United States Patent Application Publication US 2006/0123505 A1 - sequence listing, part 20

SEQ ID NO: 42174 - protein, 275 aa, Oryza sativa
MAKRLFHSCRSPSVADAVVTSTTTLLATDHPPFFPGSCPRRVPRRRPQQPPPGACAAGYAADDLTPARGTPAYRWLKSSQWHVIEAAGITDDDHTPRLKIDARSRLRRSRRRLHRRADPVSGSSGDSGWFTSDEDSYANSCGVGVGGGEAETLVTSTTTESSSGASGNCGGSGEVDGVVVAGSFAVVKRSDDPRADFRRSMAEMVVGRAIYDADGLERLLRCFLALNHQRHRRDIVAAFGDVWEAVFSNPTSSQRRIVTSDSAICKAAATVSNRR

SEQ ID NO: 42175 - protein, 202 aa, Oryza sativa
MSSSSSSFPTSRSPFPAGAGAGTSGGGGGGGGGSGGGGGGGRWSGVRPWGSSGGTSVSSSGKRIQKELMDLNASDCSAGPKGDNLYHWLSTIIGPQGSPYEGGIFFLDIVFPIDYPFKPPMVTFKTRIYHCNVDSTGNLSMDILREGWSPALTISKVLLAIKAIITNPDPYCPLVPSIGHLYLTDRTKHDEIAAEWTMRFAR

SEQ ID NO: 42176 - protein, 81 aa, Oryza sativa
MERVRRRIRVRIGVGEAGGAGAAGGEELGGARHGGVAAVVRGRELPASSTRRPNGRDKDLVGRLRFALLPPLFLRPFLFHA

SEQ ID NO: 42177 - protein, 77 aa, Oryza sativa
MSTSSRPEVGRWSLAGATALVTGGSKGIGRAIVEELASFGATVHTCARNGATLNRCLEEWRAKKLAVTVSVRRVGAR

SEQ ID NO: 42178 - protein, 179 aa, Oryza sativa
MDVDKQETMEETILVGDDLMRGLPSPVIPKEIASHVLDGVEICDGILKNLFLCLQINDIEPFCQDEIVLYRQCAEKRDKEIRERLQDSEYKLGFSMPLEEAKERATQLQSEITLLERRMILASGLEGMEGFRQRWSLHGQLGDTRKRLEALNSGIVKRGSQSSPVQETTPAVRKRWFLW

SEQ ID NO: 42179 - protein, 112 aa, Oryza sativa
MIARRLKMLVLVSLVPLALRATSLLAGHVAPPCSPESLRPEHQPAGAGDGVTMGGGGASASSYRRNRRRMEGGLAAAAVAFHARRFRPHGGGGFEADKRLAPTGSNPLHNLR

SEQ ID NO: 42180 - protein, 65 aa, Oryza sativa
MRRRWRRRPGAAPRQSSAAVMAGSAASAAADDDKAAGSGTALPTHSGHGSGSGGCVRRRIQRWRR

SEQ ID NO: 42181 - protein, 26 aa, Oryza sativa
MLLSSLPEFWSLTRSFQNVDSWARGV

SEQ ID NO: 42182 - protein, 63 aa, Oryza sativa
MVSLQGARGGGGGGGGYGWRWGEKAGLVVSLLDDALFHVLYAAEAVVLSAALCSFFLCCGCNI

SEQ ID NO: 42183 - protein, 80 aa, Oryza sativa
MADLGGRPLARLTPRPSRRARHRPQGAPQAQTHVQRRAGARREARLRLARAREQAWVLLDRRHQREGAGWLQEPRRRRVN

SEQ ID NO: 42184 - protein, 145 aa, Oryza sativa
MASYDGGGDGGRSGGGGSGDLASSAKLVAEAASRCSRTASRRDLEKVDKACIAGGASRREAAQSSGAEERHRWRGDAEERRRGRGSEEEQRRWRGGAEERRRRGAARSGGAEEQHRWRGDAEERRRRRGGEEGRREGAEPAEGRR

SEQ ID NO: 42185 - protein, 171 aa, Oryza sativa
MGNSLRCCLACVLPCGALDVVRIVHLSGHVDEFSCPVTAGAVLAAHPNHTLTTTWSSAGVGCPTKKLVIVSPDSELKRGRIYFLIPSATLPADRRKKSRQSSNKKSKRPSHHHHKSNGAATAASTAEQDNYLRELLSEKTAASGGQRRRRSGSRVGVWRPQLESIVEEQSD

SEQ ID NO: 42186 - protein, 112 aa, Oryza sativa
MGNCGASQRAVESWADGDEWEDEAAASSSSEDDGHRERMEHVAEVTIRITKRQLHELMERKGAGNGHGKISRRSTQQLLADIMNSGEVHHHDQHREAHWKPALQSIPEAVES

SEQ ID NO: 42187 - protein, 62 aa, Oryza sativa
MVVPVHLPYYAANATPYYAGGYYPIPPPMPAMLRHPPQLRPQPSRFDEDYFNEDNTVGCHVM

SEQ ID NO: 42188 - protein, 155 aa, Oryza sativa
MASLGYYDDRGAPSSYRYDARQAADGAGTSFHLFIFLATASLLGAASLYSRCESAVESLFDQVRVVVVLSPLLLLLAMQYWAAAAGGGGRRSGLSSLLMAPLVGEHSGGGGGWYDQRRDGSSPWGVALALALVLLLISYQSCFQDWWFPLVNRRR

SEQ ID NO: 42189 - protein, 83 aa, Oryza sativa
MCSWRRRVLAVFVVVIVVIMAVAASRADAARPAPEEAEERLVDCGEGGYESMVYPAMVEKAKETVELLLARLPAGPSPKGPGH

SEQ ID NO: 42190 - protein, 73 aa, Oryza sativa
MEKVKGLLKPRPTPQQQLREWQRKLRNECRVLDRQIRDVQREEKNVEKSIREAAKRNDIGSAKVCCTNHAAFA

SEQ ID NO: 42191 - protein, 98 aa, Oryza sativa
MSRATIATAAEDDDGHRRQGHRGGEAAAAAPAKVAAQSRQENPSSPSPTDEARPEPEPEPEPDLVATAMALGGRMSLSRHGQWRPALPSIAEGSVLCF

SEQ ID NO: 42192 - protein, 101 aa, Oryza sativa
MEEGGGGEEAERWPWWAGASAAQVAAGVAWFRRGRGGAAFAMPFKAFAIATLFVGAGATAVTAGVLAAGVGSVDEMKGVGASIRRWMGAPPRRRVEGGGDP

SEQ ID NO: 42193 - protein, 117 aa, Oryza sativa
MASLSSFRLAVAVAALLVVGSCATELTFKVAEGSSAKSLELVTNVAISEVEVKEKGGKDWVALKESSSNTWTLKSESPLKGPFSVRFLVKNGGYRVVDDVIPGSFTAGSEYKSGIQL

SEQ ID NO: 42194 - protein, 148 aa, Oryza sativa
MADTKAEAKAETIGGGGGGSGSFSEQAFVEKLNKLNNTATRIQTLSNWCIFHRKRARKVVDTWEKQYNSANKDKKVSFLYLSNDILQNSKRKGGEFVNEFWRVLPGLLKDFYVNGGEDGKKVVGRLYYELVASVKSISFCLHAQIVDG

SEQ ID NO: 42195 - protein, 251 aa, Oryza sativa
MAAARMLVLLASLCALLLTASAAKWTPAFATFYGGSDASGTMGGACGYGDLYGAGYGTRTAALSTALFNGGASCGACFTIACDTRKTQWCKPGTSITVTATNFCPPNYALSGDAGGWCNPPRRHFDMSQPAWETIAVYRAGIVPVNYRRVPCQRSGGIRFAVNGHSYFELVLVTNVGGSGAVAQMWIKGSGTGWMAMSRNWGANWQSNARLDGQALSFRVQADDGRVVTAADVAPAGWSFGATYTSSAQFY

SEQ ID NO: 42196 - protein, 99 aa, Oryza sativa
MINRDSHPLPTLPAQTYHFTLPPQPAATAIEPLSLREPCAAGDGITNKNGGRGGGGGGGGGRGGARAGQRQAAPGNLLEAPSRDPADAVGAREVARRQA

SEQ ID NO: 42197 - protein, 94 aa, Oryza sativa
MLGGGHEVEDSFDPCFTDAHTVSPSRTSTPRLLASASSLRRRCRPTRPHRRWAVASSPVRAAGDSALIRITCGSPDHLQHIQGLLLWKITGLSG

SEQ ID NO: 42198 - protein, 82 aa, Oryza sativa
MAMEAAAERSAGAGAAATAAPESGGGGAGERRSRFRRICVYCGSAKGRKASYQDAAVELGKELVRILLLLLLLLLLLLLLLF

SEQ ID NO: 42199 - protein, 43 aa, Oryza sativa
MIIVLVILFDFFGGILVYLLGDFVGAETDDSFILCYTKIRLCM

SEQ ID NO: 42200 - protein, 29 aa, Oryza sativa
MDFLTRCPNTSHLAFRFNGRILLMQTWQR

SEQ ID NO: 42201 - protein, 177 aa, Oryza sativa
MAMELEAEEEAMMTARENERLVESLYAAVAAGDGAAASAVLAGDVDWWFHGPRRCEHMRRRLTGEAEAASASSFVFVPRQVAAVGRGGGWVVAEGWEGPRAYWVHAWAVEGGRITRLREYFNTSVTVRDVGGGGHCRPQLDGGGVRRRAAVCWQSQRGRGGGDDDDDRSLPGLVLAI

SEQ ID NO: 42202 - protein, 128 aa, Oryza sativa
MAVAAPAKAAHALAAAAAGMVLLWCVHFRGGLALSSPTNKGLIFNVHPVLMLIGFIILGSEAIMGYKIWPWGHDTNKMVHLLLHAIALLLGSVGIYAAFKFHNESGIANLYSLHSWVGLGTICLYGVQ

SEQ ID NO: 42203 - protein, 89 aa, Oryza sativa
MMRRRWSRAAVVACLLLLAAACAESARPLPAPAKAAAAVVVVRPRSAFDVVVAGLVGIGLGHRWRPGGGDLVDDEKRRVPTGPNPLHNR

SEQ ID NO: 42204 - protein, 102 aa, Oryza sativa
MAPEYAMRGHYSIKSDVFSFGVLILEIVTGRKNNVSYDSEQSVDLLTLVWEHWLAGTVVELADSSMAGHCPGDQILKCVHRTPVCSRRPHGEANDVDGECDA

SEQ ID NO: 42205 - protein, 68 aa, Oryza sativa
MMCGKEEKLLGVQKAPGSCPYCGGGVAATDVEAKWVLCFLPLCLNNKRRFSCTACNRRLVSYPAIVHD

SEQ ID NO: 42206 - protein, 45 aa, Oryza sativa
MEVDSPATGDEEDGGGFILMKTETGLFSWSLGMLHPTVLACCTLL

SEQ ID NO: 42207 - protein, 306 aa, Oryza sativa
MSARPNPPPVRRPRWRRDLTVRTPRADVAMSLAAPPPPPSLDTTVEPPLAEMELVCLVDSGEAGEVWLVRHRGTRREYALKVLYERWAAAAGGDADDDDHSSLVRCHGATRRSGGGGEEHRIVLLEHMRGGPLSGRRVADERALAGVARQALSGIAHLHRRGVVHGDIRPSNLFVDSSGRVKIAGFGADRAIDRTANGGPCRASLSPAAYMSPDHACGGGGGYAGDIWSFGLTILELYTGSFPLVEQGQSIPLTCYSDGPPEAPATASPEFRSFVGCCLQMNPAKRPSAVQLMDHPFVTSSVFSQE

SEQ ID NO: 42208 - protein, 93 aa, Oryza sativa
MAMSSSPASPPPSFLIGGAQAQLLRHREEMLLVLPSPPSGRQLPSEEEEAAPCAVNGRSTILAAADDSKPTRPGAPAEGSGGNGGAIHTAASS

SEQ ID NO: 42209 - protein, 120 aa, Oryza sativa
MASEAATTCIGFILLTASSIAAIHRSHGEITETSFIVVSYLSLVLLFVFLRRFEAAPRNSPARGGAKAGVWVVTALLAAVFSWRVSALMPWPVDAIIWVMAASTVLGGFYALFLHHPGVD

SEQ ID NO: 42210 - protein, 135 aa, Oryza sativa
MTARSGDPGVSPESSSAAAAAAGSGGGEIWGTSEDLLLACAVSRHGTASWDAVAKEMQSRCPSAAVFTPTTCRLRFRVLHRRFSGGVTAENEDADGGEEEEEADAAAVAGWVEELRELRVAELRREVEKYDLSIG

SEQ ID NO: 42211 - protein, 90 aa, Oryza sativa
MRWMSRAKRRSASKQHADSDASSSSTSSAATARPQPNVAVDPDERERKAAFERLDNLGRCIADVESIGEKVFRALVNTRVSLLNILSTSF

SEQ ID NO: 42212 - protein, 74 aa, Oryza sativa
MANLCQSNTLTTPAPTTAIFFIFKIASLFECSWQRGGVGDGVSVVVVVVADAAGCSCGGGVAALHGGGVLEASA

SEQ ID NO: 42213 - protein, 77 aa, Oryza sativa
MVDVGERRWSGKSIQKRHDPSAFLMRRTGEENAESLRRTMPCSIIAAHCRSSSSLWAAGYRYGRTATGGASGLRTMV

SEQ ID NO: 42214 - protein, 171 aa, Oryza sativa
MNPASRRHYDSLVARYGDQDALADRFGGQNDGPDAWWSNLRVRMSQDHLLRHEARRRAATLEVFEDRENSHDGAFGCGDRASAKAMVTLHQPNLGETREQDCAVCLEPFEEGNTLRMMPCFHSFHQRCIFSWLRISRICPVCRFTLPSQADFESEKAEKERVSASPEDGNN

SEQ ID NO: 42215 - protein, 180 aa, Oryza sativa
MGLSAARLSRFAVVVLLLCLCAPFCKPEPDGDVPIDPLPGLPSRSLRCFDDGQVYSCCEGAYRLNPSGVIAVPPGEVDSYCGGACVVETEDVLNCVASALDGFRFFNGASVEDARYALRRGCSHTIKRGDFNDLEPQMGDYPDIYGDNSSDGGEDNAASPRLLAFLGAAAAAAWLLLFGR

SEQ ID NO: 42216 - protein, 110 aa, Oryza sativa
MEGGGRQEWSWAAAAGGRGQPPIRHGLPRRWPATRGRRWWLGRRSLAQSRGSAPIDVSRKVGGKTAIFSKACSPCDSTEYSFKLNSMKAANLLQPLVVPESCYFTMLLIS

SEQ ID NO: 42217 - protein, 80 aa, Oryza sativa
MENRGWTRPLPLLSSSSFFPASGPPLGPPAAAAAVAAGRHERDDESLLPATLSIVAAAASSSSSASSYSSSGGLGNLVAG

SEQ ID NO: 42218 - protein, 28 aa, Oryza sativa
MPRDVARVTCATAAEALQRVYVQLYWLL

SEQ ID NO: 42219 - protein, 190 aa, Oryza sativa
MDRASEELERRSRYLSSLVRRTKLADPPEPEPEPEPEPEREREREVAAKESGGGEGKGGKVVEEKEVKAAKEKKEKEKEAKVPRGEGGNGEEKKVAVRVRAADMPPALQRRAIRVALEATAAMPRIDSKRLALALKKEFDTTYGPAWHCIVGTSFGSYVTHSLGGFLYFSVDKLYILLFRTAVEPLSYQR

SEQ ID NO: 42220 - protein, 29 aa, Oryza sativa
MRGEESEKQIRLRERGNKRKGKERDSGTH

SEQ ID NO: 42221 - protein, 129 aa, Oryza sativa
MFLVLIRVPLTILSPWAWRVRSRWRQRRRWRSRRRHLLASAGGGSSTSSVSPLKCTRSVWESGVSVVVAPTPAPTVFSSVDSLHQQEVLHFLALSSVKKIGDMNWYEHIDDTSIESDMNLFMSTPCTYI

SEQ ID NO: 42222 - protein, 140 aa, Oryza sativa
MASYGDDGVELTELTLGPPGASARRARRGRKNGHPPPSSSMIQAAYFVKVSMDGTPYLRKVDVAAYGDYLELVEALNDMFYCSTIGLMDGYGEWEHAVVYEDGDGDWMLVGDVPWEMFVSSCKRMRVMRACEARGLSSNV

SEQ ID NO: 42223 - protein, 95 aa, Oryza sativa
MEAESAAARQAKESLELAFQMSQILDTGLDRHTLSLLMALCDRGANPEALAALVRELSSAAPPTTAAAAPSPASNATAAPSAKAASLFPSGLRKP

SEQ ID NO: 42224 - protein, 52 aa, Oryza sativa
MGVGVGFCPQGFMVHESCCVAPQGIRWPSKLVQYTALSCRHLIEHVLGMQLS

SEQ ID NO: 42225 - protein, 109 aa, Oryza sativa
MDRKYSAVDLAQVRGTPSSGMEFSDREAADGARAASTASAAPNIAVTLICRCRLVHLANTGAIPARWRTQVVVPLVRHLRIGSPPSPMGRDDLRKREIWGLERECECLG

SEQ ID NO: 42226 - protein, 82 aa, Oryza sativa
MRSSEAMELLGLPAHTRPSPSEVKAAYRRMVMESHPDRVPTHQKSQAESKFKQVRYRLISDHCGKLLGHHVFRSHGDGVLQA

SEQ ID NO: 42227 - protein, 87 aa, Oryza sativa
MAAVASALSFAAGAALPLLAGGFVRPWAARVVAVCAASSLGLAGFGVASAYLGGAGVARSGVRMLVGGWLAMAVTYGVLKLFGMHGV

SEQ ID NO: 42228 - protein, 144 aa, Oryza sativa
MVNGYCNLTSSPPVASGAVEAETKWEGVAVGAATLVRNFSSASQRFRPVERSRSTAGGNGGGLQAVVRRAFSMRRQPSSFADGYWRIHDDMDGDDAAGEHQEQAAFQDGEQKRREEQDHATGKKEKITKKKGRIFKACKKLLGF

SEQ ID NO: 42229 - protein, 21 aa, Oryza sativa
MSVKFSSFGFFFVLSNKVVIV

SEQ ID NO: 42230 - protein, 197 aa, Oryza sativa
MTRRANHTASPSVNATTAAAAAAMITATPSPPPRLPLPNPGNADAGAGAWGPYASSRAFFSNVATILIILACVSLLAFCLHAAARCLIRCLARRRDSGAPALAPALAQAQPPKPSSDDGANTGSSGAASAASGVAMVGGWAEAECAICLSELADGGGERVRVLPACGHGFHGACVDGWLAARASCPTCRAPSRAGEP

SEQ ID NO: 42231 - protein, 96 aa, Oryza sativa
MDDDDDEVAAGEAGPAPAAAATGGHADRVFRALALASLYILFRRWRAGGAGLAERPSPAEIAAAVALCASVAWLYALPAFGIRRSSEISTRRWHQD

SEQ ID NO: 42232 - protein, 113 aa, Oryza sativa
MAMTTRTLLLAAVCAAAALPRGWSPIKNIDDPHIQELGRWAITENNRVSPSDELTFHRVTGGEQQVVSGMNYRLEIEAASGGGDVTGSYGAVVFEQKWSNTRKLISFDKNHNF

SEQ ID NO: 42233 - protein, 209 aa, Oryza sativa
MARAAVVLAVVVFLAAGVQAGSGGGGGGAAWTALDGVCGDLGGYYVTPELCKSALCGGGGGGDTSSSSSPCRAASGAGKVAALAARLAAANATAARASVEAASRALEQNPSSSSNGTAAAAAAARRQGMRSCLQLYAGAVPALEWAARSVSAGRYRGAREVLQSAQYVSLGCEGMAGGGGGAAALPRENERFSVMAIVAHAVVASMLGP

SEQ ID NO: 42234 - protein, 190 aa, Oryza sativa
MSPFYCCLAAVLSLASASPAAASISVSAAAEPPANSLLPAEQFLRAHNEARAAVGVPPLAWNATIALDAQRYAGELRASCEARPVWAWGTDGLYGRNLYRGSGPRVRAGADASAHWAEGARWYDRDGDSCAAPPGRCCGEYTQMVWRATTQIGCARWLCRCLGDTCPLVLDTVAVCEYYPPGNIAGQRPY

SEQ ID NO: 42235 - protein, 91 aa, Oryza sativa
MQIVPTTSDQPAGGESTAVVAEALIISRPPWEGGGVAGGAQAMSECMEKTLYTGPCLEALCTAACILELNNGGHCRGGFLFFKKCSCFLCF

SEQ ID NO: 42236 - protein, 173 aa, Oryza sativa
MEMAAPVSPAPRTVEDIFKDFSGRRAGLVRALTVDVDEFYGFCDPEKENLCLYGHPNGRWEVALPAEEVPPELPEPALGINFARDGMHRRDWLSLVAVHSDSWLLSVAFFFGARLNGNESRVLNCEVLPSVLSCASFVLHKELNQSQNLYYHYVMGSIICSLSVCLCCFHVCL

SEQ ID NO: 42237 - protein, 154 aa, Oryza sativa
MASVARNRPVLMDFIRSGASLMKNSSCPTYANASPAPTRKNCGTSQNALIIATPPPPAPPDASRRFFSTSAETAMASVARTSPAPTRCREVSPCGRRVIIRRRASGTRSRSLAEVKRRMDRKRKTEKEPAGTAKPPVRRSMCDACSTEKVVIWE

SEQ ID NO: 42238 - protein, 93 aa, Oryza sativa
MARSAAAAMLMLSLLLLGSSRSWPPVAAAARPLLQGDGGEVVAPPAGGGVGVLVLLSSSPSLRHWLPVLEMKQGASCQTNDPNNVNCPPKPPK

SEQ ID NO: 42239 - protein, 342 aa, Oryza sativa
MFTFTPATKMSPCCRCLTRRLLFPAMSSTTCLISRGAFLLLAAAVAVALPCAAALQELQLQDAVLIDDVVQEAAQAWYHGRHRRTGVTYPLSLPGSLSGVAADVARFRAGSLRRYGVRRFGEFAVPPGLAVRGQASHLLAVRANLGNLSSVFDEYAASGGYRIASPVLGLTFYGLARRGGTARLEVLVTAAAIRVNFSMAVPALQPGAVPLCMAVALNGSVTVTDVQAGSNTCHVWDQGHFALVLGGAGDGGGVVAEAGEVSKWKLALFGAALGAGGTVLLGLVLVAVLSIQRRKSEVAEMARRAYEEEALRVSMVGHVRAPSAGGSRTTPDALENEYCAAL

SEQ ID NO: 42240 - protein, 112 aa, Oryza sativa
MRPARRGWGVGALARAFLVLLLLLLAAATTTTIGFGCRGAEAIRVIPPHGPAPGSARSSRGHGHRRSHGNAARVVDAAMPVVGTRPVPALSPAADEESKRRIPSCPDPLHNR

SEQ ID NO: 42241 - protein, 247 aa, Oryza sativa
MSSPVRRVGSDLSSGIYSAAASHGHQQQTTSDNGHGSANDDDDDDDVAKAKQRLSSLLFSGVGTWRRSVDGSGGDSKRQVKGNSSRGGGGGLDIAQLVKKYASMVERLFFASSLSNNRRRGGGDQSGRRTELRRRRHSFIISGLRRGAAAAAAAPSKRHEGSWLFSAPASLRGSPVASGHLSVKVSTSSEESTMEELHSAVQAAIAHCKNSIAAAAPSSRPAAAAAATTPTGVNADAVVACTSSRAS

SEQ ID NO: 42242 - protein, 97 aa, Oryza sativa
MHISLSFPVFLRLSPSTTRVVTDQIDHRFQAIVAARVDPLPVPGSPFCLSASLSHEFATSTVMGGVDPMTSSPPVRIPSSLGDGPLAVVTPEARRRQ

SEQ ID NO: 42243 - protein, 603 aa, Oryza sativa
MSTASPLHHGHGNGSYGTNSPAPTGVTGRDAGVAAAAVTDSAVRSGSVGASASGSAPGSASGSLYGEGHAHHNTHHHHSGHHAHSHGALASPVNGGGHSSSWSPYGYPSAPVYGGSPSPYGHNAYSQYASGYGYTNGTTHHVATAPTTPAANGTTYHTGVNGMMMHHGQHAGYGYGSHHLGSHTPTHTHSHSSAYFMNGDGSHSHLNGSTHLSSPSYTSAPQYSTQLPLAGRHRVTTTLWEDEGTLCFQVDARGVCVARRHDNNMINGTKLLNVCGMSRGKRDGILKNEKERIVVKVGAMHLKGVWISFARAKQLAEQNGIADALYPLFEPNIQSFLYHPDNYPRTAAVIAAAQERQAQRQRAPGLPSPGANGASQAPPLMRANTTPSNGDTSGFGSGLSSSTSWTGSHDQGHASAPTTTQPSPSSMHNGATQMHMSLSSHGTSSPTYSQQQQQQQQYPITQAQQLARPGVGDRRQSAPISLNSVNGHAGDNAYGAANLGAATANGGLINGARKVSGLKRSWNDAEDLNGSATASPSDRDMQRSGSGASTGYKLEGDDSNSPDTSADRMAKKNKAMPQRTAAMPSMSGNMLMGVGSGNGLHHE

SEQ ID NO: 42244 - protein, 675 aa, Oryza sativa
MISASPSFSSPNIPQGFSAATSSPQPPSWNANDSPHSLAMSNSTIDPHFSPDHIAPPGFHNPIDAPFGAHFQPQIHNHCAPGTILIQPSMYAPHDPAPFWKPDMVKLEPGTDVFSTAHVAPQFAFPGSQPMMATMSLPAYTTHPMDRRFTFSDAESIGSVPSPSSTSETSTRPGSAKRGAKRKQSAADASLDAASEQTSDAASKATKKQSRTNAQRRPPPSASHVTEAGKPFPVIDTSAKHSSLFVPPDTSGLTKREARLVKNRAAAFLSRQRKREQFEKMEVKCRGISMLVYRMWETIAGTDAPLDRVDATPLAAVLANEEPMARLCLEEVISKKGASIAPTADELEGSPAPEAPSARRPSVVPTPAAHKNADTASAELERVRADLAASHEREKQLAHQLDAMRASLAAAAMPLDNSVGVAGFESIDVTAAQSGLASRSQPFKGVQGAELPLFVPESPLSKFTHMDAAMPDAAHAAFGLSKTPTLATFSETAMRNRSAHQPFVADKLQGFGMGLGLDYKFPTASLPSSPSTASSSSSHDVHHARHLSLPSNSLATAKAPSTLASVLLLAGMSLMGAGPAESAASAARPTSRKPARVGRKKMLKDAAAADRADDNDGEPSSHLSDDDLLMEMGIDSASISEADDDDDDQLDDDAIKHTTATASKATVSAPALSCA

SEQ ID NO: 42245 - protein, 178 aa, Oryza sativa
MAALLGILLAAFLAAAAVLFALRLLHSFLWVPRRLERRFRRQGIRGPPRRPLSGNAAGYRDLPAAAQSAPLASFHHAVVARVAPHHREWPERYGRPFVFWLGPRPRLVVSDPEVVKAVLTDTTGTFGKAGPGGNNPLARQLFSEGLVGLTGEAWARHRRVIAPAFNMERVKVRRCRLC

SEQ ID NO: 42246 - protein, 771 aa, Oryza sativa
MIAQQRPSPAMSGSSFFSQISSFFGASPNSNSRSGARHSSPFSSGLPSSSRRGPPQALDANAWSLPYSSRSSIPASPAYPTDAPNSATDGHYPPAAGIARASSPYAHDHPPISTSSVAEFSNMYPTASTSTLVPGTAANTLSVSAGGSVPTTAYPPMRHTWNRIRKWCRKNYPEMSDTLNWPCTEDALDELEMTIGYALPSAVRESYLVYDGQELESNQSCQDGLFFGAALLSLEQIAEEWKFWRAVDEDPETAANPHVRNLMASCPHKWIRPEYSCRGWIPLITDHAGNYIGIDLSPHPAGAGSPGQVIIFGRDFDTKVVCWKGEGAGGWGRFLQSFADELDAGEFWTLEELTSASEDEEDVIGYQSYFSGGGAGAGQGGGDRGGEGAAAFRPQGQYKGWPVLEAWADRSVRLWESVGLAPGKPVGNAQQPAQPQPQSVVNRQSQLFGDDTGIPPSVQAVNENGEAIDAEGSGSQRPAIAVGKELAGQVSVDGPAHPLADASLAGDTSAEVLIAPADSTLATDATTVTVDTQAADAKEADGSVDVNLTPTNSTRRVSGMLPPPLPETKASLRKQKQREEGWGSPMLNQSVAMGQQPRRPVRPAPAPAATLDLPTIEDVKAIQAAALADDGKSHNVQFDSHPQARSSFTNLGFRDLAGKIGAPGMGLGGGSNGNAVGSPQQRSESVELETRSSVENRSANSYIVGQRGRARGLGLEAGEDEAAAEAFGAMSVSAAKTREMPSLIDASSAPGSPLVRGTPKLSEAEVPAALA

SEQ ID NO: 42247 - protein, 475 aa, Oryza sativa
MALLAVGTFNTNELFTIRFDPETESLELLDVSQAKGNHSWLSTATIPKSDGGAARPTHLYATCWTEPPSVAAYRIHRQGSSRASFELLNTAETAARSGYVYVGFPEKATHPVLYTCGGPTGEVVAIDGDTGAFDLAGTKHPAVVPSEAPLDGVTGVGSAGRIQEIDFVTGECSIPGKTLAETKELRRQEAQKASGGGSGSPATAQLDTSNGKNAMDFGGLRHGSHGIDLSPDGTLCYVPDIGRNCVWTMHVDPTNGALSLADKSIAPRKNDGPRHTISHPGGRYIYSLQEHSSMVDVFEVIKDSNGTRLEWRQGVKIIPQSDDEGLYWADEVRLSCAYDRPDGEYPLYMFASTRGLSAETKGWVAVFQLDKNGLVVPQSRDENDEQGDALCLWQSPTSGGWANAIEPAPTFLRGPNGTSQYAALTCSEVGVVRMLRLDVPDPQKPNLASIHEVATLAIGKDGNGRLRGAATAVWI

SEQ ID NO: 42248 - protein, 961 aa, Oryza sativa
MPPSTTTLASRHPVSASRSTEPASSSVSQPLPSAASTSSHVSIPTTSPAFTGPSHGYSPSSTAMPHRPWYNGSQPSSPRGAASIPRSQISSPGAHWLDYHIRPGSAAANHPPSTSRTHLEDRLPPHILQRLLDIYQVFVHPHWPIIYLPSFTSLHSLKRSRPIVFEAILAVASNTFDPFLDTAAGDEQQSVNPLFDGLYAESPLGLDLAWKSNELRDHFVNRAKARIFEGKFVQDIGTIQAAILISVIELGCGNTSSAFQFGGIACRMALDMNLHRCSSQASASAASSIHGDGGATDNADGERSEARRSGSQLQERLRVFWACFILDKILSTALDKPAQLRTAEIECDWPSVQEADEYDLWINETTRKFVDKGQLTRLEGVKVHALSSFKAWAEVMAILERILEEVYSPQAKRDRRRTKGASDYEALLRLNDRLSKWRADLPSHLKWSGTWTSPDVLFSAQSQSGYADRKESDPHRGLPPQILTMRAWYCTCLILLHRPRVPKLLEGPKEHATGTSEDVDAAAQSDAKSPAAKKGKKGSQASAKDKRSPAGLDICNAAAKEVCDILHVYGSSFRIRKISSSWVYLIFQSATIHAALAASKSVVAFKARQSSIWSRRGSKVAFSELGAPLAEDHHELSASAEDAEAHANGAEVFSSEARHVPEAELEGASELVKTSALYLAECVRYLKRIGPTWQSASNHVSVLRNLCIASAQARPLSPTLKHARGVAQPDPQASNQPVGAVKQEPAAFDPDQRGAPVNDVGASMHGHAHQMGGPPAGGHGEHAAIAVHESGLDAQASYAAPIAQHMYHEDRKAETMHMPSAATAAAGATGTTSELAMANTDAMQPHFLASQGYAPPAHPPAQLLPPAGVGVHSHLPPPHHAHHGHHGHQQAGYPINANDAAFWASMPVASEGYNEWDEFFRAFNPGGAAADVTANPNYHPTAAVDLITALQDPNRLLNGLQ

SEQ ID NO: 42249 - protein, 886 aa, Oryza sativa
MSLQFDEAELLKAYNLDSLEPSQWHTTEAETDAKGAASSIGVADEPDPLGLRSSMATFRGLPKDVKTQTSLSSKAFDAKVFLSTIHPDATFADLSHGILHLKNSIDQRSEALKVLVEDNFDRFVAVKATTDGVFREMRDTESGPLQPHADYGVASLNTILANASAKADQVFMPVLENNLKTIKLRSTLGVFERSKFFFNLPGSLSESVESGRYDMALRDYKKGKYLLDSRPGQLLAVGSAKLPESAGGARGDVQQKRVFAKVWDAVEATMKDMQSRLTAQLREPRRNVDEQERTIEILLELDPTDDPVSIYLEAQHQHLRSVMRNTFDAGVSRIEATRAGQRPSSSVAERDRARDLQKSMRLAGQLDASFDKCTGADEWRAIRDLVKALSDTMLGGLPSFWRVAKNHAEGKFIKTKARAGAGAGGDKVSAQNKAWAVEALEAYISLVSHLFSLTDVSILMRQPLPPVAAWVPAGTSSATAAHFLRETLAHVVDACNDLAALGIASATTLRALLTNARFCFVQVVCVLWQEDAKIFHLLEDWTLNPDEQATTLHLRAIAAFHKSNARQAFHLAGGRSASTPVSVLEARGKNRAAEQPVASEFTTRIKGAFLDALYAFLDGMVQLAFSEYSPLEPRTALSVQAVPGQPGSSVDVRDLDTRVLLSVTNLAHLTRSVIPGLVKQFSDAYAVKMDDDLATLAEVAVQLDAILFNDYVQRKSGALSPIISRGILESGIDWASIPKPSGVHSFIYEALLSLVEVHAHVRSIAKPLVTRTITTLVDDLTATTLDAFQRIGRFGMGGMLQATLEIEFLHQMLAAYISPQAEQRLKDVYETISHNYVRTSGDKDTLNAELERVKQILVHTRKSTALEFLCFRKNRVAQPKDKPSDQ

SEQ ID NO: 42250 - protein, 231 aa, Oryza sativa
MDPRNGVIITVVLRGGAEARSEVVHRRSHAQGAEAAPHFGERIDAAGLPLLGSTTAAAAATAGATEEAERREGRLRVLLPPVHHRLAVLPQQLGEVVAVGPAHTKHRAIYKHMHQLPRSESTGELNRRQRKIALHPHLCSPWRQGEEIKEGGVCSCTPSAETRAPAECEALLSSAAGRATRGELSLSFAGGRERRREEETKPKSKPKVKRGTGGAALLVRVWDKRLWRGGT

SEQ ID NO: 42251 - protein, 911 aa, Oryza sativa
MSDFPSTENGKISFKNRVVVVTGAGNGLGRAYALFFASRGAKVLINDLGPSAKDKNKKAADVVVEEIQQAGGEAIANYDSNTDGEKVIQQAIDKWGRIDILINNAGILRDKSFKAMSDKEWDQITAVHITGSYACAKAAWPYMRKQKFGRIINTSSAAGIHGNFGQANYAAAKHAMIGFGKTLAIEGAKYNILSNVLAPVAASQLTATVMPPEMLENLTPDYVVPIVAYLVSAENKEVSGHVFECGAGFFAQVRRERSRGVVFKTDDSFTPAAVRAKIDEILDFDEKPEYPFRITDANHMEFLERAKEAKSNDQGEGPVRLDGKTVLVTGAGAGLGRAYAHMFGKLGANVVVNDFLEKNAAAVVDEIKKAGGKAAPAVGSVEDGEKIVKAAVDAFGSIHVIINNAGILRDKSFAAMSDQEWHAVLNTHLRGTYSVCHAAWPIFQQQKYGRIVNTTSAVGIHGNFGQANYSTAKAGIIGFTNTLGIEGKKYNILANTIAPNAGTAMTATIWPQEMVDAFKPGYVAPMVGYLASEANEDLTSSLFEVSGGWVAAVRWQRAGGHSFSHGKPPSPEKIVKKWSKITDYETNPSWPTSPSDSLGDIVSNFGQEEEDEDDDDEGGAGGDYSDPEDPEIVQKAKKEPIEDSEFSYGERDVILYNLGVGATEKDLDLVFEQDDDFRAVPTFGVIPQFMASGGIPLDWLPNFSPMMLLHGEQYLAIKKPIPTSATLVNKPKLMEVLDKGKAAAVTSVVHTFKGSGDLVFESQSTVFIRGSGGFGGKKSGKDRGAASAANKPPSRKADKVVTEKTTDAQAALYRLSGDYNPLHIDPSFAQVGGFDKPILHGLCSFGISGKHIFREYGAYKDIKVRFTGHVFPGETLETSMWKEGNKVIFTTRVVERDTQALGAAAVTLADE

SEQ ID NO: 42252 - protein, 818 aa, Oryza sativa
MAEGSLVVAICQYGGEFTSGPNGNLIYKGGEAHAVDVTREMSLDNFKDEVSKVFHVEVSDVSLKYFLPNNNRTLITISCDRDLQRMVDFTASSAQVDVFLISRVENRSITQTGAPTAKPGSNARGDKRKTPTSKNKASKNKKKTPSATGTAVQANANNVKQPRQVVTENDDNRVFPLEFGSDIAFANTAGAGSTAPDILNQQKLALVDNTARESVGLFDDSVNPYVGSEITTEPTQGLNNPIVFWDDIIKGVGQEFDNVKDFRAQLCKYAIGKGFVYRFIKNETTRVTVKCVGEGCTWRLHASESSRNTKFVIKKMTDEHTCGGGSGEGQRRATRQWLTTVIKEKLHENPLFKPKDLVKEIYEEYGVMLTYSQVWRGREVAQKELYHAIRETYSHLPWYCERLLETNPGSIALLSPMVDTKFRRFFVAFHASLHGFTNGCRPLIFLDKVPLKATNEYKLLVAAGVDADDGVFPVAFNVVEDENYESWVWFLMQLRYALQNHNYPYNAMTFLSSGQKGLDAAVPQVFEESHHAFCLHHIMEEFKGELRKGPWSQQIRDGMVEDFTRAAQACSIEDFNASIESIRNISTEAADWIIASKPEHWSDAIFRGCRYDHFSSNIVDAFNNWIPTKKEGSIVLMIDSLRMKIMEVIEARRESCKSWSGPLTPSMEFKVQDEMSKAGKLTVLCSSETVFEVRGSAIYVVNLANWECTCRRWQLSGLPCMHAVAVFNRVGRSFYDYCSKFFRIESYHLAYSGAIFPIPDMDTVDFSAGANLIPPPKPRTSDKPRRKRFNPNKIPTVVRLCSRCKQAGHNKATCEAIL

SEQ ID NO: 42253 - protein, 928 aa, Oryza sativa
MPVQGDPYGHPRPPPAYDVAVRPASPHHQQPYLDRHHPHHHHQHHQNHAYPAHDAHHTHHTHHAPLKSEYPDQEHAMMPSHSTPHVSSTPHSAQQSSSSLPATVQRPAHQLVPEQQHQLANIHRFTPSCSRCRQKKLKCDTNLPCNQCIAKGVHDDCRKDSRIPRGRKRPKISATSSSGPDEEIAALRRRVKELEDMMARQNRRSSSPRPDSSSSSQRLSDKRSIPSHMLGTSSRGSQTSAPSDLDYSHSRNNASPTAASFDSDDDQLPGETETSLTLLEKLAASDPRVTEPGHGKAMAKQINNVSNTQIPLDAPNAYFALPTALNERIEILTLAKRIVPSKFIADTLIHTFNVRCHSWVGRIVHMPSFQRDIDFFTLASVEECLLSPKGMYDLARYLMVLRLGLRFYPWKGSAFTSDSSPEFIAINALKNRGDNVSGQWLTLAKRALAADRTFSLGSLTAIQTALLMILDGRDSPSYLRMLLRIAIQTALDMGLHRLGRAMPSPANPDEDIVRLETGVRIWWYLVVKDWCSAQREGAYTIHPTQMTTRKPLHATDAMLAAGRTDEISLDEHCEMSYTLCQIGLANIIRESIDLRNEQSMLGGTYDVISPTNRKLLQVKLETFLADLPPFYTLESNATHPPIVAVQRSLLHQQAFDVLLKLNRKSLSSYSERATCTLLAEQIVSTQTLLRSVCPVIDGFWVNFLHLFGATLTLTISLLLDGEMDAEARERRRGKVHTALTTMRETPGSDRGSRIIETLLAEEQRLWQSHRSSPLNLAGLTRRIVEQTLDSATSAAERGGGGAISVPIEPHCGTSVWDVTPEESLIPAFASGWGSAPLDVLDPTQLMPWQPADELYSRPSRPYIDSLRPWQEPSSPRTESGGHNPLWDWLFSHAALLHGPDPPVEGNPNPPQPQSQLPPQSQLPPKSRP

SEQ ID NO: 42254 - protein, 909 aa, Oryza sativa
MHLPRHTIESHAAAPLFEHASFCSPDISIFRDRPPEDHASTNASPSTSELAQPAVFACATLNGFLVAQSDPVKLAANRSWSSAQGGLSHAVPVSHSSLLLLVGGGRVPRFAPNKVILWDEAAEYIPSQPDPESHHADSDDEDDDHSSSFPSRRASTIFSAGSEFDAYGRAPSAEFENVQPPISSEQSSPRPPSMDDSVKSLSDLDHIQHRTGPAAGSSSRSAAESGSSVDQSMLASSLGIGRLQSSYLSDTTDRDAQSSVQFSRDSPNLTASSHSHAIMASSANLADPFAEDEALPPHLSPEHNARPGSFTSSESHASSHAHASRVESATSSRQFRPTSAAHRDRADGLGLIDSVSSMATTDTHATAKRPPRVLRGREVAELEFSEVVRGVYATTIHTTKPRSRHPTSKGKARATSGAASPLNREAEPGFCVVLVVLLATRAIVFELLPPSTAPTLGGRPTSSAWSISKRAVAQTHKNPKGLGSVAPLYLHTPPGTVSQPSAVVALPGRQKGHVQLLLIHLGMTHVDQSRPASVLAPPVGASTIIVAHEASLAALALSPDGRLLATASSKGTLIRIWSHNIGQSDGTGSRNSRASPHEPKSNAPGRTGVGATLARELRRGTDPATILSIAFAPDASIVAAASDKGTIHIFLLSQPGSMAPADDATELPRSQAYSTTRASNLGRVAASYLPAGLGNLAGQIPPSVLPQYLKSEWSSAQFRIPLKTFGSASRHSSASAQGDESGIYGSNAPRSTTLGTEKSTEGAWAHMRSRISDIRKGEANVDEKMFLCWVEEAAQLPVTVTKGKASAQPSSRSEHASRPRPLHTSKDNHDGPNPESPYRFHLVVLTTSGGWYKLAIHPPQSNASEDASGSTVLGMYRRESKRATDKPKPLECELLEFRPMAAMLDGWRA

SEQ ID NO: 42255 - protein, 1076 aa, Oryza sativa
MQLRVKLVTATMKNITSIKLASRFAIISERLSALRALELAAFRAAMWIATLLAVAANDLENYTTLLTLVAFSGIAQNSHSTATDSLDTTKLFTVISVLTLLRNPLFLLAQYGPMLLAALGASVGIRDFLLQAEMVPSQDDASRGRTTSSSSFSCSLDPKSGNAQASNAAASSVSETSSIVSKGVRLQVGTKALISDLNFTINKGQLACLTGATGTGKSSLLLAFLGELRSSAGELFVERSPAYGTAYCAQSTWLQDASIRDNILFHSDLDQERYDAVAWCLDLEQDFAAMPEGDVTRVGPQGSKLSGGQKSRVALARALYSSSPLLLLDDSLAALDASTTAKIVTRLLAREPQGRDGSSVAPARLVLGGRTVVLACHKFPLGIQPDVHIALSSKEETAETVADVTVQYASHQTVTFPPYSRSLPLKSASASSDQGCKDSSGASDADPSPNPRTQLRPWEAFKFYCRTCGTARALVYVAISIFAAASLASINIYLYFWSSANDRKPNASLWAWIGGYAAVVTVNSLAFTGQVYYLFIPVAQACARRMHSIILSSTLAAPLSYFLNTSGGAIVNRFSQDLFVSDNDMTKALFNVSSNLGVVLGSMILLSLASPWFLLILPVLLPTLWAIKSFYLRTSGQVRKLDLESKSPLYTLFGETIDGIVTIRAFGGGRAFTQLNEILVSRSQRAFFLNLSLMRWLTLVSGLIVAGLSTAFCSLSVGLAQRSAKHGAGSDTVGWVAVGLTQLMMLTSAITMLTKAWTQLELCLVAIERLQQVATLEAENDDGTRSYEGESTERTSAIGAEVVVESVNVGYTLPDLDVSTTVLRDLSFTLAAGEKAAVVGRTGSGKSSLIQALLRFVPLSSGSISIEGVDTTDLRLRALRERILVLPQEAVVVSCCTLRENLLMMLDTADSVDVPSDSELWDALKRVGLDAMAAKWGGLDAALDQADELSNGQRQLLSLAQLILACKAIRARHGRSRIGSEGHLIVLDEPTSFLDDSGDALLRELMQDPLALGDFTVLMISHRFGPILACDKVLLLHKHGEASTGPSYEFGPPRDLFYSPASSFGLLARDAGITRW

SEQ ID NO: 42256 - protein, 324 aa, Oryza sativa
MKAFATLLLATLVSGSLASSHASTSPHRRHHNKGPLDAEQAIAKRATYSGMATWYDVGTGNAGACGKFLNPGQHVVALNQPMYGDLGQRSSWCGKTIVISNGQKTATATVEDACPTGGGNCFYGSLDMSVGLFTEFFDLGKGVFPITWWPAGEGGGDSGGNSNNNNNNNNNNNNGGGGNNNNNNNNNNNDDNNDDDNGAAAAAAAAAAAAKKKAQQQAQQAAAEASSSAAAASSSAAASRSAAASRASVYSVTKAAARASASASKAAAKSRASVRASKSAAAAASSASAAAAASAAAATPTGNLNNFANLYDGLSKIIMEQADS

SEQ ID NO: 42257 - protein, 958 aa, Oryza sativa
MASSTGSEAQWTAPKVRAAFLDYFKENGHTFVPSSSVVPLDDPTLLFTNAGMNQYKPIFQGTVDPQSDFAKLKRAVNTQKCIRAGGKHNDLDDVGKDSYHHTFFEMMGNWSFGDYFKKEAIEFSWNVLTKVYGLDPDRIYVTYFEGKPDVGLEPDFEARDLWKSVGVADDHILAGDMKDNFWEMGDQGPCGPCSELHYDRIGGRNAAHLVNMDDPNVIEIWNNVFMQYNREPDRSLKPLPNKHIDTGMGFERLVSILQNKMSNYDTDVFTPLFKAIQDVTGARPYKGAFGDEDPDGVDTAYRVVADHVRLLTFAIADGGVPNNAGRGCVVRRVLRRGARYARKYFNTEIGSFFSKIVPTLVEQMGEMFPEIKRKEADIKEILDEEEASFAKTLDRGEAMFEKYAKDAKSYERTELTGADVWRLYDTYGFPVDLTKLMAEERGLTINDEAVAEAQEKAREASKGEKKVGAELVKLNVHDINALEKMEDVPKTDDSSKFQKDNIKSVVKAIFQGGNFVKSTSEITEGAQLGLILDRTNFYAEQGGQENDTGLILIDGVAEVKVDNVQVYGGYVMHTGYVTYGSLKVGDEVLCEYDELRRQPLRNNHTGTHILNFALKETLGDDVNQRGSLVAPEKLRFDFSHKSGCTDAELQKIEELCTSYIRQNSEVYAADVPLALAREIEGVRAVFGETYPDPVRVVSVGVPVEELLEEPKRQDWRSVSIEFCGGTHVKNTSEIKELVVVEESGIAKGIRRIIAFTGAAAHEVQRIAGEWEEKIAKLEGMSYSPEKEAKTKESQHELNQLEISAVSKSKLRERIAKVVKANLDQQKAQQKAENKKVLDTINNYFAENKEATYYVAAVNVSAGSKAIQEAIKTISSKQKDKSVYIVATAADGKVVHGCHVSADLQGKGADANKWANAVAEIVGGKAGGKGATSLGQGTNGDKADDGVEAARKYLESLSL

SEQ ID NO: 42258 - protein, 766 aa, Oryza sativa
MVQSSVLGFPRMGANRDPKKANDAYWADKLSRDELVKEAKRLRLAHWQIQKDAGVDVIPSNDFAFYDHLLDHIQLFNAIPERYSKNKLDPLDEYFAMCRGHQKDGVDVPALEMVKWFDSNYHYVKPTLQDNQTFTLASDPKPVREFLEAKEAGIATRPVLVGPVSFLHLGKADRGQSVDPISLLDKLVPVYVELLKKLKEAGAETVQIDEPVLVQDLPQKVKDAFKPAYQALTASGLPKIVLATYFGDVVHNFDVFPSLQSVYGIHVDLVRNPEQLEAVIGKLGSSQILSAGVVDGRNIWKTNFKRAIETVETAIQKLGKDRVIVATSSSLLHTPHSLEAEKKLDAEVADWFSFAVQKVPEVTIIAKAVTEGPAAVREALEANAKSMESRATSKRINNKAVKDRQAAVKPADHERQSPFPQRLAAQKTHLKLPIFPTTTIGSFPQTKEIRIQRNKFTKGEITAQEYERFIEKEIEEVVRIQEELDLDVLVHGEPERNDMVQYFGERLDGYAFTTNGWVQSYGSRCVRPPIIVGDISRPAAMTVKESKYAASISKKPMKGMLTGPITCLRWSFPRDDVHQSVQAQQLALAIRDEVVDLESAGVFVIQIDEPALREGLPLRAGEEREKYLSWAVDSFKLSAAGIKDSTQIHSHFCYSEFQDFFHAIAALDADVLSIENSKSDAKLLKVFEDKEYPRHIGPGVYDIHSPRVPAEQEMKDRIGEMLQWLKPEQLWINPDCGLKTRQWKETKAALTNMVNAAKSFREKHAA

SEQ ID NO: 42259 - protein, 675 aa, Oryza sativa
MLVPYGACIVIEEPSLNKGHIEASRVPWLAFTPSAMARRGGAAASSSMANLLGVALVLAATAQTSARGGGGGGRHDYRMALSKSILYFEAQRSGVLPGNQRIAWRANSGLADGKANGVDLVGGYYDAGDNVKFGFPMAFTVTMMAWSVLEYGKQMAAAGELGHAMDAVRWGADYFVKAHPAPNVLYGEVGDGDSDHVCWQRPEDMTTSRQAYRLDPQHPGSDLAGETATALAAASLVFRSSNPGYANQLLQHSKQLFDFADKYRGKYDDSMPVVKKFYGSFSGYGDELLWASAWLYQATDNRRYLDYLANNGDALGGTGWATNEFGWDVKYPGVQVLAAKFLLQGKAGPHAAVLRRYQRNADVFACSCLGKGGGGGNVGRTPGGLMYHQGWNNLQFVTGASFLLAVYADHLAAAGRGQAVVRCQAGPAARASELVALAKSQVDYILGSNPRGISYMVGYGARYPRRAHHRGASIVSIRANPSFVSCKDGYASWFGRAGSNPNLLDGAVVGGPDGRDGFADERNNYQQTEVATYNNAPLMGVLARLAGGGRGGLAEAAIKRPDNQTLLPPLAAAASPVEITQLNATASWKKDGRTYRRYAATVSNRSPAGGKTVEELHIGIGKPHGPVWGLEKAARYGYVFPSSLAAGESAAFAYVVRGRAAPPPADVWVIGYKLV

SEQ ID NO: 42260 - protein, 613 aa, Oryza sativa
MSSRFVAARLARVNAARLQSIAAPSHSVARLSICSRASRPSLAFSAPSSFAGAVRMNSTNATSLNPPPAPLRLQAPTAEQEQADYDAAVKQVQEWFDSPRFKGIKRPYGPEAVVSKRGSMPVQPPASSLMADKLFNLLSEHFAKGTPAHTMGAIDPIQQSQMAHNQEVVYVSGWACSSVLTTCNNEVGPDLADYPYTTVPNQVQRLFKAQQHHDRKHWDERCQLTPEQKAKTPWVEYLRPIIADADTGHGGLSTVFKLAKLFAEQGAAGIHLEDQLHGGKKCGHQAGKVLVPTSEHVNRLTSTRYAWDILGSSNILIARTDSESAKLISSSIDARDHEYIKGAFNLPEGTSSLADTLAALEARGASGPEVDAAEKAWMEKCELLTFNEAVAKHNAANKQGVEAYNAKVAGGVSNGEARAIAKEVFGAEGVPTWCWDAPRTKEGYYHFRGGVAAATKRVKIFGQYADMLWLETKTPDLKQAQGFAADIHRDLPGKWLVYNLSPSFNWSAHGFSDQDLKNFVWDLAKSGFVFQLISLAGLHSTGAMTCELSQRFKTDGMLAYVELVQRKEKEIGYDVLTHQKWSGAAYVDRMLQAVSSGSSATQAMGADSTERSF

SEQ ID NO: 42261 - protein, 795 aa, Oryza sativa
MASLGDDLLRVVNQLQDLVFNTIGNDSLDLPQIVVVGSQSAGKSSVLENIVGRDFLPRGSGIVTRRPLILQLINVEEDESESNDTVHVSYQNPTQARRSEWAEFHHIPGRRFTDFGDVKREIENETSRVAGNNKGINRQPINLKIYSPHVLNLTLVDLPGLTKVPIGDQPPDIEKQTRTLISEFIAKPNSIILAVSPANVDIVNSEALKLARHVDPLGRRTIGVLTKVDLMDHGTNAMDILTGRVYPLKLGFIGVVNRSQQDIQGNKPMEDALKAEMDFFRHHPAYRNIAVKCGTQFLAKTLNQTLMSHIRERLPDIKARLNTLMGQTQQELASYGDNHFSGKEHRGSMILQLMTKFASAFVSSIDGTSTEISTKELSGGARIYYIFNSVFGSALETIDPTSNLSALDIRTAIRNSTGPRPSLFVPEMAFDLLVKPQIKLLEIPSQRCVELVYEELIKICHTCGSTELLRFPKLQAKLIEVVSDLLRERLGPASNYVESLISIQRAYINTNHPNFLGAAAAMSHVVSNRQDQERKRLIQEERGRREKRRMKELEANGTETPEDDDAASKGDAPSSRKQLAKGSRSMSPAVRENGSIASAVNGTRPASPSRAGGGPRDTFLTYFFGKDGPTQPGGAGAPTSLPRHVSQSIEPSFSQSIRRSEEKLSHRPAPSPLGREPESPAATEFGHPGIFGSENTEPALTDREAMETELIRALISSYFNIVRETIADQVPKAVMHLLVNHSKDVVQNRLVSELYKEALFEDLLYEDDGVKKEREKCEELLQTYREASKIIGEVL

SEQ ID NO: 42262 - protein, 849 aa, Oryza sativa
MTVTVFRQFLREALFKLGKRIEIFASPNGRMNWKVVKQASPGNLQDVEEDLGGFESAPMILAVKISVKASEAPSVGVCFADASVRELGVSEFLDNDLFSNFEALLIQLGVKECLLQIDKAEKDKDPALVKLRQIITNCGVAMSERPAGDFGTKDVEQDLARLLKDEKSTAQLPQTELKLAMGSAAALIKYLSVLQGPSNFGQYQLYQHDLTHFMKLDAAALKALNLMPGARDGSKNMSLYGLLNHCRTAAGSRLLSQWLKQPLMSRDEIEKRLQLVEAFVNDTELRQTMQEEHLKSVPDLYRLAKRFQRNKANLEDVVRAYQVVIRLPGFLGSFEAVMDEKYKDPIDEVYTQKLRQFSDSLGKLAEMVETTVDLDALDNHEFIIKPEFDESLRVIRKRLDKMRSDMDREFRNAADDLGQEENKKIFLENHKVHGWCMRLTRTEAGCIRNHSKYKECSTQKNGVYFTTNTLQALRREFDQLSENYNRTQSSLVNEVITVAASYCPVLEQLAGVLAHLDVIVAFAHCSVHAPTSYVRPKIHPRGEGQTILTEARHPCMEMQDDVQFITNDVELTRDQSSFLVITGPNMGGKSTYIRQIGVVALIAQIGCFVPCTEAELTIFDAILARVGASDSQLKGVSTFMAEMLETANILKSATKESLIIIDELGRGTSTYDGFGLAWAISEHIVKEIGCFAMFATHFHELTALADQYPQVRNLHVTAHISGASMASTADKREVTPLYKVEPGICDQSFGIHVAELVRFPDKVIRMAKRKADELEDFTGKHEQNGLGAGYSKDDVEEGSARLKEVLVRWKDEVKDGNMSREEMVQKMRELVRADQTLLSNPFFKSVKAL

SEQ ID NO: 42263 - protein, 946 aa, Oryza sativa
MSFKKDEEVGSTGFYQDKTSVIQEARVFNETPISPRKCRILLTKVIYLLYMGESFSRQEATTLFFGATKLFQHKDPALRQMIYLAIKELCPFADDVIMVTASIMKDMQPNVEVIYRPNAIRGLSRVVDPSMVQGLERFFKSAIVDKNTSISSAALVSAYQLQIAARDVVRRWGNEAQEAINSKSSSGASFSSGFAGAGSYLGFSGYGSSQAQSQSNYQAVASSSYITQYHALGLLYLIRQGDRMAVTKLVQQLGGGRGGASSGQGSVLRSPYAICMLVRYAAKVAEEDPNLRAPMMELLEGWLRHKSDMVNYEAARVICEMKNVSTQDLYRPIAVLQLFLSSPKSTLKFAAIRTLAKLAQTQPAAVQTCNVDMENLITDTNRSIATYAITTLLKTGNEASVDRLMKQISGFMSEISDEFKVIVVDAIRSLCLKFPSKQTVMLSFLAGVLRDEGGFEYKRAVVEAIFDMIKFIGDCKETALAHLCEFIEDCEFTKLSVRILHLLGVEGPKMPQPHKYIRYIYNRVILENAIVRAAAVSSLAKFGIADKSLNARIKVLLERCLDDVDDEVRDRAAMYLRVLRESRLAAKVVNDESSYKLTALESALQSYVSDPSSSTSGFDITKIPRVTREEARQEALRAKSEATASVAMAADSSQSVHANSNKGASTSKVTSSGDSESLYAQQLAAVPQFAEYGPVLKSSSKAVELTESETEYVVSAVKHVFAEHVVIQYNVTNTLPDTVLENVAVVVGGAAEAGLHEDFIVTVPALSAQNPSGTVYVSFTREGGATDYAQATLSNTLRFVSKEVDPSSGEPEEEGYDDEYQTEELELGVADYVKPVYANFSEEWDKLASAPSATETFALTALDGLKTACDTLIELMGMMPLGGTESPSSTSVHTLTLSGAVANPGKPVKALARCRMTFASGQGVTMELSVRADSDEACQLIMSAIA

SEQ ID NO: 42264 - protein, 719 aa, Oryza sativa
MNGMEHGQSFDPAFDAFFQAPSSSSPHHQLQHSAAGSPASIQQIGNMSAADSSLSLYAQDTSAMRPSSSSGGNLHLNISNLSVTGGEADASHAQAHQQQGVASSLSFAPNNTASPQSTLASPADATASFNMPSTTSTSPLLHPDAPVGTATEAHLGVPTASSPLKTEYNLGNESAGLTSTMRSYSSTSIKSAAGSQNADSPSSGFGAGGAANQSMGDVSIDDANVASQSEAELAAEKRQSSKFVYKLFRMVSDPDYQHLISWNRNGTSVMVCNFDEFAKEVLGKHFKHSNFSSFIRQLNMYGFYKVNKTPRGHRQSVDAQIWEFSHPKFLRGRSDLLDDIRRKALDSEHARVEARDLQYSVSVGQMQLRQQVDEMQFRLEELTEQNMALRTFTTQLRDVLGLVLEHVKKTSGGNIGFDVRIPTLDLPSPMPPQGLWTPQGHDGPPIFVTEPEFGAGVGPGGLRMGPTPGMVPGPGHAPPPMHAPQHHFGGAPDGFAMTGTPISRRVSASSAHSESMLAMNGSPMHGSMQGEMGMLPAGLPQRSASFGEGQMPAPHFNIGRGGVNRPGLAGLAIDTSAASGMFGGMHPSVSPTSAGLSASNAGLGVMSMPPSPLTPQHQAMMAAINTPLPPSPAPGSLAGGQFKPFDGSPFVTNNGFPSYGHGLSLADQSFFGPEADGPNAKAMRTPMKHTASNSGPSAQGTPVLMQSTSPGLAKRKSPI

SEQ ID NO: 42265 - protein, 876 aa, Oryza sativa
MNGIKQDSPHGASAAADAPSNLSEKALPPIQSALHSAQKAAKDAVGSARDATSSSSRTTEYPVPQSHPDSQIADYVLVFQHIAKKYLRSSTKVPAAERSKIAAEYDALVQRIRDTGLHVTSREGSKGSGQILLFVKADSQLLHQLARQEALSDYLHGVLSVQPPPPRSSSLADASFQKQQPSSLHLTPASRLRLVDSLLTLPSLASHAVKNAAGSSQVPSGAGLRLGLKEFPHLVDMSAIHDPAYNSAWMKRWSHTSPAKLFSGIGLADLDSIREHFGEDVALYFGFLNFYFQALAPAALLGLAFWLLGRPFSPVYSLGLVSWSCLFVELWRMKERKLAVRWGTLGVSQVDRRRHDFVPRTTRIDPATEEPEEVFEWWRRELRVILSLPIVAFFASVLAATMTLMFVVEIFVTQLYHGPLKQAVPFIPTALLVVAVPQIIAAWQATAVAITKWENHHSAKSYDYSLTLKRFAMQAITAYGALTLSAYIYIPFGESIMETMVQRGFFRDSIQHAIRTGNISPKGIDFHINPDRMHTQLFAVSVTSQFVNAFTELALPVLMRKFAEWRGERAAQKNADGSSQRQPQRQDSASSSAPSSGDVTPLEPGAADGGKEESERRFVSRVRKELQLPPYDLFGDYAEMATQFGYITLWSVVWPLSPVMGFVNNFFELRSDAAKISVNNRRPVPVRAETIGPWLEAFGFIAWLGALNNAALVYLFQQSEHAHLEGHSRYETTMRTHLHPSRANLTLADDAQSRFSFSRLVPSHIPTSGAAGAIVAAVLVALLAEHVYALVRSGIRHILERLIWRGSHEEMVVRRREWVLHVETLKSHVHGQIDAAEGGLESIRESLSGDVRSAAGFWSKDKDVGATAIHNSGKTE

SEQ ID NO: 42266 - protein, 1025 aa, Oryza sativa
MGHAQSRQQQDQARRERARMGRAAASARTLPSSDSQDHVPDAVVAVADDDASSGRKRSRSSTSPAPATDPTAVSEPLRQRRRRSPDAPASSSASSSADVASQPAASAPADEPMHLESQESRSPLPSTTAPESSEPLVDANAASLTDTSAPATLTSEPSSTEAASTPDAGAEPSNATPPPHLDALRQERERARQRILEALGSRAPISSPASVSSPIQPAATTSTTASATTPSPRPHPLASATLAALLGTMAAAQTATGEAASQPAAAASNLAAGATPSQNSNAQPNQAQQPSRPHTIRVPLQPEMISGTSMVVQGALVARTVASRPASSEASAGDDADASTASDAPRAPESAFSSRTEAPRDSNNPIGLPPGALDGDGLRGAVTLEEQAVMLSRILGIAAAATAASLLNASESHHVDPSLLQTSLRRPFERLSQASTDRNERWLADWQRSRTVDRPSSSSGGGTASDSSSASSSLGNGLRGRLAALSRRVHSASSTSELAPTGGIESVASQPASSSNDPTEAPGSQSSGDQVDAGQDSSQDSRQQEIIAHLLDAAEREASSQRQRTDSNASSAQDRAVPPQSPSRGSLSRLVRSTLGTFMHPSRLLPTRQSRSEGSQTNDSSSDRDGQSAASSSDASEAPTADFSLGPNDVVGTLRQVRNGVLPDGVPGSFGSFLNHLVRDLMAAVQLMRPSEEAAPAQPEAHTTNYFEHATQAQTTSGAEVLDGETSEPAATDATAASNESTQGQQDQQADDGVGAAETQARRDRDFQNGNLSFFRLFRFDPVAPSQLVPCIVVGVRSLNVTERFGEEMMGARAPGPGRDAGGTRQQTSRPTTLGSTRTTEASPRARAQSEGAPATASVRDDATDANGEELPASRFMLFVSGGRYPANHPLLTSNPATAGRDLMILMDLLSTMQAMQNKPSTVTQQEIDAAADLSKIRGSEVAALVGEGKITENMAERCLVCLEDWKQDDECRVLACRHAFHTTCVDRWMTTSSNTCPMCRRQGVTKDGRRAGDETADSQRAAQA

SEQ ID NO: 42267 - protein, 1098 aa, Oryza sativa
MLVAFESTVVWQRQRTLNEFRGMSIKPYDMWVYRLCRWTEIRSDKLLPGDLVSAGRTEEDSGVACDMLLVEGTAIVNEAMLSGESTPLLKDSIQLRPGDVVIDSEGLDKNSFLWGGTKVLQITHGNPDEEKPKLASGVPPPPDNGAMAIVLKTGFETSQGSLVRTMIYSTERVSANNAEALFFILFLLIFAIAASWYVWDEGVKKDRKRSKLLLDCVLIVTSVVPPELPMELSLAVNTSLAALAKFAIFCTEPFRIPFAGRVDIACFDKTGTLTGEDLVVEGIAGLGLGHSGANTPVESDGAHSHMTAVQHAGMHTTLVLASAHALVKLDEGDIVGDPMEKATLAALGWQLGKNDTLKTLPAVAAAGATSGSVQVKRRFQFSSALKRQSSVATVHAVDPKTGDKLKGTFVGVKGAPETIMKMLSVIPKDYEETYKYFTRCGSRVLALAYKQLTTDAELGSGKINELKREKVEAELTFAGFLVLQCPLKDDAKESVRMLNESSHRVVMITGDNPLTAVHVAREVEIVDRDVLILDAPENNDAGDQLVWRSVDDQVSINVDPSKPIDPQIIETKDICVTGYALSMLKGNPTAWRTILRYTWVYARVSPKQKEEILLGLKDMGYYTLMAGDGTNDVGALKQAHIGVALLNGTQDDLVRIAEHSRNTRMKEMYQKQVDLVKRFNQPAPPVPVVIAHLYPPGPSNPHWQKAVEREAQKKGISPQEYAKQNGHDIEQTITSPAAQQLMNNDPRTARQREAMNKASGLADKMTSTMMEQEMSAEDEPPTLKLGDASVAAPFTSKLRNVVAIPNIIRQGRCTLVATIQMYKILALNCLISAYSLSVLYLEGIKFGDGQITISGMLMSVCFLSISRAKSVEGLSKERPQPNIFNFYIIGSILGQFAVHIATLIYMARFVENFEEKDPNVDLEAEFKPSLLNSAVYLLQLIQQISTFAVNYQGRPFRESLSENKGMYYGILGVTGIAFACSTELVPELNEQMKLVPFKYEFKATLTTVMILDYVGCYLIEIVLKRLFSDFRPRDIALRRKDQLKREEDRKAIERAEKEAKEEQARVAKVEEFERKLEERKRKIREWGQGNAAPATAAQ

SEQ ID NO: 42268 - protein, 896 aa, Oryza sativa
MSAPWTRVPGGPVPPSAAGSRGSDDNATLHNPVRTYDAPLAAQGVSSSSYYDNVADYPSEKEYENYPGNYGGSGQWTNDAGSDASNTYPPTQAGAATRHKQQFSHSTDMSRRFEAGANKAQPESVSKRPGFKRQDSDSWERLLKGAGYSQDNANASFVGLNGKHGAGPQLGHPSVRLLLYILIPTALFWIPGILALLVYDARPANRFREPKVLDVGIFWWSIWLSSIWVGWWACRVGAIMIPRVLRWTVGNLHQKMRRYTEFLIVTEKYVAFFLWTILLFALWLAIVIGNFQGADKAAIEAAPLTPGNSTSTSTSSSSSSRTTYINTNDQSSWPSTSDIMLSGYRLWFGVCLSAAILLAEKLFIQGIAYNFHRVSYEDRIQTSKFNVKVLTTLYENSKNLNRKDTYIAAEQEAKRKSTGLHLARVRLRKTGAKVRDVALQSTSVLGTVASEIAGQGVLQAGNPRSVVASSLNSRKQTQALARRIWYSFCPPGKSELIVDDIIHCFPDAITAEAAFEIFDRDLNGDITKDELEAACIGIHRERLALQLSMRDVDSAVGRLDSIFMSVFILISAIIIAAMLSVAFSTLVTSFGTLILGLSWLIGSTAQETLGAIIFLFIKHPYDVGDRVDVGEDSYIVKEMRLLTTVFKTTNGKNVMISHSQLATKPIVNLRRSGAIEETFKFEVAYGTTFAQIESLRTKMVHWLEGEKRDFLPGLDINVVDFLEQGSMLLSAGIRYKSNWQQGGLKAQRRNRWLCQLKVFLAECKIYGPKGDPNVVTTNHVTMVPYPPPDASLTATTAEAGVQNTLGAGERAYRFMDSGAAIGGQDVFDDLAGDAGTAPGTAPPSRPLSPANALEQGRLRNPGLPTSSSGPAPPYAAARRTAGMGESYELTDQPRRI

SEQ ID NO: 42269 - protein, 955 aa, Oryza sativa
MSLIVDPDHVIHSLRLAYLKRIDDHYGPRIITFPSVTNTNRPTTSTAASHGDAPTASVSTSSSNTSFFASSSTAAQRDDASGRNGALYSHYNPFSADAYVAVAGLTDASRHPELETIYSPVPTVGEAGPFGGFNHRRGSAHKQSGDYKANDDGLDKTQPSTGLSYTQTIYGPGRSGALGMRVNGRRASKRVSISGASAKATEIAEKDAASTEYDSAEAFAGAEAKQSDAGARQPQPLDSSEAADRSLGPASVAAGEAQGTVMGKRVNFADPPPVHSRSSLDVDRSSEGRSVSPHAATSTAGRSDSVYAEGSTESNTALSSLGSAGSLRDGSLGLTTINAAITGGLHSPHSSASQSMDPTLTARSSPVLSRPAVPPLGNAPGLPAPPKMIISATGDSDDNSDADTPAHILGPSKGRQHRRPSHSISTRHAAQSDYFSSIRVSRSQLESRHASRPKASMLSSMLQKQDSSPENPFAALYAGIAGRSATAPSMTVEIYFPWAEGGQPPSANPPSSGAVSVHAKTKCMKLNIRKDATMEEVIGYGLYCFVEERWKPELDPPGSSRPESEREARLTTIGWTLMIVEDGEVDDDFPAIDQSLLLGKFGGDEFAICEATPNQIKQHRDAYAGIARRTLVRPLAPNKTAVKGAAGGESVAVSSGMDATHSVLAGGAKSGATAISANPALASRLGVPGVGAQVPAGSVMNVQGTPIFASGALSRSALGSSSQSIFLRVLVTPNPEVRYKTTLQVPSDMYLADVLEMICRKRHLSNVDDWALIVPDKSIVVPLDRTVESLQGNHDLALVRRSSLGALGGAGALSSSSTNPNASIFKRYSANSDASALGGQPKYTKALDIAAAYKSYTVCRRSPMFGGRHNERSLTLDGDWLHIMPTDMKTFGKAASFHVSSVVACKLSSKLANAFKLVVWRESPRDTKRYDFEADSTRIAAEIVREINLLRSQNT

SEQ ID NO: 42270 - protein, 675 aa, Oryza sativa
MEDLSLSSELDPALLSTSTSSSSPPDSASPSFSFYHPSPPNYTLAVSNLSCRDPRRGSGGAGLFSWLLGSFSTSSPPATGGAGLLNNVSFTASSSQILAVVGPSGAGKSTLLRILSGRGTGGEIAARPHAVVSVNGRAVTSRARLRRMCGFVTQDDNLLPLLTVRETILFAARFRLRSAVTARERGERVEALMQELRLSEVADSYVGGCGGAGGAPRGVSGGERKRVSIAVDIVHDPPVLLLDEPTSGLDSRSAMDVLSLLRDVARARRQVVVLSIHQPSYRMLAYISSMLLLSRGAVAHFGTLKSLEHSLSRLGHEIPMQLNPLELAMEVTEQLEADHARFGAALATTIHQHQHNKVIDDEDESSGAGEHEHEHGYYCSRAVEVGALAVRCWRTMHRTKELFAARAAQAVIAGLGLGSVYFRIRPDPEGVALRLGLFAFSLSFLLSSTVEALPILLHERRVLMREASRRAYRLSSYVVANALVFAPCLLAVSLLFSAPVYFLAGLRATTQAFACFALAVWLIVLMASSLVLFLSAVSPDFVLGNSLICMSLGVFFLFSGYFIPRESIPRYWAFMYYVSMYRYPLDLLLINEYGGSSSGRCVAWAGGVCLRKGGDVLRGRGIDEGMSRRGWRWNGSGHVDDGCCGGKSEMARWCERHWSSACRSAAMRMTSSRCA

SEQ ID NO: 42271 - protein, 964 aa, Oryza sativa
MSDNNNAPQMYATPAKKPVRSHTADVVAPLPTVSASLNGGDLFHTKQRQIDEARANNDAQQTFAQHQSEFEQSRDTLLGAIDNTSHLLADLRDFNKNKRLIHYATADDENAQKTGPSRPQLGQHRRTQSNAPSHSLEEADAHPSSSSSSTDSTPRRAPPALMRAYTTQPAAHASLPNTPARHATTAHHDDDQDSEESTDMSVLKLDLRVGSVAADPHALVRSLERSSVAQLLDGRMEKSGRHLENLKQRLTDTQSKVLVTGDLNAGKSTFVNALLRRPLMPIDQQPCTTVFCEVLDASESNNDVEEVHMLKHGVKYSACDPSTFARHTLDDIGQIVAEAEEMSPEDAPILKCYARDTRATQDSLLKNGIVDIALIDAPGLNRDSLKTTALFARQEEIDVVVFVVSAENHFTLSAKEFLWNASHDKAFVFIVVNKFESIKNKDKCRKLVLDQIRQLSPRTYDDAANLVHFVDSQAVFGAEVDDAEAGAAPDTPSDELGLKVQGGALSVETRSTQSLQAFARLEAALRDFVLLKRAKSKLLPSKTYMVRLLSDIAFLAKINTQVAQIELAEAIKALEVARPELARCQASQHKLESVVESEEDEAVTAVIQEAQRKLSSAIDLIGNGKPAVEAVTLPAYPGLFNVWEYAQEVRHALTSSLELALRSVEDTARGTAAQAVDRVQKLGLAHLPQDVAETRTRIFNPDAMFAKRRAMPGLVGLGLGAEVVAVQPSDFLDVYHHFVVVTGGKLTHDKRIKDGSSSSSDDEMSLVSPVSLGLGALTLMGSKALGAKTAIDAFVRVSDLVGNPTARRWAAPVLAVVSTGLVVYLIYDLPNSVPRNIGRNIKNGLASGSLVRGNGSSSTSSSGGDEQRGEEVSFGAVHSARVGRETRKVLRLASWDLQERFRVAIAQRRAEVEKQEAKQASANLAIEWFDTTTARGRDQVYGRPRQGPRGLKWVVFSIICLFAR

SEQ ID NO: 42272 - protein, 896 aa, Oryza sativa
MIFRECAVSGVIYHGEVASPHIGTSETTAGDAPNVVSEKDGFSSNEGSSGSEQGHESGVKVKPLNPEIPPFRDQKLIDALKDPNSEHSEQLGRFFRCLALCHTVLVEEQEDGSIEYQAQSPDEQALVQAAADAGFIFLSKERQTLRILTPYSKEPETYELLTVNEFSSARKRMSVIVRRESDGQLLMLAKGADSIMFERARPGQDEIKQATDAALEEFANKGLRTLCLGGKELSGQFYDDWSHRFHEASVSIQEREEKMEALASELEKDFDLYGATAIEDKLQDGVPETIADLKRAGINVWVATGDKLETAIAIGYSTMLLTEDMNLVVVRGGEYGQPNSAYEQLRKAVVRFFGGPAVLSEMEHQPPGEESESRRSSFMSRRPSYHRNRRSSVSQVSLVGEDNGQRSGGFALVIDGTALGHALSEDFSKDLLLRISTQCKAVICCRVSPLQKALIVRLIKDGLGVMTLAIGDGANDVSMIQAAHVGVGIAGEEGLQAVNSSDYAIAQFRYLKRLVLVHGHWSYYRNATMITNFFYKQFIQVGTLFWFQIYCAWSTTQAIDYVYILLWNAVWTVLAVICIGIFDRNINDKVLMQVPELYHQSRRRAYFGLGPFVIYFIDGIYQSVILFLFFAYSYNTTSVRSDGYDINLYEWSTGMAIASVLVANLFVGINARAWTWFIFGGVWLGTVVMFAFAPIYASFTSTYSYGNNHFLYPSIQFWMLGLLTCFLALLPRVLAKCFRQSYYPTDVDILRYVDKQDEDHDFTTDPAIPHARPEYAESMGRPSMTHHTFAPLVRAATSASPVDEAAPGGVQMHELRQTASRASSTHYDMLTGEQRPNRGYTYSSDEPTKKKSVKDRLVPDVFRRSLLKKKEERKRLTMIHQEEDEVAEEHAAPQSS

SEQ ID NO: 42273 - protein, 1094 aa, Oryza sativa
MSQVQAPLGGGYPQSPDPTLSDPRWLQQLASHPIFTPREESSGTSTASDDQIVGTHARLMVVRGTDLIVAVDNEVRIASLVDVKASAATPAALASRSSSLGAMSSTNYKVLVPAQGPAIDFEIQHLSLNPTGKLLACVGASQITLLVMPRSGYTKHVDRTVACRAVPIAPYYHSAHSDAAVAKVDWHPWGESGTSLLVLTDDGLLREYDVARDTEEPQQTASFLPIQPTSNAQRSRSRSATPSLAAHNRSSSPIASRSSSNFGASRGFGLSAEDDDATIAVSFALCVNEASLARPTAFDQDDDSAWAAAASRSQGPTDWSPLTVFGLMKNGDVWAICPFLPKSAVVPAAYIHDLAKLASHHANTVESQQTSSVDTQLRYVNALLKQASQGIAKRSRSSISNGRQTSVTPAPEAFARSRSTSTMDLDQLVDPQDADADESQVDMDAVQDGPIRLHPPSWSYRQDVRQGGSAKRAPRPQGPFLLRPAPVELCDERETVACDIVWTWLTDERAERTDSTTVSGVGALSIVGHDGRVDVGLLFESVQGSWDSRTTRPRNAPQRRTKTPKTNRYGLSDTEDEADELEALTLDEPEELPSLLIYETIDLGLLDTAVENGVKSHAAASDLLLDTSARNRPTFVRDPLYGDTLYVYHAFGSQCLGFATWTSKLIQALNMPSQDELDNDAHADASSATAESREQALTKVLHRGENTEVVWVVNTAAPGTGKGRNALEINPVTAVAILSDVYLSYAFLAVTADLQLVGVELSLSVEHDGADSPAAMAPELGLSESKLPKPYVSLLGEGPAFQPPAVFAAGSGVQGLPSHPRRAAMAGVSKGEVQVTPDTLRTLGKTVESYRHEIRDVVSAGNAVQARLDLQVREMTRQLSKLDQIRARCSALGSGDGQSALGERVARLASTQVALVSRIDRALQRLMDSHQPSISVYERRWFDELERIAADVGIARTSSGELKPDTRARKGIAAKADRLAHQLVLLRPQMDVLAATPANERALLGADQLRKVENLLAAQATMLAEAKAKVANLNARMSQNPPRQPSVAVDADLSIASIYSSASGVPPGLPHSSTLANLASPSSFRSRTPSSFFA

SEQ ID NO: 42274 - protein, 935 aa, Oryza sativa
MAGRHSKSGSSETDAKASEAATADSSQLETSEAATNLKAEETEAPAASAEGSAEQTEAAEQEDSTAQPSAETAHDDAASRESSGSDDKAVASSPFKKSSSKSKKGGRNSRGKSNGSKRSSDELDSTKPENADPSGSADASTDAEAQQGGGAEAAADADMNGVQEQATASSANEKEEESTSTGSNGRDTAHAKGAPASKELAQLGLGSFGDGAEDALGPRRSRRGPGASPDPKARVPKPEPETDASSLQGIPTDSAEADDINDATAVNQDAQASADAVGAADDDQKAADASAVPQEAMQLEEGAADAKVEADNGSGLEGQPETTQEAPEIDGHDVQPDEGEADYGNADEADLEGEEGGDEGVTRCVCGSADENVGLMIQCETCKCWQHCVCMGMQVEEDCPDVYFCEQCRPELHIPLLRSLGLLPKAAKKSNGKGGAKYSARELKEAKDAIALLAQENARRTQAAEAAAAAAAYNSRDRKGGAQSRNDNSKEQPKSPKRRSTMNSRDSAYGGWEPIPPGLLADGEVWDGVDDRKGGKKRKRGLPDDPNESSAETPEAGAGGIDPAFASADSKRRRMSVSGADHHGDADMEEDEAAAAEVSTSASRDKSKKKKGNNQYTVREASVTAEAASSKPRHPNQYTYRNKDRNAGPSANGQKTGSSSTSNLTSHSPSPSPSKGRAEHSRRAAARENASQFGTPAPGESSGASARGAGSTVQWGLPDHLTHLAYLLPGPGHRNGSGKTSGFASGEEAGNGGGAMDKKGSSSGSGSSVPSPPASGSVPTPFHVLSSIESSTKVRFPSRRMTLGEMRKRVRNIGEYVTRSQIEAVEREKRMKLLGIVPPYVEEMEAEAEMEAEAMQNSAKKAGDTRADSAPEQVVDGEGSKETTAATLGNQQPLPLSMRLMEELTRELIQFQRRFGVGPGSYGSISNAQQSAGVA

SEQ ID NO: 42275 - protein, 799 aa, Oryza sativa
MDDLLAYVRATEEAVKVLLKNTEEPIKNLIAAFDAYRSACQAVVFTDFTLAAKEEARLWNAHVEGRKYFSTQLRQYRKITGADKPHAAIRTIIDFYLKWIRGSVKFYRNHVYKLSTAFGVPELQDVAQQIKPEAQNVTPAANMLTPELHGRVLNSCHQTVIYLGDLSRWRASERLDKNPDFGPATGYYGLACTIRPESGMGHHQLAVVALEQRHHLQAIYHLYRSICVAEPHPNAVKNLTVQFEKTNAAWDKGELIQKASPNDPEAPKRALIGWFVRLHSMCFKGEKFRGFDELEREVMGQLSTELKLRSLGATLSRMVLVNIASQHMSIENYKEKQTPENEHAFYSFLRINLRAYTTLLEILQDDLIKVTRATAEMGEVELTNKILVGSGRVLPALRTYSCWLYQNYQLLLGLKSDTTLAAPIEGFWKSYGRTLDLVASNFSIWELETYSPIPYMLEEDVGTLGFEPLVDRSGGKANKVWKLMPSGIMKPRFSDRDITRFLPAEEMLCRVYGFLEDGLYFAHELDESPIKIKGDRVFYGNGDEIEQLLMPATIKKPVSKAAPKAKAAPANKPLSYAKAAANGKAQASKPAAPQTRAPAFTQSQSHGMQDAQLSRMVDDLVDDDEAKDPVTPPQQFSTNPAVVQAHGEPTVETTPEFAKASAGYPQKSRSSSKYASVSSLWPTSPVVPATVSPRIPTGFPVGSLASPPLEHGHTRVGSVNSVRSRNSQNVGDSWSSLEGLPQGTGMAQAPVTNVPQLPGLGGAYGDGQLLFGAGGGMWSAAMGGRKSFGGVSPDAGFGG

SEQ ID NO: 42276 - protein, 441 aa, Oryza sativa
MAHNDEASSSRSTSSAAAQPSPPPPPRLAPAPASASASPMDAAAPARDFMAEALRLVHNRLTCLVDRRTMARVCHDWRAAVKPLQNAPHLRPLPWILVPRADGPSFSCALRGCGGHGLGVPDGARAARCFGAYDGGWIFLGETCRNTLLSLRDHQLRFNLPFFVRPDKTAAELGRPDGPVPNTGVIMLAATLSSPPEDEDCVAAAIITYWPFQAARRTHAFWRVQSANASQDQVAAMGHGPSAIDEPALEDVIHHKGAFLFLTAEEDLHVFTARDFHEDGDGNMKMAPRVILRFWRGRRDYGGDVVARYLVESRGNLLMVVRRVPAPLAAPPRKRNKALHGWKELESLGERMLFVARGCSRSYDAGDYPGDEFGEGVYFLDDGRLYRESTVFASRAVAGKYPCRDTGKWLPAADAAGVPRVDKFLPEQGPSDYSPPAWLLP

SEQ ID NO: 42277 - protein, 925 aa, Oryza sativa
MAHQYGSVPNPNDAHYERGYGNGTSGVSDFATGNPSASMTSPLGQSMGQQGFGGQFHEDFDAAARPNSAISGTQAAGINRSASSASTAVAHGQTGIPSRNNTLKKKSSMRRTSGATGSLKRSGSRKSLAAGSIKSVGGGNETEDFNSAFYTPVPTQGSPTDILANRFQSWRQLLKSLIAYFREIQSSYDSRAKAITKVQSAISGISHPAVMLSNDGLADATRILEDFHRHSLAEANKSREIENDVISGLSGLRSDLSQKIKEIKSLSGDFKNSVDKEKEATRREVEKLQEALQHADHEDSSATGKNDPYVVRLGVDRAVEKQIDEENYLHRAYLNLETSGRELESIVVGEIQKAYNAFAGILKREGDDAYKAVEGLRSGPISMPKDEEWSAFVTNDPHFVAPDVPLRRIEDITYPGRDHPAATEIRAGMLERKSKYLKSYSPGWYVLSPTHLHEFKSADKIYTQPPVMSLSLVEQKLGTHSEAGSSSSKFMLKGRQSGGMHKGHSWVFRAESHETMLAWYQDIQALTEKTGEERVAFLRRHARSVSGNSDRRRSFSSDGLEEDEADQVPYSADAASLSEQNPIEARPQRPQPGGRFPSDLNVSRVRNYDAPQSQSSESSDRDTINAAPAVAPAVVPIIRTDEPGRKYSRDGEDPYRLQGIASHSPGMTPGAVSYDEDQARYMANPQSSSAQPREQSFFLPGQQHLSQRPASVYQQAEHIQPAQPKSTSYEPDQSSNSNWIAPAAVGVGAGAAGAAAYNHYNHDDKSDLQRQAAAEAALVDDGGVEVTPSAAPVNNVSSAAENASFGTARDAVSAPVITAVGNSTTSAPVITPVGNGTTDTADNKPVAPPVTGNGTDTTFLSYASNTGSGIAGSSDISAPKLDGGLGGLESRGAHETGQIFPKVVRHDTDISVSQLHVPGEFPKKA

SEQ ID NO: 42278 - protein, 1028 aa, Oryza sativa
MDPPNHVPAPPRPRGTLGLKRTAPSAAFARTSFAPPSRVAAAPSPAATTKRARLILPTQNLDPDDSVPSPTAAADPVLESPATHTLLLSRNASPHTRTASPAPDTSAPGSSRRSGPFYLCTWRKPQAKKHKTWDGDAILIVKDAGERCALICSETGKELVGSARFAHGQLASGDELALGGKEIEVDRQIDEPEYRRLVAFTRGELSPVKKGPPPTAVRTPKPFVAPIKRFAIKPVDINALAPARAETFYGKPAPKPARSHLLDESRVSGLINPGQGRTPHPRFDPNEHGAIVMKRLDEGHQERHNPKGLPVVDVVLDPQLAKALRPHQIEGVKFLYERVMGMHADGEKGQGAILADKMGLGKTLQTIALVLTLLKQSCYYTPASCTIERAIIVCPLTLVKNWKREFKKWIGTSALNVLCIDEGRGCQDVARFVRSKSYHVLVIGYEKLRTCKDLFKDAPVGLIVCDEGHRLKSKEAKTTQMFDELSAERKIILSGTPIQNDLSEFFAMIDFVAPGMLNSYASFKKISEEPIMRSRAQHCSKHTKATGQARASALMTITNDIILRRTADILSNFLPPKKEMVLFCSPSPEQIRIYQSILASNDVRSLLRGDAGNGLLQIGVLRKLCNTPELLLRDSEADGTSAIKALVGDMARYFPPNFVRNDARFSGKLVCVMQLLEKLRAETDDKVVLVSNFTSTLDIVEAMMRKKRYSYLRLDGKTPQDERMDMVNQFNRDGVDSSFVFLLSAKSGGVGLNLIGANRLVLIDSDWNPSTDLQAMARIHRDGQKKVCYIYRLLLSGTMDEKIYQRQISKLGLTDSLIKGDKSSSDTFSQEELRDIFTLHLDSPCISHRQLVCDCDRRGGGASLDGLAEGMDASQTSVASSDDDLPGFVAASQHVVDRAQKDKLDKRKRLLALYKWAHYDCVQHPESFEEDEMVAALVRQSNSSVRANGAKKSEDEWSTSMADRADDLFLGSDDSGRDEDGIGEQQMDGGEGFRLDNMQTGRILFVFAKNSDKTSDKVESETTPPASD

SEQ ID NO: 42279 - protein, 796 aa, Oryza sativa
MWMSLRPRSLADSPAQQLLNRRQASASSSTSSASPTTTSDNGSSSSASASASASASSSSSSSGSSSGGIANGGMGSPASGTLNSTRIVLGRGFANGQLTYTVPIAVANQQINAQLDTGSGDLWLANQDCDSDSCKGHQGLSVLKFNDRAGSVVDQDTPFNISYLLGSASGQVKTASMLFGDPDTSRLIVNSQAFGSCNDVSNEDMDSGNFSGVIGVGPPANSLIQADLNATSNTAFLNVGVRPPETGAVLAGFWTNARPGRRFMGIGLQRLEEDGGKGDSLLTIGNHDPAYAGSTDPRINFTSAVGDADGVVRHWRVPLTEISVQLQHGVVEPIPIGTSSVISGSNPIAVFDSAASINLGPEGTLNALYGAWGIGPASDGGYYVPCDLQMNVTISLGGIRVPIHPLDASLQTGSGNGPSNDGSSCLGSFQALRSLSGSSNGANLNSSFLPADFVLSPAFMRSAYTVFSCDDGLNTTQAQAANMTVTSPCQAAIGLRPLVNMTAATQQFTAVRIKKQSLGQSGLHGGHSSSGSGNSKGLSEGIKVVIGCVCAIIVIAVLFGVALWRLRRRRRRIAAARAALYANQGEKGAGPAAGTGAAGAGGALGHAKKQSNPYSVVKIDGLTVPMEVLGKDDDSSSQVVLSPAQRVKARQLHHMHGVFDDELQDDELGRGVDPQWGEEAPPNPQHLHAAGLLSWDVSSTGYVDARQVKNAYLASLSEDERKAFLESSARRPAEPEFAQTSVSSPLQTLDDHSVQLSQTHHDVRSDSQRSSQLYSQNRSSARASSPAPLLQHDELR

SEQ ID NO: 42280 - protein, 787 aa, Oryza sativa
MANESQAAPPTRRAEERTPLLRPSDSPGDNGGLSHINHRVKTWRRRRWISFAASIFLLLGFVAILILSGVLSRASGKPHMAAALCLTPACVHAASELLYNLSPDYKNIDACTNFDTLACDGFNVHHDIPPDRSSYSTSTVMSENGQITLKHILESPYPRESRHSFLSPKMLAASVTSTDEENFNTMQAAYNSCLDETALAKLGVQPLVQLVQQVADTFPVTHADIEADTLVTEKDHAALSDTIFLLEKLGVTTFEDLGTGADDKNPDVVIIQATPAGLTLPSPEYYQNKKIVDQYVDMMGKVLGSFLPKNASRKSASKLAQAVVDFETKIAAATPPTEDQQDVTKYYNIAKVSELGKIAPALGLDSVIKKLVPQNYAVDTLLLAFPNFTANVSHLVAQTPKSTVQNYLIWNTVNTYARYVKGAEVEPVSQFNNILAGRDPDTKPERWKTCIAFTDETVGWILSRFFVEAAFSESAKKFGNQIISDIKQQFISKLKGLSWMDDSVKSLAINKVRNIDQKVGYPTTSPNITDPNAFAEWYRSMVITDSYFNNSLSSTAFSVNESWNSLGKPVDHGKWEMQADIINAYYSPVGNEIVFPAGIMQPPLFSDELPAYVSYGAFGSVSGHELSHAFDNSGRHFDENGNYTDWWTNSTVAEFEKRAECFVDEYSKFTVEGNNGEPLHVNGRLTLGENIADAGGVAAAFAAWKERQQAMPDQDLPGLDHFSHAQLFHVFYAQFWCGKTRKEQAIRYIYTDPHSPAFARILGTMANSRSFREAFSCPVKEPTCELW

SEQ ID NO: 42281 - protein, 927 aa, Oryza sativa
MAGPRTSLDAAGKKRKQSVDESPAATNQKRLKKEASNNATPVKTGKGAVHPAVSTPATGSAKKGAKKQGDDTPKEQRSLSKKEQKKLKQEAQQTPVSAKIGSTQDKKLAASTPSKQIQSPSVAAVQETPMDEERRRQRRAEKKARRHLEHEAKVAEIAATPQTAAKFKSAKKPSAIAKSQTGKSSAWTLSAASAGRYIERDPIFVNDSAGEQYIAAATAREVQVLSLETSLAVQALQVEGTVVGFCQEPGSSAISILDSTGNISTWDWEQNKTKVVKASPANALKSYSASYTESPDAKKQSIARVILTVSNKASNIYIGDKIVHKTKHVLEDAHIIGNLEFVLATGPSAVVLGRRKANSVDEFIWAELATSGSLTCAHSALKRDGQPGTPVGLRLALGNADGQIYLYEDVTRLFNGKELPSPRILHWHRDAVSAVKFTPDNQYLISGGKETVMVLWQLETGKKQFLPHLTSEVERLVVSPEGDRYSVQMGDNSIMVLSSSELKPVANFAGLQMPVPPQELGASYEAADLADVTAVLHPQHNDQLLLTVPATQPKTSQDVAARPFLQAFDFHNSRHISRQALSRNNVTDFNLGPERTAINPPDVAFLAVSQDGQWLATVDEWLPPASDVQYLAADEDQIEEEQLKRREVHLKFWQWDSTQSVWTLTTRVDAPHSRAAEDSLGAGSVLGLIANPVSRGFVTIGEDAAVKTWRPKTRIRYGMPLKDESGNDVTEWTCRHNIQLEKQLARVDSPMDGEDGVEAELMGPTSAHLAFSEDGSTIAAAVCYDFMADAPVAHLIDAHAGEVKVSKDNVFAADLSGIGFMDRYLVALSRESIRVWDLVQDKMHHHVTLPQIAEEGDRPLLAVNHQESTLQSLCRKLREAEEAWKCSNLTAPRVCTGKPWQHLSPLCWPTRAPEATSSCSQTPPSAC

SEQ ID NO: 42282 - protein, 798 aa, Oryza sativa
MALTAGARQRTLAVGREYAVWKGQVSSLYQWMSAHTVATGTVQWLPEDAPTIARESDRLSRTRQVVVGTRLPASTKTGIDGGNTLQIWEMALPPTRLGDDAPAASARGAAALFSAAAAPAIAPAPARRPALQLESSLFRASQHAMYPVKLTLGAGIGAAAASTAMANTQPNASSAAAPAAAANSSSAVPAVAPAAAAAAAAANDPLPFEGTLGRVVGYGNWVLRRSVRHVGEVWRARCMPQRPTLVATRSAAPAVKVYNIGQPGHLPVDMRDGSAAAAISDAELQAHPRERGVYKERDETCIATLSGHQEHGLAMSWHHHAARTGHILSGVDDGQICLWNIDDKPQQSQLNFTGVGSQLNTIPARMTFTSHSGSVEDIAWSRDPNAPNVFASVGADRQLMLWDSARKTPASRWTAHVSEANACAWSPHNPYWLLSGGSDGDIKLWDVRKASPDCKPMTVPRAGREVFGVQWLPYRTRAAASTTAGDGVFGGYCFSSFGAERRVMVWDVSRSGMAQTQPEQRCGPPELLFVHGGHTGRVADMDWSADDPWYAVSVCSDEVVHVWSIADALRPVTDWDYRVSPSTCIAATAAAPTATPMALEKPLPNGAAAAATHPNGAAAGSSKRKSTGSTAASAAAAAAAAAAAANDETDSDDESVAAAAAPKPPGRGKGWRKGTGKGAAAAAAKSDAPEGKGKGKGKRGAAAAAAAAAAAAVDDAPIKAEPSAPASSSSSAADAAVGHKRTRSPPPPPDATAAAATGAADESGPPAAKRAKAEPSEPAAAPSVAAPVLAAAPAALAP

SEQ ID NO: 42283 - protein, 545 aa, Oryza sativa
MGQNNGKPVVFTDQVNLNHFRLLRVVGKGAFGKVRIVERKDTGLTFALKYIRKDEVVRSENVRNIIRERRMLEHLNHPFLCNLRYSFQDIEYLYIVVDLMNGGDLRFHISRKTFTEDAVRFWIAQLGCAVRYIHQQGIVHRDIKPDNVLLDSEGHVHLADFNVASDFTPHKPLTSKSGTLAYLAPEVYEGKGYSCEVDWWSLGVLFYECIYNKRPFEASSHDSLAAKISKGEPTYPVTSPPVSMPCLHAISSLLEKNRKRRIGAIGFESFTDNPFFRPLDFEALERKEITPVFIPSSDKTNFDATYDLEELLLEEAPLEARARRQKPREALKEDATDQEIRAEELHKMIETLFEPFNYTTAGDQRPIAVAVTDTVDSVGGSRTSNQSNSENTPASVTSQQDPWGRPVPSNAQDSELQPTRSTTTARSNTHSPSGSPPLPTAPLNHTQVTSSPQSQRGERAERADYFPNDGSEVPTPSFSRPMNSRPRGSHRSTSMGGGVQTPQAVEKPSGMLGFLSRKKGRDRSPKAKERGVLGKEGARVIISNT

SEQ ID NO: 42284 - protein, 86 aa, Oryza sativa
MRRPVRFLHLEPSPPTQATAKTPHLRSSSSWKSLTLCLCSMCTRVGLQTGATICSFRRRRSLKTKARCSRTCPSTGSRSITYCTNS

SEQ ID NO: 42285 - protein, 94 aa, Oryza sativa
MPRPWRPSTCVGASSAAPSPRLTGASPSSSSWDSPATTSPARSRRRSARWSPSRASSLGTMSSRVASRRSSVTSPISSTSTSPSATSTGPSRRS

SEQ ID NO: 42286 - protein, 711 aa, Oryza sativa
MGKKTRSSSKKRAASQHESSAADDELELHNVGPPLDSEPVDAAPPPPPPPVEEAPSSPAENPFFLQCGLGIVLFLAVVCVWSIVLVPVWIVSDDSDKPAHLTAIYDASNCIVTARRAQITTSSADAAAVVSCVRHLSSQISSAAVSLALTAANSKDFATAGVQLKAALSALVADTFNGVSSKSKTVWVPVLRALAVESTRGYAVSAAQVGNAPTSRRFSDVGALVSSAVRPLSTFGIGSRIKTVTDAQNALLTRNVAEAVDVAATMQLTGVAPLGAVAEMKLEALRGLDALSELIRTAKSDSDSVSQRALADAIVSGILLSLAACVCIGGTVFVGVLTRRYSVAEGYRRVVRSDFEVVADSAHAVPKSSVLRAVSLACAKLSVMESSPDPGIDDNEGQLVLHLRRVTKSMEALRPFVPEYAFSRTKTFDAFGRTFRRLSMGPGLEREPRCTVVVVGLRDFHKEGADLSALPEFINAVHAAALAGGGTVAQVSPTHIIVVFSREAEEASGEESINMDRVNGGVEAVRTAFAILSSGVLLQKQYPSLSISIAISQGCALIGPLTTHSVKVFAAASNIVTTAIHMEAWTRDLGICVVCDTATATAIEEEILTRPVSLCTARSTNMHEVVLDYRVGTSIPGVKERCVRWTQSFERYEEAVRTLSPDKLEEAFSDLQAYRQFAIAASGSAELVEDLVFTRIAEHLRRLMADIGVKL

SEQ ID NO: 42287 - protein, 759 aa, Oryza sativa
MINRFGSENKFRYDEFLAEIDALQQSGVAVQEAAAQNVPEAGTALYHIFLACAQQAAATGIDARRSFQPFDKHNTGKVSASQFDRSFPFRLDHNQITAVKQPYIVAGGIEVNYLRFCNDLLAFRANLTQTQLNAAEWGDNTIGKSATLESPLRHRAATASDVSTTLSELKFNLLKEHVNISDSFREFDRLRSGNVSSGQFTSALGRIVLRGFKLSGDALAKLIDAYRVDGSDRVSYNRFLRDLDATERGGPQLNDLGSAEMARLNLVLDKVRTAVRTRRVNLKPTFQDFDRANKGIFLGLTCTRNRFERVLAVINITLSVAEIELLEQRYSVSKATEDDSDSINYIAFCRDVDLQDTQIESPATVRPLPTFGTGTFNATTGTTLVKKDLGLEAVIDIALIQIADRSIRLHEFIRDHDPLRSGVVARDKLETAVSVSGLRLEPDQVKTLLDAFAIDDKKKQIAYPRLLAALDIDAPGENPAMHKVDEARARVTAEVQAATAAMHSEQLDAILQRIRDDVSARHILLPPFFQDYDKHHRGTITAAQFERVICRHRLPVSTADIGVLKQYFADPADANNVRCRDFIAAVDIAEASRLPKHLRQQQEQPTAAQAPSPVSAGKELPALGAVLAKVSRFVLSRSLRVSEFFRDADPLRKGFCHESRFSGALNALGIGLTDAEHETLRTAYRSERGPNAVDHDRFTAEIDGLEFQKATGALDLTVSDGTVLKAPPPLGDFEAARQAANDDPFLQKLLGNVRSTASA

SEQ ID NO: 42288 - protein, 1053 aa, Oryza sativa
MFQWRRFQFFEKELLMEEDGKEEMKLFKDFKPTCSTSGRGHLVFGDGKGVIRIVNRDFLQVQFPAYEIDVVAVHQLKRSNLLVSIGNDVIDGTSIKIWRLDKEDQFGNPFCARTIKVFNQKFPPVPVTCFSVLEDLTQLAIGLGNGAVMLFDGNILRDRACKQELIQNLGPCVTGVHFREVESKHNAVSLFVVTSEKVISYFTKAKPTKDGYPKVVVDGEGGSELRCSELTDDKKLVAGRDKAVYFYEAEEKSICFGFEGMKKSLSWFNSYLIVVCESGKDIKKNSLTIYDLKNKFIAYAAKFESIVNLVSEWGSIFVLTDTQRVYQLSERDLPTKMEMLFRKNLYSIAISLANSQDCDKSYIIDIFQMYGDHLYSKGDYDGAISQYVETIKYVEPSYVIRKFLDAQRIHNLTRYLQALHEQERANTDHTTLLLNCYTKLKDVKTLDEFVMSDGSRDKKVNFDVDTAIKTLRQAGYFRHALYLAEKHRNHAMYLKIQLDDESNFADALNHIASLDFVAAERYIREYGKKLVNALPEETTQLLMRLCTTYRPTPKPTPPITLGDASAARDGKDAKDVKDVKGGDSKTRLDFAGGAAGGIAAATPLGGGSGAMGSALGTVGGVTADGRNAMVAAAFASVGMASVKAGAVMTGVLEDKADPQLRAKAEEFIHFFVDRADYLQRFLEHIKDTDPKASNVIYNTLLELYLRPDAEGPTIGGASAAAGAGAGAGAGAGADAKDVKLSSSPSDDKSGGAAAVAGAGASGVMAKEHPRHHKIMALLKSSQARYDTDHALVLCKMYKFFRGMVYLYEKLKLYHEIVQHYMENDARNKILAACKKYGPNDPQLWVQALTFFAAKAEVCEKEIIQVLENIERHNLLPPLMVVQILSKNHTKPLSVVKDYIIRSLQAENAVIVADQREIQRYHDETAQHRDDIHQLKTRANTFQGTKCHACTSSLSLPAVHFLCLHSLHEHCVSDNSRQCPSCAPEFRKVMDMQEAMRASASQHDKFFKQLEDSADGFSTVAEYFGRGVFNKAKPEDAKSAAEKARTASAAAADD

SEQ ID NO: 42289 - protein, 704 aa, Oryza sativa
MSRRIMNRESFNPPSLPNLAASRCWPESVILANRAYIADCKNPTTATAQSRDGHTVQISFCFAEAPVISYFCAHCYNPRVKVEFFTEPIIVAGEGAFVVLRVHLSSPLLSEFFIYRAGPGLPSLERVQDPTGYNSPIFYLSLLGIASCDNDDGGSCLLVGFRNRLTHYEVYVYTSTTKTWSTRKLDLSPGIRAIRPQKVINLGRGLLGWVDLWHGILIFNARDEQPQIQYVPLPEPMPLNKESFRPSNRSESCPMLFRDVICSSSGEIKFVELEQRQREIQPIPQELEDVRQESKEDVCDRDVLDDSYLMSCAHMDDLPKEETPSFVGDGWRAVTWSRLISSNCWQKGYVIDSDDMQSTYEVLTSTQRDKGVEMLRFRDLFSVFPTLSLNGAGDLLYLRSTVKFKDLNGWVSSIDIGKKTIKVLKPYCNGRHIPFVQMFRSCVLCHHLTVLPGPENIGRFIETSSNENHPKTIAASIMPESNCLAGNKRSRSATRWSPALRGWPSARVAKPALSWRSCPPSLSPVSSTYGLRNTAGYHMAQTCCFENDPRATANTTPRHPENQFTQHGYEQRENDFILSAPNFVRWHRPPFSAGGTLPPPPPTQQPSAFGTLPPPRPSQQFSACGTMLPPSSSQPFCPSVRSLAMQTFATPGPILPGPPVTPMQWPVFISPPQQQLSACAVWPQAGTLQQELPPHIPFRAHQCP

SEQ ID NO: 42290 - protein, 548 aa, Oryza sativa
MRPSPMAVRAAGGCSTAAAATLAFFRLRPLGRAVRPDSARAGWHFSLYGGCRGRQVHGLVDSVLEELRSQRRGRVSAKIGLQGTKELSDNKIDKRTLQKGLLLEFQKDSERFLLAVVERPDGKKSWKVTDQNGILSSIKPQQVTYVIPGIINYNHSRIDEFIKKAQDLLDPTVLECAWMELSENDKSVTVEEFAEIVYGSKESLESYCAHFLLSRDIVYFVKVESRDSSVYQPRPPAQVEELLRRKLAKEAAEKEMEEFVQLIKSAKALPLDAKPSKDSWLMEEKVKRKIESLQAYAVDACDDEQRRTAGNILKAMGFSKTSSAALKILINIGYFPVHVNLDLYRYDVRIRYTEEVLSAAEELLVDCPDSDKDIRKDLSTLKVYAIDVDEADELDDALSAARLPDGRIKVWIHVADPTSLVQPRSTIDREAMHRGTSIFLPTATFPMFPERLAMNAMSLQQGRGCKSVTVSVILQPDGSIAEYSIENSIIKPTYMLTYESATELLYMNLEEEEELRILQEAASLRAQWRRSQESQMTCAPPSAGLSKS

SEQ ID NO: 42291 - protein, 949 aa, Oryza sativa
MFELGLTAAAVPPSQVVQAVQHISSSSSSSSGSNDEGTLWLVCPPAAVVNLVASAEALGLRLSSRQEQQLMIPVLAAAIGSSSSRSKGLSYPLAIKLLCCWASSGAGVPSTLLQLLSGCIQRHLQQRPELLLLLLHRMQQLDKQQRQQQQQPQWQWQRQQQPQWQRQQQPQWQRQQQPQWQRQQQPQWQQQQQLDADPSKPDVLEQVRHTVLSQLPGHVITVLQQQVQQRLLLKGLKPEELQWTAQDLLNLSAALTQLPLHLTTEIAAQQLLPAGRKLLRAAISQLNDARRPLYAKGSSSGGSGSRQLRNAAYSSRFTPVQTSVWMHTMAKLLPAWHQRGVVTPDEKRRLAAAILDYTGELRGVKGVWTPSALVPLVQAVQQLGLASAAGLEWWAAVQEAVLLELDLYWPAQLVRVLQCMATAGALLDPGALELHWLPAISSWFVGEPLPPAGQNSAATAAASSSSSSSKVVGGQLAAAVPLTVPRLIDLLEVLAELGHKPKDSRWWSSYQATLQQQCDAVQQQQQQQQKQQQQQQQQQQQQQQKPLSAQQIVRIIWSTGKLRLEPEPSLLSWLLRMLEEQQQELSHLRPKQCVDLFVGLSKLLPKNPGVMDPGFYRQLCELLPSKQLVAGDVTNLVRCLGSIADGTAEGAVSGALVAALTTSSSSSSPAQQQQQQQQLLPPENVVQHLLSVSEASLGSLKGRALSMLLWGVRKMGYKPPEGWLQWYQEAVIAIMPKLADYEVAIVFSCLVHTGCAIAPPILQQLLSREPRESFSPGIMADLQSALELLEKQQVDQLGAAGVELQLRLGLNGFAGQHQNSSGGLNGSRWYDPWYDATVQVQEGDEEQEQQQQQLQDISDQAEGDGAAGDDVLLDIDSLIDQARSEIGAFGSVLEQQQHPPGDDSAAGNSSGSAGEELGDAGEQLDAATALRIQQRMDLIQELFRDAQMG

SEQ ID NO: 42292 - protein, 461 aa, Oryza sativa
MTSPRTCTGDLHAIGALFAPAPKVADLSALVDAIANAAGGSSSGSGSSSSGGSSSGGGDAAELMLADANTIAATGAAADSATAATAAGSEELARRTLRVRNGESWIRYEIVAAEPPLACTEVTNAAAVSGRIALVSRGQCTFMDKVLAAQQAGAVGVVITNDIENDNIFLMGGDMSGREKSVRIPVVMISKGSAARLRMCMQRHATEWNAQNERDARPPSSPAPPLSPPPPHNVHELAAERDQRRVQRERERAAIEQAFALNRQRLDEQSLTLGQHVKESELARHRDVQMAAFDRTRADAIGKLEAAIAQDSTLHAGAIAAAVTAANASPPPPPPPLAPAAATADSSWRLSGEYLPVEIIQFEYDAQPKQQQQQPANSNWASAPAEPQPPATPMAAPASNGGGSGGGSGSSSGSGKSKKPKKRLVAEPRITGNQSRFSYHALGRWSLDVEAKDGNFMLRLP

SEQ ID NO: 42293 - protein, 630 aa, Oryza sativa
MAVAQKALFVAALVLAVVAHVRAADADADAVAHTEAVAEAERTRGQTVVAADVSTWQHLSHEQLMALSAWGADPCTRHTVPGFDYARGFAEFCSRFGKVYAAKTQPLRFAVWTASFNCIHFKNRTAPKRSYFLRMNHLFDHTSEEFLKKLGARDSPEFVGSPATAPGPDFHLRTTTPTVDAPGHGPSAAFAFRQTSADADADADADADGDAEADADADAEADADSDEDLALLQTAKRTRARVWSKADAHSGESFDWRAKGVVNAVGYQQNCGNCWAFSAATVAEAAWAIAGNALRKVSVAHVTDCAPKPAMGCAGGMAGEALNSLMKAGGFCADSQYPFRGYSDTCKACDKVVQLSDVPRNYFSEKNGSALFGYLAVSPVSVALVASPVSFMAYGGGVYDAAECNAAEVRTNHALTLVGYGTDPEHGDYWIVRNQWAASWGEQGYMRLRRGQNQCKIASGKWAIAKSKPAAELGLVNAPSTTLPPGPPVAPLSPCAATDPNSKVTFHGTCQDVQSCTDAKMYPQPKLCPGSASVQCCLRVPLTGPAIPAPPTPTPTPTPTPTPTAPATPAGPVTPPRPAQQQACAALHPTKRMVVAGACIDSGICNAANNLPVAGACPGAPANVKCCLSK

SEQ ID NO: 42294 - protein, 1097 aa, Oryza sativa
MSGAASAGSNGMHHVVSEAALAAMDDEDAVVVGAATASHDADAVDGGDVADERAPPSGDWKQNELYAQFAGADFNDSAYAARALNDAQSAAAVISRLSDGIASLQQLIRAQVVSEHTALLASAAHIGSVEQRLVALHTQIGALHVTCAKLNTSLRAPYERMQVYATQLSNLQVVSDMLRQTLRFVALVRKLRSQMAQCAGANPNTRELAKAAQSVSEIHAVLAESDLDGLDAVWEEMAFVASSGTRVRTLGERALARALENQNQSELAGALQVFYNLGGRELYSAVANAVADARKAIVVVVRHTFDVGAIAQQVAARKAPLPTDNKTAAMLAIGGGGGSGTGAAAGIAGVTAGAAWRATLWERIDGLADKFYAQIMRIWTVQRVLAKVRDPQSHQLFLHSYNAQLAMPSAVSSSASSSASTGPGKGAAELKGDGKRDSKSAQAAAPAAAGATASASSAGANPNQSIMHAFWEDVCTLLTAELEAVSKGVGSSASSTGGGGGSGFVRTQLTSDFPRLSVTCNALLSRIANSCSSGSHADAAASPVAAAAAAAAAAAAAAAAAAAAAAAAAAAQNAAPAEAINGGAASSSDAATDALIALGPRSRAQFMRAVQPFQTGFLAKSFARLSDPVNSMFGGLQSAVPTLSEVSSFVLGVHTVLELVRNSDADLQLQLCRNAVAKAIQTFAAKCEDLVSMDVDPAIFSTQSAISSALSSLSSSLSTSLSSAGSSITSSLGGGTVAGTGAQAAAAAANASAAHSVLSSAQRRNAEIYALVCHVERELSVSELKRALPELSAASTAALRTAHAALSNLSQDLINVWLNSASRAFENTLFAMHSDDFGEKARVMGDGSGYIVALRGQCAFFSQHLYPVYHPPSADLNRQTYIAQRLQALCSRLVSVFVRSAVLLSPLAQAGKLKLTSDIAQFESVLHALSQAKLKSKAAALGAGAAVTGAAAGAAAGTAGGKGGGANANAKNPFKPLLDLKELLFAAPSVGAKAVELVEVKGVDRLTAASYCLSQCSLGACAPHTLAGKRVDEYSRWIDGLKPDTKEADHAAVLLKLYQKAEARVRLPKGPAGRNFLAQNYPELAAALKLLPKPNAN

SEQ ID NO: 42295 - protein, 836 aa, Oryza sativa
MENQNIDFDGSLYTNEGVFDPNYDPNRQTYNFSQTWPIPVSPATMSQPHQHHQAQNHQNNNQMHQQHDATQQNQQQTQQQQQPRRVQTVATSTAIPSTTGTIAPLQTMGLGFPTAMQPMNPMLANWMNVHTDGFATDAFTQNAISMGMQADFNATYGTQLQASPVDFAINTSSAAMMSSMSMAPFTMMPTTIDMPNMSAAPFQMADFQQEFHNTNLANADFTAHSAGSVSTGSPSEQWLEIRSLPSSDNGWVDLGHRNSYDFSDNSAIVFNPAQSLHIRTNSDSTNSNQSDVPRSAHSFSSFEEIRSFMNSPQSETDNHLELIHSHTHSDSCNHGHTHGLPLEHDFANYISPNQSVSPPIARAEPIIKQSASSTASPTSSAVSSPPAAARRRKSPVGAKPAKTIVKKTPAHTTKKDTTGEKRVGRRRGPLKPEQRQQAHEIRKLRACLRCKFLKKTCDKGDPCAGCQPSHARLWQVPCTRIDIKDIAYFMKDWKADYERHVSLGFSIGNIKGFSPQERPIYVTHGYGHYLPIMAREVYVRDEKCFGVDWFETLNGLHFEINTAKLSAGMEGVSRAMLSDYLDRHIDGGFENFVDEYFEGTYFLTELLKTAYRYYCREKLPVIRKALKLVLAYNLTLHVTMVEGLGGEEEANLGKVEDSQSKFCGKTVAPVMINFQVKCALADMWRELQKDVLEELSSLYQSVYSGDKLKNWPTIFMLAAILLAVWELIQFDCNYRVPDLGAVNSFCSEMEGTPVGVIVGLFSAISQKLPAFTEWDSRKHHHLLNSNPAVCDAMTEVRAHVTKYEGYLRSRSDCKFDRSDFDSLSNKFLSKLVIRAN

SEQ ID NO: 42296 - protein, 488 aa, Oryza sativa
MDAAAREAQVQGSLEWRVTVPEGSSVTVEHEAGVAERAWAWVVRMLVAVRAAVAGFARKVWKIGADDPRRAVHSLKVGLALTLVSIVYYTRPVYDGVGGNAMWAVMTVVVVFECTVGGCMYKGFNRAVATASAGLLALGVNWVADKSGDKLEPFILSGSLFLLAAAATFSRFIPTVKARFDYGVTIFILTFSLVAVSGYRVDQLLDLAQQRMSTIGIGIVICLAVCVVIWPVWAGQELHLLTVRNMEKLAGAVEGCVVDYFAAKPAAAKSEGYKCVLNSKASEDSQANLARWEPPHGRFGFRHPYAQYTKVGAAMRHCAYCVEALNSCVRAEVQAPEHVKRLLGDVCTRLASQCARVLREASTSVAAMTSPKTLDFAVADMNTAVHELQGDLRALPPVLALEPAAEMSLMDAMPLFTVASLLIEISARIEGVVDAVETLASLASFKQVEDDDDKKGQTEMKVHPLNVPDDHDASTHESQTTTKHPEQV

SEQ ID NO: 42297 - protein, 823 aa, Oryza sativa
MLNALNKKIESKTGVASSPVLLPLATPALPAQSSLALSGTGEDELSDSKKRKTRPNTLYDDYEIDATSRPLKKIGVPVGASPPPMMPQYVAPTTPTPVPPKKAHTPRGRGRPVGRPRGSGQHAANYAQPGTYEPEWDEDYEDYEIDNDSFAPKGVGRPPKAKRPPRPQPRPVVPVVPYTPVAATLTPPPGRKRRTGQYLPLSAPLQQCAQIATALMKHPMSPPFNIPVDPLALGIPDYWTIIKEPMDLGTIKSWVDGGAYKDIHEFADDVRLVWRNALTYNAPGSQISVMAQTLADFFEQKFTVLINRINNPEAVQSSPVAVEPVVTTSPLPVTVQRVEVDPAVLQRRKEMQETLNDLRGLLRSLDKQVTELKKQTANLPQPPSAKPKARSTRASATRPPPKRRPRDLNLKPMSYEEKCKLSEDINNLNSEHWAGVMAVIEEEMPQALKNDTDEVELDIDTLDIVTLRRLEAFIAECQGKPAVVTVTQAPTAAPVVSSPPVPPREPKVKKPKDDEAKQKPKRQPRKKTGPPQGITEETIRETERQLKAVNQSLTSGNASLKNIGDLESKQQSNKEALTRPKKGSHSSSSSDSSDSSDTDSDSSDDGSGDEGVKKKKKDKHHATGGKAPMTSKATEGETAGEETAAPKILTPTSPLKKEVVLQNVESWTALDESKPEEGDSNSTGPNNDSLWSEFRTKGQQNKQRMKEREDLEEKQRLEREKKERELKEEEERLKREQREKQEEEERKRMEEMQRRREQERLMREQQSGQTGPESSSESAHQSTILQSMTEQSEMLHSFEHQLMGHSMDTENKLPLKPVDDEDL

SEQ ID NO: 42298 - protein, 245 aa, Oryza sativa
MAATADPRAKPPTAHHLKPWVPTPTPRSHRVPSLPAVSGGGGGGARPARDRRRSSSSSSHRRGGTTTDAGAVDEEEVVEAYDGGLEDLRAKLMGHIKDVADRLHLPQPKPQPRSPEPETPPAPAPLPPPPPPPPDTSVAAAAAAARPWNLRERKRRPSARGSTAASPTTAWARRADTTRGGGERPPFAVALAAEEIEEDMYALTGGRPRRRPRKRPRVVQRQLDSLFPGLWLTEITADAYKVPDD

SEQ ID NO: 42299 - protein, 777 aa, Oryza sativa
MVCLHLWPFASPCSGHGVCMMADGVTPAADPNAAGAFCLCDNGWSGRGDWVDRVGSDCQMGDLPFTVLWSIALLFCFTCFAYALYSLITGIASYSPAKAKGVSRVGADAGVGASKLAAANANANGVGAGSPTHQRQPQSPPQAQQPLQQRMASFHPKLNGAGAGPGAAYAFGRTSIAVVAVAVGPTGTAGGVNAAGGGGIDSACNRRCCESVSACVTRTRGAFAASLATRHALNVVFAAAFATAVCVLRISRREMGGWDVGVTVCQSIASIGMGGGVLYLQYGFIRLQLALVQFQRAERDRIEHALRLLRALLIAIFVLCACLGTSVVRISYLFWAYDNNRTGQSTSPFPHTALQSVLYVCLGCQSLMVAVSSHITTPALVRILLPEHAKRVAARKRAAIAARSAVFVPDAQKFVPNAADDAAAIAAAERPGGGDEKSVLQLESVNDSVHAAADAADAKAGVTSKLRTTPDASVLAPLPLPAGGTTAPTNTAAGSQVAASAAAAAAAAAAVPAVMSSPPRPGHTRVLTVRIEPAATQAPMPLTAAAPATAHTNGSAANAVTPTAAAAATAGRSSVAVPRAVSSPHSPHSSHSPHAAGPASPMAQPQPQLETGSLPQVTQQQRASAQAERAARERHAREDERAILATKLLLLDKRAFTFLRSDPIIYFSFAFWPLLQGMTAYHAATQWCSTTFAATAALYLLTRTTPSTSAKVAPAPNGTGTGAVEPTGTEATLLRSSLKPDAPQPPSPSPAPAPAQSVRAAPAPPAASSRPLPRSSA

SEQ ID NO: 42300 - protein, 520 aa, Oryza sativa
MTRHSLCFAEMPHSSNIYASIEARELCSEQFAKDQDSKDELSKLRSEFIIPTKNDLRNRKFGFQQNNNSSAQEKSNDESIYFCGNSLGLQPRKTKEYVNRYLDTWASKGVFGHFTDYEGGLPPWLHIDEAIKEQTSKIVGATPSEVVIMETLTANLHLLMSSFYRPTKDRWKIIIEGKAFPSDHYAALSQIAHHNLPPSSLITIEPPSASSPYLSNEHILSIISQHAATTALVLLPGIQFYSGQFFDIELITRHCHALGITVGWDLAHAVGNVPLKLHDWNVDFAAWCNYKYMNGGPGVIGGLFVHEQHGKVEQLSPPEGTEKSDSVVGDSKHNNDTQLLYRPRLSGWWGSDKSSRYRMENQFVPIPGASGFQLSNPSALDMTSVMASLDVFAMTTMDALRDRSLRLTGYLEARLLRYEGGDPPYTIITPANPAERGAQLSVLLKQGLLDRVLHHLEENGVVVDERKPDVLRIAPAPLYNSFHDIHRFIIIFHEACRRAIERPEGAEQHSEDVPDGIAAT

SEQ ID NO: 42301 - protein, 471 aa, Oryza sativa
MSSYALPKSHQDLMEKSLVDTDNEVAQIMEREIQRQRESILLIASENVTSRAVFDALGSPMSNKYSEGYPGARYYGGNEHIDAIELLCQKRALEAFGLDAEKWGVNVQCLSGSPANLQVYQAIMRPHDRLMGLDLPHGGHLSHGYQTPQRKISAVSTYFETFPYRVNLETGLIDYDQLEQNALMYRPKVLVAGTSAYCRGIDYARMREIADKVGCYLMMDMAHISGLIAAGVNKSPFPYADIVTTTTHKSLRGPRGAMIFFRKGVRKTDAKTGKETLYDLEGPINFSVFPGHQGGPHNHTITALAVALKQAQSDDFTLYQQQVIKNAKQLENTFKELGFKLVTDGTDNHMVLIDLKPFSLDGARVEAVLEQVNIACNKNTTPGDKSALTPMGIRIGAPAMTSRGLGEADFAKIANYINTCIQICKKVQAELPKENNKLKDFKAKVAGGEVEEINQLKKEIAAWAVTFPLPI

SEQ ID NO: 42302 - protein, 139 aa, Oryza sativa
MLNIKPFFYGLTVNKVYDDGNLYEPSVLDINDQVLSEKFYKAVNNVASISLALGIPTEASLPHTLINGFKSLLALAAAEENITFKEAEEVKAYLKDPSKFAVASSSAPAPAAASSSAPAKVVEEKKEEEEDLDMGSLFG

SEQ ID NO: 42303 - protein, 645 aa, Oryza sativa
MMDHDSEAASSVTGSEGAEPTSLAAILHRMVRPNTTEVGSGAAAEVLTPADSGDVEIIDAAALAKGGAADQQTAATAAVTAEGEAAAAAEPPLTREERLAMARAMDENCKSLTALLEHMRDEEQRLKDLCKEFIIRDIAEENARIALTRRCLKEQKATMQSAAYVRWAADKKKGVLAHGAFPSEKSDDDNDEDGDEVVLHESADDGGSLAVAKKTAGAYAFHEEGLDAWYMQLDGLDTDHHFVTVPGRVFVLCSALVQYLRGWRSSNANIANEIEDLEQARAELQVSHGEPVVCIINGELAWAPPAHSPADPGQLEAFSTYVQRSRRGAASASAMQWPDSIEERHALWLGWRLQCAALTPLAVVLPKCTRAVAALRDDGADVVAFAPLSWFVNSVQLRVLVRAGRIVCAESPLPDASLHVAANIKPAEVLEYLQQSLDMAPSFAESNELRVLCCSASRKGEDGVTHVAVQGGGRAGPESVFDRFEWSDVCGVAQRCKMATDEGTAFKPVLRAPLARVAELEWNAVEQQRPEEESPEGAAAAMIRAQEAEIMTAWCRVLTQGPPPPPSLPVAASAAPSTSPPQDKVPTTRAAPDDGSSSNGINAHGRRSSNFALYAAVALSAAACTTLLWRAASAALGNNGRRRGL

SEQ ID NO: 42304 - protein, 594 aa, Oryza sativa
MLRAVTLVIGAALLASVVPSARADLPIHCLNNQVAGSWVFEMSADTYDKSESCGYHAPDVNALHFTKKPMKFAVARKMEFTLVQPNQVHDATGKVIGHWTMVYDEGFEVVVDGITFFAFNKYVPKKHTSLNSEEVGDYVSICDKTMVGWFHNRDRTRFGCYKGYQTAKLRFRQTAAAAEDTETEDDRVEESESTTAAAAAPAIAFNPNHVVSPFAFEADSKDVHPVGTSAVAVAEDSDEEDASEDLAFYELEQMTSANRHDSRRNVVRRSPVRGDDEVFAPDMSFVEAHNSNSQSTWRAGVHSEFLGKRMAAMDQLLSRRRFVKVHANAAGSDSGDVGPGVPRGPLNKKSRKYLSELSKMPKEFSWIKYDSPVRNQGECGACYSLAAMTVYEVRLRIKSQMKDKTIMSGQDVLSCSRTNQGCEGGYPFLVGKHATEYGLVPEACVPYKASDIDCDSVRFTSSSCANRRYYAKNYRYVGGYYGSCNELLMMKEIMRNGPVIVAFQAPSSLFYYTGGIFTGPPPKREGATEHGVRYWEQTNHAVVAMGWGEENGHKYWIIKNTWGPKWGEKGYFRIQRGTDECGVESMATTFDVVL

SEQ ID NO: 42305 - protein, 983 aa, Oryza sativa
MVAKGKRNPANAHDKRHENGNAAPGRRITKQKSSSQLIPGGAAINSTAPNARNTTPPPVPSHADTTTAAAHNTTPMTHPAGHDHGLDHGMSPAHNTPMSPMAQHDRARAASDASFDNRDPVCRLFDPATGSYGPPSAPRRQDKSAHVSMASILAVPATILTSCPLRDVLAILIILLQLPPTVLTVVQFLFATLTFVPPQAGTPLSALSALPSFTDIFQGSGGTPSLFTTIFADAFILVIWLVLWVPVQNFFPDLAQAVIAIALGGAAAGKNGTTNSIFICFFIILSNHLFRFRPLRQHIVHFLWTGLARGGLDFLASPPSTPTTSLEGFSSPHGWPRSLLGIHILAQGVVRIIRRSLSRRDATPSLPTGKKTDPEAGVPARANSTALDPTADVPNSSSTDGRPPGPSPAAHSKTDKASSSRRKRKQATHVRSQQPFWAALASTKVTVLKEMESSRAANDADEANAKDANHIGNAVWRSEDDHVWVSEVGYADISFRVSLYSGAEFREQLEQDSSPGSGIDKSKPFYIRVNGADWSSTRIRQSTSLGYQGQEGAGFWVGEIFGLTALSNYYCEFVRTVDNEVFYSASLITSASPVAELASVASPPPHQTLRPSSPTTTLKNSIAAADQQLQEHRNRLKRNKKDHKTAISTIRKEVDTLSNRLANAGGSDERQRQRVLQFTQTIRQADDSAADFALQVDNLGEIPEDEAQEAAAKKAEWKRERDSKNAISGEFDNIKTEIERQIQSIESDVAATLQKRERLQQRQTRLNEQHDRLVTANAEGFTAKQRREQERAALRAQRADVENQYRSNINGFERRTEEHHLSNSQMMQTIQHYEELLLHQSQQHMSVPTTPEGPLPGTSMSPHANTFTSFTFPSLNSHINSTPGSLRNGRGRSSSMLSNISGFTDGFDEPHSPSGFQLGNPFHAPHLNGRNGSHGSGSLSSGTSSQSSSQRDPMSPVQAVKPMMVRSPTAGSAGLMSPIGTGR

SEQ ID NO: 42306 - protein, 545 aa, Oryza sativa
MSGYDGGYGGGGRGGGGYGGGGYGRDRGGDRGGDRNGHGGGYGGRSNGNGYGGGGGGYGGGGYGGGGYGGGAGGDRMGALGSGLKNQEWDVSALPKFEKSFYKEHPDVANRSDADVEAFRRKHQMTIAGTEVPKPVETFDEAGFPRYVMDEVKAQGFPAPTAIQSQGWPMALSGRDVVGIAETGSGKTLTYCLPSIVHINAQPLLAPGDGPIVLVLAPTRELAVQIQEEMKKFGRSSRIRNTCVYGGVPKGPQIRDLSRGVEVCIATPGRLIDMLEAGKTNLRRVTYLVLDEADRMLDMGFEPQIRKIIGQIRPDRQTLTWSAAWPKEVRALASDFLNDFIQVNIGSMELAANHRITQIVEVVTDMEKRDRMIKHLEKTMENKENKILIFVGTKRIADEITRFLRQDGWPALSIHGDKQQNERDWVLDQFKTGKSPIMVATDVASRGIDVRNITHVLNYDYPHNSEDYIHRIGRTGRAGAKGTAITLFTTDNQKQARDLVNVLTEAKQQIDPRLVEMTRYGGGGGRGYGGWGRGRGGGRGGFRRR

SEQ ID NO: 42307 - protein, 342 aa, Oryza sativa
MRWPYPFSEGKMFVLTIQAGIEGYHVSVGGRHVASFPHRMGFSLEDATGLAVTGGVDVHSIYATSLPKVHPSFSLQQVLEMSDRWKARPVPEEPIQVFIGIISATNHFAERMAIRKSWMQFPAIQLGNVVARFFVALSHRKEINAALKTEADYFGDFVILPFIDRYELVVLKTVAICEFGVQNVTAEYIMKCDDDTFVRLDVVLKQISVYNRTMPLYMGNLNLLHRPLRHGKWAVTYEEWPEFVYPPYANGPGYVISIDIARDIVSRHANHSLRLFKMEDVSMGMWVEDFNTTAPVQYIHSWRFCQFGCVHNYFTAHYQSPWQMLCLWNKLSSGRAHCCNYR

SEQ ID NO: 42308 - protein, 398 aa, Oryza sativa
MGERQGGISQGTEHLLIAAGSIGATIVIVMIVLGLYTMRKRKLSFADVIRKGKDSLRNRGTPPPPPKYDMDKKQSYDDDYMYVGKDIYPPRPAAAGSRSGSLSTQTPLHPLAQSNSFNATELNRNNSTGKSFVLANAPTRQPSHRRDISATPSSPLLPIQSTRQSDSTQNTRSLRDEEEALESTSPPRQLSAQPAPPTFRQFLSNRPSASQRPGLGGGAMAGRFSWTNSNAPQMPHDPSRDTAMAAPALGRDSFMTSRSSIPRFRTINSWVNQQSTRIEEQKLKQQFRMTTSTTYSDDGENVPDMPPVPKCPEGTEGTKATEATEVKEATAGKDGKDGKRNVGVGTGVTGAKGLKHQRHDTVDTAPIFKAHPGTEVRFSTRSTVPSEVLDMGRRNAAL

SEQ ID NO: 42309 - protein, 351 aa, Oryza sativa
MWEERAEQGLFRYDVTACPTKVVPGMYGFVAQLNEGRYSKKRPTEFRVDQVVQAFDPNKFNFTKAFKREVLFTFEPAPPGRDSSFEEAGRCNASPNIVLINVSPIDYGHVLLCPKVLDCIPQPLTPETSLTALHFAVEVGNPYLRVGFNSLGAFATINHPHFQAYYLNAPMPCERAPTTPLSGMVKRRRPDSAADSVRLSKLCDYPVRGWVVEGSSLAAMAQVVGEACQVMQAHNMPHNVLISDCGARVFIFPQCYAERQARGEVPDHLLDYGVNPAVWEITGHMVLKRAEDYTTFTEAKAWELLAAVSLSEEELAAAAQLLFGGGAHSESLAGVTPAGPVEEQAAVAVMA

SEQ ID NO: 42310 - protein, 495 aa, Oryza sativa
MAIDTTADHGGGAGAGGVDIPMQILVQPPPLPPPTATATARHRRTHTGDSTASSYEPQRRPVEHQVSSMHAATASDDGGGVDDVVPERKVTAFALHVAVLEKAASHVGAVCFVWATVVILGGFAADLDARDFWLVTAILLVEGTRVFSRSNELDLQEQPMHLPDAAAAAAGDDDDDPPPPHKAAAAASPIHLLPLGGWLVEARNVSYVLYWLQLLSASACVALSLLRLATLRFAGDNGGGGNKNAYYALMLFYVLALSEAVIFLVERAYWEWVLSYRRLVEAVSGECDLGDAGVVPIKRFFYRAFSRSVEGGILDATRTDLVSFAVELLSSDSGDEQLIGAHILRGSIANRDSARRAVRKIGTSAATVERLVEMVSWKSPSKRRVRSLAAEVVLRLAGKRRNLIRVAAIPGAIESISTLLETPTTDAAAGDLAMNEMGLHIMKKLAREHGNAAKISSTRGVLSRIIHFTRTSRAALQICAGGEGSLPAKTVLRSL

SEQ ID NO: 42311 - protein, 686 aa, Oryza sativa
MSTLSPETFSPVEDGQKRLSWGLTSLFEDPISYDVMEEPVMIPCGHSFERSSITAWLQQRRACPVCQKNTDPSKIIPNFLLKQIIDRYAQKREEVRPASQSAPSLSVIHVASVPHSSSAPSVASSDSSLTDSSSSSTSTTSSSSSSSSSSSSSSSSSSSSSSSSSSSSTSTLSSSNSPLSASPLRHDGVRGRILFSESVAKACDIRLISISTSVASIAFMGSAAQWSTVPALPPLSSGLHRWECNISRTERGTIMIGVMTPDAPSGRGRYLGDSPNGWAILGVNGTLWNNGRKEKFSSSSFRSHHTLTVILDCDLRTLSYELNGNPLGVAARELPLPLCFAVSLYHPGDRVEVTAVSSSHEDAVAPLRFQAPLLPSLQLQPPSGLTHRGDSDGWAMARLEPVATGLHEWTCQIRETAKGTFLLGFMNPTVQLADGYYLGSDSRSWGVLGINGTAWHKGNKTKFASSLRSGDIITVRYNAATRSAEYLHNQKSLGTAFSNIDPPTSFAISMFHPNDFISIMYDADSPALLPSFVVPSSPLLLLEGTTVRHGPKEGWATITLSDTILPGAVSRAVFKINSTLKSHILIGLCAKALPLPDYLGANATSWGLLGINATFWRSGNKEKLPLNRFSTESVVRVTLDGIHNTLSFSINDDPPVVALTGFSAYPAHFAVSLFSPGDSVSLLPVP

SEQ ID NO: 42312 - protein, 541 aa, Oryza sativa
MAPALLTAVDATAQTHLIIGSNPLAGARCTRSIEVGANPILIAPEDSTLHYGLAKRIEAGEVKWLKRSFQEDDLTTLGRAEVDGVVDAVFVTSGGKHTSATHISDLCRRLRIPINVADAPNLCSFTLLSSHSDGPLQIGVTTSGKGCKLSSRIRREIAASLPPHLGDAVERLGSLRRRIWEEDHAAELSHDLENEDEDSGQSATFNKLILEESKEAARGRRMRWLTQICEYWPLRRLASITDADIDTLFREFAASSPSKIGPTSTTPERKFGRIILAGSGPGNPDLLTRAAYKAIQSADLILADKLVPSPILDLVPRRATVHIARKFPGNADKAQEELLELGLEGLKAGKVVVRIKQGDPYIYGRGGEEYDFFRAHGFIPSVLPGITSALSAPLFAAIPATHRGVADQVLICTGTGRKGAPLDPPEFVASRTLVLLMSLHRLSGLVDDLTKKGYPKDLPVAVLERASCSDQRVIRTSLEHVCAAVEEEGSRPPGLLVVGNACRVLMKHEQRWVVEEGFHGLDGLGSEGELEVGRVRDAVVA

SEQ ID NO: 42313 - protein, 422 aa, Oryza sativa
MALTYTSSSTGLPSNQGGSSKGGIRGGSALVRAVMPPRGLQHCAALAAVQQHMSAGALLPFTCDGNLWPQQRRHAAVQQQPGHAASHLSCKSSSSGSSSRLRAASFSRVAASATGGSGSSSSSVPGVPQPPGVVPANLQNIDPSSIDPNGLAGLFMAYAMQIQQSLEQQQQQAAAGGSPGASLVAQNLTFHPPGAEQPLLDDVSFNLKPNQLGLIIGRSGSGKTTLLQLLAGLSEQTSGQILIHRPQPGSHASGLFVPTHIEQRMQQVGLVFQFPERHFLGDDVMTEMTFTWPREVAYWGQRQAMAVRMQRVIEAVGLTDIPFNISPSDLSGGQQRRLALALQLVRGPSVLLLDEPLAGLDWHARREVVAPLRELKREATLLVVSHDLADIAPLVDCAWRMQMGGRMEPVQWPPDSLSDMED

SEQ ID NO: 42314 - protein, 91 aa, Oryza sativa
MAPRPPSTRLGPWASPVQGRQRTALTSWLGVMRMASWALVGLTTQTASCSRWMSGCAHRWQLRHCRTRSTSPRTRRASWAVTSSTPPQGCR

SEQ ID NO: 42315 - protein, 229 aa, Oryza sativa
MSSCETHKVAGEPESAMNKALETGAAAVQNFAPVKRICAHLNAFHAYAHDPMRPAVEANHYCSHLNEDVRQCILYDSPEPPARIIGIEYMITTRLYNNLDEEEQKLWHSHVFEVKSGMLIMPKPAAMPEAAWEAAENKEMEEVIHLYGKIYHLWQTDRGDTLPLGAPQLMTSYTEAGQMPNFEEKVKERDARFGSDFQRKKQAREYIKEPVIHKNADAAWAKVGHGFRG

SEQ ID NO: 42316 - protein, 748 aa, Oryza sativa
MKSAVPSVAQKARLLLQTGDRVVTGSSPSGYALETAVRASAHYATSTPAAAAAGSRHPGAATAPTPAGAAAPTTAGKPQAAAAAAGQPPTSSTAAGAPTPETAGAASAAAAAPGSSSSSSGQTAGPGDGKQPGKGKGSSWLTAALVVAIPAGAYYAYDQSKHGNDTGGTVPELSKLPPPSLSPESLGSLVERSKQALSSIIPPQLAGIMGGGAADKKASDKLHHQKQADVASGFTMLPPDGSAAGAAAAPSDAAGAAGSDAAAKGALSAAADEFPGSSGQAAETGPFADAHIEHVDMAPIHALFSEVAATGLPSSAARSSASSSTSADASSSSSSSNISAEAAAEDASRIVAAMSAVAASRSAQEEKQQQAAAKAAAAPAAQARAATLDAAPVAVKDRSDSELQLLSKQLGLSQDLSPAGLIAAANSLGLGSSSSTGTPLPPQLAQLNQATADARLLGSLLQQLATQQALLQQQLATAKQEAAWAEEAARKREDSLTEHFKELMREQSRIQQQITAEAVRAAEEAVMADTAKAHNEERRQRGAAVDELRAKVNALSLAFDQRTAQVRSAHEVNKISLGVLGLSRALEEGKPIGEQLQLLAAGCPGDPVVEAVAASLPASAATAGLPTLQQLQQQFKAVARQAAEAAYFAGEAEGGILARLVAKLAVQLKVDAGSTDGGFDSNIAQARSLVLQGKLLAAADALSAAVAGTQAAAVVAHWVESARARAVADQAMKLLQAHATTTAVTAGQ

SEQ ID NO: 42317 - protein, 214 aa, Oryza sativa
MCCRPTSAHSKVRTRSAILASITLIGRVCTRPFSSTSSRSCRPSTRRCRRMWPTRSCRRRLHRTTRFNSPFRTCSRVCTMRTRRTRCLRRTHTLCFISSCVLRRPLTTRPAPPPRVRSKSTPSPAPTPRSTRCTTPCSVAYRSKCRGTARTARPSTVGRCRPLTASTRTAGLRVRQTAWPVSRATRARAGTWRCTGAALTRTRRRRGRAALSAP

SEQ ID NO: 42318 - protein, 822 aa, Oryza sativa
MFRRKNRKGSTPSPDVYRPSGAPVRLIPMGTVGEESIASHDVMPPNPDTHARFDAVNEPLVQDFASMHDESNTHEGKPPLTPPADGSELERPADWLSDDEATAPAPPDFTRRGIHIPSRTSSNTPSANKKRLSMQRRLSADAASFNDPPIPGPQQKLRSASHTPVSTARMGYFSGQAKRVNGTAPNGLRSSSSASINSYESSAPDSTTQPIGPLQQKSNVEDGDRLSPLLEDDPKSFDLVPAPPENDKGLFSLEVQSEQLFSKEHLEAIFKDTPSLIRFTTFLSATRPKLVPVLVYYLDALKASRAIAYANAVAEALEPIPGLAFTDTPARPTMNAVLEDKATKAFEVLVRDALPAFITHVFIQVVSVSISKRVVGNLPPMLRDASEGLAEVFCLTDPSRTDNPIIFASEAFHRTTQYGVSYAIGRNCRFLQGPKTNRASVDRFRAAVKSGHEHSEVMLNYRRDGSPFMNLLMTAPILDSRGNIRYFIGAQIDVSGLVKEGTDLDAFRQMLDQQEGYGETPEEKDEFHVLSEMFNSSELETVRRHGGNMHREHVDDSDDTASIAYRPRVLIRDQDAYEEQPRLETASPRADGRLSGPYKHYLLIRPAPSLRILFTSPSLRVPGIMQSHFLDRIGGSQRVRDSLADALSDGTRGVTAKIRWLSHAVASLDGSHEEGRPRWIHCTPLLGQNGSVGVWMVILIDDKESTQPTRRFRPAPPVANDIGRAHQRQADAARSINGIYRTTDFLDEDTDHSGYSPRVSLNGQGMPKHVAIEGLRQPESPVARGQRSSGSPRDQRALRTTASNGGANGRESGANSVRSFAI

SEQ ID NO: 42319 - protein, 818 aa, Oryza sativa
MRSVALVLLLAAASAMVLAAQEPRSAQVEAQFAEVSAALHAVDELEAEAALDDADEADEAVDLDADADTDEEVDAEDADDPIVEPTEESFESDGDVVFASLASRLSRAADGLPSWWGPSQQTVDAMHARAREEQRPVAELWSDAAERLYTDGADLHDLHDAEIDGVSAHAHRFAEVEQGTSLSAALHAQLAAQATRRAEAAERRSQSSLSHGASGADICRAIVAAVRKYRNANARGGSAAIPPRDEVTSGVLTAVAGATEADVEKLWPIVVHRLLYRGGDLTETCSGNALGLALRAVVRTHVPVGGVLRDFAMGLEEEYSDVRMNPDSENVAGLAVSGNVPLPRVAPYVKICPDHTMPPKGYPPSTPYGIIEVATGPLPISWEARAAHRAVSDRWRAPLQKPTVLAEGNPMSLERLTRAFNRDIPEPLKSYVMPVEKLRDDHEEFAITNYPNENMPINSIQTNFEVSLCALYKNADFLAINQLPGQRDLWLAAREAAAAYVSGKGAHRMHSIRAEEVAALPAQQQCELHGLFTVMFLHGAYWGAQSGVKVGGKDVQSIHPYGGTPKNFFSIMVKTNVRDIVDRMPFPASDLLHAWYESSLGATNRARVRLDMHTCLVDALKTKHWTVATYAGPVISWRSKPDAKGRRPPASPLRPWLAPDGEYMDAVIRATGARPLYKPTSSSPIGDRAPPAAVYRDPLQKTPEQQIVVVCEARFQTEPLNRAMTAQGVQGLPKGADVEAAGQALVAKLKSAVSRFERDAETHSSVTGVHARHAPPKPAEASPSSSPSPSSSSSTVTPLSAPPSTESAPVVATANVAQ

SEQ ID NO: 42320 - protein, 683 aa, Oryza sativa
MQGRKMKSAREMAREEKNHHHHHHQQQQQQQSSSKGQAWFCTTGLPSDVVIEVGDMTFHLHKFPLMSRSKKLHDLITNRESRAAGGGEQDEEEEEDAGEIREEEVVLEVDEDSDVHRIRLPDFPGGAEAFEQAAKFCYGVKLDLTPATAAPLRCAAERLGMSDDHSDDNLISRADRFMSHTVLRNPRDAIRALRSCEGLLPLADDLGLVSRCVDAIAAKAAASTPTALFGWPINDAAAAAAAAAGDRPRRKNNAGAGATWFDDLAGLSLATFTRVIAAMKERNVGPEIIEGALIAYAKRSIPGLSRSGRHVGGATAAAAAAPSSDGEQKAPLETVIANLPEETIKSNAHTGTAMGATTARVLFGLLRTASILQASESARDMLERRIAARLPDAALDDLLIPSYSYLVETLYDVECVERIVRYFLEGRDADDGNDDGSELETPGREASRRAMLAVGRLMDAYLGEIAADANLKPDKFCDLAWALPDGARVYDDGLYRAVDIYLKAHPGLREEEKEKVSGVVDGRKLTLEACTHAAQNERLPLRTVVQVLFFEQLQLRRAIARTIMANEGGAAGQGEEEGDSDAGGTWRVATRGNQMLRLDMDSMRNRVQELERECTSMRKAIEKMDRRGGGSTPGERGATPAMEGRWGSMVTKRFGCKFPAQVCQSQQRTVVARPRRPRIEQSP

SEQ ID NO: 42321 - protein, 575 aa, Oryza sativa
MASLISVPNETESSSVRTTKDGRQIRYNLKVIQQPERARACGSGAKSSADRRPVDPPPIVELTVFENGQDITFAYNANFFLHASLENARAIAPGRSAPNSSNCPVLTGTPVAGMAYLDRPVPAGYFIFPDLSVRHEGKYRLSFSLFENLSEVKDPDPDDPTVIHNGNDFVSHRAEVKSAPFTVFSAKKFPGLSESTSLSRMVAEQGCRVRIRRDVRMRRRENKSSKEWDEYDEEGGGYEQARRRTVTPDNFAQPPNIPVDDRPRSMSNASNASLAQQRRPSIDEMAQSYQANNSYSQMPPPQTTGYTQVPQFNANTYQPQYSAPPANNIMQPPTAPYPQHTQQAAYPSQQSMQMNQSYNYQNYQQPQYDQSQSARQDSNQEYNHHNDYNRRTSVSQTQQQYPGPSQMMPPYSPVEQYNRPQQMVQPLQPLQTSPRGPGGVQSNGHTLPTLKTLQPPIAAEKLEPISPVYQTPPSAMSINSDNSHQNYTYNKFGSGSLPPMSATSAGQKRSFSSSFDNRHANERLVQGARPNPASSGYGYETCDSPDMEEPIDRAAMSYRRADGTQRQRHVPEVGH

SEQ ID NO: 42322 - protein, 764 aa, Oryza sativa
MLAEAQALSLREAGITGSSGSGSGSALEPPRDGRRDRRSRSRSRRRHSPGASPSRIVIRPRAIEHQSSLRSLLSSSEIDSADVDEELVRQVLEELVAEGVDLGQIGPSQEEEITERIAEVVRRRQSDRHAERQRERRERRERLAREGLTSSSSTSLDDAARRRPHSGTSTPQTQAAGTGPPISRPGLIDAANRGGRGQHQRSSSQGSSRSARRADRPAALSVPNAPTARRRQSDQGQPSGTDARQQFRNSLQTSTSANPASPRGLGFGLPASDSPTSSVAVVSTPAHSPPTSTPAVTPFQPPGARRTTDPAHGRHRSSSNQGTPPITSPPTFPRSITDPAATTTPALHTEPQVSCKHCGREHIEHELHYHCSKCDDGTYDMCHRCYRAGKGCKHWFGFGWTALARFERDRPEGGYTSNYELPHVLSGRRYRTPLTPLTESTSPPHVLMSEDDPKHRLEEGVFCDSCKAFSNACYWKCDFCNEGDWGFCNDCVNQGRHCTHPLLPVANEARNSTTGNTLATPPSLTTPPLGGTRGTPPRTPKSASFSRAPGYSTIANLVFRPLNFTTLCNDCRNSIPPTNTRYHCLKCNAGDYDICMACYHKLNVSGRITREDGINGWRKCLRGHRMVVVGFEDRDGGQRRIVVRELVGGYTLKEEETTNSGARSPTSTSNPIREWKWRDFDGNVHNYRAQSGAAIPAQRFPPDGGVGLRLKARWNYWPEEGVKDELAFPRHAGIREATDINGDWYWGVYCGITALIPSGFVTAV

SEQ ID NO: 42323 - protein, 732 aa, Oryza sativa
MVADDLYEKALPVLHNDALDDEDKTDQLEELMRKETNLTGKSLENIVLDCLWRYRDAGSSSSSPPPSRHTVIRRPSPAPWQQNRVPTPVSNSPRTINPPPGFGIAPPAFTRAKSSTASPFTSPRPSPRLAFSSPHIPHSPSLSAYQFSEGVSPNTDLYGDLDSHSVDWLVNDGTGSTESSLLGDGTLNGGAAEWVQPQTMDMGPYDMLRSILRDDRSDEELEKVLEANGFDLSAALLALMGQQMEGQQLSSSHQDQPGYLIGKSMNPTFPPATPAGQQKSNIVCKYFLSTGHCARADCRFSHDTSKTLCKYFLNGNCLAGETCLFSHDPSALMARMAISDVSTPPLQSSLPNFQMSDYEFPTLHPNGSPFGTPQIHTPEATSLEQLYGLTSSATTRPPPGLSPFPVFTPGAGSRPQSRTGSRQPSRATTPSVLAVDDNEAFPSLGSAAAAKAGKRHHGKRGGHGHKDVAGPNNMADVVRMSPAPAPATPVRKGLRTAKSFNGTRENSAAAQAIPAPQHIPWLETGEKGNQAYLKARAEAFKHGSLRNKFLQSAAQAWNRSDSRAAKALSLRGQSENNLMREAHREAARILYEERNKDTDNATGLYVDLHGLHPDESVSYLEGILLKHSSSSRPVYAITGTGHHSKNGKDKVGKAIRGFLNEWRYAFREFSVPGDRNNVGGILGIDPSSYDKSVAERPKDSDTEQESAKKDTKIRIMKRDEFLVAPKGPKRAV

SEQ ID NO: 42324 - protein, 841 aa, Oryza sativa
MQQLDPYAHRMEELPTEKELYESLKFMYVTNDVMEAMFALHYRDPSKYHPRYLSRMFNLGLPRTHAILRIKHSEKKLLATRDAHKPPHSDKAPFADPRFTAHIRQNLHRAAQDPENQLHLERAENYFWMRMSFSADPNSYAVLQDATRKLERDLLAGNIPAKPPAPEELLADVLKLDTKLVEEAQRQTTPEEDDAQLEAMGKAEDAAADAIEKAAAEPYDAAKAAAPGAPASADANAGLDPLEADEWLPLRDQADRYTALLKSKRIAVNAVDLSGTAAGAALPGETAEQRTERMARAAAIVDARKRALKAVGAQYADDLAENTPIPSKEDEQKHAATLKGRVFGISADPLVRFYQSEAEMLAHVREPDQEKRLGMLEAAAARDAAHRDGLDVSQDPEHDFYDSGVDPDIENSEDYDPSAQGVNFRSDVLHPELQAGRFFAFDPPNMQIRGRNLRQHFLNDYDAYHFEQTEKKRADLFLDRRQTLGARESHLLGKYGPLGADLPPPKPPVLLEKGKGVKGMSARHHWVFTDLKRKKDAQYEIVVRDKSGDLRTLSHREYVQMRTSTAPRISGSAFTYTNKPAGGYWMTDAERAVWAASQEDARVKAVELSRFEFLTRKAVERGLEWKQYMEARAAKGDARCRGSLLRARVFPESSEYAEYASKTPYAWETEYRDSANGKALLERIDGERKNVNWERDRLHERAQRLAERAARDRQRYAAELATRDAAAAEERAVEAKLDSALKRIGAEYSVQQRAREGLEMAELVKSVDRFAEENPDEPYPSLAIDGASPITFRLEVSTSLRDTAEESEDTADEPDDTDPEAALKPPAAVAATPASSTAPVS

SEQ ID NO: 42325 - protein, 568 aa, Oryza sativa
MISTINFGQPPSAAHARLSTSSSPQPSMSSSSESPADTPTFDTTGFSTADSLSEERVVSRDGSDEIVPKIEETELHLADVKPEPVGDDTPISPTEPVRLRRARGRPRIHPPRSPTAASKQAKARSKTGCTTCRKRKKKCDETKPFCLSCQKNNIHCEGYKPVEIWRSGKEKAAEARRMSVELKFELPPLMSGVETDIDRTLLQHFVSRASAVLSLHGDQSTNPFTRVLLPMALQHEGLMHSVLCLSASHMCSITPSQDFEDRQVFHRGKALQLLNQDLQRQKAGEGGTMVYEDSNVAQILIHLLHATCDGNTSGEYRMHMVAARKIAMSQKLKNPEFQSLFDEFFYYHWIASEITSLDGTEVPMMENFSLPFSINPETAGLIGVSDGLFGFISKISNLRRKLRTRIDEKIEPTMDYEALLTAHAIDTGLRTWVCPQQQGTPRYTPSMLYRQATWVYLYRTTKKSKPDPFIRSAVDDGIRYIHELPAEGWIQSNVLLPLFLMGCAAFEEDQRLEISRAFSGLMAVTGLGNITFAKEVVDRIWHLMDIDDPDSWDWERIINQQGWDFLAT

SEQ ID NO: 42326 - protein, 1079 aa, Oryza sativa
MSIDFPKEEERILARWKEIDAFLRQVELSKGKQPYTFYDGPPFATGMPHYGHLLASTIKDIIPRYWSMKGRYVERRFGWDTHGVPIEYEIDKELGMSGRDAVRELGIAKYNEKCRAIVMRYATEWRSTIDRLGRWIDFDNDYKTMDTSFMESEWWVFKRLFDKGAVYRGFKVMPYSTALATPLSNFEASQNYKDVQDPAVVVSFPLVEDPNTQLLAWTTTPWTLPSNVGLCAHPDFEYIKILDEASGKHYILLGALLRTLYKDPKKAKFKIVQKLKGKDMLGWKYEPLFDYLYDEFKDYGFKVLNDGYVTADSGVGIVHQAPAYGEDDYRVAPTHGVISDSRPPPNPVDDAGCFTSVVRDFEGLHVKAADKGIIKHLKSTGRLVVDSQLTHSYPFCWRSDTPLIYRTVPSYFIKIQDIVPQMLENIAGSHWVPSFVKEKRFANWISNSPDWAVSRNRFWGTPLPLWVSDDGKEMVCVGSVEELKKLSGYEGELTDIHRDKIDDITIPSQQGKGVLRRTPEVFDCWFESGSMPYASGHYPFENVEQFEKSFPGDFIAEGLDQTRGWFYTLTVLGTHLFGKLPFKNCVVNGIVLAEDGKKMSKRLKNYPDPSLIMNSYGSDALRLYLINSPVVRAETLRFKEAGVKEIVSKVLLPLWNSYQFFEQQATLLKKVANLDFEFDPSAEKTNKNILDRWILASCQSLLKFVNAEMAAYRLYTVVPRLLELIDNTTNWYIRFNRRRLKGEYGLDDTKHALNTLFEVLYTLCRGLAPFTPFITENIYLRLLPHIPKSLHAEDNRSIHFLPFPEVREELFDEVVERQVKRMQAVIELGRVCRDRANKGLKIPLKTLVVIHPDQQYLDDVKSLENYIVEELNIRDLVLSKDEEKYNVQYSATADFSVLGKKLKKDAVKVKKALPNLTSQEIKDFLKNGELLVDGIKVEAEDLMVKRGLAKDDANKDQEFNTDNDVLIILDVASYPELEQEGLAREVIRRVQDLRKKAGLVPTDDVGMEYRVLSDPDNLGLEAAFENQGALFEKALRRNVDKHVVTEVEGKIPENSKEEVIVEEEQELHKATFLLRLVKL

SEQ ID NO: 42327 - protein, 592 aa, Oryza sativa
MAQTDASPRSDSPRQLLGDITESAHNQANVARSHNAYAKNTSPTIDVNYYQQQYHSAVLQDAINVHAQYVQLQEQGYAAQAFMLQQQLMAQAGAQRQSSAPQHQSSRRKSTSPNNATQQQRVSPRPAAVSSSSRRASPVTHHHGDDETSPCDCPDCNLRRLQEVMTEATVPYAATAAVPTARRFTPQQQPMPLDFDAIMAMNAMAYQQHINSPLMRGSMPTSPLMMGAEHMSPYGAYDSVPMPTASVTRHNPYAPHSPTSVPMNASVGYEVPYIPARGDYAHYATDAPAESRDASTEASLEEGEREIPTGKPQQNVSPIRRTGPPKPSPKQPARRSSPSLLDNLQTSNATAATSEQASAPAPAAAVTAPAAPTSVVVGATAPRNQPHANPRRSSPKDNSPAHHHHQTSPQQHSSSSAPASGACPFLLRLKVSQWHTNVAVASSESVPVGTHIKFEGDRGEDLGCVVSCTQVPPEETSTLPRVRARATAAEAENHAAYAAEAAAAVPAAQTAVDRAGLHMRVVGAVYQFNREKLTFMYESTERIDFRQLVRDLYAVFRCRIWMEPVTPIVPTSSKGSHGGGKRTTSPPQHWWP

SEQ ID NO: 42328 - protein, 705 aa, Oryza sativa
MRKVSSLLLASLLIATVMATDTKLTEPLFDMNHAPHAKKTVMHAAQTVMEHLAKVHQNTFIGVALSAAKTLTEPRSFEAKADTTAAPSATCDQEGYSAAQVVVLQACPSLSGLISGTVALTDFLPGFCGSNCYKVIAANLPKYGVCLDASTKPLVEFVTGCATKPECYGETALKTGLQISAACGSGATNLFNFYAATSSAKSSISELCTTCLPIETAYIKAYPRCVAADATAAAGLSAALTAMCTQTGGTTGDYCAWNLRSIGKIDCRNNCYSSDWCDNSCNLAMTTSRLDTMCNNKCLASLATVAPAVGADKVLITALSDLFCSAAPNSTQYCYMTAQSALSTYNPSSSSAMATTCAGNNGVCLSTFFTLSSALAAASARSTFTTCAASLSSGTYLYSYCQSSYERGLGNAELLRTQGNLVCATNTAGGYCAVSATTFGSSTCFQYAVGGSCSASCATTLAGYTSTAGCCLGLINDYLRAANSRFYSSYLPTGTFTATLKSGSTVSYTFSPEDAIANPDRSLQPLNALAVCSNTTDLWTSIETPCVASSNAVARSFSVRLSYAAVTANAATRKRILGGLKADAANAANVPPSSIKNETLSEDTSITITTSRRASATGVKFSFVIDGASSTDVANAATYFDTAAKSGVATANTGSAASSCTGCLASGQDAASLSSAGSSGGGGSSSASFATAAFAAVAAFAALLL

SEQ ID NO: 42329 - protein, 351 aa, Oryza sativa
MADMNQESIQQKIQIARRDAEALKDRIKRKKDELADTTLRDVARDRVEALPRLTMKTKRTLKGHLAKIYAMHWSTDRRHLVSASQDGKLIIWDAYTTNKVHAIPLRSSWVMTCAYSPSGNYVACGGLDNICSIYNLSAREGPTRVARELSGHSGYLSCCRFISDKRIPTSSGDMTCVLWDLETGSKVHEFADHLGDVMSLSINPLDHNQFVSGACDAFAKLWDIRQQKCVQTFAAHDSDINAIQFFPNGNAFGTGSDDASCRLFDIRADRELASYQIPEPVCGITSVAFSVSGRLLFAGYDDFECKVWDVLRGERVGTLQGHDNRVSCLGVSNDALSLCTGSWDSMLRIWA

SEQ ID NO: 42330 - protein, 571 aa, Oryza sativa
MITGTQIRALLAVTVLVPCLATAQPASHGARKPPIFIFTGFMASALLGEYNPPSSALGANPAPILTNSHFEALLLSTAGSDSRKGSSNFFGDTGSSNSSTDAASAATGPAASQPAAATAVAADPGIDATAAASVDAVMQPAASAAAGGPAAAALRPAAAGGIRARGAATPKTVGSTSTPAAPTANVAGPSGCPVTRFKDVDIWLPSSTLAGLAPRCLISLMRLSYSNSARATGRPGFQNNTDVGVSVYRPGASGMRYPLFNLAGYGKLVDFIEAQLNYTRGVNLFVLPYDFRLDTETLASAGQLQQMAKEVSKKVDRSGLKAILIGHSSGAAVALRLLQDSAMRSRVQGYLALAPPFGGSSSTVLARVSGAFDYLLPWLSDEVAAVLSSGNASGGAAENVKGWMYNLTLGMPGVAMLMPYAEAFGGQTVVVTIASNKATYTVNDMPKLYRDIGQPGVANSYARIHVVASMLKSGPIPGVQTFCIYGSNSDTPLSWRYEKPLVAGQPNDMPTVDKMGKGDGVANLESLRLCKSIASGPTYISELKGVTHHSVHTKRSSLRVIKKALESIINK

SEQ ID NO: 42331 - protein, 480 aa, Oryza sativa
MAEEHDHHGSSRHMSASQKELGDEDARVVRVGDAERTNEQLEFAGNAVRTAKYSPLTFLPRNLFEQFHRLAYVYFLVIAVLNQLPQLAVFGRGASVMPLAFVLTVTAVKDAYEDWRRHRSDRAENGRLAAVLLSPGAGTHFAPTKWKHVRVGDVVRVYSDESLPADMVLLATSDPTGVAYVQTLNLDGESNLKTRYAKQEALITPPEQLTGAVIRCERPNRNIYGFQANLELEGESRRIPLGPSNIVLRGCELKNTTWAIGVVVYAGRETKAMLNNAGAPTKRSRLETQMNRETLFLSAILVVLCSLVAALSGVWLRTHKADLELAQFFHKKNYVSDDKNANYNYYGIAAQIVFVFLMAVIVFQIMIPISLYISMELVRLGQAYFMIRGTTLYDASSNSRFQCRALNINEDLGQVKCVFSDKTGTLTQNKMEFRCASVGGVDYSDIARQQPVGRRTSSLLSYPEFFPFGAGSHGWGADGF

SEQ ID NO: 42332 - protein, 1281 aa, Oryza sativa
MVEALRECYGEKADGKQPLPVLLPRASLSSGGGGDDSAGSVEVSFSAQHKVILVIDAINESANGGNNLLLELLDTKSPGANISQLPDFLGLLVTSRPETPVYTRLVRLCGYPVMELKADAESNKADVRRYLRASLCQLMASEAEAEQAAEVLGQRVEHYFLLAYVAVSFLQQLQREQGGRAPPITLQQVKETPVSPHDRYKAAFDRLTGMKDEQRAALMKILQVLCVARENLSVRGIAAIVNLSPRQVISLTDIMRPLLPLNPSSSISSSEWHLIGAGSNDPVEKEQQQEELSDIRFFHKSVADWLMDKQRHHLALKSQSPADTLVWVDEREAHAMVGRAAVATLLNLPTSSSSSSPSSSESKGSLSLPSEADPQVVVSLQARLKKFYETSAATGDGGGVSRSLTRTALLNQRGGSPLSLSPPLPTGAEATLTSEEDDVLQALAVCVPLTSLPQVVAALTLSPLKAQGTQLLLSYAIYHAAWHLVLGKQWVLAAQLCCNMRMLDLVCQVDTAMQQHAQADSKSGKESSSGLGMCAELMRVTKKMVLELAKLLHSDSLLSSPQLSAADAIIWQLGGEFVRFYDLRMKDIGAKWWLAYQYALAMPIKYAPHQQTVALQPWWSTRCRQEGRVWVEWRNRVEYLSPCTQTLRGHTGPVFGVTYSADGQRLVSGSSDLSVRVWDASTGESLRELKGHTADIRAVALSADGQRIASSGDDQTVRVWDASTGECLRELKGHTGWVRAVAISADGQRVVSGSYDQTLRVWDAATGECVRELQGHTSLVFAVALSADGQRIVSGSSDLTARVWDTATGETLRELKGHTGWVRSVAFSTDGQRIVTGGDDQSVRVWDASTGECVRELKGYTAALISVAFSPDGQRIVSGGGDQTVRVWNAATGECQCELKGHTEQVDSIAFSPDGQHIVSGSIDQTLRVWDVSSSLSPSSSSSSGGAGLRERQGHTKDVNSVAFPPDGKRLASGSDDQSVRVWDAVSGELLHELQGHSGWVRCVVFSPDGQRIVSGSDDQTVRLWDASTGESLHELKGHEGLVSSVAFSADGQRLFSAGGDQKMRVWDASTGESLPELQVRASDINAVAFSQPLGQAHVNVAAGSFDQSLRVWDGSTGENMRVLQGHTGFVFAVTFSTDGQRLVSGSDDMTVREWDVSTGAAVRELKGHTGMIFSLGLSANGQRLVSGSSDKSMRVWEAASASESLCELKSHTGMIRSVAISADGQRVVSGSNDKTVCVWDLSRAPCPSPSSLDVADPRGSVSFVTEPFHTFCGMFQLSLH

SEQ ID NO: 42333 - protein, 91 aa, Oryza sativa
MMVASPVKVAVVAAVCVVLVVLSSSPAPAAAQMICSKCDQYCNSSCAGGMGGCSGACTDPASSSCTSCKQAYYYKCMNYCGSYCRSNCVNS

SEQ ID NO: 42334 - protein, 132 aa, Oryza sativa
MLATAARWAAKKGKPKMAPIELPAPPEQAQSITRTIFDVVREHGPLTISDVWDHVKDVGLRGLTSKRQMKIMMRWMREKQKLRLICDHDGPHKQFLYTTWFTNPKNAPQRPKRDHHRQQQQQQQFRGEPRKP

SEQ ID NO: 42335 - protein, 132 aa, Oryza sativa
MARAAAAAAFVFVSLALLCDASQGEGAAAAAACRAADLVVRQRATGRVVEGKPEYAVEVANRCRCAQSRVVLRCYGLSSVESVDPRAIRPVDDERCVLRGGRVIRRGAPPVRFTYAWMTPFDFPLVSSQVHC

SEQ ID NO: 42336 - protein, 134 aa, Oryza sativa
MALEARFFLAAVFAVAATCLCLSAVASAFAVPSVAFDEGYSPLFGDDNLVRSSDDKSVRLLLDRRSGSGFISSDYYLHGFFSASIKLPKAYTAGVVVAFYVSACLSHHCSDLRTFLTLLPTKSALFRLSSCGLF

SEQ ID NO: 42337 - protein, 67 aa, Oryza sativa
MAAAAAAAANGAGGGGGVPRPTNPMVTPLLTDLYQFTMAYAYWKAGKHLDRAVSGSLIPFPSSIPSP

SEQ ID NO: 42338 - protein, 161 aa, Oryza sativa
MADSGGSRSAASSSLRAPSMPPPLLCLPSSPLPCVVEVAMTSSTPDLASSSTGRRPRCGHRRRCHLLLLDAAWEEGRHRAPLGGAAVLSVGVGDGDGPELLLPRGGRVDDEELEVDASGGDGKRRGRDGGLRRWPGMTRRRRSSSARRHGGWACRARPPRM

SEQ ID NO: 42339 - protein, 419 aa, Oryza sativa
MDPYCDGKSKKSPAMGRRRRYFRCGTTMLTMLLFVVTNSASVLLSSGAGAFLLRRYKPATARLWAWDDSAALLDDLNATQSALADTHAQLADLHARLGTANSLLETLLAAMAAERRDGGTPWARELSGELELAVAPHRNVTGKATVFPALGHACARFQDDLEAYMRYTPGGECPSDEQLARRLMLNGCDPLPRRRCRPRSPAGYVQPSPLTKSLWAIPPDTTVVWDAYRCKNYSCLVRGGGGGEFDLLGREKRRWMRDDGALAYSIDSVLAARPNGTVRIGLDIGGVSGTFAARMRERGVAVATTAMNSGGPSGSLIASRGLVPVHVGPAHRLPFFDGTLDIVHWTSPEHVAGVMLEFALFDIYRVLRPGGLLWLDHFVFPGEQLNATFAPMVDRVGFRRLRWSTGKKPVSALLEKPMT

SEQ ID NO: 42340 - protein, 236 aa, Oryza sativa
MKKTIVLYPGVAVSHFLPMMQLADELVDHGYAVAVALIDPAFQQHTAFPATVDRVVSSKPTVRFHRLPRVELPPATATDDGDFLLLGYLDLVRRHNECLHDFLCSMLPGGVHAFVVDSLSVEALDVGERLNVPGFVFHPANLGAFAIFLQLPSIRAEGEPSFRELGDNPLELPGLPPMPASHLFSQFLEHPESQVYKAMMNVSRRMLPTWKRSKIFSENQREFGRRGEETERKTEM

SEQ ID NO: 42341 - protein, 244 aa, Oryza sativa
MDFSGGGGGGGGATLSEMYQSARRLLLSARDGVARVERLASAPTSSSYSSAPLVGGGGGAGDSAAAEEVRREVAQIQGLCAQMDRLWRSIPAKGQRDLWKRKVEQLSEEVDSLKETLDRHSLRQKKRVLEAKERAELFERANGESSHVLRIFDDEAQAMQSARSSSRMLDEAYETGVAILHKYADQRDRLKSAQRKALDILNTVGLSNSVLELIERRHRVDKWIAYAGMMITVVVMFVFWRWTH

SEQ ID NO: 42342 - protein, 146 aa, Oryza sativa
MEAAVLPRPADITPELRRFLDSRFRSQADLAAAADVEAEIRGRYAELEASVSDLSVRLAAAAAAYSSSCSAAGTALSNVRGCLAALNASTSEPGVTEAVEVGSEEMLFEQLSSLAKEVARVELVRDYAGECEISFLGPCIRALFDI

SEQ ID NO: 42343 - protein, 142 aa, Oryza sativa
MGNCNCLERARAKVTAWGAEEGDGGEDEFWGATAAEFSGGGGGGARGGVPSTRKKEIIKDGGGGGEGSSSPTRRVKIRMTKGQLRRLLAGAGRGAAVEDVVAEIMSMGDVHVEPVKAEEGGGGRRPPPSPSKLEPIQEDMDE

SEQ ID NO: 42344 - protein, 82 aa, Oryza sativa
MGGAQDMNGLCRSVSQVCEDCTVQDQEASRSKSPSMRGFAECVQQRFAGVRTGLTGPANQLGPDFCVQPRIRSNGVWHLTID

SEQ ID NO: 42345 - protein, 136 aa, Oryza sativa
METASASASDPPPLRRRRQRQRRLVFDRRYGWIFDEWTDPADAALAGGRGMFCVLPMARSLVDVAVSSVTYAADSVSQALERCGTSSPIAYLPPLSLHRKQQTWFRELEHVGVIADTKLIPCRTMCSLGCISTDGH

SEQ ID NO: 42346 - protein, 241 aa, Oryza sativa
MDPASVSASASGDPMAECPPAAAAAEGSDAMDCGGGGRSNARVAGVLRGFLAVQQRRAEAYSTLRRGFSEYMANGGELAFQQLCASVTAEFNDCSKQVLEMVALLSTPEICRGDLANLLKDVQAHEKEKLHLTARIQVLKKAGRPSERLVNHADCRSSNMAQHVCVHVKEITEAAGTEDAEADAEYDGALKEAIQGVQEAVTSINEHMEEVRYEIDALGAEIIGNNLAEVEEAFPDTLLIK

SEQ ID NO: 42347 - protein, 65 aa, Oryza sativa
MATLKVYLLLFTAFFLSGLMQLSTATQTAPAPAAAPARVIDAKAIDQAIAYLLMFAALFVTYFSH

SEQ ID NO: 42348 - protein, 196 aa, Oryza sativa
MVVTIDLREVTIDLREEDEAAAAAAMKAIAGRSDEEVLAAVLARKGGPVPFLQAAIDAAAAAATKAIAGRSDEEVLAAVLARKGGPVPFLQAAIDVAQRRSDLFLDPSAPGVVAEMAVEAQAKAEAEERRKRAKGEPRKAEEMLKEEEPMKAEEMLKEEEPMKAEEMLKEEPRTPMREAGRDKVERAAVVERVRGG

SEQ ID NO: 42349 - protein, 139 aa, Oryza sativa
METKAAAMAMRKPGDWSCRSCQYVNFCKREACQRCGEAKLGVERTDYAAMGGGWEVKPGDWCCRCCAVNNYASRGSCFKCGAAKNDSAAAVAQGWGFSVASQAGWKNGDWICPRMECNVQNYANRTECFRCNFPRYYVD

SEQ ID NO: 42350 - protein, 61 aa, Oryza sativa
MALSPFLPRDPGAVDIGLGVFSFSLCSLPHRIDAPRRRPVVGEVSFGFLLRCRNAELLHVQ

SEQ ID NO: 42351 - protein, 77 aa, Oryza sativa
MAEIEIKTAPADFRFPTTNQTRHCFTRYIEYHRCVNAKGEATADCEKFAKYYRSLCPAEWVEKWNEQRENGTFAGPL

SEQ ID NO: 42352 - protein, 82 aa, Oryza sativa
MESLWSLQRTKICTRIVWVGVQFSLSPSLLFVFQFLNRSFKPCLANALCFNCYASHFHACCAASGFHCFIVQDLCRQPPEKV

SEQ ID NO: 42353 - protein, 26 aa, Oryza sativa
MFTCSWEHCPKGRPPSSRVDLGLVSI

SEQ ID NO: 42354 - protein, 196 aa, Oryza sativa
MRRNERSFRVSPMGTALQACYADLGQRPRPPPIHFRPPRNPHRASRLSSPRRGMCVSPDPRMRIPSATSAHASAATPAHRAPPARDREGALVGSRQPAGACGLRAARQNRAWGICMGRGRLRCRRAVAVADAWCMQFFDRDTVGGWEQLGSGEVMIARGQLGKGRIALHGLAVIWLFWPGRAARDGRGQRATNVSD

SEQ ID NO: 42355 - protein, 80 aa, Oryza sativa
MVMQQVQVLKEVSALLRGKETPVILDLEESLRAKGDMTQGEEVKIYASKVTAVLCKAFATATSALVGYHVLGVGERALNL

SEQ ID NO: 42356 - protein, 60 aa, Oryza sativa
MDADSIYHCTSCYGCCMRSMPHHVPGRHVILLKVSFFYTCSIVPCTNDFPAAVGWPPGLS

SEQ ID NO: 42357 - protein, 75 aa, Oryza sativa
MPKYPIWRLEPLDLRLICDEEPVERVGVRESPHEKVFERLSRDGAISTVAATVTVTVTAAASVSLDVAWVSDLIN

SEQ ID NO: 42358 - protein, 73 aa, Oryza sativa
MGNTASGATEASDSTEKTEQAPPADTKPKKKICCACPDTKKLRDECIVQHGEDACGKWIEAHRQCLRAEGFNV

SEQ ID NO: 42359 - protein, 53 aa, Oryza sativa
MPTKEPVHSHLTVGLASLALLSDGRAAAALLTVGFAVVPVSCPWVASPLLFSS

SEQ ID NO: 42360 - protein, 186 aa, Oryza sativa
MAMGRKNKAAEGARCRRHRQRGGGGGGGGAGVCAPCLRERLSHLMSASASASVSLPSVVRGEEEEASSCCSSSSEASSDASSSAASGSSSPWAARFHREMVAAGGRGGGRLSLLMRNERVLLDSDEVASVVRRMRERRRQARSFWAKLLHATVGGGGGKKEGCSMAHSKTLDQERSTTAAAKWILF

SEQ ID NO: 42361 - protein, 365 aa, Oryza sativa
MLDGCGLLAFARCCCVRGGEMESDARVSDEPGCGGGGGGGAGSVVEKGGGVVARRFGWAEIESVTGGFSSRVIGQGGFSTVYLASLTSSRLGAVKVQRSSERLHRAFCQERDVLLSLRHPHVVRLLGYCDERDEGVLVFEYAPNGDLHERLHHRSGGKSRTVLPWARRMAVAFQVAMALEYLHESRDPAVIHGDIKSSNVLLDANHDAKLCDFGFAHVGFSAAVRPPSGATRAWGRPVMGSPGYADPHFLRSGVATKKSDVYSFGVLLLELVTGREAICAQTGHRLTAAVGPSIGEGKLADVVDRRLGGDYDVEEAATVAALALRCVSDGTGLRPSMAEVVRELQEKTTALISAVGSKPSDKMVS

SEQ ID NO: 42362 - protein, 56 aa, Oryza sativa
MHFISVFFSSLYLEMAVVLYFFPLYYSCFAFVFVGEQVFFLFQQLVYMCKPRYSLK

SEQ ID NO: 42363 - protein, 80 aa, Oryza sativa
MDGETLSWAVPECGDEFALCFLDEAACAAVSGAISTVTASRTGSPSCAWRGRRVPPPEVTSPAGLLRSAGSPELCLLRSA

SEQ ID NO: 42364 - protein, 108 aa, Oryza sativa
MRRRLLLLTPPFCAAGPARDHRAAPPRKPPGRRHLLPPSPAPTSRGAAASPALGSRRLPPGSTRRRSPAPVPRREPPPPPQAPARATTNAAPSTTPLHAACNDASSRP

SEQ ID NO: 42365 - protein, 136 aa, Oryza sativa
MDESSDLQWRQGWLAVGLPPAPVVAVSAIVGFFLYLTWQMDEYEEQLRRRTQAGLWVLLVLGAVALVLLGSHALVDAGGRVAVPVSWRWGGGYGGSSGDDGGGASPWAVAAVVAVLLVLASHKPSFQMFRPPWHYK

SEQ ID NO: 42366 - protein, 24 aa, Oryza sativa
MFLIRLTELCTSRRKMSFTGLIRC

SEQ ID NO: 42367 - protein, 256 aa, Oryza sativa
MDMAMSSRLALCLAVVAACAAGGAVADWSPATATFYGGSDGSGTMGGACGYGNLYDQGYGVDNAALSQALFNDGASCGQCYLIVCDTSRAPQWCKAGTAVTVTATNLCPPNWALPSDGGGWCNPPRPHFDMSQPAWEQIGVYQAGIVPVLYQRVRCWRQGGVRFTVAGLNYFELVLITNVAGSGSVASAWIKGTNTGWIQMSRNWGANWQSLAGLAGQALSFAVTTTGGQYLQFQDVAPAWWQFGQTFSTYQQFDY

SEQ ID NO: 42368 - protein, 57 aa, Oryza sativa
MLVATKKHTAYEFVYKLLKLVLILPVATASVERVFSSMNYVKNKLRNRMGEQYLNVV

SEQ ID NO: 42369 - protein, 64 aa, Oryza sativa
MMMMKKKVVAPVERVVFALNGERQEVAAADVDPSTTLLEFIRTRTPFKGPKLGCGEEEKDTTNN

SEQ ID NO: 42370 - protein, 141 aa, Oryza sativa
MLRHLKSAAARSPMRSPPPHPPSAPAPRDEGFEEEEEEEESARAIAVSDQRTIYLVNMFIANTVELLNSFAAQCNDKLSLLHRKIVKLDSSLNLLEAKLRSIDDTNAFGHSTNQKAHGLFTQDGRFEPTNLLGESSRSGDA

SEQ ID NO: 42371 - protein, 237 aa, Oryza sativa
MAISSGSSSSSSAFPFFLLALLCVTAVVFPPAAARTFPDDKSGGAVVSGSKFSLPFPSKAAGSGSGSGSGHGFGWMVSHNGSDTTIGFGGGVGGGVGTSRGGGSSAGGGVGVGVGVDVGRGGVDVGIGVGGGGAASSADGSVGGGGGEGVGIHIGPGGVTVTHGGGGGAGGGSGGGGASGGGSGTGRSGNAVGTGQGSGSANGGTGSGGGSGSGSGQGGSAGGGGGGAGSGGAGGHP

SEQ ID NO: 42372 - protein, 139 aa, Oryza sativa
MRRASSCPYLVMAAGAVGGSAMGAVAVGANDGSPPPAHIWRRRQEWSTARRREQRWWERTAAHLLPCISGDGGGSGRQLTSSCLDPVAAGLLPPSSDSRTGRRRKQRWWEGLFPRWRLASSRLDPATQWEKLLLLYKIS

SEQ ID NO: 42373 - protein, 21 aa, Oryza sativa
MTAPPRSTMGVRWLGDHHQPN

SEQ ID NO: 42374 - protein, 191 aa, Oryza sativa
MAVRRRRPGPVAAAVLLLLAVATQAAASPIKTVVVVVMENRSFDHMLGWMKRLNPEIDGVTGGEWNPTNASDPSSGRVYFGEGAEYVDPDPGHSFQEIRQQIFGSDDASGPARMDGFVQQARSLGDNMTAAVMNGFSPDSVAVYRELVGEFAVFDRWFASVPSSTQPNRLFVHSATSGGATSNNPEYVHYY

SEQ ID NO: 42375 - protein, 225 aa, Oryza sativa
MAARSSLPSFCLHQIRSDSRRGAPPSIRASSTGAANDGGRNDDVDGKEEEEKSEVGRKVMVVADGGSDEARTALQWALSHSVRPCDTVVLLDVVKSGGDGGGKNGDDPSRGCQHLETMRSICPAKRPEVRVELSLVEGKERGPAIVEAARKQGVSLLVMGQKKRSITWRLLVMWMTGGKGGGGRGTAEYCVQNAACMALAVRRKSRRGGGYLITTRRQRDFWLLA

SEQ ID NO: 42376 - protein, 154 aa, Oryza sativa
MSSVVKIGPWGMGRGSQLTENCDIAVAPLRLESITVKHGEVVDCLSFSYRDREKLPHTAGPWGGRGGQEITINLGPSEFVTEVHGEYGSYYGHNSIANLTFVTNRGRHGPFGIVDTSGWDRFSVPIKNNSSIVGFFARTGDSYLSAIGVYVRPF

SEQ ID NO: 42377 - protein, 97 aa, Oryza sativa
MRRPAGSSSAAALAMAILLGVLVLMALVMDGGEKTGAPAIAAGRRMLVGAADAGQMRTLEDFKADDPFQDSKRRVPNGPDPIHNRGTGKSGRSPGRA

SEQ ID NO: 42378 - protein, 54 aa, Oryza sativa
MVGIMLKPEEMCTISTKIILKAQLFSQFPFQLGHFEVNFVLEAPKSSNLLSTTL

SEQ ID NO: 42379 - protein, 78 aa, Oryza sativa
MKRYIKNLSAKLDAEKQEEFKKNIEGATKYLLGKLKDLQFFVGESMHDDGGLVFAYYKDGATDPTFLYFSHGLKEVKC

SEQ ID NO: 42380 - protein, 80 aa, Oryza sativa
MEQGYGCYSYYQQYKSSGSFISGKEKRPPLKRGQLKRQIVRTLSNLMAPATRSSGDAAAAADSKKKAADRSSFRREASYN

SEQ ID NO: 42381 - protein, 55 aa, Oryza sativa
MLPIPVSRRRWGISKVACAQQPRGGEGKGTPRRRMGKPVWRRRRRYRFSTRPTPQ

SEQ ID NO: 42382 - protein, 54 aa, Oryza sativa
MHPPTRRPGPSDPVTPASLSVDPAARRRGETGYHPLYSSPSTSGTATTTAARIA

SEQ ID NO: 42383 - protein, 53 aa, Oryza sativa
MRSVHAPWTHSTTTLHGCFIPWSSSVATGIIYLLWLASSSTSLAKLFSQSHGK

SEQ ID NO: 42384 - protein, 118 aa, Oryza sativa
MNPPPVSPKPAPAALASVAQGVEDDEEKAEVDDGGGGGGYARTPDLGCPYYYAPPKKEVAAVAISNEDMRTMREREGIPELEEAETRGQRRRRTPRPPKQQKLRSEWPIKKRPKTCAG

SEQ ID NO: 42385 - protein, 40 aa, Oryza sativa
MAAVSVWFRVAVHAPVMEDVLLLIEFDCDVHFAIYFHVYV

SEQ ID NO: 42386 - protein, 66 aa, Oryza sativa
MDVCISSSSALRLAHVAVRTANPAKFPLDAVAIDHQIGRLFLFFLCTCTATAGCVLFGCHMQVQTS

SEQ ID NO: 42387 - protein, 82 aa, Oryza sativa
MRLRAPVGATAPLQVRAVRRSRRRCSHPHPSFTCGDGGGGERTNAVPVGAVAGTPYLLLLLGPAEAVVARGGRVCRRRRHIQ

SEQ ID NO: 42388 - protein, 92 aa, Oryza sativa
MGRGGHTHFLDACFLCRKRLAGNRDIFMYRGDTPFCSEECRREQMEADAAAERTEKARRAGKLTRGAPSSRREVEGPQERGNSVRAGSILAL

SEQ ID NO: 42389 - protein, 97 aa, Oryza sativa
MDTSRRRWGSWAAGGRRGWRRGSWWRGCSPGGTRSSTRCCPAASPASSGSSASTASACTPPRSPRRRHLNIQRFSDGSESEIVKRQSKISTNSYMVI

SEQ ID NO: 42390 - protein, 179 aa, Oryza sativa
METQEAKRADVAAAPATATGGEAVKPAAGDAGAVTKTNGPSAPAGKAATPTGSVDRDAILANVELERKLSMIKAWEESEKSKAENKAQKKMSSILSWENTRKAAIEAKLRTQEEKLERKKAEYAEKMRNQVAAIHKAAEEKRATVEATRHEEIIKYEEMAAKHRSKGTTPTKFLSCFGS

SEQ ID NO: 42391 - protein, 100 aa, Oryza sativa
MDDPSSLSFNLGDFDPNYLSASYINNEYDASGSVPTPSVLDEVPVASDGSGTMSRSPSTNTSSKRSRTSAVWQHFDEVAVTCPGGRQVTYAKCKIFKRDK

SEQ ID NO: 42392 - protein, 29 aa, Oryza sativa
MLWRGRLNRVAAESTAWCGVVALFCVGWG

SEQ ID NO: 42393 - protein, 72 aa, Oryza sativa
MSSTTAADVYRAHTGHSLLSPDLLIPSAGCNSCLIYVSFFFICAISIRLPFLFSVLVSISQSVCVVLNLSYL

SEQ ID NO: 42394 - protein, 99 aa, Oryza sativa
MPRLFFGGISGARMARRERRNQQGRIYFLFPRGKVWIFTPSLVSIEIWNPQGSERNSTTTLFLSLQLWSKCCFWGKGSSSIPEYFGRCLLSVAAWQLPE

SEQ ID NO: 42395 - protein, 121 aa, Oryza sativa
MGHASSGTSCARPAPARWRILAGTASRRAAAAARPPPRRRRRRRRRGLMMPEQQQRRRLCARAAPPPPPMACGGSPCVRRAPGTTRTPCRRASTGSGAPAAAAPAPAPARCSPRAPRRRAP

SEQ ID NO: 42396 - protein, 103 aa, Oryza sativa
MLAILVSVAFAQILAILSNSFAVGDAAAGYEYDGAADHPVLRMAVSTLTVAVPATFYVGVMELYARVTPVAPPLRRLLAVLAPGMAWITLFLGMPPLVVLLLG

SEQ ID NO: 42397 - protein, 101 aa, Oryza sativa
MSSSRRSRTSSRLAAAPPPTDEQMAELISKLQAVLPTRGGEANAKQASSAEVLQEACRYIRRLHREADALSERLAELLLLQPSDLAINGADVPDLIRSLLM

SEQ ID NO: 42398 - protein, 207 aa, Oryza sativa
MPSKNSVSWNSIIAAFARHGHGSEVYQLFESMKADGAKPTDVTFLSLLHACSHVGSAKKGLEILNSMSSQYGVLPRMEHYACVVDMLGRAGLLDDAKSFIEDGPFTDNALLWQALMGACSFHGNSEVGKYAAEKLLLLDPSCTAAYVLLSNIYSSEGRWDDRAKVMKRMSEMGLRKDTGKSWIELEKEVHSFVVRSTSHPNSAAAVR

SEQ ID NO: 42399 - protein, 40 aa, Oryza sativa
MVLLWLWKTDDHVTLWFYSFFWNWKNACLNPGRASRRSDR

SEQ ID NO: 42400 - protein, 266 aa, Oryza sativa
MGPLLRKLDSLPVAPEIRLPEPLKDGIELLKEDLEEIGAALVEQSMVDSPSHRARYWMDEVRDLSYHIEDCIDTMFSMRCGGDDGKPRSVRRHKVGRVKVDGFSKTQKPCTRLARIAELRALVREASERHERYQLGDGRASSSSSSSHRVFTAHGQVPAPCRNLVGMDEPKTKLTNMLTDEAELHMKVVCILGSAGIGKTTLAEQVYRKLRWQFDCNAFVRASRKPDMRRLLGAILSQVQLRIRISDTSTVQSLIDNLWEYLQKKR

SEQ ID NO: 42401 - protein, 127 aa, Oryza sativa
MARSSPLFLLGAALAVVAVAAATLPAATEAAGWAPVADVQELVIQQVGRFAVLVYSLAHHTDLAYVGVARGETEAAAGGAGGTNYRLAVAVTKPDGSAAQYECLVWGVPGSRLDTWKLRRFRRIQLP

SEQ ID NO: 42402 - protein, 238 aa, Oryza sativa
MDGHVRRLLNRVSIALAAVATAALLQLFRHSSSSCFVGSPAYSSLSLAPFPRTSCDAASRRVVDPNLRLAKLRSSPRWRRRSAALSTSVFPRLRRLRLLRRSSRVLCVAAGAGQAVDALHVAGVGDATGVDLVDFPPLVRRADPHNLPFFDGVFDVVLSDEPMALTGALFPSRFVAEAERTVRWGGAIALAIERHIDLSTVASLFKKSRVAAAWNATLDGSAATMVILRKNSNNTKQH

SEQ ID NO: 42403 - protein, 191 aa, Oryza sativa
MAAAAAAASTTSMMTRPQLLHLFSRFSFLTSLPEVKARIADAVRDKQSSLGVRLEQMSLARYEAVAVTTEIQEEILREMGIDPSFGIGCLGKVNVMYEDDMELMVKFYQFVAKEEMAIDEAELDPIEFAEKIHAQHKLQEQQLKMLIQMRKYNPESQSVILETLRKQLESANFDTDASILTPEQIQEIVEN

SEQ ID NO: 42404 - protein, 136 aa, Oryza sativa
MAAPSSLASSSHLSRRATAAASPSIPPPSPPPPPQRLRCGWVGRAAPPTRRAPGVCSVVSPSKPGVAAVDVPAATIPDAAATGVGVAERISVSSLLEVVADDLLKLNNNLKSVSFTFSSQSLHHSVQLVHDTSMIE

SEQ ID NO: 42405 - protein, 88 aa, Oryza sativa
MHLFLNAMNDWTPPPLLGQAVASRPAGSGSTTLLELGQLYVHAPGQAETRTRHLWSCHGFRICGSWTREEEKKRGVNCKIVHDMRASF

SEQ ID NO: 42406 - protein, 85 aa, Oryza sativa
MDATAPPPLRRATMEAVVFAPPPDRHPGTASGGGGGGRRCCTGEDGREWRELDIQGRGCNEEVHPWTMTDRCVQRMRARRELCSW

SEQ ID NO: 42407 - protein, 171 aa, Oryza sativa
MSPQALLLAAAAAAIVVAGAASAAGGGVQPNGAANDLLPKYGLPRGLIPDSVASYSFDEATGEFEIHLAGTCYVWFGSHLVYYERSVRGRLSYGAISDLSGIQAKKLFLWVSVTGIVAHPDQGTVEFQVGFVSEALPASQFDAVPACGAGAQLRGAAGVIRELGLLPVAEV

SEQ ID NO: 42408 - protein, 73 aa, Oryza sativa
MQFFKFPLLLQKHASIKWFRFVFKNMCCLLCFYRFDLSDDSISSSAHLKCVSYVCERNFLSTFQLHFVLQKYM

SEQ ID NO: 42409 - protein, 90 aa, Oryza sativa
MWVRALGACNASRTAVHAAHVPGDGWPASGRLAAGLTEVGSATGLGRPIRRALGPVVVVTSVRDRGACGGPCMHGWWSFAIGRRMYDRFA

SEQ ID NO: 42410 - protein, 154 aa, Oryza sativa
MQGMNLKMTCNICLAAGGLIFTEDGGGITLAREIERLLLQGSEARRKNEAIKQEGRREQQRMYCMQPERRGCGGAGIGAGERRGRPTAETETIDWVPDGPFLTFSPRPKNHPPSCRSSSWAERSPISSLKRKPTVICLSIERILVFFLFSRRKM

SEQ ID NO: 42411 - protein, 125 aa, Oryza sativa
MTPLGAAAPARKREEARVSAGRRLGSGFFCPSDLSARPSDRNPSDRTADGGRAESGPSGERAAAAFPAQAQVAAWGRGGGAHPRARWPWADRQRPEKFNLGPSGPKEKEKKSLIIGPLRSFFNYV

SEQ ID NO: 42412 - protein, 120 aa, Oryza sativa
MRSPPGTPRTRTCPPERAGNPCTLCTTTAQGSTPPASAPPPATRRRGRCRTHRSTRGLRMATSAPERRPMAGAGGGGGQGRTLATPPPGLRTAATAGGRRRRPSGWGRCTATGSRCRTCW

SEQ ID NO: 42413 - protein, 144 aa, Oryza sativa
MADAGKPDPASPPEAPSAKKGVFMRRIFPFLLAANIFIGVYVFAKTYKRDQEKKNAQTAAAAAAVVALSSPAAPAAETVDPTPPTPPPKRVLPPIPEDEQRQVYKWMLEEKRKIKPRNAAEKNKINEEKALLKEFIRAESLPRL

SEQ ID NO: 42414 - protein, 32 aa, Oryza sativa
MLPPIGSVLVLVPLPVHANVPAAAHAIVWLAA

SEQ ID NO: 42415 - protein, 82 aa, Oryza sativa; identical to SEQ ID NO: 34712

SEQ ID NO: 42416 - protein, 178 aa, Oryza sativa
MAKKLLAAAAALLLLLAAAAQALASSSSSPGSANLTATPTAYEMVERYGFPRGILPEGVESYVLRPDGSFEVRLSGDGNGGGDCEFRVGDGGAYLLRYGRRVAGVAMEGSIRSLEGVSVKVLFAWLGIGRVDRAGDDLRFFVGPLSAAFPLANFADCPRCRCGFDCDTAAAADVIAAS

SEQ ID NO: 42417 - protein, 82 aa, Oryza sativa
MATATSGAVPRRADGDGGCSAARGDDLRLAATSVTGRAAVGAAGSRRRPARGDVVWVRRTATPASGRPDPGLAALEPRDPTS

SEQ ID NO: 42418 - protein, 201 aa, Oryza sativa
MASKDQTASSSETTTAVADDTSSQQDAPPHPLQVTSPDSSLPSPSPRQRRCVAAYMDLTREECGRLFPSGRLRSQPLRLAGRPFYLTARCNMDQRDTFRCFGLFLAMEVDDEEEEEEGSPSPAASVTVEYDFAARTRQQSGDEFVSMYKGHYTFAAGKSCGYRNLLGMPWASFMGDGGGDSVFFIDGVLHLRAELCVKEDA

SEQ ID NO: 42419 - protein, 178 aa, Oryza sativa
MSLMRGGFGFSPAVAALYCAALVVAGGLGSRPVLGCYSRIFSFGDSLTDTGNYVRLTAGRKPSSPYGAPPYGRTFFGRPTGRASDGRLVIDFIGERTELPSVWFQHAFPCSDVSICPCSHHLCVAFALCSVHPSVFLPTTTYCASVHCATCMHALFGGFFFGGASNTYSVASCSVVRQ

SEQ ID NO: 42420 - protein, 70 aa, Oryza sativa
MPSYGRKEKEEWGLTIASAPATTAAPALRYVPYEHLVDVYWVRGIAFLRSWITQLQKRSGFDLVNTNCVC

SEQ ID NO: 42421 - protein, 47 aa, Oryza sativa
MSADVARVEDSESGIERRTPASGKKGRGGAAGAAAATPTPKWRKSMS

SEQ ID NO: 42422 - protein, 220 aa, Oryza sativa
MQPSQRSRRPPRLSRRNAIRQSAYVARPASQLSPPSESDQPAFWYSTEESVLEERVVEDEVGDHAEAGGAEAAALVVEEASTSSSSAVSVHAAMVIRRSILNWSKLDLIGAGSSGRVYKAVAEDGFVFAVKEASLIGPESYTKQTACQLKQEILLLSRLEHKNIVQYFGAKMGETVLCIFLEFVSEGSLVSVYEKQQLEESTISSLYKTDPQWIGLSASS

SEQ ID NO: 42423 - protein, 190 aa, Oryza sativa
MFARERMCDGTAAAVGAQGPERRWWRWQSGGRETRWLGADTLLGDAGAAIDAWAITEHHRHPGSGRARRPCHGPTTRSVTPVVVSHLRAVPEAPRGPPSRAGHAACAVPLLLTSLQRKRIADAQSTTPSSCMSTIDSVLASDALDASAMGDLGKLSTCLNFLPPPRPINDFWRGSCISDQSPLARPFCHQ

SEQ ID NO: 42424 - protein, 58 aa, Oryza sativa
MAAANRSSFSVSQFAQPFRPPESIDAGAGSSRSGGARYQLAATLLGAIGVLVDSGGEG

SEQ ID NO: 42425 - protein, 119 aa, Oryza sativa
MMGGTSGEMRAAGMAMRVWVAGTTGVVGREASDSAGSGMARAAGCSSDLSTRSSASLSSLWQISTTKSGMQLLSTVTPLMVCSPDGGVSLIGSSTLGDDGMEYLVRMLLWSQNHSVPQL

SEQ ID NO: 42426 - protein, 307 aa, Oryza sativa
MVSRTPTKQPLSPLPRAASGSPTKPTPSPSPSPASARRRRVLRRGSPGRIKSLAATFDTSLRGCRRRLLKLFARLAVLGSPTKRRAAAAGFRRLRSPPRSPSPPTPKPNQVAAVSPQLPLPLPPVSPGRRTLFLDLDETLIHSQTDPAARARHDFAVRPVIAGQAVTFYVVKRPGVDAFLAAAAAAFELVVFTAGLPEYASLVLDRLDPRGALFAHRLYRGACRDAGDGRLVKDLAATGRDLRRAVIVDDNPNAYSLQPDNAVPVAPFIDDADDHELERVMGILSIAAEFDDVRDAIKRYKEIVEAS

SEQ ID NO: 42427 - protein, 132 aa, Oryza sativa
MAAPPRLAPSPAVARAGQQGRRRRHPRRREREREGGGEESPRLPYDAPRRENARSRRLRHRSLIVARLLLARPCRLGGWLAESTSSHDRSGWWWRNGGWFWVLSVLGQRQEEENGWFTGPSDLTITGMCSTS

SEQ ID NO: 42428 - protein, 79 aa, Oryza sativa
MVRQALVLGGVAAPMLVALGRERSFWSFGVFGLAVGCLGLFAVCLPETRGRSMSDTMEEEEHKEAAAAIGDMDSNADLV

SEQ ID NO: 42429 - protein, 80 aa, Oryza sativa
MEMGRDVDAGQQQRRLVVVHSQVRRIKQEEGEKVKVDETYQHQVSEMRRMVVLRDMEARQRSRSPLGRAARPAISIGGDS

SEQ ID NO: 42430 - protein, 342 aa, Oryza sativa
MHPLNEAMASLSSAHDVLPQIFLMTDGSVDDEHNICQTVKTELISRGSKSPRISTFGLGLYCNHYFLRMLASIGRGHYDAAFETGSIESQVLRWFRKASSTIVANISIDATAHLDEFEIDSEYIPDISAKSPLCISGKYQGKFPDMVTAKGYLADMREISIELKVQHIKDIPLDKVLAAQQIGLLTAKAWLSSDKQLERKVVKLSIQNSIPSEYTSMVLLQTLEKVDAAQKVKQKLKGHKGPDEPRRIPLQCLKLGFGDRAATRENLVTGFGDVKPLETFEILNKAAGCCSRLADCLCCMCCIKACNKMNDQCAIVMTQVCAAFACLGCYECCAELCSGSDS

SEQ ID NO: 42431 - protein, 81 aa, Oryza sativa
MAGTAESPASSCVSSDAEEEAAVAKPMVVAGCPQCLMYVMLSEEEQQPKCPRCKSPVLLHFLHGAAAGAGAAASSKPPSKT

SEQ ID NO: 42432 - protein, 191 aa, Oryza sativa
MAYGKRPRQQAEEAAFSLFDSSDMARIMLLFSGAHGGGGGAAAASPPERMFECKTCNRQFPSFQALGGHRASHKKPRLADGDPAAEAPAKPKVHGCSICGLEFAVGQALGGHMRRHRAVMADGLGLGLSLGLGIGVVGQSDDDGGKKKAAAAAAAAELVFDLNAPAIEEEPDRARPAGLAVEFPVVVDFPC

SEQ ID NO: 42433 - protein, 185 aa, Oryza sativa
MSKSARKRLCRVINCRKLSDKACAHAAQNELLPLRVVVQVLFFEHARAAAMAGGAHAAAELPGSIRALLQSKSSGSDQEDDAADRVDEQRLRALAAGASPGDDWSVEGLRRAASKIATLRMKLEEDDDHDGGGGDDEEFARRQQAGLARSASLRFRAFCAIPAARPKRMLSKLWPLARGVTTERH

SEQ ID NO: 42434 - protein, 172 aa, Oryza sativa
MGSLGRRPWVGGLTAAMIFAVAVCGFCFSGASAAAAAPTFGDNFEITGAEDHVKTSADGQTWYLYLDNKTGVGFQTKERYLFGWFSMNLKLAGNDSAGVVTAYYMCSDVDAAPQRDELDFEFLGNRTGEPYIIQTNVYRSGVGGREMRHSLWFDPTADFHSYSILWNPKQIV

SEQ ID NO: 42435 - protein, 112 aa, Oryza sativa
MDAAANGGRDGKEKKAKNGRDGEDKKKEEDGDAGKKVSFTGLFRYADGTDLLLMAVGTVAALANGVSQPLMTVIFGQVINAFGEATNGDVLHRVNQVSLPASPPQLAPPVRP

SEQ ID NO: 42436 - protein, 214 aa, Oryza sativa
MLAHGMLLRSGVSPRARRPRRERPLRARRLPRPLGAAGQVTRLLRVRPRLLPLPQLPLPPRGGRRHRRRRRRPLRRPPRENNEAAVPARAASPNPPVLRRHGGAPRPGSHGLRPHRNPPSLRRDMHRRRAVPRRRARADDETTTNQIDRRGGDKGAPEGGGEERAAVVVLRALPLARRRQRSGTRSTTTAAAAAEWVVFDDDKGGGEAAWRGGQ

SEQ ID NO: 42437 - protein, 98 aa, Oryza sativa
MGDIDIVVAMAIGSNIAANERATSTRQQWCDLLLGDAMDASSNYFSHSHFTFLPATGVVARDVSRCVWLAWVQSGAVVGAYKLRRSIKRAHWIGWEIN

SEQ ID NO: 42438 - protein, 119 aa, Oryza sativa
MAGSGGGVVSGGRQRGPPLFATEKPGRMAMAAYRVSAATVFAGVLLIWLYRATHLPPGGGDGVRRWAWLGMLAAELWFGFYWVLTLSVRWCPVYRRTFKDRLAQRYLPALDSTSNCYQG

SEQ ID NO: 42439 - protein, 213 aa, Oryza sativa
MEKQNIDFGKVLGEIQESLVSLHRAQGDTQAAIIKLDQGVSAWRPQVEAAVQDLHEEVGDLRQQVDLLNKVKQAPPAASSPRVPLTGEERKAPLLPTPTATSPAAVAEGAEKWANGHRLHQNFRGKASGVVTTLIHSLGKDAPVKNVNHLPVQGIVVNISIVVALVPLDCIFQKDIDGDVSIKSKKAWDQGLSLQQKRSQDQNPTNPDNRYTR

SEQ ID NO: 42440 - protein, 64 aa, Oryza sativa
MRPQALVLANFLAAALLHPLLCQGAAAASPASIAGKLAMDGMAIDQGIDHLLVLAAIFVMCLFR

SEQ ID NO: 42441 - protein, 112 aa, Oryza sativa
MATNRMAVAIMVQLLATAAAAAAKSSEPALTGSSISAADDDLASKVGIRRLLQDGGDCIPNYNVCCSNCGWPFERTNCCDPDNYVCQYWPEMDPAHGQDWCIPRNYWSTSSP

SEQ ID NO: 42442 - protein, 299 aa, Oryza sativa
MTVAAAAASGGVGGRRYALLLALNDSEYARKVYGGYGNVFVSALGGGGGGGEEERWDCFRVIDGEFPAAEEVGRYEGFVVSGSPHDAYGDERWILRLCSLLRALHAMGKRILGICFGHQVLCRALGGRIGKARSGWNIGVKKMTFVRDFEGSKLFGDLKEIPQSASIIEVHQDEVLEVPPMGRVLAYSDKTPVEMFAVGDNVLGIQGHPEYTSDILLNLIDRLVNNNTITSGIGEEARRTVEASEPDRRFWTGLCKGFLKRPTAATTVDMPPREVAPEMMSCSHIIAGGHFVATTPIGL

SEQ ID NO: 42443 - protein, 208 aa, Oryza sativa
MSALVRSVASLYCQGLRRTVRLGGGATAGTPAARAPALDQRRPFLSRVDRIEATTGGGGGGAADTGGSPRRHGKEGTAPLFTWARLVVVLAAMAPFLQSKWATLLRIQSEVEMVKDAAETAAEVVEEVAAAVEKASAEVAEAEQLPEHGALRRAAALVERASREVAEEAHLAHDIIHKVDEIEEDVKTMIEPIIDNHKHGTRGTIKKH

SEQ ID NO: 42444 - protein, 255 aa, Oryza sativa
MEFRGHDEPVDEMGVAYGRTPPSSSSSPAASASAGNGAGAAEVRYHECLRNHAAAMGGHVVDGCREFMPMPGDAADALKCAACGCHRSFHRKDDGQQQQQLRLLIPSPPTPRVPLLMPPPQPQPHPHPQHPYLHPPFPYHHTPSGSGGTTTESSSEERGPPSSSAAAAQGRRKRFRTKFTPEQKEQMLAFAERVGWRMQKQDEALVEQFCAQVGVRRQVFKVWMHNNKSSIGSSSGGGSRRQPQEQQSQQQQQQQ

SEQ ID NO: 42445 - protein, 251 aa, Oryza sativa
MATVGPYGEAEKNEPARPLALPSPSVHPAANDDEEAARAAAAAAGDTAANKRPRSPQYLRRRRCVIWCGGCCVTSAVVVGIVILVLALTVFKVKDPELTMNRVTLEGLDGDLGTSRHPVSVNATLNADVSLRNPNVASFRFDRSETDFYYAGETVGVAYAPEGEVGADSTVRMNVTLDVLADRISPNVNATDLIFGQGYNLTSYTEISGRVNVLGIYKRNLDIKMNCSITLEVSALSTVQSKSTNCVASVS

SEQ ID NO: 42446 - protein, 109 aa, Oryza sativa
MTAALVTANADEGGSGGGRGRGRQRLRAAAVVDGVVDADEGGGGRGHGRRRQRRSRRTQTRAASRQQRSWHMISEIYLFLQLYVQMSTLRLSVAYRECLLPVMPSMFRF

SEQ ID NO: 42447 - protein, 176 aa, Oryza sativa
MEEQQHLHPGGGGGKKSNKITEIVRLQQMLKKWRKLSVAPKDAAATAGNGGGGESKAKKFLKRTLSFTDGGASPGGTPPPRGHLAVCVGPTAQRFVIPTDYLKHRAFAALLREAEEEFGFQQEGVLRIPCEVPAFEAILKAVEKNKKDNAAAFCYCSYEYAADEVALGAPNNPLCR

SEQ ID NO: 42448 - protein, 204 aa, Oryza sativa
MASVVLKDLNKRLLGLSCSSAASTSIVLSGHSPPHLRDPARTSNSSKKKKTKANKSKQQLVSPASSSRFLLNSSRMQPSADELPPPFVIPVAVAAAAEENEIVAAAVEGGGGEEEKRESSSQVEVVVLRVSLHCKGCAGKVKKHISKMEGVTSLDIDIATKKVTVVGHVTPLSVLTAVSKIKPAQFWPISSSSSPMPPRASASF

SEQ ID NO: 42449 - protein, 35 aa, Oryza sativa
MSRGTKHQSHQDYMEKANKARSERLSSGQSSAPKA

SEQ ID NO: 42450 - protein, 31 aa, Oryza sativa
MGRRHGKRALHCYCPYSACCGYVLCYDSTFS

SEQ ID NO: 42451 - protein, 65 aa, Oryza sativa
MARSIGDSAATPARSIGDSATTRGAVATGNPATTAWWFIGRSSSSFEPGVQEPYQSWQRFPGFRP

SEQ ID NO: 42452 - protein, 110 aa, Oryza sativa
MCIDQRKKRSTRSPLVIYNFEILVTTDAVFTTGSKWIGLAPVILPRRLSRRPPSRCLHHPPPPPTPAPPSPTLRPSPSLAASVAYLVASTPVPFSRRLHGHAGVPTRAHR

SEQ ID NO: 42453 - protein, 104 aa, Oryza sativa
MARLASLVGWNGGGGWRERKARQRLRRRQYCGGTVWLGRRRRPAGRCRLAVSRLVRWRLVAELLRPIRKALMEMAAAAGRRQLVALPQLSFPFVGTLALPAAVA

SEQ ID NO: 42454 - protein, 116 aa, Oryza sativa
MATTSPTSSVRAYFASNCLEQCKISANNGTHDVCAWMNNWFSETGGIQEEPAGLPVADAADEPSAHARLPRRQLRFWRIRHSRYHCKDMLGYSKKISSSCRNCARNLLLVAFSCTQ

SEQ ID NO: 42455 - protein, 25 aa, Oryza sativa
MSRDRDRVTIISGVGYPNPQCMWLD

SEQ ID NO: 42456 - protein, 49 aa, Oryza sativa
MVFFALPGATATASSSVVFLSPMQRPSDSTNTKGSPLVPPSPLLYSHVP

SEQ ID NO: 42457 - protein, 40 aa, Oryza sativa
MVSSRRYDLDHLLVRQHVPYLHPQQFDWLHYLKNNLYPLF

SEQ ID NO: 42458 - protein, 185 aa, Oryza sativa
MALSRRTRHCLVLLLVSLALLPLGMATDPIGGYCSESGTSDAEINGKTRRRSINSVVSDLVAKAASNGGFATSSAGKGNNVFYGLAQCRGDVSASDCKACLVEAANYTLSFCHYASDSRMWYDYCFMRYKNANFIGQVDTRVDASVRIRKEENMDNPKTFQKVVAKTMDKYPRRWRPRGVPHWEG

SEQ ID NO: 42459 - protein, 56 aa, Oryza sativa
MDVKGERLFKGRSRRLWWSPTRFQRRPSRGMLMQREAVLAAGGEVANPILACLFQE

SEQ ID NO: 42460 - protein, 164 aa, Oryza sativa
MVERPARACGGTRGRFNAHGRSPAVGPSRWWFGCGQSGGGVVGQRAPSRTVRWRELPPGHHVIDGVGPHVCRRVVGAAWVGAVGGVQLPRVGTTSTRVGTRVVGTVGPCPPLPYGWGPGLVGPEAWVPVTWFPRICAVSHAGSQLRLPGSKTQTVVQLMALDYS

SEQ ID NO: 42461 - protein, 192 aa, Oryza sativa
MAPAGCCLLLVLLIAAGGRAAANSAAAVATTNNKPQQLVQSTCNSTTYYDVCVAALAADPSISTAADVRGLCAIAVSAAATNASAAGASLLASAAAYQSQPQAPLLRACAARYADARQALISAQEAIKEEAYDYAFVHVSAAAQYPTMCRALFRRASSQQRAYPSDLAKREEGLRRLCTVVLDIISLLLLSY

SEQ ID NO: 42462 - protein, 238 aa, Oryza sativa
MLRRLPLRLAPTLAGGGGGAIPHRVLRGACTTAPASRPPPYPLSPSDLDAVSALLPRLVSAGNVPAAGRLLTAALLLPGSTERLPFSPLAAHLASMPTLTPAFALLTAIRHHPLRPSPLPLATPLLGHLLSRRRAREAASVVRWLCRPDSPQRPDSATFAVAVAGLCRLEDPRNALAALREMAVDGIRTSAKLRESVRDAMLQDARIEEAWALEAAMKQPDSGKLAELVQKLLEEWED

SEQ ID NO: 42463 - protein, 48 aa, Oryza sativa
MAAAAVDPMALGLGTSGGGGGGESAVGGDGAEPVDLVEHPSGIVPTLQ

SEQ ID NO: 42464 - protein, 135 aa, Oryza sativa
MRLLSSLAARSYSILDPSGEVTPSSVPCTTRNGAATSPKLSRSSAVTRASSRIVPTRGEPRYSRGLDAITLSFAGSRIDLPTILLSGITAHVSARPKRRPYRKSRTRDGYMSSGKTSSGADRMIPAHPASGGERR

SEQ ID NO: 42465 - protein, 81 aa, Oryza sativa
MAMVEAARRAMGWCGAEEERETASRKAPGACPRCGGAVVATDVESSRRILCLPLCLRNKKKFSCSRCRRALVAIVSSSAAA

SEQ ID NO: 42466 - protein, 106 aa, Oryza sativa
MQILQKRTGSGTVDEEQEHLPTLATRVMAAGWRALADAGRALGGGGAGDESGGWRRLRMSCSCCVLARRVDGVTAVKLCRRHRRGGGGWRQRNSHRRRGRISWRTC

SEQ ID NO: 42467 - protein, 93 aa, Oryza sativa
MLTTGPTPSSLSSASVRSSPPKNGCSRTTPARRTRRLEEVVAAAHRCATWWAMLPPALSPTRKQRVRSTGTAATTSAGRPTVARWRSTSTPSS

SEQ ID NO: 42468 - protein, 238 aa, Oryza sativa
MPRPKRRRSPLPPPAPPGFPTERKHHLPELQPPAVAAASPGVAGVPADLGDALLRCGKLLDKLLEHEDGWVFAEPVDARALRLVDYYLRISDPMDLGTVRRRLERRRYADPWAFAADVRLTFNNAMSYNSAGDPVYESAAELSEIFEAGWPSVLAAPPRPPDAERKRRLSGLLPRLPVGAQVTVAEIMKKRDGCLREVNGMMEVDLDRADSATLDELDRMAAEHGAALAGVVKVKQEP

SEQ ID NO: 42469 - protein, 162 aa, Oryza sativa
MSHVRSASAAADAASDWQKVRAEWFARFKEEYERKVAEHPDVDWSDELAVAARHYRESWERIYARAYGPFDKSTSIPPMRYTAEPVPFDASEQYTLQIFCVKIKELRRGLQWPIHVFGLIAARDTIDHNRNMVFDRTRDDCQTLTQEVHPLDSRYSLIIITI

SEQ ID NO: 42470 - protein, 139 aa, Oryza sativa
MAATAGDAAAAAAAACPAYPWPSDGAQRGRKVFMQSDCTACHGMFSSNAGLISDDDSAWEPKVAEIVVVEEAHQPVAAAATLRGGAYYPAPDLTFIAKGLRGNNLYSGGGASEAARMLADAAAACQELKKRALASPVWL

SEQ ID NO: 42471 - protein, 194 aa, Oryza sativa
MIGVGKAKQYANVLDKPLSRGRQEVSLSAFAFLFSELVQYNQTQVDNIAELERRLEDAGYAVGARVLELLCHREKGNRRETRLLGILSFIHSTVWKVLFGKVADSLEKGTEHEDEYMISEKELLVNRFISVPKDMGAFNCGAFVAGIVRGVLENAGFPAVVTAHFVPIEGQQRPRTTILIKFAEEVLQREARFG

SEQ ID NO: 42472 - protein, 370 aa, Oryza sativa
MNYSHDNWSAILAHIGKPEELDTSARNAGALTRRREIRDAATLLRLGLAYGPGGMSLREVTAWAQLHDVATLSDVALLKRLRNAADWFGILAAQTLAVRAAVTGCTSGKRLRLVDGTAISAPGGGSAEWRLHMGYDPHTCQFTDFELTDSRDAERLDRFAQTADEIRIADRGFGSRPECIRSLAFGEADYIVRVHWRGLRWLTAEGMRFDMMGFLRGLDCGKNGETTVMIGNSGNKKAGAPFPARLIAVSLPPEKALISKTRLLSENRRKGRVVQAETLEAAGHVLLLTSLPEDEYSAEQVADCYRLRWQIELAFKRLKSLLHLDALRAKEPELAKAWIFANLLAAFLIDDIIQPSLDFPPRSAGSEKKN

SEQ ID NO: 42473 - protein, 217 aa, Oryza sativa
MLRPILRGNCQSPPFEPLQCRITLPIDQNCHVRGVSTDGNRPEGGQGGEFGLEVRMHRRAAHIVEPVGEPLVVVDDAVVPVPRGEGLHGAPVPGGAAEADALGGPDLDRVGVHEPRVIRRRDGQREPHLVLLLQPRHRRVRPHPPRLRRRRRHRSRNRSHHRRRLGRRRRGDDRRRRQRRGLRRRPPIYQSIPALLDRAAAAVNSLLRVGFASARGG

SEQ ID NO: 42474 - protein, 63 aa, Oryza sativa
MQRWRLLNTRAPRGGGDGDSSRGAATRAADSGGGCELSSARRRKIETANPQHEHKAAVAPQRG

SEQ ID NO: 42475 - protein, 21 aa, Oryza sativa
MLCQEQNMDLLKIIWWFINCE

SEQ ID NO: 42476 - protein, 172 aa, Oryza sativa
MAAAVSACSSRCLRLILGRPPRARLASVVEVVEKRRRGGLVAVAATEGSAKSSGEADEQVPSWARPGSDEPPPWAREGGGGGGQQEPGAVELPFFAYLLASAITAIAAIGSIFEYANQRPVFGVVSPDSALYAPLLGFFVFTGIPTSGFLWFKAVQTANKEAEEQDRRDGFS

SEQ ID NO: 42477 - protein, 90 aa, Oryza sativa
MGRVMELLDARSTWRWVAADDRLWAPKVPPPLSLITACTAPVRRIACEGHSIPPHEWLIEQWLLSCLLLGSSIPYSGVVLIRSFYRILIY

SEQ ID NO: 42478 - protein, 75 aa, Oryza sativa
MLGDVAEPACNQASSDFRFFHVALCLDIPFQFDSAFSAPILQKRGYIAMTTQIRWQWRQKKKKSLQIYQGRINKM

SEQ ID NO: 42479 - protein, 212 aa, Oryza sativa
MGSKPPPPPQPSVSFKLVLLGDGRVGKTSLVLRYVNDVFSDKQEATVQASYLTKRLVVEGVPITLSIWDTAGQEKFHALGPIYYRDADAALLVYDITDNDTFLRVTKWVKELKQMANKDIVMAIAANKSDLVRSKHIDTNEAASYAESIGATLFVTSAKAGTGIDDIFSDIAKRLLERRKNSSDGLSLAHPKKGILIVDDEPEKEPPPKCCS

SEQ ID NO: 42480 - protein, 16 aa, Oryza sativa
MVPTVKLDIEMERLLE

SEQ ID NO: 42481 - protein, 113 aa, Oryza sativa
MAAMASSAPTAAKPVALLPAPICRCGGGGLRSTLLALMPPAAAAASRFRVSASASDVPDFLSSDWLETRKKKPFGPRLNFNAEEAVEYQLEALKYNDQPRQDYGIEVMYRVIG

SEQ ID NO: 42482 - protein, 241 aa, Oryza sativa
MVAPRARRMRWRDRFPRVAMETGGGPLPGATRVEVDAEVGAEGIDRRESAAVGVELSGRGGWRGGNSAGPASVVARLSPGTGRRSKDVEVNQPGDVRQRLRWISSGGGHPIFFLVVITRLRLPLVVGNTWGEATPTSRLESSHRRVPIDHRTTSTHRGVTLGSLRRAAPLLVGVDPPPPVVSATSAGDRRGAMAVGSGARAVGDGGGGGVGGGLPLVARHRVVTAAASPTGLLSTRRLGCQ

SEQ ID NO: 42483 - protein, 129 aa, Oryza sativa
MAMATAALARAMRGGSGAGAGLAAGELLSKAPATRTSSLPAMVASRGCSNGGGRCAKVADLAEMNGRINMVEFELKREVQLMKFAVEKQRAMARVEMMEAEANRMQFRFRLMCGLVWGGSLVYIASHRY

SEQ ID NO: 42484 - protein, 67 aa, Oryza sativa
MVVVVSIFSIVRCMRKEEAAVRATCQEIAVMDIDLRTRPVADPSSTPMKRFAGFPIRAHTFPKFSLR

SEQ ID NO: 42485 - protein, 88 aa, Oryza sativa
MSHVSTIIRSWNKRIGGVPIPPTRSAPCSALPTLQRRAWATMACSAQSAQGRGRERRRHALRRVLREGRSIGNGAELGIFDVSSGCSR

SEQ ID NO: 42486 - protein, 56 aa, Oryza sativa
MARRQQPTAGGTSPSWLPQPRAHGEPAADDSSQKILVPKIQLSLLSNLGSAFLFCI

SEQ ID NO: 42487 - protein, 88 aa, Oryza sativa
MVRRGATTRGTSTYRRREWCALSPSWGGTAWKRISIAAVVSKVSGDKRFDLFVTEKLELEQPWRNPWANEQCPPTPASQQGPDDVGKP

SEQ ID NO: 42488 - protein, 39 aa, Oryza sativa
MLLCSENLDKHSSCYRLKTGYLHVSIQLTHFLLAQLPGS

SEQ ID NO: 42489 - protein, 283 aa, Oryza sativa
MEDTAAAVETPVTVSTFGVSRHPDTARLVLSSPKPPGVREEFVGVVRKAFRPRASGGGGAGRTPPARWGWALTALQTVFPVLQWGRTYNFKLFRSDVMAGLTLASLGIPQSIGYANLAKLDPQYGLYTSVVPPLIYAVMGTSREIAIGPVAVVSLLLSSMVSKIVDPAVDPVTYRALVFTVTFLAGVFQVSFGLFRLGFLVDFLSHAAIVGFMAGAAIVIGLQQLKGLLGLSHFTNSTDVVSVIKAVCSALRDPVSLQTPVEQNHLLQLSRTRTKTNRCTVMK

SEQ ID NO: 42490 - protein, 498 aa, Oryza sativa
MRRLPKSLLLASLSKPFLRRNREPLPLLRPPPRPLPRVLPFAARTLAAPAAPPPEAAPAAQSDGFALLEAAQLREAADDHQEALALAIKALEPLQASHGGWSLPVARTLRLAASDLMRAMELKAVFLEKGSLELGNAYKDVAEAYRGVLACDKALPLCLEALEIARNHFGGDSQEVAKVRQLLATIYAGSGRNEEALEQYEIVRMVYERLGLDVELSLAETDVAMVLVLLGRSEEAMDVLKRVINRAGKESEERALAFVAMANILCIQDRKADSKRCLEIAREILDTKISVSPLQVAQVYAEMSMLYETMIEFEVALCLMKKTLVFLDGVSEMQHIQGSISARMGWLLLKTERVDEAVPYLQSAIEKLKNCFGPLHFGLGFAYKHLGDAYLAMNQSESAIKYFTIAKDIINATYGPKHEDTIDTIQSIANAYGVMGSYKQAMDYQEQVIDAYESCGPGAFEELREAQRLRYQLKIKARGLPHACFPANSLPTKFQDRE

SEQ ID NO: 42491 - protein, 57 aa, Oryza sativa
MRTVVVCWLAHCGAFAGFDRRYRVVAGRGAPEHTSVRGGYSPPVSPAIRYLLRWQQL

SEQ ID NO: 42492 - protein, 251 aa, Oryza sativa
MADEIKRRREEDDDMMLFVFPAMYMLCGMTNSEKIPRHISRLSGKERLQEILEGHVMDCKVAFRMEPHVFKTIANYLREEKLLKDSRGLRIEEKLGIFMFMLAHNASFQDLQYEFKHSGSTLHRHIKSIFKIIPALTYRFLKLPHADQTHWKIRTNPRFFPYFKNCIGAIDGTHIPITIDGEKAAPYRNRKGTLSQNVIVACDFDLNFTFISCGWEGSATDARVLRSAMNSGFQVPNGKFFLVDGGYANTP

SEQ ID NO: 42493 - protein, 166 aa, Oryza sativa
MIEAMMPLMITSPHGGRIVNVSSRLGRVNGRRNRIGDPSLRERLLNDDHLSEELINEMVMKFLEQTKQDNWSSGNEWPQMYTDYSISKLAVNAYTRLLARRLLDRPEGQKIYINCFCPGWVKTAMTGWEGNISAEEGADTGVWLALVPQEQATIGKFFAERREISF

SEQ ID NO: 42494 - protein, 477 aa, Oryza sativa
MATFEAVGEGVADKLTHCFLDGTVSTTAGACTVVRDATDFCFHSYFSLMDELIRKLGDNETPLDIKLSYLPHSMLAVLIAVPFDVFMISGVALWKSPCMLLKGWQRLCEDLVGREGPFLETVCVPFAGLSIILWPLAVIGAVVASFLSSFFFGMRAGLIAYQEASLQMGLAYMVSAVALFDEYTNDMLYLREGSCFPRPKYRKTDRMNNETGQNNEVRNATSPLGEKKHHHKTMKALQRSKTFMEAIQRLRPIQIWDWLFRSCELNGRILLGEGLISAEDMEECIIKGKCKKLSIKLPAWCILQCLIRSAKHDSHGLLISDDVEVTNFNWPKDKVFDWMLGPLLVIKEQMKQLELTEDEELCLRRLIMTNNNDKPSDWDDCGFPSSDNIRRARLQAIIRRLQGIVVNLSWVPSFRRRFIDLVKALYLEAVEAGAIDGSRSVKRKIEADAASAPGSKFDDKDGEGSSKGAAAVGIDAV

SEQ ID NO: 42495 - protein, 342 aa, Oryza sativa; identical to SEQ ID NO: 36987

SEQ ID NO: 42496 - protein, 206 aa, Oryza sativa
MPAGPPTPHLQALSLPAGSPSSPRGGIWSCTSATAQLEQSTGWSGLGSGTDWTRRRWYTSGQSLVRIYFRQASRPDLGPCSGNHWIWGLRGWMPSPASSLRWQSPDLGPLRLDSVDGSFGARMEVCLRIITPRLLTRPHRPTGPRGSRQHASRRLGMEGAQCWGSATAASWCSLPAVGCFVLWIVGVDQKLIMCFHRAKLVSSTDS

SEQ ID NO: 42497 - protein, 136 aa, Oryza sativa
MVFARLLARVGSSKGPNHGHRRRRRRCRRELHRRGGGDRRAPRRRQRRVHARLRGRRGRPDARRRRAMEVSPTHTHTMNESLVFSKANGDEFLIDCSMFIAAARRLRVLRSSDLNASTVSEISGFLLLFLEKFDRF

SEQ ID NO: 42498 - protein, 243 aa, Oryza sativa
MVAAGVVVLDGGGGWSWWLCASMMGNRSSGGGFTLPLWSQRVVKIPDLSYLGGDGGGSSGGCWRCPACVWAHAGGGNYVALGVVAVVVSLRCTCAGGGDGVYAALGVAAVIVSLRRACAGSGDSVCTALGAAAVVVSLRRAPVVCCAPACAAPVAASASVGSSHGWLDDDNLLQVNVFGIFVIGCLLRLDSCGSKLQVTSFLAIVVLTARHKSIGNLSNAPLLMVGWSMVWPSLLFPSSRNRV

SEQ ID NO: 42499 - protein, 155 aa, Oryza sativa
MRQPCPWREAEVAELRPRYRVAGTAKMSASLVRATVRAVSKRKLQPTRAALTLTPSAVNKIKQLLKDKPEHVGVKVGVRTRGCNGLSYTLEYTKTKGDSDEEVVQDGVRVFIEKKAQLTLLGTEMDYVEDKLSSEFVFNNPNIKGTCGCGESFNI

SEQ ID NO: 42500 - protein, 110 aa, Oryza sativa
MKGRRAYDLPAAYSFRQPAFVAKFVSLLIADAQDVPTLAYQLLLVSSAACLLRFIGSHITRQVEGTVLMHVTLADKQEHALAREVVVAIKADAGGTFRRFAVVVLLSVEV

SEQ ID NO: 42501 - protein, 180 aa, Oryza sativa; identical to SEQ ID NO: 29288

SEQ ID NO: 42502 - protein, 252 aa, Oryza sativa
MLTGNEEDDPPLPAPLAQPSGPAPTVETLPLWLRCHPPALPLPSRRSPPSHHGGIPVAQPSRPGRSRPHRRATAAAPSRHSPTPHRRRRLGWNRTARLRRARSHPAGRTHPLPPCPRRRSASSPVPLPAAMPLLFPAATPLPLPAALPPPMVRGPASHAGEAGSGGEGSGSGRRPPLCAVGTSCPSSRRAARRRPRRTHRTPPPPPVGLFPGGAVPDPSPGAGEVVAPCTADRRLPNDALLRLLRRGGPPPA

SEQ ID NO: 42503 - protein, 112 aa, Oryza sativa
MHPLKIACLIWGLGAYPSHYRSPAVRSPSPLHQVDVDASPTLRLAAVHSGIVAHPLSRLYILSLKLKESKLQFSVYTLHFSLEMVYAALFPIGVYTEFYTAVYAVIFHRGMY

SEQ ID NO: 42504 - protein, 90 aa, Oryza sativa
MPAHACRKREYCEVKVGDMSRSCCFLLQPRDLVRSESLCSTSGLPNCNVINVLPCKKPKCKRTSTHAGKFVIEIRTFRVTGTRYVIFYVV

SEQ ID NO: 42505 - protein, 660 aa, Oryza sativa
MAPEARQLKVHLRENEAVAQCVLEKWRSMEEKPGGLKENLAHTLYKSYRNVCAAKEPIRSLKDLYQIKGVGKWVIRQLKGSFPESSPDLSPPESNAAGEKGKKAGGSKRYVPQKNSAAYAILITLHRETINGKSHMKKQELIDATEASGLSRSAIGPDKSKAKPGAFASSQKDWYTGWSCMKTLTSKGLVAKSGNPAKYMITEEGKSTALECLSRSGLDDHAAPLVINSAPDTSNASHKLNNICMTSFVETSSGPSRAIGRPKTSIANSATKTSPEVTYLTSQESLNYNSDVRTAENCAEEIILSDSDSEELYTENYPLIGSEEFTERVAPPILNASNSGKTTTNYRFSDCSASISPRSSEGTFEMQSSSTMGIAEFNMLDNDTVCMDNSILAMPPRRSSKNFLEDYEVVLILDDRENFGGRSRKTVDNIHSQFRVPVEIKHLPVGDGIWIARDRKLHTEYVLDFIVERKNVADLCSSITDNRYKDQKLRLKKCGLRKLIYLVEGDPNPLDTSERIKTACFTTEILEGFDVQRTPGYAETVRTYGNLTHSITEYYSTHFSTGANTSQVCLTYDEFTKKCDDLKKITVSDVFALQLMQVPQVTEEAALAVIGLYPTLFSLAKAYSMLDGDTHAQEKMLKNKSTLINAGASRNIFKLVWAEG

SEQ ID NO: 42506 - protein, 57 aa, Oryza sativa
MVPEGWHNYSLPALLLEEHKNEPMDANVRLWTLIAYDLASFNRKVVQLFIHKEKLNE

SEQ ID NO: 42507 - protein, 103 aa, Oryza sativa
MDGDNDGWHQPNAVDPIPFVTTSPQGPYPCPSRPHPRHRRWLLLLPPPSSRPGRRSWPGGYVRRCSGGRGLQIRQNFIVRCHAPCRRRWPDHIACCYDLSCCF

SEQ ID NO: 42508 - protein, 243 aa, Oryza sativa
MCGGAIPLISSRGPGGKRSLSAADELWPPPPQHASDDPAEQAAADEEEQEQQPAARRQRRGERRTLYRGIRRRPWGKWAAEIRDPAKGARVWLGTFATAEAAARAYDRAARRIRGTKAKVNFPNEDNAFAAAPPPYHLAAYYGDASSTSYLYPMAMTPAAAGLREQQLMTTTAVEYSVNDAVDVASVYFQPPPPAVAYEFSAVGGGAVVVPVSAVAPAMTYGQSQEVAAPLMWNFDDITAMPM

SEQ ID NO: 42509 - protein, 297 aa, Oryza sativa
MASRALTPMQLIGTVFVALLATCHAGGIAVYWGQNDGEASLAETCASGNYEFVIIAFLPKFGKGQTPRVDLASHCDPASGGCTGQSKDIRACQRRGVKVLLSIGGGDGSYGLSSPGDARQVAMYLWNNFLGGSSSSRPLGDAVLDGIDFDIELGGAKFWDDLARDLKSLGRSGGRRVVLSAAPQCPFPDEWDGGAISTGLFDAVWVQFYNNPECQFSAGRGAFMDAWRKWESVPAGRLFLGLPASKDAAGTGFVPAGELNSRVLPLIRGSPKYGGVMLWSKYYDDQTGYSSAIKSHV

SEQ ID NO: 42510 - protein, 348 aa, Oryza sativa
MRGPLLLRAVVVVAMEHFNDWDLQAVVRSCSFPQSEPPRVGVGVPAAPGAGGAPVVVAPPARAPDGPDQMARASASALYDLEYLDLDHKPFLLPGSSSSSSSSRAVARARGEDDGKGRHEVMISFPAAAAASTSGAQPRSPSGRKPGIRTPRPKRSKKSQLKKVVYEVPVADGGVSSDLWAWRKYGQKPIKGSPYPRGYYKCSSMKGCMARKMVERSPAKPGMLVVTYMAEHCHPVPTQLNALAGTTRHKSAPTGDDDKPTSPGPAAGRAAAGEGVVKCEDVDGNELSAMAADGGAEDTAAAADDDGELWPEGMGLELDEFLGPMDDDVFEFDHVLEDDGVLGRRLSL

SEQ ID NO: 42511 - protein, 115 aa, Oryza sativa
MSVFFSKNSNTDGQLDRSTQQESRAASSSFCYNYSSDHHGRRRRRSHSFLRHNGQDPCLINQPSMHGTWNTCQQSGKLLTFSPVWKSCSSKRSQMFQNSQDSVISENSCKDLAHK

SEQ ID NO: 42512 - protein, 364 aa, Oryza sativa
MPPTSVSPPRTAPGPANPSPAHPSRVRVIHPGGGKPGGPVVYWMLRDQRLADNWALLHAAGLAAASASPLAVAFALFPRPFLLSARRRQLGFLLRGLRRLAADAAARHLPFFLFTGGPAEIPALVRRLGASTLVADFSPLRPVREALDAVVGDLRREAPGVAVHQVDAHNVVPVWTASAKMEYSAKTFRGKVSKVMDEYLVEFPELPAVVPWDREQPEGVDWDALIARVCSEAENVPEIDWCEPGEEAAIEALLGSKDGFLTKRIKSYETDRNDPTKPRALSGLSPYLHFGHISAQRCALEAKKCRHLSPKSVDAFLEELVVRRELADNFCYYQPQYDSLSGAWEWARKTLMDHAADKREHIYT

SEQ ID NO: 42513 - protein, 85 aa, Oryza sativa
MAHEGQRRLEFNDEAAYKGFPMVLGHIADGQCLMPCRSTDEAEKIRSPSPQRIRTLPPSAITHGLMSIIARLCLMAFPLPTIKVA

SEQ ID NO: 42514 - protein, 127 aa, Oryza sativa
MAIATTTLPLAPLALAPPSSPISQCSLLLLRPRAPAALSLRPSARLLVAVAAREPELGGSGGGGAGDGSGSGGGGDSEKPRGGGGDEEGEGEEEKMGQGLSMSQKITLAYAALVGGKNAVMPRPVHF

SEQ ID NO: 42515 - protein, 259 aa, Oryza sativa
MARLERGSLVVGGRELLERAPPSVALRRPAVVASPGGAAFLGATAPAPSSRHVFSLGTLASGWKWLSLFRFKIWWMIPTVGEDAAGVPAETQMLLLESRSEAGAALYALMLPVLDGGFRASLQGSPENELQFCFESGDPEVQTLEAVDAVFINSGDNPFKLMKESIKMLSKIKGTFSHIEDKEIPANLDWFGWCTWDAFYKSVNPVGIEEGLKSLCEGGAPPRFLIIDDGWQETVNGFKEVDEAFIEQTVLASNHFSTC

SEQ ID NO: 42516 - protein, 196 aa, Oryza sativa
MGTVLASAAALVATVCAEAAELAGTNRSGVTSAVKTGVESCSSAELLTLTATAATCLRGAAALKLRADVRGIGSNNNSVGTSTTSIHKDTTLRVRLPCGSVRLRKVAVFPQCDRVVLRLGKKHLHGAFSTYKNYEVLDVSSNGGDVVVDGMVLFPLVLRTAAGVVQLLLDSQMHCKVWKNAIEGILSDQNVKHAKL

SEQ ID NO: 42517 - protein, 229 aa, Oryza sativa
MHGHRRSPGREHRRRVERVRERRYRQRKLEAAGVEAEGDLAYAVEREAAEDVLEIQQPLAPVAGGRAKQRDEAAPQFRGHDVRREGSYRRRGELSRGELALEEPAVAVDVEYAAAEEVGEDGREGGTLGVVVEAAAQHVVDGGRVGGEHVPEHVHVHGSPRRAAQQVRVPVAEVVELARPRRGHVRLAHRARAPPRRPQPLQSQQQREGHRARGRDEEDGGNLRLQGAR

SEQ ID NO: 42518 - protein, 574 aa, Oryza sativa
MEAGEAAGAVLFLLAAAVSLLAAVSTGALDFTYLVTVVGEGSSTSPGSGGGAWWREAWVGARSRAVAPALQVGVWACMVMSVMLVVEATYNSAVSVAARLVGWRPERWFKWEPLGGGAGAGDEEKGEAAAAAYPMVMVQIPMYNELEVYKLSIGAVCGLKWPKERLIIQVLDDSTDAFIKNLVELECEDWASKGLNIKYATRSGRKGFKAGALKKGMEWDYAKQCEYVAIFDADFQPEPDFLLRTVPFLMHNQNVALVQARWVFVNDRVSLLTRIQKTFLDYHFKAEQEAGSATFAFFSFNGTAGVWRTEAINDAGGWKDRTTVEDMDLAVRATLKGWKFIYLGDLRVKSELPSTYKAYCRQQFRWSCGGANLFRKMIWDVLVAKKVSSLKKIYILYSFFLVRRVVAPAVAFILYNVIIPVSVMIPELFLPIWGVAYIPTALLIVTAIRNPENLHTVPLWILFESVMSMHRLRAAVAGLLQLQEFNQWIVTKKVGNNAFDENNETPLLQKSRKRLINRVNLPEIGLSVFLIFCASYNLVFHGKNSFYINLYLQGLAFFLLGLNCVGTLPDHCCF

SEQ ID NO: 42519 - protein, 259 aa, Oryza sativa
MNCGSSSASPWRGGGTSRRKRSRNAGQPRKSSTQRMAGDSERFLDTAAMCSADAPRKAPSSTMTSGRTSSISSANTAPVEPHPRGLAAAGCSSAAVCGGGKLSYGLSPSNSLSRSVRTTASLGIASPHSSLNRNRSCGGERGQFAAAAALPLLAGTSVEEAVPERCAARGRMTVCDGLLAGGRMDDDMMPTEYPAEKTIRNTVSRVRCGRSLAGTPPEDAAAGDGRGFMITSQQDSLCSPCSLLANLYIYISFILWRLV

SEQ ID NO: 42520 - protein, 100 aa, Oryza sativa
MQVLAPDPPFSDEIFKERCLGSLSAHLHTLLKQTVHIFQEDLAIGKCAALRVRVFARDAAKACYMAVTSGNEKKDILSKAASFYLFFCSEFYIGIFMLKF

SEQ ID NO: 42521 - protein, 429 aa, Oryza sativa
MVPPVIHTLRFRVRATAGYRSITRCFSLLSFTSLCYCTCSNPCTRDNTAALPFATNSNFQLLNIPIARNRTISSINQPNYMFAAHLHFERTASAPFGFRHVRQALLLGVRALVDVHRRRPSDGGIGRSQHRRLLGPERQRGHARGDMRHRPLRVRQPRLPLHVRRRPRPGPQPGRPLRRPVGDLRVPRRRHRVLPGRRSQGAPQHRRRRAWVQPVVALRRAGPGRVPLGQLPRRRRHRRVPPARRRRARRRRFRHRVPLQVLRRPRQEPGVAVHKGAAAAARGQDVPAHRRAAVPVPGRVPRRGARHGAVRPRVGAVLQQPAVPVRRARGRERAAERVGAVDGRLSGGDRVPGAAGVAGCRGQRVRRRGHARVAGAAGGGRRGQLRRDHAVEPLLRQGLQLQCEAAGRLAEQEQANWSRRILTYQEENM

SEQ ID NO: 42522 - protein, 290 aa, Oryza sativa
MDDDGGDFPLPVGAIRLRLVHPCRQPPSSLQVRTWMTTAATSLSLLAPSASASSTRACPPTPPASIVSPRAAMDDDGGILPLPVGAIRLRLVLPRRRSRRASPTPPPLRRGRQICSGRRPAGEQLHGILALVGSWQAVRTSVLPRAGARVWRWWAAMAYRTSPTVPPHLAGLLPTSRPTSAELACSDLVDRGDFDGARRVADAVLAAAGPRGEVSDRLVHHFARTLLALRGEDKGGHSGDEGASETREAMAALDRDVLLCCTDDRARHTVLSRPGCSPPAIDVERRGERK

SEQ ID NO: 42523 - protein, 84 aa, Oryza sativa
MYCTMTCDSFTGRPAWSRTGTLLCTGLEARRRSLLSPRFSSTYSYGSDLRLRTTRTLIAYGLLQTPSSFSSPLPAIAKSLVLDR

SEQ ID NO: 42524 - protein, 70 aa, Oryza sativa
MTTSTPTSPPPRTRPSPARRTWMMRPTMTLNALMRRTESVRTPMMKSLTTRKNWMMMMRASTTMTLNAMM

SEQ ID NO: 42525 - protein, 185 aa, Oryza sativa
MASVVFGQRNVCVFPLRRHILDEVFQHGPCNCSTQRRWKKPIDSARTRLEGRIRDHKLDKLMIQLKNLRLALDLHEFISQQRNGYASLQLLSRWRHEVGLNIEIGAFLKKYPHIFDIYVHPIKNNQCCKVTPKMADLIAEEDAAIWENEPAIVKRLKKLLMLSTDGTLNMHALWLIRRELGLPND

SEQ ID NO: 42526 - protein, 33 aa, Oryza sativa
MSTVKQPQHKHPCDSDQVDLGTEMSQRSLLQTM

SEQ ID NO: 42527 - protein, 388 aa, Oryza sativa
MADPNGRRRLPTGDPDQANASPSRRVSAVDGVTGGEGRPTYSHFPPGAYEPTVVAYGIRDAANDERARARARARHDQGGGAHDHHHDRPRQDQRGEAHLHDLPGEKSEVPDVGPSDQQGKEASDTDMAPLAALAKRSYDVNFPPLHEHRAAPFPAPAPAFAPAPAGTMGSSSAQVQGDGAPDNHDHDPRHLPRQDQSGGAHPDDLHGEKTIGSGSDILDDSKRGMINAGPQHGRITTSNGGSGSGSDKGKGVSYAGDKPASSSSSSSSDGQQGSDTDKTPSAAAASSYAVNFPPLLPAPAPVPAPAPAPAVAGAMGVANAHHKIALCSKWRKGRCHNGAACRYSHGEEEQRIVPEMRVGGGGRPCPELAAAKGWCRYGLNCKYCHGGV

SEQ ID NO: 42528 - protein, 100 aa, Oryza sativa
MWKTVVRYTMRFAAVPMLPSFSNVSLPITNGIAFHPRYRSSGAAAAAAESDLALPFPTSPSRWASRSPPPPEPETEGGRVMSRRRRHLARGGRDFDWVCG

SEQ ID NO: 42529 - protein, 224 aa, Oryza sativa
MTLFHFGNCFALAYFPYFITYKCSGLSEYNAFWKCVQAGVTYLFVQLCKMLFLATFFPTWEGGIYDFIGEFMKASVDVADLIGLNLVMSRNAGKGEYKIMVAALGWATAELIMSRCIPLWVGARGIEFDWKYIQMSIDSNISLVHYIVASAQVWMITRYDLYHTFRPAVLLLMFLSVYKAFVMETFVHLCSLGSWTALLARAVVTGLLALSTLALYVAVVNVHS

SEQ ID NO: 42530 - protein, 243 aa, Oryza sativa
MAPPPPSPPPPSPPPAPAPPSSRWDTPVPQWVILWRVPRVYPADVPSKGSEFSLALAAPPRISSLSLAAPPHLSSAYLTAAPPQISAHGRFLSGDLGPFAPFVLAADASGVILVHAYSARVLFDHSGSGSNSGSGSGSGGPFVAGDKGGSRIGPCLYVIDTFSAAADFLPDRNTNPGLTNFALVVHNHEGVVARSYSVMELVLEADSNKAQLWEFSSASGVWSMKTLTCPIHLPWNSNISFVF

SEQ ID NO: 42531 - protein, 210 aa, Oryza sativa
MTELEKSDCEAAEVYLNALGLLLRLHIRGQVDLAKDRLAALLDALTNEKIWHVEWLLDLLVLWALSSMGEITRADNLLESLRSRVSSMDTKKQQVMQKAIQLAEAVYEYGKGEHKKVFDILGPDFDALSCKMIGASDEQVDVFNEVWYTVLINTGESSRAIEVLEKQIRKREGAPFLWRLLEKAYSLHGRAADASVASEKANALQAAYSR

SEQ ID NO: 42532 - protein, 146 aa, Oryza sativa
MVKCKGLAVRRGHLARGEDPLGAIGADNALHFGVVLVEAQAAGALRLELGAARGRWRALPHTGERADARAQLHQVARSLLRGPRAGRGRGSLQEEEAAQQRGDGDRRDNGGKNRRPRRHRDGLMDLLLDTGMLGWVIVAGVRVWLL

SEQ ID NO: 42533 - protein, 393 aa, Oryza sativa
MAVRLCCCCFLLFVTIAAAGGSLTRTNVATLPGFDGALPSRLETGYVTVDEENGAELFYYFIESEGDPSTDPVLLWITGGDRCSVLSALFFEIGPLKLVIEPYNGSLPRLYYHPYSWTKVASILFVDSPVGAGFSFSRDPKGYDVGDVSASMQLIKLLREWFTEYPHYLSNPFYVGGDSYAGKIVPFIVQKISEDIEAGVRPTFNLKGYLVGNPSTGERIDLESRVPYSHGVGIISDQLYEMIMEHCEGEDYDNPSNVICQQALARFDSLLHEGSRAQILNPNCIYVSPKPNHETIDRKILKGEHGGLKHPPPQPSIKCGVYANYLSYFWANNNFTRRTLGIKKGTINEWVRCHEHDLPYNIDIRSSIKYHRNVTLKVVTTMLLCHSSGHKPG

SEQ ID NO: 42534 - protein, 450 aa, Oryza sativa
MARRGGRRADKASNCGSAPRKAKAVPAAATSVDDVPDHLLEDILLRLGPSSACLVRAAYACKRWRRVVTAAGFLDAFRALHGAHHHRVAGYYHTVDAYYAPALPGGESSVFVPSSSSLAGVDGRLWFSLDFLPASDDFSWELADSRGGLLLLSKKRRTHTRSGYAAEGDFFFTDLIVCEPLTRRYQGILCPADFTGYRCIGVFLLDGGDDGGGDISLSNFRVLCALYDLYWLNNRHIGVQSACVFSSGRHGGGWRLPKSAVADDIQLTARFNAMSFVGRAGGCFYWGIDDDDDEDDGAMLVLDETTTEFSLVTFPDIIRENYHMTTFRIIAGGDGAMRVLRVIGNDLKVFTQLAGSGVEWVLEKLVRLPEATRGLPGHEERYFEQNEAMIVAADAAYVLLTPSVEKTWLFSVELETMTVERHHERNKYAGVAYPYELPLLRALHAGGRYR

SEQ ID NO: 42535 - protein, 512 aa, Oryza sativa
MEVSLPLLIGVVLAFLLLFVLVNIKNSCRSWWPPPEKEKKKLRLPPGPWQLPLVGSLHHVLLSRHADLPHRALRELAGKYGPLMMLRFGAVPTLVVSSAEAAREVLKTYDAAFASRYLTPTLAVLSRGGRDILFSPYCDLWRQLRRICVHELLSARRVQSLRHGREDEAARLVRSVAAECAARGGAAVVNVGELISRAVNDSVVRSAVGARSARRDEFVRELDESVRLSGGFNLADLYPSSWLARRLSGAMRETERCNRSLMAIMDDIIREHGDGEEDLLGVLLRLQRNGDVQCPLTTDLITNVVLDMFAAGSETSSTTLEWALTELVRNPHIMEKAQSEVREIFRGENKLTEEMMDKLSYLRLVIRETLRLHLPVPFLLPRQCREPCSVMGYDIPVGTKVLVNAWAIARDNQYWDDPEVFKPERFENNRVDFKGIDFEFIPFGAGRRICPGIALGLANIELMLASLLYHFDWEFLDRDRNDEIDLSETFGITAKRKSKLMVYATQRIPCLG

SEQ ID NO: 42536 - protein, 438 aa, Oryza sativa
MAAKRLHDGYGQEDQPDDKRVRRMPSFSTVIREALMVKQMQTLFVALEPLLRRVVQEELQAGLVRSPRYIERMSPETPPAQPPMWKLAFRFKPQLPIFTGSKIEDVNGNPLEIILVDVDTGAPATISQPLRVEVVPVLGDFPPDDREHWTAEEFQQRGIVKERSGKRPLLTGDVSLTMRDGCVVVNELQFTDNSSWVRCRRFRIGVRVVPGSYDGPRIGEAMTEPFVVRDHRGELYRKHYPPVLGDDVWRLEKIGKEGAFHRKLTQHNVRNVQEFLRLLTVKPDELRAIMGDGMTDRMWEVTTSHAKKCVPGDKVYMYSTQHGTVYVNSIFELVKVELAGVEYQLHQLNRGQKAFVHQLLLAAYEQRNNLQEADAMALHCNDVPLLQNAAEITIPALGDTQLWIQNSLNSQEIDFQVDEIPQANFALQWTGQMYNISG

SEQ ID NO: 42537 - protein, 345 aa, Oryza sativa
MGMRHGSYDKLDDDGLAPPGTRVSGEDVIIGKTSPIPQDDAQGQATRYTKRDHSTSLRHSESGMVDQVLLTTNADGLRFVKVRMRSVRIPQIGDKFSSRHGQKGTVGMTYTQEDMPWTIEGITPDIIVNPHAIPSRMTIGQLIECIMGKVAAHMGKEGDATPFTDVTVDNISKALHKCGYQMRGFETMYNGHTGRKLTAMIFLGPTYYQRLKHMVDDKIHSRGRGPVQILTRQPAEGRSRDGGLRFGEMERDCMIAHGAAFFLKERLFDQSDAYRVHVCEKCGLIAIANLKKNSFECRGCKNKTDIVQVHIPYACKLLFQELMAMAIAPRMLTQDNKTGKDQKKR

SEQ ID NO: 42538 - protein, 371 aa, Oryza sativa
MATRRDGSSTRREGLTAEEDGGEDWLSTLPDEILHNVLSFLPAHEAVWTCVLSRRWRNLWRSAPVLRIRYAERWDGMAKFDKFVNNLLLLRDPVPLDELEFQTVLGICQLHPLQPSFRLLKYANTWIRHALMCNVRVLRVLVQYQYDLPLLKVNMPLISEHLKTLELRRVLLDKRTLDFSSCPSLEDLEMNSCGNSTANKILSQSLKRLCITNGQFADDLSSLPALQDLEMESCGICTEKVVCQSLKHLCLTQCHFEEPTHISAPGLISLQLNDIWGWTPSLETMPLLVIASVKLWKGSMGCCSECTFHPGTCADCDGDPDSSFKCEFLRDLSNAVNLELAAEDGMVHLCSFLTCLPANFCHSYYQTLHIH

SEQ ID NO: 42539 - protein, 267 aa, Oryza sativa
MPAKFFKDFNKDTKDLLSKQYIPAGDWKMESKIKPADRTFIINPGFEAKGGKTKLSVDVDYNVKEYSVETKTTFTNDGNIKPKLTWKNSWAKVEFTLNKLAIDTDFELVDEITYGDAALYGKFTKAAGEVSAAYAVCAPATIGAGVKFGLNGALKGWSAGVRATHDGYIVNVTTEALKTYTTGVFAPVKIAGQSVKLAAQVDCGNKDKFDVAVGFEVPVSDFTLKVKTNKNFNTTVALVRKFAEKWTAAASFSLDSVPSFGLTLTRE

SEQ ID NO: 42540 - protein, 248 aa, Oryza sativa
MDRHHHHHHHHHHHMMSGGGQDPAAGDGGAGGATQDSFFLGPAAAAMFSGAGSSSSGAGTSAGGGGGGPSPSSSSPSLSRYESQKRRDWNTFGQYLRNHRPPLSLSRCSGAHVLEFLKYMDQFGKTKVHTPVCPFYGHPNPPAPCPCPLRQAWGSLDALIGRLRAAYEENGGTPEMNPFGARAVRLYLREVRETQARARGISYEKKKRKKPSSAGAGAGPSSEGSPPPPGGSASGGGDTSASPQFIIP

SEQ ID NO: 42541 - protein, 241 aa, Oryza sativa; identical to SEQ ID NO: 31856

SEQ ID NO: 42542 - protein, 139 aa, Oryza sativa
MAGNDQRVILVGDGGARGPPLSNAPRHGDPHHRPTSSSPSLSAAWLPDLASLPSARQPPAAPPRRPSSAGRLQARRRPKIQSPRALPESVRPSASRLYIRRAPAESVHPKSFLLSLLFNWNCSHDFVASLGEIEQCYTY

SEQ ID NO: 42543 - protein, 226 aa, Oryza sativa
MRAHAQLLRRGVAGDAAHHIPVLLEPYRSRLQLRLLPLPLPPRPRVTHGHGELVPDLPEPPTTPPAPMPRRGGRRRVEAARLLPRPGGHRGGGGEVNEVERLARGRRRGGRPCPGGLPHALRLRPRLPWPPRGHRARDQQHAAPEQSTTPPIVPLLPPSSGGGGGGAGKRGERERGRREEGDDAAAATLLVGEEEEEIFFFPIIFLSKKPKQKMRGIERCARAREY

SEQ ID NO: 42544 - protein, 473 aa, Oryza sativa
MTTTGSTPPRKNRSNVTGGEGGSLEEYAWRAAGEAAAAKKATRAWGVSVSLRSHFSSLVLLLLLLLVALAVSATTKNGDPAETPHAPPLPPPASIKLPSSSSSGGGECDLFSGRWVYDEAAYPLYRESACRVMSEQSACEKYGRTDLRYQHWRWQPHGCDLPRFDAEKFLGKLRNKRLVFVGDSLNRNQWASMLCLIDTGAPELHTSINSSRSLTTFKIHEYNASVDFYWSPLLVESNSDHPLRHRVADRTVRAASINKHAAHWTNADVLVFNSYLWWQRPAMKVLWGSFDNPAAVVAAAAEEGDEYAVSKVIDSLRAYELAVRTWADWMEFHVDRARTQLFFMTMSPTHLRSDEWEDAAAAAAGGNHGCYGETEPIAAEEYRGTSGTDMAFARAVEAEARRLGERSVAVRLINVTRLSERRKDAHPSVHRRYWDPVTDEQRRNPSSYADCIHWCLPGVPDVWNQLLYAHIVS

SEQ ID NO: 42545 - protein, 713 aa, Oryza sativa
MAGGGVMHVLNEWAIEILLLVSFFLQLVLLFFAGFRRVGASAVLKLVVWPAYQLADFVATFTIGHLSVGHERRRLVAFWAPFLLLHLGGPDNITAYSLADNQLWKRHLVFGLVPQALGAANVIYRSFAGTTTTLLSAAMLMFAIGVLKYGERTWALKYANLSSIRSSVNVVKTPPERRVQYYPPSSLPRRDGEEADEEELLLVAHFHFHICKRAMADSSVEVDSGDYDPKIFSYGWKEMCRVVEMELSLMYDILYTKAAVMHTWFGFAIRVVSPLAVAAALGLFRLEDDLGSYRQIDVDITYALLVAAFVLETTSLCRAVGSTWIAALLQTTRWAWLRHEALCTGRWSRLRRAVASLRRLVHRDGHRYWSGTMGQFNVLHFCTRDGAAERLGAAAEKAGLGSWWNRHVNAGSIVISDEVKELVFGHIQNMLRAVDSMSTTELDAIRTTRGQRALRRHGLDGDLAASLGEEFHQGILTWHVATDIYLAVSGGDRSSPANAGDRAAAARQLTEAVRALSNYMMFLVIRPDMLPGLVLRRLYQVTCEDMARIWRERKDTHESSSSSSSCRFIDVLSMVTRLFQLHVDDPTSASRTPERKKLAAMLRDNAYNGDQNVRSHGVFAGALLADELLLKEKERRMSSDGGGGWLLPVIFEVWVEMLLYAGNRCSRESHAKQLNSGGELITLVWLLAEHAGLYRINKPKQHFKCAEYASDMV

SEQ ID NO: 42546 - protein, 282 aa, Oryza sativa
MVYLSYIIDHYDDLPDTVLFMHAHRHAWHNNMLLGLDAAQMIKRLNHERVARMGYMNVRCHHDPGCPDWIHMDRPGGDFDFFRKPEEIYWRRHIWEEIHPGAPIPPSLSGICCAQFAVSRQRIREVPIERFHHYRKWLLTTGMDDQFSGRIFEYIWHYIFTGHEVHCPAMNTCYCDGYGMCFGGRQKFADFIEMQDLRNKLWTELDVYNQRDDQAKKDGKDPGFNETEKADRIALNSRILKMDEEMDRLREEAKKRGDDPEARKEETESWDSSHIWDYAPHD

SEQ ID NO: 42547 - protein, 172 aa, Oryza sativa
MRGHMTEKVDVFAFGVVALETVAGESNYQNTLEEDRTYIFERVWELYENGHPLDFVDPKLSEFNSEEVIRVIRVALLCTQGSPHKRPPMSKVVSMLTGDADITEDAAKPSYITEWQIKVGSCHHTGSSQVGSASTPPSSGDGGAGQASSQGAGEGSPLTPSPLFTSIIDEGR

SEQ ID NO: 42548 - protein, 283 aa, Oryza sativa
MVPARSRLFHHDNSSSSKRGGGNSSSSCTPQYCIATQLDAAAAAAPARRRHHHHHQLAMAPPEDDAAAGTSSRGGGAGDDDDGDKDWLQLGLAAAAPTATAPAAAAAPSSSTPTAPELDVFAAKQYNGRPPLFPLPILRSYHHHHHHQYGHGGGRCPPPSFFPFARPLRSSGDLPGVMRVISPPRRAAAADAAGLWLTLQASPDQFREPILPQIPKSYLRIKDSNMKVEVVMKYLAGKLGLTQSHLQRAASSSLLAGQKCQRQHLVLITATKLQGRRRRRRRG

SEQ ID NO: 42549 - protein, 267 aa, Oryza sativa
MIAATATATATGSAVAATTLVIPTIAAAASTATATASAVATLTVPVITATASSVATIAVPAITSTASASLHAPLVPAAIAAIIIVPTPLASSSSTTTTSSAIVRRPTSTTTTAIAPTAAARVRSVLTAPTTTRVRRPVPAAPAAAAAAASVPAGLLLLLLVALVLASSSARHSDRRPPLRETRRRGIKPNAKRRRRRRRRLQEGLCFWKGPTRRGSWTSCGSYLFIQENFLGWKRARATRVVAFVEIFLGWKRARFPKERKDLPSSK

SEQ ID NO: 42550 - protein, 542 aa, Oryza sativa
MAMAAAVLLLLLLPATHPTCPLTSPTPARCSSASTSSPSTAAAASPRATATPPPPAARSTSSTRRWSSTASHASASSSPSSSPSPPPPPTSPAQSPSSSPPPRPSAPPPPRRRRPPWPTSFSAPPRRPARRRTGWWHSSRASFPATGSAPTPSPSPRSSLPSRTRAAALPHGRALHARALACGLVLSSGHVLTSLLDLYAAAGQLGEARRVFDEMPGRTVAAWNCMLAAYVRCCEMDAALWFFNEMPGRDSVAWTTMIAGCVNAGKAAEAVELFWRMRKANAKVDAVTMVALLTACAEQGDLRLGRWVHAHVEQEGRQWRTVLLDNALINMYVKCGAVEDAHRLFLVMPRRSTVSWTTMISGLAIHGRAEEALDLFHRMQERPDGATLLAVLLACSNAGRVDDGRQYFQSMERFYGITPGIQHYGCMVDMLCHGKQLREAIEFVETMHLQPNDAVLGALLSGCKREGNLELAAQVIERLIRLQPERAAGHLVLLANMYAGVGQWEQAGKVRERVAALNAGKPAGTSRVNPNQSSMLVHSMLA

SEQ ID NO: 42551 - protein, 221 aa, Oryza sativa
MAARPATDGEGVDASVPWWRRKRPRLPPPPPEADAEEVKAEALALMAAHPVLPRLVVFDLDHTLWPFQCDRLPKDEPPYLYPQARGILKALKDRGIEMAIASRASRKKGVAKAFLEKLGIHFMFGAQEIFYTWSPKNEHFQSIHRKTGVPFKSMLFFDDEARNIIATRKLGVSCVLVDTGITLEKLRTGLSNYANRSASPNAEPAGGRSAEITWYLDVATG

SEQ ID NO: 42552 - protein, 449 aa, Oryza sativa
MSLLLRRLAGAAAGRHLRRALSTAASRPPWRMILTEAELDRSGAPSRSARASLDLVEPPRSSRLSVPAHFVNPGPLPDAEGDAVGFVGWVIGGSGDGLLLLKFYDTRYHAPVVANVRLAVALQLSRTTSEGVLDPDVAHFVCNPLSGQMYRLPPAIETTKYSTGRGLLTRSESRHGPPDRYVVAELTRGESGSSVLRRFMSETEEWDDVATVRSSSGSERAAAAERVMHLDHQVVAFGGRLWWVDVSWGALSVDPFSDRPEERFVELPKGSVLPDLTGIGGRRILGLYRRMGVSEGKLRYVEVSNAKKPFVVSAFSLDDEGSSWTLEHRMEITPSWKGELKVPEKPRIGAIDPLNANVVYLIFLHEVLAVDMAKGEVIGRSSPDDVNSSSVVPCILPPWLESCQIPSAATLSSKKTDVERNTLADTLVVWIEAVKTELHQSIHLLVPWD

SEQ ID NO: 42553 - protein, 219 aa, Oryza sativa
MQNPNCMVMVDNCYGEFVETSEPPMVGADLIAGSLIKNPGGTIAPCGGYVAGKKDLVAAAAARLSAPGLGVEFGSTPGHVMRALFQGLFLAPQMVGEAVKGGMLIAEVMSTKGYRVQPLPRVPRHDIVQAVELGNRERLIAFCEIVQQTCPVGSFIKPTAGETPGYASEVIFADGTFIDGSTSELSCDGPLRDPYAVFCQGGTHWTQWALVLSDVLKII

SEQ ID NO: 42554 - protein, 115 aa, Oryza sativa
MLPSDEAMYSESPSTARAETYADADEWPLIVAMNWWSEGLVFRSWTSREGRERRLGCDASDMAPESMLPSAASCWIWLPSCSPEEDFMERETLLDQKIKSSPGKRSKHKLEFHAI

SEQ ID NO: 42555 - protein, 188 aa, Oryza sativa
MDKCGDADDCISTSEAAEQAAKFSQDNIMNLPVPGEVEFINGGPPCQGFSGMNRFNQSPWSKVQCEMILAFLSFAEYFRPRFFLLENVRNFVSFNKGQTFRLTVASLLEMGYQVRFGILEAGTFGVAQSRKRAFIWAAAPGETLPDWPEPMHVFASPELKINLPDGKLCSCKKHCWWCSFPCNNSYIQ

SEQ ID NO: 42556 - protein, 79 aa, Oryza sativa
MAHRTPSAPSGQACTAPGTRCRSLPGHQCKNTHIQDCRTSKTESIFYLNSFFFLFWLKLFQLLLKFDFELSMMCLHIYR

SEQ ID NO: 42557 - protein, 84 aa, Oryza sativa
MRTRRSTKCSRRTTSWSWSSCTYGWMLQFDLASPRLQAHPGDRGGGEHGLEAGIAMNSMLITGFAGCGACSEGRRGMGHPQTEC

SEQ ID NO: 42558 - protein, 192 aa, Oryza sativa
MPSRRTEGGIPDSPSKIALPPQLFGRRLPYSVVATLDFSLGFVGRSLSGLTIATLKSQSMAASPSPPMLAAFIVQESNKSIASSRICSPKLHSRNHQENNLQTNPNRTQELPVNSGQSLVDELENQGENKKQEPQKPKNTPSEKFAPPCGFKNQEPQKVAPGDGAAASSLSPREEVGGRGRRRHVSPPDDRS

SEQ ID NO: 42559 - protein, 134 aa, Oryza sativa
MVRVPRHGLLRRVVAAIPVEASAARGRGGEEAAAVERAGREDEAAPLLHAPAPGSDPPCRVAQLRQGRQGGGQAPPRAQGQGARRLRPPRGVQSPPPSPAAAPTGSGSGRRRGEGRGRFLAEHRRWQHGEGDPG

SEQ ID NO: 42560 - protein, 439 aa, Oryza sativa
MVEEILVRLPEEQHLRRASAACRRYGDIIRRPGFATRHRELHSPLLSGGVVLHGVRRRCPRVDGTAAHVRGSYAFFLPAGAGDASASSSLELDLAGLLPSPTDRELAYLLSTGAADPDAARRSVFIVHSSSSAGLLLCCRGYVNPVHYYVCDPVARRCVALPELPWPPAFDKSGMLSVAAGGGGGFQVVLFEKRGFAHGGGHLDLEVFSSDSGEWAAMRIPRPQDLAGFRCFAPPHLRHDGAAAYWLGFEPRDRAVVYGAADHSIRLIPVPRRVHDPSALNRFVGERRGGALLRYAHFDAAEFEVWDTDDATPTRWALVHRAALKDVVARSPRAVAAKFVHGRIVRHIHHHDANWNWCSSFKLIGFDPVHDDDVFLFGATNGSGCVAAYSLTLGKLSLRCKIDTADGSSSLCGCDMFPYVRASTTSPRADIPGMVYTNA

SEQ ID NO: 42561 - protein, 314 aa, Oryza sativa
MEGHPELPQGIRDCATSLKGLHVFFFTMEADHIDSLVNLRVLGLYGCPGMILRALRPESEIRVLTIDFSRLVDVLVQTTRLRSLEMHNNVVQGTVVVHDAIQLRKLHLLPPTRPSKIFIGEAPSLRSIGYLDLFNTVFVIKGIVIQAGMVLHPPKMRSVRILGLRVNYTEMGHRVPREIEQILKCFPCLEKLEIMRYDEVAPEEGLLKADDEHIYQGNNFFRDLGCFSHHLRWIYLTAFRGGKYELALGKAILDEARAGTMFKMLHPQGSYTDYISNQLWRALEHFRMTTPNHAVRDRHVSVILRLRKAGGLPG

SEQ ID NO: 42562 - protein, 510 aa, Oryza sativa
MALLLLLVSSSCLVVAASIAVLCYVNNDADERLPPGPRVRLPLIGNLFLHAPTMAFLPSALRRLRRSHGPVVTLWAGNRPAVFVIGRDFAHRTLVLAGAALAHRPPSPFASSRALSFNRHGVNAAEYGDRWRRLRSNICSCLAATEALRRRSVDRLVATLELEARAGAGATGVVAPTDAFRHGVFSFFAVLCFGEWVRDGEHDAVLRDLRRAHADILALTVELGAFHLVPAVLMVPYLHRWWKLSGLQRSHRDIVAALISVRRLRREKADGDVADSATFCYVDTLLELELGEDEMVSLCWEFMNAAAKTTSTALEWTMARLVHHSDIQRKLRHDIAKTTNSGGVGVSPSPYLKAVVQESLRLHPPAHYLLAHTVDRDVPLGAGGYVIPKGAIVNYAVAEIGRDATAWTDPDEFVPERFMEGGEGAMVDAVSCGGAEIRMMPFGAGRRACPGASFAVSVLHLFVGRLVEQFEWWPVAEDEKAAAVDFSEKTGLVTVMKTPLRALLVPITSS

SEQ ID NO: 42563 - protein, 125 aa, Oryza sativa
MAAAAPSPPPVAALEQMSRTKMFGGHNLRFRHHSATLGCPMTFSVFLPPSPASDLPVLYWLSGLTCNDENFVTKAGAQRAAAAHGIALVAPDTSPRGLNIEGEADSWDFGVGLSTLKTVNISSLQ

SEQ ID NO: 42564 - protein, 74 aa, Oryza sativa
MPPSPPRRARLGVKFAARRHHSADAVLPRRVAFAVANTILRGARPPFPPASRPSHHRTIAADVVPSRRFLIVCA

SEQ ID NO: 42565 - protein, 537 aa, Oryza sativa
MAKKPCEFPTAVLSFRRFLQRRFLGGRHHHRPTSTTATGAAIPPADKLHNQTVMIDLESWLLRSPMSTFPYFMIVAIEAGSFLRGLILLLIYPLLWLLLSHDMLLKAMVMVSFFGLPEKEVVRIGKAVLPKFFLEGMAMEGLEVVRNAKKVVVFSPLFPRVMVEGFLKEYIGVNAVIGREVIAVAGRYVGLLVDHIDMDDGGFVDEVMEETKRGKGDGAVGLAGVGSKMHHLFSRYCKETYVVCDADKKEWQPVPREKYPKPLIFHDGRLAFKLTPCAAVAMYTYLPWGIFLAVFRSLAFGLLPYRVSVPLAAFTGMRSRLIAGPSPDATRRNSGTAGGRLYVCNHRTLLDPITVAAVLNKPITAVTYSVSPVSELIAPIRTARLTRDRDEDRRRMEALLARGDLVVCPEGTTCREPYLLRFSPLFAELTGEVTPVALETRIDMFYGTSTKPAAKWLDPFYFMLNSRPEYHVEFLQPVSTAPVDGEAGGHGHSINAANRVQRVLGEALAFELTEQTRKDKYEMLAGNKGNVKGEAKM

SEQ ID NO: 42566 - protein, 178 aa, Oryza sativa
MQPCHGAKNSAAYAHLPHTLIIFSMWRGRSVVARGVVHRRQLRHRVLLLAREHASGGHASTANIHEFREVIWKNTNHAGFLGVTEREHQNAPRHHGFMVFRYICVMWSQIWLMRTPWAWRIDQINFSPASELQRPHADHDHRWRAGGVVVDLHERQLTVAHVHAPVLGLGGSHRWSTR

SEQ ID NO: 42567 - protein, 455 aa, Oryza sativa
MAGEVVAIHVDVGHGVPDEAQASTKIQKLDGSHITPIAQGKIHRFPRGLIGIGGSNEQRYIVPTFVAIGPYHHGKPHLHKMEEVKLAAMNRFIATANGASAGDVSGKLLSVVGDVRGCYADDEKLKCFSDDDFAAMMLVDGCFLLQFMMEKRKPLFEGRALSSEYSILKDMMLLENQVPWLVLDTLMEFLPMEMEVEQNVRCFVADVGDMFLRNNKEHEVSLTTSCFSVLFEVSPHKSSFLKDYKPANLLDLLRSSQIFRMPTEELSVRLVGSSLLSSSAVELAQIGVNLTASTAEWFGDMSVKEGPVYGELSLSPIFLNDVSAGWLVNMAALEASGGATTADQSSSSSSVMCSFLSVVAMLMDREEDVHQLRAKQVLYSTLSNAQTLDFFKRISQHLGFGHRYFYILQQINKFKQGRPVRSAVHKFLYKHIRAISIILSIASVLVGIFKALREL

SEQ ID NO: 42568 - protein, 219 aa, Oryza sativa
MDELMSASKEFFRQPLQMKREFSNLNDGEQFRAEGYGNDKVRSKDQILDWSDWIYLKVEPEDERNLALWPKHPSSFRDALHEFVVRCRRVKRDVLRAMARIAGLDDDDQHFVDQLGGRATVHARFNYYPPCPRPDLVMGIKPHSDGTVITVLLVARGADGLQVLRYGVWYSVPSSSTHALLINVGESTEVMSNGMFRSPVHRVVNSAEKERISLAMRSG

SEQ ID NO: 42569 - protein, 82 aa, Oryza sativa
MQPKSGGKLRPRLNTGERPIANKYREGKMKRTADNDAGSSRERIRDDGGARCWRPADRTAVEALIGGGGVGAELADDDDARS

SEQ ID NO: 42570 - protein, 148 aa, Oryza sativa
MEQGSERQDERPPLPCANGCGFFGSADTRGLCSKCYRQTVMSQASAPSAAAQSAEHDQVVLPAPEGVPVDEGAMPPPPPRHGAKTKSRCAACGRSVGLMGFECRCGAVFCGAHRYSDRHDCGYDYRGAGRDAIARANPVVRPDKVEKL

SEQ ID NO: 42571 - protein, 65 aa, Oryza sativa
MTIAGESAAAGEVPIISRNAKHTVCSSTCTSELPPGSVQSRPPPSTRSMFATAKPSRVVPSADAR

SEQ ID NO: 42572 - protein, 117 aa, Oryza sativa
MSVRIKAVVDRFVKELQEALDADIQDRVMKEREMQSYIQEREREVAEREAAWKAELSRREAEIARQEARLKMEKENLEKEKSVLMGTASNQDNQDGALEITVSGEKYRCLRFSKAKK

SEQ ID NO: 42573 - protein, 589 aa, Oryza sativa
MRSSWLSTASAVLVCAAALANAAKLPAPVEQIHYDQSGNLVWNEDSDAAPAVPSLGRPDFSGLSLSDIAAAAAPAKQAAHDVYADSMKYADDVLSWAEHEIERIEDKVQEVVAGTHKEIKDWIHAGKVLVDGLEFERLTHPAFPEYSLRLNAKSESFCDQDVVQHSGYLDISDSKHLWFIFFESRSKPKSDPVVLWLNGGPGCSSSTGLLFELGPCRVTDEGRAVKNNPHSWNNNANLLFLDQPVDVGYSYSDNDSVNNSPAAAEDVYAFLQLFFTKFPEYSKLPFTASGESYAGTYLPNIASTIYKKNNNLALSRYANPELAPKHINLDTVMIGNGLSSPQYQFPSVPTYACGAENKYALFDPSSSTCATLEQQATTCKSLIESCQKYNSRLTCTPAALYCWSRLYGPAQETGRNLYDVRKKCDREKDGPLCYKDMEYIETLLNTPSIKKNLGVPESVTFQSCNMNINQAFLLQGDSMHDSAALLPELIEDGIRVLIYAGEADFMCNYMGNLEWMQNLQTSYLDDFNNGTAQDWIVNGKKAGSVRKGGKGAGSVAFVRVAEAGHMVPYDQPENALDMINKWLANKPLA

SEQ ID NO: 42574 - protein, 224 aa, Oryza sativa
MRFTASPVVELPVGGAVLTFEQDNDSFEVGTSVWPSSLVLVKFAERCLRDPALPFADVLRFPGTRAVELGSGCGPAGLGLSRLGLADLVLTDIAAVLPALRRNLRRNRRHLPRAPRLAQLHWNCPAHLASLASPRRFDLVVAADVVYVPESVPHLVAAMDVLADADRGVVLLGYQVRSPEAHQAFWDAVPAAFPVIEKIPREHLDPDYAYEESDVFVLRRRPRQ

SEQ ID NO: 42575 - protein, 183 aa, Oryza sativa
MTMEAERDGEEQRRPLLSSSSPPPPSPGRRTATAFAVRPRSLPDPPFQAPSRDRLTLPASFRRIPFPAAAEHQHQHQQQYQYLGRSSSSALRGGGGGGGGGAGWGVGPEASAAEVRSAASISSASYYPPPPALHHDVYPPDIHSPSPSPAAPTAPHPHGGLAIVPQGPYPYGGEYQPSHDGRR

SEQ ID NO: 42576 - protein, 103 aa, Oryza sativa
MPRRPPDLSPPHLTGAALPHATISTALPTPPPSSLAAAATGGGSQLRLPHHASHIASPLPPRIYRPTVPPRRRRLLPRHPTPIPALLSVEIGGVAGSQGGASM

SEQ ID NO: 42577 - protein, 145 aa, Oryza sativa
MRGEDEACAQHRGGGGGARDKLISSISSSLTFISSPHSPHLFLFLLWIRPPPLSSPLLRKRRRPRAVAAASCGGPRPVAACAEGHAAAGGGGWRGCTDFFFLFSFFVLNDSICVVCVECMIRSVLRMNYVVMNVVVNDLGGTMLL

SEQ ID NO: 42578 - protein, 19 aa, Oryza sativa
MGRVTAAAPSSASPSAAAR

SEQ ID NO: 42579 - protein, 190 aa, Oryza sativa
MRKDMRGGSALPLLLLLLLCCSLAAVQPARALFHLRGAGAYVEQLRGGGGYGEEKVPMTVVVPDYSPRPAPFGAPAPAPAIPPLPGSDDGGGGDMPTLPSERRSPRGALPGGNAGAEANAGAPSPAAAAASTSTAFISSSPAVPLPAGVTDSATVLPMPTPGQEQQQVTNQPTNQTTVHHLFGCQCHLLL

SEQ ID NO: 42580 - protein, 34 aa, Oryza sativa
MGAASSSSSSSSSSPSPQGQAQAQAQGAVWCFTF

SEQ ID NO: 42581 - protein, 195 aa, Oryza sativa
MPFMPEQSCSSSSPCRYIRGGRARHAQPPCRRAELLLLLLVIPGHRLKPPSLPLLFPSPPLASTSSSSSSTRPPRGSRSSGPSPSPTPTLRTAAPPSGARWRPSSHAASRRRRWQRRRWPHRGRRPVELEARSGVLEVIATSTTHGKGDDGKHNSGGGIDGARSEEDAAERDPPLSAMVAVVAGSSPSQGCRRRC

SEQ ID NO: 42582 - protein, 100 aa, Oryza sativa
MELPMDFIPSDASLEKNSRSPTKEVTSTTPRRKNCGVSQNTDIIADDDDDATSLLRLTSTAAATAQDAREETKPTPIRCRWVTPPTRPVARRSAGTTARS

SEQ ID NO: 42583 - protein, 136 aa, Oryza sativa
MEERKWRSTSSWPPMLPVIMMAMAILAVSFNGAAAQPPPDTNVLCVSKCGTCPTVCSSPPPPASGNYNPVLSPPKGTGSGSVGGSSSSPSAPLAKGGQPGGSNYYYFFTSGGSSHGCAAALLLPPLVSLAVAALSQ

SEQ ID NO: 42584 - protein, 229 aa, Oryza sativa
MPRVDVPPSMRASKERIGLRPAEMLANVGPSPSKAKQIVNPAAAKVTQRVDPPPAKASQRIDPLLPSKVHIDATRSFTKVSQTEIKPEVQPPILKVPVAMPTINRQQIDTSQPKEEPCSSGRNAEAASVSVEKQSKSDRKKSRKAEKKEKKFKDLFVTWDPPSMEMDDMDLGDQDWLLDSTRKPDAGIGNCREIVDPLTSQSAEQFSLQPRAIHLPDLHVYQLPYVVPF

SEQ ID NO: 42585 - protein, 368 aa, Oryza sativa
MGSTAADMAAAADEEACMYALQLASSSILPMTLKNAIELGLLETLQSAAVAGGGGKAALLTPAEVADKLPSKANPAAADMVDRMLRLLASYNVVRCEMEEGADGKLSRRYAAAPVCKWLTPNEDGVSMAALALMNQDKVLMESWYYLKDAVLDGGIPFNKAYGMTAFEYHGTDARFNRVFNEGMKNHSVIITKKLLDLYTGFDAASTVVDVGGGVGATVAAVVSRHPHIRGINYDLPHVISEAPPFPGVEHVGGDMFASVPRGGDAILMKWILHDWSDEHCARLLKNCYDALPEHGKVVVVECVLPESSDATAREQGVFHVDMIMLAHNPGGKERYEREFRELARAAGFTGFKATYIYANAWAIEFTK

SEQ ID NO: 42586 - protein, 345 aa, Oryza sativa
MQKATDDNGGGDGEDGAALVSMVHDEAAAVPDVEGPDGEGDAVAADGDALGEPLLEPEPRRLLERCRELSHGGPLRHERVHRARRRHGLLGDGAGAGVLLPDPAGEADEDAAVHEPRDDEQHHRRQRHQRQPPQQREPDGVAAGEHGGVHDEVGHLLAQHVLHHEAVVGHAGDHLRRRPLLQVEVLHVLPEHRPKVPCPHPRCLPLRRPRPAIPLCSHTRHPSPAASARRRRSIGMQQFRIELGGEELQGTYHVDLGAELLDDVGATAEVVEDAAGDEQHHRRRDAVAHGAQKPKHHQRHVRRVRVHEHCHERREHRPRLRLAGAAVAASHGRRRRVLSYSLVAI

SEQ ID NO: 42587 - protein, 794 aa, Oryza sativa
MARRAASRVRAGAVGALRSEGSTQGRGGRTGGSGAEDARHVFDELLRRGRGASIYGLNCALADVARHSPAAAVSRYNRMARAGADEVTPNLCTYGILIGSCCCAGRLDLGFAALGNVIKKGFRVDAIAFTPLLKGLCADKRTSDAMDIVLRRMTQLGCIPNVFSYNILLKGLCDENRSQEALELLQMMPDDGGDCPPDVVSYTTVINGFFKEGDLDKAYGTYHEMLDRGILPNVVTYSSIIAALCKAQAMDKAMEVLTSMVKNGVMPNCRTYNSIVHGYCSSGQPKEAIGFLKKMHSDGVEPDVVTYNSLMDYLCKNGRCTEARKMFDSMTKRGLKPEITTYGTLLQGYATKGALVEMHGLLDLMVRNGIHPNHYVFSILICAYAKQGKVDQAMLVFSKMRQQGLNPDTVTYGTVIGILCKSGRVEDAMRYFEQMIDERLSPGNIVYNSLIHSLCIFDKWDKAKELILEMLDRGICLDTIFFNSIIDSHCKEGRVIESEKLFDLMVRIGVKPDIITYSTLIDGYCLAGKMDEATKLLASMVSVGMKPDCVTYNTLINGYCKISRMEDALVLFREMESSGVSPDIITYNIILQGLFQTRRTAAAKELYVGITESGTQLELSTYNIILHGLCKNNLTDEALRMFQNLCLTDLQLETRTFNIMIGALLKVGRNDEAKDLFAALSANGLVPDVRTYSLMAENLIEQGLLEELDDLFLSMEENGCTANSRMLNSIVRKLLQRGDITRAGTYLFMIDEKHFSLEASTASLFLDLLSGGKYQEYHRFLPEKYKSFIESLSC

SEQ ID NO: 42588 - protein, 421 aa, Oryza sativa
MAAGWARPAGFALLVVVVLAAAASADRPARGGLSVTAGAEESSAVFPLYGDVYPHGLYYVAMSIGNPPRPYFLDVDTGSDLTWLQCDAPCVSCSKVPHPLYRPTKNKLVPCVDQMCAALHGGLTGRHKCDSPKQQCDYEIKYADQGSSLGVLVTDSFALRLANSSIVRPGLAFGCGYDQQVGSSTEVSATDGVLGLGSGSVSLLSQLKQHGITKNVVGHCLSTRGGGFLFFGDDIVPYSRATWAPMARSTSRNYYSPGSANLYFGGRPLGVRPMEVVFDSGSSFTYFSAQPYQALVDAIKGDLSKNLKEVPDHSLPLCWKGKKPFKSVLDVKKEFRTVVLSFSNGKKALMEIPPENYLIVTKYGNACLGILNGSEVGLKDLNIVGDITMQDQMVIYDNERGQIGWIRAPCDRIPKFGSSLL

SEQ ID NO: 42589 - protein, 238 aa, Oryza sativa
MLKVAAECHLHGLVHRDMKPENFLFKSTKEDSSLKATDFGLSDFIRPGKHFRDIVGSAYYVAPEVLKRKSGPESDVWSIGVITYILLCGRRPFWDKTEDGIFKEVLKNKPGFRRKPWPNITPCAKDFVQKLLVKDPRARLTAAQALSHEWVREGGQASDIPLDISVLHNMRQFVKYSRFKQFALRALASTLNAEELSDLRDQFNAIDVDKNGTISLEELKQVHPCWNSSLHYWLVFFY

SEQ ID NO: 42590 - protein, 297 aa, Oryza sativa
MITCFLRCFTAYEEDDGVKLLIVKGKGRAFCAGGDVAAVVRSINNDSWKYGAHFFRNEFLLNYIIATYSKPQVSLLTGIVMGGGAGVSIHGRFRVVTDSTVFAMPETALGLFPDIGASYFLSRLLGFYGEYVGLTGVRLDAAEMLACGLATHFVPSDRLSLLEESLKKVDTSDPFAICGIIDQYSQQPSLKEKSALNRLEIINKCFSKKTVEEIIASLEQEAPNVADEWIASAIQSMRKASPTSMKISLRSVSSQTFPKHTSLCYSSHSILVPSDANYCSVRHYYLFRPINPLYGFI

SEQ ID NO: 42591 - protein, 402 aa, Oryza sativa
MADYVYGPGRNHLFVPGPVNIPDQVIRAMSRQNEDYRSPAVPALTKTLLEDVKQIFKTTTGTPFLFPTTGTGAWESALTNTLSPGDKIVSFLIGQFSLLWIDQQQRLNFNVDVVESDWGYGADLAALDYKLRQDPSHSIKAICIVHNETATGVTNDLSAVRKILDKHRHPALLLVDGVSSICALDFRMDEWGVDVALTGSQKALSLPTGLGIVCASPKALEASKTAKSVRVFFDWKDYLKFYKMGTYWPYTPSIQLLYGLRTALDLIFEEGLENVIKRHNRLGTATRLAVEAWGLKNCTQKEEWFSDTVTAVVVPPYIDSAEIVKHAWKRYNLSLGLGLNKVAGKVFRIGHLGHLNELQLMGALSGVEMVLKDIGYPVKLGSGVAAAAAYLSNSTPLIPSRI

SEQ ID NO: 42592 - protein, 430 aa, Oryza sativa
MIWWNIMSRSKCDKAINHISTLHKQIRSRSRVAISLIAVTISLIAVIHIGSGLLVPMKARLVVLAAAVAAAALLVSLDPRSDDVPVLEIWERDVELITVDAGGAVGPESVAFDGDGDGPYTGVSDGRVLKWLPLERRWVEHSSAVIEPHMLDSCRGSKDTKREQECGRPLGLKFNSKTGELYVADAYLGLRVVSPGENVSRPLVPKWTESPFSFSNGVEIDHETGVIYFTETSTRFQRREFLNIVITGDNTGRLLKYDPKENKVEVLVDGLCFPNGLAMSNDGSYLLLAETTTGKILRYWIKTPKASTIEEVVQLHGFPDNIKMSPRGGFWVGLHAKRGKIAEWSISYPWLRKVILKLPAQRIQRITSFLTGFGRQVIALRLSEDGKTIEAMSVHGDVRKLFKSISEVEEKDGNLWIGSVLSPFLGLYRI

SEQ ID NO: 42593 - protein, 381 aa, Oryza sativa
MQQLIICVQYTAELYHELHTLDRFEQDCRRKQQELDGLGSRGDSLHMLKQDVKSQTKHVKSLKKRSLWSKNLEEVMEKLVDIVHFLHLEINNAFGLADSEAPQEPAKHHNRLGPAGLALHYANIINQIDTLVSRSSLIPPTTRDTLYQGLPLTIKSALRSKLQSFELKEELTASQIKAEMEKTLRWLVPIANNTTKAHHGFGWVGEWANTGSELNCKLSGQMDLTRIETLYHAEKEKVDGHILELVVWLHHLISKSKNANGGVRSPIKSPVRSPTQKGITLMPDKSNSSSPILTQEDKDMLKNVKFRKFVPGISKSQEFDTKSRHSKQIRLIKSNSQSPTSGSRKDMLSLRRSSMLPVIDFQMDRTKALDLIDRLDGLKKQ

SEQ ID NO: 42594 - protein, 349 aa, Oryza sativa
MTGGEEQERRLFGVSLTDRPRWQQFLICSSGFFFGYLVNGICEEYVYNRLQFSFGWYFTFVQGFVYLGLIRLQGFTVKQMVNPWRTYVRLSAVLMGSHGLTKGSLAFLNYPAQIMFKSTKVLPVMIMGAFIPGLRRKYPFHEYISAVMLVIGLILFTLADAQSSPNFSMIGVAMVSGALVMDAFLGNLQEAIFKMNPDTTQMEMLFCSTVVGLPFLVVPMVLTGELMRAWTACSQHMYVYAVLVFEAMATFVGQVSVLSLIALFGAATTAMVTTARKAVTLLLSYLIFTKPLTEQHVTGLLLISMGIVLKLLLENKENVPRRQVRKTVQHWDDKQREIREVEEEKAPLV

SEQ ID NO: 42595 - protein, 527 aa, Oryza sativa
MICAISGEVPDEPVVSKKSGLLFERRLVERYIEDHGKCPVTKEELTMDDIVAVKTNKVVKPRQLQAASIPGLLGMFQNEWDAIMLSSFALEQQLHTARQELSHALYQHDAACRVIARLKKERDEARALLAQAERQIPASMAGAAPTAVVSNGKRAFEDEVGPDGKKIRPGINPVMIDELTECNTMLSAHRKKRQVPPTLASIDAIERYTQISSHPLHKTNKPGILSMDIHPSKDIIATGGIDTNAVLFDRPSGQILCTLTGHSKKITSLKFVPRDELFVTGSADKTVKIWQGSEEGNYNCIHTLKDHTAEVEAVTVHATQKYFVTASKDNTWCFYDIPSGSCLTQVGESSGQEGYTSASFHPDGLILGTGTTEAVVKIWDVKTQSNVAKFEGHVGPVTAMSFSENGYFLATAALDGVKLWDLRKLRNFRTISPYDSDTPTNSVEFDFSGSYLAVGGSDTRVYQVANVKLEWNLVKTLPDLSGTGKVTNVKFGTDAKYIAVGSMDRNLRIFGHPGEDDQMDDAKPSEE

SEQ ID NO: 42596 - protein, 361 aa, Oryza sativa
MKALILVGGFGTRLRPLTLSFPKPLVDFANKPMILHQIEALKEVGVTEVVLAINYRPEVMLNFLKDFEDKLGITITCSQETEPLGTASPLALARDKLVDGSGEPFFVLNSDVISEYPFAELIKFHKSHGGEATIMVTKVDEPSKYGVVVMEEVTGMVEKFVEKPKIFVGNKINAGIYLLNPSVLDRIELKPTSIEKEVFPRIASDAKLFALVLPGFWMDVGQPRDYITGLRLYLDSLRKRSTNRLATGAHIVGNVLVHESAKIGEGCLIGPDVAIGPGCVVEDGVRLSRCTVMRGVHIKKHACISNSIIGWHSTVGQWARIENMTILGEDVHVGDEVYTNGGVVLPHKEIKSSILKPEIVM

SEQ ID NO: 42597 - protein, 668 aa, Oryza sativa
MASETETFAFQAEINQLLSLIINTFYSNKEIFLRELISNSSDALDKIRFESLTDKSKLDAQPELFIHIVPDKASNTLSIIDSGVGMTKSDLVNNLGTIARSGTKEFMEALAAGADVSMIGQFGVGFYSAYLVAERVVVTTKHNDDEQYVWESQAGGSFTVTRDTSGEQLGRGTKITLYLKDDQLEYLEERRLKDLVKKHSEFISYPISLWTEKTTEKEISDDEDEEEKKDAEEGKVEDVDEEKEEKEKKKKKIKEVSHEWNVMNKQKPIWLRKPEEITKEEYAAFYKSLTNDWEEHLAVKHFSVEGQLEFKAILFVPKRAPFDLFDTRKKQNNIKLYVRRVFIMDNCEELIPEWLSFVKGIVDSEDLPLNISREMLQQNKILKVIRKNLVKKCVELFFEIAENKEDYNKFYEAFSKNLKLGIHEDSTNRTKIAELLRYHSTKSGDELTSLKDYVTRMKEGQSEIYYITGESKKAVENSPFLEKLKKKGYEVLYMVDAIDEYAVGQLKEFEGKKLVSATKEGLKLDESEDEKKRQEELKEKFEGLCKVIKEVLGDKVEKVVVSDRVVDSPCCLVTGEYGWTANMERIMKAQALRDSSMAGYMSSKKTMEINPENSIMDELRKRADADKNDKSVKDLVMLLFETALLTSGFSLEDPTPSAPGSTGCSSSA

SEQ ID NO: 42598 - protein, 256 aa, Oryza sativa
MAPKRGGRAPVPAKKKTEKVTNPLFEKRPKQFGIGGALPPKKDLHRFVKWPKVVRIQRQRRILKQRLKVPPALNQFTRTLDKNLATNLFKMLLKYRPEDKAAKKERLLKRAQAEAEGKTVEAKKPIVVKYGLNHVTYLIEQSKAQLVVIAHDVDPIELVVWLPALCRKMEVPYCIVKGKARLGSIVHKKTASVLCLTTVKNEDKLEFSKILEAIKANFNDKFDEVRKKWGGGVMGTKSQAKTKAREKLLARRLPSG

SEQ ID NO: 42599 - protein, 80 aa, Oryza sativa
MVKLTMIARVTDGLPLAEGLDDGRDQKDADFYKQQAKLLFKNLSKGQHEASRMSIETGPYYFQYPYVLCGYFILGIVHDC

SEQ ID NO: 42600 - protein, 477 aa, Oryza sativa
MNPYDLRYADPSSYRDRRSDLAGAPVLAASAPAAANPYAAAYAPAPAAPVAPAGGDFSRFGGRGRGGGAGGGGWGRGGGGGGGAGGYRGGGGRGGGRDALDSLSLPKPDFRSLIPFEKNFYVECPAVQAMSDMDVSQYRRQRDITVEGHDVPKPVRYFQEANFPDYCMQAIAKSGFVEPTPIQSQGWPMALKGRDMIGIAQTGSGKTLSYLLPGLVHVGAQPRLEQGDGPIVLILAPTRELAVQIQQESGKFGSYSRTRSTCIYGGAPKGPQIRDLRRGVEIVIATPGRLIDMLEGGHTNLRRVTYLVLDEADRMLDMGFEPQIRKIVAQIRPDRQTLYWSATWPREVESLARQFLQNPYKVIIGSPDLKANHSIQQIIEVISEHEKYPRLSKLLSDLMDGSRILIFFQTKKDCDKVTRQLRMDGWPALSIHGDKAQAERDYVLAEFKSGKSPIMAATDVAARGLGMVTCLKIRIRL

SEQ ID NO: 42601 - protein, 491 aa, Oryza sativa
MKEIVVGSVAAAAAVGRWGAAPPQAMLERMKDYGQEGAFALWDELSPEDRELLVRDIESLDLSRIDRIIRRSLGSQGFTLPTVEPVPESSVSKVEERLPEDKERWWKKGLKAISEGKLAVVLLAGGQGTRLGSSDPKGCFSIGLPSGKSLFQLQAERILCVQKLAAQSSPNNTVPIHWYIMTSPFTDDITRKFFESRKYFGLEADQVTFFQQGTLPCVSADGRFIMETPYKVAKAPDGNGGVYAALKSRRLLEDMSSRGVKYVDCYGVDNALVRVADPTFLGYFIDKAVSSAAKVVRKAYPQENVGVFVRRGRGGPLSVVEYSEMDAAMATEINQSTGRLRYCWSNICLHMFTLDFLNQVANSLEKDSTYHLAEKKIPSIHGYAMGLKLEQYIFDAFSYSPSTALFEVLREEEFAPVKNANGASYDTPDSAKLMLLRLHSRWVVAAGGFLTHSVPLYMTGVEVSPLSSYAGENLEAICRGRTFHAPSEISF

SEQ ID NO: 42602 - protein, 183 aa, Oryza sativa
MDQHQVVGENYANPKTCFFHVLFKAGALAFYILSALFVTNFVIIFVITVLLAALDFWVVKNVSGRILVGLRWWNEIDDEGNSVWKFECLDGESLARMNKKDSWLFWWTLYLTAAAWIVLGIFSLIRLHADYLLVVGVCLSLSIANIVGFTKCNKDAKKNVADWTRTTLLSSGVRSTIQSAFGV

SEQ ID NO: 42603 - protein, 611 aa, Oryza sativa
MDVESCASSSPPPDAAVDWRGRPCEPRRHGGMRAAVFVLGIQAFEIMAIAAVGNNLITYVFGEMHFPLSQAANVVTNFVGTIFLLSLLGGFLSDSYLGCFWTMLIFGFVELSGFILLSVQAHLPQLKPPPCNMAATDGGCEQARGIKASIFFAALYLVALGSGCLKPNMIAHGADQFAAAAGGGGAAAADNAKRLSTYFNSAYFSFCAGELVALTALVWVQTHSGMDVGFGISAAAMAAGLVSLVSGAAFYRNKPPQGSIFTPIARVFVAAYTKRKQICPSSSSDPVNAGVCEPAHLAGGSFRHASKFRFLDKACIRAAEQGPNTKPESPWRLCTAAEVRQAKTLLAVAPIFACTIVFNTVLAQLQTFSVQQGSAMDTALGGAGSSFRIPPASLQAIPYAMLLALVPAYELLLVPLMRRATGARSGITPLQRIGVGLCTVPLSMVAAATVEHRRRDLSLSAGGAPPRAMSVLWIVPQFLVFGVSEMFTAVGLIEFFYKQARGAGMQSFLTALTYCSYAFGFYLSSVLVSLVNRVTASRGGGGHGGWLGDNDLDKDRLDLFYWMLAVLSVINFFCYLLCARWYNSGGADDGCDASASAQVAAEGDGNGKEII

SEQ ID NO: 42604 - protein, 358 aa, Oryza sativa
MAAMAAAVASSPSPSPASTRLLRGHHPPPSCSAPSLLRLTRSSRRLRLRAAAAAEEADVLPGPGAEGEMATGGRLEEQPEGPIGGSQVDIGGLAFQGDMGGGGFAGGSGGAGAGGGDGNKMLDRGINTAIVLGASTYALTKLLTVDHDYWHGWTIFEILRYMPEHNWSAYEEALKTNPVLAKMMISGVVYSLGDWIAQCYEGKPIFEFDRARMFRSGLVGFTLHGSLSHYYYHFCEALFPFKDWWVVPAKVVFDQTAWSAIWNSIYFVVLGFLRLESPATISSELKSTFWPMLTAGWKLWPFAHLVTYGLVPVEQRLLWVDCVELIWVTILSTYSNEKSEARNSEDASTSNASNDNSI

SEQ ID NO: 42605 - protein, 112 aa, Oryza sativa
MESGLLAHSDEPCDAGSKPDADADGRRGGWRAARFLIAVGFLERVGFNGVQSNLVMYLAGPMGMSTAAAAAGANAWAGTVLVLTLVGALAADSRLGRYRAIVAAGVLHLLVS

SEQ ID NO: 42606 - protein, 425 aa, Oryza sativa
MSSMESSYLPATTESIAKAQEAKDASESISILYRVLQDPSSSAEALRTKELAITNLTNYLTKENRAEELRNLLTQLRPFFSLIPKAKTAKIVRGIIDAVAKIPGTSELQISLCKEMVEWTRAEKRTFLRQRVEARLAALLLENQEYTEALTLLTGLIKEVRRLDDKLLLVDIDLLESKLHFSLRNLPKAKASLTAARTAANAIYVPPAQQGTIDLQSGILHAEEKDYKTAYSYFFEAFEAFSALEDPKAIFSLKYMLLCKIMVNQADDVAGIISSKAGLKYLGPDVDAMKAVADAYSKRSLKYFETALRDYKSQLEEDPIVHRHLSSLYDTLLEQNLCRLIEPYSRVEIAHIAEMIELPVDHVEKKLSQMILDKKFAGTLDQGAGCLIIFEDPKTEAIFPATLETISNVGKVVDSLYMRSAKIMA

SEQ ID NO: 42607 - protein, 479 aa, Oryza sativa
MGVSALLLLLLAAAATAAPPEQPALSATPSSAAAANNSSGGGGGAASNGVNSNSVLVALLDSHYTELAELVEKALLLQTLEDAVGKGNVTIFAPRNEALERDLDPEFRRFLLEPRNLRSLQRLLLFHVLPARLHASDSSSPDFPSSHPTLSGERVDLSASPMRVGAAAVTRPDAVVRPDGVIHGIERLLVPRSVQEDFNRRRSLAAISAVLPTGAPEVDPRTHRLKKPAPPVPPGAPPVLPIWDAMAPGPSIAPAPAPGPGSGKHHFDGHSQVKDFIQTLLLYGGYNELADILVNLTSLATEMGRLVSEGYVLTVLAPNDEAMARLTTDQLSEPGSPENILYYHMIPEYQTEESMYNAVRRFGKVRYDTLRLPNKVTAREADGSVKFGHGEGSAYLFDPDIYTDGRISVQGIDAVLFPPKDTATGGEGSGSGSSGAAPARKAPAVTAHSKSKLRRGKLLEGACQVMGFLGRRSRFASCQ

SEQ ID NO: 42608 - protein, 178 aa, Oryza sativa; identical to SEQ ID NO: 33023

SEQ ID NO: 42609 - protein, 628 aa, Oryza sativa
MVTAESGVAGGGRGAAALLQEVATARFARQVVLGRWFMVFACLLILSASGATYIFGIYSKVLKSSLGYDQRTLNTLSFFKDLGANVGVISGLINEVTPPWVVLAMGAAMNLAGYLMIYLAIDGRTARPPVWLMCIYICVGANSQSFANTGALVTCVKNFPESRGIVLGLLKGFVGLSGAIFTQLYVAIYGDDAKSLVLLIAWLPAAISILFVHTVRIMPYLPSRRRRADGELEASAATSNDAFFCFLYISIALATYLLTMIVVQNQTNFSHTAYVVSATALLLVLFLPLVVVIKQEYQIKKELDDSLREPPTVTIEKPAAAAMQMSAITTKPKTETPSSSSPAPAPPSCCLGSCLKHMFNPPAQGEDYTILQALVSVDMLVLFLATICGVGGTLTAIDNMGQIGQSLGYPAKSIKTFISLISIWNYAGRVTSGFASEMFLARYRFPRPLMLTAVLLLACVGHLLIAFGVAQSLYAASVIIGFCFGAQWPLLFAIISEVFGLKYYSTLYNFGSVASPVGAYVLNVRVAGYLYDVEAARQHGGSLAGGDKTCLGVQCFRKAFLIITAATVAGALISLVLVWRTRNFYKGDIYAKFRENTATGEATTNGNSADTAAEKRSTLVNDEDSKKG

SEQ ID NO: 42610 - protein, 339 aa, Oryza sativa; identical to SEQ ID NO: 31603

SEQ ID NO: 42611 - protein, 595 aa, Oryza sativa
MASPAAAAPAALLVLLAAALAATGVVADGSDHRYKANELVPLYANKVGPFHNPSETYRYFDLPFCSPEKVKEKSEALGEVLNGDRLVDAPYKLDFRVDYDSKPVCSKKLTKEEVAKFRNAVAKDYYFQMYYDDLPLWGFIGKVEKGGKTDPKEWKYYLYRHIIFDILYNNDRVIEINVHTDQSALVDLTEDKEADVQFLYSVKWKETPTPFEKRMEKYSSSSNLPHHLEVHWFSIINSCVTVLLLTGFLATILMRVLKNDFVKYAHDEEAADDQEESGWKYIHGDVFRFPKNKSFFSAALGTGTQLFALTTFIFLLALVGVFYPYNRGALFTALVVIYALTSGIAGYIATSFYCQLEGTNWVRNLLLTGCLFCGPLFLTFCFLNTVAIAYSATAALPFGTICVIVLIWTLVTFPLLVLGGIAGKNSKTEFQAPCRTTKYPREIPPLPWYRQTIPQMAMAGFLPFSAIYIELYYIFASVWGHRIYTIYSILFIVFIILLIVTAFITVALTYFQLAAEDHEWWWRSFLCGGSTGFFVYGYCLYYYYARSDMSGFMQTSFFFGYMACICYAFFLMLGMIGFRAALFFVRHIYKSIKCE

SEQ ID NO: 42612 - protein, 109 aa, Oryza sativa
MENSAMQSQRSMSSISTAAQSSDQHGAGSSTNPNEFVNQGLLLWNQTRQQWVGNRRHNSQRQQPREPKISWNATYESLLGSTKPFPQAIPLGEMVDFLVDGWEQEGLYD

SEQ ID NO: 42613 - protein, 488 aa, Oryza sativa
MEISFEAWEGVQRHGQDIADRLAQGFTGLLQAQPPQFPWPAASHKRIPFEIDLPVVPFGASRGARAGKEFFPAAAVASVIDIGGRLGQAGVEIGASVGGAVQHAVRQLPLPFRNGQIRRRKLPPQPQAPSPAAAVGEAAVGLSVERAVDRCPLEAAAAAAAAATGSAAASTVSGAVGGDDVDEEDEGFGCEIGTFGNFKKSKGTVNVSASYNTRNHDIESSVVARGDLWRLEASRSSSTSGNDSSPLYLVQLGPLLFVRDSTLLLPVHLSKQHLLWYGYDRKNGVHSLCPAFWSKHRKWLMMSMVCLNPVACSFMDLQFPNGQLTYVAGEGITASGFLPLFGGLLQAHGKYPGETRVSFSCKNKQGTRFTPMFQWPDKSLSFGVTQALAWKRSGLMVRPSVQVSLCPTFGGNDPGVRAEVIHSLKEELNVMCGLSCSRHPSAFTALSIGRSKWNGQMGSSGVVVTLETPLNNIGRPSLSVQLNGGFEI

SEQ ID NO: 42614 - protein, 116 aa, Oryza sativa
MHISTWLPSTEVHFSGLMDITMCMHITPKHTNICINQESCHDVISLSFLFQDYLVNDSSVAVKIVWFLPLWFYRFSCWDCNFTPLLELEHLNISPPCSGTSCSSRNYSNWAFSSSS

SEQ ID NO: 42615 - protein, 628 aa, Oryza sativa
MRGPVRWAVVVVVMAMVEAAAGRFVVEKNSLRVTSPEGIKGKYECAIGNFGVPQYGGTLHGWVEYPKSNQKACKSFEDFDISFKSTRSGGRPKFVLIDRGQCYFTTKAWNAQNAGAAAVLVVDDKSEPLITMDNPDDAGTEHLENITIPSVLITKKLGDDLKKSAENGDMVSVLLDWRESLPHPDERVEYEFWTNSNDECGPKCDMQMDFVKSFRGTAQILEKKGYTQFTPHYITWYCPEAFVVSKQCKSQCINHGRYCAPDPEQDFSQGYDGKDVVVQNLHQICVFKAANESGKPWLWWDYVHDFSIRCPMKEKKYTPECAVHVIKSLGLDVEKIKKCVGDPEADEENPVLKAEQDAQIGHDKRGDVTILPTLVINNRQYRGKLDKSAVLKAVCAGFEETTEPAICLSEDVQTNECLENNGGCWQDRDNNVTACKDTFRGRVCECPVVKGVKFVGDGYTNCEASGIGRCEIKNGGCWKETRNGKTISACSNEVSEGCKCPPGFKGDGIKSCEDIDECKEKLYCQCKGCSCENTWGSYECSCGGNNMLYMREHDTCLSKEATSAVGWSFLWVIFFGLVLAGVGAYAVYKYRLRSYMDSEIRAIMAQYMPLDNQEAANQHHVAHAGDDI

SEQ ID NO: 42616 - protein, 847 aa, Oryza sativa
MQMPFCPKLWSSAAPAPVQPGSVVINGTVVVANHFGLSAPGKSTTLRLFSGTEVDHETRKGRLSAEAALRGGKKTRHGKASTTMYQVTFFVDGEFGTPGAVAVKNGNRNDQFFIRHVRLDLAEDRSIHFDCNSWVYPYKKTTSDRVFFINTSYLPDKTPEALRLLREEELRSLRGNGRGERKDWERIYDFDYYNDLGNPDNDDHVRPVLGGTKTHPYPRRCRTGRPLSKTDGVTETRKHKLINLDYYIPPDERFSPGKLAEVLAMGVQAVTHFVIPEARSIFHGDVVNFKSTEQLRADLYGKPPQPAADARVMDELKSSVPSHKTYKQVSRIVKDNPAKFPTPQVIHYDTEAWRSDEEFAREMLAGLNPVVIKRLEVFPPNKSKITTDDIMTQIGGLTIQQAMEQKRMYILDHHDYLMPYLRRINTEGVCVYASRTLLFLRDDGALRPVAIELSLPDGGVGGSEISRVFLPASQGTDAHLWHLAKTHVAVNDSGYHQLISHWLFTHATVEPFIIATRRQLSAMHPIHKLLDPHFKDNMQINTLARSILLNAGGLLEKTMYPGKYSMEMSSDIYAHWRFTEQSLPNDLIKRGMASRDPKARGGVSLHIEDYPYAVDGIDVWLAIEGWVRSYCDHFYHADAAVAGDAELQAWWDDVRRVGHGDRQGDAACWLDLDTVAGLVETLSTLIWTASALHAAVNFGQYGYAGYPPNRPTRCRRFVPLPGSPEMAQLEADPGRFFLETVPDRFTATLGIALIEVLSNHTSDEVYLGQRATSTWTDDGEVLLLLDRFRDELRRVEKRVEERNKDPRLVNRRGPVRVPYTLLYPDAGDVAGKEKGITGRGIPNSVSI

SEQ ID NO: 42617 - protein, 283 aa, Oryza sativa; identical to SEQ ID NO: 33113

SEQ ID NO: 42618 - protein, 141 aa, Oryza sativa
MAATSLSPPTVAGLRLAPSPRVRSPSVAFRAAPARRRSVAARAELSPSLVISLSTGVSLFLGRFVFFNFQRENVAKQVPEQNGKTHFDAGDERAKEFAGLLRSNDPVGFNLVDVLAWGSLGHIVAYYILATYSNGYNPNFF

SEQ ID NO: 42619 - protein, 492 aa, Oryza sativa
MILRALKELPDPIISSRRAIAKYISDNFSGLPSHHDALLTVHLRRLRSQGLLLMSGHSYLLSTSATAARGRGRGRPPKKASSSAPPQKRGPGRPRKNTALFPVPVLEAKPGRGRPRKNPLPVASSTSSAAAAATALSLRVKRGPGRPRKNAAATPLRLGAKRGPGRPRKNATATPLSLGVKRGPGRPRKNAAAAASPVAPPPASPLKRGVGRPRKNATPLVKPGPGRPSGFKRGPGRPRKNATPPVLSVPPTAAAVLGVKRGRGRPRKDKPLQSWSVLSGGAAMTKRGPGRPRKKRPLEAGGVVAAQVDTADGGEAGAVQNGGEVRCLLSDGASSMGNRGPGSPRKEVLLENEPTVSTLVGKRGRGRPKKEKPSAARPAETGDAKSMGIKRGRGRPRKDSSFQAVFAEAAGQVSRDVTAAQPEGDADLLARKEPETAAVVSVENKETRPADAGGVVVSEEKTSIDPVEAGSVMPCVNAEVDRMNSDLRTANP

SEQ ID NO: 42620 - protein, 180 aa, Oryza sativa
MMRGLGPAAAAALGGRSAARWCTYRRVTVAVCLGNLVAVLLVVRSLYSAPGYFASAPRRVAVKYSEEQIRLVEESIRIRRAAVSVELVEAVKKLEKVFAREEKRRKELPLELKQKVSYEILERMRDLGENSNTTEQREALESWRLEKLKDIRSASAQNLSMSDLSNEESRMLKRALELNW

SEQ ID NO: 42621 - protein, 660 aa, Oryza sativa
MVAFYGLGDGGCLVSAPAELAGMFCRGGVVVQQQQRKRSLVAASAVAAADCVVRAAKRQRQQRQPPSLDALPDECLFEVLRRLPGGRERGASACVSRRWLALLCSIRASELNQATAAAAAAAPPSLPDLNEEFVMEEDDEEEESSPVVDPCVERVLEGKEATDVRLAAMAVVAGSRRGLEKLAVRGSHPTRGVTDRGLLAVARGSPNLCSLALWDVPLVTDAGLAEIAAGCPSLERLDITRCPLITDKGLAAVAHGCPNLLSLTVESCSGVGNDGLRAIGRSCSKIQALNIKNCARIGDQGISSLVCSATASLTKIRLQGLNITDASLALIGYYGKAVTDLTLVRLPVVAERGFWVMANAAGLQNLRCMSVTSCPGVTNLALAAIAKFCPSLRQLSFRKCGHMTDAGLKAFTESARLLESLQLEECNGVTLVGILDFLVNCGPKFRSLSLVKCMGIKDICSTPAQLPLCKSLQFLTIKDCPDFTDASLAVVGMVCPYLEQVDLSGLREVTDRGLLPLINSSEGGLVKVDLSGCKNITDAAVSTLVKGHGKSLKQVSLEGCSKITDASLFAISENCTELAELDLSKCMVSDNGVATLASAKHLKLRVLSLSGCSKVTPKSVSFLGNMGQSLEGLNLQFCNMIGNHNIASLEKQLWWYDILA

SEQ ID NO: 42622 - protein, 187 aa, Oryza sativa
MSDSNPGAANPALGPDADAAAGEGLELAQFAAGCFWSVELTYQRLPGVARTEVGYSQGHRHEPTYRDVCGGGTGHAEVVRVHYDPKACPYEVLLDVFWAKHNPTTLNRQGNDVGTQYRSGIYYYTAEQEKAARDSLAEKQKEWKERIVTEILPATRFYPAEEYHQRYLEKGGQSAKKSCNDPIRCYG

SEQ ID NO: 42623 - protein, 488 aa, Oryza sativa
MGLVKDGAADLEEGTLEIGMEYRTVSGVAGPLVILDKVKGPKYQEIVNIRLGDGTTRRGQVLEVDGEKAVVQVFEGTSGIDNKYTTVQFTGEVLKTPVSLDMLGRIFNGSGKPIDNGPPILPEAYLDISGSSINPSERTYPEEMIQTGISTIDVMNSIARGQKIPLFSAAGLPHNEIAAQICRQAGLVKSLEKGKHAEGGEDDNFAIVFAAMGVNMETAQFFKRDFEENGSMERVTLFLNLANDPTIERIITPRIALTTAEYLAYECGKHVLVILTDMSSYADALREVSAAREEVPGRRGYPGYMYTDLATIYERAGRIEGRSGSITQIPILTMPNDDITHPTPDLTGYITEGQIYIDRQLHNRQIYPPINVLPSLSRLMKSAIGEGMTRRDHSDVSNQLYANYAIGKDVQAMKAVVGEEALSSEDLLYLEFLDKFERKFVTQGAYDTRNIFQSLDLAWTLLRIFPRELLHRIPAKTLDQYYSRDATH

SEQ ID NO: 42624 - protein, 289 aa, Oryza sativa
MSGADVDKVQNLIHCCLQLYMDKKEVVDALSREAKIEPSVTQHVWQKLEENNREFFKAYYLRLMLKNQITAFNKLLEDQLRIINKEYHPGPSSMPLPNGSNSNLLKQNPCFLSESTPMPAMPDDVMCNGNSSGIVDRTQSSDQLIYAGKDIQGLHSSMDASNLLPVQNANSVLFGVENGTTIKTESGYSSNGNFGFCGNAFLESCQSIGDASGGSFSSSELNGQPLDDSILDIESSSFGFLSQLPRNFFSDLPEDFSQSTEILDNYGKSPFLPSEQNNFSDSTGGEHTG

SEQ ID NO: 42625 - protein, 284 aa, Oryza sativa
MLTPRVLKLSLLRRLGAASAARAAERPPPCRPRVFPARSNHSRGYSSEGGSKYNRPMRQFAEENEANPQPLIYYVVPSALLVFAGLVTFVHYNDEKRAVTQEAQQTSVPKRCTTNRPAIGGPFKLYDTENKEVTESKLRGNWTLMYFGYTSCPDIGPAEVQKMADVVKLLESKYGTKITPLFITIDPQRDSPAQLKAYLSEFDPRIIGLTGSINAVRQIAQEYRVFFKKVDDIGQDYLVESSHNMYLLDPCLETARCFGAEYEASDLAEAITLEIQKASKSSTN

SEQ ID NO: 42626 - protein, 204 aa, Oryza sativa
MVEVGGGAAEAAAGRRWRLADERCDLRAAETEYVRRFHRHEPRDHQCSSAVAKHIKAPVHLVWSLVRRFDQPQLFKPFVSRCEMKGNIEIGSVREVNVKSGLTATRSTERLELLDDNEHILSVRFVGGDHRLKNYSSILTVHPEVIDGRPGTLVIESFVVDVPEGNTKDETCYFVEALLKCNLKSLAEVSERLVVKDQTEPLDR

SEQ ID NO: 42627 - protein, 205 aa, Oryza sativa
MERKVVVVCAVVGFLGVLSAALGFAAEGTRVKVSDVQTSSPGQCIYPRSPALALGLISAVALMVAQSIINTVAGCICCKRHPVPSDTNWSVALISFIVSWATFIIAFLLLLTGAALNDQRGEESMYFGSFCYVVKPGVFSGGAVLSLASVALAIVYYVALSSAKSPPNWGPQQNQGIAMGQPVIPPQSSEPVFVHEDTYNRQQFP

SEQ ID NO: 42628 - protein, 724 aa, Oryza sativa
MMAASNGEEPPSTSMATSSSPLPMVAQLMVTTDRAVSQQLKDLVNKENSTTMVAALSLSREAYEVAMALKNGEEHRQGRCSGKGDAAAMLMMMASKKEDAAKPSTASMNPLLLSLASQGRLNDYDAESGMDLDGVTTEGNTALHVVATCGDGPGYLRSAGVIYSRSQHLMLVQNNNGDTPLHCAVRAGHSKMVDHLIDLVETKDNSPSSARLEELLRKENCRKETAFHDAVCIGNKDIITNLLKYYSELAGFLMDATGTSPLYLAVLHQQVDIAKLLHQMTDGNLSYSGPNRQNALHAAVLQDQVMTKMLLNWNNGLTEQSDENGSTPLHFAASLLRRGIYNTVIPVLRANPVQLYKQDSEGLYPIHVAASSGANLTVKSFIRERPEIAGLRDSKGRTFLHVAVERERWNVVVYACHTQSLARILNMQDNDGNTALHIAVKHGNKAIFCSLLMNKEVNLNISNNKGQTALDISQSKILAGYFYGWNPNKLILRALTFCNARGGCRRVDHLQEQYIIHQKQVDEVRESDKMTNSTQTLGIASVLIVTVTFGVMFAIPGGYKADDHNNGGTPTLAGSYIFDAFIMANTIAFICSSLAIINLMYSGMPMASLPLRRRHFNISLLLAFSSVTSLGTAFALGMYLVLAPVTRCTAIAICAMMMIASLCLYTEPLNGVRFAIALYVRRGNRVLLVIAQILLIRTLITYWPCVIIFGWAAISTKDGHTRHG

SEQ ID NO: 42629 - protein, 517 aa, Oryza sativa
MAVRRRRRRSRAAAVLVAALLLAASAATASAASSYPAKVVTGLLSSTASAVVKQLWSLKSTATRTGSAAAGRSMVKYEGGYAVETVFDGSKLGIEPHDVEVTPSGELLVLDSMNSNVYRVQLPLSRYSRPKLVAGSPEGLSGHVDGRLREAKMNHPKGFTVDDRGNIYVADAMNMAIRKISDTGVTTIAGGKSMRGGHLDGPSDDAKFSTDFEIRYISSSCSLLVIDRGNQAIREIALHNDDCEYQYEAGFPLGIALLFAAGFFGYMLALLQRQVLGMVSTADEPQTPPRPSIASIPPYQKPLKPSLRPPLIPTEDQAGKHEAEEGFFTSIGKLIGGAKSSAVEIFSRKKRPTHQYHHHLQQQRANPWPVQESYAIPHDETPPPLDMRAATPRKDYAFMTKEPEKVHHVRHGRPYFNGWDMQHAPQQQPEQQMYHQQHLQQHRQYSAGPQTFYEQSCETTNEIVFGAVQEVDTKRRMVEIKAVNYGDTFYEQYGMRYRNNYIGYNNSSNGNNNSYYY

SEQ ID NO: 42630 - protein, 462 aa, Oryza sativa
MRSERTRSGSFSSSSSSSSGTPGISNEPPFLSFSVDNIDTVKLLELLGPEKVDSADVKAIKEKLFGYTTFWLTREEPFGDLGEGVLFIGNLRGKREEIFAKLQQQLRELTGDKYNLFMVEEPNSEGEDPRGGPRVSFGLLRREVSEPGPTTLWQYVISLLLFLLTVFSCVELGIASKISSLPPEIVTYFTDPNATGPPPDMQLLLPFVESALPVAYGVLAIQLFHEVGHFLAAFPKKVKLSIPFFIPNFTLGTFGAITQFKSILPDKKTMFDISMAGPLAGAALSFSMFSVGLLLSSNPAGASDLVEVPSKLFQGSLLLGLVSRATLGYRAMHAATVAIHPLVIAGWCGLTTTAFNMLPVGCLDGGRALQGAFGKDALFGFGLTTYSLLGLGVLGGPLSLPWGLYVLICQRTPEKPCLNDVSDVGTWRRAALIVSVFLVVLTLIPLWDELAEDLGVGLVTSF

SEQ ID NO: 42631 - protein, 451 aa, Oryza sativa
MNGLADNGSLTKQSKNLRDVDHGLRHAILEILDFFQPFKRQLSEVQGKSSHQNTILEKIEKFSTIADKVVLNENALAEMVIALAEILAGNSAIKLTLPRDSITETESNNLDYVDKVTLLENKVHHEPIKDSLADICSLAPHSSSDPDFEGSRDAFVVKTTVQMCSMEEYEQLKSEKRKLEMELAKCNETIECRKLEFSLMEKNMEELTSKLSACEKSNSLTETQLKCMAESYKSLELHKLKLESEIEVMHRQINTLRTELADERQNHQDDLAKYRDLKEKIERYENEKNTSSVDEDAGVKIKQDKEIAAAAEKLAECQETILLLGRQLQTLRPPPAEPLGSVLNQQPVGVFSEDQARTTQGLHFKKLSGQFDTDHTFSSAPGTGNVSPLNGYRTHKSPSNLDGNTYFASPNNSKRPKHRSRSSSSSSFTNQFTEKQSRGFSRLFSKSKSEY

SEQ ID NO: 42632 - protein, 552 aa, Oryza sativa
MAAAAVEEGGGGGAVARIFVGGISEGVAAADLEAMFASVGRVAGVEFVRTNGRSFAYVDFHCPSDKALAKLFSTYNGCKWKGGKLRLEKAKEHYLTRLKREWEQEAAAAQEMPASADVESKKEKLELNKAVLDSTKINIYFPKLRKVKALPFKGTGKHKYSFRHIEVPSYPIHFCDCEEHCGPPEAANDEYASVLDAAAYEKERSIMNSVMSKLFEKENDHLDSMEIQNHGVDFDAAEPSNARNELQMDKREETSEEDLDDQMEETEDPSEEELDDLVLNIVTCKPKSSVAQLNSEKQAADKDSRFRKRQQFEESSLQKRHKSSDFSETRNRKQSFPAISGAIQNEQKSSDLSGKGTHEFSSELDGDKSSASVQDVEALADSSTRNGSEQNSLASEPKRVSLWTQKSAWRDLVGGMGSASFSLSQILPNTNPAPPKVSNATEASASHAESRTKVKPSGKSLKPSEAATQLLPEQKMPTSSMAMLSSERKENNKLEKERVVPKITIGEVCPFMRNSESEKQWSKAKKVLTGFIKKGNESTGSNVGKGKPSTRR

SEQ ID NO: 42633 - protein, 123 aa, Oryza sativa
MVCVFCHFTFHYTLIVDECVQELAEPTIKDAFGKCVQQGASRVIVSPYFLSPGRHWKQDIPALAAEASKEHSNITYVVTAPLGLHELMVDVMNDRIKYCLRHVAGNVEECTVCAGTGKCQLYP

SEQ ID NO: 42634 - protein, 269 aa, Oryza sativa
MAMAMAAMRGAAASLGPGAVSWNSKRFFLSSSSTTSRPHRRRLRAFPSSEQTLEELNPSVELLRKTAEAVGDFRKTPIYIVGTDCTAKRNIAKLLANSIIYRYLCSEELLEDVLGGKDALNAFRESDLNGYLEVETEGLKQLTSMGSLVLCCGDGAVMNSTNLGLLRHGVSIWIDIPLELVVNDMLKTQATSDPDSFSEAMSRVRQRHDELKERYGVSDITVSVQNVASQLGYSSIDSVTLEDMVLEIVRQIERLIRAKSMMEAAGKPF

SEQ ID NO: 42635 - protein, 562 aa, Oryza sativa
MESNSGEIEELPPPPPLPPNAEPIKTDDTKKLSKPKRALMARSGCGKKGQPIQLLTNHFKVSLKAADEFFHHYYVNLKYEDDRPVDGKGIGRKVLDKLQQTYASELANKDFAYDGEKSLFTIGALPQVNNEFTVVLEDFNTGKSSANGGSPGNDSPGNDRKRVRRPYQTKTFKVELNFAAKIPMSAIAQALRGQESENTQEAIRVIDIILRQHSAKQGCLLVRQSFFHNNPSNFVDLGGGVMGCRGFHSSFRATQSGLSLNIDVSTTMIVKPGPVVDFLLANQKVDHPNKIDWAKAKRAPKNLRIKTSPANTEYKIVGLSERNCYEQMFTLKQRNGDGEPEGVEVSVYEYFVKNRGIELRYSGDFPCINVGKPKRPTYFPIELCSLVPLQRYTKALSTLQRSSLVEKSRQKPEERMSVLSDVLKRSNYDSEPMLNSCGISIARGFTQVAGRVLQAPKLKAGNGEDLFARNGRWNFNNKRLIKASSIEKWAVVNFSARCNIRDLVRDIIKCGGMKGIKVEDPFDVIEEDPSMRRAPAARRVDGMIDKKKKASWTTKVSALCSC

SEQ ID NO: 42636 - protein, 448 aa, Oryza sativa
MALKLLWLHADGHCQCHLSLLLRLVACLALVLLLPPPPPAQAATVVTHLPGFDGPLPFYLETGYVGVEEETGTELFYYFVESERSPRSDVVLLWLSGGPRCSVFSGFVYEIGPVMFVAERYSGGTVPRLEYNPYSWTKLASILFVDSPVGSGFSYAHDPKGYDVGDISSSMQIVKFLRKWLDDHPKYLSNPFYIGGDSYAGKVVPLITQYLSEGIEEMRHPIINLKGYLVGNPSAGDKIDVNSRVPYSHSFGVISDQLYEAALANCKGDYENPTNKPCTDVMQTINNLMSEVLEPACPFDWPWPMPGRDASNRKSLTEEHYWLGDPPVEPPFSCFAAYRYYLSYFWANDNATRAALGIKEGTVTEWIRCPTGLPYTRDLPSSIECHFNVTTRGYRALVYSGDHDPIVPFSGTQAWIRSLNFSIVDDWRAWHLDGQAAGLNSQSSMLTT

SEQ ID NO: 42637 - protein, 122 aa, Oryza sativa
MGLLDKLWDDTVAGPRPDTGLGRLRKHAAARPAAVKINDPTTLAGAEEAPVKVTRSIMIKRPAGYPASPRSAASTPPASPAGSTPPISPFAGAGGRFRRKSSSDAYERATPGTTSHPPPFEV

SEQ ID NO: 42638 - protein, 213 aa, Oryza sativa
MEALHEEKSSLEVILNGKINEASKLSSRIADLESQLNDEKEACERMASKTKKLIKAHARYVKAQDDLKRSQARFERFADLLASDTLKPCSKDQGSSAAKEDPYNAYEMSPSDQRQNHETTRKRSVALSTSEEGRNGKKRRESYDNRDPMSEKYRPEDALEPFQSSKGTEAKELLSVKKNLGDGDNNEKGNVVSSANVFTDRYEGGDDDDVLVD

SEQ ID NO: 42639 - protein, 143 aa, Oryza sativa
MLNHITMQHGYLFKSGRRMRRFDIPESQALSLLSRDLRDAQLQALLGGGHRQRRSNTTATNISADPLLSSFGLGFSTLDSEERSKAPVPIPDDTSIHKDTPAQPWESRIDSSLTSEEREQKRKQATDRATFVQGLVLSTLFED

SEQ ID NO: 42640 - protein, 288 aa, Oryza sativa; identical to SEQ ID NO: 28626

SEQ ID NO: 42641 - protein, 442 aa, Oryza sativa
MPLLDTPYLALRVRLPRFPTPHNPRPAVAIEAQHSFPHGLLARAACQPLRHVAAPAEGEGEEVEDLGTPSAAAVAEAIRRASSASPVRFRRVHREENEKLRGEGGFTEPSTDFRRLCGEQLEMFRVVISRDAVLSVYVRPAGSYIMDQLELRRVALYPETNVSKGDTVILVGNFTISAGLRAAEAFLVKHQMEIITEFGAVVLPMVKHPFVVGFLVAELPELVGCTKNSETSDIQIPSHSFLDKSSDITPYTKGETWDFQTSGDQANSYAQLVTEWKNSALMISRTLAMAYVMDQKAYLLQQASWQNNIRMSGLVEQIRGPLANIRALAKMLSVHTKRNEISYDIVEDVMIQGDHLKDALQQIQDAVYLTKVNIVRYNEETLKKIQGSPSSRTLPHYQSDPKNSSQKVDSLSSHDSDNGDMVIPMPPLWLAPLQPQDARQTM

SEQ ID NO: 42642 - protein, 73 aa, Oryza sativa
MGGGVCRGRDRGGRREPALVLMSRHACDAGDAHIVNLHWVFARYMLRTSTLHFALLICCVQTTLHFVYQMYTL

SEQ ID NO: 42643 - protein, 358 aa, Oryza sativa; identical to SEQ ID NO: 30145

SEQ ID NO: 42644 - protein, 137 aa, Oryza sativa
MSNDNKKVYTLEEVAKHNSKDDCWLIIGGKVYNVSKFLEDHPGGDDVLLSSTGKDATDDFEDVGHSTTARAMMDEYYVGDIDTSTIPARTKYVPPKQPHYNQDKTPEFIIKILQFLVPLAILGLAVAIRIYTKSESA

SEQ ID NO: 42645 - protein, 621 aa, Oryza sativa; identical to SEQ ID NO: 30151

SEQ ID NO: 42646 - protein, 149 aa, Oryza sativa
MASSDVSVDVRPEFNSFDHLRSIRYIATDRPWLTLYGIRVQPVTPFSSLSSRPDLALIHQCLPDELLFEIFARMSPYSLGRAACVCRKWKYTVRNPTLWRNACLKTWQRTGMEANYQMVQSLYDSSWRKMWMLRPRIQFDGISSRRILS

SEQ ID NO: 42647 - protein, 638 aa, Oryza sativa
MQRICPAHCSVTHSLTMKSMRLSYIPPAASAAPQSPSYGRKKNASAAPPSAAASTTVLTSPLVTTTRTPKQTEQEDEQLVAKTKTTRTVIATTNGRAAPSQSRPRRRPAPAAAASAASLPMTFCNALEEVINTFIDPPALRPAVDPRNVLTSNFVPVDELPPTPCPVVRGAIPRCLAGGAYIRNGPNPQHLPRGPHHLFDGDGMLHSLLLPSPASSGDDPVLCSRYVQTYKYLVERDAGAPVLPNVFSGFHGVAGMARGAVVAARVLTGQMNPLEGVGLANTSLAYFAGRLYALGESDLPYAVRVHPDTGEVTTHGRCDFGGRLVMGMTAHPKKDPVTGELFAFRYGPVPPFVTYFRFDPAGNKGADVPIFSVQQPSFLHDFAITERYAIFPEIQIVMKPMDMVVGGGSPVGSDPDKVPRLGVIPRYATDESEMRWFEVPGFNIMHSVNAWEEAGGEELVLVAPEVLSIEHALEHMELVHSCVEKVRINLRTGVVTRTPLAAGNFDFPVINPAFLGRRNRYGYFGVGDPAPKIGGVAKLDFDRAGEGDCTVAQRDFGPGCFAGEPFFVADDVEGNGNEDDGYLVCYVHDEATGENRFVVMDARSPDLEIVAEVQLPGRVPYGFHGLFVTQAELQSQHQ

SEQ ID NO: 42648 - protein, 422 aa, Oryza sativa
MPIPVDLGEPDNRRFFVWVEDNILTILPPDADDHEYSGFNMWTVQKPSAGSTAINLLFPGGATAAELMYAVPGASKCSKPEDDDAVYCVEAQVHFIGEQLDGTEFVSTRENGVPQRFILGQENVMHGLSLVVSAMRPGERAIFTIPPKLAITKSGSPASIPSSIPPEQTLRFEIELISLFAITDILENGSILKKIIKRPLPDKSPSNHADTVIVNYNACLEDGNSVSKSERLELNLASRTGFFCPALKYAVKTMREGEEAIFIVKPRYAFGAQGRDSTGDQAAVPPDATLYLYVQLAERKTAKQNEAEEKGPFIDGPNEAKTTARALPKRRPVKPGFSLPVVQNDRPTYPGHVLFVPHVVEEEEADAGQAASTTTSGLATPPTTAADVGTSAATNSSAAQGSGIVKTETGFLFKRFRPWPAN

SEQ ID NO: 42649 - protein, 478 aa, Oryza sativa; identical to SEQ ID NO: 32725

SEQ ID NO: 42650 - protein, 258 aa, Oryza sativa
MLPFQLGLNSIKTLTLLAPLSIFADVVDLGAMGVVLGEDVSVWLAKPPPVFAFGGLSAILYGIGVSVYAFEGIGMVLPLEAEAANKKKFGTTLGLSMGFIAVMYGLFGAMGYIAFGDATRDIITTNLGTGWLSAAVQLGLCINLFFTMPVMMHPVYEVAERLLHGKRYCWWLRWLLVLAVGLSAMYVPNFTDFLALVGSSVCVLLGFVLPASFHLKVFGAEMSWSGVPSDVLLVLLGLSLAVFGTYTSLLQIFHSSSA

SEQ ID NO: 42651 - protein, 441 aa, Oryza sativa
MGSVADDAEITGPLLAAAAGGGGDSAAAAGVERVPAWREQVTVRGIVVSAVLGVLFCLITHKLNLTVGVIPSLNVSAGLLGYFLVRSWTAVLGRLGFVIAPFTKQENTVIQTCVVACYGLAFSGGFGSYMLAMDQKTYELIGPDYPGNRAIDVMNPSLGWMIGFMFVVSFLGLFSLVALRKVMVIDYKLTYPSGTATAMLINSFHTTSGAELAEKQVSCLGKYLSISFFWNCFKWFFSGVGDSCGFDNFPSLGLAAFKNTFYFDFSPTYIGCGLICPHIVNCSTLLGAIISWGFLWPYISTKAGDWYPANLGSNDFKGLYGYKVFISVSVILGDGLYNLIKIIYATIKEVMNARWEQGRLPLVRVHDDDEGSKLSAEEKLRNDTFLKDRIPSWLAGSGYVGLAAISTATVPMIFPQTGTLRPRMERLAFLFLPPWLAEAVA

SEQ ID NO: 42652 - protein, 438 aa, Oryza sativa; identical to SEQ ID NO: 28597

SEQ ID NO: 42653 - protein, 326 aa, Oryza sativa; identical to SEQ ID NO: 31611

SEQ ID NO: 42654 - protein, 591 aa, Oryza sativa
MGMVTATAAAALLASPPQGHLGRRCHLVVPGLRLRPPASSSPPHAAPPLRLSNFVPRCYITNVEVDVSHTSEQEALDDHPPLLPACAIPVVHLRDVPDASPFPLHESASHSTDFEELPVLSEGELHTIAATPAHPAGLYALYASYLFGNLVEQLWNFAWPAALAILHPSLLPVAIVGFFTKLSVFIGAPIVGKLMDHFPRIPMYTGLNAVQVATQLISAAMVIYAMKNVTHASTSAVVLKPWFIALVAAGAIERLAGLALGVAMERDWVVLLAGTNRPVALAQANAVLNRLDLVCETVGASVFGLLLSKYHPVTCLKIACGLMICSFPVLVVLGQLINRFSCHALDSSRTPSEESICANLLDVRKIVQNGLSAIRNGWNEYKQQTVLPASVATVFLNFNVALAPGAIMTALLMHRGISPSIVGAFSGLCSIMGLVATFISSSLVERVGILKAGAAGLIVQASLLSVALVVYWTGSISQRTPLLIFLAAIALSRLGHMSYDVVGTQILQTGVPASKANLIGGMEVSISSLAELVMLGMAIIANDVSHFGFLAILSVSSVAGAAWMFCQWLGNPTDEQRELFMFDPHFQVEPI

SEQ ID NO: 42655 - protein, 679 aa, Oryza sativa
MAMRHLITGQGNCAPDGASSSNPFGNLANAIFGQSSKAQSIKELPGSAVNVPTTSELGTAAPLSTIPGSENEFKQDQLPLARGADFIRGGPSHDWVESFRPPGLPEFAVPDAQLKEFEQIFNSTGPTFGPPVMDGPPQRVLSGVLRSFLASGQAGVPFQPVPVPALGLSESDKQCIRDRSCIMARHILADQPEEYIQAQVNTLLHSLDIDSNYRMKGPMHGPYPEMEEYWNQSQSAMRSGPMHNAADKWITEFGKQNNNPEEWAHSFEQQYGSNGWASEFEQHQSQMAMTGGMNMANLAAMEQSRMLAQTLASNNDPKFQMSQGADKWASEFSTEYNQGGLNENWIDEFSKMRVDDEWAEEFSGGTFGESSADPWVDEFQNQLSASKQNSGASRGVYVFSDMNPYVGHPNPMQEGQELFRKGLLSEAVLALEAEVLENPDNAEGWRLLGVTHAENDDDQQAIAAMMRAQEADPTNLEVLLALGVSHTNELEQGEALRYLHRWLQNHPKYGGIAPPQPTDSPYGPDVIRLFNEAAQMSPEDADVHIVLGVLYNLSREYDKAIAAFKTALQLKPQDYSLWNKLGATQANSIQSADAILAYQQALDLKPNYVRAWANMGISYANQGLYEDSIRYYVRAVAMNPKADNAWQYLRISLSNASRADMIAACDSRNLDVLQKEFPL

SEQ ID NO: 42656 - protein, 585 aa, Oryza sativa
MVEAGEIGGAAVFALAAAAALSAASSLGAVDFRRPLAAVGGGGAFEWDGVVPWLIGVLGGGDEAAAGGVSVGVAAWYEVWVRVRGGVIAPTLQVAVWVCMVMSVMLVVEATFNSAVSLGVKAIGWRPEWRFKWEPLAGADEEKGRGEYPMVMVQIPMYNELEVYKLSIGAACELKWPKDKLIVQVLDDSTDPFIKNLVELECESWASKGVNIKYVTRSSRKGFKAGALKKGMECDYTKQCEYIAIFDADFQPEPNFLLRTVPFLMHNPNVALVQARWAFVNDTTSLLTRVQKMFFDYHFKVEQEAGSATFAFFSFNGTAGVWRTTAINEAGGWKDRTTVEDMDLAVRASLNGWKFIYVGDIRVKSELPSTYGAYCRQQFRWACGGANLFRKIAMDVLVAKDISLLKKFYMLYSFFLVRRVVAPMVACVLYNIIVPLSVMIPELFIPIWGVAYIPMALLIITTIRNPRNLHIMPFWILFESVMTVLRMRAALTGLMELSGFNKWTVTKKIGSSVEDTQVPLLPKTRKRLRDRINLPEIGFSVFLIFCASYNLIFHGKTSYYFNLYLQGLAFLLLGFNFTGNFACCQ

SEQ ID NO: 42657 - protein, 367 aa, Oryza sativa
MKASIKFRDDDRPLVRAKVPVGVLGLPFLTGVSAGGGGDSRDLRFDLSTAFASGPALRLSYRPNDPLQPFALSVRTGLGPLGSPARAPFAISAEFNLLSSSPPAFSLLFKPRIGDFSLANSVISPPASASPAPPLPPPPPSHKLTDLANGGDDHRAFSFSGNGFAANVAAAGKSGGGVGALLSGMRLTTRSVLPLWSKASLRFQWGLRVPPELKAALADDGYGRKAGNLAINKLPLLVMNKITIEHTLRNPPHSDADKGKKKDAPEFQTEGFSLVKRQLEVLNAESIMLRRTVEDLRAEIGGNRAASMPGKGDARRMPSSLAPPPPQPFLAKPDRHGNGKEMVDSGPKPVSNEASEELKKALEARRK

SEQ ID NO: 42658 - protein, 358 aa, Oryza sativa
MSCSHLSTAWSSSALATRRRSAPSCGSSGRLQVVRCSLRELRSRIDSVRNTQKITEAMRLVAAAKVRRAQEAVVSSRPFSEALVEVLYNMNQEIQTEDIDLPLTRIRPVKKVALVVLTGERGLCGSFNNNVLKKAETRIEELKQLGLEYTVVSVGKKGNAYFIRRPFIPTERTLEVNGIPTVKDSQSICDLVYSLFVSEAVDKVELLYSKFVSLVRSDPIIQTLLPMSPKGEICDINGVCVDATEDELFRLTTKEGKLTVGREKVKIETQPFSPVVQFEQDPVQILDALLPLYLNSQILRALQESLASELAARMSAMSSATDNAIELRKNLSMVYNRQRQAKITGEILEIVAGADALA

SEQ ID NO: 42659 - protein, 186 aa, Oryza sativa; identical to SEQ ID NO: 33215

SEQ ID NO: 42660 - protein, 409 aa, Oryza sativa
MSQRCGCSSSLHPLSLHCGPALFVSCDWITGVGPSRLYVPFGFTGFFWLDGISLFHCRVGSSFMGATTPISYWWVYIVLRENCFPLSMQPMVEASFFLITPQRYFSLFAFFALPSSLSPPTHLLFPAIVLPAFPSISFIDHGWGGRSARAAPLLQRIVIVFLYQFKSCQCNLAALIRVRGTSLLFFFASSLPHHCSSRYCWSIFVVGSSCIFHRRVQMAHALISQLYPGDSDKKILARVSRLWHFRDLNDDTNILHTDLVLLDEVGNSTHVQMYRGAIEVLKPLIHEGNVYYIESFTVKDANRTYRPVSNDFMILFSKWTTLEECIDIPADFPAITFSLTPFQEIPSLVDKNIFYVDIMGVITEISSTSTVRPRSRDADSLKRTLQICDASNSTLPVTLWGDRSTAENI

SEQ ID NO: 42661 - protein, 414 aa, Oryza sativa
MLANLKPQFLKFPGGNYAMGNYLRNAFRWSETVGPWEERPGHFNDAWGYWTDDGLGFFEFLQLAEDLGASPVWVVNDGASQNEEVSTATIASLVKDVVDGIEFARGGPKTTWGSVRAAMGHPQPFNLDYVSIGNQECWMLYYRGNYQKFYSAIKAAYPDINVVSSCGKSTISPSNPADLYDVHVYTSSSDMFSRTSMFDNTTRSGPKAIVSEYAVTGKDAGKGTLVEALAEAAFLVGLERNSDVVEMASCAPLFVNDNDRRWSPDAIVFNSWQNYGCPNYWMLHFFKDSCGATFHPSNIQISSYNQLVASAITWQNSKDKSTYLKIKLVNFGNQAVNLSISVSGLDEGIKSSGSKKTVLTSSGPLDENSFQQPQKVAPVSSPVDNANEQMGVLVDPYSLTSFDLLLQPSKHSTI

SEQ ID NO: 42662 - protein, 150 aa, Oryza sativa
MREYISELNLPKSTSISFPNGKDDLMNFEIIVRPDEGYYLGGTFVFTFQVSPSYPHEPPKVKCKTKVYHPNIDLEGNVCLNILREDWKPVLNINTVIYGLNLLFTQPNDEDPLNHEAAAVLRDNPKLFEANVKRAMAGGYVGQHYFPRCA

SEQ ID NO: 42663 - protein, 415 aa, Oryza sativa
MAAAVAGGGEEGEELLLLSAVEAGSFGGGGDGGGAGAAAEKSWRLNFDGFRPPEVQQERRPPRGLHNHCLGVLSQGPEDVVAEYYQQQVEMLEGFNEMDTLTDRGFLPGMSKEEREKVARSETLAIRLSNIANMVLFAAKVYASVRSGSLAIIASTLDSLLDLLSGFILWFTAFSMQTPNPYRYPIGKKRMQPLGILVFASVMATLGLQIILESVRSLLSDGDEFSLTKEQEKWVVDIMLAVTLVKLALVLYCRTFTNEIVKAYAQDHFFDVITNMIGLVAALLATYIEGWIDPVGAIILAIYTIRTWSMTVLENVHSLVGQSASPEYLQKLTYLCWNHHKAVRHIDTVRAYTFGSHYFVEVDIVLPSSMPLQEAHDIGEALQEKLERLPEIERAFVHLDYEFTHRPEHALSHEK

SEQ ID NO: 42664 - protein, 555 aa, Oryza sativa
MSSSSPSGHLLASVSSALAVLLLLLACVELGDAAAAVGVYRLIQYDLAGAPLGSRAAALNHHAAALPLPAAADLSRSALVAPLLDLPLAFLRDYLADKKYLGGLLILLPKKLNHEPNNEDKGQVKASLAELEQLLLHQQVPYPVYFAFQDDHFDNLLADIRKIASSGQPASATTGGYKLVVSTPEPRKVASPTISNIQGWLPGLKGEGETEQLPTIAIVSNYDTFGAAPALSVGSDSNGSGAVALLEIARLFSRLYSNPKTRGKYNLLFGLTSGGPYNYNGTNKWLRSFDQRVRESIDYAICLNSVGSWDNELWMHVSKPPENPYIKQIFEDFSDVSKEMGVSVGIKHKKINVSNPRVAWEHEQFSRFRVTALTLSELSSPPDFLESTGGLYDTRESADAESVIRTVRLVSESLARHIYGLKGKNIDVFAENSSLAINPHYIQSWLDLLSRTPRVAPFLQKNDPFIAALKKELSEHTADVHVQSDVLDGMFTFYDATKATLNVYQVASVTFDLLFLLVIGSYLIILFSFLVITTRGLDDLINIFRRPPSRKVKGA

SEQ ID NO: 42665 - protein, 173 aa, Oryza sativa
MEVARGGGKLNPWAEPFVPAGWSATYWRCGGVAAVEPAVDEVEDFSPEWWRLVGSSPAFRDRWLRDYSALGLLDDNDNGDGYDLEGFLLPDDLFSSTPHLVGEPADEKEGKGFGGAGGKKVKGGSAEVVAWGIDKWWRAHSSPPEVPRYADKAPRRVAAAAARVNPRPIQQPR

SEQ ID NO: 42666 - protein, 123 aa, Oryza sativa
MARIKVHELRGKNKAELQAQLKDLKAELSLLRVAKVTGGAPNKLSKIKVVRTSIARVLTVISQKQKAALREAYKKKSLLPLDLRPKKTRAIRRRLTKHQLSLKTEREKKREKYFPMRKYAVKA

SEQ ID NO: 42667 - protein, 273 aa, Oryza sativa
MGNAQASASSTSSPRFSMASRAFSRQELDDLRALFVSLAAQSQTGGRAISRPVFLEYFGIRGALGDRLFQLVARESGGGEGVTFEDLIVSKATYERGTRDEVDEFIYQLCDVTGDEVLERSDLETILASIRETIFSENKEAGEGSNKRTFEAFINSAVFSKDAEGVARKSMSLSDFRSWCILIPSLRKFLGSLLMPPDSGRPGFQVPALHYLENISPDLLLLNKEYAWHIGGGFFTTGGARMEASISQFSSWTKLQHFLRQCNEWRCTDCYHR

SEQ ID NO: 42668 - protein, 249 aa, Oryza sativa
MQSQRERPREDRVHEETRGADHAHPSVPHAAAAASATATETATRTMSLHAGGVVVVDGKEKGKKEEGEGKRKGKAPATAEAVRGRARLRGEQLRQLHEIFLRFDLDGDGSLTKLELAALLRSLGLRPAAGDEIHALIAAIDADGNGTVEFDELASSLADLILGPCRPSVAVDQAELAEAFRAFDRDGNGFISAAELARSMARMGHPICYAELTDMMREADTDGDGLISFEEFTAIMAKSALDFLGLAAL

SEQ ID NO: 42669 - protein, 193 aa, Oryza sativa
MCCIAMDLSTSFPFSLSSSRMNQEIMLKKKHVTVTGLVLHLCFCTHPSQAKSRLLLNSVLHKKRSFDNQFLSVLDGISVHYSDFDNHMSSWISCFLAWILNFSQHWLPQQTTMLIINLFYFHLSVYDSLNLSHFPSDALVPSPFLCIYHCRLSLFRWGHPLSLRIIMHDNLHLITRICRKLQAFSTDMKAWHY

SEQ ID NO: 42670 - protein, 661 aa, Oryza sativa
MSSLATPSGARGNLVASAGSRSRRSSRVLKTGCKARMVVVKRDEKWVVTIVDLDHNHPPLNPSALMSLKPHRLIKDEDHDLLEFLRTNKIPTQRIMSVLCDLYGSMQNIPLARKDVSNLRATMRPEAEGTCTDMAATIKYFQESQADDPSFFYSMELDSESKITSVFWVDGVSREAYREFGDCVFFNTKYITTKYCLPFAPIIGMNNHGQTVLFGCVLLKAEIEETFEWVFQTFLKAMDGKVPKSIMTDQDEAMENAIANVLPNTSHRRCSWYIWRNAKFKLGVLPSRLEGFEDDLRHCIDESFNVEEFERRWAAVLDRYNLASNKYMQDLYEIREKWVPCYFMDCFFPFMSITQQSEVMEALFKDFVHPGDIIQNFIVQYEKLVQSCLDRDDKQLFLTVKTDANLWSKFPMEEQASKFYTRAIFERFQEHLKNTTMYNVVCEATPYSYLVQNVFGDQSQNRRYVVHCKLEDETFTCVCKQYEREGLLCEHILKVMTHRNVNLIPDKYLFRRWTLKGSDSAATRSHVPLNMAEASTRKMRYSTICKKSVCMASEACRTQEGYNLALRSIEELTDKLAAINLTRQDQHLPRPNICDKNGKGITMGESNTIAEKVLSESCLKDPTKIRPAAFDNNSESARKRNKVMKAVQDLRSPFQVTKLTD

SEQ ID NO: 42671 - protein, 379 aa, Oryza sativa
MGVSGKGGFLAVVAVVGRGAVLLADAARVVDFGEVGSPPAPSPVADAPYLPDVASPPAVQTEGGNNYQKEILVAVILALAAVIVTVVSAIYAWTFWKKTRQALDSKDKKLSSTTKGHMLLPMFGKLNSMKTSKKEVVAMMDFSVLDSATGKFSENNILGKGGFGCVYRACLDRGVVAAVKKLNCCRQEVEKEFENELEFLGKIRHPNVISVLGYCIHEDTRLLVYELMQNGSLETQLHGPSNGSALSWYIRLKIALDAARGLEHLHEHCNPLIIHRDIKSSNILLDSDFNAKISDFGLAIYGGNHNKADLKPSGTVGYVAQEYLLDGQLTEKSDVYAFGVVLLELLLGRKPVEKIGDSHCQSIVSWVCFAISVLCGLCI

SEQ ID NO: 42672 - protein, 169 aa, Oryza sativa
MAAAMALQVVAGGGCCCQRPVLGAGRRRLAAARAVASDAAAAKVSEEEGKVRLGGSEVAVSKLGIGAWSWGDTTYWNDSEWDDRRLQEAKAAFDTSIDNGMTLFDTAEVYGTALMGAVNSESLLGGFIKERQEKEQIDVAVATKFAALPWRFGRGSVLSALKKSLDRLG

SEQ ID NO: 42673 - protein, 75 aa, Oryza sativa
MSLVKLFDTLAFDAWNPFSIFGTTVAADAWLASDTSAFANTYIESRETAEAYVFRADLPAGVKKEEVRVEVDEGW

SEQ ID NO: 42674 - protein, 385 aa, Oryza sativa
MALQFVESQREARPELADPYADLADLYQRKLWHQLTLKLDHFLQLPAAQTGDTLIQLYNNFITDFETKINLLKLAHFAVIASRQYPDKDAAISFLEGVITKLRETKDLRINEPILYVKMQIAAINLEKGNQKECKKLLDEGKSTLDSMTDVDPTVHASLYWISSQYHKARQEFAEFYKNALLYLAYTTVESLSESFKLDLAFDLSLAALLGDNIYNFGELLAHPIINSLIGTKVEWVYHMLQAFNTGNLALYQELCRVHNAALSAQPALVQNERKLLEKINILCLMEIIFSRASEDRTIPLSVIAERTKLSISDVEYLLMKSLSVHLIEGIIDEVDSTVHVSWVQPRVLGIPQVKALRERLDAWVGKVHTTLLSVEAETPDLVAA

SEQ ID NO: 42675 - protein, 335 aa, Oryza sativa
MAPGSKAERKAALDAGAWMFNIVTSVGIIMVNKALMATHGFSFATTLTGLHFATTTLMTLVMKWLGYIQPSYLPVPELIKFVFFANLSIVGMNVSLMWNSVGFYQIAKLCIIPVLCFLEILFDKVRYSRDTKFSIMVVLVGVAVCTVTDVSVNSQGLIAAIIAVWSTALQQHYVHHLQRKYSLGSFNLLGHTAPAQAASLLVLGPFVDFWLTNKRVDTFNYTAIVTFFIILSCIIAVGTNLSQFICIGRFTAVSFQVLGHMKTVLVLTLGFLFFGKEGLNFHVAIGMILAVIGMIWYGNASSKPGGKERQVYSAPSEKTQKHNILSSQSELDQKV

SEQ ID NO: 42676 - protein, 450 aa, Oryza sativa
MEDGHAPAGAELAVALDEEEEEAAPLVSGRRGAAAAARAATSQTRDLHLLSSAFLFVFLAYHAAQNLQSTVNTDENLGSVSLGLLYTSFTAFSVVGSPVVRRMGSRRALVLGTSGYLLFIAANLVPSWYTMVPASLYLGFTASIIWVGQGTYLTSAALSHARDNNLPEGQTLGNFNGEFWGMFASTQVIGNLISLALLRDGKDGGSVTGKSLLFVVFLGCMIVGIILMCLLSKRDEKGNNAPTHSSFGAMMKYIVAPLKDRRMILIIPLIAYSGLQQAFVWAVFTKNIVTPVLGISGVGGAMAIYGAADVVCSLVAGRLTSGLHSATSIVSVGAILQAVVLFWLLLFYSPMGGLLGAAVPLFIGALWGVGDGVLNTQLSALLGLLFEDVKEAAFAQLKVWQSGAIAVIFFLSPNITLQAMLILMATALIISFGAFLLLTLVVEKPSTVRS

SEQ ID NO: 42677 - protein, 74 aa, Oryza sativa
MYCPSPYLCFPPIFPWLYGFGPLLSVKDRTALGRVKQFPLSTFLSLFFGANHFSIKNALPYSTPLLTSQHTLFM

SEQ ID NO: 42678 - protein, 328 aa, Oryza sativa
MASSGEKLQKHRPEEIALRTGSSGQTTQKLREKAATENHRPKEIGPSGEKPPHKLLRAKGKAGTSSIGVTLQKHRAEKADSSRGIPHKLQAPAGTSSIGVMPQKYQAKQQMGTSRLGRHPPCIQVQGGVSNREAQAATTNRQKHTKSNNSLSTRATTKLRSATNTPCQKPTTAPSSNGNTAPPKDRKEPATNAENNAVPVAENNDLQEADEAIKRLNELGLGENISSEEFLTYIDQLNEQPKIDTSIELDDAQVTTLYFQHARYRVRYYKHLSQQPNTELVEDSYHMKLVGKMNSPMSLFARWNFLCVSRKMAHLIGISTLITAGLLL

SEQ ID NO: 42679 - protein, 309 aa, Oryza sativa
MRRVDAGAERWPPRRDVVACACVCRRWRDAAVSVVRPPLECGRITFPSSLKQPGPRDAPMHCFIRRNKKNSTFYLYLSLTQALTDKGKFLLAARRFRNGAHTEYIISYDCDDLFPGSNSYVGKLRSDFLGTKFIIYDSQPPYDGAKPSRSQSSRRFASKQINPNVSGGNYEVGQVSYKFNFLKSRGPRRMQCNIQCPVGQSTASDPLKKLISTSSPLALRNKAPRWHEHLQCWCLNFHGRVTVASVKNFQLVAPAGTSDPWGIADEETVILQFGKIEDDAFTMDYRQPLSAFQAFAICLTSFGTKLACE

SEQ ID NO: 42680 - protein, 671 aa, Oryza sativa
MDSVPAAGVGVGGGGAGAGYPESTESSPRSRGGDSWDEPFPSSAAAAAAAAGGGRLRLMCSFGGRIVPRPTDKSLCYLGGETRIVAVERNASLADVHARLSRSLLGGQPFTLKYQLPNEDLDSLISVSTDEDLDNLVDEYDRIAATSSGGGSSRTSRIRLFLFPAKPESSSSLGSLLDDSSKSESWFVDALNSAISGSLDGIPRGISTDSASVNCLLGLEDDSSTHSRGGPPNSSPAEEQRANQQKLAAAAAVAAARHPHDVQSVPDSPMIDKNSSFGSTSSAPSLSNLPPIRVRPEDRPPDSRLAPQVPVEDHFAQMGISDQPVQPVIGGYMQPPPQVPIPNMAVPSISPSDASSRVFSDDDKSDHGGGGGRKPQPPKPEVPPVADPTNRAMYYNDRSPPAELKRDMPVGTDAASYRVPVPAQDAAAAAAAAAAAAQQPPAGYVYAQMHAPPPQQQPPPPQQQQPVPQQYVTAQNQHFIHNPATGTFIPIQSYYHHPVPQQAPQPPMPQPVPQPQQSHAFDPNTGMYYIPMRTNAPQAYSMPPGAAAVPPPTLVDTTPKPTVPIPQMAVKQPELQQPGLYRTTAAPTPVPASNAPAYAGMGYHRVIQTHHHPAPQPAATVAGNFGYDYGDPTRAQVFYSQAAAPPTLPPQYQPMGSPDAGQADLKQARAS

SEQ ID NO: 42681 - protein, 428 aa, Oryza sativa
MSLKSIVRELREMRDGIGSMSRRAADGRAGGGRGGSRHSWPVLWSEQQQPPQQQQLQRQEHQQQQGRWANLPPELLLDVIQRVEASEATWPARRQVVACAAVCRSWREVTKEVVKTLEECGRITFPISLKQPGPREHPVQCFVRRDRATSTYLLYLGLSPSLHGENDKLLLAARKIRRATRTSFVISLVSNDFSLSSSTYVGKLKPNFLGTKFTIFDSQPPCDAVVLPNNRPSKRHFKQVSPRLPLGNYNVATVSYELTVLRNRGPRRMQCTMHSIPALCIQEGGKAPTPTGIIHSLDEQVPALSTSKGKEPAIEFSSTSLSADLSGPVCTNEVPLVLKNKAPRWHEQLQCWCLNFRGRVTVASVKNFQLVASVDPSLGIPAAEQEKVILQFGKIGKDIFTMDYRYPLSAFQAFAICLTSFDTKPACE

SEQ ID NO: 42682 - protein, 281 aa, Oryza sativa
MLPAGSLTDKQLHFFDANGYLVLGSFSSAEEVKAMRDRMAVLIDGFDGAGDVFSTKDHRQVKNDFFFKSAENISFFFEEKAFGDDGCLKQAKELSINKVGHALHELDPVFKKFSFGENVSSLFSSLRYKRPAVIQSMYIFKQPGIGGEVVPHQDNTFLYTNPPSCTGLWLALEDATKTNGCLWAIPGSHKNGLKRRMIRDENDTHFDHPSPTYDLKEFVPLEVKSGDLVVIHGDLVHQSFENLSLVSRHALSLHVIDTEGCEWSKQNWLQRKIPPQPLYEN

SEQ ID NO: 42683 - protein, 319 aa, Oryza sativa
MAIKRTKAEKKVAYDKKLCQLLDEYTKVLIAVADNVGSNQLQEIRKGLRGDSIVLMGKNTLIRRCIKVHADNTGNKEFLELMPLLVGNVGLIFTKGDLKEVREEVAKYKVGAPARVGLVAPVDVVVPPGNTGLDPSQTSFFQVLNIPTKINKGTVEIITPVELIKKGDKVGSSESALLAKLGIRPFSYGLVITNVYDSGSVFSPEVLDLTEDDLMEKFASGVSMVASVSLAISYPTIAAAPHMFLNGYKNVLAVAVETEYSYPHADKIKEYLKDPSKFAVAAPVAADSGAAAPSAAKEEEKKEEPEEESDGDLGMSLFD

SEQ ID NO: 42684 - protein, 639 aa, Oryza sativa
MEAALLRPPPLAARGGVSIAIAFSVSRLPSAAAAAAGKPRKLAPPACRCRATPQWQLDFLGAEADTEADGGDDDDDLDLDLSLPAETNDWCVRARRSALRSIEARGLSPSLQRMVASPKKKNKKKKSKKTNLKQKKAAEPKPPRDTDDDEDDEEEADDDLEALLAGGGELDDLELRVAQFADGMFDEKRQRNREQFIQTLSAFSPAAPSNRSQEVSLNRSIVEARTADEVLALTAEVVAAVAKGLSPSPLTPLNIATALHRIAKNMEAVSMLQTHRLGFARSRDMSMLVGLAMVALPECSPQGVSNISWALSKIGGDLLYLPEMDRIAQVAITKVDSFNAQNVANVAGSFASMRHSAPDLISALTRRAAELVYTFKEQELAQFLWGCASLNECPYPLLDALDTACRDAPSFDCHLHDTVPGMWQSSDKEASSLKNSSNAYALNFTRDQIGNIAWSYAVLGQMDRPFFSGIWKTLSQFEERKISDQYREDMMFVSQVYLANQSLKLEYPHLDMCLRGDLEENLTKTGRSKRFNQKMTSSFQKEVGRLLCSTGHEWNKEYTIDGYTVDAVLVDEKLAFEIDGPSHFSRNLGTPLGHTAFKRRYIAAAGWNLVSLSHQEWENLEGEFEQLEYLRRILGFDAE

SEQ ID NO: 42685 - protein, 392 aa, Oryza sativa
MEIFDVLQAVCQAHLLPLALAWIPVCSKRDVLVSVEYGANFGKRNKEVLCIEESACYVNDTRMRDFVQVCAEHPLEKGQGVAGNAYLSNNPFFSSDVKDYDMHAYPLVNHARKFGLHAAVAIRLQSTYTKNDDYVLEFFLPVLCKGGGEQQLLLDSISATMRRVCKSLRTVSDAELKEDVTRKPSNENRSGTRCPSPVNLIYSGREIDVSNETKTNTPLEYQIEGIDEQLSDTKSTNKLIKCSNASDGEKRRSSTEKSVSLSVLQQYFSGSLKDAAKSIGVCPTTLKRICRQHGISRWPSRKIKKVNRSLKKIQNVISSVHGVEGVLKYDPSTGCLVSSVSPSIEPVLMNVEHKENMQAKMYSTNCRISKMVKLILTWTMENYFETHILPEH

SEQ ID NO: 42686 - protein, 341 aa, Oryza sativa
MGAVCSRKRSQLVHEDDSFQTSSRFSKTSSLKWLLLTLPRSNSDVSRKGQGKGPGRCPSLMELCVAKACEDINKYSSFSVLPRDLSQQIFNELVASNRLTETLLETFRDCALQDIDLGEYPGVNDAWMEVVASQRHSLLSVDISCSEITDSGLYLLRDCPNMQSLACNYCDMISEHGLGILSGLSNLTSLSFKSSDGITAEAMEAFANLVNLVNLDLERCLKIHGGLVHLKGLRNLESLNMRYCNNIADSDIKYLSDLTNLKELQLACCRITDLGVSYLRGLSKLTQLNLEGCPVTAACLEAISGLASLVVLNLSRCGIYGEGCENFQGLKKLKVLKLGVQ

SEQ ID NO: 42687 - protein, 355 aa, Oryza sativa
MASEDVVGKSRGDTAVTTIVNLAEEAKLAREGVKGPGYQVLSICKSLFAGGVAGGVSRTAVAPLERMKILLQVQNPHSIKYNGTIQGLKYIWRTEGLRGLFKGNGTNCARIVPNSAVKFFSYEQASSGILWLYRQQTGNEDAQLSPLLRLGAGACAGIIAMSATYPMDMVRGRITVQTEKSPYQYRGMFHALGSVYREEGFRALYRGWLPSVIGVVPYVGLNFAVYESLKDWLLQTNPYDLGKDNELHVVTRLGCGAVAGTIGQTVAYPLDVIRRRMQMVGWNNAASIVTGEGKEALQYNGMIDAFRKTVRYEGVGALYKGLVPNSVKVVPSIAIAFVTYEFVQKVLGVEMRISD

SEQ ID NO: 42688 - protein, 70 aa, Oryza sativa
MDLHNGSCEKSAEENKAILRLLRQFRAETRDNGTLSGADTKNLANRYVLPVSIILSGIIIVAQGHFISHL

SEQ ID NO: 42689 - protein, 293 aa, Oryza sativa
MGLIAIPRIEPSRWLEMDLGNVNWGLYLNTLFWNLNYWDSISTLAGEVENPKRTLPRALSYALVLVVGGYLYPLITCTAAVPVVREFWTDGYFSDVARILGGFWLHSWLQAAAALSNMGNFVTEMSSDSYQLLGMAERGMLPEFFAKRSRYGTPLIGIMFSAFGVVLLSWMSFQEIIAAENYLYCFGMILEFIAFIKLRVVHPNASRPYKIPLGTIGAVLMIIPPTILIVVVMMLASFKVMVVSIMAMLVGFVLQPALVYVEKRRWLKFSISAELPDLPYSNVEEDSTIPLVC

SEQ ID NO: 42690 - protein, 252 aa, Oryza sativa
MAPWRAAAMASSQLARRAARRLLSSQHRRHCAAPACPWLLGSAPPVLAPSPVAAAAAGDRRGFCSVRRFTGESNAAAAVEEAENGLVAGGDQAIDFPGGKVSFVAEMNFLPESQRDRINCYRVLDDDGRTISGSRFQEVSKELALKMYNEMATLQVMDTIFFEAQRQGRISFYLTSHGEEAINIASAAALTIDDIVLPQYREPGVLLWRGFTLQEFANQCFGNKLDYGKGRQMPIHYGSNRLNYFTVSSPIA

SEQ ID NO: 42691 - protein, 214 aa, Oryza sativa; identical to SEQ ID NO: 31678

SEQ ID NO: 42692 - protein, 681 aa, Oryza sativa
MNTPEKKPLCYTSRRALQQRTESSSELISVSKRATRQNTPRKPDSPPKRTTRSSANLAKCIENKHHSSPLKRRRGSDAATGKSATGPTRRKHKQKRKNDESDEVSRMEKRARYLLIKIKQEQNLLDAYSGDGWNGHSREKIKPEKELQRAKKQIMKYKIAIRDVIHQLDLCSSSGSKDDSVIPPDGCHESVNPEHTICSRCKSHESFPDNNIIFCEGGCKLACHQKCLEPPFDKILPTTRHGRLCKHCSSKMKILDAINAHLGTSFTVKCPSSDIFKEAAEHFNSDDGLGQDWLSEYSGDEDYDPEENEASSSGEENKSADSNCSGSPLYSPNDDIPDFISADFNDAEGFCRESSNLGIDFGEDGLAEILTHQRPRRDVDYTQLNEQMFGEPIGNDEQSEDEDWGLNKRKKRRTGSTGVGTNSVEGRSDVKSNKKAQPRRKLFRIPPAAVEVLRKAFAENELPARSVKENLSTELGISFEKIDKWFKNTRCAALRDRKGESRYSGPSKRSRTSIEKAETSAKVDQMDNSCFLPLSEIINVPTRLQKGLDKKPKSINSPPRPQDNETCLSPTDKTKEGTPPTIKPSITDSSQLMNNNIGTEETAVSWVDTWASDALHFLDVSDDEHFFDVIEKVCGLENRLQRLKENMLSSSSSTDNNVAAESGLQNEVVLVPAAELKDKAS

SEQ ID NO: 42693 - protein, 273 aa, Oryza sativa
MDEGYANLPTSHLLGSVPAALTPEERKPSPVAEVGTSRLQQFPPALGGTGGVGGGGGGYQPPGTPADGVVETQTNWKGYFNVASYAPYFNVDTDVVVDRLISSVYPMDGFFRKIDANPDMYGPLWITTTLIFMLAAFGNFATYLMQRKTDLNIWSFDVGYFNWAASVMYGYAAAVPAIFFFLFQYFGSRPSLVRFWCMWGYSLFIFIPASVLLLIPVEFLRWVIIILVGGASSWFISLNLKECTEGADMMVLIASAAVLQFTLALFIKVFFFA

SEQ ID NO: 42694 - protein, 177 aa, Oryza sativa
MAAIASDDEAAEADGCGTIIRLPRNTSLPTCSPPTPPAGNGACGGCASGRTRAPRHCRPSELAGRGRPREVRMAREGKEWGAVVVMSPSPPRHGARHGGRVNAASFSGGIVAGVAPTPPRFLTPATGFQLRSPSGSRYCQEPVVTHDFLNTRCRRRPNYGEVWSLGRFPGLHYGCDP

SEQ ID NO: 42695 - protein, 622 aa, Oryza sativa
MAAASISRSLLRRSRCGGGEHHLLLLARGFVTAECHRPVVLHKRGSDILHDPWFNRGTGFSMTERDRLGLRGLLPPNVVSSQQQIDRFMLDMQRLQRYARDGPSDTYPLAKWRILNRLHDRNETMYYKVLIDNIEEHAPIVYTPTVGLVCQNYSGLFRRPRGMYFSAEDRGEMMSMVYNWPADQVDMIVVTDGSRILGLGDLGVHGIGIAIGKLDLYVAAAGINPQRVLPVMIDVGTNNEKLLKDPLYLGLQEHRLEGEEYVAIIDEFMEAVFARWPNVIVQFEDFQSKWAFRLLQRYRKTYRMFNDDVQGTAGVAIAGLLGAVRAQGRPMLDFPKQKIVVAGAGSAGIGVVNAASRTMARMLGNNEVAFESARSQFWIVDAHGLITEERTNIDPDARPFARRKSELGHQGLSEGASLVEVVKKVKPDVILGLSAVGGLFSKEVLEALKDSSSSRPAIFAMSNPTKNAECTPEEAFSILGEKIIFASGSPFSDVDLGNGKIGHSNQGNNMYLFPGIGLGTLLSGARVISDGMLQAAAERLASYMKEEEVLEGIVYPPISRIRDITKEVAAAVVKEAVAEDLAEGYRDMDARELARLSEEETVEYVQQNMWSPVYPTIVYKKD

SEQ ID NO: 42696 - protein, 588 aa, Oryza sativa
MALSCMRCSPAAGAVRRGLASAAPPAALSFARCGLRRAAALGWRVAAVTTTGVQGAKDAGLEKAARSASQSKVENGSPSEIILDDFEDLSPLSENDDSTVSITVVGASGDLAKKKIFPALFALYYEDCLPKHFTIFGYARSKMTDAELRNMVSKTLTCRIDKRENCNEKMEEFLKRCFYHSGQYDSEEHFMDLDKKLKQHEGSRVSNRLFYLSIPPNIFLDVVKCASKSASSGNGWTRVIVEKPFGRDSDSSSALTRGLKQYLVEDQIFRIDHYLGKELVENLSVLRFSNLVFEPLWSRQYIRNVQLIFSEDFGTEGRGGYFDRYGIIRDIMQNHLLQILALFAMETPVSLEAEDIRNEKVKVLRSMKPLQLEDVVIGQYKSHTKGGTTYPGYTEDKTVPKDSVTPTFAAAALFINNARWDGVPFLMKAGKALHTKGAEIRVQFRHVPGNLYKRSFGTDLDTATNELVIRVQPDEAIYLKINNKIPGLGMRLDRSNLNLHYAARYSKEIPDAYERLLLDAIEGERRLFIRSDELDAAWELFTPLLKELEEKRIAPELYPYGSRGPVGAHYLAAKYNVRWGDLTTEQKA

SEQ ID NO: 42697 - protein, 561 aa, Oryza sativa
MEAEDAAGGGGDGGRYFKADLTGAGVVQLSERVREKLREFVDDYTNNTLVEYVILLLEGGKRKDEAIKELDVFLGKDSRAFISWLWDHLSVNLHLYVQTQEQLQVDNKDDEAPNELPGEQKSSELQLRSKDQTHPECVSEPSTTRSRTKRDWKGIGREGNENFPLRSVLKDILHGEEKRSQKVNEIRHPPSSNQRNGRKRDRDDEPQQIKRDLPLRRDVGASCRLLKFAVRDAVKAVQQTSSSTEPSSKRLRSVVSTSSADSLHGKRIETSTEGHLYDKKPERTRQILQVPGAALALRAAAEAAADSTKVRSTGSVFSRLGQGNAVNQTPRSREQQRDYEDFKPATTADDHDSDRYDNDDEISGDITLEDGEAEMNVDSTSDDDVSRDDGITRYGSSDSQVAAYPSVVEKKDVFVKCSVEPETSTMRHSNLIKEEQPGSLSVISMSKTVVVPVNANNLEPSNYETPKDVHVVEKTDITPMNATVTSLTSNIKELAHGEVQKDSQRSAIASSVTSSYSTAHPTEDADSRTLYVSNVHFGATKDALSRPFQQVWCGAQSSYCY

SEQ ID NO: 42698 - protein, 44 aa, Oryza sativa
MVKIVSEHRDSLEFIDEVICFVQYFHTYNGCCLLKEEKPISARG

SEQ ID NO: 42699 - protein, 727 aa, Oryza sativa
MEGRKIERGRLRGFVRRMAMECLCSGEQLRAADEIIRSPESAITKDCSASGYSSQNGEMEQYLDNGNIEEAELSLREGVCLNYEEARALLGRLEYQRGHVEAALRVFDGIDIPALVPKMKISIARKVDRRKTRSQWDSPPMPLHAVSLLMEAIYLKSRALHDLGKFKEAAQECRMILDIVEAAVPEGLPAGFGKDCKLNEIICKAVELLPELWKLGGFSLEAISSYRRSLLNNWNLDGETIARIQKEFAIFLLYSGCEARPPNLHSQLDGSFVPRNNMEEAILLLMILLRKFNLKRVERDPTIMHHLTFALSISGQLKSLAVQFEELLPGMLDKREWSYNVALCYLAEEDDSTALNLLKRILKSGDDSDNFKELLLASKACTERSAQTEGASYAQRAIANMQGGCEQMAGVADLLLGVNLSNQARCATSDTERASWQCEALEVLENAENKMHGKDPRAMYSLSLENADQRKLDAAAFYAKKLVKLEAGSELRSWLLLARILSAQKQFADAETIIDAALDQTGKWSQGDLLRTKARIQAAQGQLRNAVETYTKLLAVIQLRTKSLSAGIFLAKGTKDDISLEIETWYDLALLYLRMSQWRDAEVCVSKIRTISPYSALAWHVKGKLYEAKGQPKEALGSYFRALDLDRKHVPSLISTASVLREIGNRPLPSVRCFLTDALQLDRTNHAAWFNLGLLYKEEGGRSAAEAAECFQAAALLEETAPVEPFR

SEQ ID NO: 42700 - protein, 109 aa, Oryza sativa
MAVDAHHLHRLPPPIQPAESMFSPRQPCFGAAAGEVVVGGAGGAVMAGLCQEEQLVQGYRQVFVGGGGVRQPAAAEVMRQYSQVCAAAADAACPACGCAKNGSVSVNFS

SEQ ID NO: 42701 - protein, 543 aa, Oryza sativa
MAAAQGSSVVPSSAKVDFLKLQNGSDIRGVAVGGVEGEPVNLTEPVTEAIASAFAAWLLNKKKADGWRRLRISVGHDSRISAHKLQDAVTLGITTAGHDVLQFGLASTPAMFNSTLTEDEINHCPVDGAIMITASHLPYNRNGLKFFTSAGGLNKADIKDILERASRIYEDSSHGSTQELEQASKGEVSNVDYMSIYASDLVKAVRKSAGNKEKPLEGLHIVVDAGNGAGGFFVDKVLKPLGAITTGSQFLEPDGMFPNHIPNPEDKTAMKAITQAVADNKADLGIIFDTDVDRSAAVDSSGRELNRNRLIALMSAIVLEEHPGTTIVTDSVTSDGLTTFIENKLGGKHHRFKRGYKNVIDEAIRLNTIGEESHLAMETSGHGALKENHWLDDGAYLMVKLLNKLAAARILNPNVGSKVLTDLVEGLEEASVTVEIRLKIDQNHADLKGGSFRDYGEAVLKHLENAISKDEYLCKAPKNYEGVRVSGYGGWFLLRLSLHDPVLPLNIEAPSKDDAIKLGLAVLTAVSEFPALDITALNKFLQQ

SEQ ID NO: 42702 - protein, 459 aa, Oryza sativa
MATITTQLRSALLSPAASPSRRARRAPSSVRCDSSAASSLSASASLDADFDKKQFRHNLTRSDNYNRKGFGHKKETLELMSQEYTSDVIKTLKENGNQHTWGPVTVKLAEAYGFCWGVERAVQIAYEARKQFPDDRIWLTNEIIHNPTVNKRLEDMGVQNIPVDAGIKDFDVVEQGDVVVLPAFGAAVEEMYTLNEKKVQIVDTTCPWVSKVWNMVEKHKKGDYTSIIHGKYSHEETVATASFAGTYIIVKNIAEASYVCDYILGGQLDGSSSTKEEFLEKFKNAVSPGFDPDVDLVKVGIANQTTMLKGETEEIGKLVEKTMMRRFGVENVNDHFIAFNTICDATQERQDAMYQLVKEKVDLILVVGGWNSSNTSHLQEIGELSGIPSYWIDSEQRIGPGNKISYKLNHGELVEKENWLPEGPITIGVTSGASTPDKVVEDALQKVFEIKRQEVLQAA

SEQ ID NO: 42703 - protein, 510 aa, Oryza sativa
MARRGRRSLASPAVAIALFVFLAYGGGGGGGGVCEAAPASAVVKSVPGFDGALPSKHYAGYVTVEEQHGRNLFYYLVESERDPAKDPLVLWLNGGPGCSSFDGFVYEHGPFNFESGGSAKSLPKLHLNPYSWSKVSSVIYLDSPAGVGLSYSKNTSDYNTGDLKTAADSHTFLLKWFQLYPEFLSNPFYIAGESYAGVYVPTLSHEVVKGLHDGVKPTINFKGYMVGNGVCDTVFDGNALVPFAHGMALISDGIYQEAQTACHGNYWNTTTDKCENALYKVDTSINDLNIYDILEPCYHSKTIKKVTPANTKLPKSFQHLGTTTKPLAVRTRMHGRAWPLRAPVRAGRVPSWQEFARGSRPSGVPCMSDEVATAWLNNDDVRAAIHAQPVSSIGSWLICTNVLDFIHDAGSMISYHKNLTGQGYRAFIYSGDHDMCVPYTGTEAWTRSLGYGVIDSWRPWHLNGQVSGYTQGYEHGLTFATIKGAGHTVPEYKPQESLAFYSRWLAGSKL

SEQ ID NO: 42704 - protein, 275 aa, Oryza sativa
MASDVPMSPELEQIDGEVQDIFRALQNGFQKMDKIKDSSRQAKQLEDLTAKMKECKRLIKEFDRILKDEESNNPPEVHKQLNDRKQYMIKELNSYVTLRKTYQSSLGNNNKRVELFDMGAGSSEPAAEDNIQIASAMTNQQLMDAGREQMTQTDQAIDRSKMVVAQTIETGTQTASALSQQTEQMKRIGNELDTVHFSLKKASQLVKEIGRQVATDKCIMALLFLIVCGVIAIIVVKIVNPHNKNIRDIPGLAPPAQNFQISNRRLLSVEIIRGL

SEQ ID NO: 42705 - protein, 341 aa, Oryza sativa
MAAMAAASLLCARAAAAAPTLRLRGGGRGARLVFSCSASSSSPSGEGGFSGKVGFLGLGIMGAPMASNLINAGCDVTVWNRTRSKCDPLLSLGAKYEPSPADVASSCDVTFAMLADPESAVEVACGANGAAQGMAPGKGYVDVSTVDAATSKLIGKHITSTGASFLEAPVSGSKKPAEDGLLIFLTAGDESLYNRVASLLDVMGKSRFFLGDVGKGADMKLVVNMVMGSMMVSFSEGLLLSEKVGLDPNTLVEVISQGAISAPMFSLKGPSMVKAAYPTAFPLKHQQKDLRLALALAESVSQSIPTVAAANELYKVAKSLGLADQDFSAVIEALKAKEQSK

SEQ ID NO: 42706 - protein, 341 aa, Oryza sativa
MGSLETRYRPAGAPSDDTTKRRTPKSRIYKDVENFGVLVLEKNSGCKFKTLRYLLLAITSATFLTLLTPTFYEHQLQSSRYVDVGWIWDKPSYDPRYVSSVDVQWEDVYKALENLNDGSQKLKVGLLNFNSTEYGSWAQLLPGSAVSIVRLEHAKDSITWDTLYPEWIDEEEETDIPACPSLPDPNVRKGSHFDVIAVKLPCTRVGGWSRDVARLHLQLSAAKLAVASSKGNQKVHVLFVTDCFPIPNLFPCKNLVKHEGNAWLYSPDLKALREKLRLPVGSCELAVPLKAKDSTQWIEEEKHMLLSCTQQVNMSVVLSQQLKAFAKQGQLGIWLSLSMTR

SEQ ID NO: 42707 - protein, 477 aa, Oryza sativa
MAFIGGPSTEGPGSIVSKSLSEPIRSHKDLDKGSAPLYTKAVKFYEEISKQLVHQGHVLDFFACALDQVGVAEMKVAVERTGGIVVLAESFGHSVFKESLQRIFQSSDNDLGLSFNGIFEINCSKDVKIQGIIGPCTSLEKKSPLSSDTVVGQGSTSAWKMCGLDRKTSICLVFDIAKKDGPDAISQSTSNQFYFQFLTYYQHHEGQMRLRATTLSRRWVAGSGGVQDLIDGFDQEAAAAVMARLVSFKMEAEADFDPIRWLDRALISMCSKFGDYQKETPSSFSLSPRLSIFPQFMFNLRRSQFVQVFNNSPDETAYFRMMLNRENVANAVVMIQPSLISYSFQSGPEPVLLDVTAIAADRILLLDSYFTIVIFHGITIAQWRKAGYQDQQGHEAFAQLLKAPREETDSIIKERFPVPRLVVCDQYGSQARFLLAKLNPSVTYNSDNPPPPGGDVIFTDDVSFEVFMDHLQRLAVQ

SEQ ID NO: 42708 - protein, 60 aa, Oryza sativa
MEQDVETVINVLQPGPIGIVEHKFTDAEIRNAQAVVRRAVENWQKSSTLERNLGIGSFAK

SEQ ID NO: 42709 - protein, 534 aa, Oryza sativa
MASPAAEGDAVSAGFAELERQQQLLASCTRLYKQLEEHFASLERGLAARSDSLRHKRRAAEARASAAMDSLRRREASIDGSVSRALDHLDDLASASSVPSDAAAAAEGVAESLRAMCARMDSAGFFGFVVARRKEVDALRAEMPSALKCCVDPAKFVMDAVADVFPVDRREAKNPTDLAWACVLILEAAVPALADPDPEIGAARLLVPRAARERARGMAREWKEAAERKGGVEWTKPPDAHAFLQHVATFAVAEREDRGIYRRIVVSFSWRRQMPRLALTLGLEEDMADIIEELIAKGQQLDAVNFAYEAGLQEKFPPVPLLKSYLADSKKTSCTVSDNSSTSSGQSGSNANKKEQSVLRAVIKCIEDRKLEAEFPLEDLQRQLEELEKAKTEKKKATSSASSGGSSGPATKRIRASNGGPMPPAKAGRLTNNACVSSTPAATTFVRSPSHTSYAMASPYPYDRPVGHGLYCNQSPPAIREPYVYPAKEVTNFAPGLPYSSPPISYPHAYGGYNNGMGAYNNGMAPAFHQAYYR

SEQ ID NO: 42710 - protein, 325 aa, Oryza sativa
MRNGRRDDSYQKWRWQPTDCDLPRFDARLLLERLRNKRLMFVGDSLNRNQWESMVCLVQSVIPKGKKTLTKFVNGGNSNIFYAHEYNATVEFYWAPFLVESNSDNPQVHSVPDRVIQWHSIAKHAHNWLGVDYLIFNTYIWWLNTLDMKVLKGSFDQGATEYVEVDRPVAYKEVLKTWAKWVDRNIDPNRTTVFFMSMSPNHITPEAWGNYGGIKCAMETLPITNRTTSLDVGTDWRLYAGAQEVLQTFRRVPVHLVDITALSELRKDAHTSVHTLRQGKLLTPEQQSDPKTYADCIHWCLPGLPDTWNQFLYARIASAPWSSDQ

SEQ ID NO: 42711 - protein, 406 aa, Oryza sativa
MKVSIKTLKGSSFEIDVEPTSKVSDVKKLIEVTQGDNVYPADQQMLIHQGNVLKNDTTLEENKVVENNFIVIMLSKKGSSSAASSTAKEPTKQPSVDRAIPTAPATQPPAPPAPVSEPVTAPVPTATTASAPAAAVTAASTEADNYGQAASNLVAGSNLEGTVQSILEMGGGAWDRDTVMRALRAAYNNPERAVEYLYTGVPEQAEAPAAVQALPVPAAVQALPVPAAVQPVDPSQAPQSAQLSIPSSGPNANPLDLFPQVLPNASANAGGGNLDVLRNNSQFRGLLSLVQANPQILQPLLQELGKQNPQILQLIQENQAEFLRLINEPAEGAEGNLLDQFAAGMPQTVAVTPEENEAIQRLEQMGFDRDLVLEVFFACNKDELLAANYLLDHMNEFDDDAPEPPQ

SEQ ID NO: 42712 - protein, 396 aa, Oryza sativa; identical to SEQ ID NO: 32454

SEQ ID NO: 42713 - protein, 728 aa, Oryza sativa
METEVFPVVDLRVLTQSDLDELAAASAHAVDPRSSCPDRAVFNESAGSRKQTFSRVRFVPAAAAAAAAASASAAAAAKLPRGNDKEDSFIAYHLRRLFAPDDPSLIENPSFPQTQTLARSPSPDPDQLTTNSRGVSVDLVSLSRLADPYDAELGKRTARMTTEEELMGFISSLAGQWVNQRMRRKLVDASFFGDHLPSGWRLQLGIERKDRKAWVNCFSYVSPKGQSFATCQEVSAYLMSLLGYPEFKTDNIEYGSTQQHGLCADDGVNVLGVQHQIGTSIDSQSNLPVASATFYSHSRDQDETVADDINSYECQQCNLTFHGQSAYAHHLITFHKVSSKRRKSNKVSKFGEPVIGKDGKFECPVCNKTFEEQSRYFGHIGSHAKYQGLTPEAFLQTFSGKVGNNSFAGLSSSLQVLVGSPQLNEKTTACEARSQHHDCSTKHGGNSTRGIDLFNSNHPANFNGHNQSWCRSGEIPPTTEAQSTWTYRNNEMNCADRTVPRTVPQPNDHEDCRVSGFAEATNFNDQAGRHQGFRPFSFGTTNHCQGQIIDHAVAASKHAEVNNSMKSRDVNLNSRLNTISFPIATANNETSTALNDVNRSCITGKGFSGSFSNNDGAASIVLPSSGLNNKISSSLGVADRSSIAARSFNAGYVYENGASEANNIGNKNNTMVYQTSLAMRPLSPGKQSSGVASRRTAAVVSERHGGQVVRHPRTASSVYMPEQGPGWL

SEQ ID NO: 42714 - protein, 260 aa, Oryza sativa
MRVLDHPNVVSLKHCFFSKTEKEELYLNLVLEYVPETAHRVIKHYNKMNQRMPLIYAKLYMYQICRALAYIHNTIGVCHRDIKPQNLLVNPHTHQLKLCDFGSAKVLVKGEPNISYICSRYYRAPELIFGATEYTTAIDVWSAGCVLAELLLGQPLFPGDSGVDQLVEIIKVLGTPTREEIKCMNPNYTEFKFPQIKAHPWHKIFHKRMPAEAVDLVSRLLQYSPYLRSTAVSVVVALFEPTPFFRESFSSWHHYCVTFF

SEQ ID NO: 42715 - protein, 392 aa, Oryza sativa
MIVTLMNLLRACWRPSSNQHARAGSDVAGRQDGLLWYKDTGQHVNGEFSMAVVQANNLLEDQCQIESGPLSFLDSGPYGTFVGVYDGHGGPETACYINDHLFHHLKRFASEQNSISADVLKKAYEATEDGFFSVVTKQWPVKPQIAAVGSCCLVGVICGGILYVANVGDSRVVLGRHVKATGEVLAVQLSAEHNVSIESVRKELQSMHPEDRHIVVLKHNVWRVKGLIQVCRSIGDAYLKRSEFNREPLYAKFRLREPFHKPILSSEPSISVQPLQPHDQFLIFASDGLWEHLTNQEAVDIVHSSPRNGSARRLIKAALQEAAKKREMRYSDLKKIDRGVRRHFHDDITVIVVFLDSSLVSRASTYRGPSVSLRGGGVNLRSNTLAPYASQM

SEQ ID NO: 42716 - protein, 307 aa, Oryza sativa
MRAAAAAAGQIDPSPGAPAKSRLKRLFERQLLRVSPAERLPSVAGVGEKDESSEPSSVCLDGMVRSFLEDGVGVERPAGAARCCNCFHGGEASDDDDDGPAAAEAAATSDAAETIKGLVHCASLRERNLLADVSTLVERHRAAGARKRDLLRLLADSLRAAGHDAAVCISRWDKSSSHPKGEHAYLDVLLPPASDRAERERILVDVDFRSEFEVARPTKAYRAVLQRLPSVFVGKEDRLRLLVAAAADAARASLKKRGLHLPPWRKPEYMRAKWLSPYERDVPSPQQPDASAGELAVDGEGGGAWTQ

SEQ ID NO: 42717 - protein, 237 aa, Oryza sativa; identical to SEQ ID NO: 32984

SEQ ID NO: 42718 - protein, 118 aa, Oryza sativa
MAAVNCKVVVAVIVVAMVVAAPGASAAITCGQVGSAIAPCISYVTGRSGLTQGCCNGVKGLNNAARTTADRQAACRCLKSLAGSIKSLNLGTVAGVPGKCGVNVGFPISLSTDCNKVS

SEQ ID NO: 42719 - protein, 924 aa, Oryza sativa
MAGALVSASTGVMESLLGKLSSMLEKEYAKKKAVEKDVLFLRNELSSMNTVMQKYAMLSEPDLQVKAWMKEVRELAYDIEDTIDAFMARSEKSNEPTGIRGFIINNILKLRELLSSCTISQEIEKLKNQVLEVNDRRKRYKLDVSVSMGTGCESIDPRLPAFYSEVGGLVGIDGPRDKIIKLLRENAADEDCGFVNRLKMVSIAGFGGLGKTTLAKQVYEKIKWQFDCAAFVFVSQIPDMKRVLLDLLCGLGASGNTWDDEKQLIDKIREFLHDKRYIIVIDDIWSISSWEILKCVLPENNSGSRIITTTRILDVSMICCSTFNGSIYRIKPLSDDDSRRLFCRRIFHGEHSCPSHLEELSKAILRKCGGLPLAILHIASLLATKSNTKEEWELVLNSIGSALENSHTLQGLKKILLLSFYDLPPQLKTCLLYLSIYPEDCMINSKELIRKWIAEGFIAEDSGKRLDQVAESYLNDLINRSMILPFDITHADGVQYYQVHDVVLNIIISMSKEENFVTIIDGHKCSSLQEKIRRVSLQFNDSEDVVVPTNITNRSCVRSLSIFGITKQVPYFMDLQSLRVLDLGYCTLLQNQHIECLGSMLQLRYLVLHSQLITELPDEIGNLQHLEMLDVTLCSIQALPDTIVRLQKLVCLYVSTKVKLPEMIGTMQCLEELFHISSNSIRLAGDLKCLKKLRDLAIAVEDPVGTKSSTLRYREVVRSSLTELGRHNLQSLSLNYKGDENFILDSSMGSCFSTQRLRKLIIGKTLSRVPEWMSIFDNLTHLQLCISRMEQSDINILKGIDSLIFLRLVFTGHAPDGRIVIDNRGFQALKELYLLCFIPGMWPVFEPGAMQELQKYHLTFKLQKVHCKNSVLDFGLQHLSSLQHISAIIIPSGATSEDTLVAEDAIRSATSIHPNQPIAEIFVE

SEQ ID NO: 42720 - protein, 564 aa, Oryza sativa
MGTERKRKVSLFDVVDETSVSAKLGRAATTNGSAAAAAANPSINRWTGRPYSARYLEILEKRRTLPVWQQKDDFLAVLRDNQTLILVGETGSGKTTQIPQFVLEAEGLSNRSMVACTQPRRVAAMSVSRRVAEEMDVTIGEEVGYSIRFEDCSSHKTVLKYLTDGMLLREAMADPLLERYKVIVLDEAHERTLATDVLFGLLKEVLKNRPDLKLVVMSATLEAEKFQTYFSGAPLMKVPGRLHPVEIFYTQEPERDYLEAAIRTVVQIHMCEPAGDILVFLTGEEEIEDACRKINKEINNMGDQVGPVKVVPLYSTLPPAMQQKIFEPAPAPSREGGPAGRKIVVSTNIAETSLTIDGIVYVIDPGFSKQKVYNPRIRVESLLVSPISKASAHQRAGRAGRTQPGKCFRLYTEKSFNDDLQPQTYPEILRSNLANTVLTLKKLGIDDLVHFDFMDPPAPETLMRALEVLNYLGALDDDGNLTPLGETMSEFPLDPQMSKMLVISPKYNCSNEILSISAMLSGMSNKTSCRHMVCQLNYIVRNNNTRTILLASIAHCRKLTSFLS

SEQ ID NO: 42721 - protein, 168 aa, Oryza sativa
MKISAVDKTLGTAVIGVLEAFKSMVSGQHGRFHRVVVQNILKNLCAYAKPDSDCQYSMQKFSVDNISMALRTMYQTDNLIGEDMEAFLGLVLQFSKLLCETDFIEAVNGNGIGLRNFVQKLKLILKQANSHRTEASVHPGIRRSAIEQVIWMAQLKPEPHCIDHFIDC

SEQ ID NO: 42722 - protein, 138 aa, Oryza sativa; identical to SEQ ID NO: 32656

SEQ ID NO: 42723 - protein, 609 aa, Oryza sativa
MASHALRLHPLLFSAAAARPAPLAARPGGGARRVHRRHSLAVVRCSSSAAQALKIKSIPTKPVEGQKTGTSGLRKKVKVFQQENYLANWIQALFNSLPPEDYVGGTLVLGGDGRYFNKDAAQIITKIAAGNGVGKILVGRNGLLSTPAVSAVIRKRQANGGFIMSASHNPGGPDNDWGIKFNYSSGQPAPETITDQIYGNTLSISEIKTADIPDVDLSSLGVVSYGDFTVEVIDPVLDYLELMENVFDFQLIKGLLSRPDFRFVFDAMHAVTGAYADPIFVEKLGADPDYILNGVPLEDFGNGHPDPNLTYAKELVFTMFGSGAPDFGAASDGDGDRNMILGRRFFVTPSDSVAIIAANAQAAIPYFQSGPKGLARSMPTSGALDRVADKLNVPFFEVPTGWKFFGNLMDAGKLSICGEESFGTGSDHIREKDGIWAVLAWLSILAHRNKDKKAGERLVSVEDVAREHWATYGRNFFSRYDYEECESESANKMMEHLRDVIAKSKPGEKYGNYTLQFADDFSYTDPVDGSTVSKQGLRFVFTDGSRIIFRLSGTGSAGATIRIYIEQFESDASKHDLDAQIALKPLIDLALSVSKLKDFTGRDKPTVIT

SEQ ID NO: 42724 - protein, 168 aa, Oryza sativa
MAAVMVARQGRELQRYSDNTGGRMVVGCIPYRVRGDGGGVEVLVISSQKKGAAAGDVVMFPKGGWELDESVDEAARREALEEAGVLGEIGASLGRWCYRSRRYDATYEGFVFPLRVTDELDRWPEMAARRRSWVSPQQAMDRCPHWWMREALQRFADLFPQHTPLSLL

SEQ ID NO: 42725 - protein, 450 aa, Oryza sativa
MALQNIGASNRDDAFYRYKMPRMITKIEGRGNGIKTNIVNMVDIAKALARPASYTTKYFGCELGAQSKFDEKTGISLVNGAHDTAKLAGLLENFIKKYVQCYGCGNPETEVLISKTQMITLKCAACGFVSDVDMRDKLTTFILKNPPEQKKGAGKDKKAMRRAEKERLKEGEAADEEMKKLKKEAKKKGASKESTSSKSGAGKKKAAAGSDEDHSNSPTRSHDGDNVAADEDDDDDVQWQTDTSLEAAKQRMQEQLSAATAEMVMLSTEEPEKKKKHEASHKEGASNGSTKHVVEEAKSSPYDDLVKEMKDNLSKGANAVQLKGLMTSSALPPQDAMNALFDALFGGLGKGFAKEVVKKKKFLAAAVPDEASQMVLLQALVAFGAKSSPEAVKEVPIVLKALYDGDVLDEEVITQWYNESVAGGKESQVVKNAKPFVEWLQSADSESEEE

SEQ ID NO: 42726 - protein, 544 aa, Oryza sativa
MALTLLRGMRTPVVARRNAGLFFTTLQSPLLSRFTMRAESARAAAPKSIQLATKEAAEQKAQGFEAVIGIETHVQLSTVTKAFCSCPYSYGSQPNSTVCPTCMGHPGTLPVLNAKVVECAVRLGLALNCEIAMTSKFDRKQYFYPDLPKGYQISQFDIPIAKEGYLDLDLPVEFGGGHRRFGVTRVHMEEDAGKLLHSESGSYSQVDLNRAGVPLLEIVSEPDMRTGIEAAEYGAELQRLVRYLGVSNGNMQEGSLRCDVNVSVRPIGQSNFGTKVEIKNMNSFSAISRAIDYEISRQILLHKEGQADQIVQETRLWDESSQKTFTMRKKEGLADYRYFPEPDLPEVVLTSEYIDEIQNSMPELPEAKRRRFENMGLSMQDVLFLANDDNVARFFDSTLEHGADAKLAANWIMGDIAAYLKNEKLSIDEIKLTPLELSELIASIRNGTISGKIGKEILIELIAKGGTVKSVIEEKDLVQIADPAAIEAMVDQVLADNPKQLEQYRSGKTKLQGFFAGQVMKASKGKANPVLLNKILGEKLKANS

SEQ ID NO: 42727 - protein, 120 aa, Oryza sativa
MAGGVGEALVSAVLKEVLGKLGSAVGEQIVMRWNLKQDLESIKSTLGMLQAVLRDAERRSVSDEGASLWLKRLKNAAYDISDMLDEFEAKLSEVKKCPPARMSSFTSVLCLSMLLPSKKI

SEQ ID NO: 42728 - protein, 94 aa, Oryza sativa
MISPTPQHAILCFLLSHRPSPTPSQRRCPDPRMHHLQIWRWLGFGLEWWLAAGRTRVRSGGAAAGAVAACARQQVAGADARRQRRRAACGRSSS

SEQ ID NO: 42729 - protein, 181 aa, Oryza sativa; identical to SEQ ID NO: 33070

SEQ ID NO: 42730 - protein, 421 aa, Oryza sativa
MLMAALSALLPLLIKDTSSMASAQVIILFLGLYMIAFGVGGLRPCLMSFGADQFDDGDTSERISKGSYFKWYIFTMNCASVISTTAMVWVQDHYGWALGLGIPAMVLAVGLSCLVAASRAYRFQTTRGSPLTRVCQVVVAAVRKFNVAPPADMALLYDLSEDASSMKGVQRIEHTADLRFFDKAAVVTASDEEAEGAAPRNPWRLCVVTQVEELKILVRMLPLWACVAFYYTATAQANSTFVEQGMAMDTRVGSFHVPPASLATFQIITTIVLIPLYDRAFVPAARRLTGREKGISDLLRIGGGLAMAALAMAAAALVETRRARAAHAGMEPTSILWQAPQYVLVGVGELLATVGQLDFFYSQAPPAMKTVCTALGFISVAAGEYLSSLVVTAVSWATATGGRPGWIPDDLNEGHLIASSG

SEQ ID NO: 42731 - protein, 887 aa, Oryza sativa
MDLPKEIFLKEYKKPDYLFDSVNLEFQLGEDKTIVTSKIAVSPGTEGTSSPLTLHGRDLKLLSIKVNGKDLKSEDYMVDSRHLTVSRPPGGTFNLEIVTEIYPQLNTSLEGLYKSTGNFCTQCEAEGFRKITYFQDRPDVMATYTCRIEADKTLYPVLLSNGNLIEQGDLEGGKHYALWEDPFKKPSYLFALVAGQLDCREDSFTTCSGRKVTLRIWTPGQDLAKTAHAMYSLKAAMKWDEEVFGLEYDLDLFNIVVVPDFNMGAMENKSLNIFQSRLVLASPETATDGDYAAILGVVGHEYFHNWTGNRVTCRDWFQLTLKEGLTVFRDQEFSSDLGCRTVKRIADVSKLRTYQFPQDAGPMAHPIRPHSYIKMDNFYTVTVYEKGAEVVRMYKTMFGASGFRKGMDLYFQRHDGQAVTCEDFYAAMCDANNTQLPNFLQWYSQAGTPTVKVSSSYDASSQTFSLKFSQEVPPTPGQPVKEPMFIPIAVGLVDSTGKDMPLTSIYSDGMLQSLTSDGQPVFTTVLQFNKKEEEFIFNNIPEKPVPSLLRGYSAPVRLDSDLTESDLFFLLANDSDEFNRWEAGQVLSRKLMLSLVADFQQQKTLALNPKFVDGLRSILRNTSLDKEFIAKAITLPGQGEIMDMMPVADPDAVHAVRTFIKKELALQLKDDLLSTVTNNRSSEAYTFNHDSMARRALKNTCLAYLASLNEPDTTELAFVEYKSATNMTEQFAALAALSQNPGQVRDDTLLDFYNKWQHDYLVVSKWFALQATSDIPGNVANVQKLLGHPAFDMRNPNKVYSLIGGFCGSPVNFHAKDGSGYKFLGEVVLQLDKINPQVASRMVSAFSRWRRYDESRQALAKAQLEMIVSANGLSENVYEIASKSLAA

SEQ ID NO: 42732 - protein, 108 aa, Oryza sativa
MKSINHLVLCIGTGHRSPTGFLITTCMLTHTMRCLTSWRATAATCSSPTPPPCRLRPPCPRRRGVPHTTSRAVARLAIRAPTSVVAAAATTTRRPHWCIWLKCSGMQI

SEQ ID NO: 42733 - protein, 484 aa, Oryza sativa
MANNSSYGENVRRKSHTPSAIVIGSGFAGIAAANALRNASFEVVLLESRDRIGGRIHTDYSFGFPVDLGASWLHGVCEENPLAPIIGRLGLPLYRTSGDGSVLFDHDLESYALYDTKGHQVPQELVEKIGKVFETILEETGKLREETKEDISIAKAIAIVMERNPHLRQEGIAHDVLQWYLCRMEGWFATDADAISLQGWDQEVLLPGGHGLMVRGYRPVINTLAKGLDIRLGHRVVEIVRHRNRVEVTVSSGKTFVADAAVIAVPLGVLKANTIKFEPRLPEWKEEAIRELSVGVENKIILHFSEVFWPNVEFLGVVSSTTYGCSYFLNLHKATGHPVLVYMPAGRLACDIEKLSDEAAAQFAFSQLKKILPNAAEPIHYLVSHWGSDENTLGSYTFDGVGKPRDLYEKLRIPVDNLFFAGEATSVQYTGTVHGAFSTGLMAAEECRMRVLERFRELDMLEMCHPAMGEQTATVSVPLLISRL

SEQ ID NO: 42734 - protein, 153 aa, Oryza sativa
MSSGTSSGSSQGTRSSRSEDDLNLQAQMEKKRKRRKESNRESARRSRMRKQQHLDELTSQVNQLKNQNQQLSMALSLTTQNLVAVQAQNSVLQTQELELQSRLCALTDILMCMNNTSATPTPTIPATTTSACDIFGASSWNQPPIDLYQYQCF

SEQ ID NO: 42735 - protein, 298 aa, Oryza sativa
MSLVSSEHKKSGPSVPSPTPVSPLSVALSLHATRSLVSSRRPPGATAFRPPSMASTDADEDQLLKSFLAEVSEAERDNEVLRILGCFKLNPFEHLKLSFDSSADEVKKQYRKLSLLVHPDKCKHPKAQEAFAALAKAQQLLLDPQERGYILDQVTAAKEELRAKRKKELKKDSASKIKSQVDEGKYEEQYERSEEFQKQLIIKVREILTDKEWRRRKMQMRISEEEGRLKKDEEETKEMWKKKREHEEKWEETRDQRVSSWRDFMKTGKKARKGEIKPPKLKTEDPNKSYVQRPVKRA

SEQ ID NO: 42736 - protein, 530 aa, Oryza sativa
MAAAPPPKADELQPHPPKEQLASVSFCITSPPPWPEAIILGFQHFIVMLGTTVIIPSALVPQMGGGNDEKARVIQTLLFVAGINTLFQTFFGSRLPVVMGGSYTFVAPTISIILAGRYNNEADPREKFLRTMRGTQGALIIASTIQMILGFSGLWRNVVRLLSPLSAVPLISLVGFGLYELGFPGVAKCVEIGLPELILLVAFSQYLPQVLHFGKPIFGRFGVLFTVSIVWLYAYILTISGAYKNAPPKTQVHCRVDRSGLISGAPWIRVPYPFQWGAPTFDAGEAFAMMMTSFIALVETTGAFIAASRYASATMIPPSIISRGIGWQGISILIDSFFGTANGTSVSVENVGLLALTHVGSRRVVQISAGFMIFFAILGKFGALFASIPLPIFAGMYCIFFAYVGACGLSFLQFCNLNSFRTKFILGFAFFMGISVPQYFNEYTAVAGYGPVHTGARWFNDMINVPFSSKPFVAGLVAYFLDNTIETHNNTVRKDRGYHWWDKFRSFKKDARSEEFYSLPFNLNKFFPAV

SEQ ID NO: 42737 - protein, 144 aa, Oryza sativa
MHARDGDEASCCRLLLPPGDRVVPSRRRRRPPMTRLSAAGTSPPRRSRDLYLATSLPGDVMLSRHRFASCSLFATSSMLACSRGLGHFPHARPHSSRSRRSPVGAPLPGARTPSSCRSATTPLLHRAGLCDAICPRCLFFTESL

SEQ ID NO: 42738 - protein, 555 aa, Oryza sativa
MPLAFRFSRILNPRLNPSTNLGLALASSFSSSSRPEQPELPGARGGGGGFPATIREGRAEIFADDSNSVFYNKAQVNNRDLSIAVLRSFISRRREEHDIQLRRGSHAELPPKHHAEELGHIRGSSEDKALSEEISYRAPKVLEALAASGLRAIRYALEVDGIGEVIAVDNNEVAIEAVKKNIHHNGSVASSKVVPHLADARVYMLTHPKEFDVVDLDPYGSPAAFLDSAVQCVADGGILMCSATDMAVLAGGNAEVCFSKYGSYPLKGKHCHEMALRILLACIESHAIRHKRYIVPIISVHMDFYIRVFVQIFTSASTVKSSPLKLAHVYQCTGCSSFHLQNIGRINSKDKRNIALPNFSPLVPQECAECGHNFVMGGPIWSDPMHDKEWAASILSSIQAMSCAYSAYAKISAIMTSVSEELPKAPLFVSLHNLCATLKCTNPTIATFQSAIRNAGYQISGSHVDPLALKTDAPMSVIWDIMRCWVKIHAVKYRPGNHPGTRILSQEPKLQAKFSHVPGGLAVQKSPRFVPNPEKYWGPKTKAGRQPKRLPVDNL

SEQ ID NO: 42739 - protein, 363 aa, Oryza sativa
MAHKAKLQSVSESAIRSIGLGYDIANDIRLKNCKQRGSPDPLLIELDHDKVQDIVLPGNLTVTGVSKSIKCDKGERMRFRSDVLSFQQMSEQFNRELSLSGKIPSGFFNAMFEFTGCWQKDASITKSLAFDGWCITLYTVALSKAHIILKDHVKQAVPSTWEPAALARFIKKFGTHIVVGVKMGGKDVIYLKQQHSSSLQAVDVQKRLKEMSDQRFLDANGHSDISLADSYAKDNKVEAREQRLRFVESNPLNSYSSNEELVMMPKRRGGRDKDIISHSEWLNTVQAEPDVISMSFIPITSLLNGVPGCGFLNHAINLYLRYKPRVEELHQFLEFQLPRQWHLSTVTSLWVLRGKDKAVHLYQ

SEQ ID NO: 42740 - protein, 558 aa, Oryza sativa
MGCVFGRPSSSPPAAAARKGRRKKRSSPMPAPSTDSPAADQSPGRGRPRRRLGRKPGPRQGCVPAPAAAEQLAAGWPPWLVAVAGEALRGWTPRRADTFEKLNKIGSGTYSNVYRARDTVSGRIVALKKVRFDNLEPESVKFMAREILILRKLDHPNVIKLEGLVTSRMSCSLYLVFEYMEHDLAGLAASPDVKFTLPQIKCYVQQLLSGLEHCHNNNVLHRDIKGSNLLLDNNGILKIADFGLATFFDPRHKRPMTSRVVTLWYRPPELLLGATDYGVGVDLWSAGCILAELLHGKPIMPGRTEVEQLHKIFKLCGSPSEEYWKKSKLPHATIFKPQQPYKRCIREAFKDFPPSSLPLVETLLAIDPAERQTATSALQSEFFATEPYACDPSSLPTYPPSKEMDAKMRDEEARRLRAAAKAKGEGVKRTRTRDRSQRAGPAPEANAELQANLDHRRRMITHANAKSKSEKFPPPHQDGAMGNPLGSSRHMEPMYEHQDASFSTVVPIQKGSSQTWSGPLVDPAALGQSRRKKQTALDAKAAAYSKQLQKDKGGTRAR

SEQ ID NO: 42741 - protein, 538 aa, Oryza sativa
MSASPSSMSGAGAGEAGVRTVVWFRRDLRVEDNPALAAAARAAGEVVPVYVWAPEEDGPYYPGRVSRWWLSQSLKHLDASLRRLGASRLVTRRSADAVVALIELVRSIGATHLFFNHLYDPLSLVRDHRVKALLTAEGIAVQSFNADLLYEPWEVVDDDGCPFTMFAPFWDRCLCMPDPAAPLLPPKRIAPGELPARRCPSDELVFEDESERGSNALLARAWSPGWQNADKALAAFLNGPLMDYSVNRKKADSASTSLLSPYLHFGELSVRKVFHQVRMKQLMWSNEGNHAGDESCVLFLRSIGLREYSRYLTFNHPCSLEKPLLAHLRFFPWVVDEVYFKVWRQGRTGYPLVDAGMRELWATGWLHDRIRVVVSSFFVKVLQLPWRWGMKYFWDTLLDADLESDALGWQYISGSLPDGRELDRIDNPQLEGYKFDPHGEYVRRWLPELARLPTEWIHHPWDAPESVLQAAGIELGSNYPLPIVELDAAKTRLQDALSEMWELEGRVTRSDGERNGGGPRRLLRRAADRLPTGAADGS

SEQ ID NO: 42742 - protein, 92 aa, Oryza sativa
MVFSQLRRPISLSTLLLTTSREQAWAASLVSIPSPDEMKTMIIFTTKPRSSLSLLRSILNSSCRTNFLLTPSRLIHCSNGNTAVPSSCWSTL

SEQ ID NO: 42743 - protein, 190 aa, Oryza sativa
MTIPRRRLFAATDEIFCLFQGTIENIAVLKQQYGLHNKGSTEINIIIEAYRTLRDRGPYPADQVVRDINGKFAFVLYDCSNNSVFMATDADGSVPFYWGVDPDSRLVVSDDDEIVNKACGKSSAPFPKGFFFTTSGGLQSYEHPMNEVKPVPRLDSKGEVCGTTYTVDAKAKKDSSIPRVGSAADWSSQY

SEQ ID NO: 42744 - protein, 472 aa, Oryza sativa
MEPNTGVTFDDVAGVDEAKQDFMEVVEFLKKPERFTAVGARIPKGVLLVGPPGTGKTLLAKAIAGEAGVPFFSISGSEFVEMFVGVGASRVRDLFKKAKENAPCIVFVDEIDAVGRQRGTGIGGGNDEREQTLNQLLTEMDGFEGNTGIIVIAATNRADILDSALLRPGRFDRQVSVDVPDVRGRTEILKVHGSNKKFDTDVSLEVIAMRTPGFSGADLANLLNEAAILAGRRGRTAISSKEIDDSIDRIVAGMEGTVMTDGKSKSLVAYHEVGHAICGTLTPGHDPVQKVTLIPRGQARGLTWFIPMDDPTLISRQQLFARIVGGLGGRAAEEIIFGEPEVTTGAAGDLQQITGLAKQMVVTFGMSDIGPWSLMDSGAQSGDVIMRMMARNSMSEKLAEDIDTAVKRLSDEAYEIALSQIRSNREAMDKIVEVLLEKETLSGDEFRAILSEFTEIPVENRVPPATPAALPA

SEQ ID NO: 42745 - protein, 287 aa, Oryza sativa
MAAISSLPFAALRRAADCRPSTAAAAAGAGAGAVVLSVRPRRGSRSVVRCVATAGDVPPTVAETKMNFLKSYKRPILSIYSTVLQELLVQQHLMRYKTTYQYDAVFALGFVTVYDQLMEGYPSNEDRDAIFKAYITALNEDPEQYRADAQKMEEWARSQNGNSLVEFSSKDGEIEAILKDISERAQGKGSFSYSRFFAVGLFRLLELANATEPTILDKLCAALNINKRSVDRDLDVYRNILSKLVQAKELLKEYVEREKKKREERSETPKSNEAVTKFDGSLNSMRH

SEQ ID NO: 42746 - protein, 1011 aa, Oryza sativa
MMSNLKLGVEVTSAHDLLPKEQGTCNPYVEIEFDDQKFRTAIKERDINPVWNEQFYFNISDPSRLSEKDLEAYVYHANRASNSKTCLGKVRISGTSFVSHSDATPLHYPLEKRTILSRARGELGLRVFLTDDPSVRVSAPGQEFDFISTPTTAQEQVAANAIPNPFQETRADQVRQFQHLPKEQHQHRPQPMTAQPYYPESSYGQQQQKTYSAVGNKAEGPPPPVMRMYAQGPQQQPVEFQLKETSPTLGGGRVIGGRVIPGEKAGAYDLVEKMQYLFVRVVKARDLPHMDITGSLDPYVEVHLGNYKMKTRHFEKNQRPEWDEVFAFPREVMQSTSLEVIVKDKDFIRDDYVGRVSIDLNEVPLRVPPDSPLAPEWYRLVGKEGHRDKGELMLAVWYGTQADECFPSAIHAGSEPIDSHLHNYIRGKVYPVPRMWYVRVNVIGAQDIFPMENHIPDVFVKVRLGHQMLKTRPARSPTRNFMWNEEMMFVAAEPFEEDLIIQIEDRVAQNKDEVIGETMIPLARLPRRADHKPVLPAWFDLRRPGLIDLNQLKEDKFYAKVQLRICLEGGYHVLDESTQYCSDLRPTMKQLWKPPIGLLEVGILSANGLNPTKTKHERGSCDAYCVAKYGQKWVRTRTIVDNLNPRFNEQYTWDVFDHGTVLTIGLFDNCHISADSNHSSSPGHMDKPIGKVRIRLSTLETGRVYTHTYPLLVLHPSGVKKMGELHLAIRFTATSLLNVLFTYSRPLLPKMHYAQPLSIVQQEMLRHQAVQLVAQRLGRMEPPVRREVVEFMSDARSHLWSMRRSKANFFRLMQVFSGFIAAGKWFGDVCQWKNPVTTVLVHVLFIMLVFYPDLILPTIFLYMFLIGLWNYRFQPRFPPHMNTRISHADMTNPDELDEEFDTFPTSKSPDLVRMRYDRLRHVAGRIQTVVGDIATQGERLQSLLSWRDPRATSMFLLFCLLTAVILYVTPFQVIALCLGFFWMRHPRFRHKVPSAPVNFFRRLPAKTDSLL

SEQ ID NO: 42747 - protein, 309 aa, Oryza sativa
MAAMATTASSLLKTSFAGARLPAAARNPTVSVAPRTGGAICNSISSSSSTPPYDLNAIRFSPIKESIVSREMTRRYMTDMITYADTDVVVVGAGSAGLSCAYELSKDPSVSVAVIEQSVSPGGGAWLGGQLFSAMVVRKPAHLFLDELGVAYDEQEDYVVIKHAALFTSTVMSRLLARPNVKLFNAVAVEDLIVKEGRVGGVVTNWALVSMNHDTQSCMDPNVMESRVVVSSCGHDGPFGATGVKRLQDIGMIDAVPGMRALDMNTAEDEIVRLTREVVPGMIVTGMEVAEIDGAPRMVRTKKTSNSSP

SEQ ID NO: 42748 - protein, 546 aa, Oryza sativa
MALPVSLLRIAAVLLAILPFCATHPSPGFHAPREFHKALVPDRYGFVARRSIAEAPVDVNVTTNSSFVLAQERTYRKDPLNGFRKYTGGWNISEVHYMASVGYTAFPLFIIALVWFVLFFLVMLGICCKHCCCPHRSYTYSRVAYALSLILLILFTCAAIVGCVMLYDGQGKFHKSTTTTLNFVVSQANFTVENLNNLSDSLSAAKKVDIGRSFLPNDVQNQINEIQGKLNSSATELATRTTDNSEKIQKLLNQVRIALIIIAAVMLLLAFIGFLLSIFGLEFIVSILVIIGWILVTGTFILCGVFLLLHNVVADTCVSMEEWVAHPTEHTALDDIIPCVEPATANESLYRSRQVTYQLVNLVNQVITNVSNGNFPPQTPFFYFNQSGPLMPTLCNPFTADLNNRTCTRGEVTLDNATRVWKNFECQTTTVSGTEICTTVGRVTPTILGQMAAGVNVSQGLYQYGPFLIQLEDCTFVRDTFTNINQNHCPGLERYSKWVYVGLVMVSSAVMLSLVFWVIYARERRHRAYSKQHNYADKPHPTGPDA

SEQ ID NO: 42749 - protein, 329 aa, Oryza sativa
MEDQKKNAKPEGSSGSQRGAPPAPDAGLPNPFDFSQFSNLLNDPSIKEMAEQIASDPVFTQMAEQLQKSAHVTGEQGGPALDPQQYMETMTQVMQNPQFMSMAERLGNTLMQDPGMSSMLESLTSPSHKELLEERMSRIKEDPSLKGILDEIESGGPSAMVKYWNDPEVLQKIGQAMSINFPGDAATSTTLSGPEETEEDGGDDDESIVHHTASVGDAEGLKKALEDGADMDEEDAEGRRALHFACGYGELKCAEILLEAGAAVNALDKNKNTPLHYAAGYGRKECVDLLLKHGAAVTPQNLDGKTPIEVAKLNNQDEVLKVLEMDAFL

SEQ ID NO: 42750 - protein, 337 aa, Oryza sativa; identical to SEQ ID NO: 32851

SEQ ID NO: 42751 - protein, 280 aa, Oryza sativa; identical to SEQ ID NO: 31565

SEQ ID NO: 42752 - protein, 519 aa, Oryza sativa
MAASGGTERLAFLVDRHWPAVSRACVSSGRLALAALRQWRGCAARGILEMASLGPASVFVILWSFFVCITSPACALYALLGMGAAGAVIHYMGYTPGLFIVGLFGILIMWMYGYFWITGMLLIAGGCMCSLKHARFVIPVLAMYAVYCVAVRVGSLGVFLTLNLSFLTNDLLNKLLQGYEGSTEERQFEEPKHSDPVMDEFYRSCEFPSAPDSEPETVSSAKPFCSTPVQDVLHVQKEASPSKVVKSDSVSLDEMKRIMDGLTHYEVLGIPRNRSIDQKILKKEYHRMVLLVHPDKNMGNPLACESFKKLQSAYEVLSDFTKKNTYDDQLRKEESRKMTQRSRVVSQQTGVEFLSEESRRIQCTKCGNFHLWICTKKSKAKARWCQDCSDFHPAKDGDGWVENKFSSSFKEIPRAFVCAESKVFDVSEWATCQGMECKPNTHGPSFMVNMVGADRMSQRSYSSRYPFSLNAEMIPEDEFELWLQQALASGVFSDSPKRRKSWSPFKLPQKGIKSWRRSS

SEQ ID NO: 42753 - protein, 563 aa, Oryza sativa
MVDMNDVLLVVSAAVLAAMWWRRCSRTGGADGLPPGPPGWPVVGNLFQVILQRRPFMYVVRDLREKYGPIFTMRMGQRTLIVVTDADLIHDALVKQGAAFRQPPRGQPDAAALQRRQVHRQLGAVRPALARAPPQLRRRDRVAAAGEGILVDPRVGRREPPPAAPRRVRRHRRRQDDGQLPPLHLQHPHLHLLRRQDPRRAHPRDRGGAQGRDDDDHAQAPGLPPAPHAALHQAARRGARTPAAPARLPGAAGARAPGVHQGRRREERRREHGGRRRGDGERARRGVRGLAVRPGAAGAGEEARRGRAGDALLRGDERRHGHQRHRAGVGHDAPRPRRRRPGQALRRGRLQGRHHRAHHRGRRRGHALLAGGGEGDIPATPAEPLRAVARGDEGHGARRVPRAGGRQRGVLHGVGDGEPGDVAGPGGVAPRAVPRGRRGLRHRHHRHPRPPHDAVRRRPPHLPRRHPRRPPHPAHARQHGPRVPLGPARRRGPPRPHRDLRLHRRHEEPAPRRPRRAPRRRRARHRRRRRRRRVRLIKYYDINTSVAAVRWMADGRTDGWICR

SEQ ID NO: 42754 - protein, 421 aa, Oryza sativa
MPRASRDLVSWNAVISAHAQNGLAVEAVELYRRMRGPEGGGVEPDAVTLVGVLSSCAHTGARRVGLDVERYVRDTIPGFRDNLPLCNALINFHARCGSLAQAQELFDEMPERSVVSWTTLIIGYGMHGQGDIAVDLFETMVSEATAPDSVAMVGLLSACSHAGMYDEGRKYFSTMERDYCLRPKLEHYTCMVDLLGRAGRLDEARELIASMPMAADGAVWGALLGACKIHKNVEMGEEAFERVVSLEPANVGYYVLMANIYADAGQLDGVAKVRAAMRRRGLRKEPGCSYVEHKGKVHLFMADDHSHPQARRIYELVVELERMVKEKTGGDVVEERAEKAVAEAAAVPLVGFHSEKLAVAFGLLNTEAGSEIVVIKNLRVCGDCHSFLKTISELTNRAFLVRDASRFHRFENGACSCRDYW

SEQ ID NO: 42755 - protein, 122 aa, Oryza sativa
MTPPSSHPRAIPRSALLASSRRRRTPPRPAPPAPGGSPFRRSPRQRRVVPLSAGALPGITRPPPSSLLPVAVHTTAACPRRRRGGSPFRRSPAWVYPTAPRWYALSQDPLRHTPLWFATLLP

SEQ ID NO: 42756 - protein, 258 aa, Oryza sativa
MALANKIGNLLKRATSSSPALYQSIRCMSSSKLFVGGLSYGTDEQSLRDTFANYGQVIEAKIINDRETGRSRGFGFITYASSEEASAAITALDGKDLDGRNIRVNTANERTGGFRSGGGGYGGGGYGGGGGGYGGGGYSGGGGYGGGGYSGGGGGGGGYQGGGGGYGGNNGGYGNRGGGGGGYGVAEGSADAFSGINLGGDGSFGGNPAGSFGDAGGSTGGGDFSGAGGDSFGSRKNDELMDDLFKDDEPDNYANKQG

SEQ ID NO: 42757 - protein, 598 aa, Oryza sativa
MTTYRVCCFLRRFRAASNEPSEELGDVFQAYADGGGGVMGEEALRRFLREVQGEAAGGGDDELEATAREVMAFAAEQRLLRKGGAAAAGGGLTVEGFHRRLCSDANAALDPQKRVYQDMGLPLSHYFIYTGHNSYLTGNQLSSGCSEVPIVKALHDGVRVIELDLWPNAAKDAVEVLHGRTLTSPVGLMKCLEAIREYAFVASPYPVILTLEDHLTPDLQSKVAKMIKETFGDMLYVSETENMAEFPSPDELKGKIIVSTKPPKEYLQTKNDADADEAGVWGEEITDDKVAATAMTTEEKCAAAEEAVAAAAVDEEMQEAETDKKTQHGVDNEYRRLIAIPLTRRKHDMDQDLKVDPDMVTRLSLGEKAYEKAIVTHGAHIIRFTQRKLLRIFPRSTRITSSNYNPLMGWRYGVQMVAANMQGHGRKLWLTQGMFRANGGCGYVKKPDILMNNDPDKLFDPTSKLPVKTRLKVTVYMGDGWRFDFRKTHFDKCSPPDFYARVGIAGVEADTRMEQTKVKMDTWIPAWDHEFEFPLSVPELALLRVEVHESDNHQKDDFGGQTCLPVWELRRGIRSVRLCDHRGEPLRSVKLLMRFDFT

SEQ ID NO: 42758 - protein, 673 aa, Oryza sativa
MAAAMEMAANPGGSGTCSDALFRELWHACAGPLVTVPKRGERVYYFPQGHMEQLEASTNQQLDQYLPMFNLPSKILCSVVNVELRAEADSDEVYAQIMLQPEADQSELTSLDPELQDLEKCTAHSFCKTLTASDTSTHGGFSVLRRHAEECFPQLDMSQNPPCQELVAKDLHGTEWHFRHIFRGQPRRHLLTTGWSVFVSSKRLVAGDAFIFLRGESGELRVGVRRLMRQVNNMPSSVISSHSMHLGVLATASHAISTGTLFSVFYKPRTSRSEFVVSVNKYLEAKKQNLSVGMRFKMRFEGDEAPERRFSGTIIGIGSVPAMSKSPWADSDWKSLKVQWDEPSAIVRPDRVSPWELEPLDASNPQPPQPPLRNKRARPPASPSVVAELPPSFGLWKPPSEAAQTLSFSEPQRAREIFPSIPASIFSASSHVEFNSKNEPSILSNQFYWSMRDSKTDSFSASTNKTRVERKQEPTTMGCRLFGIEISSAVEEALPAATVSGVGYDQTVLSVDVDSDQISQPSNGNKSDAPGTSSERSPLESQSRQVRSCTKVIMQGMAVGRAVDLTKLNGYGDLRSKLEEMFDIQGDLCPTLKRWQVVYTDDEDDMMLVGDDPWDEFCSMVKRIYIYSYEEAKLLAPKSKLPVIGDTIKLSSMNSSHESVDLDNHASVTNRDC

SEQ ID NO: 42759 - protein, 603 aa, Oryza sativa
MFKKHVDVKALQRLSGADKKKLRRTAKERFPQASDADLDAILPPKVEVTVAKYPNRVLVYGIEGEFPMLFDIDGRGHELFPTVYALWKVPDLLPAFTLKGGEVSRFILGGADLMFPGISIPPEGLPSFQPGQPWSVKVPGNPAPIAVGATTMSSNEALKAGLRGKALRITHYFKDSLWDSADGRYVPNEGFYEDIVVEDRNYASPSQPADSSEDHVEGMHDSTIEGEEAAVDVSESHTTDHDIHVEAIEDLTAGVSEVKLPEDNATEEPTEEREHQNLSTEEIDSLLDKCLLQALHTSVKDKDLPIPGSTLWSNHILPCRPTGVTLDIKKSSHKKLSKWLQSKSSAGLISSKEDKHKKEVMLLRINRGHPDYMAFKPEKRVQEPVVQHDNVVAEGSSTKQLEVAETYKPSSHVNPIFMAVGADTSKYYSASEASDIVFRYVEKENLVKQTDKAKVVLDVALCDALYKGAIKKGSAYPTEIHKRDLGSTFLNRMQIHHRVARGSEVVIRKGAIRTIQIMTERRQGNKKMTRLSGLECFLMDPDSLASELQKKFACSTTTAELPGKKGQHEVLVQGGVIDDLAKHLVDHYGVPKRFIEVLDKTKR

SEQ ID NO: 42760 - protein, 279 aa, Oryza sativa
MDLKDSLSKFKQQQERCQSSLASIAASTSKPKHRAQPVNAPSAPARPLQPIKFSNDTERLQHINSVRKSPIGAQIKLVIELLYKTRQAFTAEQINETTYVDIHGNKSVFDSLRNNPKVHYDGRRFSYKSKHDLKGKDQLLVLVRKYPEGLAVVEVKDAYPTVMEDLQALKAAGEVWLLSNMDSLEDIVYPNDPKAKIKVDGDLKQLFREMELPRDMVDIEKELQKNGIKPMTNTAKRRAAAQINGVQPKAKPKKKQREITRRTKLTNAHLPELFQNLNT

SEQ ID NO: 42761 - protein, 674 aa, Oryza sativa
MDAGELPIVYHIGIVLAALWAAGSLGFRHSVLFLLAFLYLYMVNARCAMKLRKRIQHEEMKSAYQRRLLSDAESVRWLNYAIKKMWPICMEKIVSQLLRPIIPWFLDKFKPWTVSKAGVQELYMGRNSPLFTSMRVLPETSDDDHLVLEIGMNFLSAEDMSAVLSMQLHKSVGLGMTANMHLTSMHVEGKILVGVKFVRSWPFLGRVRLCFVEPPYFQMTVKPLIGHGLDVTEFPGISGWLDKLMDTAFGQTLVEPNMLVIDVEKFVSTPSDNDWFSIEERPPVAYVKLEILEGSDMKPSDMNGLSDPYVKGRLGPFKFQTQIQKKTLSPKWFEEFKIPITSWESLNELAMEVCDKDHMFDDSLGTCTIDIHELRGGQRHDKWISLKNVKKGRIHLAITVEDISEEKGLEESSRKVDAELPISTSVNKFNADELPDEKQVLVDEVEHINIDGQEQPGGLYVHRPGTGVPKTWESRKGRARNPDTEIYKEVDKSKDAPTPKSSGQGGFFGSFFRKSLKKGSFHDIDPGIPTTPGPQSATELDPKIPQTPRPNLKEAGEKRTSIKIVVDEDAKPTRSAGDAENLTEDVAKVMEKNAGEPGRSLTSILSRKISRKKPEDKLSDIPEQTEAQASELVKEGPVPVEGKPIDGHPTTENGHGDGASGEAAETQTSAQTSQ

SEQ ID NO: 42762 - protein, 169 aa, Oryza sativa
MATAASQASLLLQKQLKDLAKNPVDGFSAGLVDDSNVFEWQVTIIGPPDTLYDGGYFNAIMTFPQNYPNSPPSVRFTSEMWHPNVYPDGRVCISILHPPGEDPNGYELASERWTPVHTVESIVLSIISMLSSPNDESPANIEAAKDWREKRDDFKKKVRRIVRKSQEML

SEQ ID NO: 42763 - protein, 194 aa, Oryza sativa; identical to SEQ ID NO: 33146

SEQ ID NO: 42764 - protein, 191 aa, Oryza sativa
MRDTLDFDFADDVEDRWKSDEPPSLYIFINCSTRDLSTIEKYVEQFASSVPALLFNLELDTLRSDLGLLGFPPKDLHYRFLSQFTPVFYIRQRDYSKTIAVTPYIVNYSGAVFRQYPGPWQVMLKQADGSYACVAESAARFTLGQAKEELLRVLGLQEEQGSSLEFLRRGYKNATWWEENVDQEKSSAWRT

SEQ ID NO: 42765 - protein, 96 aa, Oryza sativa
MPFFLVSAIISLGFLVIHTFSMIIAFNGYDERKRSDQVFVPVVHLIASVMTLINLAPGGCVIGTPLLCVMGAVTLQYCWQMVWRRLSEQQHRQFSS

SEQ ID NO: 42766 - protein, 297 aa, Oryza sativa
MPICPPSSESSPAPGLGGRALIFHGLALGAAAAAAAAAAYLYRRPGGFRGRAVGIIPARFASSRFEGKPLAPILGKPMIQRTWERVMLASSLDHVVVATDDERIAECCRGFGADVIMTSESCRNGSERCCEALQKLNKHYDIVVNIQGDEPLIEPEIIDGVVMALQRAPDAVFSTAVTALKPEDASDTNRVKCVLDNQGYAIYFSRGLIPFNKSGKVNTQFPYLLHLGIAGFDSKFLKIYPELPPTPLQLEEDLEQLKVLENGYRMKVIKVDHDAHGVDAPEDVEKIEALMRARNIQ

SEQ ID NO: 42767 - protein, 95 aa, Oryza sativa
MAAPVASASASCFAPRATMAAAGPTAGREGCRRRGVARRGGFGASWREAAAAEEEEEEERGGGYWTRSLRLCRFWDSTPRPPTPPRSSRRPSAPG

SEQ ID NO: 42768 - protein, 695 aa, Oryza sativa
MSLRRRERRVIAAAGAAALVAVGLNLAFSAVAAHRRRKRRELPGFTAQVNLSAADIKRLADRVVSKSKETYDAVAAVPLDKVSFSNVIAPLAELDAQQFPLVQACVLPRMVSPSDDVRRASAEAEKRLDSHFQQCRQREDVYRVIKAFTQKGERIGLEATRFVQCMVREFERNGAKLTQSKKTEMEKLKSHIDDLSLKYIQSLNDSTKFLLLNEEDLAGMPLEFLKELENTNGKWKVLLTSYHVTPILEHCEVGSTRKLIAVAYGQKGGKENIAILEKLVQLRHRLARLLGYPNYADYAIEPRMPRTSRKVLEFLEEMSEQLNGLANRELSVLKDLKMEEEGDAQFSVEDLLYYMKRAEELKVDLDIGEIKQFFPVDLVISGILKMFQDLFALRFEEMKDAETWHDTVRLFSVWDASSSDLLGYFFLDIFSREGKYAHTCVVALQNRCLCSNGTRKVPVAVLLSQCPKEFDGNSALLRFPEVVRIFHEFSHVVHHISNRATFSRFSGLQLEGDFAEIPSLLLENWCYENISLKMMSGFHQDITKSITSEACQSLKRRRDIFAGLKLKQEILLCLVDQIIHTGENVNIDDLIKDLHPKVMLGIPLLEGNSPASCFPRIAIGYDAVCYSYIWSEVFAADLFASKFKDDLLNQHAGLRFRNKVLAPGGSKNPLDIISDYLGREPSLQAFIQSRTRNSL

SEQ ID NO: 42769 - protein, 438 aa, Oryza sativa
MGRRKVAAAAAATPPRGSSKAGGGVISEIREKHKLELENLTLTKHPFRTLRFFMLAMLQYLKRLATYILSKGALFVVLIVLVLAPGILLAVTDGLHKKHVQEFLNYARFVLWWVSLGVASSIGLGSGLHTFVLYLGPHIALFTIKAVQCGRIDLKTAPYDTIQLKQGPSWLDKKCSDFGPPVYQASAHSVRIPVFELLPQVQLEAVLWGIGTALGELPPYFISRAARLSGSEPEAVKELDAAASDEHGPIASTLNRTKRWLLSHSQHLNFITILILASVPNPLFDLAGIMCGQFGIPFWEFFFATLIGKAIIKTHIQTLFIISLCNNQLLYLMEKELIWIFGHIPGFSASLPSVIAKLHSAKDKYLSTPTSATSSSKMEDTQWNFSFTLVWNTVVWLVLVNFFIKIVTSTAQEYLKKQQDIEMELITDSSPQSQSKTN

SEQ ID NO: 42770 - protein, 695 aa, Oryza sativa; identical to SEQ ID NO: 42768

SEQ ID NO: 42771 - protein, 301 aa, Oryza sativa
MAASSLLPSTTTSPRRRLPFPPTRKPHSAAAAAAKPPTTLTTKPLRLARPLASSSSSPPPPPPPEEAEPKDPIALAFARAAAYKKERDSPPPPPPPPTPAPPPQPPAATEEDSRSSKESFARAVEYRNGNGGGLGSGGGSPLLGASPRFGQSTFSTEDGAFGKFTNKKEEYEYDETDFLGLDFFEKKSYKGPPPGLAPAADPFPDKDFPEVEIIIGDPSKFGKTHRSTEVQPADDSEPEETSRSTTEEKKEENKPDETPPSTVTEPEEDEDEYKPTVRSWGMFPRPQNISKAVIYHIFCIS

SEQ ID NO: 42772 - protein, 190 aa, Oryza sativa
MKTILAPETMEIPEGVTVQVAAKVVTVEGPRGKLTRNFKHLNLDFQLLEGGRKLQVDAWFGTRRTMAAIRTAISHVQNLITGVTKGYRYKMRFVYAHFPINASITNSNTAIEIRNFLGEKKVRKVDMLEGVTILRSEKVKDELVLDGNDIELVSRSAALINQKCHVKNKDIRKFLDGIYVSDKGTITEDA

SEQ ID NO: 42773 - protein, 467 aa, Oryza sativa
MASLASASASTSLVFSTSSSKPRLGSSVGFSSPARFRRTAAAAASRGTGRRAGLLVVRAARGKFERTKPHVNIGTIGHVDHGKTTLTAALTMVLASVGGSAPKKYDEIDAAPEERARGITINTATVEYETETRHYAHVDCPGHADYVKNMITGAAQMDGAILVVSGADGPMPQTKEHILLAKQVGVPKIVVFLNKKDQVDDEELLQLVELEVRELLSSYEYDGDEVPIVAGSALKALENLMANPAIKRGDDEWVDGIFSLIDSVDNYIPVPQRQTDLPFLLAVEDVFSITGRGTVATGRIERGTVKVGDTVDIVGIRETRNCTVTGVEMFQKTMDDAMAGDNVGLLLRGMQKDDIERGMVLAKPASITPHTKFDAVVYVLKKDEGGRHSPFFPGYRPQFYMRTTDVTGNVTKIMNDKDEEAKMCMPGDRVKMVVELIQPVACEQGMRFAIREGGKTVGAGVINTILK

SEQ ID NO: 42774 - protein, 484 aa, Oryza sativa
METGRHRSQSLGSAGLAFHALLCSSLLLNAVFFAHHLLRSSPTATPERLGDGLSWALQAAREAEAVAAADCSGHGNVFLDGVTGEDGRPGCECNRCFSGPDCSVRTPNCTADADSGNPLFLEPYWRRHAAASAVVFSGWHRLSYITTGGRFHSVELDRHIRLLHRAVGNAVVDDKYLVFGAGSMQLINALVYALSPDGNADSPPASVVATVPYYPAYKSQTDMFDGREYRWDGTTATWSNNGSRNSTKGFIEFVTSPNNPDTALRKPVLAGSSAIVDHAYYWPHLTHIPAPADEDVMLFTASKLSGHAGSRFGWALIRDEKVAKRALSYVEQSIMGASRDTQLRMLKILKVILANLHGKEDIFAFGYDVMRSRWRRLNAVVSRSTRISLQKIPPQYCTYFNRIKEPSPAYAWVKCEWEEDVDCYETLLAAGIISRSGTLSEAEARYTRMSLLKAQDDFDVLLERITEFVDAEEHGRAPGGSSSM

SEQ ID NO: 42775 - protein, 548 aa, Oryza sativa
MDKNGSSYGESSSDDVEAPLLLPAARGGTMAKGDRRRPASSAAAAWVRALLAHKYPAIAAGPAACAAVCAAVDLGDGHGEARNMLGVLAWVFLWWVTGAVPLAVASMAPLFLFPALGISSSDDVARAYMGDVISLVLGSFILALAVDHHRIHRRLALNVLSLFCGDPVRPSLLLLGVTGTTALVSMWIHNTACTVMMMPVATGILQRFPRGDIDDGGGQEVRRFSKAVVLGVVYASAIGGMATLTGTGVNIILVGMWSSYFPEQRPITFSSWMSFGLPMAIILFLALWLTLCLMYCSNNTAKALSAYLDRSHLRRELSLLGPMAFAEKMVLAVFGGLVVLWMSRNITDNIPGWGVLFHNKVGDGTVTIMMATLLFIIPSGKREGEKLMDWNKCKKIQWNIILLLGAGFAIADGFKTSGLTDILSNGLRFLKGAPTLVIVPVACVFSGIMTEFTSDDSTTTLVLPLFAELAKSIEVHPALLMVSGAIGAQLSYLLPTGSPSNVVGFSTGYITIKDLVATGLPLKIVAIAALTVLLPTLGSTIFGMDIKS

SEQ ID NO: 42776 - protein, 709 aa, Oryza sativa
MHQHRITMLSSSETCHLGSSSNNQAMDQQNLLPSNPTADEQNLLPNTLEDDDYPHYLLGSHEVEMPNGSVIGQQNTSLNLWDSAGSSSMGCVADHDSLFEAKREHFAPALSIRAPLIIGGRRHEGSSSLPSQSLNLDLNLNQADQFDSEDVDMIQSNGQPGINAFPLNRGLSIPEHVLRHTNSSSATGNPSQVASFSDGMTGQEVNLFGGHRSSCKRKNIDGSLAESSANGSSRNNQRNNIILEPSPSSHESTSGLTAPAPTNHVFSYSPVEQLNQNTNMSANAMLSDHYSLYGDHERERFLRNTRMRTSPNEYDQSSSNLLPEGSLRCSVYQPTQQQSLFIPVQPRASSSSTSSLSRPYVPAVTQFSQNLHRAPSSGNFGSRIGIFPSSADTTNQLSSQDPNRSSVRGNFPEPLLLGSSLFPSDSAELLSMPGGRSNQQNSSSTIRTAVNIGAQQIAGLNASQPTSSSRGSVDIVRRSLQAASVPQSRGSSITSQQQRGHSSTSHEIRSHQPGSSSRANQQHYVRAVPHSVDRQNSNYLDLQSFMQSIAASRDGIRTVSESANQLVHLRNVVEQIRQGRGGRFEDPNFERALFARRASLIDRHRDMRLDVDNMSYEELLALGERIGYVNTGLSEDKIRTGLKQWKYVSIPIEEPLTGVEPCCICQEEYAEGEDMGRLDCGHDFHTACIKQWLVIKNLCPICKKTGLGT

SEQ ID NO: 42777 - protein, 744 aa, Oryza sativa; identical to SEQ ID NO: 31498

SEQ ID NO: 42778 - protein, 325 aa, Oryza sativa; identical to SEQ ID NO: 36156

SEQ ID NO: 42779 - protein, 59 aa, Oryza sativa
MWSLADDISVLYSINTVKSWKFCPCPFELFLFVSISLVSVKLFPLSMHPISIHVTFGKR

SEQ ID NO: 42780 - protein, 617 aa, Oryza sativa
MVMKMEADEDGANGGTGGTWTDEDRALTASVLGTDAFAYLTKGGGAISEGLVAASLPVDLQNRLQELVESDRPGAGWNYAIFWQLSRTKSGDLVLGWGDGSCREPHDGEMGPAASAGSDEAKQRMRKRVLQRLHSAFGGVDEEDYAPGIDQVTDTEMFFLASMYFAFPRRAGGPGQVFAAGVPLWIPNTERNVFPANYCYRGYLANAAGFRTIVLVPFETGVLELGSMQQVAESSDTLQTIRSVFAGAIGNKAGVQRHEGSGPTDKSPGLAKIFGKDLNLGRPSAGPGTGVSEADERSWEQRTGGGSSLLPNVQRGLQNFTWSQARGLNSHQQKFGNGILIVSNEATPRNNGGVDSSTATQFQLQKAPPLQKLPQLQKSHQLVKPQQLVSQQQLQPQAPRQIDFSAGTSSKPGVLTKKPAGIDGDGAEVDGLCKDEGPPPALEDRRPRKRGRKPANGREEPLNHVEAERQRREKLNQRFYALRAVVPNISKMDKASLLGDAITYITDLQKKLKEMEVERERLIESGMIDPRDRTPRPEVDIQVVQDEVLVRVMSPMESHPVRAIFQAFEEAEVHAGESKITSNNGTAVHSFIIKCPGAEQQTREKVIAAMSRVMNSG

SEQ ID NO: 42781 - protein, 720 aa, Oryza sativa; identical to SEQ ID NO: 33184

SEQ ID NO: 42782 - protein, 369 aa, Oryza sativa
MRAGGGGGGDTRRTAAGQAMVELQANASSAGGGMVVGLSPLSETLWRDSKAMPGAAAALIGDVSARLTWKDLSVTVALGPGKTQTVLDELTGYAEPGSLTALMGPSGSGKSTLLDALAGRLAANAFLSGNVLLNGRKAKLSFGAAAYVTQDDNLIGTLTVRETIGYSAMLRLPDKMPREDKRALVEGTIVEMGLQDCADTVIGNWHLRGVSGGEKRRVSIALELLMRPRLLFLDEPTSGLDSSSAFFVTQTLRGLARDGRTVIASIHQPSSEVFELFDMLFLLSSGKTVYFGQASQACEFFAQTGFPCPPLRNPSDHFLRCVNSDFDKVKATLKGSMKARIERSDDPLDRMTTSEAIRKLVASYSRSQY

SEQ ID NO: 42783 - protein, 460 aa, Oryza sativa
MSWSETDAALFAAVLGHDAAHHLATTPPHLDAPEGSPSSAELQASLHDLVERQGGAWTYGIFWQESRGAGAASGRAARAVLGWGDGHCRDGAGHGEVGAAERSVARKRVLLRLHALYGGGDEDGADYALRLDRVTGAEMYFLASMYFSFPEGSGGPGRALASGRHAWADVDPHPSGSGSAPGWYVRSSLAQSAGLRTVVFLPCKGGVLELGSVVAIRETPEVLRAIQSAMRAVPAPPEDFMRIFGKDLSPGRPSQPMGCDAPWTPRLVVQTTPVRPAKSLDFSKANVQEQAGGQERRPRKRGRKPANGREEPLNHVEAERQRREKLNQRFYALRAVVPKISKMDKASLLSDAIAYIQELEARLRGDAPVPARADGPAVEVKAMQDEVVLRVTTPLDEHPISRVFHAMRESQISVVASDVAVSDDAVTHTLMVRSAGPERLTAETVLAAMSRGVSVTTPSP

SEQ ID NO: 42784 - protein, 401 aa, Oryza sativa
MAKPANSIGRSTPRSNEGMRLIFSAVVGVMLGYLFGVSFPTVNITKLHFPSSIISYIEDRNSGITTQTLLNHAWASANRHNKNNSDSTSEEVPKIYVPTNPKGAERLPPGIVVSETDLFPRRLWGDPSEDLSSEPRYLVTFTVGITQKANIDAAVKKFSDKFTIMLFHYDGRTTEWDEFEWSKRAIHVSVRKQTKWWYAKRFLHPDVVAPYDYIFIWDEDLGVEHFNAEKYIELVRKHGLDISQPGLQPDKGLTWQMTKRRGDQEVHKVTEERPGWCTDPHLPPCAAFVEIMATVFSRDAWRCVWHMIQNDLVHGWGLDFALRKCVEPAHEKIGVVDAQWIVHQAVPSLGNQGNAENGKAPWEGVRARCRKEWEIFQTRLADAEKAYYLSQGITPPNSTLV

SEQ ID NO: 42785 - protein, 539 aa, Oryza sativa
MAGEEEGGLTEASTVAAFLGVPWDSHRRPPDSVFAPVNRRRAPRALVSMEIMISAVAGDLISRFISSVAQNYRNHIRKEDDRRRLERILLRMHCVVEEAEGRHITNQGMLLQLKGFIEGFYLGYYVLDKIKFQPPEEESIEDEVSHEIQSFALSACNSRKRFRFADAIRKHTPIAFGSRSRTNLKDVVDGLETKIADMREFVILLGSHPRLPRQPYSTYLYIENCMFGSRIEKEQVINFLLCNDPHDPYVSILPIIGPPRIGKKTLVQHACLDERVRNCFSHIFFFKEDDLKTGELSLNSKASQGKYLFVIEFIWDVDEAAWTKFQSYLQNMPGIGIKVVVIGTTEDIAKFGTTQPIRVKRPSEEEFWYYFKALAFGSMDPDEHPKLASLVMQLATEVNGSFLSATIYGELLRANPNTQFWKRILLFVRELARKHLTSSGLHPDDLFERNIPVDMSRIAVVDGQVQGCLLYDVRVAGPADGELPKLTSRDMLLGCDIPVEDKFDVLVWRSRIPPYCNYIVTYEKRKPRRMVRKRNTIYL

SEQ ID NO: 42786 - protein, 476 aa, Oryza sativa
MYYAKQGIITEEMLYCATRENLSPEFVRSEVARGRAIIPSNKRHLELEPMIVGRNFLVKVNANIGNSAVVSSIEEEVHKLQWATMWGADTVMDLSTGRHIHETREWILRNSSVPIGTVSIYQALEKVNGIAENLSWEVFRDTLIEQAEQGVDFTIHAGVLLRYIPLTAKRMTGIVSRGGSIHAKWCLTYHKENFAYEHWDEILDICNQYDVALSIGDGLRPGSIYDANDSAQFAELLTQGELTRRAWAKDVQVMNEGPGHIPMHKIPENMEKQLEWCNEAPFYTLGPLTTDIAPGYDHITSAIGAANIGALGTALLCYVTPKEHLGLPNRDDVKTGVISYKISAHAADLAKGHPYAQAWDDTLSKARFEFRWLDQFALSLDPVTAMSFHDETLPSEGAKVAHFCSMCGPKFCSMKITEDIRKYADEHGYGTVEEAVIQGMNAMSAEFSAARKTISGEQHGEAGGEIYVPESYTARK

SEQ ID NO: 42787 - protein, 419 aa, Oryza sativa
MPGMRARTAADEHMSPRSLMHMQQLLSADSPRASPRSTIAPRWRSLHGEDGWAGLLDPLDSDLRRELLRYGDFVQAAYQAFHSLPTASARHRGLMLPDRSYRPTRSLFATSALSMPPWAKRPNTPEWLTQQSNWIGYVAVCESEREVARMGRRDIAIVLRGTATCLEWAENLRASLVPLDGESGEGGGQEEPKVARGFRSLYKTAGEKVKSLSEEVMGEVRRLMEKYKGEELSITVVGHSLGGALALLVADEIATTVPDAPPVAVVSFGGPKVGNAAFVDKLQKNGRVNVLRIVNAGDMVTKVPGVAPRLPLTKEQYQHVGAELRIDSKNSPCLRPDAGPACRHDLEAYLHLIDGFTGTGRPFRHDARRSVIRLLQLQRGNVKKEYVNRARELGVDPSAPVDVGRSMAYGNCAVASPSS

SEQ ID NO: 42788 - protein, 610 aa, Oryza sativa
MGEMVLAGYGMDKAVRSSVSFETPCGRLLRELEQIWTEIGEREEDKDRMFLELETECMRVYRRKVDSANAERSQLRQSLMAKEAELKVLVASIGEITPKFKVDEKQSLKEQLAKVTPLLEDLRSKKEERIKQFSLVQSQIEKIKAQISDHNNQHDNGPVNHSKDNHDLSTRRLSDLQAELRNLQKEKSDRLQKVFIYVDEVHCLCSVLGMDFAKTVKDVHPSLHGANSENSTNISDSTLEGLTETILKLKAEKRTRVSKLQEIVGKLHKLWNLMESTEQERRHFTRVAAVLGSTEEEITSSSVLSLETIQETEEEVERLTKQKASRMKELVLKKRLELEDICSNAHMEPDMSTAPEKITALIDSGLVDPCELLSSIETQIAKAREESLTRKDIMEKVDRWLSACDEETWLEEYNQDSSRYSAGRGAHINLKRAEKARILVQKIPSMIDNLIAKTFAWEDERSVPFLYDGARLVAILEEQKLRRVQKEEDKRRHRDQKKLQSLLLKEKELIFGSKPSPKKTSSFNRRTSSHHPNGNGAGFMTPVPRRVSAGSATPELLTPRSYSGRYNNYFKENRRLAAAPLNFSTVSKEDSMSSFASISGSEPDSPLVLH

SEQ ID NO: 42789 - protein, 415 aa, Oryza sativa
MLALVATFVLACLVFLSKPCAREMRLFLSTLCQELALALLGFLAGLRLLGGVGAGAAAETTMPLMPSFKRKRAAAVEEGGGGGGGGGGEEAGGEPSVLDLPELAIECILARLPPSELRNMAGVCRSMRERCRGDHLWERHMSEKWGGVLGHAAREEWRTYLASAADTGGAAASCSLAGGGRHRRWLAALSCVCPVVSWMRPRADGGSGGKSAGPVLDDSIMSWYLSMESGKFWFPAQVYNREHGHVGFMMSCYDAELSYDFHSDTFRARYPPHGRRTVVLEDGVHWDRVRAPPVDTHAHDLHASDCLHELRPGDNIEIQWRRNKEFPYGWWYGVVGHLESCDGSEHFCRCHLSDTVVLEFNQYTPGSRWRQALVNRKDHREEGNEGDGFYGGIRKLRSKDEISKWRQLWPTDILE

SEQ ID NO: 42790 - protein, 425 aa, Oryza sativa
MVRTIAMDGTEGLVRGQRVLNTGSPITVPVGRATLGRIMNVIGEPIDEKGDITTNHFLPIHREAPAFVEQATEQQILVTGIKVVDLLAPYQRGGKIGLFGGAGVGKTVLIMELINNVAKAHGGFSVFAGVGERTREGNDLYREMIESGVIKLGDKQSESKCALVYGQMNEPPGARARVGLTGLTVAEHFRDAEGQDVLLFIDNIFRFTQANSEVSALLGRIPSAVGYQPTLATDLGGLQERITTTKKGSITSVQAIYVPADDLTDPAPATTFAHLDATTVLSRQISELGIYPAVDPLDSTSRMLSPHVLGEDHYNTARGVQKVLQNYKNLQDIIAILGMDELSEDDKLTVARARKIQRFLSQPFHVAEVFTGAPGKYVELKESVQSFQGVLDGKYDDLPEQSFYMVGGIDEVIAKAEKIAKESAS

SEQ ID NO: 42791 - protein, 241 aa, Oryza sativa; identical to SEQ ID NO: 31490

SEQ ID NO: 42792 - protein, 764 aa, Oryza sativa
MPESSTNRFCKKVDLEVLPSRSDVGESSYHKHSLWMAHWARSSISPEPQNGQSCSPLKEIDDVGYSKDCGALPFELMKARVAERLMVGVSHGGVSAGNTRQFSTNMRGVARDVCQEVQCKNVDQMGSSFESSVMQKNVNLYAAKTVVSERYSVHKISDILVDSRKLCGTENLSSEWNHFPMFEINRKIDSILNPRRSALVTSSEKIFVPQKSVKINMSTSNVMSFSSKEYQLHTHQVTGENRQCKSARGMLSHLDNYTGLNSDHAGKKLKGHLSIEEPCSCSKDDTDSSCSLADEHHARHYIPNSKKSPHRSCKNSSVYSASKMENQFVEGSLLEHKSEVYGACKKKLHLEGVAFHESALHREYQIKSVKTTAITNEGDMDTNGHHVDFGNLLQSDQQYLNKHTEDSAVNLTESCKTPDAIDSAMILKSKDESLAQEKRTNNKLIDNKRKGPCLFEMFTQPTKSNVKCSIDRTSSGKSCGNMTSGLLGAQKQFSTKTDTFYSEAHHASKSTAGFASASMQKDLGYPSSAKTEQLVTSSVKGVSSGSKGNEAVNTSAEHRDFYPKATCANNQEWSMSKTSSMNLDLVLFQISRLKNPIPNALNESPACPDPSEKWLKRLQHDTSDSHVPCSKKPKVGDGPLAGGTCTVFGQVFDCDSDSTGMINHVKNKLICKGLTDQQSQEGSPMSAKSLNRWIGRWCRGGTPVFHGTSNLERQEAKSGMPSDDLEGQFPSIAAMAMMGRVMNKLRPCELQKRGPSVVWRTEGL

SEQ ID NO: 42793 - protein, 809 aa, Oryza sativa
MASQGEPSSSSDPKGKKDFSTAILERKKSPNRLVVDEATNDDNSVIGMHPDTMEKLQLFRGDTVLLKGKKRKDTICIVLADDTCEEPKIRMNKVVRKNLRVRLGDVVSVHQCPDVKYGKRVHILPIDDTVEGITGNLFDAFLKPYFLEAYRPLRKGDLFLVRGGMRSVEFKVIETDPAEYCIVAPDTEIFCDGEPIKREDEERLDEVGYDDVGGVRKQMAQIRELVELPLRHPQLFKSIGVKPPKGKLLYGPPGSGKTLIARAVANETGAFFFLINGPEIMSKLAGESESNLRKAFEEAEKNAPSIIFIDEIDSIAPKREKTHGEVERRIVSQLLTLMDGLKARSHVIVMGATNRPNSIDPALRRFGRFDREIDIGVPDEVGRLEVLRIHTKNMKLAEDVDLEHIAKDTHGYVGADLAALCTEAALQCIREKMDIIDLEDETIDAEILNSMAVTNDHFKTALGTSNPSALRETVVEVPNVSWEDIGGLENVKRELQETVQYPVEHPEKFEKFGMSPSKGVLFYGPPGCGKTLLAKAIANECQANFISVKGPELLTMWFGESEANVREIFDKARQSAPCVLFFDELDSIATQRGSSVGDAGGAADRVLNQLLTEMDGMNAKKTVFIIGATNRPDIIDPALLRPGRLDQLIYIPLPDDQSRLQIFKACLRKSPVAKDVDLNALAKYTQGFSGADITEICQRACKYAIRENIEKDIEMEKRRKDNPEAMEEDEVDDIAEIKAAHFEESMKYARRSVSDADIRKYQAFAQTLQQSRGFGTEFRFADQPASGAGAAADPFASAAAAADDDDLYS

SEQ ID NO: 42794 - protein, 299 aa, Oryza sativa
MNAGGVRGVGVGAAAMASPPSPAIREAPHLPRRPRRVPADDVGDAGHVRVAAVGRAPRPPPRRPHRRRPPLLPRRPDRRRPRHPLPMHRRLHAAGRRGLGPLRLQPPLPPRPALCLRRRRPRRPRRRHLQHQPPLRDPRPDPHLPPHPRPRRRPRRHAGPPLPLPARRRRRRPGGVPGGDHLPRAVPAALQPALHGARRRRAARGAALGGGHVPWHHGRGVEDARPLLPPHEPLAGLRRALPRPRRRRRRRPGGGQRGAAPDRGDAGVHLHGAHAEGQVPRARRQRWRRRQQQQEQLIY

SEQ ID NO: 42795 - protein, 408 aa, Oryza sativa
MGALCDFCGEQRSMVYCRSDAASLCLSCDRNVHSANALSRRHTRTLLCDRCASQPAMVRCLVENASLCQNCDWNGHSAGSSAAGHKRQTINCYSGCPSSSELSKIWTFVSDIPNVAPEPNCEQGISMMSISDSGVSNQDNAAGDSSLLDIASATLMSDLGTAGKPKSLIGSSSEAGVNLLPLATDQMAGSVDSTSAKVPYTADQDMFSKDSIYEDFCVDDVDLSFENYEELFGTSHIQTEQLFDDAGIDSYFESKEIPSGNSDEQPKLMQPVTSNAVSADSGMSIPGAKGDSSLCIPVRQARSSISLSFSGLTGESSAGDYQDCGVSPVLLMGEPPWHPPGPEGSFAGATRDDAITRYKEKKKRRKFDKKIRYASRKARADVRKRVKGRFVKAGEAYDYDPLCETRSY

SEQ ID NO: 42796 - protein, 843 aa, Oryza sativa
MLLVGVLLLLFFNLHLPTAAIDTLTLGQSLLWNQTLVSNGGNFELGLFSPGKSNKHYLGIWYKKISKKTVVWVANRERPILEPSSCHLELSVHGDLRLFSTAPSNTLLWSSNASASSSPSPPRTTVATLQDDGNLVVNSNATRSRSRSPSSTTTTHVAWQSFDHPTDTWLPGARLGYDRGRGVHSFLTSWTDSENPAPGAFSMVIDARGLAKFDLLAGGEHRYWTTGLWDGEIFANVPEMRSGYFTGVPYAPNASVNFFSYRDRLPGAVGNFMLDVNGQMRRRQWSETAGKWILFCSLPHDACDVYGSCGPFGVCSNATNPECRCPAGFEPRSSEEWRLENAAGGCVRRHPLECHGDGFLALPYTVRLPNGSVEAPAGAGNDKACAHTCLVDCSCTAYVHDGAKCLVWNGELVNMKAYAANENGQGDPGLAGAVLHLRVAHSEVPASSTEHSWKKSMVILGSVVAAVVLLLASLVTVVAVAAVLRMRRRRGKVTAVQGSLLLLDYHAVKTATRDFSEKLGSGSFGTVFKGALPDGTPVAVKKLDGLRQGEKQFRTEVVTLGMIQHVNLVRLRGFCCEGNKRALVYDYMANGSLDSHLFVMSGSSSGPDSKQVTLTWSQRYNVAVGVARGLAYLHEKCRECIIHCDVKPENILLDQEMAARLADFGMAKLVGRDFSSVLTTMRGTVGYLAPEWLAGTPVTAKADVYSFGLLLFELVSGRRNSTAPSSSSEGGPGIYFPVHAVVKLNEGDVAGLVDERVAKDADPKEVERLCKVAGWCIQDEEGDRPTMGLVVQQLEGIANVMLPPIPSRLHILAIENEWVRGVPGDERCSKSGSKPETEAIEEM

SEQ ID NO: 42797 - protein, 145 aa, Oryza sativa
MAKLSEATEAATDGSKKPDKKIAADAATPAKKRNAVDFLKRLNQGSSPSKKKKKGSPMGTRKRAAAATSPEQPQKTRKGPGRKDAGRGGSKKGGKSATPKRSVGRPPSKQGAAAATTPPPSKRAKVNRSEKTAATATAAKRGGKR

SEQ ID NO: 42798 - protein, 653 aa, Oryza sativa
MAKGRIFSALLMVFLVLAPHCEAFYLPGSYMHTYRQGEEIWAKVNSLTSIETELPFSYYSLPYCHPQGGIKKSAENLGELLMGDQIDNSPYRFRVNVNESLYLCTTNPLDEADVKLLKQRSRDLYQVNMILDNLPVRRFTEQNGVTIQWTGYPVGYTPEGSNEVYIINHLKFKVLVHRYEGGKVKVVGTGEGMEVISETETDAKSGYEIVGFEVVPCSMKRDLEAMSKLKMYEKVDPTSCPVEMEKSQLIREKEQITFTYEVEFVNSDIRWPSRWDAYLKMEGAKIHWFSIMNSLMVILFLAGIVFVIFLRTVRRDLTRYEELDKEAQAQMNEELSGWKLVVGDVFREPTSSKLLCVMIGDGVQILGMAIVTIFFAAFGFMSPASRGMLLTGMIFLYMLLGIVAGYAAVRLWRTLKGTSEGWRSVSWSTACFFPGIVFVVLTVLNFMLWSRNSTGALPISLFFTLLSLWFCISVPLTLLGGFFGTRAEPIEFPVRTNQIPREIPAKNYSWLLVLGAGTLPFGTLFIELFFILSSIWLGRFYYVFGFLLVVLLLLVVVCAEVSVVLTYMHLCAEDWRWWWKAFFASGAVALYVFLYSINYLVFDLRSLSGPVSATLYIGYAFVVSLAIMLATGTVGFLTSFSFVHYLFSSVKID

SEQ ID NO: 42799 - protein, 562 aa, Oryza sativa
MLNFTPINGKPIRIMYSNRDPSSRKSGAANIFIKNLDKSIDNKALYDTFSVFGNILSCKVATEMSGESKGYGFVQFELEEAAQNAISKLNGMLLNDKKVYVGPFVRKQERENVSGNPKFNNVYVKNLSESTTEDNLKEIFGKFGPITSVVVMREGDGKSRCFGFVNFENPDDAARAVEDLNGKKFDDKEWYVCRAQKKSEREMELKEKFEKNIKEAADKNQGTNLYLKNLDDSIDDDEKLKEIFADFGTITSCKVMRDLNGVSKGSGFVAFKSAEDASRALVAMNGKMIGSKPLYVALAQRKEERRARLQAQFSQMRPMVMPPSVAPRMPMYPPGVPGVGQQLFYGQPPPAFVNPQPGFGFQQHLIPGMRPSVGPIPNFVMPMVQQGQQPQRPAGRRAGTGGIQQPMPMGHQQMLPRGSRGGYRYASGRGMPDNAFRGVGGLVPSPYEMGRMPLSDAGAPPQVPIGALASALANSPPDQQRLMLGESLYPLVDQLEHDQAAKVTGMLLEMDQTEVLHLIESPDALKAKVAEAMEVLRNAQQQQANTPTDQLAALTLSDGVVS

SEQ ID NO: 42800 - protein, 535 aa, Oryza sativa
MSGKKPTAAPPTARLSRACVMIIVVASVERFAYKGVASNLVTYLTEVVEMSTSAAAKSVSAWSGVTSMLPLLTAVLADSYWDRYSTITASSLLYVVGLIGLTLWALLHTRMPCSTLFFPLYLISIGQGGYNPSLQAFGADQLDIGDDDDDGDNGATAATEEQRSKVKSLFFQWWYFGICSGSLLGNTTMSYVQDTVGWGLGFAVPAAVMAVSVAAFFCCTPLYKQRQPRAVHRKPCRDSVLKALKSLLASVTGARKITLPSRDGDDDTDIVSELELQEKPLKLADQKQEAAMGEAAAPSVAKIIVRLLPIWTMLLMFAVIFQQPMTFFTKQGMLMDHRVGAVFVIPPAMLQSSITVSIILLMPLYDTVVVPLAGLVAGHGKGITVLQRIGVGMVLSIVAMAVAALVEARRLRAAASSSSGGRLSIFWLLPQYVLLGVSDVFTVVGMQEFFYTQVPSAMRTVGIALYLSVFGVGSFVGAFLITALEMVTAGGGGGGHDHGWFSDDPREARLDKYYWFLALLSCVSFVVFTHLCKYY

SEQ ID NO: 42801 - protein, 337 aa, Oryza sativa
MAKIKIGINGFGRIGRLVARVALQSDDVELVAVNDPFITTDYMTYMFKYDTVHGQWKHHEVKVKDSKTLLFGEKEVTVFGCRNPEEIPWGETGAEFVVESTGVFTDKDKAAAHLKGGAKKVVISAPSKDAPMFVVGVNEKEYKPDIDIVSNASCTTNCLAPLAKVINDRFGIVEGLMTTVHAITATQKTVDGPSSKDWRGGRAASFNIIPSSTGAAKAVGKVLPALNGKLTGMAFRVPTVDVSVVDLTVRLEKPASYDQIKAAIKEESEGKLKGILGYVEEDLVSTDFQGDNRSSIFDAKAGIALNDNFVKLVSWYDNEWGYSSRVVDLIRHMYNTQ

SEQ ID NO: 42802 - protein, 427 aa, Oryza sativa
MRCLPFLHGDSKEEDPVNKSASVRSLSTTSTERDVRSGSDFNSLNVSDMSAESIRRTQYPSFTDRPSNLRVFSFSELKNATRNFSRSLMVGEGGFGCVYRGVIKNSDEPTERTEIAVKQLNRKGLQGQKEWLTELNVLGIVEHPNLVKLIGYCAEDDERGVQRLLVYEYMPNGSVDDHLSSRSNSTLSWPMRLKVALDAARGLKYLHEEMEFQVIFRDLKTSNILLDENWNAKLSDFGLTRHGPSEGLTHVSTAVVGTLGYAAPEYMQTGRLTAKSDIWGYGVLLYELITGRRPIDRNRPKGEQKLLDWVKPYISDIKRFPIIIDPRLEGHYNLKSMTKLASVANRCLVRLPKSRPKMSEVYEMVQKIVASIETGTPQPPLHYHGSVSEPGSKRPKKGSLKRRFQEFKFGCRQIVWRSWKPEIIKTC

SEQ ID NO: 42803 - protein, 172 aa, Oryza sativa
MRSRSTPGGCSTSWTPRFLRRFLAASKSHGAPKSRLPARMGSTRMRAPPTSHTQLLISRYVSFTCLCLCLWLFVTPALLLRTRTAIALGRCGGVEAAKVLRLQLLLLISRWRPPMVVVVVVVVAMAKFAFASHSSGALPLLLSRYSTCGLWGAGYVSKWQPPTQDQSSCFYF

SEQ ID NO: 42804 - protein, 202 aa, Oryza sativa
MVSSSSPVVNVYPLANYTFGTKEPKMEKDTSVADRLARMKVNYMKEGMRTSVEAILLVQEHNHPHILLLQIGNTFCKLPGGRLKPGENEIEGLKRKLCSKLAVNSPSFPPNWQVGECVAVWWRPNFETVMYPYCPPHITKPKECKKLFIVHLSEREYFAVPRNLKLLAVPLFELYDNVQRYGPVISTIPQQLSRFQFNMVSS

SEQ ID NO: 42805 - protein, 542 aa, Oryza sativa
MAAATAAVFALLMASALAGAAAGGDIVHHDDEAPKIPGCSNDFILVKVQSWVNGKEDDEYVGVGARFGPQIVSKEKHANRTRLMLADPIDCCTSPKEKVSGDILLVQRGECKFTKKAKFAEAAGASGIIIINHVHELYKMVCEKNETDLDINIPAVLLPRDAGFALHTVLTSGNSVSVQQYSPDRPVVDTAEVFLWLMAVGTVLCASYWSAWSAREALCEQEKLLKDGREVLLNVENGSSSGMIDINVASAIMFVVVASCFLIMLYKMMSSWFVELLVVIFCVGGVEGLQTCLVALLSRWFRAASESFFKVPFFGAVSYLTLAVSPFCIVFAVLWAVHRHFTYAWIGQDILGIALIITVIQIVRVPNLKVGSVLLSCAFFYDIFWVFVSKRWFHESVMIVVARGDKTDEDGVPMLLKIPRMFDPWGGYSIIGFGDILLPGLLVAFALRYDWAAKKSLQTGYFLWSMVAYGSGLLITYVALNLMDGHGQPALLYIVPFTLGALISLGWKRGELWNLWSKGEPERVCPHHMHMQPQPKTPPLVQ

SEQ ID NO: 42806 - protein, 153 aa, Oryza sativa; identical to SEQ ID NO: 42734

SEQ ID NO: 42807 - protein, 429 aa, Oryza sativa
MESLVLASSCSASPRLPPLSAARRRRPSSQTLPATAAASGRRGAGRSKLVVVAAAAAAARGSGNGFEGLKTNGFASMSSSTNSENMSTGTGSLPPMPPPSSYIGSPVFWIGVGVALSAAFSMVSSMVKKYAMQQAFKSMMTQAPPNTFGSNSPFPFAMPPQAAPAAPSSYPYSQPRKDTSPQSATVDVSATKVEATGTLEEADVAEQPKKKFAFVDVSPEELQQKELQSSLETVDVKSESKQSETMEDTEQKAPTNGTAFKMNEGSASGTTESSNSGPMLSVDTIEKMMEDPAVQKMVYPYLPEEMRNPDSFKWMLQNPMYRQQLQDMLNNMGGSPDQWDNRMLDHLKNFDLSSPEVRQQFAQVGMTPEEVVSKIMANPEVAVAFQNPKIQTAIMDCSQNPLNIVKYQNDKEVMDVFMKISQIFPQING

SEQ ID NO: 42808 - protein, 370 aa, Oryza sativa; identical to SEQ ID NO: 31416

SEQ ID NO: 42809 - protein, 319 aa, Oryza sativa
MATGAAPLWFTSLAGLGAAYLTVVFLRLLPYLALYLRRPKDLRRCYGEWAVVTGPTTGLGRSMAMELARRGFNLVLLDLDRDNLREVSEAIREAHAGAVATRTVVFDLSTVGTGAGEEGMRRLREAVDGVEVGMLVNNAAVARPGALYFHEADVERLVAMIRVNAMALTAVTAAVLPAMARRGRGAIVNVGSGSTVAVPSFPLYTVYSSTKRYVEQLSKSLYVEYKGKGIDVQLQVPFYVHTNMLSAAIKDRMLLPAFVATADDYTRAAARWVGHGHIAVPDAGQQLQWFLAAFVPDFAHDWYRLRKHLQHRAILWNLI

SEQ ID NO: 42810 - protein, 341 aa, Oryza sativa
MERGQKKKLATLVGCNYAGTPNELQGCINDVAAMRDALVARFGFAPADVTVLTDDRGSPVLPTGANIKRALADMVARAAPGDVLFFHYSGHGTLVPPVKGRRHGHGECDEAIVPCDFNLITDVDFRRLVDRVPRGASFTMVSDSCHSGGLIDLEKEQIGPSVLAAGAAPAAAAASTTATRATAARFLPYAAVVEHLSGVSGVDAAHHVADHLLALFGADASAKFHRDAEQPVRTDDDGILLSGCQTDETSADVPGDDEVAAGGKACGAFSNAIQTVLASHPAPVSNRQLVSMARAVLSDQGFEQHPCLYCSDGNAETPFLWQEEDKKKTVTAAAEQAMTAL

SEQ ID NO: 42811 - protein, 42 aa, Oryza sativa
MMDLYIKLSVCVPRLIPGRGFYAQISSEITSEFPDVTTTFNW

SEQ ID NO: 42812 - protein, 577 aa, Oryza sativa
MYELDFTDLGSSSYYVTSETRWGVSNVGKYFQSPNDSKIIYSNEKIQNAVVSELLQTARMSPSSLRYFGLGLENGNYTVLLQFAELGYPDSPTWKSLGRRVFDIYIQGDLKEKDFDIRKMAGGKSFTAVYKSYTATVSKNFLEIHLFWAGKGTCCIPIQGYYGPLISALSITPNFTPTVRNGVPKRKSKVGAIAGISIGASVVGLAALFGIFMFIKKRRRLAQQQGELYNLVGRPDVFSNAELKLATNNYSSQNILGEGGYGPVYKGMLPDGRVIAVKQLSQSSHQGKNQFVTEVATISSVQHRNLVKLHGCCIDSNTPLLVYEYLENGSLDQALFRKNSLKLDWATRFEIILGIARGLTYLHEESSVRIVHRDIKASNVLLDTDLTPKISDFGLARLYDEKKTHVSTGIAGTFGYLAPEYAMRRHLTEKVDVYAFGVVALETVAGRSNTNNSIEESKIYLLEWAWDLYEKEQAQRIVDPRLEDFNKDEVLRVIHVALLCTQGSPNQRPPMSRVMAVLTGDAEVVEMVTKPSYITEWQYRDGNSTNSESTTSEFSRQKEIDPLTMSPTITGSSHDGR

SEQ ID NO: 42813 - protein, 843 aa, Oryza sativa
MLLVGVLLLLFFNLHLPTAAIDTLTLGQSLLWNQTLVSNGGNFELGLFSPGKSNKHYLGIWYKKISKKTVVWVANRERPILEPSSCHLELSVHGDLRLFSTAPSNTLLWSSNASASSSPSPPRTTVATLQDDGNLVVNSNATRSRSRSPSSTTTTHVAWQSFDHPTDTWLPGARLGYDRGRGVHSFLTSWTDSENPAPGAFSMVIDARGLAKFDLLAGGEHRYWTTGLWDGEIFANVPEMRSGYFTGVPYAPNASVNFFSYRDRLPGAVGNFMLDVNGQMRRRQWSETAGKWILFCSLPHDACDVYGSCGPFGVCSNATNPECRCPAGFEPRSSEEWRLENAAGGCVRRHPLECHGDGFLALPYTVRLPNGSVEAPAGAGNDKACAHTCLVDCSCTAYVHDGAKCLVWNGELVNMKAYAANENGQGDPGLAGAVLHLRVAHSEVPASSTEHSWKKSMVILGSVVAAVVLLLASLVTVVAVAAVLRMRRRRGKVTAVQGSLLLLDYHAVKTATRDFSEKLGSGSFGTVFKGALPDGTPVAVKKLDGLRQGEKQFRTEVVTLGMIQHVNLVGLRGFCCEGNKRALVYDYMANGSLDSHLFVMSGSSSGPDSKQVTLTWSQRYNVAVGVARGLAYLHEKCRECIIHCDVKPENILLDQEMAARLADFGMAKLVGRDFSSVLTTMRGTVGYLAPEWLAGTPVTAKADVYSFGLLLFELVSGRRNSTAPSSSSEGGPGIYFPVHAVVKLNEGDVAGLVDERVAKDADPKEVERLCKVAGWCIQDEEGDRPTMGLVVQQLEGIANVMLPPIPSRLHILAIENEWVRGVPEDERCSKSGSKPETEAIEEM

SEQ ID NO: 42814 - protein, 140 aa, Oryza sativa
MIQLLFLVLFAEGAAALLLMVKIGPLRELAMRGVEQAKDGKGPAAVKTLACTLLVIFMSSVASILRIQNRGIKLGTVSPMDQVLWRTHLLEASLIGIPLSSSSLTIFIFFTSTWWNLYNCTVGGGNDWGLGVDLVDFFGN

SEQ ID NO: 42815 - protein, 283 aa, Oryza sativa; identical to SEQ ID NO: 32115

SEQ ID NO: 42816 - protein, 685 aa, Oryza sativa
MGCTHSKVEDEEAVRRCKDRRKLMKQLMRRRVELAAAQTAYLQSLRNTGATLRQFAEVESALSQQPPAGIAVHPSPPPPPPPPPPPPPVPVPPAYSVTSSVPPYSMTSSLPPSPRPPPPLPFSPIVIRRKKRDGELDEDDSTDDDDDTDSCSTPLPPPPPPGVEWEYLEPFAMRPLNFPSSLADRIDKEAASQVTMDDDNWVETNTEFDGYDDESVSGNVEGIVSSVQLNQAKSRALGDDNSSMVSWVTKDSDTSAMAWRSKKSLAGIAKEIDEYFLKAAASGSDIVILLDSSGGQPDPSELEANRGKNSKSAKVFSTISWSWSFKSAQANRQSSMHSSDASGYGYHGKTLEKLYEEEQKLYKLVKDEEFARLQYRKNTSLLQRLESGDHDKLHAEKVRDNIEELQARIISLEEAVGLTCLSISKLRDEELYPQIIELSAGLVHMWRNMYECHQVQNHIAQQANLLGNLPGNEPTTDTHCQATSQLEVEVSAWHSSFCNLITLQRDYVTILNQWIKLTDCLPDNDGFMKSSSGIRSLCAELQRALTGLPEKVAAEAIKTFLSVIHTIVVQQTEERQLKKKSDQIESKFHTQLEKHSNNATQNSGQPTLAKLDTFKKQVEEEKARYLNSVRTSRAMTLNNLQTSLPNVFHALMGFSGVCVQAFEGISRCSEIVASHSGAVSPAISS

SEQ ID NO: 42817 - protein, 291 aa, Oryza sativa
MGSRYEVEVTVSSARDLKNVNWRNGDLKPYAVLWVDDGAKCSTRVDLDNADNPNWDDKLTLPLPPSSRLDDALLYLDVVHANAAEGVKPLVGSARLPLHDVLDDAGVGARVSRSLRLKRPSGRPQGRLDLRLAVRESARYYDPSPYPAPYGQPAGTRDPYGAPPPAYSSGSGGQYPYGGGYGSGGYAAPPAGYPSAYGAPPQPAYGGAPPVAAYGAAGGAPVVVEETKKKSKMGMGTGLAVGAAAGVLGGLALAGGASYLEDKFEEGVAEKVEDDLDRDDDYAAGGYDDDY

SEQ ID NO: 42818 - protein, 354 aa, Oryza sativa; identical to SEQ ID NO: 33050

SEQ ID NO: 42819 - protein, 790 aa, Oryza sativa
MGVKPGPRRNVLSAINNGGGTNSDTASVDGGEGGAGPAAPVIEFTGREDVERLLAEKMKGKSKTDYKGRTEQMSEYIKKLRACIRWYIELEDGYLVEQEKLRSTMDAENAQHAKLEAQLSSDLEELKAAHLNLTRQCDSLEESFNKEKADRMLAVESYEKERQQRESAEASLDLLSVDLERVSHEAKRFSEQLKMVQDTNKRLQEYNTSLQQYNSNLQADASKSGDIISKLQKEKSAMMETMASLKDLNNSMKNHLDSSRTSQQEAIRMKEQLMKEVDCLRIELHQIREDRDQSVSQVNTLSAELANYKELAGKSTKDCESLSVKVSAFEVSGFRLTKSILSVRNYLAHHYASAQETCSMQQEQIQTLQKQLAVATNKLKLADVTAIEAMTGYEEQKVIIKDLEERLASAEFQIVEADKLRKKLHNTILELKGNIRVFCRVRPLLQDNDSSGAEEALISYPTSVESAGRGIDLMNQGQRFSFSYDKVFDHGASQEDVFVEMSQLVQSALDGYKVCIFAYGQTGSGKTYTMMGPPGRDQKGIIPRSLEQIFKTSQSLESQGWKYSMQASMLEIYNETIRDLLAPGRSNNFDLSTSKQYTIKHDPQGNTTVTDLTVADVFSSADVTSLLAKASQSRSVGRTQMNEQSSRSHFVFTLKISGSNENTGQQVQGVLNLIDLAGSERLAKSGSTGDRLKETQAINKSLSALSDVIFAIAKGDDHVPFRNSKLTYLLQPCLGGDSKTLMFVNISPEASSVGETICSLRFASRVNACEIGIPRRHTQARSFDSRLSYG

SEQ ID NO: 42820 - protein, 127 aa, Oryza sativa
MAAPPRPIPSIHRQPPKPTTTHVARCFRDPPKAPDTNSNTNPLLSLLSAVPDWADAVSERRIRDRRPLYTHADWREHRSSRRHLRHLLSSLTSRVILSLAPPVSATEDDISNTLGHRIVICVRMEVE

SEQ ID NO: 42821 - protein, 550 aa, Oryza sativa
MTATSPPMRSVAAAALVLTPTPTLNRLSFPFAHRHCPSTAAPRWRPARCRGKPAVEDVVHDDEEETWRREANPERKDGGEEMLGRGWFMVDEIGMEILTIALPAVLALAADPITALIDTAFVGHVGSTELAAVGVSISIFNLVSKLLNVPLLNVTTSFVAEQQAVDADYNSSVENSHIGEEISISQEKAGEQRKFLPAVSTSLALAAGIGLMETVALILGSGTLLDIVGVPVDSPMRIPAEQFLTLRAYGAPPVIVALAAQGAFRGFMDTKTPLFAVVAGNLVNALLDAIFIFPLGLGVSGAALATVTSEYLTAFILLWKLNSKIVLFSWNIVSGDIIRYLKSGALLIARTIAVVLTFTVSTSLAAREGSVPMAGYEICLQVWLTISLLNDALALAGQALLASEYAKGNYKKARIVLYRVLQIGGVTGAALSTTLLLGFGYLSMLFTDDAAVLDVAQTGVWFVTVSQPINAVAFVMDGLYYGVSDFAFVAYSTLFAGAISSAVLLVAAPKFGLGGVWAGLTLFMSLRAIAGFWRLGSKGGPWKIIWSETE

SEQ ID NO: 42822 - protein, 213 aa, Oryza sativa; identical to SEQ ID NO: 32790

SEQ ID NO: 42823 - protein, 347 aa, Oryza sativa
MAGVIKWKMMSCEQSGRRSAEIARECLSLTPNRYKCHSYQHIGYLGDSAEGFICRPLKSKLRSKVGLHVAAKVHNKDDEGSCSSRISDEDNETLSNASRKMEVNHLGALRCYFSKLNTEDAQKPYSFHQTNKQRTGPLSTNIEEANMATDYGDFRNTLESFEINFNRRKKGTKGYLNTAVEDYTNYLIFDEKNFLDMQQDDQTSSFCLTNLLAAINIAVLLFEIASPVRNSDIENLSLPLMYGAKINDLILSGEWWRLLTPMCLHSGFLHIALGCWVLLIFGPRVSRAYGQTTFLLMYILGGVCGNLTSYLHTSELTVCGTDTSWGNNLWTTFRLFNLPKCAGRQCC

SEQ ID NO: 42824 - protein, 445 aa, Oryza sativa
MAGGDGGGGGGDESEFVGVGGGGGGGGEGEGNQSPPNRRFFVAVHVGAGFHAPANEKAYRRAMKRACLAAAAVLREGNGTSLDAVAAAIQVLEDDPITNAGRGSNLTESGHVECDASIMDGSTTTFGAVGAVQGVKNPIQIALHLAREQMVGPSLLGRIPPMFLVGEGACQWAKSKGLNLPEATSEGNSWLVTESAKAQWGKYRSLLASAKESVNHSTGSGSESSSVQLEAPGAEAEDITGVKKMKMITRSIMEDDQDCVMDTVGAVCVDAYGNIASGASSGGIALKVDGRVGLAAMYGSGCWASSKGPFGTPFIVGCCATGAGEHLIRGFAARECCISSSLIQSGPASACTKVLRQAVQSSSEMSHDTGAGLLLIQADVLKRGEVSALGAAELVAAYSSPSFGVGYLGSNMNSPKVAMLRSSKAAPNTINHFATRVNFDAQSDQ

SEQ ID NO: 42825 - protein, 58 aa, Oryza sativa
MGKIIKRCLRTEQKLNIPDILSIFSPILVFAFPVLFFWYQKISGAIFFLFVKLLDASF

SEQ ID NO: 42826 - protein, 496 aa, Oryza sativa
MDDATTTKRKRPVIRFNDLPTDILIGIISRLPIKEAARTSILSSHWKKIWCSHVNLEFSFYSMSPRLASTSHDARLRMKMFIERVSQVFAQHSGLSVQKIAIQGKLDNEHADHINRWLSFVSATKTKDLTFDFKSRYPREGPYDFPFKFFGAMDSSYLLSMRLSAVSLNPPVDFKAFLNLKRLKLEHTNITDENMQILISNCNALEFLGIVDCGKLTRLSTSHLWNQLKHLHVESCHLLKEIELNLGLTKLGYKGTLIPLSPPGPLLLTNVCMKLQHARSSLGYIFTNLPSTLLHLETLSLQCSELERAILPENHIKFMYLKHLRLQLRHPVTEKKIDLLDFACLLEAAPLLQKFELHMWMPLHHQRYREEAHGELRSLPPQPHAHLRLVHISGFIGMKDQLELSLHILRNSAMIRAMKVDPKPLFALPCISMLSPLEGFQYLDGYEVAIEYLCREDHNNVVDVSEIRREEVETLSVCELVYPDCVRLTRKANSSS

SEQ ID NO: 42827 - protein, 712 aa, Oryza sativa
MAGLRRLWGEWEIRVLLLSSLSLQVFLLFTGGLRKRNVAAWLHFMLWLAYLLADSIAIYALGNLSQNQKLCSNGPHGGGDMHLLVFWAPFLILHLGGQDTITAFAIEDNELWLRHLLSLVSQIALALYVYWKSRPSAAGLLVPAILMFVSGVVKYGERTWALKSASMSSLRSSMLTRPDPGPNYAKFMEEYHSSKEAGLHAEIVIVPERPPDDNIHVQEEHMEYGELVVKAHRFFHTFRRLFVDLILSFQDRTDSLAFFRRLQRDQAYKVVEIELLLMYESLHSKSSVIHGPTGRYLRIFTLAAPVLSLIVFSGTDKAPYKPVDVTVSYVLLGGAIFLEIYAILLMAISPWSFADLRKKDKCLPVASGVFRAVSYFLPEARPRWSNQMAQYNLIHYCLKDKPTWLTGALEKLEWDYNVRVKTIWDSIWYTHHIGVSMVLKQLVFKQLKEKANSTADPMSYRRFGDHRGQWFLHRMGCYQELGASVEVEFDESIILWHIATDLCFYDDDDDDGRDAGERKLKRWSSCCFCSCSDHAPTADDSHLNDVSHLPAASREISNYMLFLLVMRPFMLTASIGQIRFGDTCAETKNFFLRGDELGAARKAAEALTKVKTEINPREVKGDRSKSVLFDACRLAEQLRRLGRRKRWRLVAGVWVEMLCYAAGKCRGNFHAKQLSQGGELLTVVWLLMAHFGMGDQYRVEAGHARAKLIIEN

SEQ ID NO: 42828 - protein, 320 aa, Oryza sativa
MGSGMVKKKVVKAGSFDLDAKLDKSWMKDITCPICLDFPHNAVLLRCTSYEKGCRPFICDTDQSRSNCLERFKGAHGLPTNMKVPSFNGAPLDSIHIISSNTTDRPACPLCRGDVIGWVVIDEARLHLNQKKRCCEESCCSYVGNFHELQKHTQQKHPNSRPSEIDPARRVDWENFQQSSDIIDVLSTIHAQVPNGIVLGDYVIEYGDDDAGDDYEVYHRVRGNWWTSCIFCKSFCRSSGGRSRARARERRSSGRRSSNRSSQESFTIEVPSGSVDIREIRFDEIDDEYIVTGAMPGIAASRRIASHYRDPRYGRRRSYY

SEQ ID NO: 42829 - protein, 806 aa, Oryza sativa
MPSATDPPAALPLTLDLDDFKGDFSFDALFGTLVDELLPEFRGDDAPGAPPPPPPVLGAAPPVFPAVDELLGLFKHSCKELVDLRRQIDKRLQNLKKEVATQDAKHRKTLGELEKGVDGLFDSFARLDSRISSVGQTAAKIGDHLQSAESQRETASQTIDLIKYLMEFNSTPGDLMELSPLFSDDSRVAEAASIAQKLRSFAEEDVGRHGVPSAVGSANASRGLEVAVANLQEYCNELENRLLARFDTASQRREMSTMAECAKILSQFNRGTSAMQHYVATRPMFIDVDIMSIDIQVVLGEEGPQADHICIAEGLSVLYKEIADTVRREATTIMAVFPSPNEVMSILVQRVLEQRVTAILDKLLIKPSLANLPPIEEGGLLHYLRVLAVAYDKTKELAKELQSISCGDLDIEGLTESIFVSHKDEYTEFEQASLRQQYQSKMAELRAEAKQQSESTGTIGRSNGAAVTTSLQQQISVTVVTEFVRWNEEAISRCTLLFSQPATVAANVRSIFACLLDQVSQYLTEGLDHARESLNHAATQRDRYVIGTSVSRRVATAAANAAEAAAAAGESSFRSFMIAVQRCASSVAILQQYFSNTISRLLLPVDGAHPSACEDMGSAVSVVEAAAHKGLLQCIDTVMSEVERLLSSEQKATDYRTPDDGAAPDHRPTNACIRIVAYLSRVLEVAFSALEGLNKQSFLTELGNRLHKGLLNHWQKFTFSPSGGLRLKRDITEYGEFVRSFNAPSIDEKFELLGIMANVFIVAPESLASLFEGTPSIRKDALRFIQLRDDYKTAKIASMLNSIMAE

SEQ ID NO: 42830 - protein, 274 aa, Oryza sativa
MAERGGERGGERGGFGRGFGRGGRGDRGGRRGGRRGPRQEEEKWVPVTKLGRLVKEGRFSKIEEIYLHSLPVKEHQIVETLVPGLKDEVMKITPVQKQTRAGQRTRFKAFVVVGDNNGHVGLGVKCAKEVATAIRGAIILAKLSVVPVRRGYWGNKIGQPHTVPCKVTGKCGSVTVRMVPAPRGSGIVAARVPKKVLQFAGIEDVFTSSRGSTKTLGNFVKATFDCLMKTYGFLTPDFWRDTKFVKSPFQEYTDLLAKPTKALMIDAPVENVEA

SEQ ID NO: 42831 - protein, 463 aa, Oryza sativa
MTSLSSSAAAARATFVMPSSVRGGMSRGRRMARLVTRAAASSPKLPSGRQLRVAVVGGGPAGGAAAEALAKGGVETVLIERKLDNCKPCGGAIPLCMVSEFDLPLDLVDRKVRKMKMISPSNVAVDIGGTLAPHEYIGMVRREVLDAYLRSRAEGAGAEVVNGLFLRYEAPKEPNGSYVVHYNHYDSSNGKAGGEKRTFEVDAIVGADGANSRVAKDMGAGDYEYAIAFQERVKIPDDKMKYYEERAEMYVGDDVSPDFYGWVFPKCDHVAVGTGTVTHKPDIKKFQAATRLRAKDRIEGGKIIRVEAHPIPEHPRPKRVAGRVTLVGDAAGYVTKCSGEGIYFAAKSGRMCAEAIVAGSANGTRMVEESDLRRYLAEFDRLYWPTYKVLDVLQKVFYRSNAAREAFDEMCADDYVQRMTFDSYLYKRVVPGNPLDDIKLAVNTIGSLVRATALRREMEKVTL

SEQ ID NO: 42832 - protein, 571 aa, Oryza sativa
MDRTSQWVSSPDIPADLLIRIADDVFPLHKAVMVPKCCYIRKAVAAARGGATATVDLDLSALPGAADAFDKVARYCYGANFELSVRNAAALLCAAAFLDMHPTDGGLARRVEEFLAKVGLRTLPGAVAVLRSCEGLLPAAEEIGVVQRSADAIALRICNEVLFPTRSPPEWWTAELAALSPASFHKVITALRCRRAEPEVLVAAATAYAELLLAEVLAADGHAADHSGMHRALVESVVAVLPSTDDAPLPAAFLCHLLHVAITIGASAKTCHDLELRVAAVLDQATAGDLLTVALDGAGERVQNVDAVRRIITAFVERDSAASSGGGANGRNRRASLSGAGALQGGGGAMQTVAKTVDEVAAEIATEESLPISKFVGLAGAVPKEARATHDCLYRAVDIYLKAHPALEEMEREKVCSVMDPLKLSYQGRLHASQNNRLPLQAVLSALYYDRLKLRSGDEGGGGWDAYGNGVMRSSAAGSARKQAKEEASLARENEALRSELARMRAYVSGMQQQSKGSSSSRGKKGSWLRTLSRLNPFKAGIWGKDTSGIVDGKTDAMNSVKSKRRRFSIS

SEQ ID NO: 42833 - protein, 433 aa, Oryza sativa; identical to SEQ ID NO: 31544

SEQ ID NO: 42834 - protein, 978 aa, Oryza sativa
MASQPPAAVEARLADLCKELGVDEGVAGEAAAVLEEGKGALLASPSFGSKSPEDAEKLCFAFVLYCVSKLKETKAGSSGVRLWEILKGCKLKYDDFFKESQRLASRIDQVLGSRYGSDWEARLELKQLENLVNLLADASRFYCKAFNELFLSPSTDQEPGSTTNIPDYIRFGWLLFLILRSKSPELFKDLVSCIHGLVAILAILLIHVPAKFRSFTIEGSSHLIKQTEKGVDLLPSLCHNYHTSEDRLKEMMGKSYKVIEVFFSRKAINASEFKTVNLDKIDTDGLMYFKDLVDDEIFQSNLEKLEKLSSTTGCQGELDLEMFLTSNDYVLNAENSSGSSANFGCSKRVFETLASPTKTIKNMLAAPSSPSSPANGGSIKIVQMTPVTSAMTTAKWLRDVISSLPDKPSSKLEEFLSSCDTDLTSDVVKRVSIILEAIFPTKSIDRGTSIGLNCANAFDIPWAEARKMEASKLYYRVLEAICRAESQNNNVNNLTPLLSNERFHRCLIACSAELVLATHKTVIMMFPAVLESTGLTAFDLSKIIENFVRHEETLPRELKRHLNSLEEQLLESMSWEKGSSLYNSLVVARPSLSTEINSLGLLAEPMPSLDGIVARQSIHPDGLPPTPSKRWPSAGPDGNCYPQSPKRLCTESRNSLVERNSQTPPPKQSQTGLSILKAKYHPLQATFASPTVSNPVSGNEKCAVVGVQIFFSKILKLAAIRIRNLCERLRHEELTVSVYNIFKQILDQQTALFFNRHVDQIILCCLYGVAKVSQLSLTFKEIVNNYKREPQCKPEVFRSIFVGSTNRNGGFGSRHVDIIVFYNQVFVPTVKPLLVALMPSSTRPEDKRNTNSQIPGSPKSSPFSNLPDMSPKKVSSSHNVYVSPLRQTKMDALLSPSSRSFYACIGESTQAFQSPSKDLAAINSRLNYPTRRINTRINFDMVSDSVVAGSLGQPNGGSASSDPAAAFSPLSKKSKTDS

SEQ ID NO: 42835 - protein, 809 aa, Oryza sativa
MASQGEPSSSSDPKGKKDFSTAILERKKSPNRLVVDEATNDDNSVIGMHPDTMEKLQLFRGDTVLLKGKKRKDTICIVLADDTCEEPKIRMNKVVRKNLRVRLGDVVSVHQCPDVKYGKRVHILPIDDTVEGITGNLFDAFLKPYFLEAYRPLRKGDLFLVRGGMRSVEFKVIETDPAEYCIVAPDTEIFCDGEPIKREDEERLDEVGYDDVGGVRKQMAQIRELVELPLRHPQLFKSIGVKPPKGILLYGPPGSGKTLIARAVANETGAFFFLINGPEIMSKLAGESESNLRKAFEEAEKNAPSIIFIDEIDSIAPKREKTHGEVERRIVSQLLTLMDGLKARSHVIVMGATNRPNSIDPALRRFGRFDREIDIGVPDEVGRLEVLRIHTKNMKLAEDVDLEHIAKDTHGYVGADLAALCTEAALQCIREKMDIIDLEDETIDAEILNSMAVTNDHFKTALGTSNPSALRETVVEVPNVSWEDIGGLENVKRELQETVQYPVEHPEKFEKFGMSPSKGVLFYGPPGCGKTLLAKAIANECQANFISVKGPELLTMWFGESEANVREIFDKARQSAPCVLFFDELDSIATQRGSSVGDAGGAADRVLNQLLTEMDGMNAKKTVFIIGATNRPDIIDPALLRPGRLDQLIYIPLPDDQSRLQIFKACLRKSPVAKDVDLNALAKYTQGFSGADITEICQRACKYAIRENIEKDIEMEKRRKDNPEAMEEDEVDDIAEIKAAHFEESMKYARRSVSDADIRKYQAFAQTLQQSRGFGTEFRFADQPASGAGAAADPFASAAAAADDDDLYS

SEQ ID NO: 42836 - protein, 1044 aa, Oryza sativa
MVVEGNGRADSITIGVCVMEKKVFCSPMEQILDRLRAFGEFEIIIFGDKVILEDPIEIWPKCDCLIAFYSSGFPLKKAEAYAALRRPFLVNELEPQHLLHDRRKVYEHLEKYGIPVPNYALVNREYPYQELDYFIEQEDFVEVHGKRFMKPFVEKPVNGDDHRIMIYYPNSAGGGMKELFRKVGNRSSEFHPDVRRVRREGSYIYEEFMPTGGTDVKVYTVGPGYAHAEARKSPVVDGVVMRNPDGKEVRYPVLLTPTEKQMSRDVCSAFRQMVCGFDLLRCDGRSYVCDVNGWSFVKNSYKYYDDAACILRKIFLDAKAPHLSSTIPPSLPWKSNEPVQPTEGLTRQGSGIIGTFGQSEELRSVIVVIRHGDRTPKQKVKLKVTEEKLLNLMLKYNGGKPRAETKLKSAVQLQDLLDATRQLVPPTRSGRESDSDAEDLEHIEKLRQVKAVLEEGGHFSGIYRKVQLKPLKWIRVPKRCGDGEEERPIEALMILKYGGVLTHAGRKQAEELGRFFRNNIYPGEGTGLLRLHSTYRHDLKIYSSDEGRVQMSAAAFAKGLLDLEGQLTPILVSLVSKDSSMLDGLEDASIEMDEAKARLHEIIITNAKAKNTNEPVEFPWMVDGAGLPANASQLLPKMAKLTKEVTAQVKLLAEDEDEKLALTNSFSRYDQAKAFGKTTIDVARIAAGLPCGSESFLLMFARWKKLERDLYNERKDRFDITQIPDVYDSCKYDLLHNAHLNLEGLEELFKVAQLLADGVIPNEYGINPKQKLKIGSKIARRLLGKILIDLRNTREEAISVSDPKFTEDEATFLPTKESEYQQKLQTRNEDGRRSSSTSEKSLDQEDEDDRETKYRLDPKYANVKTPDRHVRTRLYFTSESHIHSLMNVLRYCNLDECLQGEDSLVCQSALDRLHRTRELDYMSNIVLRMFENTEVPLEDEKRFRIEMTFSRGADLSPLEDKTSENTSLLQEHTLPIMGPERLQEVGSCLTLDKFEKMVRPFAMPPEDFPPAAAPQAFSGYFKGSGMLERLASLWPFHKGATNGK

SEQ ID NO: 42837 - protein, 358 aa, Oryza sativa; identical to SEQ ID NO: 28573

SEQ ID NO: 42838 - protein, 913 aa, Oryza sativa
MMSRSYTNLLDLAEGNFAALGPGGGGGGRRRSGSFGLKRMSRVMTVPGTLSELDGEDDSEHAATNSVASDVPSSVAGDRVIVVSNQLPVVARRRPDGRGWSFSWDDDSLLLQLRDGIPDEMEVFFVGSLRAEIPVADQEEVSQALLDRFRCAPVFLPDPLNERFYHRFCKRHLWPLFHYMLPFSSSASPSPSSSSSSSSSPSSSSGSGHFDRGAWEAYVLANKFFFEKVVEVINPEDDYVWVHDYHLMALPTFLRRRFNRLRIGFFLHSPFPSSEIYRTLPVREEILKALLNCDLIGFHTFDYARHFLSCCSRMLGIEYQSKRGYIGLDYFGRTVGIKIMPVGVHMGQLKTVLSLPDREWRVSELQQQFEGKTVLLGVDDMDIFKGINLKLLAFENMLRTHPKWQGRAVLVQIANPARGKGKDLEAIQAEIHESCKRINGEFGQSGYSPVVFIDRDVSSVEKIAYYTIAECVVVTAVRDGMNLTPYEYIVCRQGSDSTSEVNGPKKSMLVVSEFIGCSPSLSGAIRVNPWNIEATAEALNEAISMSEQEKHLRHEKHYRYVSTHDVAYWSKSFIQDLERACKDHFRRTCWGIGLGFGFRVVALDPHFTKLNMDSIVMAYERSESRAIFLDYDGTLVPQTSISRTPSAEVLRIINTLCSDRRNKVFLVSGRRRDKLGEWFSSCPDLGIAAEHGYFLRWTRDEEWQTCTQTSDFGWMEMAKPVMNLYTEATDGSYIDPKESALVWHHQDADPGFGSSQAKELLDHLESVLANEPVSVKSGQFIVEVKPQGVSKGVVAEKILVSMKERGKQADFVLCIGDDRSDEDMFENIADTIKKGMVATNTSLFACTVGQKPSKAKFYLDDTFEVVTMLSALADATEPEPETDLTDEFDELAVSVSSVDIDDEQTPSDKLIGG

SEQ ID NO: 42839 - protein, 249 aa, Oryza sativa
MARYDRAITVFSPDGHLFQVEYALEAVRKGNAAVGVRGTDTVVLGVEKKSTPKLQDSRSMRKIASLDTHIALACAGLKADARVLINRARVECQSHRLTVEDPVTVEYITRYIAGLQQKYTQSGGVRPFGLSTLIVGFDPYTEKPALYQTDPSGTFSAWKANATGRNSNSMREFLEKNYKDTSGKETIKLAIRALLEVVESGGKNIEIAVMTHKDGLRELEEAEIDEYVAEIEAEKAAAEAAKKGAPKET

SEQ ID NO: 42840 - protein, 771 aa, Oryza sativa
MGLPTAAAPACCFPSTSSSSPRLLLLPLQPPPPQPPRRRRRLVSPGVCFGSPLPLHARFHWPHAVASSSMRRRGRRRRATAPPAAAAAGEATGDGGGSGPGAEDKRVETDLKTLARRFWKVAAPYWWSEDKVQARLRLAAVFALTLATTGISVGFNFLGRDFYNALADKDQEQFTKQLLYYLGGFAVGIPFFVLRDYARETLSLRWRSWMTSYYMKRYFKNRTFYKIQSQSLIDNPDQRINDDLSAFTGTALAFSLTFLNAAVDLISFSNILYGIYPPLFIVLIVYSLGGTGISIFLGKNLVNLNFMQEKKEADFRYGLVRVRENAESIAFYGGEENELQLLLDRFRRAFENLSELLIASRNLEFFTNGYRYLIQILPAAVVAPMYFSGKIEFGVINQSVSAFNHILSDFSLIVFQFQSISAFSAVIDRLGEFDDLLDGNGSSLSKPDNIDGINIIFKSTGPTVLSSNGSPTQSNPSMVLEICNLTLLTPRSGNILITDLTMELKEKDHLLVMGPSGSGKTSLLRALAGLWTSGTGDIIYHVRGSMELQTSNSGPDEPSNIQSNGEELLQSSKQRRDNGIFFVPQRPYMVLGTLRQQLLYPTWTEDVCHSSNNDPQSTDPLTFEVSTSDGVGSKSEMPTTDELIRVLEAVKLGYILPRFNGLDSMHDWASALSLGEQQRLAFARLLLAKPTLVLLDESTSALDDMNERHLYSQIEAAGITYISIGHRKTLHKFHNKVLYISNSDSTDSNPRNWYLKPTEQMSIEESSSFAS

SEQ ID NO: 42841 - protein, 104 aa, Oryza sativa
MQRLAFGSARLRRRLRRLSVDLLRGPVCSIADSACKSAGHRMILTAARSSTLSTRLSFITEGHHNLEKVDKKSYVAFDYRRFPEIVCEVWKFSSLLVAIRLCSK

SEQ ID NO: 42842 - protein, 724 aa, Oryza sativa
MMAASNGEEPPSTSMATSSSPLPMVAQLMVTTDRAVSQQLKDLVNKENSTTMVAALSLSREAYEVAMALKNGEEHRQGRCSGKGDAAAMLMMMASKKEDAAKPSTASMNPLLLSLASQGRLNDYDAESGMDLDGVTTEGNTALHVVATCGDGPGYLRSAGVIYSRSQHLMLVQNNNGDTPLHCAVRAGHSKMVDHLIDLVETKDNSPSSATLEELLRKENCRKETAFHDAVCIGNKDIITNLLKYYSELAGFLMDATGTSPLYLAVLHQQVDIAKLLHQMTDGNLSYSGPNRQNALHAAVLQDQVMTKMLLNWNNGLTEQSDENGSTPLHFAASLLRRGIYNTVIPVLRANPVQLYKQDSEGLYPIHVAASSGANLTVKSFIRERPEIAGLRDSKGRTFLHVAVERERWNVVVYACHTQSLARILNMQDNDGNTALHIAVKHGNKAIFCSLLMNKEVNLNISNNKGQTALDISQSKILAGYFYGWNPNKLILRALTFCNARGGCRRVDHLQEQYIIHQKQVDEVRESDKMTNSTQTLGIASVLIVTVTFGVMFAIPGGYKADDHNNGGTPTLAGSYIFDAFIMANTIAFICSSLAIINLMYSGMPMVSLPLRRRHFNISLLLAFSSVTSLGTAFALGMYLVLAPVTRCTAIAICAMMMIASLCLYTEPLNGVRFAIALYVRRGNRVLLVIAQILLIRTLITYWPCVIIFGWAAISTKDGHTRHG

SEQ ID NO: 42843 - protein, 318 aa, Oryza sativa; identical to SEQ ID NO: 32684

SEQ ID NO: 42844 - protein, 389 aa, Oryza sativa
MASAGDRRGGGGPPGSGDDSGGGWETVEKRVKKPAQQVGKGQWGQWNSPNAAPAPTAPRSGSGAFHHSGNTLVRHSDRRPARGTPRPPPQNRSIEAELQAPHGVVTAPLANGWQWGARSCPPGTESKEGGLPLSGCDPETDNAEGYDTSDDDNDDDMSDDLSDDYDSDASEKSFETRKNHKLFKGFFEVLEALSVEQLNEPTRQWHCPACKNGPGAIDWYKGLQPLMTHAKTKGSIKVKRHRELASLLEEELSRRGTSVVPSGEQFRKWKGLRESTDREIVWPPMVVVMNTVLEQDEDDKWKGMGNQELIDYFSEYAASKARHAYGPNGHRGMSVLIFDSSAVGYMEAERLHDHFVRQRTDRNTWNSAHQGYILTWWEKAAVWFLSYKR

SEQ ID NO: 42845 - protein, 533 aa, Oryza sativa
MMAAAFPLSTAAPPSPPLVLRRSAAAAYSPSSPFELYRNHRRPARRVHCAASASAAARRRDACCALRPPAAARGGAAAAQGQAGAAPHGGAGEGSLWMVFLATAVAVCGSFEFGTCVGYSAPAQAGIVNDFGLSNSEYGVFGSVLTIGAMIGALTSGRLADSLGRKTTMGLAAIIGIVGWFTIYFANGATMLYLGRVLLGYCTGVLSYVVPVFISEIAPKDLRGGLASSNQLFICSGCSAAYIIGALLSWRSLVLVGLVPCAFLLVGLLFIPESPRWLANTGRVKEFNASLQKLRGENAHISEEAAGIREYIESLRSLPEARVQDLFQRKNLFAVIVGVGLMVFQQLGGINALGFYTSYIFSSAGFSGKLGTTLIGIFQIPLTLFGALLMDRSGRRALLLVSASGTFLGCFLTGLSFYFKAQGVYAQLVPTLALYGISVYYAAYSVGMGPVPWVIMSEIFSIEIKAIAGSLVTLVSWIGSFAISYSFNFLMDWNSAGTFFLFSAASLVTVLFVARLVPETKGKALEEIQESFT

SEQ ID NO: 42846 - protein, 300 aa, Oryza sativa
MKLVKGSKVEVLQEAEVPLGSWRGAEIVLGNGQSFYVRYDPSPVDSCAAVERVQRRLIRPCPPRDDSVCWAVGDILEAFDSYSWKIAEMVRVLGKDFYLVRLLGSSLELRTHASELRLRKHWKDGKWTVLQKDSTKCFGGSFRGQPKSGNLGSNFGKQRQPYCAMDNNLLLKNQKALEGDKSRGMKRKSSAITHPTQCSEVTRGMKRLQTPHRDGRHAALVAGVSPRLAEKGRSRRLVKHPSVGPCRWRSLPHGLLYVKCGNIPSNFCWYLVCFCYSFCFSIIFSAAFSCDWPLNFSRTL

SEQ ID NO: 42847 - protein, 157 aa, Oryza sativa
MAKLYVQAVQPADLNKNTEWFMYPGVWTTYILILFFSWLLVLSVFGCTPGMAWTFVNLAHFAMTYHFFHWKKGTPFADDQGMYNRLTWWEQMDNGKQLTRNRKFLTVVPLVLYLIALHTTDYQHPMLFLNTIAVVVLVVAKLPNMHKVRIFGINAGN

SEQ ID NO: 42848 - protein, 1006 aa, Oryza sativa
MATESAVRLIGGTGSGNWSKDFGAFDSSLGSLSGEGLGFVDNNSGVYGGWRESVPNRSGSAPPSMEGSLAALGHMIGQQSGNLEATLGGKLGNVADSSKSEEQLRADPAYCDYYGSKVNLNPRLPPPLMSRESRRFMNRVGKVKEWRVVSQDDSNKGSLFIPRSTLSTHREEPEDDRSPRLDSSSAEDAQGSGKSGSNFDSHYTCMNLGDFASESFQQKAASLYDSSTHPSNSNTGDGISDHSDINSSTNFSIDAVKTSGLNSWTPVPVTNTVRSTHSNSISSTSVPSSSSPDNNPSMQTSQQEKPSIDIKHGNDVPGSGSILTELDTVNSNMKNLRISLDSHDTIHVKQQWPDNVLQQFGPSPLVQGDPIQMIPQGTHLPHVPFVENLSHTQLKLPTGDMQQFLPPPGMTTPFYAPNSFGSPYYQNLHPASVLPTPFGTAGYALSGSALPPVMTSYAPQVSVATPVDSPITPSFSGRPSGFPSPGNLSAGAEFVQPYKMYGQQLGVTMQPSVPDPNFFQFFQHPSLLSYAGINQYNTMGPRVSVVGNPADSFDPQKVLSQPAYPSDQRLQLPRTGIYNSPAARRGGAAPNYQGMTPYVGAPMTYPTSPVFQGQTFTGVFSPGRRNDSVRFQTPSRNMTAYSGVQGQREREKFDDPKACSFLEELKSNRARRVELSDIAGHIVEYSADQHGSRFIQQKLENCTAEEKASVFSEVLPHASSLMTDVFGNYVIQKFFEHGTPEQRRDLATKLVGHVLPLSLQMYGCRVIQKALEVMELDQKIELVRELDGNIMRCVRDQNGNHVIQKCIECVPTEHIGFVVSAFRGQVASLSMHPYGCRVIQRVLEHCGGDSQGQCIIDEILESACVLAQDQYGNYVTQHVLERGRGHERTQIISKLAGQVVTMSQNKFASNVIEKCFQHGDMTERDLLIREIVKQTEGNDNLLAMMKDQYANYVVQKILETCNEQQRELLLSRVKGHLQALRKYTYGKHIVSRVEQLCGEGDTESDS

SEQ ID NO: 42849 - protein, 510 aa, Oryza sativa
MRHFELLLFLLLCSPCLFSVSDGRTVRPAKRGAPSPPIRAVNLGGWLVTEGWILPSLFDDIPNKDLLDGTQLQFKSVTQNMYLCAEQGGGTILVANRTSASGWETFKLWRIDEDTFDLRVFDNLFVTVAGDGVTVVATVASPGPGEAFQIVRNGDKTRARIRAPNGMFLQAKTSDSVTADYDGETNWGDDDPSVFVVTRVGGLQGEYQICNGYGKAKATQVLREHWRTYIVESDFKFISTSGLNAVRIPVGWWIASDPNPPAPFVGGSLQALDNAFKWAEKYNLGVIVDLHAAPGSQNPFEHSASRDGSQDWGTTDANIAQTVQVIDFLTHRYASSPSLLAVELLNEPLAPGVTLPALMRYYKDGYNAVRKYTSTAYVVMSNRLSASNTELLGFAAGFPGAVLDVHYYNLFTSSFNGLTVDQNIDYVRTNRSDELSTVTRPNGPLTFVGEWVAEWNVQGASNQDYQRFAQAQLDVYGRATFGWAYWTYKNVNNHWSMQWNIQNGIISLKS

SEQ ID NO: 42850 - protein, 372 aa, Oryza sativa
MRLSVSVAAVLVVLAALRPPRVAVAQKYAAIFNFGDSLVDAGNLVVDGIPDYLATARLPYGMTYFGYPTGRCSDGRLVVDFIAQEVGLPLLPPSKAKNATFHRGANFAITGATSLDTPYFQGRGLGHTVWNSGSLHTQIKWFQDMKASICKSPQECRDLFRRSLFIVGEFGGNDYNSPLFAFRPLEEVHTFVPDVVDSIGKGIEKLIEEGAVELVVPGVLPIGCFPVYLSIFRKQPEMYGRRSGCIRDLNTLSWVHNAALQRKIAELRLKHPGVRIMYADYYTPAIQFVLHAEKYGFLRQTPRACCGAPGVGEYNFNLTSKCGDPGSYACDDPSNHWSWDGIHLTEASYGHIAKGWLYGPFADPPILETRHH

SEQ ID NO: 42851 - protein, 562 aa, Oryza sativa
MPERSVATVSAADNLLDKMSRTCGAGQRGRPLEAPPRDGGGKSASAAIVALAHAGRHAEVVELFCRMRRGGVPVSRFVLPSVLAACAGLRDIGMLRAVHALVIKCGLCRHVIVGTALVDGYTDFGLVDDARKAFDEITDANIVSWSVLIGGYARSSRWEETLDAFSAMRRAGVLPNDSVLVMAIQACGALGRLVHGKQLHGLAVVLGFDRNATVWNCLMDMYGKCGDIDSCKMVFETMIGRDQVSWNTLISSYARVGLCEEALDMIVQMQESGYIVDRFTLGSGVTACARLADIDSGRAFHGYLVRRLLDTDVIQGSALVDMYGKCHNMELAHIVFDRMDERNYVSWDALLSGYVENEQVDLALEIFRQMGCANIKYNQHNFANLLKLCGSQRYKEYGRQIHGHAIKTINKMNVVLETELIDMYAKCGCIGVARLLFLRMNERNLISWNALLSGYAADGQPVATINIYRQMELACIRPDKYTLAGLLSLCRYQGLLHYGRQIHAHLIKMGSEMNVVMQTILVHMYIKCMRQQDAENVCIMIEERNSYVLDAFSKVYGDDYLI

SEQ ID NO: 42852 - protein, 60 aa, Oryza sativa
MIAIRITSHFPYTRTTFNFIVDKERAILYYNSKSLCKSLHACSNTYSWHFEYHFCPTCNN

SEQ ID NO: 42853 - protein, 384 aa, Oryza sativa
MAAPEAPSCYVGIARQSAAFRLMKQMGWEEGEGLGKDKQGIKGHVRVKNKQDTLGVGVDSPHNKWVYDTTQFDNILKKLKVQSATPAIKEFEDDVSNSPDSTPKEAKPTNNEVTKVTRPQGRYKKRERGKSVSGYSAKDLEGILVRKSDDNCKVDQEVEPTCCDEPDPIICQDTVSQADDVNWWGHKFGFKSGGFLGAKSRKNKSSATKGTSNVRQTFGEEDQENLYNLVQDKATSGKQGLGIKGLPIKVAGHRWKGNKTSFGDSDEENSTQSNELSELEEDGDEEESANDNELIDANVNTVKEMCVDVKQKHKTKVKKLCKTILRQAPAQSMKLKELKVAVEAHSESMFSNFSCRREALLFLKRKLQGSRKFNIDGKRVQLVS

SEQ ID NO: 42854 - protein, 782 aa, Oryza sativa
MGSSGCSEIVELVDESKDARPGGVTHLRVRVKPVGQEHGARSCSVEDDLDRLIRSINVRTSARASGQTSTDRRLIALGKSPISSSEIVESVSLKQALRKMCISQASEMAAMKRMPKPTAVSNTPEAGAIKKLYTSVVVQTNKERDEKNKFGKVSVLPEKDVISSSVKSTEAKNKVRNKSPAKKNVRSASPTTTKVQKTRIQDVISNKSSEASEDLPAGPAVAKQRKGKMKTSSPRAVPVGGSRLVFRSKTSTKKKVKPEPAAAVVSHKTCEAKSSNSQANKKHEALQDEPRTPTPINKKAAASSISTDGANCGTKGCGVGEIHGSKPSELSRSKEKGECSQSSKSSMGDYSTSTSISDDSYGSFSGNGCRPHMSKDVRWGAIRRMAIQQGSLGLKNFKLLKQLGCGDIGTVYLAELVGSECMFALKVMDIEYLISRKKMLRAQTEREILQMLDHPFLPTLYSFFTTDNLSCLVMEYCPGGDLHVLRQKQPTRTFSEAAARFYVAEVLLALEYLHMLGVIYRDLKPENILVREDGHIMLSDFDLSLRCSVNPMLVRASSVGRDEPSRPSGPCAESCIDPLCIQPSWANSSCFTPRLVSSTPSRPRRPRGEPQKKPSLPQLVVEPTDARSNSFVGTHEYLAPEIIRGDGHGSSVDWWTLGIFLYELLYGRTPFRGPGNEETLTNVVSQGLKFPDNPAVSFHARDLIRGLLVKDPEYRLGSTKGAAEIKRHPFFEGLNWALIRWTAPPETPKSFDAASLTTARKKKEGKCLEFRLNGDDIEFELF

SEQ ID NO: 42855 - protein, 334 aa, Oryza sativa
MAGAQESLVLAGVMHGHNDVVTAIATPIDNSPFIVSSSRDKSLLVWDLTNPVQNVGEGAGASEYGVPFRRLTGHSHLVQDVVLSSDGQFALSGSWDGELRLWDLSTGVTTRRFVGHDKDVLSVAFSVDNRQIVSASRDRTIKLWNTLGECKYTIGGDLGGGEGHNGWVSCVRFSPNTFQPTIVSGSWDRTVKVWNLTNCKLRCNLEGHGGYVNAVAVSPDGSLCASGGKDGVTLLWDLAEGKRLYSLDAGSIIHSLCFSPNRYWLCAATQDSIKIWGLESKHIVQDLKPEIPVSKNQMLYCTSLNWSADGSTLYAGYTDGTIRIYKISGFSYAG

SEQ ID NO: 42856 - protein, 264 aa, Oryza sativa
MDGHSCGDLGRVSEVISDGTSSGSADGGKTLPEKHSALADATSGVAAENADNLSQAGKYMDFSSTTSLGVKKGFQKCMTFPPSSGEAQQQQGSCCDADKNPKDVPTYERSVSLPPTLKIISAMKGSRQKNGMASSTESRHVKWAPDVYDPPVTSVCHSVNNSYQRRSKSRKKDKNKQKQKQKQKGRSKKNHQNAIQSSAVLQAPGEFDRLKDAETTSSNSAPDDLNKHETDILDYGISSQDAKCGSSFLRESAAKMHFSTAEAS

SEQ ID NO: 42857 - protein, 369 aa, Oryza sativa
MGEITNVMEYQAIAKQKLPKMIYDYYASGAEDEWTLKENREAFSRILFRPRILIDVSKIDMSATVLGFKISMPIMIAPSAMQKMAHPDGEYATARAASAAGTIMTLSSWATSSVEEVASTGPGIRFFQLYVYKDRNVVEQLVRRAERAGFKAIALTVDTPRLGRREADIKNRFVLPPYLTLKNFEGLDLAEMDKSNDSGLASYVAGQIDRTLSWKDVKWLQSITSLPILVKGVITAEDARLAVHSGAAGIIVSNHGARQLDYVPATISALEEVVTAAAGRIPVYLDGGVRRGTDVFKALALGAAGVFIGRPVVFALAAEGEAGVRNVLRMMREEFELTMALSGCTSLADITRAHIYTDADRLARPFPRL

SEQ ID NO: 42858 - protein, 394 aa, Oryza sativa
MASWSSPVAAAALQVHFGSSCFFSARSPRQTLLLPPLARNPTLTIQPRPHPFRNINSSSSSSWMCHAVAAEVEGLNIADDVTQLIGKTPMVYLNNIVKGCVANVAAKLEIMEPCCSVKDRIGYSMISDAEEKGLITPGKSVLVEPTSGNTGIGLAFIAASRGYKLILTMPASMSMERRVLLKAFGAELVLTDAAKGMKGAVDKATEILNKTPDAYMLQQFDNPANPKVHYETTGPEIWEDSKGKVDVFIGGIGTGGTISGAGRFLKEKNPGIKVIGIEPSESNILSGGKPGPHKIQGIGAGFVPRNLDSEVLDEVIEISSDEAVETAKQLALQEGLLVGISSGAAAAAAIKVAKRPENAGKLVVVVFPSFGERYLSSILFQSIREECEKLQPEP

SEQ ID NO: 42859 - protein, 365 aa, Oryza sativa
MGVVSFSSTSSGASTATTESGGAVRMSPEPVVAVAAAAQQLPVVKGVDSADEVVTSRPAAAAAQQSSRYKGVVPQPNGRWGAQIYERHARVWLGTFPDEEAAARAYDVAALRYRGRDAATNFPGAAASAAELAFLAAHSKAEIVDMLRKHTYADELRQGLRRGRGMGARAQPTPSWAREPLFEKAVTPSDVGKLNRLVVPKQHAEKHFPLRRAASSDSASAAATGKGVLLNFEDGEGKVWRFRYSYWNSSQSYVLTKGWSRFVREKGLRAGDTIVFSRSAYGPDKLLFIDCKKNNAAAATTTCAGDERPTTSGAEPRVVRLFGVDIAGGDCRKRERAVEMGQEVFLLKRQCVVHQRTPALGALLL

SEQ ID NO: 42860 - protein, 127 aa, Oryza sativa
MKLSFCILSICIAILPSMMPLLQLVCSTMSMLAFLNHPSNEFKSTKFAVMLCCFLLLRSSFCSPLCSLREGYCVVIFCSFLAMLPCLSANFHQLTFCDLILLFVLYSVEEEAHEEAEEEAPKDEAEI

SEQ ID NO: 42861 - protein, 363 aa, Oryza sativa
MAAARATLPLPRVPAPSPRPQLRPFPSLPARRGAVACGAGSAAAGVAASLRFGDVIEAQQFDRDALTEIFEVAREMEALERGSSSRGAGRSRVLEGYLMATLFYEPSTRTRLSFEAAMRRLGGEVLTTENAREFSSAAKGETLEDTIRTVEGYSDIIVLRHFESGAARRAAATADIPVINAGDGPGQHPTQALLDVYSIEREIGTLDGIKLGLVGDLANGRTVRSLAYLIAKYQNIKIYFVSPDVVKMKDDIKEYLTSQGVEWEESSDLLEVASKCDVIYQTRIQKERFGERIDLYEAARGKYIVDKKVLDVLPKHAVIMHPLPRLDEITIDVDSDPRAAYFRQAKNGLYIRMALLKLLLVGR

SEQ ID NO: 42862 - protein, 529 aa, Oryza sativa
MPKTKRGGDDLARSLHKNRKTCNGGRTDSLASGCLHGDPNEDVWTELNDVVKSNLSKSVASLSLRNGDTVLFACTGVAVDRQGRLTKFLTSASLVELLVRALNDTNKNHGDLELEVYHEGNEVCQGYLTDFDLDHNLAIVEIWTDFDVHVGLLQHAVEFLPHCKVIAIGREITGKLMARRVQLMDDLSVSEDSEDLDCKIKEAWEGAPLFSFDGNFVGMNLFLAMGRAFFLPWGTIQKHWASLQNKTGLPESNSLKVYRFGTSSTAEKSNSHPEVNNDILDPEQIHIDSMGYPKFPTHMFADGMILVNTFEETFGDLRGEGVWSKLSKKSCSNIDRSVVALASFSGERRFFACTGFFVEWNGSTVILTSASLVRSSGDENKIVDNLRIEVLLPNKQRVEGMLQHCNLHYNVALVSVGYRALRPAHGQLDWWGKSSKVVAVGRCFKSGALMAASGTVTPWTGTLDCDFLERSSCKITKAGIGGPVVTLDGDCIGMNFYDTRIGTPFLSWEVIVDIVASFEEKRWPVPMPY

SEQ ID NO: 42863 - protein, 212 aa, Oryza sativa
MASTPPPPPVIGKAGNLTVFITPPSPAEAEAEGSPDSPRSEFTTTSGSPRAAEDSTPPPSPPRAEQPPVKEEAPAASPQLATPPPVKTVSPPLPAAKLSSAAAPRPPPPVQVPLPSAKLSAPRPPPTPPPVQVPPPQFEKAEARPDGSMLALFWDTVARVQEAHASLDEYISNWFGLDQSKYQWALNEYYESNGKDMESGKAAKPKELGSKM

SEQ ID NO: 42864 - protein, 163 aa, Oryza sativa; identical to SEQ ID NO: 33222

SEQ ID NO: 42865 - protein, 448 aa, Oryza sativa; identical to SEQ ID NO: 33518

SEQ ID NO: 42866 - protein, 446 aa, Oryza sativa
MKQVSCSVVNKCLAYNPCLSRNYYQRSHTVKLQRSQAGQIILPRKLRKSTLWQTNFTQRQIATHCSSDLSTSCREELPSYLTVNVLKDQSCARQGIFRKVIVILNPNSGFRSSREVFYQKVQPTLELSGFMMQVVETAYAGHAHALASTVDLSTCPDGIICVGGDGIVNEVLNGLLGRDDLEEAIQLPIGIIPAGSENSLVWTVLGIRDPVSAATTLAKGGITPIDVFSVKRTQAGITHFGLTASYYGFVADVLQLSEKFRLHFGPFRYVIAGVLKFLSLPQYRFEVNYLPLSPRRNHKLLPVTEKCNDHLAADSSAEDNWVTRKGEFLGIFVCNHFCKPAQGLLSPVIAPKAQHNDGSLDLILVHGSGRLRLFCFFIAYQFCWHLLLPYVEYVKVKHVKVRPIGKTHNGCGVDGELILGEGQTEWQCSLLPAQGRLLGRHRSASE

SEQ ID NO: 42867 - protein, 319 aa, Oryza sativa; identical to SEQ ID NO: 30615

SEQ ID NO: 42868 - protein, 480 aa, Oryza sativa
MVKICCIGAGYVGGPTMAVIALKCPAIEVVVVDISKPRIDAWNSEQLPIYEPGLDEVVKECRGRNLFFSTDVEKHVAEADIIFVSVNTPTKTRGLGAGKAADLTYWESAARMISDVSKSDKIVVEKSTVPVKTAEAIEKILTHNSKGINYQILSNPEFLAEGTAIDDLFKPDRVLIGGRETAEGRKAVQALKSVYAHWVPEDRIITTNLWSAELSKLAANAFLAQRISSVNAISALCEATGANVTEVAYAVGKDSRIGPKFLNASVGFGGSCFQKDILNLVYICECNGLPEVANYWKQVIKINDYQKSRFVNRVVSSMFNTVSGKKIAVLGFAFKKDTGDTRETPAIDVCHGLLGDKAQISIYDPQVTEDQIQRDLAMGKFDWDHPMHLQPTSPTAFKQVSVVWDAYEATKNAHGLCILTEWDEFKTLDYQKIYDNMQKPAFVFDGRNVVDPEKLREIGFIVYSIGKPLDAWLKDMPAVA

SEQ ID NO: 42869 - protein, 265 aa, Oryza sativa; identical to SEQ ID NO: 30789

SEQ ID NO: 42870 - protein, 351 aa, Oryza sativa
MATEDTSHISGSSESTIPLLEQLAEVFGKLKSHTETSLQLQNGINWEDIKAHFLNLEKSYKSKCDELAEKQKALEEKKAESCRLIAEKEANVSAKERAFLNQFQELRDTAVSALSEVRQKYKVELAGILDANGSKDKKVRTSTNDMNALCASEENTTASGLGEPSEASPVDVKPRPVLKQLCEQMDTAGLLKFLSENWKKLSSLRDELSAALRCATDPARFVLGSLEGFFPSDHTSSPGNKQIILQGQRRSCIILMEAITPALATKEPGDNHPWSSEIRELAKAIAEEWKSKLAEVDLDASDGYSLEAQAFLQLLTTFNVDSVLDEDELCKLVVAVSRRKQTAELLSLPLS

SEQ ID NO: 42871 - protein, 370 aa, Oryza sativa
MKTATATAAEVAATRRLDPAPRAAPAPPADLAVFEQFERLERKVELRNGAIEAGPPQKSLLPSFESAEMRNLAETLLRDIIRGSPDVKWESIKGLENAKRLLKEAVVMPIKYPKYFKGLLSPWKGILLFGPPGTGKTMLAKAVATECKTTFFNISASSIVSKWRGDSEKLVKVLFELARHHAPSTIFLDEIDAIISQRGEARSEHEASRRLKTELLIQMDGLTKTDDLVFVLAATNLPWELDAAMLRRLEKRILVPLPEQEARHAMFEELLPSVPGTMNIPYDVLVEKTEGYSGSDIRLVCKEAAMQPLRRLMSVLEGRQEEVPEDELPEVGPVTTEDIELALRNTRPSAHLHVHRYEKFNQDYGSHVLS

SEQ ID NO: 42872 - protein, 478 aa, Oryza sativa
MGNNFLTGNIPVTFGDLKSLGVLNLSHNSLSGTIPTTLNDLPVMSKLDLSYNRLQGKIPMTGIFANPTVVSVQGNIGLCGGVMDLRMPPCQVVSQRRKTQYYLIRVLIPIFGFMSLILVVYFLLLEKMKPREKYISSQSFGENFLKVSYNDLAQATRNFSEANLIGKGSYGTVYRGKLKECKLEVPVKVFDLEMRGAERSFISECEALRSIQHRNLLPIITACSTVDSTGNVFKALVYEYMPNGNLDTWIHDKEGGKAPGRLGLRQTISICVNIADALDYLHHECGRTTIHCDLKPSNILLADDMNALLGDFGIARFYIDSWSTSTGSNSTVGVKGTIGYIPPEYAGGGHPSTSGDVYSFGIVILELITGKRPTDPMFKDGLDIISFVESNFPHQIFQVIDARLAEKSMDSNQTNMTLENAVHQCLISLLQLALSCTRKLPSDRMNMKQIANKMHSIKTTYVGLEAKKYGPACNEQDA

SEQ ID NO: 42873 - protein, 686 aa, Oryza sativa
MAPPCSISSASHLLITASLPKPSLRPPRLPHPKPLPAALLALAAAAPTLPALADVPAPPPSPTQDVQVLEAPSPAANPFSNALLTAPKPTSSAAADLPEGAQWRYSEFLSAVKKGKVERVRFSKDGGLLQLTAIDGRRATVVVPNDPDLIDILATNGVDISVAEGDAAGPGGFLAFVGNLLFPFLAFAGLFFLFRRAQGGPGAGPGGLGGPMDFGRSKSKFQEVPETGVTFVDVAGADQAKLELQEVVDFLKNPDKYTALGAKIPKGCLLVGPPGTGKTLLARAVAGEAGVPFFSCAASEFVELFVGVGASRVRDLFEKAKAKAPCIVFIDEIDAVGRQRGAGLGGGNDEREQTINQLLTEMDGFAGNSGVIVLAATNRPDVLDAALLRPGRFDRQVTVDRPDVAGRVKILEVHSRGKALAKDVDFEKIARRTPGFTGADLQNLMNEAAILAARRDLKEISKDEISDALERIIAGPEKKNAVVSEEKRRLVAYHEAGHALVGALMPEYDPVAKISIIPRGQAGGLTFFAPSEERLESGLYSRSYLENQMAVALGGRVAEEVIFGQENVTTGASNDFMQVSRVARQMVERFGFSKKIGQVAIGGPGGNPFLGQQMSSQKDYSMATADVVDAEVRELVEKAYSRATQIITTHIDILHKLAQLLMEKETVDGEEFMSLFIDGQAELFVA

SEQ ID NO: 42874 - protein, 718 aa, Oryza sativa
MSVPAIAVYTSPPGAVYTSSSSSELEASSRGSAPCATAAPPSPASSHRHQAIAGGLSCLFSSPTAAPRAAAAQDELGALWHDRSGEATAVGGGGGGGGYSYPQPSSPFKWRDMLHHSPVPLFHSPASSPASRSPSASWLAGRERERLFSSFVRNALGSCVDYAPVAALPLGVSAAVGVGAGELAFELDEHLSEAEPSCEPYARDLLAGAQARHRIFHDELVVKAFFEAERAHRGQTRASGDPYLQHCVETAVLLAKIGANATVVSAGLLHDTIDDSFMDYDQIFRMFGAGVADLVEGVSKLSHLSKLARDNNTASRTVEADRLHTMFLAMADARAVLIKLADRLHNMKTIEALPLVKQQRFAKETMEIFVPLANRLGIASWKDQLENICFKHLNPEEHKELSSKLVISFDEALLTSTLDKLDKGLRDEGISYHSLSGRHKSLYSIYSKMIKKNLTMDDVHDIHGLRLVVDTEQDCYQALDIVHKLWPRVAGRFKDYILHPKLNGYRSLHTVIMCEGIHPFEVQIRTKEMHLQAEYGFAAHWRYKEGGCKHSFVLQMVEWARWVLTWQCEAMSKERSSGLGRSDAIRPPCPFPSHSEDCPYSYTRQCNHDGPIFVIMLEHDKMSVQELPANSTVVDLMERVGANSPRCSPYSFPLKEELRPRVNHKPISDPNRKLCMGDVVELTPALPHKSLTEYREEIQRMYERGGFALATTRDGPAS

SEQ ID NO: 42875 - protein, 218 aa, Oryza sativa
MATAAVLGSHDALDNRMHLGAFAVSPASKPRRRRHSKAASPPPKVAAVSSPPVVKSAARVASPPPKAAAAAAVPQGRRSPVARKQGSPTKELPKQRLVMGEIRILKRGEEPPVSPPSPAPVAAQAAAVDQRAPRVPAVAQAAPTDQKAPRPARSKQQQHTAAVPTKIKSVADAPVYAGPAFSSASPEPSSLPFPAFIRRAEAEATRGLRCLLRIGELP

SEQ ID NO: 42876 - protein, 70 aa, Oryza sativa
MIRGYEHGYVLKITSVGDVADISILENGIKCGHPVLLIAGNIDQDTVSIQSLWPIRLEVYRSMETARKPG

SEQ ID NO: 42877 - protein, 397 aa, Oryza sativa
MALLEAQCVPTEDTYALLLRAYCNAGSLHRAEGVISEMREHGIPPNATVYNAYLDGLLKARCTEKAVEVYQRMKRERCRANTETFTLMINVYGKAKQPMSSMKVFNEMKSIGCKPNICTYTALVNAFAREGLCEKAEEVFEEMQQAGHEPDVYAYNALMEAYSRAGLPQGASEIFSLMQHMGCEPDRASYNILVDAYGRAGLHEDAEAVFEELKQRGMSPTMKSHMLLLAAHARSGNATRCEEVMAQLHKSGLTPDTFALNAMLNAYARAGRLDDMERLFAAMERRGDADVGTYNVAVNAYGRAGYVGRMEAAFAAVAARGLAADVVTWTARMGAYARRKEYGRCVGMVEEMVDAGCYPDAGTARVLLAACSDERQVEQVTAIVRSMHKKPKTLFTI

SEQ ID NO: 42878 - protein, 764 aa, Oryza sativa
MFLQLADYHLRMDSRSPKIPRRSPDSKDKDSDRNKERDAKNDWDSSRAYGSETDCKEEMCDSNKRKGLTMGEIVVDNSRSVDSCHETELHVLRDDRQDKSVEIKDILHDGVAKSDYAQRQIDLDSERRNGTGDNSRVDVLRDDKLDSGRDRNWSDRTREPEGSKDYVRNRQWQDSKEANDSEWKNAHERLDGGSFHGRAGYRRDSRGRSESIRGSSTYGGRYDSSDSIEIRPNNNLDFGREGSVSGRRYDVGAHRDATPGTNGDKSANPEADQSGSTSTISQFPQHGPKGDRSSRGRGRPNSRDSQRVGGTLPIMPPPFGPLGLPPGPMQHIGPNIPHSPGPLLPGVFVPPFPGPLVWPGARGVDVNMLSVPPNLPIPPVAAEHRFAPSMGAGPGHNIHLNQIGSGIGAPTNVSGLSFHQLGTQSREMAHDKPPAGGGWTPHRNSGPTRKAPSRGEQNDYSQNFVDTGMRPQNFIRELDLTSVAEDYPKLRELIQRKDEIVANSASPPMYYKCDLRQHVLSPEFFGTKFDVILVDPPWEEYVHRAPGITDHIEYWNAEEIMNLKIEAIADTPSFVFLWVGDGVGLEQGRQCLKKWGFRRCEDVCWVKTNKKNATPSLRHDSHTILQHSKEHCLMGIKGTVRRSTDGHVIHANIDTDIIIAEEPTDGSTKKPEDMYRIIEHFALGKRRLELFGEDHNIRPGWLTLGKGLSYSNFNKEAYIKNFADKDGKVWQGGGGRNPPPEAPHLVVTTPEIEGLRPKSPPQKN

SEQ ID NO: 42879 - protein, 522 aa, Oryza sativa
MDSGLGRSSETSLKALPSMASNATRNTDPDQQGVRFSSMDQPPCFARPGQSFPAFPPLFGVQSSSLYLPDDIEAKIGNQFESNPSPNNPTMDWDPQAMLSNLSFLEQKIKQVKDIVQSMSNRESQVAGGSSEAQAKQQLVTADLTCIIIQLISTAGSLLPSMKNPISSNPALRHLSNTLCAPMILGTNCNLRPSANDEATIPDISKTHDYEELMNSLNTTQAESDEMMNCQNPCGGEGSEPIPMEDHDVKESDDGGERENLPPGSYVVLQLEKEEILAPHTHFCLICGKGFKRDANLRMHMRGHGDEYKTAAALAKPSKDSSLESAPVTRYSCPYVGCKRNKEHKKFQPLKTILCVKNHYKRSHCDKSYTCSRCNTKKFSVIADLKTHEKHCGRDKWLCSCGTTFSRKDKLFGHVAFFQGHTPALPMDDIKVTGASEQPQGSEAMNTMVGSAGYNFPGSSSDDIPNLDMKMADDPRYFSPLSFDPCFGGLDDFTRPGFDISENPFSFLPSGSCSFGQQNGDS

SEQ ID NO: 42880 - protein, 660 aa, Oryza sativa
MPSSVLSSDSMHIGLLAAAAHAAATNSRFTIFYNPRASPSEFVIPLAKYVKAVYHTRVSVGMRFRMLFETEESSVRRYMGTITSISDLDSVRWPNSHWRSVKVGWDESTTGDKQPRVSLWEIEPLTTFPMYPSAFPLRLKRPWASGLPMHGMFNGGGNDDFARYSSLMWLRDGNRGTQSLNFQGHGVSPWLQPRIDSPLLGLKPDTYQQMAAAALEEIRYGDPSKQHPATLQYQQTHNLNSGLNSLFASHVLGQVQFQPQQSPLQVVQQGHCQNTGDSGFLQGQLPRLQLHNTQQLLKEQELQQQQRQHVLQEQSSQEMQQQLPSSDHHVADVASESGSAPQAQSSLLSGSSFYNQNLLEGNSDPPLHLHNNFHNFSNQEASNLLILPRSSQLMASDGWPSKRLTLESAVHPEAPSMHPKIEKVNHQGISHFPGAFPPQSARGCSIVQDCRADAENRLLSSSFELQDGMTSIITDANRETDTMAIPLLRYSGADLTTENTLATSNCLGESGTFNPLNNISVNPSQGATFVKVYKSGSLGRSLDISRFSSYCELRSELERLFGLEGQLEDPVRSGWQLVFVDRENDILLVGDDPWQEFANSVWCIKILSPQEVQQLVRGGDGLLSSPGARMQQSNACDDYSASHNMQNIAGNIASVAPLDY

SEQ ID NO: 42881 - protein, 667 aa, Oryza sativa
MKDFMKLYHQREIQLLVLLSFTLQMFLFFTGSLRRRNTNVFLRVSIWTAYLGADFTAVYALGYLSRHDDIQRQMSGGTQPLAFFWASFLLIHLGGQDSITAFSMADNNLWLRHLLNLVVQVVLAAYVFWKSPARHSAELLVSGVLVFIAGVTKYGERTLSLKYGRFKSLESSTGDHYKKRFPELNDSDHGYSKVVLDALCSMLNVHNVFAARNPFVNGPESNSPVVIARDTVQGTKKMLKVVELELAIMYDDLYTKALVLRTRIGMILRCTSHACSLLAFALFLTCDKRRYNGVDVAITYSLFIGGFFLDLSAVFIFIMSPWTWAWLKAQKCDRLASLSWFLFSSDIGWPEKRPRWSNSIGQYKLLNWVSGGDQPRSYNQKVVALVRRLSGLVGVGKEDLFWLSKTLDTEHVEADEKTMEFVVKGISSLSDEVSEQQQWQHLGPLLKKIRVCFVADMGCAIVVMHIFTQVYLNAVEAAAAGDEGGGDADDMVEVCRKLSNYMMYLFVNHPSMLPLNASSEATVVEFAKSREELSRTQQGSKMTLDELYNIIQQNKDGVSRQGTMEEMYKMILEEDVQPSWGAVEEMAAMWLRFLIFAAGRSNGKVHAAELASGGELITFAWLLMAREGLGESERRRVRLTSTISSISSADSAGAAADLKEAYAFFFN

SEQ ID NO: 42882 - protein, 219 aa, Oryza sativa
MATTTTRSNSSSRHRGVHVELQHGVQLGLHLGRPPQHVPGRSPEHPAAADHRQLPDLLGGVVAAGDEDGAPVVWPVGEYHRDVDDEHRPRHGRQHVRPLRPPNLPGRQAWALRHHVVDDHRVPEVVPRRHGRVRRPRPLHHHHRRLPRPAHDVVHVHPQPHRLPTRLAQRRHGGRDGEDESHGGDKLPTVLWNTGATHLIFMFGSLARRKMEMQLYFYS

SEQ ID NO: 42883 - protein, 248 aa, Oryza sativa
MEATALTLSSRPAAASRSPAKGTFASLHPRRRFSAHAVHLRAAQSASLRAPSPGARRRRRRGSGLVVRAEMFGQLTTGLESAWNKLRGVDVLTKENIVEPMRDIRRALLEADVSLPVVRRFVSSISEKALGSDLIRGVRPEQQLVKIVHDELVKLMGGEVSDLVFAKSGPTVILLAGLQGVGKTTVCAKLAFYLKKLILMPELGDRERVVCWSLQMFTGLQPLINSLYLVNRSVYQFTQKEQKPNLHK

SEQ ID NO: 42884 - protein, 968 aa, Oryza sativa
MAAAAGKAAMERHQSIDAQLRLLAPGKVSEDDKLVEYDALLVDRFLDILQDLHGPHLREFVQECYELSAEYENDRDEARLDELGRKLTSLPPGDSIVVSSSFSHMLNLANLAEEVQIAHRRRIKLKRGDFADEASAPTESDIEETLKRLVTQLGKSREEVFDALKNQTVDLVFTAHPTQSVRRSLLQKHGRIRNCLRQLYAKDITADDKQELDEALQREIQAAFRTDEIRRTPPTPQDEMRAGMSYFHETIWKGVPKFLRRIDTALKNIGINERLPYNAPLIQFSSWMGGDRDGNPRVTPEVTRDVCLLARMMAANLYFSQIEDLMFELSMWRCSDELRIRADDLHCSSRKAAKHYIEFWKQIPPNEPYRVILGGVRDKLYYTRERTRHLLTTGVSEIPEEATFTNVEEFLEPLELCYRSLCACGDKPIADGSLLDFLRQVSTFGLALVKLDIRQESDRHTDVLDAITTYLGIGSYAEWSEEKRQDWLLSELRGKRPLFGPDLPQTEEIADVLGTFHVLAELPADCFGAYIISMATAPSDVLAVELLQRECHIKQPLRVVPLFEKLADLEAAPAAVARLFSIDWYMNRINGKQEVMIGYSDSGKDAGRLSAAWQMYKAQEELVKVAKHYGVKLTMFHGRGGTVGRGGGPSHLAILSQPPDTIHGSLRVTVQGEVIEHSFGEEHLCFRTLQRFTAATLEHGMHPPISPKPEWRALMDEMAVVATKEYRSIVFKEPRFVEYFRSATPETEYGRMNIGSRPSKRKPSGGIESLRAIPWIFAWTQTRFHLPVWLGFGGAFKHIMQKDIRNIHTLKEMYNEWPFFRVTLDLLEMVFAKGDPGIAALYDKLLVAGDLQSFGEQLRNNFEETKQLLLQVAGHKDILEGDPYLKQRLRLRESYITTLNVCQAYTLKRIRDPSFEVMSQPALSKEFVDSNQPAELVQLNAASEYAPGLEDTLILTMKGIAAGMQNTG

SEQ ID NO: 42885 - protein, 311 aa, Oryza sativa
MGEMNQPPPPPVAVPPPMVMQPIMHPPVGTGAVFPPHEQFHHLAYCVHSNPSWVQVAALAFLHYLVMLGSTVMLASTIVPAMGGTPGDKARVIQSFLFMSGINTLLQTLVGTRLPTVMNASFAFVVPVLSIAKDFEQNNYASSHQRFTHTMRATQGALIVASILNMILGFSTIWGAFARKFSPVIMTPVVCVVGLGLFALGFPQVGKCVEIGLPMLILAVVVQQYVPYYFHHYHERITFLLRGIRCFFVLGLCGPLQLSLLLLVHTTMFHSRPSSTAALTSPISYHRHHGSKSHTPSNGVHQSSLQVIHLE

SEQ ID NO: 42886 - protein, 546 aa, Oryza sativa
MQLPAMSCSPSQSSAAAAAAAYGCCQRILLASTSLPATGRPARLGLKLRSTHSLQIRNRRFVCQAMTETEPDGDGNGDEEKEELGDDASSPSVDSVTQENGSAESETNADNTKDETVNTEPLSSSDTVQNIDGDATPASDAQENVEVVDVAVGSPLPGMKQQLDESVRIPKATIDILKDQVFGFDTFFVTSQEPYEGGILFKGNLRGQPAKSYEKITNRLQNKFGDQYKLFLLINPEDDKPVAVVVPRQTLQPEATAVPEWFAAASFGVVTIFTLLLRNVPLLQDNLLSTFDNLELLKDGVYGALVTAAIIGVHEIAHILAARDTGIKLAVPYFVPSWQIGSFGAITRIVNIVRNREDLLKVAAAGPLAGFSLGFVLLLLGFILPPSDGLGLVIDPAVFHESFLVGGLAKLILGDALKEGTKLSINPLVLWAWAGLLINAINSIPAGELDGGRIAFAMWGRKISSRISSLAIGLLGISALFNDVAFYWVVLIFFLQRGPISPLSEEITEPENNYISIGVAILLFGLLVCLPYPFPFDPSQLTDFDL

SEQ ID NO: 42887 - protein, 530 aa, Oryza sativa
MAEVAAGTGQLIGVAVATLLAAIFLAAALLGSRRRRRRAPLAGKPAAVGGCGVADGEGCGGDGRTDVIVVGAGVAGSALAYTLGKDGRRVHVIERDLTEPDRIVGELLQPGGYLKLIELGLEDCVQEIDAQRVLGYALFKDGKDTKLSYPLEKFHSDVAGRSFHNGRFIQRMRQKAASLPNVQLEQGTVTSLVEEDGTVKGVKYKTKSGGELKAYAPLTIVCDGCFSNLRRALCSPKVDVPSCFVGLVLENCQLPHANHGHVVLANPSPILFYPISSTEVRCLVDVPGQKVPSIANGEMAKYLKTVVAPQIPPEIYDSFIAAIDKGSIRTMPNRSMPAAPHPTPGALLMGDAFNMRHPLTGGGMTVALSDIVVLRNLLKPLRNLHDASALCKYLESFYTLRKPVASTINTLAGALYKVFSASPDQARNEMRQACFDYLSLGGVFSNGPIALLSGLNPRPLSLVAHFFAVAIYGVGRLMLPLPSPKRMWIGVRLISSACGIIFPIIKAEGVRHMFFPATVPAYYRAPRPME

SEQ ID NO: 42888 - protein, 210 aa, Oryza sativa
MATTSLSLHGVPSPTATKLSSSFLGAPASFLRPTPPPLAAPSRRALAVRAMAPPKPGGKPKKVVGLIKLALEAGKATPAPPVGPALGAKGVNIMSFCKEYNAKTAEKAGYIIPVEITVFDDKSFTFILKTPPASVLLLKAAGIEKGSKEPQREKVGKVTADQVRTIAQEKLPDLNCKSIDSAMRIIAGTAANMGIEVDPPILEKKEKVLL

SEQ ID NO: 42889 - protein, 257 aa, Oryza sativa
MADELDELLGFLSSPQPNVRGAAAGIVRGLTGDADGLRALSARADRALPALLRLLASAGGELGTGGAAADSLVNLSQDGALSARLVSLGAVVAAMDVVAKRGGEQPGLARSLVMLLANLTQVDSGVAALLQVGDEKMQGLYVAKLVRSFCRSSSESEEEDIFEHVASILVNISKVEAGRRILMEPKRGLLKQIIRQSDSTNQLRKKGVVSTIRNCCFEADTQIQNLLSLAEYIWPALLLPVAGKKIYSEEDRSKNAS

SEQ ID NO: 42890 - protein, 400 aa, Oryza sativa; identical to SEQ ID NO: 33078

SEQ ID NO: 42891 - protein, 243 aa, Oryza sativa
MQICHRDLKLENTLLDGSPAPRLKICDFGYSKSSLLHSKPKSTVGTPAYIAPEVLSRREYDGKTADVWSCGVTLYVMLVGAYPFEDPDDPKNFRKTIGRIMSIQYKIPEYVHVSQDCRQLLSRIFVANPAKRITIREIRNHPWFLKNLPRELTEAAQAMYYKKDNSAPTYSVQSVEEIMKIVEEARTPPRSSTPVAGFGWQEEDEQEDNSKKPEEEQEEEEDAEDEYDKQVKQVHASGEFQLS

SEQ ID NO: 42892 - protein, 468 aa, Oryza sativa
MDWLSANLQVNPQVTVHGDWVSAVMPLMKLLCLTVIGLVLSNPRTQIIPKATFKLLSKLVFALFLPCLIFVHLGQSVTIQNILDWWFIPVNVLISTAIGCILGYIVALICRPPPQFFRFTVIMTGFGNTGNLPIAIIGSVCHTTDHPFGPGCHRKGVAYVSFAQWVAVILVYTLVYHMMEPPMQFYEIVGEGNEIVEEPAQISNYSRSLLHEAEWPGMADKETEHSKTPFIARVFMSISGSSQNTFPDIDFAEEGTSGAGPSSPKSLRCLAEPKVVRRIRVVAEKTPIQHVLQPPTIASLLAIVIGMVPLFKDFVFVPDAPLSFFTDSLEILAQAVVPSVMLILGGMLAEGPKDNALGIRTITGIIVARLLILPCIGIGVVLLADRLHLLCRGRPHVPLCAVATVLHPWCHPAWSDCEPQRLCCQGSIGTSILAAHLCGAISLHLPDRIFQVAYHLKDDGRPPSKIGL

SEQ ID NO: 42893 - protein, 323 aa, Oryza sativa
MASISVPNPAPSPTEDAESIRKAVQGWGTDENALIEILGHRTAAQRAEIAVAYEGLYDETLLDRLHSELSGDFRSALMLWTMDPAARDAKLANEALKKKKKGELRHIWVLVEVACASSPDHLVAVRKAYRAAYASSLEEDVASCSLFGDPLRRFLVRLVSSYRYGGGGVDGELAIAEAAELHDAVVGRGQALHGDDVVRIVGTRSKAQLAVTLERYRQEHGKGIDEVLDGRRGDQLAAVLKAALWCLTSPEKHFAEVIRTSILGLGTDEEMLTRGIVSRAEVDMEKVKEEYKVRYNTTVTADVRGDTSGYYMNTLLTLVGPEK

SEQ ID NO: 42894 - protein, 322 aa, Oryza sativa; identical to SEQ ID NO: 33860

SEQ ID NO: 42895 - protein, 271 aa, Oryza sativa
MVLGSPEVGMEDSSATHLSDEVQDPGRGSSDASVRTSLRDSTGKEAVAAVEPVREELVQSAVGFLKHPKVVASSDVQRRSFLEKKGLTVDEIDEAFRRLLSPSSNSMSPNYCTYQGVSDHSSKITQENPSTVTKCMDDDSGRPEPETESVDPVVPRHPKSYMEIMEMIQRGERPDDIQDINDDPPNPYQPISESRMAPKPKPWEKQGQESSIWELKSQSMDTIESRSEIQLDSANQFTETENRSNQGDSLLLEETVAGSEAHTDDAASTKS

SEQ ID NO: 42896 - protein, 534 aa, Oryza sativa
MDATTSSGASSSLPLHLIIDDALALVSPLQQSFQRSQRHCFGGSAPGEFPLAANPSIVLHVLTSCNLEPDDLAHLEATCSFFRKPANFPPDFQLSMSELAALDMCQKRAIFKPMTQQEREMFKQRCGGSWKLVLRFIMAGEACCRREKSQAIAGPGHSIAVTTSGAVYTFGSNSSGQLGHGSLEEEWRPRIIRSLQGIRIIQAAAGAGRTMLVSDAGRVYAFGKDSFGEVEYAAQGSRVVTTPQLVESLKDIYIVQAAIGNFFTAVLSREGHVYTFSWGNDMKLGHQTEPNDVQPHLLAGPLENIPVVQIAAGYCYLLALACQPSGMSVYSVGCGLGGKLGHGSRTDEKYPRLIEQFQALNIQPVVVAAGAWHAAVVGKDGRVCTWGWGRYGCLGHGNEECESVPKVVESLVNVRAVHVATGDYTTFVVSDKGDVYSFGCGESSSLGHNTITEGNNRHTNVLSPELVTSLKRTNERVAQISLTNSIYWNAHTFALTDSGKLYAFGAGDKGQLGTELVAQESERGTPERVEIDLS

SEQ ID NO: 42897 - protein, 446 aa, Oryza sativa
MSNYHEDHIEEMEDDYDMDDTADDMGEENYERGMRDSDSEDEEHGQSNDKIPDTSSVDARKGKDIQGIPWEKLAITRDKYRQTRLDQYKNYENMPNSGEAAAKECKPTEKGGMYYEFRRNTRSVKSTILHFQLRNLVWATSKHDVYLMSHFSVLHWSALSGLDTELMNVQGHVAPREKHPGSLLEGFSGTQVSTLSVKDNLLVAGGFQGELICKHLDREGISFCCRTTYDENAITNAVEIFNTTSGAVHFMASNNDSGVRDYDMERFQLYKHFQFEWPVNHTALSPDRKLAVIVGDDPNGLLIDANSGKTLHSLKGHFDYSFASAWSPDGRTFATGNQDKTCRIWDARNLSKSLHVLRGNLGAIRSIRFTSDGQFMSMAEPADFVHVFDVGSDYTRRQELDFFGEISGMSFSPDTDMLFVGVWDRTYGSLLQFGRLYNHSYLDSLC

SEQ ID NO: 42898 - protein, 104 aa, Oryza sativa
MSCVVPLCCAILPRDPSSFVLTLKHDQIHVHAQFCGFKFEEHKQYAVSAGRFILQDTIHLLYHRDSFLMYIMVNRETHARAIPPQLLPKDQRIAFQKLSQHCCS

SEQ ID NO: 42899 - protein, 80 aa, Oryza sativa
MNTRPVVLVFLLLVLVITSQFEWKQQIGDAAADPADARRRHQGLAKEDAVKEKVRASNPSFSSLLFGFFLVAISHFFGYS

SEQ ID NO: 42900 - protein, 625 aa, Oryza sativa
MGSLHKFSVILLMLCFATLGSAQYVKYKDPKQPVSVRVKDLLGRMTLAEKIGQMTQIERENATAEQIAKYFIGSVLSGGGSVPAPQASAQAWASMVNEMQKGALSTRLGIPMIYGIDAVHGHNNVYKATIFPHNVGLGATRDPDLVKRIGEATALEVRATGIPYVFAPCVAVCRDPRWGRCYESYSEDPKVVQSLTTLISGLQGDVPSNDVGRPYVGGSKKVAACAKHYVGDGGTVKGINENNTIIDTHGLLTIHMPPYYNSIIRGVSTVMVSYSSWNGVKMHANHHLITDFLKNKLRFRGFVISDWQGIDRITSPPHKNYSYSIEAGIGAGIDMIMVPYTYTEFIDDLTEQVNNKIIPMSRIDDAVYRILRVKFTMGLFESPFADSSLADELGKQEHRELAREAVRKSLVLLKNGKSSYSPVLPLPKKAGKILVAGSHADDLGRQCGGWTITWQGQPGNNITAGTTILSAIKATVDPSTTVVYSENPDSSVVTGDKYDYAIVVVGEPPYAEGFGDNLNLTIPEPGPTVIQTVCKSIKCVVVLISGRPLVVEPYIGGIDAFVAAWLPGTEGQGVADVLFGDYGFTGKLSRTWFKSVDQLPMNVGDAHYDPLFPFGYGLTTQAHSS

SEQ ID NO: 42901 - protein, 914 aa, Oryza sativa
MQAASGTKGGSSGSPVVDCQGRAVALNAGSKSSSASAFFLPLERVVRALNLIRDSWEAFGSKPESDYIPRGTLQVTFQHKGFEETRRLGLRNETEQMVRLVSPSGETGMLVVDSVVPEGPAHKHLEPGDELVRMNDEVVTQFLAMETLLDDSVGKEIDLQIERGGTPLTVKLEVEDLHSITPNHFLEVSGAVIHPLSYQQARNFRFKCGLVYVAEAGYMLSRASVPRHAIIKKLAGEDIENLGDLIACISKLSRGARVPLEYVKYTDRYRNKSVLVTIDRHEWYAPPQLYTRNDATGLWTAKSAIPPESPFIASAHHAGPIDANSNSVSSLPESSPMDLKCQHESENLTDGCIKTQTDDEINVDGSHSSEDSLVEKKRRRVDEEIAAEGTISSSGDLDEIKGGGLRHLSSVDGSDLARTISSNASLAEQVIEPALVMFEVHVPPVCMLDGVHSQHFFGTGVIIYHSDCLGLVAVDRNTVAVSISDIMLSFAAYPIEIPAEVVFLHPVHNFALVAYDPSALGAGASVVRAAKLLPEPALRRGDSVYLVGLSRSLQATSRKSIITNPCTAVNIGSADCPRYRAINMEVIELDTDFGSAFSGILTDEQGRVQALWASFSTQLKYGCSSSEDHQFVRGIPIYAISQVLEKVISGTPGPFRIINGVRRPIPFIRLLEVELYPTLLSKARSYGLSDSWVQALAKKDPVRRQVLRVKGCLAGSKAENLLEQGDMILAINKEPITCFLDIENACQKLDQSVDSDGVLNMTIFRQGKEIDLIVGTDVRDGNGTTRMVNWCGCIIQDPHSAVRALGFLPEEGHGVYVARWCHGSPVHRYGLYALQWIVEVNGKPTPDLETFIQVVKGLENGEFVRVRTVHLNGKPRVLTLKQDLHYWPTWELRFEPETSTWKRGIIKALQSTVA

SEQ ID NO: 42902 - protein, 301 aa, Oryza sativa
MLPYATAAEAEAALGRAMTAAESLWFRYSAGIPDYVLFWHNILFLFVVFTLAPLPVALLELRAPAAVGPFKLQPKVRLSREEFFRCYRDVMRLFFLVIGPLQLVSYPTVKMVGIHTGLPLPSLGEMAAQLLVYFLVEDYLNYWIHRLLHGEWGYEKIHRVHHEFTAPIGFAAPYAHWAEVLILGIPSFVGPALAPGHMITFWLWIVLRQMEAIETHSGFDFPFNLTKYIPFYGGAEYHDYHHYVGRQSQSNFASVFTYCDYLYGTDKGYRYHKAYQAKMKALGQTEGEKADSNGLSYAKLD

SEQ ID NO: 42903 - protein, 265 aa, Oryza sativa
MKWIQEEKAWENSKINEELMKTVTSKIKEDDRILKRFNRLGKSELYLDLLYFLRFGSARSYSYFDAKFLAEHGARILEDLVIFLADAVASIYIELISVDGDMPTDVVGSSLALCSLSTRELQRMRNEVAINGWLHQYFESVVSMYEDRFELYVLSRKLCEKPADNQAEVTNWWRLGFGKPSTVTLLEYVHISSFSLPVRRTKELRALAGWRYYFSLLLEMSDIAMPFIRAVVTKVSAAVSYFWVSMIGRSLGLIFSGIRQSLGWR

SEQ ID NO: 42904 - protein, 463 aa, Oryza sativa
MARSGGELVVVEEDDEYAKLVRRMNPPSVVIDNDSCDSATVIRVDRVKKHGILLEAVQVLVDLNLVITKAYISSDGNWFMDVFNVTDQDGNKVQNKEVTDCIKKCLESEDYLVLPASSPAGGAAPSEETTCIELTGTDRPGLLSEVCAVLASLRCNIVNAEVWTHDRRAAAVIQITDEATGLPVRDGGRLSQLQELLGNVMQGDGDGGGDSRKGSTAVSLGAANAERRLHRLMLDDGDAGRCGEERGGVAAAKAKAKVVVMDCTERRYTVVILRCRDRPRLLFDTLCALTDLHYVVFNGTVDAEGGSAKEAYQEYYVRHVDGHPVRCDAERLRLVRCLEAAVERRASDGLELEVKTEDRAGLLSEITRVFRENSLSIIRAVITTKDGEADDTFYVSDAYGNPVDGKAMEALGEQLGHAVLRVKSNGRAAINRAEDSGGGGAAAIIGNLLKGSFQGFRLIRSYS

SEQ ID NO: 42905 - protein, 479 aa, Oryza sativa; identical to SEQ ID NO: 42607

SEQ ID NO: 42906 - protein, 497 aa, Oryza sativa
MAAGDKTGGDDAAAAAAAPLLVSAAGRRRRCPGCLTEERCKADAGIPYLNFFYIWVVCLCSSLPIQSLFPYLYFMIRDLKVAKEEQDIGFYAGFVGATYFLGRTISAVPWGIFADKYGRKPCIVISILSVIVFNTLFGLSTTYWMAIVTRGLLGLLCGILGPIKAYASEVCRKEHQALGISLVTSSRAIALVVGPAIGGFLSQPAKKYPNLFSEESVFGRFPYFLPCFVISVLAAGACVACIWLPETLHMHHDDKEVIDALEAQDATSDLGETTKESGSGRMGHTKSLLKNWQLMSAITLYCVFSLHDTAYLEIFSLWAVSSRKYRGLSFTSQDVGIVLAISGFGVLVYQLAIYPLLAKYVGPIKPFRYAAVLSILLLSTYPFMANLYGLELKVLINIASLLKNMFAATITIACNILQNTAVTQEQRGVANGISVTLMSIFKAVAPAAAGILFSWAQKHITGLFLPGEQILFLMLNMVSVIGFILTFKPFFALPDMR

SEQ ID NO: 42907 - protein, 250 aa, Oryza sativa
MDAKGVNDRDALIDLESGNNIVVGEHNNGADANFAVAQERTAPNGSWNGAMGTNGCLKDDVNHQHMCCCLSSPDAAAKNGDDRKSDGEEKLGLLDTSGGEKTKKKRSKKPPRPPRPPTPTPLDVSDQKLLNELSELAILKRARIERMKALKKMKNAKHGSSSGNLFPLIITIIFCLVILWQGFFSRTGSAVSFHGSPESSVRAHSSLISIRFYKNNNSNSRSREAISAAPKNAETPSRLEIHSKARKITR

SEQ ID NO: 42908 - protein, 617 aa, Oryza sativa
MPKVAGDGGGGGRRSEDLRVVFLRVGAAVALSVAGLLLSRRRPRQQLRLPPPPPRSDSDGMKGGGGLKDELRILKNEDTKAKIINGNSVHTTTTTTTMTTTALVPLPPKCRTLDDDEEFLLPEFNEIVLKEFGRDMGNIATSPAPRVSEEDATKTPEIFELREMVRSLQEREKTLELQLLESYGLQEQDVAVRELENQLKINTVESKLYTLKIESLQSENERLQAQLTESSKLASELEAARMKCKLLKKKLRQDAEQAKERIASLQEMADSWQCKEIITEGKFSAEVEEKLSKLEELENEARELRVVNSRLQQENAHLARRLELTRLPPVPKPINNMEVKALQEADHLRQENDKLAKEVEQLKTDRFSDVEELVYLKWINACLRYELRNQDAPSGKNVARDLSKTLSPQSEEKAKQLIMEYANAGPDEKNFDHIEFCSEYSSSRASSLGEPDDASIDVSLMNKHKNPKKKKFFSKLRKLVLGKEKENKTIPTLERRISISSCSFDEFNGRESIDSYSSFMTEPGNSGNQQHDNHGSRWHSMDSQSARHLSKEIADARNLHLGVKSVSFGEGRVSNFGHSSHLGNGEATVPEDAKKIHKFAEALKTSRPGSRSSRKDH

SEQ ID NO: 42909 - protein, 582 aa, Oryza sativa
MGAVCSRKRSQLVHEDDSFQTSSRFSKTSSLKWLLLTLPRSNSDVSRKGQGKGPGRCPSLMELCVAKACEDINKYSSFSVLPRDLSQQIFNELVASNRLTETLLETFRDCALQDIDLGEYPGVNDAWMEVVASQRHSLLSVDISCSEITDSGLYLLRDCPNMQSLACNYCDMISEHGLGILSGLSNLTSLSFKSSDGITAEAMEAFANLVNLVNLDLERCLKIHGGLVHLKGLRNLESLNMRYCNNIADSDIKYLSDLTNLKELQLACCRITDLGVSYLRGLSKLTQLNLEGCPVTAACLEAISGLASLVVLNLSRCGIYGEGCENFQGLKKLKVLNLGFNNITDDCLAHLKELINLESLNLDSCKVGDEGLLHLRGLMLLKSLELSDTEVGSSGLQHLSGLRNLESINLSFTLVTDTGMKKISALNSLKSVNLDNRQITDVGLAALTSLTGSTHLDLFGARITDYGTSCFRFFKNLESLEVCGGLITDAGVKNIKDLKALKQLNLSQNVNLTDKTLELISGLTALVSLNVSNTRVSNAGLRHLKDLQNLRSLSLDSCRVTTSEVKKLQATVLPNLISVRPE

SEQ ID NO: 42910 - protein, 622 aa, Oryza sativa
MGSVAMDSDYGVPRELSALQKARALYRPDLPPCLQGTTVKVEYGDAAIAADVAGAHVISHAFPHTYGQPLAHFLRKTAAVPDATVITEHPVVRVGVVFSGRQSPGGHNVIWGLHDAIKAHNANSKLIGFLGGTDGLFAQKTLEISDEVLSSYKNQGGYDLLGRTRDQIRTTEQVNAAMTACQALKLDALVIIGGVTSNTDAAQLAETFAESKCSTKVVGVPVTLNGDLKNQFVETTVGFDTICKVNSQLISNVCTDALSAEKYYYFVRLMGRKASHVALECALQSHPNMVILGEEVAASKLTIFDITKQICDAVQARAEKDKNHGVVLIPEGLVESIPELYALLQEIHGLHDKGVSVENISSHLSPWASALFEFLPPFIRKQLLLHPESDDSAQLSQIETEKLLAQLVEAEMNKRLKEGTYKGKKFNAICHFFGYQARGALPSKFDCDYAYVLGHVCYHILAAGLNGYMATVTNLRSPVNKWKCGAAPITSMMTVKRWSRGPAASQIGKPAVHMASIDLKGKPYELLRQNSSSFLMEDIYRNPGPLQFEGPGGETKPISLCVEDRDYMGRIKQLQEYLEKVKSIVKPGCSQDVLKAALSAMASVTEMLTIMSSPSFSGQATI

SEQ ID NO: 42911 - protein, 472 aa, Oryza sativa
MRINNGRMKMRNKQRKSSALNFDAGCRSSLSFIVWSLVGVALIVCFFSVVRQADTRQNHIYFRHLSATRELEEIEEEHFRLPPPHKVNPRAVKRRGPRKAPKVIDQYLDESSAVHALFFPDERSAVNPTKGGNDSMYFYPGRVWLDTDGHAIQAHGGGILYDHITAKYYWYGENKDGLTYQTHPKSTYRVDIIGVSCYSSKDLWSWTNEGIVLPGEPTNFTHDLHKSKVLERPKVIYNDHTGQYVMWMHIDDANYTKASVGVAVSNSPTGPFTYLYSFRPHGFESRDMTIFKDDDGSAYLFYSSRDNTELHVSPLTKDYLNITVAMRRILIRRHREAPAVFKLQGTYYMITSGCSGWAPNRALAHAAESIMGPWETLGNPCVGGNRFFRLTTFLSQSTFVLPLPGLPGTFIFMADRWNPSNLKDSRYVWLPLFIGGLADEPLDYSFGFPAWSRVSIYWHRKWRLPESWKGYT

SEQ ID NO: 42912 - protein, 844 aa, Oryza sativa
MAAIVLLLFLVVGLMPVSNGQTTPFSPRFSVYLACGAGGNVVVTSDSPQRTFVPDDGELSGKSARFSNPDASPPSPLYAAARAGTSGFSYRLSYAADAAPDGNTTLVLRLHFFPFASQSGDLLSARFSVSAMGRYVLLPPSFSPPRAGVVREFLLQSDGSGEFDVAFTPESGGLAFVNAIELFPAPQELLWKFPLTAVNTDVSPSHQALETLYRLNVGGPTVTPTGDTMWRTWLPDDSYLSPATVSAVASIQGQIIFDRAQGYTQMVAPDAVYKSQRTTNSTTSNVTWTFAVDGNSSYVVRLHFCAFEELSSVIGEGVDFNVYLMQAMGTRELKAKDYATLSSPTQAFYMDYVAVVPTAGENLTVSIGRAASSDSKKAILNGLEIMKLRAVDMTPASSSGKTSKVVVVAVTAAVLGAAVLAGVALCVLLVRRRQRRATLPVPEEEEKESVGTPWSPFTPDGEGSFGSAVVTPRRMNMKLHIPLAEIMVATGDFDDANILGVGGFGNVYRGVLRDGTRVAVKRAKRASRQGFPEFQTEILVLSSIRHRHLVSLIGYCNERSEMILVYELMAHGTLRSHLYGSDAAAATPPPLSWKQRLEICIGAAKGLHYLHTGHSDNIIHRDVKSTNILLGDGFVAKVADFGLSRVGPSTGQTHVSTAVKGSFGYLDPEYFKTRQLTDRSDVYSFGVVLFEVLCARPAIDQSLPPDEINLAEWAMQWSRRGRFDKIVDPAVAGDASTNSLRKFAETAGRCLADYGEQRPSMGDVVWNLEYCLQLQESQPSTETALDLDDSGAHLPRDIVVARRVAPLAPDASADAAGDDMSWSETASFTATGNVFSQIMSRDGR

SEQ ID NO: 42913 - protein, 284 aa, Oryza sativa; identical to SEQ ID NO: 32471

SEQ ID NO: 42914 - protein, 1144 aa, Oryza sativa
MKLQAPASAQGEIWGKLLRTEHILFLKRSKSPKNWPPSLVVRRPAMALPSRRWAGAVESGVDPVAEAWAKLLRSLSQAMARLRVQMESFDDAQMRWALAAGVRAKAQLLASRLAQILALFWDEGQRAALPACVRDALYGMEDMVDDLEYHMLKFQPHQQEVRCNLLISLVNLRYRLIISHASRSRFLKDLDFVASEAGSLLSAMHKLEPTAPSLPALLLADDDHQVVFGRHKEVTDIVRILIDPPASHHHHPTYDILPIVGMGGVGKTTLAKLVYDDAKVKQHFELRLWASVSTSGGFHKIDITEQILRSANPTYPASIHSEPTLDMLQFHLSQLVASKRFLLVLDDIREESFTSMACQEILSPLSSAEKGSRILVTTTTASVPAMLGASCTYHLNVLDIEDLWSLLKKYAFHGGPTHDSTQELEEIGRNIASKLKGLPLAAKMLGGLLGATKSTKTWMNVLDKELYGDSILPVLELSYSYLPRRLKQCFSFCSLFPRNYKFNKRVLIQLWMAQGFVQSQNSADKNMEDLAEDYFEELLSRSFFDVRREACETHYVMHDLVHDLAQSVSADQCLRVEHGMISEKPSTARYVSVTQDGLQGLGSFCKPENLRTLIVLRSFIFSSSCFQDEFFRKIRNLRVLDLSCSNFVQLPNSIGELVHLRYLSLPRTLNMLPESVSKLLHLESLCFHKCSLEKLPAGITMLVNLRHLNIATRFIAQVSGIGRLVNLQGSVEFHVKKGVGCTLEELKGLKDLRGKLKIKGLDNVLSKEAASKAELYKKRHLRELSLEWNSASRNLVLDADAIILENLQPPSSLEVLNINRYQGAICPSWLQLSSLKQLQSLDLINCRNLEILPPLGLLPSLKYLCMKELCTVNQIGHEFYGDDDVPFPSLIMLVFDDFPSLFDWSGEVRGNPFPHLQKLTLIDCPNLVQVPPLPPSVSDVTMERTALISYLRLARLSSPRSDMLTLDVRNISILCWGLFHQLHLESVISLKIEGRETPFATKGLCSFTSLQRLQLCQFDLTDNTLSGTLYALPSLCSLEMIDLPNITSLSVPSDIDFFPKLAELYVCNCLLFASLDSLHIFISLKRLVIERCPKLTAGSFPANFKNLTSLKVLSISHCKDFQSFPVGSVPPSLEALHLVGCHQS

SEQ ID NO: 42915 - protein, 375 aa, Oryza sativa
MEVAVRVVQAACTLCQRVQSSLLLPASASASGSVHSKIDRSPVTVADWGVQAIVSWLLSDCFQDENISIVAEEDDETLSSSDGAALLESVVAAVNGCLIEAPKYGLRSPEKELKAHDILQAIRRCSSIGGPKGRFWVLDPVDGTLGFVRGDQYAVALALIEDGEVVLGVLGCPNYPMKKEWLNYHQRYYRLMSKVSPPTSGSWHKGCVMYAHRGCGQAWMQPLVHDFGKLDWRNSREVRVSTVSDPISATFCEPVEKANTSHSFTAGLAHSVGLRKQPLRVYSMVKYAAIARGDVEIFMKFARAGYKEKIWDHAAGVVIIREAGGVITDAGGRPLDFSRGVFLEGLDRGIIACSGPLLHHRIVGAVDASWNSSTL

SEQ ID NO: 42916 - protein, 127 aa, Oryza sativa
MEADKDKMMREYRAQLDAERAQKLALGRNHSRSKSSSSKKEKKDKDAKKRSKKRRKHRSSSESSSSSSSESSSSDDEDRDSRKSRSRSRSKRTKKDKKYRSRSKHRGSDSEEEGPVRLSKFFGNPKK

SEQ ID NO: 42917 - protein, 559 aa, Oryza sativa
MASSGFSWTLPDHPKLPKGKTVALVVLDGWGEANADKYNCIHVAQTPVMDSLKNGAPERWRLVKAHGTAVGLPSEDDMGNSEVGHNALGAGRIFAQGAKLVDLALASGKIYDGEGFNYIKECFDKGTLHLIGLLSDGGVHSRLDQVQLLLKGASERGAKRIRVHILTDGRDVLDGSSVGFVETLESDLSQLRDKGIDARIASGGGRMYVTMDRYENDWDVVKRGWDAQVLGEAPYKFQNAVEAVKTLRAETKASDQYLPPFVIVDESGKSVGPVVDGDAVVTFNFRADRMVMLAKALEYADFDKFDRVRVPKIRYAGMLQYDGELKLPSHYLVSPPEIERTSGEYLVKNGVRTFACSETVKFGHVTFFWNGNRSGYFDETKEEYVEIPSDIGITFNVKPNMKALEIAEKARDAILSGKFDQVRVNLPNGDMVGHTGDIEATVVACKAADEAVKIILDAIEQVGGIYLVTADHGNAEDMVKRNKSGQPLLDKNGGIQILTSHTLQPVPVAIGGPGLHPGVKFRSDIQTPGLANVAATVMNFHGFEAPADYEPTLIEVVDN

SEQ ID NO: 42918 - protein, 208 aa, Oryza sativa
MGVHTKSMSWYMGTPASPSPGSAGEAQHALSSGGGGGSDASFDTNMVIILAALLFALLFALGLNSLARLIIRWARRAATGEGAGGGVEGAGAGGGLKKRALRSIPIKVYGGGGGGSPAAAAEVCAICLGEFADGEKVRVLPRCGHGFHVRCVDTWLVSHDSCPTCRGSVLHDATTKHKPTAAAAAAGSRRPGSEVDAPAAAAVTVVIA

SEQ ID NO: 42919 - protein, 539 aa, Oryza sativa
MRLWFLIPLLLCFPTLIRSEDYSDVTIVVRGAETIASTSNEFICATIDWWPPEKCNYDQCPWGQASILNLDLTNPLLAKAIQAFSPLRIRLGGSLQDQVVYGTPNLGSPCTPFSKSSSGLFGFSQGCITMERWDAINKIFMDTGAVVTFGLNALQGRQQMGRGVWGGAWNSSNAREFMEYTVSMNYPIDSWEFGNELSGSGIGASVGAEQYGKDIIELKNIISQLYGNSRKPLVVAPGGFYDQKWYAQLLDISGPNVLDTMTHHIYNLGAGNDPQVANRILNPQYLSQSSDTFRDLQMTIQRHGPWSAPWVGEAGGAYNSGSRKVSNTFLNSFWYLDQLGQSAKYDTKVYCRQTLIGGNYGLLDTETFVPNPDYYSALLWHRLMGKGVISLDTSGSSYLRAYAHCGKQKGGVALLMLNLNKNMGFMVSVRNDLNINFREMAGIKRDNSFVHGLKRTVSWVGSKASDGLEKREEYHLTPQDGNPFARTVLLNGAPLQLTGDGDIPSLPPVMVSVNSPIYVAPLSIAFVVFPDFEAEGCER

SEQ ID NO: 42920 - protein, 648 aa, Oryza sativa
MMDVDAKIKLKNAELQAKKDQLRIWTGFKPPVTNSKPIHDQKFTGKVVEVVSGDCIIVADDAAPYGSPSAERRVNLSSIRAPKMGNPRRDEKPDNFAREAKEFLRTRLIGKQVTVEMEYSRRISTVDGQPTTNTADARVLDYGSVFLGSPSQADGDDVSSIPSSGNQPGINIAETLLSRGFARTSKHRDYEERSHYFDLLLAAESRAEKAKKGVHSAKESPVMHITDLTTVSAKKARDFLPFLQRNRRHSAIVEYVFSGHRFKLTIPKETCSIAFSFTGVRCPGKDEPYSNEAIALMRRRILQRDVEIEVEAVDRTGTFLGSLWESKTNMASVLLEAGLAKLSSFGLDRIPDANVLMRAEQSAKQQKLKIWENYVEGEEVSNGSASESKQKEILKVVVTEVLGGGKFYVQTVGDHRVASIQQQLASLKLKDAPVIGAFNPVKGEIVLAQFSADNSWNRAMIVNGPRGAVSSQDDKFEVFYIDYGNQEVVPYSRIRPADPSISSSPALAQLCSLAFIKVPNLEDDFGHEAAVYLNDCLLNSQKQYRAMIEERDTSGGKSKGQGTGTILIVTLVDAETETSINATMLEEGLARLERSKRWDTRERKAALQNLEQFQEKAKKERLQIWQYGDVESDEEEQAPAARRTGGRR

SEQ ID NO: 42921 - protein, 537 aa, Oryza sativa
MRRPNARAHHPRGESQEAAATTLAPPPRPTISSAMGSRRARGRRLLAALLAAAFAVALLLLVPRSPRRRPHEYGVVIDAGSTGSRVHVIAYRSSSSSPASALPRIDWARTASMKAAPGLSSFASDPGGAGRSLAPLLEFARRRVPPESWAETDVRLMATAGLRLLDAAVAEAVLDSCRVLLRGSGFQFQDDWATVISGAEEGMYAWIAANYALGTLGDDSQDTTGIIELGGASVQVTFVTDKPLPPEFSHTLKFGDATYNLYSHSFLQLGQNVAYESLHDMLSTPGHKSMATHLISQAKYRDPCTPRGFSPMEGAVKLPASVLESKVEYRPYAHAVGNFSECRSAALTLLQKGREECRYHECRMGAAFVPDLDGKFLATENFYHTSKFFRLRSKSFLSDLMLAGEKFCRGDWSKIKKEYRSFNEGELLLFCFSSAYIVALLHDTLKVPLDDKRIDVANQIGGVPVDWALGAFIVQKASNQTDMLHPEGEKISPEDGIRHGERPVHHNQGETMSLARRRWDLVELLRWGASDRVCKFS

SEQ ID NO: 42922 - protein, 362 aa, Oryza sativa
MAAVTAAAVSTSAAAAVTKASPSPAHCFLPCPPRTRAAHQRGLLLRAQVSTTDAAAVAAAPAKKEKISKKHDEGVVTNKYRPKEPYVGKCLLNTKITADDAPGETWHMVFSTEGEIPYREGQSIGVIADGVDKNGKPHKLRLYSIASSALGDFGDSKTVSLCVKRLVYTNDQGEIVKGVCSNFLCDLKPGSDVKITGPVGKEMLMPKDPNANIIMLATGTGIAPFRSFLWKMFFEKYDDYKFNGLAWLFLGVPTSSSLLYKEEFDKMKAKAPENFRVDYAVSREQTNAQGEKMYIQTRMAEYKEELWELLKKDHTYVYMCGLKGMEKGIDDIMVSLAAKDGIDWADYKKQLKKGEQWNVEVY

SEQ ID NO: 42923 - protein, 1009 aa, Oryza sativa
MDVDSRMTTESDSDSDAAAQGGGGGGFGSETSSASPSAPGTPTAMGAGGGAAPIAAAAIAAAASAAVVAGPRPAPGYTVVNAAMEKKEDGPGCRCGHTLTAVPAVGEEGAPGYVGPRLILFGGATALEGNSATPPSSAGSAGIRLAGATADVHCYDVSSNKWSRLTPVGEPPSPRAAHVATAVGTMVVIQGGIGPAGLSAEDLHVLDLTQQRPRWHRVVVQGPGPGPRYGHVMALVGQRFLLTIGGNDGKRPLADVWALDTAAKPYEWRKLEPEGEGPPPCMYATASARSDGLLLLCGGRDANSVPLASAYGLAKHRDGRWEWAIAPGVSPSPRYQHAAVFVNARLHVSGGALGGGRMVEDSSSVAVLDTAAGVWCDTKSVVTTPRTGRYSADAAGGDASVELTRRCRHAAAAVGDMIYVYGGLRGGVLLDDLLVAEDLAAAETTNAANQAAAIAAASDIQAGREPGRYAYNDEQTGQPATITSPDGAVVLGTPVAAPVNGDMYTDISPENAVIQGQRRMSKGVDYLVEASAAEAEAISATLAAVKARQVNGEAEHSPDREQSPDATPSVKQNASLIKPDYALSNNSTPPPGVRLHHRAVVVAAETGGALGGMVRQLSIDQFENEGRRVIYGTPESATAARKLLDRQMSINSVPKKVIASLLKPRGWKPPVRRQFFLDCNEIADLCDSAERIFSSEPSVLQLKAPIKIFGDLHGQFGDLMRLFDEYGAPSTAGDIAYIDYLFLGDYVDRGQHSLETITLLLALKVEYPLNVHLIRGNHEAADINALFGFRIECIERMGERDGIWTWHRMNRLFNWLPLAALIEKKIICMHGGIGRSINHVEQIENLQRPITMEAGSVVLMDLLWSDPTENDSVEGLRPNARGPGLVTFGPDRVMEFCNNNDLQLIVRAHECVMDGFERFAQGHLITLFSATNYCGTANNAGAILVLGRDLVVVPKLIHPLPPAITSPETSPEHHLEDTWMQELNANRPPTPTRGRPQAANNDRGSLAWI

SEQ ID NO: 42924 - protein, 449 aa, Oryza sativa
MAQTCLPPGFRFHPTDVELVSYYLKRKIMGKKPLIQAISDVELYKFAPWDLPAQSCLQSRDLEWFFLCPRDKKYPNGSRTNRSTPNGYWKTSGKDRTIELNSRIVGSKKTLIFHEGKAPKGNRTDWVMYEYKMEDNQLVSAGFSKDDFVLCKIFKKSGLGPRIGEQYGAPFNEEEWEHADAEMFPLLPNVETSVFPLLPSSEVVNSTDDTRVQPSVAARAIEELPVQHLPHVCAGNGSTYQNITVTGESALMELPSQHSVESIGDEVVSVDNCSNVVNNADSPVIEGLVLEELSRFLTDSPHHGNPVGEHSGLPPMSEAEAHAFEVSTNDLYNEIAGLAELGVPNGDGFSPSNAGVTEQQPTYFGVPNSENYVNMDDIFAPDTRLSYAYPLPNNQFWHYPMDQFTYSTTLSAAFPSGDSRPTMRIVDDLPAAANNGGFASKPSMQFPLS

SEQ ID NO: 42925 - protein, 77 aa, Oryza sativa
MHETIAYVLSMPCLCSSFSKTGEVSAFLFQPQNSEMKDIQIDRLCKNKLDGFYCFGANLSAIVSRSSSIIMCESYIL

SEQ ID NO: 42926 - protein, 1108 aa, Oryza sativa
MDEENVVELLQRYRRDRHVLLNYMLSGNLIKKVVMPPGAISLDDVDIDQVSVDYVLNCAKKGEALDLGDAIRLFHDSLDYPYVNNSGTVEEFFLLTKPEYSGPAPAREPPPVPAIAPSPVVIPAPIVDPPPVAVHSPVSTTNLSKSQSFDSPTEKELTIDDIEDFEDEEDEFDSRRASRRHQSDANDLSLRLPLFETGITDDDLRETAYEILVAAAGASGGLIVPQKEKKKEKRNKLMRKLGRSKSESTQSQTQRQPGLVGLLETMRAQLEITESMDIRTRQGLLNAMVGKVGKRMDNLLIPLELLCCISRAEFSDMKAYLRWQKRQLNMLEEGLINHPVVGFGELGRKVNELRNLFRKIEESESLQPSAVEVQRTECLRSLREVATSLSERPARGDLTGEVCHWSDGYHLNVALYEKMLGSVFDILDEGKLTEEVEEILELLKSTWRILGITETIHDTCYAWVLFRQFVFTGEQGLLKVVIEHLRKIPLKEQRGPQERLHLKSLRSSVDAEDSFQDFTFFQSFLSPVQKWVDKKLNDYHLHFSEGPSMMADIVTVAMLIRRILGEENNKGMESPDRDQIDRYITSSVKSAFVKMAHSVEAKADTSHEHVLASLAEETKKLLKKDTTVFSSVLSKWHPQSAVVSASLLHKLYGSKLKPFLEHAEHLTEDVVSVFPAADALEQYIMSVMASVVGDDGLDSICRQKLAPYQIESKSGTLILRWVNGQLERIETWVKRAAEQETWDPISPQQRHGASIVEVYGIIEETADQFFAFKVPMRTGELNSLCRGFDKAFQVYTQLVTGPIVDREDLIPPVPVLTRYKKELGIKAFVKKEIHEVRTVDERKASEIIQLTMPKLCVRLNSLYYGISQLSKLEDSINERWARRKSESINIRRSMSEKSKSAVSSQKNQFDGSRKEINAAIDRICEFTGLKVIFWDLQQPFIDNLYKNNVSQARLDAIMEVLDTVLNQLCNVIVEQLRDRVVTGLLQASLDGLLRVILDGGPTRVFSPSDATLLEEDLEILKEFFISGGDGLPRGTVENLVSRVRPVIDLIKQETRVLIDDLREVTQGAKSKFGTDSKTLLRVLCHRNDSEASHYVKKQFKIPSSAPAT

SEQ ID NO: 42927 - protein, 171 aa, Oryza sativa; identical to SEQ ID NO: 33500

SEQ ID NO: 42928 - protein, 176 aa, Oryza sativa
MVVLVVATASDPASIGPAAAFLAMPGWSPGPPIPEGMESFTNGDVRLLKHERSIIAEDDLDNRWQAATGEAVSEVIFLSKHTAVSNRPALTVHPIGVPHLREDETPPQGGRPGWAALPNPRIGPWLRLMQKIAVDQGLVPEFEITLEATHHGPVTNTPTMFVEIGIDLLPCLYSLY

SEQ ID NO: 42929 - protein, 625 aa, Oryza sativa
MYPVVMGRPPARLPASTRVDKATSHLLQGPDWAINLEICDTLNADRWQTKDVVKAVKKRLQHKDPRVQFFTLTLLETMMKNCGEYVHFEVVEQHILQEMVRIVQKKRDTQVRDKVLILLDSWQEAFGGPGGKYPQYYWSYIELKRSGIMFPRRPVDAPPIFTPPATHHTQSYGSPTYPAGSLNERMTSDVETLSLGDLNNIRDTTELLCDMVNALNPSDRMAVKDEIISELVTQCRSNQQKLMRFVSSTGNEELLKQGLEINDHLQSVLAKHDAIASGAPLPVETPRKDEIPREDPKIKPSAPPIAPPSAPPVEEDEDDEFAQIARRKNKSVISSDEASSSAGDQALVPVDPVTSEASSSVASNAVVPVDSSPASGTRTREQDMIDLLSLTLYSPPEASTDSSSQTQNGTQQSVTSNGPELPPNYQPAASNGSHYSSNQQAYPTNQAYTPYNNYVVPWAQAGQGTQAGGAYQTQPMQQYGSSYPAPPWAMPASVNSTNPFQPATYQMQNPPVASVAPTNTYPAPSSPYAAPPRQQVPSPATKPMQQYNSFVSQTRSGPAMAQDVRMNGNPRPSETTAAAAKPYYMPDNLFGDLIDVKSYGGGKMSRTASMPSPNGSGQPLLGGKK

SEQ ID NO: 42930 - protein, 179 aa, Oryza sativa
MSCFKNADSKGPPRVTYLHFYDCPKFSFGIFCLPKSAVIPLHNHPGMTVFCKILFGSMHLKSYDWAKSAPDNDNNALETSDGARLAKVNTDAVFDASSETTVLYPENGGNLHCFTARTACAVLDVMGPPYNRADGRDCSYYDESPYLSSSGGDARYSWLKENHSTFEMKGVQMPQRFIV

SEQ ID NO: 42931 - protein, 162 aa, Oryza sativa
MSKDIVEMEAAEAYRLVLHQVTRWLEGNVDPKSARVFFVTASPSHAGAGGECYDQTTPVGAADAASYCGSTSRRMVQVAGEVLGASRVPVGVVNVTRMSELRRDAHTQVYREQRWAKPTAEQLAADPRSYADCTHWCLPGVPDAWNELLYWKLFFPARDEAI

SEQ ID NO: 42932 - protein, 252 aa, Oryza sativa
MSSVQLSGAGVAAVAFTKNGASSFDGLRLAPPSVRVCSSRRPSRSLVVKAATVVTPKYTSLKPLGDRVLVKLGAAEEKTVGGILLPSTAQSKPQGGEVVAVGEGRTIGDKKVEVSLQIGAEVVYSKYAGTEVQFNDTKHLILKEDDIIGVLETDDVKDMKPLNDRVLIKVAEAEDKTAGGLILTETTKEKPSIGTVVAVGPGPLDDEGKRQPLSVSAGSTVMYSKYAGSEFKGADGANYIVLRVSDVMAVLS

SEQ ID NO: 42933 - protein, 67 aa, Oryza sativa
MQGDIMILLSDITLQVKVKLPYTDMMVTTSVTFCGRLTFKPKMLPSSIKTQLPSLWWNTLDVALQGN

SEQ ID NO: 42934 - protein, 164 aa, Oryza sativa
MFDSGKGREVPSLPFLSHLSIDLSLSLSLSLSLSLSLSLSQGQRGNLCAAKATLGAGWTYGGGGGWLSGGGGGEGEGETRGMRCCCDVVYSFHCMCCRSLAGNGAGEMGCCQRQLQDLSSAWTKEAHNNKSEISISTLFLSHFLHAHVVIVLFLPYSCSVLTYI

SEQ ID NO: 42935 - protein, 491 aa, Oryza sativa
MAGGQLNVLSTLDQAKTQWYHFMAIVIAGMGFFTDAYDLFCISLVTKLLGRIYYTDDSKDTPGALPPNVSAAVTGVALCGTLAGQLFFGWLGDKLGRKSVYGFTLILMVVCSVASGLSFGSSAKGVVSTLCFFRFWLGFGIGGDYPLSATIMSEYANKRTRGAFIAAVFAMQGFGILFGAIVALAVSAGFRHAYPAPSYSDNHAASLVPQADYVWRIILMFGTVPAALTYYWRMKMPETARYTALIARNAKQAAADMSKVLHTQIEESADRAETVAVGGESWGLFSRQFLRRHGLHLLATTSTWFLLDIAFYSQNLFQKDIFSKVGWIPPAKTMNALEELYRIARAQALIALCGTIPGYWFTVAFIEIMGRFWIQIMGFAMMTAFMLGLAIPYHHWTTPGHRTGFIVMYGFTFFFANFGPNSTTFIVPAEIYPARLRSTCHGIKNALFVLAGTNFLGTIMTLLVPESKGMSLEVISQEVADGDDEEAAYPK

SEQ ID NO: 42936 - protein, 49 aa, Oryza sativa
MIHKELVYQRVENRTRTPLVIWYRMNHGWKTSILFMSLSVNSHGLVARS

SEQ ID NO: 42937 - protein, 770 aa, Oryza sativa
MVFLIVSASSFLIRLPLVARARLPNPTSSSYTSRSRSRALLLLPASSPLRAFCPASRRPSPATCSAAYASSSMATDDNPLLADFDFPPFDRVEPIHVRPAVRTLLARLEGELTDLEKGVQPTWGKLVEPLERIVDSLEVVWGTVDHLKAVKDSSDLRAAVEDVQPDKVKFQLRLGQSKPIYQAFNAIRNSSDWETLSEARKRIVEAQIKEAVLSGVALEDEQREKFNQIEQELEKLTQKFSENVLDATKKFEKLITDKNEIDGLPATALGLAAQTAASKGHENASAENGPWIITLDAPSYIAVMQHARNRALREEVYRAYLTRASSGDLDNTNIISQILKLRLEKAKLLGYKNYAEVSMAQKMATVDRVEELLEKLRAASWDHAVKDMEDLKAFAKESASPEANDLAHWDLSFWSERLRESKYDINEEDLRPYFALPKVMDGLFSLANRLFGVSVEPADGLAPVWNSDVKFYCVKDSSNSPVAYFYFDPYSRPSEKRGGAWMNVVFSRSRVLARNGSPVRLPVAHMVCNQTPPVGDKPSLMTFREVETVFHEFGHALQHMLTKQDEGFVSGIRGVEWDAVELPSQFMENWCYHKNTLLSIAKHYETGELLPEEIYAKLVAAKNFRAGTFSLRQIRFASVDMELHTTYDPNGSLSIYDVDRRVAERTQVLAPLPEDKFLCSFSHIFAGGYAAGYYSYKWAEVLSADAFSAFEDVGLDNEKAIEETGRRFRETVLALGGGKSPLEVFVSFRGREPSPEALLRHNGLLPVAAL

SEQ ID NO: 42938 - protein, 633 aa, Oryza sativa
MASSSDHGSLMEDWMPPPTPSPRTLMSSFLNEDFVSGSFSNIFSDHESNKPQDQFERNRELVDLSKEVPSQFARPAFQRDASLDHSLVSPTQRSNSHGGLAERRAARAGFSVPKIDTSRGGSSTVIRSPVAIPPGLSPTTLLESPVFLYNAMAQPSPTTGTLPFLMASNAKSTIPSATKMDEDCTFGNDTFSFQPHVGSRRPNFSAAEKGPNACHQNQSLSNIHQRESSLQSSFTAVKDITDEKNIKTKTSDSMFGDNHSSDEQDDETNQNGENSMPPPNHRSGVPLSHTNDPEVNVLENRGSQTCHNSASLWDNAKNDCLQDVQSEVIETRTAACLPVSTNCDTSIMESQDAVDVSSTLSNEEDDRATHGTASIECNGDGDETDSKRRKLDALTAATAAITTTSNIDMGAAASRGVREPRVVVQTTSEVDILDDGYRWRKYGQKVVKGNPNPRSYYKCTHQGCSVRKHVERASHDLKSVITTYEGKHNHEVPAARNSGHGSSGSGNAPSAPQSNGSQRRQEQGQASFSQFGGAAPFSSFVLPPRNQFGPSASNFPFGMVPPGMAIPMPSLGSLAPAKMAGHPSTMQGYQGLMIPEGEMKTEPMSQLGFPAVNQSSSSFQQMMNRPPSFGPQM

SEQ ID NO: 42939 - protein, 425 aa, Oryza sativa
MEAPRLRLPFLLLVALVVSPPAVAAAASRMRIEPLPTAALRRLYDTSNYGKLQLNNGLALTPQMGWNSWNFFACNINETVIRDTADALVSTGLADLGYNYVNIDDCWSNVKRGKKDQLLPDPKTFPSGIKDLADYVHGKGLKLGIYSDAGIFTCQVRPGSLHHEKDDAAIFASWGVDYLKYDNCYNLGIKPKDRYPPMRDALNSTGRQIFYSLCEWGQDDPALWAGKVGNSWRTTDDIQDTWKSMTDIADKNNKWASYAGPGGWNDPDMLEVGNGGMTFAEYRAHFSIWALMKAPLLIGCDVRNMTKETMEILSNKEVIQVNQDPLGVQGRRILGQGKNGCQEVWAGPLSGNRLAVVLWNRCEESANIIVKLPSVGLDGSSPYSVRDLWKHKTLSENVVGTFGAQVDVHDCKMYIFTPAVTVASS

SEQ ID NO: 42940 - protein, 955 aa, Oryza sativa
MMAAGGHAAAEHRIQIPAAPASQSGPADHKAVAAAPEKWLNYFLRLLAVIESVGNAFGTLAFTWATVVLLGGYPTVLKRDFGIATAIIFLEATRMFTRNNRLDYQLFFRTRGAFRPLGWNGLMVIVFFSVSMVSTVVWDARRPRIVFPIMVVLFAVGQFLCAGVLGLRLRINSRLRRQMSLWSPMVAILLLASCICRSSLLAIWIVYGVLLVVVLLVTISRLQFPIIINRVHGALGRKYVFWRPFILYSCMLAAIVLPMFMIDKLYRYAIIVLDISALVIVSFGNLQIPAALVRVVLAALGFDQEDYDGHGDTTNLPQSLTIFYGMVLGQGLLYIIAAVLEVFSFIPRIHLVRRGGFTGRWGAESVDMYYAYAYDKYMEGGLFAPKRISLSNFAMDSLNSDLSKNQLYGVQMMHIFLQNGLTKARLLEKLTTSTQTMARLISMLDWSSRHHRATIRLYAAKVTAELAKNLRVETVPGTLQLVSTLLDADGKPKRGHPLLDADDDQDHFVDIADRQDKRHDIAGNQGQRREPIGDTNNLLETPTRSTHINDQRYIPRIWQRILEYWSIPKEQPLTDDDLLPALGMSIIYSLAGCDQNNCVEIDRVTDLIPNIIGFTSFRSAMVNSEAQQKVLLKSSLKVLQRLTSIEGEIGITLRYKISKHPFLLRNLAEILRDNSSNKQELRKLVVGILRNLAIDRHTRQEMGQMQMLITTLIKAFLDFKGLFSSDVDCLLPKVAGQALVMLSSENSHNCFVMLKEPDFIHKLKNMILIHGDKYIYVAASLLRNMCLYAQHELTESDQKELSHTLREVLERIMDTEGAELEILIGLSSQICKLIPEEFSQELEHGQIKRRFIKRLVDTLNANMNPSSHCPGIRRVVLEQSIHMMEYNSRYANYFNEYQMMDALSFVELTPSRAENYMVFLGDAGFMECNTPLSALVDRAKELMGRQWLQGISSAN

SEQ ID NO: 42941 - protein, 671 aa, Oryza sativa
MDSVPAAGVGVGGGGAGAGYPESTESSPRSRGGDSWDEPFPSSAAAAAAAAGGGRLRLMCSFGGRIVPRPTDKSLCYLGGETRIVAVERNASLADVHARLSRSLLGGQPFTLKYQLPNEDLDSLISVSTDEDLDNLVDEYDRIAATSSGGGSSRTSRIRLFLFPAKPESSSSLGSLLDDSSKSESWFVDALNSAISGSLDGIPRGISTDSASVNCLLGLEDDSSTHSRGGPPNSSPAEEQRANQQKLAAAAAVAAARHPHDVQSVPDSPMIDKNSSFGSTSSAPSLSNLPPIRVRPEDRPPDSRLAPQVPVEDHFAQMGISDQPVQPVIGGYMQPPPQVPIPNMAVPSISPSDASSRVFSDDDKSDHGGGGGRKPQPPKPEVPPVADPTNRAMYYNDRSPPAELKRDMPVGTDAASYRVPVPAQDAAAAAAAAAAAAQQPPAGYVYAQMHAPPPQQQPPPPQQQQPVPQQYVTAQNQHFTHNPATGTFIPIQSYYHHPVPQQAPQPPMPQPVPQPQQSHAFDPNTGMYYIPMRTNAPQAYSMPPGAAAVPPPTLVDTTPKPTVPIPQMAVKQPELQQPGLYRTTAAPTPVPASNAPAYAGMGYHHVIQTHHHPAPQPAATVAGNFGYDYGDPTRAQVFYSQAAAPPTLPPQYQPMGSPDAGQADLKQARAS

SEQ ID NO: 42942 - protein, 809 aa, Oryza sativa
MASLLLEQQEKLRRHVDEWRFRCRAAVAEIGPRSASTSVSSASVRLRVAPTDPGVGVGAASLLTAAAAAEDNVDVSKFVAVLSHSCLEISRLSDAASSNLYRQLLLFGHTAEGPNEALLEGEPQKTFAHSIPLLLEVYEIINGLVMILGNLLRQLDAICSVRDKNVRPLNSFKGLDLTTVFGSLGEGLMVFLLVDEILRHNGNTRSYLSLFSRMLDKVKSEVDVFSMSFEDVDFLDQVVHNLQKLFDIGFFQRLVQEDSPLCSSITLVRSNKKLLDTFYSFFSESSSEIIQRIGSLKELPIDRRTILHLLGLFLFFTTTTGEAPDKKSMNLLVEIFQLVPVVYVEGGKRIVLSDLIRFHCSPSLSLLPPIKEACEAFGIMKNSYLARLNEMHSRDIQAINDSLSCWSVSFQSAIHPSSQMLTEEWVRHLQKQILQGVVLADRIHMLVLSMLDLHMHLEVPLRREKAKSLCQMIVSLKAIGDLFHMKGSSLVRSLPHIINIIQSDIEQLIISLKTKLQNEIAKGSQAVKTGFLSSLIRGGTDTETRLIDSLSLVLMSLQLLEGGGSSQRQLTLSITMDILHSLGYLDIELVGVRKLISKFSILSNFWSLIDERTNCSFLYWRKEMLVTWLSMVYGDACKLSWLQNIIDAFSDGMSLLTLGNVGTVTLQHYEEEIENALRKEVVAPLCRDIETDLRLHVHSTHLKGSVFVNPTKTGVRNLSWYLRMKPLRLPSKFVDIKFLVENHLNSAFYTYSVMSNYDNRVRSYAPYFSCIDKNCMKLKYISKYFLMTGVEYILDVCRDASTRRAEIWC

SEQ ID NO: 42943 - protein, 251 aa, Oryza sativa; identical to SEQ ID NO: 30740

SEQ ID NO: 42944 - protein, 474 aa, Oryza sativa
MMAPSLSTAVSSLLLLLLLAAAISVSSSPPMPEDSIRVISAEKRIDLTSPIVKVFLTLKLENDATAPEASQVLLAFTPTEVEHLAIVKATRAEGKRKKKIYVPLSVKASDLAAAPNGARLYSILLSTPLKPAEVTTLEVFYALTHSLEPFPAEITQSDPQLVYYRDSAVLLSPYHVLEQVTYIKMPSNRVESFTRVDPTSRAGNEVKYGAYNNQLPNSYVPILVHYENNRPFAVVEEFVRKVEISHWGNVQITEQYKLKHGGAQHKGVFSRLEYQSRPSISGVSSFKNLLARLPPRVHSVYYRDEIGNISSSHLRSDSHKSELEIEPRYPLFGGWHCTFTIGYGLPLQDFLFESDDGRRYINLTFGCPLLDTVVDDLTIKVVLPEGSTSPQAVVPFLMEQYLETSYSYLDVVGRTTVVLKKRNVVGEHNVPFQVYYEFNPIFMLAEPLMLISAVFLFFVACIAYLHMDLSIGKS

SEQ ID NO: 42945 - protein, 221 aa, Oryza sativa; identical to SEQ ID NO: 32778

SEQ ID NO: 42946 - protein, 914 aa, Oryza sativa
MMPSGPLNPMGPGQPVGAAASLLRTSSSLLSGGQQGMGSGGGMIPSQSPFSSLVSPRTQFGANGLLGGGSNVSSLLNRPFGNGGHMLGPGLMPGGGGIPMNTLQQQRGGLDGAGDLVGVGGSDPLSFPSSSQVSLGNQLGSDNLHQPPQHQQQQQQLDAMHDLQQQQHHQQLPMSYNQQHLPPQPPQQPQATVKLENGGSTGGVKLEPQMGQPDQNSSAQMMRHASNVKIEPQQLQALRSLSAVKMEQPTSDPSAFLQQQQQQQHLLQLTKQNPQAAAAAQLNLLQQQRILQMQQQQQQQQQQILKNLPLQRNQLQQQQLLRQQSLNMRTPGKSAPYEPGTCAKRLTHYMYHQQNRPQDNNIEYWRNFVNEYFSPNAKKRWCVSLYGSGRQTTGVFPQDVWHCEICNRKPGRGFETTVEVLPRLCQIKYASGTLEELLYVDMPRESQNASGQIVLDYTKAVQESVFEQLRVVREGHLRIVFNPDLKIASWEFCARRHEELIPRRSIIPQVSQLGAVVQKYQSAVQNSTNLSTQDMQNNCNSFVACARQLAKALEVPLVNDLGYTKRYVRCLQIAEVVNCMKDLIDYSRQNGSGPIASLHSFPRRTSSGVSPHQSQQQQPEEQQSIPQSSNQSGQNAAPMTGVQASASANADVTSNNSLSCAPSTSAPSPSVVGLLQGSMNSRQDHPMSSANGPYTSGNSAAIPKVNSTTSLQSNPSTSFPSPMPTTSNNNMMPAPQSTNQLSSPTTSSNLPPMQPPATRPQEPEPNESQSSVQRILQDLMMSPQMNGIGQLGNDMKRPNGLTSSVNGVNCLVGNAVTNNSGMGGMGFGAMGGLGPNHAASGLRTAMVNNAMAISGRMGMNHSAHDLSQLGQLQQQQQHQQQQQQQQHDLGNQLLNGLRAANSFNNLQYDWKPSQ

SEQ ID NO: 42947 - protein, 240 aa, Oryza sativa
MAEKGCLKRLQKEYHSLCKEPPPQIVARPLPNDILEWHFVLEGSAGTPFEGGYYYGKLKFPPDYPFKPPSISMTTPSGRFAPHKRICLSMSDFHPESWNPMWSVASILTGLLSFMMDDALTTGSIRSTEGEKRRLAKASLAYNCESKNCPHFRKMFPEYVEKYNQQKQMEQTVAEPETQENPAPAPSPAVQQQAAVVANKAKPAAEAAGEQKQKKRVPFWMMLVMFSVFGAVMALPLMQL

SEQ ID NO: 42948 - protein, 772 aa, Oryza sativa
MGTSGSKGIDGVGGVGGGAAGLGGGEAGDGGGGVGGAASRSWHGGAQLYVSLKMENARITGDLVPHVYGSEPIIGSWDPARALAMERELASMWALSFVVPPDHETLDFKFLLKPKDADTPCIIEEGPTRHLTGGMLEGDVRIAWFKMNGDHETLEFRVFNKADIVSPLDLAASWRVFKENFQPSKVRGIPDVSINVAPAHGTEDTSTESLELDLEHYVIPTPSAATSEYAANLAANPASLIQTGALWTNDMLLSDGIQSPSSATADFEDHNNCNNDNVALPSDSFKKLQVSGIVESKSVDTLTTLQKQDGQKGLFVDRGVGSTKFGKSSSACSLASGLNFGTGKAMPEAAGAVAAAAVADRLHGSKEDRKLAIVLVGLPARGKTFTAAKLTRYLRWLGHETRHFNVGKYRRLKHGANQSADFFRDDNPEGIEARNEVAALAMEDMIDWMHGGGQVGIFDATNSTRKRRYMLMKMAEGNCKIIFLETICNDPNIIERNVRLKIQQSPDYADQPDYETGVRDFKERLANYEKVYEPVQEGSYIKMIDMVKGQGGQLQVNNISGYLPGRIVFFLVNSHLTPRPILLTRHGESLHNVRGRVGGDTVLSEDGELYSKKLANFIEKRLKSEKTASIWTSTLQRTILTASPIVGFPKIQWRALDEINSGVCDGMTYEEIKKVMPEEFESRKKDKLRYRYPRGESYLDVIQRLEPVIIELERQRAPVVVISHQAVLRALYAYFADRPLREVPDIEMPLHTIIEIQMGVTGVEEKRYKLMD

SEQ ID NO: 42949 - protein, 337 aa, Oryza sativa
MECEPEELQFLGMVGIYREAASILRAHRPLFARIAAAFVLPLSLLFLLHIAISHALFSHIDSDDSALDSAAPGTPAQRRLLHRLADDWLALLLFKAAYLLALLLFSLLSTAAAVFSVASVYSAKHDALSFPRVLSVVPRVWRRLAATFLAAFLLLFAYHLLFVAVFVALLVAADSGSGLAALLAFLLALAYIAGLVYLSVVWHLASVVSVLEDYKGFEAMRKSKALIQGKLWTASAIFFVLNVVFIVVEVAFRAWVVRGATHGLGAGSRLLLGLAMLAALCAVVMLALVVQTVVYLVCKSYHHESIDKSNLSDHLEVYLGEYVPLKASDVQMEQFNL

SEQ ID NO: 42950 - protein, 1033 aa, Oryza sativa
MHSGVNGCCPLRLPAAAAVHGRRIPPLLPPRGAWPGCIAAPALHRKPGRGGGGALSSCRRASHHEKLQVAALPSKATLEFEHGVSLRSAYIVPEDVQAAGFQIDADELASIVESRDTKKLTVHGQLNGIADKLGTSLTNGIVTDKDLLNQRQDIYGVNKFAETEIRSFWEFVWEALEDTTLIILSACAIFSLVVGITTEGWPQGAHDGVGIVASILLVVSVTGTSNYQQSLQFRDLDKEKRKILVQVTRNGLRQRVLIDDLLPGDAVHLAVGDQVPADGLFISGFSVLVDESSLTGESEPVFVNEDNPYLLSGTKVLDGSCKMLVTAVGMRTQWGKLMAVLTDGGDDETPLQTRLNGVANTIGKIGLFFAVLTFIVLSQGIIGQKYLDGLLLSWSGDDVLEILDHFAVAVTIVVVAVPEGLPLAVTLSLAFAMKKMMNDKALVRQLAACETMGSATVICSDKTGTLTTNRMTVVKACICGNTIQVNNPQTPNMSSNFPEVAVETLLESIFNNTSGEVVTNQDGKYQILGTPTETALLEFALLLDGDCKEKQLGSKIVKVEPFNSTKKRMSTILELPGGGYRAHCKGASEIVLAACDKFIDERGCIVPLDDKTSSKLNDIIKAFSSEALRTLCLAYREMEEGFSTQEQIPLQGYTCIGIVGIKDPVRPGVRQSVATCRSAGISVRMITGDNIDTAKAIARECGILTKDGIAIEGAEFREKSAEELHDLIPKMQVLARSSPLDKHTLVKHLPTAFNEVVAVTGDGTNDAPALREADIGLAMGIAGTEVAKESADVVILDDNFSTIVTVAKWGRSVYVNIQKFVQFQLTVNVVALLVNFTSACFTGDAPLTAVQLLWVNMIMDTLGALALATEPPNNNLMKKAPVGRKGKFITNVMWRNIVGQSLYQFAVMWYLQTQGKHLFGLEGYHADIVLNTIIFNTFVFCQVFNEISSREMEDINVLRGMAGNSIFLGVLTGTIFFQFILVQFLGDFANTTPLTQQQWLISILFGFLGMPIAAAIKLIAVEPHEKADTRRTP

SEQ ID NO: 42951 - protein, 72 aa, Oryza sativa
MCCSAVAVMKWEALLPNDTFLIVASSDGVFEKVTMQDVCDLMLYVKLGVKQELGSFALTQQNLADYVVDLSL

SEQ ID NO: 42952 - protein, 340 aa, Oryza sativa; identical to SEQ ID NO: 33837

SEQ ID NO: 42953 - protein, 50 aa, Oryza sativa
MRWMWLDVVGVRLLLCGKSCQLQWMKNIHAIFGLLNGETIRGPERGSKEE

SEQ ID NO: 42954 - protein, 544 aa, Oryza sativa
MADTPTSRMIHPFSNIPSQNLKQFQYSDNPQHPCHPYRAPSDTHVVPHHYGLKSHSPDAGYESQATPNKYTLDSSEGAGCMRHDSPSSQSFTTRSGSPLSQEDSHSDSTDGSPVGASCVTEDPNDLKQKLKDLEAVMLGPDSEIVNSLENSVANQLSLEPEKWVRMMGIPRGNLKELLIACARAVEEKNSFAIDMMIPELRKIVSVSGEPLERLGAYMVEGLVARLASSGISIYKALKCKEPKSSDLLSYMHFLYEACPYFKFGYMSANGAIAEAVKGEDRIHIIDFHISQGAQWISLLQALAARPGGPPTVRITGIDDSVSAYARGGGLELVGRRLSHIASLCKVPFEFHPLAISGSKVEAAHLGVIPGEALAVNFTLELHHIPDESVSTANHRDRLLRMVKSLSPKVLTLVEMESNTNTAPFPQRFAETLDYYTAIFESIDLTLPRDDRERINMEQHCLAREIVNLIACEGEERAERYEPFGKWKARLTMAGFRPSPLSSLVNATIRTLLQSYSDNYKLAERDGALYLGWKSRPLVVSSAWH

SEQ ID NO: 42955 - protein, 628 aa, Oryza sativa
MRGPVRWAVVVVVMAMVEAAAGRFVVEKNSLRVTSPEGIKGKYECAIGNFGVPQYGGTLHGWVEYPKSNQKACKSFEDFDISFKSTRSGGRPKFVLIDRGQCYFTTKAWNAQNAGAAAVLVVDDKSEPLITMDNPDDAGTEHLENITIPSVLITKKLGDDLKKSAENGDMVSVLLDWRESLPHPDERVEYEFWTNSNDECGPKCDMQMDFVKSFRGTAQILEKKGYTQFTPHYITWYCPEAFVVSKQCKSQCINHGRYCAPDPEQDFSQGYDGKDVVVQNLHQICVFKAANESGKPWLWWDYVHDFSIRCPMKEKKYTPECAVHVIKSLGLDVEKIKKCVGDPEADEENPVLKAEQDAQIGHDKRGDVTILPTLVINNRQYRGKLDKSAVLKAVCAGFEETTEPAICLSEDVQTNECLENNGGCWQDRDNNVTACKDTFRGRVCECPVVKGVKFVGDGYTNCEASGIGRCEIKNGGCWKETRNGKTISACSNEVSEGCKCPPGFKGDGIKSCEDIDECKEKLYCQCKGCSCENTWGSYECSCGGNNMLYMREHDTCLSKEATLAVGWSFLWVIFFGLVLAGVGAYAVYKYRLRSYMDSEIRAIMAQYMPLDNQEAANQHHVAHAGDDI

SEQ ID NO: 42956 - protein, 777 aa, Oryza sativa
MYRKATELIGISKPKNELTKQLLEYDGSSSQQSNIISIVGFGGLGKTTLANSLFQELKAKFDSYCFVSVSLNPDINKILKNILLQLDEKMYSHIDETWETKQLIDKIRDFLNNRRFLCVIDDVWKKSAWDTIKLAVQDAKLGSKIIVTTRNKVVAEHAGSGVYEMKPLSDDDSRQLFCKRIFDSNDDCPADLCGVTEKILKKCGGVPLAIITTACLLASKPRNSEEWDKVNKSISLGLENNLDVDKMRKILSLSYNDLPFHLKTCLLSLSKYPEDELIRKDVLIWGWLAEGFITDETRPVGTSLQEIGESYFNELINRSLIQPMSEDNFWDEDGKVHVFWDEDGKVHACKVHDMVLELINQLSVEEDFVTTYLSDGQQTGKHTCTAQKKKIRRLSLHNSNKSYASPEAREQLSKVRSITIFGKVDSIPPLSSFHVLRVLQLEDCSGMDKNHLNHLDKLRLLRFLRLGHYSATELPESIGKLESLETLDIRGARKPSSFKSHKVLFPMSFAKLRKLLRLYAGRVKLAQGLMLGNMKSLQELVIEATRKVIKEIGNLTELRTLRIVFGSEKTFELKESIQTSIQRLTNLQDLDLRNNISFEEIIDMQQVPSGLQRLFMPDSFMKAFPCWINSLMLSHLTTLSICLDFEYLQSDHLDRLAELPSLRFLRLQLAFVSEQLQEKLTIHRGACAFRSLKDFQFYSSMMPSFQPGAMPHLERLYLSIWTRLRRGGLNDLGLENLYSLRHATIYSFDDDSKAVIEEALKDYPNQAALKIQSMMMN

SEQ ID NO: 42957 - protein, 290 aa, Oryza sativa
MDDRIPPPSPLQYSPSPVHSSPHPLSSLRYSSSERERYLAELLAERQKLAPFVQVLPFCTRLLNQEILRASSLPPNHNFVDPERIEHGSPLRLPGLPVNGQPMDLEGWSGMQTENMRVLQASSMGWNGPPAITGTPVVKKVVRLDVPVDKYPNYNFVGRLLGPRGNSLKRVEASTQCRVYIRGRGSVKDSVKEDKLRDKPGYEHLNEPLHVLVEAEFPADIIDTRLNQAVTILEDLLKPIDESMDYYKKQQLRELAILNGTLREESPSPHLSPSVSPFNSTGMKRAKTGR

SEQ ID NO: 42958 - protein, 492 aa, Oryza sativa
MDPCKFRPSSSFDTKTTTTNAGAPVWNDNEALTVGPRGPILLEDYHLIEKVAHFARERIPERVVHARGASAKGFFECTHDVTDITCADFLRSPGAQTPVIVRFSTVIHERGSPETIRDPRGFAVKFYTREGNWDLLGNNFPVFFIRDGIKFPDVIHAFKPNPRSHVQEYWRVFDFLSHHPESLHTFFFLFDDVGIPTDYRHMDGFGVNTYTFVTRDAKARYVKFHWKPTCGVSCLMDDEATLVGGKNHSHATQDLYDSIAAGNFPEWKLFVQVIDPEEEERFDFDPLDDTKTWPEDEVPLRPVGRLVLNRNVDNFFNENEQLAFGPGLVVPGIYYSDDKMLQCRVFAYADTQRYRLGPNYLMLPVNAPKCAHHNNHYDGAMNFMHRDEEVDYYPSRHAPLRHAPPTPITPRPVVGRRQKATIHKQNDFKQPGERYRSWAPDRQERFIRRFAGELAHPKVSPELRAIWVNYLSQCDESLGVKIANRLNVKPSM

SEQ ID NO: 42959 - protein, 224 aa, Oryza sativa; identical to SEQ ID NO: 32885

SEQ ID NO: 42960 - protein, 873 aa, Oryza sativa
MVIAVEGGFVHEEEEVDHPIRYLPLGRVYSSSAPCPLPKKPRSAEDGKPPVIVYYRRRRKKPRVEGPPPSPATAPPMLHPREDDEDEEVTRRKGSLKYELLSLGQAPPALGGDGEEPARRRCLRRSGGAERRGYFSEPKRRQRQGVHKEAASSAGRRWLELEIEAADPLAFVGLGCKVFWPLDEDWYKGSITGYNEATKKHSVKYDDGESEDLNLADERIKFSISSEEMKCRNLKFGISNLNKRGYDELLALAVSLHDYQGLDPGDLVWAKLTGHAMWPAVVVDESNVPANRALKPGRLDQSILVQFFGTHDFARIKLKQAVPFLNGLLSSLHLKCKQARFYRSLEEAKEFLCTQLLPENMLQLQKSMEKGSSDANSNKDVHSCDNLSEDKTAESGGDYDEMTPIELGNLRVSKLGRIVTDSDYFHNKKHIWPEGYTAFRKFRSVKDPHVVILYKMEVLRNSDIKARPLFRVTSEDGTQIDGSTPNTCWKEIYCRLKEKQRNVASGLDRDVCQGSGSYMFGFSNPQIRQLIQELPNARSCLKYFENAGDTFRGYRAVHVNWKDLDYCSVCDMDEEYEDNLFLQCDKCRMMVHARCYGELEPLNGVLWLCNLCRPEAPRVSPRCCLCPVTGGAMKPTTDGRWAHLACAIWIPETCLKDVKRMEPIDGLSRINKDRWKLLCSICGVAYGACIQCSHPTCRVAYHPLCARAADLCVELEDDDKIHLMLLDEDEDPCIRLLSYCKKHRQPSTERPSLESNLAKPAVVVQTDAVPPSGCARTGPYNIHGRRGQKQPQVMATASVKRLYVENMPYIVSGFCQNRVGHDAISEPIQSVGFLDVAHQEAVGNVSSMIEKYKSMKATFRRRLAFGKSINLYQ

SEQ ID NO: 42961 - protein, 276 aa, Oryza sativa
MGSSSSYSAIPGDQSELITGCDEDDHGLAKTKGKNWGIFICWLLGNGCLFGFNGMVTIEDYYVYLFPNYHPTRMITLVYQPFVLTTTALFAYHEAKINTRMRNLARYMLFFLSSFGVIVLDVASSGRGGIAPFVGLCLIAAAFGVADGHVQGGMTGDLSLMCPEFIQSFFAGIAASGAITSALRFLTKAIFENSKDGLRKGAMMFSSIACFFELLCVILYAFVFPKLPIMKFYRTKAASEGSLTVTADLAAGGIKSQPENPLDEEDQAFAERLSNR

SEQ ID NO: 42962 - protein, 367 aa, Oryza sativa
MPTLDARLRLPLAGLSPATTSFPGSTPKPGSLSFALRPPSASLSSSASAPAAAAPPIVVVGSANADIYVEVDRLPLVGETVAARAGRSLAGGKGANQAACGGRLAAGPTYLVARVGDDANGRLLEGALADAGGVRLDRVARAPGAPSGHAVVMLMPGGQNSIIIVGGANMEGWASGVGSDDLDLIRRAGVLLLQREIPDWVNVQVAQAAKGAGVPVILDAGGMEAPVPGELLSLVDIFSPNETELARLTGMPTETFEQISRAAGACHKMGVKEVLVKLGSQGSALFIEGGEPIRQPIIPATEVVDTTGAGDTFTSAFAVALVEGKPKEECMRFAAAAASLCVQVKGAIPSMPDRKSVMDLLESVQVE

SEQ ID NO: 42963 - protein, 463 aa, Oryza sativa
MAAPADDYYGDDDDEYDDYNPHPYGGGYDIFATYGSPIPPSPTTCYPVSSAAPTAPPPKPSPTPPPASPPPAPTPPQTRPPSPPPQQQQPRPVSPPPVAEPYYWPKPYDYGDAPREQPAYATPEVFRGWPFFAGARCHSRCGGRDYWRQFMRGLDYLFGHADGYGERRIGVDYHGVPVYANRKGGVEEAVVIQVEPPATGTVEWHHAADDPEYNYNNGNRLSWDDNAKDETYAYVQHNYSSYDRSYDQSYSLDAVSDETTWFPNQNYQHVYKEEESQYQEILSSSCAESKISAQPIYCYNQQFSEQPLHVLVEPPETVYSQKLEYYESFSTYNHHNSNDDSDMLGHSYDIQLPDEHVPDEPFEPIKPSWAMHSGYYQSCTDGASAEFENHTLSSSEFSGIASLFATSFYPQQTQIYECHGDENVSLQQNWQCNWNVVSENDFQSGYDSNHMNGSFWPFGDHSA

SEQ ID NO: 42964 - protein, 1369 aa, Oryza sativa
MGSLTRAEEEETAAAEEWSGEAVVYVNGVRRVLPDGLAHLTLLQYLRDIGLPGTKLGCGEGGCGACTVMVSCYDQTTKKTQHFAINACLAPLYSVEGMHIITVEGIGNRQRGLHPIQERLAMAHGSQCGFCTPGFVMSMYALLRSSEQPPTEEQIEDSLAGNLCRCTGYRPIIDAFRVFSKRDDLLYNNSSLKNADGRPICPSTGKPCSCGDQKDINGSESSLLTPTKSYSPCSYNEIDGNAYSEKELIFPPELQLRKVTSLKLNGFNGIRWYRPLKLKQVLHLKACYPNAKLIIGNSEVGVETKFKNAQYKVLISVTHVPELHTLKVKEDGIHIGSSVRLAQLQNFLRKVILERDSHEISSCEAILRQLKWFAGTQIRNVASVGGNICTASPISDLNPLWMATGATFEIIDVNNNIRTIPAKDFFLGYRKVDLKPDEILLSVILPWTRPFEFVKEFKQAHRREDDIALVNAGMRVYIRKVEGDWIISDVSIIYGGVAAVSHRASKTETFLTGKKWDYGLLDKTFDLLKEDVVLAENAPGGMVEFRSSLTLSFFFKFFLHVTHEMNIKGFWKDGLHATNLSAIQSFTRPVGVGTQCYELVRQGTAVGQPVVHTSAMLQVTGEAEYTDDTPTPPNTLHAALVLSTKAHARILSIDASLAKSSPGFAGLFLSKDVPGANHTGPVIHDEEVFASDVVTCVGQIVGLVVADTRDNAKAAANKVNIEYSELPAILSIEEAVKAGSFHPNSKRCLVKGNVEQCFLSGACDRIIEGKVQVGGQEHFYMEPQSTLVWPVDSGNEIHMISSTQAPQKHQKYVANVLGLPQSRVVCKTKRIGGGFGGKETRSAIFAAAASVAAYCLRQPVKLVLDRDIDMMTTGQRHSFLGKYKVGFTDDGKILALDLDVYNNGGHSHDLSLPVLERAMFHSDNVYDIPNVRVNGQVCFTNFPSNTAFRGFGGPQAMLIAENWIQHMATELKRSPEEIKELNFQSEGSVLHYGQLLQNCTIHSVWDELKVSCNFMEARKAVIDFNNNNRWRKRGIAMVPTKFGISFTTKFMNQAGALVQVYTDGTVLVTHGGVEMGQGLHTKVAQVAASSFNIPLSSIFISETSTDKVPNATPTAASASSDLYGAAVLDACQQIMARMEPVASRGNHKSFAELVLACYLERIDLSAHGFYITPDVGFDWVSGKGTPFYYFTYGAAFAEVEIDTLTGDFHTRTVDIVMDLGCSINPAIDIGQIEGGFIQGLGWAALEELKWGDDNHKWIRPGHLFTCGPGSYKIPSVNDIPLNFKVSLLKGVLNPKVIHSSKAVGEPPFFLGSAVLFAIKDAISAARAEEGHFDWFPLDSPATPERIRMACVDSITKKSASVYYRPKLSV

SEQ ID NO: 42965 - protein, 505 aa, Oryza sativa
MTVTPRITVAEGRLVAHGRTILTGVADNIALTHASGAGLVDGAFVGATADEPKSLHVFTFGTLRDLRFMCCFRFKLWWMTQRMGTSGRDVPLETQFMLLESRDGGGGGEAVYVVMLPLLEGQFRAALQGNDRDELEICIESGDKAVQTAQGTYMVYVHAGANPFDTITQAVKVVERHLQTFHHREKKKLPSFLDWFGWCTWDAFYTDVTADGVKQGLQSLAEGGTPPRFLIIDDGWQQIGSENKEDAGNAVVQEGAQFASRLIGIKENTKFQKTTTTAMADGGETAASAAGLKALVEEAKKEHGVKYVYVWHAMAGYWGGVKPAAEGMEHYESAVAFPVQSPGVMGNQPDIVMDSLSVLGLGLVHPRMALAFYGELHAYLASCGVDGVKVDAQNIIETLGAGHGGRVSLTRAFHRALEASVARSFPDNGCISCMCHNTDMLYSARQTAVVRASDDFYPLDPASHTIHISSVAYNTLFLGEFMQPDWDMFHVYASSPLLLNLLLCS

SEQ ID NO: 42966 - protein, 322 aa, Oryza sativa
MLSSLNYPTDSWETLGRFTVANAKIAQNFTFPEPKWARYLKLNLLSHYGSEFYCTLSMLEVYGMDAVEKMLENLIPVENKRLEPDDKMKEPVDQQTQLKEPTEGKESSHEPLDEDEFELEDDKLNGDSSKNGAHDQVTETRPIQAGRIPGDTVLKVLMQKVQSLDVSFSVLERYLEELNSRYGQIFKDFDADIDTKDALLEKIKLELKHLERSKDDFAKEIEGILSWKLVASSQLNQLLLDNVIIRSELERFREKQADLENRSFAVIFLSFVFGCLAIAKLSIGMIFNTCRLYNFEKFDRVKSGWLVLLFSSCIIASILIIQ

SEQ ID NO: 42967 - protein, 812 aa, Oryza sativa
MAQMLLHGTLHATIFEAASLSNPHRASGSAPKFIRKFVEGIEDTVGVGKGATKVYSTIDLEKARVGRTRMITNEPINPRWYESFHIYCAHMASNVIFTVKIDNPIGATNIGRAYLPVQELLNGEETDRWLDICDNNREPVGESKIHVKLQYFDVSKDRNWARGVRSTKYPGVPYTFFSQRQGCKVTLYQDAHVPDNFIPKIPLADGKNYEPHRCWEDIFDAISNAQHLIYITGWSVYTEITLVRDSNRPKPGGDVTLGELLKKKACEGVRVLMLVWDDRTSVGLLKRDGLMATHDEETENYFHGSDVNCVLCPRNPDDSGSIVQDLSISTMFTHHQKIVVVDHELPNQGSQQRRIVSFVGGLDLCDGRYDTQYHSLFRTLDSTHHDDFHQPNFATASIKKGGPREPWHDIHSRLEGPIAWDVLYNFEQRWRKQGGKDLLLQLRDLSDTIIPPSPVMFPEDRETWNVQLFRSIDGGAAFGFPDTPEEAAKAGLVSGKDQIIDRSIQDAYIHAIRRAKNFIYIENQYFLGSSYAWKPEGIKPEDIGALHLIPKELALKVVSKIEAGERFTVYVVVPMWPEGVPESGSVQAILDWQRRTMEMMYTDITEALQAKGIEANPKDYLTFFCLGNREVKQAGEYQPEEQPEADTDYSRAQEARRFMIYVHTKMMIVDDEYIIIGSANINQRSMDGARDSEIAMGGYQPYHLATRQPARGQIHGFRMALWYEHLGMLDDVFQRPESLECVQKVNRIAEKYWDMYSSDDLQQDLPGHLLSYPIGVASDGVVTELPGMEYFPDTRARVLGAKSDYMPPILTS

SEQ ID NO: 42968 - protein, 175 aa, Oryza sativa
MDAYAWCRRGGAADCEEQEEDIGSPSTSAGSSARSSGSSSELADDASSSSSSSSAERRFEMSDLMTQLPFKRGLSRFFDGKSQSFASLAAVASLEDLAKPPRKRLKPSQSCGGGLDAHRGRVLSPRRHCPKAVVAGAKKATARAALSMLAASPRRPPLAAPARPEGVAAKFLVVN

SEQ ID NO: 42969 - protein, 548 aa, Oryza sativa
MLRRSRHFLPPRPRRRPRPRREAPAAEPPTPTYTRDVVRRVDAILRGHPWSAARPLLLSLPGLAWDSHTVARVLKAHPPLHKAFLFFRLAAGAGGGFRHDRFTYTSMLHLLGEAGRVPAMMRLLAEMLRAGVDPDAATFTTVMHWLAHAGDVDAAMRVWEEMRARKGKCRPTLVSYTACVKILFDAGRPAEAREVFQEMVAEGLRPSCKTYTVLIEHLANVGKFEATMEIMDKMQEAGVEPDKALCNILVQKCSRAGETSVMTRILQYMKENFIVLRRPIFLEALEALKANGESDNLLREVNPHLAFEGIECDPAFTDLGYITVRSTILYLLASRNWSAVEHMINEMTPKNIKVESHILSDIIQASCANCRPSCGLAVLRYSLRIGNELGRSAYGSLLGHYIRNGSFDLVFEIVEILIKSGCNLGTYLSSILIIKLACAGHSSTAVRIFGLLTTDKNVVTYTALMSAYFQDGKVDKALQLFLQMSANGVSACPGTYEVLIHGLQMAGRKQESEHYRRERMEMQWHLQYRNEHSPEDSLCNHLFCDFHG

SEQ ID NO: 42970 - protein, 400 aa, Oryza sativa
MAGSCLALCKMTLQGSSTSSRGKTRSPSISSPGHSPSLHYLIKFGAVYYALVAPQPPPHAAPEHVRIFREVTEPSVLCRRKSIKGKTVREAQKTFRVTDPNQRLEAGTYLRVHVHPKRFPRCYEIDWKSRVIAVTDNYVVLDKPAATSVGGATDNIEESCVVFTSRALGLETPLMTTHQIDNCSEGCVVLSKTKEFCSVFHRMIREKQVNKRYLALTTAPVSTGIITHYMRPINRAPRLVSEDHIKGWHVCQMEILDCKKVPWPSSLIRKVHKVDNCGWPQQEAAYECKINLLTGKTHQIRAQLAAIGTPIVGDSAYMTAAMAAIVNPSINPFGRWGQNYDSEDEKAAAVEAWISCHGKEPKSVIGLQASEISWDYEGEHHSYKAGVPWWRQDAVESDLI

SEQ ID NO: 42971 - protein, 334 aa, Oryza sativa; identical to SEQ ID NO: 31081

SEQ ID NO: 42972 - protein, 715 aa, Oryza sativa
MEDAWRKAKRALGLGLCVHVPEAEEGEREDCSSERRRRLPAAASGARCRGEAAVTVGPESVPAPSDVPVPLPLPGVVRRSKSGSSRSSSKRKCAICFDSMRHGNGQALFTAECSHMFHFHCISSNVKHGNYFCPICRAKWKEIPFNRSLSSNIPHGRIGVSRARLTQQDANMALLHQVPNHHQRVRRPHTSEPADFNDDEPLQQPEVFDNLNVRSTKTAEINTYPEFSTIPQSSSRDDFAILIHLKAPSANPDQGTGKLANESSAGSSRNRAPVDLVTVLDVSGSMAGTKLALLKRAMGFVVQHLGPSDRLSVIAFSSSARRLFHLQRISHHGRQQALQAINSLGASGGTNIADALKKAMKVIEDRSYKNSVCSIILLSDGQDTYNISSSVQGASPDYKSLVPSSIINDARHTVPLHAFGFGADHDSDSLHSIAQASGGTFSFIEDEGVMQDAFAQCIGGLLSIVIQEMRVSMECVHPGVQLSSIKSGSYPSKVARDGRNGSVDIGHLYADEERDILLSVNIPQSRHQTSALKVSCAYRDPVTGETIKIQGDEVKINRPTTSNISEHVSIEVDRERNRIQAAESIECARAAAEKGALSEAVAILEDCRRTLSQSFASRSGDRLSLSLDAELREMQERMANRQLYESSGRAYMLSGLSSHSWQRATARGDSTDSSTVIYSYQTPSMVEMLQHSQNHLPSPQGRQRPRPPVIGQAPR

SEQ ID NO: 42973 - protein, 378 aa, Oryza sativa
MGTKNQFDLLVDVDNDDPSHLIAAAEKKAAAAGWSAKPAAQAKLPTKPPPPAQAVKESRNYGAPAREGAGRNGPGRGSGGFGGGRIGQRRDFGEGDTNGVEGGYGASGFGDGIVRREEGEHRPSERGHGPRQPYRGGGRRGGYTGGEAGDESGRAPHRAYERRSGTGRGHGMKREGAGRGNWGTVTDEALAQESGEAVSIEVSVTVTEENKQEGVPQSDEVEKHKEGESNEEEEKEPEDKEMTLEEYEKVLEEKRKALLSLKVEERKVVVDKELQSMQQLSVKKDSDEVFIKLGSDKDKKKENVERDERTRKSLSINEFLKPAEGERYYSPGGRGRGRGRGRGDRGGFRDGYSSRGPVAAPRIEDQAQFPGLAGRLVH

SEQ ID NO: 42974 - protein, 465 aa, Oryza sativa
MGRRWHALAAVGVAACAAAAVAAGDRGFTFADAVAAPEEVGYMRKVVNFLWSGEASYHHVWPPMEFGWKIVLGVLIGFFGAAFGSVGGVGGGGIFVPMLTLIIGFDAKSSTAISKCMIMGAAVSTVYYNLKLKHPTLDMPVIDYDLALLIQPMLMLGISIGVLFNVIFPDWLITVLLIILFLGTSTKAFLKGVETWKKETILKREAAKRLEQIAEEPEYSPLPTGPNATAESKAPSDEAASLWQNVYWKEFGLLAFVWIAFLVLQVTKNYMPTCSTWYWVLNFLQIPVSVGVTMYEGLGLMQGRRVISSKGDEQTNLKFHQLLVYCFFGMMAGVVGGLLGLGGGFIMGPLFLELGIPPQVSSATATFAMMFSSSMSVVEYYLLDRFPVPYALFFTVVAFFAAIIGQHIVRKLINWLGRASLIIFILSFMIFISAISLGGVGISNMIGKIARHEYMGFDNICNYDV

SEQ ID NO: 42975 - protein, 404 aa, Oryza sativa
MGMLSLYNAAHLLIHGEVELEDAILLSRHQLETIIARNLKSSPLSQQVTRALRIPLPRTLKRIEALNYIAEYNQEQACNPSVLQLARLDFNLLQLLHLRELKEFSRWGNNLYGAVELTYSRDRIVECYFWSYTIYYEQKYAQARIILAKIFVLATLLDDTYDMHAILEEGQKLNEAIQRWDESAISVLPEYLKNYYAKLMSTFKEIEDELKSEEKYYITYAVKAYQRLCKSYLQEAVWFHQNYIPSFQEHLDVSIISSGSSMLSVVSFVSAGDLATKEALEWAFGCTDAVKACGEIGRFQDDLAAFKHGKGKLDMATSVESYMKEHNVTGEEATAVISNLVEDAWKTINQARFERSSLVPAVNRVANLAMSIMFFYQGSEDAYTFNKLSMNIIKQLFVKPIPII

SEQ ID NO: 42976 - protein, 540 aa, Oryza sativa
MDSVPAAGVGVGGGGAGAGYPESTESSPRSRGGDSWDEPFPSSAAAAAAAAGGGRLRLMCSFGGRIVPRPTDKSLCYLGGETRIVAVERNASLADVHARLSRSLLGGQPFTLKYQLPNEDLDSLISVSTDEDLDNLVDEYDRIAATSSGGGSSRTSRIRLFLFPAKPESSSSLGSLLDDSSKSESWFVDALNSAISGSLDGIPRGISTDSASVNCLLGLEDDSSTHSRGGPPNSSPAEEQRANQQKLAAAAAVAAARHPHDVQSVPDSPMIDKNSSFGSTSSAPSLSNLPPIRVRPEDRPPDSRLAPQVPVEDHFAQMGISDQPVQPVIGGYMQPPPQVPIPNMAVPSISPSDASSRVFSDDDKSDHGGGGGRKPQPPKPEVPPVADPTNRAMYYNDRSPPAELKRDMPVGTDAASYRVPVPAQDAAAAAAAAAAAAQQPPAGYVYAQMHAPPPQQQPPPPQQQQPVPQQYVTAQNQHFHSQSSYWHIHPNPILLPPSGPSASTTAAHAAACATATTITRFRPKYWHVLHSHAHECASGI

SEQ ID NO: 42977 - protein, 497 aa, Oryza sativa
MEQAAKATISLSPPSYAGCCMAACPYRSTRHLRRGGGCSARSISSLRHAPSARVYAAAAAAATPESKSTKENDLVFIAGATGKVGSRAVREFIKLGFRVRAGVRSAQRASSLVQSVEQLKVDDDATSPAERLEIVECDLEKQAQSDIVSAIGNAAIVVCSIGASEKDILDVTGPYRIDYMATNNLVQAATAAKVEHFILVTSLGTNRIGFPAFLLNLFWGVLCWKRRAEEALIGSGLPYTIVRPGGMERPTDAFKETHNLVVAVEDTYVGGLVSNLQVAELIACIASNRRTAYCKVVEAIAETTAPLLPTEDQLANIPSKRQPPPEPEVVQQGETPPKPIQQSQRPLSPYTAFVDLKPPSSPSPCPPSAAAPAPTSTDTAAAGSSSTLNSSATGTPISVDQPKQQQRPLSPYTRYEELKPPSSPSPTPPSAASSASVSASPDTPPAAAASSAALDSSANGTPITGDQLNQQQSPLSPYTRYEELKPPSSPTPSTPKL

SEQ ID NO: 42978 - protein, 474 aa, Oryza sativa
MATDTAAPAAMKVDGSALAGRALAAAGARHMFGVVGIPVTSLASRAAAAGVRFLAFRNEQSAGYAAAAYGFLTGSPGLLLTVSGPGCVHGLAGLSHATANAWPLLMVSGSCSQPDAGRGDFQELDQIAATKPFIKIAVKATTIADIPRLVFQALAATVSGRPGGCYLDIPSDVLHQTLTESEAAALIDAAAADSAKSDSSPPKHKSLDEGIEKAAELLRRAERPLVVFGKGAAYSRAEDAIWKLVDTTGIPFLPTPMGKGVVPDTHPLSATAARSLAIGQCDVALVVGARLNWLLHFGEPPKWSKDVKFILVDVCEEEIELRKPHVGIVGDAKRVVELINREIKDQPFCLAPSHPWVEAITKKARDNVLKMEAQLAKDVVPFNFLTPLRIIRDAILAEGNPAPVVVSEGANTMDVGRAVLVQNEPRTRLDAGTWGTMGVGLGFCVAAAVAEPDRLVVAVEGDSGFGFSAMEVEV

SEQ ID NO: 42979 - protein, 499 aa, Oryza sativa
MRSSDFQFSYSSRSRHGLARRRRRRRRSSRAPPAVPKPGPRPPDAPVRQAPRVPRHAPHARCHPLHPRHLRVARRRRGGRRPLRHHLRRLRRGRLRRVLRRRRRRRRHGLPVPPRVRGGGDAGQAPPGRGLRLRWTTPRARPRLRRVPPVGAPRGGAPRRRGGGVLHAAVRRQRGVRPRLVRPAARPRGGRRRRGWRRRRRRAARLAGAVAGGVAVVHQGRPRPVHGVLRPGDEAVRRAGARRRRARQFLLRARTRGGGVHGVGVARQDDRADGAGRLPRRRPHAGRHQVRLPPVRAHHGAVRGVAGRAPAALRRVRLLRQPLRPRPGRDARGRARPPRRRRPVPLGGPLVGVPQAPRRLRRRRRRRQRDGGVVVPAAGGAGPPRRGLLPDALRVELDGGGAGRRRADGGAAAVDGPADERRVRGGRVGGRRARAAGRRRRARGEGGGGARDRGGDARREERRVPEERRSVDGEGQGGEPGGRELGPEHRRVRGHVRMI

SEQ ID NO: 42980 - protein, 322 aa, Oryza sativa
MMPEDIHAKSPSDACVQKDGTFLNSCAPEEHLCNSKDRPALFLAMTFSTGKSAKGQEQHSDFPASWFSRQKQEKDSTNQVLEANLGMDCAIISEGEWADTLTDISVGYLLTEASIGTNTDCPGTAIAKNTLFLENPCSYDSFDAAVALHASRHKTVEQPALASHSTIWGAEETCDEFSFNLAASRKQESSNTSASSCPGSDSGVLPSTSQGFQGFLQDLAGAKVADNPCMDDAKDMEALCANSPPRSKSDSGLKDQSLADLYWADSLGPLDLEIPSVRYQAEDLLLGDSQNSWNRMMVNSLDAFRNLSFFMADKNDSIPSIM

SEQ ID NO: 42981 - protein, 370 aa, Oryza sativa
MAVLEEDPAPVPAADSTSGASDDEITVEETSFVHTEPPQDGTAPPVVTSDMEVLNDKVKKQVIKEGHGKKPSRFATCFVHYRAWVQGSSHKFEDTWQEQHSIELVLGKEKKEMTGLGIGVSNMRSGERALLHVNWELGYGKEGSFSFPNVPPMADLVYEVELIGFDDVKEGKARSDMTVEERIEAADRRKIEGNEYFKEKKFEEAMQQYEMAIAYMGDDFMFQLFGKYRDMALAVKNPCHLNMAACLIKLKRFDEAIAQCTIVLSEDENNVKALFRRGKARAELGQTESAREDFLKAKKYSPEDKEIQRELRSLAEQDKALYQKQKELYKGLFGPRPEPKPKASNFLVLFWRWLVSLIGYLVKLFKRKDE

SEQ ID NO: 42982 - protein, 353 aa, Oryza sativa
MCQLFDEASERCRTAPMEGVSFSPEDLDSAVESTDIDTDIGSLIKGTVFMTTSNGAYVDIQSKSTAFLPLDEACLLDVNHIEEAGIRAGLVEEFMIIDENPGDETLILSLQAIQQDLAWERCRQLQAEDVVVTGKVIGGNKGGVVALVEGLKGFVPFSQVSSKSTAEELLDKELPLKFVEVDEEQGRLVLSNRKAMADSQAQLGIGSVVLGTVESLKPYGAFIDIGGINGLLHVSQISHDRVADISTVLQPGDTLKVMILSHDRERGRVSLSTKKLEPTPGDMIRNPKLVFEKADEMAQIFRQRIAQAEAMARADMLRFQPESGLTLSSEGILGPLSSDTPSEGSGEGQTTDE

SEQ ID NO: 42983 - protein, 430 aa, Oryza sativa; identical to SEQ ID NO: 32838

SEQ ID NO: 42984 - protein, 905 aa, Oryza sativa
MADLEAGMVAAATDQGNSTRSQDDAATLIPNSGNLGSSNRSTKTARFKDDDELVEITLDVQRDSVAIQEVRGVDEGGSGHGTGFDGLPLVSPSSKSGKLTSKLRQVTNGLKMKSSSRKAPSPQAQQSAKRVRKRLDRTKSSAAVALKGLQFVTAKVGNDGWAAVEKRFNQLQVDGVLLRSRFGKCIGMDGSDEFAVQMFDSLARKRGIVKQVLTKDELKDFYEQLTDQGFDNRLRTFFDMVDKNADGRLTAEEVKEIIALSASANKLSKIKERADEYTALIMEELDPTNLGYIEMEDLEALLLQSPSEAAARSTTTHSSKLSKALSMKLASNKEMSPVRHYWQQFMYFLEENWKRSWVMTLWISICIALFIWKFIQYRNRAVFGIMGYCVTTAKGAAETLKFNMALVLLPVCRNTITWIRSKTQVGAVVPFNDNINFHKVIAAGVAVGVALHAGAHLTCDFPRLLHASDAQYELMKPFFGEKRPPNYWWFVKGTEGWTGVVMVVLMAIAFTLAQPWFRRNKLKDSNPLKKMTGFNAFWFTHHLFVIVYTLLFVHGTCLYLSRKWYKKTTWMYLAVPVVLYVSERILRLFRSHDAVGIQKVAVYPGNVLALYMSKPPGFRYRSGQYIFIKCTAVSPYEWHPFSIKSAPGDDYLSVHIRTRGDWTSRLRTVFSEACRPPTEGESGLLRADLSKGITDEKARFPKLLVDGPYGAPAQDYREYDVLLLIGLGIGATPLISIVKDVLNHIQGEGSVGTTEPESSSKAKKKPFMTKRAYFYWVTREEGSFEWFRGVMNEVSEKDKDGVIELHNHCSSVYQEGDARSALIVMLQELQHAKKGVDILSGTSVKTHFARPNWRSVFKKVAVSHENQRVGVFYCGEPVLVPQLRQLSADFTHKTNTRFDFHKENF

SEQ ID NO: 42985 - protein, 200 aa, Oryza sativa
MGMQATQEFLAELKVLTHVHHLNLVRLIGYCVENCLFLVYEFIDNGNLSQHLQRTGYAPLSWATRVQIALDSARGLEYLHEHVVPVYVHRDIKSANILLDKDFRAKIADFGLAKLTEVGSMSQSLSTRVAGTFGYMPPEARYGEVSPKVDVYAFGVVLYELLSAKQAIVRSSESVSESKGLVFLVIFFLLSNCCFSCCHL

SEQ ID NO: 42986 - protein, 429 aa, Oryza sativa
MESLVLASSCSASPRLPPLSAARRRRPSSQTLPATAAASGRRGAGRSKLVVVAAAAAAARGSGNGFEGLKTNGFASMSSSTNSENMSTGTGSLPPMPPPSSYIGSPVFWIGVGVALSAAFSMVSSMVKKYAMQQAFKSMMTQAPPNTFGSNSPFPFAMPPQAAPAAPSSYPYSQPRKDTSPQSATVDVSATKVEATGTLEEADVAEQPKKKFAFVDVSPEELQQKELQSSLETVDVKSESKQSETMEDTEQKAPTNGTAFKMNEGSASGTTESSNSGPMLSVDTIEKVMEDPAVQKMVYPYLPEEMRNPDSFKWMLQNPMYRQQLQDMLNNMGGSPDQWDNRMLDHLKNFDLSSPEVRQQFAQVGMTPEEVVSKIMANPEVAVAFQNPKIQTAIMDCSQNPLNIVKYQNDKEVMDVFMKISQIFPQING

SEQ ID NO: 42987 - protein, 736 aa, Oryza sativa
MAMRHLITGQGNCAPDGASSSNPFGNLANAIFGQSSKAQSIKELPGSAVNVPTTSELGTAAPLSTIPGSENEFKQDQLPLARGADFIRGGPSHDWVESFRPPGLPEFAVPDAQLKEFEQIFNSTGPTFGPPVMDGPPQRVLSGVLRSFLASGQAGVPFQPVPVPALGLSESDKQCIRDRSCIMARHILADQPEEYIQAQVNTLLHSLDIDSNYRMKGPMHGPYPEMEEYWNQSQSAMRSGPMHNAADKWITEFGKQNNNPEEWAHSFEQQYGSNGWASEFEQHQSQMAMTGGMNMANLAAMEQSRMLAQTLASNNDPKFQNSKFFQFVSKMSRGELIIEDNQVKQGSASQSSGWADEFQTQYNANANSWADQFVHEEMSQGADKWASEFSTEYNQGGLNENWIDEFSKMRVDDEWAEEFSGGTFGESSADPWVDEFQNQLSASKQNSGASRGVYVFSDMNPYVGHPNPMQEGQELFRKGLLSEAVLALEAEVLKNPDNAEGWRLLGVTHAENDDDQQAIAAMMRAQEADPTNLEVLLALGVSHTNELEQGEALRYLHRWLQNHPKYGGIAPPQPTDSPYGPDVIRLFNEAAQMSPEDADVHIVLGVLYNLSREYDKAIAAFKTALQLKPQDYSLWNKLGATQANSIQSADAILAYQQALDLKPNYVRAWANMGISYANQGLYEDSIRYYVRAVAMNPKADNAWQYLRISLSNASRADMIAACDSRNLDVLQKEFPL

SEQ ID NO: 42988 - protein, 755 aa, Oryza sativa
MVTVVEEVDHLPIYDLDPKLEEFKDHFNYRIKRYLDQKCLIEKHEGGLEEFSKGYLKFGINTVDGATIYREWAPAAQEAQLIGEFNNWNGAKHKMEKDKFGIWSIKISHVNGKPAIPHNSKVKFRFRHGGGAWVDRIPAWIRYATFDASKFGAPYDGVHWDPPACERYVFKHPRPPKPDAPRIYEAHVGMSGEEPEVSTYREFADNVLPRIRANNYNTVQLMAIMEHSYYASFGYHVTNFFAVSSRSGTPEDLKYLVDKAHSLGLRVLMDVVHSHASNNVTDGLNGYDVGQNTHESYFHTGDRGYHKLWDSRLFNYANWEVLRFLLSNLRYWMDEFMFDGFRFDGVTSMLYHHHGINKGFTGNYKEYFSLDTDVDAIVYMMLANHLMHKLLPEATIVAEDVSGMPVLCRPVDEGGVGFDFRLAMAIPDRWIDYLKNKEDRKWSMSEIVQTLTNRRYTEKCIAYAESHDQSIVGDKTIAFLLMDKEMYTGMSDLQPASPTINRGIALQKMIHFITMALGGDGYLNFMGNEFGHPEWIDFPREGNNWSYDKCRRQWSLVDTDHLRYKYMNAFDQAMNALEEEFSFLSSSKQIVSDMNEKDKVIVFERGDLVFVFNFHPNKTYKGYKVGCDLPGKYRVALDSDALVFGGHGRVGHDVDHFTSPEGMPGVPETNFNNRPNSFKVLSPPRTCVAYYRVDEDREELRRGGAVASGKIVTEYIDVEATSGETISGGWKGSEKDDCGKKGMKFVFRSSDEDCK

SEQ ID NO: 42989 - protein, 411 aa, Oryza sativa
MGCSWALAALVLGFLVVAVHGSEPWLNQTQVYSTNANSGSNGVFVGITLIQSAAAKGAVCLDGSLPGYHLHRGFGSGANSWLVNLEGGGWCNDVKSCVFRKSSRRGSSNHMESQLQFTGIMSNRPEENPDFYNWNRVKVRYCDGGSFTGDGADASAGLYFRGQRIWQAAMDDLMAQGMRYANQALLSGCSAGGVSTILHCDEFRGLFSGSTNVKCLADAGMFLDFVDVSGQREMRDFFNGIVRLQGSGRSLPRSCTSRMDKTSCFFPQNVVPNIQTPTFILNTAYDVWQLQQSVAPKRADPQGLWRGCRMNHASCNSNQLQFLQGFRNQMLDAVRGFSGARQNGLFINSCFAHCQSERQDTWYAGDSPRLGNKRIAEAVGDWFFDRADAKYTDCAYPCDGTCHHLTFRGDY

SEQ ID NO: 42990 - protein, 254 aa, Oryza sativa
MQAPPLASSPSPAWTAILPAPARLCCSRRGALRLEAKAAWRPAARGPRVPAKGAVLASEVVGPSPLLDARNEQELILHIRKEVEKGKLPADVAANLEELYYNYKDAVMQSRDPNAHDIVLSNMVALFDCVLLDVENPFTFPPYHKAVREPFDYYMFGQNYIRPLVDYRNSYVGNISIFQDMEQKLQQGHNVVLMSNHQTEADPAIIALLLERSNPWISENIVYVAGDRVVTDPLCKPFSMGRNLICVYSKKAYE

SEQ ID NO: 42991 - protein, 541 aa, Oryza sativa
MTTVASLSLLPHLLIKPSFRCCSRKGVGRYGGIKVYAVLGDDGADYAKNNAWEALFHVDDPGPRVPIAKGKFLDVNQALEVVRFDIQYCDWRARQDLLTIMVLHNKVVEVLNPLAREFKSIGTLRKELAELQEELAKAHNQVHLSETRVSSALDKLAQMETLVNDRLLQDGGSSASTAECTSLAPSTSSASRVVNKKPPRRSLNVSGPVQPYNPSLKNFWYPVAFSSDLKDDTMVPIDCFEEQWVIFRGKDGRPGCVMNTCAHRACPLHLGSVNEGRIQCPYHGWEYSTDGKCEKMPSTKMLNVRIRSLPCFEQEGMVWIWPGNDPPKSTIPSLLPPSGFTIHAEIVMELPVEHGLLLDNLLDLAHAPFTHTSTFAKGWSVPSLVKFLTPSSGLQGYWDPYPIDMEFRPPCMVLSTIGISKPGKLEGKSTKQCSTHLHQLHICLPSSRNKTRLLYRMSLDFAPWIKHVPFMHILWSHFAEKVLNEDLRLVLGQQERMINGANVWNWPVSYDKLGIRYRLWRDAIERGVDRLPFSNQSESGS

SEQ ID NO: 42992 - protein, 796 aa, Oryza sativa
MGTGGGEGDKSAVLPLEALLALGLDQRTAENALVNSKVTANLAAVIAEAGISGCDKTVGNLLYTVATKYPTNALVHRPVLIDYIVSTKIKNPAQLDAALSFLTNTGPDSLDTGKFEEACGVGVVVSIEEIKSTVNEVLKHNMEAILEQRYHINVGNLCGQVRKRHPWGDAKATKDEIDKKLAEILGPKTDADNVKPVKKKKEKAAKVEEKKAAVVTAAPPSEEELNPYSIFPQPEENFKVHTEIFYSDGNIWRAHNSKEILEKHLKATGGKVMTRFPPEPNGYLHIGHAKAMFIDFGLAKERNGHCYLRFDDTNPEAEKKEYIDHIQEIVHWMGWEPYKVTYTSDYFQALYEHAVELIRKGLAYVDHQTAEEIKEYREKKMNSPWRDRPIEESLKLFEDMRRGLIAEGAATLRMKQDMQNDNKNMSDLIAYRIKFTPHPHAGDKWCIYPSYDYAHCMVDSLENITHSLCTLEFDIRRPSYYWLLVALGLYQPYVWEYSRLNISNTVMSKRKLNRLVTEKWVDGWDDPRLLTLAGLRRRGVSSTAINSFICGIGITRSDNSLIRVDRLEYHIREELNKTASRAMVVLNPLKVVITNLEDEKVIDLDGKMWPDAPADDASSYYKVPFSRIVYIEKTDFRLKDSKDYYGLAPGKSALLRYAFPIKCTEVVYGDNPDDIIEIRAEYDPSKTTKPKGVLHWVAQPAPGVEPLKVEVRLFDKLFLSENPAELEDWLGDLNPNSKEVIKGAYAVPSLATAVLGDKFQFERLGYFAVDTDSTPENIVFNRTVTLRDSYGKAGPK

SEQ ID NO: 42993 - protein, 402 aa, Oryza sativa; identical to SEQ ID NO: 42591

SEQ ID NO: 42994 - protein, 813 aa, Oryza sativa
MALDPADDPLLADCKYKLNHFRIKELKDVLHQLGLPKQGRKQELVDKIIAVLSDQQEQDSRLNGLPNKKMVGKETVAKIVDDTFAKMNGSTNAVPASRNQTDSGHIVKPKRKSDDSAQLDVKVRCPCGYSMANDSMIKCEGPQCNTQQHVGCVIISEKPADSVPPELPPHFYCDMCRITRADPFWVTVNHPVLPVSITPCKVASDGSYAVQYFEKTFPLSRANWEMLQKDEYDLQVWCILFNDSVPFRMQWPLHSDIQINGIPIRVVNRQPTQQLGVNGRDDGPVLTAYVREGSNKIVLSRSDSRTFCLGVRIAKRRSVEQVLSLVPKEQDGENFDNALARVRRCVGGGTEADNADSDSDIEVVADSVSVNLRCPMTGSRIKIAGRFKPCVHMGCFDLEAFVELNQRSRKWQCPICLKNYSLDNIIIDPYFNRITALVQSCGDDVSEIDVKPDGSWRVKGGAELKGLAQWHLPDGTLCMPTDTRSKPNIRIVKQEIKEEPLSEETGGRLKLGIRRNNNGQWEINKRLDSNNGQNGYIEDENCVVSASNTDDENSKNGIYNPEPGQFDQLTSNIYDLDSSPMDAHFPPAPTEQDVIVLSDSDDDNVMVLSPGDVNFSSAHDNGNAFPPNPPEASGICGEQPRGAGPDVTSFLDGFDDLELPFWESSSSQDAAGTQVTDNQCEMQNFIVNHQFLHEPILGVNLGGTAASNTLECEHDGALQACQSSDQDGDQNQTCHDGHSGDLTNLSIISTQDSLTNGKNASQKRTNCEDGTAGLDGSVVRSANGLRGEMPPLGQEQDRTVRQKLILTIESDSD

SEQ ID NO: 42995 - protein, 607 aa, Oryza sativa
MIRLWVVATWLIVCAAAHPGEQPLSRIAVERTVLAVNESAHVKASPWVLGLKGQNSEWVEVEFFHPSPSNDDWIGVFSPANFSAAICEPENKRQRPPVLCTAPIKYQFANFNNDGYNKSGKGYLKLQLINQREDFSFALFSGGLLKPKLIAVSNKVAFANPKAPVYPRLAQGKSWNEMTVTWTSGYDIKEAVPFVEWGAKGGRSFLSPAGTLTFDRNSMCGAPARTVGWRHPGYIHTSYLKDLWPDSLYTYRLGHRLPNSTLIWSKSYSFKASPYPGQDSLQRVVIFGDMGKAEADGSNEFNDFQPGSLNTTYQIIRDLENIDMVVHIGDICYANGYLSQWDQFTAQIEPIASTVPYMIGSGNHERDWPGTGSFYGNLDSGGECGVPAQTVFYTPAENRAKFWYATDYGMFRFCIAHTEEDWRPGTEQYKFIEQCLSSVDRQKQPWLIFLAHRVLGYSSCSYYEEQGTFGEPMGRDTIEELLQKYRVDLAFYGHVHSYERTCPVYQGQCVVNASDHYNGPFKATTHVVVGGGGASLSEFTTSKIKWSHYTDFDFGFVKLTAFNHSSMLFEYKNSRDGNVYDHFTISRDYRDILACSVDNCPRTTLAT

SEQ ID NO: 42996 - protein, 933 aa, Oryza sativa
MVPSGPPNPMGPGQPVGAASLLRTSSSLLSGGQQGMGSGGGMLPSQSPFSSLVSPRTQFGANGLLGGGSNVSSLLNRPFGNGGHMLGPGSMPGGGGLPMNTLQQQRGGLDGAGDLVGAGGSDSLSFPSSSQVSLGNQLGSDNLHPPPQHQQQQQHLDAMQDLQHQHQHQQQLPMSYNQQQLPPQPPQQPQATVKLENGGSTGGVKLEPQMGQPDQNSTAQMMRNASNVKIEPPQLQALRSLSAVKMEQQSSDPSAFLQQQQQQQHLLQLTKQNPQAAAAAQLNLLQQQRILQMQQQQQQQQQILKNLPLQRNQLQQQQQQQQQQQQLLRQQSLNMRTPGKSAPYEPGTCAKRLTHYMYHQQNRPQDNNIEYWRNFVNEYFSPNAKKRWCVSLYGSGRQTTGVFPQDVWHCEICNRKPGRGFETTVEVLPRLCQIKYASGTLEELLYVDMPRESQNASGQIVLDYTKAIQESVFEQLRVVREGHLRIVFNPDLKIASWEFCARRHEELIPRRSIIPQVSQLGAVVQKYQSAVQNSTNLSTQDMQNNCNSFVACARQLAKALEVPLVNDLGYTKRYVRCLQIAEVVNCMKDLIDYSRQNGSGPIASLHSFPRRTSSGGVNPQQSQQQQPEEQQSIPQSSNQSGQNAAPMTGVQASASANADVTSNNSLSCAPSTSAPSPSVVGLLQGSMNSRQDHPMSSANGPYTSGNSAAIPKVNSTTSLQSTPSTSFPSPVPTTSNNNMMPAPQNTNQLSSPTASSNLPPMQPPATRPQEPDPNESQSSVQRILQDLMMSPQMNGVGQLGNDMKRPNGLTSSVNGVNCLVGNAVTNNSGMGGMGFGAMGGLGPNHAASGLRTAIANNAMAISGRMGMNHSAHDLSQLGQLQQQQQHQHQHQHQHQQQQQQQQQQQHDLGNQLLSGLRAANSFNNLQYDWKPSQ

SEQ ID NO: 42997 - protein, 656 aa, Oryza sativa
MIPAISPMMDGAAPLLPETSPESRQQRDPERGKRRTPVLPAVVASAVVLLGLAALFLVYGFHDGGDGRAAVLAPGTVEVAASSSRGVVEGVSEKSTTPALRLGGGAVRDYAWTNSMLSWQRTAFHFQPPNNWMNDPNGPLYYKGWYHLFYQWNPDSAVWGNITWGHAVSRDLIHWLHLPLAMVPDHWYDINGVWTGSATQLPDGRIVMLYTGATEESVQVQNLAEPADPNDPLLREWSKAEANPVLVPPPGIGLTDFRDPTTAWRNPADSAWRITIGSKDRDHAGLALVYKTEDFLHYDLLPTLLHVVKGTGMWECVDLYPVSTSPAVEDGLETSTPPGPGVKHVLKASLDDDRNDYYAIGTYDGETDTWTPDNADIDVGIGLRYDYGKFYASKTFYDPVGRRRVLWGWIGETDSERADILKGWASLQSIPRTVMLDTKTGSNLLQWPVVEVENLRMRGKSFDGLDVSPGSVVPLDVGKATQLDIEAVFEVDTSAADGVVTEAGAAAYSCGTGGGAVGRGLMGPFGLLVLADDQLSERTAVFFYLVKGVDGNLTTFFCQDELRSSKANDLVKRVYGSLVPVLDGENLSIRILVDHSIVEGFAQGGRTCITSRVYPTKAIYESAKIFLFNNATNVRVTAKSLKIWELNSAYIRPYVD

SEQ ID NO: 42998 - protein, 421 aa, Oryza sativa
MAGTGSFKVTRISEGAVKPAAATPEETLPLAWVDRYPTHRGLVESMHIFRSGADAAPGVIRDALARALVFFYPLAGRIVEPEAGSPAIRCTADGVYFAEAAADCSLEDVRFLERPLLLPKEDLVPYPGDDRRGVEPHNTIMMMQITKFTCGGFVMGLRFNHASADGMGAAQFINAVGDMARGLPEPRVKPVWDREKFPNPSIKPGPLPGAAGAGARLHRPRLPHRLHRRPEGAVQGAQRQVLLRLRRADGEAVAMPHQGTQPRARRHREALLLRQRAPPAEAGQGVLRQLHLPGEDVSAERDGAVVVGDGGGGHDPAGEGEDGGGVLPVRQGGDGAGPVPDDVQLRVHLRLRLEQARVRRGGLRLRPAQVRRPARQQRLHRLRRHPQGAAAARRHADARQLRHQGTLGGVRPRHEGGPAMN

SEQ ID NO: 42999 - protein, 247 aa, Oryza sativa
MADYEQEQEMEVEALQAILMDDIKEIDPSESGLSTTARCFQIVLSPQDDDFDESAYVPVQLALIFAHTEKYPDEPPLLNVKSVRGMKSEDLASLKEKLEQEATENLGMAMVYTLVTSAQDWLSEKYGQNAGDGESEENEAEEEEVIVPHGEAVTVESFLAWRDRFEAELALQRAKLMPESALTAPKEKKLSGRQYFESGRHTMKGASTTADEEEEEEEDIDFDEDFDDDEEDMLEHYLAEQSGKSAA

SEQ ID NO: 43000 - protein, 359 aa, Oryza sativa
MRQKAASLPNVQLEQGTVTSLVEEDGTVKGVKYKTKSGEELKAYAPLTIVCDGCFSNLRRALCSPKVDVPSCFVGLVLENCQLPHANHGHVVLANPSPILFYPISSTEVRCLVDVPGQKVPSIANGEMAKYLKTVVAPQIPPEIYDSFIAAIDKGSIRTMPNRSMPAAPHPTPGALLMGDAFNMRHPLTGGGMTVALSDIVVLRNLLKPLRNLHDASALCKYLESFYTLRKPVASTINTLAGALYKVFSASPDQARNEMRQACFDYLSLGGVFSNGPIALLSGLNPRPLSLVAHFFAVAIYGVGRLMLPLPSPKRMWIGVRLISSACGIIFPIIKAEGVRHMSFPATVPAYYRAPRPME

SEQ ID NO: 43001 - protein, 275 aa, Oryza sativa
MAEPLSSSSQGSSVPSAQEERVVVTNKHGEKLVGLLQHMGSNKIVVICHGFTASKNDSIIVDLANALTKKGVGIFRFDFSGNGESEGEFQYGNYRKEADDLHSVISHLNQEKYDVKAIVGHSKGGDVVVLYASIYDDVRTVVNLSGRFHLEKGIEERLGKEFMNIIDKEGYIDVKTNSGKVLYKVTKESLMERLTTDMHKACLSISKECRFFTVHGSADEIIPVEDAYEFAKHIPNHKLHVIEGANHCYTAHRKELSDAVVDFITSSEDGDNSSA

SEQ ID NO: 43002 - protein, 212 aa, Oryza sativa; identical to SEQ ID NO: 30192

SEQ ID NO: 43003 - protein, 576 aa, Oryza sativa
MKAGERPKLVRGVRQESRRFRLLVIVVGFFLVSLTFVFVSKPDAILFSLNGKLPVEQAPTSILIQQKVNEPSGESRKTSTDALRGDPKVVDDEADAKPKGTGGGSEEEEGRVLSEPDPTSGMMEPTHNKDGNGHKSHQETLGGGGDGESKGNDEEGEHAEQKHKVTLPTVSNYTIHDAAEDTENAKQEGMNNVQQGSKPLCDFSNFRANVCEMRGDVRIHPTATSVLFMEPEGSQRDEVWKIKPYPRKGDEFCLSHITEVTVKSSKVAPECTKYHDVPAVIFSLTGYTGNLFHDFTDVLVPLFTTASEFNGEVQFLITDMALWWTIKYQTVLQKLSKYPVIDFSKDDQVHCFKHAIVGLHAYMEFTIDSTKAPHNYSMADFNRFMRGAYSLGRDSVTVLGEYPKIKPRLLIIKRHRTRMFLNLDEIISMAEELGFEVVIDEANVSSDISRFARLVNSVDVMMGVHGAGLTNCVFLPQHATLIQIVPWGGLDWISRTDFGNPAELMGLRYKQYSIGVDESSLTDQYPRDHEIFKNPISFHQRGFDFIRQTFMDKQNVKLDCKRFRPILLEALDNLNP

SEQ ID NO: 43004 - protein, 425 aa, Oryza sativa
MTRRANTRSRSIKSPSQQFPITQFMMLLRTAENAKQEGMNNVQQGSKPLCDFSNFRANVCEMRGDVRIHPTATSVLFMEPEGSQRDEVWKIKPYPRKGDEFCLSHITEVTVKSSKVAPECTKYHDVPAVIFSLTGYTGNLFHDFTDVLVPLFTTASEFNGEVQFLITDMALWWTIKYQTVLQKLSKYPVIDFSKDDQVHCFKHAIVGLHAYMEFTIDSTKAPHNYSMADFNRFMRGAYSLGRDSVTVLGEYPKIKPRLLIIKRHRTRMFLNLDEIISMAEELGFEVVIDEANVSSDISRFARLVNSVDVMMGVHGAGLTNCVFLPQHATLIQIVPWGGLDWISRTDFGNPAELMGLRYKQYSIGVDESSLTDQYPRDHEIFKNPISFHQRGFDFIRQTFMDKQNVKLDCKRFRPILLEALDNLNP

SEQ ID NO: 43005 - protein, 358 aa, Oryza sativa
MSRLKCALRGFDLRALLILLIGLPILIFVIYLHGQKVTYFLRPIWEKPPKPFKVLPHYYNENVSMANLCKLHGWKVRETPRRVFDAVLFSNELDILDIRWHELSPYVSEFVLLESNSTFTGLKKDLHFKENRQRFEFAESRLTYGMIGGRFVKGENPFVEESYQRVALDQLIKIAGITDDDLLIMSDVDEIPSGHTINLLRWCDDIPEVLHLQLRNYLYSFEFFLDDKSWRASIHRYRAGKTRYAHFRQTDDLLADSGWHCSFCFRYISDFVFKMQAYSHVDRIRFKYFLNPKRIQHVICRGADLFDMLPEEYTFQEIIAKLGPIPSTFSAVHLPAYLLEKVDQYSYLLPGRCMRESG

SEQ ID NO: 43006 - protein, 455 aa, Oryza sativa
MEDLQDCDCKSLVAVPGSVVLHLFRLFNQQDNSWQKYTLAYFLLVRNEYFSRDSRKHSDGKNQLLDCCDDSELDLDVLYADLDSKELELKLQKPVVKTQSKGDSSASGSNDCFFPGLHDDLAQDCLAWASRSDYPSLSCLNKKFNLLINSGYLYRLRRKYGIVEHWVYLACSLMPWEAFDPSRKRWMRLPRMPCDECFSCADKESLAVGTQLLVFGREYTGLAIWMYNLLARGWSRCTPMNLPRCLFASGSFGEIAIVAGGCDKNGQVLKSAELYNSETGHWETLPDMNLPRRLSSGFFMDGKFYVIGGVSSQRDSLTCGEEYNLETRTWRRIHDMYPGGTSASQSPPLVAVVNNQLYAADQATNVVKKYDKGNNTWNIVKPLPVRADSSNGWGLAFKACGDRLLVIGGHRVPRGEVILLHSWCPEDGNGGADWEVLSVKERAGVFVYNCAIMGC

SEQ ID NO: 43007 - protein, 430 aa, Oryza sativa
MAAGAVSALFLLDIKGRVLVWRDYRGDVSALQAERFFTKLLDKESDAEVLSPVVHDDAGVSYMFIQHNNVFLLTASRQNCNAASILLFLHRVVDVFKHYFEELEEESLRDNFVVVYELLDEMMDFGYPQYTEAMILSEFIKTDAYRMEVTQRPPMAVTNAVSWRSEGIRYKKNEVFLDVVESVNILVNSNGQIVRSDVIGELKMRTFLSGMPECKLGLNDRVLLEAQGRTTKGKAIDLDDIKFHQCVRLARFENDRTISFIPPDGSFDLMTYRLSTQVKPLIWVEAQVEKHSRSRIQITVKTRSQFKERSTATNVEIEVPVPEDSTNPNIRTSMGSAAYAPERDAMVWKIKSFPGGKEYMCRAEFSLPSITSEDGMPEKKAPIRVKFEIPYFTVSGIQVRYLKIIEKSGYQALPWVRYITMAGEYELRLI

SEQ ID NO: 43008 - protein, 206 aa, Oryza sativa; identical to SEQ ID NO: 28623

SEQ ID NO: 43009 - protein, 627 aa, Oryza sativa
MPPFHDYRDGGVLVMEPAASAALFGGVRSRKRARVTAVPPCGFVSAAAEAVEVVEEEGLTAAKRQKQQQQQREAPSLDALPDECLFEILRRVKGARARCASAAVSRRWLALLGGIRSSEIKREPAAAAVPDLNQVFVDEDEEEEDEFEVPLGGGCSSERCLEGREATDVGLMAVAVADALRGSLESLVIRGSHPTRGVTDAGISAAARGCPSLLSLALWHVPQGCPDLKVVTVEACPGVADEGLKAIGRCCAKLQSVNIKNCAHVGDQGVSGLVCSAAASLAKVRLQGLSITDASLSVIGYYGKAITDLTLARLPAVGERGFWVMANALGLQKLRFMSVSSCPGVTDLALASIAKFCPSLKQLNLKKCGQVSDGRLKDFAESAKVLESLQIEECNKVTLMGILAFLLNCSPKFKALSLVKCNGIKDICSAPAQLPLCKSLRSLTIKDCPGFTDASLAVVGMICPQLENVDLSGLGAVTDNGLLPLIKSSESGLVHVDLNGCENLTDATVSALVKAHGSSLARLSLEGCSRITDASLFAISEGCTDLAELDLSNCMVSDYGVAVLASARQLKLRVLSLSGCLKVTQKSVPFLGSMSASLEGLNLQFNFIGNHNIASLEKQLWWCDILA

SEQ ID NO: 43010 - protein, 122 aa, Oryza sativa
MDADAVAKAFVEHYYRTFDTNRPALVSLYQDGSMLTFEGQQFLGAAAIAGKLGSLPFAQCHHDINTVDCQPSGPQGGMLVFVSGSLRTGPDEHPLKFSQMFQLLPAGGNFYVQNDMFRLNYG

SEQ ID NO: 43011 - protein, 112 aa, Oryza sativa [sequence omitted]

SEQ ID NO: 43012 - protein, 109 aa, Oryza sativa
MTAADAEACAVAAAADIICSLRGADLAGWTPPWGTAAAKGKEVVVEEEEEELAWPTVARGKRSRSSRRRSPSGSGSAATKGRWARGSPASPLDYSGGSGSGSPLFCRQG

SEQ ID NO: 43013 - protein, 531 aa, Oryza sativa
MRIPRRKGVAGPLVGAPSRRAQVAAVFALALLLGVSVLYDSAHIAASLRRHGVGGGGSSGGGGGGGGDGARAYTNTKLSATTEEAEAEAAEVRSPPAQGVESAVEATDRGEAPPEQPVAADSGASSAETPPSLLEQVTETPPPSPSSSSAAAAAAEAQVGGDHGGESCDVYKGRWVYDEANAPLYKESACEFLTEQVTCMRNGRRDDDYQKWRWQPDGCDLPRFDAKLLLEKLRNKRLMFVGDSLNRNQWESMVCLVQSEAPWEKKSLVKNDSLNVFRLEEYNATIEFYWSPFLVESNSDDPNMHSIVDRIIKPTSIAKHAANWEGVDYLIFNTYIWWMNTPEMKILHGGSFSKKPVKYDEMERVAAYRKVLKTWSRWVEKHVDPKRSTVFFMSVSPVHMQSEGWGKPDAIKCFSETQPAINYTKKLEVGTDWDLFSTAHHVTKAMKRVPVHFINITALSEIRKDAHTSVNTLRQGKLLTKEQKANPRKFADCIHWCLPGLPDTWNEFIYGHIVSSPQRRPVEPIENQPQR

SEQ ID NO: 43014 - protein, 88 aa, Oryza sativa
MTVLSAILLNQTASRYEEEFPSTARKPNAKSAVGEIHELFIPWGVKEEPMLMFSWAWADLVQYSSKSCRMGKNRRGAIAIDQPFARTR

SEQ ID NO: 43015 - protein, 228 aa, Oryza sativa
MDNVLLDRRSSGSFEFPRRGGGFRPGHLGGGATPAMAPRQQYKGGAWSHASLPALPYARPPLYSSPSLPLLPSNQPPLLPLPPAATKYATFPYPPPPQQPPRSGRASTPSTRQRDRRRKPSRPPPSTETTKGGTQKKKPLERATPLPPAPAVAEALDDLEQEVARNFVQDLLHVLAPPPSSLPLPRFVITSSSSSPAAGNKVVPPPPPAPSCNAEAAAADSLRRVLRL

SEQ ID NO: 43016 - protein, 584 aa, Oryza sativa
MVDWASDSDNDKFEWDTDGEAETSSAPALRNIDAPGPSTRLPQDANGKANGSGALVAEFMGMGFPKEMILKAIKEIGDTDTEQLLELLLTYQAIGGDASVGNCSASACAPQTLEVDEEEDDTNWDEYDTAGNCDRTPHSDGSGDEDFFQEMSEKDEKMKSLVNMGFPEDEAKMAIDRCLDAPVAVLVDSIYASQEAGNGYSANLSDYEDTEFSSFGGRKKTRFVDGSKKRKRYGSGPSGNQVPFDGSHEEPMPLPNPMVGFSLPNERLRSVHRNLPDQALGPPFFYYENVALAPKGVWTTISRFLYDIQPEFVDSKYFCAAARKRGYIHNLPIENRSPVLPMPPKTISEAFPNTKRWWPSWDPRRQFNCLQTCMASAKLTERIRCALGRFSDVPTPQVQKYVLDECRKWNLVWVGKNKVAPLEPDEMEFLLGYPRNHTRGVSRTERYRALGNSFQVDTVAYHLSVLRDLFPNGMNVLSLFSGIGGAEVALHRLGIHMKTVISVEKSEVNRTILKSWWDQTQTGTLIEIADVRHLTTERIETFIRRFGGFDLVIGGSPCNNLAGSNRHHRDGLEGEHSALFYDYI

SEQ ID NO: 43017 - protein, 770 aa, Oryza sativa
MDLEAAHGAAAAPGKRRRRARESWGASLLLAYQSLGVVYGDVATSPLYVYKSAFAGDDIQHSAGNEEIYGVLSFVFWTLTLISLVKYVLIVLRADDGGEGGTFALYSLICRHVRAGLLPGGAGDELAVGGRRDARAMSRLRAMLGRYRVLQRLLLLFALLGTCMVIGDGVLTPAVSVYSAVSGLELSMEHEHHKYVQLPVTCAILIGLFALQHYGTHRVGFIFAPIVCVWLLCISAIGVYNIVHWNHHVYRALSPYYMYQFLKKTQTGGWMSLGGILLCVTGSEAMYADLGHFSQSSIKIAFMSVVYPALVLAYMGQAAYISQHHSFENAYHIGFYVSVPEKLRWPVLVIAILAAVVGSQAVITGTFSIIKQCSSLSCFPGVKIVHTSSTVHGQIYIPEINWILMILCLAVTLGFRNTKHLANAQGLAVITVMLVTTCLMSLVIVLCWNKSIFLALGFLIFFGTIEVLYFSASLVKFHEGAWVPITLSFIFMIVMCVWHYGTIKKYEFDFQNKVSVNWLLNLGPSLGIVRVRGIGLIHTELVSGIPAIFSHFVTNLPAFHQVLVFLCVKSVPVPHVQPEERFLVGRIGPKEYRLYRVIVRYGYRDVQKDDIEFEKDLVSSIAEFIRSGDSHHNGVLEDTDKSCEKLSSISNGIPLWMEDGEVDASASPHKETDTQIISPNRKKARFVLPKNAQVDSEVRRELQELMDAREAGMSFILGHSYMKAKSGSSFIKRIVINFFYEFLRRNSRGPSYAATIPHASTLEVGMVYQV

SEQ ID NO: 43018 - protein, 192 aa, Oryza sativa
MARSRMSESEGTLPLSSMSYRKMLLKHWRVQMEALLWTGLSLWNMHFVMMMRKGMDTAQEEEAVIDLQTGGTIAGGLQVLMAEGVRGAALTMEEAGRGAARTMAGVVTEVALIITVVQVRKGATKVMRGAAPLTTTTVNAVKPALAMIGPAVAHLRGTRENEVAPHDACAAPSCFRSMDALLLCTELLMLSL

SEQ ID NO: 43019 - protein, 963 aa, Oryza sativa
MAGNDNWINSYLDAILDAGKAAIGGDRPSLLLRERGHFSPARYFVEEVITGYDETDLYKTWLRANAMRSPQERNTRLENMTWRIWNLARKKKEFEKEEACRLLKRQPEAEKLRTDTNADMSEDLFEGEKGEDAGDPSVAYGDSTTGSSPKTSSIDKLYIVLISLHGLVRGENMELGRDSDTGGQVKYVVELAKALSSSPGVYRVDLLTRQILAPNFDRSYGEPTEMLVSTSFKNSKQEKGENSGAYIIRIPFGPKDKYLAKEHLWPFIQEFVDGALGHIVRMSKTIGEEIGCGHPVWPAVIHGHYASAGIAAALLSGSLNIPMAFTGHFLGKDKLEGLLKQGRHSREQINMTYKIMCRIEAEELSLDASEIVIASTRQEIEEQWNLYDGFEVILARKLRARVKRGANCYGRYMPRMVIIPPGVEFGHIIHDFEMDGEEENPCPASEDPPIWSQIMRFFTNPRKPMILAVARPYPEKNITSLVKAFGECRPLRELANLTLIMGNREAISKMNNMSAAVLTSVLTLIDEYDLYGQVAYPKHHKHSEVPDIYRLAARTKGAFVNVAYFEQFGVTLIEAAMNGLPIIATKNGAPVEINQVLNNGLLVDPHDQNAIADALYKLLSDKQLWSRCRENGLKNIHQFSWPEHCKNYLSRILTLGPRSPAIGGKQEQKAPISGRKHIIVISVDSVNKEDLVRIIRNTIEVTRTEKMSGSTGFVLSTSLTISEIRSLLVSAGMLPTVFDAFICNSGSNIYYPLYSGDTPSSSQVTPAIDQNHQAHIEYRWGGEGLRKYLVKWATSVVERKGRIERQIIFEDPEHSSTYCLAFRVVNPNHLPPLKELRKLMRIQSLRCNALYNHSATRLSVVPIHASRSQALRYLCIRWGIELPNVAVLVGESGDSDYEELLGGLHRTVILKGEFNIPANRIHTVRRYPLQDVVALDSSNIIGIEGYSTDDMKSALQQIGVLTQ

SEQ ID NO: 43020 - protein, 534 aa, Oryza sativa
MASPAAEGDAVSAGFAELERQQQLLASCTRLYKQLEEHFASLERGLAARSDSLRHKRRAAEARASAAMDSLRRREASIDGSVSRALDHLDDLASASSVPSDAAAAAEGVAESLRAMCARMDSAGFFGFVVARRKEVDALRAEMPPALKCCVDPAKFVMDAVADVFPVDRREAKNHTDLAWACVLILEAAVPALADPDPEIGAARLLVPRAARERARGMAREWKEAAERKGGVEWTKPPDAHAFLQHVATFAVAEREDRGIYRRIVVSFSWRRQMPRLALTLGLEEDMADIIEELIAKGQQLDAVNFAYEAGLQEKFPPVPLLKSYLADSKKTSCTVSDNSSTSSGQSGSNANKKEQSVLRAVIKCIEDRKLEAEFPLEDLQRQLEELEKAKTEKKKATSSASSGGSSGPATKRIRASNGGPMPPAKAGRLTNNACVSSTPAATTFVRSPSHTSYAMASPYPYDRPVGHGLYCNQSPPAIREPYVYPAKEVTNFAPGLPYSSPPISYPHAYGGYNNGMGAYNNGMAPAFHQAYYR

SEQ ID NO: 43021 - protein, 392 aa, Oryza sativa
MALDGPAERRDEAQAAMGNGNGVAPPPLRPAGRPSGAPACADRRLRLNPNMEHKPQDYSDVRGEYAPAVYSALERHLPPSVLDANREIKLQLMREVLGHYWPHGERNKVQRHREYRQRILNHYKPLHKELYKMRPSSFFLPTFLEAIRTNTEESFRSIMTEPVPGVYSFAMLQPNFCEMLLQEVENFEKWVHTMKFKIMRPNTMNKYGAVLDDFGLEVMLNQFMEQFIAPMSTVLYPEVGGGTLDTHHAFVVEYGKDRDVELGLHVDDSEVTLNVCLGKQFSGGELYFRGIRCENHVNSETQHEEMFDYSHVPGRAVLHRGRHRHGARPTSSGLRINLLLWCRSSVFREMKKYQKDFSGWCGECKREKKERQIHAVKATKLAFLRGAGGATI

SEQ ID NO: 43022 - protein, 122 aa, Oryza sativa; identical to SEQ ID NO: 31636

SEQ ID NO: 43023 - protein, 253 aa, Oryza sativa
MADYNRYGYGGYGSTPSAPPASSYGYTTTPSAPPASSSSSYGYGHGGGGYPSSTYSPPPPSSSQAYPMGMGGFLVFPPGTHPDVERAFRAVDRDGSGSIDERELQDALSSAYHRFSIRTVRLLLFLFNKPASHSPSRMGPAEFVSLWNCLGQWRGIFDRYDRDGSGKIEKDELREALRSLGYAVPPSVLELLIANYNNGVSSRGALDFDNFVECGMIVKGLTEKFKEKDTRYSGSATLSYDGFLSMVIPFIVP

SEQ ID NO: 43024 - protein, 561 aa, Oryza sativa
MTWEIPPEPHPPATKIFRQKALQTMLQQKADGTGNSLSFLLDGEYSGLIFVVKLDEYTWLRNVENGFDFYIPLTRADAEADKQKADDKSSQDDGLISDIRNLVVGLSSRRGQRAKNKVLQEDILQEIERLAAEAYSIFRSPTIDTVEESVYIDDSSIVKPACSGTGSGFEILCQGFNWESHKSGKWYVELGSKAKELSSMGFTIVWSPPPTDSVSPEGYMPRDLYNLNSRYGTMEELKEAVKRFHEAGMKVLGDAVLNHRCAQFQNQNGVWNIFGGRLNWDDRAVVADDPHFQGRGNKSSGDNFHAAPNIDHSQEFVRSDLKEWLCWMRKEVGYDGWRLDFVRGFWGGYVHDYLEASEPYFAVGEYWDSLSYTYGEMDYNQDAHRQRIVDWINATNGTAGAFDVTTKGILHSALERSEYWRLSDEKGKPPGVLGWWPSRAVTFIENHDTGSTQGHWRFPFGMELQGYVYILTHPGTPAIFYDHIFSHLQPEIAKLISIRNRQKIHCRSKIKILKAEGNLYAAEIDERVTMKIGAGHFEPSGPTNWVVAAEGQDYKVWEVSS

SEQ ID NO: 43025 - protein, 299 aa, Oryza sativa; identical to SEQ ID NO: 33225

SEQ ID NO: 43026 - protein, 128 aa, Oryza sativa
MWLHTHLIQDMLSICRETFKGSVHYAWTSVPTYPSGVIGFLLCAKEGPPVNFLTPANPIEKLEGAMEAGRDIRFYNSEMHRAAFVLPTFARRELEAYCTTVEREQQEETTAEPLKMNIMQNSEILTAS

SEQ ID NO: 43027 - protein, 578 aa, Oryza sativa
MVIPWCSSMMRLLWFLFALLLARSVADAATANYTFTVESMRVSRLCNSTDIIAVNGLLPGPMIEVNEGDAVAVEVINGSPYNLTIHWHGILQLLTPWADGPSMVTQCPIQPNSSYTYRFNVTGQEGTLWWHAHSSFLRATVYGALIIRPRNGSAYPFPAPDQEVPIVLGEWWSRNVVDIESDAVSSGQLPRESDAFTVNGVTGELYQCANDTFTVDVQPNTTVLLRVINAGLNTHLFFKVAGHAFTVVAVDACYTANYTTDTLVLAPGHTVDALMVTNASAGSYYMAVQAYDSLSPTTMAVTDDTTATAIVHYNTTSTKKNATPVMPTMPQSSDSATANAFYFGLRGPPSPSAPAVPTKVDVNMTIELGLGQLPCDSTQSSCSGKSVAAAMNGVSFRLPSQMSLLEAQFNRTPGVYTADFPDAPQPSGTPMVEGTKVRRLKYNSTVEIVLQNPTAFPSENHPIHLHGFNFFVLAQGLGNFTPGNVSGYNLVDPVSRNTLAVPTGGWAVIRFVANNPGMWFFHCHLDAHVPMGLGMVFAVDNGTTPDSFLPPPPADLPICRSARTCKILALVSNCNALS

SEQ ID NO: 43028 - protein, 121 aa, Oryza sativa
MDANSLEIGTNVFLKSWKNRNKNVVVASIVSCDPTRKVAGIELGTEYLMVHVHFPLAKYEELIRPYKGYKIIGNVVRLDIAWPAIFVRCYFSNSLDVIFFLPILYQWLFFFLLQVDKINGS

SEQ ID NO: 43029 - protein, 247 aa, Oryza sativa
MSSRSPPPKDRRIRTERTSYRDAPYRRDSRRGPSRFPNDLCNNCKRPGHFARDCPNVALCHACGLPGHIAAECSSKDLCWNCKEPGHMANSCPNEGICRNCGKSGHIARECSAPPMLPGEMRLCSNCYKPGHLAAECTNEKACNNCRKSGHLARNCPNEPVCNLCNVSGHLARECPKSDAINERGGPPPFRGGYSDVVCRACNQVGHMSRDCMAGAFMICHNCGGRGHMAYECPSGRLMDRFPPRRF

SEQ ID NO: 43030 - protein, 89 aa, Oryza sativa
MRDLSKNNFMSSPAPGDGFPIVTSLTTLFMNRDQLTGTNHIEFSANGPFKYQVAYQNLGLLGDDREWYFAIADVASCALPYQLCLPVKI

SEQ ID NO: 43031 - protein, 480 aa, Oryza sativa
MCVGKTVIDEMAFSIHGENKHFGTPTNPAAPDRVPGGCSSGSAVAVAAGIVDFSLGIDTIGGVRVPGSYCGVLAFRPSHAVVPNNGVIPVAPSLDAIGWFARDPSVLRRVGHLLLRLPYADIRQPRHFYIADDCFEMSKVHARRLTQVVTKSVEKLFGRQVLGHVNLENYLASRIPSLRNNSNGHGDSKFSSLLALSRAMQFLHKHEFKDQHMEWINSVKPAVDACIVGNLSDDGESTINNSQDARKEVRAALGALLKVDGILVIPTVLGCPPKLNARELSSQDYNVQTSCLTSLASMSGCCQVTVPLGTHDKCPVSVSLIARHGGDRFLLDTIQTIYATIQEQVDALAKSNVSSKQAMSEEAAEAAKEKGNIAFKEKQWQKAINFYTEAIKLNNKVATYYSNRAAAFLELASYRQAEADCTSAIDIDPKIVKAYLRRGTAREMLGYYKEAVDDFSHALVLEPMNKTAGVAINRLKKLFP

SEQ ID NO: 43032 - protein, 816 aa, Oryza sativa
MAEAGPSRPAAAAAVAAGDFPELLAFCARAEALIAELLLLSDRAPSQFADRRFHPVLFDFRYFDSPGEFEARIEGNMELEALEDELRESCGSYMRRFFALLDAAVAYHDELCSYLNDLQEGLYVHCTLDGVLESNWACQLLTESMTLFGCMALLMEHRISGLLRERLLVAYLRHERCFSFPNVERICKLCRRHVTTPPSPGASGSSLHTVEIISVQKPEDLLRRFQFPELIVDAVITCLRNGDVYNNVRFYPDPQHRTTALSLQGGHMYVLLFYSRDLLHNGLAMREIVDRFFKDNWVVPIFLHFSVDLLVSWDAFKEAKSSLVSCLSPTFVRDRSLYHYTKVSSLLADLDSHMHAVNKEYVLDNSLNLLSIIRECNCTLRWLLLHRMTNDKKARDLVICLGSSQHADEGKLLQLLMKTAKLEFEVKELHAELLKTRKSMWYEKRHDALECMKDLSQNYLGTWAASCKLKNKSIKDWLEHLSSEVSSLDYATIGNSGRIIHRVLSTLKDIELLHQIKENIQIKHGFSKIQKNLHDMIKVLNLNQESISVFSVITDGKYAWGYLTYFEELLKKKISQDPSESLFLHTMFLKFQSWLDAPLQRIKQYESPDLQYVSTYYASKYAAKIFAVLDIIPAILLKISIDVDYINAEQSTHLINRINKETLEDLMQLDQQLCQAQQAAKLCIVSEGLLNMSKNFDGLIDLNLGGWLKQMIKKELVSQLQGKLKALSLLIYGDIEGNLMSLSNYMLSQMQRMEFLQHILHIDGCSIWEETLTAVLEECAKREVLEFMGCMQPSTNMVKPSNHMSNPGTFFGNILD

SEQ ID NO: 43033 - protein, 396 aa, Oryza sativa
MSWWWAGAIGAVKKRQEENAAATEPSFQSVALVVGSTGIVGTSLLDILPLQDTPGGPWKVYAVSRRPLPPWSPPASPAVTHLHLDLADSAAVAEVLTPLTDITHVFYVAWSAHPTEAQNREVNSAMLRNILSVVVPNCPALVHVCLQTGRKHYIGPFEVIGKIAAPDPPFTEDMLRLDCPNFYYDLEDVLFNEVSRRDGAVSWSVHRPTVVFGFSPRSAMNVVGSLCVYAAICRKEGAVLRWPGSRVAWEGFSDASDADLIAEHEIWAAVEPFAKNEAFNCSNGDLYKWKLLWPMLADQFGVEWSGYEGEESSFKLADAMSGKEAVWAEIVKENDLMDTELEEITNWWFVDAEFGVRSEHLDSMNKSKEHGFLGFRNTVNSFNTWIEKMKVFKIVP

SEQ ID NO: 43034 - protein, 38 aa, Oryza sativa
MPSLSCHNLLDLVAAADDAAPSQRPRQVQLRVSFEGSL

SEQ ID NO: 43035 - protein, 636 aa, Oryza sativa
MDGCDCIEPLWPTDELLIKYQYISDFFIALAYFSIPLELIYFVKKSSFFPYRWVLIQFGAFIVLCGATHLINLWTFTTHTKTVAMVMTVAKVSTAVVSCATALMLVHIIPDLLSVKTRELFLKNKAEQLDREMGLIRTQEETGRHVRMLTHEIRSTLDRHTILKTTLVELGGTLGLEECALWMPSRSGSSLQLSHTLRHQITVGSTVSINLPVVNQVFSSNRAIIIPHTSPLARIRPLAGRYVPPEVAAVRVPLLHLSNFQINDWPELSAKSYAIMVLMLPSDSARKWHVHELELVEVVADQVAVALSHAAILEESMRARDLLMEQNVALDLARREAEMAIRARNDFLAVMNHEMRTPMNAIIALSSLLLETELTPEQRLMVETVLKSSNLLATLINDVLDLSKLEDGSLELEIKAFNLHAVFKEVMSFIKPIAAIKRLSVSVMLAPDLPLCAIGDEKRLMQTILNISGNAVKFTKEGHITLVASVVKADSLREFRTPDFHPTASDDNFYLKVQIKDTGCGISPQDLPQVFTKFAQSQPGGNRGYSGSGLGLAICKRFVTLMGGHIWLDSEGTGRGCTVTFVIQLGICDNTNAYQQKLIPLVWPSSGDADFVGPVPNAPNEEKGQASLKSRYQRSI

SEQ ID NO: 43036 - protein, 246 aa, Oryza sativa
MPYQPQPQQPAGYSSHQAFGLVPMVIETTSRGERAYDIFSRLLKERIVLIHGPIANETASLVVAQLLFLESENPLKPVHLYINSPGGVVTAGLAIYDTMQYIRCPVTTLCIGQAASMGSLLLAAGARGERRALPNARVMIHQPSGGAQGQATDIAIQAKEILKLRDRLNKIYQKHTGQEIDKIEQCMERDLFMDPEEARDWGLIDEVIENRPASLIPEGATGVDLPHHSAAGVGGRGRDVEEPSAV

SEQ ID NO: 43037 - protein, 217 aa, Oryza sativa
MTSVVHDVSGNHGADERQKQQRQGEPEDQQEASVTSTDSHTMVATPSTDYATPYAHHDMAHAMGQIAYANIDPYYGSLYAAYGGQPMMHPPLVGMHPAGLPLPTDAIEEPVYVNAKQYNAILRRRQSRAKAESEKKLVKGRKPYLHESRHQHALKRARGAGGRFLNSKSDDKEEHSDSSSRDKQDGVAPRDSGQPSTSPSSKGASSAKQNKKSKTSN

SEQ ID NO: 43038 - protein, 707 aa, Oryza sativa
MDVSVPPTNYPKSLSSIIKCHRRRAAINNCHSVVSHPPLSHSNHHHRSLRVRSSAAVAPPLPPPLVVPMTTPKPSPTIRRLDVASPVPADIDIANAVSPLPIADIAAELGLRPEHFDLYGKYKAKVLLSVLDELKGQQDGYYVVVGGITPTPLGEGKSTTTVGLCQALGAFLDKKVVTCLRQPSQGPTFGIKGGAAGGGYSQVIPMDEFNLHLTGDIHAITAANNLLAAAIDTRIFHEASQSDKALFNRLCPPNKEGKRRFADVMLRRLIKLGISKTDPNELTPDEVRRFARLDIDPESITWRRVMDVNDRFLRKITIGQGPDEKGMVRETGFDIAVASEIMAVLALTTSLADMRERLGRMVIGNSKAGEPITADDLGVGGALTVLMKDAIHPTLMQTLEGTPVLVHAGPFANIAHGNSSIVADKIALKLVGKGGYVVTEAGFGSDIGTEKFMDIKCRYSGLMPQCAIIVATIRALKMHGRGPDVVAGKPLDHAYVSENVALVEAGCVNLAKHIANTKSYGVNVVVAINKFASDTEAEMDVVRNASLAAGAFDAVVCTHHAHGGKGAVDLGLAVQRACESQADPLKFLYPLESGIKEKIESIAKFYGASGVEYSEQAEKQIEMYTKQGFSNLPICMAKTQYSFSHVPSMKGAPSGFVLPIRDVRASIGAGFIYPLVGTMSTMPGLPTRPCFYEIDVDTATGKVMGLS

SEQ ID NO: 43039 - protein, 435 aa, Oryza sativa
MAGGDDWSKRTIMEESLQPPAHGAAATTPWVLLDIRAFMANHRNATTAMSETRSGHPIEVSSWTAPPPRVSYICVHCPGLDSKKFATEPTIIAAEADLLLIRVAMGRRNIRFRSSFHDYFVYQATTPTPKLTLLPPPPIDRFIDHELGLLRCCASPDYIVAALCNTFESGYFEYDLHIYCSGADAWTCHPISLHGLVDTSFTHINTKAITIGGKAGTMGWVDLYRGILFCDLLRDTTELRYFPLPPPLSPNNSLTGSPRPHRDIALVQGRIKFIETRLHVKPGSIINGTFISQGWTAATWTAPDTNPWNQGWRQDCKLTASDISVDDSKMNFELLPKLFDDQGTPQPTLERLHVGHPTLSLHSDDIVCFMAKADQWDDDAWVLAVDMKNKRLKVVAEFGAERTLGIGYAYMSSNISGYLRTAPGIEGSLKRQGVC

SEQ ID NO: 43040 - protein, 440 aa, Oryza sativa
MEMNTRLQVEHPVTEMIVGQDLVEWQIRIANGECLPLSQEQVPLNGHAFEARIYAENVPRGFLPATGTLHHYRPVPSTATVRVETGVEAGDTVSMHYDPMIAKLVVWGESRNAALVKLKNSLSNFQIAGLPTNVGFLQELAGHSAFEKGLVDTHFIERYQNDLLSTSTQALSGSHEAEELGAILAAACICKKDHVSSEVSLRMLCGCPLILSCNILLVWTDNDIILLADDKKLSMWYAHPPFRMHHFAKRLIEFELDRELGGSSDDLLKLSVTYRSDGTYFVETEDGSSPGLDVKVDSRGDHDFRVDVGGLQTDVTLAFYSKDNCNHIHIWHGKHHHHYRQTLRAEQSPDDSSQPSASSEARSHPKGSVLAPMAGLVVKVLLKDGARVEEGQPVMVMEAMKMEHVVKAPCAGYVEGLKATAGQQVFDSSVLFTVKENKPN

SEQ ID NO: 43041 - protein, 671 aa, Oryza sativa
MGGGSTAPLLAAFACVFLAVFPPVASGDAATLESVPDLVKAMYINVESFPCVRLLNHSGQVGCSNPGHDKVIAPIVRFGNRNDQLVQPSAVLLPLNQMTDFFLRVSNDPELYRKIAGVLVEANGVDNMLEFSPDRKFPQQAFAPYSNLSHHWNPTGSGIMWNKYDFPVFLLSEESTQTLQNLADKNEKSANGYLANVAEFDLVMQTTKAGTHDSESCLREQSCLPLGGQSVWTSLPPISNSSTKHQKPIIMVTASQDSASFFRDRSLGADSPISGLIALLTAVDALSHLHDISNLKKQLVFAVFNGEAWGYLGSRKFLQELDQGADSVNGISSLLIDQVLEIGSVGKAISQGYPLFYAHAAGNSSISMKMVDALQSASESLGSDNVKVKPAASSNPGVPPSSLMSFLGKNSSTPGLVLEDFDSQFSNRFYHSTLDGPANVNSSSIAAAAALIARSLYILASADLPIDLITLNTIKVNVSLVEELIGCLLKCDPGLSCGIVKSFISPSNSCPSHYVGVFQDLPAGTQFPSYADDISRFIWNFLADRTSSLAGNSSSCTGQCHDEGEICVGAEVEGGGRCVVSTTRYVPAYSTRLKFEDNVWHVLPVNSSDPFSAADPVWTESFWNTIGLRVYAVQATSYDWLVLLIGIIITVASYFAVIVGRSYISKIIKRD

SEQ ID NO: 43042 - protein, 660 aa, Oryza sativa
MAAQVQAVPAAEGGGAPPQANGVVAAGSAAAAAATFQATSLYVGDLDVSVQDAQLFDVFSQVGSVVSVRVCRDVNTRLSLGYAYVNFSSPADAARALEMLNFTPINGKPIRIMYSNRDPSSRKSGAANIFIKNLDKSIDNKALYDTFSVFGNILSCKVATEMSGESKGYGFVQFELEEAAQNAISKLNGMLLNDKKVYVGPFVRKQERENVSGNPKFNNVYVKNLSESTTEDNLKEIFGKFGPITSVVVMREGDGKSRCFGFVNFENPDDAARAVEDLNGKKFDDKEWYVCRAQKKSEREMELKEKFEKNIKEAADKNQGTNLYLKNLDDSIDDDEKLKEIFADFGTITSCKVMRDLNGVSKGSGFVAFKSAEDASRALVAMNGKMIGSKPLYVALAQRKEERRARLQAQFSQMRPMVMPPSVAPRMPMYPPGVPGVGQQLFYGQPPPAFVNPQPGFGFQQHLIPGMRPSVGPIPNFVMPMVQQGQQPQRPAGRRAGTGGIQQPMPMGHQQMLPRGSRGGYRYASGRGMPDNAFRGVGGLVPSPYEMGRMPLSDAGAPPQVPIGALASALANSPPDQQRLMLGESLYPLVDQLEHDQAAKVTGMLLEMDQTEVLHLIESPDALKAKVAEAMEVLRNAQQQQANTPTDQLAALTLSDGVVS

SEQ ID NO: 43043 - protein, 473 aa, Oryza sativa
MAPHPDGSNRIFLGSQPGRIWLATVPDQGSGGILQFDGTSPFADLTDQVHFDSQFGLMGMAFHPNFATNGRFFASYNCDRTKSPSCSGRCSCNSDVGCDPSKVGTDNGAQPCQYQVVVSEYSAKGSSANISEVTSADPSEVTRIFTMGLPYTSQHGGQILFGPTDGYLYLMMGDGGGKGDPFNFSQNKKSLLGKIMRLDVDNPPRQSEIANQSLWGNYSIPKDNPYTDDSDLEPEVWALGLRNPWRCSFDSARPSYFYCADVGQDQYEEVDLISKGGNYGWRAYEGPLVFNPPSAPGGNTSLNSINAIPPIMGYSHSDVNKKIGSASIIGGNVYRGSTDPCLVGRYLYADLYASAMWTGTEAPESSGNYSSSLISFSCSKSSPIACDTAAGSPLPSLGYIYSFGEDNNKDTYVLSSKGVYRVVRPSLCGYTCPTEKPATNTGTTTPSSAASVTGKQMMGALLLSVLMFWVLVR

SEQ ID NO: 43044 - protein, 146 aa, Oryza sativa
MGLLDQLWDDTVAGPRPDSGLGKLRKYASFSPSSSSSTMAASPSPISAAAAAADAPAVTRSITILRPPALSVTSPRGSESGPSTPSSPASVPDSPFGSAPTPKGSEGWKKLRRGAARMADGVDASAGGQPRSPTVYDWVVISSLDR

SEQ ID NO: 43045 - protein, 416 aa, Oryza sativa
MERDFLGAIGKDEEQRRHAEERKESDYFGAGGGAAAAAMDWSFASRAALMSFRSSSSAAAAAAREETRELAFPHFSALDGAKMQQASHVLARQKSFGAESHGIPQYAAAAAVHGAHRGQPPHVLNGARVIPASSPFNPNNPMFRVQSSPNLPNAVGAGGGAFKQPPFAMGNAVAGSTVGVYGTRDMPKAKAAQLTIFYAGSVNVFNNVSPEKAQELMFLASRGSLPSAPTTVARMPEAHVFPPAKVTVPEVSPTKPMMLQKPQLVSSPVPAISKPISVVSQATSLPRSASSSNVDSNVTKSSGPLVVPPTSLPPPAQPETLATTTAAAIMPRAVPQARKASLARFLEKRKERVTTVAPYPLAKSPLESSDTMGSANDNKSSCTDIALSSNRDESLSLGQPRTISFCEESPSTKLQI

SEQ ID NO: 43046 - protein, 224 aa, Oryza sativa; identical to SEQ ID NO: 33107

SEQ ID NO: 43047 - protein, 542 aa, Oryza sativa; identical to SEQ ID NO: 33358

SEQ ID NO: 43048 - protein, 245 aa, Oryza sativa; identical to SEQ ID NO: 32993

SEQ ID NO: 43049 - protein, 396 aa, Oryza sativa
MRGGGGGGKEVEERGKVMGPLFPRLHVNDAAKGGGPRAPPRNKMALYEQFTVPSHRFSGGGGALASARGSLARSTSAASQSQVYGCDMPLFEPFNVPSNGPGQSVEKMNSNSVNRQINGSRKDSGMLSTQPKGIDKYGSGSRAECAPQQRVEKGIKSSSGRKLADDDEFIVPSVFSARFPQYSTKERAGVQEESTPLVALSPHKSPPAVSKSPTKCYNTVSKNLERINVSDVKSRGSQKDKETGPAQTLKNVEVEHFSSFEASKDMFGSKHAKVCPKTGTINDLDEPHLENSGHQATSRSGSSVKFQNPPVRRNTISAKPSPGIENTNGHCNLPQGGLKEAGTKRKRLEAQDNAEKIDDLSDSSVECITAWEISPDEIVGAIGAKHFWKARRAIIK

SEQ ID NO: 43050 - protein, 610 aa, Oryza sativa
MKYSKEAKPERAAGGRSRAVPVALLLVVLCAFSFYLGGIYSTGRSLLDVNGIVVKGASSSSSASAVAIQKDTNTKAVVVFPECPADYQDYTPCTDPKRWRKYGNYRLSFMERHCPPAVERKECLVPPPQGYKAPIRWPKSKDQCWYRNVPYDWINSQKSNQHWLRKEGDKFIFPGGGTMFPNGVGAYADLMAELIPGMTDGTVRTALDTGCGVASWGGDLLGRGRGILTLSLAPRDNHEAQVQFALERGIPAILGIISTQRLPFPSAAFDMAHCSRCLIPWTEFGGLYLLEVHRVLRPGGFWALSGPPVNYENRWHGWNTTAAAQKADLDRLKKTLASMCFKPYSKKGDIAVWQKSTDPACYDKLTPVSSPPKCDDSVDPDAAWYVPMRSCLTSPSSTSSRYKKLALDATPKWPQRLAVAPERIATVPGSSAAAFKHDDGKWKLRTKHYKALLPALGSDKIRNVMDMNTVYGGFATSLIKDPVWVMNVVSSYGPNSLGVVFDRGLIGTNHDWCEAFSTYPRTYDLLHLDGLFTAESHRCEMKFVLLEMDRILRPTGYAIIRENAYFLDSVATIAKGMRWNCDKHDTEHKADKEKVLICQKKLWSGKNTQH

SEQ ID NO: 43051 - protein, 731 aa, Oryza sativa
MKFYLRYIIWLAYLSSDALAIYALATLFNRHKKQDYGHAHNTSILEVLWAPIFLIHLAGQDSITAYNIEDNELWTRHALTSLSQITIAIYVFCKSWPGGDRRLLQAAILLFVPGVLKCLEKPWALSSASINSLVSSPKNVRRTTNREVKKDPIQDFIDKVNESRLEDGRWEESSSPADFKPSELFVDLASPSSDDRLSKLLSFLQREGDESYILLQKSLYETFDLLYTKEKMFPIILSALKRQQNYVNTNVDTDEGKKEQETLKGFCGSMLRGLLPYLSFVAIGLFHQSHRKAYNHTDVKVTYTLLCCTAVLELYGPTLQKILTSGQARVQKTSFNMNSPKSVGKVNHAKHDVQAKSKAKGKLPVYDIMDDMVSQYSLLGYFVRNRKHSVIMGVAEFLSCKDYLDQRWRMKSCSSSRNITNLVLGHVKRWWNDEITNVSCYRKFNDNRGQWTLESEVFLQQLGWSLEGAFDESVLLWHLATDFCYYHICGSHDCEHATKTCFQGTSDLKSESPTFCEESIHQGRAVHCREMSNYMMYLLVVNPEMLMAGSRRNLFTDAYNQLKGMFNKKSTPLNEGELAGTIISEVQVHVQQPIKEKTIEDKTPAPSNKTGLIDDAWSIAEVLLNLHDEEKMWRVIEGVWVEMLCFSAARCRGYLHAKSLGTGVEFLSYVWLLMHYMGMETLAEKLARAELPNGACSGDSRTTHAEHSSGKEQVAGASSNDGITVVVDKNG

SEQ ID NO: 43052 - protein, 534 aa, Oryza sativa; identical to SEQ ID NO: 42896

SEQ ID NO: 43053 - protein, 641 aa, Oryza sativa
MMGGGLVMDQGMMFPGVHNFVDLLQQNGGDKNLGFGALVPQTSSGEQCVMGEGDLVDPPPESFPDAGEDDSDDDVEDIEELERRMWRDRMKLKRLKELQLSRGKDPAGGVVGDPSKPRQSQEQARRKKMSRAQDGILKYMLKMMEVCRAQGFVYGIIPEKGKPVSGASDNLRGWWKEKVRFDRNGPAAIAKYQADNAVPGFESELAAGTGSPHSLQELQDTTLGSLLSALMQHCDPPQRRYPLEKGVPPPWWPTGDEEWWPELGIPKDQGPPPYKKPHDLKKAWKVSVLTAVIKHMSPDIEKIRRLVRQSKCLQDKMTAKEISTWLAVVKQEEELYLKLNPGARPPAPTGGITGAISFNASSSEYDVDVVDDCKGDEAGNQKAVVVADPTAFNLGAAMLNDKFLMPASMKEEATDVEFIQKRSASGAEPELMLNNRVYTCHNVQCPHSDYGYGFLDRNARNNHQYTCKYNDPLQQSTENKPSPPAIFPATYNTPNQALNNLDFGLPMDGQRSITELMNMYDNNFVANKNLSNDNATIMERPNAVNPRIQIEEGFFGQGSGIGGSNGGVFEDVNGMMQQPQQTTPAQQQFFIRDDTPFGNQMGDINGASEFRFGSGFNMSGAVEYPGAMQGQQKNDGSNWYY

SEQ ID NO: 43054 - protein, 568 aa, Oryza sativa
MSSAAIAISPMVEEFALLPICFDGSRSPHCLSGSQLQDSIIIFLAVPGAPPMPMSVLGSESIASVKLRIQRFKGFVVNKQRLVLDGHELARNNCHVKDYGLADGNVLHLVIRLADLRLINIETTSGKKFQFQVDQSRNVKYLKSKLAVEGDEDLGEDHKLECDGKELEDHQLIADISKKDDAVIHLFIRKPAKLRTQQVDKDTVVTVVTPQEKENLQNEAHAVNPAKPAGARPALVEPIIVNHKVKLSLEVMRMISSAIAGLENGYLPVMSAEGSGGVYFMQDASGEKNIAVFKPRDEEPMAKNNPRGLPVSTDGEGMKRGTLVGEGAFREVAAYILDHPIGDHESEERIGFSGVPPTALVRSLHRGKSFKIGSLQMFIQNNGSCEDMGPRAFPVKEVHKIAVLDLRLANADRHAGNILVCKDEEGGNYKLVPIDHGYCLPEKFEDCTFEWLYWPQAREPFSDETIAYIKSLDAEEDIKLLKFHGWELSARCARVLCISTMLLKKGAARGLTPYDIGRILCRETVNRDSEIEDIVQEAEGHVLPGSSEVIFLETVSEIIDRHLDKKFA

SEQ ID NO: 43055 - protein, 454 aa, Oryza sativa
MDETGAAEAIGMEAPPSPTAMATSGSCVVEIPTDITLSHDDGERFPGEISMVRPQRHSIYRVPEYIKDMTNRDAYRPQVVSLGPFHYGEPPLKPMEAHKQRAVAHMVSRSGKPRQEFTAAVEGIAEQLRGAYENLGEEWSGGRFVELMVTDGCFLLEVMKDEVEVQGYGSDDPVFSKHGRLYLYSYIISDMLLVENQLPLLLLQKLTLVADPDTEDDRGINHRVLDLLSYTTTPTAPTTPVDEFLGLHPLDVLQKSVRGTRQYRQRPIGDGHMPSAAELREAGIHFKVSTGEGFAGTVSFERGVLRVPKIFLYDDAERMFLNLMAFEQLRPGAGNEVTAFVSFMDDLINTAKDVRLLRAKEIIESGLGSDEAVANLINNTLTKGSVMDEDSSLNDVMSEVDAYCKMRRNRWRAILLHTYFSNPWVFISLVAATVLLIATVIQTVYAILSFNSKT

SEQ ID NO: 43056 - protein, 193 aa, Oryza sativa
MAKLSCLLIVSFAVVAALAATDDDAAAAAEGITVAEASSDPENKCVYTIYVRTGTIWKGGTDSVIGVTLLGADGSGVRIRDLERWGGLMGDGHDYYERGNLDIFSGRGPCMRQAPCRMNLTSDGTGPHHGWYCNYLEATVTGPHLGCAQQLFTVEQWLATDASPYRLYAVVDNCNKAKDAAAADADEPRVTVL

SEQ ID NO: 43057 - protein, 509 aa, Oryza sativa
MGTRSVALVLLAAVLLQALLPASAAEGLVRIALKKRPIDENSRVAARLSGEEGARRLGLRGANSLGGGGGEGDIVALKNYMNAQYFGEIGVGTPPQKFTVIFDTGSSNLWVPSAKCYFSIACFFHSRYKSGQSSTYQKNGKPAAIQYGTGSIAGFFSEDSVTVGDLVVKDQEFIEATKEPGLTFMVAKFDGILGLGFQEISVGDAVPVWYKMVEQGLVSEPVFSFWFNRHSGEGEGGEIVFGGMDPSHYKGNHAYVPVSQKGYWQFEMGDVLIGGKTTGFCASGCSAIADSGTSLLAGPTAIITEINEKIGATGVVSQECKTVVSQYGQQILDLLLAETQPSKICSQVGLCTFDGKHGVSAGIKSVVDDEAGESNGLQSGPMCNACEMAVVWMQNQLAQNKTQDLILNYINQLCDKLPSPMGESSVDCGSLASMPEISFTIGGKKFALKPEEYILKVGEGAAAQCISGFTAMDIPPPRGPLWILGDVFMGAYHTVFDYGKMRVGFAKSA

SEQ ID NO: 43058 - protein, 579 aa, Oryza sativa
MADSIELARRLCLQPPARRTGTGRCRPRGRLGAPSLRVPRPPLSLSLSLWSSLRCRALDSTRPVAVEGGLGDEEDEDEEGESYFALTSSRLSRVDYLGESTKGDLNVRREHLDAFGGNGKSTLHGPIEEIAWQEAREAESLLRELGIADPFSVRHSPRGIFCTRTLNLRSISVIGYDMDYTLIHYNVMAWEGRAYDYGMANLKGMGFPVDDLEFDPDLVIRGLIMDKDKGNLVKADRFGYIKRAMHGTQMLSTSAVSEIYGRELVDLRKESRWEFLNTLFSVSEAVMFMQMVDKLDQGLVPAELGPLDYKGLYNAVSRALFRAHVEGQLKSEIMAEPERFVEPDPELPLALLDQKEAGKRLLLITNSDYHYTNKMMNHAFNRFLPNDMAWRDLFEMVIVSARKPEFFQISHPLYEVVTNDGLMRPCFKANSGGLYSGGSAQMVEKSLDIHGDEILYVGDHIYTDVSQSKVHLRWRTALICRELEDEFDALIRSHVQKEQLITLIQQKEVVGDLFNQLRLALQRRTNSRPAQTLAATCMDDQELTESMQKLLIVMQRLDEKIAPMLESDGELFNKRKIIF

SEQ ID NO: 43059 - protein, 148 aa, Oryza sativa; identical to SEQ ID NO: 33159

SEQ ID NO: 43060 - protein, 401 aa, Oryza sativa
MDFAKTVKDVHPSLHGANSENSTNISDSTLEGLTETILKLKAEKRTRVSKLQEIVGKLHKLWNLMESTEQERRHFTRVAAVLGSTEEEITSSSVLSLETIQETEEEVERLTKQKASRMKELVLKKRLELEDICSNAHMEPDMSTAPEKITALIDSGLVDPCELLSSIETQIAKAREESLTRKDIMEKVDRWLSACDEETWLEEYNQDSSRYSAGRGAHINLKRAEKARILVQKIPSMIDNLIAKTFAWEDERSVPFLYDGARLVAILEEQKLRRVQKEEDKRRHRDQKKLQSLLLKEKELIFGSKPSPKKTSSFNRRTSSHHPNGNGAGFMTPVPRRVSAGSATPELLTPRSYSGRYNNYFKENRRLAAAPLNFSTVSKEDSMSSFASISGSEPDSPLVLH

SEQ ID NO: 43061 - protein, 106 aa, Oryza sativa
MATFELYRRSTIGMCLTETLDEMVSSGTLSPELAIQVLVQFDKSMTEALENQVKSKVSIKGHLHTYRFCDNVWTFILTEASFKNEETTEQVGKVKIVACDSKLLSQ

SEQ ID NO: 43062 - protein, 139 aa, Oryza sativa
MGYAQLVIGPAGSGKSTYCSSLYQHCETVGRTIHMVNLDPAAEHFSYPVSTDIRELISLDDVMEELGMGPNGGLIYCMEHLEDNLDDWLDEQLDGYLDDDYLVFDCPGQIELFTHVPVLRNFVEHLKRKKFQRLCRVLS

SEQ ID NO: 43063 - protein, 455 aa, Oryza sativa
MLAVSPAMCPDIEDRAAVAGDAGMEVVGMSSDDMDQFDFSVDDIDFGDFFLRLEDGDVLPDLEVDPAEIFTDFEAIATSGGEGVQDQEVPTVELLAPADDVGVLDPCGDVVVGEENAAFAGAGEEKGGCNQDDDAGEANVDDGAAAVEAKSSSPSSTTSSSQEAESRHKSSSKSSHGKKKAKVDWTPELHRRFVQAVEQLGIDKAVPSRILEIMGIDSLTRHNIASHLQKYRSHRKHMIAREAEAASWTQRRQIYAAGGGAVAKRPESNAWTVPTIGFPPPPPPPPSPAPIQHFARPLHVWGHPTMDPSRVPVWPPRHLVPRGPAPPWVPPPPPSDPAFWHHPYMRGPAHVPTQGTPCMAMPMPAARFPAPPVPGVVPCPMYRPLTPPALASKNQQDAQLQLQVQPSSESIDAAIGDVLSKPWLPLPLGLKPPSVDSVMGELQRQGVANVPPACG

SEQ ID NO: 43064 - protein, 504 aa, Oryza sativa
MALRRALLRSAEISPDRKAALEYLHYLSRAQPTRSLTGAGLYSAGKSFSTQAATTSSTPQPPPPPPPPEKTHFGDLKDEDRIFTNLYGQHDPFLKGAMKRGDWHRTKDLVLKGADWIVNEMKKSGLRGRGGAGFPSGLKWSFMPKVSDGRPSYLVVNADESEPGTCKDREIMRHDPHKLLEGCLIAGVGMRASAAYIYIRGEYVNERLNLLKAREEAYAAGLLGKNACGSGYDFDVHIHFGAGAYICGEETALLESLEGKQGKPRLKPPFPANAGLYGCPTTVTNVETVAVSPTILRRGPEWFASFGRKNNSGTKLFCVSGHVNKPCTVEEEMSIPLKELIEKHCGGVRGGWDNLLAIIPGGSSVPLLPKHICDDVLMDYDALKAVQSGLGTAAVIVMDKSTDVVDAIARLSYFYKHESCGQCTPCREGTGWLWMIMERLKVGNAKLEEIDMLQEVTKQIEGHTICALGDAAAWPVQGLIRHFRPELERRIRERAERELLAASA

SEQ ID NO: 43065 - protein, 370 aa, Oryza sativa
MAAMARHLPAILLLSSALLLALASASASAAAPALAAFVDAASRRYLRDQQHHDQAASMSLDQVSAAVSVLLGFAPPPSLPAQSSSKLDKLLLPNPFDRPRAVFLLQIDGFHASVESITSEAGSIFKTTIDGLSDSATGLTDKDDLVIVHSDESPAVDSGSEYFDSDLTDLANWLGGSYEKVDGKLIIPLESGESLTLLITKEADMEFASSLISLRKTIKRGIQVHEDFSGGVMSPAELLVCHFKGIKALEEEYGSTEIVKQGTDVVRTAVTKAFDLLRGAYNGKIVGLVISTKEASPSLVGPASSLHISRWLKETSQTNTTIASSEILVRKSLAWITGIILLVSTLIGVCLLMNMPLTRDTLLYSNVKID

SEQ ID NO: 43066 - protein, 249 aa, Oryza sativa
MPALSMAGMAMPAYANYIARMQGLAGFKMNMNFGMAGNSALQQQLLASANWPYALAGRYGMQAAGWPFGGNNANQFSAAPKDWRSGDWLCSCGFHNYSSRTQCKQCSAPVPSGIPSTTMKTTVPDTSSTLGTKRLASEELANEWDNKRLNPGNASYPLSTAGTDNLFGGIEQGAGSSNGQTPYSKFDNGNSIALPSGQVSAMPGLIGKGAKWREGDWMCSNCNNHNYASRAFCNRCKTQKEASVHPGVL

SEQ ID NO: 43067 - protein, 288 aa, Oryza sativa
MEGKEENVRLGANKFSERQPIGTAAQGSDDKDYKEPPPAPLFEPGELKSWSFYRAGIAEFMATFLFLYITVLTVMGVNNSTSKCATVGIQGIAWSFGGMIFALVYCTAGISGGHINPAVTFGLFLARKLSLTRALFYMVMQCLGAICGAGVVKGFQKGLYETTGGGANVVAPGYTKGDGLGAEIVGTFILVYTVFSATDAKRNARDSHVPILAPLPIGFAVFLVHLATIPITGTGINPARSLGAAIIYNRGHAWDDHWIFWVGPFIGAALAAIYHQVVIRAIPFKSRS

SEQ ID NO: 43068 - protein, 470 aa, Oryza sativa
MAMATATPAAQNEQQEKGGLEYVYLSGLGNSLSSEAVAGTLPRGQNSPLVCPLGLYAEQLSGTPFTAPRARNLRTWLYRIKPSVTHEPFHPRRPAHPRLIGDFDRTTTDTVATPTQLRWRPADVPPHHPPLDFIDGLYTVCGAGSSFLRHGYAIHMYAANKSMDGCAFCNADGDFLIVPQQGKLLITTECGKLLVPPGEIVVIPQGFRFAVDLPDGPSRGYVSEIFGTHFQLPDLGPIGANGLASARDFLSPTAWFEQVHRPGYTIVQKYGGELFTATQDFSPFNVVAWHGNYVPYKYDLSKFCPFNTVLFDHADPSVNTVLTAPTDKPGVALLDFVIFPPRWLVAENTFRPPYYHRNCMSEFMGLIYGIYEAKADGFLPGGASLHSCMTPHGPDTKTYEATISRPDANEPSRLSGTLAFVFESALIPRVCQWALDSPSRDLDYYQCWIGLKSHFSHDNGGATSEEPCRK

SEQ ID NO: 43069 - protein, 450 aa, Oryza sativa
MRQPQSRKLLQLQALSLLLFIIALHSRLHGCSGQGEAADGSASTAAAPMEEKEKRALYAAIEGFVGKGWNGSALYPDPCGWSPIQGVSCDLFNGLWYPTVMSIGPVLDNSLRCSADAKFSPQLFDLKRLKTLSFYSCFPATNPTPIPATSWDKLAGSLETLEFRTNPGLTGPIPASLGRLSSLQSLVFVENNLTGAVPAELGSLVRLRRLVLSGNGLSGQIPASLGGLKGLLKMDLSNNLLQGSLPPELAGLGSLTLLDLRNNSFTGGLPSFLQGMASLQDLLLSNNPLGGSLGQLGWERLRGLATLDLSNLGLVGAIPESMAALTRLRFLALDHNRLTGDVPARLAELPNIGALYLNGNNLTGTLQFSPAFYQRMGRRFASWDNPGLCYSNAAVDAAHAPPGVTVCKVAGGVGDGRKPEASSSLMATSSASNLINGFCFFLWMVATSLL

SEQ ID NO: 43070 - protein, 348 aa, Oryza sativa
MGAVGRSSSLMQGGEAVSSMGIGGGWQLAWKWTEREGADGEKEGGFQRIYLHEEGVTGDRRGSILSLPGGDVPPGGEFVQAAALVSQPALYSKELMEQRLAGPAMVHPSQAVAKGPKWADLFEPGVKHALFVGIGIQILQQFAGINGVLYYTPQILEQAGVGVLLANIGLSSSSASILISGLTTLLMLPSIGIAMRLMDMSGRRFLLLATIPILIVALAILILVNILDVGTLVHASLSTVSVILYFCFFVMGFGPIPNILCAEIFPTTVRGICIAICALTFWIGDIIVTYTLPVMLNAIGLAGVFGIYAVVCILAFLFVFMKVPETKGMPLEVITEFFSVGAKQAKED

SEQ ID NO: 43071 - protein, 281 aa, Oryza sativa
MEALASFMDLEGRPHQHRWSMRRGGGLFFPQISSAAGELGWSSDSSTASSPAPSTLSSSCMSSPWGGGSGRWSASPAPAASSGLHQMVRDNYTQGLIRAFGRRRHDEALLHKWFSQLDVEWVLLLHAGQRDLDSSSVEDLMALMERWMRALLIMVQVLSMTLLELRDRRSSSSLAGTDDDDAFLLRTKGSAGNRSPAPELPGFVCVQEVVQFAEASILRMLAFVDAITLAALNDDHRRRHREPEMLPGMLYLYDCFSDASPTVLAFFKEASDVLRLRLREE

SEQ ID NO: 43072 - protein, 165 aa, Oryza sativa
MGSFLRKQPSFLLILLILHLGAREASALSSDDEAHLAFKKAVTTSDGIFLNWREQDVYPCNWKVVRCHSHTKRVIYLSNLWVPSANCYFSVACFFHSHYKSGQSSTYQKNGLCLKTFPNRAIICVVSLQQFGYQSILLHGCTEIFPLFFFFVIYSTAGGISCIVC

SEQ ID NO: 43073 - protein, 579 aa, Oryza sativa
MDAGEGGGAPAAAAAVSNGFVHAVVRWCFSPLFFWLFTVALVAAIHLASTYISPSRDEEDKEKKARRGGDFAGAGEEREEEEVGRNDDKILEMMRSFSFMHASEEDFMEGMATYDHVVARMAPEPLPLTPPAAPPPSTFSFRFQHQLPEILRETAVVSGEIPVQVLEEHEPEKKPAIAMESKQERERDAEEREVVMEEEEEEEQSREVVEAAAAAPMIVSTTHNYRFLTERDFRGFVKEPEAITVRVQESFVPSPELEAVAVAAAAQPEERRVVDGAPRRGFLTTNDFRPANEPDSARQSVASQLGRKPAASSPSAASRGSAAAAVSGRTSFASEFSGFGGDSDSESTASDGYSVKDLVVDSDSDWFLSEKDFPAAAVAGHDAGSLRGYYKAKVLKALEALDASASNLERSFQDSATTVSPGSVVGQASPDIIGAADDPAKYPEDMWSRSPSPDVEYNEDEHKGNEATNMAEEVSFDMSDDERPPASGGKKTTAMAASSSSSSPVHDAESEDENSLDHSEKETITIHDHSYESVSDVKRRSPEAISDAELDDASSRHAAVLDAKVRSPDVHSSEPIFDN

SEQ ID NO: 43074 - protein, 1006 aa, Oryza sativa
MFRLALNKPITPMLVLAFILFLNLRLPFCLSAQFHNESNADRQALLCLKSQLHDPSGALGSWRNDSSVSMCDWHGVTCSTGLPARVDGLDLESENITGQIFPCVANLSFISRIHMPGNQLNGHISPEIGRLTHLRYLNLSVNALSGEIPETLSSCSRLETINLYSNSIEGKIPPSLAHCSFLQQIILSNNHIHGSIPSEIGLLPNLSALFIPNNELTGTIPPLLGSSKTLVWVNLQNNSLVGEIPPSLFNSSTITYIDLSQNGLSGTIPPFSKTSLVLRYLCLTNNYISGEIPNSIDNILSLSKLMLSGNNLEGTIPESLGKLSNLQLLDLSYNNLSGIISPGIFKISNLTYLNFGDNRFVGRIPTNIGYTLPRLTSFILHGNQFEGPIPATLANALNLTEIYFGRNSFTGIIPSLGSLSMLTDLDLGDNKLESGDWTFMSSLTNCTQLQNLWLGGNNLQGVLPTSIGNLSKGLQILNLVQNQLTGSIPSEIENLTGLTAILMGNNMLSGQIPSTIANLPNLLILSLSHNKLSGEIPRSIGTLEQLIELYLQENELTGQIPSSLARCTNLVELNISRNNLNGSIPLDLFSISTLSKGLDISYNQLTGHIPLEIGRLINLNSLNISNNQLSGEIPSNLGECLVLESVRLEANFLQGGIPESLINLRGIIEIDFSQNNLSGEIPKYFESFGSLRSLNLSFNNLEGPVPKGGVFANSSDVFIQGNKMLCASSPMLQLPLCKELSAKRKTSYILTVVVPVSTIVMITLACVAIMFLKKRSGPERIGINHSFRRLDKISYSDLYKATYGFSSTSLVGSGTFGLVYKGQLKFGARDVAIKVFRLDQNGAPNSFSAECEALKSIRHRNLVRVIGLCSTFDPSGNEFKALILEYRANGNLESWIHPKPCSQSPPKLFSLASRVRVAGDIATALDYLHNRCTPPLVHCDLKPSNVLLDDEMVACISDFGLAKFLHNNFISLNNSSSTTGLRGSIGYIAPGEHLLHCYLYFIYCFH

SEQ ID NO: 43075 - protein, 304 aa, Oryza sativa
MNYIIGAFKAPCDVFITFADERSRKQVAIKKDNGKTLMVPAFQSLETIAGEVSVAPVPGKRVEHQGVKIELLGQIELYHERGHFYDFTSLVRELEVAGEIYERKTYPFEFSTVEMPYESYNGTNVRLRYILKVTIGRPYATSVVECRDFCVRNYTPLPSINNSIKMEVGIEDCLHIEFEYSKSKYHLKDVIVGKIYFLLVRIKIKNMELEIRRRESTGSGPGTYIETETLAKFELMDGAPVRGESIPVRLFLTPYELTPTYRNINNKFNVKYYLNLVLVDEEDRRYFKQQEITMYRLQETPQSS

SEQ ID NO: 43076 - protein, 339 aa, Oryza sativa
MLGASPKAKKGATVKFGSMKNPPPPPVVGAAAGAAAAAAGGKVPAEEVWEVRPGGMLVHKRGGGADEEPVNLKPVPTIRVKVKHAGITHEIYINSQASFGELKKMVAARTGLHPDDQKVMYKDKERDSKAFLDMAGVKDRSKLVVVEDPEARARRLIEERRNGHLEKAAKAVAAVTAEVDKLAPKVAALDASVRKGEKVAENDVVQVTELLMNELLKLDAVVADGDVKAQRRLQVKRVQKYVETLDAVMAKNAAIVRKSGEKLTSKQHHHPPARQQQQQAHQHHQQPAAGQTRWEMFDLLSSLPSTSSASSTTTVSSTASSGAPPPLPPPANRLDWMLF

SEQ ID NO: 43077 - protein, 426 aa, Oryza sativa
MLGPPRRGPAYKTKLCALWQRGNCNRDTCSFAHGHGDIRRPPSSRGAFTHHPGRRDYRAGDFRGRIDRRFSPRRRHSPGRESRGHRPLYDRRPSSRERDSSYSRSPSRKSERRHEKKTDDGETNSSRSLSLSDNNDEKKKDKFSSGDEKEDHEKQLKQIRLDMEALRDDKTQMEVILDEKIDEVRKISSKVNDLEVQLRREKDECHRMTSKMKKFIKAHARFLKAQEEVKRSQARFERLGDLLASDILKRGANEEGSSVNEDLNERSPNTAATKKRSIPYSTSEEAKAVKKRRERDSDTMTRSDKYRSDVTDFDKTSKGTEATKSLYLKKKLWEDEKSKLGANIFTEKVKGSPVRHVLPSTGMAAHAIDDLNEAIELEDRHESIDALLENDADDKTRSPAIPLQPPPVVQNAYEQYEGDDEEVDVE

SEQ ID NO: 43078 - protein, 675 aa, Oryza sativa
MAPMPAPAVALAVLVLLSAVPGYFSDDLNTDAQALQALRSAVGKSALPSWNSSTPTCNWQGVTCESGRVTELRLPGAGLMGTLPSNVLGNLSALRTLSLRYNALTGPIPDDLSRLPELRAIYFQHNSFSGEVPASVFTLKNLVRLDLAGNKFSGEISPDFNKLNRLGTLFLDGNSFTGEIPKLDLPTLSQFNVSYNKLNGSIPRSLRKMPKDSFLGTGLCGGPLGLCPGETALTPAGSPEVQPAGGGAADAGGASSGTKKKLSGGAIAGIAIGCVFGVLLLLALIFLLCRKKSSSSTPATAVEKGRDLQMAPMDMEPKGQNGSAAGNGAHVGAAAAAPAAATSAAVAAAAAAAKTGGATGGSKKLIFFGPMAAAPPFDLEDLLRASAEVLGKGAFGTAYKAVMESGSAVAVKRLKDVDLPEPEFRERIAAIGAVQHELVVPLRAYYFSKDEKLLVYDYMSMGSLSALLHGNRASGRTPLDWETRSAIALAAARGVAHIHSTGPTASHGNIKSSNVLLTKNYEARVSDHGLPTLVGPSFSPTRVSGYRAPEVTDIRRVSQKADVYSFGVLLLELLTGKAPTHAVVNEEGLDLPRWVQSVVREEWTAEVFDQELLRYQNVEEEMVQLLQLAIDCSAQHPDRRPSMSEVAARIDEIRRSSLGDRPATDSAGEGEEPSL

SEQ ID NO: 43079 - protein, 257 aa, Oryza sativa; identical to SEQ ID NO: 42889

SEQ ID NO: 43080 - protein, 228 aa, Oryza sativa
MAAAATTSSHLLLLSRQQAAASLQCGLSFRRQPGRLAGGSSAPSVRCMAAVDTASAPAATEASKKSSYEITTLTTWLLKQEQAGTIDGEMTIVLASISTACKQIASLVQRAPISNLTGVQGAVNVQGEDQKKLDVVSNEVFSNCLKSSGRTGVIASEEEDVPVAVEESYSGNYIVVFDPLDGSSNIDAAVSTGSIFGIYSPNDECLADIADDQNVTRYRSPSNRSCTH

SEQ ID NO: 43081 - protein, 104 aa, Oryza sativa
MTDLRLLSPDLAWPRPDPAEAAGVVAQRERRRYGWQRRGAPLWRRRRLARPARAPTHASGARGVARWSRRRRGTSAALHRWLGRHCPSRRGVRPLRPAPPPPSP

SEQ ID NO: 43082 - protein, 191 aa, Oryza sativa
MLHRGIPADPLAYTTVLNALCRKKQLREAYRLLCLMRGREVSPDIVHYNTVIVGMCREGRPLDACKVFRDMRESGCAPNAVAYTAVVNRLCVSGLYDKAEAYLDDMLGKGLLPHFSVFHSVIKGCCAVGKVNEAAGMMTRMLDLGMVPHAETWSSVIRSVCSDEDNVEVVLLQVMKGIKHLSNINSRSTWT

SEQ ID NO: 43083 - protein, 86 aa, Oryza sativa
MHLLLVMLFGSSLPLWIIAGYILRDWCCSFIHTNIIVVMLNILQIVLQRANSTMPSLLSFLFSRKITVPFLLKWKMHETLHCNFLQ

SEQ ID NO: 43084 - protein, 327 aa, Oryza sativa
MDELSFGSLCMVAMATLALALALMVMGAHRRVGEKGATTGAKNLPPGPWNLPVIGSLHHLLGASPPHRALLRLSRRHGPLMLVRLGEVPTVIVSGSDAAMEVLKARDPAFADRARSTTVDAVSFGGKGVIFAPYGEHWRHARRVCLAELLSARQVRRLESIRQEEVSRLVDSIIAGSSNAAAVDMTRALAALTNDVIARAVFGGKCARQEEYRRELGVLTTLVAGYSMVDLFPSSRVVRWLSRRTERRLRRSHAEMARIVGSIIEERKEKKGSDAGVGAKDEDDDLLGVLLRLQEEDGLTSPLTAEVIAALVTVSNCLYTLYMFLRL

SEQ ID NO: 43085 - protein, 135 aa, Oryza sativa
MHPSLFLTGCGIRRGGEVVAGGGEVRGGERGGGAGEHRREGGVRPGVRGDGAQPVRVRGARRAPPLRGVRELRRRRPAAVPPRPRRRRLPRRRRPPHRALRRRHVPLRLGPRLPHGAGRPARRLLLKNQPSSIVH

SEQ ID NO: 43086 - protein, 496 aa, Oryza sativa
MAKRHLLLVTTCLWALSCALLLHASSDGFLRVNLNKKRLDKEDLTAAKLAQQGNRLLKTGSSDSDPVPLVDYLNTQYYGVIGLGSPPQNFTVIFDTGSSNLWVPSAKCYFSIACYLHSRYNSKKSSSYKADGETCKITYGSGAISGFFSKDNVLVGDLVVKNQKFIEATRETSVTFIIGKFDGILGLGYPEISVGKAPPIWQSMQEQELLADDVFSFWLNRDPDASSGGELVFGGMDPKHYKGDHTYVPVSRKGYWQFNMGDLLIDGHSTGFCAKGCAAIVDSGTSLLAGPTAIVAQVNHAIGAEGIISTECKEVVSEYGEMILNLLIAQTDPQKVCSQVGLCMFDGKRSVSNGIESVVDKENLGSDAMCSVCEMAVVWIENQLRENKTKELILNYANQLCERLPSPNGESTVSCHQISKMPNLAFTIANKTFILTPEQYIVKLEQGGQTVCISGFMAFDIPPPRGPLWILGDVFMGAYHTVFDFGKDRIGFAKSA

SEQ ID NO: 43087 - protein, 507 aa, Oryza sativa
MGKAAAVGTAVVVAAAVGVAVVLARRRRRRDLELVEGAAAERKRKVAAVIEDVEHALSTPTALLRGISDAMVTEMERGLRGDSHAMVKMLITYVDNLPTGNEQGLFYALDLGGTNFRVLRVQLGGKEKRVVQQQYEEVSIPPHLMVGTSMELFDFIASALSKFVDTEGDDFHPPEGRQRELGFTFSFPVSQTSISSGTLIKWTKGFSINDAVGEDVVSELGKAMERQGLDMKIAALVNDTVGTLAGGRYADNSVVAAIILGTGTNAAYVENANAIPKWTGLLPRSGNMVINTEWGSFKSDKLPLSEFDKAMDFESLNPGEQIYEKLISGMYLGEIVRRILLKLAHDAALFGDVVPSKLEQPFVLRTPDMSAMHHDSSHDLKTVGAKLKDIVGVPDTSLEVRYITSHICDIVAERAARLAAAGIYGVLKKLGRDKMPKDGSKMPRTVIALDGGLYEHYKKFSSCLESTLTDLLGDDVSSSVVTKLANDGSGIGAALLAASHSQYAEID

SEQ ID NO: 43088 - protein, 459 aa, Oryza sativa
MVNGTAVGSGLASTVLFEANVLAILAEVLSAVFCEVMTGKPEYTDHLTHKLKHHPGQIEAAAIMEHILEGSSYMKLAKKLGELDPLMKPKQDRYALRTSPQWLGPQIEVIRFATKSIEREINSVNDNPLIDVSRGKALHGGNFQGTPIGVSMDNTRLALAAIGKLMFAQFSELVNDFYNNGLPSNLSGGRNPSLDYGFKGAEIAMASYCSELQFLGNPVTNHVQSAEQHNQDVNSLGLISSRKTAEAIDILKLMSSTFLIALCQAIDLRHLEENMKTAVKNCVMQVAKKSLSMNHMGGLHIARFCEKDLLTAIDREAVFAYADDPCSANYPLMQKLRAVLIEHALANGDAERVLETSIFAKVAEFEQHVRAALPKEVEAARAAVENGTPLVPNRIKECRSYPLYRFVREEVGTEYLTGEKTRSPGEELNKVLVAINERKHIDPLLECLKEWNGAPLPLC

SEQ ID NO: 43089 - protein, 374 aa, Oryza sativa; identical to SEQ ID NO: 32322

SEQ ID NO: 43090 - protein, 373 aa, Oryza sativa
MDHRLLLLGLLLLSPAVAAASVPGEEEPLIRQVVGGGDDNELELNAERHFASFVQRFGKSYRDADEHAYRLSVFKANLRRARRHQLLDPSAEHGVTKFSDLTPAEFRRAYLGLRTSRRAFLRGLGGSAHEAPVLPTDGLPDDFDWRDHGAVGPVKNQGSCGSCWSFSASGALEGANYLATGKMDVLSEQQMVDCDHECDSSEPDSCDAGCNGGLMTNAFSYLLKSGGLESEKDYPYTGRDGTCKFDKSKIVTSVQNFSVVSVDEDQIAANLVKHGPLAIGINAAYMQTYIGGVSCPYICGRHLDHGVLLVGYGASGFAPIRLKDKAYWIIKNSWGENWGEHGYYKICRGSNVRNKCGVDSMVSTVSAIHTSKE

SEQ ID NO: 43091 - protein, 182 aa, Oryza sativa
MARPGHGGVPGPGGAVRQGGLQPARLPPLRLRRLRQDVLRGAPDVPGPRLRGAPRTRAAPSSSARPAATPSSGGPGTGAGTTPPCWRRTRGRGGATRRGSASRGAPCRGARRRSRSPTRAGARGAARRCASSTGSPPTTRAPAQAPARRRRPPAPRPPRGAPGSAGATRRRRRAAGGSCRNR

SEQ ID NO: 43092 - protein, 455 aa, Oryza sativa; identical to SEQ ID NO: 43063

SEQ ID NO: 43093 - protein, 251 aa, Oryza sativa
MGRWVTKKQWGFTDFKGRVSISRSIGDFACKKNERLPPEDQMLTCNPDILTMDITDDMEFLVIATEGLWCNMTNQNVVDHTHDRLLEGAEARVICEELVQFGLPSGDNTTVILVLFKPGAYPAVPPVDTDTDTDSHTGDDVDNNDPANEVDPTANAGSDDSNTSDEVKVDATATAVGSSSTTAVAADEATVVSLSTATITIVDNYFFINTSEEVDPTANAGSDDSNTGDEVKVDATASSGLSDWELIYSEF

SEQ ID NO: 43094 - protein, 542 aa, Oryza sativa
MRRSGNGGAAKKKKKRSASAASERRPRADGGMRIVVPLQGVVQGRGGLVLGSLIPCALFYFFQLYIKRNRASPPPPPGSPTAASAAAVSPIHRSLSRGLLAPRAALPAISARGASVRDDDSLYYAGLRRCAADPYHPVTNPSGIIQLGLAENYLSLDLVGRWMEEHAAEAASMAGGEDEDERELSIRGLAAYQPYDGILALKMALAGFMRQIMQGSVSFEPSQVVITSGATPAMEILSFCLADPGNAFLVPSPYYPGWDRDIKWRTGIELIPVPCRSTDNFNISITALEIAYNQAKKRGIKVRGVLISNPNNPTGSFVPKQTLHDLLEFAAEKNIHLISDEVFAGSTYGSGKFVSVAEVVDDLEDFDKGRVHIIYGLSKDLSLAGFRVGVIYSYNESIVTAAAKIARFSSVSTPTQRLLVAMLSDQKFISDYLKVNRERLRKMYHLFVDALDQVGIECYKSSGGFYCWADMSKFIRSYSEKGERKLWDRLLEEAKVNVTPGSSCHCIEPGWFRCCFTTLSEHDIPVLVQRLRTITDSHKPNH

SEQ ID NO: 43095 - protein, 578 aa, Oryza sativa
MAMAATSRAPSTLAPASFSAAGGSRRRHRCPNPRVRVGVGVRCSLDSNVSDMAVNAPKGLFPPEPEHYRGPKLKVAIIGAGLAGMSTAVELLDQGHEVDLYESRPFIGGKVGSFVDRKGNHIEMGLHVFFGCYSNLFRLMKKVGADNNLLVKEHTHTFVNKGGTIGELDFRFPVGAPLHGIQAFLRTNQLKVYDKARNAVALALSPVVRALVDPDGTLQQVRDLDDVSFSDWFLSKGGTRESITRMWDPVAYALGFIDCDNISARCMLTIFTLFATKTEASLLRMLKGSPDVYLSGPIKKYITDRGGRFHLRWGCREVLYDKSPDGETYVKGLLLSKATSREIIKADAYVAACDVPGIKRLLPSEWRQWDTFDNIFKLDGVPVVTVQLRYNGWVTELQDLEKSRQLKKAVGLDNLLYTPDADFSCFSDLALSSPADYYIEGQGSLIQAVLTPGDPYMPLPNEEIISKVQKQVLELFPSSQGLELTWSSVVKIGQSLYRESPGNDPFRPDQKTPVKNFFLSGSYTKQDYIDSMEGATLSGRRTAAYICGAGEELLALRKKLIVDDSEKARGKVEALQTS

SEQ ID NO: 43096 - protein, 184 aa, Oryza sativa
MLRRRGFCCCSGAPAAAAAALLLLAVAAAAPRAAGFHLGGDESVLVRGMLAAIRREQAEAEDAARFAVAEYNKNQGAELGFARIVKAKRQVVTGTLHDLMLEVVDSGKKSLYSAKVWVKPWLDFKAVVEFRHVGDSQSQSATAADDNAGQDTADPTVASRNDLHNTENNKVSVVLSTFSQTYSV

SEQ ID NO: 43097 - protein, 981 aa, Oryza sativa
MLAVCARHGPAKLPPPPPPLAGERAAAWVVGRWWWRPAAAGRRGVVAARASFFSSRIGLDSQNYHTRDLSQLLWVGPVPGDIAEIEAYCRIFRAAEQLHTAVMSALCDPETGECPVRYDVQTEDLPVLEDKVAAVLGCMLALLNRGRKEVLSGRSGVASAFQGSEDSTMDKIPPLALFRGDLKRCCESMQVALASYLVPSEARGLDIWRKLQRLKNACYDAGFPRADGHPCPTLFANWFPVYFSTVPDDSLSDELEVAFWRGGQVSEEGLEWLLLKGFKTIVDLREEDVKDDLYLSAIHEAVSLGKIEVVNLPVEIGTAPSAEQVQRFAEIVSDSAKKPIYLHSQEGISRTSAMVSRWKQYVTRAERLATQNRSLNGNGKHVRNDQTEQLTNSPGFSSEGSENGTPLESDRTMEGETCDIDIETARHNLEITNSLPSEQSTEQGELHGTRTELQSNFRLESNPLKAQFPSCDVFSKKGMTDFFRSKKVYPKSVLNPRRRSNSLLVSRRKQSLSAEQNGAIDYEAAEFKVLKSSNGASFDNDYILSVASGITNGKPSNNGASTSVEDREMETSVVTVDPRTSDTSNSNGNAPLGSQKSAERNGSLYVERERSDHVDGNMCASATGVVRLQSRRKAEMFLVRTDGFSCTREKVTESSLAFTHPSTQQQMLMWKSPPKTVLLLKKLGDELMEEAKEVASFLHHQEKMNVLVEPDVHDIFARIPGYGFVQTFYTQDTSDLHERVDFVACLGGDGVILHASNLFRTSVPPVVSFNLGSLGFLTSHNFEGFRQDLRAVIHGNNTLGVYITLRMRVRCEIFRNGKAMPGKVFDVLNEVVVDRGSNPYLSKIECYEHNHLITKVQGDGVIVATPTGSTAYSTAAGGSMVHPNVPCMLFTPICPHSLSFRPVILPDSARLELKIPDDARSNAWVSFDGKRRQQLSRGDSVQISMSQHPLPTVNKSDQTGDWFRSLIRCLNWNERLDQKAL

SEQ ID NO: 43098 - protein, 707 aa, Oryza sativa
MARQQQQREEERAPMGAAQRRLRAVSGHLQPPTESGGVDLAANPTAGEYAHVQGYSAVLPEKLQTGKWNVYRSAKSPLKLINRFPDNPDIGTLHDNFVYAVETFRDCRYLGTRVCVDGTVGDYKWMTYGEASTSRTAIGSGLIYHGIPEGARIGLYFINRPEWTIVDHACAAYSYVSVPLYDTLGPDAVQFIVNHATVQAIFCVPQTLSTLLSFITQMPCVRLIVVIGGDNANMPSTPTATGVEIITYSRLLSQGRMSSQSFRPPKPEDIATICYTSGTTGTPKGVVLSHGNLIANVAGSSLVIKFYPSDVYISYLPLAHIYERVNQVSVVHYGVAIGFYQGDNLKLMDDLAALRPTVFPSVPRLYNRIYAAITNAVKESGGLKEGLFHAAYNAKRQAIINGRNPSPMWDRLVFNKIKARLGGRVRLMTSGASPLSADVMEFLRICFGGEVLEGYGMTETSCIISAMNIGDRLIGHVGSPNPSCEIKLVDVPEMNYTSEDEPYPRGEICVRGPTIFCGYYKDEIQTREAVDEDGWLHTGDIGLWMPGGRLKIIDRKKNIFKLAQGEYIAPEKIENVYAKCKFIAQSFIYGDSLNSSLVAVVAVEPDVLKAWAASEGIQHEDLRQLCADPKARSAVLAEMDSIGKEAQLRGFEFAKAVTLVAEPFTLENGLLTPTFKVKRPQAKAYFAKEIADMYAQLRQAEQIKPKL

SEQ ID NO: 43099 - protein, 447 aa, Oryza sativa
MGTQVADNYPPAKDGRSAQEKAIDDWLPITSSRNAKWWYSAFHNVTAMVGAGVLSLPYAMSELGWGPGIAVLILSWIITLYTLWQMVEMHEMVPGKRFDRYHELGQHAFGEKLGLWIVVPQQLVVEVGVNIVYMVTGGKSLKKFHDVLCEGHGCKNIKLTYFIMIFASVHFVLSQLPNFNSISGVSLAAAVMSLSYSTIAWGASVDKGKVADVDYHLRATTSTGKVFGFFSALGDVAFAYAGHNVVLEIQATIPSTPEKPSKKPMWKGVVVAYIIVALCYFPVALVGYWAFGNHVDDNILITLSRPKWLIALANMMVVIHVIGSYQIYAMPVFDMIETVLVKKLRFPPGLTLRLIARTLYVAFTMFIAITFPFFGGLLGFFGGFAFAPTTYFLPCIMWLAIYKPRRFSLSWFTNWICIILGVMLMILSPIGGLRQIIIDAKTYKFYS

SEQ ID NO: 43100 - protein, 778 aa, Oryza sativa
MTTSSWGGGGGGGGGAVRLWCCGLLLMLLSGGGGGGGAAAQRPPAYKTLSGNAPIVIAEGGFSGVFPDSSKNAYVFALSSTSGDTVLWCNVQLTKDGVGICLRDLLMDNCTSISQAYRAGKKAYLVNGEEKKGWFPIDYTMSSLQSVILTQAIWSRTDKFDFAFLPILPVTNVIDLAKPSSVWLNIEHDIFYRQHGLNMTKYILSIPKGGSVQYISSPELGFLQSISGRVNRKTKLVFRFLDATSSDPSSNQTYGSLLSNLTFIKTVASGIMVPKEYIWPVTTNNYIQPAKSIVRDAHSAGLEIYASDFANDRIIPYNYSYDPLEEYLHFVGSDNFSVDGVLSEFPLTAAAAIGCFTNLNVSSKTDHGSPLIISHNGASGDYPDCTDLAYQKAVDDGADVIDCSIQMTSDGVPVCMSSINLFETTNVQRTPFSNRASIFKDIQPTPGIFTFNLTWADISSSDLRPKISSPESIYYLVRNPVHKNAGNFFRLSDFLTFAKDKDLSGIMIIIKNAVFMANSLGFDVVDSVTKALSDAGYNNQTTKAKEVMIQSEDSAVLVNLKQLETKYKLVYTLPSTIGDASASSLVDVKKFADAVIVDRESIFPESQGFIMKETNLVKDLRSAGLAIYAQVFRNEFVSPPWDFFSDVTVEINSYVQSVNIDGIITDFPKTVRRYKMNSCTGLGVNMPSYMNPAEIGGLAQLLNGSQAQPPALAPMPVLNSSDVTEPPFPSAAPKNAPGGAANGSTPAPGASPSGSQAAAVMRAGILPMVTALFASLLI

SEQ ID NO: 43101 - protein, 544 aa, Oryza sativa
MGSASASSLPASAGFGENLVLILDFGSQYTHLITRRVRQLGVLSLCVSGTAPLASLAGLRPRAVVLSGGPHSVHASGAPTFPEGFLEFAAGAGAHVLGVCYGMQLLVQSLGGAVEAGEKQEYGKMEVEVTARSSALYGEGEVGKRQTVWMSHGDEVVRLPEGFEVVARSVQGAVAAVENREKRFYGLQYHPEVTHSPQGMETLRRFLFDVCGIKADWKMQDVLDEEIRTIQSMVGPDEHVICALSGGVDSTVAATLVHKAIGDRLHCVFVDNGLLRYNERERVMLTFESDLHLPVTCVDASEQFLSKLKGVKDPEMKRKIIGREFIAVFDDFAHKLEQKIGKRPGYLVQGTLYPDVIESCPPPGSGRTHSHTIKSHHNVGGLPKDMKLKLIEPLKLLFKDEVRKLGSILNVPESFLKRHPFPGPGLAVRVLGDVTEGNALEVLRQVDEIFVQAIKDAGLYDIIWQAFAVFLPVQTVGVQGDQRTHSNAVALRAITSEDGMTADWYYFEREFLVDVVNKICNNVRGVNRVVQDITQKPPATVEWE

SEQ ID NO: 43102 - protein, 849 aa, Oryza sativa
MHSEGMIDDLARSVRDILGSLGLATPGGMTNTTFSVPLTTAPEGANNVNGRTKQGNHAQPGFSILNHQIQVSQLQPAGSIPRNMVIPDSLTTLLEYINRMDQVLQNNGTPSVDTNTQQPPRSDDAYLNQRFPSPEVLVSVIERAQQLLGGSAASALSHLAQRIQRDSGTSDASIRSQIQNESAQLGVAMQHLGAMFLELGRTMMMLRMGPSPADAFVNAGSSVYINSAGPNPIMVLPSFQNTPPFGVSSIPVLGGISGAFGIVDPSRTSAVNTHGTSTTSGSSAGMTTASAGAVNEGRQNVERTQGGNPSATSMHGLPARTVIAAIPARSTAEAPNHVLSVILPVQVRSQVAMPNQSTVSQGSQTAVGGGSQPQASVGGVASIPSIVAQVTAQVANALSANQQGQVSSSAQNTVDQGSRSVTTNGVDNVDSLVSASTQLQNELSDSNNGRTSLNAQSLVAGAGISPSNTSDPNLASEDSSTENAPNIGSIQQHPEMEGIHADNVRKPSEESTTANLVGQITTTCTDDISVNRSAENSSQKNIPLDGVSAQSIKPSASSRSEPVGLGGGLQPKRRSRTAKPPGSSSDTGEVVNSSRISNSQNAVSMGQQVLQALASQNTNVNRSHVTDSPLPSTTSQFSGGMPPRRQGGEGQVDFGSMISSVLNNPAFGNLLSNVAEQTGMGSAGDLRNMVEECAQSPAIMDTMSNLVQNVDGSGRGQGGIDLSRMMQQMMPVVSQVLGGAGARPAGTNSGQSRLQPRRSDMRVDDASDYGNSQIDLHQAREHIEQHDSPRDIFGAVLETAAQAYGEDESIEDMLEELVSDPELTDDYLKLLLQQVRQRIQSASQSGNQS

SEQ ID NO: 43103 - protein, 701 aa, Oryza sativa
MATSHLTSRSLLVQAQYPISRLPSNLRLSLSHHKQPAAVAKRRRAPAPSHPAFSSVIRGRPKKVPIPENGEPAAGVRVTERGLAYHLDGAPFEFQYSYTETPRARPVALREAPFLPFGPEVTPRPWTGRKPLPKSRKELPEFDSFMLPPPGKKGVKPVQSPGPFLAGTEPRYQAASREEVLGEPLTKEEVDELVKATLKTKRQLNIGRDGLTHNMLENIHSHWKRKRVCKIKCKGVCTVDMDNVCQQLEEKVGGKVIHHQGGVIFLFRGRNYNYRTRPIYPLMLWKPAAPVYPRLVKKIPDGLTPDEAEDMRKRGRQLPPICKLGKNGVYLNLVKQVREAFEACDLVRVDCSGLNKSDCRKIGAKLKDLVPCTLLSFEFEHILMWRGNDWKSSLPPLEENDFKVASDQILNSKEAGSGSALTPIELVNNATSLKKCNLIEGAEKLEDSMKSSFENGMILGSACGNPGVCNSEGIDGTESSADAPIEFSPSNSARDLDPSQTSTLYCQSSLLDKSENGELIEMYPDRCGNSEQSPDVPEALTCLMGSSDEIHELETMRRNCKHLNGSDGVNSDSIVPSYMEGILLLFKQAIDSGMALVLNENEFADANYVYQKSVAFTKTAPRYLVLRHTPRKSHGTQKTEPAKNVRINKHLEEHKVSDHVKKKEIVMGGSRMQRNDHAREFLSDVVPQGTLRVDELAKLLA

SEQ ID NO: 43104 - protein, 900 aa, Oryza sativa
MSSEPPPPQPQPQEAAGREASSSLSPAKESAAGGGGVGGSGAPETNTLWVGNLPAQAAEDDVMASFSPHGALDCVMARAGPRSYAFVLFRSVPEARAALDALQGSKVKGSVVRLEFARPARAVKNLWVGGISSSISKEELEEEFKKFGKVDGIAFSRDQTSAYIDFDKLEDAISAHRALNGRVLGGQELCVDFQRSRGRAEWLETGSFNGRTGPAKGYGVRNRESNPTNVLWVGFPNTAKINEEALRQAMAVHGAVTNTKVFPTRQYAFVEFATVGEASNAKKNLDGRLFNDQRIQILFSNSELAPNKLDNPTAVSGFPKSEMYYDDGQYGASDYFDPRRGRSRYFEYSGVPVSGGILPSPESGNPLLTGRSAQSTFDPREAKRLRLDAAADPYDTRAGSEGLYSAGYSQRESARSERSSSPAIRIHGTVHRTSYLEHFWRGSIAKGGSPVCRARCLPIRKGVEIPLPDVVNCSARTGLDMLAKHYRDASGFDIVFFLPDSEDDFVSYTEFLRYLGSKSRAGVVKVDGGTTLFLVPPSDFLRNVLQVDGPERLYGVVLHIPQMSAAAPASAPTPAVQRPQLTAPESQPYYDEREIPLQRRYSMITPSNNHHRDADHRGSLREDSLHQLGQILARPRVDEGQVVQPNLAGIPTNAGLQVQPSLQPDMIATLAKLLPSGQSSALVTGQLPLSSTDQPALTQMNDASTLAKVWRPENQAMASTSSLEQIGNFQHSGQQFSKQAGAVHLPNYGNLAGAQEHPTQHSAYNPEMTLNLPPPPPPPTLPPSSAILSSQVGHSLPTQMSQQQYQPEQYYMTQSNYGQLATVSSSNLQAHHQQIVATPAAQAPVAAQFPPAMQAPAAAQAPVAAQASADEAERNRKYQATLQLAQRLLGQLQQKPGNQP

SEQ ID NO: 43105 - protein, 520 aa, Oryza sativa
MGNSLGCSASGERLVSAARDGDAVEARMLLELSPALARYSTFGGLNSPLHFAAAKGHLDIVTLLLEKGADVNVRNYCGQTALMHACRHGHWEVVQMLLLFRCNVTRADYLSGRTALHFAAHDGLVRCVRLLLADFVPSAPLEDGASSTVDGGECQTNSGSSPCSSLGLKFNESARLRYINKPADGGVTALHMAALNGHFDCMQLLIDLGANVSAVTFPYGTTANLIGAGSTPLHYAAGGGNAECCQLLLSKGASKLTLNCNGWLPIDVARMFGRRFLEPLLSPNSNSSIPAYQPSNYLALPFMSILNIAREFGLLHTVASVDDSDLCAVCLERSCSVAAEGCCHEFCIKCALYLCSTSNTRVEFTGPPGSIPCPLCRNGIMSFTKLPSTPTEGLKSSSALTFCNPCMLNTRSVDSPATISKAEIRRNRVAAVSSELVCPLTCSPFPSSALPTCRCSDDDPCDAIETQDGSEVQSPQPSHCASMEMDKREQQDLDRTSCSGMFWSRRSCHREEQCNAEINA

SEQ ID NO: 43106 - protein, 335 aa, Oryza sativa
MAARRRLLLLLVLLLCRLAAVLPTSEVEALQGFMAGFAGGNAAFQSWDASAPNPCTWFHVTCGPGNQVIRLDLGNQSLSGELKPDIWQLQALQSLELYGNSISGKIPSELGRLASLQTLDLYLNNFTGEIPNELGNLSKLSNLRLNNNSLSGAIPMSLTTIQNLEVLDLSHNNLSGIIPTNGSFSHFTPISFSNNPRTFANSSDSPSNNSGAAVPSGRSSASSIGTIAGGAAAGAAMLFAAPIVLFAWWWRRKPHDQFFDLLEEETPEVHLGQLRRFTLRELQVATDNFSQTNLLGRGGFGKVYKGRLLDGSLIAIKRLNEDRIGTGERQFLMEV

SEQ ID NO: 43107 - protein, 634 aa, Oryza sativa
MKHMKLGSKPDLFQTEGGNIRFVATELATDIVISIGDVKFCLHKFPLLSKSSCLQRLAASSNVEGNEELDISDIPGGPSAFEICAKFCYGMIVTLNAYNVLAARCAAEYLEMFETIEKGNLIYKIDVFLTSSIFRAWKDSIIVLQSTKSLLPWSENLKVINHCIDSIASKALIDPSEVEWSYTYNRKKLPSENGHDSHWNGVRKQLIVPKDWWVEDLCDLEMDLYKRVIMMIKAKGRTSPIVIGEALRAYAYRRLLGSLEDAVSNGVDCTKRRAVLETIIFLLPTEKGSVSCGFLLKLLKAACLLEAGESCHDILIKRIGTQLDGASVSDLLIPANTSENTLYNVNLIIAIVEEIVSRQSDTGKMKFQDDDEIVEVENLTPVSSTSNLAVANLIDGYLAEIAKDTNLPLSKFIAIAEMVPPASRKNHDGLYRAIDMYLKEHPSLSKSEKKALCRLMDCKKLSQDACLHAVQNERLPLRVVVQVLFFEQIRASAASGRTDAAAELTSAVHSLLPRENGNSYGSSRSAATTTTEEDGTGVPTSSDINSFSSLRLADNSGGSERSSGSSDINNKSCDDKSSSKSKGSLMPKKILSKLWSGKTNASENSSSDTSESPGSLNPEEVKSTTSRNTRRLVT

SEQ ID NO: 43108 - protein, 253 aa, Oryza sativa
MAEHKEEQSVMEKLSEKLHGDSSSSSSDSDDDKKGSSSSSAAAAMKAKIYRLFGRERPVHSVLGGGKPADLVLWRNKKISGGVLAGATAIWLLFEIMEYHLLTLVCHCLILSLAVLFLWSNASTFIHKSPPNIPEVKIPEDLTVNIALSLRYEINRGFATLREIGHGRDLKKFLIVIAGLWILSVLGSSCNFLTLFYIVFVALYTVPVLYEKYEDKVDAFGEKAEIEFKKYYALFEEKCLSKIPKGPLKDKKH

SEQ ID NO: 43109 - protein, 737 aa, Oryza sativa
MNRESNFMPTPDQDVLEVKPLRTLAPMFPAPLGIDVLNRLTAPPLVFVAPAGQFPGGFGSLNIPAVRSFAAFGGQDASGGKTAGGGDQDASGGKTAAGGDQDAGRGETAAFGGQETVRGEFVANGTPNVGASATGPIDATPISACKSTQPSVISLDDDDNDDDEPYGGNQTSASGRKIKRPSHLKGYNVSDGLGTDSSNGTKKRPKTSNRKAATDNEISLMPPSSDPREVVEVLLMTFEALRRRHLQLDETQETSKRADLKAGAIMLASNLRANIGKRIGAVPGVEVGDIFYFRMELCIIGLHAPSMGGIDYMNKFGDEDDSVAICIVAAGVYENDDDDDTDTLVYSGSGGISRNSEEKQDQKLERGNLALERSLSRKNVIRVVRGYKDPACLTGKVYIYDGLYKIHESWKERTKTGINCFKYKLQREPGQPDAVAIWKMCQRWVENPAARGKVLHPDLSSGAENLPVCLINDVNSEKGPGHFNYITQVKYLKPLRSMKPFQGCRCTSVCLPGDTSCDCAQHNGGDLPYSSSGLLVCRKLMVYECGESCRCSINCRNRVAQKGVRIHLEVFRTTNRGWGLRSWDPIRAGSFICEYVGEVVDDTKVNLDGEDDYLFRTVCPGEKTLKWNYGPELIGEHSINISADTFEPLPIKISAMKMGNVARFMNHSCNPNTFWQPVQFDHGEDGYPHIMFFALKHIPPMTELTYDYGDIGCESRGVGSRAKNCLCGSSNCRGFFS

SEQ ID NO: 43110 - protein, 679 aa, Oryza sativa
MAASLLLRAARRRDLASPLGTLTANAQSAYSANICSQWGSFARAFSVKPTGNEVIGIDLGTTNSCVSVMEGKNPKVIENSEGTRTTPSVVAFNQKGERLVGTPAKRQAVTNPQNTFFGTKRLIGRRFEDPQTQKEMKMVPYKIVKAPNGDAWVETTDGKQYSPSQIGAFVLTKMKETAESYLGKTVSKAVITVPAYFNDAQRQATKDAGRIAGLDVQRIINEPTAAALSYGTNNKEGLIAVFDLGGGTFDVSILEISNGVFEVKATNGDTFLGGEDFDNTLLEFLVSEFKRSEAIDLAKDRLALQRLREAAEKAKIELSSTAQTEINLPFITADASGAKHLNIPLTRSKFESLVNSLIERTREPCKNCLKDAGITTKEVDEVLLVGGMTRVPKVQEIVSEIFGKSPSKGVNPDEAVAMGAAIQGGILRGDVKELLLLDVTPLSLGIETLGGIFTRLINRNTTIPTKKSQVFSTAADNQTQVGIRVLQGEREMATDNKLLGEFDLVGIPPAPRGMPQIEVTFDIDANGIVTVSAKDKSTGKEQQITIRSSGGLSEAEIQKMVQEAELHSQKDQERKALIDIRNNADTTIYSVEKSLGEYRDKIPAEVATEIETAIADLRSVMTSDDIEKIKANIEAANKAVSKIGQHMSGGGGGAGGSETGGSQGGGEQAPEAEYEEVKK

SEQ ID NO: 43111 - protein, 393 aa, Oryza sativa
MESLTLRASPSTAAPLRRVPGRRHAAVSVRASAGAGEPDLSVRVNGLKMPNPSVIGSGPPGTNYTVMKRAFDEGWGGVIAKTVSLDAEKVINVTPRYARLRADPNGSTKSPIIGWQNIELISDRPLETMLNEFKQLKKEYPDRILIGSIMEEYNKAAWHELIERVEESGVDALEINFSCPHGMPERKMGAAVGQDCDLLEEVCGWINEKATVPVWAKMTPNITDITKPARISLKSGCEGVSAINTIMSVMGINLKTLRPEPCVEGYSTPGGYSARAVHPIALAKVMQIARMMKEEFADGQSLSAIGGVETGNDAAEFILLGADTVQVCTGVMMHGYGLVKKLCAELQDFMRQHNFSSIEDFRGASLPYFTTHTDLVHRQREAINQRKAIRKGL

SEQ ID NO: 43112 - protein, 458 aa, Oryza sativa
MRISMALAAAALLLLLSLAAADMSIVSYGERSEEEARRLYAEWKAEHGKSYNAVGEEERRYAAFRDNLRYIDEHNAAADAGVHSFRLGLNRFADLTNEEYRDTYLGLRNKPRRERKVSDRYLAADNEALPESVDWRTKGAVAEIKDQGGCGSCWAFSAIAAVEGINQIVTGDLISLSEQELVDCDTSYNEGCNGGLMDYAFDFIINNGGIDTEDDYPYKGKDERCDVNRKNAKVVTIDSYEDVTPNSETSLQKAVANQPVSVAIEAGGRAFQLYSSGIFTGKCGTALDHGVAAVGYGTENGKDYWIVRNSWGKSWGESGYVRMERNIKASSGKCGIAVEPSYPLKKGENPPNPGPTPPSPTPPPTVCDNYYTCPDSTTCCCIYEYGKYCYAWGCCPLEGATCCDDHYSCCPHEYPICNVQQGTCLMAKDSPLAVKALKRTLAKPNLSFLFGNGKKSSA

SEQ ID NO: 43113 - protein, 414 aa, Oryza sativa
MAGMAPEGSQFDAKHYDSKMQELLNQGETEEFFTSYDEVHESFDDMGLQENLLRGIYAYGFEKPSAIQQRGIVPFCKGLDVIQQAQSGTGKTATFCSGILQQLDYAVVECQALVLAPTRELAQQIEKVMRALGDYLGVKVHACVGGTSVREDQRILASGVHVVVGTPGRVFDMLRRQSLRPDYIKMFVLDEADEMLSRGFKDQIYDIFQLLPSKIQVGVFSATMPHEALEITRKFMNKPVRILVKRDELTLEGIKQFYVNVEKEEWKLDTLCDLYETLAITQSVIFVNTRRKVDWLTDKMRGRDHTVSATHGDMDQNTRDIIMREFRSGSSRVLITTDLLARGIDVQQVSLVINYDLPTQPENYLHRIGRSGRFGRKGVAINFVTRDDERMLFDIQRFYNVVIEELPANVADLL

SEQ ID NO: 43114 - protein, 371 aa, Oryza sativa
MGCFSCCGADDVGKKKKRDDPYVPIPDPGGNYGRSKPGPPAPSRSPPTSRNLPIAVPAIPLDEIKGITKNFSSDALIGEGSYARVFFGVLRDGRRSAVKKLDSSKQPDQEFLVQVSAVSRLKHENIIQLIGYCAGGSIRVLAYEYAPRGSLHDILHGKKGVKGAQPGPALSWMQRVKIALSAAKGLEFLHEKAEPRVVHRDIKSSNIMLFDNDVAKVGDFDVSNQSPDMAARLHSTRVLGTFGYHAPEYAMTGQLSTKSDVYSFGVVLLELLTGRKPVDHTLPRGQQSLVTWATPRLSEDKVKQCVDPRLEGDYPPKAVAKMAAVAALCVQYEADFRPNMSIVVKALNPLLNSRPNNRPASFTDAGERSGL

SEQ ID NO: 43115 - protein, 651 aa, Oryza sativa
MSSSTIRKALGAVKDQTSIGLAKVTSNIAPELDVLIVKATSHDDEPAEERHIREILHLTSGSRAHVAAAVAGCSRRLSRTRDYVVALKSLMLVHRLLADGDPSFHRELLHATRRGTRLLNLSDFRDEAHSGSWDHSAFVRTYALYLDQRLEFFLHERKQGSGSNASSSANGPSPRDRWGSPDPYGRRSPSYSSPPGNGNGYGYGGYDDYRERNGNNNTDDKKPPTPVRDMKPERVLARMHHLQQLLDRFLACRPTGGAKHSRMVLVALYQIVRESFQLYADICEVLAVLLDRFFDMEYAECVKAFEAYASAAKQIDELCAFYGWCKETGVARSSEYPEVQRVTDKLLETLEEFMRDRAKRPKSPPREPEPEPVKEEEPEPDMNEIKALPAPEDYKEPEPEKVEEEVKPEPPPQPQGDLVDLREETVTADEQGNRLALALFQGPPAAGGSNGSWEAFPSNGGNEVTSAWQNPAAEPGKADWELALVETASNLSKQKATMTGGMDPLLLNGMYDQGAVRQHVNAQVTTGSASSVALPPAGQKTQVLALPAPDGSMQNVGGDPFAASLSFPPPSYVQMAEMEKKQQFLTQEQMMWQQYQRDGMQGQSSLAKLDRAYNNGFAPNPAMPYGMPAAYNTNPMPMAYTANTGYYYPTY

SEQ ID NO: 43116 - protein, 349 aa, Oryza sativa
MRPTAAAATAAFASPVVAVPSRAAPLAARRRLRRARRFAVRSVASPPTVPKPAAPPSKTGKWQWTFEDKPINIYYEEHEHETAENVKNILMIPTISDVSTVEEWRVVAKDIVARKGELGYRATIVDWPGLGYSDRPSLNYNADVMENFLVQLINSPNSPVANTDGEVVVVGGGHAATIAVRAAGKGLIRPSGIAAVAPTWAGPLPIVFGRGSDMETRYGLLRGTLRAPAIGWMMYNVLVSNEKSIQSQYKSHVYANPENVTPNIVESRYELTKRKGARFVPAAFLTGLECPCPNKGRIPSAVCQVGSSQRRQRRDKIRGGSRCPSAAGGIPITSRGGTLQLSEGIILVR

SEQ ID NO: 43117 - protein, 558 aa, Oryza sativa
MADVEGQQPHQVSGVSRAQDGVAKVSLGKEHVPGSELWTDGLICAFELIKGHKKLVQHKSWPTIDSMQEKEVPMHMKRHMSRNGHHVATMKPEECDVVENPRQTEFANDPSLFKDRPVHVRAILDHKWVPIGWSRIAELVQRVQSDASWDSEPAEMTDSEDDYTVADVAAPYWQRPVGPTWWCHVTAGHPSVDAWLNSAHWMHPAIRTALRDESRLISDRMKYLLYEVPVRVAGGLLFELLGQSVGDPNREEEDIPIVLRSWQAQNFLVTAMHVKGPSSNINVLGVTEVQELLSAGGSQTPRSAHEVIAHLIGRLSRWDDRLFRKYVFGEADEIELKFVNRRNHEDLNLVSIILNQEIRRLATQVIRVKWSLHAREEIIIELLRHLRGNTTRVILDSIRKDTREMLEEQEAVRGRLFTIQDVMQSTVRAWLQDRSLRITHNLAIFGGGGMVLSIITGLFGINVDGIPGAQNTPYAFGLFAGLLFFVGFVLIGVGILYLGLQNPVTNEKVKVRKLELQDLVSAFQHEAEQHGKVREGLSRHSSSPKSSSASNVDYVLIS

SEQ ID NO: 43118 - protein, 639 aa, Oryza sativa
MAALQPSFSSAMAMKSLKLPKTAALPGFGGIARPQDVQDRSANFTCSRPRAASVTDQSTAEPAKPRQNKHTVDPSAPEFLPLPSFEECFPRSTKESREIVHEESGHVLKIPFRRIHLTGDEKHFDTYDTSGPQNISPRIGLPKIRKEWIDRREKLGGPRYTQMYYAKQGIITEEMLYCATRENLSPEFVRSEVARGRAIIPSNKRHLELEPMIVGRNFLVKVNANIGNSAVVSSIEEEVHKLQWATMWGADTVMDLSTGRHIHETREWILRNSSVPIGTVPIYQALEKVNGIAENLSWEVFRDTLIEQAEQGVDYFTIHAGVLLRYIPLTAKRMTGIVSRGGSIHAKWCLTYHKENFAYDHWDEILDICNQYDVALSIGDGLRPGSIYDANDSAQFAELLTQGELTRRAWAKDVQVMNEGPGHIPMHKIPENMEKQLEWCNEAPFYTLGPLTTDIAPGYDHITSAIGAANIGALGTALLCYVTPKEHLGLPNRDDVKTGVISYKISAHAADLAKGHPYAQAWDDTLSKARFEFRWLDQFALSLDPVTAMSFHDETLPSEGAKVAHFCSMCGPKFCSMKITEDIRKYADEHGYGTVEEAVIQGMNAMSAEFSAARKTISGEQHGEAGGEIYVPESYTARK

SEQ ID NO: 43119 - protein, 509 aa, Oryza sativa; identical to SEQ ID NO: 43057

SEQ ID NO: 43120 - protein, 387 aa, Oryza sativa; identical to SEQ ID NO: 28598

SEQ ID NO: 43121 - protein, 341 aa, Oryza sativa
MSPNLESHIKSQVPALLLRRFFGGAGRRRVFVQTETGCVLGMDLDRSDNAHTVKRRLQLALNVPTGETSLTFGDRVLENDLSFIRPDSPLLLTRNSINRSCSTPCLCPVSKDFEHKDRSGLVEMLGCSISCARVKRLVDDVVTAIRSGVDRVPIGSGLGGSYYYRNISGDRVAIVKPTDEEPFAPNNPKGFVGRALGQPGLKKSVRVGETGFREVAAYLLDHDNFANVPPTALVEITHSIFHINCPVNGGSPAHDQKQQVSSKIASFQQFIAHDFDASDHGTSSFPVAAVHRIGILDIRIFNTDRHAGNVLVRKLDGGTGRFGCQTELFPIDHGLCLPENL

SEQ ID NO: 43122 - protein, 495 aa, Oryza sativa
MEGIHAGTVTMACSWLVLTAAMAVLASWLIRLVSLKWNSSHPCKADEGSRLPPGSRGLPLLGESLEFFTSSTSLELPVFFKRRLNRYGPVFRTNMVGQDLIVCLDPEVNSFVFQQEERLFQCWYPDSFMRIIGADNIITTLGSSHKYIRNLILRLFGPENLRRAMLQDVHRTAQASLLSWLDRPSIELKDAVSSMIFSVTAKKLISYDSLASDGKMWKQFDAFIRGLLAFPIGIPGTAFYKCMQGRKNIMKMLKELIDERKEASGRRGSIDFIDVLLEELNEEKPLISENVALDLIFLLLFASFETTASAITAVVRFLTDNPEALQELAEEHDNIQKRRVDLNSEITWEEYKSMKFTSHVIHEALRLANIAPVMFRKATEDVHIKGFFIPKGSKIMICPSTVHLNPMIYKDPNIFNPWRWKDTAEPTGGASKDFMAFGGGLRLCVGADFAKLQTAIFLHCLVTKYRWKAIKGGTMVLGPGLRFPEGFHIQLFPKP

SEQ ID NO: 43123 - protein, 388 aa, Oryza sativa
MGAGGRMTEKEREEQQKLLGRAGNGAAVQRSPTDKPPFTLGQIKKAIPPHCFQRSVIKSFSYVVHDLVIVAALLYFALVMIPVLPSGMEFAAWPLYWIAQGCVLTGVWVIAHECGHHAFSDYSVLDDIVGLVLHSSLLVPYFSWKYSHRRHHSNTGSLERDEVFVPKQKSAMAWYTPYVYHNPIGRLVHIFVQLTLGWPLYLAFNVSGRPYPRFACHFDPYGPIYNDRERVQIFISDVGVVSAGLALFKLSSAFGFWWVVRVYGVPLLIVNAWLVLITYLQHTHPALPHYDSSEWDWLRGALATVDRDYGILNKVFHNITDTHVAHHLSSTMPHYHAMEATKAIRPILGEYYQFDPTPVAKATWREAKECIYVEPEDNKGVFWYNNKF

SEQ ID NO: 43124 - protein, 731 aa, Oryza sativa
MDTASFVTSLLTSFVIFVVLVLVFTWLSSRPGNAPVYYPSVLLRGLDPWEGRGRGTRSPVGWLRQAISASEGDVVAAGGVDAAVYLVFLSSVLSILVFSGIVLLPVLLPVAATDDNLNLERAIGLKNGKTPQNFTELEKLALGNVQEHSRRLWAFLLSVYWVSFVTYFVLWKSYKHVSNMRAAARSTPDVKPEEFAVLVRDVPKPPPDQTIKDSVDSYFRALHPDTFYRSMVVTDHTKADKIYQEIEGHKQKIARAEVVYAESKTTGKPEGTKPTHRIGFLGLIGKKVDTIEYCNDQIKELLPKLEAEQKTTLREKQQQAAIVFFNRRSAAASASQTLHAHMFDKWTVEQAPEPRQIIWSNLSKKIYERQIRQVVVYTIVFLTVVFYMIPITAISALTTLEKLREKLPFLKVVVDQPKIKTVLQAYLPQLALIVFLALLPSLLMFLSKLEGIPSQGHTVRAAAGKYFYFIVFNVFLGVTISSTLFSALTTIINNPPGIVNMLASSLPGSATFFLTFVALKFFVGYGLELSRLVPLIIFHLKRKYLCKTEDEVRAAWAPGDLGYNTRVPNDMLIVTIVLCYSVIAPLIIPFGVAYFALGWIIVKNQVLRVYVPSYESNGRMWPHMHTRIIAALLIYQITMVGVILLKKFLYSPVLVPLIPISFIFAYICHMRFYPAFAKTPLEVVQHNVKDTPNMDAVYTSYIPACLKPEKLEDVDIFEDAQLHTTSRAPSI

SEQ ID NO: 43125 - protein, 658 aa, Oryza sativa
MASRESFMSTIFFFLLLFSLGCKCIASELHLHATQTAVLKVDASPQLARQIPDTLFGIFFEEINHAGAGGIWAELVSNRGFEAGGPHTPSNIDPWSIIGDDSSIFVATDRTSCFSRNTVALRMEVLCDNCPAGGVGIYNPGFWGMNIEDGKIYNLVMYVKSPETVELTVSLTSSDGSQNLASTTIPVSGASNWTKLEQKLVAQGTNRTSRLQITTNKKGVVWFDQVSLMPADTYKGHGFRTELISMMLDLKPRFLRFPGGCFVEGEWLRNAFRWRESIGPWEERPGHFGDVWHYWTDDGLGYYEFLQLSEDLGAAPIWVFNNGISHNDEVDTAAIAPFVKDVLDSLEFARGNADSTWGSVRAAMGHPEPFPVKYVAIGNEDCGKKFYRGNYLKFYNAIREAYPDIQMISNCDASSSPLDHPADLYDFHVYTDSKTLFSMKNTFDRSSRNGPKAFVSEYAVWRSDAGRGSLLASLAEAAFLTGLEKNSDVVQMASYAPLFVNNNDQTWNPDAIVFNSWQQYGTPSYWMQTLFGESSGAMFHPVTITSSYSGSLAASAITWQDSENSFLRVKIINFGSDPVSLTISATGLQARVNALGSTATVLTSSNVMDENSFSNPNKVVPVKSQLSNAAEQMQVTLAPHSFSSFDLALAQSKLVAEM

SEQ ID NO: 43126 - protein, 731 aa, Oryza sativa; identical to SEQ ID NO: 43124

SEQ ID NO: 43127 - protein, 213 aa, Oryza sativa; identical to SEQ ID NO: 33414

SEQ ID NO: 43128 - protein, 248 aa, Oryza sativa
MPPLHAVSPAAAAAPPRALSSAARVPQRPGCVPERPNILSSSTNFMSLRAGPMRFYSRPLILQNSDKRAVLRHATIEEIEAEKSDIEDQARERMEKAIETVQNNFNTVRTGRANPAMLDRIEVEYYGTPVNLKSIAQINTPDATSLLIQPYDKSSLKLIEKTIVAANLGVTPSNDGEVIRVTVPPLTSDRRKELAKTVAKLAEEGKVAIRNIRRDAIIAYDKLEKEKKLSEDNVKDLSADLQKLLTST

SEQ ID NO: 43129 - protein, 431 aa, Oryza sativa
MPLLHLSPPPHRLLLAGGGRRRLLLPAARRRSLVRVRAAASAAAAAAEAYGLPFPPERAAHHRELAAAAAAVERACRLCVDVKRTLLSGDKKILEKNDQTPVTVADFGVQALISLELQRLFPSIPLVAEEDSASLRSSNTDDNSSNVLVESISSAVAEKVSNANSLLTHDDVLRAIDRGGKNAVSFDSNPASYWVLDPIDGTKGFLGGDDALYVVGLALVVNEKVVAGVMGCPNWSNATIASRKEVSAAAQPDHGILMIAHVGCGTWSRHLSVDIGQFTTAQSTWNRCLVDSCSVVNMARFCIPDSQTWNMIPLSVLFNSTMDESNPRDENEILLLSVYCGSLCKYLTVASGRASVFVLRARTKNLKSWDHAVGVICVQEAGGQISDWSGKPLDLAADLTGRRDIYPSGGVLVTNGALHGKLVEMISANHK

SEQ ID NO: 43130 - protein, 149 aa, Oryza sativa
MFLTHMDDVADHRKWAERLKCERIIHSGDVEDVTADVEWKLTGNGPWDIGADFELIHTPGHTEGSVCLFYKPVKALFTGDHVAKSEESDDLDLFLMYSKQSVGLQLDSMRKLLKLDFEWFLPGHGYRIHYKDVRAKDSAIESLIANYTS

SEQ ID NO: 43131 - protein, 368 aa, Oryza sativa
MVAIENQSQGQRAAEAAAQPRIPREARRLLHEMAASWADVADCRALQVIPLKGAMTNEVYQVRWLNGAPATADGGEVEAEAAAREREVRKVLVRIYGDGVELFFDREDEVRTFECMSRHGQGPRLLGRFTNGRVEEFIHARTLSAADLRDPEISALVASKLREFHNLDMPGPKSVLIWDRLKNWLKTARNLCSSDESKKFRLGSLENEIAALEKEFSGDYHGIGFCHNDLQYGNIMIDEDTNMLTIIDYEYASFNPVAYDIANHFCEMAADYHSEKPHRLDYSKYPDTDEQKRFVKTYLSNSVSEEPDAEEVENLLQSIEKYTLASHLVWGLWGIISDHVNDIDFDYKEYARQRFEQYWQKKQALLTS

SEQ ID NO: 43132 - protein, 337 aa, Oryza sativa
MGSPPPHRLLLLLAVAAVLHRSAAAAEGVIRLPRGRACAAPTDPAAYDRPVIGIVSHPGDGAGGRVSNGTAASYIAASYVKFVESAGARVVPLIYNEPEERLLEKLSLVNGVLFTGGSVKSGPYFETIKKVFQYVLDKNDAGIPFPLFAQCLGFELVSMIVSKDNNILESFSATNQASTLQFPNYSSLEGSVFERFDPDLIKKLSTSCLVMQNHKYGISPKTLRENVALSSFFKILTTSPDENGEVYVSTVQANKYPITCTQWHPEKAIFEFGKQMIPHSEEAVQVTQNFANYFISQARKSQNRPPADKVLDNLIYNYSPTFIGKKSKSFDVVYIFS

SEQ ID NO: 43133 - protein, 422 aa, Oryza sativa
MLAVSPAMCPDIEDRAAVAGDAGMEVVGMSSDDMDQFDFSVDDIDFGDFFLRLEDGDVLPDLEVDPAEIFTDFEAIATSGGEGVQDQEVPTVELLAPADDVGVLDPCGDGAAAVEAKSSSPSSTTSSSQEAESRHKSSSKSSHGKKKAKVDWTPELHRRFVQAVEQLGIDKAVPSRILEIMGIDSLTRHNIASHLQKYRSHRKHMIAREAEAASWTQRRQIYAAGGGAVAKRPESNAWTVPTIGFPPPPPPPPSPAPIQHFARPLHVWGHPTMDPSRVPVWPPRHLVPRGPAPPWVPPPPPSDPAFWHHPYMRGPAHVPTQGTPCMAMPMPAARFPAPPVPGVVPCPMYRPLTPPALASKNQQDAQLQLQVQPSSESIDAAIGDVLSKPWLPLPLGLKPPSVDSVMGELQRQGVANVPPACG

SEQ ID NO: 43134 - protein, 575 aa, Oryza sativa
MGGGGGEAGGGDGGESSPAAAAAAAVAGAAALHIRCANGSKFTVRADLDATVGAFKEVVAGSCDVPAAQQRLIYKGRILKDEQTLESYGVETDHTIHMVRGAGPPAGSAAPAAASPQASAAPSSGPTDGLGSLFPGLGGTGTAGTRPSGLFGSGFPELDQMQQQLSQNPNLMREIMNMPMMQNLMNNPDLIRNMIMNNPQMRDIIDRNPDLAHVLNDPSVLRQTLEAARNPEIMREMMRNTDRAMSNIESSPEGFNMLRRMYETVQEPFLNATTMGGEGNTAPNPFSALLGNQGSNQPRDPATNAPSTGSESTTGTPAPNTNPLPNPWSSNAGGAQGATRAGSTGNARTGATGGLGGLGSADLSSLFGGLAGNTGTGATGGLGGLGSADLGSLLGGSPDSSSLSQILQNPVMMQMMQNIMSDPQSMNQLLNFNPNTRNLMESNTQLREMFQNPEFIRQLTSPETMQQLLSFQQTLLSQLGQNQPRQDGSQGGNATGMRGNVSLDTLMGMLSGLGAGGGIGVPNTSNVPPEELYATQLTQLREMGFIDTAENIQALVATAGNVNAAVERLLGNLGQ

SEQ ID NO: 43135 - protein, 513 aa, Oryza sativa
MPGRVLCCGMRSRGADLAGVEMAAGPQPQGGVSGLFRGPRSSPRYSRVRATATVDPEDIPLEKVQAKSSGSVLPYVGVACLGAILFGYHLGVVNGALEYLAKDLGISENAVLQGWVVSTTLAGATAGSFTGGALADKFGRTRTFILDAIPLAVGAFLSATAHDVRTMIIGRLLAGIGIGISSALVPLYISEISPTEIRGALGSVNQLFICIGILAALVAGLPLAGNPAWWRTMFGISIVPSILLALGMAVSPESPRWLFQQGKLSQAETVIKKLYGREKVAEVMYDLKAASQGSSEPDAGWLDLFSKRYWKVVSVGAAMFLFQQLAGINAVVYYSTSVFRSAGIASDVAASALVGAANVFGTMIASSLMDKQGRKSLLITSFSGMAASMLLLSLSFTWKALAPYSGPLAVAGTVLYVLSFALGAGPVPALLLPEIFASRIRAKAVALSLGMHWVSNFFIGLYFLSVVNKFGISTVYLGFASVCALAVVYIAGNVVETKGRSLEEIERALSSAS

SEQ ID NO: 43136 - protein, 254 aa, Oryza sativa; identical to SEQ ID NO: 32798

SEQ ID NO: 43137 - protein, 411 aa, Oryza sativa
MAAAAARLLERATRTAASCSSALLRSPLDSFSGRFPSFRSPLLRPAPAPSTVFPRGLSDTAFDAQALDTRVPATVITGFLGSGKTTLLNHILTSQHGKRIAVIENEFGEVDIDSSLVASHSSVAEDIVMVNNGCLCCTVRGDLVKMLLKLVKQKGDKFDHIVIETTGLAKPGPVIETFCSDELVSRYVKLDGVVTMVDCKHAMKHLNEVKARWVVNEAVEQVAYADRIILNKTDLVDNAELEVLINKIKLINGMAQMRKTKFGDVDMDFVLGIGGYDLDRIESEVQLHERKETGHCHAGEEHGHQHHHGHVHDSAVSSVSIVSEGVLDLDEVNDWLERLVEEKGEDLYRLKGVISVNESTGRFVFQGVHSMLEGCPAKPWEPDEKRFNKLVFIGRNLDEAALRKAFKGCLL

SEQ ID NO: 43138 - protein, 524 aa, Oryza sativa
MALKSPVDFAGSITSGQKDPCCFGVPGCNPRCVRYNKKSRTCRLVTRAISVDRPQLDFSDSDWKKQFQEDFDRRFSLPHLKDVIDVEPRPTTFSLKSRTPLENVNGSMQGSWNGYVNDDDRALLKVIKFASPTSAGADCIDPDCSWVEQWVHRAGPRKQIYFEPQYVKAGIVTCGGLCPGLNDVIRQIVLTLEKYGVKNIAGIQHGFRGFFEDHLAEVPLNRQVVQNINLAGGSFLGVSRGGANISDIVDSIQARRLDMLFVLGGNGTHAGANLIHEECRKRKLKVSIVGVPKTIDNDILLMDKTFGFDTAVEAAQRAINSAYIEAHSAFHGIGLVKLMGRSSGFITMHASLSSGQVDICLIPEVPFTLDGPNGVLQHLEHLIETKGFALICVAEGAGQEHLQQSNATDASGNMILGDIGVHLHQKIKAHFKEIGVHSDVKYIDPTYMVRAVRANASDAILCTVLGQNAVHGAFAGFSGITTGICNTHNVYLPISEVIKSTRFVDPNSRMWHRCLTSTGQPDFH

SEQ ID NO: 43139 - protein, 163 aa, Oryza sativa; identical to SEQ ID NO: 33241

SEQ ID NO: 43140 - protein, 1365 aa, Oryza sativa
MSLQPPAVEPPEWLRTLPVAPEYHPTLAEFADPIAYILRIEPEASRYGICKIVPPLPRPPEDDTFRRLQAAFAAAASSNGDPSPTFPTRLQQVGLSARNRRAASRRVWESGERYTLEAFRAKAAEFEPPRHAAPPRNPTHLQLEALFWAACASRPFSVEYGNDMPGSGFASPDELPDAANATDVGETEWNMRVAPRARGSLLRAMARDVAGVTTPMLYVAMLYSWFAWHVEDHELHSLNFLHFGKAKTWYGVPRDAMLAFEETVRVHGYADDLNAIVAFQTLNEKTTVLSPEVLLSGVPCCRLVQKAGEFVITFPGAYHSGFSHGFNCGEASNIATPHWLQVAKEAAIRRASTNCGPMVSHYQLLYELALSLRPREPKNFYSVPRSSRLRDKNKNEGDIMVKENFVGSVTENNNLLSALLDKNSCIIVPNADFFVPSFPVALESEVTVKQRFTAGPCSISQQGAENMAADHVAVDKVTEIQDMSGSLYPCETSLVGCSNRKLYETKYGQRDAAALCLSTSEIQSRGIDTARSHPAGGILDQGRLPCVQCGILSFACVAIIQPREAAVQFIMSKECISSSAKQGGIGASDDTSNWIDQSHEISPPPGPASGTDDNVKHAVSLAHVSDRCRELYASNTDGCTSALGLLASAYDSSDSDDETTEDVSKHSKKNDSVNQSTDPQILETSASCSSTVQCQKTNSHLHEEECEARATSLMKPVSHNSRPISQSNRDTDIDHFIELGKSGTQCSGYLDLVDDLTTSVLKSSSDTCVSAAKASMDPDVLTMLRYNKDSCRMHVFCLEHALETWTQLQQIGGANIMLLCHPEYPRAESAAKVIAEEPGIKHDWKDITFKEATEEDVKKIQLALQDEDAEPTGSDWAVKMGINIYYSAKQSKSPLYSKQIPYKSIIYKAFGQENPDSLTDYGCQKSGSTKKKVAGWWCGKVWMSNQVHPLLAREREEQNSSVVYGKAMFTTISHGKVQDEASTRCNTSNRTPSRRTSRRKKGVSAEKSKPKNKRSTASDEASMLCSGLGMNSGVIHDQTENSDDYDKHGNGDEIEEGTNPQKYQQRKLQNVTRKSSSKKRKDEKRTDSFHELYDEDNGVDYWLNMGSGDDATLGNSRQQSPDPVKVKSGGKLQGKRKSSKYKSNDDLLNEENKLQKMNKKSSSKKQKNDKINRQLQEDQTEDDHMDHLVDVAVADEVTLDNEDKITEDKIDDVKVKSRGKSQNGKRKGSKHQATDGLRAGNKVAKFPCDIEGCDMSFSTQQDLLLHKRDICPVKGCKKKFFCHKYLLQHRKVHIDERPLKCTWKGCKKAFKWPWARTEHMRVHTGVRPYECQEPGCGQTFRFVSDFSRHKRKTGHSSDKRRKNST

SEQ ID NO: 43141 - protein, 422 aa, Oryza sativa
MKGSAIPAVAIMPSPLFLWRFKVVLFLLWGLCCCKIGWDSVMRMSADLRDLFLYEAFLYYNPLLLVALMIWLWGVNLWVFAQSSVNYARVFDLAQTHLSHREIWRCATWLTLIVPTSMTAYLYLYSHGEVSLAASQPVLLYAILLIVLLSPFDMFYLSSRFYFLRTVWRIMLPLQAITFPDFFLADIFTSMSKVFSDLERSVCRMVNRQVATTAWLEADSICGSHSVAIPLVLVFPYLCRLFQCLRQYKDTKEKTCLLNALKYSTAVPVIFLSALKYHVFPDKWVSFYRPLWLMSSVINSLYSFYWDIKRDWDLSILTRIFMFKNPSTWTNLLYGQIWVYYWVLASNLVLRCTWTYKLSAHLRHNYLTVFTIAALEILRRFQWVFFRVENEWNKMTAKQSLEMSSDMPSEGDRLLDSNSHTV

SEQ ID NO: 43142 - protein, 587 aa, Oryza sativa
MRGGGGGGGGGGEEAGQKLKSMDVDKLENGGDKPALKYHGWRAMPFIIGNETFEKLGTLGTSANLLVYLTQVFHMRSVDAATLLNGLNGTTSLAPIIGAFLSDAYLGRYLALAIASVASLIGMFLLTMTAAADGLHPAECGVGETCSKATSGQFAVLFMSFAFLVLGSAGIRPCSMPFGADQFDPHTESGKRGINSFFNWYYFTFTSAMLVSATVIIYVQSNVSWPIGLGIPTALMLLACVLFFMGTRLYVRVTPEGSPFTSIVQVFAAAARKRSLKQPKDPKQDLFDPPHTSAIVTKLAHTDQFRCLDKAAIVSGPDDVRAGGAAPSNPWRLCSVQQVEEVKCLIRIVPVWSTGIIYYVAVVQQSTYVVLSALQSDRHLGRSFQIPAASFTVFAMLAQTLWIPIYDRLLVPRLRRVTGKDEGLTLLQRQGIGIALSTVAMVMSAVVEDRRRHIALTQPTLGTTITGGAISAMSSLWMVPQLMVLGLSEAFNLISQIEFYYKEIPEHMRSVAGALAFCNLALGNYLSGFLVTIVHRTTGAGSNWLAQDLNKGRLDLFYWMIAGIGIFNIIYFMICAKWYRFKGAAAN

SEQ ID NO: 43143 - protein, 705 aa, Oryza sativa
MAAAATAAASPVEGLTGGGGGGGGGVDGLFVELWRACAGPLVTVPAVGERVFYLPQGHIEQVEASTNQVAEQQGAPLYNLPWKIPCKVMNVELKAEPDTDEVYAQLTLLPEKQQDGNGSGNGNVSKDKVEEEEVVPPAATERPRVHSFCKTLTASDTSTHGGFSVLRRHADECLPPLDMSQHPPTQELVAKDLHGVEWRFRHIFRGQPRRHLLQSGWSVFVSAKRLVAGDAFIFLRGENGELRVGVRRAMRQQANIPSSVISSHSMHLGVLATAWHAVNTGTMFTVYYKPRTSPSEFVVPRDLYKESLKRNHSIGMRFKMTFEGEEAAEQRFTGTIVGVGDSDPSGWADSKWRSLKVRWDEAASVPRPDRVSPWQIEPANSPSPVNPLPAPRTKRARPNVLASSPDLSAVNKEVASKVMANSQQNGLPRAFHSQENMNLRSRFGDSNELNTSQKLTMWSSGSNQEKNNVSVQRELGSQSWMQMRRPDGSSEILSGFQPLKDTRNPLSSFPSQISGNRSNTWNTINVHYPDQNANHNMYPGTWSLMPPNTGFGVNQQNYLMTPDITLPQRSLNAKFGGNGAFTSLRAHGIDQRSSGWLGHIEPSSHIDDASSSLIKPQPLVIDHNVQKAKGSSCMLFGISLDSPAKPELLISPPSVAFDGKLQQDALEEDECSDPSKTVKPLDGAQHDSAREKHQSCPDGTKKHSE

SEQ ID NO: 43144 - protein, 766 aa, Oryza sativa
MASHIVGYPRMGPKRELKFALESFWDGKSSAEDLEKVATDLRASIWKQMADAGIKYIPSNTFSYYDQVLDTAAMLGAVPERYSWTGGEIGFSTYFSMARGNATVPAMEMTKWFDTNYHFIVPELGPNTKFSYSSHKAVNEYKEAKALGVDTVPVLVGPVSYLLLSKPAKGVEKSFALLSLLSSILPVYKEVIAELKAAGATWIQFDEPTLVLDLDSHQLAAFSAAYTELESALSGLNVLIETYFADIPAESYKTLTSLNSVTAYGFDLIRGAKTLDLIKSAGFPSGKYLFAGVVDGRNIWADDLAASLTTLESLEAIVGKDKLVVSTSCSLMHTAVDLVNETKLDSEIKSWLAFAAQKVVEVNALAKALAGQKDEAYFAANAAAQASRRSSPRVTNEEVQKAAAALKGSDHHRATNVSARLDAQQKKLNLPVLPTTTIGSFPQTVELRRVRREYKAKKISEEEYISAIKEEISKVVKIQEELDIDVLVHGEPERNDMVEYFGEQLSGFAFTANGWVQSYGSRCVKPPIIYGDVSRPNPMTVFWSKLAQSMTSRPMKGMLTGPVTILNWSFVRNDQPRFETCYQIALAIKKEVEDLEAGGIQVIQIDEAALREGLPLRKAEHAFYLDWAVHSFRITNCGVQDTTQIHTHMCYSNFNDIIHSIINMDADVITIENSRSDEKLLSVFREGVKYGAGIGPGVYDIHSPRIPSTEEIADRVNKMLAVLDTNILWVNPDCGLKTRKYNEVKPALTNMVSAAKLIRTQLASAK

SEQ ID NO: 43145 - protein, 204 aa, Oryza sativa
MTSVWKTKVLTGLNKLFDKDGKKAAAAEFLKSFNKEEIGKEIDDKKTELEPKVVEVVESSPPEIKALLKDKKTASKIKKNGPAVTKFLEELAKIDFPGAKPVSDAVAKSGTTPLSPAIAFILEKVAPFVPKEEPKPEPEAEAAAETTSREVAVEEEKKEEEAAPAEPAAAAAEAAAPSTEVVEEKKEEEKPAEAAAPAAEPEKQ

SEQ ID NO: 43146 - protein, 681 aa, Oryza sativa; identical to SEQ ID NO: 42692

SEQ ID NO: 43147 - protein, 333 aa, Oryza sativa
MRRLRGLRVTTDVLVSTQVGKRLRYLTKHPHSDIQSMATDLLGYWKKVVIEEGKKNGTTENVGSTNSAARAEKAQPMKVDKSSASGSVKPEKREVNVRGQKPESIKVEKITNNDSKNQQVEVERAPKEATRTPDTKKPSSVPNGPPKLTSLVKCNDPTRDKIRELLADAFSRVHGETSKDDREEVRNILDEVDARDPFRVAVTVESALFERLGRSTGAHKAKYRSIMFNLRADNNTDFRRRVLLGQVRPERLVDISPEEMASDARKLENKQIKEKALFDCERGGAPKATTDQFKCGRCGQRKTTYYQLQTRSADEPMTTFVTCVNCNNHWKFC

SEQ ID NO: 43148 - protein, 952 aa, Oryza sativa
MAPAVAGGGGRRNNEGVNGNAAAPACVCGFPVCACAGAAAVASAASSADMDIVAAGQIGAVNDESWVAVDLSDSDDAPAAGDVQGALDDRPVFRTEKIKGVLLHPYRVLIFVRLIAFTLFVIWRIEHKNPDAMWLWVTSIAGEFWFGFSWLLDQLPKLNPINRVPDLAVLRRRFDHADGTSSLPGLDIFVTTADPIKEPILSTANSILSILAADYPVDRNTCYLSDDSGMLLTYEAMAEAAKFATLWVPFCRKHAIEPRGPESYFELKSHPYMGRAQEEFVNDRRRVRKEYDDFKARINGLEHDIKQRSDSYNAAAGVKDGEPRATWMADGSQWEGTWIEQSENHRKGDHAGIVLVLLNHPSHARQLGPPASADNPLDFSGVDVRLPMLVYVAREKRPGCNHQKKAGAMNALTRASAVLSNSPFILNLDCDHYINNSQALRAGICFMLGRDSDTVAFVQFPQRFEGVDPTDLYANHNRIFFDGTLRALDGLQGPIYVGTGCLFRRITLYGFEPPRINVGGPCFPRLGGMFAKNRYQKPGFEMTKPGAKPVAPPPAATVAKGKHGFLPMPKKAYGKSDAFADTIPRASHPSPYAAEAAVAADEAAIAEAVMVTAAAYEKKTGWGSDIGWVYGTVTEDVVTGYRMHIKGWRSRYCSIYPHAFIGTAPINLTERLFQVLRWSTGSLEIFFSRNNPLFGSTFLHPLQRVAYINITTYPFTALFLIFYTTVPALSFVTGHFIVQRPTTMFYVYLAIVLGTLLILAVLEVKWAGVTVFEWFRNGQFWMTASCSAYLAAVLQVVTKVVFRRDISFKLTSKLPAGDEKKDPYADLYVVRWTWLMITPIIIILVNIIGSAVAFAKVLDGEWTHWLKVAGGVFFNFWVLFHLYPFAKGILGKHGKTPVVVLVWWAFTFVITVVLYINIPHIHGPGRHGAASPSHGHHSAHGTKKYDFTYAWP

SEQ ID NO: 43149 - protein, 173 aa, Oryza sativa
MAAAATATRRPSGHVLSAAHYRSASPTRVKLAGGGARASVSVSSVSRRSCMCSPTNHPGSFRCSLHKEQKRSVHHKAAAAPSSPPSPTSPPASGGAVRLGGARRMGGSALVRIGAVESGQWARRALAATIRPSPAAQQAQHRRRVAGLRPRPSRLSAVSMAGDRAGDNHHHHR

SEQ ID NO: 43150 - protein, 291 aa, Oryza sativa
MKLGFKKSPPAYLSLLQGPAAAANLTLAIKALTGGVSFASGGAGVLDSTYAGKCIPLSTQLRSMEATRAAMVSKVGTRAVAAHLARSFFLLGVVNNDMFVFATAQQQQNRSATPAEVAAFYTTLITKFSAALTELYEMGARKFGIINVGLVGCVPLVRAQSPTGACSDDLNGLAAGFNDALASLLSDLAARLPGFAYSIADAHAAGQLAFADPAASGYTSVDAACCGSGRLGAEEDCQVGSTLCADRDKWAFWDRVHPSQRATMLSAAAYHDGPAQLTKPINFKQLARTTA

SEQ ID NO: 43151 - protein, 330 aa, Oryza sativa
MAEAAAAPPAAAATNYEVDLGNLMAYDPSHHLPAASSSREELREECLRKGTELAQAVADALFALPATEDRDGPMVRLPPPTTRFPREKHLPRPKPATKWEQFAKMKGITKHKKNKREWDEQTQTWKRTYGYDRVNDDKDIPIIEAKATDEPGVDPFAQRREDKKKHVEKQEKNRLENLKKAAKVGALPSHIQLAATALPITGTKADIPKKSRKKDLEDVAGMASSATASGGKFDEKLPGEKPPKNPGKHRKFLPVVEGKGMGNQEKQQNDKILNALLAKSSEDQMDVGRAITMYKVKKEKQRRKDKEKSSSSNKLKPQKKTLKKSSKKKA

SEQ ID NO: 43152 - protein, 526 aa, Oryza sativa
MEMRRFLGGLCFLALLRLGGAAEAVVGVAGVDGRRAIAATDEDFVCATMDWWPPDKCDYGTCSWGLASLLNLDLSNKILLNAIRGTFSPLKLRLGGSLQDKLVYGTGDGGGPCAPFVKNTSEMFGFTQGCLPLHRWDELNAFFQKSGARIVFGLNALNGRVPLPDGSMGGPWDYTNAASLIRYTASKGYKIHGWELGNELSGSGVGTKVGADQYAADVIALKSLVDTIYQGNPSKPLVLAPGGFFDAGWFTEVIVKTRPNLLNVVTHHIYNLGPGVDTHLIEKILNPSYLDGMVSTFSNLQGILKSAGTSAVAWVGESGGAYNSGRHLVTDSFVFSFWFLDQLGMSAKYDTKSYCRQSLIGGNYGLLNKETFQPNPDYYSALLWHRLMGTKVLSATFNGTNMIRTYAHCAKDSPGITLLLINLSGNTTSQVSVTSEGAHANTVKKHSRKTRHLAAGSMREEYHLTAKDGSLQSQVMLLNGRALVADENGEIPRLEPVKVDAAQPIAVAPYSIVFAHIHNFPAPACS

SEQ ID NO: 43153 - protein, 97 aa, Oryza sativa
MGGGMRVVVTGATGYLGGRLCAALAAAGHAVRAFARRSSDASGLPASVELAYGDVTDEGSLATAFDGCDAVFHVAAAVEPWLPDPSVFTTVRVLIHF

SEQ ID NO: 43154 - protein, 361 aa, Oryza sativa
MESMEGNGGGRLVVTELSHIKELVRQLEGHLGGSGSPDLCKHLASQIFSVTERSIGMIRSGHFDGHRKRSAAAVAAGDLDSATPSPLSDVSDLPFKATKKRKTSTEKKRHQIRVSSTGGVENPPVDDGHSWRKYGQKEILGAKHPRGYYRCTHRHSQGCMATKQVQRTDEDATVFDVFYHGEHTCVHKAVAAGAGKPETETDTNAAAESRLHDLSSGLTVKIEGLTAPPQQQQGGGGWNAMPPFCLSSPVSGLAPPDQHNPFSAPSTPENRLAAAASSAASPATSDSMAAAPFHQAAAGGGDEAWRDAELQEVVSALVAATTTTATAQPAPATAMVDADLSALDAFEFDPGFTIDITSFFA

SEQ ID NO: 43155 - protein, 256 aa, Oryza sativa
MSREENVYMAKLAEQAERYEEMVEYMEKVAKTVDVEELTVEERNLLSVAYKNVIGARRASWRIVSSIEQKEEGRGNEEHVTLIKEYRGKIEAELSKICDGILKLLDSHLVPSSTAAESKVFYLKMKGDYHRYLAEFKTGAERKEAAESTMVAYKAAQDIALADLAPTHPIRLGLALNFSVFYYEILNSPDKACNLAKQAFDEAISELDTLGEESYKDSTLIMQLLRDNLTLWTSDLTEDGGDEVKEASKGDACEGQ

SEQ ID NO: 43156 - protein, 216 aa, Oryza sativa
MLSSTALRPLAQPATATATATAFSASRTAAAAGRRGSAAGVVVRAVRNYDSIPKREPFSSSRSVLDEFLRQEKPLVQRTKDQITDYCTTLEGDECCSCWDAYFELNKLEQELPKEAIARMVKDSEGDPRYLINSIHHRSDLRKKMAEKSHNSLSSNSLGQAAKPRPFPVPDGLPKTQEELAEEQEALMPESSYTRLLRRMGRFPDWYTPRPDHETD

SEQ ID NO: 43157 - protein, 284 aa, Oryza sativa
MGGFVKTQKTNAYHKRFQVKFKRRRQGKTDYRARIRLTNQDKNKYNTPKYRFVVRFTNKDITAQIVYATIAGDIVMAAAYSHELPRYGLEVGLTNYAAAYCTGLLLARRVLKLRGLDQEYEGNIEATGEDYYVEPADERRPFRALLDVGLIRTTTGNRVFGALKGALDGGLDIPHSDKRFAGFKKDEKQLDSGIHRKYIYGGHVADYMRSMAEEEPEKFQAHFSEYLKKGIDADGMEALYKKVHAAIRADPTMAKSTKKEPATHKRYNLKKLTYEQRKASLSKD

SEQ ID NO: 43158 - protein, 337 aa, Oryza sativa
MSFFFRAASRPARPSPQELVRSIKESLLALDTRTGAKALEDVEKNVSTLRQTLSGDGEVEPNQEQVLQIALEICKEDVLSLFVQNMPSLGWEGRKDLAHCWSILLRQKVDEAYCCVQYIENHFDLLDFLVVCYKNLEVALNCGNMLRECIKYPTLAKYILESSSFELFFQYVELSNFDIASDALNTFKDLLTKHEAAVSEFLCSHYEQFFELYTRLLTSTNYVTRRQSVKFLSEFLLEAPNAQIMKRYIVEVSYLNIMIGLLKDTSKNIRICAFHIFKVFVANPNKPRDIIQVLVDNHRELLKLLGNLPTSKGEDEQLEEERDLIIKEIEKLVHSSV

SEQ ID NO: 43159 - protein, 304 aa, Oryza sativa
MVFGQVVIGPPGSGKTTYCNGMSQFLSLVGRKVAVINLDPANDVLPYECAINIEDLIKLSDVMSEHSLGPNGGLVYCMDYLEKNIDWLEEKLKPLIEDHYLLFDFPGQVELFFLHSNARSIIYKLIKKLNLRLTAVHLIDAHLCCDPGKYVSALLLSLSTMLHMELPHINVLSKIDLIENYGNLAFNLNFYTDVEDLSYLQRHLDQDPRSAKYRKLTKELCDVIDDFGLVNFTTLDIQDKESVGNLVKLIDKSNGYIFSSIDSSVVEFSKIAAAPRDWDYYRTAEVQEKYMKDDEFVQKTSKTR

SEQ ID NO: 43160 - protein, 423 aa, Oryza sativa
MQFVSPKGLLNYFTGGNSSIFASNEGEQLTSRVQQIKKYLADFETGGSATCVPEFPRKLDWLNTAPLQFGRDLKGRVVLLDFWTYCCINCMHVLPDLEFIEKKYKDKPFTVVGVHSAKFDNEKDLEAIRNAVLRYNITHPVVNDGDMYLWRELGVNSWPTFVVIGPNGKVLAQISGEGHRKDLDDVVGAALEFYEENKLLQNSSLPLALEKDKDSRLLASPLKFPGKLAIDVLNNRLFISDSNHNRIVVTNLEGEFICQIGSSEEGLLDGTFDTASFNRPQGLAYNSKKNILYVADTENHALREINFVSETVKTLAGNGTKGSDYRGGGQGTNQVLNSPWDVCYDPSKETLYIAMAGQHQIWKHNTLDGVTEVLSGDGYERNLNGSSLEIMIGLARMCYSSIHWVLSMLVIIKYMLRTLTITR

SEQ ID NO: 43161 - protein, 336 aa, Oryza sativa; identical to SEQ ID NO: 33433

SEQ ID NO: 43162 - protein, 963 aa, Oryza sativa
MAGNDNWINSYLDAILDAGKAAIGGDRPSLLLRERGHFSPARYFVEEVITGYDETDLYKTWLRANAMRSPQERNTRLENMTWRIWNLARKKKEFEKEEACRLLKRQPEAEKLRTDTNADMSEDLFEGEKGEDAGDPSVAYGDSTTGSSPKTSSIDKLYIVLISLHGLVRGENMELGRDSDTGGQVKYVVELAKALSSSPGVYRVDLLTRQILAPNFDRSYGEPTEMLVSTSFKNSKQEKGENSGAYIIRIPFGPKDKYLAKEHLWPFIQEFVDGALGHIVRMSKTIGEEIGCGHPVWPAVIHGHYASAGIAAALLSGSLNIPMAFTGHFLGKDKLEGLLKQGRHSREQINMTYKIMCRIEAEELSLDASEIVIASTRQEIEEQWNLYDGFEVILARKLRARVKRGANCYGRYMPRMVIIPPGVEFGHIIHDFEMDGEEENPCPASEDPPIWSQIMRFFTNPRKPMILAVARPYPEKNITSLVKAFGECRPLRELANLTLIMGNREAISKMNNMSAAVLTSVLTLIDEYDLYGQVAYPKHHKHSEVPDIYRLAARTKGAFVNVAYFEQFGVTLIEAAMNGLPIIATKNGAPVEINQVLNNGLLVDPHDQNAIADALYKLLSDKQLWSRCRENGLKNIHQFSWPEHCKNYLSRILTLGPRSPAIGGKQEQKAPISGRKHIIVISVDSVNKEDLVRIIRNTIEVTRTEKMSGSTGFVLSTSLTISEIRSLLVSAGMLPTVFDAFICNSGSNIYYPLYSGDTPSSSQVTPAIDQNHQAHIEYRWGGEGLRKYLVKWATSVVERKGRIERQIIFEDPEHSSTYCLAFRVVNPNHLPPLKELRKLMRIQSLRCNALYNHSATRLSVVPIHASRSQALRYLCIRWGIELPNVAVLVGESGDSDYEELLGGLHRTVILKGEFNIPANRIHTVRRYPLQDVVALDSSNIIGIEGYSTDDMKSALQQIGVLAQ

SEQ ID NO: 43163 - protein, 763 aa, Oryza sativa
MDAHDGEADELPPPPPVPANVVPIKADDVESEVPANKPAKPKRFPMARPGLGRKGQPIQLLANHYRVSVKSSEEYFFHYNVILKYEDDRPVDGKGVGRKVIDKLQQTYRSELSSKDFAYDGEKSLFTIGALPQVTNEFTVVLEDVSTGKTAANGSPGGNDSPGGSDRKRVRRPYQTKTFKVELCFAAKIPMNAIAQAIKGQESENSQEALRVLDIILRQHSAKQGCLLVRQSFFHNNPNNFVDLGGGVMGCRGFHSSFRGTQSGLSLNIDVSTTMIVKPGPVIDFLLANQKVDHPDRIDWQKAKRALKNLRIRTTPVNSEFKIIGLSDRNCNEQMFSLRQRNGNNGDVDEVEVTVYDYFVKNKGIELRYSGNLPCINVGKPKRPTYFPIELCSLIPLQRYTKALSTLQRSSLVEKSRQKPQERMSVLNDALRHSNYDSDPMLRASGISIAQNFTQVEGRVLQPPKLKAGNGEDIFPRNGRWNFNNKKLIQTCSVDKWAVVNFSARCDVRNLIRDLIRNASAKGIQMAEPFDVFEESPSLRRAPVSRRVDDMFEQIKSKLPGAPKFLLCLLPERKNCEVYGPWKRKCLAEFGIVTQCLAPQRVNDQYLLNLLLKINAKLGGINSLLQIEASPSIPLVSKTPTIILGMDVSHGQPGQSDRPSIAAVVSSRQWPLISKYRASVHTQSPKLEMMSSLFKPRGTEDDGLIRESLIDFYTSSGKRKPDHVIVLGMELVKASLLRSLTLSLIRSLRHANFSMRSGHQSSQ

SEQ ID NO: 43164 - protein, 534 aa, Oryza sativa
MASPAAEGDAVSAGFAELERQQQLLASCTRLYKQLEEHFASLERGLAARSDSLRHKRRAAEARASAAMDSLRRREASIDGSVSRALDHLDDLASASSVPSDAAAAAEGVAESLRAMCARMDSAGFFGFVVARRKEVDALRAEMPPALKCCVDPAKFVMDAVADVFPVDRREAKNPTDLAWACVLILEAAVPALADPDPEIGAARLLVPRAARERARGMAREWKEAAERKGGVEWTKPPDAHAFLQHVATFAVAEREDRGIYRRIVVSFSWRRQMPRLALTLGLEEDMADIIEELIAKGQQLDAVNFAYEAGLQEKFPPVPLLKSYLADSKKTSCTVSDNSSTSSGQSGSNANKKEQSVLRAVIKCIEDRKLEAEFPLEDLQRQLEELEKAKTEKKKATSSASSGGSSGPATKRIRASNGGPMPPAKAGRLTNNACVSSTPAATTFVRSPSHTSYAMASPYPYDRPVGHGLYCNQSPPAIREPYVYPAKEVTNFAPGLPYSSPPISYPHAYGGYNNGMGAYNNGMAPAFHQAYYR

SEQ ID NO: 43165 - protein, 688 aa, Oryza sativa
MRAAEERKGVVPAARRRDQFPVGMRVLAVDDDPVCLKVLETLLLRCQYHVTTTNQAAIALKMLRENRDMFDLVISDVHMPDMDGFKLLELVGLEMDLPVIMLSVNGETKTVLKGITHGACDYLLKPVRIEELRNIWQHVIRRKFSTRDRANLDFYEECNKPPNADSDHVHGHVTCGSPDQSGRPSKKRKEYCSEEEDEGEVNTQDIDDPSAPKKPRVVWSVELHRKFVAAVNQLGIDKAVPKRILELMNVEKLTRENVASHLQKYRLYLKRLSAVASQQVSIVAALGGRDPFLHMGGFEGLQGYQAFTSSAALSSFTPHGLLNSPRNNPAALGTQGVPASKSIQTMSGSHTLSHSINDANKYHLSLPGNQKGNLGQGLATSLGQTQMQQKWIHEETDDLSTILSGNGLSNGMSGTLQSVTSSPLLPQELAECTQAKIVSQPSIRTSSVSSEHIEGAVGVSSGLLESRVSQQSTIPLSGFSANGLLIHGSFNNTCANKLGGTSSSCAPARSSNDLMVARDTKGGASSFGGAMLLPPDTEQKYLNFGGGNGLKQKFDDRTADSLFDLKFVWSSVPSSQLASNIGAHHAMSQRWNNSSSNSTNIGARMIGQATSSGSTVIPQMKTDFLVSGDMAMPKNASDLSIPKLQSELSSSSCSFDGLLNSIVKVEKDDVTFSDALGWCDFYSLGACI

SEQ ID NO: 43166 - protein, 245 aa, Oryza sativa
MAAAAATADLSAAADKGAALPELMTEFMVDMKCDGCVTAVKNKFQTLEGIKNIEVDLNNQVVRVLGSLPVNTMLDTLHQTGRDARLIGQGNPNDFLVSAAVAEFKGPVIFGVVRLAQVNMELAIVEATFSGLSPGKHGWSINEFGDLTRGAESTGKVYNPSDYRSNKPLGDLGTLQAGKKGEAQFSASKEKLKVVDLIGRSIALYATEDRSDPGIAAAVIAKSAGVGENYKKLCTCDGVTIWESS

SEQ ID NO: 43167 - protein, 909 aa, Oryza sativa
MGSSLPAKEANLFKVIVKSYETKQYKKGLKAADSILKKFPEHGETLSMKGLTLNCMDRKSEAYELVRRGLKNDLKSHVCWHVYGLLYRSDREYREAIKCYRNALRIDPDNIEILRDLSLLQAQMRDLSGFVETRQQLLTLKPNHRMNWIGFAVAHHLSSNSSKAIEVLEAYEGTLEDDYPPENERYEHSEMLLYKISLFEECGMLDRALEEMQKKESKIVDKLSFKEQMACILLKLGRFEEAEKTYRSLLFMNPDNYKYFIAVQKCLGLYSENGQYSTDDVDRLCELYSSLKEEYGWSSAVKRIPLDFLEGEKFQEAADNYVRPLLTKGVPSLFSDLSPLYEQPGKANILEELFLKLERSIRTSGCFPGSSHTEPPSTLLWTLFLISQHYDRRGQYDIALDKIDEAISHTPTVIDLYSIKGKILQHAGNFSAAAALADEARSMDLADRYLNSECVMQMLQADQVGLAEKTAVLFTKDGDQHNNLHDMQCMWYELASGESYYRQGDLGRALKNFLAVEKHYADMTEDQFDFHSYCLRKMTLRAYVSMLKFQDRLHAHEYFHKAAAGAIRCYMKLHDSPSKSSTEENDEMSKLPPAQRKKLRQKQKKAEARAKREAEEKQEDETTSSHTSKSGKKQNARPVDLDPHGEKLVQIENPLAEGTRYLKLLQNNSSDSLETHTLSFELNMRKQKILLAFQAVKQLIKLDENSPDSHRCLIRFFHKINNLPSPGTDSEKLIWNVLEAERPDLRQLHGKSLVEVNRSFLEKHSASLTHRAAAAEMMYLLEPDKKLEAIKLIEDSVNSTASGNSVLGPVNEWKILDCIDVHKLLETIFGDQDVANSWKARCAEYFPYSTYFEGIKSASAAYCSVANSLEDSSENGIVANAQMKSADGETCTLNGTVHIVDELSNLSIR

SEQ ID NO: 43168 - protein, 125 aa, Oryza sativa
MIGAWHFFLWCYCLEDYPVSCIRQWRQTALGHAWHHASRIHPCVFGRRICSVIHQNSYSQSLPSFSALEAGCTQLPSRSGPICLSQTHSLCERPSRMQSIASIWVEDDCNSVSELQKQILTFRWG

SEQ ID NO: 43169 - protein, 394 aa, Oryza sativa; identical to SEQ ID NO: 33528

SEQ ID NO: 43170 - protein, 209 aa, Oryza sativa
MVGLVGGGGWRVGDDAAGGGGGGAVAAGAAAAAEAEHMRRLHSHAPGEHQCSSALVKHIKAPVHLVWSLVRSFDQPQRYKPFVSRCVVRGGDLEIGSVREVNVKTGLPATTSTERLELLDDDEHILSVKFVGGDHRLRNYSSIVTVHPESIDGRPGTLVIESFVVDVPDGNTKDETCYFVEAVIKCNLTSLAEVSERLAVQSPTSPLEQ

SEQ ID NO: 43171 - protein, 74 aa, Oryza sativa
MEADDMEQVGLSYSGAMHGGEEAATELQVGGAVRPWLLILLAHEAALRRLRVAAGAVAPPPRSVIGEPASCSID

SEQ ID NO: 43172 - protein, 274 aa, Oryza sativa
MGIGSMAREEKAIIYVTSAYLTNSSLIPQLEGIEEVQFEVELVQFVQVRDMLGDGRLIKRRVVDGKGEFPMDCPLHDSLLRVHYKGMLLDEPKSIFYDTRVDNHGEPLEFCSGEGLVPEGFEMCVRLMLPGEKSIVTCPPDFAYDKFPRPANVPEGAHVQWEIELLGFEMPKDWTGFTFQEIMDDEEKIKTTGNRLFKEGKFELAKAKYEKVLREYNHVHPQDDDEGKIFANSRSSLHLNVAACYQKMGEYRKSIDTCNKVCFQKELCTLKEFS

SEQ ID NO: 43173 - protein, 630 aa, Oryza sativa
MSLIDHPNLLRAYCSFTNGHQLWVIMPYMAAGSALHIMKTSFPDGFEEPVIATLLREVLKALVYLHSQGHIHRDVKAGNILIDTNGAVKLGDFGVSACMFDTGNRQRARNTFVGTPCWMAPEVMQQLHGYDYKADIWSFGITALELAYGHAPFSKYPPMKVLLMTLQNAPPGLDYERDKRFSKSFKDLVATCLVKDPRKRPSSEKLLKHSFFKHARTAEFLARSILDGLPPLGERFRTLKGKEADLLLSNKLGSESKEQLSQKEYIRGISGWNFNLEDLKNAAALIDNTNGTCHLDGVNSKFKDGLQEANEPENIYQGRANLVASARPEDEIQEVEDLDGALASSFPSRPLEALKSCFDVCGDDDPPTATDLREQPNMESTSPMQQFQQIENHKSANCNGESLERSASVPSNLVNSGSHKFLSGSLIPEHVLSPYRNVGNDPARNECHQKNTCNRNRSGPLFRQMKDPRAHLPVEPEEQSEGKVIQRRGRFQVTSDSIAQKVASSASSSRCSNLPIGVTRSTVHPSTILPTLQFMIQQNTMQKEVISRLISSIEEISDAADASTTGSSQPSGVHFREKELQSYIANLQQSVTELAEEVQRLKLKNTQLEEQINALPKKDERLRREDTRQQ

SEQ ID NO: 43174 - protein, 213 aa, Oryza sativa; identical to SEQ ID NO: 32810

SEQ ID NO: 43175 - protein, 242 aa, Oryza sativa
MGRARRSAGGGLHCCLAFLFKFLAFLQAFAAVSALLYAAWILSRWARHHHLHLQDLLPDLWFVCALMAAGLFYCLLLLAGCVAAEINSPCFLCFYTILAVVMMLLEAALAADLFFNKHWIQDLPYDRTGELDNLLSFIQTNLDLCKWAALAIVATQALSLLLATILRSMLSTPSADYDSDEDFVVIRRPLLVAQGAPAYLPTTADTRGFHPDLWSSRMRHKYGLNSSNYTYNTLDPNAPPPQ

SEQ ID NO: 43176 - protein, 466 aa, Oryza sativa
MDVEKVERKEVAVDDDGRVRTGTVWTATTHAITAVIGSGVLALPWSVAQMGWVLGPIALVVCAYITYYTAVLLCDCYRTPDPVHGKRNYTYMDVVRSCLGPRDVVVCGIAQYAILWGAMVGYTITTATSIMSVVRTNCHHYKGPDATCGSSGTMYMVLFGLAEVVLSQCPSLEGVTLISVVAAVMSFTYSFVGLFLSAAKVASHGAAHGTLLGVRVGAGGVTASTKAWHFLQALGNIAFAYTYSMLLIEIQDTVKSPPSENVTMKRASLYGIGVTTVFYVSIGCVGYAAFGNAAPGNVLTGFLEPFWLVDIANVAVVIHLVGAYQVYAQPVFACYEKWLASRWPESAFFHREYAVPLGGGRAVRFTLCKLVLRTAFVAVTTVVSLVLPFFNAVLGLLGAVAFWPLTVYFPVTMYMAQAKVQRGSRKWVALQALNVGALVVSLLAAVGSVADMAQRLRHVTIFQTQL

SEQ ID NO: 43177 - protein, 591 aa, Oryza sativa
MAMGAVLSSRTFASPLSSSGKQHPPQNNKCTCSSPPTRDKFSRLTTRTTIFQVSNYSRSTSMERFQLSARFHQPVVDSSTNYLTRWFYNANLKRRRIECFLTSDPINTGWLKPRRWDNFTSLDTACVQPDYKIPVRTRADCKAEQYEITGSPLSPSDVPAEAVLIGDTNEISPWWQQFPKRWTVVLLCFFSFLLCNMDRVNMSIAILPMSSEFGWSPATVGLIQSSFFWGYLLTQILGGIWADRFGGKVVLGFGVVWWSIATVLTPLAAKIGLPFLLVMRAFMGIGEGVAMPAMNNILSKWVPVSERSRSLALVYSGMYLGSVTGLAFSPLLISRFGWPSVFYAFGSLGSVWFALWQRKAHSSPSEDPELSKAEKRYILGGSTLKEPVTSIPWKLILSKPPVWALIVSHFCHNWGTFILLTWMPTYYNQVLKFNLTESGLLCVLPWLTMAIFANIGGWIADTLVGRGVSITNVRKIMQSIGFLGPALFLTLLSKVRTPAMAVLCMACSQGSDAFSQSGLYSNHQDIGPRYAGVLLGLSNTAGVLAGVFGTAATGYILQKGSWDSVFQVAVVLYIVGTVVWNVFSTGEKVLE

SEQ ID NO: 43178 - protein, 398 aa, Oryza sativa
MGVLSAADPPPVSAIGFEGYEKRLEITFSEAPVFADPDGRGLRALSRAQIDSVLDLARCTIVSELSNKDFDSYVLSESSLFIYSDKIVIKTCGTTKLLLTIPRILELAEGLSMPLAAVKYSRGMFIFPSAQPAPHRSFSEEVAVLNRYFGHLKSGGNAYVIGDPAKPGQKWHIYYATQHPEQPMVTLEMCMTGLDKEKASVFFKTSADGHTSCAKEMTKLSGISDIIPEMEICDFDFEPCGYSMNAIHGSAFSTIHVTPEDGFSYASYEVVGFDASTLAYGDLVKRVLRCFGPSEFSVAVTIFGGHGHAGTWAKELNADAYKCNNMVEQELPCGGLLIYQSFDATEDVPVAVGSPKSVLHCFEAENMVNPAPVKEGKLGNLLPWGEDALEENDGVFDE

SEQ ID NO: 43179 - protein, 486 aa, Oryza sativa
MAAAGAYSASLPAVPDWLNKGDNAWQLTASTLVGIQSMPGLVVLYGSIVKKKWAVNSAFMALYAYASSLLVWVLVGFRMAFGDQLLPFWGKAGVALTQSYLVGRATLPATAHGAIPRTEPFYPEATLVLFQFEFAAITLVLLAGSVLGRMNIKAWMAFTPLWLLLSYTVGAFSLWGGGFLYRWGVIDYSGGYVIHLSSGIAGFTAAYWVGPRLKSDRERFSPNNILLMIAGGGLLWMGWAGFNGGAPYAANIAASVAVLNTNVCAATSLLMWTCLDVIFFRKPSVIGAVQGMMTGLVCITPGAGLVQTWAAVVMGIFAGSVPWFTMMILHKKSALLMKVDDTLAVFHTHAVAGLLGGILTGLLATPELFSLESTVPGLRGAFYGGGIKQIGKQLGGAAFVIAWNLVVTTAILLGIGLFIPLRMPDEQLMIGDDAAHGEEAYALWGDGEKFDATRHDLSRGGGGGDRDGPAGERLSALGARGVTIQL

SEQ ID NO: 43180 - protein, 492 aa, Oryza sativa
MAASSADLADDGFPAPRLFSQGVSYTYDDVIFLPGYIGFPADAVDLSTRLSRRIPLSIPCVASPMDTVSEAAMAAAMASLGAAAVVHCNTEPHLQASIVRAAKSRRLPFVSSVPLFSPASTPSLSDFAGHDYGLVTERGDSLSKLVGVAVAAETSSRQAPLPVSEYMRPAPRSVSASFDFEQAAAFLADEGLDYAPLVSDDSEVIDLITVNDVERIRSYPKLGKPSLGADGKFVVAASIGTREDDKRRLEQLVKAGANAIVVDSSQGNSIYQIDMIKYAKKMYPEVDLIGGNVVTIAQAQNLVASGVDGLRVGMGSGSICTTQEVCAVGRGQATAVYKVASYAKDHNVPVIADGGISNSGHIVKALSLGASTVMMGSFLAGSHEAPGTYEYKDGHRVKKYRGMGSLEAMTKGSDARYLGDTLKLKVAQGVVGAVADKGSVLRFIPYTMQAVKQGFQDLGASSLQSAHELLRSETIKLEVSPCWTTFLNYEME

SEQ ID NO: 43181 - protein, 225 aa, Oryza sativa
MTAGSKGGGGGVAAARAAAAGPRTVLITGVSRGLGRALALELARRGHAVVGCGRSADHVRSLEAEIATPARHFLTVADVRSDSNMAELAKAVVEKKQVPDIIVNNAGTINKNNKTWSVPAEEFDTVVDTNIKGTANVLRHFIPLMIEKKHGIIVNLSSGWGRSAAAEVAPYCASKWAIEGLTRSLAKELPPGLAAIALSPGVVNTDMLNSCFGSSASLYQSTEQW

SEQ ID NO: 43182 - protein, 372 aa, Oryza sativa
MLGHLETIVSDTQEFVVLASSYPRITRQPYCSYVLLENCMFGRHAELERVIKFLLEQHPLCGAKGIDVLPIIGPGKVGKSTLVEHVCRDERVRKCFSTIVFYGPDSIDNGDMVLLPDTRAIKYRNPASGEQSLAIIELVDEMDDETWRRILHSLRGDHITSVSKIIITSRSRKIATFGTTKALQLDFLPKEAFWYLFKTVAFGSTNPEEEPKLASICMEIADLVNGSFMESNVVGSILRSNITAQFWYNFLKRLKYFTDRHFRLLGEHPRDSYKSNRGRTYIWMHKNYYGDGDAATYNLYHANSAGLNNLPMIRMSDMLIGNVKPQKKCEALEWQSSIPPYYSYIVQYGILARQPLMLPKRKRSRALLEELV

SEQ ID NO: 43183 - protein, 172 aa, Oryza sativa; identical to SEQ ID NO: 33073

SEQ ID NO: 43184 - protein, 271 aa, Oryza sativa
MLVTLCEEAVEMLSNMNHPAGDCPLCLYPLVKENDGSALPFMKLMSCYHCFHSDCIMRWWEWLQNDDTDSKKSSTAATTEVIHASEGLDLSSSAKHHNVSQHKGLCPVCRKVFDEKDIEHVRDLLGANTSQLASLSIDLDEDEKEVLHSESEKIRQEKFASLFNLQQERNGLIEPKKDLSIQPGMYIPRPPSAPTASEGDTVDDSCEDTTTSTSGTEPLNQTNSTGGTTKHNSSSGHRRRHRSHASRRQPHGQGQPARQQWQRKGGDTSHQ

SEQ ID NO: 43185 - protein, 574 aa, Oryza sativa
MGKSPAKWIKSVLLGKKSAKSNSTKAKDLAKAANNKPVLSEDPPVISEPALVNSHNDGNAENCKLPNGVAVEAMGQGVENQNIVGSKAPTSPEKLSEELAAVKAQAAFRGYLARRAFRALKGIIRLQALIRGHLVRRQAASTLRVTWLIVKLQALVRGRNVRLSGASIQFVVKSGQHKFLSDKPSDAWKEKVSSNAYVRKLLSSSIGLEALHLQYDKRDPNSLYNWLERWTISQIWKSSSQPKKVADGKPQVRKASYAMETESAKLKRNVRKSSAVTVDSFQTNMTVEPEKIKRNSRKFSSSAADSVPDSQLSELEKVKRNLRKVTNSMAEASKISSSRADASKVSSSMADASKVSSSTADASKVSDSVAQIPPSLVNGISDHQDNQCEEAQQNACVSFPPETQELHSGILLEDNSHMNLLEPDLISNPETPFTSILTWEKFNDSTADAQEVEVLPLQNIDNEDNFPENGVLGKKEKPRSKEEPLSNGNLKTSKRRSSFSTKSDYPENGAQNTPVPRRKPSYMAATESAKAKLRGQNSPRLDSDSPADMNGFTRRQSLPSSTNNRAIRAEWRRW

SEQ ID NO: 43186 - protein, 473 aa, Oryza sativa
MQRRRAQTWAGVGKTAQAAAAHAALFCFTLLLALKVDGRTAYSWWIIFIPLWLFHGIVARGRFSMPAPSLPHGRHWAPCHSIVAAPLLIAFELLLCIYLESLRVKSKPTVDLKIVFLPLLAFEVIILADNFRMCRALMPGDEESMSDEAIWETLPHFWVAISMVFLIAATTFTLLKLSGDVGALGWWDLFINYGIAECFAFLVCTRWFNPMIHKSPNPGEASSSSAAIRYRDWESGLLLPSLEDHEQERLCGLPDIGGHVMKIPLVIFQVLLCMRLEGTPPSAQYIPIFALFSPLFILQGAGVLFSLARLLEKVVLLLRNGPVSPNYLTISSKVRDCFAFLHRGSRLLGWWSIDEGSKEEQARLFYTESTGYNTFCGYPPEVVRKMPKRDLAEEVWRLQAALGEQSEITKCTKQEFERLQNEKVLCRICYEGEICMVLLPCRHRTLCKTCSDKCKKCPICRVPIEERMPVYDV

SEQ ID NO: 43187 - protein, 729 aa, Oryza sativa
MTVMELKKLPLGFRFHPTDEELVRHYLKGKITGQIRSEADVIPEIDVCKCEPWDLPDKSLIRSDDPEWFFFAPKDRKYPNGSRSNRATEAGYWKATGKDRVIRSKGDKKKQQVIGMKKTLVFHRGRAPKGERTGWIMHEYRTTEPEFESGEQGGYVLYRLFRKQEEKIERPSPDEVDRSGYSPTPSRSTPDNMEPIEDGNTPLNRESPESALHESPIDLPALTEAQAAPITRWLADRTDNATTNEVNISHMPHHGLDGGAKASPSAGAFPQLIGSQQNIHDNNELATVSAPMLPHEDFNNFPLGAIGNFDGHMNPRDPVEEFLNQTIADPDEHSSTTSKAQYDSDTGIIPTEFENHGVMQGEFMDDLSGLENLDFWPDDRNPQLSALYEDTPLLPYDSTDQDVLSMDSGAESLQDLFNSMDDSNARNNVWGNEPFLQGTGFPMSWPLQPNSAFPNRGTANRRLMLQLSESLSPDFDVSMTRDECEDEEPGIVVTSKYVNEAPEESTAEKDMPSDGDDAEPTGITILRRRHAPTASSFSDGDDAESTGITILRQHQAPNASLLSDGDDAESTGITILRRRQAPTASSASSFTQQGAAVQRVRLQSNLDAAPCSSVDGSSSCIINEGESERTMEKPEIEENAGSTLAEGGTCHEDDQKEHDASAANAKSVLRLRKTAEGSDKENKQEEEEGVLASHVRAPGNKRGFPSYIIWLVLSVALVLLISLGIYGWV

SEQ ID NO: 43188 - protein, 578 aa, Oryza sativa
MAASTTLALSHPKTLAAAAAAAPKAPTAPAAVSFPVSHAACAPLAARRRAVTAMVAAPPAVGAAMPSLDFDTSVFNKEKVSLAGHEEYIVRGGRNLFPLLPEAFKGIKQIGVIGWGSQGPAQAQNLRDSLAEAKSDIVVKIGLRKGSKSFDEARAAGFTEESGTLGDIWETVFGSDLVLLLILDAAQADNYEKIFSHMKPNSILGLSHGFLLGHLQSAGLDFPKNISVIAVCPKGMGPSVRRLYVQGKEINGAGINSSFAVHQDVDGRATDVALGWSVALGSPFTFATTLEQEYKSDIFGERGILLGAVHGIVEALFRRYTEQGMDEEMAYKNTVEGITGIISKTISKKGMLEVYNSLTEEGKKEFNKAYSASFYPCMDILYECYEDVASGSEIRSVVLAGRRFYEKEGLPAFPMGNIDQTRMWKVGEKVRSTRPENDLGPLHPFTAGVYVALMMAQIEVLRKKGHSYSEIINESVIESVDSLNPFMHARGVAFMVDNCSTTARLGSRKWAPRFDYILTQQAFVTVDKDAPINQDLISNFMSDPVHGAIEVCAELRPTVDISVPANADFVRPELRQSS

SEQ ID NO: 43189 - protein, 456 aa, Oryza sativa
MAFREDKYVRFHDWRSEHSVGSEKTVLEGRHNVFDSLMDRTVGAFSFLGNSSHPETLNKPASEEKKSKTRVLDPQGPFLQRWNKIFVISCLIAVSVDPLFFYIPVIDGDNICLYLDKKLEIIASVLRFFTDIFYLLHIIFQFRTGFIAPSSRVFGRGVLVEDTFAIAKRYLSTYFLIDFLAVLPLPQVLVLVVLPRLQGSSVMTAKNILMVIVICQYVPRLIRIIPLYLQITRSAGIITETAWAGAAFNLLIYMLASHVLGALWYLLSIQREDTCWKDACSRHDGCDSGSLFCGSNAARNNSFLQDFCPTNGTDNADPTFGIYLPALQNVSQSTSFFEKLFYCFWWGLQNLSSLGQNLKTSTYTWENLFAVFVSTSGLVLFALLIGNVQTYLQSASVRIEEMRVKRRDTEQWMAHRLLPDNSRSEYCVMNNIGGKKQEGLMKRAFFQIFLRILGER

SEQ ID NO: 43190 - protein, 556 aa, Oryza sativa
MGEMNQPPPPPVAVPPPMVMQPIMHPPVGTGAVFPPHEQFHHLAYCVHSNPSWVQVAALAFLHYLVMLGSTVMLASTIVPAMGGTPGDKARVIQSFLFMSGINTLLQTLVGTRLPTVMNASFAFVVPVLSIAKDFEQNNYASSHQRFTHTMRATQGALIVASILNMILGFSTIWGAFARKFSPVIMTPVVCVVGLGLFALGFPQVGKCVEIGLPMLILAVVVQQYVPYYFHHYHERITFLFERYSLLLCIGIVWAFAAILTAAGAYNHVSLKTQQHCRTDKSYLISSAPWIKIPYPFQWGTPIFTAGHSFGMMGAVLVSAFESTGAHFATARLAGATPPPASVLSRSVGLQGIGMFLEGIFGAPAGSSVSVENIGLLGLTKVGSRRVIQISTGFMIFFSIFGKFGAFFASIPLPIFAAIFCILFGIVAAVGVSYMQFVNKNSMRNIYIIGLSLFLGISVPQYFHEYTASASTGPARTNAGWFNDIINTVFASGPTVSLIVASILDNTLEFRGYENDRGLPWFMPFLHRRKGYSDPRNDEFYSFPIRVHDVIPSRFL

SEQ ID NO: 43191 - protein, 568 aa, Oryza sativa
MAAAQQAQDSADHMEPLESRLVVEKSPSTSILSSEDHNLSSTALHGASSLKSTKSAQEKGSFLGKGGEQHFIYQPNVYTPQPHTVFSGGYLNHLGQWEEYPHVASADGTDAASPVMYSSYSPVPTMGDSQPYYPLHCPLSSPYYQPPASPSMGYSNSATGMSQFDPMQEYYLPDGLLYSPTPGFHQHFGSFDGTQMQQSVTGIFGQGNIPLASGMHQGSMYSSGSYKARQQVGNFGGSTPNWSAASRRFSPFDRGFKHDKGSLEFMSEQNRGPRATKPKKEVNNSSTEDKNRKSALINDSNLYNQHDFVIEYEDAKFFVIKSYTEDHVHKSIKYGVWASTASGNRKLDAAYREAKEKEATCPIFLFFSVNGSGQFCGVAEMIGPVDFDKSVDYWQQDKWSGQFPVKWHIIKDVPNSLLRHIILENNENKPVTNSRDTQEVRLDHGLQMLTIFKNHEVETTILEDFDFYEQREKAMLDIRQRQKQQHTDSEVQKPMVESKEPVDLMNQISATFARAVQLGETKGSREDKPKVEDASAAAVAVPENEPVALAETEGLLADSEPSPLKESG

SEQ ID NO: 43192 - protein, 263 aa, Oryza sativa
MKLPTKLSGITGESNRHGSEDTARRPPSVKASLSVSFGQRAPHRASTRESSPVRRTVTHDGHRKSSSPSRRSGSREVPDRDRSSRDRSSRDYDRSSHDRDRDHSSRDYDRPSHDRDRDRDRSSRDYDRSSRDRDHDRDIRDYHRRDRDSRDRDYRSRHSSERQDDRRDRDREGSRHRRSSSRHRSRSRSRSRSRSRSRSRSRNEERSSPFGNAGKEKTAAISSNLAKLKDLYGDVTEKKDDGEAPRRDSCAEEVIRLGGPRWR

SEQ ID NO: 43193 - protein, 1016 aa, Oryza sativa
MGWFRAASGLARVALRRNLARAPANPFAGPAPRYFHSTRPRRFAAPVPRAVPLSRLTDSFLDGTSSVYLEELQRAWEADPTSVDESWDNFFRNFVGQAATSPGISGQTIQESMRLLLLVRAYQVSGHLKAKLDPLALEERPIPDVLDPAFYGFSEADLDREFFLGVWRMAGFLSENRPVQTLRSVLERLEQAYCGTIGYEYMHIPDREKCNWLRDRIETVNAREYSYDRRQVMLDRLMWSTQFESFLAQKWTTAKRFGLEGAETLIPGMKEMFDRAADLGVESIVIGMPHRGRLNVLGNVVRKPLRQIFSEFSGGTKPAEEGEGLYTGTGDVKYHLGTSYDRPTRGGKHIHLSLVANPSHLEAVDPVVAGKTRAKQYYSNDLDRTKNLGVLLHGDGSFSGQGVVYETLHLSALPNYTTGGTIHIVVNNQVAFTTDPRAGRSSQYCTDVAKALDAPIFHVNGDDLEAVVHVCELAAEWRQTFHSDVVVDIVCYRRFGHNEIDEPSFTQPKMYKIIRNHQSALEIYQNRLLESGKISKEDIDKMQKKVSTILNDEFQNSKEYIPNKRDWLSAYWTGFKSPEQISRIRNTGVKPEILKRVGEAMTTLPENFKPHRAVKKIFELRRQMIETGEGIDWAVGEALAFATLIIEGNHVRLSGQDVERGTFSHRHAVIHDQETGEQYCPLDNLVMNQDEELFTVSNSSLSEFAVLGFELGYSMENPNSLVLWEAQFGDFSNGAQVIFDQFLSSGEAKWLRQTGLVVCLPHGYDGQGPKHSSARLERFLQMSDDNPYVIPEMDPTLRKQIQQCNWQVVNVTTPANYFHVLRRQIHRDFRKPLIVMSPKNLLRHKDCKSNLSEFDDLAGHPGFDKQGTRFKRLIKDQNNHKDLEEGIKRLVLCSGKVYYELDEERRKKERDDVAICRVEQLCPFPYDLIQRELKRYPNAEIVWCQEEPMNMGAYSYINPRLLTAMRALGRGTIDDIKYVGRAPSAATATGFYSVHVQEQTELVQKALQRDPINSPF

SEQ ID NO: 43194 - protein, 169 aa, Oryza sativa
MAPSSLACSRKNKTKTNKLWFHHSALQVDPDEVNALAQLMTWKTAVAAIPYGGAKGGIGCAPGELSTSELERLTRVFTQKIHDLIGAHTDVPAPDMGTNSQTMAWILDEYSKFHGHSPAVVTGKPIDLGGSLGRDAATGRGVMYATEALLAEHGKSISGSTFVIQVSHN

SEQ ID NO: 43195 - protein, 463 aa, Oryza sativa
MEKSEIFVGAHSYAAICAFTLIIGWLAHWVYRWINPPCNGRLPPGSMGFPIVGETFQFFRTSPSIDMPIYYKRRLERYGPIFKTNIGGQHVVISLDPEVNQFIFQQEGKLFQSWFPETTLNIFGKKTLTTYNRTAHKLIRSFVCKLYGPENVKKSLLPELENSMRESLASWIGKPSVEVNDGVSNMIFGLAAKHLIGLDITNSGELKKNFQEIFQVMVSIPFPIYFPGTSFYRCMQGRRNVWTTLTNVVKKRLSAPGNKFGDLVDLIVGELRSENPTIDESFAIDTLSGLLFASFAPLSCTLTTTFKFLNDNPEVFDKLKEEHEMILKKREGANSGFTWEEYKSLKFSTQVVNEINRITTVIPGGFRKALTDVQVNGYTIPSGWLVMISPMGVHLNPKLFEDPLKFDPWRWTEEKRISMQRNFMPFGGGIRMCPAAEFNKLFITLFLHIVVTEYRWKDIDGGM

SEQ ID NO: 43196 - protein, 260 aa, Oryza sativa
MVLEASDCSSRILLPSWCYLLRDSLCCEPWRFACCSWRFVKSTGEVVATQLSSEHNACYEEVRQELQASHPDDPQIVVLKHNVWRVKGLIQISRSIGDVYLKRPEYNREPLHSKFRLRETFKRPILSSEPAIAVHQIQPNDHFVIFASDGLWEHLSNQEAVDLVQNNPRNGIARRLVKVAMQEAAKKREMRYSDLKKIDRGVRRHFHDDITVIVVFLDSNAISKANWSRGPSVSLRGGGVTLRANSLAPFSTPTVLSSTY

SEQ ID NO: 43197 - protein, 273 aa, Oryza sativa; identical to SEQ ID NO: 33036

SEQ ID NO: 43198 - protein, 286 aa, Oryza sativa
MVSSAMAAVAVAFAVVVAATMSSAQLDPHFYDGLCPAALPTIKRIVEEAVAAEPRMGASLLRLHFHDCFVNGCDGSILLDDTPFFTGEKNAAPNMNSVRGFDVIDRIKDAVNAACHRRARQVLRRQAAANSSIPAPTLNLDGLVSSFAAQGLSVQDLVLLSGAHTLGFSRCTNFRDRLYNETATLDASLAASLGGTCPRTAGAGDDNLAPLDPTPARFDAAYYASLLRARGLLHSDQQLFAGGGLGANPDAFRRDFAESMVRMASLSPLVGSQGEVRVNCRKVNYY

SEQ ID NO: 43199 - protein, 212 aa, Oryza sativa
MGLLLRERIVFLGNEIEDFLADAVVSQLLLLDAVDPNSDIRLFVNSPGGSLSATMAIYDVMQLVRADVSTIGLGIAGSTASIILGGGTKGKRFAMPNTRIMIHQPVGGASGQALDVEVQAKEILTNKRNVIRLISGFTGRTPEQVEKDIDRDRYMGPLEAVDYGLIDSVIDGDSIIPLEPVPERVKPKYNYEELYKDPQKFLTPDVPDDEIY

SEQ ID NO: 43200 - protein, 680 aa, Oryza sativa
MAGNPAAAAPSSSGSSSVFLPPPSPSDGELLRPLHRLARDLSAVDTPAPFLRAAFASISRRSKLLAAAFDDLLLCGAAGELPRSASLCLREVLLVLQRFKAIVADCSARSRMRLLLESDEMEAELRELNHDLATLLDLLPVVELGLADDVLDVLALASRQCRRCSPAPESEEALKASVLSLIQEIEREIVPERERLEEILVEVGINDPASCSEEIESLEQEIGDRASEKWTASMIALVGLLRYAKCVLFSATPRPSDSNSKADVEAEDGEPPVPPSDFRCPISLDLMRDPVVVASGQTYDRESIDRWFSSGKSTCPKTGQVLANLELVSNKALKNLISKWCRENGVAMEACEASKSEQAQAVAANKAALEAARMTASFLVKKLSVSFSPDAANRVVHEIRLLSKSGSENRAFVGEAGAVPLLVPLLYSEDAGLQLNAVTALLNLSILEANKKRIMHADGAVEAVAHIMSSGATWRAKENAAAAVLSLASVHSYRRRLGRNQSVVEKLVHLVRTGPTSTKKDALAALLTLAGERENVGKLVDAGVAEVALSAISKEETAAAVLAALAKRGGAEAIVNIDGAVARLVAEMRRGTDWARENATAALVLLCRRLGAPAVTQVMAVPGVEWAIWELMSIGTERARRKAASLGRICRRWAAASAADGERGGGCPVATVVPPAMMAS

SEQ ID NO: 43201 - protein, 654 aa, Oryza sativa
MKASGVVPTDPPVPFDMLLGLFAEMRHDPSPSVRPDFTTYNTLLAAAAVRALSDQSEMLLRTMLEAGVLPDTASYRHIVDAFAGAGNLSRVAELFAEMSATGHTPDPSAYLGLMEAHTLVGATAEAVAVLRQMQADGCPPTAATYRVLLDLYGRQGRFDGVRELFREMRTTVPPDTATYNVLFRVFGDGGFFKEVVELFQDMLHSEVEPDIDTCENVMVACGRGGLHEDAREVLDYITTEGMVPTAKAYTGLVEALGHAAMYEEAYVAFNMMTEIGSLPTIETYNALANAFAKGGLFQEAEAIFSRMTNNAAIQKDKDSFDALIEAYCQGAQLDDAVKAYMEIRKSRFNPDERSLEGVLNAYCIAGVIDESKEQFEELQSMVTVPSIIAYCMMLSLYARNDRWTDAYDLLEEMKTNRASSTHQVIASMIKGEYDDDSNWQMVEYVLDNSNLEGCDYSLRFFNALLDVLWWFGQKGRAARVLDQALKYGLFPELFRDTKLVWSADVHRMSVGGSLVAVSVWLNKLYDRLKGDEDLPQLASVVVLRGQMKKSTVTRGLPIAKVVYSFLNDTLSSSFHYPKWNKGRIICLKSQLKKLQAAIDSSNGAAISGFVPMTNSHLPSPGSKLYTRESQADNGSAHLTDETLVEEKESELLAL

SEQ ID NO: 43202 - protein, 366 aa, Oryza sativa
MAAVNTVSSLPCSKAGAAVAGGAPRPSTCSVFYPPRCWSKRSSGNGVRAQASTTETTAAPAAEVTTKVEKVSKKQVDGVVTNKYRPKEPYTGRCLLNTRITGDDAPGETWHMVFSTDGEIPYREGQSIGVIPDGIDKNGKPHKLRLYSIASSAIGDFADSKTVSLCVKRLVYTNDQGEIVKGVCSNFLCDLKPGSDVKITGPVGKEMLMPKDPNATIIMLGTGTGIAPFRSFLWKMFFEEHDDYKFNGLAWLFLGVPTSSTLLYREEFERMKEIAPERFRLDFAVSREQTNAAGEKMYIQTRMAEYKDELWELLKKDNTYVYMCGLKGMEKGIDDIMIDLAAKDGIDWLDYKKQLKKSEQWNVEVY

SEQ ID NO: 43203 - protein, 479 aa, Oryza sativa
MKMAHMVTNCSFSPSPAVKTYSKSPGYCCNVTQFQSSKCSNLVLKSCTATRPNRPFVARASAAVQGQTQTPLTGSQQASGHSSSKPKKVMVIGGDGYCGWATALHLSNKGYEVAIVDNLVRRLFDHQLGLDSLTPIASIQNRIRRWKALTGKTIQLYVGDICDFDFLSEAFKSFEPDSAVHFGEQRSAPYSMIDRSRAVFTQHNNVIGTLNVLFAIKEFSEECHLVKLGTMGEYGTPNIDIEEGFITITHNGRTDTLPYPKQASSFYHLSKVHDSHNIAFTCKAWGIRATDLNQGVVYGVRTDETAMHEELSNRFDYDGVFGTALNRFCVQAAVGHPLTVYGKGGQTRGYLDIRDTVQCVELAIANPAKPGEFRVFNQFTEQFSVNELAKLVTAAGAKLGLEVQTKSVPNPRVEAEEHYYNAKHTKLMELGLEPHLLSDSLLDSLLNFAVQYKDRVDTAQIMPSVSWKKMGAKPKTVSV

SEQ ID NO: 43204 - protein, 221 aa, Oryza sativa
MAILYAVVARGTVVLAEHSAAATNAGAVARQVLERLPGGGADSHVSYTQDRYVFHAKRTDGITALCMADEAAGRRIPFAFLEDIHGRFVKTYGRAALTSLAYGMNDEFSRVLSQQMDYYSNDPNADRINRMRGEISQVRTVMIDNIDKVLERGDRLDMLVDKTANMQGNTIRFKRQARRFRNTTWWRNVKLTIALIFLLTVIIYVVLVFMCHGFTLPTCIR

SEQ ID NO: 43205 - protein, 463 aa, Oryza sativa
MAAAETRAAWQRAANRCRVQEDAKRAPKLGCCPPSGQQHETNNGNQTNPQDCHIPNFMPLNWNAMNSNLPKDTQWWLQLQPNFGCQNVLASEDLNYMCGEVDVKKVESFAPVSKLEDINPKKTADPFEPPWIVSTAFMKQTYETGFEELKSLPAYSEMTLKCRGSATYLHEDKEHMDFKTFDPLYPKKPQTACYEMDAPWQENRKSRPWWQVAEADGLASVVAESEMHNVGKNELPRPTQRAHGSKLNNHENKDDYGPYTGKESPPVQYDTMLCSYSISSTNETNSSDGGGWQHQRNDARGGTQDSCSSDDRTPGSKPTYRSAAERTQLLDALRHSQTRAREAEMAAKKAYDEKDHVIKLLFRQASHLFACKQWLKMLQLENICLQLRLKEHQIAAMFPELPWIMLKEKVTPGQERKDGTRKKGRKQNKDSHLRKAVVFAVGVGIVGAGLLLGWTLGWLLPRL

SEQ ID NO: 43206 - protein, 359 aa, Oryza sativa
MATAASLSATASSLLAPAPATTGAAAAQCCSSSSTALFPTPVPSLRAYYPRLLLAFRRPAVAAVADPQGAVLEEEQGEQQDEGQEQYDDDDYDDGYEGGRGPAFTPPTRPRTGKAALPLKRDRTRSKRFLEIQKLRESKKEHDVPTAISLVKQMASARFVESAEAHFRMNLDPKYNDQQLRATVNLPKGTGQSVKIAVLTQGEKIDQARAAGADIVGGDDLIDQIKGGFMEFDKLIASPDMMPKVAGLGKILGPRGLMPNPKAGTVSPNITQAIEEFKKGKVEYRVDKTGIVHIPFGKVDFPEEDLIANFMAVVRSVERNKPSGAKGIYWKTAYLCSSMGPSIKLNIKEMLDYGSESSD

SEQ ID NO: 43207 - protein, 419 aa, Oryza sativa
MAGTGSFKVTRISEGAVKPAAATPEETLPLAWVDRYPTHRGLVESMHIFRSGADAAPGVIRDALARALVFFYPLAGRIVEPEAGSPAIRCTADGVYFAEAAADCSLEDVRFLERPLLLPKEDLVPYPGDDRWGVEPHNTIMMMQITKFTCGGFVMGLRFNHASADGMGAAQFINAVGDMARGLPEPRVKPVWDREKFPNPSIKPGPLPGLPVLALDYIVLDFPTGYIDGLKAQYKAHSGKFCSGFDVLTAKLWQCRTRALNLEPGATVKLCFFASVRHLLKLDRGYYGNSIFPVKMSAPSETVLSSSVMEVVDMIRQAKERMAVEFFQFAKEETEQDPFQMTFNYESIYVSDWSKLGFAEVDYGFGPPKFAGPLVNNDFIASVVILKAPLPLDGTRMLASCVTKEHSEEFVRGMKEDLP

SEQ ID NO: 43208 - protein, 258 aa, Oryza sativa
MLAIFQKQVAHAPAELNSPRSSAAKPKNPDEIIRDFHALHPIEAFSTSFGGGAALACVAGHARNGLSGYERMFCGLDDIYCVFMGRLDNLSSLIRQYGLCSRSTNEALLVIEAYRTLRDRGPYPADQVVKDLSGSFAFVVFDNKSGAVFAALSTDGEVPLYWGIAADGSVVICDEREIVKGGCGKSYAPFPVGCMFHSEGGLKSFEHPMNRLKAMPRVDSEGVMCGATFKVDTFTKINSMPRVGSATNWAATWDDAAA

SEQ ID NO: 43209 - protein, 646 aa, Oryza sativa
MGVRPAATKLNISPAAARRPSSFLPIATVALLCSASYFLGAWQHGGFSSPSASPSSVSVATAVACTTTTTATTRSATRPRKRTPAGQGQALDFSAHHAAAADGAVLSSSGDSAATRRYQACPARYSEYTPCEDVKRSLRYPREWLVYRERHCPTGRERLRCLVPAPSGYRNPFPWPASRDVAWFANVPHKELTVEKAVQNWIRVDGDKFRFPGGGTMFPHGADAYIDDIGKLIPLHDGSVRTALDTGCGVASWGAYLLSRDILAMSFAPRDSHEAQVQFALERGVPAMIGVLASNRLTYPARAFDMAHCSRCLIPWHLYDGLYLIEVDRVLRPGGYWILSGPPINWKKYWKGWERTKEDLNAEQQAIEAVARSLCWKKIKEAGDIAVWQKPANHASCKASRKSPPFCSHKNPDAAWYDKMEACVTPLPEVSDASEVAGGALKKWPQRLTAVPPRISRGSIKGVTSKAFVQDTELWRKRIQHYKGVINQFEQKGRYRNVLDMNAGLGGFAAALASDPLWVMNMVPTVGNSSTLGVVYERGLIGSYQDWCEGMSTYPRTYDLIHADSVFTLYKNRCEMDIILLEMDRILRPEGTVIIRDDVDMLVKVKSAADGMRWDSQIVDHEDGPLVREKILLVVKTYWTAKEQDQ

SEQ ID NO: 43210 - protein, 167 aa, Oryza sativa
MGISSMPAPKDSVVAYLLYNTAVSIAILADMVRAALVFLGLPVPPSAWEDGDDQLAAIAAAAAAAAAAAGGPSLADRFRSRFRPARFGRRRGGGAGAADCRVCLARFEPESVVNRLPCGHLFHRACLEKWLDYDHATCPLCRHRLLPATTESPSPSPATATPHFARI

SEQ ID NO: 43211 - protein, 85 aa, Oryza sativa
MGKRLSFMNAYLAEDCNPVRCWVITAAVAFVTLIVLGVGSVDDTPVELPKKLYIGPQVPKQFNFLMEGIWLIKNKESQLTGQDFH

SEQ ID NO: 43212 - protein, 565 aa, Oryza sativa
MGLILHHKSLGRVFEVRCLHIPVNDRTPFEGLLQIVENSIKYEHAMSPNRPIYLIGDSFGGCLALSVAARNPQIDLVLILINPATSFAKTPLQPILPVLEAMPSELHVTVPYLLSFVMGDPLKMAMVSVENNLSPPKTLQKLSDSLTSMLPLLSELADIIPRDTLFWKLKLLKSGAAYANSRLHAVQAEVLLLASGNDNLLPSGEEADRLFKSLKNCRVRYFKDNGHTLLLEDGVNLLSVIKGVNMYRRGRQRDPVTDYIPPTLSEFKKTFDEDHKLFHLALSPVMLSTLKNGKIVRGLTGVPDQGPVLFVGYHALMGIELSPLYEEFLREKRTSFRGMAHPILFGGKHESSRQELSRFDTISMYGGLPVTAINMYRLFERNQFVLLYPGGVREALHRKGEAYKLFWPDQPEFVRMAARFGVTIIPFGFVGEDDVLELVADYNDQKNIPYLREWIESINREAKRVRDSVKGEDGNQDVHIPALLPKVPGRFYYLFGKPIEMKGMDNVVRDRKSANEVYLHIKSEVESLMSYLKRKREEDPYRSIAQRAVYQASWGASAEVPTFEP

SEQ ID NO: 43213 - protein, 279 aa, Oryza sativa; identical to SEQ ID NO: 31604

SEQ ID NO: 43214 - protein, 808 aa, Oryza sativa
MAAKLARLHSLRERLGATFSSHPNELIALFSRYVNQGKGMLQRHQLLAEFDALIEADKEKYAPFEDILRAAQEAIVLPPWVALAIRPRPGVWDYIRVNVSELAVEELSVSEYLAFKEQLVDGHTNSNFVLELDFEPFNASFPRPSMSKSIGNGVQFLNRHLSSKLFQDKESLYPLLNFLKAHNHKGTTMMLNDRIQSLRGLQSSLRKAEEYLMGIPQDTPYSEFNHRFQELGLEKGWGDCAKRVLDTIHLLLDLLEAPDPANLEKFLGTIPMMFNVVILSPHGYFAQSNVLGYPDTGGQVVYILDQVRALENEMLLRIKQQGLDITPKILIVTRLLPDAVGTTCGQRVEKVIGTEHTDILRVPFRSENGILRKWISRFDVWPFLETYTEDVANEIMREMQAKPDLIIGNYSDGNLVATLLAHKLGVTQCTIAHALEKTKYPNSDIYLDKFDSQYHFSCQFTADLIAMNHTDFIITSTFQEIAGSKDTVGQYESHIAFTLPGLYRVVHGIDVFDPKFNIVSPGADMSVYFPYTEADKRLTAFHPEIEELLYSEVENDEHKFVLKDKNKPIIFSMARLDRVKNMTGLVEVYGKNAHLRDLANLVIVCGDHGNQSKDREEQAEFKKMYGLIDQYKLKGHIRWISAQMNRVRNGELYRYICDTKGVFVQPAFYEAFGLTVIEAMTCGLPTIATCHGGPAEIIVDGVSGLHIDPYHSDKAADILVNFFEKCKQGSTYWDNISQGGLQRIYEKYTWKLYSERLMTLTGVYGFWKYVSNLERRETRRYIEMFYALKYRSLASAVPLAVDGESTSK

SEQ ID NO: 43215 - protein, 518 aa, Oryza sativa
MACCGGGRGEGAAATESEAYLEGEAVREARELVAELCRHFYGQGWVTGTGGSITVKANDPALPLADQLIVMSPSGVQKERMVAEDMYVLSADGKVLSSPVSKPWPNKPPKCTDCAPLFMKAYLMRGAGAVIHSHGMETCIATMLDPGAKEFRMTHMEMIKGIKGHGYRDELVVPIIENTPYEYELTDSLAEAIAAYPKATAVLVRNHGIYVWGDSWINAKTQAECYHYLFDAAIKLYQLGIDWTTPEHGPINSAKRPRSVLSSSIPNGCPDSKSSKHCVVLDIEGTTTPISFVTDVMFPYARDNVRKHLTSTYSSDETKEDIKLLRIQVEEDLKNGIVGSVPIPPDDADKEEVINALVANVESMIKADRKITSLKQLQGHIWRTGFESKELQGVVFDDVPEALKHWHASGMKVYIYSSGSREAQRLLFGNTAYGDLRQYLCGFFDTTTGNKRETRSYFEISQSLGVDSPAQILFITDVFQEAVAAKSAGFEVIISIRPGNAPLPENHGFRTIKSFSEI

SEQ ID NO: 43216 - protein, 637 aa, Oryza sativa
MRTAGDATDGQAKQAASHGRVGKMTDNLIGDCSTSSKKRKKACKSRGETRKLHEDNIFEEEFGSLKNSGQGAWSELSKVVASNLSESVVSLASFDGDIMHSACTGVVIKTDLFGTSYLTSASLIRSFDDESKIMPFVSIEVHLPKKQVAHGWLYKYDLQYNIAVIETKFFPGLRAINLEHQLQFESHSKVVAVGRCFKSGKLMATSGVLTDDPSGVYRKELMISTCEITMAGVGGPLIDLDGNFVGMNFYAKKRTPFLPRSTITECMANFKTYRGELKKLDSTTGRSTNEIQESPATSKSYLEGLEGCSDSFELRNSSRKPENEQESSSSSDSEENPIENDPFFMETASPFLPVADGDEFGKFLIKELTSQGYPLPAVLDGGMRLVNTFENEFADDIWSKLTKKVASNMSRVVVSLASFNGEERIFACTGIFIGCDESNTRILTSASLVRISDDENRINDNLKIVVHLPNKQQTVGTLQHYHLHYNVAIVSIKGFRCLRTEEFHDPGLIERKEVLSVGRVFKSAKLMATSGILTDKPSKLDCKELKVSTCRISKAGIGGPLIDCHGNFVGMNFYGRKETPYLPRDTILKLLSYFDGEGDISPEIMDNQNRWPVPKLRWHYPSFSSHRKIEPRRYIKY

SEQ ID NO: 43217 - protein, 485 aa, Oryza sativa
MALSVEKTSSGREYKVKDLSQADFGRLEIELAEVEMPGLMACRAEFGPSQPFKGARISGSLHMTIQTAVLIETLTALGAEVRWCSCNIFSTQDHAAAAIARDSAAVFAWKGETLEEYWWCTERCLDWGVGGGPDLIVDDGGDATLLIHEGVKAEEEFEKSGKVPDPESTDNAEFKIVLTIIRDGLKSDPSKYRKMKERLVGVSEETTTGVKRLYQMQETGALLFPAINVNDSVTKSKFDNLYGCRHSLPDGLMRATDVMIAGKVAVVCGYGDVGKGCAAALKQAGARVIVTEIDPICALQALMEGLQVLTLEDVVSEADIFVTTTGNKDIIMVDHMRKMKNNAIVCNIGHFDNEIDMLGLETYPGVKRITIKPQTDRWVFPETNTGIIVLAEGRLMNLGCATGHPSFVMSCSFTNQVIAQLELWKEKSTGKYEKKVYVLPKHLDEKVAALHLGKLGARLTKLSKSQADYISVPVEGPYKPAHYRY

SEQ ID NO: 43218 - protein, 447 aa, Oryza sativa
MREILHIQGGQCGNQIGSKFWEVVCDEHGIDPTGRYVGTSDLQLERVNVYYNEASCGRFVPRAVLMDLEPGTMDSVRTGPYGQIFRPDNFVFGQSGAGNNWAKGHYTEGAELIDSVLDVVRKEAENCDCLQGFQVCHSLGGGTGSGMGTLLISKIREEYPDRMMLTFSVFPSPKVSDTVVEPYNATLSVHQLVENADECMVLDNEALYDICFRTLKLTTPSFGDLNHLISATMSGVTCCLRFPGQLNSDLRKLAVNLIPFPRLHFFMVGFAPLTSRGSQQYRALTVPELTQQMWDAKNMMCAADPRHGRYLTASAMFRGKMSTKEVDEQMINVQNKNSSYFVEWIPNNVKSSVCDIPPRGLSMASTFIGNSTSIQEMFRRVSEQFTAMFRRKAFLHWYTGEGMDEMEFTEAESNMNDLVSEYHQYQDATADEEGDYEDEEEQVPEDE

SEQ ID NO: 43219 - protein, 544 aa, Oryza sativa
MPIAAAAVTSPPAAAQVHGVVPRHASPTPQQRAAPRREQSPLNPSSQSIRSASSGTELAGSAATETSRAHIANLDRVLGKPPQVPRPASHAAASKQERQQQDGELEPLNVRHGLLNALNLSFFVPMPGMRARTAADEHMSPRSLMHMQQLLSADSPRASPRSTIAPRWRSLHGEDGWAGLLDPLDSDLRRELLRYGDFVQAAYQAFHSLPTASARHRGLMLPDRSYRPTRSLFATSALSMPPWAKRPNTPEWLTQQSNWIGYVAVCESEREVARMGRRDIAIVLRGTATCLEWAENLRASLVPLDGESGEGGGQEEPKVARGFRSLYKTAGEKVKSLSEEVMGEVRRLMEKYKGEELSITVVGHSLGGALALLVADEIATTVPDAPPVAVVSFGGPKVGNAAFVDKLQKNGRVNVLRIVNAGDMVTKVPGVAPRLPLTKEQYQHVGAELRIDSKNSPCLRPDAGPACRHDLEAYLHLIDGFTGTGRPFRHDARRSVIRLLQLQRGNVKKEYVNRARELGVDPSAPVDVGRSMAYGNCAVASPSS

SEQ ID NO: 43220 - protein, 324 aa, Oryza sativa
MGSNEQIHRDKLIIDTDPGIDDSMTILMAFRAPTVEIIGLTTIFGNTTTKNATQNALLLCERAGHPEVPVAEGSAEPLKGGEPRVADFVHGSDGLGNLFLPAPTSKKVDENAAEFMVNKVSQFPGEVSILALGPLTNVALAIKRDPSFASKVKKIVVLGGAFFAAGNVSPAAEANIYGDPEAADIVFTSGADVDVVGINITTQVCFTDEDLLELRNSKGKHAQFLCDMCQFYRDWHAESDGFHGIFLHDPVSFTALVHPEYFTFKKGVVRVETQGICTGHTLMDQGLKKWNSENPWSGYKPISVAWTVDVPNVLAFVKELLMAP

SEQ ID NO: 43221 - protein, 380 aa, Oryza sativa
MTTSRQAYKVDRRRPGSDVAGETAAAMAAASIVFRQSNPHYSHLLLHHAQQLFEFADTYRGKYDSSIAEVKSYYASVSGYHDELLWAALWLHRATGRAAYLDYAVDNADEFGGTGWAITEFSWDVKYAGVQILAARLLMRGEHEERHRGTLERYREKAEHYVCACMGRNAAGGADANVERSPGGMLYVRQWNNMQYVTNAAFLLSAYSDYLAGAGDGDGDGGGGVATCVGGGGAGAGEVFAAAREQVDYVLGSNPRGMSYLVGYGERFPARVHHRAASIVPYKDSKEFIGCAQGFDDWFGRRGANPNVVVGAIVGGPDRRDRFRDDRENYMQTEACTYNTAPMVGMFAMLNRLSRQESPSTTTTTTATTSSPEMGLSVNR

SEQ ID NO: 43222 - protein, 253 aa, Oryza sativa; identical to SEQ ID NO: 31598

SEQ ID NO: 43223 - protein, 317 aa, Oryza sativa
MLRLPTLLPLKPSPPTTGLNPIHGRRHGHHPSRLLASSAPPPPPPRPPKPEPRTSHENLGDDTPDFPTTKPRKPRRGRRSEAAAVEDFVRGRLEQVFASIRERDPEVLEGKGDILKRKEELSDEEGKEGTGEEEGELKAVVEEEDPSWPLDADIGWGIRASEYFDKHSIKNVTVDGVEIDWEREVEEGWVKEINCLEWESFAFHPSPLIVLVFERYNRAADNWKFLQELEKAAKVYWNSKDRLPPRTVKVDMNIERDLAFALQVKECPQLLFLRGNKILYREKELRTADELVQMIAHFYYNAKRPSCVNPEAIAPPC

SEQ ID NO: 43224 - protein, 98 aa, Oryza sativa
MGQVLGYGHLGDGNLHLNILSTKYSDKMLAQIEPFVYEWTSKQRGSISAEHGLGLMKAEKIHYSKSSEAVSPYVLPSNLASTNKSLCGRSVSKNFMQA

SEQ ID NO: 43225 - protein, 378 aa, Oryza sativa
MTVMPSLRHRAVAKKPKWIIILVSLVCFVLIGAYVFPPRRYSQCYLFGSGACATFKDWLPSVTRRERTDEEIISSVVLRDILAMPMPVSKNPKIALMFLTPGTLPFEKLWEKFLQGQEGRYSIYVHASREKPVHTSSLFVGRDIHSDAVVWGKISMVDAEKRLLANALADVDNQFFVLLSDSCVPLHTFDYVYNYLMGTNISFIDCFRDPGPHGNGRYSPEMLPEIEEKDFRKGAQWFAITRRHALLILADSLYYKKFKLYCKPADGRNCIADEHYLPTLFNMVDPGGIANWSVTHVDWSEGKWHPRSYRAADVTYDLLKNITAVDENFHVTSDDKKLMTQKPCLWNGSKRPCYLFARKFYPETLDNLLKLFTSYTSV

SEQ ID NO: 43226 - protein, 292 aa, Oryza sativa
MSHPRSSSHHHHHQQPGSSLSSPDCEVFEPVKPVPVTSNGDSNNKPDAADAAVVVGIHQRRGGVGGGVRMKEEHAFRWVEEKEEAMEQWKSTVWKTGVYVITLSMLVALLLGLNMSWSAITAALALIVLDFKDARPCLEKVSYPLLLFFCGMFITVDGFNKTGIPSAFWEFMEPYARIDTPTGIVILALVILLLSNVASNVPTVLLLGARVAASAAAISPAAETNAWLILAWVSTVAGNLSLLGSAANLIVCEQARRSEQYGYTLSFFSHLQFGFPATLIVTGIGLLLIRSN

SEQ ID NO: 43227 - protein, 641 aa, Oryza sativa
MAMGMRARESVNMSEDLTQAIAPYATALHDASLQSHCSSCFHRIPAQSPHDMSCTMCGSVRYCCSDCLISDCEVHSSSGECCFFVKHLREASPSTLTEETSDIRAALRLLYSLETRGLVSSDSVSSSNRIGGLSASGIREVLEEGGEIAEGVLEGSLLMLSARKSRMKNYVGLSNGLTIEKVALWAVMTNSVEVQISEEQSLGIAVYGPSFSWFNHSCCPSASYRFVLVPQNEGCTSNKPESCVVPVSKGAAPDAWHAWQNEEAGFAHAQCKYGPRVVVRCTKPINKGDEVFITYIDLLQTREARLSDLWSKYKFICSCELCTALPKPYVDLILNCDARNLKSPHNAVTDPAIEDLDNNLQQAISEYSFLDDSKACCDVIESMLSENLMNDLQQEELSPRKYILHPLHHISVSSFMILASAYRCSAFKSSTDNLHGENCDFIFRMTKAAAAYSIVLAGATHHLFLSECSFVTLLSHFLLSTGQSILDFAECIKGETRKNMPEAIFSFASCSTNSAKHDSVRYNQFRSTCEKFGKPLLSLSLQCWPFLAQGLPCLEKIKNPIDFSWLGPAIFQAFQLSEEDSFNLSGKHAPATLIEQQKECILSLAVCCITYSKYLASICYGPEHYLANRAKDLLECINHVQ

SEQ ID NO: 43228 - protein, 238 aa, Oryza sativa
MPLLRTYSRRRRRRRDSRLSPTRSRAPYQEEEHVVETASAKARADPLYAKEGHVPSYIAATSSSCQQADAVAQDTEVLPPSGSCLSSSPASHVWARHVKDWGLIFYIRVDLQGSFHTYPDVGGPFQSSQEADKAIDRYLEDHRDPKMHIGQNDDISSMENVIRRCLYWPDGTIKRRTKSFATWEAKKRMHQFIQALVDKYNDDHNLLGVCFLSISFSVLLPWLHCLIYLIMYSLRFIL

SEQ ID NO: 43229 - protein, 143 aa, Oryza sativa
MAPRRCSLTGAVFFASRRRRLRRPLPPPSTPSAPAATAVPFRRWTRQSRLLRRHRPIAPPLILLASSLLPACTNAAPPQPHQSRLLRQPRPPPPPAPSTAIATAAAHSTASSRGLPHRPRMEPTSSPSGAAVKLHRCHRLLAY

SEQ ID NO: 43230 - protein, 281 aa, Oryza sativa
MGLIIGSVIGGYLAQPTEKYPKLFPGNSLFGRYPYLLPSLCISVFCFIIFISCMWLPETLHDLKVHKKDDGPIESPVAHFAKSEELLEQHITPTINKNLFKNWPLMSSIILYCIICFDDMAYTEIFSLWSESDKKYGGLSFSPEDVGQVLAISGVSVMLYQTFIYPNIEKILGPINTSRVAAVLSMVLLFTYSPMTHLPRPWVQIVLNIVSVLKSNLVVTIVTCTYILQNDSVTQDQRGTANGLATTLMSFFKAFAPAGAGIVFSWAQKRQHAFFFPGIVN

SEQ ID NO: 43231 - protein, 460 aa, Oryza sativa
MAGKKRKSASSDKQPKQQQQRLPLGADADAVADAAKRRRSGASKKHQAEEEASIPSSLSAKILREALTQQQEESLADQRSAAAATAAPSPSFSFPVPKKDGEEDEDDDDVDEFDGFDAQSEYDGGVPEIDEEDEKALAAFMSKDTSSKRSLGDIILEKIREKDAEISTEGRTPVKLDSSIIELYKGVGEFLSRYTSGKIPKGFKRIPSLECWPDVLQLTEPENWSPNAVYQATRLFSSNMNAKNAVRFYEAILLPRVRNDIRKNKRLHFALYQSLKKCLYKPAAFFKGILLPLCQERNCTLREAVIIGSIISKVSIPPLHASAALMKLAEMEYCGTTSYFIKLFLDKKYALPYRVVDAVFAHFMRFIDEERVMPVIWHQSLLAFVERYKNELEKKDKEKLARLLDHQKHYLVTPEIRRELRMSCNRGEKDTIMSICSPVSVITKPIEEDRWNVPEVPMEE

SEQ ID NO: 43232 - protein, 71 aa, Oryza sativa
MVWGSKPARCSMNCLLVRGVLDMAICPYGICFLFIDHINFSDYRDIIEWQSRHVSLIGKPLLFAYMSWISG

SEQ ID NO: 43233 - protein, 416 aa, Oryza sativa
MAAAPYHQPTSLEEVRTLWIGDLQYWADENYLYNCFAHTGELQSVKIIRNKLTSLPEGYGFIEFISHEVAEKVLQTYNGTQMPGTEHTFRLNWASFSSGERRPDAGPDHSIFVGDLAPDVTDYLLQETFRVSYPSVKGAKVVTDPNTGRSKGYGFVKFADENEKNRAMTEMNGMYCSTRPMRISAAIPKKTTGSQLQYGAAKAMYPAAGYAVPQVQPVLPDSDPTNTTIFIGNLDQNVTEDELRQICVQFGELIYVKIPANKACGFVQYASRASAEEAVQRLHGTTIGQQVVRLSWGRSPASKQDQSAVWSQQADPNQWASAYYGYGYDAYGYAQDPSYAYNSYAGYTQYPQQVEGATDMASAAGSHAPGMEKEEVYDPMNLPDVDKLNASYIAVHGRAMLGRSLWLRTSSLPQSA

SEQ ID NO: 43234 - protein, 531 aa, Oryza sativa
MAMAASPFLILPSLFPKPTILAARIHPSIFRGRHIRCSPNGAAVPESPEPAPRRGRRKSPSPSPPKAKTTRRRTKKNTQESDSEGEEEPPKRRGRRTRKSKQEAEQEAAEKEDEVRAASPGTEDSKRAVQDEDGEAEATGSDSEDGEDSPYDWPPLVCCFGAPRWEFVPTVRVSDRQMHPDIYSTWLHLQWEPPEFARAPGSAASNVAIALTRLGGRAAVLGKVGDDDFGRELVYRMNCERVQTRAIRFDDGAATATARMKVGFRDREDGSGGTRLVAETVKSAAEDSLSKAEINVDVLKEARVFHFNSEVLLTPSMESTLFRAIELSKKFGSKIFFDLNLPLPLWRSRDETKELINKAWNEADIIEVSRDELEFLLDHEYYQYKRANPPQYYLDGFHLTRNWPQYYHYTPEEIAPIWHDGIKLLLVTYGTLRIHYYTPKFHGCVIGTEDALITPYTTDRTGSGDAVVAAAIRKLTSCPEMYEDQDTLERNLRFAVAAGIISQWTIGAVRGFPTESAAQNLKEQVYVPSMW

SEQ ID NO: 43235 - protein, 953 aa, Oryza sativa
MAAGNGRMEAALGCLAALPDEVLCAVVDLLPPTDVGRLACVSSVMYILCNEEPLWMSKCLSVGGLLVYRGSWKKTALSRLNLCSENDEIYQKPRHFDGFNSMHLYRRWYRCFTNLSSFSFDNGHVERKDDLSLDQFRAQYDGKCPVLLTKLAETWPARTKWTAQQLTHDYGEVPFRISQRSPQKIKMKLKDYVFYMELQHDEDPLYIFDDKFGESAPTLLEDYSVPHLFQEDFFEIMDYDQRPAFRWLIIGPERSGASWHVDPGLTSAWNTLLCGRKRWAMYPPGRVPGGVTVHVSDEDGDVDIETPTSLQWWLDIYPNLAEHEKPLECTQLPGETIFVPSGWWHCVLNLDMTIAVTQNFVNQSNFKHVCLDMAPGYCHKGVCRAGLLAAPDKSIRDIENLPSITSRLNHSDMACKEKRLKSSEPIRTSNNANQCSAFEFSDVHENLGDQVFSYDIDFLSQFLEKEKDHYSSVWSPTNSIGQREAREWLRRLWVLKPELRELIWKGACLAINVDKWYSCLEEISACHSLPPPSEDEKLPVGTGSNPVFIVSGNVIKIYAEGGLGYSIHGLGTELEFYDLLQKLGSPLINHVPEIIASGFLVYLDGVYKTVPWDGNGIPDVLAKYYSLEVSYANGSFPLGLWSKQLFGLSNSTDAPDRPICPYMVTRKCKGDIFARIRDKLTKTDVLNLASSLGVQMRNIHQLPLPHVEHISKSGNEDIKAKENSISDVTHVPPEWKQVVSTLDRRKKSIKKHLSNWGGSIPQVLIEKAEEYLPDDIRFLIKFVKDDDGDSVYVVPSWIHSDIMDDNILIEGTTEPGTSTDCIAVEDLNKMDAIHIIDFSDLSIGDPLCDLIPLHLDVFRGDIDLLRQFLRSYQLPFLRAESNKDIYKSIQNSKFSRASYRAMCYCILHEDNVLGAIFSLWKDLGTATSWEDVEHLVWGELNQYQQSCSVGEIN

SEQ ID NO: 43236 - protein, 390 aa, Oryza sativa
MAFAASHTASPSSCGGVAQRRSNGMSPVVAMASTINRVKTAKKPYTPPREVHLQVKHSLPPQKREIFDSLQPWAKENLLNLLKPVEKSWQPQDFLPDPSSDGFYDEVKELRERAKEIPDDYFVCLVGDMVTEEALPTYQTMLNTLDGVRDETGASPTTWAVWTRAWTAEENRHGDLLNKYMYLTGRVDMKQIEKTIQYLIGSGMDPGTENNPYLGFLYTSFQERATFISHGNTARHAKEYGDLKLAQICGTIAADEKRHETAYTKIVEKLFEIDPDYTVLAFADMMRKKISMPAHLMYDGKDDNLFEHFSAVAQRLGVYTARDYADILEFLVQRWKVADLTGLSGEGRRAQDFVCTLAPRIRRLDERAQARAKQAPVIPFSWVYDRKVQL

SEQ ID NO: 43237 - protein, 424 aa, Oryza sativa
MAIRARSSSYAAAAVALALALASVAAVAGEVFFQEKFEDGWESRWVKSEWKKDENMAGEWNHTSGKWNGDPEDKGIQTSEDYRFYAISAEYPEFSNKDKTLVLQFSVKHEQKLDCGGGYVKLLGGDVDQKKFGGDTPYSIMFGPDICGYSTKKVHTIFTKNDKNHLIKKDVPCETDQLSHVYTLIIHPDATYTILIDNVEKQSGSIYEHWDILPPKQIKDPEAKKPEDWDDKEYIPDPEDKKPEGYDDIPKEIPDPDAKKPEDWDDEEDGEWTAPTIPNPEYKGPWKQKKIKNPNYQGKWKAPMIDNPDFKDDPYIYAFDSLKYIGIELWQVKSGTLFDNFLITDDPELAKTFAEETWGKHKDAEKAAFDEAEKKKEEEEAAKAGEDDDDLDDEDAEDEDKADEKADSDAEDGKDSDDEKHDEL

SEQ ID NO: 43238 - protein, 318 aa, Oryza sativa
MSNQCLAPEKDAYRAIVPALCDAGMLDEATHVLYSMLWRVSQKGCDEDVVVYRALLVALCAAGRGEQAEIVLDKVIRKGLRSSGSRRSLRVPMLAGLSIEDAQEIIDQALVVRGGRTVASFEVMVIDLYDEGRLNEADNLFKEMGKKGFKPTIYMYEAKITSLCREGRLDEAVKVLEEELPKNDLIPTVTTYNLLMRGLCNSMQSMRALRYLGRMDKQLGCVTRKETFSILISGLCSESRFIDAAQIMERMVKGHHRPEAGEFNNVIEGLCSAGRTYDALLWLEEMIDHGETPDVHVWSSLVSAALGLGEGLTTAATH

SEQ ID NO: 43239 - protein, 431 aa, Oryza sativa
MISGYIRNGDDERAFELFQMMESHGVKRDTATWNILIAGSVHNGYYDRAIRIFRQMQALLRRPDYITILSIIPAFTNLVASWKVREIHACIFHHNLELDGKIANALINAYSKSGNLASACAVFDMHSSRNIISWNCIILAHVLHGSPNEALDLFCQMKQEGVVPDHTTLVTVIKAYGLTGKVSEGSQTFFNMANDYNITPELDHYAAMVDLLGRSGRLKEAYELIDEMPLIPNSTVWDTFLTAAVMHGNVRLAHLAARELSAIDPGDPRVQRLGSSLQDLTGKTVDVPEEMTPNKGRNLDEVESCSIEIRNKVYVFSNGDNVGLEDTVAELKSMMFKMGHSMLDIGIGTLDVEEEKEEVVGVHCEKLAIAFGLSNSPQFKNIRIIKTARMCNHCHTFAKLVSEKYGRHILIKDPKCLHKFEDGKCSCEDYW

SEQ ID NO: 43240 - protein, 309 aa, Oryza sativa; identical to SEQ ID NO: 32441

SEQ ID NO: 43241 - protein, 880 aa, Oryza sativa
MDVQVKDWRNKVRELSYDIEDCIDLFMHKLNRGDDKVNIVLKMAKKIRMLWSRHQIANQIQELKARVKEESDRRLRYYFSECNAHVDGTKIDPRLPALYVEEEKLVGIHGPMEEIIELLMKEDGSGQKLKVVSIVGFGGLGKTTLANQVYNKIKDQFDCSAFISVSQSPNIKKILFDMLKDVTSRDNSDDDKQIKVVGVKGDKSDDERQLIGKLRVFLENKRYFIIVDDIWSASAWEHVRLALPENSLCSRIITTTRNVNVAKSCCSGFQGSVYNIQPLNEQDSKKLFLKRLFHSDSNFPTHLEEVSHAIIKKCHGFPLAIICLASLLASKSDTKDQWEQVHNSLSSAFSSQGMSDILLLSYYDLPYHLKTCLLYLSVFPEDYKIDRDELIWRWIAEGFITEVKGQTLDQVGGSYFNELINRNMIQPIDIKYDGTANACRVHDMVLNLIISISSEENFLTVVDEQGYKYLGNKIRRLSFQSNSVENDVNVVQKIMDNLSQVRSLSFFEVPEKIPPFLKFHSLSVLVLVDYDFCLGNGHIKYLGSFFQLKYLRVTSYGITQLPDQFGNLHYLQTLDIRGSGIEKFPPTVVRLHNLARLLVGNKVQLPDGIGDLQSLQVLSSARLYKPLKLVEDLRRLTKLRTLVIVLHGSDTLGAHEMGRYEEALESSLTVLGKHKIQSLEISCCDYLRDKLLDLLCCTVPNIQKLVISGNCINRPSQQMLSLVNLAHLDIYFQRIKQEDLSVLGSISTLLYLRLKLHFVPDERLCISSQQFQSLMEFRFIYYEGGGLRMLFQQEAMAKLRRLQIRFRAEEMESNAGFEFSFHHLSSLEDLHATISCYRATRSSVEAAEAAIRNAASIHPGHLKVSIIREWESRMAGLRER

SEQ ID NO: 43242 - protein, 438 aa, Oryza sativa
MRRFRVWPPSPSPWPLLASRPCPHSHHHRSPFHASANSGARQGNFILPGATAATLVMFGILHARRMYEDQKVVERKEKGIEPEFSPDFKASFLRLLPLRSMSRLWGSLMEVELPVFMRPAIYKAWARAFHSNLQEAAMPLEEYPSLQAFFIRSLKEGSRPIDADPNCLVSPVDGKVLRLGELRGPGTMIEQVRGFSYSAASLLGASSSLHGAEEEDFSREHTEQSNPADSNAKSWWRVSVAKPKLWDQTLLSPKKGIFYCVIYLHPGDYHRVHSPVDWNIIKRRHFSGHLFPQNERAVRTIRNLYVENERVVLEGQWKEGFVAIAAIGATNVGSIKLYIEPELRTNRAGSKILNSQPEPPDDRVYEPVGTGVMVKKGEEIAGFKMGSTVVMVFEAPVVSKARWREDGSGTVTSDFDFCIKAGDRIRVGEAIGRWTSRE

SEQ ID NO: 43243 - protein, 267 aa, Oryza sativa
MDYLLHLLDSSEHQFEIVHDFIFDRTRSVRQDLSIQNIVNAQAIQIYEDVIKFHILSHQKLSRSSQDSDASSLCYLNMEQLMKCLLSLFDMYDVIHKNNSQSSKETEYYSFYVLLHLGCKIPKMVDSLSLWYGHLSASIIQSKEMVFARSILRFYHLGNFKRFFCAIAAEGTDLQLRLLEPFLNEARVRALMYFNHSGYKLQHHPLTHLSEILMIEELDLETLCRLCGLEISNNEDTKAFAPKQASFCVPASIPQINGIYISRENQR

SEQ ID NO: 43244 - protein, 357 aa, Oryza sativa
MLSSSSSAAAAAVVLTTTSGRAPLLHLPRTPRPTTAARIAAAPDSSRARAGGAPLLLGSAVPRRRGWALVCRDSSLPGPPGVDPVAEEEENRKKTEAVAAAAAARIASSGGGGGGGGGSLSDWTTSVLIFGIWAGLMYYIFQLAPNQTPYRDTYFLQKLCNLKGDDGFRMNDVLVPLWYIMGLWPLVYSMLLLPTGRSSKSKIPVWPFLILSCIGGAYALIPYFVLWKPPPPPIDEEEIGQWPLKFLESKLTAGVTFAVGLGLIVYAAKAGGEDWQEFIRYFRESKLIHITCLDFCLLSAFSPFWVYNDLTARRWKNGSWLLPLALIPFVGPSLYLLLRPSLSSLLAATGPSDDKTQ

SEQ ID NO: 43245 - protein, 105 aa, Oryza sativa
MSSKYRTLVLIQISQPPPPPHIPFHAFFSLLKVSLFSTPLHSGVASHGEASLSAVTRRRRHRSKVARDREEVLDLAGGHMAARGWEEAMDLIGSHTTVAGQGGMW

SEQ ID NO: 43246 - protein, 529 aa, Oryza sativa
MAEEVYVASIDQGTTSTRFIVYDRHAKPVASHQLEFKQHYPEAGWVEHDPMEIMESVKICMAKALGKAAADGHNMDVGLKAIGITNQRETTVMWSKSTGLPLYNAIVWMDARTSPICRRLESDLSGGRTHFVETCGLPISTYFSALKVLWLIENVDAVKNAVRAGDALFGTIDTWLIWNLTGGIGGTDRDGNKVFGHHVTDCSNASRTMLMNLKALDWDKPTLETLGIPAEILPKIISNSERIGVVANGFPLAGVPIAGCLGDQHAAMLGQLCQKGEAKSTYGTGAFILLNTGEEPTQSSHGLLSTIAYKLGPSAPTNYALEGSIAIAGAAVQWLRDSLGIISTAADIEKLADTVQDSGGIYFVPAFNGLFAPWWRDDARGICIGITRFTNKGHIARAVLESMCFQVNDVLSSMHKDAGEAGEVKSAEREFLLRVDGGATVNNLLMRIQADLLGSPVVRPADIETTALGAAYAAGLAVGVWSKEQIFAGLHKENTRVFRPKLDEAHRRKRADSWYKAVSRSFDLADLSL

SEQ ID NO: 43247 - protein, 1000 aa, Oryza sativa
MDLVVGASSGAVKSLVNKLGTLLAQEYTLISGVRDDIQYINDELASMQAFLSRLKRDVAHDEQRQDWMKQVREVAYDIEDCVDDVRHRLGGEPRGTGTVVSLKRTWYLLTTLYQRCCIATDIGNLKVRAQHVSERRTRYGVENLPANRNGGGNNNSGAPGDHPAPLPRLIGTTEPVGMDDAMNDLQRWFMVSKQNSQISYLAIVGSGGLGKTTLAMSFYRKFGDEFDSRAFMLASQKFHLPTVLRSLVSQFHQKQVSASEDALHGIEEWGVEALKKKLADQLQGKRYHILIDDIWSVSAWESIRDSLPKNNKGSCVIVTTRFNSVAEACRRQNGHVHKLKQLDPVNSSKLFLQIIYANDPCPTPTINDEIVVKMCGGLPLAIIVVSGLIASELKSKIGKPLDQKLIEVEKALRAELGNNLTTEVVQIINHCYKNLPPDLKTCLLYLSTFPKGRNISRKRLIRRWVAEGFVTEKHGQTAEEVAEDNFNELIGRNLIRPINNSSNGKVKSCQIHDMVLEYIVSKSGDENFITVIGSHWQTPFPSYKVRRLSVHKSDRQETDLVERMKLSHVRSLTVLESFKALHSTMLKFQILQVLDLEGCKDLSSNQLKKICNMHQMKYLSLRGTDIYKIPKKIGRLEYLEVLDIRDTDVTNLPASVERLQRMVHLLAGNKTKRRALRLTEGITKMKTIQTLSGIEISGRSTRTAAGEQAPVLEVIRNATTTDAKDGDIAGLQGTRKEGSKVDMPKQLRPLAALEKLTNLKKLAIYRLVNFQAKDDELLLSAIEHLSSCSLKFLAIDDSFTGFLDRSLSSSQAQPEHLYTLELSGSLFKVPEWIDRLHNLEKLTLSMTSLTTDTLVTLSRLPELFSLIFSLDAANGISNILKTVQKNTLESGGKIFVPDGGFTKLRLLRFTAPVLPPLSFLEGAMPELQRLELRFRIIEFVYGLENLSSLQQVFLTFSSQAPEDAKEKVSQIKGLASKIRKADSSNISVVIDEYNELSKEQ

SEQ ID NO: 43248 - protein, 813 aa, Oryza sativa
MACLPVFISLLFLISSCKGDDQLTQANRLISPGDVLISKGRVFALGFFSPTASNQSFFLGIWYHNISESERTYVWVANRDNPITTPSFATLAISNSSNLVLSDSGNHTLWTTNVTATGGDGAYAALLDSGNLVLRLPNGTTIWQSFDHPTDTLLMGMRFLVSYKAQVAMRCIAWKGPDDPSTGDFSISGDPSSNLQIFLWNGTRPYIRFIGFGPSSMWFSVFSFSTSLIYETSVSTDDEFYIIYTTSDGSPYKRLQLDYTGTLKFLAWNDSASSWTVVVQRPSPTIVCDPYASCGPFGYCDATAAIPRCQCLDGFEPDGSNSSSRGCRRKQQLRCRGRDDRFVTMAGMKVPDKFLHVRNRSFDECAAECSRNCSCTAYAYANLTGADQARCLLWSGELADTGRANIGENLYLRLADSTVNKKKSDIPKIVLPVITSLLILMCICLAWICKSRGIHRSKEIQKKHRLQHLKDSSELENDNLELPFICLEDIVTATNNFSDHNMLGKGGFGKVYKGVLEGGKEIAVKRLSKGSQQGVEEFRNEVVLIAKLQHRNLVRLISYCIHEDEKLLIYEYLPNKSLDTFLFDAKRKSVLDWTTRFMIIKGIARGLLYLHQDSRLTIIHRDLKASNILLDTNMSPKISDFGMARIFEGNKQQENTTRVVGTYGYMSPEYALEGSFSVKSDTYSFGVLLLELVSGLKISSPHLIMDFQNLITFAWSLWKDGNAMDLVDSSIRESCLLHEVLRCIQIALSCVQDDPTARPLMSSIVFMLENETAALPTPKESAYLTARVYGTKDTRENKERSVNNVSITALEGR

SEQ ID NO: 43249 - protein, 736 aa, Oryza sativa
MFAAGSFPVISPTPHKADNASATKHGRSGLHHSPAPAPVGLPPSEGNARGNPAYAPRHPHEYHSPSNSPEPGLPPVNPPDSHAFKKPKSLAPAPQSFPPPPPSSYCMALNCQDPLTNSLPGTTCLCVWPIKVELRLGIALYTFFALVSELAQDIASGVLMKQSQVRVMGANAATEDPEKTVVLIDLVPLGEKFDKATALLVFERFWHKQVNINSMHFGNYDVLYVTYQGLPPSPPTAPRMNNGLSNVNDPRLHPLAVDVGNHRETKSRGIIVIIVLSSVFAFILCSGAALVICFKIRNRNHLTEESPMPPKPAGPGSAVVGSRLGSRPISASPSFSSSIVTYKGTAKTFSLIEMERATQRFDNSRIIGEGGFGRVYEGILEDGERVAVKILKRDDQQVTREFLAELEMLSRLHHRNLVKLIGICTEEHIRCLVYELVPNGSVESHLHGSDKGTAPLDWDARLKIALGAARALAYLHEDSSPRVIHRDFKSSNILLEHDFTPKVSDFGLARTAIGEGNEHISTRVMGTFGYVAPEYAMTGHLLVKSDVYSYGVVLLELLTGRKPVDILRPPGQENLVAWACPFLTSRDGLETIIDPSLGNSILFDSIAKVAAIASMCVQPEVDQRPFMGEVVQALKLVCDEGSEFNESGSFSQDLHIQDSGIISRASLDVDVEPVVSAELFNASAHYDTLDASGSFRRYSSSGPLRVGRTGHNRERGLSTGSSSEYCGTQRFRIDSE

SEQ ID NO: 43250 - protein, 59 aa, Oryza sativa
MVGQTNFRKSGQCLHSELLTRLKKHRLIPIIRQFFCLRRWPPSSLQYFVLPHPIRFCSV

SEQ ID NO: 43251 - protein, 357 aa, Oryza sativa
MVVQLMLFFHDKFMAPMAEEPLPFVLIMIIILPLLVLLHYYLSASTRRSSAASKSNDDVLPPSPPRLPVIGHMHLVGSNPHVSLRDLAEKHAADGFMLLQLGQVRNLVVSSPRAAEAVLRAHDHVFASRPRSAIADILAYGSSNISFSPYGDYWRKARKLVAAHLLSPKKVQSLRRGREEEVGIAVAKLHEAAAAGAAVDMRELLGSFTNDVLCRAVCGKSSFRREGRNKLFMELAAGNADQYAGFNLEDYFPSLAKVDLLRRVVSADTKKLKEKWDSVLGDIVSEHEKKSSLRRDDQVQMDDDRDDDQEEQESDFVDILLDRQQEYNLTRHNIHAILMVINHLYICSSEFFFLFYY

SEQ ID NO: 43252 - protein, 44 aa, Oryza sativa
MSSTYFSTCHFFNLLRVYMCYFFVFSRISMDQAKGLTCSSVRIA

SEQ ID NO: 43253 - protein, 445 aa, Oryza sativa
MEANHASRGRRTLEEIRQKRAAERMQQQHNPAAAASLVDPYGNPGAGAELLGRVRELENGNIALERENQMLLSKIAEKEVEKDSLVNRLNDLERNIVPSLKKAVNDISLEKDAAAVAKEDALAQLRSMKKRLKEAEEEQYRAEEDSASLRAQLNTLQQQVMSNSYTGFPVGVSNEHILAMEKEVENLQAQLKQESLLRQQEQQKLSEESLLRQQEQQKLTGEQSHAASLVAEKKELEEKIAALTKKASDEASEFAARKAFSMEDREKLESQLHDMALMVERLEGSRQKLLMEIDSQSSEIEKLFEENSALSTSYQEAVAVTMQWENQVKDCLKQNEELRSHLERLRLEQATLLKTSNTTIQPDGQNETSISFPPEFVTENLSLKDQLIKEQSRSEGLSAEIMKLSAELRKAVQAQNNLARLYRPVLRGIESNLMKMKQETYATIQ

SEQ ID NO: 43254 - protein, 429 aa, Oryza sativa; identical to SEQ ID NO: 37152

SEQ ID NO: 43255 - protein, 555 aa, Oryza sativa
MGLPGRRNPLLSARRAAASLRRSRRLPVYVAAVFFVASVLLMFRDEILYLTTARSPSSSLPTTGGSAGGAGLARKEELVSVNKPVLLGHGGKPEKHHSVTERHRPKVSAKRRPNKKAAKAARKKFMASPSVAAGAEVNVPETCNLSKGKWVRQRDVPAVPRAGVRVPDGAGDVHAERAARRRLPEVAVAAEGLRPPARLRREAVHGAAPREAPHVRRRLAEPQPVGVHGVPGAAGAVAGEELRDVVGRPAGRPPRLGVQRDCGVLLGAVPRRVQLRRPQGAQHPGPRHQARGDRRARRRLGRRRLPRLQHVHLVDEHGQHESREADGEDVGGVRRGGSDRGVQESARHMGDLGERQRRPGPHVRVLHERLPSSHQPGGVGQPGRGAVREGGRAGAELARPAVAGHGLGHVPRGEERVPRRGARPGHVRGRDGDVGAPQGRAHVGAHHPSGPRADAGAAGRPGHVRGLHPLVPPRRPRRLEPHALRPYPLQAAGGGRSRGVTDHMCTDTVCLFVRSLMGCQLPARLVLVFAFRFCCFSIIIFSYARYKGGGWWRSR

SEQ ID NO: 43256 - protein, 536 aa, Oryza sativa
MYDFYEEYWRPFGALLVKMETAGMLVDRGYLSEIEKVAVAQRKLAADKFRKWASKYCPDAKYMNVNSDTQIRQLFFGGIENRCKPGETLPKSRTIKVPNDGSLIAEGKKTPKYCTIELFSIVEDLKTDLFTASGWPSVSGDALRSLAGKLPTDLVYTTDDVEDDDSGDSEISEHDLNDTASYGTAYEAFGGGKKGKEACHAIAALCEICSIDSLISNFILPLQGNHISCDEGRIHCSLNINTETGRLSARTPNLQNQPALEKDRYKIRQAFVAAPGNSLIVADYGQLELRILAHLASCKSMLDAFKAGGDFHSRTAMNMYQHIRDAVEEKKVLLEWHPQPGQEKPPVPLLKDAFGAERRKAKMLNFSIAYGKTPVGLARDWKVSVKEAKDTLKLWYRDRKEVLAWQMKQKELAQEKCEVYTLLGRSRRFPNMAHATSGQRGHIERAAINAPVQGSAADVAMCAMLEIDRNARLKELGWRLLLQVHDEVILEGPTESADLAKSIVVECMSKPFYGTNILNVELAVDAKCAQNWYAAK

SEQ ID NO: 43257 - protein, 926 aa, Oryza sativa
MGLPGFSVKDLEEGSMSGVVDCLLVLRESVSSGLRDGTSKAPLRKKWRVPETGEPLVPGVAQGKTSPGEDKRNGLPDPKSQQKTPIFNGRKLREIFQLKRGSYADLPAAKISEMMHSNSLDNAPTQSLLSVVNGILDESIERKKGEIPHRVVYLLRKVVQEIERRLCIQAEHIRSQNVIIKTREDKYHSKIKALEILVNGTNEENQMAINRLQIIKEEKSKIEEKRKLGEQDVARLMKEKEISENTIASLKKEMEVMTSMHEQQLQKIELTAKQMEEHLTTKIKEVESLLVQSNKKIEEVEAASLLKSQLWNKKEGIFQKYMNSQQLYVKGLRISSWSIKNEMHALEMELRDEMSNFGSGLKCLVDAAENYHKVLAENQKLFNEVQELKGNIRVYCRVRPFLPGQDKKSTTVDYIGENGELLISNPFKQGKDGHRMFKFNKVFSPFSSQAEVFSDIQPLIRSVLDGFNVCIFAYGQTGSGKTYTMSGPSTSKQDWGVNYRALNGLFDISLSRRNAFSYEVGVQMVEIYNEQVRDLLSNDIAQKRLGIWSTSQPNGLVVPDASLHPVKSTSDVLDLMEIGQANRAVGSTALNERSSRSHSILTVHVRGLDVKNGSTSRGCLHLIDLAGSERVERSEATGDRLKEAQHINKSLSALGDVIFALAQKNAHVPYRNSKLTQVLQSSLGGQAKTLMFVQINPDVESYSETISTLKFAERVSGVELGAARSNKEGKDIKELLEQVASLKDTIVRKDTEIEQLQLMKDKVKSPSFAVDINGASMPKNSNSDLRSVLSITTNQQSQLSDPQSYAEVNRDGGPTSYTDITPTCLDEADFEDNASEDGFSGGTDYSVGCAAGASVFPNSCSDRTADTSIRRISSRIARFSLTKNGQPATSRPKPKDTAPKTPNQTRVQSSQLIGGSSLRASKRWQK

SEQ ID NO: 43258 - protein, 247 aa, Oryza sativa
MATTAATTMVAAVHHPRPCFRVRAAWDMNPSASPKPKAKPPPPPPPPLPTAPAPTHADLFARHSNSEGQVPKKTTSMGFERWWLPPPPEVKKPRSLYNAASLAYLGDCIYELYARRHFFFPPLSINDYNKRAMDVVKCESQDLLLHKLLGEDFLTQEERDILRWGRNIVSSKTRTRKRAGIAVYNRASSLETLIGYLYLTNFKRLEQLMFQLGFTSGASSHHIADELVSGFKKKNSTSVQSQQQAAQ

SEQ ID NO: 43259 - protein, 573 aa, Oryza sativa
METSTISFSSSSPPSPPPPQPAPGDIDAVSLGRLSRNLENLLDPAFLNCADAEIVLASGGGDPGGGAVVGVHRCILAARSRFFYDHFSSAPAPAPATAGDKPQLDLDGLVPGGRHIGRDALVAVLSYLYTGRLRSAPPEAAACLDDGCSHDACRPAIDFVVESTYAASGFQISELVSLFQRRLSDFVNKALAEDILPILVVASTCHLPELLNQCIQRVANSNLDNRYLEKRLPDDLYAKLKEFRVPDEPHSGILDPEHEKRVRNIHKALDSDDVDLVGMLLKESPVTLDDAFAIHYAAAYCEPKVLAELLKLESANVNLKNSSGYTPLHMACMRREPDIIVSLIEKGASVLERTQDGRDALTICKRLTREKDRNEKSEKCKERSKAYLCIGVLQQEIKRRPQILEDQMSAEESIATPLLVDNFHMRLLNLENRVAFARIFFPSEAKLVMRIAQADSTQEFAGLTSANFSKLKEVDLNETPTMQNRRLRERLDALTKTVELGRRYFPHCSEVLDKFLNEESTDLILLESGTAEDQQTKRMRFSELREDVRKAFTKDKAAGAAISSSTSASSSPS

SEQ ID NO: 43260 - protein, 285 aa, Oryza sativa
MKLKKFEFENKESLWKHFGPSHDSSHNANCVYRYDLCCQNLEDLRLARVITEPEGPETGLRFLLRKCKALERLCLEYVNGVIDKDMIVLSQSCKNLKSISLWMIPGLYHEPDGIVFRTDLTDESLEALTNNCPLLQDVELAFTGVDHWEPPEIGFIQEGLVKLMHYCPIRTLTLNGALFFNDKGMKGLSSAPFMETLSLVDCKEITDSGMCFLVQYPCLTDLKLQHCPGLTDVGIAELVHAQKLQSLVVDGCCNISENAVQCAARSVQYFVNSAGSCAAHFKRLH

SEQ ID NO: 43261 - protein, 393 aa, Oryza sativa
MAFFPNIPEAKQEIQSLYRNYAHLFDMSSDNAGVDSRIMRRQPAMLIDRSVFLTGSAIWTIALHYKAHIYRWLLQKFSAIQGAPIYCAMILRSLCRRSSLPFFVGISVLTARIYNYVTIHNHIYSPQLCAGHDANLRRDLFIQDTELCNKQALDSGFLGSKHDCIRLALHFICSTANLKVYTTPKQIGFDGKCKQKNTERGRFWRILSTNEQYLTYIGALVTLQLFLQLSRANITTLLLPMLYQTTSSQRNAAVVGNIVIVLVNSFGILGSDFTTKHHGREVTFTVSAILMVFCQITIPLLVEAQIGLGGGTRILTGYTTATFLLTCVVSYGLSWSWGSLFCTIPGMKIQSAGQVIGMGLCFGLCFVQMQYFLLMLCRLKNAILAYYAMWIWS

SEQ ID NO: 43262 - protein, 173 aa, Oryza sativa
MAFRLSNSLLGILNAVTFLLSVPVLGGGIWLATRADGTECERYFSAPVIAFGVFLLLVSLAGLVGACCRVNCLLWFYLVAMFVLIVVLFCFTVFAFVVTNKGAGEAVSGRGYKEYRLGDYSNWLQKRMENSKNWNRIRSCLQDSKVCKKLQDKNWDRTQFFKADLSPLEVTTI

SEQ ID NO: 43263 - protein, 462 aa, Oryza sativa
MSFRSIVRDFRDSFGTLSKRSFEVKISGFSGRHRGKSIGPSSELDDTPVVAQQSKWAGLPPELLRDVMKRLEEDDSNWPSRKDDVACASVCTTWRDMCKDIVRNPEFCGKLTFPVSLKQPGPRDGVIQCFIKRDKSKLTYHLYLCLSSAVLDETGKFLLSAKRSRRTTHTDYIISMDSKNISRSSSGYIGKLRSNFLGTKFIIYDTQPPYNARTLCSQERTSRRFSSRKVSPKVPTGCYPIVQVNYELNVLGTRGPRRMQCAMHSIPASAVEPGGIVPGQPKELLPRLFEESFRSMATSFSKYSITDHSTDFSSSRFSEFGGGALQGQEQEQDGDDVNKERPLVLRNKAPRWHEQLQCWCLNFRGRVTVASVKNFQLIAAAPQPSSGAASEPSQAGQAAQQQTQPSQPSSSSSSSSSNHDTVILQFGKVAKDMFTMDYRYPLSAFQAFAICLTSFDTKLACE

SEQ ID NO: 43264 - protein, 578 aa, Oryza sativa
MAWHFTAAFMIATCLMLFPRSEQSSQGEVLQQLRKQLEYPRQLDVWNNPNSDPCYTQPTSVVTVACEGNAITELKIIGDRITKPPKFSGYPVSNITLSEAFVLDSFVTTLARLPALHVVILVSLGLWGPLPDKIHRLSSLQVLDLSSNFLYGSIPPKLSAMPKLHTLTLDGNFFNGTMPDWFNLYSNLTVLRLQRNRLKGPIPASIGKATMLSELALAGNSIAGEVPQLGSLNKLEMLDLRDNELDGELPELPTALVTILLSKNSLKGEIPEQFGQLNRLQHLDLSFNFLVGKPPEKLFALPSISYLNLAANMLSGSFSTSLTCSSTLGFVDLSTNQLTGDLPVCLNVNVNNRVVKFDGNCFSDDPEHQHETKYCQQPHKGRGSNKDVGLVVTVVGVVFIVLVLSLILMASNRRSCQRVLAEQQLLQKQMQDNSTSGMSTELLVNARYISQAVKLGTQIMPMYRAFSLEELKEATKSFERSAFLGEGSIGKLYKGKLENGTLIAIRCLALHQRYSIRNLKLRLDLLAKLRHLNLVCLLGHCIDGEVDESSVKRVFLVYEYVPSGTFPSYLSGKELKIK

SEQ ID NO: 43265 - protein, 274 aa, Oryza sativa
MEAMAGELERLRAEREELDSRIRLLESQLGASPTPAGEGDAAGTGAGGGGGGGGATACPIRRRGNGFAAADGLPADMIYRYSRHLLLPDFGVEGQRKLSQSSILVVGAGGLGSPVALYLAACGVGCLGIVDGDDVELNNLHRQIIHKEAFVGKSKVKSAADACREINSSINVMEYHHTLKPSNALEIVRKYDIVVDATDNLPTRYMISDCCVLLNKPLISGAALGLEGQSMLSMPFPKSTTSGSLPEMLRQWSSWGCSRSDWLPASSRGYKGCY

SEQ ID NO: 43266 - protein, 509 aa, Oryza sativa
MVVSEIRRCLNEGIEFQGELLNFRKDGAPLYNRLRLIPMHGDDGFVTHVIGIQLFSEANIDLSNVSYPVYKQQSNHRPNIQEINPASHEHIPKIQSSEYCCILQLSDEVLAHNILSRLSPRDVASIGSVCTRMHELTKNDHLRKMVCQNAWGRDVTVRLEMSTKMLGWGRLARELTTLEAASWRKFTVGGRVEPSRCNFSACAVGNHLVLFGGEGVNMQPMDDTFVLNLESAKPEWRRVKVSASPPGRWGHTLSWLNGSWLVVFGGCGQQGLLNDVFVLDLDAKQPTWREVASEGPPLPRSWHSSCTLDGSKLVVSGGCTESGVLLSDTFLLDLTKEKPAWKEIPTSWSPPSRLGHTLSVFGKTKLFMFGGLAKSGSLRLRSCDAYTMDAGEDSPQWRQLATTGFPSIGPPPRLDHVAVSLPCGRIIIFGGSIAGLHSPSQLFLLDPAEEKPTWRILNVPGQPPKFAWGHSTCVVGGTRVLVLGGHTGEEWILNELHELCLASRPDEDE

SEQ ID NO: 43267 - protein, 181 aa, Oryza sativa; identical to SEQ ID NO: 33522

SEQ ID NO: 43268 - protein, 525 aa, Oryza sativa
MALSRSVEVAVPADPAGDGDRDKIRLRQLGYKQELKRGLSVLSNFAFSFSIISVMAGVTTTYSTGLRYGGPVSMTLGWLVVSAFNGCMALSMAEICSAYPTSGGLYYWSAKLAGNDWAPFASWITGWFNITGQWAATTSVDFALAQLVQVIVLLSTGGANGGGYMASNYVVLAIYGAMLVIHGAINSLPIQCLSWFGQLGAFWNAAGVFVLVALIPAVATERASVEFIFTHFNTENGMGIRDKAYILLIGLLMSQYAMAGYDTSAHMTEETKNADWSGPIGIVTSVALSTVFGWIYIVSLTSAVTDIPYLLSPDNDAGGNAVAQAFYTTFHRRYGSGLGGILCLGVVAVAVFLCGLACITSNSRMAYAFSRDGAMPFSKVWHRVNKQEVPINAVWLSVVVAFIMALTSLGSQVAFQAMVSIATIGLCISYALPIFFRVTTARGSFVPGPFHLGKYGIVVGWAAVLWVAAVTVLFSLPVAYPVAEETFNYTPVAVGGVLLLTVGAWALRARFWFQGPITNTNDGPL

SEQ ID NO: 43269 - protein, 695 aa, Oryza sativa
MGSEELIDKLKQDLTGKKYLIVLDDLSTTTEWDSIIRNLPINNNGSRIILTTRFKLVAQHCSKKEMNMHNIEGLTDGDALELFLTKVRMDGDESELKPDLKEEAKIIIKKCGRLPLAVATVGGFLSARPRNIIEWREFSDRISEEFDNNPSLEMIKKILASSYEGLTYHLKSCFLYMSIFPEDSDIRYRRLLRRWTAEGYSRATRNRSNEKVAEEQFTALLNKSMIQQSKTIASGKTGFCQVYNLMHEIIISKSEEENLVLVLDDHITSRSKDKVRHLVVSKSWSREKNDMQNIVDVSHIRSLTVFGEWKSFFLSKKMRMLRVLDLEDAEGLQDPDLVPIGKLHHLKYLSLRGSFGVFNLPNSFGNLLNLETLDIRGTWVTKLPATIGRLQNLKYVHAGSLDDEDDQPIIKLLHQFRSIREEMGTRFAVSYIMLFITAWLRNLDVCGVKVPRGIGRLRSIHTLSIVNIARGKALLKNLKKLTQLCKLGVTGINKNNCKELCSAIADHGRLQSLLLRAEGNAGLEGCLDNMSQPPKDLKSLQLYGNLVTLPEWIKDLKILQKLSLRNTNLKADTTMEVLGNLPMLAILRLQDNACEEEELCFGPERFTGLTSLELLNWESLKSVKFERGATPKLKVLLLHYCWQIHNGGFSGIETLSTLKEVSILGYNYDQTYTEFKEQLQKQLDMNKNKPNLSIL

SEQ ID NO: 43270 - protein, 394 aa, Oryza sativa
MASSNVSTVYISVIDDVISKVRDDFISYGVGDAVLNELQALWEMKMLHCGAISGTIDRSKAAPAPSAGTPGAGTTPPVHDLNVPYEATSEEYATPTADMLFPPTPLQTPIQTPLPGTDAGMYNIPTGPSDYAPSPISDVRNGMAMNGADPKTGRPSPYMPPPSPWMTQRPLGVDVNVAYVENREDPDRTGQPPQLTKDFLMMSSGKRKRDEYPGQLPSGSFVPQQDGSADQIVEFVVSKDNAQQLWSSIVNKQGTATKESSTKETIIAPTIPQRDGMDDYNDPFYFQGVPTEDYNTPGESSEYRAPTPAVGTPKPRNDVGDDDEPPLNEDDDDDDELDDLEQGEDEPNTQHLVLAQFDKVTRTKNRWKCTLKDGIMHLNGRDVLFNKATGEFDF

SEQ ID NO: 43271 - protein, 514 aa, Oryza sativa
MFRSMGTGTGTKPPAMTTERYEFGPLVGEGNFAKVYLGRHRATGEEVAIKVMDKEKLVRLGATELIKREIAVMQRLRHPNVVRIHEVMVNKRRICVVMEYVRGGALYRYFRRGPSGGAAGLREHEARRFFQQLVSAVAYCHSRGVFHRDIKLDNLLVDEQGNLKVADFGLSALADMERREAHLQTVCGTPLFLAPEVFKRRGYDGAKADVWACGVVLYVLLTGRKPFPDEHVSRLYRLIGQNQFQCPPSFSPDLARLVRRLLQPDPDRRITIPEIMEMRWFKRGFKEVTYYIDSNDRLRSLDGLDGEPELYDSDTDTIESSSSSESPTPVAGTPRGMHTSVSAPALSELDRMEDSASLPLPLPLPPRPRMPRPKSLNAFDIIASSPSFDLSGLFEERGERMRFVSGAPVADIIAKLQEIAGMVSFTARTKDCQVSIEATRNGQKGALAISAKVFELTRELVMVQVCKKAGDTAEYRRFCDNELKAGLRGLVVDALPPPVEGGGHGGAAAAAEAE

SEQ ID NO: 43272 - protein, 855 aa, Oryza sativa
MQEQAAGSALAMLVTYGETDTSAVSVSPVLESGEPDAAQIDVVAGMQEEAPGSMLAMEVTYREVDAATVSVSPVLESVEPDAAKIDVVARMQEEAPGSKLAMEVMYGETGTAAVSVPLVLESREEGSLQESMQRPSSPTMNIEQESMQRPFSPTIGTETSSPEMAPAGSENCKVSWLPLPPPTPLGESMPSLPVAAAPKVLLVMPEEAVESVPSSEALDVEKPASITQAEPSSPNTPPPGFENFKSSWLPLPTTPPPVETTDVLPDVVVTKAVEAPIEEVSRPLPALEVTNMESDTVLSILPTTVLPTEGTEGLLQQPLLRPPSPVVQSEPCLQNEMAPPGFENFKSSSEPCSAEEIAPPGSDNFKSSSEPCLPEEMAPPGFENFKSSSEPCSQEEMAPPGFENFKSSWPPLPTLPQTVPDAAAADALAATVEEAAGPPPALELEAMDVDMDAIHPPPLPFDSGVESLQKPLPRAPSPIMQEAPCSPDRAPPGFETYKSSQLLLPSPSLAQTTNVRQDQSVTEPVSVIEEAPQLLHSVEVMGVHMDAVPPLLPSSESGADGLSPQQFAQPPPAEKDTTTCLPDMVHSGCDNSEPSQLLSLPAVISPVQTPDGLADVPAIDRVAVALEESPQRPLVSGEMEAGTVPIRSSPLKNISEGSLPQLESESHSPTSQAADSLLDASDSKSVAVASEEMSQLPLASQATTTDLVSTTAMQPQSEGIVDESLQPQHPPSSTAHDSPCLQDSVPLVPPPPSPYLNKEVGQMVCGSCRILLAYFRGAGYVHCTCCQTMNYVLEAHEVGKVHCGHCATLLMYPFGAPAVKCSLCLFVTEIGERNVRRRLSIEQPTRTNSSGLAEA

SEQ ID NO: 43273 - protein, 400 aa, Oryza sativa
MPELPEVEAARRALEAHCVGRRIARCAVADDPKVVVAAAGGRVAFERAMVGRTIVAARRRGKNLWLRLDAPPFPSFQFGMAGAIYIKGVPVTKYKRSVVSSTDEWPSKYSKFFVQLDDGLEFSFTDKRRFARVRLFEDPETVPPISELGPDALFEPMSSDSFADSLSRKKIGIKALLLDQSFISGIGNWIADEVLYQSRTHPLQIASSLSRESCEALHQSIQEVVKYAVEVDADCDCFPVEWLFHHRWGKKPGKVNGQKIEFITAGGRTTAYVPQLQKLTGMQSSKVVIANPEQVAENDDAKEIDTDPEDADNLNTKKRGATSRVARGKQKRDAIGALSRKTRKNGGGKEKPGSDYSEDDGETAEPNKVSTSSKGEKADPVRRSSRTASKPRQVNKLKER

SEQ ID NO: 43274 - protein, 280 aa, Oryza sativa
MATPAAEKPDGVEIREVWEDNLEAEFAVIREIVDDFPYVAMDTEFPGVVCRPLGTFKSNADFNYATLKANVDMLKLIQLGLTFSNEHGGLPSLGPEGRPCVWQFNFRGFDPRTDVAAADSIDLLRRSGIDFTRHSADGADARRFAELLMSSGVVMNSEVRWVTFHSGYDFGYLLKLLTGTYLPDTITGFFDLIRIYFPVVYDIKHLMRFCNSLHGGLNKLAELLDVERVGICHQAGSDSLLTALSFKKLKEAYFNGLTEKYAGVLYGLGTEGGETSSAAH

SEQ ID NO: 43275 - protein, 506 aa, Oryza sativa
MARRVAARARARAGGVPRSEGTIQDRARVGSGGAEDALDVFDELLRRGIGAPIRSLNGALADVARDNPAAAVSRFNRMARAGASMVTPTVHTYGILIGCCCSAGRLDLGFAALGHVVKKGFRVEPIIFNPLLKGLCADKRTDDAMDIVLRGMTELSCVPNVFSHTIILKGLCHENRSQEALELLHMMADDGGGCLPNVVSYSTVIDGLLKGGDPDKAYATYREMLDRRILPNVVIYSSIIAALCKGQAMDKAMEVHDRMVKNGVTPNCFTYTSLVHGFCSSGQLTEAIKFLEKMCSNGVEPNVVTYSSFMDYLCKNGRCTEARKIFDSMVKRGLKPDITTYSSLLHGYAIEGALVEMHGLFDLMVQSDMQPDHYVFNTLIYASAKQGKVDEAMLVFSKMRQQGLKPNCVTYSTLINGYCKITRMENALALFQEMVSNGVSPNFITYNIMLQGLFRTGRTATAKEFYVQIIKSGKKDLIEQGLLEELDDLFLSMEDNDCSTVSTPAC

SEQ ID NO: 43276 - protein, 401 aa, Oryza sativa
MGEKHIILPRLVPSKLSHRQQLCGHRSVSEISGVVDETLGKRPLDGQNDILRYRLFTSTWNVGGMTPSSDLDLEDWMDSTANSYDIYVLGFQEIVPLNARNVLGPRNSCISTKWNSLIGEALNKRRRRGAVLHQEITNSSATERSAQEEHFRCIMNKQMVGIFMSVWVRSNLRPYIHHLNVSCVGSGIMGYLGNKGSVSIRFVLHETSFCFVCCHLASGGKQGDVLLRNFDAADILVRTRFPGGATQELPKKILDHDQVVLLGDLNYRISLEEAETRLLVEDKNWSILLENDQLLIEFSTGRHFDGWQEGLITFSPTYKYHPNSDQYYWCFDGALGKKKRAPAWCDRILWRGKGLKQIQYDTCNYRLSDHRPVRAVFHAECVIRGDADCACGCIALSSSSE

SEQ ID NO: 43277 - protein, 583 aa, Oryza sativa
MLPEEAFTVIRKSFDARKILKEPQFVYTVDVAVKRLLDLEPRTWDFIARLEPKLGTIEYMPDEKVASDLVSMLNVYKQGSDGELGINDTVNNGSICSPRKKPRVAVVGSGPSGLFASLVLGELGAEVTLIERGQPVEQRGRDIGALVVRRILHSESNFCFGEGGAGTWSDGKLVTRIGRNTDGVQAVMKTFVQFGGPPNILVDGKPHLGTDKLVPLLRNFRHHLKELGVNIIFNTRVDDLVVEGGQVKGVVVSDSRLQLGSPNQTLSFDAVVLAVGHSARDTYSMLLRHNVDMHPKSFAVGLRIEHPQELINDIQYSELAAEVHKGRGRIPVADYKIVKSFGEGDAELPEQNRSCYSFCMCPGGQVVLTSTNPSELCINGMSFSRRASKWANSAFVATVSSHDFRPFESHGSLAGVEFQREFERRAATMGGGNFVVPAQCVTDFLSNRLSVTTLPPSSYRLGVRPSKLHELFPSHITEVLQQSIIMIEEEMPGFVSSEALLHGVETRTSSPLQISRNTGTYESTSLQGLYPIGEGAGYAGGILSASVDGMYCGFALAKQLSLFHGDIESTLGKAQNQKGFVKY

SEQ ID NO: 43278 - protein, 272 aa, Oryza sativa
MAAAAVGVASRARRSSGPRGVAFCRWTNGLLHPRFVFPEAAAVAGSWAGSAQGAFCVKWVLRMVLNKVLELFCVKKKDSKKKGKAINPLCKVAAPHPTANVSTNNSLLDPFSTGNGTVLSVQKHEPECSSVISSMTRTEYGFESDGCNSFSHFDVQDFSDHYYAKNSPGKTSKDWVKTIQNEWRLLQKDLPESIYVRVYEDRIDLLRAAIVGPAETPYHDGLFFFDVHFPSEYPQSHRLTHVHIPSLMSYESPMHTCHGKWSSIPSSVQLQA

SEQ ID NO: 43279 - protein, 98 aa, Oryza sativa
MSRAAAFTSSNGPLTMKTERERARARGDGERKARSEFPSFLRSNWCFHQQAFYNVECRRPRPQPPSSGLDSTGNSSDISSVPVHLLPLRQRLDQASWI

SEQ ID NO: 43280 - protein, 163 aa, Oryza sativa
MGQAARTGMSVFVRGGGDGFAPVHAVVAGIRPSPPVLPFRSATASTSTAPTGPPPPASASFARPKELHRHWLAPYPVTHFLLLFLRSRWRRSPPPPPVLPAPSLVSASVVHAGRLLRLRYLTREIQGALDVGGRRKPMVPLPDTGGCVKPLSWLSGTGSGGSV

SEQ ID NO: 43281 - protein, 87 aa, Oryza sativa
MSMIVTKFGPWGGPGGDYRDVQVAPYRLVRLTIRSGDTVDGISFTYIGNDGLVYHMGHWGSDGGVPHEVKSTTDTPLFLYLFLSMSM

SEQ ID NO: 43282 - protein, 245 aa, Oryza sativa
MAARPVSSTTSTCRPCRPAQAAASKPSTSSSPGTGVLVGVPRERGSSVSKAAIRGARLEAAARCSLVRQRPMLLATVAVGSLVAAGAANATEIGDSLLGSSGLALADLSIGDWFGHLLYSAGQQANEAVQDQLSALSFTSLAVIFGAGLVTSLSPCTLSVLPLTLGYIGAFGSGKDRSEVVGNSVAFSLGLATTLAILGVAASFAGKAYGQVGQGLPVAASGLAVIMGLNLLEVYKHTLPDLRLH

SEQ ID NO: 43283 - protein, 385 aa, Oryza sativa
MLTLVGTRDSFAQSQAQLCAGMQLKAPTRAKYSQGFMPIGESDAYCALIPGLPEDLAKICLALVPRSQFPVMGSVSKRWMSFLESKEFIAVRKEVGKLEEWVYVLTADAGSRGSHWEVLGCSGQKHSPLPPMPGPTKAGFGVVVLDGKLFVIAGYAADHGKECVSDEVYRYDSCLNRWVELSKMNVARCDFACAEVNGMIYVAGGFGPNGDSLSSVEVYDAEQNKWTLIESLRRPRWGCFACSFEGKLYVMGGRSRFTIGNTRFVDVYNPNDNSWGEVKNGCVMVTAHAVLDKKLFCIEWKNQRSLAVFNPADNSWQKVPVPLTGSSSTRFCFGIHDGKLLLFSLDEEPCYKTLMYDPAAPTGSEWFTSELKPPGLCLCSVTIRA

SEQ ID NO: 43284 - protein, 66 aa, Oryza sativa
MSRRLYMSGAVWKGFNRSNVIGKVFCGAVWKGFCRSNSGNYTFIGSIMIGKDFIAEILIRKVYAFP

SEQ ID NO: 43285 - protein, 517 aa, Oryza sativa
MSAYVALKNGSLEVFTSFQETKAPDYHIQLPENSFGLEFARLDWDGHMRLYQWINYSAWVPSDIFDITDPCAYPLACGEYGICSHGQCSCPDVAIGQSGLFELVDAKGVNHGCFLTSSLTCGSARKTRFLAVPNVTHFNFVYNWTTNEDHCKLSCMDDCSCRASFFQHKDISSGFCFLAFNIFSMINFSAQSYSSNFSSSAFLKIQDSTHKSLLSKEKRAIVLVAGSLSFVTSVIVAVLIVLRRKRDKPLEDEYFIDQLPGLPTRFSFVDLKSATGDFSRKIGAGGFGSVFEGQIGDKHVAVKRLDSIGQGKREFLAEVQTIGSINHIHLVRLIGFCVEKTHRLLVYEYMPNGSLDKWIFQNHQADPLDWKTRLKIISDVAKALAYLHSDCRQTIAHLDIKPENILLDEVFTAKISDFGLAKLIDREQSSVMTRLRGRLGYLAPEWLTSVITEKVDVYSFGVVIMEILCSRRNLDYSQPEESCHLISMLQEKAKNNQLMDLIDPCFFDMELHMDDVL

SEQ ID NO: 43286 - protein, 573 aa, Oryza sativa
MAELRHSTVAAAAARSSNSPAKRDSDASAASSPFASTSSARGRGGGDDDDGKDAHRSSPLLPHHHKRLGLPSPLRSLLALEDPRSPSASSSYRILFALLAFLLLAATFSATSVWSRLNAPYLCQKDGITLHCPETKEAPSLWENPRAATTSWKPCAERRSNEPSDVPPENETSGYIFIHAEGGLNQQRIAICNAVAIAKIMKATLILPVLKQDQIWKDQTKFEDIFDVDHFINYLKDDVRIVRDIPDWFTEKDELFTSIKRTVKNIPKYASAQFYIDNVLPRIKEKKIMSIKPFVDRLGYDNVPMEINRLRCRVNYHALKFLPDIEEMADKLAARMRNRTGSVNPYMALHLRFEKGMVGLSFCDFAGTREEKEMMAAYRQKEWPRRYKNGSHLWPLALQKRKEGRCPLEPGEIAIILRALGYTRGTQIYVASGQVYGGKNRMAPLRNMFPNLVTKEELASAAEMAPFRKHVTSLAALDFLVCLRSDAFVMTHGGNFAKLIMGARRYGGRHRLKSIKPDKGLMSKSLGDPHMGWAAFSDDVVITHQTRAGLPEPTFPNYDLWENPLTPCMCPTA

SEQ ID NO: 43287 - protein, 405 aa, Oryza sativa
MEGEGRALRVYGFNQIQRTQFLQTLMRYGFQNYDWKEFTPRLKGKSVEEIQRYAELVMIHLLEDINDSGYYADGVPKEMRTDETLVRLANISLVEEKVAAMEQGKITKLFPSYLLYEFPSLVGGRVWKAEQDLLLLKALIKHGYARWQYISDDRDNGIFEAARQELRLPTANELISSHSNNETNGNLESTQEGQSNPTSMIHYRDTQRKIVEFIRKRYHLLERCLNLEYAVIKTKTPVPDDLAEQDFPGGHRPAVPDYSEMLRELPVLEPISKEVAPEGTTDQSQVSHLYNKMCFVLEDSAVPALNSHFGDKAASSGLANSLHKFEAVCEDVSRILRSHENGTTPKEEVMLDASSKETTSPKDPATEVPSSASKEATPPVQDPVIEAVKEEPPTVKAEDKMEIDS

SEQ ID NO: 43288 - protein, 69 aa, Oryza sativa
MWEIHQDMDLDWFFFSTETPIYPQHHHVTPPSSDVSPFAPKMAVAECSKELRDVSSPYRQLGCSTELSS

SEQ ID NO: 43289 - protein, 1066 aa, Oryza sativa
MQLPNLPCSSSSSTTTTTTTKLSVAFFRLLVILLLSFASPTSSCTEQEESSLIGFLEGLLPGHNGSLSTSWVKGIDCCKWEGINCSSDGTVTDVSLASKGLQGRISPSLGNLTGLLHLNLSHNLLNGYLPMELLFSRSIIVLDVSFNRLDGSLPELESPSGGSPLQVLNISSNSFTGQFSSKQWEVMKNIVALNVSNNSFTGQIPPSICINSPSFAILDLCYNQFSGSISSGLGNCSKMREFKAGYNNFSGALPEELFSATSLEHLSLPNNDLQGVLDGSHIVKLVKLTVLDLGSTGLSGNIPDSIGQLSTLEELRLDNNNMSGELPSALGNCTNLRYLSLRNNKFVGDLSKVNFTWLNLRIADFSINNFTGTVPESIFSCSNLIALRLAFNKFHGQLSPRMGTLKSLSFFSISDNHFTNITNALQILRSCKNLTSLLIGTNFKGETIQQDETVDGFENLRVLTIDSCGAMGQIPPWISKLKKLEVLDLSNNMLIGEIPFWIRDMPVLFYLDITNNSLTGDIPVALMNLPMLQSGKNAAQLDPNFLELPVYWTPSRQYRLLNAFPNALNLGNNSFTGVIPPEIGQLKMLDGFNVSFNRLSGEIPQQICNLTNLQLLDLSSNQLTGELPAALTNLHFLSKFNVSNNELEGPVPTGRQFDTFLNSSYSGNPKLCGPMLSNLCDSVPTHASSMKQRNKKAIIALALGVFFGGIAILFLLGRFLISIRRTSSVHQNKSSNNGDIEAASLSSVSEHLHDMIKGTILVMVPQGKGGSNNLKFKDILKATNNFDQQNIIGCGGNGLVYKAELPNGSKLAIKKLNGEMCLMEREFTAEVEALSMAQHDNLVPLWGYCIQGNSRLLIYSYMENGSLDDWLHNRDNGRPLLDWPTRLKIAQGASRGLSYIHNICKPHIVHRDIKSSNILLDREFRACVADFGLARLILPYDTHVTTELIGTLGYIPPEYSQAWVATLRGDIYSFGVVLLELLTGKRPVQVLSKSKELVQWTREMRSHGKDTEVLDPALRGRGHEEQMLKVLDVACKCISHNPCKRPTIQEVVSCLDNVDADLQVQM

SEQ ID NO: 43290 - protein, 474 aa, Oryza sativa
MALLSIAAVCALLSSGTRNGARKILLLPSAVSVTTFVAKMAFDLLCDISPASRGWKIRAKIARMWDYTGTADDLPPIHVDLVLIDEKGNAMYAEIPGVEADKFRPLLQESKVYTFSKFLILPSKPAYKPFPNKYMIKLTPWTNVEQVNEVPADFPSHVFNLVQFSYLSLRVGMQEYFTDVIGMIIGVSKLAYVRMASKTSDTPKRVIALRDLANCEVKLVLWGEHAPDFDADAVHSVGQDNAVVGIFVDTLMKAYNNEETLSGGSACKWYLNEDIPEINQFFDSLGDSAPKIQWISTGAESFGSSQRPARLEHKSVADLKKIDPWEAAGAGFSCTVTIAKLSPSQSWWFSSCSRCHRAATAYGSSYKCSSGCSSVTAIPKYRLCLIGTDGTNSAEFVLFGRVAQQVVGRPVMNLIKFQGRSDNIPKEIAAVVSQKFTFAVSVTERSLMHRNISFQVNGIETFFGRQGSIPQPRE

SEQ ID NO: 43291 - protein, 457 aa, Oryza sativa
MEVFYYLVFGGLAAVVAGLELGKSAKDRVTTSQAFNSFKNNYVLVYSLMMSGDWLQGPYVYYLYSQYGFDKGDIGRLFIAGFGSSMLFGTIVGSLADKQGRKRACITYCISYILSCITKHSPEYKILMIGRVLGGIATSLLFSAFESWLVAEHNKRGFDSQWLSITFSKAIFLGNGLVAIVSGLFANLLADNLGFGPVAPFDAAACFLAIGMAIIMSSWSENYGDPSESKDLMSQFKVAAKAIASDEKIALLGAIQSLFEGSMYTFVFLWTPALSPNEEDIPHGFIFATFMLSSMLGSSIAARLLARKLKVEGYMQIVFTISAFTLFLPVVTNILVPTSSVKGGSISFGGTLQLLGFCTFEACVGIFWPSIMKMRSQYIPEEARSTIMNFFRIPLNLFVCVVLYNVNAFPITVMFGMCSIFLFMAAILQRRLMVVSDLHKSSTKAQEMVDEDEPLNP

SEQ ID NO: 43292 - protein, 491 aa, Oryza sativa
MVSVDAVLPSVHIQHAVALPDHVLLMLRDGSLLPASGQFECLYSPVNSSQLRRQPLSVATLPDGPSLVHCPAGPSRVAVSLSLAQSVPVAPLQWDRLVYTALIDSKDNSTVVFAKGMNLRPGRLGVPSRYECVFGRDFSKPKLVVTSPVVSAAQEIFRCVTPVRIRRYLRMTTGGKNSVNNDDKPMLVSIRTKGRGSSTLPSIAQPEPLPRYNKHWRRKAHSMCVCTMLRNQARFLREWIIYHSRIGVQRWFIYDNNSDDGIEEVLNTMDSSRYNVTRYLWPWMKSQEAGFAHCALRARESCEWVGFIDIDEFLHFPGNQTLQDVLRNYSVKPRIGELRTACHSFGPSGRTKIPKKGVTTGYTCRLAAPERHKSIVRPDALNPSLINVVHHFHLKEGMKYVNIGQGMMLINHYKYQVWEVFKDKFSGRVATYVADWQDEENVGSRDRAPGLGTKPVEPEDWPRRFCEVYDNGLKDFVQKVFTDPHTGNFPW

SEQ ID NO: 43293 - protein, 537 aa, Oryza sativa
MATPSTSASGPAPAPAPASSAFPLTAAARFLRVSAFSSTRAFALAERRRTPRCRLSEVGGGDRSVAAGRSPGPRSFHGLVLSGNAEGAMQSLRRELSSGMHPLRENFVALVHVFAKNDLTTKGMEILAAMERQSIKSEADTFRPAKIQEAFGMRRCSKSLLQLGTLPCCTMAWLSFAQTAQASEGTNINMVYEVGELFELGIQLSYLLILLGLLGAGTFFVIRQVLVRRELDLSAKELQEQVRSGDASATEYFELGAVMLRRKFYPAAIKYLQQAIQKWDRDEQDLAQMQSLRRELSSGVHPLHGNFVALVHVFAKNDLATRCMEILATMERQSIKRELESSRRRMLLAAGAAVFLSWPNLAANAAEAKKGFLPVTDKKDGYSFLYPFGWQEVVVQGQDKVYKDVIEPLESVSVNTIPTSKQDIRELSPPDQVAEALIRKVLAAPTQKTKLIETKENDVDGRTYYTFEFTAQAPNFTRHALGAIAIANGKFYTLTTGANERRWEKIKDRLHTVVDSFKIEVLQLVWFNGKCRKHGFY

SEQ ID NO: 43294 - protein, 410 aa, Oryza sativa
MEGNLPPRGALVHGHGGGVGAFDLEATMQPPPPFHFAQDPHLHHHQGMVPVRGNPMLDLGNVVKTSPSDEEDVDDGHHHGGGGGSGKEASQWHRVKWISGMVKLLVSAVAYIDEDVDMDYGTGSAARRKHAMLKRKGKWRLVSAAMTERGFPVSPQQCEDKFNDLNKRYKRMTEILGRGTACQVVEHPELLEGMRLSGKLKEEARKHLNSKHLHYEEMCSYHNRNKMCLFDDPALQKSLRLALRSGEERAKKNPFGYDDEDFSDDDDEDEEFDDLEVSAEDHHHGIHGAKRLKHDQEETHFGSNLSEVAVIDMNKMLSEGSGGPTAEKSPSTPGMRDIRLEKRRLKIKAQMLKIEQKHFKWLRFSKEKDRELEKMRLENEKMKLENERLELELKLKEIEMGIKPKKIFSD

SEQ ID NO: 43295 - protein, 70 aa, Oryza sativa
MRHRRDSSSGETPPPGLLRRNATTTPGTATVNLAPTEATRRALSSASTPSPRSTSTVTSSAIPKHGQHGD

SEQ ID NO: 43296 - protein, 245 aa, Oryza sativa
MSQSSRRTSVCDRISALPDELLHHVMTFLTAKEAVQTCVLSRRWQNVWASVGYLNVDSCNFITVKHFKKFVDNLLLQRSCALLDMFCIHTSYDSSDDSLDYSDIHPWVCHALRCNVKTLGILNYCDGKLLSVDGYPVPFTFLHLKSVYLCKFSIDNRFVEKLFSGCPELLHLELRHCAIKATMFCSATLKILTITAADRTQDDPEGFQHLVINMPNLICLHVEEIANRNLRLLDISSVESASVYP

SEQ ID NO: 43297 - protein, 283 aa, Oryza sativa
MVRAALSIPVKIPFTRFSRGLSASQRIRKLLRGIARERETLLQQQQAHGASAADDFFTYMLALRAEGAHSLTVEDIVDNAIFLLIAGYETTSVLITFMLWHLDKEPEVLSKITEEQDEIARNKGPEDALTWDDVSRMKYTWKVAMETVRTIPPIFGSFRTATRDIEYQGYHIPKGWMVFTAQSVTHLDANIFPEPSNFDPARFENNSSIPPYCFVPFGGGPRMCPGNEFARTETLVTMHSLVTQFRWKLCCKEESYKKDPSPTPLLGLPVELEPRCLPENAHA

SEQ ID NO: 43298 - protein, 84 aa, Oryza sativa
MKKQPSSVQWSFQNCTARSLPSETLVDAIVGSNAPQIIFQTGVSVGLARIGISFCRCCALSQWKHGSGEPDSSLLASFISSDRL

SEQ ID NO: 43299 - protein, 399 aa, Oryza sativa
MMMPLRCLSELARRRRGCCRPDHAVDAMRAGLQCLMSTCSSTKATDNHSFSNTYATSCANLPEVAPSEAPLSDMLVDSFGRFHNYLRISLTERCNLRCQYCMPAEGVELTPSSELLSHDEIIRVADLFVTSGVDKIRLTGGEPTIRKDIEDICLHLSGLKGLKTLAMTTNGLVLSKKLPRLKECGLNALNISLDTLVPAKFEFMTRRKGHSRVMESIDAAIELGFQSVKVNCVVMRGMNDDEICDFVEMTRDKPVNVRFIEFMPFDGNVWNVKKLVPYAEIMDKVRQRFNGVERLQDHPSETAKNFKIDGHAGTISFITSMTQHFCAGCNRLRLLADGNLKVCLFGPSEVSLREPIRAGVDDAGLREIISAAVKRKKAKHAGMFDIAKTANRPMIHIGG

SEQ ID NO: 43300 - protein, 50 aa, Oryza sativa
MRNRRLQMMCYVTDHWEKQLNKTRRPGQYWMMDLETHLMGPVIALKFQLV

SEQ ID NO: 43301 - protein, 311 aa, Oryza sativa
MEMMVHGRRDEQYGGLRLGLGLGLSLGVAGGAADDEQPPPRRGAAPPPQQQLCGWNGGGLFSSSSSDHRGRSAMMACHDVIEMPFLRGIDVNRAPAAETTTTTARGPSCSEEDEEPGASSPNSTLSSLSGKRGAPSAATAAAAAASDDEDSGGGSRKKLRLSKDQAAVLEDTFKEHNTLNPKQKAALARQLNLKPRQVEVWFQNRRARTKLKQTEVDCELLKRCCETLTDENRRLHRELQELRALKLATAAAAPHHLYGARVPPPTTLTMCPSCERVASAATTTRNNSGAAPARPVPTRPWPPAAAQRSSA

SEQ ID NO: 43302 - protein, 281 aa, Oryza sativa
MSGLYSPGFSPARNLSPQIRSNPTDVDSQYLAELLAEHQKLGPFMQVLPICSKLLSQEIMRVSSIVHNHGFGDFDRHRFRSPSPMSSPNPRSNRSGNGFSPWNGLHQERLGFPQGTSMDWQGAPPSPSSHVVKKILRLDVPVDSYPNFNFVGRILGPRGNSLKRVEASTGCRVFIRGKGSIKDPGKEDKLRGKPGYEHLSDPLHILIEAEFPASIIDARLRHAQEVIEELLKPVDESQDFYKRQQLRELAMLNSTLREDSPHPGSVSPFSNGGMKRAKTGQ

SEQ ID NO: 43303 - protein, 856 aa, Oryza sativa
MGALAAATSSAIWLVEDDILLKNAVETGASLEALAKGAVCFSRKFTLKEIQDRWNSLLYDPEISTQASARMVEYENDLSTSNPLKAKVINAKQKDLSFQKRKIDSVKNQYYAMRKRVRNEPCSTVDLGFLIDPCSCTMNGGQCVCGGLDKHSQGHHVVHNTEPGVSTMNCFGQQDGSYNGGQTMFVGMNGHSFPAKHAETDSMVKGGDIANSVPYGYSDVSQIYEQDAYTRKDPDTNEGNNVSLKGITDFQGSMQFQNLGSSNQCGSKVTESKTIVIADHCGVEHVHFPVNSSSRMQEPGSLQVIGQPEGSQTPVGSIWTEVDERGTFTLDDDKKIKTDNSDPLALQPNLDGGICAAGLDHAAITEGDFMDFPYFSNSEDLDLLNGENFLNIPHETNQEDLDDPDHVKNLLHPDEANICYDQTDPDHVKHNVDVSGIISVPTSLEVPYPGRFVECVLNTEDPEIPCNDDVIFPGESPLQCSATDFGQNSEHNTCLVSPATSPASNVEHSNVSDKALIKREDMTNTEPSSQPMNLSPPTSEQKEGSTAPSKGCVPLGAEPSEGPSTAGTLVHCHVDTNDANSCASNLPSISAAVFAEGSPCHLEQQNNFDDSLSFPLPNSVEVPDHMNYNSHDNQPELGDGAPLQNCIPPHELPDLGLQDPITTVPVSNQVEECSDNENDVPNYYDLEALILDQDLIPWVQDSEQHPGVSRFQHPESRKSLIRLEQSARSYMNRAIVSKGAFAVIYGLHLRYYMKDSEVTLGRETEDIKVDVDLGKEGRANKISRRQAVIKMDEAGSFHIKNIGKCSIFVNSKEVPSCKRIILSSDSLIEIKDMRFIFHVNQDAVTQFVTRTPKPEH

SEQ ID NO: 43304 - protein, 246 aa, Oryza sativa
MGTGIDDDCGTKKPPKKGRKIKLTSNGNQKVHIKLKAKSQSENKNIANGFELDNVLANKVQPIGSTIDQRLKSSANNPALTSVPQGHHRDAPVPLATKMYHSQGNYRLRLELGQLYRQSCSEHSGSYSIPNSSQENGLMVSHLSPRDNSSLNVAQKSFVPQTKSMDQLLASTPESCPVIPQQVAASVPNRQATKSQKAEVQVSAVKNEMARSRCSKDAVRHSKNTGNKKAHQQRNGTVPVIKSSVD

SEQ ID NO: 43305 - protein, 1206 aa, Oryza sativa
MLPLLLVSFSDQVLAVRESAECAARAMMSQLTGHGVKLVLPSLLKGLEDKAWRTKQSSVQLLGAMAYCAPQQLSQCLPKIVPKLTEVLTDTHPEVQAAGQTALQQVGSVIKNPEISALVPILLSALTDPNNHTKHSLDILLQTTFINSIDAPSLALLVPIVHRGLRERGVDTKKKAAQIVGNMSSLVTEPKDMIPYIGLLLPEVKKVLVDPIPEVRAVAARALGSLIIGMGEEIFPDLVPWLLDTLKSDSSNVERSGAAQGLSEVLAALGKDYFDQILPDIIRNCSHQKASVRDGHLTLFRYLPRSLGGVFQNYLQIVLPAILDGLADENESVRDAALSAGHVFVEHYATSSLPLLLPAIEDGIFSDNWRIRQSSVELLGDLLFKVAGTSGKAILEGGSDDEGASTEAHGRAIIDVLGREKRNEVLAAIYMVRSDVSLTVRQAALHVWKTIVANTPRTLKEIMPVLMDTLISSLASSSSERRQVAGRSLGELVRKLGERVLPSIIPILSQGLKDPDASRRQGVCIGLSEVMGSAGKHQLLSFMDLLIPTIRTALCDSTQEVRESAGLAFSTLYKSAGLQAIDEIVPTLLRALEDDETSATALDGLKQILSVRTAAVLPHILPKLVQPPLSSFNAHALGALAEVAGPGLNSHIGTVLPALILAMDDEDADVQNSARKAAETVVLVIDEEGIETLIPELLKGVNDSQASMRRGSAYLIGLLFKNSKLYLADEAPDIMSTLITLLSDTDKATVSAALEAFSRVVSSVPKEQLPTHIKLVRDAVSTARDKERRRRKGVPILVPGLCLPKALQPFLPIFQQGLISGSAETKEQAAEGLGELIDVTSEKTLKEVVVPITGPLIRILGDRFPWQVKSAILSTLTIIISKGGLALKPFLPQLQTTFVKCLQDNNRSVRTRAASALGKLSALSTRVDPLVSDLLSMLQSGDDAVKESVLSALKGVVRHAGKSVSPVVRSRGCDLLKDLLQADADDVRSSAAKAIGTLCQYMEENETSDLVQTLLNMGTLPDWCTRHGALLTFCSISMHCSSKLCRSMSFPSIVDLLKDSLKDDKFPVREASTKTLGRLLCYQLQSEASTLQLIQLLALALRDDSSEVRRRSLSRLKAAAKINNPALATHLSILGPAIAEALKDTNTPVRVAAERCALHVFQLTKGADNVTIAQKHLNMTGLEVRKIAKLPEESDGSESSDDDKRK

SEQ ID NO: 43306 - protein, 288 aa, Oryza sativa
MKSIIWKPKGFIRRLMSWSAWLIIQCFWLQCLLCMIRRSVVLFCVIQNLINCLKIGCLLKPFKGRFIPPIWMHLIKDVISYMSNIDNLAASLGSIDSYVLETKPEKIKVILFPFESREVNWRKDFATFLIEHLRNKWKSTMLDHFINILQKDFKIGYIQHHPLLQDFNQLSNMIRMTWKESKYLTVERRVLLSSTLNAIRNNIPWTSVTTMDAVVNEYISKATNDSLGLFMEIKKIAAHYIENRRKLNKEKGICNRKQVHPIEIIEEIWPGAIEEIYELSLKSEWLMT

SEQ ID NO: 43307 - protein, 321 aa, Oryza sativa
MLLLQFLENKVAVELTRSEFVEAQEALAQMINWFTRFPTILRGCENTIEMLRGQYAHSVGCFDEAAFHFLEAARLTDSRSMQSMCQVYASVSYICMGDAESTSQALELVGPAYRTMDSFVGVREKTCIIFVYGLLLMRQQNPQEARLRLAGGLRIAHQQLGNIQLVSQYLTILGTLALQLHDCGQAREILKSSLTLAKTLYDIPTQIWILSVFTELYRELKERENEMENSEYERKKEDDLQRRLSEAHSSPFHQELVEKTRIQVQQLHNFSREQQGMPGPTTAKADLDIPESVGLYAAQPSSVKRLIEPSSVRRSSRRRLS

SEQ ID NO: 43308 - protein, 1030 aa, Oryza sativa
MFFSGDPTARKRVDLGGRSSKERDRQVLLEQTREERRRRLGLRLQNSSATKIQKCFRGKRDLELARSEVRGNFCSTFGEHCQRVDWSSFGANSDFLRQFLFFFNAKKDSDIAILCQVCNLLLYYVKHGGDVLRLFGGTNYSSLEPLVIHRVKKLALICVQTVHQKRHDWGSQLLMPPESTPKPCGSLLETAACLINPKLAWNCKVVGYLQRKKIYCLFRGIIISIPQTARNLEHNNNTSALEQVLMLIASHIGDDPCCCPVVDPRWSFSSQLLSIPFLWHRLSHFKKVFSANGLSKYYIHQIACFLPSCADVLPNDISSNHPGYACVLANVLEAATWILSEPKFASETAADIIAVCTSLLDALPTITSPTGRADDDDDTPMDDVINGLDADLEKQITAAIDSRLLQHLVNALFRGTISTDYSYPTGPSDIEVEAVGSICAFLHVTFNTLPAERIMTGLAYRTEIVPALWNFIKRCNENQSWPQFSKFVSSPPADAVGWLLPVSVFCPIYKHMLKIIDNGEFYEQEKPLSLKDLKSLVLILKKALWELLWVIPSHASPAKKVLPNPSGFKKLSIENVKIGARIGLSELLAQLQDWNNRLPFTSSNDFYSQQATSENFVSQALLGNTRASEIIKLAPFLAPFTSRVKIFTSQLANSRQSTTSHSALTRHRFKIRRNRLLEDAFDQLSMLSEEDLKGPIRVVFVNEHGVEEAGIDGGGIFKDFMENITRAAFDVQYGLFKETADHLLYPNPGSGLVHEQHLQYFHFLGSLLGKAIYEGILVDLPFATFFLSKLKHKYNFLNDLPSLDPELYRHLLSLKHYDGDISQLELYFVIVNNEYGEQSEEELLPGGRDMRVTSENVITYIHLVANHRLNYQIRAQSTHFLRGFQQLIPNEWINMFNEHEFQVLISGSLESLDIDDLRSNTNYSGGYHPDHELIDIFWEVLKSFSSHNQEKFLKFVTGCSRGPLLGFQYLEPKFCIQRAGVPGMEEEDEDRLPTSATCVNLLKLPPYRNKTQLESKLLYAINAEAGFDLS

SEQ ID NO: 43309 - protein, 66 aa, Oryza sativa
MEGGGLASLLAVPVLDVKKGAPISDLFLPQHSSFPSQACLHLHHESVPPPSASPSLVFSHLYAVLQ

SEQ ID NO: 43310 - protein, 894 aa, Oryza sativa
MPPWWGKSFSKDAKKTTKENLIDTFHRLISPNDQKGSTKSKRSCRRGNDSSVEKSCRSTTVSRPTSPSKEVSRCQSFSADRPHAHPLPIPGVRPPVTRTVSDITESKPILEKRGKPPLLLPLPKPNRPPRRHGNSEVFSEIVVASPSSNCSDSDDHGDSQLQSPVGNDAENATLVTLKNKSSNARKECPGPITAKNMKEIHRPANQVHGSHILSTSPRGVAADSYQSNLQNPRPLVLDSAPNSLMSSPSRSPRRICPDHIPTSAFWAVKPHTDVTFVGSGQCSSPGSGQTSGHNSVGGDMLAQLFWQPSRSSPECSPIPSPRMTSPGPSSRVHSGSVSPLHPRSGGMAPESPTNRHDDGKKKQTHKLPIPPLSISHSSFHPNNSTPTSPISVPRSPGRTENPPSPGSRWKKGKLIGRGTFGHVYVGFNSDSGEMCAMKEVTLFLDDPKSKESAKQLGQEISLLSRLQHPNIVQYYGSETVDDKLYIYLEYVSGGSIHKLLQEYGQLGEQAIRSYTQQILSGLAYLHAKNTVHRDIKGANILVDPSGRVKLADFGMAKHINGQQCPFSFKGSPYWMAPEVIKNSNGCNLAVDIWSLGCTVLEMATSKPPWSQYEGIAAMFKIGNSKELPPIPDHLSEPGKDFIRKCLQRDPSQRPTAMELLQHPFVQKAVSLEKSVLSEPLEHLAVISCRSSAKMAAHTRNISSLGLEGQTIYQRRGAKFSSKHSDIRIRSNISCPVSPCGSPLLKSRSPQHSNGRMSPSPISSPRTTSGTSTPLSGGNGAIPFNHLKQSTYSNEGFAIPSRSPDDLFASRPTDPDLGQFIRVHQVSQGLQERVVSEADILSPQFGKRLGNVFDLRDKLSPSERFTHHAFVDHVKLNPSLDLTSGSPHLGLKHGN

SEQ ID NO: 43311 - protein, 331 aa, Oryza sativa
MEIINGPVLPRYAAPATGALTSDAKISGQLLRRVHLRRRACGLQGDHYRAARRFFGFPSERHARSGWVWPVCCSYGSSSDGDGAAAADYDASGEEFVNSSVMEAVELRSVSDGFVIKMRDGKNLRCVQNNPRVLRLRDSAPHHAIVLKMEDGSDLLLPIIVMETPSIMLLAALRNIRIPRPTIYNVVKEMTERMGYAVRLVRITEMVHDAYYSRLYLAKIGNEEETISLDLKPSDAINIAFRCKVPIQVNRRIAYNNGLKVVQPTPSESYVSSDQFQYTRLDRPDDQPCFEAQEFDLVRNMLVAAVEERYKDAAQYRDQLFMFRAKKKNMI

SEQ ID NO: 43312 - protein, 520 aa, Oryza sativa
MRHVVVQCATSWDTPRTSTTNGSHAEPSAVVKAGTAPLIQALKSTANQDVSCFHFPGHNRGKASPPSLSELIGSRTFLHDLPELPELDDLFSPKGVILDAQKRAAELFGSFKTWFLVNGSTCGIQASVMATCSPGDYLIIPRNCHISVISALVLSGAVPKYIVPEYNSGWDIAGGITPSQVDKVVKELEEDRKKVGAVLVTSPTYHGICSNIQGIVNVCHLQGIPVIVDEAHGAHFRFHRNFPSSATEQGADLVVQSTHKVLCSLTQSSMLHMAGDLVDADKVSQCLQLLQSSSPSYLLLSSLDAARAQLSENAESFDEPVSMALETKHQLRIIPGISVLDLSSFLSDFPAIDPLRITLSASDLQLSGYEADDFLAEEHQIVSELVGTQAVTFAVNLGTRRHDVQRLVHSVKHLSEKYFSENGSSSRKENPASSPLDKFSIKLTPREAFFLKKRRVSIEDSLGEICGELICPYPPGIPVLIPGEIVTQDSLSYLMDVRDNGIAISGAADGELKSIMVCNV

SEQ ID NO: 43313 - protein, 367 aa, Oryza sativa
MSSDDTTPTPLGRRTKPKPPMSRLMRLSLKAVDWATDATRRADGTLNRLALSVLDPRVPAFSSPCRGVASRDVLVHPPTRLRARLFYPSAAAGKDERPPPPRPLPVIVFFHGGGFAFLSAASAAYDAACRRIARYASAAVLSVDYRRAPEHRCPAAYDDGIAALRYLDDPKNHHGGGGGGVPPLDAARCYLGGDSAGGNIAHHVARRYACDAAAFENVRVAGLVAIQPFFGGEERTDSELRLDGAPIVTVSRTDWMWRAFLPDGCDRTHEAANFAAPSAAPGVDSPAFPPVLLAIGGYDPLQDWQRRYAEMLRGKGKDVRVFEYPNAIHAFYVFPAFDDGRDLMIRIAEFVAESAAAAAAASGGGSE

SEQ ID NO: 43314 - protein, 151 aa, Oryza sativa
MDEVPGDARLGWIRQAVLLLQRARPSTPPPKQADAKGTRPDGVGEQQGVKRPVDHQIRVFFSVAASSVAENDLPDYFYSLSNEEIRNEAKMRRGRLEQSWLLIPKSYKEKQALAARQKYKQALIRIPFPDGVILQGVFLPTEPISSLYEVS

SEQ ID NO: 43315 - protein, 239 aa, Oryza sativa; identical to SEQ ID NO: 30517

SEQ ID NO: 43316 - protein, 370 aa, Oryza sativa
MEMFFSSFLNESASSENLFGHPNVERCPFLRNINGATTYSFSSALPVAARGGNGPIFEDGPGFDSAFKLFHGWDGIVPLSGKSYLPDESNSESIDANPEPALLFNPLAARAATISLSAFGPFGFNFFNGKGKRQNKKPNNLNQSNKKPSNPNQNSMKQKGGNSSSHEAMSNEWMENGQCPLARSYRAMSGILPLVAKALQPPAGVKLKCPPAVVAIRAALARTELVKSLRPQPLPAKMVAIALLGMAANIPLGVWREHTKKFSPQWFAAVHAAVPFIGMLRKSVNMPKTAMAFTIAASIIGQTIGSRAERIRLKALAAKGDADSTTVADMYPNKSGNCSDTEGKAWDPLAMKMAGRASGGVAAPTPSMCF

SEQ ID NO: 43317 - protein, 331 aa, Oryza sativa
MIGVRPVADTFGRVNRVEPVSLEELGRPRIDVVINCSGVFRDLFINQMNLLDRAVKMVAELDEPEEMNYVRKHAQEQARELGVSLREAATRVFSNASGSYSSNVNLAVENASWTDERQLQDMYLSRKSFAFDCDAPGAGMREQRKTFELALATADATFQNLDSSEISLTDVSHYFDSDPTKLVQGLRKDGRAPSSYIADTTTANAQVRTLSETVRLDARTKLLNPKWYEGMMKSGYEGVREIEKRLTNTVGWSATSGQVDNWVYEEANATFIEDEAMRKRLMDTNPNSFRKLVQTFLEASGRGYWETSEENLEKLRELYSEVEDKIEGIDR

SEQ ID NO: 43318 - protein, 784 aa, Oryza sativa
MSSKPSNTIIKYFKALLDLHQPILTRSILETLHAVGDSPTVQLKSDVLLDIVCSLGLSVSVERKSGDEMASIARLLNVATRKIYNQNKNICVVKLPLVFTSLGDILASEFEEARFSAVEAFKSLIEDCIDESMILQGITQIKSRHPGIRSDPTTIEKICAILEGLLNVRYGDVWDKSFHVISMAFDKLGESSADLLPEALKNLADMQNLSDDDFSFRKQLDSCLGSAVAAMGPKNVLKILQIHSISDENEWIFPILEKHIVGASLQFFLTDIRDIIRAVEKNIPKLLKEDKLFSAKRAEGYVYSLWSLLPSCCNYARDTSIHFRALQNVLCDTLKNQLDLRGIICSSIQVLIKQNKEALSVPVEEAILAEDEISKSERRAKERYTKEFAEENLKAIRAFSSKFLEVLCSIFLASSNDAIGLLQPAISDIASISEKDTVGRFFLDAIRKLLDATKAVNAEQKNDSSMQIEANSNTNNMARALLLDFAASLMPGLAAKSINVLFSYVKPAIKDTDSLIQKRAYKVLSMLLKDTEFIERNLDTLLGLMISSLPCQFPSKRYRLECLHHLIVYILKDSSKLGKREIIGSFLTEILLALKEANKKTRNRAYDLLIEIGRACEDAENDGRKENLHQFFGMVAGGLAGQTPYAISASVTGLARLTYEFSELIGVAYKLLPSTFLLMQRNNREIVKANLGFIKALVAKSKADVLHEHLKGVVEGLLSWQTDTKNSFKAKIKSLMEILVKKCGLDAVKAVMPEEHIKLLTNIRKINERKMRKYKSSEDGETCR

SEQ ID NO: 43319 - protein, 470 aa, Oryza sativa
MTPPLESLRLLTPPRSAAPPKSPLPPPVRPCPSLIATICSAGAATLTRPFSCEYSHAPPRPSPIAAVPNPPMLPLPSSVSNSPDAADQLMLHRRCPTNSHLPRGPVEANSVAVRADGNYGDDNEKLSLIKLASMIEVSAKKGARDLNLQGKLMAQIEWLPDSIGKLTGLVTLDISENRLLALPDAIGKLFSLAKLDIHANRISQLPESIGDLRSLIYLNMRGNQLSSLPSSIGRLLNLEELDVGSNGLSSLPDSIGSLTRLKKLIVETNDLDELPYTIGHCVSLVELQAGYNHLKALPEAVGKLEPLEILSVRYNNLRSLPTTMASLTKLKEVDVSFNELESIPENFCFATSLIKLNVGNNFADLQYLPRSIGNLEMLGELDMSNNQIRVLPDSFGNLKHLRVLRAEENPLQVPPRDIALKGAQAVVQYMSDASKRTTKSEPMKPKKTWVHFCFFSRPNKRKHDRIDNAT

SEQ ID NO: 43320 - protein, 387 aa, Oryza sativa
MWGDRTHHKHWNQAHVPSGTSKDKFQAKGQPKFIPDNYSSVDEVTAALRDAGLESSNLILGIDFTKSNEWSGRYSFGRKSLHAISATPNPYEQAISIIGRTLSPFDDDNLIPCFGFGDASTHDQSVFSFYQDSRSCCGFEEVLERYRQIVPHLNLSGPTSFAPLIYAAISVVENSNLQYHVLVIIADGQVTTSNTKDGKLSPQEQATIQAIVDASYYPLSIVMVGVGDGPWDAMQHFDDCIPDRAFDNFQFVNFTEIMSTSKDMPKKEAAFALAALMEIPSQYKATQGLRPLEKHAGHVASHLRILPPPNKVLENDNAAASRPPTASSQSTGFGKNTTDEQVCPICLTNPKDMAFQCGHLTCKECGPTLSTCPLCRVPITMRVRLYS

SEQ ID NO: 43321 - protein, 76 aa, Oryza sativa
MEAGAWWSTMPLRAQKYRTRGYEDLCWALVGWLPGLVGLLPNTPFLLPNFSTMFSTNHASTISYGKATPYASALWR

SEQ ID NO: 43322 - protein, 1020 aa, Oryza sativa
MGASAARLAALLLLLLAAAAAVGECVYIPYNTSAGVVGGKLNVHVVPHTHDDVGWLKTVDQYYVGSNNSIQGACVQNVLDSLVPALLKDENRKFVYVEQAFFQRWWRQQSDMIKDIVKGLISTGRLELINGGMCMHDEATVHYIDMIDQTTLGHRFIKEEFGQIPRIGWQIDPFGHSAVQAYLLGTEVGFDAFYFFRIDYQDRDTRKGTKELEVVWRGSKTFGSSADIFAGIFPKNYEPPPGQFYFEVDDTSPIVQDDPLLFDYNVEQRVDDFVAAAIAQANITRTNHVMFTMGTDFKYQYAESWFRQMDKLIHYVNKDGRVNALYSTPSIYTDAKHAENVPWPLKTNDFFPYADNPNAYWTGYFTSRPALKRYVRVMSGYYLAARQLEFFKGRSNSDLTTDSLADALALAQHHDAVTGTEKQHVANDYAKRLSIGYTQAEKLVSSSLSCLSQSGSKSHCPSQTTNFEQCPLLNITYCPPSEMDLSQGKSLVVLVYNSLGWKREDVLRIPVISDSIVVHDSEGREVESQLLPIANASLYMREKHVKAYLGMLPAAKPKFWLAFPVSVPPLGFNTYFISSGKKSASVSLMSTLHSSQGSENSNMQIGQGQLKLQYNAAGALSLYSNSKTQVEANFEQKYKYYIGQDGNGSDPQASGAYIFRPNGTVPIKTDGQVPLTVLRGSILDEVHQQINPWIYQINRVYKGKDYVETEFIVGPIPVDDGNGKELSTEVVTNMATNKTFYTDSSGRDFIKRIRDYRSEWRIEVHQPIAGNYYPVNLGIYVEDGSRELSILVDRSVGGASIKDGQIELMLHRRLLHDDGRGVAEALNETTCFDNQCEGLVIQGKYYLKIDPQGEGARWRRTFGQEIYSPLLIAFAEQDGGNWVNSHVTKFSAMDPAYSLPDNVALLTLQELEDGTVLLRLAHLYEAGEHKDLSALASVDLKRVFPDKKIVKIVETSLSANQERSAMEKKRLKWKVEGPPADEKIVRGGPVDPSKLVVDLGPMEIRTFLINFAPQSGKQLM

SEQ ID NO: 43323 - protein, 968 aa, Oryza sativa; identical to SEQ ID NO: 42884

SEQ ID NO: 43324 - protein, 949 aa, Oryza sativa
MEPSAAVASRPPSFTAQTNALLRKNLIFQKRNRKGTIRLIIVPIYLCLLLTILQRVINSVLDKPKFRCGCKCVDVNGTGSCQNVCGIQYSTLDQAGSCPIPNPPEWPALLQLPRPEYRAMQESSLYAGFPDVSCRKSQSCAATIPFTGANETLSNIVMQNLFTSSPLSNLSDNASISSLLLGTDVPGTYTGFIEPAFVSDRPIYVLRPQCKASDSVTVPITFGDINIRKEMLCIQGLPLWRNSSAIINEETFNGYRKGKSQEGINEIPMAYDFQDSNEKHFSVLALYNSTYQNVSYVPMPFGLLHISRSLNAVSNAYLQFLRGSGVKMLLAFTKEMPKQETRLRFDFSSVIGPLFFEWVVALLFPVMLTYLVYEKQHKLRTMMKMHGLGDGPYWIIYYAYFLILSMVYLVLFVVFGSVIGLNFFKINDYSIQFVFFFSFMNLQIVLAFLTATFFSKVNTAQAIAYLYIFGSGLIAGSLIRNFIEGGKFPKHWITVLEIIPAFSLYRGLYELGQYAIRASEAGSHGMRWSDLNDHANGMRDALIIIILEWLVLLPVAYYLDHSASVGHKSSFLSLIKNLLKKNPTWRRVSINEVVNDAVHVEMVKQDIIKERETVDQVLQQQSSGYAVVCDDLKKVYHGKDGNPDKFAVRGLSLALPYGECLGILGPNGAGKSSFISMMIGLTRPTSGNAFVREFSIQTDMEKIYNSMGVCPQNDMLWEMLTGREHLQFYGRLKSLNGSDLDTAVNESLRSVNLLHGGAPDKQVRKYSGGMKRRLSVAISLIGDAKVVYMDEPSTGLDPASRKSLWDAVKQAKRDRAIVLTTHSMEEAEVLCDRLCIMVDGSLQCIGTPKELIARYGGYYVLTMTTSPEFEQEVENLARKLSPNARKVYHLSGTQKYELPKQQVRIADVFMAVENFKRRTEVQAWGLADTTMEDVFVKVAKGAQSSEELS

SEQ ID NO: 43325 - protein, 435 aa, Oryza sativa
MAASSAPPPPPRRLLALTMALAAAVVSAASAARAPASVTPISRTLYHSSDSLLSDIKALVARHPDKLSMDTITASNKGYSTDLFIVTFNHAKESTSNSSKIHVLLSFGQHGRELITSEVALNLLYILTEKRKIAGVDLSSFEKILENLVIKVVPMENLNGRKRVEEGELCDRRNGRGVDLNRNWSVDWGKKEKDYDPYEENPGTAPFSEPEAQIMRELSKSFKPHMWVNVHSGMEALFMPYDHKNTTPNGASAHLMRTVLENLNHRHFQDSCLVGSGGGAVGYLAHGTTTDYMYDIVKVPMPFTFEIYGDEKASTSDCFKMFNPVDKTTFDRVINKWCMAFLILFEEGLRNLREAQLVSQGAVDNWVPMGGDIVEISAARKSSPDKRKLEGLDLGMQELRTYFRLFMLSTVLLMFMFCSRISKNRNRETGNIFDS

SEQ ID NO: 43326 - protein, 65 aa, Oryza sativa
MTVVSQCIHFIYPIIVVVCQCVILLDFSSSILPAPWVLMIQKSWNCLEHVLYSQPFFVEVWMYIV

SEQ ID NO: 43327 - protein, 258 aa, Oryza sativa
MDERPPPPALRLPRGRRGGGLLGWLRSRAERDHLRQTRGAFCVKWVLRMVLNKVLELFCVKKKDSKKKGKAINPLCKVAAPHPTANVSTNNSLLDPFSTGNGTVLSVQKHEPECSSVISSMTRTEYGFESDGCNSFSHFDVQDFSDHYYAKNSPGKTSKDWVKTIQNEWRLLQKDLPESIYVRVYEDRIDLLRAAIVGPAETPYHDGLFFFDVHFPSEYPQSHRLTHVHIPSLMSYESPMHTCHGKWSSIPSSVQLQA

SEQ ID NO: 43328 - protein, 334 aa, Oryza sativa
MQVFLLFCMSVTLYFAEEIPLEPTDAQRLSDSAPLLNGSRDDNNASNEPRNGALPNGHTDGSNVPANSNAEDSNSNRENVEVFNDGPGAVLVNILTSMRHLPPGMYSVLLVMALTWLSWFPFFLFDTDWMGREVYHGDPNGNLSERKAYDNGVREGAFGLLLNSVVLGIGSFLVDPLCRLMGARLVWAISNFTVFICMLATAILSWISFDLYSSKLHHIIGANKTVKNSALIVFSLLGLPLSITYSVPFSVTAELTAGTGGGQGLATGVLNLAIVVPQIVVSLGAGPWDALFGGGNVPAFALASVFSLGAGVLAVLKLPKLPNSYRSAGFHGFG

SEQ ID NO: 43329 - protein, 649 aa, Oryza sativa
MAGKGEGPAIGIDLGTTYSCVGVWQHDRVEIIANDQGNRTTPSYVGFTDSERLIGDAAKNQVAMNPINTVFGAKRLIGRRFSDASVQSDIKLWPFKVIAGPGDKPMIVVKYKGEEKQFAAEEISSMVLIKMREIAEAYLGTTIKNAVVTVPAYFNDSQRQATKDAGVIAGLNVMRIINEPTAAAIAYGLDKKATSVGEKNVLIFDLGGGTFDVSLLTIEEGIFEVKATAGDTHLGGEDFDNRMVNHFVQEFKRKNKKDITGNPRALRRLRTACERAKRTLSSTAQTTIEIDSLYEGIDFYSTITRARFEELNMDLFRKCMEPVEKCLRDAKMDKSSVHDVVLVGGSTRIPRVQQLLQDFFNGKELCKNINPDEAVAYGAAVQAAILSGEGNEKVQDLLLLDVTPLSLGLETAGGVMTVLIPRNTTIPTKKEQVFSTYSDNQPGVLIQVYEGERTRTRDNNLLGKFELSGIPPAPRGVPQITVCFDIDANGILNVSAEDKTTGQKNKITITNDKGRLSKEEIEKMVQEAEKYKSEDEEHKKKVESKNALENYAYNMRNTIKDEKIASKLPAADKKKIEDAIDQAIQWLDGNQLAEADEFDDKMKELEGICNPIIAKMYQGAGADMAGGMDEDDAPPAGGSGAGPKIEEVD

SEQ ID NO: 43330 - protein, 100 aa, Oryza sativa
MFGRDSSNMSVLQTAICVNINFSYSESPSVARQRKFLRLSLFYFDNGRVNSRVCNCLPVNEVPFYSWLCDCRHTIPAKQRCGFDTIIVPGAWSIWKERNG

SEQ ID NO: 43331 - protein, 446 aa, Oryza sativa
MKLDSFTARRGNPELVAPARATPRETKPLSDLDDHWDLRYLQPSLEFFRVVDGDRRPARPGDGIKAALAEALVYYYPIAGRLRELPTGHMLAVECTAEGVVFVEAEADVALEDFGEPLMPTFHGAEGFLCDVGDTRVIVGRPLFYLQITYLKCVGFVLGTYMCHCIADAFGTIQFLKAIVDIARGEAKPTTLPVWERELFLATSLQPHIKEDQKKLFDELESTTCDDIMVTMPTENMVSEYFILSQIDMAALRRHVPLNLNKTVTSFELLTAVTWRSRTIALGYRPCHIVRLMIVVNARGRWKKLPLGYYGNGLLCSVIETTVNDLCTNPLGHTIELVRKAKDEMKTEENMQLRVDLLPLWREKPYIKVQRIFEACDIKWIGQDTLDIGWAKRIGGGIPTVSPPNLTSYQFLCKNEKGEKSTVISMLLPQPAMDRFKKEMAAWLIE

SEQ ID NO: 43332 - protein, 178 aa, Oryza sativa
MLNVPLNVSFRRALVGQNLTLWHELCASIVHIQLNNTSDYFRWNYHQNGQFSVRSMYLALINNGYIDRNKLIWKLKMPLKIKIFMWYLLKGVVLTKDNLARRNWTGNLRCCFCTKNETIQHLFIDCHFTKFIWRAVQFSFGLYIPTSISHIFYDWLQGVINKKSKLILAGASALCWAL

SEQ ID NO: 43333 - protein, 381 aa, Oryza sativa
MGYNELIPGLPEEVARECLIRVGFDQLPAVRRISRQWKAEVESPAYNRLRKAEGLARPALALVQARRELAEAGPAADKQSSAGGVPGNSYRMVLLDPAEGRWTPLPEVGGASGSLPLFCQVAAVDGGVEGRKRLVVVGGWDPETWAPTDSVLVYDFLTGAWRRGAAMPGPRRSFFACAAVGGKVFVAGGHDEEKNALRSALAYDPDADAWAALPDMAEERDEPRGLCVDGKFLVVGGYPTPAQGRFVGSAEWFDPATSTWSAVQEGYVDDGACPRTCSAAPEAGDRMYMLRDGHLVARHGAISSAPAAWRPVAPVPEDARTAAAVSVIPDGHVVVIGSDCHGGDQTVYTLREEAGKPASWARAPAPPEFSGHVQAACLLEI

SEQ ID NO: 43334 - protein, 215 aa, Oryza sativa
MFSIMLIIFSAIAELLDNAIDEVNTGATFVRVNEFTNPRDGSSSLLIQDDGGGMDPEALRRCMSFGFSDKQSDALIGQYGNGFKTSTMRLGADVIVFTQNQNNWVPTRSIGLLSYTFLMETGCDDVLVPTVDYQYDISTASYTQMLRHDQKLFSSNLAILLKWSPFASEAELLKQFDDIGEHGTKIIVFNLWFNDDGDMELDFNSDKKVSNAGIF

SEQ ID NO: 43335 - protein, 1037 aa, Oryza sativa
MRLLVQVSEARNLPAIDGGGGLSDPYAKLQLGRQRGKTRVAKRTLSPTWDEEFAFRVVDLKDELVVVVVDEDRYFSDDFLGQVRVPLSAVLDADNRSLGTQWYQLLPKSKKSKIKDYGEIRLTISLSLNYPEETTTLAHCVSDDLASYSDKSTELQKGSSLPNIPIEIPTSVSGGDETEIIKEDRSNGVPSFVNRLYQFFSAKPKDAEASASAPPLTTGDGNSDILEETPSTSSELPDNQDYETGVTMSFDEQLKAFGSCHEGNEIPENLSGGVLIDQVYAVAPSDLNGLLFSPSSDFLQSLAEMQGTTGLEIQQWRLENDGEVLKRVVSYTKAPTALVKAVKATEDVSYLKADGDIYATLADVSTPDVPFGNSFRVEVLTCIMPGPELPDNEKSSRLVVSWRLNFIQSTMMKGMIENGAKQGLKDNYIQFSELLARNIRPVDSKDAAATDKVLSSVQPEQESDWKLAFRIFGNFTVVSSLVAFIYVFSHIILASPSIIQGLEFPGLDLPDSVGEVVVCGVLVLQGQRVLNMIARFIQAKRQRGSDHGVKAQGNGWLLTVALIDGTNLAATKSSGYSDPYVVFTCNGKTKTSSIKFHTLEPRWNEIFEFDAMEDPPSVMKINVYDFDGPFDEVESLGHAEVNFLKSNLSELSDIWIPLKGKLAQACQSKLHLRIILNNSRGTEVMKDYLDKMEKEVGKKIAVRSPHTNSAFQKIFSLPPEEFLINDFTCHLKCKMLTQGRLFLSPRIIGFYTNLFGHKTKFFFLWEDIEDIQVMPATLYSMGSPSLLIILHKGRGMDARHGAKQLDNEGRLKFHFQSFVSFNVAHKTIMALWKARSLTPEQKVQLVEEESEMKDLQNNESDSFLGIEDAKMSEVFSSTKPFDVSTLMSIFEGGPLEHQVMEKIGCMEYSVSPWESVRADAYQRQIHYKFDKRLARHEGEVMSTQQKSPLPDKNGWLVEEVMTLEGIPVGEYFNLHMRYQLEQISSKPKACNVQVSIGIAWLKSCKNRKKIAQEVLSSASSRLKKMFGLLEKELLPAK

SEQ ID NO: 43336 - protein, 156 aa, Oryza sativa
MEPKRSPALPQPNVETKKSPPRAAAGGGGGGTAAVGGESPLSSLFHQPSHGAKGKEDIYSIFYKGQNGTAQAGTADGKSQWTPPKSRTVYTKDNKQSNQYDSVDTSCFGSSVNYGGRDYYGISGHKQSTESNDYKADKKDTSTDSHGDWWQGSFYY

SEQ ID NO: 43337 - protein, 349 aa, Oryza sativa
MIAVLVVILRRRMVKATTRVEGSLISFTYRDLKSVTKNFSEKLGGGAFGSVFKGSLPDATMVAVKKLEGFRQGEKQFRSEVSTIGNIQHVNLIRLLGFCSEKTRRLLVYEYMPNGSLDKHLFGSNQHVLSWNTRYKIALGIARGLDYLHEKCRDCIIHCDIKPENILLDGSFAPKVADFGLAKLMGRDFSRVLTTSRGTVGYIAPEWIAGTAVTAKADVFSYGMTLLEIVSGRRNVQEQGGAAVDGLLPLLAASTLGGGGGGRDELVSAVVDGRVGVNADMGEVERACRVACWCIQDDEKARPAMATVVQVLEGLVEIGVPPVPRSLQILADLANQSNNLRFFSDLPSK

SEQ ID NO: 43338 - protein, 380 aa, Oryza sativa
MAHDEAVATQKIGKTTSPPKDQPTPCPFPDWSAVQAYYGPGVLPPTYFAPAIASGHAPPPYMWGPQPIMPPPFGTPYAAMYPHGGAYPHPLMPMMANPLSMEPAKSASSKEKGYNKKLKEVDGAAVSTGSGDSKKTMTSSGDYSAEGSSDVNDLKVGKTGRKRRLDDGAGAETSAAAKMENALPPSHILGSTAILPNHSFPAQVIRPSATNVANSRALGTPISPPPGVIVPSHTGVSTELLIKDERELKREKRKQSNRESARRSRLRKQAETEDLATQVESLTAENTSLRSEISRLSESSEKLRLENSALMGKLKDPAASTQAETSLQKTTTASSPRVVENFLSMIDNTNKTSVRHTEHAEPKLRQLLGSGPATDVVAAS

SEQ ID NO: 43339 - protein, 73 aa, Oryza sativa
MDPTPYAHRPPAIRCRLASIAVSIGCRPLPRRRLLSLLDQGRQPPSGVIHCHGRPPPNRAGQHPISNACEPCR

SEQ ID NO: 43340 - protein, 272 aa, Oryza sativa
MLRRYKEDMASLPDHRGLDEFRDVPVEGFGAALLAGYGWSEGKGIGRNNKGDTKVVEYDRRAGTQGLGYNPSEADPKKTRAGEWVVGGNKETQNGNAKKRDRDSRGRTEDRDSSSRQKRSGERRAEREVQEKDRNSRHTKQVKIGGGGGDKMRWLHSDIKVRVVSERLSKKLYLKKGRVLDVVGPTTCDIIMDDQSELVQGVEQDMLETVLPRMNGLVLLLAGEHKGLCGHLVEKNSEEETGVVELSNTKDMIRVKYDQIAEYIGDPESLEY

SEQ ID NO: 43341 - protein, 133 aa, Oryza sativa
MILREGSKLVYHRLPWQEPFAPHLLDVLYEDDDMIALNKPSGLQVLPKGLFQQRTVLAQLQLKDWKMPSSFCSKRKDAQSHPVPVHRLGRGTSGLFLCFCSVHAQKPWSIDTQLSSSGCKFLFTDHQSVKLVV

SEQ ID NO: 43342 - protein, 88 aa, Oryza sativa
MSTFKHGRSNDEAGNNQEVTRMTYKRSSKQVTSATGSQQPSVSEPPEGTRMTYRRSSKQGTSAAGSQQPSVSEPPADRRMIWSKQSRR

SEQ ID NO: 43343 - protein, 401 aa, Oryza sativa
MGKLAAVVRSVLRLTNESMRIVMVTIIGVLLGFFIGISFPSVSITKLHFPSSFVSYIEDRNSGLTTQALLNHAWTSARNARENSSEPSSNTTLKIYVPTNPKGAERLAPAIVVPETDFHLRRLWGEPSEDLPFKPKYLVTFTVGYAQKENINRAVKKFSDNFAILLFHYDGRVSEWDEFEWSKRAIHISARKQTKWWYAKRFLHPDIVAAYEYIFIWDEDLGVEHFNAEEYIKLVKKYHLEISQPGLEPDRGLTWQVTKRRGDREVHKVTEERPGWCSDPHLPPCAAFVEIMAPVFSRDAWRCVWHMIQNDLVHGWGLDFALRKCVEPAHEKIGVVDSQWIVHQVVPSLGNQGKSENGRPAWEGVRARCRKEWGMFQTRMAEAEKAYYKMMGITPPNSTLV

SEQ ID NO: 43344 - protein, 96 aa, Oryza sativa
MRGVRHMLSRSRYRQVGFLHLIFFHAICECWGFLFMEKQCFYFPFISVIAFFKSRVVLYGFYLFCIHCACKFLHENVSKSTSNFECSKLVQVYLEK

SEQ ID NO: 43345 - protein, 879 aa, Oryza sativa
MASKGTEGGHGGVERKEQQQQRGYQLPRDSRGSLEVFNPSSASSFRTAAAAPKSASPFLAIPDREEDNVVAQQRAAEWGLVLQTDHHTGLPQGVSARPSSGSARTSSEDNPQQQQSAAAIPRVSEELRAALSVFQQTFVVSDATHPNHPIMYASAGFFNMTGYTSKEVVGRNCRFLQGSGTDPHEIDKIRQSLANGSNYCGRILNYKKDGTPFWNLLTIAPIKDEDGRLLKFIGMQVEVSKYTEGKKDTVVRPNGLSESLIKYDARQKDHARSSVSELLLALKNPRSLSESSNNTLKRKSQESLSMSMSEVPSKRSSESGSRRNSRSGTRSSLQKINEVPDQVNRTRKSGLRAFMGFLGMGHGSVEKNMLKPRDEDPLIDSDDERPESFEDEFRRKEMRRGIDLATTLERIEKNFVITDPRLPDNPIIFASDSFLQLTEYNREEILGRNCRFLQGPETDRATVRKIRDAIDNQAEVTVQLINYTKSGKKFWNLFHLQPMRDQKGDVQYFIGVQLDGTEHVQDDAAKEGVVLVKKTADNIDEAAKELPDANLRPKDLWANHSKVVLPNPHMKDTASWRAIQKVLESGESIGLKHFRPVKPLGSGDTGSVHLVELLNTGEYFAMKAMDKSIMLNRNKVHRATAERQILDLLDHPFLPTLYASFQTKTHICLITDYCPGGELFVLLDNQPLKVLHEDAVRFYAAEVVVALEYLHCQGIIYRDLKPENILLHRDGHISLTDFDLSCLTSCRPQVFLPEDADEKKGRKNGSYPIFFAEPMRASNSFVGTEEYIAPEIITGAGHTSAVDWWALGILLYEMLYGYTPFRGKTRLPSSPGARPTPRPRSASTAAPPATPPRPRACTSRATPTRIRPNHWVAPMRPCL

SEQ ID NO: 43346 - protein, 54 aa, Oryza sativa
MLLCCVTFAPDSWFRLPIDRFGLGVSDPRLCFDCAGHRVVDRFVSGVVHSGFIL

SEQ ID NO: 43347 - protein, 384 aa, Oryza sativa
MICTNSLVRIECRSLNGLLAFLHNLFPALSEHDAMMYLFHSNANLEQVTFRAMCDHDISCSHEDAYKAAADAAWHPHPDAQAEFAVSTHPMLLPIDKPSLAVSRTLTSNEVELISRYFSQKSYPAKSVPSVPELVPRADELVKRSQQNFMANQYFICRKVKAALKRYAKEKGTEYELHVICGTNFDVPENGRYGYFRNRKGFPYAHVNFLARPKGSQRDNTAPSLFFLECSNGEEDIGTLFSCCAELESPTDSGRCFHCECKGTKIVHPAIGTYRGRETDFEEMSCGKQEIDSKGLIISEKMAIEFVGLCEDDSIYFDPSKDYDFALGLNNLVREDDEALEELHRDIAECERMKVCDMSCEPDLLAEITEDVLQDCQGHLVPQC

SEQ ID NO: 43348 - protein, 479 aa, Oryza sativa
MERTVVLYPGLGVGHLVPMVELAKVFLRHGLAVTVAAVKPPLDSPDFSAAVARFAECNPAINFHVLPPPPPPPAPVGSGSDGKSASPIVGMLGFLNAMNAPLRDFLCSLPSVDALIVDMFCTDALDVASELRLPVYVFFTSAASDLAVFLHLTSMRDSINTSFGELGDSMIHIPGCPPFKASELPSDILSDNEASRLILLMFRRHPESRGILVNTFESLETRALRALEDGLCVPGRATPTVYSIGPIVSGGGGSDKDHDCLRWLDAQPDNSVVFLSFGSLGRFCKKQLEEIAIGLQKSEKRFLWVVRSPRIDEKNVFEPLAEPDLDALLPAGFMEATRGRGLVVKLWAPQVEVLRHRATGAFVTHCGWNSTLEGITAGLPLLCWPLYAEQRLNKVFVVEEMKLGVEMRGYDEEVVVAEEVEAKVRWVMESEGGQALRQRAAAVKDAAAQAIKEGGSSHAAFFKFLEDLPLQVSRGMVSA

SEQ ID NO: 43349 - protein, 760 aa, Oryza sativa
MASAQVSSSSAAAGAASSSSSRKKDLHAGKKLLAEYRKKKNKAAKKAAETADQATAPVPDTLENPPPNATSTNSGDKLVSDVDVNTTSTSSVPPVYENGPTSYSRGDEPLSNGPAPVNVPVSVSNPAPSHDVSSVGGSKIYGNLSFSDLVNGHNEDWRGDAARKREEHSPDKDVTLKSKLSAFGNSDEVSHSSDEVLLSQGRNPVLREVSDTEQSSSYSSGSLFGKLEGTQSQGYSANNDIFGRFRATSKDSSQADGLAYASSREYGSAFNNSWNTSNSTPVCFDKQDPFMSSGYPTTYNRSRPSFLDSIGVQRAPTTEVPYVEPAKASKPFGNSNSESSFFQPPNQQSAGSNDVDGSLKSGRQEYNNEKGSYGNSIRTDSFPSKDERNLHHSTQMFQNFTIPGKDDDFAALEQLIEDLTKEKFALQRTLEKSQELAQTLATDNSALTDKFNQQAQVISNLTSDMERLQNEIQAQLLALESVRTEYANAQLECNAADERAKVLAAEVILLEDKALRLRSSELKLEKEIEGLSSEISSYRRKVSSLEKERQHLQSTVEALQEEKKLLHSKLRNTSVTEKVNIIEKPSADKRDASTATEDLDTGESSSSETLTSAIDTVEDGETSVSRSNNVADFTYLEEVSSSIPHDQLRMIDNINSLMSELAVEREELLRALRIESSNCSKLKELNKDLTQKLEIQTHRLELLSSQRMANENVLPKPIDTRSINDATLYAGEGDEVVERVLGWIMKLFPGGPKRRTSKLL

SEQ ID NO: 43350 - protein, 672 aa, Oryza sativa
MNTKTEASKEGSGNIFGNELDEEFDAEKHNKEATTRTGFPKAALLLVDALKKNRACQKFIRRKMITIEAKIEENKDLRDRVKCLLDYQLSCRKAFGKILCQKEDPRVRLISSRKPCAQSTKNKDKKTPALFLGPADNPHVSKYKMVLKQLPMSLQKQPWSDVEKEKLAKGIKQQYQEALILNSINKGSSTGDFSAVDMAYALTNTAGNFEVTPESLRSVLPLINWDKIAAMYLPGRSGAECESRWLNFDDPLISHNAWTAREEKRLILTVQQQGMNNWINIAVTLGTHRTPFQCLVRYQRSLNHCILNKDWAEEEDLQLQAAVNTFGTNWQLVSASMDGRTGNQCSNRWRKTLNPERSRVGRWSLDEDKRLMVAVKLFGSGSWNKIAQFIPGRTQSQCNERWRNVLDPDIDLGEWRPEEDSILLASVDEFGPCWSKIAGAKIPHRTDNMCLRRWRKLCQDKLPSVKAAQQIKKSILQCNFVDRETERPAIGPSDLMPLVRSKVDGSDENTVSAKVRKPRKRSRIPCEDNVLPGDTSNSSPSMNLPLSESIDAEAAVNTTTANSKKKPSRSRSKKQTDENLAVCDVNNSSNCSSGARKRKRSITDKNQVVQKKMKGSISGDNEAVVETVGTISADNEVATKRKTGSTSVGEEGTTKKTTRGSLSLVKEKSTRE

SEQ ID NO: 43351 - protein, 526 aa, Oryza sativa
MAETSSAAAAAQTDAEREEALDRMLTRLALAEDARLAPLLARVLPYAITSLASATASVRKLVMEILSHINKRVKHRPEISLPMLDLWRIYTESTSSTIVRNFCIVYIEMAFERLLSEDKGSIAPDLLINISNVTEQHQGIILRLVVKAIGECNTHKVGDNVASKYQPISGSNDGLVFADFCFHTVLYQTPPQGVGCPAGLSVAQSDRVTGKQPLKGDTLTSRKLGILNVIEAMQLAPEIVYPLYLAAASDSQESVTKRGEELLKRKASAVNLEDSNLMKKLFTLFNGTASPENIAAELKVAPAHSSLRVRLMGVFCRSIAAANAFPYTLQCIFGCIYGNGTTSRLKQLGMEFTVWVFKHAANDQLKLIGPVILSGILRSLDGSSTTEADSSSRDIKIFAYQAIGLLATRMPNLFSNKTDMAIRLFTALRLEEQSLRLTIQEAATALATAYKGASVVILKDIEALLLENSQMEQSEVRFSAVRWATTLYDMKHCPSRYICMLGASDVKLDIRHGKLCIQPTASVATL

SEQ ID NO: 43352 - protein, 321 aa, Oryza sativa
MKFAKKYEKYMKGMDEELPGVGLKRLKKLLKKCRSDLQSHENDGSSAGRCPGHCSVCDGSFFPSLLNEMSAVIGCFNEKAKKLLELHLASGFKKYTMWFTSKGHKSHGALIQQGKDLVTYAIINAVAMRKILKKYDKIHYSKQGQEFKAQAQSLHIEILQSPWLCELMAFYMNLRRSKKNNGAMELFGDCSLVFDDDKPTISCNLFDSMRVDISLTCSICLDTVFDPVALSCGHIYCYLCSCSAASVTIVDGLKSAERKSKCPLCRQAGVFPNAVHLDELNMLLSYSCPEYWEKRIQMERVERVRLAKEHWESQCRAFLGM

SEQ ID NO: 43353 - protein, 529 aa, Oryza sativa
MAALSSCLLAAVRPHPPPPPRPLSPSFIPSALRHRHRLSQAPPLATSLPRPRPPWCRFSASSPPPPPDDPDDYELLDTTGNCDPLCSVDEVSSQYFEANYKPKNDLLKALTIIATALAGAAAINHSWVAEHQDIAMVLVFALGYAGIIFEESLAFNKSGVGLLMAVCLWVIRSIGAPSTDVAVQELSHTTAEVSEIVFFLLGAMTIVEIVDAHQGFKLVTDNISTRNPRTLLWVIGFVTFFLSSILDNLTSTIVMVSLLRKLVPPSEYRKLLGAVVVISANAGGAWTPIGDVTTTMLWIHGQITTLNTMQGLFLPSVVSLAVPLALMSLTSEANGSSQKSSSLLSSEQMAPRGQLVFAVGLGALVFVPVFKALTGLPPFMGMMLGLATLWILTDAIHYGDSGRQRLKVPQALSRIDTQGVLFFLGILMSVGSLESAGILRQLANYLDANIPNADLIASAIGVASAIIDNVPLVAATMGMCGFHGNGKGGFLLVFPQGKLNFYSNNKWSCGTTYTIQNRMLQNKKLIRCG

SEQ ID NO: 43354 - protein, 534 aa, Oryza sativa
MGNSCQNGTYGNNYQNSNRFQNDRFASRYVDGNDTEDCYSGSSRASLAGALRQGLNLKSPVLGYKTPNVRELYTLGRELGQGQFGKTYLCTEISTGCQYACKTILKSNLRCVSDIEDVRREIQIMHHLSGQKNIVTIKDTYEDEQAVHIVMELCAGGELFSKIQKRGHYSERKAAELIKIIVGIIETCHSHGVMHRDLKPENFLLLDADDEFSVKAIDFGLSVFFRPGQVFREVVGSPYYIAPEVLEKRYGPEADIWTAGVILYVLLTGVPPFWADTQSGIYEKVLDGRIDFKSNRWPRISDSAKDLIKKMLCPYPSERLKAHEVLKHPWICDNGVATNRALDPSVLPRLKQFSAMNRLKKLSLQIIAERLSEEEIVGLREMFKAMDTKNRSVVTFGELKGLKRYSSVFKDTEINDLMEAADDTTSTINWEEFIAAAVSLNKIEREKHLMAAFTYFDKDGSGFITVDKLQKACMERNMEDTFLEEMILEVDQNNDGQIDYAEFVTMMQSNNFGLGWQTVESSLNVALREAPQVY

SEQ ID NO: 43355 - protein, 543 aa, Oryza sativa
MQDVGSEYTRDGSVDINKEPALKHSTGNWRACFLILGVEFCENMTYFVISRNLVTFLTTVLHESKVDAARNVSAWVGACFLTPVVGAFLADTYWGRYWTIVVFLPVYITGMLIVTVSASLPMFLTSSEHGNVHRSVVYLGLYLAALGSGAMKPCTSSFGADQFDSTDLEELPKKASFFSWSFYMTTVSTLLSSTVLVWLQDNVGWGVGCAIPTVFMIISFPVFIAGSRVYRFRNLGFSPLKSLCQVIVAAVRKCHLQLPENKSLLYEPSNSSSTTEASHKIQPTNQFRFLDKAAIVLPPSDETCIKPMSSCSLCTVTQVEELKMLLRMFPTWASFVIFFAVNGQMSSTFIEQGMAMDNHVGSFAIPPASLTIIAVLSVLVLVPVYEIISVPLVKHFTGQDKGFSHAQRIGIGLSLSMIMMVYAALLEMKRLAIVQSSGLADHNVAAPMSILWQTPAYFLQGVSEIFSCIGMSQLAIASGAYFNTFVLGAVAVITTSSGAPGWIPDNLNEGHLDYFFWMMATLSLLNLAMFVYSSTRHRENTAS

SEQ ID NO: 43356 - protein, 280 aa, Oryza sativa
MAGSPPKPWERAGAEGTSGPAPFKPPSGGTTSDVVEASGTAKPGETVTATERNLSANVNNPVSRPMPQRPWQQTSGYGNTYGGYGSNMYSSYGGFGNTYGSGGLYGNSMYSSYGGGYGGSLYGGSGMYGGGMYNSGLGGSYGGYGMGGMGGMGGMGGMGMGPYGNQDPNSFGPPAPPPSVWVSFLRVMHGVVNFFGRVAFLVEQNTQAFYLFITAMLQLFDRSGMLYGELARFVLRMLGIRTKSKKGKVQGPDTPAFEGPAQQFIEAPKGNNSWDNVWGN

SEQ ID NO: 43357 - protein, 295 aa, Oryza sativa
MTEAAEWNDENTKIICELYAEQVRAGNRPSTHLNSIGYSQVALKFQQRTHLLYTKRQLKNKWDKLRNEYTIWKKLLIRGSGLGWDSTKGTIAADENWWNKTNTELPGAKKFRKAGMKNLDHLRVMFDDIASNGVDHTPVPATSSPSTLESPVNVANLDGLDNDMEDNDDTQLEEESPLNRNKKRPRHANNANKNKSSRTEIALLMQAQLKGMADLAEKAQATFENFTSLVGSLGSSIQYVMTLVQECGARSGSDEHFIATELFVSREQREMFLTLSTAEERLEWLRRKYKAKYGA

SEQ ID NO: 43358 - protein, 401 aa, Oryza sativa
MTADGKIAASSGHASWVSGKSSRGRVFELRGRSDAIIVGGNTVRLDDPRLTARHVKGHVPVRIVMSQSLNLPEEANLWNVHDAYTIVATQRGARRDLQKKLALKGVEVVEFDMLNPRDVMSYCYDRGYLSVLWECGGTLAASAISASVIHKVYAFLAPKIIGGVNAPTPVGELGMNQMTQAIDLIDVSYEQIDRDMLMSGFIQPIPDLSPVIPSVDEMPSVDPEVSPYETNIISFYKTWDTFGAFSNFSPHPIHMPDENGDYFTWPTVEHYYQAHKFIGVDDPQAREIVQEIKLAKSPEEAARIGRTRQREFQELVRPDWDSIKIEVMYRATKRKFSTYSHLTDMLLSTAGSVLVEASPHDLFWGGGREGEGMNYLGRLLMQLRSEILGTIQTAVEVGEPA

SEQ ID NO: 43359 - protein, 439 aa, Oryza sativa
MAEHDLTARMAGQMDCHLVFPLLEFLQERALYANKEILEAKLRLLSGTNMVDYAMDIHKSLHDTDEVPDDMVRRRTDVVSRLRALDEATAPIVSFLQNQQLVQELRPDKQYNLHMLQDRFEIGPEQIETLYQFAKFQFDCGNYSDAAVYLYQYRALCTNSERSLSALWGKLAAEILMQNWDVALDELNRLKEIIDSKNFSSPLNQLQNRIWLMHWSIFIFFNHENGRNGIIDLFFQDRYLNAIQTNAPHLLRYLATAVVVNKRRRNMLKELIKVIQQEQHSYKDPITEFLECLYVNYDFDGAQQKLIECEQVILNDPFLGKRIGEGNFVTVPLRDEFLENARLFIFETYCRIHRCIDIGMLSQKLNMSYDEAELWIMNLVRNSKLDAKIDSVSGTLIMTTNHVNIHEQVIESLKNLNMRTFLLAKNIVEPAQAAQQAAR

SEQ ID NO: 43360 - protein, 363 aa, Oryza sativa
MATGESQQASRREGRERDEHDASRRERERDHTHGRRPHSSSRSRRDDPSPRRRREDRRHHESDRSHRHRSRAEESAKAVDRDQKRDRPLQDAAQPDDPLRAETKPLDDARNGSPARHERSPRGTKRFPESRDARRPRSFFQHDERGSAGQGGRCYYRQASDRGRQRDEKEHVGDREKNKDEGKAMQDEQQNDGESTWKHDGFFQLEEEAHPAKRRPPFNEMGMPLEGKESVLSVTEPDSRSHKHDQAGPTSAIGEERRNYHPRGFDRHEGPFVRPDGQGMRRGFSDHRNAGQRNGYDSWGRFAGRGRGRYRFNNSYDGRNSMHQAAGDQAEKWKHDLYEQTNRSPTPKTEEEQIAKIEALLAL

SEQ ID NO: 43361 - protein, 33 aa, Oryza sativa
MDFHLHHHSRVARFDNIFKHGLWIYSSVSLIYI

SEQ ID NO: 43362 - protein, 793 aa, Oryza sativa
METRTNEYSRKGAMWELERNLDQPMDAEAGRLRNMYREKTYPTILLLRLAFQSLGVVFGDLGTSPLYVFYNIFPHGIEDTEQVIGALSLIIYSLTLIPLVKYVFIVLRANDNGQGGTFALYSLLCRHAKINIIPNQHRTDQDLTTYSRRTYEEKSLAAKIQRWLEGHQFRKNLILILVLFGTCMAVGDGILTPAISVLSATGGIQVEEGRMRNDVVVIISVLILIGLFSMQHYGTDKVSWLFAPIVFVWFILIGILGAVNICKYDHSVLKAFNPVYVYRYFKRGKTSWTSLGGIMLSITGTEALFADLSYFPVQAIQIAFTVVVFPCLLLQYTGQAAFIAANTNQVSHAFYISLPAPILWPAFAVATAAAIVASQATISATYSIIKQALALGCFPRVKIIHTSKKYLGQIYSPDINWILMVFCIAVTAGFKNQSQIANAYGTAVIMVMLVTTFLMIPIMLLVWRSHWTLVVAFTVLSLLVEIPYFSAVVRKIDQGGWVPLVFAAGFMIIMYVWHYGTLKRYEFEMHSKVSMAWILGLGPSLGLVRVPGIGLVYTELASGVPHIFSHFITNLPAIHSTLVFVCVKYLPVYTVPPDERFLVKRIGPKNFHMFRCVARYGYKDIHKKDDDFEKMLFDSLILFVRLESMMEEYSDSDEYSTLMMSLPNNPGISNGGVTTTGTNNVMEVMSCTSTHDSIVPVNSRSDDTGSSQVMPASGQMAFQSVGDEIAFLNACRDAGVVHILGNTVIRARRDSGFVKKIVINYMYAFLRKICRENSAIFNVPHESMLNVGQVFYV

SEQ ID NO: 43363 - protein, 202 aa, Oryza sativa
MGRSFRDSLKVLEADIQHANSLAAEFRREYDGACLQMRMSYCPAAHFFLFLVQWTDCNLAGALGLLRILIYKVYADGTTTMSAHERKASIREFYAVIFPSLMQLHEGINEVEDKKQKAICIGRYRRRDEDQKMVISEIDDNIEEECGICMEINGKVVLPTCSHAMCIKCYRDWYTSSLFSLWRLYCIRGFSSENIFYVSLAV

SEQ ID NO: 43364 - protein, 682 aa, Oryza sativa
MSMSIALHAVLPPAAATPRRRPTRLRASSTEAPASGEKGQEDTDRKSGTGMRRRRRRAKKVQEVGLEALYDDGFGEATVRDYFDALRATPLDGGGGGGPPAVHAPPLLLFLPGIDGVGMELIMQHKSLGKVFEVRCLHIPVNDRTPYEGLLQIMEESVKYEHNLSPNRPIYIIGDSFGGCLALSLASRNPEIDLVLILVNPATSFAKTPLQAILPLLEMVPSNLPVTLPHLLRYLIGDPLKMAMVSIQNNTSPQDTLESFSDSLSSMLPLLSEFGHIVRMDTLVWKLKLLMSGVDYTNSRLNAVQAEILLLASGNDNLPPSGEADRLFKALKSCKVRYFRTSSDRLLMESSFNLLTVIKGASMYRQGKQRDTITDFLPPTISEFKRTFGEDFKLLHHLLSPVMLSTLRNGKIVRGLAGVPDKGPVLLVGYHQLLAMEITSMAEEFLREKKAVLRTLAHPVFFVGNYEILRQELSFFDVVPLYGGVQVSPINTYRLFERDEFVLLYPGGIREALHRKDEDYQLFWPDQPEFVRMAAQFGVTVIPFGCVGEDDMLEIVLDYNELKNIPYIRETIESFNQDCPGVRSTVKGEEGNQVLHLPAVLPKLPGRLYYLFGKPIEMKGMDGVQRDRESANQLYLDIKSEVENIMSYLKRKREQDPYRSITARTFYQATWGVTAQIPTFEP

SEQ ID NO: 43365 - protein, 293 aa, Oryza sativa
MGRGWSTYRLHSTKTIGRAVASRVAEEVGVRLGEEVGYTIRFEDQTNPGMTMIKFLTDGVLIREMMEDPLLTKYSVIMVDEAHERSISTDMLLGLLKKIQRRRPDLRLIISSATIEARSMSTFFNIRRKNSMLESADHLPNPEPAILSVEGKGYTVEIHYVEEPVSDYLQAAVNTVLIIHEKEPPGDILVFLTGQDDIDAAVKMLNEEIQHRGRHYLDLLILPLYSGLPRGDQDLIFTPTSKGKRKVVISTNIAETSLTLEGVVYVVDSGFSKQKCYNPVLSIYTQLYGPLFF

SEQ ID NO: 43366 - protein, 859 aa, Oryza sativa
MPAARRSGGRLTEEVNMMVALSGRKRRLQAATMVALCFLSSICVSTAQFKPADNYLVDCGSSKSTTLGTRTFAADGAAPVKVDTSLEILAGTSANGVASFDNSALYQTARIFTSPSSYTFPIQKQGRHFVRLYFFAFAYQSYDLSTAKFTVSTQEMLLLSDFQQPDKTAPLFKEYSLNITQDKLIISFKPSNGIAFINAIEVVSVPDDLIGDSVPMVNPMQQYSGLSTQPLETVYRVNMGGPKVTADNDTLSRTWVTDKKYLVNPSVTREVNGGKVNYMKGGGSTPLIAPDIVYSTATELAASNTTNALFNMTWQFDVDSGFSYLIRFHFCDIVSKALNQLYFNAYVGSFYAQHDIDLSIQSMNQLATAIYLDVVLSSNDASNKLSISIGPSTLNNALPDGILNGLEVMKMSSGSGSAFTVGSSGSNKNLGVIIGSVLGAVGILIIVLVIVLLCRKKKTLEKQHSKTWMPFSINGLTSLSTGSRTSYGTTLTSGLNGSYGYRFAFSVLQEATNNFDENWVIGVGGFGKVYKGVLRDDTKVAVKRGNPKSQQGLNEFRTEIELLSRLRHRHLVSLIGYCDERNEMILVYEYMEKGTLKSHLYGSDNPSLNWKQRLEICIGAARGLHYLHTGSAKAIIHRGVKSANILLDENLLAKVADFGLSKTGPELDQTHVSTAVKGSFGYLDPEYFRRQQLTEKSDVYSFGVVLLEVLCARPVIDPTLPREMVNLAEWGMKWQKRGELHQIVDQRVSGSIRPDSLRKFGETVEKCLADYGVERPSMGDVLWNLEYVLQLQDADSSTVSDVNSMNRIVELPSQVQNIGALESISVTMAEAGASHEPDHDLSDVSMSRVFSQLIKAEGR

SEQ ID NO: 43367 - protein, 73 aa, Oryza sativa
MKMLMLFRCFDFYSIDRKFCNGTNLNTLYQYHWSMRLSTGNSPIEQSRQTIIYCAYGQLAIGKNCCCTSVVFA

SEQ ID NO: 43368 - protein, 668 aa, Oryza sativa
MHPTLLCLPLLASLLLLCHRARAECEPATCGNLTVRYPFWLGGPNFNQSNQSSPSSALASCGHPAFEVWCNGGVASLRGSQILVLSIDYNSSSFVAAHKRVADGGDGVCRTDFNISSSLALSPFTISSSNRAICFLYSCNGTEPPEIDGLVNATISSCSKPIYAYLGGIYDRDNPPAIKAGNCTYSYLPVLWPDSPANLTAGTNYSPQFKKGFVLEWQKNGFGDCDACNGSGGQCRYINDSAAAFACLCSDGKLRRSTCPGSRSKSHIIGIACGSSGGILLIVSIFIFAWHKRKKRKQTRDLKDLMHSSSSMQSYSKDLELGGSPHIFTYEELEEATAGFSASRELGDGGFGTVYKGKLRDGRVVAVKRLYKNNYRRVEQFLNEVDILSRLLHQNLVILYGCTSRSSRDLLLVYEYIPNGTVADHLHGPRAGERGLTWPVRMTIAIETAEALAYLHAVEIIHRDVKTNNILLDNNFHVKVADFGLSRLFPLEVTHVSTVPQGTPGYVDPVYHQCYKLTDKSDVYSFGVVLIELISSKPAVDMSRSHSDINLANMALNRIQNHEVDQLVDPEIGYETDSETKRMVDLVAELAFQCLQMDRESRPPIKEVVEVLNCIKNGECPAEKMNKNASPKEDSHLLKDSLQYSPDSVIHRFHSQSTNHSVASNSSG

SEQ ID NO: 43369 - protein, 490 aa, Oryza sativa
MTKTATPASVSSRFIPRYQVGSSKVDTSERYFDEWQKKLPNTDEIRKSKPRSRYFTISGVELSPDNMAVATVYFVQGVLGLARLAVSFYLKDDLHLDPAETAVISGFSSLPWLIKPLYGFISDSIPLFGYRRRSYLILSGFLGAISWGLMATLVDSKYSAAFSILLGSLSVAFSDVVVDSMVVERARGESQSTSGSLQSLCWGSSAFGGIVSAYFSGSLVDTYGVRFVFGVTAFLPLMTSAVAVLVNEHRLSSGERAMSHSGSGFIETSKQHIRQLWTSVKQPNIFLPTLFIFLWQATPKSDSAMFFFITNKLGFTPEFLGRVKLVTSIASLLGVGLYNYFLKAVPLRKIFLATTIIGSALGMTQVLLVTGLNRQFGISDEWFSIGDSLIITVLSQASFMPVLVLAAKLCPPGMEATLFATLMSISNAGSVSGGLVGAGLTQFFGVTKDSFKNLALLIVICNLSALLPLPLLGLLPEESGNADDEETKHN

SEQ ID NO: 43370 - protein, 65 aa, Oryza sativa
MLRISARRRNEVFCFGFEFVAVSVIQIFSITEGMEVHESSRTENCIGGSYFVLHDYTLRFLYPQI

SEQ ID NO: 43371 - protein, 379 aa, Oryza sativa
MQHCDPPQRKYPLERGTPPPWWPSGNEDWWIALGLPRGQIPPYKKPHDLKKVWKVGVLTGVIKHMSPNFDKIRNHVRKSKCLQDKMTAKESLIWLGVLQREERLVLSIDNGMSEVTHHGALEYRNGDTHSSSNEYDVDGFEEAPLSTSSGDDEQDLSPAAQLSEEHAPTRRERAKVKRPNQVVPKKAGTKEPPKRKRPRHSVTVIEQEVQRADDASEHSRNMIPDMNRLDQVEIQGMANQITSFNEEANTSEALQHRGNTQELAHLPADFNHYGNAQATIATPVSICMRGQAVPYESSDNSRPKTGNIFPQDSDSGFNNMPSSYQTIPPKQPLPLSIMEHHVVPLGIRTPADNSPYSDQIIGSGNSTSVPGDMQLIDYL

SEQ ID NO: 43372 - protein, 730 aa, Oryza sativa
MGESRGSIAFFASYRPPVALDIFCCPAPPSSPKDELHLTDGDSYNYNCQPIPPAALKTVVERLGVSRGDAVEGDIDSGRITGLVFVSEREHNLETLHIALRFNDDGEVQVFSLADAYGGDGLFSGARMEDSGCIAGGYEVDGRTVDHYLVYVSTKEQVRERRSPWNVAYKTNLRTGETERLTPPGTFDISPSVSPSGKKVAVASYQGKKWDGEIKNLNTNIYVMSLENPSQDRERVIENGGWPSWGSEDVIFFHRKDGDGENSCWGVFRHTLSTGETVRVTPAAFDSVTPAAIDETRVAVAAIRQKSEFSDVRVEAQYRHIEVFDMRSPEQPMQITRNTRPKADHFNPFVMDGGKFIGYHRCKSELLQHGDDLPRKFHKLQSPHEDVGVFRVSGVFPTFSKDGSQLAFVDNEFKSVWLADSQGMRVVFKTDGPDSVFSPLWNSKKDILYVCMGPSFKASETLEIHSIHNVSTGDRKSRQLTFGGFNNAFPSTNPDGTKFVFRSTRDGGAKYSKNLYIMEDADAGEGEDGSQSTVTRMTAGEWTDTHCQWSPNGKWIVFSSNRDRPADAPERDHGLDPGYFAVYLMDVASRSVVRVIRSGYDVAGHVNHPVFSPDGRSIAVTSDLAAVTADPMSLPLFLHSVRPYGDIFTVDIDPDDMARNEDVEGFVRVTHSRYENSTPAWTVFSTHDPHAQWNLLVVEDEHVPSCPYAHPDGGESWHMTGQICIPKRHC

SEQ ID NO: 43373 - protein, 413 aa, Oryza sativa; identical to SEQ ID NO: 32522

SEQ ID NO: 43374 - protein, 312 aa, Oryza sativa
MKFMKLGSKPDAFQSDGADVRYVISDLATDVIVHVSEVKFYLHKFPLLSKSSKLQRLVIKATEEGTDEVHIDGFPGGVTAFEICAKFCYGMVVTLSPHNVVAARCAAEYLEMTEDVDKGNLIFKIDVFINSSILRSWKDSIIVLQSTKALLPWSEELKVIGRCIDAIASKTSVDPANVTWSYSHSRKGMSCTEIVESTGRTSIAPKDWWVEDLCELDVDLYKRVMVAVKSKGRMSPELIGEALKAYAVRWLPDSYDALVAEDYMRRNQCLVETIIWLLPSDKTSGCSCRFLLKLLKVAILVGAGQHVKEELM

SEQ ID NO: 43375 - protein, 366 aa, Oryza sativa; identical to SEQ ID NO: 28611

SEQ ID NO: 43376 - protein, 405 aa, Oryza sativa
MGEPPPAGEGSGMMMPAKRRRERVLPSRFKDSVLVLPTAAAKKGEPAEAAAEGGVVDGELYDVELEEGDPGMLWTGDERPVQTEEELYWACRNIRRSSTSTSGSFSSSIFSGSSAVTSLSNAGGGGGNGRPEGKPTVVVECKPKSDGGERKEDFYWPEEFVLGDVVWARSGKKCPAWPALVIDPLLHAPRVVLNSCIPGALCVMFFGYSNSGLRDYGWVKQGLIFPFVEYLDRFKGQTLYKIKASRFREAIEEAFLAERGLFELETDEGCSLEKSVNDQSIPDGLLEGSGSNNEQECQSEAQVVGKSPGCDICGNRLPCKIASKKKQAGERLLCRHCDKLLQSKQYCGICKKIWHHTDGGNWVCCDECQIWVHVECDQTCIKMEDLENADYFCPDCKSKRKNISS

SEQ ID NO: 43377 - protein, 301 aa, Oryza sativa
MATLCHSAHTRTFGKIGRRNAAKVLCSTQMPPSQSTIKVVIIGATKEIGRTAIAAVSKARGMELAGAIDSQCIGLDAGEISGMEEALEIPVLNDLTMVLGSIAQTRATGVVVDFSEPSTVYDNVKQAAAFGLNSVVYVPKIELDTVTELSAFCEKASMGCLVTPTLSIGSVLLQQAAIQASFHYNNVEIVESRPNPSDLPSQDAIQIANNITDLGQIYNREDMDSDNPARGQILGEDGVRVHSMVLPGLASSTSIHFSGPGEIYTLRHDVTNVQCLMPGLILAIRKVIRLKNLIYGLEKFL

SEQ ID NO: 43378 - protein, 720 aa, Oryza sativa
MAEEEEVEEGRSSSSAILDLPEPLLLHILSFLTDVRSRHRAALACGRMRAAERATRSELSLRGDPRSPGFLFLSHAFRFPALEHLDLSLVSPWGHPLLSSVPPCGGGGGGAPSASSSSGMNVYHPEAISEQNAFIAARLAGCFPAVTSLAVYCRDPTTLANLTPHWQASLRRVKLVRWHQRPPTLPDGADLEPLLETCAALRELDLSEFYCWTEDVVRALTTHPSATAALTHLDLGLAAATDGFKSSELGPIAASCPNLRKLVAPCLFNPRFSDCVGDDALLSLATSCPRLTVLRLSEPFEAAANIQREEAAITVAGLVAFFAALPALEDFTMDLQHNVLEAAPAMEALARRCPRIKFLTLGSFQGLCKASWLHLDGVAVCGGLESLYMKNCQDLTDASLAAIGRGCRRLAKFGIHGCDLVTSAGIRRLAFTLRPTLKEVTVLHCRLLHTAECLTALSPIRDRIESLEINCVWNTTEQPCSVANGTTTECDPEDDELGEVYESAAKKCRYMEFDDLGSWEILRSLSLWFSAGQLLSPLISAGLDSCPVLEEISIKVEGDCRTCPRPAPRTIFGLSDLAGFPVLAKMKLDLSEAVGYALTAPTGQMDLSLWERFYLHGIESLQTLYELDYWPPQDKDVHHRSLTLPAVGLIQRCVGLRKLFIHGTTHEHFMTFFLSIPNLRDMQLREDYYPAPENDLMFTEMRAESWLRFEVQLNSRQIDD

SEQ ID NO: 43379 - protein, 396 aa, Oryza sativa
MELRKKEAAVAAAAAVAEMERGSKGLAALGLESKPISSLRRDVSAGTDMEKLSLIQVASLIESSAKKGITELSLRGKLVDQIEWLPVSLGKLQDVTELDLSENRIMALPSTIGSLRYLTKLDLHSNQLINLPDAFGELSNLIDLDLHANQLKSLPSSFGNLTSLANLDLSSNMLKALPDCLGKLANLRRLIVETNELEELPYTIGSCTSLVELRLDFNQLKALPEAIGKLEKLEILTLHYNRIKGLPTTVGSLSRLRELDVSFNEVEVIPENICFATSLVKLNLSRNFADLRALPKSIGNLEMLEELDISSNQIRVLPDSFRCLSRLRVFHADETPLEFPPREVVKLGAQAVVKYMNDLNAARGTNQKKTDRGSFWTWLFSLFGCCKKNQEVGLPV

SEQ ID NO: 43380 - protein, 667 aa, Oryza sativa
MASNAIPALNVVSETYATNHGLNQVNANHFGALKHQGDHTQSLLASDVDSQSDQFISSSVKSPMDGNTSIPNEVPARQNSLGLWKYLDDDSPGLGDNPSSVPQSFCPVTNERLLEINEISPEWAYSTETTKVVVIGNFYEQYKHLAGSAMFGVFGEQCVAGDIVQTGVYRFMVGPHTPGKVDFYLTLDGKTPISEICSFTYHVMHGSSLEARLPPSEDDYKRTNLKMQMRLARLLFATNKKKIAPKLLVEGTKVANLMSALPEKEWMDLWNILSDPEGTYVPVTESLLELVLRNRLQEWLVEMVMEGHKSTGRDDLGQGAIHLCSFLGYTWAIRLFSLSGFSLDFRDSSGWTALHWAAYHGRERMVATLLSAGANPSLVTDPTPESPAGLTAADLAARQGYDGLAAYLAEKGLTAHFEAMSLSKDTEQSPSKTRLTKLQSEKFEHLSEQELCLKESLAAYRNAADAASNIQAALRERTLKLQTKAIQLANPEIEASEIVAAMKIQHAFRNYNRKKAMRAAARIQSHFRTWKMRRNFINMRRQVIRIQAAYRGHQVRRQYRKVIWSVGIVEKAILRWRKKRKGLRGIASGMPVVMTVDAEAEPASTAEEDFFQAGRQQAEDRFNRSVVRVQALFRSYKAQQEYRRMKIAHEEAKIEFSEGQLGAACRS

SEQ ID NO: 43381 - protein, 524 aa, Oryza sativa
MASRDLAESLLPVGGGAATATATATAHDEYDERAYDSDDKVSIAVSDSDSEDGGGGGGDAMRPAFSWRKLWRFTGPGFLMCIAFLDPGNLEGDLQAGAAAGYQLLWLLLWATVMGALVQLLSARLGVATGKHLAELCREEYPPWATRALWAMTELALVGADIQEVIGSAIAIKILSAGTVPLWGGVVITAFDCFIFLFLENYGVRKLEAFFGVLIAVMAVSFAIMFGETKPSGKELLIGLVVPKLSSRTIKQAVGIVGCIIMPHNVFLHSALVQSRKIDTNKKSRVQEAVFYYNIESILALIVSFFINICVTTVFAKGFYGSEQADGIGLENAGQYLQQKYGTAFFPILYIWAIGLLASGQSSTITGTYAGQFVMGGFLNLRLKKWLRAMITRSFAIIPTMIVALFFDTEDPTMDILNEALNVLQSIQIPFALIPLITLVSKEQVMGSFVVGPITKVISWIVTVFLMLINGYLILSFYATEVRGALVRSSLCVVLAVYLAFIVYLIMRNTSLYSRLRSAMTKST

SEQ ID NO: 43382 - protein, 107 aa, Oryza sativa
MAELTTAADVTAAPPPPPGPTPPPEPVVTATVVAEQKVSPTAPPLDVPAPAPPPPKKRKVEEAGFHNSAYYKIRATVADLRVRFVQCLCVGDGVLISVNLGFWGKKI

SEQ ID NO: 43383 - protein, 288 aa, Oryza sativa
MAGSFITGALMLILGYAYPAYDCYKTVELNKPEIEKLRFWCQYWILLAVLTVFDRVGDNFVSWLPMYSEAKLAFVVFLWYPKTLGTAYVYESFFKPWIAKYEADIDHNLLELRTRACDMAVLYFQKVSNYGQTRLYEILQYVASQSQTQTSRPQAREQQQRPPPAQTRQVNPAPQPVPAPSVPPLPPQPTQAPSAPPRNQTQDTTPVPVPPPGAESLAQPQAHAGPPQANASDGPQNTEAMQIDPSGPSTSNARQSSIPDEDTLIQEAIRMTRGRLRRRTAGSGPPPS

SEQ ID NO: 43384 - protein, 894 aa, Oryza sativa
MTASVVSSVLQRLGDLVIQEATFLSDVPRQVSSMKAELSQMQCFLNVVDAKCLEGNSMMKNLASNIQDVAYRVEEVIDNAHFIFRRRKTSVSKYTHIFGDSIDLREVGKNIQVIRKEISEIFERYNRYNAVNSSTSTEAQPIFREDEDFYAQRLVPPGLDQGMDIVGFDHEIAQIKSYLLDQNNMNLTVISIVGQAGAGKSTLAKLAYSSVITEGYFHKYGWVSISPKYSALEVLRDLVRQIRGTGKISERKSMHLNFYGETEVSKLIFDFLKEERYLIVLDDIWTTDTWDKIKSVFPDKGNGSRIILTTRDMEVGQHPKTKVQIHTPDLLDEDKSWELFQKKAFPHDVQFTELEVVGKKLSKKCNGLPLALVVLGCFLSRNHNIHTWEKMVASVDWEIMKKEGDVGRILALSYHNMSNNLKACFLYTASFPEDYPITVHVLKKMWIAEGFVPNIRGYTQEEVAYRYVEELAQRCMIQIEERSKNIGWIKKIKVHDVLREWGIGQARKEGFLKVCSSGTDVETYYADEQRCYRVAFHGYFDNEVGKSVLNLRSVLAFNPDGKRLFSFNGLHLLRVLHFCSSLKTCTLPEEINKLVHLRYLGLEGSTVFMFPSYMKGLRNLQILEASTATVKALPSSLWSIAALKHVHVYQVLHWKAQEIRTKRSLQTLYVFSIMQCDALTWKRTIRSLQKMSQHVSWCLGIASTKRVKEKETQEHEEYNLDIRVDALESKVDGLELSGCFKERHVLNDVLPHHNLFPNFLLQLKISCPNILNDDPMPILERLPRLEVLEIVNSSYTGKRITCSSEGFLALRSLVLMDIGLEEWNLQQGSMAFLAVLTLKCTMLRSISNVLHQLDDLVELRLICMPQLSVDDHEPARGRGCRVMISVDEEQTSDT

SEQ ID NO: 43385 - protein, 554 aa, Oryza sativa
MQIRLSPSMRSITISSSGIGIGGGNGGGGGGGGGVGSGLLDLMKLKAAARHFSYRTVFHTVLILAFLLPFVFILTALVTLEGFNKCSSLDCLGRRLGPRLLGRGNDGSMRVMRDLYRMLDEINSEEVPVDLKVPDSFDEFIWDMKNNDYDLRSFAFRLKATMESMDRELRTSRLSEQLNKHYAAIAIPKGLHCLSLRLTDEYSSNALARKQLPPPELIPRLSDNSYLHFVLASDNILAASVVVSSTIRSSLKPGRIVFHVITDKKTYPAMHSWFALNTLSPAIVEVKGVHQFDWLTRENVPVLEAIETQHTVRSRFHGNHLARNSAGDSPRVFAAKLQAGSPTYTSVLNHIRIYLPELFPNLNKVVFLDDDVVVQRDLSSLWDIDLGGKVNGAVETCRGGDTWVMSKRFRNYFNFSHPLIANNFDPSECAWAYGMNIFDLSAWRKTSIKDKYHHWVRENLSSNFTLWRLGTLPPGLIAFRGHVHPIDPSWHLLGLGYQEKTDIPSVQKAAVIHYNGQSKPWLDIGFKHLQPFWTRHVNYSNEFIRNCHIMEPQL

SEQ ID NO: 43386 - protein, 681 aa, Oryza sativa
MARHPRPPTPSPPRASSDTDAAFDPVVEWLLDLDQAPMADEVAKGLGIAEEPASFDAGKVSGGSVSESRGVEEKGNALPEQSGASFDGELDVEMEPKTGSGGLVPQLVQDQHPASDIGDLAVREDGSEIMVDVERSTVPVDADMNNVSLALVKEEAEGGGDREDKSDEEESESSKEESSEASSSSDEEEDKRESSEASSSSDEEEQMAKKTGGAGDTDSLFEEGELMLASDDDDEEAPKGPIKSKHEVEVLPPVPKIDVQLEPHHQTLPVGTISAIMGERVIVEGSVQHNPLNEGSILWITESRIPLGIVDELFGPVKNPYYLVRYNSAEEVPADISAGTAVSFVAEFADHILNMKELYAKGYDGSGENDEDQTDPEFSDDEKEAEYKRSLRLAKRQTDRQHEGKKTSGDKKRAQPRGSGFRKDMPPRSHDGPAPGRQSQPHFHRPDKAPVVDAIRPLGSQDGPMSAPTKLPPGPVHPVMPAANQLTNQMGGRFMNPSQQFLPQQPNVVWPGGLTPTPHPNMGIEGAAFAANIMQNLLIGANQYQQQFQNHNFGGFLNQMPVPPPQFMSQGGMPSNPMAFGGPTMAQMNPPFGPPQLPMDQGNFGQAPHMAGHTVQQGPPAGFPNGQGFGQSASPQGDGEQPPMQFSSGQFNQGNSSFHGRRQQQRGGRHSSGRGGGRHRR

SEQ ID NO: 43387 - protein, 65 aa, Oryza sativa
MTLFFDMTLLILPIVSLTPLFAFSRARSINLSKLNATSPLLVAWSHVLFQLADCPKSRHHTSTML

SEQ ID NO: 43388 - protein, 807 aa, Oryza sativa
MVVGGKFHASKLRPEQVSTYRKYEREQVEKNLDEYLEQCTKMKVKCEKIVIENEDIANGITELILLHGVSKLVMGAAADKQYSRKMKLPKSKTALSVTVKANPSCKIWFVCKEHLIYTRDFVAPISPNSQSPDTIRGSISNLAARGGTTNQYANNAVNGYVQRSMSEMVVPASSRVSLQLHSRSSLQESLSRLNMEGTSVDSWDSFRRGSFPSSYRASSTVTEEVLSDSSSSGIPRDGISTLAGCDFPNSALHHEQGDAGSNANLFDKLEEAFAEAEKYRKQAYDESLRRQKTEEELISYHQKARKSEDLFLNEAKQRKEVEETLAKANVEIQLLKEEMDALKHNRDDLSSKLSDVSEQKVTLEQQAVEYGSIIIDLKDTVAASQALIDSMQMEFEQLKHERDNALKHAEELHREKQNMVSSSDLEWSTEFSLLELQQATQNFSDAMKIGEGGFGCVYRGQLRNTTVAIKMLRSQNLQGQSQFQQEVAVLSRVRHPNLVTLVGYCSEASGLVYEFLPNGSLEDHLACESNTSPLTWQIRTRIIGEICSALIFLHSDKPHAVIHGDLKPANILLDANLVSKLGDFGISRLLNRSSTVSTSFYQTTNPRGTFAYMDPEFLTTGELTARSDIYSFGIIILRLVTGKPALGIAREVEVALDKGELELLVDRSAGDWPFVQAEKLMLLGLQCAELSRRKRPDRMNHVWSVVEPLVKSASLPVEPESIGHWVNKNRTPFYFICPISQEVMRDPHIAADGFSYEEEAIKGWLGSGHNTSPMTKSTLEHLQLIPNLALRSAIEEFMQQKQQQIPS

SEQ ID NO: 43389 - protein, 70 aa, Oryza sativa
MPSLHQSGPSESEKKAFQKTRSSDWTVTMRANSGLIFAVMILIMCGASAASSDNDELVAPFDTSNGLRTL

SEQ ID NO: 43390 - protein, 140 aa, Oryza sativa
MDEGVIAGGTAGVVVETALYPIDTIKTRLQAARGGSQIQWKGLYSGLAGNIAGVLPASAVFVGIYEPTKRKLLETFPENLSAVAHFTAGAIGGIAASLIRVPTEVVKQRMQTGQFRSAPDAVRLIVGKEGFRGLYAVCIF

SEQ ID NO: 43391 - protein, 248 aa, Oryza sativa
MVWNRTGVHFAQRDVNWPLGWPVGGYPGPQGPYYCAVGSDKSFGRDISDAHYKACLYAGINISGTNGEVMPGQWEYQVGPSVGIEAGDHIWISRYILERITEQAGVVLTLDPKPIQGDWNGAGCHTNYSTKSMREDGGFEVIKKAILNLSLRHDLHISAYGEGNERRLTGLHETASIDNFSWGVANRGCSIRVGRDTEAKGKGYLEDRRPASNMDPYVVTALLAETTILWEPTLEAEVLAAKKLALKV

SEQ ID NO: 43392 - protein, 167 aa, Oryza sativa
MASNNVKEKLRKLLMLSLGKLARISILTESSKEIESADRATEKLEMFKSQLKQKDVCLAENGNGGSLNTILLEKRSRWSITKSWTPCAIGMVPCSFSSTAVLPTLDVIDHELKDDTLEQHVNFELDDHTERAGYHSHPEKQLDVECIPAISEREISDMSEVTFPLKV

SEQ ID NO: 43393 - protein, 1245 aa, Oryza sativa
MAVAAAQDLPPTFHPNPSPLPSSMEPRLRQLRRVPLLDFVARIADLHADQASPVRKLVAEMIGEVGSKHMAYLPNVMPCLLHLLNDDTPAVARQAIKTGTTLFAKVLRQLVIQGLFSSGGIDDSLKLSWEALLKLKSAVSHMAFQPMSNEGARLLAIKFVEKTVLLYTPDLDTPPDPPIEVTEDMGFNVAWLRGGHPLLNVGDLAMEASQNLGLLLEQLKPPKVKSLSTSMIIVFVTSLSAIAQRRPSFYGRILPVLLSLDPASSIIKVQVPGAFHALKSAFAACLKCTHSSAEPWRARLLEAQNIINQADSIEHSSNRVESLPLETTSTDNSNKRNLIDDIDNAPEDGDRSNKRIRQSHHDQEHTENVKNNVELTSADTPSSPSNSASTGNSEAVYQLVSMFAALAAQGDRAAGSLQILSSSIAADLLAEVVMVNMQHLPVSHPEVDQQQSPSAGQPSGAPSSSLLSACFPLLESLLKRINQSDREVDEAPQTIDSAVVPSAAGETAAIPAIPGPTSRNVPMEENSNSSSIPSDMETIEAKEPTADAARLSIEIQESSEASHASTELQGTQEHGGSFISSLPADNSSAGLSLAQSSETRSPSSSMVEASQTQFSYSSTLTSQHVLPKLVVTNIDLSDEAKDLLQKEAFLRILDCDKQDASGGSIARLPLLAHLGVEFPLELDPWELLQKHVLSDYVNNEGHELTLCILNRLYREAEQDQDFLSSRTATSVYESFLLTVAENLRDMFPASDKSLGKLLCEIPYLPEGVLKLLEGLCSPGSNEKQDKDLQSGDRVTQGLSAVWNLIMLRPSNRDRCLEIALQSSIHHLDEVRMKAIRLVANKLFPMASISKRIEDFANEKLNSVLEVVPADESAASEMSTPEAPKDGGSENLSSSVADSQTLMSLYFALCTKKHSLLRHVFAIYGSLPQAAKQAVHRQVPILIRTIGSSPSLLGIISDPPADSRDLLMQVLQTLTDGAMPSQDLISSVKNLYSKTKDIEVLFAVLAHLPKDEVLPVFPSIVNLPLDKFQVALSRILQGSPQNGPSLDPSEILIAIHVIDPEKEGIPLKKVIDACAACFEQRTIFTQQVLAKALNQLVEQIPLPLLFMRTVMQAIGAFPALVDFVMDIMSRLVSKQIWKYPKLWVGFLKCAILTKPQSYGVLLQLPAPQLENALNKNPVLKAPLVEHANQPNVRSTLPRSTLVVLGLAEDQQQPAPQAQSSQNQAAETSSSAADTTTEVTQESSAVS

SEQ ID NO: 43394 - protein, 525 aa, Oryza sativa
MGSSDLSSEMRRTVLGLTLWVWIAIGVVALLVAILLMVCIWMASRRKTKRTMDNLRQTQIPIFSKEIPVDRVGGRSLAQTMHEREQPSFPPQDKHTNREPGKTLGHMALSKSSEPDNMSQGSSVCNVDRAGSVHSGEDGSTGHGRKPYSPAAFVSASPLVGLPEFSHLGWGHWFTLRDLELATNRFSRENVLGEGGYGVEYRGRLVNGTEVAIKKIFNNMGQAEKEFRVEVEAIGHVRHKNLVRLLGYCVEGVNRMLVYEFVNNGNLEQWLHGAMRQHGVFSWENRMKVVIGTAKALAYLHEAIEPKVVHRDIKSSNILIDEEFNGKVSDFGLAKPLGSDKSHITTRVMGTFGYVAPEYANTGMLNEKSDVYSFGVLLLETVTGREPVDYSRSGNEVNLVEWLKIMVANRRAEEVVDPILEVRPTVRAIKRALLVALRCVDPDSEKRPKMGQVVRMLESEEVPYREDRRNRRSRTGSMDIESIAEGSNSTEFANKVEELEARHQTGLSPEFINLRSILSTHHHHH

SEQ ID NO: 43395 - protein, 427 aa, Oryza sativa
MDMVREEAWPLAAPQQQQQPSAPPPQPQAQQQNGRIDLREVKLRLEKRLGPDRSRRYFSYLKGYLSNRLSKADFDKVCLQTLGRENLRVHNQLIRSVLYNAYHAKCPPPTPAPDVGRSVGATVKKVCQPGEALNSCNGDIRLLQMQGSRHMSTMQDHQSKDRMKSTGLSCRVDASANHSQITHGGAAVPENGTLSSSDLKRSVHFQHESAEPLAKHQRVEQSPTGNIIKLRRSMSNVSDHSAEASNSPVRAPLGIPFCSASVGGARKLPPPLISAGEDHCTSCCEHRELLNTEALHRRMEKTAESLGLAGVTLDCADLLNNGLDKYLKNLIRSSVELIGANVQSDARKGELYKQHAYGKHMNGVWLPNHVQMQSGSGPSGATNDIRNHHLISLDDFKVAMQLNPQQLGEDWPVLLEKICLCSPEEND

SEQ ID NO: 43396 - protein, 472 aa, Oryza sativa
MNKNAQVEAIIGPQTSAEVELFAGIAIRNHIPILSFSPTTSPALSSPPTRFFVRTAASIASQAAPIAAILDVFSWRAAVLLHEDSLYGIGILPALVHAFQVQGQLLAGSYGARGVVDSVSVPADATDGRLDAALRAVKIMPWRVYVVHMLPALVARLFRRASVAGMMSEGYAWIATAGVGAAADGLSPDDIEHMQGVVSLRPYVQPTGQVRSFTRRLKARFRRDNPGIDDEDDDDDVAHTSASLLWLYDTAWAAAAAADRCLHQSSNAREEHNTTTFLDALLATTFQGLAGRFRLVDGERQVSAYEVVNIIGSGARTVGFWTPELGVSQDMARRRPKSGSNEELKQILWPGETAAVPIGWSESANGRPLRVAVPVKVGFNQFVAIRRQQNQTSAGGAMITGFCIDVFQAVMAKLAYPVAYQYVPVTDNMLSYDKMVNLVHEKRRSWRATCRSSWSSYGCLLFLSSRQATRQT

SEQ ID NO: 43397 - protein, 200 aa, Oryza sativa
MNGGGSRRGGASCADESGSDQDGGSGGGLRKPLLNTGSWYRMGSRSSLAASSMAAIRESHVSAFLCTLIVALGPIQFGFTSGFSSPTQDAIIRDLKLSISEFSAFGSLSNVGAMVGAIASGQMAEYIGRKGSLIIAAVPNIIGWLAISFAKDASFLYMGRLLEGFGVGVISYTVCIYQLHFMFICCLECSVASLLEYLSD

SEQ ID NO: 43398 - protein, 240 aa, Oryza sativa
MILKLILGLLWCLVHLVISFFSSLSHLKNDLECYLISFKLLPKYRNLHLERLAYLGVVVDSREAKNALKVKQLLRWFSTIGINYLILYDIEGVLKELIQPGIETSTDGNPINSLDVVADTKASCYRHGGMFMECLSSSDGKEAIAKVANLLYSTCCNSDNKSEIAFTEADMTHALKAVGTGGPEPDLLLVYGPGRFHLGFPAWRLRYTEIMYVGPLESMKYGTIVKALYRFSRKYQNYGK

SEQ ID NO: 43399 - protein, 369 aa, Oryza sativa
MSGKRAFCTAVESGRKTPEFCYLLGFSGVVALPGDRFQPLDDFLSENPFLSPIPLGRLYENIDPAKPYMLEDPIRRAVWSGSLAPYIANKVKMSLSHILTKENVGVHKDFGLVVFKDVPKKREGISDSSENYQHYSSFLTETIQRLHGSEFLNALPVEMDIYLKDLTDPNVKEDDIVDHPIALPGRVFGDVSVEAYRLLCKQYPVVKNGKEISADRIIEAVGAKFKDALTVSLDSGLLPKFLPLKWQKLYPANKYPWIPKPQLIISQEEAGKIVIEIHRHGSVHSVEVGVDTIVTSNFPGFSGDKFTRMEVLALIRHIFPEYLNTIFKEFKMDNLYEDLQIRERNPIPSLYSAQGDGVYAEVIVKFIGF

SEQ ID NO: 43400 - protein, 300 aa, Oryza sativa
MMLVAQSRDMSYLYFAEDLVLKIVQSLSHDLDSFNKRKWDHIIANQFLRDLREAKKRGNTERRHKEAQAIMAAAARCILPTSRNAPVRKVAECDVLSAKQESVPVAVPAKQEVHSPKQESIPKFNTGSSRVSQLISVQQANDSSPNSKVSADANIGSFDLAKFSKKNALPCDICMRSETVLNRIFVCSSCKAAVHLDCYRSVTNPTGPWKCELCQEMPSDVVAGSQSDCDGSKPCLLQCDLCHGTSGAFRKTIKGRCIHAFCAEWLLESTFTRGQYNAVDGMESLPKDKDTCAICHRNVG

SEQ ID NO: 43401 - protein, 148 aa, Oryza sativa
MSYLLRAWVALRPSPVKNLVGLTIIARPHVYPGPGALRVKFLGNLTVLLVVPARPTLIWKEEAAFDGSWLNVFITPALQQLAICMLYGVPGSRSTTVGSFLQQWGVPPLNFEQSPCSVVCAPTIDQMTSFFAHVHPSCHPGAWMCRNC

SEQ ID NO: 43402 - protein, 1016 aa, Oryza sativa
MVPKKVWGVQQLNPMPHARSATGEHTFSSLLKQKSPKTSPTKPRGSMAVSMREVDAVFQGAGQKDGLEIWRIEKLQAVPVPKESHGRFFTGDSYVILKTTALKNGSFRHDIHYWLGKDTSQDEAGTAAIKTVELDAALGGRAVQYREVQGNETERFLSYFKPCIIPEEGGIASGFRHTEINEREHVTRLFVCRGKHTVHVKEVPFARSSLNHDDIFILDTKSKIFQFNGSNSSIQERAKALEVVQYLKDSNHEGKCDVGSVEDGKLMADADAGEFWGLFGGFAPLPRKTFSDLNGKDSAFSSKLICLNKGQTVPVDFDVLTRELLDSTKCYLLDCGSEIYVWVGRETPLEERKRAGSAAEELLREVNRPKSHIVRLMEGFETVIFRSKFSKWPKKADAVVSDESRGKVAALLKRQGFNVKGLAKAAPVKEEPQPQIDCTGNLQVWRVNGTEKTFLSFSEQCKFYSGDCYIFQYSYPGEEGEECLIGTWFEKKSVQDEKTTAISVASKMVESLKFQAVMVRLYEGKEPAEFFSIFQNLVIFKGGVSTGYKKFVSENGIEDDTYSENGVALFRVQGSGPENMQAIQVDTAATSLNSSYCYVLHDGDTLFTWIGNLSSSMDQELAERQLDVIKPNLQSRMLKEGSEYDQFWKLLGVKSEYPSQKIAKDQESDPHLFSCTFSKGVLKVREIFNFTQDDLMTEDVFILDCHSCVFVWVGQRVGTKMRAQALSVGEKFLELDILMENSSQETPVYVITEGSEPQFFTRFFTWDSAKSAMHGNSFERWLSIVKDGVKPKLDKPKRRPTTSSSHTGRSSVPEKSQRSRSMSFSPDRVRVRGRSPAFNALAANFENPNARNLSTPPPAIRKPSPKSPSSDPTKPPQRAASIAAISASFERPRPTLIPKSIKASPDVNKPQVEASKPKPEANGKDSTPSKDSPTVTPTIQEDLKEGQPENEDGLPVYPYERLRTSSINPVTDIDVTKRETYLSAAEFRERFGMTKEAFAKLPKWKQNRLKIALQLF

SEQ ID NO: 43403 - protein, 488 aa, Oryza sativa; identical to SEQ ID NO: 42613

SEQ ID NO: 43404 - protein, 423 aa, Oryza sativa
MGNRIGGRRKAGVEERYTRPQGLYEHRDIDQKKLRKLILEAKLAPCYMGADDAAAAADLEECPICFLYYPSLNRSKCCSKGICTECFLQMKPTHTAQPTQCPFCKTPSYAVEYRGVKTKEERSIEQFEEQKVIEAQMRMRQQALQDEEDKMKRKQNRCSSSRTITPTKEVEYRDICSTSFSVPSYRCAEQGTECCSSEPSCSAQTSMRPFHSRHNRDDNIDMNIEDMMVMEAIWRSIQGSIGNPVCGNFMPVTEPSPRERQPFVPAASLEIPHGGGFSCAVAAMAEHQPPSMDFSYMAGSSAFPVFDMFRRPCNIAGGSMCNLESSPESWSGIAPSCSREVVREEGECSADHWSEGAEAGTSYAGSDIVADAGTMPQLPFAENFAMAPSHFRPESIEEQMMFSMALSLADGHGRTHSQGLAWL

SEQ ID NO: 43405 - protein, 516 aa, Oryza sativa
MEASQAASAWSSVNSGIVLSLAAVLWTVVWNSLQSLQLHHLVGRHLARHARRLAAVVDPYLTVTVAEHDGGRMKRSDAYREVQAYLHRATCDASAGVRHLRAEPAKNPDAFVLSMADREEVADVFRGGVTVWWLAYSTPPREDDAGGGFYWGGRAARADRRFYRLSFLERDRDVVLGEYLPHVRREGRAAMVRNRQRKLFTNLAGDTWGDDGGWCESVWSHVVFEHPKTFDTLAMDPARKKDIMDDLDAFRNGKEYYARVGRAWKRGYLLHGPPGTGKSTMIAAMANYLDYDIYDIELTSVRTNTDLRKLFIETTSKSIIVIEDIDCSLDLTGKRKNKKKKDAAAAKNDTDGDKKESPPSEEEEKDKEGSKVTLSGVLNFIDGLWSACGGERIIVFTTNHVEKLDPALIRRGRMDKHIEMSYCGFEAFKFLAKVYLGIDAHHLFDAVRALLRDVDMTPADVAENLTPKAAGDNADTCLAELVKELEKAKADKAQAKGKAAATAAAEEEVDGDDDEE

SEQ ID NO: 43406 - protein, 173 aa, Oryza sativa
MSMPDGKSLVCARLKRKRPILEINDGELHESLSNDADDFPTAFNFRSNRPVRRRLCTQLAETNDGELHGSPSSHANDFPTAFNFRSNRPVRRRSYTQLTDFPRPDSAMAAQSRKKRKAYMSERSRVLRQRLAHSSSSIYDKDASSSHTTIPTNGHSHDSYVMLNHDVISTVRS

SEQ ID NO: 43407 - protein, 682 aa, Oryza sativa
MVHMDGAGSDNNFTEVQSAAEGKCALSDANLDSQEIVAICQPDNISVGTKERVQLYEGFNVESHEDLIGELVRSLSLSDDEEEFVDIAENSELNDALCSQMGSCRFSLGSKMNEGPRTDPHGRLIEELEMSFSDAEEPLDQNIMVSLNDIEKPTLDEVSKENHILEEDGKESHILDVDGKESHILDVDGKQNHILDEHGKENHILNEDDKENLILDKGGEDTLDAGGANSYEERVLPSDDGLLKSGQSFQQCELVAVNMAEKDEGHLEGTNMANHAEANSGIAAVLSNLSNDKFCAILPPSCDGRKEEKSNIHRGRELCQGLSLDSVDFRSIQNFIESQMDGTSSSLSSGSPSHGDLEHNRSNRFKKIDRLERLRKMDDLRDQLNRLSSQKGLENRYKNKGPGVLQEQISYRHLEQHPCGFDGDSILDSDIIDSYYDQGNPPRYPPPDPFSPTHSHYHCGHGQPHIPYNCSAWEFNSYYQSSYAGSTVLEHVSLRSSYKEQKRAVKKSILRSLSGASPFTICNGCFNLVQVPSDIYVSKKKIAKFQCGRCSKALMLSFPATNSDDAKLSNKEVNRKPNKPVHNSVVGMEGGYSFSAECSRGDPVSISEECGASISRSFSGRTRAAVAASGSGKKVSDSALHRLMGYDSASQLLRRSRAFEDGYDSFESMVPVSNRVSRRKNL

SEQ ID NO: 43408 - protein, 1090 aa, Oryza sativa
MSVWNYVVTAHKPTSVTHSCVGNFTGPNQLNLIVAKCTRIEIHLLTPQGLQPMIDVPIYGRIATLELFRPHNETQDFLFIATERYKFCVLQWDGEKSELLTRAMGDVSDRIGRPTDNGQIGIIDPDCRLIGLHLYDGLFKVIPFDNKGQLKEAFNIRLEELQVLDIKFLYGCVKPTIVVLYQDNKDARHVKTYEVALKDKDFVEGPWSQNNLDNGAGLLIPVPAPLGGVIIIGEETIVYCNANSTFRAIPIKQSIIRAYGRVDPDGSRYLLGDNAGILHLLVLTHERERVTGLKIEYLGETSIASSISYLDNGVVYVGSRFGDSQLVKLNLQADPNGSYVEVLERYVNLGPIVDFCVVDLDRQGQGQVVTCSGAFKDGSLRVVRNGIGINEQASVELQGIKGLWSLKSSFNDPYDMYLVVSFISETRFLAMNMEDELEETEIEGFDAQTQTLFCQNAINDLLIQVTANSVRLVSCTSRELVDQWNAPEGFSVNVASANASQVLLATGGGHLVYLEIKDSKLVEVKHIQLEHEISCVDLNPIGENPQYSSLAAVGMWTDISVRILSLPDLELIRKENLGGEIVPRSVLLCTLEGVSYLLCALGDGHLFSFLLNASTGELTDRKKVSLGTQPISLRTFSSKGTTHVFASSDRPTVIYSSNKKLLYSNVNLKEVNHMCPFNTAAIPDSLAIAKEGELSIGTIDDIQKLHIRTIPLNEQARRICHQEQSRTLAFCSFKHNQTSIEESETHFVRLLDHQTFEFLSIYQLDQYEHGCSIISCSFSDDNNVYYCVGTAYVLPEENEPSKGRILVFAVEDGRLQLIVEKETKGAVYSLNAFNGKLLAAINQKIQLYKWMLREDGSHELQSECGHHGHILALYTQTRGDFIVVGDLMKSISLLVYKHEESAIEELARDYNANWMSAVEMLDDEIYIGAENNYNIFTVRKNSDAATDEERGRLEVVGEYHLGEFVNRLRHGSLVMRLPDSEMGQIPTVIFGTINGVIGIIASLPHEQYVFLEKLQSTLVKFIKGVGNLSHEQWRSFHNDKKTSEARNFLDGDLIESFLDLSRNKMEEVAKGMGVPVEELSKRVEELTRLH

SEQ ID NO: 43409 - protein, 93 aa, Oryza sativa
MPSLLYNLWIVVKCQQNRDHILIIFCCLSIFLDSSCIVCVSSCVKCCGYKLVFDFYLYLNLPFYNIRFLLRGAAQVLCCYVLESVGNSPTLLI

SEQ ID NO: 43410 - protein, 326 aa, Oryza sativa
MSTRARSPWWSRRRTAPTLSTTLSSLLLLLATTTTKLCRSCSDGERHALLRRIQPLIGPEFSSSGRLDWDEAVDCCRWEGVTCSVAGRRREAAAGGRRVVSLSLPGVGIAGAVDAAVLAPFTALEKLDLSGNQITSFSAANRSDMVVGAVLNNLTALTELHLAGNEITTTGWISNLTSLQVIDMSSNKVHELNGICGLHQLKYLSLGFNMIQGVINPCLGKLQYLVYLDMGSNFLTGEIGQYLLSNLTQVEEVHLGDNNLTGTFDFSSLANNSELHSIVLSNNCKLEIETELVRWTPLFQLEYLNLSNSIVNKRSNGIIPTFLSAK

SEQ ID NO: 43411 - protein, 539 aa, Oryza sativa
MFEDLVSKVLPALLGRYVSFQKDQLTINIWNQEIILVDVELILEAFDYLQLPFALKKGRIGKLSVRIPWKTLGWGAIIIAIEDVFICACPREDSEWSSDSLDKRELDGKLAKLKAIELAKISRGITDNQTGQSLLSYILAKILDNIQVSIRNVHITYADNYKDQGNFMFGLEFSSLSIQTDPKKQSFAMSLMVMSRQDEVNKTVEISNVGIYCHHLDEQQGSCDTGGLTETNFSFSHELAHPRDAYLLNPFNVTIFVLANKAGKLDGAPRYNITVELTALILSIDEIQIQQILNLCDYFSICALRTKYGRYRPSQSSLSKRHKGWQRMWWHYAQRSVLADVRRELRKTSWNYLGQRLDCRRKYVNFYRMKLELLQKGQLVSEDILQELENMDREGDIDDILNYRTIAEQKLQEALVKSTKDNFSSPGSPRIDDQSAGAGQGWLKWLSRGMLGAGGTADTSSFADVSDDIIKDIYEGTEFHPISSAENHLTKENHYSLFVRLSFSEILVSITSRQVLHTYITGTSTLYCCRHSITNYNKF

SEQ ID NO: 43412 - protein, 718 aa, Oryza sativa
MTSSSTAAAAIQSASSSTLSPHAAPFALPVRPARAPLQDGDVSRSMDGSIVVHGLDNKILGDAHPSSSSATSCFRTQSFDTVLPASTCGANASQPREWPEIGSDAAYPSSICSTSVVFSYPSVMMASNHNQKNPLYPGMGSNGSRCSTVKIESPPNKISEANKISCGLTSKSSMTKDVSKSNEDAVKNAPFPQILEVGMEICSKEASPVSHTRPLHISTAGSDPCDSMADGVKTEPSECYVDSPCWRGRGTSLSHQTSVTQLINQESEAFDAGQKKSTSTVQHCEVLTASQNLDTIENKQNQSQSHVELSVSMKSGDNGKKEEEVSHNKELESAKQCAAKCTAEQKHSLELRDNSVKRSGLNFAAPDFIPSSVGKSKIVKGSCSTTGRNTSGILKAMGNLSEMLRDSCLLDENELDEHEHTLLQSVIENLQTCIDRKKKGPINDDGSNKAGLRAPHSQSAVLKSYAGDYRGSCTTNGGNGITVNKSVGPTRVLSDFGKNSLTWSQPSFNNIPRMISCEEDHSQILIYKNLWIDAERTNCELKYLLKQNRIKIGQESSMAHIGGPRNPSFQACDLGAGPSNSYGAAISYPPTLSFPKGDSTEETSRARNTDLLYTGDCIRLGDNSVPSCSASTISHPTRPNNFQGDLLTGLEETGLHHHAQPVPQLAPSRVHREPRISTMDEASGHSCFTGADGILSGNSEYGLSSDWEHVLKEEIGWS

SEQ ID NO: 43413 - protein, 337 aa, Oryza sativa
MMDKDDVVSSDSDEEEEDGEENSGASQKKKGWFSSMFKSIAGNNVLEKSDIQPALKALKDRLMTKNVAEEIAEKLCESVAASLEGKKLGSFTRISSTVQTAMEEALLRILTPRRSIDILRDVHAAKERGKPYVIVFVGVNGVGKSTNLAKVAYWLLQHNLSVSLAACDTFRSGAVEQLRTHARRLQIPIFEKGYEKDPAVVAKEAIQEATRNKSDVVLVDTAGRMQDNEPLMRALSKLINLNSPDLVLFVGEALVGNDAVDQLTKFNQKLADLSAVPTTRLIDGILLTKFDTIDDKVGAALSMVYISGAPVMFVGCGQSYTDLKKLNVKSIVKTLLK

SEQ ID NO: 43414 - protein, 228 aa, Oryza sativa
MATCSRPLFVPASAAAASPSPAASRRGAPLVRLHAVAIVSIWEPRRHLRAHMSLCCKATRRSSGGLTTGHPISALPRAIKRILSSYPSLLTSLGGNLARGYKAAKPFLSIGFGRVVLGMVLVMSVSAATYTAPSSLALTEENLLFLEAWRAVDRAYYDKSFNGQSWFRYRENALRNEPMNTREETYAAIKKMLSTLDDPFTRFLEPEKFKSLREAWLARNTHRCRFIN

SEQ ID NO: 43415 - protein, 203 aa, Oryza sativa
MMLCCVTFLLDSISGFMSSPPEEGQLLSLLLNLTGAKNTIEVGVFTGCSVLATALAIPDDGKVVAIDVSREYFDLGLPVIKKAGVAHKVDFREGAAMPILDNLLANEENEGKFDFAFVDADKGNYGEYHERLLRLVRAGGVLAYDNTLWGGSVALEDDSVLEEFDQDIRRSIVAFNAKIAGDPRVEAVQLPVSDGITLCRRLV

SEQ ID NO: 43416 - protein, 375 aa, Oryza sativa
MLLPPHPGRTLPAYHGDNRFLLGACFLSKLPMLRPMKLSLVCSANPNNHRSRSSDITRHQKGGSARRKSKPYQEKDDSENIDEFDTDIMSSKNGPPISLTSNSRPQATSVPGEREKEIVELFKRVQAQLRARGKGKEEKKPEQAKAQGERGSVDSLLNLLRKHSVDQRRKSGDEKEQSVDQTKRSNESGNKQNSSIFIKNDTQEEQKKPHPAAFKRPASNFRRRSPVPNVKFQPVTNVDAERVINNINDAVQEAKPTLENKAATDEPDSVSTFEPNSVIEPENLSLDDLDHISDDEPDASDTDEPSGEYDEPSLQIPSVPIIDESHDTTLKSSLGGPDLSTLKVTELRELAKSRGIKGYSKMKKNDLVELLSNMA

SEQ ID NO: 43417 - protein, 262 aa, Oryza sativa; identical to SEQ ID NO: 30891

SEQ ID NO: 43418 - protein, 674 aa, Oryza sativa
MDGTNNHGALMDDWMLPSPSPRTLMSSFLNEEFSSGPFSDIFCDNGSNKHQDGLGKSKAFIDSSREETAQLAKKFESNLFGANQKSSSNGCLSERMAARTGFGVLKIDTSRVGYSTPIRSPVTIPPGVSPRELLESPVFLPNAIAQPSPTTGKLPFLMHSNVKPSIPKKTEDETRHDRVFFFQPILGSKPPTCPVAEKGFSVNHQNQPSVTDNHQELSLQSSSTAAKDFTSATIVKPKTSDSMLDNDDHPSPANDQEENATNKNEEYSSDLIITPAEDGYNWRKYGQKQVKNSEHPRSYYKCTFTNCAVKKVERSQDGQITEIVYKGSHNHPLPPSNRRPNVPFSHFNDLRDDHSEKFGSKSGQATATSWENAANGHLQDVGSEVLTKLSASLTTTEHAEKSVMDKQEAVDISSTLSNEEDDRVTHRAPLSLGFDANDDYVEHKRRKMDVYAATSTSTNAIDIGAVASRAIREPRVVVQTTSEVDILDDGYRWRKYGQKVVKGNPNPRSYYKCTHPGCSVRKHVERSSHDLKSVITTYEGKHNHEVPAARNSGHPSSGSAAAPQATNGLLHRRPEPAQGGGGGSLAQFGYGSAGHRPAEQFGAAAAGFSFGMLPRSIATPAPSPAIAVPAMQGYPGLVLPRGEMKVNLLPQSGNAGAAASQQLMGRLPKQHPQM

SEQ ID NO: 43419 - protein, 486 aa, Oryza sativa
MEILISAVATDLISRFISSVTQNYRNHIHKEDDRRRLERILLRMHSVVEEAGGRHITNQGMILQLKGLVEGFYLGYYMLDKIKFQPPEYEVSHEIQSFALSACNSAKRFRFADAISKRTPVAFGSRSRTNLKDVVDGLETKIADMREFVILLGSHPRLPRQPYSTYLYIDNCMFGRRIEKEQVINFLLCNDPHDPYVSILPIIGPQRIGKKTLVQHACLDERVRDCFSHIFFFKEDDLKTGELSLNSKASQGKYLFVIEFIWDVDEAAWTKFQSYLQNMPATGIKVVVIGRTEDIAKFGTSQPIRVKRLSEEEYWYYFKALAFGSMDPDEHPKLASLAMQLSTEMNGSFLGATMFGELLRANPNTQFWKRILLFLRELARKHLTSSGLHPEDLFERNIPVDLSRIAVVDGQVQDFMVYDVRVAGPAEGELPKLTSRDILLGGDIPVEDKFDVLVWRSRIPPYCNYIVTYEKQKPRRMVGKRNTIYL

SEQ ID NO: 43420 - protein, 72 aa, Oryza sativa; identical to SEQ ID NO: 33319

SEQ ID NO: 43421 - protein, 362 aa, Oryza sativa
MGEEVHLGLPGPWAEDYREKADHYTTKIGGVPDWPTEDMGIKPHLLQCGLCGTKLCLVAQVHAPVAKFNIENRTIYVLVCPKPKCGTNPQSWKVLRVQKCHTSAQTDGKVDETDQINGNVCSSEPSSSSLLNKSHEVSDDDFDLDALANALEEAATLASNSKKQNKPKRSNAPIKCPVGKQKVDDPSLPVLPCFYIYYGKEQFRDKGSVGSNSSKSVLAKEIADVANDEEEKWEGENYEYDRAIGADRTFLKFKKRLDAYPQQCFRYSYGGKPLLAATNLQDSGTCQLCGSPRQYELQLMSPLSYFLHEAGDGSSDYAPDGWTWLTLIIYTCSKSCCPSSCVGKPGSCCWGVAEEEIMIQED

SEQ ID NO: 43422 - protein, 542 aa, Oryza sativa
MLQGGNDHCPSRQDCDDDETKHIETSADHHDSQGRENSDLQAQDYKGTSCADRSISFCASNVEEQNEDFVNTKFSNDGPDVQAEDFKEISYTDTTIIDHSPERRQIKTTCYTTAPIDTRESQNTQAQSLEGITYTGPSMHAHEQNQGLKGTRYKIMIDKGHSANDISLVNSYPEMNDVTMDSKEVENTTVIPSNSSTLLSNTSGGQIPVEEHLNGQAAKGVKDLWELPEPDDSYYLPLENSSVYNGSGGLQIGHRHLPAGQQGSVVCMENGILSQQQSQVTIAAAFPMDNPASFMQPCSNRQSNGQVQTVANDIGMLPYSLEHTDCIGQSTDLHSLDNNRFSQPTHFPSPLQEQQLVDQSNSVLYDELHKNLYSDVSFQTKGNNSILEQHSFASSGSMDHRYNRFPQEHQPHDNWPAMESNNCLPQAFPVGSSNTDGSLFSALAQYRLPSSSLHMQSGRSSPSQLLEIRNQVPMSGSFVPRTQGTNLQAPSIYGYTQNLPSSSSSHVASVGSLNNMQWTNLIQQNPGMPNLTNRQFRGPWTR

SEQ ID NO: 43423 - protein, 196 aa, Oryza sativa
MVVETETGRDESEAAAATASAMDDGPCGESEGGGDAAAKAVGAKDAGEGDEPKEEEEDGRDREEEEEEAAKRGWSEIRLAIEELSAVDVERRGGKPPPPLPPPPTLTFLALSHLLLQVLDKIGPTMAVLRLDVQRNIERLQELYLLDPSKYYNLEEILEKEVDEGTARKVDSCARAILWLTRDWRRILIRSVLHSL

SEQ ID NO: 43424 - protein, 402 aa, Oryza sativa
MAGRLPGAASAAAAPLPRALLLLAALALFSLTFLSLRSLRPAAAPPSLAIGGSRPSSFARPSVYHSAEAFAAGYAEMERSFKVYMYPDGDPKTFYQTPRKLTGKYASEGYFFQNIRESRFRTGDPDKAHLFFVPISPHKMRGKGTSYENMTIIVKDYVEGLINKYPYWNRTLGADHFFVTCHDVGVRAFEGLPFMVKNSIRVVCSPSYNVDFIPHKDIALPQVLQPFALPEGGNDVENRTILGFWAGHRNSKIRVILAQVWENDTELAISNNRISRAIGELVYQKQFYHTKFCICPGGSQVNSARISDSIHYGCVPVILSDYYDLPFNDILDWRKFAVVLKERDVYQLKSILKSISQEEFVELHKSLVQVQKHFVWHSPPLPYDAFHMVMYELWLRHHVIKY

SEQ ID NO: 43425 - protein, 449 aa, Oryza sativa
MKRRLVVVALVLLAVVELVHGDGWRWAPGSRPHSVTITEFGAVGDGKTLNTLPFQNAVFYARSFADKGGAQLYVPKGRWLTGSFNLTSHLTLFLEEEAVIIGTKDPSQWPIVEPLPSYGQGLDLPGPRHRSLINGYNLSDVVITGNNGAIDGQGSVWWDWLHSHELNHSRPHIVEFLHSEEVVISNLTFLNSPAWSIHPVYCSNVKVHNVTIKTSLDAPLTDGIVPDSCSNVCIEDSSISVGHDAISLKSGWDNYGISFGRPTSDIHISRVDLQASSGAALAIGSEMSGGISDIHVDHIRIGSSSKGISFRTTPGRGGYIAEVVVADVVMDSVHLAIEFTGNWSSHPDDHFDPSFLPVIDQITLKNMEGTNISVAGVLSGIEGDPFSAICLSNLNFSIADLAPSSAWTCSNVHGYSELVFPKPCSELHDTSTNSSICFSLSSYSALAVL

SEQ ID NO: 43426 - protein, 65 aa, Oryza sativa
MALCYSLHFQIICHFSFVLSQTFLTFTINFYNFIQFNIIRFMFYIHHDKYFHHLYIVHMLNYTSI

SEQ ID NO: 43427 - protein, 431 aa, Oryza sativa
MIYSAVNKGVELSMLMTNSVACGLNIYHLLSIYRHNKERKKTICLVSFICISFLVILVLLETNVGDDILRLLEHLFGSLGNVMIVLCHLVQINNLWYSTLSLEIHVFILFYVPNILFAASELVLIVYKQYSMKIYVQLSYILNTIFYVIELPVMIRAMITNNPDSDNEAIDIENQAIVKIDGQKKHHNERQEDRAEKKTTFTEVYLLPAPPGLFGQGKRKHSDNDTASTKRRRITILQRKRRWIELRDKEIHFSKRMRSHIYSRSIKRGSPPTRTLQLQMDSLSEDSYEPEYVEEHRLKDLVKNSEFISYPISLNEKKIEKEICDDEEVDAEEGKVEDVDEEKEKKGEKINEVSHEWHSSNKQKPLSDSKEITSENEEAKEGKVEDVDEEKEEKKKQGKKIKEVCHECNLINKQEAIWMRKSEVITKEAAF

SEQ ID NO: 43428 - protein, 278 aa, Oryza sativa
MIMYIKTEDPDLPAFYYDPLINPITSTNKVDRRERRTTEEDEDEDFRLPDGVEPLLKGTELYTDTTAAGISLLFAPKPFHMRSGRTRRAEDIPLVSEWYKEHCPPAYPVKVRVSYQKLLKCYVLNELHHRPPKAQKKKHLFRSLQATKFFQTTELDWAEAGLQVCKQGYNMLNLLIHRKNLNYLHLDYNFNLKPVKTLTTKERKKSRFGNAFHLCREILRLTKLVVDANIQFRLGNVDAFQLADGLQYIFSHVGQLTGMYRYKYRLMRQIRMCKEKQC

SEQ ID NO: 43429 - protein, 453 aa, Oryza sativa
MSVSTAAVPTANTNGNHALSMDSHSSQDVRRRTVVVARKKASPELLADGGFNGTSSVDKITDKKDLSHTIRGESVLGKSKYPLEARKDAIASAAAADRQKKSGAKQEKAKWEIALSVLMKLCLLISAVAWMGQLFWRWQNGDLSFTTLDMESRLSKVEGFKKTTKMLQVQLDILDKRLGNEIDKTRRDITKQFEDKGNKLEIKMKALEGKTDKLDKSLAELRDMGFVSKKEFDEIVEQLKKKKGLDGTVGDISLDDIRLFAKEIVEMEIERHAADGLGMVDYALASGGGKVVKHSEAFRKAKSFMPSRNSLLEQAKKMLEPSFGQPGECFALQGSSGYVEIKLRTGIIPEAVSLEHVDKSVAYDRSSAPKDFQVSGWYEGPEDDSDKESRVVTNLGEFSYDLEKNNAQTFQLERTADSRVINMVRLDFCSNHGNSELTCIYRFRVHGREPGSP

SEQ ID NO: 43430 - protein, 263 aa, Oryza sativa
MRRYSPPYRSPPRRGYGGRGRSPPRRGYGGRREQGSGSLLVRNIPLSCRGEDLRVPFERFGPVRDVYLPKDYYSGEPRGFAFVEFVDPYDASEAQYHMNRQVFFGREITVVLAAESRKRPEEMRSRARVRGYSGNEGRRSSYYGRSRSRSRSPHYRGRPRSRSYSPAPRRRDDYSASPPRKDTHPTKSPRRQPKEHDEEKKRRSYSPASRDGDPRDADNGYEKRSPPPDSDGSPPHRRSPRHSSGSPPGSRSRSADVSPARSD

SEQ ID NO: 43431 - protein, 73 aa, Oryza sativa
MQPKIPWAQVFLPCRPSTQQFVCPLQHGVLEWSFELVTDLVSQAYLPLSSTGLMGCHHPSGPQRESSLHRISF

SEQ ID NO: 43432 - protein, 851 aa, Oryza sativa
MENSEQERTDSPLECDLRKYLLLLATLVATVTYGAGFSPPGGVWQDTEAGHLAGDSIIRDSQYRRYLMFFYCNATAFALSIVVIILIFILAILHEKGKLQIPMLPLRAAMVVDLLSLIGAYAAGTSRGVLTAGNVSALVATFIYMVAQMVVTLWLDKKQTQDISSGDEKKKRHRKVLMLLATFVASITYMAGLSAPGGYWDNNQEGHHPGDPVLWEHHSRRLRAFFVCNTIAFVASLLIIMLLLDKKQRIFLPLDKIKITITVRTYVLYAYITIALLGLVGAYVAGSCRKPDTTIYVLSLVGAVLLCIGALQAVLFFLPQLSNISCLPIIAKLSCSPGGPSDSSSRKNTSSKTDILEKAQSLVVLLATLVATVTYQAGLVPPGGVWQKNQDGHMAGEPILLSTQAKRYKVFFYCNSTAFAASLVVIVLVRYKPLLRRRILEITMILDLFGLMGAYAAGSCRDITTSVYIIALAGGVLVYVVIHVVFFTLEDNDKEKEVGNTNSVRNGSVVRTQNNSAEGNLAEKDSCIDKRRKRLLLFAVLGATLTYQAGLTPPGGFRVVDDGFGRHAGDPILFYNFPRRYKAFLYCNSVSFMSSLSLIILLVNPNLYRPAIQSYALSVCTVAGLFALLGAYAAGSTQHLKTSIYVFVLVAVVLFIMIILLVCFYQSESKEKRDDISKEPVEKDKDRAKYHAKRKYLMLLGVLAASVTYSQAGLNPPGGVWQGNSDGHGVGHSVMHDNKRYRYLTFSYSNSTSFVASIVVIILLLPTELLKKNRWLRVMNITIVLDLLGLLLAYVAGSSMRWEPSGYVIAFVIGALGCAAIHKFLSFVRRSQQQGQGNDQPSRLPEGGSQA

SEQ ID NO: 43433 - protein, 41 aa, Oryza sativa
MFFHDIVGSQLVLGTPSILNPEIDQVHVSLKDLLNCLVACS

SEQ ID NO: 43434 - protein, 565 aa, Oryza sativa
MGACVSSSKKRRSQKLCCIYRRYRGKVLSNAPIVRASDAGSRAAPGEVVHVEAKSDGSNVTFHLTQLQWHHSELDSENGNVVCQEEAWFDSLSILGSDSDEDFSSVNGDLPAMSNSAGTQLMHCEDASSIADAIQKFERIFDGSCVAQAIGQYLKRDANKMDRPNQADIQESEKPKIPSPESCDVSDVKVDETKTRNEGIKILTKLRRGEDACNTLKSSKEGDKAHESIFKSLTPVCTPRHANKVQPLAVASPRGQKKKSGVVRLSFKRKSFDGEQTTEICSSRRYLIHPRAGLLVPQGSEKISESCWSVLEPSTFKLRGETFFKDKEKLPAPGSSPYTPIGVDMFMSPRKIHHIAQHIELPSAGPSEKIPSLLIVNIQMPTYPTAMFLGDSDGEGISLVLYFKLNENYEKEISPLFLDSIKRLVNDEIEKVKGFPLDSTVPYRERLKILAGLVNPDDMNLSSAERKLVQAYNEKPVLSRPQHNFYVGPNYFEIDLDVHRFSFISRKGLEAFRERLKHGVIDLGLTIQAQKQEELPENVLCCVRLNRVDFVDHGQIPTLLPCDDD

SEQ ID NO: 43435 - protein, 188 aa, Oryza sativa
MPAAARSLSLCPLPLPRCHLAPPSRLPPAPPSRLPLVPPPRPPPPLPSAVAADPSRCHLRFQPSPSPATSASPPRAASTSSAAAITSPSLGASASPLALLPSPSAAVSASATAVAVAERRRCRLRLAPLLLLLPSTAVAPSSTTAAITERRRCVLRCLRQRPLLCPPLPEPTSRKAGAVARRGEPLQT

SEQ ID NO: 43436 - protein, 485 aa, Oryza sativa
MDMALPIVNATAAVLARVSAAFNAPFARAVVFGVHIDGHLVVEGLLIAVIVFQLSRKSYKPPKKPLSEKEIDELCDEWEPEPLCPPIKDGARIDTPMLESAAAPHTTIDGKEVINFASANYLGLIGNEKIIDSCVGSLEKYGVGSCGPRGFYGTIDVHLDCEAKIAKFLGTPDSILYSYGISTIFSVIPAFCKKGDIIVADEGVHWAVQNGLHLSRSTVVYFKHNDMASLANTLEKLTRGNKRAEKIRRYIVVESIYQNSGQIAPLDEIVRLKEKYRFRVILEESHSFGVLGQSGRGLAEHYGVPIDKIDIITAGMGNALATDGGFCTGSVRVVDHQRLSSSGYVFSASLPPYLASAAVSAVSYLEGNPSVLADLRSNISFLHKELSGTPGLEISSHVLSPIVFLKLKKSTGSSNTDIDLLETIAERVLKEDSVFIVASKRSPLDRCKLPVGIRLFMSAGHTDSDISKVSSSLKRVSASVLSDYI

SEQ ID NO: 43437 - protein, 277 aa, Oryza sativa
MAGAVSALFLLDIKGRVLVWRDYRGDVSALQAERFFTKLLDKEGDSEAHSPVVYDDAGVTYMFIQHNNVFLLTASRQNCNAASILLFLHRVVDVFKHYFEELEEESLRDNFVVVYELLDEMMDFGYPQYTEAKILSEFIKTDAYRMEVSQRPPMAVTNAVSWRSEGIRYKKNEVFLDVVESVNILVNSNGQIVRSDVVGALKMRTYLSGMPECKLGLNDRVLLEAQGRATKGKAIDLDDIKFHQCVRLARFENDRTISFIPPDGSFDLMTYRLSTQV

SEQ ID NO: 43438 - protein, 778 aa, Oryza sativa; identical to SEQ ID NO: 43100

SEQ ID NO: 43439 - protein, 304 aa, Oryza sativa
MADQKVVIAEGSGEQKRKVVKKSKVEKDRELFELAQAYHKVVAERDAAIAVKEKLESLCREFQRQNKMLKEECRRVSTEGQNMRMELSDKFNNAIKDVSVKLDEQKNECIAQLEENNLLRSKLKDLADQYNITQQKYAHQLKEKMLELELADLKMQQHQEKTAQEQTQMQLYADQVSQLMSTEKNLRLQLAADGERFQQFQDALTKSNEVFETYKKEMEKMVKLIKDLKKDNEFMKSKCENSDVALVKLIEERELMKKQVDKFKNQKEKLESLCRSLQAERKQSPSGGTPDATSNETNLATIES

SEQ ID NO: 43440 - protein, 559 aa, Oryza sativa
MGSSDFSWTLPDHPKLPKGKPVAVVVLDGWGEADADQYNCIHVAETPTMDSLKKGAPEKWKLVKAHGTAVGLPSDDDMGNSEVGHNALGAGRIFAQGAKLVDTALASGKIFEGEGFKYIKESFDQGTLHLIGLLSDGGVHSRLDQLQLLLNGASANGAKKIRVHILTDGRDVLDGTSVGFVETLENDLSQLRAKGIDACIASGGGRMYVTMDRYENDWDVVKRGWDAQVLGEAPHKFQNAVEAVETLRSETKANDQYLPPFVIVDDSDKAVGPIVDGDAVVTFNFRADRMVMIAKALEYGDFDKFDRVRVPKIRYAGMLQYDGELKLPSHYLVSPPEIERTSGEYLVKNGIRTFACSETVKFGHVTFFWNGNRSGYFDETKEEYVEIPSDSGITFNVKPKMKALEIAEKARDAILSGKFDQVRVNLPNGDMVGHTGDIEATVVACKAADEAVKMILDAIEQVGGIYLVTADHGNAEDMVKRNKSGQPQLDKKGEIQILTSHTLQPVPVAIGGPGLHSGVRFRNDVQTPGLANVAATVMNLHGFEAPADYEPTLIEVVDK

SEQ ID NO: 43441 - protein, 488 aa, Oryza sativa
MLRTGGGARATAAAQLLSSSSSPPPLRLPRRFLSLTATPYPLYYDLLLYRPSYPNPPKSSAADDRHTRPTDDHLDRAKRRYLRKRRSRLLPDPDATTAKPSSSSSSEFVELKPEVVDFPRLHAREEALYFHDAFALPWEKDKHYRMLYRLEKKYFPDQSLDNAFVPADASPPSSDAADKGLVFFDDDDNNKEAEVKKKKDGEDRGEVLERKVEDFFRSLKKGPGHGEANVMKAKKKEPPQVRHEADEWPQPHLASRRTELPPRWNGPTGTVVLIDKPKGWTSFTVCGKLRRLVNVQKVGHAGTLDPMATGLLIVCVGKATKVVDRYQGMVKGYSGVFRLGEATSTWDADSPVVQREPWEHIKDEDIRKVAASFRGEIWQVPPMFSAIKVGGEKMYDKARRGETVELSPRRISIHQFDIERSLEDRQNLIFRVICSKGTYIRSLCADLGKALGSCAHLTALRRDSIGDFSVNDAWSFAELEEQITKGYL

SEQ ID NO: 43442 - protein, 655 aa, Oryza sativa
MEEAVRVDLDKLPIKRLHAIDEAGNEHYPPDTSSEEQRLSAIRRIDFSWVIDKDAKKPKKDTAQQQQQQAWPWQGMMESLQQAQQELSVVIDLISTVEANDAVAVAGMLKPKSLPTETLVDTAVSAATKLQRVRHLSRYFKQSAKTMEQQFQKESRFYGSLIRLQQNWKVKRQRFGGSGPGSEGFMFDLIDTSQLDTAAMPRLSSLPLIPIDQDSSGTLSVQVPQKSCRFLSLNFRGDSANGVENYGHKLKDGISSITSSETDNDDVNKSIKHAHSILRNIHKSIFEEQVFDMVIRETFVQSQGINVTGMREDFLQLAIGQECSLCLSLAHSGDGSDSEMVDHEDHANSEDASNLVLVTMNGKLDPLRKDVTGFPNPRSLEIYLLQLFHENILRKVREKSLNIGRYQSPAQVAGDDYGLLGHFCLTVAHRIFSNKVLVELESVVSRVPYLHLRSLPTWHSRTSSWSLCLKVPQPILAADRIAKPSDNHELKYKSRSQFNTKVIVKDSQISLMGEGSPSIAGSLTGKPSDGYLVNSYNCDLEDLPTMLLQQVASQVIHWLHEEALVLGMNVTRDFLCLYFDLEQGETLGLVANVDPDDTCGCISWYLTIDHPTEDGKMSADSQEFEKRRFLGYVSLEVLYSTLMDLINLCNAGAHH

SEQ ID NO: 43443 - protein, 381 aa, Oryza sativa
MAATSLLSRLLILPPPAPAAAASLRQRKPAAAHSLSSRGRRPRLAVQAVAPAAAEEEKGGLPAAEAERLAEFLREDLPHLFDDVGVDRSAYDDRVRFRDPITRHDTIGGYLLNIRLLKLLFRPDFYLHHVEQTGPYEITTRWTMVMKFVLLPWKPELVFTGLSIMGVNPQNLKFCSHVDIWDSIQNNEYFSFEGLGDVFKQLRIYKTPDIETPKYLILKRTANYEIRSYPPFLIVEAKGDKLTGSSGFNNVTGYIFGKNASSETIAMTTPVFTQASDDKLSDVSIQIVLPMNKDLDSLPAPNTEAVNLRKVEGGIAAVKKFSGRPKEEIVIQKEKELRSQLLKDVLKPQHGCLLARYNDPRTQSFIMRNEVLIWLNDFTLE

SEQ ID NO: 43444 - protein, 533 aa, Oryza sativa
MDPPPQPPTSYPSSYTKFNSALNAGLLNPMSPPPLPLDKTRSSPTLFDMMANEQDYHPRTAAAIHSIPAPPQQAHPLQPARSMDRQVLLQDRVAELIGSCSPGNQFNDADSSDVRLTLTSKDGLSVTLCVHRHILVAHSRFFAAKLSDRWSKQQRTLPHIVEISDCDDVEVYVETLRLMYCKDLRRRLMREDVSKVLGILKVSAAIVFDAGVLSCLEYLEAAPWAEDDDEKVAALLTQLHLENSGAGGVLKRVSLELAPSAVAEEVEVGSGCNGGGNSGGGEEVLVRLLQVVLEGKDEKARREMKGLVSKMLRENSTSRGGAIGGDLRKESLYSACNGCLRLLHEQFEMAAGGDQSEVAQIARQADNLHWMLDILVERQIAEDFLRTWAMQIELAELHGKVPAIHRYEVSRVTARLFVGVGKGQILVSKEVRCQLLSTWLEPFYEDFGWMRRACKGLDRHLIEDGLANTILTLPLATQQEILLAWFNRFLNSGEDCPNIQRGFEVWWRRAFWKRNGEPEQPPRLRITAICENS

SEQ ID NO: 43445 - protein, 919 aa, Oryza sativa
MAASRGPPLLGFRALALALLLAILLLLGCSAAAAYAGAEGVLRQVVGRRGDDGGGGNFFEPFNVTYDHRAVLIGGKRRMLVSAGLHYPRATPEMWPSLIAKCKEGGADVIETYVFWNGHEPAKGQYYFEERFDLVKFAKLVAAEGLFLFLRIGPYACAEWNFGGFPVWLRDIPGIEFRTDNEPFKAEMQTFVTKIVTLMKEEKLYSWQGGPIILQQIENEYGNIQGNYGQAGKRYMQWAAQMAIGLDTGIPWVMCRQTDAPEEIIDTCNAFYCDGFKPNSYNKPTIWTEDWDGWYADWGGALPHRPAEDSAFAVARFYQRGGSLQNYYMYFGGTNFARTAGGPLQITSYDYDAPIDEYGILRQPKWGHLKDLHTAIKLCEPALIAVDGSPQYIKLGSMQEAHVYSTGEVHTNGSMAGNAQICSAFLANIDEHKYASVWIFGKSYSLPPWSVSILPDCENVAFNTARIGAQTSVFTVESGSPSRSSRHKPSILSLTSGGPYLSSTWWTSKETIGTWGGNNFAVQGILEHLNVTKDISDYLWYTTRVNISDADVAFWSSKGVLPSLTIDKIRDVARVFVNGKLAGSQVGHWVSLKQPIQLVEGLNELTLLSEIVGLQNYGAFLEKDGAGFRGQVTLTGLSDGDVDLTNSLWTYQVGLKGEFSMIYAPEKQGCAGWSRMQKDSVQPFTWYKTMFSTPKGTDPVAIDLGSMGKGQAWVNGHLIGRYWSLVAPESGCSSSCYYPGAYNERKCQSNCGMPTQNWYHIPREWLKESDNLLVLFEETGGDPSLISLEAHYAKTVCSRISENYYPPLSAWSHLSSGRASVNAATPELRLQCDDGHVISEITFASYGTPSGGCLNFSKGNCHASSTLDLVTEACVGNTKCAISVSNDVFGDPCRGVLKDLAVEAKCSPPSTTKEPRGEM

SEQ ID NO: 43446 - protein, 264 aa, Oryza sativa
MSRRWSRTIYVGNLPGDIREREVEDLFYKYGRIVDIDLKIPPRPPGYAFVEFEDPRDAEEACAGRDGYNFDGHRLRVEPAHGGRGNGGSSFDRPSNFGGGGRRGVSRHSEYRVLVTGLPSSASWQDLKDHMRKAGDVCFSEVYREGGGTVGIVDYTNYDDMKYAIKKLDDSEFRNAFSKGHIRVKEYDGKRARSYSRSRSPSRSRSKSRSLSKSPRTRRSASRSRSRSRSVSSRSRSASKGRSPSRPDYLFIYLGLCGDLGIAH

SEQ ID NO: 43447 - protein, 654 aa, Oryza sativa
MGNFPSWATNNNLQLNLVANKFNIRSNNDSILPSGLNCLQQDTPCFLGSPEYYSFAVDSGSNRSVRGLDNTVYEADATSLGAASYYVTGQTRWGISNVGKFNEAPNGSYLMYSSQQFQNALDSELFQTARMSPSSLRYYGLGLENGNYTVLLQFAEFAYPDTKTWQSIGRRVFDIYVQGDLKEKNFDVRKTAGGKSFIAVNKRYNATVSKNFLEIHLFWAGKGTCCIPTQGYYGPMISALSITPNFTPTVRNGVPKKKSKAGVIAGIVIGASVIGSAALLGIFVLVKKRRKAARQQEELYNLVGRPNIFSSAELKLATDNFSSQNVIGEGGYGPVYKGKLPDGRIIAVKQLSQSSHQGKSEFVTEVATISAVQHKNLVKLYGCCIDSSTPLLVYEYLENGSLDQALFGHGSLNLDWPTRFEIILGIARGITYLHEESSIRIVHRDIKASNVLLDTDLSPQISDFGLAKLYDEKETHISTKIAGTFGYLAPEYAMRGHLTEKADVFAFGVVALETVAGRSNTDNSLDNDKIYLFEWAWGLYEREQGIKIVDPKLDEFDSEEAFRVIYAALLCTQGSPHQRPPMSRVLAILTGDIEMTEMVTKPSYITEWQLRGGNTSYISSNYSSGSTTGEFREQRETSPLTPSPTITGVTYDGR

SEQ ID NO: 43448 - protein, 846 aa, Oryza sativa
MAVGLRRSDSIADMMPEALRQSRYQMKRCFQRYVSQGKRLMKRQQLLDELDKSVDDKADKDQLLQGFLGYVISSTQEAAVLPPFVAFAVRMNPGIWEFVKVHSANLSVEQMTPSDYLKNKEAMVDDKWGAYDDDSQLEVDFGALDLSTPHLTLPSSIGKGAHLVSRFMSSKLTDNKKPLLDYLLALSHRGDKLMINDILDTVDKLQTALLLAEVYVAGLHPDTNYSEFEQKFQEWGLEKGWGDTAETCKETLSSLSEVLQAPDPINMEKFFSTVPCVFTVVIFSIHGYFGQEKVLGMPDTGGQVVYILDQVRALEDELLQRIKQQGLNATPKILVLTRLIPEAKGTKCNVELEPIENTKHSNILRVPFKTEDGKVLPQWVSRFDIYPYLERYAQDSSVKILEILEGKPDLVIGNYTDGNLVASLLTSKLGVTQGTIAHALEKTKYEDSDIKWRELDHKYHFSCQFTADMIAMNTSGFIIASTYQEIAGSKEKPGQYESHYAFTMPGLCRYATGINVFDPKFNIAAPGADQSVYFPFTQKQKRLTDLHPQIEELLYSKEDNNEHIGHLADRSKPIIFSMARLDKIKNITGLVEWYGQNKRLRDLVNLVIVGGLLDPSQSKDREEIEEINKMHSLINKYQLVGQIRWIKGQTDRVRNGELYRCIADTKGAFVQPALYEAFGLTVIEAMNCGLPTFATNQGGPAEIIVDEVSGFHINPLNGKEASDKIADFFQKCKEDLIYWSKMSTAGLQRIYECYTWQIYATKVLNMASIYGFWRTLDKEERQAKQHYLHMFYNLQFRKLAKNVPTLGEQPAQPTESAEPNRIIPRPKERQVCPFLRNLLKKETGNN

SEQ ID NO: 43449 - protein, 74 aa, Oryza sativa
MEKRKYLVPCDMPVGQFIFILRSRLHLSPGIALFVFVNNTLPQTAQLMGSVYESYKDEDDGFLYMCYSSEKTFG

SEQ ID NO: 43450 - protein, 500 aa, Oryza sativa
MFGGKFRRSKVCSKCGMLSNSEEDFTLLMFNIPHREQVVAATLEDCLDHIVEENVHDSLSRCESCMNDQKSTSKCTFHETRDVVIVLQRFEPLTLGGYRKIGELINFPTELDISPYMSGVVTDKHIYELFGIIVHEGGVIGGHYRSYVKTNCWYEVSDRDVKRVNENFVLGAQAYILFYNRKEEAKSFDEVLAFAATAMSSSDAVPTSTSKDYTERTLSPEVSSAALSCWIDAARVLEPKSYSDQDILEKYIICMDRDSSDVSERIRNAMRNCNESRQEYHFNLPTTDGPFYDDNLGQYCLLRGARFRTISTSSNVEAKRDRAVRMHFLLSEILKLLQLKKVIDVGAIGYLEKFKFGNYSRSALLRRINDACMLLGTNRLSLNISVMSRGSIIGPVLFKVGEDVMIDASLRAVQIPHDIHLVDHIKLKKPVSFVLVVEKLSIFNMLVNLNFHVTHNCIIITGCGKPDMATRGAVFKLNYCLPVKVYILADLDLDGLQIYL

SEQ ID NO: 43451 - protein, 392 aa, Oryza sativa
MAGCIVVVFGVLVLVAGMAAAPTPDCNGILLTYNFEGRAKIRPYVADRNKQPYSFRANATVLNSGTRPLKSWAMLVTFGYGEILVGVDGAVLTGGGEMPYNTTQDAGNATSFSGYPQTDLLTPIATAGDISQIQAKVGIVGTLFAGPGPFVPLPTALSLDDPAYRCPQETNVSSGVLSTCCVLTPEAEANATVINANATDPTKNFLPRGTGDLVITYDVLQAYPSSYLALVTLDNNAKLGRLDNWRLSWEWRRGEFIYSMKGAYPSEKDTTGCIYGAAGQYYQSLDFSQVLNCDKKPVILDLPLSRYNDTQIGKIDHCCRNGTILPKSMDETQSKSAFQLQVFKMPPDLNRTKLFPQSSLIQAGLIQRLWRSRHGRWFATLPRVRGRSRSAV

SEQ ID NO: 43452 - protein, 563 aa, Oryza sativa
MESGITTADILKDVISLIFEKAVFEPTFCPMYAQLCSDLNEKLPSFPSEEPGGKEITFKRVLLNNCQEAFEGAESLRAEIAKLTGPDQEMERRDKERIVKLRTLGNIRLIGELLKQKMVPEKIVHHIVQELLGSGPDKKACPEEENVEAICQFFNTIGKQLDENPKSRRINDTYFIQMKELTTNLQLAPRLRFMVRDVVDLRSNNWVPRREEIKAKTISEIHDEAMKTLGLRPGATGLTRNGRNAPGGPLSPGGFPMNRPGTGGMMPGMPGTPGMPGSRKMPGMPGLDNDNWEVPRSKSMPRGDSLRNQGPLLNKPSSINKPSSINSRLLPHGSGALIGKSALLGSGGPPSRPSSLMASLTHTPAQTAPSPKPVSAAPAVVPVTDKAAGSSHEMPAAVQKKTVSLLEEYFGIRILDEAQQCIEELQCPEYYSEIVKEAINLALDKGPNFIDPLVRLLEHLHAKKIFKTEDLKTGCLLYAALLEDIGIDLPLAPALFGEVVARLSLSCGLSFEVVEEILKAVEDTYFRKGIFDAVMKTMGGNSSGQAILSSHAVVIDACNKLLK

SEQ ID NO: 43453 - protein, 284 aa, Oryza sativa
MGQALGLVQVDQSTVAIKESFGKFDEVLEPGCHFLPWCIGKQIAGYLSLRVQQLDVRCETKTKDNVFVNVVASVQYRALAEKASDAFYRLSNTREQIQSYVFDVIRASVPKMNLDDAFEQKNEIAKAVEDELEKAMSMYGYEIVQTLIVDIEPDEHVKRAMNEINAAARLRVAANEKAEAEKILQIKRAEGDAESKYLAGLGIARQRQAIVDGLRDSVLAFSENVPGTSAKDVMDMVLVTQYFDTMKEIGASSKSSSVFIPHGPGAVKDIAAQIRDGQLQAKLI

SEQ ID NO: 43454 - protein, 364 aa, Oryza sativa; identical to SEQ ID NO: 32965

SEQ ID NO: 43455 - protein, 143 aa, Oryza sativa
MNSADEQEEHVTWLIDLRGWSISSTPLSTSRESMHIVQNYYPGIIAVAILSNTPRIFESFWKIIKHFLEAKMSEKVKFLYTNNPESHKIVSEMFDMDLLETAFGGRNSITIDIDNYAERMRRSDLARGVLIIQTDINLISRHH

SEQ ID NO: 43456 - protein, 143 aa, Oryza sativa
MMTDLTLTKRVGIVTCYFEKVSVVGTNSCFCFVVFISFLEVCMKLVSSFFIKKCVIYSLTNDGGHQIVPCPGEYRIFDLTKTSCLILWLHFAYCLLYERQKLGQALTLRHPQGENRNGNTSFAFSVISILLSGTTKYAKYGFS

SEQ ID NO: 43457 - protein, 419 aa, Oryza sativa
MRHCWGGASSVLRLLLALQCGVVVVVLQCSANALGSDVSALIAFKRAIIGDPRSALAEWSDADGNACDWHGVICSSPQGSVISLKLSNSSLKGFIAPELGQLSFLQELYLDRNMLFGTIPKQLGSLRNLRVLDLGVNRLTGPIPPELAGLSSVSVINFHSNGLTGNIPSELGKLQNLVQLRLDRNRLKGSIPGSNGSGFSPTANSGSTAHNGLCPSPRLNVGDFSYNFLVGKIPPCLKYLPRSSFQGNCLQDEYSVRQRAFQICISGSPAGQRGGVKGFKHPTSDHKHERSPQPTWLLILEISTGILLLVFVITGAITASRSCKLKPSIRISSWNRSKSWSDEITVLIDSDMLKSLPKLSRQELEVACEDFSNIIGSSPETVVYKGTMKDGPEVSVISLCAFEGHWTSQHELFYQNKRK

SEQ ID NO: 43458 - protein, 312 aa, Oryza sativa
MGAIKVLQNLFSEPGRLQFIYADLGDPKAVNRIFAENAFDAVMHFAAVAYVGESTLEPLRYYHNITSNTLVVLEAMAAHNVRTLIYSSTCATYGEPEKMPITEGTPQFPINPYGKAKKMAEDIILDFSKSKKADMAVMILRYFNVIGSDPEGRLGEAPKPELREHGRISGACFDAALGIIPGLKVKGTDYETPDGTCVRDYIDVTDLVDAHVKALNKAERGKVGIYNVGTGKGRSVKEFVEACKKATGVDIKVDYFPRRPGDYAEVYSDPAKINSELNWTAQHTDLLESLRVAWTWQKKHRSGYGPPQAMVL

SEQ ID NO: 43459 - protein, 496 aa, Oryza sativa
MHNIRQYQLPLQKYMAMMDLQEGNERLFYKLLIDNVEELLPVVYTPTVGEACQKYGSIFSRPQGLYISLKEKGKILEVLKNWPERSIQVIVVTDGERILGLGDLGCQGMGIPVGKLALYTALGGVRPSACLPITLDVGTNNEALLNDEFYIGLRQKRATAQEYADFLHEFMTAVKQNYGEKVLIQFEDFANHNAFELLAKYGTTHLVFNDDIQGTASVVLSGLVAALKLVGGSLSEHSYLFLGAGEAGTGIAELIALEISRQTKAPIEECRKKIWLVDSKGLIVSSRKETLQHFKKPWAHEHEPVGNLLDAVKTIKPTVLIGTSGKGQTFTQEVVEAISSFNERPVIFALSNPTSQSECTAEQAYTWSKGRAVFASGSPFDPVEYDGKIYVPGQANNAYIFPGFGLGVVMSGAIRVHDDMLLAASEALAQQVTQENFDKGLTYPPFSNIRKISAHIAANVAAKAYELGLASRRPRPKDLVKYAESCMYSPLYRNYR

SEQ ID NO: 43460 - protein, 443 aa, Oryza sativa
MYGGDEVSAIVIDVGSYSCKAGYAGDDTPKAVFPSVVGSIEQTGETDEAKADKEAEAASDSKNGAKPMDVDKAKTKRKLYVGQELEFRRDHMEVISPMKDGTVTDWDIVDNIWNHAFRQRLLINPEEHPMLIAEPSTNTGQQREKAAELMFEKYKVPALFLAKNAVLTSFASGRATSLVVDSGGGSTVVAAVHDGYVLQKSVATSPIGGEFLTDCMMKSLESKGVVIRPRYSFKKKEVGPGEYKVVDLDLPNTTESYKLYCMRAIASDIKESVCRVPDTAFDEVAYANVPTTSYELPDGQTIEVGADRFKIPDILFNPSLSQTIPGVDGFADSMSVRGLPRMVIDIVNRCDVDIRKELLSSILLSGGSSSILQLKERLEKEVLEESSGNTRVKVLASGNSVERRFSVWIGGSILASLGSFQQMWFSKAEYEEHGVSYIQRKCP

SEQ ID NO: 43461 - protein, 551 aa, Oryza sativa
MASCSRTWLLPGMAPQATAQTVPRPLQSLKVFAGLPHRRRVLFSGVSSRTRRGRIRSVKDDSLHFDPSKIEAPPYSSYFDSTSGQLEPASGARASIPGQEYWPEGTASRVRAARAPAPVGESAGTPSFGKKPGSRRKGYKEQVASATAGRGTETSGDEGESVVAIEASSDETLEETKDSLDEYVVYEMPKEENLSEYEMDKMMGRPHPFVDPQKAMSVGEPKSSEELWWNWRRKSEENEMWSRWQRRRPDVDTVFAKAMAETGQIKIFGDHPTRTEAALAKARRHLFKEERLEAEQRRLEEIGPIAYYSEWVEAYKNKDTSREAVQKHFEETGEDENTQLITMFQHQTAGEFRIMMGTDVRIQRDPLAMRMREDQIKQIWGGDPVYPTINYVHDPDEVADYRGPDFHEPTPEVVPYLMEHGIMITKEELYARLNEEMEDINQDITYLPEVRDPMATAVDIGEHSYNEDSDDDEEDADKVVAQPESLEDDEDDGDDAEDAEGKVSRNWSVLKTTGQAENPKEKSKKDQLSLKEAIADSENLTDFLMDFEEDE

SEQ ID NO: 43462 - protein, 136 aa, Oryza sativa
MKACARAAGERLPLVGAPARQPLARSFVKVNRLSSQHETKSVVSCSVRVSDDKTHRIEATAEHILPATNDHVMKAIDSINRGQVIAVPTDTIYGFACDAWLVLLKVHFVPRILFFSFALLSYCSHVNSNLTPSAMM

SEQ ID NO: 43463 - protein, 109 aa, Oryza sativa
MREAIIFLLLLSVKYMIRSIYNSQHNKRRKSTKHATPWASIERHGKGIKASAARRLILQASRSRLWKASMQLTPMLTSSRHSTSMSPSRLGFCRCNVRACQSCGISVRA

SEQ ID NO: 43464 - protein, 473 aa, Oryza sativa
MLIRSPPRPWRRRLPQHVVIVDASSSSRGPKAATGGRLETSTDAAAVAGEDGDVIRRLQNGPDVRGVALEGENGRAVDLTPLAVEVIAESFGEWLREELQQLESGRDGGEVRVSVGRDPRLSGARLGAALFAGLARAGCSVFDVGLATTPACFMSTKLPRFSYDASIMMTASHLPYTRNGLKFFMKRGGLTSGEVEGVCDRAARKYVARKMGLGGGRGMPPVVMRVDLMSAYAQHLRNIIKERVAHPTHYDTPLKGFKVIVNAGNGCGGFFTWDVLEKLGADTTGSLHLEPDGKFPHHMPNPEDTTAMSLTRDAVLDHGADLGVVFDTDVDRSGVVDATGAAINGDRLIALMSAIVLDEHPGTTVVTDARTSDGLTRFIQARGGHHCLYRVGYRNVIDKGVQLNADGVETHLMMETTGHGALKKNNFLDDGTPSYVHIHTYIRHLLGVLIAYITSNLTRFTNVDLLYYILYIC

SEQ ID NO: 43465 - protein, 130 aa, Oryza sativa
MEALPCLSFIFSLLSSVTASLFFFLLQFHRSHEKKKTHFSCSLSPETVLYWYAMDCINILIQISCCPCLYRPTLMEPRNLYSLMCMGTYFVLCRTCPDHESIQSWFVVSLNLESDCFVFPFHVDICMFDL

SEQ ID NO: 43466 - protein, 53 aa, Oryza sativa
MHIWSSLISVGLCREEKVELWKVIAGSFGSFFEDFSNWYVLINQLEFWSRYSL

SEQ ID NO: 43467 - protein, 202 aa, Oryza sativa
MLPASHPLLYACAYRDSALVADLAHAPPPHDGGAAEDDAPAVAAALVAGAPAHHRHVTHTASGRAHAVLLAPPLVLAAVSRAPQLPSSHLLLFLRRLRCLPGNRMRDEMPRLALRLPFPDEEALAREAGEVAAAEAEAEEAERREGELARRTPKRERRAHSGGAGWTWRRKLWLIVLADLVLLFVLFAAWLAVCKGFSCIGR

SEQ ID NO: 43468 - protein, 158 aa, Oryza sativa
MILAFDITAESFRWMRSPFGKAVWRAFHGLFEINCMLGMYCCDDGATFVDIWVLEDYEREVWSLKYRVELPVLEIRRELDVKRDLYSVMVSSEDGDVLVLVNCKRAMLYIGTDGKLLASLPHDNDGLSITPVKLRASLVPHAFFPSLLDYVVNASPFV

SEQ ID NO: 43469 - protein, 858 aa, Oryza sativa
MRSQLDAAAVSSPPRAPAARRCLRPALPLALRFHAFPGQVRVYRGGGIGVGVRSAGHLPSKRGLVRVFDSAMGMNEKVTNGNLEQPTTSTSGNNPSFPAEGNFNVVTVVSITFCVLHKIVIGQMQLMTKFLPWMSHNITSLPLACISDPMKKPVPLKLDVSFPQLPDIRWSISRLYYLFNSQLERNIALSIITLMITCFSLVVVGGFLFHKFRKNQQSLEECFWEAWACLISSSTHLRQKTRIERVLGFFLAIWGILFYSRLLSATAEQFRIQMHKVREGAQQQVIEDDHIIICGVNSHLPSILNQLNKFHESSIRLGTATARKQRILLLSDLHRKQIEKLGDSFAKDLNHIDVFTKSCSLSLTKSFERAAANKAKSIIILPAKNERYEVDTDAFLSLLALQSLPQIASIPTIVEASNSTTCDLLKSITGLNVQPVEMAASKLFVQCSRQKGLIKIYRHLLNYHKNVFNLFSFREVVGMKYVDVRRRIPDAVVCGIFRSGMMHFHPCEDEVLTEKDKLLLIAPVSWRRRAQSTFSNSPNGAQNSSHYSESTEGQRSSSMALEVNETRLNSIRKRPSKTLSKSNDYTLGPREHVLIVGWRPKVTDMIREYDNYLGPGSVLEILSETPIKERSSIVNPLMQKQLKNIKVNHQVGCPMNYDTLKEAIIKFKKSRKHDQNVPFSVVVISDKDWLGGDTAQVDKQLAYTLLLAENICQKHDIKVEHLVSEIVDTGLGKQMSRIKPSLSFIGAEEVMSLVTAQVAGSSELNEVWKDILNAEGDEIYIKEIGFYMKEGEKISFSELTERAILRREVAVGYVKGKKQYINPTNKLELLSFEMTDQLIVISEFEGEQPVVRGGDTST

SEQ ID NO: 43470 - protein, 910 aa, Oryza sativa
MAVVLEALASNLSNVLAKMARKEVGMLLGISDKIDSLRVRLDGLKEFLADAERRRITDLHVQGWVKELKDAMYDATDILELCQLKAMDQDSRRSNNPSLLSLRNPLNAHHIGSRIMALNQRLDGIKQRAEQFSFIKLDRYGDCSRTAQGHGLRRTTPELDRSGVVGNKIEQDTRRLVELLTREEEEASAASISSNVRVVAIVGVGGIGKTTLAQNIFNHQDIKEKFDKIIWLSINQEFSDPELVRTAITGAGGEHSGHQELSLLQPILREAISGKKIFLVMDDMWSVHAWNNSLRIPLVNSAAQGSWVLITTRDERVAREMKAIQPYHRVDILSRQDAWLLLKKQIASTLKDEYAIEKLKSTGFRILERCGGLPLAIKAIAGLLNHKEINEIEWGKVLRSPSWLVDGMPEEINHAIYLSYDDLDPHLKQCLLYCSLFPKYGKPNKHLIVEVWISEGFVNGKSNEPEELGKEYYNELIIRNLLQTMPGDNNNWTMHDVVRSFCRHVAKDEALPFHMEHLRVTDLDSNRYRWLCIQNELDWSAWQEQNSVRTLFFYGSTHIKLKANDLCSKFSNLRVLSIVYAQLATFDSLCQLKNLRHLYFSRTDIRSLPDGIGKMKFLEYIGITCCEQIQQLPGSIIKLERLRSLNLMGTNIKSIPRGFGRLTSLRTLYSFPAQMGSSSSKDEWCSLEELGPLSQLRDLHIKGLENVSASSSAAKAMLGAKKHLAIWWLECTDRQRDDGFLKEEGIISIDEQRRIKEVFDELCPSYCLEQLYIRGYFGWQLPKWMTSKASVRLDRLTSLKLDGLPCCTKLPDGLCQLSCLKLLQIRRAPAIERIGHEFLQIQQHNGDCHPSRAAVAFPILETLEFTVVLELEEWVWEEHIQAMPLLHELTLDRCKLRQLPLGLAENMPGL

SEQ ID NO: 43471 - protein, 448 aa, Oryza sativa
MAALLYLRRRAAAAALAGVAPKPQWLATAARSGALVSGDDGGETGERGKSPWLQLPPFAPLDAAAAARAISRGGGEGGGGEQGATAIKWVRRCCPDLPTSLVQKLFRLRKVKKNVVTAEISSADASAEQHRLRRVSAKDQLMPGDILFLPVNLKESSVAEKTKKFDNRNEINFLRGLEIYKDEAIIVVNKPPGMPVQGGVGIKNSIDVLASMFEENSSEAPRLVHRLDRDCSGILVLGRNQLSTSMLHAIFREKTADALADGTQHVLQRKYVALVIGTPRHPKGLLSAPLAKILLQDGKSERLTIRASSNAASVQDALTEYRVIESCPQGYTWLELFPRTGRKHQRFLEPQLLGITSMDGKRIRSGCLFPCHGQLMRNCSGKGSFPLGLLWVAEASLRSNLSFIYTASKWFFLMSQWLFIGCSLQTLILISQILRSSTLLLHCRCICG

SEQ ID NO: 43472 - protein, 115 aa, Oryza sativa
MSPPHQSPPPPPLLASSLLSSHPRESPPPHSLHPIPRCRQTSRPLLLSRARNPRRLAPPDSPMPLQSTAGPATPSSLLLPPPLSRVNARRSPSLDQRRRYRASTAGPPQSLRASS

SEQ ID NO: 43473 - protein, 79 aa, Oryza sativa
MSVPFGNRRTKFPVSSSTAEAPVTLILVVQRMWPWESDSTMPELLVMARVADEGVVIGLSRLATHTTVRWGMLWNQTPT

SEQ ID NO: 43474 - protein, 214 aa, Oryza sativa
MGTLHDVLHGPRDGQGWGGEAKAVVSWEQRVRIALDAARGLEYLHEKVQPAVTHKDVRSTNVLLFEGFRAKIADYNMFSQAADMARLNRSTHTLGSFGYQAPEYAMTGQMNDKSDVYSFGIVLLELLTGRKPLDRTLPQGQRSLVNWATPILTEDRVQDCIDPNLGDKYPPTGALKLGRIAVQCLQYDPTFRPSMGTVARVINYAVVRDQQGVV

SEQ ID NO: 43475 - protein, 156 aa, Oryza sativa
MTAVIGRRKTESGEPSFMVEKGIVKSADKLAFIIGHEKYVKGIEGSIPVLVKSANWIDTAEEIDDLFLGDAEVWRRPSIGTAGPLGGDFPLVTKEGHHVLDVIFTTPIPDLGKVAESLEKIAGVVDHGIVSSIPSYVVVALNGEVQVLDEKSSVIP

SEQ ID NO: 43476 - protein, 190 aa, Oryza sativa
MVEGDHILHTTGEDHTPPMRGVDPTLHMKGDSPTLRMADPLLLMVDGDHTLPMTHVVHGVGHTHLTVVPATVQDLHTVTEERGHVPMTILFHHTIEGAILQVLEDGAILAVYHLRGATPIAVPRILRGQGAILQGKDTVKGNRRAAGRRVRGILGRATLTAAVPTQGLSPGSAQNELKLDVLEINKALYA

SEQ ID NO: 43477 - protein, 427 aa, Oryza sativa
MSGGALRTFTRCVTCLARVGSDLVLQAHPAKLELHTLNSSRSAYASISLARDFFDEFSLSAAAAADSAPSSTPLQCSVLLKSASLPNPDAPKLQLTLHCLNGVKKTYWIACSAESEVQTLALDRSNFSSRLAIRPRDLARLLSNFQSSLQELTVIATGPAAGLSNVGVDGEIEGKAVELRSYIDPTKDDCDTRLHTQLWIDPTEELVEYVHSGDSVDVTFGVKELKAFLTFCEGCEVDILLFFQKAGEPVLLVPKFGLDDGSSSDFDATLVLATMLVSQLTDSSVAQQPTTSAQRAEEPRVAATPPPVPENVSNHTKIWSELSGSAPKSFEVNREKYTQKERNANSNALNDTSMLHSVNARYKPPVADNANDTMQPMQMDHLEEPPDVVSDNPRSQHHPSNWVGADEDDDDDEDEELFVQTTPHYMD

SEQ ID NO: 43478 - protein, 76 aa, Oryza sativa; identical to SEQ ID NO: 43321

SEQ ID NO: 43479 - protein, 351 aa, Oryza sativa
MADESWRAPAIVQELAAAGVEEPPSRYLLREKDRSDVKLVAAELPEPLPVVDLSRLDGAEEATKLRVALQNWGFFLLTNHGVEASLMDSVMNLSREFFNQPIERKQKFSNLIDGKNFQIQGYGTDRVVTQDQILDWSDRLHLRVEPKEEQDLAFWPDHPESFRDVLNKYASGTKRIRDDIIQAMAKLLELDEDYFLDRLNEAPAFARFNYYPPCPRPDLVFGIRPHSDGTLLTILLVDKDVSGLQVQRDGKWSNVEATPHTLLINLGDTMEVMCNGIFRSPVHRVVTNAEKERISLAMLYSVNDEKDIEPAAGLLDENRPARYRKVSVEEFRAGIFDKFSRGERYIDSLRI

SEQ ID NO: 43480 - protein, 503 aa, Oryza sativa
MWSALFSHLREVHKIFFVKEEKLIMKSPAAAGEAAGCHKPQATATNKMTVLQSPLGLRTILTSLVAFFIVVSSVSLLFDRSQDAQAQLAVAQHQHQEVQLKQKPASAAVGEQKSVFVDQSSLRSQEAQVQWTSELQDVATDSGDGGVDGEEECNWSLGRWVYDNSSRPLYSGLKCSFIFDEVACDKYGRNDTKYQHWRWQPHGCNLPRFNATKFLEKLRNKRLVFVGDSVNRNQWVSMVCMVEHFIPDGRKMRVYNGSLISFKAFEYNATIDFYWSPLLLESNSDNPIIHRVEYRIIRADRIEKHANVWKDADFIVFNSYLWWRKQRDGMTMKVMYGSFEDGDAKLDEVEMVDGYEIALKKLTEYLGANINKNKTRIFFAGSSPAHSWASNWGGDDNNKCLNETEPIQIEDYRSATTDYGMMDKAKEIFGTLEPKGIHVQILNITQLSEYRKDAHPTIFRRQYVPLTKEQIANPSIYADCTHWCLPGVPDVWNEFLYAYLMHK

SEQ ID NO: 43481 - protein, 358 aa, Oryza sativa
MASSRSSLVVAMAVVILHRWCCAAAPAAAAANRTRTPALFVFGDSIVDAGNNNAITTLIRCNFAPYGKDFPGHNATGRFSNGKVPGDILATQMGIKQYLPAYLGAELSDFDLLTGVTFASGGCGFDPLTAELVSVLTMDNQLDLFKEYKEKLRRVAGDARAGEIVSESLYMVVTGTDDLANTYFTTPFRRDYDLDSYIDFVVRCASGFVRKLLGMGARRVNVAGAPPIGCVPSQRTNAGGLDRDCVALYNQAAVVYNARLEKEIERLNVTAAPPGTVLKYIDLYTPLLDMIQRPAAYGFEVTNRGCCGTGVFEVTLTCNRYTADVCRDVDKFLFWDTYHLTERGYNILLSQIITKYGF

SEQ ID NO: 43482 - protein, 322 aa, Oryza sativa
MSSSYDEGKSFARRDLLLKIQSEVQKCWEENKVFEAKAGDTPPSPGEKFFGNFTYPYMNGMLHLGHAFTLSKLEFAAAYHRLHGSNVLLPFAFHCTGMPIKPSADKLGKEIQQYGNPPVLPPANKNSKFELTNDRIYGQTTASAQDKYRSKRSKSVAKSGSYKSQWEIMRSFGIADGEIVEFQNLHHWLSYFPPLAMEDLEDFGLSCDWRRSFITTDMNPFYDAFVQWQMRKLKKMHRIVKGKQYMIYSPLDRQPCLGHDRASGEEVEPQEYVLIKMKVIPPFPPKLMVLEGRNVYLAAATLRPETIYGQTGGEATGNHRGQ

SEQ ID NO: 43483 - protein, 476 aa, Oryza sativa
MGRAFVHVILGGGVAAGYAALEFARRGGYSRGELCIISEETVAPYERPALSKGYLLPEGAARLPGFHTCVGANDELLTAKWYKENGIELVLGTKVITADVRMKTLLTATGETISYKNLIIATGARALKLEEFGISGSDASNICYLRNLDDADKLVNVMKSCPGGNAVVIGGGYIGMECAAALVTNRIKVTMVFPESHCMARLFTPKIAEYYENYYTSKGVTFVKGTVLTSFEKDSTGKVTSVILKDGKHLPADMVVVGIGIRASTGLFEGQLLMEQGGIKVNGQMLTSDGSVYAVGDVAAFPIKLFDGVIRRLEHVDSARRTARHAVAAILEPSKTKDIDYLPFFYSRVFTLSWQFYGNNTGEVVHFGDFTNSSPRFGAYWVDKSRIRGAFLEGGSREEYEAISNVVRRKAKVINIAELEKQGLMFAIQESQKDLPDGGLALGEKPTYVWHATAGVIAAASIAAFGYWYGRKRRRW

SEQ ID NO: 43484 - protein, 811 aa, Oryza sativa
MMAAAVEEEEMVERMHGWARDMDVASRRAEEEAMRRYDAASWLRSTVGVVCARDLPDEPSEEEFRLGLRNGIVLCNALNKIQPGAIPKVVQAQSDAAGPTDGSALCAYQYFENLRNFLVVVEDLRLPTFEVSDLEKGGKGVRVVDCVLALKSFSESNKTGRQASCKYGGLSKPLTARKYFILKNTDAFMNKIMKGHSAEAIQSEFSEGQSIVTDFSIESNEMTTSDSLSILLRKVLLDKKPEEVPLIVESILSKVIQEYEHRIAIQNKMDEEEQNLLNITEQVNHVVVNGDGEVKQFQLEAQTNFDVQQKQIQELKGALSFVKSGMEQLRLQYSEEFAKLGKHFYTLSNAASSYHKVLEENRKLYNQIQDLKGNIRVYCRVRPFLPGHRSLSSSVADTEERTITIITPTKYGKDGCKSFSFNRVFGPASTQEEVFSDMQPLIRSVLDGFNVCIFAYGQTGSGKTFTMSGPKVLTEESLGVNYRALNDLFNIKAQRKGTIDYEISVQMIEIYNEQVRDLLQDGGNRRLEIRNTPQKGLAVPDASIVPVTSTADVVELMNQGQKNRAVGSTAINDRSSRSHSCLSVHVQGKYLTSGAMLRGCMHLVDLAGSERVDKSEVVGDRLKEAQYINKSLSALGDVIASLAQKNSHVPYRNSKLTQLLQDSLGGQAKTLMFVHVSPELDAVGETISTLKFAERVASVELGAAKANKEGSEVRELKEQIATLKAALAKKEGEPENIQSTQSSPDMYRIKRGNAIPAFPKNRQPMEEVGNLEVRNNATPMQKKASFQFSGVLSENNSSDLAEKLQWHSEDR

SEQ ID NO: 43485 - protein, 405 aa, Oryza sativa
MQQMAVSAFTANPSSSHGNTLSGLCSRRPEIWHRRRIGSRIRAQAQSQMQYRKLGDSDLVISEVTLGTMTFGEQNTEKEAHDILSYSFDQGVNILDTAEMYPVPPRKETQGRTDLYIGSWMQSKPRDKIILATKVSGYSERSTFLRDNAKVVRVDAANIKESVEKSLSRLSTDYIDLLQIHWPDRYVPLFGEYCYNPTKWRPSVPFEEQLKAFQELIDEGKVRYIGVSNETSYGVMEFVHAAKVQGLPKIVSIQNSYSLIVRCHFEVDLVEVCHPNNCNVGLLAYSPLAGGVLTGKYIDTNPDISKKSRLNLFPGYMERYNASLAKEATNEYVKLAKKHGLTPVQLALGFVRDRRFTASTIIGATTMDQLKENIDAFTSAPRPLAPEVLDDIESLFKRYRDPTLS

SEQ ID NO: 43486 - protein, 461 aa, Oryza sativa
MVNGEAEAECTRASLLGRYEIGRTLGEGNFGKVKYARHLATGAHFAIKILDRNKILSLRFDDQIRREIGTLKLLKHPNVVRLHEVAASKTKIYMVLEYVNGGELFDKIAVKGKLSEHEGRRLFQQLIDAVSYCHDKGVYHRDLKPENVLVDRRGNIKISDFGLSALPQHLGNDGLLHTTCGSPNYIAPEVLQNRGYDGSLSDIWSCGVILYVMLVGYLPFDDRNLVVLYQKIFKGDTQIPKWLSPSARDLLRRILEPNPMKRINIAGIKEHEWFQKDYTPVVPYDDDDDNYLDSVLPIKEQIDEAKQEKPTHINAFQLIGMASALDLSGFFEEEDASQRKIRFTSTHSPKDLFDKIENVVTEMGFQVQRGNSKLKVMKNGRGSKNLRNPSSFLVCTEVVELGPSLYVVELKKSHGDPILYRQLCERLSDELGVCKTEQIQRTESLEDDLESFDSGSSLPGF

SEQ ID NO: 43487 - protein, 461 aa, Oryza sativa
MEKKASILMNRYELGRMLGQGTFAKVYHARNLASNQSVAIKVIDKEKVLRVGMIDQIKREISIMRLVRHPNIVQLHEVMASKSKIYFAMEYVRGGELFSRVARGRLKEDAARKYFQQLIGAVDFCHSRGVYHRDLKPENLLVDENGNLKVSDFGLSAFKECQKQDGLLHTTCGTPAYVAPEIINKRGYDGAKADIWSCGVILFVLLAGYLPFHDSNLMEMYRKISKGDVKFPQWFTTDVRRLLSRLLDPNPNIRITVEKLVEHPWFKKGYKPAVMLSQPNESNNLKDVHTAFSADHKDNEGKAKEPASSLKPVSLNAFDIISLSKGFDLSGLFENDKEQKADSRFMTQKPASAIVSKLEQIAETESFKVKKQDGLVKLQGSKEGRKGQLAIDAEIFEVTPSFFVVEVKKSAGDTLEYEKFCNKGLRPSLRDICWDGQSEHPSLAQSSTLTQSSKSISRHAI

SEQ ID NO: 43488 - protein, 195 aa, Oryza sativa
MLTTSSHSRHHHAFERSPNHSMMKNIADRNKHDLLQSAMNHAASKYMQRIYPLGIQRSSSNLTLSSLSLSQNSNDSSLSSSNSSWEPKVPLLYGGTFSPWGDVLVSLERRREEDDDKVSDHDVEGGEEDFDCSEPGSLHRCSWITKNSGKKWLLLLLAICFSFFCANFHAVMQICFLVLYFIWWTDSDEQSSQPT

SEQ ID NO: 43489 - protein, 254 aa, Oryza sativa
MLSQFSSSFLEGISTHVDPKLPFISLSKGLELNTLRTMSQIIPQALGNPRQPFIVLSGPSFAIELMNKLPTAMVVASKDKKLAAAVQQLLASPNLRISTSNDVTGVEIAGALKNVLAIAAGIVEGMHLGNNCMAALVAQGCSEIRWLATKMGAKPTTLSGLSGSGDIMLTCFVNLSRNRNVGLRLGSGEKLDEIMNSMNQVAEGVSTAGAVIALAQKYHVKMPVLTAVARIIDNELTPKKAVMELMNLPQVEEV

SEQ ID NO: 43490 - protein, 454 aa, Oryza sativa
MDSSSSFVLVVLILQAVVIGCSSLDELPVQLSNRRLLHDRNHAALLYKDHFPTVGNMTFPTSHQLQNDPNYKPLDSSSHPAEASANKGSSKGFKKWLYIVVIPVAGLIMLAGMAWMFLPCRKKSVATIGPWRTGLSGQLQKAFVSGVPQLQRPELERACEGFSNIVASHPYYTVYKGTLSSGVEIAVVSTTIKSSKDWSKHCEDCFRKKIESLSRINHKNFINLLGFCEEEEPFTRVMVFEYAPNGTLYENLHDEAFDHIDWRSRMRIIMGIAYCIQHMHELNPANVHPDLHSSAVFLSEDCAAKIADLSVWQEVVSDGKKSTANNDHHEPISARLAGNVYSFGILLLEIISGKPPYSENEGSLANLALGCIIKGRSIASMLDSVLESHKENELDVICQIIMECIQSDPTKRPGMREITTRLRETIAISPDAATPRLSPLWWAEVEVLSPVEPR

SEQ ID NO: 43491 - protein, 371 aa, Oryza sativa
MEALAGTAAASLPALPSHQPRSRLAPRSLALPGGRSCCGPLRAAAAGGGGGAKDDAQAGVTPNGSPVIKPKSDSALSSQNGVLGSTKTDKPHTTLSTHTTTDSSGSRAGLFRTPISGGVQSATFAHGLPPPALAVRNLMEQARFAHLCTVMSGMHHRRTGYPFGSLVDFSNDSMGHPIFSLSPLAIHTRNLLSDPRCTLVVQVPGWSGLSNARVTIFGDVYPLPEDQQEWAHKQYVAKHQQWASQQWGNFYYYRMQNISDIYFIGGFGTVAWVDVKEYEAIQPDKIAVDGGEQSLKELNAIFSKPLREFLSSEGEVDDAALISVDSKGIDIRVRQGAQFNIQRLAFDVPHKVETLEEAKRALHKIIKTTSK

SEQ ID NO: 43492 - protein, 287 aa, Oryza sativa; identical to SEQ ID NO: 32351

SEQ ID NO: 43493 - protein, 221 aa, Oryza sativa
MVVFQYGSIVLFNVSDHEADGYLKIVEKHASGLLPEMRKDDYAVVEKPTLEAWMQGGLDFIILRDLSIDGIRTIGSVLGQSIALDYYIRQVDGMVAEFTDINRGMEKTGTFTMERKKLFQLVGKANSNLADVILKLGLFERSDIAWKNANYAQIWEYLRDEYELTQRFWNLDFKLKFVEHNIRFLQEILQNRKSDFLEWLIIILISVEILISVYNIVQEQM

SEQ ID NO: 43494 - protein, 607 aa, Oryza sativa
MASKGTEGGHGGVERKEQQQQRGYQLPRDSRGSLEVFNPSSASSFRTAAAAPKSASPFLAIPDREEDNVVAQQRAAEWGLVLQTDHHTGLPQGVSARPSSGSARTSSEDNPQQQQSAAAIPRVSEELRAALSAFQQTFVVSDATHPNHPIMYASAGFFNMTGYTSKEVVGRNCRFLQGSGTDPHEIDKIRQSLANGSNYCGRILNYKKDGTPFWNLLTIAPIKDEDGRLLKFIGMQVEVSKYTEGKKDTVVRPNGLSESLIKYDARQKDHARSSVSELLLALKNPRSLSESSNNTLKRKSQESLSMSMTEVPSKRSSESGSRRNSRSGTRSSLQKINEVPDQGNRTRKSGLRAFMGFLGMGHGSVEKNMLKPRDEDPLIDSDDERPESFEDEFRRKEMRRGIDLATTLERIEKNFVITDPRLPDNPIIFASDSFLQLTEYNREEILGRNCRFLQGPETDRATVRKIRDAIDNQAEVTVQLINYTKSGKKFWNLFHLQPMRDQKGDVQYFIGVQLDGTEHVQDDAAKEGVVLVKKTADNIDEAAKELPDANLRPEDLWANHSKVVLPNPHMKDTASWRAIQKVLESGESIGLKHFRPVKPLGSGDTGR

SEQ ID NO: 43495 - protein, 688 aa, Oryza sativa
MNVLCEVCGDVGWEELILHCNKCKNATRHQYCFDPVIYDGSLVEWLCDDCLPNGNEVGNLLDISNQKKSSQTELGFSITKETNVKKMKLTKGLWSWGHHRNRSFKARCDGSDSKTKHFASGNAFSSSEVVTGEISKINDCEMEGRGKDEYSSHSALDHASRVEQHINIQNPMGIIKPSLNSIKRLNLSNEKDDRFSSSDHVEGSIPQVNHVERAHLMIEDGSNPTFTCVEHMDLVHKKQLLQPSSLERNSIGTSIPCSENMDVLHKMQLLKPSPLDKKYVDRSIPNSENMDVVLMRRSCTLNNSMGSCEKQVVTKVDPIEPSRQFDRACLEVSSNAHEIHEADDGSKGAQSIKNGKPKKQRRLILPYEEDKDAEPIQVDDMNRQSCGINGQVKKPVEIVASLGDINAGCGQNVCSQLALPTIAVKGQCGLSSTPFIPRYFCVQPIDEPNWTGIMKIGTNYIPVGAHFSNKACKKVCELSMSLPQIMKVTELPKLKAWPKSWGKASVPSAESIGLFFFSQNTRSNKEFDDLVKHVIDYDIVLETDVSFAKLLVFPSVVLPAEYRVFQGKHYLWGVFKRSKDMAERDALVEQNCTTCLADEDVPEQNALDIVPCKALDQEMALVVSDIHHDNQPSLTTSQVVESEASSDKGPSHPVINSPERPMYLILDTSCKVLKKWSCERMDTKLSML

SEQ ID NO: 43496 - protein, 383 aa, Oryza sativa
MVTLILSFNNLSGHIPESFCRMEQLAALDLANNLFEGELPQCFGMTGMAIVLLQNNRFSGSFPVFLERSTKLQLVDLSRNNFSGKLPTWIGDKKELVLLLLSHNVFSGIIPINITNLSNLRQLNLAGNSLSGNIPWRLSNLEAMKEDNYIFNLDIPDDSSYNNLSVFTKRTELFYGPNIFSAVNIDLSSNYLVGQIPEEIASLALLKNLNLSRNYLSGKIPQKIGSLWSLESLDLSRNKLSGEIPPSLSNLSYLSDLDLSHNNLSGRIPSGSQLDTLYFEHPDMYSSNDGLFGFPLQRNYSEGIAPKQGYHDHSKTRHVAEPMFFYLGLVSGFVVGLWVVFCTILFKKTWRIAYFSLFDKACDKIYVFTVVTWARVSQKTNVQ

SEQ ID NO: 43497 - protein, 243 aa, Oryza sativa
MSCKLSGMATDLFGLHRILSSLLEIEGTRTTREIKSKDSIQKLAKVLLKANWQKDLHHILVEPMEKSKQDSRESVRRTIMEHDEVFRQQVHELHRLYRVQKSLMAELGGEKHRFQSRTGETQEMMQGPLSNLKNSPSTSETTQSAHLGSTQHCAPEQVPEHSILQEYKPATCLNFFTEETSRTQEFRREGGRSTGGENWSASDPSVENDLDLKLTIGPSLHATKAPHWLFSGSRERNPSGQHR

SEQ ID NO: 43498 - protein, 294 aa, Oryza sativa
MSRVSSYTGLSSTSSFGGRRRGSWCTPPRLFLEDQFDVIPSEAGSSHNSTSKRKEDEVRRKKGSGGIKISPWALARLNAEEVSRVAAEARKKSKVLLPIRKDEYAVGHETDSSYGGTSSSRIDLGPDNKRRTSRRARPHNDFSLKPVAKISADALDSHGSELVPETLSSLAPLQLEARSAFHPSRAASSANGGGSSPDSSLDSPDLHLYRVSAVSSSAAEDLQLTTLTAPGSTPQQGIELSRSTSDGYEASGGEDSDRIPSRIVHRSSNWASIILSSDQSVASSGILVPKNRLS

SEQ ID NO: 43499 - protein, 553 aa, Oryza sativa
MLLACDCDDDAQTAENGNAPMLSNYRAQPAPPLAEPLLLDKPQRAHWLRQLKPWRRNAADDHLSAGIAINWSSVRSATKDWITNPMNIAMLLWLLCVAVSGAMLVLLLLGLLDGAFPTPAARNHWIEINNQVLNALFTLMSLYQHPVLCHHLFLLCRWRPADAADLRAAYFKDGAGPRHGERAHMAVVVALLHLTVACQYVLCGLYWGYTKKTRPELVENGFFVLGVVAPVVAVVYTVCSPLGKDNYGELACPNAFDSVSQHKCTGHAVVEPEWAGGMFDCGGDATAWWLSLSCTFCAFGWNMERLGFGSMFVHTATFVLLCFAPLWVMGVSALHIHDVVIGDMVGGAGALLCVCGLLYGGYWRIQMRERFGLPASTACCGSPSVTDYARWLFCWPCALAQEVRTESLYHIDCETFYKKLPVVDDVEDEKRLPLLASHHVQFHEPPDTMIMAASEGSNDHVVIVHEEMVPPAVQVAVEQVVVEGDKSEEECSAVHDEKIMGSPLPESVVIVDDDEIPASLSDGSWTVEKVKRLINVVTLVSLLILLYTRGFIR

SEQ ID NO: 43500 - protein, 360 aa, Oryza sativa
MCVEESEGAERLDFGEPAAAAADAGKSKSKSPDELPSPRMERVCENTTAADFKQNKSGNFVPNIRSGDWSDIGGRQYMEDTHVCITDLAKNFGYQSVDNEAISFYGVFDGHGGKDAAHFVRDNLPRIIVEDADFPLELEKVVRRSFVHADNQFAKTTLSSGTTALTAMIFGRTLLIANAGDCRAVLSRCGTAIEMSVDHRPCSLSEKLRVESLGGYVDDGYLNGLLGVTRALGDWHLEGMKEAGNPGGPLSAEPELKMITLTKDDEFLIIGSDGIWDVFSNQNVVDFARRRLQEHNDVKSCCREIVEEAIKRGATDNLTAVLVSFHLEAPPQVRVSRPGRVARSISAEGLNSLRTLLRNQ

SEQ ID NO: 43501 - protein, 119 aa, Oryza sativa
MPVIVPALTLEPFVLWEEISQGPSAEANMAMTLLDFKNMLADRARRIRYWKTKLEVVELKKIMVQVKKDQAMEALRGSRGVVQLVPQELLHVDGEGLHGALSSPRRSRGVGGWLYLVVE

SEQ ID NO: 43502 - protein, 244 aa, Oryza sativa
MAASARPVGVGGERATSFAMACSLLSRYVRQNGAAAAELGLGIRGEGEAPRAAPATMSLLPGEAERKKETMELFPQSAGFGQQDAITADSAADAREQEPERRQLTIFYGGKVLVFNDFPADKAKGLMQLASKGSPVAPQNAAAPAPAAVTDNTKAPMAVPAPVSSLPTAQADAQKPARANASDMPIARKASLHRFLEKRKDRLNAKTPYQASPSDATPVKKEPESQPWLGLGPNAVVKPIERGQ

SEQ ID NO: 43503 - protein, 485 aa, Oryza sativa
MKQSMRSRQEPRRVSNGVIIAAMLLSLCVLSIVKARYCSTPFVKPDDQLQEQMNSSIRMETDEPATMAAGEQEEDEEEESSGGGGAEPEVSATPAVVVTAAAGGGGGKRKPTCRMTSKRSERCEARGDIRVEGNASTIYIGGIDKEWKTKPYARYHDPVAMAVVREFTLKPVTESSPACTRNHSVPAFVFSNGGFSGNLYHDYTDVLVPLFLSTHQFKGQVQFLLSGLKPWWVNKFNLFFRQLTKYDILDIDNDKDVHCFPRIVVGATFHKDMGVDPKRSPGHVSVVDFKRALRRAFGLERVAASRGGATGNGKPRLLIISRKNSRRFLNEREMAQAAAAVGFEVRIAEPDQHTDMSTFAQLVNSADVMIGVHGAGLTNMVFLPRGAVLIQVVPFGGLEWLTTVTFKNPAKDMEVTYMDYNVQLEESSLIDQYPRNHQVLTDPYAVHKQGWDALKTAYLDKQNIKMDMDRFKKTLQEALDRLPPA

SEQ ID NO: 43504 - protein, 454 aa, Oryza sativa
MSCSRSAAMIDCPRLLLAAARASPYPSSAAHRRVCTAGVPPVPVYCRVSHRRRSSVPVQSASSGSGSQSSVAESSEATEWAMQDFYALRKDVELAVARVSEVRQSAGLDQLEEEIASLEKKSADSSLWDDPSKAQEVLVALTEVKDRVKLLNDLKLQVEEAETIVKLTEELDSIDTGLLEEASKIIKALNKALDNFEMTQLLSGPYDKEGAVINITAGAGGTDAQDWADMLLRMYVRWGEKQRYKTRVVEKSPGEEAGIKSATIELEGRYAYGYLSGEKGTHRIVRQSPFNAKGLRQTSFAGVEVMPLLPEESMDVEIPEEDLEISFTRAGGKGGQNVNKVETAVRMVHIPTGIAVRCTEERSQLANKIKALSRLKAKLLVIAEEQRASEIKQIRGDAVKAEWGQQIRNYVFHPYKLVKDVRTACETSDITGVMDRRAGHLHQSLPQVQALCRC

SEQ ID NO: 43505 - protein, 215 aa, Oryza sativa
MTNSVEEKDFREMAAQELLQALEEEKQLQHKLFRSLLPKDEADERDCILGVRAGTGGEEASLFAMDIFKMYEKYSQKNGWKFDAIDIMESALKGYKEASGTISGPGAYGKLKFESGIHRVQRVPVTEKSGRVHTSAVSVAILPQADEVDVQLRNEDLRIDTYRSGGSGGQSVNTTDSAVRITHVPTGTVVAIQDERSQHQVAIHTQSFLCCSFLL

SEQ ID NO: 43506 - protein, 747 aa, Oryza sativa
MFVFFTGGIVFLTLIFNGSTTQFLLHLLGMDRLAATKLRILNYTKYEMLNKALEAFGDLRDDEELGPPADWVTVKKYITCLNDLDDEPVHPHAVSDRNDRMHTMNLRDIRVRLLNGVQAAYWGMLEEGRITQTTANILMRSVDEAMDLVPTQELCDWKGLRSNVHFPNYYRFLQMSRLPRRLITYFTVERLESGCYICAAFLRAHRIARRQLHDFLGDSEVARIVIDESNAEGEEARKFLEDVRVTFPQVLRVLKTRQVTYSVLTHLSEYIQNLQKTGLLEEKEMAHLDDALQTDLKKFKRNPPLVKMPRVSDLLNTHPLVGALPAAMRDPLLSSTKETVKGHGTILYREGSRPTGIWLVSIGVVKWTSQRLSSRHSLDPILSHGSTLGLYEVLIGKPYICDMITDSVVHCFFIEAEKIEQLRQSDPSIEIFLWQESALVVARLLLPMMFEKMATHELRVLITERSTMNIYIKGEEIELEQNFIGILLEGFLKTKNQTLITPPGLLLPPNADLNLFGLESSAINRIDYCYTAPSYQVEARARILFVEIGRPEIEADLQRSASLISQTLELPRTQSKEHSGLLSWPESFRKSRGAQNGASLTEIRDHPASFSARALQLSMYGSMINDMKSGQGQGQRRQRHRHTKASSNKAHSSSYPRVPSRSSNTQRPLLSVQSEGANMTTARQAAAAGASLPPEPEEAGRRRRRQRKAIEEDEDNSSDESAGEEVIVRVDSPSMLTFRQPSSAADR

SEQ ID NO: 43507 - protein, 177 aa, Oryza sativa
MQAKESKKSRDRGRDRVKWNEENLNDIESTKPVREKITEPKTPYHSMIDEDDGTVSPKRTIEESVDKSTHADAIKTALMEAVSSGKLSAREHLESCSNEEEEEEEEEEEEEEEEEEEEEEQEEEEEEEEEEEEEEEEEEVAIKQGTDFEEQRKAHYDEFRKMKELRRRGTPSQEGDE

SEQ ID NO: 43508 - protein, 103 aa, Oryza sativa
MLRCLVVFIVSPSFLGRYRDGVSDESDRIADPPRVRVRRCGAYAFVLDLIFFSDLDLVPNSRLLILSMIRVGVIKLEFPLIFGGYPEFGTRISIRSMVSGEAT

SEQ ID NO: 43509 - protein, 378 aa, Oryza sativa
MGWGNTLTRRLKVFSMALFIYFDYKAVQKRVKWVGAGKKDAIWTKTHERNARRVLNLMIELEGLWVKMGQYLSTRADVLPEPYINVLKQLQDSLPPRPLEEVRGTIEKELGKPMNDLFANFVLDPLATASIAQVHRATLVDGREVVVKIQHDGIKDIILEDLKNAKSLVEWIAWAEPQYNFNPMIDEWCKEAPKELDFNHEAENTKAVSSNLSRKTNCESGAVSSAVDVLIPEVIQSTDKVLILQYMDGIRLNDNDSLEAYGVDKQRLVEEITRAYAHQIYVDGFFNGDPHPGNFLVSKEPPHKPILLDFGLTKRISQSMRQALAKMFCHALRETMWHCCQPLRRWGLSCGLTCLSRLWRSLQYFFGSPLQQMKQRRT

SEQ ID NO: 43510 - protein, 429 aa, Oryza sativa
MTSSGAPPPAAMAVDDAEDDQLASMSTEDIVRASRLLDNEIRVLKDELQRTNLELESFKEKIKENQEKIKLNKQLPYLVGNIVEILEMNPEDEAEEDGANIDLDSQRKGKCVVLKTSTRQTIFLPVVGLVDPDKLKPGDLVGVNKDSYLILDTLPSEYDSRVKAMEVDEKPTEDYNDIGGLEKQIQELVEAIVLPMTHKDRFQKLGIRPPKGVLLYGPPGTGKTLMARACAAQTNATFLKLAGPQLVQMFIGDGAKLVRDAFQLAKEKAPCIIFIDEIDAIGTKRFDSEVSGDREVQRTMLELLNQLDGFSSDERIKVIAATNRADILDPALMRSGRLDRKIEFPHPSEEARARILQIHSRKMNVNPDVNFEELARSTDDFNGAQLRAVCVEAGMLALRRDATEVTHEDFNEGIIQVQAKKKSSLNYYA

SEQ ID NO: 43511 - protein, 493 aa, Oryza sativa
MAQMGVMDASLCPPFHGRSVDKGTRRRPRWVLLDKLAYFAGADVRNATTATSKTREGHEIQVTLCTAAQPQLVSYVCVHSPTLNPASDDYAMEPQIIAAHDDLLLIRLILGRGNRFTVSLADYFVYQASIADDIPPSLTRITHPGPMITFTNHEVAILHYIPEDTHHHPYRPPGEYKLHLYHSHTQQWTTTHFNLAATMPDLSPFHHRTTNVINLTHQSPGLMAFVDLWQGLLLINVLDKVQPAAPRYIPLPPPLKQGKVISGRVDPTDVRDIAVDAKGHINFVELEVDAIQHESDRTGYISQGWTVAKWSCSNTESDDCCWHMDCKLNASDISHLMPPELPNYCHPTPTLERLHIGHPLLSLDNNGDVVYFMAKVDHRDYKAWVIPVDMRKRLIHEPAVFEGAPRTLGIGSTFIQTTISNYPQPAPGKKRKQKQPGMLLGSSSKRKSETPYLTNVVLPLPTRHGVQKQPDAEEVAWKLNFQIICYYNKLGYE

SEQ ID NO: 43512 - protein, 350 aa, Oryza sativa
MHTTMVALYITICSILFIVSKMLISFLLYKKWARKKRIIENSLTGGKMVMFRSAAMQSLSPKSFLTMIMGLSNKDIIGSGGYGTVYRLSVGEKAAFAVKKLSRGSAEMDRGFERELDTMGDIKHRNIVPLCGYYAAPHFNLLIYELMPNGSLDTILHGKEETRRALGWEARHKIAAGVARGLAYLHHDCIPHVIHRDIKSSNILLDHNMEARVSDFGLATLMKPNHSHVTTVVAGTFGYLAPEYFETGRATTKGDVYSYGVVLLELLTGMRPTDESFLENGTRLVTWVKETMEEKREEHAVDSALESSFPAEEVKLVFKVADKCLESEPCNRPTMAEVVKLLEQAKNTTA

SEQ ID NO: 43513 - protein, 136 aa, Oryza sativa
MAVDDLNHHLIAVGVGEEAATAHCGLRTMAHAACAEYGAAGGVAGHIGRRRQVGGAGLRSRLHQVPQRPLRHVLRLRPPPLPTSFARQRIHGFLRPRHRLHPQVAAPLLRPLPRRPAACRQGRLACFCPQDPLHHM

SEQ ID NO: 43514 - protein, 485 aa, Oryza sativa
MLPFVRSLRRLGPAAADGRLLLPLAPLSSKAAAPPPEYEMPSVTWGVIQGRKERLVSRVLALDFLRSAGVSDPAGELEAVELPSSLEVLQERLDFLLRLGLSTDDLSAYPLLLACSLRKNAIPVLSYLEKLGVTRARLAAFVRAYPACLHASVAVDLTPVVKSLRGLDVDRQDLPRVLERYPDILGLKPDGTISTSVAYLVGIVGVAPRDIGPMVTHFPFFLGMRVGTTIKPLCEYITSLGLPMRILARILEKRPYILGYDLEETVKPNVEALLSFGIRKEMLPLVIAQYPPILGLPLKTKLAAQQYFFNLKLQIDPDAFACAIEKLPQLVSLHQNIILKLVEFLRGRGISNEDVARMVVRCPQILLLRMELMKNSLYFFKSEMKRPISELLDYPEYFTYSLESRIKPRYMRVSTKGIRCSLDWFLNCSDQRFEERMRGDFIEGDAPGPSFTMGGKLQMPGSQLVSDDDNAESDDEVLYRRTVML

SEQ ID NO: 43515 - protein, 366 aa, Oryza sativa
MVLGNVAILVGSGILGSVLVGGDAKLPSAGEVLSGAAKFVKKHGNEGKDTSSNTDTHTAQLLSQVNHLRQEIQSLGSRPVTVVTNAARSGPGTFTITAVVVAGAVGYAYIKWKGWKLSDLMFVTKRGLSDACNVVGSQLDKVSDDVTSARKHLAGRIDRVDISLDETQEIIEGTRDEVTVIHGDLSAFQEDLQSVNLVVRSLESKLVSLEYTQDHTANGISDLVEFTQKATIRQVPAASVPPAIGSSERVVRRVSSLPQSTALPALPTTAPAAEPSPRAEVPQEEQWGFVSKASSSREGLGRLQQQRSVVTRTSSMREGSPESSNGASSSTGASTGRNTSTGTNTSTGRFGGLRLPGLGFLASSTS

SEQ ID NO: 43516 - protein, 354 aa, Oryza sativa
MGVGGEKFQLGTVGALSLSVVSSVSIVICNKALMSSLGFNFATTLTSWHLLVTFCSLHVALWMKFFEHKPFDSRTVMGFGVLNGISIGLLNLSLGFNSVGFYQMTKLAIIPCTVILETLFFRKKFSRSIQLSLSVLLFGVGVATVTDLQLNAVGSVLSLLAIITTCIAQIMTNTIQKKFKVSSTQLLYQSCPYQSLTLFLIGPFLDGFLTNQNVFAFDYTSQVVFFIVLSCLISVSVNFSTFLVIGKTSPVTYQVLGHLKTCLVLTFGYVLLHDPFSWRNILGILIAVVGMVLYSYFCTLEGQQKNAEVSPQQAKEGDSAPLISDSLSKVENGGGVVDDEPLKVPMWSSKYSRA

SEQ ID NO: 43517 - protein, 423 aa, Oryza sativa
MATADVSRPSSSAPTAAAAGADGHGAKGSAFRGDGLRPYYQSRIHDLQLQIRQGTDNLSRLEAQRNVLNSQVITLGEELKVLHEPGSYVGEVVKVMGKSKVLVKVHPEGKYVVDVDKSIDITKLSPSTRVALRNDSYMLHLILPSKVDPLVNLMKVEKVPDSTYDMIGGLDQQIKEIKEVIELPIKHPELFESLGIAQPKGVLLYGPPGTGKTLLARAVAHHTDCTFIRVSGSELVQKYIGEGSRMVRELFVMAREHAPSIIFMDEIDSIGSARMQSGSGGGDSEVQRTMLELLNQLDGFEASNKIKVLMATNRMDILDQALLRPGRIDRKIEFPNPNEDSRFDILKIHSRKMNLMRGIDLKKIAEKMNGASGAELKAVCTEAGMFALRERRVHVNQEDFLMAVAKVMKKDTEKNMSLRKLWK

SEQ ID NO: 43518 - protein, 253 aa, Oryza sativa
MVGMMETSPDDGGGGEAMAAAQQTEEDMGPPWLRPLLSTSFFVACASHPELSKNECNLFCLGCTGDALCAYCLPAHRDHHVVQIRRSSYHNVIRVSEVGKLIDISHVQTYVINSAKIVFLNGRPQARPGKGVTNTCEICCRSLPDSFRFCSLGCKLGGMRWDPSLTFAIRPKRGQDSGDGGSGSDYDSFSPKKARRAAAGYDQLGRFDRGMIRWSDDEGSKSNTAPITPTTPPISRCRPSRRKGIPHRAPFYG

SEQ ID NO: 43519 - protein, 262 aa, Oryza sativa; identical to SEQ ID NO: 30149

SEQ ID NO: 43520 - protein, 561 aa, Oryza sativa
MLATPGALHHLLLLPPPPHTQLAFHHAVGGVPAALLPLPRPRRVAASASTSRRGGARRRAAGARVRASVGEEAPPVVTEEASTSGGPTKFSTKIPVGDRHILVETGHIGRQASASVMVTDGETIVYSSVCLADTPNDPSDFFPMSVHYQERLSAAGRTSGGFFKREGRAKDHEVLVCRLIDRPLRPTMPKGFYYETQILSWVFSYDGIHSPDSLAITAAGVAMALSEVPNKQTIAGVRVGMINDQFVVNPTTEQMDDSELDLVMAGTDSAILMIEGYCDFLTEEKLLQAVETGQGAIREICKAIDGLVQKCGKKKMFDAIDLPPPELYRHVEDISGDELVKALQIKEKILRRKALSALEEKVITILSEQGYVAKDESSGVSENLADVIEEEDEDEVIVDGEVDEGEVHIKQVSRKPPRQLFSEVDVKLVFKEVSSKFLRRRIVEGGKRSDGRSPCELRPINSQCGLLPRAHGSALFTRGETQALAVVTLGDYQMAQRIDNLVDTEESKSFYLQYTFPPSSVGEVGRIGAPNRREIGHGMLAERALEPILPPEEDFPYTIRV

SEQ ID NO: 43521 - protein, 350 aa, Oryza sativa
MPLLPASPPPLSLSRSLAAAAAASRRGRAVTCAAARGAASSSSASFDAAGFEAERLRLDAEARAGMASAAAVAGAEAADPKAWKWAIRKRVWDALEAEGVARDPRPVHHRIPNFDGAAAAADSLGRLDVFQDAQCVKVNPDSPQKQVRFLTLSGDKKLLTPQPRLRTGFFSVLESHMIPIGCIPEACTSVGAAKYGRPIGLDEKIKVDLIVIGSVAVDPSTGARLGKGEGFAELEYGMLRYMGSISDSTMIVTTVHDKQLVNDIPVEKLLVHDVPVDIICTPTQVIFTNTTIAKPQGIYWEKLSPEKLGQIRILQELKRRIESETGTTLPCGPSEKLPPTAQRRRRKRRR

SEQ ID NO: 43522 - protein, 324 aa, Oryza sativa
MLPEGLPTGMMKEFQETRRCAVMVRESFLDLRDNFRRIVDPAIAAKRKDAKRQIVLDGPRSCGKSIALAMLVHWARTEGWLVFYVPQGKDWSHGGFFYRNTYNDLFDTPIQAAKILQDFLKYNENRWQQLPCQIFEPIPLGEGAGVGMMKGADTVEMPEGSTLYDLIQTGITHSHASVGVVVRLRKELSLVKDVPVLFAIDQYNSWFTFSEFQEPVTVRSCRPIHAKELTMVNVYRPMLHNDMMVGAFSHSTAVGKLRQDLPDVPSDARVMFPRYTVNEAETVCHYYMRQKIIKRENFSEEKWKKIYYLSNGNGSEMRWLAAFI

SEQ ID NO: 43523 - protein, 868 aa, Oryza sativa
MNITQILLSAQSADGNLRVVAEGNLKQFQEQNLPNFLLSLSVELSDNEKPPESRRLAGIILKNSLDAKDSAKKELLIQQWVSLDPSIKQKIKESLLITLGSSVHDARHTSSQVIAKVASIEIPRREWQELIAKLLGNMTQQGAPAPLKQATLEALGYVCEEISPEHLEQDQVNAVLTAVVQGMNQTELSPEVRLAAVKALYNALDFAESNFANEMERNYIMKVICDTAVSKEVEIRQAAFECLVAIASTYYVHLDPYMQTIFNLTANAVKGDEEAVALQAIEFWSTICDEEIELQEEYEGSDDANSTVNYRFIEKALPSLVPMLLETLLKQEEDQDQDDNVWNISMSGGTCLGLIARTVGDAIVPLVMPFVEGNITKPDWHCREAATFAFGSILEGPSVEKLAPLVQAGFDFLLNTTKDPNSQVRDTTAWTLGRVFELLHSPASANPIITSANLTRIMTVLLESSKDVPNVAEKVCGAIYFLAQGYEDAESISSVLTPFLPNLIAALLSAADRADTTHFRLRASAYEALNEIVRVSNISETSGIIGQLLQEIMRRLNLTFDLHILSSGDKEKQSDLQALLCGVLQVIIQKLSSSDAKSIIAQTADQLMFLFLHVFACHSSTVHEEAMLAIGALAYATGTDFVKYMPEFFKYLEAGLQNYEEYQVCSISVGVVGDICRALEDKILPFCDGIMTVLLKDLSNSMLNRSVKPPIFSCFGDIALAIGDNFEKYLPYAMPMLQGAAELLAVLDHTDEDMVDYGNQLRRGIFEAYSGILQGIKGAKAQLMIPYASHLLQFTEAVYKDRSRDESVTKAAVAVLGDLADTLGSSSKDLFKSNLFHVEFLRECHDLDDEVRDTASWAQGMINQALVS

SEQ ID NO: 43524 - protein, 153 aa, Oryza sativa
MHVASSISSLIKGSEFKYLMKLFLIWQIMMFQTRVLLGGMSMYDRYQDWRLDVDNMTYEELLELGDKIGYVNTGLREDEIVRNLRKVKHPAFDSSFRYSTEMEKKCSICQEEFEANEEMGRLDCGHSYHVYCIKQWLSQKNVCPVCKTAVTKT

SEQ ID NO: 43525 - protein, 581 aa, Oryza sativa
MAAAASPPVPSKVDASSRPDRSPRPQSLEISWDSQAALCKRAESCELEAEVPSINPTLLPVLEDLLIELYAILRPKPDDYEQRHLMIDVFNKIAEEIYGKKKGFPVVEAFGSFTMDLFTSKSDLDLSVNFNADFHSQFARKDKISVIRNLAKVLYAHQRNGRCHGVLPVVTAKVPVLKVIDKGTGVECDISVENKDGMSRSMIFKLISSIDERFQILCYLMKFWAKAHDVNCPRDRTMSSMAIISLVAFHLQTRRPPILPAFSALLKDGPDFPSIQRNVSLVEGFGSRNKESVAELFVSLMSKLLSVEGLWEQGLCASNFEGSWIFKTWERGVGNLSVEDFLDRSQNFARAVGKEEMQKISECIRVAVLNLNNFFRGKIDAPKLKNLLFEPPHQDELISNPSLKRPKRKDHPTHGPESNPQQQKKAKHIIGPESNQKQQKKVKHTVNPGPAASRSATNLHRPTAFVPQIRPIQPINQVSHIPQPLVDPMFAYGLPPQQHLHSAPLYCQGLLGQQQGNFIHLNPGIQPQQQAQHMFVPLLEQQPVINGFHPYDFHLAQLIQHNENIALQRNIAYGTYPYYRR

SEQ ID NO: 43526 - protein, 565 aa, Oryza sativa
MSSAGIATLSPLLDQFCFAPHGEPRLQQLDSIVIFLAMPGVAPMPMRVLHSDSVASVKLRIQQFKGFVTTKQRLVFSGHELSLNNSHVRDYGLTDGNVLHLVVRLADLRAISIETANGKKFQFQVESCCNVGYLKDKLSAESGQQLGSLKDQRLVFDGEELEDNQLIADISKKGAAVIHLFIRRPAKVQTQQGDKETVVTVVTPKDNDNLQTDALNLAKPAKGKPAPVEPIIANGKVKLSPAVMEMIYSTISGIENGYLPVMSTEGSGGVYFMKDSSGESNVAVFKPIDEEPMAKNNPRGLPLSTDGEGLKRGTRVGEGALREVAAYILDHPVYGCKSCDVPGFSGVPPTALVRCFHMGKGSNKVGSLQLFVDNNGSCEDMGPRAFPVKEVQKIAILDIRLANADRHAGNILVCQDGEDHLKLIPIDHGYCLPEKFEDCTFEWLYWPQAREPFGPETAAYIGSLDADKDIALLKFHGWALSPQCARVLRISTMLLKKGAERGLTPYDIGSILCRQTVKKESEIEAIIEEAEDAILPGTSEETFLETISEIMDFHLDKLAVKLKKF

SEQ ID NO: 43527 - protein, 287 aa, Oryza sativa
MAGVGVEEEEAFEHTLLVVREVSVYKIPPRTTSGGYKCGEWLQSDRIWSGRLRVVSCGDRCEIRLEDPASGDLFAACFVLPGQREAAVETVLDSSRYFVLRIEDGRGKHAFVGLGFGERNEAFDFNVALSDHEKYVKREHEKEAADGGAGGGEENDDGQIDIHPAVNRRLKEGETIRINVKNKPSTGSGMLSSAGLSGGASAKPKASMLLAPPPGSAGKLRSPLPPPPNDPAAARMNSGSNAGIRAPKEPAKRNSDAFSDLSAMKQNLPSSTESAQTKSTGAGWAAF

SEQ ID NO: 43528 - protein, 596 aa, Oryza sativa
MAGVAALFASPAFPFPSTSSVSSCSCRFRPAVARAPRHQPPGRRVTRRFDEVEGVSKRRRGIGGGGGGGSQASSSSSRKDRGLAVDFKESQVSDFEDLEEDKFLNAVVKVYCTHIAPDYGLPWQKQRQHASTGSAFMIGDGKLLTNAHCVEHDTQVKVKRRGDDKKYIAKVLARGIECDLALLSVENEEFWRGTEPLQLGRLPCLQDSVTVVGYPLGGDTISVTEGVVSRIEVTPYAHGTSDLLGIQIDAAINPGNSGGPAFNDHGECIGVAFQVFRSDEAENIGYVIPTTVVSHFLNDYQKNGKYTGFPCLGVLLQKLENPALRESLKVPSSEGVLVRRVEPTAPASKVLRKGDVITSFDGVAVGCEGTVPFRSTERIAFRYLTSQKYAGDVAQLGIIRAGNTMKVQTVLQPRKHLVPFHVEGGQPSYLIVAGLVFTPLTEPFIEEECEETLGLKLLAKARYSLSTFEGEQIVIVSQVLAHEVNIGYEHMGNQQVIKLNGTVVKNIHHLAHLVDNCKDKFLTFEFEDDFLVVLDREEATTASSDILKEHAIPSVRSSDLSEPYVDTEQEIQKPNDDFGDSPVTNYEMGVDCLLWA

SEQ ID NO: 43529 - protein, 633 aa, Oryza sativa
MGQLHNLMLLLPCLIFSTLLRTEAMSVAPVKVSTTPIFPTIPRGQTNKDFQVLLRVEAPPAADLNSHVPLDVVAVLDVSGSMNDPVAAASPKSNLQGSRLDVLKASMKFVIRKLADGDRLSIVAFNDGPVKEYSSGLLDVSGDGRSIAGKKIDRLQARGGTALMPALEEAVKILDERQGSSRNHVGFILLLTDGDDTTGFRWTRDAIHGAVFKYPVHTFGLGASHDPEALLHIAQGSRGTYSFVDDDNLANIAGALAVCLGGLKTVAAVDTRVSLKAAELSGGGARIVRVDSGGYESSVACGGASGEVVVGVLYTGEVKNFVVHLHVPAASSTTLTFSSVECGGYYDAATVCDHCHHRHQQQLLAVGYSYSHAPGAASAAVSVEGHGVFVERPEVAAVFVSVDGVGVGGGRQRQIPLPSPVVMQHMVRFELLELVAGFAEAEMASKPAATTTQPRAADVLQGKWEEFRRARQFWGGVELDGVEKEVDAMVASLRSGLAYVSSLVSSHQMQRATAMGSPEKVVAEFMTPAMVIIVEEARKLPPPPPPPPAAAEAARERPSGCDGGDDIHHVIRQRLELWSKVRREVPLMYQPSPEQEDVQLTAVFREASLEAIDRAMHHDIYLAVVHVSNQRRC

SEQ ID NO: 43530 - protein, 568 aa, Oryza sativa; identical to SEQ ID NO: 36797

SEQ ID NO: 43531 - protein, 702 aa, Oryza sativa
MAALPPTPRPRVLAAAPCHVPSRRRRRVCDGLCSAAAADNGCAESPDVVLECKRLNRLVKSGRLADALDLFDRMPRKNVVAWTSVMSGYTRNGRPEAALAMFADMVESGVAPNDFACNAALVACADLGALRAGEQVHSLAVRAGFAGDAWIGSCLIEMYSRCGSLPAAKEVFDRMDSPDVVGYTSLISAFCRNGEFELAAEALIQMLKQGLKPNEHTMTTILTACPRVLGQQIHGYLIKKIGLRSQSVYSSTALIDFYSRNGEFKLAKAVFDSLHCKNVVSWCSMMQLYIRDGRLEEALQVFGDMISEGVDPNEFALSIVLGACGSIGLGRQLHCSAIKHDLITDIRVSNALLSMYGRTGLVEELEAMLNKIENPDLVSWTTAISANFQNGFGEKAIALLCQMHSEGFTPNGYAFSSVLSSCADVASLDQGMQFHCLALKLGCDSEICTGNALINMYSKCGQMGSARLAFDVMHTHDVTSWNSLIHGHAQHGDANKALEVFSKMRSNGIKPDDSTFLGVLMGCNHSGMVEEGELFFRLMIDQYSFTPAPSHYACMIDMLGRNGRFDEALRMINDMPFEPDALIWKTLLASCKLHRNLDIGKLAADRLMELSDRDSASYVLMSNIYAMHGEWEDARKVRRRMDETGVKKDAGCSWIEINNEVHTFASRDMSHPNSDSIYQMLGELVAVMQDFDELEPFDVHIC

SEQ ID NO: 43532 - protein, 525 aa, Oryza sativa
MATSPLPRWAATPSPSRPLWRSSGGGGAIVSKLLRSPFTTVLEAVRGRAAPDDTPPPVQAPPAPEHNCAGAFDGIAVVAGDGREERLDGGVFLTWEDVWVTAVDSGGKAATILNGVSGSARPGEVLAIMGPSGCGKTTLLDTLAGRLDSNLKMKGQILVNGRCQQLAFGTSESEDRLRCMPAVADEAIDILVNSYKSSNTSEVAKQDMRHINEMDRVTIGRNRAGFITKTLVLTRRSFVNMYRDIGYYWLRMAIYISISACLGTIFYNMGYGSDSIRARSSMLMFISTMLTLMAIGGFPSFVEDMKIFSRERLNGHYGVTTFVISNTLSSTPYLLLIAIIPGAIAYYLSGLQRQIEHFVYFTLVLCSCTMLVEGLMMIVATIVPDFLMGIITGAGIQGIMMLTSGFFQLPNSLPNIVWKYPMYYISFHKYALQGFYKNEFLGLVLNLEGPITVSGEKVIAELFQVETGHSKWVDLAVLCGMIMTYRLLFVVIIKVLDIVKPILKGMTFRCNTKCIHGIENLCAPS

SEQ ID NO: 43533 - protein, 376 aa, Oryza sativa
MGNCWFKGNPYFNRVSSNATKSESPKMQSPSERKEKDDSMLPSNAKEVEELRRESARNPLIAFTFEELKRITKNFRQDSLLGGGGFGRVYKGYITSDLREGLTIEEPLRVAVKVHDGDNSFQGHREWLAEVIFLGQLSHPNLVKLIGYCCEDDHRVLVYEFMPLGSVESHLFSRVMVPLPWFTRMKIALGAAKGLAFLHEAEKPVIYRDFKTSNILLDEEYNAKLSDFGLAKDGPVGDKSHVSTRIMGTYGYAAPEYIMTGHLTAMSDVYSYGVVLLELLTGRKSLDKSRPVREQTLADWAFPMLIQKKKVLGIVDPRLAEDYPVKAVQKTAMLAYHCLNRNPKARPLMRDIVATLEPLQQMEEDPSISLVSGTEV

SEQ ID NO: 43534 - protein, 117 aa, Oryza sativa
MIFGVFFGWGAWSSWMGSTAFVVASSLVVVRRMRLRLLFVCCGWSRWTRRRAHDAMVFWCVGIWFRDAAMLLLLGWGDHSICVAIGFCVFFFFGLCMRCFIMQACGCLLPPIPWSIS

SEQ ID NO: 43535 - protein, 952 aa, Oryza sativa
MDDDLWQVFEDEKGGIGRDELAWPCKYKKPREFCYVMFTSGSTGKPKGVCGTEKGLLNRFLWMQRWKPLCSDDLLLFKTSVSFVDHLQEFLSAVLTCTTLVIPPPNDWRANPASLANLIKAYGISRMNLVPSLMEIILPSLEKNLSWGHNPLKMLIFSGENLSILLWKRVHEILPETTIVNLYGTTEVSGDCTFFDCTDLPILLKREELTSVPIGFPISNCEVCIATDAEVADEGEMHVTGACLFAGYLEESMASNHTEDNGSSTYYRTGDFARRLKSGEFIFLGRKDRTVKIYGQRFSLQEVESTLNEHPDVSAAAVTFQNNEFLDFRAYLVLKSSAASVEDCQRRKRYKSFEVIMPSIRSWLIMKLPPAMIPRFFLPMESLPLTSSGKIDYMKLSSLKCALESCETETERITVNPHLQVIKKAFSDALLVDEVSEFDDFFTLGGNSISAAHVAHKLEIDMRMLYIYSTPSKLLDALFTKHGCLLSSSHEPHPKKGLDISSSIHSSFNPIATSVDDNFPEVKAHINGDGECAHDAISGNYANEVDGQLNRNVPLSNDRYQTKSLLLDTCSNDRNSVDVSPWILNFCLVKKWSIGRCNRFMHGYEDKLQIEDVCSYVPYNKRGYLQALWNIPLGSCVDASPLLVSNNGMLSIFIGSHSHRFLCIDGCSGSVRWSVKLEGRVECSAAITGDFSEVVVGCYKGKIYFLDLLTGKQAWTIQTDGEVKMQPAVDMIRNLIWCGSYDHHLYALNYKDRCCTYKISCGGSIYGSPAIDMTHNMIYVASTSGLVTAISLEVSSFKIIWQYEAGAPIFGSLAIHHHGGKVICCLVNGLVIALNSHGSVVWKASVGGPIFAGACLSSGLPTQVLIPSRDGRLYSFDTTSGALLWKYEVGDPITASAFVDEVLTATSPGASERFACICTSSGQVHVIRIRADAKERKLMEVFVMTWCKDLLQ

SEQ ID NO: 43536 - protein, 717 aa, Oryza sativa
MASPEREEEEAARSPPPKRPRRDGDAPPEPQPARVGLNPADCDLDFDVGGGGLRGEALHDGGFAYCWSGARATVGVRGGGKYCFGCKVVAEQAVEMEDTAADQQHLCRVGVSRGGDPVGALGETGHSFGFGGTGKFSHQGKFVEYGVKFGVGDTVVCAVDLDSKPLSSIGFSRNGEWLGIAKHFDASDKGLGLVESPVSSMQWESAIFPHVLLKNVVVEMQFSKEDGLQLVDGYELWPSACVDGNAVSGPVFAEQKECEIMMMVGLPASGKSTWAEKCIKEHKEKRFILLGTNLALVQMKVPGLLRKNNYGERFERLMDRATMIFNTLLTRAAKIPRNYIIDQTNVYKNARSRKLRPFANYRKTAVVVFPSPSELKVRAAKRFKEMGKDVPADAVNEMTANFVLPLSKDMPDSKEPFDEVIFVELSRDEAQRNLDEMKRLLPKASTPSYANFSNQNVSSTYSGTIAGTMPSLSPGYHRQMDSPYGSGVQTPRALTHQQAAWGVQGFQSPAGINHHQVHLSSYPNTPYQHQQIQSNHPSTPYQHQAQSTSYPSTPYRDQIHSSYPSNPTQHQIHLNYPSTPNQYQSHSTYPNTPFPGHGNSVYDSNGGPGPYNPNPYSMNTDMQQRIQAPIGDRNQSYAVVSNEAYGRSGYEAANSVGRPINTHPAVYNSGSGNYMPYMQHSHDVHNSGSQYSAPVPRPPYGAPPPNYMNPQTSIWHI

SEQ ID NO: 43537 - protein, 149 aa, Oryza sativa
MSGRRSFFASKKPSRSSNPFDSDSDDGGREQRPARASSVPPPADQRGSLFGGGDGFSASSAAARSRYRNDFRDTGGVEAQSVQELEGYAAYKAEETTQRVQGCVRIAEEMRDTASKSLVTIHQQGQQITRTHMMTLDIDQDLSRVTNTN

SEQ ID NO: 43538 - protein, 421 aa, Oryza sativa
MQTSNFRKKNAAEVDFFMGYGDVNRYEVLEVIGKGSYGLVCSANDIHTGEKVAIKKIHNIFEHISDAARILREIKLLRLLRHPDIVEIKHIMLPPSKMDFRDIYVVFELMESDLHQVIKANDDLTREHYQFFLYQMLRALKYIHTANVYHRDLKPKNILANANCKLKICDFGLARVAFTDAPTTVFWTDYVATRWYRAPELCGSFYSKYTPAIDIWSIGCIFAEVLIGKPLFPGKNVVHQLDLITDLLGTPSLDAISQVRNDKARKYLTCMRKKQPASFSHKFLKADPLALQLLRKLLAFDPKDRPSAQEALADPYFNGLAKVEREPSCQPIPKMEFEFERRRATKEDIKELIFQEILEYHPQLLKEHISGTERPNFHHLSVVDQFRKQFTQVEENLNGSGAAVSLQRKHSSLPRRAFNYR

SEQ ID NO: 43539 - protein, 531 aa, Oryza sativa
MTSLNKVVSNGDTRSMLPNKVTALNPNAAEFVPSCIRPSFESSAVSDVSKADLRASGKTILDRSESSKSNNSDDEAHQFWRKQLPDDIIPDFSFEKIEQEPEELSLAGLSLNAPPFYGTTASRFSREHDLSSQANKSLELGLTSLLYEDNSQASFPTMGSSNWEQNFVGDLHFTNGNQGLHYDSESAAGFSDSFASDYAAATDDVLDPLAYLASQFPDFSSESLAELYYANGCDFNHTIEILTQLEMQVDATSNPTLTPRTPNFSTGDFPALPTVEDQNGFSKGNADILSIFNGRSSPSVSTGTGDFVSAVRKLASQNSGHWKYKKGPEYGNGVSTVSVPKQYSSTTKTSSGNKFQSVSSARAAPWLETGDAVANMYSESRGEARDFARIRNACFEQARQAYLIGNKALAKELSMKGQTYNTQMKASHEKAREAIYRQRNPSSQRGSDRLIDLHGLHVNEAIHILKVELGTLKSTARATGERMQVMICVGTGHHTKGSRTARLPIAVEQFLLEEGLHYTQAQPGLLRVVVF

SEQ ID NO: 43540 - protein, 475 aa, Oryza sativa
MEVAAGARGGGAGGGGGGPAPFLLKTYEMVDDPSTDAVVSWSDASDASFVVWNHPEFAARLLPAYFKHSNFSSFIRQLNTYGFRKIDPERWEFANEYFIKGQKHLLKNIHRRKPIHSHSHPPGALPDNERAIFEDEIERLSREKSNLQADLWKSKQQQSGTMNQIEDLERRVLGMEQRQTKMIAFLQQASKNPQFVNKLVKMAEASSIFTDAFNKKRRLPGLDYSIENTETTSFYDDHSSTSKQETGNLLNQHFSDKLRLGLCPAMTESNIITLSTQSSNEDNRSPHGKHPECDMMGRECLPLVPQMMELSDTGTSICPSKSSCFAPPISDEGLLTCHLSLTLASCSMDVDKSQGLNANGTTIDNPTEAATATMEKDDTIDRSFDDNQKKSADSRTADATTPRADARVASEAPAAPAAVVNDKFWEQFLTERPGCSETEEASSGLRTDTSREQMENRQAYDHSRNDREDVEQLKL

SEQ ID NO: 43541 - protein, 273 aa, Oryza sativa
MTRHTTRNARGGSRADHPGAPRREQGNSTCPPTPPRRLPHPSARRRPGPRRREGHPRRRLLRRQLEGLLLRLPLRAHPRHAPRDRRRLPPPPRHRRPRGVPRPRAGLRQLPGRGRMRAVKETRDRFGRFFFRFPEGESAADVFDRVASFLESLWRDIDMGRLEQDASCETNLVIVSHGLTSRVFLMKWFKWTVDQFERLNNFDNCEFRVMQLGPAGEYSLLIHHTKEELQRWGLSPGDDRRPAVARLRQPPQLGRRVLLLPRHLLRPLERRRQ

SEQ ID NO: 43542 - protein, 595 aa, Oryza sativa
MLIERRAIKKLLDKISGTDPKKEGVLKFLLYLVKKYGKNIKPETGERNENMQSESQSSTPSSSFVSDTSTPGKWYTPTDIQRNEDQTSMSGAATPPAEFCCPISTKLMRDPVIITSGQTYERENIERWFREGYDTCPRTHIKLENFAMIPNTCMRDLIFNWCKEHGFIISDILPPSKNAYSYLPEQLHGYSMSSLHNVSVPLIAGKVRDFVIDHSTSSVALSEASYMSDSYHVRDMEEPKDSFSQFSWSADYQECLSFRNFNQDKFLRFFYELSKLPLELQDRSIGDLKIILNEENEASCAMVSNGFVEAFFDFLMNEDGSYSMQAQKVGFQFFRVFLSNSRTNILHMNEEAFRLFASFIDSELKTEALLTLHELVQHLSCRQSHLMASIITPLLESEDAEGLKLCLKIVCNLSSDSDVKPYLISLGIVSRLSPILSEGTFAECCLEILRNLCDVEEATVLITKTDRCLGSVAEYLDTGSPKEREHAVVILLAVCSHSSEDCLLVMKEGVIPALVDLSVNGIDEAKGCSMKLLHLLRDLRRTDQLNNSCSQEVVVTDVVEGPPDSSIHKQPIPKSSRFFQRKLNIFSKPRSLTLF

SEQ ID NO: 43543 - protein, 402 aa, Oryza sativa
MDRHRWCDSDNDMDISHRYGSRGINTKSSNNSLQNSSFHKTAKVNQSLRKSTSQKDFLHSRDSSSSHSSITDDEFRDSFHSRSQKGIRAVYTLEKDRLSNNEDENALYDVMRKEVRQAVDEIRTQLEKVVTKSEPSEKATSADAQPTQVINELRRSYTSKLEESEMRKQELLAQLAAEEQRGHELTKIVKELLPTPKKNMNSERQPRYRRRSNDRARVSRRLTEEAEQYFEDFLSNVEDTDFSSFDGERSDTSSSRRDVVQNTKIETPITLPKVASPVEADGVVLPWLQWETSNDLQTSPCKPKTQGASTACSTSSRTMSSRGSWSPGDHDSAAGSKDTLLTRFEEAASRRSSCPDNTQRSSFHIDDYMHLRRSHDLLLERWRQKERIGDGGLILCSRSSIM

SEQ ID NO: 43544 - protein, 1118 aa, Oryza sativa
MEKEVDVSAGAAEAPQPEDKVAPEAEANGDLGDKAEEEASASAAVEVVEESNAPEELLEKAVVSEANGVAAAVELAVEEKLEDNKGEEEEMEAKPEPVSGVIPVVVDDTSSEMIAPVSAESAVEESTEKEQTVDDTSSEMIAHVSAESAVEESTEKEQTVESEASESVEIVGVEKPTEDESNVDGGASSVVSRELAPEETKENNVGQEDEGVAEVIDREEDADDDEEIVLAAADDEDDGTNEADDDEDGVSSDRGPARVAIIESSEAAKQIMKELGEGSASVSPVSGLSSSREYTNSMDGQIVLDDSEEDGDDDDNEDDDEKGFDSAALAALLKAATGASADGNVTVSSQDGSRIFSMDRPAGLGSSAPSLRPTVPRPVARSNLFSPSELAVTAEPTEEMTEEEKKLHDKVELIRVKFLRLVYRLGATPEETVAAQVLYRLSLAEGIRHGRQTNRAFSLDNARKKAMLLEAEGKEELNFSCNILVLGKIGVGKSATINSIFGEEKSKTDAFSSATNSVREIVGNVDGVQIRIIDTPGLRPNVMDQGSNRKILASVKKYTKRCPPDIVLYVDRLDSLSRDLNDLPLLKTITSVLGSSIWFNAIVALTHAASAPPEGLNGAPMTYEVLMAQRSHIIQQSIRQAAGDMRLMNPVALVENHPSCRRNREGQKVLPNGQSWRHQMLLLCYSSKILSEANSLLKLQDPNPGKLFGFRFRSPPLPFLLSSLLQSRAHPKLSPDQGGNEGDSDIDLDDYSDIEQDEDEEEYDQLPPFKPLTKSQLARLTKEQKNAYFDEYDYRVKLLQKKQWKDEIRRLKEMRKRGKTDMDAYGYANIAGENDLDPPPENVSVPLPDMVLPPSFDCDNPTYRYRFLEPTSTVLARPVLDAHGWDHDCGYDGVSVEETLALLNKFPANMAVQVTKDKKEFSIHLDSSISAKLGEDASSLAGFDIQTVGRQLAYILRGETKFKNIKKNKTTGGFSVTFLGDIVATGLKVEDQLSLGKRLALVASTGAMRAQGDTAYGANLEARLKDKDYPIGQSLSTLGLSLMKWRRDLALGANLQSQFSIGRGSKMVVRLGLNNKLSGQITVRTSTSEQVQIALLGLIPVAASIYRSFRPSEPSFAY

SEQ ID NO: 43545 - protein, 311 aa, Oryza sativa
MAQAPARAASVVRLFDAHCHLQDPRVLSVAPSLIRAATAAGVARFAVNGTSEKDWHLVKQMAEEYPSVVPCFGLHPWWVPERSPDWMDSLRRFFAETPEAAVGEIGLDKGSHGKTIDFGEQVEVFQQQLELAKELNKPVSVHCVRAFGDLLEILKRTGPFPAGVLLHSYLGSAEMVSSLEILGCYFSLSGFLTGMKSTKAKKMLKSMPLDRILLETDAPDALPKLDDISLLAVPVDSSSADNGESKKDSNSRASTTSNESLNHPSNIHIVMKYVASLLEISEIELAEVTYKNATKLFSYHGSKVHNEVEAL

SEQ ID NO: 43546 - protein, 1307 aa, Oryza sativa
MAAAAIGGMLASAAIKETTRKLGSAIGGEIKLHRDFRRDLECFRNTLESIEAVMEDAEKRSIKEKTVQLWLNRLKNASYDICDMLEEFEAKTATPAARMLSRKLFHHPKITKFTMVHKMKELRLELKDITDQYHNFGFKQGSTFSEQHVPDKRETSPKEYEAFIVGRTEQKNFILSCLFDNIKDKIIILPIYGIGGIGKTTFAKMVFNDTRLNDYSKVWVYVSQAFDLNKIRSSIMSKLSKEESQLSNQTNPAEPFGDKKIMVVLDDLWEIDQSELDRLRAILVNDVGIGSKVIVVVTTREKEIANKFCTVAPFELPPLTDDMCWTIIKQKVEFDTRPDKDQLEQVGREIALKCGGVALAAQALGYMLRSMTVNRWNTVKNSDIWNENNSEDRSNQHHNVMASLMLSCNNMSPYLRLCFAYCALFAKGQKIVKDDLVYQWISLGFVEKQGIFSIWEDGENYVCHLMGMSFLQYSKSPSIVQVHQEDVTLLTMHDLVHDLARYVMVDEILDASKQGNITGRCRCRFALLNDCTKPLNSLTHSPTQVRAVRYLENEENVLRDASFSSAKYMRVLDLSGCSIQKLPDSIGHLKQLRYLKALGIKDKMIPNCITKLSKLIFLSISGSSAILTLPKSIGEMESLMYIDLSGCSGLKELPESFGKLKKLIHLDLSNCSNVTGVSESLESLINLKYLNLSYCRNIGQLPEVMGNLSKLVYLNLSSCSYMKGRLETEVLGTLTKLEYLNLSTEHFYTERLAQGLNSLINLKYLNLSGSLNYLGSSIDISFLGCLNNLEHLVLSKNIYLNGVVLPDCFDTLKKLHTLDLSDCPLLSSLPASIGKADSLKFVNLNGSDLSKVPQWNKNLLTLPRFVVQPNDDGSSSNLVLLNDVNPPNLQIRCLENVRSVKEVQKIELIEKQRIKELELHWTQHVKRSMEDIDLLRELVPPRSLKKFRMEGYKDTKYPSWLMDISLYLPNLIQITMAQMPKCVRLPPLGQLPNLEELCLERMKSVVKIDEDFCGGPGPFPRLKKFTIEGMPSLEVWNTMYSCDEDSVSEFMFPNLCELEISNCPKLQLTPCPPRAKKWTIVRSDGIISSWAGNAPHTSTSCSTPLVSSLVVQQCDSPLREWRLLHHLPALNYLKIQYFGDPTISAEIIGALSTLQSLALEGIYSHQPQLPDWLGHLRSLKELKIKFFEVKATHENITRLTSLHKLSLSRCDSLTSLPLWVGDLVSLQELSISDCPNLNDLGDCMGRLTSLKRLEIKGCYEIKSLPEGIKKLTMLEYMLIFHCRELREWCELEDNKKTLAHVKQIKLR

SEQ ID NO: 43547 - protein, 143 aa, Oryza sativa
MISSQAKTPWNDLIAMKDDHHIPCCSSRSQDFAVKSGEDRTSDGEMKVGLLDKSMGEKEKKKRSKKPPRPPRPPSASPLDAADQKLISELSELASLKRARIERMKALKKMKNTKPASSIGNLVALIITIIFCLVILWQGLPMK

SEQ ID NO: 43548 - protein, 432 aa, Oryza sativa
MADVQSPPPPPPPSGQRRLVGPAPDALGSLPLDVLDSILSRLHIHDVVRTSALSRSWRRRWESLPTVDLTRSPGISASDVDALLLRRTAPARSFRLATRDRSWSPTAFHDWLLRLSRGGGGGGLRDLELTLRYTYINSKLNSCLFSFRELTSLRLHCCGLPHVPTEFAGFPNLKTMYLSVVKVQRHGGRGLATLIAASPVLQEVTLIDVVLIGDGPDEDWVIRASNLRKLTIALGSEYGGRMEDLPRLEECCLFGLNYAKYLTGMARVTKLTFYCNCMLSTEVDVLERLPFLFENLRSLILGVNFCMMSHILAIFCLLRSAPVLEELDVWNWSEGAQEMEANDVFLNAQWINHMFAKLHVVRMKKVYCLNNEMHFIEFILSKARVLRVLSLTLASDSLSSIEEAIIDITEYPRASPDAQVIFMGVEPESANK

SEQ ID NO: 43549 - protein, 394 aa, Oryza sativa; identical to SEQ ID NO: 42858

SEQ ID NO: 43550 - protein, 275 aa, Oryza sativa
MTPQRSPAAAAAGGGGTPALHYLSGPYGDTTYTKVFVGGLAWETRSEGLRAHFEAYGEILEAVVITDRATGRSKGYGFVTFRDPDSARMACMDPYPVIDGRRANCNLAILGRPGPDIPFAPLRPVIPYNGGVAVPGGMYVQSPTYQQPPYNYPQAFVYPSYGPSTYGPEYMYPQNAYGSYVGQQYVPVYGGPRTVGPAVYPYGQFGQPVPGDQPYSPGYVPGRILPLSNQNAANVVRMSTVQQQYPPGAPRPQQQLLIPARAQFTPNNISEQTSG

SEQ ID NO: 43551 - protein, 714 aa, Oryza sativa
MEDDERGDGDELIADYVDCLMSLDTNSRSCQNDALILEGAPDDVDDDAAAAAAAAAEQDVMRDFAPGDGDGDADAENDPKEPVLGMTFESDEAAKMFYNEYARWLGFPFRVGRSRRSKGMEEVVIMKRFVCSREGAHKKKQPSTSGEATSKRERASMREGCNAMMEVVRDKDHWVVSKLEKAHNHSLGIGTRYGYLRARGLPDVSNKIAAMGSDGTASLRQNFLGETGDGQGLLDYLKKKQANDPRCSHAIQVDKNGCLMNVFWADSRAKEAYRHFGDAVTFDTSYKKTKYMMPFVTFSGVNHHLQTVIFGCAFLMEETESSFSWLFETWLAAMGGKAPGSLVTDQNRAMKAAIGKVFPDTCHRFCKWYILSRTKQKLCHAYSEHPDLRDEIESCVIESETISTFETSWMSILEKYDLRKHAWLQAIYNIRQKWVPLYMMGTFFAEISPTQKLETMNDFYKKYFNTKTTLEVFLNQFDSTMTSRYENEAQADIDTRLNEATTRTASPIEKQAASTYTKAVFSRFQEEFTESLGYIIQKTEEGRVNKFSITKDEDDPSDTFCVTYNASSKMAKCSCKYFKFSGILCRHILGVFIIVDPRTLPPDYFLKRWTRNARHDELLEDNSNNHKDATCQSITSRYNVLCADAIRCADKGSASKAVYKAAKDILQKAYEEIIAYERNPGRGLQRDAININEDITIDDTMNDQSLPDFWTKGT

SEQ ID NO: 43552 - protein, 506 aa, Oryza sativa
MGKGTVVGTAVVVCAAAAAAVGVAVVVSRRRRSKREAEEERRRRAAAVIEEVEQRFSTPTALLRGIADAMVEEMERGLRADPHAPLKMLISYVDNLPTGDEHGLFYALDLGGTNFRVIRVQLGGREKRVVSQQYEEVAIPPHLMVGTSMELFDFIAAELESFVKTEGEDFHLPEGRQRELGFTFSFPVHQTSISSGTLIKWTKGFSINGTVGEDVVAELSRAMERQGLDMKVTALVNDTVGTLAGGRYVDNDVAAAVILGTGTNAAYVEHANAIPKWTGLLPRSGNMVINMEWGNFKSERLPRSDYDNALDFESLNPGEQIYEKMISGMYLGEIVRRILLKLAHDASLFGDVVPTKLEQRFILRTPDMSAMHHDTSHDLKHLGAKLKDILGVADTSLEARYITLHVCDLVAERGARLAAAGIYGILKKLGRDRVPSDGSQKQRTVIALDGGLYEHYKKFRTCLEATLADLLGEEAASSVVVKLANDGSGIGAALLAASHSQYASVE

SEQ ID NO: 43553 - protein, 687 aa, Oryza sativa
MHQDSFRSVVCRSLSKSLSSKTKESSYPEIAQCAVPCVVTLQPTVCRGCQGRDWSPSQSNREDMSMMLQKDYLMASSLSRRFAEDLLRGAMDLQDSLTMLEKFQTASRSMRVSNKKRRPEGCERSPDTSGFRGALSEASNAKKMVGRSASSGLDGELTNSTDELKRVIKDSFYRKNILSVYPNDEQASMSQSLHYMPNKNSLSKPNEQKKAAPRSLPSCAPGQSEKSKSPSLVAKLMGLDGLPTHNSNTFKKDESMKTVSSPRALFDIEMPKVQQNDAHMSSPYSRKSNVSLYDSTVVNEIGSMKTIRREKGIEQPQTRAAKDIKVVSHTSRKQQIKETTEMGRRSSDKQRPHSTYRNREGRKDTKSKTGSASRSSANTVKRPDKKSMIASSSSSSTCRTRKPVARKAPSNSREKAVSSRSRKNSTIDDIVAYELHREFIQVDGPSTEHSATPSDESCQSVVDWDTEPSIDGIREDLSESYEASVTTSSAERTDSANGDPFHPSTHLVSKNEVEIKDEMSLLLLSDQPFLTRAAELIGIGEPGHLINRYKGIRKAQMGNHELFVDTATEQLERKHRQRNSLCYTGIWSQKCRTAPYFSLEALLTDIRDATRKLSIYTEDDDGCTTKDTLYMKLEKDLRCTDASINSVWDMGWEDWIFMEETQCFIRDVGESILSGLIEEAALDMWVH

SEQ ID NO: 43554 - protein, 294 aa, Oryza sativa
MALFNLAVNNNRNKGLLLSAGVIDQLEQMISNPRLSAPATALYLNLSCLPEAKNIIGSSQAVSFLVDRLFSHEARDTKGSSCKHDALYTLYNLSNHQASVPSLLSAGIVEALHSLLSESLASGGLGWTEKALAVLISLAATQAGRKDIMSTPGLISTLAMLLDTGEPTEQEQSVSCLLVMCSADDKCIAPVLQEGVVPSLVSISATGTGKGKEKSQKLLKLFREQRQRDGAQPVPQQAQQQQQQQQQQQQAGETGNGTMVCRRDSKQLCKSKSRKLGRTLSSLWKNRSFSLYQC

SEQ ID NO: 43555 - protein, 608 aa, Oryza sativa
MQTENAHIYLRHWASKILDRCCGLPLAIVSVGNLLVLKDRTEFAWKSVYDSLVWYESSDHGIGQVSSILNLSFDDLPYHLKKCFLYCSIYPEDFMIKRKILIRAWIAEGLIKEKGQGTMEEVADDYLNQLVQRSLLQAAVQNEFGRAKRCCIHDLIREMIVHRSTKERFFVFSKCTVTLKSSKKARHLVFDRCRSDRLSAPKMNSLRSFHAFKADLDASLLSSFRLLTVLNLWFTPTAKLPSAVASLLNLRYLGIRSTLIGELPEELGQLHNLQTLDAKWSMVQRLPQSITKLKNLRHLVLYRRRSADFTYPGPGTAIALPDGLKNLTCLQTLKYIEADEKMVRSLGSLKHMRSLELCGVHESNLIHLPSSISKMTCLLRLGIISQDANVKLDLEPFYPPPIKLQKLALAGMLVRGKLPSWFGSLNNLMQLRLHSSNLMEDSLGLLSSLPRLLHLSLVNAYSGKSLTFANGYFPALKKLTLHDLPNLSHLEFQKGSLVDLHVLMLGRCAQLNKLPQDIRNLVNLETMDLFEMPSEIIQNIQNNEILQEHNHESEHTIVIKNIRWNNGKLLEEKVYINLSLLESRPFIDKEQHNVKSQAEITAGRTHNE

SEQ ID NO: 43556 - protein, 315 aa, Oryza sativa
MVATVRCEEIADEKLRSFISDKGWLELETAANSGLVPGFGKKLNAILDFYLSEYDTEAMYFDEDVRTAKRQQLESEILKHTYDAFKKMLEHLHHVVLNKFKSDLEQSLRSGEGFAASARYCVQSSMAEFDAGLRDALVKHAEWDTTKVRSKLEQHIEAHATSVRGTKLAELKANYEKKLLDTLAGPVQSILETGEKDSWACIRRLYRHATESAILAFSASLSEFELDQTTIRKMVMELREHARSIVEEKAREEAGNVLMRMKERFSTVLSRDKDSMPRTWKGNEDIRAITREARLAALRLMSVMAAVRWTINQIK

SEQ ID NO: 43557 - protein, 133 aa, Oryza sativa
MASSHTKPSILLLAAALLLLSCSSIGGAARYLEEAAPAAAAAEEEEHPAHPAVPEIPKPELPELPKVPELPHPVVPELPKPELPKIPEVPHLAVPELPKPEVPEIPKAELPPLPKFELPPKPEFHFPEPEAKP

SEQ ID NO: 43558 - protein, 392 aa, Oryza sativa
MAMAMASPPACPFLLSLSAGATAISTVSAAYGSVSAPRAPLFLLASPRPVPPRRPLAAGSSSPKAAAPAAVEIPEEYVDDVDAVNIAQDVTQLIGKTPMVYLNNVVDGCVANIAAKLEYMGPCRSVKDRIGLSMINDAEEKGLIFPNKTILVEPTTGNTGIGLASVAAARGYKLIATVPSSIDVERCVLLRAFGAEIVLTDPNKGLKGALDKAEEIVSKTPNAYMFQQFNNSANSEIHFQTTGPEIWEDTLGTVDILVASIGTGGTITGTGRYLKMMNKDIKVIGVEPAETSVISGDNAGYIPSILDVQLLDEVVKVTTTEAVDVARELALKEGLLVGISSGAATVAAINVAKRPENAGKLIAVIFPSFGERYISSILFRPIYDSVRRMRKR

SEQ ID NO: 43559 - protein, 517 aa, Oryza sativa
MFISTPLPQVRDKVSRTKPPKPHGGGGERRRKKQPQEAAARAGGGMGGSSASPCDLDREFAPQIAQLLATPPLQPAQEYYNGLIQSRKHDGIRVNFSSKHGKGVCANKEFAEGDLILKDQILVGAQHSLNKIDCAVCSYCFRFIGSIEFQIGRRLYWQSVGSSSDCTNRRHCHESDLGSSASSSGATKENSSTLPEEVLGSLITGDMSLPFTDHFSLPQVVPCRGCEEERYCSQSCADSDWETYHSLLCTGSKTEPSQRSALQKFIEHANGSNDIFLVAAKAITFTLLRYKKLKTQPEFQNNTDESNFSLLMEAWKPLSMGYKKRWWDSVALPEDVDSCDEDTFRQQIRDLALTSLQLLKDAIFDSECAPLFSLDVYGHLIGMFELNNLGLVVPSPVEDYFIHIDDLPDDEKEEAEKVTRPFLDALGEDYAAPCEGTAFFPLQSCMNHSCCPNAKAYKRDEDTDGNAVIIALEPIKKDDEITISYIDEDVSYEERQAELADYGFICTCPRCQEEKPN

SEQ ID NO: 43560 - protein, 218 aa, Oryza sativa
MVHALMSCVTTGNVKVQWNVCHALSNLFMNDTLRLPDMPWASSVYSILLLLLRDSNNYKIRMHAAVALAVPVSRLDYGSSFPDVVRGIEHVLESLSSNSLSSPSNFKHKGNLEKQVTFTALHLFSFVSPKDDQSLRDFLIKKASFLEDWLKSLFSLFNNVEDQPLANEAINDEDGFSPNVAQKAMLSSAVKSLLDIYTSENQHTVAQRFEQLARSLEL

SEQ ID NO: 43561 - protein, 214 aa, Oryza sativa
MTMEASMSRTVSMLFSARRCIVASAAKDIEIAQGGRRRRSNDVKQQRGSHGQLAVAAATTAAAMTGQCHCCCCCCCTGASVAGGGGVGVQGGGGGRGAGPSDGEGGDRGGRAGAVGVRVPVHRPDRDVVVPEAPREGVPLRGGVRADGAAPRRDEEGDPAARRRRRHAGGVVRPRQLRQRDPRRPTGIARAPLSAKALANSVSFVRFHVKSEAN

SEQ ID NO: 43562 - protein, 478 aa, Oryza sativa
MDYSAGSYMWPGNSGSENYNFVDGSSESYAEEGSLPPSGYFMGAGSDRSLKITENERNPTMLANGCLPYNTQAHPLSGQILPKGELPNNLLDLQQLQNSSNLRSNSIPPGVLQCNSTSGTFDAKLDTPGLAELPHALSSSIDSNGSDISAFLADVHAVSSAPTLCSAFQNVSSFMEPVNLDAFGFQGAQNVAMLNKTSLPNGNPSLFDNAAIASLHDSKEFLNGGSIPSFGTVLQALGAGGLKAAQQEQNIRNIPLPTFTSGSHLAVTDAQGPPLPSKIPPLIHDHNSEYPINHSSDVEPQANSAPGNSANAKPRTRARRGQATDPHSIAERLRREKISERMKNLQVLVPNSNKADKASMLDEIIDYVKFLQLQVKVLSMSRLGAPGAVLPLLRESQTECHSNPSLSASTISQGPPDMPDSEDSSAFEQEVVKLMETSIISAMQYLQNKGLCLMPIALASAISNQKGMAAAAAIPPEK

SEQ ID NO: 43563 - protein, 242 aa, Oryza sativa
MNIDRPKIVLLYQSLLGIYGDHGNAVVLTKRLQWRGIDAELLIVEPGQPVPTDGAVYLLGGGEDTAQITAVQELEADGGLFTALDDGAMLFAVCAGYQICGKSFTIGARNEVIKGLGLLDAETRRGPERAVGEVLHIWTQSDSNTYPITGFENHGGWTELGSDAKPLAAVEIGWGNGNRRDEGAVQGRVIGTYPHGPVLVRNPQLADHVLEMALGRRLEPLDIPEMAALRQRRIEAVRTDRS

SEQ ID NO: 43564 - protein, 651 aa, Oryza sativa
MAGSERTVVWFRRDLRIDDNPALASAARDGAVLPVFIWCPADEGQFYPGRCSRWWLKQSLPHLSQSLESLGCPLVLIRAESTLEALLRCIDSVGATRLVYNHLYDPVSLVRDDKIKKELSALGISIQSFNGDLLYEPWEIYDDSGLAFTTFNMYWEKCMELPIDASPSLAPWKLVPVPGLESVRSCSVDDLGLESSKDEESSNALLMRAWSPGWRNAEKMLEEFVSHGLLEYSKHGMKVEGATTSLLSPYLHFGEVSVRKVYQLVRMQQIKWENEGTSEAEESIHFFMRSIGLREYSRYLCFNFPFTHEKSLLGNLKHYPWKVDEERFKSWRQGMTGYPLVDAGMRELWATGWTHNRIRVIISSFAVKFLLIPWTWGMKYFWDVLLDADLESDILGWQYISGSLPDGHELSRLDNPEVQGQKYDPDGVYVRTWIPELARMPTEWIHHPWDAPSCILEVAGVELGFNYPKPIVDLHIARECLDDSISTMWQLDTAEKLAELDGEVVEDNLSNIKTFDIPKVVLRETSPCALPIDQRVPHASSKDHNLKSKVLKASNRSSICVDMIRSSKMEATSSVANSPVSRKRSFCETAFHVPSYSSSAEVHSHIQDHGGSLVGPSRYLLQEAGRNYVDEVEDSSTADSGSSISRQRKAA

SEQ ID NO: 43565 - protein, 163 aa, Oryza sativa
MVIDATNKGNMSRFINHSCEPNTEMQKWTVEGETRVGIFALRDIKTGEELTYDYKFVQFGADQDCHCGSSNCRKMLGITKPVNSIVLHNGNLSQDQHVRKKRKTYLENCIGEIVRLWHRRHSMYLAASIYDFNERNGIHTLLFTDATIEEFDLREEDWDFLPV

SEQ ID NO: 43566 - protein, 270 aa, Oryza sativa
MSSAAGEPSSSSAAAAAISCSSSNDDEKPPPSLEGKELRRVEEEEPAAAARPEKLTEGSSRAAEAEEEEEVVEDEEDDDEEDEGKVAEAIDLGPRVSIKEQLEMDKEDESLRRWKEQLLGSVDLNSVGESLEPDVRITSLCILSPGRPDVLLPLPVEPSNSKEPWFTLKEGSTYRLKFTFSVSSNIVSGLRYTNTVWKAGIRVDKTKEMLGTFSPQLEPYTYVTPEETTPSGVFARGSYSAKTKFVDDDRKCYLEINYTFDIRRDWPCKS

SEQ ID NO: 43567 - protein, 294 aa, Oryza sativa
MSHQILHTSNPTLPTPPQPHNHHPPVPPPPKLGRRAALAIAAAPAILSATPAPSRAQEAAAAAAAPCIADLPVTAKAFLDVSIGGEPAGRITIGFFGDAAPAGASRFLSLVTGVGYRRKEFVKIVPGYVQHGGVVSYPAIPAVTERLAAEMGAVRAQCGGERSPHAAAGAVSIVVRDPSLPPPKPKLVARGGKLEVDQEQVGVVPNGTEFVITTGDAPELDASALVVGRVVDGMDVLGKIAAVPTVKDNTASPYFRVAKLIGDKRAVVAERGFNRPYTKILITNCGVIEQQQEQ

SEQ ID NO: 43568 - protein, 343 aa, Oryza sativa
MLASTFATHPAAAAAARRRGPIRWRLPFCSQIVTVTLRRRFPMARLSITNALASQSLESAPAAPPKHSFPILVNSCTGKMGKAVAEAAVSAGLQLVPVSFSAIEVPDGKVEICDREIYIRDPSEGESILPSIAKDYPDMIVVDYTVPDAVNANAELYCKLGLPFVMGTTGGNRQLLHKTVEDANVYAVISPQMGKQVVAFLAAMEIMAEQFPGAFSGYKLEVMESHQATKLDISGTAKAVISCFQKLGVSFNLNEVKQVRDPQEQLTLVGVPEEHLSGHAFHMYHLTSPDETVSFEFQHNVCGRSIYAEGTVDAALFLHKKIQSGANKKLYDMIDVLREGNMR

SEQ ID NO: 43569 - protein, 315 aa, Oryza sativa
MGEKVNPWCHWSNPPWTESSANNLHPPDVSLDNTNSVALPTYLNSDGYIYSGVAASMPSIAASVTDRPVSFSSRFVTTLVPSVGLSTAETLRKRPLVFFHNVNNTFTVGPLLSKGTLDTVPELQGSNETNVTDVGAQNTECMHENTEEIDALLCSDSDEGCLKVQELNNRVRKYPMQNDTMSVESVASAGASQPAKKRRLSSGTDRSVVDTASSARPDHSVDQKHLSHDDDAQSCCIGEVESDHQFALREGEEAEGDDGPDDRKRRRERIQETVAALRKIVPGGIAKDATAVLDEAICYLKYLKLKVKTLGAVSL

SEQ ID NO: 43570 - protein, 67 aa, Oryza sativa
MILFFSFQVLQKLELHQAVATPSDVSSVTGRIIRDLSMMVIPIEHHMVHRGHGIFDFQQVNPCRLMF

SEQ ID NO: 43571 - protein, 357 aa, Oryza sativa
MERAEETPRAPSTAPSARVSIWESVRACGVWGKEVDKAELRRQVVMPLYARRAVAAAVKAKDEAVGVAAAAERGEEGEVEVEVEAAVTPVVVFVNSRSGGRHGPELKVRLHELISEEQVFDLSVVKPSDFINYGLGCLEKLAEQGDNCAETIRKKLRIMVAGGDGTVGWVLGCLTDLYRLKREPVPPTGIIPLGTGNDLARSFGWGGSFPFGWRSAVKRYLSKAATAPTCSLDSWQAVVMMPDGEIKELPYALKKTEPADCLELCQENGTELPEKASCYKGVFYNYLSIGMDAQVAYGFHHLRDEKPYLAQGPVANKLIYAGYSCTQGWFCTPCTASPQLRGLKNILRLYIKKSQLF

SEQ ID NO: 43572 - protein, 674 aa, Oryza sativa
MPPPAEEFAVDDLDEFESRLDSFLNRFHADDLRRILLPFPDGKLHFPLVIDFAELLEFDPEVAHQLYDYPKDVLELFDAAAQRALDKFDAAARRADKRKAGDGTMEKKFVHVRVNTSGSALECPEASPSIGKVRVKHRGTLLTLKGTVIRSGGVKMIEGERKYQCRKCKCRFTVHPELEAGNRITLPASCKSKSAKGCGGANFQLIEDSITCHDYQEIKIQENIQLLGVGSIPRSMPIILMDDLVDIVKAGDDVVVTGRLSAKWSPDIKDVRSNLDPMLIANFVRRTNELKSDLDIPVEIINKFEEFWAASRATPLKGRNSILKGICPQIYGLFTVKLAVALTLIGGVQHVDASGTKVRGEPHMLLVGDPGTGKSQFLKFAAKLSNRSVITTGLGSTSAGLTVTAVKDGGEWMLEAGALVLADGGLCCIDEFDSMREHDRTTIHEAMEQQTISIAKAGLVTTLNTRTTVFGATNPKGQYDPNESLSVNTTLSGPLLSRFDIVLVLLDTKNKKWDKIVSSHILAENTEEKKGKTSDPEVMWTLSMLRRYIHYVKQHFKPVLTKEAERVISSYYQRQRQSGTRNAARTTVRMLESLIRLAQAHARLMFRNDVTKLDAIAAILCIESSMTTSAIVDTAGNALHSNFTENPDQECILKCDSIAYLSKNIKYLTDEISN

SEQ ID NO: 43573 - protein, 378 aa, Oryza sativa; identical to SEQ ID NO: 36899

SEQ ID NO: 43574 - protein, 398 aa, Oryza sativa
MVSASRFVLLSRLPAAAASSRFLRPLAAAGSLLPAALAPFAPPAAGARCFATQPATSSLRDSSPNWSNRPPKETILLDGCDFEHWLVVMDPPPGDPSNPEPTRDEIIDGYIKTLAQIVGSEDEARHKIYSVSTRHYFAFGALVSEELSYKLKELPKVRWVLPDSYLDVRNKDYGGEPFINGEAVPYDPKYHEEWVRNNARANERTRRNDRPRNFDRSRNFERRRENMHNFQNRDVPPGQGFNSPPPPGQGPVLPRGAPPMPPPPSPPNPGAPPSYQPHAPNPQAGYTNYQGGVPGYQGRAPGYQGGNQEYRGPPPPPPSAYQGNNPGYQGGGPGYHGGNPPPYQAGNPPPYQAGNPVFAGGAPGYQGQGGNPSYQQGSDNYNAGAPAYKRDEPGRNYQ

SEQ ID NO: 43575 - protein, 583 aa, Oryza sativa
MGMDMLVSAALEEVCARLSLGLPVTEMWTALSSVFNMAGLPMDLAVKRVLFARLIALPVISLVVEGVLAHPPRMDMEEAERYGARLLASRPLRDNFLGIYDHRCSASKLSDIQRKTLELIGASRTSGLTQRSLSKEAEIKGNNFHYVVKTLKSQGLIVGKQAIAKINTQAKRKAVSQDKHVISTNSLYLSRYAKNLNMNSYQRIEITKPKLECNEETNIDALQEDETLSVDYKNDVSIHDYLPAMKAICDKLEEASGKVLAVSDIKKDLSYRMQPGHRAWRNVLHRLLGAQLVEKIAANLDDKIVHCLRLLKRFNPDEFKPKGTISNYKLGKKGLETDQVMELPLDNCIYDMIDAQGPKGITLIELGKRLGGKYNNSKELHDRVSSMHDRFNLTVEVEVVGKSKQGRVWTSKNFSLYNATLRNCDVPDDHDYCSVWPLIPSEEPTSVSPYGFVVNNKLLFEEDCHDEPPVHRLLNSHEACVGVSQPVEQDKVAFQRKRHCWPTSISDDRRQKRIIHILEKHSFVLMVELHKWLERVEKENRKIFDRKTLIHTLDKLQQEGTCKCIKVNVPVVTNYAGSRSILM

SEQ ID NO: 43576 - protein, 143 aa, Oryza sativa
MAGDEVDAPKALLPPRPAILVASAGQHLPRSKGKWYAPPSYGRSRRARPVRCPDAARRPSSRTPPEPEPPVGLVDLSPFACLRFTSSTPHPTSIPTTTPPAVHTPRSPIPSSSEVHCHLQLAGEKTRQVGTARWRPGGQGKSQ

SEQ ID NO: 43577 - protein, 266 aa, Oryza sativa
MGVISTVLGFSGFGFGFSAGIVIGYYFFIYFQPTDVKDVKVRPLVEYDSISLDGILPEIPLWVKNPDYDRIDWLNRFLEMMWPYLNKAICRTALDIAKPIIEENRKTYKLESIEFESLTLGSLPPTFQGMKVYVTEEQELIMEPSLKWAANPNVTVVVKAYGLKATVQIVDLQVFASPRITLKPLVPTFPCFAKILVSLMEKPHVDFGLKLFGADLMAIPGLYRFVQETIKKQVASMYLWPKTLEVPIMDPSKASKKPVGILLVKV

SEQ ID NO: 43578 - protein, 285 aa, Oryza sativa
MACHYCFVSSINFFLQVAFKTGDFNHQVIFIGGLTDGFLATDYLEPLSLALEVEKWSLVQPLLSSSYTGYGISSLEQDALELDQLISYLINKENSDGVILLGHSTGCQDIVHYMRTNFACSKAVSGVILQAPVSDREYRATLPETAEMIDLAAKMLSEGRGMDLMPREANPDAPITAYRYHSLCAYMGDDDMFSSDLSEDQLRQRLGHMSTTQCQVIFSMGDEYVPEYVDKEALVDRLCRALGNAEKVEIEWGNHALSNRVQEAVRAIVDFVKREGPKGWDDPWS

SEQ ID NO: 43579 - protein, 806 aa, Oryza sativa
MEIEEAGGAGEDELEMEAPSVSTVAIAVNGSRNSKHALKWALDKFVPEGKVLFQILHVRPTIKMVPTPMGNFIPITQVREDVATAYKKEVEWQANNMLLPYKKMCAQRKVEAEAVLLESDDVPTAISEEISKFSVCKLVLGSSSSIFRRKNKGSKTATKICECIPSFCTAYVVSKGKLSSVHSATSDAIGTPESISSSTVSSPSSRSFSSSVPSEWGDTYGSANVSFHQPSLSSQRDQAIANMNKLSNRRASPSGSGGSEISNHDDTVLTSSHSINSETRFSSSSSGNSIYKSFNRDRSFDNSDQASVSDMATNLKHSHDQEYLKLEIERLRVKLRHLQKLNELAQKESLDANQKLHKLGIQDIEDEIKLKETELTEEKVRRLIRKKEREEQEVARREDQLRNENAESEATKQSNGNQEGDENKTGERIFVRCFDEYNRYTWEEIKASTLSLSEDLMIGRGSYGTVYKAKFHHTVAAVKVLNSPEGCGTQQLQQELEVLGKIRHPHLLLMLGACPEHGCLVYEFMENGSLDDMLQRRNNTPPLTWFDRFRIAWEVATALMFLHSSKPEPIIHRDLKPANILLDRNLVSKIGDVGLSTLLPSMDQYLSTMIKNTAPVGTFCYIDPEYQRSGVVSMKSDVYALGIVILQLLTAKSPMGIAHVVETALEDGHFVDILDAAAGQWPLNEAQELAFLALKCAEMRRRDRPDLSDHVLPALERLKDVATKAREMAFNGHQTAPPSHFICPILQEVMADPYVASDGYTYDRKAIELWLSMNDKSPMTNLRLPHKSLIPNHSLRSAIIDWRTKS

SEQ ID NO: 43580 - protein, 58 aa, Oryza sativa
MEEICNSSSGQDCLFLFLLEEKLKGSREPQFMLFCLMLELVVLHLLDPSHVPNLTLLF

SEQ ID NO: 43581 - protein, 199 aa, Oryza sativa
MAEEEAKKPAVVVAMKGHPGSGKSTVARAIATALCCPLLDKDDVRDCTLPLERVDGLAVGMLNELSYAVLWRMAERQVQLGLSVVVDSPLSRRAHLDALTRLPGALVIVVECQPGNEEEWRRRLEKRGAAVPEDGGDGWHKPKTWTELERLRDGYQGCTDYEFGDVPRIVVDTTDPTANSEAISVRVVEFIGSILACDH

SEQ ID NO: 43582 - protein, 300 aa, Oryza sativa
MATPTVPAAWRVCLPATTTRPASRPRTSSSTLSPACPRASTYHRASSQLPTTTVRSSRSSSSSMLATSSSGQRAGLLSTATPTLSSQAPASSPSPSTTASRPSTCSRQPTTTHGRRSAGRCPAPTLGSAHGDTGRVFLSGASAGGNIAHNMTIAVGVRGLDAVVPAPRIEGTILLHPSFCGETRMEVEPEEFWGGVKKRWAVIFPGANGGLDDPRMNPMAAGAPSLTKLACERMLVCSAGFDPRRTRDRAYYDAVKASGWGREVDWFESEGEGHHFFVDKPGSHEASKLMERVAAFIAGH

SEQ ID NO: 43583 - protein, 1095 aa, Oryza sativa
MAVRRAPLPVGPRAAADGNPAPPGESSKGPGLDGEFRQLVDIADEGVKLVNDAELRLKKRACDNPKDLAAWLRRLQSAKEDLDDALDEFRASMAAQRRRPEQDQERKKSIRHWFSRSSANHEVDKKMKITTEKLNKKFHGILQNGRELGLQPIKLQRHSRISEFPGDLSPQYTLVGDIEQEKLKLINKLTGSESTSAVIAIFGLGGIGKTMLARKVHDDLLTESAFSTVVWVNGSKSFTKKKLLRAILSSSGGKPGEAKKKSNEQIEDMLVTILGAKKFLLVLDDVWADQIHQDFLKVSLQAQQGSRILLTTQDEGVLRQIASDDIHKVNKLSFPDCWSLLCSSACLDEQDCDALTDIGITIIQKCNKVPLAIKVLGGLLGTKNPRREEWQEVISESEGWTLENVPDGMEEICLPIYLAYYSLPYHLKLCFDYCLQLPEGFVIRPQIVTQLWIAEGFIREQDNRNPEDIAEQYYKELVLRNLLQPEIGCFDMSKCTVHDCVKSLLQPSTKDKKSTDSTEGTKFFRSFRTAFVYKNPSGDRGLNWLINLRSLINLRSLDLTGTCIRYIPKSLEHLHHLRLLNLSLTQVLELPESIESLSNLQFLILRCCYWLETLPEEISNLVSLRSLDLEGTTPHIVLSRLSALEQLTALHGFIVDHNAAVPDNDHQNGWPMKELSPLNSLRSLQIMGIDRVPDESRAQEANLASKSHLTHLELCGSSTSDSQVFVPEEEQDRWLSVLCGLQPPQCLEYLKIASYYGSSLPDWILQLRNLQRLVLTDCKLCDSLPALGQLQQLKFLTINGCPKLRIIEWRTGATTKLVFPKLEQLDLRDMQALESLDRFKHGDLLSLTKFHLENSPKLRSLPSGLGYCKVLTSMKIVGADSLQVIDNLPMLKELVVQDCRELVMISNLPVLQVLVVVDCSMLQDLRGVAGLRHVRLVDRVTKELPDWLTGHEAPLLQTFTIVGTTELLRKLVPNSKGWSAIRNMDRVYANLPDGAPFLAYNKGRPDFQMIKTAVGPQLEDRPSAYIILRKLVRMASQTGLLDSLKRYFLPPLAIVLVLLLLATRDFTLIGILLAFFAAIACLAGFYYIYIQKASG

SEQ ID NO: 43584 - protein, 247 aa, Oryza sativa
MNCQFCFTGRMGLRKHLSTAEIVEQAVFARRLFSDEFGSITNVVFMGMGEPLHNIDNVLKASAIMVDEQGLQFSPRKVTVSTSGLVPQIKRFLQESNCALAVSLNATTDEVRNWIMPINRKYNLSLLLGTLREEIRLKKKYKVFFEYVMLAGVNDSVDDAKRLVDLVRGIPCKINLISFNPHSGSQFKPTPDEKIIEFRNILIQDGLVVFVRLSRGDDQMAACGQLGEPGDYQLPLLRVPEKFQVAL

SEQ ID NO: 43585 - protein, 561 aa, Oryza sativa
MAAAAAAAVPCVPFLCPPPPPLVSPRLRRGHVRLRLRPPRSSGGGGGGGAGGDEPPITTSWVSPDWLTALSRSVATRLGGGDDSGIPVASAKLDDVRDLLGGALFLPLFKWFREEGPVYRLAAGPRDLVVVSDPAVARHVLRGYGSRYEKGLVAEVSEFLFGSGFAIAEGALWTVRRRSVVPSLHKRFLSVMVDRVFCKCAERLVEKLETSALSGKPVNMEARFSQMTLDVIGLSLFNYNFDSLTSDSPVIDAVYTALKEAELRSTDLLPYWKIDLLCKIVPRQIKAEKAVNIIRNTVEDLITKCKKIVDAENEQIEGEEYVNEADPSILRFLLASREEVTSVQLRDDLLSMLVAGHETTGSVLTWTIYLLSKDPAALRRAQAEVDRVLQGRLPRYEDLKELKYLMRCINESMRLYPHPPVLIRRAIVDDVLPGNYKIKAGQDIMISVYNIHRSPEVWDRADDFIPERFDLEGPVPNETNTEYRFIPFSGGPRKCVGDQFALLEAIVALAVVLQKMDIELVPDQKINMTTGATIHTTNGLYMNVSLRKVDREPDFALSGSR

SEQ ID NO: 43586 - protein, 166 aa, Oryza sativa
MSLVKLFDTLAFDAWNPFSIFGTTVAADAWLASDTSAFANTYIESRETAEAYVFRADLPAGVKKEEVRVEVDEGNVLVITGERSVRREEKGQRSHHIERSCATFFGRFHLPDDAVVDLVRASMDGGMLTVTVPKVVTDKQPAIAAAAPVPAVVAPAVEAKAIEASP

SEQ ID NO: 43587 - protein, 198 aa, Oryza sativa
MMKSWSRRSNGSTGNGNGNGNGSINWWVNGARSTRDWASGEFVPKSSGAVSSTPSMRGTVCYVAPEYGGGGPLSERCDIYSYGVLLLVLISGRRPLQVTASPMSEFEKASLISWAKHLARVSRLIDLVDPALQDVNRDEVLLCITVALLCIQRSPARRPSSEEVLRMLSGEGEPPHLPLEFSPSPPGGFPFKSRKKVR

SEQ ID NO: 43588 - protein, 229 aa, Oryza sativa
MSRLRALWQASVNATRRAIVWNSEDLIPPSEKYIFNFNSKDELKRWHLYSDSEYGGLSSASLEITDGGAGGDTSSTGLFSGNLSLDMSEGSTWKIRRSGFCGMRSKKFNGFIDLDAYDTIAMKLRGDGRCYISTIYTENWVNSPGQQEDNSWQAFVYLPQDRWQIMKIPLDSYLPTWRGNVIEAKMEMNPARVVGMSLSVNAEGGVPGAKTGPGDFRLEVDWIKALRTL

SEQ ID NO: 43589 - protein, 1208 aa, Oryza sativa
MPKTAIAEEGALKLGVQRDQSFIRDELEMMQSFLLAADKEHDGHHHEVIRTWVKQVRDVAYDVEDCLQDYAARLKKPPWWSLPCTVHRERRRIGNEMKELRAKVEDVSQRNMRYHGVSAAAPQSSSVTAAELLQSTAAIDDIDEARRAAKQQEKVDLVKLITNDGQGGLRVIAVLETRSGPAGTVPVVRAAYQKLKGEFECHAWVRLMHSFDANQFIGSLVRQFKANSREGTGKTPQGTPSGVSVLNEMEAQDYNLLHDFTGYVTNKKYLVVLNGLSTIEEWDWIKTYLPNNHNGSRVLVCTQQAEVASCCTCTDDKYKVSEIQHEGSFSKPLYVFYKEVVSQPVNSDSTKMKSETRSSMEGASTTSDSKTVPSDGVIQEDGPKDLPESSLPPHLNRDSNTVSVKELSRSTTQLIGRGKEKDDVIKLLSDCNPIRQVISVWGMGGIGKTTLVKSIYQSSELEKLGFERRAWVTVLRPFQLTELLRSLAQRLVKDSPGKKVESIPGLARSGLSTMGSEELIDKLKQDLTGKKYLIVLDDLSTTTEWDSIIRNLPINNNGSRIILTTRFKLVAQHCSKKEMNMHNIEGLTDGDALELFLTKVRMDGDESELKPDLKEEAKIIIKKCGRLPLAVATVGGFLSARPRNIIEWREFSDRISEEFDNNPSLEMIKKILASSYEGLTYHLKSCFLYMSIFPEDSDIRYRRLLRRWTAEGYSRATRNRSNEKVAEEQFTALLNKSMIQQSKTIASGKTGFCQVYNLMHEIIISKSEEENLVLVLDDHITSRSKDKVRHLVVSKSWSREKNDMQNIVDVSHIRSLTVFGEWKSFFLSKKMRMLRVLDLEDAEGLQDPDLVPIGKLHHLKYLSLRGSFGVFNLPNSFGNLLNLETLDIRGTWVTKLPATIGRLQNLKYVHAGSLDDEDDQPIIKLLHQFRSIREEMGTRFAVSYIMLFITAWLRNLDVCGVKVPRGIGRLRSIHTLSIVNIARGKALLKNLKKLTQLCKLGVTGINKNNCKELCSAIADHGRLQSLLLRAEGNAGLEGCLDNMSQPPKDLKSLQLYGNLVTLPEWIKDLKILQKLSLRNTNLKADTTMEVLGNLPMLAILRLQDNACEEEELCFGPERFTGLTSLELLNWESLKSVKFERGATPKLKVLLLHYCWQIHNGGFSGIETLSTLKEVSILGYNYDQTYTEFKEQLQKQLDMNKNKPNLSIL

SEQ ID NO: 43590 - protein, 750 aa, Oryza sativa
MATTPAAAAAAAAAGGAAILDTLGDFTSRENWDKFFALRGTGDSFEWYAEWDDLRAPLLSLLHGGGGAEGGGKAPEILVPGCGSSVLSERLYDAGFRRVTNVDFSRVLVADMLRRHARARPEMRWRVMDMTDMQFTDGSFDVILDKGGLDALMEPEAGTKLGMKYLNEAKRVLKSGGKFACLTLAESHVLALLLSEFRFGWDMSIQAIGNESSKSAFQTFMVVMVKGKMGVVHPIQSLLDQSGKFCNMKQANDVIHSLEKENTIRESYSSGVDITLSLRDLQLGAVGDLKVIIPGRRRMFILGDQGNSLYCYKAVLLDARKRTETFVYHCGVFIVPKVRAHEWLFASEEGQWHVVESAKAARLIMVFLDSRHANADMDVIKNDLSPLVKDLEPGNPEEEARIPFMMAGDGVKQREILQEVTSEITGPMVVEDVVYENNDEDQSSMTEKMFRRLIFKRNSGLVQSEALLVKDSTSDKADENNKKSPSASKKRRNQKKGPSGSKTVLRIDHSYLGSSYHSSIISGFSLIASALDSAAVAGTKVSTTVIGLGAGTLPMFLRGCLPFLDIKVVELDPLVEEVANKYFGFSTDEQLQVHLGDGIKFIDDIAVADSRATTQQLMSTGNENNAVKILIVDVDSSDVSSGLSCPHANFVEDSFLLAVKKFLDEGGLFIINLVSRSSAVREMVVSRLKAAFEHLYSLHLEEDLNEVLFATPSERCLDNNNMDEAVAKLKAMLKFPVNVESDMKKLQKLQ

SEQ ID NO: 43591 - protein, 62 aa, Oryza sativa
MPSSVVNHVAPSCSVAVACTQRRCCRRGTRAALSPSTSEAQATDAIFSFAGALLLHLLCHGW

SEQ ID NO: 43592 - protein, 306 aa, Oryza sativa
MTVLVEYVEVVDLALVVMEVAVDIAVVVDMVLVSMAEVVDMLAMVDTVAGLLNMVVMVLGDTAVVGAIMLPVFFMEMLVATVALVCPMEMLVTTEALMFTILPTPMALATSAIVVSPVAASVETTVELVVDDLVPPVAATSTTLPTSAMVVSPVMVAATAATLLATLAKVVALVKTVVDITADNLVPRVTAMAATLPATSVMLALVQTVVYLAVDNLVPPVATTVATRPATSASVAALVQTMVELAVDNLVPWVTAMEATLPATSAVVAALVQTVVDPAMDNMVPRMATTAATSATVAALVHKWWV

SEQ ID NO: 43593 - protein, 197 aa, Oryza sativa
MQQGRGRRRMMQGSSYYAVLGVHPGASAAEIRAAYHRLAMKWHPDKITSGRVDAEEAKSRFQQVHEAYQVLSDEKRRALYDSGMYDPLDDDQEEDVEGFHDFLQEMVSLMATVGREEPVYCLDELRSMLDGMMQDFASSELPSPSGGFFAGAPSSPFADTGAAQQQRGVGSASARAHAHPQVVGNSACLSRMAFSSY

SEQ ID NO: 43594 - protein, 118 aa, Oryza sativa
MNRFFCLKFRLPLLVFSVWNRNSVVNLLCFCHGQSTLCLSGLLVLIQFMVTFSLPFAMNNQFRSWNVMCWNVKGMNVDAKILMRRQKVEESGCQVLCLQKTKKHNFTLVDIKTFSLAF

SEQ ID NO: 43595 - protein, 113 aa, Oryza sativa
MIAQLMANSLNQLLQFLQLKLRLKKIALRDLSPLSLQKLLQQNLSPQSLRKALRLLVQLKLLKMIAQLMTNSLSLLLQFLQLKLRAKKIALRDLLLQQNLSPQSLRKALLCHQ

SEQ ID NO: 43596 - protein, 147 aa, Oryza sativa
MTGSMLLIREFCDRFVPAEKATRTRIFFPEANEVSFARQSAFEGCSLKLDYLTKPSLFEDFGFTTKVKMSDRVRPEDEIFLVAYPYFNVNEMLVVEELYKEAIVSTDRKLIIFNGELDRIRSGLLVTFLNKREAALMMFENSMLVKF

SEQ ID NO: 43597 - protein, 158 aa, Oryza sativa
MHILYVFSEGKMNIERLKQLVDLVGKHRLVLDLSCRKKDGRYAIVTDRWQKFSDVFVDEPTLKHLAAYADEFLVHGVDVEGKRLGIDEELVELLGRYSPIPVTYAGGVSTMDDLERIKRAGNSRVDVTVGSALDIFGGDLPYKDVVLWHKEQNMVSQP

SEQ ID NO: 43598 - protein, 143 aa, Oryza sativa
MGSLMAGWDSPVLGDENRVLARRNKSLTREEVEAFWKQHGGEMMSGSPLGSPAAGGMARSAPVSRSKAHASSPRGGRIDPATRVEGFFPHDDAATAESPSKSHDWWTRSNWAFLNEPPQEEIAGKAQNYAPQFHVARIATGNA

SEQ ID NO: 43599 - protein, 73 aa, Oryza sativa
MCQSLWQEVTDLKIGFRRKMLQLIMTITMMGLGTYSLARMRILWIYSQRVLTVMKGITMFQKRMWKNLQQVLH

SEQ ID NO: 43600 - protein, 467 aa, Oryza sativa
MSTQSVIAVKQFSGPDKIAQAYTVPQPSAHVLSNANYDYDLCGSTNSTSLSCAIQSSNIKTESISSSSLPKILPFSTDSNGESSLSRMSQAEFSDPILSSSSTFCTSLYTSSPMNSGSCRKTGYLPFLPQPPKCEQQQNSAGQSSSSLMLLDADLRNSGHADDEHTDDLKDFLNLSSDCSFHGKCSAMAYNEQMEFQFLSEQLGIAISNNEESPRLDDIYDRPPQLMSLPVSSCSDQEDLQDARSPAKVQLSSSRSSSGTASCNKPRLRWTPELHERFVDAVNKLEGPEKATPKGVLKLMKVEGLTIYHIKSHLQKYRLAKYLPETKEDKKQEEKKTKSVANGNDHAKKKSAQMAEALRMQMEVQKQLHEQLEVQRQLQLRIEEHARYLQKILEEQQKARESISSMTSTTEGESPEFAPMEKTEDKAETSSAPLSKCRITDTDAECHSKVDNKKTKPQADLEMVHDE

SEQ ID NO: 43601 - protein, 274 aa, Oryza sativa
MIVGDGSRTSFWHDCWIASECLATKFQALYTHTMDNQISVKYALQQGLTASLVPRLSETARQECQCLQDLLQDFSLNNERDIRTGGIMGKFTTKNIYDTRLPPGISSPNWNLIWKCRAPLKVKLFAWLLVRDRLSTKQNLLKKKIVQNGVCDVCQQGDETADHMCFTCPFVQSFWERIRVNPTIQDVWLLHQLKPSPNVPELHHHVFFLLCMWAIWNHRHDVVFRGQTPSIRCCLQRCINEAALWAENLKIEDRHVISAWKNIFTSPLRSLNLM

SEQ ID NO: 43602 - protein, 419 aa, Oryza sativa
MARAAASRLAAAATSTSTLEMFSRHLAAASSAWGIASSRAPYPGRERRSASWWCPTRSFHATRGMNARDYYDVLGVNKDASASDIKKAYYLLAKKFHPDTNKEDADAEKKFQEVQHAYEVLKDDDKRETYDQLGAEAYERQASGGGPDDFSGSHPFGDIFGDMFDNPFAMRGGRDVKVPIKLSFMEAVQGCRKTIAYEADVFCDTCNGSGVPPGTVPQTCKACRGAGVIFMQRGIMSIETTCSRCGGSGKIVKNFCKTCKGEQLVKGKKSVKLDIMAGIDDNDTMKVFGKGGADVERNKPGDLYVTIKIREDPVFRREGNHVHVDAIISIAQAVLGGTVTVPTLTGNVSVKVRQGTQPGEKVVLRGKGIKARNSPAYGNQYIHFNVRVPTDVTQRQRELMEEFDKEECNEGERVAAASG

SEQ ID NO: 43603 - protein, 103 aa, Oryza sativa
MPPGQFRHGSIPLRAPSKFVSTKYGRNKRAWIVNNCFVVSLNPSKFVHDQLMNSHILCNKAHTNNMVVKVPAGTGIHNQDNRAIISLGAMSFHLKFHFLLFFA

SEQ ID NO: 43604 - protein, 698 aa, Oryza sativa
MNPYFVGLLVPIAVSLLLRKRRMVGKMRALPVDVGGEPGYAIRNYRFKQPVETHWEGVTTLAELFEQSCKDYVNMPLLGTRKLISREQESSLDGRSFEKLHLGEYDWKCYAEVFKSVCNFASGLIRLGHQKTDRVAIFAETRAEWQIALQACFRQNITVVTIYASLGEEALCHSLNETEVTTVVCGQKELKKMIDISGQLDTVKRVIYINEEGISAEVSLAQKSTSWIIEPFEDVGRLGDTAPVDANMPLPSDVAVIMYTSGSTGLPKGVMMTHRNVLATLSAVMTIVPEIGKKDVYLAYLPLAHILELAAEALIAAVGASIGYGSPLTLTDTSNKIKKGTLGDASALKPTLMTAVPAILDRVRDGVRKKVDTKGGVAKQLFDVAYNRRLAAVNGSWLGAWGLEKLLWDMLVFKKVRAVLGGKIRFVLSGGAPLSGDTQRFINICLGVPIGQGYGLTETCAGGTFSEYDDPSVGRVGAPLPCSYIKLIDWSEGGYLTSDSPMPRGEIVIGGPNVTKGYFKNEAKTNEVYKDDEKGMRWFYSGDIGRFHPDGCLEIIDRKKDIVKLQHGEYVSLGKVEAALIVSPYVENIMIHADPFHSYCVALVVAAHNELENWASQQGVTYTDFVDLCQKPEAVKEVLGSLSKAAKQARLEKFEIPAKIKLISEPWTPESGLVTAALKLKREVLRKTYEDDLAKLYA

SEQ ID NO: 43605 - protein, 280 aa, Oryza sativa
MAAAAAAAASASSSSSSSSSAESVPLPTTTLPIDKAAAVGGGGDRAVDCGVCAICLDKIALQETALVKGCDHAYCVTCILRWASYKQTPQCPQCKHPFDFLSVHRSLDGCIHDYMFEESVCLLLRATWFEPLIVEAHEEALDEEELYHIYQYDDGVEDDLDEEAYYMSRSPSIRIGNRRWGDNGYVRGGRKEARPVSRQSLNDTDAGPSRTPKKKDVSASGSGSVSKEVAGRRAKRALKREAADKAAAEKHLKHLQRLGLRKAPEATAEATPEVEPQLNE

SEQ ID NO: 43606 - protein, 586 aa, Oryza sativa
MGKVGEKVRAFATNRWLVFVAAMWLQSMAGIGYLFGAISPVVKAALGYNQRQVAALGVAKDLGDCVGFLAGTLSATLPAWAMLLVGAAQNFLGYGWLWLIVTRQLPALPLSMMCLLIFVGTNGETYFNTASLVTCIQNFPKSRGPTVGILKGFAGLSSAILTQLFAVLHTPDHATLVFMVAVGPSLVAIGLMFVIRPVGGHRQVRPSDNNSFMFIYTICLLLASYLVGVMLVQDFVQLSDNMLVFITAVLFILLILPIAIPVTLTFSSKTEHPMEEALLAEPSKGQASTSQEKEPDVFLSEVEDEKPKEIDSLPPSERRKRIAELQARLVQAAARGGVRIRRRPHRGENFTLMQALVKADFWLIWLSLLLGSGSGLTVIDNLGQMSQAVGYKDAHIFVSLTSIWNFLGRVGGGYFSENIVRERTYPRHIALAFAQILMAAGHFLFAMAWPGTIYVATFLVGLGYGAHWAIVPAAVSELFGVKHFGAMYNFLTVANPTGSLIFSGVIASNLYDYEAEKQAHHQSSLSGRSLFDMSFLAEGPLKCEGAVCFFVSSLIMSAFCIVGAGLSLIVVHRTKRVYANLYRAVR

SEQ ID NO: 43607 - protein, 386 aa, Oryza sativa; identical to SEQ ID NO: 31842

SEQ ID NO: 43608 - protein, 337 aa, Oryza sativa
MILRTTRCSESFRKVNASDVIILEGILVFHDQRVRDLMDMKIFVDTDADIRLARRIRRDTVERGRDVISVLEQYGRFVKPAFDDFVLPSKKYADVIIPRGGDNHVAIDLIVQHIRTKLGQHDLCKIYPNVYVVNTTFQIRGMHTLIRDRDIATPDFVFYSDRLIRLVVEHGLGHLPFTEKQIVTPTGSTYMGVDFCKKLCGVSIIRSGESMENALRACCKGIKIGKILIHRDGDNGQQLIYHKFPLDIAERHVLLMDPVLGTGNSANQAIELLISSGVPEERIMFLNLISAPEGVHCVCKRFPRLKIVTSEIETGLNEEYRVIPGLGEYGDRYFGTD

SEQ ID NO: 43609 - protein, 114 aa, Oryza sativa
MAQSPHRRNNCQGKYIIPSAPHALALPPPLSPSTTRIPQRRPSPAPLPCTQALLDLDREPSSLDQSLRLTAVVGQWRRGDPVYMHCYSCPTAYGTTSRQVEEEPRPSLNTSGTS

SEQ ID NO: 43610 - protein, 475 aa, Oryza sativa
MATSALLRALRRPSSEAALRLAASVRVQGVTGYRHLNNRNLSVFNEFSKQLKGEAKSNPEFQKSMKEFSEKLSGVKEDLKVRTKQTAETIYKSVDDVLTEAEATSKKVTANVKEKMSAATEEVKESFRLGKEDTSSCKDGSPETSKHEYSETSSHSDDKSQAGTSGYTLFNKLRSTLSSASPVLSGAFAKLRDTRVSTYAKQGYEIFKDELSSSSSRKKRNHARHASAGTVEKSTRTELVIVPTKKSVLGEKWEAFKNKMRGHPAYKRVNEYTKPVVNIGQEVAEDVRERWETSDNPVVQKIQDLNESIFEETATAVSFREIRQRDPSFSLPDFAGDVQEMIKPVLTAYSKGDVKTLKKYCTKEVIERCKGERDAYASQGIFFDHKILHISDADVRETKMMGSTPIIIVGFQTQQIYCVRDREGQVTEGGQDTIQTVFYAWAMQLMDSDEVPEEESYYPVWRLREIQQVGIKALI

SEQ ID NO: 43611 - protein, 406 aa, Oryza sativa
MIPLNRRASQTRGGMEYFDARRKPHNVGKVIAALVLTTLCIFILKQSPGFGGSSVFSRHEPGVTHVLVTGGAGYIGSHASLRLLKDNYRVTIVDNLSRGNMGAVKVLQELFPQPGRLQFIYADLGDQKTVNKIFAENAFDAVMHFAAVAYVGESTLEPLRYYHNITSNTLLILEAMASHGVKTLIYSSTCATYGEPEKMPIVETTRQLPINPYGKAKKMAEDIILDFTKGRKDMAVMILRYFNVIGSDPEGRLGEAPRPELREHGRISGACFDAALGIIPGLKVKGTDYPTTDGTCIRDYIDVTDLVDAHVKALNKAEPSKVGIYNVGTGRGRSVKEFVDACKKATGVNIKIEYLSRRPGDYAEVYSDPTKINTELNWTAQYTDLKESLSVAWRWQKSHPRGYGSN

SEQ ID NO: 43612 - protein, 107 aa, Oryza sativa
MVSWSLWSAAAFPSSLRSRSRCLPLKLAEPAVADVVWSQWLPSLSSQRASGSCRHLLASSMSTVAVISSPSPSHASLVLQDLCRIERLQARGNQQSYISCSLLINLT

SEQ ID NO: 43613 - protein, 243 aa, Oryza sativa
MTEYWVSQGNKWCDFCKIYIANNPLSIRTHEIGKRHKDNVTKRLATMQKEGAAKEKEQQQAARALKQIEAKAKKSYQKDLENSQRNVDGDTSAAPGDGWEFDSTSGYYYDKSTGLYFDSNSGFYYSDGLGKWVTQEEAYAWAKTSQANAGQSSSSQTKPTASVATVPTIKGGQAPGLVVKKPLNPMRTVKGAPSAIAVNKRKREDGKPKVISKEEEAALKAREAARKRMEDREKPLMGLYRSY

SEQ ID NO: 43614 - protein, 698 aa, Oryza sativa; identical to SEQ ID NO: 43604

SEQ ID NO: 43615 - protein, 1171 aa, Oryza sativa
MGTELTVTGWFLSPIIREMQDTALSYIRGQFSWEKDQEKDLERLDTILTEILAIVDAIEKREIKDGNQRKLLRKLKDAIYSAVDVLDSFQYMALKSKVDSQAMVSRVTSSCVYLGKRVVGTDKFRRKLTDMLKKLDEVKTTADTLFKLVSFDSATAKLLPVTQARVTSPLKEENHIYGRKDDLDRLRDLLLMQSDSSAPGPSNSCVPVISIIGVGGIGKTSLAQLAFRDERIRASFGLRIWVCVSDIYDEITLARDILESVTGENYRSVTKLDELKNVLQEKISQKNFFLVLDDVWYDENRTNWENELVWDGVLSTLDTGLGGSKILVTTRTNKASELLRAGACLQLGGLNRDDYWMLFKSCAFGEKHPGLFQELKEIGMQIAERLNGLPLAAKVIGRLLNVDLDSSHWKKVLESDISGDVMKVLRLSYQHLPIHLQLCFSFCSLFPKNWRFDPRRLTDMWISQGFVQKEDESDNDMNVEDVAKGYFNDLVQRSFFERSLLDLPIEYVMHDLINDLARNVSKDEYTRIESEKQKEIPPNIRHLSISAHLWAGMKKTEMKNLRTLLVWSKSWPCWKLSLPNDVFRKSKYIRVLDLTGCCLERLPTSVKNLKHLRYLAFRVPEKPLPTALVQLYHLEVLVTRGHSCRGSECFQLPTNMKKNLLKLRKAYLFNVGGATISGFGGQTLLHGPGEFHVKKESGHRLGELKEMNNIRGRLSVRFLENVEHQQQAVDAHLDCKEHVKHLQLEWSDLPRPITSELDSDVLEALRPHPDLDRLNITGYKGLRSPTWFETNWMKALTSVILENCMGWVQLPPLGQLPLLEDLVLRNMHAVGQIGEEFYGNGEMKGFPKLEEIVFDGMPNWEKWSGIEDGSLLPCLTRLYIAKCPKLQEAPPLNARPKVEVAITSDSLPSSCLFDSLMASASYLILLVNCCSFLSSLNTDQLSHVEELNVKSCTDPMPACGFIGLSSLKVLRISNCSALLSSVCVEAGEELDTCFFPQSLSELEIVDSNIQSSLLPRYLQGLTNLSVLVINSCDSMDLLSLAYGTHHLTSLEAIIIKDCIFLSSLDGFENLIALRKLVVADCKNFCFLPADLNALISLKTLAIYGCPKMKFLPQNGVPASLQLILLSLLHPELDRQLQRREGTEWDKIAHVPEKKLEVELIDLLTLFPSSSF

SEQ ID NO: 43616 - protein, 312 aa, Oryza sativa
MLLRLKAVAVHPAALLGRPRSHDAPQLVGRTGASTTTARRRAARSAVTVTMALKEEPEGSRSGFAGGVPSWDPGLEIQVPFEQRPVNEYSALKDSVLYSWAELSPGSFFLRLGSLWLITFTVLAAPIAAASFSPGKDPLKFVLAAGIGTLLLVSLVVLRIYLGWSYVGDRLLSAVVPYEETGWYDGQMRVKPPEVLARDRLLGSYKVKPVINLLKQTLVGTGALLVGAVSLFAFAAPVEDFLHSVNAPPSAASSKPSLRREELLRLPVEVRQDDDLAAAAAEAADGRPVYCRDRYYRALAGGQYCKWDDLLN

SEQ ID NO: 43617 - protein, 213 aa, Oryza sativa
MKKVEWNNRGFSTFHALVAAVVSFYLVVISDLFHSNIIIVRNSWLSDAMFGVSIGYFLTDLVMILWYFPSLGGKEYLLHHGLSMYAICLALLSGKAHMYILMVLFTEATTPFVNLRWYLEVAGKKTHNLYLYNGLALFVGWLVARVILFIYFFTHMYFHFDQVKSIFPLGFYSILTVPPALAVMNLFWFWKIFKGMLKTLSKRRQQSENGKAE

SEQ ID NO: 43618 - protein, 202 aa, Oryza sativa
MEETATAAAAAEKASSYRYWVREATGDAAPLPVPRKLDATAAAAANGNGNPPPLGSVWNQAGTWEEKNLNSWANSRIKEMLGSLDSLEFPTGKASLDGVSKCIGDAFLVTVRNKKRVGYTYELSLKFKGEWLIKEEKMKVKGHLDIPEFSFGELEDLEVEVRFTDDKGLASDDKRQICKDLKSFLSPIREKLRAFEEELKDR

SEQ ID NO: 43619 - protein, 912 aa, Oryza sativa
MEAVILAVSKIGSVLVEEATKAAIAKLSEKVANLKELPTKVDEIKKELETMNNVIKKMSTTHPIDEVVKGWIVEVRGLAHHVQDVMDKYSYHALMLEEESSMKKVFTKKKYVTVFSDIAEEIIQIEKKIENAGKRKERWLQQPDLIPNPLTYIERKQFQDCLLAQDYLVGIEGNRKLLTEWLYSSEQGNTVITVSGMGGLGKTALVNNVYEYEREKNNFDAFSWIVVSQTYNGVDLLRKLLRKIGVVETTPTIGYPEQTNLSDLDPRDLKNIIKERLKDRKFLVVLDDVWNREAYTLIEDAFLSCQTSRIIITTRQDDVATLAYPTHRLKLKPLEHNDAFDLFCKKTFYNSMHSKCPQDLEKLAHNIVDRCEGLPLAIVSIGGLFSSVKLESYIWNEMYKQLGDELVNNDHIRAILNLSYRDLPGHLRNCFLYCSLFPEDHLFSRDTLIWLWVAEGFAVRKQHSTPEEVADRYLRELIQRNMLDVVENDELGRASSCKMHDLVRDLALSIAKEEKFGFSNDYGTMIEMERDVRRLSSCGWENNDVLKLKFPRLRTLVSLRAMSPSTYMLSSILSESNYLTVLELQDSEITEVPESIGNLFNLRYIGLRGTKVKTLPQSVEKLSNLHTLDIKQTKIEKLPKGIAKVKKLRHLIADRYADETQSTFQYFVGMQAPKNLSNMEELQTLETMQASKDLAEQLSKLLKLRRVWIDNISYTDCAKLFATLSNMQLLSSLLISARNENEALCFEELRPKSKELHKLIIRGQWAKQTLDYPIFRYHGTQLNYLALSWCYLGEDMLGILSSRLENLTCLRLNNIHGTKTLVLDAKAFPRLKMLVLKHMPDVNQIQIMNGALPVIEGLYIVFLSGVESVPPGIETLRTLKKLWLLNLHKNFRADWIEREMQQKMQHVPELLM

SEQ ID NO: 43620 - protein, 681 aa, Oryza sativa
MAKPLLLPATVAAAAAARLPSRLAVGAAPPFRVLPFFLCPPPQSRSLSFSPVSAVSTAGKRGRSPPPPPSPVISEGRDDEDAAVGRPVCPGCGVFMQDADPNLPGFFKNPSRLSDDEMGEDGSPPLAAEPDGFLGDDEEDGAPSESDLAAELDGLDSDLDEFLEEEDENGEDGAEMKADIDAKIDGFSSDWDSDWDEEMEDEEEKWRKELDGFTPPGVGYGKITEETLERWKKEKLSKSERKRRAREAKKAEAEEDAAVVCARCHSLRNYGHVKNDKAENLIPDFDFDRFISSRLMKRSAGTPVIVMVADCADFDGSFPKRAAKSLFKALEGRGTSKLSETPRLVLVGTKVDLLPWQQMGVRLEKWVRGRAKAFGAPKLDAVFLISVHKDLSVRNLISYVKELAGPRSNVWVIGAQNAGKSTLINAFAKKQGVKITRLTEAAVPGTTLGILRITGVLPAKAKMYDTPGLLHPYIMSMRLNSEERKMVEIRKELRPRCFRVKAGQSVHIGGLTRLDVLKASVQTIYITVWASPSVSLHLGKTENAEELRDKHFGIRLQPPIRPERVAELGHWTERQIDVSGVSWDVNSMDIAISGLGWYSLGLKGNATVAVWTFDGIDVTRRDAMILHRAQFLERPGFWLPIAIANAIGEETRKKNERRKKAEQRDDLLLEESAEDDVEVLI

SEQ ID NO: 43621 - protein, 767 aa, Oryza sativa
MRASAAPMETSASARRSAAPDPKKPRLAQHPAPRDPRSYPAAANGNAPAVDQAQVDELVAQYRTALGELTFNSKPIITNLTIIAGENLHAAKPIASLICANILEVPSEQKLPSLYLLDSIVKNIGKDYVKHFSARLPEVFCKAYKQVDSSIHNSMRHLFGTWKGVFSPTSLQVIEKELGFQSSTNGSSGAAPSKPDSQSNRPSHSIHVNPKYLEARQQLQQPNKGQGILGAGAKTTTISDSGDDIERTSRTAVDRGAGRRLDALNPRTNVQRAQRDPFSNPIHEKQDRDMRVLGFSNISQQAVVGTGLVRAKPKGQDGSGGPYYTAGVGSSEEQFDRRSNFYANKDVRPSGSVRLDGALLPTPVSNSDRIGRPSSNKSWKNSEEEEYMWDDVRSQGADYGGTSSTRKREWIPDDGNVGSFQRVKWAEAGGPLDPDQHKLDSFQRFGNATGQDRRITPYMDHEEYLHGKHEVEPRIDREMLPEGQPFSSSRGSSLWLSHEKPLPDIVSDPRISAFSNQPADRPTIYAGTLSTSITSSVPVGLSAAYAGRSSLESAATRSTETIGQQKNRYWSTSSPPVQSPSASFARQSSPSPVELDYSSKPFSQLGQNSLEDYNQRTHALAQNLALSQGRPNLLGAPSHASQQIEKHPSLLQSKPHLRTLDQPQANFSPENSSSVFKSSIQLPISVGVGHRQPEEVSLSSDSTLMSSDHLSASSLLAGLIKSGFKPNDPNDLASLRAQPPLPSGSLLMFRHLFQLLPHPCTFQLVIL

SEQ ID NO: 43622 - protein, 405 aa, Oryza sativa
MTRDGCQPTAPCFNIILTGCVKSCQYDRAFRLFYDWKEYGVKISLSPEQKGCFGDNFSYCEEHTSNSSTLLVVPFRPTVTTYNILMKACGTNGERAKSVMNEMRRNGLCPDLISWSILMDIYGSSQNRDGAIQALRRMQRVGMKLNVTAYTVAIKACVENKDLKLALHLFEEMKAHQLKPNLVTYKTLLTARNKYGSLQEVQQCLAIYQEMRKAGYQANDYYLKNLIVEWCEGVLSSGNGNREYYQLDQRKESFKLVLEKVTTFLQKDVDQNQTVDVRGLSKVESRVVVLSVLRKIKEKYLLGRAVQDDVVIITGHGKASSAKAETSVVEVEHAIVAVLTDELGLEVLIGPGSRPASSKPTVPARSRSHLDLASKHFSRRPQGMIKIPINSLNHWLKRKAVRTVQ

SEQ ID NO: 43623 - protein, 812 aa, Oryza sativa
MIASRTPVSLHSLLVAGGHGKRCVAGAGGRKRGRVQRRHLTQALESFWRHAPRPAPPAAAARGEANRSWQPPPLENPAFEEYYKEQRIVREEEWDDFISVLRKPLPATFRINASSQFFKDICSKLENDFKRYLESEVSDEYGEDAIRPLPWYPGNLAWHLNFSRKQLRKNQALESFHEFLKHESEVGNITRQEAVSMVPPLFLNIQPDHHVLDMCAAPGSKTFQLLEMIHQSKEPGLLPRALVVANDVNAQRCDLLIHNMKRMCTANLIVTNHEAQNFPDCRIANDLSEIYKKDCKPQRLEFDRVLCDVPCSGDGTIRKGHDMWRKWNSGMGNGLHLLQVDISMRGIALLKVGGRMVYSTCSMNPVENEAVIAELLRRSGNSVELLDVSNELPELVHRPGLSTWKVQDKGSWFQNHDDVPCDRKNVILPSMFPSNNSIQEGQSVCDDIEVNTGSNGSFSRNFSIEKTNKVYCDTDGISNSNTTKHSDSTPNSTSSNFPLHRCMRIVPHDQDSGAFFIAVLHKLSPLHECQMVEVTKTEVLDDDESLEEQKKISIDAHTSEDSNLTEVALVTDDVKNDQAESGNRMNKLQDQCKWKGVDPVLFFRDLTVIKSIVSFFAINISFPLEGHLVTRSADPNNARRIYYVSKSVQEILQLNVEVGEQLKIASLGLKMFETHRSKDGCPCAYRLSYEGLPLLLPYISKRILCASPNDFLRLLQYRTVNFAHFINARFGEEAASLIPGCCVVILREGHQNLDLGSITMDPTTIAIVCWRGKATLNAMVSPPDRKELLERITQRFGLKALRVEEENPRRQN

SEQ ID NO: 43624 - protein, 220 aa, Oryza sativa
MFNRLFGKPKEQANASALATLDKLNETLDMLEKKEKVLEKKAAAELERAKEFSKAKNKRAAIQSLKRKKLYEQQIEQLGNFQLRIHDQMIMLEAAKATTETVDALRTGAAAMKAMQKATNIDDVDKTMDEINEQTENMKQIQDALSAPLGASADFDEDELEAELEELEGAELESQLLEPVAAPPVHPVQVPGTRIPTRPAPQKASAEEDELAALQAEMAL

SEQ ID NO: 43625 - protein, 901 aa, Oryza sativa
MGRRSHKRSTEQEENNVGCVWGLMRMLYFRRDAKFLLDTKQVSRRHTFRELADGRHSVKNSSDFVETDDDDDNKEECASQKRTVKKLMEDELGKVNLLKKIPSNEIQRGLPDLGYDVSLDGGSEHTNKPVAALNQHTDIFASYLSGSVYSQGSKSLNHSEEYDLESVLANFLGEIYRCHGECPHGDCKNKGELCPSLKSLIHNKLNDLNNPHATHGNEQSPESKGEGLLGENSRSNSRAAQFKEFKDAVEILSSNNELFLKLLQKPNSHILDNIRKYQNSRLTTKLEPDKSLGRSSILEEKRGSNHELATKAQGKETKHVFFWRKDRSDRKQKPERANRPQPVSKIVILKPNQGRRIDETETTSSRYLHQQPCTSQAPEFSGRESSKFSIKEVRRRFKIVTGDSKREKNAIPAENLPGDSHQLKDSVVEDKDPRHLTEGSLPDKAASNFKNGIKPSASSKQKQQNDSQSEISDHTTGASIFYEKAKKHLADMLKNTSQSASYPTAQVSKSLEGMLSQPHYNVSPPRSDHRGKCHNAFSPEEPEVCLVKAVDVEEPAQERSQLHDNSESNAYSTSVAVDDQVAVLEECGIKEDTQEGIIYATDEVDTVPVEGVGKLDCSKTICNIQCIPAEQYTDSPLPEILEGTEGKEPVQMFMSSPESMVENLEQQDPKTPEPKSSPKLPDGCPEQSNEKKEQPSPVSVLDSFDEDDSSPECKTMKKYELHEVSCGTLYFPDNESGVKVFWEDKNARLDYIMLVLELSELCAEQNLEVWYLEDELISPCMFEELQNQGDRIDDMKILFDCICEALTEIQERYFRLSSWLSFVKHDIRTPPVGEKLISEVDKYVDGYLKCSFPSTLEQIIKRDLEVQAWMDIRSKTEGIVVEIWEFVLDELIDEAVFDLWI

SEQ ID NO: 43626 - protein, 251 aa, Oryza sativa; identical to SEQ ID NO: 31016

SEQ ID NO: 43627 - protein, 1003 aa, Oryza sativa
MLISWVDWGECRWGGDMGAAEEEAAAAWDKAEAKEERIMVSVRLRPLNGREAGDSCDWECISPTTVMFRSTVPERAMFPTAYTYDRVFGPDSSTRQVYEEGAKEVALSVVSGINSSIFAYGQTSSGKTYTMTGITEYSVLDIYDYIEKHPEREFILRFSAIEIYNEAVRDLLSHDTTPLRLLDDPEKGTTVEKLTEETLRDKDHLRNLLAVCEAQRQIGETALNETSSRSHQILRLTIESSTRQYLGRGNSSTLVACVNFVDLAGSERASQTASAGVRLKEGSHINRSLLTLGKVVRQLSKGRNGHIPYRDSKLTRILQSSLGGNARTAIICTVSPARSHIEQSRNTLLFATCAKEVVTNAQVNVVMSDKALVKHLQRELERLQSEIKFPAPASCTTHAEALREKDAQIKKLEKQLKELMEERDTVKSQLDCLLKSDCDDHSDGRVAKRWDEHSRSSESFARNASEEAFSVSDTSGVPYQDQDNAVFNGSYVFSDDRDDIVFPVQTVDLPEETKHEKFMSPWHPPSHHSSSDCIESYHMTEAASRTASEVSEEHCREVQCIDIHEHRRSTSHKFDLLLPQDTEFQTPELEISKEAVPQPDEDQELESITNRMEDPTRMCPVEEEQQDEIVDTCESNGTTDNDVKLYTCDSNISFDIQKPYPNGCLTVKRCILSSKDRALSRSKSCRASFMIIPNSWFDDSEYTSQTPPNEILKHTPRRFDKVRRSLYPENDNPSSVDRSEFSGEVSSDEVVKDMSTIDEVAKDMCPSDAEQETLTSDISCLTKLKKTDSDHEDELDEYQDQQSIRDGSTTLRTVKDVGIDSSLSASPSRWPIDFEKMRQEIIQLWHECNAPIVHRTYFFLLFKGDPADNIYMEVEHRRLSFIRRSFSASPAGGELNSAVVSSLKNLRRERDMLYKQMLKKLTNGEKERVYARWGIDLSSKQRRLQLSRLVWTQTDMEHIRESASLVAKLIELLEPAQALKEMFGLNFTLAPRSERRSFGLLGT

SEQ ID NO: 43628 - protein, 406 aa, Oryza sativa
MLSSGGELKSSSLVHQMVWVGTGNSSSSSIMGSLRQLPCSEEQDAASSPAYMLFLPQQLLLHASSNSSPCLNIPEVNLSTGLHPLGSFHGDVQQQEIISGMPDQSWRQLLLGGLVGDHEKYSVATALLSKGLDDEASMPHEASAAAYDFYGHGGGAGDGILQASPEASSCKSQLSQMLLQAAASSPRSCVTTSGLGSSMMDFSNTAAVAPAAEPELTRKHHAGQSDNSSECNSTETGSALKKARVQASSSAQSTLKVRKERLGDRITALHQIVSPFGKTDTASVLQETIGYIRFLLGQIEALSYPYLGQCCSANPMQQQTGIMAGERSTDGLFPEFPAGQDAEKDGKKQQAKKDDDLRSRGLCLVPVSCMPHLAADNDVVVGSDFWAAAGGGGGGGAPPLAGMNLR

SEQ ID NO: 43629 - protein, 573 aa, Oryza sativa
MAAAAAGKGGGGQGRIHRLEVENFKSYKGTQTIGPFFDFTAIIGPNGAGKSNLMDAISFVLGVRSAHLRGAQLKDLIYALDDRDKEAKGRRASVRLVYHLPATGDELHFTRAITGAGGSEYRIDGRLVTWDDYNAKLRSLGILVKARNFLVFQGDVESIASKNPKELTALLEQISGSDELRREYDELEDQKNRAEEKSALIYQEKRTIVMERKQKKAQKEEAENHLRLQQDLKLAKTEHLLWQLYTIEKDAEKIEAELEEDRRSLQQVLEENQSSDYELSAKKKEQSGFLKKMTLCEKSIAKKKLELDKKQPELLRLKEQISRLKSKIKSCNKGIDKKKDDSKKHLEEMKSLQSALVDVTRAIDELNEQGQNKSDKLQLADDQLQEYHRIKEDAGMSTAKLRDEKEVFDKELNAGVEAKKNLEENMQQLRSRENEILSQERELRAKLNKILHSIPKHEDELAHLREEHNKIAKERQTSGVKYQMLKQRLDEIDTKLRELKADKHESEQDARFSETVRSLKRLFPGVHGRMTELCRPSQKKYNLAVTVAMGKFMDAVVVEDENTGKECIKVPLL

SEQ ID NO: 43630 - protein, 226 aa, Oryza sativa; identical to SEQ ID NO: 30678

SEQ ID NO: 43631 - protein, 286 aa, Oryza sativa
MPPFVMFGVIHAPGCTFLRYNIEMWKATGMALDKVDLVWLSDEIRQHGDEYWPIVMDIARTNSVRRIKSTCRSSYYCLPSRFCGSRNSYAIGKLNVDEIFYICLQCASILFQKADIWLLGMEQHDANLLARQYYKHFKKKNKAIAVLDNMLPNLLQYPQMENRRHPAWAIFMEDDKEDICFKMEKAFCPPKLAEGNPCLEYIKYIILPWFGMFEVVQKKGNGGKKTFLSMEELTADYESGALHPADVKLALEKSLNEILQPVRDHFGRNGEAKDLVEAIGECYGAD

SEQ ID NO: 43632 - protein, 193 aa, Oryza sativa; identical to SEQ ID NO: 33844

SEQ ID NO: 43633 - protein, 225 aa, Oryza sativa
MRAAAIQTHALVCAPPGAAAAALAPWPRRAAGGGGGGPLLHHHRLRSDLPHTRSLPCRARSPSSSSSSNVNSGRGDDADNLLEDLLSKHGEVVYNAGGAPGIDADDDAECLSFAVSLAKVASEVKAADIRVLFVKPLVYWTRFFIILTAFSNAQIDAISSKMRDIGEKQFSIVASGDTKPNSWTLLDFGDVVVHIFLPQQRAFYNLEEFYGNATSIELPFEKQLQ

SEQ ID NO: 43634 - protein, 509 aa, Oryza sativa
MRRAMMGVDDLIEEAKVRTVWWALCVFAISYFLTHTSKSMWTNVPMSILILAFLRYLSFKVEFHWRGQPVQKQTHLSQLSKRQLSAHDHRLSTVAPVSRWRRKVGSPSVEAAFESFIENILRDFVVDLWYSSITPDREAPELIRGLILHALGEISGRVKEMNLVDLLTRDMADLIGHHLDIFRKNQSQIGVDVMGTLSSEERDERLKQHLIVSQELHPALLSSEHEYKVFQDIVGGIMALVLRPQDAQYGSNDIKLNEAYSGFDAQASQQIEKPTRAYSDSSNMSSLNTFEDPAGIPPEWTPTNVSVHLLNLVDKVFQLKRRGWIRKQVLWISKQILQLVMEDAIDEWILRQINWLRRDEVIVQGIRWIQDTLWPNGVFFTRLDGYQGNAGPSQFDKHPSGSANQASGNRKDSASSFEQQLEASRNASEVKKLLLGGTPPTLVSIIGYKQYQRSARDIYYFLQSNVCVKQLAYAMIEQVLVSLFPELRQLIEDIHEKGRKEQASFTYQL

SEQ ID NO: 43635 - protein, 796 aa, Oryza sativa
MGAVLGDPRRPLLLSVRSGAAVSMPGMMDTVLNLGLNDHVVAGLAHRSGERFAYDSYRRFLDMFGNVVMDIPHSLFEEKIEAMKAALGLRNDTELTARDLKELVAQYKNVYVEAKGEEFPSDPKKQLHLSVLAVFNSWDSARAKKYRSINQITGLKGTAVNVQCMVFGNMGDTSGTGVLFTRNPSTGERKLYGEFLVNAQGEDVVAGIRTPQDLDTMKDCMPEPYAELVENCKILESHYKEMMDIEFTVQENRLWMLQCRTGKRTGKGAVKIAVDMVNEGLIDRRSAIKMVEPRHLDQLLHPQFESPSSYGDKVIATGLPASPGAAVGQIVFTADDAEAWHAQGKSVILVRTETSPEDVGGMNAAAGILTARGGMTSHAAVVARGWGKCCVAGCSGIRVNDAEKVVLVADKVLCEGEWLSLNGSTGEVILGKLPLSPPALSGDLGEFMSWVDEVKKLKVKANADTPADALTARNNGAEGIGLCRTEHMFFSSDERIKAMRQMIMAETIEHRQIALDRLLPYQRLDFEGIFRAMDGLPVTIRLLDPPLHEFLPEGNVEDMVRLLSSGNVYTQEEILTRIEKLSEVNPMLGFRGCRLGISYPELTAMQARAIFEAAISMTEQGVKVFPEIMVPLIGTPQELAQQVDVIREVAEKVFANAETTISYKIGSMIEVPRAALIADEIAAIAEFFSFGTNDLTQMTFGYSRDDVGKFLPTYLSKGILQNDPFEVFDQKGVGELVKVAVERGRKARPDLEVGICGEHGGEPSSVAFFAKVGLNYVSCSPFRVPIARLAAAQVML

SEQ ID NO: 43636 - protein, 143 aa, Oryza sativa
MLRLLVPASSAASGHTSPSATATRSRRRIRREATTMGVSFDEDLAAAAATKIGASVVPSPFAAASCFAEACGGADDGRRAEKGVEPRNPGGCDPQRRWVGETTLVTRRARVRDADRWFDASSEFDAAVPHSIDAAPGGQQRWR

SEQ ID NO: 43637 - protein, 101 aa, Oryza sativa
MTLMVAWKVSRMGMKVHLHQLSRQLILPIVHHGCTKILLKAHHRLVAIQIQHQLSHCQAQMEMLSVGLIKLSSSFSRKFLVIYLQFCDHRFLVGCPVALLI

SEQ ID NO: 43638 - protein, 886 aa, Oryza sativa
MRSSFLSESPCDEQHIHGFNPQSWLQVERGKLPKSSYSPSSIESLIKIAEPPVVPLYKPLDYVEVLSRIHEELEQCVPSERPGLYLIQSQVFRGLGEAKLRQRSLHSAWRCATTVHEKIVFGAWLRYEKRGEDIISDVLASCRKCCKEFGPLDVASEMPEGDFEILGSCDIGTSSKVSPVVTFQIRDGKVTCNRCKIASLSIPFWSMLNGPFTESQLDLVDLSENGISLEGMRAVSEFSCTYSLEDLPLETLLEILVFANTFCCDRLKDACDRKLASFVSSRQDAVELMALAFEENAPVLAASCLQVFLQELPDCLNDEHVVSLFLSATEQQQCIMVGHASFLLYCLLSEVAMNIDPRTEATVCLSEKLVQLAVTPTQKQIAFHQLGCIRLLRKEYNEAEHQFSVAFSAGHVYSIAGLARIAGTRGRKGLAYEKLSSVITSSVPLGWMYMERSLYSEGDKKLGDLDKATELDPTLTYPYMYRAASLMRKKDARLALEEINRLLGFKLALECLELRICLYLALEDYKSAICDIHAILTLSPEYRMLEGRVAASKIGTLLGAHVEQWNTAECWLQLYERWSSVDDIGSLSVIYRMLESDAAKGVLYFRQSLLLLRLNCPEAAMRSLQLARQHAATEHERLVYEGWLLYDTGHCEEALQKAEESISIQRSFEAFFLKAYVLADSGVDPSYSATVISLLEDALKCPSDRLRKGQALNNLGGVYVDCEKLDAAADCYTSALKIRHTRAHQGLARVHFLRNNRDAAYEEMTKLIEKAKNNASAYEKRSEYCEREQTMTDLQIVTQLDPLRVYPYRYRAAVLMDSHKEKEAIAELTRAIAFKADLHLLHLRAAFHEHIGDVPSALRDCRAALSLDPNHQEMLELQKRVNSQEP

SEQ ID NO: 43639 - protein, 438 aa, Oryza sativa
MDRVRGCAFLLGVLLAGSLFAFSVAKEETKKLGTVIGIDLGTTYSCVGVYKNGHVEIIANDQGNRITPSWVAFTDSERLIGEAAKNQAAVNPERTIFDVKRLIGRKFEDKEVQRDMKLVPYKIVNKDGKPYIQVKIKDGENKVFSPEEVSAMILGKMKETAEAYLGKKINDAVVTVPAYFNDAQRQATKDAGVIAGLNVARIINEPTAAAIAYGLDKKGGEKNILVFDLGGGTFDVSILTIDNGVFEVLATNGDTHLGGEDFDQRIMEYFIKLIKKKYSKDISKDNRALGKLRREAERAKRALSNQHQVRVEIESLFDGTDFSEPLTRARFEELNNDLFRKTMGPVKKAMDDAGLEKSQIHEIVLVGGSTRIPKVQQLLRDYFEGKEPNKGVNPMRLLPMVLRFREAFSAARAVTKPKISFSWMWHPLPSVSRLSVES

SEQ ID NO: 43640 - protein, 206 aa, Oryza sativa
MEPDDDVGGRGAIPEPAAEAHRRQEDHGDRRLHRLLPPRHRPRHPRRRHDLGDGHQPGELRAGAPVDREGGSGAQDRLPGGTRAAGAGPAGGGGGQPWVVRLRVRRRRQGQLPQLPRAADEAGQGRRPRRLRQHALERLRRAPRRRPHAQVHPLLPRLRARAQQGPRRRPPRRDLPAPRRRRHHPLPPRQVSPPPPRVRLRPMPKN

SEQ ID NO: 43641 - protein, 566 aa, Oryza sativa
MERRLLEAAMVGSATSMKEMAAQDPSLLLGTTPQGNTCLHISSIHGHEGFCKDVLTLNNSLLTVANMDGETPLLTAVTNGHMSLASILLECCCTLGFSEAILQQDRNGCNALHHAIHCGHKDLALELILKEPALSKAVNKYSESPMFIAVMRDFTDVSEKLLGIPGSSHVGTYGHNALHATVRNGNAVMAKKILEGRPWLGKERTRERKTPILMTVIWDKIDVLRVLLEHDVLLGYECYDDGGNLSPLLVAAAYRGHVDVAQELLNHCPDAPYCDRNGWTCLHEAVKEGQTEFVEFILRTPQLRKLINMRNNKDGQTALHQAVRMCNPKIVASLLSHKDTDFTLNDHKTGQSVIWQLCLGSERAKTLNWNEVSMLMTKADPEAATTLHRQFARKRLTDELARNVKSLTQTYTSNTSLVAILMATITFAAAFTLPGGYSNDSGSEGLPVMAKKLAFQAFLISDTVAMCSSLAVAFICILARWEDLEFLLYYRSFTKKLMWFAYMATTIAFATGLYTVLAPRMLWLAVGICFLSVLLPILTKLLGEWPVVKLRFRLGKTFKTDLLDMV

SEQ ID NO: 43642 - protein, 196 aa, Oryza sativa
MNHHLSLLHLPRLSPVLHHHPRHLRLHGRTTVFQARLPSPQRTNQHRLLAVTTAPPEPEKTEEQQLLHPLQEPAEGEVSGGGGADRTCGLPTWALIGAIAAAVALSSAAAAGPAAALGPEGPLVEEFWDNMRRYALYVVTVSTGFAYTLAQPIVELLKNPVTALLIVAVLAGGGFLVSQVLNAMVGNSDFIYTYDQ

SEQ ID NO: 43643 - protein, 439 aa, Oryza sativa
MSELAALDMCQKRAIFKPMTQQEREMFKQRCGGSWKLVLRFIMAGEACCRREKSQAIAGPGHSIAVTTSGAVYTFGSNSSGQLGHGSLEEEWRPRIIRSLQGIRIIQAAAGAGRTMLVSDAGRVYAFGKDSFGEVEYAAQGSRVVTTPQLVESLKDIYIVQAAIGNFFTAVLSREGHVYTFSWGNDMKLGHQTEPNDVQPHLLAGPLENIPVVQIAAGYCYLLALACQPSGVSVYSVGCGLGGKLGHGSRTDEKYPRLIEQFQALNIQPVVVAAGAWHAAVVGKDGRVCTWGWGRYGCLGHGNEECESVPKVVESLVNVRAVHVATGDYTTFVVSDKGDVYSFGCGESSSLGHNTITEGNNRHTNVLSPELVTSLKRTNERVAQISLTNSIYWNAHTFALTDSGKLYAFGAGDKGQLGTELVAQESERGTPERVEIDLS

SEQ ID NO: 43644 - protein, 222 aa, Oryza sativa
MSISLRLAVPTAAPPVLPPLRQSAVRAAGSPAAAALRTGALRGCASLPLKPQPLLGAGQAASGRRGGAAVCHSSAHLSARTMQWVSAGATAVLLLAKGTAIHKSFLVPLFALLAPCSVISWIKSDYGQWTAFLALLVRLFFSIPGELELPLSTMLLVSVAPYQLMNLRGTQGGAALSLALAGYLAFQHFTRVGGLGKAFDQGSIIATLAIICITVIPLMMLF

SEQ ID NO: 43645 - protein, 232 aa, Oryza sativa; identical to SEQ ID NO: 30187

SEQ ID NO: 43646 - protein, 346 aa, Oryza sativa
MEQREQQLQAYNEEIRKMQDLALRHSQRIMDENKKLRSDLESKMQLLDSRSKELDKLAVQSNSDRMNLEKEKEKNDIKTKHLKMATLEQQKADESVLKLVEEHKREKQAALDKILKLEQQLNAKQKLELEIQQLQGKLEVMKHMPGKEDSEAKSKIHELSEELKDKYAEMESIESLNQALVIKERQSNDELQHARKVLIEGFQDIIVGRTNIGIKRMGVIDFKAFTNAYKQRSLEEGADVSAAELCSLWENEIKNSDWHPFRVVMVDGKEMEILSEDDGKLCELKEEHGEEICAMVTKALLELNEYNPSGRYPVPELWNFKENRKATLKEVVQYVLNQWKKNKRKR

SEQ ID NO: 43647 - protein, 397 aa, Oryza sativa
MDTGRSSQLTERVRRMPASSNSGILPLEVLFDVLVRLPAKELCRLRIVCRPWRSLTSDPLFMKTHVAHHRETFFLASFKDDETHIHIMDFAGNVIKQIGIPAGHKVLCTRLDLVCVATNKNSCHVLNPVTGDVYNLPKSPAEEHTYHVNLRKPFTSFAFGHVASTGEYKVLRMFNRPGFTDLGIPQLCEVITVKGGTGQARWRGKQSREFFVECQKANSGVVVNGVVYFLIDSVYDSMIIGGDGAGIHPDFICSFDLEVEEWREDIQGPISRNFVYDMDFPDEYIAIWDQLSLAELKGYLVLVYHQSYRSSTIDLWYLIDYETRTWIKQYSIQIESFVPVRECKVKPLLVLDDGRIVVWLGSTGLLLIYDPRTSTFAEVEMRRLSEVGLYTGSVLSL

SEQ ID NO: 43648 - protein, 630 aa, Oryza sativa
MPWQTMHRLQPPSTACHERGKPCWPSSEASLATPQGASPRGRKTTMTAAGGGALDYSPLEFNAVALVGRITSSLLSLEHLEHLDLSNNNLTGPDGRFPVFVASLRNLQYLDLSGLGFTGMVPYQLGNLSKLEFLDLSGTGMQSADISWLTRLQWLKYLYLSSVNLSAISDWAHVVNKIPSLTVLSLSGCSLTRVDHSLKHVNLTRLEKLHLSGNDFSHPLSSCWFWILKTLIYLDLESTGLYGRFPNAITNMTSLQVLDFSRNNNAGILEPILLRNLCNLESLNLQLGLLSGNMTELLESLSHCSPNKLRKLYLSNNNITGTLPAQSMGQFTSLANIGFSFNQLTGHVPPEIGKLASLTHLDLSENKLTGTITDEHFGGLVSLTYIDLSYNKLKIVIDPEWLPPFRLETAYFASCQMGPLFPAWLRWSSDIDMIDISSANIIDEFPDWVSTAFSKAIYLDMSNNKISGNLPKNMKIMSLEELYLNSNRIIGEVPTLPTNLTYLDISNNILSGLVASNFGAPRLDTMNLSSNSIQGQIPSSICRLKYLSTLDLSNNLLNGKLPRCIGMRNLQKLLLSNNNLSGTFPSLLQGCTLLRYIDLSWNRFYGRLPSWIGDFQELVSLQLRNNTFSW

SEQ ID NO: 43649 - protein, 195 aa, Oryza sativa
MVVVSSGGGGGGNAWAKEMTIRRRMASIFNKTQDHFSCLKDYNDYLEEVEDMTFNLIEGIDVEEIEAKIARYQQENAEQIYLSRAKRAEDLAAALKASRMNPGKAAASDTAAGSSQGISSSAGVQGQYAPAAVGMSQPRPTGMAPQPIGGSSDPLQGDDEETMRLRAERGARAGGWTIEMGKRRALEEAFSSIFI

SEQ ID NO: 43650 - protein, 170 aa, Oryza sativa; identical to SEQ ID NO: 30190

SEQ ID NO: 43651 - protein, 88 aa, Oryza sativa
MESPTSPASRLDFYDFIGRMRRPAAADLFHSIRSFLASLSQGGEPNAEVDGGRVQTFFAEMETAIRDHPLWANATNQEIDNALEVTPP

SEQ ID NO: 43652 - protein, 225 aa, Oryza sativa
MRAQRPSSAAAGNPVLALLFLWVLGWGHVTAEIDIANMTALHKHVSFFDRNKDGIITPSETIEGIVAIGCDYAFARDFAAPVHAGLGPKTSPKDAPLPHLSIYIKNIYKGMHGSDTGALDAKGRFVPAKFEEIFSKHAKNRPDALTSLEVKEMILANRDPDDPQSWAAPIQEWGLIYGLASDKNGYFHKDSVRGIYDGSVFVKLEEERASSQSTVCRSLSFRSTV

SEQ ID NO: 43653 - protein, 516 aa, Oryza sativa
MASPPSPAEYRSYRYVLDDNLSSPTPAPGPSQPPPSPPPPPLPSPPPPYPFSSPWSSPPSPQAPPPQILTAPPLPAQALPLAQPKTNSSTKTIAMAVVVPTLAVCVVAAALLWLWRQRKRRRKNSPPPANNDSDQYSSDGQRQHGTADLERAVTGGGPRRYQFHELAAATRDFAEEEKLGQGGFGNVYLGRLAVGTGGGEDHQEVAVKKFSMDSMSQGRREFEAEVRIISQLRHRNLVQLHGWCDSRKGLLLVYELVAGGSLDKHIYNTDRILTWPERYKIIMGLGAALRYLHQEWEQCILHGDIKPSNIMVDSSYNTKLGDFGLARLVDHGKAWQATRSVLGTAGYIDPEFVNTRRPSTESDVYSFGVVLLEIVCAKPPVVLQENEPSFVLLRWVWNLYSQNAILDAVDERLRVVGVVRDERQMERVLVVGLWCAHPDLSERPSIARAMNVLQSDDARLPDLSPQMYKSKASPPPRDVAVGVDYGGVSTGSTFSGSGVPTSATTTTTRSSGSFVG

SEQ ID NO: 43654 - protein, 431 aa, Oryza sativa
MVEAAAIAFAKSSAVFVGKKVAETVISYVVNKALDRLPLENEDLKTKLKSKLSKTQAMLYGITLQEIQDNQGLVEWLWQFRDAIQEAEDALDELDFFDLEKVCNRKAESSSSLVPKFMRLQLSVSSNNSNSSRKNLKNALMRLESVFDDAANFRVVTGHGLHTSPQRNEGRIQDTTNRNETTRVLATPVFGRQKEKDEIIEWLGVEAPGRDSKLSVCAIVGGGGMGKTSLAQLVCQDKKVQDHFGDMIIWVHVPKRFEPVVLVARMLESINRNRVTASSLDILQLDLTKELVTKRFLLVLDDAWEDGENELWGQFLSPLRNIIAPMGGRILLTTRMGSVADAVKRQMPSNEYKCVVLGGLDHRDIMQILNHHVPPNEDLELRSVAEWIVHNLEGCPFVAKVIGQYLRDNTDHSNWNDFLNKKSMSFRRYCT

SEQ ID NO: 43655 - protein, 88 aa, Oryza sativa
MCRPGSSSLHNPPAGLDLPSLSGAPAACLLSLLSSRGWGPSGRPPPRYRASLSSSRKMQVSAYLFYHLDISLYVLCSRLCFVVEGCMQ

SEQ ID NO: 43656 - protein, 486 aa, Oryza sativa
MGWLNKIFKGSVNRVSRGHYDGSWHEGHSSDNARGAYDESDNEDIDRAIALSLSEEQNKGKAVDIDYNLEEDEQLARALQESLNADSPPRQNIPVENVPSEPPRELPPILFASSGSRTCAGCKNPIGHGRFLSCMDSVWHPQCFRCFACNKPISEYEFAMHEDQPYHKSCYKDFFHPKCDVCKNFIPTNRNGLIEYRAHPFWMQKYCPSHEDDGTPRCCSCERMEPMDIKYITLDDGRKLCLECLNSSIMDTPECQQLYMDIQEFFEGLNMKVEQQVPILLVERQALNEALETEKNGHHLPETRGLCLSEEQIVRTILRRPIIGPGNRIIDMITAPYKLERRCEVTAILILYGLPRLQTGSILAHEMMHAYLRLKGFRSLSPQVEEGICQVLSHMWLESEIIFGSSIDISATSVASSSSSSSTPTTSKKGAKTEFEKKLGAFIKHQIETDSSEAYGDGFRAANRAVESYGLRSTLNHMKMTGSFPY

SEQ ID NO: 43657 - protein, 417 aa, Oryza sativa
MASTAAPGSGQDHQQHEQQQQQHVAQQSRRDKLRVQGFDPAAAAAGHGLLPIEGDEHGAEPGAMYDHAEAAAAGASNMLSEMFNFPSQPPTGPSATELLASQMNANYRFGFRQAAGLAGGEGGWFGGGGAAGRTGLVLGGASLGSLGETSSPKQQASGMAGLAADPAAAMHLFLMNPQQQQQQQSRSSTSPPPSDAQSAIHQHHEAFQAFGGAGAAAFGGGAAAGVVEGQGLSLSLSPSLQQLEMAKQAEELRVRDGVLYFNRQQQQQQAAAAAASVQQQLPMALHGQVGVLGQQLHGGGYGGPAGVAGVLRNSKYTRAAQELLEEFCSVGRGQIKGGGGRGSAPSSPSSRTSSSSRSSGQTSSTTSTCSRTASRLVLSRLRLCISLPSFSLTAVITQMLLSTCINTVLCARTARGA

SEQ ID NO: 43658 - protein, 60 aa, Oryza sativa
MSAESVGNYGIRILFDDLHKTGIFTWDYLHHLGSKKFSLTRNYIRTLRKHGLSRDPQRRK

SEQ ID NO: 43659 - protein, 47 aa, Oryza sativa
MTLLRSYTNQNPLGNYFHIRRMIRFLKLIVLKRMLNCQRIRLLHQHY

SEQ ID NO: 43660 - protein, 348 aa, Oryza sativa
MDRRWIHGALFTPDYIDGVRNFMKFVEERFPGDAAILCPCSRCINQKSMAQRDVERHILLNGMSSTYTRWIHHGEANDVHVLEEPVDVDPHSNPIEHENNAADRVEDILTDLMGAQVPCNNAANGDGNPSSNHESVFKTLMEEAKHELYPGCTQFSRFSFVVKMLHLKSYYRISNSAFSAQLKVLRKAFPENNCLPNSYEEAKKMLRTLGLGYVSIHVCPNNCVLFRKEYAELDTCPVCQASRWKDPVNKKVPEKVLRHFPLIPRLQRIFATKKTAEEAQWHKLNREPKEKEMSHPADGEAWKDFDKCWPDFAEDARNLRLGLATDGFNPFGNMKLARLLMLLKLLDL

SEQ ID NO: 43661 - protein, 702 aa, Oryza sativa
MSNGVIALQASSTVSLLKLKGIDGLEVIQSFEQPAAVSDALTITEKDEAFAVVQHTGSEIEFVVKFTSDVTGEVIREKINIDQHRGNIQKVFLNNYIRTDKSHGFRALVVMEDHSLLLVQQGEVVWSREDGLASIVDVTTSELPIEKDGVSVANVEHNLFEWLKGHMLKLKGTLMLANADELAAIQAMRLKSSEKNKMTRDHNGFRKLLIVLTKAGKVIALHTGDGRIIWSNLLQSLRSSKSGEMPSALRICQWQVPHHRVMHENPSILIIGRSGADSAAPGVLSVLDSYSGEELNSLKLDHSVVQIIPLTVKDSSEHRLQLIVDSHSRAHLYPRSPDAMNVFLHEMPNTYLYTVDIETNVIRGHSLQKSCDNSADEYCFSTKELWSIVFPSDTERIAISETRKMNEVVHAQAKIIADQDVMYKYLSKNLVFVATVSPKASGEIGSAAPEEAWLVAYLIDAVTGRILHRVTHHGAQGPVHAVVSENWVVYHYFNLRAHRFEMAVIEIYDQSRADNKDVMKLILGKHNLSAPTTSYTRPEVMVKSQSYFFTFSVKAIAATQTAKGITSKQLLIGTIGDQVLALDKRFVDPRRSVNPTQQEKEEGIIPLTDALPIIPTSYLTHSLQVEALRGIVSIPSKLESTTLVFTYGVDLFYTQLAPSRTYDSLTDEFSYALLLITIAALVAAIVVTWIWSEKKELRDKWR

SEQ ID NO: 43662 - protein, 500 aa, Oryza sativa
MLQRNMVWTHQVASPENQVQPESFYHGGAGSNLSNLSVQVAVGVPGNTDFRSHYESINLQHQHVQNPYPHVGVASSSVFPSTMYNPCISTTAVDRYVPPIQSFGLGNPLLLPLYHQLAQGSMDENGSSGNFCDSVREFIKRKNALLVGGHHFVNSFASSSSSAYVPPNPLHRSWNASFEANILPSTGVSNPPEYSSADSLNNSNSMASHPELVHHGNYVFPAGHMSQYNAWIAQASRTGGVPQWEHGNAAANPPGGFVHSGTIDMPNGGLQGYQAGPFANYYGPLPHFHQNPLNSMQHPALFNHIQMQVPHQHCLSNNLLHHPSGNGLPLDPRILAISSNSGHTFGPTAQPSLANQVNAGSSRIQPYENAPFVDLSRLYEAGVIDEHRDMRLDVDSMTYEELVALEERIGNVNSGFTESYIEENLKSSSYVPDADCMPDQSSVEKDACIICQEEYEAKELVGTLGCGHKYHAMCIKGWLMVKNLCPICKTTALPADRRNG

SEQ ID NO: 43663 - protein, 311 aa, Oryza sativa
MGSSGADAPTKTSKASAPQEQQPPASSSTATPAVYPDWANFQGYPPIPPHGFFPSPVASSPQGHPYMWGAQPMIPPYGTPPPPYVMYPPGVYAHPSMPPGAHPFTPYAMASPNGNADPTGTTTTAAAAAAGETDGKSSEGKEKSPIKRSKGSLGSLNMITGKNSTEHGKTSGASANGAISQSGESGSESSSEGSEANSQNDSHHKESGQEQDGEVRSSQNGVSRSPSQAKLNQTMAIMPMTSSGPVPAPTTNLNIGMDYWANTASSTPAIHGKATPTAAPGSMVPGEQWVQVCSISPSLQEPCTCNIFFPL

SEQ ID NO: 43664 - protein, 230 aa, Oryza sativa
MEKRHNYVRKTAELATQFFINPATSQPNVSGLILAGSADFKTELSQSDMFDQRLQAKILNVVDVSYGGENGFNQAIELSAEILANVKFIQEKKLIGKYFEEISQDTGKYVFGVDDTLKALEMGAVETLIVWENLETNRYVLKNSASGETVIKHFNKEQEADQSNFRDPASNAELEVQEKMSLLEWFANEYKKFGCSLEFVTNKSQEGSQFCRGFGGIGGILRLPARYPVI

SEQ ID NO: 43665 - protein, 606 aa, Oryza sativa
MAKCYSEWPPLPPLHPPRRTPSQTSLWTIRRQLASFVLHCSRSCASPLLEPKNLPDEFHAVSASTPAPVPVSPLPDAPKLGISNKFIRGLCSDRQTEQLAFECYRRALHQPEFLPDKKTMNALTVQLLRAKQWSSLEFLVEDFRAYGVMPERRTCARLVASCVKARKFGLADMVLGVLEGKRGAPAAVAFSSAMQAYNKLHMYRSTLLVYERMRAARLSRDADAYRAVMAACGALGKPEMVASLLKQYKSHKWYPSESCVETYAIVCDALGRAGRASDALKCLREMEADGIAPNATIYSSIIRSLADAHESSAAEDLYNEAWKKGRLGDPDMFLKVIVMHVEAGRVEKIMGVAKDMRETGLRVTDCILSTIVNGFVKRRGLKPAIRAYDKLIALGCEPGQVTYASVINVYCQLGRSDRAESVFSEMIDRGFDKCVVAYGNMISMYGKISRASDAMRLLAVMKKKGCEPNIWVYNSLLDMHGRLGNSRQAEKIWKEMMRRKIQPDRISYTAIINAFNRSGELDRCMDLYQEFRETGGKVDTALAGLMVGVFSKCSRFNELIELLKDMQGTRLDRRLYLTVLRSLRDAGLEVHVKWLQTNFSFVEEKT

SEQ ID NO: 43666 - protein, 242 aa, Oryza sativa
MCTLEQRGRVFVLTLTGDGEHRLGHSLIGSIRAAVSSVAAAAAAAGPGAALVTVAEGRFFSNGLDIGPGGIPPSRVGELVVALRPLAADLLALPMPTVAAVTGHASAGGFLLTLCHDYRLMRADRGVLYMSEIDIGLPLPPYFVAILRAKITAAHALRDVTLRGRKLKAAEAKEMGIVDVVCPTAAETAAEAVKLAEQLAARKWNGNVYSSIRISMFPEACRSVGIVEESDEEKRNHFASKL

SEQ ID NO: 43667 - protein, 167 aa, Oryza sativa
MAGEAAAAERWVGAAVDFSEGSRAALRWAADNLLRAGDHLILLHVLKDPDYEQGETLLWEATGSPLIPLSDFSEPTIAKKYGAKPDAETLDMLNTVARQKEVVVVFKVLWGDPREKLCQAINEIPMSCLVIGSRGLGKLKRVLLGSVSDYVVNNATCPVTVVKTADG

SEQ ID NO: 43668 - protein, 1511 aa, Oryza sativa
MSQFRPSQHGSDSDAQMWQRQMLYKQLQELQRQQQQQQLDHGGRMQNSFGQFQAPAKQSLADQFPTMMNEMPMNEPSSYAWSNGISLGGSRLGSNSQILNNGNPHWEQHHGASLGTSSFANGAVYSNIQNLMRPMGSVNNKVNQSSHSLPASMSKGSGNQYSQFPGFPANSHNAMARAGSDQSDMTARFASSINSFQNEHGLCEQVTSNNLQNFCENGSVLSDSSTQSQGGNLKTGSPVLVNHLQHGFHVQHFNGWMNQVECQSAPHVGPASSAASLDPTEEKILYGDDNNFTGLLGEDDSSDGVPGHDNSSGNGNSSIPVSAQGGSWSALMQEALQSTSSKNGLQEEWSSVNFQNRDQAFTNKMTSPDLEQRQHATLNSMNLHSAPPSAQPSPSHDGSSGTMNNLKFTSFQRATKSVYDHQEKFSYGSTSAAINNHTTTGANDGLFQPSLKQSHSGDCGSPEHVNLSIGVWAQQKPMLLKRNLNSGGERFMPQNAQGLGVLQQSSYNHNFNGESSNNQSNWNGRNSNCVNTYSINNFQQSNPDVNTVRVPNDGYSSKNTVLTSSSTGMFSPGQHQMMLGQSGGNFGSNNAPGQRPLPETSCSQGNNAEYGLAGFSQMYTNAISAEGHNSNNGQHLGISFSARGNSFSGMDAHNLGQSDQKTMGPSALLNHLSATSGISTGHFPTNSLCNNKLLSESIQPPNNQENLLGGSCQLAGHVGSTNEKIAMVEEQLTQHSTASKYSNEPPFRGYDGTLLQNPNKIVQTSQHMLQQFLQKVDSTNSVVSSNMPIRSDITPNQLNQPPLQGFGLKLAPPMQQQLTSGNLWTSHTSVDIKPADNSVPGEDQRQLPSTPGSTTSSGYPSRSSPFYSSDADNTGLSSGCLPQTKSLGQQYPVAEPKSAPVNSLPQQSLQGTAATMLKNVWTNISAQRLGGIQHNKITPNILQSMMFPSTIGDSTLRGCPKDDYQRMRVANLSDDATTTTNSGRQEIKRVVENDGSDIPNMDQMGDILLGKKNALQRPLMQHGIINSSQGENMAANIPNMGSSFNKVSTYGGISLHGSLAPSNSQLINYSLLHQIQAIKPVDSDPENTSGKRLKTTDMSCNASQVEWPGAERAPHGENNPLRLCTDKTEVPRISNLLPSDQMLRFAPRNSEDVTSTMPSQVQLRELTSTSNDMATARTDLQNQCSSLGTSSTENLIESGDKLMINPQISPWFQHGSNRNGHNLAMYSVRKTASPYNHPKVPWSMDTSSVSGHGLECSTSVRPEMPSGLKVSSSVRRPKKRKFKAPVLVSWNQIIDGHQKLADMSTLGMDWPEATNRLIEVEDEADIQEDALILYLPRKRLIMTSRLIQQLLPSIPAAILRAQAISMYQSVTYTIAKLTVGDACSMPSNSSLDTGTLISSGDKSYEQIENDKMRDRFTKAVEFFIPRFKKMENDFVSLNKRSSMLDIQLECQDLERISIVNRLGRFHARNYHAAGVEASSTDLAPRRIYRDRHVMTFAVPVNLPDGVPCLLL

SEQ ID NO: 43669 - protein, 392 aa, Oryza sativa; identical to SEQ ID NO: 33312

SEQ ID NO: 43670 - protein, 26 aa, Oryza sativa
MARGNSTKRPTSDGCKAGRRGVAAAQ

SEQ ID NO: 43671 - protein, 500 aa, Oryza sativa
MDRRLLLSALLFIALACSSNRVHGALNRHSFPEGFLFGTGTSAYQYEGAVDKRGQNIWDTFSRIPGKIADGSNADIANDFYHRYKEDLNLITAMNMDSFRFSIAWSGILPNGTISGGINKEGVEFYNSLINEVIAKGLKPFVTIFHFDTPQALEDKYGGFLSENIVKDYVDYADLCFSLFGDRVKLWNTFNEPTIFCMNGYATGIMAPGRCSPYASASCAAGGDSGREPYVAGHHLLVAHAEAVRLYRARYRAAHGGEVGITQVSHWFEPYDAGSAADRRARRRALDFMLGWFMHPVAHGEYPPAMRRLVGGRLPAFTAEQSEMLRGSFDFIGLNYYTSNYAVAAPPPNKLHPSYLTDNWVNATGYRNSIPIGPPAYTPIFFNYPPGLRELLLYVKRRYNNPTIYITENGTDEANNSTIPISEALKDETRIGFHYKHLQFVHKAIQEGVKVKGYFTWTFMDCFEFGDGFKDRFGLIYVDRATLARFRKKSSYWFADFLRR

SEQ ID NO: 43672 - protein, 700 aa, Oryza sativa
MASALTGVMTSVINKLTALLGKEYMKLKGVQGEVEFMIDELSSMNALLHRLAEEDQHLDVQTKEWRNQVREMYYDIEDCIDDFMHHLGHTDIAESAGLVHRMAQHLKTLRVRHQIANQIEKLKARVEDASKRRLRYKLDERTFNLSTAGAIDPRLPSLYAESDGLVGIEQPRDVVIKLLTEGEGASSQKLKVISIVGPGGLGKTTLANEVFRKLESQFQCRAFVSLSQQPDVKKIVRNIYCQVSQQEYGNIDIWDEEKLINATREFLTNKRYFVVIDDIWSTQAWKTIRCALFVNNCGSRIMTTTRNMAIAKSCCTPDHDRVFEIMPLSIDNSKSLFLKRIFGSKDVCIPQLDEVCYEILKKCGGSPLAIITIASLLANKANTKEEWERVRNSIGSTLQKDPDVEEMRRILSLSYDDLPQHLKTCLLYLSIFPEDYEIERDRLVERWVAEGFIITEGGHDLKEIGDCYFSDLINRSMIEPVKIQYNGRVFSCRVHDMILDLLTCKSTEENFATFMGGQNQKLVLQGKVRRLSLNYYTQDHIMVPSTAIITHCRSLSIFGYAEQKPPLSMFPVLRVLDIENGEDMESSYTKHIRKLIQLKYLRLNVRSVAELPEKLGELQHLQTLDLRRTNIRKLPESFVRLQNLTYLRVNNLDLPEGIGHLHALQELTEIRISQDCLASSLLELRNLTKHTLTTKFSPII

SEQ ID NO: 43673 - protein, 641 aa, Oryza sativa
MEVAGAQAGILPLLLRHPASLRGSLSLSCGGARRSWAAAAATAEGGGGEEGRGYERVPMDTPGAYRLVDRATGRSVIVWGGTDDVSMPSPAVLSTTTRVPDRPKENGRSTSIGNFGRLKAQKVKVLARRSAHLKREDSGRISTSRFSESPSDESDEDGTYFERDRARNTRQNSRSRDDKTRGAHSLNSVLRQYRGADDLDFPGSEATSGSKRWGNISDVTFGRQNQRQKGPLDSGFFSRRSFKEIGCSDEILGALRSFGFPRPSHIQAMAYRPVLEGKSCIIGDQSGSGKTLAYLCPVVQNLRKEEVEGLHRSSPRNPRVVVLTPTAELASQVLNNCRSISKSGVPFRSMVATGGFRQKTQLESLDQELDVLIATPGRFLYLLQEGFVQLNNLRCVVLDEVDILYGEESFEQVLHQLITVAPLTTQYLFVTATLPLDIYNKVVETFPDCELIMGPGVHRTSSRLEEILVDCSGDDNEEKNPETAFSNKKSALVKIIEESPVRKTIIFCNKIETCRKVENALRRVDRKASQIKVLPFHAALDQQQRIANIKEFLNKQTADSMFLVCTDRASRGIDFANVNHVVLFDYPRDPSEYVRRVGRTARGASGNGKAFVFAVGKQVSLARRVMERNIKGHPLHDVPCV

SEQ ID NO: 43674 - protein, 462 aa, Oryza sativa
MTKPEALQLHHLPDDVLHRILSRLTFRESSRMGLLSRKWQKLWRSCCPKLIFTRATMFKPGNKTIRRTRTNFARRVNSLLRQLCAPPTLNKFVVKFGLRRKHTCHVNRWVGFCSKLRARHITFDFTPGVKGIFRGLADEKYIFHLHVFSVPDRSPAHIKSLHLSYVWLNTATTGFTGFANLKKLTLHKVSFLNDFQHLMLSECTALEWLSISCSSFTELTLCKPLRRLRYLSLHYCYMEKVELEAPNLTSVDLTNRPIPLALSESLKVMEANIKLLHKSVLYGDNLDYICTELPAALPHVQKLSITSTLCIYDELQSFAKTSVRFINLRHLSLYLPLYGDGRSVGGILRLAYLLELAPVLEELELHFRFSDFVIRQAIRVDMLPYRHDKLKRVVMSGACHWQGLIELAHHIRRCASRLDCMIMDPMVRIKGLPTVDWLEERGRRIAKELLKRQEFQGVLTVL

SEQ ID NO: 43675 - protein, 716 aa, Oryza sativa
MAWRMLRRKDFHTGLVNLASRVDHGGAKNFSSGTFGKLADFVLSDTHTPIVKGAANCTAYKHCTIRNFHAGVYMLAWSRKREEVAGLKAPKKEKRVKRETRTQPPVEAPYVAPKQKIAIKSSPDKTVDIFDGMTLLDLSKRTGASIGALQDILTDLGEKVESEFDAISIDLAELVAMELGVNIRRMHTGEGTLEPRPAVVTIMGHVDHGKTSLLDSLRQTSVAAKEAGGITQHIGAFVVEMPSGASITFLDTPGHAAFSAMRARGAAVTDIVVLVVAADDGVMPQTLEAMSHAKAANVPIVVAVNKCDKSGADPERVRIQLGSEGLLLEDMGGDVQVVEISAVTKLGLDKLEEALLLQAEIMDLKARIDGPAQAFVVEARVDRGRGPLATAIVKAGTLVSGQHIVVGAEWGRIRSLRDTAGKITESAKPAMPVEIEGLRGLPMAGDDVVVVDSEERARMLSQGRKKKQEKDRLRKIDEDMTEEAEIGEETPERVEMPIIVKADVQGSVQAVTDALRSLNSPQVFVNIVHVGVGPISQHDIDLAQACRAYIVGFNIRTPPSAITLAATQANIKILLHKVIYHLLEEMGREIVEKAPGTPETQVSGEAEVLNIFELKGRSKSKGPDIKIAGCRITDGHLSKTGTMRLLRSGDVVFEGPCASLKREKQDAETVDKGNDCGLVIQDCNDFQVGDIVQCLEQVIRKPKFISTQSGAVRIEC

SEQ ID NO: 43676 - protein, 155 aa, Oryza sativa
MADRLELQGRHGKSRVRVSRVWRRPAAAGGHVIVEWNVAVSVVSDCLPSYTSDDNSAIVATDSIKNTVYVKAKECTEIVSMEEFAVILGRHFTSLYPQVSEATVTIAERPWERVVVDGKPHSHGFKLGVEKHVTEVIVKKSGNLLINSGIQDTPC

SEQ ID NO: 43677 - protein, 469 aa, Oryza sativa; identical to SEQ ID NO: 31523

SEQ ID NO: 43678 - protein, 542 aa, Oryza sativa
MVGPGHRNSHGKRHSDYAENGGGKRRNPGDDTYAPGPDDTVYRYLCPSRKIGSIIGRGGEIAKQMRADTQAKIRIGESVSGCDERVITIFSSSRETNTLVDAEDKVCPAQDALFRVHEKLSIDDDIGNEESDEGLAQVTVRLLVPSDQIGCIIGKGGHIIQGIRSDTGAHIRVLSNENLPACAISGDELLQISGDSTVVRKALLQVSSRLHDNPSRSQHLLASSMTQPYPVGSHLGSSSTAPVVGITPLISSYGGYKGDVAGDWPSIYQPRREESSAKEFSLRLLCAASNVGGVIGKGGGIIKQIRQESGAFIKVDSSNTEDDCIITVSAKEFFEDPVSPTINAAVHLQPRCSEKTDPESAIPSYTTRLLVSTSRIGCLIGKGGSIITEIRRTSRANIRILSKENVPKVAAEDEEMVQISGDLDVVRHALLQITTRLKANFFEREGALSGFPPVIPYHPLPVGVSEGPKYLGRDTKPLGHDYPYSSGYRGSDDIGPIDSYASYGSSQVSGGGYGAYGGYSGRSGSSGLSGPSSFSYGKRHGY

SEQ ID NO: 43679 - protein, 191 aa, Oryza sativa
MASKYRGYYHDEASSAAGGGGGGGGGDGYRREKQVRKKRLTAQKRKEIKEAFDLFDTDGSGTIDPKELNVAMRALGFEMTPEQIHQMIAEVDKDGSGTIDFDEFVHMMTDKMGERDAREELNKAFKIIDKDNNGKISDVDIQRLAIETGEPFTLDEVREMIEAADENGDGEVDHEEFLKMMKRIGFGAGFF

SEQ ID NO: 43680 - protein, 766 aa, Oryza sativa
MDSLQKSHDLCLKRKLVDDCLSKDFKYRRVEEDNVSSNVESRPLPGSPSQSCCIQPNLAKDCVNYLKSGLPSRIAFYKQGAWCDFPQKIMESLVEGFKADKSSAVVVMDDQPLLVDFLSMTMVNLKTRKQRSVSWLDGTGKWFFPSAFFDEGVDESRKLNMGSEGSGQGLTEGMAPKAPNELVKQAVVETSSPVLQNSCIPDILRKKIVPVERGSESFQFVQNLFLSGMGSFASPKNLLHIHRYSAEDVTAQCRLESFARQMRLTRKKIGYADVRYGWRSRKQDIVGVLINGFISTGQTSHSSDMRTGVYLSPENRAFTSVGLCDVDEKGVQYMLLCRAILGNMGTIKPGSQDEFLSIYDSGVDNCSNPSYYVIWPSKLGTHISLEYLISFRLTPEIQDYLLHLKGLWLCPPPKEVEVDLSTLQPPSEWYKSCSEVNCHPLSIKLDPISNSRININSASGRASNDSQAPSVQPQKCGPVDSTVVSMALKREQFSIPSMCSESFSSHCTKSQDSVVRMRPDDTLVRRALISDSVNGCDSVGPTVESHCHSLLSQNFDSEGHASHVVSMFGNSGARLHSSAPCMTTEAQVFVAPSRAYENSSSLNAEGSDAVISSIAPQVHAPSIPPQNCPRTSVAPHLCLPRSMAPHLRVLRKISKVHSTNMPEAHYSSAATMVPVICKPPLFGITQKGHGVHTSSMMCTTPNVVLHGPDHPAKLADTERNAPSLINGALRREVQVQRPNQGVDASSIITQAADTLVALSAHGEKGW

SEQ ID NO: 43681 - protein, 426 aa, Oryza sativa
MASTVSFSPANVQMLQGRSCHGHAAFGGCSAVPRTGPRMRSVAVRVSSEQEAAPAVRAPSGRTIEECEADAVAGRFPAPPPLVRPKAPEGTPQIRPLDLTKRPRRNRRSPALRAAFQETTISPANLVLPLFIHEGEDDAPIGAMPGCYRLGWRHGLLDEVYKSRDVGVNSFVLFPKVPDALKSQSGDEAYNDNGLVPRTIRLLKDKFPDIVVYTDVALDPYSSDGHDGIVREDGVIMNDETVYQLCKQAVSQARAGADVVSPSDMMDGRVGAIRAALDAEGFHDVSIMSYTAKYASSFYGPFREALDSNPRFGDKKTYQMNPANYREALLETAADEAEGADILLVKPGLPYLDVIRLLRDNSALPIAAYQVSGEYSMIKAGGALNMIDEEKVMMESLMCLRRAGADIILTYFARQAANVLCGMRSN

SEQ ID NO: 43682 - protein, 124 aa, Oryza sativa
MASSSSPPLLLLVSLLAAVAAAFLAAQALAQHQPQGNDTAAAGEGWRPRLRKTYVEGGAAGMVPRRRRLVGRFQICAVCTCCGGPHGVCIPAPCCYAINCNIPNRPFGVCSFTPRTCNCLNCHL

SEQ ID NO: 43683 - protein, 170 aa, Oryza sativa
MGIGHPEYASTMYLLGKVLSQQGKDAEALIEESIRILEESGLGESPICIQRMRYLSTELIKSNRLAEAENWQRKILHNLELSKGWDSFDTTNAAELLTMTLQTMGKLKESEELLERCLEVRKRILSEEHFQITYQVFEFFTTSSALLAINTDWEVFVPCAPATMLDWEAM

SEQ ID NO: 43684 - protein, 173 aa, Oryza sativa
MQVQGKHALHGTRYSSPLDCAMKTLQSEGVCGLFRGGLATLFREAVGNAVFFCTYEYSRYWMHRYLDSPWFSGGNHLVLAKDVGVGIMSGGISGMAFWTATLPLDVAKTIIQTDPDPHLSRNPFQILKMVYRRAGMGGCYAGLGPTLARAFPANAAAIVAWEYSAKILSIRRD

SEQ ID NO: 43685 - protein, 234 aa, Oryza sativa
MIRNQPLLWVLSIGFELMELTFRHMLPNFNECWWDSIVLDILICNWFGIWAGMKTVRYFDGRTYEWVGLSRQPNIISKVKRTLGQFTPAQWDKDEWYPLLGPWRFIQVLSLCIVFMIVELNTFFLKFCLWIPPRNPLIVYRLVLWWLIAIPTIREYNTYLQDRKPVKKVGSFCWLSLAICILELLLCIKFGHGLFPKSMPSWLFIAWTTVASLLMMFLLVWTWKIYRTMIRKRL

SEQ ID NO: 43686 - protein, 288 aa, Oryza sativa
MQRKIFVGNVHADVDVDRLYEYFSQFGEIEEGPLGFDKTTGKPKGFALFVYKSVESARRALEEPTRNFDGKMLNVQKAIDGRTKNTPGMNANSNPSGTAASAAAAAAAAQMTAPATAAITPYDASAYGATAVPDLGYAQQAAMLGLGAQQQAFAQPNAAMLAMMAAAMQNPAMLATLNPAFAAAALGAGGQQVHAAGIPGFGAQGFGTQGFAAGAAAFPNAAGVQAPPGFQGPPGFQTSAGFQVGQAASQAGTAAAAAAGAAGYQAAAAGQGQVPGTQIGGAGFQGGF

SEQ ID NO: 43687 - protein, 337 aa, Oryza sativa
MVAPSRLPSHEEQSAAAAADGSATPSQGIPVVDLGVLINGAADERSRAIRDLGRACEDWGFFMVTNHGVPEALREAIMDACKELFRLPLEEKKEYMRAKPMDPIRIGTGFYSVVDAVPCRRDYLKMFSHPEFHCPEKPAKLREIATEYATCTRALLLELTKAISESLGLAGGRLSEALNLESCFQILVGNHYPACSRPDEQAMGLSAHSDHGLLTLLFQNGVDGLQVKHDGEWLLAKPLPGSFFVIAGDQLEIVTNGRYKGVLHRAVVGGEQSRMSFVSLIGPCMDTVVEPLPEMAADGRGLEFRGIRYRDYMEMQQSNSINEKTALDIVRVMHQAG

SEQ ID NO: 43688 - protein, 650 aa, Oryza sativa
MVDMEKKREKLVAGLTRRHMIRSGSSSSSSPTAAAAAADNNKNMSEGGDLNLISRQKKGKAKVLKWRLSNTDMDMKGEEGGSDGDYDDTVLSSLTTASFSSLISRKRVKSLGKVAEDCDAIDPPVPRKLRSAINKRASQTVSTSPRHVKKRRHLSAISSQTFLMDRETRCNAIPLANHFSKEEEVVVDALLSLSQIPHLCELSSDRGMAEDNLDLNVTSVSYSAGATKVDEKISALPTAGTEVANQPALDEPVERTGNVSQINHVPCGGTCNNTNPTLSNDGQIHDISLGIVTNLPSPSKDYNNSRKQLKVQFDNSTIHPTKIEAPRCLENSKKPDILEHDRKNVKNNTAQEIVPPVQTSKPCASHRPSSNTLASCNNTAAETVKGTGEHENLSLVNKNGTPSKTWKRSITHVYMCHLIQMHLDKEKASQNRVKPEEVCHSHISRSPDGSTISKNGAQDEKFYALHFDVRLPVQPSCSVCDTTIARQKMVSGNFLNLPTSAALSGVQHVQYLHPPIAPRGAMPYPIQHLPYTRGNLTHTALLLQQMPQYMCNPNPAIMKIQQQLMPNQHQHQQQQQMWQFQFPQYHHPRPDAAAAAVSAAWQHSSRLHDVSSLRPVAVLPAPPPPPPPQMELFCSPYHGGSRQPPQLRLI

SEQ ID NO: 43689 - protein, 504 aa, Oryza sativa
MDHIFSTNAWLTIALVFIITLAAKVVRSSVTLPAEKTSKPRPPPEAKGAPLVGIIPAVLRRGLQAVIREQHRALGSVFTLRSLGLAVTFLVGPECSDHFFHAPELEIAIDGLYEVTVPIFGKEVGYDIDLDTRNEQHRFFAKMLRPAKLRGHVLPMVCEIEEYFGKWGECGVVDLMQEVDHVLMLIASRCLLGKEVRENMFDEVASLFHELMGGMHLISMFFPYLPTPGHRRRDKARAKLGEIFSQIVKTRKMSGRVEDDMLQDLIDSTYGDGRATTDTEVTGLLVALLFAGHHTSSTVAVWTALRLLTHPEHLRAVRAEQERLVAAAEQQRSHHGGGGGGGIDYGVLLQMDVLHRCIKEALRLHPVTPMILRRARRGFTVRDKEGGEYSVPAGRLLASPLVVNTLLPNIYKDPHVFDPDRFAAGRAEDKAVAGARDLAYLSFGAGKHACMGEGYAYQQIKVILSHLVSNFELKLESPFPETEDMLSMRPKGKAIVSYKRRTLS

SEQ ID NO: 43690 - protein, 533 aa, Oryza sativa; identical to SEQ ID NO: 33245

SEQ ID NO: 43691 - protein, 382 aa, Oryza sativa
MAFKSTTNRSHLRLVREVEAIGGNVFASASREQMSYTYDALKCYAPEMVEVLIDSVRNPAFLEWEVKEQLQKIKSEISEVSGDPHGLLMEALHSAGYSGALAKPLMASESAVNRLDVATLEEFVSENYTAPRMVLAASGIEHDELVSVAEPLLSDLPSVKRPEEPKSVYVGGDYHCQADSTSTHIALAFEVPGGWRQEKTAMIVTVLQVLMGGGGSFSTGGPGKGMHSWLYLRVLNNYGQIESFSAFSSIYNNSGLFGIHATTNPDFVSSAVDLAARELHEVATPGKVTQEQLDRAKEATKSSVLMDLESRIVASEDIGRQVLTYGERKPIEYFLKTVEEITLNDISSTAKKIISSPLTLASWGDVIHVPSYESVRRKFHSK

SEQ ID NO: 43692 - protein, 272 aa, Oryza sativa; identical to SEQ ID NO: 30793

SEQ ID NO: 43693 - protein, 382 aa, Oryza sativa
MTGALAMMPSTSSPYPLLAPPTCSSRLPPLRCFVGLRWSAPRIQVREYPDAVAGIAKGAGGRGGRFRAPASSISQPCSRTIIITNEHVQNADFPPNYSKREKKPFPIPVLELRRRAKERAKKAEGKPKRSLPPPKNGMLIKRLIPVAYKVYNARILLINNLKRLMKVIPVKGCKHCSEIHVGSVGHPFRTCKGMSSDKRRGQHDWGGTLVEAVFVPVEAYHLEDRLGKRIPHDQRFAVPRIPALVELCIQAGVNLPEYPTKRRRKPIIKIGKNEFVDANEDDLPDPEPYKLEHPILEELNDNEIIAPASPEEIVALAEETLEAWEVVRDGALKLMKGYAVRVCGYCPEVHIGASGHKARNCGAFKPSRGMGSMDGKQQCSMT

SEQ ID NO: 43694 - protein, 504 aa, Oryza sativa
MSMPKEETTEEHKETDLTSNIAQITACTIQSLCKIGTHAASSGGSQVILLNISWKGIISLLQLGKGMVEEKVNVREIILIPISVAIESLGVATERWCVPLQEVLGTAEARRAFLPIKYFLTNAVRICSIYPSETMAIYKSIIRCALLISHSSILFCRNPQLKAASELLFELLEPSSFLLLDTLMKSTEVSPESKCQLVQYFLEKVRTGNPEYTGEVDHTMNFATLGCIFSVDSDVDNINRALLPAEFTVFLHFLNASPWLREEVVIELCKKLHLFLNILTLEDVYSYVLGCQIPALSSDDDSPKVVWQPVYTSLIQALKTFMIAASSSSAAWSEFEVFLLENLFHPHFLCLEILTELWCFFMHYAEAETSTYLINQLFLLLKTLASPEEVLAPLSALRKLARASCNILSYASSATIDQIYTMLNDSSSKSSILYLALLMEGFPFDSLSRGVKEHAVKTLFTSFAGYLQNQNYFKNHGEINLPTSSSSGIIGFPVHALASAFQSW

SEQ ID NO: 43695 - protein, 1326 aa, Oryza sativa
MAELMATMVVGPLLSMVKDKASSYLLEQYKVMEGMEEQHEILKRKLPAILDVIADAEEQAAKHREGAKAWLEELRKVAYQANDVFDEFKYEALRRKAKAKGHYKKLGSIVVIKLIPTHNRILFRYRMGNKLRMILNAIEVLIAEMNAFRFKFRPEPPMSSIKWRKTDSKISNLSMDIANKSRKKDKEEIVNRLLAQASNGDLTVIPIVGMGGMGKTTLAQLVYNDPEIQKHFQLLLWLCVSDNFDVDSLAKRIVEAAPKEMNKKNDNGGAKKLPQDELKEVVSGQRYLLILDDVWNRDASKWEALKYNLKHGGSGSSVLTTTRDQAVAQLMAPAQEVYDLKNLNESFIEEIIKRSAFNSEQERPPPELLEMVGDIAKKCSGSPLAATALGSTLRTKTTKKEWDAILSRSTICDEENGILPILKLSYNCLPSYMRQCFSFCAIFPKDHEIDVEMLIQLWMANGFIPEKQGECPEIIGKRIFSELVSRSFFQDVKGIPFEFHDIKCSKITCKIHDLMHDVAQSSMGKECATIATELSKSDDFPYSARHLFFSGVIFLKKVYPGIQTLICSSQEELIRSSREISKYSSLRALKMGGDSFLKPKYLHHLRYLDLSYSKIEALPEDISILYHLQTLNLSICDCLCQLPNGMKYMTALRHLYTHGCWRLKSMPPDLGHLTCLQTLTCFVAGSCSGCSDLGELRQLDLGGRLELRKLENVTKADAKAANLGKKEKLTELSLRWTGQKYKEAQSNNHKEVLEGLTPHEGLKVLSILHCGSSTCPTWMNKLRDMVKLVLDGCKNLEKLPPLWQLPALEVLCLEGLDGLNCLFNCDIYTSFTFCRLKELTLASMRNFETWWDTNEVKGEELIFPEVEKLIIKSCPRLTALPKASNVISELSGGVSTVCHSAFPALKEMELYGLDIFQKWEAVDGTPREEVTFPQLYKLDIRLCPELTTLPEAPKLRDLNIYEVNQQISLQAASRYITSLSSLHLHLSTDDTETAPVAKQQDSSELVIEDEKWNHKSPLELMDLTGCNLLFSYPSALALWTCFVQLLDLNIWEVDALVDWPEEVFQGLVSLRKLHILQCKNLTGLTQARGQSTLAPSELLPRLESLQIRRCYSFVEVPNLPTSLKLLQITDCHDLRSIIFNQQQDTTMLVSAESFAQPDKSSLISGSTSETNDRVLPRLESLVIEYCNRLKVLHLPPSIKKLDIVRCEKLQSLSGKLDAVRALNISYCGSLKSLESCLGELPSLQHLRLVNCPGLVSLPKGPQAYSSLTSLEIRYCSGINLLPPSLQQRLDDIENKELDACYEESEAKPEPKSPHRQSAISRLLCLE

SEQ ID NO: 43696 - protein, 664 aa, Oryza sativa
MLRRVHAALRDAERLSVADHSARLWLAELGDLEYRAEDVFEELEYECRRAAQLEDLKIDLLRAVGAAPTTGKRKREVAQLFAAAPAARLRRKIDDIWARYGEIASDRERLRLRPGDGAARRPAAGALVPSSSLPRGEIHCRERDLQRVTDLVCRCKPDGGRNYAVVAIVGMAGVGKTSLAQHVCSEEAVASQFDLNLWAWVSQEFDVIGMTAKIVEAITRARPDCSELNALHGTMVEHLAGKRCLLVLDDVWDDNPIHWDTITAPLSCCAPGSTVVITTRSKMVAKMVTPNVYHLDCLSDEHSWYMCRRRASRGGATIDDELASIGQQIAKKCRGLPLAAEAAGTTMNTSVTREHWNHVLESNLWADNDEAKNNVLPALKVSYDHLPAPLKRCFAFCSLFPKSFVFDKDALVQLWTAQGFIKTRGECRPEDVGAGYFYDLVARCFFQLSPSHGIGKGKYVMHDLYQELAQFVSGHECRMIHQLNLTGADKTTRHLSIVHDESNSDKELLLKSFCSPDLRTFLFLARMEQVIRGEMPYRRKIVPCGLVTDFECLRVLGLSNTDIVEVPKSIGSLIHLRYLGLDNTGIQMLPESVGALFHLQTIKLNHCSSLTQLPQGIKLLLNLRCLEIAHSNVQMPSGIRVLTSLQKLPIFKGCSVQGTILQPF

SEQ ID NO: 43697 - protein, 343 aa, Oryza sativa
MANLGGGAMPAGSSGGDGEVEAGFAKLQGEDFEYYMQTYSIMLGRNSKKSTVDVDLSSLGGGMNISRHHARIFYDFQRRRFALDVIGKNGCLVEGVLHLPGNHPVKLDSQDLLQIGDKKFYFLLPTRSIFASAAAARHPPIIPQQMPPPSYVRTGRPRLSEFHDRSFEGDYGREGDEIGNGISESGGMRGKLIKRNKKLSAESEMYGGHRINVEAIGTLGEDSRSEIRSRGDRDMDNQHILQAEEKDVVSSVATVLSDLCGPGEWMPMAKLHTELLEQFGNVWQHSRVRKYLSPEDWSPTETKGRPWYGLLALLRKYPEHFVINTRSKGRVTSEFVSLVSLLS

SEQ ID NO: 43698 - protein, 622 aa, Oryza sativa
MAAASISRSLLRRSRCGGGEHHLLLLARGFVTAECHRPVVLHKRGSDILHDPWFNRGTGFSMTERDRLGLRGLLPPNVVSSQQQIDRFMLDMQRLQKYARDGPSDTYPLAKWRILNRLHDRNETMYYKVLIDNIEEHAPIVYTPTVGLVCQNYSGLFRRPRGMYFSAEDRGEMMSMVYNWPADQVDMIVVTDGSRILGLGDLGVHGIGIAIGKLDLYVAAAGINPQRVLPVMIDVGTNNEKLLKDPLYLGLQEHRLEGEEYVAIIDEFMEAVFARWPNVIVQFEDFQSKWAFRLLQRYRKTYRMFNDDVQGTAGVAIAGLLGAVRAQGRPMLDFPKQKIVVAGAGSAGIGVVNAASRTMARMLGNNEVAFESARSQFWIVDAHGLITEERTNIDPDARPFARRKSELGHQGLSEGASLVEVVKKVKPDVILGLSAVGGLFSKEVLEALKDSSSSRPAIFAMSNPTKNAECTPEEAFSILGEKIIFASGSPFSDVDLGNGKIGHSNQGNNMYLFPGIGLGTLLSGARVISDGMLQAAAERLASYMKEEEVLEGIVYPPISRIRDITKEVAAAVVKEAVAEDLAEGYRDMDARELARLSEEETVEYVQQNMWSPVYPTIVYKKD

SEQ ID NO: 43699 - protein, 145 aa, Oryza sativa
MERIQREEDSRGVDSDCRAAPTSDGRHDFMRTPIWACKYFMESLSSLLSNGSSHMSITVLERPQLSFYSRLFCPWCCVTSFGPMGCVSKLGALGARPRVGARPYGRSSPLFMPLVAAKNRRVLMIEIASCYQLAARMLAKPPICL

SEQ ID NO: 43700 - protein, 308 aa, Oryza sativa
MEHKQHYRASVPWVGPNNAESISFVTGTVYTLLRETAKWAAYSTKKRFATAKMDIGGAFPTIYSLTQCTPDLSSESCFKCLQGTIQESLKWFDGRRGGRIIGVRCLIRFETSIFYNGEPMRIMGPSTNSTSADGNRSKRKLSGLAVSIVFPVMGVLLFCVILGFGWIIRRNKIGKASLQEKTSTYLYEEEALAWPIQGQSSELLFDFACIIRATNNFSRENKIGEGGFGTIYKGKLDRLEIAVKRLDSHSGQGFVEFRNEIQLIAKLQHSNLVRLLGCCSKGEEKILVYEYLPNKKPRLLHIWYLKPH

SEQ ID NO: 43701 - protein, 412 aa, Oryza sativa
MDGIDTSMKSVGISYPYVRRRKKLPDPVEKEKGVSLWSMIKDNIGKDLTKVCLPVYFNEPLSSLQKCFEDLEYSYLIDRAYEWGKRGNSLMRILSVAAFAVSGYASTDGRSCKPFNPLLGETYEADYPDKGLRFFSEKVSHHPMVVACHCEGTGWRFWADSNLKSKFWGRSIQLDPVGVLTLEFDDGEVFQWSKVTTSIYNLILGKLYCDHYGTMRIQGNNEYSCKLKFKEQSIIDRNPHQVQGVVQDRSGRTVAILFGKWDESMHYVMGDCFGKGKGSENFSEAHLLWKRSKPPKFPTRYNFTRFAITLNELTAGLKEKLPPTDSRLRPDQRCLENGEYERANAEKLRLEQRQRQARKMQESGWKPRWFAKDKATDTYRYLGGYWESREKGSWEGCPDIFGQVPNDLMITD

SEQ ID NO: 43702 - protein, 430 aa, Oryza sativa
MHLCACRILSDCIPIKQRKRTPYLIISSCLSLFPWLILEMSEPLRSSSNFLTALLIVQNLGSAMADVVIDAMIAEAVRSAGPEFAGDLQSLSWSSMAVGGIFGSLLGGYALSNLPIHVIYIIFSALPLFQLISCIFVEESPKGFESRMDNAAPKHVEDQTIDASPGKSSSESYKYEDTRRRKGARRNNKRKSLSKRPEYHDKNKSTNLRPYLSLKSAFFSLCTAFKQPTILRPMAWFFFSNVAIPNISTVMFYYQTEVLHLEASFLGTARVIGWFSLMLGTYIYNRYFKHKKLRNILMFAHVGLAIIGVLDILLVLRLHVHYGITDKYMVLWGSALADAINQFKMMPFLILSGQLCPPGIEGTLFALFMSINNFGSTLGSFLGAALASALSISSAQFDNLALGLGVQLIGTLLPVGFLFLIPKEVTGLTS

SEQ ID NO: 43703 - protein, 472 aa, Oryza sativa
MAVTVARDVEAGGLDASTSGAADEKPSWFTPKRLLVMFCLINMLNYVDRGAIASNGVNGSRQSCTGGTCTSGSGIQGDFNLNNFEDGVLSSAFMVGLLIASPIFASLAKIHNPFRLIGVGLLVWTIATAGCGCSFDFWSITICRMLVGVGEASFISLAAPFIDDNAPAAQKTAWLAMFYMCIPTGIAVGYVYGGLVGNSLHWRAAFWGESILMLPFVILGFVIKPLELKGFNHSVKTKEYGEMLNPERQDETKQGASIGVDGLAETLPHKFSISSFGKKVLTEIKHFMKDIMFGGITIVCGIFGTLSGGFILDKIDSTISNAFKLLSGATFLGAIFCFGAFCFKSLYGFILFFSVGELLVFATQAPVNYVCLHCVKPSLRPLSMAMSTVAIHIFGDVPSSPLVGLLQDKIHNWRSTALTLTSILFIAAIFWFIGIFVRSVDRFNEQSEHDVPAVERSNLRPLLDENEEARAS

SEQ ID NO: 43704 - protein, 511 aa, Oryza sativa
MAGGGVAALGVKKERAAEYKGRMTLAVGMACLVAAVGGAIFGYDIGISGGVTSMDPFLKKFFPVVFRKKNDDGQNNYCKYDNQGLSAFTSSLYLAGLVSSLAASPVTRNYGRRASIVCGGLSFLAGATLNAAAVNLVMLILGRILLGVGIGFGNQAVPLYLSEMAPAHLRGALNMMFQLATTLGIFTANMINYGTQHIRPWGWRLSLGLAAAPALLMTVGGLLLPETPNSLIERGRVEEGRRVLERIRGTADVDAEFTDMAEASELANSIEHPFRNILEPRNRPQLVMAVCMPAFQILTGINSILFYAPVLFQSMGFGGSASLYSSVLTGAVLFSSTIISISTVDRLGRRKLLISGGIQMIICQVIVAVILGVKFGTDKELTRSYSIAVVVVICLFVLAFGWSWGPLGWTVPSEIFPLETRSAGQSITVAVNLFFTFVIAQAFLSLLCALKFGIFLFFAGWITVMTVFVHVFLPETKGVPIEEMVLLWRKHWFWKKVMPDLPLEDGDSHHK

SEQ ID NO: 43705 - protein, 96 aa, Oryza sativa
MKLTAGPLGLTTKRIGEIGRRILKNRFTKKCRRARGDNLQVGFSENLSLRFDHLAQPTVKLALIPLCHAQKFSPNFQTILCIKSLSRTSQGTQNDK

SEQ ID NO: 43706 - protein, 474 aa, Oryza sativa
MGKKGKWFGAVKKVFSPESKEKKEERLRRKLAASNPNPPDLTPSASLEVNVSVPPPPPPPPVQQIEEVKVPEVEQEQSKHVTVEAVPEAVPVPAQTSSLPPGVSREEQATIKIQTAFRGYLARRALRALRGLVRLKSLVEGNSVKRQAASTLRCMQTLARVQSQIRSRRLKMSEENQALQRQLLLKQELESLRMGEQWDDSTQSKEQIEASLISRQEAAVRRERALAYAFSHQWKSTSRSVNPMFVDPNNPQWGWSWLERWMAAKPWEGRAGTDKESNLDRASAKSASLNLGEGEITKAFNRRGSKPDKSSPTTPKLTRPASRQSPSAPSAKVSPIFAKKKSATPKNGLSQVDDDAKSVFSVQSERPRRHSIATSTVRDDESLASSPSVPSYMAPTKSARAKLRLQGSAVTDGAETPPEKVASVGSVKKKLSFQAGMAPPSPMRRHSGPPKVEVVKDIAEPPQPEALVINGGSK

SEQ ID NO: 43707 - protein, 363 aa, Oryza sativa
MAILPLSISHSLTSALSATSSGIGRPVARLLHPRVPSRPTVICLAAPPKVPVPIASPASLGDDPSKWDPAECDALLRGGEQVASVLQEMLKLMEDMEMDGSFESLAVELIAQGVIGKRVDEMESGFLMALDYMIQLAEKDSDNERKSLLEVVKQTVLDHLTKKCPPHVQVVGLLCQTEKKDSRHELLRRVAAGGGVFKNDKGLKCQIPGANLNDIANQADDLLESMESRPTIPDRKLLARLVIVREEARNMMGGGLLDERNDRGFTTLPEAEVNFLSKLVALKPGKALERMIKDVMQGKAEGADNIENANAGPDSKLNHLTGISGRGSVTGLKPRPVRPGMFLETVSKVVYMQTTHLALQHNI

SEQ ID NO: 43708 - protein, 109 aa, Oryza sativa
MSFLLKTRSESDKPKSPSSEELQQKRATSGEPLISTPTSSSMRNEEEPLLPSYIGDQRSPHAIAFTAFDAGHHVVVERHTLPLHEHLLWMLRWATCSGRTGREHEMRYG

SEQ ID NO: 43709 - protein, 269 aa, Oryza sativa
MRGIQDGEARHPHRLDIHRLAVDRRPRRRRRRRRVQGLHRRVLLDSARRRLPTPERPLRRDLSSSVLPPPIKNTMKQKTEETKLNIVLQKYVLSKMMSEKELLGYNDGEGRAFEVVTLPCGLVAGDTVLGRAPETLENAVSPVSRNEPSFAFLRLLQRLVGSVPLVHADDVCDALVFCMDQPSLAGRFLCSAAYPTIHDIVEHFAAKYPHLDVLEEPEREVARVQPAADKLGELGFRYKYGMEEILDGSVGCAARLGYIDAAKLRPQEG

SEQ ID NO: 43710 - protein, 563 aa, Oryza sativa
MCKKAARAGLAQSLFERLVILGVKPFRLQVQYRMHPCLSDFPSNCFYEGTLQNGVTVNERQTPGIDFPWPVPNRPMFFYVQMGQEEISASGTSYLNRTEAANVEKIVTTFLRSGVVPSQIGVITPYEGQRAYIVNYMSRNGSLRQQLYKEIEVASVDSFQGREKDYIILSCVRSNEHQGIGFLNDPRRLNVALTRARYGIVILGNPKVLSKQPLWNSLLTHYKEHECLVEGPLNNLKQSMVQFQKPKKIYNDRRLFLGGGQGVMQGASFGAAGTNPVADKRSGRGKGHSFVPFGPPNGAHKPGVHPSGYPLPRMPFPPFAGAHSQPYAIPTRGSLHGPIGAVPPVPQPGNRNFGPRGNTGGPIGGHLAHQQSSQQAMGGMGSAFNFPGLENPSSQPSGGGPMSQTGLMTQMPVQGLSQTFRDGFSIGGMSQDFFGDDFKSQGSHVAYNIADFSTQASQGGYGVDYSQGPQSGYPGNYLNQNAHPGYSHMGAANDIVSQDHMAHGSHGMFTQAGYNDSSQDESSQMHFGMAGPGLQSQPMMNPLYSQSYAHYNTQPQSLQPPPQ

SEQ ID NO: 43711 - protein, 717 aa, Oryza sativa
MKQTHLDHRDRVNEVQADSIDPTVFSESRCIALIDETTATRINCTTVHSVGPKPINVDKNQAQAPNSKRIIQQAQKQPSYIAISQENAQDKHADGVVHVQEKQLRTASQVNHRQETCAQLDNQTVAGDSSGRIRCPEKEQSEPFSCTIRKRKTKSLLANSNSGLELRRSKRLAKDSPAAKDKKHSKNKSFEQQVSQNDQVSAAVMDTESIHRDPVERQAASSTGHMPAAITDSEPSENEPDDLYMPSPDQSLSNSPDIDRIINSICPSSSPRHMTPEKVSNEFDNVQLTTPPPSDIDMSDPEHFACNYVPQEVRKALAKLRSSNSSFERAMSQASSGDVHALSDSEDCDERWNVGTKRNQGCGRGRGLTLCLKVWNLAKGVRIPVLLNASGEPVGKEAGTLSTFLGALARDGILAPLTHQDWRRVPEKNKDVMYHIVKLKFDIAPAAEFWIMKCIGRKWKSWKALLKQKHYDTHETVEECLADQNPRVLKEQWQYLVAYWGTEKAKAVSSRNKACRANVTATHTAGTKSFARIIEEEKQKRPNNEEPTAADLFLLTHTHRNGKPMKKEKADIIARVREQSHKQAECSGSDSAAHKVGLESCSIGLRGKRGHRRKAVLQASFKEAEEAKRKAEDEAATLRKKMVAMEESQKKLQEDLANMKSTVSAMQKTTSTGDLSDGQTQNFPQVQNSRSAHEILQPYLDYSALYDPSASPSPRFR

SEQ ID NO: 43712 - protein, 719 aa, Oryza sativa
MVGGSRLFLLLLLPLLLLLLGAGCRDGRRCAAAAAQTQRLPQQEVEALKGIARKLNKMDWDFSVDPCTGSKTWVNASDSNSYPKSSYPNFPVSNLTCDCSFKNNTECHVISLELMRQNLSGVLPEEVVNLTYLTNLDLSRNFIQGPIPASWASLPVFNLSLQGNRISGTVPKELGRMPFLKSINLEGNQLEGHIPPEFGNIISLERFFISANDITGELPSTFSRLTNMTDFRIDGTNISGRIPSFIKNWQRVNRIDMQGTLMSGPIPPEISLLNNLTELRVTDLSGPSMKFPPLQNAQHLTKVVLRNCSIYGEIPPYLGQMQYLILMDLSFNKLTGQIPQNFDRMVALQLQYLYLSDNMLTGDLPGWMLKNKASNKVNMDVSFNNFTGNPPNECQQANVNMVSSFSSSNDNLLQPCLRKNLPCMDKPRYSSLFINCGGKSVEVNGNIYEDDSSRIGTSTFVLSNDRKWAYSSTGDFVGNPDADYIARNTSELTLDHPELYTEARLSPLSLKYYGVCMENGEYSVELHFAEIVFTEDHTFSSNGKRIFDVFIQGTKVLKDFNIQDEAGGVHRVITKTFTTNITDNTLEIHFYWAGKGTTGVPDRGVYGPLISAISVIQLNRNHHGISTGLMITIIVAACLIVILALILCYIKFFRKKNLKGNGLQFFYHGRKTDTSDLQTRTQYFFSLKEIESATKNFDPANKIGEGGFGPVYKDVEIIN

SEQ ID NO: 43713 - protein, 479 aa, Oryza sativa
MDDLAAASPPHPPPPPPESHVPPPPQTPEKDSCEDTGDMRISEEKPCTDQELDADQMNSSSFNSSSECENQTPSNDEMTGSESKSEAAQTEGGGSSEEKVLKKPDKILPCPRCNSMDTKFCYYNNYNINQPRHFCKSCQRYWTAGGSMRNLPVGAGRRKSKSSTANYRSILITGSNLAAPAGDAPLYQLSIKGDQTATAVKFAPDSPLCNSMASVLKIGEQSKNAKPTSTAQPRNGETQTCPASGTTSDSPRNEPVNGAVSGHQNGIVGHSGVPPMHPIPCFPGPPFVYPWSPAWNGIPAMAPPVCTAPAEPANSSDNGSTASVQWSMPPVMPVPGYFPVIPSSVWPFISPWPNGAWSSPWIQPNCSVSASSPTSTSTCSDNGSPVLGKHSRDSKPQGDDKAEKNLWIPKTLRIDDPDEAAKSSIWTTLGIEPGDRSMFRYSSRNLKAGSRYPVLHESCRRIQQLYLDLNLSRRQRDVY

SEQ ID NO: 43714 - protein, 194 aa, Oryza sativa
MRNPCIWCCLVLLTLVVCDSCLHEERKHLMDICDAFLWPAGNPPDWSSRDCCRWERVTCSSITGRVTALDLDAAYPSWYGLLNCSMFLPFRELQNLSLGNAGIAGCMPGAGFEVWSNLRQLEILDLSENELNDSSIMPLVGLASLRSPFLGGNAIKNDFTVQRLSKMKLDILDLSWNGIFGNISRGMASHLKFL

SEQ ID NO: 43715 - protein, 68 aa, Oryza sativa
MLHGRKCVSRLAAGGVVEASPAATVERPASYLHQLAVFQTSRSLALLARNVHNQLPVQQRSLYDSAST

SEQ ID NO: 43716 - protein, 421 aa, Oryza sativa
MTHANLVEILMDANQYAAVFSNIVSRAITLEVLSTGVAGNYNGALQVMSVEFQVPSPLVPTRESYFVRYCKQNADGTWAVVDVSLDSLRPSPVLKCRRRPSGCLIQEMPNGYSKVTWVEHVEVDDRSVHNIYKLLVNSGLAFGARRWVGTLDRQCERLASVMASNIPTSDIGVITSSEGRKSMLKLAERMVVSFCGGVTASVAHQWTTLSGSGAEDVRVMTRKSVDDPGRPPGIVLNAATSFWLPVPPKRVFDFLRDESSRSEWDILSNGGIVQEMAHIANGRDQGNCVSLLRVNSSNSNQSNMLILQESCTDASGSYVIYAPVDVVAMNVVLNGGDPDYVALLPSGFAILPDGPAHDGGDGDGGVGVGSGGSLLTVAFQILVDSVPTAKLSLGSVATVNSLIACTVERIKAAVSGESNPQ

SEQ ID NO: 43717 - protein, 326 aa, Oryza sativa; identical to SEQ ID NO: 31657

SEQ ID NO: 43718 - protein, 830 aa, Oryza sativa
MKPKSLPFIAFEHKRDAYGFAVRPQHLQRYKEYAGIYKEEEEERSDRWKNFLERQSEPSGQEEKGEAAGRVVDSSGIGGSSLLQEKIVQGPHKIEIWKPIRPSLGNIEQIMSVRVEEKQSPASGNQDTKDVIHPVKVQEGKLSEDSDDEFYDVDKVETSQEMHSSDSANTGIDNRGQEENFPSMEELECLVHGGLPMALRGELWQAFVGIGVRRVKGYYDSLLVAEGELEDTSGSRSSTSDVAGENTEVSSEKWKGQIEKDLPRTFPGHPALDEDGRNALRRLLLAYARHNPAVGYCQAMNFFAGLLLLLMPEENAFWTLVGIIDDYFDGYFSEEMIESQVDQLVLEELVREKFPKLANHLDYLGLQVAWVTGPWFLSIFTNVLPWESVLRVWDVLLFDGNRVMLFRTALALLEFYGPALVTTKDAGDAVTLLQSLAGSTFDSSQLVLTARMGYQSVDETGLQELRNKHRPSVLSSMEERAKGLGALDTNGLASKLYNFKHDPEPLVSISDSQDQMSDVGDGNANQSDSGNMDDMYGGLTVSSEIEALPDPKDQISWLKFELCRLLEERRSAVLRADELETALMEMVKQDNRRQLSAKVEQSEQELSELRQTLLDKQEQEQAMCQVLLRVEQELKIAEEARISAEQDAAAQRYAVNVLQEKYEEAMASLAKMENRAVMAETMLEATLQYQTSQQKALLSPLPSPRTSMIDASPGRANHDSSQEFQPKKINLLSPFSLSWRDKNKGKQNNVDDSAKLTDAHDQREEITNNNDEKQVETPKLDVLEESMGSPKEDNKSRVEVPKEDSDLASVQVVANDMNGQHEQLQEIKLD

SEQ ID NO: 43719 - protein, 120 aa, Oryza sativa
MFVCYLIYRVSLMIFSADFCGGSFCPYQHICSKFYYEISPPCCLFIFQRKKLVSCSVACVAAMNMLPSLYIHRHYTCFTVLTLGQHHVNGCLAKPRTAPKFFSRILGLVVIFSFSVVNLT

SEQ ID NO: 43720 - protein, 437 aa, Oryza sativa
MRHGQGKTMWPSGATYEGEYSGGYIYGEGTYTGSDNIVYKGRWKLNRKHGLGCQTYPNGDMFDGSWIQGEIEGHGKYTWANGNTYVGNMKNGKMSGKGTLTWKNGDSYEGNWLDGMMHGYGIYTWNECGYYVGTWTKGLKDGKGTFYPKGCRVPVNDELYINNLRNRGVLPDIRRQNHGSRILHSSSVDMGNMKVGLTRESSGPSSRRNSSEQPHSKNVSLERRWSLEVAIEKFIGHDATGSSGLERSESINDSDLPMLEREYMQGVLISEVVLDRSFSDSSKKAKRRQKKIVRETKKPGETIIKGHRSYDLMLSLQLGIRYTVGKITPIQKREVRASDFGPRASFWMTFPKEGSRLTPSHPAEDFKWKDYCPMVFRNLREMFKIDAADYMISICGNSALRELSSPGKSGSVFFLSQDDRFMIKTLRKSEVQVLFYA

SEQ ID NO: 43721 - protein, 994 aa, Oryza sativa
MSKGAMGRTSIMEKQEEALKEWEPLHESISKLLKGGRITDARERHSLAFMEMELGVIVAYLRMPLPPHTDCPGVDLIDNQIQYHWSYYRDVVISLYNQYGEEAPNAGLLRKAMRCFRRRRSLEYNIPRTAYSLYRECSSDPRLELPSSELMPSPHQAAQVEAGALNDHLVGIDSMANEMLRWLMATDKGLRVMAIAGPAGIGKTTLAMELHRRLRSKLVLQTILKQIMEQLDAPSPNSSEITMSMLEDNPELLTRNISEHLKDKRYFVLIDDILDESDLEIIKGAFPNNNCGSRILFTAQHEWIAGWFLSNYNGVVHKMKPLNDSDSEKLLRTKAFSSMDDLLPDNLRLLCDEILNKCRGIPLFITGMADWLKQQQHGSSAVLRVEQVRLLLKQFEYWLSFDYSYELSLSSLYLSMFPQGYVFDKDHLVMKWENDGLIRILESSSEYGELYFSELVNTNIITPVGENYGPNLDEDELCQWQVNPFVLSFLASRAAEKGLVFTSSTLTSLPSCGGNNTRIKRRLALHHPDPLLPEMLQQMDLSHTRSLLISGAVDRTTVPLDKFGYLVFLDLQGWENLKDEDLLQICKMFMLSYLSVRNTRVSKLPPQIKELCNLKALDVSQTHIFKIPSEVCELEYLEILELRGTQIKHMPDKIVEKRKYEQLYGNGSVFGMIDSNQKVLTKISKKIHQLRYLKTLATIDLSEFSAKSIQSLGDLERLEVLAITWSFHQCSDEDYQEALRLSIERWRKLKSLTIHCGLGCSMEFLGSLTKPPEGLKKFKVIAGKFVSVPRWIERLVYLTFLQITVCKQVADDVKILAGLVKLQHLVLCLEFIPEEAIVIETKGFKEIERFSLDCPVPWLTFEKEAMPKLTYLRLNLYAFPASEMSVPSGISNLEKLSEAKICYNARYINSPNVKRTVEVVSKEVAKHHNSIDLFINGTQIEVNQAGEEKAESATRFNQVNPPEDVVQAEDEAALRRETEFQSEKEDEDEAECHA

SEQ ID NO: 43722 - protein, 801 aa, Oryza sativa
MIKVKRGEHRLFRLAENLCMNLILSLRDFFLVKKELKGPTEFTETLNRITIISLAITMKTRGIAEVEHIIHLQPLLEQIMATSQHTWSEKTLRYFPPLIRDFLMGRMDKRGQAIQAWQQAETTVINQCNQLLSPSAEPTYVMTYLSHSFPQHRQYLCAGAWMLMNGHLEINSANLARVLREFSPEEVTANIYTMVDVLLHHIQLELQRGHQIQDLLSKAITNLAFFIWTHELLPLDILLLALIDRDDDPYALRLVINLLERPELQQRIKAFCTSRSPEHWLKNQPPKRVELQKALGNHLSGKERYPPFFDDIAARLLLVIPLIIYRLIENDATDIADRVLAVYSTFLAFHPLRFTFVRDILAYFYGHLPSKLIVRILNVLGVSTKTPFSESFAQYLASSNSSICPPPEYFANLLFGLVNNVIPPLSCKSKSNPSDAAGSTARTTYNKPYTSSAGGISNSDGQRAFYQNQDPGSYTQLVLETAAIEILSLCVPASQIVSSLVQIIAHVQAMLIQSNSGHGMSGGLGQNSGVPTSSGGGVEPVGANRPNTTASGINASNFVSRSGYSCQQLSVLMIQACGLLLAQLPPEFHTLLYAEAARIIKDCWWLADSSRPVKELDSAVGYALLDPTWASQDNTSTAIGNIVALLHSFFSNLPHEWLESTHTVIKHLRPVNSVAMLRIAFRILGPLLPRLAFARPLFMKTLALLFNVLGDVFGKNSQASPPVEASEIADIIDFLHHAVMYEGQGGPVQSTSKPKLEILTLCGKVMEILRPDVQHLLSHLKTDPNSSVYAATHPKLVQNPS

SEQ ID NO: 43723 - protein, 196 aa, Oryza sativa
MSMTCQLIRIVLIHPILNILMIHLRKKATLEDLRIISLIYLEKDCPRLNLVGTTSRTRKASMLPLIKRTQTTTTATIALPMVHSPMAAVPFGTVRMIKLDLILQLLFLINMILMSEKKIYWILSLQSTLKNPLLKITRDSQVQIGVNSIEMNLQLIIAAQHYFQEQKQTEKMFPHLILMIMCHLHLTRMVLVLMRK

SEQ ID NO: 43724 - protein, 803 aa, Oryza sativa
MDTHHSDQYAKSSLQLQFRDTSVSFENNNSVLDKHDITSPQVGMTFETADLAYRFYLEYGYRAGFGVSKRTSHSVDGVKYRATFVCYKGGIARIKPGLKARRRLVAKTGCKAMMVVKYNTTENQWEVVFVELEHNHPCNPEMVRFMMCFKDLPDWQREHRPFNAKTRLNPKIHSGRGRPPNQNKDFMVKKTFSQSNYSIEAAGKAGKLRFAEGDVEALLVFFDKMQAQNSNFFYNWDMDDEGRLKNVCWVDARSRAAYQHFCDVVCFDTVYLTYQFVIPLVAFLGINHHGQFVLLGCGLLGDESPETFSWLFKKWLKCMNDKSPEAIITTHSRPVVKAVAEVFPNTRHRYNLWHIMKELPEMSGRVEDKEAISLRMKKVVFDTITSTDFEREWVEMVNQYNLHDNHWLTTLFEERAKWVPAYVKDTFWAGISTVRRSERLEAFFDGYITPETTIKTFIEQFDTAMKLRSDREAYDDFRSFQQRPQVLSGLLFEEQFANVYTMNMFQKFQDHLKQLMNVTCTEVSRNGSIVTYTVTVIGKERKYDYKVMYNSAEKEVWCICRSFQFKGILCSHALAVLRQELVMLIPYKYILDRWRKDYKCPEESKETPISPKAIKATGKGTKPENAREDKVDNLYKHGHQYFADIVEMGATDPDAMEYVLSVMKEAKEKVRKFEESRKDRRPGDSPVSTGKRNGKSSRPSNEDGGNGISDSTPATTTVATVAVATSTTMQATPTMVAIAPTSATVPAGMFLVPMHPHPMVFPPFTPAVPPVVAPAVPPPAPAANVGDVASNSTRKRKKRKGNK

SEQ ID NO: 43725 - protein, 141 aa, Oryza sativa
MYLSDVGKGGETIFPEAEGKLLQPKDDTWSDCAKNGYAVKPVKGDALLFFSLHPDATTDSDSLHGSCPVIEGQKWSATKWIHVRSFDISVKQGASTDGCEDENVLCPQWAAVGECAKNPNYMVGTNEAPGFCRKSCNVCAQ

SEQ ID NO: 43726 - protein, 312 aa, Oryza sativa
MAAATAEPLAVAVAVAHTATAGTDHSPAPLPPPPPHCNYKSKLQEYLQQANKQLPIYCTKCKGEHHQLKFKSTVMVDGEEFSSTFCHRRVKDAEQDAAKVAYDTLLERKETETDDADVFELIDQDVVFSKSILHEYTTKTKTDQPEYSVTKTEGSVTPYVSSVSFAGHTYTGGAARNKKDAEQKAARAAVKSLLATDYTSMAKIVRSKEKLIRAISPSGYNKGIDSNPTNKKLPFAPIKFTPPSIFKLYDGEIDMLSVPQALFAPLVAAEEPKVRPAAEPASNPSEQAVHVSKKHKDNKVRGPEVKEERVAQ

SEQ ID NO: 43727 - protein, 533 aa, Oryza sativa
MAPPSHCHTINGGAPRNGAIPEVETTTSTPAASDTALLLDADEFRRLGHQVVDFIADYYAGLGDYPVHPSVTPGFLRRQLPADAPSRPEPEAFAAALRDVRDLILPGVTHWQSPRHFAHFPASSSTVGALGEALAAGINVVPFTWAASPAATELEMVVVDWLGRALHLPESLLFAGGGGGTILGTSCEAVLCALVAARDRKLADIGARRIGDLVVYCSDQTHFAFRKVARIAGIPREHCREIPTCRDDVFALSPTALHAAMQADVDAGLVPLFLCATVGTTQTTAVDPVRELCAVAARHGGVWVHVDAAYAGSALVCPEFRDVIAGAEAVDSLSMNAHKWLLANNDCCAVWVAAPSALVAALGTEQEYILRDAAAEGHDVVDYKDWGTTLTRRFRALKVWLVLRCYGVEGLRSHVRSHVAMAAAFEAMVRGDARFEVVAPRRFALVCFRLRSPPERLGVGVGVGGEKAANELNRRLLEEVNAASSGPYMSSAMVGGVYMLRCAIGSTLTEERHVREAWKVVQERATSILRKRG

SEQ ID NO: 43728 - protein, 406 aa, Oryza sativa
MTKSATSLLLGAALATVFFLLYTSVCRDLGDGPPKSSPPRWAHAQEQGTATVTPATRVVDAEQGTGRPGRQEEEVVAPREEKQTKDEAASRSGHGGGSVEQQQNQRRIVMPTSQQKETPSSPPQRQQQDLGELLRRAATPDKTVLMTAINEAWAAPGSFLDLFLESFRHGEGTEHLVRHLLVVAMDGRAFERCNAVHQFCYWFRVDGMDFAAEQSYMKGDYLEMMWRRNRFQQTILELGFSFLFTDVDILWFRSPFPHLSPDAQVVMSSDFFVGDPTSPGNYPNGGLLYVRSSASTVRFYEHWQSSRARFPGKHEQFVFDRIVKEGVPPHVGATVRFLDTGHFGGFCQHGKDLGRVVTMHANCCVGLHNKLFDLRNVLDDWKTYKERVAAGNMDYFSWRVPGRCIH

SEQ ID NO: 43729 - protein, 174 aa, Oryza sativa
MAGSARSAAAKHAYRMFAPSRGAAARCPGSPGADEFDESDVWGSYGAAGVESSPAELGARGRAIPSARAGRKAPLDRAAGSLPVNIPDWQKILGVEYRDHQAAAAEWELQGDGDDDYEYGKVAGVGGVVIPPHELAWRGRAASLSVHEGIGRTLKGRDLSRVRDAVWKKTGFED

SEQ ID NO: 43730 - protein, 108 aa, Oryza sativa
MASSSSLPEIVSFSPESDGSSSSSAPLIGGDGELVVQLVPRDVSDGILGKFADTSEFDFDYDQSGLWSPLVLRPEVLLLAQTPAGRRRRRHHHRRRWKRKKMLCYCFW

SEQ ID NO: 43731 - protein, 973 aa, Oryza sativa
MLLVVSGDVRQQNFNESGAAIMERQTARRTPSSVTQMPEFPPACVNLAKELTARCRARALQLTDDEILSITQDLESVIENLCDYIGRVPTSALGSNAYTDGAVKALSVRGFLEDDMLTNAVNSMPNRKYFHDSNMPRLVEFLQGMYHESDEFGGHLFSSLPEVSEYIEPLYDALFCPLTNQVMTDPVLTESGVTYERRAIEEHFERFADSSENVICPVTKMPLQSKTLMNNASLKSVIAEWTMRNEAMRIRIARTALSLSSTEAMVLEAIHELKSLAKLRGKNREQMHKIGVTRLLARLLDNHNVQIRHSALELLCFLVEDEEGKDIIGKTKAIARTIKLLSTNGTDERHAAISFLLELSKSQLLLEDIGSTAGSILILTTMRINDSDDPIAAQKAGEVLKNLEKCSKNIKYMAESGYLEPLQSHLVEGSEEMQMEMVGYLAELIQEQELTIDINGSTSGVLIKMVHSCNTVARKAALDVLVQLSSHRPNSKTLVEAGVVPVMVEELFIRKVDDEPLSYKAMAAAVLANVVESGIDPDNTVVNKEGHVLTSKYSIYNFVHMLKCFMPDELNLSIIRVLLALTAHAKALAAVVSVVRENHRGHSVVELMSSWTEALGVASTRLLITLSAHMGHTIAERLCKTQGQPRRLVRSIFRAGRAAITERHAAAVTLLSRLPYRNVSLNLALVQEGAVPAILRGIEEMGSGAARMTTSRHAAPYMEGLVGTLVRLTATLYNPDVLKAAMDHDFASVLTALLARAAGSGEVQRLAAVGLENLSYHSIKLSRPPPPPEDEPRPKKMTILKRLKDARVHNHSSSKNPPLNVCPVHRGVCTPATTFCLLEAGAVEGLLACLENDDARVVDAALGALCTLVDDRVDVEKAVVALAGQGAARRVLAALRQHRGNSLWHRCFSVVEKLLVHGDDVCVREVTGDRMLPTALVSAFHRGDANAKQAAESILRRLHKMPDYSATYMSVEF

SEQ ID NO: 43732 - protein, 160 aa, Oryza sativa
MEIDTLEYSQVKCYICIFCALADSIYNVKKYQQHGTHMVFVIVDDADAMDQVLQVNGGHNHNAFPFDLNFDADEEDLQMHPDMQEYGVYAGDVEVVFEQEELDDSDQEDEQQNKNLTKIQRQQIYAALAGKTNNGTLRKNATTEVAAMFNVKRARVQAIW

SEQ ID NO: 43733 - protein, 150 aa, Oryza sativa
MGLEEDTPVTKTVKAAATGLAAGTIWGTVVATWHDVPRVERHVALPGLIRTLKMCGSYGATFAAVGGLYIGVEQLVLSQRKKNDYVNGAVGAFVAGATIFGYKGRSIPSALIAGSCLAFTSAALDVGGNTTRVDNGKEYYPYTVENKPAH

SEQ ID NO: 43734 - protein, 316 aa, Oryza sativa
MSSSATGVNVSDRPISPDTTRVAWVGTGVMGQSMAGHLLAAGYALTVYNRTASKAEGLVSRGATLAESPRAAAAAADVIFLMVGFSSDVRSTSLDPSTGALAGLAPGGLLVDMTTSDPTLAAEIAEAAAAKSCAAVDAPVSGGDRGARSATLSIFAGGDAAVVARLAPLFKLMGNALYMGGPGAGQRAKLGNQIAIASTMVGLVEGMVYAHKAGLDVAKWLEAISTGAAGSKSLDLYGKRMLERDMAAGFYVRHFVKDLGICLSECQAMGLALPGLALAHQLYVSLLAHGEGGLGTQALILAIERLNNTCLDKKPE

SEQ ID NO: 43735 - protein, 817 aa, Oryza sativa
MEETSIAIEIDGEAICLDSVGDNEEQGTQENQEIQIIYDAENEGQVAFDNGEQGKEEHPMRNEEENQENIPVIPSREELTEELRNKIANSEEEAYRLYCDYGHRMGFSVRKGKQYYFTGTKTIRTKDYYCSKEGLKDDEQLTEANFNKPDTRTNCKAMVRYRVDSEGHWRVIQIVPEHNHELVRPEEVHLLRSVRTLSIPKPGVLNAMVNAEIQAMHENLHMNDDGAECQSQLGIQSYTLLEPEDSEALVGYFKRRTIEQGMFYWDVLVEDGRMTNFFWRDGRSRVDYDCFGDVVVFDTAYRTSKYNMICAPFVGVNHHGQDVMLGCALLLDESLTSYEWLFKSFLDSMGGHPPKTIFTVMAETISKAIEGVLPETRHCICQWSIEKNLQSHLGTLNVSGTFHSMLTKCMRECESEAEFEETWAMMLNECNMQDDQWLSDLYQQRRKWSTVHHRDAFDGGINSLDRSDSSNNVLSSIANESTSPTQFILDFDKLVGSWRTNESAEDIQCTQTSPESRVKHRSILEHAAEVYTRKVYKSLETEYLDGCSATSYQEMQCSETLYRFEFILQRSGPKVQVVFLDTSTMELSCTCKKFETTGILCSHAINALDLKNFDRIPERYVLKRWKKYVRKGTYLFPSDEFVGQDCTEPGLAFRNKAMRFVYDLLMKSKGHQDTRKLILDVFENGEKLVESLCELKRLNAHASGREKDGSKVEKRKKKSAKQEKSSRNVKQAVSSQTADTVLVDPPNQNQYFATEDMATNSSIGRPFFYQGFPSAGVSTSQIQGHTNIHSVPQCAPQEYSAYGAAHPPPTFGGGRNF

SEQ ID NO: 43736 - protein, 444 aa, Oryza sativa
MVERNGINQGKNNNQVGMASSSNVLVQNNRKQNAMVKHKVNSKPPTPNRQRSNTHSINGTMRKVGTAGTPSENNTQGNRNVELRSTGHANRRQNSTAKSIPKPGRLPDGRIHSVKTRPSDKDIADRSQRRVRHNIVIDEQSPFSMNKKKISTDIVSFTFTAPVDKPLSGYRLPNHLVEKQFMKNASSVPNSSETSSAKFDSIDGDYLGLLLEQKLRELTSGVRSPYCKPAKDVRIYAPSSVLEDSQSACETSSIASTDYDRESVQSYKDGKGSFTQTDLASKSGQSSQSVKYDNDAMDQMEIERLHLSPLSTWDASVSTETGSSTESWRSANGTKVFSSTEGATTSNSACFSKFLEADAFSEYSDTASSITVTTTDIPPSDSSSSSRMDCRQEIDFIRGQNTPNESEAALRMCKRDTECEMCILFQCRLRLMVLGDGNSEEAHS

SEQ ID NO: 43737 - protein, 352 aa, Oryza sativa
MSWGNHVDKRLDERRRSAVTCNLYHPDDAVDKIYSVSFPKGSFVACYGASHGWLVLANDLSNLVLHNPVTLAMIPLPPITDFACVEAVYGSEEGNLEHYLLETNSRFEAYRLGIWFYQKAVLSCSPSRGGDYVVMIIHNNGEWLSFVRAGQSKWQVASTLSGGDRYLDCAYHKGRFHAVTLHGMVEKWDLDGASNGPTREVFYAARPYGGLGLILTRHLVSTPWGDLLQVRAILAHHYPDGIAFQICKVDPDGCKGVVQENVLMDHALFLGLNHSACLPTQNLPGIRPHCIYFSSPVIIHAFDWLLGLRVWGGVRTYDLETGKFERAVPFCDVKEQIYGLFPSEVWITQNLQ

SEQ ID NO: 43738 - protein, 288 aa, Oryza sativa
MAGEEIGASEEHGCAAGGEPMNDYERQRLARIRENEARLQALGIRRLAASPLLHSPASSAGGKGKRKSRAADADEEYLPSDGGEDDDEEESSSTSDQDGEEEEDAEASSRSRKKGKKKVLNSGKSSQVTHRKENAHLADSVDDDAALQQAIALSLAESLENSVPAMSGETPSTGMKGSGSTPCKKNNTVPIQDSAKTMRIKKQGKSRIQLTEDDVVAFFFSFDEVGKGYITPWDLERMATVHDFIWTDSEISKMIHCFDSDRDGKINLEDFRTIVSRCNMLQEPEKSG

SEQ ID NO: 43739 - protein, 140 aa, Oryza sativa
MVITVLIILFFIQQRTELLVYLIGNYLLWVIKCVMLHTALCRILLMQQLVQVILMVDLNILAFQMAFPHWKSTSLHTALSLQDPGRLQVGSFMLPFRFFEGHLYMQEYITDGLWVMLQVVSVLDFLARLLMLWLTVPGIS

SEQ ID NO: 43740 - protein, 591 aa, Oryza sativa
MGMVTATAAAALLASPPQGHLGRRCHLVVPGLRLRPPASSSPPHAAPPLRLSNFVPRCYITNVEVDVSHTSEQEALDDHPPLLPACAIPVVHLRDVPDASPFPLHESASHSTDFEELPVLSEGELHTIAATPAHPAGLYALYASYLFGNLVEQLWNFAWPAALAILHPSLLPVAIVGFFTKLSVFIGAPIVGKLMDHFPRIPMYTGLNAVQVATQLISAAMVIYAMKNVTHASTSAVVLKPWFIALVAAGAIERLAGLALGVAMERDWVVLLAGTNRPVALAQANAVLNRLDLVCETVGASVFGLLLSKYHPVTCLKIACGLMICSFPVLVVLGQLINRFSCHALDSSRTPSEESICANLLDVRKIVQNGLSAIRNGWNEYKQQTVLPASVATVFLNFNVALAPGAIMTALLMHRGISPSIVGAFSGLCSIMGLVATFISSSLVERVGILKAGAAGLIVQASLLSVALVVYWTGSISQRTPLLIFLAAIALSRLGHMSYDVVGTQILQTGVPASKANLIGGMEVSISSLAELVMLGMAIIANDVSHFGFLAILSVSSVAGAAWMFCQWLGNPTDEQRELFMFDPHFQVEPM

SEQ ID NO: 43741 - protein, 200 aa, Oryza sativa
MVGVVSVSEAVQIADENDLILAILSLDGDPPVLRLFQEKDYKKHKYEQQKKKRTQQKRSVAKRMGLKELKMGYNIDIHDYSVRLKAARKFLKAGDKVKIMVNLKGRENLYKKQAIELLRRFQNDVGEMATEESKNFQERNIYLVLVPNKIAIQKEQDELNKKDTAIEDSDQSDDQPEESEPVPAQPEESKETETEVSANV

SEQ ID NO: 43742 - protein, 186 aa, Oryza sativa
MTMKVKSTMMAASMLLFLLVLAGIVTATTTTTDSNIRLPSNGAAGETDGNKQAKSRPWECCDNIEMSVLKIYPPRWRCNDEVKQCAAACENCLQLVPGAGGEDVVFVCDDWYPTTNPGPVCTPRPWGDCCDKAFCTRSLPPICHCADEVASCAAACKECDMVNSSSEPPRYICRDHFTGEPGPMCA

SEQ ID NO: 43743 - protein, 467 aa, Oryza sativa
MSAAAEEAAAAAAAEEVEGVEAGKKGVADAKGKGKEKVVVAEEDSAVAAGSGGSGGGRRTLVAYPARVAGYKDVVADAAVFRRALEGLHAQMGTKLKVPIIGGKDLDLHQLFKEVTSRGGIDKVKSDNRWREVTASFIFPATATNASFMLKKYYMSLLYHFERLYLFEAQGWYQETDSRSISCIEMKAEGQASRKRKRGSNSCSSDLAASLDNDVQVIIDGKFEHGYIVTVIMGSKSTKAVLYNCTEEPAVPTAVPHVAIDSAEGIRPRRRRRRKKLSTTDPNHPKPNRSGYNFFFQDQHRKLKPEYPGQDRLISKMIGERWNNLGPEDKAVYQEKGVEDKARYQRQLALYREQRTGQPISNAVPIQQRLPQKEVTIDEVDSKVSEGDILLSNQGYSSSTSSSDETADSGEKNVEDDEEFNTETSPEPSMETTDSHGQPDPSADGERFELRRRENPKIDEKRDMPPN

SEQ ID NO: 43744 - protein, 91 aa, Oryza sativa
MLNFEQAIEKHPKDFARWDTHMQQLKGSCSSIGASRVKNECTSFRNFCGEENAEGCTRSFQKVKREHAVLRQKWESYFQVIFTSHFVPSFH

SEQ ID NO: 43745 - protein, 597 aa, Oryza sativa
MIKQLMEEDDGRSVRRGRIPRVLVLAPTRELAKQVEKEIKESAPKLSTVCVYGGVSYNVQQNALSRGVDVVVGTPGRIIDLINGGSLQLGEVKYLVLDEADQMLAVGFEEDVETILQQLPAERQSMLFSATMPGWVKKLSRRYLNNPLTIDLVGDQDEKLAEGIKLYAIPLTSTSKRTVLSDLITVYAKGGKTIVFTKTKRDADEVSLALTNSIASEALHGDISQHQRERTLNGFRQGKFTVLVATDVAARGLDIPNVDLIIHYELPNDPETFVHRSGRTGRAGKAGTAILMFTNSQRRTVRSLERDVGCRFDFISPPAIEDVLESSAEHVIATLRGVHTESIQYFIPAAERLQEELGPNALASALAHLSGFSQPPSSRSLISHEQGWVTLQLTRDPGYGRGFFSPRSVTGFLSDVSSAAADEVGKIFLTADEKVQGAVFDLPEEIARDLLSMELPPGNTITKVTKLPALQDDGPATDSYGRFSNSDRGFRNRRSRGGGSRGGRGGWDSDGEDRFRRGGRSFRSDNDSWSDDDFGGGRRSNRSSSFGGRGSSYGSRSSSSFGGRSSSFGSRDSSRSFSGACFNCGESGHRASDCPNK

SEQ ID NO: 43746 - protein, 445 aa, Oryza sativa
MHCLACAAPAARAPGSRVGGGGRRRMAIECAASSPFTRDGEETAPRSMMETYGEMSSKPVLLASRRKLVALSSFCFCLHSSRYFSALALGDPSVKIDDVTPKIFPSGPLFPTEKRIAELFETNTYSVVNIFDATLRPQLNVTGVVEIPEGNGSGVVWDDSGHIVTNYHVVGNALSKKPKPGEVVARVNILAADGIQKNFEGKLVGADRSKDLAVLKVDAPTDLLKPINVGQSSALRVGQQCLAIGNPFGFDHALTVGVISGLNRDIFSQAGVTIGGGIQTDAAINPGNSGGPLLDSKGHMIGINTAIFTQTGTSAGVGFAIPSSTVLKIAPQLIQFGKVRRAGLNVEFAPDPIAYQLNVRTGSLILQVPGGSAAAKAGLVPTSRGFAGNIVLGDVIVAVDGKPIKGKSDLSRVLDDYGVGDKVSLTIQRGAETLEVTLPLEEASI

SEQ ID NO: 43747 - protein, 223 aa, Oryza sativa
MAALLARQAAQALRARQMAQLGPSATAMQGHIRTYMGAGKPTRFKEDEEKEKLAKEIAKDWNAVFERSINTLFLTEMVRGLMLTLKYFFEKNVTINYPFEKGPLSPRFRGEHALRRYPTGEERCIACKLCEAICPAQAITIEAEEREDGSRRTTRYDIDMTKCIYCGFCQEACPVDAIVEGPNFEFATETHEELLYDKEKLLENGDRWETEIAANLESESLYR

SEQ ID NO: 43748 - protein, 145 aa, Oryza sativa
MASLLCPAAAASYSSLLSSSFPSRRRPQPSAPLASPAPSSPPRPRSVAAAAAYGYGGDVLMRPFDTQTLLISAAVVSAVSLSLVLGLKGDPVPCERCAGNGGTKCVFCNDGKMKVENGVVECRVCKGAGLILCKKCSGSGYSRRL

SEQ ID NO: 43749 - protein, 595 aa, Oryza sativa
MADGEASSGAYREFKALTEAADRKFARARDVPLYGGGVDHHSRKAFKAYTRLWRLQQERRRELVAGGLRRWEIGEVASRIGQLYYARYLRTAEPRSLVGAYVFYEAIYSRGYFAAAAQVVVGGGYRHQGLLIRYKELRFIARFLVVAMLMRRAEAVDHLASRLRSLVEETKSAYPKTNFKEWKQVLQELGRFLKADGAYKGSRSLRYDNLFDSFPSNLAPIARFHSKRVLKLKEAVLTSYHRNEVKFTELTLDTFRMLQCLEWEPTGSYQIAAKELTENGTISDQSGPSGLIDIHLSSEISDGNLPANPQKAIIYHPTVSHLLAVLATVCEELSQDSILLVYLSASGFSEQNITSQKYASSSSYARATSVYPIDKPNSNGNSDNHLWLGPRGSGGPNNLYPEDLIPFTRYPLFLVIDSENSHAFKAIHNAEKGEPAALLLSPRIASAMPGVESTSNGSQFTYFLTAPMQAFCQLAGITSDIDSDTYANAEIILFSALEQYEGILCTSVGLNNVWGQILPDPFLRRLIVRFIFCRAVIFYFHPEENGEHIPICLPSLPESVAPNAEAIMAPILEFAENLVVSDRFHFRHSVHNNKK

SEQ ID NO: 43750 - protein, 927 aa, Oryza sativa
MGRPGMDSSEGRESNGVVPERNGGAVPAKQQLDGKDTLRYANILRSRNKFAEALQLYNNVLEKDEANVEALIGKGICLQAQSLPMQAIECFNEAVRIDPGNACALTYCGMIYKDEGHLVEAAEAYQKARNADPSYKPAAEFLAIVLTDLGTSLKLAGNTEEGIQKYCEALEVDSHYAPAYYNLGVVYSEMMQFDLALTCYEKAALERPLYAEAYCNMGVIYKNRGELEAAIACYERCLTISPNFEIAKNNMAIALTDLGTKVKIEGDINQGVAYYKKALFYNWHYADAMYNLGVAYGEMLNFEMAIVFYELALHFNPRCAEACNNLGVIYKDRDNLDKAVECYQMALSIKPNFSQSLNNLGVVYTVQGKMDAASSMIQKAIFANSTYAEAYNNLGVLYRDAGSITSAVQAYEKCLQIDPDSRNAGQNRLLALNYIDEGFDDKLYQAHREWGKRFLKLYPQYTSWDNPKVADRPLVIGYVSPDYFTHSVSYFIEAPLAHHDYSNYKVVVYSGVVKADAKTLRFKDKVLKKGGLWRDIYGIDEKKVASLVREDKVDILVELTGHTANNKLGTMACRPAPIQVTWIGYPNTTGLPTIDYRITDSLADPPDTTQKHVEELVRLPESFLCYSPSPEAGPVCPTPAILNGFITFGSFNNLAKITPKVLQVWAKILCAVPNSRLVVKCKPFCCDSIRQKFLSTLAELGLEPLRVDLLPLIHLNHDHMQAYSLMDISLDTFPYAGTTTTCESLYMGVPCVTMAGSVHAHNVGVSLLTKVGLGRLVAKSENEYVSLALDLAADVTALQELRMSLRGLMAKSPVCDGENFTRGLESAYRNMWRRYCDGDAPALRRLDLLQEEPCSNNNKQDFDDNQVAKLADLKAQRVDAAVDGDKQSQLTAHAAVVGEVQQAPIMVNGVSSPVSSGKVEANGHISR

SEQ ID NO: 43751 - protein, 389 aa, Oryza sativa; identical to SEQ ID NO: 31704

SEQ ID NO: 43752 - protein, 587 aa, Oryza sativa
MGSPSMSLPSSSYHMAGLSHGLPYGGSVSFGSPNLPGSNPIQNDWPNQANPYAVDQFNLLPNMLQKQISLPNSPMSSLLFSQQQQRLAQVQVQPSHQNYLNLPPHLFYQHHSPELTGRFDSISNVPSLRDKRSRSGRGKHSTRFSQPLTDTGSQNGDSGGLKFRSKYMSSEEIESILRMQHSASHSSDPYVVDYYHQACIAKKGAGSRQKANFAPTSMKDLPSKSRSSSDHHAYLQVDALGRVSFSSIRRPRSLLEVDLPSSGDGSHDQKSSLRPLEKEPMLAARVTVEDAICLLLEVDDIDRLLQSSQAQDNSFQLRRRRQVLLEGLATSLQLVDPLGPSKSSHSSGLAPKDDLVFLRIVSLPKGRKLLSRYLRLLTPGSELTRIICMAIFRHLRYLFGGLPSDSSAAETTVALAKTVSSCVLHMELGALSACLAAVVCSSEQPPLRPLASSAGDGASLIIKSVLDRATELLTDHHAAASYTVSNRTLWQASFDAFFGLLTKYCLSKYESIKQMFVMQSPCSVTGSEVSKATSREMPVELLRASLPHTNDQQRQLLLDFAQRTMPVTGINPTGANGGYITSESVPG

SEQ ID NO: 43753 - protein, 318 aa, Oryza sativa
MGAFFSSQVNRRKLVTSEKQALATRLSAGGEAFPGSEHRPADRKTWMAELGPERLRVHQLVWPGTHDSATNKIGIPFVTRPFAQCQSLSVYEQLAAGARVIDVRVQEERRVCHGVLATYSVDVVLDDVRRFLGETASEVVILEVRTEFGHDDPPEFGRYLVEQLGEHLIPQDEAVFHKTIAELLPRRLICVWKPRKSPAPKPGEPLWSAGYLRDNWIDTDLPETKFESNVKFLGEQPPVADRRFFYRVENTVTPQADNPVLCVRPVTRRIHGYARLFIAEVFAKGLGDKLQVFSTDFIDGDFVDACAGVTKARVDGAA

SEQ ID NO: 43754 - protein, 818 aa, Oryza sativa
MSNYYCNSSSIGTSSVAGNFTYADASSEGSMVTASVLMFVLAGFFFILNLFGGLSNVGAILSPRVRLLFTSLLSLFLLVMSYLLSEAKNTAKELDQVTTVIGIGRASSTDLPFMAGVILTWMLLVEPIRKKVDEIAMKGYSGTIHRAGRVVWLGSLVFVNIRSAGRKAVFGVLWVLCATKVVQRIAFTEVGKRSYACGKNPWIITSYMMSTSPSLPAQGDAMLKGCRYIVTGEEDARVEATADGYKLKEDSKSSLVTVGKIWVEQGLPGTGNNGGDEKAELKRLCLSFALSKLLRRRLEQLPVPEPEMSSAETSECRDVIFNGLYKSGDAVAVFEVMNSEINFLSEYYHSVVPVVLASPFFFVANYFLLPVVVLCVCVMTIILCGGGDVLYAFRSIKTDNFTISSGIFDTTMCLLLTAHHSAAAFFATINFAVTFLLYIIYIYEEVWELFVFLLSNWFAVSLLSAYVAKTRFCDNSAFRAFARCILSVRTWLGFHLHPQDMINQFSALDLRWPPLTLAMPIPLITLLVSTKPVPVPVPVKHSILLSSLASASASASTKSALASFDELKTACENGSIAEVILICHIATGLLERLNPPPDPEVMITESDSKRMSCCGCPNKKKKNTSSDNFTVATTLSRYCAYLVAFQPELLPDYHEKAEDLFKAMKMELKDRLGCYHYYFSCGRERADAIINNINSKNNNKEGTVDKGAELANKLLEKYTNDHDSMWTLLAEVWTEIIVYVAPSNEERTIMAHKNVLWQGGEFITVLWALMTHTGITRHRRLREIALKISQDDASTSSSQQKSAPDRIDKQHEIDIHRH

SEQ ID NO: 43755 - protein, 182 aa, Oryza sativa; identical to SEQ ID NO: 31494

SEQ ID NO: 43756 - protein, 477 aa, Oryza sativa
MAAAGGGSLLDQSRHAMHSWVLKNIEKLAGHYGAEFNSLRAFEDRVFNETSSIDDYISKISTKMAILERPQSSSGMQHQGQMGNQTRLPTTVMQEQPQPQQQPHLMSNNHHQTHGGWQSNVARVQMITGVGEVNWREEMFQKISVLKNSFFSELTDFDRLLHNCQKTEEQLQSLPKKQADQYKRITKLKDAVRSALDLLQLQKSSIDEGMKVKFCKYESSIHSLLRFYRETKAKINEMNANRHNNQQEQPAGLPRQRITDRTPSSARRQNRNDNVIGQSEDKLRCRVESVVAKKKPIDRLINALRHSVEDDRTDVKRQKTRHVNSALANEIDAMNAKLIDTVVRIAGEKDGGTEIEFSYTAVSLALDMKQLFAAYGTSPVKPVKLFVPADYPRSSPVVSNNNDDGDEQRRGMFGEISGMVSAAFHCALRELPPSMSVKQMASEWNSCVQMIMKKFAIRHGGGTFSSRHGQWMDCTVE

SEQ ID NO: 43757 - protein, 154 aa, Oryza sativa
MKLEVMPKQRAMEAEQREEAMEMSGLELWKHEKPASMVVFLPPPPPPPPLVPAAAAAVAAACGEEATLVPPLNFAMVDDGIFRSGFPAAANFRFLKSLNLRSIVYLCPEPYPETNAEFLAKNGIKLHQFGIEGRKVNETWKKFELSFVVNSDSY

SEQ ID NO: 43758 - protein, 644 aa, Oryza sativa
MADGASSSGAASASGPGGGGGGESVVIDYGRRRTACGYCRSTGQTSISHGLWANSLRADDYQALLDRGWRRSGCFLYKPEMERTCCPQYTIRLKANDFICSKEQGRVLKKMQRFLDGELDPQVGSPQNKTSPTKHSLAEPMNMPVSKISKTLTNDFQAAKCPNLFEEDEFISCLSSKINEAVGMSFQVGTLGSDVQLPKAVVKTVKPQLKKKVGGASQDKKVGEAVQDLLYTCNISFRIVAEIRRALPKEKDANHNKVVADISPNSIAEKLAMTMECHGDIAGLAVKACNGHLNFYSVTNQTKQNKTSIIVSTHAPDKSSSSKQSSVNKNTVRVPQKRRKLEIKMRRSHFDPEEFALYQRYQTKVHKEKKVSESSYKRFLVDTPIVFVPPRSGDNTVPPCGFGSFHQQYRIDGKLVAVGVVDILPKCLSSKYLFWDPDFAFLSLGKYTALKEIDWVKTTQEHCPNLQYYYLGYYIHSCNKMRYKAAYRPSELLCPVRFEWVCYDSAKRLLDKSLYSVLSDFAQIQDEMPQPQNSHLDTELSKNDNCESPIDEDDEDLSYDDSDMMVDEEMVRSESNTDVMEDCSSIIDFENVMMDLNGSRVKYKDLLGVVGRIERRHLEQLERQLSKYVKVVGKELSDRMVYSL

SEQ ID NO: 43759 - protein, 327 aa, Oryza sativa
MAAAAAAASAPRLLLPPAASTFPHQHEHVRRNWHRPRRQVISARAGASVAARGLDADDFRHPLDKQNTLLLRAVPGLNDMGKALLGPVSEQVMVLQNIGSSVLVSENQLSDLHQILTEAAKLLNTDAPDLYIRQNPVPNAYTLAISGKKPFIVVHTSLVELLTRKELQAVLAHELGHLKCDHGVWLTFANILTMGAYSVPGFGMVAGFLEEQLYRWLRAAELTCDRAALLVVQDPKVVISVLMKLAGGCPSLADQLNVDAFLEQARSYDKAASNPVGWYIRNAQTRELSHPLPVMRAREIDEWSRSREYKTVQQKVIQLQLNDHDAS

SEQ ID NO: 43760 - protein, 1095 aa, Oryza sativa
MAGFGGTCRVAAVLVFTAWIALTALTRLLRPVPNGCVMTYMYPTYIPVSTPKNVSSDRYALFLYHEGWKQIDFHHHLSNLNGVPVLFIPGNGGSYKQVRSLAAESFRAYQNGPLEPTFYREASTAFSVNELEGFSIPSRYGRMLDWFAVDLEGEHSAMDGRILEEHTEYVVYAIHRILDQYKESHLARSKGRAQSSDNLPSSVILVGHSMGGFVARAALVHPGLRKSAVETILTLSSPHQYPPIALQPSLGQFFLHVNEEWRNGYKTGLSRTSSAKLSNVVVVSVAGGIHDYQVRSKLALLDGIVPSTHGFMVGSSSMKNVWLSMEHQSILWCNQLVVQVAHTLLSMVDPLNGQPFLSSQKRLFVFAKMLQSAVPQSLSWVAPVSGVKPPNLIASGNKEASDLQQKDSLSCPPSLQWTSDGLEKDLHIQLNSVTVLAMDGKRRWLDIKKLGSNGKGHFVFVSNLSPCSGVRIHLWPEKDHSSEQNGVPASKKIVEVTSKMVQIPAGPAPKQVEPGSQTEQPPPTAFLLLSPEEMSGFRFMTISVAPRPTISGRPPPAASMAVGQFFNPEEGTSALSAARIIGSSYIPEEIFLKEDHPLALNLSFSVSLGLLPVILSLRTAGCGVKATGDQLEAEKNKLCKLRCFPPVALAWDPVSGLHIIPNIYSETLVVDSSPALWDSHQGTERSTVLVLADPHCSYEVSLRVSLSAAASRFFLLYSSQILGFMIAVMFFGLMRQSSAWEHDSSVPSVLSAIESNLRLPRAFMFLCFIPVLLFLAFLVFTREQNPPLGTFLLVTMMCYIVANGFTILLILSSKLILYVAAILHVFIKRRWQSWEDGTQSMIVRHFLTLSLPFQSLKIVQIIKNNPSIIVAFATIPLVCLVHPAIGLGVLLLSHAFHAHSTLCSFLAASFRSITQKKDLYKSMGDNIILPENKQDGLEQLLPMDDSPTSVKSFTDCQLEVFDCRHGIMILHLLATLMFAPSLVAWLQRIGMGQNFPWFVDSVLCVGTILHGLFGSPPNVSCISFKLPGRRGRDVGLSFLYLVAGYYSFVSSMALAPYRALYALAIIGFICFASRIIETRSTVRGDVISRKHRKHS

SEQ ID NO: 43761 - protein, 662 aa, Oryza sativa
MSDGEIIQSAPYQDLLACCEEFQDLVNAHKDTIGVSDINNMPLHRAKEISTKETDDIHGSRYGESVKPSQADQLIKIEEREIGDTGLKPYTLYLRQNKGFLYASLAIISQIIFICGQISQNSWMAANVENPSVSTLRLIVVYIAIGVCSMIFLISRSLCIVVLGMQTSRSLFSQLLNSLFRAPMCFYDSTPLGRVLSRVSSDLSIADLDVPFFFMFSMNASLNAYSNLGVLAVVTWQVLFVSVPMIILAIRLQRYYLASAKELMRINGTTKSALANHLGESVSGAITIRAFEEEDRFFAKNLELVDRNAGPYFYNFAATEWLIQRLEMMSAAVLSFSAFVMAILPPGTFSPGFVGMALSYGLSLNTSFVLSIQNQCNLANQIISVERVNQYMDIESEAAEVIEENRPAPDWPQVGKVELRDLKIKYRQDAPLVLHGITCTFEGGDKIGIVGRTGSGKTTLIGALFRLVEPAGGKIIIDSADITTIGLHDLRSCLGIIPQDPTLFQGTVRYNLDPLGQFSDQQIWEVLDKCQLLETVQEKEHGLDSLVVEDGSNWSMGQRQLFCLGRALLRRCRILVLDEATASIDNATDAILQKTIRTEFKDCTVITVAHRIPTVMDCTMVLAMSDGKMVEYDKPMKLMETEGSLFRDLVKEYWSYASNGNI

SEQ ID NO: 43762 - protein, 339 aa, Oryza sativa
MESLCGQLEHEHEQQLHQSSSSSLLPYCFLSAPEPLPVPGFPAGCSNLEEKAAAAMAAYEYESSSCSSLDPTSMPMVYSPIVLQPQECPLSFVFDNAAAAAGDNKWVPGIQGSCPCSLGSTQDMDASWGKSRKHKRSNVGLKGLEEKKARRVVLHQHDDDVKKKAKEAAGGEPPAGYIHVRARRGQATDSHSLAERVRREKISERMKMLQSLVPGCDKVTGKALMLDEIISYVQSLQNQVEFLSMKLASLSPLMYEFGPGIDMHPDVLRQLAKMPHEMVQCMGQMGSTGISLQGLGGGPTGFAQDGSSHINMVVMQVGEQGQQQGSLHQVEMSSHCFFH

SEQ ID NO: 43763 - protein, 622 aa, Oryza sativa
MLIKAWCYYESRILGAHHGLISTYALEILVLYIFHLFHGTLDGPLAVLYRFLDYYSKFDWDNKGISLYGPISLSSLPELVTDSPDTVNDDFTMREDFLKECAQWFTVLPRNSEKNTQVFPRKFFNIVDPLKQSNNLGRSVSKGNFLRIRSAFDFGARKLGKIIQVPDNFTMDEVNQFFRNTLKRHCSRVRPDVQEIALDFNGERADNDSSPLYSNNSFGDLSDEFNNISISDSSNHGSLRQNGWNYVAENKERKSVSGGLLASKATNPAATNSTGMTNGSDSCEPASPSITGAHSLPSEEGHDALDLFNESESGTKAGIKYGTNPSHHGMSTVSYAGRSHQSFEEVDNDDRGTIDSNWSDLTGDYTTNFNNLLYAQGFHQDYPMNQYYPFGPVYYPIPSPPPARYQNRRSSNGHSRNNVYGYAGTNGIGPAPCPPGYLIMRPYSQVDDSNRARGTGTYFPNPNLSKDRSPSGRGGRGKTHFLPHNHQRPHHYGRADMSADFTPSEELRHIYDPDANDLGIPSSLRISIPSPSSEAPREIVHGNGFIQPPAKKLEFGTLGALPLEVTSQELGINRLNTASDSQPSASASPMSLANNPGISSNQMRNAQPYHLKDNGDFPPLSS

SEQ ID NO: 43764 - protein, 212 aa, Oryza sativa
MASRRLAPLLVLLLSSSLAAGQSTGDTVVFWGRNTDQLEGSLREACDTGLYTTVIISFLSAFGYIPGTYKLDISGHTVSAVGPDIKHCQSRGILVLLAIGGQGGEYSLPTSQAAVDLEDYLWNAFLGGGRPGVARPFGDAVVDGIDFFIDQGATEHYDELAAGGAVHGALLADPRQGVRRRAVRVEEGGAGEVDGGVPAEPRPRRRRRVAGG

SEQ ID NO: 43765 - protein, 706 aa, Oryza sativa
MAKSNASRASATRRKFYFLQKSLLVSSLLAVVAADVVGAGPNQQCFPSSCGDLGNISYPFRLASDSRPCVGTLRPWYNLSCSSGRATIQINTRTYYVTSINYTGEIFSVVDATLQDDDTNGTSCPLPRSDHLPYIDYWPPYLGESSTDSYGFVYLATASDTWACFVNCSRARTDTMPWYRPVTCLLPNNSFVFVSFDDCAVGELQPSCRYLAMIPVDRWNLPDNSSQLQNASYTDIIGFIRKGFSVRFPYRPDQYQSPRMSARECLKDSNRYFKERISHPSILNLTRAIFWSETNSEVDCGYEVAPQKDRIFLGTIVSAIDIIKFHFVLFRLVLGSLVVFIFLAHKYWKTGITIDAVEKFLRMQQMIGPTRFAYTDIIAITSHFRDKLGQGGYGSVYKGVLLPGNVHIAVKMLTGSSSCNGDEFISEVSTIGRIHHVNVVRLVGFCSEEMRRALVYEYMPRGSLDKYIFSSEKSFSWDKLNEIALGIARGINYLHQGCEMQILHFDIKPHNILLDDNFVPKVADFGLAKLYPRDKSFVPVSAARGTVGYIAPEMISRSFGVISSKSDVYSFGMLLLEMAGGRRNADPNAANSSQAYYPSRVYRELTRRETSEISDIADMHELEKKLCIVGLWCIQMRSCDRPTMSEVIEMLEGGSDELQVPPRPFFCDDERFPGVESYNMPSDLTAISEEHEDDDDESICLFESYQ

SEQ ID NO: 43766 - protein, 399 aa, Oryza sativa
MGAAMLLAPMPLLLLASTPLAAVHLPTRCRLRLQLLSRAAPEAASATTTTTTAPDNHFSVEEYLISNCNLTQPQAHKASKSIAHLKSRSNPDAVLAFLADFGLSPKEVAAIVASNPRILCARIDRSLAPICSELRAVGLSPSQIARLAQITGRYFLCRSFVSKVRFWLPLFGSSERLLQASDWNYWLLTSDLEKVVEPNVSFLKECGLSARDISKLLVAAPRLVTMHPDYVKDAVRRAIQLGVAPGSQMFRHALSTAGCIGQDKIDAKVAVLKESLGWSQEEVNLAVSKAPRILVASEERLRRNAEFLIDEVGLQPQYVARRSVLLMYSLERRLVPRHLVVKLLKERGLIEQDRCFFNAVAPTEEKFLEKFVVPFEGCVPGLADAYESACAGKTPVQAE

SEQ ID NO: 43767 - protein, 296 aa, Oryza sativa
MLPKYYNHVKAYDNTLITKFFGVHRITLKPGRKVRFVVMGNMFCTELRIHRKYDLKGSTQGRSTKKQNINENTTLKDLDLSYVFHVDKPWREALFRQIALDCMFLESQSIIDYSMLLGIHFRAPNHLKRITSCQNALESTGISAETECSVALHHEETISSKGFLLVAADEPGPAVRGSHIRGSMVRAAEGGYEEVDLVLPGTGRFRVQLGVNMPARARKVQEDVNVEVKNRDTIEEYDVVLYLGIIDILQEYNVSKRVEHAVKSLKFDPLSISAVDPNLYSRRFISFLEKVFPEQD

SEQ ID NO: 43768 - protein, 21 aa, Oryza sativa
MPVEWSRHSCSVVCYSFFSAA

SEQ ID NO: 43769 - protein, 238 aa, Oryza sativa; identical to SEQ ID NO: 32950

SEQ ID NO: 43770 - protein, 376 aa, Oryza sativa
MAMWRAAAGHLLGRALGSRAAHTSAGSKKIVGVFYKGGEYADKNPNFVGCVEGALGIREWLESKGHHYIVTDDKEGLNSELEKHIEDMHVLITTPFHPAYVSAERIKKAKNLELLLTAGIGSDHIDLPAAAAAGLTVAEVTGSNTVSVAEDELMRILILLRNFLPGYQQVVHGEWNVAGIAYRAYDLEGKTVGTVGAGRIGRLLLQRLKPFNCNLLYHDRLKIDPELEKEIGAKYEEDLDAMLPKCDVIVINTPLTEKTRGMFNKERIAKMKKGVIIVNNARGAIMDTQAVADACSSGQVAGYGGDVWFPQPAPKDHPWRYMPNHAMTPHISGTTIDAQLRYAAGVKDMLDRYFKGEDFPVQNYIVKEGQLASQYQ

SEQ ID NO: 43771 - protein, 376 aa, Oryza sativa
MLTDRWGGRREAMEFGNGGSSSSERRAAAEGATLARQGSVYSLTFDEFQSALAGGGGGGGGGSGFGKDFGSMNMDELLRSIWTAEESQAMASASGSAAGVGVAVGAPPTSLQRQGSLTLPRTLSAKTVDEVWRNLVRDEPPPVGAADGGDMPPQRQSTLGEMTLEEFLVRAGVVRENPPAAPPPVPPPMPPRPVPVVPKTTAFLGNFPGANDAGAAALGFAPLGMGDPALGNGLMPRAVPVGLPGAAVAMQTAVNQFDSGDKGNSDLSSPTEPMPYSFEGLVRGRRNGGGVEKVVERRQRRMIKNRESAARSRARKQAYTLELEAEVQKLKEMNKELERKQADIMEMQKNEVEEMIKDPFGRRKRLCLRRTLTGPW

SEQ ID NO: 43772 - protein, 316 aa, Oryza sativa; identical to SEQ ID NO: 29544

SEQ ID NO: 43773 - protein, 391 aa, Oryza sativa
MDFGDSRRKPNVVGKFTVAVALTVMCIIVLKQSPGFTSTSVFSRHEIGVTHVLVTGGAGYIGSHATLRLLRDNYRVTIVDNLSRGNMGAVRVLQRLFPEPGRLQFIYADLGDAKAVNKIFSENAFDAVMHFAAVAYVGESTLEPLRYYHNITSNTLTVLEAMAAYNVKTLIYSSTCATYGEPDTMPITEATPQNPINPYGKAKKMAEDIILDFSKRSEMAVMILRYFNVIGSDPGGRLGEAPRPELREHGRISGACFDAALGIIPGLKVRGTDYPTADGTCIRDYIDVTDLVDAHVKALDKAQPGKVGIYNVGTGHGRSVKEFVEACKSATGASIKVSFLTRRPGDYAEVYSDPSKIHDELNWTARYIDLRESLSTAWKWQKAHPNGYGSA

SEQ ID NO: 43774 - protein, 246 aa, Oryza sativa
MLLQGGEVANEEEINILDENFGAKSNGVPVIYPMNGHFQNGHGVASNGLDGKAGFVSKSLEGRAVAALNKFGQNAKMTSDPMWMKKALPPPDPPAMVVEKPTLASIWSAKGISGRLFLLGEVVHIFRPLLYVLLIKKFGIKSWTPWLVSLAVEITSLGIHSRATDLHQRGGKVHQLSSAERDELKRRKMMWALYVMRDPFFTRYTKRHLQKAEKVLDPVPLIGFLTGKLVELVEGAQTRYTYTSGS

SEQ ID NO: 43775 - protein, 547 aa, Oryza sativa
MMDPEMMRLAQEQMSKMSPADLARMQQQLLSNPNLVKLASESMKNMRADDFRRAAQQMNQTRPDEMLDMAEKLANANPEEVAAMKVQAEQQMSYVISGAKMLKQQGNELHRCEQYSEAAAKYKLAKDNLKSIPSQSAHSLQLVCTLNLMACYLKTRNFEECINEGSEVLTYDSSNVKAYYRRGQAYKELGNLEAAVGDLSKAHELSPDDETIAAVLRDAEEKLAVEGKGAKHPKGVVIEEVVDDASEPSSSQRSSSPGYTVSQPPEEGNSRPSGSSSIDANGLSKLGMQGMSPELVKTASDMIGTMKPEELQKMFEAASSLHGTSSSPPNLGPNMPEMSPEMFKMASDMIGNMSPDELQNMLNFASNMGGPSASPLRPENKLQSSSRATTSSTSQRSVDNSQPSSSQNVMENPHEILSNQRMGESSSPGAPSTADMQETMRNAMKDPAMRKMYASMMKNISPEMMSSMSEQFGMKMTKEDAAKAQEALSSLSPEALDRMMKWMDRAQQGVEAAKKTKNWLLGRKGLVLAIVMLILAFILRQLGFIGG

SEQ ID NO: 43776 - protein, 387 aa, Oryza sativa
MAAKAAALSSSPFVSSRRLSSPAASLRARTPRCVMGSEQVRVVVEEEGKTKKRMGVAEPRSAPPAVWTPRAPAQEARLAALRTDGRDSRLKIFSGTANRPLAQEIASYLGVDLGKVLIKRFADGEIYVQLQESVRGCDVFLVQPTCSPVNENLMELFVMIDACRRASARSITVVIPYFGYARADRKAQGREAITAKLSANLLTEAGSDRVIVCDIHSTQALGYFDIPVDHIHGQPVILDYLASKTISKDLVVVSPDVGGVVRARAFAKKLSDAPLAIVDKRRQGHNMSEVMHLIGDVKGKVAIMVDDMIDTAGTITSAAALLKQEGAEAVYACSTHAVFRFGSWFIVTSMIHVIVLIHWLVAKEPCYGMIRQIGFMFDQYKNDRVEQ

SEQ ID NO: 43777 - protein, 321 aa, Oryza sativa
MSNNWDSRKFFQSHHATANKVSQRPAKKQKISSYSDQMQNGNASSDSDKEQDLTKYYASATALANSPEEKKRREHRSKRFEKNQNSSSKSRNSAASKDVMANIHARRAVSALLARSCEDGTTLAVEDMDWDALTVKGTCQEIEKRYLRLTSAPDPATVRPEHVLEKALSMVETSQKNYLYKCDQLKSIRQDLTVQRIQNELTVKVYETHARLAMQAGDLPEYNQCQSQLKRLYAEGIKGCYFEFSAYNLLCVMLHSNNKRDLLSSLARLSKQAKQDEAVKHALAVHSAVSSGNYVLFFKLYKQAPNLNSCLMDLYVERMHV

SEQ ID NO: 43778 - protein, 190 aa, Oryza sativa
MGRRAAATAPAAAAAAAGAISATWWPGPSWSTTTRRSTPTAPRSPRSTARRPCSPSRDTWWPAPRRSAGSCWGCPSSNAGTPPAPSTANPRRPSREASSSSSVATSSSPARSTSSGSARCFSWCPTSREASSCRMTYSGSTTASSRLRVAAERNRVLGCFGPMWMRDCEKLLRAVSTVSLSSSVLLPSFM

SEQ ID NO: 43779 - protein, 288 aa, Oryza sativa
MGMSGATNGCGAGEYIRIPEDVEAGLGKEAGKGEGEGECPAVLRWRAIRWWAQVAALGILLAGAAAAAVVFLGPLVIKKVIAPVIEWESRTFSRPVIALICFGAIAFFPSVLLPSSPFMWMAGMSFGYFYGFLIITAAMSIGMSLPFFIGSAFHSKIHRWLEKWPKKAAFVRLAGEGDWFHQFRAVALLRISPFPYLVFNYASVATNVKYGPYIAGSMAGTVHGTFLAIYSGKLLQSLAVATTQGSFLSVDQIIYNGLGFSVAAVSTAAITIYAKKALQKLQADDELC

SEQ ID NO: 43780 - protein, 73 aa, Oryza sativa
MLLNHIPTYQLGEVMLPDLTTTLGWKKPSVNLPFLDTSLSPTASTSPAARVSFVAAEHGGVTCREKRRKPSDM

SEQ ID NO: 43781 - protein, 403 aa, Oryza sativa
MDATAIGNGALHSNGAGADTKGKPIKCKAAVAHGPGEALVMEEVEVAPPARMEVRLKVLFTSICHTDLSAWKGENELQRKFPRILGHEAAGVVESVGEGVEDLAPGDHVVPIFTGECGACTYCESSKSNLCKTYRVNPFKSTMVTDGGTRFTMIDRSSGAHNPVYHFLNTSTFAEYTVIDSACAVKINPKAPLEKMSLLSCGVSTGVGAAWNTANVSKGSTVAIFGLGAIGLAVAEGARLRGASRIIGVDINPEKFSKGKEMGITDFINSKASGKPVHEVIMEMTDGGVDYSFECTGITDVLREAFVSTHDGWGLTVVLGIHATPRMLPLHPMELFDGRRITGCVFGDFKGKSQLPEIVEKCMQGEININFDGFITQELPFADINKAFQLLEEGKSLRCLLHV

SEQ ID NO: 43782 - protein, 535 aa, Oryza sativa
MSLRVLNPNAEVLNKSAALHMNINAAKGLQDVLKTNLGPKGTIKMLVGGAGDIKLTKDGNTLLKEMQIQNPTAIMIARTAVAQDDTSGDGTTSTVLFIGELMKQSERCIDEGTHPRFLVDGFDVAKRATLEFLEKFKTSVVMGDEPDREILKMIARTTLRTKLYEGLADQLTDIVVNAVLCIRKPDEPIDLFMVEIMHMRHKFDVDTRLVEGLVLDHGSRHPDMKRRAENCYILTCNVSLEYEKSEINAGFFYSNAEQREKMVAAERRQVDERVKRIIELKNKVCAGNDKNFVVINQKGIDPPSLDLLARAGIIGLRRAKRRNMERLVLACGGEAVDSVDDLTEDCLGWAGLVYEHTLGEEKYTFIENVKNPRSCTILIKGPNDHTIAQIKDAVRDGLRSVKNTVEDEVVVLGAGAFEVAAKKHLIDNVKKTVKGRAQLGVEAFADALLVIPKTLAENSGLDTQDVIVSLQNEHDRGLVVGLNHHSGEPIDPQMEGIFDNYSVKRQIINSGPIIASQLLLVDEVIRAGRNMRKPT

SEQ ID NO: 43783 - protein, 320 aa, Oryza sativa
MAPAAASSSALLPAGTFSTARPVAGRPAGQRLPTRVAAASRTTTARSPAACLSVGGRRRGAEAVRASAGGAPAASLPAALLFDCDGVLVDTEKDGHRISFNETFAERELGVSWDVELYGELLKIGGGKERMTAYFSKMGWPAKAPKTDDERKEFIASLHKRKTELFMALIEKKLLPLRPGVQRLIDEAIGKGVKVAVCSTSNEKAVSAIVSCLLGPDRAEKITIFAGDVVPRKKPDPAIYLLAATTLGVDPSSCVVVEDSTIGLAAAKAAGMKCIVTKSGYTAEEDFATADAVFDCIGDPPEVRFDLEFCANLLQKQFVS

SEQ ID NO: 43784 - protein, 522 aa, Oryza sativa
MLMAASSPPPAAASSSGRLARVRLHDLAPYDGAATPAYGRAVHALSASLTRHGAALLDLPDAHAAILRCALQSARAFFRANDQPAFYLYRAGGSASRTSDDGGGDLVPACMDDAFRCFGEAARAALSAIARHLRLRTNVFDHLLDDTPLPVNEVSSSELLVAYSNQHLHTDHASSTACLGSSVPQVDRGFLVLIASDHPGIEVCDPNGQWYLADGISGPGDLLLLTGRALSHVTAGLRPTSRYRITNETRASLTFRLMPHANAILDCSPIAAAGHCVPQMYQPISASQFMDDLCAEERAVSNHSEAPSESQGSFISEPSLRSVLSDPLSGAFLEDAMVLLCGHSFGGLMLKKVIEMARCTICNGEVDPATLFPNLALRAVATVVKMEDDRRLFHNAALRKHRKEVTERMDVLKSTGGSRGNGELVLDAENPTSPRGVQYPFVVGERVLIMGNRRTPDKFVGKEAVITSQCLNGWYLVKAVDSGESIRLQYRSLKKVSELQLQSEMRLQPLTFLHNKYPSSGS

SEQ ID NO: 43785 - protein, 151 aa, Oryza sativa
MRGAATPASMPSCPPSSPRGFPSAASPASFGATATLAGFFRFGIRGVGAGGGRRGQPAPLGPEDAAATGPATSPCAQPSHRRGHCRPARQGEEGAGGSPSCAAVEPSEGGPRRRPRSPLRVADLGVAGELVATPLRSAPPPLSSSEKLTGG

SEQ ID NO: 43786 - protein, 244 aa, Oryza sativa; identical to SEQ ID NO: 33010

SEQ ID NO: 43787 - protein, 588 aa, Oryza sativa
MATTASKIIPQTLPEIPTTPEPQQYTKTAPDIPKSNNSRSSVPKLLQESDRGKLNHKLEPKEQKPNHHLKESVDVSSAKCPTEVSEEMVSEGIASQEKKVVEYESVNGSSTSFHTCEGSGPGKASGSARMTDRSETGERGSSSRCRPSTSSDISDESSCSSMSSTTKPHKSNDSRWEAIQTIRVRDGIIGLSHFRLLKKLGCGDIGSVYLSELSGAKSYFAMKIMDKASLASRKKLLRAQTEKEILQCLDHPFLPTLYTHFETDKFSCLVMEFCPGGDLHTLRQRQPGKYFPEQAVKFYVAEILLALEYLHMLGIIYRDLKPENVLVREDGHIMLSDFDLSLRCAVSPTLIKSSNPDAEALRKNSQGYCVQPACVEPSCVIQPSCAAPTTCFGPRFFSKSKKDRKPKPEIATQISPWPELIAEPSDARSMSFVGTHEYLAPEIIKGEGHGSAVDWWTFGIFLYELLFGKTPFKGSGNRATLFNVIGQPLRFPEYPIVSFSARDLIRGLLVKEPQHRLAYKRGATEIKQHPFFEGVNWALIRCASPPEVPKPVEIERPPKLPPSTSGTTDVSSGAPQKGSDGYLEFDFF

SEQ ID NO: 43788 - protein, 506 aa, Oryza sativa
MAASRRLARKLPSLISKHQRLISPEIDVEQAAESPASSSSIPLDPSLPILPLAVSHLSPPSPLPALPSVHASTPAALLRILRRARHHPRLAALDLHLLLAAASDSPAFRPDHRLTSLLASRLAESRRLPSLGRLLELVLFRPCPCTDDSIFACPELLPTFRKAILAFAASGDIPAASDALASLRRAADSPLPAEFYNIILHALARLRRHEDTVRFYGEMTSTHRVHPDVYTFNILINSSCRAEGVDAAMRWFQEMRRWSCSPTGVSFNTLMRGFFREGRCKEGIKVAREMLQLGFGLSVASMEIMINGLCRGGEPLKAAEVFIEFLVDGVVPEGFDCLDLVESLCRVRNVEKAVEVVELILERNWVSCLGVPAGVTVLECLMKEGKLDKACQMMGRMVAAEIVPDTISCNYIFEALCEAGRTVDANRLRLQAKEKGFQADGFTYSIIVQGFGRQGIRKEGEAVLDEMLDAGYVPNIATYNRLLDGLHMGRSMQLQQKCSRHRNAAN

SEQ ID NO: 43789 - protein, 202 aa, Oryza sativa; identical to SEQ ID NO: 30172

SEQ ID NO: 43790 - protein, 496 aa, Oryza sativa
MGENGVVASKLCYPAAAMEVVAAELGHTAGSKLYDDDGRLKRTGTMWTASAHIITAVIGSGVLSLGWAIAQLGWVAGPAVMLLFSFVTYYTSALLADCYRSGDESTGKRNYTYMDAVNANLSGIKVQVCGFLQYANIVGVAIGYTIAASISMLAIKRANCFHVEGHGDPCNISSTPYMIIFGVAEIFFSQIPDFDQISWLSILAAVMSFTYSTIGLGLGVVQVVANGGVKGSLTGISIGVVTPMDKVWRSLQAFGDIAFAYSYSLILIEIQDTIRAPPPSESGVMRRATVVSVAVTTLFYMLCGCTGYAAFGDAAPGNLLTGFGFYEPFWLLDVANAAIVVHLVGAYQVYCQPLFAFVEKWAQQRWPKSWYITKDIDVPLSLSGGGGGGGRCYKLNLFRLTWRSAFVVATTVVSMLLPFFNDVVGFLGAVGFWPLTVYFPVEMYIVQKRIPRWSTRWVCLQLLSLACLAITVASAAGSIAGILSDLKVYKPFATTY

SEQ ID NO: 43791 - protein, 311 aa, Oryza sativa
MDGGLATELEANGADLNDPLWSAKCLLSSPHLVRKVHLDYLEAGANIIITASYQATIQGFESKGFSKEQSEDLLAKSVEIAREARDMFLKEHSDRPIQHPILVAASIGSYGAYLADGSEYSGDYGEAGTLEFLKDFHKRRLEVLAEAGPDLIAFETIPNKLEAQAYVELLDECNISIPAWFSFNSKDGVHIVSGDSLIECATIANGCSKVGAVGINCTPPRFIHGLILSIRKVTDKPILIYPNSGERYDAEKKEWVESTGVSDGDFVSYVNEWCKDGAVLIGGCCRTTPNTIKAISRSLNQRHSSLHLPVA

SEQ ID NO: 43792 - protein, 213 aa, Oryza sativa
MLRLAFHDAGTFDIADKSGGMNGSIIYEVDRPENTGLNKSIKVLGKAKEVIDLVQQVSWADLIAVAGAESVALCGGPEIPVRLGRLDSSTADPAGKLPEETLDATALKTLFSKKGFSTQEMVVLSGAHTIGGKGFGNPNIFDNSYFKVLLEKPQPSSSGMPAMVGLRTDWALTEDDECLRWINLYAQDQAKFFTDFKDAYIKLVNTGASWRSA

SEQ ID NO: 43793 - protein, 499 aa, Oryza sativa
METGGIAERFRDKTILITGATGFLGKLLVEKILRVQPEVRKLYLLVRAPDAIAAEERVLTEVVGKGLFDVLREQYGAGFNSFIKEKIYALPGDVMHENFGLESYEVLQLSQKVDIIVNGAATTNFMERYDVALATNAAGVMHLCQFAKQCDNLKMVLHVSTAYVAGEQAGQLLEKPFQIGRALRLDYQLDIEAELQLVDSIKSELRIKCSSDDKLEKTTMRKLGLKRATHFGWPNTYVLTKAMGEMLLQQLGQDLPVVIVRPSMITSTFQEPMPGWIEETRTIDVIFVAYNDQTLPCFIFDGSVIFDLIPGDMVINAMMAAINSQWNKRAQVIYHVTSAHQNPLPVSLIEESMFRYFDINPRTSKDGKAIKNKRPLAFKRLAYFQAYMILRYKLPLEMMRAANVLLGGIYTKNYYEFNRDYNILMTVAKLFAPYVFFKGWFDDTNLRKLWKATAMDQNDDASIFNFDPKCINWSSYLVNTHIPAAIKYANDQKAKARSA

SEQ ID NO: 43794 - protein, 570 aa, Oryza sativa
MEASDEDRPLIHHLPPQEQCSKYTCDGTVNIDSKPALKQSTGNWRACFFILGVEFTECICFYGVSKNLVTYLTSVLHESNVNAAQSVSIWIGSCFFTPLIGAFLADTYWGRYWTVVMSILVIILGMIVLTVSASPLFLNASFYNGGISRLTVYLGLYLFALGTGGIKPNIPAFGADQFDGADPVERVTKGSFFNWYYFSINVGSLLSSTVVVWVQDNIGWSVGFAGPMLLLGFGLAMFIAGRRAYRYKKLGGSPLTRVFQVLVAAVRNHRLNLPDDSSLLHELPGVTEGDYRTQHTYQFRFLDKAAILSDKNCAPAAPSSPWRLCTVSQVEELKMLLRTFPVWASLVGFFMVTAQMTSTLIEQGVAMDGRVGRFTVPPASLATFDVVAVLALIPVYDAALVPLARRVTGRDRGVSHMQRIGVGLALSAVAMAYSALVEARRLAMAAAAAGTRMSIAWQVPSFFVLGAGEVFAVIGMLEFCYEQSPASMKSLGTALVQLAVAVANYLNSGMLRVVAAATARGGGAGWIPDKLDEGHLDYFFWMMAALSVLNLLQFLHCSIRFRGNNTLSSS

SEQ ID NO: 43795 - protein, 37 aa, Oryza sativa
MLIRWQPLYSSLLESWIHFGGDVCFLFRHVAFNCYQF

SEQ ID NO: 43796 - protein, 782 aa, Oryza sativa
MDTPDRAAAAARAEDSPLFSFIDSLSPIEPLKSAYSASSIQAYQSLNITSISSIFTSPHDNAQKESKLSKSSFAEFSESEVCADESDKNKPSKSSNAVRLFACTSTLTQATHKITSSVSEGTVGPPEGSNDLPQPGQFDSGSPDHNTTPCRGVRSDLKQGKCRKLQAFQTAKTNTSEKRKCLFSTEVQLMDGCQPEKLNDEILGCDWDDLISATSGELIAYDEDHKGVQLAVSNAESCGFLLSKLTGDGDISDRTHPSSSTQTYYRELLMDEDQTENAQLVPDGEKNISTEEIQDNLYEANGSIPTGYKVETRQQRGMRRRCLVFEAAGYSNRIVQKESVMDLSVSTCKGKSPVQNHSNPGKTPSPRVLRGIGLHLNALALTSKDKMICQDPMSSLVPSSATQQEAHGKMLSAGENFIHPGGELLELQMDDDCSAGVFLGNDHDSSQSNSPQKKRRKSDNGDDGEACKRCSCKKSKCLKLYCECFAAGVYCSEPCSCQGCLNKPIHEEIVLSTRKQIEFRNPLAFAPKVIRMSDAGQDITGEDPNNTPASARHKRGCNCKKSSCLKKYCECYQGGVGCSSNCRCEGCKNTFGKRDAAVSTEAEEMKQGGEEAENCGKEKENDLQKANAQSEDHPFLELVPITPPFDVSSSLLKPPNFSSAKPPRPTKARSNSSRSSSKAPGAVHSQKFSKIANSGLNEEMPDILRDDASPGNCVKTSSPNGKRVSPPHNALSVSPSRKGGRKLILKSIPSFPSLIGDASSGSSMNSSESAFNTASPLALGPS

SEQ ID NO: 43797 - protein, 824 aa, Oryza sativa
MEHQMFHQSFFLNSALHGPKASNTQHSVEPCAMQVILARGRSKFSNMRHLPFCRFITLSVIFLLSIPLLVASVPQDILSPGSSIPVEDNSNMLVSPNGLFSCGFYEVGANAFIFAVWVNQSIGKTVVWTADRDVPVNGRGSRIELRDGNMVLLDFNSRLVWSTGTTSGQVRSAKLLDTGNLVLLGHDGSRIWQSFDSPTDTLLPTQPIAANLKLVSGKYMLSVDNNGSLALTYDTPEGHSKYWPRNINATPFSGDQPQGLDMLGCISAGNHIRYCASDLGYGVLRRLTLDHDGNLRLYSLLEADGHWKISWIALADSCQVHGVCGNNGICRNLMNPICACPPGFVFADVSDLSKGCKPTFNISCDKVAQAYFVEIEKMSVWGYNSNYTASTAFDVCRKSCLDDLHCEAFSYQYGLGGCTLKSSLYTGGFTPSEISITCMKLTADAAVQNSIDYKPHGPYLSCQGRGFSTSADTKAFQWNYLYMPIGSIFAVEAILFPLAWCFLRKRKQDSISRNDGFALIRDHFRKFTLKELVAATAKFKHEIGRGGSGVVYEGILDDGKKIAVKKLQDMVQGELDFQSELSVIGRIYHMNLVRMWGFCSECGHKLLVFEYVENGSLAKLLFDTASTTGARLRWEQRLRVALGVARGLAYLHHECLEWVIHCDVKPENILLDEELEPRLADFGLAKLLNRGKDVQMLSRVQGTRGYIAPEWASNLPITGKVDVYSFGVVLLEIVRGLRVSDWTVVDGEEEEVEMVFRTTVAVLKERLRGEDRSWLPGFVDPRLDGNFCRLQAAAMVELAVACVEEERSRRPNMKLVVEKLLNFL

SEQ ID NO: 43798 - protein, 104 aa, Oryza sativa
MLPSGLAVAPPPISLHAAASRTGRQRYAPVDRRASMGRSNPPRPTRAAWWRTRRREGVPPLPSPPTGTTPPQSSSPAAGAARFGGRERRKGEKRGKSLRRRRPR

SEQ ID NO: 43799 - protein, 40 aa, Oryza sativa
MKCFFLVGWHLFTTWRMDLPMIFRQHFTGAKLIALFQRRW

SEQ ID NO: 43800 - protein, 630 aa, Oryza sativa
MWRGCVSRGLRSLSKGKGSSSSAPVSAAARLFSTASSSYTVVDHSYDAVVVGAGGAGLRAAIGLSEHGFNTACITKLFPTRSHTVAAQGGINAALGNMTEDDWRWHMYDTVKGSDWLGDQDSIQYMCREAPKAVIELENYGLPFSRTEDGKIYQRAFGGQSLDFGKGGQAYRCACAADRTGHAMLHTLYGQAMKHNTQFFVEYFALDLIMDSEGTCQGVIALNMEDGTLHRFRATNTILATGGYGRAYFSATSAHTCTGDGNAMVARAGLPLQDLEFVQFHPTGIYGAGCLITEGSRGEGGILRNSEGERFMERYAPTAKDLASRDVVSRSMTMEIREGRGVGPLKDHIYLHLNHLPPEVLKERLPGISETAAIFAGVDVTKEPIPVLPTVHYNMGGIPTNYHGEVVTMKGDNPDSVVPGLMAAGEAACASVHGANRLGANSLLDIVVFGRACANRVAETAKPGEKQKPLQKSAGEKTIAWLDKLRNANGSLPTSKIRLNMQRVMQNNAAVFRTQETLEEGCKLITKAWESYHDVKISDRSLIWNSDLIETIELENLLINACITMHSAEARKESRGAHAREDFTKRDDEQWMKHSLGYWENEKVRLAYRPVHMNTLDSEVESFPPKARVY

SEQ ID NO: 43801 - protein, 148 aa, Oryza sativa; identical to SEQ ID NO: 30070

SEQ ID NO: 43802 - protein, 85 aa, Oryza sativa
MLVADHYLLLSRKAVERQLAMLMRAQHHKNQQTEWRTNVVQFGTSLVGLLEGEFSLSNKLQIKMFLSLMWITKTHNQMISSGLNS

SEQ ID NO: 43803 - protein, 715 aa, Oryza sativa
MSSYPVLNNRPIDQWRVTDLKDELRKRRLPVKGLKDGLVRRLFESIQSEKGEEEEEQDNETVEVNPAANQASEIQSVSQETTVSITEVHKETVVQVTQEATPPITEVSQSLTVSAAEEPPKVNAVATHEAPLSKAPTDKGEEPPIAGDVSTVENEHLHAENNTEPFVEKTQDVGTNEAIGALDMTSADVESDMTSSDIKIDATEASKVQQHDTVATTVDAIPTDADPMDTDVATEKAVLNDLGDTTSVYDEERKDSELTNEDEKPIAPKPNDQVPEVSPDLGSPIKCESISSDDISTNKKNNIKDNLNANNFDLELEAKPEMVKPSSGITSIGGDLQPLDDDKDLGKNQSSLEYIDSTANVDEGGSPEKLNLDRSSGDESMEEDVMEIKQVESNIKSEGTAELSSDHVKEVSLPDTVVDNSSVDTKEVIADEKTAASTEKRKLEAEETVAATEPIKRQRRWAADGAKVPERQPISHSGSDAPKENFQPALKRSFGRSDSTASGDSPKERVVPPSQKPATASLRIDRFVRPFTLKAVQELLGKTGSLCSFWMDHIKTHCYVTFSSVEEAVATRDAVYDLQWPPNNGNRLVAEFVDPQEVKLKLEPPPPAAAPISPATTPKEPPFQQAQANQNMPRQAAAPREHLPPPPPLTTLPTSDSGSAKERLPPTPKKQPEPPVVTLDDLFRKTHSSPRIYYLPLSEEEVAAKLASQGKGKRE

SEQ ID NO: 43804 - protein, 57 aa, Oryza sativa
MAKILMLLEQTLASELERSGSPTGIFISAHYWGTHQRVQGGMSGQMVALTMVSGGEG

SEQ ID NO: 43805 - protein, 154 aa, Oryza sativa
MTTTAPTRRRRQHRLCVWGWGDGGGEAAARLSPLPATRNDDDDAATDASGGGGTEEEKRQLGSPFSWRRAMTMTTLPVGKPVDGGGEAATTVSNGADATTTMPPVVGETGGWRRRAIGGTPFFIRCNVFRRRVNLPPAKMEVSLAKIIFASLCV

SEQ ID NO: 43806 - protein, 408 aa, Oryza sativa
MPPTMLASVPTRPRSHPFRRRRGAAAAAPPLLPDQIAAAAAAAAKRPAESSTSASSCFHSEVISATSTTCPEQLANDAETTAYSSAREDLTLSETEEEEEEEEVRSGPCICTDCSFSPLHESSSSSDDDNAVPSPTFSLFLALAEQFVPFTHPKTPTATDVALQAGEGKRFEDLDNEVSYERFRRRERRGVVARDYIEVYSSMLGSYGRAVVEQRVVMVNWIMEHSQAMKLQPETVFMGIGLMDRFLTRGYVKGSRNLQLLGIACTTLATRIEENQPYNCILQKAFKVGINTYSRSEVVAMEWLVQEVLDFQCFVTTTHHFLWFYLKAANADDRVEDLAKYLALLSLLDHKHLSFWPSTVAAAVVALACLATNNESSCHLVMETHMRTKNDDLPECLMSLEWLTNYAS

SEQ ID NO: 43807 - protein, 511 aa, Oryza sativa
MENLISLVNKLQRACTALGDHGEESALPTLWDSLPAIAVVGGQSSGKSSVLESVVGKDFLPRGSGIVTRRPLVLQLHRIDGDREYAEFMHLPRKRFTDFALVRKEIADETDRETGRSKQISSVPIHLSIYSPNVVNLTLIDLPGLTKVAVEGQPDSIVQDIENMVRSFIEKPNCIILAVSPANQDLATSDAIKISREVDPKGERTFGVLTKIDLMDKGTDAVDILEGRSYRLQQQWIGVVNRSQQDINKNVDMIAARRREREYFSTTPEYKHLAHRMGSEHLAKSLSKHLETVIKSRIPGLQSLITKTIAELETELNRLGKPIATDAGGKLYTIMEICRMFDGIYKEHLDGVRPGGEKIYHVFDNQFPVAIKRLQFDKQLAMENVKKLITEADGYQPHLIAPEQGYRRLIESCLVSIRGPAEAAVDAVHAILKELVHKAINETHELKQFPTLRVEVGNAAFESLDRMRDESKKNTLKLVDMECSYLTVDFFRKLPQDVEKGGNPSHSIFDR

SEQ ID NO: 43808 - protein, 225 aa, Oryza sativa; identical to SEQ ID NO: 32661

SEQ ID NO: 43809 - protein, 366 aa, Oryza sativa
MLKEQPFYHPKEGTFMKLLLLLGRSGQPSRARYLFDEMLQQGCQPTPELYTALIAAYCRNGLLDDAFRLLADMKASPVCQPDVYTYSTIIKACVDASRFDIVDAMYKDMADRSIAPNTVTQNIVLSGYGRAGRLDDMEKVLSAMLDSTTSKPDVWTMNIILSLFGNRGQIESMEKWYEKFRGYGIEPETRTLNILIGAYGKKRMYDKMSAVMEYMRKLAFPWTTATFNNVIEAFADAGDAKNMEHTFNQMRAEGMKPDTKTFCCLINGFGNAGLFHKVVGMVKLAERLGVPMDTTFHNAVLMTCVKAEDLMEMERVFMRMKQIQCIPDATTYSILVGAYRKEGMTDKIYVLQQENPTLVPTDLVHV

SEQ ID NO: 43810 - protein, 194 aa, Oryza sativa
MDGKPARSVDLADHEKEAIQHLCLLTMKPVIYVANVTESDLAEPGNNPHVKEVAKLATDLESGMVTISAQVEAELAELPLEERVEYLKSLGVTESGLGNLVKATYDLLGLRTYFTTGDKETKAWTILAGMTAPQAAGVIHSDFQKGFIRAETVSYDDFVAAGSLGVAREKGLLRLEGKDYIVQEGDVMLFRFNV

SEQ ID NO: 43811 - protein, 227 aa, Oryza sativa
MTDALTRQVRNLAMEVKQLASSRGSITVLNGGSGQTGVSGLIVPAATVGALGYGYMWWKGISFADLMYVTKRNMANAVSSMTKHLEQVQTSLAAAKRHLTQRIERLDDKLDQQKALSGQIRDDVTDARLKLENIGSEIKNIKQLVWGLDEKMDSMEAKQNFSCAGVMYLCQFIEQNGGKLPERLEGSKMAGKRFGSQNLIQGLQLAIETGNFDKETFNALKNNSDSR

SEQ ID NO: 43812 - protein, 787 aa, Oryza sativa
MTSGMEPVDDSEWEEVSSINNYALFMGHMSMAVKGLGYLLVLWTTVILLGGFVSILGKKDFWCLTIITLVQTAGVSDIFLNEKLRYTWRSFLGFFSATDTLETERGAISWFYGRSRSRSYYLNNLVVVVIWLLHLFVFATIICPLAVLYMFGLIITTAISACRLIQHDYGGEVNNGGANLKSALKFVYSIALLQGVLFCYRFTLCYEQKRLVDLVVNKYRFVTSLSESVMAYMQETMIGCEKDPSFVKGRNLVTYAVGLTKSGSPDGFLSGVRILDSLLNTPMYKYNFFLEVEVEVEEQKAMVKQLLLSASYSQDGGLHTLLQSLDCTRAYNAEAREHAARIVAHLAGDLHLEQFPQGIHCIASLLEGPPKDCDGNIPVNYRELMLQGLSILMKLAAHEDCQRSINKTEGLLAKIMAPLRSGLLNHNDDPNSAWFRTVHASMVVILRLVDAPGQTGKELRRKISGDVEAMASMERILGCQGCGLGSFHDSSLFMQALDIYTRMHEHTLSNIVTREYFIEKLLLIFTHKVYKEANIIFGLAVVGEKLATLCSHGKANAKLILQVKDDVVGDLTKILVQDRYPKEYRISAAQILEQLCVHHTDDDEYIQSLKEALKVKSPEVLVRTLRAESVDRQMLAAVLSLIVTMTRNLMDAEDLPPLIDAINRAANGFSILTELQSMVTKLSMKSKVTIVNRLNTLKLITEIFILIVRHGSRYTVEEAENLIKSLSKAARNMSEIEDIMVISGCSSSLKTLGSLVKEAEELLPRARASEMEVIIEHPSCVNRNQIN

SEQ ID NO: 43813 - protein, 472 aa, Oryza sativa
MSNRSQNQGVDFSSLDQRMILGENGTRPSYSASGNCNNCGVRERSGITARTNISESLVIQKASAGAGSDGRLSIEQSGSVVPGSLASCSSLSIHVFNKKDNEDSLPVRLEAKPVERSAGDMIGLGGAFSTKETEITCTRGTETLWSDRISAKVTVLAGNANFWAVGCEDGCLQVYTKCGRRAMPAMMMGSAAVFIDCDECWKLLLVTRRGLMYIWDLYTRTCVLHDSLASLVTSPDEAAGKDTGTVKVISAKFSRCGSPLVVLASRHAFLYDTSLKCWLRIADDCFPASNFASSFSSTQGGELGKLQIDIGKFMARKPIWSRVTDDGVQTRSHLETQLAASLALKSPQEYRQCLLSYIRFLAREADESRLREVCESFLGPPMGMVDAASSADLKNPSWDPDVLGMKKHKLLREDILPSMATNRKVQRLLNEFMDLLSEYEAAETNVEQMDVTPTPPPPPPAAATEGNNNGAS

SEQ ID NO: 43814 - protein, 378 aa, Oryza sativa
MKRKRGRKMGKKGKSKASTTADASPMSLSSPSTVDASSKSPSSPSTEENGTSPAHHQADNAPVIAPPPVPEPAPPEPEKPAVSTDVQNAKPKVYSRVRLKFKSAKVLETHQGPSEAKAPVDGGGGKPASAAPEASKEVVAEKAIVSPDGQKDAQAAELSGSDKDKVARKVASIKIKSVGLSSVEDKNQDRKADSVSEPLPSKQETVLENVESETALELRSSQELEVKQATPERQRDDRELTAALEAIKKVMKMDAAEPFNTPVDPVALGIPDYFDIIDTPMDFGTICQNLERGDKYMNSEDVYKDVQFIWDNCTKYNSKGDYIIELMKRVKKGFMKNWLAAGLYSDVQENGGNDNTGDEDVKGSKGKSKQKRRRLGND

SEQ ID NO: 43815 - protein, 116 aa, Oryza sativa
MRQRRRRRRGRAAAAAAAAAHGHVRPGRRRAAAVPAVRRPGQVQPLAPPPPPPPRADAADAAAKVGRRRRRRGELPDPVAVAGHAGVLLRPRPRRARRRVRRRLPLTSRDRKRVQV

SEQ ID NO: 43816 - protein, 356 aa, Oryza sativa
MPPPAVSTAPVAPVVASSSSAAAAAPRRPRSLRLRVTPYASVSSSSSPSTFAVSIPPPPPARHSRKQLVGRDGAPAKPAKPRVFFLDVNPLCFRGSQRSLGAFARWLALFFAHVSLRDPVVAVLDGEGGNEYRRRLLPSYKAHRPRGPGTGADSRVIDVLRECNVPVVRVDGYEADDVVATLTEQVLQKGFRVVIGSPDKDFKQLISEDVQLVMPIPEIGRWSFYTLRHYVAQYKCDPTADLSLRCFIGDEADGIPGIQHLVPGFGRKTAVKLLKKHGSLENLLNTAAVRTVGKDYAQDALVKHADYLRKNYEVLSLKRDVKVQLDDRWLSTRDSCNDSSVLSDFILKFNEGQNIR

SEQ ID NO: 43817 - protein, 267 aa, Oryza sativa
MHIYSRASAKGKRVQSNMGAKNHAIILPDADRDATLNALIAAGFGAAGQRCMALSTAVFVGGSEPWEDELVKRASSLVVNSGMASDADLGPVISKQAKERICKLIQSGADNGARVLLDGRDIVVPNFENGNFVGPTLLADVKSEMECYKEEIFGPVLLLMKAESLDDAIQIVNRNKYGNGASIFTTSGVSARKFQTDIEAGQVGINVPIPVPLPFFSFTGSKASFAGDLNFYGKAGVQFFTQIKTVTQQWKESPAQRVSLSMPTSQK

SEQ ID NO: 43818 - protein, 347 aa, Oryza sativa
MMSTLIDGLPNEVALQCLARVPFLSHPVLQMVCHSWRASVRNGELSKVRNQISATEDLLCVLAFEPENMWQLYDPLRDKWITLPVMPSQIRNIARFGVASVAGKLYVIGGGSDRVDPLTGDHDRIFASNEVWSYDPLCRLWVQRAPMLVARAMFACCALDGNIIVAGGFTNCRKSISKAEIYNPEADTWEPLPDLRQAHSSACSGLVIKGKMHVLHKGLPTVQILEDGNAWAVEDYSWLQGPMAMVRGELYVLSNSCIMKQRGVNFPDKMVSCASEFQSRIGFGMIGLGDNIYLVGGVIGPGPRNQCIKPLSDVDILNVTSERPTWLPGSPMTHCRGSISGCALLRI

SEQ ID NO: 43819 - protein, 732 aa, Oryza sativa
MSKKSRGGGGGAAAGEDPEDLSRSPLQAVLLADSFTLKFRPITLERPKVLLPLVNVPMIEYTLSWLESAGVEECFVFCCAHAQQVKEHLGKAGWTGKPAAREMTVTAVESHDAISAGDALRVMYGRGVIHGDFVLISGDTISNMNLKDALQEHKDRRKKDPLAVMTMVIKHSKPSILTNQTRLGNDEIVMAIDPETKELLYYEDRADVSNLYVTIDKDILASNPTLQLHNNMEDCYIDICSPEVLSLFTDNFDYQHLRRHFVKGLLVDDIMGYKIYTHEIRSSYAARIDNFRSYDTVSKDIIQRWTYPMVPDVLSFGDRQEIKLHRQGIYKASDVTLSHSAQIGANSVVGNGTSVGENCKVSNSVIGQGCNIGKNVLIHGSYIWDNVTIEDGCKVSNSLVCDGVHLGAGAIVEPGCILSFKVEVGKNVVVPAYSKVALLPQPSNEDSDEELEYADTNSGVTDSPPFSSMRSADHPTVSDDDDLEASETGTCGVVGYVWENVDAGIQEEWRQSIAPIPKDKLEELQHAASFDDDDDGSEDDFKNRPTVLDQDDDSDVSAVEDDDYSKFEKEVEETFQRALDGIHQDNLILEINALRLSYSLQHADCAGALFHSVMRSALVAAQSTNGNLLKTTAEALGKWKDLLRNYTKSVDEEMEILLKFEEMCQENTKEFSPLFSKILPYLYDKEVVSEDAILRWAEEKENADESDKVFVKQSEAFIQWLKEAEEEDEEEE

SEQ ID NO: 43820 - protein, 480 aa, Oryza sativa
MAVTRIGLAGLAVMGQNLALNIAEKGFPISVYNRTTSKVDETVQRAKVEGNLPVYGFHDPASFVNSIQKPRVVIMLVKAGAPVDQTIATLAAHLEQGDCIIDGGNEWYENTERREKAMEERGLLYLGMGVSGGEEGARNGPSLMPGGSFEAYKYIEDILLKVAAQVPDSGPCVTYIGKGGSGNFVKMVHNGIEYGDMQLISEAYDVLKSVGKLTNSELQQVFSEWNKGELLSFLIEITADIFSIKDDQGSGHLVDKVLDKTGMKGTGKWTVQQAAELSVAAPTIEASLDSRFLSGLKDERVEAAKVFQGDFSSNLPVDKAQLIEDVRQALYASKICSYAQGMNIIKAKSMEKGWSLNLGELARIWKGGCIIRAIFLDRIKKAYDRNSDLANLLVDPEFAQEIMDRQAAWRRVVCLAINNGVSTPGMSASLAYFDSYRRDRLPANLVQAQRDYFGAHTYERVDMPGSFHTEWFKIARAAKM

SEQ ID NO: 43821 - protein, 602 aa, Oryza sativa
MALALAHLILAAALPLLFLSRAGKRCSCSSVSTAVWCVVFFCFSLLIIYRRVILLRVREKCFSCTADGGEVGVCYGRDGNNLIDPPSVVSLLKAKGITMVRIYDADPTVLNALANQNIKVMVAMSNRDLVAGSAKDFNSALSWVKNYVLPYYRSSQINGVAVGNEVFQQAPDLTSQLVSAMRNVQAALARLGLADAIKVSTPISFDSVKVSFPPSAGVFQDNIAQSVMSPMIDFLQQTNSYLMVNFYPYIAWANSNGQISRDYAVFGPNASPVVDQASGITYHSLFDAQLDAVYFAIDHVSGGSVRVSMAQARRGRPSPRIPVKCSECGHPSGGRLPQLSTLDDVQVDVATKANAQAFNNGLISRALFGATGMPDVSVYIFALFNENLKGGASVEQNFGLFYPDGTEVYQVDFHNGGGGNVCPTKASWCVANSAVGSTRLQAALDWACSNGADCGAIQPGKTCFAPNTLVAHASYAFNDYYQRKSQASGTCDFSGAAFIVYKPSPSICDPNPSWCIAKPEVGDTRLQNALDYACGSCADCSAIQRGAQCFDPDTKVAHATYAFNDYYQTTGRASGSCDFNGAATIVTQQPKIGNCVLSPNNS

SEQ ID NO: 43822 - protein, 212 aa, Oryza sativa
MASSKPILYGAWISSCSHRIRIVLNLKGVDYEYKSVNPRTDPDYEKINPIKYIPALVDGDLVVSDSLAIALYLEDKYPQHALLPKDLKKKALNLQIANIVCSSIQPLQGYAVIGLHEGKLSPDESLQIVQHYIDKGFKAIEKLLEGSNFKYATGDEVQLGDVFLAPQIHAGINRFQIDITKYPNLARLHDTYMEIPAFQAALPKNQPDAPSC

SEQ ID NO: 43823 - protein, 358 aa, Oryza sativa
MNSGDAEAAAASKKARCKKEKKKKRKDDCGAAEASAADEEIVHDKKRKKQLQQKKNGDDVAVPNRKTTVSIAVAGSIIDNAQSLELATLLAGQIARAATVFRIDEVVVFDSNSSVENSGDDVESGARFLVRILQYLETPQYLRRRLFPMHNNLKFVGLLPPLDAPHHLRKHEWSEFREGVTLDGDRSMGTFVDVGLSKNVLVEQMLEPGKRVTIAMGTNRDITTACKRKIVSPSSPRDEMELYWGYKVRYASNLGGVFSDSPYKEGYDYIIGTSEHGKIISSSELILPSFRHLLIAFGGLAGLEECIEEDRNLKGKGVDDVFNTYLNTCPSQGSRTIRTEEALLISLQYFQDPIRRAG

SEQ ID NO: 43824 - protein, 118 aa, Oryza sativa
MAKVALSSLLAVGGAAAFAVQPSKKTGSGLFRNRVITVRRPRISANLGGDGEVKPAGNKKKFITREEEPEQYWQAAGERKGENPMKTPLPYIIIFGMSTPFVILAIAFANGWIKVPVR

SEQ ID NO: 43825 - protein, 264 aa, Oryza sativa
MWHVRKEIAPAILLVVDFGGWYKLDSNSASSNVSHMIQHTQVSLLKDVIVPYTHLLPTMHLSENKDRPTLLYFKGAKHRHRGGLVREKLWDLMVNEPDVVMEEGYPNATGREQSIKGMRTSEFCLHPAGDTPTSCRLFDAVASLCIPVIVSDEIELPFEGMIDYTEFAIFVSVNNSMRPKWLTNYLRNVPRQQKDEFRRNMAHVQPIFEYDSIYPGRMASAAQDGAVNHIWKKIHQKLPMIQEAVTREKRKPDGTSIPLRCHCT

SEQ ID NO: 43826 - protein, 482 aa, Oryza sativa
MEDSARPTPADSGELPNGAGMAEDAVVAPDAGEAPEEGEESGIANDSETNAALGAEGEPSRALTMRELLGELKDSGEPSSGRSTLSEGNGIGSAGAERASQDSLQFSSHHDVAMDLINSVTGVDEEGRSRQRILSFAAKRYVSAIERNPEDPDAYYNWALVLQESADNVDPDSSSSKDSLLEEACKKYAEATRLCPTLYDAYYNWAIAIADRAKMRGRTKEAEELWKQAIMNYDKAVQLNWNSPQALNNWGLGLQELSAIVPARDKQTIIKTAISKFRSAIQLQFDFHRAIYNLGTVLYGLAEDTMRSAGPDVSPNDLYSQSAIYVAAAHALKPNYSVYRSALRLVRSMLPLPYLKAGYLTAPPADNTIAPHKHWERSEFVLNHEGLQQVDASESPSSKPLGHMGRSKKYIKVAVEDIVSVSACSDLTLPPGAGLCIETIHGPLFLVADTWESLDGWLDAIRLVYTIFARGKSDVLAGIITG

SEQ ID NO: 43827 - protein, 66 aa, Oryza sativa
MSKVEHMKSTVDEKQPCEPNILTVTSEPLGERNLVMKPFLCVKHDVKLPNPELRIASCWLCSIGCV

SEQ ID NO: 43828 - protein, 74 aa, Oryza sativa
MTPSTCSPGSPAPAAAPHTIQVPAAVLPHPAPHHHTTPPSKPSPPWAHPHRGGLTFIPTCDGRLHPLLREERYT

SEQ ID NO: 43829 - protein, 128 aa, Oryza sativa
MGLWEWPWDRRRRGPSGLGPTSTAEEVTAGVDATHLTAIVTGATNGIGRETARVLARRGAEVIIPARTMESGNAVKQSIAEEVPGSRLHVMEMDLASLDSVRRFATAFDSSHTHLNILMYATLTHSLT

SEQ ID NO: 43830 - protein, 283 aa, Oryza sativa
MSQQHGRGHIAHCLGGALAGRDTVAVSGNRRLTGAGLADGARRLAAALSNLGVRRGHVVAVVAFNSIEYIELFLAVTYIGGIIAPLNYRWSFEEASQALELVQPTVFIFDGSYSSWALRLKESNSLTSVNLYLFLGNLCSISQAANFVSVVSVEQIKRSSGGTTRAVEPVSAPNDVALICFTSGTTGRPKGVAISHTSLIIQSLAKIAIVGYGEDDIYLHTAPLCHIGGISSCLAILMAGGCHVLIPKFDVKSAFDAILEHRVTSFITVPAIMADLLSYARRY

SEQ ID NO: 43831 - protein, 611 aa, Oryza sativa
MQQDQRKKSSTEADFFTEYGDASRYKIQEVIGKGSYGVVCSAIDVHTGEKVAIKKIHDIFEHISDAARILREIKLLRLLRHPDIVEIKHIMLPPSRRDFKDIYVVFELMESDLHQVIKANDDLTKEHYQFFLYQLLRALKYIHTANVYHRDLRPKNILANSNCKLKICDFGLARVAFNDTPTTIFWTDYVATRWYRAPELCGSFFSKYTPAIDIWSIGCIFAEVLTGKPLFPGKNVVHQLDLMTDLLGTPSMDTISRVRNDKARRYLSSMRKKEPILFSQKFPSADPLALDLLQKLLAFDPKDRPTAEEALAHPYFKGLAKVEREPSCQPITKMEFEFERRRVTKEDIRELIFREILEYHPQLLKDYINGTERTTFLYPSAVDQFRKQFAHLEENGGNGPVIPMDRKHTSLPRSTIVHSTPIPAKEQPRIGPSRDKPSDEPYSNPREFDRFSGNAPRTSQAPQRVPTARPGRVVGPVLPYENGATKDSYDARRLAMNSGYPPQQQIPQAYGYYQIPGKSACSELSQAERYTLHQQAYTCANSATVTDVALDMRAPPFHLSGGPKSDSSERLAAETNLYTRSLNGLAATAAGVAASAHRKVGVVPYGMSRMY

SEQ ID NO: 43832 - protein, 709 aa, Oryza sativa
MLMPETDLGYKVTHLSLNTDGSSLLLAGSHNISILYVHERVSEDGDKVICRTVPVASQILPSNNDGIKVLQTSWHPFSSSHFGVLTSDAVFRLFDLSFDLEQPEQEFYLQPILPGKCQNASSICPVAFSYGSDHLWDRFSVFILFSDGSIFVLCPIVPFGSDYNKKHIQEIYEDVNSFGLKSSNQNVVTNSRLAIAWLEATFPDLSRQPADNSALMSRAHPYASLDDSLTLQGPLCRVCEENNEPESKSNSCEGKAVGFVYSSVGKDSILVTAWGSGQLQIDALADEIQPQWSIGIPTRLNVDSHGQIKSVAMICDSNSEDSWAMRSYRPSSTGSNVKSNTDAVWMGHSPPLLRLAIVDLALAKTSNDSSLSLFLDPLVPERFYCAHGGGLDMVTLHFLPFSYPEMASTPPSVHPILTTGNNEANSPFLSGFVTIADAYGHVQLVSITCPGECFVVEMKGWKEPTPLQLDIDSKSIKDVESFTTGMISKELIAGPDPPIVPSSSSLRSLTPDSIEGKSTLHHYIKVFHEYYVEYGHKVFIELKEHGDYLKTEIEDKQKRLQAVKQSLLSIEAKDQDINNRINRAFKVYDLLEKRIEGFKILPAANKKPLSQAEQEFKAQLDRFADVELDALCSSITALSARMKRFAHPAIGSAAGTGMSTWQTPKVGRSHVSDSQMSLLKSSLEKLSLLNEENNVKLRLIEHELKNQEQ

SEQ ID NO: 43833 - protein, 224 aa, Oryza sativa
MAPRPSMAGSEFSYAFAIVADPICTLMREGDSVGTLAAAKERRSQRESRTQLGEAGKASWEKERRRSEQWRQQQQLCPPLPLFPTSPPINPLLPFLRLPYLLAPPPPPPSHWAANGLMEQYEEEKIGEGTYGVVYKARDKVTNETIALKKIRLEQEDEGVPSTAIREISLLKEMHHRNIVRLHDVIHSEKRIGLVFEYLDLDLKKFMDSCPEFAKNPTLIKTLV

SEQ ID NO: 43834 - protein, 566 aa, Oryza sativa
MDGEQEARWLAAQGVAVGADMVAAALRQLEFLAAVDRRRWLYEGPLLERAIHRYKSCWLPLLSKHTQAAVVDGPLVVPLDCEWIWHCHRLNPVQYLKDCKRLYGRILDNSNVQSSIRAESKHQSEKVWAEQYPKEPFELEYTSSSDNSIYANAGAAEDISYDLVAAVKRQSSFFYQVDTPTMHDQRFLEEALARYKGFLYLIKTNQENKMKLFRVPTYDVDVIWHTHQLHPATYCHDMLKLIGRVLEHDDTDDDRSEGKKLDTGFSGTTKQFENAFGARYWKAGAMYRGNLPSPVTSNPQMFISEVDGEFSVGKAESQITILETTVIELFLQIVDIKNLPPAIPKENVYIWFTKNQPDMFISDGGRLDISTKTGKSIGASIQCEPTGELILTVLVDRESSSKKPKKIGKISIPLQEFTWSDSKLSFERWFELKPHDGHASSPIVSLRVAASSTVPVKAQQVLSMIRTEPFSLKSFLSPNSIKDQKMSCWTHFVYDCNTELIRLQIRDQKAKNGMVVARELVGVTKSSKKPFKLAEFVDNGKKEIALWFPEGLAEWRSNLHPWIYES

SEQ ID NO: 43835 - protein, 366 aa, Oryza sativa
MTLLAEGCRGSLSEKIIRNHKLRESGQGQHQTYALGIKEVWEIEEGKHKPGSVIHTVGWPLDSKTYGGSFMYHLDDRQLAIGLVVALNYQNPFMSPYDEFQKFKQHPAVRTILDGGTVLQYGARTLNEGGFQSIPNPVFPGGAIIGCSAGFLNVPKIKGTHTAMKSGMLAAEATFKTLVEGSSMELYWENLKKSWIWEELYRARNYRPAFEYGFIPGIALSALERYVFKGKSPFTLKHGIPDHEATDMASLHSPIQYPKPDGQISFDVPTSLYRSSTNHEHDQPPHLRLRDPTVPERVNLPLYAGPESHYCPARVYEYVTDEKGDQKLHINAQNCLHCKACDIKDPKQNIEWTVPEGGGGPGYTVM

SEQ ID NO: 43836 - protein, 731 aa, Oryza sativa
MVCPNMLLRLLFLVCCSSSLAASAAAASSSSGSACSCSSSSDETSYSFPSTRIEDTLALLDDAEISSNNGSTILHLTPAASSNKSGTALLPTPVTLWRRLDYQTTAAQPGSYSKQDASLNTSFTMRVQYANAKYSPADDAAAAAAGLNNGLAFVIVPTINGPPPPGSAAAFAVEFETGDNRSITVSITTGGNIIAAATATTTTTNQTNSYYAVWIDYNGEKHRLLIYIDLQDRPKPQKPCLDVPLNLSSVVPDRAFIGFSATTTTTTTGGSSSAMDELLLHRYSILSWSLTVKLPPSPHGLDFEWKVILPAVVGTVAITAIMNVIVAAQYLNSKYNKLKMELVLTEALRRLPGTPREFKHAAIRKATNNFDEGRKLGNGGFGAVYRGTIRSSSSSAGKNKATTAAAAAVSSSSVEVAVKRFTRDENRCYDDFLAEVDIINRLRHRNVVPLVGWSYEKGELLLIYEYMPNGSLDRQLFPKEKPGRILGWTTRYGIVTDIAAGLHYVHHEHEHMVLHRDIKASNILLDAAFRGRLADFGLARIVVGLDKNSYTDVGVAETWGFIAPEYSVSHKATRKTDVYAFGVLLLEIVTGRRALCKFQGTFQLLVDWVWRLHREGSLLDAVDNGIASSTEEFDADDAIRLLLLGLACSNPNPSDRPSMTEVVQVVARSAAPPDVPPVKPAFVWPPEGGVEVDSDDVDSSGSDVYASLCEWEEEETSSSDALAVRVSSGYH

SEQ ID NO: 43837 - protein, 396 aa, Oryza sativa
MRPSGFDREKNNTPIQWKLGSDGRMQMSKPESYSEMLSGFQPPKDVQIPQGFCSLPEQITAGHSNFWHTVNAQYQDQQSNHNMFPSSWSFMPPNTRLGLNKQNYSMIQEAGVLSQRPGNTKFGNGVYAALPGRGTEQYSGGWFGHMMPNSHMDDTQPRLIKPKPLVVAHGDVQKAKGASCKLFGIHLDSPAKSEPLKSPSSVVYDGTPQTPGATEWRRPDVTEVEKCSDPSKAMKPLDTPQPDSVPEKPSSQQASRNMSCKSQGVSTRSCKKVHKQGIALGRSVDLTKFNGYEELIAELDDMFDFNGELKGPKKEWMVVYTDNEGDMMLVGDDPWIEFCDMVHKIFIYTREEVQRMNPGTLNSRSEDSHANSMERGSVGREMRGCLSTSSLNSENC

SEQ ID NO: 43838 - protein, 405 aa, Oryza sativa
MAVKRCAEVPISARPGKMMRIAIKSWSRFLPPYIPDDVIFDILLRLPSKSLIRFKSVCKAWHAIISNPCFISAHLECSKQKPSIFMVPGVYEKQNNGENTSFLMGLYQYQGGNIMEQIHVQDFPQGIGTWSRPIHCNGMLLISTMNHEMIVCNPSTREIVSLPKGSYNLHAGPRAGFGFDPHSNKYKVARFFYQRDDDTSELVCKFEVLTLGTNLWRQTEDPPYPISGLTPVHVKGAIYWMVNTPLCPDPPNAFLRFCLTNEKFSLLQYPPCNLKPTRFIEVEGELCCACFCSQVSALKIWTCNYAQNPEWTQRCTVQIPPDIVVNNPVARPPIVFLHGKKLLLTWNQVYQYDIQTCRMEKIASGVEDFTCYDPRNNKYWAYLEKEVTDMHLFNYAESLVPIREF

SEQ ID NO: 43839 - protein, 573 aa, Oryza sativa
METISNIFHNDPLPPLGARANQSIKLRKFIISPYDSRYRTWETFLLVLVVYSAWICPFELAYLRNLSWKVSLVDNIIDSFFAIDIILTFFLAYLDQKSYLLVDDPKRIVARLLSMLRLWRLRRLSELFARLEKDIRLNYYWIRCTKLISVTLFAVHCSGCFNYLIADRYPNPARTWIGAAIPNYRSQNLWVRYVTAIYWSITTLTTTGYGDLHAENQREMLFSICYMLFNLGLTAYLIGNMTNLVVQGSCRTRNFRDTIHAASQFAARNQLPGHIKDEMLSHICLRYKTEGLKQKETLDSLPKGIRSSIACNLFLPVIEKVYLFHGVSFTCMIQLVTEMEAEYYPPREVVILQNEAPRDVYILVSGAVEERVEIDGTEKVQEVLCNGEIFGEIGVICSIPQPCAFHTIKVSQLLRLNTAVLKNIIKENSDDRRVILNNLSQKMNQDHRFSTEVMEKSLQMMHQHFGEYNRCSALNQDNEKNELKANNGHSMALEWKRVTIHMYSQRNKRPEAPLAKVINLPGSLDKLFAIACQKFNNYRLTKLVNPEFAEIDDITVIRDGDHLFFYGNLNKDA

SEQ ID NO: 43840 - protein, 58 aa, Oryza sativa
MPMFASTIWILLTCVQTVKSTSARTQIQKTILILTIPMMVLTRWFCTTQHLAIIVQNY

SEQ ID NO: 43841 - protein, 107 aa, Oryza sativa
MHLNIRISFTSISHDTLLMKFLQELGTEYLVKPLGDAEDEEHSSDFEPDENGEGAEDEEIDEDDDGDDDSAKAQSSSKRKRSGGDDEDDDDDDDDGDDDDDGRPSKR

SEQ ID NO: 43842 - protein, 301 aa, Oryza sativa
MGRRKAMMKKCPSELQLEAFIREEAGAGDRKPGVLSPGDGARKSGLFSPGDGEMSVLDQSTLDGSGGGHQLWWPESVRTPPRAAAAFSATADERTPASISDDPKPTTSANHAPESDSDSDCDSLLEAERSPRLRGTKSTETKRIRRMVSNRESARRSRRRKQAQLSELESQVEQLKGENSSLFKQLTESSQQFNTAVTDNRILKSDVEALRVKVKMAEDMVARAAMSCGLGQLGLAPLLSSRKMCQALDMLSLPRNDACGFKGLNLGRQVQNSPVQSAASLESLDNWISSEVTSCSADVWP

SEQ ID NO: 43843 - protein, 269 aa, Oryza sativa
MGGDLYALDFDGVLCDSCGESSLSAVKAAKVRWPWVFEQVDAAMEEWIVEQMYTLRPVVETGYENLLLVRLLIEIRIPSARRSSVADGLSIQEILENWLKLKPTIMSEWNEDRDSLVDLFGSIRDDWIENDLSGWIGANRFYPGTADALKFSSSEVYIVTTKQGRFAEALLKELAGIEFPSERIYGLGTGPKVKVLQQLQQMPQHQGLTLHFVEDRLATLKNVIKEPALDQWNLYLVNWGYNTPKEREDAEGISRIQVIDLPGFSQKLK

SEQ ID NO: 43844 - protein, 313 aa, Oryza sativa
MAAASARFLLLLPAVSPAAPTHPRLLFSCPLPLAARTRLAASRSSSDGEGDGGIVTGPAGGGGGVFLSPRALSQRDELAAFRYAHSFPHGRLTVRALTPAGDDDESDALVRLLASSFAENVRWAPAQRYEQLLAFVIRRYLFERRGLAPHAAVLVGYYRPAATGDGDEEEGEGNEDDDDYGEMACTAEVSLDAVGAPGAPPTPTPPLDFPYICNMTVKTSLRRRGIGKQLLKACEDLIIKMDAKRHVYLHCRIIDQVPFNMYRKAGYNIVQTDSILVWLSLQKRKHLMSKELLQTSVSSRSTAKDFDDNKLTS

SEQ ID NO: 43845 - protein, 358 aa, Oryza sativa
MFRTRFRMRKHLFLRIVQALGQWSPYFTQREDCSGRTGLSPLQKCTAAIRMLAYGTPADALDEYLLIGKSTSLECLDTFARGVVEVFGGQYLRRPTSEDIDHILQVNESRGFPGMLGSIDCMHWRWESCPRAWRGQFTRGDYKVLTIILEAVASYDLWIWHAFFGVAGSNNDINVLNQSPLFLEQVRGEAPRVHFSVNGNEYNNGYYLADGIYPEWASFMKTISLPQIEKHKLFAERQEGARKDVEQAFGVLQARFNIVRRPAKKWKRKSVGKIMLACVILHNMIVEDEREDAICDIDLNRIPRTSIVLPPEVTCDDNPCFSDVLRRRSAIRARSVHTQLKNDLIEHIWNRFGNRQST

SEQ ID NO: 43846 - protein, 580 aa, Oryza sativa
MERSTTTTTEQQQQQQQGRRRGAGWRRWAVLVATVWIQAVTGTNFDFSAYSSALKASLGVSQEALNYLATASDLGKALGWSSGLALIHLPLPAVLLLSAASGLAAYALQYALILDYLHLPYPLVFLICLVAGCSICWFNTVCFVLCIRSFSSSNRPLALSLSISFNGLSAAFYTLFANALSPFSPSVYLLLNAIVPLVVSLVALPAILLCHPHDGHLHVVPKHDKRIFLGLYLLAFITGIYLVIFGSFNTTNSTAWVVLTGAMVLLALPLIIPASSSCSHVDTHDPEPTVQLNHEDSRKPLLLNSDHSTESNAMMQKTVEHPMQDCCLGTVLEKGRMLVLCEEHSAKKLIQCVDFWLYYIAYFCGATVGLVYSNNLGQIAQSFHRESQLTMLLAVYSSCSFFGRLLSALPDFLRRKVSFARTGWLAAALVPMPMAFFLMWKLHDVNTLVAGTALIGLSSGFIFAAAVSVTSELFGPNSIGMNHNILITNIPLGSLLYGQIAALVYDANGLKMSVIDNRNGMVDTMVVCMGPKCYSTTFFVWGCITFPGVGVKHNPILENKNSLQCCWWSASCKHLSEVST

SEQ ID NO: 43847 - protein, 239 aa, Oryza sativa
MKNTRKRKHRASAEGHANVCAAGRPKAAQHGTPKVWPAGGAARCWKINLPGDEGCDKIDATPSRTISSNIVQFFCLSLSLSTCIFQAFSTYMHGQSFNSHQSIHWRRLRRRQNTEGGRTRRHERSRWLPAGASDARRGYRRSPKRRRQAIDIRPVIPLPDEKVQHAGRRLDRMTEERGSARSSTPARQAFSFFLFYRLIMESRGHRCRTTAKERIHPSTPGINKIDRSTHFHPENTQHT

SEQ ID NO: 43848 - protein, 224 aa, Oryza sativa; identical to SEQ ID NO: 30534

SEQ ID NO: 43849 - protein, 1271 aa, Oryza sativa
MEEALDWSFCEPLLTVAISLMDRALFYFGGVKEKEKGSKKRFGGVDKEKILERLGHVRAIFDEFRHLVLTNLKIPFSYNLKEIWSFRIDIEGFEHWIEEIEYRGLVGQGRHPTFNILKAKITNKFAKSPDSYAIREGLDHLMRLADIAARIRYLRFEISVSSSRTTTPVAVGRGREKEDIEVVSRGREKEEIQLFGREREKEQIVQWLIKQPAENSESEIFSTDHIRLFAILGVAGMGKTALAKVACQEPIVSTIFDFVVWVQVPYDFTTETIAKIIMETVTSVSPEYYSLKFLQHALTGKRLLLVLDDTWEDESVKKWEALVATLSNCKRGSSILLTTRMQSVVDMAAEAVGSPAECLELDELGKSDNLLLFMSRLPSQVHSEGYYHLRLIGEQIAENTGGCPLVTEKVASWLGSCVENHHWNAVLQKGWQKLGLNAIFASSRLSYERLPSELQICFRYFSIFPKGYKFNKVELANMWISSGLIPFGLSKQDDTGLQHKKAAYLFSAEDVGEQYFAALVRKSFFCRLLETDPSNGNMKEYYVLHNLMHDCAQFVARNECARVDDNNFQDVRRTTVHLSIAHCGSLRAIPPITNLRTLIIQSEFCLDQEAELMLGEVLRKSARLRLLYLDVPSLSNALDEIPSLTQLRYLFLFSCDKSHIRSILKLCHLQVFKLKYFTGKQADLDGIRNMRFLRCLHVPDSMLSKILKTGMPTTLQELQEFEVAKNDGHMLSALSTLTNLKRLSLRNLQNVRNCKDAMEIKLKDKPDMMFLSLSWNKHSNDPEDIDHQIIDNLEPNKGIQQLHVYGYNGVQLPVWIETSFLIHLVSLELQYCMEWRTLPSFKELSSLKYLKLEHLFQLGSVIEEQSGSIESDNAFLPPLLNTLIVRWCPNLKKLPALPCTLEKLIIRHVWLAVLPRLHQAYASTCESLSVDSRLSLLHIESCAHLTSLDGLLDQQQHLQHLKTLLVRHCAKLCHLPANGFTELHHLNFLEIVACPMLRNVKTDSNLFPTSLNNLDINPCCHIEASVLMSLPNLTYLRRLSLVSCSSVEKLPSDEVFRTLKNLNDMLIARCESLLSLGGLGAAASLRTLSILYCDKIYSSSSPQAGCSFMLWKLKVDREAMLLVEPIKSLRYTLELHIGDDYAMDSLPEEWLLQNASSLRLIEIGVAKNLQTLPTQMEKLVSLQSLHIEKAPRIQFLPKLPFSLNKLTIWGCDPRFLKLYERNVGSDWGKIENIDHVDMKAYSEETSDDDDDKIQHFDDSISYPSSQFIVID

SEQ ID NO: 43850 - protein, 1058 aa, Oryza sativa
MDAASCCRVFSTQRCRFPLRRLAPPISRRPFGTESTSELFAASTSKRRSRGPVMAAKKAAEGAKQEEGKYKHTVDLPKTTFGLRANSVVREPELQKLWEENQVLKRVSERNTGATFVLHDGPPYANGDLHMGHALNKILKDIINRYELLQNHKVSFIPGWDCHGLPIELKVLKSLDKETLNALTPIKLRQKAAKFAKATVTTQMNSFKRFGVWADWDNPYLTLSPEYEAAQLEVFGQMVMKGYIYRGRKPVHWSPSSRTALAEAELEYSENHISKSMYAAFKITNLSKPGLLEEFLPNLCLAIWTTTPWTIPANAAVAVNPELTYVVVELQSVLESESTSGGNQRKLGSILSPGSQKPFIIVAADLVSALESKWGTKLIIQKSFPGSALEHCRYIHPVNGNECSVVLGGDYITTESGTGLVHTAPGHGQEDYITGLKYGLPIVSPVDDEGNFTAEAGQFSGLSVLGAGNAAVVNYLDEQCSLILEEPYKHKYPYDWRSKEPTIFRATEQWFASVGGFRNAAMDAIRRVSWIPSQAENRIVAMTSSRSDWCISRQRTWGVPIPVFYHVDSNEPLITEETIEHIKGIVSKKGSDAWWYMTIEELLPEKYRDKASEYRKGTDTMDVWFDSGSSWAAVLAQRDGLNFPADIYLEGSDQHRGWFQSSLLTSIATTGKAPYSSVITHGFVLDEKGFKMSKSLGNVVDPGKVIVGGKNSKQEPGYGADVLRLWVSSVDYTGDVLVGPQILRQMSDMYRKLRGTMRFLLSNLHDWEPENSVRYSDLPKIDKYALFQLENVVTSMKDSYENYQFYKIYQILQRFAIVDLSNFYLDVAKDRLYVGGRVSFTRKSCQTVLSAHLLYLVRAIAPIMPHLAEDVWQNLPFQHTLDDGSVAEFVFNLKWPVKNEEWLSVPKDDVDFLSVILELRSEVNKILESARTGKLIGSSLEAKVYLHAENANTVSKLKELVSATNDADALHRLFITSGVEILPSVSSETTSGVSYTGTFSSERTGNIWIGVTRADGEKCERCWNYTRDVGSFLDHPTLCARCHGVIDLPPVPAAAAVS

SEQ ID NO: 43851 - protein, 257 aa, Oryza sativa
MDRVQLLLVGLPALLFLSDLSHIFAPPPPHLRHPHHHPPHHHPHPPHHHPPHHPHPPHHPHPPHHPHPPHHPHPPHHHPHPHPDPAAEAIQANVDGAGYGTTVELQFCASCSYKGTAMTMKRMLETSFPGIHVILHNYPPPFPKRVLGKLVPILQVGAIATIMAGDHIFPRLGMVPPPWYYSLRVNRFGTMATIWLFGNFAQSFLQSSGAFEVYCNGDLVFSKLAEQRFPSEFELRDLINSRLPDSLVGKNVGKSLS

SEQ ID NO: 43852 - protein, 414 aa, Oryza sativa
MAEICCEEAMSPPATATAAVAAAVSASAAAAVSSAIDRRRRRMEMRRIRIASDLELQAGEDGRPGKRQRLAHTASGAPRPDEDSASERPSCGRTEEFPRYGVTAVCGRRREMEDAVSIRPDFLPASGKFHFYGVFDGHGCSHVATTCQDRMHEIVAEEHNKGASGEVAPWRDVMEKSFARMDGEVGNRASTRSDDEPACPCEQQTPSRRDHAGSTAVVAVVSPTQVVVANAGDSRAVISRAGVPVALSVDHKPDRPDELERIEAAGGRVIYWDGARVLGVLAMSRAIGDGYLKPYVTSEPEVTVTERTDDDECLILASDGLWDVVTNEMACEVMRACFHNNGPPAPAARPSGVPSSAEAAETENGGAASVKGISKAESSDKACSDAAMLLTKLALARRSADNVSVVVVDLRRGL

SEQ ID NO: 43853 - protein, 330 aa, Oryza sativa
MNNLFSSSWKRTGGGGGGDGDIESGGGVEMAPPPGAAAGASLDRFFEDVESIKDELRDLERIQRSLHDANEGGKSLHDAAAVRALRARMDADVAAAIKKAKVVKLRLESLDRANAANRSVPGCGPGSSTDRTRTSVVAGLRKKLRDSMESFSSLRARISSEYRETVARRYYTVTGEQPDEATLDNLAETGEGERFLQRAIAEQGRGEVLGVVAEIQERHGAVAELERSLLELHQVFNDMAVLVAAQGEQLDDIETHVGRARSFVDRGREQLVVARKHQKSTRKWTCIAIIILLVLILVVVLPIVLKFVNNNKSSSSSPAPATPSPPPPTA

SEQ ID NO: 43854 - protein, 124 aa, Oryza sativa
MAMEKSRVLIVGGSGYIGRRIVAASLAEGHPTFVLLRPEIGLNIDKLQILLAFKAQGARLLEASLDDHDGLVAAVRQVDVVVSAMSGVHHRSHNILLQLKLVKAIKEAGNVKVIYFLSAQQINT

SEQ ID NO: 43855 - protein, 589 aa, Oryza sativa
METSTISFSSSSPPSPPPPQPAPGDIDAVSLGRLSRNLENLLDPAFLNCADAEIVLASGGGDPGGGAVVGVHRCILAARSRFFYDHFSSAPAPAPATAGDKPQLDLDGLVPGGRHIGRDALVAVLSYLYTGRLRSAPPEAAACLDDGCSHDACRPAIDFVVESTYAASGFQISELVSLFQRRLSDFVNKALAEDILPILVVASTCHLPELLNQCIQRVANSNLDNRYLEKRLPDDLYAKLKEFRVPDEPHSGILDPEHEKRVRNIHKALDSDDVDLVGMLLKESPVTLDDAFAIHYAAAYCEPKVLAELLKLESANVNLKNSSGYTPLHMACMRREPDIIVSLIEKGASVLERTQDGRDALTICKRLTREKDRNEKSEKCKERSKAYLCIGVLQQEIKRRPQILEDQMSAEESIATPLLVDNFHMRLLNLENRVAFARIFFPSEAKLVMRIAQADSTQEFAGLTSANFSKLKEVDLNETPTMQNRRLRERLDALTKTVELGRRYFPHCSEVLDKFLNEESTDLILLESGTAEDQQTKRMRFSELREDVRKAFTKDKAAGAAISSSTSASSSPRYETKLRPGNKKGKLSR

SEQ ID NO: 43856 - protein, 661 aa, Oryza sativa
MGSLPAADKPLPALRYPPARRDDDIVDDYHGVTVPDPYRWMEELESEEVKGFVDAQAAVAEAVLSTCDDHRVRLRGQLTALFDHPRYRAPFKRAGSYFYLHNPGLQPHSALYVQHGLGGGEEPDVLLDPNTFSDDATVSLAMFGVSHDGEHLAYGTSASGSDWVTIRVMRVRDRRHLHDEICWVKFSAIAWTRDGKGFFYSRFPAPKNDGAPLGAGIKTSVNLNHEVYYHFLGTDQSEDLLCWEDPDHPKYIYTPEVSEDGKYVILSVAETSEPVNKLYYCDLSALPDGLEGMKGNHGNAMLPFVKLVDEFEAYYALIANDDTQFTFLTNKNAPKYKLSRIDVNEPHSWMDILPEDEKAVLESACAVHGDKLLVNYLSDVKYVLQMRSLVTGELLHDIPIDIGSVNGISGRRDNSEVFIEFASFLTPGIIYRCDVSKETPEMNIYREISVGGFDRTDFEAKQVFYPSKDGTKIPMFIVSKKSIVLDGSHPTLLYGYGGFGMNMTPHFSVTRIVLMRNLGFVSCIANIRGGGEYGEDWHKAGSLANKQNCFDDFIAAGEFLVSAGYTNPSRLCVEGASNGGLLVAACINQRPDLFGCALAHVGVMDMLRFHKFTIGRAWTCDFGCSEKKRNSTGSSSTLPSTTSGGHGRKVTGGSSTLPPCC

SEQ ID NO: 43857 - protein, 64 aa, Oryza sativa
MGGREKLRALAHCHGSSQQTVCHQVVDDWLLHPETLAKVPQRGIGHEEDIIFPILFVGSVLSRN

SEQ ID NO: 43858 - protein, 356 aa, Oryza sativa; identical to SEQ ID NO: 32935

SEQ ID NO: 43859 - protein, 844 aa, Oryza sativa
MRLLALAVASIVLANLHLLGVHGRDLLLSCGSNATVDAGGRRWIGDMAPGLNFTLSSPGIAASQAGSSNGNEIFGLVYHSARFFSTASWYNFSVLPGNYCLRLHFFPYTFGNFSGNDSLFDVTANDFKLVSKFNVSEEIVWRSTVSNSAINAVVKEYFLLVGSRGLQVEFDPSPGSFAFVNAIEVMLTPDNLFNDTVNKVGSAGNGQLPLGLSNRGLETMYRLNVGGHALNSSSDQYLHRPWYTDEAFMFSANAAQIVSNTSSVSYLSNNDSSISPIDVYETARIMSNNMVVDKRFNVSWRFYVHPNFDYLVRLHFCELFYDKPNQRVFKIYINNKTAAEDYDVYVRAGGINKAYHEDYFDNLPQQVDSLWLQLGPDSLTSASGTDPLLNGLEIFKLSRNGNLAYVLGHIDMGNQRGISKDRNRKILWEEVGIGSASFVTLTSVVLFAWCYVRRKRKADEKEAPPGWHPLVLHEAMKSTTDARAAGKSPLTRNSSSIGHRMGRRFSISEIRAATKNFDEALLIGTGGFGKVYKGEVDEGTTVAIKRANPLCGQGLKEFETEIEMLSKLRHRYLVAMIGYCEEQKEMILVYEYMAKGTLRSHLYGSDLPPLTWKQRVDACIGAARGLHYLHTGADRGIIHRDVKTTNILLDENFVAKIADFGLSKTGPTLDQTHVSTAVKGSFGYLDPEYFRRQQLTQKSDVYSFGVVLFEVACGRPVIDPTLPKDQINLAEWAMRWQRQRSLDAIVDPRLDGDFSSESLKKFGEIAEKCLADDGRSRPSMGEVLWHLEYVLQLHEAYKRNNVDCESFGSSELGFADMSFSLPHIREGEEEHHSKPSSIREDPDT

SEQ ID NO: 43860 - protein, 127 aa, Oryza sativa
MAAAASSAVLLLPNSRAPAALSRRRAPVPRRGFVVGFEGRSRRGAAGTVRACFNPPGDERILREALKEPVAFMGGVFAGLLRLDLNEDPLKEWITRTVEASGVAEDSRTDESSEGSQNDAPQQIEIE

SEQ ID NO: 43861 - protein, 863 aa, Oryza sativa
MALLFPPPPHALSPKPPFPSTLRSTRSLRLRRATAAAAAAGAGVSSSSPSTSSPEKAPALDVASGKRGGKKRRSLKPSFEKQAIRRWSARAPSQRASFPWQQQQQQQQPGGGEGEAAGDQESGWSGSSTLQSIVDYFDFDYDSSDGDGDGDGDGVVVGGEAAEAQEDGPRPEPSFLLGSRPVSAPWMHGEEEPMTNQLVSDEEGLDGDGASEDEMGLVDGDGDEDEDLGSEEETLSESSDGEFSEDYAAPAANSSSMMDSVLDHVSSGGGFYRGTRRSSVNSIVNTMRNSMEESSRNAAIECPETEDFVQKLGPVLLPWEREGDVDRPRKRSNTELAERTIPEHELRRLRDVALRMKERMRVGPGGVTQLIVESIHQKWRVEEVVKLRFEGPPSLNMKRTHDILEERTGGVVIWRSGRSVVLYRGMNYNLRCVQSYTQTTEVNFDKRVSSNSVEPIHVEHKFQKSGADGLNRSAYIVNSSEKPTETFDIDSFLDQLGPRYKDWSGRGPIPVDADLLPGVVPGYKTPFRLLPYMVKSTLRNKEMTALRRLARQTAPHFALGRNREHQGLATAIVKLWEKSSIAKIAIKRGVPNTCNDRMAEEIRKLTGGVLLSRNKEYIVFYRGNDFITPKVRQVLVEKQEQAITWQDEEELARLKASASISVRPKVFKNPPVAGTLAETREAKSRWGDSINAELRKKEKNHMILTKHTSLLRNLKRKLILAKTKVIKAEKALAKVQEFLSPAELPTDLETVTDEERFLLRRIGLKMKAFLMLGRREVFDGTVQNMHLHWKHRELVKVLVKGKSFPQVKHIAISLEAESGGVLISVDKTTKGYAIILYRGKNYKTPQILKLETYCQGEKHWHGL

SEQ ID NO: 43862 - protein, 356 aa, Oryza sativa
MTSSPSWFSGIARASSAMPPGGVASAAAPLSDGAGGRGGGGGGGGGGGGVVAAVVAAGPGAGAGVGAGGKRRQVQGALFKYGPKSAQVAFKTGDFNHQVIFIGGLTDGFLATDYLEPLSLALEVEKWSLVQPLLSSSYTGYGISSLEQDALELDQLISYLINKENSDGVILLGHSTGCQDIVHYMRTNFACSKAVSGVILQAPVSDREYRATLPETAEMIDLAAKMLSEGRGMDLMPREANPDAPITAYRYHSLCAYMGDDDMFSSDLSEDQLRQRLGHMSTTQCQVIFSMGDEYVPEYVDKEALVDRLCRALGNAEKVEIEWGNHALSNRVQEAVRAIVDFVKREGPKGWDDPWS

SEQ ID NO: 43863 - protein, 273 aa, Oryza sativa
METLRDSGVIKHQNNATGGKMILIIIELTRDIDEGVWRRLYSVCKCCVANGSKIIVSSRSNKIACFGTTQALRVKFFTQEAYWYFFKLRAFGSMDAEEHPKLESIAMEIAREWNGCFMSSGIYNELLKANFNTRFWSTVLTRIREFRKLNISLYANFDGPWEVVESAYVRRVNGISSEYILILHDYQTCSVPNMLHRCTNSAQSEVEVPQLSFEDFQFGNVRPQGKFKVLGWRSHLPPYHDYMFSCEVLKSQHIVARNKRPRELCGRDFGLGA

SEQ ID NO: 43864 - protein, 397 aa, Oryza sativa
MEAKGENDARAPLLAERRRNSVGSMRGEFVSRLPKKVLDAVDPERPSHVDFSRSKGLREGEKEYYEKQFATLRSFEEVDSIEESNVMSEEDDIAEQKQSEFAMKISNYANMILLALKIYATIKSGSIAIAASTLDSLLDLMAGGILWFTHLSMKSINVYKYPIGKLRVQPVGIIIFAAVMATLGFQVFVQAVEKLIVNETPDKLTPVQLTWLYSIMIFATVVKLALWLYCRTSGNKIVRAYAKDHYFDVVTNVVGLAAAVLGDMFYWWIDPVGAIALAVYTITNWSGTVWENAVSLVGESAPPEMLQKLTYLAIRHHPQIKRVDTVRAYTFGVLYFVEVDIELPEELPLKEAHAIGESLQIKIEELPEVERAFVHLDFECDHKPEHNILSKLPSSQP

SEQ ID NO: 43865 - protein, 112 aa, Oryza sativa
MALAKAKETVASAPVVVYSKSYCPFCVRVKKLFEQLGATFKAIELDGESDGSELQSALAEWTGQRTVPNVFINGKHIGGCDDTLALNNEGKLVPLLTEAGAIASSAKTTITA

SEQ ID NO: 43866 - protein, 54 aa, Oryza sativa
MDEMKLMVVFSLLGGVSDNSTCCHISINKTFRQIQPKEIMEDKISLFVFGKRCS

SEQ ID NO: 43867 - protein, 372 aa, Oryza sativa
MGASTSPRLALLVVVAAAAFVFVSPAMAFPMGLPATANPFPNPWSAFQNLSGCHAGEEREGLGRLKDYLSHFGYLPPPPSSSPYSDAFDDSLEAAIAAYQRNFGLNATGELDTDTVDQMVAPRCGVADVINGTSTMDRNSSAAALRGRHLYSYFPGGPMWPPFRRNLRYAITATSATSIDRATLSAVFARAFSRWAAATRLQFTEVSSASNADITIGFYSGDHGDGEAFDGPLGTLAHAFSPTDGRFHLDAAEAWVASGDVSTSSSFGTVVDLESVAVHEIGHLLGLGHSSVPDSIMYPTIRTGTRKVDLESDDVLGIQSLYGTNPNFKGVTPTSPSTSSREMDGSAAAAGIRPWSGFVGLVVPAVVLLLAP

SEQ ID NO: 43868 - protein, 846 aa, Oryza sativa
MMHPSLLATTQWVTLSTLLSIAVAADNYFSSSSPIFLNCGASAMQLDSNNRSWDGDTSSTFAPSVKGLAARASYQDPSLPSLVPYMTSRIFISNYTYSFPVIPGRMFVRLHFYPVAYGNYASRDAYFGVTTNNLTLLDNFNASQTALAAKYAYILREFSLNVTSGSLDLTFFPSTQNGSYAFVNGIEIVPTPDIFTTLSPIPPTNGNPDPSDIDSMISFQTMYRLNVGGMTISPQGDSMFYRSWENDSPYIYGSAFGVTFSKDSNVTITYPSTMPNYIAPADVYGTARSMGPIAQINLHYSLTWILPVDAGFYYLLRFHFCEIEYPITKVNQRSFFIYINNQTVQEQMDVIVWSGGIGITTYTDYVIVTVGSGQMDLWVALHPDLSSGPEYYDAILNGLEVFKLQDIGKKSLAGLNPPLPPQPKSDVNPKGVSGGGKSKGAVPASIRGAMGSTATMLIACFSVCIICRLKKVAKHSFMTDKKCMTYRTEFYHSPSNLCRNFTFDEIQVATRNFDESLLLGRGGFGDVYRGEIDNNGENVAIKRSNPLSVQGVHEFQTEIELLSKLRYCHLVSLIGYCKEKNEMILVYEYMAQGTLREHLYNSNKPSLPWKQRLKICIGAARGLHYLHMGANQTIIHRDVKTANILLDDKWVAKVSDFGLSKANPDIDSTHVSTVVKGTFGYLDPEYYRRKQLTQKSDVYSFGVVLFEILCARPAVNIELPEEQASLRDWALSCQKKGMLGKIIDPHLHGEISPPCLRMFADCAKQCVADRSIDRPLMSDVLWSLEAALKLQENAENNKKFSEATTSSKRTPDLITIMGTDKPSTYSTMSITGQKIIFSDMMHPQGR

SEQ ID NO: 43869 - protein, 789 aa, Oryza sativa
MEQDQGVAAAAASENPSAGQGAHDSGSAGAGAAASSIASFDSATANPDANVYSQNPSSVPQADGAQGADASVYPADHAPLNGTSGQVVDYQSAGAAENGAATNEMGEPAPEQSYADAVLSAEEARLWNAVTANCLDFNAWTALIDETEKTAESNILKLRKVYDAFLAEFPLCFGYWKKYADHEARLDGVTKVIEVYERAVLAVTYSVDIWYNYCQFAISTYEDPDIIRRLFERGLAYVGTDYRSNILWDEYIKYEESLQAWSHLAIIYTRILEHPITQLDRYFHCLKELAATRSLSEILTSEEAAMYSVTAENTAQTLDGETQPGDVDMSAQPEISGSTEADNLAKYVSVREEMYNKAKEYESKIIGFELAIRRPYFHVKPLDNPELENWHNYLDLIEKEEDINKVIKLYERCVIACASYSEFWIRYVLCMEARGSIELANNALARATHVFVKKQAEIHLFSARFKELSGDVSGARVEYQHLYSDLYPGLLEAIVKHSNMEHRLGDKESACSIYEKAIAAEKEKDRSQILPTLLIQYSRFLSLAIGDIEKAKETLTGFLEQCDLTKSIIEAIMQLESILPSEKRIEFLDSLVEKFLTAEPTEGEVTSLADKEDISSIFLEFLDLFGDAQAIKKATNRHLTHFSRKRSMLSSKKRRADDVIMSDRDKLARIGDGTQPVVGTDPNAHNPPVWPATSEASGQQWGAAYAPQATYPAYGTYDYSHQMPQSAPQAAAYGAYPPTYPAQAYTQQTYAQPSAMAVAAPAPAVAPAAAYPQQPVAAQQPYYGTGTYY

SEQ ID NO: 43870 - protein, 134 aa, Oryza sativa
MFFGGREILARKYEIRLRGIDAPEIGMQYGKESQDALVKLIARKCVTLHVYGQDQFKRFVCDIHCGGVFIQEQMLVNGHAWHFKNYDKRPQFAKWEKMARDARQGLWAYDNLEKPWEWRKNKRKASRHHNSDVR

SEQ ID NO: 43871 - protein, 124 aa, Oryza sativa
MESAKRSCLAISLILLLLLVPSIHGARHVAAAIKGTGADSEMVVTERTAGGGGGHGRGYTSHRSHNPNNPNDGGSGTPVVDPHNVATRGHHHRGAATRTAAGGDPRLAACMLRLGATFFLLVLG

SEQ ID NO: 43872 - protein, 227 aa, Oryza sativa
MPISHELGEPDESFYNLWKEECEELWEEEDELWGDEDVEEELSLRHPGFNKWTVQQGAAGGDHIRAKDKNFYCFEVQVHFTGELVDGTQFVSSRENDIPERFILGQEDVMHGFNLAVSSMQPGEKAIFTIPSALTMTKAGSPASIPSNIPPNQTLRFEIELIAMFTIIDIFKDEGILKKIVKNAEPDRKQSHSSDFVFGTFLIYQFQLYMEIDFFISSIFLLLFTFL

SEQ ID NO: 43873 - protein, 343 aa, Oryza sativa; identical to SEQ ID NO: 31985

SEQ ID NO: 43874 - protein, 517 aa, Oryza sativa
MEDKVLLAVGASLVLVFLSKLISSYAKKPRLNLPPGPWTLPLIGSAHHLVSWSESVHSVIGKLAREHGPVMQLWLGEVPTVVASSPEAAQEILRDHDLIFADRHLTSTTAAITFGGTDVVMAQYGERWRHLRKLLTQELLTVARVRSFRRVREEEVARLVRDLSAAAASGATVNLTDMVNRLVNDTVLRCSVGSRCKYREEFLAALHAILHQTSALSVADLFPSSKLASMVATGPRNVLANRNKVERIIEEIIQERKNQIETDMMSGNDDVGDKAAVESKSCSLDVLLRLQKEGGTPIPITNQVITVLLWDMFGAGTDTSSTTLIWTMAELMRSPRVMAKVQAEMRQAFQGKNTITEDDLAQLSYLKMVLKESFRLHCPVPLLSPRKCRETCKIMGYDVPKGTSVFVNVWAICRDSMYWKNAEEFKPERFEDNDIELKGSNFKFLPFGSGRRICPGINLGWANMEFALANLLYHFDWNLPDGMLHKDLDMQESPGLVAAKCSDLNVCPVTHISSSCA

SEQ ID NO: 43875 - protein, 233 aa, Oryza sativa
MVVIKFYDWKICKQFMEVSYHFFSQLMGFISIWCSLDNIEECMQKTQYVKYGEEVCFNGMLMLKASSSGLELGNCVWTIKGPRASMTYLPSSIFVSAHALDFDYSSLKGNDVILFSDFSSLNGMYDDNKKMGEHIVDETDILLASNSVFRDDGMDEDETIKFLCSNDDIAEEIERISFICSCIIDAINSGGSVLIPIGRIGIILLLLEHMSETLHSSNMKDMPFGFAYVDVSS

SEQ ID NO: 43876 - protein, 457 aa, Oryza sativa
MDETESTYLKHCRKVVYMGHRRFLAANHPVRKKGKHFEHKADHRTKPKHRSGKTVFAMVKDLKVVFGKGPGSQPIESEDGHAVMWKKNSIFWELPYWKFLDVHHAIDVMHLTKNLCVNLLGFLGVYGKSKDTLEARNDLKHMEQRGDLYPEPKEKGSHYLSPASYTLSKAEKESMFECLESIKVPSGYSTNIKRIISTKEKKFTNLKSHDCHVLMTQLLPVVISGILPDNVRATITKLCAFMNAISQKVINPDRLEALQNDVVQCLVSFELIFPPSFFNIMTHLLCHLMKEISILGPVYLHNMFPFERYMGVLKKYVRNRARPETSIAKGYGTEEVIEFCVEFIEDLRPIGVPESRHEGRLRGKGTLGRKAIMTVNNNLFRKDHFTVLQQSSLVAPYIEEHMALVRARNIGKSDAWITRHHIDTFPAWIRQHLMGNESINQQLAFLARGPSGSIATF

SEQ ID NO: 43877 - protein, 521 aa, Oryza sativa
MKPAGGRSKDGGGGGAALLGGGGVTCFDVKSFVASLALLTLIMALWQLHPYQPLVLLPAALSSSPCPLLPRSPTSGIAVSFLSTAAATNSTDTATVPTTTAAARVAATTRPTLPARQRERDPNKRELRPYGTAAALFVQMGAYRGGPRTFAVVGLASKPAHVFSNPYFKCEWLPNAPAGAPPVRTKAYKMLPDWGYGRVYTVVVVNCTFPSNPNADNLGGKLLVHAYYSTASRRYERFVALEEAPGSYDDARFRPPFAYDYLYCGSSLYGNLSSARMREWLAYHARFFGPRSHFVLHDAGGVTPEVRAVLDPWVSAGRVTVQDIRAQEDYDGYYYNQFLVVNDCLHRYRHAANWTFFFDVDEYIYLPDGRALEDVLAQLQPYTQFTIEQNPMSSKLCIDDPTEDYSREWGFEKLVFRNSITGVRRDRKYAIQARNAYSTGVHMSQNVYGRTTHKTESLIRYYHYHNSINVMGEPCRKFVPKPANGSKVMFEGIPYVYDDNMKRLAGEIRRFEKQTIGDVHT

SEQ ID NO: 43878 - protein, 314 aa, Oryza sativa
MDNLWHLGDEFRGQSKVVEDRQWSLMTSKLAEINKSKAERTNELDYARMNTIPDVKQWDKVSYHQDESKMDHLNLGLMNLDLKMNDIRMNDAAMKNPFRGMAYNMNQLYPKGGNGNVNSFKMNVGVNKYLHSPNGKDVNGKNSGANSNGSNSSGNNSSNSAVDKRFKTLPTSEMLPRNEVLGGYIFVCNNDTMQEDLKRQLFGLPARYRDSVRAIIPGLPLFLYNYTTHQLHGVFEASSFGGSNIDPTAWEDKECKGESRFPAQVRIRIRKLCKPLEEDAFRPVLHHYDGPKFRLELSIAEALSLLDLCEKEGV

SEQ ID NO: 43879 - protein, 167 aa, Oryza sativa
MDSHVGSGEIITAPIITEDGKPIKDPLVLLEATSDQHTMQGSSSSSRNENEVDKSENCVVDKQIIEWKLLLHQIGLDVLRTDRSMVFYENKENLSKLWDILAVYAWIDKEIGYCQGMSDLCSPMIVLLNDEADAFWCFERLMRRLMHTAICWGGEPASAPCVYHSSA

SEQ ID NO: 43880 - protein, 198 aa, Oryza sativa
MVATCTCMLFETHGIPCRHLIPVLRSAQLSELPRYYLLERFRKDCKKTHVFDADGILLEENTSNSNDPVMQKMLSEACNKMEKLILQAKQSAAAMQLLRDELVVLGDKLNEMVPEKELSQIEEFESYLGCSIPSQIEIHPPNDTRSRGRIKRIKGHNDKEKKQNKKIKKKERVPQRCKKCKQVVLHDSRNCPNKEPQQ

SEQ ID NO: 43881 - protein, 430 aa, Oryza sativa
MIGSRGGGGGAAPRPRRRSDPGDSRDLSVATTTESYNSERSVGSGGGRGTAFLDAFRSCFVSGEAQARSPETSSLSDDFHPSQQLSQSISSQGSSSGSNFEMRRSMKGLYNPMHRNSSGKEIPGSTQFSLPQIQKATKNFSPNLKIGQGGSGTVYKGQLNDGTLIAVKRAKKNVYDKHMGREFRNEIETLQCIEHLNLVRFHGYLEFGGEQLIIVEYVPNGNLREHLDCVNGKILEFSLRLDISIDVAHAVTYLHTYSDHPVIHRDIKSSNILLTNNCRAKVADFGFAKLAPTDASHVSTQVKGTAGYLDPEYLRTYQLNEKSDVYSFGVLLVELITGRRPIEPRRAIVERVTAKWAMEKFVEGNAIQTLDPNLEATDAINLAVEKTYELALQCLATTKRNRPSMRRCAEILWSIRKDFRELDIPTASLN

SEQ ID NO: 43882 - protein, 611 aa, Oryza sativa
MDHLAIIATELGDSSDFEVEGIQNLTENDVSDEEIEAEDLARRMWKDRIKLRRIKERQDRLALALQQAELDKSKGKPISDQAMRKKMSRAQDGILKYMLKLMEVCNARGFVYGIIPDKGKPVSGASDNIRAWWKEKVKFDKNGPAAIAKYESENLASADAPSSGIKSQHSLMDLQDATLGSLLSSLMQHCDPPQRKYPLERGTPPPWWPSGNEDWWIALGLPRGQIPPYKKPHDLKKVWKVGVLTGVIKHMSPNFDKIRNHVRKSKCLQDKMTAKESLIWLGVLQREERLVLSIDNGMSEVTHHGALEYRNGDTHSSSNEYDVDGFEEAPLSTSSGDDEQDLSPAAQLSEEHAPTRRERAKVKRPNQVVPKKAGTKEPPKRKRPRHSVTVIEQEVQRADDASEHSRNMIPDMNRLDQVEIQGMANQITSFNEEANTSEALQHRGNTQELAHLPADFNHYGNAQATIATPVSICMRGQAVPYESSDNSRPKTGNIFPQDSDSGFNNMPSSYQTIPPKQPLPLSIMEHHVVPLGIRTPADNSPYSDQIIGSGNSTSVPGDMQLIDYPFYGEQDKFAGSSFAGLPLDYISISSPIPDIDDLLLHDDDLMEYLGT

SEQ ID NO: 43883 - protein, 528 aa, Oryza sativa
MASPDLFPNVSFSHVSVPAAAGASTEVTGGATAVFGGDASTGAPRLSLVWSGETQAKHTLEIDLSDAQIFKLGPTEWLCVSGESEAKDGVEEKSYSRAIKVVLRTEAESKAFYLAFQQWKHRVISGKAGEPLENGLIIGSKSKFDTKIEASSAKMYFHYYGQLLHQQNMLQDFVRTGTYYAAVMENRSDFEGRVVVDVGAGSGILSLFAAQAGARHVYAVEASEMAEHAQRLISGNPSLGQRITVIKGKVEEVELPEKADILISEPMGTLLVNERMLESYVIARDRFLVPGGKMFPTTGRIHMAPFSDEYLYVEMANKALFWQQHNFFGVDLTPLHGSAFQGYFSQPVVDAFDPRLLVSPPTFHTLDFTTMKEEELYEIDIPLNFVASVGTRVHGLACWFDVLFNGSTVQRWLTTAPGSPTTHWYQLRCILSQPLYVMAGQEITGRLHLVAHSAQSYTIYLTMSAKMWGEGAEQGGILQTSTAKLELKEPYYRLSQPQPYVMQQDQQQQQLPSLQPQSPLWDYHYGQD

SEQ ID NO: 43884 - protein, 318 aa, Oryza sativa; identical to SEQ ID NO: 30569

SEQ ID NO: 43885 - protein, 634 aa, Oryza sativa
MKHMKLGSKPDLFQTEGGNIRFVATELATDIVISIGDVKFCLHKFPLLSKSSCLQRLAASSNVEGNEELDISDIPGGPSAFEICAKFCYGMIVTLNAYNVLAARCAAEYLEMFETIEKGNLIYKIDVFLTSSIFRAWKDSIIVLQSTKSLLPWSENLKVINHCIDSIASKALIDPSEVEWSYTYNRKKLPSENGHDSHWNGVRKQLIVPKDWWVEDLCDLEMDLYKRVIMMIKAKGRTSPIVIGEALRAYAYRRLLGSLEDAVSNGVDCTKRRAVLETIIFLLPTEKGSVSCGFLLKLLKAACLLEAGESCHDILIKRIGTQLDGASVSDLLIPANTSENTLYNVNLIIAIVEEFVSRQSDTGKMKFQDDDEIVEVENLTPVSSTSNLAVANLIDGYLAEIAKDTNLPLSKFIAIAEMVPPASRKNHDGLYRAIDMYLKEHPSLSKSEKKALCRLMDCKKLSQDACLHAVQNERLPLRVVVQVLFFEQIRASAASGRTDAAAELTSAVHSLLPRENGNSYGSSRSAATTTTEEDGTGVPTSSDINSFSSLRLANNSGGSERSSGSSDINNKSCDDKSSSKSKGSLMPKKILSKLWSGKTNASENSSSDTSESPGSLNPEEVKSTTSRNTRRLVT

SEQ ID NO: 43886 - protein, 86 aa, Oryza sativa
MRHLPLPPAAAAAAAAPREASPPPPPPPAARALSPTAVAFAQIPSVAMAARAQARLFAAALVIFHGSEYVLAAAFHGRRNVTATCE

SEQ ID NO: 43887 - protein, 56 aa, Oryza sativa
MPLVDFQEKKCTGWRQLKILPSGVVKYLRNTCYEHLATLESDIFASLIQHILVGDC

SEQ ID NO: 43888 - protein, 453 aa, Oryza sativa
MRPLNFPSSLADRIDKEAASQVTMDDDNWVETNTEFDGYDDESVSGNVEGIVSSVQLNQAKSRALGDDNSSMVSWVTKDSDTSAMAWRSKKSLAGIAKEIDEYFLKAAASGSDIVILLDSSGGQPDPSELEANRGKNSKSAKVFSTISWSWSFKSAQANRQSSMHSSDASGYGYHGKTLEKLYEEEQKLYKLVKDEEFARLQYRKNTSLLQRLESGDHDKLHAEKVRDNIEELQARIISLEEAVGLTCLSISKLRDEELYPQIIELSAGLVHMWRNMYECHQVQNHIAQQANLLGNLPGNEPTTDTHCQATSQLEVEVSAWHSSFCNLITLQRDYVTILNQWIKLTDCLPDNDGFMKSSSGIRSLCAELQRALTGLPEKVAAEAIKTFLSVIHTIVVQQTEERQLKKKSDQIESKFHTQLEKHSNNATQNSGQPTLAKLDTFKKQVEERRLGI

SEQ ID NO: 43889 - protein, 174 aa, Oryza sativa
MSPSTSQPASAIVSASSSSSLQTAPTPSETSTESQLAIIPAQGTSTPTKYTPAAATDETPTSKSSSLVFTKKSIIVSGYSMPSHTAKTSTDTKAKIGTHHEEKISQSASLTTIVPRDTSDKAKVTAESPDESPQADPSLAPKSTPKKRGRPTETTTIAKKLFKDSTQKKPTDSE

SEQ ID NO: 43890 - protein, 227 aa, Oryza sativa; identical to SEQ ID NO: 32781

SEQ ID NO: 43891 - protein, 482 aa, Oryza sativa
MAKPTVVVLPVWGAGHFMPMIEAGKRLLRGSGGALSVTVLLMPAPTPDAAVDIAAQVKREEASGADDISFRHLPAVDMPTGHTGVEEWISRILRSHAPNVWAAIAGLDCPVAALVTDIFCTPALEVSRELGVPGYVYFPCSASMLALLLRSPGLDEEVAVEFEEMDGAIRIPGLPPVPPSALPSTMLDRKKSTYDWFVATGRGYMNATGVIVNTAAELEQSVLAAIADGRCTRGVPAPTVYTIGPVLSFPPPPEEQPHECVRWLDAQPPASVLFLCFGSKGLLPPPKVREIAAALERSGGHRFLWVLRGPPKDSRQGQRVPTDAMLDELLPEGFLERTKGRGLVWPTRAPQKEILAHAAVGGFVTHCGWNSILESLWFGVPVLPWPLDAEQHFNAFTLVAHLGVAVPLGMDRRRDNFVEAAELERAVRSLMDDASDEGRKARAKAAETRAVCRKAVEEGGSSSTAFQRLTDDIVRRGAVQIR

SEQ ID NO: 43892 - protein, 1338 aa, Oryza sativa
MDRVGIDYPTIEVRFENLEVEADVHVGNRGLPTLLNSVTNTVEAIGNALHILPNKKQPMTVLHDVSGIIKPRRMTLLLGPPGSGKTTLLLALAGKLDKDLKVSGKVTYNGHGMHEFVPERTAAYISQHDLHIGEMTVRETLAFSARCQGVGTRYEMLTELARREKAANIKPDHDIDIYMKASAMGGQESSVVTDYILKILGLDICADTVVGNEMLRGISGGQRKRVTTGEMLVGPARALFMDEISTGLDSSTTYQIVNSLRQTIHILGGTAVISLLQPAPETYNLFDDIILLSDGQVVYQGPREHVLEFFEFMGFRCPARKGVADFLQEVTSRKDQGQYWCRRDRPYRFVPVKQFADAFRSFHVGRSIQNELSEPFDRTRSHPAALATSKYGVSRKELLKATIDRELLLMKRNAFMYIFKAVNLTLMALIVMTTFFRTSMRHDRDYGMIYLGALYFALDTVMFNGFAELAMTVMKLPVFFKQRDLLFFPAWAYTIPSWILQIPITFLEVGVYVFITYYVIGFDPSVSRFFKQYLLLLALNQMSSALFRFIAGIGRDMVVSHTFGPLSLLAFAALGGFILARPDVKKWWIWGYWISPLSYAQNAISTNEFLGHSWSQILPGENVTLGVSVLKSRGIFTEAKWYWIGLGALLGYTLLFNLLYTVALSVLSPFTDSHASMSEDALKEKHANLTGEVVEGQKDTKSRKQELELSHIADQNSGINSADSSASRKGMVLPFAPLSISFNDVRYSVDMPEAMKAQGITEDRLLLLKGVSGSFRPGVLTALMGVSGAGKTTLMDVLAGRKTGGYIEGDIRISGYPKKQETFARISRYCEQNDIHSPHVTVYESLVFSAWLRLPSEVDSEARKMFIEEVMDLVELTSLRGALVGLPGVSGLSTEQRKRLTIAVELVANPSIIFMDEPTSGLDARAAAIVMRTVRNTVNTGRTVVCTIHQPSIDIFEAFDELFLMKRGGEEIYVGPVGQNSSKLIEYFEGIDGVSRIKDGYNPATWMLEVTSSAQEEMLGVDFSEIYRQSELYQRNKELIEELSTPPPGSTDLNFPTQYSRSFITQCLACLWKQNWSYWRNPSYTAVRLLFTIVIALMFGTMFWNLGTRTKKQQDLFNAMGSMYAAVLYIGVQNSGSVQPVVVVERTVFYRERAAGMYSAFPYAFGQVAIELPYIMVQTLIYGVLVYSMIGFEWTVAKFLWYLFFMYFTLLYFTFYGMTAVGLTPNESIAAIISSAFYNVWNLFSGYLIPRPKIPVWWRWYCWICPVAWTLYGLVASQFGDIQHVLEGDTRTVAQFVTDYFGFHHNFLWVVAVVHVVFAVTFAFLFSFAIMKFNFQRR

SEQ ID NO: 43893 - protein, 358 aa, Oryza sativa
MSEVSVMAEVEETAAAAPLDLPPGFRFHPTDEEIVSHYLTPKALNHRFSSGVIGDVDLNKCEPWHLPAMAKMGEKEWYFFCHKDRKYPTGTRTNRATESGYWKATGKDKEIFRGRGILVGMKKTLVFYLGRAPRGEKTGWVMHEFRLEGKLPSQLPRSAKDQWAVCKVFNKELALAAKNGPMAVTEATADDAGIERVGSFSFLSDFIDPAELPPLMDPSFVADIDGVDDAKVSASTSGQAAIAAGFHVASQVMSYQQVKMEEPLPLPYLHQQPPRMLHSGQYFSLPAVHPGDLTPSAIRRYCKAEQVSGQTSALSASRDTGLSTDPNAAGCAEISSAPTSQPFPEFDDGILGLDDFWN

SEQ ID NO: 43894 - protein, 770 aa, Oryza sativa
MVFSDEYKPVGKPIEKTGAELQASGEAVYVDDIPAPKDCLYGAFIYSTHPHAHIKDINFRSSLASQKVITVITAKDIPTGGENIGSCFPMLGDEALFVHPVSEFAGQNIGVVIAETQKYAYMAAKQAVIEYSTENLQPPILTIEDAVQHNSYFPVPPFLAPTPIGDFNQAMSEADHKIIDGEVKLESQYYFYMETQTALAIPDEDNCITLYVSAQLPEITQNTVARCLGIPYHNVRIITRRVGGGFGGKAMKAIHVAAACAVAAFKLRRPVRMYLDRKTDMIMAGGRHPMKVKYSVGFKSDGKITGLHFDLGMNGGISPDCSPVLPVAIVGALKKYNWGALSFDIKVCKTNVSSKSAMRAPGDAHGSFIAEAIVEHIASTLSVDTNAIRRKNLHDFESLKVFYGNSAGDPSTYSLVTIFDKLASSPEYQQRAAMVEHFNAGNRWKKRGISCVPITYDVRLRPTPGKVSIMNDGSIAVEVGGVEIGQGLWTKVKQMTAFALGQLCDDGGEGLIDKVRVIQADTLSMIQGGFTGGSTTSETSCEAVRKSCAALVERLKPIKEKAGTPPWKSLIAQASMASVKLTEHAYWTPDPTFTSYLNYGAAISEVEVDVLTGETTILRSDLVYDCGQSLNPAVDLGQVEGAFVQGIGFFTNEEYTTNSDGLVINDGTWTYKIPTVDTIPKQFNVELINSARDHKRVLSSKASGEPPLLLASSVHCAMREAIRAARKEFAGAGGSPLTFQMDVPATMPIVKELCGLDVVERYLESFAAKA

SEQ ID NO: 43895 - protein, 339 aa, Oryza sativa
MPPPAVSTAPVAPVVASSSSAAAAAPRRPRSLRLRVTPYASVSSSSSPSTFAVSIPPPPPARHSRKQLVGRDGAPAKPAKPRVFFLDVNPLCFRGSQRSLGAFARWLALFFAHVSLRDPVVAVLDGEGGNEYRRRLLPSYKAHRPRGPGTGADSRVIDVLRECNVPVVRVDGYEADDVVATLTEQVLQKGFRVVIGSPDKDFKQLISEDVQLVMPIPEIGRWSFYTLRHYVAQYKCDPTADLSLRCFIGDEADGIPGIQHLVPGFGRKTAVKLLKKHGSLENLLNTAAVRTVGKDYAQDALVKHADYLRKNYEVLSLKRYAFFSNHEYSNLMSGCPTLL

SEQ ID NO: 43896 - protein, 534 aa, Oryza sativa; identical to SEQ ID NO: 42896

SEQ ID NO: 43897 - protein, 470 aa, Oryza sativa
MSRRTTTTTARWVPRQGQKGEPGGSGHAAAPVDRLSALPDTLLHHVMSFLKAWEVVRTCVLSRRWRDLWASAPCVDIRLRGSGRDGAPPEDFGRFVYRLLLAREVSAPVDTLRLRSSNGEEYAETYDNDDVNIWICSAIKRNVRVIHLNGHRKDELVLEHTAFVSHHLKILKLSHIKLDGKILKQLSSQCTSLEDLELNNCPVNGGEILSVSLKKLTMVKCSITMDLSICAPNLELLCCITPYYHVPLFENLSSLVAATIMLDDSFLRRDEFLYEVEEETSDDEDDNKTTSDHCDSKMDADSDAYDDDDNDDILYDEYLNSRHGNLVDDYNYGSDIDSDDDLHEYSQIAHECRGGRYGYCHDSKRRGSYYETCKLADSFSGKYLLRSLSSARSLELLAHSGEVFQNLFLLINLYLVLVFCICILILMINSKRRTILFFFLVLFLLSTQKVTLKITNNCVTAMLHPCLLSY

SEQ ID NO: 43898 - protein, 215 aa, Oryza sativa
MNAFRLAGDMTHLLSVVVLLLKIHTIKSCAGISLKTQELYALVFAARYLDLFIHFISLYNTVMKLVFLASSFSIVWYMRRHKIVRRTYDKDHDTFRHHFLVLPCLALALLINERFTFREVMWVFSIYLEAVAILPQLVLLQRTRNIDNLTGQYVFFLGAYRVLYILNWIYRYFTEPHFVHWISWVAGIVQTLLYADFFYYYIMSWKNNVKLELPA

SEQ ID NO: 43899 - protein, 265 aa, Oryza sativa
MDGRFPLPPASGGGRGHHRRAHSETFLRLPDADLLLDPEGDFSFSDLDFPSLSDDSPAISDPTPPPPPPMAATPAPAPRPPGGAHMRSLSLDTAFFEGFSLQGGGGGGGGGGSGGSGGHKRSGSMDGVNSPFEGESALSGGLPDYAKKAMPAERIAELALIDPKRAKRILANRQSAARSKERKIKYTSELERKVQTLQTEATTLSAQLTLLQRDTSGLTAENRELKLRLQSMEEQAKLRDALNEALREEVQRLKIAAGQAPNMNG

SEQ ID NO: 43900 - protein, 368 aa, Oryza sativa; identical to SEQ ID NO: 31055

SEQ ID NO: 43901 - protein, 342 aa, Oryza sativa
MSGRRRGRTKNGAAHFAVSPELIQSRNRIYLRGTVSKELLTHKQVVHLSHKIKDGIWLQQQRSKLKEKLGNEPSYKQLAHSLKISPPELRSRMHESFLAREMLTMSNLRLVISIAQKYDNLGVELADLIQGGLIGLLRGIEKFDASRGFRISTYVYWWIRQGVSRALAENSKTFRLPTYLHERLIAIRGAKYELEDQGIAPTIENIAGSLNISEKKVLNATEAVNKVLSLDQQAFPSLNGLPGETLHSYIEDQNVANDPWHGFEEWYLKEEVNKLLNSTLNERERDIIRLYHGIGKQCHTWEDISRQFGLSRERVRQVGLIAMEKLKHAARRKNLEALLEDY

SEQ ID NO: 43902 - protein, 1129 aa, Oryza sativa
MPTPVAAARQCLSPAAVPALDAAVASARRRAHAQTTSLHLISSLLAPPAPLLLRDALARARSAAYSPRVQLKALDLCFAVSLDRLPSVSASSSSGAADEPPVSNSLMAAIKRSQANQRRNPDTFHFYHQAATAQTPAAVKVELSHLVLAILDDPVVSRVFAEAGFRSGDIKLAILRPAPPMPLLGRLPTRTRPPPLFLCSFAAADDADVPSPAGNLAGAGEENCRRIAEILSRGRNPMLVGVGAASAADDFAAASPYRIIHVDPNTIDRSDLGVAAAMASATSGLIISIGDLKQLVPDEDAEAQENGRRVVAEVTRVLEAHSKVGRVWVMGWSATYETYLAFLSKFPLVDKDWDLQLLPITAVHAAPAAAGPAAAGGLMPPATTVAAFSKPAASLMDSFVPFGGFLCDNYEENSLTANSCPQALRCQQCNDKYEQEVATIISASGITAEDHHQGGLPSLLQNGSMMGPNNGFDPVKVRDDRMVLNSKILNLQKKWNEYCLRLHQDCQRINRDPYKPFPRYIGVPADKERSANPSKGSESIGVQKDVIKPCAVSAVHSSSTARPISSPSVTNKRNEDLVLNLQARHSKSDENLQERGMQSQHGTLSNADNPDDHASPSSAAPVETDLVLCTPRDCSSKGSSSTCSKRVEDSERSVHLVPKKVDDLNLKHPQLSVQPNSCSWSSINVGKTSHSTLHSVASGGFSAFGQWQKRSPLAAQNSDLSNYKLLVERLFKVVGRQEEAVSAICESIVRCRSTESRRGPSRNDIWLCFHGSDSMAKKRIAVALAELMHGSKENLIYLDLNLQDWDDSSFRGKTGIDCIVEQLSKKRRSVLFLDNIDRADCLVQDSLSDAIKSGRFQDMRGKVVDINDSIVVLSRSMIHGSKNGLEEGLSFSEEKILATRGHRLKILVEPGRAITSGCPSGKVVVSPRHFLTKIQASLCSGSISKRKLSMSDDQEKLQESPSSLKRLHRTSSIPFDLNLPVDEDEPFDADDDSSSHENSYGNTEKSIDALLHSVDGSINFKPFDFDKLADDMLQEFSNILRKNLGAECMLEIDVGAMEQILAAAWKSEDKGPVQTWLEQVFARSLDELKLKYKHVSSSTLRLVPCEDTLPTVKGDGLGVLLPPRIILDC

SEQ ID NO: 43903 - protein, 617 aa, Oryza sativa
MPSASKSKSKDRSAAKAPKEQPKVAAKPMGNGTVASAYNNFSGKFHLLEPSSSLLVSQGNDKLRNTDEIDEHSRSSHGTGDFDCASNNGSCSGESEDPKEKSTSTAPRVDSVPGCDVDKREKIRQKNEKKHQRQKERRAQELHERCKGYLMSRKLEALAQKLVAMGFSSDQATMALIQNEGCLEESVAWLCSFDGSEEAKQQTAADQQPGVNLKIDITDELAKIATLEVKFKCTKQEIERAVVSSEGDLEKAEEVLKTQKQESTATASKPEGSGDSSGLANKAQLMLAQNPTRPQTNGFSSVGAQQMRRDEKDLNYKLLLNGSGPKEHAVKGFQPLAPSVKPEMGRPQFVQPEKRRLNANSVPSVSYITSSPLPVAAPQIKSETRHVAGGNEVKNAMHNGNLRESVVVMQRPQSAAAKQSLPSTSHSMFASEPPREWYLNGASGVDMMLNGGLGHGLRNMSLDGVNSSKQFVHANHQQSFVSNPIDLAANGWGGTWGSGGTSSSLGAASSLGLFRGWSSSESSSSLSRPDWRTNGPSPCDYTSIDWSLDTTLLNPAAKSEWLSDTWSTMFMGGRSTRPSGNLGGPGIAGLHESNFPMDPSPSPRPYDWPSFCRGGSS

SEQ ID NO: 43904 - protein, 644 aa, Oryza sativa
MPSLALLRAVAMALLLLLARSMEGVDGAGGGGNATCPLDLSYVTTFPWDADLCAGGAGNMTRCCNTLLSVLAIGLAEQVRATGHFRIPSVGESAACLKDYGAKLSAAPLSLPGASLVQTCFPSPEQFVSSPSFCAGVTTAAEYRAVVGNDSVAALDSACGDLSSTPHCLRCLDAGIAATSRLKAAANISANATTDGAATTRNCFYLTVTYAAGISNVAGPTNPPTAACTLGLALSNPPAAPPKSHDTVIYATAIPVAFLLLASLLAFLVWRRHDKKKKKKKIHEISKEGSAKRRSHPRPNTGSILYDIAELSKATDAFADRNLVGRGGFGAVYCGVLADGSVVAVKKMLDPDVEGGDEEFTNEVEIISHLRHRNLVPLRGCCIVDDDAEEGKQKFLVYDFMPNGALEDFIFRDGKRPALTWAQRRSIIMDVAKGLEYLHYGVKPAIYHRDIKATNILLDGDMRARVADFGLARRSREGQSHLTTRVAGTHGYLAPEYALYGQLTEKSDVYSFGVLVLEVLSARRVLDMSAPSGPVLITDWAWAHVKAGQAREVLDGALSTADSPRGGAMERFVLVGILCAHVMVALRPTITEAVKMLEGDMDIPELPDRPLPYGHSAMFSEAGSNFSASPAFSGPFIDNGDMLR

SEQ ID NO: 43905 - protein, 567 aa, Oryza sativa
MTLITLIRDYIDRMLHDIPGMKVLVLDPDTVGMVSVVYSQSDLLRKEVFLVETVDNASSSRESMAHLKAVYFLRPSSDNVQKLRRHLAAPRFAEYHLFFSNVLKIPQIQVLADSDEQEVVQQVQEFYADFCAIDPYHFTLNIRNNHVYMLPMVVDPPGMQSFCDRAVDGIASVFLALKRRPVIRYQRTSDVAKRIAQETARLMYEQESGLFDFRRTENSSLLLVIDRRDDPVTPLLNQWTYQAMVHELIGIENNKVDLREYPNVPKDQKEVVLSSVQDEFFRANMFENFGDLGMNIKRMVDDFQHLSKTSQNIQSISDMSKFLSNYPEYRKTHGNVTKHVALVSEMSRIVEERKIMLISQTEQELACTSGQAAAFEAVTSLLNNESVSDIDRLRLVLLYALRYERESPVQLMQLFNKLASRSAKYKSGLVQFLLKQAGVDKRTGDLYGNRDLLNIARNMARGLKGVENVYTQHQPLLFQTMEGIVKARLRDADYPLVGNHFQQNRPQDVVLFIVGGTTYEEARSVALYNAANPGVRFFLGGSVVLNSKRFLDDLGEAQRISKSSSLV

SEQ ID NO: 43906 - protein, 277 aa, Oryza sativa
MRKNFRKRNLEADAAADHSDDDDARRVALEEIKYMQKLRERKLGIPAAVAAAGASSAASADGASPRGRGGGGGGLAAGGDAEKEDLVLQDTFAQETAVTIEDPNMLRYVENELLKKRGKKVDVKDKEEKDQVDELYTVPDHLKVRKKNSGESSTQWTTGIAEVQLPIEYKLRNIEETEAAKKMLQEKRLAGKTKSDANIPSSYNADFFHRGKDYTEKLRREHPELYKDQGSQANGTGGKSMGGNHPDGAGAGRREAATDELLLERFRKREKFRVMRR

SEQ ID NO: 43907 - protein, 127 aa, Oryza sativa
MEVEMMEDDVFFAELSKRISLLITDDDEAADFGAARFPASAAAPIPVSLRCFFLYSSSAASSSYHIIHQACVCTRACELASSVSSFRLGALGSSCGFSRLLAAVGLVVAAPPRTWLPLHTTKPNQIA

SEQ ID NO: 43908 - protein, 210 aa, Oryza sativa
MGAAGLPAPGCLQKFGHIVDAERFVLNMSNRGIHKALSFQCFASDGRGFGAGSTNRRKIKSKKRQKDVAQEPSKVISGGSKSRDQWALDLGTRRESKYAKTVMDKQFLEKVEAVRRSALEKKKADENKNYQAIDYDAPIESDKSTIGFGTRVGIGIAVMVFGLVFAFGDFLPYGSVSPSKESTVVSKQLSEEEIQNFKVNVFLPQKFCWF

SEQ ID NO: 43909 - protein, 205 aa, Oryza sativa
MESSFRGRKNHATQNVMAAVDFDLRFTYVLAGWEGAAHDVVVLRDALERENGLHVPQGKFYLVDVGYGAKPGFLPPFRSTRYHLNEWGNNPVQNEKELFNLRHSSLRITVERAFGSLKRRFKILDDATPFFPFQTQVNIVVACCIIHNWVINDDIDELVMGPNESIIQDNDTSTVGQPNDHAWMVQFRQGLADQMWADRQNHHGN

SEQ ID NO: 43910 - protein, 399 aa, Oryza sativa
MEYFIKLIKKKYSKDISKDNRALGKLRREAERAKRALSNQHQVRVEIESLFDGTDFSEPLTRARFEELNNDLFRKTMGPVKKAMDDAGLEKSQIHEIVLVGGSTRIPKVQQLLRDYFEGKEPNKGVNPDEAVAYGAAVQGSILSGEGGDETKDILLLDVAPLTLGIETVGGVMTKLIPRNTVIPTKKSQVFTTYQDQQTTVSIQVFEGERSMTKDCRLLGKFDLSGIPAAPRGTPQIEVTFEVDANGILNVKAEDKGTGKSEKITITNEKGRLSQEEIDRMVREAEEFAEKDKKVKERIDARNQLETYVYNMKNTVGDKDKLADKLESEEKEKVEEALKEALEWLDENQTAEKEEYEEKLKEVEAVCNPIISAVYQRTGGAPGGGADGEGGVDDEHDEL

SEQ ID NO: 43911 - protein, 157 aa, Oryza sativa
MGSSATPSTAASAPGRRKVALYLALLTLQYGAQPLISKRFVRQEVIVTTLVLSIEVAKVICAVILLVAEGSLKKQFNNWSITRSLTASGLPAAIYALQNSLLQISYKNLDSLTFSILNQTKLLFTAFFTYLILGYVLVIPPIYILQCIDDAHDLMKL

SEQ ID NO: 43912 - protein, 155 aa, Oryza sativa
MPTAPPPVLLHLPWQRHPNLRSWFRTATAWAWRVAVASSLRFGRRKAGEAAAGAARSAPLMATSKVSRKPAGAPWAPGASARLKNELWETSMPGARSSSLLLQAPGLTKRVVSSGGMASASDPHHLLLQPYESRDVPLPLSWLCLLSIRHAISGD

SEQ ID NO: 43913 - protein, 411 aa, Oryza sativa
MADGANEDGGGSAAGERPMVAIKRKREKVPGLAEDGDSSPSSANRSVDMEVEEKLDYSCAGAEEDVSSGCSIEMEDVGEQRQVEPTWEDKVLRVLHIVRRNQFAEYDPKEGGIVYTRFCIHNIALFDLDKESTIGPGPPINSLDPSEYWWLDDSLNIIAIKVAESDVGYPVRIYGTVLARDQQDYRCVYLFRRSRDNPQLITSPEDSLTLTGPYRALASKDIIIFEFNLKILGDGDVDRDFGKGVIEHSCIRHTKKLMTLDLTSWLSKIDLVYTPVDYAVEASLAVNILDGPSDFTGKVIAWTSGNKDNEIVLHDTQVTGSPTKLGDDGSIELSRHIVVVPLDEELVLNVILFHGDDHEDECFEFVLTNYDEESSFKEGRFELQVKVIWTGVVRTGEHKMWESTGRNRMLV

SEQ ID NO: 43914 - protein, 513 aa, Oryza sativa
MDEMAARTWLWLLLSPLILLLLHYALALLTARRARKNPLPPSPPALPFIGHLHLIGALPHVSLCCLATKHAPDLMFLRLGTSLPVLVASSPCAAEAILRTHDDVFASRPRTVLADIIFYGSRDIGFAPYGEDWRQARKLVNTHLLSVNKVQSLWLAREEEVKIVMEKISKAAFAREAVDIGQILCSFTNDLACRVVSRKLVGDDRQKKLLQELVNKTIKLLSIFNVEEYFSILARIGVIGKVMCARAERLKKKWDMLLKKLIADHESKCDSYLVCGRNKDDFVDILLSVRKEYGLTEEHVKAILEDVFIAGTQSSARVIEFTFAELMRKPHMLKKVQDEVRACIPNGQAIVSEVQVNNMTYLRAVVKEVLRLHPVAPLLATHVSMADCNINGYMIPSGMRVLVNAWAIGRDERFWYDPEKFMPERFVESVNGSATASVNFWVNNYQYLPFGSGRRMCLGMNFAMAVIEITLANLLWKFDWALPAHAMEVDMSEEFGLSVRLKEKLLLVPKQHV

SEQ ID NO: 43915 - protein, 217 aa, Oryza sativa
MDTQKKLSEFRDQLSSILFHERLGTMLDKMKRVENTVAEVALLLGINEKMIPAIKDAAALAMSDLATNIVTEFTSLAGIMARHYALRDGLSEQIAEALFEITLPRFSGDVFPKTDPGIVLAVTDRLDSLVGLFGAGCQPSSTNDPFGLRRISYGLVQILVENKKNFDLTKALTLVAEEQPITIDSGVIDEVVQFVTRRLEQLLVRISLNSNNSLSYI

SEQ ID NO: 43916 - protein, 85 aa, Oryza sativa
MVTSRRPRVSRQARRLRLDKGTRGRWALVQAVAAYREELAAAASQLGIGGFMREGDDGSGPAKRWRLARQATGRAQRAGLRGAAS

SEQ ID NO: 43917 - protein, 622 aa, Oryza sativa
MEELDPDDRGYIEIWQLETLLRGMVSAQAAPEKMKRTTSSLARTMIPSRYRSPLKRHVSRTVDFVHENWKRIWLVALWLAVNVGLFAYKFEQYERRAAFQVMGHCVCVAKGAAEVLKLNMALILLPVCRNTLTTLRSTALSHVIPFDDNINFHKVIAATIAAATAVHTLAHVTCDFPRLINCPSDKFMATLGPNFGYRQPTYADLLESAPGVTGILMIIIMSFSFTLATHSFRRSVVKLPSPLHHLAGFNAFWYAHHLLVLAYVLLVVHSYFIFLTREWYKKTTWMYLIVPVLFYACERTIRKVRENNYRVSIVKAAIYPGNVLSLHMKKPPGFKYKSGMYLFVKCPDVSPFEWHPFSITSAPGDDYLSVHIRTLGDWTTELRNLFGKACEAQVTSKKATLSRLETTVVADAQTEDTRFPKVLIDGPYGAPAQNYKKYDILLLIGLGIGATPFISILKDLLNNIKSNEEVESIHGSEIGSFKNNGPGRAYFYWVTREQGSFEWFKGVMNDVAESDHNNIIEMRNYLTSVYEEGDARSALIAMVQSLQHAKNGVDIVSGSRIRTHFARPNWRKVFSDLANAHKNSRIGVFYCGSPTLTKQLKDLSKEFSQTTTTRFHFHKENF

SEQ ID NO: 43918 - protein, 632 aa, Oryza sativa
MIVYYAKRGDKHHARATFENMRARGIEPNAFVFTSLVHAYAVARDMRGALSCVEEMKSEGLELTIVTYSILISGFAKINDSQSADNLFKEAKTKLSSLNGIIYSNIIHAHCQSGNMERAEELVREMEEDGIDAPIDVYHSMMHGYTIIQNENKCLVVFERLKECGFKPSIISYGCLLNLYVKIGKVAKALSISKEMESCGIKHNNKTYSMLINGFIHLHDFANAFAIFEEMLRSGLQPDRAIYNLLIEAFCKMGNIDRAICILEKMQKERMQPSNRAFRPIIEGYAVAGDMKSALDTLDLMRRSGCVPTVMTYNALIHGLVRKHKVQRAVSVLDKMSIAGITPNEHTYTIIMRGYAASGDIGKAFEYFTKIKESGLKLDVYIYETLLRACCKSGRMQSALAVTREMSFQKIPRNTFIYNILIDGWARRGDVWEAEDLMKQMKEDGVPPNIHTYTSYINACCKAGDMQRAEKVIEEMVDVGLKPNVKTYTTLIKGWARVSLPDRALKCFEEMKLAGLKPDEASYHCLVTSLLSRATVMEGSTYTGIISVCREMSENDLTVDLRTAVHWSRWLHKIERTGGALTEALQRIFPPDWNSLEFLGEPSSSISMGESDDYSDSDFSGDEDEDHNIDDS

SEQ ID NO: 43919 - protein, 101 aa, Oryza sativa
MLTSSSSNSNSLTLSYSLSSPRSHPRKELDGEDSGQVPLLLLSQLFLLFLFCIRLLRVHNCTEFPPSFVFFLIMRFCGHKHDEILNNRIGSCALCHYNCKP

SEQ ID NO: 43920 - protein, 348 aa, Oryza sativa
MHGRPSRPLASSSSSSSSRVFSFFLAPRVFLFLVVVVVVVFLPGRSSCWWLEGTEELEEEMGFAGDCSPVSGGGLSENGKFSYGYASAPGKRASMEDFYETRIDGVDGETIGLFGVFDGHGGARAAEYVKQHLFSNLIKHPKFISDIKSAIAETYNHTDSEFLKAESSHTRDAGSTASTAILVGDRLLVANVGDSRAVVCRGGDAIAVSRDHKPDQSDERQRIEDAGGFVMWAGTWRVGGVLAVSRAFGDKLLKQYVVADPEIKEEIVDSSLEFLILASDGLWDVVSNKEAVDMVRPIQDPEQAAKRLLQEAYQRGSADNITVVIVRFLEGTTTGGGPSREAASDQNS

SEQ ID NO: 43921 - protein, 239 aa, Oryza sativa
MLLAAATATAAPVSSSSSFFAATTRATTTTRFTAQLQLSLPRRCRSWWGNGKARRSSRRRSHHCWAGGGAATPEDHMDELPPGRGRYHPFEEIAEKLQVDDGEPAHLTDAESARTIVEVNSKATVMISTLIDEGVHERIILPEFPYLTDENGDIYFEVDNDDALLESIMGDDKTAHVIIGLDNTQVFADLDLAAASATEFAQEDDDDDDDDDDSDDEESDFDDDFDGVMKNPSQEIQGS

SEQ ID NO: 43922 - protein, 392 aa, Oryza sativa
MSDNLMDKVSAFGERLKITGSEVSKKMTAGMSSMSFKMKEIFQGQTPADKIVEEATSENLDGPDWSANLEICDLINTEKVNSVELIRGIKKRIMLKDARVQYLSLVLLETIVKNCEKAFSEVAAERVLDEMVRLIDDPQTVVNNRNKALMLIEAWGESGDELRYLPVYEETYKSLKSRGVRFPGRDNESLAPIFTPARSVAEAEVDANFSQQTFEDVQVHTYTAEETKEAFDVARNSIELLSTVLSSSPQQDALQDDLTSTLVQQCYQSQHTIQRMIETAGDNEAMLFEALSVNDEIQKVLSKYEQMKKPAASENAEQRPVVIPIATEHEDSATVGNEDALVRKPAGSRARSGGDDDILDDLDEMIFGKKGGSSSQEGPKKQDPKKDDLISF

SEQ ID NO: 43923 - protein, 211 aa, Oryza sativa; identical to SEQ ID NO: 37034

SEQ ID NO: 43924 - protein, 924 aa, Oryza sativa
MAGALVSASTGVMESLLGKLSSMLEKEYAKKKAVEKDVLFLRNELSSMNTVMQKYAMLSEPDLQVKAWMKEVRELAYDIEDTIDAFMARSEKSNEPTGIRGFIINNILKLRELLSSCTISQEIEKLKNQVLEVNDRRKRYKLDVSVSMGTGCESIDPRLPAFYSEVGGLVGIDGPRDKIIKLLRENAADEDCGFVNRLKMVSIAGFGGLGKTTLAKQVYEKIKWQFDCAAFVFVSQIPDMKRVLLDLLCGLGASGNTWDDEKQLIDKIREFLHDKRYIIVIDDIWSISSWEILKCVLPGNNSGSRIITTTRILDVSMICCSTFNGSIYRIKPLSDDDSRRLFCRRIFHGEHSCPSHLEELSKAILRKCGGLPLAILHIASLLATKSNTKEEWELVLNSIGSALENSHTLQGLKKILLLSFYDLPPQLKTCLLYLSIYPEDCMINSKELIRKWIAEGFIAEDSGKRLDQVAESYLNDLINRSMILPFDITHADGVQYYQVHDVVLNIIISMSKEENFVTIIDGHKCSSLQEKIRRVSLQFNDSEDVVVPTNITNRSCVRSLSIFGITKQVPYFMDLQSLRVLDLGYCTLLQNQHIECLGSMLQLRYLVLHSQLITELPDEIGNLQHLEMLDVTLCSIQALPDTIVRLQKLVCLYVSTKVKLPEMIGTMQCLEELFHISSDSIRLAGDLKCLKKLRDLAIAVEDPVGTKSSTLRYREVVRSSLTELGRHNLQSLSLNYKGDENFILDSSMGSCFSTQRLRKLIIGKTLSRVPEWMSIFDNLTHLQLCISRMEQSDINILKGIDSLIFLRLVFTGHAPDGRIVIDNRGFQALKELYLLCFIPGMWPVFEPGAMQELQKYHLTFKLQKVHCKNSVLDFGLQHLSSLQHISAIIIPSGATSEDTLVAEDAIRSATSIHPNQPIAEIFVE

SEQ ID NO: 43925 - protein, 64 aa, Oryza sativa; identical to SEQ ID NO: 33740

SEQ ID NO: 43926 - protein, 363 aa, Oryza sativa; identical to SEQ ID NO: 33303

SEQ ID NO: 43927 - protein, 770 aa, Oryza sativa
MASTPSLSVSAAAAVFASAADPRRPPPPSVAIVDKNSSYGRSLQAADNGGGGGMEAPLRPLDVQEAMTMLTEGKAVQSAMYVPLLHRCVETGSLGAARAVHGHMAKTGASADMFVATSLVNAYMRCSAARDARRLFDGMPERNVVTWTALVTGYTLNSQPALGLEVFVEMLEMGRYPSHYTLGATLNACLASCDVDLGKQVHGYAIKYGAESITSMGNSLCSLYAKLGSLDSALRAFWRIPEKNVITWTTMISACAEDEECVELGMSLFIDMLMDGVMPNEFTLTSVMSLCGTRLDLNLGKQVQAFSFKIGCETNLPVKNSTMYLYLRKGETDEAMRLFEQMEDASIITWNAMISGYAQIMDSAKDDLQARSRGFQALTIFRDLKRSVMKPDLFTFSSILSVCSAMMALEQGEQIHAQTIKSGFLSDVVVNSALVNMYNKCGCIQDANKAFLEMPTRTFVTWTSMISGYSQHGQPQEAIQLFEEMRLAGVRPNEITFVSLLSACSYAGLVEEAEHYFDMMKKEYCIEPVVDHYGCMIDMFVRLGRVEDAFSFIKRTGFEPNEAIWSSLVAGCRSHGNMELAFYAADKLLELKPKGIETYILLLNMYISTERWQDVARVRKLMKQEDVGILRDRSWITIKDKVYFFRANDRTHPQATELYQLLENLLEKAKAIGYEPYQNAELSDSEDDEKPAAGSLKHHSERLAVALGLLQTPPGATVRVTKNITMCRDCHSSIKLFSLLENREIIVRDSKRLHKFKDGRCSCGDFGALL

SEQ ID NO: 43928 - protein, 711 aa, Oryza sativa
MAGSMVDRATSDMLIGPDWAKNMEICDICNRDPGQSKDVVKALKKRIGHKNPKVQILALTLLETAIKNCGDIFHMHVAERDVLHEMVKIVKKKSDQNVKEKVLTMIDTWQEAFGGPRARYPQYYAAYHDLVRAGAAFPKRSDRPAPLFNGQSPAGRNMRSPDQQDEAESSAGNDFPALSMSEIQNARGIMDVLAEMLNALDPGNREGLRQEVIVELVDQCRTYKQRVVLLVNATADEELMSQGLALNDDLQRVLAKHDAIAAGIAVRVEKKPKSLQALVDTEDSMNQDSKKEQALVDIEDPTTQETNKEPSQSASVQSPFEQLALPAPPVSNGSATPAPKSDLGVDLLSWDDNPSTTENSLALVPVTDPVVDSTPSQNALAIVDIFSQNNTTNNIAKPADPFGVNSSSTLPGSQPYNAPTQHPLQAQQQPQQVGLYPNGGAVNPGTSYPTSSGWNGQIANNATPPAQQTVNYDEQSGALPPPPWEAQSAPSGDMSNGGMQSHPVSNGQFGGMPSLPTPSNQMGGMQPLHPQMNQMGGPQAHQMYNNQQPGAMQPSQPAVTQMQSGFANQFGSMPPHSMPGMQFPGMQPSPMPGAQPVMMYAQPMMMPGMQFAAMPQPRMYGPQMSQYRLVQQQAAQYYSNSQGRPTYYAGMNDLSQKMYGLSMQDSSYMGMNSSPYSTTPSSSSSMGQPSKPEDKLFGDLLSIAKTKQNKA

SEQ ID NO: 43929 - protein, 167 aa, Oryza sativa
MPDQRRGTTALLPTARHGPAASDRHHSASAARRDAAATRPATSVAAANTLVSSSLIEIESTHTPPTTGRPPRTGEQDGEAAVLRQGWVKKGPWTPEEDLMLASYIQEHGSGNWRAVPTNTGVMRCSKSCRLRWTNYLRPGIKRGNFTEQEEKLIVHLQALLGNRSLP

SEQ ID NO: 43930 - protein, 852 aa, Oryza sativa
MTGGGAGGGGGGGKGGAAAGPVPAASRKLVQSLKEIVNRPEAEIYAALRDCGMDPDEAVSRLLSQDTFQEVKSKRDKKKEVKEIPEPRSRAASNAASRGVRGGADRGGRNSSFHSSSIDNVASRSISGPGMTSTNSTQKQTIPSSLVNKSVVADGPSVPAQSSSGFQHGWSGTPGQLSMADIVKMGRPQVKQSSSKPAVTADKGYTGQYPSLPSTVNQNLKQSASTVSPTNPDQGLHSAQDSIHPKDHNHSAAVNKQAYDNDWLPQDEPPPGNQSALPETSGDQSLYESSLQSSTLVAGVINPHENSHLDENRSAAFSSERHLEHHGGDSEYDDGLLQESSTYLPQKNSHAEDEVEGSNSDVALATENFQGLSLHNEELVPTKLAEDNPAVIIPDHLQVTGSDCVTLSFGSFESGAFSGLLPVPSRSADDNNVELPVIEESVPLDQIDSRDQDYYDSAAVNSSGNENLDTIIGTNMENIDVPSVSQPDVLRQEVLDHSGLQYNLPSDSSAAYANTTQPSTMESSQGNNQAHTLSHLSNLLQANSLHNSLLGSNIAPLRDLDFSLSPLLAAQSMTKYNSAAPTTTGPAISMQETLKPGVFSNAQSTQNLPSTSIATGPPLPQQLVHPYSQPTVPLAPFANMIGYPYLAQNYPAAYLPSAAFQQAYSSNGPFHQSAAAAVPGAMKYNMNVPQFKNNLSATSLQQQPSSVISGYGGFGSSSNLPGNFTLNQNAASASTNLGFDEALSTPYKDPSQYMALQQGDNSAMWLHGAGSRATSALPPSHFYGFQGQSQQGGFRQAQQPQQHSQFGGHGYPAFYHSQSQEHHQNPAEGGLNGFQNAQSQPSHQGWQQHTGY

SEQ ID NO: 43931 - protein, 773 aa, Oryza sativa
MDGHPSPRSHHQPPPPERDGSFNYDEAGGGPRQPLLRKRTMNTTSQIAIVGANVCPIESLDYEIVENDLFKQDWRSRKKKQIFQYIVLKWALVLLIGMLTGIVGFFNNLAVENIAGLKLLLTSDLMLKQRYFTAFLAYGGCNLVLATTAAAICAYIAPAAAGSGIPEVKAYLNGVDAYSILAPSTLFVKIFGSILGVSAGFVLGKEGPMVHTGACIANLLGQGGSRKYHLTWNWLRYFKNDRDRRDLITCGSAAGVAAAFRAPVGGVLFALEEAASWWRSALLWRTFFTTAVVAVVLRGLIEFCRSGKCGLFGQGGLIMFDLSSTIPTYTAQDVVAIIVLGIIGGVFGGLFNFLLDRILRAYSIINERGPPFKILLTMIISIITSACSYGLPWLAPCTPCPADAAEECPTIGRSGNFKNFQCPPGHYNGLASLFFNTNDDAIRNLFSSGTEKEFHMSTLFVFFTAIYCLGLVTYGIAVPSGLFIPVILAGATYGRIVGTLLGPISDLDPGLFALLGAASFLGGTMRMTVSVCVILLELTNDLHMLPLVMLVLLISKTIADSFNKGVYDQIVVMKGLPFMEAHAEPFMRNLVAGDVVSGPLITFSGVEKVGNIVHALRITGHNGFPVVDEPPVSEAPELVGLVLRSHLLVLLKGRSFMKEKVKTSGSFVLRRFGAFDFAKPGSGKGLKIEDLDLTDEELDMYVDLHPITNTSPYTVVETMSLAKAAVLFRALGLRHLLVVPKTPGRPPIVGILTRHDFMHEHIHGLFPNLGKSH

SEQ ID NO: 43932 - protein, 513 aa, Oryza sativa
MPVAVDTRDGIRLVFEVEPNQDFHGLVCEGANMLPSKFLEDAFHDRHGKIINIRHLDQVIKSVNGWYQERGLTGLVSYAEILSGGILRLQVSEAEVNNINIRFLDRRTGEPTVGKTQPETILRHLTTKKGQAYNRAQVKRDVETILTMGIMEDVTIIPQPVGDSNKVDLVMNLVERPSGGFSAGGGISSGITNGPLSGLIGSFAYSHRNVFGRNKKLNLSLERGQIDSIFRLNYTDPWIDGDNKRTSRTIMVQNSRTPGTLIHGGDHPDHGPITIGRVTAGIEYSRPFRPKWSGTLGLIFQHAGARDDKGNPIIRDFYNSQLTASGNAYDDTLLAKLESVYTDSGDRSSTMFVFNIEQGLPILPEWLSFNRVTARLRQGYEIGPARLLLSASGGHVEGNFSPHEAFAIGGTNSVRGYEEGAVGSGRSYAVGSGEVSCRMFGPLEGVVFGDYGSDLSSGPKVPGDPAGARGKPGSGYGYGVGVRVDSPLGPLRLEYAFNDKQARRFHFGVGYRN

SEQ ID NO: 43933 - protein, 458 aa, Oryza sativa
MAVDDLNHHLIAVGVGEEAATAHCGLRTLVRNMAQLVVSLGILVAADKLVEQAFAAASIKFPSALFAMFCVFALLLFLPPSLANGFMAFFDPATVFIHRWLPLFFVPSLVVLPLAVRDVSPASALKILFITFGGWFASLVVAGYTALSVRRIVKTQLIPAEPMKRPSPFGPLEFWAWAAVFVASFAVAYVSPTALGTTATTCLPFLLASTVFGYILGSRLPSGVKKVLHPIICCALSADLAAVAYGYLSRSGVDAVLGDYLTESPSNPGAGDILMGFLGSVIISFAFSMFNQRKLVRRHAAEIFTSIAVASTFSLYSTAILGRVVELEPILTISILPRCITVALALRVVSLFEGVNTSVTAAVVVLTGLIGANFAQAVMDKLRLKDPIARGIGTASSAHGLGTAAVSAKEPEALPFCAIAYALTGVVASLFCSLPAIRHSLVFIAGDASASQTQHFSY

SEQ ID NO: 43934 - protein, 554 aa, Oryza sativa
MADWDGVPARERRQMEEILQLDMEELNVEMVNDDGSSSEEANGGDDGADAFLREGVASTSGQFTFNTSLASLHTYLGEVDDTRGRVSLLDGGTILSLPMLYLQGVVLFPGATLPLRLIQGRFVAAVEKALRQVDAPCTIGVVLMYKRHSTRHYANASVGTTAEIRQLGRMDDGSLNVVARGQQRFRLKRHWMDVDGVVWGDVQIIEEDTPLRTPRDAFAQLASCNSLRQHTSSPVISLDVSPIKQRDHVDSELDCGTPSPKSTASNHSAIDSRMCHSDSRSSSSMRSSNEDGLFMHEQFYSQELHPLKGSAAVQSGENTNMGEEDFCLTSLRSLSSAGTRDTKEQRQYILPKQHFQAPLSFWPRWAYQMYDSYALARRAADLWRQIITHPSMDDYVRKPDLLSFSIGSKLPVSESVRQKLLEIDGISYRLRREIQLLKAFNLIKCRCCKSLIAKRSDMVVMSTDGPLGAYVNPHGFVHETITVSRATGLALDGNPSTVHSWFPGYSWTIASCTDCESNIGWLFKATKKNLRPRSFWGIRSSQIADDAQELDQDE

SEQ ID NO: 43935 - protein, 394 aa, Oryza sativa
MDGRESTVASGSNFSSFYVQHRGIGVPGGSGHPAGLHGPPPGGYRQHLDAVSAGYPFQPPHIGGSHIGQGYHHVDASAPVAQHGSGGGGGGMDIGMGVEMSADAKGDQGSGAGQDEPVKKKRGRPRKYKPDGAVTLGLSPSSSTPHSSTSAMGTMVTTPGSGFGSGAGSGGSGSGALTEKRGRGRPPGSGKMQQLASLGKWFLGSVGTGFTPHVIIISPGEDVAARIMSFSQQGPRAVCIISATGAVSTATLHQDSSSGGVVTYEGRFEILCLSGSYLVIEEGGSRTRSGGLCIALCGPDHRVIGGSVGGVLTAAGTVQVIVGSFMYGGTKKNKAKAEQETENNEEPIGGEEETPTMALPDHNMPHHTMGGWSPGLMRQMDSRTPNIDINSIRE

SEQ ID NO: 43936 - protein, 416 aa, Oryza sativa; identical to SEQ ID NO: 31547

SEQ ID NO: 43937 - protein, 127 aa, Oryza sativa
MMEEGLAVADLRELVHLPDVLVVCTSVGWTNEKHMLYLSLLEESFVSQLHDSKYSFKELFNHSPGACIHELSSKGHVKNVEAEQEHMDVDEVDRAESWIKIEHVRSPSENQDDVKVCFQMIMHQVPG

SEQ ID NO: 43938 - protein, 250 aa, Oryza sativa
MRLLSGASASRIPCPLLSLARARARCLPVPASATACRAASSSAAAAAGDGGALKPWLFVGLGNPGKVYQGTLHNVGFEMIDVIAEAEGISLSSMQFKAMVGKGRIGDAPIMLAKPQTFMNASGESVGQLVSYFKIPLNQVLVMYDDLDLPFAKLRLLPKGGHGGHNGVRSIINHLKQNRDFPRLRIGIGRPPGKMDPANFVLRPFNRKEQEELDFAFHRGLEAVRIMALVGFNKSATYVNTAQSSEMLNR

SEQ ID NO: 43939 - protein, 264 aa, Oryza sativa
MGPLACWQPIFPSSFCRGIKERRHDYLSWMRITQVIATSVILGLLWWHSDPSTPKGLQDQAGLLFFIAVFWGFFPVFTAIFTFPQERAMLNKERAADMYKLSAYFLARTTSDLPLDLFLPVIFMVIVYFMAGLKATAAHFFLSMLTVFLSIIAAQGLGLAIGASLLDIKKATTLASVTVMTFMLAGGFFVKRVPPFISWLRYLSFNYHTYRLLLKVQYHPVPDILINAIPLDNGVTEVVALVAMIIGYRVLAYMSLRRTKTSAS

SEQ ID NO: 43940 - protein, 210 aa, Oryza sativa; identical to SEQ ID NO: 30533

SEQ ID NO: 43941 - protein, 45 aa, Oryza sativa
MCCCFPCFCKCICIDVLFNLHAEYAIMTHKDFLLGAVYNYFYRGL

SEQ ID NO: 43942 - protein, 458 aa, Oryza sativa
MALSRRLLPLLLRRGSTPSLSPARALSTAAVTADAPAAAAAAAEEEAMTIKGVRISGRPLYMDMQATTPVDPRVLDAMLPFYLSRYGNPHSRTHLYGWESDAAVEEARARVASLVGADPREIFFTSGATECNNIAVKGVMRFYRDRRRHVVTTQTEHKCVLDSCRYLQQEGFEVTYLPVRPDGLVDVAQLADAIRPDTGLVSVMAVNNEIGVVQPLEEIGRICKEKGVPFHTDAAQALGKIPIDVNQMGIGLMSLSAHKIYGPKGVGALYLRRRPRIRVEPQMSGGGQERGIRSGTVPTPLVVGFGAACEIAAKEMDYDHRRASVLQQRLLDGIRGQVDDIVINGSMEHRYPGNLNLSFAYVEGESLLMGLKEVAVSSGSACTSASLEPSYVLRALGVEEDMAHTSIRFGIGRFTTEEEVDRAIELTVHQVKKLRDMSPLYEMAKAGIDLKSIQWAQH

SEQ ID NO: 43943 - protein, 240 aa, Oryza sativa
MKSSSQEAGEEVSEISSQAASNNNETCNSSSGKVSLDLSLTVAAAAAAAASATESSTTDSGGTRPAATATATAREPARVFTCNYCQRKFFSSQALGGHQNAHRRERTLARRAVRLDAFPYGYADVASLPLYGAGLYPIGIQAHASVHHHHPGVAAPAGRAELRSARALLGPMPFFVQAAGDEDASFGWPGSFRPPPTAATTIPAAAAAPVAVNSGSSNSNHGGSVVVQAAADEPDLTLRL

SEQ ID NO: 43944 - protein, 439 aa, Oryza sativa
MDDAGRASAPAVVTVTASAAAPTPPLPPPPPPPPPSQLPATAAATDEPSHDPAALYGEGMWQQMTMSGSGAMQPGPYPERSGEPDCTYYLRTGLCRFGMSCRFNHPQDRNLAIASARMKGEYPERMGQPECQYYLKTGTCKFGPTCKFHHPREKAGIAGRVQLNTLGYPLRPSEKECAYYLKTGQCKYGNTCKFHHPELFNAMASSRGSPIYPSVHSSATAGPPYTGTMASWAFPRGSFIPSPRWQNPSNYAPMIVPQGLVQVPSWNSYTGQMMPVSSSESRLQSPGAQQTYGTSQQVDASAGNQGMLSPYRSSSYPVPQYALQRENVFPERPDQPECQYYMKTGDCKFGAVCKFHHPRVRSMPTPDCVLSPVGLPLRPGEELCKFYSRYGICKFGANCKFDHPTMAPPMGVYAYGSASTNVPMVRRLLQSPSASAYTS

SEQ ID NO: 43945 - protein, 133 aa, Oryza sativa
MNQLIVNLKKLISFTQSLWEDKDSLHILQSICTGAIPDGPVMDDRNTSVGPPIDKPEVPNEVLLPEAVPSGLHKHGVEAWVEFPHRALVHHQDRCEVLQVWDDGGLAAAHPSAGSTVGCAVDALAVGVAASHI

SEQ ID NO: 43946 - protein, 479 aa, Oryza sativa
MAAWNTSILLPPPPPLLSRAAVATPALNPYPLRLHRRHPQKPLCLPSESYPADTDADASSASLDSRPRRIALFVEPSPFAYVSGYKNRFLNFIKYLREMGDEVIVITTHEGVPQEFYGAKLIGSWSFPCPWYQKVPLSLALSPRIIGEVARFKPDIIHASSPGIMVFGALIIAKLLCVPLVMSYHTHVPIYIPRYTFSWLVKPMWLIIKFLHRAADLTLVPSVAIGKDLQAARVTAANKIRLWNKGVDSESFHPRFRNDEMRARLTNGEPEKPLILYVGRLGVEKSLDFLKRVMDRLPGSRIAFVGDGPFRAELQLMFTGMPAVFTGTLQGEELSQAYASGDVFVMPSESETLGFVVLEAMSSGVPVVAARAGGIPDIIPEDQEGKTSFLYTPGDVDDCVSKIERLLTCEELRETMRKAARKEMEKFDWRAATRKIRNEQYSAAIWFWRKKRAQLLRPIQWVSRRLFRPTPAPSTMNQS

SEQ ID NO: 43947 - protein, 677 aa, Oryza sativa
MAGAFRRSAALQAMAAFSVLALVVPDQVQGRGKCPSFSCGRLSYVHFPFRRQGDPAECGVPSYELTCADSNATIQIDKATYLVTDINYSDQYFWVVDASLDSANNCPLPRWSQTPYNENYRLGEDSHRRVQVQLSPDVDWFATFVKCSQEMNSSNVMYRPVACRSGNSSFVYVLTGLGSYLAENLEPSCGYLAMTPLALGGLENWRTATAAATLEDVNYEDVVRSMSEGFAVRFPFRSGGFIDCLRGLISDSNGEPTVYRIFVIVTNINSYFSICGRHATQLPHPFVVLLMLVPQTFWILRVISACRFVLVMLLMWTSVAYMYWKIKMRVDEVEKFLQLQQMLTPTRYSYTDIIAITSHYRDKLGQGGYGSVYKGVLLPGDVRVAIKMLKGDANCKGEEFISEVSTIGRIHHVNVVRLVGFCSEEIRRALVYEYMPQGSLDKYIFSSEKSFSWDKLNEIALGIARGINYLHHGCDMQILHFDIKPHNILLDNNFVPKVADFGLAKLYPRDKSFVPVSAARGTVGYIAPEMISRGFGAISSKSDVYSFGMLLLEMAGGRRNADPNAENSSQAYYPSRVYRQLTRQETGEITAAADMHELEKKLCIVGLWCIQMRSCDRPMMSEVIEMLEGGVDCLQIPPRPFFCDDDYIPAMESLYLSSEVELAAISEEEDESITELN

SEQ ID NO: 43948 - protein, 306 aa, Oryza sativa
MSSIAPSMRTRVRIPGYLSFMYHMFCCSHVVNSCFFSSIFFPDGVAMEEKEDSLRASVTEQDTEALLLRDVLINGILAIGTLGHNVNSLCPESCIEQDEPIIMCDEKVEQEKCEEEKAEAKQDTPVTAPSEPASALEPAKMHSSSMKEDNFMCFVKEEILMHGMEVEDVPNIQERPLLMLEKVEKVRTTLADLFAAEAFSSSDAEDKCYPKIVIVAGASTSKPTSCMEKMHHKKPTKPTSKPLKATRKLSRVWFSSSLLYLLSLVTLYFTSLEFITLCSMVSAPHLTHMFYHIATTGVSIMHLASL

SEQ ID NO: 43949 - protein, 806 aa, Oryza sativa
MFSIAAINESDTGGQWEPLAPTKEAQESALSQKYHEGLLKLQEKNYVKARELLEDVLKDPLISKIQADNIVSDQHLLQLRFLTLKNLASVFLQQGSAFYDNALRCYLQAVELDANDSVVWNHLGTLSCSMGLLSTSRWAFEQGLLCSPNNWNCMEKLLEVLIAICDEVACLSVAKLILRSWPSHHRALHVKKTIEDAEPVPFAPRGIDILEPKHAKLKFCNKRKSGDDETHHETVTKKSRQNAKLQLTEAKWMALLDGILSFLSSNNTKSNEDHGANTESQCDTKRSINGFAYNMMDVSLSTETLKTMESAGGNEHDLYHDGESVLSHDCRTAVKEKDTNSDREHPHERRSTRLERLRSRKSGKDEHESNGKDISHAITQFLDSFILKRTSIPEKIDCSGNGDASTPEALTYTPDREASDVKQFLSKISKNCGPLHIGYMLLEEIAQTNIPFQDYFVKFIELDKITRGWAQDRSAQCSLFLAELYYDQALCSGSPLASSELSNSSYHLCKVIQSVALELPFRTSDGAAKSTNLDLNMESHMEEVCSSDKTEKNASNMSRNSVNSVNSVSSNILCDETSECDSSSNTNCVFWIRFFWLSGCLSLSSDCKEKAYKEFNIALSLMRSSNEAKINREFVLLPHNKLVKLLTADRILREINLVKLESLLWHNDENINKITHTEFMELLPPLLLSTKDVYVGSAYGPPRESEKVISLELGALDVLISACENAKPMNIQVYLDSHRRKMQVLTVAAGMVGSVTTNEGKKSSDIEFMETMNRNRLESVVEAVKDVSRNASKAKAFVDQCDNPVS

SEQ ID NO: 43950 - protein, 469 aa, Oryza sativa
MRILRRFPRLLRRSNAAARSPAPMHRLISSPSLMASAAASWCWWSPLLARGGPVVRRVSRFPWEPRNMTTISRVKGDESYRRLPSQEKKHTAITQGMKTIDTRGTILEARAGDEKSNRDAASSEVSYIKYDVLGQSAKQDGCDEDDRRSETEEHVEEDEVLDPEEYTVNNILPKSRHRDGSIYRDIMDTPWKWEFHIADRNETRLEAMRFSNPTNCVIRSNGTCMSHVHCHMLQILSLELAKITLDGGSVELYGYIAVRDDLDPLLNYIVNCSRDDPIIVEQGSLINMEGPNRGIDMMDYALIEYDMRIKTGEQEKDDLQLIDGASMIGPGGLWNRPETICIPGDYGAVDITLSRFNCSAEATVEILISEVQSSFNLLLGCLTSDLDKEIRLFDGVISESRDLKRSVVAVMRDSFIDLKFKVGAFPSSFDQHYVSFKEKIHGYDTQEIKTDFALISVNVTWSTLPAGLK

SEQ ID NO: 43951 - protein, 301 aa, Oryza sativa
MASTAAFLSTLAGSTSLGGATPASGGGSGRSKTARFLRRRRRGGAVRAAVSGTEQAPETTKKKGGGGGGGDERVVQVHSAEELDGALRAAKERLVVVEFAASHSVNSSRIYPCMVELSRTCGDVDFLLVMGDESDATRELCRREGITAVPHFTFYKGAEKVHEEEGIGPDQLAGDVLYYGDHHSAVVQLHSRADVESLISDHRGEGGKLVVLDVGLKRCGPCVKVYPTVVKLSRTMADTTVFARMNGDENDSCMEFLRDMDVVEVPTFLFIRDGDIVGRYVGSGRGELIGEILRYSGVKVT

SEQ ID NO: 43952 - protein, 354 aa, Oryza sativa
MVLTIMEAKGKDAWGLLLVLLLGQLVAFSMAVSSFTSSLIATLGVDAPLTQSFFAYLLLTLVYVPILLKRRQKLQIPWYWYLALAFIDVQGNYLVVKAYQYSYITSVTLLDCWTVVWVVILTWYALGTRYSFWQIVGAGTCVAGLALVLLSDSKSADAQDPSKIPLLGDALVIAGTIFFAFSNVGEEYCVKKKDRVEFVAMFALFGLLVSIIQILIFEKKNLVAIAWSPTMLCLFAGFAVALFMFYSITPFVLKMSGSTLFNLSLLTSDMWAVAIRVLFYHQQINWLYYIAFAVVAIGLIIYSLNDHSSDSGTRTTANTEAAAQYQQLPGENNSTGIGSNDSQERKQEEEVHIC

SEQ ID NO: 43953 - protein, 610 aa, Oryza sativa
MLSPAATAVAAVRATAGSPAAVRGMHARILKEGLAHHPPNPAALVSAYAKSRLLPDALHLFDETPRRDIYIYSSLLTAVSHSASPELALPILRCMLSADALHPDHFVISSVASVFARLRSRRLGRQLHAHFVVSPYNGDDVVKSSLVDMYCKCGSPDDGRKVFDSMSAKNSVVWTALVSGYASNGRSEEALQLFRSMPGRNLFAWTALISGLVNTGESVGAVELFVEMRRDGVRIDDAFVLSIVIGGSADLAAFVLGRQLHGSTMRLGFLSNMIVGNALIDMYSKCSDILSAREVFEGITFRDVISWTTMVVGEAQHGRAEEALALYDRMVLAGAKPNEVTFVGLIYACSHAGLVQKGRQLFESMKNEYGITPRLQHYTCYLDLLSRSGHLLEAEELMTTMPYEPDEATWGALLSACTKYKDAEMCIRISDKLLELRPKDSSTYILLSNVYAVNGKWDSVAKVRKCMIGLEIRKEPGYSWIEAGREFRLFHAGEVPLDVREEIMVFLEEMVLEMRKRGYVPDTSSVMHDLEESEKEHHLFLHSERLAVAFGLIKSPPGSVIRVVKNLRVCVDCHTVMKLISEITHRKIVVRDSSRFHHFEGGKCSCSEFW

SEQ ID NO: 43954 - protein, 637 aa, Oryza sativa
MRSSWADSVANAEESAPATGAAPTPVANHQNSRPTRSAYVPPHLRGQAPTTTAAPAPAPGPAAVQPSASVQPSGYAAIVGGSRWAGPASGDGTGAVGGPRQSVGGRGGGGGGGGGWNSRPGWDRRDREPNPFANSEAEEATEVDFDTANTGINFDAYEDIPVETSGHDVPPPVNTFAEIDLGDALNENIRRCKYVKPTPVQRYAIPISIAGRDLMACAQTGSGKTAAFCFPIISGIMSSRPPQRPRGSRTAYPLALILSPTRELSVQIHEEARKFAYQTGVRVVVAYGGAPIHQQLRELGRGVEILVATPGRLMDLLERARVSLQMVKYLALDEADRMLDMGFEPQIRKIVEQMDMPPRGVGQTMLFSATFPKEIQRMASDFLADYIFLAVGRVGSSTDLIAQRVEFVLEADKRSYLMDLLHAQKANGTHGKQALTLVFVETKRGADALENWLYTNGFPATSIHGDRTQQEREYALRSFKSGATPILVATDVAARGLDIPHVAHVINFDLPNDIDDYVHRIGRTGRAGKSGLATAFFNEGNLSLARPLCELMQEANQEVPQWLERYSARSSFGGGGGRNRRSGGARFGGRDFRRDNRGGGGGGYGGGGGGYGGGGYGGGGGYGGGYGGGQGSTSSWD

SEQ ID NO: 43955 - protein, 641 aa, Oryza sativa
MGKNLRIKTGNRAPLLAQGETSRALSDLEEGSNVQPENVGFCRVIKLARHDAGKLVIATMALLVASLSNILVPKYGGKIIDIVSRDVRRPEDKAQALDDVTGTILYIVIIVVTGSVCTALRAWLFNSASERVVARLRKDLFSHLVNQEIAFFDVTRTGELLSRLSEDTQIIKNAATTNLSEALRNITTTSIGLGFMFATSWKLTLLALVIVPVISIAVRKFGRFLRELSHQTQAAAAVASSIAEESFGAIRTVRSFAQESHEVLRYGEKVDETLKLGLKQAKVVGMFSGGLNAASTLSVVIVVIYGANLTINGYMTTGSLTSFILYSLTVGSSVSALSGLYTTVMKASGASRRVFQLLDRVSSMANSGDRCPTNENDGEVELDDVWFAYPSRPSHMILKGITLKLTPGSKVALVGPSGGGKTTIANLIERFYDPLKGRILLNGVPLPEISHQFLHRKVSIVSQEPVLFNCSIEENIAYGLEGKASSADVENAAKMANAHNFICSFPDQYKTVVGERGIRLSGGQKQRVAIARALLMNPRVLLLDEATSALDAESEYLVQDAMDSLMKGRTVLVIAHRLSTVKSADTVAVISDGQIVESGTHDELLSRDGIYTALVKRQLQGPRFEGTSNATAEIEPISNGQ

SEQ ID NO: 43956 - protein, 44 aa, Oryza sativa
MLDMHHLTVLIASWIKLLLHSTQPTRTHYEAVKTTLYRQERAWL

SEQ ID NO: 43957 - protein, 640 aa, Oryza sativa
MIAHGDGPSSGFFWLNAAEMQIDVLAPGWDGASSTENGRIDTLWMAEAGVVDAFFFVGSEPKDVIKQYISVTGTPSMPQQFAVAYHQCRWNYRDEEDVAGVDSGFDEHDIPYDVLWLDIEHTDGKRYFTWDHSAFPNPEVMQGKIADKGRKMVTIVDPHIKRDSSFHLHEEATAKGYYVKDATGKDFDGWCWPGASSYPDMLNPEIREWWADKFSYENYKGSTPTLYIWNDMNEPSVFNGPEVTMPRDAVHYGDVEHRELHNAYGYYFHMATADGLLKRGEGKDRPFVLSRAFFAGSQRYGAIWTGDNSADWDHLKSSIPMVLTLGLTGMTFSGADIGGFFGNPEPDLLVRWYQVGAFYPFFRGHAHHDTKRREPWLFGERRTALMREAIHMRYSLLPYYYTLFREASVTGVPVMRPLWLEFPDDKETYNNGEAFMVGPSLLAQGIYEEGQKSVSVYLPGEELWYDLRNGSPYKGGVSHKLEVSEDSIPSFQRAGAIVPRKDRFRRSSTQMVNDPYTLVIALNSSSAAEGELYVDDGKSYDYQQGAFIHRRFVFADNKLTSMNIAPKNLGNKKFSTECVIERIIILGVSSGSKKAIVEPGNHEVDIELGPISLRSGSSSVAPTVRKPNVRVVDDWTIRIA

SEQ ID NO: 43958 - protein, 595 aa, Oryza sativa
MDAAAPEATGGFCGGGGGLSTGRKLVPWSSWAEWRHVRDGLFSASPAAALRRIAAWRSRGTLPVPVDVTAAFVEIRLRDPFFRSVMAVDDALESEEMLSMLYSMAIMRLVNGFVENPHKKTGYSISELAEAVGIPRVLVDIRHESSHRTLPSLRLLRLAAIKAFDWLKCIYWDSQTNAIPDVQVEVRSKLHEINNFMKGKDSMKAKSGSKRKRSEKMISRNIKYVRRLYYACPSEVAFVILDFFQRGAPESSENSDVLETDKDVDQSSDIHSEISNNDMRTIITKLSEKEPRLLLGILKSVIETIETMEDLENKGEYNASLPAKVELLSSHVLWLVTKLKELKDSGCIGVVHEIGVLSSDRNAVPRFCLAKLLRKLLSLSIIDERCIIDAALVLIEMATNNVQEKLRKLPMLSLGKVARDSTLPEPTKETESVEEATEKLEMFKSRLKQKDLRLAENDTGASLNTIMPEKRNRWSTAKSWTPCPIGMIPCSFSSVAVLPTLDVVDHESRDEILEQHVSVEPDDHTERIGYYSDPEKQLDAERIPELSRPSPEECEISDMPELAFPLKGRLLVGGVWKMVSEEELLFIKSKMKILL

SEQ ID NO: 43959 - protein, 1200 aa, Oryza sativa
MEGSMFNLPGRLDRLLRRHGSMLPKGAEEEIPLIKQDLEEIISVLHGHCSKPKLEDHAMVVRCWMKEVRELSYDIEDCIDQYEHAATATRSHTGPNICRRKFNQRHGKMIPWVPWKLKQRLWMANKIREFSLRTQEALQRHTMYNNLGGITIASTTGGDVCSATPWHPTQFREHTDNVCSVGIDADGMEAALNDLNKLKNLLASIPTASLVQFREHANKVRHIHPDVEAILNKLKNIPTGITTTSTTTRGDVSSTSSRQPTRFMESAGLVGINAAVNKLENLLDVCGEEKLKVVSIVGVGGVGKTTLANKLYCKLQRQFECWAFVQTSQKTDMRRLLINILSQVQPHQSPDNWKVHSLISSIRTHLQDKRYLIIIDGLWATSTWDVIKCALPDGNSSSRILTTTEIEDLALQSCSYDLKFIFKMKPFGEGDSRKLFFSIVFGSHSKCPPEVSETLYDIVRKCGGLPLAIVTVASLLASQLEKQEQLDYINKSLGYGLMANPTLEGMKQLLNICYNNLPQHLKVCMLYLSMYQEDHIIWKDDLVSQWIAEGFICATEGHDKEEISRAYFDELVGRKIIQPVHIDDSGEVLSCVVHHMVLNFVTYKSIEENFIIAIDHSQATIRFADKVRRLSIHFSNVEDATPPTSMRLSQVRTVAFFGVLKYMPFVMEFRLIKVLVLHILGDEDSIGIFDLTKISELVRLRYLKVTSNVTVKLPTQMQGLPYLETLKIDGTISEVPTDIYLPRLLHLTLPAKTNLPSGIVHMTSLRTIGYFDLSCNSAENLWSLGELSNLRDLQLTYSEIHSDNLKDNMKYLGSILGKLRNLTSITLSPPGSSCPDTLHIDRTRINVDGWSSVSSPPALLQRFELLPCVCIFSNLPNWIGQLGNLCILKIGIREVTSNSIDVLGVLPKLTVLSLYVHTKPAERIVFDNAGFSILKYFEFICSVAWMKFEMGAMPSLRKLKLGFDVHIADQHDIIPVGIEHRSGLEEISAKIRVACTAHDHCRRFAESALTNAFMMHPGRPSVNIRCVDWTFHDKDNDCVGTREEECRTPMKQEHFVKEDLSEKSAVLQNEHDEEAHKFVDRRYYPIMDAAEIRRCPWSVNEEQEQPVLIYDARTKISQSSSMHSEFWAAVQRLTGPAATPAKTKRHLHLTTSPELEDGFLPVRSLVFPSAPDPRCNMKKKKMRAGPGGGRAVRSNWAPKS

SEQ ID NO: 43960 - protein, 114 aa, Oryza sativa
MQGERDDEAAGCFPAGGGKGKAPSPPPPPPSHEFDGGHRRGLIRRRRRWRPVRGEVFAVGFMVAGAAYFLLADALAVGRDPADGGDPSGGWFFAAYVLWITGLNLLYVLDYLMN

SEQ ID NO: 43961 - protein, 167 aa, Oryza sativa
MKLRSCPVDDSGIFGFDYPVGVGLAIPVTWTQKTSDHVKKEQTGFSGRSSCSSQDECNSHVTEDIPRNVPGCKVECDEHDEKLLKSAEQDINCLQNGKASDYIPLPGMTHYSWTDEEAQTFLLGLYIFGKNLVQVTKFLQCKTMGEVLSYYYGEFFRSDSYNRWAAS

SEQ ID NO: 43962 - protein, 197 aa, Oryza sativa
MEETAAAAAEKATSYSYWVREATGDAAPLPAPRKIDAADLAAKPAPTTLGSVWNKAGTWEEKNLNSWANGRIKDLLGSLDPLEFSTGKASVYEVSKCSGDAFLVTVRNKKRVGYTYELGLKFKGEWLIKEENKKVKGYLDIPEFSFGELEDLEVQISFTDIKDLSSDNKAQISKDLKSFLAPIREKLRKFEEELKDR

SEQ ID NO: 43963 - protein, 251 aa, Oryza sativa
MDWMPPPKPTSPRSPPLLWDWADAAVPGSSSGEVSAAAAAAAAHPGRRRKEKRGRAEEGGGGGGEVRCQVEGCGVELVGVKDYHRKHRVCEAHSKFPRVVVAGQERRFCQQCSRFHALSEFDQKKRSCRRRLYDHNARRRKPQTDVFSYASARPPSSLLFDDNRQISFVWNKAPLSHVRPFAISPWESSSEVGTTDGHIYLDKSHISKSLPAFNTDIDELLPMKDFSAATIWMFFGVLFIRTAQESCMSFH

SEQ ID NO: 43964 - protein, 445 aa, Oryza sativa
MDPNEPCWRMNSSFSPPMSRRWDCRNPSDGLPHRIHDAPPYVSSLSSHSKGSRSAFGSDQYLNHQHSVSDGALSYFGSPADSLQAPRWTPSLQRFDLGEFSTPAGSRPDTSGYPQSSERQLTAVSSFSSASPFSESSQLASSSKPPYLHLPRNHLGRRSFMSKPVYPLVFRNPVSEAEASGMPEASNIGRTTPSDDSPVWRRSLASPELKFHNALSEFRKVEASPEPNTSSRREGFRWSNASSYDFGYDGDAIDISDHISVESQRSPTSSVRFLKCGLCERFLRQKSPWTSNRIVQNSDMPVAAVLPCRHVFHADCLEESTPKSQVHEPPCPLCTRGTDDEGCVSFSEPLHVALRSARRNQGNSFSLGGSGGSTSANPSRSDHGLKRNQSALVARRSGTMFRNRFKKQFSFKGRFGKDLFGGRVFKKVGSSSSSGQQDDRQQPKA

SEQ ID NO: 43965 - protein, 92 aa, Oryza sativa
MAEQLRQRVIVFTLVVVACLVLATTTKVADARMLKRMERDGDAVVESPAVDLEAMDGSTEGAGDGGLQWLKSVSLDMLGGIKDSGPSPGAGH

SEQ ID NO: 43966 - protein, 118 aa, Oryza sativa
MPPSLKPRRQASMSAPRPSAGAATVCCGWYPSITVRRSSRSAITVVPWCAHGQHTNCLMKCMIEVHSCYCFNPYYYLIFTLFFTVCCDLKLCLCKLKLNCSLVSNTSYGADKYFIFAG

SEQ ID NO: 43967 - protein, 683 aa, Oryza sativa
MSSSSSSTTAASPAAAAADGGGTGEKPVAAPYGSWRSPITADVVSGADKRLGGIALAGDGRLLWIEGRPEEKGRMVIVKEDDKPVDIIPQEFAARTLAQEYGGGAFSVKDNVVVFSNYKDQRLYKQSTKTGVPVPLTPDYGGPDVSYADGVFDPHFSRYVTVIEDRRKSSLNPTTTIAAISLSNGVVQEPKVLISGNDFYAFPRIDHNNKRMAWIEWSHPNMPWDKSELWVGYFSESGDLTKRVCVAGSNPMLVESPTEPKWSPKGELFFLTDRGSGFWNIYKWVEHTNEVISVYTLDAEFTRPLWVFGISSYGFLGESNHIVFSYRQHGRSYLGVLDSDIGSVSLLDTPFTDLSNVVTGNDYFYIEGASATVPMSIAKVALNEDRTKVVSFSIIWSSSSDVVQYSSFFSAPEFVEFSTSSTGQKAYAYFYPPSNPNFQGLPDEKPPLLVKTHGGPTAETRGILDLSVQYWTSRGWAYLDVNYGGSTGFGREYRERLLGKWGIVDVDDCCSCARVLVESGKVDERRLCITGRSAGGYTTLASLAFRDTFKAGASLYGIGDLSLLRAETHKFESHYTDNLVGNENAYYERSPINFVDKFTCPVILFQGLDDKVVPPDQARKIYKALKEKGLPVALVEYEGEQHGFRKAENIKFTLEQQMVFFARLVGNFKVADDITPIKIENFD

SEQ ID NO: 43968 - protein, 151 aa, Oryza sativa; identical to SEQ ID NO: 32970

SEQ ID NO: 43969 - protein, 711 aa, Oryza sativa
MSGDGNLYILDHATNSIIWSTDHVVNTTTETGMNTSATLLNSGNLVIRNPSGVVSWQSFDNPTDVVLPGAKFGWNKATGLNRLGISKKSLIDPGLGSYSVELDTTGARGLILKHRNPSMEYWSSDRALIIPVLKSLFEMDPRTRGLITPAYVDNSEEEYYIYTMSDESSSVFVSLDVNGQIKMYVWSRANQSWQSIYAQPVDPCTPSATCGPFTICNGNSTQTCDCMESFSVKSLWDWELDDRTGGCIRDTPLHCVSDKNMTSSTDMFQPIGLVTLPYDPQIMQDATTQGECAQACLSDCSCTAYSYQNSRCSVWHGKLLNVNKNDGIYINADNVLHLRLAATDFQDLSKNKRKTNVELVVGASIVSFVLALIMILLMIRGNKFKCCGAPFHDNEGRGGIIAFRYTDLAHATKNFSEKLGAGGFGSVFKGVLTNMATIAVKKLDGAHQGEKQFRAEVSSIGIIQHINLVKLIGYCCEGDKRLLVYEHMLNGSLDVHLFQSHAAVLNWITMHQIAIGVARGLSYLHESCRECIIHCDIKPENILLDISYFPKLADFGMATFVGRDFSRVLTTFRGTVGYLAPEWISGVAITPKVDVYSFGMVLFEIISGRRNSPEVHTSGNYDATYFPVRAINKLHEGDMSSLVDPRLHGDYNLDEVVRVCKVACWCIQDDEFDRPTMREVVRVLEGLQELDMPPMPRLLATLTNFSAVASM

SEQ ID NO: 43970 - protein, 165 aa, Oryza sativa
MVGRGSPKLSMIPKGSPKFGRMLSAASTRMKTVSPQSILAKKTASSPKGNQVKQRAIWNAELEKSLVEILFEYKVNGCRGDNGWTTKGWNRMVKEFHAGNKCVSFTKNQVQEEGQLKRDYKMLKAVRQQSGSSWNEKRCMVEGSPAMWQNLQIISGFVINIFLCM

SEQ ID NO: 43971 - protein, 552 aa, Oryza sativa
MAFPDDDEKMKGCRPKLFGTKDKKVVKRADYQSCSAVKSGPSSSKSQSSSPFRTLTEVRSIRLSHLLGHSSSTTKTEPFRIFVSTWNVGGNTPTAELNLDDFLPADDNSDIYVLGFQEIIPLNAGNVLVVEDNEPAARWLALINRTLNKPVDSNADIFQHKPSSSLDSTSSLSSSNLDASFSSRTRTASGSSAIFQKSSLKSIRKPYMPTQRKLLKLCNCSVEMTRKSYKDACFGCPQAYANETDSSEDDTDDRSNDPCGYIVDGMNSAASASRDQLKYNLVSCKRMVGIFITVWAKKELVHHIGHVRTSCIGRGIMGYLGNKGCISVSMTVHQTSFCFICSHLASGEKEGDELRRNLDVLEILRLTQFQRICRAGRRIPEKILDHDRVIWLGDLNYRISLSYEDTKKLLTENNWDALFEKDQLNIERKSGRVFKGWSEEKIYFAPTYKYSSNSDSYAGETATSKKKRRTPAWCDRILWHGDGIVQLSYFRGESKFSDHRPVCGTFIVDVEIQESRSKRRSSNTNIRIGAEELLPTSKSKANKNKGNKGSGT

SEQ ID NO: 43972 - protein, 195 aa, Oryza sativa
MGDVSLNPPINAEPLTKGDQFLDLMSDGWTNERHSLYISSMEASFMEQLYRHDHHGLDRNRSHAGGAIGFRVHREGVCDNLRSERNDAHAHDGGMSCFPENPWIRRFRPRDAGVNRKNDAVGFSVDDDESGTDMVRQRVRVHGREAKSCAGGILADKSTVSDQNFPDEDVEVDSEPCKRRRRPTNSTATPHDQTT

SEQ ID NO: 43973 - protein, 316 aa, Oryza sativa
MCELGSGGVSLVSMAMRTLGTFGVRTACISYLFIHYALLVAYVARSSEIITNSVGIPLWESAALFSLAFGGLCYFGSQRVIGAVNGFLVFSILASFTTLVVVASGNLQWSSLLEANFAAAPQSIPIIALSFVYQNVVPVLCTNLEGDLSKVRKAIVVGTAIPLALFLIWDAVILGTLPGLAGDGTIIDPLEQLRSSNGTVGPIVEAFSFLAIGTSYIGFVLGLSDFIADLLKLPGGQNKPLPYLLTLLPPLVLSLLDPEIFFKALDFAGTYGGKDPFKLSLIMNRCREETCIVLCYFKIYFTRRLVKLSCNETNQS

SEQ ID NO: 43974 - protein, 696 aa, Oryza sativa
MVNFGKKLMADQVEEWKGYYINYKLMKKMLKQYVQQTQLGGKDREQVLKEFSRILDEQIERIVLFLLQQQGHLANRIEELGEQRAALLEQHDISQVFQLREAYREVGRDLIKLLRFVDMNATGIRKILKKFDKRFGYRFTDYYVTTRANHPYSQLQQVFKQVGIVAVVGALSRNLAYLQDHEGSVLSIYDHPSVTLKDPIIDQVNHAVQKLTHATSFLQFLGQHALIIQEDVQSGSEDLVDDQSYHFMSLILNLVNTFLYMVNTYIIVPTADDYAVSLGAAATVCGVIIGSMAVAQVFSSVYFSAWSNRSYFRPLVFSSIMLFAGNLLYALAYDLNSLTVLLIGRLLCGLGSARAVNRRYISDCVPLKIRLQASAGFVSASALGMACGPALAGLLQTRFKIYSLTFDQSTLPGWVMCIAWLVYLLWLWISFKEPGHFAKSSDTAQPAESGHQVNANLEEGLAQPLLTGSEEGQDQNAEDNDDNEEESKNSHGPATSISSAYKLLTPSVKVQLLIYFMLKYAMEILLSESSVITTYYFNWSTSAVAIFLAILGCTVLPVNAIVGSYITNLFEDRQILVASEIMVLIGIIMSFRYTPHYSVPQYVLSALITFVFAEVLEGVNLSLLSRVMSSRLARGTYNGGLLSTEAGTLARVVADATITAAGYLGPDLLLNITLLPPLVICIASLVATFCTYNTLY

SEQ ID NO: 43975 - protein, 579 aa, Oryza sativa
MEEDSGRSISTTGFLRRGSSVSLKDQGNEERPNKTKLNPMNARWADSKEKPRYLREPFRSSGTKAACPSSSKAPVRKYFEEKQGRTFLGEADNAESSSRRTEANRLQCSKKAVVEEDVHPYGQQDEPEDLLSTSTTEDQPAELDPELLDSSVSSGVSAHAIGSVVRNAALRSKSRQQKGKEELCQIRPQTASAFVNRSTIPRNSTNGVKSSNAAGPGVQRRTLKNLGCTSISDVLPSGCSSANSIHNKRAEVMRNRAFDGESSSRPRGLNGHSSLGHSPAMYSGITGPRVRTAEQSASQQTRTSSRSIQESADSSRIRRPSTQHARVRVPNEREDSVFALRETLARDRQPEWAHFSLGEAAPRRSMRPFSMELPHEIYSSSRQGSSNQTARSRSSYRPDESPPQMFHGLLVERENYRRINMEGIAEVLLALDRIEQDDELTYEQLLVLETNLFLSGLGLHDQHRDMRMDIDNMSYEELLALEERIGSVSTALSDEQLVKCLKRNVYKLPNSDLEANRAVLDDAKCSICQEEYIEGEEVGRMQCEHQYHVSCIHEWLRQKNWCPICKTSAIPSEMDKGGT

SEQ ID NO: 43976 - protein, 252 aa, Oryza sativa
MALASTSATASAAVLKTPFLGGKRALANAVGVAGAKPAPRRALVVSAKKSWIPAFKSDAEFINPPWLDGSLPGDFGFDPLGLGKDPAFLKWYREAELIHGRWAMAAVLGIFVGQAWSGVPWFEAGAQPEAIAPFSFGSLLGTQLLLMGWVESKRWVDFFNPDSQAVEWATPWSRTAENFSNATGEQGYPGGKFFDPLGLGGETRDGVYIPDTDKLDRLKLAEIKHARLAMLAMLIFYFEAGQGKTPLGALGL

SEQ ID NO: 43977 - protein, 141 aa, Oryza sativa
MEPYLRGDVSPIMDISSESIELGLRISKLRESMCNLHSLQMKLKVPEDEPLQTNIKASLLWSEKEIFEEYNEGFIPALPERLSFAAYQTVSGMSEAELLSLQKYKIQAMDSTNTLERLNSGIEYVEHNIGMIAARLAIQNI

SEQ ID NO: 43978 - protein, 492 aa, Oryza sativa
MSSDSNSISSALSQTTPVLRLRVWVLIAIGIGILMAILFIIALWLSMRRKKKTAVGFDGRSHMEIPIVSKDINVDRVDAQSLHDSGTPIMPVQDKYEQMKGVSHLAESRSVDVDAFSQCSSVYNIEKAGSSYSEDYSSSGPGRKGSSSYGYVSASPLVGLPELSHLGWGHWFTLRDLEYATNRFAKSNVLGEGGYGIVYKGRLMNGTEVAVKKILNNVGQAEKEFRVEVEAIGHVRHKNLVRLLGYCVEGIHRMLAYEYVNNGNLEQWLHGAMSGGILTWENRMKILLGTAKALAYLHEAIDPKVVHRDIKSSNILIDDEFNSKVSDFGLAKLLNSDSSYINTRVMGTYGYVAPEYANSGMLNEKSDIYSFGVVLLESVTARDPVDYSKPADETNLVEWLKMMISSKRAEEVVDPNLEIKPPKRALKRAILVGLKCVDPDADKRPKMSHVVQMLEAVQNAYRQDQKRPSSQMGSVDVESQQSAEEISNSADS

SEQ ID NO: 43979 - protein, 705 aa, Oryza sativa
MGTASGDQPAGASSDKLRHVESMSELPSGAGRISGINAVVLGESLAAEEHDLVYPSAEFSADALVPSPKKYQKMYERSINDPAGFWSEIADAFYWKEKWNPSEVCSENLDVTKGPVQISWFKGGKTNICYNAVDRNVEAGNGDKIAMYWEGNEPGQDGKLTYSELLDRVCQLANYLKSVGVGKGDAVIIYLPMLLELPIAMLACARIGAVHSVVFAGFSADSLAQRIVDCKPKLVITCNAVKRGVKPILLKDIVDAGLAESEKQGVAVGLCLTYENQSAMKREDTKWQAGRDVWWQDVVTSFPTKCDVEWVDAEDPLFLLYTSGSTGKPKGVLHTTGGYMVYSATTFKYAFDYKPSDIYWCTADCGWITGHSYVTYGPLLNGATVLVFEGTPNYPDSGRCWDIVDKYKVTIFYTAPTLVRSLMRDGTEYVTRHSRKSLRVLGSVGEPINPSAWRWFYNIVGDSRCPISDTWWQTETGGFMITPLPGAWPQKPGSATFPFFGVQPVIVDEKGKEIEGECSGYLCIKKSWPGAFRTLYGDHDRYETTYFKPFAGYYFTGDGCSRDKDGYHWLTGRVDDVINVSGHRIGTAEVESALVSHPKCAEAAVVAVEHEVKGQGIYAFVTLVDGVPYSEELRKSLILTVRNQIGAFAAPDKIHWAPGLPKTRSGKIMRRILRKIASKQLDELGDTSTLADPGVVDQLIALKDC

SEQ ID NO: 43980 - protein, 884 aa, Oryza sativa
MLLNLPKAVKPIGEWFLSSARAACIGVDVYPSHFASLLKECKSANTVHQIHQQIIASGLLSLPTPLLSVSLPALPSEPFISPRSLGTGVVASYLACGATDYALLVLERVTPSPAVWWNLLIREHIKQGRLDSAINVSCRMLRAGTRPDHFTLPHVLKACGELPSYRCGSAFHGLICCNGFESNVFICNALVAMYSRCGSLEEASMIFDEITQRGIDDVISWNSIVSAHVKSSNAWTALDLFSKMTLIVHEKPTNERSDIISIVNILPACGSLKAVPQTKEVHGNAIRNGTFPDVFVGNALIDAYAKCGLMENAVKVFNMMEFKDVVSWNAMVAGYSQSGNFEAAFELFKNMRKENIPLDVVTWTAVIAGYSQRGCSHEALNLFRQMIFSGSLPNCVTIISVLSACASLGAFSQGTEIHAYSLKNCLLTLDNDFGGEDEDLMVYNALIDMYSKCRSFKAARSIFDDIPLEERNVVTWTVMIGGHAQYGDSNDALKLFVEMISEPYGVAPNAYTISCILMACAHLAAIRIGKQIHAYVLRHHRYESSAYFVANCLIDMYSKCGDVDTARHVFDSMSQKSAISWTSMMTGYGMHGRGSEALDIFDKMRKAGFVPDDITFLVVLYACSHCGMVDQGLSYFDSMSADYGLTPRAEHYACAIDLLARSGRLDKAWRTVKDMPMEPTAVVWVALLSACRVHSNVELAEHALNKLVEMNAENDGSYTLISNIYATAGRWKDVARIRHLMKKSGIKKRPGCSWVQGQKGTASFFVGDRSHPLSPQIYALLESLIDRIKAMGYVPETNFALHDVDEEEKNNLLVEHSEKLALAYGLLTTSPGCPIRITKNLRVCGDCHSAFTYISKIVDHEIVVRDPSRFHHFKNGSCSCGGYW

SEQ ID NO: 43981 - protein, 525 aa, Oryza sativa
MVTQLTYLAASAGVCLASALAIALLSIALYIIGVVASFAVLCAKEFAERAHDRPPLVGTVFRQLKNFDRMFDEHVNYATAHRTSRIVYPGHCEVFTSDPAVVEHVLKNSFSKYSKGDFLTTAMKDLFGDGIFATDGDMWRHQRKLASYEFSTKVLRDFSSDTFRRNAAKLAEKISCAAANRISINIQDLLMRATMDSIFKVGFGFELNTLSGSDESGIQFSKAFDEANSLVYYRFVDIMWKLKRYLNIGSEAKLKRNIQIIDSFVMKLIHQKREQMKIAADYKTKEDILSRFVLASEQDPGTMDDRYLRDIVLNFLIAGKDTTGNTLTWFFYLLCKNPIVQDKVALEIREFVEWSKEDNTIESFTKRLDEGAISKMHYLQATISETLRLYPAVPVDAKMADEDDVLPNGYRVVKGDGINYMIYAMGRMTYLWGEDAQEFRPERWLVNGVYQQESPFKFVSFNAGPRICLGKEFAHRQMKIMAATLIHFFKFRLEDESKEPIYKTMFTLHIDNGLHLLANPREISP

SEQ ID NO: 43982 - protein, 444 aa, Oryza sativa
MSGGGGGGGGGGGGSPNNTEWRFNQTLRNVQGMLKGRSFPGKVLLTRRSEPLSPPEYSPRYENDRDEYEQNEGSQEGKGQASGNTADSMSAKKSNPPSTSSTNSLPDAQGLVSGARATDSARIAKFTNELSRPAVILDKLRELSWSGVPPYMRPNIWRLLLGYAPPNADRREGVLTRKRLEYVECVSQYYDIPDTERSDEEINMLRQIAVDCPRTVPDVTFFQHPQIQKSLERILYTWAIRHPASGYVQGINDLLTPFLVVFLSEHLEGNMDTWSMEKLSPQDVSNIEADCYWCLSKFLDGMQDHYTFAQPGIQRLVFRLKELVHRIDEPVSKHMEEQGLDFLQFAFRWFNCLMIREIPFHLVTRLWDTYLAEGDYLPDFLVYISASFLLTWSDKLKKLDFQEMVMFLQHLPTRNWAHHELEMVLSRAYMWHTMFKSSPSHLAS

SEQ ID NO: 43983 - protein, 633 aa, Oryza sativa
MTIWYQSIDPGEATLYISPSAAGRSDGEAEYRLWQGLNGDSGVACLAESGARRDATAVNKLDQGVTNWRPQVEAAVKELREEVGDIRQQMDLLGKSQSAPPATSSPRVPLTDEERKAPLLPTPPASRVAAAGDSGDKWASGRQHPHEHRGRAPGVVTTVVPTSVKGTFSSPAPSLGILDWENDFDSGERRFNHRVPKLDFPKFDVSDPHDWRMKCEHYFDVNNTYPGLWVRVSIIYFSGRAASWLRSTRAHLRFPNWEDFCAAVSDKFDRDQHDSLIRQMDQIKQTGSVWEYYERFDELMNQLLVYDPGVNMCYLTHRFIDGLRREIRNAVLLQRPKNLESALAVASLQEEVLESSDSTPVKEGKKFESSGQHKTGGNFKGAFPLPLPPGRHLGVIQSARVDEKKEGEIKRLSASSEKVSALKAQRRAQGLCYICAEKWSPTHKCANTVQLHAVQELFSVLHEACDEAVCNPENSVLSDSQVLMAISVHAVQGSEASGCMRMLGQIQGKDVFILVDSGSTASFISARVAEGLSELSQIATNLQVKVADGATLHCQSEIPACEWSTQGQKFCTTLKILPLGNYDMILGMDWLMQHSPMTVNWVTKSLTIEGRNPVVTLQGILSNTAQCGLIPSK

SEQ ID NO: 43984 - protein, 811 aa, Oryza sativa
MDHDSLQNTMEHPVPGEEHEEDNSMKVDVAFDGVHSPFRYRHKKRSKVWEEYKPIFLNGKVQFAECLYCHNRLSCKDSNGTSHLWRHQKICPGKEEAAQRRQKDSYFPCVLVNENDPVSPHDPVNDVITETLSDINSVTPSGNRFTSKVWKEFTLVYIEGKLQAADCIHCQKRLSANKFGGRSHLSRHLITCAGRRGRGGGQIHQKGLFYPSSVPSLKSRVQDELSPALTNGKVQIAEYSSKLLRASSSGDSTPKPIRVVPAEHSVPTPDYTSLMKQRTSFVTTPAGQETSDPDLVGMIALHGYPLSIVEHEEMMRFVKKLNPVVNLVSRNAMEEHCLTLFQKEKENIKGKIAHFSRRVSLSASIWTPDGPETTVNYLCLTAHYIDEDWKVHRIIIKFGMFWSAPADLERMIHCMEACVPESESGSYNVILDAIRDWNLDQKLLSLTSVGEVRGDTNTSLLKEMLIEKKCLPIGGTLFNVACVDYVLNSIVFKVQADILRLVGDIVMDFLVSLTQQQLLEVISQTGLKCPQEDAKWWHKLYFRLEVLLHFKKSFPSEERVSPEDTKTAESVCKILRTIYRVIEVISSPSSPTANIYFNEIWKVRTVLQEEALNDHREIATVAMVMQEAFNEYWQNSYLWLAIPVVLDPRFKFSFIEFRLKRAFGTDSASYLSVIRETVRELFNEYCHSLNQASDVVSNSEALCADDNDSLEDWDQHLHEQASRQLSSELDDYLEDGLVPRKDDFDILNWWMTHSTKYPTLATIARDILAMPASAVQSEAAFSSSGPVIPKHQSTLNIRTIEALVCTRDWMR

SEQ ID NO: 43985 - protein, 275 aa, Oryza sativa
MAFVSAAAAATAAAAFLPGVSSASRAGTPLLSLQRQPLAGSLRAAAQGSSASSGQVVMESKVKAKKKKGSGAGNLPGAIDAEIREAQDYLAIDEQEPVPENFPFEILDEEGMSVVILKRDYKDEKIEVIVSMPNLEGGPEFDDEEAEGEGKNASKDDEDEEEDESAGDSSVSLKVTVSKGSGPKLEFTCTAFREEITIDDMLIVENAATEGDEKFTYEGPEFTELPVNVQKGLFKYLEQRGITLPTTNYMHDYMVTKQTKEYVGWMTKLKDFVRQ

SEQ ID NO: 43986 - protein, 111 aa, Oryza sativa
MSYHMAQPTTSVSYYAPRPEPAYSMQQHPPPPAYSAPPPQQQQYPPPSPSPQPQAMQQQWSPSYLYMPYPHSSPDTYYRDYYSPPGTAHAPPLQDEYRMFDDENPNACSVM

SEQ ID NO: 43987 - protein, 334 aa, Oryza sativa
MSSMADMACTVQAEVIFLGQFRHPHLVKLLGYCCEDEERLLVYEFMPRGSLENHLFKRISATVPWGTRLKIAIGAAKGLAFLHGASTPVIYRDFKASNILLDSEFTAKLSDFGLAKMGPEGSETHVTTRVMGTHGYAAPEYVMTGHLNIKSDVYSYGVVLLELLTGRRAMEHVRGRSLHADQVVKIVDWTRPYLGSSRRLRCIMDPRLAGHYSVKAARAVAHLAVQCTRPRREDLAVTVAAARGRASTAASLACVHGEAVGGGDVSSPSRLKKPISWSSSPPMARSYPGRGELRERVDAAACAEDDGAMATCGSRPRAYLSRGVVNWANWWLMR

SEQ ID NO: 43988 - protein, 268 aa, Oryza sativa
MFSGHSRDYPTNSIFYSESQEQKHVKEETHRLRQLLVEIHTALEAAKGCAITNSWLLRWLRELEDAACRGDQTLRNWRDMSSKVSSIIDSSNSFKRIKIAASQLIPSKESTMKVSATVKKLEAVASGIPKFTQLLSLQNDQAVLHHRPVIIFVSIHDRVVGRVDERKQAIEFLLHIDKNGSSSPDGCVLPIWGVKGVGKTTIARLVCDDRKVRSHFSMIIWVNCREYTSPAMALVKSLCKKLGLSSNVTINLSSVIRKAKNGEISTCS

SEQ ID NO: 43989 - protein, 317 aa, Oryza sativa
MLRAVARCCGHWPPGAAAADGMLWQTELRPHAAGEFSMAAAQANLAMEDQAQVLASPAATLVGVYDGHGGADASRFLRSRLFPHVQRFEKEQGGMSTEVIRRAFGAAEEEFLQQVRQAWRQRPKMAAVGSCCLLGAISGDTLYVANLGDSRAVLGRRVVGGGVAVAERLTDEHNAASEEVRRELTALNPDDAQIVVHARGAWRVKGIIQVSRTIGDVYLKKQEYSMDPVFRNVGPPIPLKRPALSAEPSIQVRKLKPNDLFLIFASDGLWEHLSDDAAVQIVFKNPRTVSSDNIYSIRSFHHREYIFPVNERGVLTQ

SEQ ID NO: 43990 - protein, 301 aa, Oryza sativa
MADEYDRSSYRRSGADDEEGGYNKTNTGDYGRSGDDYGRDTGLFNESGNDDNESGYKNTNTDEYGSTGSYNKSNTDDLTGGFNKSGTDDYSGGGGYNKSGADDYSSSGGYSKSGTDNYSGSGGYNKSGNNDYSGSGGGYNKSSAGDYGSEYKDSSTGDYGRGDEYKKSSSDDYDGGYKKSSSNDDGYGGSGYSKPSTGDYDSGKNASNTDGYGGSGYNKSSTDNSESGYNKSGTGEYGSGGGYNKSSTDNYESGYNKSGTGDYGSGGGYDKSDAGDYTGGYNKSSTDEYATGRGKTSSDDY

SEQ ID NO: 43991 - protein, 147 aa, Oryza sativa
MPDGDALVGGGRRRRNGGCMGFLRLSMFRLVSVGVNSGSGMSPLRYSMTWFILGLDLANGCEHKSPSFSTRHASFMLQFPCSLLSIVSTIDPFCQCSSTQSTNINRSPCAFCLTGLCPQVISRRNVPNANTSVRGDGLPVRTNSGAR

SEQ ID NO: 43992 - protein, 88 aa, Oryza sativa
MSASLRRKAFMLCSSSFMVRISSFTPLKLLLHCLSTRAGSFPRTELSTPVATLTMVCSICDLRCMFGGNSKSSLLHRCRAQGGGRASL

SEQ ID NO: 43993 - protein, 548 aa, Oryza sativa
MAAAPQQSVHPSLPSSTSTLRLLISSSPRRPPPPPPRARRYNRLAASASAAREMPWPHVLTVAGSDSGGGAGIQADIKACAALGAYCSSVVTAVTAQNTAGVQGIHVVPEEFIREQLNSVLSDMSVDVVKTGMLPSIGVVRVLCESLKKFPVKALVVDPVMVSTSGDTLSESSTLSVYRDELFAMADIVTPNVKEASRLLGGVSLRTVSDMRNAAESIYKFGPKHVLVKGGDMLESSDATDVFFDGKEFIELHAHRIKTHNTHGTGCTLASCIASELAKGATMLHAVQVAKNFVESALHHSKDLVVGNGPQGPFDHLFKLKCPPYNVGSQPSFKPDQLFLYAVTDSGMNKKWGRSIKEAVQAAIEGGATIVQLREKDSETREFLEAAKACMEICKSSGVPLLINDRVDIALACNADGVHVGQLDMSAHEVRELLGPGKIIGVSCKTPAQAQQAWNDGADYIGCGGVFPTSTKANNPTLGFDGLKTVCLASKLPVVAIGGINASNAGSVMELGLPNLKGVAVVSALFDRPSVVAETRNMKSILTNTSRT

SEQ ID NO: 43994 - protein, 864 aa, Oryza sativa
MFSSIMAKKSYKQRCKSEKVHMGCMSGLIHMFDFRRSPKLISDGTIRRSSVRSDLKGSEDFHGIIFSDEDKDYGVKTIHASRPSIKALMEEEMASGTQILKETQRNIFGIRSDDLKSVNLQEGSDVDLDLATSLMELYRNHNGSRDIITSEVSDHSSSLIDKEHNTDASTHPKQISCSIEKALEAVAEAVITHQSANGKYTSSSYEARPNEFLDALQLLSANEEFFLMLLKDPSSRMLQCLQNLYTALGNPMLELAEDDKQTKSKVTINSLEQSEVSKYSVQKTHNFFLKEDKLVMRRPPKLNDSPRGVSRIVILKPSPGRSQTSLISSSAMSSPVQTRADLQGQEQSDKYARHFSLRELKRRLRLAISNNRKDVMSSTFQKDDSTQQFILESMSTSMDSSECEKAEKPSIVDKKTIPEDSGSGMGNDATHCASSFFYEKAKKHLIERLDNQKNDTSQIVHKSEPFGKLLSYSENDTFSQTDCPQEDVKLSEDSTASSALLTTEQEDISSNSDPPMKFGELIPLDTSTSANTQLDEFKTDHASHPVKEGTISQELTSEGIDSMNDATDTPQVSIQIETSTESLEQINTDQCFAEESQTMNALPEVSLHTPEKVNEQFNHSPSAVVGLTKPSILTFSCSPENADDKEERLSPQSVLDSFLGDGISPSHKTRTQDELSMPSTRILFKEDDTPSGTPTLQNTPQEAILDDKQARLSFIKVVLEASDFLSEESSEIWYVDGSLLDTSVLAEVGTLYCLTDDAVFLFDCVEEALCKIRDNFFGCDPWVAYLKHSVRPAPVGTGLIQEVDNCIDSLVSDEVPSTLDRVVLKDLESGSWMDLRVDTEEVAIEVWDTLLDDLLEEMVFDLWL

SEQ ID NO: 43995 - protein, 174 aa, Oryza sativa
MATNNPVSLKAEEQKCYGGGGGRVIQAITMLVATAVTAQAAYRARREPWDLAFVLFAYADLGLLFLCLSMYERLPPPLEEIQKGDSGDDGAAVRRRLKMAVWALSTALSVAFAWRVAAVMPAPAMRAAVWGMTSTVAVAGFYLLFVYRPVTISSYSEMDTCKHKQSSPKLDQMV

SEQ ID NO: 43996 - protein, 330 aa, Oryza sativa
MSSPITLLPPRANPRRHLDARELHLAADHHHHPSLLRSPLERVKILLQTRTHGFQSLGILQSLRKLWQYEGIRGFYKGNGASVLRIVPYAALHYMTYEQYRCWILNNFAPSVGTGPVVDLLAGSAAGGTAVLCTYPLDLARTKLAYQVSNVGQPGNALGNAGRQPAYGGIKDVFKTVYKEGGARALYRGVGPTLIGILPYAGLKFYIYEDLKSRVPEDYKRSVVLKLSCGALAGLFGQTLTYPLDVVRRQMQVQNKQPHNANDAFRIRGTFQGLALIIRCQGWRQLFAGLSLNYVKVVPSVAIGFTTYDMMKNLLRVPPRERLYQSSGNA

SEQ ID NO: 43997 - protein, 215 aa, Oryza sativa
MGNCQAAEVATVVIQHPGGGRTERAYWAMSAGAVMAANPGHYVAAVITSPPAAGASSATPAAAPVKHLKLLRPDDTLLLGRVYRLVSFEEVLREFASKRHVKLSRATIKAKDDVEEETNPAKPRRRRGSGGIAPEEEYSSRSLAKVMRQSDEPEPVARASPSAAPKPESDIDDHADGEAAEPDCDLEALLPPHGVVFGRRVARQWRPALQSIAEG

SEQ ID NO: 43998 - protein, 291 aa, Oryza sativa [sequence omitted]

SEQ ID NO: 43999 - protein, 453 aa, Oryza sativa
MAIRNFWSMAAAAVGFRLVLVLFGGDLHLASRPEVSTPLTSIRRLAEGYWLKQASMSPYSGSMYHGSPLLLLVLGPLTNKRSVGHHDHIYCSLIFVAVDFIAAMLIRATGRRLQIARNRNLKSLELTEAVSNSVNVSAGDIASLIYLWNPWAIVTCVGSCTSPIENLMVVIMIYGACSRLAPLAAFGYVMATHLSLYPAILIVPIILLLGYGPDAPPTKVFRIKSSSASKTDVSDNDKSSSSRDVQQFLWKPVFHFILWMLFWTFYVLLLSSIVLNKVGGLQEMFEKTYGFILTVKDLSPNIGVLWYFFAEVFDFFRSFFLIVFNMNIVFMVLPLAIRLKHRPCFLAFIYTAIVAILKSYPSVGDSALYLGLLGLFANELAEMQFTFFLFFGYIGVSLLSPVMHNLWIWRGTGNANFYFATGLAYTCLQTVLVVESVSSMIKHDRKLRLLVTA

SEQ ID NO: 44000 - protein, 279 aa, Oryza sativa; identical to SEQ ID NO: 32300

SEQ ID NO: 44001 - protein, 532 aa, Oryza sativa
MSLIYLGVPEENILQTHMEGIHRYCGSDAKVDSLASQYVQKLGMIIKRSTHELDLDDQASIRMWVDRNKKSVFYYQDSTDTDAFVLGIQTEWQLQQMIRFGHQDLLASHSSFGVSKLKYPLHTLLVFDSRQHALPVAWIITRSVTKQDTLRWMKALTERIYSVDSTWRIGGFVIDDPASELDPIRDVFSCPILFSLWHIRRTWLKNIIKKCSNSEVQREMFMQLGKVMYSIWSEKNPMDALEQLFQDFVDQTTFIQYFKSFWVPKLEMWIDTIRSLPLASQESSGTIEGYHLKLKVKAYDDSQLDALQRVDWLVHKLTTELHSSYWLNLYADESGSFPEVKAEYIASTSWHRALQIPDDAVIFDDKEPFSAKVTSQKDTSQMWTVWNPGSEFSLCDCSWSMQGNLCKHIIKVNMMCGPRKDFQPSLSFQSFQRVLLDLWQKPMDDSFSLDLSVAWVMQMQERIQKVTELATADGIAEVSNRLPIQWTNKKGRKVAAKRTSPLRVLPHSNGIVQKDFTPKKNRKRKRLSTVSG

SEQ ID NO: 44002 - protein, 41 aa, Oryza sativa
MQIWMLFLVRKFICAGAKANCRSLLEQWRLEWESTSQMSGL

SEQ ID NO: 44003 - protein, 182 aa, Oryza sativa
MVDGRMAGTAAALGLSVVSSVSIVVCNKALMSTLGFVFATTLTSWHLLVTFCSLHVALQMKLFENKDLDPKTIIGFGILNGISIGLLNLSLGFNSIGFYQVTKLAIIPCTVSLETILFRKTFSRRIQMALAVLLFGVGVATVTDLQLNRLGSLLSLFAVLTTCISQIVSSKQSIHSILFSLH

SEQ ID NO: 44004 - protein, 288 aa, Oryza sativa
MYPYRFSNVMIGYLNLATLLASIPVIGAGLWMAKGSTATCSSMLQTPLLVIGFVVLLVSLAGFVGACFHVAWALWLYLLAMMLLIAFLLGLTAFGFAVTAGGGGTQVPGRPYREYHTSDYSSWLQKHIQDAKYWRPALACVVGSKACPKIANWSPMDYLQHDLTPIQMINCIVSIIVGVLQAADGVRVQRRGGRRSAGRGLLPVEQRGGDTVLRVRVVQGRGDGEGEGGLAQDLGAQRHGAGGAHLHLRLRLLRLQERPPLRLRVPLRGKPHAQDPPPMGLLLVAMVA

SEQ ID NO: 44005 - protein, 252 aa, Oryza sativa; identical to SEQ ID NO: 30657

SEQ ID NO: 44006 - protein, 368 aa, Oryza sativa
MACLAPHFKWAPCPHAHHHHSTSSLPSSSSSSTSAPSSSSRCSFSRGGPFRVHCAVTATTSAAAPVVVEAPGGGMRLAYAAAPDSSAPALQKKIQSALASEVFLNEEAVVTAAAAEAVALARAAAEAAQEVVRMVQNNKNERNTRPKKAVVNYLANEILRTEMKPNILDKYSDGILSEEIESYGILSDEAELDGDTQDIPSIAVKSARQTEGRARRTRAAIKAATIVRTSPKPATSSKKKRSKGASSGTNPLGSLWKMTGRRLLTAKEEVEFSEGIQDLLKLEAIQAELAEYNGGQPTFAQWATAAGVDERTLRKRLDHGIYCKNRMVTSNVRLVISIAREFEGPGMELYDLIQVFITGRDAGPYKGC

SEQ ID NO: 44007 - protein, 253 aa, Oryza sativa
METAASASTSTPEGDSGQHAAAAPPRMTTVSKHYFGGASSAHNHDLRVDIIENIEEDYGMFVWPCSVILAEYVWQQRSRFTASTVVELGAGTSLPGLVAAKVGADVTLTDIAHNTEVLNNIRQVCGLNNVNCTVLGLTWGEWDEPTFDLHPDVILGADVLYDSAKFDDLFATVSFLLENSPGAMFITTYHNRSGHHLIEFLMVKWGLKCLKLRDGFSFLPSCKAASLRGNIQLVEIALDKEKPNCSSADENNL

SEQ ID NO: 44008 - protein, 540 aa, Oryza sativa
MASDRRYYYFEEDDGDGEEEVEWLAMEADEDDVGLLEEDDLHLRLPDDRPADCWAITQESLPAAQQQDLSMVMNLLNIKQHLARTLLIHHRWKMHCIYDHLDRKGRDRMLSEACIILPKNSMSAASSTSVTCNVCFEDFSMTDVSTMDCGHCFCNDCWTEHFFASINTGNKQIRCMEVKCKAICDEDIVRRLLSLKYPAASKRFDLLLLESYLEDNDSVKWCPSAPHCGRAIQVGTGERYCEVACPCGVSFCFNCAGQVHSPCPCAIWEKWKAKGHGDSDSVKWILANTKSCPKCSKPIEKNGGCNLVHCKCGQCLCWLCGGPTGREHTWDSISGHSCNRYKEENGDKVDTSRQQMQRYTHYWDRYNIHAGSYKVEQKDLGPAVEEQVKKLESNLTGPKMNWDGSWLAMAYQSLLASRQVLSRSYAFAYYMFGGGEVKTRPSERASLAVAQNLFEDRQEQLERHVEHLSKELATDLLGLPEEEIVLKKVEIANLAKIVQAICGQLYRCIQDELLPLLVQPMNIAAYQPDGPDKAKEFIGA

SEQ ID NO: 44009 - protein, 448 aa, Oryza sativa
MGGGVTERLPEGSSEPLLPTKREGGGGGGEFAGAVFNLSTTIVGAGIMALPATMKVLGLAPGLVAILLAALLTDASIELLVRSSRAAGAPSYGAVMGDAFGWWGRRLLQVCVVVNNIGVMIVYMIIIGDVLSGTSSGGEHHYGVLEGWFGPQWWNGRFFVLLVTTLVVFTPLACLKRVDSLSYTSAISVALAVVFVIITAGIAIVKLIKGQIPMPKLFPDVPDLASIWELFTAVPVLVTAYVCHYNVHPIHNELKDPSQIKPIVHTSLVLCSTVYITTSFFGYLLFGESTLSDVLANFDSNLGIPYSQMLNDAVRVSYAVHLMLVFPMIFHALRLNLDGLLFSSSSPLSSDNRRFSVMTAVLLLVIFLSANFIPSIWDAFQFTGATAAVCIAFIFPAAITLRDPHSIAKKWDKILSIFMIVLAIVSNVVAVYSDAYSMFHRKSSPSIA

SEQ ID NO: 44010 - protein, 318 aa, Oryza sativa; identical to SEQ ID NO: 32874

SEQ ID NO: 44011 - protein, 418 aa, Oryza sativa
MDAIRKQLDQLMGANRNGDVREVSRKYYDRDVCRLFLAGLCPHDLFQLTKMDMGPCPKMHSLQLRKEYEEAKAKGMDNYDRELEETIERLISECERKIQRALKRLEEDDAKAAIAISITEVTQSKEVIEFSKQIKEKMKEIDAFDLEGNTEGKIRATEEVDKLKEQRAEEQAKHLLEAFNKDRVSLMTSLQTANQSIPPPPVAAAPDARTQEMIDEKLKKAEELGENGMIDEAQKLLDEAEALKKLGARPQPVPDSAKMSTHVQITDQKLRLCDICGAFLSVYDSDRRLADHFGGKLHMGYMLIREKLSELQEEKNKRRKIDRAEHERRSRDRSLERDRASSKDRHRGDRGSSRDRDRDYDRRRSHDRYHDRESRSDKDRESGRSHSYDSRGYRRSRSPRDRSRDYDRYGRDDRRHRR

SEQ ID NO: 44012 - protein, 39 aa, Oryza sativa
MGFDRALVLDVFFACNKDEQLAANYLLDHMNEFDDEGPP

SEQ ID NO: 44013 - protein, 493 aa, Oryza sativa
MPPPPPHSPPLPPHLLRHLDGRALSTPLLDPLIRAASASASAPHHAFSLFLLLLRSALRPSHLTFPFLARAAARLATPRLARAVHAQPLRRGLLPHDLHVSNSLVHMYAACALPGLARRLFDEIPRPNHVSWNALLDGYAKCRDLPAARRVFARMPQRDVVSWSAMIDGCVKCGEHREALAVFEMMEATAARHDGVRANDVTMVSVLGACAHLGDLVRGRKMHRYLEEHGFPLNIRLATSLVDMYAKCGAIVEALEVFQAVPVENTDVLIWNAVIGGLAVHGMSRESLQMFQKMEHAGVVPDEITYLSLLSACVHGGLVDEAWSFFRSLEAQGLRPHVEHYACLVDVLGRAGRLEEAYGVVKSMPMKPSVSVLGALLNACHLHGWVELGEAVGRQLVHLQPDHDGRYIGLSNIYAVARRWQEAKKARKVMEERGVKKVPGFSEIDVGRGICRFIAQDKTHPGSAEIYALLKLIAMDMKMKDDVTVPDYTCMYC

SEQ ID NO: 44014 - protein, 460 aa, Oryza sativa
MATTMGSGRGRRRWCPSTARTGTACLSAATSSPRTWSSSPSSGASSSAASSPAPSTTSSSISGSSNSTLPSSMLEDLAVYRLYKIKRKEDEEPVNAAAAASSTDEPSTSSALSPPTPPRPLPDMAGPSSATPLLPLQLPDMTGPSSSTPLLPLQLLGLAGSSSAMSLPLPLQLPGLAGSSSAMSLPAQQMPGMAGSSSAMPLPLSLPGLAGGMMSMADQANMASTSQASTPSSELLQDWYDEFEITYGAVAPPSPSTISWEEPQSSPTGWWPSPNGEPVQHDGYLGMAANPTSYMLEHPLPTAAIPPEPMTPPTSSPAPPPAVDNHHRLSPPHDAAGSNYNHPELAGYNGGVQAQHEHQHQPQEPQPALLVDGEDGYGAIADGDGDTQLGVAELDTERIAEMVNHIMDGEFEFKFEDNTVLKYNEVFPDDDKVVAAPMMIDGGGDGDGADGGDGGDPFDN

SEQ ID NO: 44015 - protein, 109 aa, Oryza sativa
MSSPPLRISTAGDALPLRRSPSPSPHRRHPSLSAPFLLSHGPRRRAAPSFCRRRPPPSRRRPFLSDIIVFSGTVEATPSVSASATTSSLRRTVGRSPSRHDLGAAGACL

SEQ ID NO: 44016 - protein, 484 aa, Oryza sativa
MASLADSFLADLDELSDNEAYPEEENAEAVGTEEIGDDDMPDLESLNYDDLDSVSKLQKTQRYNDIMQKVENALQKGTDFSNQRSILEEDPEYQLIVDCNALSVDIENEIIIIHNFIRDKYRLKFPELESLVHHPIDYARVVQKIGNEMDLTLVDLEGLLPSAIIMVISVTASTTSGKPLSEENLVKTIEACERALTLDAAKKKVLEFVESRMGYIAPNLSAIVGSAVASKLMGTAGGLGALAKMPACNVQLLGAKRKNLAGFSTATSQFRVGYLEQTDVFQSTPPALRTRACRLIAAKSTLAARIDSIRGDPTGKAGRNLLEEIRKKIEKWQEPPPAKLPKPLPVPDFEPKKKRGGRRLRKMKERYAQTDMMKLANRMQFGVPEESSLGDGLGEGYGMLGQAGSGKLRVSTAPSKLSAKITKKFKEKSYGSSGATSGLTSSLAFTPVQGIELSNPQAHGNLLGSGTQSTYFSETGTFSKIKRT

SEQ ID NO: 44017 - protein, 761 aa, Oryza sativa
MAQIQSSSLVNCTLLAVLCGKVTDKQQKPPGLVPEVKRPRLSYPFPELISSGRLEVHTLINPTVDQFRKAQQAVQPNLMYLQGQQLENEEEIGTLVWGDADVSDPQIFSSLISPPFPTIVYLEVPAGEKLAQSLQLKGIPYVLYWRNSFSSYAASHFRQALISVVQSSCSHTWDAFQLAQASFRLYCARNNDAQSVKLGPRLLGDAPKINIFLPENEMVEEEGSSEHFPAIKIYDEDVNMKLLICGAPCILDASLLGSLEDGLNALLNNEIRGCRLQNRVSAAPPPLHAETLPHGVVTMRCDITTCSSSHVSLLVSGSPQTCFDDKLLENHIKKEIVEKGQLVRAVLVREDDKPSSVEPLTSISVASGASTFEVWMTLPKWAGQVLKYLAPEISYKSLVPLGIACVNGTPVSSFDRQDVDRLLFFCKNEAIVNGLYSHLPRWSASLVKDRLKGTPESKSSTFSANGVGEYQKHPMKGTSLVVRPKLKSAKMRPIPHSSKRQMHPFMGIPPSFIHDASQVKPSLPAPPVRHNALPVAPTTQRKLSSGTSRVEPAVPLNPLPMKKHGCDRLPIGICSEEDFLKDVMQFLLQRGHTRLVPQGGLAEFPDAVLNAKRLDLYNLYKEVVSRGGFYVGNGINWKGQVFSKMSNHTVTNKMTGVGNTLKRHYETYLLEYELSHDDVGGECCLLCHSSAPGDWVNCGLCGEWAHFGCDRRQGLGTFKDYAKTDGLEYICPHCSLANYKKKPPPPESANGFRIASAQRNI

SEQ ID NO: 44018 - protein, 371 aa, Oryza sativa
MAIPRISPRKTLPLFAALALALAWAFAAPAFADGDDVVALTESTFEKEVGQDRGALVEFYAPWCGHCKKLAPEYEKLGASFKKAKSVFIAKVDCDEHKSVCSKYGVSGYPTIQWFPKGSLEPKKYEGQRSAEALAEFVNTEGGTNVKLATIPSSVVVLGPDNFDSIVLDENKDILVEFYAPWCGHCKHLAPIYEKLASVYKLDDGVVIANLDADKHKDLAEKYGVSGYPTLKFFPKGNKAGEDYDGGRELDDFVKFINEKCGTSRDTKGQLTSEAGRIASLDALAKEFLGAANDKRKEILSNMEEEVVKLSGSAAKHGKVYIAIAKKILDKGHDYTKKETERLERMLEKSISPSKADEFIIKKNVLSTFSS

SEQ ID NO: 44019 - protein, 742 aa, Oryza sativa
MMGTAHHNQTAGSALGVGVGDANDAVPGAGGGGYSDPDGGPISGVQRPPQVCWERFIQKKTIKVLLVDSDDSTRQVVSALLRHCMYEVIPAENGQQAWTYLEDMQNSIDLVLTEVVMPGVSGISLLSRIMNHNICKNIPVIMMSSNDAMGTVFKCLSKGAVDFLVKPIRKNELKNLWQHVWRRCHSSSGSGSESGIQTQKCAKSKSGDESNNNNGSNDDDDDDGVIMGLNARDGSDNGSGTQAQSSWTKRAVEIDSPQAMSPDQLADPPDSTCAQVIHLKSDICSNRWLPCTSNKNSKKQKETNDDFKGKDLEIGSPRNLNTAYQSSPNERSIKPTDRRNEYPLQNNSKEAAMENLEESSVRAADLIGSMAKNMDAQQAARAANAPNCSSKVPEGKDKNRDNIMPSLELSLKRSRSTGDGANAIQEEQRNVLRRSDLSAFTRYHTPVASNQGGTGFMGSCSLHDNSSEAMKTDSAYNMKSNSDAAPIKQGSNGSSNNNDMGSTTKNVVTKPSTNKERVMSPSAVKANGHTSAFHPAQHWTSPANTTGKEKTDEVANNAAKRAQPGEVQSNLVQHPRPILHYVHFDVSRENGGSGAPQCGSSNVFDPPVEGHAANYGVNGSNSGSNNGSNGQNGSTTAVDAERPNMEIANGTINKSGPGGGNGSGSGSGNDMYLKRFTQREHRVAAVIKFRQKRKERNFGKKVRYQSRKRLAEQRPRVRGQFVRQAVQDQQQQGGGREAAADR

SEQ ID NO: 44020 - protein, 341 aa, Oryza sativa
MMGRQSSSAARRVVVVVCAAMVVAAAAAQKYNAVYNFGDSITDTGNLCTNGRVVVDFLASKFGLPFLPPSKSTSADFKKGANMAITGATAMDANFFRSLGLSDKIWNNGPISFQIQWFQQISSSVCGQNCKSYLANSLFVFGEFGGNDYNAMLFGGYSADQASTYTSQIVDTISNGVEKLIAMGAVDVVVPGVLPIGCFPIYLTIYGTSSSSDYDSLGCLKKFNDLSTNHNNQLKTKISALQSKYKSARIMYADFYSGVYDMVRNPGNYGFSTVFETCCGSGGGKFNYNNNARCGMSGASACSNPASHLSWDGIHLTEAAYKQITDGWLNGPYCSPAILHS

SEQ ID NO: 44021 - protein, 183 aa, Oryza sativa
MMDAQIPGRHVSQFKPLLKEDAVYYIKYFEVAEARPQYRPIDRMVMAKFTAHTTVREDTEAPSTFPSHAYKVLSFDELRGRAYRKDILSDAIGIMTAIGPVQTVSCGGVMKAVLNVHITNGSETAVVALWGAHATQFHAENLQQQPDHGPVVILFVGLTVKFRDDQLALQGSTVCRWYPNAPI

SEQ ID NO: 44022 - protein, 102 aa, Oryza sativa
MRRTRRPTASLVAAFPSPHSRSRRPTVSLAAAFPSPPHRLHSAFAGRPPPSPPSLLHHARLHNASDACAAPAGRPPPSLPPSLLRHAGSTAPPPPHGFSRRR

SEQ ID NO: 44023 - protein, 198 aa, Oryza sativa
MHPHTHSPQAAAAAPTTVLGRRRAVAPAAACGGDGDKTRAHVGSQAAARGGDGDGRQVRGSARSLCLPPLSLLPSLSIAASLPSFSTAASLPSLSIAEWGRGRRRKEGGAAVARGRKRRWFSTTRCGSGAGEPRESGSAAACPRERHGGRGQWRRSAAPARGRGGGEQSRRRRADPLPAIHALPWEQRIHPHLLIFVM

SEQ ID NO: 44024 - protein, 195 aa, Oryza sativa
MEQADESSVNKESSEQQQLTSEQDDDGATWLSLTLATQGSPEEATAEAEETEAANCSESEAPKPSSAPHKVFSCNFCMRKFFSSQALGGHQNAHKRERSAAKRSYHAQRMMMGLPLEAHAAFVHSLRVNQSSVIQKASQQAQIRTAPRFHEGSISWPPIAYEEVPNSTWPGSFRLRSQPSDQPSEQSKIDLNLRL

SEQ ID NO: 44025 - protein, 607 aa, Oryza sativa
MRELRVAVLIIAVSLPSFSASDRQGDALYDMKQKLNVTGNQLSDWNQNQVNPCTWNSVICDNNNNVIQVTLAARGFAGVLSPRIGELKYLTVLSLAGNRISGGIPEQFGNLSSLTSLDLEDNLLVGEIPASLGQLSKLQLLILSDNNFNGSIPDSLAKISSLTDIRLAYNNLSGQIPGPLFQVARYNFSGNHLNCGTNFPHSCSTNMSYQSGSHSSKIGIVLGTVGGVIGLLIVAALFLFCKGRRKSHLWEVFVDVAGEDDRRIAFGQLKRFAWRELQIATDNFSERNVLGQGGFGKVYKGVLPDGTKIAVKRLTDYESPGGEAAFLREVELISVAVHRNLLKLIGFCTTQTERLLVYPFMQNLSVAYRLRDFKPGEPVLNWPERKRVAIGTARGLEYLHEHCNPKIIHRDVKAANVLLDEDFEPVVGDFGLAKLVDVQKTSVTTQVRGTMGHIAPEYLSTGKSSERTDVFGYGIMLLELVTGQRAIDFSRLEEEDDVLLLDHVKKLQREGQLGSIVDRNLNQNYDDEEVEMMIQIALLCTQSSPEDRPSMSEAVRMLEGEGLAERWEEWQQVEVTRRQEYERMQRRFDWGEDSVYNQEAIELSGGR

SEQ ID NO: 44026 - protein, 561 aa, Oryza sativa
MPSPSSAHWLSLVGSVWLQTINGPNADFPVYSSQLKEVKGISQVQLNFLAFASDAGKLFGWFAGVAALYLPLWLVAVVGASFGLVGYGVQFLFLERPGLAYWHLFLLTSLAGNGICWINTVCYLLCIKNFPSDSRVAVSLATSYLGLSAKLYTTMAEKMPRGATARYSKEKVYLLLNAVVPMLVTLVAAPSLRVVELTSHRRTDPAFLAMFAITLATGACAVVGSIGSKSIGLSTSEHMISLYILLALPVLIPAALKVRESMDKLREAKRENRVHDVAAATDVPETAVSVLEVAEAAENKEEDDAAAGESGGQDEVGGIRLLRRLDFWLYFLSYMFSGTLGLVFLNNLGQIAESRGLSDPSTLVSLSSSFGFFGRLLPAFLDYYTAKSGYSLSRTASMAALMAPMAGAFFLLLDPRDMFLYTSTAVVGTCTGAITSVAVSATGELFGRKNFGVNHNVLVANIPVGSLCFGYLAAFLYQREARGASRCAGAACYRGTFLVWGATCAVGTALCTVLYARSRGFAGRLPPPARSTTMPCAGQRPATNLGDDNKGPEPEVSSTAV

SEQ ID NO: 44027 - protein, 405 aa, Oryza sativa; identical to SEQ ID NO: 43838

SEQ ID NO: 44028 - protein, 706 aa, Oryza sativa
MPWRLVPCGRGQLFLVVLGLLLLLLGEVHHGSGARTASLPRLLPAEVRTLRRIAQKMGILRWNFSVDPCNSGGNGGFGGTVNCDCSFYNHTFCHVTNITLEGQNFTGELPPDFAEFPNLLQLDLSRSLLHGGVPDQWARMKLQGLSLMGNNLSGPFPIALTKITTLTNLSIEGNNFYGPIPSDIGHLMQMEKLILSANEFSGPLPAALARLTNLTDLRISGNNFSGRVPVFLGKLKKLGKLQIEGSLLEGPIPSEFSKLINLYDLRISDLRGRGSVFPDLRELVSMKTIILRNCSINGSIPSYIGNMDNLKHLDLSFNKLTGEIPASFANMGHVDHIYLTGNSLTGSIPDWILKRNKIADISFNNFTMGSSGPTQCVPGSVNMVESYSPEMSSLTNVESCLKRNFPCGSSNGKYRYSLNINCGDKEVTINGTKYETDVEPKGASLLYQSPGSNWAFSSTGNFMDNNINDDSYIATSASKLTVPNSELYAKARLSPLSLTYYGLCMHNGSYTVKLHFAEIVFTNDSTYCSLGKRRFNVFIQGRMVLEDFDIEQSAGGAAKAVIKTFTANVTNHTLEIHFYWAGRGTTGIPKRGYYGPLISAISVVPNFEVPLAVEPPQIGGSKKLSRISKAFLVAMPILAMCAALFVGIYWIKWRRKNSMHKDLRAFDLQTGSFTLRQIKVATRNFDAANKIGEGGFGSVYKVSHHH

SEQ ID NO: 44029 - protein, 612 aa, Oryza sativa
MDAVAFPPPPAPFLDDDLDFGDFAFADPQPAAAAAFDAFGAYDDDWGDFVDSRLGSWEKPRGPLPLSLFGADEDEEEEEGPAELPPTAADQRGASHASSNGSKPADLKDLIAGLYGSHPQPSSTDAAEVGTQEGSAVAAAEEEEEDGDGFEDDGWEFKAAAPSSSSDAVQDGGRQAHGDLTQDVPKSMSSDQEGWSLFTSVSENLNNVQTTDHVGTRESAGQSVKAFSYFPPNNAAILDLYKESEPIDAVHIMQCSSESVQSSSDMFSNTEMNSSFGTDENHSIKSASDRILIDFYHKLREESLTVISQYKKDLKESQKNSMLSDEKNEVMTETEREIQEICKELQDSSLAKGFCKDEHPSKDVCISELLNSAKEDHLKDFDKEYHLTEIIAMALEDMSSAVKLYKHSVSILRTLEIASKEEQCDYVSAWYSMLLSCAQELQHGAMIWQESCHANVGETVISQGAHYFIALGEIYRVAQILHISMLSFKPWVLADPGMLSKMLVCWNSCVNSWTSGLGMALTMVVDSKNLHAPVAKVLLESIININDIEVPNLQSFLPSDKMACKLTLLPTSLVPGMEVIIWDADHYFVKVANLWANQISSDPPQFSVSRVA

SEQ ID NO: 44030 - protein, 68 aa, Oryza sativa
MLGLIAVPPSRVTGCEGSTYQPTTLVKRGVHQVNTEQMRVTHLLLRGDVGKQGEACTAISPTSPVICS

SEQ ID NO: 44031 - protein, 277 aa, Oryza sativa
MSSICAMRSLLAASTFLRSGASPLLRPLSRPLPSRLNLSRFGPVRPVSAAAAAADKSRGGGGSAMEAQPSYPGEIHVIVGPMFAGKTTALLRRVQVEAGTGSRNVALIKSDKDNRYGLDSVVTHDGTKMPCWALPELSSFQDKLGTEAYDKVDVIGIDEAQFFDDLHDFCCKAADRDGKIVVVAGLDGDYKRNKFGSVLDIIPLADSVTKLTARCELCGRRAFFTLRKTRETKTELIGGADVYMPVCRQHYLDGQIVIEATRIVLDLEKSKVIHAFK

SEQ ID NO: 44032 - protein, 293 aa, Oryza sativa; identical to SEQ ID NO: 33488

SEQ ID NO: 44033 - protein, 367 aa, Oryza sativa
MASHLLLRLPAPPPLLLHFPQRRVTLPQSRVSPTAPLLGARLVFSPASAVRPARARGSSIGGAGEDDSDGEVDGAPRLVGEDSAAFRLGDQRVASWVYFGGILAVVLWGLNVLWIDPATGVGTRFLEAVAAVSDNHEVTMLLLTIIFAVVHSGMASLRETGEKIIGERAYRVMFAGISLPLAVSTVVYFINHRYDGIQLWQVQGISGIHELVWLSSFISFFFLYPSTFNLLEVAAVDKPKFHMWETGIMRITRHPQMVGQVIWCLAHTLWIGNSVAVAASVGLIGHHLFGVWNGDRRLASRYGEAFEVLKKRTSVIPFAAVIDGRQKLPKDYYREFIRLPYLAITALTLGAYFVHPLMQASSYQLPW

SEQ ID NO: 44034 - protein, 539 aa, Oryza sativa
MAPAAEVSSSSAETTGSSAGSAPSTAAAAATSTSHSSYRRTAPPLLLLASLAALLIISTGDDTAAFDSAAVGRSIKDVSLENPEVTFVPSSLGGQFCERVRLSGIPKLHIGSYANQIRVKMNVSQSMPEKFHWKIEICFHGNASMGLCQCETGEWQNLQNGMWNAVKSPYGNKYVDVKVADKTSTRFSISIQEEFQKWRLACLGIGFILLFLSPIVSKWAPFYYSSSMALGVLLVVLIVLFQGMKLLPMGRKSLFYLTIYGSVVGVGSYAVHYFSTLVASILENFGLSEEMHNPVSIFLLVAIVLTGAGFGYWMVRRFILSKDGSVDAGIAQFVKWAMRVVAICFVMQSTLDPLLALFALAASWWICSVFTAYRAPKSMTLKQKQSKASTQPMYNKGSPNPRQIQFLSPSKRDIGRTTSNSSATQYGWSNLANGGLVSPTLTKRVVPDNQDEDHYSTFHNIQPRKYSKEEWDDFTQKSTRKALMECTATPEFARWVADNAHRLRVEQQDDASEDELIESSSNSSEETAQEADTGLFRWY

SEQ ID NO: 44035 - protein, 219 aa, Oryza sativa
MGRRPARCYRQIKNKPYPKSRYCRGVPDPKIRIYDVGMKKKGVDEFSHCVHLVSWEKENVTSEALEAARIACNKYMTKSAGKDAFHLRVRVHPFHVLRINKMLSCAGADRLQTGMRGAFGKPQGTCARVDIGQVLLSVRCKPNNAVHASEALRRAKFKFPGRQKIIESRKWGFTKFSRDEYVRLKSEGRIMPDGVNAKLLGCHGRLSARAPGKAFLSAA

SEQ ID NO: 44036 - protein, 405 aa, Oryza sativa
MAMAAAVHRFLGVFPAPSTPTPPPRQLSPRPHHIPPSLVRCCSSSPVCAATVAVAQPQEFVVVTFYKFVSIDDPRAEVSRHLHFLQGRDIHGRIYMNEQGINAQYSGPHKDAVAYADWLRKDHRFRDLLVQTSPSLCGHAFPRLKLRMRATPLTPSEWRERLEARKCLDVSSSEAAGDSSGRRLLLLDVRNDYEWDIGHFQGAQRPNVDCFRSTSFGLSESEQEMDSSDPLNGIDKENTDILMYCTGGIRCDVYSTILRKKGFRNLYTLKGGVSNYLKEEGSAGWVGNLFVFDGRLSLPPATYKPGAGDDDDEEEEEGRNRSSSELGRCYACGSEVVELRHRNCANIDCNRLYLCCGRCVEELRGCCGEGCTAAPRLRPLLPSHQRYHKWHLYRHLDLGAPSSPS

SEQ ID NO: 44037 - protein, 355 aa, Oryza sativa
MESCSFRTAASPSPFPSLPSSSRQAPPCSSLRFPRPRNGRMVGVRRRASGFEAFPPLPGKVFVEEAIGAEYGEGFETFRMDGPLKVDVDYLNEKLQECFLQRIRHAMKPDEACGLIFSWDNVIADTDSLKLDAWRQLALEEGKDIPNAGHVQKSILHGAADHVLRKVLCWAKDESQMERLKARLIELYYENLFKLDTPVNGLREWLDAVQTAGIPCAVASSLDRRCMIEALDRMELSKYFKAIVTDEDDMESIAHRFLSAAMKLDRKPSKCVVFEDDPRGVTAAHNCTMMAVALIGAHPAYELVQADLAIAKYSELSVINLRRLFAHKGLSFMDLQKQIIERSPPKRKLTVDTIF

SEQ ID NO: 44038 - protein, 886 aa, Oryza sativa
MDVEKPTSKGHGFFSLFDWGKKSKKRLVSGNGSDSPAPRVSENFRESDGGTPSTRPNSFLEDAPSLKESSEHSCSSSVVDDEALVRRGPTVVARLMGLDSMPAASSSGSYTMPLTVQQSPQNSTIHDEFIGRSYVGSPHKMPGSPHKMPGSPIDRFRMEALPPRFAKRTLSVAQNKLSPMKNPNHISSRNAADIMEAASRIIGAGVEVISPYRVRDVGYANTVRVYSQREIAIVQQRPPRMNEALKKHDGLTSYRLPTGKPLDGSLKSSGNTSASVVSQSNGGAPVGPKVKASSRSSPDSRATNVQGREDISKISRKLATRDPERRMVERNGINQGKNNNQVGMASSSNVLVQNNRKQNAMVKHKVNSKPPTPNRQRSNTHSINGTMRKVGTAGTPSENNTQGNRNVELRSTGHANRRQNSTAKSIPKPGRLPDGRIHSVKTRPSDKDIADRSQRRVRHNIVIDEQSPFSMNKKKISTDIVSFTFTAPVDKPLSGYRLPNHLVEKQFMKNASSVPNSSETSSAKFDSIDGDYLGLLLEQKLRELTSGVRSPYCKPAKDVRIYAPSSVLEDSQSACETSSIASTDYDRESVQSYKDGKGSFTQTDLASKSGQSSQSVKYDNDAMDQMEIERLHLSPLSTWDASVSTETGSSTESWRSANGTKVFSSTEGATTSNSACFSKFLEADAFSEYSDTASSITVTTTDIPPSDSSSSSRMDCRQEIDFIREILNTSPLNGQICSGLERFINSDILDLQLLEDLNGDIRLAVGVAEGKTLRMNRRLLFECVNEILSVRCAYYFNAGYGSWFLGMAILKKLTAEEIYAEMTDLKVAEEWMVDELVYKEMSSPLGSWVDFKLESYESGIDITTELLGSLIDEMVADLLLVSDTSL

SEQ ID NO: 44039 - protein, 428 aa, Oryza sativa
MNAGFSPQILAQKLLKLNNSRQSIETLSHWCVFHYRHCRQVVETWESDFHSAPRERRVSLLYLANDIVQNSKKDSGRYVNEFWRVIPAALNDVFVNGDDFGRNVVQRLVDIWEERNIFGSHGQSLKEDYSRRFKEFKSKSRNSSGELLEKVISCYKHMLNAHVDDDTLMRKCQNALSFVDNLSNEYENNSILDCSNGSGFVEELQEQHNILRDSIEQFKTSELLRGNLISCLKEALHEQEFKMERARSQIKEVQSRYKKADDLCQKLGIHVERQEQPNHGPKNSGSEMHGSFGPDSANASSFEKGQSSAVMYSQENGGEHEIPNGVFSSRATKDNIEQKLEEHSTNKRQKLQNDVYVSRPQSPPPPLPSDAFEQPPPPPEHPPPPESTSPLHRQLLIHLQSPRHHRQQVHSCQFLLLRLRDCQYLPAL

SEQ ID NO: 44040 - protein, 98 aa, Oryza sativa
MVESRTRRCSGGRCGRWSASCGWRRSPGRWPPTRRWRRRSSRRTATATRAPGRRRSARSATSTGSPTSPPPSNPNAHSLSTDLPLPMCNCNSARLSLR

SEQ ID NO: 44041 - protein, 386 aa, Oryza sativa
MGAGEGGEEQSLALTPTWVVAGVCFIIVAISLAAERLLHRLGKVLKFNGQEALFSALQRVKEELMLLGFISFLLSVFQKFINHICIPESAAHLMLPCITRETSETTEDASKLCKRKGEVPMLSEEALHQLHIFIFVLGIVHVVFCVTTLLLGGAKMKKWEKWEKEIQQGRTKERPKRPGWMKFIVVRCAISFLKQFYDSVGKPDYQVLRSAFVQRHYPNRPDFDFHKYMVRALEHDFKEVVGISWYLWLFVIVFLLLNINGWHTYFWLSFLPLILLLIVGTKLELISTRLAQEAADCPDEATGNPWTKPCKEHFWFSKPRIVLHLIHFILFQNSFEMGFFFWVLATYGFDSCIMENKIYALPRLAIGIIVQVLCSYSTPPPQGPRP

SEQ ID NO: 44042 - protein, 32 aa, Oryza sativa
MNKDVNYSWYTELLREMLVTTCILLIILRCFQ

SEQ ID NO: 44043 - protein, 72 aa, Oryza sativa
MCQSLIIRPANRPPTPSISLPLQLAAARSASPPPIPFDLPRRRPPAPAFRSATTRRHHHHHKCRRRREHTRP

SEQ ID NO: 44044 - protein, 281 aa, Oryza sativa; identical to SEQ ID NO: 28965

SEQ ID NO: 44045 - protein, 417 aa, Oryza sativa
MARDPRVVALLDAKSFPVLFDVAKVEKRDVFTGTFMPSTSLTGGYRVCAYLDPSEPNHAKIKQLLLSLLVSRKDAFVPVFRSNFGALLDTVESQLASGGGKSDFTALNDATSFEFIGEAYFGVRPSASSSLGTGGPTKAALWLLWQLAPLTTLGLPMIIEDPLLHTLPLPPFLISSDYKALYAYFAAAASQALDAAEGLGLSREEACHNLLFATVFNSYGGFKLLLPQILARVAQAGEKLHERLAAEIRSAVADAGGNVTLAALEKMELTRSVVWEALRLDPPVRFQYGRAKADLEIESHDASFAIKKGEMLFGYQPCATRDPRVFGATAREFVGDRFVGEEGRKLLQYVYWSNGRETENPSVDNKQCPGKNLVVLVGRLLLVELFLRYDTFTAEAGKKVVITGVTKASTSAVNRTA

SEQ ID NO: 44046 - protein, 319 aa, Oryza sativa
MDPATTELRFDTPLLRIYNDGRVERLFGTETTPAGFDGATGVTSKDVVIDDATGVSARLYIPDLPASGPGHHRKKLPIVVYFHGGGMVLDSAASPTYHRYLNSLVSKAGALAVSVNYRLAPEHPLPAAYDDAWAALSWTASAADPWLSEHGDVGRVFLAGDSGGANVVHNVAIMAGAGQSSLPPGATVEGVIILHPMFSGEEPIDGENAETRELTEKLWPLICADAEAGLDDPRLNPMAEGAPSLQKLGCRKLLVCSAESDIVLARAAAYYQAVMASGWPGMAEWLESKGEEHVFFLNKPDCEESVALMDRVVAFLAGN

SEQ ID NO: 44047 - protein, 386 aa, Oryza sativa
MIMERLLQPTEHREVIVIVGMGGIGKTTLASLVFNKARGVEERNTWSGQAPPKATDPGSSSKRSHFDVCAWVPVGQDPDTLHLFSTISIQIGANLDLSRDVAEIKHHMFTFLLDKRYLIVLDDVWREETWHELVDAFPMSTNGSKILMTTRSKVIAISADPASYPHELNPLSDEVSFHLFLSKVFPNSNLNQAMSYPPLMEDLGRQLSKKCGGLPLALVVLGGLLSAKEKKHDVWSSILNSMNWNDNEAEKQCLKILALSYDDLPYRMKLCFLYLGAFREESEISISKLTKLWIGDDLIPQQSGRRRKEDTATDYLNELIQRCLVQPVLLKHKQRSTRVRVHALLRELAISEGRENRFLYCEYSNQAVSEMEMETLSSFGSPSGTQ

SEQ ID NO: 44048 - protein, 319 aa, Oryza sativa
MMASCRRGGGGDVDRIKGPWSPEEDEALQRLVGRHGARNWSLISKSIPGRSGKSCRLRWCNQLSPQVEHRPFTPEEDDTILRAHARFGNKWATIARLLAGRTDNAIKNHWNSTLKRKHHSSLLADDLRPLKRTTSDGHPTLSSAAAPGSPSGSDLSDSSHHSLPSQMPSSPPHLLLPQHVYRPVARAGGVVVPPPPPPPPPATSLSLSLSLPGLDHPHPDPSTPSEPAVQLQPPPPSQMPPPTPSCVRQEPPQMPFQLQPPPPPRPSAPFSAEFLAMMQEMIRIEVRNYMSGSAAVDPRSSPDNGVRAASRIMGMAKIE

SEQ ID NO: 44049 - protein, 812 aa, Oryza sativa
MEHGSIIASAVGVGVGVGVGIGLVSSRLTGLATGGGATAAEVEAELRCLVVDGRDVGVSFDDFPYYLSEQSKLALTSTAFVHLSPTILPNHIRVLSASSRTILLCGPSEAYLQSLAKALANQFSARLLLLDVIDFACKLHHKYGGPSNTQTRERSMTEAAFDRVSSLVGAFNLFRKKEEPTGTGPLSRETGILDLRTSTCCPHNTPSVRVQLSLVPPEKDHDPESSKYLASVKPCWSLNEKVLIQSLYKIIVSASEISPVILYIRDVDDLLGSSEKAYCMFQKMLKKLSGRVIVIGSQFLDDDEDREDIEESVCALFPCILETKPPKDKVLLEKWKTQMEEDSNNNNNQVVQNYIAEVLAENNLECEDLSSINADDDCKIIVAYLEEIITPSVSYHLMNNKNPKYRNGNLVISSESLSHGLRIFQESNDLGKDTVEAKDETEMVVPDNEYEKKIRPTVIPANEIGVTFDDIGALADIKECLHELVMLPLQRPDFFKGGLLKPCKGVLLFGPPGTGKTMLAKALANAAGASFLNISMASMTSKWYGESEKCIQALFSLAAKLAPAIIFIDEVDSMLGKRDNHSENEASRRVKNEFMAHWDGLLSKSNERILVLAATNRPFDLDDAVIRRFEHRIMVGLPTLESRELILKTLLSKETVENIDFKELAKMTEGYTSSDLKNICVTAAYHPVRELLQKEKNKVKKETAPETKQEPKEKTKIQENGTKSSDSKTEKDKLDNKESKKDKPADKKDKSDKGDAGETTLRPLNMEDLRKAKDEVAASFASEGVVMNQIKEWNELYGKGGSRKREQLTYFL

SEQ ID NO: 44050 - protein, 534 aa, Oryza sativa
MSIGIRYPANLFGHPTDKRIDAVNSELQYWSNHSNVPITKVVFGHYPMSFTTSSQKGQRYESIFAKQSISAYLCGHLHAKISKQLWRFHEMSATTQEQKSSYWEWELGDWKESRLMRILAIDGGAISFIDHTLKQAFQTSILITYPTDSRSMNTLESMNWSTRNDINVLVFSNQVIRNVSARVFDSHNEFKIVEEIPLQLVATPSVHKPLFHAEWNAENYKSPSPTRYWLQVFAQDSQGGKTSSERRPFSVEGKVQIQSRPCLNYLIFEVQWEDMYQVLLWSNFAFIIVLLFAPKLLYHFMKKSLTYQRWTVSVMLSPIQPRKAYFWLVWFLMEGARSRPIWFSLLIYVIWLIEMPWFWGHATSEKGEIAQMYLSGWSIPSLGEDLTWNKSSNPDVLVITLPFLYLVVVPVVVVIYSLFAEKAVACLRHSRRTENTVNPTNSNPESGYLLPSASVSLANLSDKKILSMVMKFCGGWTRRVLLLLCCIIAVIHLKLSSRLMSAYGAKPVAFSPPVTWMPLLLLSATAYCTMPNTY

SEQ ID NO: 44051 - protein, 176 aa, Oryza sativa
MHPAQWNAHFGHPVPKIVSRKHIKKKPKVVQPLTCEVCKIQCDTPEVLRIHKTGKKHKKNLERLQDSITPKPVKPPSTPNTVALAANMAPDPVTTSVTTSVIPAAQTKKKKSAAATPEELEVKRRRVLDAGAAQGEVKICTVCNVVVNSQKVYEFHIIGQKHKAMVQKQQAQPPIA

SEQ ID NO: 44052 - protein, 119 aa, Oryza sativa; identical to SEQ ID NO: 30676

SEQ ID NO: 44053 - protein, 209 aa, Oryza sativa
MEALYLVASLATTLLTSTFLSLLLLHRLPLPGHLSPDDARRVASTSGPVHLLTIPKSVGYEQNPLSIYYCYDSAEQGEDEKLKMCIAEVTNTPWGERVMFTFQPGSDLVAKPLHVSPFMDMLGNWSIRAESPGDSLYVVILVQHPTLGNYFTAALHAKLVEKTSSSLRLATFFWLMPHKVAAGIYWEVSVLYLFLPFQYHTCKSILSFV

SEQ ID NO: 44054 - protein, 188 aa, Oryza sativa
MPTSFGILPVKKLYCTWNDMSSGQLVNNTEGISPVSPFISSPNSRIAHIPANAGGKPPERWFTDISRKVRFLRFPSSGGRVETSPAFFILSRCSIWSWPRTGGIAPPSWLSPSSRILNCDIDPRNSGTPPVRLLAAISRSWSFVNLLSDAGIRPENSLLDKFRYIRFGSFSGSVSGISPNRVFCDKSR

SEQ ID NO: 44055 - protein, 189 aa, Oryza sativa
MSGRKNAGKASPFLLLLISVGCFFATYNFLTMVGHGRSRDAGPRKILGGVGGVGGGGSDPSKRFHVALTATDALYSQWQSRVMYYWYREMRDRPGSDMGGFTRILHSGKPDGLMDEIPTLVVDPLPEGADRGYIVLNRPWAFVQWLKKSNIKEDYVLMAEPDHIFVRPIAKLSSWRRTCCVSLLLHQTN

SEQ ID NO: 44056 - protein, 121 aa, Oryza sativa
MHILDPVLQHREVSDVSAKHRQTVTMIHTGLLTCINKFFDDWDINPDGWTCTYHTKISPRCQKWNSVFHTLYYAREFYDGKLSNVLDSGRVAALRRDLFYKLLTMEGNSAELPSHIARYLE

SEQ ID NO: 44057 - protein, 396 aa, Oryza sativa
MGAFCSKQNPSGQQPHCCNHSSSSNAAPKGNNRFAKFGDDYHTLEQVTDALAHAGLESSNLIVGIDFTKSNEWTGRVSFNNQSLHSLGHVSNPYEQAISIIGQTLSRFDEDNLIPCYGFGDATTHDQKVFSFYPDNKPCDGFEQALDRYREIVPQLRLAGPTSFAPMIETAIGIVDSSGGQYHVLLIIADGQVTRSVDTGNGQLSPQERETIDAIVKASDYPLSIVLVGVGDGPWDMMRQFDDNIPSRAFDNFQFVNFTEIMSRPVPASKKEAEFALSALMEIPEQFKAAINLQLLGKRRGFPHRTVLPPPVRDFQQYYGCSTVKETQSTSYGSLQKKTSAPKQDSDIGDQTCPICWLEAKNLAFGCGHQTCSDCGKDLKVCPICQREISTRIRLY

SEQ ID NO: 44058 - protein, 347 aa, Oryza sativa
MVSIFGDDNFVVGNWESKEVLSRDGHLRLSTQVFFASIDQRSERAAGESACTALVAVIADWFEANQDLMPIRSQFDSLIREGSLEWRKLCENETYRERFPDKHFDLETVLHAKIRPLTVSPNRSFIGFFQPESTEDGSGFDFLDGAMSFDNIWDEISRAAECSTGKPTLYIVSWNDHFFVLKVEAGAYYIIDTLGERLYEGCSQAYILKFDDNTTIHKVPAEKKEANPDSSGRLKDSSDSSSTDQDSGTDTEECELVSKGKESCKEYIKSFLAAIPIRELQADIKKGIIASTPLHHRLQIEFHYTESCPEEIPLPAPLPAIEAPFEFSWPEPPPAMEVTLAPAVAAI

SEQ ID NO: 44059 - protein, 196 aa, Oryza sativa
MSCIINPLYGPGVTGAPHQLKLSRSGFLESIWASCHSLFALRPAECLDAYNILSLSLYLSTLKYVFSGPHEPQDYDLRNSNEFWDEIRRGLVDKDSLVRKQALYILRISLDIFPSSKNDAAQQCSRKRSAALPVQDKPNTAMTKRERWAQKEARSLGIGETSQSDENCSSRKDRSKVFLLLYEMLQEYGTHLVEAA

SEQ ID NO: 44060 - protein, 855 aa, Oryza sativa
MFERFTEKAIKVIMLAQEEARRLGHNFVGTEQILLGLIGEGTGIAAKVLKSMGINLKDARVEVEKIIGRGNGFVAVEIPFTPRAKRVLELSLEEARQLGHNYIGSEHLLLGLLREGEGVAARVLESLGADPSNIRTQVIRMIGETTEAVGAGVGGGSSGNKMPTLEEYGTNLTKLAEEGKLDPVVGRQPQIERVVQILGRRTKNNPCLIGEPGVGKTAIAEGLAQRISTGDVPETIEGKKVITLDMGLLVAGTKYRGEFEERLKKLMEEIKQSDEIILFIDEVHTLIGAGAAEGAIDAANILKPALARGELQCIGATTLDEYRKHIEKDPALERRFQPVRVPEPTVDETIEILRGLRERYEIHHKLRYTDDALISAAKLSYQYISDRFLPDKAIDLIDEAGSRVRLRHAQVPEEARELDKELKQITKDKNEAVRSQDFEKAGELRDREMELKAQITALIDKSKEMSKAETESGETGPLVNEADIQHIVSSWTGIPVEKVSSDESDKLLKMEETLHQRVIGQDEAVKAISRSIRRARVGLKNPNRPIASFIFAGPTGVGKSELAKALAAYYFGSEEAMIRLDMSGFMERHTVSKLIGSPPGYVGYTEGGQLTEAVRRRPYTVVLFDEIEKAHPDVFNMMLQILEDGRLTDSKGRTVDFKNTLLIMTSNVGSSVIEKGGRKIGFDLDYDEKDSSYSRIKSLVVEEMKQYFRPEFLNRLDEMIVFRQLTKLEVKEIAEIMLKEVFDRLKAKDVDLQVTEKFKERIVDEGFNPSYGARPLRRAIMRLLEDSLAEKMLAGEVKEGDSAIVDVDSEGKVIVLMAKVGCLSFQLRLSLCSSSYILQSVKRCSAFHSDIFLHS

SEQ ID NO: 44061 - protein, 90 aa, Oryza sativa
MGGGNGQKSRMARERNMEKAKGAKGSQLETNKKAMNIQVIFRGTFWARQWSLLLKEEDGQKVREGCLILEKRVSGFFAMKGWNLRKRLGD

SEQ ID NO: 44062 - protein, 522 aa, Oryza sativa
MGVSPWIIIFLLIVLVQAFVASADTNAQDTSGLNGLAGSWGSAPSNWAGNDPCGDKWIGIICTGNRVTSIRLSSFGLSGTLSGDIQSLSELQYLDLSYNKNLNGPLPSTIGTLSKLQNLILVGCGFTGEIPKEIGQLSNLIFLSLNSNKFTGSIPPSLGGLSKLYWFDLADNQLTGGLPISNATSPGLDNLTSTKHFHFGINQLSGSIPSQIFNSNMKLIHLLLDNNKFSGSIPSTLGLLNTLEVLRFDNNAQLTGPVPTNLKNLTKLAEFHLANSNLTGPLPDLTGMSSLSFVDMSNNSFSASDAPSWITTLPSSLTSLYLENLRNRLNGTLNIADATPFSSNAESSNTHEPEVDAHAIYVRSLPLNATTTQLEDEFKKFGTIKPDGIQVRSHKIQGFCYGFVEFEEATAVQSAIEASPVMIGGRQCFVEEKRTPGSRGSSRGGRFAPGRGNNNFRADGMRGRGNYSGGRSYGRGDFSYRSDYGGRGGGRGDSARGPDVGYQRVDGGRGGRTSAGPGAPAK

SEQ ID NO: 44063 - protein, 263 aa, Oryza sativa; identical to SEQ ID NO: 32560

SEQ ID NO: 44064 - protein, 395 aa, Oryza sativa
MAGWYEEAVGLLRRPAVAEMAVDVLLCAVPIWAAVMIGLVMIGLLSTAFGSRGKHQRKDAALADDDDAADASGDAGDCVDGRTFFEGGHHVVTEKDLEHLVQLLDNKESGDTTWQHLMERTTSNMTYKAWRREPEVGPIMYCSRTIFEDATPELVRDFFWDDEFRLKWDPMLAYFKILEEFPQNGTMIIHWIKKFPFFCSDREYIFGRRIWESGKTYYCVTKGVPYPALPKKEKPRRVELYFSSWRIRAVQSPKQDGQQSACEVTLVHYEDMGIPKDVAKVGVRHGMWGAVKKFQSGFRAYQQMRDTENTLSRSAIMARVTTKTSIASSSCPLDQEPSNAAKTIDESENSRAVQPGFDWKWVVFGGAVAAVCVLNTGLVGKALLIGAASRRQAKK

SEQ ID NO: 44065 - protein, 62 aa, Oryza sativa
MKGGRPPQRALSPSTNMVMIIVDIDQDLSRVSRTALKLGLAFLDTMLFQKLISWSLVFILLA

SEQ ID NO: 44066 - protein, 390 aa, Oryza sativa
MAAAILLRRVPPARAQATALIAARSISDSTAPLTIETSVPFTSHIVDPPSRDVTTTPAELLTFFRDMSVMRRMEIAADSLYKAKLIRGFCHLYDGQEAVAVGMEAAITRSDSIITAYRDHCTYLARGGDLVSAFAELMGRQAGCSRGKGGSMHFYKKDANFYGGHGIVGAQVPLGCGLAFAQKYRKEETATFALYGDGAANQGQLFEALNISALWKLPAILVCENNHYGMGTAEWRAAKSPAYYKRGDYVPGLKVDGMDVLAVKQACKFAKEHAIANGPIVLEMDTYRYHGHSMSDPGSTYRTRDEISGVRQERDPIERVRKLILAHDLATAAELKDMEKEIRKEVDDAIAKAKESPMPDTSELFTNVYVKGFGVESFGADRKELRATLP

SEQ ID NO: 44067 - protein, 70 aa, Oryza sativa
MISCLSQILKIAGSILFLMLFVTASVMTQVVQIPLYLFKSNPMMQTLYLVYCKRTQCILCFEAIDSQIRT

SEQ ID NO: 44068 - protein, 606 aa, Oryza sativa
MGDETSTSVATQSQEPAAVGAGSVKQQLSKLVIASLRTTVPEVEVDPMVEVCTAKFGDYQCNNAMGLWSRIKGSGTSFKNPNAIGQAIAKNLPPSDIIESTSVAGPGFVNIVLSNSWVAKRIQDMLVNGIKTWAPILPVKRAVLDFSSPNIAKEMHVGHLRSTIIGDTLARMFEFSNVEVLCRNHVGDWGTQFGMLIQYLFEKFPNWEEIGSQAIGDLQTFYKASKNRFDGDAEFKDRAQQAVVRLQGGEERYRAAWNKICEISRNEFDMVYKLLNVKLEEKGESFYNPFIPQVLEELNNKGLIKESEGAKVIFIEGHQIPLIVVKRDGGFNYASTDLAALWYRLNVEKAEWIIYVTDVGQQQHFDMFFNAARMAGWLPDPKEKKYPKTNHVGFGLVLGSDGKRFRTRSTEVVRLIELLDEAKSRSKSELLQRLTENGKIVDWTEEELEKTSEAVGYGAVKYADLKNNRLTNYTFSFEQMLSDKGNTAVYLQYAHARICSIIRKSNKDVEELKMSGAISLDHPDERVLGLYLIRFAEVVEEACTNLLPNVLCEYLYNLSEMFTRFYTNCQVVGSPEETSRLLLCQATAVVMRQCFELLGITPVYKL

SEQ ID NO: 44069 - protein, 868 aa, Oryza sativa
MMVTWPWRALPLAAVLFLFLSPAASVDTVTMEAPLAGNRTIVSAGGTFTLGFFTPDVAPAGRRYLGIWYSNILARTVVWVANRQSPVVGGSPTLKINGNGSLAIVDGQGRVVWASPVMSASVLSAGSAKAQLLDNGNFVLRFASAGVAWQSFDYPTDTLLPGMKLGIDFRTGLDRYMNSWRAADDPSPGEYSFRIDPSGSPEFFLYRWSTRTYGSGPWNGYQFSGVPNLRTNTLLSYQYVSTADEAYYRYEVDDSTTILTRFVMNSSGQIQRLMCIDTTRSWSVFSSYPMDECEAYRACGAYGVCNVEQSPMCGCAEGFEPRYPKAWALRDGSGGCIRRTALNCTGGDGFAVTRNMKLPESANATVDMALGLEECRLSCLSNCACRAYASANVTSADAKGCFMWTADLLDMRQFDNGGQDLFVRLAASDLPTNSVSDNSQTAKLVEIIVPSVVALLLLLAGLVICVIKAKKNRKAIPSALNNGQVTPFGQRNHTASALNNWEITPFWQRNHVAASNDAQDNNSMRPAGQGNHQDLDLPSFVIETILYATNNFSADNKLGQGGFGPVYMGRLDNGQDIAVKRLSRRSTQGLREFKNEVKLIAKLQHRNLVRLLGCCIDGSERMLIYEYMHNRSLNTFLFNEEKQSILNWSKRFNIINGIARGILYLHQDSALRIIHRDLKASNILLDRDMNPKISDFGVARIFGTDQTSAYTKKVVGTYGYMSPEYAMDGVFSMKSDVFSFGVLVLEIVSGKKNRGFYHNELDLNLLRYAWRLWKEGRSLEFLDQSIAGTSSNVTEVLRCIQIGLLCVQEQPRHRPTMSAVTMMLSSESPALLEPCEPAFCTGRSLSDDTEASRSNSARSWTVTVVEGR

SEQ ID NO: 44070 - protein, 332 aa, Oryza sativa
MSTTNHYQHIKSNKPVLGKARKLKDLMLKSDNRICADCGAPDPKWASANIGVFLCLKCGDVHRALGPDVSKVLSVTLDDWSDSDIDSMLEIGGNSYANSIYESFLPKDHPKPKMDSTMEYRTKFIRAKYETQDFLKPSLRITSKGSFDATNAVKSVTSSISSASGKHVADDTREFVGELNITVVRGIQLAVRDMLTSDPYVVLTLGEQKAQTTVKPSDLNPVWNEVLKISIPRNYGPLKLEVYDHDTFSADDIMGEAEIDLQPMITAVMAFGDPSRVGDMQIGRWFMTKDNALVKDSTVNVVSGKVKQEVHLKLQNVESGEMELELEWVPIP

SEQ ID NO: 44071 - protein, 332 aa, Oryza sativa
MAISSLHATTSLHSPCTTNTSFRQNQVIFFTTRSNRRGSTRYGGARTFQVSCSVDKPVVIGLAADSGCGKGTFMRRLTSVFGGAAEPPKGGNPDSNTLMSDTTTVICLDDYHSLDRTGRKEKGVTALDPRANDFDLMYEQVKAIKEGKAIEKPIYNHVTGLLDPPELIQPPKIFVIEGLHPMFDERVRDLLDFSIYLDISDEVKFAWKIQRDMAERGHSLESIKASIEARKPDFDAFIDPQKQYADAVIEVLPTQLIPDDNEGKVLRVKLIMKEGVKNFNPVYLFDEGSSITWVPCGRKLTCSYPGIKFAYGPDTYFGMRYQCWRWMANLTD

SEQ ID NO: 44072 - protein, 511 aa, Oryza sativa
MAAKAPLVLRLCLFLCISLSLLLLSSPQRVTSLSLDADVDDHYYHYDGDEDDDNYYHDDDDDVFSGRPVRRIYDGDDDENYYRNDEVDFSSRPARRLYDGGAVMPEKYNVLNGNSSNSSSGSAFCRLLSLQILDLSNNKLTGKLPDCWWNLQSLQFMDLSHNRFSGEIPAVNTSYNCSLESVHLAGNGFTGVFPSALKGCQTLVTLDIGNNNFFGGIPPWIGKGLSSLKILSLRSNNFTGEIPSELSHLSQLQLLDMTNNSLTGSIPTSFGNLTSMKNPKIVSSAGSLDGSTYQDRIDIIWKGQEIIFQKTLQLMTGIDLSGNSLSECIPDELTNLQGLRFLNLSRNNLSCGIPENIGSLKNLESLDLSSNEISGAIPPSLAGISTLSTLNLSYNHLSGKIPTGNQLQTFTDPSIYSHNSGLCGPPLNISCTNASVASDERDCRTCEDQYFYYCVMAGVVFGFWLWFGMLLSIGTWRYAIFGFVDGMQCKVMQKVSSVDKFLSRGNTDQYL

SEQ ID NO: 44073 - protein, 216 aa, Oryza sativa
MSWFFSTDGFSLHALFCYVQCEGKIKTVALTNFDTDRLQIILENGIPIVSNQVQHSIVDMRPQRRMAELCQLTGVKLITYGTVMGGLLSEKFLDTNVSIPFAGPPLNTPSLQKYKRMVDAWGGWSLFQALLQTLKKVSLKHGVSISTVAVRYILNQTSVAGSMVGVRLGLSEHIKDTNAIFSLELDEEDMNSITEASNKGRNLMDIIGDCGDEYRA

SEQ ID NO: 44074 - protein, 324 aa, Oryza sativa; identical to SEQ ID NO: 33382

SEQ ID NO: 44075 - protein, 388 aa, Oryza sativa
MESSRSRKRARQDWDGAGAPPPPAERAVVARGGASPPWRDDDRDGHYVFDLGENLNRRYKILSKMGEGTFGRVLECWDRETHEYVAIKVVRSIRKYRDAAMIEIDVLNRLAENERYRSLCVQIQGWFDYRNHICIVFEKLGPSLYDFLKRNRYQPFPVELVREFGRQLLESVAYMHELRLIHTDLKPENILLVSSEYIRVPGSKKNSQDEMHFKCLPKSSAIKLIDFGSTAFDNQEHSSIVSTRHYRAPEIILGLGWSFPCDLWSVGCIIVELCSGEALFQTHENLEHLAMMERVLGPLPEHMIRKASSSAQKYFRRGARLNWPEGAVSRESIRAVKKLDRLKDLVARKADHSRAVLADLLYGLLKFEPSERLTAQEALDHPFFRNTT

SEQ ID NO: 44076 - protein, 411 aa, Oryza sativa
MGLDLGALVLKSGGLLVSDYDSIVAINIFVALLCSCIVIGHLLEGNRWVNESITALVMGLITGGVILLVSGGKNSHILVFSEDLFFIYLLPPIIFNAGFQVKKKQFFRNFMTIILFGAVGTLISFVIISLGAMTLFKKLDVGPLQLGDYLAIGAIFSATDSVCTLQVLNQDETPLLYSLVFGEGVVNDATSVVLFNAIEDIDIANFDSLVLLAFIGNFLYLFFTSTLLGVVAGLLSAYIIKKLCFARHSTDREVAIMILMAYLSYMLSMLLDLSGILTVFFSGIVMSHYTWHNVTESSRITTKHTFATLSFIAEIFLFLYVGMDALDIEKWKLASSSPKKPIALSATILGLVMVGRAAFVFPLSFLSNLSKKRDTPKDLLQAASNHMVGRSHERSSINSTCLSQVHRIWSY

SEQ ID NO: 44077 - protein, 144 aa, Oryza sativa
MSETHEKDKQFEKEGEEGEEEEYVLLELDDCLYSDVQPNASYVLSGLDTLTPTLILGDGLKMIGEYQETIGTCYLFSETNAPPKPIHGEMAPPEENKDKQASCSKEVPSKEVKHLASVQKILKFRSINADHEQRRAYRDNEREI

SEQ ID NO: 44078 - protein, 48 aa, Oryza sativa
MWPRRRSTSVAASSSMSSATSCIGGRGGQGDGEKRRRLATRRPCSFQG

SEQ ID NO: 44079 - protein, 226 aa, Oryza sativa
MQRTSTASSIGSSEGTSEQIKVASTISLIDFSADPEPSASVPPPQSTPTSQQQPASAQPVQPVNAPAQQPAVEQGKNVSSVSSGGGDWASFDSFGQQQTPQTGNSVDPLESALAQLSFSETPSAPNSSAFPASVMPTSVPNDGGSSMMGQSHSSFFGAPPGVSGHQASTGMSIHGSSVQQTGLAAPAAGLPFQVSANSRATSGIQEAAPNTDSRSIGRKELPAVCD

SEQ ID NO: 44080 - protein, 259 aa, Oryza sativa; identical to SEQ ID NO: 32947

SEQ ID NO: 44081 - protein, 413 aa, Oryza sativa
MEGEDKLDLILRRMEEFERRQVEADQRRAEYQSLKAAVELWMPEIQKNAEDLQFLVGDEQSKVTLTTCSTECPNGSSPSRTARSIYDDEGSTPTIILELGGGEDKIHDPYIIAKDSLEVTPTMCSMKCSIPDTESNLTMVAEVTYASTATVSMELVAAQEAIDATYSDTSDHSKVMRTKCLTVVLDAIGDTGQAMVVFQTWTDAFKDVPTSVQFMDFFSSSMMANIKWNTPIPIKYSVQFLGHDMLATNALDVNSWPPPWSDGVIRGRDLRPSPWPGFNFCGTVEHWMPPWPPPTQPMPLTYPSKFGLVFTIDGVHIDWNLVVAVHKIFWSVMIKSMRHVPSISSELDDIQGKSTMIFIDVTIPEGCNPKKSGSATTETIFNSFSELLDVHLTTIEMLVSKRSQEIRCWQGAL

SEQ ID NO: 44082 - protein, 780 aa, Oryza sativa
MDSSRDSEEERPQRKDNGEETENGEDGGNALSLKDVANELLGCVVHSEEEAYKLYCDYGHRIGFSVRKGKQSYFIGTKNIRTKDYYCSKEGLKYDGPVTEANFNRPDTRTNCKAMIRFRVDEKGRWTVIRFVPTHNHQLAKPGERHMLRSAKSLAVGKSGVIDPQASTESHPINGFSHMIGSDIVEPPGYTIRDCYNHVSMQGITIIEAGDSQSLVNYFKRRTNEEGMFYWDVQVDQEGRMTNFFFRDAKSRNDFDCFGDAVIFDTTFRTNKYSLVCAPFVGVNHHWQNIVFGCAFLLDESSASYVWLFKSFLESMGGRSPKSIFTDQDDAITQAVELVFPNTQHCFSYWHILKNAQSHLGTVNTSQTFQNMFIKCMQGPNSETELEESWATMLNGYKLQENSWLSDLYRSRNKWCSAFNKDTFDGGINSSQWGEVSNNTFTGISDESTPLTRFALLLEKVFKGLRRNESEEDFRCSQTAPVRAIKHSTVLKQAAESYTHKIYKLFEAEFLDGCGATSCHESSCGGNLLRFEITMQGRGSKVWTVLLDTSTMEISCGCRKFERMGLLCSHALKAFSLQNVDTIPEKYIPKRWTKDARRSMYKLSQDDSTQQECTEAELAYRNRATQYACSLIAKSQELDESRKIFWDTLETGEKALDVFFEIRSLRSQAAKDVSKRDKKKKKSSKGPSTKKAKPTPATSSAVPELLAQTNVHQFQSAQDAQGNTTIGRPLYYQAFSSAPIQPNQIYMHPNMHTMPLCAPQDFSAYSAMRPNSNFGGAKNV

SEQ ID NO: 44083 - protein, 345 aa, Oryza sativa
MIGLDEQNSSAHGKNHTSLLSDDEEEILEKHNVTVEQAVDDFKLPAQLVQRYVKVSCGSRLAILLTILKSLFERQLSHKVVVFLSTCDSVDFHHTVLSQLEWSPGLQLDTDKKRKFISCKVFRLHGNMDQDDRKKSFLGFSSEKSAILVSTDVAARGLDFPKVKCIIQYDSPGEASEYVHRVGRTARIGEKGEALLFLQPIETDYLRDLELHGASLTEYPLQKVLDSFPVNGQRLHKRKQISLDMHPWIMSLQRALESFVTSEDTTKKLARDAFCSWVRAYTAHRGELKKIFMVKKLHLGHVARSFGLKEQPSLLGRSHQVQLKKRKKEQKRERPAKRRKIPAKR

SEQ ID NO: 44084 - protein, 52 aa, Oryza sativa
MHRTAASARRRRRRASHGHTAARRRSRNLRREGAATGWALREGARVVTAARR

SEQ ID NO: 44085 - protein, 299 aa, Oryza sativa
MPLLDTPYLALRVRLPRFPTPHNPRPAVAIEAQHSFPHGLLARAACQPLRHVAAPAEGEGEEVEDLGTPSAAAVAEAIRRASSASPVRFRRVHREENEKLRGEGGFTEPSTDFRRLCGEQLEMFRVVISRDAVLSVYVRPAGSYIMDQLELRRVALYPETNVSKGDTVILVGNFTISAGLRAAEAFLVKHQMEIITEFGAVVLPMVKHPFVVGFLVAELPELVGCTKNSETSDIQIPSHSFLDKSSDITPYTKGETWDFQTSGDQANSYAQLVTEWKNSALMISRTLAMAYVMDQVVCS

SEQ ID NO: 44086 - protein, 528 aa, Oryza sativa
MAAASAAKELHFLLVPLVAQGHIIPMVDLARLLAGRGARVTVVTTPVNAARNRAAVEGARRGGLAVELAEITFTGPEFGLPEGVENMDQLVDIAMYLAFFKAVWNMEAALEAYVRALPRRPDCVVADACNPWTAAVCERLAIPRLVLHCPSVYFLLAIHCLAKHGVYDRVADQLEPFEVPGFPVRAVVNTATCRGFFQWPGAEKLARDVVDGEATADGLLLNTFRDVEGVFVDAYASALGLRAWAIGPTCAARLDDADSSASRGNRAVVDAARIVSWLDARPPASVLYVSFGSLTHLRATQAIELARGLEESGWPFVWAIKEATAAAVSEWLDGEGYEERVSDRGLLVRGWAPQVTILSHPAAGGFLTHCGWNATLEAISHGVPALTWPNFSDQFSSEQLLVDVLRVGVRSGVTVPPMFLPAEAEGVQLTSDGVVKAVTELMDGGDEGTARRARAKELAAKARAAMEEGGSSHAGLTDVIGYVSEFSAKKRQERDAGETAQQPPPSPAELGDISGDKVEADPALSVQS

SEQ ID NO: 44087 - protein, 331 aa, Oryza sativa
MVGGGRRGAAAEEVKLSTGNVFAALETLKKKKKGGDKAKGGSSSSSGRKREQQGAQPSSQQQQQQQKEVFWAPAPLTTKSWADVEDDDDDDYFATTAPPRPAWGTGHGDDGAKEEDEEDDDDAVHAALQEEVESEDEDLDDEVDDGAVDEPEHEVDDTSAEPAGKKAAVPVAPPKDTERQLSKKELKKKELAELDAVLAELGISGGSSNAAQDENNAEKKGSNQTGDGDAPAPSESKSSKKKKNKKAKEAKESQEPADGTEETASAEPDEDTTSVDVKERLKKMASMKKKKSGKESDTAAKIAAAEAAARSARLAAAKKKEKNHYNQQPVR

SEQ ID NO: 44088 - protein, 210 aa, Oryza sativa
MRAINAGCWIVRRVYGWCVADAGLQRSVKSCRLRWVNYLHPGLKRGRMSPEEERMVVQLHAKLGNRWSRIAKSIPGRTDNEIKNYWRTHLRKLKLKQQKQQQSDDHHNDNDDDDDRNSSSSSSSSNSNSNLQQQPQPEDESSASGSLQAQHHEDQHQLFLHPLWNDDIIVDVDCWSSSTNVVAPPPMPASPLWDIDDAFFCSDYSLPLWG

SEQ ID NO: 44089 - protein, 794 aa, Oryza sativa
MSGAPKRSHEEGSHSTPAKRPLDDSSLYSSPSGKIIQPGSSDFHGSFEHDGRFAKVQRIEPRDDKRPSLAHRMPIGPSNFVDHSISSDGRLESKQNKDPWDTKVDVREAKADTRDVYSDPRVEFPSNKVETDVKTDNRADDNDIRADRRIHADYKGDAKLDKDGHPTAISNIAWKDNKEHRGKRNIEQPSDNADWRFPRPGLQGTDESSKGPVPADERSKDAHESTGENKTEPKTEDKFRDKDRKKKDEKHRDFGTRDNDRNDRRIGIQLGGNSVERRENQREDRDAEKWDRERKDSQKDKEGNDREKDSAKESSVATEKENAVLEKTASDGAVKSAEHENKTVEQKTLKDGAWKSHDRDPKDKKREKDMDAGERHDQRSKYNDKESDDTCPEGDIEKDKEALGSVQRKRMARSRGGSQASQREPRFRSRMRDGEGSQGKSEASAIVYKAGECMQELLKSWKEFEATPEAKSAESVQNGPTLEIRIPAEFVTSTNRQVKGAQLWGTDIYTNDSDLVAVLMHTGYCSPTSSPPPSAIQELRATVRVLPPQDSYTSTLRNNVRSRAWGAGIGCSFRIERCCIVKKGGGTIDLEPRLSHTSAVEPTLAPVAVERTMTTRAAASNALRQQRFVREVTIQYNLCNEPWLKYSISIEADKGLKKSLYTSARLKKGEVIYLETHYNRYELCFSGEKARLVGSSSNAADAETEKHQNSSHHHSQNGDRASSEHELRDLFRWSRCKKAMPESSMRSIGIPLPADQLEVLQDNLEWEDVQWSQTGVWVAGKEYPLARVHFLSSN

SEQ ID NO: 44090 - protein, 540 aa, Oryza sativa
MEFSGGATVSAPFGCCRAAWGAAAAGAGAEGRSRRVVPRAVEPRRRGRWMVRCVATEKHKDAAARRGGVEVEFADEEDYVKGGGGELLYVQMQASKSMDSQSKISSKLLPIPDENSVLDLVIIGCGPAGLSLAAESAKKGLNVGLIGPDLPFTNNYGVWEDEFKDLGLESCIEHVWKDTIVYLDGNKPIMIGRAYGRVHRDLLHEELLRRCYDAGVTYLSSKVDKIMESPDGHRVVCCEGDREVLCRLAIVASGAASGRLLEYEVGGPRVCVQTAYGVEVEVENNPYDPSLMVFMDYRDCFKDKFSHPEQGNPTFLYAMPMSSTRIFFEETCLASKEAMPFDLLKKRLMSRLDAMGVHIRKVYEEEWSYIPVGGSLPNTDQKNLAFGAAASMVHPATGYSVVRSLSEAPRYASVISDILRNRVYPGEYLPGTSQSSSPSMLAWRTLWPQERKRQRSFFLFGLALIIQLNNEGIQTFFETFFRLPKWMWRGFLGSTLSSVDLILFAFYMFTIAPNQMRMNLVRHLLSDPTGSTMIKTYLTL

SEQ ID NO: 44091 - protein, 143 aa, Oryza sativa
MLSTSTVFLFGPKQITLAETTGGTFREYIDTFDGYSFLYPKSWIQVRGAGADIFFRDPFFLDENMSVEISSPSSSKYMTVEDLGPPEKAAERVLQQYLTEFMSTRLGVRRTSNILSASSKVADDGKLYYEVEVNQTDYTNSHS

SEQ ID NO: 44092 - protein, 378 aa, Oryza sativa
MSSASGVNNGDGKEAALFEQRLSKIGEVRAALGQLSGKAALYCSDASIARYLVARNWEVKKATKMLKKTLKWRSEYKPDEIRWDEIANEAATGKIYRTDYFDKSGRSILVMRPGVQNTKKAKGQIRYLVYCMENAILNLPHDQSQMVWLIDFAGFSLSNISLHVTKLTADVLQGHYPERLGVAILYNAPKFFESFWKIASPILEPKTFNKVKFVYPDRPETNKIMEDLFNMEELESAFGGKNQATFNINDYAARMRGDDIKMPLFWSPENSALASEPYVMVNKDMAQEGSSGLKSEETASEKREETDTESENREETESESERAEIDSVSGKREETVAVSDKREEKETESENGKAAVTSSNGVELTSLPGEGKGITPAD

SEQ ID NO: 44093 - protein, 465 aa, Oryza sativa
MDKSQGVLLSSNVGAGSRPWPELLGSAHWDGLLDPLDLTLRRLILLCGDLCQVTYDSFNSDSHSKYCGTCRFSRSTLLDRTQFPAAGDLSVAAYLYATSDATAFPGSMVYSMSREAWSKESNWIGYVAVSNDAAAAASGQRVIYVAWRGTIRSLEWVDVLKPDLVDHDDILPEGHPGRGRSRVMKGWYLIYSSTDERSPFSKYSARDQMLATVRELVARYRNESLGVVCTGHSLGASLATLCAFDIVVNGVSKVGDGAHIPVTAVVFGSPQIGNPEFKKQFEEQPNLRALHVRNMPDLIPLYPSGLLGYANVGKTLQVDSKKSPYVKRDTSPGDYHNLQGILHTVAGWNGKDGEFKLQVKRSVALVNKSSGFLKDSNLVPESWWVERNKGMVLGQNGEWQLEGPAEENLPVPPVVTGKIIDDDVAAVATSSSAKEDKKTGKGSKLLSGLIDQLLCVPDTCKAGAA

SEQ ID NO: 44094 - protein, 186 aa, Oryza sativa
MGIGWIGGSRSSSPPTRSAGVSLTSRRCGSGRFILERSSSSAPASRSTCCLTRSGFLCVPSPPCSPPSERSLISSSSASPGSARRPPRTTSSSRRRRRPRRRTWRSSGSRRPSWSGSCGRSWLGYSSTRRSTRRRASSSSCSSASPSGTTRCRRPASAPSRRSSRTACRRAPSASTPAPRPSASPA

SEQ ID NO: 44095 - protein, 83 aa, Oryza sativa
MYERLSDGIAMLCLDSDPPPPARFDLCLKSLIWAVGCSSELLELHLMIAHNKDGICNPNLPRSTSSRQALSLCTQSLIHVFCT

SEQ ID NO: 44096 - protein, 481 aa, Oryza sativa
MATSGPARGWLPALARRIASVTGTLNPPASRVSRFPGSRNMASGSGVEGEGLGIPYRRRFIPFANDPIHTTKDNIISMDKHLPITQGKDSAATKEFISCYGHCRPTTYGDEDASRTAVEVTGGKQDPRGAVQNLIDGEVAVQELIDGEEIARNQRASEVSDNDGYEEFNDRAVNYHCDCHVWTPLIASSHRDGSIYDTRGTFGSGWKWDYRIADRNETRLEAMMLSHPTKDCYMRDGTCIWHPANSMLQIFSVKLAKTPVVDGSIELYGYIAVRDLQDPLLNYIVKIGRDDPIIVEQGSLIEMTGPKRGIDFSCAVLVEYDMRIKTGEREEDDLQLIDGATDLDHILTSHVPVRNRIYGDCGAVDITQANLLYAFEATVEVVISEVQTSFDLCLSCFTSGLHEEIRLFDGAISESRDLRRYVIAVMEHECMDLKFKVGLGSGCFAEHCRSFKATNHGCASEQIKIEFASISVKVTWSAMEF

SEQ ID NO: 44097 - protein, 282 aa, Oryza sativa
MAGFSHLPQQMEHGLITNNGFLFCHGSHGGAATTTAPAIPEDASMETSSVVLDTSPQDKKRKPREEDTASLNSAHSKEAKENGRKRGGKKHSRDQMEEEAPQGFIHVRARRGQATDSHSLAERVRRERISERMRMLQALVPGCDKVTGKALILDEIINYVQSLQNQVEFLSMRIASLSPVLYGFGIDSDAFSDHSQKMEGMFHEAVAIPASVLNRGSSPAQSHAIMDTSNTSPTPYTLQVQGGSNNNSLSQDNGSYIMQTVGEPRQELFNQVVLNNYMCSFQ

SEQ ID NO: 44098 - protein, 57 aa, Oryza sativa
MHENYHFRVLQFMECLCVCVANAQFMDDLATAKMMLRINIIVFLSETNRSSGNTHIN

SEQ ID NO: 44099 - protein, 172 aa, Oryza sativa; identical to SEQ ID NO: 37315

SEQ ID NO: 44100 - protein, 485 aa, Oryza sativa
MMVSSQTSSLTRTIAQDPELFTAKIILPMGPPDVISENDEFDFSDVFGTTPVQTPTGISVAGPDSPAPLAESNEGVYNDPIVIIKRSHSLVGPTSLVSQSLRLSNLTLNKTEGSSEPAEEKERNLGQLSDEEFDNATTENEGIGLDDFEILKLVGQGAFGKVFQVRKKGTSEIYAMKVMRKDKILEKNHAEYMKAERDILTKVDHPFVVQLRYSFQTKYRLYLVLDFINGGHLFFQLYKQGLFREELARIYTAEIVSAVAHLHDNGIMHRDLKPENILLDADGHAMLTDFGLAKEFNENTRSNSMCGTVEYMAPEIILGRGHDKAADWWSVGILLFEMLTGKPPFVGNRDKVQQKIVKEKLKLPSFLSSEAHSLLKGLLHKEGGKRLGSGPGGSDEIKRYKWLKPINWRKLEARQIQPSFRPNVSGLTCIANFDECWTSMPVLDSPVATPVAGGAGHSSFAGFTYVRPAPFLQDVKPPSSSRLKD

SEQ ID NO: 44101 - protein, 522 aa, Oryza sativa
MAPPVPTAAARLVLRRLLSTAVAEAEAAAVAPAAEKAAAKGAKTAAAAGEEKDARSLYRRLSALGGAGEGSVSRVMNKWVREGREARAADLAKYVKELRKYKRHAHALELMEWMVNTKGMNMSYTNHAIRLDLIYKVRGIEAAEQYFAGLPDPGKNHKTYGALLNCYCSAKMEDKATDIYRKMDELGISSSTLPINNLMSLYVKIGQHRKVTSLFEEMKVKNVKPDNLTCCLLMSSYAALNKIDTVGEVLKEMEEKKVALGWSAYSTLASLYVNANMVEEAESALKKLESLIDVQAGRQPFDFLMSLYASVGNLSEVNRVWNLIKANFQKVTNTSYLGMLQALYKLNDDDRMKQIYEDWESNYENYDARLTNMMTRAHLRNGLTKEAELLWEKVKEKGAEFDSKTCELFLEHYMGKGDMTSALNWVENMTKLPRKKSKLDQEKISCFLKYFEEHKDVEGAERFLNCLRTSGCIDGKAYESLLRTYLAAGKTSRSIRQMIKEDKIEICYGIGKLLKRIADKGR

SEQ ID NO: 44102 - protein, 343 aa, Oryza sativa
MRVNPILDWSYRDVWSFLLTCKVKYCSLYDQGYTSIGSIYDTVPNALLCDSTTGKSFRPAYMLSDGRLERAGRTKKNISSVSSNGTNSTEVEQTISRSASIIVVGDEILFGTVEDKLGAGLCKKLHAIGWRVSHVAVVSNEIDSVAEEVERCKSTDDMVFLVGGLGPLHSDISLAGVAKAFGVRLAPDEEFEEYLSQLIGDNYTGDRNEMALLPEGITELLHHKMLPLPLIKCKNVVILAATNVDELETEWGCLLDTQESGLVMAKSFVSKHLCTSLLDVKIAPVVAKLCIDFSDVYIGCYRISRSGPLVVSFIGKDNQRVEAAAEKLTNSFEGQFSQVDSCK

SEQ ID NO: 44103 - protein, 475 aa, Oryza sativa
MFSLNSEQDSNVWKDLFLAYKTLGVVFGGLVTSPLYVYPSMNLSSPTEADYLGIYSIMFWTLTLIGVVKYVCIALNADDHGEGGTFAMYSLLCRHADIGILPSKRVYAEEDPLLHSQSAIARRPSRLGKFFEQSITARRVLLFVAVLGMCMLIGDGILTPAISVLSAIDGIRGPFPTVSKPVVEALSAAILIGLFLLQKYGTSKVSFLFSPIMAAWTFTTPIIGLYSIVHYYPGIFKAISPYYIVHFFLRNKRQGWQLLGGTVLCITGAEAMFADLGHFSKKAIQIAFLSSIYPSLVLTYAGQTAYLINNVNDFGDGFYKFVPRPVYWPMFVVATLAAIVASQSLISATFSVIKQSVVLDYFPRVKVVHTSQHKEGEVYSPEINYILMVLCVGVILGFGGGKAIGNAFGVVVIMVMLITTVLLTLVMIIIWRTPLVLAGLYFVPFFIMEGAYVSAVFTKIPEGGWLPFAVSKPLQ

SEQ ID NO: 44104 - protein, 235 aa, Oryza sativa
MSSVQLSGAGVAAVAFTKNGASSFDGLRLAPPSVRVCSSRRPSRSLVVKAATVVTPKYTSLKPLGDRVLVKLGAAEEKTVGGILLPSTAQSKPQGGEVVAVGEGRTIGDKKVEVSLQIGAEVVYSKYAGTEVQFNDTKHLILKEDDIIGVLETDDVKDMKPLNDRVLIKVAEAEDKTAGGLILTETTKEKPSIGTVVAVGPGPLDDEGKRQPLSVSAGSTVICFNFEFRIDGSRW

SEQ ID NO: 44105 - protein, 766 aa, Oryza sativa
MTSVTSDLLQSCSETMISFVHNMTASYADKSNESSVVSTSVVMFILAAVFFNLNLFSGVSDVSAVLNPTVRIFLSSALNLFLPVMSYLFSEAKQAPLGVGDSTTTTRDAHSDDLSLLARVILTWMLLVELLRKKVEAILITTGMHVYSSLISHATSVAWLGNLVFFNLQAAGKKALFGVLWVLCAAKLVQRVAITEIGKRSFAHGKNARLISSYMAQLPKLLEVDEHVAADGSRMERCNFAVMGEENMVLKAGPHGYELDLGLAAAVVTVGKIWQTKQHPRLKRLCLSFALFKLLRRRFENLPPATMKETDECRDLILDGMCKDAQATGDVPAEVALFQVLNDEVNFLAEYYHSVLPVVLASPYFFVVNYLCFPVVVFGLCVMTIVLCGNGNVLYAFKSLTNDNYAVSSGILSLTKCLWKNVVRSPLVFFSIVDVSICYLLFIVVVYEEVWEFVVFLLSNWFIVSLLCTFSAKPRRRESPTFRGSVRCILWLRRNLSHYPSLITIKQFTVLSTCCLSPRLPTATLPRHAKLAILERFRGGDPLSNGGAVLTSMGGRHRRFSRLSWACQSGAVAEVILTWHIATSLLETKQQQQLPTSASRSRRTAARLSRYCAYLVAFRPELLPDDREGTERIYKDLKKGIKAALGGARGYYLSSERSRHETIRALRVDASAAADMTVLERGAVLGKQLVEDDEAGDGAVWEMLADVWVELVVYVSPSRAEEHARGHEAALAQGSELVTLLWVLATHTGIARPDHDGEIDQPAAPA

SEQ ID NO: 44106 - protein, 115 aa, Oryza sativa
MEPIREGEGPPRRRHHSLLRLGVWPRQAALHRLQEEQHGGGHRRREANYKRRSNTRREAVRHGHHRRRRRLPEAGEGGGNGARGVLDEEAMRGSSAYSCPWCPAVITSNQFIYTS

SEQ ID NO: 44107 - protein, 438 aa, Oryza sativa
MNGLVFDVRRSQAATLDGSTEVEQSTSFKHEVQDPQCSSFTSRDQRCFHEIIFACDDKPKLLSQLTALLGELGLNIQEAHAFSTSDGYSLDIFVVDGWSHEVDVLRDALRRGVEKIKYKAWPLVQSMPTRTGHELMEDSPPADFVQIPADATDVWEVDPRLLKFERKLASGSFGDLYHGTYCSQDVAIKVLKPERVSVDMLREFAQEVYIMKKVRHKNVVQFIGACTRPPILCIVTEFMRGGSIFDFLYNFRGTFQLPDVLRIASDVSKGMNYLHQINIVHRDLKTANLLMDDQVVKVADFGVARVKDQSGVMTAETGTYRWMAPEVIEHLPYDQRADVFSFGIVIWELLTGKLPYEDMTPLQAAVAVVQKDLRPIIPADTHPMLAGLLQKCWQKDPALRPTFSEILDILNSIKEAVRSSGHQKRHSGRSYSRQRRSG

SEQ ID NO: 44108 - protein, 151 aa, Oryza sativa
MEKGFRSSSGGHSRWRCRCSGLPWRVSSQKRLLRPPSVGQPGSLWFGGWSRGAVCTPPCREWPAQIPSGPASHPDKAFTVSLKYSTLTMRGTALHRLDVCSHISSSAARSGHCFPSGSLHLNPRTYLQRLLTGISDVLPDPVVLPDSGSYW

SEQ ID NO: 44109 - protein, 400 aa, Oryza sativa
MISTEEDSDSFQDDSEELQMQVTKKTLKRVISLAETFIAIATGILAAAFSAGKDVHLHRHVLAAGGCFLVVTYLSALLLIYMKLFLSDHRRLRRWHVRSLQLLCVTSGASLVATNSLLLVLIGEGNGLLSLNLLPVQGIVGVLAYHATPTEGSARDEAFEAQVKSARKVALFAAATAFAVQTTLVFGAFSNAALQAMGGRRLDLSVSFLASALSVFLVVATCMPLGFRNQGARDKVLSIVRYLKKGVMAVLAVTAVTLGQEFLGGAAALALFPEITVAAMYYAVSMPADEAAAAADRKMEVLPTVVVATFGFGMLGAAYAALFGTPEYDLYTKALAFTLLTAVVSSLGRVAGPLCNAQRDKSSAAWVTFLSSILPIVEMLVAVPLAAKVMVDFLAVPGNG

SEQ ID NO: 44110 - protein, 356 aa, Oryza sativa
MAISPPPPSPSSGDPIEAARHAAAAALAVPARLWGSLLARLPSLSDRRPRRRRRPALPLPFRTAAAHSARATGETPKAFGILEDIVQHTLCSLHGIQKSLLFWQSKAEGTNSQKMYFMIFERGPRAFVKATYQTLTRLRSNESPTQYILHSASDMVSTKLAVLTNMQHCLAAFLAEVYCEVDKFKEGLTENSDKSLHTLFAVLNTVFSKLEVSLQNVCEGHTLLFALDGSPSELLFERLPEIDYDNSEWTEASSTDAICFIYQNLQKLDNLVCSQLSRHKKPRHMTIYWLPYTCGALGLSACSLWLLRHSSLMGSSDIDNWVQSAKESIAGFWDVHVEKPVGYFLFMSFYYLSYAF

SEQ ID NO: 44111 - protein, 302 aa, Oryza sativa
MLRNRSRRSVGAKQGGVTAMAQPEPPPPSSQSSSSSSSSSPVFPSPRPFMALPHPPQAGFLDGAAEGPSSSMSPTSILETKQFCCSSAMPPFLSERSLRKAHVEMAAAPPEPAGVGLADVLREHHGGGKAGGGKVVFGSQLRIQVPTGRAVELVSSPIEFGVKNRDAHLAAMSPARRFLPEVVSSPSARVFAAAVVSPGEMAMSEDYTCVISRGPNPRTTHIFDDCIVESCGDVLVEKVAGGGGDGDGDAVRTNGFLNSCYACNKQLGHGNDIFIYRGDKAFCSSECRYQEMLFDEAVDNLR

SEQ ID NO: 44112 - protein, 735 aa, Oryza sativa
MDESRKRAASTANAKSSSLGEDFGNDFLSSWKLPKSGNDTIDFDVESVPKNSKKFSFDNLDDFGLDGAFDKLSSFKMGMSDLDFSGPLKKKVKPNNSNGNDLSEGIKGTEKDNFSFSFDFNGLGKFNLDANLGIEENGMSIFVEKVNPVSSEGDKDPRKGLSVKGSDVLGGNISKEQKQTHDACTLRPTHLGSFSPARMDQNKVDLLSTDTHEEKSNETHPSRAAVNKPSQNLPCSSTPGEDPTHVTTTAVAENCREAPLVELSKVHISRGNNDSGQSVSSQFMNTSTTCPSISRKLTAQSDSQNDQNEIVGESACLNAQSPDNQRFRGTSMKLLKKTSCETKKAEKGTSGPKSLSSSMQRDMRNVKPASLNEAGSLSLPPQSSIVKASRPPQLTSETTLNQLSSANNMVKKMNTHSTELKRGSTQANARSERPKIASSKTFCKPALHELLTTSMNAKDHKNSKLRLESPSTGNVSTLNAPSSPAHSNGHKTVASRSLLGSTNVFDAGKGTPKVDNRPLSQLKAAKITKAGTISSKSDLLLEKDMMETSGRKGSPVTTSNNPKSYGEGKYVLPSPSMMQKTPKESASDPKAPAMLKHIMKSPAVRTSPETVSELGNKTIPGSGTPKARMDNAIASAISCEMGEISELELPALLENDVNVQKAEACRKELEDLCISLKRKHEEAKELAVRAIVNNNTMLMLNHPMFEDKICALQKFASNLRSKKVLFEDISAIDAH

SEQ ID NO: 44113 - protein, 504 aa, Oryza sativa
MRNVATNRSRNFSNKVRASYNIWRLQFHHTNTDSTLRLMKDQIIMAKVYATIAHSQKQPDMYALLMKCIKLCQEAIGDAHMDYELDSSALERAKAMGHALSSARDVLYNSDEVSRRLLVMLQSTELNIDSVKKQNSFLVQHAAKTVPMPLHCLHMQLTTDYYFRDGMIKEYFHDAALKEEEDKAKREDRSLYHYAIFSDNVLAASVVVRSTVTHAKEPEKHVFHIVTDRLNFAAMTMWFIRHPPLPATVHVENIDNFKWLNSSYCSVLRQLESARLKEYYFKAHDPSSLSDGNENLKYRNPKYLSMLNHLRFYMPEIHPKLDKILFLDDDVVVQKDLTPLWDVDLKGMVNGAVETCKESFHRFDTYLNFSHPKIAENFDPRACGWAFGMNMFGLKEWKKQNITGIYHYWQDLNEDRKLWKLGTLPPGLITFYNLTYPLNRNWHVLGLGYDPAVDLAEIENAAVVHYNGNYKPWLDLAVSKYKPYWSKYVDLDNSHIQHCYMSEQ

SEQ ID NO: 44114 - protein, 859 aa, Oryza sativa
MNFLYRTSQPVAPELPRIPEQDQQRDSLQKPVTTLEGLIADDPYHPSPEDEDTDNGDVDIGGDSADADSKNSVPTGKHTDVLDDEGWITIPNKELPDNWNDLSDMLQLQPLDRPFLFPGEQVHILACMSASKQETQVISPFRIAAVMSKNGNSLQYSTNKSSHATENGDSNVKNGENGSQVVEDDMQSVELNSEMSPMTQDDMQNVELDNEMSPSKQDDMQNVKLNNEISPSKQDILETESLLRLEDHKQQIESMLQRFKMSNFFVRIAESDEPLWSNKKLAVSKVPKEQSYSDNQENNKGSRGNAYNTISDKGVFDGSTSGGIARGTARCYALQNGDIVVVLQVNVGVNKMEAPVLEVLQFEKSSSSNYITKNLVNGLSSGDEDPCQELLSWLLPLDRTLPPRSLSPPTLNPSASHKQSYSASGSQIFSLSHFRSYSMPSASSTQPPNIRPPPISESQEFVPEKPAKTPDIINDGQLSFRGVPLEPERYSVRCGLEGVYLPGKRWRRKVEIIQPIEVHSFAAKCTSENLLCVLIKNISPQHVKDIVVLVDAITIVFEEASKGGAPLSLPIASIEVGHGHSLPNLALRRGEEHSFILKPATMSFRDRRTNNDAPLTLSLPKMNGTATNVSLAKVGETIGSLMDQYAVLVSYRCNYTESKLFFKQATSWRPCVASDLMISVSSELSLRNPISSARVPQLPVQVLTLEATNMTSENLTVTVLAPEASGSSSVVSLNSAPTTPNSSYDNLNESVRGSGLGKHRAGFRRMNSVLAGSPKESDNGGNRISTSGGCTHLWLQSAVPLGCIPARSSTTVKLELLPLTDGIITLDTLQITIREKGLTYIPEHSLEIYASAANSTGSS

SEQ ID NO: 44115 - protein, 469 aa, Oryza sativa
MVANEVVAAAAVVEEPAPASAGAVDPMRLASRWRSPAEWGAAAAEMEAEPAPSELNTTNSSGLFAVVSTDRMSVRYLGVNQHGHDVGVVQANRPAPTRRAVYYFEMGVKNAGQKGQTSIGFTTENFKMRRQPGWESNSCGYHGDDGYLYRGPGKSESFGPKFTSGDTIGAGINYFSQEFFFTKNGSLVGSFQKEIKGPLYPTIAVHSQDEEVTVNFGKEPFCFDIEGYIFEEKMKQQSVSDKLDLQPDISHWIVRSYLLHYGYQDTLNSFDMASETDPPSNHQNGYGEPPEMYGLSHRKLLRQLIMSGDIDSAFKKLGEWYPQVIKDETSIICFLLHSQRFIEFIGAGQMEDAVKYARSNLANFLTHKAFDGLLKESVALLAYEKPAESCIGYLLDSPQREFVADAVNAAVLSTNPNMKDPESCLYSCLEKLLRQLTVCSFERRAFSGDQGDAFLLHKEVQSCDRSRCS

SEQ ID NO: 44116 - protein, 390 aa, Oryza sativa
MEKGGAESSIACARCGKPASLQCPKCAQLKLLREGAAFCTQDCFKEAWSSHKSVHIKLDALTLQQTPEGWQYCLKKGRTRTSQLPRFDWTGPLRPYPISKMCVVPDKIEKPDWALDGTPKIEPDSDLQKRVEIKTPEQIERMRETCRIAREVLDAAARIIKPGITTDEIDRVVHEETVARGGYPSPLNYHFFPKSCCTSVNEVICHGIPDARKLEDGDIVNVDVTVYYKGVHGDLNETYFVGNVDEASKQLVRCTYECLDKAIAIVKPGVRFREVGEIINRHASMSGLSVVKSYCGHGIGELFHCAPNIPHYSRNKAVGIMKAGQTFTIEPMINTGVWHDRLWPDEWTAVTADGKRSAQFEHTLLVTETGVEVLTARLPSSPDVFPWLKP

SEQ ID NO: 44117 - protein, 310 aa, Oryza sativa
MAVLPPPVRVAAAAAATTFGLSTSPAAATPAGCRRCGPRGRAAVHVAISASGRASFSRGAAGDGGGGRPAITVAGDPPTFVTAPGRRIVAVGDLHGDLNQTRAALVMAGLLSSESDGHVWTGGQTVLVQVGDILDRGEDEIAILSLLSSLNMQAKSQGGAVFQVNGNHETINVEGDYRYVDPGAFDECIRFMEYLDECDGNWDDAFLNWVNVCERWKEEYPMSPNGDWRPWNFVKKQKGIAARSSLFKRGGPLACELARHPVVLSVNDWIFCHGGLLPHHVHLHSTCSRIWYRAYEQRSFGLDEKFKWRQ

SEQ ID NO: 44118 - protein, 476 aa, Oryza sativa
MRRSASLLRVLLVFITMVGTQWSNVSSTYCKDMASSVYRPHSVTITEFGAVGDGVTLNTKAFQNAIFYLNSFADKGGAQLFVPAGRWLTGSFSLISHLTLSLDKDAEIIGSPDSSDWPVIDPLPSYGRGRELPGKRHQSLIFGTNLTDVIITGANGTIDGQGAIWWDWFHSNTLNYTRPHLVELMYSTDVVISNLTFKNSPFWNIHPVYCSQVLVQHVTILAPLNSPNTDGIDPDSSTNVCIDHCYVRNGDDVIVIKSGWDEYGISFARPSTNISISNITGETRGGAGIAFGSEMSGGISEVRAEGLRIVNSMHGIRIKTAPGRGGYVKNVYISDVSMDNVSMAIRITGNFGEHPDDKYDRNALPMISNITIENVVGVNVGVAGILEGIEGDNFSSICLSNVSLSVQSMHPWNCSLIEGYSNSVIPESCEQLRTDCGQTPICYDGGSSSAIHAQAARHRLSSASRLLNPLLKLAML

SEQ ID NO: 44119 - protein, 125 aa, Oryza sativa
MAAAAASSVSLPGARALPTWSSSVSGDSHSLALSSWAARPRSARPLRAPARMGNVNEGKGIFAPVVVVVRNIVGRKRFNQLRGKAIALHSQVITEFCKTIGADAKQRQGLIRLAKKNGEKLGFLA

SEQ ID NO: 44120 - protein, 312 aa, Oryza sativa
MAADSSMGFHQGITASMYNHHMLSFQSNSDLGGGAGAAAGMVMAPRSMNGTSSSAGLFVSPNTGVLGNASVAGPSRSSSGDAFSSTVAPKYKFVTGSPSDWNDRELNTLKEGLVRYAREPNIMKYIKIAAMLPNRTVRDVALRCWWATSKDRRKKPDGFYTGKKIRDMKPIQDKMVASASMANFHLAPANTVTPFSISMQHTNQQCQVPKEVPVVDSATQHLLEENNHLLNQIATNIETFKTGENTDLFFRTNNNFKNILSRMSETPGIMGQMPQLPVQVNEDHLSSLLQLDRMVPSYGVTQTSHMKQEPRS

SEQ ID NO: 44121 - protein, 500 aa, Oryza sativa
MAAAVGRARGFAGLVVQGEDTPFGSVWWWAYAGISCFLVLFAGIMSGLTLGLMSLGLVELEILQRSGTDAEKAQAAAILPVVQKQHQLLVTLLLCNACAMEALPIFLDRIFHPVVAVILSVTFVLAFGEVIPQAICTRYGLAVGANFVWLVRILMIICYPISYPIGKLLDCALGHNESALFRRAQLKALVSIHSKEAGKGGELTHDETTIISGALDLTEKTAEEAMTPIESTFSLDVDSKLDWEAIGKILARGHSRVPVYSGNPRNIIGLLLVKSLLTVRAETETPVSAVSIRRIPRVPADMPLYDILNEFQKGSSHMAAVVKAKPKIVPLPDKTEPNREVSGAPQLTAPLLSNNEERVESLVVDIEKPQSRQVNGNKPCSMQQNEMPYAMSRSSEDIDDGEVIGIITLEDVFEELLQEEIVDETDEYVDVHKRIRVAAAAAASSVARAPSIRRLTGQKGTGTQNRQGQPTGILKKPTEGDSNPSKHQVNLVEPLLENKR

SEQ ID NO: 44122 - protein, 348 aa, Oryza sativa
MGDSGGSVVSIDVERISFGGKEHHIHTNHGPVSVAVYGDHDKPALVTYPDIALNHMSCFQGLLFCPEAASLLLHNFCIYHISPPGHELGAAPISPNAPIPSVDDLADQVADVLDFFGLGSVMCLGVSAGAYILTLFAAKYRDRVLGLILVSPLCKPPTWTEWFYNKVASNLLYYYGMCGLVKEGLLQRYFSKEVRGCSDLPESDIVQACRSLLDQRQSMNVWRFVQTMNMRYDLTEDLKQLQCRTLIFVGEYSQFHTEAVHMTSKLDRRYCALVEVQACGSLITEEQPHAMLIPMEYFFMGYGLYRPSQLDCSPRSPLSPFCISPDLLSPESMGVKLKPIKTRVRLEV

SEQ ID NO: 44123 - protein, 64 aa, Oryza sativa; identical to SEQ ID NO: 37454

SEQ ID NO: 44124 - protein, 528 aa, Oryza sativa
MAESAVSAAVGSISNLAAQETSLLCGVMDEVGFLKAELERLHGFLEDAKHKRRSGDASAAVLVGQIRDAAYDAENVIEASEYMVKRNKLKKGFMGAISRYARLPTDLIALHKIGVEIQWIRRKISEIFYSANRLKIVGLGNPTTDIGHADDEFPQDYDIMYQNFEDDDVVGFDNEYNEIVEKLVEQENELSVVSIVAMGGAGKTTLARKIYNSTRIRNHFDTTAWVTVSQKFKGIDLLKDIMRQIMPNKLESREIDQMQELEVGKKIHEFLLNKRYVVVLDDVWATDTWNQINRVGKVFPDANNGSRVLLTTRKEDVANHIEMSTYIHPLKLLDDEKSWELFSRKSLPSYKRSSLQDVNEFEELGRKLARKCNGLPLALAVLGGYLSKNLNIQAWSDIFKSRISTKNGQMMRDILARSYNDLPNNYMKSCFLYIAVFPEDYSISTADLVELWTAECFVQPRRKYKPEELAYKYISELAQRSLVQVVDRSTAHGSILRIKIHDILRDWCIEEATQDGFFLCHRQKYRSS

SEQ ID NO: 44125 - protein, 291 aa, Oryza sativa
MGTVLDSHFLALTAIVTVGYQLVFFIITALLRFDKVTDFAGSTNFIILAILTLALKGAWHFRQVVLTVLVVIWGLRLGLFLLMRILQWGEDKRFDEMRDNLGKLAVFWIFQAVWVWTVSLPVTIVNASDSDPSIEARDIIGWIMWLIGAGMEAIADQQKLTFKNSPSNRGRWCNVGLWSYTRHPNYFGEIFLWWGIFVASTPVLSGAEWLVILGPVFLTLLLLFVSGIPLLEASADKRFGQNEEYRTYKNTTSPLIPLPPAVYGALPGWFKMGFLFELPLYNRVPQRDPVS

SEQ ID NO: 44126 - protein, 72 aa, Oryza sativa
MTRRRRTAPPAPRAWIYAVPLPTTRRQRRPGAAPPAPRTRAPAGSAPLPSDSRVPFFRIFIFLEFYFSMRAT

SEQ ID NO: 44127 - protein, 99 aa, Oryza sativa
MLEGKARVEDTDMPARMQAAATSAASRALDLFDVADCRAIAGHIKAEFDKRYGVGWQCVVGANFGCFFTHTSGTFIYFSLERLSFLLFKAAAAAAIAAS

SEQ ID NO: 44128 - protein, 293 aa, Oryza sativa
MDTSTNAAAKPEEPKPLALSDRDMVFNIGKRVVESKTDGVAFKRPGLRKEGSRVVGVPKPGKKKKFMEVSKHYDADQADKISEGNASTRPVKHLVPNVPRPREGTSKVDQKGKRIGEMRSRVPKSTKSQDGATNIIPGKGPLSMSAPSTGVFESSHTFIGSTIGSSNNMNLSVEKNSSVHGVGLRSEDSSVSEPHIQAASAAPTSRKNLTTTDRAKRKLVPSMDNSNRTTNKTSEIPGKSADSTEPRRSNRRIQPTSRLLEGLQSSLIVSKVPGEKGPRTNYRSASSRGRNLG

SEQ ID NO: 44129 - protein, 337 aa, Oryza sativa
MGTPSQGSAAVAAAGVDLCVLDLVPVFAKEMIAGGVAGAFSKTAIAPLERLKILLQTRTNEFSSLGVLKSLKKLKQHDGILGFYKGNGASVLRIVPYAALHYMAYERYRCWILNNCPSLGTGPLVDLLAGSASGGTAVLCTYPLDLARTKLAFQVNSSDQISSGLKRTNFQPKYGGIKDVFRGVYSEGGVRALYRGVGPTLMGILPYAGLKFYIYEGLKAHVPEDYKNSVTLKLSCGAAAGLFGQTLTYPLDVVRRQMQVQSQQYHDKFGGPQIRGTFQGLMIIKQTQGWRQLFAGLSLNYIKVVPSVAIGFTAYDTMKSLLKIPPREKKMSGHGSN

SEQ ID NO: 44130 - protein, 66 aa, Oryza sativa
MSRREGCLPSGSEGPSSPQPMTPCRPPHLIDASSSSAKAACTRQRSSDVLRSGHGVLHFAVTYMCS

SEQ ID NO: 44131 - protein, 664 aa, Oryza sativa
MMHLFHICRDFSYNQLTGSFPSWATQNNLQLNLVANNFDLGSTNNGILPPGLNCLQKDTPCLRGSPEYYSFAVDCGSNRSIRGSDNTMYELDFTDLGSSSYYVTSETRWGVSNVGKYFQSPNDSKIIYSNEKIQNAVVSELLQTARMSPSSLRYFGLGLENGNYTVLLQFAELGYPDSPTWKSLGRRVFDIYIQGDLKEKDFDIRKMAGGKSFTAVYKSYTATVSKNFLEIHLFWAGKGTCCIPIQGYYGPLISALSITPNFTPTVRNGVPKRKSKVGAIAGISIGASVVGLAALFGIFMFIKKRRRLAQQQGELYNLVGRPDVFSNAELKLATNNYSSQNILGEGGYGPVYKGMLPDGRVIAVKQLSQSSHQGKNQFVTEVATISSVQHRNLVKLHGCCIDSNTPLLVYEYLENGSLDQALFRKNSLKLDWATRFEIILGIARGLTYLHEESSVRIVHRDIKASNVLLDTGLTPKISDFGLARLYDEKKTHVSTGIAGTFGYLAPEYAMRRHLTEKVDVYAFGVVALETVAGRSNTNNSIEESKIYLLEWAWDLYEKEQAQRIVDPRLEDFNKDEVLRVIHVALLCTQGSPNQRPPMSRVMAVLTGDAEVVEMVTKPSYITEWQYRDGNSTNSESTTSEFSRQKEIDPLTMSPTITGSSHDGR

SEQ ID NO: 44132 - protein, 333 aa, Oryza sativa
MWDPVAYALGFIDCDNISARCMLTIFTLFATKTEASLLRMLKGSPDVYLSGPIKKYITDRGGRFHLRWGCREVLYDKSPDGETYVKGLLLSKATSREIIKADAYVAACDVPGIKRLLPSEWRQWDTFDNIYKLDGVPVVTVQLRYNGWVTELQDLEKSRQLKKAVGLDNLLYTPDADFSCFSDLALSSPADYYIEGQGSLIQAVLTPGDPYMPLPNEEIISKVQKQVLELFPSSQGLELTWSSVVKIGQSLYRESPGNDPFRPDQKTPVKNFFLSGSYTKQDYIDSMEGATLSGRRTAAYICGAGEELLALRKKLIVDDSEKARGKVEALQTS

SEQ ID NO: 44133 - protein, 106 aa, Oryza sativa
MVKNCIYQGPTKSSRPFGTRSLMEQCNEILRSRRAPQSEGWCLIHSKQTQILDNHGQVDDDEVIIDSPLLPYQISHDFLSQFGSSLPDLIDFNDVKPASFLRLFLS

SEQ ID NO: 44134 - protein, 204 aa, Oryza sativa
MVTSDEDAKKAYADFEKKVKRTIYIDHLSPQVTSSVIKAALAQCPNVVDVEFIVNYTVPYDIPSAALVELDDEIQAKAALDLMNDFPFIIGGMPRPVRAICAKPEMFRERPPHPGIRKEFRWVKQEDGTEYQGMKKLRILAKRQEVENMALIKNQLEEEKELAKQQQELLDGNYNKYDMLENVVQNGNMKSLAQHYGVSLADEF

SEQ ID NO: 44135 - protein, 243 aa, Oryza sativa; identical to SEQ ID NO: 30323

SEQ ID NO: 44136 - protein, 353 aa, Oryza sativa
MSDYMLAENVPANLLCVGHREFPSDSLPVQETPLVSRKTSDHVDILREQFNILSGEVALHQSVLKRLSEEAGKNAMNEQIEMEMKVVNDEVKLNKQKIASLERRISNSMSNSRGMHDNLELSLPYIEIPEQLNEKAFQLEASECQEFLLSERTTFQHNTGIVQETGSQAHKGKPLPSDVSDEFLKKASQAEIDELKQRVSELTEAKSQLDSCNHKLLEESTYAKGLASVTSVELKALSVKVTKLMKQNERLSSELASGRNQRRGSHGPRGARRESHTKRYEPARRGDMNALEAMLKEKDQRQAELHTKIEESKQKEAFLEKELANMWTVLANLKKTRGIDQEDFDSKYNGSWA

SEQ ID NO: 44137 - protein, 842 aa, Oryza sativa
MSCDCCFFLCRTDHGQMGLGKTLQAISLLSYLKIHSISPGPFLVLCPLSVTDGWLSEFNKFCPSLRVIQYVGDKLHRRDLRRMMFQDVQKSSSSSHSTELPFDVMMTTYDIALMDQEFLSQIPWHYVVIDEAQRLKNPSSVLYNVLEQRFIMPRRLLLTGTPIQNNLSELWALMHFCMPSIFGTLDQFLSTFKQSGDSLTGGETNKTDKQFKILKHVLRAFMLRRTKALLIQSGILALPSLTELTVMVPLTPLQKKLYLSVLRKELQTLLTFTGGLSRHQSLQNIVIQLRKASSHPYLFSGIEPEPYVEGEHLVQASGKLVMLDLILKKLHEVGHRVLLFAQMTQTLDILQDFLELRQYTYERLDGSVRAEERFAAIKSFSSQPTKGVVRDDNQSGAFVFMISTRAGGVGLNLIGADTVIFYEQDWNPQADKQALQRAHRIGQLNNVLSINLVSQRTIEEVIMRRAERKLKLSHSVIGEEDATYGKGKYVENEASDMRSIIFGLHLFDTSDTTAETMNDDTASETIKEETMLKLKSMSEKVVLMRSHEPSEKDERAFEINPNMTDNSGAVVTRVSDSVNVDPDFNEAAYLSWLEKFKESSHSKENTRAELERQRIAPEEKFLKREAIKKKVEEKRLAKWESLGYQTLKIKDPDILPNQNIPDSGSVQLVYGDCTNPSVVCPAKPAIIFSCVDNSGTWGHGGMFDALANLSTCIPDAYNRASEFDDLHLADLHLIQLDEAKCNRSLDAPLWVALAVVQSYNPRRKVPRSEISIPDLELCLSRVAFSAAQHSASIHMPRIGLQGGGGGGSQRSEWYTIERLLRKYSSLHGVDIFVYYYRRGNKH

SEQ ID NO: 44138 - protein, 96 aa, Oryza sativa
MPCSFGSTVSGSEPWCQCWRTQSTNIFRPWCALLLIGHRPQVTSRRNVPKANTSVRGDAFPVRASSGAMNPMVPTRSTLLALMSRWMTTLSHFLCR

SEQ ID NO: 44139 - protein, 606 aa, Oryza sativa
MNKIMKSNPALYVLRERIRKGLQLYSSEPTEPYLSSQNYGEIFSNQIIWFVDDTNVYRVTIHKTFEGNLTTKPINGAIFIFNPRTGQLFLKVIHTSVWAGQKRLGQLAKWKTAEEVAALVRSLPVEEQPKQIIVTRKGMLDPLEVHLLDFPNIVIKGSELQLPFQACLKIEKFGDLILKATEPQMVLYNIYDDWLKSISSFTAFSRIVLILRALHVNNEKAKMLLKPDKTIVTEPHHIWPTLTDEQWLKVECALRDLILSDYAKKNNVNTSALTQSEIRDIILGAEIAPPSQQRQQIAEIEKQSRETTQLTAVTTRTTNVHGDELIITTTSPYEQQAFASKTDWRVRAISATNLYLRVNHIYVNSDDIKETGYTYIMPKNILKKFICIADLRTQIAGFLYGLSPQDNPQVKEIRCIAIPPQHGTHQMVTLPANLPEHEFLNDLEPLGWMHTQPNEAPQLSPQDLTSHAKILENNKQWDGEKCIILTCSFTPGSCSLTAYKLTPSGYEWGRSNKDTGSNPHGYLPTHYEKVQMLLSDRFLGFYMVPDNTPWNFNFMGVKHDPLMKYNMKLGTPRDFYHEDHRPTHFLEFSNIDEGEVAEGDREDTFT

SEQ ID NO: 44140 - protein, 285 aa, Oryza sativa
MVSGRQKGCKKILVLYTNFGKHRKPEKTNWVMHQYHLGDLEEEKEGELVVCKIFYQTQPRQCSWSSDRGGGAAATASAVTTAAVQQDQQRRRDSGSGSCSSTRDHEVSATSYSTAGYAVAAAVEMQHLKHAADHFSFAPFRKSFEEVGISGDQVHSNQLGRSEQQHAGQEQQPHRPLLATTTAVPATAFLISRPTNPVSNIVPPAMQHASVVLDHDQFHVPAILLHHDKFQQQQQKLDRRSAGLEELIMGCTSSSTKGEASIPHSQETEWPYQPYWTPDNQDHHG

SEQ ID NO: 44141 - protein, 69 aa, Oryza sativa
MKMLVSSTTIKKNASLEFNGHCSFVLITIIFQVAFKTKVFHPNINSNGSICLDILKEQWSPALTVSKVN

SEQ ID NO: 44142 - protein, 474 aa, Oryza sativa
MPTVSVKWQKETFPGIEIDTSQPPVVFKTQLYTLTGVPPERQKIMVKGGILKDDADWSTLGVKDGQKLMMIGTADEIVKAPEKGPVFVEDLPEEEQVVALGHSAGLYNLGNTCYMNSTLQCLHSVPELKSALLSYSDNVRGNGVDQASHNLTVATRNTFGELDQSVRPVAPLLFLQTLRKKYPQFAQQQNNVYMQQDAEECWTQLVYTLSQTLTSETSEPPAGQMKELFGIDLVSRVHCAESGEESLERESVYSLKCHISHDVNHLHEGLKHGLKSELEKASPSLGRTALYTRESRINELPRYLTVQFVRFFWKRESNQKAKILRKVDYPLELDVYDFCSDELKQKLQAPRQMLRDAENAKFGLKAQGKASSSKENEGSSSNAGESSSMDIDKADSSVPKKHLTGIYDLIAVLTHKGRSADSGHYVGWVKQDDGKWIEFDDDNPSIRKEEEILKLSGGGDWHMAYICLYKARVI

SEQ ID NO: 44143 - protein, 359 aa, Oryza sativa
MSSRKKPSRIEPFRHKVETDPRFFEKAWRKLDDAIREIYNHNASGLSFEELYRTAYNLVLHKHGPKLYDKLTENMEDHLQEMRVSIEAAQGGLFLVELQRKWDDHNKALQMIRDILMYMDRVFIPTNKKTPVFDLGLDLWRDTIVRSPKIHGRLLDTLLDLIHRERTGEVINRSLMRSTTKMLMDLGSSVYQDDFERPFLEVSASFYSGESQKFIECCSCGEYLKKAQQRLDEEAERVSQYMDAKTDEKITAVVVKEMLANHMQRLILMENSGLVNMLVEDKYEDLTMMYSLFQRVPDGHSTIKSVMNSHVKETGKDMVMDPERLKDPVDFVQRLLNERISMTVLLPLPLAMTRVSKML

SEQ ID NO: 44144 - protein, 88 aa, Oryza sativa
MAAAESGDVPTVEYFLDHSGDVTKADVRGCTVLHHAAGTGCCKVTEFLLSKGIPVDIDCGLGTPLFHAANNGKDKTLKILLDHKADAF

SEQ ID NO: 44145 - protein, 214 aa, Oryza sativa; identical to SEQ ID NO: 32289

SEQ ID NO: 44146 - protein, 136 aa, Oryza sativa
MLSQLSAAGKVKKIFAHCLDTINGGGIFAIGNVVQPKVKTTPLVPNMPHYNVNLKSIDVGGTALKLPSHMFDTGEKKGTIIDSGTTLTYLPEIVYKEIMLAVFAKHKDITFHNVQEFLCFQYVGRYTLQHTPSVSQ

SEQ ID NO: 44147 - protein, 577 aa, Oryza sativa
MAFSHLLHALLVAAALPLLLLPRAADAGEIGVCYGRDANNLIDPPAAVSLLKANGISAVRIFDADQTVLDAMANTGIKVMVAIPNADLAAAGQDLRSATDWVTNNVVPYRSRGTLINGVAVGNEVFRQRPELTGMLVSAMRNLHKALENLNLANDVKVSTPIAFDALKQSSPPSAGEFKDEIAQSVMKPMIDFLKQTGSYFMVNLYPYFAYVAQPDKISLEFATFRPNAGVLDGNTGIRYFSLFDAQLDAVYAAINRVSGGSLTVSMARRDGILSVQASESGHPSGGTFPLFSMLAAADTDSIATIADAQAYNNGLIRRVVSGASGMRDVSAYIFSLFNENEKPGPAIERNFGLFYPNGQKVYEVDFRGGGGGGACPTKTSWCVARTDVGSAALQSALDFACGNGADCSAIRQGSVCFEPNTLVAHASYAFNDYYQRKGQASGTCNFSGAASIVFKPSPSICDPNPSWCVAKSEVGDAQLQNALDYACGSCADCSAIQPGARCFDPDTKVAHATYAFNDFYQTTGRASGSCDFAGAASIVNQQPKIGNCVLPPNNAGTEQTAIEDQSTANLPATAWQ

SEQ ID NO: 44148 - protein, 174 aa, Oryza sativa; identical to SEQ ID NO: 30209

SEQ ID NO: 44149 - protein, 157 aa, Oryza sativa
MAPAALAAPIASISPSSAGRVTAGDVGLRSVRMASSPVAQPIGEAVVLRPNQMFRSVLRQRRRLVVRSSSSDETNSTTEEKTPFGYTRKDVLLIGVGVTLLGYGLKYGLELVGVDPLQAGNARPADHRARDDGGVDLDVHVQGGQQVHDLRPAAQGL

SEQ ID NO: 44150 - protein, 613 aa, Oryza sativa
MSGPLDRFARPCFEGFTHNDEKKEIRSDADNSEGEKKTKIGSFKKKAINAGNKFRHSLRRRSKKKNEPRGSIEDIRDVQDLQAVDAFRQCLVDEDLLPQQHDDYHTMLRFLKARKFDVEKAKSMWSDMLKWRKEFGADNIEEFDYTEADEVMKYYPQFYHGVDKEGRPIYIELIGKVDANKLMQVTTIERYVKYHVKEFERCFQMRFPACSIAAKRPIDSSTTILDVQGVGLKNFSKAARDLITRLQKIDNDNYPETLRRMYIINAGQGFKMLWSTVKSFLDPKTASKIHVLGSKYQNKLLEIIDENELPEFFGGKCKCEAFGGCKKSDKGPWKDPNIIKRVLNGEANYGRQIVTISSTDGKIIRYAGPQYPTRKGSDGSAESGSEVEDGASPMASRNLITNPLLTPVHEESKLAAHGFTSASPSIIEESIPVVDKVVDDGWGSPRASSSPSRSLPITFDGLWTQVITWLTVLIVSLFAMVRSVPSRMAKRFSSQSTDHDHSYVEYPQEAEYKEEFRPPSPAPSYTEKDVLSSMVRRLGELEEKVQALETKPSEMPFEKEELLNAAVRRVDALEAELISTKKALYEALMRQDELLAYIDKQDMIKFRKKKFCF

SEQ ID NO: 44151 - protein, 225 aa, Oryza sativa; identical to SEQ ID NO: 43652

SEQ ID NO: 44152 - protein, 435 aa, Oryza sativa
MFRPPGAFGVAPPPPPPQQQQHQPWQWQPPFQPPAATSFWQRDNVREHVGRLQETIELATAVINELEEIAQARNSVDASTQGPDSSSAKLSSEPDGSSADRPRHFVELARAMKISQDTHESLATDAANYLCSQIQNLLAPIYPAVNQGGPWEERYAMIRLAQKLQKSKRNKRWRKRKRKHVAELFQKEHADYDRIDQEADEWRARQIAKDMAQRKVENMKQIAKKKENEERKRLESELELALMVEKLQELRSMRVQKMKKQGHFLPEEDDKYLERVKAAVEEEERQAASAARTDAAKDAILTAEESRKAVQCSNSREDDSDQAKSAPTLEQNQRDPGISGRNHHASQKTEHELHKDDSKGHGRYDSVSSLPFEFYHYYHGSSYDMGTLIEVRRMWDSFIRAGGSRIPGHWVQPPPPADEVWASYLVQPNCPSNST

SEQ ID NO: 44153 - protein, 484 aa, Oryza sativa
MTTTTTTSAIGSLLVLLLVVVVGGVCSASVGGGGGGGEAWRAEQERDRVARVPGQDFDAGFAQYAGYVAVSEERGASLFYWFFEAADDPASKPLVLWLNGGPGCSSIAYGVAEEVGPFHVNADGQGVHLNPYSWNQVANILFLDSPVGVGYSYSNASDDILNNGDARTANDSLTFLTKWIERFPQYKGREFYVTGESYAGHYVPQLAQAIERHHEATGDKSINLKGYMAGNALFDDFHDHLGIFQFMWTNGLISDQTYRLLNVFCDYESFVHTSSQCNKILDIASDEAGNIDSYSIFTPTCHASFASSRNKVMKRLHSVGKMGERYDPCTEKHSTVYFNLAEVQKALHVSPIINKSKWETCSDVVNTNWKDCERSVLHIYHELIQYGLRIWVFSGDTDAVLPVTSTRYSINALKLPTVTPWNAWYDDDGEVGGWTQGYKGLNFVTVRGAGHEVPLHRPKQALILIKSFLAGSPMPSVQDFYSDV

SEQ ID NO: 44154 - protein, 125 aa, Oryza sativa
MRQAKTLKICANHLVASTTKMQEHAGSDKSCVWHAADFADGELKEEMFAIRFGSVENCKKFKDLVEEISESLAKTEGKETEEDSSAAGLLEKLSVTEKKSEEVATKEESTEAVKETDTKSAATSE

SEQ ID NO: 44155 - protein, 90 aa, Oryza sativa
MGGGGGDEREKAKGGGGGGGGGGGGGEYGTFQGPPSYPPPRPPVVGYPQPAPPPGLYGQGDPYYRPRGGYQGIPGNVLACLVWGITRDAG

SEQ ID NO: 44156 - protein, 86 aa, Oryza sativa
MSITEILGICMLGFMWCNSTHLMLNNMDLTHSPFSYVGLFLPSATEVIKYCRTNLLCVRVNILISCSIVLGIELLVLPSKEERSKF

SEQ ID NO: 44157 - protein, 323 aa, Oryza sativa
MDETLADESAAGGGEAAAAEPAQESQQETLEEVLSRHRKEKSKLQDKETSLKKAAAKGSKAEQKAKKKQVEEEISRLSAELEAKHAAELATFGYKSSGSSEKGNMDTLVKAIAGVSVTSNADSAKPSKGARRREKKAKEEAAREQRIQEEQNNLVSDRMIENEKLEKKLEPMGLTIQEIKPDGHCLYRAVENQLSLYSRETTQYNYQELRQMTANYMKEHAADFLPFFLSEGKVESGPDPLESFKRYCEEVESTAAWGGQLELGALTHCLKKRIVVYSGSFPDVEMGKEYKLDSGGKDGPSIRLSYHRHAYGLGEHYNSVVPA

SEQ ID NO: 44158 - protein, 531 aa, Oryza sativa
MGFSLDHPLSGVASDLSSSGAHTATGGGGKASLGFGLFSPEATSLEQPPPSMLFHEGIDTKPPLLGAQPQFLLNHYQPQPPNPAAALFMPLPPFPEHNHQSPHLQPPLKRHHAIPDDLYLARNQQQSSAVAPGLAYSPPLHGPAPFQLHPSPPPIRGAMKSTASEAAQQQLLDELAAAAKATEAGISVGAREILARLNQQLPQLGKPFLRSASYLKEALLLALADSHHGSSGVTSPLDDALKLAAYKSFSDLSPVLQFTNFTATQALLDEIGGMATSCIHVIDFDLGVGGQWASFLQELAHRRGAGGMALPLLKLTAFMSTASHHPLELHLTQDNLSQFAAELRIPFEFNAVSLDAFNPAELISSSGDEVVAVSLPVGCSARAPPLPAILRLVKQLCPKVVVAIDHGGDRADLPFSQHFLNCFQSCVFLLDSLDAAGIDADSACKIERFLIQPRVEDAVIGRHKAQKAIAWRSVFAATGFKPVQLSNLAEAQADCLLKRVQVRGFHVEKRGAALTLYWQRGELVSISSWRC

SEQ ID NO: 44159 - protein, 137 aa, Oryza sativa
MPQTQTGRSYCSDTSTLLELTQAGTLVRTPAASQTTSCPSSSRSLLAGGRPLPSMEPTTTPRMELGYVYALFIHSQQSVVYDLLINFIPCRQVRDYIHVVDLADGHIAALRKLYEDSDRIGIYEPSLVVHPSTGRDT

SEQ ID NO: 44160 - protein, 166 aa, Oryza sativa
MDASAGSGNASGGAGAGASACCYYSLLGIRKNASATDVRAAYRRLAMKWHPDRCVSDPGEANRRFQRIQEAYSVLSDKGKRAMYDAGLFDPLDDDDQDFSDFMQEMLVMMDNVKNEKPDTLEDLQKMLQDIVSGDGGSRGGGVGGRVPSDGARRTRVAPYPAQSRR

SEQ ID NO: 44161 - protein, 930 aa, Oryza sativa
MNIATGAMNTLLPKLGELLVGEYKLQKGVKGEIEELEKELKGMTAALHKVAETPVDQLDQQVKIWASEVRELSYDIEDAIDTFMLKCKGHEPATSFKKVTNLFNKFKTNHQIHGVMKDIMDQVKKVSERRDRYIVDDNAARPTVVDVDSRLEAMYRKATELIGISKPKNELTKQLLEYDGSSSQQSNIISIVGFGGLGKTTLANSLFQELKAKFDSYCFVSVSLNPDINKILKNILLQLDEKMYSHIDETWETKQLIDKIRDFLNNRRFLCVIDDVWKKSAWDTIKLAVQDAKLGSKIIVTTRNKVVAEHAGSGVYEMKPLSDDDSRQLFCKRIFDSNDDCPADLCGVTEKILKKCGGVPLAIITTACLLASKPRNSEEWDKVNKSISLGLENNLDVDKMRKILSLSYNDLPFHLKTCLLSLSKYPEDELIRKDVLIWGWLAEGFITDETRPVGTSLQEIGESYFNELINRSLIQPMSEDNFWDEDGKVHVFWDEDGKVHACKVHDMVLELINQLSVEEDFVTTYLSDGQQTGKHTCTAQKKKIRRLSLHNSNKSYASPEAREQLSKVRSITIFGKVDSIPPLSSFHVLRVLQLEDCSGMDKNHLNHLDKLRLLRFLRLGHYSATELPESIGKLESLETLDIRGARKPSSFKSHKVLFPMSFAKLRKLLRLYAGRVKLAQGLMLGNMKSLQELVIEATRKVIKEIGNLTELRTLRIVFGSEKTFELKESIQTSIQRLTNLQDLDLRNNISFEEIIDMQQVPSGLQRLFMPDSFMKAFPCWINSLMLSHLTTLSICLDFEYLQSDHLDRLAELPSLRFLRLQLAFVSEQLQGKLTIHRGACAFRSLKDFQFYSSMMPSFQPGAMPHLERLYLSIWTRLRRGGLNDLGLENLYSLRHATIYSFDDDSKAVIEEALKDYPNQAALKIQSMMMN

SEQ ID NO: 44162 - protein, 194 aa, Oryza sativa
MAASVGLNPEAFFFSNSYSYSSSPFMASYTPEFSAAAIDANLFSGELDFDCSLPAPAQEYPENENTMMRYESEEKMRARVNGRIGFRTRSEVEILDDGFKWRKYGKKAVKNSPNPRNYYRCSTEGCNVKKRVERDREDHRYVITTYDGVHNHASPAAAAAALQYAAAAGDYYSPPLSSAVSPPAAYSAGGSLLF

SEQ ID NO: 44163 - protein, 249 aa, Oryza sativa
MSARVPRSYEMGHTLLSDLSLGDDNERICVRVSRFWAFCDQKDDDKILHFGLVLIDEKGTSIAAQIYPPCDEIFRPIITEGKVYYIKYFRVRKCNRQYKPVDNCMSIYFTRWTKLEERVDPPAEIPLYTYSLSPFGGLRSRVGKKDSFTDIIGIITQLSPVTPLQGTVKRSVFIRNTGNAILNVALWGERATSFPADEVFVAGQKEPQIVIFVGTLVKGYGDVSLSGNSACKWYINADTPEVISLRNSI

SEQ ID NO: 44164 - protein, 54 aa, Oryza sativa
MDIASPLEQTKSGTSAFMDFTARQFHSPKSVVQSNKCKTSPLMFKYIMQYSLIT

SEQ ID NO: 44165 - protein, 326 aa, Oryza sativa; identical to SEQ ID NO: 28721

SEQ ID NO: 44166 - protein, 38 aa, Oryza sativa
MNRSVQVMQILVVCVPAQPQLAVLRLWWQEGKHLPVFL

SEQ ID NO: 44167 - protein, 374 aa, Oryza sativa
MKWLPEGNTRFYPSDTWSEVRMKLSEALQSNGRDATSDGSDSELKNNRKNYPLSMLAIHGGPRLRLLLATFQLLEMEVRNVPESSELVDGIKWLQISTTLIDGLIEPTFMKWIQEEKAWENSKINEELMKTVTSKIKEDDRILKRFNRLGKSELYLDLLYFLRFGSARSYSYFDAKFLAEHGARILEDLVIFLADAVASIYIELISVDGDMPTDVVGSSLALCSLSTRELQRMRNEVAINGWLHQYFESVVSMYEDRFELYVLSRKLCEKPADNQAEVTNWWRLGFGKPSTVTLLEYVHISSFSLPVRRTKELRALAGWRYYFSLLLEMSDIAMPFIRAVVTKVSAAVSYFWVSMIGRSLGLIFSGIRQSLGWR

SEQ ID NO: 44168 - protein, 361 aa, Oryza sativa
MSCFACCGDEDTQGVPDNRNPYPGNHPARSDAYRTADPTPRGPQPVKVQPIAVPIIPVDEIREVTKNFGDEALIGEGSFGRVYFGVLRNGRSAAVKKLDSSKQPDQEFLAQVSMVSRLKHEHVVELLGYCVDGNLRVLAYEFATMGSLHDMLYGRKGVKGAQPGPVLSWAQRVKIAVGAAKGLEYLHEKAQPHIIHRDIKSSNVLLFDDDVAKIADFDLSNQAPDMAARLHSTRVLGTFGYHAPEYAMTGQLSSKSDVYSFGVVLLELLTGRKPVDHTLPRGQQSLVTWATPRLSEDKVRQCVDSRLGGDYPPKAVAKFAAVAALCVQYEADFRPNMSIVVKALQPLLNARATNPGENAGS

SEQ ID NO: 44169 - protein, 1020 aa, Oryza sativa
MESYLEENFGGVKAKNSSEEALRRWRKLCGVVKNPKRRFRFTANLDKRGEAQAIKHANHEKLRVAVLVSKAALQFIQGLSLRSEYVVPEEVKAAGFQICADELGSIVEGHDSKKLITHGGVTGIADKLATSPADGLSTAEESIKRRQDVYGLNKFTESEVRSFWVFVWEALQDTTLIILAVCAFVSLVVGIAMEGWPKGAHDGLGIVASILLVVFVTATSDYRQSLQFKDLDKEKKKIQVQVTRNGFRQRLSIYDLLPGDVVHLAIGDQVPADGLFISGFSLLINESSLTGESEPVVVNEDNPFLLSGTKVQDGSCKMLITTVGMRTQWGKLMATLSEGGDDETPLQVKLNGVATIIGKIGLFFAVITFIVLSQGLISKKYHEGLLLSWSGDDALEMLEHFAIAVTIVVVAVPEGLPLAVTLSLAFAMKKMMNDKALVRHLAACETMGSATTICSDKTGTLTTNHMTVVKACICGNIKEVNNPKNASDLCSELPETVVKTLLESIFNNTGGEVVIDQDGKYQILGTPTETALLEFALSLGGNFKAKRDETKIVKMEPFNSTKKRMCVVLKLPGGGCRAHCKGASEIVLAACDKFMDETGAVVPLDKTTADKLNGIIESFANEALRTLCLGYREMEEGFSVEEQIPLQGYTCIGIVGIKDPVRPGVRESVATCRSAGIMVRMVTGDNINTAKAIARECGILTEDGLAIEGPEFREKSLDELLKLIPKIQVMARSSPLDKHTLVKHLRTTFNEVVAVTGDGTNDAPALHEADIGLAMGIAGTEVAKESADVIILDDNFSTIVTVAKWGRSVYVNIQKFVQFQLTVNVVALLVNFSSACFTGNAPLTAVQLLWVNMIMDTLGALALATEPPNDDLMKREPVGRTGKFITNVMWRNILGQSFYQFIVMWYLQTQGKSMFGLDGPDAEVVLNTIIFNSFVFCQVFNEISSREMEKINVLRGILKNYVFLGVLTSTVVFQFIMVQFLGEFANTIPLTRLQWIASVLLGLIGMPISAIIKLLPVGSS

SEQ ID NO: 44170 - protein, 261 aa, Oryza sativa
MPCKSVTYTHLICLESNIYGGRHGQPPREAGGASASSRQQAAQGCRGGDIAHQARPHHHGLSRLCRLLQGRRRRGALSLTRGLHGWSASKMERRASRQHRGRPPPASRSGAGRHGSGRPMAGSAALGGKLGLRAASSVWLAAGPSTRRPVGGVVGVVGGGPEEASAWTRFWRRHAGCWRPQPAEAEVEDAGAVGVWETRWLDPPPLPRLSVTAALVAAVVRRQGAATWRKGRLPCGDGGGVCGVWRWLWLWRRPPRLLWPR

SEQ ID NO: 44171 - protein, 142 aa, Oryza sativa
MDPTKLTCFFFSSRVTRRRAQLRGRGGADEERQGGAGGGGAELPRRVRGGPRQRGVPRAGDRAAGGVRRTRRPAARRRQGHVRRGQAVHEGEQHAHGPLEEAQVHAVQVARHARACRGRGGGAGGGLVAGEADQVQGVHAQL

SEQ ID NO: 44172 - protein, 463 aa, Oryza sativa
MRRYSALPGGGARPDTLADRLHRYRGVLLVILAPLALVSLVLLLMPRSPASSSAAAGRRWGPLDANKYAVIFDAGSSGSRVHVFRFDANLDLLHIGDQIELFVQKKPGLSEYANNPQEAAKSLVSLLEDAKRVVPVELRGQTPVRVGATAGLRALGAEKSEEILQAVRDLLREKSSFKTQPDWVTVLDGPQEGAYEWVTINYLLGKLGKTYADTVGVVDLGGGSVQMAYAIAEKDAVKAPKPSEGEDSYVKKLFLKGTTYYLYVHSYLHYGLLAARAEILKAGNGKGYSYCTLEGHQGQYKYGNGKFEASASPSGASYSKCRDDVVKALKVDQACTHMKCSFGGIWNGGGGAGQKNLFVASFFFDRAAEAGFVNPKAPVAKVKPSDFEKAAKRACKLNLKDAEAAYPGVQKDNIPYICMDLVYQYTLLVDGFGVGSHQEMTLVKKVPYSNAFVEAAWPLGSAI

SEQ ID NO: 44173 - protein, 127 aa, Oryza sativa
MLSCLSAWLVNLRRNPLARLHMNVVASHLHKYGLRYDDLFDAYQYHGLDIKEALARLPREVVDAHNQRLKRTMDLSTKHQYLPADEQAMQTTLRGYLSDAYLSSHRVWRERRRWDKPTTLFQAIWQF

SEQ ID NO: 44174 - protein, 69 aa, Oryza sativa
MDLKCILLWILNHLLLTAFVPLTNVLLRWPTRCHGRMCCSCWWQRWRHPSPHQGLRRAGSNLLLRCHRT

SEQ ID NO: 44175 - protein, 828 aa, Oryza sativa
MERTWMNCKLFSKEHREGVTEFMDFVCKNLSGSQKILCPCRKCLNRLHQYKGRVEDDLLMYGMSNTYTRWIHHGEPLVIVTGNVEHLNEDIGCNVEHLNEDVSCNVEFETNEPPDDPEDDQMYRMVQDLYPDQNHGPRTKSKFATILEEMKQVLHPGGPYTRFSFVVKLLHIKSFYRISNVAFSAFFDLLSSAFPNCSLPASYAEAKNFIRALGLGYESIHVCPNNCVLFRKELAKKDACPICGASRWKDADSRRKIPEKVLRHFPLIPRLKRMFGSKELSAEAQWHKLKRKPVDNELSHPADGEAWKDFDRKYEWFANDARNVRLGLATDGFNPFGKMSSSYSMWPVFLIPYNFPPWQCMEQSNFMMCLLILGPTCPGKDMDLFLQPLVEELLNLWSGVPTLDALTGKEFDLHAAIIWCIHDYPALSTLSGRVTRGYYACVCCDKNPCYKRLRNKICYIGHRRFLPVDHIWRRKKDFNGQTEERAQPEEFTQDELMQQLARVEHVRPGNHPNNKKRKRVEEGQCWKRRSTLWDLPYWSNLKLRHNLDVMHIEKNICEALLGTFLDIAGKSKDSVTARLDLEDMGIRKNLHLKDDGNSACTAPHAPYVMTKAQRKAFCAFIKNVKFPDGYASNLARCVSVDECKVQALKTHDCHILLQRILPAGLRGIMHKEIYETIAELGNFFQQICAKKLKLDALNKMRGEIPIILCKLEKIFPPAFFDVMVHLCIHLIDDAILRGPVQYGWMYPVERRLLTLKRFVRNMARPEGSIAEAYVANECLTACSRYFADVDTRHNREGRNKERVPMSRCGLSIFQHGANLLGAPRLTYE

SEQ ID NO: 44176 - protein, 136 aa, Oryza sativa
MASTLTNVGLSTPAAAASSLVRPVAGAGRVVFPRVGRGGFAAVRASGPTNAAGHLGQDVGEHRQGEGGVRGGHGERRVRGGVGRGGGAERGGEPRARQAQGDLRPARGLLQGQPGDRRVPHLRQLILTIICLLISL

SEQ ID NO: 44177 - protein, 651 aa, Oryza sativa
MGLASDSPASFPFSAAKLAASPRFCNPISRRIFSDVAGDLTVSVDGQSFLLHKFPLVSRCGRIRRMVAESKDPDLSKLELVNVPGGALAFELAAKFCYGSNFEINTVNVAHLRCIAEYLEMTEEYQEENLIVRTETYLNEIVVKNLDKSLEVLCACDGLDPTVEDVGLVDMCVDAIAMNASKEQLVSGLAHLECDVGSGKLRMHCQDWWVEDLSALRIDYYQRVIVAMRRTGVRPESIGTSIVHYAQTALKGIERRHVWDSGPLVGDNQRVIVETLIDLLATEKITSVTLSFLFGMLRMAIEVDAGLDYRIEVEKRIGLQLEMASLDDLLIPATQTSDSMFDVDTVHRILVNFLQRIEEDDSGNLSPCGYESDDGLKSPSHSSVLKVGRLMDGYLAEIAPDPYLKLQKFMALIELLPDYARIVDDGLYRAIDIYLKAHPSLTESECKKMCKLIDCQKLSQDASSHAAQNDRLPIQTVVRVLYFEQLRLKSTVSSTTPHTTSLGGDGCGGSLSQRMMMTGGSGVASSCVSPQRGNYACLRRENRELKLEIARMRVRLTELEREQGVMRQGMRDGRGGGEHGRALLASISRGIGRIAMLGVGAQGGAERRRKTKTKKSSHSQSQWSSDGGGKTMMMSSRRRHKASSVTYAAAS

SEQ ID NO: 44178 - protein, 73 aa, Oryza sativa
MLMWIFVFSPAIGSTSFVGVAILELIRALVSSTYRFSTDLELQNQYRFGCSDLSKQVYFWSFCKANPIPIEIF

SEQ ID NO: 44179 - protein, 408 aa, Oryza sativa
MAVEKTVPGGVRTVLVTGGAGYIGSHAVLQLLLAGFRAVVVDNLNNSSELAVRRVATLAGDHSRNLAFHKVDLRDKGALEKVFASTRFDAVVHFAGLKAVGESVQKPLLYYDNNVNGTVNLLEVMSAHGCKKLVFSSSAAVYGSPKNSPCTEEFPLTPNNPYGKTKLVVEDICRDIYRTDPEWKIILLRYFNPVGAHPSGYLGEDPCGIPNNLMPYVQQVAVGRRPALAILGNDYATRDGTEVRDYIHVVDLADGHIAALQKLFESSSIGCEAYNLGTGKGTSVLEIVKAFEKASGKKIPLIIGPRRPGDAEILFSLPAKAEKELNWKAKFGIDEMCRDQWNWASKNPYGYGSLDSTKQNGHHSYGSIGSPKQNGHCTNGFSESTRHNGHNGYGLVDSAKHNGNGHFH

SEQ ID NO: 44180 - protein, 814 aa, Oryza sativa
MASAFSPATAAPAASPALFSASTSRPLSLTAAAAAVSARIPSRRGFRRGRFTVCNVAAPSATQQEAKAAGAKESQRPVYPFAAIVGQDEMKLCLLLNVIDPKIGGVMIMGDRGTGKSTTVRSLVDLLPDIRVVVGDPFNSDPDDPEVMGPEVRERVLEGEKLPVVTAKITMVDLPLGATEDRVCGTIDIEKALTDGVKAFEPGLLAKANRGILYVDEVNLLDDHLVDVLLDSAASGWNTVEREGISISHPARFILIGSGNPEEGELRPQLLDRFGMHAQVGTVRDAELRVKIVEERARFDRDPKAFRESYLGKCNHLQQNLDKLQEKLTNMENENHVLRQKALNMSPLNNMPMTTKAFPQKFATPIGLPNGEQKHGYETPPPAKYLASLPQSLTRSRRTRMPVERQEENHEILLRCIKENLGFKDGKPVTACIIYSCLLHWRAFESERTAIFDHVIEAINNVLKGEEADGRLPYWLSNTSSLLCLLQKNLRSNGLFATPSRRSGGTLGIGDKIVQTLRSPSKLMGRSDNLGQVDARYPAILFKQQLTACVEKIFGQLRDNLKKEISPLLSVCIQAPKSSRAQPGKATKSPGIGAQPPSNSHWDNIVKFLDLLMDTLHENYVPSFFIRKLITQLFSFINIQLFNSLLLRRECCTFSNGEYVKAGLSLLEKWITDATDEFAGTSMHELNYIRQAVGFLVIHQKRKKKLEEIRNELCLNLSVRQIYRICSMYWDDKYNTQGISNEVVSAMREEVNKDTQNLVSNSFLLDDDLCIPFSTEDLSIAIPAIDYVDIELPESLHHYASVQLLLKHHDPQPV

SEQ ID NO: 44181 - protein, 111 aa, Oryza sativa
MASSQSDGSSSYSQHSSRSPIPYRVGPFDYQSAVMCDCRVKAAWWISWSPDNPSRRYFKCRNAQEGGCGFYAWYDGPTTTFIREVLNDLRDAVWSARREKERLVWLSKKRG

SEQ ID NO: 44182 - protein, 50 aa, Oryza sativa
MSFFLSFFLFLKKKLKLDLAWQSRCKTNTLSGKDVDSKNNTETMFEFIYQ

SEQ ID NO: 44183 - protein, 463 aa, Oryza sativa
MGMLRWGAHLLLLLLAAATWTCAGAGAGVTSEYRRKLEATVDMPLDADVFRVPPGYNAPQQVHITLGDQTGTAMTVSWVTANELGSNTVRYGSSPEKLDRAAEGSHTRYDYFNYTSGFIHHCTLTGLTHATKYYYAMGFDHTVRTFSFTTPPKPAPDAPFKFGLIGDLGQTFVSNSTLAHYEANGGDAVLFVGDLSYADNYPLHDNNRWDTWARFVERSVAYQPWIWTAGNHELDYAPELGETVPFKPFTHRYPTPYRAAGSTEPFWYSVKIASAHVIVLASYSAYGKYTPQWTWLQEELATRVDRKLTPWLIVLMHSPWYNSNNYHYMEGETMRVQFERCLVDAKVDVVLAGHVHSYERSRRFANIDYNIVNGKATPAANVDAPVYITIGDGGNIEGIANNFTVPQPAYSAFREASFGHATLEIKNRTHAHYAWHRNHDGAKAVADAVWLTNRYWMPTNDDV

SEQ ID NO: 44184 - protein, 58 aa, Oryza sativa
MSDMKDTNAAGPETVGNPDPMDQTEDNSMPSAQEQELAIKKKFGGLMPKKTTTHLEGS

SEQ ID NO: 44185 - protein, 84 aa, Oryza sativa
MGAARLCVGLQAILVMSLLLPPPFLPCVLAGAGPGGELVAGEEKHQGRVFASGISTRSLRILSQNPGPGGEHHPPISSGRGNNG

SEQ ID NO: 44186 - protein, 749 aa, Oryza sativa
MANHDLVLGHGEDPELALGQNHHDFGQDHGLGLGHSHELGLGHAHEHDLVLGQSHEHEHEHDHDLGLGSHHDSQLVLAHDHHGHTSELAFGHGHDEDPHSLDGQDHDGLAMTENHVLTLTDAHQLDVDQNMDQLSLEQAHELALQPAHDFSHGPLAVAPVVQSRKMVVSSEFQLVVGQEFPDVMSCRRAIRNTAIACHFEIQTVKSDKTRFTAKCSADGCPWRIHAAKLPGVPTFSIRTIHDNHSCVGINHLGHQQASVQWVANTVEERLRENPHCKPKEILEEIHKSHGITLSYKQAWRGKERIMAAVRGSFEEGYRLLPEYCRQVERTNPGSIARVYGNPDDNCFRRLFISFHASIYGFVNACRPLIGLDRTILKNKYLGTLFLATGFDGDGALFPLAFGVVDEESDENWIWFLSELHELLEKNTENMPRLTILSDRRKGIIDGVDFNFPTAFHGHCMRSLSETFRKEFNNSVLVNLLWEAANALTVIEFETKLLEIEDTSPEAVCWIRRLPPRLWATAYFEGTRYGHLTANITESLNSWILDASGLPIIQMMECIRRQLMTWFNERREASMQWTTILVPAAERRVQEAIERARGYQVARANEAEFEVISPHEGTNIVDIRNRCCLCRGWQLYGVPCAHGVAALLSCRQNVHRYTESCFTVATYRKTYSQTIHPIPDKTLWNETSDQGQEEENKVDVIINPPKSLRPPGRPRKKRIRAEDRGRIKRVVHCSRCNQTGHFRTTCAAPI

SEQ ID NO: 44187 - protein, 327 aa, Oryza sativa
MDLVAGGVIRGLPSSWERIRSPRTPLFLSSWASRRRVAFAACSSCPLVVCRNASAVVPFAKKKRKGGSEEPPDEEEGDDFVDEMEGEDDDDEEEEDVDDDDLLDDNEDDDDDYSFEDDFESDDEQDLYVGDGGAGGGISLAGTWWDKEALALAEEVSNSFDGDLKIYAFKTAANLTIRVRIEKMSTRYGSPTIDDIEAFTIAYRAKIDDAESAGRIPQNISLEVSSPGVERVIRIPDDLERFKERAMYVRYTITSDGGEGMTPQEGDGVFRLISYDMDLCECTWGIADVKINRQQAGKGRPLSKKQREWRLQTPFESLKLVRVHSDC

SEQ ID NO: 44188 - protein, 153 aa, Oryza sativa
MVPAGGAGAGGAGEHPGVPGDREREDAHRGDAAPGVRAPRAEAGLAPLRRLPRPHRRPRGPAGARRRAAHRPRRQAVLRRDGGRLLGRRHLAIPTGGRRGARHDAADPARQPPPQLLPPPGHRAAHLRRVSPRQGQYAVRLHFQGILSPPVEF

SEQ ID NO: 44189 - protein, 238 aa, Oryza sativa
MAASSLLRSLSRISRRGCVGGAGPSPFHHSRLPYSPFSTAAADAVERRGFAGLGPTAKGEKARVVVLGTGWAGSRLMKDIDTTGYEVVCVSPRNHMVFTPLLASTCVGTLEFRSVAEPLARIQPAVSKSPGSYFLLARCTAVDPDAHTIDCETVTEGEKDTLKPWKFKVAYDKLVFACGAEASTFGIRGVTDHAIFLREVHHAQEIRRKLLLNLMLSDVPGMPQKHKTTQIKIFVLLR

SEQ ID NO: 44190 - protein, 283 aa, Oryza sativa
MNNGVGGGIPGELAALRGMEVLAVDGNRLSGGFPVAVMNMSGLAVLGLSTNGFTGELPSGIGGFLPKLRQLTIGGNFFQGNIPSSLANASNLFKLGMSDNNFTGVVPASIGKLAKLTLLNLEMNQLHARSKQEWEFMDNLANCTELQVLSLEKNQMEGQVPSSLGNFSVQLQYLYLGLNRLSGSFPSGIANLPNLIILALDDNWFTGSVPQWLGGLKTLQSLTVSYNNFTGYVPSSLSNLSHLMELFLESNQFIGNIPPSLGNLQFLTTIDISNNNLHGSVPE

SEQ ID NO: 44191 - protein, 151 aa, Oryza sativa
MSPDENTGDESNDEWWRDSIESPDNRYNSPRLLPNEAPESSIIWADERHGLPRFQPQNNRVLPRFSFTNRSSSRSDWHRIRRPSRQSLARRGLLNRPYRNNSDYHGFRPQLFDQPNGSSHRSGINRSLDDPSFVPRRQRLRYTHRSHHIRD

SEQ ID NO: 44192 - protein, 374 aa, Oryza sativa
MASSSSPPPPPQIRCASFNQDNSLFYVGTKDGFRIFDAHTGKLHYQKNIGGIGNMEMYFRTNILAIVGTGEQPVLSPRCLRLIDTVAAVTKKDLNFMTSVLAVRLSRTRLVVVLQDRTFIYDVNSTTILEEIETVPNTKGLCAFAPNSEACYLAIPASTSKGSALVYKASEPELICQIDAHESPLAAMAFSSNGTYLATASGKGTIIRVFLVAQATKSHSFRRGTYPSTIYSLSFGPSDDLPDVLVATSSSGSLHMFFLDAARNRRNQTSKLLGSMIPGAITRALDPANHHIIHNVIPAGIKSCVAVHKVENSQNSSKLPALRTVVYIITHDGYFREYSINTTKSNESSWVLQRELNLLDTGCSTPQREEQHKD

SEQ ID NO: 44193 - protein, 32 aa, Oryza sativa
MLMNLDICMCLNSLTSIYIDNARKSYIMKRRE

SEQ ID NO: 44194 - protein, 91 aa, Oryza sativa
MVTLDLAKGVYAKFIDWDEQMFDRETCTPAHSANTAISEDLGQVEYVLSDRTGTLTENIMIFRRCCMSDTLYGENNGDALKVACQMLIHEC

SEQ ID NO: 44195 - protein, 505 aa, Oryza sativa
MEAFVPGGAGAAAAAVGGFVAAAALAERAGVIAPRKRPNAPPAVPGLPIIGNLHQLKEKKPHQTFAKWAEIYGPIYTIRTGASSVVVLNSTEVAKEAMVAKFSSISTRKLSKALTVLTRDKSMVATSDYCDFHKMVKRYVMSSMLGTSAQKQFRDIRDMMIHNMLSTFHKLVKDDPHAPLIFRDVFKDELFRLSMIQSLGEDVSSVYVDEFGRDISKEEIYNATVTDMMMCAIEVDWRDFFPYLSWVPNKSFETRVFTTETRRTAVMRALIKQQKERIVRGEAKTCYLDFLLAENTLTDEQLMMLVWEALIEAADTTLVTTEWAMYELAKNPDKQERLYQEIREVCGDETVTEEHLPRLPYLNAVFHETLRRHSPVPLIPPRFVHEDTKLAGYDVPAGTEMVVNLYGCNMNRKEWESPEEWVPERFAGGRLEVADMYKTMAFGAGRRACAGSLQATHIACAAVARFVQEFGWRLREGDEEKVDTVQLTAYKLHPLHVHLTRRGRM

SEQ ID NO: 44196 - protein, 404 aa, Oryza sativa
MGSLQTQKSSFVKMMFTFLIFLLPIFDRVLEEVFIHHGASIGFWRGDVKLLVEDIGELKPTIFCAVPRVLDRIYGGLQDKVSTGGFLKKTLFNVAYKYKQGNMVKGSKHEEAAAMFDKLVFTKVKRGLGGRVRLILSGAAPLSNHVEEYLRVVTCSLVLQGYGLTETCAGSFVSLPNNMSMLGTVGPPVTYVEVHLESVPEMGYDALSKESPRGEICIRGDTLFSGYHKREDLTKEVLVDGWFHTGDIGEWQSGGSMKIIDRKKNIFKLSQGEYVAVENLENIFGQAPGVDSIWVYGNSFESCLVAVVNPNKQALERWAESNGVTGDFATMCEDPKAKEFILGELTKTGKEKKLKGFELIRAVHLEPVPFDMDRDLITPTYKKKRPQLLKYYQNVIDSMYKNMK

SEQ ID NO: 44197 - protein, 170 aa, Oryza sativa; identical to SEQ ID NO: 30674

SEQ ID NO: 44198 - protein, 435 aa, Oryza sativa
MATIIPVLLRLLLLLLPLPLIRDHLWAPSHLRPTPQDDAGELHPIFLVPGATCSNVEARLTEAYRPSAAHCGAMKGKGWFGLWENNTELQAHDYAECFQEQMALVYDPAANEYRNLPGVDTRVPNFGSVRSFGSKDVFNPEWCLASLIGALEEMGYRDGDNMYGVPYDIRYAPPIPGQASQVYSRHFREFMELVETASEKQHHNKKAIILGHSLGGMVALEFVRNTPSAWRDKYIEHLFLVAPTLSTGFVPTVRNLVSGPKDLLHVANTTALSLRPMWRSFETSIVNVPSPEVFGHEPIVVTKRRNYSAYDLEDLLAAIGFSDGIEPFRRRTIARMNYIEAPMVPLTCINAVGKRTPRQFVYWDGNFDDEPTEIVYGDGDDSINLVSMLAFDEEMRRQPGQKGRFKSIKLNNASHGSILTDEWALRRVMQEIFLK

SEQ ID NO: 44199 - protein, 340 aa, Oryza sativa; identical to SEQ ID NO: 33037

SEQ ID NO: 44200 - protein, 428 aa, Oryza sativa
MICPWSVAAAAVALLLLSPGENQMVRVSAQPTKTRCAAGVVDTCGDVGVPYLFGIDGGSCSFLPGFNLTCDRTKQPHRLFLGDGSHLQVTEISLANYTVRVLNGVGTVNFTFAGHNDSTAKWAGVSVGQDDGPYIVSEEHNQLVVTGCNIMASLLGNSGSNVIIGCSSFCSITDWWGADPIVHSGAGGACSGLGCCDVNITIGRPSYELQLRWLDWDHNYDDLLPIAVRIAERGWFDGMSTKLLRKNSRSAVPVPVVLEWAVASVHKPPTPVDVNSTCPKDPARSECRSSNSFCRNIANMYRSGYVCKCDDGYQGNPYLTGGCQDIDECSLPGKCFGECTNTPGNYSCRCPRGARGNPYTKDGCIKFPLGPGLQRKWIGAGWICFGVSPNGPFSRLLGMLMRNQRGGRDGITLNRNASDAGAKRNVYL

SEQ ID NO: 44201 - protein, 261 aa, Oryza sativa
MASLGANSHGRVLHTCTLSPKPVTALSRSMAAIPGHHVFQSPRARIAVRASTERATWLPGLDPPPHLDGTLPGDFGFDPLGLGEEPANLKWYVQAELVHCRFAMAGVAGILATDLIRVSGINNLPVWFEAGATKFDFANTTALFFVQLLLMGFAETKRYMDFINPGSQAEEGTFLGIEAALAGSQPGYPGGPLFNPLGLAKDIENADEAKLKEIKNGRLAMVAMLGFIVQASVTHVGPIDNLLTHLSDPFNKNIIHTLSSS

SEQ ID NO: 44202 - protein, 77 aa, Oryza sativa
MLLDRYCLSVLSSSIDQVYIWISESLQMPTRPLSNSSMDMIIVMSIDVQCHSLLGARSKPPVHIISYEIDLKLKQFR

SEQ ID NO: 44203 - protein, 193 aa, Oryza sativa
MEHLLLPLLPHRPSQPLLLLLRHRRRPSIPRASSGDPSPTAADAPTDAQSATPPSSGAKPTGVKNRLRARNQARRVQEFTPPAPLGITMKSKSSSSSRPAASKSSASASASAATRREKQTRRKEWEEMSMAEKAGELYVGEKGLLFWLNKFAYASIFIMVGAWILFRFVGPSIGLYQLDAPPLAPTDVFAGSP

SEQ ID NO: 44204 - protein, 583 aa, Oryza sativa
MHIKRLQNNPRSGPTVLVLAPTRELATQILEEAVKFGRSSRISSTCLYGGAPKGPQLRDLDRGVDVVVATPGRLNDILEMRRISLKQVSYLVLDEADRMLDMGFEPQIRKIVKEIPPRRQTLMYTATWPKEVRRIAEDLLVHPVQVTIGSVDELVANSAITQNVELITPSEKLRRLEQILRSQDSGSKVLIFCTTKRMCDQLARTLTRQFGASAIHGDKSQSEREKVLSHFRSGRSPILVATDVAARGLDIKDIRVVINYDFPTGIEDYVHRIGRTGRAGATGVAYTFFCDQDSKYAADLIKILEGANQRVPRDLADMASRGGRGGRKRNRWATRSDRGGSHSELDSRYGGRDGLSGSSGRLDSSRSSRRHDYGDDGRSRRSGRGRSRSRSRSDSDRYSRSPKRSRRHSRSRTRSRSRSRSRSYTRNRRASRSRSRSPGASRRHERSATGSGSALPDSGHGERKRTPEADPSRNHTNHSDPKDDRHPEDGKVGKVDLDRSPTPQDKSGPYSPAYNGKTSRSVSPGNQVEGNNKAAEVSKNPDPSSPPHHGKTREDEEEGMIDEDGEIADDPRANATVQNGGDN

SEQ ID NO: 44205 - protein, 750 aa, Oryza sativa
MSGPVPASLATAPLQALWLNNQIGENQFNGSISFISNMTSLQELWLHSNDFTGPLPDFSGLASLSDLELRDNQLTGPVPDSLLKLGSLTKVTLTNNLLQGPTPKFADKVKADVVPTTERFCLSTPGQPCDPRVNLLLEVAAEFQYPAKLADNWKGNDPCDGYIGVGCDAGNITVLNFARMGFSGSISPAIGKITTLQKLILADNNITGTVPKEVAALPALTEVDLSNNNLYGKLPTFAAKNVLVKANGNPNIGKDAPAPSGSGGSGGSNAPDGGNGGDGSNGSPSSSSAGIIAGSVVGAIAGVGLLAALGFYCYKRKQKPFGRVQSPHAMVVHPRHSGSDPDMVKITVAGGNVNGGAAASETYSQASSGPRDIHVVETGNMVISIQVLRNVTNNFSDENVLGRGGFGTVYKGELHDGTKIAVKRMEAGVMGNKGLNEFKSEIAVLTKVRHRNLVSLLGYCLDGNERILVYEYMPQGTLSQHLFEWKEHNLRPLEWKKRLSIALDVARGVEYLHSLAQQTFIHRDLKPSNILLGDDMKAKVADFGLVRLAPADGKCVSVETRLAGTFGYLAPEYAVTGRVTTKADVFSFGVILMELITGRKALDETQPEDSMHLVTWFRRMQLSKDTFQKAIDPTIDLTEETLASVSTVAELAGHCCAREPHQRPDMGHAVNVLSTLSDVWKPSDPDSDDSYGIDLDMTLPQALKKWQAFEDSSHFDGATSSFLASLDNTQTSIPTRPPGFAESFTSADGR

SEQ ID NO: 44206 - protein, 214 aa, Oryza sativa
MALVAQASTIAQFAGVDAYGLIKMIAEAAQTVRRNRATCLQLARRLKMIGDLLKQLHGAQLMQQPETRNPVEQLEETLRRAYLLVRSCQGRSYVYRCFMGGRHADELREVQSEIAFYLQLFPLVSYVDATLNWVRHLNKADPSCKEAPLVRPYFVPFVILSWDGSCLAVVQKVHLGIVYTWLYISYLNIYSTICRSFMCLQELNCCLADIYFLR

SEQ ID NO: 44207 - protein, 841 aa, Oryza sativa
MGIPEVVVPPRAAGPRRYKGLVPWRFQPGFVRPPPVKPPAAAAAVAGGGVAGTPGGKGRGLGASGEGVGSSGGRGDPQSRRCTHSASAKGSGDARSVEEGGPRVAGDDGGSGKSGVAAEGSGFEGLRNGRGGGVGTAAAEDCGLEKSNPDGIVGDADVHLESGSDARDGECVSEGLKKPCVNNSNGSSAADCAPKVKKGNDSGNGGADECNAAAKSSNLACPGNNGDETNRKGRKVVLPWRFQVGFKRSFSKAFCSDSESSGPSGTQFYRAQDSSTPCTPATRSSVRCYASAHSGVRVSAMRDFSVKGEKETSTPYKKSKTGMDGPSQGMPKNGVVLARENIMGSLQNFRLIYRDLLDEEEEKSTEAVIRPDLQAYRIFRERFITDCDEKKYIGNVPGIKVGDIFHLRVELCVVGLHRPHRVGVDHIKQEDGTCIAVSIVSYAQSSDIKNNLDVLVYSGAMTAIANQKIEGTNLALKKSMDTNTPVRVIHGFVTHLNGNCQRKKIPTYIYGGLYIVEKYWREKEGNDRYVYMFRLRRMAGQKHIDIQDILNSGQAESYGGIIIKDISRGLEKIPVSVVNSISDEYPMPYRYIAHLQYPRNYQPAPPAGCGCVGGCSDSKRCACAVKNGGEIPFNDKGRILEAKPLVYECGPSCKCPPTCHNRVGQHGLRFRLQVFKTKLMGWGVRTLDFIPSGSFVCEYIGEVLEDEEAQKRSTDEYLFAIGHNYYDEALWEGLSRSIPSLQKGPDKDEEAGFAVDASKMGNFAKFINHSCTPNLYAQNVLYDHDDKSVPHIMFFACEDIPPRQELSYHYNYTIDQVHDANGNIKKKKCLCGSIECDGWLY

SEQ ID NO: 44208 - protein, 434 aa, Oryza sativa
MNIDMANSDDKALISEDTAHQISADPWYQVGFVLTTGVNSAYVLGYSGSVMVPLGWIGGTCGLILAAAISLYANALLARLHEIGGKRHIRYRDLAGHIYGRKMYSLTWALQYVNLFMINTGFIILAGQALKATYVLFRDDGVLKLPYCIALSGFVCALFAFGIPYLSALRIWLGFSTFFSLIYITIAFVLSLRDGITTPAKDYTIPGSHSARIFTTIGAVANLVFAYNTGMLPEIQATIRPPVVKNMEKALWFQFTVGSLPLYAVTFMGYWAYGSSTSSYLLNSVKGPVWVKAMANLSAFLQTVIALHIFASPMYEFLDTKYGSGHGGPFAIHNVMFRVGVRGGYLTVNTLVAAMLPFLGDFMSLTGALSTFPLTFVLANHMYLMVKRHKLSTLQISWHWLNVAGFSLLSIAAAVAALRLIMVDSRTYHLFADL

SEQ ID NO: 44209 - protein, 60 aa, Oryza sativa
MELGSRSFFLCPKSSAAVHAPSPSCSSDEASRIRDRDAPAAARAGAAPAWVSYMQFWPMM

SEQ ID NO: 44210 - protein, 663 aa, Oryza sativa
MICPKISLACVLLLLWFTSTGDAAYMKYLDPKQPTNTRIKDLISRMTLAEKIGQMTQIERGVASADVMKNYFIGSVLSGGGSVPAPQATPAVWVNMVNEFQKGALSTRLGIPMIYGIDAVHGNNNVYNATLFPHNIGLGATRDPDLVRRIGEATALEVRATGIPYTFAPCIAVCRDPRWGRCYESYSEDHRVVQQMTDIILGLQGDIPINHTKGVPYIAGKDKVAACAKHFVGDGGTHNGINENNTITDEHGLLGIHMPPYYDSIIKGVATVMVSYSSLNGVKMHANHDLVTGYLKSKLHFRGFVISDWLGIDRITSPPDANYTYSVQAGINAGIDMVMVPFNYTQYIDDVTPLVKKGIINMSRIDDAVRRILRVKFIMGLFENPLADLSFADQLGKKEHRDLAREAVRKSLVLLKNGNSPNQQFLPLPKKARSILVAGSHASNLGYQCGGWSIEWIGGSGDITVGTTILEAIKSTVADSTHVVYSENPDESFMKNNDFSFAIVVVGERTYAETTGDDPELTILDPGTDTIRTVCSTAKCAVVIISGRPVVIEPYLPMMEALVAAWLPGTEGQGVADVLFGDYGFTGKLPRTWFKSVDQLPMNVGDLHYDPLFPFGFGLTINSSQPGFSGADRLRDRNGGMIYVVLSLVLSVILMHASGIGIF

SEQ ID NO: 44211 - protein, 486 aa, Oryza sativa
MGSNSRLHAVLIPYPAQGHVTPLLHLAKVLHSRGFHVTFVNSEYNHHRLLRSRGTGALAGLDDFRFETIPDGLPPPSESDNDDVTQDIPTVCTSFLTHGPAAFGALLARLNSEPGTPPVSCVIPDGVMSFAQRVASDMGILAPAFWTTSACGFMGYLHYAELIDRGYVPLKDESYLTNGYLDTVLDWVPGMPGIRLRDMPSFIRTTDRDEFMLNFDSGEAQNARHAQGLILNTFDAVEHDVVDALRRIFPRVYTVGPLLTFAGAAAARRPEVGAIGGNLWKEDASCLRWLDAQQPGSVVYVNFGSITVMSPAHLAEFAWGLARCGRPFLWVIRPDLVASEKAMLPEEFVSETKERGIFLSWCPQEQVLEHPATGLFLTHSGWNSTLESISAGVPMICWPFFAEQMTNCRYACTKWDIGLEIDTDVKREEVARLVQEAMDGEKSKDMRAKAMAWKEKAVAATEEGGTSSAGIDRLVEFLLARGDHAS

SEQ ID NO: 44212 - protein, 434 aa, Oryza sativa
MVGQIQGLEILILVGSGSSVSFLNSTIADNLKNVQRKPQQISVQVANGNILHCTSAITNCQWSTQGYVFNTTLRVLSLNSYDLILGMDWLTEHSPMTVNWATKQLTVSLKGQFILLQGINSQVSQCNLLLGHQMKQLQARQAVAHLVQLCVSHSNIEQEFIPDSVQQVLQEFSGIFDEPSGLPPSRSFDHTIPLLPGAQPVSVRPYRYTPAQKDEIESEVTEMLDKGIIQPSASPFSSPVLLVKKKDGTWRFCVDYRHLNAITVKNKYPLPIIDELLDELSGAQWFTKLDLRSGYHQIRMNSADEHKTAFRTHHGHFEFKVIPFGLTSAPATFQGVMNSILSSLLRRCVLVFIDNILIYSRSLEEHVKHLRAVFQILARHQLKVKKSKCSFAQQRLSYLGHVISPNGVATDEEKIQAVQMWPTPTSMSRPEIPE

SEQ ID NO: 44213 - protein, 279 aa, Oryza sativa
MAGARAIGSLPVPNVQELAKTCNGPDEHIPERYIRPGASSEEVISNYHGEAIPIIDLNKLLSPQSSEECVKLRSACQYWGFFQLINHGVPDEVIANLKRDIVDFFSQPLDAKKEYTQLPNSLEGYGQALVFSEDQKLDWADMLYLQVHPSDSRDLRFWPTSPASFRRSLDAYSSETKSLALCLFEFMAKAVGAKPEALLGIFEEQPRGLRMTYYPPCLQSDKVMGISPHSDVVGLTLLLQVNDVQGLQIKKDGKWLSVDAPNGAFIVNIGDTLEVPTKN

SEQ ID NO: 44214 - protein, 422 aa, Oryza sativa
MVKEHAEKGDGVQECQSSPALSEDNLRHSFRLGDITWVKHTGSWWPAQVVENSCISSKPKKTAKHHVPVRLYGTCVHMYVDPWKSNMEFKMMLKRENKSAMEAFHEAVKKELSHVNSPCDSTEEAGNLKAKTSSKKVRKQKGLKESPASEHMGEDTKDQHSAEQHQELGYTATTGVATRKGRRTREGARQLSPTDGEDQASGKKASIEGSSYKTEKQVGSVYDEEACKMTTTERSVGRREGLRRSACTPMKAYLDPSEDRTSLFSDTSASEGANEVNRTPENSNQHEDDSTIDGTLASHAEIRVMVRDILFSDIIAKQHAAEMAYVDEVINGICCASELNITGDPTPVAKGGRGIKRGGSRAEAESSNITQRSRKGRIDQASSNGKKRAKDTSETMNHDNSPNSLRGPFDSTGCSHGGTGAS

SEQ ID NO: 44215 - protein, 210 aa, Oryza sativa
MDGQLLDAICERLVSSLSTVGTYIVREGDPVTEMLFIIRGKLESSTTDGGRTGFFNSITLKTGDFCGEELLGWALVPKPTVNLPSSTRTVKTIVEVEAFALRAEDLKFVASQFRRLHSRKLQHTFRYYSHHWRTWAACFIQAAWRRYKRRRLAKDLSIRESFFSRRSFEDDGSPEHSLVLNAVRKGAHIIKELPKFRKPSEPDFSAEHDD

SEQ ID NO: 44216 - protein, 274 aa, Oryza sativa; identical to SEQ ID NO: 32906

SEQ ID NO: 44217 - protein, 196 aa, Oryza sativa
MVREEVAGSTQTLQWKCVESRVDSKRLYYGRFILSPLRKGQADTVGIALRRALLGETEGTCITHAKFGSVPHEYSTIAGIEESVQEILLNLKEIVLRSNLYGVRTASICVKGPRYITAQDIILPPSVEIVDTAQPIANLTEPTDFRIELRIKRDRGYHTEVRKNTQDGSYPIDAVFMPVRNVNYSIFCLWEWKCKI

SEQ ID NO: 44218 - protein, 203 aa, Oryza sativa
MAPSLLGGFTKSLAMTVLSEIGDKTFFAAAILAMRYPRKLVLAGCLTSLTVMTALSVSLGWVAPNLISRKWTHHVTTLLFFVFGILSLWEGFKEDGDSEELAEVEAELDANFKSNKAESKSKSKANDDKKKQQRPFVLQFFSPIFIKAFSITFFGEWGDKSQIATIGLAADENPFGVVLGGVLYELHLLFPLHFLNGLLCGPD

SEQ ID NO: 44219 - protein, 431 aa, Oryza sativa
MTTPLPVSAGDASRVLFTGIRDHTDILIEVLLRLPPWSLCQLRCVCKLWLERTTSSTFLSAYAERHTTNPSNWFLLDRTIFIDTAPTPRGPIRALLRNSEPPKVSSIITSSRMCSIHRKESFYDQLPMVVSYSGGLILLTGNENNYYVCNPFTGDTFLLPVPKPQLRNAESLGIVARDGEYVVAELMMSCLRSFSSVNGRWEEKPLVCPQFSRGDMVFSSGGMLHWVDLNCGILSCDPFASEPTVLFINLPEASGRPTRGLDEWIHMRYVGVSAGRLCFFDIDEDDGESGSMSLWALGGNSGEWVLEYKVDFEDLWEDESYDDYSLDEDEVPLVGLVDPLNEHSVYVISQDCLFNIDLKTKQILNCTAQTNAGREVGSSPPIACVVPPLPHLVSPYPSCLRKEASNSDPQEAGSSDKPQKSGKGRRRKSKT

SEQ ID NO: 44220 - protein, 893 aa, Oryza sativa
MTKPKNGCLKILACAGGGSDPSAGSDGDADDHVDENKAISDKSRWSFRRRSTRHRVLKNSDISEPETLSSSKAKAEIAPSNIYSSTYSYASEKPLQQEKPDEKILQQEKSDEKILQQDEPAEKILQQEKPDEKILQQDKPDEGPLNEEMPDEKLIEKPIDQPGDESIEKPADEPIEKSADQITERSIEQPAERVTEVPIQEPTERVTETPIVKPNDNDVEEHTDKTDESIFVSSTEVKQEETVSLFDGSSEDHQEDCAETAAAVIQSGIRVHTEEQELPNDKDLVKLQAVIRGHLVRRQAAESLQCLLAIVKMQGLVRVHQAQQYGGKFQDSLICSSSEKLLNNGFALKLMDSMSTSKSIHIKCDPSEPDVAWKWMERWTSMIPPNTGGHLLEDRENNESVDEKIKGDAQHEENTLPLDSDISFLKLVPDDAEETLRPSDSHPLEVSACIPDRTSGMEIEDVPEPDLIEKFKEDVEKLTEPETENVAEQPLEVSVEQSTQTDTSREPIPLPEKPESSFDDTMDAYKTEQTSEMEGKKFMARKSCNPAFAAAQLKFEELTSNLTVSRSNSLDGANKPKVHTPRSQDNVSPKQSNDTSIPESSVGHDPKIVVAASECGTEISISSTLDSPDRSEADGGEIVLEIGSLEDRNHVGDNAEKDNSVLHSEVNTSGGAIEPEKEVQTDDTAIAANAIDPVPVEQPHLGQEKPDLHDELEKSVGSYVKTPEGTPLSRTTFAESHGTPSSEVSVNTKKSKSKRPKSHVSKRSLTSPSSDSVGRSSMDNLSKDYRLGRRESSGKVKSDHVDQEPRISNSTPLPSYMQFTESARAKASASVSPKLSPDVQDNNPRKRHSLPMTNGKQDSSPRMQRSSSQAQQNVKSNGAVPVPPNSSDRRWHI

SEQ ID NO: 44221 - protein, 366 aa, Oryza sativa
MFPNMLPMGVGQFNPLVIQPQAMTQQATRHARRVYVGGLPPTANEQSVAIYFNQVMAAIGGNTAGPGDAVLNVYINHDKKFAFVEMRSVEEASNAMALDGILFEGAPVKVRRPTDYNPSLAAALGPSQPSPNLNLAAVGLTPGSAGGLEGPDRIFVGGLPYYFTEAQVRELLESFGPLRGFDLVKDRETGNSKGYAFCVYQDLNVTDIACAALNGIKMGDKTLTVRRANQGAAQPRPEQESILLQAQQQVQLQKLVYQVGALPTKVVCLTQVVSADELKDDEEYEDIMEDMRLEAGKYGNLIKVVIPRPDPSGLPVAGVGKVFLEYADVDGATKAKTAMHGRKFGGNPVVAVFYPENKFSSAEYDA

SEQ ID NO: 44222 - protein, 644 aa, Oryza sativa
MMEPLSDDNSKKLFYNRIFGVACSSSTGNQSVEATKKILHKCGGIPLSIIAIASLLVDKPTGDWSIIYDSIGFGTGDRNEAVQNTRKILSFSYYHLPSYLKTCMLYLSIYPEDHLIKKDTLIWKWVAEGFVQEEQDKPLFEVGERYFIELINRSMIQPMENDGKISGCHIHDMVLDLIRNIIAEENFVKVFDKLHEVHRLSSQRSTVRRIALHESWNQGKNNDLAVGMTQLRSFNAIKCTISMMPSLLSFQVLRVLELQGCNVTGGLYLKHIGKLRQLRYLGMRGTRVAELPVEIGNLMHLQTLDVRYTGLKELPSTICKLSKLMRLCVAGGTGVLMGGWNLSSLQYLKMGYGCIKSNKDFAIEVGKLMELRILKIYVENKFDKGTKNALLQSLCCLRRLQNLMIDFPLPFQNTMSIWDGWDLWEPSPQLRVFRICGIELPRLPEWVNSMCVPYLSELRLDVVAMEARDLDMLARMPALRTLCLRTQARFSWTVGGAGLFPNLRFCRMDIALTFLQGAMPMLMKLQLWLWASEYCAATDVGLGHLPLLNRVEVILHCCDATTRQVEEAEAAWRHMVNSHPNRPAIRVSRLEEYRMKGDEDNDDEEISAKDHVDGNCDDGNSAYTDQEVLRLRLPCITIRSWLHD

SEQ ID NO: 44223 - protein, 382 aa, Oryza sativa
MDVPWLLVAHGSVTALVVVSFLCGQWPIFEGTFVQRVNHFLTFGAYHHLLRLVHAACGNGARDLVLGVESYCCDRPNPILQIFYVAIIGVTYFIIVQTSFQYIPGYYVSGLHRYLSIVAVAIGALLFVLTSFSDPGTVTAENVSQYLSAYPYDGIIFEEKECSTCKIARPARAKHCRICDKCVARFDHHCGWMNNCIGEKNTRYFVAFLVWHFLICLYGAVILGFILAGELKERKVVYILTVYYGIDNSFSGLFPHVAQWLLAVHNTQILLAVFLAIIALLLGGFCAYHTHLCLTNTTTNETFKWQDYIMWRKKVNEEKAAANGEVRKSPPSKWKAFFSRSHTEADETIVKNNIYDRGMIRNMCEVFVPLSERQSFSRKKSD

SEQ ID NO: 44224 - protein, 409 aa, Oryza sativa
MAAAQRWLPGILRRGDGLARRLYSSASSLLFDDTQEQFKESVHKFAQETIAPHAAAIDASNHFPKDVNLWKLMGDFNLHGLTAPEEYGGMGLGYMYHCIAMEEISRASGSVGLSYGAHSNLCINQLVRHGSPAQKLKYLPKLISGEHVGALAMSEPNSGSDVVSMKCKAEKVDGGYVINGNKMWCTNGPSAQTLVVYAKTDIAAGSKGITAFIIEKGMPGFSTAQKLDKLGMRGSDTCELVFENCFVPHENVLGEEGKGVYVMMSGLDLERLVLAAGPIGLMQACLDVAVPYVRQREQFGRPIGEFQFIQGKLADMYTSLQSSRSFVYSVARDCDNGKVDRKDCAGVILFAAERATQVALQAIQCLGGNGYINEYPTGRLLRDAKLFEIGAGTSEIRRMIIGRELFKEE

SEQ ID NO: 44225 - protein, 402 aa, Oryza sativa
MRVLREKKWKDSDFEDNLYHILICSCKEAGCCDDAVRIYNQMPKSATHPNLRIYCSMIDVFSIMERFTDAEALYLELKASSCVLDMIAYSVIVRMYTKAGRPEDACLVLEDMEKQKEIVPDKYLFLDMLRTYQKCGLLEKLSDTYYWILKSQVELDEAMYNCIINCCGRAIPVDELSRIFDEMIQQGHLANTVTLNVLLDIYGKAGLFNKAEKVFLMARKQGMADIISYNTIIAAHAKNGDFRSMIYFVQRMQEAGFPVSLEAYNCMLDAYGKAGQLEEFAAVLQKMERAGCEFDHYTYNIMINIYGRKGWIEGVANVLAELKSRGGEPDLYSYNTLIKAYGIAGMPEDAVKLMQEMRIKGIAADRVTYTNLIAALQRNENFLEAVKWSLWMKQTGVAATRT

SEQ ID NO: 44226 - protein, 250 aa, Oryza sativa
MMGGECKVHQLQAAGDGGPGAVAPFVAKTFHMVSDPSTNAVVRWGGAGNTFLVLDPAAFSDFLLPSYFKHRNFASFVRQLNTYGFRKVDPDRWEFAHESFLRGQAQLLPRIVRKKKKGGAAPGCRELCEEGEEVRGTIEAVQRLREEQRGMEEELQAMDQRLRAAESRPGQMMAFLAKLADEPGVVLRAMLAKKEELAAAGNNGSDPCKRRRIGADTGRGGVATGGDAAEMAQSRGTVPFPFSVLGQVFY

SEQ ID NO: 44227 - protein, 732 aa, Oryza sativa
MRVWLGRVGGGDAMMHMLVAPDGGGGGEMPPPYGGAAAAPPPPMEQELELHRDNADDGLDGHVRCLRCGISGNATPHMRRGPDGPRTLCNACGIAYRKGKMRRMIEAEPPIDEAALAKLVPEVGMEFESEDKAYEFYNKYAGHVGFSVRKSTSHKSSGNITKVRTFVCSREGYNRDKKSLEAKKPRLDTRIGCPARLIIKVTPESKYRVTDFKADHNHQLAPPSTMHMLRSQRILTELQSGEAELSDDSVMTPTTKATGDLVVRQIGFLRSISLLPADYKNYLRSKRMKAMQLGDGGAILKYLQTMQMENPAFFYTMQIDEDDKLTNFFWADPKSREDFNYFGDVLCLDTTYKINGYGRPLSLFLGVNHHKQTIVFGAAMLYDESFESYRWLFESFKIAMHGKQPAVALVDQSIPLASAMAAAWPNTTQRTCAWHVYQNSLKHLNHVFQGSKTFAKDFSRCVFGYEEEEEFLFAWRSMLEKYDLRHNEWLSKLFDERERWALAYERHIFCADIISALQAESFSSVLKKFLGPQLDLLSFFKHYERAVDEHRYAELQADFQASQSYPRIPPAKMLKQAAHTYTPVVFEIFRKEFELFMDSVLFSCGEAGATSEYKVAPSEKPKEHFVRFDSSDCSCICTCRKFEFMGIPCCHMLKVLDYRNIKELPQRYLLKRWRRTAKSANEENQGYVANGNGSSLNSIVPPANHHGLQGFSAMIQDTPVSNMHENSFRRSS

SEQ ID NO: 44228 - protein, 606 aa, Oryza sativa
MILDIEKKVLLRKTAITGKGKGIGKRIGVKLTPKKGRPSLFVLDINSGEVRAAKGISRSLSVGQVVWAPPSSCGRQKYLIFVGWLEHNGFQNTPRKLGIKYCSNRPCSLYSTLCPFEESDVDNAPASDSKLEPASVAINLTPSISSAFFPRFSKDGKLLVFLSANRAVDSGAHNATDSLHKINWPSDWKMDQYLEITDVIPIVMCPQDGCFPGLYCSSMLSNPWLSDRCTMILTSAWRSTEVILSIDVLSGKATRISPENSEYSWSALAVDGHNVLAVSSSPIDPPQIKYGHQVSLKDQTCTWVWDEVNNNPLMAANNKVKALLSHHQFSILKIPVTNPSDDLSDGSKLPFEAIFVSCKDSSHKPTILVLHGGPHSVSVSSYSKTSAFLASLGFNLLIVNYRGTPGFGEEALQSLPGKVGSQDVQDCLTALDYVIEGGLIDASKVAVIGISHGGFLTTHLIGQAPDRFMVAAARNPVCNLSLMIGTTDIPDWCYAVACGSEGRQHATESPSPDHLRLFYQKSPIAHISKVKAPLLMLLGGADLRVPISNGLQYARALRERGGEIRIMMFPDDIHEINIPQSDFESFLNIGVWFKKHLSISASDASA

SEQ ID NO: 44229 - protein, 600 aa, Oryza sativa
MAAPLTAAAALRLGRGLSHRRAFLLRRRYSPAPLAPSPCAAPRCLSSAAHPPPPPPRRLARSGPSRPLAASAATAVSEAQTDLESGPVTASKGRIYHETYGCQMNVNDMEIVLSIMKNEGYDEIVPDPESAEIIFINTCAIRDNAEQKVWQRLNYFWFLKRQWKANVAAGRSRSLRPPKIAVLGCMAERLKEKILDSDKMVDVVCGPDAYRDLPRLLQEVDYGQKGINTLLSLEETYADITPVRISDNSVTAFVSIMRGCNNMCSFCIVPFTRGRERSRPVSSIVREVGELWKAGVKEVMLLGQNVNSYNDTSEVEELEPGKNWELSEGFSSMCKVKNMGLRFADLLDQLSLEYPEMRFRFTSPHPKDYPDELLYLMRDRHNVCKLIHMPAQSGSSAVLERMRRGYTREAYLELVQKIRSIIPDVGLSSDFISGFCGETEEEHAETLTLVRAVGYDMAYMFAYSMREKTHAHRNYVDDVPDDVKQRRLAELISTFRETTAKIYDSQVGTVQLVLVEGPNKRAPETEMIGKTDRGHRVSFASVPVPHTFEGDELRKPVVGDFIEVKITKSSTASLSGDVIARTSLSKFYKNHSSEAHAVAA

SEQ ID NO: 44230 - protein, 229 aa, Oryza sativa
MGKRWIPLEANPDVMNQFMWGLGVAEGEAQFCDVYGLDDELLAMVPQPVLAVLFLYPLTSLDDDEEESGAAATSTAGDKDLSKRVYFTKQTVGNACGTVGVIHAIGNAASKLKLVEGYYFDRFYKQTVDMDPVQRAAFLEEDDEMEDAHSVAASAGDTDANVEVNEHFVCFSCVDGELYELDGRKSQPICHGPSSPDTLLQDAAKVIKARIASNPDSMNFNVMALSKVV

SEQ ID NO: 44231 - protein, 181 aa, Oryza sativa
MATPAASPLLLPLPLPLPASTFPPRRAVPCARRLVLRPPRAGRPRLRDPPPAAPPPAAEEVGEEEEDDDAPPLRLLEPPQEDDPFPPEMEPADPDFYRIGYARMMRAYGVEFLEGPDGMAVYASRDVDPLRRARVIMEIPLELMLTITQKRPWMFFPDIIPLGHPIFDIIESTDPEVNGAL

SEQ ID NO: 44232 - protein, 146 aa, Oryza sativa
MVAEAALPPLPPSLPHRSGRREGGPRPQRRRRRPQRWRRVFSTLRLATPRAAVAPSAISLLPPAAVVASAVAAAVALAAAADGWCRRRPQMDDVVATADGWRGDDRGRRWQRPRAAVAMANGGSGGRREKFCDVGLLFFDDYFVIL

SEQ ID NO: 44233 - protein, 127 aa, Oryza sativa; identical to SEQ ID NO: 33793

SEQ ID NO: 44234 - protein, 112 aa, Oryza sativa
MVLSKVEVNLIRLLEAAPRQQNQTKLVHYVTTARELLEQLGSETTLEGISSVSKAKTSEYSEKIEALAARLAAPEPENEMPVDENREVESSYEGDKPGSPISLSSGLRRRPM

SEQ ID NO: 44235 - protein, 202 aa, Oryza sativa
MFYYLPVYKYFGYEGERVMHPVQTYAMYYWCFHYFKRIMETFFVHRFSHATSPVSNVFRNCAYYWTFGAYIAYYCNHPLYTPVSELQMKIGFGFGILCQIANFYCHILLRNLRSPSGNGGYQIPRGFLFNIVTCANYTTEIYQWLGFNIATQTVAGYIFLVVAASIMTNWALGKHRRLKKLFDGKEGRPKYPRRWVILPPFL

SEQ ID NO: 44236 - protein, 271 aa, Oryza sativa
MASSSLLVRLASDEMPQTLDASSSSSCYDAFVPVFHPDPSSGFSAASVVAAADRLRSQFLSVEPDLFHDALVAPSPDHLGFPDEEEEEEIRWDCLQLDDDDEEEEGVADLRLEASNAAEEFDWEEVASPSGGAGMDQPEPEWEVLADVPPPPPPPADEGFVYTSDRDVYEVLVGEGLFLKSKPPAARSAVEALPSAVVAAGEDGEGEECAVCRDGVAAGERVKRLPCSHGYHEECIMPWLDVRNSCPLCRFELPTDDPQYESWKASRAAAA

SEQ ID NO: 44237 - protein, 759 aa, Oryza sativa
MWRLKVSEGGSPWLRSVNNLLGRQVWEFDPDLGTPEERADVEKARREFAEHRFERKHSSDLLMRMQFAKENCQKLDLLAVKRGEHEDVMGEAVWSSLKRAISRVCNLQAHDGHWPGDYAGLMFFLPGLIITLHVSGVLNTVLSSEHQKEMRRYIYNHQNEDGGWGLHIEGHSTMLGSSLNYVALRLLGEGPNGGDGCIENGRNWILDHGGATFTTSWGKFWLSVLGVFDWSGNNPVPPELLLLPYQLPFHPGRMSSYIRMVFIPMSYIYGKRFVGPVTPVVLELRSELYNDPYDEIDWNKARTQCAKEDMYYPRSSKLDMFWSFLHKFIEPVLLRWPGRKLREKALATSMRNVHYEDECTRYICFGGVPKALNILACWIEDPSSEAFKCHIARVYDYLWIAEDGMKMQIYDGSQVWDAGLTVEALVATDLVKELGPTLKRAHSFLKNSQLLDNCPRDFNRWYRHISKGGWTFTTADDGWQVSDCTATALKACLLLSRISPEIVGEPLEIDAQYDAVNCLMSLMNDNGGFSAFELVRSNTWLEHINPTEAFGRVMIEYPYVECTSSSIQCLALFKKLHPGHRKEEVENCISKGANFIESSQRSDGSWYGSWGICFTYATWFAVTGLVSAGRTLGNSATVRKACDFLLSKQLPSGGWGESYLSCHDEVYTNLKGNRPHGTHTAWAMIALIDAGQAERDPVPLHRAAKALLNLQLEDGEFPQQEIVGVFLQTAMISYSQYRNIFPIMALTGYRRRVLLAGNI

SEQ ID NO: 44238 - protein, 184 aa, Oryza sativa
MHFSQGDGEVSFCGAIEMSGFLELKCEIIRGGMKEYLTPIGPTPLHVNPIFDIGPVEPRFSDWLVFEGISVDESGKQHFLDASVAYKRAVLNAIEYLSRFGYSKEQVYLLLSCCPCEGRISGIVDSPNAVATLAIPTAIFDQDVKPKRLSGKQGPKLRRLPDVLRCSSDGHLPVTQDPSGTKAP

SEQ ID NO: 44239 - protein, 195 aa, Oryza sativa
MGIDLVAGGRNKKTKRTAPRSEDVYLKLIVKLYRFLVRRTKSHFNAVILKRLFMSKTNRPPLSMRRLVRFMEGKVPDRHAISGDQIAVIVGTVTDDKRIYEVPAMKVAALRFTETARARIINAGGECLTFDQLALRAPLGQNTVLLRGPKNAREAVKHFGPAPGVPHSNTKPYVRSKGRKFEKARGRRNSKGFKV

SEQ ID NO: 44240 - protein, 62 aa, Oryza sativa
MVFTVMKILMRIKYHMSEMMRTYILTMNLLKWLFPLFVLVMNMTATPCLQIPIGLHLVRIKH

SEQ ID NO: 44241 - protein, 950 aa, Oryza sativa
MVENGVLEQPKGVSRNRPRAQSNDHPVDPGYLPELTWEHKLSNIGYDLPSFRLTWRETFQLAGLGLRLGRHILEETSKGRAAVIDPMKKRIAKSGQGVPLGGIGSGSIGRSYKGEFQRWQLFPGTCEERPVLANQFSAFISRKDGRNYSSVLHPGKPDLPKGSNISGIGSWDWNMSGQNSTYHALYPRSWTIYNGEPDPDVNIVCRQISPIIPHNYQQSSYPVSVFTFTVTNSGNTAADVTLLFTWANSVGGKSELTGYHSNSPMIEKDGVHGILLHHRTANGQPPVTFAIAAQEKEDIHISECPYFIISGSSDAFSAKDMWNYVKENGSFDNLDLTKTSMCSKPGLSIGAAIAASVKLPPQTTQNVSFALAWACPEVKFSSGKTYHRRYTKFHGTDNDAAASLAHDAILEHNSWERQIEEWQNPILQDERFPDWYPVTLFNELYYLNAGGTIWTDGLPPIQSLTGIGEKKFSLDMQNGDADDANGIIPRNNTASDILNQMASVLERIHASMESNSAIGTTLLQGEENIGQFLYLEGIEYYMWNTYDVHFYASFSLIMLFPKLQLSIQRDFAAAVLMHDPEKLRMLHDGKWVARKVLGAVPHDLGLYDPWFKVNAYTLYNTDRWKDLNPKFVLQVYRDVVATGDKSFARAVWPSVYMAMAYMEQFDRDKDGMIENEDFPDQTYDVWSMAGISAYCGGLWVAALQAASALAHEVGDKASEKLFWDKYEKAKSVYGKLWNGSYFNYDDGDNIMSASIHADQLAGQWYAKACGLFPIVDKDKAESALEKIYSFNVMKFKDGKRGAMNGMWPDGTVDMSAMQSREIWPGVTYALAATMIQEGMVEKGFKTAEGIYHAAWSPEGLGYSFQTPEAWNNDDEYRSLCYMRPLAIWAIQWALSNPKLHKQTADIPQDSFPKNQFSYARIAKLLHLPEDESPKSFLRVIYEIVRNRYRS

SEQ ID NO: 44242 - protein, 379 aa, Oryza sativa; identical to SEQ ID NO: 33118

SEQ ID NO: 44243 - protein, 369 aa, Oryza sativa; identical to SEQ ID NO: 33088

SEQ ID NO: 44244 - protein, 159 aa, Oryza sativa
MCCYDAMHAPMYCLSLCDELVKFNVCWSKFTMFSSSCNPVVACLLFFCFFRVLRPGGCPVPAAGTGTGEIYPLCGDGEGERSVFYAVGMGTGCTNPTGAAPLPSLISLQSLPTTATARSAYSCALFSASCDLFCFVLIFFFTVVLLFYYASDAMAVTTW

SEQ ID NO: 44245 - protein, 379 aa, Oryza sativa
MAMERAWKPREIADTFGIEMDEEEAAAAAIPPPQTPLEPMEYLSRSWSVSASEISKILFNGSKKSFAAKRLPEMTIPENSVVAASIVPSHLQHIDTRRNSISSHHLPIGRWFQHKEASRVKQSSKEKLRAEKAHVHAMVSVARVAAAVAAVTAATTSSDIQTSKMAAAMVSATELLASHCVEIAQHAGARHEQVACAIQSAVGVRSSGDLMTLTAAAATALRGAATMKQRVQREMRSNASVLPYEKGHSWSPDIWCKEGELLKRTRKGDLHKTRVSIYINKRSQVILKLKSKHIGGALSKKNKSVVFGVYNELPTWVEAGKHFTEERCCFGLSTAQGLVEFECENSTSKQRWVDDVKNLLRQVAAEEQVENKLGSVKLS

SEQ ID NO: 44246 - protein, 337 aa, Oryza sativa
MHPYSLKSSKGAPFPPRPILVFLIAIFGFYVCYISFNQITLENRSEENSGEVQAEIHCRKPHLPHEELRYVHFPKPESYSRGECSCNLVRSFVLVSMQRSGSGWFETLLNSHPNISSNGEIFNRVDRRENISSILQTLDKLYNLDWFTSAAKNECTAAFGLKWMLNQGFMDHHDDIASYLNKKGVSVIFLFRRNTLRRLISVLANDYDRDAKQLNGTHKSHVHSKEEAEILAKFKPVLDVSNLIPNIRNAEKYIRDCLDHFNTTRHMILYYEDIVRNRNALFQVQEFLGVPVRKLVSRQVKIHTSPLPGLVRNWDDVSNKLNGTQYAHFLDGADYVR

SEQ ID NO: 44247 - protein, 503 aa, Oryza sativa
MATGELALVSSLFIVVVFLLLGAVAREASALTRHDFPEGFVFGAGSSAFQVEGAAAEDGRKPSIWDTFINQGYMPDGSNADVSADQYHHYKEDVKLMYDMGLDAYRFSIAWPRLIPDGRGEINPKGLEYYNNLIDELIMHGIQPHVTIYHFDLPQALQDEYGGILSPRFIEDYSAYAEVCFKNFGDRVKHWATFNQPNIEPIGGFDAGDRPPRRCSYPFGTNCTGGDSSTEPYIVAHHLLLAHASAVSIYRQKYQAIQGGQIGITLMVRWHEPYTDKTADAAAAIRMNEFHIGWFLHPLVHGDYPPVMRSRVGVRLPSITASDSEKIRGSFDFIGINHYYVIFVQSIDANEQKLRDYYIDAGVQGEDDTENIQCHSWSLGKVLNHLKLEYGNPPVMIHENGYSDSPDIFGKINYNDDFRSAFLQGYLEALYLSVRNGSNTRGYFVWSMFDMFEFLYGYRLRFGLCGVDFTAAARTRYLKNSARWYSGFLRGGELRPEKSYATL

SEQ ID NO: 44248 - protein, 372 aa, Oryza sativa
MDCCFMFRKKQPVEGDDGEHRVKIFSYSELRKATHDFSGANKIGEGGFGSVFRGVLRDGTTVAVKVLSATSRQGVREFLTELTAISDIKHENLVTLIGCCAEGSHRILVYNYLENNSLAQTLLGSRGSNIRFDWRTRVKIAVGVARGIAFLHEEIRPPIIHRDIKASNILLDKDLTPKISDFGLARLLPPNATHVSTRVAGTLGYLAPEYAIRGQVTKKSDIYSFGVLLLEIVSGRCNTNTRLPYEDQFLLERTWVRYEQERLAEIIDADLGNDLDVDEACRFLKIGLLCTQDAMARRPNMSTVVRMLTGEKHFSVHRITRPAMITDFADLKVSSSQQKENETTRSSNMRSFSTTDETEPFSSSETPTQTSI

SEQ ID NO: 44249 - protein, 123 aa, Oryza sativa
MSSPVLSPLEDSRAEHSVRRELAVFETQVRHRRPGVAAVEPVSDGIGFVRVPVCCDLRISHHLLFTIHRSKSSGGTYIARRFSLGSLWPLQVNHILHDGDAVSISLRAILEFGSFISLQVIIS

SEQ ID NO: 44250 - protein, 69 aa, Oryza sativa
MSDWGPVVIAVVLFVLLSPGLLIQLPGRHHFVEFGNLHTSAMSIVVHSIIYFALITLFVIVIGVHITTD

SEQ ID NO: 44251 - protein, 136 aa, Oryza sativa
MVKFLKPGKAVILLQGRFAGRKAVIVRVFEEGTRDRPYGHCLVAGLAKYPKKVIRKDSAKKTAKKSRVKCFLKLVNFTHLMPTRYTLDVDLKEVAAGPDALATRDKKVAACKSAKARLEDRFKTGKNRWFFTKLRF

SEQ ID NO: 44252 - protein, 300 aa, Oryza sativa
MESVAVNAARWVVGKALSPLSGGFVEAWAATTELGPNVDAIKMELLYAQGMLHNARSRETSNPALQQLLLKLRGLAYDAEDVLDELDYFRIQDELDGTYEAAEEHAKGCLYGLVLNTRRTVRNIKKKACSCGDNGEASRHTNDGEALAGSSCIHKLFSNARERSQFLCCAYPCKASHIEHTMKTPKLKFDRVDLSTRMKHIVEQLKPVCAKVSTILNLELLESNRNIGLMSLNAALSRMPGQAPFLPSSVAMSRPVTTSEFIDPKFHGRMSEINKIIGITRGDYCGKDLTIIPIVGSGGI

SEQ ID NO: 44253 - protein, 296 aa, Oryza sativa
MDRSTAATIFWHRFYKVADTRETLKEAMMLSNPTNCRPHMWACNIHEEQFMMQIFSLKLSNITATVDGPVHLYGYFAVRDHLDPLRNYIFNRTRDDPFIMGQDNGVDSDNSLIPMPGPKRGIGNQARVLIEFDMKIKNGETRDDDFQLIDGAIICSEFVLPNRVFTQRIEGDCGAVDISLALLHSTVEATVQVSISQVHGNGFSLSLYSYTSRIPEKIQLFDGFISKPCDLNRFVVAVVVNTPLILIFKIDKRDGSDHVPGCCAFKARTHGYEYDMQELKLGCTNILVKLSWSTLE

SEQ ID NO: 44254 - protein, 396 aa, Oryza sativa
MELSGDAAVVSGSGNRKRKRHVQQHSLEYPCVSRLRHRRLLAFLSRHDYDSTFDALVQETSVLFRVGHIQALVRQGRWADAASYVNRFVPPSRVLTDAGLVFHEFLYIHHVLDCIVAGDHLRGAQVAASYQRHVRDNPNPSHGAIKLIRILLTILHCHPIRAFLNWHLMRYMAAEIIKDLIPQIPEFNDLLKLPKGGPIKPHNILPIGSSSHRRRHVKNEDRIPPDIARFYLQKKRGLPSSTICQERYYTGLSRNAANWLADIIDKSLQAGVLRDGYPFKHSCNEGVTGAPIGLDSPANSYGISTQTIADMMRPLIISDIGQGSVARNNPTRPETTAHQAISPTTQQITTEFVQHSESQFQEYNSQMDGRVRIVESGMKRSRSFGGGCSSSVEISS

SEQ ID NO: 44255 - protein, 822 aa, Oryza sativa
MGIPSFYRWLVNRYPSIVSPAKESRPADGIVVYDNLYLDMNQIIHYSFHPQDQMNAGTDVCAPTTVSEVFESMFDYLDRLFRIVRPRRLLYLAVDGVAPCAKMNGMRRGRRFAWASEEEEMQKISEGVSDPNVITPGTEFMEKISQALTYYIRARLNSSDPGWKHIMVILSDANVPGEGEHKIMSFIRAQRSMEGYDPNTRHCLFGHDADLIMLALASHEVHFSILREDNSQLTEADPEKQYLFLNIWVLREYLEIELKILDPVCEPDIERLIDDFIFICFLMGNDFIPHIPSLEMKEYALDLLIEVYKTTFNKMGGYIVNIEKVKDKHAAYLEVSRLEIFFHQLSMYEEKIFLKRYELEQESLKKSCRDVLREASESERLELSRKLEDRFFNEERPYDKLRLGLPGWKSRFYREYFGIETSNEIGNLQNDMAQKYLEGLCWMLQYYLADVPSWSWYYPFYVAPFVSDLKSNCRFEISFTVDKPLRPFDQLMAVLPLRSSCALPECYRKVMGRKEFDHPKLQADTIGKRFLWKCISEEELLQATKELDKELSMHEMRRNTPRQEKIFLQRNSNAQALAKVIVQLQTSSCSPEQKLPIDSAISGLGGWLSPDGLSNGFFCSPLQNLQDITNDQAISAMFFNPEAGNPIPRLLSNVKVHDKTVTEADISRRLLWHTYPGSRPPPPIVERPDTIWKPISKPSAPREEHKNAGTGWMGRGRGNAALAAAETTTQLLTASSSSSSSYGHGAAGSRTAAETQRSSSSSSSRRGSRRADMVAPQSRNSRFDDSDGGAYGFRPLGIGSAPWTGDGSGGGHGRGRAQPRGW

SEQ ID NO: 44256 - protein, 124 aa, Oryza sativa
MATIAAAAAARTAVVGRPSGVAQLRARRGERVRCGYSSRDGKEATPAAAVKGATSMLAAAVTASSSSAPAAMALVDPPRRVRPHLVALHRLHLHARRRRRVRRPLPLRPCSVNPRKRLERGLRE

SEQ ID NO: 44257 - protein, 235 aa, Oryza sativa
MARIKPKQLLIQSKTKKAPTRISYSTIVTWNLIVILVALSLYATYRHWHHRPMLETEMDLPRAEHVGRSEDSTKTSRPSYAVIDTAKGSITIEIYKDASADVVDRFVSLCKSNHFKGMPFRHVIKNFVIQGGDFDFNGAAQEWILKAKASGENALSPKHEAFMIGTTKNPNNKGFDLFITTAPIPDLNDKLVVFGQVINGQDIVQEIEEVDTDEHYQPKTPIGILNITLKQQALS

SEQ ID NO: 44258 - protein, 438 aa, Oryza sativa
MADRQQSEEPEEQVDLEGDDDIMDDDDGYRRHRREDSDDPEEEDPDERQGEGDGRREDAEGPGGAGGDPAAGGEGGADVMDKVGGDAGPEDEEEKRKWDELLALPPQGSEVFIGGLPRDTTEDDLHELCEAFGEISEVRLMKDKETKENKGFAFVTFTGKDGAQRAIEDLHDKEHKGRTLRCSLSQAKHRLFVGNVPKGLSEDELRNIIQGKGPGVVNIEMFKDLHDPSRNRGFLFVEYYNHACADYAKQKLSAPNFKVDGSQLTVSWAEPKGSSSSDSSSAAAQVKTIYVKNLPENASKEKIKEIFEIHGEVTKVVLPPAKAGNKRDFGFVHFAERSSALKAVKGSEKYEIDGQVLEVSMAKPLGDKKPDHSFKPGGAPNFPLPPYGGYMGDPYGAYGGGGPGFNQVNQTKPSGAYGRVGPSIPKYQTHSARKSTYK

SEQ ID NO: 44259 - protein, 77 aa, Oryza sativa
MDKGDVAVAVPPSIAGASSSGAKKGKRFEIKKWNAVSLWAWDIVVDNCAICRNHIMDLCEHARRWPSARPRSDLLFL

SEQ ID NO: 44260 - protein, 149 aa, Oryza sativa
MAMAAAEARVRQEKVKKFEDFVDRRLKPDLVNTIAQRDKVFQQQKTFLDLKRNIENLEKNGVTSMRSMVNLGSEVYAQAEVPDTRHIFVDIGLGFHVEFTWQEALQFISVRESRLARQIDEYTHLIASIKAQIKLVCEGIRELLELPAE

SEQ ID NO: 44261 - protein, 110 aa, Oryza sativa
MVFFPGDCCSPDQRLINPFYLFAPCRYTAFIPLYPIGVGPGEMWTMYQALPFVKERKLYSGFFGKFSMSYHSFLVAVLAVYPFLWMKLYLHVFKQRRSKLGKSGGAKKRA

SEQ ID NO: 44262 - protein, 176 aa, Oryza sativa
MAEPRARCRAPQSSTSPTWPRRVEALTHILTHPSHSPSLHSQLFLASRVPCPPPGSTYPPFLCPGAGDGAGLLRWALASVFLPRAARLCLPPSSWRSRCPFQLPPPVVPSAAIEPAPERWGEAELRGYARRQRAQRGPMRARPPHSIAGAVLTIVPNVVIVAAVIRELFWVRPNRI

SEQ ID NO: 44263 - protein, 241 aa, Oryza sativa
MFSQYLSAYPYDGIIFEEKECSTCKIARPARAKHCRICDKCVARFDHHCGWMNNCIGEKNTRYFVAFLVWHFLICLYGAVILGFILAGELKERKVVYILTVYYGIDNSFSGLFPHVAQWLLAVHNTQILLAVFLAIIALLLGGFCAYHTHLCLTNTTTNETFKWQDYIMWRKKVNEEKAAANGEVRKSPPSKWKAFFSRSHTEADETIVKNNIYDRGMIRNMCEVFVPLSERQSFSRKKSD

SEQ ID NO: 44264 - protein, 573 aa, Oryza sativa
MVHTGACIANLLGQGGSRKYRLTCNWLRYFKNDRDRRDLITCGSAAGVAAAFRAPVGGVLFALEEAASWWRSALLWRAFFTTAVVAVVLRSLIEFCRSGKCGLFGQGGLIMFDLSSTVATYSTPDLIAIIILGIIGGIFGGLFNFLLDKVLRVYSIINERGAPFKILLTITISIITSMCSYGLPWLAACTPCPVDAVEQCPTIGRSGNFKNFQCPPGHYNDLASLFFNTNDDAIRNLFSNGTESEFHMSTLFIFFTAVYCLGILTYGVAVPSGLFIPVILAGATYGRIVGTLLGSISDLDPGLFALLGAASFLGGTMRMTVSVCVILLELTNDLAMLPLVMLVLLISKTIADNFNKGVYDQIVVMKGLPYMEAHAEPYMRHLVAGDVVSGPLITFSGVEKVGNIVHALRFTGHNGFPVVDEPPLTEAPELVGLVTRSHLLVLLNGKMFMKDQLKTSGSFVLQRFGAFDFAKPGSGKGLKIQDLDFTDEEMEMYVDLHPVTNTSPYTVVETMSLAKAAILFRALGLRHLLVVPKTPDRPPIVGILTRHDFVEEHIHGLFPNLNPHKFHSTSMGG

SEQ ID NO: 44265 - protein, 416 aa, Oryza sativa; identical to SEQ ID NO: 31888

SEQ ID NO: 44266 - protein, 372 aa, Oryza sativa
MDEVAEIADAMGTVGIDNGASRKLLSNESLEERGEEHDVQADGAHSGESEVINPAEEVGGEATSQPEDVKPRVSKGSQSHSPKVTTKSQRQSPRSGDKSQARKNSPGSTYPKAPIARVSDPDLVDSSSCNDGADIKKAEKSSFRPVARASQSLEDSKEKKKTQKTSNQCSVKNDEEEPNCEKVKPQRVGSTPAYGFAFKCDERAEKRREFYSKLEEKIHAQELEKSNMQAKSKETEEAELKKLRKSLNFRANPMPSFYKEPPPPKVELKKIPTTRARSPKLGRSKNTSSVSTEESTVPSSRPARLSLDERASQNGVKKVPAANTVRKPQRKSLPKLPSEQTVTEQVENNTSATDPVRELIRAQVTPDDQFGG

SEQ ID NO: 44267 - protein, 274 aa, Oryza sativa
MGTMVGHVAPGAGFILIGMWQLFNHIRLFALRPSSYAAPVWFPVRGVRHLELILVIVGAAISILMELVIGPARHQPFDDDGTIPSNHLHNFEHASISLALLVYAAVTIHMDRARAPMRDAVSQLVAAAAFAQQLLIFHLHSADHMGVEGQFHWLLQTVIAVTLATTVLGIPCPRSFAVSLVRSASLVFQGVWFVVMGVMLWTPALIPKGCFLHLTKLYPEEPRYLPLVKGGGGGGDGDSDGGRFSIGDDEDDLEAAKGGFGHVAGGGNAVEIER

SEQ ID NO: 44268 - protein, 699 aa, Oryza sativa
MPELRSSTRQARLRSRKPDDQKPAEQAAKPALPAPQRAGKRVPPPAIRGRKGAAGRRGGAAPRGRRKAVEVVDLEAGQGRGDSPKPVVGQAVVGEAKNVKAPEVVANKGLRMDGESAEKLVAADDESSLPVPERIQVGNSPEYITDRKLGKGGFGQVYVGRRVSGGTNRTGPDAYEVALKLEHRNSKGCNYGAPYEWQVYHNLNGCYGIPAVHYKGRQGDYYILVMDMLGPSLWDVWNSLGQTMSPHMGACIAVEAISILEKLHSKGFVHGDVKPENFLLGQPGSPDEKKLYLIDLGLASKWRESSGQHVDYDQRPDIFRGTIRYASVHAHLGRTGSRRDDLESLAYTLIFLIRGRLPWQGYQGDTKSFLVCKKKMATSPEMLSCFCPPPFKQFLEVVTNMKFDEEPNYAKLISLFDSLIEVPASRPIRIDGALKVGQKRGRNHEEDEQPKKKVRLGSPAAQWISVYNARRAMKQRYHYNVADNRLQQHIEKGNEDGLYISCVASSANLWALIMDAGTGFLSQVHELSPVFLHKDWIMDQWEKNFYITAIAGSANGSSLVVMSKGTPYSQQSYKVSESFPFKWINKKWKEGFHVTSMATAGNRWGVVMSRNSGYSEQVVELDFLYPSEGIHRRWETGYRITSIAATNDQAAFILSIPKRKPVDETQETLRTSAFPSNHVKDKWAKNLYIASICFGRTVC

SEQ ID NO: 44269 - protein, 315 aa, Oryza sativa
MLDRSLRPPQPQQAAAEAEAGPGGGEGGGNVDRVLFKNLVEMVPLVESLMDRRSNPSYSRRASMVYTPAPAKKGSDLKSVKSPQSVSVKKRRDPGETGKKSTADSNGENGAVAPVGLLGGENKPKDKDEIVLLREQIEELQKTLLEKEEALKSAESLVGEMNTLYSTVDELRRQVADKEGLIKSINSQLHNAKIMLADKQASLEKLEWEVKTSNKKVEDLQGDVSNMEFEIGSLMALFEKISENVSGELQDGSLPSSFELEALQSTSEIDKIEVEKIEQEAVTYAEALAAARENPNEEQLNIAAEARLRLQVLVL

SEQ ID NO: 44270 - protein, 501 aa, Oryza sativa
MKPPASSAAAAGDKGGGVDPSLPRFKCQECQRALVVVGVESFTDKLPAHAVSGMNVSSVQGSVMGASRMDNSYVVLSKQNRSHSHGIPPRPPSAGIPRAEPNQPTRAMEGSYIVLPPAAASIYKTSASEGGGAQLSPTSMNPGSPLPGNNFHSSVTVLKRAFEIATSQTQIEQPLCLDCMRLLSDKMEKEIEDVNTDNKAYEACLQRLEQETYNILSETDFQKERQKIEEEEKKLKAAIEEAEKQYSEICSEMKCLETKSKQFEELEERYCHDLNSFQFQWISHQEERDAVLAKIEVSQVHLELLKRTNVLNDAFYISHDGVIGTINNFRLGRLPNVQVEWDEINAAWGQAALLLHTMAQYFFPKFEYRIKIHPMGSYPKVTDINQNTYELFGPVNLFWSTRFDKAMTWFLTCLQEFADFAVSLDKENNVPPDKSLKLPYKIEGDKVGSYTIFLSFNKLDNWTKALKYMLCNLKWVLYWFIGNTSFAPPSGSLHVAQSSKG

SEQ ID NO: 44271 - protein, 901 aa, Oryza sativa
MINLIDLSAGASARVATRDGSPVRETQSERKEYADLKTVTGSVRRSSSDRSCGSGTPMKVLIAQEMAKEGDTNQETTSVVAKLMGLDDDAALPKPVQPSNNRRRFPDGHLSAMLARVNNQMSFDNHTGFVENMEYKDVYEVGYQPPSCEHLSNEFPQRRRPHEDHDKKRMDLVRQKFVEAKHLASHENLLQSKEFHEALEVLNSNKDLFLKFLEEPNSLFAKQSGEFHSAPTSPQRKRITVLKPTRSVELKGEKEIKRQQDQTVNGSRVERSNTHRRSHSGGGHAKAERLPQHTRIVILKPSTALTSMEHFQKNGHDNLDYSEAPVISRHLSDEINWSAQDMCHQHDESFRGCMQSNMFIRDRVYYGYAEEEGSSFSDSEIGSPTSRHSWEYIYRFSNPYFGSTLSHASCSPDSLVTREAKKHTSDRWPTVSSNEISQEKVLVRRSLSTLGEMLAMSGMKKKGAAEQVVTNTSNQLCSNEPRLAVPSKCSVDGDGESSLRKISRSKSVPVSSAAFDSLRLDDGCSNPEHEEPTSSKEEIKPKNGKSSLKGKISSFFLKRKKSGKDKLAPSPLGALGTRVPLASNASIVSSDVSQTEWTSLQDDVASENLEKFDIAPTVVPVNEPEATSSSKPPIITLEKALSFEIRNSHFDQPSPTSVLDASFEDASEKSPNSSEHAIIAKQEPLSRSLPIGSIARTLSWDDSSQEATLCSAKGDSHEQDQHEFVEKILSSVGFDNEKTSDIFVRWHSHDFPLGTGVLDQFLERKVEDAKCRERRSNQRLLIDSVNAALLDIGQSKLWGAYPCTDPQVNNARRVATGEVLVVDEVWRLVKGWLSDDDGEKHMVNAEDNAGLVADWVVGKEIQGRSWPEALRLEVDEISTEICGEVLDELVGEAFSELVGCH

SEQ ID NO: 44272 - protein, 369 aa, Oryza sativa
MATVMQKIKDIEDEMARTQKNKATAHHLGLLKAKLAKLRRELLTPTSKGGGGGAGEGFDVTKSGDARVGLVGFPSVGKSTLLNKLTGTFSEVAAYEFTTLTCIPGVIMYKGAKIQLLDLPGIIEGAKDGKGRGRQVISTARTCNVILIVLDAIKPITHKRLIEKELEGFGIRLNKTPPNLTFRRKDKGGINFTSTVTNTNLDLETVKAICSEYRIHNADVSLRYDATADDLIDVIEGSRIYMPCIYVVNKIDQITLEELEILDKLPHYCPISAHLEWNLDGLLEMIWEYLDLVRIYTKPKGLNPDYEDPVIVSSKKKTVEDFCNRIHKDMVKQFKYALVWGSSVKHKPQRVGKEHELEDEDVVQIIKKV

SEQ ID NO: 44273 - protein, 88 aa, Oryza sativa
MLCHFEHVQTNNCTHRYPLLITFTFLRWLVEIVPSASVLFVLRKLPTKRGITQHHPTLGQSGSPQYVISNCSATLCEQKCRLSDTDEP

SEQ ID NO: 44274 - protein, 490 aa, Oryza sativa
MEPVTNVGDIQENRTKLVCSLCKVMHGACIRCSHGACRACFHPICARESKHQMEIWGKTGNTNVEMRAFCLKHSTVQETISIQNDRICAEEDTSQIELDDASLATQKIQQLRLTRNNKDKFTSSMIASSCSSSLKQTTELATSPSTARSVESQETQITDMAVDRPIGDRCLVSNSGDVSTALRKLIDQGMVNVGDIESELGVSSESLEAALVPETSTFSPGLKLKIIKLLQNTIRVPSVQEKCSKEGSLALQGTVFTGESKSLTDTQICSELEEGISSFDHCCPEGDNTNKDWADSVENGFHNCGEDCISGKCFLNQDGSRCYVHPFIERKLRILWDHIFKQNKHPIHCHEQSTCDPHDRIAGSSSTKLEQLADIAVADQVSKAKSSGILEHSPHDEIEGELLHLQSRLLDDVGGAKQRYEDLVLKIVQSLSHDLDSFNKRKWDHIIANQFLRDLREAKKRGNTERRHKEAQAIMAAAALYFTYLTKCTS

SEQ ID NO: 44275 - protein, 320 aa, Oryza sativa
MKFGKDFRSHLEETLPAWRDKYLAYKSLKKLIKNLPPDGDPPPVAAAAEVPAGDGDGDGGIALGNWFARVLDMELQKLNDFYIEREEWYVIRLQVLKERIERVKAKKNGAFTSKSEFTEEMLEICKAFVIIHGEMILLQTYSSLNFAGLVKILKKYDKRTGGLLSLPFTQRARHQPFFTTEPLTRLVRECEANLELLFPIEAEVLESASSSAKLQPQNDDAASHDPASSVDVETSDVYRSTLAAMKAIQGLRKASSTYNPLSLARFFHGEDGEACSGAITSESDSYSDSQIEDAEDDDKEVQSREQNTAQNAAEGQPRDE

SEQ ID NO: 44276 - protein, 725 aa, Oryza sativa
MAPPPLHLFSPHVPSTSVSPPDPATEAPPAPKQHRGPRPAPRNPGSAKPLTAGVPGGRTRRAVLGIIRKVRSLELSDPRTPSPNGGGGSSSSSTATARVPFHLPIHPPPPEREEEEEKKGIRRAVPWAAARDEETKVVLRREKKTRVPTRAETELEAGELERLRRAARGKERWARAKKAGITDEVVEEVRGQWAKGQELAGVRIVEPLRRCMDRAREILEIKTGGLVVWTRGGIHFVYRGSSYLENAKRHRDFVNYNEELSPVTSNNPTSQGKYWSKDVTLTNDNDEADDKDDKPIKGTLYEREVNRLLDSLGPRFIDWWWNTPLPVDADLLPEVVPDFKTPFRQCPPGVRPALADEELTYLRKHARPLPTHFVLGRNTKLQGLAAAILKLWEKSLIAKVAVKVGIQNTNHEQMARNLKRLTGGTVILRNKDYIIIYRGKDFLPGGVAESVIERESQVHDQQAKEEEARLKMADSLQMIVGLSSERSYVGTFREYQDFHDSHARRTTENNFRIQLEAKKHRLEKELKDQEWRLSMLTKKIERSNQVLAKLHSSWSPSKKDGDRELLTEEERRIFRKIGLKMDEHVLLGRRGVFEGVIEEIHQHWKHKEVVKVITKQNQASQITYTSMMLEVETGGTLIAIERFTTSHAIILYRGKNYRRPTKSAPSNLLTKREALQRSIEVQRRGSMKYFAQERKKSIDELKRELRNVTWEIRKLNHDTEQSWTA

SEQ ID NO: 44277 - protein, 130 aa, Oryza sativa
MESCPSVKNILVLDSEGKRVAVKYYSDDWPSLSSKQAFEKSVFAKTQKTSARTEAEIVMFDSYFVVYKFIQDLHFFVTGGDEENELILASVLQGFSEAIDYLLRNKVHRRAALENLDLIFLCLDEVVDGG

SEQ ID NO: 44278 - protein, 311 aa, Oryza sativa
MIGFGIGGVAGALPLVLRRTRTCTPPPPMAMTPLHHTCSFFFRPQPSPSLSHSPCAAAADDDFFTVDYDPEEEKEEDEEGSPWEGAVVYRRDASVHHLEYATTLERLGLGDLSSTHSRARAATMGILILSSTNLTGTKDDDTPVLVSLDVARRRGRLRLDGIVRTVITLGCYGCAEPAPQGIFANFSLLLTEDRVEEPDVVDLGTIFEEEQTKAPSLTGSQEDGDDEDIDWDDRLHFPAGEKEIDISKHIRDIIHLEITLDALCSPTCKGLCLGCGENLNTSSCSCNAEKQQAKNVQRRGPLKDLLKPLQR

SEQ ID NO: 44279 - protein, 64 aa, Oryza sativa
MICHDALLNTVMSAESAYLAVQEGLLTDRVKHIESRVPTSSVYDDGINQRNMVRTAESLNHSEI

SEQ ID NO: 44280 - protein, 999 aa, Oryza sativa
MLVVRRACCLLRLSSSSHPPATRVLPAAIYLTSSSSAAASAPAPPAMAASTEWPASRVRETFISFFESKSHTRWPSSPVVPVDDPTLLFANAGMNQFKPVFLGTAAPDAPLGRLRRACNTQKCIRAGGKHNDLDDVGKDTYHHTFFEMLGNWSFGDYFKEEAIGFAWELLTQVYKLPTDRIYATYFGGDEKFGLAPDTESKNIWLKYLPKEKVLPFGCKDNFWEMGDTGPCGPCTEIHFDRVGNRDAASLVNNDDPTCIEIWNLVFIQFNREADCTLRPLPAKHVDTGMGFERLTSILQNKMSNYDTDVFMPIFDAIHQLAGNGIQSYSGKVGPEDVDKVDMAYRVVADHIRTLSFAIADGSQPGNEGREYVLRRILRRAVHFGHQKLKAKQGFFSSLVHVFVQLMGDVFPELKDNEKKIKDIIKDEEESFENTLAKGFEKFKKAADAVKESGGTVLSGQDAFVLWDTYGYPVDLTEVMGVDYGLSVDREGFDAAMEEARQKARNARFKAGENSIVLDANATAQLRNQGLASTDDSPKYGYKDNDSVVKAIYTGSEYVSAASGDEDFGLVLESTSFYAEQGGQIYDTGKIEGSFGSFNVTNVQVFAGYVLHMGSFTKGSKALSVGDKVACKVDYARRALIAPNHTCTHMLNFALREILGDHVDQKGSIVLPEKLRFDFSHGKPVQPEDLRKIESIVNQQIKDKLEVFAREIKLADAKRINGLRAVFGEIYPDPVRVVSVGRKVEDLLANPESKEWLSISTELCGGTHIKNTSEAEAFALLSEEGIAKGVRRITAVTAKHASDAIKDASSIDSEINEASKLEGAILEKTIASIKSKLDTALIPAARKADLKGRVSKLEDELRKAKKKMGEENIQKAVKFAIDAAQTALSEGKRFCVAHVDVGLDTSAIREAVIKVKDQKDLPIMLFSTDEATNKAVIYAGVPPSAANSLKVLDWLTPSIAPLKGKGGGGKNGIAQGQGTEASQLKEAMEVATQIASMKLV

SEQ ID NO: 44281 - protein, 110 aa, Oryza sativa
MALPAPRPAIHIGRGRCGAEPASTSRRPRLRPSSSGASTSRMTTAVTTTPTVGSHAVTNHPSVFLFLDLNRRRCSWRRTADGHNRGGPPAYSTLSRSAVLHGRSTTGSGC

SEQ ID NO: 44282 - protein, 29 aa, Oryza sativa
MMRRRGMQANLQRSRARKRLQKEPTKLEK

SEQ ID NO: 44283 - protein, 159 aa, Oryza sativa
MSSKLVTSPLKSMEQGHLEQPLRDPQAPAEQHDMGLSPLTLLGFAFLTFNSGMAVYRSDRDLATIFFVVFSYVDLVSLFYFLRLFEKTPPESPRRHHIKTAVWLLTTMLTAVFSYKVAAIMPFPVQVLVWAMAAATVLGGFYAFFLHSDEKKPIEGLTE

SEQ ID NO: 44284 - protein, 617 aa, Oryza sativa
MAGTPPDGGGDRPWESYHTAYTNAKAGMEGVDKEKVQKKVAEHKILELEASRDLSKIWLHTDMDAFYATVEILENPSLKGKPLAVGSMSMIATASYEARKFGVRAAMPGFIGCKLCPELVFVRPNFERYTYYSELTRKVFQRYDPNFVATSLDEAYLNITKVCFDRGITGEEVATELRGAIHQETGLTCSAGVAPNRMIAKVCSDINKPNGQFILPNDQEAVTTFVSTLPIRKIGGIGKVTEQMLRQVLGISTCQEMLQKASFLCALFSESSADFFISVGLGLGGTETPEQRLRKSISCERTFRATDDCSMLFEKLDSLADNLADDMQKECLKGRTLTLKLKTAAFEVRTRAVTTQNYINSKEDILIYARKLLKAELPLSLRLMGLRMSQLRDEKDDSSTQTQKTLDRFFRTPDNSNVIGANSPSIGNTTGGDNYCTNVMTKVDYLEHDSMDDQALFLHEKNLFVPEVRSSDNYNNDAASSNPLMCDGVGGKELDDDSSSSKGTHTVKFDGQLTSSNATTSSSKPDQLFWINGYICSICGFELPPGFEEERQEHSDFHLAEMLQQEEAVDSTGPLSKERLAERPCSSTPTPKKKLKSSKEGKHIPIDAFFHKVNKNL

SEQ ID NO: 44285 - protein, 286 aa, Oryza sativa
MREPVVVAASSAAALRGFWEEVNESPAWQDGAFFSLSAAYALVSALALIQLIRIQRRVPEFGWTTQKVFHLMNFLVNGVRALVFGFHLHVFLLSAKVYKLVLLDLPGLLFFSTYTLLVLFWAEIYHQARSLPTDKLRIIYIAVNAIIYTIQVCIWVYLGINDNPLVELVSKIFIVVVSFVALLGFSVYGGRLFFLLRRFPIESKGRKKKLYEVGTVTAICCACFLIRCIVVAISAFDSDVSLEVLDHPILDFFYYMLTEILPSALVLFILRKLPPKRVSAQYHPIN

SEQ ID NO: 44286 - protein, 41 aa, Oryza sativa; identical to SEQ ID NO: 32642

SEQ ID NO: 44287 - protein, 539 aa, Oryza sativa
MAMALALSCGRRQRGKKGGGGGGDCGGRHFHVHYHLPRRVCASSFVPNLLPRFFSLLSACVLVPPVLFLAVLAFLVLFLWFTLLYFIRSLWNKDINGETFERSSNDHGSDADKRLGEGVAEEGKAEKKTLKISSEDCARRFEIEEVLHVNSDDSQNLPSMVSSDGCLNCKMHTDDEKLIKEVTVFEIKRRESGAAIVCSDGLSQKRQPRDMSVDWFEEETKSGDIIKSGDSSPTVLSTFSSEFHDFSDNNEVVGLATDFLDVNNQNKAVLLDSSSHRGIMDNHCKCGEEFSSDKEAPAYHLFENYDFVDKHETKEVVLGDTVVLTFVDDLANDDSEYREDISEQKDPNNLSGLLDNVADIFYQQQEIHKVVVSDDNKPPEVLFLSGKQTVSSSGEFSSPNENGTSGFPFDSVCEDKNGTVAYPSVASHYNIGIEDDKCEDHTDNNIEEASSIASTNCGSADKHQTIQVLPVCLANGDNIDDVASLGSSICEDVEDKDNKSNANCISEGAPHGNGMPLVRSPASWWNLCGVIDVFAGCKD

SEQ ID NO: 44288 - protein, 796 aa, Oryza sativa
MACTAPREEDLLMEEDEHRPPLNRALLHRSATNNTSQVAMVGSNPCPIESLDYEIIENDLFDQNWRSRGKADQVRYVVLKWTFCFAIGIITGIAGFVINLAVENVAGLKHTAVSALMESSSYWTAFWLFAGTNLALLLFASSITAFVSPAAGGSGIPEVKAYLNGVDAPNIFSLRTLAVKIIGNIAAVSSSLHVGKAGPMVHTGACIAAIFGQGGSRKYGLTCRWLRYFKNDRDRRDLVTIGAGAGVTAAFRAPVGGVLFALESLSSWWRSALIWRSFFTTAVVAVVLRMFIELCASGKCGLFGKGGLIMYDVSTKFDDLMTYHLKDIPIVVLIGVIGAILGALYNFLMMKVLRVYSVINERGNAHKLLLAAVVSILTSCCVFGLPWLAPCRPCPTAGAPSPPNGTCHSLNRFRRFHCPAGHYNDLASLFLNINDDAIRNLYSTGTNDVYHPGSMLAFFVASYALGVLSYGVVAPSGLFVPIILTGATYGRLVAMLLGGRSGLDHGLVAILGSASFLGGTLRMTVSVCVIILELTNNLLLLPLVMLVLLISKTVADSFNSSIYDLILNLKGLPHLDGHAEPYMRQLTVGDVVAGPLRSFNGVEKVGHIVHTLRTTGHHAFPVVDEPPFSPAPVLYGLVLRAHLLVLLKKREFLTAPVRCPKDYMAGRFEAQDFDKRGSGKQDTIADVELSPEEMEMYVDLHPFTNTSPYTVVETMSLAKALVLFREVGLRHLLVVPKSCDRSPVVGILTRHDFMPEHILGLHPVLVGSRWKRLRWQKGAVAKKFRSLLDWLANDSG

SEQ ID NO: 44289 - protein, 303 aa, Oryza sativa
MFVFSHRTSEKTEAHTASDGGIGEVMQYIKSRYLSTCELFWRLYGFEIHGRSPSVERLIVHLPNMQFVTYHDGADLEEVIEDPDSSRTMLTEWFATNQRHIFARDLTYCEFPTKFSWDPEKKVWTKRKRGTKIGRLKHIHPSTGEPFYLRMLLMIVRGCMSFEDIRTYEGVLYGTYREACQARGLIGDDAEWDHLFEEAVIWATSYQLRNLFMTVLAHCDVGDVRVLFDKYWRYMVDDFAYKLTKALGVQRTAIPEVMLQDTLLKELDAMFSNNGLSISSYNLPTPVDCSGSSAANRLILEEL

SEQ ID NO: 44290 - protein, 608 aa, Oryza sativa
MRNASGSSCCSRVAAPLHAQVLGSPSPSHGYGGAGDGCLLQAPPPAVVCGEMLALTTPAPPSLLHALASLNVLLLVAYLLLFLLAKLAAGLHRRGHGSCDEHQVTETSGREEFAGADDIAGVQQQQAEMLFWFDEAVFEDTALLGGEGKDQLMYDAATTPPTPTPARCLQVESTFPMVESTRRISPHHRQCSFSHEEPKAAAAAAAATASSQKDIIPAAVPSPENVPVEAGEEDGHGEHGEEDDEEEKRFRGDDVKLFVNSRALADTKKLLLEGAMAGKGGVQREREEESRLGASTLTSESTSKSSVEWRSSTVTKDSETEYPFSSSSRRSSSRWESYALFRKYDEDMVYFHRVGAQKLTETESYRSIKYQPRSVSERIVQKLTPKPRPAIGLRDPYPELERVYVAQICLTWEALNWNYASFRRHAGDIAARCCPARVAQEFQQFQVLLHRFIENEPYEYGLRPEVYARMKNSSPKLLLVPEFRDEEDEKDDLISAVQFLYILEESIRTFMAFLRADKRSHYQMFREMVKRRTSSMDQTLVITLKKANKKKKSRLKDLTRPRRCLRRTKLREEEEMSILLGLIDLKIVARVLRMPEITDQQLHWCRRR

SEQ ID NO: 44291 - protein, 492 aa, Oryza sativa; identical to SEQ ID NO: 33426

SEQ ID NO: 44292 - protein, 117 aa, Oryza sativa
MLPAALLPHLLIPPMMGRIASPLIPPKPGRITWPRSGRTPGTPMTSSPPMLWSTRCWSNASALLWSPPPRIRSPSPSLSRSWTYNEPLLAAILVSTAKSCSGKKLLLQFKSINLLKE

SEQ ID NO: 44293 - protein, 500 aa, Oryza sativa
MELPCPRLLLLLRLLVFLVAVSWPLCGAGTEGLGVGEEGLSSIGASSGSRNVRRLLQTGGVNQGAPAPLPLEQSPSASGPVSSPSPSPCVSPPKGSPSPSPSSKIIAHRSPHHPFTTPPQLVRPKPTTRRAEHDHSVETTGRSWFKRSWTTYGFIAAGIAALLIISAAGAFYCRAKKMGTVRPWATGLSGQLQKAFVTGVPALKRSELETACEDFSNIIGCTSTCTLYKGTLSSGVEIAVASSLVTSADDWSKECESRYRRKITSLSKVSHKNFMNLLGYCEEEQPFTRVMVFEYAPNGTLFEYLHVREAEKLDWMTRLRISMGIAYCLEHMHQLKPPVVPRNFDSTTIYLTDDFAAKVSDLEFWSGAKEPNPATSNSSSSSDLENTVRKYGMVLLEMLTGRVPDSEEDGPLERLASRYFDGETRLAELIDPSIGSFSEEAARSLCEVVRSCIDPDPKRRPTMAEVAARMREITALGPDGATPKVSPLWWAELEIMSSES

SEQ ID NO: 44294 - protein, 348 aa, Oryza sativa
MGGDMESGSVKDLQTHLFSYEELEEATDSFNENRELGDGGFGTVYKGILRDGRVVAVKRLYNNSYRRVEQFVNEAAILSRLRHPNLVMFYGCTSSQSRELLLVYEFVANGTVADHLHGHRAQERALSWPLRLNIAVESAAALTYLHAIEPPIVHRDVKTTNILLDADFHVKVADFGLSRLFPLDVTHVSTAPQGTPGYVDPEYHQCYQLTDKSDVYSFGVVLVELISSKPAVDITRQRNEINLAGMAINRIQKSQLEELVDLELGYESDPATKKMMTMVAELAFRCLQQNGEMRPPIKEVLEGLKGVQDLCVMEKDGGKDKKGPDPPLSPDTVHAQWDSRQTTPNTSQ

SEQ ID NO: 44295 - protein, 453 aa, Oryza sativa
MGWAHETVAMEELLGLVRGFVDVLVLAGGRTSSGAAATWRSGDVKKALQWALFFEEVFKNLRDDGQYDESASELDAALVQLASSPNFPKGIEDIRSKTLAMARELVVKHFLKTTNAENLGAVLQAVVEMDMDGISASGECNVCQEYVQSILDMNLPSLMRTKNARDVGHSTSSDEFCEESLFTGNSQILLKELQKKLDSGSCISLAERELNTLLKSMKKDSFDSAGSTLCTSATAQKTQIIDKFILWKQWKAKCLSYLLDERTIRIMSGTNMIFNAPKEQWMGLFEPLKVSADSSQSGIIEVMELCLLGLVARQWNSLIESIMSHTFSSFPISKQYADLHQLLQGTTQDECQDKLLGFKEMDICEYARQSLESEPYILWFLPPVLTAAAMPPRSSLFKIYLVEIDKQLGEAASKDRKCNCGGDGIDQHQNCEISERIQCLYTFHVQRTQLTIQ

SEQ ID NO: 44296 - protein, 146 aa, Oryza sativa
MPMPSRARRRSKSRWPLGEPPPGLFPARDDLLRLLAVVSIAAAAAAACSLLNRRPKPLCDSGGAAYTHHDSCQPCPPHGRCVDGNLECVQGFNKYGNLCIEDGLVSQTATKIVLPLCLLSCSFPSHFAMHTFLLLLLHISLYSHSC

SEQ ID NO: 44297 - protein, 396 aa, Oryza sativa
MARSTSLTEAEAGITCFASSLPGFRGVLKHRYSDFIVHEVARDGSVARLTSFDLPDECVDVSEEDKAAPSADADHSQALESFRALCGDADCDALKGLLEKASAGAEADVSPVILSPDADKAHRSEVHNFFKRSFKFLVTDTVEHNDGVQRCIRVRLGSGARGGRGGGGRSGGGRGRKRKNMGGSDWRDDRPFDSRGSTSWPNHVGKFLRFHLCKENKDTQEALGVIGKMLGLQSRSFGFAGTKDKRAVTTQQVTVFKISANRLAALNNRLFGIKVGNFSYVKEGLVLGQLMGNRFTITLRGVVAESEDIIKASVEGLGKNGFINYYGLQRFGSGSVPTHLVGAALLRGEWRSSVNLILDPREGDILDLFYPISSCILGYIAVPTFVQHNLILRTER

SEQ ID NO: 44298 - protein, 609 aa, Oryza sativa
MSHPADGEAWKDFDKCWPDFAEDARNIRLGLATDGFNPFGNMRSSYSMWPIFVIPYNFPPWSCMQESNFMMALLIPGPRSPGKKHFDVFLQPLIEELLSLWSGVDTVDALTGKDFKLRAAVLWCIHDYPALSTLSGRTTQGFFACLHCDKNPLSYSIRNKLCYIGHCRFLPRRHRLRTNNEYASLHESKEKPGTFTTEELLEELAKVNDVRPGQKRKRSEGHVPIWGRRVSLWDLPYWPSLKLRHNLDVMHIEKNICENLLGTLLGIHGKSKDNVNARLDLADLNIKPELQLQPNGDDYHMPEARYTLSREKKIKFCKFLKETKFPDSYAANIERCITAEGTSLHGLKTHDCHILLQRILPAGMRGILDDDICLVIAELGKFFRELCSQTLNKDILVRMKTEIPAILCKLEKLFPPAFFDVMVHLAVHLPDEAMLRGPVQFGWMYPVERRLYTLKRSVRNKARPEGSIAEAYVADEALTFCSRYMEDVETRFNRAPRNPGFSDPSAFNIDVFGHGVNLIGACDYGYSEDFDQMVWYILYNCDQAQDYIKYVLTSLSCTLAHLHFDLIAEICLFTECFKANYRKQGCKQLILIEGLGLDLLLGSGTICGG

SEQ ID NO: 44299 - protein, 619 aa, Oryza sativa
MATRPGPLTEWPWHRLGNFKYVVMAPVVAHGARRVMRNGWGDLDIAFSLILPSLLLRMIHNQIWISLSRYQTARSKHRIVDRGIEFGQVDRERGWDDQILFNGLVFYAGYLAMPSVRRMPVWRTDGAVVTALVHTGPVEFLYYWFHRALHHHFLYSRYHSHHHASIVTEPITSVIHPFAEHVVYFILFAIPILSTIYLGNVSAMGIVGYIAYIDFMNNMGHCNFELVPEWIFQIFPPLKYLIYTPSFHSLHHTQFRTNYSLFMPFYDYIYNTMDKSSDELYESSLKGTEETPDLVHLTHMTNLQSAYHLRIGIASIASKPYSDSAWYMWTLWPLAWLSMVLAWIYGSSAFVVERIKLNKMKMQTWALPRYNFQYGLTWEREPINDLIEKAILDADMKGVKVISLGLLNQAKQLNGNGELFRQKYPKLGVRIIDGSGLATAVVLKSIPSDAKKVFLRTGTSKIARAIAIALCDRGVQVIMNEKEVYHMLKSQIPENRASYLKLSSDNVPQLWIVHNIDDNEQKMAPKGTIFIPISQFPLKKLRKDCTYMSTPAMRIPEEMKNIHSCENWLPRRVMSAWHIAGILHALEGWNMHECGDEMMDIEKSWSAAIRHGFLPLTKA

SEQ ID NO: 44300 - protein, 66 aa, Oryza sativa
MWFCSGSACLTLLGRVLYAHYCPPKLGRSCTKPNLRAANEHHHTRVINDSVICCLSSFFLFSYIYM

SEQ ID NO: 44301 - protein, 381 aa, Oryza sativa
MASASTAVASATAGTTRSFEKLSAPWMIGRGHVALPPSPGRYPAVTVAAASRRTGEGGRRRRRARGADQEDGLSLSSEIEASSSTPPVRTTDKESTKPASETGITKKGSAIRRVTLVVLAAVFFGVSIALRDGVGKASEYFAGYLLEQSLSVDNLFVFVLVFKYFKVPQEYQNRVLSYGIAGAVIFRTVMITLGAATIQRFEAVNLLLALILLFTSYKLFAEEDEESDLSDNFIVKTCQRFIPVTDYYDGDRFFTTQEGLWKATPLLLTVAVIELSDIAFAIDSIPAVFGVTRDPLIVLSSNIFAISGLRSLYVLISESMSELDYLQPAIGIVLGFIGTKMVFDFFGYHIPTEASLAIVTTCLSGGVILSLRKASTEEKDK

SEQ ID NO: 44302 - protein, 86 aa, Oryza sativa
MCIIHLMDPPHLDRGLQRRSQVRRRISIHSCTLQRLEMDYMDPVSGPGEEKPLGIGSVPTYVRWERVVCDVAPHLHHAQVAILYES

SEQ ID NO: 44303 - protein, 1162 aa, Oryza sativa
MSLSSTSTSSLLLLLSPRGNPRRLLPLLLPLRLSSSSSAAAAAAAMPPRRDRHHGKQPQQQWKPKATDPAAAAPAVVAAASSPASSTSSSADFAGGVERMTISPSPQGGASQVWVPRGYATSASSSSSSSSAAAAEQRIDAEKLSRVFKAAPNFEVDNNTFIQSQIRATFYPKFENEKSDQETRTRMIEMVSHGLATLEVTLKHSGSLFMYAGHHGGAYAKNSFGNIYTAVGVFVLGRLFREAWGKEAPRMQEEFNVFLEKKCISISMELVTAVLGDHGQRPKDDYAVITAVTELGHGKPKFYSTPEVIEFCRKWRLPTNHVWLFSTRKSASSFFAAYDALCEEGTATSVCKALDEIADVAVPGSKDHVKVQGEILEGLVARIVSRESSVQIEEVLRNYPLPPLDGVGSDLGPSLREICAANRSDEKQQIKALLENVGPSMCPDHSDWFGCSGLDDHQSPSANRSVVTKFLQAHPTDYTTKKLQEMIRVMKQRNFPAAFKCYWNYHKIDSLSNDSLYYKMVIHVLSDSVFRRYQQEMRRNQGLWPLYRGFFVDVNLFKVNNMKSSIPSEDIDTSLKNINGALDSNSSAKDGLADEDSNLMVKLKFLTYKLRTFLIRNGLSTLFKDGPSAYKTYYLRQMKNWGTSASKQKELSKLLDEWAVYIRRKYGNKPLSSSTYLSEAEPFLEQYAKRSPENQALIGAAGDLVQTENFLAILEAKRDEEGDLQAERGTAPPSPTSTSLDVVPKAEGLIVFFPGIPGCAKSALCKEILTTPGGLGDNRPLHSLMGDLIKGRYWQKVADERKKKPFRITLADKNAPNEEVWRQIEDMCRTTKAAAVPVIPDSEGTDSNPFSLDALAVFMFRVLQRDNHPGNLDKASPNAGYVLLMFYNLYDGKSRREFESELYERFGSLVKMPLLKPDRAPLPDEVKAILDEGISLFRLHQSRHGRAEPSKGAYAKEWAQWEKRLRQVLFANKDYLNSIQVPFDFAVKEVLEQLKSVAKGDLKTPDTAKRKFGNIVFAAVTLPPADILGALPKLAEDTDANKFLNNTKLADNLTKAHVTLAHKRAHGVAAVSSYGVYQNHQVPVIFNAFLFSDKMAALEVELGTVNGEKIASRNDWPHATLWTAPGVAPKEANTLPQLVTEGKAKRVAIDPPITISGVLDFY

SEQ ID NO: 44304 - protein, 277 aa, Oryza sativa
MEWSRPKQQGLAPSPRAGHAGATVGENWYIVGGGNNKSGVSETLVLNMSTLTWSVVSSVEGRVPLASEGMTLVHSNYNGDDYLISFGGYNGRYSNEVFALKLTLKSDLQSKTKEHASDGTSSVLEPEVELSHDGKIREIAMDSADSDLKKDDANELLVALKAEKEELEAALNREQVQTIQLKEEIAEAEARNAELTKELQTVRGQLAAEQSRCFKLEVDVAELRQKLQSMDALEREVELLRRQKAASEQAALEAKQRQSSSGMWGWLVGTPPDKSES

SEQ ID NO: 44305 - protein, 239 aa, Oryza sativa; identical to SEQ ID NO: 33022

SEQ ID NO: 44306 - protein, 589 aa, Oryza sativa
MGGEAGERRLGRAMSFGIPDVALGLVMGFVEDPWDRDAISLVCRHWCRVDALSRKHVTVAMAYSTTPDRLFRRFPCLESLKLKAKPRAAMFNLIPEDWGGSASPWIRQLSASFHFLKALHLRRMIVSDDDLDVLVRAKAHMLSSFKLDRCSGFSTSSLALVARTCKKLETLFLEDSIIAEKENDEWIRELATNNSVLETLNFFLTDLRASPAYLTLLVRNCRRLKVLKISECFMLDLVDLFRTAEILQDFAGGSFDDQGQVEESRNYENYYFPPSLLRLSLLYMGTKEMQVLFPYGAALKKLDLQFTFLSTEDHCQLVQRCPNLEILEVRDVIGDRGLEVVAQTCKKLQRLRVERGDDDQGGLEDEHGMVTQVGLMAVAQGCPHLEYWAVHVTDITNAALEAIGTYSSSLNDFRLVLLDREANITESPLDNGVRALLRGCTKLRRFAFYVRPGALSDVGLGYIGEFSKTIRYMLLGNVGESDQGLLQLSTGCPSLQKLELRGCFFSERALAVAVLQLKSLRYLWVQGYKASPNGTDLMAMVRPFWNIEIIAPNQDEVCPDGQAQILAYYSLAGMRSDYPHSVIPLYPSV

SEQ ID NO: 44307 - protein, 214 aa, Oryza sativa; identical to SEQ ID NO: 32443

SEQ ID NO: 44308 - protein, 449 aa, Oryza sativa; identical to SEQ ID NO: 32786

SEQ ID NO: 44309 - protein, 66 aa, Oryza sativa
MQMINPEVGRKIRQSEENYVSMQGGVMNFIETSARRGYELHRNISESTQNSEKWIKEVQGRRWAKG

SEQ ID NO: 44310 - protein, 304 aa, Oryza sativa
MGKKGKWFGAVKKVFSPESKEKKEERLRRKLAASNPNPPDLTPSASLEVNVSVPPPPPPPPVQQIEEVKVPEVEQEQSKHVTVEAVPEAVPVPAQTSSLPPGVSREEQATIKIQTAFRGYLARRALRALRGLVRLKSLVEGNSVKRQAASTLRCMQTLARVQSQIRSRRLKMSEENQALQRQLLLKQELESLRMGEQWDDSTQSKEQIEASLISRQEAAVRRERALAYAFSHQWKSTSRSVNPMFVDPNNPQWGWSWLERWMAAKPWEGRAGTDKESNLDRASAKSASLNLGEGEITKAFNSLR

SEQ ID NO: 44311 - protein, 332 aa, Oryza sativa; identical to SEQ ID NO: 32714

SEQ ID NO: 44312 - protein, 361 aa, Oryza sativa
MFTGCGLFACVRRCDGGDVRKRGEAGAMSSRVAADPAGVEEEGSCKNVAAASARQLAWADVESVTGGFSSRVIGHGGFSTVYLASLSSSRLGAVKVHCSSERLHRAFRQELEVLLSLRHPHIVRLLGYCDERDEGVLVFEYAPNGDLHERLHCSEVAGGVASVLPWARRVAIAFQVAMALEYLHESRHPAVIHGDIKASNVLLDANMNAKLCDFGFAHVGFSATVGCRPSARAVMGSPGYVDPHLIRSGVATKKSDVYSFGVLLLELVTGKEAVCRDTGRRLTAAVGPMLSEGKVADVVDRRLGGEHDGAEAAVMAELAMQCIGDSPGLRPSMADVVRALQEKTSALASAVGSRLDRKMMF

SEQ ID NO: 44313 - protein, 131 aa, Oryza sativa
MIEGAGSLVDAHTVEVTKPDGSKQRYTAKHILIATGSRAQRVNIPGKELAITSDEALSLEELPKRAVILGGGYIAVEFASIWKGMGAHVDLFYRKELPLRGFDDEMRTVVASNLEGRGIRLHPGTNLSEVS

SEQ ID NO: 44314 - protein, 676 aa, Oryza sativa
MENQPVLFSAVFILYVSFLGPFCASSGEESFVYSGFASTGAANLTLDGSAMVTTTGLLQLTDSMPNIQGHAFYPTPLRFKKQSNGIVQSFSVAFMFGIISPYSDASTDGMAFVVAPNKGFPDAKAAQFLGLLNISSDNSTSNHMFAVEIDTAQNTELDDIDGYHVGIDINSLHSKKSQHIGFYNDQHGGLLKNLTLTGSNCKPVQVWVDYDGETTQINVTLAPIKVTKPTRPLLSVPFNLSTVLTDQAYIGFSAATGPLTSHYYVLGWSFAMNAPAPPIEISRLPRLPCPGDNRLQKILQILLPIVAVGLIFIVVMILVRRQQRYAELREDWEVEFGPHRFSYKDLFNATEGFKSKHILGVGGFGKVYKGVLRTSKLEVAVKKVSHGSNQGMKEFISEVVSIGHLRHRNLVQLLGYCRRKGELLLVYDYMPNGSLDKYLYGEDNKPVLNWAQRMQIIKDVASGLFYLHEKWDKVVIHRDIKASNVLLDSEMNARLGDFGLARLYEHGTNPQTTHLVGTMGFIAPELARTGKASPLTDVFAFGTFLLEVTCGRWPISNSAHHGRKMLVDWVLQHWHQGSLPETVDPKLHGIYNVDEACLVLTLGLMCSHPIPGARPIMRQVMQYLDGDAPLPEFTPATLNSSLLAIMHNEGVDPYVAQYPWSGNSLGTMTPDILSGR

SEQ ID NO: 44315 - protein, 269 aa, Oryza sativa
MAAEGEAKKDSASNPPGGGGGGGGGEEEEDSSLAVGEAAVGVGEAGGGGGGGEKADREEEEGKEDVEEGGVCKDLVLVEDAVPVEDPEEAAATAALQEEMKALVESVPVGAGAAFTAMQLQELEQQSRVYQYMAARVPVPTHLVFPIWKSVTGASSEGAQKYPTLMGLATLCLDFGKNPEPEPGRCRRTDGKKWRCWRNAIANEKYCERHMHRGRKRPVQLVVEDDEPDSTSGSKPASGKATEGGKKTDDKSSSSKKLAVAAPAAVEST

SEQ ID NO: 44316 - protein, 628 aa, Oryza sativa
MDMGDWSKKCKEALSNFELLKEGKSKDDIIYDKAVQVLHGKKDELHDIFESALKSSDLKGLHAECLTDMWIGRDRFAFIDLSAGPFAWGPAVGGDGVRTELSLPNVAKTVGAVAEVIEEEAEAKLQDTIRERFSSFGENYHAVDILLAEIDVYELFAFKHCVGRRVQLALCKELDERMHDLKSELEGYNTGDSDDINKKKALDALNRMEKWNLFKDVPEEHHSYTVARDSFLAHLGSVLWGSMSHVIAPSVSHRAHHYYDKLSFQLYFVTQEKVRNMKQFPVNVKSVTEGLSSVLLQFQKPMFSQRMLSLSEDPALMMAFSMARRAAAVPLLLVNGTYKSTVHTYLDSAILQHQLQRLSEHNSLKGGHSNHRSTLEIPIFWFIHSEPLLLDKHYQAKSLSNMVVVVQSEVDSWESHLQCNGRSILWDLRRPVKAAIAATAEYVSGLLPSHLAYSPAHETATEDWTWSVGCNPLSITSKGWQLSEFQRDVIARNYIITAVEESIQIINSAIQQLITERTSERGFKLFKAQERVLVEKYNSVVSLWRRVSAMSKGLRYGDAVKLTSMLEEASHGFANAVNSAISSLHPVQCTRERKVDVQLDLTTIPAFLAVFLLLWFLLRPRRPKPKIN

SEQ ID NO: 44317 - protein, 250 aa, Oryza sativa
MAKIRSEVLSPFRSVRMFFYLAFMASAGLGALIALTQLIPALSSPARAAAAGETLKGLGIDVAAVSVFAFLYWRESKAKDAQVAKLTREENLSRLRIRAGEGRPPVPLGELRGTARLVIVAGPAAFVTESFRRSKPFLKDLMERGVLVVPFSTDGNAPDLQFDEADEEEEEAAAAAGKMKRRLWQLTPVYTSEWAKWLDEQKKLANVSPDSPVSLAPAGRPRPWQRRRVPAVASVRGAAAAGEGDVVRPP

SEQ ID NO: 44318 - protein, 294 aa, Oryza sativa
MSPAATMAVLLRPSTLLPSSQSTTTSRLRFPVATPLPRCRHGGAGKKSRLLVARRRGRRDRVACLPTKEEEEEEVGVAGDGGEEDGDEDGYLAREGEWGVRRMGRVGEEMRRVALVQAEAFHIPVALFNDFFFDFFKAEVLSALIYRVRNSPPDRYACLVAEEVDATSQISEAPFEKIVGVVDCTVQNEADILKNLQGVDEYLYVSGIAVLPSFRRRKVGTALLKACEALALQWRHRFMALRAYKDDDGARGLYSKAGYRVVAKDPGWVTWVGRRRRVLMIKELPIHEHHLEQQ

SEQ ID NO: 44319 - protein, 164 aa, Oryza sativa
MEKTRKATSPKSSMTSSTGPKSPVRNGGSPPHKKSTSEFRGRKNESQILRKGGQDSITLDESKRRSPTSQTSPKRSSPKHEQPLSYFRLHTEERAIKRAGFNYQVASKINTNEIIRRFEEKLSKVIEEREIKMMRKEMVHKAQLMPAFDKPFHPQRQIITSTYH

SEQ ID NO: 44320 - protein, 200 aa, Oryza sativa
MAEVRTIGSLPVPNVQALAGTCNGSDEQIPERYIRTEATCEEVISNYHGDMAIPIIDLNKLLSPQSSEEECVKLRSACQYWGFFQLINHGVPEEVIENFRSNIIEFFSLPLDAKKEYSQLPNSLEGYGQTFVFSEDQKLDWGDMLYLQVHPTDSRDLRFWPVTLHLSGNPLINTHRRLKACRSACLSSWLRPWVLSQSRC

SEQ ID NO: 44321 - protein, 550 aa, Oryza sativa
MEGCMPSDANYAPLTPVSFLERAAVVYGDRTAVVSGGREYSWRETRERCLAGASALARLGVGRRDVVAVIAANIPAMYELHFSVPMAGGVLCTLNTRHDAAMVSVLLRHSEAKVFLVESQFLAVAHDALRLLADAKAKFPLVIAISDTGDSSSSDGGGLEYEALLRDAPRGFEIRWPADERDPISLNYTSGTTSRPKGVIYSHRGAYLNSLAALLCNDMTSMPVYLWTVPMFHCNGWCMAWATAAQGGTNICVRNVVPKVIFEQIVRHGVTNMGGAPTVLNMIVNAPASERRPLPRRVLISTGGAPPPPQVLAKMEELGFNVQHGYGLTETYGPATRCVWRPEWDALPLAERARIKALQGVQHQMLQDVDIKDPVTMASVPSDGRAVGEVMLRGNTVMSGYYKDAAATEEAMRGGWLRTGDLGVRHPDGYIQLKDRAKDIIISGGENISSIEVESVLFGHHAVLDAAVVARPDDHWGETACAFVTLKDGASATAHEIIAFCRARLPRYMAPRTVVFGDLPKTSTGKTQKFLLREKARAMGSLPMQSKSKL

SEQ ID NO: 44322 - protein, 643 aa, Oryza sativa
MSRRVQNEKDSRRITSDGTAARTRPLSIQDIMSRREKKTASEAKKTKEGLEENSNGKSNHLESGRGSKSRKDVREMPLEGSKKDNSDKPGEGSKKDEMRHTPREERRKDNMRDMQREVSKKDNLKDRPKDISKIDNLKVKVKVPSKDDQRDAPKKSSKKERSSTRDDSHLVDKDKGNHNSHKLSTYTSGRVGKSRGGNHGEITARDGDATIQESQKRPGKRWIDEPVGNDRIKERSERRTDGKRNSRGFDDEKSSQVDRPTLKKQDAVRLQDPRHFDRKGGRKENAKLHHEEPRSKRRRSTSRDHYQERHDRSVSPSSREQRHSYRGHGHDYYPPYHSMDKSRRKHFETDRHRTSWNDGYSSGSYRRYESRLGGYSPRKRKTAPKDEQTTIKTASLVIRSPEKKSATWDQLPVATDLSNFVTTLQSTVGLKDSTVPVNFTTSKQDPNTTIGTILTGSNLAVDSVQLTQATRPLRRLHIENLPSLATEDMLIGCLNEFLLSSSASHIQRSKQPCLSCVINKDKRQAFVEFLTPEDATAALSFDGRSFGGSSLKIRRPKEYVEMAGILIGYVIIHVQDGEAKDFLSRIQGVMSILCDCCFFQNYWLLITLLAESLWCSVHGKIRKTACTTWFNMLLLRSLLKRLN

SEQ ID NO: 44323 - protein, 435 aa, Oryza sativa
MMSSQVASVSDGLPQAQGPAAPNDSPRKRFSGVAPPAALIFFVLVFAGGAIVTLDHKENLSILQLRPREMVVSETETRAPTSEVQETETRAPTSEVQEAGTGAAAGGVQRAELAGSSICENQCRPSGSEPLPKGIVQDKSNFEMEPLGGNPERRAAVARPAKSLLAIPVGIKQKAVVDKLVSKFPGDRFTVMLFHYDGEMDGWRELGWSDRAIHVAAKDQTKWWFGKRFLHPDMVAEYEYIFLWDEDIEVDGFDPIRYLRVVRRERLEISQPALDHRSQIHHRLTLRARKGQVHRRFYKTRGGGRCDDNSTGPPCTGWVEMMVPVFSRAAWRCAWHMIQNDLIYAWGLDFKLGYCAGGDRRLAVGIVDSEYVLHRGIPTLGDGGGKPAAKRSSTATKAATDRLAVRQRSYTELQIFNRRWKAAAEGDVCWTDPYP

SEQ ID NO: 44324 - protein, 495 aa, Oryza sativa; identical to SEQ ID NO: 32685

SEQ ID NO: 44325 - protein, 411 aa, Oryza sativa
MAWELTEVPGNPTPSLRGSTVEVIAAKIEPKLANSLIRQLSQACPLENLRHVKRVRRCCEYGEKSELSIILCLATGPEHCSEMFPQDVKKIVGTYELNTFIAKVARFPATSKEEWEEQCKLWPTSYHPPHDLDGVSGFKECELPSIFNCMRTALRLSEVGNAAVVVNPSTMQIIAKATDQTLQHDSLKSNKCAELNSDSPFSSLEVTEKKGSRLFLSNSNVSKCNSLNMEASCLNPWGWMKPRPSEQKSLPCEGGFPWHPLRHAAIVAIENAAERDKVMFPSIISSTKPNSDGNMEYYSVNESAKRLKVDRNDDKKIAHEAICDDLSETRPYLCTGFDIYLVWEPCSMCAMALVHQRFKRIFYAFPNPITGALGSVYRLHGEKSLNHRYSVFRVKVPESYSNSSGDCSDKC

SEQ ID NO: 44326 - protein, 536 aa, Oryza sativa
MDPDFSRASRGPSFAFAFNSVNFSDRVLRIEIVAGDDAAGAKGAAGEGCSSLADWAHQRKRRREELRREKESGKYTDLETCKVEAEECDTYEENNEEPVAMIEESPPDIGQDGEDGDSCDSSWSMECTQVLRVKSIYISSAILAAESPFFYKLFSNGMKESDQRHATLRITASEENALMELLSFMYSGKLTTNQPTLLLDILMIADKFEVVSCMRHCSQLLRSLPMTTESALLYLDLPSSISMAAAVQPLTDTAKAFLANKYKDLTKLQDEAMNIPLAGIEAILWSNDLQVASEDAIYDFVIKWARSQYPKLEERREILGTRLLPLVRFCHMTCRKLRKVLACNDLDHEQATKCVTEALLYKADAPHRQRTLAADVLTCRKYAERAYKYRPLKVVEFDRPYPQCIAYLDLKREECSRLFPSGRIYSQAFHLAGQGFFLSAHCNMDQQSAFHCFGLFLGMQEKGSTSVTVDYEFAARTRPSGEFVSKYKGYYTFTGGKAVGYRNLFAIPWSSFMADDSLFFIEGVLHLRAELTIKQP

SEQ ID NO: 44327 - protein, 97 aa, Oryza sativa
MVQIAWRPWRQMIGNYRLHSMNLTKWKTSVRDLLWNKMPCSPTLIGCSQCRKRIFYQLWSLLIKMMIAADLMTLVVIRRTSWTLLITWNQRVKHMLR

SEQ ID NO: 44328 - protein, 421 aa, Oryza sativa
MAPAAQEPWAILAAIPNVVGYKEAKRIFPPGTDISVARKEVPRASVLTVPRHISLPACLGLYPYVVAADRSGLLLLGTHPVTSASAMVSYHICDAHTGEVVSLRDCKPMRPMTFYGAANVGLIIKDDGCMVAELQPGCKGTSTGGATLLSYKVGECCKWRERELTCSPPLPLDWYPEGVVSHGGMLWWVDLSYGLLACDPFAEEPNLIHVPLPQVPDELPVDDQVNRGAHRCVKVSGGRLMYVQIHGNPVVPVVSTWLLDESTCSPGEWEWNPQLSAPLAELWIDQSYVDTMLPLTIPALALPHPTDPNRVYFFLKSCIFAADLRLRKLVSFNSFEMLDPPCELWMKRSSHLVHAWQYDPSSSRSDFVLACLRQDKAIASKSSFSGIIPVTRRTAKSLKRVWDSVTRQQQKQEQQLQKQAM

SEQ ID NO: 44329 - protein, 169 aa, Oryza sativa
MAPCLLLVLFLLPALATGHQHPSTLGSSALSEWRSAKASYYAADPEDAIGGACGFGDLGKHGYGMATVGLSTALFERGAACGGCYEVKCVDDLKYCLPGTSIVVTATNFCAPNFGLPADAGGVCNPPNHHFLLPIQSFEKIALWKAGVMPIQYRRYVRFLAASFDCCYL

SEQ ID NO: 44330 - protein, 105 aa, Oryza sativa; identical to SEQ ID NO: 34175

SEQ ID NO: 44331 - protein, 287 aa, Oryza sativa
MEATGAAVSAFSTASSSSPAAPRHGRLLASPAAWRSARTLPPRAVASSRATVLVSSPPPPPLPPTPAPAAVAPSKVDRSGRFCSPRAARELALMISYAACLEGADVVRLFDRRISARREPGYVFDKACVVNYNHMSFGGGPLEVGTEEEAEKLMSQNEKDSANEAEVLSAPPKLVYNNFVLRLAREILVAVASGWDKHVDIINKITPQNWKDEPVARILELCILHIAMAEMTSKGTPHKIVINEAVDLAKRFCDGGAPRVINGCLRTFVKDHMNIDTSQPAPAESKA

SEQ ID NO: 44332 - protein, 644 aa, Oryza sativa
MEPPFFLLLLLLVVSSSSPSAALLSAKGVYNEVQALIVIKNLLKDPHGVLKSWDQNSVDPCSWAMITCSPDFLVTGLEAPSQHLSGLLSPSIGNLTNLETVLLQNNNITGPIPAEIGRLENLKTLDLSSNSFYGEIPSSVGHLESLQYLRLNNNTLSGPFPSASANLSHLVFLDLSYNNLSGPIPESLARTYNIVGNPLICDANREQDCYGTAPMPMSYSLNGSRGGALPPAARDRGHKFAVAFGSTAGCMGLLLLAAGFLFWWRHRRNRQILFDVDEQQIENVNLGNVKRFSFRELQAATEGFSGKNILGKGGFGNVYRGQLPDGTLMAVKRLKDGNAAGGEAQFQTEVEMISLALHRNLLRLYGLLHDRHRAPPSLPLHVQRQRRLPPQSEAGVGVGDEEEDRGGGGEGPGVPARAVRPQDHPPRRQGRQRAAGRGVRGRRRRLRAGQAAGPPGVARHHGGAGHRRPHRAGVPVHGAVVGPDRRLRLRHPAAGARHRPDGARVRQVVQPQGRHAGLGEEDAVGEEGGGAGGQGVRRRVRPGGGGGDGAGGSPLHPVPPRPPPPHVRRRPHARGRRPRRPLGEGLRPLHRRRRLPLPLPPHLRPGAARRRLRRRLRPLLLRPHRRLLPPRPGRRALRPQITPP

SEQ ID NO: 44333 - protein, 70 aa, Oryza sativa
MALQNTGMDAGSGQSPLVSLHHPDINMQLFSSMHDFMSQEGPLEAVAWLKTPQVLQCWILLLECGVIQNQ

SEQ ID NO: 44334 - protein, 159 aa, Oryza sativa
MAAPLRRSLPSLGRTLLSPSPAPARMLSAAASDALVEIKPGEIGMVSGIPEEHLRRKVVIYSPARTASQQGSGKVGRWKINFVSTQKWENPLMGWTSTGDPYANVGEAGLTFDRADSAKAFAEKHGWDYVVRKRHTPLLKAKSYAENFKWRGPPKAEQA

SEQ ID NO: 44335 - protein, 420 aa, Oryza sativa
MYGRMPKKSNNTKYYEVLGVSKTATQDELKKAYRKAAIKNHPDKGGDPEKFKELAQAYEVLNDPEKREIYDQYGEDALKEGMGGGSSSDFHSPFDLFEQIFQNRGGFGGRGHRQKRGEDVVHTMKVSLEDLYNGTTKKLSLSRNALCTKCKGKGSKSGAAATCHGCHGAGMRTITRQIGLGMVQQMNTVCPECRGSGEMISDKDKCPSCKGNKVVQQKKVLEVHVEKGMQHGQKIVFQGEADEAPDTVTGDIVFVLQLKDHPKFKRKFDDLFTEHTISLTEALCGFQFVLTHLDGRQLLIKSNPGEVIKPGQHKAINDEGMPQHGRPFMKGRLFVEFNVEFPEPGALTPGQCRSLEKILPPRPRNQLSDMELDQCEETTMHDVNIEEEMRRRQQHRRQEAYDEDDDEDAGAGPRVQCAQQ

SEQ ID NO: 44336 - protein, 295 aa, Oryza sativa
MESVPDAESKADTSDESDEQAICHRMVLVCGTSTCHMAVSKNKLFIPGVWGPFWSAMVPEFWLTEGGQSATGALLDYIVENHVAAPLLANHAASQRISIYELLNKILFSMAHEQNISFISSLTQDIHVLPDFHGNRSPLADPKSKGIICGFTLDTSEKHLALLYLATIQGIAYGTRHIVEHCNAHGHKIDTLLACGGLAKNSLYIQEHADITGCPIILPRENESVLLGAAVLGAVAAKKFPGVRDAMKALNAAGKVVYPSSDPRVKKYHDAKYQIFRSLYEQQLSHRSAMAQALQ

SEQ ID NO: 44337 - protein, 110 aa, Oryza sativa
MGQSKKKFRGVRQRHWGSWVSEIRHPLLKRRVWLGTFETAEEAARAYDEAAILMSGRNAKTNFPVARNATGELTPAAAVAGRDGRVGGGSGSSSSMTANGGGNSLTPAGS

SEQ ID NO: 44338 - protein, 247 aa, Oryza sativa
MKASCPFFCHSSFFFIYSEGALELASAGIGVSVFNIVSKIFNIPLLSIATSFVAEDISKNASKHSSSGKLELSSVSSALVLAAGIGTIEALALFLGSGLFLKLMGVSPASPMHKPAKLFLSLRALGAPANVIMLAVQGIFRGFKDTKTPVFFIGLGNLSAVVLLPLLIYVFRLGITGAAISTVASQYIITILLLQSLSKRAVLLPPRLDQLEFSGYLKSGVFFVLLSPPLSLYSIVVHAKSEFLHFH

SEQ ID NO: 44339 - protein, 199 aa, Oryza sativa
MALDCFFAVWFVVGNVWIFGGRSSAADAPNLYRLCIVFLTFSCIGYAMPFILCAMICCCLPCIISVMGFREDTNNTRGATSESINSLPTYKFKTKKRRHSSGNEAEGQDGGIVAAGTDKERSLSAEDAVCCICLAKYAHNDELRELPCTHCFHKECVDKWLKINALCPLCKSEIASSSGTSDTRRSDHTDIPVQEIEMH

SEQ ID NO: 44340 - protein, 307 aa, Oryza sativa
MAQDDSVVSAQWLHEHLGQPDVKVLDASWYMPVEKRDPWQEYQVAHIPGALFFDIDGIVDLTTDLPHMLPSQEAFAAAVSALDIKNHDKVIVYDGKGFFSAPRVWWMFRVYGHNKIWVLDGGLPQWRTSGFVLESSTPGDAVQKTKAANSVVERIYNGQLASDVTFQTEFQPHIFWTLEKVKHNMDAQSHQVVDARSKGRFDGVAPEPREGVRSGHIPGTKCVPFLEMFDDAPMLLPADEIRKKFEQAGISLDRPIVVTCGSGVTACILALGLYRIGKQDIPVYDGSWTEWEALPDHDYPKVTSNGS

SEQ ID NO: 44341 - protein, 136 aa, Oryza sativa
MVVMMVRSSAHLPQLKRTPSPCAPSPSPSPSPQHQRHCHHQQPCRTTPGCSSSEDNRDDEMSDIVKQRRRPRVCTRKVRWGAKIRTPTPSPDRTTSEVENKDGDPLYKAVLMIPTRDSTPAIPMDLIALARQRGLF

SEQ ID NO: 44342 - protein, 401 aa, Oryza sativa
METSPALRPAHIPRSTAVRPPCATPFSRAHWHATCAAIRRVPRVNGDSNSSIKPALADHAAPPLDLDLLPVSNLPRPLTITDLSPAPMHGSQLRVAYQGVPGAYSEAAAAKAYPSCDAIPCDQFEVAFQAVELWIADRAVLPVENSLGGSIHRNYDLLLRHRLHIVGEVQLPVHHCLLALPGVRRDLLTRVISHPQALAQCELTLNAMGLNVAREAFDDTAAAAEHVAAAGLRDTAAIASSRAAELYGLQVLADGIQDDAGNVTRFVMLAREPIIPRTDRPFKTSIVFAHDREGTSVLFKVLSAFAFRDISLTKIESRPHRHRPIRLVDDANVGTAKHFEYMFYIDFQASMAEVRAQNALSEIQEFTSFLRVLGSYPMDMTPWEYSSSSSPSPAPGGDTSR

SEQ ID NO: 44343 - protein, 364 aa, Oryza sativa
MVSPSLRIPAAARVFDPAINTRCPPPHAVVMRMRSRSRRSIAASASPPGDPSIRDPISLPRPLTSADLMEASGDGLKVAYQGCPGAYSEAAAKKAYPSCHTVPCEYFETAFQAVENWVADRAVLPLENSLGGSIHRNYDLLLRHRLHIVGEVRLAVRHCLLANRGVKIQNLRSAMSHPQALAQCEQTLTKLGIEHREAVDDTAGAAKLIAEQKLQDTGAVASSLAAQLYGLDILAENIQDDTDNVTRFMMLAREPIIPRTDKPFKTSIVFSLEEGPGQLFKALAVFALRKINLTKMESRPHKKKPLRIADDNCSAPLKHFDYLFYVDLEASMADPNAQNALANLKEFATFLRVLGSYPTDVSEA

SEQ ID NO: 44344 - protein, 404 aa, Oryza sativa
MTSFIKYSSWLENPSNVKAARFLSKGHSMLSDCMKELDLTKYDMPKDQTFPEAKEHLVARTELASFDKSLESVEEALVKLEDLLQELHLSSSNSGKEDLRAACSDLEMIRRLKKEAEFLEASFRAKTEFLEADASSRPLSPAVEEGRGKTASNANESSTPQKPANRVENKRRPIWDLFGRPSGRRVQLVQQTSDQNVSVANVDNKDTQSNDILRFEQLRRELIELEKRVQKSADNAQKEETYVANETLDSSVSSSPVSMPSGPASKKENVITKSVEKVKETTTTVVQGTQLLAIDTGAAMGLLRRALIGDELTHKEKQALQRTLTDLASVVPIGILMLLPVTAVGHAAILAFIQRYVPSMIPSTYAPERLDLLRQLEKVKEMGVAEGSSEEMVEAVSSRGDQVK

SEQ ID NO: 44345 - protein, 658 aa, Oryza sativa
MAHLPLLLLSFLVLIGVHASVSHGSPPLPSTYDPSICSKSSECGGVNISYPFYLSNATDYYTRFSCGYTDLKISCSRDRDGRNETPTILLGGDNYTVLDIIYDSHTIVLADTDALRGGSCPRVRHNITFAQADEWLQYTGPRDNLTFFFGCKLNLPPPIDPGLVSLADKHQINCKDFSNWPDSGDSFVFTSAELEAPVESELARRCRQVIVVPVNGDILNSSNQSALPSGGYGQVLNKGFDLAWNSRKDEQCYQCEQSQGHCSYGQNRVFLDCLCSDGKVGNQDCRNSGASNSSTLRYSSLKGRMKLYIIAGISSVLLLCLLSFPCLFSLKKYRHRRISKGTPRIESFLQRNGTLHPKRYTYTEVKRMTKSFAEKLGHGGFGAVYRGNLSDGRQVAVKMLKDSKGDGEEFINEVASISRTSHVNVVTLLGFCLHRSKRALIYEYMPNGSLERYAFRNNSKGELSLTWEKLFDVAVGIARGLEYLHRGCSTRIVHFDIKPHNILLDQEFCPKISDFGMAKLCANKESIVSIAGARGTIGYIAPEVYSKQFGAISSKSDVYSYGMMILEMVGARERNIEANSESSSHYFPQWIYEHLDEYCISSSEIDGETTELVRKMVVVALWCIQVVPTNRPTMTRVVEMLEGSTSGLELPPKVLLSW

SEQ ID NO: 44346 - protein, 93 aa, Oryza sativa
MMGIPRMDPKVRTRRLIWVQLLNHLQKERPQVRSLDALNQRRMETVFRSPGNLQLGQKVNAVILYQMVWWSMRLEWWMSTHLRMVLVLFQKKC

SEQ ID NO: 44347 - protein, 242 aa, Oryza sativa; identical to SEQ ID NO: 31906

SEQ ID NO: 44348 - protein, 389 aa, Oryza sativa
MAGDRLSWSGLLKWSLSYADGTRPSRAISEEERRWLAEAVERHMMVDVVSRMREIALLMSTPLSVLEAHGITPDDIEGLLAELQVHVESIDMANDLHSVGGLVPVIKYLRNSNARIRARAADVVTTVVQNNPTSQQLVMEASGFDPLLSNFTSDPDLTARIKALGALSSLIRNNKPGVSAFRLANGYAGLRDALTSESARFQRKALNLTNYLLSESHSGCSVFAQLGFPRLMMHLVSSDDLGVREAALGGLLELARDTTLGSRSLLADHDRLRRLLQARIERIRMMAPEDLDAAREERQLVDSLWITCYHEPSTLHVEGLLVLPGEECFEQPPDVAGRFFEPLRRSSARRAPSNERSDPGDGTGGGMMLLLGPSPGSRSNSGRIDHSGM

SEQ ID NO: 44349 - protein, 421 aa, Oryza sativa
MPWLEMWLPPAGSGGGGEGMAAGLFLDGEAAHGALLAAMPGISASFGVRQRRPGFVSLTMSVKGGRGFVSGPVGLLASGEEKGARAEEAEALVAGRRATEEEVAEASEGKVVEEVKEARAGAGAMNMTKHLWSGAVAAMVSRTVVAPLERLKLEYIVRAEQRNLFELIHAIATTQGLKGFWKGNFVNILRTAPFKAVNFYAYDTYRKQLLKWSGNDETTNFERFIAGAAAGVTATILCIPMDTIRTRMVAPGGEALGGVIGVARHMIQTEGFFSLYKGLVPSLISMAPSGAVFYGVYDILKMGYLHSPEGKRRVSTMKQQGQEANALDQLELGTVRTLLYGAIAGCCAEAATYPFEVVRRQLQMQVKATRMNAFATCLKIVDQGGVPALYAGLIPSLLQVLPSASISYFVYELMKIVLKVE

SEQ ID NO: 44350 - protein, 472 aa, Oryza sativa; identical to SEQ ID NO: 34820

SEQ ID NO: 44351 - protein, 639 aa, Oryza sativa
MALDGGGEVGRRRRRRGWGGGFPSLMRRKQVDSDRVRAAEGEGQPQLAKELNIPALVAIGVGSTIGAGVYVLVGTVAREHAGPALTISFLIAGIASALSAFCYAELASRCPSAGSAYHYSYICVGEGVAWLIGWALVLEYTIGGSAVARGISPNLALFFGGPDSLPWILSRHQLPWFDVIVDPCAAALVFVVTVLLCVGIKESSAVQELITVLNACVMIFVIVAGSYIGFQIGWVGYKVTDGYFPHGINGMLAGSATVFFAYIGFDTVASTAEEVKNPQRDLPLGIGAALSICCCLYMMVSVVIVGLVPYFAMDPDTPISSVFAKHGMQWAMYIVTSGAVLALCSTLLGSLLPQPRILMAMARDGLLPSFFADVNKRTQVPVKSTVVTGLCAAALAFFMDVSQLAGMVSVGTLLAFTIVAVSILILRYIPPDEVPLPSSLQETFCLSQEYDEERVSGILGDERCKTSETKDVILAESMEDPLIEKKITRKMDEMKRRKVAAFSIGSVCVGVMVLTSAASATWLPFLPMCIGCIVGALLLVAGLGLLCWIDQDDGRHSFGQSGGFTCPFVPLLPVLSILVNTYLLINLGGEAWMRVGIWLLIGVLVYILYGRTNSSLKDVIYVPVAQADEIYKSSSGYVS

SEQ ID NO: 44352 - protein, 310 aa, Oryza sativa
MAMAKAKLISLSFADKCRNILCANWEAHLNTIKADIKGSKGEIYTSRVHYMVERGTTYLIVPEDDRHTINIVIDERGSLSVCSPIPGRLTTLLRSLGKLPPRIAMTGDVLFMKRSKVPVIADSLKKAILKEHKAASEASHSVSAILSSASAACRSRSEGLLSLLDQGSSYNILKFEIGSCVYIDSLGSSHKVDLDNFEPPKADLLLPFSARIIDGINRSDPRRRALIFFCFEYFNVTATDALLLSIDHHGFDVLAKVPEKAVLLDVPRQYVWREFRFSFKEAAKDIEDFCRMLVELEEEALQSMKSYSGL

SEQ ID NO: 44353 - protein, 926 aa, Oryza sativa
MDIALASAAATWLINKLLDRLSDYAIKKLLGSEGLDAEASSLRDALRRATLVLGAVPAGAAAGVRIGNDQLLPQIDLVQRLATDLARHLDELEYYDVKKKVKKNQKSSNPLSKMNLPLTQAGQSKPKYNRTDIKQIRDTVGYLHSICDDVHKALLLDKLDAIKQAAQDASTDKRETVDNFTENPRNKVFPREEMKDIIELINSAASSDQELLVVPIVGAGGVGKTTLARLVYHDPEVKDKFDIMLWIYVSANFDEVKLTQGILEQIPECEFKSAKNLTVLQRGINKYLTKRFLLVLDDMWEESEGRWDKLLAPLRSAQAKGNVLLVTTRKLSVARITSNTEAHIDLDGMKKDDFWLFFKRCIFGDENYQGQRKLQNIAKKIATRLNGNPLAAKSVGTLLRRNINEDYWTRILDSNEWKLQESIDDIIPALKLSYNQLPYRLQLLFSYCAMFPKGYNFDKGQLICTWIALGFVMNERKKLEDEGSDCFDDLVDRSFFQKYGVSQYYTVHDLMHDVAQEVSINKCLIIDGSDLRTVPSSICHLSIWTEPVYNEQSIERNDNFEEKLDAVQDNVLGSLECLILAGVYDENYSAKFVKTLERVRYVRMLQLTAMPFNSDILLSSIKKLIHLRYLELRCTSDKPKSLPEAICKLYHLQVLDVQHWSGLNDLPKDMSNLVNLRHLFVPGSGSLHSKISRVGELKFLQELKEFQVQEADGFEISQLGNINEIRGSLSILGLETVKKKGDATRARLKDKKHLRTLSLTWGSASGSTTTVQKEVMEGLKPHENLSHLLVYNYSGATPSWLLGDSFSLGNLESLHLQDCAAVKILPPFEEMPFLKKLSLVCMPCLKSIRIDFNSADEEDELELSEIEISKCLALTSIRLHSCKALTMLSINDCEALGSLEGLSFSEKLKQCVVQGCPKLPSGFIAN

SEQ ID NO: 44354 - protein, 540 aa, Oryza sativa
MAAAASRKEEERNERVVRGLLKLPPNRRCINCNGLGPQYVCTSFWTFVCISCSGIHREFTHRVKSVSMSTFTTQEVEALQNGGNQRARESFLKEFDAQKMRLPDSSNVDSLREFIKAVYVERRYAGGRFSERPPRDKQNQKNNEQEHRRASSYHSFSQSPPYDYQYEERRNGKQSVMLTRKPGSDRGHDGKMSGFAYSPQSLHERMSEDRFANENSGPRISDCSGSSISNTFRTTPHSPNFLDKGCSSPSMQQNQSNIQASSGITQSERTISTGNIDSSSTKSSKSSLADMFFESDIAHRTQQTKDCITPSFTAFSDVANIAQKDLLNEPVAQQQPVTGLDQPVDFFASMPPATPSTDRMLTAAPSMDNAGWATFDTPPEEKQPGVIGLSGISVMDKHALSGDLFSFEPNNDQPTWLQSSKTSKNNASVTDQSDVPCKYTSSDASNSQAWSAFEAKSVSTQQASPDLSLMSSIEPKEPIDENKLQLWHSFDDASETMTLNLSNAQLQTNEHKNVDNNSLTTSNPFTCSITSKVPLCSITT

SEQ ID NO: 44355 - protein, 260 aa, Oryza sativa; identical to SEQ ID NO: 32920

SEQ ID NO: 44356 - protein, 171 aa, Oryza sativa
MSEEAAAAAAAAGAAGVEESLGRRRSRRGGGGDGVGMGAAAAARVWEFERDLVAGAAMGGAVHTVVAPIERAKLLLQTQDGNAALLGRARRFRGFADCVARTVRDEGVLSLWRGNGTAVIRYYPSVALNFSLKVPTPTPKPPRHFCSYCLFVPCCPSYRFVRYNRINIASV

SEQ ID NO: 44357 - protein, 136 aa, Oryza sativa
MYELSRFTASVGSKCDGAEAGADDGGGPARRAAGHLAGVVRIPRRSETIKPGKKPIGKRVKKNCDLETARMMNRTTTSDAYPWCGLMPLVPAPSSCMLVLPASTAPHARSCATTAASCTHGRILCSHLVPPVHMRL

SEQ ID NO: 44358 - protein, 486 aa, Oryza sativa
MVGGGAGEPLRRAWGYHPECPGCRVDRRKEEREGIPYTELSLIWLVTVSSTLPIQSLFPFLYFMIRDLHIAKQEEDIGFYAGFVGASYMFGRALSSVIWGIVADKYGRKPIIIITLISIIIFNTLFGLSSSYWMALTSRGLLGLMCGILGPIKAYATEVCRKEHGHLGLSLVSSSRGIGLIVGPAIGGYLAQPADKYPSIFSEKSIFGRFPYFLPCLCISLLAIVALLASFWLPETLHKHTQDMVLEDSISVEEGLSGPTAEENSAGCLNLFTNWPLMSAIIAYCIFSLQDVAYAEVFSLWAVSDRKYGGSSFSSQDVGSVLAFSGLFLLVFQILVYPSVAKSVEPITLVRIVAILTIPLLSSYPFMAGLSGSILQLIVNCASFLKNAFAVTTITVFNILMNDAVAQDVRASANGVAVTLMSIFKAIAPAIAGAIFAWAQRRQTASFLPGDHLVFFMLNVFTVIGLVSTFRPFYARRSTKHDPITT

SEQ ID NO: 44359 - protein, 545 aa, Oryza sativa
MELGLGMGMGLGDPPADYGSIAAVGMFVALICVCIVVGHLLEESRWMNESITALIIGLGTGGVILMVSSWKHSRILVFSEDLFFIYLLPPIIFNAGFQVKKKQFFRNFMTITLFGAIGTLISFSVISLGSLGLISRLNIGSLDLGDYLALGAIFSATDSVCTLQVLNQDETPFLYSLVFGEGVVNDATSVVLFNAMQNFDLANFSSVKFLQFIGNFLYLFATSTFLGVAAGLLSAYITKKLYFGRHSTDREVSIMMLMAYLSYMLAELLDLSGILTVFFCGIVMSHYTWHNVTESSRVTTKHAFATLSFIAETFLFLYVGMDALDMEKWKIVSETFSPMKSIALSSTILFLMLVARAAFVFPLSFLANLTKKTEEGKISIKQQVIIWWAGLMRGAVSIALAYNKFTRSGHTQLPSNAIMITSTITVVLFSTMVFGLLTKPLIRLLIPARHLNRESSALSDPPSPKSFLDPLILNGSDVDPEIGVGIRRPTSLRLLLASPTQSVHHYWRKFDNAFMRPVFGGRGFVPFVPGSPTERSVPLLQGNEN

SEQ ID NO: 44360 - protein, 473 aa, Oryza sativa
MDHSTSLLRLIFLALGAALVVLVVRSAFRLPGDIDTTTTSLFDDGNGGSCTRFSPWACRQGRGDPRSKPSKPRRPSHESDVPRHPLDPLTVREVNRVRELLRAHPLFASAPSSLFVHSLELDEPEKSVVKSWRKGADPLPPRRAVAVVRFRGESHVLGVDPQRGRRRGDSSACPCLRLPDDEHGRADQPLLRAVQGRGVQRQPPPPWRQGLRRRLPAHLPRLVRPSGGEPATHQEPVLLHRGHGQLLHAPHRGPHRAGRHGHGGGPPRLRPRRRHPHPRRREHRLPARTLGADSGGGASAGAARVPDRPRAVDGAAGGRAGVRAGQRAHGAVGRVGVPPEARRARRHGGVAGAGAGPGDRRAPRRDVQGHGVGAVRAVHGPDGGVVLQDVHGRRRVRLRAAGHAARPAQRLPAPRPLPRRRLRRRRRPPLRAREHDLRLRALRRRHRVTTLREPHHRHGRKCKPIRLLCFSLS

SEQ ID NO: 44361 - protein, 384 aa, Oryza sativa
MNVIVVASECSPFCKTGGLGDVVGALPKALARRGHRVMVVIPRYGEYAEAKDLGVRKRYRVAGQDSEVSYFHAFIDGVDFVFLEAPPFRHRHNDIYGGERFDVLKRMILFCKAAVEVPWFAPCGGSIYGDGNLVFIANDWHTALLPVYLKAYYRDNGLMQYTRSVLVIHNIAHQGRGPVDDFATMDLPEHYIDHFRLYDPVGGEHSNVFAAGLKMADRAVTVSHGYLWEIKTMDGGWGLHEIINHNDWKLQGIVNGIDMAEWNPEVDEHLQSDGYANYTFETLDTGKKQCKEALQRQLGLQVRDDVPLIGFIGRLDHQKGVDIIGDAMPWIAGQDVQVVMGARGGRTWRRCCGGSSRSTTTRCAGGWGSRCSWRTGSRRAPTSS

SEQ ID NO: 44362 - protein, 31 aa, Oryza sativa
MESEDRKKDWWDPLKGICTVEHVSNNVLGCS

SEQ ID NO: 44363 - protein, 756 aa, Oryza sativa
MELKGNLSEKDGVFSCSEACSHMLSCGNHACQDICHPGPCGECELMPGKVTACHCGKTRLLEKRASCLDPIPTCDKVCDKKLPCGVHRCKVTCHEGDCPPCVVRVEQRCRCGSSGQMVECYKVLEEEFRCNKPCGRKKNCGRHRCSECCCPLSKPLARLEGGNWDPHLCQIPCGKKLRCGQHGCQLLCHSGHCPPCLETIFNDLTCACGRTSIPPPLPCGTPTPSCPHQCLVPQPCGHPATHPCHFGDCPPCVVPVMRECIGGHVVLRNIPCGSKDIRCNQPCGKNRQCGMHACNRSCHPSPCDPPPANGDASSSTGGRASCGQVCGAPRRECKRTCTAPCHPSSPCPDLRCEFPMTIACSCGRITATVPCSAGGTANGDNMFEVSIIQKLPMPLQPVESDGRRVPLGQRKLSCDEDCAKMERKRVLAEAFDITPPNLDALHFGENSNASDLLSDLFRREPKWVMAIEERCKFLVLGKTRGNSSGNLKVHVFCHMTKDKRDAIRVIADRWKLSVQAAGWEPKRFITIHPTPKSKAPARILGSKPGVFVAASHPFFDPLVDMDPKLVVAMLDLPRDADVSALVLRFGGECELVWLNDKNAVAVFNDPARAATALRRLDYGSAYQGAAVFLPSSSAQPGNVWVAGQKDGVAATKSSANPWKKATASEPDPSSGDWTGVLGQAPGSVWRRGGDTVAQVMGTSNRWNALESDAATSSRPVEESKPAPRTDAVSSAGPSTAPPVSKMQPEVEVDDWEEACE

SEQ ID NO: 44364 - protein, 75 aa, Oryza sativa
MLASLLQNNFDTIFFLKLALKMPLPLRNDKCIFFYKCKNLQVDTYLAGEFVSYGHIFHWKICPYVGAISPVLSLE

SEQ ID NO: 44365 - protein, 107 aa, Oryza sativa
MAAGGGGGYRAEDDYDYLFKTVLIGDSGVGKSNLLSRFTKNEFCLESKSTIGVEFATRSIQVDGKVVKAQIWDTAGQERYVRPPPSSPTLAASRVGAQMGSASSVFC

SEQ ID NO: 44366 - protein, 355 aa, Oryza sativa
MISAKDEPDAPLPPAVDGLLRVHKRITDGLDGESDQPQRAAGTVGPTRLLVPASQAGSLIGKQGATIKSIQDASKCVLRILESVPPVALSDDRVVEIQGEPLDVHKAVELIASHLRKFLVDRSVLPLFEMQMKVHNAHREQPMPPPQTWGPPPPWGHPSNVPPGGPGYGGNPQFMPPRPQDHYYPPPDVPPVEKQPHYGISSYGRDAPPTGAPPASGNQHPPHGSSQITHSMQVPLSYADAVIGAAGASISYIRRHSGATISIQEGVPGEMTVEISGSASQVQTAQQLIKNFMAEASPQGPPQAPAPPAQPVDTGYSSYPPYGGTSYGSPPGGAGPHNGGSYGGAPPPYPPSYGY

SEQ ID NO: 44367 - protein, 224 aa, Oryza sativa; identical to SEQ ID NO: 33033

SEQ ID NO: 44368 - protein, 509 aa, Oryza sativa
MGTRSVALVLLAAVLLQALLPASAAEGLVRIALKKRPIDENSRVAARLSGEEGARRLGLRGANSLGGGGGEGDIVALKNYMNAQYFGEIGVGTPPQKFTVIFDTGSSNLWVPSAKCYFSIACFFHSRYKSGQSSTYQKNGKPAAIQYGTGSIAGFFSEDSVTVGDLVVKDQEFIEATKEPGLTFMVAKFDGILGLGFQEISVGDAVPVWYKMVEQGLVSEPVFSFWFNRHSDEGEGGEIVFGGMDPSHYKGNHTYVPVSQKGYWQFEMGDVLIGGKTTGFCASGCSAIADSGTSLLAGPTAIITEINEKIGATGVVSQECKTVVSQYGQQILDLLLAEAQPSKICSQVGLCTFDGKHGVSAGIKSVVDDEAGESNGLQSGPMCNACEMAVVWMQNQLAQNKTQDLILNYINQLCDKLPSPMGESSVDCGSLASMPEISFTIGGKKFALKPEEYILKVGEGAAAQCISGFTAMDIPPPRGPLWILGDVFMGAYHTVFDYGKMRVGFAKSA

SEQ ID NO: 44369 - protein, 422 aa, Oryza sativa
MSSWAMNKLRGRALDALMEHIHYEDENTQYLCICSVNKALNMVCCWAEDPNSDAFKRHLARVPDFLWLSEDGMKAQVYDGCQSWETALIIQAFCATDLVNEYASTVQRAHEFMKNSQVVRNHPGDQSYWHRHRSKGSWTLSSADNGWAVSDTTAEALKAVLLLTKISSSMVGDPIERERLYDAVDCLLSFVNKDGTISTYECKRTSTWIEILKPCESFPNMVVDYPYPECTSSVLQALVLFKELCPGYRTEEIEECVRNASMFIENTQRKDGSWLGTWGVCFTYGAFFSVQGLIAAGRTYENSSSIRKACDFILSKQLNTGGWGESHVSNETKVYVNIKGDRAHVVNTAWAMLTLIYAGQMERDPTPLHCAAKELINMQLETGEFPQQEHVGCFNCSLFFNYPNYRNIFPIWALGEYCWHLR

SEQ ID NO: 44370 - protein, 701 aa, Oryza sativa
MGNATLTDMTLLPSVDPDDALSGMAATSSAPAQGAKPKKKTMKSLYLQFFDTAPDGKSRVCKLCKKSYCMTTATGNLGKHLNNRHPGYCQLSEGEATQSTTPTSMVSRAKRSQPLARTRSQAQSQSQVQPQSQVQHQPQPQTVSKVRHQPKAKPAIDIDHVNWLLLRWLISSSLPTSTLEDSMLIDSCRYLNPPVQLWPKEKAHEIVLQVFRSMKEDVKASLQCVSSRFSITLDFWTSYEQIVYLSVKCYWIDEGWALRKVLLDVRRIPYPCTGPEILQVLMNVLHEFNIDSKILACTHNNSQHAIHACHELRQELESRKLPFCYIPCAARMLKIIIKDGLENVRPVLSKIREFVLETNSNQDMMEDFMHWTEVYQEGSWKLPFDHSSNWSGDYNMLDVVKKAPNAMDNTIKKFEGVFGPRDWVLSSTEKSAVNSLHSYLEPFYKTTTNLCTCKIPTVGLVFFFMDHVIELINVCHDSTRQDWLKKIASDMSETAHNFASQAYNIYTFTAAILDPRIKGELIPETLNSTSNLEDARNQFVRDYSSTFEAVGNGYNTQDTTDGGDAFSFAEEIVRKRRRVSMITAADELSQYLAEPPAPISTDALEWWKGHSSRYPRLSLMARDFLAIQGTSLDPEELFTSKGDSMRKQHYCLPLSSIQATMCVKSWMQSGYQFNFQSTIIDFERLVESAVAPDAVDAPEFS

SEQ ID NO: 44371 - protein, 310 aa, Oryza sativa
MRNLLRVGAAGIRCPKPLLLRLHVLVMEFIGKGGWAAPRLKDAALSDDKLRESYFELITTMRTLYQKCKLVHGDLSEYNILYFEGHLYIIDVSQSVDLDHPSALEFLKEDCLHVTDFFKKRGVAVMSVTELFNFVIDQNIADEDVDHYLEKIQQKMLENGDMVANDDEITPTVLVQTLDYVKQCEADIVNMSLMQRPSFANEPTADKLYNQPLLGFVRNKNEPTKNQQVQSEEPLDLQNKCSSEHSESCTSSDEDGSWHEILKVGPEERKAARKENKKKVKAEKREARKDKIPKAEKKKRKKMAKAKCKR

SEQ ID NO: 44372 - protein, 229 aa, Oryza sativa
MGGFCCCLCTDDFEEYAHPNNPIYRQGVCLRNFFHNFFGGYTATFQRLESRPSNPAQGAAPLASTNPSTNITDNSLSETYHLVSRPPPYDTDPRYARVQREGLVSRREKSINLTQEESLALRRNGSSSGIEHLAAQKKWSSTEPEGEYKVHHSESTKSLSAKSYNSSFAVVTSEDEDVCPTCLEEYTPDNPKIIAKCSHHYHLSCIYEWMERSDTCPICGKEMEFCETP

SEQ ID NO: 44373 - protein, 494 aa, Oryza sativa
MKALSVPEISSSKKLSDEVTQSSEAREEESDEDMKEPITRLFVHGFLSLVISAVGNYIIPLLTSHSEPEQTAKRSAMPIAVFCLGMITPVIGNGMRFRILQPKQQYGSGVALHITTARIVLISYVFLLLINTRYISLAVFPAIMIVFIGALCRKFWVEETCRRQLRHDSPGASKASSVLRKSEEQLTLIVAVLPFWLQLPGVMLARGTWQQDRVLVSHFLVFISSAMVALATLIARTVPAGIYPGVSRVLPVMHRTCIALILVSVHTMAGEWFGTKSMALACTPELVALLIWFSVHLNHAHDARACKIICLFAVSLLWAWAATYDEMTILQGYWRSSFWGISGLSGGLCYFSSWILKQWPKDSFRPTTDHHASLLLQLLRISAEISLFTSVPSIALQLPRWVSRISAQIRLFASVLTTALQLGLLVPIIYVLLKSVAVIMFYVLIYCVCFLPLIGVEYRPGMSVNRRKASISIQLRPIMLLVLLSILISHFTGR

SEQ ID NO: 44374 - protein, 169 aa, Oryza sativa
MAEEAAAASSAAEGRMTMVVGVDESEHSYYALQWTLRHFFAAAAGQPPQYRLVVVNAKPTAASAVGLAGPGAADVLPFVEADLKKSSMRVIEKARELCAQVSDALFEVLEGDARNVLCESVERHQAEMLVVGSHGYGAIKRAVLGSVSDYCSHHAHCTVMIVKKPKHKH

SEQ ID NO: 44375 - protein, 118 aa, Oryza sativa
MAMKMLFDSWILTYWIWMHHLSFEVLAIICKSIAFPSSLDGPVPKLKNIMYCVGECKPFKAPQNISPLFFVDVVLGYMQSKIQTSDSLPAKISKNIKTWQCSYLFTNSYRYMIRKIEW

SEQ ID NO: 44376 - protein, 171 aa, Oryza sativa
MLRLFTSRDTVEGSFDQRFATLKSIGEDRVKDSELELLLKKKSAPVCYVWCDPTPFMRISQGIITTLSVNKMVKSGYKVKILMADWIAQMNRNIGGNLSEMRTIGLYNIEMWKAAGMALDRVEIVWLSDEISRLADEYWPLAIDVARKTTVSIIKRLTYGSWAWINMRPIC

SEQ ID NO: 44377 - protein, 508 aa, Oryza sativa
MAATSDSTPAAAAAAAASSSSSPLHIVVFPWLAFGHMIPFLELSKRLASRGHAVTFVTTPRNAARLGATPPAPLSSSSRLRVVPLDLPAVDGLPEGAESTADVPPEKVGLLKKAFDGLAAPFARFVAEACAAGDGEAVTAAAEFLRKPDWIIPDFAHSWIWPIAEEHKIPYATFLIVPAALVAILGPRRENLTHPRTTAEDYMVQPPWIPFPSNIAYRRRHEAEWMVAAFRANASGVSDMDRFWESEQHPNCRLIIYRTCPEIEPRLFPLLTELFAKPAIPAGLLMFPDTINNDDDASEQSFVPPTIEWLDKQSEKSVIYVALGSEAPLTEDHVRELALGLELANVRFLWALRPPRGDGGSNDGGAAEILPDGFESRVAARGIVCTQWVPQLRVLAHRAVGGFLTHCGWGSTIESFQFGHPLVMLPFIVDQGLIAEAMAARGIGVEVARNDDGLFHRDDVAAAVRRVMVEEEGKVLARKAKELSDIVGDREQQEMYLDELVGYLQLYK

SEQ ID NO: 44378 - protein, 704 aa, Oryza sativa
MFSSGFSKLSSDSNRRDPYGLSCWNLNNLPRIPGSVLSFETEDISGVVVPWLYVGMCFSSFCWHVEDHFLYSMNYMHFGEPKVWYGVPGADAVKLEEAMRKNLPRLFEEQPDLLHELVTQLSPSVLKSEGVPVYRVVQNPGEFVLTLPRAYHSGFNCGFNCAEAVNVAPVDWLPHGQCAVELYREQRRKTSISHDKLLLKTANEAVRQLWMNLSDCKSEQGVYRWQDTCGKDGMLTSAIKTRVKMEKAARGGNMALRYKKMDGDYDSADRECFSCFYDLHLSAVSCQCSPNRFACLNHANILCSCEMDRKTALLRYTIEELHTLVAALEGDPTAVYQWGQNDLGLVCPSGSTQYKKLDLGENTEFPDSATNVNHGCSLGSQDQYHYDPAKPAGYQQEKGIQIASEKHDKNKMVVNLESPATASNPSRSKSDCSGSLSLNHSSELPSSRIQTGNSTLASITTEKLFGVDIKSNLAQSSDGQVSQLAKPSSSQTDEVSKPAIAKYTVELLDSGTMMIGKKWCNQQAIFPKGFKSRVTFHSVLDPTRTCCYISEVLDAGLLGPLFRVTVEGLPEVSFTHTSPMQCWGSVRDRVNEEIAKQISFGKSGLPDFLSCNSLNGLEMFGFLSSPIIKEIEALDPCHQCLDYWLSRVSSVGTELPSESVMAAMVNDSTNPPIKLLGIEINRRESEQSSSFNNSCVRRSHLAGC

SEQ ID NO: 44379 - protein, 475 aa, Oryza sativa
MAAMGRTVLPSYVLLDRIVRSEEEAVEEESEWAAMECADWKSYGCHPGDERYPRNAARVKGMLLLARLAEPPGLSELSIRLSAAAAVPRPPPASFPPGAAVPPIPNLPDASPYDDPPLTYVEAAGDGLIALTSCFRDGCSCYLVYDVVGKSLSMIPGLPESCLTYCSMRPLPLRTAAAGGYALRSSYSLAIVAKDMRFDMEAGRDVYRDVLCLCPPRPSSSSSSRGGITPWQFKDAIFPSQMPGSFHGDKVFSFGGHAFWADLAKGVLFCRCDDALSGRNDDAVQFRYIPLPVECHLKISFAMRGDLQLCRTMSCVDGCGDSIKFVCISDGGSSSAHTGDRAITMWTLTLATGEWLKDAQLMVADLWELEGFDKARLPKAIPISPVLNPQEDGVLSFMLNDADAELYMVSLNMHSKKLLSSLTLSSCPDDIVPPLGLDLSKDLQNLSLRPIAAESVPAETQGRPIATKRRRSSLP

SEQ ID NO: 44380 - protein, 53 aa, Oryza sativa
MAIEDWKSMNERMLKKWHRTINDKIMNVAFLCNSYYVVYTLLGVCKDSEHLVS

SEQ ID NO: 44381 - protein, 114 aa, Oryza sativa
MASQEKPTPPPPPPPHPPAPEAVPRVRRFGGGPPGGGGGGGYPNPPDAAIPDAATLREQWRFAVRQYSRWYSHAWGTAILAGAAFFGLGWLVKGSNPLPSRAEHHASNAKEEEG

SEQ ID NO: 44382 - protein, 178 aa, Oryza sativa
MDPYDVEMEAAEGEPMAEQAPPPAAAAAAAARGDGWSMLSRARVLLEEGKPSLALQAILLAIRSQGGEQALMQTLNRARELYRQRSQPSPSVDDLASLLAQCAIAESQSTNTNPQQVPGSDPVMMLDSDEVCILAESGRKQIILDAFADGSSFICLKCGGLFSTSRKDEHLAYWCGTA

SEQ ID NO: 44383 - protein, 443 aa, Oryza sativa
MAAAASSSLLAAASSSSRAAAVSARRAPSASPAAAASLPSPSRASCAPPLRASAARTLRSRVVASAAPAMQPPPASRVSTVVDVDLGDRSYPIYIGAGLLDEPDLLQRHVHGKRVLVVTNTTVAPLYLEKVTWALTHNNPNVSVESVILPDGEKYKDMGTLMKVFDKAVEFRLDRRCTFVALGGGVIGDMCGFAAAAFLRGVNFIQIPTTLMAQVDSSVGGKTGINHPLGKNLIGAFYQPQCVLIDTETLNTLPDRELASGIAEVVKYGLIRGAPFFEWQEKNMPALLAREPSALAYAIKRSCENKAEVVAQDEKESGLRATLNLGHTFGHAIETGTGYGAWLHGEAVAAGTVMAADMSHRLGWIDESIKKRAIDILEKAKLPITPPEAMTVEKFKSIMAVDKKVADGLLRLILLKGPLGSCVFTGDYDRNALDETLRAFCDC

SEQ ID NO: 44384 - protein, 584 aa, Oryza sativa
MATRRRSFPLVPLLLFLLAAAAYGRLISDGSPASASATSLLSNPVSAVIRLTTSNSASASSPPAAAPEEKCEQSYGFLPCTTTVLGNLFLVLAYGFLMYKAATFLSAGSELLLEIMGPGLVGGLLLPILGALPDALLVLVSGLSGSRETAQSQVLIGMGLLAGSTVFLLTLLWGTCVVVGKCDIGPNGVAVDLQNNKGFSLTGTGISTDVQTSYAARIMGISVIPFIIAQFPKMLKTHHGQRLAVLLALIVSFSLVLAYCLYQVFQPWIQKRKLAYAKHKHVISGILRHAQMEALGRLLNEDGTPNEDVIKKLFHKIDMDESQTLSRAELHALIIGINFEEVDFDKNDAVDKIMDDFDTSGNDIVEEAEFVSGMKRWLNEAKRSVPTSGAYSNKFITDYHARTRQEHDLLVDRSDETVESVENPGWCITKAVGLLLLGSAIAAAFADPLVDAVHNFSNASHIPSFFISFIALPLATNSSEAVSAIIFASRKKLRTSSLTFSEVYGGVTMNNTLCLGVFLALIYIRNLTWDFSSEVLIILLVCVIMGLFTSFRTTFPLWTCLVAYMLYPLSLVVVYILDFVFGWS

SEQ ID NO: 44385 - protein, 491 aa, Oryza sativa
MAAESTAQAPAQPHFVLAPLAAHGHLIPMVDLAGLLAAHGARASLVTTPLNATWLRGVAGKAAREKLPLEIVELPFSPAVAGLPPDYQSADKLSENEQFTPFVKAMRGLDAPFEAYVRALERRPSCIISDWCNTWAAGVARSLGIPRLFFHGPSCFYSLCDLNAVVHGLHEQIAAAADADDEQETYVVPGMPVRVTVTKGTVPGFYNAPGCEALRDEAIEAMLAADGVVVNTFLDLEAQFVACYEAALGKPVWTLGPLCLHNRDDEAMASTDQRAITAWLDKQATCSVVYVGFGSVLRKLPKHLSEVGHGLEDSGKPFLWVVKESEASSRPEVQEWLDEFMARTATRGLVVRGWAPQVTILSHHAVGGFLTHCGWNSLLEAIARGVPVATWPHFADQFLNERLAVDVLGVGVPIGVTAPVSMLNEEYLTVDRGDVARVVSVLMDGGGEEAEERRRKAKEYGEQARRAMAKGGSSYENVMRLIARFTQTGVE

SEQ ID NO: 44386 - protein, 503 aa, Oryza sativa
MCIIFAGDDGHSEQLALLNNDHEVSEVCVEEISADNTGRSFLIRISESKVFYYWCAEKSKKHGMDLLAKMKNLLQGRPTLSDLTGISDSRLDAFATHLHAYLVASSIGDVKSLGSLNDFLGASSPQDQYLQPSSVVSKSSRFCTSAANAAKASSVYQTSLSPRCGAFKDGVPRMSCAKIAGRDKLKRRGDWLSSSTGPDDANLLTPKIVSSDSASEKCGGDCSENSANSPPLDLPLSFPLLPSLFPLATQYPLPKVSTEQPFKPYYCWCPPCPSSLQYSVTPLHMPVTSVEPLPLPPLSSLLSNDQPPTSTVSAKMDTTDLPSLNLPSILRDPLLHLPLPTSPLVSLHGSQVPTFTPLMSDPIVHVPVIDVCSSGQAYLVSCGPSMSATVTLLPSLKPLIPETESLVERSARETLMRLIASTPSASNPQLVNILPAVLTDVPEMNVRKHLGVHPGDRLSSSCSVDVIGPGFAVTEDDASVGDGAHATFAEYDDIGDQQHFQSM

SEQ ID NO: 44387 - protein, 422 aa, Oryza sativa
MIFVIVAGSYIGFQIGWVGYKVTDGYFPHGINGMLAGSATVFFAYIGFDTVASTAEEVKNPQRDLPLGIGAALSICCCLYMMVSVVIVGLVPYFAMDPDTPISSVFAKHGMQWAMYIVTSGAVLALCSTLLGSLLPQPRILMAMARDGLLPFFFADVNKRTQVPVKSTVVTGLCAAALAFFMDVSQLAGMVSVGTLLAFTIVAVSILILRYIPPDEVPLPSSLQETFCLSQEYDEERVSGILGDERCKTSETKDVILAESMEDPLIEKKITRKMDEMKRRKVAAFSIGSVCVGVMVLTSAASATWLPFLPMCIGCIVGALLLVAGLGLLCWIDQDDGRHSFGQSGGFTCPFVPLLPVLSILVNTYLLINLGGEAWMRVGIWLLIGVLVYILYGRTNSSLKDVIYVPVAQADEIYKSSSGYVS

SEQ ID NO: 44388 - protein, 645 aa, Oryza sativa
MASVNTGGLRLVRCPKCYNILPEPPSVEVYKCGGCDTILRVKIRPSNGQNVATKQVRQDSDDFSVATTASNGVHPQKKDIAFSGATMDRSRTPDAPSTDTEHASNGTSSNDNGHAMSVENNASEVADTDNKEDCNLDGQNTSGRIEGPSEEIPPNANGMDIDSDREETYNVEGIAENSEDCRVRGGGDIDTECNLSLPEHELPLHQESKSDSELKEATKTEDEATKKGHLVRVQSRSCDLRESHRASAGSSMDFHSARTSLQSKSFRASEPLQSKIMKTVDELRGDLSEFFSKPEEEGEDDDDRKPKTAAYPPRPSKQDGYSKPRAPFTSSVPLTAYHPAAKHSGHVSRLSRSGQVPPPPHHHRELSSLRYRRRRRAYSCCHSDQMETMRRPCSHDCCHYHSCRPPPCHHHDRPWKSQEGAMQRPPVQETTRRRAPPRHHCRPVLRGAPFVVCSGCNRLVQLPTDFAVPSKGTRRLQCGSCSEILSYSYRDPAKKKLQSPSGDGEECQYSTDDYEIHQAAGDADPFSYSEEYGVISYSTEEEQQPLHVSRNSSFDTVDDERSAKLHRLMGYSSASELLRLRRSPDLYESFGERTPAARTSDTKGKAICVADEEEHPSAKVRRGRGLPLPGILKKGIHGLESLKLR

SEQ ID NO: 44389 - protein, 108 aa, Oryza sativa
MHAHEYLGLSSTSGCSSLQEAQGFFLERVIMAMKSSMSTKPSRFLSIFFTISLQSSRLQLSPSLCSTCITSSALILPSPSWSNTKNARRMSPSGTPLLCTSMNSSKSM

SEQ ID NO: 44390 - protein, 271 aa, Oryza sativa
MSVQCAVRPLAALPAAAGTSRSRRVGGASHVAVAAVPSSPRRPRRAASVAPVRAAESSPPAAAPAPPSSGAAAGKAVVPDEEFTLAKVSFGVIGLGVGGTLLSYGFGAYFNLLPGSEWSALMLTYGFPLTIIGMALKYAELKPVPCTTYADAFALREKCATPILNQVRSDVTRYRYGDEQHLDEALKRIFQYGLGGGIPRRSAPILQNIREEVTDDGKYSLVLVFEAKALEISDFEKRQAKFTSFFGPGIKAEIGKGGDDLYEVRLISETT

SEQ ID NO: 44391 - protein, 219 aa, Oryza sativa
MALAHQTGKFEVGDKVLATSAVFGEEIWPAAGYGQTMYCIRQRVGPLYMKMEKRFGKWDGAAELSEKEIIRAERNSGVISNRVREIQLQNYQRKMEQKMQREEDLRMGLRLYKDGKYEEALEKFESVLGSKPEINESSIASYNVACCYSKLDRIQAGISALEDALKAGYEDFKRIRTDPDLENLRKTEEFNVLLNKYDESFINENAINAIKSLFGFNKK

SEQ ID NO: 44392 - protein, 87 aa, Oryza sativa
MYQNIILSLYSGRTAYNLALHEHGPKLYDKLTEDMEDHLQEMCVSIEAAQGGLKIIDRFSQESTLPYYLLPFVWENILACALIVAAE

SEQ ID NO: 44393 - protein, 377 aa, Oryza sativa
MGSHRHRSAGQCSLVQPPRLITCLLLLLLLLLSPPALPCSASSSSSSSSVITHLPGFHGRLPFYLETGYIGIEEKTGTELFYYFVESETNPDTDPLVLWLVGGPRCSAFSGLAYEVGPLNFVLEAYNGSLPRLVYNQYSWTQMASIIFLDSPVGSGFSYARDSNGYDVGDISSSLQVVTFMKEWLNDHPRYRSHNFYVGGASYAGKVVPVIVQYISEAIEEQRQRPLIDLKLQGYIVGNPITGSKFDKNFHVPYSHGVGIISDQLYEAAVTHCKGDFVNPTNQLCANVVYTINKLMSEVSDGNILEDKCVKAAPKPTIDVSASRALLEEYSRLSKPPIRPSMDCASYGYYLSYCWMNDNTTRDALKIKKGTIGEWLR

SEQ ID NO: 44394 - protein, 667 aa, Oryza sativa
MAAGAHCVVQAPAEGMEYTWSSRGPTADGDLGVSISAPGGAVAPVPTWTLQSRMLMNGTSMSSPSACGGVALLVSAMKAEGIPLSPYTVRKAIENTAASISDVPEEKLTTGHGLLQVDRAFEYAQQAKELPLVSYRISINQVGKPTSKLRGIYLRGSNTCRQTSEWTVQLDPKFHEDASNMEQLVPFEECLQLHSTDSSVIKIPEYIMVTNNGRTFNIVVNPVNISSGLHYYEVYGIDCKAPWRGPIFRVPITVIKPIALSGEPPALTLSNLSFKSGHIERRFINVPIGASWVEVTMRTSAFDTPRRFFLDTVQICPLKRPIKWEAVVTFSSPSLKNFSFPVEGGLTLELSIAQFWSSGIASHEPTCVDFEIVFHGISVDQKIIGLDGSEAPVRVVARSLLASERLVPVATLNKVKTPYRPVESNLCSLPPSRDRLPSGKQIIALTLTYKFKLEDGAEIKPRVPLLNNRIYDNKFESQYYRISDSNKCVYSSGDVYPNYVKLSKGEYTLQLYIRHDNVQLLEKLKQLVLFIERKLEKKDFIQLSFYSEPDGPTVGNGTFKSSILVPGEPEAFYVGPPSREKLPKNVLPGSVLVGSITYGAVSSFSKKDDQNQHAPASYSISYLIPPSKVSVPDAGSLFVSLSALLFLWSCIICYTASSGLNPYSRSS

SEQ ID NO: 44395 - protein, 390 aa, Oryza sativa
MGGKHPRSFITDGDLSMANAIAKVCPDADHRLCTWYIEENAKRHLHGDALTKFRRLVYEVMKADEFERRWCAFKNRDNVPEKELWLAMMYALREKWAAAYTDGRYFLGMRSNQRSEGLNSRIHSHLDRKMSLIDVIEHFMCCVSRMRRNEAEMDARASQSVPFTKISAARFFTHVIFREVRAEIRKICKWVILEVRQLDEARRYSIASKYDHKVHGEVSCSFDGALLMGVKCYCQMMDSKEIPCSHIFTVLKYLRIDIIPQCCVAVRWTLQAKAAFPSIRTANVHEWSEQMDQYRLLRNIANEALVKASLSFERSQQVIDFFENFMREGAENEGSVNETTLGPLPAHFSASNQPSGERVLDPHKIVPKGRFPSKRLKPCRESYANKRASH

SEQ ID NO: 44396 - protein, 930 aa, Oryza sativa
MTVDRTDCQTDVFSGVDTVNNTTQVGSVISTYRSLDTFEGVYGPANTSSIEKVQDILPQSRSVSDGQHQSRHFANRRAQLGGLPHQFLSLSKQNEQTKNGQGPPDNKTDSEGANLLGCHQSDQGDYVDFTSLSSFKRINEHPLNFIPEAHASNLFEPRKASEFTNSYAGGSYLRAGRLVPVACLRDGPVSKQKKAMNDHDDAKLIGWSISNLLSKENPENSTSANRAGLRGTKDVPDYLRRYNSLLIDGRLKDSVDLLESMEQKGLLDMNKIHHASFLNACKKQRAVPEAVRFCKLINNPKMSTFNMLLSVCANSQDFDGALQVMVLLKEAGLKPDCKLYTTLISTCAKCGKVDAMFEVFHEMVSAGIEPNVNTYSALIDGCAKAGQVAKAFGAYGIMSSKKVKPDRVVFNALISACGESGAVARAFDVLSEMTAEASESKGSKPILPDHVTVGALMKTCIQAGQADRAREVYKMLQEYNIKGTPEVYTIALRSCSLTGDLGFALKIYEDMNKIGVQPDEMFLSALVDVAGHARRADAAFEIMKDARAKGYQVGTIAYSSLMGACCNAKDWKKALQLFEEIKSIKLMPTVSMMNALITALCDGDQVLKSFEVLSEMKRLGVCPNMITYSVLFVACERNAEAQLGLDLFEQLKIDSIDLNPTIVGCLTGLCLQMFDNDLSLGNIVVTFNLGKPQIENKWTSSAIKVYREAISTGLLPSSDVLSQVLGCLRFPHDNTLTNTFIENMGISCDIPHHPNVNSLLEGFGEYDIRAFSILEEAASLGAVESISMKDTRILVDARKSKIYTAEVSVLTTLRSLKHRLAAGARLPNVTILLPTEKKQVGLDEREKTLKLAGRVGQAVGSLLRRLGIKYHGEESHGKMRINGLTLRRWFNPKLTSTSSTGTPADLLPLPSRLAKGIADQQRNIRNLSLE

SEQ ID NO: 44397 - protein, 678 aa, Oryza sativa
MWASTHNDTLLAKMSSVVDALHDCQKKMGSGYLSAFPSEFFDRVESIKAVWAPYYTIHKIMQGLLDQYTVAGNSKALDLVVGMANYFSDRVKNVIQKYSIERHWASLNEESGGMNDVLYQLYTITNDQKHLTLAHLFDKPCFLGLLAVQADSISGFHSNTHIPVVIGAQMRYEVTGDLLYKQIATFFMDTINSSHSYATGGTSAGEFWTNPKRLADTLSTENEESCTTYNMLKVSRNLFRWTKELSYADYYERALINGVLSIQRGTDPGVMIYMLPQAPGRSKAVSYHGWGTKYDSFWCCYGTGIEYFSKLGDSIYFEEKGDRPVLNIIQYIPSAYNWKAAGLTVNQQLKPISSLDMFLQVSLSTSAKTNGQSATLNVRIPSWTSANGAKATLNDNDLGLMSPGSFLSISKQWNSDDHLSLQFPITLRTEAIKDDRPEYASLQAILFGPFVLAGLSTGDWNAEAGNTSAISDWISPVPSSYNSQLVTFTQESSGKTFVLSSANGSLTMQERPTVDGTDTAIHATFRVHPQDSAGQLDTQGATLKGTSVQIEPFDLPGTVITNNLTQSAQKSSDSLFNIVPGLDGNPNSVSLELGTKPGCFLVIGVDYSVGTKIQVSCKSSLPSINGIFEQAASFVQAAPLRQYHPISFIAKGVKRNFLLEPLYSLRDEFYTVYFNLGA

SEQ ID NO: 44398 - protein, 643 aa, Oryza sativa
MVVAAAARPQTAEALSKRASMLRDSLQRSQGNTDGMVTILGSFDHRLSALEAAMRPTQVRTHAIRMAHENIDKTIKAADGILSQFDLARRAEAAVLKGPHEDLESYLEAVDLLKGIVRFFSTNKNFKSSEGVLNHVNNLLAKSALKIEEEFRQLMTTYSKPIEPDRLFDCLPKSLRPTKDDPDADPGNAGHSEHPSKSLETAVYRTPTLIPPRILPLMNDIAQQLIQAGNQQSCYKIYRDTRGSALESSLRKLGVEKLSKEDVQKMQWEALEAKIGNWIHFMRIAVKLLLAGERKICDQIFDGVNFNKDQCFAELTANSVVTLLSFGDAVAKSKRSPEKLFVLLDMYEVMHELQPEIEVIFEGKSCSEMREASLGLAKRLAQTAQETFADFEEAVEKDASKTIVNDGTVHPLTSYVINYVKFLFDYQSTLKLLFQEFETGSETESQLAVVTMRIMQALQNNLDGKSKQYRDPALTYLFLMNNIHYMVRSVRRSEAKDILGDDWIQRHRRIVQQNANQYKRVAWAKILQTLSIQGAGSTGSSDLSSSGVSRAMIKERFKSFNMQFEELHAKQSQWIVPDQELRESLRLAVAEVLLPAYRSFVKRFGNLVENGKNPHKYVRYSPEMVEQLLGEFFEGQQWGEQKR

SEQ ID NO: 44399 - protein, 507 aa, Oryza sativa
MEEGRGSPEPAGAADWIVLDPYVRCSWRRRHKYEEEDITASKVGRTCTGFPVRASLRVADPPAVSRLYLHCPPQWPADLPEVRYPDVIAAHRGCILFVAAVPFEEPGFNVDGHYPLDYFIYSASPSSQPLLTRLPPCFVGGFTDQEEDELYQPYHQQRQRYMCSRDVGLLCRDGDGDGEDGRSLFTVAHLTSSGSKEVELCVVQSGEAEEWSITPLRVRRAMSMLGLNLGEWRTDAVLPLHDRFLCWVDYYQGILLIDVLNPGDEPHQFSFIPLPKPVRDGSTRLFSQSYCADPVRCVCVRGSSDSGFFIKLVCVTIAATADKDVYPPAFTITAWTLVSIDQKTWELDFTMEAAEFWDLCANSVGHTCALPRAVPTFSHLSLVDPGVVSFLLMEKIDDEFLFWIVELDMTNKVLRSLPTLYIQVEEEEEDDDEIKKVQEVQGPSRCKAYKRVFHGEYFFPSHFTSYLRKNPIQRFDMCPFCLVIFFRLALATLCLFSNIKGTRWLNG

SEQ ID NO: 44400 - protein, 183 aa, Oryza sativa
MLNLIKIKDKKKEQAASAAGKAPVKKQSAGELRLHKDISELNLPKSTSISFPNGKDDLMNFEIIVRPDEGYYLGGTFVFTFQVSPSYPHEPPKVKCKTKVYHPNIDLEGNVCLNILREDWKPVLNINTVIYGLNLLFTQPNDEDPLNHEAAAVLRDNPKLFEANVKRAMAGGYVGQHYFPRCA

SEQ ID NO: 44401 - protein, 383 aa, Oryza sativa
MGSVSLNVPAPRRGGGRRISCHCTPSLLNLLMFLALLSTNALALLAFFSSSSSSSSSPAASAATAAASTISDHVAAIAREIDTSSSSHLPYRADGLPPELLLFLSPHALPLGRDARTGLTHMPASVAHSCFRSPATLSLLAAFMSYDPHAACPRNATLQQHRLLSKACEPLPRRRCLSGGPRAALPASNMGVDGRRWVRPRHDYEFLLDDVLRLGATRIRIGLDVAGGAANFAARMRDRGVTVVTTVLDNAGKPMNEFVAARGLFPLLLSPAHRFPFYDGVFDLVHVGTNALDEGGAPSMGNSGTEEALEFFMFDVDRVLRVGGLLWIDSYLCQSEERRQLVVNLIKRFGYKKLKWMVGEKAGTGSAKTALYLSALLQKPARD

SEQ ID NO: 44402 - protein, 31 aa, Oryza sativa
MRSSFSRRVLRADVKLGRTAMPTMLSAVLEK

SEQ ID NO: 44403 - protein, 155 aa, Oryza sativa
MGYTWGLGSMGQLGHCSLQSGDKELIPRRVVALDRTVIRDVSCGGVHSCAVTEDGALYAWGGGHVGQLGLGPQSGFFSCALNGSDMLLRNIPVLVIPSGVQLVTCGHSHTLVSMKDSRIYGWGYNSYGQAANEKSTYAWFPSPVDWYDSQSVLER

SEQ ID NO: 44404 - protein, 518 aa, Oryza sativa
MSARDNNGHGTHTAYTAAGVAVEGVNLHGLGAGVARGGAPRARLAVYKVGWEEGGAGGVYLATAAVLAALDENSFGALHAVQNGITVVYAGGNRGPRPQVLYNTAPWVITVAASKIDRSFPTAITLGNKQTLVGQSLYYKLKNDTESRFESLVNGGNCSREALNGTSINGKVVLCIELTFGPIGRIFKDVFAGVIQGGASGLIFAFYTTDVLLSTEDCKGIACVFVDNEIGYQVATYIGSERLPTVKIEPASSITGNQVPAPKVAIFSSRGPSIKYPTVLKPDIAAPGVNILAAKEDAYVFNSGTSMAAPHVAGVVALLKALHPHWSHAALKSAIVTTASTKDEYDTPILAEALPRKVADPFDYGGGNINPIGAADPGLIYDIDPKDYNKFFACQIKKYEICNITTLPAYHLNLPSISIPDLRHPINVRRAVTNVGEVDAVYQSSIESPLGVKMTIEPPVLVFNASKKVHAFKICITPLWKVQGGYTFGSLTWYNEHHTARIPIAVRITIQDFYADVA

SEQ ID NO: 44405 - protein, 742 aa, Oryza sativa
MAQLLHHQDSAFYGKELHGRRWSILQFFGFRRRLRSTKMISDKKQSQGKGSGGSRRRGSYVPLKDEDTSVMDDDKHTETTKKNKSSKKSSGKGSLGSLILKKLYGKEGHKEKMLPVAPKLLRTLSIHYLESNEYVLDGESASNGDGSSQSIMPNSTDTNIQNATFNTQDGCDNDTSSSLLKRGDIHVKQRSHRSISMDGVLHKVPYGHKASEDVIKEGLSRSASATYDRDGLKSYTVTAAKRPVNQGFRRSRSLTESLEKYSHLLDSISSNQSKRTLTSSKSTRDHSLDAPAVMTGLQSLVMTAENLVIPEHALAPYVPERIIVDGDVDAAMDEISGHKDADGSENTVLIEEYIVDKKCGVSVSTEANICTPPLLSEVIDISQGHVATCDDDQVHSSTEDNMCTVHSKSEEIDVPEEHGTTCDDDHTNLSTEAGMHTTKVSEDGRISEEHTTTSDDKQIHSSDVLKSREGTFCVPRPSQEIEAEINLSCEQETDSPMSVLDMTFPDDPASPVKYTILDDSSLKPRVLHLSDTDDSADMDLNTSTSMELSTAGLGHKNVQESDSDELSSLQADPKNEDGLIYVKNIFMKSSFRNEVLFDEWCSQNITVLQEEDCQHYEAAAAAFDFTEMSADQLLLSDLTNEVLLDIYKKYSVSKSLLSRFSSFDRPKPVGNHALKELWSKVSCHLDEQPQSSIEIDTILSNDLSKNDHWVNFQRDADHLGNMLADFVFDRLLTEFTLQLAKF

SEQ ID NO: 44406 - protein, 321 aa, Oryza sativa
MCGSAARALNSVSRAAFSWKPTGLPQQTLAAAVSRSGVGLHSGAKTTATLLPARAGEGRYFVVEGEETRVAAEVANAEAHSPLCTALRRGGARVRTVEHLLSAMEALGVDNCRVEVSGGDEIPLLDGSAQEWVMAIRGAGQCAAKDSSGQKLEKLAPEIHEPVYLQKSDCFIAALPSSRIRITYGIDFPKVPGIGCQRFATVLDANVYSSKIAPARTFCIFEEVEKLRSAGLIRGGSLENATVCSISGGWLNPPLRFEDEPCRHKILDLIGDFSLLAQNGNQGFPLAHVVAYKAGHALHTDFLRHLLGRSAVGQENLAEQC

SEQ ID NO: 44407 - protein, 492 aa, Oryza sativa
MGLSSAAAGEGPQLCVFDLRRGQQEGQELDKILFFHPTDCPILLQLSVIGLCEGIITFARIFSPDDDCEVIESEKHSHVFYQAEADIWMVLVVEKNKDIESTWRCGALQGILKEVHSLFTMFHGPIRTLLDRQPSAELARGHLRTFFTDYLSDFNAGKKIQLPTFRDCLKERGTVQMLTISREVALEVQSLTTVLGSCLGNVMCQSLVLFEDLLVSTTLPPDDTLNLYTYAILRLTPRALLSNATSWSYLRKGTSVHAGPTSSSSNGTASVERPLQREKLYKGKDGFVAAGSTTSEVRGAVAWVPILWFQQAEDRMHLCVYQHKNITILLLIPASSLINGDDGIAHVKRHLLENASQNIVTLELKLSRGWGGENAYHVGGYRYLLVDPDRKVSRASPPGKVTTLSKDSLLSLNRLREEIDLEKSRAKRSDSCHDKDFEVCIRAKNNAWVIAKVTRGRELYMALEKAGETLLYASTAIEKFSNRYCEGAFSTD

SEQ ID NO: 44408 - protein, 107 aa, Oryza sativa
MEKSSGETSADKQDGDTSCSPSDGNSNNSRGSVKLASGDKKVMGSLKNLGQNMLENIQVIESAFQQDRGQPGPVENFSNNILGGKGQVTAMAALTELRKISNLLSEM

SEQ ID NO: 44409 - protein, 182 aa, Oryza sativa
MLKFYPWLQLVGWEIDPKIIELSRDYFGLSDLEKATESGGSLSVRIGDALSPSATIEGGFAGIVVDLFADGKIIPQLQEVETWLEIAKKLMPDGRIIVNCGGADAAVSLANDTGLSSWVQNSTIKALCAAFPGQLNWKRLSEKESVNYVALTGPLPNLDEWSTSVPSEMSTKVKQWVPCELA

SEQ ID NO: 44410 - protein, 91 aa, Oryza sativa
MGYWWDRVVLPVRRAWLGVAARFGVRQTGLWRLRQEVSTCEYEDVRVMWEMLSRTSTAGAGAGRAAPPARRHSRFRQPRPWTESICLCAGF

SEQ ID NO: 44411 - protein, 527 aa, Oryza sativa
MRVAAGFSPSLMGNACGGSLRSKYLSFKQTASQRHDTDDNNNAAAADSPKKPSRPPAAAKTDLYAMGRKLGQGQFGTTYLCTELSTGVDYACKSISKRKLITKEDIEDVRREIQIMHHLSGHKNVVAIKGAYEDQLYVHIVMELCAGGELFDRIIQRGHYSERKAAELTRIIVGVVEACHSLGVMHRDLKPENFLLANKDDDLSLKAIDFGLSVFFKPGQTFTDVVGSPYYVAPEVLLKHYGPEADVWTAGVILYILLSGVPPFWAETQQGIFDAVLKGFIDFDSDPWPVISESAKDLITKMLNPRPKERLTAHEVLCHPWIRDHGVAPDRPLDPAVLSRIKQFSAMNKLKKMALRVIAESLSEEEIAGLKEMFQTMDADNSGAITYDELKEGLRKYGSTLKDTEIRDLMDAADIDNSGTIDYIEFIAATLHLNKLEREEHLVAAFSYFDKDGSGYITVDELQQACKEHNMPDAFLDDVINEADQDNDGRIDYGEFVAMMTKGNMGVGRRTMRNSLNISMRDAPGAL

SEQ ID NO: 44412 - protein, 431 aa, Oryza sativa
MQPMGLRQGQEVGIDVGNGDEQAVADKRIVVWREDSDVDPTLPILTEPNDGSDSDNEYFPGDDEPSDDEEEAANIDKQYKELKKKIKAGKIADLDDIGFEGLHCFPNVQAGGDEGGNETPYEDSDSEQSIDELGSDGEVTTKKSKYPRYKKKAGVPTFELGTKFSCEKLFRKAVTAYALSERKVINFIKSDPKRVRAKCDWPSCPWVCLLSKTSRSHSWQLVTLDNLHACPPRRDNKLVTSRRIAEKYEKFIVANPGWNLSHMKAIVQEEMFADASISKLKRAKALVMHKVMDAAKGQYQKLFNYQLELLRSNPGSTVVVNREVGLDPPVIKRIYICLDALRKGFKAGCRKVIGLDGCFFKGATNGELLCAIRRDANNQMYHVAWAVVNKENNEEWDWFMDLLSRDLQVGDGEGWLFISDQQKGILNALEK

SEQ ID NO: 44413 - protein, 113 aa, Oryza sativa
MEALLSSPRALFSVTPTACWPASARRRRRVASPVKAAAAAAEPAGEEKKPATGGAAAAAGDGQAAAPAPKKILKKKPVYSSNEYALQLCISALSSEQASKPFSFLFVFLFILD

SEQ ID NO: 44414 - protein, 935 aa, Oryza sativa
MAETAIYLALRKIGIALGRERSATALEHDLEGRSALEHGLEGGSFLIRSLTRVISEIINSNDILVLRQAELQGRLRRIESELRMILCFLAQIETRYDNKQVLQSWIGEARKLGCLVEQIMDEYIVYIVQSKQYRLTKRVQVILASHRFTAQLKEIEVELEHLSKMKKRWVQVDKETSLASSSSMFGPHVNNIDTKRYAERKEELIESLKSKDMTKDGALSVIAVYGQPGSGKTHLVKDVYASEKKYFSTSAWISIAQCPNADTDALKRMMMEELGRQVGTSTESTSLRVMTENQDSKFLFVFDDVWVPDMVHKVHRAASDNKMGSRIIIIARMPEVAFVRSESSVESQSQTPSSSLEPVRPSARVPKEFMKLTCLHPNDSFDIFCTKAFGRPSDCPIELREVTLKIIGLCNFLPQAIVSIGALLSSKQKTESVWSEMAQQIEDIQKSKSSLNNVQKVLYLSYKNLPMHLKNCLLYCSTFPAGFLLLPESLVRLWAAEGFIENQGSLQVEEIGERYIKELIHWGFLQVVDVDEQGRVASCRMPIVVHELAVSISQKEEFGAICHGGKLAEMDTNVRCLFISENPEDIGALVDFPYLRTLMASRNAAANLKSLPASLTAKLKYLTVLKLQESPLEELPRGIGYQLFNLRYLGLRKSQIRCLPSSMANLYNLQTLDLRGSRINELPSWIGKLIRLRHLSADTLDGQGPDIYRAVKAPKTVNYLKELRTLETVQASDTFEKHVEKLTQLTTLSVVIGEGRSSKTLFSSLSKLSCLSSLHVSASRVDEESLDFETLNPTSLEKLVIRGGLAEQTFQYPIFKSKQIKVLELSLCKLRDDSLVLLSTNLCNLESLRLHNISGISKLVFQAINSFANLRTLLLHEIDGVDELEIPNGSLGSLQVLHVVKISQLNSIHDQERIISVRDLYFPQLWLSREKRNAS

SEQ ID NO: 44415 - protein, 540 aa, Oryza sativa
MESTPEPEDGRELYALLHLSPDASGEEIRRAYRQYAQIYHPDKYQDPQMKDVATENFQRIRDAYEILSDENKRQIYDIYGMEGLNSGLELGPKLNKPEEIKEQLERLKRRKEEEKFLAHARPTGSIIANFSVPQYLDGYGIMRGMGMSSEVQLPVSKKNTVVVGGNLVVNGTDGTGAASAVLRHQLSSVASVEFMATAGLRSLISVQTFRQISPHSTATSGLALSLRDGSINLSNAWTRQLSDNIVGNIQLALGTDSSISVGWQKKDEKNSAAGDVKLGTNYFGASAHYTRYFSTKSHGRVAGRVGSTALDFEIGGGRRISEFSTVRMIYNIGIQGVSWRFELHRAGQKLVIPVLLSTDFNALLATSVFAIPSTLYFLLQTYFVKPYCLKREKQKELEKMESLSSQLTEARRAAKKAQKLLEPVSNRKKNRQLEDDGLVITKALYGNRKKVKESSESNELNDDVASQVLDVTIPLNFLVSEAGQLKLHEGIKKSGIMGFYDPCPGDPKLLLVEYTFHGQKYKVMVDDYAALLIPQDIHQI

SEQ ID NO: 44416 - protein, 542 aa, Oryza sativa
MGNQCQNGTLGSDYHNRFPREHAVGYVQGDSYLDLKKFDDTWPEVNNFKPTAASILRRGLDPTSINVLGRKTADLREHYIIGRKLGQGQFGTTYLCTEINTGCEYACKTIPKRKLITKEDVEDVRREIQIMHHLSGHKNVVAIKDVYEDGQAVHIVMELCAGGELFDRIQEKGHYSERKAAELIRIIVSIVAMCHSLGVMHRDLKPENFLLLDKDDDLSIKAIDFGLSVFFKPGQAFTELVGSPYYVAPEVLHKRYGPESDVWSAGVILYVLLSGVPPFWAETQQGIFDAVLKGHIDFQSDPWPKISDSAKDLIRKMLSHCPSERLKAHEVLRHPWICENGVATDQALDPSVISRLKQFSAMNKLKKLALRVIAERLSEEEIAGLREMFKAVDTKNRGVITFGELREGLRRFGAEFKDTEIGDIMEAAHNDNNVTIHYEEFIAATLPLNKIEREEHLLAAFTYFDKDGSGYITVDKLQRACGEHNMEDSLLEEIISEVDQNNDGQIDYAEFVAMMQGSNVGLGWRTMESSLNVALRDAPQVH

SEQ ID NO: 44417 - protein, 55 aa, Oryza sativa
MGEGRERGDGERGGRKGVRMTCGAHVGPTIFFINLCMKLTCGSHGFYYFLDQIAT

SEQ ID NO: 44418 - protein, 368 aa, Oryza sativa
MASGGGGSVLFELHSHSNHSDGFLSPSELVERAHRNGVKVLALTDHDTMAGIPEAVSAAHRFGMRIIPGVEISALYSPKEIAGTGEHVHILAYYGMCGPSRFDDLERMLSNIRDGRYLRARNMLAKLDRLKVPIKWEHVTKIAGEGVAPGRLHIARAMVEMGHIENIRQAFNKYIGDDGPAYATGSEPFAETVVQLINRTGGISALAHPWALKNPDAVIRALKGAGLNALEVYRSDGKVDGFSELAEKYDLLKIGGSDFHGRGGKDESDIGTVKLAITTLCSFLKMARPIWCSAMKDILLKFAEEPSTTNLGKMVLFGELINFNGFSSTGSGMDIVNLCLSSWLSNNGMEEVELEEVRLKLAHCVRKR

SEQ ID NO: 44419 - protein, 941 aa, Oryza sativa
MELSGETASPAPEPEPPGQPEVSPRGAGMFEDAVEGSSTATESPVAVARPDGEATTESSSPSASRTLAGDEPAAAGAGEVEAYGGDESPSVSEPREESGSVDTGSAASPSVLRSEQRARGAEEQENSMAAQLGEGSPAREETKSRISSAPSSPVLSGTSTSSSSPLSQIKHQARHVRTGSFQRFRQQMQRAWKWGPIGSGGGGERSPREQLLRTTVNFEAMAHQKRQWYQIQSKSRDNKQYKEPTTLFEHFFVVGLHSYANVGVIEDAFAKKKAWESNVEHSEIVDLRKIQYHGPIPTMEPQILFKYPPGKKAEIREIDLPSFCFPEGVKARLIERTPSMSDLNEVVFGQEHLCRDDLSFIFSMKVSDNAPLYGVCLHVQEIVQRAPGILGMVSPLNPTSYKPSRFLVSAPRCYCLLTKVPFFELHYEMLNSIIAQERLDRITQFASEIALAEPIPRSMKEQSQVNGEDFESANELSYNDWTEYAVPVNSISGLISSSGLPSEGEIPSYLFRSWEPNSPESMSASETSDSSYIRELEKEGRHSFQQYEDCISENLGSRCDSFGRTSYTYENGHTSPDLLSTHSPISRRIMRAQSMESLHSSVKGVGSDEEEELNMKQEIVVDDEKVMGWAKVHNNEPLQIVCGYHALALPPRGGELVFHPLEHLQPVKYSRPGLSLLGLGDTISDNGLTSVEKTEVNARLAAAEEAIALSIWTTATICRALSLESVLELFAAALLEKQIVVICSNLGVLSAIVLSVMPMIRPFQWQSLLLPVLPRKLVDFLDAPVPFIAGVQHKPPDIKMKASSIVRINVDKDQVKACSLPQLPRFKELVSDLSPIHARLSCENALAKRHPIYKCNEVQAEAAWQFLNVMRSYLESLCSDLPSHTITNVQSNNDRVSLLLKDSFIDSFPSKDRPFVKLFVETQMFSVLSDSRLSTFENELT

SEQ ID NO: 44420 - protein, 483 aa, Oryza sativa
MDPRARYPPGIGNGRGGNPNYYNRGPPLQQHHHHNHHQQHQQQQQQWLRRNQIAREAAGTDRNSEPKAVAQSPAVDGIDSSSQDWKAQLKLPSQDTRYRTEDVTATKGNEFEDYFLKRELLMGIYEKGFERPSPIQEESIPIALTGSDILARAKNGTGKTAAFCIPALEKIDQEKNAIQVVILVPTRELALQTSQVCKELGKHLKIQVMVTTGGTSLKDDIIRLYQPVHLLVGTPGRILDLTKKGICILKDCSMLIMDEADKLLSPEFQPSVEQLIRYLPASRQILMFSATFPVTVKEFKDKYLPKPYVINLMDELTLKGITQFYAFVEERQKVHCLNTLFSKLQINQSIIFCNSVNRVELLAKKITELGYSCFYIHAKMLQDHRNRVFHDFRNGACRNLVCTDLFTRGIDIQAVNVVINFDFPKTAETYLHRVGRSGRFGHLGLAVNLITYEDRFNLYRIEQELGTEIKPIPPQIDQAIYCQ

SEQ ID NO: 44421 - protein, 224 aa, Oryza sativa
MQKLVVPFDMRGYQGVYNLERRIYEGAVRGLSPVQGPLPVNFPLPDPTNPLSLNPGSLQLHSSRSAALDKSPSVTAAIAGARAAATQYSRNNTAITSTPTEETRQRFSRENHADNTSGPSIVHDRSPVLQNQNLPSLALTNPPYLKNQTMPSFVQNNLPNLQNHNLSYLPHQNLSADVSNRRVSLLQNQSPSSLLQSGQSYLQNQNAEPRRSPRLQNEPPSRWH

SEQ ID NO: 44422 - protein, 262 aa, Oryza sativa
MSQPAELSREENVYMAKLAEQAERYEEMVEFMEKVAKTVDSEELTVEERNLLSVAYKNVIGARRASWRIISSIEQKEESRGNEDRCTLIKEYRGKIETELSKICDGILKLLDSHLVPSSTAPESKVFYLKMKGDYYRYLAEFKTGAERKDAAENTMVAYKAAQDIALAELPPTHPIRLGLALNFSVFYYEILNSPDRACNLAKQAFDEAISELDTLSEESYKDSTLIMQLLRDNLTLWTSDISEDAAEEFKEAPKGESGDGQ

SEQ ID NO: 44423 - protein, 270 aa, Oryza sativa; identical to SEQ ID NO: 31748

SEQ ID NO: 44424 - protein, 63 aa, Oryza sativa
MLSDQIPLCVIHAVVEVRNRDLHSPIFLIVEFHMPVDSDRAHVRSTLDKRLTGPFARAINGRL

SEQ ID NO: 44425 - protein, 388 aa, Oryza sativa
MVSDQEIASCVESVLRSSGGAAGEASLAAVLSQAEAKLGVDLAHKATFIRDQMDLFFGPRLQPPLVAKAQAAAAAAPNPPPLVAAPAPAMPQVQVQAQLQQMQQQLAVLQPQLIFQAMPQLPAGVPGGAAGAVSPQPPVPAMAFYPPPPLAFRVTGGLAGVATGGTVSFQQPAPGTGGTASPTAAVQAAGDNKESASKRKRGGPGGLNKVCAISPELQTIVGETVMSRTQIVKQLWQYIRQNNLQDPDDKRKIICNDELRVVFGTDTTDMFKMNKLLAKHITPLDPKDQIREAKKFKPSNVATQPMPLINQPSVVISDALAKFIGMEGTVPQDDALRYLWDYIKANQLEDAITGSILCDSKLQELFGCESIPSSGLSELLAHHFIKET

SEQ ID NO: 44426 - protein, 146 aa, Oryza sativa
MVLQAQGVYAQLVPTLALYDISVYYAAYSVGMGPVPWVIMSEIFSIEIKAIAGSLVTLVSWIGSFAISYSFNFLMDWNSAGTFFLFSAASLVTVLFVARLVPETKGKALEEIQESFTWQLEEDLYVERSLSSQIICISVFILLYIY

SEQ ID NO: 44427 - protein, 150 aa, Oryza sativa
MAMAQRGLGLLRRSLGLGPLSTQRALSSTSPAASAEGGAAAAAAAEVAKESKGRKKKKNLFDVVQFLPSWGVGYKVAKTTWRDVSYQITKINLYKDGRHGKAWGIRYKAGVQAAEAPTKISGVNKRGWKYIKESQKKLQDTPKVETPVTA

SEQ ID NO: 44428 - protein, 53 aa, Oryza sativa
MTYSNTTNLEHMYTQIRKTRYVTSGIKLIFYVTDGVCANDILTIKNGKKKYIY

SEQ ID NO: 44429 - protein, 577 aa, Oryza sativa
MAISYLLRSSILAVAALLLFSVNLAKGDIREYQFDVKTTNVTRLCSSKSIVTVNGQFPGPTVFAREGDLVVIRVINHSPYNMSIHWHGIRQLRSGWADGPAYITQCPIQPGGSYVYKYTITGQRGTLWWHAHISWLRATVYGPIIILPKAGVPYPFPAPDKEVPVVFGEWWKADTEAVISQATQTGGGPNVSDAFTINGLPGPLYNCSAKDTFKLKVEAGKTYMLRLINAALNDELFFSIAGHTLTVVDVDAVYVKPFTVDTLLITPGQTTNVLLTTKPSYPGATFYMLAAPYSTAMSGTFDNTTVAGILEYEDPSSHSTAAFNKNLPVLRPTLPQINDTSFVSNYTAKLRSFATAEYPANVPQQVDTRFFFTVGLGTHPCAVNGTCQGPNGSRFAAAVNNVSFVLPSTALLQSHYTGRSNGVYASNFPAMPLSPFNYTGTPPNNTNVSNGTRLVVLPYGASVELVMQGTSVLGAESHPFHLHGFNFFVVGQGFGNFDPVNDPAKYNLVDPVERNTVGVPAAGWVAIRFLVDNPGVWFMHCHLEVHVSWGLKMAWVVQDGSLPNQKILPPPSDLPKC

SEQ ID NO: 44430 - protein, 309 aa, Oryza sativa
MARPPVLSVALPSDTGRVLSIQSHTVQGYVGNKSAVFPLQLLGFDVDPINSVQFSNHTGYPTFRGQVLNGSQLWDLIEGLAENDLLHYTHLLTGYIGSVSFLTTVLQVVDKLRSVNPDLVYVCDPVLGDEGKLYVPQDLISVYQQKVVPVATMLTPNQFEVELLTGLRITCEEDGLKACNALHSAGPRKVVITSALIEDKLLLIGSHKKAKEQPPEQFKIEIPKIPAYFTGTGDLTTALLLGWSNKYPDNLERAAELAVSSLQALLRRTVEDYKRAGFDPSTSSLEIRLIQSQDEIRRPQITCKAVKYS

SEQ ID NO: 44431 - protein, 939 aa, Oryza sativa
MMLKLETRDAIDIVKLLCKRHREEAPRSLLRKPPMRCFRRPMSFNYDTPGKAYYLYRVFSNDPRLKLPSSELMPSLHQAAQVEAAAVHDHLVGIDGTANELLGWLMAADKSLRVMAIAGPAGIGKTTLAMELHRRLRCQTHFQCHVVAKLSRRPAHRSKQLLLQTILKQIMEQLEAPSSPNSSEITMLEDDPELLARNISECLKDKRYFALIDDIFDGSDLEMIKGAFPNNNCSSRILFTARDEQVSGWFLSNYNGVVHQMKPLNDSDSEKLLRTKAFSSMDGCLPDNLRLLCDEILNMCRGIPLFITSMADWLKQHQQQYGSSAVPRVEQVRLLLKQFEHLLSFDYSDELRQPSLYLSMFPQGYVFENKDHLATILEYEGFIPEWDLSPDFGKRYFSWLLNRKIIIPAAENCGLNIDEDDLCQWQVNPFILRFLASRAAEMGLVFTSSTLTLAPSGGGNTTRIARRLALHHPDPQLPAMLQQMGLSQTRSLLISGAVDRTTVPLDKFAYLVLLDLQGWENLKDEDLLQICKMFMLRYLSVRNTRVSKLPPQIKELHILGTLDVSHTTISEIPSEVWELKHLKMLDLRGTWIRHLPEKVKELTSLERLDISHTKISDLPSGVCRLPNLETLDLRGTLISQLPDQIVRIKWLRNLIVGAAGAGSGMIDSDQTVLTKIPETIHQLRYLKMLATIDLSEFSVKSVQSLGDLKQLEVLTITWSFHQCSDKDYQQALRSSIEGWWELKSMTIHCGLGCSMEFLGSLTEPPENLEKFKVIAGKFSRVPQWIERLDRLTFLQITVCKQVADDVKILAGLIKLQRLVLGLEFIPENPIVIEKEGFKELERFSLDCPVPWLTFEEEAMPKLTYLRLNLHASPASEMSVPSGINNLKELTEVTLCYNIRYINSPNIKMTTDAVSKEVAKHSNTIDLFIKWHQKRCYSVK

SEQ ID NO: 44432 - protein, 440 aa, Oryza sativa
METSPPHRKPRLPPPPPEGDPTASAVGASLESLPGELLENIVSRLSLRDAVRTSAISRSWIHRWESAPDLRHYWPRRSRPDAICAVLARYSRSVGQFCTWGIRADAFPHIDEWLPLLAAKGVQTLTLSFWDYSDVNVEYYTLHPAIFACGQLTSLHLERCFLPTAPEGFGGFPNLTLLSLVYVGLPENGERKLEAMIRMSPSLVSLELSNVEVTDDDFEDWIIQAPNLERLTITSDIDYGWQIQDLPSIQDANINIEDYSIDRDFVKLLTSLAQVGELELFIPSADGNVLEGISCSFQKLRSLTLHTNFYKASSILSTFGLLTRAPNLLHLEIEITDHENQSDEVDIDFLNALWTNSLFANLDFVSIKSATCWSNEMRFIEFVLSKARLLGEFYIYHDDTGSYSKPREEAIIELAKYKRASPKAKVFFRDMEVSSLLTIC

SEQ ID NO: 44433 - protein, 97 aa, Oryza sativa
MTMVRSIIPRTIMICQPEGFLIFKRSFAIYRKRSLIAFRRSSYTSMKCTAYALCLGWILQRQLKMCIQVYMGPTQKIQRISVIALLKVLLRPSLSSK

SEQ ID NO: 44434 - protein, 205 aa, Oryza sativa
MECMASTEESLPASSSMDSCSGELPTTTTTAPAQSTASSGCRPPATAAKRRSLISTDLRLGLTLSSVVHIDGNNPSTPRSSLTTATVTADRGGGGGGHGRRRSLFVKVYMEGVPIGRKLDLLPLDGYKGLVARLASMFRASITYHHCHRQFAVVGMKTNKVHHVLTYEDQEGDWMMAGDVPWELFLTSVKRLRIARADDKYCYSC

SEQ ID NO: 44435 - protein, 96 aa, Oryza sativa
MHDLLRRHNPCSRIHRRSSPRTVATGLATDQCLISVHGSGVFFCSSSLLGCSVHLLWISLWLQACKMELSWEAEQAATGGIKEQGGKCEGGGNWDT

SEQ ID NO: 44436 - protein, 587 aa, Oryza sativa
MGAMAMVEQEGCVENRQPLAASSSSVSDGSSYGGGGGGLAQMSPPVSSSANSISGLRRTSGPIRRAKGGWTPEEDETLRKAVEAYKGRNWKKIAECFPYRTEVQCLHRWQKVLNPELIKGPWTQEEDDQIIDLVKKYGPTKWSVIAKALPGRIGKQCRERWHNHLNPEIRKDAWTTEEEQALINAHRIYGNKWAEIAKVLPGRTDNSIKNHWNSSLRKKQDMYNTSNNMVVPKLLVHDKFKDKPKLMAMEGHLDLNKAPIINSKDQPGTAHRSNCSGFLSRSSLPTAQPLTSREASVVDGSAVTLVAQALESDSVRGKGLEIDSVHEKGLEVNSAPDHTGNSWTIQLEAAPSKGEAELSLKNEARSLGPLCYQIPNMEDVVPVSSSLFSDHLTGNHTSEHCGGDILSPAGCTTPPPTKGKLTSQLSVDSILKSAANSFPGTPSILKRRKRDKSTPVSASEMKISGSNTDRFYTPMGMEPATATPESFKTTSFLSLGSLDGSVKSFDVSPQYRARSKRMALTKTVEKQLDFSSDGLDTCGSEILNSSCNNSQSTLSITEAPKLKEKEHAVQLENLTKNFAHTTNLDVT

SEQ ID NO: 44437 - protein, 586 aa, Oryza sativa
MEALRAWRASSNLLGFAASRAAKAAPAARPLRPHVRCCSPAAASTTKPPPPPPQDRRRRSASSSSSSTSDRESIRAIRLKKVEELRGKGYEPYAYKWDRTHTTKELQDGYTHLENGEVCADVAVSIAGRIVARRAFGKLVFMTVRDDSGTIQLYCEKDSLTEEQFEQLKTIIDIGDIIGANGSIKKTEKGELSVYVKNFEILTKSLLPLPDKYHGLTDVDKRYRQRYVDMIANPEVADVFRTRAKAVSEIRKTMESFGFIEVETPVLQGAAGGAEARPFITHHNSLQRDLYLRIATELHLKRMLVGGLEKVYEIGRIFRNEGISTRHNPEFTTIEMYEAYSDYESMMNLAEEIVTRCAMATHGKLRVDYQGTEISLERPWRRETMHSLVKEATGIDFNSFGEDLESAKNAARGIKTESNENISLQACSSVGHVLNEVFETVVESSLVQPTFVLDYPVEISPLAKPHRRYAGLTERFELFICGREIGNAFSELTDPIDQRGRFENQIKQHNAKRAAMTKEVKSTEGKHEEDDFSYEVTLDEDFLTSLEYGMPPASGMGLGIDRLVMLLTNSASIRDVIAFPVLKIQQ

SEQ ID NO: 44438 - protein, 305 aa, Oryza sativa
MAAAGAVPAAKLENADALIDSVETFIFDCDGVIWKGDKLIDGVPETLDMLRSKGKRLVFVTNNSTKSRKQYGKKFETLGLNVNEEEIFASSFAAAAYLQSIDFPKDKKVYVIGEDGILKELELAGFQYLGGPSDGDKKIELKPGFYMEHDKDVGAVVVGFDRYFNYYKVQYGTLCIRENPGCLFIATNRDAVTHLTDAQEWAGGGSMVGAILGSTKQEPLVVGKPSTFMMDYLAKKFGITTSQICMVGDRLDTDILFGQNGGCKTLLVLSGVTSVQMLQSPDNSIQPDFYTNQISDFLTLKAATV

SEQ ID NO: 44439 - protein, 495 aa, Oryza sativa
MGRNHLCLVTCLWILSCAVLLHASPDGLLRISLNKKRLDKKTLDGAKLAREESHRLRADGLGDDIVPLDNYLDTQYFGEIGIGTPPQNFTVIFDTGSSNLWVPSVKCYFSIACYLHHRYKSKGSSSYKKNGESCSISYGSGSIAGFFSEDSVLVGDLAVKNQMFIETTREPSLTFIIGKFDGILGLGFPEISVGGAPPIWQGMKEQQLIEKDVFSFWLNRDPDAPTGGELIFGGVDPNHYKGSHTYVPVTRKGYWQFEMGDLLIDDYSTGFCSGGCAAIADSGTSLLGGPTTIVAQINHAIGAEGIVSMECKQVVRDYGDMILEMLIAQASPMKLCSQIGLCAFDGTRSVRNNIESVVDKEKVGSDLSCTACEMAVVWIQNQLRHNQTRELILQYADQLCERLPSPNGESAVDCDEISNMPNLSFTIANKTFTLTPEQYVVKLEQQGQTVCISGFMAFDVPPPRGPLWILGDVFMAAYHTVFDFGKNRIGFAESA

SEQ ID NO: 44440 - protein, 514 aa, Oryza sativa
MYKNQLQELAQRSCFNLPAYTCLREGPDHAPRFKAAVNFNGEQFESPGFFTTLRQAEHAAAEVALAALARRGPSYSLAARILDETGVYKNLLQEVAQRVGAPLPSYTTERSGLGHLPVFTCTVELAGITFTGDPAKNKKQAEKNAASAAWSSLRQLVRQEASSSNEPESNDEQEQIRIARALLNYRLKEKMAMANNPHASPFPKKFPMQPERRTAFPQSSHSSYSKILPLFRPKSNSRSRPESPAASDAASQTPFRPTESPNPRSRFPAAEAAPYVPVGHFRMPCHSMAPPVTVRTSIPVFSAPPLPPPGARTQQLPPLMSHPPPIRMASPVRIRPAPPLFTPSAVQGPKPMMPVQIKDVQHQQIKETRSPVMPVQVKDAQNQLLKGSLSPVIPVQIKDVQSQPPKEALSPAIPVQIKDVQLQPRNEPVSIGKGVVPLPAIRPPVKVEAPAEVKEASQPVAGSSVVQCKADTSPDSLPKTQLKTANADNADAKDDHLPVDAEEVEDIIRHLELK

SEQ ID NO: 44441 - protein, 837 aa, Oryza sativa
MDAAAARKEWRAVPDAPLRSNGADDPGEHGKMGQSEDRAMYEDGGGRLDDYCSITIDGSGGLSEDIIQQRLQSVVHQREELQRLEMELRAQVIAHPQIIEAQRSFEAAAKEHVTAAAKLKEQLHEREKYILELEMKLDDKDRELDALKIDHQTVWANQDLLREQTKELATFRRERDNSEAERAQHLKQIHDLQEHLREKESQMLALEEQHRAAQDNIIYKDEQLREAHAWMARVQEMDTLQSQTMQAELRDRTEQFNQYWISFQQQYVEMQRGFLHTIQQLQLELNELRDRTGAPKDGSQTAQESSAESTLGQNKGNNMAANGSGTTDSSQSVKSNGVPDCSTKGNSNASPVPVVPSSLLGIGGFVPSAQIAGMHSYMMHPQGVPPSLASPNSAVPQFGSFQSQSTIQPNMQWPNQQEAQNASQTPDETNYHTSPPDQKALQQAAGNNDELSLKQNQATRAEHLTATAHGKQQQQQRFPSVVSESTHEQKLQVVESNVTEHLVYNEQQKAQDSSSIVSPIRKFEHQEQTNEFKDEKVASGNQSEEQVARHQHKASDFDASTTQIHLKGGAAEFTANVGNQTDTHTSAGGGLGSLLPRIPKEPSLLDERSLLACIVRAVPAGPDGRIKISTTLPNRLGKMLAPLHWHDYKKHYGKLDDFVASHPELFVIEGDFIHLREGAQQIISATTAAAKIAAVASSAPYSLLPSVAVTPVAQSTRQKRGPVVDSRSSNVMPSRNGSTTASFGDQFDKGGHIPKPNDSVGYNIVQGIGDVTIASKVKDIQENGFSDEVRPGQSSMHAVSANGVRQERSGLPAGNTRHGYGGKQQGRSTGPAYISRR

SEQ ID NO: 44442 - protein, 283 aa, Oryza sativa
MDKVTQAVENLKEEWNQAVAQLEGCIAAIESCGKMGKGTEEASSLPRLNGSAQDALQLLNSLQCRLDPLAEQLPTFEEVQSGQATLQSWKEQYQKLRMRLRNANLQANANIKKAAQEERELLLGGGEESTIRRRNLQTKAGMTSAAESITESLRRSRQLMVQEVERSANTLATFDESTSVLRKAEGEYQGHRSLLMRTRGLLSTMQRQDVLDRIILTIGFLIFSLAVLYVVSRRIGLLTLQRKLADAIRSGSISAEDVVAKVKNVPVPAPAAPAPAPPIYDEL

SEQ ID NO: 44443 - protein, 139 aa, Oryza sativa
MPLYRRIPKLRGIAGGMHIGLPKYVPFNLRDLARGGFKDGDEISLESLKSRGLINPSGRERKLPLKILGDGDVSVKLNIKAGAFSASAKEKLEAAGCTLSLVPKRKKWLPQSYLKNQARAEEYFSKKNGGAGESDEASA

SEQ ID NO: 44444 - protein, 81 aa, Oryza sativa
MLHTRCSTKCFKELLPACGHAFAFPIWCFTESIRGLSLPSPVHLHQLLLSATKLDRINQLICNSLAATIMSFASISMSSTN

SEQ ID NO: 44445 - protein, 447 aa, Oryza sativa
MPPRQWRPMLASATKCCAAEDAVVAVDGSGGGGGLARCRPARSEFSRRLASFRKLSSMTNSPASSVAGAAEGGKDDGEEGGGGGGGVSGPLQLYSFSFSELRSITHDFSSSYLLGEGGFGAVHKGFVDAGMRPGLLPQPVAVKQLDIAGLQGHREWLAEVIFLGQFRHPHLVKLLGYCCEDEERLLVYEFMPRGSLENHLFKRISATVPWGTRLKIAIGAAKGLAFLHGASTPVIYRDFKASNILLDSEFTAKLSDFGLAKMGPEGSETHVTTRVMGTHGYAAPEYVMTGHLNIKSDVYSYGVVLLELLTGRRAMEHVRGRSLHADQVVKIVDWTRPYLGSSRRLRCIMDPRLAGHYSVKAARAVAHLAVQCTSPQPRDRPRMAAVVDALERLQGFKDMAVTVGLWPTNAPVAGRNAISAKIRAEVRGAGSGGGAASRRRSASAKLP

SEQ ID NO: 44446 - protein, 125 aa, Oryza sativa
MTASSSSSAAASSRRRPRRICAPTAASSSTSSAASLHRRPPRSGGRGEAAEVATRHATVASLDGRGNGVGGRRGYVRRLGGATARLGRMGSTSKDRGREQEVTGSSQPANLFFSPLLISSFSISF

SEQ ID NO: 44447 - protein, 580 aa, Oryza sativa
MGGGGTLVDGFRRLFHRRTASGSNQSSNAGEEAASSDLEVADDPDLVALRSIRIRVPKRKMPLPVESHKKNTVEMEFFTEYGEASQYQIQEVIGKGSYGVVAAAVDTRTGERVAIKKINDVFEHVSDATRILREIKLLRLLRHPDIVEIKHIMLPPSRREFQDIYVVFELMESDLHQVIRANDDLTPEHYQFFLYRLLRALKYIHAANVFHRDLKPKNILANSDCKLKICDFGLARASFNDAPSAIFWTDYVATRWYRAPELCGSFFSKYTPAIDIWSIGCIFAELLTGRPLFPGKNVVHQLDIITDLLGTPSSETLSRIRNEKARRYLSTMRKKHAVPFSQKFRNTDPLALRLLERLLAFDPKDRSSAEEALADPYFASLANVEREPSRHPISKLEFEFERRKLTKDDVRELIYREILEYHPQMLQEYMKGGEQISFLYPSGVDRFKRQFAHLEENYSKGERGSPLQRKHASLPRERVGVSKDGYNQQNTNDQERSADSVARTTVSPPMSQDAQQHGSAGQNGVTSTDLSSRSYLKSASISASKCVAVKDNKEPEDDYISEEMEGSVDGLSEQVSRMHS

SEQ ID NO: 44448 - protein, 948 aa, Oryza sativa
MDAYPHHRRFAVSGDAPPPPPPPQPQPPPPSHASPHWYPGPSPPPYPPHANHPFPPQHHQWGPPHPPPPLPQQPPPYGYHPSLPPMPMQPPPPAAGNPWPPHHAAAQPPPPSYPPPPPGQGWANHSWAQSHGYAGHGNEEDWATKAKAWAAAKSVTENHHIQQHAISANRPEVHNYGYQDQYQQPAGLPAEPLRPPIPQSSNDQLPFQMTGQHRETNYLPDGGPLAPPAKNFGSFPSAYEQEVSYNYPSTPGVGNAMIQYPSSQTQLPPTASAMQDGFPQAPSSMHIAPSLEQPHFGHDGQSSKIAVDPSDQPLEFNSRKAPDMAVHRTANFNSNIPAAPIAASDHDAHSAPAQSWIPSTTVLFPQASVPPQAAQMDPSVHAAPLFGAVSGSSYIPPAAFGVGNVTEAFPVDANTPFNVTERSKKPPVPNWLREELLKKKSTSVSASVQHSTEFHSKGSEDAEKTLKSSDQADSRSVDSAKSTDDDEEDEDEIEAARMAAMNQEIKRVLTEVLLKVTDDLFDEIATKVLNEDDPSAEPNEPTRVSSVKGPGLGESKPKVSAKVVVPAKPTNVSSADHSDGTGLSSPKGALLGLASYDSDDEDDEGDNEDKVPVSNLSSETKAGAARPGEGEKATDGEQHGNHNERNSVVQNASLGEDRKFNDEMSHRNSSAELKQELRVHDTHSREFPSDAKISSQPKDVAPTLDEKAHGYSQNGKVPPSGNNVENFSNMESSQGHLGKSSNEEDFVKEPKAVRRKESESSSKRYNDDDKSSMYGNIDKKGSFKEEKGSDRSVRHGADTREPRSRGNSKQDDAKGERKDYQKDVREKSRDSADRREKGKHEKEDRSRQTTKGSSSHSSRRSRSPSARSRTKKESSSHRESVSSDEPSDNSKRRKLHSCKSSMSPSPPKSRNRRVSRSPHSKHSHRRHSPYSSAERKKRSRSRTPVKRR

SEQ ID NO: 44449 - protein, 329 aa, Oryza sativa
MMASHFYGMFRQDDPAPAPAWWFQSLAFLGAAYVAGVTLRLLAYVAICLGGPKDLRRYGAWAVITGPTSGIGCAMALELARRGLNLVLVGRDPARLREISGTIRSRHGRVQTKAVVFDLSLASTPDGDQPLRRLREAVAGLDVGVVVNNASEGRPGAVYLHEADVEEWVRMARVNVSAVTEVTAAVLPGMVERGRGGAVVNLGSAASEAIPSFPLYTMYASTKRYVAQFSRSLHVEYANKGIHVQCQTPFFVETTMLAKLEEEVGLSVSPLKVSTDTYARAAVAWIGRGGPLCTPGGLLHQLMWCITAAVPESVLDWIVLRFTTWNRGR

SEQ ID NO: 44450 - protein, 608 aa, Oryza sativa
MADGVEEGNAVAPRGPARRRGTVRASLDADEFIALMHGSDPVRVELTRLENELRDKERELGEAQTEIRALRLSERAREKAVEELTDELEKMFEKLKLTESLLDSKNLEVKKINDEKKAAMAAQFAAEATLRRVHAAQKDDDMPPIEAILAPLEAELKLARQEIAKLQDDNRALDRLTKQKEAALLDAERTVEIAMAKAAMVDDLQNKNQELMKQIEICHEENKILDKLQRQKVAEVKKLSLTVKELEEAVLRGGATANVVRDYQRQVQEVNDQKKTLECELARAKVTANRVAVVVANEWKDSNDKVMPVKQWLEERRFLQGEMQQLRDKLAVAERTARSEAQLKEKYQLRLKVLEDGLRGPPSGSSRLPTEGKSFSNGPSRRLSLGGADNMSKLSPNGLLARRSPSFHSRSSLSSSSSLVLKHAKGTSKSFDGGTRSLDRSKINGNGAHLLNRSTDAVRDCETNDSWKGNADEGTIENTNSNTDESNKETANNKSAEMVSGFLYDMLQKEVISLRKACHEKDQSLKDKDDAIEMLAKKVDTLTKAMEVEAKKMRREVAAMEKEVAAMRVDKEQEVKARRLGSSKGTGSSQVLSGSRSSSRSGLTRNYQ

SEQ ID NO: 44451 - protein, 174 aa, Oryza sativa
MEWARGPAMAAAAAAAVVMVAAVLAGQAMAAGATTYTVGAPDGLWDMETDYKEWVARRTFHPGDKLTFTYSRELHDVVEVTKAGYDACSNANNISAFRSGNDLVALTAVGTRYFLCGLTGHCGSGMKIRIDVVAAASSGPAAAAAPLPSTSSVTAAVAGSRLVLVLLYALLPLW

SEQ ID NO: 44452 - protein, 826 aa, Oryza sativa
MEVEEKLIDDISGSPSSHLPVALKSTESNQPAEHAVPAEDDGDGLQSEGTAVDVVDSKKDDMEVEEKQIDISRGSSSFLPGALESAELNQPAEHTAPTEDHGNCLQSEGTAVDVPCSKEDNMEVEDQFDGISRGPSSFSPDTLESAELNQAAEHAAPTEDDGNGPQSEGTSVDVAGSKEDNIEVEEKIDDISRGSSSHLPDVLQSTPNQRAEQECLDNSDDVNTSVVSSHAPLSGPKFTCVKELEKADETLETSDAQVADEVCLQTNDGAHNMASGSCSTLEDKNEDSSAQIADCEDLLLRKGTTVDDLDGCVEGHSGLSTHSNDEVRNLVEIVKGMNDTTAGSEVHVDPESHVSDEVSMPVAPSELKVELKNQSEPACQFGAVIVEESNVSLGIQTPALAESEEMTSGGFMHGKEVCASEQTNIGAAAEPASTKDDHDMHEVDKEIVHCTISSPIGDQENLQGNIDGKMDVGLAACQTESDFVSGNDHSRETDLAGSQAPYDASDKEDTAADLIGPKQATLEIEKMQIDGIPEGPSSVPAVLQLTDSNQPAEQERLENSDSKFASTKDQGRVDGTSNLSGGDNAKCSLTNDDSQTVNLVGYSPSEDSNDDDSVQAADSDGVLGNKEGTDDVISAACTDDVSMLKTESIDRHGSDEVDHSTAPSAAIKQESGTEVTCDASVPVSESSISKEIGTSPECDDDQVATAAPHPPTPLSDATDVSADVQIPAGISEAKLEQPNETTSPSGAATEENNTVVSTQIPTLAESEDRTPADTAIQGTEVDSAEPASVSDDENKVTAADDSALPSTGPEDTADDKIDSSADASEK

SEQ ID NO: 44453 - protein, 380 aa, Oryza sativa
MKQSLQTLGMHHIMLLVKQDGVSAMMSPSSLRYYGLGLENGNYTILLQFAEVAYPDSQTWQSLGRRVFDIYIQGSLREKDFDIRKMAGGKSFIVVHRSYTATVSNNFLEIHLFWAGKGTCCIPTNGYYGPMISALSVSPNFTPTVRNGVPKRRSKVHTIAGILIGASIFGLAALFGIFMMVKKRRTMAQQKEELYNLIGRPDVFSNTELRLATDNFSSQNILGEGGYGMLYKGKLSDGRVIAVKQLSQSSHQGKSQFVAEVTTISAMQHRNLVKLHGFCIDSNTPLLVYEYLQNGSLDTALFGHSRLNLDWGTRFNIILGIASGLTYLHEESSVRIVHRDIKASNILLETDLTPKISDFGLAKLYDEKQTHVSTRIAGTL

SEQ ID NO: 44454 - protein, 43 aa, Oryza sativa
MQSGMVLSLFLMIYLYFLLHILEERICSFFYKYIICNIFGRYM

SEQ ID NO: 44455 - protein, 102 aa, Oryza sativa
MCCVDPRRPGTLQAAEELRTSVARHADRRSWPSRQSKPPAAGTSSLYTPFWSVVRSASRDSSSAMVEFTLKLHWISTLAPAQHPSPWWPLVVWLQHLSSCQR

SEQ ID NO: 44456 - protein, 171 aa, Oryza sativa
MSNTLLRVHPSELKIPYEYKRKRSCCMQLTNKTNQYVAFKVKTTNPRKYSVRHACGILPPRSSCDITVTMQAPVEMLSDYHCKDKFLVQSVAVGYGATMRDFVPELFTKAPGRVIEEFKLRVVYVAANPPSPVPEEEEEEEEDASPQSEVMSHGVKMTSVFDAVTVSNIMH

SEQ ID NO: 44457 - protein, 451 aa, Oryza sativa
MVEQKGNILMKRYEIGKLLGQGSFAKVYHGRNIKNSQSVAIKVIDKEKILKCELMDQIRREISVMNLVRHPCIVQLYEVMATKTKIYFILEYVKGGELFNKVRRGRLKEEVARKYFQQLISAIDFCHSRGVYHRDLKPENLLLDENRNLKISDFGLSALAECKRQDGLLHTTCGTPAYVAPEVINRKGYDGAKADVWACGVILYVLLAGYLPFQDKNVINMYKKICKAEFKWPSWFSSDIRKLLRRILDPNPATRISVSEIMEDPWFRVGLNSDLLNKTIPTDKVDKVVHVDMDSTFGNLSNNINEGKQEAENLTSLNAFDIISLSSGFDLSAMFEDENSKEESKFTSTNTATTITKKLEDVAKNLRLKFLKKNGGLLKMEGSKPGRKGVMSINAEIFQITPDFHLVEFTKINGDTLEYQKVKQEMRPALKDIVWAWQGEQPQPQSLNEQS

SEQ ID NO: 44458 - protein, 544 aa, Oryza sativa; identical to SEQ ID NO: 33834

SEQ ID NO: 44459 - protein, 287 aa, Oryza sativa
MQDQYINHIMNETGVTVVLRGKGSGTPVNCHAEASQQPLHLYISSMHVKNLEAAKVLAENLLDTIAAEFGASRISSSKVYGAVPPPQQLLDGVQTSGTIPDVHPTLGPNVLTGASHSFASTGANASLVAPSVTSQSGAPSYSVVSPPSNLICPSQPANGGTFYGGYGGIYPQATPLQQVALTLKHASSSSTQVVSATSTSTSTVAMVNPCSHAEADKRSQRRKFQELPVSQGATTEVQVFSLTLSEAHRVVIECEFFTGLVTSWSFHQWSLTDESLLLLNWIIACIF

SEQ ID NO: 44460 - protein, 808 aa, Oryza sativa
MSRRMARGGRARCVWPSSASASSTATSAPPHSTSTPPPSTAASATPTTSSASSPSSSTASSSSPSSSTSTSPSAPTTTETAALSPSTPSSPATPRSASSPTSRPRTSSTSTSASPPRSAAPPSSASPPPPRSAPSGSRTSSRTAAPSASPSSSSPSSPPPWSSATPASRPPSPSSPPSVASRTRRHTSTLVVWVTVGILVMLFAVQRFGTDKVGYLFAPVVLLWLLLIGGVGVYNLAAHDVGVLRAFNPKYILDYFRRNGRHGWVSLGGVLLCFTGTEALFADLGCFSIRSIQLSFAFGLVPAVLLAYAGQAAYLRVYPDHVGDAFYASTPQVLFWPTLVLALAASVVGSQAMISCAFATISHSQAMGCFPRVKVVHTSRQYQGQVYIPEINLLLGAAACVVTVAARDTVVIGEAHGICVVLVMLITTLLLTVVMVLVWRVNIGWVLVFACVFASTESVYLTSVLYKFAHGGYIPVAMSAVLMGVMGVWHYVHVRRYKYEMERTVSTERVRELVSRRELQRVPGVGLFYTDLVQGIPPVFPHLIDKIPSIHTVLLFVSVKHLPVPHVDPSERFLFRQVEPQEHKLFRCVARYGYRDRLEDARDFVANLVERLQYYVRDVNLYGAAANNKVSYPSSRCDSMGIPKSASYAERLQLQRARSVAMLHSHSQHQQQPLPQQLGQLLQYSASTGEQQRRSVYAEEMLTPAESFSEMGTMAASGRQLMAVAVKMSLEEMARIEEEQRFIQREMEKGVVFILGESEVVARPHSSLLKKLVVNYAYSFLRRNCRQGDKMLAIPRSQLLKVGMSYEI

SEQ ID NO: 44461 - protein, 645 aa, Oryza sativa
MATREVPLLLLLVVVMVLAGAGAARGFYLPGVAPRDFRKKDQLAVKVNQLSSIKTQLPYSYYSLPFCRPATIVDSAENLGEVLRGDRIENSLYVFEMREPRLCQIVCKTALTHQEAKDFREKIDDEYRINMILDNLPLVVPIRSLLDDHDAPTSYQLGVHVGIKGQYAGSNEEKHFIYNHLSFLVKYHRDENTDLARIVGFEVKPFSTKHEYDGEWKENETRLKTCDPHSRRLVVDSDSPQEVEAGKEIIFTYDVNFEESDIKWASRWDSYLLMTDDQIHWFSIVNSLMIVLFLSGMLAMIMLRTLYRDISKYNQLETQEEAQEETGWKLVHGDVFRPPARAGTLCVFVGTGVQFLGMLLVTLLFAILGLLSPSNRGGLMTAMLLVWAFMGVLAGYAAARLYRGFRGSEWKAVAMRTALAFPGAAFAVFFVLNALIWGERSSGAVPFTTMTALVLLWFGISVPLVFVGSYLGFKRPAATEDYPVRTNKIPRPIPEQPWYMNPAMSVLIGGILPFGAVFIELFFILTSIWLHQFYYIFGFLFLVFAILVVTCAEIAVVLCYFQLCSEDYEWWWRSYLTAGSSALYLFLYAAFYFFTKLDITKVVSGVLYFGYMLIASAAFFVLTGTIGFYACFWFTRLIYSSVKID

SEQ ID NO: 44462 - protein, 352 aa, Oryza sativa; identical to SEQ ID NO: 32358

SEQ ID NO: 44463 - protein, 546 aa, Oryza sativa
MERLDQHVIEMASLLAQELKHELASLNSPTTGRAGGESSPPSIMIDKVAELTRNVDKQEYEPHFVSIGPYNRSCDCKSKLARDSDKVGRLQEVLSAAAAHTTAPLQLEDFITELARMEARARKCYKLSFDHVQSKDFLRWLLLDGCYILVRFGDVVMRRRPEDEEVEEEEETTADGIVLRRVRRWFHVPSCKGFLRRRLLDACYVLVRLRDVVVGRRSKAPVAAEANRVVPSVEEREEESAVDQQEAVAVVRDVFYLAENQIPFFVVDKIHQLTFLDGQTPAVHAIARYAHELLRVNGYSVATPTKVEEPERPPEPANLLHLLHMHFTPTVLTSAATTGSRRRGGGRPVGRWRTAMEYYFAGVTFKKRPLDRRGGARCVLDVKVSGCGGGTLEMPQLTVDAETWPLLRNLMALEQSNPAAAGSHVTAYCVFMSQLACTAADVELLSRRGVIVHGLGHHGEVAKHFADLCKGAVFDADDADMNYLRPVCQVLERRFQSRPRRWMAWLKKKYFANPWLIAGLVAATVGLVYTVIQAVYSVLGYTKPGS

SEQ ID NO: 44464 - protein, 217 aa, Oryza sativa
MAAGYRAEDDYDYLFKVVLIGDSGVGKSNLLSRFTRNEFSLESKSTIGVEFATRSLQVDGKVVKAQIWDTAGQERYRAITSAYYRGAVGALLVYDVTRHSTFENVERWLKELRDHTDPNIVVMLVGNKSDLRHLVAVQTDEGKAFAERESLYFMETSALESTNVENAFAEVLTQIYRIVSKRSVEAGDDAGSGPGKGEKINIKDDVSAVKKGGCCSG

SEQ ID NO: 44465 - protein, 413 aa, Oryza sativa
MASDDLFEGLPPPAAAAAPAAGGERAPSPSPPPPPRLPALKSALKRDKLSSSDAAASSPAAAAATDAAAEGRAPEKRLRFRTTVDASETQVIDAMHKITSHIRNPSKFSKASKLALQLIEAGSVKPGTISHFFAILEAAMSSPGACNEPSVRADYQALFNAAQGVTECFNQQQKNQFDIWVLHAVVANDLFTDDSFVFSKAVGKIKDAISALPITTVDDDNDEAAALAAVESNNTDDNPQAAASNSLPDDSTHAAASNSSEESSDPFGLDGLLEHKSKKSEKAREKTVAALNRKADEDESKRFLKSQREALLKCLEIAARRYRIPWTQTAIDIFAKHAYDNMNRFTTQQRDAITKLWNSIKEQQIRRKQGKSVSGKLDVNAFEYLQEKYSHEKISIRHAVGGGGERRATQWLG

SEQ ID NO: 44466 - protein, 27 aa, Oryza sativa
MSPRAAGVVAVGEGAVLALACLSRVRW

SEQ ID NO: 44467 - protein, 480 aa, Oryza sativa
MEADPNPMVVLHACLGVGHLIPMVELAKLLLRRGLAVVIAVPTPPASTADFFSSSAPAVDRMAAANPSISFHHLPPPEYPDPDPDAFLQMLDTMRLTVPPLLAFLRSLPSVAALVLDLFCVDALDAATAAGVPAYFYYTSSAGDLAAFLHLPHHFATTEGSLKDMGKTPLRFPGVPPIPASDMPHTVLDRADRTCATRLGHYGRIPEARGILINSYEWLEARSVRALREGACIPDRPTPPVYCIGPLMAKGEEAANGERHACLSWLDAQPERSVVFLCFGSLGAVSVKQLKEIARGLENSGHRFLWVVRSPPQDPAKFFLPRPEPDLGMLLPEGFTERTRDRGMVVTSWAPQVEVLRHAATAAFVTHCGWNSVLEAASAGVPMLCWPQYAEQRMNKVLLVDGMQLGVVMDGYDEELVKAEEVEKKVRLVMEFEEGKKLRDRLTMAKEMAAKALADGGSSSLAFTEFLKDLNFGNTTKEKA

SEQ ID NO: 44468 - protein, 204 aa, Oryza sativa
MIGWGDVYKVVAATVPLYFALFLGYGSVRWWRIFTREQCDAVNRLVAFFALPFFTFEFTLHTDPFQVNYRAVAADVISKAVIVAVIGAWARFMSKGGCAVSWSITSFSLSTLTNSLVVGVPMARAMYGEWAHGSSSSSPSSRPLSGSRCCSSCSRSGRSPSGCTSTAPRRRRRPARTSRPPAPPPPQARSSSPPPRASRRCGRW

SEQ ID NO: 44469 - protein, 96 aa, Oryza sativa
MPAVVKVMKTDSTLITLIKPQFEARRSQVGGGGIVRDPLVHKEVLDRIISGVEQFGFCNKGWIESPIKGAEGNKEFLACFHRIPVQELQPEEAKST

SEQ ID NO: 44470 - protein, 610 aa, Oryza sativa
MGLSISYPPDDYLPTEEDTDQMFVRSLSSDNLSTIETFESPPALLDSLSSQRPIIKESFNFKKSEGDPFHVETTVSLMSPKPGKEKSCTHKRTILPRYGSMEYLPPHSPVVGMISPKHQAAAVRVQKVYKSFRTRRQLADCAVLVEQRWWKLIDFALLKHNSVSFFEEEKPESALSRWSRARTKAAKVGKGLSKDEKAQKLALQHWLEAIDPRHRYGHNLHYYYQHWLHCESKQPFFYWLDVGEGKDVSMEDHCPRWKLLQQCIRYLGPKEREFYEVVIENKKLLYKMSRKIVDTSEGPKNSKWIFVLSTTRVLYIGTKSKGTFQHSSFLAGGATSAAGRLVVDNGILKAVWPHSGHYRPTEANFREFMMYLKKRNVDLANIKLSPSEDEEDECLRSRSGRSQLEPTEPGKPEKEEDATADDNGTTTVAAQAAPPSTTGGEPATPVMKRSSSGNRLQRKRPPRLTLDKSRLAKGVAEQDAGSFGDRLDFCKVNLFRGGEEAEEAVVVPQEKILRRLNSRMTMNSYQLGKQLSLRWTTGAGPRIGCVRDYPPELQFRVMEQISLTPRGGAGPLRLGSTATPRQSPCAPLPSPAPLYAAAGTPTSLLQHGAA

SEQ ID NO: 44471 - protein, 807 aa, Oryza sativa
MKGGSSATAASGGGGNSLAIVERQKPATSCVASLFQMLAKKKLFSSSSKKTKLLPPVRTQKFSPGRPPAGGEKTPAAKMRTLLLDAPYYPNEVTTRLPPPGQDNKSSEMCTPGVVARLMGLSAMPATSHQKAVKTMDASELGGHRSECSYGSIYNSHQRQQKPGHIRDGRHDNGNQLDADAQPVWSRKHAAHKLASPIKSPRSVSSRNKVRLIEAAVKVLEPGLQSRHHHQARRQARLEYRCNSSDVQSAAEAMHDFSDQFAREMCDVDASRSGAQNVGATSLHNSTSNQWSEEDTMRNVSVRRPNQNISCQAQSEGNHKGQRNGFKDSGQRTSDDVLVSSQGVQKIQPKNISRENVDCRPLKQNNLKQNALPETYRAADTGHMVQRQKHRAKEQNVANTANDFVCSNRGMNNSASLRSKGKVKDKIGMPHGSAENRNLSTKCHRTSGLHGDCSNKQISKTATLKATEKDMIIAKGAGLVSEKPKSTSPNSVRNDSRRKVESRIASRGNNSGIISISSNSPRKAVLALLNGHTKGSDSVVLGSPTGSCPKRDYRRDCQNISSERELVLSEALQGISSLESAESVCFNRNELRNREILDDRVMSSLFRKTSAINVMEESPSDEFLWQCNFLDSLTFGFREVPRSGKLRETHKKHEVTTNASDPSYYADDECFSGSLLKTAASEAGFRDRRRSENCTMQQDGTNKRNSRCSETNFGQDSSNLIHPGEVAATVELLLTNVRRSTSTTPPRRRRRRRRTGSASTPASSRPQKGRRAGARWEASRSIPSWSAWTRCSPSSATQDTGRSRGFP

SEQ ID NO: 44472 - protein, 138 aa, Oryza sativa
MFTHHQKIVVVDHELPNQGSQQRRIVSFVGGLDLCDGRYDTQYHSLFRTLDSTHHDDFHQPNFATASIKKGGPREPWHDIHSRLEGPIAWDVLYNFEQRWRKQGGKDLLLQLRDLSDTIIPPSPVMFPEDRNMECSAI

SEQ ID NO: 44473 - protein, 455 aa, Oryza sativa
MANPRPPYVLLERVVFFGGRELPDGTWKDAAGIVIGWSRARLLSRREAMEAMEPHPFLADPPQVSSLRMMSPTPAHAQQLGSIRDGDIASTHKGIVVIYAGFYRPGCSDDLGGCYLLYDAPTNALTAIPPLPDSPRFPTLLHLGRTAVLVDASRSADDYILADIVTNSGLGLPEATIFAWSSLTMEKSGGGWVKSSIPRLPLPAHLCGPKHLFQIDLAFSLDSGRICWVDLLQGILFCDRILAPDGPKLGFIPLPTGYCIDVHHRLRHQMMPLARRSMACVSGAVKFVALVGLEDIHCPPNEVMLKTWVLSPDFKEWKEDSRSLSVEEMWASESFKQMGLPCVVPVSPVLSLTQDGVMYTILNVIEQVPAQVDEFGIVVVDDDLVPIANYMIRFDIRRNKVLSSTKISQHGELQWLIPNLIATDFTAYLQDHQRAEEAGKVGASAKGKRKQMEYY

SEQ ID NO: 44474 - protein, 928 aa, Oryza sativa
MAPAVSASQGVIMRSLTSKLDSLLLQPPEPPPPAQPSSLRKGERKKILLLRGDLRHLLDDYYLLVEPPSDTAPPPDSTAACWAKEVRELSYDVDDFLDELTTQLLHHRGGGDGSSTAGAKKMISSMIARLRGELNRRRWIADEVTLFSARVKEAIRRQESYHLGRRTSSSRPREEVDDDDREDSAGNERRRFLSLTFGMDDAAVHGQLVGRDISMQKLVRWLADGEPKLKVASIVGSGGVGKTTLATEFYRLHGRRLDAPFDCRAFVRTPRKPDMTKILTDMLSQLRPQHQHQSSDVWEVDRLLETIRTHLQDKRYFIIIEDLWASSMWDIVSRGLPDNNSCSRILITTEIEPVALACCGYNSEHIIKIDPLGDDVSSQLFFSGVVGQGNEFPGHLTEVSHDMIKKCGGLPLAITITARHFKSQLLDGMQQWNHIQKSLTTSNLKKNPTLQGMRQVLNLIYNNLPHCLKACLLYLSIYKEDYIIRKANLVRQWMAEGFINSIENKVMEEVAGNYFDELVGRGLVQPVDVNCKNEVLSCVVHHMVLNFIRCKSIEENFSITLDHSQTTVRHADKVRRLSLHFSNAHDTTPLAGLRLSQVRSMAFFGQVKCMPSIADYRLLRVLILCFWADQEKTSYDLTSISELLQLRYLKITGNITVKLPEKIQGLQHLQTLEADARATAVLLDIVHTQCLLHLRLVLLDLLPHCHRYIFTSIPKWTGKLNNLRILNIAVMQISQDDLDTLKGLGSLTALSLLVRTAPAQRIVAANEGFGSLKYFMFVCTAPCMTFVEGAMPSVQRLNLRFNANEFKQSDSKETGLEHLVALAEISARIGGTDDDESNKTEVESALRTAIRKHPTPSTLMVDIQWVDWIFGAEGRDLDEDLAQQDDHGYGFFILFPGYNLQGLLSFFLSLPWLLSLPSMHLQPDLMIV

SEQ ID NO: 44475 - protein, 1097 aa, Oryza sativa
MSMESAAATAFLKTVMGRLFMALEKEYNKHRGLAQESHSLQQDLRMIAAAMDDQQLSMGRSDAAARTAVARLYTEEMLDLAHDIEDCVDRFLHRLTCNHHKRGGAGAGASLLRRVTHELSKVKSRSSFGDEIQKLKKRLREAHQRVLTINPPPILIAGGSSSSAAVAPPCRAARSPVGIGEDVEELLSMLDEVEGEPVQMRVISVVGFGGLGKTTLAKAVYDEPRAKDKFRHRAWVAAGGSPEIRGILRDVLQQVRPDDAMDVDGQRLEASFKDYLKDKRYLIVIDDIGMDQWSIIRSAFEDNGTSSRIILTTTIQSVANMWADPEMGQGPGRSMEISAQRKVYMVKGGPIDFFLVKKHTSLMGLPSQAPGRGPACPGSGSAPCSHGSGYVYQMNTLGEDDSKKLAFPGFRSPELEQGSASLLGKCDGLPLALVSVSDYLKSSSEPTGELCAKLCRTLGSHLKEKHGHDNFSELRKVLLDNYDSLSGYALSCLLYLGIFPSNRPLKKKVVIRRWLAEGYARSDSLRSEEDIADENFSKLIDRHIIQPIDTRNNSEVKTCKTHGIMHEFLLNKSLTQRFIATSSHDHPRLGINTTNARHLSVHAGELRECVTSDEELSRVRSLTIFGDASDAISYFRKCKLIRILDLQEWNNLDDDHLKHICKLWHLKYLSFGGNISELPRSIEGLHCLETLDLRRTEIKFLPIEAIMLPHLAHLFGKFMLQCLETLDLRRTEIKFLPIEAIMLPHLAHLFGKFMLHKDDLKNVNKSKLQKFFSSNKSNLRTLAGFITDEGKGFLQLVGHMKKLRKVKVWCKHVAGSSNYIADLSRAIQEFTRTPIDRDSDRSLSLDCEECSENFLSSIDLEPCSEDSKYHLRSLKLHGKLLRLPPFVTSLSGLTELCISSAILTQDHLSALIKLNRLLYLKLIADKLENIEIKIGAFPSLRRLCFVMKIMTSALTTIEQGALSNLVSLQLLCQGLVGLSGIEIRHLKHLKEITIDSAVTVQTRQDWEQAAKNHPNRPRVLLFRKVDPMESEEPEKPCAIGEKRKLSVAQPTGSDGGLDSSLKKMRLSEPSSSRLQVIVHPVVVTATEAAPQHSFANL

SEQ ID NO: 44476 - protein, 222 aa, Oryza sativa
MLVVAAGRGCSFLFLVSSGLRGTHQLSQARGLGRLRSAPGSPARPAARGADQLGLGWVGLDLGAGQCELCCCCCCAGGMRWCGLRLLPLVCLLVIAAAAEEDKTNILQADKNNDNNIAHSDGGKTGRHDETNPNTVHHDEGKNDPDGNNKKDKSTEVISTAKYAAAVHHVDKDINTAKSSHVTDFSQDPLIKGCDPSHTCVIENKKFIACLKVPGEGDFLGN

SEQ ID NO: 44477 - protein, 326 aa, Oryza sativa
MPKDRSTRAMSYERRRSRVSPYPSNGKGCARRSEESAAAAAAAAAKQAAEWEDVRCPVCMDHPHNAVLLVCSSHEKGCRPFMCDTSYRHSNCFDQYRKASKESSKDSGASAAAAPECSECQQPIKLSCPLCRGPVSHWTKDYDARKYLNVKVRACTKESCEFRGAYGQLRRHARENHPTVRPTQVDPERQRDWHRMEQQRDLGDLFSMLRSGLSAREDGIGVSEGEEDISERALHSPSITMVFIVRTGRSILHYREAFPGHHRRRTILLLGEAFGRESSPLGGASGSGDGDTTARENDEGDDDVTLSTEASAGSQHDGEVDGDPAH

SEQ ID NO: 44478 - protein, 256 aa, Oryza sativa
MDGGYGSVTIVHDARSPEDVFQDFCGRRSGIVKALTIEVEKFYKQCDPEKENLCLYGLPNGTWAVTLPADEVPPELPEPALGINFARDGMQEKDWLSLIAVHSDSWLLSVAFYFGARFGFDKKARERLFMMTSSLPTVFEVVSGGVNTQSKTANGSSKNKSGSKPPKRPNSDSKPQKQVQAKYEGENGGRGNGGDEDQAETICGACGEAYANGEFWICCDICETWFHGKCVRITPAKAEHIKHYKCPGCSNKRTRE

SEQ ID NO: 44479 - protein, 341 aa, Oryza sativa
MATIVDDKYSAALSIILGSLAVAIADVVVDSMVVERARGEPQSTSGSLQSLCWGSSAIGGVMSAYFSGSLVDTYGVRFVFGVTAFLPLMTSTVAVLVNEKRLPLGENATSSSDSGLIESSKEHIMQIWSSVKQPNIFLPTLFIFLWQATPQSDSAMFFFITNKLGFTPEFLGRVTLVTSIASLVGIGVYNSFLKEVPLRKIFFVTTIFGSALGMTQVLLVTGLNRVLGISDEWFSIGDSLIITVLGQASFMPVLVLAAKLCPPGVEATLFATLMSISNAGGVTGGLLGAGLTQFLGVTKDNFQNLALLIVVCNLSSLLPLPLLGLLPDESPGVDNEQTKVD

SEQ ID NO: 44480 - protein, 383 aa, Oryza sativa
MGKGEVATRSKSQKSSATQNEQSTPTNPPTAYPDWSQFQAYYNPAGTAPMTPPGFFHPNVAPSPQGHPYMWGPQMMPPYGTPPPYAAMYAQGTPYQQAPMLPGSHPYNPYPGQSPNGTVQTPTSAGGTETDKSGKSKRKTPLKRSKGSLGNLDVVATKNKKAPAKPSASSSNEGSSHSESGSGSSSEGSSTNSKSGSRTKDGSEHGQGNDASNKGATAQSSAVEPVQASTGPVVLNPMMPYWPVPPPMAGPATGVNMGMDYWGTPTSVPMHNKVIAAPASAPSSNSRDVVLSDPAIQDERELKRQKRKQSNRESARRSRLRKQAEWEEVANRADLLKQENSSLKEELKQLQEKCNSLTSENTTLHEKLKELEGEKSNGNWYKE

SEQ ID NO: 44481 - protein, 183 aa, Oryza sativa
MIIPKKNRNEICKYLFQEGVLYAKKDYNLAKHPQIDVPNLQVIKLMQSFKSKEYVRETFSWQYYYWYLTNDGIEHLRNYLNLPSEIVPATLKKSARPPGRPFGSGPPGDRPRGPPRFEGDRPRFGDRDGYRGGPRGAPGDFGGEKGGAPAEFQPSFRSSGGRPGFGRGGGGGFGAGPTSSSME

SEQ ID NO: 44482 - protein, 343 aa, Oryza sativa
MAVTTRFLLGALNGLLAPIKAYSIEVCRAEHQALGLSIVSTAWGIGLVVGPAIGGYLAQPVKQYPHLFHEKSIFGRFPYLLPCLCISLFALLVLISCIWLPETLHKHKGLETGVEAAEASTTQGSAESHKKSLFRNWPLMSSIITYCVFSLHDTAYSEIFSLWTVSDRKYGGLSFSSKDVGQVLAVAGASLLVYQLFIYRWVDKILGPINSTRIASVLSIPIIAAYPFMTHLSGIRLGVALYSAAMIKSVLAITIITGTSLLQNKAVPQGQRGAANGIATTAMSLFKAVAPAGAGVLFSWAQKRQHAAFFPGDQMVFLLLNLTEVIGLMLTFKPFLAVPQQYK

SEQ ID NO: 44483 - protein, 988 aa, Oryza sativa
MASFPSPPLAAAAAAAPPRLAPGLPLAAAAVRRPSSLARRSSIALAAPANPLRCIHRRAVSPRLRRRTEAVGAASAAIGSLGEEREGCLSCFPRGRRRGRPGLARFAPCALPHTYGLSSLHSGLTGAKIRRRHVLHAAGPDEPHVASPFGAMASLFAPKLPGGLAASLTGERSPAADKIKPVKRERQAIRPPVEHKWSLPGVAQDAKPPAIFQHELIQSFSINMFCKIPVNQVQTYKDLRSVLMKRIFLSALHFRINTRYKSSNPPFTSVELDHSDSGREGCTVTTLTVTAEPQNWRSAIKVAVHEVRRLKEFGVTMGEMTRYMDALIKDSEQLAMMIDSVPSVDNLDFIMESDALRHTVMDQLQGHESLLAVAETVTLEEVNTVGAEVLEFISDYGKPDAPLPAAIVACVPKKVHMDGVGETDFEIHPEEITDSIKAGLEEPIYPEPELEVPKELITRSELEDLKLQRKPSFASLSKEENVVKIFDDETGIAQRRLSNGISINYKITQNEARVGVMRLIVGGGRATEDSESKGSVIVGVRTLSEGGCVGNFSREQVELFCVNNLINCSLESNEEFIFMEFRFALRDNGMRAAFQLLHMVLEHNVWLEDAFDRATQLYLSYYRSIPKSLERSTAHKLMLAMLNHDERFVEPSPHSLQKLTLQSVKDAVMNQFVGDNMEVSIVGDFTEEEVESCVLDYLGTVSAPKSSKTQEHIEKISFLPFPSDLHFQQVYIKDTDERACAYIAGPAPNRWGFATEGNDLFNVIRSSSGDAQVSESANTDLTERKHNDVRSHSLFFGITLSLLAEIINSRLFTTVRDSMGLTYDVSFELNLFDKLDLGWYVIAVTSTPSKVHKAVDACKGVLRGLHSNKIVERELDRAKRTLLMKHEAETKTNAYWLGLLAHLQSSSVPRKEISCIKELTMLYESATIEDLYLAYEHLKVDESSLFACIGIAGAESGEETTDDELDMGLHGMGPIGGRGLSTMTRPTT

SEQ ID NO: 44484 - protein, 393 aa, Oryza sativa
MARPLPNQAVARTSATSLRHFPGHSKPSLPLSAPALRKAAAALLLAAAVALPCAVLYRAAVLDAVQPVQVGWDRGPWWERGQPPPAVVVPEEDGDVDPAAADDLDSDDLKLEQVLQEASMDNKTIILTTLNAAWASSGSVIDLFIDSFRRGVRTSSLLRHLVIITFDWKAYKRCMKIHAYCFALATENMDFSQEKRFLTAGYLDMMWKRLDFLRLVLEKGYSFIFSDADITWFRNPFPHFYPDGDFQIACDHYVGNATDLGNIANGGFNYVRSNNQSIEFYKFWYSSRLRYPGYHDQDVFNFIKHDPYITDIGLKIKFLSTTYFGGICEPSRDLNKVCTMHANCCIGLQSKLHDLRVIMEDWRNYMSMPPSLKRFGALSWGVPQNCSLSLLNQ

SEQ ID NO: 44485 - protein, 67 aa, Oryza sativa
MPHPAPRSRTTPPSKPRPPRAHPHRGAPAFVPTFDGRLHPLLQVERYTRSRSSVCDPRLLLLGRHCG

SEQ ID NO: 44486 - protein, 628 aa, Oryza sativa
MAAPPLSSWPWASLGSYKYVLYGAVVWKVAEEWRQQGAAPVGSWWLHLLLLFAARGLTYQFWFSYGNMLFFTRRRRVVPDSVDFRQVDAEWDWDNFLLLQTLIGATLVGSPAVARQQLLLPSLKQAWDPRGWAIALLLHVLVAEPLFYWAHRALHRAPLFSRYHAAHHHASVTTPLTAGFGTPLESLLLTVVIGVPLAGAFLMGVGSVGLVYGHVLLFDFLRSMGYSNVEVISPRVFQAVPLLRYLIYTPTYLSLHHREKDSNFCLFMPIFDLLGGTLNHKSWELQKEVYLGKNDQAPDFVFLAHVVDIMASMHVPFVLRSCSSTPFANHFVLLPFWPVAFGFMLLMWCCSKTFLVSSYRLRGNLHQMWTVPRYGFQYFIPAAKKGINEQIELAILRADRMGVKVLSLAALNKNEALNGGGTLFVNKHPELRVRVVHGNTLTAAVILNEIPSNVKDVFLTGATSKLGRAIALYLCRKKIRVLMLTLSSERFLKIQREAPAEFQQYLVQVTKYQPAQNCKTWLVGKWLSPREQRWAPAGTHFHQFVVPPIIGFRRDCTYGKLAAMRLPKDVQGLGYCEYTMERGVVHACHAGGVVHFLEGWEHHEVGAIDVDRIDVVWKAALKHGLTPA

SEQ ID NO: 44487 - protein, 364 aa, Oryza sativa; identical to SEQ ID NO: 31199

SEQ ID NO: 44488 - protein, 315 aa, Oryza sativa
MLALVDDVGENFNWGPNQYIGFWKLGDVSTQSKVEITTDSQLLDWLDKGNQHGVVNIHAIVNDFGGPLQVEPSPTKRRCHPSVRYSIPFTPPLFTDLLVDATPLTLPESYNHLENSIQPVPSTQNESTTHPESTSHPDDEATSPIKKSAKKVVKKCAKRRSQDDDDDEEVWDDEKEENEEEEPQLCPNCDPLEVDSDSSYDSDAAASSDSEYDCDDLDDQIHDDDDNDSDLEHVFAYDFDNPCIDEGEVFADTTTCKEAVTHHAIIHDYSFETEKKDKQSVVEMTTAYVERRGLISDLFYQMAMEGLWLYMHLSK

SEQ ID NO: 44489 - protein, 969 aa, Oryza sativa
MEPGVSIESGSAIRVAVLPVGGPISPARLRDYAALVARHARVDLASLRPYYSEHQKSPFAHQPWGGGCLRLKFVLGGCVPSPWEDFQSSRKVLAVVGICHLPSFPDLGRVAADFVDAARSYPSALASRCFAFCPTDAQLVQKKRDNIIMFPPSDQQSLELHMLTMIQDLSASLLMEFEKWVLRAESTGTILKTPLDSQSSLGSEEVIKAKKRRLGRAQKIIGDYCLLAGSPADANAHYATAIELARLTGDVFWHAGALEGSVCALVVDRMAESDPVLEDEVKFRYYTIIQLYRRATLQDNAQRVSPVSFELEAALKLARYLCRRQCAKEVSDLLMGAADGAKALIDASDRLILYIEIARLFGTLGYKRKAAFFSRQVAQLYLQQDNAYAAMSAMQVLTTTTTAYHVQSRKTSKMDHGLLKSVVSLFESQWSTLQMVVLREILMSSIRAADPLSSWSAAARLLRSFYPLITPAGQSGLASSLSNSADKLPSGTRCADPCLPFIRLHSFPLHPSQREIVKRNPNKKEWWTGGGPSGPFIYTPFTKGGTSGTSKQEVNWIVGEPVQVMVELANPCSFDLIVESIYLSVHSGNFDAFPVSVNLPPNTSKLVLLSGIPTQVGQVSIPGCIVHCFGVITEHLFKEVDCLLLGAAQGLVLSDPFRCCGSSKFKSVNFPSISVVPPLPLLVANVVGGDGSILLYEGEIRDVLITLTNAGTVPVEEANVALSGKNQDSVISIAHSTWKSALPIKPGGEVTFAVTLRAWHLSPTDLEADGSRSPANSRRIAREGSNPFLDIHYAGPSGNSESNDVSLPPGRRLVVPLNICVVQGMRLVRARLLSMELPARFTDAHLRSVSSKDNLSNGSDAIRNDISLLKIDPYKGSWDLRLLELELFNPTDVVFDVDVSVHLDGTSVEQKILPEDKTASSACHKTRIDRDYSARVLIPLEHFKLPVLDTSFFVKENGSDEPLGSELPR

SEQ ID NO: 44490 - protein, 762 aa, Oryza sativa
MDHDRSRRHKSNTSRKRPHFNSDDGKRKRLNSRHDDGTISSEPIETIYRILCPVKKIGSVLGRGGDIVKALRDTTKAKIRVADSIPGADERVIIIFNYSSQTEEAAQNISTDGFEDMKPHCFAQDALLKIHDKIAADEDLHAGIVHEKSENVDDVIARILVPGNQVGCLLGKGGSIIQQLRNDTGAGIRVLPSENLPQCALKSDELVQISGSSSLVRKALYEISTRLHQHPRKDNPPLEEIIDASTQRKHQAPPQLPHANPMLPHLHVDHSPQIPLLDPYRNRPLQYHSAEAEEFSIKILCASEHIGQVIGKSGGNVRQVEQQTGACVQVKEVGKNASEERLIVVSSQEIPDDPVSPTIEALILLHSKVSTLAENHHLTTRLVVPSNKVGCIIGEGGKVITEMRRRTGAEIRVYSKADKPKYLSFDEELVQVAGLPAIARGALTEIASRLRTRTLRDGSSSNNPTPFAPFDGPPVDILPNREFMLYGRSANSPPYGGPPNDPPYGRPAIDPPYGRPAIDPPYGRPAIDPPYRRPANDTSYGGLNNDGPRDPYTAYPVEYFSKREYPSGNSKVTPSASYDRYAATTRLPNRELPSSISPGADYMSRRSYLDQVPTDRYSSRGTLQLGLSRAGNSNVQQLGITRAGNSNAYDYTEAAEQIHGREDYRRLSGLTGYPGGSVEFRIPNSYLESVIGAGGVNLAEIRQISGARVKLHEAHPGSSESIVEIQGIPDQVKAAQSLLQGFIGASSNSRQAPQSSRMAHYF

SEQ ID NO: 44491 - protein, 462 aa, Oryza sativa
MAHLAASAAPLPSADPDAGEESSHSPPPPEKGLRKVVVVMGATGAGKSRLAVDLASHFAGVEVVSADSMQVYGGLDVLTNKVPLHEQKGVPHHLLSVIDPSVEFTCRDFRDHAVPIIEGILDRGGLPVIVGGTNFYIQALVSPFLFDDMAQDIEGLTLNDHLDEIGLDNDDEAGLYEHLKKIDPVAAQRIHPNNHRKIKRYLELYESTGALPSDLFQGQATEKWGRPSNSRFDCCFLWLDADLHVLDRYVNERVDCMIDDGLLDEVCNIYDREATYTQGLRQAIGVHEFDEFFRFYFARKETGEIKMDSCTTMAGLHDDNLKGLLDEAVSQLKANTRRLVRRQRRRLHRLNKYFEWNLRHIDATEAFYGATADSWNMKVVKPCVDIVRDFLSDDTILASRDGSSVTGSPRMSSRELWTQYVCEACDNRVLRGTHEWEQHKQGRCHRKRVQRLKQKASTVISL

SEQ ID NO: 44492 - protein, 549 aa, Oryza sativa
MLAMDQKTYELIGPDYPGNRAIDVMNPSLGWMIGFMFVVSFLGLFSLVALRKVMVIDYKLTYPSGTATAMLINSFHTTSGAELAEKQVSCLGKYLSISFFWNCFKWFFSGVGDSCGFDNFPSLGLAAFKNTFYFDFSPTYIGCGLICPHIVNCSTLLGAIISWGFLWPYISTKAGDWYPANLGSNDFKGLYGYKVFISVSVILGDGLYNLIKIIYATIKEVMNARSKQGRLPLVRVHDDDEGSKLSAEEKLRNDTFLKDRIPSWLAGSGYVGLAAISTATVPMIFPQVKWYLVLCAYVVAPLLAFCNSYGCGLTDWNLASTYGKIGLFIFASLVGRSGGVIAGLAACGVMMSIVSTAADLMQDFRTGYLTLSSPRSMFVSQLIGTTLGCIIAPLTFWLYWTAFDIGNPDGMFKAPYAVIYREMSILGVEGFSALPQHCLAICSVFFVAAILFNLLRDVTPKSVSKFIPLPMAMAVPFYIGAYFAIDMFVGTVILFVWERVNRKESEDFAGAIASGLICGDGIWSVPSAILSIMRIDPPMCMYFKPSLTS

SEQ ID NO: 44493 - protein, 251 aa, Oryza sativa
MVFRGLCVGLGEFLTFAAVILMVFANIGQLTNNIVTRNIRYVSVDASNLGNALASTNTATNDLYAANPAAPVAQGNGIRQSYQWGLYNYCAGQPSGDSRACSDKSFGFEWQPVDALLNDAPQDARNGIQNFLPEATFRDSKYLGDYSKPAMYLIFIGSCLALLSWISGLLSHRFAFLGAAFIALLAALTLGVGAALLTAIYTKARDSVGVQYGVVVHYGNALWMTWGAFVACVLAIVPYILSCCTGRSDDY

SEQ ID NO: 44494 - protein, 59 aa, Oryza sativa
MHGLGISIHGVTISLLYFCVGTGECGVAVVAFFKSNPPWNQTPHLLATAQKLVRWFSPM

SEQ ID NO: 44495 - protein, 456 aa, Oryza sativa
MDVPLVPVPTTAADDDAAAGSPSPSPEMEMEEDGGGGKVVYVAVSGNRNKALPTLRWALRRHAPAPEGRKKTALLVLVYVHRPATMIPIFTGAKVPSIVLKDEIVTSYRQQERRITEKFLQQYLDICTSEKVQAEAFMIANDNIAHGLIGAIQEHKISTLIMGAGIYGKTSTQRTKLAITMEKEADPSCKILFVHKGNLFSIRPRTTSIPISVNSGVPTMAGSHIPWFSFIPPWHHDDRSSVTSSSFLTDSQTMTDNGLDPENLDHQFFENAMPMFDYDSFSLIRHESLHGLNEIASQIILSGHSQYLRQLNFDVSCNEEVRNRQFIHGIDSILGVDSMNLEEVYWKAYMEDKTIKWIYLLEYIHKIVSVSLKQIQEQHDGASSGLTLEGLSDAATKPINRLLTFASTVSKVNGSPEKLFHTLQMHKALSGASPMIQQALLGEQKEFFRQRASQNS

SEQ ID NO: 44496 - protein, 403 aa, Oryza sativa
MLSVSCPRVYMSRKALDFGQLASCRCRWAGRSGMRVAPRRRMPCVCFVASPSQPGLAAVDVPAEAISSARTTTMIPERISVSSLLEVVSDDLLKLNNNLKSLVGAENPVLVSAAEQIFGAGGKRLRPALVFLVSRATAELAGLLELTTEHQRLAEIIEMIHTASLIHDDVIDDSGMRRGKETIHQLYGTRVAVLAGDFMFAQSSWFLANLENIEVIKLISQVIKDFASGEIKQASTLFDCDVTLDDYLLKSYYKTASLLASSTRSAAIFSGVSTTICEQMYEYGRNLGLSFQVVDDILDFTQSAEQLGKPAGSDLAKGNLTAPVIFALQDEPKLREIIDSEFSESDSLATAIDLVHRSGGIRRAQELAKEKGDLALQNLQCLPKSQFRSTLENVVKYNLQRID

SEQ ID NO: 44497 - protein, 283 aa, Oryza sativa
MVVVTAAAPPLGIALVGPTRARRGGGLSLSSSSCCYLSMCGRGVLRGGCARMREPLPPAPIGLDRFLCGYMRRDGHEDGERSQGIEDSLMFGPDDDNGSNIPTQVETLVRGTATVATPEYKSIPDLDYLQELLAIQQQGPRAIGFFGTRNMGFMHQQLIEILSYAMVITKNHIFTSGASGTNAAVIRGALRAEKPELLTVILPQSLKKQPPESQELLSKVQNLIEKPQYDHLPLIEASRLCNMDIISKVQQVICFAFHDSKLLMETCQEAKNFRKIVTLFYLD

SEQ ID NO: 44498 - protein, 491 aa, Oryza sativa
MDAAVVAIAGDGDADAGHRRPLLASADDDDEIRPYPASSPSPQHPAGAERKPRRVASLDVFRGLTVAMMILVDDAGGAWPGMNHSPWLGVTVADFVMPAFLFIIGVSAALVFKKTPNKTVATKKAAIRAIKLFILGVILQGGYIHGRHNLTYGIDLDHIRWLGVLQRIAIGYFLAAISEIWLVNNISVDSAISFVKKYFMEWIVAVMISALYVGLLLGLYVSNWEFKVQTSNSILTIPTPGNEIGMKMIQCGVRGSLGPPCNAVGFVDRVLLGENHLYKNPVYKRTKECSVNSPDYGPLPPNAPDWCLAPFDPEGLLSTLMAAVTCFVGLHFGHVLVHCKDHSPRMLLWLLASTVLTVSGFLLQLLGMPFSKPLYTVSYMLLTGGVSGFLLLLLYYIVDVINIKKPFILFQWMGMNALIVYVLAACEIFPTLVQGFYWRSPENNLVDLTESLLQTIFHSKRWGTLAFVVLEIIFWCLAACFLHMKGIYLKL

SEQ ID NO: 44499 - protein, 355 aa, Oryza sativa
MCKSRSDAVPVSSVASRSRRSSATTSSSSSSSRRPGPASSSISGSTASAASSSSSSLAAARASLPDPPVLYPFQEVAGATNNFLAKRAPASTYWPCTLRGRHAALFQLRRAPPPRDTVTGKLLAATARYHHTSLAPLLGGCVAGAHLYIAYELPPGAATLSACLRSPRNTSFTALRTWLSRVQVAADVAQGLDYIHHHAAAVHGRVSSSTVLVSDPGLRARLTHMGAAQLAELEDEEEPSREADVRAFGLLLLELLSGEQATTYRVREAVVETAAAARANGRVRSWVDRRLGDSFPQAVAERLLDVGLRCASASPPPEMTWVAGKISKAYLDSRAWDHSLQRPQAHLSSVSLAPR

SEQ ID NO: 44500 - protein, 801 aa, Oryza sativa
MVDNQGCSPALEPVPTPPNPDPSSISPEAWDPLEAAAGAVVARIQPNPPSEDRRAAVIAYVQHLLRCTVGCQVFPFGSVPLKTYLPDGDIDLTAFGHSSDEILAKQVQAVLESEEARKDAEFEVKDVQYIHAEVKLVKCIVQNIIVDISFNQFGGLCTLCFLEKVDQKFEKYHLFKRSIMLIKAWCYYESRILGAHHGLISTYALEILVLYIFHLFHGTLDGPLAVLYRFLDYYSKFDWDNKGISLYGPISLSSLPELVTDSPDTVNDDFTMREDFLKECAQWFTVLPRNSEKNTQVFPRKFFNIVDPLKQSNNLGRSVSKGNFLRIRSAFDFGARKLGKIIQVPDNFTMDEVNQFFRNTLKRHCSRVRPDVQEIALDFNGERADNDSSPLYSNNSFGDLSDEFNNISISDSSNHGSLRQNGWNYVAENKERKSVSGGLLASKATNPAATNSTGMTNGSDSCEPASPSITGAHSLPSEEGHDALDLFNESESGTKAGIKYGTNPSHHGMSTVSYAGRSHQSFEEVDNDDRGTIDSNWSDLTGDYTTNFNNLLYAQGFHQDYPMNQYYPFGPVYYPIPSPPPARYQNRRSSNGHSRNNVYGYAGTNGIGPAPCPPGYLIMRPYSQIDDSNRARGTGTYFPNPNLSKDRSPSGRGGRGKTHFLPHNHQRPHHYGRADMSADLTPSEELRHIYDPDANDLGIPSSLRISIPSPSSEAPREIVHGNGFIQPPAKKLEFGTLGALPLEVTSQELGINRLNTASDSQPSASASPMSLANNPGISSNQMRNAQPYHLKDNGDFPPLSS

SEQ ID NO: 44501 - protein, 114 aa, Oryza sativa
MDASWTRCPALLPCPATAGLCWISLAESPPRPSAPCSISWRSGSPMEPGRALPPPATRGSSPSSTSPPSPWPSSPYASPCACTFPWEQGSSCRHSSLLLEFQVTACPPSSLVAH

SEQ ID NO: 44502 - protein, 104 aa, Oryza sativa
MENLPPYSNHAHHRSAPLTGNLHHCHHPRPTGAIGACLADCHWAWPLPPSTSPPLRRSPEPGETHRAALSLGRGLRRKPCRQPSGPALSGDLLERWQVEKRRRR

SEQ ID NO: 44503 - protein, 1058 aa, Oryza sativa
MFFTPSPVFFYIDGIEGIICRLILPPNAAFRQADGQPCLSKDEAKRDACLKACVKLHKLGALTDFLLPGPGSRKNKVSVTNNSSNNKVEDDSLREELHEMLIPAVLKPSGLKLDSLSNLHFYYVKFIPIPEDRRYQMFGLFVINPLPVEAETLQVDLHLARGRIVKAGIKHLGKIAFEKEKMMLAHKFQEMCLKILLDRSEFTSPHVKLGNDVTLEINSTFYLLLPIKQKCYGDRFMIDWPAVERCLSSPIFKDPIDVSVHASYSSNESLRLLDGIFSKTDVVGSVVFSPHNNIFFFVDGILDEINAWSEHSGATYAEHFKERFRIELSHPEQPLLKAKQIFNLRNLLHNRLPETTESEGRELLEHFVELPPELCSLKVIGFSKDMGSSLSLLPSLMYRLENLLVAIELKDVMLSSFPEASQISASGILEALTTEKCLERISLERFEVLGDAFLKYVVGRHKFITYEGLDEGQLTRRRSDVVNNSHLYELSIRKKLQVYIRDQQFEPTQFFAPGRPCKVVCNTDVEVRLHQMDIHPDNRENCNLRCTRSHHWLHRKVIADVVESLIGAFLVEGGFKAAFAFLHWIGIDVDFNNPALYRVLDSSSINLSLMDYTDIAGLEELIGYKFKHKGLLLQAFVHPSFSQHSGGCYQRLEFLGDAVLEYVITSYLYSTYPDIKPGQITDLRSLAVGNDSLAYAAVEKSIHKHLIKDSNHLTSAISKFEMYVKLSNSEKDLLEEPACPKALGDIVESCIGAVLLDSGFNLNYVWKVMLMLLKPVLTFANMHTNPMRELRELCQCHGFELGLPKPMKADGEYHVKVEVNIKSKIIICTAANRNSKAARKFAAQETLSKLKNYGYKHRNKSLEEILIVARKRESELIGYNEDPIDVEADISVKMKSPHIHEENIPFQNTETSFTRSSKFHNQIIAGSGKHDVNNGRNNQPKLATQSGRLPSEATEKSNKKVYHGDMVHKTARSFLFELCAANYWKPPEFKLCKEEGPSHLRKFTYKVVVEIKGASATLLECHSDGKLQKKAAQEHAAQGALWCLKQLGHLPKEEDVRV

SEQ ID NO: 44504 - protein, 494 aa, Oryza sativa; identical to SEQ ID NO: 32783

SEQ ID NO: 44505 - protein, 96 aa, Oryza sativa
MVICMFWTALRRTGALPIYSMGEPPFAEVPRETQAANTIGCFLSRSIQISSGNIVSVSHRSVRFFINSLALVFQSIACFCCQSLRIEKTCATEGLI

SEQ ID NO: 44506 - protein, 293 aa, Oryza sativa
MAISFTSLLAMAAVLATCFFVRRHQIRRDRGRIPVTREFHGMSSQLVKAMPSLIFTKVQEDNSTSSSCAICLEDYSFGEKLRVLPCRHKFHATCVDMWLTSWKTFCPVCKRDASAGTSKPPASESTPLLSSVIHLSAESTALSSFRSTVAVSPPRPIRRHPSSQSTSRAYSISSAPRNYNLQRYYTNSPYISTSRSNVDLANMSSQWSHTPHQASMHSLRSGHLSLPINIRYTIPHVSRSDYGSASLGLSHDSCSHHGSPSYYHSSLGQQRSYLMHRTESGPSLSTMVLQSPQ

SEQ ID NO: 44507 - protein, 423 aa, Oryza sativa
MDRKRPRPPQPSPPPPVASSAASSSSSSVLDDGDLLREILLRLAHPTFLVRAALVCRRWLRHASDRAFLGRFAVLHPPRLLGFYVDSASLPRPRFVPLPHPPELAAVVRRGSFDLGTAADLHFHLGTGIYCCRNGRLLVCHRGGGESTLQLRRPLHPASDGAVISTFRTPPRPLPPNQRHTRYILLPEDGGDGDGDAVACTVVTLVSSEREVFAKVEKILRAGVWDVAQTSAPIELPAHWRRSLSRGFLVNGKLYMLGTTGYILGLELVSMSLFFIEVPDAVRDDCPESFQLSVKLSQAEKSGLYLIHVEGFKIHVWLHGTDGNSSADWNLVNTICLREVFGHLVKPSWESGDSRISLPGSGDNAEFVFLEVDGEVFCMDIISRTVEKVYEMAMKDDFLFEIYPFMMVWPPIFPALIKTHEPE

SEQ ID NO: 44508 - protein, 359 aa, Oryza sativa
MATSSLLPLHLPTRPSAVKASAAATAAAAPTPQSLEESFGRKGLRFAADPATGAPTAELSVRNGSSLQLRLADGLVTSYRPKVYWKDDGCREVLHTVAGAGAGGEVKGGVGLALSEVSSSGAAESLLVGSEWSVVDADSDSYDAVQVELGCTKGSGTLEVTYVVTLYPLSMATAVMVKNNGKKPVSLTSAMLSHIKFDKRRGTAVEGLRGCPYCSHPPPAAGFALLTPAEAMKREDGGWFGGGGGEEPRQGVWTVEDNLYTILKKKVSRVYAAPPEERKKRIYSTAPSKFTTIDQNSGLGFRVVRMGYEDMYLCSPGEMYRKFGKDYFLCTGTASMLVPVVVNPGEEWRAAQVIEHDNL

SEQ ID NO: 44509 - protein, 256 aa, Oryza sativa
MGFCQVTQSHAVVGIFYYWKNYESHQYYLTCIIWSCSSQGQPLPDPPLPVNDMPPVSLDGVLYWMSEPRLGQSYERAIVFFNIAAKIFDVIPCPSCIAIWDSRNPCHAFVVELQGMLCAVLSNPVADKLDIWKWDHGLWSIAYAINLKFWPDYSLATNVVVPLAVDPIDGKVLLNTGRKLGLYNPCEQTIENLHLIRRRSNRTLELTEISTLPDAKMFLRSSLSGNYYWLRARSLLTLQVLHQGRIHFTPETNLRS

SEQ ID NO: 44510 - protein, 491 aa, Oryza sativa; identical to SEQ ID NO: 44385

SEQ ID NO: 44511 - protein, 181 aa, Oryza sativa
MIFTFYKAQGLSVGSSLVEEDKLELATSLLAKAKEKGVSLLLPSDVIIADKFAPDANSQVVPASAIPDGWMGLDIGPDSVASFSSTLETTQTVIWNGPMGVFEFDKFAVGTEAIAKKLADLSGKGVTTIIGGGGSVAAVEKVGVADVMSHISTGGGASLELLEGKELPGVIALDEAVTVAV

SEQ ID NO: 44512 - protein, 173 aa, Oryza sativa
MAAAGDLTDEERRALRGSKFAPLPAPTAPSRPQPRMAHPGGPLTTNKAAALAKFLERKLQQPDGLESLNPDLVKLAVRNAKETIKASKGEPSTSGRIVRHVSSFGDSSEDSDDSKDGEETKGVKRKRKNKKDKSFQNGGEQSKKKKKNKKKNLKAAKDSKSQKASKKKKLKSL

SEQ ID NO: 44513 - protein, 391 aa, Oryza sativa; identical to SEQ ID NO: 32576

SEQ ID NO: 44514 - protein, 676 aa, Oryza sativa
MAAGVLMTKPFMAAAAAALVSLLVMLRCLPSVVATTVSFNYSSFSNASKNITLQGSAALAGAEWIELTKGKGNNLSSGGTMGRMVYTPPVQLWDAATGEVASFTTRFSFNITPKNKSNKGDGMTFFLVSYPSRMPYMGYGGALGLTSQTFDNATAGDRFVAVEFDTYNNSFLDPDATYDHIGIDVNALRSVKTESLPSYILIGNMTAIVDYNSNSSIMSVKLWANGSTTPYNLSSKVDLKSALPEKVAVGFSAATGSSFEQHQLRSWYFNLTLEQKQPTGQHSRGGVVAGATVGAILFIVLLFTMVAILVRRRQRKKMREEEEDDSEGDPIVEIEMGTGPRRFPYHILVNATKSFAAEEKLGQGGFGAVYRGNLRELGLDVAIKRFAKDSSKQGRKEYKSEIKVISRLRHRNLVQLIGWCHGRDELLLVYELVPNRSLDVHLHGNGTFLTWPMRINIVLGLGNALLYLHEEWEQCVVHRDIKPSNIMLDESFNAKLGDFGLARLIDHNVGVQTMTHPSGTPGYLDPECVITGKASAESDVYSFGVVLLEVACGRRPMSLLDNQNNSLFRLVEWVWDLYGQGVVLKAADERLNNDYDATSMECVMAVGLWCAHPDRYARPSIRAAMTVLQSNGPLPVLPSKMPVPIYAPPMASSEGQLSSSTGMSSSSLTITSITPR

SEQ ID NO: 44515 - protein, 512 aa, Oryza sativa
MGIQVAAVTSSPCAVTTSSSSSLSPSSSAAATTSRRHGVLGGVRLSRGQSSLASWSVGMTRRRAGGHQMARRALSASIDSIGSDGGDDEEFLRRIQELAVGLHPGAAGCGWPASVERSASSVGLPLSLRMLKRKKQQQQQQGRWDERLIDCAGESARGAVGRAFSSMVLIIRELQSFTLQMRQALFYEDLQRVLARVHAEMHASFVWLFQHIFSGTPALMVSVMLLLANFTVYSMGDSVAAAATLPPPQPPAATVAMVDTQHAEQSHSHQRFDHASLKTLSIGRTASVGGNSGGGGKVRPVAGATGDGRSDEWSNRQSGAVLPQDASQGTPGAGAEEAVPVSEAMAVEETEDELVIWKRIADEATRMQASVRAEALMDPDTLGQLVAPVEAKLDTEDTAEFAASEERYERAVSEEPDNSLLLSNFAQFLYTVQRDHDRAEHYFKRAVRAEPADAEAMGRYATFLWKARNDLAAAEETYQEAIAAEPSNSHHAAAYAHFLWNTGGDDTCYPLD

SEQ ID NO: 44516 - protein, 1089 aa, Oryza sativa
MAMVLDSFVTRCTASLEDFAGQEACGALGIGDDVRCLLATLRRVQAVVSHEERRGRVLSAKVDAWVAQVKDAMYETDDVLDVPMVEGGKMLAEGDSPPTPKARCSLMFSCFKPASAPKFHHEIGFTFREIDAKLREIEEEMPRLPAGSLHSESRRDWFSRGICSNFSDAIRPLAVGTQVQKSLDGLVPRMIREGKKKVDVLAIVGAVGIGKTMLAREIYNDERMTETFPIRVWVKMTKDLTDVDFLKKIIIGAGGGVNVGEIESKKELLGIVSSTLSKRFLIVLDDLDNPGIWDDLLKDPLGDGVARGRILITTRSEEVATGMKAMVHRVDKMDAENGWALLCRQSLPECSSEELASLKDVGIKIVERCDGHPLAIKMVAGVLRSRGKSKAEWEMVMRSDVWSMRPIIPELPQALYLSYVDLPSELKECFLHCSLYPEELPIQRFGLIRRWIAEGLVSDKDNKLLEDSAEEYYAELVSRNLLQLYAGNLDQCWITHDLLRSLARFLITDESILISGQQRLSTDPLSLSKPRHLTLCNMENRFDDPISVKQQMSLRSLMLFNSPNVRSIDNLVESASCLRVLDLSKTALGALPKSIGNLLHLRYLNLDETQVRDIPSSIGFLINLETLSLQNCQRLQRLPWTVRALLQLRCLSLTGTSLSHVPKGVGDLKNLNYLAGLIISHDNGGPEGCDLNDLQTLSELRHLHIENLDRATSGASALANKPFLKDLHLCEQAPLIEEQQSEQEQENQDDQKETEEEEKEVLDVTNSQFSREESIKASEKIWNELTPPQNIEKLVIKNYRGGKFPNWLTGPKLGISFPSLVYLDIDNCMSCTALPALGLLNQLQSLQISNADSVVTIGPEFLGAASSSSATASFPKLEILKLRNMKKLEEWSLAVEENQILLPCLKSLHIQFCPKLKALPEGLKNVSLRELHVEGAYSLTEIKDLPRISDDLQLKDNRALQRISSLPVLQSLTIDNCPKLKHVSGLDTLQHLRLAFPPSTETFYFDELIIFWSIAFPRWLELLIRKRDGLCHFELQCSLSLLRSCLDGGKNWSIVQQIPEVRITSTDGKRYIRYNKRRCIYETNAQSED

SEQ ID NO: 44517 - protein, 133 aa, Oryza sativa
MATVPEPLIWEIVKKNNCFLVKQFGNSNAKVQFTKEPNNLYNVHSYKHSGLANKKTVTIQPSGVKDAAVVLSTTKTKKQNAPAKLYHKSVMRKEFRKMAKAVKNQVLARETTSLHSFLSLLCLAMLEALNALL

SEQ ID NO: 44518 - protein, 502 aa, Oryza sativa
MEGEMDTVVGSSSKPCGPLTDYRIPDYILRPDAQRVLLDHAPPCPVLVFINSGSGGQLGSSLIKTYRELLGEAQVFDVSEEAPDKVLHRLNVNLEKLKMDGDILAVQIWRTLRIIVAGGDGTASWLLGVVSDLKLSHPPPIATVPLGTGNNLPFSFGWGKKNPCTDQESVKSFLGLVRHAKEMKIDSWHIMLRMRATKEGPCDPIAPLELPHSLHAFHRVSSSDSLNMEGYHTFRGGFWNYFSMGMDAEISYGFHSERKKNPEKFKNQLTNQGTYAKVGLKQGWFCASLSHPSSRNIAQLASVKIMKRAGSHWQELNIHHSIRSIVCLNLPSFSGGLNPWGTPGTRKVEERELTAPFVDDRLIEVVGFRDAWHGLVLLAPNGHGTRLAQAQRIRFEFHKGAAEHTFMRIDGEPWKQPLPKDDDTVVVEISHLGQVTMLANEPCKSKSVHDDQSSHAQHSGHGNNDDDKDSMEDEDEWEDGRRKFGAADTFKIPDEVDIAHLS

SEQ ID NO: 44519 - protein, 250 aa, Oryza sativa
MGNCLNPASKARRHGGMPPPEDMDEEEGWCYATPEPASATATATTTIGHLLREEEPAEEEDEEETAASAAAAAAAAAGVKVKVVLKRAELEWLMSQLKTGDRRLEDVLNQMATARALSSAQPPWATASTRPPRRAATAACRRRRTWTRRRGGATRRPSRPPPLPPPRRRSDTATPLPTAPATGGARGSSASSSATSSPPPDLSNSISSSSSIYMCVSCSPLLGSASVACMRPSCFPDLLQFFPQGKLKGR

SEQ ID NO: 44520 - protein, 211 aa, Oryza sativa
MLPIASDRLTIHVPISTTSINDLILIIFSIICRSVTAPIKKGSNPPRRTNLNVLMSSKLVTSPLKSMEQGHLEQPLRDPQAPAEQHDMGLSPLTLLGFAFLTFNSGMAVYRSDRDLATIFFVVFSYVDLVSLFYFLRLFEKTPPESPRRHHIKTAVWLLTTMLTAVFSYKVAAIMPFPVQVLVWAMSAATVLGGFYAFFLHSDEKKPIEVT

SEQ ID NO: 44521 - protein, 75 aa, Oryza sativa
MCMEKSNSSLHISVQEYFFRCIYKIVPLYVYGQKNTGPVTRSISMSVSFRWSSIKSSEGMNYCPISKYEQQYSLN

SEQ ID NO: 44522 - protein, 297 aa, Oryza sativa
MEHLSEFNSILKGFEGNHPFHNYTARAKYRKVLAGRHRKVKGASSAVNSMPTEMSLDQSSSDDGTTSDHDEEDLNSSSIIGSSVPEDSYKDNPEFSEKQVQIRARWLHEPDENDRLNASHFRDILTFSCGELQISSGIQFVELTISGVSFMLHQIRKMVGTSVAVKRGLLPKDIIALSLAKFSRIVLPIAPSEVLVLRDNSFCLRNKQGTIVRPGIQSMNESEEVKKGVMEFYRAALVPELANFLDASMPPWKEWVENLDRFTSIPDPQLEEVRSAYRVWKADYDRVKMARKSASSD

SEQ ID NO: 44523 - protein, 96 aa, Oryza sativa
MKMVGESEGGGGGAPVGHQLNPVHLSLWRRPPLPAAATTSSPSPSSSVGPAQEHAAVGAGAAAANTTATRAVVGGGGGLAEAPPSPSFFCAVFSPF

SEQ ID NO: 44524 - protein, 52 aa, Oryza sativa
MIQDTRRLARLKKTARAGREKGIGKKLGEKRIPRKGYLHCSWSTFQAVKCEL

SEQ ID NO: 44525 - protein, 420 aa, Oryza sativa
MAQLQCLPPTCEPRVTDHIEHIIELITKIMENGKAYAMEGDVYFSVDTFPVYLSLSGRKLDHNLAGSRVAVDTRKRNPADFALWKAAKEGEPFWDSPWGRGRPGWHIECSAMSAHYLGHVFDIHGGGKDLIFPHHENELAQSRAAYPESEVKCWMHNGFVNKDDQKMSKSDKNFFTIRDIIDLYHPMALRFFLMRTHYRGDVNHSDKALEIASDRVYYIYQTLYDCEEVLSQYRGENISVPVPVEEQDMVNKHHSEFLESMADDLRTTDVLDGFTDLLKAINSNLNDFKKLQQKLEQQKKKQQQQKQQKQKQQQAQKQPEEYIQAMFALETEIKNKISILGLMPPSSLAEALKQLKDKALKRAGLTEELLQEQIEQRTAARKNKQFDVSDQIRKQLGSKGIALMDEPTGTVWRPCEPESE

SEQ ID NO: 44526 - protein, 117 aa, Oryza sativa
MANESILVLLHLRLQNPDRGLPQNPRRVAGLRRRPHRELLAGYSSGHEGLGSGPGRRRAGHLQALLPLQRPLLPRLPRHLRRLLGHRRGSTPQSVKRRHSEFSPFSVLYGGGGGPVY

SEQ ID NO: 44527 - protein, 72 aa, Oryza sativa
MVTAAVAAASLPRRGGSSCPLPPPSRLPLISPMWSRRRLLLPLPGVGAWRQRRRLLPSRRGGSSCPPSPTSC

SEQ ID NO: 44528 - protein, 361 aa, Oryza sativa
MDVEATKDVGHEQAAVPGRGRAARWLLVALNCGMLVVGTTGGPLISRLYFSKGGHRQWLSAWLQTAGWPLLLVPVAASYLSRRARDRRAPLFLTPTRVLLAGVGLGFLNGADDFIYAYGLAYLPVSTSAILISTQLAFTVFFACLIVRQRFTAATLNAVALLTIGAVVLGLHASKDRPAGVTSGKYWMGFFLTLGAAALYGLILPLVELAYKHAAGGGRAVTYALVMEMQLVMGFFATAFCTVGMVVNKDFQAIPREAKQYELGEARYYVVLVFNAVLWEFFFVGAVGVIFCVHTLLAGIIIAVFIPITEVLGVIFLHEKFSSEKGVALVLSLWGLASYSYGEYADAKAKKKAALEAEEAS

SEQ ID NO: 44529 - protein, 275 aa, Oryza sativa
MAVRCCSSMASASVVLFFVVVGMSASMVSGCDRCVRRSKAGFRDSSIALNAGSCGYGSLAASFNGGHLAAASPALFRGGVGCGACFQVRCKDGKLCSTAGAKVVVTDEARSTNRTDLVLSAAAYAAMARPGMAAQLRTRRAVDVEYKRVPCEYAAGRNLSIRVEEKSRPPRELSIRFLYQGGQTDIVAVDVATVGSSNWKFMTRDYGPAWSTAQAPAGPLQFRVVVTGGYDGKWVWADGEVLPRRWTAGRVYDAGVQIADVAQEGCYPCDTQEWK

SEQ ID NO: 44530 - protein, 129 aa, Oryza sativa
MVKKKPAGDAEADERRRLRSLAFSNGLLQRGEPAAPRSALAPSTAVSRLQGRDIVRRGGQRKSRFLFSFPGLLAPAAAASGGRVGELADLGTKNPLLYLDFPQGRMKLLGTHVYPKNKYLTLQMTSSRA

SEQ ID NO: 44531 - protein, 426 aa, Oryza sativa
MLEGQSCLISRSLPSSCDQESRLAYMTYHLLEITRSKRISSTPRIEPDSVAAVAVLTKRPKSARNHECEQLDCQGSNDQGFSDSSTLISSIGRDNSISCLARCSRSDYGSIASVNRNFHSLVRSGELYKERRQLGIAEHWVYFSCNVQEWEAYDPYRSRWMTLPKMPHNECFMCSDKESLAVGTELLVFGKEILSHIVLSYSILTNSWSPGVDMNAPRCLFGSASFGEKAIVAGGMDAQGRVLRSAELYNSETRRWITLPCMNKARRMCSGVFMNGKFYVIGGMASNTEVLTCGEEYDLEKGTWRVIENMSEGLNGASGAPPLVAVVENELYAAQYAGKLVRKYNIKDNTWTTLGELPERPEAVNGWGIAFRGCGERLLVIGGPRVMGGGMIELHSWIPREGPLRWNMIGSKPSGNFVYNCAVMGC

SEQ ID NO: 44532 - protein, 806 aa, Oryza sativa
MKVEEKKRSITVAPFECAWDEEFRFRETGRGCITFEASAHNDVTLVFREQPGSQHYHYKMDNSRHYIVILGSHRNKRLKIEVDGKTVVDVAGIGLCCSSSFQSYWISIYDGLISIGQGRHPNNNILFQWLDPDPNRNVQYVGLSSWDKHVGYKNISLMPSAPQNSILWSQIECAYVEPDGAGGHTRKQESKDGLDQRALANFLENWDFSDSIFVVGSERKVVPAHKVVLGSCGDFPFNLMMSRPAIELPSVSYPVLHSLLEYIYTGSTQISEWQLVSLLELSSQFKVKPLVMYCEEIIGCLKMSDAVSESSKKIQLSSGGSQAHQFYYFPFKAPLNTQKIEQFLVNGEHSDVNIYVNGHGLVTHAHKLILSLWSMTFDKMFTNGMKESSASNVFFEDVPVEAFFLLIQFMYSGELKVDIEEITPVLVELLLLSDQFGITALQFECCKRIIEFLSKDTVCSVLRAVSSIPSCKLLEEMCKRNFAEHFDYCTTACTDFVLLDEATFKDILQHGHMTVTSEERVLDAILTWCMEACDCFNWTSVHELLSTSRPEKLFGGRLTAINTLLPFVRFPLVQPSVLHLMEKSNLAKNIEAFRQLVAEAIEFSNAGLRMATNTCERFHHRRSSYKELQYISDGDNNGVIYYAGTSFGKHQWINPVLAKNITVTASSPNSRYTDPKALVSKNYQATCFAGPRLEDGKMCSWWMVDIGPDHQLMCNYYTVRQDGSATFMRSWVLQGSMDGRSWTSLHVHEDDQTICQPGQFASWPITGQTALLPFRFFRVMLTAPATGVSNTWNLCICFLELYGYFR

SEQ ID NO: 44533 - protein, 538 aa, Oryza sativa
MGNCCGTPATAEEGGKRRRRGKQKKANPFTVAYNRAPSSAGAAAGRPGLMVLRDPTGRDLGARYELGGELGRGEFGITYLCTEAETGDRYACKSISKRKLRTPVDVEDVRREVEIMRHMPSHPNIVSLRAAYEDEDNVHLVMELCEGGELFDRIVARGHYTERAAAAVTRTIVEVVQMCHRHGVMHRDLKPENFLYANKKDSSPLKAIDFGLSVFFRPGERFTEIVGSPYYMAPEVLKRHYGPEVDVWSAGVILYILLCGVPPFWAETEQGVAQAIIRSVVDFKREPWPRVSEPAKDLVKRMLDPNPMTRLTAEQVLEHPWLHDSKKMPDIPLGDAVRARLQQFAAMNKLKKKALKVIAEHLSAEEAADIKDMFDKMDVSKNGQLTFEDFKAGIRKLGNQMPDSDLKILMDAADIDKNGILDYQEFVAVSIHVRKIGNDEHIQKAFSYFDQNKSGYIEIEELREALVDEIDGNDEDIINSIIRDVDTDKDGKISYDEFAVMMKAGTDWRKASRQYSRQRFSNLSLKLQKDGSISDDTQ

SEQ ID NO: 44534 - protein, 858 aa, Oryza sativa
MRRKAAGDAALVGGCFLLLLHPLLSHGADMPLGSSLSPANQALWSSPNNTFSLSFTASPTSPSLFVAAITYAGGVPVWTAGNGATVDSGGALRLSSSGDLQLVNGSGAVVWSSNTGGQGVTTAALQESGNLLLRNSSATLWQSFEHPTDTVVMGQNFTSGMNLTSASYQFSLDRNTGNLTLKWTGGGTVTYFNEGYNTTFTANKTLSSPTLAMQTNGIVSLTDGSLTSPVVVAYSSNYGESGDMLRFVRLDTDGNFRAYSAARGSNAPTEQWSAVADQCQVFGYCGNMGVCGYNGTSPVCRCPSENFQLSNPADPRGGCRRKIELQNCPGNSTMLQLDNTQFLTYPPEITTEQFFVGITGCRLNCLSGSSCVASTALSDGSGLCFLKVSNFVSGYQSAALPSTSFVKVCFPGIPNPPLGGGGSPSGRASGVRGWVVAVVVLGAVSGLVLCEWALWWVFCRHSPKYGAASAQYALLEYASGAPVQFSYRELQRSTKGFKEKLGAGGFGAVYRGVLANRTVVAVKQLEGIEQGEKQFRMEVATISSTHHLNLVRLIGFCSEGRHRLLVYEFMKNGSLDAFLFADAPGGRMPWPTRFAVAVGTARGITYLHEECRDCIVHCDIKPENILLDEHHNAKVSDFGLAKLVNPKDHRHRTLTSVRGTRGYLAPEWLANLPITAKSDVYSYGMVLLELVSGHRNFDVSEETGRKKYSVWAYEEYEKGNIAAIVDKKLPGEDIDMVQVERALQVSFWCIQEQPAQRPSMGKVVQMLEGIMDLERPPPPKSSGSFLSLTSATTATGVSGSGSTSMVSTFTSSAAPPAPTPSPNVDEVQQEMAVGRSASARIRDRASRSLLGQEPYMTM

SEQ ID NO: 44535 - protein, 728 aa, Oryza sativa
MEPWTRCSCCLTESGSLPSACFTNSRKSRPLPKSHQRVHPKSIHESLPHSNCLPPPSKSNLSSHLRRFRHAPSTPRSILSPPIRSNPQLGSTNCKGLGADWSMGLRSPNSMLWLVLLVWAALLCGSCHGRFVVEKNSLKVTSPSDMKGTYECAIGNFGVPQYGGTMVGVVAYPKANKKACKSFDDFDISYKAKPGSLPTFLLVDRGDCFFTKKAWNAQNAGAAAILVADDKTEPLITMDTPEESGNTDYLENITIPSALITKSFGDKLKKAIDNGDMVNVNLDWRESLPHPDERVEYEFWTNSNDECGPKCDSQIDFVKSFKGAAQVLEKKGYTQFTPHYITWYCPDSFILSKQCKSQCINHGRYCAPDPEQDFSKGYDGKDVVVQNLRQVCVYKVAKEHGKPWLWWDYVTDFAIRCPMKEKKYTKECADGVIKSLGLDHKAIDKCIADPDADKENPVLKAEQDAQIGKGSRGDVTILPTLVINNRQYRGKLDKGAVLKAICAGFRETTEPAVCLSEDIQTNECLENNGGCWQDKAANISACKDTFRGRVCECPVVKGVKFVGDGYTHCEASGSGHCEINNGGCWKDSRHGRTYSACTNDGCKCPDGFKGDGVHKCEDIDECKERTACQCKECKCKNTWGSYECGCSGGLLYMKEHDTCISKNAATEVGWNFLWVIFFGLVVAGIAGYAVYKYRIRRYMDSEIRAIMAQYMPLDNQGDVPNHSHHIEL

SEQ ID NO: 44536 - protein, 242 aa, Oryza sativa
MQSAAAAFGLVRPCPARPPLQLGPGSSSCRPILLHARPLAAGIASSSRGPAAVAARSLGRLLLLPPPPPISPDRAGRGRARHVACGAAAGDAKAEEEESGLAKTLQLGALFGLWYLFNIYFNIYNKQVLKVFPYPINITTVQFAVGTVVALFMWITGILRRPKISGAQLFAILPLAVVHTMGNLFTNMSLGKVAVSFTHTIKAMEPFFSVLLSAIFLGELPTVWVILSLLPIVGGVAFGISY

SEQ ID NO: 44537 - protein, 115 aa, Oryza sativa
MLLFQLPKSLPLPRISAAVERNGKARDKEVKEGSNLKELPQGYLGKMVVYKSGKIKMKLGDVMFDVNPGEECRMAQHVAAINTKEKHCCLLGEIESRHVVVTPDVDSLLLNDNRG

SEQ ID NO: 44538 - protein, 281 aa, Oryza sativa
MGGVTSSSAGGGGGGETALGDLPESCVAEVLRRLDPPEICRMARLSRTFHGVWEAKLPRNYARLLAVAADGEAAALEAIPKKEVYARLCRRNRLDGGTKEFWLDKGGGGVCMTISSRALSITGIDDRRYWNFIPNDESRFHAVAYLSQIWWFEVRGEVEFCFPEGTYSLFFRLHLGRPLKRLGRRVYSSEHIHGWDIKPVRFQLSTSDGQQAQSKCYLTDPGVWINHHVGDFVVKSSNELVKIQFAMVQIDCTHTKGGLCVDSVAVKPQYLAKKKASRIYV

SEQ ID NO: 44539 - protein, 502 aa, Oryza sativa
MLGWTDPADREIRMLAAIIVGHVASNINLSQFPGALQSIGSLLDPRDDLSFYDQDDQHDHDKGMGRCQLLVQGLLVIERLTCDHNNCILICRDHCLLSHIRYAIRLRKKVTFPDMCPVWPEMLKGSLRAMAYLIAGVTEVELETLESIFNELPLGMIMGHKRFPDIMIPTIALYANLLYYRDTTFPSEHFFETMLPVFLSCTDIEQGEEITSVWTKVGVLAGASLAKLLLKSEDSVSRDDIMKGEQVFDGLTKLLTAPNTTIREIAAEILQHVYFHDYTHRLSLTEKLVAELFRTNSQMGTQAQSGALAITVEAEHDGVKQFLGDNAQTSSLNRLEHEEQSNYTELQTTLLHVLASTTEHGTDCLANVIQKIAPGDGLSRFVGMLKSLVEKHSRVVTEDGLIIIKATAWLIMWMLRRSEFVQEIRQQKIVEALPEATKIVSRTSLTKKKQPASDLDIWKLLGYNIYYKRFASNIRLSSRLSSLVEDAQDELVRQQEVTVQVE

SEQ ID NO: 44540 - protein, 213 aa, Oryza sativa
MSKAAMIAAAFGGTLPPGVSGINDRCTLLVSNLNTDKIDEDKLFNLFSMYGNIVRIKILKNKPDHALIQMADGLQAELAVLYLKGAMLFGKKLEVNYSKYPTVTADPDARDYSTSHLNRFNSNVVKNYRHCCAPTKMIHISALPQDITEDTIHSLVGEHGTIANSRLFETNGKTQALVLFESVEEATEALVEKHASKLDRTNIRISFSQMQNI

SEQ ID NO: 44541 - protein, 136 aa, Oryza sativa
MRALQDLVPNTNKTDRAAMLDEILDYVKFLRLQVKVLSMSRLGGAGAVAQLVADIPISVKGEASDSGSKQQIWEKWSTDGTEKQVAKLMEEDIGAAMQFLQSKALCMMPISLAMAIYDTQHSQDGHSVKPEPNTPS

SEQ ID NO: 44542 - protein, 243 aa, Oryza sativa
MANKLQLAIAFVVVVVVLGAMAASAAAAVAPMLTMHNLCPYTVWPIVSPDSGSPPIADGIRLEGRGVGLRSLNLPAGFWSGRVVPRTWCRDGGRCDTGNAPPGDGGEAVVQRRRRAGGVQRQPRGRVQRADGGEPARHRRRDVPGAGLHGRPQRRVRGGAARVRRRHRRRRRGVQGAGELLQAAVPADEDGRGRRGARAAALHLPRRDQARLLPGRHGRRRAGAHPHRRRRRQLASLAGRSVN

SEQ ID NO: 44543 - protein, 45 aa, Oryza sativa
MKHALQFPVLRLRAGWLLTSTDPSPVYSESASPCRKIIQTMSCRS

SEQ ID NO: 44544 - protein, 128 aa, Oryza sativa
MSGRRTRFAVGELPPPPPAAFWKVEKTRARGRKRRELLLHGAHGADELAVHAVAEPRGQVEREQCGVQAARRAERRQEGGVGGVAQRPSEARKGGGNGARRGSCSRSRRRRRKADRLGRAPLPYLPPS

SEQ ID NO: 44545 - protein, 761 aa, Oryza sativa
MENNNDGVIGISWRNSNPKVHSSMCSELTMMLDKVSSILPSIETAQPGCKAGIEELCNLYNIVDKGKLIIQNCIECSSLYLAITGEATAMRCERIRDALRRSLFLVQNMVPSSLANQVADVHDDLGDVKFIVDPEEDEAGKAILEMLRQSDATQEHELQTFLFAASKLNLTSPKAILIERRAIKKLLDKINGNDPKKEGILKFFQYLVRKYGKTMKPEGSAKNEGVDVANVTSSTNLIASGTDAPQKCFSPTNSWTGRCEEQNNLSRFSTPPEFCCPLSMKLMYDPVIIASGQTYERENIEKWFSEGYDICPRTQLKLENFTITPNTCMKAVICNWCKDNELEFTSLPEQFHSYSVSSLHNISAPLVAGTKRDYMSDHSSSSVALSGSSYVSSPMRETEESRTNSTQFFSNAYYQLYLSFSSFNKEMFLNFFYELSELPMELQVKAVRDFKSVLNREYQIWRSMISNGFLEAFLEFLKNDNGKCTMEAQRTGIQFFLAFLRNSRTRIPSISEDAVRLVASFLDSELKTEALEILHELLHQPSCRKSRLMASVVAPSVFLAWDSADSLCLELVLKIICELSFKNDVQSFLISSGIISKLSPILSQGKSPECCLKILLNLSEGKQAADLIIRTDQCLSSISDYLDTGSSVEREHASGILLALCSRSIDDCVLVMKEGVIPALVDLSVNGTEVAKASSIKLLQLLRDSRQSDQFGNSCSSEVAVNGAAENSPIGTICKQPISKSARYISRKLSIFSKPRSLTLV

SEQ ID NO: 44546 - protein, 406 aa, Oryza sativa
MLALTLLGFGNLNIMPTIQWGTHTKTVLDVGCGVASFGGYLLDRNVITMSFAPKDEHEAQIQFALERGIPAFLAVIGTQKLPFPDEAFDVVHCARCRVHWYANGGKPLLELNRVLRPGGYYIWSATPVYRQEKRDQDDWNAMVKLTKSICWRTVVKSEDSNGIGVVVYQKPASNSCYLERRTNEPPMCSKKDGPRFPWYAPLDTCISSSIEKSSWPLPWPERLNARYLNVPDDSSSTDEKFDVDTKYWKHAISEIYYNDFPVNWSSTRNVMDMNAGYGGFAAALVDKPLWVMNVVPVGQPDTLPVIFNRGLIGVYHDWCESFNTYPRTYDLLHMSYLLGSLTNRCDIMEVAAEIDRILRPDRWFVLRDTTEMIKKMRPVLKSLHYETVVVKQQFLVAKKGFWRSGK

SEQ ID NO: 44547 - protein, 449 aa, Oryza sativa; identical to SEQ ID NO: 32786

SEQ ID NO: 44548 - protein, 250 aa, Oryza sativa
MEPSSQPQPAIGVVAGGSQVYPAYRPAATVPTAPAVIPAGSQPAPSFPANPDQLSAQHQLVYQQAQQFHQQLQQQQQRQLQQFWAERLVDIEQTTDFKNHSLPLARIKKIMKADEDVRMISAEAPVIFAKACEIFILELTLRSWMHTEENKRRTLQKNDIAAAITRTDMYDFLVDIVPRDDLKEEGVGLPRAGLPPLGVPADSYPYGYYVPQQQVPGAGIAYGGQQGHPGYLWQDPQEQQEEPPAEQQSD

SEQ ID NO: 44549 - protein, 996 aa, Oryza sativa
MENDHGDLDDVGSGWLEVKKKHRSSSKFTLQRSSGGSNDNKISNSSSQSQTNFGSDSAKWCDRLQCSPQITKVNVCVNEPGSVVTMVVHGEECAHADASNLKSELSVSASDHAIEKPKKLLVTEEISEPPNVGKIDCADSPTPHQSSNCSSGLAKSSGFYDHVKGPPMTDSIGVLSNTSVRFGDFDEVPGLALPADACRNNSSSQKHIHIGDATEFINECKDESELKTEPNSCKTIVETSPVIIQGAETPTEDESKVLDICEITDNRLDVSGSPSLDDTVSLSCANNDLEVPVKSSSVASTESQTVLHAPTSADFGGETAGSKERFRQRLWCFLFENLNRAVDELYLLCELECDMEQINESILVLEEAISDFQELKSRAEHFDNTKKSTALPKEGMPMAVKADHRRPHALSWEVRRMTSSPHRQEILSSSLEAFQRIQLELARKQAGITTESFASSSSGEVSGSSSKLTTASATVGSISLKVESQVKLSDTEKKIAGERQSKDTIKSGRSPPQNMPSSSAKSRKGSLEPISEVEKHNFRKDKELPENKFDKLRSTDTAKRTTVHTEKEKQNAAPRKSLDAWKEKRNWEDILKSPVRSSRVSHSPGVGRKVPERARVLHDKLMSPEKKKRSALDMKKEAEEKHARALRIRSQLESERVQRLQRTSEKLNRVNEWQAVRSSKLREVMNARHQRSESRHEAYLAQVAKRAGDESTKVNEVRFITSLNEENKKFLLRQKLHGSEMRRAEKLLVIKTKQKEDIAREEAVLERRKILEAEKMQRLAEIQRKKEEAIIRREEERKASSAAREARAAEQQRRKEIRAKAQQEEAELLAQKLAEKLRESEQRRKYYLEQIRERASMDFRDQPSPFQRRFPSKDNQNRSSSANSGEDSQIISSANAAESGVKSFNSTQMKRRIKKIRQRLMALKHDFVEPLIGENTGIVHRSALGTAKAKLSRWLQDLQRLRQARKEGAASIGLIVSDMTKVLLVCSILCCNKDVY

SEQ ID NO: 44550 - protein, 503 aa, Oryza sativa
MALAILARRRAAEALLRRPLGAAGVSALRASYAAVAGEESDVVVVGGGPGGYVAAIKAAQLGLKTTCIEKRGTLGGTCLNVGCIPSKALLHSSHMYHEAKSSFAHHGVKFSNLEVDLPAMMAQKDKAVAGLTKGIEGLFKKNKVTYVKGFGKLASPSEVSVDLSDGGSTVVKGKNIIIATGSDVKSLPGVTIDEKKIVSSTGALCLSEIPKKLVVIGTGYIGLEMGSVWNRLGSEVTVVEFAPDIDPSMDGEVRKQFQRMLEKQKMKFMLKTKVVGVDTSGDGVKLTLEPAAGGEQSVIEADIVLVSAGRVPYTAGIGLESVGVETDKAGRILVDKRFMTNVNGVYAIGDAIPGPMLAHKAEEDGVACVEFIAGKEGHVDYDTVPGVVYTHPEVASVGKTEEQVKALGIPYRVGKFPLLANSRAKAIDDAEGLVKVVAEKETDKILGVHIMAPGAGEIIHEAVLALQYGASSEDIARTCHAHPTVSEALKEACLQTFTKAIHI

SEQ ID NO: 44551 - protein, 1110 aa, Oryza sativa
MATEVLRPHNVLLPSPAQRRIRATAATHQRTANNHQSDARTKPTTAGSRRRQGRGSSAARKAAARPVAVEIEGVKVPVDTSKPNPNGLEFDNLYLDMNGIIHPCFHPEDRPSPTTFAEVFQCMFDYIDRLFVMVRPRKLMYMAIDGVAPRAKMNQQRSRRFRAAKDAADAAAEEERLREEFEREGRKLPPKQQSQTCDSNVITPGTEFMAVLSIALQYYIHLRLNYDPGWKQVKVILSDANVPGEGEHKIMSYIRGQRNLPGFNPNTRHCLYGLDADLIMLALATHEVHFSILREVVYTPGQQDKCFLCGQVGHLAANCEGKVKRKAGEFDEKGEAIVPKKPYQFLNIWTLREYLEYEFRMQNPPFPIDFERIVDDFIFMCFFVGNDFLPHMPTLEIREGAINLLMAVYKKEFPSMGGYLTDACTPDLNKVEHFIQAVGSYEDKIFQKRARLHQRQAERIKREKAQAKRGDDLDPHVRDDLIVPVARFQGSRLASGPVPSPYEQNGSDKNNGGKNSRARKAARVSSSGSSIAAAIVEAENDLEAQERENKEDLKTMLKDALREKSDVFNSENPEEDKIKLGEPGWRERYYEEKFGARTPGQIEEIRRDVVLKYTEGLCWVMHYYYEGVCSWQWFYPYHYAPFASDLSGLGQLNITFELGSPFKPFDQLMGVFPAASSHALPVQYRQLMTDANSPIIDFYPTDFEVDMNGKRYSWQGIAKLPFIDEARLLAEIKKVEHTLTPEEARRNSIMFNMLFVNGSHPLSPYIYSLNSKFGHLPDRERNEIKEKIDPSSSGGMNGYISLCSGDPCPPVFRSPVDGLEDIMDNQVICTIYKLPDSHKHIARPPVGVIIPKKTVEATDLKPPPVLWHEDSGRRPHDNNNRRPYENSNRQNPAGAISGRQLGEAAHRLVVNSLNARSGGQYNTPSMPYQTIMNGMPYPNGIPPRMEQPAPGWHVPGDLPNGQVPPAYASSSGHYQNDRSGPSQYGRDNHGRYPYARDNHHDSRGRVPPYHQSGGNSYQSHSAPSAGPGRYAQPPPYAGGYGRSYQPAPYGGGQQWQQQQQQPYGSYAGSGPYGGGAPPARPNSRPQQSQNRYNTLDRNSNRRPPPGHGRH

SEQ ID NO: 44552 - protein, 503 aa, Oryza sativa
MDLPASRGRWRKRSARSHAPLLVAVLVLLIPASLLLSSAYSSLLRSILPFSGFGGGGGGGGRRCGRSPELEGERFLWYAPHSGFSNQVGELRNAAVAAALLNRTLVVPPVLDHHAVVLGSCPKFRVADASDLRAAVWDHSMQLLRERRYVSMGDIIDLSPIKATVRTIDFRVFVSLWCGVDMRKTCFSGLCCAVSGGGSLPGDYDRCRSMLSGLGGSENGCVYPVQDDCRTTVWTYQENNDGALDSFQPDEDLKKRKKISYVRRRKDMYKALGPGSEAEDASLLAFGTLFSGPYKGSESYFDIHESPKDRRLQTILEKVEFLPFAPEIIATGKEFARKKIKEPFLCAQLRLLDGQFKNHWKATFSALKEKLKAVALEMKKTQGSGPIHMFMMTDLPPANWSKTYLADIAKDGRYKLHTLKESDELVAQTAERLMAAEHGVRSGFIPKNIANTRKDCDPVQLPEILLYVEESVCSCASLGFVGTAGSTIAGSIETMRKNNVCQL

SEQ ID NO: 44553 - protein, 1014 aa, Oryza sativa
MISLHSAPFTLLVKLPGRRRSGLTPPRCAVRGAGNVSSAAVREMAVAEGRRQHEYSIDARLRQLAPEKVSADDRLVDYETLLVARFLDILEDLHGGDFRQVVEDCLRLSGEYQSEGDPARLGELGGLLTSLDVGDAIMVASSFSHMLNLANLAEEIQMVYRKKAEASRRGDFVDEASAPTESDIDETFQRLVRGLGKSPREVFDALRSQTIDLVLTAHPTQSVRRSLLQKHASIRSCLTQLCGEGISDNEEQEIDEALQREILAAFKTDEIRRTPPTPQDEMRAGMSYFHDTIWNGVPKFLRRVDTALKNIGIDERLPYNAPLIQFSSWMGGDRDGNPRVTPEVTRDVCLLARMMAANMYFSKMADLMFELSMWRCNDELRARANELHRKSSRKYAKYYIEFWKKISPGEPYRIILGDVRDKLYNTCERARQILSKGISSIPEDQTYTNVEQFLEPLELCYRSLCDCGDKLIADGRLLDLMRQVSTFGLSLVKLDIRQESERHTDAMDAITTHLGIGSYREWPEERRQEWLVSELRGRRPLFGPDLPQSEEVADVLGAFRVIAELPADSFGAYIISMATAPSDVLAVELLQRECGVKKPLRVVPLFEKLADLQQARATMELLFSVDWYKERIDGKQEIMIGYSDSGKDAGRLSAAWQLYKAQEEIVGVAERHGVKLTIFHGRGGTVGRGGGPSHLAILSQPPNTVNGSLRVTVQGEVIEKSFGEENLCFRTLQRFTAATLEHGMNPPVSPKPEWRRLLDDMATVATDEYRSIVFQEPRFVEYFRAATPETEYGRMNIGSRPSKRKPGGGIESLRAIPWIFAWTQTRFHLPVWLGFGAAFRHAMQQSDAGGGLATLREMYDEWPFFRVTIDLLEMVFAKGDPGIAALYDELLVPDDLRPFGEQLRANYVETQRLLLQVAGHKDLLESDPYLRQRLMLRDSYITALNVCQAYTLKRIRDGGFRPETRPPLSKELLGSSAVAEKLVKLNPNSEYDPGLEDTLILTMKGIAAGMQNTG

SEQ ID NO: 44554 - protein, 364 aa, Oryza sativa
MGASCSSPFPPPPSPAESNAPSASAMHHPPHPAAGGGGPVMPYADADRTLRALAGAAEGFGRRAIGGLHGPLYRVTSLDDDGHGTLRQACRAHGPLWIVFDVSGDIHLRTYLRVTSHKTIDGRGQRVRLLGKGLQLKECRHVIVCNLQIEGGRGHDVDAIQIKPSSADIWIDRCSLADCDDGLVDITRGSTDVTVSRCRFSRHDKTMLVGADPSHTGDRGIRVTVHHCFFDGTRQRHPRVRFGRAHLYNNYTRGWGIYAVAAGVEAQVASQCNVYEAGAERKAVFRYVPERAADREEAEAGWVRSEGDAFLNGARPCLVDGGDAAVFRPEEYYERWTMEAASPALKEVVQLCAGWQPVPRPPGE

SEQ ID NO: 44555 - protein, 156 aa, Oryza sativa; identical to SEQ ID NO: 31111

SEQ ID NO: 44556 - protein, 462 aa, Oryza sativa
MSKLDYCFSNDYMVLRPDRAGAYELLHLLFSPKVGRNKAVDCFTSTELHSFRRRLSIFLNLLLQLFLLSLVGPLVAVLGGALEFALNLASNVLHGRMEYPDRKSASYRSITGLIDPRVDLERSITPADSRYHAALCVMASKVAYENEAFIRDVVTRRWQMEFVQFFNCWNEFENAYTAQAFVFCDKAADAELVVVAFRGTPALDVARWCADVDPSWYKIPRLGRAHAAYTHALGAQRNIGWPKWVEHVKGKPQRVHAYYAIRDAVKRLLEANGRARVLVAGHGSGGALAVLFATVLAYHKEKAALDRLAGVYTFGQPRVGDAMLAMFAERNLDRPRKRHFRITYGDDPLPRLPHESSAAHFLHFGIRLHFDSLYNLKVVKELPGDGSSSSSAAEFATSRINAAWELARSAYLGYWRSAYCREGWLLMAARAAAVALPGLPFHRVQDYVNAVTLAGSNIPKDM

SEQ ID NO: 44557 - protein, 813 aa, Oryza sativa
MLGQGTFGQVAKCWDGETNSYVAVKVIKNQPAFYQQAIMEVSLLSMLNEKYDPDDQHHIVRMLDFFLYQNHLCIAFEMLGHNLYELLKRNSLRGLQLKYVRTFSRQILDALVVMKDAGIIHCDLKPENILITPNVKTAAGVKVIDFGSACLEGKTIYSYIQSRYYRSPEVLLGYPYTTAIDMWSFGCIVAELYIGLLLFPGASEYDVLCRMIEILGGQPPDDLLREAKNTGRFFKQVGSIYPGIEMQNGPISAYRILTEEEIETRESKKPKVGRWYFPRGRLDKLIYTYPWKNLNGENLPETEKTDRLALVDFLRGLVEFDPNKRWSPLQASYHPFITGEAFTGPYEPIQETPRIPVGRVAAVDHNPGGGHWLAAGLSHQVGSINRGLPFNNAFAPKIPFSYGSSCGSFGSHGSFNDNVGLASSYGSYDVNSVNMYHSPLGPSGFNLHSQAGGTFLGSSPDIRRRSYLYHGGGIRLSPGCPGPMSLGASPSQFTPPNSQMQIPSTATGKYGSTSPARSSHGSLGKAAAVGQYNRRRNLGHPPISMPPHEYTSQLTQGHHGDGTISNHFDGYARGHSGYPQSALPNPGHFSWRPHTCAGSGLSTDTSNHGSFPPSRYGGFPPTHSSNVSADTLASTSSIPDPADWDPNYSEESLLQEDTSLSDALSDLHLKDASGQTNQSSRLAHIQSHAIANSNSLSMNQRGDRLFHASTLTESSASTGHVTYDGYHNANYSQLNFQSRHGQPFQRYNHMTASYLRPMGNHHNGQPVWPNYGMAEPPPATMADGMPWGGRPGHSFTAGGLPSSFAGKDFGRIF

SEQ ID NO: 44558 - protein, 377 aa, Oryza sativa
MGSHRHRSAGQCSLVQPPRLITCLLLLLLLLLSPPALPCSASSSSSSSSVITHLPGFHGRLPFYLETGYIGIEEKTGTELFYYFVESETNPDTDPLVLWLVGGPRCSAFSGLAYEVGPLNFVLEAYNGSLPRLVYNQYSWTQMASIIFLDSPVGSGFSYARDSNGYDVGDISSSLQVVTFMKEWLNDHPRYRSHNFYVGGASYAGKVVRVIVQYISEAIEEQRQRPLIDLKLQGYIVGNPITGSKFDKNFHVPYSHGVGIISDQLYEAAVTHCKGDFVNPTNQLCANVVYTINKLMSEVSDGNILEDKCVKAAPKPTIDVSASRALLEEYSRLSKPPIRPSMDCASYGYYLSYCWMNDNTTRDALKIKKGTIGEWLR

SEQ ID NO: 44559 - protein, 698 aa, Oryza sativa
MEGVVTSSVGEPNQDNEPRDSSIELPRVITDMETSAMHDPEAQKLIGHEADTELTPYEGMEFESEDAARDFYSKYARHAGFRIRISRYTRSRRDNSIISRRIVCSKEGFHETRDCENLHVDQKQQARVGTRVGCKAMLMIKKFGPDKWVVTKFIKIHNHGPVPPRKPHAGEHHDCDLMENPHSIEVDPIDEPVEGMEFESEEAAKLFYINYARVNGFRARISRYCRSRRDNSIISRQIVCSKEGFREVRARKDITDGGKTTKRPRMITRVGCKAMIVVKRMNSGKWMVSKFEKEHNHSLLSSRAVPITSNDSSREVIDFAATSNDPNEVKAEGCSTGIQCNSTDSLTVLYNHLCQEAIKFAKEGSVTEEIYHVAMNALKEAAEKVSEVKRSHPTMSQSKHEVMQMETMSASQCSNDDKQKTMTPQLKFLQEPSPSLVLIPTNLLTHSSSNCADNIPLSCDLTINAGEVKHVSESSCLAANRKEDSSQKSQGKDERFHVLSKETTVAIPAIPLTLYMPIMKNPTGDSADGQYRLLAAPIEAVPISYRPAEPIQQPHGSFPNSGPLPGFLPKLYKRGKGPNSLVHATALACGARVVPPEEAASLIKAIESKIRSGGATIAKLPSSSLTPLIPEVASMSSSSEDDEENDHSEPLMASVEHNCHDQSSEEMKLEADPPSELETEAENCSAQPENENNGPTHC

SEQ ID NO: 44560 - protein, 300 aa, Oryza sativa
MGLLVHLPNLAGARRPSPCGGHRRARGGARFSVSAAAPGGGVKEEEEEEEEEEEKGTRGKERIVIRVSDPVRERRLPPPLFSSPDAPSPAAGRRRRKGEDEDDGEDRRRRYHVNVGDAIRALREELPAAFYREPSFHIYRDDIVFKDPINNFTGIDNYKRIFWALRFTGQIFFKALWIDIISIWQPVEDVIMIRWIVHGIPRVLSDGPGRFEGTSEYKFDKNGKIYEHKVDNVAKNTPTKFKVLPVVELIRSLGCPSTPKPTYFETSSLQLISLLPFWFKLTWMRCYLSLYLILANLSKG

SEQ ID NO: 44561 - protein, 630 aa, Oryza sativa
MARLLLLLVLIGGICAAAAASSPLLPAAETMRVSFAGKSEFRTVNRKPLGTCLDPSPYLEISVSTGGAPLPDEAFLNVTVSGVRRPDRSHWLAMITPSNSSVLGCPLNGVNYIETGDLASLPLLCHYPVKAQYLTSDPGYLGCKASACQKRRASGTCKVRTCAATLAFHVINFRTDVEFVLFSGGFATPCVLKRSGALPFANPAKPLHGHLSSVDSKATSMRLTWVSGDARPQQVQYGTGKTATSVATTFTHKDMCSIAVLPSPAKDFGWHDPGYIHSALMTGLQPSQSYNYRYGSDSVGWSNTTEFRTPPAAGSGELSFVIFGDMGKAPLDPSVEHYIQPGSTSVAKAVAAEMQTGKVDSIFHIGDISYATGFLVEWDFFLHLITPLASQVSYMTAIGNHERDYAGSGSVYPTPDSGGECGVPYESYFPMPASGRDKPWYSIEQGSVHFVVMSTEHEWSEKSDQYNWMEMDLSSVDRSRTPWVIFIGHRPMYSSSSGIPPSVDPNFVSSVEPLLLNHKVDLVFFGHVHNYERTCAVYQGNCKGMPKKDAKGVDTYDNSNYAAPVHAVVGAGGFNLDGFPKIGLHSWSLSRISEFGYARVHATKTDMLVQFVNSNTSAVQDQFRIVKGAR

SEQ ID NO: 44562 - protein, 318 aa, Oryza sativa
MACSLLPPLAPVSPPPRLLLPSSRSALLPRGPRVAPRVPVSPPRALPDTAVGAAEALRGALADAFLASPPTWRSAAVSNLAIFVADSPVLLSGLSASGFAAAYLLGTLTWRAFGPKGLVLVASYFVLGTAATKLKIKQKEALGVAEKRGGRRGTGSVIGSSAAGCVCALLSIYNVGSAALAELWRLGFVASYCTKLSDTVSSEIGKAYGRTTYLVTTLKVVPRGTEGAISIEGTLAGILASIILASVGYLLGQVNVSQGAVCVLASQIANFCESYIGATLQDKEGFEWLTNDVVNVLNISTGGILAVLMQQLLVSWRS

SEQ ID NO: 44563 - protein, 399 aa, Oryza sativa
MDSTACLRLPFLPARTRPSSSSSSSPRRAARASSIKCCTAASDAGASSASISSASPRRPDVVNGVGPAGVDGLAGPPVPVPDSPAPASRDLHWLPRPLTSADLMGVSGEGLKVAYQGCPGAYSEAAAKKAYPNCQTVPCEHFDTAFKAVENWLADRAVLPLENSLGGSIHRNFDLLLRHRLHIVGEVRLAVRHCLLANPGVKIENLKSAMSHPQALAQCEHTLTEFGIEHREAVDDTAGAAKTVAEQNLQDTGAIASSLAAELYGLNVLAENIQDDKDNVTRFMMLAREPIIPRTDKPFKTSIVFSLEEGPGQLFKALGVFALREINLTKIESRPHKKRPLRITDDSFSTPSKQFDYLFYMDLEASMADPKTQNALGNLKEFATFLRVLGSYPTDVNEA

SEQ ID NO: 44564 - protein, 388 aa, Oryza sativa
MGCFCIFGKRRATRQQSSQHNDDPSGDMNITKFTYKELSRVTENFSPSNKIGEGGFGSVYKGKLRNGKLVAVKVLSLESRQGAKEFLNELMAISNVSHENLVKLYGYCVEGNQRILVYNYLENNSLAQTLLGYGHSNIQFNWATRVNICVGIARGLTYLHEVVNPHIVHRDIKASNILLDKDLTPKISDFGLAKLLPPDASHVSTRVAGTLGYLAPEYAIRGQVTRKSDVYSFGVLLLEIVSGRSNTNTRLPYEDQILLERTWVHYEEGDLEKIIDASLGDDLDVAQACMFLKIGLLCTQDVTKHRPTMSMVVRMLTGEMDVELAKISKPAIISDFMDLKVRSMRKEVDIVSSSTSTLLSSIMAHSSPLLSQETTEASMTFTAISDRE

SEQ ID NO: 44565 - protein, 811 aa, Oryza sativa
MDHDSLQNTMEHPVPGEEHEEDNSMKVDVAFDGVHSPFRYRHKKRSKVWEEYKPIFLNGKVQFAECLYSHNRLSCKDSNGTSHLWRHQKICPGKEEAAQRRQKDSYFPCVLVNENDPVSPHDPVNDVITETLSDINSVTPSGNRFTSKVWKEFTPVYIEGKLQAADCIHCQKRLSANKFGGRSHLSRHLITCAGRRGRGGGQIHQKGLFYPSSVPSLKSRVQDELSPALTNGKVQIAEYSIKLLRASSSGDSTPKPIRVVPAEHSVPTPDYTSLMKQRTSFVTTPAGQETSDPDLVGMIALHGYPLSIVEHEEMMRFVKKLNPVVNLVSRNAMEEHCLTLFQEEKENIKGKIAHFSRRVSLSASIWTPDGPETTVNYLCLTAHYIDEDWKVHRIIIKFGMFWSAPADLGRMIHCMEACVPESESGSYNVILDAIRDWNLDQKLLSLTSVGEVRGDTNTSLLKEMLIEKKCLPIGGTLFNVACVDYVLNSIVFKVQADILRLVGDIVMDFLVSLTQQQLLEVISQTGLKCPQEDAKWWHKLYFRLEVLLHFKKSFPSEERVSPEDTKTAESVCKILRTIYRVIEVISSPSSPTANIYFNEIWKVRTVLQEEALNDHREIATVAMVMQEAFNEYWQNSYLWLAIPVVLDPRFKFSFIEFRLKRAFGTDSASYLSVIRETVRELFNEYCHSLNQASDVVSNSEALCADDNDSLEDWDQHLHEQASRQLSSELDDYLEDGLVPRKDDFDILNWWMTHSTKYPTLATIARDILAMPASAVQSEAAFSSSGPVIPKHQSTLNIRTIEALVCTRDWMR

SEQ ID NO: 44566 - protein, 483 aa, Oryza sativa
MSGGGGEVEAAAEAAPLLVPHDPQPAVGAEVRRQVGLAAPLVACSLLQYSLQVVSVMFAGHLGELSLSGASVASSFANVTGFSVLLGMGSALDTFCGQSYGAKQYDMLGTHAQRAIFVLMLMGVPLAFVLAFAGQILIALGQNPEISSEAGLYAVWLIPGLFAYGLLQCLTKFLQTQNIVHPLVVCSGATLVIHILLCWVMVHCFDLGNRGAALSISLSYWFNVILLAIYVKVSEVGRRSWPGWSREALKLKDVNMYLRLAIPSTFMTCLEYWAFEMVVLLAGFLPNPKLETSILSISLNTMWMVYTIPSGLSSAISIRVSNELGARNPQAARLSVFVSGIMCLTEGILVAIITVLVRDIWGYLYSNEEEVVKYVAAMMPILALSDFMDGIQCTLSGAARGCGWQKVCSVINLCAYYTIGIPSAVTFTFVLKIDGKGLWLGIICAMTVQILALVVMLLRTSWNEEAEKARARVQGSDGRITLA

SEQ ID NO: 44567 - protein, 445 aa, Oryza sativa
MDEEYDVIVLGTGLKECILSGLLSVDGLKVLHMDRNDYYGGDSTSLNLNQLWKRFRGEDKPPAHLGASRDYNVDMVPKFMMANGTLVRTLIHTDVTKYLSFKAVDGSYVFSKGKIHKVPASDMEALKSPLMGLFEKRRARNFFIYVQDYDEADPKTHQGLDLTTMTTRELIAKYGLSDDTVDFIGHALALHRDDRYLNEPAIDTVKRMKLYAESLARFQGGSPYIYPLYGLGELPQGFARLSAVYGGTYMLNKPDCKVEFDMEGKVCGVTSEGETAKCKKVVCDPSYLPNKVRKIGKVARAIAIMSHPVANTNDSHSVQIILPQKQLGRKSDMYVFGCSYTHNVAPKGKFIAFVSTEAETDHPESELKPGIDLLGQVDELFFDIYDRYEPVNEPSLDNCFVSTSYDATTHFETTVTDVLNMYTLITGKTVDLSVDLSAASAAEEY

SEQ ID NO: 44568 - protein, 56 aa, Oryza sativa
MLPAGLGDLDHARLFWRRPAATTCGSLRHPCPAIPFSPLSQIYPRGGGRRRRNRGR

SEQ ID NO: 44569 - protein, 520 aa, Oryza sativa
MATASSPASVQDYPDLQEDDDDDFQDDDDLDDEDEEDDDDQEPSPSPSDEARLQSVLRRLTAEEVRIRVHDVEIRGCCRTRRAAVEAAVGSDLPRAATVRDLVRAAAAAADRIRRLGAFDTVSITLDAAPPGIPGNAAVIVLVDVAEARGRAAGELGIFANKGTRSCSVQGSVKLKNLFGYCETWDASGDLGLDQTVELSTGVAIPRIGAIPTPLVARISFLSEDWLKSSLREHMMGVSVGLLSTMNHNLAYNLSWRTITDRALMSSNSIRGQLGHSLLSSIKYAYKVDQRDSRIRPTRGYAYLFSSQVGGLAPESKDARYIRQELDLRVALPLGVLNGALNAGVAAGIIHPLARGSTGSISPLSEQFYLGGNRSLMCRLGGPSSLLGFKKRGLGTDLQSSTPENSENVASTSPELSARGGDIAVTAFADLSFDIPLKPLRELGIHGHAFVSAGNLAKLTEPDLRKFPLAEFLQTFRSSAGFGVVVPTRLFRIEVNYCHILKQFDYDLGKAGIQLNFSSP

SEQ ID NO: 44570 - protein, 720 aa, Oryza sativa
MAEGRRYAIAPQLDIEQILKEAQRRWLRPTEICEILKNYRSFRIAPEPPNRPPSGSLFLFDRKVLRYFRKDGHNWRKKRDGKTVKEAHERLKSGSIDVLHCYYAHGEENINFQRRSYWMLEEDYMHIVLVHYLEVKAGKLSSRSTGHDDVLQASHADSPLSQLPSQTTEGESSVSGQASEYDETESDIYSGGARYNSFSRMRQHENGGGSVIDDSIFSSYVPASSVGSYQGLQATAPNTGFYSHGQDNLPVVLNESDLGTAFNGPNSQFDLSLWIEAMKPDKGTHQIPLYQAPVPSEQSPFTGGPGIESFTFDVVYNNGLSIKDVDGDDTDGETPWQIPNASGTFATADSFQQNDKTLEEAINYPLLKTQSSSLSDIIKDSFKKNDSFTRWMSKELAEVDDSQITSSSGVYWNSEEADNIIEASSSDQYTLGPVLAQDQLFTIVDFSPTWTYAGSKTRVFIKGNFLSSDEVKRLKWSCMFGEFEVPAEIIADDTLVCHSPSHKPGRVPFYVTCSNRLACSEVREFDFRPQYMDAPSPLGSTNKIYLQKRLDKLLSVEQDEIQTTLSNPTKEIIDLSKKISSLMMNNDDWSELLKLADDNEPATDDKQDQFLQNRIKEKLHIWLLHKVGDGGKGPSMLDEEGQGVLHLAAALGYDWAIRPTIAAGVNINFRDAHGWTALHWAAFCGRERTVVALIALGAAPGAVTDPTPSFPSGSTPADLA

SEQ ID NO: 44571 - protein, 604 aa, Oryza sativa
MPKHYRPAGKKKEGNAAKYITRTKAVKYLQISLATFRKLCILKGVFPRDPKKKVEGNHKTYYHMKDIAFLAHDPLIEKFREIKVHRKKVKKAFAKKNKDLADRLLNRPPTYKLDRLILERYPTFVDALRDLDDCLTMVHLFAALPAVEGERVQVQRIHNCRRLSHEWQAYISRTHSLRKTFISVKGIYYQAEVQGQKITWLTPHALQQVLTDDVDFNVMLTFLEFYETLLGFINFKLYHSINVNYPPVLDPRLEALASELYALCRYMSSGRVPGNSEPAGLIEDKEGEDNKESSKTDESELRLAQLQHQLPTNEPGALMHLVQESTAADADDADAKECRSLFKNLKFYLSREVPRESLLFIIPAFGGTVSWEGEGAPFDETDEDITHQIVDRPTQSHVFLSREYVQPQWIYDCVNARIILPTEGYIVGRVPPPHLSPFVDNDAEGYIPEYAETIKRLQAAAQSQVLPLPSLGDEDMENSLVEAIIDRSESNEIADKKRKLEMLEKQYHDELRMEYEGKTFSNRTADNQPDVVDKSDTKEADDHMEDSHKQAEKDAADISKTLMSRKQRGLLQAIEINQERKKDKVNLLKKRKKNADSSASAKGR

SEQ ID NO: 44572 - protein, 144 aa, Oryza sativa
MSRSAASTALSRPPRSPKICSLTPRPTWTSSQRQLRGEGIHPGGAGDPLWRVLHRQGALLLLQRPPHRAELRDQCQLARQRPEQDLLRRPERDDVGEQHPRHRRGDAGAPAPALHPPLHPRPAASQLRRRPSAPPAAARHSQGR

SEQ ID NO: 44573 - protein, 65 aa, Oryza sativa
MRSSFNRRVLHADVKLRRTSVAAMLSAVLEKSSLRPRRRLRTSWDSETAWPTSRRASVAVFIFWQ

SEQ ID NO: 44574 - protein, 268 aa, Oryza sativa
MEIPKQGQPPRVAGTPPTLPGAITHTTQVGYPAVFYNGNWGAQVPASSYLIVPMSEPPAQVGVPRPNALGLSGSGARPLSRVSLRPPQQVLSVQTALPGMAAMMPSPSMIAGKKMAASPKVQMLKSVPFRSAGSKRPAQELLPKAQPQLFESVRSKFRETLAAALNMDSDQQCAPQSVETVSHVGSASENKQADGAGIDSVTETSALKSGQHNMLSSNSASNMSIKMSFCKAMDFAGLLTLLELLRLFLNPIQTESENLILMKVLMYL

SEQ ID NO: 44575 - protein, 313 aa, Oryza sativa
MAAPREPEVIRDKAAMRAWSRRRRAEGKTVAVVPTMGYLHQGHLSLISAAAAAASADPVAIVVTIYVNPSQFAPSEDLATYPSDFAGDLRKLASTGVVDAVFNPPDLYVRGAGRRGAASGGAISCLEEAAGDGHETWVRVERLEKGMCGASRPVFFRGVATIVSKLFNIIEPDVAVFGKKDYQQWRVICRMVRDLDFAIEIIGSEIVREADGLAMSSRNVHLSREEREKALSISRSLVDARTGALKGNTDCKQIKNKIVQTLTETGGQVDYVEIVEQESLVPVEQIDGPVVICVAAWFGKVRLIDNIEIDTRS

SEQ ID NO: 44576 - protein, 327 aa, Oryza sativa
MAAAATRAVRRLLIASRSLHAISSEGAAREAATSFVHPAAVVHPDAVVGQGVSIGPFCTVGASARIGDACQLHAGSHVMGDTELGERCVVLTGAILGSDIPGQTIIGENNVIGHHAVVGVKCQDLKYKSGDECFLQIGNNNEIREYCSIHRSSKSCDCTVIGDNNLIMGSCHIAHDCRIGNNNIFANNTLFAGHVVVEDCTHTAGAVVVHQFCHIGSFSFLGGGSVIAQDVPRYMMVAGDRAELRGLNLEGLKRNGFSDQEVRMLRKAYQQVFMPSINSQSSFDERLAELEREIELSETHVSYMVESIRMSFGQGRRGICKFRSWNR

SEQ ID NO: 44577 - protein, 127 aa, Oryza sativa
MKARSRSSNGDSRLSVRKTKAEKDPNKPKRPPSAFFVFMEQFRKDYKEKHPNVKQVSVIGKAGGDKWKSMTDADKAPFVTKAEKLKAEYTKKIDAYNNKQAGGPATSGDSDKSKSEVNDEDEGSGDE

SEQ ID NO: 44578 - protein, 219 aa, Oryza sativa
MVDAAAASGDACGRVTEWETGLPAPGEMTPVSHQLVPPALAAAFGIDLAAVGVLLPSPSVDSPVSHLFFPVDEDDDEDEEGEGEGGNDDAPAAAAAGGGGGRCGKKARMVWTPELHHRFVEAVAHLGEKGAVPKAIVRLMNVDGLTRENVASHLQKYRLYLKRTRVAATPPPSPPPPPPPPPPLPPAMYVPCFAAKPPLDAANRSDSPPSRTSDATTKQ

SEQ ID NO: 44579 - protein, 60 aa, Oryza sativa
MAVAARRQKGIRQRRPGDSDSGAAAAAPSSPSDDGGSGGDVSGGSGGGGEGNMMSVLDSR

SEQ ID NO: 44580 - protein, 700 aa, Oryza sativa
MGAGKKTQTENEFRELPEKELGGVVFCCNNNTFDECFTKQLFGLPQRNILYVKNVKPGLPLFLFNYSNRQLHGIFKATSTGQLNIDRFAWMSEQSNDAKTNAKTTPFPAQVRFSTRTECPPLPESKYKSVIINNYRKDKPSHFRFELDHRQTRDLISLFLPAPVRANQNKLSIPKPPATAHTVPNPWNRPLPFLTAKAPVVSDKVKSESNVKDVDQFNVSSHSHDIVPHTLPDVEVDLASTSTTSRSNLNKDASGCDDLVAGLIKEDKESVDDDQHAKMDLPVKLQELSSLQQKEANFLEDAPVSTSAQSIRQDTRFAATLPKDSFNATSQCDTSLKDTSFVQCHEYAELYQIINDLSKKTEEMEKMKVDSDQEILLLKKLVKVMERKVEHLEQQLEKSHSSSAPLFGVTNDDVEGPSILLTGGHNGINWLSSLDSYCPATDILETLMPMSSARAYAAVATLKDHVFIFGGWNGIRSLWYNTVECYNRGANKWIGLPCLNHEKGHLAGATLNGKIFAIGGGDGSQSFSEVEMFDPAVGKWIYSLSMQQPRCAPAAAELNGVLYVIGGYDGNMYLQSAERYDPREGFWTQLPRMRTRRGSHSVVVLGDSLHALGGLNRNTTFSSVEIFDTRANSWRRGSPLSVPRAHGCAVTLDGNAYLIGGIQSSEEYVETVEVYKEGQGWSISGSKAFGKRAFACAVAI

SEQ ID NO: 44581 - protein, 90 aa, Oryza sativa
MPTTAEDQKQWKVVEVQRINAESHPPPRRDDRCDDLRNDEEFQRVMDNVVFGRGYDPTRDDLRISTDPTAMVELIEYYHKMGLIEGEWVA

SEQ ID NO: 44582 - protein, 397 aa, Oryza sativa; identical to SEQ ID NO: 33856

SEQ ID NO: 44583 - protein, 531 aa, Oryza sativa; identical to SEQ ID NO: 43539

SEQ ID NO: 44584 - protein, 491 aa, Oryza sativa
MGWLSKIFKGSVNRVSRGHYNGNTHEGHSAWHTKAYEHDSDHEDIDRAIALSLSEEDQRKGKAVDEVDIDHRLHEDEQLARALQESLNDEPPRQNVPVKDVHSESTPATFMPPYIFPSTGLRVCAGCKTPIGQGRFLSCMDSVWHPQCFRCFACDRPISEYEFAVHEGNPYHRSCYKELFHPKCDVCKNFIPTNKDGRIEYRAHPFWMQKYCPAHETDRTPRCCSCERMEPKDSKYITLDDGRKLCLECLNTSIMDTDECQPLYIDIQEFYEGLNMKVEQQIPLLLVERQALNEAMEAEKTGHHLAETRGLCLSEEQIVRTILRRPVIGPGNKIVDMITGPYKLVRRCEVTAILILYGLPRLLTGSILAHEMMHAYLRLKGYQTLDPKVEEGICQVLAHMWLESEITSGSSSIIASIAASSSSSSSSSAPSSKKGVQTDFEKKLGEFFKHQIETDPSDVYGDGFRDGIKAVERYGLRKTLDHMKLTGVFPC

SEQ ID NO: 44585 - protein, 508 aa, Oryza sativa
MEAAAKVGRLTRSSLQAASCPAVNGGVVVFFAAVVAGALVSASWMSTGARVTSIPMIATRNMAQHAAASPEPEPTLPRLGNLAPPPRQPPPPAPAPAPDAAAAASPSSSCPAYFRWIHEDLRPWRDAGITREAVDGAARRYGAKFRVTVVAGRLHVARYGRCFQTRDMFTQWGVLQLLRRYQGRVPDLDLMFDCQDLPVVNAGDRRGRTSSSPPPLFGYCGSEPTLDIAFPDWSFWGWPELNIKPWETLRGEIADGNAAVNWTGRAPYAYWKGNPTVGADRRNLLRCNASGKRDWNARIYEQDWRKEVRDGFRESDLAKQCTHRYKIYIEGRGWSVSEKYILACDAVALIVRPRYHDFFSRGLMPLQHYWPIPGGGRGMCRSIKFAVDWGNAHADKAQEIAGNATRFIQEDLTMDRVYDYMFHLLTEYAKLLKYKPTVPDRAVEVTVESMTRGRRGLERQFMVDTMVEAGSGTGEPCELPPPFSSEELETLRRRQADAVRQVETWEKR

SEQ ID NO: 44586 - protein, 430 aa, Oryza sativa
MLEKDRIAYFYDGDVGNVYFGPNHPMKPHRLCMTHHLVLSYDLHKKMEIYRPHKAYPTELAQFHSADYVEFLHRITPDTQHLYENELRRYNLGEDCPVFDNLFEFCQIYAGGTLDAARRLNHKTCDIAINWAGGLHHAKKCEASGFCYINDLVLGILELLKYHARVLYIDIDVHHGDGVEEAFYFTDRVMTVSFHKYGDFFFPGTGDIKDIGEREGKYYAINIPLKDGIDDSGFTRLFKTVIAKVVETYLPDAIVLQCGADSLARDRLGCFNLSIEGHAECVKFVKKFNIPLLVTGGGGYTKENVARCWAVETGVLLDTELPNEIPDNEYIKYFAPDYTLKVSNVNMDNLNSKSYLSSIKVQVMESLRAIQHAPGVQMQEVPPDFYIPDIDEDELDPDERVDQHTQDKQIHRDDEYYEGDNDNDHEDGAR

SEQ ID NO: 44587 - protein, 323 aa, Oryza sativa
MMITASGPPCRSRGRGDTGGDHRRLPPSSTSPPPEQTAGNRVAARKAAAGPSFSLEGAGRCPRPRPVGGGDGAAASASASGRWAGRAEATGCGTAGRRRLGAERRRRRRIWRPSPDPAVRSPPGTMVAPKEAGKGDAGGGKGGAAATRVASPDPGWGSGRRRGGAETGRQRQRHGGQATTAAARSRRGRGAAVGVCQALVLASVMLRRRALAGHPLYLAGSGRPRPDPSPPRRMAAGRRDGCVWTASAAAARWRPASCSAGGFCRWWVLSLLMGGDVRMWKWQDDGLCWREAGMGLDVRDGDFLIVGRVFSLSSVSPLGRTLF

SEQ ID NO: 44588 - protein, 311 aa, Oryza sativa
MPPKRGAAPAAAFEYCELCRRNHDQGRRHRYFPAHRAALAAALSRFRSKLLDLRRALRHPSSAARSRLWCPFCSADLVDLDSRFACSNAIYHLASQDHLNGVKAFLQKHGGGMDQVDSFRISEDELAKWEKCCESSSTEQETSTEGLIGPSLGPLKDIRNKSTSKHLDNFAETYIPSSSNTASNVVMPLQSPTNGAYYPNSTACQGSSSFGSIPYSAPFETFGVPIIPCGSVALHEQQVMLGTDLFQSAGTKMKGGQLTILGNGPNSSVSCSVHVQQRNSGGNSSQGTTHFYSFSNIYIYIFVTISVEACH

SEQ ID NO: 44589 - protein, 241 aa, Oryza sativa
MGTNPSLHELAAGAAPRGRVVRILVRDADATDSSSSEDEAVAVAQPRPRRRGKVGGGGGGGGGVKRRVMEAGAGEARPTARFRGVRQRPWGRFAAEIRDPHLRRRLWLGTFDTAEEAAAAYDAASVRLRGSSAATNFASVRCCSLPPELPKPTISPPEAAVRPITLPIGTAKPTLLPRVKEEGESCGGRVKEEASSCEVQVLAPEPMWTMISGKRKERSGCGTRVRAFHAVSACVEEVGGA

SEQ ID NO: 44590 - protein, 415 aa, Oryza sativa
MPGQMEEAEFNQYAGYVTVDAKAGRALFYYFVEAPHDPLKKPLVLWLNGGPGCSSFGAGAMLELGPFSVRSDNKTLYNKQHAWNTVANMLFVDVPAGVGYSYSNTTSDYYNIGDKKTTDDAYIFLINWMKKFPEYQGHDFFITGESYAGHYIPELANLIVSNNRAINSTNIKLKGVAIGNADLHDNVTLRASFDYYWRHAMISDRVYRAIQTSCSFNETYTNDCQNAMNLANKEKGNVDDYNIYAPQCHDASNPSPSGSSDSVAFGDPCTNHYVSSYLNNPEVQRALHANTTGLNYPWMDCSGLIFDNWKDSPETMLPSIKTLISSGTRIWLYSGDMDAVCSVTSTQYALDILGLPVETSWRPWRIDNEVAGYVVGYRGLVFATVRGAGHMVPYYQPRRALALLSSFLEGKLPPE

SEQ ID NO: 44591 - protein, 138 aa, Oryza sativa
MSSSAALALALRRATSSAHKQKQKQALALTDAAASRIRQLLSLRHRPYLRLGVKARGCNGLSYTLNYADEKGKFDEVVEDKGVKVLIDPKALMHVIGTKMDYVDDPLRSEFVFINPNSKGECGCGESFMTTSSKGSTS

SEQ ID NO: 44592 - protein, 949 aa, Oryza sativa
MEPSAAVASRPPSFTAQTNALLRKNLIFQKRNRKGTIRLIIVPIYLCLLLTILQRVINSVLDKPKFRCGCKCVDVNGTGSCQNVCGIQYSTLDQAGSCPIPNPPEWPALLQLPRPEYRAMQESSLYAGFPDVSCRKSQSCAATIPFTGANETLSNIVMQNLFTSSPLSNLSDNASISSLLLGTDVPGTYTGFIEPAFVSDRPIYVLRPQCKASDSVTVPITFGDINIRKEMLCIQGLPLWRNSSAIINEETFNGYRKGKSQEGINEIPMAYDFQDSNEKHFSVLALYNSTYQNVSYVPMPFGLLHISRSLNAVSNAYLQFLRGSGVKMLLAFTKEMPKQETRLRFDFSSVIGPLFFEWVVALLFPVMLTYLVYEKQHKLRTMMKMHGLGDGPYWIIYYAYFLILSMVYLVLFVVFGSVIGLNFFKINDYSIQFVFFFSFMNLQIVLAFLTATFFSKVNTAQAIAYLYIFGSGLIAGSLIRNFIEGGKFPKHWITVLEIIPAFSLYRGLYELGQYAIRASEAGSHGMRWSDLNDHANGMRDALIIIILEWLVLLPVAYYLDHSASVGHKSSFLSLIKNLLKKNPTWRRVSINEVVNDAVHVEMVKQDIIKERETVDQVLQLQSSGYAVVCDDLKKVYHGKDGNPDKFAVRGLSLALPYGECLGILGPNGAGKSSFISMMIGLTRPTSGNAFVREFSIQTDMEKIYNSMGVCPQNDMLWEMLTGREHLQFYGRLKSLNGSDLDTAVNESLRSVNLLHGGAPDKQVRKYSGGMKRRLSVAISLIGDAKVVYMDEPSTGLDPASRKSLWDAVKQAKRDRAIVLTTHSMEEAEVLCDRLCIMVDGSLQCIGTPKELIARYGGYYVLTMTTSPEFEQEVENLARKLSPNARKVYHLSGTQKYELPKQQVRIADVFMAVENFKRRTEVQAWGLADTTMEDVFVKVAKGAQSSEELS

SEQ ID NO: 44593 - protein, 460 aa, Oryza sativa
MPPPPPPPPPPPPSPPRLPLTAHRLPLPPATSPPASLLLAPRPSPTRALALLFPDSSARLLPSLPPAASLPATAVPSPLAAAACFVLLLPSSHLLFLSVHPSPSSPAAHLRAYSLASGRFSPAPLSFKRQASASGLPLHGLPFGLGVRLAGGVNAVALLSLSAGQIWVLAPGMAADGRTVELHKCAVVELEPSRPVYAMEVAMGRLLLGEAGGLRVFPLQGLMKSGKERQVRKEGAGAAVRKSLHKKNGIRNGFIVPIGHGGSEGGGKREAVSTRKLATLRVKQTSGSYFSFFSSCSSEDHHNSQGAVEVKNVVKVVSIRPLSKDKFLVLDSAGLLHVFSLQNKELLSEATSKRYSGNHTHCLDNAMKVQLFAVFPSSSTKTEIFWISDGGHSIHIMSALDVEPPNSDNGGGDGERESTTIKLTAIEAIFTSEKVQDIVPISKDSVLILGQGNMFLYGTS

SEQ ID NO: 44594 - protein, 408 aa, Oryza sativa
MELMTNQLMEVNIEGVRCSQLTSQLKKRLPCLERLRIINPQNEAETSSSSTDINDIFVDKTDLQLLDLSGNKEMKNLPTSISNAGQLKVLILDGCDALEDVVVPNRLPSSLRSFSFDGYGSAAPSRASTIELPLQSCRPVRRGMIRMKDVKTSVISLEGCTQLDNLFLRGLPNLVERDLSGCAIKVLDFGTMVTDVPCLKRLFLLGCEHLRAIRWGRSRLLELLCIDTRPARKVLGCARPSLAVDHKYFRLQVHACIVDARLARSLLATINYYYYFNISITSSMASSSGVVQPEETSKKMTEPSGQKHCGVAGIYGDVFSKVGDAVTTMEAFPQPPTQQLDRHMEIGDGSHSVESEVKQAYDESNKLIQLMVSCTSPCMCMMTRPAATPWLRKIGVTSGGAAWRGPPT

SEQ ID NO: 44595 - protein, 215 aa, Oryza sativa
MEEREKLPPPAVPLLPPAAGDRAPLLSLLMLPAVPVPPAAARVSSPTRLRRSSPVPVRSTGAATSFLSARPALPFYFLSRRRRRRRRRRVRQRPPAALSRRQPATAQLRPSALATVAPPAPLSPSAPLRPWPAAPSLCSAPRLLSTGEFILHRHLHVGPTVLSHVANRVNDATSDETTSQTTEGICQTTEGGDLVWFSKLKEPIYQGRDLTRDES

SEQ ID NO: 44596 - protein, 388 aa, Oryza sativa
MSPFRLPNVQVSEDTGKIFNLAALTLALMVCIYEAPSTLRRDLIGTVSAQLIRGDMWGAAKKLMLAMGSDMEEQWMRSLNLAVTNWIIETRRSGGTPVSPFTVFSYAVSAIRLWKVELYCPVVAMIMEHPAHQTKDEKLQFSLNYQHLEAVIQFIYRVTFRENWIDVTVNVDNIRCDLIQLVSETLMAKQGYGSDEKHFPSRISLQLTPLVQTDILSLTVSRSTDNPAQEVDTEMGLDATLSAAPATIGITMSAHETVTRTLRPWKFEHSVHGNTAALNWFLHGGAEGREVFSSEPHKRELLQPRSWFRNRYTNPGRPFTRGGGVIFAGDEYGESVCWRMPAAAAGKTVEWEMKGRIWVTYWPNKKRTLHVETRRVEFRELLRLTIRE

SEQ ID NO: 44597 - protein, 266 aa, Oryza sativa
MQINHMATASLSLLLCLAAAAGAAAAAVPPRLQCFEHPPDMKAGGGEAGVVVHDLAGYEAYVTGAAHSGRAIVLASDVYGFQAPLLRQIADKVGDAGYYVVVPDLFHGDPATTTVNFTEWLESHSPVKEAEKAKSIFAFLRNEGKSLVGVGGYCWGGKFAVEVAKTNEVEAVVFSHPYAVTADDMKEVKWPIEILGGQNDTVTPPRLVYQYVHALRQRNDIDFYAKIFPGVSHGFAGRYNTSDPFALETGKQALALMLDWFQKHLK

SEQ ID NO: 44598 - protein, 426 aa, Oryza sativa
MVTGSFSRSTSARLTARGGVGSPRVSAAAAAHRKWWWWAPSGPSFECAALAFFLSSVALVLACALYLYLFRYQGRGHAVAEFAGDNLESCDVFDGSWVPDRRYPLYNSSDCPFVERGFNCLANGRKDTGYLKWRWKPRGCDLPRFSARDVLERLRGKRVVFVGDSMSRTQWESFICMLMAGVENPKTVYEVNGNQISKTIRFLGVRFASFNLNVEFFRSVFLVQQSPAPRSSPKRVRAILKLDKMDNISRKWENADVLIFNSGHWWTPSKLFDMGCYFEAGGLLKLGTSINSAFKMALETWASWVKEKVDLKRTHVFFRTYEPSHWSGSNQKVCEVTEFPTAEAKGDDRSEFGDILAGVVVNMSVPATILNVTLMGAFRSDAHIGIWSHPSTILDCSHWCLPGVPDAWNELVISHLLTNGWRNLAG

SEQ ID NO: 44599 - protein, 624 aa, Oryza sativa
MFLAMTEEVRVIIVKLADRLHNMRTLTHMPQHKQYAIAMETLQVFAPLAKLLGMYRIKSELEYLSFMYMNPGDFAELKKRVEDLYKAHEQELEEANQILGEKIAEDQFLDLVSVETQVRSVCKELYSIYKTALKSKSSINEINQVAQLRIIIKPKSCNGVGPLCTAQQICYHVLGLVHGIWTPIPQAVKDYIATPKPNGYQSLHTTVIPFLNESMFHLEVQIRTEDMDLIAERGIAAHYSGRGVVSGPVRPGISSGRNSNGKVICLNNTGFALRIGWLNAIREWQEEFVGNMSSREFVDTITRDLLGSRVFVFTPKGEIKNLPKGATVVDYAYLIHTEIGNKMVAAKVNGNLVSPIHVLANAEVVEIIIYDKLSAKYAFQRHQQWLQHAKTRSARHKIMKFLREQAALSAAEITADAVNNFVADLEDESDYEQSIPSSENKDYTFNWQKILNSDKLSFGNKKSDCFLPVKNVSVPKVNGKHNKTVKELGIKINGSTFRGDSFTDFIHPGVSSSKEVLPSVDNWKAGKICAWHNTEGSSIQWLCIVCVDRKGMVAEVSSALTACGITICSCVAERDKRRGIGVMLFHFEGAYENVVSACSGVDMILGVLGWSVGCSCNPLGVLEC

SEQ ID NO: 44600 - protein, 391 aa, Oryza sativa
MVGVFTKCSERTIFKLEELIERGEHGEKYTIVDLEAEFSNLALDIIGLGVFNFDFDSVTKESPVIKAVYGTLFEAEHRSTFYIPYWNLPLTRWIVPRQRKFHSDLKVINDCLDSLIKNAKETRQEADVEKLQQRDYSSLKDASLLRFLVDMRGADVDDRQLRDDLMTMLIAGHETTAAVLTWSVFLLAQNPSKMRKAQAEVDSVLSNETINVDQLKKLEYIRLIIVEALRLYPQPPLLIRRALRPDKLPGGYNGAKEGYEIPAGTDIFLSIYNLHRSPYFWDRPDEFEPERFSVPKKDESIEGWAGFDPDRSPGAMYPNEILADFAFLPFGGGPRKCVGDQFALLESTVALALLLQKFDVELRGSPDEVEMVTGATIHTKSGLWCRVRRRT

SEQ ID NO: 44601 - protein, 100 aa, Oryza sativa
MFYLNDFKKAERYICAHVRLHWGPRFSFLLSIFNYIIEFSLSQDIGLHVFLNAHMIPFNEHTPQYKLGDPHYVESKIWKHFFCQIMGEKSSALEFSITKE

SEQ ID NO: 44602 - protein, 306 aa, Oryza sativa
MADPSKLQITPCGMLVQGNQINFTKLYLHHTPAGPEQNQSAVTSNDKKTGLGCIVVNNWSVYDGIGSDAKLVAYAKGLHVFAGAWHNSFSLVFEDERLKGSTLQVMGLIVEEGDWAIVGGTGQFAMATGVILKRMQEQKQYGNIIELTINGFCPLLKGSQCPVTKIGPWGSSHEGTVQDITESPKRLESITLYHGWSVDSISFTYLDHAGEKHKAGPWGGPGGDPIMIEFGSSEFLKEVSGTFGPYEGSTVITSINFITNKQTYGPFGRQEGTPFSVPAQNNSSIVGFFGRSGKYINAVGVYVQPI

SEQ ID NO: 44603 - protein, 651 aa, Oryza sativa
MNSMNPYRSIDMCLRLRRSASSWAAAVADHARSGRHDAALTVFRRVLAVHPTTAAADELACSALLRCCDARLAYQIHAQACRRGLVASNPVLACSLLAFYAAAASSPTAAIPPACNLFDEMAHKDAVSYTAMISALVRAGAAHWRQALALYPCMLQARAPPTQHTFAQLLSACASGRLHHQGTQLHAQLLRWGAGLNLVLKTALLHMYCNCGNMGYAHTVLHSTPQTDVVLWTAIITGYARSGDLQSALQMFRSMTRAAVLPNAFTYAALISACSSFRALQPGRQIHARLFKFGLEHDTSVCNALVDLYSKSSSRLLDLLHTFHAVDKPNVVSWTALIAGLACHGRDEEAFLAFSQMRLSGVLPNSFTVSTLLKGSSSSLAFLHARKIHGYILKTSFESLDAAVGNSLVDVYVRFARMDDAWAVATTMAFIRDRFTYTSLARGLNQMGLQQRTLEMFVRMFHEDVDIDGFSIASFLSSAASLASIETGKQLHSCSVKLGLSSDISVSNSLIDMYSKCKCMGDARSVFQSISEPKVVSWNALMSALVSNEYYNEALSAFEDMTLVGAKPDGITFSLMLFACNRSGLVDIGIKYFNSMGNLFGVLPQRSHYTLFLDMLGRSGRLTEAASTIDVIPIQPDLVNVQGSIGILKSL

SEQ ID NO: 44604 - protein, 484 aa, Oryza sativa
MGGVRPTLFDARKVFVRMLSSGVGGGDALVDTADPAKRLFKLIISCRKASAVEHELDHSGVRVTPDVAERVLERLDNAGMLAYRFFEWARRQKRGGCAHTVRSYHTVVASLAKIRQYQLMWDVVAVMRREGAVNVETFGIIMRKYARAQKVDEAVYTFNVMEKYGVVPNLAAFNSLLGALCKSKNVRKAQEIFDKMNSRFSPDAKTYSILLEGWGRAPNLPKMREVYSEMLDAGCEPDIVTYGIMVDSLCKTGRVEEAVRVVQDMTSRGCQPTTYIYSVLVHTYGVEMRIEDAVATFLDMEKDGIVPDIVVYNALVSAFCKAKKFENAFRVLNDMEGHGITTNSRTWNIILNHLISLGRDDEAYKVFRRMIKCCQPDCDTYTMMIKMFCENDKVEMALKVWKYMRLKQFLQSMHTFSVLINGLCDKREVSQACVLLEDMIEKGIRPPGSTFGKLRQLLLKEGRKDALDFLVEKMNILIQEPLFD

SEQ ID NO: 44605 - protein, 572 aa, Oryza sativa
MSYFGANVLHPRTIIPVMKDNIPIVIRNMFNLSAPGTTICKQPANENADLDACVKSFATIDKLALVNVEGTGMAGVPGTASAIFSAAKDVGANVIMISQASSEHSVCFAVPEKEVAAVSTALHVRFREALAAGRLSKVEVIRGCSILAAVGLRMASTPGVSAILFDALAKANINVRAIAQGCSEYNITVVLKQEDCVRALRAVHSRFFLSKTTLAVGIIGPGLIGGTLLDQLKDQAAVLKENMNIDLRVIGISGSRTMHLSDIGVDLNQWKELLRKEAEPADLDSFVRHLSENHVFPNKVLVDCTADTYVACHYYDWLKKGIHVITPNKKANSGPLDRYLKLRTLQRASYTHYFYEATVGAGLPIISTLRGLLETGDKILRIEGIFSGTLSYIFNNFEGTRTFSNVVAEAKEAGYTEPDPRDDLSGTDVARKVIILARESGLRLELSDIPVKSLVPEALRSCSSADEFMQKLPSFDQDWDRQRDEAEAAGEVLRYVGVVDVANRKGRVELQRYKRDHPFAQLSGSDNIIAFTTSRYKEQPLIVRGPGAGAEVTAGGVFCDILRLASYLGAPS

SEQ ID NO: 44606 - protein, 700 aa, Oryza sativa
MDLYMDDYIDPYEEAEAEAAAEAAGLTSAAAAEDSSDEGDSEDDSEAESDYEERSYGLLRSGNHRVRNPDGTFRCPFCPGKKKQDYKLKDLLQHADGIGASSKRRRHGRERAFHRAFARFVRTDPSFAQDLAAINGIATTADAISNSSAAGAKEKADANGDTDGSASVAAVAAGNRREEERFAWPWSGVLAAGAGFNAEDFADRVAMFGLDDVVPLVVDDAEGADSFAIVRFANGWGGFGDALTLENHFNKNKLGKNEWDARGSAGDAVKGDDGDTDVKVYGWVAREGDYNAGNVVGRYLRKHTNLTTIDEVSKSESEKSGKMVAILATQIEAKNRFLQDLETKKNATELSIARLEEDNRKLHDAYNEEMRNLHRRARDYALRVFQDNENLKLELDSRRRELNSRAKQLEKITAENASDRKKLDDQKQKAKDDNSELELASIEQQRADEDVMKLVEDQKREKEDVLARMLQLEKELHEKQQLELEVTRLNGTLQVMKHLEGDDDGDIHDKMEKLSERLEHEKKRLEELSGELVKKERESNDELQEARKELIMGLEDMLTGRTAIGIKRMGELDEKPFQNACKRKYGNDDYEIKAAELVSSWQEEIKKPSWHPYKIITVDGEDKEVVDDDDTKLRHLWIEYGDDVCNAVKTALSEVNEYNASGRYVVPELWNFRKGRKATMKEVLKYIFGQIETTSKRRRP

SEQ ID NO: 44607 - protein, 418 aa, Oryza sativa
MAAAAGGVAGEPSGTRTKQLKVAVIHPDLGIGGAERLIVDAACQLAVHGHDVHVFTSHHDKNRCFEETVSGPFEVKVYGDFLPRHIFYRFHAICAYLRCIFVAMCVLLWWPSFDIILVDQVSVVIPLLKLKAKSKIVFYCHFPDMLLAQHTTMLRRLYRKPIDMIEETTTGMADLILVNSKFTATTFARTFCSLHARGVEPAVLYPAVSVEQFQEPHAYKLNFLSINRFERKKNLGLAISAFSLLRSVASMLPGDARQEVTLTVAGGYDKRLRENVEYLEELKRLAASEGVSEHVKFVTSCSTSERNELLSNCLCVLYTPKDEHFGIVPLEAMAAYKPVIACNSGGPVETVINDETGFLCEPSAPEFSKAMLKLVNDHDLAVKMGKQARGHVVQKFSTKTFGDLLNSYVLNVYHQRIE

SEQ ID NO: 44608 - protein, 195 aa, Oryza sativa
MEAGVGLALQSRAAGFGGSDRRRSALYGGEGRARIGSLRVAEPAVAKAAVWARGSKPVAPLRAKKSSGGHETLHNSVDEALLLKRKSEEVLFYLNGRCIYLVGMMGSGKSTVGKIMSEVLGYSFFDSDKLVEQAVGMPSVAQIFKVHSEAFFRDNESSVLRDLSSMKRLVVATGGGAVIRPVNWKYMKKGLGRSC

SEQ ID NO: 44609 - protein, 290 aa, Oryza sativa; identical to SEQ ID NO: 32978

SEQ ID NO: 44610 - protein, 540 aa, Oryza sativa
MMSSTAPPDMPAGDGDGDMETLPLASDYASVASTFDPLLSSAAAAASPPSPTIAAAAAFPLSPSSSSSFVDPPSYADVAASSSSSPRSASASASASPRSAASDYALIAVSDPTPEAEPAATSLVPGSAPTYISYLVTSARRGDHRRHAVRRRFRDFVTLADRLAEAFRGHFVPPRPDKNTVESQVMQRDEFVAQRRAALERYLWRLAEHPAIGPSDELRVFLQAEGKMPLPSTTDVASRMLDGAARLPRQLLAGEEAVAAPQEVVQPAKGGRDLLRIFKELKQSVVSDWGGVRPPLVEEDKEFLDKKQKLQDWEQQLTSASQQAEALVKAQQDMGETMGALGLAFIKLTKFETEEAMYDSQRIRAADSKRIATAAVKASRACRDLNTQTVKYLDTLHEHLGIMLSVHTAFSDRSSALLTVQTLMSDLASLQLRIEKLEAAASKIFGGDKSRLRKVEELRETIRATEDAKCCALREYERIKENNRSELNRLDREKKEDMLEMIKGYVTSQAAYAEKIVEGWETVAEETSGYARRSDNNIAW

SEQ ID NO: 44611 - protein, 109 aa, Oryza sativa
MQGISKGVVVDNLLSSMVSRGKAPDFVLCIGDDRSDGDMFESIVCPSNSSVKLPASSEVFACTVGKKPSMAKYYLDDTVDVIKMLQGLANAPSQRPRQVQLRVSFEGSL

SEQ ID NO: 44612 - protein, 300 aa, Oryza sativa
MYAMKPPAEPIRCKLQPYLLVLPLACRSSGDLHCTQASSSQGDHNDAEKACFPDEATAVLKLFPIGATCLIYAIVFAQWITLFTKQASTLDRWIGKVHIPAAALQSLISVSIVISVPIYDRILVPLTRRYSKNPRGITTLQRIGIGLIISVILMVVSALVETRRLMVARDFGLVDNPEATIPMSFWWVVPQFILTGLADMFTMVGLQEFFYDQVPDGLRSLGLALYLSIFGIGSFISSFLVYAIDKVTSMTGDSWFSDNLNRGHLDYFYWLLAVLSVLGLAAYLHFSRVYVHKKKGISVQ

SEQ ID NO: 44613 - protein, 981 aa, Oryza sativa
MAIKLTKYQFFSSRATALHLRRRELKLLPFPSFPCSSSSAPNTCSQQSHLLLVSSAGPREQTLLPADSRSSLPHGITDNGTRKEGRRRRRGRKRKETAKDEGECVPSAEEVSIRVNTLYESGDPIGKKELGRCVVQWLKQGMHSMAIKYASTEMQNDGATFLLDGGSSEDNLGFVMLAQPYLSAIPMPKGQEALCLKASTHYPTLFDHFQRELRDVLLKQQNQGLISDWRTTQSWMLLKELANSAQHRAAARKPKAPTTHSTLGISLDKTRLMQTKIEDFVKKMSDLLHIERDAELEFTQEELNATPVMDGNSKKPLKPVEYLVTHGQSQQEQCDTICNLNVISSSTGLDGQHLVLFRVKDNHRLPPTTLSPGDMVCIRTCDNRGEITTSCMQGFIYNLGEDGCSITVTLKSRRGDPTFSKLFGKNVRIDRIQALADALTYERNCEALMLLQRKGLQKKNSSIGVVATLFGDKEDMMMMEQNNLADWGESTIHDDELLKKNKYDFDASQLKAITLGLNNKRPVLIIQGPPGTGKTGLLSYLIACAVRKGERVLVTAPSNAAVDNMVEKLSDTGLDTVRVGNPARISPSVASRSLGELVNRRLQKFTEEFERKKSDLRKDLKHCIQDDTLAAGIRQLLKQLGKNFKKKEKEIIREVLSNADVVLSTNIGAADPLVRRIGCFDLVIIDEAGQAIEPSCWIPILQGKRCILAGDQRQLAPVVLSREAMQGGLAMSLLERASSLHNELLTTKLTTQYRMHDSIASWASNEMYDGFLKSSPSVASHLLADYPFIKETWITRCAFLLLDTRMPYGSLNIDCEEHLDPAGTGSFYNNGEADVVSQHVLNLVQCGVSPTAIAVQSPYIAQVQLLRDRLEDYPEASGVEVSTIDSFQGREADAVVISMVRSNTLGAVGFLGDNRRMNVAITRARRHVALVCDSSTICNNAFLARLLRHIRQHGQVRHVEPGSFGGDSGLGYTPPALPSIS

SEQ ID NO: 44614 - protein, 567 aa, Oryza sativa
MADPYGDGKGLKQQQRQKLKPALEVEDFINLLHGSDPVRVELTRLENELQYKEKELGEAQAEIKALRLSERAREKAVEDLTEELTKVDGKLKLTESLLESKNLEAKKINDEKKAALAAQFAAEATLRRVHAAQKDDDMPPIEAILAPLEAELKLARHEIAKLQDDNRALDRLTKSKEAALLEAERTVQIALAKASLVDDLQNKNQELMKQIEICQEENKILDRMHRQKVAEVEKLTQTVRELEEAVLAGGAAANAVRDYQRKVQEMNEERKTLDRELARAKVSANRVAVVVANEWKDGNDKVMPVKQWLEERRILQGEMQQLRDKLAIAERAARSEAQLKDKFQLRLKVLEEGLRMSTTRTNVSAARRQSIGGADSLSKTNGFLSKRPSFQMRSSVSTTTTTLVNHAKGASKSFDGGCRSLDRYKGHVNGSGMNVSTDSSEDKESNNSDEKANEFTSVETEDTVSGLLYDTLQKEVIALRKACHEKDQSLKDKDDAVEMLAKKVDTLTKAMESEGKKRRMEVAAMEKEMAALRLEKEQDNKAKRFGSSSSQLPPGRTLPRSGSARNM

SEQ ID NO: 44615 - protein, 401 aa, Oryza sativa; identical to SEQ ID NO: 34460

SEQ ID NO: 44616 - protein, 512 aa, Oryza sativa
MRRPSPSPPAARGPALAAAAAVVVLLPSIFPAIFTPLGRAFPSLFSEWNAPKPMHESLLNEALRRTISNEQKRELWSPLPYQGWKPCLKSSSVHGVPLEPTGYIQVFLDGGLNQQRMGICDAVAVAKILNASLVIPHLEVNPVWKDTSSFEEIFDVDHFINTLKAEVSIVKVLPKKFSWSTREYYGTGIRATRIKTAPVHASASWYLENVSPILQSYGIAAIAPFSHRLAFDDLPVDIQHLRCKVNFQALVFLPHIISLGETLVKRLRSPVQGQSGELIQEVGEDTNQAGKYAVLHLRFDKDMAAHSACDFGGGRAERLALAKYRQVIWQGRVLNSQLTDEELRNLGRCPLTPEEIGLLLAALGFDSRTRIYLASHKVYGGEARISSLRKLFPLMEDKRSLASEEELTNVEGKASVLAALDYYISMHSDIFISASPGNMHNALMAHRTFENMKTIRPNMALLGRIFVNKSMEWLEFQEAVQAGHKGRYGQIRLRKPKQSIYTYPAPDCMCQG

SEQ ID NO: 44617 - protein, 386 aa, Oryza sativa; identical to SEQ ID NO: 31842

SEQ ID NO: 44618 - protein, 759 aa, Oryza sativa
MPEPRKTPLLLTASADESNKKSSLQTKSKGKRKVLLVEHPNRKAAGKNVNPVRSTSTNNSRPLSADDIQKAKMRAMFMQEKYGKVDTSKVIEKPHMMEIQKPSGLVDSNVPLVPRTPLTSIIKQPVDPSPSTSKQSTLSPPDKPEIAVSLKLNVTAKENFIEKLDSKRVIWQIPPEVWIDPAWSLGAGENSKEFEVQTQRNRREKETFYASLKDIPLNPKGPWDVEMDFDDSLTPEIPIEQPPDADAMETDSVSTAPPNIVVPVVDKQIGSTSSVSPAVAAGANGATSEPDLELLAVLLKNPQLVFALTSNQGGTLPSEQTVALLDMLKQTGLGLSELVNSLANNSGVQKEPESGPEAIPASLPSPTPPKDLIARDGWSSEFPSQVRTQNLQHAHLPNRANAPPVASSVQQSFSNVVSSLPSQPYASASALPAQTRTNMTSLPQSMISVNPSTQHVAPMNNLLSRATVHQHTQSYALTSDPVAVAVHHQPAVNKLAHEVQSISHPAVSHSSVAESHASYTSYTWQSSVATIAATGRNATPDRWAAPARTTNSFNAAPSNSNHVTYPNQNAYSNHSTQATTYNSYGSAPVSSHSLHPGQGLDRNGYTHAAEYQTTMARDALWRNSRSPELGAGAVYGSSSQGYVPEPSRQWNYGQQSYNPEPYSRQWSSGQQSYNTVTAEPSRQWSSGQQSYSNPAEPSRQWSSSAHAQPSYNPEPSRPWNSGHQSQNPEASRQWSHHHGKQERYNPTDGRNSYDQHWRR

SEQ ID NO: 44619 - protein, 135 aa, Oryza sativa
MFVDTLVKAALPYNEETFDRIRKMYDAFPRISVPHFLGDDYDDDGQKLSEAISAAKVRSESCSSFLRAAIRWSAEVGASRSGSPELHVMLAEYIYSESPETDMTKVSSHFVRGNDPKKFASMLANFMGKVMVFRK

SEQ ID NO: 44620 - protein, 209 aa, Oryza sativa
MEREQMRMAILRQEQTFRQQVHELHRLYHVQKQLMKQMQIAKLNQAQAIAANAETKPKFEITFAENSTNHHHHHQFYSFQSSKIMSPPAAAAAAADQEEEEECDLQLTLATGSSGGGDGTARGHKGKKEVRSSNSDSGTAASSTSTESELAQFKNHHHHQLDCAAAAPVASPAARFQGESKKRVVVVVDNEMSLLQPPWLNQCLSLRMA

SEQ ID NO: 44621 - protein, 112 aa, Oryza sativa
MIEDHGCSHAARQHHLKGRHQELTLAVCRAHHVKNKNLLLGVMIVILRLTVLICKKCFSITMKTLCTEELYKGELHDVFLSLQEAAQPLAMKMEALLARMLYSMLSQEMMSQ

SEQ ID NO: 44622 - protein, 236 aa, Oryza sativa
MVSVYEEARERWTWKNQVTEEGPYGFKILSQIRRQDHDCCTFSAMASTLEANVRVQHGRNDQFSIPHLQFIDAQSKISAPNTNETKVLRLLKSLKERDGGVYLDEDYDSEGNLRALDAKVCRVWKFNLYHVKDIIHLRSALHRLRRQGPLLAVIRISRNYDECRKSGHVYKYDPARICTYDDGKPKTHALCVVSFVTEKGTPCLECQDSHGTAWGIGGYLTVEIRSLKELYSVRVT

SEQ ID NO: 44623 - protein, 454 aa, Oryza sativa; identical to SEQ ID NO: 33449

SEQ ID NO: 44624 - protein, 390 aa, Oryza sativa
MTGGLQEGSSSRTRDVPRGSGGITYFIGRIVVPRQYKPQCVSIGPYHRNMPLRGNVEKKECLNDILRKEAQRRSGDLSSSEIKSEWMNELSRYVDNSPECYYDFNSLNKNEKHMTTEDFLSMLLEDGCYILHKFVVRQDRTAAVGGGGGSGRYREDIDVNVQRDIIYLAENQIPFFILDKINGIIGWSVTGKPLVEVFCSYIEREVLNWYGYAIGQRWNVTPEPIHLLHLLHILLIGCQKPRALTHTHQVATGAAVPTEPHAARSRIEASSANITRQNETAIEMVPVITDASTTQHEQTAAGTRAAHSHGEASSGNHPQQDETAIDVITGASATEHRNEKPPEKKGVRRFLRWRRAKQYEKARVDLTGVDLISIAEGPGGEACGALSILE

SEQ ID NO: 44625 - protein, 357 aa, Oryza sativa
MAKDQNGSAAGEGEAAAAVAARSRSKSIEADEEERSKGRRDRDRDRRGKSKRREEEEEEEEEEGDAGSESSGEDSGERRKWRRKEKERRHRRRRSRSASSGSSSESESESESSYSDCSAGSESETDSEEERRRRRRRRRRKEREEEERRRRRKDKERRKRKEKERERERKKKEKKKRRKEEKKNLGKKAAVTNSWGKYGIIREVDMWNKRPEFTAWLSEVKQVNLEALSNWEEKQMFKEFMEDHNTATFPSKKYYDLDAYHRRVMEKEKKKGLKNALGTERTVFNDEEQRRLELLRERERQKEEEVAALKRSMQTGMVQAMKEQARLREEMMYQYRLGNFEAAAAIQKRLDPDAPLQ

SEQ ID NO: 44626 - protein, 814 aa, Oryza sativa
MGEDEGKKKVELDDWEDAAEMSTPKLERSDSSNQTTEANGRKRYSRDFLLTLAQSCTNLPVGFQMIEYASVLFPNLAGKSYVVDHPSPGRGADRPASRGDRRGVVIEDDRWGKSGHLFGSGRDMSMDNGPPTMNHRGAPGVMRNPRGGLINVGPVAPQMSRSGSDADRWQQKGIFPSPVTPMQVMHKAEKKYVVGKVSDEEEAKQRQLKAILNKLTPQNFEKLFEKVKEVNIDNVATLTGVISQIFDKALMEPTFCEMYANFCFHLAGALPDFSEDNEKITFKRLLLNKCQEEFERGEREEAEADKTEEEGEIKQTKEEREEKRIRARRRMLGNIRLIGELYKKRMLTERIMHECIKRLLGNYQNPDEENIEALCKLMSTIGEMIDHAKAKEHMDAYFDIMLKLSTSQQLSSRVRFMLRDSIDLRKNKWQQRRKVEGPKKIDEVHRDAAQERHAQSSRLARGSVVGSGPRRGAAPMDYGPRGSAAALASPSSQQVGHRGMPSHSRGFGTQDIRFEERSPLDHRTTVLPPRKDEAITLGPQGGLARGMSIRGQPLISNAELSSADSRRMVSGPNGYNSASTAREEPGSRIPDRSGRIAPNTQFAGPSNRPASQEGRSGNKLYSEDDLREKSISAIREYYSAKDEKEVALCIEELNAPSFYPSVVSLWVNDSFERKDMERELLTKLFVSLCNSRNNLLSKSHLTAGLATVLGSLEDALSDAPRAAEYLGRLLARFVVESILSLQEVGTLIEKGGEEPGELVHHGIGADVLGAVLESIKVEKGDSFLNEAKASSNLKLEDFRPQHLKRSKLDAFMKA

SEQ ID NO: 44627 - protein, 303 aa, Oryza sativa
MADEVAFETARKIIMHPLYTPRSSPWLDLKVFYVRVSNCEVDESAPDRLTLNHIPLSPDTVIEVNGQRSSMHTEFISSSLRRDRVDKMTEEATFVSTDSIRMTGSVRFQVFDKNDLLLTGDLELCSANGVVGESKNSSKRWNMKCQPASSCNGFLKGKPSTASESVHPVIEVYLAGTFCGTPIILTKTVQHISRRKSQMKLKLDSIPENEATEQQKEELNEDSLQVSESQNPKSEQDVDVDYNSLYSRQDFIEGEDGELSWFNAGVRVGVGIGLGICVGVGLGVGLLVRTYQSTSRNFRRRLP

SEQ ID NO: 44628 - protein, 211 aa, Oryza sativa
MAMGPPRLLRGLIPQLLSVDAWLPCTCSSRLQLLLSHFHCRLHLRWPSCADAFKLLLALLLVSAALAEVRYIASSSMAPTLRPADRAVAERITYFFRRPSIGDIVFFKVPTTLQNYGVNKDVVFIKRILATPGDFIEVRQGQLIINGVARKEHYTASHASYTMEAMRLPEGHVFVMGDNRNNSCDSRAWGPLPISNIIGRYMMSFTRSSIQ

SEQ ID NO: 44629 - protein, 523 aa, Oryza sativa
MANINMADTVPSCDTYLLFNGETLLPIGVRAFIYTAVLAYCFIGLSAITGRFFKSMESIMRHSREVVTVDPHTNATIVKHEKVWNYTIADVALLAFGTSFPQISLATIDAIRNLGQLTAGGLGPGTLVGSAAFDLFPIHAVCVVMPRAGSKKKISDLGVWLVELFWSFWAYIWLYIILEVWTPRVITLWEALLTVLQYGLLLLHAYAQDKRWPYVSIPLARGERPEDWVPAKDASVDYDDNYDGIGDILPGQNEDIVDIFSAHSYSNEGYHHVSEEDVEESSTGLTLKNKWEDTHWFSIWWQQFVDAATLESSVSRKMDSTCLRVIGISWNLIIAPWKMLFAFVPPYEIAHGWIAFICSLIFISGIAYGVTKITDQISCVTGVSPYVIAFTALAAGTSWPDLVASKIAAERQITADSAITNITCSNSVNIYVGIGVPWLVDTMYNYFVYQKPLYIDNAAGLSFSLLVFFATSFGCITVLVLRRVILGAELGGPRMWAWATSVYFMILWVVFVVLSSLKISGVI

SEQ ID NO: 44630 - protein, 577 aa, Oryza sativa
MGIRMGRRLLFTLFLGALFCNGVYAKFTRYSFPKDFIFGTGSAAYQYEGAYKEGGKGPSVWDNFTHIPGKILNNDNGDVANDFYHRYKEDVSLLKDMNMDAFRFSIAWTRILPNGSLSGGINKEGVAFYNSLINDVIAKGMIPFVTIFHWDTPLALESKYGGFLSEDIVKEYVDFAEVCFREFGDRVKYWTTFNEPFTYSAYGYGKGVFAPGRCSSYVSKSCGVGDSSREPYLVAHHIHLSHAAAVQLYRTKYQPTQKGQIGMVVVTHWFVPYDNSDADRGAVQRSLDFIYGWFMDPIVHGDYPGTMRGWLGNRLPEFTPEQSAMVKGSYDFIGVNYYTTYYAKSIPPPNSNELSYDLDNRANTTGFRNGKPIGPQEFTPIFFNYPPGLRELLLYTKRRYNNPTIYVTENGIDEGNNSTLPEALKDGHRIEFHSKHLQFVNHAIKNGVNVKGYFTWTFMDCFEWGDGYLDRFGLIYVDRKTLKRYRKESATGSKTSSRGTDPAPQNFGLITRSIGWPPDLCFVSLAFSWLICDLCISGDDRYDGVMNYAALLLNVYLSTCASLLADPIEPDNNKKKQ

SEQ ID NO: 44631 - protein, 603 aa, Oryza sativa
MSQPTPPTTTATTTALREWNRLIQHAAASGSYSRCLRHYASLLAAGLGGGGASTFPSLAKSCAALRLPRLGAAVHAHALLAGAASAVFVRTSLLDMYAKCGRLPDARRLFDEMPRPTLVSWNCMVAAYGRSSQVEESVAVFNAMRRAGVRPSEGTLVGVLSGCVGSVSASNPGMCVYGFSVKSGLDAGLPVLNSVLTMLVRGSHLDAARLLFDGICNKSVVTWTALASGYLLRGDYLEVFDLFNRMRGVGKNVDSVVLVNLISAAVLFGNLSVAKGVHALIIKLGFECEEDLAASLINLYAKCGDLESAREVFDAVHMANVVVWTSMISGYVEGGHLNEALVMFDSMVCANIEPNEATLSSVLSACAKLGSANLGKKVEEQAIATGLHSEPRVATGLIDMYSKFGSINLARKIFEGVTNRDIAVWSAMINGYACNGEGSEALVLFKEMKNKGFQPDGIAFTHVLTACNYSGLVDEGLECFHSMTMEYGIEPSIEHHMCMVDLLCKAGHFGSALKFFKQMPSEVQNKVLAPIISSYSARCADSSIDFIPEELLNLETQDSDHCVLMSNMLSCLGKWKKATSYRRQLSKQGLMKEPGWSCIELSG

SEQ ID NO: 44632 - protein, 193 aa, Oryza sativa
MSSSSSTHHHQRRHSARGERAWLPPARTVEGRGERARTGCSSLSRTASTRLAAPGVGGSCSLQVSSTCTNARRLALRETTHMARAGPSTVVLDAEHHGGGDDEAAEEEQERRRPARDGVHGVDAPQSSVDATEEHVHIEDMRQRAAARCLIRCLARRRDSGERAQPQQPKPASDDGANTGRSRAVGAASACQS

SEQ ID NO: 44633 - protein, 219 aa, Oryza sativa
MASIAMAASLRTFLRPHRCRLLLRQSRSLSASAAPAGAAAASTVIRRSVVEVLRERGLVEATTSESLGSASASPRELKAYCGFDPTAESLHLGNLLGLVVLSWFRRCGHNAVALVGGATGRVGDPSGKSAERPELDLAAVETNSNAIKSLIGQILDRAPEPSQHAQSGKNLNLEQNEQALVNSGEKMGLFRSLITMTGGRTSRCWISSRRWGDSLVLGR

SEQ ID NO: 44634 - protein, 413 aa, Oryza sativa
MRLRLSRVSPILNFWDRTPFYAESGGQVGDNGFLYVYGEEDAKQKAVIEINDVQKSLGNIFVHKGTIKQGSVEVGKEIDAAVDAKLRQGAKAHHTATHLLQSALKSIIGSETSQAGSLVAFDRLRFDFNFHRPLSEEELMKIESLVNQWVSSATHLETKVMDLQDAKNAGAIAMFGEKYGEQVRVVEVPGVSMELCGGTHVSNTAEIRGFKIISEQGIASGVRRIEAVAGDAFVEYVCARDNYMRCLCSSLKVKAEDVNGRVETILEELRTTRNEVSSLRSKIAVLKAASLANKATTIDNTRVVVENMGDVDADGLKSAAEYLVDTLEDPAAVILGSSPGDGKVSLVAAFSPGVVKMGIQAGKFVGGIAKLCGGGGGGKPNFAQAGGRKPENLPGALEKARDEIVAAISSKSS

SEQ ID NO: 44635 - protein, 660 aa, Oryza sativa
MSRDLDCPVQTQMAVAVLDRSFSSEYPASSRTEGRSCSWKRVFVQTENGYVLGIELERGENAHTVKKKLQVALKVPTEESSLTFGDLVLNNDLSSIRNDSPLLLRKNQMHRSSSTPCLSPTAHDVQEQDHSEPIEILGCLSPSSRMKQLAKDVVEAIRNGVDPVPVNSGMGGAYYFKNIYGERVAIVKPTDEEPFAPNNPKGFVGKTLGLPGLKRSVPVGETGLREVAAYLLDHDNFANVPPTMLVKITHSVFNVNDTVSCKSKVFHNKLQAVSKLASLQQFIAHDYDASDHGTSSFPVSAVHRIGILDIRIFNTDRHAGNLLVRKLGPGPDNFGVQTELIPIDHGLCLPESLEDPYFEWIHWPQASIPFTEEELEYIANLDPVKDAEMLRLELPFIRGACLRVLVLSTIFLKEAAAFGLCLSEIGEMMSRQFTGKEEEPSELELLCMEARKWVKKRELFLPEAGVEDDNDGITQFSIDSEDGSDASELPSFSKFGLMNASHRNPLSKLDECDEEDGEEEEDDDGDEEDDDEDMFKDDAGNLKNPFSKHIPSVSKLSASFKGLGFIGKARAYHKGVPKNKVTAKTNYSGKGSEHQSGSRSANELLPPSASFVKLSDMGSDEWSAFLDKFQELLPSAFRARKHAAADGPRPLQRLGTSCQF

SEQ ID NO: 44636 - protein, 26 aa, Oryza sativa
MARGNSTKRPTSDGCKAGRRGVAAAQ

SEQ ID NO: 44637 - protein, 854 aa, Oryza sativa
MELATGAIGAVLPKLGKLLKEEYDLHNSVKEGIKFLKAELEYMQPALKKVSNVPRDQLDEQVKIWAKDVRELSYSIEDIIDTFMLQVDALEPPKNNIFTWLINKCHKLSQLMIHHKIGNDIKSVENQVKEVTERYDRYRIDSIDAKPPIFIDPRILGLYEKVTNLVGVDKASEDLIRMLFVGSDASKMLKIVSVLGLGGLGKTTLAKFVFDNLKVQFQCFAFISVGQKPADIKNVLKHILIGLDKHKYMELDTSQLSESYLTDEVREYLDNKRYLIVIDDVWEIFTWKRINCALVDSNCGSKVITTTRISEVAEVVGDVYRMKPLSSDNSKRLFNNRIFGIGSNGPTNNQSVEATEKILKKCNGMPLSIVTMASLLVNKPVEDWIEVYDSIGFGPTGQNQEVENMRKILSFSYYELPSYLKTCLLYLSIYPEDHRIMKKPLIWKWIAEGFVQEEQQTWLFEVGERYFTELVNRSMIQPIEMYGRVFACRIHDMVLDLIRILATEENFVKILDRLYDVHSSSSQSSTARRVAWHKSLNQDKFDNLTTGMAQLRSLNAIECPISMIPPLVSFEILHVLALESCGVITGYHLKHIGKLQRLRYLGLRGTRITELPSEIGDLMHLLVLDVRGTNALPATVGKLRRLIRLCVGGTIVPSGVIGNLTSLQDLRLGEITDDGCPNIAVDLCKLTDLRKLTIDWLHLDEGSLKTLVESLCTLRKLQSIKIKGSWKVLEGWEGWEPPRQFRKFYVDGSLPRRPTWVDSVRIPHLSHLNLHLLAVEQRDLDALAMMPELRVLEVNSDLSISWTIAGGGLFPSLRCFSTDIEIMFLQGAMPMLTNISFEPSGDDSANDIGLRYLP

SEQ ID NO: 44638 - protein, 113 aa, Oryza sativa
MRVAAANQYPYRYYPGAPPPAPYYGNGGYPPPHQRGGGGGGSGGGYYTPMTMATGGYYGGGGGGYPQYGQSSSYPQYGQSSSYYPPAAAATTNTHTVVHHQYANNDPDSCAIM

SEQ ID NO: 44639 - protein, 209 aa, Oryza sativa
MVTAARLLPLILFLTAVAVGCSAWEMNIRLPTERLAYGGGEAVVAPIIHALRPLLGSGRQLAARAGVACDSWRLGVEAHNVIDWRTVPAECEGYIGHYMLGEHYRRDFAVVVDEAVAYAETLKLAGNGKEIWVFDIDETSLSNLPYYAKHGFGYVYVYSYIIYTYFYQYIHFIFIGAPADLAIYSLRFMPFHVIRYFDFWSKSNSLKFD

SEQ ID NO: 44640 - protein, 594 aa, Oryza sativa
MPAAVAAAGAAAASGTALLAYILLACCRPQPAPEAGEEEEEESRLLSSGAEARGREAGDGGEEEEEWPYRPPSTCCEAAAVAARTARRTWDLTVGRWGLHGIAFGIKRHMKRQGDLQHEYSGNDCLQLKGHDAHTEVAYLLEHLKICMFYSKKTFSAFLQFGGYNQEDILIHKARARLMQPSFALVCDKKSKCFLLFIRGAISTKERLTAATAAEVPFHHIVLSEGQISNVVLGYAHCGMLAAARWIANLAKPHLHKAVQEFPDYQIKVIGHSMGAGIGAILTYILHEHHEFSSCTCLAFAPPACMSWELAESGKEFVTSLINRNDVVPAFSKVSAENLRAEVMVSSKLDDEQDQAHFSLFTAISKRVAFIKSHMLSVSHPTEKNTDPDSSISEPLLKHVPGITQPVTNGLSTDCNQHQTDLVANTEQDFSAVSVVTSEEKIVLSSNDNVISTKSVAGSGFAAQGDVNINGSLDTEQEQSSLTGQEEPESLKQNCDIKDKLKEPLPTCSSRQFFPPGRIIHMVAMASPDPNPGEGSSSNEIISIYETPRDLYGKIRLAPNMIKEHYMPSYISTMESLLEQLLKDDNVDTVTNDL

SEQ ID NO: 44641 - protein, 951 aa, Oryza sativa
MEVPRDRCGWCLACQSSAGGTKKACFLNMATANASKGSARILSGMRLIKNSDSHFPSIVTYLSHMEESLRGLLVGSLQDVQRRQQWYNQLKDASNCGNIIPLLLELESNIRGVAFSTSWLKLIDDWPVESPSASAGASRPAAYQKRGTGGRRGRKRSMASESAPVTDDDNSWKEVNWWSGGNVSKRILQRGALPILTIRKAARQGGKKRMFSVSYHEGSNFPRRTRQLAWRACVGLSQSSSQLALQVRYLDSHIRWKEFIPPDQIPSEGKSVDSDYSVLRNAVVCDKKIVDNKIRYALKFPNQKHLPVRVTKNILEAEDNQDGDGKFWFSENHIPLYLLREFEQKAGVSSLPTPGMLDSNCFANFYQRRVKSSIGDVFFYLLHKGDVYPCTSCKKDVSFRDIIKCSSCQGNCHKECTLRSVGSKEGNAASSLTCKLCLQKRSLMLTNYNTNASFILPQQKSNVHHAVAAPKIIFKVGSSHSAEPATKVEAPPIVKVEAQPVVKKETWPVVKMETQPTANVEAQPTAKVEAFPISNLATQNNAGAQVQPKTKSKKPKPEKPRKSKKTEEIKYFGLVWKKSTNDKNNNENSGEVFRANDVILKGKDGVGSSIKPTCCLCNKPYCPDFLYVRCERCKKWFHGDALQLEEEKIFELVSYRCCRCRRRAIPKCPHSDDYKKPEPEYSEQTVATSSQSTMLSSEENFAVADQDPLLASYGRVEPFGAQTMDADLSMNMMSFNPGNQKLSVRRGQNKNCEYVDQSSIHVDDYYIQNQPQGNANINFSHSNEFSLSEADGVDASELLGWDFSQGNTSAAPSDFAANCPWNDISCGSVAGDEYEPQTYFSFTELLEADDTQFDNTFGMSNSVQDDGDQQGIGFDEMAFMMEDGASNMPFPAIDSASDEVACDRCKNPQPPPDLKCAVCGLQMHRHCSPWEDGEQPSDSADWSCGACREWR

SEQ ID NO: 44642 - protein, 199 aa, Oryza sativa
MREACAPVPPGAHEEACIEQSDDRSEDGSFSGSSIGSSCSSASDLSDDGSSYRPGDYLEPSSSSSSASSSTLQLDSEGPLCDLSSLIAQLPIRRGLSNYYQGKSQSFTSISDATCVQDLAKKITYNKRMKACKSYAAGLDMNQRSNHLPKPCNKMIAKRPSKGSFTCLLSRPSSTSLLCSSAKPPTHQSKKDVQMHINS

SEQ ID NO: 44643 - protein, 301 aa, Oryza sativa
MAWPTGCLGFEAAAAVCPAAFQAYQKYYDIVSAFSNVNTREGLAELSQVIDGMEGLRDAIFSDIPKLMSALDLDDAHRFSIFYDFVFFISRENGQKNISVQRAVGAWRMVLNGRFWLLDRWCNFVEKYQRYNITEDVWQQLLAFSRCVNEDLEGYDPKGAWPVLVDDFVEHMHRIYNSCDCSSAMESQLNISNTFGGINPLPGSKRKCPTRLKPNEDVDLSDNFTRSVHLAPLKRLKESPVITKYGVWEYNAGTPLVHSPSDYCDDANLHNPRGCLQNSPSIVEDCLSKGFEGCISMKCSF

SEQ ID NO: 44644 - protein, 569 aa, Oryza sativa
MLFARRPLATAASHLAPFSPPLLLFFASASSSCSSAASPSSASGPRGCSAVRMETGAVEPASTGAIWSTPSVEPRTISVGKEIFCNRSLNMRNITAVGFDMDYTLAQYKPETFEALAYHGTIEKLVKDLGYPEELLTWQFDWKYMVRGLVLDKKRGNILKMDRHKYVKVAYHGFREMSKEEKVSAYGSTLIRDSFDEPDYALIDTLFSLGEAYLFAQLVDFMDNNPGKVPSGTDYPLMYRDVRSAVDLCHRDGTLKRMVAKDPSRYINEDLAIVPMLEMIRKSGRSTFLVTNSLWDYTDVVMNYLCRPYTSDVSSSHNHKWLGYFDVVITGSAKPGFFHDGNRAGLFEVEPDSGKLLNADLHIGSPRSGQQPSRPIHKIYQGGNVGHLHRLLSVASSSQILYVGDHIYGDILRSKKVLGWRTMLVIPELEQEVKLLSESKSTRKELRHLRMERDSIEDKIHRLEWSLKFENLTEDEKEKLFSEHDILLQKKEHVRRLHQEAQRQHHHKFHKVWGQLMKTGYQNSRFAHQVERFACLYSSQVTNFALYSPNKYYRPSEDYMPHEFDVLGL

SEQ ID NO: 44645 - protein, 606 aa, Oryza sativa
MRFRMLFETEESSVRRYMGTITGISDLDPVRWMNSHWRSVKVGWDESTAGERQPRVSLWEIEPLTTFPMYPSPFPLRLKRPWPTGLPSLYGGKEDDLASSLMWLRDSQNTGFQSLNFGGLGMSPWMQPRLDSSLLGLQPDMYQTIAAAAALQNTTKQVSPAMLQFQQPQNIVGRSSLLSSQILQQAQPQFQQMYHQNINGNSIQGHSQPEYLQQPLQHCQSFNEQKPQLQPQQQQQESHQQQPQHQQMQQQKHLSNFQTVPNALSVFSQLSSTPQSTPSTLQTVSPFSQQHNFPDTNISCLSPSNVSSMHDTLRSFPSEAASDLPGVPRITPVPVSDPWSSKRVAVESTITSRPHDISSQIENFDLTPSSIPQNSTLAPLPGRECLVDQDGSSDPQNHFLFGVNIDSQSLLMQDGIPSLHNENSSSTIPYSTSNFLSPSQDDYPLSQTLTTPGCLDESGYVPCSDNADQVKRPHATFVKVYKSGTVGRLLDITRFSSYHELRSEVGRLFGLEGQLEDPLRSGWQLVFVDREDDVLLVGDDPWQEFVNSVSCIKILSPQEVQQMGKPGIELFSTSARRLGNSCDNYMSRQESRSLSTGIASVGSVEF

SEQ ID NO: 44646 - protein, 931 aa, Oryza sativa
MPSPAGGPVAVAAASAAAAEALGISPEMYPTEDDLAYEEEILREPFKLKGWWRYLVARAAAPFAKRAVIYERALKALPGSYKLWHAYLRERLDHARPHPISHHAYASLNNTFERALATMHKMPRVWVLYLTSLLDQRLLTRARRAFDRALRALPVTQHDRIWPLYLRLASLPACPVETSLRVFRRYLQYDPSHAEDFIDFLISANRWQEAADRLASVLNDDGFRSVKGKTQHQLWLELCEILTKHADEVAGLKVDAILRGGIRKFTDEVGKLWTSLADYYVRRTLYEKARDVFEEGVASVMTVQEFSVVFEAYTQFEQSMLAAKLEAAEEEGAGSEGEEEAGRKNGMDKLSKKFLADCWLNDEDDTDLRLARFERLLDRRPELLSSVLLRQNPHNVEEWHRRVKLFEKDPTRQVATYVEAVKTVDPMKAAGKPHTLWVAFAKMYEKHNRLDSAEEIFKKATQVNYKAVDHLASIWCEWAEMELRHSNFDKAIELMRQATAEPSVEVKRRAAAEGDEPVQLKVHKSLKLWSFYVDLEESLGTLESTRAVYERILDLRIATPQIVLNYAYLLEENKYFEDAFKVYERGVKIFKYPHVKDIWVTYLTKFVRRYQRSKLERARELFDEAVKQAPPQEKKVLYLQYAKLEEDYGLAKRAMNVYDEAVRAVPNSEKMSMYEIYIARAAELFGVPRTRQIYEQAIESGLPDRDVMTMCMKFAELERNLGEIDRARAIYVHASNYADPNSHPEFWNKWNEFEIQHGNEDTFREMLRIKRTVAASRSQTHFILPEYLMQRDQRLNLDEAVDTLKRAGVPEDEMANLERQLAPGPSTAPPAPSTATAPANRMMNFVSAGVQAQAESSSRQQQAAATNNEDIELPDESDEEEDDVQIAEKSVPAAVFGELGKRAAENREEESSGAQENEQLGALERIKRRRQ

SEQ ID NO: 44647 - protein, 95 aa, Oryza sativa
MAGGYGVEWFQVVYGKAEQASAVLSQHDLVRESGESLILERRKKIGTHNIRHLWMVAAFAMSGYLFGAGVATLIKGNNRRTPEAAGTKEDTTDEH

SEQ ID NO: 44648 - protein, 90 aa, Oryza sativa
MHLGVANNRMTNFVMASISTSAGVCLEVWLIRDTHPKSMVSLKTFCISVDHAITFSNNLLPLSHDIRSFRVLDTFIKKVGKIKYVKIVIG

SEQ ID NO: 44649 - protein, 103 aa, Oryza sativa
MSDSALKDLNLAQCWDFTCDFEIDYGSEERASIVYKTLAVDKELQPDKVKREMSVSGGKLVVHFEAVEARFLRASFSAFVDLTVLVTKLVEEYGISKEGEGSI

SEQ ID NO: 44650 - protein, 834 aa, Oryza sativa
MAEEGEERRRFSNLRGVRWRVDLGILPASPGASVDEHRRAAADSRRRYVSLRRRLLVDPHVPKEEGRSSNLIVDNPLSQNPDSSWGRFFRGAELEKTVDQDLSRLYPEDGSYFQTPTCQAMLRRILLMWCLQHPEHGYRQGMHELLAPLVYVLQVDIDKLSQVRKLHEDCFNDDFDGVPFPDTDMVFSYKPRKDPKWSFGADNQNDSERSSKSNTLDELDPDTKEIILLSDAYGAEGELGIVLSERFMEHDAYSMFDGLMDGGSGVVRMAEFFSPSSVGSSSNLPPVIEASSALFHLLSIVEPTLHNHFIELKVEPQWFALRWLRVLFGREFCLNDLLVVWDKVFACSNNMLLSSDEEYNFRILCSDRGAFIAAMAVSMLLHIRSSLLATELDVFCLQRLLNFPTNIDVQKLIEKANSLQSIAIDANTSSSSFLLKRDSYEFDRVHSNLSSSTPPRTPLHPVSESYWEEKWRNVHKDGTTPKEVERGNSFSKQLKKSLTQKLGLSRTESDPSPVKVLSVSSNDTRNSVRRCLLNTLSDDLDCSNELAGKTQEDEFPIISVHREHPLSSAEPSKLKAAGENVTVSASCVAKLSPLKKSVVEPANENATQGTKCVPEACSSGENSPVFYAARASAGNEPLNGQDTDSESSSVTSNSFAGDHDRDEILKDEPSSSNDDNKTIQDSEAASSDKSPDRNGTSERAVVSNERKPFISKFQWLLKLGRPSVEGNMEKSSGETSADKQDGDTSCSPSDGNSNNSRGSVKLASGDKKVMGSLKNLGQNMLENIQVIESAFQQDRGQPGPVENFSNNILGGKGQVTAMAALTELRKISNLLSEM

SEQ ID NO: 44651 - protein, 699 aa, Oryza sativa
MAKKGAPRRQQPAPAARQLAVAKKGKAPPKAAKRAPKKKQELLEPSSDDSELEQQQERLQEVEEDESGSDLDAPPDSGAEELSDSDDASLEGGDSGDEEDDDEEEEEDDDDPLADDFLAGSSDDESAEGDDSGVDSDESDDLEAKSRAIDEAKGKAEEEAEEELKLNIRSESDEFRLPTKEELEEEALRPPNLPHLKRRISEIVRVLSNFSKLRQKDVPRKDYVDQLKTDVMSYYGYNDFLVEAFIEMFPAVELVELLESFEKRPPECLRTNTLKTRRRDLAAALIPRGFNLDPIGKWSKVGLVVYDSTISAGATVEYMAGHYMKQGASSFLPVMALAPQEKERIVDMAAAPGGKTTYIGALMKNTGIIYANEFNEKRLHGLLGNIHRMGVTNTIVCNYDGKELPKVLGMNSVDRVLLDAPCTGTGTIWKDPQIKTSKGIEDIRDCAFVQKQLLLAAINLVDANSKTGGYIVYSTCSLMIPENEAVIDYALKKRNVKLVPCGLDFGRPGFIRFREHRFHTSLDKTRRFYPHVNNMDGFFVAKLKKLSNTIPVTSESSKVPEEAIEKTDPSSDDLQEQPIQSKIHKDVKKMNEETTILDGVTEDKQQTHDRPEKTLKNHKKGEKKRNGPGSGKKETHNEKEEPTSEKKQPVSAKIKKTVPKRTSGAKEKKPDTDQGGKRKRNWMVRREWEAYKKSRSKKV

SEQ ID NO: 44652 - protein, 587 aa, Oryza sativa
MKGLATRCAEAERGVAVALEAFPCDLQQQLDQFMDGRIDGSILKLYTLHWPQDRWEEYEPLLNYCRDNGIKLIACGTPLEVKRTVQADGIRGLSKAERQEYAPPAGSGFISGFSSISGRSLIDKISSARDSPFGPTSYLSAQARVVDDYTMSQIILKELNGGDTSRMLIVITGASHVIYGSRGIGVPARVSKKMPKKDQVVVLLDPERQSIRREGEIPVADFLWYSAAKPCSRNCFDRAEIARVMNAAGRRPEALPQDLQKGIDLGVVSPEILQNFFDLEKYPVMSELIHRFQGFRERLLADPKFLQRLAIEEAISITTTLLAQYERRKGRFFEEIDYVLTDTIRGSVVDFFTVWLPAPTISVLSYADDGSGESLEFVKGLLGSLPDNAFQKNVLGQNWNMKQRVAAVLVGGLKLASVGFISSVGAGASSDLLYAARGVLKSSVNAEAGRKRSPIWKSAAVYSCFLGTSANLRYQIIAGLVEHRLGESLATSYNQPLLASLLSFVARTVNSYWGTQQWVDLARYTGLQKTKEVPPVEATAPPAETSQLATPPAETSQLATPPAETSQLEDGRTEVQNLDDNSNQSSG

SEQ ID NO: 44653 - protein, 441 aa, Oryza sativa
MAPPAPAALLIPSNHSYRPLLPRPILLHATGFACASASPSPPPRLRLRLRHAAPLRAAALPAIAIAPGDHWGNWAFLLSAAAFGTWSEESTSWGAALSGSLVSIMAGLAATATGLVTAGAPAQDAVMDYLLPATVPLLLLGADLRRVVSTTGDLLKAFLIGSVATTIGTTIAFLLVPMKSLGQDSWKIAAALMGSYIGGAVNYVAISEALGVSPSVLAAGVAADNIISALYFMTLFSLAAKIPAEPKTAQEGSNGGESEGGRRMSVLHGGAAVALSFVICKAGSAISSQLGIQGGTLPCVTALVVALATAFPRLLGKLAPSGETIALILMQVFFTVVGANGNLVDAVTKAPSVFAFALVQVTIHLGIVLAAGKLMGFERKPLLIASNANVGGPTTAAAMATAKGWSSLIVPGILVGMFGISIATFVGIGFGMFVLRRICGA

SEQ ID NO: 44654 - protein, 329 aa, Oryza sativa; identical to SEQ ID NO: 29100

SEQ ID NO: 44655 - protein, 304 aa, Oryza sativa
MAFAVAPPVAPPPPSPAAAWGRRRARATPPRFALAASTRDGDPAPPTFERLREQLLQLHAEADLTQSKANSTRVRLVRLTEAAENLKKRAAVSIRMGKENEAVDLLVQKKKLTKALESIKQRIEVLDKLSMKISEAISVKQNMLIEHALHPGMSNGKESNDNIRVFSSKVGDEADETTSSPAKSSEKAFDLQHVVHSGMTGQLEQSELQTSDSFSFSSDLESPNSITNHSSYDAFLDHIGFQLDSLECEIEQYIVSQLAEQVDIQKPINAKWQKLSDVLKLVTETRERIAKIVDNTVKEAGSED

SEQ ID NO: 44656 - protein, 631 aa, Oryza sativa
MKATPPPAKRRRGPRLAVLALVFCSLLVPIAFLFNRFPAVYVTDERPQQEIDLPSFGRMGLERGGGVTVVKPEDGSGANAETKDTPEMIHRGGINSHHHSDNVPSKVSANPKVPPPPKIEPLKPKAKSVPVPVQRTEVISGNNMKPAKVQNADDVEKAKACQLEFGSYCLWSIEHKEVMKDTIVKRLKDQLFVARSYYPSIAKLKGKEALTRGLKQNIQEHERVLSESIVDADLPSFIKSKIEKMDQTIGRAKACTVDCSNVDRKLRQILHMTEDEAHFHMKQSAYLYNLGVHTMPKSHHCLNMRLTVEYFKSAPLDSDDSAVHKFNVPDHRHYVILSKNVLAASVVINSTVSNSEETENVVFHILTDAQNFYAMKHWFGRNSYRESAVHVINYEHIILENLPEFSSQQLYLPEEFRVFISNLERPSEKTRMEYLSVFSHSHFFIPEILKDLKKVIVLDDDVVVQRDLSFLWNIDMGDKVNGAVKFCGLRMGQLRNLLGKATYDPQSCAWMSGVNVIDLEKWREHNVTENYLQLLKKFQHNDDEASVRAAALPISLLAFEHLIYPLDERLTISGLGYDYAIKEELVRNSVSLHYNGNMKPWLELGIPDYRKYWKRFLTRDERFMDECNVSP

SEQ ID NO: 44657 - protein, 495 aa, Oryza sativa
MNPLSIQLVRDTDFPIFSKLDEETYGPGDSLITKELIEEQINGVMTAEEAVEKKKLFMLDYHDVLLPFVHAVRELDDTTLYASRTLFFLTEDGTLRPIAIELTRPKSPNTPQWRQVFTPGSSVAASWLWQLAKTHVLAHDTGYHQLVSHWLRTHCCVEPYVIAANRRLSQMHPIYRLLHPHFRFTMEINAQARGMLINANGIIESAFAPGKLCMELSSAVYDKFWRFDMEALPADLIRRGMAIECEDGKLELTIEDYPYANDGLLIWDSIKEWVSDYVNHYYQLASDIHMDKELQGWWNEVRTKGHPDKEEGWPELNCHGSLVEVLTTIIWVASGHHAAVNFGQYPYAGYFPNRPTIARRNMPTEGQACSHDGMQPTFVEDPVRVLLDTFPSQYQTTLVLPVLNLLSSHSPGEEYMGTHAESAWMADREVRAAFGRFNERMMSIAEMIDCRNKDPERKNRQGPGVVPYVLLKPSYGDPKDMTSVMEMGIPNSISI

SEQ ID NO: 44658 - protein, 95 aa, Oryza sativa
MLSLGSFKTGAILLGMKLLPMGRKSLFYLTIYGSAVGVGSYAVHYFSTLVASILENFGLSEEMHNPAESTYNLLLRKHLATINGARLESIHRRTT

SEQ ID NO: 44659 - protein, 177 aa, Oryza sativa; identical to SEQ ID NO: 29596

SEQ ID NO: 44660 - protein, 252 aa, Oryza sativa
MAAEEQTPRTKPSTGNSKKRKKPRKDKWGQPIIDAGDRPAVEPEPEPEPEPVPAPAAAAAAEEEEEAGIYETGKVVASGLPYTTTEAEIRELFERFGPLRSLQLSRFPDSGNFRGLAFVSFESNEVVMKSLELDGFKIGNRFMRVERCRLAAGSKRKRTVEFQTDPKKADGCLSAYVGNLKWDVTETDLRDFFKSLKISSIRFAINKRTGDSRGFCHVDFEDDESLEKAVGMNQSELRGRPIKISYAVSNRG

SEQ ID NO: 44661 - protein, 440 aa, Oryza sativa; identical to SEQ ID NO: 44432

SEQ ID NO: 44662 - protein, 117 aa, Oryza sativa
MAAAAAASSGWLRRAAGTVPRIPCGLVTALVPTPPPPAAAVVSEAPALALPSHAAVAMELMAVPKKKVSKYKKGLRNGPKALKPVPVIVRCKCCGRVKLPHFYCCSGERGNPGSESS

SEQ ID NO: 44663 - protein, 882 aa, Oryza sativa
MAAAALRTPATRRPLLAPLSILRTPTPRHLSSSSPPSQPPSSPAGELLRLLSAAPTWTPDLARAVSSTFSASPTADVVISVLRSIRNPSLAAPFFLLASSSSASAPHPLPADAYHAVLPFLHHDLAALEKVLEEMAVLGYGLPNQACAHLAAALVRARRLDDAVLAVAVMRRLKFRPAFSAYTVLIGALAEARRPERALELLRQMQEVGYEVGVHLFTTLVRALAREGQVADALALVDEVKGSCLEPDIVLYNVCIDCFGKAGNVDMAWKFFHELKAQGLKPDDVSYTSMIWVLCKAGRLGEAEELFAQMEAERSVPCAYAYNTMIMGYGSAGRFEDAYKLLERLRERGCIPSVVSFNSILTCLGKKRKVDEALSLFEVMKKDAEPNSSTYNIIIDMLCLGGRVEEAYRILDEMEHASLFPNLLTVNIMVDRLCKARKLEEAYKIFESASQRGCNPDCVTYCSLIDGLGKKGQVDEAYRLFEKMLDAGHNANPVVYTSLIRNFFIHGRKEDGHKIFKELIRRGCKPDLTLLNTYMDCVFKAGEVEKGRMNFEDIRSYGFLPDVRSYSILIHGLTKAGQARETSNIFHAMKQQGFALDARAYNAVVDGFCKSGKVHKAYEILEEMKEKCVQPTVATYGAIVDGLAKIDRLDEAYMLFEEAKSKGIELNVVLYSSLIDGFGKVGRIDEAYLILEEMMKKGLTPNVYTWNSLLDALVKAEEINEALVCFQSMKEMKCPPNTYTYSILINGLCRVQKYNKAFVFWQDMQKQGLVPNVVTYTTMISGLAKVGNITDAYSLFERFKANGGIPDAASFNALIEGMSNANRAMEAYQVFEETRLRGCRINIKSCISLLDALNKSECLEQAAIVGAVLREIAKSQHASRSL

SEQ ID NO: 44664 - protein, 49 aa, Oryza sativa
MAQDDEDVGLALGLATAAAAGASPTAAADRTNKPTAPHLFSPFAKSAAC

SEQ ID NO: 44665 - protein, 626 aa, Oryza sativa
MAATPAADSRLLVIYASETGNAMDAAERVGRQAERGGCPAVDVLPMDSFDPSCLPSERFVVFVVSTTGQGDPPDSMKGFWRYLLKKNLGARWLEGVRYAVFGLGDSGYQKYNFAAKKLDKRLLHLGAEPIIQVGLGDDQHPSGYEGALDPWLLSLWESLNQTTPSLLPRMYDIINPDLSVLGDAKVEVIYHSSDEAQQDSNLLDFKNLIQRARSMSPSLQFYNNDKEPHYMLQMVSNRCLTKENSDRDVRHFELENPSSGITYQVGDALEILPSQSPSAVDSFIERCKLDPDCYITVRAKDRVKISKGSLLKDRIKLKTFVALTMDVASASPRRYFFEVMSFFATAEHEKEKLQYFASPEGRDDLYQYNQKEGRTILEVLDDFPSVQMPFEWLVQLTPPLKKRAFSISSSPLAKPNQIHLTVSIVSWRTPFKRMRRGLCSSWLAGLNPNEENLIPCWVHHGSLPPPHPSTPLILIGPGTGCAPFCAFVAERAAQSTSEATAPILFFFGCRNQENDFLYKDFWYAHAHDQGVLSSKNGGGFFVAFSRDQPQKVYVQHRIREQSARVWNLLKSGAAIYIAGSSTKMPADVTAALEEVICQETGCSEEEASIWLRKLERNGKFHTETWS

SEQ ID NO: 44666 - protein, 168 aa, Oryza sativa
MLWRKRVTSLASEFPDIELSHMYVDNAAMQLIRNPKQFDTIVTNNIFGDILSDEASMLTGSIGMLPSASVGESGPGLFEPIHGSAPDIAGQDKANPLATILSAAMLLRYGLGEENAAKRVEAAVTETLNNGFRTGDIYSPGTTLVGCKRMGEEVLKTVESQSAVALNS

SEQ ID NO: 44667 - protein, 732 aa, Oryza sativa
MVAMYGGGAAPAGAEEEEVDFDQRVGSILEELEMVSIEEAEKSFEGACTRLRTCFENLKPLFPESGSPMPMLDALVQQAFVGIDTITTVANSYDMPKREQTKNMLLKLLFHIKNRYSDMLTPDQRDELDSRVRQLVFEDGKDNANGPNATSTNAAAPSGQVLSERLPFESGAGNSFSKVEIPAKNRMVSPLLDLHADYDENSLPSPTRDSKPPFDVPKPIGYGALPMAPDRPSVLERVEPAKNSSYQSFNDALKAVCYYQQKHGQKSNFASDDLPSPTPSGDGDKSGDKGGDVFGEVSSFSASNKIALPIVNQMPSRPSTVSSNSDSFAGGPPGYAKQIENSVSGSNHLLKATAKSRDPRLKFLNRDTGGVADANRRVNFAEPNPSKDRTMGGGVSINSRKNKAVDEPMVDENALKRSRGVIGNLRDMQPTGRGGWAKDGGNISSYSSDGFQPNQNTRLGNNTTGNHNIRTDSTLASNLNNTTNNSGTSPGIVQAPQTNSAPQTSSAPAVSLPAMLKDIAVNPTMLMQWIQMEQQKMSASEPQQKVTASVGMTSNVTPGMVLPLGNAPKTTEVAAVPSVRPQVPMQSAPMHSQNDTGVIRMKPRDPRRILHSNIVQKNDTVPPVGVEQAKSNGTAPPDSQSSKDHLLNQDQKAEQLQAIALPSLPVTSSARPVTMNANPVSNSQLAATALMPPHGNTKQTSSSVNKADPRLAAGQNESNDDAASKYWSCNST

SEQ ID NO: 44668 - protein, 323 aa, Oryza sativa
MAAAAAAAEAKHRKEEEEDEEEMTLEDGDIEESPRRSFDDDYEDGGSGDDDRDDDGEGLGSPRSFQSRQWPQSYRETTDTYTIAASPSFGYLGPSTSKYSILDGGRSSLGSDLKLPLLSDKLDGKQDSVKSLRKTLGSAIDRKSSLLTQHTGEVYIAQGCSVTQTVFNGVNVLAGVGLLSTPFTIHEAGWVGLAVLAMFAIVCCYTGVLMKHCFESKDGISTYPDIGEAAFGRIGRLLISIILYTELYSYCVEFIILEGDNMTSIFSHIGFDWLGVHIDGKHFFGVLTALIVLPTVWLRDLRVLSYLSGLNTLNLKYFSHCDH

SEQ ID NO: 44669 - protein, 362 aa, Oryza sativa
MAHRRIILLLAAAAVAATSAVAAASSGFDDSNPIRSVTDHAASALESTVIAALGRTRDALRFARFAVRHGKRYGDAAEVQRRFRIFSESLELVRSTNRRGLPYRLGINRFADMSWEEFQASRLGAAQNCSATLAGNHRMRDAAALPETKDWREDGIVSPVKDQGHCGSCWTFSTTGSLEAAYTQATGKPVSLSEQQLVDCATAYNNFGCSGGLPSQAFEYIKYNGGLDTEEAYPYTGVNGICHYKPENVGVKVLDSVNITLGAEDELKNAVGLVRPVSVAFQVINGFRMYKSGVYTSDHCGTSPMDVNHAVLAVGYGVENGVPYWLIKNSWGADWGDNGYFKMEMGKNMCGIATCASYPIVA

SEQ ID NO: 44670 - protein, 119 aa, Oryza sativa; identical to SEQ ID NO: 33700

SEQ ID NO: 44671 - protein, 57 aa, Oryza sativa
MWCIRFGSFVALKTSWSGLADAQDFSEAGGPAPRHAFFHRGGNRDGLHEYTTRKSHA

SEQ ID NO: 44672 - protein, 60 aa, Oryza sativa
MFSPFHSRLLLRFWVKITSEIDIIWRPFVCLENSGYLSPSCCAFMVVLSEHRHGHSSPRI

SEQ ID NO: 44673 - protein, 383 aa, Oryza sativa
MASSAPAWVPYEPTRDCSQGLCSMYCPQWCYFIFPPPPPFDVAGTSADDSSGPVFSPLVIAIIGVLASAFLLVSYYTFISKYCGTVSSLRGRVFGSSSGGAAYGGGAGSGGRHGHGQSRSHESWNVSPPSGLDETLINKITVCKYRRGDGFVHTTDCSVCLGEFSDGESLRLLPRCSHAFHQQCIDTWLKSHSNCPLCRANITFVTVGLASPEPEGCAPGETGGDNTHEVVVVMDGLENLCEEQQEAVSRASTADDDHDAKDVAEGMEEANGAAEIREEGSPPKRGAPSFDLHRDNRMCIADVLQESMEDELTAARESGLLAGGAGTSRRCHGENSKGRGGRSRRALQLQDAMEALPGKRLPSGGRSCFSSKSGRGKDSDHPM

SEQ ID NO: 44674 - protein, 71 aa, Oryza sativa
MATTVAAMCGAAEERVVGTHKAPGACPRCGGAVVATDVESERRILCLPLCVKSKRKYSCSRCLRRLVTLYS

SEQ ID NO: 44675 - protein, 519 aa, Oryza sativa
MAAAAARCAGHGGGGGGGGFLLRRRLLATAAFLAAFGLCTAAADDAATGRGQGHDHVMLSVEDMFPDSSSSSPSCDAPPRDHRHDATSSTTRMTIVHRHGPCSPLAAAHGEPPSHGEILAADQSRAESIQHRVSTTTTGRVNPKRRRHRQQQPPSAPAPAASLSSSTASLPASPGRALGTGNYVVTVGLGTPASRYTVVFDTGSDTTWVQCQPCVVACYEQREKLFDPASSSTYANVSCAAPACSDLDVSGCSGGHCLYGVQYGDGSYSIGFFAMDTLTLSSYDAVKGFRFGCGERNDGLFGEAAGLLGLGRGKTSLPVQTYGKYGGVFAHCLPARSTGTGYLDFGAGSPPATTTTPMLTGNGPTFYYVGMTGIRVGGRLLPIAPSVFAAAGTIVDSGTVITRLPPAAYSSLRSAFAAAMAARGYRKAAAVSLLDTCYDFTGMSQAAIPTVSLLFQGGAALDVDASGIMYTVSASQVCLAFAGNEDGGDVGIVGNTQLKTFGVAYDIGKKVVGFSPGAC

SEQ ID NO: 44676 - protein, 227 aa, Oryza sativa
MKLKQLEGLLGDLQQFTAPKVELEQYATGPHIASRMLYTAENSFDDITGKVVADFGCGCGTLSVASSLLDAEHVVGIDIDPQSLELAQENAADLELDIDLIQCDIKNLNLRGLLVDTVVMNPPFGTSRKGADMEFISMGMKVATRAVYSLHKTSTREHIKKVALRNCNAISAEVLCELRYNLPRTYKFHKQNEVDIAVDFWRFVPRARDEGSTACSVTNLKQRRMHR

SEQ ID NO: 44677 - protein, 327 aa, Oryza sativa
MLPADLMRAVVPVFPPSESKIVREGSLRGERNPGELHCAPSEFFMLFDTNGDGLISFAEYIFFVTLLSIPESSFNIAFKMFDLDHSGEIDKEEFKKVMALMRSYHRQGAAHRDGLRFGLKVGQSVENGGLVEYFFGKDGNEQLRYDKFSNFLKQLHDEIVRLEFSHYDVKSSKTISVKDFALSMVASADMNHINKLLDRVDDFDDYPDLKDLRITFEEFKAFADLRRKLEPFAMAIFSYGKVNGLLTKQDLKRAATHVCEVDLTDKVVDVIFLVFDANRDGSLSADEFLRALQRRESDIRQPASSGLMGVFTCLLNCTKCSLQQTVI

SEQ ID NO: 44678 - protein, 551 aa, Oryza sativa
MAKATSSNNAFLSVFNLDMEYVKIHIAKSRITRVVQLGRWKRSRKHHIELVGDNDLLKKVLACKNLRYLSLRGISLIESIPEAIGTLAELLVLDLRACHNLEKLPGSIGSLLKLEYLDLSECFLLEEMPKEIGELSKLQVLKGFLVGSSRKKSSPCRLADLATKAQNLRKLNITTGRQSLVCDEDELCQLAKCQHLESLTITWIGEASTEPYLPLPSSLTKLDLRRAPTASLLNIIHPSTSVSLKRLYIRGGKLRTLGQDGGWNVETLRARCLNDLECEWSELHGLFRELRFVEMWRCARLSFWPCDGRGVWDKGSPSLARRSIGVCYGVKGNNLPPWHEVVQLYASNNIPAMRIFYPHHDVLEALRGTGIGISLDVEGQFLPSFASEPSVAAAWVKTNVQAFYPAVSFKFITVGNQVALREMRYILPAMQNIYAALSAVGLDHIKVSTSVRRDVLGLSYPPSAGAFSSAMEQYMAPIVQFLAKIGAPLLASVFPYFTYVHNQEGIDIDYALFTSPGTVVQDGEHSYQISSMPLWMLCIRRWRRWVAQPSE

SEQ ID NO: 44679 - protein, 533 aa, Oryza sativa
MEEESQSQSHFPLRWESTGDQWWYATPIDWAAASGHYDVVRELLRLDANLLIKLTSLRRIRRLESVWDDDMRFADAARNRAAVARRLLHDCEPPRGAAAGGGSRPNRLIRAGYGGWLLYTAAAAGDAAFVRELLGRQPLLVFGEGEYGVTDVLYAAARSDSSEVFRLLLSAVLSPPECSAGGEGDGGTAAIAGGFMFRCEMMNRAMHAAARGGNLEVLRELLQGCSDASAFRDAQGSTILHAAAARGQLEVVKDLIASFDIVNSTDEQGNTALHLAAFRGHLPVVKALITASPSLISATNEVGDTFLHMALTGFRTPGFRRLDRQMELMKQLIGGVIMDLSSIINMQNDDGRTVLHLAVIGNLHSSLVELLMTAPLIDLNVRDNDGMTPLDLLRKQPPTASSEILIKQLILAGGIANSMDHETRSAIASQLKMHCIVGSPGTSFKIPDAEIFLHAGIDASDISERTNSFSSVGQSEPEFPESSRKKLNSMQNAAKHLKILLRWPLRKEKKSSSGARIAFRLGLLVVVVLGRQD

SEQ ID NO: 44680 - protein, 304 aa, Oryza sativa
MQILICANAPPHLALLDRRRWSPAWDRRRPDHHTRMHAPRPRDKEQSKGIVYCKAKETQETVDRRSGGKDEPRDMEEMVNTIRVMLRTMGDGEISASAYDTAWVALVKNHNGSDSPQFPSTIDWISHNQLPDGSWGDDLCFLVHDRLLNTLACVIALMEWKVHGDKREKGLSFIRENIWRLAQEEEAWMPVGFEITFPSLLEIAKDLALDIPYDDPALHKIYAQRELKLKKIPREILHSLPTSLLLSIEGLRGLDWKRLLKLQLSDGSFLSSPAATAYVLMQTGDKKCLEFLDGIVSKFHGGGK

SEQ ID NO: 44681 - protein, 513 aa, Oryza sativa; identical to SEQ ID NO: 33063

SEQ ID NO: 44682 - protein, 84 aa, Oryza sativa
MFQSWFQLWHMRVDGTLWHPDKPQVGCKRNLAIKRTRRTLPCRLHKNVSGLVVCECCISWLPALLVQKLWQPQVQELLRLFHCL

SEQ ID NO: 44683 - protein, 314 aa, Oryza sativa
MAASALHQTTSFLGTAPRRDELVRRVGDSGGRITMRRTVKSAPQSIWYGPDRPKYLGPFSEQTPSYLTGEFPGDYRWDTAGLSADPETFARNRELEVIHSRWAMLGALGCVFPEILSKNGVKFGEAVWFKAGAQIFSEGGLDYLGNPNLVHAQSILAIWAVQVVLMGFVEGYRVGGGPLGEGLDKVYPGGAFDPLGLADDPDTFAELKVKELKNGRLAMFSMFGFFVQAIVTGKGPIENLFDHVADPVANNAWAYATQLRPRQVSTTTRSRWCQPTYHVYTCSSHAPTLQLQLQQCMYVCTLIVCVCVIDRGDF

SEQ ID NO: 44684 - protein, 445 aa, Oryza sativa
MNQFVPDWNTTSMGDGFAPLGEDDGLVELLWCNGHVVMQSQAPRKPPRPEKTTAAAAAAMAEDESASWFQYPVDDVLEKDLFTELFGEMTAAGGGGGDVRRAACKEERGAVAAFQSRMMPPPWPARGKAEFGDVDDVCGVSEVVMAKMDGAAAAETVGESSMLTIGSSICGSNHVQTPPVGNGKAGAGTAGAARRAHDTATVASSSMRSRSCTAKAEPRDVAAAGVGGKRKQRGGAAMESGSPSEDVEFESAAATCSPAQKTTTAKRRRAAEVHNLSERRRRDRINEKMKALQELIPHCNKTDKASMLDEAIEYLKSLQLQLQMMWMGGGMAPPAVMFPAAGVHQYMQRMGAVGMGPPHMASLPRMPPFMAPPPAAVQSSPVVSMADPYARCLAVDHLQPPPPMHYLQGMSFYQLAAAKNLQQQQNTAEAPPPPPAGGNRAAADS

SEQ ID NO: 44685 - protein, 129 aa, Oryza sativa
MGNAAARGMRHDDYATAAAATGGRRRKRCSKNTEAGSVPASVPGRRGAEHSAAAAATGVTVKVVLRRKDAERLIARLNEQSAMGRKARMAEIKSEIMAGDGGRGAAAASASPGRCRDAWTHRLAPIQEN

SEQ ID NO: 44686 - protein, 909 aa, Oryza sativa
MPFSYAAAASGSASSSRKPVPVAAAAARRPAPSPAAAAAPAPSPSNPSAVSDSDPSSYSSSGEETDLTASDPAAASVISSYLSVAGDGADLSKVGIFLSSAARRRSPPCLICFDPIRPSDPVWSCSASCFALLHLHCIQSWAHQSSSAAPSPTWGCPKCRFPYPKSQTPTSYLCFCSKTVDPAPDPWILPHSCGDVCGRRLNADRDSGCEHNCLLLCHPGPCPPCPAIVPNAMCFCGSHRETRRCSHQRYSCSGKCNKRLGCGIHRCPVDCHDGPCPPCAVRGKHKCECGETMEERLCSERVFQCKRECGGMLQCGKHSCERGCHAGKCGGCPLQGRRTCPCGKKDYPSLDCDAEAATCGSTCEKVLGCGRHKCPERCHRGSCVETCRLVITKSCRCGGLKKEVPCYQELTCERKCQRLRNCGRHACRRRCCEGDCAPCPEVCDKRLRCGNHKCLSPCHRGACAPCPLMKTISCNCGQTFFEVPCGTEKNQKPPKCSKKCNIARLCRHKLECRPHKCHYGACPPCKLICGEELSCGHRCKLRCHGPIAPPNPEFTLKPIKRKKGKHIDSTPGTPCPPCQEVVLVPCFGHHLGQERAILCSKRRQFPCQNLCGNPLNCGNHYCTKACHVLQIPLSQPEGDQSAILSLASASAFAEPCEECNLPCQRVREPPCSHPCPLPCHLNDCPPCKALVKRPCHCGAMVHAFECMYYNNLNATKQQKVRSCGGPCHRKLPNCPHLCSEICHPGQCPSVDQCMKKVNVRCACNNLKKEWICQDVLKEYRQSGRDPKQIPKNQYAVGLLACGEDCVKKVKAADSELHLRKIQEIKTPAVEVENVPKRRKRRNRGQESVESSKFQEIKAVALKFLLVIFLCIIVVAGLYLLWKGVYRLSDWMNDMEEQRARQRHLKPGRL

SEQ ID NO: 44687 - protein, 540 aa, Oryza sativa
MGGGDGDEVLLLPEPRPRRGLASWALDLLERAAVRLGHDASKPLYWLSGNFAPVHHETPPAPALPVRGHLPECLNGEFVRVGPNPKFVPVAGYHWFDGDGMIHAMRIKDGKATYVSRYVKTSRLKQEEYFGGAKFMKIGDLKGFYGLFMVQMQQLRKKLKVLDFTYGHGTANTALIYHHGKLMALSEADKPYVVKVLEDGDLQTLGLLDYDKRLKHSFTAHPKVDPFTDEMFAFGYSYEPPYCTYRVITKDGAMLDPVPITIPESVMMHDFAITENYSIFMDLPLLFRPKEMVKNGEFIYKFDPTKKARFGILQRYEKDDTNIRWFELPNCFIFHNANAWEEGDEVILITCRLENPDLDKVNGYQSDNLENFGNELYEMRFNMKTGAASQKQLSVSAVDFPRINESYTGRKQRYVYCAILNSIAKVAGIIKFDLHAEPEISGKKQLEVGGNVRGIFDLGPGRFGSEAIFVPREPGVSGEEDDGYLIFFVHDENTGKSEVNVIDAKTMSADPVAVVELPSRVPYGFHAFFINEEQLAKQSA

SEQ ID NO: 44688 - protein, 764 aa, Oryza sativa
MDPSMPPPPPRNPNPSSASMPPPPPPPKLEPASKPESTNPNSSMPPPPPPLPVEGASTSSSMPPPPPPRPAAPPQPEVEGADASAEGGTSASDSEADEAAGNLGRGSRDIEMAEAAAPPPSQQQQPRPRAPYAIPEWSAAPGHPFFLEVLKDGTIVDKLDVSRKGAYMFGRIDLCDFVLEHPTISRFHAVLQFRNDGEVFLYDLGSTHGSFINKTQVKKKIYVEIHVGDVIRFGQSSRLYIFQGPSELMPPEKDMQKLRDARVQQDMLDREASLLRAKNQAALAEGISWGMSEDAVEDSAEDEADEITWQTYKGQLTDRQEKTRSKIIKRLEKITNMKKEIDAIRAKDISQGGLTQGQQTQIARNEQRTSQLMEELENLEETLNDSIRESLGARTGNSNRGSHKASLEEEDDILSDEDDFYDRTKKKSSSHKSSEQQVETADSLLDKKDTITSDIESKKKLVEEEKNKLAKSENADVGDDLDAYMSGLSSQLVHDKIAQIQKELSDLQTELGRVVYLLKIADPMGEAARKRDLKPRETKSPASNDSLRPESRKQNKVAQNKASTEEKLKESCAEKTQVDKPAEEEKGISTNQENGSKPAFSIPKPQWLGDKRTVESEENCIKEESANEEETDNFVDYKDRKTILSGSANGKDLEEAAPGLILRKRKSDQSAANEVESSVESEASAADAVALLLKHKRGLQTSEDMEDENEPQASKRKSKKSKQKRVLGPARPDFLDAGPDHETWVPPEGQTGDGRTSLNDRLGY

SEQ ID NO: 44689 - protein, 531 aa, Oryza sativa
MAATPTTSASAAATTRLFLPTRRHLHETASVPAPSRTIARRYSGGVRSLGPPRAAAGELGGGAGGTITGKGAVRIVSIVGDGSISPLKDTPWEEVMRHTANRMKWVDEGFEMLVFTDKSIGHDELRKELAQCDMLVNVAITSQETVQWLINNSEDIPNIICFQSSPTLENKLGGRYVQYTGRQDMFCKLTNIGETGGMKESAEVLKAVSNAWERHNSDDIRFCLLVVVNAYIRPVDMLQNLRAKGLSTLSCMIRNCGPQILNCLFDPNCRKALQCLNSCSPTDQVCNYRCIASYESPHLEAFSLCVLQKNNCLDLNAEIPSKPSVPPLTMFREQMLSHELAEDMFVGWLDNLEWSWRVVAGQNPAYDQFPCQYQLFYRGKAKGSFWYEPIFQVRTLEGELVWRRRKYRVRRALIPGTFYFSVLDNGVVSKEFWTIVDVSDDFSWGLFHYHGAAQAAGLAYTGAVLVSPDGSCPDLDDPRLASALDKCGIKKWELYMVDNCSCTGAPLGTPGDAKLHYQIAPGKESGILQTG

SEQ ID NO: 44690 - protein, 172 aa, Oryza sativa; identical to SEQ ID NO: 37315

SEQ ID NO: 44691 - protein, 848 aa, Oryza sativa
MPPARVLSGGGGGGGLGDEAPELERQMGCMAGIFQIFDRRQRLLTARRRRPPPKMLPPGPGHTLPRSSSNVAAQSSSTSKIVLEKTFSKSMTENSSLSIESSRASCSSSSCSSFSSLDGNKSIQQELPYINEQLFVQRPLKSSPSLKDPVMDTRSGQSNIGFRDIVKDSINRDTGGLTVKTSVKDARRNGQYKDSPRPLLLSKSMDGTYVIGIDRSTKVPANAVESSRRFPEQSRFSCDDRRLLRPVEAQENKKPSTRLKELPRLSLDSRKETLSSSSRQKTFSYRRTDDSLMDALRPQDSPGHRRASSVIAKLMGLEEAPNATGVLTVDSYEPERSPRPAEDTQKEHPVPSPRRFCQDPRESLPKDESPAMKTKPSPRILTESAPWRQQEKIATSSKASQCRDAEVRPRTASLYAYIERRGGGLEFLECNKDFRALRILEALHAKDAKRQNDGNGALTVAAQQAGDALNTSSRHFQPPIVVMKPARSTEKQPGVSLASVDPLAGFRNLRKLQARDAPCIGEHETSTNEKVHSRISRAQSKSDEPASRASSPRPTGSSSPRTVQRKAESERRSRPPVSPKSPSKKSSEAASPGGRTRTKPSQGKNHRDNEVSKSPRSRISMVKEIDISIMDFQKPLASTPSHKGTPSVLASDQKINSLENAPSPISVLDTSYYHTRLSYSFKDGETHSSEECWNPNSLPDTPQSKTSSEVSQIKPENFEALIQKLEQLQSMNDEVANKKDHQYIYEILLASGLLHKELSFVAMPGQAWPSSCLINPELFLILEQTKPDFASADQTVTKSSKANTEKLHRRIVFDLVNEITAQKMNIHCSASQSAKSLQLRKYNGWRLF

SEQ ID NO: 44692 - protein, 79 aa, Oryza sativa; identical to SEQ ID NO: 29773

SEQ ID NO: 44693 - protein, 329 aa, Oryza sativa
MAAAAAAGAGADEEVDFEFFPIIRRYKGGRVERFMNIPPLPAGTDPATGVTSKDVVVDPAVGLWARLFLPPGGGAPQGKLPVVVYYHGGAYVVGSAADPFTHSYLNGLVAEAGILAVALEYRLAPEHHLPAAYDDSWEGLRWVASHANGGGGVEPWLLEHGDFSRVFLAGASAGGNIAHYVAARAGEHGGLGLSIRGLLVVHPYFSGAADICAEGTTGKAEKAKADEFWRFIYPGSPGLDDPLSNPFSDAAGGISAARVAADRVLVCVAEKDSLRDRGVWYYESLKASGYAGEVDLLESMGEGHVFYCMDPRCERAWEMQARILSFLRK

SEQ ID NO: 44694 - protein, 635 aa, Oryza sativa
MPRRGASSASTVIQWAQEIERHTAKDSVRVLVYHGGRRGAQKYDFNKYDFVITTYSTIEADYRKHIMPPKTRCCYCDKLFYPNKLKVHLRYYCGPDAQRTEKQAKQESRKWGSKKGTSKRRVQKKKNDSDGEDFEERDGGSGSQSRGQSPLHSVRWERIILDEAHFIKDRRCNTAKAIFALESEYKWALSGTPLQNRVGELYSLIRFLQIFPYSDYFCKDCNCEILDTLLKKQCDCGHSSVRHFCWWNKYISKPIQFGSASFEGKRAMVLLKEKVLKGIVLRRTKKGRAADLALPPKIVTLRRDSFDKNEMEFYEALYTQSRTQFDSYVDAGTLMNNYAHIFDLLTRLRQAVDHPYLVAFSKTAELSDRSKNEGNENMESQCGICHDMTEDAVVTSCEHVFCKNCLIDYSATLGNVSCPSCSVPLTVDLTTRSSGEKVTPNLKGGKRSGILSRLQNLADSKTSTKIDALREEIRNMVEHDGSAKGIVFSQFTSFLDLIEFSLQKSGIKCVQLNGKMNIVEKGKAIDTFTNDPDCRIFLMSLKAGGVALNLTVASHVFLMDPWWNPAVESQAQDRIHRIGQFKPIRSMRFVIKDTVEERILQLQEKKRLVFEGTVGDSPEAMSKLTEADLKFLFQN

SEQ ID NO: 44695 - protein, 747 aa, Oryza sativa
MATYTCRIEADKTLYPVLLSNGNLIEQGDLEGGKHYALWEDPFKKPSYLFALVAGQLDCREDSFTTCSGRKVTLRIWTPGQDLAKTAHAMYSLKAAMKWDEEVFGLEYDLDLFNIVVVPDFNMGAMENKSLNIFQSRLVLASPETATDGDYAAILGVVGHEYFHNWTGNRVTCRDWFQLTLKEGLTVFRDQEFSSDLGCRTVKRIADVSKLRTYQFPQDAGPMAHPIRPHSYIKMDNFYTVTVYEKGAEVVRMYKTMFGASGFRKGMDLYFQRHDGQAVTCEDFYAAMCDANNTQLPNFLQWYSQAGTPTVKVSSSYDASSQTFSLKFSQEVPPTPGQPVKEPMFIPIAVGLVDSTGKDMPLTSIYSDGMLQSLTSDGQPVFTTVLQFNKKEEEFIFNNIPEKPVPSLLRGYSAPVRLDSDLTESDLFFLLANDSDEFNRWEAGQVLSRKLMLSLVADFQQQKTLALNPKFVDGLRSILRNTSLDKEFIAKAITLQGQGEIMDMMPVADPDAVHAVRTFIKKELALQLKDDLLSTVTNNRSSEAYTFNHDSMARRALKNTCLAYLASLNEPDTTELAFVEYKSATNMTEQFAALAALSQNPGQVRDDTLLDFYNKWQHDYLVVSKWFALQATSDIPGNVANVQKLLGHPAFDMRNPNKVYSLIGGFCGSPVNFHAKDGSGYKFLGEVVLQLDKINPQVASRMVSAFSRWRRYDESRQALAKAQLEMIVSANGLSENVYEIASKSLAA

SEQ ID NO: 44696 - protein, 157 aa, Oryza sativa
MAVSASLPAATPAGRHAAAVYVAAVPLRGPKGPAQALMSAGYSLGLWDLQHFMVLLRPDPARAQALVFDFQPRDPEDALAAFAVLSRSEIPGVVRRRTLRRVPDTRCWLVGHHRSGGGAGAAAAVLAADAFTARWPTDLVVGRHDCRDFTNGWSATS

SEQ ID NO: 44697 - protein, 361 aa, Oryza sativa
MEEELCGNNWDLDAVVRLGCCRRRISPAAVAQQVDPFASFLQQGVAMEVAAEKEVGVEAAWSFPELTVRDGGGGGLGRDADELLKAFCAAFPSSSSSKSSPLPTPPPPPPTQPQPEQQKPVTVQENLPAPTTAPARASQPAAARQVPAGGVPRSKRRKNQQKKVVRHVPADGVSADVWAWRKYGQKPIKGSPYPRGYYRCSSSKGCPARKQVERSRSDPNTFILTYTGEHNHSAPTHRNSLAGTTRNKLPSSSAASAASAQPQPPPPSVVVVGAGGGGAEAAGLSPTTPLRTPSMEEDEEEEEEEELLVEDMEMAGEDELLFLNGGDDNAALDGTPMSSLFDIADEPFLPSPWTEPTAAGS

SEQ ID NO: 44698 - protein, 357 aa, Oryza sativa
MAAPGACLASRSPPAFLAGGFLAARPAAVSPIPSRSGKSIAPSRRFIVSNKLAWVEDELVEITESQEPSSASSKKRPPLRRGKISPQLPVPEHIPRPSYVGSNRPQELSSVRQIHSAEGIAGMRAACKLAARALDFAGTLIKPSVTTNEIDREVHNMIIEAGAYPSQLGYGGFPKSICTSLNECVCHGVPDSTQLQTGDIMNVDVNVFLNGYHGGASRTFVCGEVDDSIRHFLKAAEECLEKGITVCRDGVNYKKIGKKISKLAYFYGYYVVDRFVGHGIGPIWHSEPLILHHANDNSGRMVEGQTFTIEPILTMEKAETVTWEDGWTTVTADGSWAAQFKHTVLVTRTGAEILTKL

SEQ ID NO: 44699 - protein, 486 aa, Oryza sativa
MEVVSSSHSCLAFNRTPSSAWRFPGNGLGPGHAKLTRPRSAILCVRSGTASNPADSGKVHASHGFYVSDVDAALQGIPKKVGEIEKMIIPSLPEGPESSLISTGFWEWKPKLSVYYEKSGIDNSKAPSVLFLPGFGVGTFHFEKQLKDLGRDYKVWTMDFLGQGMSLPCEDPAPKSTSGELDEDTYWGFGQELQPWAEELVYSIDLWRDQVQHFIEEVIGEPVYIVGNSLGGFVSLYLAASCPHLVKGVTLLNATPFWGFLPNPATSPRLSKIFPWAGTFPLPSFVRKLTETVWQKISDPRSIQGILKQVYADHSTNVDMVFSRIIETTQHPAAAASFASIMCAPKGQISFEEALSRCQRQGIPISLMYGREDPWVRPIWGIKVKQQVPESPYYEISPAGHCPHDEVPEVINYLLRGWLKNVESEGSVAVPFLEEPSYAENGVSRELEFVRGGSKKSVHVRLFGSKISLWSQLRSLLKSNTWVISR

SEQ ID NO: 44700 - protein, 508 aa, Oryza sativa
MAATPPSSQHRRPLSSSASAASLAGKPRGGGLLLGRYELGRLLGHGTFAKVYQARSADSGEPVAIKVLDKEKAMRHGLVPHIKREIAILRRVRHPNIVRLFEVMATKSKIYFVMELVRGGELFGRVAKGRLKEDTARRYFQQLVSAVGFCHARGVFHRDLKPENLLVDEHGDLKVSDFGLSAVADQFHPDGLLHTFCGTPSYVAPEVLARRGYDGAKADIWSCGIILFVLMAGYLPFHDQNLMAMYRKIYRGEFRCPRWFSKDLSSLLNRILDTNPETRITVKEVMESRWFQKGFRPVRFYVEDDQVHSLADGDNDMPELEPSEPPPPPPFPPPPPQQGDDGEESGWESDSSVASCPATLSSEERRQRPLGSLTRPASLNAFDIISFSKGFDLSGLFEERGSEVRFISAEPMQTIITKLEEIAKVKSFFVRRKDWRVSIEGTREGLKGPLTIGAEIFELTPSLVVVEVKKKAGDKEEYDDFCNRELKPGMQHLVHHMGSVPNIPSDTE

SEQ ID NO: 44701 - protein, 650 aa, Oryza sativa
MGPLSDLDSQRLFFRRIFGSDDGCPTQLKRISMDILKRCRGLPLATLTLASILADVPMLAEKWKQVHNSIGLATPGENMNRILSLSFHDLPNHLKTCLLYLSIFPEDYVIEREQLVWRWIAEGFIPETRGIPLEGVGSAYFNELINRSMIQPADVQYDGTVQSCRVHDMILELIVSISTKINFVAVLHKDQDETRFTDYKTKVRRLAHQSNCIEKLLERMSRDDLSHIRSIISFDYVKGIPHLGDFQALRVLDLGSCRSIENHHIENLEMLYQLKYLDLSRTSISELPMQIDNLRYLETLDLRGCAIEKLPASTVRLQNMQRLLVNRSVKFPDEIGHMQALQTLLFVSMSCNSIKFVEELSKLIKMRVLNITFSKPVDMVDEVRKYTDSLVSSLNELFNLESLKIDPEEGCSLDSLMGVYLTFGCLKKLVIGYISRIPKWINPSMYNLVHLELKVDIVREEDLHSLELLPCLLYLQLEMTDGSSKMLTVGSEGFRCLRESQFIWKNDGMGLVFLEGAMPELQTLHLYFRTHETIANYSGVDGNGIENLSRLKKLCVDVDCSGSTREEVEAAEDSIRKAADRHRTKLTLEIRRWCEACMIEEEAHDGNAEFPSRSVNRRANPVRVAFRVRADRRNRNRTRRNRITAPSAST

SEQ ID NO: 44702 - protein, 247 aa, Oryza sativa
MELDKKFKVLCLHGFRTSGSFLKKQISKWNPSIFQQFDMVFPDGIFPAGGKSEIEGIFPPPYFEWFQFNKDFTEYTNLDECISYLCDYMVKNGPFDGLLGFSQGATLSALLIGYQAQGKVLNDHPPIKFMVSIAGSKFRDPSICNVAYKDPIKVKSVHFIGEKDWLKVPSEELAAAFEDPVIIRHPQGHTVPRLDEASVKQLSEWSSSILEDIKNADDVAKASIVEKPSEGNTVAESGENLVEQIAA

SEQ ID NO: 44703 - protein, 664 aa, Oryza sativa
MMHLFHICRDFSYNQLTGSFPSWATQNNLQLNLVANNFDLGSTNNGILPPGLNCLQKDTPCLRGSPEYYSFAVDCGSNRSIRGSDNTMYELDFTDLGSSSYYVTSETRWGVSNVGKYFQSPNDSKIIYSNEKIQNAVVSELLQTARMSPSSLRYFGLGLENGNYTVLLQFAELGYPDSPTWKSLGRRVFDIYIQGDLKEKDFDIRKMAGGKSFTAVYKSYTATVSKNFLEIHLFWAGKGTCCIPIQGYYGPLISALSITPNFTPTVRNGVPKRKSKVGAIAGISIGASVVGLAALFGIFMFIKKRRRLAQQQGELYNLVGRPDVFSNAELKLATNNYSSQNILGEGGYGPVYKCMLPDGRVIAVKQLSQSSHQGKNQFVTEVATISSVQHRNLVKLHGCCIDSNTPLLVYEYLENGSLDQALFRKNSLKLDWATRFEIILGIARGLTYLHEESSVRIVHRDIKASNVLLDTDLTPKISDFGLARLYDEKKTHVSTGIAGTFGYLAPEYAMRRHLTEKVDVYAFGVVALETVAGRSNTNNSIEESKIYLLEWAWDLYEKEQAQRIVDPRLEDFNKDEVLRVIHVALLCTQGSPNQRPPMSRVMAVLTGDAEVVEMVTKPSYITEWQYRDGNSTNSESTTSEFSRQKEIDPLTMSPTITGSSHDGR

SEQ ID NO: 44704 - protein, 74 aa, Oryza sativa
MSGRQRDRESLRMTGCLETTKTLKDWKIGLVWETNFEANSGSCVNLANQIWLRLAPNQAETCLALFVESTHLDC

SEQ ID NO: 44705 - protein, 786 aa, Oryza sativa
MWSLAVASPHPAAAFAAARPRRGPRPAAAPSHRGVNPQRWRCEKTQAWSFWSSLWASDLPGGLYGDVSKNILKPAAAVSVEQAEASAHLPKGDMWSVHKFGGTCMGTSQRIQNVADIILRDPSERKLVVVSAMSKVTDMMYNLVNKAQSRDDSYITALDEVFEKHMAAAKDLLGGEDLARFLSQLHADVSNLKAMLRAICIAGHATESFSDFVVGHGEIWSAQLLSFAIKKSGTPCSWMDTREVLVVNPTGSNQVDPDYLESEKRLEKWFARQPAETIIATGFIASTPENIPTTLKRDGSDFSAAIIGSLVKAGQVTIWTDVDGVFSADPRKVSEAVILSTLSYQEAWEMSYFGANVLHPRTIIPVMKYNIPIVIRNMFNISAPGTMICQQPANESGDLEACVKAFATIDKLSLVNVEGTGMAGVPGTASAIFGAVKDVGANVIMISQASSEHSVCFAVPEKEVAAVSAALHVRFREALSAGRLSKVEVIHNCSILAAVGLKMASTPGVSATLFDALAKANINVRAIAQGCSEYNITVVLKQEDCVRALRAAHSRFFLSKTTLAVGIIGPGLIGRTLLNQLKDQAAVLKENMNIDLRVMGITGSRTMVLSDTGIDLAHWKEQLQTEAEPANLDKFVDHLSENQLFPNRVLVDCTADTSVASHYYDWLKKGIHVITPNKKANSGPLDKYLKLRTLQRASYTHYFYEATVGAGLPIISTLRGLLETGDKILRIEGIFSGTLSYIFNNFEGTRAFSDVVSEAKEAGYTEPDPRDDLSGTDVARKVLLPS

SEQ ID NO: 44706 - protein, 203 aa, Oryza sativa
MAANPGNKIRNAKLVLLGDVGTGKSSLVLRFVKGQFVEFQESTIGAAFFSQTLAVNDETVKFEIWDTAGQERYHSLAPMYYRGAAAAIVVYDITNAASFTRAKKWVQELQAQGNPNTIMALAGNKADMVEARQVPAEEAKTYAQENGLFFMETSAKTAINVNDVFHEIAKRLLQGQQAQDTPAGMVLNQRPAERVVSSSSCCS

SEQ ID NO: 44707 - protein, 81 aa, Oryza sativa
MDIYPLAWSLLKGKKKLVVTMAPEFIIQEVFQVFPLTNNTAISVEMSLSIQKMEHCMRVAMLLRVIIMSSMHYLLCLLFSS

SEQ ID NO: 44708 - protein, 650 aa, Oryza sativa
MASHAAVVEIIDDDDDDDDDVAAASTPPALHKRSHAVAAAAPDSPDAFSPSPPDPKRRQLAASTIVLDDTPTPPKRRPPPVAADRSASVVADTPRSFVPCSLRNRAIAGDTPDSVLPSPSFHLDAPDSATPGSDVPCSVGLDDIVPETPGFNSPRLARPPAVPGLTSPMTARKFSGVSCPISLDSDDELDDTVYRESLTRTPSNMAKPEHAIQPCTTSCTDKVENTKSTDKKDYSKSNVGYQTNNSACKNNGTTSYNQPPRANSPCEDSTLKEADPFINNHCPQEENALPIEERKKKQQEEKRLKKEKKAREIEEKKQKRLETKKQKEAMKAELAELKKLEKEKKKWESGKLATKCIVAEIDSSVIESGSVGGHLVQGFHEKGLCFRVTSNSIKGSILWKMQIPNEFTQDQASTSQVPYILFVLQAEEFCDLVSGGTLLDHVQKVRRQYPEFTICYVTNKLMSFIKRREQNQYNKTTSNSNSWKRPPVEEALCKLATHYARVRSRHCTDEAEVTEHIVGLTYSLANCKFRKPLTWLSVHANGSNISKGCVDKDRIKKSAWLKSLVAIPGVSPGQAIAIEKKYPSMRSLLNVYMDDSKSVHEKEHLLEDLRLEGPLGDFKRRLGPACSKKVYTILMAQNGAAEVEVDRRGA

SEQ ID NO: 44709 - protein, 602 aa, Oryza sativa
MCLLLILLCFVRWQYVLEYSKTIGSLLGNPDSLSAYMIDDPKMILKVKEKPTSLKAAWELLEIFFVDKQLQTWLPERLVDWLADYDSLLTKTENTIYRTLINFQKKLINLQVVEDDPDYWSGLSAALSVGWLDIVVNMLRFHGSYQLDQMDSRETENGLVEAVAVLVSTMPRMRPDLPSGKLGQCCKTRPDFIKALEKWRGQVSKLECSAFWIQCGHQKTRDGLKSLLHIMLGNIKNLTASTSHWLELFASHLLYIRPFTVGFEGMHQLAQKCIQLKPSADNSGLTGLLTGILSENREVVLAECTKNFGPWMVTHAMELLTADNDYADMMLHEERPNFGGISIEELHRLVYAQVLCSHALTWQIAPTYLSSCLNQGLGLLEILLLKQPIQDNRVVLKTLEICRLYELENVSTNIMKIAGIYHWKHGRKGTGVYWFQQANDKVRLDRIAQQLFEHIGKSVTDDSFKQWEGLLELLGSDIGSAGGLEFLHRYRDFKRSLQMAQEGRTGESVRQTVEFLIQLMRNPSTPQRFWLPLLHDSVRLLNCKPCPLLNVAETTLLLNKLQELSLAKLRPDLSNIHLPSHALNSVRLALASNLARAILEEP

SEQ ID NO: 44710 - protein, 963 aa, Oryza sativa
MKPMDDEHSTTLFLQRFFGFVSDCPQQFKEVSNKIVQICGGLPLATISLASLLASQPVILMDLCLYIRNSLSSAFRTNSSIEGTRQVLNLSYNNLPHYLKTCLLYLNMYPEGYKICKDDVVEKWVAEGFIDQIEGRDLEKVAGSYFDELIDRRFLQPSRLNYNNEVSTCTIHDEVRDLIAYKSVEENFVLVLDFYRKDVELSDKVRRLSVHFGDIKYAKIPTNIRTSEVRSLTFFGLCKCMPSLTEFKLLRVLNLQLSGHVGDELLDLSGISELFQLRYLKIACDIRTELPSQMRGLKYLETLQMDTTLTAVPWDIIFLPCLLHLHLRFDMNLIDLMGHMTPPSELGSSSSNSSPSGGIISNLNNVRDIHLTFCALPSKHLERNMEILGSLLGRLGNLKNLTLVSSSSQKKIAASGASEVTILWDNLAPPPLLQRFEWLLHSCIFYRVPKWIGELGNLCILKIAVRELVKNSVDILRGLPALMALSLNVHRASVENIFFDKVGFSVLKYFKYNCSVPWLKFEAGAMPNLRKLKLGFSALGDLYGTAPIRIGHLLGLKEISVKIHGASVDAESALTSAVSNHPSNPRINVQLVDKIFYGDRVTKEKDHGSEEEQNAIMSANFDEYHQTQDKESSDANKQVGSIVPLPREQEHGILEHDEYAPKDPDKYKQSDIRSVSSMYPWHLKFLGALSIHGGTRLATAPRKAEDAYISYAMKGNMQDSVHMPDSSCYLSMLVLPMALDMKSHLYESFEVTLARANTWLYASQASGVPIKLMSVQSDDLLTKISRVGDATSATVNSGLLPDLSNATLEDYQGYNTEVVKAARLWYSSIGGEMPLEITPKVGDTKLGFAISRTEEGFIYISSVLQDDNDSETPSTRSGMHNLFNRAREASKLLVISRVSNEKVLPWMISSSGAIRCFDTLSISQKLSLSRYPLCSFQLHLLMWEKPIHPAERSIHRPKMPFFF

SEQ ID NO: 44711 - protein, 283 aa, Oryza sativa
MAMRLFPSSSPLPPPPPLLPSPSAKAPPSAPFSLSLRLRRARVAASAAAAAGGPERGAGGYEGDAEGEGSSGAFDRGMSEIARKVPLFEPARGDAAAVAGERPLPINLELWLYRAKVHTRKYEFADAEKLLNQCIMYWPEDGRPYVALGKLYSKQSRFDKARAAYERGCQAAQGENPYIWQCWAVLERKGGNIRRARELFDAATVADAKHIAAWHGWAILEIKQGNIKKARNLLAKGLKYCGGNEYIYQTLALLEARAERFEQARTLFQQATQCNPKSCASWL

SEQ ID NO: 44712 - protein, 269 aa, Oryza sativa
MPPHEYTSQLTQGHHGDGTISNHFDGYARGHSGYPQSALPNPGHFSWRPHTCAGSGLSTDTSNHGSFPPSRYGGFPPTHSSNVSADTLASTSSIPDPADWDPNYSEESLLQEDTSLSDALSDLHLKDASGQTNQSSRLAHIQSHAIANSNSLSMNQRGDRLFHASTLTESSASTGHVTYDGYHNANYSQLNFQSRHGQPFQRYNHMTASYLRPMGNHHNGQPVWPNYGMAEPPPATMADGMPWGGRPGHSFTAGGLPSSFAGKDFGRIF

SEQ ID NO: 44713 - protein, 35 aa, Oryza sativa
MIHPPLSHWGTVGRRSSCGGSVLKRELTANFLRGG

SEQ ID NO: 44714 - protein, 506 aa, Oryza sativa
MKLDRSMDLVFNTLLEHATRLREYLKKAAEGISLGEGIERLRRFYKVAKSVEEREVLDWHLANLEFSNAGCLSELSLAHWDQDDQYEMGGDHCFLAGGNARLVHALCDGVPVLYEKTVKRIEHGEDGVSITVEGGQVFKADMALCTAPLGVLKSRSIIFEPELPERKLEAIQRLGFGLLNKVAMVFPHVFWDEEIDTFGCLNKERSKRGEFFLFYSYHTVSGGAVLIALVAGEAALEFEKVDPAVALHRVLGILKGIYGPKGVTVPDPIQSCCTRWGSDPLCSGSYSHIRVGSSGTDYDILAESVNDRLFFAGEATNRAYPATMHGALLSGLREASKILHASESRLNSDYKKYALQKSIRLINNVLDDLFMEPDLECGRFSFVFSYITPEEEQAPGLARITLEKPLLLPSKKRKVKGNQKDQDPVAEKIDQEVFYLYATVSQEQATELLECDNDKSRIAVLCKDLGVKLMGYDSTYDVCSHLISSISRAQKARKRLQGPKSLKTGL

SEQ ID NO: 44715 - protein, 671 aa, Oryza sativa
MKRKQKLLFPSPPKQKHQNIPPKSKEKQSISNEPSLSILVPLLSPRIPPPETLVHRRAARLGDSITLRGIEVGPRVGKAKMAGSIDRPSGAGFEGIVHDDDKKEWKSDEDNSEGDKKAKAVSFKNRAISAGNKFRRSLRRKRRRRVGDHVASIEDIRDVKELEAVQRFHQCLHDEGLLPERHDDYHVMLRFLKARKFDIDKAKHMWSEMLRWRKEFGADNIEEFDYSELDDVLECYPQFYHGVDKEGRPVYIELIGKVDPNKLVQVTTIDRYVKYHVKESEKCLQMRFPACSIAAKRHIDSCSTILDVQGVGLKNFSKDARELIMRLQKINNDNYPETLHRLYIINAGQGFKMLWGTIKSFLDPQTASKIHVLGSKYQNKLLETIDESELPDFLGGKCRCEEHGGCIRSDKGPWKDPDIIKRVLNGEANYGRKILAISSVDGKKICYINPRHLTKKCSDASAESSSEMEDVSSPIASVNPIINPHLTPVDESKLPGNTSTSGAPPRVEDIPVVDKAVDTCAGPSTSSMVFNSDSFSLRNITMELGGLRNRITAWLIVLIVSFVAVLRSVPSRVTASLSSQAISRENSTHSSVLRRLGELEEKLQELEAKQSQMPPDREELLNGAIHRVDALEAELISTKKMLYDALMRLDELLAYADQQKNIQFRKKRFCF

SEQ ID NO: 44716 - protein, 372 aa, Oryza sativa
MKKNLISNAALCQLACSSNLVGYIHAEEFNPRDWIIPCLDYDERDNKKISFLAPNGMYSQRKMSIKSKRIADSVEALIGAYLSTAGEKAAFLLMKSLGMNIEFHTEIPVERKISMKAEEFINVRSLEGMLGYKFNDSLLLLEALTHGSYQTSGPTSCYQRLEFLGDAILDHLFTEYYYSKYPDCTPELLTDLRSASVNNNCYAHAAVKSGLNKHILHSSSELHRKMSYYLEEFGQSFTGPSYGWEAGIGLPKVLGDVIESIAGAIYLDSKCDKEVVWRSMKRLLEPLATPETIEPDPVKGLQEFCDRRSFKITYEKNHVDGVSSVIARVKAGETTYSATKSGPCKLVAKKLASKAVLKDLIAGHKDTEAAAV

SEQ ID NO: 44717 - protein, 235 aa, Oryza sativa
MYISVKALIMGLLSTGQNPQNISNLEGSLLGALKLIMLIGLVVISFGPSYSYTLLRLLYGARYSDGDATVILRYYCFYVICLAMNGTSEAFLHAVANEDKLKQSNDMLLLFSAIYIVLNVVLIKSAGAVGLIAANSINMLLRITYSAAFIKDYFKGSFSFRHCLPAGWGVLLISGLTTAFSERMFLNRNRFKQTLPIHMAIGIMCLGFSSLEIYRGEKQFLTSIIRSLKSRDKLA

SEQ ID NO: 44718 - protein, 387 aa, Oryza sativa
MDVCWSMLSEEQHWKNMALPTPRLVVPIDVSKKPWEQKVPLHNRWHPDIPPVADVTEGELFRVEMVDWTGGRVSDDNSADDIKFLDLTITHYLSGPLRIVDAEGVPAAPGDLLAVEICNLGPLPGDEWGYTAIFERENGGGFLTDHFPSARKAIWYFEGIYAYSPQIPGVRFPGLTHPGIVGTAPSAELLNIWNEREKILAETNHESIKICEVLHQRPLANLPTPENCLLGKIQEGTADWQRIANEAARTIPGRENGGNCDIKNLSRGSKVYLPVFVDGANLSTGDMHFSQGDGEVSFCGAIEMSGFLELKCEIIRGGMKEYLTPIGPTPLHVNPIFDIGPVEPRFSDWLVFEGISVDESGKQHFLDASVAYKRAVLNAIEYLSRFG

SEQ ID NO: 44719 - protein, 249 aa, Oryza sativa
MPKIKSLSNACKVSFSPDGPISDEALERVRALLDEIRPIDVGLDNEAQIARNWNNSTRQPNGRRGRNGANQFTSPIKYLHIHESESFSMGIFCMPPSSVIPLHNHPGMTVLSKLLYGTLHAESYDWIDVTDPTDQLQELSVRPARLVRDREMSAPETTILYPNRGGNIHTFRAITPCALFDVLSPPYSAEKGRDCSYFRKSSVRETPPVVLPGEINSAEVIWLEELEDHQPPEGFVVARGLYKGPVIRR

SEQ ID NO: 44720 - protein, 815 aa, Oryza sativa
MSSPSPEPPPNPTPVPPPPPPAPSGNTAVEDSEAGPCIPRLQAATGDYTQWLGQEFASEHEAYEFYRYYAWKLGFSVRREYANKSRKTGEITSRKFVCSREGFKAPDKRTNHTRTPQPDTRTGCHANLVIRRKNDTSKYEVYAFEAQHNHPLFIPSCANPLQKKLSDVQSSDADNSASVTHASEPDSRNSILAEKTIKSPEISQRSLHTRRQREIKCGEASALLNYLQDQCRADPLFYHAVQLDAEDKVTNIFWADAKMVIDFGQFGDVVSFDIVPRNNMNLRPFASFVGFNNYGETVLLGMALMYDDSLESFQWLFETFLHAMSGQAPRTVFSRQDAIVSKAISLVMPDTCHAICTWNLKQSAKSNLNHLIRGDCGFIKEFKACINDYEEEVEFFTAWEAMISKYNLHNNVWLQKVFEEKEKWARPYTKWIFSAGMKNTQLNERLHSDVRDYLKSDVDIISFLKHLKKLVNDRRYIELEVEFSSRLKLPDFKIRAPILRQASEAYTGMIFQLFQEEYEEFQSAYIVTRDESGPSREYIVAILEKERRYKVHGNPCEQTVTCSCRKFETLGFLCSHALKVLDTMDIKYMPDRYILKRWTKYGRCLTAPQVEGRKVQADTTLEFSSRCEYLCPVYVRLVARASECEESYRVLDQCSVELGKKIEEILQKQTSIDASAPQSDIEDVTISLSANGTDNESERALDYSSSTRPKRRKKKGRNAKSQRKSCIEKGLQKTKKVQPEQSPIQYTMLDAAQPGNVLFQGLDISNPFPMGQLNYGGVQSQPGLCPSLPTVSRELGFAAYLSQPSSNNQHNQQGL

SEQ ID NO: 44721 - protein, 110 aa, Oryza sativa
MDDDGDDIFMRSWTGTIIGPLNSVHEGRIYQLKLFCDKDYPDKPPTVRFHSRINMPCVNPDTGLVESKKFHMLANWQREYTMENILTQLKKEMAAPHSRKLVQPPEGTFF

SEQ ID NO: 44722 - protein, 548 aa, Oryza sativa
MLTVAASALGNNKKSTAAACFSLAMPFLLSSPTPPPPPHSSSLPRSPSPRPRLPLPPPRRAALVTAAQDPRWRRAMASLAVSASASASGEEVTHLAQREAAEIDEQLMGPLGFSVDQLMELAGLSVAAAVAEVYKLGEHTRVLVICGPGNNGGDGLVAARHLHHFGYKPSVCYPKRTPKPLYSGLCTQLESLTIPFVPVEDLPANLSEEFDIIIDAMFGFSFHGTPRPPFDDLINRLVSLSAIDNSAKRPAIVSVDIPSGWHVEEGDINGGGFKPDMLVSLTAPKLCAKKFTGPHHFLGGRFVPPPIVSKYKLHLPPYPGTSMCVRIGKAPSVDISSLRENYISPELLENQVMPDPFDQFVRWFDEAVTAGLREPNAMALTTADKEGKPSSRMVLLKGVDKQGFVWYTNYGSQKAHDLSENPNAALLFYWNEMNRQVRVEGSVQKVPEEESEKYFHSRPRGSQLGAIVSKQSTIIPGREVLQQAYKELEQKYSDGSVIPKPDYWGGYRLTPKLFEFWQGQQSRLHDRLQYSLREVDRSTVWHIERLSP

SEQ ID NO: 44723 - protein, 106 aa, Oryza sativa
MCRGSLVHKKSHCYPAAHRPHANTRFVNDWMQVSRCCHCMFWYWPIGQDMNRNGEVVILLRVVGEIGTELMHLINMQGAVDSLIYDLALLRQNFTLRIGLHGMGTH

SEQ ID NO: 44724 - protein, 387 aa, Oryza sativa
MAAKAAALSSSPFVSSRRLSSPAASLRARTPRCVMGSEQVRVVVEEEGKTKKRMGVAEPRSAPPAVWTPRAPAQEARLAALRTDGRDSRLKIFSGTANRPLAQEIASYLGVDLGKVLIKRFADGEIYVQLQESVRGCDVFLVQPTCSPVNENLMELFVMIDACRRASARSITVVIPYFGYARAGRKAQGREAITAKLSANLLTEAGSDRVIVCDIHSTQALGYFDIPVDHIHGQPVILDYLASKTISKDLVVVSPDVGGVVRARAFAKKLSDAPLAIVDKRRQGHNMSEVMHLIGDVKGKVAIMVDDMIDTAGTITSAAALLKQEGAEAVYACSTHAVFRFGSWFIVTSMIHVIVLIHWLVAKEPCYGMIRQIGFMFDQYKNDRVEQ

SEQ ID NO: 44725 - protein, 528 aa, Oryza sativa
MAKGDDALARKRNKVRRKRMRSSENAVSARVAGIIASKRRRKSGKRRACEGMCFSLPTPEDPFNDRHGKKRKGDDEPTGDAPAAAAAGRDESKKKKKKKKKKDSSAKKQPAREAAAAAAANAKSREKDGAEYDRPSKFLVVCLNAIRDAAASEDGGGGGIHDTGSWGVELWNCCSAAPPTHVLDTSGECATREKTAWLVSTACDIVARKEKLAVVVSCPFLLYLVPSQEKAVQVRSICKPLKSLGIHSVSLHPGASIEHQISGLKSCEPEFLISTPERLLELIALKAIDISGVSMLVIDGLKCFTDLNVSDKLCSIRDAILSNPQITIFSDPSDRRVAALATKLVGGKKITRLCTNDSVTSRGAFITQKIHICPSKDQKAPKVKEILEQILNDHARKTAKVLLVTASDHEAQHLSSSLKLQNCTVTNDSHGNSFTICSSVGLINVLVKDWENITTANFEDFDTVLVADLPPSVDEYIEILAGASCHVLVGEVHCIFSSADALLAKPLSEVLTSCGQVVPEFLRKLASS

SEQ ID NO: 44726 - protein, 395 aa, Oryza sativa
MAPPAPAALLLPSNHSYRPLLPRPILHHATGFACASASPSPPPRLRLRLRHAAPLRAAALPAIAIAPGDHWGNWAFLLSAAAFGTWSEESTSWGAALSGSLVSTTGDLLKAFLIGSVATTIGTTIAFLLVPMKSLGQDSWKIAAALMGSYIGGAVNYVAISEALGVSPSVLAAGVAADNIISALYFMTLFSLAAKIPAEPKTAQEGSNGGESEGGRRMSVLHGGAAVALSFVICKAGSAISSQLGIQGGTLPCVTALVVALATAFPRLLGKLAPSGETIALILMQVFFTVVGANGNLVDAVTKAPSVFAFALVQVTIHLGIVLAAGKLMGFERKPLLIASNANVGGPTTAAAMATAKGWSSLIVPGILVGMFGISIATFVGIGFGMFVLRRICGA

SEQ ID NO: 44727 - protein, 321 aa, Oryza sativa; identical to SEQ ID NO: 28790

SEQ ID NO: 44728 - protein, 94 aa, Oryza sativa
MLLTVLSAMTQGSTGSASLCTSTMSSVVSPLLARSTVVCAARVTLTTRPGRPAGLPGSATRLSLFAVIVKPMCFDVTLLWNPTLADFDNICLHF

SEQ ID NO: 44729 - protein, 98 aa, Oryza sativa; identical to SEQ ID NO: 34490

SEQ ID NO: 44730 - protein, 892 aa, Oryza sativa
MAACGAAAAEYSALLSLSCGPITRRRFAVSCRARPPGNLSAQQKKKRGKNIAPKQRSSNAKLLLTTEENGQLPSTSLRTSMERPQKSTSSEDDTNGAISQIDEKIAAIGNEQQERSKDKHFESDFQLEDFGEMIQNMEKNILLLNQARLQAIEDVDKILTEKEALQKKVDTLEMNLSKALATKGNINTDIPGDHLEKFTKEILIESALSGGNPAHLCESPLFMELTVLKEENMLLKADAQFLKAKIVEFAETEEFLFKLEKERSLLDATVRELEARFLVAQTDIWKVVPLQYDVWMEKVENLQHMLGCLKNHVEKYAALLDQHDDLHDKIDELEASLKEGKTSEFSPYVVELLQQKLKAAKSHHQAGHQETNTHIQVYQQLTEEFQDNLGKLIEESGRLEHSANSMPSEFWSHILLMIDGWFLERKIPNTDARMLREMAWKRDDRICEAYFACKGAKESDVMETFLKLSLSGNSQCSSGLHIVHIAAEMAPVAKVGGLADVVAGLGKALQTKGHLVEIVLPKYDCMQLDQITNLKVLDVVIQSYFDGNLFSNNVWTGTVEGLPVYFIEPQHPSKFFWRAQYYGEHDDFKRYSYFSRAALELLYQSGKKIDIIHCHDWQTAFVAPLYWDIYATRGFSSARICFTCHNFEYQGTAPAPDLSYCGLDVEQLDRPARMQDNAHGRINVAKGGIVYSNIVTTVSPTYALEVRSEGGRGLQDTLKMHSRKFVGILNGIDTGTWNPSTDRFLAVQYSATDLQGKAANKAFLRKQLGLYSEDASQPLVACITRLVPQKGLHLIRHAIYKTAELGGQFVLLGSSPVPHIQREFEGVADQFQKNNNIRLILKYDEALSHCIYAASDMFIIPSMFEPCGLTQMIAMRYGSVPIVRQTGGLCDR

SEQ ID NO: 44731 - protein, 951 aa, Oryza sativa
MPSSPTPATAPISCSPSPPLHLHLTARRQTLAPPMWRRLPARRLASALLSSSAPLPHPLHRSLLLLLPAASQRLAPSQTLPRFASSSAAVAAESVSSEEVDELHHAIGEIARGDPSVSAPAPAAGQEGHRRRSGRGKHSAEAMAVPAAGQEGHRRRSGRGKHSAEAMAVHGVGYHKYAMLRRRQIQIETEAWEQAAEEYRELLADMCQQKLAPNLPYVKSLFLGWFEPLRDQIIAEQELVGERGARASHARYFNMLPADMMAVITMHKLMGLLMTGSGDGSVRVIQAACQIGEAIEHEVRIHKFLEKTKKKSNKEMDNEEEGGDSDIAKEQERLRKKVTDLMKKQKIRQVRNIVKKQDNSKPWGQDAHAKVGSRLIELMIETAYIQPPASQSADGPPDIRPAFTHEMRTVAREQQKSSRRYGVIKCDPLVRQGLDRTAKHMVIPYMPMLIPPISWTGYDKGAHLFLPSYVMRTHGARQQRDAVRRAPREQMQSVFEALNTLGSTKWRVNKRVLSIVDRIWSSGGRLADLVDRTDVALPEKPDTEDEDKLKKWRWTLRAAKKENSERHSQRCDVELKLAVARKMKDEDGFYYPHNLDFRGRAYPMHPYLNHLGSDLCRGVLEFAEGRPLGKSGLRWLKIHLANLYAGGVDKLSYDGRIAFTENHLEDIFDSADRPLEGKRWWLGAEDPFQCLAVCINLTEALRSPSPETMISHIPVHQDGSCNGLQHYAALGRDKLGAIAVNLVAGEKPADVYTGIATRVVEIMKNDALKDPATDPDAARARLLLDQVDRKLVKQTVMTSVYGVTYVGAREQIKRRLKERDMICDDSELFSASCYAAKVTLTALGEMFQAARSIMNWLGDCAKVIACENEPVRWTTPLGLPVVQPYRKLGRHLIKTSLQVLTLQRETDKVMVKRQRTAFPPNFVHSLDGSHMMMTAVACKRQGLNFAVVGEL

SEQ ID NO: 44732 - protein, 70 aa, Oryza sativa
MVLNIGGSVTLLWPQLQVGNDVDDVRSKPANAKPRPCRYQPWHTRLTYSRIMFPAMQTENTRRNRLRQLR

SEQ ID NO: 44733 - protein, 432 aa, Oryza sativa
MIQHWLNIPTEDILVVLPQTGGSNKAGYRLVYSNTKGDFNLDGVFNVISYDVVPKIKDMLLDLDFKIVIADESHFLKNAQAKRTMHSLPVLQKAKYVVLLSGTPALSRPIELFTQLQALYPTVYKNVNEYGNRYCKGGFFGLYQGASNHEELHNLMKATVMIRRLKKDVLSQLPVKRRQQAFLDLSEKEMRHIRALFHELETVKIKIQSCDSQETMDSLKFAQKNLINKIYNDSAEAKIPAVLDYLGTIIEAECKFLIFAHHQSMLEAIHQHLLKKKVKCIRIDGQTPVPVRQTLVTDFQNKDDIKAAVLSIKAGGVGLTLTAASTVIFAELSWTPGDLIQAEDRAHRIGQVSSVNIYYLLANDTVDDIIWDVVQGKLENLGQMLDGQEKTLDVSQSDTRPSPSKQKTLDAYLKRCSNSTEADQPKLKNPRF

SEQ ID NO: 44734 - protein, 585 aa, Oryza sativa
MEQYEVLEQIGKGSFGSALLVRHKVEKKRYVLKKIRLARQTDRCRRSAHQEMELIAKVRNPYIVEYKDSWVEKGCYVCIVIGYCEGGDMSEAIKKANSNYFSEERLCMWLVQLLMALDYLHVNHILHRDVKCSNIFLTKDQNIRLGDFGLAKVLTSDDLTSSVVGTPSYMCPELLADIPYGSKSDIWSLGCCLYEMTALKPAFKAFDMQTLINKISKSVLAPLPTIYSGAFRGLIKSMLRKSPDHRPSAAELLKHPHLQPFVLELQLKSSPARNLFPDTNKASCSDDENNWKAKYSKSHSFKVDRIVKVDKVAANNGHPSSTGTAKDYQELLKQPMDELLGQLTEKVVDEVIHGNHSRVTKSPAPTPRRASSTPRIRLEPSKTFHARAAETPPSKCSLERASQPTRRASTPVNMLQTPEKRQGADILTRLKSPDVSVNSPRIDRIAEFPIPSFDDEQLHPTTKLKLYPPSITDQSITKDKCTFQVLRSDSSKNHTGDSSDPSILGTDSNPLITSSSDWMKQRRFDTTSYRQRAEALEGLLEFSAQLLQQERFEELGILLKPFGPGKASPRETAIWLSKSFKGTGL

SEQ ID NO: 44735 - protein, 937 aa, Oryza sativa
MESPAARGALGDDASGASTSQAAPGAVDGGASPDSLRNTPSNIARLEDAIEHCAARRKYLARTKSPSDGEDVRWYFCKLPLADKALSASVPRTEIVGKGDYFRFSMRDSLALEASFLEREEALLAYWWREYAECSEGPKGSLVAADASDSKSLYKVEEERVGVPVKGGLYEVDLMRRHCFPVYWNGENRRVLRGHWFARKGGLDWIPLREDVSEQLELAYNCQVWHRRKFQPSGLFAARVDLQGSTPDLHALFTGEDDTWEAWLVFDTGPKLGGNTIKLRRGFSSSGSAKPTQDELRQQKEEEMDDYCSQVPVGHLVFMVHGIGQRLEKANLVDDVVDFRRVTANLAERYLTPYQRSTQRVLFIPCQWRKSLKLSGEQSVEKITLDGVKGLRVALGATVHDVLYYMSPIYCQHIIDSVSNQLNQLYTKFIKRNPGYSGKVSIYGHSLGSVLSYDILCHQESSSAPFPVDYMNMEVSSDEGHIAKSPDTVTAHESVMKEQDTSSISGHSCADNVNDVVDEGSTRTGTSCTEDTTLPTCALENSPKLTTDALPTAVDGEQIEVEKQVDNHKIACSEEGDNSSVRAKDIDSCIISRSAEGVHADVPDKDTLISSLKEEVERLKARLAQLEQHNDLVTESSAESHQGKSATHAVNLSSGKNRIGQGSTSESYTPHIRYTKLNFKVDTFYAVGSPLGVFLSLRNVRIGIGRGQDYWQNENIVEEMPCCRQMFNIFHPFDPVAYRIEPLVCEDYISKRPVIVPYHRGGKRIHVGVQEFTEDIAARSQAVARQFKSLKVKAVAALLSLSRNDTDEDVDSNNEKEKSYGYMMMERLTGSPDGRIDHVLQEKTFQHPYLSALGSHTNYWRDHDTALFILKHLYRDIPEEPPTDDPERMPIRLFYVRDPIAEETPLTFSDNSLVKEFSRKVRTYSRKSENDSSCESS

SEQ ID NO: 44736 - protein, 302 aa, Oryza sativa
MPPLNPRVVGCGERTLVLSHGYGGSQAIWDRVLPHLAETNKVVLFDWDFSGGGGDGEKAAAEEEEEYTFEGFADELVALMEEMGVSGAVYVGHSMAGMIGCIASINRPGLFTHLVLVGASPRYINSDDYEGGFDEPEIDAMLATISSDFLSWAKGFVPLIVGAAADNPSAAETLARTFFAMDPRVADALARMIFLGDNRGVLGRVAAPCTLVHASGDPAAPPCVGRYMEGRIGRAALVTVDSAGHFPQLVAPDEMLRILDAVLAEEEEAAAKGGGVAIVMEERGSLAAVGEVEVKGDIDVAT

SEQ ID NO: 44737 - protein, 101 aa, Oryza sativa; identical to SEQ ID NO: 35492

SEQ ID NO: 44738 - protein, 616 aa, Oryza sativa
MSMTEVPSKRSSESGSRRNSRSGTRSSLQKINEVPDQGNRTRKSGLRAFMGFLGMGHGSVEKNMLKPRDEDPLIDSDDERPESFEDEFRRKEMRRGIDLATTLERIEKNFVITDPRLPDNPIIFASDSFLQLTEYNREEILGRNCRFLQGPETDRATVRKIRDAIDNQAEVTVQLINYTKSGKKFWNLFHLQPMRDQKGDVQYFIGVQLDGTEHVQDDAAKEGVVLVKKTADNIDEAAKELPDANLRPEDLWANHSKVVLPNPHMKDTASWRAIQKVLESGESIGLKHFRPVKPLGSGDTGSVHLVELLNTGEYFAMKAMDKSIMLNRNKVHRATAERQILDLLDHPFLPTLYASFQTKTHICLITDYCPGGELFVLLDNQPLKVLHEDAVRFYAAEVVVALEYLHCQGIIYRDLKPENILLHRDGHISLTDFDLSCLTSCRPQVFLPEDADEKKGRKNGSYPIFFAEPMRASNSFVGTEEYIAPEIITGAGHTSAVDWWALGILLYEMLYGYTPFRGKTRQRTFANILHKDIRFPASISVSLAARQLMYRLLHRDPANRLGSYEGANEIKGHPFFRGINWPLIRATAPPKLEIPLFSKDDMEKKGLVTNNRTDMF

SEQ ID NO: 44739 - protein, 78 aa, Oryza sativa
MVTEPTTVAARWGGGGGTDTMELLAACCSSLLPQVVVFVYPHVFCLVHRLCREEEHEVLITAVLGANPSRSSDLWILD

SEQ ID NO: 44740 - protein, 243 aa, Oryza sativa
MNFFRGMSAPVKEAIKLSDYERTLKKASSGKSKPVPQLGEQPNQEIEPLVTGKDMTIEEFIIDTGLTTDQLLGVEPIEKAELKYMYELGKSLVKPKLVQSLPTQMYRFHQLYVEMSATGREMIGARIRDLDFLQGDDILWINFKGIYEVYQLDALDVSIMSCWTLMEIQRARWRRVFDTGFIDPRRVNVAMLDQYPQETGNRGQSRPSPEGAALQDVHTVTVQHRIPLGAFILRPVGLHRQCI

SEQ ID NO: 44741 - protein, 722 aa, Oryza sativa
MAGPTSRRLLLLVARRAGHLCRHHHHHHHRDGLVLARSLQAAAAAAASSPPPLPASPPARSFSSAFSSVHGERPSSEYAKIRKESLESQFGRILGSSSRTLFADRGFGPFLAMYRAAIISFHVMKLTIWHLLLSDVHKRAEKFQETLIRLGPFYIKFGQALSTRPDILPNAYCQELSKLQDQIPPFPTRIAIRTIESQLGSRISDLFADISPEPVAAASLGQVYKAHLHSGELVAVKVQRPGMTPLLTLDALLFHMIGGQLKRFAKARKDLLVAVNEIVRHMFDEIDYVLEGRNAERFARLYSHDLGGNSSGDGTSIKVPKVYWNFTRKSILTLEWIDGIKLTDAERIGKANLNRKRMIDEGLYCSLRQLLEEGFFHADPHPGNLVATEGGSLAYFDFGMMGDIPRHYRVGLIQMLVHYVNRDSLGLANDFHSLGFVPEGTDLHGVADALRVSFGDGRRQSNDFQGVMSHLYDVMYEFNFSLPPDYALVIRALGSLEGTAKALDPDFKVIESAYPFVIGRLLEDPSPDMRKILRQLLICDDGSIRWNRLERLIAAISEQSESSNKSEDRSGENAANKPGWRSFDMHSVVAATEDLFHFILSRKGWRVRVFLVQDIVKASDAFLQEATFPGIFDEEGTTGELHPERSKMIRRVVHGVQSFRQAISLAPDAWTAMLFRTLLKPESQKFILDVFLALAMHSCYKIPETSWICMSRFLNYLDRQGR

SEQ ID NO: 44742 - protein, 721 aa, Oryza sativa
MARMARTPVHPRSSSIVAAFTYLLLVLFRDAITTAAASPKAPASTNGCIAAERDALLSFKAGITRDPKKRLSSWLGENCCQWSGVRCSNRTGHVIILNLSNTYLYYDDPHYYKCAHVDFPLYGYISSSLVSLRQLKRLDLSGNVLGESMPEFLGSFQSLTHLNLARMGFYGRVPHQLGNLSNLQFLDITSEIYDHPPMHTADISWLARLPSLKYLDMSYVNLSSVVDWVRPVNMLSRLEVLRLTGCWIMSSSSTGLTNLTSLETLDLSENTLFGTVIPNWVWSMKTVKMLNLASCQLSGSFPDGLGNLTLLEGLNLGGDSYHGSNSFEGTLPSTLNNTCNLRVLYLNENLIGVEIKDLMDKLPSCTWNKLEELDLSYNDITGNLDWLGSQTSLTSLYLSWNKFSGHLPLLIREMANLTTLILHNNNISGVISNQHLSGLESLERIIMSYNPLKVVLDESWSPPFGLFDVYFASCQLGPEFPVWIKSLNNCYSIDVSSSGIKDELPNWFWNLVSDVANVNISHNQIRGKLPDSFQGMSTEKLILASNQLTGRLPSLQENLYYLDISRNLLSGPLPFHFGGANLGKLILFSNHINGSIPQSLCKMHNLGALDLADNFLVGELPHCLPTELKPSTGGSFIHSTSLNIHILLLSKNQLSGEFPMLLQSCQSITILDLAWNKYSGKLPEWIGEKLPSIVILLSGLISSLVISQVVLPNLIICGIWI

SEQ ID NO: 44743 - protein, 107 aa, Oryza sativa
MNTRPVVLVFLLLVLVITSQFEWKQQIGDAAADPADARRRHQGLAKEDAVKEKIIFSQEKNIQQLNELIESLQRQLLHCRGSNNTVHTTTVSHTEVSEVDGQESIDD

SEQ ID NO: 44744 - protein, 723 aa, Oryza sativa
MASACSGGMAIEYYAAGDFSNAKQLFDGVAGLYRQEGWATLLWENLGYLRECARKLKSLKDFISYSLEMAALPLFSGSGQGNSENKRKNGPAGSPTISSRELIQQEVINILEGKHASENTDDEFDLHLMEESTHLDIDQISPLRIVFLASVAFHDQSVKPDSPMLVSVSLQSHLPCPVMIDKLEVQFNQSDCNFVIVSAQEDCSASNSHVHDGAVQTPLTLFTDKWMRLTHEVKPGQSGKLECLAVKATISKRLVVCCQAESPVSMGEFSLWKFEDQVEALPMKDNVLAFSGQKLIQVEEPDAQVDLVLDCPGPALVGELFTVPVTILSKGHAVHSGELKINLVDAKGGGLLMSPREAEESESHHVELLGVSDVTTENGSKEEVDSIRKIQHSFGVVSVPTLYAGDSWSCKLEIKWHQAMSVMFYVSLGYSLDSTEEAALHRLNVHRSLQIEGKIPMIVSQQFLRPFRREPLLLSRIRSSSDDDKKSSLAFNESNMLILSARNCTEVPLRLHTMTIVSNDDGKQLCSVQQISGISNEYAVIAPSEEYKGIFSVNPHTISPSFFLGEICLSWSRDSSIGESQDSRVIMKERLPEVHIEEPPLVVTMECPPYAILGIPFTFHVKIYNSTSLLQEIKYSLVDSQNFVFSGAHNHAASILPKTEHIVSHKLVPLGSGSQQLPRITITSVRYSAALTPSASAATVFVYPSEPKFNLEKGYSSTDPCVS

SEQ ID NO: 44745 - protein, 73 aa, Oryza sativa
MQFLDTAHCGGFCQLSRDMARVCTLHANCCTGLANKVHDLAAVLRDWRNYTAAPPAARRRGGFGWTTPGKCIR

SEQ ID NO: 44746 - protein, 316 aa, Oryza sativa
MAPKRPTPPPPPPPVASSEETASGSDSDESEEEEEESPLAQPAPVVSNKGAESDSSGEEESEEEEEEDLVRSSATKSRDPPQENREEDDSSDEEEDESSESEKAEAPPPPPPNPAPKQGAEGNGPKVSSPKRQAFHRIWSTEDEVRILEALAAHRREHGSLPQTDALIATLAGSLDNTGYGRKELQGKVSTLKRRYESTAKKKGDLPSKGHDRRLYDLSKSVWGSEAAAAAVNGTTTAPREFGEMCELYPHLAEEVKLLEAAHPGLFKRDFGKLDDDKAHALDMKIKKQRIAEISVVVRRGDLTKEVTKVLAELVE

SEQ ID NO: 44747 - protein, 475 aa, Oryza sativa
MGDGRVGGGTNRPAWLQQYELVGKIGEGTYGLVFLARLKQSHPHAAAGVGRRGSPIAIKKFKQSKEGDGVSPTAIREIMLLREINHENVVKLVNVHINHADMSLYLAFDYAEHDLYEIIRHHREKLNLPINPYTVKSLLWQLLNGLNYLHSNWIIHRDLKPSNILVMGEGEEHGIIKIADFGLARIYQAPLKPLSDNGVVVTIWYRAPELLLGAKHYTSAVDMWAVGCIFAELLTLKPLFQGVEAKATPNPFQLDQLDKIFKVLGHPTVEKWPTLANLPCWQNDQQHIQGHKYENTGLHNIVHLPQKSPAFDLLSKMLEYDPRKRITAAQALEHEYFRMDPLPGRNALLPSQAGEKIVQYPVRPVDTTTDFEGTTSLQPTQAPSGNAAPGNQSVVPRPIPRQMQQPMVGMSRMGGTNMAAFGAAPQGGIAGMNPGNIPMQRGAGAQSHPHQLRRKADQGMGMQNPGYPTQQKRRF

SEQ ID NO: 44748 - protein, 941 aa, Oryza sativa
MLRPQLNPSSSHHHTTTTSSSSSTQLYFASSSCIASLRRPSPPSLIAGAGCRTTRRRQQGRQRVVVRCASSSAASSASEAARRGTGSSDMAPAAVVKVKAVATIKVTVEGLLNSLRPSKAIDNIRDLIGRSLFLELVSSELEAKTGKKKATVHSYAHKVDDDDHGVVTYEADFDVPTGFGPIGAVVVTNELGQEMFLEDLNLTAGDGAGNSTVLPIRCNSWVQPKSSIDEGTPGKRIFFAKAYLPGQTPAGLRSYREEDLKQKRGNGAGQREADDRVYDYDVYNDLGNPDSNGDLARPVLGGSKQFPYPRRCRTGRPPSKKDPKSETRKGNVYVPRDEEFSEVKNAQFLLKTLQSVLHAAVPAAQSALIDNLSLNLPFPSFFVIDKLFEDGVELPGVEKLGFLHSIVPRLLELLRDSPGDKILLFDTPANVQKDKFAWLRDEEFARETLAGINPYAIELVREFPLKSKLDPAVYGPAESAITADLLEEQMRRVMTVEEAISQKRLFMLDFHDLFLPYVHKIRSLKHTTMYGSRTIFFLTDDGTLRLLAIELTRPASPSQPQWRQVFTPSTDTTKSWLWRMAKAHVRAHDAGHHELITHWLRTHCAVEPYIIAANRQLSEMHPIYQLLHPHFRYTMRINALARSRLISAAGIIELSFSPQKYSMELSSVAYDKLWRFDMEALPADLVRRGMAEEDPTAEHGLRLAIEDYPFANDGLLIWDAIKTWVQAYVARFYPDADSVAGDEELQAFWTEVRTKGHGDKKDAPWWPKLDSPESLAHTLTTIVWVAAAHHAAVNFGQYDFGGYFPNRPSIARTVMPVEEPVDGAAMERFLDNPDQALRECFPSQVQATVVMAVLDVLSTHSTDEEYLGGEQTRPWNSDAAVQAAYAGFTARLKEIEGVIDGRNKDRKLKNRCGAGILPYQLMKPFSDAGVTGMGIPNSTSI

SEQ ID NO: 44749 - protein, 179 aa, Oryza sativa
MTHISARVAGTLGYLAPEYAIRGQLTKKADVYSFGVLLLEIVSGRCHTDPRLPLQDQFLLERAWALYESGDLKSLVDGTLKGVFDTEEAQRLLKIGLLCTQDTPKIRPSMSTIVKMLKGECAIGDKIMRPGLITDVMDLKIRTVEPVQFSASPPKSPSDSNSQVSMLAVAGSTVVEESP

SEQ ID NO: 44750 - protein, 120 aa, Oryza sativa; identical to SEQ ID NO: 29281

SEQ ID NO: 44751 - protein, 334 aa, Oryza sativa
MAHRPLADPEDEDHDELIATLPCKPPTPLMRRMRLYRGGWFPEKWLPAIMAFRRRFEARDGDVVVASLPKCGTTWLKALAFATAVRGTYPPPPVAGSDDEGNRRHPLLRLNPHECVPFLESVYSTMEEESKLDATPSPRLLSTHLPYSVLPASITDSSRCKIIYVCRQPKDMLISFWHFINRDKSRDVSSSYVWESVRECTYFGSPIWDHILGYWNASKVKPDNVLILKYEDMKRNPTENVEKIAEFIGQPFSNSEKEASIVDNIVELCSFEKMKALGASMAGSQKVISSEFPNDSFFRKGAIGDWVNHVTPEMAESLDKFLSEKFDGSGFTFM

SEQ ID NO: 44752 - protein, 154 aa, Oryza sativa
MALHRGGLGSQGHEVTAKLLQRLPQRRPPLPPSAMFMKETGCNPIRWDQRRWHQESRDRSGASGMASSSLLITDQRCIGETWRLEAGRPCAMRGFQADLALMADIACAGPHLLLVNFFPIYKLGPHQHLRHFSYCRHPKTAEDFLKLSPGRKKK

SEQ ID NO: 44753 - protein, 83 aa, Oryza sativa
MHYYICTISGHCAGGMKLAINVGSGSGSGSGSGTPPSTTPGSSGTPPATPSSPSKPTGGASAGLQASAAVAAAAGVLVKLALF

SEQ ID NO: 44754 - protein, 179 aa, Oryza sativa
MQSQQLSQDYRARTQANNAPRFGDTMSRIAGGENSSYFGTPSRIFDEHKQSLVKGKRDFVHVLLKRNKTFVTVTDVRGNKKTGASAGCLEDRKGRSRLSKYAAEATAEHVGRAARKMGLKSVVMKVKGTTFFNKKKKVILSFREGFRGERVREQSPVVLIHDVTQLPHNGCRLPKQRRV

SEQ ID NO: 44755 - protein, 641 aa, Oryza sativa
MTDGHLFNNILLGGRAGSNPGQFKVYSGGLAWKRQGGGKTIEIEKSDLTSVTWMKVPRAYQLGVRTKDGLFYKFIGFREQDVSSLTNFMQKNMGLSPDEKQLSVSGQNWGGIDINGNMLTFMVGSKQAFEVSLADVSQTQMQGKTDVLLEFHVDDTTGGNEKDSLMDLSFHVPTSNTQFLGDENRTAAQVLWETIMGVADVDSSEEAVVTFEGIAILTPRGRYSVELHLSFLRLQGQANDFKIQYSSIVRLFLLPKSNNPHTFVVVTLDPPIRKGQTLYPHIVIQFETEAVVERNLALTKEVLAEKYKDRLEESYKGLIHEVFTKVLRGLSGAKVTRPGSFRSCQDGYAVKSSLKAEDGLLYPLEKGFFFLPKPPTLILHEEIEFVEFERHGAGGASISSHYFDLLVKLKNDQEHLFRNIQRSEYHNLFNFINGKHLKIMNLGDGQGATGGVTAVLRDTDDDAVDPHLERIKNQAGDEESDEEDEDFVADKDDSGSPTDDSGGEDSDASESGGEKEKLSKKEASSSKPPVKRKPKGRDEEGSDKRKPKKKKDPNAPKRAMTPFMYFSMAERGNMKNNNPDLPTTEIAKKLGEMWQKMTGEEKQPYIQQSQVDKKRYEKESAVYRGAAAMDVDSGSGGNESD

SEQ ID NO: 44756 - protein, 101 aa, Oryza sativa
MHKSVAYFSTNQYIAVPNEHGKNIISAILCFYRFSCLRYLIDIHPSFAWFSFSEHFSFQYMKFMNEVTVVRLATVPWCKSISLDMEHALYGLLLIGCLDIT

SEQ ID NO: 44757 - protein, 260 aa, Oryza sativa; identical to SEQ ID NO: 29589

SEQ ID NO: 44758 - protein, 130 aa, Oryza sativa
MVLHRKKMIMARGFFPHPFQMAAQQMLCIQWLQVRHANSHHLLPMEIHKDWLKIGWEKMLPMELGSLHRQGFRAEVLLVLTTRRSSQTVTMRMSMYMEAPVHIGFFLHLLVAIVLLITANLLMALICKVV

SEQ ID NO: 44759 - protein, 667 aa, Oryza sativa
MVEVAKFAELWVPFCRKHCVEPRSPENYFAMKTQAYKGGVPGELMSDHRRVRREYEEFKVRIDSLSSTIRQRSDVYNAKHAGENATWMADGTHWPGTWFEPADNHQRGKHAGIVQVLLNHPSCKPRLGLAASAENPVDFSGVDVRLPMLVYISREKRPGYNHQKKAGAMNVMLRVSALLSNAPFVINFDGDHYVNNSQAFRAPMCFMLDGRGRGGENTAFVQFPQRFDDVDPTDRYANHNRVFFDGTMLSLNGLQGPSYLGTGTMFRRVALYGVEPPRWGAAASQIKAMDIANKFGSSTSFVGTMLDGANQERSITPLAVLDESVAGDLAALTACAYEDGTSWGRDVGWVYNIATEDVVTGFRMHRQGWRSVYASVEPAAFRGTAPINLTERLYQILRWSGGSLEMFFSHSNALLAGRRLHPLQRVAYLNMSTYPIVTVFIFFYNLFPVMWLISEQYYIQRPFGEYLLYLVAVIAMIHVIGMFEVKWAGITLLDWCRNEQFYMIGSTGVYPTAVLYMALKLVTGKGIYFRLTSKQTTASSGDKFADLYTVRWVPLLIPTIVIIVVNVAAVGVAVGKAAAWGPLTEPGWLAVLGMVFNVWILVLLYPFALGVMGQWGKRPAVLFVAMAMAVAAVAAMYVAFGAPYQAELSGGAASLGKAAASLTGPSG

SEQ ID NO: 44760 - protein, 141 aa, Oryza sativa
MGDAAGSSEPWSRGVKVEQLGAGGGRRGSSWARALDPHAGGARTLSRCSSRPPQPPPSLPVTAAWWIPPPGCASAQPGMATLRRSSTPQTAAKAGPRRQRRSIPRRGQMSSRRKPTRMGTATRRPWALLCSSSRPHRRLWL

SEQ ID NO: 44761 - protein, 146 aa, Oryza sativa
MAMSLSLARVALPPLLQQQGGAPRKLHPGALAFPAKSFFGAPLAAVAVSPASAAAASPLRRRPSSASAVVAAGKGYKMKTHKASAKRFRVTGRGKIVRRRAGKQHLLSKKNTKRRKRLSKMIQVNKSDYNNVTGALPYLKVNRNAE

SEQ ID NO: 44762 - protein, 599 aa, Oryza sativa
MSVILKDEDGQILLFCKGADSIIFDRLAKNGRMIEADTSKHLNDYGEAGLRTLALSYRVLDESEYSSWNAEFLKAKTSIGPDRELQLERVSELIERDLILVGATAVEDKLQSGVPQCIDRLAQAGLKIWVLTGDKMETAINIGYACSLLRQGMRRICLSIPTDDQVAQDANKAAKESLMSQIANGSQMVKLEKDPDAAFALVIDGKALTFALEDDMKHMFLNLAIECASVICCRVSPKQKALVTRLVKEGIGKTTLAIGDGANDVGMIQEADIGVGISGVEGMQAVMASDFSISQFRFLERLLVVHGHWCYKRIAQMICYFFYKNIAFGLTIFYFEAFAGFSGQSVYDDWFMLLFNVVLTSLPVISLGVFEQDVSSEICLQFPALYQQGPRNLFFDWYRILGWMANGLYSSLAIFFLNICIFYDQAIRSGGQTADMAAVGTTMFTCIIWAVNMQIALTMSHFTWIQHLFVWGSVGTWYLFIIVYGSALRSRDNYQILLEVLGPAPLYWAATLLVTAACNMPYLIHISYQRLCNPLDHHVIQEIKYLKKDVEDQTMWKRERSKARQRTKIGFTARVDAKIKQIRGKLHKKAPSLTIHTVS

SEQ ID NO: 44763 - protein, 177 aa, Oryza sativa
MAMEKSRVLIVGGSGYIGRRIVAASLAEGHPTFVLLRPEIGLNIDKLQILLAFKAQGARLLEASLDDHDGLVAAVRQVDVVVSAMSGVHHRSHNILLQLKLVKAIKEAGNVKTYWMDADVVTAFELSRAIDDGVLQPLPFGSLTCCSFYVRLPVPRTRRQHCATSSFCARLTPPSAE

SEQ ID NO: 44764 - protein, 211 aa, Oryza sativa
MRVGPRGGQADVLATEADGVPFNYLNGVDVDQDTGDVYFTDSSTTITRRYQENIMRNRDATARLMKYDAKTKQVTVLKDRLPYANGVAVSHDGRYLVVAHTGPAQVFRYWLKGAKAGQYELFADLPGYPDNVRRDAKGGYWVGLNREKITFNVPAAASPAKHLVGVRLNGDGVEVEELTAASRAVTLSEVVERDRKLWLGSVDLDYVGLLQ

SEQ ID NO: 44765 - protein, 520 aa, Oryza sativa
MGSRGGDADAWETASARSGVSSSSSGRATAAAAAPAPENKVFVALPAQHKSGRSTLAWALRHVAELAPAAIGGGGEVVVVAAHVHSPAQMIPMSMGGKFHASKLRPEQVSTYRKYEREQVEKNLDEYLEQCTKMKVKCEKIVIENGDIANGITELILLHGVSKLVMGAAADKQYSRKMKLPKSKTALSVTVKANPSCKIWFVCKEHLIYTRDFVAPISPNSQSPDTIRGSISNLAARGGTTNQYANNAVNGYVQRSMSEMVVPASSRVSLQLHSRSSLQESLSRLNMEGTSVDSWDSFRRGSFPSSYRASSTVTEEVLSDSSSSGIPRDGISTLAGCDFPNSALHHEQGDAGSNANLFDKLEEAFAEAEKYRKQAYDESLRRQKTEEELISYHQKARKSEDLFLNEAKQRKEVEETLAKANVEIQLLKEEMDALKHNRDDLSSKLSDVSEQKVTLEQQAVEYGSIIIDLKDTVAASQALIDSMQMEFEQLKHERDNALKHAEELHRETKHGIELRLGMEH

SEQ ID NO: 44766 - protein, 309 aa, Oryza sativa
MPQSLVALDVTYNPLLRGRLPSSSADRKMRINYIGTSIGAGSSVGSENLRLLNCVDMKGCNTTGLTNPVSFAVNCGGKQYTPPSDPSNMFNDDSANLGAADFHVDTNNNWVVSHVGTDPFSNSSGIVTTGNGTNIPELYRTARTSTGSLWYYVVGLPSGKYTVQLFFAEIVIESGSGRRLFNIDIQDRNIMTDFDISKEAGGSNRPINRNYTADVTTSVLKIHLYWNGRGTCCIPRNGTYGPLVSAIRVFPSAETQASPPPVALTSRHDEKRRGVVAGIAALSIAATVISSSAVYLWWKWVSLVKHRKA

SEQ ID NO: 44767 - protein, 220 aa, Oryza sativa
MASSPFAAAVQGGLALRPVAPRRLSSTSSDVARSGGVAAWRAPRRRRVAAVGDLRPAIDEYPEGILSGEWPENFSLLSYADLRAYLESQIVTTDQMSPTAKLGEVMSRLVQVAMADQRLADIDAFFAAQSGLPVLDEEGRCIGVISKKDKAKASNGLDSTVGEVMSSPAITLTPEKTVLEAAALMLKEKVHRIPVVNEQQQVIGIVTRTDVFKALEASKV

SEQ ID NO: 44768 - protein, 237 aa, Oryza sativa
MIKRRRPLSYLPGSQQALGTCLEVGQFGLDEEIDRLKRDKNILLAEVVKLRHKQQSTKANMRAMEERLQHAEQKQVQMMGFLARAMQNPDFFHQLIHQQDKMKGLEDTFSKKRTRSIDIVPFLNPGEVSQGDQLESTLLFDPRPFAELNDEPAKSELENLALNIQGLGKGKQDVNRTRNQPRNQASNETELTDDFWEELLNEGARDDAGIPGMERRRPRYVDALAQKLGYLSNSSQK

SEQ ID NO: 44769 - protein, 165 aa, Oryza sativa
MATPANATTFSGEVWAELRLADSSDVPHIHALDLSASPLADPEAAAFASPRGGGRVTAGFVICFPNYSTFLSKPGLYVEDIFVRAPWRRRGLGRMMLSAVAGKAAELGMGRVEWCVLDWNKNAIDFYEGMGAEVLPQWRICRLTGAALDKYKGNQEEGGGSKAAE

SEQ ID NO: 44770 - protein, 170 aa, Oryza sativa
MAKRLPADGLAAIRAALRPSARGLRSRPSQGGKAGKPSAAPLDTPRNAAGAGASAGRAEVRDLAAACGLQEDDRVPLSEVVLDCTRRWFQDTLKEARAGDAAMQVLVGQMYRSGYGVNKNEHKAQIWTEKASRYRSTVWKVSNKRPGYNASDSDSDDSKETGKQSHVTGK

SEQ ID NO: 44771 - protein, 697 aa, Oryza sativa
MRGWKLARVGKRVVRRDGMVPMVAAMLRNGSARVRLKALQALREFAREDDEYRDSVSEGDTIRRIVKFIDFEDCQERELAVSLLCELSKSEMVCEKISELNGAILILGKVACSKSQSPALAEEAEMTLENLEKCEKNVLQMAENGRLEPLLNLLIEGSPEKQLRIASSLEKIVLSNDLKNLVAQRVGLLFAGVVENGTLPAKEVAFKVLDHISTNTESAKVLIEDGILLPLFRVLSVDGVKFVPPRLQETAAAVLSNLVACGIDFGTVPLDGNRTIVSEDIVHSLLHLISNTSPPIQCKLLEIFVMLSSSTTTVLSIISAIRSSGAITNLVQFVESDHQESRAASIKLLCKISFDMDHEIAQVLRSSPTLLGCLVRIVSENDANADEQDAALQILANLPKRDRRLTMELMEQGAFKYIARKVLNICRRGTANNIVDNTMLEGLVKVLARITYILREEPRCVALAREYNLASLFTSLLRLNGLDGVQLLSAKALVNLSVESRYMTGTPNFDEHEQKSGLTWFGKKPPGIQLCRVHSGICSIRDNFCILEGKAVERLVVCLSHQNKKVVEASLAALCTLLGDGVEVTEGVSVLYMANAVEPIFEILKGNPTGTLQQRVTWAVERILRAENIAKAASSDRGLSSALVHAFQNGDSRTRRIAEASLKHINKLPTFSQIIDKHPSRRGSSIGSMERYFRSDR

SEQ ID NO: 44772 - protein, 186 aa, Oryza sativa; identical to SEQ ID NO: 33811

SEQ ID NO: 44773 - protein, 469 aa, Oryza sativa
MASSSENVEAPRDEQRDPPPSPPNPSEEAGAGEEMEAEGEGEEEVKTLERAEELFERGSKAIEEGDFVDAVDCLSRALEIRVAHHGELAPECVSTYFKYGCALLYKAQDEADPLGNVPKSSSNKESMKSTTNKDDSGSSKTPGSNTEDAPSTDKADAEEGQNSTGKGQEEENGDSDKDDDEMVGDEDDSDLDQAWKMLDIARAIVEKSPDDTLEKAKIFSALAEVSMEREDIDNSLGDYFKALAILEKLFEPDHRRTIDLNFRICLVYELVSKISDAIPYCAKAISLCKSRIQSLKNDKDALLAGKDDNASAADGGSEKSAPEGEIEQLSGILSELEKKLEDLEQAMSTPSSVMDEIMKRIASKAGGEQNATDTMPAAASFNSSSQMAGSSNGFDSSTLSTAATTGSTGSTVTDLGVVGRGIKRANIKPISAEPPPKRAAADSLSVKGDSSNNSDVHTPAQEGDDSVSK

SEQ ID NO: 44774 - protein, 172 aa, Oryza sativa
MTPTVATTTPAAAAATTAAAAEVKPAKRSVGLGLPALPPLLPGLASHGQPRVASFCKRLARNVVAMAAGEAPAAPLAANAEITEFINALKQEWDRIEDKYAVTTLAVAASLGMWSAGGVVSAIDRLPIVPGLMEAVGIGYSGWFAYRNLLFKPDREAFFAKVREVYEDIISG

SEQ ID NO: 44775 - protein, 107 aa, Oryza sativa
MAVAAATRIAVVVVVLALAVLAPAARGLRRDDFPPGFLFGAATSAYQIEGAYLDDNKGLNNWDVFTHTQAGRISDGRNGDVADDHYHRYTVQEKFYKTAHKCPSDAC

SEQ ID NO: 44776 - protein, 189 aa, Oryza sativa; identical to SEQ ID NO: 28929

SEQ ID NO: 44777 - protein, 252 aa, Oryza sativa
MSLATAAAGAQPFVRSSSSAAAASSSRPLLAVAAARHRRPHGSLAAAAAAARRRRRRPLLQVRAARTESTGVSVGFRAPQFELPEPLTGKLWTLDDFEGNPALLVMFVCNHCPFVKHLKKDIAKLTSFYMEKGLAAVAISSNSIVTHPQDGPDYIAEEAKLYKYSFPYLYDESQEVAKAFRAVCTPEFYLFKKDGRRPFELFYHGQFDDSRPSNNVPVTGRDLSRAIDCALSGQELPFVPKPSVGCSIKWHP

SEQ ID NO: 44778 - protein, 79 aa, Oryza sativa
MQQFNSGGGRTLWSRSGGVQATGGVEEAVTTASGCGGAAAGDGDSPRQRRADDDGLLRARQAIPRPDPAATPVPRGSVG

SEQ ID NO: 44779 - protein, 281 aa, Oryza sativa
MAASTAAAVAPDWWNDVNNSPMWQDRSFHALATLYGAVSFVALVQLIRIECRVPEYGWTTQKVFHFMNFIVNGVRSIVFVLRRDVQLVQPEVFQHVLIDFPGLAFFTTYALLVLFWAEIYYQARAMSTDGLRPAFYTINGVVYAIQIILWMALWWKPVRAMVILSKMFFAATSLFAALGFLLYGGRLFLMLQRFPVESKGRRKKLNEVGYVTTICFSGFLIRCVMMCLNAFDKEADLDVLNHPILNFFYYLLVEIVPSALVLFILRKLPPKRGITQYHPIH

SEQ ID NO: 44780 - protein, 326 aa, Oryza sativa; identical to SEQ ID NO: 34307

SEQ ID NO: 44781 - protein, 60 aa, Oryza sativa
MTCPARLVAGEVDQSDGMLSDDVVAQGYALLCASYPRSDCTIRVIPEDELLKVQLATADD

SEQ ID NO: 44782 - protein, 58 aa, Oryza sativa
MMNQSLFLVGEIGGNDYNHPLMGGVSIRKIRSFTPSIIAKISSTITVSNMPMDIHTYI

SEQ ID NO: 44783 - protein, 198 aa, Oryza sativa
MITGAAQMDGAILVVSGADGPMPQTKEHILLAKQVGVPKIVVFLNKKDQVDDEELLQLVELEVRELLSSYEYDGDEVPIVAGSALKALENLMANPASITPHTKFDAVVYVLKKDEGGRHSPFFPGYRPQFYMRTTDVTGNVTKIMNDKDEEAKMCMPGDRVKMVVELIQPVACEQGMRFAIREGGKTVGAGVINTILK

SEQ ID NO: 44784 - protein, 321 aa, Oryza sativa
MMGRDDIPVGLGNTTALGIPTLGCNNSYAIPHGSGGFIDSDTLYGLARSLPRSPRRYAPESLDHPEDRQPLALEVWQSVRKQLDPGEKITVLTNGPLTNMANISLSDRDASSVIERVYVVGGLIKDGGDENGNLFTVPSNKHAEFNIFLDPLAAKTVLESDLKIALIPLTAQRKAASFRAVLAALEDIQHTHESKFVHELLSLLQELQIKQKLYHHLDIFLGEILGAVYMVEGSGLKPSVELKPVSVIANTNKSTDGQIVISKNSAKLVRVLSDFDGEIYSKQLANSLANKRQSAVIGSFEEQKAIWSRPVNSSGNIKKQK

SEQ ID NO: 44785 - protein, 157 aa, Oryza sativa
MSPRKMPKESPGSTGGDRIGDLPDEVLHHVLSFLPAQEAVRTCLLARRWLHLWKSATGLRIGEDCDYLGSVKKQKEFLDRLLLLRDGAPLDTCVLMFDYYGDMDIEDTARVNLWFRHALIHKARFLWLDVGYYHSFVIDEMPLVSQHLTRLQLRNIR

SEQ ID NO: 44786 - protein, 138 aa, Oryza sativa
MAGGKAVYSFQEVSKHNDRKDCWLIIAGKVYDVSPFMEEHPGGDEVLLACTGKDATADFNDIGHTATAKELMPQYCIGEVDASTVPAKPAYRVVSEDASAKPDAASQGAWLTALQLAVPVVLLGLAYALQDFAKTKTA

SEQ ID NO: 44787 - protein, 293 aa, Oryza sativa
MQIRESRPKVTLVARMAASVANYDYIVDWEFQMDGLVRIKVGLSGILMVKGTQYSHMNQVHQNDNMYGTLLSENVIGVIHDHFVTFRLDMDIDGADNSFVKVAMARQNTGAGESPRKSYLKATRHVARTEKDAQVRLKLYEPSEFHIVNPMKKTRVGNPVGYKVVPAGTAASLLDPEDPPQKRGAFTNNQIWVTPYNKTEEWAGGLFVYQSKGEDTLATWSERDRPIENKDLVLWYTLGFHHVRCQEDFPIMPTVSSSFDLKPVNFFESNPILGQRPTQENDLPVCAAAATTS

SEQ ID NO: 44788 - protein, 106 aa, Oryza sativa; identical to SEQ ID NO: 32964

SEQ ID NO: 44789 - protein, 359 aa, Oryza sativa
METAINIAYACSLVNNDMKQFIISSETDVIREAEDRGDPVEIARVIKESVKQSLKSYHEEARGSLISTPGQKLALIIDGRCLMYALDPTLRVDLLGLSLICHSVVCCRVSPLQKAQVASLVKKGAHKITLSIGDGANDVSMIQAAHVGIGISGQEGMQAVMASDFAIAQFRYLTDLLLVHGRWSYLRLCKVITYFFYKNLTFTLTQFWFTFQTGFSGQRFYDDWFQSLYNVIFTALPVIMVGLFDKDVSASLSKKYPKLYQEGIRNTFFKWRVIAVWAFFAFYQSIVFYYFTAAASRYGHGSSGKILGLWDVSTMAFTCVVVTVNLRLLMSCNSITRWHYISVAGSITACLCSSSSTLQ

SEQ ID NO: 44790 - protein, 179 aa, Oryza sativa
MVVLHVRWAAASSSSSPPPPSSPEEEEMEFLHECAASTPVEDVAAALAGVAALQARLLSLCRSLRERGAAAAAAAGEVERAVAEAESYASKEQVRYNRFLSPRALREHIKNIEKTAVTALQESPEALCLQQKSSGDKLENVQLWWAGKELAMGKKLCDYIGVNDKTKIIIRLKHVPQSS

SEQ ID NO: 44791 - protein, 482 aa, Oryza sativa
MATFFTARRRKAELVAPARPTPHEHKPLSDIDSQRGLELYAAGVEFFRRRHHAAAVFSGGDDDNSGDPVGIIRAALAEALVSFYPLAGRIRELPAAGGGGGGGGKLVVECTAEGVVFVEADADVRLQELGHGQPLGPPYPCVEELLCSNDLVGEPDVVVGKPLIFMQVTRFRNNEGFCIGYHYCHSITDAFGMAQLLHTVCRLAGGDDDGESLNDPPVWERDLLAVAPRRSSPRIRHVVEHPAYDPLPVSSAAAKDVVWTTPREQMVTRYFHLGPTEMAALRAHVLSSATVFELVTTVLWRCRAAALGYAAAQRVRVLVMSSARWSWKRNPPLPRGFYGNLLVPQVAEATAGELCGRPLAHAVELVRGRKFAVTDEYMRSMLDMLARRGRPFFNLDWTFVVADAGGLGRSLGVVGRWERAGGGLTPVGQATAASMYSYYERCKIGAGEEAAVVSMCLPAPAMERFVREITGCSNTRSAKSAM

SEQ ID NO: 44792 - protein, 845 aa, Oryza sativa
MEMESKYAALRRAAEEAAAVDAHAHNLVADGSAFPFLRCFSEADAADALALAPHTLSFKRSLRDIAALYNCEASLEKVEEFRRAEGLSSISSKCFKAANLSAILIDDGIDFDKMLELEAHKAFAPTVGRILRIEKLAETIINDESFSASSWTLDSFTEIFVTKLKSVANKIVGLKSIAAYRSGLEIDPNISKTDAEDGLRKELSGQRPLRITNKNLIDYLFTCSLEIAVSYHLPMQIHTGFGDKDLDLRKCNPLHLRAVLEDTRFSKCQIVLLHASYPFSKEASYLASVYSQVYLDFGLAIPKLSVQGMTSSIKELLELAPIKKVMFSTDGYAFPETYYLGARRARDVVYRVLSAACEDGDLSIQEAIEAVEDIFRRNALYLYKLNVANGSVGQITAIADNGIPLSEQDVLFVRVVWIDTSGQHRCRVVPAGRFYEIARKKGIGLTFASMGMTSFTDGPADGTNLTGVGEIRLMPDMSTLLRLPWSRREEMVMAEMHIRPGEAWEYCPRNTLRKVTKVLLDEFNVTMMAGFENEFFLRKKVVSGEKELWVPFDNTPYCSTTAFDGASSVLQEVYTSLKAAEIVVEQLHAESGKGQFEIALKYVLCTLAADKLIYAREIIKSVARKHGLLATFLPKPDLNDIGSGSHVHLSLWEFDQNVFMGSSEYNYYGMSRIGESFLAGVYLHLPSILAFTAPHPNSYNRIQPNTWSGAYQCWGKENREAPLRTACPPGIPLDLVSNFEIKSFDACANPHLGLAAIVAAGIDGLRRSLTLPEPTESNPAGYASNSKLKRMPKDLMESVEALAADKIMHELIGDKLVTAVIAVRKAEIDHYEKNPAAFADLIHRY

SEQ ID NO: 44793 - protein, 69 aa, Oryza sativa
MRLWVNANSCCFECKCNLLIKTNIYIIWNWRCNDIILLNNKQQAFPQSYSLPQCSHTILDMILNSCRFS

SEQ ID NO: 44794 - protein, 758 aa, Oryza sativa
MILGHPSVVFNERGEREKLLVESAENFVKEFELLIKTILDGSSGACILKQPILDDLSPGSSNYQESSAVVADRKKFRSQLASFDKAWCAYLYHFVVWKAKDAKSLEEDLVRAACKLELSMMQTCKFTAEGQPENLNDNLKAIQKEVMVDQTLLREKVRHLGGEAGIERMEVALSEARTKFFEAKGNRSPLATTIKNVAATCSSGESPISDMKENSNINDKRPSQAVQSMFRVPSSPSESNTAGITMSNPMTVSSTLSEKRPTENEQMVNEILHGFLADSSSNIGTVEGGFKEKVRETMEKAFWDVVVDSLRGDMPDYSYLVQLVKEVRDTLYEMVPKGWKEEIINNIDLEILLQVLESGTQDMQYLGQILQYSLGMLRKLSSPAKEDEMKRSHDKLLGELTEHSECNNSGSNSFVIAVIKGLRFTMEELKALKTEVSRARIQLLEPIIKGSGGVEYLQKAFADRYGFPSNASVALRSTAQWISTSKDTVEVEWNEHVSSFSALPETDHAQPFVATLRSGHGVPDQRQSTIPVSDDTGLPECTGQRLDQLIRIGLLQLISGIEGVQMQSVTETFKLNWLRLRSVQSQFQQVIVIATSMLVQRQVLATDDPNITPTELESATSQLFNTLAELLDNFPDVSTAKIMEVMLRSSSSSSSGSTTGSPSDERTESRKQILARVFLKSLQTDDPVFKKVSRSVDCAFRAITLGGSGARGRKLADAALRRIGATKLTDRVVRSAEILIRAASISQQVHGPWYNHLV

SEQ ID NO: 44795 - protein, 431 aa, Oryza sativa
MMFLLWKWERGTYYTTEILRPDSLILAHPANSKFVDQHTSSEEDFPNADTLTQSVVKVEQQVSDAPPPMSIASDSADVADEREPPPSGKKDCNYGNGKWVSDNNRPLYSGFGCKQWLSESWACRLTQRTDFAYEKFRWQPEGCEMPEFEASQFLTRMQDKTIAYVGDSLGRQMFQSMMCMVTGGKERLDVEDVGAEYGFFLAPGAKRPDGWAYRFPRTNTTILYHWSSTLCDLEPLDPSDPATSYAMHLDRPPAFLKNNLHRLHVLVLNTGHHWNRGKLRANKWEMYLGGAPNTNRNTAVIWKAKNITIHTVIKWLDTQLPHHPQLKVFYRSISPRHFFNGDWNTGGRCDNTSPLAKGSGISQNHSDDADAEGAVMGTRVKLLDITALSRLRDEGHISRYSIKATQGVQDCLHWCLPGLPDTWNEILAAQL

SEQ ID NO: 44796 - protein, 76 aa, Oryza sativa
MEREICRGKVNYMWKTSLQKRDKEVGMQRGAPGTRMPPGHRICTPPSSVSAFRFCTVMMLLADLTANRSRFDCPID

SEQ ID NO: 44797 - protein, 911 aa, Oryza sativa
MSTLLSKLAELLKEQYDLQKSVKEGVTFLMAELKSIQAALEKVSKVPLDQLDEQTKIWAWDIRELSYDMEDNIDTFMLRVDGLEPAKKHNFTCLVDKCQKSLSKIKICNKIANEIKDIKSQVKEVMERRDRYKIDDVATNLSTFVDPRILTLYGNVTKLVGIDKARDDLMKRLSVGDEALKKLKMVSVVRIGGLGKTTLSKVVFDMLKLQFDCAAFVPVGQSPEIKKVLKDILVELNKQKYMSFDVTAVSERHMINELREYVDNKRYLIVIDDVWDTSKWNIIKCALIDSNCGSRVITTTRICQVASEVAEEFGGVYIMEPLSDDNSKKLFYSRIFGSTYNGSTGNQSVEATEKILKKCGGIPLSIITISSLLVDKPVGDWSAIYDSIGFRTRDQNEAVQNTRKILSFSYYHLPTYLKTCVLYLSIYPEDHLIGMDTLIWKWVAEGFIQEEQDKELFEVGKRYFIDLINKSMIQPIEEEGSVFGCRIHDMVLDLIQNITAEGNFVKIFKKLHEVCRLSSQRTNVRRIALHDNWNQLKNNDLDVALTQLRSFNAIECTISMMPSLLSFQVLRVLELQGCNVTGGLYLKHIGKLRQLRYLGMKDTRVAELPMEIGDLVHLQTLDVRYTGLKELPSTICKLSKLMRLCVAGGMSVPMGVGNLSSLQYLKLGWDSIKSNKYFAMEVGKLMELRILNICVDNEIDESMKKALLESLCGLRKLQNLVIDFDLIFWNTMSVWEGWDHWEPPRQLRDFHISSMYLPRLPAWVNPMCIPYLSDLQLYVIAMEARDLDMLARMPALRTLILRTRQRISWTVGGTGLFPNLRFCEMNIALTFLQGAMPMLTELQFELWAAEDGAAAGDVGLGQLPLLNYIGLLLMCTGATGRQVEEAEVAWRRMVNAHPNRPATVVHRIGST

SEQ ID NO: 44798 - protein, 129 aa, Oryza sativa
MKEYAEWVQKLENGVWSHESGNSGIKDMAMDVVMLSLRTAWGLDVQSFSKTFGRSLTESLCNTFRPFVESGLVIAMDMERRALQPSEFELDLQHDGENGSRVAFIRLSDPDGFLLSNELISLAFGIISP

SEQ ID NO: 44799 - protein, 159 aa, Oryza sativa
MEKLKKQRLLAEVKFLRKRYKSMSENPSQTFVYRVKNPALPPTLRQPGWSHGEEYHTVRAIGSSSKGPSAHRRLNAAPRASPVIDLNEACEPSSEEMEELHGYQEPVRVGRVMRYPMEGDFAAGPSDAKMAAFWDVRNAASSRAGKRKISWQDQLALRV

SEQ ID NO: 44800 - protein, 667 aa, Oryza sativa
MRQDVASKCDSRSRSGAAPEIMRSPRRTIGENGYRDTRHHQLKCSDGNLGELRVESIPNFHCKSLPTRSRKTNAEDSIVGKRGSMYQSSSEISMIRKLHEGRRKKIDSALDGDAFLSFEIVDSSSQPSTSGAYLFSHQNRRSEAKSSVESRRIHRASRDFLDLSFRELPDENCRLDRPRMDCTLLKNDAGDGFLEISLEEEMTKGPCRNAAPQLIGGESSKGTEANCLQNKISVCPSENNCSQRERNSTNSLPESMSAKVSISDGTRPSESVRHGIENSTKVRSSPFKKILDPIMKSKSIRSPSLMEDSNHVTMPVNRKNCVSRKSLLSDLSRSEQSQSINCQLNGERQHTTNALSPAHLQAVLKLDTKNGIPVFEFCVKGPEESISARSWKTGNDLNWIYTFHSGGKRASATGRASKDGRWCSPPIVGQMQASSYLCSEVGKDGVLTNSVITEFVLYDIAHARQSFSAEEKTQCTETTQSTLSSAVEKSASGDCPQRINLMDQQNSARNNSDVSTSCPWSEEDLYPHLEIAATVIQVPFNRSKSKELKSGLSPGTVKVITPSGLHGLPNDDETSPSPLLDRWRYGGGCDCGGWDMACPIAVLGNAYDNNWANSVTKEGENPMELFVLVHFTSPIFIFCVKSLWAMHALVSKILGCLPANSPKITQG

SEQ ID NO: 44801 - protein, 219 aa, Oryza sativa
MHRAQVEGRELRVHRGGPRQQERAPPSSNPVHKKIPVLIHGGKPVSESLVIVQYVDEAWAPSPTSPSILPADPYDRAVARFWAAYVDDKMVPGMVGVLRAATEEERAAKADETLAAMAQLEKAFAEVAAKNGKPFFGGDTVGYVDLALGCNLHFLEAIRRLHGVALVDAGKTPLLAAWAERFVEVEAAKGVVPDADDAVEFARKVQARVAAAAASTAAK

SEQ ID NO: 44802 - protein, 646 aa, Oryza sativa
MAANEAGALREAKNKLEKKLDDLTLRLTLERRLRAAGEEAKSVEILKRDILIESLSAKCAAAKSAAQSEHDKNLLLQRQLDDSLREITMLRSSKIMTAEAERENSNLKNLVESLSKNNSSLEYELTSARKGSDATMKKLKDVEGKCNHLQQNLDKLQEKLTNMENENHVLRQKALNMSPLNNMPMTTKAFPQKFATPIGLPNGEQKHGYETPPPAKYLASLPQSLTRSRRTRMPVERQEENHEILLRCIKENLGFKDGKPVTACIIYSCLLHWRAFESERTAIFDHVIEAINNVLKGEEADGRLPYWLSNTSSLLCLLQKNLRSNGLFATPSRRSGGTLGIGDKIVQTLRSPSKLMGRSDNLGQVDARYPAILFKQQLTACVEKIFGQLRDNLKKEISPLLSVCIQAPKSSRAQPGKATKSPGIGAQPPSNSHWDNIVKFLDLLMDTLHENYVPSFFIRKLITQLFSFINIQLFNSLLLRRECCTFSNGEYVKAGLSLLEKWITDATDEFAGTSMHELNYIRQAVGFLVIHQKRKKKLEEIRNELCPNLSVRQIYRICSMYWDDKYNTQGISNEVVSAMREEVNKDTQNLVSNSFLLDDDLCIPFSTEDLSIAIPAIDYVDIELPESLHHYASVQLLLKHHDPQPV

SEQ ID NO: 44803 - protein, 176 aa, Oryza sativa
MRRSEWEDRWCKRHPEHRLSKGVCPYCLRDRLAHLSASSSATTTTRASSSAESSGYSSGSPPCYGALSADVSSVHVVGAAGSSFANVAAFSQPLMPSSVSRKPAGGGQEEPGREASGKGKQQEVKRKKSGKKKKIGRFLSRLVGAEKRRQSGDADGGDLFHSKTMKEKTAHKWVFF

SEQ ID NO: 44804 - protein, 60 aa, Oryza sativa
MYQEVALVAIRELCHRYSELLRDTYYCYDPSMAHNDEYNNYWNQRRRTILLLPPSQNIAI

SEQ ID NO: 44805 - protein, 61 aa, Oryza sativa
MSSELSMFMLLCMSSDLYIFRSPVYILRYSVIAYYYRWQRCLILFFYWISFSDMPLPGLVS

SEQ ID NO: 44806 - protein, 221 aa, Oryza sativa
MVGSYAAGGGRGAAVAAVAEGKLDELRRRMGKADGDLLRIVGVGGGAWGSAFCALLQDAYGRHRDKAQVRVWRRPGRAVDRATAEHLFEVINSREDVLRRLIRRCAYLKYVEARLGDRTLYADEILRDGFCLNMVDTPLCPLKVVTNLQEAVWDADIVINGLPSTETREVFGEIGRYWKERIRPPVIISLAKGIEASIDPVPRIITPTQMISNASKFFALE

SEQ ID NO: 44807 - protein, 488 aa, Oryza sativa
MSLSTVNHAAAAAAAAAGPGKSFSAAAPAAPSVRLPRTRAPAAAAVSAAAVGADRAADRVSALSQVSGVLGSQWGDEGKGKLVDVLAPRFDIVARCQGGANAGHTIYNSEGKKFALHLVPSGILHEGTLCVVGNGAVIHVPGFFNEIDGLESNGVNCNGRILVSDRAHLLFDLHQAVDGLREAELANSFIGTTKRGIGPCYSSKVTRNGLRVCDLRHMDTFGDKLDVLFKDATSRFEGFEYSKSMLREEVERYKRFAERLEPFIADTVHLLNESIQQKKKILVEGGQATMLDIDFGTYPFVTSSSPSAGGICTGLGIAPRCIGDLIGVVKAYTTRVGSGPFPTELFGEEGDLLRKSGMEFGTTTGRPRRCGWLDIVALKYCCEINGFSSLNLTKLDVLSGLPEVKLGVSYNQPDGQKLQSFPGDLDTLEQVQVKYEVLPGWQSDISSVRSYSELPLAAQRYVERIEELVGVPVHYIGVGPGRDALIYK

SEQ ID NO: 44808 - protein, 72 aa, Oryza sativa; identical to SEQ ID NO: 35496

SEQ ID NO: 44809 - protein, 179 aa, Oryza sativa
MPAHISTVVKGTPGYLDPEYFLTHKLTDKSDVYSLGVVLLELLTGMKPIQHGKNIVREVNTAYQSGEIAGVIDERISSSSSPECVARLASLAVKCCKDETDARPSMADVVRELDAIRSALPEGEELLPEYGDQSATSTSLTATGPLSSSSTTGALFISSGSGGHANSKSGIPSGTVAPR

SEQ ID NO: 44810 - protein, 577 aa, Oryza sativa
MEGGGTRTRRRAATASPGRNKVWVEPPGKTHHLRSPPPPPSPSSSKRVAVVYYLCSNRHLEHPHFIEVPLASPDGLYLRDVINRLNVLRGKGMAAMYSWSCKSRSYKNGFVWHDLSEDDLVLPAQGNEYILKGSELLDRSPPDRQQNGVGEPKVETLKHPPEESPHSRGSQEGCSSSSSPSAVTKEASPPPPTPQPQQQAQSATLLPSSSASTNREDDQCRTPRSGSSGNMSPEPAGRVAPPLSEASSPGPLEYRVCKPIGAQDASTQTDDSERDAPERNSRMAGVCTENSTSDSEIQECHPRSTQPSPKGPGVVRESPPVCSSDASPGGRVETLESLIRAEASRRSSFRALEEEHLFAPMGVKFKPANLLMQLITCGSISVKDHRSFGLIPTYRPRFTQVEFPSPMFSTPLALRHLDNIPCNARTIGMRIPESEYFSGSLVETKKQDESGKGGTPTLKRSSSCSEDRVCRVSDSNRDMESMAESGSFRCLPQTIKMISCKQSRSGTILSPNSDVRNSCSRQECSTRSSPLGSSKSASNRMTDLSLGKLSSSRVESFHEEKEKVIKIEESLLLELGL

SEQ ID NO: 44811 - protein, 294 aa, Oryza sativa
MSEELKRDFEIGEEIGRGRFGVVHRCASRSTGEAYAVKSVDRSRLSDDLDRSLAALEPKLARLAAAGNPGVVQVHAVYEDDDWTHTVMDLCTGPDLLDWVRLRCGQPVPEPDAAAVVAQIAEALALCHRRGVAHRDVEARQRPPRRHRGRAATGAPRRLRLRRVGRRRDQRRGARGDAALRRARGGRRGRVRGEGRRVERGGGHVRAPHRRRAPVRRRDGLRRVRRRPAGQPEVPAEAVLRRVAGCQGPDAADDVPRRLQEVLRRASPEAPVDRERRRSTRCAADLKNPYQISK

SEQ ID NO: 44812 - protein, 87 aa, Oryza sativa
MHIPNTSTQQPPSCSITPSNPSKDSMIFSKALSSPVRQNLQLYHVQQCGDTGCFADGIFCPGNGDSDPAASNDSSVDMHSDSPGHDS

SEQ ID NO: 44813 - protein, 173 aa, Oryza sativa
MSPSSFLHHPRLLPPSSTPSFLPPSLLPPTSPQRRPVVANGERLRPAAPSRQIWGRRQWRGRGGGWLRQRATVAAGKGRPATVAGDESGEELSFSLPPLPSSGRLRPLARYGGGGSGGEGMATGCGGGRRVRQQAPLLPPTSPQRRPAAPSCQIWGNSSGGEGAAAGCGKGQR

SEQ ID NO: 44814 - protein, 577 aa, Oryza sativa
MDSRVGVVLFFLLFVLVRDVSAVAETEVGVVRVVQEAPDRKLEGAGGQDGFKSGKVPVSTVAWSTLAMAAATGLGALPFFFLELEAQWAGLCNGLAAGVMLAASFDLVQEGQMYGSGSWVVFGILSGGFFIWLCKKFLEQYGEVSMLDIKGADASKVILVVGIMTLHSFGEGSGVGVSFAGSKGFSQGLLVTIAIAVHNIPEGLAVSMLLSSRGVSPQKAMIWSIITSLPQPIVAVPAFLCADAFQKVLPFCTGFAAGCMIWIVIAEVLPDAFKEAAPSQVASAGTLAVAFMETLGTVLQGFTDGHNSEDTAGFLVSLVFGLGPLFGGIVLVAFSLTFSMPHPLLTGVASGIAFRLAAWRPLQLLMSSKMGLFTTLFLLIGGSLIYHVATSNILQLVNRKKSSVNVITSSSGLSLSVLTLQSLLACGSVFLHAYAEGLQLGVAARKAYGLGRYMVLPVSLHGLPRGAAVASCIYGATDSWRAALAAAALTGFAGPSAAISAILAKIDYSGLDYWMVIACGALIPSFGRVFKRSLRLDMRKSICGLLIGFAFASVCLMSTRFICLHTPYCNSAPEAVT

SEQ ID NO: 44815 - protein, 403 aa, Oryza sativa; identical to SEQ ID NO: 33046

SEQ ID NO: 44816 - protein, 109 aa, Oryza sativa
MEEGAKIGREHEQQQQQHGRVNGSGRVAAVGGGSGGGGDEIEIEVAAAAGASPSRQHGGLHGDVQVSLFFFLSSSSARLPAVNFFFSPAVRTSRKQTMCSTIASANSDI

SEQ ID NO: 44817 - protein, 634 aa, Oryza sativa
MASSLLSSPKPSSFSSANPTSTPRPRAQTLSPFRAAAPRFSHGLATAAAAANPSASRRCYHRAFARPVRASMAQPRRPEYVPNRIDDPNYVRIFDTTLRDGEQSPGATMTSAEKLVVARQLARLGVDIIEAGFPASSPDDLDAVRSIAIEVGNTPVGEDGHVPVICGLSRCNKRDIDAAWEAVRHARRPRIHTFIATSEIHMQHKLRKTPEQVVTIAKEMVAYARSLGCPDVEFSPEDAGRSNREFLYHILEEVIKAGATTLNIPDTVGYTLPYEFGKLIADIKNTPGIENAIISTHCQNDLGLATANTLAGAHAGARQLEVTINGIGERAGNASLEEVVMAIKCRRELLGGLYTGINTQHITMSSKMVQEHSGLHVQPHKAIVGANAFAHESGIHQDGMLKYKGTYEIISPDDIGLTRANEFGIVLGKLSGRHAVRSKLVELGYEITDKEFEDFFKRYKEVAEKKKRVTDEDIEALLSDEIFQPKVFWSLADVQATCGTLGLSTATVKLIGPDGDEKIACAVGTGPVDAAYKAVDDIIQIPTVLREYSMTSVTEGIDAIATTRVVVTGDVSDSKHALTGHSFNRAFSGSGAALDIVVSSVRAYLSALNKMSSFVGAIKASSEVSESQRVQTTE

SEQ ID NO: 44818 - protein, 276 aa, Oryza sativa
MAAAVTAPPYAAGAPRRRLLAARPRLPPQGRQEQQRHRRAPPLRRLRLRGLRHPGLRLPRRVPRLQVNHAAPPLSLSRFFQLSLLDRCTQCSCAGLVPGEPVEEGGEGRLRRVARRARAGAGVGRHRRVHELAGGRVHGGGGVEEARDNRVLLRGRPAGGDAGARRRRRRRRLQRGGLLLRVQDGRVAGAAARRARAVRVRRRRPAVRGGDGAGAGGTREGRQGRRVRRQGARVRAPAAVAGGRRRRRGRVRADAGVAARPPSRLIILVPFQTVRS

SEQ ID NO: 44819 - protein, 206 aa, Oryza sativa
MAPTAPTAAKSASPSQPSGKSEVADLKQQLRQLAGSRAPDADDQRRDVFKRVISCMTAGIDVSAAFGEMVLCSATSDVVLKKMCYLYVGVHARNHPDLALLTINFLQRDCHDQDPTIRGLALRSLCSLRVPNLVEYLVSPLATGLKDPSAYVRMIAAVGAAKLYHISATACLDADLPAALKALMLSDPDAQVSCHSTNNVVIIMQL

SEQ ID NO: 44820 - protein, 367 aa, Oryza sativa
MLGPLRRAAVAAGAASASAASLRQFQCAYHRSNERLLPCRDQEVSYGLNWAIAGRGVVVKDKVFYNLEKSELQKGGAAYTECLSGIPLHVRGNVISGIPDVSRAQFAKLLKLVTFHLSSISSLYVQDGAVGSSVECDAKVRVISDNPSAVLLLSNILWKTPDRSISHDTCPLTIYVASSISANVRNSLGSGSQYANGFAAADIERSSLILCGKAFADSAMLKGALSALTAPVLSARGGLPFPGCTDALPALSKLSPGQAAYHFLAGYCDGKFIPAYSKDPSPLDPIALANSLFSHLKEDNTPTYLINAKSSGKYIDGKEFVRLIEVLLSNNLPDRKSEDIRVGELKGKYKSFLSSKFGKYLPKEFSF

SEQ ID NO: 44821 - protein, 149 aa, Oryza sativa
MKRTMDARWAHIVYALLVPEAFFRDPDGRDGVASRSLRRPLAISAATLLSLPGEGRRYEAHDERAVGAHRVRAAGARGVLPRPRRPRRRRLLELSRSLRCPLALSASVTATSSSPLSPPPSIPPALPISPPLLSPLVSPSPPPPLASCR

SEQ ID NO: 44822 - protein, 376 aa, Oryza sativa
MEPDGDAAFHRNEAISAVQDVDQYYGDDDDFDDLYNDVNVGDGFLHNSSSSQPPPSQQLPPPSLPPPLPQKQPPSQQLPPPPQQQQPPPQHSLPPPPPLPQAPPPQQQKVHIPGVAAPAPNHPPSQPNLPPPAAPAPLPPQQHQIQQGGGDGFHRPGGNYGGGPIVVGNGGPAVVGGDGPGGTTLFVGELHWWTTDADLEAELIKYGPVKEVRFFDEKASGKSKGYCQVDFYDPAVATACKEAMNGPPVQWSSVRCGLCLAEFRPSNGRGRRLRTSNPCLHRHRLCSPRVGEAAAVLEALRLVVIMVVAAEVDLVVVQAEVAEIGGEVWRDGERTCWEYEESDGRTSRRPRDHGKWWNGCTTTSNAASRRNDGAGF

SEQ ID NO: 44823 - protein, 482 aa, Oryza sativa
MSGGFFRGTSADQDTRFSNKQAKLLKTQKFAPELEHLVDMTKVKMDVMKPWIATRVTELLGFEDEVLINFIYGLLEEKEADGKKIQIQLTGFMEKNTVKFMKELWSLLLSAQQNASGVPQQFLDAKGAEIQQKKAEESRIAQEIQKKREKDGREQELEKQKLMDGDAGNSRLGPDRADAEEEKELDSKHSSRAKSRESLRSRSISLSPRGRRRSVSPRRRSPSPSRNSISFGRQQRSSRRSVSPRRSFSPRKRSPRSTPSMSRRRSPYSRRSPSVPRHRSPSPHRRSHIRRKSPPFVRQRSPSPHHRRSPGRAPRSPSPARHRSPRRRSSLDRHWSPSPGRRRPRSPSPGRRRPRSPSPGRRRPRSPSPGRRRPRSPSPGRRRPRSPSPGRRRPRSRSPGRRRSPSPRGSPRLRSPKRPRRSPISPRSRSANRRPSPQRRRSTSPHDRSPIHSRRSLSRDIEKGTNGIPSSNDVDVLQRNKE

SEQ ID NO: 44824 - protein, 376 aa, Oryza sativa
MVSGRSANGELDACFRSLMLSISSGRGQAEGGGAMPTLSGWKDLPIELLLRIMSIIGDDRMLVVASGVCTGWRDALGWGLTNLSLSRCQQNMNNLMISLAHKFTKLQVLTLRQNIPQLEDSAVEAVSNYCHDLRELDLSRSFRLSDRSLYALARGCPQLTKLNISGCSNFSDTALTYLTFHCKNFKCLNLCGCGKAATDRALQAIARNCGQLQSLNLGWCEDVTDKGVTSLASGCPDLRALDLCGCVLITDESVIALATGCPHLRSLGLYYCQNITDRAMYSLANSRVKSKRRRWDSVRSSSSKEEDGLANLNISQCTALTPPAVQAVCDSFPALHTCPGRHSLIISGCLSLTSVHCACALHPHRTGRTMVPSHAY

SEQ ID NO: 44825 - protein, 54 aa, Oryza sativa
MQRTKNTVASRDTALLHHRLGTFGDSQGVLLFLWQMDPMNRSQSLVNGNYFLRR

SEQ ID NO: 44826 - protein, 148 aa, Oryza sativa; identical to SEQ ID NO: 32094

SEQ ID NO: 44827 - protein, 624 aa, Oryza sativa
MAPTLQDVSYLLGLPLAGAPVGPVDGVFGWKEDITARFEQVMRLPHLGPTNTLPPYSTVGPSKAWLLQFTADLLHPDADDYSVRRSLEAYLLWLFGWVMFTSTHGHAVDFRLVHYARSIADAQPQDVPQWSWGSAVLAATYRALCEACTKTDAGAIIAGCPMLLQLWAAERFAIGRPVVDSAPYGVGRSAQWPEDGPTMGTYWCRRGRRYAHVQVRRGYPDFVFEFDRLQPSDVIWEPYTEEAVAARAPLGLSSLCTRDQAYWLTILPMVFDIFVEPHCPQRVMRQFGLRQVFPGNVQPTVLPADHSLTRRGQLAGALWAPRVQQYVDDWVLATEEVINELFPHTEENYRDYLRWYLPRTRARVTFTPDAPEPHVAAVTDAYPAHRDRDYFVAADDARDISADITAVQVRLNRGLHLTDVEQRVIFSCRSAVDVVPPAGPVQPRPRAPTVGAGPRPTAPVSHGPRLPSSAPSFGAVRPTAPVSHGPRLPSSAFAGTTGASASSAGAFATSSGAFASSSSHGASIPRPHGFAAGIFGTRASSSHAGRTGPTSQFYDDDLHGAHHHDVLGSSQLGGAPEAHTQEQPEVTPVQAGRVGRAVPPDRLTYSQGHIRAQGRRDRGKRPRQ

SEQ ID NO: 44828 - protein, 254 aa, Oryza sativa
MQVELADRAAARPSETGEAPPSSPAAAAAASAAAEDAPLLPGGGGGVRRRVVVSERFRQRSGSFRREVRRAAEETYLLTRLTLILLRYLGIGYRWIRQFLALCCYTFLLMPGFIQVVYYYFFSSQVCRSVVYGEQPRNRLDLYIPTDRTGLKPVVAFVTGGAWIIGYKGWGALLGRRLAERGILVACIDYRNFPQGTIGDMVEDASQGIAFVCNNIASYGGDPERFITYNDIKLSNFSVAITKWFLPTYALLMR

SEQ ID NO: 44829 - protein, 483 aa, Oryza sativa
MREEARTMVATRSTTSRRCLTWWWLACCCFVSWVASSSWTAAACVAVSSLPGFDGPLPFSLETGYVEVNESTGVQLFYYFVRSEKNPDLDPLLLWLTGGPGCSSISGLAHEIGPFQFAAKRYYSGGLPIIIYRPETWTKVSNIIFVDSPVGAGFSYAATEEGSKSSDTNAVKQLLIFLRKWLHDHPRFSLNPLYIGGDSYSGMIVPTLTLAIDESNGSEEKPFFNLKGYIAGNPVTDYKIDEDGRIPFLHGMGLISDELYEHAKETCGEKYSAPSNAQCAHSVQAINDDINRGHILEPLCEELQSPIHNTAARDVMSRLMLESRPAAADDDIIIFECRKASHVLLKIWANDETVRESLGVQKGTVGEWKRCNRDIDYNSDVRSTVEYHLTLMRKGYRAIIYSGDHDSRVPSISTQAWIRLLNLSIADDWRPWYVDGQVAGFTRSFASNNLTYATVKGAGHTAAEYKPKECQEMFARWISGTPL

SEQ ID NO: 44830 - protein, 213 aa, Oryza sativa
MSGTSMACPHVSGVVALLKALHPDWSPAIIKSALVTTASNEKYGVPILADGLPQKIADPFDYGGGFIDPNRAVDPGLAYDVDPNDYTLLLDCISAANSSCEFEPINMNLPSIAIPNLKEPTTVLRTVTNVGQADAVYKAVVKSPPGMKISVEPSVLQFSQSKKKQSFKVIFSMTRKFQGGYLFGSLAWYDGGTHYVRIPIAVRPIVSDNYADL

SEQ ID NO: 44831 - protein, 487 aa, Oryza sativa
MAASASASLRHHLLLRRRPRFPLGPSPTFRTSSLPRRHQRLFASAPSSSTVENGEPSSPVEPSDGASVVDVNPPRGTRDFPPEDMRLRTWLFDQFREVSRVMAFEEVDFPVLESEALFIRKAGEEITQQLYNFEDKGGRRVVLRPEITPSLARLVIKQGKSVSLPLKWFTIGQCWRYERMTRGRRREHYQWNMDIFGMPKVRAESELLQAIILLFERLGITSSDVGIRVSSRKVLQAVLNMYSIPEHLFTEVCVIVDKLGKLTREEIEKKLVTIGLSSEAVLGIIEVLSLKSLPKLEEVLGSDVEAVADLKKLFSFAEQYGYADWICFDASVVRGLAYYTGIVFEAFDRDGKLRAICGGGRYDRLLSTFGSEDIPACGFGFGDAVIVELLKEKGLLPDLSRQIDDIVFPLDEELEGPACSVASSLRRQGRSVDLVEDKRLKWVFKHAERINAGRLILVGKSEWERGMVRVKILSTREEFEVKAGELQ

SEQ ID NO: 44832 - protein, 208 aa, Oryza sativa
MLTRELAEDGYSGVEVRVTPMRTEIIIRATRTQNVLGEKGRRIRELTSVVQKRFNFPENGVELYAEKVNNRGLCAIAQAESLRYKLLGGLAVRRACYGVLRFVMESGAKGCEVIVSGKLRAQRAKSMKFKDGYMISSGYPVNLYIDSAVRHVLLRQGVLGIKVKIMLDWDPKGKQGPMTPLPDLVTIHAPKDEDEFSKPLTAEIPVAA

SEQ ID NO: 44833 - protein, 254 aa, Oryza sativa
MQAVYANGSLREPNLGFTGPIDPGALGFEIKYSHWVDEQNRNTGELRNALLQGQTTDQDLELKLLVEAGLDNYNRLFEMKEEAANSDVFYIMSGMWKTPTERFFLWIGGFRPSEVLKNLRPQLEPLTDKQVVEVGGLQQTSMQVEDALSQGMDKLKQTIADSLTAADPFDSPEAYMVHMANAVEQLRSLVQFVTQADHLRQQTLQEMLDPDDAAGGEGAPRAGGLLPALPSAELAMGSSPARFRDKLNTVIWSR

SEQ ID NO: 44834 - protein, 379 aa, Oryza sativa
MGAEAEHRMSPSPAPAPAPPTPVGRTDGDAPPMVLGLQLSALIDHVARVDWSLLNRIPGDLGGSQQVCIEELNHILAEVNAQILPCRDDLSSIRTIAGGSVANTIRGLSAGFGISTGIIGACGDDSQGVLFVSNMSFSGVDLTRLRTKKGHTAQCACLVDASGNRTMRPCLSSAVKLQANEFKKEDFKGSKWLVVRYARQNMEQILEAIRIAKQEGLSVSLDLASFEMVRDYRTQLIDLLETGNIDLCFANEDEARELLGGELTFDPEEALAFLAKYCKWAVVTLASKGCIAKHGKQVVQVAATGESNAVDATGAGDLFASGFLYGLVKGLALEECCKVGACSGGSVVRALGGEVRPENWQWMYKQMNASGLLLPDLKN

SEQ ID NO: 44835 - protein, 175 aa, Oryza sativa
MQNNLNTFAGVQSFVTLFHYDTPQALEDKYNGFLSPNIINDYKDYAEICFKEFGDRVKHWITFNEPWIFCSKAYASGTYAPGRCSPWEMGKCSVGDSGREPYTACHHQLLAHAETVRLYREKYQFTEEVVRQSQFIHDNDLHRRSAKLSFIIQNYLLLGIHFQPGPGGRVCQYRH

SEQ ID NO: 44836 - protein, 655 aa, Oryza sativa
MPPASLVSSPPLACCLQLHRLLRPAALLPSPPRLRLRLRPLRADSSPSPDAFAGWSDGDEQDEQDKSPGPFRGLLGPGLAGLFFLAGLTFAAISFRSNAANGPKAQIDTSSTNSQEAPYSTDNTCKEDGLKDAQVSLPSDSKGETSLDDEAHSSTDPLPVQVNATAEGSTEHETQHPLQNSELVPPDKYVPSEDAGQAHNLVASDGAESLVSPLSNSTEPSIAAYDSPDKLYGVGPSEGTPYVEDTLNCEITLPENQHLGETLTSDTMLGSGDASLIQEISDTAASSDAKDKDTEQNPELHRKNGISPSRMPDYTEYGHADQLLSFGSNDVSTEANKPGNGVETLASNQNEGADELENQNSLYESTTPDKSFASSGIPAPTLLSAALRVRTGQIMVPAAVDPAQASALAALQVLKVIEPDAQAGDLCTRREYARWLVVASNCLSRNTSSKVYPAMYIENVTELAFDDITPEDFDFPFIQGLAEAGLISSKLSRSDMNVPLDVDNLHNLFSPECPVSRQDLVSWKMALDKRQLPEVDKTSMYKASGYMDVDKINAAAWPALVADLDAGDQSITALAFGFTRLFQPDKPVTKGQVALALSTGDSADVVMEELARIEAEKIAEDAVNAHGELVAQVEKDLNATFERELTKEREKNRET

SEQ ID NO: 44837 - protein, 462 aa, Oryza sativa
MSFRSIVRDFRDSFGTLSKRSFEVKISGFSGRHRGKSIGPSSELDDTPVVAQQSKWAGLPPELLRDVMKRLEEDDSNWPSRKDVVACASVCTTWRDMCKDIVRNPEFCGKLTFPVSLKQPGPRDGVIQCFIKRDKSKLTYHLYLCLSSAVLDETGKFLLSAKRSRRTTHTDYIISMDSKNISRSSSGYIGKLRSNFLGTKFIIYDTQPPYNARTLCSQERTSRRFSSRKVSPKVPTGCYPIVQVNYELNVLGTRGPRRMQCAMHSIPASAVEPGGIVPGQPKELLPKLFEESFRSMATSFSKYSITDHSTDFSSSRFSEFGGGALQGQEQEQDGDDVNKERPLVLRNKAPRWHEQLQCWCLNFRGRVTVASVKNFQLIAAAPQPSSGAASEPSQAGQAAQQQTQPSQPSSSSSSSSSNHDTVILQFGKVAKDMFTMDYRYPLSAFQAFAICLTSFDTKLACE

SEQ ID NO: 44838 - protein, 582 aa, Oryza sativa
MGAVCSRKRSQLVHEDDSFQTSSRFSKTSSLKWLLLTLPRSNSDVSRKGQGKGPGRCPSLMELCVAKACEDINKYSSFSVLPRDLSQQIFNELVASNRLTETLLETFRDCALQDIDLGEYPGVNDAWMEVVASQRHSLLSVDISCSEITDSGLYLLRDCPNMQSLACNYCDMISEHGLGILSGLSNLTSLSFKSSDGITAEAMEAFANLVNLVNLDLERCLKIHGGLVHLKGLRNLESLNMRYCNNIADSDIKYLSDLTNLKELQLACCRITDLGVSYLRGLSKLTQLNLEGCPVTAACLEAISGLASLVVLNLSRCGIYGEGCENFQGLKKLKVLNLGFNNITDDCLAHLKELINLESLNLDSCKVGDEGLLHLRGLMLLKSLELSDTEVGSSGLQHLSGLRNLESINLSFTLVTDTGMKKISALNSLKSVNLDNRQITDVGLAALTSLTGLTHLDLFGARITDYGTSCFRFFKNLESLEVCGGLITDAGVKNIKDLKALKQLNLSQNVNLTDKTLELISGLTALVSLNVSNTRVSNAGLRHLKDLQNLRSLSLDSCRVTTSEVKKLQATVLPNLISVRPE

SEQ ID NO: 44839 - protein, 527 aa, Oryza sativa
MAGGQLNVLSTLDQAKTQWYHFMAIVIAGMGFFTDAYDLFCISLVTKLLGRIYYTDDSKDTPGALPPNVSAAVTGVALCGTLAGQLFFGWLGDKLGRKSVYGFTLILMVVCSVASGLSFGSSAKGVVSTLCFFRFWLGFGIGGDYPLSATIMSEYANKRTRGAFIAAVFAMQGFGILFGAIVALAVSAGFRHAYPAPSYSDNHAASLVPQADYVWRIILMFGTVPAALTYYWRMKMPETARYTALIARNAKQAAADMSKVLHTQIEESADRAKTVAVGGESWGLFSRQFLRRHGLHLLATTSTWFLLDIAFYSQNLFQKDIFSKVGWIPPAKTMNALEELYRIARAQALIALCGTIPGYWFTVAFIEIMGRFWIQIMGFAMMTAFMLGLAIPYHHWTTPGHHTGFIVMYGFTFFFANFGPNSTTFIVPAEIYPARLRSTCHGISAAAGKAGAIIGAFGFLYAAQYQHKPEPGYPRGIGIKNALFVLAGTNFLGTIMTLLVPESKGMSLEVISQEVADGDDEEAAYPK

SEQ ID NO: 44840 - protein, 269 aa, Oryza sativa
MAASASSPWPSWCSPEWPPPPPRRRSGRGAFDPSRVVQLSWRPRAFLHKGFLTDAECEHLISLAKDKLEKSMVADNESGKSVMSEVRTSSGMFLEKKQDEVVARIEERIAAWTFLPPDNGESIQILHYQNGEKYEPHYDYFHDKNNQALGGHRIATVLMYLSDVGKGGETIFPEAEGKLLQPKDDTWSDCAKNGYAVKPVKGDALLFFSLHPDATTDSDSLHGSCPVIEGQKWSATKWIHVRSFDISVKQGASTDGCEDENVLCPSGLQ

SEQ ID NO: 44841 - protein, 104 aa, Oryza sativa
MMKPIGIGTAVAMERSKLLEPCSPSMQQQQLLQLDRMELQCLKCNKQVVVPRQMATWLLRSCMGVVQHLEIYLLKLSPLGSFGSILLFSTILQHTNRLASRRCS

SEQ ID NO: 44842 - protein, 240 aa, Oryza sativa
MALAARLVSRSRQLYSAQAALANGGATQVRLYAKEADRTPVNGDDLLKGIFFEVKKKFETALGVLKKEKITIDPDDPAAVSRYAQVMKTVRQKADLLSDSERIKYTIDTFTKGIPDARTYLNTLQEIRIKSGLIDDMGAEAMMMEALEKVEKEIKKPLLRSDKKNMGLLLAEFEKINKKLGIRKEDLPKIEEELELEIAKSELTELKKECVEAMEVQLKREEFKDEEMPDVKKLDIRNFL

SEQ ID NO: 44843 - protein, 416 aa, Oryza sativa
MNSPCYPLPDMSHVNGKNRKELLAMAKVQGESKKGTSVLPGDLTPKDESPFSPPRVKVEDALGEGLAGRSPSHIAGGANKKASNVGQFKDGANVAKVEDGHVDRSIGVKKPRYSADEGPSLTELSGYNSKRHEFDPEYDNDAEQALAEMEFKETDSETDRELKLRVLRIYLSRLDERKRRKEFILERNLLFPNPLEKDLTNEDKEVYHRYKVFMRFLSKEEHEALVRSVLEERKIRRRIQELQECRSAGCRTLAEAKIHIEQKRKKEHEVNAQKAKESGQLLSNTKVVHKTNRPMKIESDGNLDQKKGGASLDSTGRDSPKTTGHAGTKHWDDWDIVGFPGAELLSTSEKNLCCQNRLLPNHYLKMQEVLMQEIFKGSVAKKEDAHVLFKVDPAKVDNVYDMVTKKLGTNEEAPTV

SEQ ID NO: 44844 - protein, 100 aa, Oryza sativa; identical to SEQ ID NO: 32200

SEQ ID NO: 44845 - protein, 473 aa, Oryza sativa
MLRQQANLRGLEVQMLTGSQRKSTSNPNMDIHFDGALSQNGSNPPSMTSMSEDGVDDEGSCTESWANALVSELSHIKKEKGAKSSVTEGSNRLELMDDFLEMEKLACLSSEANGHVSTVEKMKIDDTEASLSGITERDGVKDSQSVLALPGTPSNKLQLSDSSPLLKLQSRISSLLDSESPQNNAGNILDSIRNILKDIEDEADSSNDSKTHHGDMVEVADNGSLMKHSSSGSKHAMDQELVNAILKIQDFVKSLDQEVSKFQGQSSDCDGLCDKIQQFSALVEKALSNENVLNDIVMTLSLILSGTSEIKFMMLKENTKEADDNNLDYVDKVTLLENKVQLEPLKDSISGPCLPRSSSDPEIEGPTDSGCDVKTAVQICSSEEFEQLKSEKLNLEAELSKCNEVIEETKFRFKELEKSLEELTSKLVASEKSNSLAETQLKCMAESYKSLESRKAELENEISAAVQNRSFDS

SEQ ID NO: 44846 - protein, 300 aa, Oryza sativa
MAKGGGALLPMSAEAGKGNGGGGGGGDDAALFKGSAMTRRGAVAALSYMACSVLLVMFNKAALSSYNFPCANVITLLQMVCSTGLLYVLRRLKIISFTNSEPSVPSDALFFVPFRILLRTTPLSLAYLLYMLASMESVRGVNVPMYTTLRRTTVVFTMTMEYFLAKQKHTPPIIGSVALIVFGALIAGARDLSFDARGYAIVFVANITTAVYLATINRIGKSSGLNSFGLMWCNGLVCGPSVLFLTYIQGDLKKAIEFPYLYCPWVSGGAAILMHASFSAKLHYLLEYNPEFCTHTIDVW

SEQ ID NO: 44847 - protein, 418 aa, Oryza sativa
MMDTEGSEIHMGDLGGAAAAKAEDGEIWTFSVRSFEAPPPERTIHVNYEGFAEDVRVGDELLVDGGMARFEVVEKLGPDVKCRCTDPGLLLPRANLTFWRDGSIVRERNAMLPTISSKDWLDIDFGISEGVDFIAVSFVKSAEVINHLKSYIAARSRGSDIAVIAKIESIDSLKNLEEIIRASDGAMVARGDMGAQIPLEQVPSVQQKIVKLCRQLNKPVIVASQLLESMIEYPTPTRAEVADVSEAVRQRADALMLSGESAMGRYPEKALSVLRSVSLRIEKWWREEKRHEELELKDVSSSFSDKISEEICISAAKMANKLEVDAVFVYTNTGHMASLLSRCRPDCPIFAFTTSTSVRRRLNLQWGLIPFRLSFSDDMESNLNRTFSLLKARGMIQSGDLVIALSDMLQSIQVMNVP

SEQ ID NO: 44848 - protein, 811 aa, Oryza sativa
MAQQQAGARGSKLEIVAARGGSGGSSSAGDAEAPPLDVLRQDSLYRDATRPAHGHHGQESWMRTLRLGFQCVGILHADLGTSPLYVYQNTFKYGIKHEDDIIGVLSLIIYSFVLFTMVKIVFIALHANDDGDGGTFALYSLISRYAKVCLIPNQQAEDELVTRYNDHGKPPATLRRAQWMKSQLEKKPAKIAVFFLTIFATALAISDCVLNPSVSVLSAVNGLKLRAPHLTTDEVVWITVGILVVFFAVQRFGTDKIGYTFAPVVVVWLLLISGIGIYDLVKYDVGVLRAFNPKYIIDYFRRNKKDGWVQLGEVLLTFTGTEALFADLGYFSIKSIQLSSTFVLLPSVLCTYIGQAAYLRKHMDQQHIQNAFFNSIPRPLFWPMFVLAIMTSVIGCQAMVSCAFVTMSHLQTLNCFPRIKILHTSRRYSGQLYSPEVNFFLCLLSCVITLSFRTTGFIVKAHEICVVLVMVITTILMTIVMLLVWKVNIWWIVLFFVVFMSTETVYLSAVLYKFTKGPYMPLAMSAVLMVIMFVWHYVHVKRYKFELEHTVSPNKVRELLERRDLKRVPGVGLFYTELVQGIPPIFPHLIEKIPTIHSVIVFISMKHLPIPHVDVSERFLFRQVEPKECMVFRCVARYGYRDTLEMADDFVTTLVEYLQYYIRDLNLYNTVEPLKMSCPSIRIDSFSWDRRPSGHGIYAEEMLTPIQSFSELTMHPVGMSSRLAQFQTTKMSLEEMLKIEEDQKLIQREVDNGVVYILGESEVVAKPHSNLLKKVVVNYIFNFLRKNSRKGEKMLSIPRRKLLKVGITYEI

SEQ ID NO: 44849 - protein, 291 aa, Oryza sativa
MDSSYQHDKPLLDEENSSQVTLEYTGDGSVCIRGHPALRKHTGNWKGSSLAIVFSFCSYLAFTSIVKNLVSYLTKVLHETNVAAARDVATWSGTSYLAPLVGAFLADSYLGKYCTILIFCTIFIIGLMMLLLSAAVPLISTGPHSWIIWTDPVSSQNIIFFVGLYMVALGYGAQCPCISSFGADQFDDTDENERTKKSSFFNWTYFVANAGSLISGTVIVWVQDHKDFRNLEEALLREYARLLLLLFTNAIKICHVIPQFFMSFWGRVQQSKAAENWSIQLDLSSLIELQW

SEQ ID NO: 44850 - protein, 71 aa, Oryza sativa; identical to SEQ ID NO: 44674

SEQ ID NO: 44851 - protein, 323 aa, Oryza sativa
MLSAAAAAAADASFHGGAPRRRRPRLRSCLASPPASGGGGGDCRESEKARRLLVERYQDGVSKRYILDGNSKLQIHQEKNEHMANTLEEEEKEEANSSIPRAIKDFVLPAGFPGSVSDDYLEYMLWQLPTNVTGWICHTLVTSTLLKAVGVRSFTGTSAAASAAAIRWVSKDGIGAFGRLLIGGRFGTLFDDDPKKWRMYADFIGSAGSIFELITPLYPGYFLPLASLGNLAKAVGRGFRDPSFRVIQNHFAESGNLGEVAAKEEVWEVGAQLLGLSIGVFIMDTSGIKSSYPTLALTWLGVRLLHLWFRYQSLSVLKFRTVR

SEQ ID NO: 44852 - protein, 216 aa, Oryza sativa
MRQQSMIGQVAALYPVKVFHDLPHGRNLNSNTNGAHRSLSEENGTLPEENGTHLLNVIKLPQIHALAFLGWQIGKQRRKQNDICEKDLQRSAAVLGYAAHAILLIASYLHVPLRYPLHFGGSRSYVSDCLPSAETASIASAERTCINMTDPKLTVYPLFVECQEDDPTKASYAIYLLHKDTEQLLNYIGAESSGRRVFDNLQELIRIIQSDEYVYS

SEQ ID NO: 44853 - protein, 241 aa, Oryza sativa; identical to SEQ ID NO: 32960

SEQ ID NO: 44854 - protein, 174 aa, Oryza sativa
MLVLRAPGGHAKTKGTIYLSNIRMVFVASKPVGNFFAFDMPLLYVHGEKFNQPIFHCNNISGFVEPVVPENQNRALYSTHTFKILFKEGGCGTFVPLFLNLVASVRRYNQFEAQSAASMAPRVDPLQAVQTPVDDMMRHAYVDPNDPTKIFLQQPAPESQLRRRNYHGRADNAY

SEQ ID NO: 44855 - protein, 157 aa, Oryza sativa
MTSWIAPSALLPKMQPYLKNRNPRIRAKASMCFSKSVPSLGVEGIKEYGMDKLVQIAATQLSDQLPESREAARKLALELQAFYEKSQASSSGEVDDAPATSPDADADAGAESWEAFCQSKLSPLSAQAILRVTSTTKEGVAVGVTSTPPKEGVTVGC

SEQ ID NO: 44856 - protein, 709 aa, Oryza sativa
MADREKAEETEEEYESDLDDAPLPAVRRRDAASDDDEEEEEEEEEGARPSPPTKAGSDAESDGQGAAEVYDDDDAYEDDEGYEEYGEVYEEFEQGRGVAGGVATGAVAAAGEEAGMGMKGEAEGEASAAAAEGEEGKKGSEPYAVPTAGAFYMHDDRFQEARGHGRQRRMVGDRRLWNAKEDQAWVHDRFDEMNLHDFHNDYTRRRPRGRFRGRGGAPVGKVRGGSRDNFRGNRSQTYYRDGAKNYIYVPKEPHSYHDNTKKVQQVLNDNGKNRTIKPPNPRDGDANNFDFVRKESRPLYGNAKSNKSAPRVVRGRGSKRYQPHWRSTAEISSEHNNKSQNLENTSSNANLGKHQHQASNSQPERGFPMKQSFASNLNSASPPFYPSRPSHQELPVSQRGDGQPSTTTRHFSSPIGMEHVSPTPQYGPLLRGKAFVPSAGHGKLHAEVPIKGMDHPSFHSSTSSSTSQFPIATNQVTGNSAKSPHPIVQQRLVQSFNQSTPKMPGQMFAAQFASSDKLPSSMQSTSTILTEGTEISSPRGSNKSNTRLMAKGQHSDQGEEHASFMYGGAQVLGTTGSLGDQNFHGTPALFPVMQFGGQHPGGTGVPSIGMALPGFVSQQQLGLSNSEMTWLPILAGASGALGATYGSPYITVDGSYYPRTSEHASSSVSLREPSASSQLKSQEITEALNDELSQRQHKPRRYSEMNFGK

SEQ ID NO: 44857 - protein, 138 aa, Oryza sativa
MESRKEEEQHGGGGAVGWMTVPAFGEWDMKNGAVPDYSMDSSKIREMRKQNKRELSRASLGGDDDLLAAQQHKAAAPQPAPNASAAADDHRRPLHAAHDDSPTGRKKFLSYFQCCIRAWRTVTLPVVLAARNSCANSS

SEQ ID NO: 44858 - protein, 177 aa, Oryza sativa
MQAKESKKSRDRGRDRVKWNEENLNDIESTKPVREKITEPKTPYHSMIDEDDGTVSPKRTIEESVDKSTHADAIKTALMEAVSSGKLSAREHLESCSNEEEEEGEEEEEEEEEEEEEEEEQEEEEEEEEEEEEEEEEEEVAIKQGTDFEEQRKAHYDEFRKMKELRRRGTPSQEGDE

SEQ ID NO: 44859 - protein, 903 aa, Oryza sativa
MDSCALFLSTPRPPPPLVPAHRRRPLASRSGLRRREGCPCSCASSSSSSGRAGSQDRPPRPWQQKQRTQRPGRGEAIDPVGFLAKHGISDRAFAQFLRDRYKALKDRRWELHSRLIDLKEASSGFELMGMHRHRQHRVDFMEWAPGARYCSVVGDFNQWSTTENCAREGHLGHDDFGYWTIILEDKLREGQEPDEYYFQEYNYADDYDKGDNGVDVEELIHRMNEEYWEPGEIKSQKSRLEVVAKLYEQMFGPNGPQTEEELGDIPDAETRYNEWKALQKDDSASSLPCYDIIDNGREFDIFNVATDRVSFEKFQGKSPPLAYWVEMRKGRKAWLEKYVPAISHKDKYRVYFNTPDGGLERIPAWATYVLPDAEGKQSYAVHWDPPPEEIYKWRFERPKVKGSLRIYECHVGISGSEQKISSFQEFTSNVLPHIKDAGYNAIQLIGIVEHKDYSSVGYKVTNYFSVSSRFGSPDDFKKLVDEAHGLGLVVLLDIVHSYASADELVGLSLFDGSNDCYFHSGKRGHHKYWGTRMFKYDDIDVLHFLLSNLNWWVTEYRVDGFQFHSLPSMLYTHNGFSTFTGATEEYYNQYVDEDALIYLIIANEMLHELHPDIITIAEDATFYPGLCEPTTQGGLGFDYWVNLSIPEMWLWHLENVPEQEWSMNKIMRVLVNNNSNMLSYVENHNQSISGRKSFAEIILYEGKCSNSSVDNDLIFRASSLLNIIKLITFTTSGGAYLNFIGNEFAHPKRIEFPMSSNDYSFCLANRQWELLDKGVHKHIFNFDKDIMSLDGKERLISGGSPIVHHCDDTSMIIYFTRGPFLFVFNFNPDASYQLYSVGVDEAGEYQLILNTDETKYGGRGELTSNQYMKRTSDNRVGGCRNSLELTLPSRSAQVFKLVRILRI

SEQ ID NO: 44860 - protein, 815 aa, Oryza sativa
MDGDGWVWVRRPADDDEEERPLKVVFDSPAEHFTDAAPIGNGSLGAMVWGSVASEKLQLNHDTLWTGVPGNYTDPNAPYALAVVRKLVDGEKFVDATEAASGLFGGPTEVYQPLGDINLEFDSSSLGYTSYKRELDLRTATVCISYNIGEVQYSREHFCSNPHQVFATKISANKSGHVSFTLSLNSQLNHNVRITNANEMIMQGTCPGRRPALHHNGANDAIGIKFATAVGLQIGGTSTKVTIIDDQKLRIDAADWVVLLVAAASSFDGPFVNPSESKLNPEVAALNTLNISRNATFSQLKAAHLEDYQGLFHRVTLQLSQASMLEKDILEEVDHDVKTTAERINSFRSDEDPSLVELLFQYGRYLLISSSRPGTQVSNLQGIWNQDFAPAWEASPHLNINLEMNYWPTLPCNLTECQEPLFDLIGSLAVNGTKTAKVNYQASGWVTHHVTDIWAKSSAYYVDAMYALWPMGGAWLCTHLWENYQYSLDKEFLEKRAYPLLEGCAMFLIDWLIKGPGDYLETNPSTSPEHPFIAPGTGGHLASVSYSTTMDISIIREVFLAVISSAEVLGKSDTNLVERIKKALPMLPPVKISKDGTIMEWAQDFEDPEVHHRHLSHLFGLYPGHTITMQKNPEVCKAVANSLHKRGEDGPGWSTTWKMALWARLLNSENAYRMILKLITLVPPGGKVDFEGGLYTNLWTAHPPFQIDANFGFTAAIAEMLLQSTHGDADLYLLPALPREKWPKGYVKGLRARGNVTVNISWEKGELQEATVWSSNPKCTLRLHYGEQVAMVTVLGGNVYRFNGGLQCVETYMAP

SEQ ID NO: 44861 - protein, 657 aa, Oryza sativa
MGSGSAANGGGGGAGAARVPMPAAKPFLETLGGNMKETFLPDDPFRVVRRERGCGRRAAAALRYVFPFMEWAPSYTLGTLKSDLIAGITIASLAIPQGISYAKLANLPPVLGLYSSFVPPLVYAMMGSSRDLAVGTVAVASLLIGSMLSEEVSAAEDPALYLHVALTATFFAGVFQALLGVLRLGFIVDFLSHATIVGFMGGAATVVCLQQLKGMFGLDHFTTATDLVSVMSSVFSQTHLWRWESVVMGCGFLFFLLITRFFSKRRPRFFWVSAAAPLASVIIGSLLVYLTHAENHGIQVIGYLKKGLNPPSATSLNFSSPYMMLALKTGIITGVIALAEGIAVGRSFAMFKNYHIDGNKEMIAFGTMNIVGSLTSCYLTTGPFSRSAVNYNAGCKTAMSNVIMSVAVMITLLFLTPLFHYTPLVVLSAIIMSAMLGLIDYPAAVHLWQVDKVDFCVCLGAYLGVVFGSVEIGLVVAVGISILRVLLFVARPRTTVLGNIPNTMIYRRMDQYTAAQRVPGVLVLRVDSPIYFTNASYLRERIARWIDDEEDQCKEKGEMGIQYVVLDMGAVGSIDTSGTSMLDELRKTLDRRGLQIVLANPGSEIMKKLDSSKVLEAIGHEWIFPTVGEAVAECDFVMHSQKPGMVMGSGAPHENLV

SEQ ID NO: 44862 - protein, 767 aa, Oryza sativa
MAILSALGTEVFIPVAAAVGVAFAVAQWLLVARVKVNPAHAAAAAASGGSKNGGYGDYLIEEEEGLNDHNVVVKCHEIQTAISEGATSFLFTEYQYVGIFMSIFAVVIFLFLGSVEGFSTKSQPCTYSKDKYCKPALFNALFSTASFLLGAITSLVSGYLGMKIATFANARTTLEARKGVGKAFIIAFRSGAVMGFLLASSGLVVLYIAINVFKLYYGDDWEGLFESITGYGLGGSSMALFGRVGGGIYTKAADVGADLVGKVERNIPEDDPRNPAVIADNVGDNVGDIAGMGSDLFGSYAESSCAALVVASISSFGINHDFTGMCYPLLVSSVGIIVCLITTLFATDFFEIKAVKEIEPALKKQLIISTALMTVGIAIISWLALPAKFTIFNFGAQKEVTNWGLFFCVAIGLWAGLIIGFVTEYYTSNAYSPVQDVADSCRTGAATNVIFGLALGYKSVIIPIFAIAVSIYVSFSIAAMYGIAVAALGMLSTIATGLAIDAYGPISDNAGGIAEMAGMSHRIRERTDALDAAGNTTAAIGKGFAIGSAALVSLALFGAFVSRAGVKVVDVLSPKVFIGLIVGAMLPYWFSAMTMKSVGSAALKMVEEVRRQFNSIPGLMEGTGKPDYATCVKISTDASIKEMIPPGALVMLTPLIVGTLFGVETLSGVLAGALVSGVQIAISASNTGGAWDNAKKYIEAGASEHARTLGPKGSDCHKAAVIGDTIGDPLKDTSGPSLNILIKLMAVESLVFAPFFATHGGLLFKWF

SEQ ID NO: 44863 - protein, 685 aa, Oryza sativa
MDPSYPPSATARRAAAIARHLAGLSPRDAAAVAAALEPSACLSYAPPESSEPAPAFSPLELRSLLDGHHLRERDWAFRAMEESPLFCQRRSGGKVFVSPDYNEGKEGQREATMRRVGYLARRGVFRGWLTEPGPDAELRKLALLECLGMYDHSLAIKIGVHFFLWGSAIKFLGTKRHHDKWLSDTENYVIKGCFSMTELGHGSNVRGIETVATYDIKTREFVINTPCESAQKYWIGGAANHATHTIVFAQLHINGRNEGVHAFVAQIRDEHENVMPNIQIADCGHKIGLNGVDNGRIWFNNIRVPRENLLNLVADVLPDGQYVSTIDDPDQRFAAFLSPLTLGRVNIAVNAVYISKVGVAIAVRYALSRRAFSVTPDGPEMLLLDYPSHQRRLLPLLAKACLMSSAGNFMKRMYVKRTPELNKSIHIYSSALKATLTWQNMTTLQECREACGGQGLKTENRIGIFKAEFDVQSTFEGDNNVLMQQVSKALYAEFLTAKRKNQPFKGLGLEHLNGPCPVIPDYLTSGTLRSSSFQMDLLCLRERDLLKRFTTEVSNYLAQGENREKALMLSYQLAEDLARAFTERTILQIFLEDEKNIPTGSLKDILGLLRSLYVMVCIDESASFLRYGCLSRENVAAARKEVMTLCSELRPHALAIVSSFGIPDAFLSPLAFDWIEANARSSGNE

SEQ ID NO: 44864 - protein, 488 aa, Oryza sativa
MGSDAEPAKGLLPYLQRADELQKHEPLVAYYCRLYAMEKGMRIPQKERTKTTNSLLISLMNQLEKDKKSLTLGSDDHLHVEGFALNVFAKADKQDRAGRADINTAKTFYAASIFFEILNQFGELQTDVEQKQKYAIWKAAEIRKALKEGRRPEAGPPGGDKDEAPDSTTTNSHLTDMGRSQSFGSGQHGNEASSQHVDQDFSRRDSFSAVQPGNNALRHSTEKFNDHVSAQSPYSPPPPQSQTPPQSQFSSPAQSSYSSPSYQGTDYPSSDVHKPPHGYSSAPYTSTDYPTNEVHKPPSNYSSPPYTRTDYPSSDSYNPQSNDKPDIPTYPHTYHQPPYTIEPQHTSQNYYSTETPAAPYNYSNFQSYPSFQDSSVPSVPTHQSSFYPASDGTSAVSYSPSGSNHPAPTQYHPSADTTTHQVTPPAIAPPASQYKYDSSYQPEVEKIAEAHKAARFAVGALAFDDVSVAVDHLKRALDLLTNPSAETH

SEQ ID NO: 44865 - protein, 409 aa, Oryza sativa
MEEADDAPPPWRHGKPAAAIDGSSGPLAAAAARLSGRSRALPSSRDFHFYNNFPSFRSPVGAAAARAGASLAALGAAPFYPKRHPPFPGDDLDDAQDWVVGVIDDLAEQFGASMDEFKAAREEEEATGRRATEEDGFQVVYGKKKKKVMGGGGGEEGVGRGGEAFGGGSGSVKMATRDKSAAPGAKAKVPFHIPTIPRPQDVHRILVDNSSKPFEHSWLEKSDDGSRVVHPLEKIPMEQLVDRDFPESEPIKPPALDDTPFTHVEDLKSLEVLATKLKSATEFAVDLEHNHYRSFQGLTCLMQISTRTEDFIVDTLKLRKYLGDYLREIFKDPTKKKVMHGADRDIIWLQRDFGIYVCNLFDTGQASRILQMDRNSLEHLLHHFCGVTANKEYQSADWRLRPLPDEMIK

SEQ ID NO: 44866 - protein, 571 aa, Oryza sativa
MSMNNMMGSPPSRSRGRDEKKKRWKWKLGPATILGFELLESIAFSGVALNLVVYLATVLHGTLAFNAAHVDTWNGTTFIVPVIGAFLADSYWGKYRTILASLLFYLAGLVLLTVSAAVPSLRPAPCTGVPCSPATGTQFSVFFLALYLTSIGTGGVKSALLPFGAEQYERDDHDTDQEGAPAPEKTKQSFFSWFFGAINLGIFVAGTLVSWVEQNVSWALGFGIATLCLLIASAAFLAATPCYRVRLPTGDTPIKAILRVLVAAFRNRTRTLPPDADGDGLYEVDDDKNKNGGDDEKLAHTEGLRWLDKAAVRVDGGGVWEVCTVSEVERVKVLARIVPIWVTCVLYAASLGQMTTTFIQQGMAMDTRVFGGRFRVPVASLVSVEVVFMLLWVLLHDVVVMPVARRWWRSGGLTQLQRMGVGRVLVVVAMATAALVERRRLRGEKRSMSILWQVPQFVVLAGSDVFSGIAQLEFFYGEAPGSMRSICSAFSFLALSLGFYVNSLVVTIVAAVTKRSDGSGGWLAPDLDTAHLDYYFWLWALISLANLALYLLLAARYKSKKPSPPHSSSHP

SEQ ID NO: 44867 - protein, 666 aa, Oryza sativa
MLFGGKTTKESDSYKKGDRVRYIGSLQSTGIILDGESPPDFGSQGEICLPFEENRSSKVGVRFDEQIPGGIDLGGNCEVDHGLFCSVDSLCLDAPGWEIRSKHPFDVIIQFISEEIEHGPLVLFLKDTERICGNNDSYRALKSKLQYFPAGAFIIGSHVHPDDHKEKANASSLLLSKFPYSQAILDFAFQDFDRGTDKNKETSKATKHLTKLFPNKVTIQPPKDEIERSKWNQMLDRDVEILKGNANISKIRSFLLKMGLESSDLETVCVKDRLLTNECIGKIVGFALSHQLKHSTIPDPSSDVRFTLSSESLKHGVDMLESVESNPKSSNIRKSLKDIATENEFEKRLLADVIPPDEIGVTFEDIGALESVKETLKELVMLPLQRPELFSRGQLMKPCKGILLFGPPGTGKTMLAKAVATEAGANFINISMSSISSKWFGEGEKFVKAVFSLASKIAPSVIFVDEVDGMLGRRENPGEHEAMRKMKNEFMVNWDGLRTKDKERVLVLAATNRPFDLDEAVVRRLPRRLMVNLPDASNRRKILSVILAKEDLADDVDLEAVASLTEGYSGSDLKNLCITAAHLPIKDILEKEKKEKALAEAENRPLPQSFSSNDVRALRLSDFKHAHEQVCASVSSDSTNMNELIQWNDLYGEGGSRKKTTLSYFM

SEQ ID NO: 44868 - protein, 369 aa, Oryza sativa
MPHVQSAPAAATAAGMSAASAPAPRRWEGVDQALERMVLRACLDQAPERRRVRDAFKDVQLSIDHCLFKGQYSDIGTKESYEKNSRGVEIFSKCWYPENHRIKAIVCLCHGYGDTCTFFLDGIARKIASAGYGVFALDYPGFGLSEGLHGFIPSFDTLVDDVAEHFTKVKENPEHRGLPSFLFGQSMGGAVALKIHFKQPNEWDGAILVAPMCKIADDVIPPWPVQQVLIFMARLLPKEKLVPQKDLAELAFKEKKKQEQCSYNVIAYKDKPRLRTALEMLRTTKEIESRLEEVSLPIIILHGEGDLVTDPAVSKALYDKAKSSDKTLRLYKDAYHAILEGEPDEAIFQVLDDIISWLDQHSTKKVPSS

SEQ ID NO: 44869 - protein, 377 aa, Oryza sativa
MTATPTITSIAMVATIRRSFTAVLIHGICKANILIHPAMGWIWSSELFHGRFHQTTSNRRNELTCSIMTVAMQHVLWDLPRFVKIVEVGPRDGLQNEKNTVPTSVKIELIHKLVASGLSVVEATSFVSPKWVPQLADAKDVVEGIKHVPDVRFPVLTPNLRGFEAAVAAGAKEVAVFASASESFSKSNLNCTIKESLVRYHDVVTSAKKHGIRIRGYVSCVVGCPVEGTIHPSKVAYVAKELYDMGCSEISLGDTIGVGTPGSVLAMLEAVMSFVPVDKIAVHFHDTYGQALANILVSLQLGINIVDSSVSGLGGCPYAKGATGNVATEDVVYMLHGLGIETNVDLNKLMDAGDYISKHLGRQSGSKTTTALRKLTT

SEQ ID NO: 44870 - protein, 657 aa, Oryza sativa
MPRKASSTSDSRLKWRKWKRNPTASPSPSNRSSAAAAAADHSDDSDSAAVNEDDDSAVPEDADDETLAGAEDPVLDLREAEVLPSAEPVSAFPVATRRVVNRPHPSVLAVIAAERSACAGEGSAAVAAAPVLENISYGQQQVLSGVLPDHASLATDTDKPSTYVCTPPNLMEGHGVTKQFQGRLHVVPKHSDWFSPGIVHRLERQVVPQFFSGKSPGNTPEKYMLLRNKVIAKYLENPSKRLAFAECQGLVANTAELYDLSRIVRFLDTWGIINYLASGSVHRGLRMATSLLREEPTGELQLLTAPLKSIDGLILFDRPKCNLQAEDISSLASNSEVVDFDAGLAELDGKIRERLSESSCSYCLQPLTSLHYQSLKEADIALCSDCFHDARYITGHSSLDFQRIDGDNDRSENDGDSWTDQETLLLLEGIEKYNDNWNNIAEHVGTKSKAQCIYHFIRLPVEDGLLENIEVPDASVPFRAETNGYPHLDCNGSTSGNLPQKIPPDNQLPFINSSNPVMSLVGFLASAMGPRVAASCASAALSVLTVDDDSRVNSEGICSDSRGQGPHPNFRDHNGGVSSSISPEKVKHAAMCGLSAAATKAKLFADQEEREIQRLTATVINHQLKRLELKLKQFAEVETLPFERMRASGENKAEDCI

SEQ ID NO: 44871 - protein, 248 aa, Oryza sativa
MVLVVKQHRCMHSASCVCIKGHLSEDALFLVFRHMNWNPRLIAVLSCVCEWFDEVAKQVLWKEFCHARAPKMMLDLHSGGSHIVDGNWKALGKLLIYCNGCTKGGLFNNIHVPGHFVFRTRFSRTAGKSFLPQQCRNDVLYVSDPCEHLDQGDEGDLGFFRGIFMSFATSKVKKMLIEKRARFHPSESCPYCKAKLWSMLEANMSPGSSSARLGAYEDSVEYFVCLNGHVIGIGTLLPLSDSEEVPEE

SEQ ID NO: 44872 - protein, 522 aa, Oryza sativa
MELFSSQQWLALLPPIILCILLFSYVYIILWLRPERLRQKLRSQGVRGPKPSFLFGNIAEMRRIQQLAKSAHEQEAGSTDMFSSNYVATLFPYFLHWSRVYGSIYLYSTGSIQVLNVTDPNMVKELANCKSLDLGKPCYLQKERGALLGMGILTSNGDLWVHQRKVIAPELFMERVKGMVNLMMEAAMSMLNSWKNEVEDRGGSAEIVVDEFLRTFSADVISRACFGSSFSEGKEIFIKIRQLQKAMAKQSMLIGVPGSRYLPTRSNRGIWNLDSSIRTLILNISKKYEHDSSTSVNKDLLHSIIQGSKDGPFASCTPEDFIVDNCKNIYFAGHETTSTTAAWCLMLLASHHEWQSRARVESLDICQGRPLDFDILRKLKKLTMVIQETLRLYPPASFVAREALNDMKLGGIDIPKGTNIWIPIAMAHRDPSVWGPSADKFDPDRFANGIAGACKPPHMYMPFGVGVRTCAGQNLAMVELKVVLSLLLSKFEFKLSPNYVHCPAFRLTIEPGKGVPLIFREL

SEQ ID NO: 44873 - protein, 386 aa, Oryza sativa
MRLANDLKGEEEELYFFTSSLLSMLAEYNVRPPQINASAITAGTKRLYHQMQWKIKYLNDSLGEITQPGHIYNNPNHQQATPLRHEPSSSYNTDATRNNFHQYAQDPNDRNTGQMYHGSNYHQEIVAATPSNYFEENNGPREVRLDDSQFYRQDNQEYSADDDPLPGIEGFQIVGEPRPGFTLTACGFPTNGTTLCNFQWVRYLDNGTRQSIEGATMYDYVVTADDVDTLLAVDCTPMDDNTRQGELVTEYANNGSKITCDPEMQNTIDMHISNGRAHFNLLVLGYSSDEWELAILTLKRTGYHIKVKDEVLTEEKYSSNLQTKIPNGRTTQFVLVSSGGVNIPFNTQGISEPNNEDSDVRLRDLIVLVLRTFQSKALDAKRKGKV

SEQ ID NO: 44874 - protein, 705 aa, Oryza sativa
MPECPARERFSALRGARWRADLGVLPDCASVSTEEFRRAAADSRRRYANLRRRLLIDPHLSKDEENAPDLAVENPLSQNPESTWGQYFRNAELEKMLNQDLSRLYPELGNFFQTTICQSMLGRILLVWSLRYPELGYKQGMHELLAPLLYVLHADVHYFKQVRELHDELFSDDFDGQTFPDRIKLNRSDRTNTIEGSAAKIRSLDDLDSDTRDLFLINDAYGAEGELGIILSEKFMEHDAYCMFESLMHGSMNGAQGVVAITDFYSLSPAPESSTGLTPVREASSAIYHLLASVDSPLHSHLMELGVEPQYFALRWLRVLFGREFSLDNLLFIWDEIFSSPNHSYCADIKNQSDYQFKILCSHRGALILSMAVSMMLHLRSSLLGSEHATSCLVRLLNFPGDTDLKSLIDKAKLLQPFALEANLPSSPLRGKSPLNPPNYWEETWKILQMSEEKRSGGSINRMKVRGLFRRSSPNTESNVSRTKDANFEDSNSTSENMITTSNNVLEAGQPEVHRSSSVDVRDALGVACGNLSRDSSTSLSCGTEYDHETHHADEPCASHDDKVVSEPDPLPVHNDKIDEVTIAAIQTCALVDYQQSQQNKPCSVNGKSEVKYQQNFAVHEVGRKETFELGSSSDVADKELLGTLRLLGESMVENIEVIDLLFQPNLHSTSLDKSEEIVLGSIEQAKAKAALEGLKKISELLRRI

SEQ ID NO: 44875 - protein, 36 aa, Oryza sativa
MVLAEAALRPWPAAEPRELRVEMVALFFEAMESLLK

SEQ ID NO: 44876 - protein, 433 aa, Oryza sativa
MERYKVIREIGDGTCGNVFRAYNTETNEIVAVKKMKRKFFQWEECISLREVKALQKLNHPNIVKLKEVTMENHELFFIFENMECNLYDVIRERQAAFSEEEIRNFMVQILQGLAYMHNNSYFHRDLKPENLLVTDGTVKIADFGLAREVSSSPPYTDYVSTRWYRAPEVLLQSSAYTPAIDMWAVGAILAELFTLSPLFPGGSETDQLYKICAVLGTPDHTVWPEGMNLPRSSSFNFFQIPPRNLWELIPNATLEAIDLIQQLCSWDPRRRPTAEQSLQHPFFNVGNWVPRPLHASHTKTIETRPNPRLELNLWDFGTEPEDNYLDLTLSLKPSFPGTDFSNNVPEHTKEEILLYPGFENPPVQSGFWPLVASDRPMGDVPAMSSWPQAYVVDGQATLPAVGFSGSPFGLSPLQPNLFENRSFATPIRQVNFF

SEQ ID NO: 44877 - protein, 342 aa, Oryza sativa
MANVALLSAASPSTSSAAPRLRHVARRRPSRRSACPRSAASRLSIMAALGEDPIRQWILTEGKATKITGVSSIGGGCINSAQCYKTDASSFFVKTNGRIGPSMFEGEALGLKAMYDTNSIRVPLPYKVGSLPTGGSFIIMEFIEFGCSRGDQSALGRKLAEMHKAAKSDKGYGFYVDNTIGSTPQINTWTADWIEFYSKHRLGFQLELITQRFGDSAIYDKGQRLIENMHPLFEGAVMEPCLLHGDLWSGNISSDTNGEPVILDPACYYGHNEAEFGMSWCAGFGGEFYSSYFEVMPKQPGFEKRRDLYLLYHYLNHYNLFGSGYRSSAMSIIDDYLRMLKA

SEQ ID NO: 44878 - protein, 854 aa, Oryza sativa
MSRGRRAHLPQIRASTRRTWSGVDADRAELLEQLAERQPEQLKVIAIVGFCGLGKTALAAEAYNRETRGGRFERHAWVCAAHRSAREVLGELLRRIDAACHGDSDAGQLCVDIRQQLEKKRYFIVIDDIQTEDQWKSIKSAFPTDKDIGSRIVVTTTIQSVANACCSANGYLHKMSRLDKNCSKQLLSKKACPERYSHYKQPDSAAILKKCDGQPLALVTIGEFLQANGWPTGPNCEDLCNRLHYHLENDKTLERMRRVLVRNYTSLPGHALKACLLYFGMFPSDHPIRRKSLLRRWLAEGFVEPVSSSSNLDSTAAFDVLMDRNIIEPINVSNNDKVKTCQTYGMMREFISHMSISQNFVTFFCDDKFLPKYVRRLSLHGDTVVNGDNFNGIDLSLVRSLVVFGEAGTTVLDFSKYQLLRVLDLEKCDDLNDDHLKEICNLVLLKYLSLGGNISKLPKDIAKLKDLEALDVRRSKVKIMPVEVFGLPCLIHLLGKFKLSDKVKQKTEVQEFLSKGKSNLQTLAGFASNGSEGFLHLMRYMNKLRKLKIWCTSSAGSTDWTDLREAIQQFILDEKEANIGTRSLSLHFTGCSEDAINSLKEPCYLSSLKLHGNFPQLPQFVTSLRGLKELCLSSTKFTTGLLEALSNLSYLQYLKLVADELEKFIIKVQGFPRLLCLCIVLQCPTFPVIEEGALPFLVTLQLLCKDLHGLSDIKIECFKHLQEVTLHSGVTPATRQEWVKAAKEHPNRPKVLLLKSVDTAESEHTDVDSVMEAVKSETTEYSIAPEGPEQVIDMNNKMQLDHGLESSSVLNKQNNFADQSSSKDQLHYSFNNMGLSDVSPAVSELPNGMVPSCT

SEQ ID NO: 44879 - protein, 330 aa, Oryza sativa
MGERKVLNKYYPPDFDPSKIPRRRQPKNQQIKVRMMLPMSIRCGTCGTYIYKGTKFNSRKEDVEGEKYLGIQIFRFYFKCTKCSAEITFKTDPQNSDYTVESGASRNFEPWREEDEVADREKRKRDEEEMGDAMRALENRAMDSKQDMDILAALEEMRSMKSRHAGVTVDQMLEILKRSAHDKEEKTVAELDEEDEKLIKSITFRNSQDYVKRIEDDDDDYEDLVIPGQSSSTSKMNGSSQSVSNATDVLTKTSGSDNANKEGNKIWPSKMPKFIVKPKSTPTDPIKKQKTETTAGPDTGKAPVAEENSEPAQNNVLQSLCQNYDSDESE

SEQ ID NO: 44880 - protein, 694 aa, Oryza sativa
MQIVGDIGGNWKTIMHEQSNQCYYWNTVTGETSWEIPNVLASEIAADSVTSASAPTHVDYSMEAQAHALTHNAVEAYPSDISVLNGSVAYATLGMGQPTHDAYAYAGAVTSHESMDIDPLQLARYGEELLQRLKPLERLHGSIYNVELLKREIEIRISDCNALSSYGSSLLPLWLHAEVHLKQLEFSVSKLETSYSTTEPRHPEKADTEHKTPNEAEVMMPPSNGEGLKSEVSTDVMMDGNVKNEEPFSTSSIQKSEENDTTTVPSKIESDNDEDMDVDMEVDDDNVEEHKHSNSTPIKEYPPSEQVQSPALLLLDGSAAPLEDSDIPPPPPEDEWIPPPPPENEPAPPPPPEEPAVSSVSTETIPQSYVDQANLVYTVPGMEYYAAAGTEGTHASYYMQTSEPHVVQAHQNGYYAPVSASGISIPVDATSIAPVPVSYYSYHSVTMAATGEAAEPSGYYAASVSATSSSVLDNTTSSSNLAPANSSLHSRESDNIISKEAKLASLSQPVGATSASASIQGSSAQASTSTTSQSKVVRSKKRAVSVATSLRSNKKVSSLVDKWKAAKEELRDEEDEEPESALDALERKRQKDIDEWRKQQIASGEAQENANFVPLGGDWRDRVKRRRAEAKKEANSETISAPVSVTDLHKGQPDLAELCKGLPSGWQAYLDESTKQVYYGNSLTSETTWDRPTK

SEQ ID NO: 44881 - protein, 257 aa, Oryza sativa
MAIDHASPFSLKNRGDMGGRGYEEEEVENQRWPPWLKPLLSTSFFVQCRIHADAHKSECNMYCLDCMNGALCSLCLSHHRDHHAIQIRRSSYHDVIRVSEIQKVLDITGVQTYIINSARVVFLNERPQPRPGKGVTNTCEVCERTLLDSFRFCSLGCKIVGTSGGYRPRKKHGGCGGGGGGGDGGKKKKKRAALKDARYESEDSCTSTSGGSSDKSSVVQSFTPLTPPPTSASYRTGNKRRKGVPHRSPFGSLIVEF

SEQ ID NO: 44882 - protein, 278 aa, Oryza sativa
MSFRCKGGVAWVALLVAVAALASAAQGFPNPFGHEEFTESYYDETCPNAQSIVRSVMERHAAANPRTAPAILRLFFHDCFVNGCDASILLNATDSMESEKDAEPNATLAGFDVIDGIKSELERSCPATVSCADVLALAARDAVAMLGGPSWGVLLGRKDSLTASIDMAKEDLPNPKDSLAELIRMFKEHDLDERDLTALSGAHTVGMAHDCKNYDDRIYSRVGQGGDSIDPSFAALRRQECEQKHDKATAPFDERTPAKFDNAYYVDLLARRGLLTSD

SEQ ID NO: 44883 - protein, 396 aa, Oryza sativa; identical to SEQ ID NO: 33142

SEQ ID NO: 44884 - protein, 335 aa, Oryza sativa
MDQGSSSSMSSCSSSTTASTGPDQRRLSAAAPTFDPSMASSSSMAATTAGVPGSSPAMAPLLTSARMSSGSSASSTTSFDPAGSSALAPARSPRPGLSASAPAFYPTTASSSSTPVMPAVPGFLPQIPEPTASCSDFPPEMLWHHPCGEQKIKGGRPDLLGREFGILAEQKRLIQRHLDLKEEMHLRHNKEIENAFISETRLARGVEQDLLGDCKKAVLVQQDQSGKEEESHQCLRQLQDVNGEQLVGVPKLGLPGAEENVACNNTASHKEFSEFPGPDIKFGSINIRDIPLLQGRQAAVILPNPQLDRRTSGLTPAGASSLDQETDQELNEKLL

SEQ ID NO: 44885 - protein, 150 aa, Oryza sativa
MKDSDNDVGMVIGGYAQDPYDDRGLEELMQDQDALEKSVFLIGIKVEIKRKGIMVVTSIYLQNLIHGIGIVYNNKYHIILYWSMVPYIVLKFRALCAQHWRCIQVDIKRKHMDGTSVEITSKLVILLISHCCFFSHCFIEIRYSLFISLI

SEQ ID NO: 44886 - protein, 1101 aa, Oryza sativa
MASDSDVDEDELLQMALQEQAARDLSHQRPAGAGKPVVNLVRPPANSSRGGGGGGRGGGGPAKARQPSRGGGDDDDDDSEVEMLSISSGDEDGAPSSRDRGPPPPRGGGRAGARRAASRDDGDFDDDEPRSWKRVDEAELARRVREMREGGAAPTVDQKAAAAATRKALTNVQTLPRGVEVLDPLGLGVIDNKSLRLITDASVSSPVSREKAQGLDPSMREKVIYSSPNFDPKVFLSWVHKDTSAADLESGALTLKTDLKGRTQQKKQLVKENFDCFVSCKTTIDDIESKLRQIEEDPEGAGTAHLYSVTQKISGVANRAFEPLFERQAQAEKIRSVQGMLQRFRTLFNLPSAIRGNIRKGEYDLAVREYQKAKSIVLPSHVGILKRVLEEVEKVMQEFRGMLYKSMEDPHLDLAELENIVRLLLELEPETDPVWHYLNIQNSRIHGLFEKCTLDHEARMEVLQNKIREKILSDAKWRQLQQDSNKSLEVDSATGDSFQDDQLSTNIMADEADSLRAAYIRRLTAVLIQHVPAFWRLALSVFSGKFAKAAAGNVLSDSDMNTKQSVNKTDDKGGEAKYTNHTLDEVASMVRATVSAFDTKVQNTFRDFEECNILRPFMGDTIKEIAKACLTLEGKDSSPTAVKMLRALHYEITKLYILRLCSWMRATTKEISKYETWFTLTTLERNKSLYAISSMPLEFRDIIVSAMDRIDFMVLNLRSETAKSYDISQHLHEIHESVRLAFLNSFLDFAGYLERFGGELAQNRSNKENNHTQNGYVNGTNSETSAGMDGDLYKKLLVVLSNIGYCKAELSDELYTKYRHIWSPVRDNDERSADMRDLMTSFSALEEKVLEQYTFAKSNLIRNAARNYLLDYGIHWGAAPAVKGIRDAALDLLHILVAVHAEVYSGARPLLEKAMTILVEGLIDIFLSIFHENKTKELRMLDANGFCQLMLELEYFETILRTYLSTEAEQALRSLQENLLEKACESVTEALENPGHHRRPTRGSEDAASDDRQSVSPDDLLALAQQCSSDLLQGELEKTRLNIACFMESTLQSTPAPAGSKPAAYQSYKAPATHQPVQVSSPSFRRQQTSTNSPAASRRRR

SEQ ID NO: 44887 - protein, 145 aa, Oryza sativa; identical to SEQ ID NO: 32872

SEQ ID NO: 44888 - protein, 251 aa, Oryza sativa
MELPWLDLPFTLLTLLLATRLAYDYYGVVAATFTGSFSLQIFLFYCFARWYRHTIAARAAADADGDGGGGAVADEEAAPPVLIPLLEGRGGGGGGAGAASSLANRCFAVVFMVFVPLVIVVFERSQADVVAYALCLANILVMVVWLSPERRRGPRVGGQVVPPPQRRRGRRQLQRQRPRRRRGQVLRLPRRDAGGAGLRDLPRCGHRFHAKCIGKWLTAHPTCPVCRTTAVPPPAPLPASGDHADDAITPV

SEQ ID NO: 44889 - protein, 234 aa, Oryza sativa
MLFALDEAGVPWTEEEHRRFLLGLQKLGKGDWRGISRNFVVSRTPTQVASHAQKYFIRQSNMTRRKRRSSLFDMVPDESMDLPPLPGGQEPETQVLNQPALPPPREEEEVDSMESDTSAVAESSSASAIMPDNLQSTYPVIVPAYFSPFLQFSVPFWQNQKDEDGPVQETHEIVKPVPVHSKSPINVDELVGMSKLSIGESNQETVSTSLSLNLVGGQNRQSAFHANPPTRAQA

SEQ ID NO: 44890 - protein, 929 aa, Oryza sativa
MDSRSINLRGFAGNAGKNIMQGIGGFVFGNERSESKEDSYVERFLDRISNGTISDDRRSAMTELQSLVAESRSAQMSFGAMGFPVLLNVLKEDREDVELVRGALETFVSALTPIETSQGPKTEVQPASVNSDLLSRETENISLLLSLLSEEDFYVRYYTIQLLTALLTNSLKRLQEAILLIPRGITVLMDMLMDREVIRNEALLLLTYLTRDAEEIQKIVVFEGVFEKIFSIIREEGYSDGGVVVQDCLELLNNLIRQNASNQMLLKETIGFDPLIAILKIRRGSAFNFTQQKTVNLLGALDTVELLLMGGGSSGEPGKDANKTTNQTALAQKNILDHLLLLGVESQWAPVALRCMALRCIGNLVLRNPQNLDSLASKQVGEDPHVQPALSAIFSIILRTSLAQEFVAADYVFKCFCEKNPGGQALLASTIAPHPNQAHATFGATTDMPFGSILLQALVSSDDNGDMEACCRASSVLSHIIKDNLQCKDRVLQIQLETPAPSLGRTEPLLHRIVTCLSIAASAEGENGQSGQPEESYIQPVILRLLIVWLVDCANAVDCLLESAVHLNYIIELASSKRYSACVRGLAAVVLGACVLYNASREKGRDAFAVADAISQKIGLSTYFLRFDELRKRFAHSSSGQQNRKQLSRSSANSMSDFQEIEEEEINKGDQHPVLSEIFDSHFVSFLSKLETDIRDNIMDIFSRTKTATAIIPAELEQKNGEVDGEYIKRLKSFVEKQCNEMQDLLGRNAMLAEELVRTGGGNSADSLQKPSSGRERVQIESLRQELEGATRRIEALRAEHTQIEAEASNQRNLAAKLESDLKSLSDAYNSLEQANFRLDSEVKALRQGGSAPYPDVEAIKAEAKEEAEKESEAELNDLLVCLGQEQSKVEKLSTRLAELGEDVDTLLQGIGDDTALPDDDDDEDEDDE

SEQ ID NO: 44891 - protein, 443 aa, Oryza sativa
MSMAFSCAGARLQQGRVGVGKCRGGGGGGGGAAVVRRSGCCLYPGGRRGLGVRGIRAELPPRACADGGGGATTSGSTVAVPDAGEVADHVKEVGAVAPPSVLPKGERGEVADVDGSGGNGKLPSSGGGGDGDNGGGGGGGDGGDGGDEGDDEFGPILSFDQVVQEVEKRGVSLPSLPADMIEAAKSVGIQKLLLLRYLDMQASAWPLGPAIRSCSLLRNRMLVDPSFLFKIGTEIVIDTCCATFAEVQKRGEEFWSEFELYAADMLVGVVVNVALVGMLAPYARFGGGSASPGLLGRVRHAYDSLPSSVFEAERPGYSFSIQQRIGTYFFKGILYGTVGFFCGLVGQGIANLIMTAKRSVKKSDDDVPVPPLLKTSALWGAFLGVSSNTRYQIINGLERVVEASPVAKRVPAVSLAFTVGVRFANNIYGGMQFVDWARMTGCQ

SEQ ID NO: 44892 - protein, 580 aa, Oryza sativa
MVASLLCTVAVAVLAVAAVGGEAGVVEHTFVVHEMNVTHLCNTTKIFVVNGQLPGPTVDVTEGDTVVIHVVNKIPHGLTIHWHGVRQLRSCWADGAGFITECPIPPGSERTYRFNVTDQVGTLWWHAHVTCLRSTINGAFIIRPRDGKYPFPTPVKDVPIIIGEWWELDLVELDRRMRDGNFDDNPLSATINGKLGDLSNCSGIVEESFVLNVKHGESYLLRVINTAFFSEYYFKVAGHTFTVVGADGNYLTPFKTDMVTVAPGEAIDVLMVADAPPAHYHMIALANQPPEPDPQIPKYISRGLVRYTGVDANNNGLPVPMPIMPNQHNTMPSYYFHANLTGLMHPKHRRVPMHVDERIFIILGLGTICRGRNTTCKRQRSLETIEVATMNNVSFTHPNTTALLERYYDGTPEGVYTEDFPVRPPRPYNYTNPALIPPGPLEEVLEPTFKATKLKRFKYNTSVEIIFQSSTLLMSDSNPMHLHGYDVFLLAQGLGSFNAKRDIRKFNYHNPQLRNTILVPRGGWAAVRFITDNPGMWYLHCHFEFHIIMGMATAFIVEDGPTPETSLPPPPPEFKRCDAS

SEQ ID NO: 44893 - protein, 795 aa, Oryza sativa
MDPDENPTPPPPYQEAEAAVPVDEQPPPPVEEEQAEAARQESAAPVEQDAAAAEGGGGDRAAGGERSREELERVVMELGFQNDYLKSQIAAAEGGSGAAESELVKGLKEQVERLRKEVEEHKQTQKATEAALEHVNVAYAEADAKVQDLTAKLTQAQQKMDKELKERDEKYVELDTKFQRLHKRAKQRIQDIQKEKDDMEARFNEINQKAEQASSLQSAAQQELERARQQASEALRSMDAERQQLRTVNSKLRTNLDEARVALEARNNVLEKLRQSMFEKEQLLEQTQASLQSAEEKRNASIAELTAKHQKQLESLGAQLTEVSAERTKASETIQSLQMLLVEKDSEIAEIEAASTGEAARIRAAMEELKGELAHLKDQHEKERQNWETTCESLRTKLEASESACHISVIESTKVKSQLELELSKQNQLLQTKDSDLLAAKDEISRLESEFSAYKVRAHALLQKKDAELNTAKNSDLIKAHEEAIREAEKEISAALAERDKAIHDLQIAQSKYGEEIEARDLALADSDKKLKNVMAKLDSLTSKFLSEKESWEKNVASVEESWRLKCESVKAESNGHAGDELKKNLVELTVKHEKLKEEHDSFRDIADRMLEEKDREVAKLLRENKDLHNSLEAKAAVSINGNQNPGPAKQDAMDIELAEQQILLLARQQEQREEELAQSQRHILALQQEIEELERENRLHDQQEAMLKTELRNMERSQKREGIDMTYLKNVILKLLETGEVGALLPVVATLLQFSPEELTKCQHGVLSAVASSPATAVPDGGSTPNSFFSRFTF

SEQ ID NO: 44894 - protein, 189 aa, Oryza sativa
MSFFYVAWAAAVRSAGATLPTPFVDRAAIAVPRGPPAPAFDHRNIEFKGENSWTHSYGSLPLERIRNLAVHFPDEFVAGLKSHVGTRCSTFQCLLAHAWKKITAARDLSPEEYTQVRVAVNCRGRASPAVPMDYFGNMVLWAFPRMRVRDLLSASTPRWSASSARPWRASTSSTSSRSWTSGRWPSATS

SEQ ID NO: 44895 - protein, 146 aa, Oryza sativa
MGSAVCAGAGVLGAPDPRRRLRGRGRARRLPPAAVHFGRGRGDVPNLHDVVASATPEPTAPGRIWKPATQRRAPACRSSPSASTGFPSDVAALSSSSRPPRRPFPICSTQATTTTRSRKSLHRSSPDSGWRTPAGCSNSSPQKYQS

SEQ ID NO: 44896 - protein, 31 aa, Oryza sativa; identical to SEQ ID NO: 32932

SEQ ID NO: 44897 - protein, 570 aa, Oryza sativa
MQTSNFRKKNAAEVDFFMGYGDVNRYEVLEVIGKGSYGLVCSANDIHTGEKVAIKKIHNIFEHISDAARILREIKLLRLLRHPDIVEIKHIMLPPSKMDFRDIYVVFELMESDLHQVIKANDDLTREHYQFFLYQMLRALKYIHTANVYHRDLKPKNILANANCKLKICDFGLARVAFTDAPTTVFWTDYVATRWYRAPELCGSFYSKYTPAIDIWSIGCIFAEVLIGKPLFPGKNVVHQLDLITDLLGTPSLDAISQVRNDKARKYLTCMRKKQPASFSHKFLKADPLALQLLRKLLAFDPKDRPSAQEALADPYFNGLAKVEREPSCQPIPKMEFEFERRRATKEDIKELIFQEILEYHPQLLKEHISGTERPNFHHLSVVDQFRKQFTQVEENLNGSGAAVSLQRKHSSLPRSTIVHSAAIPAKDYKHVASSSTKLAVDGSWNAQIQGVHANIAGEPSTIVRPAVSSERSLAPTLQWQPNMTHFLNHALCYQNTVFSGSLLDATGPAQAIPRTTPYVDYRSGNLDLYQHHVSREDVQSDTATAQAHAASHGPVPAVSYSLPGTYRIT

SEQ ID NO: 44898 - protein, 451 aa, Oryza sativa
MAAQSSTPSPQDGSGRGEFSDNLVLQTPQPMREDYIQNAVNFLGHPKVKGSPVFYRRSFLEKKGLTKEEIDEAFRRVPDPQPNSTDVAAVASQQAGIANQSAGVQPYETVQAPQAINTGPIVPHAQPQLSWSRTLIGVGVFLGVGASAAVILKKLFVPRLKSWIQGAHVEGDEISGNELKSKFYEEIKAAIQDSASAFSDIAKTNQELLASKDEDKKILTKLAQAFDSQAEAFRSLSDSLNRMSENRFYQYNLMEDHFQSAPWNGPTTNSWRASQQTNAYNTSPRSDFDSGRHPFMPVPGEPSPGAFPARSYVEQQRMQRPGYGFQPQMSNDRWNPGSPLTNYHGAPPYQQYHHGSTNAIDEAPAPAPVPAPAPPAESPFQRRWVPPQPPGVVMPEAVAAIRQPRQQVAAASRPSESAAATEQPQSGDVAGGAAMANAGNGEAEQEREAAA

SEQ ID NO: 44899 - protein, 704 aa, Oryza sativa
MKKPNVAAKVKAAAAGGADGGSSKGSPSTPASLRVTKLVKGKAKVKAKASREKAAAPAAAAGKEAASLGDAGGNADASPAAPALRPAAVADADGASKGSPSTPASVKKTSRLNKVKAKAKAAAAAAASGSPSVGAAGGNADASPAAPAPRSATVADGSAARVISTPAAATAEASTPKRRLKLKPKLAEANANANAVVATKNGVGADNNDGDAIKKRKREIAGERTSNVKERRKEEEGSKKEERLDSKGGGLIFMCNAQTKPECFQSRLFGYPRGKIGIVEKIRPGMRLFLYDFDLKLLYGVYKAVSKGGLDLVRDAFSGKFPAQVKFKIDKDCLPLPESRFKDAIRENYSAKSKFNPELNSRQVHRLIALFESVSVPQPAPQKPLEEMHHYEGKTQPHQYEERRSSLPVMHVPPPKDLYRATRFDPHPVDYRIDHSLSNAHDGPHIHYQQTLVARESQRVPLDIEPRLVPHALEPRHGPSIPEIQHVPHAYYRHLAPSDVPYYRSQVDPLPDRVAARTVADPFLSRDYTAVPATRSDGAARVEELRRIGDIASLGARVEELYRPGELAARGSRVEELYRPGEIVARGSRVEELYRPREVAAHSARMEDLYRPGEIPIRGARVEDLYRPGEISARAVRVEDLYRSDQRITHAVDLPLHAPYPTAHYEVPNPAYSDISQRYASTRLNAPGASVSSLYSFPGAPAYR

SEQ ID NO: 44900 - protein, 787 aa, Oryza sativa
MSPAVRTKRPPPQPLPRRPPPPKPSAESKPAKARAPATSLLESLKSFKSRLAAGPPLAPTPKSFKSYAETCASILRLCSGAAAASGTAAASSNLPLVLSIHAHALVSGLTADGSVASHLLTAYAAFARAADRDGAFRDCVSVVGAASPFAYDFMVREHVKAGDIVSARRLFDGMPERSVVSYTTMVDALMKRGSVRDAVELYRQCPLCSVPFFTAMIAGFVLNELPKDALGVFHEMLSCGVSPNEITLVSVIKACIGAGEFDLAMSIVGLAMKSNLLDKNLGVRNSLITLYLRKGDADAARRMFDEMEVRDVVSWTALLDVYAELGDLEGARRVLDEMPERNEVSWGTLVARHEQKGNAKEAVSLYSQMLADGCRPNISCFSSVLGACASLQDLRSGRKIHNQTLKMACSNNVFVSSALIDMYCKCKQLPDAQMIFYSLPQKNIVCWNSLISGYSNNSKMVEAEELFKKMPARNVASWNSIISGYAQNRQFIDALKSFHAMLASGQSPGEITFSSVLLACASLCSLEMGKMVHAKIIKLGIKESIFVGTALSDMYAKSGDLDSSKRVFYEMPKRNDVAWTAMIQGLAENGFAEESILLFEDMISAGITPNEQTFLAILFACSHSGLVEHAMHYFEMMQACGISPKAKHYTCMVDVLARAGHLAEAEDLLLKIESKSEANSWAALLSACNIYRNKEMGERAAKRLQELDKDNTAGYVLLSNVYASCGKWKDAAEMRILMKGINLKKDGGCSWVQIRGQYQAFFSWETKHPLLPDVYEMLDLLTWELIA

SEQ ID NO: 44901 - protein, 289 aa, Oryza sativa
MAKDALALMAHLGWRKAHVFGHSMGSMIASKLAAIAPERVASLALLNTTGGGYQCIPKIDWQTISLACRFLRARTPEQRAGVDLDVHYTREYLDEIVGSNTRRQMLYQEYVKGLSSCGMQSRHGYEGQLNACWTHKLTQKELDRIRSSGFLILVIHGRDDVVAQLYHARRLAEKLQPAAKLVELHGGHLVSHERTAEVNMSLMEMIKASKSNTDQGEWSNLPKKSDDLLLAGSDSRLAKRECNIIVIYNLLGKLQLILLFFFGVFYIILEHARRVLRVLKPVRVSATSL

SEQ ID NO: 44902 - protein, 301 aa, Oryza sativa
MPRFTARVAVIEALKAKGLYKETKKNEMCLGVCSRTNDVVEPMIKPQWFVNCNTMAKAGIDAVRSKRIEIIPQQYEQDWYRWLANIRDWCVSRQLWWGHRVPAWYVVLEDDQENILGSDNDRWVVARNESEANLEAHQKYPGKKFELHQDPDVLDTWFSSGLFPLTVLGWPDDTADVKAFYPGSVLETGHDILFFWVARMVMMGMQLGGDVPFQKVYLHPMIRDAHGCKMSKSLGNVIDPVDVINGIPLEGLLKRLEEGNLDPNELNIASDGKKKDFPDGIAECGTDALRFALVSYTSQSD

SEQ ID NO: 44903 - protein, 266 aa, Oryza sativa
MEVVGGVSSLSASSPAPARARLRQLSPGEASGGGSFLLMRTAPRSRLQAAARPARRAALVVEARGRGWSDRRSQQQRMPQLPKIEDDGNPRFVIFIRTANVYFWYPLNIVTGGTTAKIMLAAKDNFLGKYIYKDTLARNLAAVIYKDEDDIIDTAKEQYRVLKTDNEFRYGYKVVENGNLRSALTTSNVIELPKKEELKTVVDKVKDFFGDVTSGAKESFAQITGSVSAEAEAPVEEEKPWVKRRNERKRKQKEKQNQKQGIKTES

SEQ ID NO: 44904 - protein, 276 aa, Oryza sativa
MASAAVAAAAAPLRRSLLPSLNPSCLFSSLASSSHRLSLPRALRPAGPLPSDVEDSDDSNAGDGAGEALRKSRNDLKREARRAVQWGMDLAKFSPLQIKRILRAASLDREVFDALMLVKRFGSDVREGKRRQFNYIGRLLRGAQPELMDTLIQYSKDGDDNRLLALMSENTFLMEDEEIEDLPCNEEEGDKEHIEIADRWFEGLLSKDISVTNEIYAIHNVEFDRQELRKLVRTVHMVQDNIENEHEEESTMKLLGAKKQLLCFLRSIAKEAYVKS

SEQ ID NO: 44905 - protein, 113 aa, Oryza sativa
MKREIEDLKTNAKVFQLSKCTTCTFTLDLPAVHFMCMHSFHLRCLGDNEKECPECAPEYRSVMEAKQKLEHNARDHDLFFRQLRGSKDGFSVVADYFSKGIVSKTAIPPENGR

SEQ ID NO: 44906 - protein, 345 aa, Oryza sativa
MARSARARRHVARQLRSAPYPIPSYRWKAMKESNRKKTLPAAQKMDWEDANCSVCMEYPHNAVLLLCSSHDKGCRPYMCGTSHRHSNCLDQFKKAYTKGALLEELPANTVGTNLDSTPLIAGEKNESVDLACPLCRGKVKGWTIVEPARSYLNGKRRTCMQDGCSFVGTYKELRKHVKSEHPLAKPREVDPILEQKWRLLEIERERQDALSTITATMGRAIVFGDYVLDLEDEDDLDDVESDEDDNANGHGTDNTRRMLMFLMRQVARHHQNQRLQNAIGTTGGAEDNYAVSSGANATTPYHYPLEGDDEDDLVMAGGGSTGMVRPERRRRRRRRNRERLFLGAN

SEQ ID NO: 44907 - protein, 246 aa, Oryza sativa
MMLWLTERFILCWAMQDYTAKLSDFGLAKEGPQGDATHVTTRVMGTHGYAAPEYILTGHLTAKSDVYSFGVVLLELLTGRRSVDKRRRGREQNLVDWARPYLRRPERLHRVMDPSLEGGYSDKAAGKAAMVAYHCLHSVPKSRPHMRDVVAALEPLLQTSCGDVLAGPFVYTVPSAAAVVVAAKDDGKKAAAAAGEDGEEEVAAAAKAKRRYVASAVHAEGAMRKGEHRYASSVSGSPRQSRDRGG

SEQ ID NO: 44908 - protein, 368 aa, Oryza sativa
MALSDRSRESLLPSFLYSTAGARPYTAGGGGAAFRLPAAAAPGGVGGGAPIEIQAPREKIEMYSPAFYAACTAGGIASCGLTHMAVTPLDLVKCNMQIDPAKYKSITSGFGILAKEQGVRGFFRGWVPTLLGYSAQGACKFGFYEFFKKYYSDIAGPEYAQKYKTLIYLAGSASAEVIADVALCPFEAVKVRVQTQPGFARGLGDGLPKFIKSEGALSLYKGIVPLWGRQIPYTMMKFASFETIVEQIYKHAVPVPKSECSKSFQLGISFAGGYIAGVFCAIVSHPADNLVSFLNNAKGATVGDAVKKLGLWGLFTRGLPLRIVMIGTLTGAQWGIYDAFKVMVGLPTTGGVTPAPSTSDAGLKAVSA

SEQ ID NO: 44909 - protein, 399 aa, Oryza sativa
MDAARASLLLAGGLAVSTSTSAVATAAQTVSIPHLSPHTRRRRQRRFLRLASAAASSPPPLPAASAQPHCSRWVVVMERPPAPAGGGEVSRAEAVDHYVATLARVLGSQEEAQMRIYDASWDGSYEFSCEIDDEASRNLAKMPGVLAVKPDTDKVDMSEKDNHGSGLSAANLGNFSDAVSNHSSSSGENEFWLVRMEKPGVEVVTKAQMVDHYTQTLMKVLGNEKDAQVSIYHISWERDYGFCCHIDEECAKELADVSGVLSVQPDTNFGSDNKNYKGDDSFKSSEATQAEVKTKRLFVTGLSFYTSEKTLRAAFEPFGELVEVKIIMDKISKRSKGYAFIEYTTEEAGGAALKAMNGQIINGWMIVVDVAKHRSRDRQPPYSASGRSNQVLRSRYHTG

SEQ ID NO: 44910 - protein, 1101 aa, Oryza sativa
MNRSKAKLSGVLHKGFKPDKCKTALRMALARIKLLRNRKEVQVRQMRREVAQLLEADQDQTARIRVEHVIREEKFMQAYDLIEVYCELMVARMSIIDSQKTCPIDLKEAIASVIFASMRCSDVTELADVRKHFTSKYGKEFAAAALEVRPDSGVSRLVIEKLSAGAPDTQTKIKTLTSIAEEHNIKWEPKAFEEKLPKQNDDLLHVTSTYPGGNIPTRGSSASNSGMPTSQPAAPSHSYMESSNSHMSTAHSYSSAEVPDNRAPYVTANSNAFPQENRRGSDAPMSPRSQHGPNSFSHDTAGGSNVSRPYSQYGATVPDTDTASRREEFNHSRERKSSVSGSNWNIEFKDATSAAQAAAESAEMASIAARAAAQLASRGNLSAEQNTGAFESPAYTHETTPRKQQAEHLMKDGQRSSNEQSSGAYDPRLISSNDARKDGGRTETSRVGSQNMPTNSLGQSPPYSPHIHSDEYDMPTDPHRSHSPDPQYSDDSSEKESNFGRPEDHQFNLPGERLSEAQLGGHNIKDTESKHATFDQENTDNYYSNYSSSHGTFTHGSSTIWDSQNDKAGPDSSAVVFDQYDSDVGEENLLDPFSSKHTEEPTVEDHKGFSSADWGQQHRNESPVNHSSSTLFSGTEANRKDVSSPHSYDNVPPTFDSDGVSSDEEMTTGMHARSLRSHSRGSDFSESRENIISGKVVHDVNENIEDHVSMSRKNYLNSSGSNAFNKERYSESSPRSDYSWVDGELDRTKIRDLEEERVPHKLEGASSLTTGENKNQLFSLGRQTSTSSADYDEGDPGLNFGRLTPGLRNKLRQPPPYIKDSGNTSLHKVPTAIEKSVHSEEDTSFGNTRNTSTGMARSSFGADYNSELHDQNQSVGASVEARSTMRNYYGSEGDRGKLSEQSYNAPSSVMNKSSGGVNSSQDLYHEKPGAGARRGTTTKTAKSYFDSDDSEDELAQRKEVQTKWSREQIQSRRTQMTSDTKKETGVRVGVQHADETEAKSPAGSFSRFTEQRRDSPVYSRVPVPRTSPKPVRVEPPLGKGKSQEADLNTVSVTGKEENTESPAETPKESTSKTAPSHVHPKLPTDYDSFAAHFMSLRTNRR

SEQ ID NO: 44911 - protein, 268 aa, Oryza sativa
MADEKHAEKREEVSELTPFDPTKKKKKKKVVIQDPSDEVDKLAEKTENLTVTEPGELNFTGMKKKKKKPVDLDLSINDIGDGEDILDDQVVEEEEGEGIVLGGAPRYPWEGTDRDYNYDELLGRVFNILRENNPDLAGDRRRTVMRPPQVLREGTKKTVFVNFMDLCKTMHRQPEHVMMFLLAKMGTSGSLDGQQRLVIKGRFAPKNFEATLRRYINEYVICNGCKSPDTILSKENRLFFLRCEQCGSSRSVAPIKAGFVAQVGRRKA

SEQ ID NO: 44912 - protein, 1076 aa, Oryza sativa
MAANAGMVAGSRNRNEFVMIRPDGDAPPPAKPGKSVNGQVCQICGDTVGVSATGDVFVACNECAFPVCRPCYEYERKEGNQCCPQCKTRYKRHKGSPRVQGDEEEEDVDDLDNEFNYKHGNGKGPEWQIQRQGEDVDLSSSSRHEQHRIPRLTSGQQISGEIPDASPDRHSIRSGTSSYVDPSVPVPVRIVDPSKDLNSYGINSVDWQERVASWRNKQDKNMMQVANKYPEARGGDMEGTGSNGEDMQMVDDARLPLSRIVPIPSNQLNLYRIVIILRLIILMFFFQYRVTHPVRDAYGLWLVSVICEIWFALSWLLDQFPKWYPINRETYLDRLALRYDREGEPSQLAPIDVFVSTVDPLKEPPLITANTVLSILAVDYPVDKVSCYVSDDGSAMLTFEALSETAEFARKWVPFCKKHNIEPRAPEFYFAQKIDYLKDKIQPSFVKERRAMKREYEEFKVRINALVAKAQKVPEEGWTMADGTAWPGNNPRDHPGMIQVFLGHSGGLDTDGNELPRLVYVSREKRPGFQHHKKAGAMNALIRVSAVLTNGAYLLNVDCDHYFNSSKALREAMCFMMDPALGRKTCYVQFPQRFDGIDLHDRYANRNIVFFDINMKGLDGIQGPVYVGTGCCFNRQALYGYDPVLTEADLEPNIVVKSCCGGRKKKSKSYMDSKNRMMKRTESSAPIFNMEDIEEGIEGYEDERSVLMSQKRLEKRFGQSPIFIASTFMTQGGIPPSTNPASLLKEAIHVISCGYEDKTEWGKEIGWIYGSVTEDILTGFKMHARGWISIYCMPPRPCFKGSAPINLSDRLNQVLRWALGSVEILLSRHCPIWYGYNGRLKLLERLAYINTIVYPITSIPLIAYCVLPAICLLTNKFIIPEISNYAGMFFILLFASIFATGILELRWSGVGIEDWWRNEQFWVIGGTSAHLFAVFQGLLKVLAGIDTNFTVTSKASDEDGDFAELYVFKWTSLLIPPTTVLVINLVGMVAGISYAINSGYQSWGPLFGKLFFSIWVILHLYPFLKGLMGRQNRTPTIVIVWSILLASIFSLLWVKIDPFISPTQKAVALGQCGVNC

SEQ ID NO: 44913 - protein, 74 aa, Oryza sativa
MFCCARFPRMDTGCCSVIATIARHSVPSCTITNAFSGISANVKSGVKSELQRQVRTRLFGSLPAGCTQEVIQDQ

SEQ ID NO: 44914 - protein, 490 aa, Oryza sativa
MAALRQGDDPAIKLFGRTIPLLLDPPAAAAAAADEVMPNLGNGVKTNNDLPLVSDKLLIVKGIPFCPNNSKKNDLQGISRPDGRIEIDSMTEDVKTEPDGSVPEKILKKPDKILPCPRCNSMETKFCYFNNYNVHQPRHFCRNCQRYWTAGGAMRNVPVGAGRRRNKHVSKYCQAMMTCNNTVAPGDVSDVVHHQVITHGSSLLPATLKENETPTEFISEVPPCKSSASILDIGEPNDTDLVPLASGDNKEEKSCASSVVVSSCSENLMPDNAIMKEPNNRSGCCNGVALPFPTGPALVLPWSLGWNSVALMPATQCSMQPVLGLKGGIPCPPSWPPQLMVPAPGICTPVVPIPLVPPLWRCFPGWPNGMWNAQCPGGNTTVLPSTAPNKISCSGSSSLVLGKHSREESLQEEEKTRNYLWVPKTLRIDDPAEAAKSSIWATLGIKPDDKGIFKSFQPNVAKNGTAPESPQALQANPAAFSRSQSFQETT

SEQ ID NO: 44915 - protein, 176 aa, Oryza sativa
MAAGLFYCLLLLAGCVAAEINSPCFLCFYTILAVVMMLLEAALAADLFFNKHWIQDLPYDRTGELDNLLSFIQTNLDLCKWAALAIVATQALSLLLATILRSMFSTPSADYDSDEDFVVIRRPLLVAQGAPAYLPTTADTRGFHPGLWSSRMRHKYGLNSSNYTYNTLDPNAPPPQ

SEQ ID NO: 44916 - protein, 488 aa, Oryza sativa
MHPSGEYSPYYQPYPSPTSAPLATYPSASAPPYTPYPATDYAAPAAYPTYPPPPADPPQYAPPPAAPQPQPYYPYEPPPHNPAPSPYPSLDRAGSYGYGSGSQELYPPKPAGGGWSDDGVYAYSGGGGDAPEPYGARGTAPRSNSPLFDDYGRSIGSTKERGGGGGGGGGSSASPKVVRAVPKVETSEDTSGGVQKFRVKLLPEGAGSPMDVLCQVGLDGIRMLDPNTSRTLRIYPLETVTRWDVLDSSIFAFWSKSSVDFEARRIRLKSNSYTTNTILDTVTAASVQFKEMGGSSISRSRAIADAAKPPEQQNDRRKNFLDWRNLMKPMNEEKDHWVPDEAVTKCTACTADFSAFNRRHHCRNCGDIFCDKCTQGRTPLTTDADAQPVRVCDSCMAEVSQRLNNAREAANRPIVHSHEDLAKKLKDAMDINKKSSSASSRSTDGSSRRMREVACPTCTVHLQVQVPTSGSETIECGVCQQPFLVSAR

SEQ ID NO: 44917 - protein, 61 aa, Oryza sativa
MGRRGGGGRAGGAWIGGCVLALAATLVVCVLVIRGAGGMCSGVLCAVLVCSVGVLGASLLV

SEQ ID NO: 44918 - protein, 809 aa, Oryza sativa; identical to SEQ ID NO: 42835

SEQ ID NO: 44919 - protein, 297 aa, Oryza sativa
MEEEGEGLCEIARLPEVLLSAAISRASPRDACHAAAVSPAFRAAADSDAVWASFLPRNLPDLADGELSPAPASKKELFLRLSDGPYLLSDRLMSMWLDRETGAKCYMLSARSLVIIWGDTPHYWRWIPLTDSRFAEGAELIDVCWLEIRGRIHSKMLSPNSTYAAYMVFKIADEFYGLDAPFQEASVSLGGRGSTKIVCVQSYDSEDEEVPENYWPMSIGPLLRRRARRRDRRLVLDEGVTVPQKRTDEWMELEMGEFINEEGEDGEVCFSLMETKGGNWKRGLIVQGIEIRLKKSG

SEQ ID NO: 44920 - protein, 417 aa, Oryza sativa
MATRVLSQNLRKLASFSLLNLSQRAPISPSPEPLRPAIASFGKCLNPFYQFSPPWMVRWASHSSVNLVLSDDGKPKFEIEEVEPSKKRGYLTKKRLKLQRKREKKKRKEANKNDPRRIRPKGKKIKQKFPTPEARLKYKIEKAKLKEAMLVEKLKKYEIAKAQGPMAKQDDLDGEERFYLKKVSQKKSNYVPVGRRGVFGGVILNMHLHWKKHETVKVICKPCKPGQIQEYASEIARLSGGIPINTIGNDTIVFYRGKNYVQPDVMSPVDTLSKKKALEKSKYEQSLETVRRFIAVSEKELELYYRHIALYGNPQSQNVDPVYCDDRRAASLKMEEPSQGKDLSHMDNDGFSDITDASESDEEANPSEYDDNDDETGDNIGTVLYDHGGFKLNGNSVDDHLSPALAVSMFMLYGTWI

SEQ ID NO: 44921 - protein, 136 aa, Oryza sativa; identical to SEQ ID NO: 33121

SEQ ID NO: 44922 - protein, 161 aa, Oryza sativa
MLNFISDKEDSDLARSKLVRARLLVNDSIRIAEGILYDSRKDLNKLNNGRTTDRDKIAATSALLQALEVAGLLESGMKNMLTPGEQDLYPVEQALNKCVSLYKEPHTRKFVSKTLKNEYIRCLRRLTGIVQSDFAVSEALTLQGLLAEAQQILEELGHESN

SEQ ID NO: 44923 - protein, 243 aa, Oryza sativa
MAHANKNHIESFPPPGKKITIVFVIGGPGSGKGTQCAKIVKQFGFTHLSAGDLLREEAKYDTEQGTMIKNLMNEGKLVSSDLIVKLLFKAMRESGNDKFLVDGFPRNEENRHAYENIIHIEPEFLLFIDCSKEEMERRILNRNQGRDDDNIDTIRRRFDVFQQQTLPVIQYYEKRGKLRKVDGNRQVDEVFEDVKAIFAQLNNQKIHGGQQASGLSRAQMNPLKRWFFDFFCGCFGTKEEARN

SEQ ID NO: 44924 - protein, 269 aa, Oryza sativa
MVFFADEDANSASYNSCTVNCHEESWGSNEGCSLLDIYNPDDAFSFLLDTPSEFLGSFTALYDEVVPIDSLVNISGRCGVFPLTESTTEASIGNEPCRSEGDMLFSNSEVLEWLNPHLAEEDLPNLVDFTELNSHAVSKEQGARKVTLVLDLDETLVHSTTEQCDDYDFTFPVFFDMKEHMVYVRKRPHLHMFLQKMAEMFEVVIFTASQSVYADQLLDILDPEKKLFSRRYFRESCVFTNTSYTKDLTVVGVDLAKVVIIDNTPQVNC

SEQ ID NO: 44925 - protein, 250 aa, Oryza sativa
MAYRRKQGPIAADDRRSSYPQPPQGSSSSYSYTSIKSMNEPKLGLWETLARKAKGILDEDGTAHKSDEYTKQKTPRKFDSSTGAQESRSRWSFENHSRTGDTGSRTRSEALAASVNQLGGRIRDALEEGLTIVDNKTSNIIEETKKIQIRRKQANSNSYMPNPAFDTLRPPNLSHDQAETAAQETQLKASRDVANAMAAKAKLVLRELKTVKADLAFAKQRCAQLEEENKFLREAKQKGSKTEEDDDLVC

SEQ ID NO: 44926 - protein, 113 aa, Oryza sativa
MLALILILCRLATRLSSSRVQPSSRLLSCCKWRRQARDSNCISCKKIGFMAIPMIFLQAVQLLSQACCLPLPELLDMKTESRNAESRFAKSSNINMLCIPIETCWVINSLVFF

SEQ ID NO: 44927 - protein, 144 aa, Oryza sativa
MSSPSKRREMDLMKLMMSDYKVEMVNDGMQEFFVEFRGPTESIYQGGVWKVRVELPDAYPYKSPSIGFVNKIYHPNVDEMSGSVCLDVINQTWSPMFDLVNVFEVFLPQLLLYPNPSDPLNGEAAALMMRDRPAYEQKVKGDVV

SEQ ID NO: 44928 - protein, 218 aa, Oryza sativa
MLAKSPSLPFLTATETAAISLSPSCDLFSSPNARFSKKKYGGRLTIQPNIEFGKTQNSRTQRKWRTFSADQAQATVVDAGDNKTWEEAKQILTSLDYSIEDADKMLKKAFGWIHSPYWSEERKKEVPNAEVVSGVLNYIRTLGLSDDDLRKLLKKFPEVLGCDLDSEVKLNVGKLDSDWGINGKTLRSLLLRNPKVLGYNVDCRGDCMAQCTRCWVRF

SEQ ID NO: 44929 - protein, 705 aa, Oryza sativa
MAAAEQSAEQFRGQARLPGFAAPRRYDLRLVPDLDGCAFTGSVDVSVDVTAPTRFLVLNAAELEVSPGGVQFKPHGAEQELHPAEVTNVPEDEILIIRFNEVLPVGEGTLVIAFKGTLNDKMHGFYRSVYELNGEKKNMAVTQFEPADARRCFPCWDEPSFKAIFKITLEVPSETVALSNMPVVEEKVNGLIKAVYFQETPIMSTYLVAVIVGMFDYVEAFTTDGTRVRVYTQVGKSAQGKFALEVAVKTLVLFKEYFAVPYPLPKMDMIAIPDFASGAMENYGLVTYRETALLFDEKHSAAANKQRVAVVVAHELAHQWFGNLVTMEWWTHLWLNEGFATWVSYLAADNFFPEWNVWTQFLEESTTGFKLDALVGSHPIEVDVNHVDEIDEIFDAISYRKGAAVIRMLQSYLGAETFQKSLAAYIEKFAYSNAKTEDLWAALEEGSGEPVKTLMHSWTKQQGYPVVNVKLKDGKLEMEQTQFLSSGAEGVGQWVVPVTLCCCSYSRQEKFLFNGKQEDFNLSGLVECQKKEDFWIKLNVNQTGFYRVSYDEELASRLRYAIEANKLSAADRYGVLDDTYALCMAGKQKLVSLLHLIAAYKDETEYTVLARVIDTSLSIVEMVAVAAPEGLGKLKKFLIDFLEPFAQRIGWDAKSGEGHLDALLRGTLLTALAELGHEATINEAVRRFNIFVEDRETPLLPPDVR

SEQ ID NO: 44930 - protein, 321 aa, Oryza sativa
MPPPLLLRLRSPAPPAAVAAGSLSRRRRRRRAGLAPVRASWQELAGVLVFSAVPFTAVKALANSPLGARLCRRLDDRKAAAAAEADALRSAARQARTASSWYGDERPRWLGPVPYEYPAHLTGEYPGDYGFDIAGLGRDPVAFANYFNFEILHCRWAMLAALGVVVPELLDLFGVVHFVEPVWWKVGYAKLQGDTLDYLGIPGFRIAGGQGVIVIAICQALLMVGPEYARYCGIEALEPLGLYLPGDINYPGGALFDPLGLSKDPVAFEDLKVKEIKNGRLAMVAWLGFYIQAAVTGKGPIQNLVEHLSDPLHNNILSSFV

SEQ ID NO: 44931 - protein, 145 aa, Oryza sativa
MPKIKTSRVKYPEGWELIEPTLRDLEAKMREAENDPHDGKRKCEALWPIFRISHQKSRYIYYLYYRRKEISKELYEFCLDQGHADKNLIAKWKKPGYERLCCLRCIQTRDHNFATTCVCRVPKHLREEKVIECVHCGCRGCASGD

SEQ ID NO: 44932 - protein, 866 aa, Oryza sativa
MAPTVLMVAEKPSIALSIASALSGGRMSTRKGSTDVHEFDGMFQGSHAFFKVTSVIGHVLSVDFPPAYQNWEGTDPMDLFVAPVLRSECNPKAHIRRHLAQEARGCTYLVLWLDCDREGENICYEVIDCTGIPKSEVGRRIFRAKFSSVTEKDIMDAMNNLVLPSKDEALAVDARQEIDLKVGVAFTRFQTRYFQGKYGNLDSRVISYGPCQTPTLGFCVQRYQQITTFKPEKFWSLKTYVIKDGNEIQLEWDRKKLFDFDVTVMFQKMVASDGILKVTDISVKEECKARPPGLNTVNLLKVASSALGIGPQTAMHLAERLYTQGFISYPRTESTAYPSSFDFRSALAALAHNPLWSNDVRTLLDTGFVKPKQGHDAGDHPPITPMRLATEEALGTDAWRLYQYICQHFIGTVSPDCRYTRTSIEFTSGGETFHCVGNRVTSKGFTSIMPWLAVSENNIPAYKKGDAVSIHKVDIYEGSTTPPDYLSESELISLMEKNGIGTDASIPVHVNNICERNYVQVNSGRRLVPTPLGTTLIRGYQCIDADLCLPDIRRFIEQQITLIAKGEADHLQVVQHVLQQFMKKYSYFVKKIENMDALFEAQFSPLADSGRLLSKCGKCARYMKYISTQPMRLYCVTCEEVYYLPQNGSIKLYKEIICPLDGFELLLFSMVGPDAKSFPLCPFCYNSPPFEGIDKLFGALKLDDTGKVGKGAGMPCFLCLHPTCKQSMITQGVCACPECTGTLILDPVSAPKWRLYCNRCNCIVLLPHAAHKISTTDKKCPTCESTIIEVDFNKKTTPLKDGATLHEGCILCDELLHSLIEMKHGKSFFMRRGRGRGRGRGRGRGSSRGRRGSSRHDDPKMSFRDF

SEQ ID NO: 44933 - protein, 321 aa, Oryza sativa; identical to SEQ ID NO: 32538

SEQ ID NO: 44934 - protein, 499 aa, Oryza sativa
MRWLLLALFLVALVSNGAAVHGAFNRFSFPEDFIFGTGSAAYQYEGAVNEGGRGPSIWDTYAHIPGKVEDGSNGDVAVDFYHRYKEDLNFVTDMNMDAFRFSIAWSRILPNGTISGGINKEGIAFYNSLINEVISRGLKPFVTIFHFDTPQALEDKYRSFLSENIVKDFVDYADVCFREFGDRVKSWNTFNEPMIFCAGGYGSGTKAPGRCSPYVSKKCAPGDSGNEPYVAGHNLLLAHAEAVRLYRQKYQATQKGQIGITQVSHWFVPYSDAAADKHAVRRSLDFMYGWFMDPIVFGDYPGTMRKLVGDRLPKFTAEQSELVKGSYDFIGLNYYTTNYAKSVLRRPSKLKPAYATDNWVNQTAYRNGVPIGPPAFTKIFFTYAPGLRELLLYTKRKYNDTDIYIAENGTDEANNSTIPIAEALKDDNRISFHYQHLRFTQLAIKEGVKVKGYFTWTFMDDFEWGDGYTGRFGLIYVDRETLKRYRKKSSYWFADFLKR

SEQ ID NO: 44935 - protein, 636 aa, Oryza sativa
MVDINPDHIFEVPDTPDRIQQSTCPVSSPAARRGIAKAAGTPLPSRRIKFKITNNSIQGQSSRGNASSVSPAPLDAGDIFKQAELARLLPVAEDPEARSSLLKSGRTIETSVENEKVPKKSGLDQSMNISNNINCRGSGERDRSCQIRKGDISARDANSCNADFLCLGSGLPTTTVGKPRNRMGTITFKKPKEVVGANVCSVSSPREGKGEEITDKGTTGISSSTPSIVPQRHVGQRKLVRNGCISPSNIAKRSLKVDEKREICSTSGLLHYPDTQVDASGKGNVIDLTDSSPIIRRQGNTATDMEKRSGRKSAIGRAGETVIPLAANQVNSIFSEGNKNKGKEISHDVVGAKQSGEAYMRRVCPRSMGDSSSVANNDHTGIGSEQGWRTTHNNTSNIPMPLSGKMTNSCGRESGSSEQSNLDRASAAGDSNNSIEGGDNNNSIGGAKTLQTASFVNRTIRISSRKRKRIASSYHPGESSSSVDVDQPRVASSDSTAARNHTTHRHHIPVVDIDDICSPEVRPSLSGIGSSNRTSVDPNIREQLESDELLARQLQEQLYNETPHVVPTEEIDAIIAMSLQHEDNAQPTSRTARRFQSTTRGPRVLRSTVPQHANRVRYDSNNRRIIYQIPCCTYST

SEQ ID NO: 44936 - protein, 262 aa, Oryza sativa
MLGSDQLEHRPAPSAPRAEPDDVADDVEVEAFRDIHPEPSPPHLPPPPLRQPSWDAASHRSLSSSGAGGGGDVELFATMSREFTAMVAAGSSSAPSPDVPGDAPAAADLNLLQLARIGENEPAAEANALAIVPAAAGSGPPAPVEQVKKEEVEAKVAAWQAEEVAKINNKFKREEVVINGWESQQVDKATAWLAKIERKLEEERAKATEKARNEAAAARRKAEERRASAEARRGRKTAEVLDRANFCKAAGRVPSKRSFFSF

SEQ ID NO: 44937 - protein, 392 aa, Oryza sativa
MPTSGPDAMQPALRRRRRRQGFLLPFACLSAALIAAALLPGAAFADGVTPSEARRLRDEVKDMFYHAFDGYMQHAFPLDELRPLSCQGEDSLGGYALTLIDSLDTLALLGDKERFDAAVEWVGKNVRFDINKTVSVFETNIRILGGLLSAHLIASDYATGMRIQSYDDQLLHLAADLAQRLLPAFDTPTGIPFGSVNLLYGVDENESKITSTAGGGTLTLEFGVLSRLTNDSVYERVTKNSVRGIWARRSKLDLVGAHINVFTGEWTQKDAGIGTSIDSFYEYLLKAYLLFGDEEYLYIFQEAYKAAMHYLHHDPWYVEVNMNSGATVWPLFNSLQAFWPGLQVLAGDVDPAIRTHAAFFSVWKKYGFTPEGLILLHPLFRMDKGATRCGLN

SEQ ID NO: 44938 - protein, 193 aa, Oryza sativa
MHLARAASAPPAGAFPCPSLASSCSRGARVRVCTVHELSAGVLLPPDPAAHRRAVQAAPGRGAGLRADTLLPRPLRVPLHRRGPRAAHPRPPPRSPRRRRPAARGGEAGPPAGRVHATRRPVGGLPRRRERLPGHVQGVPGEVGGDGRGEAAGQLHPRLPHRLHRPVDRPGRGDVPALSVPPAATSTKGPAWQ

SEQ ID NO: 44939 - protein, 865 aa, Oryza sativa
MSAAATTGGGGERRSLRGMFKFADRVDVLLMALGTLGAIGDGCSTNLLLIFASDVMNSLGYARAGAHGGAAAATGVDFMREVEKSCLNFVYLAFAVLAVAFMEGYCWSRTSERQVLRIRYLYLQAILRQEVGFFDSQEATTSEIINSISKDASLIQEVLSEKVPLFLMHSTVFISGLAFSTYFSWRLALVSFPLVLLLIIPGLIYGKYLLYLSRQSRHEYTNANSLVEQALGSIKTVYSFTAEKRIIQRYTAVLDKTIKLGIRQGIAKGLAVGFTGLSFAIWAFLAWYGSRLVMYHHESGGRIYAAGISFVLGGLSLGMALPELKHFTEASVAATRILDRINRVPEINADDPKGLILDQVRGELQFESVRFVYPSRPNMTVLKDFNLQIPAGQTVALVGSSGSGKSTAIALVQRFYDATEGTVKVDGVNIKELQLKWIRSKMGLVSQDHALFGTSIKENILFGKPDATMDELYAAAMTANAHNFIRGLPEEYETKIGERGALLSGGQKQRIAIARAVIKNPAILLLDEATSALDSESEKLVQHALDQASMGRTTLVVAHKLSTVKNADQIAVVDGGTIAEIGTHDELINKGGPYSRLVKLQKMVSYIDQEGGDQFRASSVARTSTSRLSMSRASPMPLTPGISKETDSSVSPPAPSFSRLLAMNAPEWRQAVIGSLSALVYGSLQPIYAITIGGMIAAFFVQDLKEMNAIISRYALIFCSLSVISIVVNLLQHYNFAYMGEHLVRRIRVQVLEKILTFEAAWFDEETNSSGSLCSRLSNEASLVKTLVADRISLLLQTASGIIIAVTMGLIVAWKLALVMIAVQPTTMICYYAKKIVLSNVSRDLAKAQHQSTQIAIEAVTTTGW

SEQ ID NO: 44940 - protein, 441 aa, Oryza sativa
MPLRDGVQPGGGAVRAGDAGAPLQAHLPGEQGADAGSPGHLLPAGRLPRPPPPHRLPRLLPRVHPRLRPGHRGHRAPLPPLLGRPVRQHLPRDEDLRAECGIAVHLRGGGDALHRGAEAVLPDAGEGVQLDAGEPAGHPVPQGHEGPEEAGRHCGPHHLCPARAAAGERPARVVRGRPRGPHRRLDRRQRHRRHLRRPRHHRQRPHLDGQVPRRPPRRPQGRHRRAAADCQGERGVGRAAVMGGHAADEDDEPGHPGDDEGGVHPLLHLQGGRGGRGIPRVPDPQGLESATSVPQHPPQPRPLPLPGKVRPVPVRGQHHEPTLPCFCSLPSLSFPGAADFLAKSVRGLRAVAGMGFPDPASVPSLLQVAPKPNTFMPFGNGTHSCPGNELAKLEMLVLFHHLATKYRWSTSKSESGVQFGPFALPLNGLPMSFTRKNTEQE

SEQ ID NO: 44941 - protein, 223 aa, Oryza sativa
MAGRGSLAGLLPFADANAIVLEMANEVLPVVKGVPVLAGVCATDPFRRMEYFLKQLEAIGFCGVQNFPTVGLFDGNFRQNLEETGMGYSLEVEMISRAHSMGFLTTPYAFNPEEAAAMAKAGAHIIVAHMGLTTAGSIGAKTAVTLDDSVKRVQAIADAALGINPDIIVLCHGGPISGPQEAEFILKRTNRVHGFYGASSMERLPVEQAITNTMREYKRISIK

SEQ ID NO: 44942 - protein, 758 aa, Oryza sativa
MTPSMMAQERGEPLLQSGNGAAGGGAKGWPPPALARTVLKVLMWAVFLTWAAAIFFYPTKPAQAAFEGWMAATKQSLFGITGSIFLAFSAPILIVAALAYVYISAFPSDHIHVEKNKLKTLCFRLWTFPVLVDGPFGVVSAVEFIGIVLFIVYVVYSMTYYAVESVSLISKFGQISLTYSELLLYIIGLRFGSIGLFCMAFLFLPVSRGSVLLRLIDIPFEHATRYHVWLGHLTMALFTLHGLCYVIAWSLEGNLLGELAAWKEIGVANLPGVISLAAGLLMWVTSLHPVRKTYFELFFYTHQLYIIFVVFLAFHVGDFIFSFSAGPIFLFMLDRFLRFWQCRAKVDIISASCRPCGTVELVFSKPASLRYNALSFIFVQVRELSFLEWHPFSVSSSPMDGRYHMSILIKVLGSWTEKLRGIITDAQEQGRNGSESETGRITACVEGPYGHESPYHLMYENLILVAGGIGISPFLAILSDIIHRIEEGKPCMPKNVLVLWSVKKSNELSLLSAVDAQFISSSVSDKLHLDIQAFVTQESQPPLEEGIVGDDQKATGMFVKNGTTMSGLVGTGNNFWAGMYFAASTLGFVLAYALAQAYYVRRLNVFAWWHLGLVFVLCMAAGVALPGGLVVLLWHLSEKRKAEDDRWDAAAAAVPRAQDGEEEAEQTTNGADAADGGVSLAAVKTTRYGCRPQFEAEFAAFAEKAGGGAADVGVLVCGPPGLQASVARECRSHNLGRRGGRRRRAGAVFHFNSHSFDL

SEQ ID NO: 44943 - protein, 229 aa, Oryza sativa
MVAPSPDAGKPLVILLRPLYPEFAAALDGRFRFVLAADADEGNAAEARAVLVPALTPVSADLVARLPKLEIVVATSTGVDHIDLDACRRRGISVTNAGEVFAPDVADYAVGLVVAVLRRVAAAEAYLRRGRWAADGDYPLATKVSGKRVGIVGLGSIGGLVARRLAAFGCVIAYNSRSPKASAPYKFYPSVRELAAESDVLVLSCALTEETRRMVGREVMEALGRAACW

SEQ ID NO: 44944 - protein, 417 aa, Oryza sativa
MWCASCLASACAGCTCNLCASALSAISRRSARLAYCGLFAASLILSFLMRQFATPLLKQIPWINTFDYTQPDEWFQMNAVLRVSLGNFLFFAIFALMMIGVKDQNDRRDAWHHGGWIAKIVVWVVLIVLMFCVPNVVITIYEVLSKFGSGLFLLVQVVMLLDFTNNWNDSWIEKDEQKWEIALLVVTVVCYLSTFAFSGLLFTWFNPSGHDCGLNVFFITMTIILAFAFAIIALHPQVNGSVMPASVISVYCAYLCYTSLSSEPDDYACNGLHRHSKQVSMSALILGMLTTVLSVVYSAVRAGSSTTFLSPPSSPRSGIKNPLLGDDNVEAGKSNSKEIDARPVSYSYTFFHVIFALASMYSAMLLTGWTSAASDSSELMDVGWTTVWVRICTEWATAALYIWTLVAPLLFPDRDFS

SEQ ID NO: 44945 - protein, 271 aa, Oryza sativa; identical to SEQ ID NO: 30721

SEQ ID NO: 44946 - protein, 246 aa, Oryza sativa
MSCEFFLPSPVAARGRWWWWGVCVWFISLFCRASEFLRDYDGAVIQMRMAYSAVAHFLVQWIDCKLAGALGLLKIMIYKVYADGTTALPEWEREASIRQFYGVIFPSLLQLPSGITELDDRKQRRLCLQKFRKVEERVSEVDLERELECGICLEVNAKIVLPDCAHSLCMRCFEDWNTKSKSCPFCRACLKKVNPSSLWLYTDDRDVVDMDTLTRENIRRLFMFISKLPLVVLHVVDLDIYEYRIK

SEQ ID NO: 44947 - protein, 283 aa, Oryza sativa
MESHCKIHVKEGNLMQLACPDTNCRNPLPPSVLKSLLRDDGYAQWESFALQKLLDAMPDLVYCPRCSAACLEVDNDAQCPGCFFTFCTLCKRRRHVGDTCITPEEKIRILKERQKLYSIPEEQLLKEKREIDELINIQEALRDSKQCPRCKMAISKIEGCNKMTCGNCGRFFCYRCNKAIGGYDHFWNGNCDMFEREQDENPQQQDDENFGGDPDEDAELLEPEWVLLTYPCPNCGRRNEKLGTNNHILCIGCRGHYCALCRKRVLRGEQHFGPRGCQQHTED

SEQ ID NO: 44948 - protein, 876 aa, Oryza sativa
MAEVALASLRLAASPILNKLLADASTYLGVDMASELRELETSIMPQFELLIEEAEKGNHRAKLDKWIRELKEALYNAEDLLDEHEYDILKRKVKNGGEDPSPDLEHASSIGSIIKKPMRAASSSLSNLRPKNIKLVRQLKELKAILAKARDFREMLGLPAGSSVEGAQTGHTKTVVVTAATSTPPPKVFGRDADRDRIVDLLTQHKTCAEASRFVVSIVGPGGMGKSTLAQYVYNDKTIQEHFDVTMWVCISRKLDVHRHTREIIESATKEKCQRVGNMDVLQYKLKEILQKKEKVLLVLDDIWFDKSQDVEEWDLLLAPILSSQNGATKVLVTSRSKTLPPALFSEDVIDLENMKDTEFQALFKHHAFSGATIRDLQMCGWFEEHAVKITERLGRSPLAAKVVGSNLKRVMSIDDWKGALTIKIDNLSEPKRALLWSYQKLDPCLQRCFLYCSLFPKGYKYIIDELVHLWVAEGFIDARDTNKRMEDTGMDYFKEMVSGSFFQPFSERFDSTVYIMHDLLHDLAESLSREDCFRLEDDKVREIPCTVRHLSVRVESIIQHKPSVCKLQHLRTLICIDPLVDVGSNIFEQVVLNLKKLQVLYLSFYNTRKLPESIGQLKHLRYLNIKKTLISELPKSLCDLYHLELLYLRPKSRLPDKLCNLCKLRHLQMYSDGLELSRIPDIGRLTLLQRIDSFHVLKQKGHELRQLRNMNEIGGYLSLRNLENVIGKDEALESKLYQKSRLEGLTLEWNDANNMNPENCLHVQILEGLVPPPRLEHLSIRGYKSTTYPSWLLEGSQLENLESFALYNCSALERLPSNTKLFRRCRELSLKNLPNMKELSFLPAGLTTLSIRRCPLLLFVTNDELEYHDHSEHIH

SEQ ID NO: 44949 - protein, 328 aa, Oryza sativa
MGSDFKAIPLIDISPLVGKIDDPSMVNDEDLLQVVQMLDDACREAGFFYVKGHGIADSLMKQVRDVTQKFFQLPYEEKLKIKMTPQSGYRGYQRVGENITKGKPDMHEAIDCYTPIEPGKYGDLAKPMVGSNLWPKYPSNFDVLLENYISLLRDLSRKIMRGIALALGAPVDAFEGTTAGDPFWVCRLIGYPVSTDIPEEQRTDTGCGAHTDYGLLTLVNQDDDICALEVRNQSGEWIYAKPIPGTFVCNIGDMLKVWSNGIYQPTLHRVVNNSPRYRVSVAFFHESNFDAAVEPVEFCRERTGGVAKYEKVVYGEHLVQKVLTNFVM

SEQ ID NO: 44950 - protein, 35 aa, Oryza sativa
MKLYACSCDVRRLNSFVGCPFNFWLLILLKNESRL

SEQ ID NO: 44951 - protein, 336 aa, Oryza sativa
MAGRARWVAKYTKGLVDVLHENNISHYRTQNGWRTDGWRKIVSEFNDRYPDAKFTKVQIQEHETQLKRDYRLVKLILQREGVTWDQNASMIRTTDEIWDEIIEEMPKARKYQFKSFPLLQSLEVLFEGDIPEGEHNLMPSKPQLAGRNVDEGGNNMSTAPSIPGRPCSTVIAGIDDGENNIGILQRTPELGQQGLDDVDILQNPTEEVLERPQHGADPKPQSADEPAHSSSCIEPQKDKRKKRKVPDIQQTMEAFLEFRMKQARLKEQAKKEKKDGEPFSISTCIKALHSMTDVSDQVKILASDVFKDAANREIFLSYDLRLRTLWIKREVNRLLT

SEQ ID NO: 44952 - protein, 314 aa, Oryza sativa
MAASTFSTVKVSNVSLKASLRDVKEFFSFSGDIVHVEMQSSDELSQVAYITFKDNQGSETAMLLTGATIVDMAVIVTPATDYELPASVLAALEPKDSKPSALQKAEDIVGTMLAKGFILGRDALDRAKALDEKHQLTSTATARVSSFDKKMGLSEKISVGTSAVNDKVKEMDQKYQVSEKTRSALAAAEQSVSTAGSAIMKNRYVLTGAAWVTGAFNKVANAANDVGTKAKEKIASEQEHKTVELESAEPNSSEGHGTQKDVDGEFAKIQVSESPEDIPISTTATVPITDEDSSQASPPAASPKKPEPAQGLIL

SEQ ID NO: 44953 - protein, 273 aa, Oryza sativa
MGDSLRMSRVKGILEIHHSSFCLIRTVQTTNTMSFGLLKKKCYLLSSKEAQASKHASSSTPSSRAPSAPQRSSFEQKTNYQTPASALYGAYEGSSSQGSSSGYGEPPKDPVALMEFYMKKAAQEERKRPPKQSKDEMPPPPSLQAPSSKKGHHMGDFIPQEELEKFMARCNDAAAQKATKEAAEKAKIQADNIGHKLLSKMGWREGEGLGSERSGRADPIMAGDVKKDHLGVGAVQPGEVTSEDDIYEQYKKRMMLGYRYRPNPLNNPRKAYY

SEQ ID NO: 44954 - protein, 93 aa, Oryza sativa
MSSTGRPYGRRGGAAPSYVPRPRAPNPSPSAPAPARPPQQLRKPVFTTPSPPASSPPASSSTTLLPALVSLSASSATTPAPSSSPPATNKLTW

SEQ ID NO: 44955 - protein, 242 aa, Oryza sativa
MWALSSTATVVSLLQEEGGRRAVLVDSTVFYPQVGGQPADTGVISAGGGTRFIVDDVRMKDGVVFHYGRFEDAGDGCNSGFSEGQSVSLEVDAERRNLNSRLHSAGHLIDICMSNIGLSHFDPGKGHHFPDGPFVEYKGVIPPDQLQDKKNELEKEANELITKGAKVLAYILPYEEAAQLCGGALPSYISKDSTPRIVKFGVYPGGPCGGTHVADISIINNIKVTNIRVKKGLTKVSYSVSL

SEQ ID NO: 44956 - protein, 69 aa, Oryza sativa
MDSVNNNYGHFSIICFLFASTKASSLTALYFKPMFGQTKYLVTKLWRPSIQMMTVCGFMIITSCFSQPF

SEQ ID NO: 44957 - protein, 325 aa, Oryza sativa
MQIFVKTLTGKTITLEVESSDTIDNVKAKIQDKEGIPPDQQRLIFAGKQLEDGRTLADYNIQKESTLHLVLRLRGGMQIFVKTLTGKTITLEVESSDTIDNVKAKIQDKEGIPPDQQRLIFAGKQLEDGRTLADYNIQKESTLHLVLRLRGGMQIFVKTLTGKTITLEVESSDTIDNVKAKIQDKEGIPPDQQRLIFAGKQLEDGRTLADYNIQKESTLHLVLRLRGGMQIFVKTLTGKTITLEVESSDTIDNVKAKIQDKEGIPPDQQRLIFAGKQLEDGRTLADTTHLEGVTSPLGVSSLWWSVISQFGGVVDVSGCLRVSVR

SEQ ID NO: 44958 - protein, 146 aa, Oryza sativa
MASITTTAAAAAASSFLHRRRVAASASPPPRATATATLRHHQRVVGCRAAEVSGAERRRRRGRRAGMGTGCRWCRWRRCRVGERRVIVQDGEEILLLWYKEQVYAVENRSPAEGAYTEASSTPSSPRTAALFAQQQIVHLIFVLVK

SEQ ID NO: 44959 - protein, 669 aa, Oryza sativa
MEGGVGGEVDHLAGERATAQFDVEHMKVAWAGSRHAVDVADRMARLVASDPVFRKDNRTMLPRKELFKDTLRKAAHAWKRIVELRLTEEEANLLRLYVDQPGYVDLHWGMFVPAIKGQGTEEQQKKWLPLAYRFQIIGCYAQTELGHGSNVQGLETTATFDPKTDEFVIHSPTLTSSKWWPGGLGKASTHAVVYARLITEGKDYGIHGFIVQLRSLEDHSPLPGVTLGDIGGKFGSGAYNSMDNGVLRFDHVRIPRDQMLMRLSQVTKEGKYVHSDVPKQLLYGTMVFVRQTIVADASKALSRATCIAVRYSAIRKQFGPQTGGPETQVLNYKTQQSRLFPLLASAYAFRFVGEWLKWLYTDVTHKLEAKDFSTLQEAHACTAGLKAVTTSATADGIEECRKLCGGHGYLNSSGLPELFAIYVPACTYEGDNVVLLLQVARFLMKTVSQLASGKQPVGTTAYMGNIQYLMQCKCGVNTAEDWLNPAAIREVFEARALRMAVNCAQNINKAPSQEEGFYELSPDLLEVAVAHIQLIIVTKFIEKLEQDIPGEGVKEQLCILCNVYALYLVHKHLGDFLSTGSITARQGALANEQLGKLYAQVRPNAVALVDAFNYTDHYLGSVLGRYDGNVYPALYEEAWKDPLNDTDVPDGYQEHLRPLLKQQLKLSRL

SEQ ID NO: 44960 - protein, 210 aa, Oryza sativa
MADGEDAAAARRRASVTEYRKKLLNCRELESRVSTVRENLKNAKKDFTKTEDDLKSLQSVGQIIGEVLRPLDNERFIVKASSGPRYVVGCRSKVDKEKLTSGTRVVLDMTTLTIMRTLPREVDPVVYNMLHEDPGNVSYSAVGGLSDQIRELRESIELPLMNPELFLRVGIKPPKGVLLYGPPGTGKTLLARAIASNIDANFLKVCRLLT

SEQ ID NO: 44961 - protein, 31 aa, Oryza sativa
MDHMKIFHRFPTPLWLCTMRTITLLQLQRKL

SEQ ID NO: 44962 - protein, 565 aa, Oryza sativa
MALALLSPSSASAHRLPRPISSPPLGRAASATSIGSSFFPLCSSPPSSGSCSLRRASSAGGASEPEASGATSLDADLLRRVAGAADAGEALDIVAESAGGTGGLDASDCNAIVAAALDRGNVELALSVFEAMRSGFARAGAWRWARPDVRTYALLVQRLAAALRVSDALRIIDYVSRAGISSAEEVPFGMIIRCPSCMVAVAVAQPQHGTQTVSCSKCRYQYELFSGDIMSIESEEVSMDISALDKALRFINVIKDGLPAAVHSIVIRTPSGTARTHRFATQTVELPAQEGERVTISLAAPSNVYREMGPLKISARSQGFRPGEPMSLTNHINRQVSRLLRAPSKNEGPFVFNPYLLVGALALLASGDAASAFIDPSLPRFITATAFASAAVGTALNQVILPEIRKLPQKTVDIIAVRQQLLSQYDMLQTRLKDLKQLSEKEVWMLARMSQLENKILAVGEPSYRARRGRVKRVLESLESTLLAKIELMESYAKLCSMIEIEVEMDSDVIVAEAASSAERISEQIQQLMEIDSLEEQWRIQAEANDEAERLLNSDSSETFSAEHV

SEQ ID NO: 44963 - protein, 181 aa, Oryza sativa; identical to SEQ ID NO: 33168

SEQ ID NO: 44964 - protein, 316 aa, Oryza sativa
MALGNILGYATGAYSGWYKIFPFTVTPSCSISCANLKSAFLLDIIILVVTTCITVASVQEPQSFGSDEADHPSTEQEAFLWELFGSFRYFTLPVWMVLIVTALTWIGWFPFILFDTDWMGREIYRGSPDDPSITQSYHDGVRMGSFGLMLNSVLLGFTSIVLEKLCRKWGAGLVWGVSNILMALCFVAMLVITYVAKNMDYPPSGVPPTGIVIASLVVFTILGAPLAITYSIPYAMAASRVENLGLGQGLAMGILNLAIVIPQVIVSLGSGPWDQLFGGGNAPAFAVAAAASFIGGLVAILGLPRARIASRRRGHR

SEQ ID NO: 44965 - protein, 60 aa, Oryza sativa
MAFYCLYFKIYIYILKYRKYILSQTKYITVTAWLPFFLDYFFFNSTLGNYLLVLKFYTNN

SEQ ID NO: 44966 - protein, 417 aa, Oryza sativa
MDPLASSHFTTEGEVEFRSILYVPATKKEDITDRKTKNIRLYVKRVFISDDFDGELFPRYLSFVRGVVDSNDLPLNVSREILQESRIVRIMRKRLVRKAFDMILGISCSENRDDYERFWENYGKFLKLGCMEDKENHKRIAPLLRFFSSQSNEELISLDEYVENMKPEQKDIYYIAADSLSSAKHAPFLEKLNEKEYEVLFLVDPMDEVSVTNLNSYKDKRFVDISKEDLDLGDKNEEKEKEIKQEYSQTCDWIKKRLGEKVARVDISNRLSSSPCVLVAAKFGWSANMERLMRAQSMGDMSSLDFMRSRKVFEINPEHEIIKGLNAACRANPDDPEALKAVDILFETSMISSGFTPDNPAELSGKIYEMMSTAMASKWASHAQPAEMNLQRDSPVSSEPIEAEVIEPELVDDSQKK

SEQ ID NO: 44967 - protein, 246 aa, Oryza sativa
MKGLPLRVYLDLEAARKPTGFEDIFIGYHAKDDVQVTYAGKSFHTSRSYHVSTEKRNDALIYWSSSRCLPHRDKVAKDFLSLVPHHSFGKCLNNVDGPDMALSMYPVCSTNDNGKPHWWDHLHCAMSHYKFVLAIENTKTESYVTEKLFYALEAGSVPIYFGAPNVWDFIPPNSIIDASKFSSLRELASYVKAVANDPVAYAEYHAWRRCGTLGNFGRSREMSLDTLPCRLCELVSKRGGRNADAL

SEQ ID NO: 44968 - protein, 352 aa, Oryza sativa
METPTNLTNTISAVHLLKINGYSVTRALGCSEYISSRRLAAGGYDWEVLYYPRYYEHGVYWIALRLMFMSKECKHEVKAALKCQLVHEAQIYLPSGSKSVSSKYTGQRDCGPALLLVKQDDLPGSNYFIGDSFVVECTITVLREPQEAVTNVSPNVSNPCCDLQMHLGELLLSEKGADVTFVVAGESFLAHKIILAARSPVFMAEFFGPMKESSSQCVEIKDIEASVFKAMLHFIYTGTSPELDQQHVVSDSEQDITTMTQHLLVAADRYGLDRLKLICQDRLHDDINVETVATTLAFAEQHSCTQLKDRCIEFIISSRANLDAVMATEGYKLVIASCPSVLSTLLRAAVGR

SEQ ID NO: 44969 - protein, 940 aa, Oryza sativa
MVEATRQRRKPLVLASTQALLDSLPGDRRGSALPPPPPPEPVRIRAGVLRFPNSSSSSSSAGGGEFGEAASFVALPSSALRRLAVVTGTPVLVKNADNNVGRIAKAVVLDHPCLDDSLAEHTEPVDAASPLDNAMGILPCRSFPTNGFPPLDEEVAYVSPLLAFNLGVHVSCLKLLVQKGEKPFKFCSKVEDSDLAAGEESNPILHLEILPSPQVPKHALHLRVSVVRIPECGVFASLKANSAIGGSDYQDMIDQALNEHFKFDRFLARGDVFCIRNNWNCGATSCLACNREDNRLHPHDMIYFKVTGMEPSDEPVHRVNCNQTALVLGGGASASIPPYSLFASPGASVPLHSEIVEHLASIIAPALCPSNILPKVKFSTFLYGPSGCGKRTVVKHVANHFGLHVVECSCHDLMTSSDSGAPAALVAAFKEAHKYSPCIILLRHFDAIGNTSSNEGTQSAQSGTAANIESVIKQYIGQHWVATESLPARDINGNPYLVEPECVSPLQVILVATADRAEGMPQSIRRCFRHEINMKSINEEQRRNLIPETLHCVSTSADESINDKFVKDLAVQTSGFMPRDILALVADAGISFAHKVETDKNNSEGDKLKGILPTSSSSSQNEEKTFCKEYILSSLERAKKRNRAALGTPKVPNVKWEDVGGLEEVKKVILDTIQLPLLYKHLFSSKLGKRSGVLLYGPPGTGKTLLAKAVATECSLNFLSVKGPELINMYVGESEKNVRDIFEKARSARPCVIFFDELDSLAPARGSSSDSAGVMDRVVSQLLVEIDGLSDNSQDLFIIGATNRPDLLDSALLRPGRFDKLLYVGVNSDASYRERILKAQTRKYKLHENVSLLSIARQCPPNFTGADIYALCADAWYHAAKNLAKTLEADPSRTSEASADDVIVEINDFMTVLGDITPSLSIEELQNYEQLRKKIEGPSR

SEQ ID NO: 44970 - protein, 226 aa, Oryza sativa
MPDQLLLFQQYKERVRGAAGDARVADMMTRGIFAICAGSDDVANTYFTMRARPGYDHASCAALLVHHAAAFVDELVKAGARKVAIIGMPPIGCVPSQRTMSGGMERRCSEGHNQIAVAYNAGMERRMEEMQAKKKSTKTKLVFMDIYGFLMDMMMRPRAYGFSDSTMGCCGTGLLEVSVLCNALTSSVCTPVSDYLFWDSYHPTEKAYSILTDFVYDNYVKKLLLD

SEQ ID NO: 44971 - protein, 638 aa, Oryza sativa
MPKNIQSSERNIASPKDLSDVQDCVQPQQPILCEESANGMTGLKALLNTDQDCIKQNQFSGNSNEILQDPGSLKAMSEHWCSQAPSAPTRKKFQGVNAPDMLTDVHHKEQEILAFSDDKKKETTNIDTFSCKVNVENGMSGSGLDDATEGEVMHSCLMDASQGEDFELLNSENILDSSLDPNLEGLGDRHANVILKDISKEHLLDIPHVSSACGNNTDPIHEKHDVADISGVDMIYTTEVPFPCAGIVCILNTEDPEIPCNDDIFTPGPVASTSTCDQNSQHNMHLVSAKPIPPLNAADLNHTDLVSDVQPLLLTMKLEPYTLEQKETLVGLSESCTVRSKSPVMPVDASNANACTSTFHSAAEFVKKSTCGLVQHECFDNLGSVSLDECIGVLDEMNSKVPDESGISCDATTQNSISAHALPDVEFLNPITTTSSPERGGSDSEDGIPNYFDIEALILDQDLIPWDQESDFIQLEVSRFQSLESRKDLIRLERGARSNTNRSIMSHGAFAVLYGQHLKYYIKDPEVTLGRETSEEHVDIDLGKEGKANTISRQQAIIKMDKGGSFHITNIGKAPIFVNSKEVPCNECTHLISDALLQIRHMKFIFHINQDAVRQHIVRSRRGTSQGKYAVFNWDEKP

SEQ ID NO: 44972 - protein, 700 aa, Oryza sativa
MSASNEKWIDGLQFSSLFWPPPQDSQQKQAQILAYVEYFGQFTADSEQFPEDIAQLIQSCYPSKEKRLVDEVLATFVLHHPEHGHAVVHPILSRIIDGTLSYDRNGFPFMSFISLFSHTSEKEYSEQWALACGEILRVLTHYNRPIFKVDHQHSEAECSSTSDQASSCESMEKRANGSPRNEPDRKPLRPLSPWITDILLAAPLGIRSDYFRWCGGVMGKYAAGGELKPPTTAYSRGSGKHPQLMPSTPRWAVANGAGVILSVCDEEVARYETANLTAAAVPALLLPPPTTPLDEHLVAGLPPLEPYARLFHRYYAIATPSATQRLLFGLLEAPPSWAPDALDAAVQLVELLRAAEDYDSGMRLPKNWMHLHFLRAIGTAMSMRAGIAADTSAALLFRILSQPTLLFPPLRHAEGVELHHEPLGGYVSSYKRQLEVPASEATIDATAQGIASMLCAHGPDVEWRICTIWEAAYGLLPLSSSAVDLPEIVVAAPLQPPTLSWSLYLPLLKVFEYLPRGSPSEACLMRIFVATVEAILRRTFPSETSEQSRKPRSQSKNLAVAELRTMIHSLFVESCASMDLASRLLFVVLTVCVSHQALPGGSKRPTGSDNHSSEEVTNDSRLTNGRNRCKKRQGPVATFDSYVLAAVCALSCELQLFPFISKNGNHSNLKDSIKIVIPGKTTGISNELHNSISSAILHTR

SEQ ID NO: 44973 - protein, 131 aa, Oryza sativa
MELRELGATGLRVTPSASAPPLSAMSSATSPATSPAPPSAAPSTSASTSSTPPRTTAARCRSRCSGTASAAAACRGTGSWSPPSAGATGKGSTSAPPASPAASTRASHASASTTSTSSTATTSSSPTSTRL

SEQ ID NO: 44974 - protein, 214 aa, Oryza sativa
MHPVVSPLPSCTDLPPAPGSHPLRPPLARIRHWRRREGWIRRPLLLPHRSRHLPAPCSRGSAANDDGRGGPSSLSYGDNNDWWTWADPVPGICCGGDSRVAEDDIMCDFLLKLLRAGSMVGTDAALLQELESRAVHTSPSQLSRPGYGRLTSRRSRPRRACQRPMSLTRRRFQPQPPSMEAHQISTWILLGYCAVTQVCQTFMWHQHLSWKLKL

SEQ ID NO: 44975 - protein, 370 aa, Oryza sativa
MLVLASIAHAWVSTQQMITLGIGVVAHLASKEIHISKMVAKVIISALLPLPSDLALSLILLSDVADINECLVPNKCKGVCYNTPGSYRCTACPDKTQYDMTTMQCTRTRRQSLMLGVVIGLSCGFSILLLSLGIMLLIHRWKKDIQKQLRRKHFQKNQGLLLEQLISSDENASENTKIFSLDELEKATNNFDPTRILGHGGHGMVYKGILSDQRVVAIKRSKHIEEGEISQFINEVAILSQINHRNIVKLFGCCLETEVPLLVYDFIPNGSLFGILHSGSNNGFSLSWDDCLRIAVEAAGALYYLHSAASVSVFHRDVKSSNILLDANYTAKVSDFGASRLVPIDQTHVVTNVQGIWLLRSRVLSYRAAE

SEQ ID NO: 44976 - protein, 1132 aa, Oryza sativa
MAIQRLLASSLVAATPRWLPVAADSFLRRRHRPRCSPLPALLFNRRSWSKPRKVSRSISIVSRKMNKQGDLCNEGMLPHILWWKEKMERCRKPSSMQLTQRLVYSNILGLDPTLRNGSLKDGSLNTEMLQFKSKFPREVLLCRVGDFYEAVGFDACILVEHAGLNPFGGLRSDSIPKAGCPVMNLRQTLDDLTRCGYSVCIVEEIQGPTQARARKGRFISGHAHPGSPYVFGLAEVDHDVEFPDPMPVVGISRSAKGYCLISVLETMKTYSAEEGLTEEAVVTKLRICRYHHLYLHSSLRNNSSGTSRWGEFGEGGLLWGECSGKSFEWFDGNPIEELLCKVREIYGLEEKTVFRNVSVSLEGRPQPLYLGTATQIGVIPTEGIPSLLKIVLPPNFGGLPSLYIRDLLLNPPSFDVASSVQEACRLMGSITCSIPEFTCIPAAKLVKLLESKEVNHIEFCRIKNVLDEVLFMGSNAELSAILNKLLDPAAIVTGFKVEADILVNECSFISQRIAEVISLGGESDQAITSSEYIPKEFFNGMESSWKGRVKRVHAEEEFSNVDIAAEALSTAVIEDFLPIISRVKSVMSSNGSSKGEISYAKEHESVWFKGRRFTPNVWANTPGELQIKQLKPAIDSKGRKVGEEWFTTIKVENALTRYHEACDNAKRKVLELLRGLSSELQDKINVLVFCSTMLIITKALFGHVSEGRRRGWVLPTISPLCKDNVTEEISSEMELSGTFPYWLDTNQGNAILNDVHMHSLFILTGPNGGGKSSMLRSVCAAALLGICGLMVPAASAVIPHFDSIMLHMKAYDSPADGKSSFQIEMSEIRSLVCRATARSLVLIDEICRGTETAKGTCIAGSIIERLDNVGCIGIISTHLHGIFDLPLSLHNTDFKAMGTEIIDRCIQPTWKLMDGICRESLAFQTARKEGMPDLIIRRAEELYLAMSTNSKHTSSAVHHEISIANSTVNSLVEKPNYLRNGLELQSGSFGLLRKEIESVVTTICKKKLLDLYNKRSISELIEVVCVAVGAREQPPPSTVGRSSIYVIIRRDSKLYIGQTDDLVGRLSAHRSKEGMQDATILYILVPGKSIACQLETLLINQLPLKGFKLINKADGKHRNFGISLVPGEAIAA

SEQ ID NO: 44977 - protein, 90 aa, Oryza sativa
MSSSRLGGGDRAGMYEEGEDDELFGESSSVSGGESDDDGEGEDQFSEGGAAAAAALDQMEHRRFAPQPLRRLNSDSIYDMSSMTEQLPAK

SEQ ID NO: 44978 - protein, 52 aa, Oryza sativa
MCCCNGQIITSFMLDPLMIFLPFSVCACSAAFSMRVQPLHSSQRLALVSTWY

SEQ ID NO: 44979 - protein, 549 aa, Oryza sativa
MSSEPPPDAAAAAASSAGDLAADLSSATISKKQLKKDARKAEKAEKASQRQQQQQPQADADDPFAANYGDVPVEEIQSKTISGRVWTEIGGLDEAAAGRSVLIRGAAQAIRPVSKKMAFVVLRESMSTVQCVLVASADAGVSTQMVRFATSLSKESIVDVEGVVSLPKEPLKATTQQVEIQVRKIYCINRAIPTLPINLEDASRSEAEIEKAEQAGEKLVRVGQDTRLNYRAIDLRTPANQAIFRIQCQVENKFREYFLSKNFVGIHSPKLIAGSSEGGAAVFKLQYNGQPACLAQSPQLYKQMAICGGFERVFEVGPVFRAENSNTHRHLCEFVGLDAEMEIKEHYFEVCDIIDGLFVAIFKHLNENCKKELETINRQYPFEPLKYLEKTLKLTYEEGIQMLKEAGTEIEPMGDLNTEAEKKLGRLVKEKYGTEFFILYRYPLAVRPFYTMPCYDNPAYSNSFDVFIRGEEIISGAQRIHLPELLTKRATECGIDASTISSYIESFSYGAPPHGGFGVGLERVVMLFCALNNIRKTSLFPRDPQRLVP

SEQ ID NO: 44980 - protein, 192 aa, Oryza sativa
MAAAAASTSLPVPRVSLPPSARPAAAPRHGLLIPGRRGCFRLRGSPAAPAAAASGSPSVPSSSPEAGSGIGDALGGVAIYSAATGEPVLFRDLWDQNEGMAVVALLRHFGCPCCWELASVLRDTKERFDSAGVKLIAVGVGTPDKARILAERLPFPLDYLYADPERKAYDLLGLYFGIGRTFFNPASCVFTI

SEQ ID NO: 44981 - protein, 67 aa, Oryza sativa
MAQLLSSSAPPRLHLAATPACFSSSSGHGVSRLSVTSACSAAPGSRFLLDFSLSFVIPSPFLGILRA

SEQ ID NO: 44982 - protein, 167 aa, Oryza sativa
MGDFIGEMAQMMSQARPTRQESFKELQQLFVDMFQADLDSGFCNGPSKCYHTQAQSQTRTSSTSPSMSPSPPPPVATEAESPSCNGINKRGSSAMDSGKPPRASEVGSGQSQSGFCFGQKSDAKQAAKTRSGNTASRRRNGRKQKVSSKHDVSSEDEMPGSQWHGVA

SEQ ID NO: 44983 - protein, 207 aa, Oryza sativa
MTSEENKAVTPNEPIEASSSGSKRKRVRPRKSEYGMHEKPYSVQPIQSVPPLHSTEDSSNIQQDGIQINHKSGGSVGPSANLVKTSLSQASTYTSASLQSNSVKDGIVGKYFVGKMSNKVPGFSLITVKVKDNLVLKGWIPDESDLRPITPKDDLAPDLPMLRPSQVRKRPSTIYKQAAGPIPVPLEDVTFAKPLQMRKPVEKSVAK

SEQ ID NO: 44984 - protein, 369 aa, Oryza sativa
MSNLSEPSKEAASADVSSAVQKTGAWSNTLNILLQQASVYGVAAGYCLSASLLSIINKWAVMKFPYPGALTALQYFTSVVGVLLCGQLKLIEHDGLNLRTMWKFLPAAVMFYISIFTNSELLLHANVDTFIVFRSAVPIFVAIGETLYLHQPWPSLKTWLSLSTILGGSVIYVFTDNQFTVTAYTWAVAYLASMSIDFVYIKHVVMTIGLNTWGLVLYNNLEALMLFPLEMLLMGELNQMKGDSAKVTNWLSSDVILPVALSCLFGLSISFFGFSCRRAISATGFTVLGIVNKLLTVVINLLIWDKHASFVGTIGLLICMSGGVLYQQSTTKPKAPKAEPKEENDEEQQKLLEMQQGLESSSTQKQASS

SEQ ID NO: 44985 - protein, 358 aa, Oryza sativa
MDLPLVDLAPYLDRAVAGGGAAGEEAVRALCATVSASLRDTGALLVKDPRCPAADNDRFLDVVEHYFARSADSKCLQERPNLHYQVGVTPEGVEVPRSLVDKEMQDKIKSMPEEFQPATPKGPDPKWRYMWRVGPRPANTRFKELNSEPVIPDGLPEWKETMDSWGSKMISAIEVVAEMAAVGFGLPKDAFTSLMKEGPHLLAPTGSDLERHGSEGTVFAGFHYDLNFLTIHGRSRFPGLNIWLRNGKKMEVKVPVGCLLIQSGKQLEWLTGGECLAGMHEVVVTKRTLEAIALAREQNRSLWRVSSTLFAHIASDATLKPLGHFAEASDAHSYPPICAGDYVEQELSVINLKGKNGF

SEQ ID NO: 44986 - protein, 265 aa, Oryza sativa
MEVDEKPTEDYNDIGGLEKQIQELVEAIVLPMTHKDRFQKLGIRPPKGVLLYGPPGTGKTLMARACAAQTNATFLKLAGPQLVQMFIGDGAKLVRDAFQLAKEKSPCIIFIDEIDAIGTKRFDSEVSGDREVQRTMLELLNQLDGFSSDERIKVIAATNRADILDPALMRSGRLDRKIEFPHPSEEARARILQIHSRKMNVNPDVNFEELARSTDDFNGAQLKAVCVEAGMLALRRDATEVTHEDFNEGIIQVQAKKKSSLNYYA

SEQ ID NO: 44987 - protein, 586 aa, Oryza sativa
MASSTAANLWVLLGLGIAGVLLAAKRLRRPARPDNGAFIARLELLPPPQPPPPQARHPLTGLCFAIADAFHVTGYITSFGSLEWAKTHDAATQTSLVVSSLVDGGAMCVGKTVIDEMAFSIHGENKHFGTPTNPAAPDRVPGGCSSGSAVAVAAGIVDFSLGIDTIGGVRVPGSYCGVLAFRPSHAVVPNNGVIPVAPSLDAIGWFARDPSVLRRVGHLLLRLPYADIRQPRHFYIADDCFEMSKVHARRLTQVVTKSVEKLFGRQVLGHVNLENYLASRIPSLRNNSNGHGDSKFSSLLALSRAMQFLHKHEFKDQHMEWINSVKPAVDACIVGNLSDDGESTINNSQDARKEVRAALGALLKDDGILVIPTVLGCPPKLNARELSSQDYNVQTSCLTSLASMSGCCQVTVPLGTHDKCPVSVSLIARHGGDRFLLDTIQTIYATIQEQVDALAKSNVSSKQAMSEEAAEAAKEKGNIAFKEKQWQKVINFYTEAIKLNNKVATYYSNRAAAFLELASYRQAEADCTSAIDVDPKIVKAYLRRGTAREMLGYYKEAVDDFSHALVLEPMNKTAGVAINRLKKLFP

SEQ ID NO: 44988 - protein, 233 aa, Oryza sativa
MSCTSPDPPDYCSAASPELKLYQAFIFSVPVFFTFVLLLFFYLFYLRRRRANWQSLRMRTNNLIRGDNPRLECGIKKEMREMLPVVVFKESFLIRETQCSVCLADYQPDERLQRIPPCGHTFHIDCIDHWLSTNTTCPLCRVSLLPSPKTASIDPVDLEAQTVEENSSLDVQYQEGRIDENTRQEDQTLQQGSEGPTHQAEENEETSVRVTTEPQVEAEGSPSTTCRPCKTKK

SEQ ID NO: 44989 - protein, 369 aa, Oryza sativa; identical to SEQ ID NO: 44868

SEQ ID NO: 44990 - protein, 479 aa, Oryza sativa
MSCFPCSGSSGKGGVDAKSVAALSPGPRPAASAAPDRSNSSRGSGIKKDDSVRRGGSSASDGPAKIFTFRELAVATKNFRKDCLLGEGGFGRVYKGQMENGQVIAVKQLDRNGLQGNREFLVEVLMLSLLHHPNLVRLIGYCADGDQRLLVYEYMLLGSLENHLHDRPPGKKPLDWNARMKIAVGAAKGLEYLHDKANPPVIYRDFKSSNILLGEDYYPKLSDFGLAKLGPVGDKTHVSTRVMGTYGYCAPEYAMTGQLTVKSDVYSFGVVFLELITGRKAIDHTQPAGEQNLVAWARPLFRDRRKFCQMADPSLQGCYPKRGLYQALAVASMCLQENATSRPLIADIVTALSYLASNHYDPNAPSAKSSRTCPSTPKAKAHRRTTSVPDAQHAADSLNWNFPDLGRKETTRGEFEQDHSEGYGSGSSSGRNDGLDVPELLALHNGQNNSEADIYHKSSVKLDAHEKQRSGSGKGSRQF

SEQ ID NO: 44991 - protein, 526 aa, Oryza sativa
MAYNMVMDGLCKEMRLDEAEKLLENKARQGSNPDVYGYSYLIQSYCKMGNLIKAVDHYEAMVSHGIETNCHIVSYLLQCFRKLGMTSEVIAYFLKFKDSGLHLDKVIYNIAMDTYCKNGNMNEAVKLLNEMKCGGLTPDKIHYTCLINGYCLKGEMQNAQQVFEEMLKANIEPDIVTYNILASGFCKSGLVMEVFDLLDRMADHGLEPNSLTYGIAIVGFCRGGNLSEAEVLFNVVEEKGIDHIEVMYSSMVCGYLLSGWTDHAYMLFVRVARQGNLVDHFSCSKLINGLCRVGNVQGASNVCKIMLEHNVVPDVISYSKLISIYCQNGDMDKAHLWFHDMVQRGLSIDVIVYTILMNGYCKAGRLQEACQLFVQMTNLGIKPDVIAYTVLLDGHLKETLQQGWEGIAKERRSFLLRANHNKLLSSMKDMQIEPDVPCYTVLIDGKCKAEYLVEARELFDEMLQKGLTPDAYAYTALINGYCSQGEISKAEDLLQEMIDKGIEPDELTFSVLNQSSLRSRKIQFCA

SEQ ID NO: 44992 - protein, 236 aa, Oryza sativa
MEERPRDRTVEEAAAFSGDESDGEFEFPFVSRETDAGGVADELFADGRIRAFYPVFGRVLDDVAVTLRRGGGGAEAAAREAVPRGGADLVRRVDVVVVVVHGHRRAGRRVARQLLRLGARVVAGVLAVAPPAEERVDGVHRARGAASASSSSAAATATAKRSSASSPRRRPRPGITQNRSPRRRAAPPPPPSSTPSSTPSPPATGCPTPQTTRRTAARRGGRSYSTARISWASSPT

SEQ ID NO: 44993 - protein, 116 aa, Oryza sativa
MRHGRRVPKLSRPPDQRKALLRGLTTQLLKYGRIKTTRPRAKAMRKYVEKMITLAKDGSLHKRRQALAFIYEKHIVHALFAEVADRYGEREGGYTRIIPTFPRRGDNAPMAYIELV

SEQ ID NO: 44994 - protein, 199 aa, Oryza sativa
MSSHDFARRVPKRRRTNKLLSQLLPDLNSLPAEGADDGGSPSSSVLVSHAQTSAVAVAGTSQYLVPAVVAGPHIGMSSCPIIVDDINDDVVIYSASSFPQVRQQAPRTEPVVTIEDDSETTPGQAGDAVDEHVDILLSLTLGRYPRHGHQRSSNISTSPVIHIIDTPSNVLKLEFLQYTYQVCDVQLNNAAFGGNAGTP

SEQ ID NO: 44995 - protein, 335 aa, Oryza sativa
MDLMKSNPLQGSPWSLLNLLVLIIVAAMICGELCRRRRRRRGDENGGATRLPPGPWRLPFVGSLHHLAVMRPRGVVVHRALAELARRHDAPVMYLRLGELPVVVASSPEAAREVLKTHDAAFATRAMSVTVRESIGDKVGILFSPYGKKWRQLRGICTLELLSVKRVRSFRPIREEQVARLVDAIAAAAASSTAEAAAVNISRQITGPMTDLALRAIMGECFRWREEFLETLAEALKKTTGLGVADMFPSSRLLRAVGSTVRDVKLLNAKLFELVECAIEQHREQIRAAHDNGGDDDDAHGHGDKECFLNTLMRIQKEGDDLDDTHHGNRQSCHS

SEQ ID NO: 44996 - protein, 351 aa, Oryza sativa
MCGGSILGDLHLPVRRTVNAGDLWGDAGKGRDGGDGLKKRKGSSWDFDVDCDDDDDDDFEADFEEFEDDYGDDDDVGFGDDDQESDMNGLKLAGFSTTKLGLGGSRKRKTRYRGIRQRPWGKWAAEIRDPRKGVRVWLGTFGTAEEAAMAYDVEARRIRGKKAKVNFPDAAAAAPKRPRRSSAKHSPQQQKARSSSSSPASLNASDAVSKSNNNRVSSAGSSTDATAAAIAIDDGVKLELLSETDPSPPMAAAAAAWLDAFELNDLDGSRCKDNAFDHQIHKVEALSLMNSRSTTIRATCSWVTSSIRATRTRTSTRSSAARPSTLVDSGASTTCQWSSELIEHLILFRRE

SEQ ID NO: 44997 - protein, 648 aa, Oryza sativa
MGLSGASAHIFRGQPRRHLLQSGWSVFVSAKRLVAGDAFIFLRGENGELRVGVRRAMRQQANIPSSVISSHSMHLGVLATAWHAVNTGTMFTVYYKPRTSPSEFVVPRDLYKESLKRNHSIGMRFKMTFEGEEAAEQRFTGTIVGVGDSDPSGWADSKWRSLKVRWDEAASVPRPDRVSPWQIEPANSPSPVNPLPAPRTKRARPNVLASSPDLSAVNKEVASKVMANSQQNGLPRAFHSQENMNLRSRFGDSNELNTSQKLTMWSSGSNQEKNNVSVQRELGSQSWMQMRRPDGSSEILSGFQPLKDTRNPLSSFPSQISGNRSNTWNTINVHYPDQNANHNMYPGTWSLMPPNTGFGVNQQNYLMTPDITLPQRSLNAKFGGNGAFTSLRAHGIDQRSSGWLGHIEPSSHIDDASSSLIKPQPLVIDHNVQKAKGSSCMLFGISLDSPAKPELLISPPSVAFDGKLQQDALEEDECSDPSKTVKPLDGAQHDSAREKHQSCPDGTKNIQSKQQNGSSRSCKKVHKQGIALGRSIDLTKFTCYDELIAELDQMFDFNGELNSSSKNWMVVYTDNEGDMMLVGDDPWNEFCNMVHKIFIYTREEVQKMNPGALNSRSEDSRSTSVERGLVGEGLQGGLSTPSLNSENC

SEQ ID NO: 44998 - protein, 463 aa, Oryza sativa
MRAAAGGRGFLLHPRPPWRAPATPPCPPPPATATALARRLHHRRLPEGILSTLERGVSTLHLRCWVHCATCGVTLHDISQAEPVNGAKSDLVQKHEKVGAFQRIPMVMPATDILMSAQRKSRNVPPTKGIANIAKRERNKGAKQLDALMKEISVPLRTYTENFPKRRDLHPYERSLIELTFGEGYYEKVIARVDALRKKINSVGKQHASVCAKSLTKREAGERLSEGRKKLEEAFEHGKWVIDDLVNIAKTLRSMPVVDPHIPTLCLVGSPNVGKSSLVRILSSGKPEVCSYPFTTRGILMGHIVSNHERFQVTDTPGLLTRDDDERNNIEKLTLAVLSHLPIAVLYVHDLSEDCGTSVADQYITYKHIKERFGDRLWLDVISKSDLLDKKTSSEFDDADDEVGRYRRFGPECAIRVSVQGQVGVKELKEKVHQLLTSQMSRIKAGTIYQETQRTDDNAPGQT

SEQ ID NO: 44999 - protein, 455 aa, Oryza sativa
MAFGDRITTFEDSEKESEYGYVRKVSGPVVVADGMGGAAMYELVRVGHDNLIGEIIRLEGDSATIQVYEETAGLMVNDPVLRTRKPLSVELGPGILGNIFDGIQRPLKTIAIKSGDVYIPRGVSVPALDKDALWHFKPEKLGVGDIITGGDLYAIVNENTLMQHKVALPPGAMGKISYIAPAGQYSLQDTVLELEFQGIKKEFTMLQTWPVRSPRPVMEKLAADTPLLTGQRVLDALFPSVLGGTCAIPGAFGCGKTVISQALSKYSNSQAVVYVGCGERGNEMAEVLMDFPQLTMTTEDGREESVMKRTTLVANTSNMPVAAREASIYTGITIAEYYRDMGYNVSMMADSTSRWAEALREISGRLAEMPADSGYPAYLAARLASFYERAGKVRCLGSPKRDGSVTIVGAVSPPGGDFSDPVTSATLSIVQVFWGLDKKLAQRKHFPSVNWLISY

SEQ ID NO: 45000 - protein, 167 aa, Oryza sativa
MLFKGDRSSDGSRRGQRVWRRSSRRGQRIRRRLGAQAVDPATTRGTGGGSGLGQRRRGKREGPHCRRRLLPPRADAGGAPHHAAAAPSLTPPQHPLRAPPRALGAPPPPHPQITAATRVARERMCVARERERELHGGWIGFLRVFWALRILVTFSSLFFWYFGHYEY

SEQ ID NO: 45001 - protein, 604 aa, Oryza sativa
MDDDDYSWVRRTKFSHSIVKSNSGREQFGAFLDPFDSSTAWRQKGFSGELMIHGHNLQPRAKGAVSKSPRPSIPLAKSPVSQAERKLKAKFSDGELKQRGKISDGSLREASKEKDRKVGHKGEGLSLDISCPILDRTVQDDSSDTLDFSFHSEEQSLRLLRVCSSPAPFYSKDTTTFGDSKIHSTSVKIVGEGSKPRRRAKSPMPTRVISEVFKEAKAATKRFSSPQRQRKSSSPHSPRSPDDSPRFGFPSMRTPGNLKARRASSWPRNCDNGVAKAVALDILERWTIDRSQLLIGQRFASGAYSRLFHGIYKEQPVAVKFIRQPDEEEDAELAAKLEKQFTAEVTILARLHHRNVIKLIGACNAPPVFCVITEFLCGGSLRAFLRKLQRQKLPLEKIICIALDIAHGLEYIHSQRVIHRDAKPENILFDGECCAKVVDFGVACEEVYCNSLEDDPGTYRWMAPEMYKRKPYGRKVDVYSFGLVLWELFSGSIPYEEMTPLQAAFAVVNKNLRPVVPSSCPAQLRLLIEQCWSCQPEKRPEFSQVVQILKNLKEALDRDGTLDKIPSTNCQEPPDQNKKRLSNWIQRLSYSQADFSGPPPPKLL

SEQ ID NO: 45002 - protein, 475 aa, Oryza sativa
MNLVSYEYVACQGSKKGVLILSEFAGAAQSLGAGAILVNPWNITEVADSIKHALTMSSDEREKRHRHNYAHVTTHTAQDWAETFVCELNETVAEAQLRTRQVPPDLPSQAAIQQYLHSKNRLLILGFNSTLTEPVESSGRRGGDQIKEMELKLHPELKGPLRALCEDEHTTVIVLSGSDRSVLDENFGEFNMWLAAEHGMFLRPTNGEWMTTMPEHLNMDWVDSVKNVFEYFTERTPRSHFEHRETSFVWNYKYADVEFGRLQARDMLQHLWTGPISNAAVDVVQGSRSVEVRSVGVTKGAAIDRILGEIVHSKSMITPIDYVLCIGHFLGKDEDIYVFFDPEYPSESKVKPDSSGSVSLDRRPNGRPSNGRSNSRNSQSRTPKAQAAPERSSSSSSSSQGTPNSHHDWREGSSVLDLKGENYFSCAVGRKRSNARYLLNSSEEVVSFLKEMADATAAHNGFQSTTADYMFLDRQ

SEQ ID NO: 45003 - protein, 66 aa, Oryza sativa
MGQEFHLMIITTKISEALIIVMIYFGFSAFLSCILLFKLHIRNTGIHVPAHLLNSEHALNYWIYEL

SEQ ID NO: 45004 - protein, 357 aa, Oryza sativa
MVSGGRVGGGEGEAGEAAEVAVAMVDNEEEMAQAQAPPAAAVAARELVVGYALTSKKAKSFLQPKLRGLARKKGILFVAIDQKRPLSDQGPFDIVLHKLTGREWQQLLEEYREEHPEVTVLDPPGAIEHLLNRQSMLQEVSELDLSDCHGRVGVPKQLFVNTDPSSIPAAVMRAGLSLPLVAKPLVAKSHELSLAYDPISLTKLEPPLVLQEFVNHGGVLFKVYIVGDAIRVVRRFSLPNVDVGDLSNNAGVFRFPRVSCASANADDADLDPHVAELPPRPLLEILARELRRRLGLRLFNIDMIREHGTRDRFYVIDMNYFPGYGKMPGYEHVFTDFLLSLVQKEYKRRPSYSSCEG

SEQ ID NO: 45005 - protein, 393 aa, Oryza sativa
MAAGAHASRASAPIIAGLTGALRAAYKGFSPQLCNFHASVNNGLLHRRKIQLHFICSFRSIQARYNHSSAVAPKDYCETYIQFLRDKQIVPDSDPPSAKDVDLLYRFIDQSKKLMVLTGAGMSTESGIPDYRSPNGAYSSGFKPLTHQEFVRSIRARRRYWARSYAGWRRFRRAQPNSAHYALASLERIGRVHSMVTQNVDRLHHRAGSKPVELHGSVYEVACLDCGTSIDRESFQEQVKDLNTKWALAIDSLEVGQPGSDKSFGMQQRPDGDIEIDEKFWEQDFDIPSCNQCGGVLKPDVVMFGDNVPEERAESTKEAARNCDALLVVGSALMTMSAFRLARLAHEANAPIAAITIGETRADSILSLKINARCGEILPRILQMGSLAVPNVS

SEQ ID NO: 45006 - protein, 573 aa, Oryza sativa
MMAAEVNQTFFAWSQGEPTERDGSQGVSVSQKIDHGSISFGRFELESLSWEKWSVFSDDKRHEEFGKFNGLVAQKKAYFEEYYRKIRELKAQQQNQQTELILEYSGDGSDSSQTGEYTQGAELETPTGSGTIVDDYVEQGAHETTSEQGLTCYDDHENENFNAEFSSSNISSSAVGLQQTGRDARENVHGDDSAGKMDLEQQNAISGHSLGTAYEVVRAPKRIIEKDSRLRYAPKIVPKSVKTSSDSPLDRTSVSKRPDSLKLGMSINQKAKTDNDRLLRGPNVAPHKMSGSTERNKLTTKQTGVRRPSSASSQRPSVGERHRIARESIKKPADVSTPRRPSTAERHPVTTERARKQADVDTPRRPSTSERRAVNKGSADMTTTHRPSTGERRSVTRESVLKMDVRTPSKTRPTMTQLKGATTTVGIVKKAGTPNASKSINMGTKSNIRELEGPSKVGRHSVGSKITDLQIAGKQKSSSVHLPPRKLLSSSIGEPALQTFTRPKKKDVAAQSRASTSKRAMTLHTGNVKGRSSNPPPPPPPPRRPSRTTNRPNGSNSSTVGQKPKVSSAPKWH

SEQ ID NO: 45007 - protein, 135 aa, Oryza sativa
MAVLGLSTAFSPPRGSCIAVRIRHGARSARSNLSLRRRSAGGGAYWRPCRGELRRRRRGEAAGGGGGVHGAGHPGPDAAREGAHQELSACAPLRRERRRRHWNYYKAHGTQQLRRPVLRATIHQTEPRVHQDGQG

SEQ ID NO: 45008 - protein, 171 aa, Oryza sativa
MDPNGSAFEERAPFRDITNISSDARAGSTTSTKLQRNTKRTLELCFCAKNVDPTADLKKYIEDLECLDRSSKFYAVAVNNTFMKQDRVYFTKEFSKDYLKPLMDGKETISIGVQMAGGVSKNMMLQMSTDDRCNLKKVWAKFATRNHIYLQSLCTFHFNKTTRLEATFDVL

SEQ ID NO: 45009 - protein, 585 aa, Oryza sativa; identical to SEQ ID NO: 44734

SEQ ID NO: 45010 - protein, 389 aa, Oryza sativa
MVAEAEVMHQPVPVLEVPYHRCVAKGVEEVAAAAAVAPPPVVEVEVAVQVPHMGLESAAGAPSISVDALQFVPSIRSGSFADIGPRRYMEDEHIRIDDLSAHLGSLLVCPLPSAFYGVFDGHGGLDAAAYMKRHAMRFLFEDSEFPQASQVDETYVQSVENSVRRAFLQADLALADDLDISRSSGTTALTALVFGRQLLVANAGDCRAVLCRRGVAMEMSRDHRANYAEECERVAASGGYIEDGYLNGVLSVTRALGDWDMKMPDGSISPLIAEPEFRQTMLTEDDEFLIMGCDGIWDVMTSQHAVSIVRRGLRQHDDPERCARELVMEAKRLETADNLTVIVVCFVSELGSPRQEQVGGQAGVARPRSCKSLSAEALCNLRSWLETDR

SEQ ID NO: 45011 - protein, 237 aa, Oryza sativa
MHPMAVAVAAAVSCPRLVPGRIPLSAASVAVARGRGCGVAVRARGQSAATPDPAAILRRPAVVTTAAAEEEGEGEGEGEGEGESEAESSPGGGSGEDETPEGGEEEGDGEGVGGLGGPHPRGHRAARRLRPDDSALRYENGDRLSPEHEKAILERLLPYHPQYEKKIGCGIDYLTVGLHPEFENSRCLFIVRKDGEQVDFSFWKCIKGLIRQKYPMYADSFILRHFRRRQDYRISDS

SEQ ID NO: 45012 - protein, 358 aa, Oryza sativa
MAAMVVGALRRGTATAGGSSRSFARSLPRPVSTLVVAEHEGGFVKPSSLSALAAAEAIGKDDNRVSLLLGGSGPGLHKAAEHAASSHPLVSEVLVADSDVFAHPLAEPWAELLRSVQHKGGYSHVIASSTSFGKNLLPRAAALLDVSPVTDVTSISEPRVFVRPIYAGNALCTVRYTGEDPCMMGIRSTSFSPTEAMSEAKVAPITQVDLSFLSEGSSGKSAWVNLKSQDTERPDLANAPVVVTGGRGLKSAENFKVLEQLAEKLGAAVGATRAAVDAGFVPNELQVGQTGKIVAPELYMAFGVSGAIQHLAGMRDSKVIVAVNKDADAPIFQVADYGIVADLFEVLDELLKKLPDKK

SEQ ID NO: 45013 - protein, 332 aa, Oryza sativa
MGSYVQGEDEVPVYESGAEIVQKLQEKWKSTAAPFPAMYSSVLGGIILDPAMMSVPLDDHMVHRGHGVFDTAMILDGHLYELDPHLDRFLRSAAKARIGTPFPRDTLRSILVQMTAASNCRRGSIRYWLSAGGGDFLLSSAGCAGPAFYAVVIPTDYSQCRHGVRAVTTSVPMKPPLFATMKNVNYLPNVLSIMDAEDRGAFASVWVDGEGNVAEGPMVNVAFVTAAGELVLPAFDKILAGCTAKRLLALAPRLVKSGLLKAVTTRHIAADEAKRCSAEMAFVGSGLPVLPIVEWDDQLIGDGKVGKTMMALSDLLWEDMKSGPDRIAVPYK

SEQ ID NO: 45014 - protein, 68 aa, Oryza sativa
MGHTHMVTFMQSSRQVSFIVIWSASWFVTRCPQPLSFQFNAVCSVCLQLSYTCCTIMCPLPGLQKCNG

SEQ ID NO: 45015 - protein, 343 aa, Oryza sativa
MKEVRELCYDIDDFVDELFHAAANAKIQRALQFKASPLRKKLPLFKTSQLQEKLSRFNASQLQKKLSWRQKIVDEVSSFSSCLKELIMLYKRYDLGSLERRSGWESNGTMSLTLPLAEETSQRCYLGMDKDMDKLVGLLNDGQQECKVIAIIGLCGVGKTTLAEELYQKFGFQFQCCAFLRLSRKPDMKRVLGSLFSQVRQHDPPGTGTVEVDNLSHEIKSYLNDKRYFIVIDGVWSSYIWNTINQTLPKNFYSRILITTEIDHVAQRCCVDNRKYIFKKEPFNKVESDEFFSRVHEYLKEISSEIAQLFSGLPLMMAIVASILTRLPPSTEQWDVVKKIIKF

SEQ ID NO: 45016 - protein, 458 aa, Oryza sativa
MPPVGEVAAAEARSGMVLGGGAAAAAVGGGEDAVVMQVAGAEGQDSVITINCPDQAGLGCDLCRTILEFGLRITRGADVSTDGQWCFVVFWVVPRTPSIKVRWANLKNRLMSMCPSNYPMTFYPEITQPGPSQFYLLKLFSADRKGLLHDVTHILSELELIIHRVKVSTTPDGRVIDLFFITDGMELLHTKERQEETCSMLIATLGPSISCEILLAEGFQQGFSSLPPTISEELFRLELADGDNCSRSICAEMKRVQKATINFDNTLSPAHTLLQINCADQKGLLYDILRTMKDCSIQVTYGRFWSDKKGFREVDLFIKQADGKKIIDPEKQDVLSSRLRSEMLHPLRVMIVNRGPDVELLVANPVELSGKGRPRVFYDATFALKALGICIFSVRITEYSERVQNEFVFTLLLMHFRLKLGGRQHQSVNGRSTDSSWMIAVSSHCQTALSIGTVLSTG

SEQ ID NO: 45017 - protein, 51 aa, Oryza sativa
MMLFGGNLSACYFAVKSNPAMVHGSVNLVRTFKHGHSSHRILMLTCLLPES

SEQ ID NO: 45018 - protein, 279 aa, Oryza sativa; identical to SEQ ID NO: 32392

SEQ ID NO: 45019 - protein, 719 aa, Oryza sativa
MTNLSGKKSLNTVTLVFKLPYYTQWGQSLLIAGSEPALGSWNVKQGLSLSPVHQGNELIWSGRVSVATGFTCQYNYYVVDDNKNVLRSESGEKRKLVLPEGVQDGDVVEIPRLVAGCLLKLFSFEVHSRMSFPNGSENAKRELKTTSLNKSLEPEDIVVQFIVSCPRLGAGSTVVVTGSNPQLGRWQTQDGLKLNYVGDSIWKANCLLRKSEFPIKYKYCKISEAGVSSLEFGPNREADVDLSSPKPSRYVLLSDGALRESPWRGAGVAVPIFSIGSNEDLGVGEFLDLKLLVDWAVNSGFHLVQLLPINDTSVHGMWWDSYPYSSLSVFALHPLYLRVQALSDAIPGDIKDEISQAKKQLDKKDVDYEASLASKLSIARKIFKLEKDKVLNSSSFKQFLSENEEWLKPYAAFCFLRDFFETSDHSQWGRFSQFSKEKLDKLVSEGTLHHDVICFHYYIQYHLYMQLSEAAAYARKKKVILKGDLPIGVDRNSVDTWVYPTLFRMNTATGAPPDYFDKNGQNWGFPTYNWEEMSKDNYGWWRARLTQMAKYFTAYRIDHILGFFRIWELPDHAATGLVGKFRPSIALSQEELLSEGLWDFDRMSRPYILQETLEEKFGSFWTVIAANFLNEYKKQHYEFKEDCNTEKKIIAKLKNSSEKSLWLEKEDSIRRGLFDLLQNIVLIRDPEDSTKFYPRFNQEDTSSFNDLDEHSKYPQKIVL

SEQ ID NO: 45020 - protein, 267 aa, Oryza sativa
MPDLSTVCLPLSPQPPSTAAAAGGELAGEQPAAAAVTTAAAAVSASAEAEAAGEAESASGGDGAPVLPVECRWSGRVRSFAGAGEGAGAAAVPACPAPRRGGGKKPSSAPSPSSTVATAPAHPSGRPFEEYVKEWKAKKAALGVPAGRCELPFLTGTPKAVECRLCSKIIHPGEEIKCSVSRCGELFHLTCAAEDTTNFIAESFKCPQHGCMVCKQKMFFWRCGRCTVAAHTKCAPWPVIHLKDDQGSAICWRHPSDWLLQNEDYFV

SEQ ID NO: 45021 - protein, 205 aa, Oryza sativa; identical to SEQ ID NO: 28762

SEQ ID NO: 45022 - protein, 364 aa, Oryza sativa
MEEHGKAAVGWAARDDSGVLSPYNFSRRAQKDDDVTIKVLYCGICHTDLHIVKNDWGNAMYPVVPGHEIVGVVTGVGAGVTKFKAGDTVGVGYFVASCRGCECCGNGYENYCAKMVTTCNGVDHDHGGGAATQGGFSDAIVVNEHYVLRVPAGLPLDSAAPLLCAGVTVYSPMVIHGLNAPGKHVGVVGLGGLGHVAVKFAKAFGMRVTVISTSPGKRQEALEHLGADEFLVSRDAGQMAAAAATMDGILNTVSAWHPIAPLFSLMKPMAQMVFVGGPTRPLELPAYAIVPGGKGITGNCVGGIRDCQAMLDFAGEHGITAEVEVIKMDYVNTAMERLEKNDVRYRFVIDVAGSSLAGSGDAKI

SEQ ID NO: 45023 - protein, 357 aa, Oryza sativa
MAGARSVGSLPVPNVQALAEICNDPDEHIPERYIRPEASSEEVINNYQGDMAIPIIDLKKLLCPQSSEEECVKLRSACQYWGFFLLINHGVPDEVIANLKRDIVDFFSQPLDTKKEYTQLPNSLEGYGQSFVFSEDQKLDWADMLYLHVHPSDSRDLRFWPTSPASFRQSIDAYSSETKSLALCLFEFMAKAVGAKPESLLDLFEEQPRGLRMAYYPPCRQADKVMGLSPHSDAGGLTLLLEINNVQGLQIKKDGKWFSIDAPNGALIANIGDTLEILSNGKFRSVEHRAVINPNKERISAALFHYPSENMVISPLPEFVKDGKVKYRSISYLDFMKQIFTQQLDGKNRVEVLKLDQ

SEQ ID NO: 45024 - protein, 112 aa, Oryza sativa; identical to SEQ ID NO: 42605

SEQ ID NO: 45025 - protein, 88 aa, Oryza sativa
MEFRRRRPPPRALPCPAHLLPHPQALSACFSSPPVAAVTLFCVGLHGAATTVASARKRPMDQWWEHLARTHSLKNQTLACDGKQARGC

SEQ ID NO: 45026 - protein, 641 aa, Oryza sativa
MMGGGLVMDQGMMFPGVHNFVDLLQQNGGDKNLGFGALVPQTSSGEQCVMGKGDLVDPPPESFPDAGEDDSDDDVEDIEELERRMWRDRMKLKRLKELQLSRGKDPAGGVVGDPSKPRQSQEQARRKKMSRAQDGILKYMLKMMEVCRAQGFVYGIIPEKGKPVSGASDNLRGWWKEKVRFDRNGPAAIAKYQADNAVPGFESELASGTGSPHSLQELQDTTLGSLLSALMQHCDPPQRRYPLEKGVPPPWWPTGDEEWWPELGIPKDQGPPPYKKPHDLKKAWKVSVLTAVIKHMSPDIEKIRRLVRQSKCLQDKMTAKEISTWLAVVKQEEELYLKLNPGARPPAPTGGITSAISFNASSSEYDVDVVDDCKGDEAGNQKAVVVADPTAFNLGAAMLNDKFLMPASMKEEATDVEFIQKRSASGAEPELMLNNRVYTCHNVQCPHSDYGYGFLDRNARNSHQYTCKYNDPLQQSTENKPSPPAIFPATYNTPNQALNNLDFGLPMDGQRSITELMNMYDNNFVANKNLSNDNATIMERPNAVNPRIQIEEGFFGQGSGIGGSNGGVFEDVNGMMQQPQQTTPAQQQFFIRDDTPFGNQMGDINGASEFRFGSGFNMSGAVEYPGAMQGQQKNDGSNWYY

SEQ ID NO: 45027 - protein, 354 aa, Oryza sativa
MTSCGCLVLEKVEDHGGEAAGRGRGRLAQGGGGGGGGCGSCAGEWRSRSETMFPIYVMGSSRASSAAAARGIVDAAGDPIWEAVKSEAKSEAEKEPILSSFLYASVLSHDCLERALSFVLANRLEDPTLLATQLIDIFNDVMMNNKDIRRSIRLDAQAFKDRDPACAQYSWALLYLKGYHSVQSYRIAHVLWNQGRKVLALALQSRISEVFAVDIHPAARIGEGILLDHGTGLVIGETAIVGNWVSLMQGVTLGGTGKENGDRHPKIGQGALLGAGATILGNINVGEGAMIAAGSLVLKDVPPHSMAVGNPAKVVGYKDKEDPSLTMKHDARRDYFEHVAVSFSDDRANGSVVK

SEQ ID NO: 45028 - protein, 374 aa, Oryza sativa
MKLEHDFHMAIGEAEDNYANNSRLQRKALLKTKPVLDKAVRQVCMALHPRAMIVADLGFSVDANTLLFVSDVINTVADAQHHDELRCHPMELQFFLNDLSGNDFNQVFKSVKQFTKSIAASHPKGVALPPFYISGLPGSYYTRLFPCQSVHLFHSSYCLHWRSQMIKDMDEKMSDINGGNIYIAKSMPPSVVKMFQDQFQKDMSLFLKLRHQELVPGGQMLLTFLGRKKEGVLDGDLSHLCALLAEALQALVTEGLVEREKLESFNLPLYGPSIDEVKAVIALNKLFGIDHIQLFESNWDPYDDMENDGMCSSPQHGVNVAKSIRAVFEPLLASHFGECILDELFQRYARNVERHLAEDNTKYSVIVLLLNRKV

SEQ ID NO: 45029 - protein, 284 aa, Oryza sativa; identical to SEQ ID NO: 30591

SEQ ID NO: 45030 - protein, 761 aa, Oryza sativa
MVRFFCFSSSTSTTHHRAKEHFLPAEQVILGASQKDTMLAVSQMDSQDQTVKSNAGSASPNQLTDVNDHSNVSRQYDTSPSSHQECWRSEDLNRYACSDDSKESGHLKKSLSLGNMLHKDHDHHFSEGAECDIIDCDHKGHCSSLKSNSAVGDSAKLNTKGNENAFDALSDLVSPSGDHVVDSDSHYLCYDQTKFPRSQSAIFQNNSNCGTEGSADSEILGPRCRSYEDLCSAVSEKVDYLNSDLCSAVSEKVDYLNSVEPHHSKSNLDVHCAGPSSPDVYERMNFEDNGSIGCSDAADGGQRSTASAEESFVRDGMLSHEYWDNKYVSGHQSVDPVAPYYSGTGDGSHHSNNDGGINEALDQERKDNLWNRDSTPYHKSLVIDASDLKLCDSKDISEELKHNRTGINDNQYFDVDPDELSPRTFSIKRIEDWINQIDIDDGTLVEEQGESSNSVLTKYNEPVAGVPAVRPDAKSPLGMEIAYTYISKLTPTSSSAQLGNLGLVAIPRLSAFLGLRLLNLSGNSIVRITAGALPRGLHMLSLSKNNISTIEGLRELTRLRLLDISYNRISRIGHGLASCSSLKELYLGGNKISEVDGLHRLLKLKVLDLRHNKISTSKGLGQLAANYSSLEAVNLDGNPAQKNVGDEHLKKYLVGLLPNLGFYNKHPIRASGSKEVSDRHTRKISSSHRSDRSGRSDRKSSRLVASTSSYKAQSSRHARSGHASSSFLKNPRGRSMAVAASGPRLMEYGGAGDVQIERKAQ

SEQ ID NO: 45031 - protein, 259 aa, Oryza sativa
MDFEPLPSAAGDATADETPPGRAVCSSGCGRPTTVCLCPYLPATPLPTSTTVVILHHPHALRRNPLSTLPLLARSLSNLRLIPGRRLLPSSAPVISRSPVLLLFPSPDAADLASWCRSTPPPARANPTLLLLDGTWKQAKEMHAASLPFLSSFAVPVSLPVDCGVDGDSMFEGELVVKKEPHKGCVSTMEAVARALRLLEPEGRGEEIEETMVGVLRAMVAFQAEHLQHRPMKPRVKMRKKKDIKREEEMKRNTLDWSD

SEQ ID NO: 45032 - protein, 943 aa, Oryza sativa
MAKVPDLGSDFAQKLLLDLRRRRERLGFDSPAPPQRTSSSNAAVLPRDSHSSSQRPHRSQKPQQAAPRAGRAEATANRSHPQSGNAIAGAGKPRHRATPVANSHQIVPFQGGGSAKQKPANSSIDVQMALAIALSNRGKLQNIELVSRNGSIFFRDTDHAMPESHLVSPSAHVGKVAIGVKKLNDILMVYSSGGGARDTGRRSSVDIGRELFGGAMDLEESLSMLVMLQEASDYMEGSGNGKVLLLEGKENLKNSARSPSSARLVEIVDEDSEAEQAKNSKSLSMQIVPHKNSQGFSTPNSSSVLQVSTVTGNNSRSNSSKADKDDAKVRMPNVIAKLMGLDNLPSTKVANKGMEKFVKPEALSRKDRRTNLVGGRLPIQIIGSERVSSKGHNMNLLPGEWKIGLKNYEVYKSANLQVSNSSSIPAADKQTRQTMRQMLSKMENAERRGSLGQQLHEEKKLTEETNQQKVANVGCRTDAGKKMDFLKRIRKISGSRQVTEEKHIIQEESTTGKKQTTSMKQLLGTDSEDKSKITRVKFNKENLATTEIKNAARGKNGKTDQRKRQSYNKQTDVHSMPKKSQKYREMKSKEGIQNLEHKRSTKSEATQLKILPYTAEIQQENGKHEEDNDIVKPSDSHGDGGISEQFAGMVEDSRTTGMASPDQFMKQITEVTSIDVHASDRSNVVDQSVTQTNDDTGSNTASEATQTPETFTEGEHHQNLQLVEFKEKPLDDLGDAKETSNPTDLQDQKMHVVSCDSFTENQLLLMRMLLKDQYLLETAKALVRNPVPVHFVNASADRWSEKGSSLFSDIAREVIRKKGKRTEAIVEVSMANTTNMKLQYLDDLIMELDGDIESLNISKKSQHLGEDCTAENLRMILHRDMQNNHPDANSMWDFGWNRISDLPIERNEVVRDLEKNILGGMITDVARELIELSVRHGCCACEA

SEQ ID NO: 45033 - protein, 207 aa, Oryza sativa
MAIATTTLPLAPLALAPPSSPISQCSLLLLRPRAPAALSLRPSARLLVAVAAREPELGGSGGGGAGDGSGSGGGGDSEKPRGGGGDEEGEGEEEKMGQGLSMSQKITLAYAALVGAGGAMGYMKSGSQKSLAAGGISALVLYFVHTQLPVRPVFASSIGLGISAALLSVMGSRFKKSGKIFPAGVVSLVSLVMVGGYIHGILRSTHA

SEQ ID NO: 45034 - protein, 393 aa, Oryza sativa
MVHHLRRHMISLLLRPAYPHPTAAISPLSSLRRLLLFSTTAAPVSPELFAVEDYLVATWGLTGAQARKASKKLSHLRSPSKPDAVLAFLSDLGLPPRKIAAVATADPRFLCADVESNLARRVDELGGLGLSRSQIARLVPLALTCFRSSSVGTNLGFWLQIVGSFDKILKALRMNSSLLGSDLEKVVKPNLELLKQCGMSDFATSFPLYTSRLFTANPIYLRDAVARVEELGLDRSSRMFRHGLIAVAFTSKESVARKIQVMEELGFSRDELLMIIRKAPQLVASSEEKIRQAAEFLKRDVGLEGRYIAHRPVLFLYSLERRLLPRHHLLKVLRMKGLLDCELDYYNTAAMSERKFVRKFVDPYKCHIPGLADAYTSSCAGETANGVASLLGV

SEQ ID NO: 45035 - protein, 268 aa, Oryza sativa
MLRAPPQAPRASRRPPPPRCSPAAGASPPPSAGGIRRLVLTPEGRAKLDARPDRDFYAFPRLVKHVDDGFLAALADLYRERLRPGWDVLDLMSSWVSHLPPERELPLRRVVGHGLNAQELAKNPRLDYFFVKDLNKEQRLELQTSSLDAVLCTVSVQYLQSPEKVFAEIFRVLKPGGVCIVSFSNRMFYEKAIGAWREGTAYSRVQLVTQYFQCVDGFTEPEVVRKLPSDAAGGKPASPLDAVMRLFGMAGSSDPFYAVISYRNFKPM

SEQ ID NO: 45036 - protein, 1011 aa, Oryza sativa
MMSNLKLGVEVTSAHDLLPKEQGTCNPYVEIEFDDQKFRTAIKERDINPVWNEQFYFNISDPSRLTEKDLEAYVYHANRASNSKTCLGKVRISGTSFVSHSDATPLHYPLEKRTILSRARGELGLRVFLTDDPSVRVSAPGQEFDFISTPTTAQEQVAANAIPNPFQETRADQVRQFQHLPKEQHQHRPQPMTAQPYYPESSYGQQQQKTYSAVGNKAEGPPPPVMRMYAQGPQQQPVEFQLKETSPTLGGGRVIGGRVIPGEKAGAYDLVEKMQYLFVRVVKARDLPHMDITGSLDPYVEVHLGNYKMKTRHFEKNQRPEWDEVFAFPREVMQSTSLEVIVKDKDFIRDDYVGRVSIDLNEVPLRVPPDSPLAPEWYRLVGKEGHRDKGELMLAVWYGTQADECFPSAIHAGSEPIDSHLHNYIRGKVYPVPRMWYVRVNVIGAQDIFPMENHIPDVFVKVRLGHQMLKTRPARSPTRNFMWNEEMMFVAAEPFEEDLIIQIEDRVAQNKDEVIGETMIPLARLPRRADHKPVLPAWFDLRRPGLIDLNQLKEDKFYAKVQLRICLEGGYHVLDESTQYCSDLRPTMKQLWKPPIGLLEVGILSANGLNPTKTKHERGSCDAYCVAKYGQKWVRTRTIVDNLNPRFNEQYTWDVFDHGTVLTIGLFDNCHISADSNHSSSPGHMDKPIGKVRIRLSTLETGRVYTHTYPLLVLHPSGVKKMGELHLAIRFTATSLLNVLFTYSRPLLPKMHYAQPLSIVQQEMLRHQAVQLVAQRLGRMEPPVRREVVEFMSDARSHLWSMRRSKANFFRLMQVFSGFIAAGKWFGDVCQWKNPVTTVLVHVLFIMLVFYPDLILPTIFLYMFLIGLWNYRFRPRFPPHMNTRISHADMTNPDELDEEFDTFPTSKSPDLVRMRYDRLRHVAGRIQTVVGDIATQGERLQSLLSWRDPRATSMFLLFCLLTAVILYVTPFQVIALCLGFFWMRHPRFRHKVPSAPVNFFRRLPAKTDSLL

SEQ ID NO: 45037 - protein, 582 aa, Oryza sativa
MELVYLERRNGFDEDSTSPEFSGRSAIDHQQLSIATPEVESDLGQTIYKQPLPSDEKKSRSCQSCHKSPCSCRSEVFHSDLYPTLPAKMMILEFLIRSLRHPRRTHNVSDLDDMISNGASTGSVVLGPSEKMMLDSLHSLVDAKTRPKSPSFFHSGTKMRKARSKSHIITQSEILKLISPETWEISSPGVSPLKKSTAELSMHEKMVSSDTPSMSSNQPVLSSCPSSLSAGLLQCIWKDGLPHFELSLDNPMAVYTANPTKAHDNDKPLDYVYLFHSGEQGRKDWLGNSSSVSRLVGKMKVSSSLVLNPDKSTSMETEFVLYGSPDDYLRQMQSSYGVTKGKGLAKRVADIMKPSNLNSSPKHVWKFGKSSSQQIDEMTEIPEGEQCSAKESVLKNLVADDLPTNQEIAAIVVRKQRRERRKSPVLGGWGLKFLEKAGATHPGSTEDGDVQNKKNNAGSVSAIFPRGYHGGAASKNGSPASLIGRWRSGGRCDCGGWDIGCPIRVLQNDGCGTSPQAESQSQDRKSVELSVKGAKKGPMFRLVNITDDLHIIYFDSSLSPLQCFSAGIAIIHSQAPHLYPKL

SEQ ID NO: 45038 - protein, 1359 aa, Oryza sativa
MWHLRGRSSVTAAAAAALHKPVAHLRLLLAVSAWSVPAAASNVAAASTTTRGGPSPSAGVAPRAMPSSSSSPPSAAEGTTAAAGGFRLTEPSFLESLMPKKEIGVDRFLAAHPEYDGRGALIAIFDSGVDPAAAGLQTTSDGKPKILDVIDCTGSGDVDTSKVVKADDDGSIVGASGTHLTINPSWKNPSQEWHVGCKLVYELFTDTLTSRLKKERKKKWDEHNQEAISEALKQLNEFEKKHSKCDDAKQKMAREDLQSRLEYLRKQAEGYDDRGPVIDIVAWHDGDVWRVAVDTQGLEGNKNCGKLADFVPLTNYRLERKFGIFSKLDACSFVANIYDDGNLVSIVTDCSPHATHVAGIAAAFHPDEPLLNGVAPGAQLISCKIGDTRLGSMETGTGLVRALIAAVEHKCDLINMSYGEPTLLPDYGRFIDLASEVVDKHRIIFISSAGNNGPALNTVGAPGGTSSSIIGVGAYVSPAMAAGAHCVVQAPAEGMEYTWSSRGPTADGDLGVSISAPGGAVAPVPTWTLQSRMLMNGTSMSSPSACGGVALLVSAMKAEGIPLSPYTVRKAIENTAASISDVPEEKLTTGHGLLQVDRAFEYAQQAKELPLVSYRISINQVGKPTSKLRGIYLRGSNTCRQTSEWTVQLDPKFHEDASNMEQLVPFEECLQLHSTDSSVIKIPEYIMVTNNGRTFNIVVNPVNISSGLHYYEVYGIDCKAPWRGPIFRVPITVIKPIALSGEPPALTLSNLSFKSGHIERRFINVPIGASWVEVTMRTSAFDTPRRFFLDTVQICPLKRPIKWEAVVTFSSPSLKNFSFPVEGGLTLELSIAQFWSSGIASHEPTCVDFEIVFHGISVDQKIIGLDGSEAPVRVVARSLLASERLVPVATLNKVKTPYRPVESNLCSLPPSRDRLPSGKQIIALTLTYKFKLEDGAEIKPRVPLLNNRIYDNKFESQYYRISDSNKCVYSSGDVYPNYVKLSKGEYTLQLYIRHDNVQLLEKLKQLVLFIERKLEKKDFIQLSFYSEPDGPTVGNGTFKSSILVPGEPEAFYVGPPSREKLPKNVLPGSVLVGSITYGAVSSFSKKDDQNQHAPASYSISYLIPPSKVDNDKEKGVSSGRKSISERLDDEVRDTKIKFLSGFNQETEDDKSSWTALVASLKPEYPKYTPLLAKILECIVQKATSDDKFSHQKEIIAAAEEVVDSIDKEDLAKSLSLKPDPEDEEAQKNKKKMEETRDQLADALYQKGLSLAEIESLKTDESTEASAKDVFEENYKELIKWVDAKTTKYGSLTVLRERRCGRLGTALKVLNDMIQDDSEQPKKRLYDLKIQLIEEIGWVHVSAYEKQWMHVRFPPSLPPF

SEQ ID NO: 45039 - protein, 490 aa, Oryza sativa
MAAANLLSRALLPALNPNPSSHSNRVSPSAVSLRCRHGLTASVRASLSTAAPSPPPRPAAAAADGRAPKRCFRRGADGHLYCEGVRVEDAMGAAERTPFYLYSKPQVVRNFTAYRDALEGLRSIVGYAVKANNNLRVLQLLRELGCGAVLVSGNELRLALRAGFDPTRCIFNGNGKTLEDLVLAAESGVFVNIDSEFDLENIVTAARVAGKKVPVLLRINPDVDPQVHPYVATGNKTSKFGIRNEKLQWFLDSIKSYSNDITLVGVHCHLGSTITKVDIFRDAAGLMVNYVDEIRAQGFELEYLNIGGGLGIDYHHTDAVLPTPMDLINTVRELVLSRDLTLIIEPGRSLIANTCCFVNRVTGVKSNGTKNFIVVDGSMAELIRPSLYGAYQHIELVSPSPDAEVATFDIVGPVCESADFLGKDRELPTPDKGAGLVVHDAGAYCMSMASTYNLKLRPPEYWVEDDGSIAKIRRGESFDDYMKFFDNLSA

SEQ ID NO: 45040 - protein, 596 aa, Oryza sativa
MADAEAAGVTGAAREGGQEALTAGRDGDECCASCGGGDDEGCCGVEEDDESDGKVFDRATFSRLLRKVSLGEAKEFSKMSYLCNIAHMIPKITPKLLRRYNLRFVTSSVQEKAKTGVDQKQELKTEEGESSDQESEVVENPEPGSNKKKESGLGVNPFGAYHVMSSAASYLHSRAMGVVPFGSRNDGKNDPTIMAIVNGESGEGLTMDEASFVATTNSVTSMVAAKEETRQAVADDLNSSRSCPCEWFICDDDQGSTRYFVVQGSESIASWQANLLFEPVKFEGLDVLVHRGIYEAAKGMYHQMLPYVKSHLRSSGKSATLRFTGHSLGGSLALLVNLMLLMRGAAPASSLLPVITFGAPCIMCGGDHLLRKLGLPRNHVQSVTMHRDIVPRVFSCNYPDHVANILKLANGNFRSHPCLTNQKLLYAPMGEMFILQPDKRLSPHHDLLPPDSGIYHLSDSSSSSGTSLRRLRSAMSTFFNSPHPLEILKDKSAYGPKGAVYRDHDVNSYLRSVRAVVRKEVRRHRETRRGRWRRLLLWWPLGAHGALAGAGVLLDAAVEGGRETARQARAHARLLVVLLVPAKLLVIGAFLVVRLM

SEQ ID NO: 45041 - protein, 93 aa, Oryza sativa
MAMKCLLVFFLVAFFPGAAVSAGLKVGFYNETCPSAEALVQQAVAAAFKNNSGVAAGLIRLHFHDCFVRVRLHLSRSILVSFITALFGVRTAS

SEQ ID NO: 45042 - protein, 548 aa, Oryza sativa
MAWWSCFGCGPSIAAEGEVRLPEPFQLPAPLPDWPQGGDFSKGTICIGELEVASITKFQSIWSCSGATFYEPQEIPDGFHCLGHYAQQNDRPLQGFLLVAREAASCQSINLKPALEKPLDYTLVWTSTDLNDDDNSDCGCFWSPSPPDGYEALGYVVTRGPKKPSLDAVRCVRGDLTDECENFKSITNMGGNCYIWNTRPCHRGMAGRGIPVGTFFCGTDTEESDIPCLKNFDSSLSSMPNLEQIKALIEHYGPTVFFHPQEIYLPSSVSWFFENGATLHKKGKEMGDVILASGSNLPAGGTNDGEYWIDIPDGDRNEYVKAGNLKSAELYVHIKPAHGGTFTDIAMWVFCPFNGPATIKVGFASFALQKVGRHTGDWEHFTLRISNFSGELSSIYFSQHSGGDWVDACDLEFISGNKAIVYSAKDGHASYAHPGCYLLGSEKAGVGVRNDAARSDILVDSSTRYKIISAGNLGDAVIEPCWLQYMREWGPTVEYNSRSEIDAVLSFLPFFLRFTAEAILNSLPVELYEEEGPTGPKEKNNWEGDERG

SEQ ID NO: 45043 - protein, 158 aa, Oryza sativa
MVLKLSCISRRTRLAGAGAGQGHRRRRLAQGAPCGRLSRRSPTCSVARASPSSCATSTRSTSTCSRRRWRRGWSLRPGQIYLRAPVGDARAAAVHRRHGRAGGVREPPLAAVKAPLRRGVRRAATGRLRRCASRRCGTRCSTSNGVLFPREAQRADSG

SEQ ID NO: 45044 - protein, 354 aa, Oryza sativa; identical to SEQ ID NO: 33050

SEQ ID NO: 45045 - protein, 313 aa, Oryza sativa
MATATATATAAAAAASSSRLPFRRAASSSSSSQLRLPAVPPPHRASFAVVALHKRNPKRLKYASQRQFTRGDAGMLRVQVEPSGEDAWKLEPVVELINRGAVGIIPTDTVYSIVCDLSNNDSVERLRRIKGIGDSKPLSILCRSLRDIDTYTTGFPRGTNQGQANIFRAVKRVIPGPYTFILPATKELPKQCIRHGSSTRYAKRRQVGVRLPDDPICEAILQNLDEPLICTSVKSLSEDEWILDQVIIADIYEQQGLDFIVDGGTRIADPSTVVDMTGSYPTIIRQGKGPKLDWMVAEDEEQESRPTFAYKAA

SEQ ID NO: 45046 - protein, 349 aa, Oryza sativa
MGYSYSSAAVAVSVLVVALAAAASGQLSTTFYASSCPTALSTIRSAVNAAVAREPRMGASLLRLHFHDCFVQGCDASILLADNATFRGEQGAFPNVNSLRGFEVISSIKMQLEASCRQTVSCADILAVAARDSVVALGGPSYPVELGRRDGMTTNQTMANTNLHPPTTDLGNFVTSFAGKGLSPTDLVVLTGAHTVGVAQCTNFRSRLYGESNINAPFAASLRASCPQAGGDTNLAPLDSTPNAFDNAFFTDLIAGRGLLHSDQELYRGDGSGTDALVRVYAANPARFNADFAAAMSAHGRHQAAHRHAGRDQAQLLQGQLICISLRNASIYCTYVDRIESNKTRLLIS

SEQ ID NO: 45047 - protein, 145 aa, Oryza sativa
MRELVAGNEMQRRGLEHRMSELEGHMIDICGSLRTSFTSLHQLAGECSVTTTIPAHPDEFSLTSSLVELATAMEEITSKHAARIGEETSNGIYTGACHVLACMRLAYPDLDLKKALDLGAADDARKDTMEEVGDLGESVLPLFEE

SEQ ID NO: 45048 - protein, 961 aa, Oryza sativa
MAALVRPAVLPVCAMTGGGGNDKRSPPQQRSWWGGNKQRLPHQPRRQRAGMVAEEEEEGRWTRCSECSAATASFSRRQPDAPLRDIFWLRFLEKKKQQRRRKQPKPKPKPPEQQQQQEEAAAAIQAPSFPPPSYRPGLSCLDLMTADFEALKLYIGYSKHAIEQQFLKGKRQPQHQQTPKPKLQQQQQQQKKKQQQQEQQNQTLQPPAFPPPSYPPGLSCMELMMADIEALKLYINYYVAILTTPLPQHYDPEILSRYFTSRPHILAFRTIQIIFAFVSAAVKMQISKRTNLITDATYSCNSTGSKGFNASQYMVGQLLKETFLDLGPTFVKVGQSLSTRPDITGSEISEALAELHEKVPPFPRKDAMKIIEGEFELPVSHIFSYISDEPVAAASFGQVYQGRTVDGALVAIKVQRPNLLPSVLRDIYILRLGLSFVRKVAKRKSNIALYADELGKGLVGELDYNIEAANATKFLEYHSRYSFMLVPKVLKQLTRRRVLTMEWVSGENPTDLLSLSKGISSEIAESSEKQKIEATARLLDLVNKGVEASLVQLLETGLLHADPHPGNLRYTPEGRVGFLDFGLLCMMEKKHQHAMLASIVHIVNGDWASLVYDLTAMDVVPPRTNLRRVTMDLEDALGEVTFEDGIPDIKFSRVLGKIWSVAFKYHFRMPPYYTLVLRSLASLEGLAIAADGTFKTFQAAYPYVVRKLLSDNSVATRRLLHQAIFNKRKEFQWNKITVFLKLASARGNFRYNTGVLPERKGLDVAKLVEISDASSSLHLNRATPERALHTANLCLRLLLSKESIVIRRLVMTANAKSLARDLISKDASIYRVLLSRVLADVIFQWMVKATGFKRAGQLEPHPRVTAGKNDEDLGLSKEAPALVTFQTAVRDRRLKVIFSKFVRDIREDPILMVRVSWNMFAISVVSAAIGVHRFIVVLSEEFLSTLPPPVPPPRLVQIQSI

SEQ ID NO: 45049 - protein, 828 aa, Oryza sativa
MVKFSKQFEGQLVPEWKDAFVDYWQLKKDIKRLQAAEAEAAGVAATTPLSQCQAPVAAAHWVMRLPFLHPHGHHHKEHGAIQVHRKLASGGGGGGGAVAGEVYETELVDGGAGFADGEAARAFFARLDEQLNKVNRFYERKEAEFVERGESLRRQLQILAELRAAVVAEQQRDGRRRRCGNGGDSSPPDTEDPSVSCSILHGDQSLRGTSEQEQEGQEKLTKDMIARSPDEGDDDQLTIPQELGDSGRLGRPREEAANTRPRTTLPGGRAVTCQGRSVRINIPVTTPTRTVTAIRELLFDDMLSQSRRSGSANGTKCGDKLSINKRKVHQAEKMIRGALIELYKGLGYLKTYRSLNMMAFVKILKKFDKVTAKEAQSIYLKVVESSYFNVSDKVIRLMDDVDELFVRHFAEGDKRKAMKYLKPNQREESHTTTFFIGLFTGGFAALFIGYCIMAHIAGMYTQQSNKVYMATSYPVLSMFSLFFLHLFLYGCNIFMWRKTRINYTFIFEFTPTKELKYRDVFLICTTSMTIVIGVMFAHLTLIVKGYSSCAVQAIPGALLLVFLLILVCPFNILYRSCRYHFLTVIRNIILTPFYKVVMVDFFMADQLCSQVPLLRSLEYLACYYITSSYKTQDYGYCTRVKHFRDLAYAVSFLPYYWRAMQCARRWFDEGDINHIVNLGKYVSAMLAAGTKVAYENDNSAGWLSLVVIVSSLATIYQLYWDFVKDWGLLQFNSKNPWLRNDLILKQKYIYFLSMGLNIILRLAWLQTVIHPNIGSLDSRVTLFILAALEVIRRGHWNFYRLENEHLNNAGKFRAVKVVPLPFHEVEED

SEQ ID NO: 45050 - protein, 104 aa, Oryza sativa
MVACVIFVQYLYSLACIYYRLIVSFNSQLLARRLVLGKGYDKLAETDESRKKINKFKESAWKFVYFLSAELLSLSVTYNEPWFKNTRNFWVGPGEQIWPDQKTK

SEQ ID NO: 45051 - protein, 404 aa, Oryza sativa
MSWRRLELAALCAYALGFYLVVIRKSLRLSHDYSGRLYGLRAGSLAGHLNDLSDAQWRNFRGNLPVLTIVMGAFLMLANMLRYCYSLKGRGASLVWLLLSVTYLCYLHGACVSFILLIALINYSIVKLFSRYKYCVGLIWSFNLAVLILNRVYEGYSFSLFGQQLAFLDNHRGTFRWHICFNFVVLRMISFGCDYCWSLRSSQFDHKKHMQRCQVCYSGKTCYFALQERALIGDKYTLLTYLCYLTYAPLYIAGPIVSYNAFAAQLDAPQKNYSVAQISWYGVRWILSFLLMEAMTHFFHYNAFVVSRLWQQLSPFEIFIISYGVLNFMWLKFFLIWRYFRFWSLVGGVETPENMPRCINNCHDLESFWKSWHASFNRWLVRYLTFLLGVLKENYLVSGWYSRL

SEQ ID NO: 45052 - protein, 232 aa, Oryza sativa; identical to SEQ ID NO: 33011

SEQ ID NO: 45053 - protein, 535 aa, Oryza sativa
MALAFDEFGRPFIILREQEKKSRLRGLDAQKANIAAGKAVARILRTSLGPKGMDKMLQSPDGDVTITNDGATILEQMDVDNQIAKLMVELSCSQDYEIGDGTTGVVVMAGSLLEQAEKLLERGIHPIRIAEGYELASRIAFDHLEHISHKFEFSATNIEPLVQTCMTTLSSKIVNRCKRTLAEIAVKAVLAVADLERKDVNLDLIKVEGKVGGKLEDTELVYGIIVDKDMSHPQMPKRIEDAKIAILTCPFEPPKPKTKHKVDIDTVEKFQMLREQEQKYFDEMVQKCKDVGATLVICQWGFDDEANHLLMHRNLPAVRWVGGVELELIAIATGGRIVPRFQELSPEKLGKAGIVREKSFGTTKDRMLYIEQCANSRAVTIFIRGGNKMMIEETKRSLHDALCVARNLIRNNSIVYGGGSAEISCSVAVEAAADRYPGVEQYAIRSFADALDAIPLALAENSGLSPIDTLTAVKSQQVKESNPHCGIDCNDVGTNHMKEQNVFETLIGKQQQILLATQVVKMILKIDDVISPSDY

SEQ ID NO: 45054 - protein, 666 aa, Oryza sativa
MGGLRVDLSGAEIRVDPACGAAADDGGSPPVFLPRQPAAPPLLALDIGGTLIKLVYTASCGGGGAELRFAKFERRRMQECFDFVRAQGLVHRNGSTMGSSKENIALKASGGGAYKYTEDFREKLGVCLDKVDEMDSVVSGANFLLQSVPGAAFTHMNGKKSSVDISPNNLFPYLLVNIGSGVSILKVTGNRKFERVTGTHIGGGTMFGLAKLLTGCKSYDEFLQLSQKGDNFVLDLIVKDICGELVCQKQGLSTSTLASSFGKVITSKKKLTDYRPEDLASTLLSAFTYNIAQISFLVASILHLRRVFFGGSYIRGHKSTMQNISYAIDFWSQSKMQAVFLQHEGYLGALGALMSYGDSGDKNMNLEEMKEEENIHESATPIDETSTDEHNDGNIFPYLLVNIGSGVSMIEVTGNGKFERIIGSHLGGGTILGLARLLTGCSSYDEFLELSQRGNNLAVDLTVGDIYGEHGYPKIGLPASTTAASFGKVSSSRLSEYKVEDLAAALLNSFTYNIGQIAYFVANLSGLKRIFFRGAYICGHEKTMDKISHSLKYWSKGQVQTTFLCHEGFLGTLGAFWSYENMGIDGLAAHEVIREVLLGAPYTGQLPSLPLTHQQDNGEDTTIEGEVERLRHDNAVLKAELERLQRENTELKAKLVKSGKPNTFYH

SEQ ID NO: 45055 - protein, 183 aa, Oryza sativa; identical to SEQ ID NO: 30401

SEQ ID NO: 45056 - protein, 293 aa, Oryza sativa
MTTIAARMPFAGPRLRPPCNLTASRPGPRRAGLAVVSAAAGGPLPTVLVTGAGGRTGQIVYKKLKERADQFVGRGLVRTEESKAKIGGAADVFVGDIRDPASIAPAIDGIDALIILTSAVPKMKPGFDPSKGGRPEFYFEDGSYPEQVDWIGQRNQIDAAKSIGVKQVVLVGSMGGTDVNHPLNKLGNANILVWKRKAEQYLADSGLPYTIIRAGGLQDKDGGVRELLVGKDDEILKTETKTITRADVAEVCLQALLFEEARFKAFDLASKPEGEGVPTTDFRALFSQVNSRF

SEQ ID NO: 45057 - protein, 213 aa, Oryza sativa
MVLGLGTGSTAAFAVAEIGALLASGKLSGIVGVPTSKRTFEQAQSLGIPLSTLDDHPRIDLAIDGADEVDPDLNLVKGRGGALLREKMVEAASDKFIVVVDETKLVTGLGGSGLAMPVEVVQFCWKYNQVRLQDLFNDEGCEAKLRLDEGGKPYVTDNSNYIVDLYFKTPIKDALAAGKEISALEGVVEHGLFLDMATSMIIAGTDGVSVKTK

SEQ ID NO: 45058 - protein, 473 aa, Oryza sativa
MDQHQLDEENQRAALFHSSAPSSSLGADGEEERETVPLLSCKMADDKSDTVQVSEDTAHQISIDPWYQVGFILTTGVNSAYVLGYSASIMVPLGWIGGTCGLILAAAISMYANALLAHLHEVGGKRHIRYRDLAGHIYGRKMYSLTWALQYVNLFMINTGLIILAGQALKAIYVLFRDDGVLKLPYCIALSGFVCALFAFGIPYLSALRIWLGLSTVFSLIYIMIAFVMSLRDGITTPAKDYTIPGSHSDRIFTTIGAVANLVFAYNTGMLPEIQATIRPPVVKNMEKALWFQFTVGSLPLYAVTFMGYWAYGSSTSSYLLNSVKGPIWIKTVANLSAFLQTVIALHIFASPMYEFLDTRFGSGHGGPFAIHNIMFRVGVRGGYLTVNTLVAAMLPFLGDFMSLTGALSTFPLTFVLANHMYLTVKQNKMSIFRKCWHWLNVVGFSCLSVAAAVAAVRLITVDYSTYHLFADM

SEQ ID NO: 45059 - protein, 359 aa, Oryza sativa; identical to SEQ ID NO: 43206

SEQ ID NO: 45060 - protein, 424 aa, Oryza sativa
MDLERSPPPPPPEGGGGGGGGGASCSICLDPVVAGGRSVARLQCGHEFHLDCIGSAFNAKGAMQCPNCRKIEKGRWLYASGHHPSPDIDIGGWVTGETYDITSDIPFGFQWCPFSGFTQLASVFEEGEAEQTSYHTVGDHSNAASSSLVCPYLALRGFLHPVHVPSSSSSGAENSSFHRHPTSLEGHAAHDLSNTQVFHATESRNHDNDHRYMSNLPVSGIPDHSVAPFGIGLPRYDSSSQQRTRPYAHHRPLVHRPTPRNGSNMVTPLGSVPAVMAETRGHGHGARGHMYQQSMHSLQSSPFPPTSRRVRPRALTITSFIAASSSAEIGGHHGFAPPVNRCNSSDGEAVSRPVDRPYGWGQEGFTPFPWIPADGESHWWGTFNPMQNHTHGGFTRRPTGERMPQSHPDSGYHSMHPQRMPPFL

SEQ ID NO: 45061 - protein, 353 aa, Oryza sativa
MRKLDPKYEELYPCRKGVCQNTPGSYICKCKKGKKSDGTGYGCQPADSPDYRMVVGLSVSAIVVTAMACMLIMQLQRRRHKKEKIEYFKQNGGHRLYDEMISRQVDTIRILTEREIKRATENYNEDRVLGSGGHGMVYRGTLDDNKEVAIKKSRVINDDCREEFVNEIIILSQINHRNIVRLLGCCLDVDVPMLVYEFAHNGTLSEFLHGTDHRSPIPLDLRLKIATQAAEALAYLHSSTSRTILHGDVKSANILMDDQYNAKVADFGASTLKSMDESEFILFVQGTMGYLDPESFTSHQLTERSDVYSFGVVLLELLTRKKALYTNDFNKNESVVQISVDVSAEQTPSHARP

SEQ ID NO: 45062 - protein, 279 aa, Oryza sativa
MPVGPVKVVPRAMGMSKAGQKTCHRCGMKKAARIVQCKNCDNRYFCNSCINKWYSGLSKKDIKTRCPVCRGSCGCKQCTLGQTKGAISKESSGDQDKLISIKICNHQLYKLLPVELNQEQLDELEIEAKIQETKISDVRVQVADEQSGSLDCNNCKLSVHRFLRSCPRCPFKLCLSCCQKIRDGNISAATPEDKFNQRLLQQESAHEDGSISCPSIELGGCGDSLLNLVYVPPSDQSEEVSSGDELDGPGNHSGVKDAVAESNGGPDRLSVGQQETVSS

SEQ ID NO: 45063 - protein, 149 aa, Oryza sativa; identical to SEQ ID NO: 44821

SEQ ID NO: 45064 - protein, 348 aa, Oryza sativa
MLVYIRESDKDKIMCNVDEKDIAEHLRVRLKKEQEEKEHKKKEKAEAHLYTIIKVARDENLKEQIGKDIYFDLVDHEKVRSFRIQKQLLFTTFKEEVAKEYGIPVQFQRFWLWAKRQNHTYRPNRPLSPHEETQSVGQLREVSNKAHNAELKLFLEVELGPDLRPLPPPEKSKEDILLFFKLYNPEKEELCFVGRLFVKALGKPSEILTKLNEMAGFVPNEEIELYEEIKFEPNVMCEHIDKKATFRASQLEDGDIICFQKSPIPDSDTQMRYPDVPSYLEYVHNRQVVHFRLLEKPKDDDFSLELSKLHTYDDVVERVARQLGVDDPAKIRLTSHNCYSQQPKPQPI

SEQ ID NO: 45065 - protein, 126 aa, Oryza sativa
MDSTFRKLKLVLALVGIIDKRIAGTIRPESLRKYGETVEKCLAEYGVERPTMGDVLWNLEFVLQLQEAGPDMSNIDSMNQISELPSNAQRISSLEISTADESRTAMDYSQMSTSNAFSQLINTEGR

SEQ ID NO: 45066 - protein, 326 aa, Oryza sativa
MERYKVIREIGDGTCGNVFRAYNTETNEIVAVKKMKRKFFQWEECISLREVKALQKLNHPNIVKLKEVTMENHELFFIFENMECNLYDVIRERQAAFSEEEIRNFMVQILQGLAYMHNNGYFHRDLKPENLLVTDGTVKIADFGLAREVSSSPPYTDYVSTRWYRAPEVLLQSSAYTPAIDMWAVGAILAELFTLSPLFPGGSETDQLYKICAVLGTPDHTVWPEGMNLPRSSSFNFFQIPPRNLWELIPNATLEAIDLIQQLCSWDPRRRPTAEQSLQHPFFNVGNWVPRPLHASHTKTIETRPNPRLELNLWDFGTNLRTTTLI

SEQ ID NO: 45067 - protein, 476 aa, Oryza sativa
MNEKASVSKELNAKHKKILEGLLRLPENRECADCKSKGPRWASVNLGIFICMQCSGIHRSLGVHISKVRSATLDTWLPEQVAFIQSMGNEKSNSYWEAELPPNYDRVGIENFIRAKYEDKRWIPRNGSSRPSSGARDEKSSESQTSVNRGGHNQRSSFEQHRTSPAAVSKIAPVVSRTPTQAPHQPKAQPSVPKVSPPQPEKSPPNATPPKVERPSVAPPPKVDYATDLFNMLSMDGTTEKEAESSSNDDSAWEGFQSAEPVPSSDKKDSAKPVESKPQSTSGIEDLFKDSPAVTVSSAPAAPQVNVKNDIMSLFEKSSMVSPYAVQQQQLAFMTPQQLALLSQQQALLMAALKAGNAPQMIPGNASLLNGNGSNPANGGLPSQSWTNLAYQNPGLAPVAAQNGATKVANNNQEFSFGNFNFSTPGAYNTSSSVPANGAASAAANKSTSPTSSSLPSQSGKEYDFSSLTQGLFSKR

SEQ ID NO: 45068 - protein, 106 aa, Oryza sativa
MLQWICQDLCRVKPPTCSLANSWAWAILSHIIQIKEHSYPDQESLLCVYLIPKKHILIQTLIAASRLIMLPHELASMHIMSDLIHLKNHTSAFLQIISSIQMKLWL

SEQ ID NO: 45069 - protein, 182 aa, Oryza sativa
MARLLAQTLTLTLARPAAAAAAPLLPLRGLATKVEVIEIDLAEDDDSSASTSGPASSPASVEVVGVRRLEEAIHGVMVRRAAPDWLPFVPGGSFWVPPMRRPHGVADLVGRIAAAASGADAEVVAGGLAYEPEVYAPMTEEEALSFSTARGWPSASYFVEGKFPHTKKKSRKRATRTDEEES

SEQ ID NO: 45070 - protein, 434 aa, Oryza sativa
MRDQKGELQYFIGVQLDGSDHVEPLRNRLSENTEIQSAKLVKATAENVDDAVRELPDANLRPEDLWAIHSMRVSPKPHKRNNPSWIAIEKATNLGEKIGLKHFKPVKPLGCGDTGSVHLVELQGSGELFAMKAMDKSVMLNRNKVHRACIEREIYALLDHPFLPTLYTSFQTPTHVCLITDFCPGGELFAVLDRQPMKIFREECARFYAAEVVIGLEYLHCLGIIYRDLKPENILLQADGHIVLTDFDLSFLTTSKPHVIKNSTSLKRRRSQEFLPPTFVSEPSTPSNSFVGTEEYIAPEVITGAGHTSAIDWWALGILLYEMLYGRTPFRGKNRKKTFYNILHKDLTFPSSIPVSLAAKQLIHGLLQRDPSNRIGSNAGANDIKQHSFFQDINWPLIRCMSPPELDVPLKLIGKETQPKAKPDEDVPLNLDTF

SEQ ID NO: 45071 - protein, 675 aa, Oryza sativa
MELCTSSVSGSVQWSRISAFDCRTRSHGYASSSSWVCQRRRKTSFYVMNAASTGALPPTKKLIPRTNVRNISGDKPSSALEQLDIERGVCIPFRKYTPEMVRNRVLGSRGSVLSLASRGVEIIWKLGLYWSALMYDFLVGRDEEIVPFRARQLRNLLCDLGPSFIKAGQVLANRPDIIREDYMNELCILQDDVPPFPNQVAFSIIEEELGQPLERLFSRISSRTIAAASLGQVYRATLRETGEDVAIKVQRPGIEPIIYRDLFLFRTLASFLNGISLQKLGCNAELIVDEFGEKLLEELDYTLEATNIEDFLENFKDDPTVKIPQVYKQYSGSRVLVMEWIDGIRCTDPQAIKEAGIDVEGFLTVGVSAALRQLLEFGLFHGDPHPGNIFAMRDGRIAYVDFGNVAVLSQQNKQILIDAVVHAVNEDYAEMANDFTRLGFLASGTDVSPIVPALEAIWQNSAGKGLADFNFRSVTGKFNQLVYNYPIRIPERFSLVIRSLLTQEGICFTLQPDFKFLEVAYPYVAKRLLTDPNPALRERLIQVLFKDGLFQWKRLENLIVLAKENVSKMSSNPALKKNSSQIERNRQMEKKLDLTDTIKDGARLFLIDAGIRRQLIMAFTEDSKLHVEELVDVYRLVEDQIDIPSVALEVIQDLPSVARDFMLSWSDSILSDRQY

SEQ ID NO: 45072 - protein, 959 aa, Oryza sativa
MGKRKQRGGGGGGGGAATEGGAATGGGAGGHSPSTVFVSNLPYTFKSSDLEAVFSEVGPVRRCFMVAPKGSETSRGFGFVQFATVQDAERSIQQKDGFSVAGRKIRVKLATHRAPLKERLQKKENAVQAKDADATNEAKDADATNEAKDANATNEAYATSTAKHKETSHKTDTEPLQLLKKETTLSKEVSISNTAKVKSSEKQRVAKTVIFGGLRDFAMASEVFRLAGEIGTVVSVSYPLPKEEMELHGLERDGCTTDAAAVLFASVKSAWDSVVHLHRKEVKGAVVWARQLGGEGSKIRKWRVIVRNLPFKITVKEIMDIFSLAGFIWDVSIPQKSDDGASKGFAFVSFTRKQDAENAIKNVNGKVVAKRTVAVDWAVPKKVYTVAAKSSTKDDELANVSDRGSDEESEDNLVGEDDSYELEQETSNCPADDFKTEMDISRKVLENLIKSSERAEPSGNEGSDIDTDTETEQDTSEKKQKQTHLPTSVPAADKLENSKRVAQEENTLPATKFKKQDAGLDRTLFISNLPFDLSNEEVTERFSAFGKVESFFPVLHKLTKRPRGTGFLKFSTPEAADAAVSAANAAPGLGIFIKSRALKIMKALDKESAHKKELEKAKNEVEDRRNLYLTKEGEILAGTPAAEGVSDADMNKRSWLARRKAEMLQSPKFHVSKTRLIIYNLPKTMTINDVKKLCREAVISRAHKQNPVIRKVNILKNEKKSSSTAQKHSRGVAFVDFQEHEHALVALRVLNNNPETFGAERRPIVEFALENVEKVRLQKIWKDRRDKLREAAQDKARPLGDQSATDGPDANNRRAFNKGNKRKSHDRSSKLPYAGEGPAEDLSAAGDGGTVESMVEDKRKDQRPAKRARKSNKGTTALDGDRQDATPTADRNRTLSSKHNPADALAKRKNRNDSHSEQKRGRAQRKTKKELAGEGSVDKSLVEQYRSKFLQHGLNKTKG

SEQ ID NO: 45073 - protein, 480 aa, Oryza sativa
MVVEQQQRPLHRRHLAPPTPHPQHRRHRHHGDEARQEQHHRRNDASKDYHRFLPRVLRRRRRNLRVGDTEVKHRSGEARIALAVLISRVGFHVDELAVPHEALRSVVNVGRAGAVDQAGVRARLVVPSSGRRLHGAIREPHGVRQRQEPVSVTLERVPPHAASGGVLQPPLLRRPRLEAGGAPALRVGGVAADSKGPARAVHVARVVGQRAEEDPLPRRLAPLPPPHLPVHVQHEVADGARQPVAVAEEVDAGVRRVGDAGEVAGPHLRHVREDLAVPEAGRPVPVLAAGEEVELGQPARVDHHGERAGRRVLGVRPRREEAVDAAAPVVAEPGSGEPCVGRVIKALPRHVRRRSRRRRSRPRPRRVAVHHEVAVVLERGDGGARGRRRGRRGRVRRPQQGVRRRRREQPQIAVDAQLEVAARRLKNRALTVGNPNNRLLGDLLVPDAKVVLVGLSRREEAELEVAAIGDQRLVPQQRLA

SEQ ID NO: 45074 - protein, 42 aa, Oryza sativa
MVLDLCLNPINVSYLNMARLLEKVMTAEACSALSWMICVIKL

SEQ ID NO: 45075 - protein, 423 aa, Oryza sativa
MARIRRASSGRGLLEDARRKTFLNFLAVVFTLELITRINLIAQTSALNVVAPAISPSQSWRPVRSMLSKAKVDISISVSEQRRKKLYSSPATLSVHPPMSAPSYSSISDAAPPDAASNTSAAPSGLVQPPVSPHNACCSHNMVQKRGSQDCHCVYPVRVELFLRNVSLTSNWSDEFLGELASQLSLRVTQFEIVNFYVVGASGLNITMYIAPHTGISFSADQVTAMNYSLSQHTVQINPVLVGDYNLLNLTWFRPLVLAPAPTFTISPKPSPSQASTVPRHSADTSNEKHMSLITIICIFIGALIAVLVIAMFICFCKLRKGKRKVPPVETPKQRTPDAVSAVDSLPRPTSTRFLAYDELKEATNNFDPSSMLGEGGFGRVFKGVLTDGTAVAIKKLTSGGHQGDKEFLVEVEMLAGCTTETL

SEQ ID NO: 45076 - protein, 382 aa, Oryza sativa
MKGDRVRRGKEEALGAGGGQLCPECGYEYPNANPNPRLRRSHSKNCRRKMKMPVVAEEAGVAVHKRRRGLAVENASRGGGGDKVVHEGSSEQGCSAKAKEISAEPKLMADDPMSSHEKHMICHRHYKLYPTKVAPQCNDLSFGPFLGLRRKAMIVTKGIKVMSGETLDYKPEGGRIMFLFEAGVVDELHASAIRDPIGIYLKDKNETMCIGSITKAQPRARLWLMLSEEMKLFHNSERRSVYFNGYEFYPMYKRLHPLETYRKLWVVEVKPFEDASFNPVEDERKYYLLKVFSTAIPKEEIDVHVRSNKEVKRLGVISSYDTSFSCKLDFEDQFTLSHTSQEEDVVFYGYTLRHVQYPFFYLYYHNICSYRFIHEGLGYNST

SEQ ID NO: 45077 - protein, 757 aa, Oryza sativa
MDATGRGVFPNKPALPAGPKKRPPPHTVLLPATPPPPPSRSSLPLDSLLLHLTAAPPPPQPPATRRPHPTPTPPHSFLSPAAQSLVAAISSQPLPSLPAFLSSRRDELLRSDLPSLLKALELSGHWEWALALLRWASDEGAADAAALEMVVRALGREGQHDVVCDLLDEMPLPPGSRLDVRAYTTVLHALSRAGRYERALQLFAELRRQGVVPTIVTYNVVLDVYGRMGRSWPRIVALLEEMRAAGVEPDDFTASTVIAACGRDGLLDQAVAFFEDLKARGHVPCVVTYNALLQVFGKAGNYTEALRVLKEMEDSGCQPDAVTYNELAGTYARAGFFEEAAKCLDTMTSKGLLPNTFTYNTVMTAYANVGRVDEALALFDRMKKNGYVPNVNTYNLIFGMLGKKSRFTAMLEMLEEMSRSGCTPNRVTWNTMLAVCGKRGMEDYVTRVLNGMKSCGVELSRDTYNTLISAYGRCGSRTYAFKMYDEMISSGFTPCLTTYNALLNVLSRQGDWSTAQSIVSKMLKNGFKPNDQSYSLLLQCYAKGGNAAGIESIEKEVYVGTIFPSWVILRTLVIANFKCRRLEGVEKAFQEVKAQGYKPDLVIFNSMLAMYAKNGLYSKATEMFDSIKQSGLSPDLITYNSLMDMYAKSNESWEAEKILKQLKSSQVKPDVVSYNTVINGFCKQGLIKEAQRILSEMIADGMAPCVVTYHTLVGGYASLEMFNEAREVVNYMIHHNLKPMELTYRRVVDSYCKAQAV

SEQ ID NO: 45078 - protein, 365 aa, Oryza sativa
MWWRAARARRRIAGARAASTSAAAAGEKSCRAVVVPRFGGPEVLEVRQGVPVPDLKPGDVLVRARAVSINPLDLRMRSGYGRSIFEPVLPLIIGRDISGEVAATGTSVSSFTIGQEVFGALHPTAIRGTYTDYAILSQDELTSKPSTLSHVEASAIPFAALTAWRALHGTARISEGQRVLVIGGGGAVGLAAVQLAVAAGCSVSATCGTKSIEQVLAAGAEKAIDYTAEDTESAVKGKFDAVLDTIGVPETERIGINVLRRGGHYMTLQGEAAALADRYGLAVGLPAATAVLLKKQMHYRYSHGIDYWWTYMRADSEGLHEIQRLSGAGKLQIPVEKTFPISKVREAHEAKEKRLVPGKVVLEFD

SEQ ID NO: 45079 - protein, 640 aa, Oryza sativa
MAPLPAAAAAPAFLFLSPPGKLPGGKPRLKPSCAASTSSSSSSSAPLLRAIRALPDAADLAPTLHDFFPPASPPSTSDALLLLNYLHPSWRKSLSLLCWLRALPDGAFPLDTIVFNVALKSLRAARQWPQAERLALDMLASGVPLDNITYSTLITAARRCRQFDKAVEWFERMYASDGVLPDEVTYSAILDVYAQLGMKEEVLALFDRARGSGWKPDHVAFAVLAKMFGEAGDYDGIQFVFKEMREVGIKPNIFVYNALLEALGKTGKPGLARNLFEEMTAEGVEPNARTLTALAKIYGRARWGRDALQLWEQMREKKLPADNILCNTLLSMCADVGLVGEAEQLFSEMKDPDLGDVPKPDKWSYTAMINIYGSSGDADRALQLFAEMVESGIEPNIMSYTIVIQCLGKAGRIQEAVDVLEAGMAKGLKPDDRLCGCLLSVVALSSGDETEVILACLEKVRSNLVKLIRMLGDARVGVEDLRVELKGILNSAAPEVRRPYCNCLIDICRNHGYPSERAVELFRLARHYGLYSKIHTRKEEEWSLDLRSLSVGAAKTAFDDWMKTIREHEEEEALPQTFSVYTGSSTHKFAQGLATAVASHLEQVGAPFRASDSQLGSFISSRDDLLSWLHTTMSSPDVAV

SEQ ID NO: 45080 - protein, 761 aa, Oryza sativa
MATAVVPGICHAVALMWLLLVLFCWAPGLTSAADTAAYIVHMDKSAMPRAFASQASWYESTLAAAAPGADMFYVYDNAMHGFAARVTADELEKLRGSRGFVSCYPDDARAVRRDTTHTPEFLGVSASSGVLWEASEYGEDVIVGVVDTGVWPESASFRDDGLPPVPARWKGYCESGTAFDAGKVCNRKLVGARKFNKGLVAATNLTIAVNSPRDTDGHGTHTSSTAAGSPVAGASFFGYAPGTARGMAPRARVAMYKALWDEGTYPSDILAAIDQAIADGVDVLSLSLGLNDVPFYRDPIAIGAFAAMQRGVFVSTSAGNDGPDPGFLHNGTPWTLTVASGTGDREFAGIVRLGDGTTVIGQSMYPGSPSTIASSGFVFLGACDNDTALARNRDKVVLCDATDSLSAAIFAVQVAKARAGLFLSNDSFRELSEHFTFPGVILSPQDAPALLQYIKRSRAPRASIKFGVTILGTKPAPVVATYSSRGPSASCPTVLKPDVLAPGSLILASWPENVSVSTVGSQHLYSRFNVISGTSMSCPHASGVAALIKAVHPEWSPAAVRSAMMTTASAVDNTNAPIKDMGRANRGATPLAMGSGHIDPNRAVDPGLVYDAGADDYVKLMCAMNYTAAQIKTVAQSPSSAVDCAGATLDLNYPSFIAFFDPGATAPAARTFTRAVTNVGDAPASYSAKVKGLGGLTVSVSPERLVFGRKHETQKYTVVIRGQMKNKTDEVLHGSLTWVDDAGKYTVRSPIVATTASSAPL

SEQ ID NO: 45081 - protein, 202 aa, Oryza sativa
MAAASHAPRSVVVSSSSPAAAIATAGCVVDTNTTFVQADPATFRALVQKLTGAPGSGGSKPAPAAPVMRRPKLQERRRAAPARLELARPQPLYYSHHHHRLMHSPVSPMDYAYVMASSSSSSSSSLPSSSSSLSPSPPASSSSCGVVVITKEEEEREEKAIASKGFYLHSSPRSGGAGDGERPKLLPLFPVHSPRSSSFARS

SEQ ID NO: 45082 - protein, 690 aa, Oryza sativa
MAISTWSTRLLLSPSASASSHRPNPTRRLAFPSPISGPGRQAPRAYISAPASGPDAYPSPALDAAAAAADVAAAIASSDAVTWAGVWALLSPHRARIAVSLAALLACTTCTLSMPLFSGRFFETLIGRGSEPLWRLLSKIAVLYTLEPIFTIVFVINMTVIWEKVMARLRSQIFRRILIQKMVFFDRHKVGELTGLLTSDLGTLKSVVSDNISRDRGLRALSEITGTLCILFTLSTELAPVLGLLMVSVSVLVALFKRSTVPTFKSYGIVQARISDTASETFSAIRTVRSFGGEERQISMFDNLALAFQNSGTKLGVLKSANESLTRVVVYVSLMALYVLGGSKVNAGKLSVGTMASFIGYTFTLTFAVQGAVNTLGDLRGTFASVERINSILSAEDIDDSLAYGLAKELEDSNGAVHENGTANKHYMSALKSSSSCSNLAWSGDIHLEGVHFSYPLRSDVEILNGLDLTIECGKITALVGPSGAGKSTVVQLLARYYEPTHGRITVAGEDIRVFDKREWSRVVSLVNQDPVLFSVSVGENIAYGLPDDVVSKDEIIKAAKAANAHEFIVSLPQGYDTLVGERGSLLSGGQRQRIAIARALLKNSPILILDEATSALDTTSERLVQEALNHLMKGRTSLVIAHRLSTVQNAHQIAVCSDGKIAELGTHAELVASGGRYASLVGTQRLAFE

SEQ ID NO: 45083 - protein, 238 aa, Oryza sativa; identical to SEQ ID NO: 30191

SEQ ID NO: 45084 - protein, 387 aa, Oryza sativa
MYRQKIPNSGWAAFDRRWRSKDGRGDDTDVNSFPALSDYIAPSAASSSVAENSRPKAKPFASVLRPSVDCAADGNENGNKHFTCHRENANYGLKSASENKIELLRGAHSWADSNLIEDVLASVNNDVGEASALLKAMASPCFPIREDGLPDQLSSEINKTHGLPSGNGTAENNLVNDSQLLPLPMNMSSVPIEPEVEELDDDYFNHRKDALKIMRAATKHSQAASNAFLRGDHAAAKELSLRAQEERSAAEELNKKAAKEIFRLRNSNNSIWKLDMHGLHASEAVEVLERHLHRIEFQPPGNNAASSDEVARSEPRVSGPSIEPGPGKVVFVRPIQAILEVITGIGKHSKGQASLPVAVRGFLIENGYRFDELRPGVFSVRPKFRRQ

SEQ ID NO: 45085 - protein, 137 aa, Oryza sativa
MAPPYETSAAGSESPVPVVTVDVAAASDLITSAGHRYVDVRTEEEMNKGHLHNSLNVPFMFVTPQGREKNPLFVEQFSSLVSKEEHVVVGCQSGKRSELACVDLLEAGFKNVKNMGGGYAAWLDNGFPINTPPHTMY

SEQ ID NO: 45086 - protein, 142 aa, Oryza sativa
MHRKEAIKTVYREVGGECKDGSTIGIDMNSHNTSVKECLSKTEVVTTDSCPDRVIIPDPTPKRVNSVFYDILPKLMPILQKDNVQDFLRFFHRNMDVMGRDLVTPETFFYIIMVNSVRCAKVVLEGQAPELEGLRAYPNCVT

SEQ ID NO: 45087 - protein, 226 aa, Oryza sativa
MGGGGRDGRRRQRPRSWARAVAKGGIAGRGRLPPGEEMGGNDSGRGVGRERPLLPTGSSLPRRCRRPPRPRWIPPWRSGHRPGRPPRRRSIRPRRPTSATSRRIPPPPPPRHLPGCGKKWNRPPPPPRGPRRGQRPSSISPPLGPSMPVHEAGVVGLQNAEARRRRGGGPASVQYSSVQLRNLVVETDDERGGGELVHRHHHRLPDLPLPNHYLHLRLHTISQLKR

SEQ ID NO: 45088 - protein, 520 aa, Oryza sativa
MGACFSSHTATAAADGGSGKRQQRKGDHKGKLPDGGGGEKEKEAARVEFGYERDFEGRYQVGRLLGHGQFGYTFAATDRASGDRVAVKRIDKAKMVRPVAVEDVKREVKILKELKGHENIVHFYNAFEDDSYVYIVMELCEGGELLDRILAKKNSRYSEKDAAVVVRQMLKVAAECHLHGLVHRDMKPENFLFKSTKEDSPLKATDFGLSDFIKPGKKFHDIVGSAYYVAPEVLKRRSGPESDVWSIGVITYILLCGRRPFWNKIEDGIFREVLRNKPDFRKKPWPGISSGAKDFVKKLLVKNPRARLTAAQALSHPWVREGGEASEIPVDISVLSNMRQFVKYSRFKQFALRALASTLKEEELADLKDQFDAIDVDKSGSISIEEMRHALAKDLPWRLKGPRVLEIIQAIDSNTDGLVDFEEFVAATLHIHQMAELDSERWGLRCQAAFSKFDLDGDGYITPDELRMHTGLKGSIEPLLEEADIDKDGRISLSEFRKLLRTASMSNLPSPRGPPNPQPL

SEQ ID NO: 45089 - protein, 229 aa, Oryza sativa
MAGAPRGLVLLGVCAVLMAVAVGGEAASVVVGTAKCADCTRKNMKAEDAFKNLQVAIKCKNTNGEYESKAAGKLDGTGAFSVPLDADLDSSDCIAQLHSANNEPCPGQEPSKVVPMSEGTFVAIAGKTHYPSALCASATICGPIKKKIIDHFHKKPVPPKPEPKPEPPKPKPEPEHPFLDHIHKKEKHFFDHFHKKPVPPKPEPKPEPKPEPKPQPAPEYHNPSPPAKN

SEQ ID NO: 45090 - protein, 313 aa, Oryza sativa
MGNIASCGGASLRPPPPHLEAYRHGVPPPYYHSYPRPPPGAAAPPPVPVPAHVERHRAVAVNVGVNVKGDTLRLVPDDDDDDGRSLLLAFSFDADGPGSITVCFFAQEDKCALKTAKENLLQPVTVPFKEGRGQEFKQPSGSGIDVSRFEESELTNVGEGGVFPVAFKVQMDVSGNQESEGAHETEQSKYLVKYAIFVKKDNAEYGVHVVQQILWVNGIRYVLQEIYGIGNTADKNAHEDDSGKECVVCLSEPRDTAVLPCRHMCLCRECAQVLKYQTNKCPICRQPVEGLREIEVDNKPIPQQGSQQLTAPQ

SEQ ID NO: 45091 - protein, 447 aa, Oryza sativa
MYPSLFPLRVKHPWYSGVASLHDDSNALMWLRGVAGEGGFQSLNFQSPGIGSWGQQRLHPSLLSSDHDQYQAVVAAAAASQSGGYLKQQFLHLQQPMQSPQEHCNLNPLLQQQILQQASQQQIINPDAQNIQTMLSPSAIQQQLQQLQQMQQVQNDQKQKIQPDQSYQVPTSAVLPSPTSLPSHLREKFGFSDPNANSSSFITSSSSDNMLDSSFLQGSSKAVDLSRFNQPVASEQQQQQQQAWKQKFMGSQSVSFGGSVLHNSPTSKDGSVENKIGRDVQNQSLFSPQVDSSSLLYNMVPNLTSNVSDGNLSTIPSGSTYLQNAMYGCLDDSSGLLQNTGENDPATRTFVKVYKSGSVGRSLDITRFSNYAELREELGQMFGIKGQLDDPDRSGWQLVFVDRENDVLLLGDDPWESFVNSVWYIKILSPEDVHKMGKQGNDPRYLS

SEQ ID NO: 45092 - protein, 413 aa, Oryza sativa
MGRERGGGEGMTMLQRWSSSVWSVSGSGRLLWADKAWRAHAAMAFTQLAYGGYHVLTKSVLNVGMNQIVFCVYRDLVALALLAPAAFFRERRTRRPLTPHLLASFALLGFTGIFGNQLLFLLGLSFTNASYAAAFQPAIPVFTFLLAAIVGVEVINIFTKDGIVKVLGTAVCVSGAVLMVFYRGPSLIGMGGGGGGGSNGVGENVLAGTWSSNSYTPQWLTSAMLQYGLETWNLGVICLIGNCFLMGAYLVIQAPVLIKYPASLSLTAYSYSFATVFMVLTGVVTTNGLHEWALTTTEIIAILYAGIVASCLNYAIMTWSNKILGPSLVALYNPLQPACSTILSTIFLGTPIYLGSIIGGVFIIAGLYLVTWARYNEAQRVLAIGYLDPLLVEDEDPPTPKTQESSFTGSIDP

SEQ ID NO: 45093 - protein, 421 aa, Oryza sativa
MLYDGNSLVDSDHSYHIMTETNHRLLNVSYDIHYVGNWSLETFRRQHISAEGVYDAKTGSLCMIACRVVNISLDCEILVTAQFSPLDTKVAQHVKGTIRSLRKKTDPLFFEPLDIASYGLYIDKVDESMWRMDLESTMALISMTLSCLFIAVQLFHVKKVPEALPAMSITMLVVLSLGYMIPLVLNFEALFKNSNKQTFPLSGGGWLEVNEVIVRIITMVTFLMQLRLLQLACSARSMDVSKDQSWAAEKKVLWICLPLYIIGAVAAWVVHMQFNNNRRMLRKVARLPRVNRHAFWEDLVSYGGLILDGFLLPQVILNACLGSKVKALSPGFYIGSTMIRALPHVYDVFRAKHFVPSLRPFYRYANPRDDLFSLAWDIAIPCGAILLSVLLFLQQRFGGAFFICSKNRKASEYEMVSTVSS

SEQ ID NO: 45094 - protein, 365 aa, Oryza sativa
MASLKELLPTPKAAASTFYDHSSDPWFKERYGGESAQSDAAAAAAKPSGPAKPVPPYGKRGGFVPRRPEDFGDGGAFPEIHVAQYPLGMGRRDEKGGSKILALTVDAKGSVAFDAVVKQGENASKIVYSKHSDLVPKIATADSEATADDEEYQKQIEETTERTKAALEKVVNVRLSAAQPKNVPTHDSESKFIKYKPSQQSAAFNSGAKERIIRMSEMAQDPLEPPKFKHKRVPRASGSPPVPVMHSPPRPVTVKDQQDWKIPPCISNWKNPKGYTIPLDKRLAADGRGLQEVQINDNFAKLSEALYVAEQKGQGGSTDAIQGAEGAAAEGEGEEGARAKGTCTEGAHGEDWCPTCTYRGSCWWW

SEQ ID NO: 45095 - protein, 699 aa, Oryza sativa
MRLRGVKPGVNSWNCIISGCVQNARYDEALNIFCEMCESESPDAVTVASILPACTGLMALGIGKQLHSYVIRCGIKLNVYIGSSLIGMYSECGEFGYARSVFAAIEEKNATVWNELIRSYINEERMNEAWEAFRLMKENGLQPDTITYNSFIAAYARAGQKEQAYTLLSNMVEIGLKPNVVSMNALISGLHHHGRHADALEAFRYMQVSSDGEAKGWALPGNSIQPNGTTITSVLSLLTDLRLDRLGKEVHCYAFRSGLISNIFVSSKLVDLYGKTGDVGTADKVFRRISNKNVVTWNSILASYRQNRKPEIALKLFHEMIKSNLLPNLVTLQIALLSSGMTMALQHGRELHGYIRKNWPDGYPTALASALIDMYGKCGKIEDARLVFECTDEKDIATWNAIMSAYLLHRIPGEVKKLFKYIEQSGIQPDPVTFIILLSACKQEGSMEEARRYFYSMEDVYGIQPTLKHYTCMVDIMGMAGLLEESLELIQKMQLEPDGCLWSILLKACKLHSNLEIGEKAAKALFELEPNNTSNYMSLSNIYADNGLWESTEALRVAMTEQGLNVERQCSRLYLGTDVHTFEAGDSSHPAFEKILSTWNDLSDRMEQSGYPPQDIEPYSNAEADPLSCQHTERIALCYGLISVRVHDLIRISKNFRMCMECHSSIKFISRDMNREIFVSDGCTYHHFQNGACSCGDMW

SEQ ID NO: 45096 - protein, 274 aa, Oryza sativa
MVRLLHLLRAASAPTYPRRRHHLALLPSLRLRVPAPAAAAAMSSAAAAQEVADQKRALRSEVRRALRALTPEQRASEDQAIQNAILNSSWFKESKRLCAYISCAQLREVDTSKVLSEVLSPNSEHGHAKDLYVPRVEDKNRNMRMLKITTMDDLVKNSMNILEPSPLDASGNAREEVLSTSSPVDLFLLPGQAFDRTGRRLGRGGGYYDTFLMRYQELAKEKGWDQPLLVALSYSVQILEEGIIPVNSTDVPIDALAHPLASFQSVLQHWRGYN

SEQ ID NO: 45097 - protein, 222 aa, Oryza sativa
MVSLRRRRLLGLCSGKDSLPVDFPKPSDNENSVEVAHPNIKPFSVHPLPLTKNSDVLLESSNGSDSLKEEKNHYYPGKEIKRRKRHRRKQYVDQEPCIMRGVYFKNMKWQAAIKVDKKQIHLGTVGTQEEAARLYDRAAFMCGREPNFELSEEEKKELQNYTWKDFLDMTRDTITSKKQRKVGLIRRNKTDSLVGQSDGDTEMINGGGSSHSEDGDAETSAS

SEQ ID NO: 45098 - protein, 523 aa, Oryza sativa
MACVLRLASRSRSRSGLRPTLAAPRASPVPPPPPRVGPTPVAPSPAPLRGLLLPLSPLRLASPDAFSSSSPSPAWLLDGLNWRRAGIGRRWFATEASAASTAAELVDVPLAQTGEGIVECELLRWFVTEGDQVDEFQRLCEVQSDKATIEITSRFKGKVHQIHFGPGDIVKVGETLLKMMVGDSQTVSHDSIASSTDHSHAVDAANPSGEGSVPSGTLSTPAVRHLAKQYGLNISDIQGTGKDGRVLKEDVLSYAASKGLCKEPTSALEENIDQVELLEGRGSLPDANSYEDRRISLRGYQRSMVKSMTLAAKVPHFHYLEEINCDALVELKASFQNANKDHTIKHTFLPFLIKSLSKALSKYPLLNSCFVEETNEVIFKGSHNIGVAMATEHRLVVPNIKNVQSLSILEITKELSRLHEMASHNRLSTEDIAGGTITLSNIGAIGGKFGSPLLNLPEVAIIALGRIQKLPRFDDDENVYPSSIINVTVGADHRVVDGATVARFCNEWKSLVEKPERLLLHMR

SEQ ID NO: 45099 - protein, 505 aa, Oryza sativa
MEGAGRDGNPLGGYRIGKTLGIGSFGKVKIAEHILTGHKVAIKILNRRKIKSMEMEEKVKREIKILRLFMHPHIIRLYEVIDTPADIYVVMEYVKSGELFDYIVEKGRLQEEEARRFFQQIISGVEYCHRNMVVHRDLKPENLLLDSKCNVKIADFGLSNVMRDGHFLKTSCGSPNYAAPEVISGKLYAGPEVDVWSCGVILYALLCGTLPFDDENIPNLFKKIKGGIYTLPSHLSPLARDLIPRMLVVDPMKRITIREIREHQWFTVGLPRYLAVPPPDTAQQVKKLDDETLNDVINMGFDKNQLIESLHKRLQNEATVAYYLLLDNRLRTTSGYLGAEFHESMESSLAQVTPAETPNSATDHRQHGHMESPGFGLRHHFAADRKWALGLQSRAHPREIITEVLKALQELNVCWKKIGHYNMKCRWSPSFPSHESMMHNNHGFGAESAIIETDDSEKSTHTVKFEIQLYKTRDEKYLLDLQRVSGPQLLFLDLCSAFLTQLRVL

SEQ ID NO: 45100 - protein, 516 aa, Oryza sativa
MIKQILGRLPKKEKPGKSGEKDLAGVGSSLPDARTTTDLTMSSGIANPNNYTAAVTNPGQNYTVKDAHHGGAGVSNGFLAPPVFEALPSLRDAPAPEKPSLFLRKVVMCYVVFDFTDPTKDVKEKEIKRQTLLELVDYVTSATGKFPEPAVQEVIKMVSTNLFRVPNPAPRENKPLESFDMEEEEPVMDPAWPHLQIVYELFLRFVQSPETDAKLAKRYVDHGFIIKLLDLFDSEDPREREYLKTILHRIYGKFMVHRPFIRKAINNIFYRFIFETEKHNGIAELLEILGSIINGFALPLKEEHKLFLVRALIPLHKPKCVSMYHQQLSYCVTQFVEKDCKLADTVIRGLLKYWPITNSAKEVMFLGELEEVLEATQPAEFQRCMVSLFCQIARCLNSSHFQVAERALFLWNNDHIEVLIKQNSKVILPIILPAIERNTKEHWNQAVQSLSFNVRKIFMDHDPVLFEECLKKFEEDEAKETALRSKREATWKRLEEIASSKTISSEPAVPPEATVH

SEQ ID NO: 45101 - protein, 536 aa, Oryza sativa
MSLAAESPSPSSPSSSSGSDDFAALLDAELELTSAADSASAGDPSAATDDDDEGGDEEEEDVVVVVEQEDAIVEQSSTKRRRVEDQHRHQAVVMKSDEDTVGSSKDVKIDECPPHPGFFGGLCYRCGKRQDEEDVPGVAFGYIHKGLRLGTTEIDRLRGADLKNLLRERKLVLILDLDHTLINSTKLFDLSAAENELGIQSAAKEVVPDRSLFTLETMQMLTKLRPFVRRFLKEASDMFEMYIYTMGDKAYAIEIAKLLDPDNVYFGSKVISNSDCTQRHQKGLDVVLGDESVAVILDDTEYVWQKHKENLILMERYHYFASSCRQFGFGARSLSETMQDERENDGALATILDVLERIHTIFFDPDDQKPLSSRDVRQVIKRVRQEVLQGCKLVFTRVFPLHQRQQDQMIWKMAEQLGAVCCTDVDSTVTHVVALDLGTEKARWAVSNKKFLVHPRWIEAANFRWQRQQEEDFPVARPKEKGKENAADAPISKENGDKNAADAANAKKGNENVADAGSTKEGSKENADDAANSEEE

SEQ ID NO: 45102 - protein, 199 aa, Oryza sativa
MAMASTYQYQQYQQLQQAQQLFQRDAQTITPEALESVKAALATSDVLDPANARATATSSSDPAAKKKAIPRRAAGQSWEDPTLTDWPDNDYRLFCGDLGNEVNDDVLSKAFSRFPSFNMARVVRDKRTGKTKGYGFVSFSNPTDLAGAIKEMNGKYVGNRPIKLRKSNWKERTDVDALERQKNHIQKKPKMPKKSILHK

SEQ ID NO: 45103 - protein, 757 aa, Oryza sativa
MATAPLAFHLPFPFPSASRPPPRLLPPSRRPPAARLAATRRFRPPTADDEPPEAAEDSSHGLNRYDQLTRHVERARRRQQAEQPEITPDHPLFSSPPSSGEAGSYDPDDEFFDEIDRAIAEKREEFTRRGLIKPSAPAPSQPEEEDGLADELSPEEVIDLDEIRRLQGLSVVSLADEEDEEANGGGGGVDYGDDGVPLDDDGEVFDVADEVGLEGARVRYPAFRMTLAELLDESKLVPVAVTGDQDVALAGVQRDASLVAAGDLYVCVGEEGLAGLTEADKRGAVAVVADQTVDIEGTLACRALVIVDDITAALRMLPACLYRRPSKDLAVIGVAGTDGVTTTAHLVRAMYEAMGVRTGMVGVLGAYAFGNNKLDAQPDASGDPIAVQRLMATMLYNGAEAALLEATTDGMPSSGVDSEIDYDIAVLTNVRHAGDEAGMTYEEYMNSMASLFSRMVDPERHRKVVNIDDPSAPFFAAQGGQDVPVVTYSFENKKADVHTLKYQLSLFETEVLVQTPHGILEISSGLLGRDNIYNILASVAVGVAVGAPLEDIVKGIEEVDAIPGRCELIDEEQAFGVIVDHARTPESLSRLLDGVKELGPRRIVTVIGCCGERERGKRPVMTKVAAEKSDVVMLTSDNPANEDPLDILDDMLAGVGWTMEEYLKHGTNDYYPPLPNGHRIFLHDIRRVAVRAAVAMGEQGDVVVITGKGNDTYQIEVDKKEFFDDREECREALQYVDQLHRAGIDTSEFPWRLPESH

SEQ ID NO: 45104 - protein, 614 aa, Oryza sativa
MLMPPLPVVRLPLPPSAAHAAPTAQWPRALRHRGGGGIEARGDGRGRGRRGVVCAMAAGEAGPGPGPAPSRTQMIMDKISSGEEVGGAGGAYSYNALKRLDQIWSSICEAQSDSKVPEVVTRVQGPLVDYDLGDGSEIFDVLVCGGTLGIFVATALSYKGLRVGIIERNIIKGREQEWNISRKELMELVEVGILSEEEIEQIISSDFNPTRCAFESKGEIWVENILNLGISPAKLVEIMKERFVSSGGAIFEGKSLSSISVHDDFAVLNLSDGGSLPCRLVIDAMGNFSPIVRQIRSGRKPDGVCLVVGTCARGFDRNTTSDIIFSSSSIKRAGNSGVQLFWEGFPAGSGPTDRTTYMFTYVDPHSGGPKLEELLETFWDLMPAYEDVVLENLDIMRVIFGIFPTYRNSPLPAAFDRVLQVGDASGIQSPVSFGGFGSLTRHLGRLSNGIYEAVSGDLLDARSLQLLNPYMPNLSASWLFQRAMSARPQIDVSPTFINELLFANFESMQKLGDSVLRPFLQDVIQFGPLVKTLGLVMITRPQILPSIFKQAGPGVILNWSGHFVMLGYYTFLSTFIDPILRPWVESLPLRNKYQWKRYLEAWKYGAGLDYRQGE

SEQ ID NO: 45105 - protein, 368 aa, Oryza sativa
MRQWFCCNCHFDEEDDHGKERSNAQGNKMDAKQKSSKPPAGQPEPEIAPLTIDVPELSLEDLKQKTDNFGSNALIGEGSYGRVYHATLDDGRQAAVKKLDASENEPNDEFLKQVSQASRLKHENLVEMLGYCVEGNYRILAYEFATMGSLHDVLHGRKGVQGAQPGPVLDWTQRVKIAIEAAKGLEYLHEKVQPSIIHRDIRSSNVLLFEDFKAKIADFNLLNQAPDMAARLHSTRVLGTFGYHAPEYAMTGQLTQKSDVYSFGVVLLELLTGRKPVDHTMPRGQQSLVTWATPRLSEDKVKQCVDPRLKSEYPPKGVAKLAAVAALCVQYEAEFRPNMSIVVKALSPLLQQKPAVPAASEPAPATEN

SEQ ID NO: 45106 - protein, 495 aa, Oryza sativa
MAALRLPRAPTTAALAAGVPHRFPAPEGEPPPPRGPNRAHLNALLTSYGRRGRLRDAQLLFDQMPSRDVISWTALLTAYADGGDLASARLVFDDMPRRNAPSWNALLSVYLRAARPRAAHALFYKMPAKNAVSYGAIISGLAKAEMLHEAELVYEEMPWQWRDPVGSNALMAGYLRVGELAMALRVFEGMTVRDVISWSAMVDGLCKHGSVSEARRVFDAMPERNVVSWTSMIRGYVKRGMCRDGLLLFLNMRREGVQVNTTTLSVALDACAAASLAREGIQIHNLIISMGFELDIFLGDSIIIMYSRFGWMVDAKRAFDCMQQKDIVSWNSLITGYVQHDMVEEAHVLFKLMHQKDAVSWTSMVVGFANRGWMRESVELFEQMPVKDEVAWTAIISSFITNGDYLSAVRWFCRMSQEGCKPNTIAFSCLLSALASLAMLNQGRQAHAYSINMGWVFDSAVHTSLVSMYAKCGRLAGLIMFSQALATQALLLLIL

SEQ ID NO: 45107 - protein, 398 aa, Oryza sativa; identical to SEQ ID NO: 43178

SEQ ID NO: 45108 - protein, 263 aa, Oryza sativa
MPPLLASTSSTSPLLLASRLRGGGGCGCGGAPLLHRTRRGFLAPSTTTTQTTRTSFAAMSWLGKLGLGGLGGSPRASAASAALAQGPDEDRPAAGNEFAQFGAGCFWGVELAFQRVPGVTRTEVGYSQGNLHDPTYEDVCTGATYHNEVVRVHYDVSACKFDDLLDVFWARHDPTTPNRQGNDVGTQYRSGIYYYTPEQEKAARESLEKQQKLLNRTIVTEILPAKRFYRAEEYHQQYLAKGGRFGFRQSAEKGCNDPIRCYG

SEQ ID NO: 45109 - protein, 382 aa, Oryza sativa
MLPGVITSRVRGDGAAAAAAAGWRGRTGWRPSPGWPSGASTPSAPPPTAAPIPSRSASGTGSLPNPNPPLLRDHRFALSNQIIRQFDPNPCRYLSVEKARYVYVRLFPEPGRVAKERPPLARFLLRACWSGPPRRSCVSPVHEHLLRSSEDFFWQLDTMYAGRFTIDVEFLDLKIASNNAAESSTSIWPNESIAVQNIASKSSLGCLSRMLTESIHADVTINTTDGVLKAHKAILASCSPVFESMFLHDLKEKESSTININDMCLESCSALIGFIYGTIKLDQFWKHRLSLLAAANKYSISDIKDCCEESLLEDINSSNVLERLHVAWLYQLQKLKKGCLTYLFVFGKIYDVREEINSFFQHADRELMLEMFQEVITAWKPI

SEQ ID NO: 45110 - protein, 256 aa, Oryza sativa
MDEWVRQAEVWVGQAERWIRQQPPEQVYVAVAVVAVTVLLLVAVSCLKSSKANTIVLSGLSGSGKTILFYQLRDGSTHQGTVTSMEQNNDTFVLHSELERRGKVKPVHVVDVPGHARLKPKLDEVLPQAAGIVYVVDAQDFLSTMHAAAEYLYDILTKATVVKKRVPVLIFCNKTDKVTAHSKEFIKKQLEKELNKLRESRNAISSADITDEVKLGNPGEAFNFSQCQNKVTVTEGAGLTGNVSAVEEFIREYVKA

SEQ ID NO: 45111 - protein, 361 aa, Oryza sativa
MWIIVLLSLVCVALIGAYAYPPRRYSACYFFASSVCTPFKDWLPTVTRRERTDEEIVSSVVMRDLLAMPMPVSKNPKIALMFLTPGSLPFEKLWEKFLQGHEDRYSIYIHASRERPVHSSSLFVGREIHSEKVVWGRISMVDAEKRLLANALEDVDNQFFVLLSDSCVPLHTFDYIYNFLMGTNVSFIDCFLDPGPHGSGRYSVEMLPEIEQRDFRKGAQWFAVTRRHALLILADHLYYNKFELYCKPAEGRNCIADEHYLPTLFNMVDPGGISNWSVTHVDWSEGKWHPRSYRAIDVTYALLKNITAIKENFRITSDDKKVVTMTPCMWNGTKRPCYLFARKFYPEALNNLLKHSSYTST

SEQ ID NO: 45112 - protein, 231 aa, Oryza sativa
MARSLAALLLLLVAAAGASHAASPAEMYWKIALPTSPMPGAIRDLISPASSAASASKDKEDTVGSVFFLEKDLFPGSKMTLHFTRATARRRGCSLAAAPTPSRSPPKSSRRSSPSSPSPPARRPPTPCGPRSPCARPRGSPARRRPSTSTTAPRRSTSMVELVASSLGTRDVHAVSTEVVNTAAADAEAGVQGGGREARAGARGRHGGMPQDALRATPCSGCTGSRARRTR

SEQ ID NO: 45113 - protein, 684 aa, Oryza sativa
MEMDTSPSSSAPSSPAASSDSIDLNFLPFLKREPKSEPASPERGPLPLPAAAPPPPPPPPPPPPPPQVQAATVATPVPATPDLSAAAVMTPLQSLPPNPEEETLLAEYYRLATLYLSSAGAAGVIVPAAAPEASAGAVAQPGSGSGAKKRRPRSSELVRVSSLSVQDQIYFRDLVRRARITFESLRGILLRDDERAEVLGLTGVPGFGAVDRRRVRADLRAAALMGDRDLWLNRDRRIVGPIPGISVGDAFFFRMELCVLGLHGQVQAGIDFVTAGQSSSGEPIATSIIVSGGYEDDDDRGDVLVYTGHGGRDPNLHKHCVDQKLEGGNLALERSMAYGIEIRVIRAVKSKRSPVGKVYFYDGLYKVVDYWLDRGKSGFGVYKYKMLRIEGQESMGSVNFRLAEQLKVNALTFRPTGYLGFDISMGREIMPVALYNDVDDDRDPLLFEYLARPIFPSSAVQGKFAEGGGGCECTENCSIGCYCAQRNGGEFAYDKLGALLRGKPLVYECGPYCRCPPSCPNRVSQKGLRNRLEVFRSRETGWGVRSLDLIKAGTFICEFSGIVLTHQQSEIMAANGDCLVRPSRFPPRWLDWGDVSDVYPEYVAPNNPAVPDLKFSIDVSRARNVACYFSHSCSPNVFVQFVLFDHYNAAYPHLMIFAMENIPPLRELSIDYGMIDEWVGKLTM

SEQ ID NO: 45114 - protein, 553 aa, Oryza sativa; identical to SEQ ID NO: 33851

SEQ ID NO: 45115 - protein, 340 aa, Oryza sativa
MERVATLVSCIAAATAMLLAVAAAAAGSGGGGCTRSCGNISVPYPFGVEADCYYPGFNLTCNHSYHPPTLFLVDGAGTSHQVLDISISNSTVRINSSLIAFTKSADKQAVINTTWEVRGPYYLLDDPSNMVVLVGCQARFDVRGGSNNTLISSCTVVCPSPDPSTTYIGAGDGSCSGVGCCQANIVLRYSRYTVQIHDLQEQDAPSSSPTFNDGSAYIVDQPFNYTGLMIFEKNFPQALPAMLDWFIVGDNSTCPMSTNESAPAPASAAECRSVHSFYEGYYGDVSDDVVVGYRCRCSPGYQGNPYVKDGCYGMCLPSLFFLRNCQKTCASFFSSQLPNF

SEQ ID NO: 45116 - protein, 567 aa, Oryza sativa
MDMDPPTNNPSPPGPPDSPPPEKGLASLSLRTSHLPPDFEIHDDYDDDDDEGYLTAVSRVGSISTSASAWKDDLEDADVAPPSPSSSGYAAERGTSLASSAAANDDPQPQPDDDDWPRDKKHLHEDDTSASWRKRKKHFFILSNSGKPIYSRYGDEHKLAGFSATLQAIISFVENSGDHIKFVRAAKHQIVFLVKGPIYLVCISCTEESYEGLRGQLELMYGQMLLILTKSVNRCFEKNPKFDMAPLLGGTDAVFLSLIHAFSWNPATFLHAYTCLPLAQSTRQAASAVLQDIADSGVLFALLMCEHKVISLVGAQKATLHPDDIFLLSNFILSSESFRTSESFSPICLPRYNSMAFLYAYVHFFDENTYLTLLTARSDAFYDLKDSRSRIQNVLLKANVLVEVQRSLRESALRIEDLPADPSSQSVSPPPQFSQDLHFQLLSSEMAIGGPAGLWHFIYKSIYLDQYVSSEFPLIISNPKQQKRLYKAYQKLYASMHDKATGPHKTQFRRDEDYVLFCWITQDFELYAAFNPLADKSQAIKVCNRVCQWIRDLENEIFVYGESTLSW

SEQ ID NO: 45117 - protein, 249 aa, Oryza sativa
MSLSLLQGYSSAEEDDPAAAGAGAGELSDSGDSSAEDAGSDGEEASAAPRPAAKPRPRPNPSRGDAGGGGGDGSLLPSALDAFAEISGPPEFLNNRVAEPEEAVEALGVLDRRGKGGRGSDSKQPPPGAVVVAKPQLVAIRERVSSGTNGANPPVSTEGKRIIGAANPGPEDAADLLRMCLQCSIPKTYSHARGMVCPVCNDRPEQAREPEKKKGSTVKDKEKIKRMRGQSSHASWKSETEMALRQQFD

SEQ ID NO: 45118 - protein, 601 aa, Oryza sativa
MAQIPNLDNAPLNLAALREQSQKDLLNILKSIRGKKCVVIDPKLAGTLSLILQTSLLKEYGAELRLLSAEPLQTECAKILYLVRSELKFMKLIASQIKNDEPKGLQREFFLYFVPRRTVACEKILEEEKVHQKLTLGEYPLYLVPLDEDVICFELDHSLQECLIEGDTSSVWHVAKAIHKLEFAFGVIPNVRAKGVASTKAAELLNSMQQEDPVNMDDMGTPEINTVILLDREVDLVTPMCSQLTYEGLLDEMLQINNGSVEVDATIMGAQQDGKKVKVPLNSSDKLYKEIRDLNFEVVVQVLRQKATSIQQDYAEVKSTNTQSVSELKDFVKRLHSLPEIARHVHLAQHLQSFTGKPSFHARLDIEQTILEVQNFEICFEYIEEMIHKQEPIENVLRLLVLLSLTNAGLPKKNFDYLRREILHSYGFEHMPLLYNLEKAGLFKRQESRSNWIGITRALQLIVDVNDTANPSDISYIFSGYAPLSIRLVQHAVRSGWRSIEELLKLLPGPHLDLKRGSSAINSSLDVHQGLGLQQSIDRVGHRSLVLVVFIGGVTFAEIAALRFLSSQEGMGYDFLVATTKVVNGNTILRPIITNSKEVMI

SEQ ID NO: 45119 - protein, 491 aa, Oryza sativa
MAGGDAEEEEEEEEETYTTDDALTRAGFGRFQALVLAYACVGWVAEAMEVMLLSFVGPSVKAEWGVSGAAEGLVSSVVFAGMLIGACLGGLISDRYGRRIGFLSTAVVTGIFGLLSAFSPNYASLLVLRFVVGLGLGAGHVLSTWFIEFVPAAKRGTWMVVFHCSWTVGTILEALLAWAVMPVLGWRWLLALSSAPCFILFIFFPVTPESPRYLCSVGRTMDARVILEKIARMNNSSLPPGILTYASTRRIDKVLDDSETALLITEDGGSGIDEHTSSKPGGITALRESWSYDLIRSTFLLWFVYLANYFAYYGVILLTSELSNGQRRCASVGINFMQPKDANLYRDVLVTSLAEFPGLVLAALLVDRIGRKVSLGIMLLLSCAFLAPLAVHLGQGSVTTLLFCARTCIMGGFAVLYVYTPEIYPASSRNTGVGITSSFGRIGSIVSPVVTVSLSENCRQKEAVFFMDLMLFLAAVACALIPLETKGRQIQ

SEQ ID NO: 45120 - protein, 299 aa, Oryza sativa
METLLSPSTLLSPLRGSKKKPASPAASASSSSSSPARSVVSCALRRQQPPPQAVAAWRGDGGRGGGVGSWATFLQHGLAAAALSLAISMAPAPAPAVASEFDVLNGGPPEDTYVVDDAGVLSRVTKSDVKRLVRDLESRKNIRINFITVRKLTSKADAFEYADQVLEKWYPTVEEGNNKGIVVLVTSQKEGAITGGPAFVQAVGDEILDSTVSENLPVLATDEKYNEAIYTTAKRLAAAIDGLPDPGGPTFKDNKRESNFKTKEETEEKRGQFTLVVGGLLVIAFVVPMAQYYAYISKK

SEQ ID NO: 45121 - protein, 315 aa, Oryza sativa
MASETEPDAVVFEAPAHFRIYKSGKMDRLHRPPCLPAGVDEATGVASKDVVIDAGTGLSVRLYLPKIQEPSKKLPVLVFFHGGGFLIESADSSTYHNYVNPFAAAAGVVVVSVDYRLAPEHPLPAAYDDSWAGLLWAASAQDGWLAEHGDVSRLFIAGDSAGGNIVHDMLLRAASNGGPRIEGALLLHPWFGGSTVLEGEPPAAAALTGMIWCYACPGASGGADDPRMNPLAPGAPALEKLACERMLVAAGQTDGLAARDRAYYDAVAASPWRGTATWVESEGEGHVFFLEKPECDKAKQLMDRVVEFISAGSPA

SEQ ID NO: 45122 - protein, 220 aa, Oryza sativa
MSAPPPRAAYLRRPRAHHANDLRLRRTRRAAARRRPATARRSTPSSCFAAPPPPPATTTPSPPPPASSSSTTTARAPASARSRRPCRTSSWAPASSASSTSSPRSRPAARPRQGEPTGLQGLRRVHAHRHHRRLPRRRRLPLRRLQGALRARRRGQGDALQPHLPPGLHPPMARAPQLLPGLPPRDAHRRRPPAAQQCRHRGGDGRPHHLEAARRRLRRR

SEQ ID NO: 45123 - protein, 203 aa, Oryza sativa
MAWQNTAPAPMPGMQGWQAVAFRISGDKAFFFGCGFYGAQDTLCDDAGRHYFRDCYIEGSIDFVFGNGRSLYKDCELHSTAQRFGSVAAQGRHDPCERTGFAFVNCRVTGTGRLYVGRAMGQYSRIVYAYTYFDSVIAPGGWDDWDHASNKSMTAFFGMYRNWGPGADAVHGVPWARELDYFAARPFLGKSFVNGFHWLTPDV

SEQ ID NO: 45124 - protein, 575 aa, Oryza sativa
MPPLTSALLSRSSSTRIPAAAAAAAAISNPAGAAASSSSPSPPPPSSRPRPASPFTSGLAGRIFGGRRAAARSSSSAAAVFERRFASAAAKNSYDEILTGLAKPGGGAEFGKYYSLPALSDPRIERLPYSIRILLESAIRNCDEFQVTGKDVEKILDWENSAPKQVEIPFKPARVLLQDFTGVPAVVDLACMRDAMSKLGSDPNKINPLVPVDLVIDHSVQVDVARSENAVQANMELEFHRNKERFGFLKWGSTAFRNMLVVPPGSGIVHQVNLEYLARVVFNNGGILYPDSVVGTDSHTTMIDGLGVAGWGVGGIEAEATMLGQPMSMVLPGVVGFKLTGKLRNGVTATDLVLTVTQMLRKHGVVGKFVEFYGGGMSELSLADRATIANMSPEYGATMGFFPVDGKTLDYLKLTGRSDDTVAMIESYLRANKMFVDYNQPEAERVYSSYLELNLEEVEPCLSGPKRPHDRVTLKNMKSDWLSCLDNDVGFKGFAVPKESQGKVAEFSFHGTPAKLKHGDVVIAAITSCTNTSNPNVMLGAALVAKKACELGLEVKPWIKTSLAPGSGVVKKYMD

SEQ ID NO: 45125 - protein, 400 aa, Oryza sativa
MAEAATRGLPPVSPGLPLPEELVVWEILVRLPPKPLLRCRLVCRAWRRLTSTRDFLLAHHRHQPSLPLIAACDYADIMYLIDVLTLTLGRRRGAAARLHPVARYASTADYLDSSCDGLLLISRNTGPPQYSICNPTTRQFGDLPLISGFMFLGLYQHSPTGDYRILLYRAEKVVLEDLIPGHVERDASYVYTLGSNDMPRRIGWAEPEVSMLAGHSRRCRPAQLHGSLLHWYHSIKRMILVFDTTAESFRWMRAPIDKTENELNRELWADVLEMDSTLGLYCCNHDKTIVNIWALQDYEQEVWSIKYQVELPVTCIRGELDVGDSWSVMVSSEDGDEVVVVLVDCGQSVLCFDTDGKLLARLEHDGNDIMVTRMKLKQSLVPHAFFPLLKSYVVNDLPFI

SEQ ID NO: 45126 - protein, 184 aa, Oryza sativa
MAGLHKGKRDGHAQPRLLHHQRDIATSSRIAYEGAQNIHHEEKSDMLEMSSPSLTKEEEKTDAPTLSEEGIKGKLNGADITQGECASDESHLSTIHANLEQILVETTFDLPLSQVDLLAIPCDKEELCNNASLISLPQLVNEHAISSVSLCADFKHDVHIANDVEERKLITSLNTFSYVQFDDF

SEQ ID NO: 45127 - protein, 921 aa, Oryza sativa
MSVLNPPPKRRAISAIRKFPRDCGRAASTLAESGASMEELPLEATPISVATGGASMEDSLARTPISVQGASLVCGLDHSSEAIDGKTIEDDESSKVENRIQEFQVATNVAEDDFEGAKNGSTHPNDSIAKPSPSHGFVERVNGKGSQQEKKLVARSAGDGKMVSKYEERLQKGTPETRMRDLVDVKAKKKILKSDKMNGALQNDARSSGDGKMKTKASSTQRGVVRSDMSLKQGDIARKVDATGKCKGGVNSLIKEATSGKHATTNGIEENDDRDLVSDRIIVQALMAPDKCPWTRRRKSIGGSSESRTPKLKKKFGRPRKELKDTTPREEVSPEVASCKAIKHEAIEDKEDSYFEDEGNSKASYSDVEGNSKELVRGGKALVVCGGKKELCVTLPPSAPFGTDPRSKIRNLLIKFHAACRKLVQVEEQHKGNIGRIDIEAGKALKQNGFIKPGPIVGNVAGVEVGDEFNFRIELSFVGLHRPYQGGIDSTKVNGILVAISIVASGGYHDELSSSDELIYTGSGGKAIGNKAAGDQKLERGNLALKNSIETKTPVRVIHGFKGHSKGEASHSKSKQISTYIYDGLYMVVDYWKEGPEGSMVYKYKLQRIPGQPELALHIIKATRKSKVREGVCVPDISQGRERIPIPAINTIDDTQPTAFKYTTEVIYPHSYAKEPLKGCDCTNGCSDSNRCACAVKNGGEIPFNSNGAIVEAKPLVYECGPSCRCPPTCHNRVSQHGIKIPLEIFKTGNKGWGVRSLSSISSGSFVCEYAGEVLQENGDEHVETDEYLFDIGHHYHDEVWEDPKFEGILGLESSTSKTTEDTEGSKTTEDTEGSTIDASKCSNVGRFINHSCSPNLYAQNVLWDHDDMKKPHIMFFATENIPPLQELTYDYNYGKVEDKNGKEKVKPCFCGSPDCSRRLY

SEQ ID NO: 45128 - protein, 125 aa, Oryza sativa
MIQLLFLVLVAEAAVAAVLLFKTPLRKLAVMGIDRLKRGRRAPRRRQDRRRRRPRPARLHALQHGRDQRPRRGDPESGGGGGGASLSPTDQVLFSRHLLEASLMGRCWLLDQIGSRVRRPDALSS

SEQ ID NO: 45129 - protein, 481 aa, Oryza sativa
MGRRTWQWHAIAALGVACAAAAAVAADRRAFSVTSAAGGGAAAAAAVVAATPEEVGILRKVANFLWQTDGNSYHHVWPEMELGWQIVLGSLIGFFGAAFGSVGGVGGGGIFVPMLTLIIGFDPKSSTAISKCMIMGAAVSTVYYNLKLKHPTLDMPVIDYDLALLIQPMLMLGISIGVIFNVLFPDWLVTVLLIILFLGTSTKAFLKGVETWKKETIIKREAAKRLEQTSEEPEYAPLPTGPGAVADAKRPSDEAASLMKNIYWKEFGLLAFVWMAFLVLQVTKNYTATCSSWYWILNLLQIPVSVGVTMYEALGLMSGRRVLSSKGNEQTTLKFHQLCIYCFFGITAGVVGGLLGLGGGFIMGPLFLELGIPPQVSSATATFAMMFSSSMSVVEYYLLNRFPVPYALYFVIVAFIAAIIGQHVVRRLINWLGRASLIIFILAFMIFVSAISLGGVGISNMIHRINQHEYMGFENLCKYDA

SEQ ID NO: 45130 - protein, 687 aa, Oryza sativa
MGAKDNGEVRDEKGVGSDYEPARVSGVSKKLMRKDTRENSPRMAKSSGSRQVQNKLQHKASNNIQSRSPKPRKVVNAAKSAEVRRSDTVRVPSRAPSELSEEADDIVSEAGTVDDSKGNEEAKEIDVLDEAPHCDQSTGTDDEIPEIEEKIVDDEKPVVYQRNEELQSKIDKLEQELREVAALEVSLYSVLPEHGSSAHKLHTPARRLSRMYIHASKFWSSDKIASVAKSTVSGLVLVAKSCSNDASRLTFWLSNTVVLREIIAQTIGISCQSSSTITAINMNGSAKSLDGRSMPMLWTNSSSGKQTKFTGMQVPDDWHETSTLLAALEKIESWIFSRIVETVWWQALTPHMQTPVEGSSTPKTGRVLGPSLGDQQQGTFSVNLWKAAFHDAFNRICPLRAGGHECGCLPVLAKLVMEQCVGRLDVAMFNAILRESASEIPTDPISDPIVDPKVLPIPAGDLSFGSGAQLKNSIGNWSRWLTDNFGIDADDSEEDGTDTGSERSAAESKSFQLLNELSDLLMLPKDMLIEKSIRKEICPSIGLPLVTRILCNFTPDEFCPDPVPSIVLEELNSESLLERCTDKSATSAFPCIAAPVVYRPPSLLDVAEKVADTGGNAKLDRRASMVQRRGYTSDDDLDDLDSPLASLIDKSAPPLLSKGSAHFTAQRGVSMENARYTFLREVWLERQ

SEQ ID NO: 45131 - protein, 286 aa, Oryza sativa
MAATVLLLSPRLAVAPLRPHPRLGLTPTAVGRPLPLAYLGRRAAAARQLAAVADRNVYNGVYGPWTVEDSDVREVLLYRSGLVTAAASFVAAASAAFLPEGNAAGDAIRQGADLLYATGAAGLGLSLVLIHIYVTPIKRFLQALWVVGVVGSIGTYVAGAQPLDESLVGYVLDHPAALWFVGPTFAALTGLVFKEGLCYGKLEAGILTFVIPGLLLGHLSGLMDNGTKAGLLGVWMVLFTVFAARKFQQPIKDDIGDKSVFMFNALPEEEKKALIQKLEMQTETDG

SEQ ID NO: 45132 - protein, 440 aa, Oryza sativa
MGISSKWFKSLVGIRKQEKARNAEKQEKAQNAESCETSTPAAQLLHKRKHSLDTERAILVEELAVQSEPLTDDTNTQTVSDSISSDSTLLGVHISQTEEHKTKEDVAATLIQSAFRAFLARRALRALKGIVILQALVRGHIIRKQTSETLQCMQALVRAQARVRARQVRVSLENQVARKKVPEQDDHENHVREIEERWCGSIGSVEELQAKVLKRQEAAAKRERAMAYALTHQRQAGSRQQKPTTPQGLELDDSHWGSNWLERWMAVRPWENRLLDSNTKETMPLCDDKQDMETKSQITPKGKVQVSSALSNGSNKKKGINHKKSYSDVTCASFGRSPNIPSTSLGSCKQKSKLSDEALEEVSSQPTDLASLSTCQPKAKLVQANTPVKKWLSLPTNVGGGAAKGATNSNSICRSTSAKSDPKPRANASNQSRKQVELQA

SEQ ID NO: 45133 - protein, 389 aa, Oryza sativa; identical to SEQ ID NO: 33368

SEQ ID NO: 45134 - protein, 570 aa, Oryza sativa
MREESAKKSKLSWSKSLVRKWFNIRTKAQDFHADSETTTQGRDGGGGAGGRASFSASSASTSSAKKSRTDRSSSKRSADRVRRGRNDFDLARLTEVQDYRIFAATWNVGGKSPPRGLNLDEWLHSSPPADIYVLGFQEIVPLNAGNVLGTEDNIPAKKWVSLIRRTLNKNPGASGSGVYHTPSPVLNPVVELEADFEASARRQENYSFFHRRSFHNLSRSLRMDADYMFPQPKLDRRFSVCDPVSLGGRPSDFDGNLRWLGSPDEENIDEELSNAAQCSPLPYSCNTTAPTEANDEQPNGSRYCLVASKQMVGIFLTVWVRNEIRDDVRNLKVSCVGRGLMGYLGNKGSISISMSLHQTSFCFICCHLTSGEKEGDELRRNSDVMEILRKTRFPRVRGANDVKSPETILEHDRIIWLGDLNYRIALSYCSARALVEMHNWKQLLEKDQLRIQQRYGRVFQGWKEGRIYFPPTYKYSFNSDRYAGEGMHPKEKRRTPAWCDRILWYGNGLNQLCYVRGESRFSDHRPVYSIFMAEVEIVHHRRKNMGYFSSRIEVEELLPHSQSYREINFY

SEQ ID NO: 45135 - protein, 274 aa, Oryza sativa
MTKKVIPAMAAARQDSCKTKLDERGGSHQAPSSARWISSEQEHSIIVAALRYVVSGCTTPPPEIVTVACGEACALCGIDGCLGCDFFGAEAAGNEEAVMATDYAAAAAAAAVAGGSGGKRVRRRRKKNVYRGVRHRPWGKWAAEIRDPRRAVRKWLGTFDTAEEAARAYDRAALEFRGARAKLNFPCSEPLPMPSQRNGNGGDAVTAATTTAEQMTPTLSPCSADAEETTTPVDWQMGADEAGSNQLWDGLQDLMKLDEADTWFPPFSGAASSF

SEQ ID NO: 45136 - protein, 65 aa, Oryza sativa
MSSGRESRWELPATLRALARDAGQQLRVPRAAAAAATPAATAGRRAADGGGKADKVMHLLLWGPK

SEQ ID NO: 45137 - protein, 290 aa, Oryza sativa; identical to SEQ ID NO: 28559

SEQ ID NO: 45138 - protein, 493 aa, Oryza sativa
MLLGFISLLLTVAQTPISKICIPESAANIMLPCKAGQDIVKGLKGKKDHRRRLLWYTGEEESHRRSLAGAAGEDYCAQSGKVALMSSGGMHQLHIFIFVLAVFHVTYCVITMALGRLKMKKWKKWELETNSLEYQFANDPSRFRFTHQTSFVKRHLGLSSTPGLRWIVAFFRQFFGSVTKVDYLTMRQGFINAHLSQNSKFDFHKYIKRSLEDDFKVVVGISLPLWFVAILVLFLDIQGFGTLIWISFVPLVILMLVGTKLEMVIMEMAQEIQDRATVIKGAPVVEPSNKYFWFNRPDWVLFFIHLILFQNAFQMAHFVWTLATPGLKKCFHENMGLSIMKVVVGIFIQFLCSYSTFPLYALVTQMGSNMKKTIFEEQTMKALMNWRKTAREKKKLRDADEFLAQMSGDTTPSRGSSPVHLLHKQRVRSEDPPSAPASPGFAGEARDMYPVPVAPVVRPHGFNRMDPDKRRAASSSAIQVDIADSDFSFSVQR

SEQ ID NO: 45139 - protein, 1032 aa, Oryza sativa
MAWWSGKVSLGGLQDIAGAVNKISESVKNIEKNFDSALGLEEKRDDEEGSGSHASNSDRIGFFNPVMAFMGNNGEEDSAEASEKQQPPKSTTAEQSQSASTEAPTSKVDASEESESTQSPKPSEQGETLISSTEPPVSKAEVSEQLATPKTPKSLSATEEKPSHSTESPTYKGDSEAPQSPTDPSTAEENSGSTETGNTIETGNQDHQETKYSGPNDEAPQSQIGESDRGIPDGTKPSSPTELDQSGNTGTTEYLHAGTENIDDKNAIQSQPLDSILASSDDVNEAVKIVKGADDRNEISSSHENTDTVDQASHVEVIEHDEHTNAAENDEEANRTEAQVATVVEREENTMVQLEDLSSMSIIVSNDSNSQNESVPTSADVPVGLVEVGSNSNDLRKEENIQGSVTTSNHLESVGAVAELEKLRREMKMMEAALQGAARQSQSKADEIARLMNENEQLKSTIDDLKSKSAEAEMDALKDEYHQRVATLERKVYALTKERDTLRREQNKKSDAAALLKEKDEIISQVMAEGEELSKKQAAQEATMRKLRAQVRELEEEKQRLNSKIQVEETKVESIKRDKAATEKLLQETIERNQTELAAQKEFYTNALNAAKEAEALAEARVNTEAKVELESRLREACEKENILIKTIEELRHALTRQEQEAAFREERLKRDYDDLQRRYQSSELRYNELVTQVPESTRPLLRQIEAMQETAARRAEAWAGVERTLNSRLQEAEAKAAAAEEKERSVNERLSQSSSRITVLETQITILRTEQTQLSRSLEKERQRASESRQEYLAIKEEAAMQEGRAKQLEEEIKELRTRHKKELQDAAEHRELLEKDLEREKAARAELEKTSSRDAPKIPLPDQTRNAPLRKLSSSGSINSLEESHFLQASLDLSDNASLERRMSAESNMSYYLRSMTPSAFESALRQKDGELASYTSRLASLESIRNSLAEELVKMTEQCEKLRTEASALPGLRAELEALKQRHFQALELMGERDEELEELRNDIVDLKEMYREQVDLLVSQLQSLGARV

SEQ ID NO: 45140 - protein, 635 aa, Oryza sativa
MPARSAVVVIAMEPSSSITIASSSSYLSNGSSPCSVSLAPPGAGAVAAQAAPVAAGEGGGGGGGGGGGGSSSVEVVSLNRLSANLERLLLDSDLDCSDADVDVADGGPPVPVHRCILAARSTFFYNLFAARGRGGDGAAGGGGGGGGGGGERTGGRPRYKMEELVPGGRVGRDAFLSLLGYLYTGKLRPAPDDVVSCADPMCPHDSCPPAIRFNVEQMYAAWAFKITELISLFQRRLLNFVDKTLVEDVLPILQVAFHSELTPVLEKCIRRIARSNLDNVSLDKELPPEVAVQIKEIRQKSQPNEGDTVISDPVHEKRVRRIHRALDSDDVELVKLLLNESEITLDDANALHYAAAYCDSKVVSELLDLRLANLNLKNSRGYTALHLAAMRREPAIIMCLLNKGAAVSQLTADGQSAMSICRRLTRMKDYNTKMEQGQESNKDRLCIDILDREMIRKPMAVEDSVTSPLLADDLHMKLLYLENRVAFARLFFPAEAKVAMQIAQADTTPEFGIVPAASTSGKLKEVDLNETPVTQNKRLRSRVDALMKTVELGRRYFPNCSQVLDKFLEDDLPDSPDALDLQNGTSDEQNVKRMRFCELKEDVRKAFSKDRADNSMFSILSSSSSSSPPPKVAKK

SEQ ID NO: 45141 - protein, 776 aa, Oryza sativa
MATTPETLPNSEAVSHAYKFASTWEKNAPLTEQQNAAIAALSRAVSERPFPANLEKSLVKDGGVVVPEKEAALEEGAMDAVLVNTHQFYKWFSELESAMKSETEEKYRLYESTLEERVKTCDGILQQVDDTLNLFEELQSLHLSVATKTKTLHDACDQLLLEKQRLIEFAEALRSRLNYFDELENVSTSFYSQTMNIGNEQFLPLLKRLDDCISYVENNPQYAESAVYLVKFRQLQSRALGMIRSHVLSILKAASSQVQAAIRGNGSAKNVVTEGVEASLIYVRFKAAASELKPILGEIESRSSRKEYTQILSECHSLFCEQRLYLIRGMVQQRISEFARKEALPSLTRSGCAYLMEACQFEHQLFAHFFPASASDVSSIAPLMDPLCTYLYDTLRPRLIYEGSIDSLCELVDILKVEVLGEQLSRRGESVAGLRPILQRILADVHERLAFCARTHIREEIANFRPSDEDLDYPGKLERSVDATTSSNVSGNSDIYVTWYRPLEKTVSCLSKLYHRLEPTVFTGLAQEAVEVCSTSLQNASKVIAKKATAMDGQLFLIKHLLILREQIAPFDIEFSVTHKELDFSHLLDHLRRILRGQVSLFDWSRSTSLARTFSPRVLENQIDARKELEKSLKSTCEEFIMSITKLVVDPMLSFVTKVTAVKVVLSSGSQGQKLDSVLAKPLKTQAFASPDKVAELVQKVGTAIQQDLPKVMTMMRLYLQNPSTRLILFKPIKTNIVEAHIQLHSLLKSEYTADEIQSIGMLPIPDLQSQLEALL

SEQ ID NO: 45142 - protein, 281 aa, Oryza sativa
MVVQLMLFFHDKFMAPMAEEPLPFVLIMIIILLLLVLLHYYLSASTRRSSAASKSNDDVLPPSPPRLPVIGHMHLVGSNPHVSLRDLAEKHAADGFMLLQLGQVRNLVVSSPRAAEAVLRAHDHVFASRPRSAIADILAYGSSNISFSPYGDYWRKARKLVAAHLLSPKKVQSLRRGREEEVGIAVAKLHEAAAAGAAVDMRELLGSFTNDVLCRAVCGKSSFRREGRNKLFMELAAGNADQYAGLQPGRLLPELGEGGSAEASGERRHQEAQREVGQCSW

SEQ ID NO: 45143 - protein, 176 aa, Oryza sativa; identical to SEQ ID NO: 33320

SEQ ID NO: 45144 - protein, 272 aa, Oryza sativa
MAWRGLARDAAAAYLRRGGAPAHVFSAASRAPGPVVANPGGELRAFGLFRSPMARRADAFEVPSAAGRHGAQGVWSRSSVPALVRAGAPNSRALPFLVGRVVRGFYPQLSGHKLVKGLGMGSTLAATFCSQKVAYAEEVAEQPSEGLIGPSTKHQISKLWTIIRKYQLPVGLIALIALGWQNPLGLFINVLLILYSSRPSPYSIYLFLQEVRHGEMHQNRAFWKEEAVLTRKVDTKDYKLFSIGTVESADREVLHVIGILGNWWIYRASYGK

SEQ ID NO: 45145 - protein, 161 aa, Oryza sativa
MTAAAAAAAVTLLRLPLARLSSHLRSLPPRPIPPPRLRVYTSHRLLSSLLAPSHVPAVSSLAEAVAAPDGEGVEVEEEEDEEEEAEARPTTFALPRLPRPKLSVKERKELASYAHGLGKRLKSQQVGKGGVTPSVVAAFNDNLESNELLKVPLPFPHPLAL

SEQ ID NO: 45146 - protein, 101 aa, Oryza sativa
MTSSGCGCGSWRTWSAWPRTCSRSSSSRRSARPASSGSSSSSSGPAPASGSASSARSSPPPRIASTARLGRSWSATTISPGTGTRCGCEAVMRRGDVSRAH

SEQ ID NO: 45147 - protein, 389 aa, Oryza sativa
MGICASSEQLEHVHETDESIVYVKDEQGRGGRGVESGGARKVASLFSQRGKKGPNQDSVILCQGFGMEDGVFCGVFDGHGRCGQFISKLVRDYLPFMILSHRNALLLADAAADDDDDAAFSDDAAASSSADSSGNSSPQPSASASAQMLEEWRQACASAFAAMDGELKLQPNLDCAFSGTTAVCAIKQGRDLIIANLGDSRAVLATMSDTGYLQAVQLTVDHKPSVPEEAARIKRSGGRVFGLKDEPGVMRVWLPGENSPGLAMARSLGDMRLKRHGVIPAPEVTSRRVTGADLFMVLATDGVWDVLSNEEVVSIVCATPRKQHASKAVVEAAVQRWRAKFPTSRVDDCSAVCLFLHDHTLGTAAAASAAAAAAARKARRASTATPPAS

SEQ ID NO: 45148 - protein, 320 aa, Oryza sativa
MGSGMVKKKVVKAGSFDLDAKLDKSWMEDITCPICLDFPHNAVLLRCTSYEKGCRPFICDTDQSRSNCLERFKGAHGLPTNMKVPSFNGAPLDSIHIISSNTTDRPACPLCRGDVIGWVVIDEARLHLNQKKRCCEESCCSYVGNFHELQKHTQQKHPNSRPSEIDPARRVDWENFQQSSDIIDVLSTIHAQVPNGIVLGDYVIEYGDDDAGDDYEVYHRVRGNWWTSCIFCKSFCRSSGGRSRARARERRSSGRRSSNRSSQESFTIEVPSGSVDIREIRFDEIDDEYIVTGAMPGIAASRRIASHYRDPRYGRRRSYY

SEQ ID NO: 45149 - protein, 219 aa, Oryza sativa
MGSEGPSVVTVHVTGFKKFHGVAENPTEKIEGNLKSFVEKKGLPKNLVLGSCTVLETAGQGALGTLYKVLESAIAERENGSSAQGQVIWIHFGVNSGATRFALENQAVNEATFRCPDELGWKPQRVPIVPSDGAISRTRETTLPVNELTKSLRKTGYDVMPSDDAGRFVCNYVYYHSLRFAEQHGIKSLFVHVPLFLTIDEEVQMHFVASLLEALAVLN

SEQ ID NO: 45150 - protein, 698 aa, Oryza sativa
MDAPPLRLRLAVAFLSLLLTVSASAAAASGGGGGFNVSFDSAALAFSDLTLLGDSFLRNGSVGLTRDTAVPSSSAGSVLCSRAVAFGGGGGSAASFAARFSFVIAEQNAGSTGGDGIAFFISPDHATLGATGGYLGLFNSSSSAAKTNASIVAVEFDTVLNDEFGDPSDNHVGLDLGLPVSVNAVDLAAFGVVLNSGNLTTAWIDYHGADHLLQVSLSYSAAKPAKPVLSVAVDLSPYLRDAMYVGFSASTEGSTQQHTIKEWTFQTFGFPSATNSSSFSNTTGNASAQTVPGEAAAGGAASRKKRFGLALGILGPVALAVSFVFFAWVSIRKLIELTSRKNAGFLPELVKGPRKFSYKELSAATRGFHASRVIGKGAFGTVYKAAMPGTATASAVSYAVKRSTQAHQSRNEFVAELSVIACLRHKNLVQLEGWCDDKGELLLVYEYMPNGSLDKALYGEPCTLSWPERYTVASGIASVLSYLHQECEQRVIHRDIKTSNILLDGNLSPRLGDFGLARLMDHNKSPVSTLTAGTMGYLAPEYLQSGKATEQTDVFSYGVVVLEVCCGRRPIDKDDGGGKNVNLVDWVWRLHGEDRLIDAADPRLAGGFYRDEMLRLLLVGLSCANPNCDERPAMRRVVQILNREAEPVPVPRKKPLLVFSSSASIKLQEIAFACGDDVRGGLPAAATSPRSEGGDIER

SEQ ID NO: 45151 - protein, 200 aa, Oryza sativa
MLPRRGRHRLARGIVVVRVIEPGQPVARGGCVWWRCTARVGSGELGGCATSPTRASGGVACWRRPPARQGVSSAGGGSRAHVRRCADVELVWLLVRRLGLIYGHRCGGACVGDVKMLVKALPCLWPVRRRRHPLAPFPFLEALSWRSFISPQSPGENLVPNSDKRRRRYVSCPPWGRRFGEVPTHRQLLMVFFGSKAFIP

SEQ ID NO: 45152 - protein, 659 aa, Oryza sativa
MAAQMAAVAVNGGSPGAVTAAAAAGGVGVAVGLGGGGAQSLYVGDLEASVTDSQLYELFSQAGQVMSVRVCRDISSRRSLGYAYVNFNNPVDAARALELLNFAPLNGKPIRVMYSNRDPSSRRSGSANIFIKNLDKAIDHKTLHDTFSAFGNILSCKVATDEMGQSKGFGFVQYDKGEAAQSAIKSLNGMLINDKPVYVGPFLRKQERENSVDKTKFNNVFVKNLSESTTKEDLVKIFGAYGNITSAVIMVGMDGKSRCFGFINFKSPDDAARAVEELNGKKINDKEWYVGRAQKKSEREIELKRRFEQSMKDAADKYQGLNLYMKNLDDSIGDDQLCELFSNYGKITSCKIMRDANGVSKGSGFVAFSTREEASQALTEMNGKMISGKPLYVAFAQRKEDRKAMLQAQFSQVRPVPMTPSMAPRLPMYPPMAPLGQQLFYGQAPPAIMPPQPGFGFQQQLVPGMRPGGAHMPNYFVPVVQQGQQGPRPGIRRSGAGSAQGQQSAQPFQQQMLPRGRVYRYPPAHNMPDVPPMPGVAGGMIQSYDMGGFPVRDAGLSPAPIGTLTSALANANPEQQRTILGESLYPLVELLEQNHAAKVTGMLLEMDQTEVLHLLESPEALKSKVAEAMDVLRNVAQQHNANTPTSQLAALSLGDAIIS

SEQ ID NO: 45153 - protein, 988 aa, Oryza sativa
MALPSRRWAGAVESGVDPVAEAWAKLLRSLSQAMARLRVQMESFDDAQMRWALAAGVRAKAQLLASRLAQILALFWDEGQRAALPACVRDALYGMEDMVDDLEYHMLKFQPHQQEVRCNLLISLVNLRYRLIISHASRSRFLKDLDFVASEAGSLLSAMHKLEPTAPSLPALLLADDDHQVVFGRHKEVTDIVRILIDPPASHHHHPTYDILPIVGMGGVGKTTLAKLVYDDAKVKQHFELRLWASVSTSGGFHKIDITEQILRSANPTYPASIHSEPTLDMLQFHLSQLVASKRFLLVLDDIREESFTSMACQEILSPLSSAEKGSRILVTTTTASVPAMLGASCTYHLNVLDIEDLWSLLKKYAFHGGPTHDSTQELEEIGRNIASKLKGLPLAAKMLGGLLGATKSTKTWMNVLDKELYGDSILPVLELSYSYLPRRLKQCFSFCSLFPRNYKFNKRVLIQLWMAQGFVQSQNSADKNMEDLAEDYFEELLSRSFFDVRREACETHYVMHDLVHDLAQSVSADQCLRVEHGMISEKPSTARYVSVTQDGLQGLGSFCKPENLRTLIVLRSFIFSSSCFQDEFFRKIRNLRVLDLSCSNFVQLPNSIGELVHLRYLSLPRTLNMLPESVSKLLHLESLCFHKCSLEKLPAGITMLVNLRHLNIATRFIAQVSGIGRLVNLQGSVEFHVKKGVGCTLEELKGLKDLRGKLKIKGLDNVLSKEAASKAELYKKRHLRELSLEWNSASRNLVLDADAIILENLQPPSSLEVLNINRYQGAICPSWLQLSSLKQLQSLDLINCRNLEILPPLGLLPSLKYLCMKELCTVNQIGHEFYGDDDVPFPSLIMLVFDDFPSLFDWSGEVKGNPFPHLQKLTLIDCPNLVQVPPLPPSVSDVTMERTALISYLRLARLSSPRSDMLTLDVRNISILCWGLFHQLHLESVISLKIEGRETPFATKGLCSFTSLQRLQLCQFDLTDNTLSGTLYALP

SEQ ID NO: 45154 - protein, 90 aa, Oryza sativa
MPRNPNRLDAGDSKSAMAVFVGSHKNRTRKMQGFHFCNSIYKMQRGFLSSYPPATRSNPRGSRNYIKVETQSLGVRLSFTIQSSNQLYNE

SEQ ID NO: 45155 - protein, 139 aa, Oryza sativa
MPQRHSKNNNDLAFFTYEEKRKLGYGTQRERLGKDSIKPFDACCLCLKPLIHPLCCPKGHTFCKECILECLLARRRTSSANLLLMRPRKSWRRKRRMRSVCCKSPRSWTLLISRIMEPSPNTTIAAALKTRMVFMEQTA

SEQ ID NO: 45156 - protein, 201 aa, Oryza sativa
MGKVRAFFSRKGRGNSSGRSRSMREAAMNVDWSPRPSDLAAAAAAKPRPPAAEDETERVFRKFDANGDGRISRAELAALFRSVGHAVTDDEVARMMQEADSDGDGYISLGEFAAISAPPPGDAAAAEEDLRHAFGVFDADGNGVITPAELARVLRGIGEAATVAQCRRMIDGVDRNGDGLINFEEFKLMMAAGAGFGRIAS

SEQ ID NO: 45157 - protein, 347 aa, Oryza sativa
MEKGDETLAYPAAAAGGQKTAPIGCFAGDDVAATTDGHPTKSYAAVAAEKTLPNGSVEEDEVTVTAAENPAKSYAAVVAEKTSPNGSVAEDEVTVTAAENRAKSYADVAAEKTYPNGNVEEDEVSVAAAVNPAKSYATVAAEKTVPDGSVAEDEVTVTAPVNPAKSYAAVAANAEIEDLRTTNHDLEEKLAAADREKKGRATEIDGLKDTSDKAKQNSVVFQYIASSSDAKVLALREELEDLQKLLQAEKDEFKADKRDSNQLAGKVGSERAVKMRLEEEVIAMKERARARAAAAAAAAAAEDERVAAPTPGTLQGARVAWPVMAGAAAVGAAAAAVAVVIFLRLKR

SEQ ID NO: 45158 - protein, 424 aa, Oryza sativa
MAQPQPQSQRLRVYEAWKGNNRFFFGGRLIFGPDAKSLLFSVALIFVPVAVFCAFVARNLRHQFPAYNAGYAILAVAIVLAIYVLSLLFITAAQDPGIVPRASHPPEEEFHYDNLSLADTPGRLVFPRVKDVMVNGVPVKVKYCETCMVFRPPRCSHCSICNNCVERFDHHCPWVGQCIGKRNYRYFFLFVSSASILCIYVFAMSALYIKILMDGDYPTVWKALKHSPASLALLIYCFICLWFVGGLTGFHTYLISTNQTTYENFRYRADGRPNAYDRGCMNNFLEVFYTKVPPSKHKFREPIQEEARAPPANRAVEREEEPVGARTKVEDDLDIGGDLLKISQRHNYDGIDIEMGGGDRNSRNEAVSNSKLISKTDAQAPTVEDEVQHPSRGERSRSSDLASEGITTSAPVSQPAFPFRREAL

SEQ ID NO: 45159 - protein, 181 aa, Oryza sativa
MGLTFTKLFSRLFSKKEMRILMVGLDAAGKTTILYKLKLGEIVTTIPTIGFNVETVEYKNISFTVWDVGGQDKIRPLWRHYFQNTQGLIFVVDSNDRDRVVEARDELHRMLNEDELRDAVLLVFANKQDLPNAMNAAEITDKLGLHSLRQRHWYIQSTCATTGEGLYEGLDWLSSNIANKA

SEQ ID NO: 45160 - protein, 376 aa, Oryza sativa
MDPVPLFNPCEMGRFTFSHRIVLAPLTRARSYGNLPQSHAILYYSQRATKGGLLISEATGVSSDAPCTNTPGIWTKEQVEAWKPVVDAVHAKGGIFFCQIWHVGRASDLEQEPISSTDKPVEKNEDMDFPVPRRLAVEEIPDVINHFRIAARNAIDAGFDGVEVHGAHGFLLEQFMKDGVNDRADEYGGSLQNRCRFALEVIDAVSTEVGPDRVGFRISPYISYYGCHDSDPDALGVYMARELDRRGVLYCSAVEPEMVAATTVVDGETTTTTMSRRMMIPHRLHGMREAFRRGMFMVGGGYDRDAGNMAVASGYADMVVFGRLFLANPDLPRRFQLDAPLNKYDPATFYTHDPVVGYTDYPFLDDDREAMSDHTG

SEQ ID NO: 45161 - protein, 788 aa, Oryza sativa
MTAQPKKRSVIESGDGGLGLGLALFISNGEDLGPIIRHGFDSGKPEALMQNLRSIVKKKEVEIEELCRLHYEDFILAVDELRGVLVDADELKGMLTGENIHLQKVSSATLLNLDELFELYSIKKNIGEAITTLKICVKVISLCMACNGYIAEAKFHPALKTLDTIEKGYLKNIPLKLLKKVVAKHIPLIKMHIEKKVCSEFNDWLVHIRRMAKQIGQVSISQASMARQKDEEMRARKREAEAHSDARSDEHVYTLDVENTDEESTLNFDLTPVYRAHHMHICLGIGEKFRDYYYKNRLMQLNLDMQISTSQPFLESHQPLLAQVAGFFIVEQRVLRSADGLLSESQVESTWETAIAKITSILEDQFARMSIASHLLLVKDYVTLLGTTVSKYGYQIAQLIQVIAKYKDKYHQLLLIESRKQIDDILANDSYEQMIIKKEYEYNMNVTAFHFEPDDVVPEFPYVAPFSSGVPDICRIVRSFIGDSVSYFSYSARTNIYEIVKGYLDRLLIEVLNDSLLNMVYARSLAMSQMMQLAGNISVLEQSCDMFLLYSAQLCGIPKRIAQRSHSGLTAKAVLKASQNAAYNSLINLANFKIDEFMVLLDDVNWIVEEAPDNPNEYMNEVLIYLETLVSTAQEILPLEALYKMVSGAMSHISDSIMTTLLNEGVKRFTVNAVMGLDIDLKLLEAFAEEKFYRTGLVDLGKETTFADCLVEIRQLVNLLLSSQPENFMNPVIRGRNYGSLDYKKVAIVCDKYKDFADGLFGSLSNRNKQDARKRSMDVLKRRLKDFS

SEQ ID NO: 45162 - protein, 80 aa, Oryza sativa
MPAVLLVIIVVVTVVVAVLILILVLVVGRRGLGVAGSARSHHCRRAGGRVESVAPVPLHHRIRCCRASPPPDPPQSDPRG

SEQ ID NO: 45163 - protein, 279 aa, Oryza sativa
MASSPVSYWCYHCSRFVRVSPSTVVCPECDGGFLEQFPQPPPRGGGGSGRRGAMNPVIVLRGGSLSGFELYYDDGSGDGLRPLPGDVSHLLMGSGFHRLLDQFSRLEAAAPRPPASKAAVESMPSVTVAGSGAHCAVCQEAFEPGASAREMPCKHVYHQDCILPWLSLRNSCPVCRRELPAAAAPESEADAGLTIWRLPRGGFAVGRFAGGPREQLPVVYTELDGGFSNGVGPRRVTWPEGDGHVDGGEGRIRRVFRNLFGCFGRSSRPESSSSQSRSG

SEQ ID NO: 45164 - protein, 315 aa, Oryza sativa
MAMGLPGLRCCRGLDAAAARPLLGPARARASPRASALRYSSLQAGDSLGEEVLRMFLAERQAHGDFVTKISDMVWRRNGGDLGVLEAAAEQENSADVAPPQPEEADVMGEGMLRIAATRDWVSGESSLPVSKRLSAKDRQDERERRKELNLLRYEALKDELLLLTTGIGAACSLYCLLVFSLEAAVSYAFGVAFSCLYLQLLYRHTDNLSKKDVPEIFMKKKVKRIGIRSEDLKNTIEKVLGGISVALSSPRLVIPAIFFGLSTLSDHFQNSILNFELVPGMMGFFAYKAAALVQVYRDNEDLRLILPEEDADSS

SEQ ID NO: 45165 - protein, 370 aa, Oryza sativa
MEAIRKQASKLREQVARQQQAVMKQFGGGYGADGAFADEAEAQQHSKLEKLYISTRAAKHFQRDIVRGVEGYIVTGSKQVEIGNKLCEDGKKYGAENTCTSGSTLSKAALCFAKARSLMEKERGNLLEALGTQVAEPLRAMVMGAPLEDARHLAQRYDRMRQEAEAQAIEVSKRQMKLRETSGNGDMISRLEAAESKLQELKSNMGVLGKEAVASMTAVEAQQQRLTLQRLIAMVESERSYHQRVLQILDQLEREMVSERQRIEGAPPPAVESSMPPPPSYEEINGVFMRNPTVAELVETVEFFLAEAIQSYRAESETELNLAAGDYIVVRKVSNNGWAEGECRGKAGWFPYDYIEKRDRVLASKVAQVF

SEQ ID NO: 45166 - protein, 787 aa, Oryza sativa
MAEPESSTAAAGGSRLRNACGGVLCAFTLLLIGVLAFSIRLFSVIKYESVIHEFDPYFNFRVTQFLSKNGIYEFWNWFDDRTWYPLGRVIGGTVYPGLTLTAGTIWWLLNSLNIPLSVETVCVFTAPIFSANASWATYLLTKEAKGTGAGLMAAAILAMVPSYISRSVAGSYDNEAVAIFALIFTFYLYVKTLNTGSLFYATLNALSYFYMVCSWGGYTFIINLIPIHVLLCIVTGRYSSRLYIAYAPLVILGTLLAALVPVVGFNAVMTSEHFASFLVFIILHVVALVYYIKGLLTPRLFKVAMTLVITVGLAVCFAVIAILIALVASSPTKGWSGRSLSLLDPTYASKYIPIIASVSEHQPPTWPSYFMDINVLAFLIPAGIISCFLPLSDASSFVVLYLVTAVYFSGVMVRLMLVLAPAACILSGIALSEAFDVLTRSVKYQLSKLFDDSPAASGDSSAESSSASTVSTNSAKNETRPEKTETAPKEKPSKKNRKKEKEVAESVPVKPKKEKKLLVLPMEASVLGILLLIVLGGFYVVHCVWAAAEAYSAPSIVLTSRSRDGLHVFDDFREAYAWLSHNTDVDDKVASWWDYGYQTTAMANRTVIVDNNTWNNTHIATVGTAMSSPEKAAWEIFNSLDVKYVLVVFGGLVGYPSDDINKFLWMVRIGGGVFPHIKEPDYLRDGNYRVDAQGTPTMLNCLMYKLCYYRFVETDGKGFDRVRGYEIGKKHFKLTHFEEVFTTHHWMVRIYKLKPQKNRVRGKLKKLKSGSKASSTNAAGRKKNPWQ

SEQ ID NO: 45167 - protein, 282 aa, Oryza sativa
MEATTLSVGKSVLNGALGYAKSAFAEEVALQLGIQKDHTFVADELEMMRSFMMEAHEEQDNSKVVKTWVKQVRDTAYDVEDSLQDFAVHLKKPSWWRFPRTLLERRRVAKQMKELRNKVEDVSQRNARYHLIKGSGSKATITSAEQSSVIAAAIFGIDDARRAAKQDNQRVDLVQLINKEDHDLKVIAVWGTSGDMGQTTIIRTAYENPAVQIRFPCHAWVRVMHPFSHESQKGEARKVNPPRQSHNHERKECSLSGKHSECPIALSTTHHSCHDSGHATKR

SEQ ID NO: 45168 - protein, 526 aa, Oryza sativa
MPPTAAVAVAVAAATALPSPSSSSSHRRLPATAKSVWVNPSLPSSQPFHRRKPAEPQHQRQDHVPDLPALLAALSAARTASDLAAAVSPHRPVSPRLLGTLLSRLPDARRGVALLDLLAPDLPASALLIPYNLLLRSACRAGMLRLASGLLLEMRDRGVAPDAFSYSTLLAALTRAGHLDHALTFLPLMEDDAVAPDLVLFSNLIHLALRGGDAPKALALFSRLRGAAGIKPDLKAYNAAIAAYCKSDLLRDANRLLLHDMPSDGVAPDAESYSPILAALARRGRHLAAVSLFTHMRAVARVKPDLSVFNIVLNAYGQLDLAREADRLFWSMRRAGVAPSVVTYNTMLRVYGDAGLFGEAVHLFGLMRSAASDGSDRGGSVIKPNVVTYNTMIAIYGKSLEDEKAGSLVQDMQANGIQPNAITYSTILSIWVKAGKLDRAGSCSRSSGKPARRSTRCFTRRWSWPTSVPGLFHNPSACCMTSKTQRTSPRRQPSKSWRMPAEWRRPHGCSAVQPTPATSGTHRCTE

SEQ ID NO: 45169 - protein, 285 aa, Oryza sativa
MDSKKFLQLLEEKKKRILEKKEAPLKWEQKLEAAAKAKADAEAKEKKLKSRKHRRRGHSSSDSESDSDSDGDRKHRKRKDRKRHRKHGHSDSDEAKRHKRRSKRRSSDSSDDTDSDEYDSGSEEENRRKKRSHRRKHRRHSSRSDSDASDYSSDDEERRSSKKDHSSSRSHRHHHHRSSGDDSGSESEERGRSRHKKHHRSSDEDATSDSNNHKHRRSRSLEESSDDAAAGEYEKVRNGKRPHKTGHHRHHHRHHHHHHDHRSSSEPNDKKRQDGQKALEGGNVD

SEQ ID NO: 45170 - protein, 502 aa, Oryza sativa
MIEQFVNFVIRPPRAEYNPDQYLWEPEFTLAGRKYKRIDLELTNGRDQTLKCSHYVPAVIPDNTALPCVIYCHGNSGCRADANEAAVILLPSNITLFTLDFAGSGLSGGEYVSLGWHEKQDLKCAVSFLRNNKEVSCIGLWGRSMGAVTSLLYGAEDPSIAGLVLDSAFSNLYDLMMELVDVYKIRVPKFTVKMAVQYMRRVIQRRAKFDIMDLDVVQFAPKTFIPALFGHASNDMFIQPHHTDRIHQAYAGDKNLIKFDGDHNSPRPQFYYDSVSIFFYNVLHPPQFPSVCSNKLDKYYNLGAFKVGAGTNESLLYEIINGLRAAGPDAGSSSAAAANFTNATKSVVELLTERVNQLSIKTDNDLDFLLDENHNLTEMDTHTAESHLEDKSHRQNEECCSYTSSNRESWGRCSSLGAASDGSSLGERPEIPSHKHKSMTLRALATPLRRIRRKPLAIPKERKNRSLWKRLKQERQEMGESLTQRFRLCLQGQAQHKRTKSS

SEQ ID NO: 45171 - protein, 753 aa, Oryza sativa
MTVGAGVAVQDGGLVALGATVLTEVRDNVLLTPAAGAGMTSGTFVGVRSATAGSRSVFPVGKLRGLRFICTFRFKMWWMTQRMGTSGRDIPFETQFLLVEAADADGSHLAGDGAAAVYTVFLPILEGQFRAVLQGNSDDELEICLESGDPAVESFEGTHLVFVGAGSDPFEVITNSVKAVERHLQTFTHREKKKMPDMLNWFGWCTWDAFYTDVTSEGVMEGLQSLGKGGTGPKFVIIDDGWQSVSMDPAGIASLADNSANFANRLTHIKENHKFQLNGRKGHREENPANGLAHIVNEIKGKHQLKYVYVWHAITGYWGGVRPGADGMEHYESKMQYPVSSPGVQKNEPCDALNSITTNGLGLVNPDRVFSFYNELHAYLASAGIDGVKVDVQNILETLGAGHGGRVLLARKYHQALEASIARNFRDNGIICCMSHNTDNLYSSKRSAVVRASDDFWPRDPASHTIHIASVAYNTVFLGEFMQPDWDMFHSVHPMAEYHAAARAVGGCAIYVSDKPGNHDFNLLKKLVLPDGSILRAKLPGRPTRDCLFSDPARDGKSILKIWNLNEHSGVIGAFNCQGAGWCRVGKKNLVHDEQPATVTGVIRAQDVHHLATVAADGWNGDVIVYSHIGGEVTCLPKNASLPVTLKTREYEVFTVVPLKKLDNGVSFAAVGLIGMFNSGGAVTAVRYVEDAGVEVRVRGYGTVGAYSSAKPARVVVDSEAAEFSYDDGCGLVTFELAVPEQELYSWTISIEY

SEQ ID NO: 45172 - protein, 25 aa, Oryza sativa
MMRLGMWSQVNMMTSLICFETWHVA

SEQ ID NO: 45173 - protein, 445 aa, Oryza sativa
MRWLLLALFLVALVSNGAAVHGAFNRFSFPEDFIFGTGSAAYQYEGAVNEGGRGPSIWDTYAHIPGKVEDGSNGDVAVDFYHRYKEDLNFVTDMNMDAFRFSIAWSRILPNGTISGGINKEGIAFYNSLINEVISRGLKPFVTIFHFDTPQALEDKYRSFLSENIVKDFVDYADVCFREFGDRVKSWNTFNEPMIFCAGGYGSGTKAPGRCSPYVSKKCAPGDSGNEPYVAGHNLLLAHAEAVRLYRQKYQATQKGQIGITQVSHWFVPYSDAAADKHAVRRSLDFMYGWFMDPIVFGDYPGTMRKLVGDRLPKFTAEQSELVKGSYDFIGLNYYTTNYAKSVLRRPSKLKPAYATDNWVNQTAYRNGVPIGPPAFTKIFFTYAPGLRELLLYTKRKYNDPDIYIAENGTDEANNSTIPIAEALKDDNRISFHYQHLRFTQLAIK

SEQ ID NO: 45174 - protein, 709 aa, Oryza sativa
MRGNGRGREEEGNSPMGRRLRAVSAHLLPPASTTTTTGGVDLAANPTAGEYAHVQGYSAVLPEKLQTGKWNVYRNAKTPLRLIDRFPDTPDIATLHDNFVYAVETFRDCRYLGTRICADGTVGDYKWMTYGEASTNRTAIGSGLIYHGIPEGACIGLYFINRPEWIIVDHACAAYSFVSVPLYDTIGPDAVQFIVNHATVEAIFCVPQTLSTLLSFITQMPCVRLIVVIGGDNANMPSTPTSTGVEIIIYSRLLNQGKMSSRPFRPPKPEDVATICYTSGTTGTPKGVVLSHRNLIANVAGSSVVIKFYPSDVYISYLPLAHIYERVNQIALLHYGVAIGFYQGDNLKLMDDLAALRPTVFSSVPRLYNRIYAAITNAVKESGGLKERFFHAAYNAKRQAIMNGRNLSPMWDKLVFNKIKARLGGRVRLMSSGASPLSADVMEFLRVCFGCLVIEGYGMTETSCVIATMDCDDRLIGHVGPPNPSCEIKLVDVPEMNYTSEDQPYPRGEICVRGTTIFFGYYKDEIQTREVIDEDGWLHTGDIGLWLPGGRLKIIDRKKNIFKLAQGEYIAPEKIENVYAKCKFIAQCFIYGDSLNSSLVAVVAVEPEVLKAWAASEGIQYEDLRQLCADTRARAAVLADMDSIGKEAQLRGFEFAKAVTLVAEPFTLENGLLTPTFKIKRPQAKAYFAKEIADMYAQLREAESTKSKL

SEQ ID NO: 45175 - protein, 558 aa, Oryza sativa
MHDQAEICSLPIDIAFGRLQEWLVDRKRVPQDWRKRLAGIRARLAAAFASLPRDLDPSLLALEPDEIGYLEAKKIYGILLESNPESRNIFGRLTGSAGEWEAIVKAYEKDHVFLGEAAQIMVQNVNYDIPYQRKQMQKTQQQLAELDRREADIKRLAALSATRYAEACQELGLQGINVRQELIESAKTLPSTFTKILEVLNSDPVSIATEYYTTFVRECHTEDKENCKSVLQNLKQLQANPPSLHISVCNEVESSLGETSKALESNVTGAENIDSNISADDIDWDISLDDNGIDWDIGAVEQPVEESGNGFGSYEIIDANVELAGSENYNFGISDDPSVNKSSSSEPGICWDITDVNPEENASIQNAPESGQSQSLAEERSQLLEKEYRNNILDDLLEVRAFLTQRLGEMRNADTSSLQHQVQAVSPFVLQQYAPENLENMLAEVSSAISLLSNQKTLDLIMILNSKRFLDRLVSTLEDKKHHEVKLREGLGDLSVKRMELQNALSSSWPKQEAAITKTRELKKLCETTLSTVFDGRPVHIIGEINTLLSSSVSQLAG

SEQ ID NO: 45176 - protein, 507 aa, Oryza sativa
MAMAAAKGRVLPLLAVAAALAAALLYRAPFSKSLGGEGCSLLPHDHFWIASERVVTLGRVGPAAVEVKGGLINAIAVGDYRSFLLRRPVVDYGDAVIMPGLIDVHAHLDEPGRAEWEGFSTGTRAAAAGGITTLVDMPLNSYLSTVSEETLKLKLDAAKDKLHVDVGFWGGLVPENALNPSALESLLNAGVLGLKSFMCPSGINDFPMTNSTHIEEGLVTLAKYKRPLLIHAERIPDVQNEDGIDGELDPKAYTTYLKSRPPAWEEAAIKDLQREMKDTEIGGRSEGAHSHIVHLSDAKTSLGLLKDAKQNGARVSVETCPHYLAFSAEEVPDGDTRFKCAPPIRDSTNRDNLWEALLDGHIDMLSSDHSPSAPDLKLMEEGNFLRAWGGISSLQFVLPVTWSHGKKYGISLNQLASWWSERPAMLAGLKKKGAVLPGYRADIVVWKPEAQFHLDDSHPVYHKHRNISAYLGKQLSGKILSTFVGGNLVFAEDKHAKAACGAPILAK

SEQ ID NO: 45177 - protein, 557 aa, Oryza sativa
MSERIAGLGTEANNAQNIKNPHLGWIIGFLFLVSFIGLFGLVPLRKVMIIDYKLTYPSGTATAFLINGFHTPHGAKIAAKQVKKLGIFFILSFFWGFFQWFYTATDDCGFHKFPSLGLQAFQHKFFFDFSPTYVGVGMICPHIVNVSVLLGGILSWGIMWPLIAKKRGDWFSADLPDGSLHGMQGYRVFIAIALILGDGLYNFLKMIILTAFSLRSQIKKKNASTLPVSDDGMVTTTAAVSYDEERRNELFVKDQIPWYVAYGGYAVVAAISIGTVPQIIPQLKWYQILVAYIVAPILAFCNAYGTGLTDWSLVTTYGKLAIFAFGAWTGASHGGVLAGLAACGVMMNIVSTAADLMQDFKTGYLTLASPRSMFVNQVIGTAMGCVIAPCVFWLFYKAFDNIGISGSDYPAPNAAVFRSIAILGVDGFSSLPKNCLNLCYAFFAAAIVVNLIRDLVPKVSRFIPIPMAMAIPFYIGSYFAIDMFIGTVILFVWQRVDRAKADTYGPAVASGMICGDGIWVLPQSVLALAKVKPPICMKFLSRRTNDKVDAFLTTLGK

SEQ ID NO: 45178 - protein, 581 aa, Oryza sativa
MGVAGHNDPLIGETTCGSLLQQLQLIWDEVGESDEDRDKMLLQLEQECLDVYRRKVDQASNSRARLLQQLANAKSELSRLLCALGELSISGIPDKTTGTIKEQLEAISPFLEKLCREKDKRVREFAGVQLQIQTIRGEIAGSLQVGDHMETPRVNEDDLSTKKLNEFLSELQALQKEKSNRLHKILDFVSSVHDLCSVLGMDFLSTVTEVHPSLNDSVGAEFKSISDATLSKLSKMVIQLKEEKSKRLERIQALASQLTDLWNLMDTSADERQLFDHVTCNISSTLDEVTAPGALDIDLIEQAELEVERLDQLKASRMKDIAFKRQTELEDIYAQAHITIDTSAARDRILTVIDSSIFEPSELLADMENQILKAKEEALSRKDILEKVERWMSACEEESWLEDYSQDDNRYSATRGAHLNLKRAEKARLLVSKIPVIVDTLMAKTRAWEQEHGMPFSYDGVHLLAMLDEYKVLRQQKEEEKRRMRDQKKINDQLAAEQEKLFGSKPSPARPQSSRKAPGPRANGGAVNGTPNRRLSAHQNGGGRSVSRDGRRDSGRPAAPVNYVAICKEESSNNNPAASSP

SEQ ID NO: 45179 - protein, 131 aa, Oryza sativa
MTQGRVFCTDFKILNLGSYDMILGMDWLMQHSLMRVDWIKKTLTITWQQQSVTLQGIQSKMSQCARISPQQFQEFKDRQAISHLIQLCSITDSSSKETVPSEVQQLLSQFAQVFEEPDGLPPSEYLITQFL

SEQ ID NO: 45180 - protein, 707 aa, Oryza sativa
MGCVASKNAVSVTPAADSSGALRERSLPRAPEAAATVVSVTASSLRCSSAAAAGRRSEKKRDEAAVAAAGEEPSEKAVIAAATASRSFRLRSLRRSLEGEQVAAGWPPWLSAVAGEAIQGWIPLKADSFEKLEKVGQGTYSSVFRARELDTGKIVALKKVRFDNFEPESVRFMAREIQILRRLDHPNVMKLEGLITSRLSCSLYLVFEYMEHDLAGLSSSPDIKFSEAQVKCYMNQLLSGLEHCHSRRIVHRDIKGANLLVNNEGVLKIADFGLANYFDPNKNHPLTSRVVTLWYRPPELLLGSTHYDAAVDLWSAGCVFAEMFRGKPILQGRTEVEQLHKIFKLCGSPADEYWKKSKLPHATIFKPHCPYQSTLQDVFKEMPANALRLLETLLSVEPYKRGTASAALTSEFFKTKPYACDPSSLPKYAPNKEMDAKLREDSHRRKASRGHGPEASRKSRLSRAARETTTVNKQTDGKEESKTKANGTKDNSILDRTKVNGDARLFSDIQPVSVAQVKERSRHVKNDSREEIPFSGPLIVSSSSGFAWAKKPPEDRSFARSRTKSSSGGQFTAELDQDNKMPAKENQNLGLKEQPNRDMHIARANSKVREPHDAAKRAVLKKWSQLGRPDSFDSYDTYHSQNFSNAMYLGDTLSSKNSIKGDHDQGERVEYSGPLLSQSHKVDELLEKHERHIRQVVRKSWSSRGKK

SEQ ID NO: 45181 - protein, 482 aa, Oryza sativa
MAAKQSLYPEVNQSHPDLNTAFLANPNRAATASPGGSLYPSVDPQQLAENLFPDAADDAAPPPPTTEEALVAVPGAQLHLVDPDRSMDLGAGTLSVVRLRQGDHSVAVLARLVPEKRSQRRGGLFGFLSGGGKAGDGAAQEPVQWPLTRDVAAVKLDTAHYFFSLHVPHTDHEDDDAEGAEAEKDADGEAALSYGLTVASKGQEAVLAQLDKVLEEYTTFSVKQVEPAAKEKSEVMDTKAVTEITPEEAVGDKKEVVEEQSAAFWTTIAPNVDDYSSSVARLIARGSGQLVRGIIWCGDITAEGLRCGEAVVKKSVGPSGKPSQVKPSTIRRMKRARRVTKMSNRVANSILSGVLKVSGFVTSTVLNSKPAQKFFKLMLGEVILASLDGFGKVWDAVEVSGKNVMRTSSVVTTSVVTHRYGDQAGQVTQDYLHASGNALGVAWAVFKIRKALDPKGNLKKSSLASAAAHAVAKESISRQRRK

SEQ ID NO: 45182 - protein, 51 aa, Oryza sativa
MNSNNSYIQFLNTNRRRRLIIETLQGLSFISATISPTYLSIYISIILLKQP

SEQ ID NO: 45183 - protein, 68 aa, Oryza sativa
MQHHQRLRGHQLHHLLRLTMQLISSTCYQWMEQPRKKQSHLLMMIVHGRASSLQSQYLAQTKRILLSQ

SEQ ID NO: 45184 - protein, 187 aa, Oryza sativa
MLLCRISVKKTVEGTINDAEIESIVLKLWNFTEEERVPYYNRLNKKRANMALAWYNENNPEDCYEFTSVLLHDVCNFCDGGVCHVHINFKARNVTTNSEELFFAELALINNVFDQYSGYTTTACCIIDGNCLGMLLSYIYLYTQTHVFLFFHDWLSRNHKRRIVSFTSFPCACICEKVNLCLHIFYC

SEQ ID NO: 45185 - protein, 324 aa, Oryza sativa
MERNPHLRQEGIAHDVLQWYLCRMEGWFATDADAISLQGWDQEVLLPGGHGLMVRGYRPVINTLAKGLDIRLGHRVVEIVRHRNRVEVTVSSGKTFVADAAVIAVPLGVLKANTIKFEPRLPEWKEEAIRELSVGVENKIILHFSEVFWPNVEFLGVVSSTTYGCSYFLNLHKATGHPVLVYMPAGRLACDIEKLSDEAAAQFAFSQLKKILPNAAEPIHYLVSHWGSDENTLGSYTFDGVGKPRDLYEKLRIPVDNLFFAGEATSVQYTGTVHGAFSTGLMAAEECRMRVLERFRELDMLEMCHPAMGEQTATVSVPLLISRL

SEQ ID NO: 45186 - protein, 231 aa, Oryza sativa
MAHLRLLLSHSSRHHPQPHRLISLLRFSSNTGSGSGSGPTPPPIKPVSYAPKPQPAPEEAPAAAEEAAPSDDPGSRPPPPPRRSQGPPQRQQCTREEMRFVKDAGPSITPVSYPARVAPLPEDRPTEEAPPEGPADEGLRGEGERIEMDATRARRSFFGMQAEEEQAPYPTLIPVEKRPQKVAIDLVDAIREIKTSANEKKRNFTETVEAHVMLGVDPRRGDQVCCAICIN

SEQ ID NO: 45187 - protein, 108 aa, Oryza sativa
MPRHHHAHVAQRPDRPQVSMQRLRNPVPEEEEAGSWAGPDQPQKQEHGEVIPEVKDSNSNSNNCNSGSGNSSSNLQVVPKRRLLMGVEEAALLLMTLSSPSASTLLHG

SEQ ID NO: 45188 - protein, 195 aa, Oryza sativa
MQWQFPASKVSVHVLQVIVVVGGGEGGGFQGGGGVRPLLPLRVPPTAAPVSPGDAFDGAAAASTMKQRQFGFDGRQQYAAAEQHGHREQGVDSYGVAAPHHFPSPSPRHAVQFSQANPSTLRGSVDERFPVFVLLAVSAVPEADGGRRRVRLPAGSPRRGGRRRQEAHRLPRQTGMIRAIIQCMPRKQNHGKTRL

SEQ ID NO: 45189 - protein, 315 aa, Oryza sativa
MEDLSLERRRRNDTGDNTGSMSISSRYPKTKLIHEIIFSSLDKPKLLSRLTLLLSEVGLNIREAHVYSTTDGFCLDVFVVDGWDTEETDDLIIKIKEALSHKNASPSNSTNSSASTNQQKIAELQQQVGDSEIDWNLLTTGEKIATGSSADLYRGTYNGLDVAVKILRDSHFNNPSEVEFLQEILILRSVNHENVLQFYGACTRPQKYCIVTEYMPGGNLYDFLHKQNNVLDLLTILRIAISISKGMNYLHQNNIIHRDLKTANLLMGYHQVVKIADFGVARQGNQEGQMTAETGTYRWMAPEMCSALLLFCGSW

SEQ ID NO: 45190 - protein, 484 aa, Oryza sativa
MTTTTTTSAIGSLLVLLLVVVVGGVCSASVGGGGGGGEAWRAEQERDRVARVPGQDFDVGFAQYAGYVAVSEERGASLFYWFFEAADDPASKPLVLWLNGGPGCSSIAYGVAEEVGPFHVNADGQGVHLNPYSWNQVANILFLDSPVGVGYSYSNASDDILNNGDARTANDSLTFLTKWIERFPQYKGREFYVTGESYAGHYVPQLAQAIKRHHEATGDKSINLKGYMAGNALFDDFHDHLGIFQFMWTNGLISDQTYRLLNVFCDYESFVHTSSQCNKILDIASDEAGNIDSYSIFTPTCHASFASSRNKVMKRLHSVGKMGERYDPCTEKHSTVYFNLAEVQKALHVSPIINKSKWETCSDVVNTNWKDCERSVLHIYHELIQYGLRIWVFSGDTDAVLPVTSTRYSINALKLPTVTPWNAWYDDDGEVGGWTQGYKGLNFVTVRGAGHEVPLHRPKQALILIKSFLAGSPMPSVQDFYSDV

SEQ ID NO: 45191 - protein, 382 aa, Oryza sativa
MAILPLSISHSLTSALSATSSGIGRPVARLLHPRVPSRPTVICLAAPPKVPVPIASPASLGDDPSKWDPAECDALLRGGEQVASVLQEMLKLMEDMEMDGSFESLAVELIAQGVIGKRVDEMESGFLMALDYMIQLAEKDSDNERKSLLEVVKQTVLDHLTKKCPPHVQVVGLLCQTEKKDSRHELLRRVAAGGGVFKNDKGLKCQIPGANLNDIANQADDLLESMESRPTIPDRKLLARLVIVREEARNMMGGGLLDERNDRGFTTLPEAEVNFLSKLVALKPGKALERMIKDVMQGKAEGADNIENANAGPDSKLNHLTGISGRGSVTGLKPRPVRPGMFLETVSKVLGGIYANNTSGITAQHLEWVHQTTLKILQEMAF

SEQ ID NO: 45192 - protein, 535 aa, Oryza sativa
MALNLAQSAAAAACFATAGDARRAASVVAMPSSSSSATTSLRMKRQAACEPVACRAVARHVAAAAASSRRNGVPVFVMMPLDTVSKCGSALNRRKAVAASLAALKSAGVEGIMVDVWWGIVESEGPGRYNFDGYVELMEMARKTGLKVQAVMSFHQCGGNVGDSVNIPLPRWVVEEMEKDNDLAYTDQWGRRNFEYISLGCDAMPVFKGRTPVECYTDFMRAFRDHFASFLGDTIVEIQVGMGPAGELRYPSYPESNGTWRFPGIGAFQCNDRYMRSSLKAAAEARGKPEWGHGGPTDAGGYNNWPEDTVFFRGDCGGWSTEYGEFFLSWYSQMLLEHGERVLSGATSVFGDGAGAKISVKVAGIHWHYGTRSHAPELTAGYYNTRHRDGYLPIARMLARHGAVLNFTCVEMRDHEQPQEAQCMPEALVRQVAAAARAAGVGLAGENALPRYDGTAHDQVVAAAADRAAEDRMVAFTYLRMGPDLFHPDNWRRFVAFVRRMSESGSPREAAESAAHGVAQATGSLVHEAAVALRS

SEQ ID NO: 45193 - protein, 225 aa, Oryza sativa
MAISRRLLLSLFLLRAFSSLPAQAAARGASHPSGTSGNYGSFLRNLLQDNPMITEELVRGYMSNSELEIAVHAIGSRYPNISRIYSIGKSVNGVTLWVIEISDKPGQKEAEPAFKYVGNVHGDEPVGREVLIKLANWLCDNYLKDPLATLIVKNMHLHILPTMNPDGFALRRRGNANNVDLNRDFPDQVSDALFSSYGIFGFLLFFTYLSLLIILLMLAVFHQQR

SEQ ID NO: 45194 - protein, 253 aa, Oryza sativa; identical to SEQ ID NO: 43518

SEQ ID NO: 45195 - protein, 316 aa, Oryza sativa; identical to SEQ ID NO: 32152

SEQ ID NO: 45196 - protein, 110 aa, Oryza sativa; identical to SEQ ID NO: 34385

SEQ ID NO: 45197 - protein, 120 aa, Oryza sativa
MPERSELGRQLPLRGPLKALEADIHHANTMANAIQRNYGGACVQMRLSCSSLAPFFLYLIQWLDCGCCYALPSYLGLFHILICKVYADGDSSVSTYERRASLKEFYADHLPYPLKSLRVV

SEQ ID NO: 45198 - protein, 151 aa, Oryza sativa
MAAAAAAKTTTRRRRRGVLDLEAQFAFFRSQHRHPVNAAAHRSSRGPSSSPASSSSTSSPPRPRSRSTRRSPSPSPTPPPTSRPTAARGRSRGSSSPPAGLPAAPSPRASGSRSPGRPRSPPSSSAGPGSSSAMASSRREGRLWVISLRCS

SEQ ID NO: 45199 - protein, 1098 aa, Oryza sativa
MVWKSWGGVVFAVAAAAAALLCSSDAADDVVSVSFSKTPPRVSRSASAVFTFQVLHTNGSGPCQDCLITCKVDGERAWECGRNSSSSNGTAVVRYSRLKDGNHTLAVCAGAGRPPTTTTTTTCATYAWDVDTVAPTASVKAEAGFTSGSNVSVLVSFSEPCPGGGGFTCNATYCHLSVYGPGRVDPSSLQVLRPALQYSVHVTIPPELLYGRLILVMAKGFCTDAAGHHFIRTANSTFTLRFDRRSDSMNIGSSIPEKLLQIEGATRVVEATNDDKDLRVYLSFAEPVMNSSSQILAALTATDAILTPTNRSTLGNRRFGYLVKRTSNTAVVTVSCDGNSIISRQGTPVSSSEPYTFLYDNQRPSVKLATSTVRTSSRNIPVLIKFAKPVFNFTSSAVQVSGGNLLSFHEASKSIYTAQIQAVDNLVSVHVAENSAQDVAGNTNLPSDRLEVRHYSVPASSSSIAIVTTVIFTATAAFATLLTVSTSSLLASGVIQRPPSYLVSEPSRNLLRMACHIQVFALSRWLSINLPVEYYELSKGLEWSIPYMRLPWEGPSADPFVGYSTMPAIAYSEMLDRTALAADVLRRPPAAPGVAMAMPSTSPLDGKPLTAMEYRYLFENQDMKPEAQIIMKLQDLDGWKYFFRNIFWLAVIAAAFLLLHATLLLYLKLRHRHSHTHVGALVFPRLELMLVILAMPCVSQASAALIRGGTTAGLAVGIVLTGVLTAFLVALLLFLSLGVTTGRLLQYKEVHQEGREYHWYQEIVRRTLGPGKRGQWTWKDPARTACLVKLGPLFEDLRGPPKYMLSQIAGGSGGKRAAERIIVSDDENEDAEAPFLQKLFGILRIYYTFLESVKRVALGIVAGAHASSDHSSRAHAVVVLAIASFQLFFMVLKKPFIKKRVQLVEIVAVASEVLVFAACLRLVDSGGSAVAEGSGVGLAMLTVFAVALAAQVCNEWNALYRQVRLLSSDRRSFVEGAKAAWVGLLLLVLPSSALGEQLEKMKKQQEQPEAVALGGGGGGTERSWLGQLREMAKASFSKEGQGGEAEASGSRAKGGSRSMSSVASSSDSKAKGPENSHSQWSSKSKGLYKDLEAIFSNR

SEQ ID NO: 45200 - protein, 251 aa, Oryza sativa; identical to SEQ ID NO: 30206

SEQ ID NO: 45201 - protein, 520 aa, Oryza sativa
MRGRSDGGQSKRPILLLCVMVVCLCLLFLYFSGSNGQAGSAALEYGTKFSRSLGWGSDGDGDDGSEESIFGTGDADDVELKSFPVCDDRHSELIPCLDRNLIYQMRMKLDLNLMEHYERHCPPPERRLNCLIPPPHGYKVPIKWPKSRDIVWKANIPHTHLAHEKSDQNWMIDAGEKIKFPGGGTHFHHGADKYIANIANMLKFKDNNINNEGMLRTVLDVGCGVASFGGYLLSSNVIAMSLAPNDVHQNQIQFALERGIPAYLGVLGTKRLPYPSRSFELAHCSRCRIDWLQRDGILLLELDRLLRPGGYFAYSSPEAYAQDEEDRRIWKKMSSLVERMCWKIAEKRNQTVIWVKPLNNDCYRSRAPGTNPPLCKRGDDPDSVWGVQMEACITPYPEQMHKDGGTGLAPWPARLTTPPPRLADLYVTADTFEKDTEMWQQRVDNYWRLLKPKIKPDTIRNIMDMKANFGSFAAALKEKDVWVMNVVPHDGPSTLKIIYDRGLIGSTHDWCEAFSTYPRT

SEQ ID NO: 45202 - protein, 671 aa, Oryza sativa
MGVGQTIRGIVGIFTVAVTIVVVAVPEGLPLAVTLTLAFSMRKMMRDKALVRRLSACETMGSATTICSDKTGTLTLNQMTVVEAYFGGKKMDPPDNVQVLSASISSLIVEGIAQNTSGSIFEPENGQDPEVTGSPTEKAILSWGLKLGMRFNDTRTKSSILHVFPFNSEKKRGGVAVHLGGSESEVHIHWKGAAEIILDSCKSWLAADGSKHSMTPEKISEFKKFIEDMAASSLRCVAFAYRTYEMVDVPSEDRRADWILPEDDLIMLGIVGIKDPCRPGVKDSVRLCAAAGIKVRMVTGDNLQTARAIALECGILSDPNVSEPVIIEGKAFRALSDLEREEAAEKISVMGRSSPNDKLLLVKALRKRGHVVAVTGDGTNDAPALHEADIGLSMGIQGTEVAKESSDIIILDDNFASVVRVVRWGRSVYANIQKFIQFQLTVNVAALIINVVAAVSSGNVPLNAVQLLWVNLIMDTLGALALATEPPTDHLMQRPPVGRREPLITNVMWRNLIIMALFQVIVLLTLNFRGTSLLQLKNDNQAHADKVKNTFIFNTFVLCQVFNEFNARKPDELNIFKGITGNHLFMAIVAITVVLQALIVEFLGKFTSTTRLTWQLWLVSIGLAFFSWPLAFVGKLIPVPERPLGDFFACCCPGSKQAADAKGDDADHSDV

SEQ ID NO: 45203 - protein, 316 aa, Oryza sativa
MDENYLHSCFGYTGEVVAIKVIRNKQTGQSEGYGFVEFYSHAAAEKVLEGFAGHIMPNTDQPFRINWASFSMGDRRSDIASDHSIFVGDLASDVNDTTLLETFSKRYSSVKGAKVVIDANTGRSKGYGFVRFGDDNEKTHAMTEMNGVYCSTRPMRIGPATPRKTSGTSGPTGSAARSDGDLTNTTVFVGGLDPNVSEDDLRQTFSQYGEISSVKIPVGKQCGFVQFVQRKNAEDALQGLNGSTIGKQTVRLSWGRNPANKQLRSDNGSQWNNGMYYAASPFYSGYGYPAPFPADPGMYAAAYGAYPFYGNQQQVS

SEQ ID NO: 45204 - protein, 445 aa, Oryza sativa
MGSMAAAAEAAQEEETVVFRSKLPDIEIPSHLTLQAYCFEKLPEVAARPCLIDGQTGAVYSYGEVEELSRRAAAGLRRLGVGKGDVVMSLLRNCPEFAFTFLGAARLGAATTTANPFYTPHEIHRQASAAGARVIVTEACAVEKVRGFAADRGIPVVAVDGDFDGCVGFGEAMLDASIEPLDADEEVHPDDVVALPYSSGTTGLPKGVMLTHRSLVTSVAQQVDGENPNLYFRREDVVLCLLPLFHIYSLNSVLLAGLRAGSAIVIMRKFDLGALVDLTRRHGVTVAPFVPPIVVEIAKSPRVTADDLASIRMVMSGAAPMGKDLQDAFMAKIPNAVLGQGYGMTEAGPVLAMCLAFAKEPFEVKSGSCGTVVRNAELKIVDPDTGATLGRNQSGEICIRGEQIMKGSISLSFFPLHIIIGIISAKSIIHHLPRVYGHASACTTT

SEQ ID NO: 45205 - protein, 698 aa, Oryza sativa
MGHPVVAVAIVFVSAAIAMAASSQYSHHPLDPLTATEITAIRAAVLASPLVPARPLFFHYVGLDEPDKPDVLSYAYGAADAAATSSQMTLPRRAFVIARAGGQSHEFTVDIAADNASVLSHAVHRGPGFPMFTDEDQIAAMALPYTYPPFVESVRRRGLDVGEVGCGVLSRGWFGAEQPAYGGARVAKMKCVVVDYNATANIYARPVEGVVMVVDLDRMAIIGYRDRAVFTVPKAEGTDYRADKVGPPFTGPAAPPGVVMQPEGRGFHVHGHLVKWANWEFHVGFDMRAGTVISLASVNDTDAGGLKRRVLYRGFVSEIFVPYMDPEEEWYFHTFTDAGEYGLGALASQLQRGADCPANAVYMDGYYAGSDGKPVKAEDVICLFERYAGDVAWRHTNGIGLGGLFSEVRPDVTLVVRMVVTVGNYDYTLDWEFKTVGSIKIVVSLSGILEMKAINYTHVDQIREDTHGTLITENTIGVYHDHFVTYHLDLDIDGTRNSFIKNNIVPKCNTGVRATGGAPTPRRSYWTVLYEVTETEAEGQVNINSAPADLLFVNPSKKMKIGNEVGYRLIPTGATATSLLADDDYPERRASYTKKQVWVTPYNKSEKWASGLYAEQSTGDDNLAAWSKRNRSIKDEDIVLWYTVGLHHVPYQEDFPVMPTISGALEVRPSNFFERNPLIRTKPPENSPNCSCSIGGSA

SEQ ID NO: 45206 - protein, 174 aa, Oryza sativa
MASRAAAPAAAHRDQQATLQQDLPAPAPALTARSTASTPPPPEAVPPPPPSPFARSPPWRRGSAAATGNRRRHPAFPEAAAAEGGRDTGSDPSGPSSRPRPQQQQPTTPPPCPPTSKRTKAKRIHPRPKGLERNGIFSPKPPTNPQRISPAADVIDRHGDEPFLLKNHPAWGID

SEQ ID NO: 45207 - protein, 276 aa, Oryza sativa
MTITMQAKPITMATASMLLRSLLCLAVLAAAAAAAQPRLQCLENPPELTAAGDGEAGVVVQNLGGFAAYVTGAAHSGRAIVLASDVFGFEAPLLRKIADKVGEAGYYVVVPDFFQGRPYNGDPSINITQWIMAHSPVKAAEDSKPIFAALKREGKSVVGVGGYCWGGKLAVEVAKTNEVGAIVISHPSSVTADDMKDVKCPIEILGAENDAVTPPRLVYQFVNALRQRPEVDYFARIFPGVAHGFACRYNASNPFAVRTAEQSLALMLDWFEKHLK

SEQ ID NO: 45208 - protein, 155 aa, Oryza sativa; identical to SEQ ID NO: 29395

SEQ ID NO: 45209 - protein, 507 aa, Oryza sativa
MGLPQVNPAEEAPTPSSRPVSSPRSFEGVGACDLDGLLGGSSSSRVFEYPSIGDSDRKTALDIPNGSTEYSRDSHCFDRPAGLRGLRIDSRDADSRSSHKLDPTVHVPTMRVVGFESGSVGGSAIIETDNCHTPFDQHELQARKRLLSPLKNVLNRQFHGDILNISAGDARFELSDSARKLNISCFQDSKKANTGMLDSFEPQAWTNSRCSNGSPEWDANKINSNLFTDGPLLGSKESLAYLDHLAASAKLAHSPLSLSPLSPKFMNRTKATGAQCRTMRDIEHHFLDSREKGGPDGIRMLSVLEETNILHDEYNVMTPKRSSCRRYQIWGPESTPTSPRVGYGRSLSLPVRRSLVGSFEESLLSGRLSYGKDNQIIDGFLAVLNITGGNFSPPTQKLPFAVTSIDEDSSLLYYSSIDLAGRSSATNCRSPKLERSLSNNDSRSAKSRLRIPVKGRIQLVVSNPEKTPLHTFFCSYDLTDMPSGTKAHLMDQRRKTQMQNVVRWTVT

SEQ ID NO: 45210 - protein, 410 aa, Oryza sativa
MALKAVSREAARHKKNGSGGEDGHRRIWFERDVLMSLRHPLLPSLRGVLATDAVVGFAIDRCGGGDLNSLRRRQTEKMFSDSVIRFYAAELVLALDYLHSLGIVYRDLKPENVLIQDSGHIMLVDFDLSTRLPTPPPPPEEQDATIADSMPEPPPSSPSPNRAKGKRQPGAASCFPFCSVGATKPAASADSPSPTSTSRTASASSSSSSSTATTASSSTAAGVRSPAKSNSFVGTEDYVAPEIIAGSGHDFSVDWWGLGVVLYEMLYGRTPFRGLNRKETFYRVLSKQPELVGEKTPLRDLIARLLEKDPEKRIGARGIKAHPFFNGVDWDRILRVARPPFIPPPPEDEDEAGEVLDVEKVVNEVFAANDGGAAAGVVEKPSPEAGGTLAVGDGEQRRDPSKEGDFSVFF

SEQ ID NO: 45211 - protein, 260 aa, Oryza sativa
MRLVAAKPCCLFRISSVAAVAAGRRRPWRAAAASGNAHAEAEGDEDGQSLSARARGRRARLSARRRERIVVVEGGGVGGIGEFLRQPAGVESLLNTRALQSFAAVDEAPGANTFRCTLQSIGFLGFQVAPVLDLRVAPTCHDCTVEMLSCRFEGSGSVEQQNELFSAFMSNHITWKDDGEEPCLDIDVNLEVTLEVYTKPFSMLPLSAVETPGNLLMQGLLGRLVPLLGEQLLRDYHSWVQLQQQQPEISSLETAEIDAS

SEQ ID NO: 45212 - protein, 324 aa, Oryza sativa
MAAASSAHYFGLGEPQMQQQQQQPPLQNNAAAPVAATPPPKKKRNQPGNPNPDAEVVALSPHTLLATNRFVCEVCNKGFQREQNLQLHRRGHNLPWKLKQKNPKETRRRVYLCPEPSCVHHDPSRALGNLTGIKKHYSRKHGEKKWKCDKCNKRYAVQSDWKAHSKTCGTREYRCDCGTLFSRRDSFITHRAFCDALAQESGRIMPPMGAALYAAAGAGMAIGGLTGMAASHQLQPFQDHSSGRGGEWRGGKAATRRGDATMTAPTTTTTMATTRRRRRRRRRRRREYDDDCCDDGADATTTTAPPMEAGGWTTTAFFLSLHVD

SEQ ID NO: 45213 - protein, 347 aa, Oryza sativa
MCEGVRAAGDAAAAADVDVITSSGRRRIPAHSTVLASASPVLESILQRRLKKERDAAAGGGKVRRAVVLIRGVTDDAAAAFVRLLYAGSSGDEEEIDEKSAAQMLVLAHAYRVPWLKRRCEGAIGSRLTAESVVDTMQLAALCDAPQLHLRCTRLLAKEFKAVEKTEAWRFLQENDPWLELDILQRLHDADLRRRKWRRKRAEQGVYVELSEAMDCLSHICTEGCTEVGPVGRAPAAAPCPAYATACRGLQLLIRHFSRCHRTSCPRCQRMWQLLRLHAALCDLPDGHCNTPLCMQFRRKEEEKAAAKAKAKAGDDDDKWGLLVKKVRVARAMSSLGKRRQMSCSQC

SEQ ID NO: 45214 - protein, 326 aa, Oryza sativa
MLTFSGSYVGLALNTGIMTGILSLTEGIAVGRTFASINNYQVDGNKEMMAIGVMNMAGLMCLLLCHHRIVLEVGGELQRGVQDGGVEHRDGVGGAGDAAVPDAAVPLHPQRDPLGDHHHRRDRPHRRPGRRRLWKVDKLDFLACMAAFLGVLLVSVQMGLAIAVGISLFKILLQVTRPNMVVKGVVPGTASYRSMAQYREAMRAPSFLVVGVESAIYFANSMYLGERIMRFLREEDERAAKCNQCPVRCIILDMSAVAAIDTSGLDALAELKKVLEKRNIELVLANPVGSVTERLYNSVVGKTFGSDRVFFSVAEAVAAAPHKTQP

SEQ ID NO: 45215 - protein, 766 aa, Oryza sativa
MDYFNGTDAHCGGAVGAMGSYVYNLTSSYADQKNEVNIVATSLAMLLLAALLLAFDLLAGAATLRPAARLVLSVSLALFLPVTSYLFSEAKNDVPGAAAADAELPLRARLILAWMLLVELLRKKVEATVAGTKGASGGGPTSRAGRVAFLGYLVFFNVHGAGRKAVFGVLWVFAAAKLVQRVAIGEFVKRSFAFGKNPQLLAGYMAQTLEQQERRPRRDDELMTSCKYAVMGEENLEREAGPNGYLVDLNKTVAGDDNADDAVVVTVGRVWSLAESDQLLVSNPKLKRLCLSYALFKLLRREFEETPLAAAEAADCRELIFRGLCNDGGAAADRAATLFQVFDDELGFVTEYYHSVLPVMLASPFFLLVNYIVFPVLVLGLCLMTVVLCGNGDIAFIAGSIKRDNYAVSFGLLRMTRCLLSRVFRSPSALFSSIDLSITFLLFLTILYEEAWELAVFLLSNWLTVSMVCDYAVKPPSRLRRSAIRGVQWVTNRMSRRNYLRVKQYSVLWFCRLPLKLPAAAVPEEAKQSIVEYLAAYDGAVAPLSAGRSAVAARNTLCNASRLISSACESGSVAEVILTWHIATSLLEVRCPPHAEEEAAAAARSSTVATRLSRYCAYLVAFRREMLPDDVDCTARVYGTMTTELKRELGLKGYYFSTDATRYGKMMAIAGGQEDDEAAAEETTVVRKGARLGKALMDEAAGGDEAAVWKLVADVWTEIVVYVAPARDAEQVRAHGEALARGGEFVTVLWALVTHTGIARPAAASV

SEQ ID NO: 45216 - protein, 338 aa, Oryza sativa
MSRVCVTGASGYIAAYLVKKLLERGCVVHGTLRNLGDEKKTAPLREFPGAAERLVLFEADMYDADTFEPAIAGCEFVFLVATPMQHDPTSTKYKNTAEATTDAMRIILDQCERSRTVRRVIHTGSVTAASPLREDGSGGGYKDFINESCWSPPNLTCDFTNDYLNGYVSSKTLSEKELLSYNGSSPSPAFEVVTLTCAVVGGDTLQPCPWSSSIPVILAPLTGDEPSHNSLKFLQALLGSVPLVHVEDACDAHVFCMDQPSIAGRFLCAAGYPNMKDCVDHFAAKFPDIEIRLKEVIGEGVRVQADTNKLVDLGFKYRYGVEETLDSSVDCAKRLGEL

SEQ ID NO: 45217 - protein, 191 aa, Oryza sativa
MARRRPPPQRHHHLVLLALAAFSCLASGTATPTPTTSSQSQQPQPAGTLLQPALAADLAARTCWYTVQIKTSCASPWRTSDAVSLAFGDAYRNEVYAARLAGSSSSPQPSSSAAFERCATDTFRVGGPCGYGVCYLYLRRSGRDGWTPQWVRVYEPTSDTPSTFYYGDPLPNAVWYGFNRCPRLAASAAAQ

SEQ ID NO: 45218 - protein, 605 aa, Oryza sativa
MAAAKEAVVPVEGRRNVLVTSALPYVNNVPHLGNIIGCVLSADAFARYCRLRGHNVLYVCGTDEYGTATETKAMEEGCSPREICDKYHAIHKEVYEWFDISFDIFGRTSSPQQTEVCQDIFLKLLDNNWLSENTMQQLYCNSCQRFLADRLVEGYCPTEGCNYDSARGDQCEKCGKLLNSTELVNPKCKVCGSTPCVRDTDHLFLELPLLREKLEKYIDETSLTGSWSQNAIHATNAWLKEGLKPRCITRDLKWGVPVPHEKYKDKVFYVWFDAPIGYISITACYTPEWEKWWKNPENVELYQFMGKDNVPFHTVMFPSTLLGTGENWTLMKTISVTEYLNYESGKFSKTKGIGVFGNDAKSTNIPPEVWRYYLLTNRPEASDTLFTWTDLQAKCNNELLNNLGNFINRVLSFIAKPEGTGYGSVVPDSPDVDSHALTQSLAETVGKLIDQYIDAMDKVKIKQGLKIAMAISSEGNAYLQESQFWKLYKQDPASCATVMKTSVGIVYLLACLLEPFMPTFSKDVLQQLNLSPEEHLSFCDEKGEVEKAKRPWDLIPSGHRIGKPAPLFKGLENETVKGLREKFAGSQAERKLRTQVAAQLEATSI

SEQ ID NO: 45219 - protein, 507 aa, Oryza sativa
MAAVAVPPLSAWLVAARSSTQAECGGADEHHHHHHQQQHQCCVGGGSSTVMFGPRRRRFLGGGARRRGAARSGMAMAVALQPERRTVEKKPDVKQRRVVITGMGVVTPLGHDPDVFYNNLLDGVSGISEIERFDCSTFPTRIAGEIKSFSTDGWVAPKLARRMDKFMLYLITAGKKALEHGGLTEELRNELDKTRCGVLIGSAMGGMKVFNDAIEALRVSYKKMNPFCVPFATTNMGSAILAMDLGWMGPNYSISTACATSNFCILNAANHIRRGEADVMLCGGSDAPLIPIGLGGFVACRALSQRNSDPTKASRPWDVDRDGFVMGEGAGVLVLEELEHAKQRGAKIYAEFLGGSFTCDAYHMTEPHPEGRGIILCIEKALADSGVAREEINYVNAHATSTQSGDLKEYEAIVRCFGQNPQLRVNSTKSMTGHLIGAAGGIEAVAAIQAIRTGWVHPNLNLENPEKIVDVGVLVGSQKERCKVNVALSNSFGFGGHNSSILFAPFK

SEQ ID NO: 45220 - protein, 456 aa, Oryza sativa
MASALLAGRGGVNHHHHHHQWGETRAPLAPVAPNSDPNHPLQQRANGSATRPPPSSYVALRPGAMAHREARALRDRLAGELGQVRALIARIDTWQQGQVKRHGSPRRDLPTPPAKLRAAMRKRCEQILAKLRKDKRSIWFNAPVEVDRLGLHDYHAVIKCPMDLGTVRANLAAGRYPSHDDFAADVRLTFSNALRYNPAGHEVHTFAGDLLASFEKMYKASMSWFEQELKLLEPPMPVPPPELPPATAPVQVKPRAANVKMRKPKAREPNKRDMTLEEKNLLRVGLESLPEEKMHNVLQIVRKRNGNPELVGGEIELDIDEMDVETQWELDRFVNNFKKALNKSRRAAIVNGENADVIDASVANDSDMLVNGSTATMVDNGDVTMAIESKDPDKITTQAEQLDEYVDIGDEMPTATYQSVEIEKDTEAASSGSSSSSDSGSSKDSVSESGNAHSLV

SEQ ID NO: 45221 - protein, 403 aa, Oryza sativa
MAAALAAAAAAAAAHHHRLSSSSPAARTRVVHHHRRRRSSSLSFSAPASSHGCPRGARALRRAAAGDGGGNGSGGVSTGTVDPAAASSPSSSLEELYRSCATWTWRGMRMNYLVRGEGPPLLLVHGFGASVGHWRRNIGVLSESYTVYAIDLLGFGASDKPPGFSYTMETWAELILDFLDEVVRRPTVLVGNSVGSLACVIAAADSSRDLVRGLVLLNCSGGMNNKAIVDDWRIKLLLPLLWLIDFLLKQRRIASALFERVKDRSNLKDILLSVYGNKDAVDDELVEIIRGPADGEGALDAFVSTVTGPPGPSPIALMPAVAARSPVLVLWGDRDPFTPIDGPVGRYFSALPSELPNVTLHMLEGVGHCPHDDRPDLVHAKLLPWLDTLPSTTALTPVSSPAA

SEQ ID NO: 45222 - protein, 593 aa, Oryza sativa
MMAAGGHAAAEHRIQIPAAPASQSGPADHKAVAAAPEKWLNYFLRLLAVIESVGNAFGTLAFTWATVVLLGGYPTVLKRDFGIATAIIFLEATRMFTRNNRLDYQLFFRTRGAFRPLGWNGLMVIVFFSVSMVSTVVWDARRPRIVFPIMVVLFAVGQFLCAGVLGLRLRINSRLRRQMSLWSPMVAILLLASCICRSSLLAIWIVYGVLLVVVLLVTISRLQFPIIINRVHGALGRKYVFWRPFILYSCMLAAIVLPMFMIDKLYRYAIIVLDISALVIVSFGNLQIPAALVRVVLAALGFDQEDYDGHGDTTNLPQSLTIFYGMVLGQGLLYIIAAVLEVFSFIPRIHLVRRGGFTGRWGAESVDMYYAYAYDKYMEGGLFAPKRISLSNFAMDSLNSDLSKNQLYGVQMMHIFLQNGLTKARLLEKLTTSTQTMARLISMLDWSSRHHRATIRLYAAKVTAELAKNLRVETVPGTLQLVSTLLDADGKPKRGHPLLDADDDQDHFVDIADRQDKRHDIAGNQGQRREPIGDTNNLLETPTRSTHINDQRYIPRIWQRILEYWSIPKEQPLTDDDLLPALGMSIIYSPCWL

SEQ ID NO: 45223 - protein, 996 aa, Oryza sativa
MRIRGDGGGDEEEAAMAVVSAPPQHLVFAYYITGHGFGHATRALEVVRHLIAAGHDVHVVTGAPEFVFTTEISSPNLHIRKVLLDCGAVQADALTVDRLASLEKYHQTAVMPRESILRTEVEWLNTIKADLVVSDVVPVACRAAADAGIRSVCVTNFSWDFIYAEYVVVAGHHHRSIVWQIAEDYSHCEFLLRLPGYCPMPAFRDVIDVPLVVRRLHKSRSEVRKELGIKDDVKVVIFNFGGQPAGWKLKKEWLPDGWLCLVCGASETQELPPNFIKLAKDAYTPDLMAASDCMLGKIGYGTVSEALAYKLPFVFVRRDYFNEEPFLRNMLEHYQCGVEMVRRDLLTGHWKPYLQRAMTLHPCYDGPINGGEVAAHILQDTAVGKKYISGKLSGARRLRDAIVLGYQLQRAPGRDVGIPDWYSVSEKEIGVRPAPTYHEVNGSAESSFEDFEILHGDIQGLTDTMAFLTSLSGLVGNDPRSPEKQSRERVAASVFFDWEEEIYVARAPGRLDVMGGIADYSGSLVLQMPIREACHVAIQRSNPMKQKLWKHTQARQLANGRAVPLLQIVSFGSELSNRAPTFDMDLSDFMDGDKPISYDKAKEYFSQDPSQKWAAYVAGTILVLMTELGVVFTDSMSILVSSSVPEGKGVSSSASVEVASMSAIAAAYGLNIPPRDLAILCQKVENRIVGAPCGVMDQMTSACGEANKLLAMICQPAEVKELVSIPTHIRFWGLDSGIRHSVGGTDYGSVRVGTYMGRKMIKCAASDLLSESLPSCPPIQSGNTNSDEYEEHGVDLLKSEASLEYLCNLPPHRYEAVYARDIPEIITGDAFLEKYGDHNDAVTTVDPKRSYCVKAPTRHPIYENFRVEAFKALLTAAKTVEQLSALGELMYQCHYSYNACGLGSDGTDRLVNMVQEVQHRKTSQDGGPSLFGAKITGGGSGGSVCVIGKNCLKSSEEIFEIQKRYKAATGYLPIVFEGSSPGAGKFGYLKIRRRST

SEQ ID NO: 45224 - protein, 687 aa, Oryza sativa
MTSGFSPDSAQSPPGFPLSELAEQICRLESGEHKEEEAADADADAVGLYHLMVDERTEAVGGSDTIMASPPASASRPLDPAWVHAKVIGNSKNALACLHCGKKIGGGGITRFKYHLAGITGQVQACKKVPNDVRRQMKQLVNEHRSRHDTRDGHYSGFEEDSSDAVLSNGSSGVQLRPSRKRRTGCVSPQAAAGFERTGYVSPQAAAGFERIGYISPLAAAGCERTAYVSPQAAAGFEPSNDALLVSRDLVQHSMDGVEVPNDLLHNARVAMARWWYDANIPFSAAKSPFYQPMLDAIASAGAGLKGPLYHDLRGPLLKHLTDDIREYLHDMKKEWNACGCSLIADRKKNHGESSIINFFVYCRRGTMFLKSVDTSAEKANLLEIFDQVVREVGPENIVQFITDLDPRYKTTVKVLEERYKTFVWSPCAARCIDLMLENLADPRYFPMIDETLNKAKKITQFIYNHAWVLSLMRKEFTGGRDLCRPAISRFATHFLSLQCILKFEKELCQMVTSNKWVKSTYAKGGVGKEVAAMILNAHFWAQCKHVVKVTEPLLCVLRLVDSNEKPSMGYLYEAMEKAKELIRARMMHKVSLYGPYVRVIDARMEKQLNSPLQAAGLFFNPGIFFSPTFKMQSYAHRGLVKTISCLVPDDDIQDKIFLQLEEYKKGTGDFGLPIAIRQREKLDPVA

SEQ ID NO: 45225 - protein, 387 aa, Oryza sativa
MKGGGGAAAASAAPGDYVYFKSVVPLHKISIGPKLWRYYDFGPKTVPPLVCIQGIAGTADVYYKQIMSLSMKGYRVMSIDVPQVWNHQEWIHSFEKFLDSMNIHHVHIYGTSLGGFLAQIFAQHRPRRVKSLVLSNTFLETHKFAAATPWSPVVNWTPSFLLKRYLLTGIRDGPHEPFIADSVDFVVSQVETLSRDDLSSRLMLNVNVASVGSLMLPDSLITIMDTNDYSAVPQQLKDQVNERYPGARRAVLKTGGDFPFLSRPDEVNLYLQLHLRRVGVEPRPDLVQGFTRNGSAGSSKDQKDGGNNFDNHPGDNGGPGSGGHDHETQNSGSESHDSDESIPTSTMLANTILGTVSSTLQASLCVLLIHHYYESALYISSRQPLDV

SEQ ID NO: 45226 - protein, 763 aa, Oryza sativa
MATITLKPPATAAAAGGEVSEVELSEAGSPDVGSQSSGSGGSGRSTAGSSGWVYHLGVNSIGHEYRHLRFLVIRGKTVAMYKRDPSKNPGIQPIRKGVVSHTLMVEELGRRITSHGELYVLRFYNRLDQTKKGEIACGDPGEARKWVEAFEQAKQQADYDLMTRGVSWNRSQNENELNLDGHRPRVRRYAQGLGKLVRIGKGPEKLLRQSSNLQSHEIINTNFGGDSGDAFEAHEWRYVRTFNGIRIFEDIANTKGGKGVLLKSVGVVGANPDTVFAVVLSSDKHKRYEWDMLTADLELVETIDGYYDVVYGTYEPRYLSWWKTKKDFVFSRQWFRGQDGAYTILQIPACHKNKPPRHGYERTKINSSTWELRRLNPPGSSTPKCLVTHMLEMSPSFWDRWKRRHNENFDRSIAFALLSQVAGLREYFAANPALTSDLPSTVVKPKQSDSLIIQSELEDSELNDEFYDALARGESFEDEDSDDDDDMIPKAGKVKFKNISWAIAGLAMKPTKASVEKSELVTNSTPVTIDSNHFHGTLRRAKSENDPNSWSEPGGEKFMIRGKTYLTDYTKVVGGDPLLKLIAVDWFKADERFDSVALHPKSLVQSEAAKKIPFILVINLQVPAKPNYNLVMYYAAERPVNKDSLLGRFIDGTDAFRDARFKLIPSIVEGYWMVKRAVGTKACLLGKAVTCNYLRQDNFLEIDVDIGSSSVARSIIGLVLGYVTGLVVDLAILIEAKEEKELPEYILGTVRLNRANPDSAVPI

SEQ ID NO: 45227 - protein, 407 aa, Oryza sativa
MVGIRRNKGHGEATIFTLRELADATNNFSTECLLGRGGFGSVYKAFLNDRQVVAVKQLDLNGLQGNREFLVEVLMLSLLHHPNLVKLFGYCVDGDQRLLIYEYMPLGSLEDRLHDLRPGQEPLDWTTRMKIAADAAAGLEYLHDEAIPAVIYRDIKPSNILLGEGYNAKLSDFGLAKLGPVGDKTHVTTRVMGTHGYCAPEYLSTGKLTIKSDIYSFGVVFLELITGRRALDSNRPPDEQDLVAWARPLFKDQRKFPKMADPSLHGHFPKRGLFQALAIAAMCLQEKAKNRPSIREVAVALSYLASQTHESQNTAARHTLPGPSVPRVLDNQINQDTSLPSQHGVHMPPLAGTDHMVQEVKENCRSSSHRPGRGRVTPNGADRERALAEANVWVEAWRRQEKTSKMR

SEQ ID NO: 45228 - protein, 254 aa, Oryza sativa
MQSLLPAMQSVHQALLDLGLAGRVNVSTAHSVNILATSYPPSAGAFREDLAQYIQPLLNFHAEVGSPFLVNAYPFFAYKASPASVSLPYVLFEPNPGVRDPATNLTYDNMLYAQIDAVYAAMKAMGHADITVRISETGWPSKGDDDEVGATPQNAAAYNGNLMKRIAAGEGTPLKPAVPVDVFVFALFNEDMKPGPSSERNYGLFYPNGTPVYNIGFDAASFSPSPTTSTFSSSSRPTSTFLMGVVVLLAAFLL

SEQ ID NO: 45229 - protein, 258 aa, Oryza sativa; identical to SEQ ID NO: 32390

SEQ ID NO: 45230 - protein, 110 aa, Oryza sativa
MDANRRQSGIQQLLAAEQEAQQIVNAARAAKSARLRQAKEEAEREIAEYRAQMEAEFQRKVAESSGDSGANVKRLEQETAEKIAQLKQQAASISPEVIQMLLRHVTTVKN

SEQ ID NO: 45231 - protein, 112 aa, Oryza sativa
MMSSLHISVCLQGDQCHSVYIPVQLVCPSATFKLLALHALLYACIAYLMPFLDDIMCSMLRYIQNFILLAHNKDKITHAMNGPLIYFMTQLIISIHFIRSAMLRHCNHCTGM

SEQ ID NO: 45232 - protein, 266 aa, Oryza sativa
MQINHMATASLSLLLCLAAAAGAAAAAVPPRLQCFEHPPDMKAGGGEAGVVVHDLAGYEAYVTGAAHSGRAIVLASDVYGFQAPLLRQIADKVGDAGYYVVVPDLFHGDPATTTVNFTEWLESHSPVKEAEKAKSIFAFLRNEGKSLVGVGGYCWGGKFAVEVGKTNEVEAVVISHPYAVTADDMKEVKWPIEILGGQNDTVTPPRLVYQYVHALRQRNDIDFYAKIFPGVSHGFAGRYNTSDPFALETGKQALALMLDWFQKHLK

SEQ ID NO: 45233 - protein, 495 aa, Oryza sativa
MGLLGMVGDSFGCSATGERLVSAARDGDIQEAMALLELNPRLARYSTFGIRNSPLHYSAAKGHHEIVSLLIESGVDINLRNCRGQTALMQACLYGHWKVVQILVLFKANIHKKDCFSGATAIHFAALKGHTRCLRLLVADYVPSLPEFWSVMHAKCTDETNKEAFDAVALRRLINNKSDGGVTPLHLAALHGHAECVQLLLDLGASVSEVTINDGSTIDLIGSGSTPLHYAACGGSAVCCQLLVAAGANMRAQNTNGLTPLMVARSWHKSSVEGILTKRSEVPVRILPSSYLSLPLMSIVKIARECGWRKTSVSSVCHDPCAICLDTECTVSAEGCGHEFCTKCALYLCATASSSTSIRGVPGSIPCPLCRHTIVSFVRLTSTTPIKELPWTNKSLALCAAGASTGSKYAGPAAITSSKYAGSLHRRSEMRSLRSSSVDLGCSSFRTASSGKLSSIKLNCTGADETMPCLVNCFRPDVQRSSSYRERIRRYSQFS

SEQ ID NO: 45234 - protein, 182 aa, Oryza sativa; identical to SEQ ID NO: 30941

SEQ ID NO: 45235 - protein, 73 aa, Oryza sativa
MWLEQNHIHLPSKKKKRKISANLLFLVLRMVKDGLPRMVEDGLVSHYELFLCLQMDDTLTTGSIRSTQGKRDV

SEQ ID NO: 45236 - protein, 224 aa, Oryza sativa
MSEQQDHASKSSCSSLSTSTQESEEDVTVGTLLTEAKNSGRSLGKRLSHLDSIPHTPRVNGQIPDVNNATIDHETLLERLGTYGLAEFQVEGDGNCQFRALADQIFRNPDYHKHVRKSVVKQLKEFRKHYEGYVPMEYKVYLKKMKRSGEWGDHVTLQAAADRFAAKICLLTSFRDTCLIEIVPRGATPTKELWLSFWSEVHYNSLYATEDLPNRKTRKKHWLF

SEQ ID NO: 45237 - protein, 83 aa, Oryza sativa
MVLTMELLTCITHLTCIVNYMMEVVGACKVQIQQLIVLGKLLVLKSNLILKARGRQLLKNPVFLLMRLMLQRVYYRIMLVRKI

SEQ ID NO: 45238 - protein, 940 aa, Oryza sativa
MIRSMVYFGNTSIGEVEVWPSGDASLAAAAWAREIRVDRLSPPSERCQPLAVMHTVAVGARCLVMESRLPKAADEPPQPLVAMHAACLKENKTAVVPLGEEELHLVAMTSRRNLTNHACFWGYKVPFGLYNSCLTMLNLRCLGIVFDLDETLIVANTTRSFEDRIDALQRKLSNETDPQRINGMIAEIKRYQDDKSILKQYIEGDQVYDDGKMYKVQPELVPPLSDNHQPMTRPVIRLQEKNIILTRINPLIRDTSVLVRLRPAWEDLRSYLIARGRKRFEVYVCTMAERDYAVEMWRLLDPDSRLINSVQLNDRMVCVKSGLRKSLLNVFHDGSCHPGMALVIDDRLKVWDEKDQSRVHVVPAFTPYYAPQAEANCSIPVLCVARNVACNVRGGFFKDFDEGLLPRISNVFYEDEINEIPSAPDVGNYLISEDENVAAVNGNRDPLAFDGMADAEVERRMKEASGNAQAFTTTAANFVMPVLPGQNFVSSSVAPVAPSLGMVPLSNNQGPPPFTQPVAQLSLSDPLQGSPAREEGEVPESELDPDTRRRLLILQHGQDTRDPTPPLPAVPPVQVPVPPVQPHGNWFPVEDGMNPNNLNRGSAGFPLESETMHYDKKQLPHPFFHGGENPISSDRFSYQNQRYPSQLPHSEDHRVLQNHAPSRYRSFPGEELATRHVSSSQRNNQIVPGQHFARHAGSSAGILEEIAMKCGSKVEYRSALCDTADLQFSIEVWIVGEKVGEGIGRTRKEAQCQAAEISLRNLANKYLSSDPNKMTDMKENGFGSNTNIFGYPGNSRDDVLPIASTSEETRFVKMGENNSRKAGGSIAALKELCTAEGYNLVFQARTSPDSSVGKEAYAEVEVCGQILGNGVGITWEDAKLQAADEALGMLRSMLGPLAQKRSSSPRSLAPSFDKRFKPDFPRAVQRVPYGRYSRIEGHVP

SEQ ID NO: 45239 - protein, 101 aa, Oryza sativa
MGTPPQRLRKSKKSWPSDHVLVLLGNSSEMSSIPSSMWFPTSSTGPSSGTPASPRTTTPSPIVENIAGHVLALRSLLFHPSHFHPCSWMHGEPLYFLTLNI

SEQ ID NO: 45240 - protein, 316 aa, Oryza sativa
MHRSAGATMAWNVFRFCTALRGLGSIMILLVLSIVGVTYYAVVVYNYGPALFAGGASTLLALVVLLLFHFLLVMLLWSYFSVVFTDPGSVPPNWNLDFDEERGETAPLPGLDFNSQVNSQQSIAHNDTGHPRARYCRKCNQMKPPRCHHCSVCGRCVLKMDHHCVWVVNCVGALNYKYFLLFLFYTFLETTLVTLSLLPRFIAFFSDIDIPGSPAALATTFLTFVLNLAFSLSVLGFMIMHVSLVSANTTTIEAYEKKTTPRWMYDIGRKRNFIQVFGNDKRYWFIPAYSEEDLRRMPVLQGLDYPVRTDLDGQEL

SEQ ID NO: 45241 - protein, 470 aa, Oryza sativa
MALTAAAASGGDAHDDEYAKLVRGMNPPRVVVDNEACDEATVIRVDSVSSHGTLLAVVQVIADLGLVIRKAYFSSDGSWFMDVFNVTDRDGNKVLDDQTISYIQTTLEADDWYYPEVRNTVGIVPAEEYTVIELTGTDRPGLLSEVCAVLAGMRCAVRSAELWTHNTRVAAVVHVTDDGGSGGAIEDEARIADISTRLGNLLRGQSGVRAAAAAAPGGLTHKERRLHQMMFDDRDYDGGGGAASSSPRGRSPTPATEVSVTPCAERGYTAVVVRCRDRPKLLFDTVCTITDMGYVIHHGAVSSEPRGGAYQEYYIRHVDGDPVRSEAERQRVVQCLEAAIERRTADGLALEVRTGDRAGLLSDVTRIFRENGLTIRRAEISSERGEAVDTFYLSDPQGHPVEAKTIDAIRAQIGEATLRVKHNPFADGDGAGGGGGGATDDVAGSTAFLFGNLFKFYRPFQNFSLIKLYS

SEQ ID NO: 45242 - protein, 359 aa, Oryza sativa
MGSAGALLSHSPPGLGGFPPRHHHHHRLSVLRCVPLLPSPAPEPLSCRHGRHLRCAAVDGGAGRETERPSPPAPQREESPSGSLGAALEDPSPQPVQNGSFGGITEDEEQSSLYNFLYPSKELLPDDKEMSIFDHLEELRDRIFVSVLAVGAAILGCFAYSKDLIRILEAPVSVQGVRFLQLSPGEFFFTTLKVSGYCGLLLGSPVILYEIIAFVLPGLTRDERKFLGPIVLGSSVLFYLGIFFSYTVLAPAALNFFVNYADGAVESLWSIDQYFEFVLVLLFSTGLSFQVPVIQLLLGQVGLVSSDQMLSIWRYVVVGAVVAAAVLTPSTDPLTQMLLAGPLLGLYLGGAWMVKLTGR

SEQ ID NO: 45243 - protein, 417 aa, Oryza sativa
MPHSLSLLLAPSRALSLSSPPLRLAPTHPPLRLHHDGGHLLVGTTRRQAPSPRRRRLHAARASAPSAAAASPVGPAGEGGEVGGRARKAAGYRNRFLDLARLGAVAESAAEALFRSEIRRRLAVTAVLILLSRVGYFVPLPGFDRRLIPDSYLSFAPLPADDLGDFSSELKLSFFQLGISHQISASIVMQVLCHVLPSLEKLRKEGLDGHEKIKGYIWWLSLGFALVAAFTVSCYSLQYSIYAASYRVKHVMITSLFLVLGAMTMTWICDTISESGFGHGSSLIICVGILTGYTDTLHKMLTQFSGNWYSCWPYILGIAGTFILVTMGAVLVTEGCRKIKLQYYGFKLASGARSESSPVTEVEPYIPFNINPTGMQPLLTTSYLLAFPSIMASIFGTQFWESLKETLNPKTSVGGGP

SEQ ID NO: 45244 - protein, 82 aa, Oryza sativa
MVVIINPWLHEPTFLPTSGWNFLLFFKFGVIYIVYINAPQPYRIAARRLRDLSLMQHLVRGDCDRASYNILVDAYEGTDGGR

SEQ ID NO: 45245 - protein, 249 aa, Oryza sativa
MQCQSEEDCARVAKCLPPTEAALLDWAVNLMADVVQEEQINKMNARNIAMVFAPNMTQMADPLTALMYAVQVMNFLKMLIQKTLKDREESDLDDLSLPQKDPSDENGHQTTGLSLDSHPDEGSRRPSFVSEEPLLNSPVHSTEEKPNKTNLAEGKFADSSCPENVALTSMETEGSTSCSQPALAAAAAAPRATAMNLLQGKGSRSLNSRRTRKGKVQFGTRAAPASEKSKGASIVSRINSKVERIEAWR

SEQ ID NO: 45246 - protein, 387 aa, Oryza sativa
MEGGGAKDGSAAAAQTRGSGDDGSHKPLPPCCLKAKAAAAESEAKCHATVVSGWFTEPRSHSGKTSKVQYFNNPMWPGEAHSLKVENILYQGKSPYQEILVFESSTYGNVLVLDGIVQLTEKDECAYQEMVTHLPLCSIPSPKSVLVVGGGDGGVLREIARHASVENIDICEIDQLVIDVCKDFFPQLSVGFKDPRVQLHVGDAVDFLRNAPEGKYDAIIVDSSDPIGPAQELVEKPFFQTIARALKPGGVLCNQAESMWLHTHLIQDMLSICRETFKGAVHYAWTSVPTYPSGVIGFLLCAKEGPAVNFLSPVNPIEKLEGAMEAGREIRFYNSEVHRAAFVLPTFVRRELESHNTCAEKDKSETKPVAKPKKMKIMPNSAIPTAS

SEQ ID NO: 45247 - protein, 666 aa, Oryza sativa
MVKVEDDVEGSGINASVGDLRDAAVNPQPALLRATVKEEEGQPSSSSSHVRSQFIGMGFSPMLVDRVLQKHGDRDSDTILEALLSQSALQKSGSESGSLGDLFDSDNEENSSHFAPRKEVIQDIKVGADSSSEKRSYLLSTMNFSQREVDLALNQLGEEASLEQLVDFIVTGQVSGCSGGNENGDASNEVKDESLFGVMDKTLHLLQMGFTEEEVSSVIDKAGPEATVLELADTIFARRIASSIEQKEVKVEPDFLDETETSYSAYHPSNSGLRYYDDDHDNIRIKRAKHMFIDDSAGSSSRAGNQPLDPWLKDHRATTSDGSVKEEFDAMTPGIRRNVRSDVANPPYFLYGNVVEIPKATWRQLSEFLYNVEPEFVNSQFFSALSRKEGYIHNLPTEGRRNLVPRSPMTIEEAFPFTRQCWPSWDTRKQLNSVATEVAGIEQLCERLGKMVRDSGGYLSQEKKTHIMHQCKLANLIWVGPDRLSPLDPQQVERILGYPRKHTNLFGLNPQDRIEAMRYSFQTDTLGYLLSVLKDLYPDGLRVLSIYSGIGGAAIALHRLGIPLQCVVSVDQSDTNRKILRRWWSNTEQKGQLRQINTIWKLKINVLEDLVKEFGGFDIIIGGNFSSCKGGTTVNSSMGMDSNQFFEYVRVVQRVKHIMGRLQNRG

SEQ ID NO: 45248 - protein, 116 aa, Oryza sativa
MKLFAFVRRCRRLSSAPVDQAAEEEPAAVAPPAEKRRRRPSGPAWKPTLGAISEDAAVASSAAAKAKPAARTKAKAKGKAAAPPPPRRVVRSEYDDFRHYGAPTVLPAFAPTAFLF

SEQ ID NO: 45249 - protein, 264 aa, Oryza sativa
MIRSLVVCCCCLACAKIWSFLGLFLGLFSSVVVVLLVVQFLESHGWWWCGQFLIQAQIETGGREIPGCRRSSWSHFGWWWWVVVAVLDLLPRENSIDVVGSLSSSSPWSSVPQFAILMRSSHCESYCAPPLCNLPCLPKSKDDSTTDDAAAASSPTPATVVAAAFAEDKPPPLQKIEAAVTANKDHDDDGDGGGDEGSKEVVVTVVPKSSLKKTNCEDSKNVVKGNVKWMDLLGKDLTQVKEFEPSESGDSDDEDGNTCICVIQ

SEQ ID NO: 45250 - protein, 386 aa, Oryza sativa; identical to SEQ ID NO: 44047

SEQ ID NO: 45251 - protein, 114 aa, Oryza sativa
MEVNSQAKMKAAIQRNTIARTSQHIRMNSNHVQPMKTTTIHRPNSTITITKPTGPNKPLQSDKQTGLNRPFESNKPTGQNRPFQSNKPTGQNRPLQSNKPTDLNRPFQSNRPKF

SEQ ID NO: 45252 - protein, 838 aa, Oryza sativa
MIKKISFLFPFNPSAGVDPPSSRDPPVPLAATASNHLSLQNSALLDSSVPSTINASARNGGSRLLESMTTQLGTRERSRSPYLGNISSESMTSLSLPFPRRSLERPQEGGRMDEGSDIRSTRRFPQTQNYVDMPYRDAIHRDSHNNHVPNFQRPLLRKQVMSRASASIRHSFDDSQVQSGDVSGYTDALASLSDALSEGLSPSSDWVVRVSAFEFIRNLLQQGQRGIQEITQNFEKVMKLFFRHLDDPHHKVAQAAFSTLAELIPACKKPFESYVERILPYVFSRLIDPKELVKKPCSSTLDVVGRTYAIDMLLPALVRSLDEQRSPKAKLAVLEFANKSFSKYTVDSEGYSNSGFLKLWLSKLAPLVHEKNAKLKEASISGIISVYSHFDSTAVLNFILNLSVEEQNLLRRALKQYTPRIEVDLVNYLQSKKDRPRPKSYDQADYGTSSEDGYALASKKSYPFGRYSSSSLDAEGGKWMNSVQESTPRNAPMARTTSDMSIDHTSQSIELDTGSEVLLTRSRESKNNTSSLVETARSWPNYPEKTDAPLDDETAISTPRLDLSHRAASDGHNAVGSTAEENVQEGDIAVKLSSIKTTLHADNELSIPQLLHQISNGTEVSSLEKREALQQLVKASVDNDISIWAKYFNQILTAVLEVLDDSDSSTREIALSLVAEMLNNQSGAMEESIEIVLEKLLHVTKDMVAKISNEANQCLNVLLAKYDPFRCLAVVVPLLVSDDEKTLVVCINSLTKLVGRLSEEELMNQLPTFLPALFDAFSNQSPDVRKTVVFCLVDIYIMLGKAFVPYLEGLNSTQLRLVTIYANRISQARSGAPIDANQ

SEQ ID NO: 45253 - protein, 191 aa, Oryza sativa
MESSSRDTANKKIKLSKDIGLDRLTATTVQEAPKRPRTTSLKKNQECSRQKKRKISKWDGSYSVIIEWLNYYSVDESDEDEVPLINKRTERRKRQKLLKLVLARESNSGSEGASSTSFVENGRNSSSAGSYPLSQGDNDKSENVQANRVDVSSLPDHPVSSHVAAEDQVGQAASSPLNSPTRGIVVDISDG

SEQ ID NO: 45254 - protein, 832 aa, Oryza sativa
MVDKNDGSEGLKFNTSHLMQTTEEVARAFIAAASAATVQSTRPSVVYSSREESGSPMQKLQQQFSKILKGFSTSPEVSGSYNPEVLTTQKRQWSRFQLKSLGNRCIREPSHLFESIVIVGLPPQADIHELENIALGSNEEDVKKPRNIFGNNHHQVHALSNLEPQVLFAYPPERPLPLKYKDILSFCLPGGVQVHAVERTPSFSELNEILLGQEQLKESNQSFVFRLQVADDSTLYGCCVLVEEIVQRPSKLVSMLTSEKPVFPRRSRYVITTPRCYCIFSRLPFFELHFGVLQSILMEERLEWLTDGVSLLTSLSPEETCEDDVVCEGTELATEKQYFDGHAVDLEKSSESSVGVCSKELSDTDSSSECRDNQLDLNCKEVQQECVVQDDLVTGTAPQCDTLERPDNCLSEDTTADQSGIELHELDSVPVILKESDTTENCGYSLQDDVNDEQLDIFVNDTILPLMRSRLCEGSELSPGSQDSPSEGINFRSDSHESDLEEPSSIGHGDLVGHNNISQWAKAKKYGSLQVVSQYYQLQCPARGSSLTFHPLDHLHPLRFHRPGETVLHIAGSTIDLRSCDTSLEVAEMRNALFAEEESTALSTWAVASICGCLRLEHVMTLFAAALLEKQIIIVCSNLGMLSASVLSIIPLIRPYQWQSLLIPVLPNDMMDFLDAPVPYIVGVQNKTSDVHSRLVNAVVIDANKNQIKSTSVPQLPQQKELLSALRPYHSRLVGESFLARKRPVYECTDAQVEAAKGFLAVLRSYLDSLCSNLRSHTITNVQSNNDKVSLLLRESFIGSFPTRERPFMKLFVDTQLFSVHTDLVLSFYQKD

SEQ ID NO: 45255 - protein, 244 aa, Oryza sativa; identical to SEQ ID NO: 30577

SEQ ID NO: 45256 - protein, 585 aa, Oryza sativa
MSSSDQDDHDEDAPLFRASSGDDDDHPHPRRRSSPVGEVPVAQSIIKAASNVCFSLFVLAVLVVTVVAVTYQPPDPWLQSSAAITTSLSRVLPNSTFLLPDDSLLPTGEDFNSSSSTPSAPRRDDPDQATATATAAAVNGTCDPDAPLNCSDPRVLAAVKAFNAKAFFRKSIVFLSYEAPVPGPKPGECDVAWRFRNRREKSWRRYRDYRRFVLVPGDGCALDINGVGKFRSGTNAARPPRQKGSKNRNPRVAPPPVDAEINDTIPIVGSEAEFRRGKYLYYMRGGDHCKSMNQFIWSFLCGLGEAKFLNRTFVMDLNMCLSGAHTNNGKDEDGKDFRYYFDFEHLKESVSVVEEGDFLKDWKRWDKKKGPGRISVRKVPSYKVTPMQLKRDKSNIIWRLFDGQEPENYWYRVCEGRAAKVIQRPWYAIWKSKRLMNIVTEIAGRMDWDYDGLHVIRGWKAQNKQMYPNLDADTSPEALVDKVPKLIKQPMRNLYIATNEPFYNYFDKLRSYFHVHLLDDYKELWSNTSEWYNETTTLSGGRPVPFDAYMRVIVDTEVFYRAKTQVETFNNLTRDCKDGINTCNL

SEQ ID NO: 45257 - protein, 160 aa, Oryza sativa
MRPGAMAAAAAKLPRLTTSAALFPTPRPFGSPRPAKARPMPPPPPITISMDPAAVDPAHLQALMLACAHSCAIRPSPPSAAEDPVDLRKLRVALAHSFLVVSVFCSARFLDDGDGGVDGDGRRRLLGLGLGLGRREDRRLVGFGRAVSDVGLTASVHDVV

SEQ ID NO: 45258 - protein, 51 aa, Oryza sativa
MPSHRKTSFAVGMPSSLPVSQSINLFLCRLASCIAGMHLLFPASLGSLLTL

SEQ ID NO: 45259 - protein, 274 aa, Oryza sativa
MERGEGRRGDCSVQVRKKRTRRKSDGPDSIAETIKWWKEQNQKLQEENSSRKAPSKGSKKGCMAGKGGPENSNCAYRGVRQRTWGKWVAEIREPNRGRRLWLGSFPTALEAAHAYDEAARAMYGPTARVNFADNSTDANSGCTSAPSLMMSNGPATIPSDEKDELESPPFIVANGPAVLYQPDKKDVLERVVPEVQDVKTEGSNGLKRVCQERKNMEVCESEGIVLHKEVNISYDYFNVHEVVEMIIVELSADQKTEVHEEYQEGDDGFSLFSY

SEQ ID NO: 45260 - protein, 623 aa, Oryza sativa
MGGGVEERKVVDLEDGDGEEGEDAAAVAAGSSRETRMLPRMPVRVLLAEGDDSTRHIICALLRKCGYRVAAASDGVKAWDILKEKSFNIDLVLTEVELPLMSGFLLLSTIMEHDACKNIPVIMMSSNDSVSMVFKCMLKGAADFLVKPIRKNELRNLWQHVWRKQLSSGVLDVQHTQQEDNLTERHEQKTGVTKAEHVTENVVHKNMECSEQESDAQSSCTRSELEADSRQTNNLLEYKQPMGRHFSKPDHKNTEKNGGTKIHASNDGNLIPRREEDASLRRMTCSNDINCEKASRDMELVHIIDNQQKNNTHMEMDVARANSRGNDDKCFSIPAHQLELSLRRSDYSRLESQEKNERRTLNHSTSSPFSLYNCRTASSTINAGDAQACSTSATHIDLENKNGDSKTPSQDKRETNQPPIRVVPFPVPVGGLTFDGQPFWNGAPVASLFYPQSAPPIWNSKTSTWQDATTQAISLQQNGPKDTDTKQVENVEEQTARSHLSANRKHLRIEIPTDEPRHVSPTTGESGSSTVLDSARKTLSGSVCDSSSNHMIAPTESSNVVPENPDGLRHLSQREAALNKFRLKRKDRCFEKKVRYQSRKLLAEQRPRVKGQFVRQDHGVQGS

SEQ ID NO: 45261 - protein, 146 aa, Oryza sativa
MKCVLEVPENSGVKVFGENLEAQGMLIGTEGIEKGAMTVTEIPTMTGIVIDLVTVIETDFTNLEALIKKLTIPWIKIMGMKGVETTTVQQKCIMLIRIMTEKKKTLKTMIVKERKKRSSDQEKGSGIIFSLYFSSVNIANHALGWK

SEQ ID NO: 45262 - protein, 327 aa, Oryza sativa
MSCSQLVAPSTIAMGTPGSMDFRLLPLSTLLTYNCQNTSQGPSVSLKCNGCRIPPRDHYVSWQFIDLPRQPAAAVGFQFNLTAKQHGDDKHVSSVSGTINSDNFTDDKLKTFRGRDSNVLKIQLFPQTYINHHNLKLLQPLVQDFTQGSTFSNVRNLNASLQNPMDGIINTTLYISYLSNYIVEISNENVLGPVSILASIGGLYAFSVAIFLCLMAQCEARIKKLRDEDSRMLKILRKRRAQQNWDKVRKFVMYTWGPSNLDPSDRSGKWPESSVMDSLHGSFHKKRKPIRRATSNGNKPKRNPADAGVIDIERVGEMQESSSSRQA

SEQ ID NO: 45263 - protein, 90 aa, Oryza sativa
MHGKVNSGCRGRRVVVAGTMGWLQSLLAPLKKLWIRMHSAQRKKRGIYILYEDVKSCPCEDVQILWSILVESSHGGGHHHHHPQPLRLKQ

SEQ ID NO: 45264 - protein, 295 aa, Oryza sativa
MSPAARSLLLSAARRQRRRFSTEAPSSTPQQQLLPKGKRWDAVVIGGGHNGLAAAAYLARAGRSVAVLERRGVIGGAAVSESDLVPGFRFSRCSYLLSLLRPALIQELELERHGLKLLPRSPSSFTPCLDGRYLLLGPDAELNHSEISKFSENDASAYPRYEEKLEKFCKLMDFVIDSPPPEMRHEYHLSMVDRMKDKVDKSVFWSKLLGIVMQQGQKDMVDFFDLLLSPASKILNNWFEGDVLKATLATDAVIGSMAGVHTPGSGYVLLHHVMGETGGQRGVWAPETMSKPLWP

SEQ ID NO: 45265 - protein, 937 aa, Oryza sativa
MEVDPSSSLPGAGEGGGGGIGGGGGDLWPFDSLTTSLLFSSVSASPQPLPASSSWLTPPSPLWLFDERQLLPLDMGAPAAPATAPPAEAAAVVEEVHRTRSGNSDTTSKRVDQINSKWQFHLSIDDNTDSSCLFKERLTQALRYFKESTDQHLLVQVWAPVKSGDRYVLTTSGQPFVLDQQSIGLLQYRAVSMMYMFSVDGENAGELGLPGRVYKQKVPEWTPNVQYYSSTEYPRLNHAISYNVHGTVALPVFDPSVQNCIAVVELIMTSKKINYAGEVDKVCKALEAVNLKSTEILDHPNVQICNEGRQSALVEILEILTVVCEEHKLPLAQTWVPCKYRSVLAHGGGVKKSCLSFDGSCMGEVCMSTSDVAFHVIDAHMWGFRDACVEHHLQKGQGVSGKAFIYRRPCFSKDISQFCKLEYPLVHYARMFGLAGCFAICLQSMYTGDDDYILEFFLPPNCRNEDDQNALLESILARMKKCLRTLKVVGNGDTNEVCLQISNVLIIETEDLKTNVHFENSEGCFRESPESNGSQRVHEVDNDGNKVSIMSERHLLADDNSQNNGASVGRPNGSGASDSLHKSNKPPERRRGKAGKTISLDVLQQYFSGSLKNAAKSLGVCPTTMKRICRQHGISRWPSRKINKVNRSLSKLKQVIESVQGSDAAFNLTSITGPLPIPVGPSSDSQNLEKASPNKVAELSNLAVEGDRDSSLQKPIENDNLAILMSQQGFIGANNNLQLEADKASHSRSSSGEGSINSRTSEASCHGSPANQTFVCKPIASTFAEPQLIPEAFTKEPFQEPALPLSRMLIEDSGSSKDLKNLFTSAVDQPFLARSSNLALMQNSGTVTIKASFKEDIVRFHFPCSGSVTALKDEVAKRLRMDVGMFDIKYLDDDHEWVKLACNADLEECMEISGSHVIRLLVSDVAAHLGSSCGSSG

SEQ ID NO: 45266 - protein, 162 aa, Oryza sativa
MTSSLSSSTASAAACCKSRSRNPPPASAPHTSTARVVRSNRRRLLLVFFSAEAAAAATSGLIQTPCGQAYPFAGTNVKKPQPPSTPYSQSQSQQQFGLDAKGRIRACPSTNPGCVSTNPTVGASCSLASPLIRPANTTNGQGRRFAAQGYPQDAEECGDQSR

SEQ ID NO: 45267 - protein, 338 aa, Oryza sativa
MKMLINEAITGLCEPTSTILPKSMAIADLGCSSGPNALTLVSAALDAIHHHCAQQQQPPPEVCVFLNDLPSNDFNSVAKSLATLKHSHGDLDDPVVITGIGMIPGSFYERLFPCGSLHFVCSSNSLHWLSKAPDDLKEGKIPMYDMVEHLRVSRRAAVRDAYARQFRKDFTQFLSLRAQELVTGGRMVISLYGRCSENPISRSNQAWQVVAVALNDMASRGIIDKEKLDSFYIPLYAPLENEVNEIIEDEGSFEINKMLVRNPFSGMDDATVSPKMIALSIRAVFESTVVLHFGSSEEIMDEFAKTVEQKLSSGSAWRAVLAAEYPLVLLCLSLTRVI

SEQ ID NO: 45268 - protein, 418 aa, Oryza sativa
MRRRRTGGGIVRGRGGFFGRDLSFGTLPRAMVSDQEIASCVESVLRSSGGAAGEASLAAVLSQAEAKLGVDLAHKATFIRDQMDLFFGPRLQPPLVAKAQAAAAAAPNPPPLVAAPAPAMPQVQVQAQLQQMQQQLAVLQPQLIFQAMPQLPAGVPGGAAGAVSPQPPVPAMAFYPPPPLAFRVTSGLAGVATGGTVSFQQPAPGTGGTASPTAAVQAAGDNKESASKRKRGGPGGLNKVCAISPELQTIVGETVMSRTQIVKQLWQYIRQNNLQDPDDKRKIICNDELRVVFGTDTTDMFKMNKLLARHITPLDPKDQIREAKKFKPSNVATQPMPLINQPSVVISDALAKFIGMEGTVPQDDALRYLWDYIKANQLEDAITGSILCDSKLQELFGCESIPSSGLSELLAHHFIKET

SEQ ID NO: 45269 - protein, 1087 aa, Oryza sativa
MYDDVKEYLNWYGTRRDTNDKLKDPNAPVIGLVLQRSHIVTGDDGHYVAVIMELEAKGAKVIPIFAGGLDFSGPTQRYLVDPITGKPFVNAVVSLTGFALVGGPARQDHPKAIAALQKLDVPYIVALPLVFQTTEEWLNSTLGLHPIQVALQVALPELDGGMEPIVFAGRDPRTGKSHALHKRVEQLCTRAIRWAELKRKTKEEKKLAITVFSFPPDKGNVGTAAYLNVFNSIYSVLQDLKKDGYNVEGLPDTAEALIEEVIHDKEAQFNSPNLNVAYRMNVREYQSLTSYASLLEENWGKPPGNLNSDGENLLVYGKQYGNVFIGVQPTFGYEGDPMRLLFSKSASPHHGFAAYYTFVEKIFQADAVLHFGTHGSLEFMPGKQVGMSDACYPDSLIGNIPNIYYYAANNPSEATVAKRRSYANTISYLTPPAENAGLYKGLKQLSELISSYQSLKDTGRGPQIVSSIISTAKQCNLDKDVPLPEEGVELPPNERDLIVGKVYAKIMEIESRLLPCGLHVIGEPPSAIEAVATLVNIASLDRPEDEIYSLPNILAQTVGRNIEDVYRGSDKGILADVELLRQITEASRGAITTFVERTTNNKGQVVDVTNKLSTMLGFGLSEPWVQHLSKTKFIRADREKLRTLFTFLGECLKLIVADNELGSLKLALEGSYVEPGPGGDPIRNPKVLPTGKNIHALDPQAIPTTAALKSAKIIVDRLLERQKVDNGGKYPETIALVLWGTDNIKTYGESLAQVLWMIGVRPVADTFGRVNRVEPVSLEELGRPRIDVVINCSGVFRDLFINQMNLLDRAVKMVAELDEPEEMNYVRKHAQEQARELGVSLREAATRVFSNASGSYSSNVNLAVENASWTDEKQLQDMYLSRKSFAFDCDAPGAGMREQRKTFELALATADATFQNLDSSEISLTDVSHYFDSDPTKLVQGLRKDGRAPSSYIADTTTANAQVRTLSETVRLDARTKLLNPKWYEGMMKSGYEGVREIEKRLTNTVGWSATSGQVDNWVYEEANATFIEDEAMRKRLMDTNPNSFRKLVQTFLEASGRGYWETSEENLEKLRELYSEVEDKIEGIDR

SEQ ID NO: 45270 - protein, 229 aa, Oryza sativa
MSEHLALRSSVGSHSSALPPSYHHHRRLPPPQQQHPDPLNSVWIRRLHLLPHQPPPPPPPPPLPQPQHHHDAVSTDESRTPPPPPPPMGAPGFGPFRWSPRPLRGAPLAAWDAASPVRSGGGGGGGTGPPMLSPFFRLPAPSPSPPVTDFGEFSPTMPLFEVGSSSGSGGFPGPSSRMIPGGSSSPFAMGVAAAAYPSHAVDMVPIRTLQVSYIKLDQKEGVQDLYVVN

SEQ ID NO: 45271 - protein, 215 aa, Oryza sativa
MDKAGGNQGGKVLKKGKKKHAKDELDRQKQAEKKRRRLEKALANSAAIISELEKKRQQKREEQQRLDDEGAAIAEAVALHVLIDEDSEEPCHLMLNNLRICNHWEDFVGFGFAPDSQGVDAYPSGKPTSVSHAYVPQLRWTNWGMSQTFSSWEQLTDCEAPLYQEALAQSDIHPGPIAIVSPLQKRREDPFTIQGEAVAAASSATESESGQWNQQ

SEQ ID NO: 45272 - protein, 251 aa, Oryza sativa; identical to SEQ ID NO: 30598

SEQ ID NO: 45273 - protein, 330 aa, Oryza sativa
MLHSSSQLRGSMVLHSPIPTAVGFGELGVDRLSSSGAAAEAADCESARPPSLLARILHCEFQAICCSRCSLDARRLFDGMPPGEAPPPTGGDRIGGLPDGVLQHILGFLPPHEAVRTCVLARRWRHLWKSVAALRITNWDWRKVVPMEEFRYFVHHLLLRRGRAPIDEFELDLAELSDRDTLRVNRWFRHAVMCQARVLRLDIRVSRGSELELENLPVVSRHLQKLDLYGVKLMHNFLDFSSCPVLQHLEIAGCDLSDSNARKISSLSIKHLNISGCNFSDTFHTHIYAPNLLSLGLVNYMNQSPVFEGIPSGSFITGQEVGVVSSGTRF

SEQ ID NO: 45274 - protein, 316 aa, Oryza sativa
MAAGEEVMDRSTSAEDGYCSAGTDSPRAESVDEQGAAEESSPRGGQKRELPSPSASPSSPLPPAAKRSRRSVEKRVVSVPIAECGDRPKGAGEGPPPSDSWAWRKYGQKPIKGSPYPRGYYRCSSSKGCPARKQVERSRADPTVLLVTYSFEHNHPWPQPKSSSCHASKSSPRSTAPKPEPVADGQHPEPAENESSASAELEVPEPEPEQESEPVVKQEEEQKEEQKAVVEPAAVTTTVAPAPAVEEEDENFDFGWIDQYHPTWHRSYAPLLPPEEWERELQGDDALFAGLGELPECAVVFGRRRELGLAATAPCS

SEQ ID NO: 45275 - protein, 261 aa, Oryza sativa; identical to SEQ ID NO: 30971

SEQ ID NO: 45276 - protein, 57 aa, Oryza sativa
MKRPRRSLKAWTLMKFSRELRKLKQRVVKGRKEMNFLVHSRLPTFLVVRMMPHSGAD

SEQ ID NO: 45277 - protein, 150 aa, Oryza sativa
MPSSRGQRPPPLQLAVACGFVHLICLAAVAGGGGPCEFSVARGGKLYSFSLASPTTAHRHGVLSEDGFYKVAVNNSVLWFQLCDQMIFNFDPPVCLNCEDCGGPQRCGTQCSALVSNNRGGYDVCTTIGRASKSHISLIDDINPQKGVVV

SEQ ID NO: 45278 - protein, 376 aa, Oryza sativa
MMHGKDVHAVPADSWYNFSKISQYKQLTLEEAEEKMSRRRSTATGYGRWMMKAATNGAAAFSSDVTQLDDANEGETDQVHLKKGNKNGDENRSDKGSGEERAHVPMTKGREEEGSKDRDFDLDDEIEKGDDWEHEEIFTDDDEAVDVDPEEGGDLADPEIPAPPEIKQDDNEKHGGVGLSKSGKELKKLLRRAAGQNESDDDDEDTDEDESPSPVLAPKQQDQLKIEPQEDNHSKPTVLGHPYSTPHVSKSNQKRRQRGDDSKTCATPKKPKIEPDTKKIVVKEETSCSLEPTSEPFASARSDTNVSPITVEEIRVVLRLYAPIAMRDFSKDFMPRFSPRLRSPEDREVFLANLRKISHLQKINGQKYIILLEEYK

SEQ ID NO: 45279 - protein, 287 aa, Oryza sativa
MGTWGARRPASTVVRTAPSTVAACTRTHRIRIPPSSSSPQPNNGFGVSLRLPLPPLRVRLPCSSSPLLSTPPPPPPPPPPPQHVLAFRSRGAGAHMRFRFRNKAAAAGDGSRPASSPPNAGKFAAPVAGGGGAADVAGESPDQDSTRNGSKDESFFEARPWLDSDSEDDFHSVRGDFTPSRGTTPDHQRQSPFAGRISVDRSEPSLIEKKQRLLELLQEKQQYDDDSVADVGSEIENGAVHAEEYLKSSRKGAKANRASKSRGGCFPSSFWKIKFRSCRKKRKEQND

SEQ ID NO: 45280 - protein, 944 aa, Oryza sativa
MAGSASSPYVAPLISSRITGRLRPASARTDPLGLAAAAAAVRVRSWRRFAGARCEVALLPARRISAQPRRRNALREKASPPLPADPQVLEESGSLDVQRLPDLDREPGISGGLDAVTSGNIVSKWNLEGGSDVVGLGVAQTGPGIVGRGGNTEVQGRGGNVEEVMISRAGAMANQFGSGECEVPTLSSSFPFLTVEAKEPLVVDAQFLAVQIDKPRLRSIAWSGFAALCAACVLLAVSKLIWGNGKKYLSRNMFDILRPRMNKGESGKGGIKVLKNVKCPEDLLGRPQLDRHKLMNNIKRAKQSRELFDLSSVFGYCSVATCYDVIITETRRMVTNVHTLLEGILEQSKTKSKHSVLFPHPAATNGQEVSASHGQCSVYLNDVLGCAELPDISISNNIIGETVESSVDFKSSAQVMDNSVKNQNNVGDIEPPVDTPTNDMPTDAKDSIPMVHVVEIEEQIGSPDECIDGLNSISIPSSEFEGQKQFPDISVKNVDGIFGIKSSQISSDTDVIGTNDNSHKFSINVASKTTGDLSSGCSNSIPSESESKEIPVDINRNDLNYFQEIEAQSTFANYDAQTVQYEEISHRVSMITKEACINPAMADILITKSPQRIGEEPVDLMRGNAQSMQELEPSSSIRDHKQIVLANQKNNIISRSHNETQASSEIDSIGTNDNASTSSVYDLPEESIHQSAKNSTENTSYNEEPEESIIKRKIKLHQEMCNDKDAQTKHKVEGVSEIGPEFGPSNDVCKTETVAKKRSKKTPCDKGLKVPEQDIVQCNSMADKKSSSKNVKRTRKNLKSALRNQGTQTTQEISETALVVNSPDDAPRAENIRPFGGSGSSTETQSPMFSDTFSEARPNGFSISTMRKEKSKHNFQPLESVEAAAVKFKTNRHGDNIMNERAIDFDISNLGVTTTKKMTKRRSLSKRKKPANGLGGATDVPPDV

SEQ ID NO: 45281 - protein, 101 aa, Oryza sativa
MAPTLPSARRTSAPPTASRCHPWRRRGRARRSSPPLLTFLFPIGLLPDRLPRPTTPPFQRSAATVILFQTRARRRWLPPSSKRSRRWLGFAPPSSAKRPRR

SEQ ID NO: 45282 - protein, 377 aa, Oryza sativa
MSAAAAAAAASAANVAVIGGGISGAVCASLLAVTLFDSGRGAGGRMAQRREVMEDGTELRFDHGAPYFTVSNDEVARVVSGWEARGLVAEWKAMFACFDREAGKFTDFEKEGTIKKYVGVPGMNSICKSLCLEDGVVAKFGVTIGRMDWIQDRSSWLLASLDGRDLGHFDYVVATDKNIASPRFSGLTGRPPPLDLSLLPQLSMMIQDIPVRPCFALMLAFSEPLTKVPVQGFSFNNSDYLSWAFCDSSKPGRAHVPLNSQSWVLHSTAEYASKVINNIGPRKPSADALAKVAEELLKEFQATGLNIPQPIFMKAHRWGSAFPAIAISGDDKCVWDKSMKLAICGDFCTSPSVEGAVLSGMRGASKILRCLNFPSGL

SEQ ID NO: 45283 - protein, 233 aa, Oryza sativa
MEENQGTLERDDEDVYFDDESAEVVISSLRLGDDQDGSLFTNSNWFTFDGERGITDRLAAVPSSSPNSEEISPDTEETDDGEVVIGTEDHMDTVNLGNGPIEEAEDAAEFTKHPATSTEDEQLQNAEGIERHLDVSNGDAEASTEAAEAAPVSSAPSSDEVQTERTADEPTGSSDSGNSVSEVLPDPEDSSIDPANTAVSSEQTVDNEDVELPTKEVPSVDVETKTDEIKANE

SEQ ID NO: 45284 - protein, 369 aa, Oryza sativa; identical to SEQ ID NO: 33105

SEQ ID NO: 45285 - protein, 167 aa, Oryza sativa
MARLPYMDPEFNTTGELTTLSDVYSLGVIILQLLTEMPPLTLSEKVAEALESDSLHLLIDKSAGDWPYIQAKQLALIGLSCTEMTRKKRPDLLTKVWKVVEPLTRKPLAATWPYLQSATGDSCVPSAFICPISLEIMKDPQMASDGFTYEAEAIRSWFDRGNILGLR

SEQ ID NO: 45286 - protein, 839 aa, Oryza sativa
MVCFGSKALRRKGDKQRCLPEGDIDDSLPMRRGRKDKSEKPRKGGSSSSNRPSAEKAKHGRKKSGDGKKSKGRGKSCHSDSSIEMNPGHMKNDNTLLPSKASKPVTNFLRKRVDPETAKYFLEISYLFDNKEIDLEERATICANALEETKGKELELATDGPISHTLQVLVEGCELEQLCVFLHNSIESFHIIAVDKFGSHVAEAALKSLATHLEDEASRGIIEDILIRICKVIAGDAANVMSSCYGSHVLRTLLCLCKGVPLQSLQDFHTTKRSAVLAERLSCGSTRSGGSDPKNQGCGFSDIFKSFVREMLQNAKDDIASLETDKNSSLVLQTALKLSAGDDHELNYIISILLGFDEDDTAQKKDRSEQKNEIIALLEDTAYSHLLEVIVEVAPEELRNNMLTGTLKGALFAISSHHCGNYVVQALVASAKTSDQMEQIWDELGSRINELLELGKAGVVASILAACQRLETKRLESSQVLSAALSSNSESSDSIVAHMLFLENYLHQKSSWEWPLGAKMSVLGCLMLQSILQYPHQYIRPYVASLLAMDDNKILQISKDSGGSRVLEAFLCSSATAKRKFKVFAKLQGHYGEIAMNPSGSFLVEKCFTASNFSHKEAIVVELLAVQTELSRTRHGFHLLKKLDVDRYSRRPDQWRASQTSKETTQREFQVEFGLSSKGAGQNIEELLTSRSPSKKRKQKDKTDVTTEDASTNKQDLSHVGKTKRIKSEKTTCEKESSNKKPTNEDSGTSMAFLKNSAKRKSPGFLSDKPSFKRQKHHKPNAGNSSGKMFVRDSAGTPFVRNSGKQKRSIAELADLAGKEKLSASEVRKLLKTEMPGKS

SEQ ID NO: 45287 - protein, 455 aa, Oryza sativa
MSKPQQQSPPSTTTTSPPPPPPSTPPPASSSRSLLSALRRSPVTTLVAAFFLLALFMYGEDVRTLAELSIDDYLYPDADFYNVSALPPLLLPPPTCDLSRGRWVFDNTSLPAYREKECTFLTKQVSCLANGRPDDLWQYWRWQPNNCSLPTFDARRFMEKMRGKRMMFVGDSLNRNQWESLVCLVQPILSKGRKKIVKRGSFNIFYAKEYRATLEFYWAPFLVESNSDNPNFHHIDQRIISPERIESHANNWKDVDYLIFNTYIWWMNNEDIKVRRPNSTSWSDHDEVPRIETYGRVFKTWSTWLEQNVDPARTSVFFMTISPLHNSPAQWGNPNGIKCVKETLPVLNYTKPLDLNHDMRMYDLVAKVAKNMKNVPVSLIDITRMSDYRKDAHTSLYSIRQGKLLTPEQKADPQKYADCIHWCLPGVPDVWNQILYTRILSKSSPPSTHPSLPPQ

SEQ ID NO: 45288 - protein, 137 aa, Oryza sativa
MSGSSSQRVQRARESRTRRRASIGQGFLQAPVFSNVSPTAPRLTTVLPGLSGSIPSVPKPALSLPTISDVGVESQTGSIGSTSCPVHDSQPAPSRKRTLLDVPRHAATANRERRRLKRAGGDSGHLLQKILDGKPAA

SEQ ID NO: 45289 - protein, 230 aa, Oryza sativa
MAAAAAMAAHRASFPLRLQQILSGSRAVSPSIKVESEPPAKVKAFIDRVISIPLHDIAIPLSGFRWEFNKGNFHHWKPLFMHFDTYFKTQISSRKDLLLSDDMAEGDPLPKNTILQILRVMQIVLENCQNKTSFAGLEHFRLLLASSDPEIVVAALETLAALVKINPSKLHMNGKLINCGAINSHLLSLAQGWGSKEEGLGLYSCVVANERNQQEGLCLFPADMENKYDE

SEQ ID NO: 45290 - protein, 273 aa, Oryza sativa
MASEMVKAATSEKLKEMDWAKNIEICELVAQDPGKAKDVIKPIKKYLGSRSKNTQLYAVMLLEMLMNNCGEPIHKQVIDNGLLPILVKIVKKKTELPVREKIFLLLDATQTSLGGVKGKFPQYYGAYYELVSAGVQFSNRPNVVVTQAQAPVPVPEPTIEPNNNSLSRRLDEGQKEVHAQPVSESSIIRKASSVMEVLKDVLDSMDPRHPEGATDEFVLDLVEQCTFQKQRIMHLVMTSRDEVVVSQAIELNESFTRSLYGMMRCFQFSQLQQ

SEQ ID NO: 45291 - protein, 530 aa, Oryza sativa
MAGGFGGGGGEAIAGRAEQYEGKITGYFILACIVGSFGGSLFGYDLGVSSGVTAMDDFLIKFFPEVYARKSAHLHETDYCKYDNQVLTLFTSSLYFAGLVSTFAASHLTRRRGRRATIMVGAVSFFLGGAVNAAAANVAMLIAGRLLLGVGIGFGNQAVPLYLSEIAPYNIRGAVNQLFQLTTCLGILVADVINYFTDKIHPWGWRLSLGLAMGPATAIFVGALFLPETPNSLVEMGRLEEARRVLEKVRGTRKVDAEFEDLREASEAARAVRGTFRSLLAARNRPQLIIGALGIPAFQQLSGMNSILFYSPVIFQSLGFGNSAALYSSIITGSMLVVGALVSMVVVDRLGRRFLFIEAGIQMISSMVVVAVILALKFGHGEELSKGVGTVLVVAICLFVVAYGWSWGPLGWLVPSELFPLEMRSAGQSVVVCVNLFWTAAVAQCFLAAMCHLRWGVFILFAALIVVMSIFVILLLPETKQVPIEEIWMLFDKHWYWKRIVRKDPKYQGHHHHQMAAMPTAAAKSGSSEV

SEQ ID NO: 45292 - protein, 938 aa, Oryza sativa
MKVVSKKHHQQGGGTTTMEEGAMDGAGGGVAEEGCSGEEREGVADVAVGGGGGEGEREGRTLVVGVRADAASRTLLTWTFINVAAPGDRIVAVHVVLASAPVAAATTAVDFDTMLAVYEGFCNLKQINLKLKICKDSSVRKALVREANLFGASKVIVGIAKKKRGISSLHSVAKYCSKKLPAKCAVLAVDSGKIVFRRESNVHSGKVSAEIPGCGDNELYCEVPFLARQCKEEPLPLHEPPRDGGGSAGEEEEEHDVGTKETEPVNAVSGEQQPSGVDPAELSPDQVQGDVDPSDKGEEWTADQKDEISELPGEGASVLYCVLPERNGHSAASTSSRQSNDSTEPPTEGNGELYCILPPRNDHSGRSSGDSSRSTASRKHDDSASLSAEGDGELYCRLPRTGHSGRSSGGSKRSFGAKGLIRRSSSFSSDIQKDVSVCTTTTEQTSSMVSTEAEDSPKNAARDVDTPSSSPMSLRRMIEGRPDRCRLRRRIFNHQRSSSFEWAKISMVQWAMRLPSRYTSVADNKSFKSDASPRLNCDSECESTSAVDTESMFSFSLYDISWPPNEVESLQEKYSSTCRLFTYEELKLATSNFSPDMLIGKGGTSQVYKAQLFDGTLSAVKILKPSVDAIQEFVTEVEIATSLQHDNIVSLRGFSSDNYSLVLVYDYMLQGSLDKALHGKHDSKDSLSWEKRNKIAIGIAKALEYLHHGSVTQSVIHGNVKSSNILLSEDFQAQLCDFGLAKQVSASTPHLTCTDITGTFGYLAPEYFSHGKVNEKIDVYAFGVVILEIISGRRPIRTGCSKGQESLVGWAKPLLSSGEIKQLVDPFLGNDYDCDEMERMTLAASLCTRTSSHSRPEMSQMLKLLEGDDETIHWARTQVTASFDGSDEEAVAAPDSNMQSHLNLALLGVEDDTLSHCSTEQTMDTSADGYWSRSSSFD

SEQ ID NO: 45293 - protein, 745 aa, Oryza sativa
MPECPARERFSALRGARWRADLGVLPDCASVSTEEFRRAAADSRRRYANLRRRLLIDPHLSKDEENAPDLAVENPLSQNPESTWGQYFRNAELEKMLNQDLSRLYPELGNFFQTTICQSMLGRILLVWSLRYPELGYKQGMHELLAPLLYVLHADVHYFKQVRELHDELFSDDFDGQTFPDRIKLNRSDRTNTIEGSAAKIRSLDDLDSDTRDLFLINDAYGAEGELGIILSEKFMEHDAYCMFESLMHGSMNGAQGVVAITDFYSLSPAPESSTGLTPVREASSAIYHLLASVDSPLHSHLMELGVEPQYFALRWLRVLFGREFSLDNLLFIWDEIFSSPNHSYCADIKNQSDYQFKILCSHRGALILSMAVSMMLHLRSSLLGSEHATSCLVRLLNFPGDTDLKSLIDKAKLLQPFALEANLPSSPLRGKSPLNPPNYWEETWKILQMSEEKRSGGSINRMKVRGLFRRSSPNTESNVSRTKDANFEDSNSTSGTQSTADEHHRSGIVPVNLVNGTLHTPIRERTSHVEQCTAENMITTSNNVLEAGQPEVHRSSSVDVRDALGVACGNLSRDSSTSLSCGTEYDHETHHADEPCASHDDKVVSEPDPLPVHNDKIDEVTIAAIQTCALVDYQQSQQNKPCSVNGKSEVKYQQNFAVHEVGRKETFELGSSSDVADKELLGTLRLLGESMVENIEVIDLLFQPNLHSTSLDKSEEIVLGSIEQAKAKAALEGLKKISELLRRI

SEQ ID NO: 45294 - protein, 165 aa, Oryza sativa; identical to SEQ ID NO: 43970

SEQ ID NO: 45295 - protein, 664 aa, Oryza sativa
MMHLFHICRDFSYNQLTGSFPSWATQNNLQLNLVANNFDLGSTNNGILPPGLNCLQKDTPCLRGSPEYYSFAVDCGSNRSIRGSDNTMYELDFTDLGSSSYYVTSETRWGVSNVGKYFQSPNDSKIIYSNEKIQNAVVSELLQTARMSPSSLRYFGLGLENGNYTVLLQFAELGYPDSPTWKSLGRRVFDIYIQGDLKEKDFDIRKMAGGKSFTAVYKSYTATVSKNFLEIHLFWAGKGTCCIPIQGYYGPLISALSITPNFTPTVRNGVPKRKSKVGAIAGISIGASVVGLAALFGIFMFIKKRRRLAQQQGELYNLVGRPDVFSNAELKLATNNYSSQNILGEGGYGPVYKGMLPDGRVIAVKQLSQSSHQGKNQFVTEVATISSVQHRNLVKLHGCCIDSNTPLLVYEYLENGSLDQALFRKNSLKLDWATRFEIILGIARGLTYLHEESSVRIVHRDIKASNVLLDTDLTPKISDFGLARLYDEKKTHVSTGIAGTFGYLAPEYAMRRHLTEKVDVYAFGVVALETVAGRSNTNNSIEESKIYLLEWAWDLYEKEQAQRIVDPRLEDFNKDEVLRVIHVALLCTQGSPNQRPPMSRVMAVLTGDAEVVEMVTKPSYITEWQYRDGNSTNSESTTSEFSRQKEIDPLTMSPTITGSSHDGR

SEQ ID NO: 45296 - protein, 323 aa, Oryza sativa
MLQLRLQPPRFTPLPRRRVAGGGHHRRRRAAAPPPPLALRSQWRIPDVDADAVQERVRSWLSRARGAIADAANAAREKGRSKEEAEGRKKRRKEALEEQALVAVPEITVERRVGRGWLSLDAVVTIEQFARLNGLTGRKVQRIFEALAPSHVQNDARNLVEYCCFRYLSRDNSDLHPSLKELAFQRLIFMTMLAWEDPYGEDDDTESSLDNYSILGRLVGEDAFVRIAPAVAGVADVSTAHYLFRALVGSEKGLSLDIWTTYLGELLKVHHGRQTHKSGDHFLSDEQVLCIGSSRKRPVLKWEENTAWPGHLTLTNKALYFEM

SEQ ID NO: 45297 - protein, 378 aa, Oryza sativa
MDPYTSRAPASGGVAAGDDEEEAACLQAFELMCIFTVPMTLKAAIELGLLDALAAAGDGRALTADELAAARLPDAAPDKAEAASSVDRMLRLLASFDVVKCSTEAGPGGEPPRRRYSPAPVCRLFTAGGNSHRGSLAPSVLFGVDEDYLCTWRQLAAAVGGGGPSAFERAHGMRMFEYMGTNRRLNTLFNKAMAQQSMIVIDKLLDRFHGFDGVGVLVDVGGGTGATLEMITSRYKHITGVNFDLPHVISQAPSIPGVKHIAGNMFESISNIGDAIFLKMILHMQNDEDCIKILKNCHQALPDNGKVIAVEIVLPTIPDLAQTARYPFQMDMIMLSNSRGGKERTELEFAKLATDSGFSGALRTTYILANYWVLEFSK

SEQ ID NO: 45298 - protein, 379 aa, Oryza sativa
MIMLWLPAAVSLLLSSSLHVAGDAGGGVASLSVRRYDAIFSFGDSLADTGNNPVVFDWYSIFDPVTRPPYGSTFFGRPTGRNCDGRLVLDFVAERLGLPLVPPFLAYNGSFRHGANFAVGAATALDSSFFHGAGDPPGASPFPLNTSLSVQLSWFDSLKPSLCSTTQECKDFFGRSLFFVGEFGINDYHSSFGRRSMQEIRSFVPDIIRTISMAVEKLIGDGATTVVVPGMIPSGCSPPVLVTFADAGAAEYDASTGCLREPNEVATLHNSLLLDAVEELREKHPDVAIMHTDLFRHVSEMVQNPDKFGFQKDVLSVCCGGPGKYHYNTRIICGDEGATTCVDPSKSLYWDGVHLTEAAYHYIADDWLHAITLSARATS

SEQ ID NO: 45299 - protein, 656 aa, Oryza sativa
MEFQPLPQGVHPNTSEPAMEPMASESSVPIGTAFADLLLQGPEHPSLWNDLTGMFRKAFRWQGADKRFTLSVYVMSVLQGLFPILDWWKTYNLKFFRSDLMAGLTLASLSIPQSIGYATLAKLDPQYGLYTSVVPPLVYAVTGSSREIAIGPVAIVSLLLSSMIQKIVDPSVDPAFYRKMVFTVTFLTGVFQFAFGLFRLGFLVDFLSHAAIVGFMGGAAIVIGLQQLKGLLGLSHFTNRTDVVSVTKAVWVSVHETWHPENVFIGCSFFMFILAMRFIGRKYKKLFWVSAIAPVLSVALSTLFVYATRADKHGVKIIQKVNSGINASSVEQIDLKGGYAAECAKIALVCAVIALTEAVAVGRSFSAINGYRLDGNKEMVAMGFMNIAGSLSSCYVATGSFSRTAVNFAAGCKTTVSNIIMAATVMVALELLTKLLYYTPVSILASIILSALPGLINVQEVRFLWKVDKMDFLTCMGSFLGVLFGSVEIGLSVALLVSFAKIIIQSIWPQVEILGRLQGTEIFCNVKQYPVVHETPTVLTVRIETSFLCFVNSSSIKEKIMGWVTDEREAFCSVVLDMSNVVNMDTSGLVALEELHKELACLGIQMAIAKPGWQVIHKMKLARLVDGIGEGWFFLTVGEAVEACLANKAGNALECC

SEQ ID NO: 45300 - protein, 377 aa, Oryza sativa
MPAKRNQKRRRRQIRAQNELIRWCKRKGSPCQHGDSRAVKTMRRSTPYPCLPEDIWHHIHSLMPMRDAARAACLSRTFLQSWRSHPNLILNKDTIGLNASACGGNFSRKVDHIMRNHSGIGVKIFRLEYLGVVGFDASRYLDSWLQVVVKPGIEELTLVLCKTKREYNFPCSLLSDGIQNSIRYLRLDWCALRPTAELGPLQSLTSLRLRSVSIRGEELQCLLSNSPALEQLRISSCTEIVCLKIPCSLQKLSNLTVIGCDSLKVLENKAPNLSSFFVSGCSNLRILENKTPNLSSFFCRGVGAKLSLGETLKMKKLGMGRANAVHYARAELPSIMPNLETLNIRSGPEVCIYISRSFRCYRLVLHIYAYYISHTCV

SEQ ID NO: 45301 - protein, 360 aa, Oryza sativa
MQVGPSIARIHGGTGIGLSISKCLVGLMKGEIGFASKPHVGSTFTFTAVLMRAHCKGNDIKSSEFKGINALVVDHRPVRAKVTKYHLQRLGVKTELTAELNQFISKLNSGSLTAKLVLIDKETWLKESHCTPLLVNKLRNNDKPDSPKLFLLGSSASSPKGGSDTSREHNLNVIMKPLRASMLQVSLRRALGGVDKVHCRNGVVGNSTLGSLLHKKQIIVVDDNIVNLKVAAGALKKYGAEVTCADSGKKAITLLKPPHNFDACFMDIQMPEMDGFEATRRIRVMERDLNERIERGEAPPECASIQRWRTPILAMTADVIQATHEECLKSEMDGYVSKPFEGEQLYSEVARFFQNHDQVE

SEQ ID NO: 45302 - protein, 354 aa, Oryza sativa
MEFEDRCHKVQEPKFDCLLFDLDDTLYPLSSGIASHVKKNIGDYMVEKLGIEESKIENLGNLLYKNYGTTMAGLRAIGYSFDYDEYHSFVHGRLALREHQAGPCPEAHSQEPAHPQTHIHQRRQGPRRESPQEAGAGRLLRGDHLLRDPQPAVPVAAVRRGGQHLRHRRTLLHARRRRRRASQDTRPLQAQRRRHGGGPQDRQREPSQGDFLRRQREEHPGGEEDRAPHGAGGHAAAGEGRGPRAGEHPQHQGGAAGAVGGVREGGGRAHLLRPRRHRDIGDRLGHTYCLSRLRRIAQNEQPSIHPCPSLAGQVIIRWEFQNWPGQQYVPRKKEEGVPWKFRIQNVTAMLERVL

SEQ ID NO: 45303 - protein, 464 aa, Oryza sativa
MSHFKSGSRVKCTMLAVLCGKVGKQRTPPGPVPESQRPRPSFPFLELISSGRLDVHTLINPTVDQFLEAQRALQPRFIYLQGQLLDNEEEIGALVWGDADVSDPQTFSSLICSPFPTIVYLEVPSGEKIAQSLQSKGISYIMYWRYSLSSYAASHFRHSLLSVVRSSCSHAWDAFQLAYASFEQYCVRNNDVQRLMLGPHLLGDAPRIYITPPGNKMAEEEDTSEYFPDIKIYDEDVHLKLLICGAHCTPDSSILNSLEDGLNALLNIEFRWCKLQDRVSAAPPLHVDSALLDGVVTICCDITTSSSSHVSLLLSGSPQTCFDDELLEKHIKKELIESRRLVRVVSVSEDDGPSSAEPLTSMSVASGASTFEVLMTLPKWAAQVLKYLAQETSYKSLVPLGIASVNDTPVSSFDKEDVDRLLFFCTNQDEDEAIGNGLYHHLPRWSASLAKDRVKRNFVSKPAR

SEQ ID NO: 45304 - protein, 535 aa, Oryza sativa
MLASITSVELCKSSSFNQLSGLFSIPSDIGNCSMLRVLKGGRNNFKGPLPDELFNASSLEHLSFPNNDLNGVLDDANIIKLSKLSILDLQQNIFSGNIPKSIGQLKRLKELHLGENYLYGELPSTLGNCTNLKILDLKINYLSGDLGKINFSSLSNLMIIDLLVNNFNGTIPESIYDCTNLIALRLSWNKFHGEFSHRMDRLRSLSCLSVGWNDFTNITKALYILKSFSNLKTLLLGGNFNHETLLADETMDGFENLQYLEISGSSLHGKISLWLSKLTKLKVLQLSNNQLSGSVPAWINSLNFLFYLDISNNNLTGEFPTILTQIPMLKSDKRTNLDVSVPNMRFYGIPFIKNRQYQYIHTTINIAKNGFTGAIPPEISQLKALDMLNLSFNSFSGETPQAICNLTKLVMLDLSNNNLTGTIPLELNKLNFLSAFNVYNNDLEGAIPTGGQFDTFDNSSFTGNPKLCGGMLSHHCNSARALPSPTSSTDQFGDKVIFGITFGLFFAYGVLLDQMVLKRLRSLQGILIFQLYEQS

SEQ ID NO: 45305 - protein, 329 aa, Oryza sativa; identical to SEQ ID NO: 32744

SEQ ID NO: 45306 - protein, 277 aa, Oryza sativa
MNSRRSRSVKLVSTRAKPLEVEIAKEDERMSSSADNTVYCCIAKGRKIIYCYNSKDGDPHMETTAALCLENAPSYHRHYIHTAGSRSYGYLMADGHTFFAIIDPSVGNVGALQFLERVREVFRTVNRSGFHDSLVPAVQRLVASLEKMPHATFDLEESVEKGEPSDSSSCTSSKVPLLGRSGSRKDKKKAKEKAASAAVCEDEQHGTRGVRIDVPPEEVGGMSLERSASQSRLRRQHSSRSLWVRHVKIIIVVDAIICILLFAAWLAVCKGFQCVSS

SEQ ID NO: 45307 - protein, 241 aa, Oryza sativa; identical to SEQ ID NO: 30626

SEQ ID NO: 45308 - protein, 484 aa, Oryza sativa
MDKEPTMEDLPSTLGQPSTSASSVDARYSADRTEDSQLFLSVPALNQAASYLAQTASYLTQCLPVSGYTAISEEGQELATLPPASTVGGSSFQASSEQSADSSPGEIDNTGSSSQEITEQMAPLRVFQNGASLFQGLVERARKTVRGSANDIGWLQQDQSLPPTEDGTARFLEILDAVRKNEHKLPDSMVYLLVPGLFSNHGPLYFVKTKSYFSKMGLACHIAKIHSESSVSKNAREIKEYIEEIYWGSKKRVLLLGHSKGGVDAAAALSLYWPQLKDKVAGLALAQSPYGGSPVASDILREGQLGDYVRLRKLMEILVSKVLKGDLQALEDLTYERRKEFLRQNPLPPEVPIVSFHTEASITPSVLTALSHVAHLELPAAADGNPTRIPVVMPLSAAMAACSQLLVARYGEKSDGLVTRKDAEVPGSVVVRPERKLDHAWMVYSSLNEEPRDQADTSQVCEALLTLLVEVAQKRRHEMAMKDE

SEQ ID NO: 45309 - protein, 369 aa, Oryza sativa
MRDKFFMQNHGLLLQQLISRNTDFAERMIITLQELEIATNNFDKSREVGTGGHGVVYKGIIDLHVVAIKKSKIVVQREIDEFINEVAILSQVNHRNVVKLLGCCLETEVPLLVYEFISNGTLYHHLHVEGSISLPWDDRLRIALEVARALSYLHSSASMPIFYRDIKSSNILLDDNLTAKVSDFRASRYISINETGITTAVQGTIGYLDPMYYYTGRLTSKSDVFSFGVLLMELLTRKKPIGGTFDNGDGLVSHVISLLSKGNLYNIIDSQVKEEEDGEVLEVATLATTCTKFKGEERPTMREVEMALESIVSKKSSFCNKNSQSSSRSDENRILALYMSIEGVTKDKTITITESSTEGEIPLSSRFSR

SEQ ID NO: 45310 - protein, 243 aa, Oryza sativa
MIRMSPSLVSLELSNVEVTNDDFEDWIIQAPNLERLTITSDIDYGWQIQDLPSIQDANINIEDYSIDRDFVKLLTSLAQVGELELFIPSADGNVLEGISCSFQKLRSLTLHTNFYKASSILSTFGLLTRAPNLLHLEIEITDHENQSDEVDIDFLNALWTNSLFANLDFVSIKSATCWSNEMRFIEFVLSKARLLGEFYIYHDDTGSYSKPREEAIIELAKYKRASPKAKVFFRDMEDTWLYS

SEQ ID NO: 45311 - protein, 213 aa, Oryza sativa
MAAASSSAAACFLSPSPPPRPRHHSIKHLACAASRSPSPGPSSSRSLALPSPSASASPWPWPRRLRDLLPDETGRILSSATGSLIVALASAALILGDAGSASAFVVATPRKLQADELATVRLFQENTPSVVYITNLAVRQDAFTLDVLEVPQGSGSGFVWDKSGHIVTNFHVIRGASDLRVTLADQTVYEAQVVGLTRIRMLLFCVLKHQQIN

SEQ ID NO: 45312 - protein, 799 aa, Oryza sativa
MEAFAAAAAAAGVFAGAGAAARPVLLRRRGAPRSGRVRLLRAPPRAGGDRGGDLPPLDEWDRMELEFGRFLGEDPKLTLAKILLKKADPDASSLDVENLIANKKAKLDDILREFMDANRQEQTSESPEETSKPMVDKNSPSMSRPVQTNAKQDEPALTLLRPAGSKLKQDDPPLTLQRPAGSKPKQDGPSLAPLRPVGSKPKENNTSLTLVRPMGSRPIVRGKPVQDSWPSKGSLAARRESSDVGSTSRKNNVDVSLRKPTIHQSDDDELKSKLNLKPNIDLKMRKDMDEDLANISLLQKPELSVDNMNSNQEKSDAGPASVASGEDNGAVDPETNGLDERVVIDSINDRESSVLPDDLSAELQPSEQNFNREGDPSVVDDQSAVSSNFSMQAFLQGKPKMKDLAVETFPSQVDAEKMNASENNMNYVDDGGNVLSSKLEDITESDWTRLENYASTGEKVEVELINCSSKGFVVSLDSLIGFLPYRNLATKWKFLAFETWLRQKGGDPSLFKQSVGIEESFEVNDRNIESVSSSDSELAVQDQGSMPSKEKFEDLLRTYNTEKSKFLSSFIGQRLRVSVVLADRKSKKIFFSMKPKESEELIQKKKSLMAKLNVGDIVECTIKRFVYFGIFVEVEGVPALIQQWEVSWDETLDPSVSYKIGQVVDAKVIQLDYNNNRIFLSLKDVKPNPSVGALEAVIGEELSLGGALEPAEADFEWPEVDALMEEMKNIEEVRDVYKGRFLRSPGLAPTFQVYMAPLVGQKYKLLARYGNNVQEVMVETSLDKEQLKEAVLACTNRVS

SEQ ID NO: 45313 - protein, 1123 aa, Oryza sativa
MTPVVHCSVGNISLFHIGSFRPSHEIQIRRFRSTERYSRVPSRRLLQPQRAFNLISIYKRSSWSSARRPRTLSAATVGTDVTVEDPNPPPSGETSEESSEDTAPDTAEASEQAEASTSSIPKAGRNIRKSEMPPLNDEDLVPGASFTGKVRSIKPFGVFVDIGAFTEGLVHISRVSDGFVKDISSLFTVGQEVSVRLVEANKETGRISLTMRTGGDFVKPKTETPKAASGGRNTTATTSRGSPRQTRERDEAKSMGETNYVQGQFLDGVVKNSTRAGSFVTLPDGSEGFLPREEEAVALFTLIGHSALEVGQQVRVKVLNVVRGQVTLTMKEGEDDEEDLASLNTQLKQGWSRGTNAFELAFRRNKEISAFLDQREKIIVPDVQEAAVASVGTELDAEVGIEQSPGKEPETGNAESVAIDSSITEVKETDSIAAVEKDSEISKTESVETASSVVISEDDSTVDGKLVEPTASVSATETEIKEDSSEGSVTTEPTEAASTEFVTAVVEESAPTASSVETSEDDSTVDDKLVEPTASVSATEAESKEDSSEGSVASTESVTAVVEESAPVSSVAIEVPAPEASEASAQEIIEDSTTVEGAADDQTVESDSPPPEGVELSSNGAPDSSIAEDKPDEPEESLIVEEVPVTASSESEDKEPAAVPEEVAASSEKTADVAVAGAEASTATATISPALVKQLREATGAGMMDCKKALAESGGDIEKAQEFLRKKGLAAADKRAGRATAEGGIGSYIHDSRIGVLIEVNCETDFVSRGDIFKELVDDLAMQVAACPQVQYISLDDVPEEVMKKETELEMQREDLLSKPEQIRSKIVEGRVKKRLGEYALLEQPFIKNDKVTISEWVKQTIATIGENMKVNRFVRYNLGEGLEKRSQDFAAEVAAQTAAKAPPAAPPKDDKPEETAETEEKKPAVAISAALVKQLRDETGAGMMDCKKALAETGGDIQQAQEFLRKKGLSSADKKSSRLTAEGLIGAYIHDNRIGCMIEINSETDFVARNEKFKELVNDLAMQVVACPQVEYVSIEDIPESVVIKEKEIEMQREDLQSKPENIREKIVEGRISKRLGVLALLEQPFIKDDSKTVKDLVEETIATLGENIKVRRFTRYTLGEN

SEQ ID NO: 45314 - protein, 284 aa, Oryza sativa
MAAPPQPVPAPAAASPEVFRLGFIGPGNLAESIARGVAASGVLPATAIRTAPHRRPERAEAFSSIGAHILETNAQVVDDSDVIVISVKPQIVRQVLVELKPLLSEEKLLVSIAAGIKMEDLQGWSGHRRFIRVMPNTPSAVGQAASVMCLGEMATENDENRVRSLFSAIGKVWTAEEKYFDAVTGLSGSGPAYIFLAIEAMADGGVAAGLPRDLALGLASQTVLGAATMVNKTGKHPGQLKDMVTSPAGTTITGIQELEKGAYRGTLINAVVAATKRCRELSQS

SEQ ID NO: 45315 - protein, 295 aa, Oryza sativa
MAAQAADLSLTLAPSGGGGGGGGGGGGGGSSSACIDGKDVRLFPCLFCNKKFLKSQALGGHQNAHKKERSIGWNPYFYMPPTPHPAGNAAAAAAAATPGGMSSVTTPSGSYGVVGGAAVGATAGVGGGGGVGGGLLPAHAYAGHGYAAVPTSFPIASHSSSVVGSGGLQYYAGTDCGAAAAGAAKTTTTAAAAATAVAGSESGVQVPRFATHQHHLLAVVSSGRAMLAAPDQPGAGRDDMIDMLNWRRGSHGPTASAAATTPSPASTTTTLTTFASADGSNNGEENEELDLNLSL

SEQ ID NO: 45316 - protein, 176 aa, Oryza sativa
MAREAASLHHPPLSPLQSPPPPSYHHPSARAHGRAACGRHAARTRVPRATAASPQPRRPSLCRHTPPLPIAASTSARPKDPRGRCRRTQPHRPREQLPRTPPSPPIRGATATSAAIVTLIWVTAAPSGVPPAASAAPRAAKSSRTPPPLRVAASPCRDERRHQVADHGHGLLLPSP

SEQ ID NO: 45317 - protein, 604 aa, Oryza sativa
MINFGGVLCAVTLVVLLPFLEAADGKSTDPSEVSALMAIKGSLVDPMNNLKNWNRGDPCTKNWTGVSCHDLGDTYLHVTELQLFRRNLSGNLVPEVSLLSQLKILDFMWNNLTGNIPKEIGNITTLKLILLNGNQLSGLLPDEIGNLQSLTRLQVDQNHLSGAIPKSFANLRSVKHLHMNNNSLSGQIPSELSRLNTLLHLLVDNNNLSGPLPPELAAAKSLKILQADNNNFSGSSIPTLYYNMSGLFKLSLRNCSLQGAIPDLSAIPQLDYLDLSWNQLTGSIPTNKLASNITTIDLSHNMLNGTIPSNFSGLPYLQLLSLKNNLLDGSVPSEIWAGVNPNRNGSLVLDFQNNSLNMLPAEISPPPPNVTVVLYGNPICENSSETLIINLCRLQSINLEKSKQETSTAMVCGACPTEKNYEYNPSFSDQCFCAVPLGVGLRLKSPGVTDFHPYENAFKIDLTSLLQLFPYQLYIENYIWEVGPRLNMHLKLFPSNTSLFNMSEVVRLRHVLAGWEITLLDVFGPYELLNFTLGSYEDEYPNLASSGLSKAALGGILASTIASAIALSAVVTALIMRRNSRTNRISRRSLSRFSVKIDGVRCFT

SEQ ID NO: 45318 - protein, 388 aa, Oryza sativa; identical to SEQ ID NO: 35272

SEQ ID NO: 45319 - protein, 96 aa, Oryza sativa
MVGGEVMCEAAAPRYRGVRKRPWGRFAAEIRDPAKRGRVVAQHLRLHRGRGSGLRTSPRGTSAARSPEPTSRSSPPSRSRRPTTTSPGRRRRRRRR

SEQ ID NO: 45320 - protein, 188 aa, Oryza sativa
MATRFLPLVRRGLAGVLNQSPAPASTRGFLFPAPVTAGIRSLQTIMEASNNASDDRNQDIEDSKTDTVPATVPSSDSGFKVRDTSNLKISPRHDLAMIFTCKVCETRSMKMASKESYEKGVVVARCGGCNNFHLIADRLGWFGEPGSIEDFLAEQGEEVKKGSTDTLNFTLEDLVGSQANDKGPSDKK

SEQ ID NO: 45321 - protein, 600 aa, Oryza sativa
MDEFKGPGEKEKEEEAGDKAAAEEAGDGFQVVRGKKKKRPNGGSASGAGSGTMMAKDKAAAAAAAEPWTKAKVSFHDPNIPRPQDVYAIRVNNYNVPFDHVWLERTEDGSRPIHPLEKLPMEQFIDRNVPESEPVKPADLEDTPFTLVEDKNGLADLAKKLKSVNEFAVDLEHNQYRSFQGLTCLMQISTRTEDFVVDTLKLRIYIGLYLKEHFKDPTKRKVMHGADRDIMWLQRDFHIYVCNLFDTGQASRVLQMERNSLEHLLRHFCGVTANKEYQNADWRSRPLSDEMIKYAREDTHYLLYMYDLMRLRLQKESTSDNDLLLEVQKRSNEICLQLYEKELLTDTSYLHIYGLQEHDLDAKQLAVVYALHQWRDYIAREVDESTGYVLPNKALIEIAKKMPTDTAELKRMVKSKYPFVDENLDQVVGIIWNATESSYAFESRAEQLKKERLEQLTDRVQTISSPEMKTSMNLSGQIRSMDKEILSDNIHQQVAQATFQELKRPMALGAVGNSTSGGQRDFFGGFSNKSEKMEKAKSYPAFYYPQLPQYSPEVGYGFQSINRTMAGTAQSPTGNKERDLQNPRRRQSFPPSGNISDTHQ

SEQ ID NO: 45322 - protein, 348 aa, Oryza sativa; identical to SEQ ID NO: 32886

SEQ ID NO: 45323 - protein, 661 aa, Oryza sativa
MATSASASTSSPFPFPARRPPDDTLFYAVYSLPLPTALPPPDLHAALRSLHLSLSSHLAPFLASHLFHRDAFALTIPPPDHTAATSPCALCASPPVPHLHGALRFGDSLADEWLGVSLLFELTRAFPSLAVRAWDSDGEFLLIEAAFALPRWLDPDTAPNRVFIFRGELHILPPSLFPGTPSLDAALAAVHDDAVDTRAPDAVQAAIQRRIAGLPEKASENLHTVRVIVPVPVAKVLKEEPCLIARAVEGFYDRDIDTMKHAARIEKFLRGPGGEGVEMVRTSVRMTRAMYAQLVQQNFQAPRGYPMPRREEGPEKWMEAELGMKIACGFEMMYQERRREGEEGKGSTWEVYRKSLEATGCFNGLLPGSKEYKRVMEDAMQYYKSSSLFSRTREILSAPVRRIDEILAMPYSAEEFEGSDLPPSDDDSWLYNGEDELAAELCARQQEMEEYETAKQYRKSQRKNVSGSSSSQSNEFNLGEITESMQEFVRKMSSFEGAEVPANRKDMESVDLDVNQFFKAMESVLGRSKDEPGNEAGFDGKSSSSDIDLEDDSDYGSDFSEESGEKGMDNAFMESYSDALNKELSMTTIEKSFARAPHPDTSNEGPSGAADTDGEMTPVDVDLNLVESFLNSYSSQQGLPGPASNLLGLMGVKVPPDGKKP

SEQ ID NO: 45324 - protein, 750 aa, Oryza sativa
MAGVLQITSSTTTTRYNIVGLIFFFSVFCDDLYSPAPVALALTFNHTNFGPDEQTNIRLEGDAAFSADFSFSGDGGGWVDISANRHGSIEDSRGRVSYALPVPLWDAATGEVASFTTGFSFVINPPKQDGGIDNKGAGMAFFLAGFPSRLPGSYPYNLGLTNQTADQVAAGDDRFVAVEFDTFNDTIVHDPDATYDHLGVDVNSVVSKTTLTLPSFTLVGNMTAVVEYDNVSSILAMRLHLGYGLSGPRHRPDYNLSYKVDLKSVLPEQVAVGFSAATSTSVELHQLRSWYFSSSLEPKAAPPPVAPPSPSPPPTSGSGSGGVVAGATVGAALFVVLLLAMVAVVVLVRRRHQRKKMREAEEANDDDDDTEGDPIMEIENGTGPRRFAYHVLVNATKSFAAEEKLGQGGFGAVYRGYLREQGLAVAIKRFIKDSSNQGRREYKSEIKVISRLRHRNLVQLIGWCHGHDELLLVYELVPNRSLDIHLHGNGTFLTWPMRVKIILGLGSALFYLHEEREQCVVHRDIKPSNVMLDESFNAKLGDFGLARFIDHIVGMQTMTAVSGTPGYVDPECVITGRASAESDVYSFGIVLLEVACGRRPMSLLDSQKNGIFRLVEWAWDLYGKGDILMAADERLNGDYDAAEMERVIVIGLWCAHPDPNARPSIRNAMAMLQSGGQLPVLPAKMPVPMYIPPVVSVDELFTSPAGMSSSSATQSSTTTVSGYATHISTSSDTSTSAGSKDSSSLLKHQF

SEQ ID NO: 45325 - protein, 465 aa, Oryza sativa
MLGSLELQGDETWLTAKEHFREAKDASEGKDTYSMLQLGNWNYFAANRPEKKAPKFEATHREKAKELYSNVLKQHHGNMFAANGIGILYAEKAQWDIAKELFTQVHEAASGSIFVQMPDVWINLAHIYFAQGFFQQAVKMYQNCLRKFFYNTDATILLYLARTHYEAEQWQDCRKTLLRAIHLAPSNYLLRFNVGVSMQKFSASTLQKTKRTVDEVRATVYELQNAIRVFSLLSVASTYHSHGFDERKIETHIEYCKHLLDAAKVHRDAAEQAEQQNKQKMEVARQIALADEARRKAEEQRKAQLERRKQEDELKQVMQQEQHFERVKEQWKTSSNTPGKRKDRSKHEDEEGGGEKRRKKGGRRRKDQKTKAHYGEEEEDEYRDEPEAEDDYANTARSNDGGDSEKAPGHLLAAAGLEDSDAEEDDMGHPQSAIERKRRAWSESEDDEPVQRPVQPSAGENDLSD

SEQ ID NO: 45326 - protein, 326 aa, Oryza sativa
MNSRPRSAAPSNTGGYSDRLNMPSFQGMMYPSSAAQVGVPSQSPQLKPSSARATGAPAGVASPGASPSNLIVMKSGLHQQQAKAPMQSLSTSNHQPQSSSKMGPVTNMSTGGGDLSRSSNAPVASGSPSNSVSKSTGGSPPASGSAKGVPPAVQLPSPQQQSAKNPASTSGAKSAPTNHYSSMPMPSILGQQPNVPPGSNSGSKQQSHMMKQQPFPQGSHFFISNAYTPQAPGAAGGVALGLYQKRSADKTQQQQQPHQQSAMSAAASNNMKTHHPPAGSFMHLAAASQSPSGVPHSHMSAAQLTFGAPMSMSVKPSSDQKPAAGK

SEQ ID NO: 45327 - protein, 712 aa, Oryza sativa
MTVGAGVAVQDGGLVALGATVLTEVRDNVLLTPAAGAGMTSGTFVGVRSATAGSRSVFPVGKLRGLRFICTFRFKMWWMTQRMGTSGRDIPFETQFLLVEAADADGSHLAGDGAAAVYTVFLPILEGPFRAVLQGNSDDELEICLESGDPAVESFEGTHLVFVGAGSDPFEVITNSVKAVERHLQTFTHREKKKMPDMLNWFGWCTWDAFYTDVTSEGVMEGLQSLGKGGTGPKFVIIDDGWQSVSMDPAGIASLADNSANFANRLTHIKENHKFQLNGRKGHREENPANGLAHIVNEIKGKHQLKYVYVWHAITGYWGGVRPGADGMEHYESKMQYPVSSPGVQKNEPCDALNSITTNGLGLVNPDRVFSFYNELHAYLASAGIDGVKVDVQNILETLGAGHGGRVLLARKYHQALEASIARNFRDNGIICCMSHNTDNLYSSKRSAVVRASDDFWPRDPASHTIHIASVAYNTVFLGEFMQPDWDMFHSVHPMAEYHAAARAVGGCAIYVSDKPGNHDFNLLKKLVLPDGSILRAKLPGRPTRDCLFSDPARDGKSILKIWNLNEHSGVIGAFNCQGAGWCRVGKKNLVHDEQPATVTGVIRAQDVHHLATVAADGWNGDVIVYSHIGGEVTCLPKNASLPVTLKTREYEVFTVVPLKKLDNGVSFAAVGLIGMFNSGGAVTAVRYVEDAGVEVRVPEQELYSWTISIEY

SEQ ID NO: 45328 - protein, 755 aa, Oryza sativa
MEAALEAARAKDTKQRLAGVERLHEALEAAARRGLTSAEVTSLVDACMDLTKDGNFRVAQGGLQALSAAAVLAGDHFKIHLNALVPAAVERLGDGKQPVRDAARQLLVTLMEVSSPTIIVERAGSYAWTHKSWRVREEFVRTVATAVGLFASTELPLQRVLLSPVLQLLNDLNQSVRDAAISCIEEMYRNMGSQFHEELQRHNLPSYMLKDINSRLDKIEPKARSSDGARMQYKVIERSVSANAKRGSPRKKSSTRESTLFGGDSDITEKPVEPIRVHSEKELLREMEKIASALDPEKDWSIRIAAMQRIEALVYGGAIDYPSFLTLLKQLVPPLSAQLSDRRSSIVKQACHLLNMLSKELLGDFEACAEIFIPVLFKLVVITVLVIAESADNCIKTILRNCKVSRILPLIADTAKNDRSAILRARCSEYAILILEYWADAPEIQRASDIYEDLIKCCVADAMSEVRATARSCYRMFTKTWPERSRRLFMSFDPAVQRIINDEDGGLQKRYPSPSLREKGVQLSHASSHASGTHLAGYSTSAIVAMDKSAAISSESSLSSRSLLSQSKKIGRTAERSIESVLSSSKQKVSAIESLLKGVSGRQNFSAMRSTSLDLGVDPPSSRDPPIPLAATASDHLSLQNSILLDSSLPSINNTRNGGSRLVDTVNPHVANKERSRSPYLSSLSSESISGSSLPYARSSSGRSPYGSTMEECNDTWSTRRMPQMQMDRHYLDMTYRDASHRKAFKKLCRILKRS

SEQ ID NO: 45329 - protein, 496 aa, Oryza sativa
MAVAVAASLSTPAPSPAAGGRGRRRVNVAVASLRRAAAGGGSSWRSERRLMSELERTVTPGAAERVIRSYVASKSERAALAALSRLLMDSDPFAIPFYEVVTQARWFKWSSIHAAAVAALLESNGSAEESRSLISDSISRLHSTSSSSEEVSLFYCDLMAAFSSRGMRDRAMDFYSQLRASPPLSGKKTYTAMIKSLCLMGLAGEAEAALREMASRGHQPEAFQFGLVAKCYGKAGSMAEMERVISSMSDAGIRLGTGAANIVLSCYTSCRDHSRMLAWLRRMRKLRIAPTTKAFNFVLNSCPTVASMAQELGESLPLSTAELVKKLRSASQWPAEAELVQELLTSSSVLDKAMDWSESEVKLNLHGFSTIAAYVLILQWVDAMKARRALPLEVSVVCGIGKHSDVRGEPKVRELAQEVLSRMGSPLRLSMRNKGRLVAKRDRVKQWLATDWSSPVDEESTDQSPNGDNQQPFLLTLMRKLGQVLSPFLQFSKGKA

SEQ ID NO: 45330 - protein, 470 aa, Oryza sativa
MPQRRPRLAPLTRRLSTCRDGDLAALLSVLRSPPASSTSLPRALSSAFPSPSDSFPLGKLPSLLPLLPSPLLSLRFLLWRLPPSSPLPSSYALSSLAASLPDLPSAVPLLLSSSPQPLPLRHYALLLGISAHAGLFPASLALLRHMRSFGLAPDAACFRSALRSAGSPGDVCAVLGIMSACGVSPSVPLVVTSVHKLATAGDFVGARQLIEKMPEFGCVTNVAVYTALLDGMCSFGDVDAALRLVEEMEGWSLGAGCVPNVVSYTCLVKCLCGKKRMGEALSLLDRMTGRGVMPNRVFVRTLVGGFCSEEMVADAYAVVERVVSDGSVSSDQCYNVLLICLWRVGMDGEAEGLVQRMMKKGVRLSPLAASVMVRELCNRNRLLDACYWIGVMEENGVLCDTDVYNGLLLRLCVEGHVGEALALAKKVAERGILIEASCADRLMDLLKQYGDEELAPKISELRRCSEVLSH

SEQ ID NO: 45331 - protein, 1195 aa, Oryza sativa
MTSTSSPASASSSSGSTPSRSPSIGRRWCGAGGVDAGRFGSGCTHVIVCGLVYDDPACVAARAEGKKVVTELWVEASLDRGMLADADRVMYWPVRDLNGIAGSESLRICLTGYQRSDREDIMSMVSLMGAQFSKSLNPDVVTHLICYKFEGEKYEAAKKAKLKFNFNIKLVNHRWLEDCLKCWKILPVDDYSKSSWELEIMEAQAKDSEDEEDVGQRSFRNKIVRSTLNPKGSAGTSANPVVNAPIRSPTISSGNIGMVLEKQPNIPGEIRKAEDAVNRIHDVAVQGTPRTRLAMSANTDFSTPSQIPFIHSDSRGDAAVRDLKNADQIQGNKHKDVGTKTLDVTSGASGTPCSSKMVVSANHNVHSLNKTNFVEDHGDTDASKADLTTPSREILPANVLDSSNVARGRSQEDYGATCTPDAAAGQSTINDNVTNNNIGLKSGNNASLNINNKSSLKPLEKSVLPEQYSANRIGPLQGADGSMMRSDSSISTARKGDKIIADLAGVQVLKGGENIQDENVLDGAYSQKKKCSISPVLFKVQNGDTGKETGALNSPSANRLSDTSEPAIWSSVGTNPSEANNVDLGKQQSGSSKSRSRTALKHGNLVDGIKLPEYSSSETNAQPPPKPKELLATSLSATVHDVKRCPDFSFQNKDGDYAQDSGNALNQDGSPLMRKTENVLAKVRTSDISLHSSRKSKLVPSSGNGDTEMSDALDIEKNKAAVASNCKPEKVVPDENIKADQLKDFPGTSNNVLRQTGYLKKVASRKGMKASTKRPRSASKVVDEPVVDDGKTKTVVSESEPDKMIAHKHIGETAKDGPDSVNAAEHRTNSSDKVLTDGASRISRRLQNVHTMKNDRHAASNLESSKMISEENTGIGITPKKFVSNATTEGHQTNSPKMLPNTSMRNTFAKRSRVSDTKMTGESSADKTETVAGKSLFDDLFPSQNIGHPKKLSSSASADGCGSLSCKNASPARVRNAVAKRKIKALGDKSDSKLGKIGGAIVSAAKAVASRGIEESSCNINKVSSDQNSVKTDGMRDVSGLFSSDTSVIDRSENLNNSKLRCSKRNKSLSLDHEKENMQDNGTLSSKSNGRTAIMNSNLDANSMKHGANMFNEPNRIKGNGPGTLITPEPTCFILSGHRQQRKDYRSILRCLKARVCRDSHHWSYQATHFIAPDPLKRTGKLLCSCSSWQVDTEN

SEQ ID NO: 45332 - protein, 837 aa, Oryza sativa
MDEARQPLSRKVPIPSSQINPYRMVIIIRLVVLGFFFHYRVMHPVPDAFALWLISVICEIWFAMSWILDQFPKWFPIERETYLDRLTLRFDKEGQTSQLAPIDFFVSTVDPLKEPPLVTANTVLSILAVDYPVDKVSCYVSDDGAAMLTFEALSETSEFAKKWVPFCKKYSIEPRAPEWYFQQKIDYLKDKVAPYFVRERRAMKREYEEFKVRINALVAKAQKVPEEGWTMQDGTPWPGNNVRDHPGMIQVFLGQSGGHDIEGNELPRLVYVSREKRPGYNHHKKAGAMNALVRVSAVLTNAPYMLNLDCDHYINNSKAIKEAMCFMMDPLVGKKVCYVQFPQRFDGIDRHDRYANRNVVFFDINMKGLDGIQGPIYVGTGCVFRRQALYGYDAPKTKKPPSRTCNCWPKWCICCCCFGDRKSKKKTTKPKTEKKKRSFFKRAENQSPAYALGEIEEGAPGAENEKAGIVNQQKLEKKFGQSSVFVASTLLENGGTLKSASPASLLKEAIHVISCGYEDKTDWGKEIGWIYGSVTEDILTGFKMHCHGWRSIYCIPKLPAFKGSAPLNLSDRLHQVLRWALGSVEIFFSNHCPLWYGYGGGLKCLERFSYINSIVYPFTSIPLLAYCTLPAICLLTGKFITPELTNVASLWFMSLFICIFATGILEMRWSGVGIDDWWRNEQFWVIGGVSSHLFALFQGLLKVIAGIDTSFTVTSKGGDDEEFSELYTFKWTTLLIPPTTLLLLNFIGVVAGVSNAINNGYESWGPLFGKLFFAFWVIVHLYPFLKGLVGRQNRTPTIVIVWSILLASIFSLLWVRIDPFLAKNDGPLLEECGLDCN

SEQ ID NO: 45333 - protein, 96 aa, Oryza sativa
MAVAAVARCGPPTRAADGAKTANGESPSRLSLSLASASPSSSPPLPSHLSSLGGVVAWCGDCRCRRGQLGVADHGARECPTRNPSHLLPPCLLLLC

SEQ ID NO: 45334 - protein, 477 aa, Oryza sativa
MDDAEANILASLGRVRLCDLAAADGLPSDGYKMCVSALMQSLAQYSAAVVELPPADGALLRSGLDSARLFFHQRGYGSGEAGGGGGGGGSGDAREWCKTSGYYADPQMWLEMYDFRPGITPVEPNGVAELPPSGLPDMFSVLGKVSREVLDAISFSLNLRSSTFTELLDNIPLRSQEVSSSVLSACCHSRPSMEGAQQHSVASQDDEQLLMFSDQENQIDKTLLTLVKSDRSGLYIKDLQGRWILVDGDLGPLDIVVYPGLALYRETAGYVNPAVHKTEVGNLQECMFGRCSLVFKLMPRSVARLSGEEMRAAGHGVDAQFQVPILVNDFMQTEHSANQLFPKNNEPSPHVEQEASYNFVMKRKKEGRKTKALPPSKRLRLEAQRVLKERVQDIADKKGIKLRFCSLRDCESHIKSLDRPCENIRTEIGWPPGVPFVHPHDLPNKAKLMFLEAYEPGWTASQQDLGWISSLMISPTC

SEQ ID NO: 45335 - protein, 645 aa, Oryza sativa
MAPKAGKAKPHKAKGDKKKKEEKVLPTVLDVTVETPDYTQLTLKGISTDKILDVRKLLAVHVDTCHLTNYSLSHEVRGAQLKDTVEVASLKPCHVSIVEEGYTEELAVAHVRRLLDIVACTAAFGPRKSAPEQKPASPSSPDAPPPPPPPASPDAAKTPGSPAGGGGGVGAGGGGGEEPMYPPPKLGQFYEFFSFSHLSPPLHYIRRSTRPFVDDKTEDDFFQIDVRVCSGKPVTIVASKAGFYPAGKRALISHSLVGLLQQTSRAFDGAYKALMKAFVEHNKFGNLPYGFRSNTWVVPPAVADLPSVFPPLPTEDETWGSNGGGQGRDGKHDHRPWAKEFAILAAMPCKTAEERQIRDRKAFLLHSLFVDVAVLKAVAAIQQMVPDKSSLETPNDTTNPDLHTQQIGDMKITVTKDKADASSKLDVKLDGSQAPGMLSDELAKRNLLKGITADESATVHDTATLGVVVVKHCGYTAVVQVPADAQLTTVSLAQHDIDIEDQPEGGSNALNVNSLRMLLHKPCIQPSGGVQRLQSSPHGLPSPSDSIVESPATASPQVSEISQTSPEGNDTTSGVDTENGSEKQDTDGKNHVESKDGEGEPEQTEASKGDGDGAITPEDGSAVTENPKSWADYSDGEAEAVEVAS

SEQ ID NO: 45336 - protein, 348 aa, Oryza sativa
MGAVGRSSSLMQGGEAVSSMGIGGGWQLAWKWTEREGADGEKEGGFQRIYLHEEGVTGDRRGSILSLPGGDVPPGGEFVQAAALVSQPALYSKELMEQRLAGPAMVHPSQAVAKGPKWADLFEPGVKHALFVGIGIQILQQFAGINGVLYYTPQILEQAGVGVLLANIGLSSSSASILISGLTTLLMLPSIGIAMRLMDMSGRRFLLLATIPILIVALAILILVNILDVGTMVHASLSTVSVILYFCFFVMGFGPIPNILCAEIFPTTVRGICIAICALTFWIGDIIVTYTLPVMLNAIGLAGVFGIYAVVCILAFLFVFMKVPETKGMPLEVITEFFSVGAKQAKED

SEQ ID NO: 45337 - protein, 414 aa, Oryza sativa
MARKPESTNVKPLQAPQTMNVNRDCDNGGCSRSSSSSTTLSSGAILAGTIIIIGGAAACGISVISWRRRQKQKVGGGGTVESLEGRASSSNASSSLINVEYSSGWDTSSEGSQQGLRLSPEWSPSVRYNMEEVECATQYFAGANLLGRSGFAATYRGAMRDGAAVAVKSIGKSSCKAEEADFLRGLRAITSLRHDNLVALRGFCRSRARGECFLVYEFMANGSLSRYLDVKDGDVVLDWATRVSIIKGIAKGIEYLHSSKANKAALVHQNICADKILMDHLFVPHLSGAGEHKLLADDVVFSTLKDSAAMGYLAPEYTTTGRFTDRSDVYAFGVVVFQVLTGRKAVSSELRLLGGGGGAEYSGKLDDLVDPRLGGRFSRPEAAKLAGIALLCTSESPAQRPAMAAVLQQLGATQ

SEQ ID NO: 45338 - protein, 617 aa, Oryza sativa
MPLFKRKPFSLLEPPKDLDSKEKVFQIRFTREIFRDYQDYINRLNLYRQRVWSCKISGKSNLTFEEALVSEHHAVSKAQKLPTELMAPVLRMIQYSTLGLYELVEKIYASLQEAVFEGLELYAKQDGLEAACRILKILGSDGTKMYEVGWLLRDKTIISTSVIKGEDLIHRRPPVSRNTLKIFIRDATSQNAPWVIHENLAKRYGIPIEPPNDMMFGEGLQKKGRKRREDGPMGDPKKKMKNDEEHINVPIKYPIDDLLVQPSADDHALLKRPPLATDFRVPKYSVGDLLMVWDFCLSFGRVLNLSPFSLVDLENAICHKESNALLVEIHTAIFHLLIKDEGDYFTILRTKKRKLKVTLVTWAEYLCDFLEMTKTEELTRNIATVRKGYYSLIDTDIKLKILRELVEEAITTSPVREKLSERVDQRQALAATKRESTRKAKDEQNSSIDGLQDDNESVDEQGKGKEEKDKNNISRSKTEGKRHGVQHLETEIEKLSIRSSPLGKDRHYNRYWFFRREGRLFVESADSKEWGYYSTKEELDVLMSSLNVKGLRERALKRQLDKLYSKISNALEKRSKEITHKLLLEEAVLRRSTRVRAQPRDNPSMSFLKYVNKWKDN

SEQ ID NO: 45339 - protein, 822 aa, Oryza sativa
MAAAVAALPGKLPRQPPPPPPPPSPPNSTFPRYPKSLAAHPALSSSHPSDVSALLAAAARAGDLRLGRALHRRLLRGDLLDRDAVVANSLLTLYSRCGAVASARNVFDGMRGLRDIVSWTAMASCLARNGAERESLLLIGEMLESGLLPNAYTLCAVAHACFPHELYCLVGGVVLGLVHKMGLWGTDIAVGSALIDMLARNGDLASARKVFDGLIEKTVVVWTLLISRYVQGECAEEAVEIFLDFLEDGFEPDRYTMSSMISACTELGSVRLGLQLHSLALRMGFASDACVSCGLVDMYAKSNIEQAMDYANKVFERMRKNDVISWTALISGYVQSGVQENKVMVLFGEMLNESIKPNHITYSSILKACANISDHDSGRQVHAHVIKSNQAAAHTVGNALVSMYAESGCMEEARRVFNQLYERSMISCITEGRDAPLDHRIGRMDMGISSSTFASLISAAASVGMLTKGQQLHAMTLKAGFGSDRFVSNSLVSMYSRCGYLEDACRSFNELKDRNVISWTSMISGLAKHGYAERALSLFHDMILTGVKPNDVTYIAVLSACSHVGLVREGKEYFRSMQRDHGLIPRMEHYACMVDLLARSGLVKEALEFINEMPLKADALVWKTLLGACRSHDNIEVGEIAAKNVIELEPRDPAPYVLLSNLYADAGLWDEVARIRSAMRDNNLNKETGLSWMEVENTTHEFRAGDTSHPRAQDIYGKLDTLVGEIKGMGYVPDTSIVLHDMSDELKEQYLLQHSEKIAVAFGLITTSAPKPIRIFKNLRVCADCHSAIKYMSKATRREIILRDSNRFHRMKDGECSCGEYW

SEQ ID NO: 45340 - protein, 365 aa, Oryza sativa
MEKYELLKDIGSGNFGVARLMRNRETKELVAMKYIPRGLKIDENVAREIINHRSLRHPNIIRFKEVVLTPTHLAIVMEYAAGGELFDRICSAGRFSEDESRYFFQQLICGVSYCHFMQICHRDLKLENTLLDGSPAPRLKICDFGYSKSSLLHSKPKSTVGTPAYIAPEVLSRREYDGKMADVWSCGVTLYVMLVGAYPFEDPDDPKNFRKTIGRIVSIQYKIPEYVHISQDCRQLLSRIFVANPAKRITIREIRNHPWFMKNLPRELTEAAQAKYYKKDNSARTFSDQTVDEIMKIVQEAKTPPPSSTPVAGFGWTEEEEQEDGKNPDDDEGDRDEEEGEEGDSEDEYTKQVKQAHASCDLQKS

SEQ ID NO: 45341 - protein, 215 aa, Oryza sativa
MIGGAARPPTPPAVVDKTMCAACDILKLLPTGTVLAFHELAPSFTNHGGACGAASRYTTAALIAACTASCVLLSFTDSLVSHVDGRRLYYGVATLRGFRPFNFEGTREEMEERFGDLPGMKVRALDFVHAHVSAVVFVVVALGNADVQGCLFPDAGTGFTEMFRNLPMGLGLLASMVFMIFPTTRKSIGYTDMMPHKEDYGKGGNNIPGQTTPSV

SEQ ID NO: 45342 - protein, 536 aa, Oryza sativa
MAAAAEVDAEARSILERAAASSFPPLHAIHHLLSVGVCVRCIFRFFGAFSYAAPCLSLTASVLHSFLEEHDDSAKSGSCSCLSKDEAYCSICFGVLLPTCYQDDGVEPLRSVSPIDNVTSIISEAVQREGHQVDEFSLEISLRAVIAANDRAIRLYMKEKYGSANWFDEKIFSQQTMSVKEALRILLVPSVEKQMNVKHGNNSFRIRLTYTHDEGSQKLLRLLPNDRGRKRKTESRDGSSKRGSTDDDKQILSESDAFINKNLEGIQDQDFRSLFQLPPEKVLEPCHLVISCQRSPIYIGGRYLKLSRNVSQSCWIIDDERMGEASVEEIIGENVRAICKGDGYKFHAAGREDIDVRMLGSGRPFLVEVLNVRSIPSATEVQQIADKINDSEKKHVRVRNLKLVGSEIWTMMREGEAEKQKQYAALIWTSRPLTDDDLHNISLIKDMEIVQKTPIRVLHRRSPLERKRIIHWMEIEKISGGSNYYLLHLCTQAGTYIKEFVHGGLGRTHPSVGVMLSCRAEILQLDVTDVKMDFLQ

SEQ ID NO: 45343 - protein, 980 aa, Oryza sativa
MDDLEQAILLASDSPAAAAASPAVRAEALAYCARARDETPPSSLLHLCLYGLASSPHAHVHFWCLQTIHDALLLRRRLALPDDLALLRSSLLSLAVSSNAASPPFLRNKLAQLLALLVRFEYPHVYPSYFLDLIPPSPPLPGPTDMFARVLVSLDDDLLSQDYPRNAEEASDAGRVKDAMRAQCVPQIARHWHEAAVSLRAADPAVAAVALDAARRCISWIDVSLVANDVFVPLLFDIALSPGSVAPLAAAAVGCLSAVAAKRMDARAKVALLRSLMSAQKGFGSPDSGLKMAHLVTAYAVEALECYRKLGSSDADGAAALEMLEEVLPAVFAAAESGDDDEVDSGSVLEFLSGYVSTMKAPTEKQLGHLGQILEVVRMQMSYDPVYRGHLDVLDKIGKEEEDLMAEQRKDLIALFRSICRVAPGATQLFIRGLLVTALSSAEVSVEDVEVALTLFYRLGEIVGEEEIRTGAGLIRELVPMLLSARFSCHTHRLVALVYLDTISRYIKFMQENDQYVPHLLTVFLDERGIHHQNAHVSCHAGYLLMRAIRLLKAKLVPYLDTILQSLQDALVQFTATDWANKDIKFSSSEDGSQIFEAVGLLIGIEEVSPDKQVQCLTALLNPLCQQIESLVMDAKAQGLEESSPRAIGLQQIIVALTMISKGFNERLVMGSRPTLGVMFKKTLDVVLQVLISFPNVKPLRSKIISFLHRMVEILGISVLPCIPIALRQLLVDNEAKDMSEFLYLINQIICKFKSSANALLEDVFPAIASHLSVILSHDAFSNGFASNTEEMRELQELEKRFYAFLLHIATHDLSTVLLTPSCRHYLENIMQLLLITSCSHKEISHRKTCVQTFVNLIKDWCSSSEIEDKLPGFRVFMIEKFATGCCLQSVLDKSFNFRDGISIALFGEIMMAQKVMYERFGENFVVNFVTKLREAHCPPDLAEQYYQKLQGNDIKAFKSFYESLVMKIRQQQNGSLVFR

SEQ ID NO: 45344 - protein, 441 aa, Oryza sativa
MATATATSLASSAAHRRLPPSRSAASSILRAPNRGRLCPGSPSVLRASSSSPSSPQPTAGGDEGEEEEEGRRLSKQSSWEAKDSEGDDYLYRLGKEADNMNIAVGARSGIVDDLFVGNFLGKDSDIVFDYRQKATRTFEYLQGDHYIAPLFLDKVACHIVKNYLAHILTIKIPLILGIWGGKGQGKTFQTELIFRAMGVEPVIMSAGELESEKAGEPGRLIRDRYRTASQVIQNQGKMSVLMINDLDAGVGRFGNTQMTVNNQIVIGTLMNLADNPTRVSIGQKWRESDVTHRVPIIVTGNDFSTLYAPLIRDGRMEKFYWQPGREDIINIVHRMYIKDGLSFEDVSKVVDTFPNQALDFYGALRSRTYDRAILQWVEEIGGHEQLNEKLLKRKKGEELPTFIPPKTTVDALIESGDSLVKEQELIMNSKLSKEYMKNLDD

SEQ ID NO: 45345 - protein, 212 aa, Oryza sativa
MGDVSVNRPIKAEPAAGGIAQGNRILDMMSSGWTDERHMHYISSMEASFVEQLYNHEQNDAGNGFKVLRGGVWEKLKFDRTSACSRIGRKYCLPASPWIQHFRPRECSSNARNDAAEALVGDHESGIQTIQGRTPLSHGREWEACKEEKAVGESTEVSDQNFADDEAEVDAESSKACKRRKLRSALTRNYQVVPSDKLFASTKADGRKDAPE

SEQ ID NO: 45346 - protein, 825 aa, Oryza sativa
MFKFLKEVVAGSGSGLKDFPYTIGEPYASAWGSWTHHRGTSKDDGSPVSIFSLSGSNPQDRHLVAGRNGVKRLRTVRHPNILSFLHSTEAEVPDGPAMKHTIYIVTEPVTPLSEKLKELNLGGTQRDEYFAWGLHQISKAVSFLNNDCKLVHGNVCVTSVVVTQTLDWKLHAFDVLSEFDANNEASNSPMLQFEWLVGTQYKPMELTKSDWVSIRKSPPWAIDSWGLGCLIYELFSGAKLTRTEDLRNTASIPKSLLPDYQRLLSSAPSRRMNPSKLIDNSEFFQNKLVETIQFMEVLNLKDSVEKDSFFRKLPNIAEQLPREIVLKKLLPVLASALEFGSAAAPALVVLLKMGSWLPADQFSAKVLPTIVKLFASNDRAIRVSLLQHIDQFGESLTAQTVDEQVFPHVATGFSDTSAFLRELTLKSMLVLAPKLSQRTISGSLLKYLSKLQVDEEPAIRTNTTILLGNIANYMNDGTRKRVLINAFTVRALRDTFPPARAAGIMALSVTSSYYEMTEIATRILPNVVVLTFDPDSDVRTKAFQATDQFLQIAKQHHEKLTMGDNSAAEATGIQLKPGNAGLLGWAMSSLTQKGKGSDHGPVSSANASNSQISATSSVTSDNRSSTVAYAPSTSSSLDQTAPASARSSVDGWGEIENDNTQEENGSDKEGWDDVDPFDEKPPPSLLSNIQAAQKRPVAQPKQPVSNSSRLNQPKVPKPEEDPLWGSIAAPAPKNASKSSDIKPSTSHNDDDDLWGSIAAPPPKSAGKPLKPPAAANSDDLWGAIAAPPPSTKARPLASSGRGRGTKPAQPKLGAQRIGRTSSTGM

SEQ ID NO: 45347 - protein, 610 aa, Oryza sativa
MDVLDAGHRATPEPSSSSSSAAAADMSGASVLPLAGAAYQPYVSELLSFSIERLHKEPELLRVDAERVRRQMQEVAVENYGAFIAASEALSFVRAQLEGFDRHLEALIEEIPNLTSGCTEFVESAQQILEERKLNQTLLANHSTLLDLLEIPQLMDTCIRNGNYDEALDLEAFVSKISKLHPDLPVIQGLAVEVKKTIQSLISQLLQKLRSNIQLPECLRIVAHLRRIGVFSESELRLQFLRCREAWLSGILDDLDQRNVYGYLTGMVGYHRTHLFDVVNQYRAIFNNDKSGSDENYDGGLLFSWAMHQISNHLTTLQVMLPNITEGGSLSNIREQCMYCAMGLGLVGLDFRGLLPPIFEKAVLNLFSKNMGTAVENFQVVLDSHRWVPMPSVGFVANGVVDETSDDVTPPSVLMEHPPLAVFVNGVSAAMNELRPCAPLSLKNVLAEEVVKGLQAVSDSLVRYNAMRMLRGNESSLFLSLCQAFIEVAYPYCSACFGRCYPNGAILITERRSTFDAVSQLLTVPARSNSSGISIERRQSGSIERKQSGAIERKQSEGIERKQSIDESAGTTATDNGTPANGPPPVANDDSGTSSAPAQPDGQTTAAAST

SEQ ID NO: 45348 - protein, 173 aa, Oryza sativa; identical to SEQ ID NO: 33094

SEQ ID NO: 45349 - protein, 95 aa, Oryza sativa
MQKKKKKIQIGGEPAMSRGGGGGGVEGAGAGEAAMAPNSKAQRLVRAVRRSPPLAFALSPIPAIFSGVVTSLDSRRIRPSSKRTVRLWVSLWLLV

SEQ ID NO: 45350 - protein, 637 aa, Oryza sativa
MEEMGSAQLSALAVCVCIFGCLAMADGQNVTGGDGSRPAELRIGALFTFDSVIGRAVMPAIELAVADVNADPGVLPGTKLSVITQDTNCSGFLGTMEALELLAKDVVAVLGPQSSSIAHVISHAVNEFHVPLVSFAASDPTLSSLEYPYFVRATTSDYFQMSAIASIINQYRWREVIAIYVDDDYGRGGITALGDALAKKKSKIAYKAKLPPGASRTTIEDMLMHVNEMQSRVYVVHVNPDSGLAVFAAAKSLGMMSTGYAWIATDWLSAVLDSSDHISTDRMELTQGVIMLRQHVSDSGIKHSLVSRWNNLTRNGGHSSFSSYSMRTYDSVWLVARAVEDFLSEGNAVSFSADPNLQDIKGSNLQLDSLRSLNNGERLLEKVWHTNFTGVSGLVQFTAERDLIHPAFDILNIGGTGFRTVGYWSNISDLSVVAPEKLHSEPLDSSTNNIELHGVIWPGQTSEKPRGWVFPYHGKPLRIGVPLRTSYKEFVMPDKGPDGVKGFSVDVFKAAVGLLPYPVSFDFILFGDGLKNPSYNDLIEKVSDNHFDAAIGDIAIVTNRTRLVDFTQPYTESGLIILAPAREIESNAWAFLKPFTFQMWSVLGVLFLFVGAVVWVLEHRTNTEFRGPPRQQIMTVC

SEQ ID NO: 45351 - protein, 163 aa, Oryza sativa
MEVGAKVPKKAGAGGRRGGGGPKKKPVSRSVKAGLQFPVGRIGRYLKQGRYSQRIGTGAPVYLAAVLEYLAAEVLELAGNAARDNKKNRIIPRHVLLAIRNDEELGKLLAGVTIAHGGVLPNINPVLLPKKTGSAAAKEAKEGKTPKSPKKATTKSPKKAAAA

SEQ ID NO: 45352 - protein, 306 aa, Oryza sativa
MARGGGVAVAMAVAVAAVVLLLHPAASAAAAGPKKVATAARKEDIPYIRCQVCERIAREISAQVAKKQQALPAAKKVPEIEIIEIAENVCNLKKQEADWMLKIDIVEKGDKLELVEQDEEGHCNAECKTIERACQEVMGYADSDVAEFVYKKKPSADQLVKFLCKDLSEACVVDPPPVPKDRVPGEPFAAKPSKDAEMDRILKSMEGIPGAPSMKMYSRDDLMKNNFGVDGDDDDDDEDEDDDFPKNLGKVFKDKGSPKKDLKQQVVKQIKDTGKKLKGHVNKVSKVVKKWWQGKKKPSKSSKTEL

SEQ ID NO: 45353 - protein, 357 aa, Oryza sativa
MDIGGSNKHGKGKSKARKGVGGSGVRSKPINWPPAFSEFLLDWYIEKKLELPPKGVIKKMHHTACTSAINAKYGSTYNVDQVQRHYRCHKETWALVARHLNESGGGWDETNKMLSLSQSTLDSLSINDRGILSKPIQFFDKLQELFSGSSADGAFMEDPSSVADFDDEADELDNFNDMSTYAETKYPQGEDSDKLEADSDDCKEVAALNAATAALNAATSQVSSSHTSGLKPNKKSFKKCGKPKTLPQSHNDKGKLKAKSSSGLHDDDDIDVLITSTLVGIKDNLAKPIQTAAPQDPNAPLWDMLKKIALEPEDKMRVGLHLCKPEFQAHRSFLISMGQEYLERWVYKFLSGDDTGL

SEQ ID NO: 45354 - protein, 104 aa, Oryza sativa
MDPASPTTAAASRFKIRPPRPPAPPPRPRPPPPASSRSPPPPASSPPSPQDRRRGRFADRRCHAAASQILKTNVKPAPTGLLSSQVHFLSLVFFMHCGCNGCSV

SEQ ID NO: 45355 - protein, 505 aa, Oryza sativa
MSGGSSPRSRRSSFNSLSRDLELPSEQGCLSVIVLGASGDLAKKKTFPALFHLFAQGFIQSGEVHIFGYARSNLSDDGLRERIRGYLKGASEEHLSDFLQHIKYVSGSYDSGEGFEKLNKEISEYEKSNKSESPRRLFYLALPPSVYPSVCKMIRTYCMNPSGWTRVIVEKPFGKDLDSAEELSAQLGELFDENQLYRIDHYLGKELVQNLLVLRFANRLFLPLWNRDNIDNIQIVFREDFGTDGRGGYFDQYGIIRDIIQNHLLQVFCLVAMEKPVSLKPEHIRDEKVKVLQSVNPIKHDEVVLGQYEGYKDDPTVPDDSNTPTFASVVLRVHNERWEGVPFILKAGKALSSRKAEVRVQFKDVPGDIFKCKRQGRNEFVIRLQPSEAMYMKLTVKKPGLEMATEQSELDLSYGMRYQNVKIPEAYERLILDTIRGDQQHFVRRDELKAAWQIFTPLLHDIDEGKVKSIPYQPGSRGPKEADELSERVGYMQTHGYIWIPPTLA

SEQ ID NO: 45356 - protein, 344 aa, Oryza sativa
MSAVERKTACVTGGNGYIASALIKMLLEKGYAVNTTVRNPDDMAKNSHLKDLQALGPLKVFRADMDEEGSFDDAIAGCDYAFLVAAPMNFNSENPEKDLVEAAVNGTLNAMRSCAKVGTVKRVIITSSDAAISRRPLQGDGYVLDEESWSDVDYLRTEKPPAWAYSVSKVLLEKAACKFAEENNMSLVTVFPVFTLGAAPAPVARTSVPGILSLLSGDETHLEVLKPLQWVTGSVSIVHVDDLCRAEIFLAEKESSSLSSAESSARYICCSFNTTVLALARFMAGRYPQYNVKTDRFDGMPEKPRVCCSSEKLIREGFEFKYTNMGDILDDLVEYGRALGILPH

SEQ ID NO: 45357 - protein, 352 aa, Oryza sativa
MESGSEFYAGEGLQIDSKWLIDPKLLFVGPRIGEGAHAKVYEGKYKNQNVAIKIVHKGDTPEEMVKREGRFLREVTMLSRVQHKNLVKFIGACLEPVMVVVTELLVGGSLRKCLVGLRPRSLEPRVAVGFALDIARAMECLHAHAIIHRDLKPENLLLTADQRTVKLVDLGLAREETLTEMMTAETGTYRWMAPELYSTVTLRHGEKKHYNHKVDVYSFAIVLWELLHNRLPFEGMSNLQAAYAAAFKNIRPSADNLPEELSEILTTCWKEEPNERPNFTQIVQMLLHYLSTLSPPEPLAPPRTFSSENAILPPESPGTSSLMASRGDLGDTPKGKMEDKPRGFFFCFSQCY

SEQ ID NO: 45358 - protein, 404 aa, Oryza sativa
MAMDRHDKEKEMASVLLSSLYGDVISSTQIRLGFVMLLEAVDDLAVDILDAVDVLALFIARAVVDDILPPAFLSREKASLSESSKGMQVVQIAEKSYLSAPHHAELLERRWGGSTRTTVDAVKLRITDLLKEYIKNGDTAEACRCIRELAVPFFHHEVVKRALTLGMESPTAEALIVKLLKEASEELLISSSQMMKGFSRVVDSLDDLSLDIPSAKSQFQTLVSKAVSEGWLDSSFVHVGANGDVQDDEHEKLRRYKKEAVSMIHEYFLSDDVPEIIRSLKELGSPEYNPVFIKKLITIAMDRKNREKEMASILLSSLSMELFSTEDIVKGFIMLLESAEDTALDILDASDELGLFLARAVIDDVLAPLNLDEISGKLPPNCSGAETLNMARSLATAPMQERGF

SEQ ID NO: 45359 - protein, 362 aa, Oryza sativa
MGMDYYKILGVDKAASDDDLKKAYRKLAMKWHPDKNPNNKKEAENKFKQISEAYEVLSDPQKRAVYDQYGEEGLKGQVPPPGAGGAGPGGATFFSTGGDGPNVFRFNPRNAEDIFAEFFGSSSPFGGMGGGMGGGMGGGPGMRTGGTRFSSSIFGDDIFGSAFGGGADGHHGMHGGGAGRALKAPAIERKLPCSLEELYKGTTKKMKISREIADASGKTIPVEEILTIDVKPGWKKGTKITFPEKGNEQPNVIPADLVFIIDEKPHPVFTRDGNDLVVTQKIPLAEALTGHTVHLTTLDGRSLTIPITSVINPGYEEVVRGEGMPIPKDPSKKGNLRVKFDIKFPARLTADQKSGVKRLLGQ

SEQ ID NO: 45360 - protein, 98 aa, Oryza sativa
MLAKVGKQVTRQQAAGEEFLGWLPPPILDMDMAGIYGNWARKEPLHWQHRRQPRVVGINGRDEERGQDHLCVVMSDSFMNTMLFSEGGLLSATVQVFL

SEQ ID NO: 45361 - protein, 359 aa, Oryza sativa
MSSAAMKLAVVAALISAAAVGARACLDVGFYDTTCPTAETLIQQVVAAAFRNDSGVAPAMIRMHFHDCFVRGCDGSVLIDTVPGSTTRAEKDAAPNNPSLRFFDVIDRAKSAVEAACPGVVSCADVVAFMARDGVVLSGGLGYQVPAGRRDGRTSLEDDALNFLPPPTSTAADLVANFTAKNLTAEDMVVLSGAHTIGVSHCDSFTNRIYNFPNTTDGIDPSLSKAYAFLLKGICPPNSNQTFPTTTTFMDILTPTKFDNRYYVGLTNNLGLFQSDAALLTDAALKATVNSFVRSEATFRLKFARAMIKMGQIGVLSGTQGEIRLNCRVVNPVNVTATAADDHHLTSSSSSSSDEVAAS

SEQ ID NO: 45362 - protein, 502 aa, Oryza sativa
MQQVVVGNLCGATLPAAKLVLFTVVCTSTGTCKCIDGFSPTEPSEWELGHFVSGCSRITPSNCQGAVSTDSFVLLDNLQGFPDNPQNVTAATSEECQAACLSECFCAAYSYHSGCKIWHSMLLNLTLADNPPYTEIYMRIGSPNKSRLHILVFILIFGSIAVILVMLMLLLIYKKRSSCVASQAKMEGFLAVYSYAQVKKATRNLSDKLGEGSFGSVFKGTIAGSTIVAVKKLKGLGHTEKQFRTEVQTVGMIQHTNLVRLLGFCTGGTRRLLVYEYMPNGSLDSHLFSETSRVLSWNLRHRIVIGIARGLAYLHEECRDSIIHCDIKPENILLDAELCPKIADFGMAKLLGREFSAVLTSIRGTIGYLAPEWISGQPITYKADVYSFGVLLFEIISGRRSTEKIQHGNHRYFPLYAAAKVNEGDVLCLLDDRLEGNASLKELDVACRVACWCIQDDEIHRPSMRQVIHMLEGIVGVELPPIPASFQNLMDGYDSDLYSVEV

SEQ ID NO: 45363 - protein, 198 aa, Oryza sativa
MPPPSCPTRCISSAQGPAISSRTTTTTPRCRAATTSTVTAISSSASSPASPTLGARRIGVTSLPPLGCLPATIRLYGKGRSGCVERLNGDAETFNNKLNITVEALAKKHSDLKIAIFDIYTPLRNMSESPASQGFLEARKTCCQTGTRKTRVYLCNPATAGLCRNASDFVYFDGVHPSEAANLVIAESTILAGISLVT

SEQ ID NO: 45364 - protein, 320 aa, Oryza sativa
MSVPMAIALTGQVLLGQQVMVKPSEAEKNLVQSNVASGGIASGGARKLYVGNLHSNITEDQLRQVFEPFGQVELVQLPVDPLTGLCKGFGFIQFARLEDAKAAQSLNGQLDIAGRVIKVSAVTEQAGLQVGGATTGDLDDDEGGGLALNASSRAMLMRKLDRSGTATSITGGIGIPGVNTSVELPSASVTGAPLPTTSLIQPTIPAIGTVPGIQIPGTQSADIGSPTEFLLLKNMFDPAVETDPDFDLDIKDDVQDECSKFGAVNHIFVDKNTAGFVYLHFDSVAAATAAQRALHGRWFAGKMITATFMTAQQYKMKFPN

SEQ ID NO: 45365 - protein, 145 aa, Oryza sativa
MVSGQHGRFHRVVVQNILKNLCAYAKPDSDCQYSMQKFSVDNISMALRTMYQTDNLIGEDMEAFLGLVLQFSKLLCETDFIEAVNGNGIGLRNFVQKLKLILKQANSHRTEASVHPGIRRSAIEQVIWMAQLKPEPHCIDHFIDC

SEQ ID NO: 45366 - protein, 184 aa, Oryza sativa
MPPAAIPTPCRSGEVDLGLAEVPTAPRSAGRRRRRGASSLCRCLRRPPPPGLSGSRPPRLAREGRCMRRRAPFFPPQPDKAHRPSNLSAGSLPTRLSVRRALYLSTTPPTYCFLPLLSPGQLIPIPTGWSSTAVGKGRRLHLPRPLERPPKVSSPTCEITRGWLSTEPSTGVRLPQHHSDGVCR

SEQ ID NO: 45367 - protein, 1042 aa, Oryza sativa
MAARAEAAAAAPRPLQAAAIGVCAETGFWDALRRLKLDVLGTDDSPIPITGYYTPRQYEKIASLFRICPESILPPSANSFGDRNNCPVPGTLLNTNNMRGFQNLDRALLLKAEAKKILHDIKSGKVEENPALLLRFLVISFADLKNWKVYYNVAFPSLIFDSKITLLSLKLASQVLKQEEATSLSNAFTEWRKSSETTVVPFFLINISPDSSATIRQLKDWKACQGNGQKLLFGFYDHGNRGFPGWALRNYIAFVSLRWKIEKVHFFCYREKRGRPDIQQSLVGEASFPAPHAGWDEPDYVPEAIGWEGETAGKESKEMKPKEIDLSSINPASQDEEKQLMHLKLMGWRHFPVNLDKLAGVRCLLLGAGTLGCEVARLLMTWGVRKLTVVDDGCVSMSDLVKQSLYTDKDCGVPRVTAIVPHLKERCSAVEVEGIQMGIPKLEYNISASKISSITDDCKRLQTLVDSNDVVFLLNETWEGMWLPTLLCADKNKIAITVLLGYDNYLVMRHGAGPGTKSGGMDEGIAQIENLSTQDALGRQRLGCCFCSDTTSLVNSDHNGALDQQSAVILPGLTSVASGKAVELFARMLHHPDEIHAPGDIAGTDTEHQLGLLPHQMQGSLSKCVLSTVLCNSSSNCIACSNAVLSEYRRRGFDFVTQAITCPTYLKDLTGISDLKKPFASKISASIPVSKTSASIPVNLEKLSSARCLLLGAGTLGCDVARILMDCGVRKLTVVDSGRVVVSNLARQSLYTSDDRDSPKASAILGRLKERCPSVDAKGIKMEIPMPGHPVSPNEAVSVLEDCKRLQELVSSHDAVFLLTDTRESRWLPTLLCANENKIAITAALGYDSYLVMRHGAGPGTNCGSPDVVAAADTLSAEDVLGRQRLGCYFCNDVVAPVDSVSNRTLDQQCTVTRPGLSSITSGCAADLFTRMLHHPDGIHAPGEIAGTSSEGPLGLLPHQIRGSLSQYNLLTLLGYSSSNCTACSNAVLSEYHRRGMDFVMQVINEPTYLEDLTGVTDLMKSAAYSQVEWIDEVDDDDEMDI

SEQ ID NO: 45368 - protein, 152 aa, Oryza sativa
MSIDGSYLLLAETTTGKILRYWIKTPKASTIEEVAQLPGFPDNIKMSPRGGFWVGLHAKRGKIAEWSISYPWLRKLIFKLPAQRIQRITSFLTGFGRQVIALRLSEDGKTIEAMSVHGDVRKLFKSISEVEEKDGNLWIGSVLSPFHGLYRI

SEQ ID NO: 45369 - protein, 886 aa, Oryza sativa
MAANGGGGGAGGCSNGGGGGAVNGAAANGGGGGGGGSKGATTRRAKVSPMDRYWVPTDEKEMAAAVADGGEDGRRPLLFRTFTVRGILLHPYRLLTLVRLVAIVLFFIWRIRHPYADGMFFWWISVIGDFWFGVSWLLNQVAKLKPIRRVPDLNLLQQQFDLPDGNSNLPGLDVFINTVDPINEPMIYTMNAILSILAADYPVDKHACYLSDDGGSIIHYDGLLETAKFAALWVPFCRKHSIEPRAPESYFAVKSRPYAGSAPEDFLSDHRYMRREYDEFKVRLDALFTVIPKRSDAYNQAHAEEGVKATWMADGTEWPGTWIDPSENHKKGNHAGIVQVMLNHPSNQPQLGLPASTDSPVDFSNVDVRLPMLVYIAREKRPGYDHQKKAGAMNVQLRVSALLTNAPFIINFDGDHYVNNSKAFRAGICFMLDRREGDNTAFVQFPQRFDDVDPTDRYCNHNRVFFDATLLGLNGIQGPSYVGTGCMFRRVALYGVDPPRWRPDDGNIVDSSKKFGNLDSFISSIPIAANQERSIISPPALEESILQELSDAMACAYEDGTDWGKDVGWVYNIATEDVVTGFRLHRTGWRSMYCRMEPDAFRGTAPINLTERLYQILRWSGGSLEMFFSHNCPLLAGRRLNFMQRIAYINMTGYPVTSVFLLFYLLFPVIWIFRGIFYIQKPFPTYVLYLVIVIFMSEMIGMVEIKWAGLTLLDWIRNELFYIIGATAVYPLAVLHIVLKCFGLKGVSFKLTAKQVASSTSEKFAELYDVQWAPLLFPTIVVIAVNICAIGAAIGKALFGGWSLMQMGDASLGLVFNVWILLLIYPFALGIMGRWSKRPYILFVLIVISFVIIALADIAIQAMRSGSVRLHFRRSGGANFPTSWGF

SEQ ID NO: 45370 - protein, 151 aa, Oryza sativa
MSVWDSILRGGGGGGGRRFIKRKDSDAGEAGRALEELRGSLYNEFHTSEGAKRQQQRFCGPSVALTFNFFVAVGIIMANKMVMGAVGFNFPVALSLIHYIAAWVLMAVLKAFYLLPIAPPSKSTPFSSLFALGAVMSFSTGLANISLKHNR

SEQ ID NO: 45371 - protein, 596 aa, Oryza sativa
MGCVCSRRFRDDAAPRSVQPLAAAYEARRGRYGPGDFDSGELAIPPPKLLTSHKVPETGTLLGRASIAAVEVLDTLGSSMTNLNHGSGFLSGGTNRGNRVCILAFEVANTIAKASNLWRSCSDTSIKELKEEILRSDGVLILVSSNSSELLYIAYVDKRDELDIFSREVIRFGNLCKDPTWHNLGRYFNKLTTDFAPQDSKEHMETTTQQLINLAQNTSEPYHELHALDRFEQDFQRKFHEEESVPAARRESVMILHSELKRQRKLVKTLKKKSLWSRTLETIVEKLVDIVVFLHKQIRDSFSEAVSVGADLFNSEQAQNKRLGSCGLALHYANIINQIENIVSRPLSLPPSARDNLYHGLPVTVKSALRSRLQSVNAQEERTVAQIKAEMQKTLRWILPIAENTIRAHQGFGWVGEWANLGCEMNKKSGSQLSITRVQTLHYADKAKTEQYMLDLVVLLHHLVVQVKNRGYGSKSSKHDQSRSRKGMDLQPESKLNTSPVNNATYPSPLSESERETLDHLSFKRTGYGRSKSCEPPPNRGKKAHRTWDSCRSHGSSPAREFGRNSASELDKTMDLDVIDGLDRLTSYHPTSPTFC

SEQ ID NO: 45372 - protein, 1315 aa, Oryza sativa
MSVWNYVVTAHKPTSVTHSCVGNFTGPNQLNLIVAKCTRIEIHLLTPQGLQPMIDVPIYGRIATLELFRPHNETQDFLFIATERYKFCVLQWDGEKSELLTRAMGDVSDRIGRPTDNGQIGIIDPDCRLIGLHLYDGLFKVIPFDNKGQLKEAFNIRLEELQVLDIKFLYGCVKPTIVVLYQDNKDARHVKTYEVALKDKDFVEGPWSQNNLDNGAGLLIPVPAPLGGVIIIGEETIVYCNANSTFRAIPIKQSIIRAYGRVDPDGSRYLLGDNAGILHLLVLTHERERVTGLKIEYLGETSIASSISYLDNGVVYVGSRFGDSQLVKLNLQADPNGSYVEVLERYVNLGPIVDFCVVDLDRQGQGQVVTCSGAFKDGSLRVVRNGIGINEQASVELQGIKGLWSLKSSFNDPYDMYLVVSFISETRFLAMNMEDELEETEIEGFDAQTQTLFCQNAINDLLIQVTANSVRLVSCTSRELVDQWNAPEGFSVNVASANASQVLLATGGGHLVYLEIKDSKLVEVKHIQLEHEISCVDLNPIGENPQYSSLAAVGMWTDISVRILSLPDLELIRKENLGGEIVPRSVLLCTLEGVSYLLCALGDGHLFSFLLNASTGELTDRKKVSLGTQPISLRTFSSKGTTHVFASSDRPTVIYSSNKKLLYSNVNLKEVNHMCPFNTAAIPDSLAIAKEGELSIGTIDDIQKLHIRTIPLNEQARRICHQEQSRTLAFCSFKHNQTSIEESETHFVRLLDHQTFEFLSIYQLDQYEHGCSIISCSFSDDNNVYYCVGTAYVLPEENEPSKGRILVFAVEDGRLQLIVEKETKGAVYSLNAFNGKLLAAINQKIQLYKWMLREDGSHELQSECGHHGHILALYTQTRGDFIVVGDLMKSISLLVYKHEESAIEELARDYNANWMSAVEMLDDEIYIGAENNYNIFTVRKNSDAATDEERGRLEVVGEYHLGEFVNRLRHGSLVMRLPDSEMGQIPTVIFGTINGVIGIIASLPHEQYALIHQLQQRVVIFSDAGPDTRWVGDEAGVAGYTCWSPFNKSTVTIGHIIPEYSRCGDPFGQDWVPAECDVSIRPGWFWHASEKPKNATTLLDIYYKSVGRNCLLILNVPPNSSGLISTEDMQVLQEFTEIRQTIFSQNFAANATVTASTVRGGLGNQQFAPSNVLQESIYSYWAPEEGQSSWEMLFDLGQSASFNVIQLQEPIQMGQRVIKFRVEILVDELWQTIVEGTTIGYKRLFQFPVVEGQFLKLSIDGARADPLISFFGVFTDSFSVTYSLENHEKPSVVNSSEVIMLRTDHSFGNKSIATM

SEQ ID NO: 45373 - protein, 287 aa, Oryza sativa
MAQQQQQQGSGSGSASASSSSLGLHLLASPFGDTTYTKVFVGGLAWETTSERIRRFYDRFGEILEAVVITDRHSGRSKGYGFVTFRDPESARKACEDPTPVIDGRRANCNLASLGRAQPAVPLGRPRSAGSYFGVPVPRGVYVGGYGQHRTLPLGYYQGFPVPQYSYTTYGTEYIYPQGTLNPYVGQQYVPIYGVSSAANTASQPFSQFSPSISGGGNGYVAIHGYNVPGNPFVQLTGSNFSSASPTPRPTIQAPFLVAPVPTHPHLVLPAHSPQFTQASGSDQRAS

SEQ ID NO: 45374 - protein, 260 aa, Oryza sativa; identical to SEQ ID NO: 33227

SEQ ID NO: 45375 - protein, 585 aa, Oryza sativa
MSEQPLPQPRSSMREALEKEDKEKAAAAKEKAAVPKNGGNGGGGKNGGGNGGGNGGAGAQPGEETTREIQVVREAYRREPAAPAYVMPEEPPAMVELVGWYLYGFCSYFITHLLLPVLFPAIITQVAFPASDFTPDTKYIVKGATCSIHEMSMYQRLTKHSIAIDGSRLSPLGWSGLSWAIGILIAAPILTQAAHHLDRGQYQSLILIAATSFGSFFCLLTGFFKTVWVFLFYILFIGASIIVAEAVHTRNLGLMIRGLAAHDSGKHLVLRRRAAASQLTLYCTAIGGIGAALMAAFMYHMLRRTDQLTGLWVVSIFSGLIWFIGICHGLFTNRPSSSSPTTAFEPNFFTKLSYSMTLVRYPQAIGSLVAVFLSSFATMCIFTSGTLYAIGGVCIKPVLVLVLWILYFLFPLISLPLLHPIQIIIRADAVRMQLLGFIICLFVSGAGFYFKSHRWRAAHIIVIALVQSTANGVLYSFGRILLLDASPPGKEGAFAVWYAFVRCIGAMIGFAAASAGPGRAGGSFAAAFLGSFLGIIVLIFGNVSNIGALKAAGHLKGMEDEKRLGMEKGEGMSAVADSGEGRGRV

SEQ ID NO: 45376 - protein, 432 aa, Oryza sativa
MAEAEVKDNEVYEEDLVDYEEEVENGTDGGANAANASADVVKKGYVGIHSSGFRDFLLKPELLRAIQDCGFEHPSEVQHECIPQAILGMDVICQAKSGMGKTAVFVLSSLQQIDPVAGQVGALVLCHTRELAYQICHEFERFSKYLPEVKVAVFYGGVHIKKHKDLLKNDCPHIVVGTPGRILALAREKDLSLKNVRHFILDECDKMLDSLDMRRDVQEIFKMTPHDKQVMMFSATLSKEIRPVCKKFMQDPMEIYVDDEAKLTLHGLVQHYIKLSEAEKNRKLNDLLDALDFNQVVIFVKSVSRAAELNKLLCECNFPAISIHSGMTQEERLTRYKNFKEGHKRILVATDLVGRGIDIERVNIVINYDMPDSADSYLHRVGRAGRFGTKGLAITFVSSASDSDVLNQVQERFEVDIKELPEQIDTSTYMPS

SEQ ID NO: 45377 - protein, 1081 aa, Oryza sativa
MVDTRRSAAAKRRASSEEAASPATDGAAAGAGAAGSSTPRRRSGKRAKAEATVGTPAAKAGGADATAAAAIDVIDSSVENLHGVARPTGAVPASSTVSNSGVKKKRTKYINVPSAEELSLWKARQAVANGRAEAWGRLISQSSESHSVPIYTTHFTVGHGGNYDLRLTESFPGSLICKLKHVKRGAALEIYVSKAVHVNGKVLDKTAKVTLVGGDEVIFSSLGRHAYIFQQLPEERSSTSTFSATCAFQQGQYPVTKGTLDVSSKGAKLSVMPFNFGNGRPPLVPHDTEIVSSLCKTMEEQSQLASEENLQVAQHQLLKEDLKKVVVNASDISDSFDSFPYYLSENTKNALLSSAYVNLCCKESIKWTKHISSLCQRVLLSGPAGSEIYQESLVKALTKHFGAKLLIIDPSLLASGQSSKSKESESYKKGDRVRYIGSVQSTGIILEGQRAPDYGSQGEVRLPFEENESSKVGVRFDKKIPGGIDLGGNCEVDRGFFCPVDSLCLDGPGWEDRAKHPFDVIYEFASEESQHGPMILFLKDVEKMCGNSYSYHGLKNKIESFPAGVFIVGSQIHTDSRKDKSNSGSPFLSKFPYSQAILDLTFQDSFGRVNDKNKEALKIAKHLTKLFPNKVTIQTPQDELELSQWKQLLDRDVEILKAKANTSKIQSFLTRNGLECADIETSACVKDRILTNECVDKVVGYALSHQFKHSTIPTRENDGLLALSGESLKHGVELLDSMQSDPKKKSTKKSLKDVTTENEFEKRLLGDVIPPDEIGVTFEDIGALENVKETLKELVMLPLQRPELFSKGQLMKPCKGILLFGPPGTGKTMLAKAVATEAGANFINISMSSIASKWFGEGEKYVKAVFSLASKIAPSVIFVDEVDGMLGRRENPGEHEAMRKMKNEFMVNWDGLRTKDKERVLVLAATNRPFDLDEAVVRRLPRRLMVNLPDASNRKKILSVILAKEDLADDVDLEALANLTDGYSGSDMKNLCVTAAHCPIREILEREKKERASAEAENKPLPPPRSSSDVRSLRMNDFKHAHEQVCASITSDSRNMTELIQWNDLYGEGGSRKKTSLSYFM

SEQ ID NO: 45378 - protein, 313 aa, Oryza sativa
MAPPLLDLPSHCLLPRLRRPTSGRLLLHLRLKPLSSSSYTTTTTTTTSSSTSSSRAPQVPPSLHGPSLRLGRRLPGETDGLLSFARIFDLAALRVPAAACAPLERRLRGHLLNWPRVRNVVRQPGDDGGLLFPVPHPSLATPSSLPTAVARREKLAREFNARGFVQFPNLAKMSRPPARKRKGKKDEGGGEAAATARDTKDKVYVVEVIGERKEEHGDEWMGLVGEEGFGRITWRGGPTRLLLLDENYANKRVDDLPEAVKVVLDHETNKDGSSSYELVQCQLTLFYNYWPMNEVTLPLQIPDTDQKFSLYRF

SEQ ID NO: 45379 - protein, 1094 aa, Oryza sativa
MAVKGKGKAVASASASGGGVKRRKGPGDAAGPSSSSSAAAEAAKRRRRSGVLQFFDDAAFVGDEEEDEDEEEEEEEEMFASDGDDDGFFTEGKAENVNLKRTERSHPLPFLGIVKEEELSGDELEEFIKDRYSSRVKHTPFDGSTNVQDDEFTEDGLLKEPVIWRIKCMVGRERQIAFCLMQKYVDLQKFGTKVPIISAFALDHVRGFVFVEAEKACDVTEACKGFCSVYISRINSVPVAEVPSLLSSRAKPFAISPGTWVRMKTGIYKGDLAQVVSADEGRKRVMIKLIPRVDLRAISKKIGGAIPLKEAAIPAPRLISSQELEFFGSHIERKHDRQTNDFYEVLDGLMFKDGFLYKRVALSSLIYWGIQPTETELLKFSSTPTITSSTDDLDWVSSMYGPKKRNVPKEPDMEPSSSKASSSKGKYSKASSKASTSTEDYEDKGFNLHDLVLFGRRDFGVVIAFEKDGLRILKGGPEGSAVTVRKQDIKDVCADKMLTAVDHKKKIICINDTVNVLEGPFQGKQGVVKHLYMGILFIHNESESENSGFFCAQCSSCENVKKRKELASFTFGNSDDNPIPMFSYEQNEQRDNERPYRSTREQLFSIGEMLRIRKGPMKGYLCRVVRIFRNDVTVKLDSLLKIVTVQAEFLSVPAKRGDNSSGAPSGPFGSEADKPSWDNGLPSFGSDSWQPFSSAALPVQNADGESEVDPWCKKTSSSANDSDPWGTKTKSASVDVWNNSTTQVENSSDNAWDKQPGGSGPNIGGSSWDRPATDKESEKSDNWGEACKETEKTGSDTDPWGSKVKEIDLKETDSWGKASMQPEKKLEDDSQGWGQPVGKSNQDQEKGADKCGAWDTVIAGSSSSVPGRGDDDSWIKTDTLPVAQDDAWGNSKDCSDGAAGWNETRTSKQSHSTGGWDAAAANLNESSDVDAHKDSWGKAKDTTANAEEKNNESGNWNKAGPLDKVCGSDWGSPKFSSGDGPSSWNKGDKIGGDSQNGSWSRPGGNFEGGRGFGRGRGRGRGRESGDFGGRNDQGSWKNSGTSDSSGRPSWRSGDQVNQENTALSSCLTSSLASSVEGLCGRRSAQHCSARCRVR

SEQ ID NO: 45380 - protein, 74 aa, Oryza sativa
MGWCLDKDYFTSLPQYWRSSRSSLGYTSSAVVDLQVDGEQNLLICTTHTPMTNTWKEVCLLQRGSASATLPWIL

SEQ ID NO: 45381 - protein, 145 aa, Oryza sativa
MESPTSPASRLDFYDFIGRMRRPAAADLFHSIRSFLASLSQGGEPNAEVDGGRVQTFFAEMETAIRDHPLWANATNQEIDNALEGLEKYIMTKLFDRAFASSAEDVKSDMEISEKIGLLQHFVRPHHLDIPKLLHNEAAWLVRQQ

SEQ ID NO: 45382 - protein, 370 aa, Oryza sativa
MERVATLVSCIAAATAMLLAVAAAAAGSGGGGCTRSCGNISVPYPFGVEADCYYPGFNLTCNHSYHPPTLFLVDGAGTSHQVLDISISNSTVRINSSLIAFTKSADKQAVINTTWEVRGPYYLLDDPSNMVVLVGCQARFDVRGGSNNTLISSCTVVCPSPDPSTTYIGAGDGSCSGVGCCQANIVLRYSRYTVQIHDLQEQDAPSSSPTFNDGSAYIVDQPFNYTGLMIFEKNFPQALPAMLDWFIVGDNSTCPMSTNESAPAPASAAECRSVHSFYEGYYGDVSDDVVVGYRCRCSPGYQGNPYVKDGCYGMCLPSLFFFTELPENLRKFFFIPASQFLAVRCYVKICVKPVIYYNYSIVTISYNKMQ

SEQ ID NO: 45383 - protein, 563 aa, Oryza sativa
MAAVAGSASAGANGSAAAHRVGAPTNPMATALLTDQYQFSMAYAYWKAGKHADRAVFDLYFRKNPFGGEFTVFAGLEECIKFIANFKFTEDDILFLQSVMPMCEDAFFDYLRKTDCSDVEVYSIPEGSVVFPKVPLMRVEGPVAVVQLLETPFVNLINYASLVTTNAARHRHVAGKSKVLLEFGLRRAQGPDGAISASKYCFMGGFDATSNVLAGNLFGIPLRGTHSHAYVSSYMSLDEIPDKSLKSKDGSRVCKDFVSLVKEWLQKIQLADSLCGVFGETNQSELAAFASYALAFPTNFLALVDTYDVMRSGIPNFCAVALALHDLGYKASGIRLDSGDLAYLSIEARKVFRTLEKEFNVPAFGKMIITASNDLNEETIDALNKQGHEVDSFGIGTYLVTCYSQAALGCVFKLVEINSRPRIKLSEDVAKVSIPCKKRCFRLYGKEGYPLVDIMMRESEPSPKAGERILCRHPFLESKRAYVVPQHVEELLQCYWPGTSNKPRVELPSLEEIRGRCMQQLEKLRPDHIRRLNPTPYKVSVSAKLYEFIHSLWLNEAPVGELQ

SEQ ID NO: 45384 - protein, 314 aa, Oryza sativa
MYYCLAAPPAAAAPAAPAARRASSFLFVVSVPPPTLWGRVTGGAVSAQRLVRRRCSSAGEPRAAGDGGLSSFCIIEGPETIQDFVQMQSQEIQDNIRSRRNKIFLLMEEVRRLRVQQRIRTSESRGASSEESEMPEIPSSIPFLPNTSPKTMKQLYLTSFSFITGIIFFGGLIAPVLELKLGLGGTSYEDFIRTMHLPLQLSQVDPIVASFSGGAVGVISALMLVEIRNVRQQEKKRCTYCHGTGYLPCARCSASGMLLNSKSFSLSCDNGHNMWSTTERCPNCSGAGKVMCPTCLCTGTAMASEHDPRIDPFD

SEQ ID NO: 45385 - protein, 654 aa, Oryza sativa
MRSVTLGGSIQRVMRRIGGGGGGRRSAGSRGAPQRAECLGAGSGDASASCSGDDSSNGTGKRDGSRRVRMRRYRSELEQEVKKLQRQLEEEIDLQLALTDAITNNATLILEPSAKLPNKAQELIISIASLENTVSKLEKDLNDLCYQLCHLRNNTRLAENNSRYLETLAEENNSRGLLSTSLQYQPPSTCKCTGEEDISTLRDIKLGESESMQENLFPGLEDQQNIQKESEGREIVSQDGLLEEHQDVPSNRLLEKHWNEEMQESYPMENGGREYQIIDALSFDQSHQRKSSINGNVWNGNPNKLSEEMVRCMRDIFLRLSDSSSEISPKGSSVNSISSTERLSGCTLTSVSDSSLMASVMQSPSVDSNHDSIDEVRYFDPYNVNGKEVRRDIGNYCSVAEVSWMYVGKEQLAYASEALKNFRNLVEQLSKVDPTCMTCAERLAFWINLYNTLIMHAYLAYGVPENDIKLFSLMQKACYIVGGQSFSAAEIEFVILKMKTPVHRPQLSLMLALHKFRVTEEHKKYSIDDAEPLVLFGLSCGMFSSPAVRIFSAGNVRQELQESMRDYIRASVGINDSGKLIVPKLLQSYAKGTVEDSLLADWICRHLTPNQVAAVQDTSSSRKQRLLGVRSFSVVPFDSKFRYLFLPDNSSSQH

SEQ ID NO: 45386 - protein, 474 aa, Oryza sativa
MGRGCGRWWWVAVALVVVAAAAAAEGAREEAAVAVAVAPRRHAYAAMMYMGTPRDYEFYVATRVMMRSLGRLGSDADRVVIASLDVPPRWVQALKDDGVKVVSVENLKNPYEKQGNFNMRFKLTLNKLYAWSLVSYDRVVMLDSDNIFLQNTDELFQCGQFCAVFINPCIFHTGLFVLQPSMDVFKNMLHELAVGRDNPDGADQGFLASYFPDLLDRPMFHPPVNGTKLEGTYRLPLGYQMDASYYYLKLRWSIPCGPNSVITFPSAPWFKPWYWWSWPVLPLGLSWHEQRRENLGYSSELPVVLIQALFYIGVIAVTRLARPSLSKMCYNRRMEKSTIVLLTTLRVVAAWSILAAYTIPFFLIPRTVHPLLGWPLYLLGAFSFSSIVINVFLLHPLAVLTTWLGIIGALFVMAFPWYLNGVVRALAVFAYAFCCAPLIWGSLVKTMSSLQILIERDAFRLGEPNQTAEFTKLY

SEQ ID NO: 45387 - protein, 382 aa, Oryza sativa; identical to SEQ ID NO: 32726

SEQ ID NO: 45388 - protein, 83 aa, Oryza sativa
MAPPGSRRWACVRVMTGTILGGALGFYVMHRLETSHKAKMEERLRKYEAHMSMVAKGKEEAQQRLQDEAALQHKDQARLLPDS

SEQ ID NO: 45389 - protein, 590 aa, Oryza sativa
MVMAPIPQPWHQWPFLILFFLVLFSCESNLPCRNGVEATQRVFLYPQSPKVSSIVSKGYRTGYHFQPPKNWINDPNGPMYYNGIYHEFYQYNPNGSVWGNIVWGHSVSTDLINWIRLEPAIEGNTPSDINGCWTGSATILTGDQPVIIYTGADTEKRQVQNIVLPKNRSDPYLREWTKPKNNPLIEPVGPGLNSNQFRDPTTGWIGPDGLWRIAVGAELNGYSAALLYKSKDFMQWTRVDHPLYSSNASNMWECPDFFAVLPGKNNGLDLSAAIPNGAKHVLKMSLDSCDKYMIGVYDLKHDMFVPDTVLDDRRLWLRIDYGNYYASKSFFDSKKGRRIIWGWTNETDSTSDDVAKGWAGIHAIPRTIWLDGDGKRLLQWPIEEVESLRRNEVSHQGLELKKGDLFEIKGTDTLQADVEIDFELTSIDAADPFDPSWLLDTEKHCREADASVHGGLGPFGLVVLASDNMDEHTTVHFRVYKSEQKYMVLLCSDLRRSSLRPGLYTPAYGGFFEYDLEKEKKISLRTLIDRSAVESFGGGGRACIMARVYPAAVVDGATHMYAFNNGSSTVKVSQLKAWSMTRAQVNVRKG

SEQ ID NO: 45390 - protein, 80 aa, Oryza sativa
MKKDDDYGSVTIFHDARSPEHVFQDFCRRCAGIIKALTTGISLFLSPLSINLSMCFCICWCGGSIRRCLVVVQTWESSTS

SEQ ID NO: 45391 - protein, 294 aa, Oryza sativa
MAGQQPQQQGPPEDDFFDQFFSLTSSFPGAAPGGRAAGDQPFSLALSLDAAAAAEASGSGKRLGVGDDAEGGGSKADRETVQLTGLFPPVFGGGGVQPPNLRPTPPTQVFHPQQSKQGGAAVGPQPPAPRPKVRARRGQATDPHSIAERLRRERIAERMRALQELVPNTNKTDRAAMLDEILDYVKFLRLQVKVLSISRLGGAGAVAQLVADIPLSVKGEASDSGGNQQIWEKWSTDGTERQVAKLMEEDIGAAMQFLQSKALCMMPISLAMAIYDTQQTQDGQPVKHEPNTPS

SEQ ID NO: 45392 - protein, 619 aa, Oryza sativa
MSGARRCGDRRSERSSVVGDNRNGYVETDPTGRYGRLSEVLGKGAMKTVYRGFDELRGVEVAWNQATISDVLRTPDALHRMYAEVSLLADLRHDAIIAFHASWVHPSRRTFNFITELFSSGTLRSYRLRYPRVSRRAVAAWARAILRGLAYLHSRGVIHRDLKCDNIFVNGHLGQVKIGDLGLAAVLRGCTSARSVIGTPEFMAPEMYDECYGVGVDVYSFGMCMLEMLTNEYPYSECDNPAQIYKKVTAGKLPDAFYLLTDADARRFIGRCLVDAAHRPSAEELLLDPFLSPPQNHDDHNTIAHATAPPPPLPLACSNSSEEQEEEEAPAAKTTGMAITGKLNKEHDTIFLKVQIGGGGNVRNIYFPFDVANDTAMEVATEMVKELDIADREPTEIAAMIEQEIVRLVPGYKQHEYSYADDDDDDDVNGQPNPFYYLSSSPTSSQGSLCGVGPTSSEGFPGPHGKVDWSRDYCYYPPSSVSVSDDDDSSTSSLSAAVSAISLQQQHCSASSSRLGPASASASEDGGGHAGRPRQREGEEERRRRRMSRNRSMVDMRSQLLHRTLVEELNKRLFFNTVGAVHDIGFRDPTTYGSSSSSSSSQHRRRSSSKVDHKHHYMF

SEQ ID NO: 45393 - protein, 169 aa, Oryza sativa
MRLVYAEAGFQEGGDEDDQGEAGLEEGDEGDVRGDGRRAAGLPPRRRRVHHLGEEAQGVQEERQRPGAQGRGAAGERAHRLVLLLPADRRREDELHVPRRGHLPRVREGGRRRGHARRRRRRRRREGRRRARRPPGEVRRRLPQEPHRRAARRPRQHPQSLSVIELPHA

SEQ ID NO: 45394 - protein, 74 aa, Oryza sativa
MNLKSKRKKLKLQWRAMARSKEEENKTWWPSVGRQGLSSPTHVIKSLNGLRKAVVVVTAWLCPAGDVSREREEE

SEQ ID NO: 45395 - protein, 228 aa, Oryza sativa
MAAEAASGGGGGYRMLPQAGLPIGFRFRPTDEELLLHYLRRKVMSRPLPADVIPVADLARLHPWDLPGEGDGERYFFHLPATSCWRRGGGGSRAGGGGGAWRASGKEKLVVAPRCGKRPVGAKRTLVFFRRGGARTDWAMHEYRLLPADDHPPEANDVWVVCRVFKKTTTLAHRRSPPSIRGAPRRRAAAADDDDMPSSPSSCVTDGGDAGEEGEESSSCSVVASNCP

SEQ ID NO: 45396 - protein, 762 aa, Oryza sativa
MWRLKVAQGGGALLRSTNGFAGRAVWEFDPDHGTPEDRANVERVRRDFTDHRLRRPESADLLMRMQFARENNHQRRGDRIPPAVNKLGEKEQVTEETVMASLRRALDEFSSLQADDGHWPGDLSGAIFIMPVLIFSLYATGSLDTVISSEHRREICRYIYNHQNEDGGWGMLILGSSTMFATCLNYVTLRLIGEEPSNEQLARGHAWIISHGGATLVPQWGKICLSIIGVYEWSGNNPIFPELWLAPQFLPFHPGKFWGPTRVVYVPMAYLYGKKFVGPITPTILALREEIYTDPYHTIDWAQACNACSKEDLVCPRTLLQNVVWTSLYKWVEPVLGSRPMNKLRERALDRLMEHIHYEDENSQYLCLCPVNKALNMVCCWVEDPNSDSFKRHLARIPDFLWLSEDGMKAQIYDGCQSWETAFIIQAFCATDLVNEYGSTVRRAHEFMKNSQIMRNHPGDQSYWHRHRSKGSWTLSSADNGWAVSDTTAEALKAVLLLEKISSNVVGDPIEIERLHDAVDCLLSFVDKDGTLSTYECKRTYTWIEVLSPCESFPNIVVDYPFPECTSSVLQALVLFKQLHPSYRIKEIEKCVRNAAMFIESTQGEDGSWLGTWGVCFTYGAFLSVKGLIAAGRTYENSSSIRKACDFILSKQLDTGGWGESYVSNITKVYVNIKDDQAHAVNTAWAMLALICAGQMERDPAPLHRAAKELINMQLETGEFPQQEHVGAFNACLFFNYPNYRNLFPIWALGEYCRHLHSTRRA

SEQ ID NO: 45397 - protein, 409 aa, Oryza sativa
MGCAPMGHILYDEVMRYNPKNPYWFNHDRFILSAGHGCMLQYALLHLAGYDAVLEEDLKQFRQWGSKTPGHPENFETPGVEVTTGPLGQGIANAVGLALAEKHLAARFNKPDSEIVDHYTYCILGDGCQMEGISNEACSLAGHWGLGKLIAFYDDNHISIDGDTEIAFTEDVSARFEALGWHTIWVKNGNDGYDEIRAAIKEAKAVTDKPTLIKVTTTIGFGSPNKANSYSVHGSALGTKEVEATRENLGWPYEPFFVPEDVKSHWSRHVPQGAAFEADWNAKFAEYEKKYPEDAATLKSIVSGELPAGWADALPKYTPESPADATRNLSQQCLNALAKVVPGLLGGSADLASSNMTLLKMFGDFQKDTPEERNVRFGVREHGMGAICNGIALHSPGLIPYCATFFVFH

SEQ ID NO: 45398 - protein, 357 aa, Oryza sativa
MAIASSSFSLAAILLIIIMYCCPTGLVEAARKGPAAAGGGDDSAMRERYEKWAADHGRTYKDSLEKARRFEVFRTNALFIDSFNAAGGKKSPRLTTNKFADLTNEEFAEYYGRPFSTPVIGGSGFMYGNVRTSDVPANINWRDRGAVTQVKNQKDCASCWAFSAVAAVEGIHQIRSHNLVALSTQQLLDCSTGRNNHGCNRGDMDEAFRYITSNGGIAAESDYPYEDRALGTCRASGKPVAASIRGFQYVPPNNETALLLAVAHQPVSVALDGVGKVSQFFSSGVFGAMQNETCTTDLNHAMTAVGYGTDEHGTKYWLMKNSWGTDWGEGGYMKIARDVASNTGLCGLAMQPSYPVA

SEQ ID NO: 45399 - protein, 344 aa, Oryza sativa
MAAPGEEEQEQGRKGIPSLLSSREENIASNITQLIGWTPLVEMKNIAKNEGVQARLVGKMEAYQPLCSVKDRSALRMIEDAEEKGLITPGVTTLIEPTSGNLGIGLVLVAVQKGYRFIAVMPAKYSLDKQMLLRFLGAELILTDPAIGFNGMMDKVEELMKSIPNSHCLNQVTNPANPEAHFMWTGPEIWKDTAGKVDVFVASVGSGGTLTGVGRYLKMKNPSINIVCVEPSESPVISGGSPGPHKIQGTGAGFIPEILDKSVIDEVVTVNTEESMAMARRLAKEEGLLVGISSGANVAACIKIADREENKGKMIVTMFPSGGERYMNSDLFAPVREECDNMTF

SEQ ID NO: 45400 - protein, 88 aa, Oryza sativa
MQRHHHESLRQRKQTERAKMDAVRSAARVADLLVATVDGGVQELYINEKRIELEARALLATIAWYRKQTDQWLAATNAINCLEGNWRF

SEQ ID NO: 45401 - protein, 437 aa, Oryza sativa
MPSCRARMHAHQHQHALLAALLACALAASSSTAGAQPAGQQGYAYGDVSGQQVHVSTTMIVLLAAVVGVFLFIAISTIYLRHCTGYDPATEGGGVGGSRSMILPANSFVSRRQRRPRGLDSSVVRMFPTMKYAEAKALRVGKVAGAALECAVCLSEFEDDEMLRFLPKCSHAFHPDCIGQWLASHVTCPVCRRNLDPNKDTTEEVIIPAAAAADPNSTSSEIVVIRQEDGAHPAAVVIDVVTEEDDEERRKEELELQAIGTQLRAMRSRSGLRPKTSAAKLPRSHSTGHSLAVRLDGDLERYTLRLPEHVHREMVAAGEQSVRRGRRLGEGVGMGARCSPRFSRSGRWSSFLSNSLSGKLSFLSPSSRRTPDSTQVEVSSSSSSSVTKVKGKRVAAVDVADDGSAHGTAQYPGCTVASSAAAAAVDVEKAATRQVRT

SEQ ID NO: 45402 - protein, 553 aa, Oryza sativa; identical to SEQ ID NO: 31529

SEQ ID NO: 45403 - protein, 530 aa, Oryza sativa
MELTWLLLLATLLLSTTLLVFLFHGGSSATGGEKRRRLPPGPATVPVLGNLLWATNSGMDIMRAVRRLHARHGPMLGLRMGSRLEVIVADRRLAHAALVESGAAMADRPEFASRALLGLDTATISNSSYGPLWRLFRRNFVAEVAHPARLRQFAPARAAVLEELTDKLRRRQEDAGAGTILETFQYAMFFLLVAMCFGELLDERAVRDIAAAQRDLLLHSSKKLRVFAFLPAITTRLFAGRMKAMIAMRQRLKGMFMPLIDARRARKNLVDDHGDATAPPPPAASATTLPHSYVDTLLNLRINDNGGERALTDDEMVALCSEFLNGGTDTTSTALEWIMAELVKNPTIQDKLHGEIKGAITSNSGKVSEEDVQKMPYLKAVVMEGLRRHPPGHFVLPHAPAEDMELGGYTIPKGTLVNFTVADMGMDGAAWDRPREFLPERFMAGGDGEGVDITGTREIRMMPFGAGRRICPGLGVATLHLEYFVANMVAAFEWRAAEGEAVDVDGEKLEFTVVMEKPLRARLLPRAVTV

SEQ ID NO: 45404 - protein, 203 aa, Oryza sativa; identical to SEQ ID NO: 31996

SEQ ID NO: 45405 - protein, 88 aa, Oryza sativa
MLPVSGEAATVGKLQDGASGGEPARPRGRRRASSLRLDLDALADDVHSLVRSNSNLSDRHRHQFGVATTWTVDLLAVIVRTSSYSSIR

SEQ ID NO: 45406 - protein, 862 aa, Oryza sativa
MIVAGPGSGKTSTMVGRVLTLLKEEFPPSNILAMTFTTAAASEMRDRIGTVVGKAVAKEIVISTFHSFCLQLCRTHAEKLGRTSEFIIYGNGQQRRAVIEAERLLESDKNNGLGDANKNCDGDIKNSFKDKAKKWQKFVTQAKASGRTPEEYEKKGDLTGASILRHYNEILRSCNALDYHDFINSSITLLTKFPEVYDECRNTWQAIVVDEFQDTSAMQYYLLKTLASHNRITIVGDEDQSIFSFNGADVSGFDSFRRDFPKHKEVRLSKNYRSTRAIVEAATALIHNNTKRQSHKLAETDNPSGNKIIVKECHSEDSQCAFVIDKIIETTSSSVEGCHFGKIAVLYRRQITGKAFQASFRNRKIPFNIHGVAFYRKKVIKAIMAILKTTLPGCDDDAPWHQAFKAILPGDKEEKKKIIHHIEKISLARKCSFISAATDIFSAKVSGTFKRAQITQGRKVLSALDSLSKLVEREQSVSVVISSAGDMLPQKYLLEKRAIVDADGGKLLNEDNDIRSVLQFLMDDVSDFLSTHFSSSVDTSKTEEKGCASTLKAFIDYISLRETENFRSRKEENKNSITLTTIHQSKGLEWDVVFIVQANDSEIPLLHEYNGTVKEAGSTLEEERRLFYVAMTRARKKLYILHVTVDSNRQLLQPSRFLREIPAHLLEVQGEGTVRRTPEQPVNIPFDQPEGDTSVERPMVVRNETSPFPEMDQPCLANDFLKRFEIEDRAIISHIFHQWAKKQAFQNPKRLLDKIGFVIDERLRGKGYKRKDVLCKLKSFLSGDEAFGYAQYVIKWEQIPIDKRSHLMRERQEHFQKQRIENSMGSSEPTPKQISYLRNLGCTITPTSRLHASHLIEKYKSL

SEQ ID NO: 45407 - protein, 279 aa, Oryza sativa; identical to SEQ ID NO: 29997

SEQ ID NO: 45408 - protein, 114 aa, Oryza sativa
MDGDTLSAAAAEDGKVLHAFQTSFVQVQSLLDQNRVLINEINQNHESKVPGDLSRNVGLIRELNNNIRRVVDLYADLSSLFAASSPGPAASKGASVGTAVRHAGHKRVRSTHLD

SEQ ID NO: 45409 - protein, 319 aa, Oryza sativa
MEAKLSAASRRVAPSPIQQLSHLAQRAGAVNLAEGFPDFPAPAHVKAAAAAAIAADLNQYRHVQGICDALAETMKRDHGLRVDPLTDFAVCCGQSEAFAAAIFAIIDQGDEVLLFDPAFETYQTCIELARGVPVYVPLDPPSWTLNEDKFLKSFTNRTKAVVLNSPHNPTGKVFSREELLIIAQACQKMDCFAITDEVYEYITYDENKHISLASLPGMQERTIITSSLSKTYSVTGWRIGWACAPANIASAIRNIHVKLTDSAPAPFQEAALVALTSPPDFYSSLKQDYTARRDFILQVLTDFGFRISFKPTRLDLCIC

SEQ ID NO: 45410 - protein, 135 aa, Oryza sativa
MRRCSCWQLLWLVLVCSWRIAAAQAQAAPRTDPTEAAALNTILGRWGKKASSEWNISGELCSGLASDKTNWDDYPNINPFIKCDCSYNNNSVCHIIKLYVRPSSYFDQLHTWCLFTTPYFLCFLMHGDVEFWTHV

SEQ ID NO: 45411 - protein, 93 aa, Oryza sativa
MGRANQRKPARSLNAAIASASASASAAAVATDIPPPLSTPPHVARLRVSTAVAARPVPAPARHHARRPPAPLDLDPRLPHVREREREREGRGG

SEQ ID NO: 45412 - protein, 241 aa, Oryza sativa
MFCFTNGSIGNFFFAGARIFFQSLDAAIFLFSRVSQIPAESLVLPVISTNDRLTLGCELWDGTIIRGQNEISHPSNGRKEVVNKDCNSCSALPSRIKRVFYMSSEGSNLLHEVFPEANRTVLEQLSKVDCIVYAMGSLFTSVCPSLVLRGIGETIASRSIPKVLLLNGSHDRETTGLPASGFVTAITDSLNRTYGYPDKSLKNLPKDYVNALLVPKGGQIPLDIKNLSSKGIFHVVSVCVC

SEQ ID NO: 45413 - protein, 605 aa, Oryza sativa
MNLLCAIAILPVILVALLDTIPLASASSLMNHSQPSMATLASCPKSCGQMSIHYPFGIGAGCFRQPDFNLICDNSTQPPKLLLHDGVTEIIGDTDSSFDMDVGSTESIDVNISSTIPMLSSISHYNYSWNLSSFSIEYVILNITGCNFDTYIINPDTDIRTRICRNSCPKEEITEAVARQSCNGTGCCTYDIYGVANLQLSFVRGDEGLLGGNSSRNSLWNIINIRSWYAYVTWSIIDQPTCASAKDNRTDYACVSANSTCIDSFNSMEYLGYLCYCSSGFIGNPYVLHGCTRDEGYYPVQQKANCSRRCGNISVPFPFGLEEGCAARKLFQLNCTNVTSSTLQFDRGHVVTDIDFAEGVVGIKLASYFEEQEFSMYRSGEPDLYASFGEAVISVHWAAANLTCQEAQKNHSRYACVSANSTCLGVDSTYGYVGYRCKCMDGFHGNPYVVNGCEDIDECKKTPGICKGICHNDIGSYHCMECPDKTEYDVTAMQCVSRKKQNLLIGIVIGLSVGFTVLLFVLGGMLLLRRWERDIQRQLRRNYFRKNQGLLLEQLISSDENASDKTKIFSLEELEKATNNFDPTRILGRGGMAWYTKESYLINVW

SEQ ID NO: 45414 - protein, 1047 aa, Oryza sativa
MLSHQNIYLPVTSLQETSATQIEGEVESGKEIVSNGFHVGSKVEEPAVSTANVDCSQDHQRQERIQDIMPTNSTHDKREESPVMVEDGEQHSTIDIISKEKTTNEDQADDALDTHSILILMSSQCITKQVICEQSHLSRIKYYGNFDVSLGRYLQDILQNPVLQNQKLSCSSCGEFPESHLYSYTHRNGNLTVRVKHLAPQHHLPGESEGKIWMWTRCLRCENEHGMSKSTPRVLISSEARSLSFGKFLELSFSSHSAARRLSICGHLVNRDCLRFFGLGSKVAMFRYSSVEIYTTCKPQTTLQFDNPCRQDWFKEERRYVLARGIKLFSEVASMLQPLKDQLLDVTTTNCTGSLPVKDFSELEELLIKEKAFFEDSLEKTINQNENLSASVHELVDINWSYQDLLLELYLWDRRLDQLTKCVSAGQERVVSCKDPFDTVVKNIRVNQEIENKADELTCDRTTSVLSAVGLTECPSNRNYIDHQSVDIEAPVLTENQGAGCAQFSSTGGRNDEDSYTAPCQLEVDSMAQTKEVPSFEISEVRGDGIVVHPISLDQEPSNAPNHFRKIPDWDTGEGWIWNSFHECQLAYRKDIQNEILDKFEIVNRYSPSHMSPLFEQHEEVSSPQFTVGPGGNILSVLEDEISSIIARALAVSGEHRHLVENETEGARLEHAKTMEKSYSFMSGSSLDSSPWSSIGSLDSEASFLSLGSSVSSDDLSGYDSLPLFSSIHPEVAVNGKVALRGKYSVTSIYAKQFQDLRKKCCPSELAYITSLSRCKKWDAQGGKSKAFFAKTVDDRFIIKQIKKTEFESFIKFAPDYFKHVYHSLDTGSQTCLAKILGIYQVKQTRHGKEIKIDLLVMENLLFGHNISRIYDLKGAIFSRHVAHSNDRNTVYLDQNYVEDMRVSPIYIGGRTKHLLQRAIWNDTSFLTSVNVMDYSLLVGVDKEKHELVFGIIDYLRQYTWDKQLETWVKSSLVVPKNVSPTVVSPKEYKKRFRKFMAKHFLTVPDTWSSENSSGPSKSFGHSNNMLVEVHSDDNLLQHPIEAETVV

SEQ ID NO: 45415 - protein, 451 aa, Oryza sativa; identical to SEQ ID NO: 30029

SEQ ID NO: 45416 - protein, 399 aa, Oryza sativa
MASPAVVAFAVAVAVAALAAFCGTDPLRTGSMVDFPGFVPHVVELPDASEMPPHADTRERLRGAEIRFRGEVQGPESVAFDPLGRGPYTGVADGRVVRWDGARWVYFAHSSPNWTAELCGHKASPLDYLKDEHICGRALGLRFDRRTGDLYIADAYFGLLKVGPDGGLATPLATEAEGVRFNFTNDLDLDDDGNVYFTDSSIHYQRRHFMQLVFSGDPSGRLLKYDPNTKKATVLHRNIQFPNGVSMSKDGLFFVFCEGSRGRLSRYWLKGEKAGTVDLFAILPGFPDNVRTNDKGEFWVAIHCRRSIYARMVSRNVRLRKFLLSLPIPAKYHYLMQIGGKLHALIIKYNPEGEVLDILEDTTGQVVRAVSEVEEKDGKLWIGSVLMPFIAVFDYANAS

SEQ ID NO: 45417 - protein, 102 aa, Oryza sativa
MHWLAQVGWMACSTWCSVDLGRFNITLINQLFYRLLNKMLCNRLYAKSHKPSFYPLACLHHWCGLVSMVVVLSLGIIPLFKSEKCSASDLKTMLKDKGSDPS

SEQ ID NO: 45418 - protein, 146 aa, Oryza sativa; identical to SEQ ID NO: 34463

SEQ ID NO: 45419 - protein, 55 aa, Oryza sativa
MRVLLPPHSLAAHPPPSFLTLTTWPMVLMVILSSHGLKHCPILHHQRNIHSFPHY

SEQ ID NO: 45420 - protein, 918 aa, Oryza sativa
MSSTNKIDTHNRNGSSKEKKSNPSSSSEYQLKNHLLLLATLVATVTYAAGLNLPGGFWQDTQEDHLAGDPILPGNHKEQYIMFYYCNATAFAASLVVCLLLLVLDKENSGCAAALRVVMLFDLLGLMGAYAAGSCRDEFTTIYSSVIMSMVFAYIVPSLFTYAVSKLKKKDKNHGKQNKDSGEPKDTEKQTWYPDEHKREELHEVLMLLATFAVTITYVAGLNPPGGFWGSTQDGHRVSNPVLQDINSRRYKAFFVCNTTAFVASLLIIMLLLDKRVNTEQMSLQFGELYGSIVVVLFGLVGAYAAGSCRDTDDTVYVICLIAAILAYIFLQVAVTQFLKKRIKNDGHTERSISSVKSLIRNEDGSRNTKRNIAMEKARSLVMLLATLAASITYQAGLDPPGGLWPDDRDGHKGGDPILLTTNPARYKVFFYSNSVAFVTSLVAIIMVQSKHVLKNHTLEAAMLLDLFALITAYAAGSCRDVSTSIYVVALAGGVLVYVVIHIIFFTLDNMDNEYHDPDEEDKKREVLLLLAILVATLTYQAGLTPPGGFWSEDDNLGHHHRAGYPILLENYPPQYEAFFYCNATSFMASIALIMLLVNPNLYRPGIKCYALYVCMVAGMFGLMGAYAAGSSRRLRTSIYVLTLVGAVFALVALQVAMFWNKRTSKTGGNMTNSSAQEGGSTDTEASQPAPLIKGMGSTSQATQITDITDAALRNTDKGEGSSEQGGSRINSVTSEPGAHGTGNGASLQEANSEEDKSGSTEKDMREYLMLLGVLAASVTYQAGLKPPGGLWQENGNGHLAGHYILHDINKRRYYAFFYSNSISFMASIVVIALLLPRMLNNLEIPVWPMHTAILLDMLGLLCAYAAGSTMRWETSRNIIALVIPVLVYMAACTALSFFHKEDQKQISASTCQASTNS

SEQ ID NO: 45421 - protein, 332 aa, Oryza sativa
MLRAAKYLLGSPGANGFGSKSTAEDVCPDLGCITAIITGATSGIGAETARVLAKRGARVVIPARNVKAAEDMRARIRGECPGADVLVLPLDLSSLASVRAFADRFLSLGLPLHLLINNAGKFSHGQLALSEDGVEMTFATNYLGHFLLTKLLLGRMAETAAATGVQGRIVNVSSSVHSWFAGDWAEYLDLVTRRKIAYDATQAYAVSKLANVLHTKELAVRLKEMGANVTVNCVHPGIVRTRLNRDRDGLVTDLVFLLLSKLLKTIPQAAATTCYVAAHPRLAGVSGRYFADCNEALPSPAATNRHEAERLWQISESMLLCTNRHSKDASAP

SEQ ID NO: 45422 - protein, 543 aa, Oryza sativa
MSAPPLLKAPAAAAASLVAAAAAHRATAAAAAPSGASRVPPRRLRCSASGAAAVEVRAPMDWATRSLEEMQRAEDFDSFCLMGLSPLDGRYERFTRDLKPFFSEFGLIRYRVIVEVKWLLKLSQIPEINEVPPFSKEAQLFLDAIIQDFSVADAKEVKKIEKTTNHDVKAVEYFLKQKCSSNPEIAKVLEFFHFGCTSEDINNLSHALALKEGVNTVMFPVMMDICKAMCSLATQNSTIPMLSRTHGQPASPTTLGKEMANFAARLSSIGNSFSEVKILGKFAGAVGNYNADVVAYPEVDWPKVAEDFVKSLGLEFNPYVTQIEPHDYISKLFNLFVQFNNVLTDFDRDMWTYISLGYFKQIVKAGEVGSSTMPHKVNPIDFENSDGNLTIANGTLSSLSMKLPISRMQRDLTDSTVLRNLGVGLGHSLLAYKATLRGINKVQVNESRLSEDLDQTWEVLAEPIQTVMRRYGIPEPYEKLKEMTRGQAVTKDSIRQFIEDLDLPEAARSSLLKLTPHSYIGEAEFLARNIEEVVDLKSGFKIE

SEQ ID NO: 45423 - protein, 340 aa, Oryza sativa
MYKRESTDSREIMESRDREFLEWAHVHALKSSLDESKLEQRVKAANEAEAITQQRLATAEAEIAESGQKLGTSRKDLVSLSHMLKSKQEECEAYRVEVECVGQAYEDIQAQNQQLLQQIIERDDDNTKIFMEGVKAKQTQDALHLETYSLRRNLQQESSLMDLYNQKIVSLEDQLKMWSDRVGKLQEDGWQQSVSLSNYQRKLVDVHRDAQKLMQSLDGIQANVGSSRLEVADLLIELEKERFSKKRIEDDLEVMSRKASSLRAKARESAVLEKLRHEVKEYRGILKCGICHDRQKEVVITKCYHLFCNQCIQKSLGNRQRRCPSCSLSFGANDVKPIYI

SEQ ID NO: 45424 - protein, 536 aa, Oryza sativa
MMSGGPSDATHRKRRRRRGPKGSGVDGPSIPRAVTTNGAGPEEEEVVEGKAMELDAGMSAAEVGGVVGSHLSETRFDQCPVSPLSLKAIKDAGYEKMTQVQEATLPIILQGEDVLAKAKTGTGKTVAFLLPAIELLSTLPRSPSINLLVICPTRELANQVAAEARKLLKYHRSLGVQVVIGGTKLPQEQRSMQSNPCQILVATPGRLKDHLENTPGFSNRIKGVKVLVLDEADRLLDMGFRRDIEKIIAFIPKERQTLLFSATVPEEVRQIWHIAMKRGYKFINTVKEGDEETHSQVSQMYMVAPLDLHFSILYNVLKKHIAEDADYKVIVFCTTAMVTKLVAEVLSQLKLNIREIHSRKSQSARTKVSDEFRKSKGLILVSSDVSARGVDYPDVTLVIQVGLPADREQYIHRLGRTGRKGKDGLGLLLLAPWETYFLNSVQDLSVSQAVVPTIDSSIQTGVKDALGRVETKSKESAYQAWLGYYNSNKAISRDKSRLVRLAEEFSQSMGLAIPPAIPKLILRKMGLNNVPGLRSV

SEQ ID NO: 45425 - protein, 95 aa, Oryza sativa
MGHWGSDGGVPHEIHLGLMDFVMEISGTTGMWVSGMSNVLRSLKITTLKRTYGPYGNPKAGIPFSFSVDGSDRITGFFVRAGFITDAIGVYVRHC

SEQ ID NO: 45426 - protein, 453 aa, Oryza sativa
MRECISIHVGQAGVQMGNSCWELYCLEHNITPDGTMPSDTTLGSSDDSFNTFFSETGAGRHVPRAVYVDLEPTVVDEVRTGVYRQLFHPEQLITGKEDAANNYARGHYTIGKEIVDLVLDRIRRLSDQCTGLQGFLIFHSFGGGTGSGFTSLLMERLSVDYGKKSKLEFAIYPAPQVSTAVVEPYNSILTTHTTLEHSDCAFMVDNEAIYDICRRNLDIERPTYTNLNRLIGQIVSSITASLRFDGALNVDLTEFQTNLVPYPRIHFPLVTYAPVISAEKAYHEQLTVSEITNSCFEPSNQMVKCDPRHGKYMACCLLYRGDVVPKDVNAAIAAIKTKRSIQFVDWCPTGFKVGINYQPPTVVPGGDLAKVQRAVCMLSNTTAIAEAWARLDHKFDLMYAKRAFVHWYVGEGMEEGEFSEAREDLAALEKDYEEVGLDSADAGEDEEEGQGEY

SEQ ID NO: 45427 - protein, 956 aa, Oryza sativa
MHHHPHPRERDTAAFAPAAPLASLVAAAECVPFISVPPRHSNQQLLFFFFFFFFFFFFFSFASPTEQLCSSFLLLLLVIVRTSAGDNRTTPNGAAAAVMAAATVGVLLRLLLLPVVVVVSLLVGASRAANVTYDHRAVVIDGVRRVLVSGSIHYPRSTPDMWPGLIQKSKDGGLDVIETYVFWDIHEAVRGQYDFEGRKDLVRFVKAVADAGLYVHLRIGPYVCAEWNYGGFPVWLHFVPGIKFRTDNEAFKAEMQRFTEKVVDTMKGAGLYASQGGPIILSQIENEYGNIDSAYGAAGKAYMRWAAGMAVSLDTGVPWVMCQQSDAPDPLINTCNGFYCDQFTPNSKSKPKMWTENWSGWFLSFGGAVPYRPAEDLAFAVARFYQRGGTFQNYYMYHGGTNFGRSTGGPFIATSYDYDAPIDEYGMVRQPKWGHLRDVHKAIKLCEPALIAAEPSYSSLGQNTEATVYQTADNSICAAFLANVDAQSDKTVKFNGNTYKLPAWSVSILPDCKNVVLNTAQINSQVTTSEMRSLGSSIQDTDDSLITPELATAGWSYAIEPVGITKENALTKPGLMEQINTTADASDFLWYSTSIVVKGDEPYLNGSQSNLLVNSLGHVLQIYINGKLAGSAKGSASSSLISLQTPVTLVPGKNKIDLLSTTVGLSNYGAFFDLVGAGVTGPVKLSGPNGALNLSSTDWTYQIGLRGEDLHLYNPSEASPEWVSDNAYPTNQPLIWYKTKFTAPAGDDPVAIDFTGMGKGEAWVNGQSIGRYWPTNLAPQSGCVNSCNYRGAYSSNKCLKKCGQPSQTLYHVPRSFLQPGSNDLVLFEQFGGDPSMISFTTRQTSSICAHVSEMHPAQIDSWISPQQTSQTQGPALRLECPREGQVISNIKFASFGTPSGTCGNYNHGECSSSQALAVVQEACVGMTNCSVPVSSNNFGDPCSGVTKSLVVEAACS

SEQ ID NO: 45428 - protein, 58 aa, Oryza sativa
MSVRPSLCPCAPLQLLVYSFGVSVQTMFLFLSEFCPCVWPHTYAICELRSCDVFRAVT

SEQ ID NO: 45429 - protein, 137 aa, Oryza sativa
MATMLCSFTPATRAPLLRTSSSSSSLGFATSQLAGLSLGLSAAATTAPSAAGPKLHPILARRICPFTDKKTNRANKVSFSNHKTKKQQFVNLQYKKLWWEEGKRFVKLRLSTKALKTIEKHGLDAVAKKAGIDLNKK

SEQ ID NO: 45430 - protein, 247 aa, Oryza sativa
MLPTTASKGRGAARSAPPLFGPYLRRIVKWQQMDIEYTFWQMVHLCTSPKVVYQHTKYHKQTKNQWARDDPAFVVILILFLVFATSAYCAAYGESPSHAALTITSVVLVHFLFAGIVLATLCWFLTNSYLREEPNSHVVEQRVEWLYAFDVHCNSFFPAFVILYVLQYFLSPLLVAHGFFPALLSNLLFVVAISYYHYLNFLGYDVLPFLDRTTFFLYPIGLVIILSPLMILIGFNPTRYFLSLYFR

SEQ ID NO: 45431 - protein, 680 aa, Oryza sativa
MPSSESDRDDIFFDAFDDVTSTREPSLSDDCSTSDEGLASRRFEYDIWGNEPMSVEERRQRFLKGMGFDEFLATRVDFSQPQGEITTVGPFADLGLEESTTSDISSVNSSVPENESVSDASCCIGDIDSGERYTVQNDGYGELTSMLKDVASHKVVSLLEFDGVPGLSQSVQKLLRKVYSSSMEEKKNVFNKKKGVKSLWKSFMKNRSFGGICKHDVNVKNCTIGIPSRTKVQHRKKKTMEFSAVHLGQEIQAHKGLIKVMKFSPSGWYLATGGEDCIVRIWQIMEVEASSKLHGGDNPQNYDDKITIIKTELGRGKNHALAVVPKKGFRISETPLHEFQGHTDDILDMAWSESDYLLTSSKDKMVRLWKVGCDGCLGLFKHKDYVTCVQFNPIDERYFISGSIDGKVRVWDALDKRVVDWTDTRKIITALSYQPDGKGFIVGTTSGECRFYDQSGENIQLDKELFMQGKKSAVHRVNSLQSRSSDSSRITITSTGSKIRVADGVDIIQKFEGPWNLKALSSPSLTSDGRYLISAGLDSNVYIWNFDIPSVADHKGEAKSVRSCEKFFSKDVTTAVPWPGLHQERQQVKNSSSLTEESVSSPILHRHGERRSPAARCFADGMKGTPTWPEEKLPPAKAADAPRLSDCLSTISPAWNTVIVTASRDGVIRSFHNYGLPVRL

SEQ ID NO: 45432 - protein, 219 aa, Oryza sativa; identical to SEQ ID NO: 28919

SEQ ID NO: 45433 - protein, 54 aa, Oryza sativa
MSTVCVVNTNSVTILYIVFIVQSNLSHAFQTCTVLNFDMASKLNSIKKSYYGMT

SEQ ID NO: 45434 - protein, 299 aa, Oryza sativa
MNAGGVRGVGVGAAAMASPPSPAIREAPHLPRRPRRVPADDVGDAGHVRVAAAGRAPRPPPRRPHRRRPPLLPRRPDRRRPRHPLPLHRRLHAAGRRGLGPLRLQPPLPPRPALCLRRRRPRRPRRRHLQHQPPLRDPRPDPHLPPHPRPRRRPRRHAGPPLPLPARRRRRRPGGVPGGDHLPRAVPAALQPALHGARRRRAARGAALGGGHVPWHHGRGVEDARPLLPPHEPLAGLRRALPRPRRRRRRRPGGGQRGAAPDRGDAGVHLHGAHAEGQVPRARRQRWRRRQQQQEQLIY

SEQ ID NO: 45435 - protein, 313 aa, Oryza sativa
MSSSEQAAMESGGCQHHQERQAATAGESAKKLCRVVRAVYLVLVKGLGKHQPKLAALGVHLHQMMSSRRHGGGGHDHGLDDLREHRALLTYLSSTMSCRSMDPAAAVHPYPRGRGAHGAGRRRSGGGISSASGGVSGLSSMSCRSMDPSAAVSQYQYRPREVEFSCSSTPLHRRRRAQRRSQLRLQQHGQWHDRSSAADPYGSAATVSRLFELMDVKEEAAAEAMTTDIDDEDGDVVAWPAVVVPAPRQVRITDSPFPAWEADGDDDEEGRLGVVDRRADEFIMWFHEQLRMQQQQRAAAAAAKERSTYYFVR

SEQ ID NO: 45436 - protein, 627 aa, Oryza sativa
MKSSLRKLRGFALQRHEQRVDRRGGHSPAAAAAANELLAASQDMADMRSCYDNLLSVAAAIANSAYEFSEALQEMGTCLLKRVTPNKDGINDKVLLLLGKAQFELRKLVDSYRVHVLNTITTPSQSLLNELQTVEEMKHQCDEKRELFEFLLNAQKEKGRSKNAKSDIGASEQLKQAQDDYQEEATLFLFRLKSLKQGQFRSLFTQAARHHAAQLNLFRKGLKSLEAVEPHVRLAAEQQHIDHQFSALDEEDYSVDEENEDDYNDSHEDLSFDYGENKEGTEAGHASRSPTEELLDRSKAEYSSFPGERQRSGSQSAPLFPEKKLEAAERIKELRRSATRKLYTYVLPTPNDVRDTSQTVTANPTSGSPLGNKGAFYSSPLQPSTNVGDLRDNKLPSPTRLSNAHSVLKESNTNTTDTRTMLVLPLGDLSLPGYHDSKASDNKKVKRGSFSGPIVPRSRSTENIDVVSVPPRHSSSHQPSIHVRVSPNTSPPLLSSPKIKELHELPRPPANASKHTTFPSLVAHSAPLVPNSAPLAPRGQDHFRPRQTPPSAPQTASPLPTPPGPISRSFSIPSRGMRTSGISDGKETEDLQDKGPARMSLSSLPSAQTSLEDHRPLSGATESVSKT

SEQ ID NO: 45437 - protein, 1153 aa, Oryza sativa
MFRRKMARKIKDIKVKYNEIVRQRRDANTIRSSLQVDQPIPSSNMIIGELSLLSNVEESKIPIRDQEMDTIVSMLVDSNEGENCWIVSVVGLGGSGKTTLAKHICHVNKIKELFKERIFWVHVSREFDVQKLIGKLYETIVGRKSDCQPQQQMVREISKQLCCNKFLLVLDDAWHTDGYEWGQFMVHLQDRSIGSRILLTTRDRKVAEVVKSKQIHELVFLTESESWSLFLKCSGWVEDDLGSEFIQLGKEILKKCGGVPLAIRTIAGVLCEKREISTWRAIRGSDLWNVGSVNDRVFASLKLSYIHLADKLKQCFTFCSIFPKGYVINKDRLVAQWIAHGFITPMKEEQPKDIASEYFDSLVKAGFFLQDTIEEFGYLHKMHDLIHDLAQYCEKNEVVTSRPNSMSTYQTHKCRYLSLTSGNEKVKRGLLDKVHALYMSDGNLSFDKPVKKSCYIRSVILDNENCTTFPPVLLKFEFLGYLEIHGVDCKKLPEAISGCWNLQSLHFIRCSGFVMLPESVGKLKKLRTLELNYVIDLESLPQSIGDCQGLQSLQLHSCNKLQGMPTSIGRIENLRVLHITSCPCMQKLPSEPCGESNNLEIINLSNCHNFHGLPSTFACKALRTLNLYNTKITMLPQWVTSIDTLECLDLGYCHELMEFPKGIANLRRLAVLNLEGCSKLRCMPSGFRQLTRLTKMGLFVVGCDGDNARISELETLDMISGKMKIINLKYTLDPTDADKASLKRKNNIKYLELDWSRGETEKELVTDMVMEQDLAVLNALEPPSRIEEILIYYYGGPCLPWWMKKQTDSSCWESTMLKQTNPCQLIYLTRMTLHEIPNLKHMQGLVELPLLNYLELFGLPNLEDMWTTTGGAEIRGDELQAKYCFPALSTLWIRGCPRLNVVPYFPSSLERLFLRESNDQLLSSGSFSHLLPPLAHESSPCSNAHSAVPRLKELTIIKMTGSSCGWDFLQYLDALEYFNIFGSNDLTQLPESMRSLTSLHKLIIHDCPTFGMLPEWLGELCSLQSLFIKGTPMMDSLPQSIGCLTSLTHLTIACDNLKQLPETFHHLTSLRELDLAGCGALTALPENIGKLSALEALYVGPCSAIQCLPESIKHLTNLRRLNISGCPNLVKRCEQEVGEDWQLVSHIPNLISD

SEQ ID NO: 45438 - protein, 221 aa, Oryza sativa
MATASDGSGSGGEQRRLLSIPKEGERIIAPTRRPDGTLRKAIRIRAGYVPQEEVAIYQSKGAQMRKSGPDVPPGYDPALDAKPKTKAAKRNERRKEKRRQQASTTNDKGKGLHIEDDAGETDNPKDAVDSVTKQISGIAISESLVVATSSTDATDNSKSESSAPDIDKKIRALKKKIRLAEAQVQGDPENLKPEQLEKMKKIEGWKEELKLLENKSSPAAS

SEQ ID NO: 45439 - protein, 945 aa, Oryza sativa
MKKVFDQTVRDLKREVNKKVLKVPGIEQKILDATSNEPWGPHGSLLAEIAQATQNYHEYQMVMNVVWKRINDTGKNWRHVYKGLIVLDYLVAHGTERVIDDIREHSYQISTLADFQYIDSSGRDQGSNVRRKSQSLVSLVNDKERIQEVRQKALATRDKYRSAFATSGTHRSPGGYDNDRYEGSYGSRYDNRNGYGGEREYGYRDDDRYGVAGTTPNREGDRYSRDSNEQRYSRDREDEYKGSHSNHEYAEGSGRRSYGRDRDSYGDDEAYSSRGRQSNADGPTQDERPMERKPSNQQIASPPPNYEDVTRDTQDNNHDGRNGGTVPVPVAAAKVSSPPRTSVPPGQVNGVHDNTVEDVPAPPPTHPEVNGFDEFDPRGSVPDTSPPVNPSQAVNSLEMDLFGPDPINSLALVSVPQPTASPNVEPSANPGFESNSFMGMPPASTGFNEAFDATNPFGDPTPFKAVHEETPAVSQTNAAPAGSFHATEPAADANPFQPASAASFGFGDTLGDLSFGSNAAPGQQDIFVPTSSHSEVPPANPSVHPEQAVPSYVSSQAPQPAAAGPQTHAAPASFASQAPPTSFASQAPQAGAPYPQAASTFPHSQASHPAATNPSTIPQNVATPFAPLQMPQPVPSGQSNYFMQPVPGTGINGMSGAPSQNGAPSYIPSQASQFAAPTNLQPSQPTFPPQTAMAASQATSISRGASQPLAVPNSMPSGVNFPLQSSSSAPPETILSALQVSQSEPVKKFESKSTVWADTLSRGLVNLDISGPKANPHADIGVDFDSINRKEKRQEKKVSQAPVVSTITMGKAMGTGSGIGRAGASAMAPPANPMGASRGIGMGMGAAGSGYGGGMGMNRPMGMGMGMNQQMGMGMGMNQQAMGMGMNQQAMGMGMNQQPMGMNMGMGMNQGMGMNMRPPMGMGPGSGYNPMGTGYGGQQPYGGYR

SEQ ID NO: 45440 - protein, 157 aa, Oryza sativa
MFADHGTVERAEVMFDKYTGRSRRFGFVTMSTPEEANAAIESLNETEVGGRKIKVNVTESFLPNIDRSAPEPEPVFVDSQYKVYVGNLAKSVTTEMLKNFFSEKGEVLSATVSRIPGTAKSKGYGFVTFSSEEEVQAAVSTFNNAELEGQPIRVNKA

SEQ ID NO: 45441 - protein, 480 aa, Oryza sativa
MASCASPRLKSLCHHPLFIILLALSLLQTITAEDEQEADRVAFLPGQPRSPQMSQFSGYITVNSQNGRALFYWFFEAQALPSKKPLLLWLNGGPGCSSVGYGAASELGPLMVNGNGTGLEFNKFAWNNEANLLFLESPVGVGFSYTNTSSDLESIDDRFVAEDTYNFLVNWFKRFPQYKNHDFYISGESYAGHYVPQLADVVYERNKHVETNQHINLKGFIVGNAETDDYYDYKGLVEFAWSHSVISDQLYKHVNNVCDFRLSPRSNECNHVMGYIYDQYDMIDIFNVYAPKCNTDDSSLFSTSYSTADMNAKKRLKGTRMYSGYDPCYSSHIEDYMNKMDVQKSLHANTSGLIKDRKWSICSYSIFDNYDITVFSVLPIYSKLIKAGLRIWVYSGDVDGRVPVIGSRYCVEALGLPVKSQWQPWYLNNQVAGRFVEYQGLTMATVRGAGHAVPQDKPEQALVVINSFLSGRRLPTKNNR

SEQ ID NO: 45442 - protein, 61 aa, Oryza sativa
METTEFINALKQEWDRIEDKYTVMTLAATASLRMWSRRSCIGNWHASCYSWSNEGCWHCVQ

SEQ ID NO: 45443 - protein, 229 aa, Oryza sativa; identical to SEQ ID NO: 33850

SEQ ID NO: 45444 - protein, 355 aa, Oryza sativa
MENLECTVGKDGLNFQCNLCDSDVVHSMAEILLRGLATASVDSTTGDIFKSPSSVAVGMKSELAEYLIQGSMTLVREAVDGGEDHSEQLIKASTMPTEFLSDLIDGFVASKRNLLSHVSGFLSSETRLNKIKDFIQKLEMENFWAPDVREATAGTILKSIDMKCIIHCPERFDTQDKLAEHRNLCRFRIVNCKNDGCLASFSANHIEKHDSVCPFKVLPCEQLCEQHVMRCEMDRHCASVCPMKLINCPFYQVGCESAFPQCVLDKHCSERLQIHLMYILELTTRHDAFVNDMNQRLHLLEKAQSLNELSGALDNRTLTLTAKEQEAKIKKLEQDLKVQETKLEKLESEFKSGKV

SEQ ID NO: 45445 - protein, 209 aa, Oryza sativa; identical to SEQ ID NO: 33015

SEQ ID NO: 45446 - protein, 182 aa, Oryza sativa
MAKSSSSSIRSLLLAAALLVAVGISPHAAEASSGGAVMGLVTGVVPCSAGSSINAASVPGFPNAAVQLECGGRAVAGATADGSGAFAINLGKLTAATLTPLLNDRCRVVVTTPLAACDASLAGVAGTLAAPVQLLGDGGAGGGGALGGLGGLIGGITGIIGQIISGVLGNIISIVPSAFSVV

SEQ ID NO: 45447 - protein, 572 aa, Oryza sativa
MSQSSPFFSVARAHAGAGGRAAAAALLLRHPVAQLPPRIHGLRYYPSAIVSPAKTLNSHLSLPHATISSFANADNGSSGQADATESEEEQNGESELSEMAKAFHISPRMAMSISVVIAFAALTVPLAMQSVVFHGTNKMKALAYLTLLSGFYMAWNIGANDVANAMGTSVGSGALTLRQAVLTAAVLEFSGAFLMGTHVTSTMQKGILVASVFQGKDSLLFAGLLSSLAAAGTWLQVASSYGWPVSTTHCIVGAMVGFGIVFGGVNAVFWSSLARVSSSWVISPLMGAAVSFIVYKGIRRFVYSAPNPGQAAAAAAPIAVFTGVTAISFAAFPLSKTFSIAILQALACGAIGAVIVNRVIQKQLGDLLSSEAEKIASADKANAQQVGFLSDIAGPTGAQLQIVYGVFGYMQVLSACFMSFAHGGNDVSNAIGPLAAALSILQGVASSAEIVIPTEVLAWGGFGIVAGLTMWGYRVIATIGKKITELTPTRGFAAEFAAASVVLFASKLGLPISATHTLVGAVMGVGFARGLNRVRAETVREIVASWLVTIPVGAVLSIFYTLLFTKILAYFM

SEQ ID NO: 45448 - protein, 521 aa, Oryza sativa
MDDKENKGLDKEGKNGKPGKHSAGKKIRRADAKKQKHSAMEPVHHAEENRHERYTETSVHVKEAMKDLKLVFGQDIRCAQMPANCNLSQLRDIVQNKFPSLKALLIKYKDKEGDLVTITSSDELRWAYSLADLEGPIRLYIVAVDPAQELGVDVVRRRSSFASLEKAYYSMSENGSSRHDDDHNCSIDDWMIQFARLFKNHLGFDSDSYLDLHDLGMRLYYEAMEDTVASEEAQEIFQVAELKFQEMAALALFNWGNVHMASARKRPPLSDDASMECILEQVKVAYEWACAEYAKAGAKYGEAVKTKPDFFEGLIALGQQQFEQAKLCWYYALACKIDMGTEVLGLFNHAEDNMEKGMGMWEEMENTRLRGLSKPSKEKIIFEKMGIDGYMKDMSSDEAFEQASSIRSHVNILWGTILYERSVVEFILGLPSWEESLTVAIEKFKTGGASPADINVMVKNHSANETTQEGLSFKVEEIVQAWNEMYDAKKWRNGVPSFRLEPIFRRRAPKLHHMLEHIHYA

SEQ ID NO: 45449 - protein, 815 aa, Oryza sativa
MRGVESDGGGGAPFSSSSSAAAPDNFDAAQYPFFGKEPLEGLELSCLEDGGGGGGDANGGGFSGGAEEGLYRLSSVGEEIDNLSNLSDIDDLASTFAKLNRTISGTRNPGVIGDRRSISRGSSLTVDWAEDVEFPNWVDQDILEDEEFQESKRWWSQSHTLVQQGDAKPLSRTSSYPQQPLQHRASEPIIPPKSPSFTSFPPPGGRSPYTSQGLTRHGCIPSLGAGLQMGSPSMSLPSSPYHIAGLSHGLPYGGSMSFGTSNLPVNNPMQNDWPSQANLYAGEQFNLLPNMLQKQISLPNSPMSSLLFSQQQQRLAQVQVQPSHQNYLNLPPHIFYQHHSPELTGRFDSVSSVPSSRDKRSRSGRGKHNIRFSQPLPDTGNQNGDSGGIKFRSKYMSSEEIESILRMQHSASHSSDPYVVDYYHQACIAKRGANSRPKANFAPTSMKDLPSKSRSSGDHHAYLQVDAVGRVSFSSIRRPRSLLEVDLPSSSDGSHDQKSSLRPLEKEPMLAARVTVEDALCLLLEVDDIDRLLQSSQAQDNSFQLRRRRQVLLEGLAASLQLVDPLGPSTSSHSSGLAAKDDLVFLRIVSLPKGRKFLSRYLRLLTPGSELTRIVCMAIFRHLRYLFGGLPSDSSAAETTVTLAKTLSSCVRHMELGALSACLAAVVCSPEQPPLRPLASSAGDGASLIIKSVLDRATELLTDQHAAASYTVSNRTLWQASFDAFFGLLTKYCLSKYESIRQMFTMQSPGSVIGSEVSKATSREMPVELLRASLPHTNDQQRQLLLDFAQRTMPVTGFNASGANGGHITSESVPG

SEQ ID NO: 45450 - protein, 269 aa, Oryza sativa; identical to SEQ ID NO: 38098

SEQ ID NO: 45451 - protein, 777 aa, Oryza sativa
MPRSLLTGWLRECFISQVHKQPCHIVYTDYRPTPLQHYVFPSGGDGLYLVVDEKSKFREDSFQKGLNALVPASENDKKRENGKWQKGLLTGKPSEDSDIFKMVKMIIQRQYDPVILFSFSKRECEFLAMQMAKMDLNDDDEKANIETIFWSAMDLLSDDDKKLPQVSNMLPLLKRGIGVHHSGLLPILKEVIEILFQEGLIKCLFATETFSIGLNMPAKTVVFTNVRKFDGDRFRWLSSGEYIQMSGRAGRRGIDQRGICILMVDEKMEPSTAKMILKGSADSLNSAFHLSYNMLLNQIRCEDGDPEKLLRHSFYQFQADRVLPDLEKQVKELELERNSMIIEEEENLKSYYDLLQQYKNLKKDVRDIVHSPKYVLPFLQPGRLARVQYSTDEQSTFSIDENITWGVTINFEKVKTHSEDRRPEDSDYTVDVLTRCSVSKDKSGKKTMKIIPLKDRGEPVVISLPLSQIDGLSSIRMHIPKDLLPVEARENTLRKVDEVISRFAKDGIPLLDPEEDMKVQSSSFRKASRRIEALESLFEKHDVHNSPHIKQKLKVLHAKQELSTKIKAIKRTMRSSTALAFKDELKARKRVLRRLGYITSEDVVEVKGKVACEISSADELTLTELMFSGTLKDATVEQMVALLSCFVWQEKLQDAPKPREELDLLFFQLQETARRVANLQLDCKIQIDVESFVNSFRPDIMEAVYSWAKGSKFYQIMEMTQVFEGSLIRAIRRLEEVLQQLILASKSIGETQLEAKLEEAVSKIKRDSVCSIFIPVK

SEQ ID NO: 45452 - protein, 102 aa, Oryza sativa
MTVVLRPDPLAAGVPRLAPHGSTGGERPSPGPARIHRRRGEESSVLNRFSSAAVAPAGFVVRMTVGSLPSFLPQRRLHIREAGDASRLRGETPGPSSVRGAR

SEQ ID NO: 45453 - protein, 197 aa, Oryza sativa
MSASRFIKCVTVGDGAVGKTCMLISYTSNTFPTDYVPTVFDNFSANVVVDGSTVNLGLWDTAGQEDYNRLRPLSYRGADVFLLAFSLISKASYENVSKKWIPELRHYAPGVPIILVGTKLDLRDDKQFFVDHPGAVPISTAQGEELRKLIGAAAYIECSSKTQQNIKAVFDAAIKVVLQPPKQKKKKKKAQKGCAIL

SEQ ID NO: 45454 - protein, 387 aa, Oryza sativa; identical to SEQ ID NO: 43776

SEQ ID NO: 45455 - protein, 634 aa, Oryza sativa
METLAQRAALLRESLQKSQSVTDAVVSILGSFDSRLSALDAAMRPIQVRTHAVRTAHENIDRTLRSADVILTQFDRTREAEREIQKGPHENLQGFLDAVDRLRSIERFFSSNRSYRSSDGVLNHVNALLSKALVKMEDEFQKQLTQRSKPIEPDRLFDCLPSTLRPSSESHPEGGKNQSHSENQQNSEAAVYSPPALIEPRFIPFLAKLAQQLVQAGCQQQCSEIYSEARASALESSLKSLGVEKLSKDEVQKMPWEILESKIGNWIHFMRIAVKLLFAAERQLCDQVFECSQSLRDKCFAQITRNSLATLLSFGEAIAMSKRSPEKLFVLLDMYEIMCELQADIDTIFVGESCSQMRESALSLTKCLAQTAQKTFSDFEEAVEKDATKNIHIDGTVHPLTSYVINYVKFLFDYQSTLKQLFQEFKREDGTGSELATVTMSIMQALQNNLDAKAKQYKDPALMHIFLMNNIHYIVKSVRRSEAKDLLGDDWIQRHRRIVQQNANHYRRIAWSKVLQCLSGQGLTSSGGSGQVGSEGGNSSGASRAAVKERFRSFNVLFEEIYQKQCGWSVPDTELRESLRLAVAEILLPAYRSFLKRFGPLIENSKAPGKYVKHTPEQVELLLANLFEGKQERT

SEQ ID NO: 45456 - protein, 372 aa, Oryza sativa
MIDREPAGSSRHGSNMDPSINIPVNRDAITEEVAAAFAESEVIPERYCRPDEVHDGIVVGHDDDEAYELPVVDMEKLLDPELAEAEIAKLGSACQDWGFFQLVNHGVDEQVVNEMKDSTVKFFSLPLESKRTVEIQDNGFEGFGHHYRRASGKLDWAESVILLTQPIQERNPEMWPTNPSSFRDALDKYSAEMTKLAMRIASIMATDLGVDQEALVGAFRDKQQSMAIHHYPPCRHPDKVIGITPHSDGLGLTLLLQLDDTPGLQIRKDGRWLPVRPRPGTFIINVADILEVLTNGAYKSVEHRVLADAEKGRTTIVTFHEAYVDGMVKPIPEVLKLNGAEARYKSIERIEYIKGNFVALSEGTRFLESLKI

SEQ ID NO: 45457 - protein, 95 aa, Oryza sativa
MMVGNKSDLNHLRSVPEEDGQALAEKEGLSFLETSALEALNVEKAFQTILKDIHQIISKKALAAQEAAGSGPPTQGTTINVTDSAVNTKRGCCSS

SEQ ID NO: 45458 - protein, 657 aa, Oryza sativa
MMSSDDDLEPQLKAVENYYFVDDNDVPVSFDVLPFQFDAAEGVASFKKDVYLRGFTDGGLQKVYKQVVAWKLVLDGDSPEIAVLSTEGSWIALLKPRPSYEETIRSVLITVEMLHFVRRRPTDSEKDMWDHLYGVFERFVVRPLEDDFANHQNLIKLFAQRDPDLANSQVLQVFIKDKIMEKTNEVGSNNLDNKREPDIKQEPDIKQEPVAAGDEMEEIVEEGIPDAPSNDDDDDEEDLVYLFEDRATQNHDVNNKNYTSGNGNFTAEKPVQADAFPPEKLVEVAYEEMKVASNRSSMYQSDQISVHDERDAHSDLPMSRHNSMKAKEVSNSSRDRRKSDKTGHEADSDMSILPSDSRNFLHKSGNLEPPISSRSGYTLERLRYHDNHFDHLVGEHSSSSLQMPIFEDSYFRSVNEYGVASVENNIALSTDNVGAGSRMYSPDPELNGYAVDPTVNAYGSVSGGTGGSFYRRQNLEDYTMDSSESAQMNPVPGRDVQEYARTYYGHNRDEVPQTAINTPSMDIRTHIRMYGRHIRDDHTQTTMNPPANDIRAQIRMYGQHATSDHQHASRYSSGSPDARFEQQPSFTSYGMPSLGSTGRSMMDRYSPSIDETSYRTGQRGPYNASDFRRDRHPDDMNFALHNQYPYPHPGSSGGWHD

SEQ ID NO: 45459 - protein, 577 aa, Oryza sativa
MAGTGLRFRQGAIFFSGAHAAAHPRTRTPHHHCSPQRTHDARGRCRLTAKSANGRPQISASFRDVAIDGAQSEDGAPEQGGSTVSITVVGASGDLAKKKIFPALFALYYEDCLPEHFTVFGYARSKMSDEELRNMISLTLTCRIDQRENCSDKMEQFLKRCFYQSGQYNSEEGFSELDRKLKEKEAGKVPNRLFYLSIPPNIFVDVVRSASRTASSQDGWTRFIVEKPFGRDSESSGELTRNLKKYLAEEQIFRIDHYLGKELVENLSVLRFSNLVFEPLWSRNYIRNVQLIFSEDFGTEGRGGHFDNYGIIRDIMQNHLLQILALFAMETPVSLDAEDIRNEKVKVLRSMRQLRLEDVVVGQYKGHSKGGKTYPAYVDDPTVPSGSITPTFAAAALFIDNARWDGVPFLMKAGKALHTRRAEIRVQFRRVPGNLYGRRSRSVGGGGTTATRELEKATNELVLRVQPDEAIYLKINSKVPGLGMRLDSSDLNLLYSERYPAEIPDAYERLLLDAIEGERRLFIRSDELDAAWAIFTPVLADLEANKVAPELYPYGSRGPVGAHYLAANHNVRWGDIS

SEQ ID NO: 45460 - protein, 589 aa, Oryza sativa
MIDTLYVAYFYPGMFHLFCRRHLGKSRTKRLVQFQYSYGCLSSHYGFLVKHYLAVQKEEERPKEKERRKPRVIDEFMEELKFEKELRQKRNQEREQWREGRHTDTSASSSRFDELPDELDPIGKLPGSFDDGDPQTTNLYVGNLSPKVDENFLMRTFGRFGPIASVKIMWPRTEEERRRQRNCGFVAFMNRADGQAAKDEMEGVVVYDYELKLGWGKSVALPSQALPAPPPGHMAIRNKEDGFRLNEDGALATGKAAATRELLGLPLAELERRCRHNGLSLCGGKEMMVARLLSLEEAEKERVYEKDAGIKYGQGESHRTGRDDIAVNARNASRPGEGTDSGESDMLGLSHYAMEAGYKRSNESTPAEPVPSKKPKVDPVLPASKWSREDDVSDDEDRKGGRGLGLSYSSGSDIAGDSGKADATEVSTDHSNHHQDTILDEEHRKKLRQIEIAVMQYRESLEEKGLRNTEEIEKKVASHRRRLQSEYGLSFSNDGANSRRSSERTSSERRDRHDDCSRKRHRSLSRSRSPPRRSLERDREHNRNRDTDRSHGNDAGRERDRVREKSASRGRDDHYDRSRDREKDRRKGR

SEQ ID NO: 45461 - protein, 90 aa, Oryza sativa
MNSSHNWHQVGWITMDVTPSDDISSVFCGLGYPSGHGFINLVAEDDIVVVEINIWWVWDDYNRSEYILPPFHNVNHSNISHIHIDVNESR

SEQ ID NO: 45462 - protein, 621 aa, Oryza sativa
MEATGAEATLSQVTAVDGEDNLFQDKESRATAKERGEAAVFGLENIVTANGATSAADLAPPKDVVDEWPEPKQTHTFFFVRICSYEDPSLKAKLEQADKECQKKIQARSHIFEALRTKRSERSNIISELKPLAAENKQYNEVVSGKLKEIEPLQKSLGKFRSENNAMRAQGAGLCSSIEELDQLIKSLNDRISHESISLDEEKRLVKEIKQLNGTRSKVIENAAKRAKMQDTVVERGTIHDQVKQIGVGIDEVKRDRQAVRDKIKVLEDQIHAVDGEIAALQDDLTAATARKDKAFEALNELRKTRDLNNTSFHQYRTISNSVRDLSARGEVEAVQQLCQNEVEKFMAQWCSSKSFREDYEKRILVSLNSRQLSRDGRMRNPDEKPIVLETQVAPPAEQEPAPLKKPAKQAKEAPAPRADVTPKDEIRAKAPAKAAKAKQPLDIDDIPDVHDDEPPKEKTKPKVDEAKLKEMKRQEEIEKNKLALERKKKQAEKQAMKAAARAEKEAEKKLKEKEKKARKRSATAGGAESEEAAESDAKSDEAEAQEEEPAAPVTIKKNARHRSTVTKTKTPLPKAVLKRKKSQAFWSWGAPMAALAAALVALLGALVYYQYYYLPASTSN

SEQ ID NO: 45463 - protein, 916 aa, Oryza sativa
MAARALGPPPPHALGATRQAPRCPHAAAADASAPQTHGYRRGAAALGSALSARRGRHTLCSVQLMDALRGGNLQVEPNILHSPKPLMSTRRDDSAITCKGFCTISWNLKSDVLDGYIIFVTGDPVTLGCWESDMAVQLSPSVESNNLWTAEIKVPYGVHFKYNYFVREENDASSDIIWRPGPEYSLSIPPVGRKKHVIVVKDLWMKTSVAGIPTPSWGSWLMEANFLEDQFAKSGEHQNIVKAHSVIDTVGRASSVGEHIILRLGNGTPLHVKNISENPSASVHDDFTVTDKANSIKSSISEHERNQPVEEPWILGSVMAAKKSVAAGKHEKNRWKFVNKKQNLSEVSENIPEQDQPVEEPWLFQSKVVAKKPVVQTKGKIEAKDIIRKLRKMDKPPAPLEEDKATSGEPSSRVIVINSSVCTMQRIAVLEDGKLVELLLEPIKNNVQCDSIYLGIVTKLVPHMGGAFVDIGLSRPSLMSIKQNRDPFVYPQIVKNAKRDSANFSDYNDDSLPTYEDEDDDMTDGELADEENDDESSAFPAEVVSENEEHMAFLPNSKINMIHSAEFESISSYDEEKDDEIDDHMEDEYNEDLLPGDQSEVSNDLKTLSSIQHALRESSDDTNGSRWSQVRKGTKIMVQVVKEGLGSKGPTLSPFPCLRSRFWILVSRGNKVGVSKKITGIERTRLKGITKLLRPPGFTLTARTVAAGHSWEELQKDLDRLLSTWKGIIEHAQSAALAAEEGVEGAVPVMLHRSKGQALSVVQDDFNEKVKRLVVDSPRTYHEVTNYLQEVAPELCNRVDLYEKRTPIFDEYKIEKEIDNILCKRVPLHNGGSLVIEQTEALVSIDVNGGHSMFGQGTSQEKAILEVNLEAAKQIARELRLRDIGGIIVVDFIDMTDDTNKKLVFEEMKKAVEKDR

SEQ ID NO: 45464 - protein, 735 aa, Oryza sativa
MDESRKRAASTANAKSSSLGEDFGNDFLSSWKLPKSGNDTIDFDVESVPKNSKKFSFDNLDDFGLDGAFDKLSSFKMGMSDLDFSGPLKKKVKPNNSNGNDLSEGIKGTEKDNFSFSFDFNELGKFNLDANLGIEENGMSKFVEKVNPVSSEGDKDPRKGLSVKGSDVLGGNISKEQKQTHDACTLRPTHLGSFSPARMDQNKVDLLSTDTHEEKSNETHPSRAAVNKPSQNLPCSSTPGEDPTHVTTTAVAENCREAPLVELSKVHISRGNNDSGQSVSSQFMNTSTTCPSISRKLTAQSDSQNDQNEIVGESACLNAQSPDNQRFRGTSMKLLKKTSCETKKAEKGTSGPKSLSSSMQRDMRNVKPASLNEAGSLSLPPQSSIVKASRPPQLTSETTLNQLSSANNMVKKMNTHSTELKRESTQANARSERPKIASSKTFCKPALHELLTTSMNAKDHKNSKLRLESPSTGNVSTLNAPSSPAHSNGHKTVASRSLLGSTNVFDAGKGTPKADNRPLSQLKAAKITKAGTISSKSDLLLEKDMMETSGRKGSPVTTSNNPKSYGEGKYVLPSPSMMQKTPKESASDPKAPAMLKHIMKSPAVRTSPETVSELGNKTIPGSGTPKARMDNAIASAISCEMGEISELELPALLENDVNVQKAEACRKELEDLCISLKRKHEEAKELAVRAIVNNNTMLMLNHPMFEDKICALQKFASNLRSKKVLFEDISAIDAH

SEQ ID NO: 45465 - protein, 215 aa, Oryza sativa; identical to SEQ ID NO: 30672

SEQ ID NO: 45466 - protein, 108 aa, Oryza sativa
MPSHAQQSMPFRHDMAMPLSCDSPARNRRRELFSCSRHAMVELAMESSSNNKAAAARPEKGIPSLLLHRECGASFMISPITAVFGLRIWQLIFVREKLHCSVRIYIHN

SEQ ID NO: 45467 - protein, 84 aa, Oryza sativa
MEFLAGGGAAGESRESACRFSSEYNERGVLGEMSRPAPHLQCMCSGECLWILDLRSPQRLGSSVKLHLEGAHLPLFRQNTMHDL

SEQ ID NO: 45468 - protein, 575 aa, Oryza sativa
MSAAFLTLLYTPSVYDHQMQSSSRFVSGWIWDKTIPDPRYVSSLGVQWEDVYKTVENLNDGERKLKVGLLNFNSTEIGSWTQLLPDSDFSIIRLEHAKESITWQTLYPEWIDEEEETEIPSCPSLPDPIFPRGTHFDVVAVKLPCTRAGGWSRDVARLHLQLSAAKVAVTASRGNRGIHVLFVTDCFPIPNLFSCKNLVKHEGNAWMYKPDLKALREKLRLPVGSCELAVPLKAKARLYSVDRRREAYATILHSASEYVCGAITAAQSIRQAGSTRDFVILVDETISNHHRKGLEAAGWKVRIIQRIRNPKAERDAYNEWNYSKFRLWQLTDYDKIIFIDADLLILRNVDFLFAMPEITATGNNATLFNSGVMVIEPSNCTFQLLMDHINEITSYNGGDQGYLNEIFTWWHRIPKHMNFLKHFWEGDEEEVKVKKTRLFGADPPILYVLHYLGLKPWLCFRDYDCNWNNPILREFASDVAHARWWKVHDKMPKKLQHYCLLRSRQKAGLEWDRRQAEKANFTDGHWRRNITDPRLKTCFEKFCFWESMLWHWGESKNSTKENPVPATPTASLTSS

SEQ ID NO: 45469 - protein, 298 aa, Oryza sativa
MLEVKVSSAVVAIENKPGGILTSRDILMRVIAQNLPPESTTVEKVMTQTPECATVDTPILDALHTMHDGKFLHLPVLDKDGNVVTVVDVLHITHAAIATVGNSAGSGSEATSAMMQRFWDSAMSIGPLDDDDDSRSEGSTKVASEATDVGRSAFYPASGLSNTFGFKIQDKQGRMHRFNCETSSLTELITSILQRLGDDIDRKNLPQILYEDEDHDKVILSSDSDLVAAVDHARQIGWKSLKLHLDYAGVGRRKRGGGGTSDFEYAGKDAWASAYSAVAAGAALVAGLGVMAYLKRAG

SEQ ID NO: 45470 - protein, 507 aa, Oryza sativa
MERPGDEHDDCRTAPLLEPKHAHGEGSNNDKQEEDEEEVGSLGPRVLVESKKLWVVAGPSICARFSTFGVTVISQAFIGHIGATELAGYALVSTVLMRFSGGILLGMASALETLCGQSYGAKQYHMLGIYLQRSWIVLLCCAVLLLPIYLFTTPLLIFLGQDPKIAAMAGTTSLWYIPVMISNVGNFTLQMYLQAQSKNMIVTYLAMLNLGLHLFLSWLLTVQFHLGLAGVMGSMVIAYWIPVFGQLAFVFFGGCPLTWTGFSSAAFTELGAIVKLSLSSGVMLCVELWYNTILVLLTGYMKNAEIALDALSICLNINGWEMMISIGFLSATGVRVANELGAGSARRAKFAIFNVVTTSFSIGFMLFVLFLIFRGRLAYIFTESKVVADAVAELSPLLAFSILLNSIQPVLSGVAVGSGWQSVVAYVNVTSYYLFGIPIGVILGYVLGFQVKGIWIGMLLGTLVQTIVLLFITLRTDWEKQVEIARQRLNRWSMDENGRQQNPGENP

SEQ ID NO: 45471 - protein, 439 aa, Oryza sativa
MRRPTIEEKLATYSMFQVRQGSTVPITAREWLDSVMAGVGSISLAVRGAGSISAAAGAGDGACSSSVAVAGTGSISAAGAADGPSSSSVAVAGTGLISAAGAADGACSSSVAVAGTGSISAARAGDGPFSSSVAGAGAGSISATAGAGHGAGSSSVAAAGSGEAPARRKRTPGRWRRIPRTLPHPCLRKRPMTWEELLADSLDMSDEVHCFREEDKPAFRKSKAQMARFYQRMIDIENNKIKQIFRPRVPSDTHEQHLTAEEMEAEFAGKKVSSQACHFANLAINHYNNIEENIVKIELCTVLLSNCFHEICGSTYAHVNFTARAEDDDQAKKRLYFAELKLNPDLLAKRRERFVELSLDPNIVGCADDIEPMCVVSIHNLQGSCFGGCHEINRRIDYVMIRNQDYERCHACSDRIKHPYGTEFIAGHDSSKIPYYTAG

SEQ ID NO: 45472 - protein, 585 aa, Oryza sativa
MDRIFARFFCFLLIAAVSHAADLSPEQYWRSILPNTPMPSSISQLLNYPYLPAVRLPRRTDAGQRNYKSSVSHVAERSHRVDDGQRNYKLSALPATNELPHRTDAGQRNYKSSVSPVAELPHRVDDGQRNYKLSALPATNELPHRTDAGQRNYKSSVSPMAELSHRVDDGQRNYKLSALPATNELPHHTDAGQRNYKSSVSPVAELPHRVDDGQRNYKLSALPATNELPHRTDAGQRNYKSSVSPVAELPHRVDDGQRNYKLSALPATNELPHRIDAGQRNYKSSVSPMAELPHRADDGQRNYKLSVSPAAELPHRVDDGQRNYKLSVLPATELVHYTDGQRNYKSSVLETPELLKDPDMALFFLEKNLQQGKKINNALHFANLLATTNSKFLPRGKADSIPFSSKELPEILDRFGVRPGSDDAAEMSATLQDCELPANKGEKKACATSLESIVDFVTSSFGASDVDAASTVVLSKAVESSSLAQDYTVSGVRRMAGTGQLIACHPESYPYAVFMCHLTEATTRAYKASLVGKDGTAVEAVAVCHTDTSDWNPEHAAFHVLGVKPGTVPVCHFMQPDTVVWTRRG

SEQ ID NO: 45473 - protein, 417 aa, Oryza sativa
MAEGAKFHGIVGAVGAHDVGGNFCDMGYYQKLGEGSNMSIDSLNSMQTSIYGGSVAMSVDNSSVASSDSRTGMLKHPGLRGPVIVSSYSVGNSIFRPGRVSHALSDDALAQALMDSRFPTETLKDYEEWTIDLGKLHIGMPFAQGAFGKLYRGTYNGGDVAIKLLERPEADPEKAQLLEQQFVQEVMMLATLRHSNIVKFVGACRKPMVWCIVTEYAKGGSVRNFLNRRQNRSVPLKLAVKQALDVARGMAYVHGLGFIHRDLKSDNLLISGDKSIKIADFGVARIEVKTEGMTPETGTYRWMAPEVIQHRPYDQKVDVYSFGIVLWELVTGNLPFANMTAVQAAFAVVNNGVRPAIPHDCLPALAEIMTRCWDANPDARPPFTEVVRMLEQVEMEVVNTVRRARFRCCISQPMTLD

SEQ ID NO: 45474 - protein, 741 aa, Oryza sativa
MFFVVIDDMQREYWNSSFRNAFPSDTGLRSIVIVTTAIQSIANACSSRNSHVYVMRTLNEEHSRQLFLKEASWKDYPPGSEAILKKCDGLPLALVTTAQFLQSRCQQQPLGCAKLCDNLGKHLVTEDTLARMKRVLVHHYSSLPGHVIKACLLYLGIFPSGHPVRRKTLIRRWSAEGFVGADHHRSSLDVAIDSFEELVNRSIIQPVDVSSNTEVKTCQTHGMMLEFILHKSICDNFITFLYGQARLPDKIRCVSIQQNSGSKTRVDSDIDLSLVRSLTIFGKAHKSFLNFSRYKLLRVLDLEECDELEDEHLKKICKRLLLKYLSLGRGITVLPKEIAKLKFLETLDLRRTVIKFLPIQVLELPCLIHLFGVFKIQDADQQMRKLKSFLTEKSKLETLAGFVTDRCQTFPQLMKHMTNLAKVKIWCENTADASSSSNSDVHLSEAIQEFIQRGTDVNDVRSLSLDVGECSQEFLNFSLGDSCYLSSLKLKGNKICRLPPFVTSLAVLTDLCLSSSDRLSSDVLAALSNVRALRYLKLIARHLDRFVIERGDLQSLRRLHIVVVSMTTMSKQQPEIQEGALPNLESFHLLCKDLDGPCGHGGIRIDSLGLGCLREIVLDDGVRETAKEQWKDAARRHPKRPKVVFVGAGDVVDRRRVGAAAAAAPAAGESNSAMAPAAVASVVAAGDVKRPAREESDISAALASLPAKMARLLGAASIHQSSGTQGELSCGGNGASQRHFS

SEQ ID NO: 45475 - protein, 987 aa, Oryza sativa
MHGFDRPIYTNVTYPFTMNPPFVPNDNPTGCYRTVFRIPKEWKGRRILLHFEAVDSAFFAWVNGVPVGYSQDSRLPAEFEITDFCHPCDSEKENVLAVQVMRWSDGSYLEDQDHWWLSGIHRDVLLVSKPQIFITDYFFKATLDEGFRVADIEVEVEIDSQKQDREHVSTLSIEATLYDNYGPADVLTSDMSAASVANLKLKPASRPKHCYGFHGYVLGGKVENPKLWSSEHPNLYTLVVVLKDSNGKLIECESCQVGIRNVVLAHKQMLVNGCPVVIRGVNRHEHHPRVGKTNLEACMIKDLVLMRQNNINAVRNSHYPQHPRWYELCDIFGLYVIDEANIETHGFDESSHFKHPTLEPFWASAMLDRVVGMVERDKNHACIIVWSLGNESSYGPNHSAMSGWIRGKDPTRPIHYEGGGSRTSSTDIVCPMYMRVWDILKIAQDPSENRPLILCEYSHAMGNSNGNIDAYWMAIDNTVGLQGGFIWDWVDQGLLKEDADGSKNWAYGGDFGDTPNDLNFCLNGIVWPDRTIHPAVHEVKYLYQPIKITMMDNMLKIENVHFFETTEALDFSWLLQGDGCALGSGSLNVPSIAPQSTHLINMKSSPWFTIWSTCVVKEIFLSINVKLRYQTQWAKDGHILASAQICLPPKKGFVPHAIALPRSSLVSERVGDHVLISKSNAWQIKVNSISGTIDSWKVNNIELMSKGIHPCFWRTPTDNDKGGFYTKPYVSRWREASLDNISFYSSQFSLKELPDQTVEISTIYYGLPGNQPKPDETSLSDESESVLFRVQMRGRIYDSGDVILDYEVSPKNDLPPLPRVGVVFNADKSLSRAKWYGRGPFECYPDRKAAAHVGVYESGVDELHVPYIVPGECGGRADVRWVALQDADGFGLFASAYGESPPMQVSASYYGAAELDRATHNHKLVKGDDIEVHLDHKHMGLGGDDSWSPCVHEQYLLPPARYAFSVRLCPLLPSSSCHDIYHSQLPC

SEQ ID NO: 45476 - protein, 227 aa, Oryza sativa; identical to SEQ ID NO: 32151

SEQ ID NO: 45477 - protein, 346 aa, Oryza sativa
MEEAGREKDRSVVVVVEDLGTATKDTVNPSAKSTRRYPLLSWTTILALIALVGVYIFSVSLKQNGMLLGLKQTDMIEKEREKLCQDPSIPVTEIPYVHYPTPDTYSRKECACTPVRFFAILSMQRSGSGWIETLLNSHENISSNGEIFSIKERRSNITSITKTLDKLYNLDWLSSAAKNECTAAVGLKWMLNQGLVQHHEEVVEYFNRRGVSAIFLLRRNTLQRYVSVLANAHDSKAKQINGTHKSHVHSEREAQILAQFKPEIDTKKLIADLKKSDKLAADALLYFKKTRHIILYYEDVVSNDTVSPIALYILVRRLNEHLSLSLSLSKQLFFSFFRSSWMSWIF

SEQ ID NO: 45478 - protein, 286 aa, Oryza sativa
MAFSHLLHALLVAAALPLLLLPRAADAGEIGVCYGRDANNLIDPPAAVSLLKANGISAVRIFDADQTVLDAMANTGIKVMVAIPNADLAAAGQDLRSATDWVTNNVVPYRSRGTLINGVAVGNEVFRQRPELAGMLVSAMRNLHKALENLNLANDVKVSTPIAFDALKQSSPPSAGEFKDEIAQSVMKPMIDFLKQTGSYFMVNLYPYFAYVAQPDTKVAHATYAFNDFYQTTGRASGSCDFAGAASIVNQQPKIGNCVLPPNNAGTEQTAIEDQSTANLPATAWQ

SEQ ID NO: 45479 - protein, 352 aa, Oryza sativa; identical to SEQ ID NO: 37260

SEQ ID NO: 45480 - protein, 390 aa, Oryza sativa
MAVSSLAFARVLVPPSPRTALASACSHSIKMCASSASPSESKKTVWVWTTNRQVMTAAVERGWSTFLFGSKDLGKDWSSTARINPLFIDGLEIFDEKKQKIAVISEVSSPGELELIQPDNVEVENIVIDFRGGWQVIPAENIVAAFQGCRGTVLAVSTNSTEAQVFLEALEQGLDGVILKVEDMDDIIKLKDYFDRRNEAKSQLMLTKATVSKVEVVGMGDRVCVDLCSMMRPGEGLLVGSYARGMFLVHSECLETNYIASRPFRVNAGPVHAYVAVPGGRTSYLSELQSGREVIVVDQNGLWRTAIVGRVKIESRPLILVEAKENGGDDTYSIFLQNAETVALITPEKGSSGRTAIPVTSLKVGDEVLVRKQGGARHTGIEIQEFIVEK

SEQ ID NO: 45481 - protein, 94 aa, Oryza sativa
MSSNFKATRGTPCSSSLHYFSILHASVSESLRGHQGQKSFLKPALFQYLRGVKYPVLEFRVKMRPAKSLESKCGLLRASKNFLHFGNGSLLVGY

SEQ ID NO: 45482 - protein, 222 aa, Oryza sativa
MASPRLLPWAGTAGITSPATATEKTSSGRLLMHLCQPGLQLLATNTSTSGNLVANKKTFPHGIKALADYVHSKGLKLGIYSDAGFKTCAKVQPGSLGHEEQDAKTFASWGVDYLKYDNCNNGDLKPLERYPEMSKALMMAGRPIYFSLCEWGDMHPAKWGAAYGNSWRTTNDIADTWESMVSRADENEVWARHNSSRVHAVMQIRIPRMCQPMSAPCHCPQL

SEQ ID NO: 45483 - protein, 249 aa, Oryza sativa
MPRFHSPTLPSSKGEEVRIQGDEFWHMTRVLRLGINDRVELFDGAGGLVEGSIQKVDKGGSDVKLLEDARLIAPDGIQWHVYAAFGTLKGGRADWLVEKCTELGACSVTPLLTERCHTIAENRVDRLQRLVLAAVKQCQRIHGMLLNPPIQIADLQPVVSQSKLAFVASAESPPLLSTLPKSCNEESGLLIVGPEGDFTEEEVNVLKASGAVPVGLGPCRLRVETATISLLSALMLWSDAHRQETLKCR

SEQ ID NO: 45484 - protein, 819 aa, Oryza sativa
MQKLVRWLADGEPKLKVASIVGSGGVGKTTLATEFYRLHGRRLDAPFDCRAFVRTPRKPDMTKILTDMLSQLRPQHQHQSSDVWEVDRLLETIRTHLQDKRYFIIIEDLWASSMWDIVSRGLPDNNSCSRILITTEIEPVALACCGYNSEHIIKIDPLGDDVSSQLFFSGVVGQGNEFPGHLTEVSHDMIKKCGGLPLAITITARHFKSQLLDGMQQWNHIQKSLTTSNLKKNPTLQGMRQVLNLIYNNLPHCLKACLLYLSIYKEDYIIRKANLVRQWMAEGFINSIENKVMEEVAGNYFDELVGRGLVQPVDVNCKNEVLSCVVHHMVLNFIRCKSIEENFSITLDHSQTTVRHADKVRRLSLHFSNAHDTTPLAGLRLSQVRSMAFFGQVKCMPSIADYRLLRVLILCFWADQEKTSYDLTSISELLQLRYLKITGNITVKLPEKIQGLQHLQTLEADARATAVLLDIVHTQCLLHLRLVLLDLLPHCHRYIFTSIPKWTGKLNNLRILNIAVMQISQDDLDTLKGLGSLTALSLLVRTAPAQRIVAANEGFGSLKYFMFVCTAPCMTFVEGAMPSVQRLNLRFNANEFKQYDSKETGLEHLVALAEISARIGGTDDDESNKTEVESALRTAIRKHPTPSTLMVDIQWVDWIFGAEGRDLDEDLAQQDDHGFCMLPESSSRLQSREISIEEDMPTGAEGTVIVPHTMEQFALHMSQAKQSHKLVVIQFTTSRCPASRYIAPAFTEYAKEFAGAVFIKVNVDSDELESVTDWYDIEGIVPTFFFVKDGEKIDKIPGANKELLRAKIRRHTASPYFLR

SEQ ID NO: 45485 - protein, 575 aa, Oryza sativa
MAEKEGNLDAVLKEAVDLENIPLEEVFENLRCSREGLTTQQAQQRLEIFGPNKLEEKEESKFLKFLGFMWNPLSWVMEAAAIMAIALANGGGKPPDWQDFVGIITLLVINSTISFIEENNAGNAAAALMARLAPKAKVLRDGRWTEEEAAILVPGDIVSIKLGDIIPADARLLEGDPLKIDQSALTGESLPVTKGPGDGVYSGSTVKQGEIEAIVIATGVHTFFGKAAHLVDSTNQVGHFQKVLTAIGNFCICSIAVGMFVEIIVMYPIQHRAYRPGIDNLLVLLIGGIPIAMPTVLSVTMAIGSHRLSQQGAITKRMTAIEEMAGMDVLCSDKTGTLTLNKLTVDKNLIDVFERGITQDQVILMAARASRTENQDAIDTAIVGMLADPKEARAGIQEVHFLPFNPTDKRTALTYIDGDGKMYRVSKGAPEQILHLAHNKPEIERRVHAVIDKFAERGLRSLAVAYQEVPEGTKESPGGPWHFVGLMPLFDPPRHDSAETIRRALNLGVNVKMITGDQLAIGKETGRRLGMGTNMYPSSALLGQNKDESIAALPVDDLIEKADGFVYSQSTSMRL

SEQ ID NO: 45486 - protein, 437 aa, Oryza sativa
MESATEKVRRTPSSCLLLRISDICKVRSVGVAPTVREKPKADGSATGESSEDGGAHLKVHPHHVSDHESVSECSSARCEEAFVERLLDAISGLKLSYVNLQQALVPYDPEEITIADERFTSELQETAGLKDLYVNMNKWRNPMYQCYVGSRIQEQQKLAVELQAGMCKRDSEIVCLRAELDELERKNMELEEKIGQSALQKEGSFAIGMGVSTDMFMELFELSTKSIHDFAKLVVRWMKLSRWNLGNLTSPIDNSVVYDKRSHKNYAVEAYFACMMLMGHKEEYLSLDVFDYVMSFSDPFDALMKAPDSCFGRFCREKYLAILPPSMEDSFFGNLDHRSFVENGGHPRTPFYQAFVTMSRYVWASLTVARSLNPRAEMFYVKGGTEFRSKHMECVPSKITKEGDKVSVGFTVMPGFKIGCTVIRCRVYLSMVNERNF

SEQ ID NO: 45487 - protein, 58 aa, Oryza sativa
MRKEIVIRLQSSEKGHKKAIKVAAAVSGKNSLHTQTHISAKYNKKMALFLSYQEPIVI

SEQ ID NO: 45488 - protein, 302 aa, Oryza sativa
MQPLRPSPAAGGWAGVAGVGPTTVDEASMERSKSFVKALQELKNLRPQLYSASEYCEKSYLHSEQKQMVLENLKDYAVRAVVNAVDHLGTVAYKLTDLFEQQASEVSTVELKVARLNQQILTCQIFTDRAGLRQQKIGGTTFKHHKHYILPSTGHKRTQAARLQTDNGQDSKPKPYPSAKTLSWHLSSENSISTTGAQKYTFTLGDTISSKPASNGSMYLLGKDIPASPMHKPLQPNGNTSFDAKKNVGSKDQPGFMHMSTFNALDKPRGREIQKVPVSTKSMLATLFIKHKSAKTRKASVR

SEQ ID NO: 45489 - protein, 203 aa, Oryza sativa
MAATAASSLSAAAAAARRSFPSRLRLLARRRRLPFSSTASFSAAAPPAAAASFGWEDALRVAADDRRGDESDLSGYSRKVDTCNRGMDKKGEFVAFMVEDQVVGYIHQGFVEHLRDFRDVFTIASGSNGSNNVEHVTLHSSLRTPDERTNAVGSVIRSLGDLIPGIRNELYPITSSYGMPVYFSLERAAAPYFGLWSSYEWVC

SEQ ID NO: 45490 - protein, 240 aa, Oryza sativa
MISCCRFPMLAGNGPSKLLLSRESCCSCVKFPSEDGMIPDNRLFSSVKYCSVSSLPMLSGIGPLKRLLERPNLISLRKLLIPSGILPEILLNPISRSSSCADRLVIEFGSAPPSLLFCIVTARSLVQFVKNVMNLQSLTLVAFSWFLCSIRYFRQSIPISGGMIPVKLLEERSMERMLVAFAIEGGMLPVKWFKATMKYWIFGRPLPKSEGNLPCNSFSCRPMWISEERLRSVLGMVPDR

SEQ ID NO: 45491 - protein, 329 aa, Oryza sativa
MVQMSIQRAATISPPCSLSLPFDCVSGTSRRFASCRSQYSCFAYSERLSPNVLKTNSVVDPSEPKILDASSSASRTGQYSATTHLSGTIGVMGISASSSLRFLQKLVHWSTRDGEEAPPFLVCNDPLLKKELMSSQNSQRPSDCNTALGKLRLRRLLLEKSGVCCIAMPCNTLHAYHDEISQGCSVPSLHIGDCVVKELKSANLKPVEYGSNVCVGILCTDNTLNAKCYLNKLESQGFEVLLPDKASLEHTVLPAIGAFRRGDMEGARNLLRISLQVMFVRAVNTIILASDDFVGILPDDDPLLKKCIDPMDALVRETIMCARTDSLRP

SEQ ID NO: 45492 - protein, 1257 aa, Oryza sativa
MGSTEKFRFCIDRGGTFTDIYAEVPGRREGYVMKLLSVDPSNYDDAPIEGIRRILQEFSGERIPRSSKIPTGKIDWIRMGTTVATNALLERKGERIALCVTRGFRDLLQIGNQARPNIFDLKVSKPSNLYEEVVEVDERVELVGGGDGERDDGLSVKGISGELVRVAKPVDVEALKPLLKGLLDKGIRCLAVVLMHSYTYPKHELLIEKLSLEMGFKHVSLSSSLTPMVRAVPRGLTASVDAYLTPVIKEYLSGFMSRFEGGGEQVNVLFMQSDGGLAPERRFSGHKAVLSGPAGGVVGYSQTLFQLETSKPLIGFDMGGTSTDVSRYDGSYEQVLETQIAGAIIQAPQLDINTVAAGGGSKLKFQFGAFKVGPDSVGAHPGPVCYRKGGELAITDANLILGTVIPEYFPSIFGPNEDLPLDYDATKKAFEILAVEINSHRKSQDPSAKDMTVEEIALGFVNVANEAMCRPIRQLTEMKGHDTKNHALACFGGAGPQHACAMARSLGMSELLIHRYCGILSAYGMGLADVIEDLQEPYSAIYNVDSAAEASRRVDLLVKQVKEKLIEQGFGEDSIRTHSYLNLRYEGTDTAIMVKQPERESGSDYADEFVKLFQQEYGFKLLNRKILICDVRVQGVGATNILQPHELTPVSTKPVPESSCRIYFSYGWQETPLYKLQNLGYGHVLKGPAVIMNGNSTVIVEKDCKAIITKYGNIKIEISAAPSSVEVSETVADVVQLSIFNHRFMGIAEQMGRTLQRTSISTNIKERLDFSCALFGPDGGLVANAPHVPVHLGAMSSTVRWQLKYWGDNLHEGDVLVTNHPCSGGSHLPDITVVTPVFNEGKVIFFVASRGHHAEIGGITPGSMPPFSKSIWEEGAAIKAFKLVERGVFQEEGIIHLLQSPSYDELTNHKIPGTRKIQDNLSDLHAQVAANQRGITLIKELINQYGLITVQSYMNHVQNNAEEAVREMLKVVASRVEKENGSCVIEDEDYMDDGSVLHLKLTLDSSKGEATFDFEGTSPEVYGNWNAPEAVTAAAVIYCLRCLVDVDIPLNQGCLAPVKILIPKGSFLSPSDKAAVVGGNVLTSQRVTDVVLMAFQACACSQGCMNNLTFGDDTFGYYETIGGGSGAGASWDGTSGVQCHMTNTRMTDPEIFEQRYPVLLHRFSIRENSGGSGFHRGGDGLVREIEFCQPVVVSILSERGVHAPRGLKGGRNGARGANYLVKKDGRRVYLGGKNTVMVNAGEILQILTPGGGGFGSP

SEQ ID NO: 45493 - protein, 512 aa, Oryza sativa
MADQLVHLPQQLLVLLLFIAPFFFFFLIRSIRRRDGGSVRLPPSPWALPVIGHLHHLMGALPPQHAMRNIALRHGPLVRLRLGGLQVILASSVDAAREVMRTHDLAFATRPSTRVMQLVFPEGSQGIVFTPYGDSWRNLRKICTVELLSAKRVQSFRPIREEEVGRLLRAVAAASPARRAVNLSELISAYSADSTMRALIGSRFKDRDKFLMLLERGVKLFATPSLPDLYPSSRLAELISRRPRQMRRHRDEVYEFLDIIIKEHQENRSSSDDQEDLDLVDVLLRIQRKGDFPLSTDNIKTTIGDLFNGGSETTATTLKWIMAELIRNPRVMQKAQDEVRQVLGKHHKVTEEALRNLSYLHLVIKEGLRLHPPGLPLLLRESRTTSQVLGFHVPQGTMILVNMWAISRDPMYWDQAEEFIPERFEHVNIDYYGTDVKYMPFGVGRRICPGIAFGLVNLELVLASLLYHFNWELPDETELGNLDMKEEMGAIARRLHDLSLVPVIRHPLPVDM

SEQ ID NO: 45494 - protein, 234 aa, Oryza sativa
MSSAQDPFYIVREEIQDSIDKLQTTFHRWEKTPSNTGEHVHLTKELHTSCESIEWQVDELEKTILVASRDPAYYGLDEVELSRRRNWIGSARNQVAAVRRSVEKGKSNSTFSAHQDMGTSRSNHYTAQDNDDFIASESDRQLLLMRQQDEELDELSESVQRIGGVGLTIHEELSGQERILNDLSLEMETTSNRLDFVQKRVAMVMKKAGIKGQIMLILFLVVLFIILFVLVFLT

SEQ ID NO: 45495 - protein, 391 aa, Oryza sativa
MAITDQATALRQAGVPVIGLAAGEPDFDTPHVIAEAGMNAIKDGYTRYTPNAGTLELRKAICNKLQEENGISYSPDQVLVSNGAKQCITQAVLAVCSPGDEVLIPAPYWVSYPEMATLAGATPVILPTSISENFLLRPELLASKINEKSRLLILCSPSNPTGSVYPKELLEEIADIVKKYPRLLVLSDEIYEHIIYQPAKHTSFASLPGMWDRTLTVNGFSKAFAMTGWRLGYLAAPKHFVAACGKIQSQFTSGASSISQKAGLAALNLGYAGGEAVSTMVKAFQERRDYLVKSFKELPGVKISEPQGAFYLFIDFSYYGSEVEGFGTIKDSESLCMFLLEKAQVALVPGDAFGDDKCIRMSYAAALSTLQTAMEKIKEAVALIKPRVAAK

SEQ ID NO: 45496 - protein, 914 aa, Oryza sativa
MVEIVTGAISTLLPKLGEVLRKEYQLHKTVRGEIMFLMAELERMQAAILEISESDEPNKLVKLWVRDVRELSYDIEDTIDSFMVHFDKHRSFRGFIDRSLNLLTKFKIRHKIGANIRDIKSHIKEVSELRDKYKVDGVTVARPVGHQTVDSLRLQSALYKNVSELVGTKKKTDDLVSRLMEMHDDVESKRNLKVVSIVGFGGLGKTTLASVVYHKLKLEFDCGAFVSISLHPNMVGVFKNMLRQLDEKTYLNINGETWEEVQLIDELRKFLQNKRYIVVIDDIWSKFVWKTIKYVLVDNQLGSRIITTTRAVDVAEQVGGAYKLEPLSPDDSIKLFNQIIFHSEDKCHPYHLSEVSQKILKKCGGIPLAIITIASMLASKKGNQHEYWYKVYHSMGSGLEDSPDLRNMRRILSISYYDLPPHLKTCLLYLSSYPEDYLSTRETLIWKWVGEGFVETKQGSSFYQVGGEYIYELMNKGMIQPACDIVNDYPEYYRVHDMVLDLITSLSNEEHFLTRLDGHPSLSLQKKIRRLSIQTNEEEYVKQLATMSLCHLRSLTVCGQGLSSLLPTLPSMCPFLRVLDFSGCDKVENQHCKDICKLFHLRYLRLYGTSISELPKEIANLQFLQVLDISITNIKELPPTFIQLKQLVYLHFPNMMRLPDGLGSLNRLQEIPNVITIDSPTMLHDLGCLSKLRRLTIYFDKWDESYEKPFIQCLSNLVSLELLEVDGTLGSTCGSLSPGPQRLQSIDMSFCTLTAFPGWMSSLCSLSSLHLILLTLGEDELQVLGSIPHLNDLYISISVNKAIHDKNKRLVIGKGCPFLCLTQFSLASSSMYVGFAQGAMQKVRDLSLYFGVSETMGQFGDFDFGLENLSSLEHVDVWMRCFGSKTGEADDAEIAIKRSLQLNPNNPTMELEKV

SEQ ID NO: 45497 - protein, 376 aa, Oryza sativa
MATSHLLAAASSTAASSATFRPPLLSLRSPPPSSLRLNRRRHFQVVRAAETDKETKANAPEKAPAGGSSFNQLLGIKGAKQENDIWKIRLQLTKPVTWPPLVWGVLCGAAASGNFHWTVEDVAKSIVCMIMSGPCLTGYTQTINDWYDRDIDAINEPYRPIPSGAISENEVITQIWALLLAGLGLGALLDVWAGHDFPIIFYLAVGGSLLSYIYSAPPLKLKQNGWIGNFALGASYIGLPWWAGQALFGTLTPDIVVLTSLYSIAGLGIAIVNDFKSVEGDRALGLQSLPVAFGMETAKWICVGAIDITQLSVAGYLFSSGKPYYALALLGLTIPQVVFQFQYFLKDPVKYDVKYQASAQPFFVLGLLVTALATSH

SEQ ID NO: 45498 - protein, 883 aa, Oryza sativa
MMQQDSKRKRSVLPETATLAPGSKRRRRKSVPSRHAAAMLPDELLTEVCLRLPVKSILRFRAACRSWDAMLSSEEFGQLYAARAEEMSSAPKLLFVSPTANFNSTAVYKCSPSKPTDDLLLTLDDVRGNYVEVTPAPCHGLSLLYDGIAPAYYVMNATTRAVTRLPPFRDVAFATAGLGCDARTKKYKVVRFFEGNLFEKEFLKCEIYTLGGDEGDIWRPAAGGVPFRFYSFARSAISNAVMNKLQPLFFNGYLHWLINPLHHVKLPRASILSFSLTDETFRWIRSPPFVASGVHLVELDGNLCMVRDLRDRSTAVCKLEIWKLKDYNSGGWSLDHRIDLTGQLPRDLLEPQIVKVIGSAGSCRSGTKIIIATSKHKVCSYDPVSRTLETITSISETCTSYQNEKSDIRFSLFKECLTPVHKTREGIAFATPLSKATKEILLRLPAESVLKFKPVCKQWLGLIKSERFIRAYFAHKNMDKRPKIMLVGKGSGKSLFNFVPLSKWLQEASNQGTLFLDTKVVCSKPCRGLNLMSFVEEDYLFNPCTGYHRVYWNREWHQHQPWKMPTGCREQEDNPFAVGNKNVGLGFSQVIQDHVVVGIFYDRKDYNSREYSLTCSLWSCGSGYFEQLPQPPLPVNDMPPVSVDGVLYWMSEPRLGQSYERAIVSFDIAAKIFEVIPCPSSIAMWDPRSRCHAFVVELLGKLCAVLSNSVADELDIWKWDHGLWTRAYTINLKFWPDYSLATNVVVPMAVDLTDGRILLNTGRKLGLYNPFDQTIENLLALDQVSLATPKVQQQRTGGHLKCHITRCEDVPRKFSPWKLSMAPCENFATPPSASSGKNLLSSRHQYVKALNSVSPKVMPVVPMLYEESLTYYPFAARARVLFS

SEQ ID NO: 45499 - protein, 461 aa, Oryza sativa
MPSGSATQFRYTQTPSKVLHLRNMPWECTEEELVELCKPFGRVVNTMCNVGANRNQAFVEFADQNQAISMVSYYASSSEPAQVRGKTVYIQYSNRQEITNNKGTGDSSGNVLLVTFEGVQPNDISIDVIHLVFSAFGFVHKIATFEKAAGFQALIQYTDAPTALEAKNSLDGRSIPRYLLPEHVPTCHLRITFSAHKDLNIKFQSHRSRDYTNPYLPVNPTAIEGIAQPTLGPDGKIKEPESNVLLASIENMQYAVTVDVLHTVFSAFGTVQKIAMFEKNGGMQALIQYPDITTAAVAKQALEGHCIYDGGYCKLHLSYSRHTDLNVKAHDERSRDYTVSSDPSAQMQAAAQAPGPSTPGVAWQNTAPSASFYGSTAAATPVGQVPAWNPNMQAGAFGSASSAYPTQPMMPGSVPHYPGIGSSSGALPVSFQASHQMPQYGVPPAAPHHAPPAGQPMYFPK

SEQ ID NO: 45500 - protein, 526 aa, Oryza sativa
MDELSFGSLCMVAMATLALALALMVMGAHRRGGEKGATTGAKNLPPGPWNLPVIGSLHHLLGASPPHRALLRLSRRHGPLMLVRLGEVPTVIVSGSDAAMEVLKARDPAFADRARSTTVDAVSFGGKGVIFAPYGEHWRHARRVCLAELLSARQVRRLESIRQEEVSRLVDSIIAGSSNAAAVDMTRALAALTNDVIARAVFGGKCARQEEYRRELGVLTTLVAGYSMVDLFPSSRVVRWLSRRTERRLRRSHAEMARIVGSIIEERKEKKGSDAGVGAKDEDDDLLGVLLRLQEEDGLTSPLTAEVIAALVTDIFGAATDTTASTLEWIMVELMRNPRAMDKAQQEVRNTLGHEKGKLIGIDISELHYLCMVIKETLRLHPASALILRQSRENCRVMGYDIPQATPVLINTFAVARDPKYWDNAEEFKPERFENSGADIRTSIAHLGFIPFGAGCRQCPGALLATTTLELTLANLLYHFDWALPDGVSPKSLDMSEVMGITLHRRSSLHLHTTLTRSGFFSHSGR

SEQ ID NO: 45501 - protein, 653 aa, Oryza sativa
MAALIQLWNDWELQVLVLLSFMLQVFVFFSGGLRQRSTNSSLRILVWLAYLVADFIAVYALGQLSRQKTDASEAGQPHKFAFFWTPFLLIHLGGQDTITAFSVEDNELWLRHLLNLLVQVCLALYVFWKSAAGNQFVVSAIFAFISGIIKYGERTWALKSASQKSLRRSTDGGVVGQFPELEDYQELGYKTMVMFALSSSPVVRNLLVGRKIDQMEERVRHAFSGRLYSQVSENAQLVFKILEIELGMMYDNLYTKARVIRTWTGAILRFITCISLMVAFVLFLTGNKKWHHSRVDVAITYALFIGALCLEVCAIFFMVMMSPWTWASLQYWKYHRLADAAWYVFKSLQTESMSWWSNSLGQYNFLSSCFSDNVFGKVMSLVGAKEFWRNFRYSQRVGVKAEMKKLVFEAKCLAEIFGASQTSSVDADPNSGVGSALDIILREQFEVAILSLHVYTDIFLHRCMNPTSADSCDATRERRHLMDACRTISEYMCYLLVVHPEMLPVSGSVRDVLDKASETVAKVSSGAAASKGRVSVVLEKLATDRDLNDLSDPITLAGFVFRGNKEEAVHCHESLQVLARAWVGVLLYAAGKSRGENHARQLSMGGEFLSFVWLHMAHCSLGDMGTFEVELVRPSAVNEGGRKMFVWGYQRPR

SEQ ID NO: 45502 - protein, 140 aa, Oryza sativa
MAAAAAAAKRKPVFVKVDQLKPGTGGHTLVAKVLSSKTVVQKGRAAAGAGPAARPTRIAECLIGDETGCILFTARNEQVDLMKADSTVIIRNAKIDMFKGSMRLAVDKWGRIEVTEPASFNVKEDNNLSLVEYELVNVEG

SEQ ID NO: 45503 - protein, 178 aa, Oryza sativa
MGFTDEIVQVDVLERHLLAGLSPDDYKGISEDEILYDASFEATEDKFVKYQITWWILLSVLLILAWGVGLLMLLYLPIWIYVCRKDFRSRKLCLTPHAIVYKVTRPATFPCFGVLRNEKHVVLHSVSDIVVEQGYLQSLFGIYSIRFENIGVRKPSSDDIKITGISHPHDFRLFLSIF

SEQ ID NO: 45504 - protein, 604 aa, Oryza sativa
MTATSNAAAGAATLMPLLIHLLRGASDLASVSATHAKLLKLGAASSVASSNHLLAAYGRCGCTALARHLFDGMRDRNVVSWTALMSGYASAGRPRAAVALLRAMARSGVPPNAFTFSTAASSCARLADAGLGRQVHARAEVAGYACDSVVSTALVDMYGKAGRVGDARAVFDAMPVTARNAVSWASMLSVYAQNALGHDAIQLFAELRTNGEDMAPNHFMLSSVVNACAGVGRLGIGKCIHGMVLHHGHEDNDVVAVALVDMYSKCGIYEYSKKVFDRINQPSVIPYTSIIVATAKYGLGRCALALFSDMVGRGVQPNSVTLLGVLHACSHSGLVDTGLQLLRSMRSEYGIDPCASHYTCAVDMLGRAGQLEAAFELADEAQVNGNDALMLWSSLLSACRNHKRLDLATMAGQKVSEFTQDVAGALVVMSNAYASAGQADDAAAVWSNMRRRGIRKDPGCSWIEIKDISYVFYAGMVSPAGSRAGEVMLLLDELEGKMREKGYKGRIGSARVLDADEEEDGNHHHQEGRGVMVGVHSELLALGLGLLVIPKGMAIRVMKNLRMCRDCHEAFKVISAIVEREFVVRDLNRFHHFRMGSCSCNDYW

SEQ ID NO: 45505 - protein, 74 aa, Oryza sativa
MLMCCSAVAVMKWESLLPNDTFLIVASSDGAFEKMTMQDVCDLMLYVKLGVKQELGSFAVTQQNLADYVVDLFL

SEQ ID NO: 45506 - protein, 90 aa, Oryza sativa
MWPAMIYFGCAAIHCRVELTPAVQRLVASVFLASLQLSLGKTELSCSRKSFLPADLGKFAKLQVTLQTSRSVITVCASEKWTSSESGRLI

SEQ ID NO: 45507 - protein, 407 aa, Oryza sativa
MARAVHDRLPFLATPPPAPARGRNPPLAEMLRLVGAATVDSDAAAAAADEEANALSLPLPRGGVTPPPPGGRTIQFRLAFTSLTYSVRAARRARPGGGDGGGGFRLPLQNRCDRVTAAAPDAHSSRARVLLDGITGEAREGEILAVMGASGSGKSTLIDALANRISRDALKGSVTLNGEPLTGNVIKSISAYVMQDDRLFPMLTVAETLSFAAEFRLPRALPAAKKRTRVLELIEQLGLRAAADTIIGDEGHRGVSGGERRRVSIGTDIIHDPILLFLDEPTSGLDSTSAFMVVQVLRNIAESGSIVITSIHQPSQRILGLLDRLILLSGGRTVFSGPPSAIPAYFAEFGYPVPDDEKRAEFALDLIREFESLPAGTGQLVSFNKTWQVMPRRGTTQTMIRGRQPCR

SEQ ID NO: 45508 - protein, 460 aa, Oryza sativa
MPSANVRGAQPSADRRLSTLVRHLLPSSARTATTTSTSSSAADADSSLQAFPTMASSSVFAGLAQAPEDPILGVTVAYNKDPSPVKVNLGVGAYRTEEGKPLVLNVVRRAEQMLINNPSRVKEYLPITGLADFNKLSAKLIFGADSPAIQENRVATVQCLSGTGSLRVGGEFLARHYHERTIYIPQPTWGNHPKVFTLAGLTVRSYRYYDPATRGLDFQGLLEDLGSAPSGAIVLLHACAHNPTGVDPTLDQWEQIRQLMRSKALLPFFDSAYQGFASGSLDQDAQSVRMFVADGGELLMAQSYAKNMGLYGERVGALSIVCGSADVAVRVESQLKLVIRPMYSNPPIHGASIVATILKDSAMFNEWTVELKGMADRIISMSQQLFDALKTRETPGDWSHIIKQIGMFTFTGLNSDQVAFMRQEYHIYMTSDGRISMAGLSGRTIPHLADAIHAAVTKLK

SEQ ID NO: 45509 - protein, 403 aa, Oryza sativa
MSIPTNFGSIFQFLDYCDMSSNRLYGGIPSLAEATSLEVLDLSSNNLNEEILPTLIGNLSILTSLLLSNNDLTGPMPPFHWNLGSLKHLSLENNRFSGWLSPLLSNSSNLKTLNVRNNHLSGIIPDGLLSFQQLGVILLGGNDFHGPIPLDLCFNNYLHFVDLSNNQFSGEIPNCFYNDFWTDLPMYFNDDPFSGNITERMSVDFTTKGENLTYMGEPLVLMTGIDLSMNQLSGAIPPPLGFLRQLKSLNLSHNQLVGPIPETFMYMQDMESLDLSYNHLNGSLPMQLANLSFLCSFNVAYNNLSGEIPFQQQLGTFDESAFEGNDNLCGGIINKNCSSVLHQNQGVFDAIDTSLVFWSYVFGCFALGFWGTVALLIWDEVCRRRLCDLMDALMFKLGWEFVP

SEQ ID NO: 45510 - protein, 357 aa, Oryza sativa
MVVPDESTIWDEVLEEADELAYVHKVPPSISFLSAGTGKRRKGEHRLKFSIRGSSSVSLNVKTENPYIGEQEVSSVMPTNRAPETMMAEQLENIKEETEDLPSEFACSTKKANVSISELLDSLQDRSASSAGTPFLLHQHTRPKEEKPKVPTSVKRTLALLGQRNLETENPLEHVIGETSSEEEDDAQNNLALINKDVKGQTMADIFQQVFNATSMDCFTLPVRSYGSGYYGRMQQILQMEKDRHAEFLRQYNREQDYLGDPKGVTVQILSRSLEGKLTICRCLFMEKSNLATTGEVSTDLDMDNSSVKRTIIFSPKICDNVDLLAGNIIHIFPPWKEVKVKEETVILCTYFSHRGV

SEQ ID NO: 45511 - protein, 664 aa, Oryza sativa
MDPEQTFLRVHARLSGMLSQLLTPRIRLALEYLYLAGAVALFCLLVVMHTNFVQQPGCSSEFSGIEFGEAQLVQIKIISGGLWVSKGASYIMDLQNLGRSAEKILEVNGDRFNILASKFWSTWVGPGARRSKIMFRTWKGDKEFEPQPENAADTAITATTSGVSDSKTTVEGSAYHPLSAKESFKAAVMYLFRKWYFRVVSFWRNIKQLSDNTFQLMFRSNWNDFLHTIKGIQLPSVDHLVSTIVQWFERRSKAFEPTYLYGVEKGYFLLSEGAKVRHGVRTINITISARNPCFGNRWQQLLINSIVGYDTILTNSLVNSPGHGYLYNFQTKELYDLSYGHEPPAGPTRFGDYFVTKCGVLLMSLFVFFTTTMSVSFTLRETQSRMLRFTVQLQHHARHQLPTFQLIFVHVIESLVFVPIMIGILFFLFEFYDDQLLAFLVLTLVWLCELFTMISVRTSISMQFFPRFFLLYFLVFHIYFFSYTYGFSYLAFSATAAFMQHLILYFWNRFEVPALQRFIRSRAHLHQQTGVQITSSTIYTSALHIARVNMRDPGAMNEGLGAAREADALLVPDEPNRNQQEGQPIENAELVANNPLHYQDQNPQQPGNAPAGSGSLNPFGSLLLWLLGGGASDGIVSFFSMFRDVRDHGQDYTDPPRNENGQVT

SEQ ID NO: 45512 - protein, 258 aa, Oryza sativa
MSLGLVTSPTAAASTPVAQGVPGPFSPTQPKPPASFLSSGWPDGVKKRGRPKGSTNKPRIDAVGSAGVGFTPHVITVLAGEDVSAKIMSFAQHGNRAVCVLSANGAISNVTLRQTATSGGTVTYEGRFEILSLSGSFLLTDHGGQRSRTGGLSVSLAGPDGRLLGGGVAGLLIAATPVQIVVGSFNSEGKKEPKQHAHSEPASAPSKAVPTAGMGPNSPPSRGTLSESSGGAGSPLHPGIAPPSSNSQPPFLSSMPWK

SEQ ID NO: 45513 - protein, 524 aa, Oryza sativa
MAAGSIVVDFPSMGAACCFSSLESLLRDSTSRFLAAVSAAPDPDLTNFRSLFSRVLNTYPDPPLEAVWFFSALSFHDNPGDLRSLLHLLSAFTASSRSAAKPLALLAPVVSELYHSAKPRREAEALVEAVLSYISICSSRAAPAAGDGAGAGADAGSLLPAFGELVKVWSVRHSRDRCPFQVLFPLVGEDARRELMREGCSVAFLAGAVVAEAFLLRLCLKVQGAAGASRAELQKELRIWAVSSISVFQNQQFFGVLLNMLVNPPLPVYSLLSADDEILVRDVLYDALILVDYSFINKGAGVDQADSSLLPLYVSRLLITHDAINDARSKGDQGRAMSFMNAFFTSNIPTYFAKCATSQVGFNQLSKPAAITPQALLKWLVDLEDKGFKVFGENVSRIRERLMYDEVKNGYQSRMTHSDADLFFIDKQSGGEVMDTRAGEDEEAVEMETADNAFMAAAQSMKAMANGMRKRKDCGAEDANVVKFVKYKVEDSSVKDYFLSANNGMSSGSEVENPQSDDEMEETD

SEQ ID NO: 45514 - protein, 252 aa, Oryza sativa
MCRFSYLSTGSSCRPGASVSAGDAEAVTARVLKGSNIVLGPYARGDANVIAADFVKSSVRPDDCPRDGLPEFALVGRSNVGKSSLLNSLVRRKRLALTSKKPGKTQCINHFKVNDSWYLVDLPGYGYAAAPQEARTNWDEFTRNYFLGRENLVSVFLLVDASIPAKKIDLDYASWLGQNKVPMTLVFTKCDKRKKKKNGGKRPEENVENFQSLIREYFEAAPPWIMTSSVTNQGRDEILLHMSQLRNYWLKH

SEQ ID NO: 45515 - protein, 697 aa, Oryza sativa
MAESDGGEASPSGGGGGEGSPDPRRPPARPQLTKSRTISGSAASAFDRWGTSNSSSSILVRRSSTAPLPPGAAPRGLLTVAVDEPSYAAPNGGAAMLDRDWCYPSFLGPHASRPRPPRSQQQTPTTTAAAAADSRSPTPAAPPQTASVSQREEEKSLASVVKRPMLLDERRSLSPPPPQQRAPRFDLSPYLVLMLVVTVISFSLAIWQWMKATVLQEKIRSCCSVSTVDCKTTTEAFKINGQHGSDFINSADWNLASCSRMLVFAIPVFLVKYIDQLRRRNTDSIRLRSTEEEVPLKKRIAYKVDVFFSGHPYAKLLALLLATIILIASGGIALYVVSGSGFLEALWLSWTFVADSGNHADQVGLGPRIVSVSISSGGMLVFATMLGLVSDAISEKVDSWRKGKSEVIEVNHILILGWSDKLGSLLKQLAIANKSIGGGVVVVLAERDKEEMEMDIGKLEFDFMGTSVICRSGSPLILADLKKVSVSKARAIIVLASDENADQSDARALRVVLSLTGVKEGLRGHVVVEMSDLDNEPLVKLVGGELIETVVAHDVIGRLMIQCALQPGLAQIWEDILGFENAEFYIKRWPELDGMRFGDVLISFPDAVPCGVKIASKAGKILMNPDNDYVLQEGDEVLVIAEDDDTYVPASLPQVRKGFLPNIPTPPKYPEKILFCGWRRDIHDMIMVLEAFSRSRF

SEQ ID NO: 45516 - protein, 1056 aa, Oryza sativa
MVMDRTSWLWRRKPSDKSPGGAENTVSVSSHSEHYSDDQEVLRPVSNNASPHLGQSPGMPSRVRDDGTQEIGVTKPSNEKLALGFKLNDSSPRHGQSSEPQSSSNVRDEDVKENLKSLNDKLAAAFLTINAKEELVRQHAKVTEEAVLGWEQAESEVAALKKLLEASAQKNGSLEVQVSHLAEKNASLEVQVSRLDEALKECVRQLHLAQEDQAEKVHDVVTKSQELESENSKLQNRITELKKQLETTKLEASNMSIDHDLQEKFQAIKKENMDLKSKLLVQSKDLKILSLERDLSNQAAETASKQHLENVKKIARLEAECRRLHHLTRKATLINDSRPLANNTCVESLTDSQSDSAERMAAVDNELRNSDSWASALVAEFDQFKNGNADEKNLVNNPVVIDLMDDFLEMERLAALPESDRTSSTFDMETDSDKAVTRNSSSKLETEELRNQVADLHAQVEKIESEKKELEMALMEARNQLDISCNALVAAKNRLVEMQMELDLANDSKHDALRDFEGLNSEKKALEFQLEPKSVRVEELLQVVASLEENTDKKELESQLELLSAEAKELRLTVTSLLEKIEAERSLSVQHQAEAVAACNAKESLEEQLYSANTEVERLHVIVKELEDEVEKEKMRQEELVAELEMKMETAVEAIKESLEAQLCAANTEVERLNSIVQALENDIEKEKALHKELTAQLEVKFEEEKARSVQTVKESMEAQLCSSNTEVLKLRDIVKALENEVEKEKALHEDLSAQLEAKIEAERTFSVEAIKESFQSELQSVNSEVVELRGMVTALEHEVVKEKTFSAELQMQLEALEAIKRVLESEIESAHQDNRKLNDKVKSFEAKLKKQVSSAVDFTAKEEAMQSERRAMKQQLEAAKMEVGKLTNKVSLLQGEVLQERLLSEEFEQEYHKLEARLSRDSRDAKLWRLANSNGGLKAKQEKELANAAGKLAECQKTIASLGRQLKSLTDIDNTIVEPERLEPREIREMPLDFRNSDADFAVFADELYDFDLPKVNSSCFSPLPSIQPSSPPSEMSVFAGGLSSLSSFRSKRRK

SEQ ID NO: 45517 - protein, 79 aa, Oryza sativa
MPLVSILTYAFSCLLCLLCVQIGLVGVGFDCGFVAVMTIKPRFSMLRLDLFKDQNCADLNLCVSEPPQTHHVRIDFCES

SEQ ID NO: 45518 - protein, 529 aa, Oryza sativa
MASSAAAAFYRDREDAAPPSSGPGGGGAMAAYDPSYVPDSVKTFVSHLYRHIRDRNVYETHQMYEGGFTRLSDRHFRDTPWPPAEAVAAHCDGDHVFLLLYRELWFRHAHARVQGLTPAQRAESWDNYCSLFSVVLQGVVNMQLPNQWLWDMVDEFVYQFQSFCQYRAKLKNKTHEEIALLKQYDQAWSVYGVLNYLKALVEKSMIGEILEREKVGLEQFTATDGYDYEGGSNVLKMLGYYSMIGLLRVHCLLGDYHTGLKCLAPIDISQQGVYTTVIGSHISTIYHYGFASLMMRRYIDGIREFNKILLYILKCKQYHQNSPQYDQLLKKNEQMYALLAICLSLCPQDKLIDENVGTQLKEKYGDKMTKMHRYDDEAYAIYDELFSYACPKFITASPPVLREPYTNYNQDAYRLQLKLFLYEVKQQQLLSGIRSYLKLYSTITIGKLAKYMDVDEVTLRTILMTYKHKMHSIDSDGKVISSADFDFYIDEDIIHVVESKLTKNHGDYFLRQILKFEEMITQLDKVQFD

SEQ ID NO: 45519 - protein, 590 aa, Oryza sativa
MWPSDIWKAHAGSSQSEGSALDMERNGCNHNCCPSPLQPIASGGQHSESSAAYFSWPTSTLMHGSAEGRANYFGNLQKGVLPGHLGRLPTGQRATTLLDLMIIRAFHSKILRRFSLGTAIGFRIKKGTLTDTPAILVFVARKVHRKWLSPTQCLPAHLEGPGGVWCDVDVVEFSYYGAPAPTPKEQLYDELVDGLRGSDPSIGSGSQVASLETYGTLGAIVKSRTGNKQVGFLTNRHVAVDLDYPNQKMFHPLPPNLGPGVYLGAVERATSFITDDVWYGIYAGTNPETFVRADGAFIPFADDYDITSVNTSVKGVGVIGDVKAIDLQSPISSLIGRQVVKVGRSSGLTTGTVVAYALEYNDEKGICFFTDFLVVGENQQTFDLEGDSGSLIILTGKDGEKPQPIGIIWGGTANRGRLKLKSGQGPENWTSGVDLGRLLDLLELDLITTSEGLQEALEEQRIILAAAAAAANSTAGESSPVAGPQENEKVDKIYEPLGINIQQLPRDNSATSTGPDEFHVDTVEGVTNVEERQFLIGMSPAREGQEANGDLNNLAELENSPEDICFSLHLGEREPKRLRSDSSLDIDLQK

SEQ ID NO: 45520 - protein, 74 aa, Oryza sativa
MAAGSVSHRRALSTFSSHLHLPPPSPTTRVASPSSPGHRRRACARVQGDGRGASPVCVHAGGSRIGSQPGTKGN

SEQ ID NO: 45521 - protein, 594 aa, Oryza sativa
MAAGDLLLRTQSGLPVLARAFPSCLCLRVPARRRRGAPPLTAAKVDVADAVGRRVRSGGAAVPKRRRSRRDAEEEEEEGLAFSRVVTGRGRGVREEGVAEGEAPEFDAAKSGDESGGVDGSYLSDTRFDQCTISPLSLKAVKDAGYERMTQVQEATLPVILQGKDVLAKAKTGTGKTVAFLLPAIEVLSALPNSRRDQLRPSINLLVMCPTRELAIQVAVEAKKLLKYHRSLGVQVVIGGTRLTQEQRSMQANPCQILVATPGRLKDHVENTPGFSTRLKGVKVLVLDEADRLLDMGFRRDIERIIASVPKERQTLLFSATVPEEVRQISHIAMKKNYKFINTVKDGDEETHAQVSQMFMIAPLDLHFSILYDVLKKHVAEDADYKVIIFCTTAMVTKLVAEILSQLRLNIREIHSRKSQSARTKVSDEFRKSRGLILVSSDVSARGVDYPDVTLVIQVGVPADRQQYIHRLGRTGRKGKEGQGLLLLAPWEKYFLSSIKDLSISEATVPSVDSSTQTIVKDAVRKVEMRSKECAYQAWLGYYNSNKTIGREKSRLVKLAEEFSQSMELSVPPAIPKQILRKMGLNNVPGLRST

SEQ ID NO: 45522 - protein, 406 aa, Oryza sativa
MVVREKQGGRMGKGKGKGKEKECDINCFGRSFFRVLLTLQSLERMKIPSSFNQCLQNQPTGMVSLVDRSGNKWSAELTSDSEGFFFVHGWKEFVRDNSIQCGQFLVFTYDKRSQFSVTVFEPSGIDKISTFSAHPSKNVIIKTESDEGGMVTAAITTEKMAPALKENNGITGKRTRDVDYLMEDRVVVFKKSSEANVCESSRRKRAGASAGKSKVTSTSHNSTRGSSCSSDEDNSSSKSPNPPFLMRFLSGEVSRRGRCVSKGQRQLTVISQRRPVTEAEKDHALQRAREFKSKNPFAVQIMMESYVYVGFFMNIPCEFVRECLPHTNKRITLWDPQGKAWEVNYVYYSDRSVGSFSGGWGKFAVGNNLEKFDVCVFELVQKDNIKVHIYRVVPEITPHKLRSDPK

SEQ ID NO: 45523 - protein, 964 aa, Oryza sativa
MAGKVEKMASIDAQLRMLAPAKLSEDDKLVEYDALLLDRFLDILQDLHGDDLRELVQECYEIAAEYEGKHDSQKLDELGNMLTSLDPGDSIVMAKAFSHMLNLANLAEEVQIAYRRRIKLKKGDFADENSALTESDIEETFKRLVVDLKKSPAEVFDALKSQTVDLVLTAHPTQSVRRSLLQKHSRIRNCLVQLYSKDITPDDKQELDEAVQREIQAAFRTDEIRRTQPTPQDEMRAGMSYFHETIWKGVPKFLRRLDTALKNIGIDERVPYNAPLIQFSSWMGGDRDGNPRVTPEVTRDVCLLARMMASNLYCSQIEDLMFELSMWRCNDELRARADELHLSSKKDAKHYIEFWKKVPPSEPYRVVLGDVRDKLYNTRERARQLLSSGYSDIPEETTLTSVEQFLEPLELCYRSLCDCGDRVIADGTLLDFLRQVSTFGLCLVRLDIRQESDRHTDVLDAITTYLGIGSYREWSEERRQDWLLSELNGKRPLFGPDLPKTDEIADVLDTFRVIAELPADNFGAYIISMATAPSDVLAVELLQRECHVKTPLRVVPLFEKLADLESAPAAVARLFSIDWYRERINGKQEVMIGYSDSGKDAGRLSAAWQLYKSQEELINVAKEFGVKLTMFHGRGGTVGRGGGPTHLAILSQPPDTIHGSLRVTVQGEVIEQSFGEEHLCFRTLQRFTAATLEHGMHPPIAPKPEWRALLDEMAVVATKEYRSIVFQEPRFVEYFRLATPEMEYGRMNIGSRPSKRKPSGGIGSLRAIPWIFAWTQTRFHLPVWLGFGSAFKHILEKDIRNLHMLQEMYNEWPFFRVTIDLVEMVFAKGDPGIAALYDKLLVSEELWPLGEKLRANCEETKQLLLQVAGHKDLLEGDLYLKQRLRLRNAYITTLNVCQAYTMKRIRDPDYHVTLRPHMSKEIMDWSKPAAELVKLNPTSEYAPGLEDTLILTMKGIAAGMQNTG

SEQ ID NO: 45524 - protein, 435 aa, Oryza sativa; identical to SEQ ID NO: 33026

SEQ ID NO: 45525 - protein, 401 aa, Oryza sativa
MAPMLQDTTNAAPNINEVGMEESQQVLTSNELEDDGKRNILPEHSDITIQPSESVLDCSSHESSAPNQAAPALGQVDKESCEEQAPLQIHGQASDTEKIHGQASDTEISSELTTAASQDTPNHATKELDGEDGNSPEPIILNLQESEPIYQGEEHILSTGNLAYENQEPVYEGEVVLAEQADKTEKSSEDMQDGPAEHQWELIDNFLQNTASQLTVYGLFCLQEGLNERELCVFFRNNHFNTMFKYNGSLYLLATDQGFFSQSDLVWQKLDEVNGDGVFLTSNFTPFKAENPRNDSWNEQQAMTSTADYLAQFDNTTLQHSSGNSDLELAIALQQQEFERQQPQRHQSSTQQQEPVPQQQQQTPNQSHGTGRPGLVVGPTTARRPPAPQPTTPKKEKCIVM

SEQ ID NO: 45526 - protein, 313 aa, Oryza sativa
MLLAALDYKQAFSTLETSDDNYNEAPSAEDWKKVEAACNYLKLLYDSAHSIMAAANPTSNLFFHEAWKLQLELSNATGHEDPVFSSIAKDMHERFDKYWKDCNLVLAIAVVMDPRFKMKLVEFSYSKIYGVEAAKYVKVVDDAVHELYKEYVAQPLPLTPAYVEQGEGNNAPASENSTQTTAPSTGDGLVDFDMYLSEIATSQPTKSELEQYLDESLTPRIQEFDILNWWKLNTLKFPTLSKMARDILAIPMSMVSSGNSIFSAGTGTRMLDDYRSSLRPEIVEALFCAKDWLQYSPATPEAPSTALVKVDAP

SEQ ID NO: 45527 - protein, 903 aa, Oryza sativa
MSSNSGGSAKEKDPENAPELVALPLVRTLRPVHAVIDPAADPRSAQLSWPGHVVLLPPYATWPHHVPTLPPAVNPANPQQNVDVAAADVSPDVGCCDEKMLPKVDMLFDGEKEAYDFYNAYAEMVGFFVRRSTLWTTSKNIITRRTFVCSREGFREKKRGTKEAKCPRPETRIGCPASMTIRLNTNGKYRLTEFVPNHNHQLATASTMHMLKAKKIRLKARAARENLVDDTVRTPGFGSEDEAYEFYSMYAGKIGFNVRRASMTMNAENVITRRMFVCSKEGFREKKRGAKRVKKPRPETRTGCPACMVIRLTSNGKYHVTEFVTFHNHQLGATVPSDLVATSQSTETGQDDGLDLVDGSADANIHRQNLIIGNIMATSLEGRSNKRFKCTKVPHYGDVGATLEYLQKMQHDNPSFFFAVKSDDDGNLTNFLWSDSKSIMDFVHFGDVVCLDSTYALQGYGRPLALFTGVNHHKQTVIFAAALLYDESVEAFRWLFDTFKMAMNGTQPKTLLTDRSDAISEGVAASWPATAHRYCVWQIYQNALQQLSQAFHGSKTLDYCFQKCLFDSEDEPEFLTAWREMLEKYDLEDNQWLADLFSLKEKWALPYGREAFCADMKSVQQKESLGTELKKHLSLEFDLLSFFKQFERVLCDRRSTELQADVDASQSIKKPPPMRVLRQASNIYTPAAFKMFEREFELYMDCMLYNCGEMGTISEYRVVIEDNPKDHFVKFDSLNSMVNCSCKGFEFVGIPCRHMLKVLDTRNIKDIPPQYFLKRWRKDAKSGSPNCSYSFPLDGDPQLVQTKRYNLLCRMFSIAAARAATSIETFAYMENQSSIFMDQVEQALQTRPPDIAAMIGAHCDQTQNPIDNIVAGGLHSHTNFINGPADGSLTFPFTLGAGVLDYR

SEQ ID NO: 45528 - protein, 609 aa, Oryza sativa
MRGLLRRVYLRLPPFPPATSLYYWSRTRPAAAGPNHPIPRRMSTSSTAAAVVAEGSAARRFWIAAASREAAFAAYTPFLVSLAAGALRLDSFRQYIAQDAYFLHAFARAYEMAEECADDDDDKATIVVLRKAILRELNLHASVLQEWGVDPNKEIPPIPATTKYTDFLLATSTGKVDGGKGSDKMVTPFEKTKIAAYTVGAMTPCMRLYAYLGKELAVFLKQDENHPYKKWIETYASSDFENNALQIEELLDKLSVSLTGEELEIIGKLYQQAMRLEVEFFSAQPVDQPVVAPLSRYCGPKDKLLIFCDFDLTCTVVDSSAILAEIAILSHQKASQGGADSSLDRTKSADLRNSWNMLSNQYMEEYEQCIASLLPPEEARSLDYDQLYKGLEVLSQFEKLANSRVVDSGVLRGMNLDDIRKAGERLILQDGCKIFFQKIGKTRENLNLDVHILSYCWCADLIRSAFSSVGCLDGLNIHSNEFAFEGSVSTGHINRQMESPLDKAEKFKSIKSDVGSTGTLLSVYIGDSVGDLLCLLEADIGIVVGSSTTLRRVGKQFGVSFVPLFTGLVEKQRRIEKEESSIFKARSGILYTVSSWSEVQAFTLGNDFS

SEQ ID NO: 45529 - protein, 915 aa, Oryza sativa
MACLAAGAEAAPLLFRRRLAPSPVAARRRLLVSCRARRRGLRTAAELPRKSTSNDKHHNRVNMQRDEASVSSDKERQEKYGDENGISNLQLEDLIQMIQNTEKNIMLLNQARLQALEHVETVLKEKEDLQRKLKILETRLSETDARLKLSAEGQFGTEINDSLPVLELDDIKEENMLLKDDIQFLKTMLIEVAETENSIFTLEKERALLDASLRELESRFIDAQADMLKSDPRQYDAWWEKVENLGDLLETATNKVENAAMVLGRNHDLEDKVDKLEASLAEANISKFSCYFVDLLQEKIKSVEERFQVCNHEMHSQIELYENSIAEFHDILSKLVEETEKRSLEHSASSMPSELWSRISLLIDGWLLEKRISYNDANTLREMVRKRDSCLREAYLSCRGMKDREIVDNFLKITLPGTSSGLHIIHIAAEMAPVAKVGGLADVISGLGKALQKKGHLVEIILPKYDCMQNDQVNNLKVLDVVVQSYFEGNLFNNKIWTGTVEGLPVYFIEPQHPAKFFWRAQYYGEHDDFKRFAYFSRAALELLYQSQKKIDIIHCHDWQTAFVAPLYWEAYANLGFNSARICFTCHNFEYQGAAPAQDLACCGLDVQQLDREDRMRDNSHGRINVVKGAIVYSNIVTTVSPTYALEVRSEGGRGLQDSLKLHSRKFVGILNGIDTDTWNPSTDRHLKVQYNANDLQGKAANKAALRKQLNLSSTNASQPLVGCITRLVPQKGVHLIRHAIYKTAELGGQFVLLGSSPVPHIQREFEGIADHFQNNNNIRLLLKYDDSLSHWIYAASDMFIVPSMFEPCGLTQMIAMRYGSVPIVRKTGGLNDSVFDFDDETIPKELRNGFTFVHPDEKALSGAMERAFNYYNRKPEVWKQLVQKDMRIDFSWASSASQYEDIYQRAVARARAAA

SEQ ID NO: 45530 - protein, 364 aa, Oryza sativa
MGLNGKWRKAMPYMAMVFLQFGFAGLFLISVASLRQGMSHYVLVVYRNAVAAVVMAPFALWFERKTRPKMTLSVFFKIMALGLLEPVLDQNFFYMGAKNTSASFSSALTNILPAVTFVNAIILRMERISIKERRSQAKIAGTLITVGGAMLMILFKGPVINFPWTKNANHNISDSSDHNNGHWLMGIFMILLSCFCWSAFFILQSYTLRGYPAELSLTTLICAMGVAQSGAVALVMERDIKAWLIGFDMRLFTAVYSGIMCSGVAYYVQGMVIKERGPVFVTAFSPLCMIIVTILGSFILCEVVTLGRVIGAIIIVVGLYALIWGKNKDHGNQVDQDDNFEKQKTFELPLSTTNVNEARSPNHI

SEQ ID NO: 45531 - protein, 141 aa, Oryza sativa
MMPCASACCSSSRHHPTTTETANESSSSSSSSPLLPALPRAWRSSRSLAISTPAAPGRAPRRHGHPASPASSPPAPAPAPSAAPASARSPASAPGSPAAATRSCRAAATRTSSPPRCRRSSSSAATATRRSRRRRGRWCGG

SEQ ID NO: 45532 - protein, 568 aa, Oryza sativa
MYGDDTGSGMCHVSVLNFGDPSRKHEMHCRFEKKPPWPWLAITSSFGTLVIALLTGHIFQATVHRIAKVEDDFHKMSELKKRAEDADVAKSQFLATVSHEIRTPMNGVLGMLQMLMDTDLDTTQQDYVRTAQASGKALVSLINEVLDQAKIESGKLELETVPFDLRTVCDDILSLFCGKAQEKGLELAVYVSDQVPQILIGDPGRIRQIITNLVGNSIKFTERGHIYLTVHVVEEVMSCLEVETGIQNTNTLSGYPVANRRCSWESIRLFNRELHSSEKSFAPIASDSISLVISVEDTGVGIPFEAQSRVFTPFMQVGPSIARIHGGTGIGLSISKCLVGLMKGEIGFASKPHVGSTFTFTAVLMRAHCKGNDIKSSEFKGINALVVDHRPVRAKVTKYHLQRLGVKTELTAELNQFISKLNSGSLTAKLVLIDKETWLKESHCTPLLVNKLRNNDKPDSPKLFLLGSSASSPKGGSDTSREHNLNVIMKPLRASMLQVSLRRALGGVDKVHCRNGVVGNSTLGSLLHKKQIIVVDDNIVNLKVAAGALKKYGAEVTCADRGKKQSHC

SEQ ID NO: 45533 - protein, 319 aa, Oryza sativa
MSSGGGRPPAAQHIVRSVRQRFVPLPPPLARAPFAAAPGDYHRFAAASRGGEIEEGIVIRRTPLKRKTPCGESEAAESSERMMTSPGFTEGVGSPLMTPVSGKTSRTTKSMAKFNKAGPQTPISNAGSPGNPSTPASSRYDNSLGLLTRKFINLLKQTQDGILDLNDAAKILDVRKRRIYDITNVLEGTGLIEKKLKNRIRWRGSDDSGTNLDSDISCLKTEVENLYIQEQALDRSISEIREKMEELTEDESNHRWLFVTEDDIKGLPCFQNEALIAIKGPRGTTVEVPDPDEAGDYLQRRYRILLRSTMGPIDIYLVR

SEQ ID NO: 45534 - protein, 497 aa, Oryza sativa
MPPTPPPLLLPAPRCPRSTAVLAAYRFAASASSSSGGGGGGSSSGARTARPPPAPRRRRGKPGFSRQSAIKKSFHQEQVVFSTPVPPDPSVAVVGGGASGLACAASLAARGVRAVVFDTGMHGLGGRMATRAIAAAGDQQQQQQLVFDHAAQFFTASDERFKRVVDEWMDKGLVREWGGLIGELDAGGHFRPMPSSSPPRYIGVDGMRPLADAILPESDLIEVVRPCWISKLEPFNGLWRLFENEKPHGQYDAIVIAHNGKCANRLLSTSGLPLLTRQMKRLQLSSVWALLAAFQDPLPIPQTDSYGTFEGAFVKDVDSLSWMANNTQKLFPLQTGRPECWTFFSTAAYGKRNKVPQENIPKITAEKVKEDMLRGVELALGLSRGSLQQPFYTRVQLWGAALPMNTPGVPCIFDPQGRAGICGDWLTGSSIEAAVLSGMSLANHIADYFASSGEQPEEFAIGLHENLSQVEGHDIGQFPGLESQKPHVAEAQLTPST

SEQ ID NO: 45535 - protein, 132 aa, Oryza sativa
MEKSVFACRPLEWTARENGPIFPGHTQKYNSLFSLSLTLNFSPLLPIVSTHLSLSLLSSPFLSLLCSPLLLSSPLHVGVGGRRRGGGQRGGEAATGLGEVGDEAARLGGRGGGEIISSSAALSFAYDLLTGE

SEQ ID NO: 45536 - protein, 649 aa, Oryza sativa
MGREAAAEAEEQLLRRSLRLFAAGERSFRMDRLSPDADALRAAVADVLPRFLGSYTDDILAEYIVILVCNGKHQYQARDDLEAFLGDDSAKFVSWLWGYLSKKALTLADNSSIQHGLTNEIRNRSTKKNLQVANALSEDTFIVNSDISSPQEHHTLQKHDSTEGQNVARRHISSTVTVTPEKLVDDQCYWEGQHQKKDQRSSSGRNFSTLKSGVAVRTAQALPQDELRHEVCIGRNASARRFPLAVRSDDVLDPESIKKRGNVWDRLGKPAIKDRICATEDDDMHVQNGLHKKAKLMVTEHELRCRMNSSTEGDLFDIANSRRFPRSYQDVNTVQAHEHTEKSNRSRLIGRINFGDIERNQLQVRDVIRQKSSPNLPARSVPLQSQNEFISEVKSSVTAVSESACHVSKSTKGQVPGSSKLGQLATRRNLETEVLQSQQVSSPAQSKTGSSVHEDGGNCCNKPMKNEMLDVKLKLKQVELDVLKLRSKQAQINNVKQGFLSSGPHANLDEDADSRTVLVTNVHFAATKEALSGHFMKCGTVLKINILTDAISGHPKGAAFVTFTDKESVEKAVSLSGSSFFSRVLTVMRKAEAPPGFLASVQPIGRPLQSWNSPPIQKGVSPRQIPGYHLQWKREQSVLEKSPASCPTN

SEQ ID NO: 45537 - protein, 295 aa, Oryza sativa
MPRPEVQAPPEIFYNESEARKYTTSSRIIEIQSRITERALELLALPNDGVPKLLLDIGCGSGLSGETLTEQGHHWIGYDISKSMLDVALEREAEGDLLLADMGQGLGLRPGVIDGAISISAVQWLCNADKSCHNPRLRLKAFFGSLYRCLARGARAVLQFYADNVKQSEMIVTAAMRAGFAGGVVVDWPHSSKAKKSYLVLTCGPPSLNSSLPKGKGQDGAMCSDDDESDDGSGDEDEAQTVGIYERNRPKKRQKTKKNGKGKAWLLNKKEQLRRRGREVPADTKYTGRKRKSYF

SEQ ID NO: 45538 - protein, 369 aa, Oryza sativa; identical to SEQ ID NO: 31072

SEQ ID NO: 45539 - protein, 371 aa, Oryza sativa
MGGKKAKTVERNDHRLLCSDVLTEVFHRLPARTLASCRLVCKSWMSELTDPHFVHEHLKRSQQKLLLFANDKANDRSLAMVLADDTGATYQLTRPMASRSLFVHNSCNGLLCLGDSTGAVQLLNPTTGESATLPMPMYTAGSSQFSSCNWHCLGFCPSTKEHKVVHFYLGAHFDSFNVCCEIFTIGDKSWRQIGSFHGAPTDRGVHVNGAVYYLTKFRYIASSRINCLNLESENFDVMMLPPRKSYGGHCSLAELEGKLCLLVVEGGHDNPPRTMDILMLDSGDKTTWTHRYHISLPWLMPSCYFTPKHTLFHEGKIWVQLLARNLYCYDPSSSSTELKMACPESEFPFSTHTFIESIVPLRKDYFIKQIQ

SEQ ID NO: 45540 - protein, 609 aa, Oryza sativa
MEAAAAIGGARSPLSFSSSLCNAKVSCGLALHNVKIKSSRRLEVVCHGMLTTRKFMQKKKKEEVYKDAADEAEQKNWRMMMREIEESGSAVSILKTQRSKKEPLPRDAVLGTLMRFKQLKKWNLVSEILEWLRTQHWWNFSEMDFLMLVTAYGKLGDFSRAERVLKYMNKKGYKPSVISQTALMEAYGRAKQYRKAEAVFRRMQTSGPEPSAVTYQIILKSFVEGDKYKEAEAIFEDLLNEKRASFKPDQKMFHMMIYMYKKAGDYAQARKLFAQMSERGIPLSTVTFNSLMSFETNYKEVSSIYDQMQRTALKPDVVSYSLLIKAYGKARREEEALAVFEEMLDAGVRPTRKSYNILIDAFAISGLVEEAHTVFKAMRRHRVEPDLCSYTTMVLAYVNASDMDGAEKFFRRIKEDGLKPNVVVYGTLMKGYSKLNNVERVMRVYERMRMQGVEPNQTIYTTIMDVHGRNSDFGNAVIWFKEMEARGYPADKKAKNILLSLAKTPEEQEEANELTGNCAIQLEAKPDGTTYGLEINGTGNEYKHGQNDAGHDSLLDGACTTSNRNGKVEAGKGHFEEVNDDDDDDDDDDYDEELNFVSFKDKRELNFAT

SEQ ID NO: 45541 - protein, 27 aa, Oryza sativa
MTFITNCPSRDSYLSTNCRMFSWLKEV

SEQ ID NO: 45542 - protein, 401 aa, Oryza sativa
MACSTHLLSQSLYPLNRANPAAARGHLRFQASPSVRLGSGTSRRRALGLRVAASAEQGRRQVEVEYDLQAKFNKLADQIDQNAGITRLNLFSPCKINVFLRITGKRPDGFHDLASLFHVISLGDTIKFSLSPSKSKDRLSTNVAGVPVDESNLIIKALNLYRKKTGTDNFFWIHLDKKVPTGAGLGGGSSNAATALWAANQFSGCIASEKELQEWSGEIGSDIPFFFSQGAAYCTGRGEIVEDIRNPLPANLPMVLVKPPEACSTAEVYKRLRLEHTSQTDPLVLLKEITENGISQDACVNDLEPPAFEVLPSLKRLKKRIIAANRGDYDAVFMSGSGSTIVGIGSPDPPAFVYDDDDYKDTFVSEACFLTRNENEWYREPISSKITSEEDLPPEVASVSD

SEQ ID NO: 45543 - protein, 581 aa, Oryza sativa
MVVREPVAMEIPAVESSAAGRMPPRIRRRLLEGSRVGGGAPTSAEEIEAKLKEAELRRQQFHEWVSCKARKKPRSPSWSSQEEDQGQRLEAKLQAAEQKRLSLLAKAQNRLAKLDELRQAAKNIVEMRIEKEREELGTRVESRVRQAEANRMRLLHAHMQKRAAMKERTARSLVRKQTSERKYTERVKSLILQKRNAAEKKRLALLEAEKRKAQARILHIQRAAKTVCSKRESERRQLQEQLESKLQKAKRQRAEYLKQRVSPRSSAHADYIKHAEFLSTKLARCWKRFLKSNKTTYALVQAYDALGINEMSVKSMPFENLAMLMESPTTLQTTKAVLDRFEKRLLLSQPTGSSSAENIDHLLKRLGSPKRKAPASRSRVAAKKPAKGSETSKLSRYSLRVVLCSYMILAHPGAVLSGQGEKENLLMESAENFVKEFELLVKTVLDRPGGASMQSTDAASQKKFRTQLAAFDKAWCAYLYHFVVWKLKDAKSLEQDLVRAACKLELSMMQTCKLSSDGQSHDLSHDMKAIQKQVTDDQKLLREKIQHLSGDAGIERMNSALSDTRSKFFEAKENRFRTRQS

SEQ ID NO: 45544 - protein, 519 aa, Oryza sativa
MEDKLLLLLALAVSVLVAVVISKLVSYATKPRLNLPPGPWTLPVIGSIHHLVGSHPIHRSMRALAEKHGRDLMQVWLGELPAVVVSSPEAARDVLRSQDLAFADRYVSTTIAAIYLGGRDLAFAPYGERWRQLRKLCTQRLLTAARVRSFRCVREEEVARLVRDLAASAAAGEAVDLTARVAELVNDVVVRCCIGGRRSRYRDEFLDALRTALDQTTWLTVADVFPSSKLARMLGTAPRKALASRKKMERILEQIIQERKQIKERSTGAGAGADDEAAAAGNECFLDVLLRLQKEGDTPIPITNETMMLLLHNMFSAGSETSSTTLNWTMAELIKSPRVMAKVHDEVRQAFQGKNTITDDDVAKLSYLKMVTKESLRMHCPVPLLGPRRCRETCKVMGYDVPKGTIVFVNAWAICRDSKYWKSAEEFKPERFENISIDYNGNNFEFLPFGSGRRICPGITLGMANVEFPLASLLYHFDWKLPNQMEPEEIDMREAPGLVGPKRTSLYLHPVTRVAPSSV

SEQ ID NO: 45545 - protein, 254 aa, Oryza sativa
MEFLSSVSYLFKALCTCGVAFVTGWFAHWVYRWMNPQCDGKLPPGSMGLPLVGETFRFFRASASIDMPSYYKERLKRYGPIFKTSLVGQPLVISLDPEVNRFVFQQEGKLFRSWYPETTNTIFGKKSLTTYSGAVNKFVRSFASKLFGPTNLKESLLPELESAVRESFATWVMNPSIEVKDGISNMIFDLVAKKLIGFNPTKSRELRKNFQEFFQGMVSFPIYFPGTSFYRCMQVYLCPSSSMRNQFFDFIREN

SEQ ID NO: 45546 - protein, 226 aa, Oryza sativa
MYKQKPMQAPAMRMRSDRGVVLRVLPMDYACGGGAWCSRGHRGWGCSTLRTTRSSPPSPSRLSASPRSTCPTPTPSPPASSSLSPLVTLTTRSPSRTATSRPRSPRTAPTSATARSPGSSTPPATPPSSRCDASAAAATVDPLVANGLRSRKSHAMSVEMDSKVGFLIVRFKSKRINVRVLCAGFTAALAKNTPSAPPIVVAAAPSPVRSVVKALFFLFEHDGRQV

SEQ ID NO: 45547 - protein, 490 aa, Oryza sativa
MAAKGSPEEEALLAGVGGDHQLVESDELAPAAAVVREEVKKQLWLAVPLVAGALLQNVIQMISVMFVGHLGELPLAGASMASSFASVTGLSLLLGMASALDTLCGQAFGSRQYHLLGVYKQRAMLLLTAVSVPLVVVWFYTGDILVAFGQDADIAAEAGAYARWMIPALFAYGPLQCHVRFLQTQNVVLPVMASAGAAALCHLVVCWALVYAAGMGSKGAALSNAVSYWINVAILAVYVRVSSSCKKTWTGFSMEAFHDPLSFFRLAIPSALMVCLEMWSFELIVLLSGILPNPKLETSVLSISLNTAAFVWMIPFGLGSAISTRVSNELGAGRPRAARLAVRVVVFMAVSEGLVIGLVLVGVRYIWGHAYSDEEEVVTYVAKMMLVIAVSNFFDGIQCVLSGVARGCGWQKIGACVNLGAYYIVGIPSAYLIAFVLHVGGMGLWLGIICGLLVQVLLLMAITLCTNWDKEAANAKDRVFSSSLPSDLAT

SEQ ID NO: 45548 - protein, 474 aa, Oryza sativa
MVRTAACKSLGALSKLSAQYAQKALDLLMGMMNDDTEAVRLQTLQALFHMATYGCLTVQEMHMHMFLGLLVDMNASIRDATRKILGLVNLPKLQMFKSAIDVLITSLEKHQEEQEIYSVLFSVGKNHGNFSANIAKHLAKEISMPSDGELILDKPRIKALLIVSISVAFSDDKHNKRDIPEVIFSHAISLLGKISCAIGEVVDQNSLLSYFCQRTGIPFWETKLPSRESEGCSVETVADIRPRIEKTVKSTKCLDEVLTMQSVKSIIETVERTWTIRKSCNIRDVRNILRTCKEELRILASNSSGSTGAFLSFLCEYLDAVQFIVEILRSFQLDNSYDLGPTSPDILLEKLDTSIRRMKCCYAGFNRGMEIQVCELALLANLFGLSKVGIQSKLVLDKLHWMINRLDCLCADGSCELSYFSREIKKAFDANFVGHDIFTLLELFHPKPTTDYGMLKTISADLQSGQIVAPHDCW

SEQ ID NO: 45549 - protein, 501 aa, Oryza sativa
MAARARLRLVLPPLAALLLFAHLAAVAVARPRWEEEGSNLRLPSERAVAAGAAADDAAEAAEGTRWAVLIAGSNGYYNYRHQADVCHAYQIMKRGGLKDENIIVFMYDDIAHNPENPRPGVIINHPQGGDVYAGVPKDYTGKEVNVKNLFAVLLGNKTAVKGGSGKVLDSGPNDHIFIFYSDHGGPGVLGMPTYPYLYGDDLVDVLKKKHAAGTYKSLVFYLEACESGSIFEGLLPNGINVYATTASNADESSWGTYCPGEYPSPPPEYDTCLGDLYSVAWMEDSDVHNLRTESLKQQYNLVKERTSVQHTYYSGSHVMEYGSLELNAHHVFMYMGSNPANDNATFVEDNSLPSFSRAVNQRDADLVYFWQKYRKLPESSPEKNEARKQLLEMMAHRSHVDNSVELIGNLLFGSEEGPRVLKAVRATGEPLVDDWSCLKSMVRTFEAQCGSLAQYGMKHMRSFANICNAGISAEAMAKVAAQACTSIPSNPWSSTHRGFSA

SEQ ID NO: 45550 - protein, 174 aa, Oryza sativa
MDSPPPPETRAPRRRRRRRAGRSPRGGDIAGGGASFTLSVAYLCSRSYLGHRRRRRRRRRGQIPFPREARSRVHSQPASQPASHAVAWIDDQSSEIPTTSQTHLRPTAQTPGRVPADCGAGGGGGDLVRTVDWASILRRPNSDWNLIRYFMWFLCLKPSAGSSLASIEDWMCGN

SEQ ID NO: 45551 - protein, 193 aa, Oryza sativa
MAAVARMAAAVVCLPSSSSSSSACRAAPLPWSRGVVVGVRRRRTVARAARRRGRRPGRRGLVIVDEFAGQYEEGFEDVHTEIMNYFTYKATSTVLHQLYEMNPPAYTWLYNYVVVNDPKEGKHFLIALAKERQDLAERVMITRLHLYSKWIKKCDHAKMYEKISNENLEIMRQRLMETVAWPTDDTNTSDTAK

SEQ ID NO: 45552 - protein, 217 aa, Oryza sativa; identical to SEQ ID NO: 31051

SEQ ID NO: 45553 - protein, 228 aa, Oryza sativa; identical to SEQ ID NO: 30644

SEQ ID NO: 45554 - protein, 645 aa, Oryza sativa
MGKEKGKGKWKRPPTVKPPVMAASASDDDEIDAFHKHRDMIPLHDHDMESEDDLEHPVFDLEGISENETDDSEGDEDGNMDKAAYDEWDDKFIAKLKRAERAVKQIAGGDDSMDEHEDDHKDKNSWGRGKNAYYDAGEQSGDDEDDYEEARRIQKEEESKLSMQDFGLEDGESDEEDRAIKASNHQVKVPDGEHSFETYVKMKEEFAVLSRDEKMGVLDSSAPELVGLLSELKDAHEELMAIGPVTNEVTAGQSKDKGKMQPLEVKRACLAAYCQAITFYLLMKAEGLSVQDHPVIARLVEIKSVVEKMKHANVNFPRQKEDSDDYCMPDSNIMDVADMISLDKKNIYSNLLLRDKGVEVAELTKNDHSNKDHHEIAKRKGKDEHIGSQSLEMLKVRATLEERLKEKGLYNLTRLKRKKVSNTRTTNRSDLQTLDDFDDEVLKNTQAIKPSKVLVAAAKSNKNKFVSGDDELPKRDDIGERRRKHELRVLARVGASTLEDDDLPEEDDHTEERPNQLSEENGSDDDIGPSESEDEFYKDVKRRRTEKLSSKEQKYSPNPVIESLEEETEGDGKRKISYQMEKNRGLTRSRNKKLKNPRKKYRVKHQTKLVKRGGQVRGVKKPSGPYGGEMSGINPNVSRSVRFKG

SEQ ID NO: 45555 - protein, 291 aa, Oryza sativa
MRDFPSCFGESGVQIADASSSSSSAGKGAAQNLVTCLYQAQFSGRPCLISVTWSKSLMGQGLSIGVDDLSNQCLCKADIKPWLFSKKKGSKRLDVEDGKIEIFWDLSGAKFGAGPEPMEGFYVAVVFDLELILLLGDMKKDAYRKTGANRPMLNAAFVARREHIYGKKIYTAKAQFCENGQFHDVVIECDTVSLKDPCLEIRVDKKPVMQVKRLAWKFRGNQTILVDGLPVEVFWDVHSWLFGLTTSNAVFMFQTCQAPEKSMPWSYSQVFRESQLQGLGFSLILYAWKLE

SEQ ID NO: 45556 - protein, 468 aa, Oryza sativa
MAACSIARIINLGDLAKCPKNLCCLLFRVVSKFLALSPSLLKEVEKDDGDQPSMTESVMANLPELHQDILMEIFALLEIPDLVRAGSVCNSWRSAYNGMRSLGIYKLSQTPCLLYTSESAGDSVVSLYSLVEKREYKITLPEPPVRSRFLIGSSLGCLVTVDDVSEMHLVNPITGEQIALPSVITIEHVNPIFNESGAIHMYEYSWYSASRVYHSEPSIFSLDELREYLLDKAFVFSDTSTENYLVVLIHNPHSQLSFARVGDDKWTWLPPHTHYADCIYKDGILYAVNKVGEIHAFDLSGPVVTMKTIIEMVPGYACDKMYIVQAPWGDLLQVWRSYEYIEGDYEADLHDADPAISVENTAEIKIFVVDTVEKKRVEIENLDGHVLFLGHNQSLCLSTEQYPHLKENYTYFTDDNDLSLFGHKNNRRDIGLFDLKHNSREELVSPQLWSNFPAPVWITPSFTKLNFA

SEQ ID NO: 45557 - protein, 351 aa, Oryza sativa
MYGWEMLSFNIHDGFLEAIVRGNRSGLLTAADYNNLCQCENLDDVKMHLTATEYGPYLQNEPSPLHTTTIVEKCTLKLVDEYKHMMCQATEPLSTFLQYITYGHMIDNVVLIVTGTLHERDVNELLEKCHPLGMFDSIASLAVAQNMRELYRLVLVDTPLAPYFSECITSEDLDDMNIEIMRNTLYKAYLEDFYKFCEKLGGATAEIMCDLLSFEADRRAVNITINSIGTELTRDDRRKLYSNFGLLYPYGHEELAVCEDVDQVRGVMEKYPPYQAIFAKISYGESQMLDKAFYEEEVRRLCLSFEQQFHYAVFFAYIRLREQEIRNLMWISECVAQNQKNRVHDSVVFIF

SEQ ID NO: 45558 - protein, 684 aa, Oryza sativa
MAAALVTSFPHAIPKPHHHLHAAHHAHLTAAATRPEAPSASSPNPANARLRRLIARDDLAEAARLVDRATSRGEAPDVYLCTKLIRNLCRRGRTSDAARVLRAAERSGTAVDVFAYNTLVAGYCRYGQLDAARRLIASMPVAPDAYTYTPIIRGLCDRGRVGEALSLLDDMLHRGCQPSVVTYTVLLEAVCKSTGFGQAMEVLDEMRAKGCTPNIVTYNVIINGMCREGRVDDAREFLNRLSSYGFQPDTVSYTTVLKGLCAAKRWEDVEELFAEMMEKNCMPNEVTFDMLVRFFCRGGMVERAIQVLEQMSGHGCAANTTLCNIVINTICKQGRVDDAFQFLNNMGSYGCSPDTISYTTVLKGLCRAERWEDAKELLKEMVRKNCPPNEVTFNTFICILCQKGLIEQATMLIEQMSEHGCEVNIVTYNALVNGFCVQGRVDSALELFYSMPYKPNTITYTTLLTGLCNAERLDAAAELLAEMLQKDCAPNVVTFNVLVSFFCQKGLMDEAIELVEQMMEHGCTPNLITYNTLLDGITKDCNSEEALELLHGLVSNGVSPDIVTYSSIIGVLSREDRVEEAIKMFHIVQDLGMRPKAVIYNKILLALCKRCNTDGAIDFFAYMVSNGCMPNELTYITLIEGLANEDFLKETRDLLRELCSRGVLNKNLLEEWRPKFSNQTVHLP

SEQ ID NO: 45559 - protein, 612 aa, Oryza sativa
MTPVQAGAAPASPSAAAALGFLLPTCWEIEVTCAAAMILVALYAAYELLAPRPASAAGGSSAAGDDLLLVRDLDGADKYKGGSSGPSAYMVKLELLAAKNLIAANLNGTSDPYALITCGEEKRFSSMVPGSRNPMWGEEFNFFVDSLPVKINVTIYDWDIVWKSTVLGSVIVPVESEGQSGPVWYTLDSTSGQVCLHIKAIKVHESSSRALNSSAEAGARRRISLDKQGPTVVHQKPSHLQTIFGLPPDEVVEHSYSCALERSFLYHGRMYVSSWHICFHSNVFSKQIKVMLPLRDIDEIRRSQHAVINPAITIFLRMGAGGHGVPPLGSPDGRVRYKFASFWNRNHTFRALQRAVKNFHTMIEAEKQERAQSALRAHSSSRKSSMKEINVPEDCADLTGQLQPFVKEEVLVTVFNGSFPCTAEEFFNTLLSDDSSYITEFRTARKDKDINLGQWHHADEYDGQVRELNCKSICHSPMCPPYSAMTEWQHMVLSADKTDLVFETVQQVHGVPFGSFFEVHCRWSVKTTSSDSCSLNISAGAHFKKWCIMQSKIKSGAVDEYEKEVQEMLEFAESYMRKVRTSSQDNGTPTEQDNGAVTEQENVAPDNTPNDE

SEQ ID NO: 45560 - protein, 339 aa, Oryza sativa
MAVTPHHRLYEFAKTALIKIFAFPYATVCDLYCDGGVDTDKWGDAQIGHYIGIDASASGVNDARELWESRKKLFTSEFIELDPSADDFEAQMQEKGIQADIVCCMQHLQLCFESEEHAQKLLNNVSSLLKPGGYFVGIIPDSSTIWTKYQKNVEASHNKGLKTVPNSIRSENYVITFEVEEEKFPFFGKKYQLKFANESMFENHCLVHFPSFMRLAREAGLEYVEIQNLTEFYDDNRTQFAPLLGGYGSSLVDPRGKLVARSFDILGLYSTFVFQKPDPDAMPPIVTPELHDPENDQEEEWLWTQQASMDDGRVSRTDILPPADNEKGILGPGPADMRL

SEQ ID NO: 45561 - protein, 721 aa, Oryza sativa
MAAATALDSLPAPLRSLRLKTKQQELLLRVSALALIYVLAFVVRLFSVLRYESMIHEFDPYFNYRTTLFLSDHGFSEFWNWFDFESWYPLGRVVGGTLFPGLMVTAALLHRLLRALSLAVHIREVCVLTAPFFAANTTLVAYAFGREIWDSGAGLVAAALIAVCPGYISRSVAGSYDNEGVAIFALLLTFYLFVRAVNTGSLAWSLASAFGYFYMVSAWGGYVFIINLLPLYVLVLLVTGRYSQRLYVAYNSTYVLGMLLAMQIRFVGFQHVQSGEHMAAMGVFFLLQVFFFLGWVKYLLNDAKLFKSFLRITLTCVITVGTLALGIGTTSGYISPWTGRFYSLLDPTYAKDHIPIIASVSEHQPTAWSSFMFDFHILLFLFPAGLYFCFKRLSDATIFIVMYGLTSMYFAGVMVRLILVAAPAVCLISAIAASATIKNLTTLIRTKSKSPQTVSGKSSGSKAAAKGAVDQSLPFQQNVAIALLLGAFYLLSRYAVHCTWVTSEAYSSPSVVLAARGHNGGRVIFDDYREAYYWLRQNTPSDAKIMSWWDYGYQITAMGNRTVIVDNNTWNNTHIATVGRAMSSYEDEAYEIMQSLDVNYVLVVFGGVTGYSSDDINKFLWMVRIGGGVFPVIKEPDYLVNGEYRVDKGAAPKMLNCLMYKLCYYRFGELTTEYGKPPGYDRVRGVEIGNKDIKLEYLEEAFTTSDWIVRIYKVKPPKNRS

SEQ ID NO: 45562 - protein, 323 aa, Oryza sativa
MADAPATGGGFPAQDYPTIDPTSFDVVLCGTGLPESVLAAACAAAGKTVLHVDPNPFYGSLFSSLPLPSLPSFLSPSPSDDPAPSPSPSSAAAVDLRRRSPYSEVETSGAVPEPSRRFTADLVGPRLLYCADEAVDLLLRSGGSHHVEFKSVEGGTLLYWDGDLYPVPDSRQAIFKDTTLQLREKNLLFRFFKLVQAHIAASAAGAAAAGEGEASGRLPDEDLDLPFVEFLKRQNLSPKMRAVVLYAIAMADYDQDGVESCERLLTTREGVKTIALYSSSIGRFANAEGAFIYPMYGHGELHQAFCRCAAVKGIANASHSTSC

SEQ ID NO: 45563 - protein, 611 aa, Oryza sativa
MPKRVADEIAALPEPRGPLRRPCADLSRRVRLLAPLLDHLPASSSSSSSTPLADALGAARDLLRKTRDGSKIDQAMRGDAFLDEFAGVNRQIHLALDALPYNTFHMPQEVQEQVALVHSQFQRASTRTDPPDTQLSMDLAWALTDNPSDPALLTRISHKLQLHTMADMKNESIALHNMVISTAGEPDGCVDQMSSLLKKLKDCVVTEDHANDALTTRSASIKHRSPIIPDEFRCPISLELMQDPVIVSSGQTYERSCIQKWLDSGHKTCPKTQQPLSHTSLTPNFVLKSLISQWCEANGIELPKNKQNSRDKKAAKSSDYDHAGLVSLMNRLRSGNQDEQRAAAGEIRLLAKRNVNNRICIAEAGAIPLLVNLLSSSDPRTQEHAVTALLNLSIHENNKASIVDSHAIPKIVEVLKTGSMETRENAAATLFSLSVVDENKVTIGAAGAIPPLINLLCDGSPRGKKDAATAIFNLCIYQGNKVRAVKAGIVIHLMNFLVDPTGGMIDEALSLLSILAGNPEGKIVIARSEPIPPLVEVIKTGSPRNRENAAAILWLLCSADTEQTLAAKAAGVEDALKELSETGTDRAKRKASSILELMHQANEDSLKGNGH

SEQ ID NO: 45564 - protein, 137 aa, Oryza sativa
MPLLDTPYLALRVRLPRFPTPHNPRPAVAIEAQHSFPHGLLARAACQPLRHVAAPAEGEGEEVEDLGTPSAAAVAEAIRRASSASPVRFRRVHREENEKLRGEGGFTEPSTDFRRLCGEQLEMFRVVISRDAVLSVY

SEQ ID NO: 45565 - protein, 122 aa, Oryza sativa
MSHKCTEFNRSQFLSTHIRGLSVNCEKVNMSMFLSSGLLHSINFSRPYVFSEAYIAYRYVLKTFLCLHSQSHLHGCRQSVGIWMRSNHVYCAISVRQVSLIMQRICTTAVCMWMAALRRDMS

SEQ ID NO: 45566 - protein, 385 aa, Oryza sativa
MRIHDRSICFVNCHFAAHMEAVSRRNEDFDHVFRTMTFATPSSGIMTTSVSSSTGQLLRGANGSRMPELSDTDMIVFLGDFNYRLYDISYDDAMGLVSRRCFDWLKNNDQLRAEMRSGRVFQGLREGDFKFPPTYKFEKHTAGLSGYDSSEKRRIPAWCDRILYRDSRVSSGNECSLDCPVVSSISLYDSCMEATDSDHKPIKSVFNLDIAYVDKQTMRQKYVELMSSNNKVVHLLQELEAFPGVNINNSNIILQDRNPSVVKLQNRTEVIACFEIIGQAPNLSSTHFSAFPAWLKVSPAVGIISPGQTVEVTLQHRDLHSQQNYNGTSLDILPGGATQQKAATVFAKITGVYSTVAKYYEIHAQHQNCRSTLPSRGYNLGDRFF

SEQ ID NO: 45567 - protein, 412 aa, Oryza sativa
MAFDAFTDKNAVFRRLKAKPENKMCFDCSAKNPTWASVTYGIFLCLDCSAVHRSLGVHITFVRSTNLDSWTPDQLKMMAFGGNNRAHAFFKQHGWTDGGKVDAKYTSRAAELYRQILQKEVAKSSADNVLPSSPVAASQPQNPSDDFPEFKLPEAPAENTNGKQEPDVTNSQKAPTQTRKAPTHPTFATSVKKSIGAKKIGGKTGGLGVKKLTTKPSESLYDQKPEEPKPAAPVMTTSTTKSGPSLHSRFEYVENEPAVDSRNGGTQMTGHVAPPKSSNFFQEYGMDNGFQKKTSTAATKTQIQETDEARKKFSNAKAISSSQFFGNQSREEKDAQMSLQKFAGSSSISSADLFGRRDMDDSNLDLSAADLINRISFQASQDLSSLKNMAGETGKKLTSIASNFISDLDRIL

SEQ ID NO: 45568 - protein, 427 aa, Oryza sativa
MPHPSAAAMLPSPSSLLRLLRRPHPRLLPPPPPLLTRFLSSSSPGDAAGWASYDPLTDSLAPPAAAAAASDSEAPAEGEAWGVFDAVTGRIVMKEHPPYSQPPPPGPDEERSKVGRRRSAGVKDEARWSSVAAVGKARGKAGKERASYVCGNCGEGFSQWWGTCRHCEAMGTLTKYVPGSDPGASVGSHHAFRSWIPQKSKEMVPQSLQQVTKGVDQSEWRIPLSGNFGMEIARVLGGGVVPGSLILVGGDPGVGKSSLILQLASIMSENIGAGESSAIVYVSGEESIEQIGNRADRMSIKSRNLYLYSSTDIEDILDKIQPLSPRALIIDSIQTVYLRGFAGSAGNMTQVKECTSALLRFAKLTNIPVILIGHVTKTGDIAGPRLLEHIVDVVLYMEGERCLSHRLLRSVKNRFGSTDEDMVYNLF

SEQ ID NO: 45569 - protein, 481 aa, Oryza sativa
MAAAEARAAWQRAANRCIVQEDRKRAPKLACCPPSSEQQHVKSNGNCRNSEDRPVPNFMPLSWNPMNSSLPPDIRWWLQLQPNLGGQKNLAGEHLYFLGREISDKEVEDSAQKNIHDEPLFCEMFDTNPEKIEDVFEPSWMVSTASMKYSSETGLQDLKNIGGYSQVPSKCKENASDCLFNDKEFLDFKNFNPPPSKNPQKDDFDMNAPWKGGERSQPWWQITDENELALLVAERAMQHIENCDLPRPTQIVRVQGTESRSHENMGRYRGSSGPAGTMSYPDTGQCEHIECSYSTASTDEVDLTSDGVWQQQERNVARSDAQDFSRGINTEPRGKRTYQNPAEQAQLLEALCHSQTRAREAEMAGKKAQSEKDDVIKLFFRQASHLFACKQWLKMLQLENICLQLKHREHQIATMIPDIPWITLKKRTTPDHEKEDWTRKKGRRHKNAGSFCDALLFAVGLGLAGAGLLLGWTFGWLLAKF

SEQ ID NO: 45570 - protein, 925 aa, Oryza sativa
MKKSSPADKLSGGGEEDRNKLSGFGPISLVPARRKLNKVIFPYDEFLKLCNWRDLDYLPCGLLNCGNSCFANVVLQCLSCTRPLAAYLLGMDHSRECYKRHEDWCFLCELQCHIQRASESMHPFAPKNILSHLPNIGGNLGFGRQEDAHEFMRFAIDKMQSACLDEFGGEKAVDPSTQETTLIQHIFGGRLQSQVQCTACGMVSNRYENMMDLTVEIHGDADSLEECLDKFTAVEWLDGDNKYKCDGCSDYVKAQKRLTVYQAPNILTITLKRFQSGRFGKLNKRVTFPMKLDLTPYMSSTDGSDQYDLYAVVVHLDMLNASFFGHYICYIKNYRGRWYKIDDCKVMAVDEEEVHALGAYMLLYSRRTARPRPLIAVEELMKQQQQLKVCPLNGQNHLIQEDVPLEGVPSLKPSEDLEVDFESNNKSLHTMDREPDLDFHVSFDRDKFTNNDIMHPPVSTVSHALDENTRGDSGFPLEESNTMGSVQFGNSTYETSLVHSPAEQCEEPASCIDSVDYMEIDTEAGVKVERWSRPALGDSVGVMGNGTLVPALENGLAGKPIPGFPDKPSRINSFFAEGCQTGDNGAGSSQELNGHCNGEPSCPEQGVLTNGGNTPSPSTQCYENKFATSTNGNYSIGNGDTLSSSNSLHAGKQNAGFTYNGFNPKPYKEPSGSNTYLNNTCNGKPSEDNHNKCAPNLPAKDCQGGMPFLHRGFLLRPCSRGNPGKCDDGLSISNGTSSSFVSSNSKSSNISSSRNGEGGTPFLSPSFRTNHCRESAAMDTSASSVHDLKTSYNISLEQKSIGAAVPSDLIKESWGEDGTTFGTVYQQRATSVDNVSSRHDENGHVILGANNSSYGGENGSNNGILDMNSSSSQRDAASSTMMASEKGIGPKTADQVNYISDALEHDGLRRRLTSNFPDQNGIDAQ

SEQ ID NO: 45571 - protein, 298 aa, Oryza sativa
MPLPAFVAAAARLAVLVAAAATAANAASYARYRRRHLRRIPSPIDESADPLADFRAFPSSDADDSEEDNFFFGLATAPAHVEDRLEDAWLQFATETSCDDNGNVRDQRPVDALMASAAGDGGSQQSWRSTGGENIGDREQRKPLRVAMEAMLRGFEILAESGESAGGDNCSHNVAAWHNVPCPQERLRFWSDPDAELKLAKETGISVFRMGVDWARLMPEEPTEELKSSVNFAALERYRWIIQRVREYGMKVMLTLFHHSLPPWAGKYGGWKMEKTVTYFMDFVSWGCAGLLLIVYPI

SEQ ID NO: 45572 - protein, 668 aa, Oryza sativa
MQWKQEKLLQAVDAMRDIELELLRISTNRPQWTNLIMAVDSRVDKTLAILRPKALTDYRALLAALGWPPSLSSPDAANNKYSEIPNPLILMNEANKEKYSQSFLALCALQHAQANCEARQCQAKGASASMSDSKYFDKTAACFDNGLWAIDELVQPIASRLEYHFAKWSEQPEFIFALVYKIARDFMGGVDDILQPLIDRARLVGLSAKESWVTGMVKMLLGYLERQIFPVLVTSYQATDDKFEVHSSWMHLNDLMITFDKRMQLLADSGIQKIASISEGLSRSLSVFSIYSEHSDWLHMWAGVELNSAQHKLKSEMEDEINWSYSIKELGLQEITSNFLLSTREDYKAPTISEFVVKTASAMIERGHALPNRGLRIQYNRSSSVQFLSDFFLVLRERCEALQLTNTALEDDSLLKASFAINAARYCEYVLREWDDDIVFLEMGAHRKHVDGGQGQGHKHSAQHPCSFFGDEIAFLAKLGTDYLEQIMSSVLLEFEDLSWDYVQNIGLPNEQIHPVDEVLDEENLGVSPGFVASLEVVRDRTTKLMLHLNSKDFLDLWRSIAEGLDYFIYSSIRWGELTFSDQGVVQLRVDTKALLHIFRPFCLRPEAFFPFISDSLRLLAMRKTDARYLLEVLKNAKENDSCLRQQGLQHVNASQAMKILGSKRSDG

SEQ ID NO: 45573 - protein, 1055 aa, Oryza sativa
MGKRVKAKAKNPRKAQQQQEPTAAAPSDAGSGDAAAAAAQDSGNSTEEAAAAAAAAASASGREQCGHYGGDSARLDKVLLEIMTSKHFASCEHCRDDAPRKKGGGKEKGGKQQQKKKGGGTKGSAAKAKVEKSDMWVCLDCGRHFCGGEVDVTKPYGHARRHAKQDRHWWAARFDDPTVAFCLSCEKEVSIEMPRIETVAAVPTEVAGAADRDLGLVNSHGSVIRGLPNLGNTCFFNAVMQSLLALDRLRSKMLGPDVPTGALLMSLKKLFMETSASNDVGGALSPKNLFSNICSKYPQFRGFQMQDSHELLRCFLDGLHTEENEARKLADEASSATIPTIVDSIFGGQLSSTVSSTECTHSSVKHDQFLDLSLPVPSRRPPAKSVSSPPAKRNKQSLRDRNKNRRYGKISTRVTPTIEVSNKEKIQTVAEGNNSLIPGSESGQVVSEKEPEPSECSESCASVPNLEQTGTSNVEDGTCWLDYIDDADEAKSEILDSADSIEAGQIWEDKGVTYGPFLPQDDALSKEQVLGSEHSGENPIDDATSSQPVILLPYKEFGSTANEMDGTTENSQKPEDAVAPPAVSPLPEDNAQPASVGDGDQDDYVGLGDMFNEPEVTSEVKKEIGTVEDIDVMAWSSNSAEDEVDDSNAPVSVEGCLALFTEPELLSEPWHCELCSDSIACPNTNDGKDDEMATSVNERKDGEEMMAGGDETQDGDKLIANCTEKEGIDQIMATDGCSDNLNSDMNSKEGGCANSSLVGADNSVDANFPENGKVALLKTGSSLVDTTEQADSKAYRREIRDLNNSAVEYTSSSKQPHDSAQHKDEHNVDVASEETTAPECSCDNESASCSTTNKNEAECGVGAEEIVTSSLPSETQRILPGEKDNEDVVTRNHGRRKRMKMVGKAHQGQDNQNEQKENGKKVFRSAMRRILISKAPPVLTINLNRFSQDSHGRFKKLKGHVHFKETLDVRPFMDPRSKENDNTTYRLVGVVEHLGTMAAGHYVAYVRTGKIGGRQQRSTGSKSWFYASDAQVREASLEEVLNCEAYILFYERVGD

SEQ ID NO: 45574 - protein, 519 aa, Oryza sativa
MDRKRVGIIGAGVSGLAACKHSLDKGFNPIVFEADDTIGGVWAHTLESTRLQAPTTAFRFSDLAWPATVTEKYPSHRKVMEYLRSYASEFDLLKCIRFNSQVLGVEYLGATEGEIMQWEHWSGNGEAFGAQKDGVWRLTVKDLKIGNIEVFLVDFLIVCIGRHSGSPNIPEFPANSGLELFKGKILHSIDYSYMDNAAEFVKGKKVTIIGSGKSAFDIAAEVAKVNGETQPCTMIYRTRHWLVHKSSICGVDLSYFYLNRISQLLVHKPGEGFLYYVLATALSPLRWAISKVIETYFKQSIPLQKHGMVPDYSFSFAMSSCLIAMLPEGFYDKVDEGSIILKKSKRFSFFNDGIILEDGNEHIKSDIVILATGFRGDQKLRDIFTANWCKEKVAGSSATAVPLYRECIHPRIPQLAIVGYSESLTNIYASERMANWVTHFLGGRFKLPSIRCMEESVAEWAKYKDLYNGKYFRRSCISTVNIWFNDILCQDIGCNPKRKKGVLAEWFQPYGPADYASLY

SEQ ID NO: 45575 - protein, 229 aa, Oryza sativa
MASAATLPKLRFRPKCHGHFQAIYPVHVHIKNCNACKCQIPTHGLLVSSARSRPVLPVSAVGSGGGSSVAEDERRSGLSLQNAKTSVVSRDDETINVRVDLPGKATQKVFDEALTSLARDAPPVPGFRKSKGGRTSNIPSSILLQMLGKSRVTKFVLQEILSITVGDFVKKENLKVNPEIKTTQSEEELESSFTPGSSFSFSVVLQLEKPESDETSENSESDEASEPSS

SEQ ID NO: 45576 - protein, 405 aa, Oryza sativa
MAALQSGVVVLADAADTVAADRPLSGRQRPLVSNRGKFALGFFQPENSEHWYLGTWYYQISKHTPVWVANRGSPISNPDTSQLTIATDGNMVLLDNSTTAIWSTNISNFTSNSTVGVILDSGNLVLADASNTSIILWQSFDHFGDTWLPGGKLGRNKLTGVSTRLVAWKARNDPVPGVFSLELDPNGTSQYLLQWNSTLQYWTSGNWTGRIFTGVPEMTPTGSYPNSLYTFDYVNGENESYFVYDLKDDSVLTRFVLGEMGQIQFLTWMNGANDWMLFWSQPKAQCDVYSLCGPFSVCTENAMASCSCLRGFGEQNVGEWLQGDHTSGCRRNVELQCSSNGSVVGRSTDRFYTMANVRLPSDAESVVAAGIDQCEEACLSNVLALPTPTMAAAHCGTETSSTCKM

SEQ ID NO: 45577 - protein, 330 aa, Oryza sativa; identical to SEQ ID NO: 31165

SEQ ID NO: 45578 - protein, 628 aa, Oryza sativa
MMKAGTRRLVWPRSKRVQRWNRWILLARAAALAVDPLFFYALSIGRAGQPCVYMDAGLAAAVTALRTAADLAHLAHVLLQFRVAYVSRESLVVGCGKLVWDPRAIAAHYARSLKGLWFDLFVILPIPQVIFWLVIPKLIREEQIKLIMTMLLLLFLLQFLPKVYHSIYIMRKMQKVTGYIFGTIWWGFGLNLFAYFIASHIAGGCWYVLAIQRVASCLQEECKIKNTCNLTSLACSKEMCFHLPWSDKNGLACNLTSFGQQNIPDCLSGNGPFAYGIYKGALPVISSNSLAVKILYPIFWGLMTLSTFGNDLEPTSNWLEVIFSIINVLSGLMLFTLLIGNIQVFLHAVLARKRKMQLRFRDMEWWMRRRQLPSRLRQRVRKYERERWAAITGDEEMEMIKDLPEGLRRDIKRYLCLELVKQVPLFHGMDDLILDNICDRLRPLVFSSGEKVIREGDPVQRMVFVLQGKLRSTQPLAKGVVATCMLGAGNFLGDELLSWCLRRPSLDRLPASSATFECVETAQAFCLDAPDLRFITEQFRYKFAKREAQADGALLLLQLADVGGRQHPARVAPVQGKDDDRPGVGGAAAVRRRARRRGPPAPPLRGHVHVAQATRSPRVRAAVDWDRE

SEQ ID NO: 45579 - protein, 445 aa, Oryza sativa
MEDLALPAAPPAPTLSFTLLAAAAAVAEAMEEALGAALPPLTAPVPAPGDDSACGSPCSVASDCSSVASADFEGFAELGTSLLAGPAVLFDDLTAASVAVAEAAEPRAVGATARSVFAMDCVPLWGLESICGRRPEMEDDYAVVPRFFDLPLWMVAGDAAVDGLDRASFRLPAHFFAVYDGHGGVQVANYCRKRIHAVLTEELRRAEDDACGSDLSGLESKKLWEKAFVDCFSRVDAEVGGNAASGAPPVAPDTVGSTAVVAVVCSSNVIVANCGDSRAVLCRGKQPLPLSLDHKPNREDEYARIEALGGKVIQWNGYRVLGVLAMSRSIGDKYLKPYIIPVPEVTVVARAKDDDCLILASDGLWDVMSNEEVCDAARKRILLWHKKNAATASTSSAQISGDSSDPAAQAAADYLSKLALQKGSKDNITVVVIDLKAHRKFKSKA

SEQ ID NO: 45580 - protein, 457 aa, Oryza sativa
MEDAASEVFMETTICCAETPRASHSSSYLQQCHSRSVVSTHGNVLDISPRLSYHKPTTNKDKMLRRRYSLNLPEHLPEHHVITSAEQSEKTISKSIADLVWEIAALEEEVVRKELHLLSLYRAAFDQHLGVSPRVSTQVDQEIHHQKSRKKADEGALRLRNIKESASYNLPTVSTVSDSKHGLSRSSSGHSSLANFLSASIAEYVPKISCKLSEDIVRCISAVYCKLASQPSQNLADFETLSTPSFSSSSSTFSLKHRVDSWSPRCHYNVNTSSDKYDSLNEKSEQYNGMIICPRIYMDAEKFEYASKMLETVRSLIKRLEKIDPTKMAHEEQLCFWINIHNALVMHAFMAYGLQEKRMKNTDMILKAAYNVGGLSVNAQIIQNSIIGCQSHRTSVWVRTLFTPLKKIGIRELHTSICSSSSRATCSFCSFHWSNFRSTCEAVHCQESESSTGSSQD

SEQ ID NO: 45581 - protein, 145 aa, Oryza sativa
MRHLCRAPRLRRIQSVAHHRHNDKSSYPTLSPKRRRCYLHSASVLLASSLLPAWRRSAVVPLLRSPSPPPRLLTPPRVAHAAVVPFRRRPDAAVVPFHRCPDAAAHTLPSSPSTAGAAVFPIGHTNRAMATHKIPHAWTTKAPSR

SEQ ID NO: 45582 - protein, 361 aa, Oryza sativa
MASAASPPRSGDASPSSPLLPSPTSPDRRSGGGGGGGRLLPGLRGAARFLGRTGSRRLMREPSVAVRETAAEHLEERQTDWAYSKPVVVLDVLWNLAFVAVAAAVLAASLPESPSVPLRVWLAGYVLQCLFHVLCVTVEYRRRREARGGGFGADQGAAADGDFKLSIVKHLESANTMFSFIWWIIGFYWISAGGQALSHDAPQLYWLSIVFLAFDVFFVVFCVALACVIGIAVCCCLPCIIAILYAVTDQEGASEEDINNLSKFKFRTMGDADKLVAGIAAPVGGVMTECGTNPPVEHFLSAEDAECCICLCPYEDGAELRELPCNHHFHCTCIDKWLHINATCPLCKFNIIKSNLGPEDV

SEQ ID NO: 45583 - protein, 375 aa, Oryza sativa; identical to SEQ ID NO: 43416

SEQ ID NO: 45584 - protein, 432 aa, Oryza sativa
MTGAVSKLAAPRPAAAAPLPPASVRSAFLASAPSPRRFSVSIAAGRARSPIIAMASDKEGNGAPTKRTTLHDLYDLQGQSPWYDNLCRPVTDLLPLIGSGVRGVTSNPSIFQKAISTSNAYDDQFKQLILAGKDAESAYWELVIKDIQDACKLFEPIYDQTDGADGYVSVEVSPRLANDTQGTVEAAKWLHKVVDRPNVYIKIPATAECVPSIKEVIANGISVNVTLIFSIARYEAVIDAYIDGLEASGLSDLSRVTSVASFFVSRVDTLIDKMLEKIGTPEALALRGKAAVAQAKLANQLYQKKFSGPRWEALVKKGAKKQRLLWASTSVKNPAYPDTLYVDPLIGPDTVSTMPDQALLAFIDHGTVSRTIDANVSDAEGVYSALEKLGIDWDEVGKQLELEGVDSFKKAFDSLLGSLEEKGNSLKKTVSL

SEQ ID NO: 45585 - protein, 129 aa, Oryza sativa
MDPTTTTTDSECDFIKKIPSWMIKNSPMHCMEAGHFGKDAAAAAAAATADAMEHALPCSDLHHLRVGKTAEQSCSVCLKNFEEGDYIWSMPCSHTFHQLCILGDRSCRVCHPAAPPSTEEKPEAPRTVN

SEQ ID NO: 45586 - protein, 973 aa, Oryza sativa
MGGQEQVAMAERRPCYCRNNGFLLLLVQVLLFLFLFLDSSMVATAASAPAPLNTTQVSIMKELSGLVTASAKWNTSDSNPCRWDGVSCSSSSNSISVVTNLTLSGYGLSNSTIFATICSLDTLQILDLSKNSFTNSIEQFFTSSCSMKAGLRSLNLSSSQLSMPLSNFSGFPLLEVLDLSFNSFSGDVRTQLSSLLKLRSLNLSSNNLAGDVPTSMTPSLEELVLSINNFSGSIPIALFNYQNLTMLDLSQNNLNGDVPDEFLKLPKLKTLLLSGNQLSGNIPVSVSNVASLARFAANQNNFTGFIPSGITKNVKMLDLSYNELSGVIPSDILSPVGLWTVDLTHNKLEGPIPSSLSPTLYRLRLGGGNSLNGTIPATIGDASTLAYLELDSNQLTGSIPLELGRCKSLSLLNLASNKFQGPVPDAISSLDKLVVLKLQMNNLDGPIPSVFSNLTSLITLNLSGNSFTGGIPREIGKLPKLSILNLQCNKISGTIPDSLHLLTSLIELNLGNNILTGTIPTMPTKLSTVLNLSHNNLSGSIPSNIDLLSDLEILDLSYNNLYGEVPASLAKLESLTQLVLSYNHLSGSIPIFRQHVDIATNGNPDLTNGTRNYDNAPTSGKRRTHNTVIIVVAITGALVGLCLLAAIVTISYSKRIYRVEDEGPSTEDVARIINGHLITMNSIHTSAIDFVKAMEAVSNHSNIFLKTRFCTYYKAVMPNGSTYSLKQINCSDKIFQIGSQGKVAHELEVLGKLSNSNVMVPLAYVLTEDNAYIIYEHVHKGTVFDFLHAGRSDVLDWPSRYSIAFGLAQGLTFLHGCTQPVLLLDLSTRTVHLKSMNEPQIGDVELYKIVDTLKSSGSLSTIAGTVGYIPPEYAYTMRLTMAGNVYSFGVILLELLTGKPSVSDGIELAKWALSLSGSPDQREQILDTRVSRTSAAVHSQMLSVLNIALACVALSPDARPKMRTVLRMLFNAK

SEQ ID NO: 45587 - protein, 205 aa, Oryza sativa; identical to SEQ ID NO: 31273

SEQ ID NO: 45588 - protein, 152 aa, Oryza sativa
MDSSRFRSAAATEAAEEEAAGWVTVEEWAGSSAAALSRTAVLTASPSSSLASRRFGSRWGRVGGRLLGAFVPEGFPGSVTPDYVPFQMWDTLQGLSTYIRAMLSTQALLGAIGVGEKSATVIGATFQVNFDFMSWFSLLQFFLGARHNVNGF

SEQ ID NO: 45589 - protein, 676 aa, Oryza sativa
MENQPVLFSAVFILYVSFLGPFCASSGEESFVYSGFASTGAANLTLDGSAMVTTTGLLQLTDSMPNIQGHAFYPTPLRFKKQSNGIVQSFSVAFMFGIISPYSDASTDGMAFVVAPNKGFPDAKAAQFLGLLNISSDNSTSNHMFAVEIDTAQNTELDDIDGYHVGIDINSLHSKKSQHIGFYNDQHGGLLKNLTLTGSNCKPVQVWVDYDGETTQINVTLAPIKVTKPTRPLLSVPFNLSTVLTDQAYIGFSAATGPLTSHYYVLGWSFAMNAPAPPIEISRLPRLPCPGDNRLQKILQILLPIVAVALIFIVVMILVRRQQRYAELREDWEVEFGPHRFSYKDLFNATEGFKSKHILGVGGFGKVYKGVLRTSKLEVAVKKVSHGSNQGMKEFISEVVSIGHLRHRNLVQLLGYCRRKGELLLVYDYMPNGSLDKYLYGEDNKPVLNWAQRMQIIKDVASGLFYLHEKWDKVVIHRDIKASNVLLDSEMNARLGDFGLARLYEHGTNPQTTHLVGTMGFIAPELARTGKASPLTDVFAFGTFLLEVTCGRWPISNSAHHGRKMLVDWVLQHWHQGSLPETVDPKLHGIYNVDEACLVLTLGLMCSHPIPGARPIMRQVMQYLDGDAPLPEFTPATLNSSLLAIMHNEGVDPYVAQYPWSGNSLGTMTPDILSGR

SEQ ID NO: 45590 - protein, 713 aa, Oryza sativa
MAATSPLPRWAPTPSPSRPLWRWGWGGGATPDARADGGVTGWTSSFFAAVFPWTRRRRVDDRWAPSAGGGVGTFDGVEVPLPAAQAVSLPRAAADVVDDPAVFLTWEDVRVTVPGRTRGSPPARILDGITGHARPGEVLAIMGPSGCGKTTLLDTLAGRLGQEMNQTGVILINGRQEKLAFGTSAYVTQDNVLMSTLSVREAVYYSAHLQLPDTMLASEKRAHAERVIREMGLSDTMDTRIGGRITKGISGGQRKRMSICIEMLTRPRLLFLDEPTSGLDSAASYHVMSHITRVAAREGMTVIAAVHQPSGDVFDLFHGLLLLAYGRMVFFGTVSNATEFFTQSGFPCPHLRNPSDHFLRTINKDFDEGTMESSKANRKTAAEATNILTNAYHSTYSEKTANEIVEMKGMGGTPFRRKEQASFLTKLLVLTRRSFLNMHRDIGYYWMRLGIYLGIGICLGTIFYQVGYSYSSIQSRCEVIMYTTALVTFMAIGGFPSFVEDIKLFRRERLSGHYGVMEFVISNTLSATPYLAVIAVIPGAMMYYLTGLTRGAEHFAYFVATLCMCTLLVESMMMIIAVIVPDFLMGIIIGAGIQGMMMLNGGFFRLPNELPKPVWKYPCYYISFHKYAVQGFYKNEFIGLSFPSDQLIEANATISGLQVLKERLQVEMGYSKWVNLAILFGMMVTYRMIFFVIVKIAEELRLKLRGIRFRRLK

SEQ ID NO: 45591 - protein, 594 aa, Oryza sativa
MASPPPPPRLLTPKPDPDAPLPPLPYPDPNLVQSMLFSAQSPQAQPQAPPPHIQPPASASAEAPSGDEKNKKKKKRARASQEMVRITNLSIADHLHYRSLVRRARLTFEALRAIYQRQGLATAGGIRNRFDLRASSKMLSKGLWMHRDIRTVGSIPGLPVGDSFFYRAELCVLGLHTAPQAGIGYIPASIVDQGHPVATSIVSSGGYLDDEDSGDVLVYSGSGGRLRNRLDHSADQTLQRGNLALHYSCHYGIEVRVIRGHACDHSPSSKVYVYDGLYRVVTSTFGPGKSGRDVCKFKLVRIPGQDDLGSKAWHTAAELKDALDSKIRPPKYISLDIAKGKEPFRVPLYNKLDDDRSPLFYDYIACPDFPTTQQLLKRQTQRGCHCAELCGSRCSCERKNRGADGPVYTSDGILLRGRPLVYECGPLCGCPMTCPNRVTQQGMKHRLEVFRSKETGWGVRTLDLIQPGAFICEYAGDVLSLDSHSGDAPLPPMEDGSSIIDPTKFPERWREWGDASVVYPDRVPHFPLFAGARYRLDVSQRRNVACYISHSCSPNVFLQYVIRGNEDESYPHMMVFAMETIPPMRDLSIDYGLD

SEQ ID NO: 45592 - protein, 230 aa, Oryza sativa; identical to SEQ ID NO: 33533

SEQ ID NO: 45593 - protein, 386 aa, Oryza sativa
MAKPISIEVWNPSGKYRVVSTKSMPGTRWIRLLADNDCRLEICTETKTILSVDDILALIGDRCDGVIGQLTEEWGEVLFSALKRAGGTAFSNMAVGYNNVDVEAANRNGIAVGNTPGVLTETTAELAASLSLAAARRIVEADQFMRAGLYDGWLPHLFVGNLLKGQTVGVIGAGRIGSAYARMMIEGFKMNLIYYDLYQSTRLEKFVTAYGQFLKANGEQPVTWKRAATMEDVLREADVISLHPVLDKTTYHLINPERLAIMKKEAVLVNASRGPVIDEVALVEHLKANPMFRVGLDVFEDEPYMKPGLADMKNAVVVPHIASASKWTREGMATLAALNVLGKIKGYPVWGNPNLVEPFLKEDATPPAACPSIVNAKQLGLPSSKL

SEQ ID NO: 45594 - protein, 763 aa, Oryza sativa
MPPLSPSSSPPATAAAVLRCGSPSCRPVTHELFRQKLSFMVSFQAQHMRCAPHLIKSVVKGIRANITDGENGATEPARELLERLFAKTQRLDTSASQDSELSMSIDVLKSEFEAALSTLRKKERDLRDAENRVSVDQVRLNRAKKDLDQRERGINRAYARQQEMERSLGKASRDLVLQVRQIDNLKLLVDEQDKKIASSQDLLSQKVTEVEKLKQDMLKKNEEVTLMRSEIKSKEQLLLEANQAAEQQEATIKELRSEIKRKEIDFSRSNELRKANEQRLKIAEQELERQNMGWLAAQKELKEVAQLACKDMDGIKDTVSDFKRVRSLLDAVRSELIASKEAFSSSRKQIEDQAVQMQKQVQELSGQRLLLSSFNQNLEAARLEIQGKAKELNAAQSRCHELESLLLQEKEKVESLEAVLTKERESLEEKTKEVELLQKALVQKENEHSNSLKLVEIKESELLEARNEVQDMKSKVESIQIAVQEKDSELSETQRRLAEVNSEVVELKQLLDSKEDQLVQVRTELQDKEQHIQTLQNKLDSMKFSCSQAESVVQKIAELTGNLASSVEGEEMDIYALLDDEISSTGTALKSNLHKHNQLEADIEMLKESLHQKDMDLRAAHEALDAKDQELKAVMRRWDVKEEVDKLEGFLKDPSDIKRPSDFSVHMGLQNLQTEAAEVEALAATTTLKKLADMAKGFLRSGKTDSGINLVASPSVNSTRIVSKTKPNKEMDMILDAEKEIAGLFSLTEQLITEAGIDVAHQA

SEQ ID NO: 45595 - protein, 268 aa, Oryza sativa
MYSNFKEQAIEYVKQAVQEDNAGNYVKAFPLYMNALEYFKTHLKYEKNPKIKEAITAKFTEYLRRAEEIRAVLDEGGGGGGANGGDAAVATRPKTKGKDGEGGGDDSEQSKLRAGLNSAIITEKPNIKWNDVAGLESAKQALQEAVILPVKFPQFFCMVHQEQESLIWLKLLQLRLILHFSVYLHQTLFQNGWERVKNLLQTFSKWLEKTLLPLSSLMKLIHCVVNEEKEMRVKLLGESKLNFLCKCRVLAIMMTKYWFLLLQTRHML

SEQ ID NO: 45596 - protein, 345 aa, Oryza sativa
MTGTEQMMYHQQQVQSDSQHLSSRPGLPPEKQFLLQGGADSSSGLVLSTDAKPRLKWTSELHERFVEAVNQLGGPDKATPKTIMRLMGIPGLTLYHLKSHLQKYRLSKNLQSQANASRAQGVLGCSTTEIDKPCEGNGSPASHLDLETQTNSSMHINEALQMQIEVQRRLHEQLEVQRHLQLRIEAQGKYLQSVLEKAQEALGTIAIAETAATANASSSKRLQNEHTQLHHHQQQQQVGDGSVDSCPTACDREGSHHSRSHGHRGEQDILSIGLPPFEPAAARSGKEHHYLLFPNEPSRRRSCSDERRREMSTLQASELDLSINGRSSSHSHRRENIDLNGAGWS

SEQ ID NO: 45597 - protein, 281 aa, Oryza sativa
MAADYRTPDRLLSAAAPGEEQAQDPPKPVLAVAATHDGLRFWQYMLAGSVAGVVEHTAMFPVDTLKTHMQAGAPPCRPVLSLGAVLRAAVSGEGGVRALYRGLPAMALGAGPAHAVYFSVYEFAKSRLSERLGPNNPAAHAASGVLATIASDAVFTPMDTVKQRLQLTSSPYTGVSHCVRTVLRDEGLGAFFASYRTTVVMNAPYTAVHFATYEAAKRMLGDMATNEDSLAVHATAGAAAGALAAAVTTPLDVVKTQLQCQVRISYEFYLCFAESVYFNSI

SEQ ID NO: 45598 - protein, 372 aa, Oryza sativa; identical to SEQ ID NO: 45456

SEQ ID NO: 45599 - protein, 709 aa, Oryza sativa
MASWLKVAEDLLEVVDRRAKIVATELSDEQSSPQPSGSSSQEGQAKKGKLREKGPLKLATGDAGSRTAAQKERKSRQPPRERIKIEKIRPSPPVDSSSVDASASKPDVSSSDVKGLDDDGGAEKEEKVVVDRKNDIGAEVVDTEVEVQSTERSAEDAAIVVDGAADSGNSEGAAESSAPSVPDERCEPSISNQDAEIVSAVNLEEKDSAMEVIHEKNIKEVPDTQVSGKSQDSKREGLSDSPESTENQQEHKLDSGSVKDQDQLEEARGLLKNVVKTGQSKEARLARVCAGLSSRLREYKSENAQLEELLVQEREKCSSYEAHMKQLQQELSMSRVEGSRAESNMVDALTAKNAEIESLVKSLDSWKKKAAASEEKLAALQEDMDGLKRNRELTETRVIQALREELATVERRAEEERIAHNATKMAAVEREVELEHRAVEASNALARIQRAADQSSSRAMELEHKVAVLEVECASLQQELQEMEARNRRAQKKPSEEANQVIQMQAWQEEVERARQSQREAETKISSLEAELQKMRVEMAGMKRDAEHYSRQEHVELEKRYRELTDLLYHKQTQLESMASEKAALEFQLEKSIKQFHEVQMEAERSRVARRSASAWEEDADIKALEPLPLHHRHMATANQQLQKAAKLLDSGAVRATRFLWRHPVARVSLLFYLVFVHLFLMYLMHRLQDFASREGPTAMGGLANSDLP

SEQ ID NO: 45600 - protein, 430 aa, Oryza sativa
MAAAAEQQQQQQQQGFRPLDEASLVAYIKATPALAARLGGSLDALTIKEVGDGNLNFVYIVLSDAGSVVIKQALPYIRCVGDSWPMTRERAYFEASALQKHRGLCPDHVPEVYHFDRAMSLIGMRYIEPPHIILRKGLIAGVEYPLLAEHMADYMAKTLFFTSLLYNSTTDHKKGVAQYCDNVEMCRLTEQVVFSDPYMLAKYNRCTSPFLDNDAAAVREDAELKLEIAELKSMFIERAQALLHGDLHTGSIMVTPDSTQVIDPEFAFYGPMGYDIGAFLGNLILAYFSQDGHADQANDRKAYKKWILKTIEDSWNLFHKKFVELWNKHKDGNGEAYLPPIYNSSELLCLAQKKYMTSLFHDSLGFGSAKMIRRIVGIAHVEDFESIEDASKRASCERRALNCAKAILKGRRQFESIGQVIVHVQSFDRD

SEQ ID NO: 45601 - protein, 280 aa, Oryza sativa
MSAVPVVSSALAGPAVAVAVARPASGSVTRLRAPAPHGVPAGSVPLASGLANCYRRSAAAARRLPIPSAAGGGTVGDAFVIEDTTNVKFPREIAVPGYTEPLVILGTGYREKFFLKIYAAAFYVDCSIGVDTMRWREKVGIETFDASSVFDSIFKAPVVKSLSIILVRDVDGKTFVKALDDIIARQIKKPSAEEEQSLSTFQKTFLGRSLKQGTTVYLTWLEPSKLLISIAGNQDPCQVDAEITSATVNYALYDGFLGSSPVSPTLRSSTALLLEAILTK

SEQ ID NO: 45602 - protein, 124 aa, Oryza sativa
MSTQSISPAAAAASAQYSYPAAAAAAVPSYFPVPFHLQNVQQPATWPAAPAAYNAVYPMPQVQQVQQLFQKDSQIITPEALATVKAAIANSEKDKKIEANKKAVPRKAAGQSWEDPTLADWPEM

SEQ ID NO: 45603 - protein, 222 aa, Oryza sativa
MNCLVAYRMEPEVFKSTAEFLRRKNLVRDTRGVRVEEKLAMFMYMLSHNASYQDMQYEFKHSGATIHLHIRAFFDIVPTLTHRFIKPPLANQTHSKITSNPRFYPYFKNCLGAIDGTHVPITINPEMAAPYRNRKSTLSQNVMLACDFDLNFTFISCGWEGSATDARVLRSAQLNGFRIPMGKFYLVDGGYANTPSFLAPYRGVRYHLKEFGRGHRRPSNYK

SEQ ID NO: 45604 - protein, 608 aa, Oryza sativa
MVLPFEPLYMSFNEINYYVDMPLSQGVTADKLQLLSGISGAFRPGVLTALMGVSGAGKTTLMDVLSGRKTGGYIEGEIYISGYPKNQATFARISGYCEQNDIHSPQITVRESLLFSAFLRLPKEVNDQEKKIFVDEVMELVELTGLKDAIVGLPGVNGLSTEQRKRLTIAVELVANPSIIFMDEPTSGLDARAAAIVMRTVRNTVNTGRTVVCTIHQPSIDIFEAFDELLLLKRGGQVIYSGPLGTNSHKVVEYFEAIPGVPKIEENRNPATWMLDVSSAASEVRLEIDFAEYYRSSTMHQRTKALVKELSNPPPGSDDLYFPSQYSQSTFNQFKLCLWKQWWTYWRSPDYNLVRIFFALFTALMLGTIFWRVGHKMESSKDLLVIIGSMYAAVLFVGFENSVTVQPVVAVERTVFYRERAAGMYSAIPYALAQVVVEIPYVFVETVIYTLIVYPMMSFQWTPAKFFWFFYVSFFTFLYFTYYGMMNVSVSPNLQVASILGAAFYTLFNLFSGFFIPRPKIPKWWVWYYWLCPVAWTVYGLIVSQYGDVEDFITVPGQSDQQVRPFIKDYFGYDPDFMGVVAAVLAGFTVFFAFTYAYSIRTLNFQQR

SEQ ID NO: 45605 - protein, 274 aa, Oryza sativa; identical to SEQ ID NO: 32580

SEQ ID NO: 45606 - protein, 608 aa, Oryza sativa
MARTMGSTPTYCSYQTNGVGALKQSPHMQFQQSYNYGVRFLKRDTLSVRINKHMAKRIATSTGICTKPRRFHMPIVCSAGMTIIFIATECHPWCKTGGLGDVLGGLPPALAAMGHRVMTIVPRYDQYKDAWDTNVLVEVNIGDRTETVRFFHCYKRGVDRVFVDHPMFLEKVWGKTGPKLYGPTTGDDYRDNQLRFCLLCLAALEAPRVLNLNNSEYFSGPYGENVVFVANDWHTGVLPCYLKSIYQAKGMYVNAKVAFCIHNIAYQGRFAREDFELLNLPDSFLPSFDFIDGHFKPVVGRKINWMKAGITECDLVMTVSPHYVKELASGPDKGVELDGILRTKPLETGIVNGMDVYEWNPATDQYISVKYDATTVTEARALNKEMLQAEVGLPVDSSIPLIVFVGRLEEQKGSDILIAAIPEFVEGNVQIIVLGTGKKKMEEELILLEVKYPNNARGIAKFNVPLAHMMFAGADFIIVPSRFEPCGLIQLQGMRYGVVPICSSTGGLVDTVKEGVTGFHMGLFNVECETVDPVDVTAVASTVKRALKQYNTPAFQEMVQNCMAQDLSWKGPAKKWEEVLLGLGVEGSQPGIEGEELAPLAKENVATP

SEQ ID NO: 45607 - protein, 252 aa, Oryza sativa
MIDQFIAHFSKCKNFVADPQGDIGDGEDVLVRVHSECLTGDILGSARCDCGNQLDLAMQLIDKAGRGVLVYLRGHEGRGIGLGQKLRAYNLQDDGHDTVQANVELGLAVDSREYGIGAQVVHRHQPWRILNSILHLHLHFDDFDPISDSAGHGGAHDAADDEQPGKVRRAQGLRARRRRQGSGDLPHHQGEPEVPRDEAHQDGPCLRLRPPRQRPGGIPQPGRHRRRPRRRRHPQLNATTKFTTTDSPHLIL

SEQ ID NO: 45608 - protein, 342 aa, Oryza sativa
MFHPLPPNLGPGVYLGAVERATSFITDDVWYGIYAGTNPETFVRADGAFIPFADDYDITSVNTSVKGVGVIGDVKAIDLQSPISSLIGRQVVKVGRSSGLTTGTVVAYALEYNDEKGICFFTDFLVVGENQQTFDLEGDSGSLIILTGKDGEKPQPIGIIWGGTANRGRLKLKSGQGPENWTSGVDLGRLLDLLELDLITTSEGLQEALEEQRIILAAAAAAANSTAGESSPVAGPQENEKVDKIYEPLGINIQQLPRDNSATSTGPDEFHVDTVEGVTNVEERQFLIGMSPAREGQEANGDLNNLAELENSPEDICFSLHLGEREPKRLRSDSSLDIDLQK

SEQ ID NO: 45609 - protein, 285 aa, Oryza sativa; identical to SEQ ID NO: 31445

SEQ ID NO: 45610 - protein, 535 aa, Oryza sativa
MERALDSLTYKGSIPDAILQSRRDNKLFVVYISGEDETSSSLEQSTLVNESVAEVIGNCCVFLHLKQGNVDASQFSAIYPQKAIPSISVIGQNGVMLWCHEGYISSKDLKENIEKAWATLHLQGTAAAFLTASLASRMTEPVNTTPTTLPTQGGSSAAENPSTSSNQSTGTSGASGFANPTDSVAQPPRSTSRDETPSISEKESSNLDSSPGNRTVQERPDSDSAQVKGSLPDHPRSSNIEGCANPVQSGNTASLKQKNKVDDGFTKVSSESVPTRVASRGKSSKVAVDQDKATTTSTPIEPAPVRSNDIQLVVRIPDGPSLQIKLTKDDNLRKVKNFVDENRANGAGSYDLAMLYPRKVFTEQDMEATLHELGIETRQALTIVPHHKTIRAAKRQSSSSPHEGDNNMDADSSGGSGYFGYLRTALSFVNPLSYLRANAAPSNPDQLANQGSPQYRPSTGPWNRPGEDTASESRIPDSARQQAARDTSSGSTLRRRPRQFGGNVHSLRSDDQGPSDDRNVYWNGNSTEFGGEDKK

SEQ ID NO: 45611 - protein, 294 aa, Oryza sativa
MDVSRRKKWVAWVAAVTIFVVLMLVTPAIPQNEEYHDFADQRRLFLGIPNTLNVISNIPFFFVGVVGLVLCHYKNYFRLNSQGELWSWTLFFAGVTAVAFGSSYYHLKPNDATLVWDRLPMTIAFTSVMAIFIIERVDDRAGTKSLAPLVIAGALSIMYWRFFDDLRPYAVIQFVPCIAIPVMAIVIPPMYTHSSYWLWAAGFYLLAKVEEAADKPIYKWTHQIVSGHTLKHLAAAMVPVFLALMLAKRTVEPERVSLFQRWKVKLVAVRETRFNKDRNTVDYNYIAVSTTPEP

SEQ ID NO: 45612 - protein, 401 aa, Oryza sativa; identical to SEQ ID NO: 43060

SEQ ID NO: 45613 - protein, 468 aa, Oryza sativa
MAATPATATFPHLGLRPKPLLRRRLRRIAVSVSPSGPDETPADDPPVIPSILVKNTEPEDVARRRSWVEHGWAPWEEIMTPEVAFARHSLNEGEEVPLQTPESQEAFRMLTPAYREKVESEPGYEERLFATRDTPEPLETSWAGELPLRLVPPRDWPPPGWEVDPGELEFIREAHREFTERLDMAAVAAKGVTHVDKVENAPDDLGLDRYKMFLKQYKEWVEANRDRLEEESYKFDQDYYPGRRKRGEDYKEDMLELPFFYPGQICRGRVISVHLYQGAFVDIGCVHDGWVPIKGNDWYWIRHHIRPGMEVHVEILAKRDPYRFRFPLEMRFVYPNIDHLIFNRFDYPPIFHRKEDTNPEQLWREGGRPPIPRKKPLKDMEKEPLVSDHPFVETLWLWHNAEQMILDHEEENPDKFKDTTYESTVDSSIVHEENRVQHTEGYFKDTLLKKEVVISRSLIWMPLVLSVS

SEQ ID NO: 45614 - protein, 524 aa, Oryza sativa
MAYRNTVCTPQVIDLETEQGHSHIHSESFNRTGNDSSDQGAQHAVRGVGNATNIGLSDMRSYYDAGMNHPHQPVHNLPPNLGVDSGFVFPSSMYNPCMSTTSMNQYVSHTQSFGLPSNQVVLGSMDEGSRNENAGESARGFIKRKNAAVAGSYHCANGFASSSSSHASLNPTHRPWDPSFESNVLPNTSSYNPSEYHSQTSWPSMEGSSIPSNGFNLMGAHPESAQHGNYAFPTSHISQCFQPTSNTWISQSANGIADGIPQWEYVNGMNNAPAGRFSRSGMTETVNGSFREYQNGPSTLCRGPLPYFHQHAGMHAHNLLDHTQVQAPYQQCHNNPVLHGVNHSGNRFHLGPRIPVLFSNSERTFGPPHHPLLANPVNHRNIRILPPEHATIMDFSRLYEVSNVVDEHRDMRLDIDSMTYEELLALEEQIGDVNTGLAKSYIVEKLKTSLFVPGSSCMSNKSSESSMENDACIICQEEYQVKECIGTLDCGHRYHEDCIKQWLMVKNLCPICKTTALSTGRRSG

SEQ ID NO: 45615 - protein, 143 aa, Oryza sativa
MEVFGKSVIAEPSNVIYLSSILNTEGPIPSHKCDKNCQNEHVFGNMYRCKLTGTTHICDKNCNQRILYDNHSSLCRVSGQLFPLSPLEQQAVRGIRRKHEVDSNEGCSFKRRRGAQLHPSPFERSYTAVSPIPSQVGDGMDLS

SEQ ID NO: 45616 - protein, 416 aa, Oryza sativa
MKLLGWMHRKLRSNNDVFKEFNTGGGGACNCITGLASPDHDNDYFSGDDAAHASPPVTAGDLFTFGGSGLLTIGTLGIAAVAIPSGGDDDDYDIDFEVDATSDDDGGFTVEDDDADVGGAVTPTFTFPAATAAEAVVATVEKAVAAVEAIAEKDDDTTTEDDLMVVSAELEKVLGGVDVASARVSFAMGGGVDCPLQGFLFGSPVSDVESRPEYLQAPRESSGSCGGGGRRTSLGELFMRTRFADEKVALVAVAEGEDGVAGDDGAAAAGVGGDRAGKGGGYKTMKKRKVKDEKGGGGAAGGGMPATVTKSKFQKILQIFHRKVYPENTLLTRNLTKKSRNRGATDNGGGAVATGDPDGPLASPVLRCRKDHPMRGFGCCTNGAFGASSPGGNAEMNGNKSGHWIKTDADYLVLEL

SEQ ID NO: 45617 - protein, 287 aa, Oryza sativa; identical to SEQ ID NO: 31387

SEQ ID NO: 45618 - protein, 422 aa, Oryza sativa
MPISHELGEPDESFYNLWKEECEELWEEEDELWGDEDVEEELSLRHPGFNKWTVQQGAAGGDHIRAKDKNFYCFEVQVHFTGELVDGTQFVSSRENDIPERFILGQEDVMHGFNLAVSSMQPGEKAIFTIPSALTMTKAGSPASIPSNIPPNQTLRFEIELIAMFTIIDIFKDEGILKKIVKNAEPDRKQSHSSDFVFVKYDACLMDGTSVSKSEGVEFSLTDGFFCPAFAHAVHTMKEGEEAVLIVKPKYAFGEQGRPSQGEEAAVPPDATLYVHLLFVCWIRRIGEDQAIAKKTLRIGNSQRIHTQSQAVVKVRLLGKLQDGTVFDRRGYGDDEPFEFVVDEGQVIDGLDESVMTMEEGEVAEFTIPPQHAFDAVGSDQHQFAFVPRNATVVYKIELLSVVNVRYYVRITGETSVVHSEP

SEQ ID NO: 45619 - protein, 478 aa, Oryza sativa
MSLRKRQRSASSSRLSTLSSSPAPHTAAAAASASSPPLSFPNADLVLRLHLDPCPDDDADLDAGEDHRPSLDLHVSSASLLRSRYFAALLSDRWSPAPTSAAGGHGHLSLAVAAPRSASHPFHAHVEVVRLLHTLDFAGAIHSPADALDILPVALQLLFDACVEACTRFLEAVPWSPDEEARVLEIAPLLPADEAADLLARITPPPAASASAAGGEAARSPSEAMLHGLIHSAIHGHPVPAATKAFVAMLLKDYPSRDCVQKVLDEAFLSRLETVKELMGKYASPDFRVAVDSDERDAIQRLNLQSAVLNVRHLLWLIERMVEMRVAGNAVKLWSEQAALTADLQKLLNDVDMWKNITPGLPVLVTRCTLRFANSVVNGETIVPRQVRTKLVRSWLPVLNVCRNMVQPMQCGYKSPNCQELEETFLQIISTLPVPDAQELLQQCLGFSTRNVDDCPHLIAAFKTWFRRAGRAPQGAEN

SEQ ID NO: 45620 - protein, 351 aa, Oryza sativa
MGAVSRAAGSGVLQLVSTVVLLLSPPPAAASRRDMSVDFHAASCPQLETIVRSAVQAALQREIALAAGLLRIFFHDCFPQGCDASVYLNATNPNTEQFPQGPNETLQPRALQLVEDIRAKVHAECGPTVSCADISALATRDAVVVSGGPSYAVPLGQQDSLAPASVDLVGDLAGPSTSRVQALIDLFASRGLGDPADLVALSGGHTVGRARCDFFRDRAGRQDDTFSKKLKLNCTKDPNRLQELDVITPDAFDNAYYIALTTGQGVFTSDMALMKNQTTASIVRQFAQDKAAFFDQFAKSMVKLSKVPRPGGNVGEIRRSCFLSNSNGPRLDLVVAAATDQDPGFAASASA

SEQ ID NO: 45621 - protein, 521 aa, Oryza sativa
MATASSPASVQDYPDLQEDDDDDFQDDDDDDLDDEDEEDDDQEPSPSPSDEARLESVLRRLTAEEVRIRVHDVEIRGCCRTRRAAVEAAVGSDLPRAATVRDLVRAAAAAADRIRRLGAFDTVSITLDAAPPGIPGNAAVIVLVDVAEARGRAAGELGIFANKGTRSCSVQGSVKLKNLFGYCETWDASGDLGLDQTVELSTGVAIPRIGAIPTPLVARISFLSEDWLKSSLKEHMMGVSVGLLSTMNHNLAYNLSWRTITDRALMSSNSIRGQLGHSLLSSIKYAYKVDQRDSRIRPTRGYAYLFSSQVGGLAPESKDARYIRQEIDLRVALPLGVLNGAVNAGVAAGIIHPLARGSTGSISPLSEQFYLGGNRSLMCRLGGPSSLLGFKKRGLGTDLRSSTPENSENVASTSPELSARGGDIAVTAFADLSFDIPLKPLRELGIHGHAFVSAGNLAKLTEPDLRKFPLAEFLQTFRSSAGFGVVVPTRLFRIEVNYCHILKQFDYDLGKAGIQLNFSSP

SEQ ID NO: 45622 - protein, 512 aa, Oryza sativa
MAEAIFSAIVGDVIGRVISLVVSNFNGDHSTEVKLQRICRMLIKIHSVVEEAKGRQITNHGTLEWLSELIDGAYQGRYLLDTIGCGEPDLDDKNRDEVDPKPFSLSKFNPAKRVRVAAFTVRNILSRHDIGVDEIDRVVESLQSMCGDLKEFMMLLQACQPIHRPLATNIFIEGQMFGRHVKKEMIINFLLHEDDLPRGKLGVLPILGDIGVGKTTLVQHACDDARVRSHFTTILLFNFSHTYKMEMCEPKPVLRPKHVIGDVGNSDDPLHELEQSFFNKRFLIVFEDVDIHKKNMLEELLKSLSCGKQGSKIIVTTSNKHVTTIGTVQPIKLKFLPCPEYWFFFKAHAFAGTDVQENPRLVAAGKSIAAKLNGSFFGAKIIGAILKENPDPKFWCTVLQRDIGGLSLLGDGLGYIADLVEILLPSRLSVKEVFVSKNSLSSETELARLQGLCLPCPSSAPLATHSSELSLAKATSYERVLLCKAVLPFYSLYYTAKCAVDSENCYSKFSVV

SEQ ID NO: 45623 - protein, 128 aa, Oryza sativa
MQTAASSVVGLSAVLPAAVKGRSLQIQAPRRVALRVRAAAAAVAVEAAEVDYSSNISVFPMEACDLIGGEACNVQMYPEAKLSSSAAVAVSRAAAEEVDRDYLSYDEPTTVFPEEACDDLGGEFCKAT

SEQ ID NO: 45624 - protein, 388 aa, Oryza sativa
MWVLGTASCAVLSFLNQFFWYRKEPLTITAISAQIAVVPLGRLMAATLPEHAFFRGRPWEFTLNPGPFNVKEHVLITIFANSGAGTVYAIHVITGVRVFYGKTLSFFISLLVVLTTQMLGFGWAGIFRRYLVEPASMWWPSNLVQVSLFSALHEKEARRKGGLTRNQFFLVAFVCSFAYYIFPGYLFQMLTSLSWICWVFPSSVLAQQLGSGLRGLGVGAIGLDWSSISSYLGSPLASPWFATVNVGVGFFIVMYIITPIAYWFNFYKAQNFPIFSDGLFTSTGQKYNVSSIVDSHFHFDTKAYEKNGPLYLSTSLLVTYGVGFATLAATIVHALLFHGRSLSGGSYASLLLTSERPYLLVNTTMRNSNCPGGVFCLHAPLPFSSPSQ

SEQ ID NO: 45625 - protein, 534 aa, Oryza sativa
MATAVAASPAQSRKTETYTDTKRRDDVRGLNIAAARAVADAVRTSLGPRGMDKMISSGEQEVIITNDGATILSRMSLLQPAARMLAELSRSQDAAAGDGTTTVVVLAGSLLRRAQSLLSAGAHPTAAADALHRLATRAVEVLHAMAIPIELSDRDSLVKSASTALNSKVVSQYSSLLSPLAVDAALSVVDPAHPDLLDLRDIRVVKKLGGTVDDTELIRGLIFDKKASHAAGGPTRVENAKIAVIQFQVSPPKTDIEQSVIVSDYAQMDRILREERNYILGMVKKIKASGCNVLLIQKSILRDAVTDLSLHYLAKAKILVVKDVERDEIEFITKTLNCLPIANIEHFREDKLGYADLVEEVSVGESKIVKIMGIKDMGRTATVLVRGSNQLVIDEAERSLHDALCVIRCLVNKRFLIAGGGAPEIEMSMQLAAWAKELQGMESYCIKEFAEALEVIPYTLAENAGLNPISIVTELRNRHAKGEKNAGINVRKGQITNILEENVVQPLLVSTSAITLACECVRMILKIDDIVTVR

SEQ ID NO: 45626 - protein, 233 aa, Oryza sativa
MPKSKRNRPVTLSKTKKKPGLERKGKVVTDIKDAVEHYANAYVFTYDNMRNQKLKDLREQLKSSSRIFLAGKKVMQIALGRSSADEAKTGLHKLSKFLQGDTGLFFTNLPRDDVERLFREFEEHDFARTGSIVTETVELKEGPLEQFTHEMEPFLRKQGLPVRLNKGAVELVADHIVCEEGKPISPEAAQTLRLLGMQMATFRLYLVCRWSSDDFEVYKEGLAQLRAEADDSS

SEQ ID NO: 45627 - protein, 164 aa, Oryza sativa
MTREQVVCSAYLSLNVLDQPFFTTEPLTRLVRECEANLELLFPIEAEVLESASSSAKLQPQNDDAASHDPASSVDVETSDVYRSTLAAMKAIQGLRKASSTYNPLSLARFFHGEDGEACSGAITSESDSYSDSQIEDAEDDDKEVQSREQNTAQNAAEGQPRDE

SEQ ID NO: 45628 - protein, 594 aa, Oryza sativa
MDFVKVFDQAVREIKREVNLKVLKVPELEQKVLDATSDEPWGPHGTTLSELSHATKKFAECQMVMSVLWTRLSERGSKWRHVYKALTIIEYLIANGSERAVDDILDHYSKISVLSSFEYVEPNGKDAGLNVRKKVETILGLINDKEKIKSVREKAASNRDKYVGLSSTGITYKSSSASFGSNYSSGERYGSFSGTREGDSYGDSYRDKEPVKSSPSYTGSQKSGSRIKKDVNRRNEDSPSSLKSNAKGNEDDFDDFDPRGSSSNGAANTNTSGVDLFAPNLLDDFIDVPAAATHETNDSADAQVDLFADADFQSAIPSTETAAGSDVQGNVDLFAEQPAFTAAFPPQTGFIPPPSSGTSEANTSTSKNTTPEPFDPFGAIPINSFDGSDPFGAFNSDVGSSSIPPPTQSSVGNISTPSQNPQAASDFGGFVSSTVETAAKDPFDFSSSNLGKTPLADPKADASDFGAFVSHSEEVAKDPFDLSLSTSSGRTNQAPLAAPKSDTKKENFQVKSGIWADSLSRGLIDLNITGPKKVNLADVGIVGGLDDGSDDKALPSWTMGAGGSSLGMSGIPSSTQSGGIESLANYNKYQFGFK

SEQ ID NO: 45629 - protein, 689 aa, Oryza sativa
MEKSYASASSGELGVVAGGGGRSVRVIPLRHPQEAVAGSSPSWWSVVMVKARGMGPRDWAEAALPCLSWMRTYRLKEDLQADLAAGITVGVMLVPQAMSYAKLAGLHPIYGLYTGFVPLFVYAIFGSSRQLAVGPVALVSLLVSNVLGGIVDSSSELYTELAILLAFMVGVLECLMGLLRLGWLIRFISHSVISGFTTASAIVIGLSQIKYFLGYSVTRSSKIIPLIESIIGGIDQFSWPPFVMGSSFFVILLIMKNLGKSNKRLRFLRASGPLTAVVFGTIFVKIFHPSSISVVGEIPQGLPKFSIPRGFEHLMSLMPTAVLITGVAILESVGIAKALAAKNGYELDPNKELFGLGIANICGSFFSSYPATGSFSRSAVNHESGAKTGLSGIIMGIIIGGALLFMTPLFTDIPQCALAAIVISAVTSLVDYEEAIFLWSIDKKDFFLWAITFITTLIFGIEIGVLVGVGFSLAFVIHESANPHIAVLGRLPGTTVYRNRLQYPEAYTYNGIVVVRIDAPIYFANISYIKDRLREYELNLPNSNRGPDVGRVYFVILEMSPVTYIDSSAVQALKDLYQEYRDRHIQIAIANPNRQVHLLLSRSGIIDMIGTGWCFVRVHDAVQVCLQKVQSSSSSSIKLSPQASGDLADSVTTPKVQQRYSFLKNLWKSQVGDGCTGSEVQPLLRQNLV

SEQ ID NO: 45630 - protein, 120 aa, Oryza sativa
MAPLTSQSTATAAAMIAMKPPAPAKNIATLLPPGAKCRRAFLRGLIAAGAGGSLLVAGDGGGIASAASKRRAPPAAAAPEERKDPSVSGVQAKVLASKKRKEAMKEFVAKMREKGKPVSQ

SEQ ID NO: 45631 - protein, 542 aa, Oryza sativa; identical to SEQ ID NO: 43678

SEQ ID NO: 45632 - protein, 62 aa, Oryza sativa
MENHPAMEPPHLLRKGKSKLQGQQLILGHLMPAILKAILSLDHKNLLKGTVSLIWREKNRSY

SEQ ID NO: 45633 - protein, 182 aa, Oryza sativa
MGVLAFYRWLADRYPQTVSDAVEEEPVELEPGAFVPVDLRRPNPNGLKFDNLYLDMNGIIHPCFHPEGHARSYSPIPSVFSSSNQPILCSISPWIWTPSPAAGTDHLRRGAALKGNFVEQDECVARNFKQAAKLLGLDSKLEKNLLIPFREIKVECTVPKDDGTLASYMLGLGFNMTMLGDL

SEQ ID NO: 45634 - protein, 595 aa, Oryza sativa
MMGVGGGLGMEATNCGALLRELQQIWAEVGESEGEKNKVLSEIERECLEVYRRKVDDANRTRVQLHQSVATKEAEVASLVATLGEHKLYLKKDKSVVPLKEQLAAVVPVLENLKGKKEERLKQFSDIQSQIEKIRSELSEYSDGDDKANSLIVDENDLSTRKLNNYQAQLHALQKEKSDRLHKVLEYVNEVHCLCGVLGIDFGKTVNGIHPSLHQNGLEQSTNISNSTLEGLANTISNLKAEQRSRIDKMRETMESLCKLWKLMDSPQEERRQFIRVLSVLISSEEEILSPGVLSQETIEKMGAEVERLTKLKARRLKEIFMKKRSELEEICRSAHIEPDASTAPEQTNEMIDSGMIDPSELLAKLESQILKAKEESLSRKDIMDRINKWISACDEEAWLEEYNQDSKRYSAGRGAHINLRRAEKARILVTKIPAMVDNLINRTFAWENARNKPFLYDGGRLISVLEEYRLNREQKEEEKRRYRDQKKLESILLKEKEAIFGSKGSPKRAVSLNRRTNGYRSSGTTSGLMTPNPRRSSLGGATPELLTPRSCSGHYNRYFSDSRRLSATQLNFGDDSLSTFTSISGSEPESPSLG

SEQ ID NO: 45635 - protein, 258 aa, Oryza sativa; identical to SEQ ID NO: 30725

SEQ ID NO: 45636 - protein, 392 aa, Oryza sativa
MSMSLADSWGSAPASPIGFEGYEKRLEITLSDAPVFVDPCGRGLRALSREQIDSFLDLAKCTIVSHLSNKHFDSYVLSESSLFVYPHKVVLKTCGTTKLLLSIPRILELAAELSLPVLSVKYSRGMFIFPGAQPSPHRSFLEEVSVLNSFFGGLKSGGNAYVIGDAFKPKKKWHVYYATEEPEQPMVTLEMCMTGLDAKKAEVFFKDSTDGSCSSAKEMTMFSGISEIIPEMEICDFEFDPCGYSMNGIYGPAVSTIHVTPEEGFSYASYEAMNFNPSSLVYDDLIKKVLACFCPSDFSVAVTIFGGHGFAKSWAKGAEVDSYMCDDLVEQELPGGGVLMYQSFTAVTPGAVSPRSTLDGWNSDGAEMVAKSKEMSVCWEGEKAAKKKDADA

SEQ ID NO: 45637 - protein, 529 aa, Oryza sativa
MLYLLPLSVSCRVPGSPPAPRSRRFLDPGGGRGVGDGLGGVRVFRRRALRGTDVRSNTSSSSSRKGRHDDARHDGGYGDDGDAGALLASVRRLLLSGSAQDDAAEGEAEEDEQGQFPKRWAIVFLCFSAFLLCNMDRVNMSIAILPMSAEFGWNPQTVGLIQSSFFWGYLLTQIAGGIWADTVGGKTVLGFGVIWWSIATALTPFAAKLGLPFLLVTRAFMGVGEGVAMPAMNNILSKWVPVSERSRSLALVYSGMYLGSVTGLAFSPLLIHNFGWPSVFYSFGSLGVFWFSTWASKAYSSPLEDPGISAEEKKLITSQTTGGEPVKEIPWGLILSKPPVWALIVSHFCHNWGTFILLTWMPTYYNQVLKFNLTESGLFCVLPWLTMAVSANFGGWIADTLVSRGLSVTTVRKIMQSIGFLGPAFFLTQLSHIDSPAMAVLCMACSQGTDAFSQSGLYSNHQDIGPRYAGVLLGLSNTAGVLAGVFGTAATGYILQHGSWDDVFKVSVVLYLVGTLVWNLFSTGEKIID

SEQ ID NO: 45638 - protein, 218 aa, Oryza sativa
MEVDGGGDESSAATPDPGRGKKRPLSPSTPPTPSDDGEDSDDSWAVSDEEEEEEEEDEEDQEGKHRPFTVDDFPRLSSDHSVQTDALFDIPHLRLGGPSPLSLFRAFNDPLTDKRRHWFGSYYRLDDESEISVDSAGAVDCLNGCRCLSKNLLQFIDLKISGYRHTQPGRAKIFGFFAVRDDLEPLRNYVFRHAIYNYEAVSVKPKTGMACLPLTSPA

SEQ ID NO: 45639 - protein, 450 aa, Oryza sativa; identical to SEQ ID NO: 42725

SEQ ID NO: 45640 - protein, 234 aa, Oryza sativa
MELFVMIDACRRASARSITVVIPYFGYARADRKAQGREAITAKLSANLLTEAGSDRVIVCDIHSTQALGYFDIPVDHIHGQPVILDYLASKTISKDLVVVSPDVGGVVRARAFAKKLSDAPLAIVDKRRQGHNMSEVMHLIGDVKGKVAIMVDDMIDTAGTITSAAALLKQEGAEAVYACSTHAVFRFGSWFIVTSMIHVIVLIHWLVAKEPCYGMIRQIGFMFDQYKNDRVEQ

SEQ ID NO: 45641 - protein, 146 aa, Oryza sativa
MDRNEEEFQASLSAMPWFAIPYSDTTVQELSRIFTIKGIPTLLILGPDGKVFKTDGRRIISKYGAMAFPFTESRAYELEEVLKKERDSLPHRVRDHRHEHELELDMAKAYVCDECQQKGQNWVFSCKQCNFDLHPTCAQESTDVNI

SEQ ID NO: 45642 - protein, 108 aa, Oryza sativa; identical to SEQ ID NO: 30022

SEQ ID NO: 45643 - protein, 293 aa, Oryza sativa
MITRRSKSVRACTPYRASFHPCGSRWTTMRNMILSIYQPSHLATLIPSMESCIERAAENLEGQEEINFSKLSLSFTTDVLGQAAFGTDFGLSKKLASSDDDEDTRKIAADTCAEAKASSEFIKMHVHATTSLKMDMSGSLSIIVGQLLPFLHEPFRQVLKRLRWTADHEIDRVNLTLGRQLDRIVAERTAAMKRDRRRCSSARTSCPSCSRRESRTNPRGSCSRRTTSARSLTSTSSPGRPRRRSLSPRRSTSSPSTRRWRRSCSERSTGSDPATACRRPRICRPNSPTLIRS

SEQ ID NO: 45644 - protein, 418 aa, Oryza sativa
MAMMERIGVTKLHHHLLLLVLLLVVAAAGGGSVQAAEEDEMSGRRRRSRRRRAADVMVPITILNSAVDKGAVCMDGTPPAYHLDPGSGGGNRSWVVNLEGGGWCNNARTCRFRTASRHGSSDHMERRIAFTGIMSSAAADNPDFHSWNRVKIRYCDSGSFAGDAFNEGLKLQFRGQRIWGAVIQHLLDVGMASAEHVLLTGCSAGGLTAILHCDQLRALLPAAATVKCLSDGGLFLDAVDVAGGRSLRSYYGDVVGLQAVAPNLPETCTDHLDATSCFFPQNIIDGIKTPIFLLNAAYDVWQIEQSLAPNAADTSGTWRVCKFNRAACNASQLQFLQGFRDQMVAAVRVFSESRNNGLFINSCFAHCQSELTATWNGGSPALQNKGIAKSVGDWYFGRAEVKAIDCPYPCDKTCHNII

SEQ ID NO: 45645 - protein, 316 aa, Oryza sativa; identical to SEQ ID NO: 32299

SEQ ID NO: 45646 - protein, 131 aa, Oryza sativa; identical to SEQ ID NO: 40935

SEQ ID NO: 45647 - protein, 152 aa, Oryza sativa
MGSALLPTLRRKPEVDAAIRDTLDKVLVLRFGRADDAACLHLDDILAKSSWDISRFATVALVDMDSEEMQVYIDYFDITLVPATIFFFNAQHMKMDSGTPDHTKWIGSFSSKQDFIDVVEAIFRGAMKGKLIVSCPLPPERIPKFQLLFKDV

SEQ ID NO: 45648 - protein, 60 aa, Oryza sativa; identical to SEQ ID NO: 44579

SEQ ID NO: 45649 - protein, 540 aa, Oryza sativa
MACLAPQLKWPLSTRAAAFREHGGAGIGGFRTVRLHCAVSTTALVEAESSDSLAPGARRLVVYDGAVAPPPLPGGFGEAILNQEAVVAAAAAEAVALARAAAEVAGEVVRMSQTEQRHRPDFVTTHDTEDNYLAREILRAEAGLGARYADACLSEDAGFSSIFSDESEVDDDEQCVQGVAVKSVRQSERGARRVRAAMKAAKSFSGRNPVAASSSARKKRLKGCRSPLGCFYKMTGRRLLTAKQEVEFSQGIQDLLKLEAIQKELAHYNGGEPTFSQWAEAAGTDENTLRKRLNYGISCKNTMVKSNVRLVISIAREFEGPGMEFSDLIQEGIQGLVRGAEKFDASKGFRFSTYSHWWIKQAIRKSVLEQTQIIRLPAHMAEASSRVKECRRRLRRQLKRLPTNEEIASDTGMPLRRVEAAMSLPKYTVSLTSKVGCTDMTYQEITPDTSTETAEEMLHRWLMKEDVDRALDGLSPRERQVIRYRFGMDDGRLRTLHDIGRLMGVSRERIRQIELVAFRKLRGRKKVQSLQHYLQPVESW

SEQ ID NO: 45650 - protein, 315 aa, Oryza sativa
MLLLKYLSLKKTEITQLPSEINCLRELEVLDIRETKVPANATVNVLLLKLKRLLAGHIDSSPRNSGTSVQIPHRIDKMVNIEVLSNVKAQRRDDLEDTGKLWQLRKLGVVVDDKRGHLGNLLKAISNLHECIRSLTITISTTTHKDTPSNPELPDHIGSDLPHPKKLESLSISGARHLFPLLIKSDNNKLAKVTLSSTPLNQDDLEVLAKLPKLQCVRLQHISCIVSELIFKEENFKCLKYLLIEGFNLTNITFEDGSACELEKMVLSSTSIESVSGVDVLPKFKELELNNSHVPNELKEAVENNKRIILKCNEP

SEQ ID NO: 45651 - protein, 380 aa, Oryza sativa
MGRRRRHRRHHRRDGTDLLEAEPLLDDSHLMTVRDPLPAAYIAVCRRDWYSHSYYRLYKVEDDSSSSSSPSSPVTKQVLHRFAHLPTDVACKTVVSVRSRWIVSVGGNPGGTVLFDTETRRVITGPKLLSAKLSPVAAAVGDRIYVLSSRPQYFEPWFEVLDLSRATVVATADGRHTLDGCSWEALPDPICFPCVLSPAGYLAPPLILVTSYVLFLPYLLVSVNNMGKMTTYAFDTGTHRWHKLYDYGLPFFGSATPLVGIRLVSSAPHLKLSVTEFPVKTEAREEVGVGEALCLASMEDEGSFSCITFRLDDREHHMSYDKDIHEFYPRKMYLNLTTYKIVEGEKTDMDIVVRCKRDKALKIFSSHGFSSPPIAFALSI

SEQ ID NO: 45652 - protein, 705 aa, Oryza sativa
MGTASGDQPAGASSDKLRHVESMSELPSGAGRISGINAVVLGESLAAEEHDLVYPSAEFSADALVPSPKKYQKMYERSINDPAGFWSEIADAFYWKEKWNPSEVCSENLDVTKGPVQISWFKGGKTNICYNAVDRNVEAGNGDKIAMYWEGNEPGQDGKLTYSELLDRVCQLANYLKSVGVGKGDAVIIYLPMLLELPIAMLACARIGAVHSVVFAGFSADSLAQRIVDCKPKLVITCNAVKRGVKPILLKDIVDAGLAESEKQGVAVGLCLTYENQSAMKREDTKWQAGRGVWWQDVVTSFPTKCDVEWVDAEDPLFLLYTSGSTGKPKGVLHTTGGYMVYSATTFKYAFDYKPSDIYWCTADCGWITGHSYVTYGPLLNGATVLVFEGTPNYPDSGRCWDIVDKYKVTIFYTAPTLVRSLMRDGTEYVTRHSRKSLRVLGSVGEPINPSAWRWFYNIVGDSRCPISDTWWQTETGGFMITPLPGAWPQKPGSATFPFFGVQPVIVDEKGKEIEGECSGYLCIKKSWPGAFRTLYGDHDRYETTYFKPFAGYYFTGDGCSRDKDGYHWLTGRVDDVINVSGHRIGTAEVESALVSHPKCAEAAVVAVEHEVKGQGIYAFVTLVDGVPYSEELRKSLILTVRNQIGAFAAPDKIHWAPGLPKTRSGKIMRRILRKIASKQLDELGDTSTLADPGVVDQLIALKDC

SEQ ID NO: 45653 - protein, 154 aa, Oryza sativa
MEGLTSEQMVAFQEAFLLFDKNGDGCITLEELAAVTRSLGLEPTDQELNDMMREVDTDGNGIIDFQEFLSLIARKVKDGDGDEELKEAFEVLDKDQNGFISPTELRTVMTNLGEKMTDEEVEQMIREADTDGDGQVNYDEFVIMMKNAERKISG

SEQ ID NO: 45654 - protein, 317 aa, Oryza sativa; identical to SEQ ID NO: 28954

SEQ ID NO: 45655 - protein, 83 aa, Oryza sativa
MKIINAVSKSVPQPHKVDLNSPNRIIIVQIEKIICMVGVIERYTVLAKFNLKQLTSPPQKQLMGQLELDSAAVSCWLSRGSHC

SEQ ID NO: 45656 - protein, 593 aa, Oryza sativa
MAEVTVVRAEREEESTLEQGLLAIPEESNQLTYTGDGSVDFSGNPVVKERTGRWRACPFILGNECCERLAYYGISTNLVTYLTKKLHDGNASAASNVTAWQGTCYLTPLIGAILADAYWGRYWTIATFSTIYFIGMAVLTLSASVPTFMPPPCEGSFCPPANPLQYTVFFLGLYLIALGTGGIKPCVSSFGADQFDDTDPVERIQKGSFFNWFYFSINIGALISSSFLVWVQDNIGWGIGFGIPTIFMGLAIISFFSGTSLYRFQKPGGSPITRVCQVVVASFRKWNVHVPEDSSRLYELPDGASAIEGSRQLEHTDELRCLDKAATITDLDVKADSFTNPWRICTVTQVEELKILVRMFPVWATTIVFSAVYAQMSTMFVEQGMMLDTSVGPFKIPPASLSTFDVVSVIIWVPLYDSILVPIARRFTGNPRGFTELQRMGIGLVISIFSMAAAAVLEIKRLDIARAEHLVDQNVPVPLNICWQIPQYFLVGASEVFTFVGSLEFFYDQSPDAMRSLCSALQLVTTALGNYLSAFILTLVAYFTTRGGNPGWIPDNLNQGHLDYFFWLLAGLSFLNFVIYVICANKYKSKKAA

SEQ ID NO: 45657 - protein, 250 aa, Oryza sativa; identical to SEQ ID NO: 32404

SEQ ID NO: 45658 - protein, 251 aa, Oryza sativa
MATAAAALLRLSRSRRPLLPLSSLRLPPPAPYHHHSHSQTPPSSSSSHARLPAFLSFLAAAAAAGGTTVALCDSGIDHRVGGKESTELVVRGERKRVPNEFIDELASFLGENLTVDYEERHYHGTPQNSFHKAVNVPDVVVFPRSQDEVQKIVMACNKYKVPIVPYGGATSIEGHTLAPHGGVCINMSLMKKIKSLHVEDMDVVVEPGVGWIELNEYLKPYGLFFPLDPGPGATIGGMCATRCSGSLAVSL

SEQ ID NO: 45659 - protein, 686 aa, Oryza sativa
MATPSSFSSARKKAPSPPKHRHDGTSGLPFGMDWSPPPKRWEGRNTIWPHNPQTGWSYCVMIPSWIAQTPEASATADNFLKSIVFYRIHVGIQSPEGISSSHGVLRRFSDFLKLSSDLKQEFPRKGIPPAPPKHAFSRINSSRVLLEERRNALEEWMQKLLSDIELSRSAPVAAFLELEAAARSYYQDWNQRPSEVGSSAKSSADSSPRPDEHGSGVLSESSQMNSAFAHGNGPTGATGNGMLGESILDQPNERASSMSNHRKKNHVFLEHGVRNGSIDTYKGVVSEEDHDSNPGHARKDSAESIGSDLSSLRGSELSVPGVSSSLWDGPVDLPSGIDGHSQTEQFTGLDMQLLYDMDAQIILPADQRPKLTRLLISMDRRQVTAKTDMEDLIARLNQEVAVKEYLATKVKDLEVELEATKKKDKEILHQAVLTEREKITQLQWDKDELYRKYSEMESNLKIEQNEKTRVQSEKTTASGEKEMLLEELETKRKEVESLQQHIGEFEAKSKADIKVLVKEVKSLRNSQKEMKKVLNQYHEEKTELERIVNREKQRSTRARFSREKILHECRLLRERLQECTAKFVADEQDTMTIDLSSLPDALDLVTTSDNRIRLLVAEAQLLSRDDEQGSSDDGDNSDGKSSVTMSSEDAYVTDEETTKMLSDLLIDNAQLRLRLNSLIRNAVILL

SEQ ID NO: 45660 - protein, 394 aa, Oryza sativa
MGSFGRLARRAVETEAPVMVKMQELLRGNKDVMSLAQGVVYWQPPEAAMNKIKEIVWEPSISKYGSVDGLPELREALLEKLRRENKLTKSSIMVTSGANQAFVNVVLTLCDAGDAVVMFAPYYFNSYMSFQMTGVTDILVGASNPETLHPDVDWLEKVLQENNPIPKLVSVVNPGNPSGAFIPKPMLERISELCRNAGAWLVVDNTYEYFMYDGMEHYCLEGNHIVNLFSFSKAYGMMGWRVGYIAHPNEADGLHAQLLKVQDNIPICASIIGQRLALYALEAGPEWIRERVRDLVKNRELLMEAMSPLGKDSVKGGEGAIYLWAKLPEKCSDDFEVVRWLANKHGVAVIPGSASGGPGYIRVSFGGLKESDTRLAAERLRRGLQELVTEGMVQ

SEQ ID NO: 45661 - protein, 152 aa, Oryza sativa
MSTPARKRLMRDFKRLQQDPPAGISGAPHDNNIMLWNAVIFGPDDTPWDGGTFKLTLQFTEDYPNKPPVVRFVSRMFHPNIYADGSICLDILQNQWSPIYDVAAILTSIQSLLCDPNPNSPANSEAARLFSENKREYNRKVREIVEQSWTAD

SEQ ID NO: 45662 - protein, 387 aa, Oryza sativa
MAATSSAPAQGAKPKKKTMKSLYLQFFDTAPDGKSRVCKLCKKSYCMTTATGNLGKHLNNRHPGYCQLSEGEATQSTTPTSMVSRAKRSQPLARTRSQAQSQSQVQPQSQVQHQPQPQTVSKVRHQPKAKPAIDIDHVNWLLLRWLISSSLPTSTLEDSMLIDSCRYLNPPVQLWPKEKAHEIVLQVFRSMKEDVKASLQCVSSRFSITLDFWTSYEQIVYLSVKCYWIDEGWALRKVLLDVCRIPYPCTGPEILQVLMNVLHEFNIDSKILACTHNNSQHAIHACHELRQELESRKLPFCYIPCAARMLKIIIKDGLENVRPVLSKIREFVLETNSNQDMMEDFMHWTEVYQEGSWKLPFDHSSNWSGDYNMLDVVKKVPYSSYFV

SEQ ID NO: 45663 - protein, 511 aa, Oryza sativa
MVAFYGLGDGGCLVSAPAELAGMFCRGGVVVQQQQRKRSLVAASAVAAADCVARGSPNLCSLALWDVPLVTDAGLAEIAAGCPSLERLDITRCPLITDKGLAAVAHGCPNLLSLTVESCSGVGNDGLRAIGRSCSKIQALNIKNCARIGDQGISSLVCSATASLTKIRLQGLNITDASLALIGYYGKAVTDLTLVRLPVVAERGFWVMANAAGLQNLRCMSVTSCPGVTNLALAAIAKFCPSLRQLSFRKCGHMTDAGLKAFTESARLLESLQLEECNGVTLVGILDFLVNCGPKFRSLSLVKCMGIKDICSTPAQLPLCKSLQFLTIKDCPDFTDASLAVVGMVCPYLEQVDLSGLREVTDRGLLPLINSSEGGLVKVDLSGCKNITDAAVSTLVKGHGKSLKQVSLEGCSKITDASLFAISENCTELAELDLSKCMVSDNGVATLASAKHLKLRVLSLSGCSKVTPKSVSFLGNMGQSLEGLNLQFCNMIGNHNIASLEKQLWWCDILA

SEQ ID NO: 45664 - protein, 610 aa, Oryza sativa
MLQLPFSPKESWSSPVNSAIGHVRKIRRRAGHFLSRSSKNKAAHSKGGQTTKSLISGDLHSGSIQDVWATLSAEVASKLSKSVVSLALSDGNIPIYACSGTAISCQEGSGTIFLTSASLVRAFYDTEEIYDNLKIEVRHEGNEVYKGYLAKYDLDKNFAVVYTMESLGVHVVLSEHLKDRYAKKKLVAVSRNKYGGLITKSVMVGSHHNSNRSEVCHDISVMAEDWEGGPLFDFDGKFVGMNKFLAMDTTFILSWMSILIIFKHYLPTLQNRILKRLQNLKRVRDGEGPGELSDCHPEVHRGGLDKEHVEYLNSLGYPKPPVNVLDDGLILAYSFEENFGFVYGEVIKKFPCDIHQSVVALASFKGERRFFACTGFFIEWKGCTIILTSASLVAESGDRNKIDENLRIEVLLPNEQRRQGTLQHYSLHYNVALVSVNDMDFHARPANMKLDNECPPQVAALGRCFESGKIMAVCGDLVDWTGTLDCNFLIRSSCKTTKAGIGGPLIGLDGKVIGMNFYDKKIGTPYMPWDVILKILACFENESSAAEVGNGSDPSDAPGWKIPGDGSVKLNRWPVPLPYWRPHDDVEEQEPPEGCEYQCTYRNGERWCYR

SEQ ID NO: 45665 - protein, 510 aa, Oryza sativa
MDGLVENFDADDLGEMPQNHYNEEQLIPYSDVSHPYNEEPDNMDNVEEGNPYIQQVSLYSEEPENQYNEEPSNPYQEESDNAYNGEVKQQDSLPVEADKKWPGWPGESVFRILIPAQKVGAIIGRKGEFIKKMCEESKARIKILDGPPGVPERTVMISAKDEPDAPISPAMDGLFRVYKRITDGSDGDSGQPERNISNVGPTRLLVPASQAGSLIGKQGATIKSIQDSSKSIVRIVETLPLVALNDDRVVEIQGEPVGVQKALESIASHLRKFLVDRSVLPLFEGQMKMHNAQREQAMAAPQPWGPPQPWGPPPSHLPPGGPGYGGHPQFMPPRPQDNYYPPPDVPSMEKQPHYGISAYGREAPTGVSASGNQPPSHVASQVTHNMQIPLSYADAVIGAAGASISYIRRHSGATVTIQESRGAPGEMTVEIIGSASQVQTAQQLVQNFMAEAPQGPPPPASNPPAPAVDLSYGSYPPPYGASYGSAASGAGPAPHNGGSYGGTTYPSYGY

SEQ ID NO: 45666 - protein, 621 aa, Oryza sativa
MALRRAASLLLRPRLRAPVPIPTPKTPNPLLLPPRRHFSQLPPPPVPASAAAAAAAVAEEAEEAFEAAKGTKDLLAAFSRLEAVMPPSDKRLALACIKLGQHLEASGAADPSRVLALALRSLGILEATPNSATSTTASHSDAVSLAMALHLAGSASFDLSRFHDALSFLTRSLRLVSPLLPSSSSAAAASGDDDAQGFDVRPVAHAVRLQLANVKTALGRREEALADMRACLDLKESILPPGSRELGAAYRDLAEAYSTVLDFKEALPLCEKALELHQSTLGKNSVEVAHDRRLLGVIYTGLEQHEQALQQNEMSQKVMKSWGVAGDELLHAEIDAANIKIALGKCDEAVTVLRNVSKQVEKDSEIRALVFISMAKALANQEKAGDTKRCLEIACDILEKKELAAPDKVAEAYVEVSSLYEMVNEFDKAISLLKRSLGMLERIPQAQHMEGNVAARIGWLLLLTGKVSEAVPYLEDAVERMKDSFGPKHYGVGYVYNNLGAAYMEIGRPQSAAQMFALAKEVMDVSLGPHHSDTIEACQSLANAYNAMGSYALAMEFQKRVVDSWRNHGPSARDELKEAIRLYEQIKIKALSCLSPENSAIALPEPLEKEVDSDSTRVAQQ

SEQ ID NO: 45667 - protein, 453 aa, Oryza sativa
MGDEVGRGHFGYTCAAKIKKGARKGDAVAVKVIPKAKMTTSIAIEDVRREVKILKALAGHKNLVQFYDAYEDNDNVYIVMELCEGGELLDRILSRGGKYSEDDAKAVLVQILNVVSFCHIQGVVHRDLKPENFLFTSKDENSQLKAIDFGLSDFVKPDERLNDIVGSAYYVAPEVLHRCYSTEADVWSIGVIAYILLCGSRPFWARTESGIFRSVLKADPSYNEAPWPSLTLEAMDFVKRLLCKDPRRRMTAAQALSHPWIRNYNDIKLPLDILIFRLIKAYIRSSSLRKAALRALSKTLTVDELFYLKGQFSLLEPDRNGCITLDNIRMALTREATYAMKESRVQEILVSLSALQYRRMDFQEFCAAAVSVHQLEALDRWEQHARSAYDFFEKDGNRAIVIDELASELGLSPSVPLHVVLQDWIRHTDGKLSFLGFVKLLHGMSSRSLSKMR

SEQ ID NO: 45668 - protein, 272 aa, Oryza sativa
MSLLDAGKRLLGCRGGGGLSLTVLVMQPPRKEYASAVAATVRREEASGLDIRFRHLPAVEPPTGCAGVEEFVSRFVQLHADHVRAAVSGLDCPVAGLVIDFFCTTLLDVARELAVPAYVYFTSNAACLALLLRLPALEGEVTVEFEEMDGEVDIPGLPPVPPSSLPMPVMDKKNPNYTWFVYHGRRFMEANGIIVNTVREIERSVLAAIADGRVTPGVRAPVIHPVGPVISFTPPSDDPPHECVRWLDAQPPASVVFLCFGSMGSLAPPQVL

SEQ ID NO: 45669 - protein, 940 aa, Oryza sativa
MIRSMVYFGNTSIGEVEVWPSGDASLAAAAWAREIRVDRLSPPSERCQPLAVMHTVAVGARCLVMESRLPKAADEPPQPLVAMHAACLKENKTAVVPLGEEELHLVAMTSRRNLTNHACFWGYKVPFGLYNSCLTMLNLRCLGIVFDLDETLIVANTTRSFEDRIDALQRKLSNETDPQRINGMIAEIKRYQDDKSILKQYIEGDQVYDDGKMYKVQPELVPPLSDNHQPMTRPVIRLQEKNIILTRINPLIRDTSVLVRLRPAWEDLRSYLIARGRKRFEVYVCTMAERDYALEMWRLLDPDSRLINSVQLNDRMVCVKSGLRKSLLNVFHDGYCHPGMALVIDDRLKVWDEKDQSRVHVVPAFTPYYAPQAEANCSIPVLCVARNVACNVRGGFFKDFDEGLLPRISNVFYEDEINEIPSAPDVGNYLISEDENVAAVNGNRDPLAFDGMADAEVERRMKEASGNAQAFTTTAANFVMPVLPGQNFVSSSVAPVAPSLGMVPLSNNQGPPPFTQPVAQLSLSDPLQGSPAREEGEVPESELDPDTRRRLLILQHGQDTRDPTPPLPAVPPVQVPVPPVQPHGNWFPVEDGMNPNNLNRGSAGFPLESETMHYDKKQLPHPFFHGGENPISSDRFSYQNQRYPSQLPHSEDHRVLQNHAPSRYRSFPGEELATRHVSSSQRNNQIVPGQHFARHAGSSAGILEEIAMKCGSKVEYRSALCDTADLQFSIEVWIVGEKVGEGIGRTRKEAQCQAAEISLRNLANKYLSSDPNKMTDMKENGFGSNTNIFGYPGNSRDDVLPIASTSEETRFVKMGENNSRKAGGSIAALKELCTAEGYNLVFQARTSPDSSVGKEAYAEVEVCGQILGNGVGITWEDAKLQAADEALGMLRSMLGPLAQKRSSSPRSLAPSFDKRFKPDFPRAVQRVPYGRYSRIEGHVP

SEQ ID NO: 45670 - protein, 244 aa, Oryza sativa; identical to SEQ ID NO: 30851

SEQ ID NO: 45671 - protein, 838 aa, Oryza sativa
MPPAPESAADFPSLSSADAPDISEPVLSGYTANPHPEVSAIATNTPVSNTEDAPGPLEISESASRAYIITLPNQSLPDSKEIPDSKAEDAPIDSPEKLEPGPSSYTPTIPIKESSIVSQNTNAENVSGDCSEGTACAISYSQHIISDKPTNEVSATNSSPDDTSSDEDTVESGGIVEVSNSQPMPLNDSLENGCATQGLPANAPTNSTGVSSVKLWTNAGLFGLEPSKPPVFGAHDGPKEDTTPGHTQPQLCHSTGCPEVHFSKPTESAQVCVPNGNSPITSSFVGKLVGICPGSTSHSSETNQSTVRTPDTVIGQTEGSTGCSTSFEHSDHKNIIGKQTSISELLESEDSAENGAEMFSKTDMTGRNNMNQVTASSFSSIAQRFLANTLQRRTPKYTDLPMSSVIVNTDANGTDESTKISSLAPNETTFEASQFEKKTENDTNGLPKSSLFSSSHYSEKSSPPLEYMKISFHPMSAFEMSKLDLDFSDENLHENADDMMLPTFQLLPGSSVPQLGSGSESEDDTFGRSYSYSSYDDLSPRLYSNSELWDQEDANGLEDHDMHNNPNQIGSFGAPISSFVEFEQMDLSGAKSTVSLTDLGDDNGLGTLDSHPAGELPNFDTLMAHQNEAFIPHNPVSLSPDEGQLPPPPPLPPMQWRTMRQVASVEEGRGSAAKEDMLESTSDLPPVHTPVQEEHLLPIAPPDQQNLLPIAPPDQQGHAKENDRKVDGVKEISNPLDIEIRASLLQQIRDKSGQQKLNGHEKSKAVGNDTKNLDEREELLQQIRSKTFNLRRTNASKTNTSSPTTANSSVVAILEKANAIRQAVASDEGGDDDSWSDI

SEQ ID NO: 45672 - protein, 452 aa, Oryza sativa
MDHAELTTEQVLKRDIPWESYMANKLISGTCLQLLRRYDHKPESQRGPLLDEDGPSYVRVFLNILRNISKEDTVEYVLALIDEMLAVNPKRAALFYDNSLSGEDIYDPFLRLLLKGNWFVQEKSCKILTQIISARPKMQNGIVPNGEASNSKSKLTSTQDVLRGLVDWLCSQLRNPTHPNCSVPTAMHCLATLLREQYVRALFVQADGVKLLIPLISPASTQQSIQLLYETCLCIWLLSFYDAAVDYLSTTRVMPRLVEVVKGSTKEKVVRVVIMSIRNLLAKGAFAAQMIDLGLPHIVQNLKAQAWTDEDLLDALNQLEIGLKDNLKKLSSFEKYKQQVLLGHLDWSPMHKDPSFWRENINNFEENDFQILRVLMTIIDTSADTTALAVACYDLSQFLQYHPSGRIVVADLKAKDRVMKLMNHENAEVRKNALLCVQRLFLGAKYASFLQT

SEQ ID NO: 45673 - protein, 333 aa, Oryza sativa
MAASLQAAATLMQPAKLGGRASSAALPSRPSSHVARAFGVDTGAAGRITCSLQSDIREVANKCADAAKLAGFALATSALLVSGASAEGVPRRLTFDEIQSKTYMEVKGTGTANQCPTVEGGVDSFAFKAGKYNMKKFCLEPTSFTVKAEGVAKNAPPEFQKTKLMTRLTYTLDEIEGPLEVSSDGTIKFEENDGIDYAAVTVQLPGGERVPFLFTIKNLVATGKPESFGGPFLVPSYRGSSFLDPKGRGGSTGYDNAVALPAGGRGDEEELAKENVKNASSSTGNITLSVTKSKPETGEVIGVFESVQPSDTDLGAKVPKDVKIQGVWYAQLE

SEQ ID NO: 45674 - protein, 567 aa, Oryza sativa
MGKQQPQPPPAAMSAPPRKRKKKGRPSLLDLQKRTLRLEKLQEPPPPPPPPQPRRSTRRNPAGVDSGDEGTAPGGRREKKLRLVMGLPDGSAKGEKTRKATDGSEEPSDSGPTTPLPDKKLLVFVLDRLQKKDTYGVFSDPVDPEELPDYHDIIKHPMDFSTIRKKLNKGAYGNLEQFEDDVFLLTSNAMCYNSPDTIYYRQARAIQELAKKDFENLRQDSDASEPEPEPEIKPDPEPKPQPRRGRPPNKNTIKQKVGKPPVERATADFSGATLASVGNNGHRTQPPFDLQRQVMNGSFIADVLRASFASRNNGYNWSNERKLERIEDYSGSIGKWSAKSGRKPILTEESSRSTYCQPQPSSSIYELPVSSSYNETRKLLVPVGVQLQQSYPRSLARFAAQLGPVAWEIASKRIERALPPGTKFGRGWVGDGEAPNATQPPVLTTSSTALIHPSSTETSSEQPTHNGTASTSHSAGPQPSSAPYASSTITTHRVNCQSLPSQQHGSVPQVSAERGEHGAEVKGNHNNLHERPAIQHTVNGFSAVSGSNIFPSAAQMVANRMQTHTAD

SEQ ID NO: 45675 - protein, 233 aa, Oryza sativa; identical to SEQ ID NO: 30381

SEQ ID NO: 45676 - protein, 351 aa, Oryza sativa
MMEEASTSASGGGGAAANGGQRGFPPARSGVFYRFTQQNLPAWKPAMTPGCVITIFLMIGVTFVPVGLVCLHASNHVAEIAHRYDIDCVPNAYKRNRQAYIKDSSISKNCTQEVKVKYLMRAPIYVYYELDNFYQNHRRYVKSRSDKQLRYGQKYTHSSCDPIERNDGLPIVPCGLIAWSLFNDTYGFTCGSTEIKVNRKNISWKSDREHKFGKDVYPFNFQNGSLIGGGKLDPALPLNQQEDLIVWMRTAALPQFRKLYGVIEEDLQADEIITMHIANNYNTYSFGGKKSLILTTSTWLGGKNDFLGYAYLITGSLSLFLTILFALIHVKNPRPHGDANYLSWNRPNSNS

SEQ ID NO: 45677 - protein, 247 aa, Oryza sativa
MDTASLCTVEKRGAVHVITLTGAGEHRLGPPLLSALRSAVAAVRAAAAAGAGGALVIAGEGKYFSNGFDLDWARTVPAELHASMGGAFRGLVADLLALPVPTVAAVTGHAAAAGCALALAHDAVVMRASRGFLYMSEVDAGLKIVDFFAELIRQKVPDAVNRRDLVLRGDKMTAADALRRGIVDAAVDGGVDDVVAAAVREAEALAARGWDGEIVAETRKAIWPELWAKVKDHATDEPPPPPPRPLL

SEQ ID NO: 45678 - protein, 381 aa, Oryza sativa
MAGQIPQPIRCKAAVCRAAGEPLAVEEIVVDPPKAHEVRIKIVCTSLCHSDVTFWRMQDFPGVFPRIFGHEAFGVVESVGEHVEGFAAGDPVVPTFLGQCTECVDCASERSNVCSTYRFAVRPGMPRDGTARFRDRHGAPIHHFLGVSSFSEYTVVDANQVVRVDPAVPPATASLLSCGATTGVGAAWKLAKVEPGSSVAIFGLGAVGLAVAEGARICGASTIIGVDLNPEKHELGKKFGVTHFINPQELGDKPVSQAIIEMTDGGADYCFECIGLASVMSDAFRSSREGWGKTIILGVEMHGAPLSIPSLEILNGKCVMGSLFGGVKPKQDIPILADKYLNKELELDKFITHEVPLKDINTAFDLLLQGKSLRCTIWMDK

SEQ ID NO: 45679 - protein, 450 aa, Oryza sativa; identical to SEQ ID NO: 33424

SEQ ID NO: 45680 - protein, 137 aa, Oryza sativa
MAMASSSSASAAAARGGSLVEEWSGRVKALEAGFRKWMAEQPTHIEAAVTTAVGAVQGAALGGLMGTLTADGGSPFPTPPPPPPNANPQAMASFKQAQALAGGPLVQARNFAVMTGANAGISCVMRRIRGGEDIQGR

SEQ ID NO: 45681 - protein, 1002 aa, Oryza sativa
MGSGSLLLSLLLVLVVVNVGVAVNQDGLSLLDARRALAAPDGALADWNARDATPCSWTGVSCDAGVGGGAVTGISLAGLNLTGSFPAALCRLPRVASIDLSYNYIGPNLSSDAVAPCKALRRLDLSMNALVGPLPDALAALPELVYLKLDSNNFSGPIPESFGRFKKLESLSLVYNLLGGEVPPFLGGVSTLRELNLSYNPFVAGPVPAELGNLSALRVLWLAGCNLIGAIPASLGRLGNLTDLDLSTNALTGSIPPEITRLTSVVQIELYNNSLTGPIPVGFGKLAELQGVDLAMNRLNGAIPDDFFEAPKLESVHLYANSLTGPVPESVAKAASLVELRLFANRLNGTLPADLGKNSPLVCVDMSDNSISGEIPPAICDRGELEELLMLDNKLSGRIPDGLGRCRRLRRVRLSNNRLDGDVPAAVWGLPHMSLLELNDNQLTGVISPVIGGAANLSKLVLSNNRLTGSIPPEIGSASKLYELSADGNMLSGPLPGSLGGLEELGRLVLRNNSLSGQLLRGINSWKKLSELNLADNGFTGAIPAELGDLPVLNYLDLSGNRLTGEVPMQLENLKLNQFNVSNNQLSGALPPQYATAAYRSSFLGNPGLCGDNAGLCANSQGGPRSRAGFAWMMRSIFIFAAVVLVAGVAWFYWRYRSFNNSKLSADRSKWSLTSFHKLSFSEYEILDCLDEDNVIGSGASGKVYKAVLSNGEVVAVKKLWGLKKGTDVENGGEGSTADNSFEAEVKTLGKIRHKNIVKLWCSCTHNDTKLLVYEYMPNGSLGDVLHSSKAGLLDWSTRYKIALDAAEGLSYLHHDYVPAIVHRDVKSNNILLDAEFGARVADFGVAKVVEATVRGPKSMSVIAGSCGYIAPEYAYTLRVNEKSDIYSFGVVLLELVTGKPPVDPEFGEKDLVKWVCSTIDQKGVEHVLDSKLDMTFKDEINRVLNIALLCSSSLPINRPAMRRVVKMLQEVRAEATRPRLEKDGKLSPYYYEDTSDQGSSV

SEQ ID NO: 45682 - protein, 41 aa, Oryza sativa
MVDMQFSPSPGIAAALVVSRPESPTERLQSQQPPPTCSGSG

SEQ ID NO: 45683 - protein, 472 aa, Oryza sativa
MEADSGKLFVGGISWETDEDRLREYFSRFGEVTEAVIMRDRNTGRARGFGFVVFTDAGVAERVTMDKHMIDGRMVEAKKAVPRDDQSITSKNNGSSIGSPGPGRTRKIFVGGLASNVTEVEFRRYFEQFGVITDVVVMYDHNTQRPRGFGFITYDSEDAVDKALHKNFHELNGKMVEVKRAVPKEQSPGPAARSPAGGQNYAMSRVHSFLNGFNQGYNPNPIGGYGMRVDGRYGLLTGARNGFSSFGPGYGMGMNSESGMNANFGANSSFVNNSNGRQIGSFYNGSSNRLGSPIGYVGLNDDSGSLLSSMSRNVWGNENLNYPNNPTNMSSFAPSGTGGQMGITSDGINWGGPTPGHGMGNISSLGLANLGRGAGDSFGLPSGSYGRSNATGTIGEPFSAPPNAYEVNNADTYGSSSIYGDSTWRFTSSEIDMPPFGNDLGNVDPDIKSNIPASYMGNYTVNNNQTSRGITS

SEQ ID NO: 45684 - protein, 766 aa, Oryza sativa
MASHIVGYPRMGPKRELKFALESFWDGKSSAEDLEKVATDLRASIWKQMADAGIKYIPSNTFSYYDQVLDTTAMLGAVPERYSWTGGEIGFSTYFSMARGNATVPAMEMTKWFDTNYHFIVPELGPNTKFSYSSHKAVNEYKEAKALGVDTVPVLVGPVSYLLLSKPAKGVEKSFALLSLLSSILPVYKEVIAELKAAGATWIQFDEPTLVLDLDSHQLAAFSAAYTELESALSGLNVLIETYFADIPAESYKTLTSLNSVTAYGFDLIRGSKTLDLVKSAGFPSGKYLFAGVVDGRNIWADDLAASLTTLESLEAIVGKDKLVVSTSCSLMHTAVDLVNETKLDSEIKSWLAFAAQKVVEVNALAKALAGQKDEAYFAANTAAQASRRSSPRVTNEEVQKAAAALRGSDHRRATNVSARLDAQQKKLNLPVLPTTTIGSFPQTVELRRVRREYKAKKISEDEYVSAIKEEISKVVKIQEELDIDVLVHGEPERNDMVEYFGEQLSGFAFTANGWVQSYGSRCVKPPIIYGDVSRPNAMTVFWSKMAQSMTSRPMKGMLTGPVTILNWSFVRNDQPRFETCYQIALAIKKEVEDLEAGGIQVIQIDEAALREGLPLRKAEHAFYLDWAVHSFRITNCGVQDTTQIHTHMCYSNFNDIIHSIINMDADVITIENSRSDEKLLSVFREGVKYGAGIGPGVYDIHSPRIPSTEEIADRINKMLAVLDTNILWVNPDCGLKTRKYTEVKPALTNMVLAAKLIRTQLASAK

SEQ ID NO: 45685 - protein, 300 aa, Oryza sativa; identical to SEQ ID NO: 44252

SEQ ID NO: 45686 - protein, 623 aa, Oryza sativa; identical to SEQ ID NO: 45260

SEQ ID NO: 45687 - protein, 1013 aa, Oryza sativa
MNWDLSQWCPLIDDRCFLSWLVKVPSGQEQLRARQISAQQINKVEELWKTNPDASLEDLEKPGVDDEPQQVALKYEDAYQYQNVFAPLIKLEADYDKMMKESQSKDSLTVRWDIGLNKKRIAYFVFPKEDNELRLVPGDELRLRYSGDSSHPAWQSVGHVIKLTAQEEVALELRASQGVPVDLNHGFSVDFVWKSTSFDRMQGAMKTFAVDETSVSGYIYHHLLGHEVEHQIIRNTLPRRFGAPGLPELNASQVLAVKSVLQKPISLIQGPPGTGKTVTSAAIVYHMAKQGQGQVLVCAPSNVAVDQLAEKISSTGLKVVRLCAKSREAVSSPVEHLTLHYQVRHLDTSEKSELHKLQQLKDEQGELSSSDERKYKALKRATEREILQSADVICCTCVGAGDPRLANFRFRQVLIDESTQATEPECLIPLVLGVKQVVLVGDHCQLGPVIMCKKAARAGLAQSLFERLVILGVKPFRLQVQYRMHPCLSDFPSNCFYEGTLQNGVTVNERQTPGIDFPWPVPNRPMFFYVQMGQEEISASGTSYLNRTEAANVEKIVTTFLRSGVVPSQIGVITPYEGQRAYIVNYMSRNGSLRQQLYKEIEVASVDSFQGREKDYIILSCVRSNEHQGIGFLNDPRRLNVALTRARYGIVILGNPKVLSKQPLWNSLLTHYKEHECLVEGPLNNLKQSMVQFQKPKKIYNDRRLFLGGGQGVMQGASFGAAGTNPVADKRSGRGKGHSFVPFGPPNGAHKPGVHPSGYPLPRMPFPPFAGAHSQPYAIPTRGSLHGPIGAVPPVPQPGNRNFGPRGNTGGPIGGHLAHQQSSQQAMGGMGSAFNFPGLENPSSQPSGGGPMSQTGLMTQMPVQGLSQTFRDGFSIGGMSQDFFGDDFKSQGSHVAYNIADFSTQASQGGYGVDYSQGPQSGYPGNYLNQNAHPGYSHMGAANDIVSQDHMAHGSHGMFTQAGYNDSSQDESSQMHFGMAGPGLQSQPMMNPLYSQSYAHYNTQPQSLQPPPQ

SEQ ID NO: 45688 - protein, 526 aa, Oryza sativa
MVTLLIETTQGVGRYGGIKVYAVLGDDGADYAKNNAWEALFHVDDPGPRVPIAKGKFLDVNQALEVVRFDIQYCDWRARQDLLTIMVLHNKVVEVLNPLAREFKSIGTLRKELAELQEELAKAHNQVHLSETRVSSALDKLAQMETLVNDRLLQDGGSSASTAKCTSLAPSTSSASRVVNKKPPRRSLNVSGPVQPYNPSLKNFWYPVAFSSDLKDDTMVPIDCFEEQWVIFRGKDGRPGCVMNTCAHRACPLHLGSVNEGRIQCPYHGWEYSTDGKCEKMPSTKMLNVRIRSLPCFEQEGMVWIWPGNDPPKSTIPSLLPPSGFTIHAEIVMELPVEHGLLLDNLLDLAHAPFTHTSTFAKGWSVPSLVKFLTPSSGLQGYWDPYPIGMEFRPPCMVLSTIGISKPGKLEGKSTKQCSTHLHQLHICLPSSRNKTRLLYRMSLDFAPWIKHVPFMHILWSHFAEKVLNEDLRLVLGQQERMINGANVWNWPVSYDKLGIRYRLWRDAIERGVDRLPFSNQSESGS

SEQ ID NO: 45689 - protein, 913 aa, Oryza sativa; identical to SEQ ID NO: 42838

SEQ ID NO: 45690 - protein, 485 aa, Oryza sativa
MFGGGGGGGRKPLDYEELNENVKKVQYAVRGELYLRASELQKEGKKIIFTNVGNPHALGQKPLTFPRQVVALCQAPFLLDDPNVGLIFPADAIARAKHYLAMAPGGLGAYSDSRGIPGIRKEVAEFIERRDGYPSDPELIYLTDGASKGVMQMLNTIIRNERDGILVPVPQYPLYSAAISLFGGSLVPYYLEEEANWGLDFVNLRQTVASARSKGITVRAMVIINPGNPTGQCLSEGNIKELLKFCFHENLVLLADEVYQQNIYQDERPFISARKVLFDMGPPMSREVQLVSFHTVSKGYWGECGQRGGYFEMTNLPPKTVDEIYKVASIALSPNVPGQIFMGLMVNPPKPGDISYLKFSAESKSILESLRRRARLMTDGFNSCRNVVCNFTEGAMYSFPQIRLPPKAIDAAKRAGKAADVFYCLKLLEATGISTVPGSGFGQKEGVFHLRTTILPAEEDMPAIMTSFKKFNDTFMDQYDGYSRM

SEQ ID NO: 45691 - protein, 648 aa, Oryza sativa
MPKRTSSHSPTVSAMNPLLPSSSFPKFPHPDPNLSSPNPSPCSYLLHADADDEALIQIPCPNPSSGAASSSSVVLPPIDPAPHISSQFYTFTAESHALMLRCVLAGRPAAADEVRSATPPSVLASWRAVWKDRNEDTAYLTAWKRIQDKLGASADGRSLHFKSNPGQRVSHVGQWRDIVSEAHADPDLLRHLGLKDTVDRIKQSWTVGAKFYGIPESFVRVCVSACAVCKAAPAGQPDFAMSSPGRGKRRRRFEYTETLDVPARDVPRRLQQLAAKHKVVLCIRQKYIRHKPFMAEVKDYACHRAGVPTSSGVNATSSSGSVPDGKKTRVLKREPYQSKRCGCGFRIRAIVPIANYNEKDKSFVYEEEGTAVFKLYAVHSGHEPGPLDGNARIVHRLVGHKGALEFDPDIYGVSEEGDPNFTIKGDFDVETDDSHLAVLQQIRDLKTEVGLLEGKVGKMHPELLGSLSNELSECLHRIRKFNFDGNVCQPEDTLMIGNEEVPGWGPADVSHHLDQHDGAFCRDDEMLDDDDTDFGSSLGPIVSWDGMTAECEDRKMLMSDSPKCDKWMLKEDVGDFVEKSILNCGDDDGVEDSKIIKPLMHDETMVADPGLVGIHVEGFYSGAKWYDSPVGLDSSGDADVSFRHGGLV

SEQ ID NO: 45692 - protein, 97 aa, Oryza sativa
MLPKDTFDNLQAKVQMCFVRIIAMSAGKPTLFAPGIVIAKKKLSCYVITDKGTFCYGSEGLYAAVFPGLNMESVAINFTDVSIADSCLFHAKQTKMH

SEQ ID NO: 45693 - protein, 105 aa, Oryza sativa
MSGGAWLDFRVMWVLHKQWQSSYFFLATRWRRSCLPSPSRSLDAASHLPLVSDFCRSLDAASHLPLVSDFRLYSPQKFEVFVLCGVLPTRCSLFSLQAWECGNLT

SEQ ID NO: 45694 - protein, 590 aa, Oryza sativa
MASAAAHAATATAAAVLLVVFLAPLAAASDSDHKYQSEEKVMLWVNKVGPYNNPQETYNYYSLPFCHPSNNPVHKWGGLGEVLGGNELIDSQIDIKFGRDVDKGTICSIELDPDKAKQLSDAIESSYWFEFFIDDLPLWGFVGEADRNSDNKYFLFTHKNIVIRYNGNQIIHVNLTQESPKLIDAGKALDMTYSVKWEPTNVTFAHRFDVYLDYPFFEHQIHWFSIFNSFMMVIFLTGLVSMILMRTLRNDYAKYARDDDDLETLERDVSEESGWKLVHGDVFRPPRSLALLSALVGVGTQLSALILLVILLAIIGMLYIGRGAIVTTFIVCYALTSFISGYVSGALYSRHGGKNWIKAMIMTASLFPFMCFGIGLVLNTIAIFYRSLAAIPFGTMVVVFILWAFISFPLALLGTVVGRNWSGAPNNPCRVKTIPRPIPEKKWYLTPSVIALMGGLLPFGSIFIEMYFVFTSFWNYKVYYVYGFMLLVFLILIIVTICVTIVGTYFLLNAENYHWQWTSFFSAASTAVYVYLYSVYYYHVKTKMSGFFQTSFYFGYTLMFCLGLGTLCGAVGYLGSTLFVRRIYRNIKCD

SEQ ID NO: 45695 - protein, 316 aa, Oryza sativa
MQVKQKVYELYKGTVERVTGPRTVSAFLDKGVLSVPEFILAGDNLVSKCPTWSWEAGDPSKRKPYLPPDKQFLVTRNVPCLRRAVSLEEEYDAAGAEVVLGDDEDGEGWLATHGVQASKQEEEEDIPSMDTLDIGKTEGIKSIPSYFSAGKKAEEEEDIPDMDTYEDSGNDSVATAQPSYFVAEEPEDDNILRTRTYDVSITYDKYYQTPRVWLTGYDESRMPLKPELVFEDISQDHARKTVTIEDHPHLSAGKHASVHPCKHAAVMKKIIDVLMSQGVEPEVDKHLFIFLKFMASVIPTIEYDYTMDFDLGSTSR

SEQ ID NO: 45696 - protein, 268 aa, Oryza sativa; identical to SEQ ID NO: 31104

SEQ ID NO: 45697 - protein, 971 aa, Oryza sativa
MFEECVAPLVDGLFQGYNATVLAYGQTGSGKTYTMGTACKEGSHIGIIPRAMATLFDKIDKLKNQVEFQLRVSFIEILKEEVRDLLDPATAAVGKLENGNGHATKLSVPGKPPVQIREASNGVITLAGSTEVHVTTQKEMTACLEQGSLSRATGSTNMNNQSSRSHAIFTITLEQMRKADPIMTLDGMPIEEMNEDYLCAKLHLVDLAGSERAKRTGSDGLRFKEGVHINRGLLALGNVISALGDEKKRKEGAHVPYRDSKLTRLLQDSLGGNSKTVMIACISPADINAEETLNTLKYANRARNIQNKPIVNRNPVADEMKRMRQQIEYLQAELVSARGGVVLDDVQGLRERISMLEQKNEDLCRELYDLRNHGYTDPCEPELQKIGTGYTKGEGLKRSLQSTEPFDVPMTDSVRAGSPKDIDDEVAKEWEHTMLQDSMGKELNELNRQLEQKESEMKMYGSDTVALKQHFGKKLLELEEEKRAVQQERDRLLAEVESLNADGQTHKLRDAQLQKLKTLEAQILDLKKKQENQVQLLKEKQKSDEAAKKLQEEIHSIKAQKVQLQHKIKQEAEQFRQWKATREKELLQLRKEGRRNEYERHKLQALNQRQKLVLQRKTEEAAMATKRLKELLEARKSSGRDNSGMNGTSPGSHMTEKSLQKWLEQDLEVMVHVHEVRNEYEKQSQLRAALGEELAILKQEDVMSGAASPPRGKNGNSRANTLSPNARQARIASLESMVTISSNTLVAMASQLSEAEERERAFSGRGRWNQLRSMAEAKSLLQYIFNVAADARCQVREKEMEIKEMKEQMTELVTILRHSESRRRETEKQLKQREQAAVTATTSPGNGNGSVKHSADDSNTPLSPVAVPAQKQLKYSAGIVNSPSKGVPAFNKQHLKMVPMAQLPVGKKVSIAGQSGKLWRWKRSHHQWLLQFKWKWQKPWKLSEMIRHSDETMTRTRPRPQLLPHRPQRVM

SEQ ID NO: 45698 - protein, 894 aa, Oryza sativa
MVTEMAMRGEPWRRQEGEQAQAEADRERELDLFRSGSAPPTVEGSMGALHAAAAADVFLEDELRADPAYHSYYYSNGNINPRLPPPLLSKEDWRSAQRLRPGLGGIGDGRKPRGGGGGRGGGGAGGMGPGDGLIGMPGLEIGRQNSFSGIFQDDSYQHDTDRQGANCNGTDLLSSSKVQYGLHRETGAISGLHSDSKAPCLPENQNESSHSYASIIGSSLSRSASPDPELVRRVPSPCLPPIGVKLGATDKKNNVGSSSFNCSSPNIIESDDLVSALSGMNLSSSRAMNGNTMDQSKLHQDVDDVRKFLFDQYMDQTNGNQRHSYMKRSEQGHVKVPQEYSGASMNPSVMRSQINAGGFTSFNNSSVGSGFASPRLGSRSPGGSLSSRQNLTGASNLPNYVGIGSPTAASAHQMPVDPLYVQFLRAAEIAALAANCEDPLMDRANLGGSYMDLFGPQKAYLSPLLQSQKQYSYYGNLGVGLGYAGNSLTSPILPSSPGGPGSPLRHGDRSMRYPSGMRNFGGSFGSWNSDLGGKMEANLVPSLLEEFKSNKSKSYELSEIAGHVVEFSADQYGSRFIQQKLETASTEEKDMVFAEIMPQALTLMTDVFGNYVVQKFFEHGSSAQIKELADQLIGRVLALSLQMYGCRVIQKAIEVVDLDQQTKMVAELDGQVMRCVRDQNGNHVIQKCIECIPQHAIQFIVSTFYGQVVMLSTHPYGCRVIQRVLEHCDDPKTQQIMMDEILQSVCLLATDQYGNYVVQHVLEHGKPHERSAIIEKLIGQIVQMSQQKFASNVIEKCLAFGNPVERQVLIGEMLGSSNESEHLEGMMKDQFANYVVQKVLETCDDQQREMILTRIKAHLNTLKKYTYGKHIVARVEKLVAAGEKRLGLQPSTAA

SEQ ID NO: 45699 - protein, 310 aa, Oryza sativa
MADTQLGCHTIGSHGIKVAKFHLYDWMILIFLAVVYGLFNIIEPFHRFVGSDMLTDLRYPLKGNTVPFWAVPLIAIVLPWAIFGGIYFKKKNVYDLHHGILGILYSVLITAVITDAIKNGVGRPRPDFFWRCFPDGKPNFNNVTGDVICHGERSVIKEGYKSFPSGHSSGAFAGLGFLAWYLAGKLKAFKREGHIAKLCLVFLPLLVASLVAVSRVDDYWHHWQDVFAGGIIGLTVASFCYLQFFPYPFDADAIWPHAHFQLLAESRSNGNENSHNMGWTETDAFHEGAGAVALRDTSLVLDSMESGRRF

SEQ ID NO: 45700 - protein, 545 aa, Oryza sativa
MAGGGGRERRGGGRLLVGVLLLTLVVSGHCLESTHHRGLKRRRRKHEIHSPIKTVVVVVMENRSFDHILGWLSRTRPDIDGLNGTQSNRLNASDPSSPEIFVTDEAGYVDSDPGHGFEDIREQIFGSADTSAVPAPMSGFAQNARGMGLGMPQNVMSGFKPESVPVYAALADEFAVFDRWFASVPTSTQPNRLYVHSATSHGLTFNARKDLIHGFPQKTIFDSLEENGLSFGIYYQNIPATLFYQSLRRLKRLVKFHQYSLKFKLHAKWGKLPNYAVIEQRYFDCEMFPANDDHPSHDVARGQRFVKEVYETLRASPQWNETALIITYDEHGGFYDHVPTPVVGVPQPDGIVGPDPYYFKFDRLGVRVPSFLISPWIEKRTVIHEPNGPQDSSQYEHSSIPATVKKLFNLHSNFLTKRDAWAGTFENYFKIRKTPRTDCPEKLPEVTKSLQPFGPKEDSSLSEFQVELIQLASQLNGDHVLNTYPDIGRTMTVGEANRYAEDAVARFLEAGRIALRAGANESALVTMRPALTSRASPSSDLSSEL

SEQ ID NO: 45701 - protein, 509 aa, Oryza sativa; identical to SEQ ID NO: 33141

SEQ ID NO: 45702 - protein, 649 aa, Oryza sativa
MGRGAPSSHPPPWRRLLRYALLCALLPPWGTSEANEQLAEFPPRGWNSYDSFSWIVDENTYMQNAEILAEKLLPHGYEFAVIDYLWYRKYVHGAYTDSYGFDNIDEWGRPFPDLQRFPSSRIDKGFSQLANKVHGMGLKFGIHLMKGISLQAVNGNTPILDIKTGKPYVEDGRQWTARDIGLTHRTCAWMPHGFMSVNTDIGAGKAFLRSLYQQYADWGVDFVKVDCIFGTDYSPKEIITISELLAELDRPIILSISPGTEVTPALAKNISQHVNMYRITGDDWDNWKDVSSHFDVSSSFAAANKIGAIGLRGRSWPDLDMLPFGWLTNAGVNQGPHRQCELTSDEQRTQIALWSMAKSPLMYGGDLRHLDNDTLSIITNPTLLKINHYSINNMEFHHVHSERTSKEDKHSSRFISEDLVHVPKIDGVSLGLTACSDDKANGWYMFSQHGKSDHICRNYGMQDDKNISFCLGKTIPLLTSDDIIVHNEEYQTKFHLANMDSDDACLDASGSQRRTSSDSKFPMFSRCRWHAMQMWELNEKGNLISSYSRLCATVESNNKGVVTTGAVARAWIATGSKGEIYLAFFNLDSMSRKITARISDLEKVLGSTFIRKDTCSCTEVWSGRNFGRVEEEISAVVKSHGSMVFEITC

SEQ ID NO: 45703 - protein, 246 aa, Oryza sativa
MSAVGMKTACVTGGNGYIASALIKMLLQKGYAVNTTIRNPDDMRKNSHLKGLEALGTLKVFRADLDEDGSFDEAVNGCDYAFLVAAPVNLQSENPEKEMIEAGVQGTLNVMRSCLRAGTVKRVILTSSAAAVALRPLQGGVGHVLDESSWSDVDYLTREKPPSWVTFYSFLFWSSIKSFIYIFYRADENDGWLMLAHPIVFAFAFCRRMVSRRCFWRRRRANSRRRTTSASSPCSRCSPWARRRRR

SEQ ID NO: 45704 - protein, 210 aa, Oryza sativa
MTWPFTHAAASLTRKATTGATSVVSAIRPIDLSSTFFTNASSFPAMNSSVLTGPGATTFAVTPFAATSFAMILVIASTAPFVAVYAAYPGRSVPRMDDENVTTRPPAPAGKRFAASRHTRNVPRTLTASMASKSSTAVSASDGYLDSRRPAQATTMCGGVPNASSVRSNSARTAAGSDTSARTATARGRAAAPRELRSAAKASALAELEA

SEQ ID NO: 45705 - protein, 386 aa, Oryza sativa
MPSFPSSGASPQKQQHNARRRQLIRQQRKSLPIASVEKRLIEEVRKNDTLIVVGETGSGKTTQLPQFLYDAGFCQDGKVIGITQPRRVAAVTVAKRVAEECNDQLGKKVGYSIRFDDSTSNATRIKYMTDGLLLREALLDPLLSKYSVIVVDEAHERTVHTDVLLGLLKKVQHSRSIYANKNGKILPDIQHQSQYFTLKACQGTKIDPLKLIIMSASLDAKCFSDYFGSAKAVHIQGRQYPVDILYTYQPESDYLDATLVTIFQIHLEEGPGDILAFLTGQEEIESLDRLIQERARQLPPQRSKIWTTPIYSSLPSEQQMNAFKPAPAGTRKVVLATNIAETSVTIPGIKYVIDPGMVKARAYNPVTGMESLIIIPVSKAQALQRR

SEQ ID NO: 45706 - protein, 215 aa, Oryza sativa
MALIHHHLAVPVAPAPPPRGLGPATAARRLTLHRRRRRSGAAAGRMTVTASSMVEPASGEETAARSAADVVRAFYDGVNRRDLAAVEPLIAEGCVYEDLVFPNPFVGRAEILGFFAGFMGSVSSDLRFVIDDISAGDDSRAVGVTWHLDWKGRPFPFSRGCSFYRLQLDEKQQQLQIVYGRDCVEPAVKPGESALLIIRAVTWIFERFPRLANML

SEQ ID NO: 45707 - protein, 489 aa, Oryza sativa
MEDEATSVAAPLLRPRGGVDAEAVKQQLWPAGARVAGEWWVESKKLWRVVGPAIFQRIALYGINVVSQAFIGHMGDLELAAFSIASTVVAGFNFGFLLGMASALETLCGQAFGAKKYHMLGVYLQRSWLVLLMFAVALTPTYVLMEDLLLLIGQPADLASLAGKMSVWLLPQHFAMAMLLPLTRFLQSQLKNWVTAVTAGVALALHLVITYLLVNTLHLGLLGAVAAANVAWWIVVLGQLVYVVGGWCPLSWKGFSMEAFADFWEFIKLSSASGVMLCLENWYYRVLVLLTGYLNNAEIAVDALSICLTINGWEMMIPFGFLAATGVRVANELGAGSGKGARFAIVVSVTTSVAIGLVFWCLIIAYNDKIALLFSSSKVVLDAVSDLSVLLAFTVLLNSVQPVLSGVAIGSGWQALVAYVNVGSYYLVGVPIGAILGWPLHFGVGGIWSGLIGGTAVQTLILAYLTISCDWDEEAKKASTRMEVWASSK

SEQ ID NO: 45708 - protein, 163 aa, Oryza sativa
MFMALSSIWMLLLLFGTSAFLVPSLCILSLTFGDAFGARYLLYGAKSFDVITRVNDMVLIGLGYLIGYPISSASVGALQGLLTNNLVALKGSCPNCGEQVFAFVKTDNSIKAPHRAECHVCSCPLEYRTKVEKSLSGTRRTWVYGRVYLVKQGHPRKRKWLKD

SEQ ID NO: 45709 - protein, 447 aa, Oryza sativa
MGAKDSKPSYSYSSSYDHGNSSSGYNSRYPAYPANASSSQNTRYAPSMENYVQPETHARLQRKYSRIGDDYRSLNQVTEALAQAGLESSNLIVGIDFTKSNEWTGKLSFNRRCLHDIGNTPNPYEQAISIIGRTLSAFDEDNLIPCFGFGDASTHDQEVFSFYPENRPCNGFEEALERYREIVPTLRLAGPTSFAPMIETAIGIVDSTGGQYHVLLIIADGQVTRSVDTQSGQLSPQERDTIDAIVKASQFPLSIVLVGVGDGPWDMMHQFDDNIPARSFDNFQFVNFTDIMSKSIAADRKEAEFALSALMEIPTQYKATLDLQLLGRRQRIQPRIPLPPPMRNAYSRSTSFDQHSGVYSRSSSFGPQTSGFQQSESFKQRQPVATTAPDTYTSESSLEGRLLCAICMDKSKDLAFGCGHQTCYECGKNLVRCPMCQQHITTRIRLY

SEQ ID NO: 45710 - protein, 418 aa, Oryza sativa
MGSARQVLALVFPTGTIVFSITLLLRVIIPLLVQIYPLLIVCWFQALLMNNSRVMELLQLDCHLVAMILVEAITIQEAHKEVFGQELAWLNILAPMVCGHLQVLSDIPVVSSLNFQYQHPMNVVPGIPQMSHRFTGPGASSSRTGNLENRIIGSEEFSARNVVATSFPDAVPPAALDMRHLIPEPSSWNVDGRATTIPGNVPSSSRANTNSMVNPPAGSPFIAHQNLHRRNPRNLSEEISRLSGALRGHQHPRLRSGFLLERQGDGVWGVPLSTRSREGRRLIEIRNALEMIHRGENVRFESIFYGGVDIHDRHRDMRLDIDNMSYEELLALEERIGNVSTGLSEEEVTKLLKQRKFSSWRLEASVEEEPCCICQEEYVDGDDLGTLDCGHDFHVGCVRQWLVVKNTCPICKNTALKS

SEQ ID NO: 45711 - protein, 293 aa, Oryza sativa
MAGQAAALTLRQAGRLRRRHGVLVRWTVGHAFWADLAQGVLCCSCDDVLSGGYDVEFRYLALPPECRLDANWTTRRQPQRYRTMSRVGDTIEFVSIGDGLHRQEFTASTTLAVWALVPATGEWKWKKLHELSMATLWRLDGFKNAGLPEVMPIHPILSTKQDGVIYMVSSADDLASAGREDSSASESEGWDSDVGDESDDDDEEDGVLVEEERQYLIGLDIRNESLLSWRRLPGSGYLDRPDLMGFDVSKCLDEHCLCPPADAAPNTDGAEVLIYGSSYTQEEVAKQPKLSLI

SEQ ID NO: 45712 - protein, 262 aa, Oryza sativa
MARACSPALRLQLPPNPPITPQLPSCRTHSAGARCRGFAAAHSQPPAAGRPDEPAAEPSPKQPEIAQTQNLRRSRRRGPGSRQSLVSVGTSCGGGDQWSSDFDLTLRQLHLDDLIEDGQNDDADVLVHLLVQQHTQFGMSIKGRVVTSFSKICDSCSSPYCAKIDEQFNLTVLSSTRKEQSEMPDIGDSDPSVIYVRPGVEVDLDSVIQETIRLTASAKSSCSEACEKSTVVWQYGGNQKKRYSQRWSKLLDLKKTLDKAAN

SEQ ID NO: 45713 - protein, 335 aa, Oryza sativa
MASLLRLQALALNLTAPRRLPFLPLRVTTATAPLAGRLSTAAASGSSPESPASEPDLDSGLYLVATPIGNLEDITLRALRILKCADVILSEDTRHSGKLLQHYNIKTPLLSFHKFNEREREPNILKRLHEGEAVALISDAGTPGISDPGMELARLCATEGIPVIPIPGPSAAIAALSASGLPTDEFTFVGFLPKHARSRKERLEISACQAATQIFYVPPHGIHQFLSDAASSFGDSRSCVIAREITKLHEEFWRGTIGEANEAFATRQPKGEITVLIEGKLISADETPSEDFLEHELRELMTQGHPLSAAVKMVSEATSAKKKDVYALALRLFGK

SEQ ID NO: 45714 - protein, 444 aa, Oryza sativa
MATHAALAASRIPATARLHSKAASKQRVDFADFSGLRPGSCSISHAAREASFSDVLGSQLVARATGENAVRAPAEAKLKVAINGFGRIGRNFLRCWHERENSPLEVVVVNDSGGVRNASHLLKYDSMLGTFKADVKIVDDQTISVDGKLIKVVSNRDPLKLPWAELGIDIVIEGTGVFVDGPGAGKHIQAGAKKVIITAPAKGADIPTYVLGVNEGDYSHEVANIISNASCTTNCLAPFVKILDEEFGIVKGTMTTTHSYTGDQRLLDASHRDLRRARAAALNIVPTSTGAAKAVALVLPQLKGKLNGIALRVPTPNVSVVDLVINTVKTGITADDVNAAFRKAAAGPLSGILDVCDVPLVSVDFRCSDVSSTIDASLTMVMGDDMVKVVAWYDNEWGYSQRVVDLAHLVASKWPGAAVQGSGDPLEDFCKDNPETDECKVYEN

SEQ ID NO: 45715 - protein, 248 aa, Oryza sativa; identical to SEQ ID NO: 30794

SEQ ID NO: 45716 - protein, 674 aa, Oryza sativa; identical to SEQ ID NO: 42761

SEQ ID NO: 45717 - protein, 766 aa, Oryza sativa
MASHIVGYPRMGPKRELKFALESFWDGKSSAEDLEKVATDLRASIWKQMADAGIKYIPSNTFSYYDQVLDTTAMLGAVPERYSWTGGEIGFSTYFSMARGNATVPAMEMTKWFDTNYHFIVPELGPNTKFSYSSHKAVNEYKEAKALGVDTVPVLVGPVSYLLLSKPAKGVEKSFALLSLLSSILPVYKEVIAELKAAGATWIQFDEPTLVLDLDSHQLAAFSAAYTELESALSGLNVLIETYFADIPAESYKTLTSLNSVTAYGFDLIRGSKTLDLVKSAGFPSGRYLFAGVVDGRNIWADDLAASLTTLESLEAIVGKDKLVVSTSCSLMHTAVDLVNETKLDSEIKSWLAFAAQKVVEVNALAKALAGQKDEAYFAANTAAQASRRSSPRVTNEEVQKAAAALRGSDHRRATNVSARLDAQQKKLNLPVLPTTTIGSFPQTVELRRVRREYKAKKISEDEYVSAIKEEISKVVKIQEELDIDVLVHGEPERNDMVEYFGEQLSGFAFTANGWVQSYGSRCVKPPIIYGDVSRPNAMTVFWSKMAQSMTSRPMKGMLTGPVTILNWSFVRNDQPRFETCYQIALAIKKEVEDLEAGGIQVIQIDEAALREGLPLRKAEHAFYLDWAVHSFRITNCGVQDTTQIHTHMCYSNFNDIIHSIINMDADVITIENSRSDEKLLSVFREGVKYGAGIGPGVYDIHSPRIPSTEEIADRINKMLAVLDTNILWVNPDCGLKTRKYTEVKPALTNMVLAAKLIRTQLASAK

SEQ ID NO: 45718 - protein, 77 aa, Oryza sativa
MNFLLLSLMYAYYCFEYKWNFFAVSLNERLDFFESNWAFFAGFGMLIIIHCIWCKIYAFAFLGHDALPVSALDCNAK

SEQ ID NO: 45719 - protein, 106 aa, Oryza sativa
MGGSGGGGGGGGGGGQGRIRRQSVVVASVTATASLLPSVAVVASGGSGGSGGSVWQRRVDPAAVAAAEGDPAAVGDGRGWIRRQPRVDPVAFFFRPSLFLFRGIRH

SEQ ID NO: 45720 - protein, 556 aa, Oryza sativa
MRRRPFLDQRRPSSFKRRWQQRPWWFRLAVTLLLALACLFLLLALRGSPDPDPVVLPSTDSSRSAATTSPLLHQRSYLDGVTDAFNMTDEMLSAHSFSRQLMDQISLAKTYLVVAKEANNLQFAAELSSQIRRAQSILAHAAAHGGTVTEQDAEKAIRDMSVLFFQAQQFRYDSAVTIMKLKGQIQSLEEKSKAEAEKSTKYGQIAAEELPKGLYCLGVRLTMEWFKTTELQRKFTERSPAVQSNLRDNSLYHYCVFSDNILAVSVVVNSTTLNSMRPEKIVFHLVTDEVNYAPMRAWFALNDYRGATVEIQKVEDFTWLNSSYVPVLKQLQDAATQNYYFSGSGNRGTPVKFRNPKYLSMLNHLRFYIPEIYPELRKVVFLDDDTVVQKDLSELFTINLNGNVMGAVETCMETFHRFHKYLNHSHPLIRAHFDPDACGWAFGMNVLDLVMWRNKNVTGIYHYWQERNADHTLWKLGSLPPGLLAFYGLVEPLDPKWHVLGLGYTTVDPATIKEGAVLHYNGNMKPWLKIGMEKYKGFWDNYVDYSHPLLQRCFTH

SEQ ID NO: 45721 - protein, 124 aa, Oryza sativa
MGQAFRKLFDAFFGTSEMRVVMLGLDAAGKTTILYKLHIGEVLSTVPTIGFNVEKVQYKNVMFTVWDVGGQEKLRPLWRHYFNNTDGLVCFVSFVVIFLGIRERFVHRCIKEGKKWLFDFDRLV

SEQ ID NO: 45722 - protein, 236 aa, Oryza sativa
MAAITLLRSASLPGLSDALARDAAAVQHVCSSYLPNNKEKKRRWILCSLRKTRYKNFDELYMYCYYVAGTVGLMSVPVMGIAPESKATTESVYSAALALGIANQLTNILRDVGEDARRGRIYLPQDELAEAGLSDEDIFNGVVTNKWRSFMKRQIKRARMFFEEAERGVTELSQASRWPVWASLLLYRQILDEIEANDYNNFTKRAYVGKAKKLLALPVAYGRSLLMPYSLRNSQK

SEQ ID NO: 45723 - protein, 182 aa, Oryza sativa
MASEKKQANPMREIKVQKLVLNISVGESGDRLTRASKVLEQLSGQSPVFSKARYTVRSFGIRRNEKIACYVTVRGEKAMQLLESGLKVKEYELLRRNFSETGCFGFGIQEHIDLGIKYDPSTGIYGMDFYVVLERAGYRVARRRRCKSRVGIQHRVTKEDAMKWFQVKYEGVILNKAQANTS

SEQ ID NO: 45724 - protein, 168 aa, Oryza sativa
MSCTRKIWMGLFSKLVVHIHSWRSILPRSRITTTLCAITLCHHLNSTVNQSMWLPSIPRPIIQVQPYSNLFTSVSCTCAIPPFFLALEPALRVRALLHDGTRKQQLLPGREKGCSGDRREQRTWARDMQAAGCQWSHRRLDSEERGEGRRSSGRASSARAIGGPVPSV

SEQ ID NO: 45725 - protein, 485 aa, Oryza sativa; identical to SEQ ID NO: 43436

SEQ ID NO: 45726 - protein, 156 aa, Oryza sativa
MANAGLKPVAGLLLVLNFCMYVIVAAVGGWAINHAIHTGYFIGSGMALPANFSPIYFPMGNAATGFFVIFAVIAGVVGAAAALAGFHHVRAWSHESLPAAASSGFIAWTLTLLAMGLAVKEIDLHGRNARLKTMESFTIILSATQLFYLLAIHGGR

SEQ ID NO: 45727 - protein, 330 aa, Oryza sativa
MAVGIALLLDLASRGPRYASGVHAHSAISASAAAAAAAAAALSATGIPLSARHLFGFPGFTIAHCDAGAPTGLNDAPDLINGLNDKIQDSLQYPIKEYPLELKPLFSAFALKNFSLTTLRSFLLYYLPLLEPHPHTDGDDEDDLLQDESENRPPVDLVTPFYNSVKQIIRETSVVTTRRILERIAVCHVSQRTAWKLLKDASKSSKRKSVRGMPFQEYSYCVARTTFRAHALGVAAAWVVQSIVEVYRCFFGKPSNDQAMFDEMDKVKLFGKKIYGITVKCGFSLVFASIGAGIGVLVHPVHGQWLGCTLGDFAGPIVAILVFEKFQLPL

SEQ ID NO: 45728 - protein, 28 aa, Oryza sativa
MMDWQLCLPHMICLWSENGQEAARTLYL

SEQ ID NO: 45729 - protein, 472 aa, Oryza sativa
MAKKKDVEVEELDEEVVAAAAAPAADGGEEQEAEPPARRPSTFAELGVVPELVAACDAMGWKEPTRIQAEAIPHALEGRDLIGLGQTGSGKTGAFALPIIQALLKQDKPQALFACVLSPTRELAFQIGQQFEALGSAIGLSCTVLVGGVDRVQQAVSLAKRPHIVVGTPGRLLDHLTDTKGFSLNKLKYLVLDEADKLLNVEFQKALDDILNVIPKERRTFLFSATMTNKVSKLQRACLRNPVKVEVASKYSTVDTLRQEFYFVPADYKDCFLVHVLNELPGSMIMIFVRTCESTRLLALTLRNLRFKAISISGQMSQDKRLGALNRFKTKDCNILICTDVASRGLDIQGVDVVINYDIPMNSKDYVHRVGRTARAGNTGYAVSLVNQYEAMWFKMIEKLLGYEIPDRKVDNAEIMILRERISDSKRIALTTMKEGGGHKKKRRKNEDDEEEEERNAPVSRKSKSFNKSRRR

SEQ ID NO: 45730 - protein, 124 aa, Oryza sativa
MDTVKNVLGKMGKRLGEAARKTESLNARDYPRRFPLLLEPLRRSTRDAGLAPTGHCSAEPPPRSHVLPIRARHAGPSLSPPAPSLSNVPPNILRDAWELVIWGLLQDGGISLRFQGCSVRKTEG

SEQ ID NO: 45731 - protein, 474 aa, Oryza sativa
MLNHVVSAPPNGNSQIPLQATAGIDSVEATRDPAYTDSLFSNQDPWNAVGNASVAPPRLNKLAKEPAVSGDPYVEGHGLAINSSNAATLLEEGNLPLIQDRTFKDIYPEPSQMSKGYGEETIKRQLQAVAEGVAASVLQSPFPEKPTVFSGDHTDKQGAVIDPKLEDAVNNQSDKTSQGVKVLDDIDNLQIIKNSDLEELRELGSGTFGTVYHGKWRGSDVAIKRINDRCFAGKASEQERMRTDFWNEADKLASLHHPNVVAFYGVVLDGPGGSVATVTEYMANGSLRQALQRHEKIFDRRRRLLIAMDVAFGMEYLHEKNIVHFDLKSDNLLVNLRDPQHPICKVGDLGLSKVKCQTLISGGVRGTLPWMAPELLNGSSSLVSEKVDVFSFGIVMWELLTGEEPYAELHYGAIIGGIVNNTLRPPVPESCDPRWRSLMEQCWSSEPSERPSFTEVGKRLRAMATPSTKAQPQK

SEQ ID NO: 45732 - protein, 308 aa, Oryza sativa
MQKKLYQLGGLQAEGIFRINADNSQELHVREQLNMGVVPDGVDMHCLTGLIKAWFRELPSGVLDSLTPEQVMHCNTEEECALLASTLPPVEAALLDWAINLMADVVEHENYNKMNARNIAMVFAPNMTQMADPLTALIHAVQVMNFLKTLILKTVKGREETAMPSSAFPSSSGSPSDKDEPQALEHLDKPTICSTQQNNDFPMISGATLDHFLFRAEPLRHNDAQGSAGRPKKRDNKDHDNSSREFSPIDSDSSSQASNSASKFSNDNVEGLFDRFKFRKGVGRLCRHPVFQLSRSMKKSGEAGQACV

SEQ ID NO: 45733 - protein, 85 aa, Oryza sativa
MVRDCELLSPTGCSDGEGTATEASARRWRRQWGYGAEMASLPLPLLLVLGLFVPFVESGRRWRRGLGLEGDDGRSRRMTITTVAC

SEQ ID NO: 45734 - protein, 368 aa, Oryza sativa
MGSKTKGCCGWLIVALVASLVATAAVVAIMKKKVGGGSGRKLKPLPVPGPPGAIDSKYGDALGVALQFFQVQKAGKLENNQIPWRGDSALDDGKPAGLDLSKGMYDAGDHIKFSFPMAFTATVLSWSILEYGDQMSATKQLDPALDALRWITDFLVNAHPSDNVFYIQVGDPDLDHNCWERPETMSEKRPLTQINTKSPGSDVAAEAAAAMASASIVFKSRDTTYSDSLLQHAQKLFTFADTYKGLASDTYPKLQNYYNSTGYQDELLWAASWLYHATGDQTYLSYVTVENGKAFADWGRPTWFSWDDKLAGTQVLLSRLNFFGSKQTSNAENMGLKMYRDTAEAVICGLLPDSPSATASRTGGDWCG

SEQ ID NO: 45735 - protein, 462 aa, Oryza sativa
MGSMEPFNRLVRLAARAFYDDISMKGDNQPKTSRGDNRGMAVVVLDALTRRQWVREEDLAKALKLHSKQLRRILRFFEEEKLVTRDHRKESAKGAKIYSAAAAAAGDGQSITKEGEEKVKMHTHSYCCLDYAQICDVVRYRIHRMKKKLKDELDSRNTIQHYICPNCKKRYSAFDALQLISYTDEYFHCENCNGELVAESDKLASEEMGDGDDNARKRRREKLKDMQQRIDEQLKPLQAQLNRVKDLPAPEFGSLQSWERANIGAFGTADPSAADSSRNPQGQYGTPMPYLGETKVEVALSGTGVKDEGAESGTNGNGLKVLPPWMIKQGMNLTKEQRGETSNSSNLDEKSEVKDEKKQDSKEDEKSIQDEYIKAYYEALRKRQDEEEAKRKIQQEGDTFASASHSERQVGMKSKREDDDEGVEWEEEQPAGNTAETYKLADLNVEAQESGDEEDEIDWEEG

SEQ ID NO: 45736 - protein, 609 aa, Oryza sativa; identical to SEQ ID NO: 45540

SEQ ID NO: 45737 - protein, 596 aa, Oryza sativa
MLGHREIVDGKAGAYVWKTYKEVFDLSTKIGNSIRSRGLAKGSRCGIYGANCPEWIITMEACNAHGIYCVPLYDTLGAGAVEFILCHAEVEIAFTEEKKIEQIFKTFPKSAEFLKTIVSFGKVTQEQKENASKYGLEIYSWDEFLSLADQEFDLPVKAKTDICTIMYTSGTTGDPKGVLISNASIICLVAGVDRLLNCVNEQLEQTDVYMSYLPLAHIFDRVVEELFMFHGASIGFWRGDVKLLVEDIGTLKPTILCAVPRVLDRIFSGLQAKIASGGFIKSTLFNLAYKFKQFRMMKGAKHNEAAAICDKVVFSKVKEGLGGNVRVILSGAAPLATHVEEYLRVVTCAHVLQGYGLTETCAGSFVSLPNQMCMIGTVGPPVPNIDVCLESVPEMNYDALATRPRGEICIRGETVFSGYYKREDLTKDVLIDGWFHTGDIGEWQPDGSMKIIDRKKNIFKLSQGEYVAVENLENIYGLVSAIDSIWVYGNSFESFLVAVVNPNKEALESWAAANGISGDLEALCENPKAKEYILGELSKVGKEKKLKGFEFIKAVHLEPVPFDMDRDLITPTYKKKRPQLLKYYQGTIDNMYRSAK

SEQ ID NO: 45738 - protein, 1016 aa, Oryza sativa
MGWFRAASGLARVALRRNLARAPANPFAGPAPRYFHSTRPRRFAAPVPRAVPLSRLTDSFLDGTSSVYLEELQRAWEADPTSVDESWDNFFRNFVGQAATSPGISGQTIQESMRLLLLVRAYQVSGHLKAKLDPLALEERPIPDVLDPAFYGFSEADLDREFFLGVWRMAGFLSENRPVQTLRSVLERLEQAYCGTIGYEYMHIPDREKCNWLRDRIETVNAREYSYDRRQVMLDRLMWSTQFESFLAQKWTTAKRFGLEGAETLIPGMKEMFDRAADLGVESIVIGMPHRGRLNVLGNVVRKPLRQIFSEFSGGTKPAEEGEGLYTGTGDVKYHLGTSYDRPTRGGKHIHLSLVANPSHLEAVDPVVAGKTRAKQYYSNDLDRTKSLGVLLHGDGSFSGQGVVYETLHLSALPNYTTGGTIHIVVNNQVAFTTDPRAGRSSQYCTDVAKALDAPIFHVNGDDLEAVVHVCELAAEWRQTFHSDVVVDIVCYRRFGHNEIDEPSFTQPKMYKIIRNHQSALEIYQNRLLESGKISKEDIDKMQKKVSTILNDEFQNSKEYIPNKRDWLSAYWTGFKSPEQISRIRNTGVKPEILKRVGEAMTTLPENFKPHRAVKKIFELRRQMIETGEGIDWAVGEALAFATLIIEGNHVRLSGQDVERGTFSHRHAVIHDQETGEQYCPLDNLVMNQDEELFTVSNSSLSEFAVLGFELGYSMENPNSLVLWEAQFGDFSNGAQVIFDQFLSSGEAKWLRQTGLVVCLPHGYDGQGPEHSSARLERFLQMSDDNPYVIPEMDPTLRKQIQQCNWQVVNVTTPANYFHVLRRQIHRDFRKPLIVMSPKNLLRHKDCKSNLSEFDDLAGHPGFDKQGTRFKRLIKDQNNHKDLEEGIKRLVLCSGKVYYELDEERRKKERDDVAICRVEQLCPFPYDLIQRELKRYPNAEIVWCQEEPMNMGAYSYINPRLLTAMRALGRGTIDDIKYVGRAPSAATATGFYSVHVQEQTELVQKALQRDPINSPF

SEQ ID NO: 45739 - protein, 125 aa, Oryza sativa
MASTGVKLIDIAVNFTDGMFRGIYHGKQCHAADIPAVLARARAAGVDRIIIRCFAACHSPFRFLFLAYGSDLVCLISRFLGLVRRKVTGGSLKESREALEIAETDGRLFCMVGVHPTRCGCFAEC

SEQ ID NO: 45740 - protein, 326 aa, Oryza sativa
MQRQLYTHNSPGAFDALKDEYFLAITKNRILNLLKFADDFTSITSHEKLIYILGMYQALSEAASGLLLMFTGPHKELVAERSEEILAKLAMSIRSMVASLIAKVRDGVSNTKNIVGVGVHPLTKYAVLCIVRLAPHRDTLDLILASGGDDVASLSDLASRVVGSLEEKPVLPCDDDATAAATGSRHHLFHANNANFVLQSCKPLLGDEWAAARESIVERHVAGYAEACWAPVVACLEPAGRKPAAKVVAKFSAAFDRAYESQARCEVRDPALRDALRRAVSDKVVTAYGVYLKTHPKLEKKLRYTAGELGERLSELFEGEAAEHNK

SEQ ID NO: 45741 - protein, 264 aa, Oryza sativa
MALPSGSFAACSIQPRVRAALRAPTLPSQNAAVARMAGHRAGATKGGVSAVCEPLGPDRPLWFPGSSPPPWLDGSLPGDFGFDPLGLGSDPELLRWFAQAELMHSRWAMLAVAGILVPEVLEKWGFMEDYSWIDAGARDYFADPWTLFVSQMALMGWAEGRRWADYLNPGCVAVEPRLPNRRNPVPDVGYPGGLWFDWGNWGRGSPEPVMVLRTKEIKNGRLAMLAFVGFWFQAVYTGEGPIDNLLHHLADPGHCNVFSAFTSH

SEQ ID NO: 45742 - protein, 405 aa, Oryza sativa
MAAWADAALLRASSSPASATAAASSSSSSCCLARPRASLESRLHRRKSFLYTSSPKSGFLINSCRARSLKVKAKMDSGDGLTRLAPLMFETPSGQLLVQILQSHPHLLPATVDQQLENLQSEKDAQEKEASKVPQDLLYKRIAEVKEKERQNTLEEIIYCWIIYKFMENDISMTPALAPLGGPVRDISSLPNQEDRLQSIHSPDALEMIQNHLNLIMGEKVAAPLDTVVEISNLNLGKLYAASIMYGYFLKRVDERFQLEKNMKTLPPNPKQQIVLENLKPNPFWDMESLVQITPDGEEIDLDDEESNPNKLRSYVSRLDADTLQRYATIRSKEAVSLIEKQTQALFGRPDIKVLDDGSVNAKDGQMITITFIELTHLVLEAAAFGSFLWEAESHVESKYHFVNS

SEQ ID NO: 45743 - protein, 103 aa, Oryza sativa
MAAMAAAATTTTKKLQVASSSPNTHKSYWSTKQYILVAVVGTLAATVIVIGISALLEPGEIDFSVTEASRMILPLDGGVELNLTVAADRPRVSRAAWSTAGST

SEQ ID NO: 45744 - protein, 105 aa, Oryza sativa
MLAFTDAWLPPPRPSSTVLHPSSPPPPLLPYLGPLPDLMPARAPAASRAPLLAAASEPAPGAVLPSGSMDLEVVPAVAVLGGIYMSISLSFLLLSLSLPIGSAEW

SEQ ID NO: 45745 - protein, 657 aa, Oryza sativa
MGELADLVVVPSQPPLAGGRRDRLAALLELAAADDVDGLRGALAEGGEEAAELADGVGLWYGRSKAYEARTPLMVAATYGSAGVVSLLVGLGGCVDVNRRPGADGATALHCAASGGSRNAVAVVKLLLAAGADPATPDSAGRFPADVILAPPASPDALGDLEVLLGRRRALAVATSVASGSSSPPLSSSPDEGNRSPSSRSSSLSPITVDRGKKEYPVDPTLPDIKSSVYASDEFRMFAFKVRPCSRAYSHDWTECPFVHPGENARRRDPRKHPYTAVPCPNFRRPGGCPSGDSCEFSHGVFESWLHPSQYRTRLCKEGAACARRICFFAHDEDELRHVPHNSGAGLLSPRASSSIDMTAAAALGLLPGSPTRHFAPPPVSPSAGSNGGAAAAHWLQGSRLRSSFNARDAAVDDLGMLLEWESQYLGALCLPPSSRPQPRLSAGLSIRPTIAPSNLEDMYASDMAMSPRFPNDQGHSVYSPAHKSALLNKLHQQKGLLSPVNTNRMYSPRALDPSSLAHSPFGGMSPRSPRTMEPTSPLSARVGAPATQRPSVGSPRNSSAWGTVGSPMGKVDWGVDSEELVRLRRPAQPGFGEDETDVSWVQSLVSNAELNGKRGEVQGMPGTSALMNRPDLNNQGDLLDQTVIGAWLEQMHLDQK

SEQ ID NO: 45746 - protein, 372 aa, Oryza sativa; identical to SEQ ID NO: 32090

SEQ ID NO: 45747 - protein, 993 aa, Oryza sativa
MLMLLLNIRRQVQTLYLRESSISVARVQMGHLNIMLAFLSFVLLGLAEVEGTVALSQILSNSHLITPYREVTARKFERRSLLQDHSSDDRRSSNASLPSAATLANCPKRCGNLSFDYPFGIGDGCFRHPDFSLTCNATTQPPKLLLHINESVEVIDNIEVVGKDIAEFFYFNFFMVAFNHLIPIKAGVDVYNLTWKAPGISFTISEMMIITVVSCDLDVFLIGQDNTPKLLCMVACPNKEIADMVYMQDCEGPGCCTVLSETPVQAVQLQFVRHETSNAGKISNLSMLWDRINITIGAPLVWSIVDQTRCSRNMEDNFACVSNHSGCITSVFRDIGYACQCNSGYKGNPFILDGCKHDSGYNPRPEKHNCARQCGTITVPFPFGLEEGCSARKRFQLNCSDKTNSVLKFNDYFQVTYINVSEGLLGIKHNSSLEEQLFNIMMEMMTSDNEPDLFVDPLESVSVQWAVANLTCQEAQHNTSGYACVSTSSSCLNVLSSMDGYVGYRCSCLPGYRGNPYILDGCEDIDECRETPGICKGVCKNTVGNYSCTKCPDHTEYDILRMQCTPIRKKSFYLGIIIGLSSGFGMLLLGLSGIVLIRRWKRHAQKRLQTKYFRKNQGLLLEQLISSDENASEKTKIFSLEELKKATNNFDTTRILGRGGHGTVYKGILSNQHVVAIKKAKVIRECEINDFINEVSILSQINHRNIVKLFGCCLETEVPLLVYDFIPNGSLFGLLHPDSSSTIYLSWGDCLRIAAEAAGALYYLHSAASISIFHRDVKSSNILLDANYTAKVSDFGASRSVPIDQTHIITNVQGTFGYLDPEYYQTRQLNEKSDVYSFGVVLLELLLRKQPIFTINSGMKQNLCSYFLSEIKTRPITDMVDAQVLEEANEEDIKEVASLAEMCLKLKGEERPTMKKVEMTLQLLRTKTMNSSQVDPTIDQEIQTVLTEGASDPEIQPLVTNLDVDRANAASQRFQISCYSLEQEFLSSASLPR

SEQ ID NO: 45748 - protein, 625 aa, Oryza sativa
MDAAAPPPRGQEGQGDRSGGDEGGRYGVLLYYKYAEVPDAAALAAFYESHCRALALVGRVRVGPDGVNATLGGRMAALEKHVAEMSSNALFDGTDFKLASCDDPVDERVARECGFTSLSVRLVKELVTLCANPSLATPQITCAGRHLSAAEFHSVLQSVAGATSDSEATVEKSEVVVLDARNVYETRIGKFRVPNVETLDPEIRQYSDLPLWIDEHAEKLRGKSIMMYCTGGIRCEMASAYIRSKGEGFENVFQLYGGIQRYLERFPDGGYFEGKNFVFDHRISVGSLKENILGTCLLCGSSFDDYSPRCRCSHCRMLVLVCSTCQDSTKDYVCELCQKNGKQCCQTSPRQGCKTESELIDSSDFGIPMIINQSATSTIPRSNGSEQLKKLKILCLHGFRQNASNFKGRTSALAKKLKHIADLVFIDAPHELSFVYKPNPDHCSGRSSLPSGTPKRKYAWLVAPNSIFYAEHDWKIADAPFDPLQYQQQTDGFEESYAYLEHAISQMGNIDGILGFSQGAAMAALFCRQQQKTCGSLKFRFGIFCSGYPAPIISDFDGEPIKLPSLHCFGNSEDHDRQIANRASTELANRFDKSCRSVIEHDMGHIIPTRPPFIDKIKEFLSNFI

SEQ ID NO: 45749 - protein, 372 aa, Oryza sativa
MNAAARKAAAAARLPAAVLVVVAVGAFLISYNLLAIVLRGGGGAATGAGRERDPVVAMPGWMRAAGSAGGGRRRPFHVALTATDAAYSRWQCRVMYYWYKRMQARPEGADMGGFTRVLHSGKPDALMGEIPTFVVDPLPAGKDHGYVVLNRPWAFVQWLEKAKIEEEYILMAEPDHIFVRPLPNLARDDPAAFPFFYITPSEHESVLRKYYPKERGPVTNIDPIGNSPVIIKKIQLEKIAPTWMNVSIQMKEDQETDKAFGWVLEMYAYAVASALHGVQHILRKDFMIQPPFDTKLGNTFIIHFTYGCDYTLKGVLTYGKIGEWRFDKRAYQDRPPPRNLTLPPPGVPESVVTLVKMVNEATANLPGWDDGR

SEQ ID NO: 45750 - protein, 86 aa, Oryza sativa
MSITEILGICMLGFMWCNSTHLMLNNMDLTHSPFSYVGLFLPSATEVIKYCRTNLLCVRVNILISCSIVLRIELLVLPSKEERSKF

SEQ ID NO: 45751 - protein, 299 aa, Oryza sativa
MKKMWRANARVVERRGGREAEERGGVISVVLAHGYGASQAVWDKLVPSLSKGHNLLLFDWDFTGAGAGKDDDEYTYGRFADELIAVMEERGVGASGAVVVAHSMSAMAACIAAQRRPDLFAHIFLVCASPRYINLEEEGYVGGFEEAAIHGMLAAMESDFDGWVRSFLPNAAGYASAVEHLLKSFLAMDPTVALKLAKMIFLGDQREVLDGVKTPCTIVQVKADFAAPPSVAEYMHLRMKGAATAVEIIGSVGHFPQLVAPQQLLDILAGVLRLREAAAEAEHDDAGTVEIAGGIDVAI

SEQ ID NO: 45752 - protein, 845 aa, Oryza sativa
MEDRASPGGGVCGRVLRLASVQIILILFLTQGACSSSRDGKTSPPQGLDAGEKDIYLSHSCIHDEILHQRRRAWRKEYSVMPQVYHERRENMERLRGRHLLGVSSWHASQKNVKKPIRIYLNYDAVGHSPDRDCKTVGDIVKLGEPPVPSIPGTPVCDPHGDPPLVGDCWYNCTVEDIAGEDKKQRLRKALGQTVEWFRKALAVEPVKGNLRLSGYSACGQDGGVQLPHAYIEDGVANADLVLLVTTRPTTGNTLAWAVACERDQWGRAIAGHVNVAPRHLTAEAETLLSATLIHEVMHVLGFDPHAFTHFRDERKRRRSQVTSQILDEKLGRMVTRVVLPRVVMHSRHHYGAFSQNFTGLELEDGGGRGTSGSHWEKRLLMNEIMTGSVDTRSVVSKMTLALLEDSGWYQANYSMAEHLDWGRNQGTEFVISPCNLWKGAYRCNTTQLSGCTYNREAEGYCPIVSYSGDLPKWAQYFPQANKGGQSSLADYCTYYVAYSDGSCTDVNSARAPDRMLGEVRGSNSRCMASTLVRTGFVRGSMTQGNGCYQHRCTNNSLEVAVDGIWKSCPQTGGPVQFPGFNGELICPAYHELCNTVPVPVSGQCPKSCSFNGDCIDGTCHCFPGFHGHDCSRRSCPAKCTGHGICKANGICECESGWTGIDCSTAVCDEQCSLHGGVCDNGKCEFRCSDYAGYTCQKGSAILPSLSMCHDVLVRDADGQHCAPSELSILQQLEAVVLVPNYNRLMPSGRTFLNFFNNANCAAAAKRLACWISIQRCDEDGDNRLRVCYSACELYNTACGAGLDCSDQTLFSKREEEEKGVPCTGYGEKKSFWLMTITSPGVSSL

SEQ ID NO: 45753 - protein, 488 aa, Oryza sativa
MGSLKMTGKAPCAALPESSCAYLLQELKMIWDEVGQEENERERILQEIEQECQEVYRRKVNSANMSRIQLHQALAESEAEFTNLLLSLGERSFPGRPEKMTGTLKEQLNSITPALQEMQMRKEARLKQFREVQTEIQRIASEIAGRPENEAITVNQEDLSLKKLEEHQSELQRLKREKSDRLCKVEEYKVLIHNYAKIMGMDPSKILSNVHTSLLDGANDQQTKNISDDILNKLNTMVQQLKEEKNQRMDKLHSLGKALTKLWNILDTNMEERRPYGEIKIYSMTSGSSMLGPGSLTLETIQKIESEVQRLDHLKASKMKELFMIKQTEIKEICKKSHMDMPYQTEMNKIMDVIMSGDVDHDDLLKTMDEYIYKVKEEATSRKEIMDKVEKWMASCDEERWLEEYSRDERRYSISRGAHKHLKRAERARIIVNKIPGLVELLMAKTEIWEQEREKVFLLRRASPIGHAERLHANTEGKGRGKIQAMGE

SEQ ID NO: 45754 - protein, 196 aa, Oryza sativa
MVANSGADGEPLQEEDYFLSNPYHLLRIFSSQVFQETSEEKNRRKNSLTYDMEKHCSVEIAAKVVRVSSNLNEGEHEKYRLEGLMESTAVDDDGECFSPILLNATSLNVEVYYNKAVNYTLMVTFISFLQVLLLIRQMEHSNTQSGAAKVSILMIGQQAIMDAYLCLLHLTAGILVESLFNAFATAAFFKFVVFSI

SEQ ID NO: 45755 - protein, 290 aa, Oryza sativa; identical to SEQ ID NO: 32917

SEQ ID NO: 45756 - protein, 682 aa, Oryza sativa
MRADRLMAEGGKRIDLGAPLRSVRHADALPYHKADLNSGPVRHPGAVPFVWEQRPGQPKSVRTRRAPPSPTTASHPQPLEHGVEDEIDGSPYHDALGEHYVGILHGVDASPACSRTGAPAPAPARDEKRAQVAEAAVLQAKKEVTEKQVVSVAAVLRKGDDDDDDEERFSDALDTLSRTESFTVNCSVSGLSGMPEPTSRAAAGAEAGVRGIMMDRFLPAAQAVAIGSPQYTFRKAGAASATSNSGRELARAAGSNASGSSGDDPGRRTPVQLPYQHLPPNYLSCSYPRREEQEDEDDDDDYDVHSTRGFASKGCGLLPSLCVKGSLLLLNPMPAMKRGKPRGNGRVREFASKGRGRGAPSPLARSSQNKHLGCASNGSWEDVYKHKLEQKYVRPGEDGRGKLTSESNQLTFWSDSQAGNGSSPFHHSAGGGMSPYYRDVVLSSSSKADESFGTGVKEDKMSSSNGSSSLGRDHDRGSLLGSDRSSLKGSSSISSGLDRPVHVESMDHRGDIDSETSHSVLLLDSRTSLDAGGCGSQLGEQIVGKNPIGKGEDNDPLTERVSEVTECTLLAPSEKLRSVNLDDGKTSGHLEDSSVSKRDMPLQSLLPLPVPRSPSESWLSRTLPSVTSKPPVPSFLGIQLQSKKQTPWASIQPKENNVKPPRPRQIRFADVVERPNSLDAEI

SEQ ID NO: 45757 - protein, 1376 aa, Oryza sativa
MASGKVVSFVGADELGVSLAASFVRSGAIVRCFVAPGGDGSATALAELGGVRCASPAEAARDAELVIVLSDTDGVDELFFGPEGIVKGLCSGAVVLIRSTMLPSHLEKLNQKLADEKKNALLDGYIFSGLSDELKQKIVVVASGRHDVTERTGQFFSGLDTAVYFVEGEFGSSSKIKLVNDLLESIHFIASIEAMFLGVRAGIHPSIIYDIISNAAGSSRIFVEIVPKLLREDSLLIDYLESSKTNAGYVMDMAKAVIFPLPLVAVSYQQLIHGCSSANGDALVSPLKVWEQSFGVNIIDAASQQIYDASKLADQLVMACKTAKTIGFIGLGAMGFGMASHLLKSGFSVIAYDVYKPTLARFTDLGGLTKDSPEEVSKDVEILVIMVANEVQAENVLYGNAGAVSVMAAGTSIILSSTVSPGFVIKLKERLEAECRDIKLVDAPVSGGVKRAAEGTLTIIASGTDEALQCTGSVLSALSEKLYVIKGGCGAASSVKMVNQLLAGVHIASAAEAMAFGARLNLRTRRLFEIIQHARGYSWMFGNRVPHMLDNDYTPYSAVDIFVKDLGIVSHESSNARIPLHVSSIAHQLFLSGSASGWGRFDDAAVVKVYETLTGVKVEGRPPMLNKEDVLSSLPAEWPEDPMDDLVSSASHNSKKILVVLDDDPTGTQTVHDIEVLTEWPVEALAEQFQKLPACFFILTNSRSMTAEKATLLVKDICRNLEAAAKSVPGVSYTVVLRGDSTLRGHFPEEADAVVSVLGEMDAWIICPFFLQGGRYTIDDIHYVADSDRLIPAGETEFAKDAAFGYKSSNLRQWVEEKTKGRISENQVSTISVNLLRKEGPNAVCQHLCSLKKGSACIVNAASERDMSVFAAGMIQAELKGKRFLCRTAASFVSARIAIKPKPPIRPTDLGLKRALTGGLIVVGSYVPKTTKQVDELRSQCEQSLRIIEVSVEMISMKSAEDRDHEISRVIELGNAYIQSRKDTLVVTSRQLITGKTPEESLEINYKVSSALVEIVRGIGSRPRYILAKGGITSSDLATKALEARRAKVMGQALAGVPLWQLGPESRHPGVPYIVFPGNVGDNSALAKVVQNWACPSRSSAKELLLNAENGGYAIGAFNVYNLEGIDAVVSAAEAEKSPAILQVHPSALKQGGVPLVSCCIAAAEHASVPITVHYDHGTSKSDLLQALEMGFDSIMVDGSHLPLGKNILYTRSISSLAHSKGMLVEAELGRLSGTEDGLTVEEYEARFTDVAQALEFIDETGIDSLAVCIGNVHGKYPPSGPNLRFDLLEDLRALTMKKGVSLVLHGASGLPHELVKECIALGVRKFNVNTEVRNSYLESLKRPEKDLIHVMASAKEAMKAVVAEKMRLFGSSGKA

SEQ ID NO: 45758 - protein, 974 aa, Oryza sativa
MVSGNLFHCRRNSWPAEEYVGRTALQLLDFDGGSPPEQAWRRRLNSHANLLKEFSVTFMEAMRMMSLGLRLWSYVREEASHGRKAPIDPFTKEKCKPSASQGVPLGGMGSGSISRGFRGEFKNWHIIPGLCETSPVMENQFSIFVSRDGGNKKYSSVLSPGHHEGLKKCNDSGISSWDWNLSGQHSTYHALFPRAWTVYDGEPDPDLKISCRQISPFIPHDYKDSSLPTSVFVYTLVNTGKDRAKVSLLMTWANSIGGFSHHSGGHFNEPFIAEDGVSGVLLHHKTAKDNPPVTFAIAACETQNVNVTVLPVFGLSGEGHDSAKQMWDRMKQNGHFDRENFEAGTSMPSSSGETLCAAVSASTWVEPHGRCTVVFGLAWSSPKIKFQKGCTYNRRYTEFYGTSERSAVNLVHDALTKYRIWEEEIEKWQNPILKNEKLPEWYKFTLFNELYFLVAGGTVWTDGQPPVIDEKPSPGSNQQKSSKRGTRDTKQESVKDNHVKLTAEQVTNGGDLANGEEQSVSKYAAVHGPQMAKATNGLGSQEPIPYLLSKNGPENVGKFLYLEGVEYIMWCTYDVHFYASFALLDLFPKIELSIQRDFANAVLYEDRRRMKFLADGTSGIRKVKGAVPHDLGTHDPWHEMNAYNIHDTSKWKDLNPKFVLQVYRDFAATGDMSFGRDVWPAVCAVMDYMNQFDRDGDGLIENDGFPDQTYDAWTVHGISAYCGGLWLAALQAAATMAHRLGDRPFAEKYKLKFIQAKAVYEAKLWNGSYFNYDSGTSSNSRSIQADQLAGQWYAASSGLPPLFDENKIRSALQKIFEFNVMKVKGGRLGAVNGMTPNGKVDETCMQSREIWTGVTYGVAANMLLHGMEHQGFTTAEGIFIAGWSEEGYGYWFQTPEGWTIDGHYRSLIYMRPLAIWAMQWARSPPKAILDAPKVNLMDRIHLSPQMIRAMNEINVRKIAPDNRCFPSSAFRCEC

SEQ ID NO: 45759 - protein, 195 aa, Oryza sativa
MSASRFIKCVTVGDGAVGKTCMLISYTSNTFPTDYVPTVFDNFSANVVVDGSTVNLGLWDTAEDYNRLRPLSYRGADVFLLAFSLISKASYENVSKKWIPELRHYAPGVPIILVGTKLDLRDDKQFFVDHPGAVPISTAQGEELRKLIGAAAYIECSSKTQQNIKAVFDAAIKVVLQPPKQKKKKKKAQKGCAIL

SEQ ID NO: 45760 - protein, 688 aa, Oryza sativa
MATPLLAALLAAALLASPAAPAASASGGTIVFTTLGRSRYEFDIFSLPLAPSPHNPAAAAELRLTDGVSVNYNGNFAPASDSILFVSERNGSLNLYLSPVPSSRREALESASSSSSSAAATISPLLPWEPIALKDRPSLTPDGSRLVYVSTAVPAAEPRSSWAAVYSTELSTGRTRRLTPLGVADFSPAVSPSGEWTAAASPGAAGWSGEVEDLRTDIYVFRTADGSRRSLAIRDGGWPSWADETTVFFHRRDSDGWYGVYRAEISVTGDGVEAASVERITPPGFHAFTPAASPGAPGLVAVATRRAGSDYRHIEVIDVSSDGKNAYFEVTRPVAPRVHHFNPFISPDGARVGYHRCRGRGNGDSPLLLENIKSPGSPDTFSLFRIDGSFPSFSHDGKKIAFVGLPGMYVVNSDGSGGRRKIFSGNAFSTSWDWKRKGVVYTSIGPDFASETTEVDVVAISLGDDDDESTISMKKLTVGGENNAFPSPSPDGKWVVFRSGRSGNKNLYIIDAEDGEAGGIRRLTEGPWSDTMCNWSPDGEWIAFASDRHAPGSGSFAIYMVHPNGTGLRRVVHSGGSGRTNHPWFSPDSKSLVFTSDYAAVSAEPVSNPHHYQPYGEIFTVDIDGSNIRRLTHNSFEDGTPSWTPYFLEPRDVGETLQASGRCAFQDCHWLNIQDAAQPEELNYGKSC

SEQ ID NO: 45761 - protein, 690 aa, Oryza sativa
MDGDGEWVWVRRPAEAEAVAAAAGWPTAEEEARPLEVVFASPSRYFTDAAPIGNGSLGALVWGGVASEKLQLNHDTLWTGGPGNYTNPKAPSVLSKVRDLVNRGQYAKATAVAYGLSGDQTQVYQPLGDIDLAFDEHVEDTNYKRNLDLRTATVNVSYTIGEVVHSREHFSSNPHQVIVTKISADKPGNVSFTVSLTTPLNHQIRVTNANEIIMEGYCPGERPTEYGNASDHPVGIKFSAILYLQMSGSNGTVEILNDKMLKLVGADSAVLLLAAATSFEGPFVNPSESKLDPTASALTTLTVARNMSYSQLKAYHVDDYQNLFQRVSLQLSRDSNDALGGNGLVNLPENSLQETSVSDYAVQMVECSRFQGFNNSGKPTVDRILSFRDDEDPSLVELLFQFGRYLLISCSRPGTQISNLQGIWNDETSPPWDAAPHPNINLQMNYWPALPCNLSECQEPLFDFIGSLSVNGAKTAKVNYEASGWVSHQVTDLWAKTSPDAGDPMWALWPMGGPWLATHLWEHYSYTMDKQFLEKTAYPLLEGSASFLLDWLIEGNGDYLETNPSTSPAVGVGTPDKARILAERLPFPLDYLYADPERKAYDLLGLYFGIGRTFFNPASASVFSRFDSLKEAVKNYTIEATPDDRASVLQQGGMFVFRGKELIYARKDEGTGDHAPLDDVLNICCKAPAA

SEQ ID NO: 45762 - protein, 162 aa, Oryza sativa
MEKSQRKRGPDHLLILVHGIIASPSDWTYGEAVLKKRLGDNFFIYASSSNIYTKTFDGIDVAGRRLANEVLDVIQKMAGLRKISFLAHSLGGLFARYAISILYSTAMKDASQSAACIAPTTGGSEKLECTSGLGAIAGLEPINFITLATPHLGVRGKNQVGL

SEQ ID NO: 45763 - protein, 77 aa, Oryza sativa
MRKKQRPRLTQELEAFWTLDKPITRLELGITSDAHAEKLRLLIDLFYQCTKGIASERPKAEAVYNLLCSLPTCYDMR

SEQ ID NO: 45764 - protein, 204 aa, Oryza sativa; identical to SEQ ID NO: 31082

SEQ ID NO: 45765 - protein, 714 aa, Oryza sativa
MECENGHVAAAANGSSLCVAKPRADPLNWGKAAEELSGSHLDAVKRMVEEYRRPVVTIEGASLTIAQVAAVASAGAARVELDESARGRVKASSDWVMNSMMNGTDSYGVTTGFGATSHRRTKEGGALQRELIRFLNAGAFGNGDDGHVLPAAATRAAMLVRINTLLQGYSGIRFEILETIATLLNANVTPCLPLRGTITASGDLVPLSYIAGLVTGRPNSVAVTPDGRKVDAAEAFKIAGIQHGFFELQPKEGLAMVNGTAVGSGLASMVLFEANVLGVLAEVLSAVFCEVMNGKPEYTDHLTHKLKHHPGQIEAAAIMEHILEGSSYMMLAKKLGELDPLMKPKQDRYALRTSPQWLGPQIEVIRAATKSIEREINSVNDNPLIDVSRGKALHGGNFQGTPIGVSMDNTRLAIAAIGKLMFAQFSELVNDFYNNGLPSNLSGGRNPSLDYGFKGAEIAMASYCSELQFLANPVTNHVQSAEQHNQDVNSLGLISSRKTAEAIDVLKLMSSTFLIALCQAIDLRHLEENVRSAVKGCVTTVARKTLSTSATGDLHKARFCEKDLLQAIDREAVFAYADDPCSANYPLMQKMRAVLIEHALANGEAERNVDTSVFAKVATFEEELRVALPREVEAARAAVENGTAAKANRITECRSYPLYRFVREELGTEYLTGEKTRSPGEEVNKVFVAMNQGKHIDALLECLKEWNGEPLPIC

SEQ ID NO: 45766 - protein, 179 aa, Oryza sativa; identical to SEQ ID NO: 32008

SEQ ID NO: 45767 - protein, 441 aa, Oryza sativa
MAVASAWAKPGSWALAAEEQDDLPPPPPPVPAADFPSLATAATTKVPKKKKPQPVPLGEFNSTKFVAPAYRGPTQDDLLSLPTGPRERTAEELANATRGFGARWGGAGAGGPRGDDEPRRGGSGPQDFGPSRADEADDWGAGKKPLERRERMGGFGVDSSMSRADDVDDWVSTKRAAAPAPMERRERSVAFGADSHSRADDSASWISNKGYSAAPPPPSDSRRGGPVWGFNRDGGPDADSWERRREEVSGGGSSGGARPRLNLQKRTLPLANGTDGEGKEDKEEEKGEMQPKSRSSNPFGAARPREVVLATKGDDGRKEEEKEKEEEKLEIQPRTRTSNPFGAARPREEVLAAKGEDWRKIDEKLEAMKMREAPPPERRSFGRRGSPVRGEDNGSRPLPESHVEGAWKKPDAVQAVGESEDGSDKLNTAEAARKFEEGFDN

SEQ ID NO: 45768 - protein, 398 aa, Oryza sativa
MTMVRIIGPSPAQSSSPTPRRPRPPRPRRRPPTMASAAASSSKPPVVLGCGAVSADYLATVASFPNPDDKIRSLTLKVQGGGNTGNALTAAARLGLRPRIISKVSNDPQGRNILKELQDDGVDTSHILVAEEGNSPFTYIIVDNQTKTRTCIHTPGYPPMVPEELTQENLFAALDGADIVYFDVRLHETALLVAEEASQRKLPILIDAERKRDGLDELLNFASYVVCSAKFPQAWTGASSTPVALVSMLLRLPNIKFIIVTLGEKGCLMLERSTTDASEAEEIDVESLLESLEKKEVLSSSMPKCIASKSNLRISADGIGSISGRLLLGTAEIIPSEELIDTTGAGDAFIGAVLYGLCSGMPPEKMLPFAAQVAACGCRGLGARTALPHRTDPRLVAY

SEQ ID NO: 45769 - protein, 226 aa, Oryza sativa
MCSIRSFAFVLVLAFSVAVAESRDSFNVLAHKSFPLENKKTGLTSANGKLCQLCEQYSTEALFYLQQNETQTEILSILHHACANVGPLKQQCITLVDYYIPLFFLEVSMVTPEKFCESVHLCRKGTMLRLPSRGDTCGICHHVLVEVLIMLKDPDMQLEIVEIFLKACSKADNYVQQCKKMVLEYTPLILVKSQKFLETTDVCSTIHACKTGTQASAETMLLSAAS

SEQ ID NO: 45770 - protein, 221 aa, Oryza sativa
MSRRPYERHSGTGRGYEMKREGSGRGNWGTTTDEILAQETGEALKLDEKAPVTEKQGAPEGAPQADENKDNKDVTPNEEEKEEDKEMTLEEFEKLREEKRKALLSLKTEERKVEIDKDLKSMQPLSNKKENDEVFIKLGSDKDALKKKENAERDERAKKSVSINEFLKPAEGERYYGGRGRGRGRGDRGGFRGGYGEGHRSAAPPAPEIKDQSQFPTLGRK

SEQ ID NO: 45771 - protein, 732 aa, Oryza sativa
MQFEDGGDVHVGAGEGEDGGRVTVDELTRCLRCGISANATPHMRRGPEGRRTLCNACGIAWAKGKVRKVIDSDTPMDNAMFAQMVPELSMEFDDEDKAYEFYNRYAGHVGFSVRKSSSDKSAENITRSRTFVCSREGFRKDKKGAKEVKRPRPETRIGCPARMSIKITSDGKYRISEFVPDHNHQPAPPSTMHMLRSQRVLTELQTTEADSSEESATPSRFSSCSLVKQAEVIRHTNFLPAEYRCSLCSKRKKNMQPGDAGVTVKYLQSMQLSNPSFFYAVQLDEDDKLTNIFWADSKSRTDFSYYSDVVCLDTTYKINEHSRPLTLFLGVNHHKQISIFGAALLYDESEESFKWLFDTFKIAANGKQPKTILTDWSMAATTASAITAAWPGTVHRLCPWQVYQNSVKHLNHIFQGSKTFAKDFGKCVYDYDDEENFLLGWNTMLEKYDLRNNEWIKKIFDDRDKWSPVYNRHVFTADIKSSLQSESVRNALKKSLSPQFDLLSFFKHYERMLDEFRYAELQADFHASQSFPRIPPSKMLRQAANMYTPVVFEIFRREFEMFVDSVIYSCGEDGNAFEYRVAVTDRPGEHYVRFDSGDLSVVCSCKKFEAMGIQCCHVLKVLDFRNIKELPQKYFMKRWKKDVKSASTGNQELLNGGVSQIPSSYLNVPVPFIDPQHVQSNNELNHDTSVSNSHQQALHGGAQGSQGYAPLAGIQQQQFIGNFRLNHETGFL

SEQ ID NO: 45772 - protein, 527 aa, Oryza sativa; identical to SEQ ID NO: 37210

SEQ ID NO: 45773 - protein, 244 aa, Oryza sativa
MASVTARTPVAALRSSASLKSTFLGQSSTRLARAPTTRRNVRAEAKGEWLPGLPSPTYLNGSLPGDNGFDPLGLAEDPENLRWFVQAGLVNGRWAMLGVAGMLLPEVLTKIGLIDAPQWYDAGKATYFASSSTLFVIEFILFHYVEIRRWQDIKNPGCVNQDPIFKSYSLPPHECGYPGSVFNPLNFEPTLEAKEKELANGRLAMLAFLGFLVQHNVTQKGPFDNLLQHLSDPWHNTIIQTLSG

SEQ ID NO: 45774 - protein, 187 aa, Oryza sativa
MVGQALFGDGAAAVIVGSDPDEAVERPLFQMVSASQTILPDSEGAIDGHLREVGLTFHLLKDVPGLISKNIERALGDAFTPLGISDWNSIFWVAHPGGPAILDQVEAKVGLDKERMRATRHVLSEYGNMSSACVLFILDEMRKRSAEDGHATTGEGMDWGVLFGFGPGLTVETVVLHSVPITAGAAA

SEQ ID NO: 45775 - protein, 541 aa, Oryza sativa
MEVEAARRDAATLDPELLQLPELSPGALRENPALAEALYSQWLALPETSKLVNSLIEDAKAGATLNVTGSSASTNAASSGSLPSMFPAGSAPPLSPRSTSGSPRVMRRGSGAGPSSLGSPLKVVSEPVREVIPQFYFKYGRPAPKDLKEQCLSRIDHLFFAGEGLQIQEFRSVTKDICKLPSFFSSVLFKKIDAAGSGTVTRDAFVDYWINDNKITMDTASQIFEILRKPDYNYLTQEDFKPVLKELLATHPGLEFLQGTPEFQERYAETVIYRIFYSINRAGNGHLTLRELKRGNLIAAMQQLDEEEDINKVLRYFSYEHFYVIYCKFWELDTDHDFLIDKENLIRYGNHSLTYRIVDRIFSQVPRKFTSMTEGKMGYEDFVYFILSEEDKSSEPSLEYWFKCIDLDGNGILTTTEMQFFYEEQLHRMECMAQEPVLFEDILCQMIDMIGPENECYFTLRDLKRCKLSGNIFNILFNLNKFMAFETRDPFLIRQERENPTLTEWDRFAHREYIRLSMEEDGEDASNGSGDVWDESLEAPF

SEQ ID NO: 45776 - protein, 409 aa, Oryza sativa
MELTGAAIRGSLATAASPVVLRGRGRRCAARVSCVGRGGGGFGDEGHLRYYEAPPRKAVEAVARDLAKLRPMGIAAGDAAKEKVLSEATELLLEELNRMRDEEGELKKKMKEDKDAMKALKKQQKEAMKAATTMKCNDDDSSESSESSESECEEQMMTMSCVATVTMPQIGEGVAISTTVPQVAASDVATAPAMEYDKAAMKAMKKREKEEKKAAKMAMKMKKKEKKMATLTLCKDEDSTSCSSESSDSECEEVVRMSCCATITTPQTQPSSTVFPIILPQIPESVTLEPCQDAQISSEPANTMLSTTATIAVVEKPMTNRIEVCMGGKCKKSGSLAVLQEFEKKVGTDGAVVGCKCLGKCGLGPNVRLRSEGAAQKKNPLFIGVVLEDVGTIASGLFGGGDDLGMVNN

SEQ ID NO: 45777 - protein, 636 aa, Oryza sativa; identical to SEQ ID NO: 43035

SEQ ID NO: 45778 - protein, 1369 aa, Oryza sativa
MGSLTRAEEEETAAAEEWSGEAVVYVNGVRRVLPDGLAHLTLLQYLRDIGLPGTKLGCGEGGCGACTVMVSCYDQTTKKTQHFAINACLAPLYSVEGMHIITVEGIGNRQRGLHPIQERLAMAHGSQCGFCTPGFVMSMYALLRSSEQPPTEEQIEDSLAGNLCRCTGYRPIIDAFRVFSKRDDLLYNNSSLKNADGRPICPSTGKPCSCGDQKDINGSESSLLTPTKSYSPCSYNEIDGNAYSEKELIFPPELQLRKVTSLKLNGFNGIRWYRPLKLKQVLHLKACYPNAKLIIGNSEVGVETKFKNAQYKVLISVTHVPELHTLKVKEDGIHIGSSVRLAQLQNFLRKVILERDSHEISSCEAILRQLKWFAGTQIRNVASVGGNICTASPISDLNPLWMATGATFEIIDVNNNIRTIPAKDFFLGYRKVDLKPDEILLSVILPWTRPFEFVKEFKQAHRREDDIALVNAGMRVYIRKVEGDWIISDVSIIYGGVAAVSHRASKTETFLTGKKWDYGLLDKTFDLLKEDVVLAENAPGGMVEFRSSLTLSFFFKFFLHVTHEMNIKGFWKDGLHATNLSAIQSFTRPVGVGTQCYELVRQGTAVGQPVVHTSAMLQVTGEAEYTDDTPTPPNTLHAALVLSTKAHARILSIDASLAKSSPGFAGLFLSKDVPGANHTGPVIHDEEVFASDVVTCVGQIVGLVVADTRDNAKAAANKVNIEYSELPAILSIEEAVKAGSFHPNSKRCLVKGNVEQCFLSGACDRIIEGKVQVGGQEHFYMEPQSTLVWPVDSGNEIHMISSTQAPQKHQKYVANVLGLPQSRVVCKTKRIGGGFGGKETRSAIFAAAASVAAYCLRQPVKLVLDRDIDMMTTGQRHSFLGKYKVGFTDDGKILALDLDVYNNGGHSHDLSLPVLERAMFHSDNVYDIPNVRVNGQVCFTNFPSNTAFRGFGGPQAMLIAENWIQHMATELKRSPEEIKELNFQSEGSVLHYGQLLQNCTIHSVWDELKVSCNFMEARKAVIDFNNNNRWRKRGIAMVPTKFGISFTTKFMNQAGALVQVYTDGTVLVTHGGVEMGQGLHTKVAQVAASSFNIPLSSIFISETSTDKVPNATPTAASASSDLYGAAVLDACQQIMARMEPVASRGNHKSFAELVLACYLERIDLSAHGFYITPDVGFDWVSGKGTPFYYFTYGAAFAEVEIDTLTGDFHTRTVDIVMDLGCSINPAIDIGQIEGGFIQGLGWAALEELKWGDDNHKWIRPGHLFTCGPGSYKIPSVNDIPLNFKVSLLKDVLNPKVIHSSKAVGEPPFFLGSAVLFAIKDAISAARAEEGHFDWFPLDSPATPERIRMACVDSITKKFASVYYRPKLSV

SEQ ID NO: 45779 - protein, 108 aa, Oryza sativa
MASGGVVKKEIGGNHDVVRFGVNDSVKGDLAPPHPLQASVHKEAKFWADKKRFGAEAIYGSAFNIRKDLDAQILSKFQRPPGALPSSMLGYEALTGSLDDFGFEDYLN

SEQ ID NO: 45780 - protein, 662 aa, Oryza sativa
MAAAAAQAQAQQAASSASEGGSPASSAAAAAAAAASFPATSLYVGDLDVSVQDAQLFDVFAQVGGVVSVRVCRDVNTRRSLGYAYVNYSSPADAARALEMLNFTPINGKPIRIMYSNRDPSLRKSGTANIFIKNLDKSIDNKALYDTFCVFGNILSCKVATDASGESKGYGFVQYERDEAAQAAIDKLNGMLMNDKKVYVGPFIRKQERDNSPGQVKFNNVYVKNLSENTTEDDLKEIFGKFGTITSAVVMREGDGRSKCFGFVNFESPDDAAQAVQELNGKKFDDKEWYVGRAQKKSEREMELKEKFEKNLQEAADKYQNTNLYLKNLDDSVDDDKLRELFAEYGTITSCKVMRDSNGVSRGSGFVAFKSAEDASRALAEMNSKMVGSKPLYVALAQRKEDRKARLQAQFSQLRPVPLAPSVGPRMPMFPPGVPGVGQQLFYGQPPPAFINTQPGFGFQQPLMPGMRPGAGPMPNFIMPMVQQGQQPQRPAGRRAGAGGMQQPMPMGQQQMMARGGRGYRYPTGRGMPDPAMHGVGGGVMPSPYEMGGMPMRDAAASQPVPIGALATALANAAPDQQRMMLGENLYPLVDQLEHEQAAKVTGMLLEMDQTEVLHLLESPEALKAKVAEAMEVLRTAQQIQTNATPEQQLASLSLNDGVVSS

SEQ ID NO: 45781 - protein, 140 aa, Oryza sativa
MASPMLSAATVPLQGGGLSEFSGLRSSSSLPLRRNATSDDFMNAVSFRTHAVGTSGGARRAPTEAFRDSAANELKGILEVCDVPLVSVDFRCSDVSCTIDASLSMVMGDDMVKVIAWYDNEWGYSQRVVDLADIVANQWK

SEQ ID NO: 45782 - protein, 1072 aa, Oryza sativa
MAVVAGAMTALIAKLTTLLMDQYKLQNSARGDIIFIKAELESIQAALEKLFEVQVTDRQVKIWERDVREQSYDMEDIIDNFMVHVETHLLAKPHELKGFMKGSLSLLRRAMVRYRVATDIKRIRRLVNETSARRDRYKVGTIVAAAKTETAIDPRLIGIYGEATKLIGISGPKEELTKPLMDSKGNSKNKLKVISIVGVGGLGKTTLANVIYQQLRGQFECHAFVSVSLKPDLKKVLSSILRQFSEQGYAWTETWCAQEIINKIRDEIKEKRYLIVIDDIWEKSAWECIECALIENDRGSRIITTSRVLDAATPCSSEVDHTVYKLQPLSSDNSKKLFYKRIFYCEDGCPLELKDISEKTLRKCEGVPLAIITIGSLLAMRPQNLYQWDRVHNLIGSGLEKSHHVENMRHILSISYYDLPAHLRACFLYLSIYPEDYNIQKDQLIRRWISEGFILGEDMDTLHEGGKYFNELINRSMIQPAYIDSHGRVHACRVHDMVLDLITSLSNETNFVTSLGGQQPTYHPNRARRLCLQNSIYDHTIRQEKMKWPRVRSLIVFPHATNLLPSLSRFRILRVLDLEGCQDLKNHQIEGISDLFHLRSLVLKDTNIGSLPKKIGNLSCLHTLDIRHTIITELPSTVVHLRRLVRLLIDASVKLPDGIGKMECLQEISLVGISKSPNFLKELGSLTELRILKISESTGAWHDSYENTLIDSLCNLHKICDLYIHGCKLSTEFISNIRCSPRYLRYLSCGQLSILPRWINSSLLSLSTIDLILNVLRQDDLRSLGALQSLCCLRLNVFKIEPERLVVGTEHAKFHWLAEFSFTTNAMGLIFSQYSMPRLENLELAFNVRETKYFDIGLEHLSSLKDVTARIDCRDSSIFEVQNADAAIRRIAYMNSNQPKVHVIRHYEHMLMDEVKIQKETEEEKEILENRIGPWGGNGGVTCDIKVAPKRLESITICSGIIIDALAFSYLDKDGERHTTSLWGGLGGSVQLIDLDEREFLMEVIGTVGPFNVLSEAITSLTLVTNVRSYGPFGQPQGTPFRTPRKKNSCIVGFFGRSGTYLDAVGVYFHPM

SEQ ID NO: 45783 - protein, 701 aa, Oryza sativa
MAEAIILALSKINSTFGLDPTNIAKSAVSKLYQKGKSLAELPGKVEEIRMELTTMENVIEQLDTAHLTDKVIKGWIAEVRKLAYHVEDVMDKYSYHALQMEEEGFLKKYVVKGSHYAIVFDGIVAEIVQIEQEIQRVIKLKDKWLQPSQLIRNKHSDFERKRSQGCLPELVKDEDLVGIEGNRMLLTGWLYSNELDSTVIIVSGMGGLGKTTIVANVYERGKIRFHAHAWIVVSQTYDVEELLRKVLRKIGYADQAHLDGMDVHDLKEKFKENISDRRCLIVLDDVWDREAYNQIHDAFQNLQASRIIITTRSKHVAALALPTRHLKLQPLDKVDAFSLFCRRAFYSRKDYDCPSELLELANSIVDRCQGLPLAIVSIGSLLSSKQPIQHAWKQTYNQLQSELAKSDHVQAILNLSYYDLPGDLSNCFLYCSMFPEDCPMPRDNLVRLWVAEGFAARKENNTPEDVAEGNLNELINRNMLEVVETDELGRVSTCKMHDIMRDLALFVAKDERFGSANDSGTMMLMDNEVRRLSMCRWEDKGVYKAKFPRLRTLISVQTISSSSNMLSSIFSESTYLTVLELQDSEITEVPTSIGNLFNLRYIGLRRTKVKSFPETIEKLYNLHTLDIKQTKIEKLPRGIVKVRKLRHLLADKCADEKHSDFRYFTGVQPPKELSNLEELQTLETVEASKDLAEQLKKLTQL

SEQ ID NO: 45784 - protein, 210 aa, Oryza sativa
MKIGCDACEQAEAAVLCCADEAALCRRCDAAVHSANRLAGKHTRVALLLPSSSSAAAGDDDHHPTCDICQEKTGYFFCLEDRALLCRSCDVAVHTATAHAAAHRRFLITGVRIGGSVDAAAAADVIVSPTSSSIAPAGSASSNHAGAAGNNNGRSPAPVRFSGGDGGVEPEQQWPWSDVFAADDDDDVSAAMEQCYYHGISEPHSSSLTG

SEQ ID NO: 45785 - protein, 595 aa, Oryza sativa
MADDGDAVLSDVDEEDPLPPPPPPSTSSSQKSPSPSQPQPQPHAQAQRLHDLAAELEEERRLRRKAEESLAEAEKRSERVKALAQNVLRKHDDLKTEASTASSMLTSGFERISAKASPSAAASPAPLPTSQKYSSGLPAIAYGVLKRANDIVDDLLSQIDAANRDRDRAREQMEHRNYQIAIEVSELEASLASRSAHCDSLSKSLSDKDAEISDLRNNLAFLETKLDAQRPVLADQIACASKVYDEIREVVKLVDADAASALSDSVFVWKETDVEESLKVSLEGTKMAYDLATTALHKVGAWVDKKESKVRDLEARVDELLREKEHIGVLLRSALQSNTSEVLKVAEDGLREAGIEVGLKERREHRPGSMEKDEVYTLAGELENSMKESQVKIVELQHLVEALRAESGLLRTRLEGQEKEIAQLRKQIKHLEEKERVANESVEGLMMDVTAAEEEIKRWKMAAEEEAEAGKAIEQEFETQLSSLNKELDEAKQAMLELENKLKFKEETAAAAMAARDAAEKSLKLADMRSTRLRERLEEINRQLEESDNRRDSSNRNGHRYMCWPWQWLGLNYVRLPPTEADQTSNEMELSEPLI

SEQ ID NO: 45786 - protein, 310 aa, Oryza sativa
MRWSRAPCAWMAWCAASWRTGAAWARLSSGLAAMARGAATASMAAGAPTTTTTRTTPPRPPTSPRRSRGSCTAPRSGSATSSPTSAATWSGTGRAGQGGGSSSAWWRRRSARRGTTPPCASPAGTSPPPTPPASTPTSTCSSRRPPTAARASASWSTSTSAPPSRSPAPPRPTARCCSASPRCSSARTTASASSSPPPPTPRAPASGSAASTSRHGASPSTCAPSGCPPTTASQRRPTRPPPPPPRPRSLERKPPPPRKQEVPLGIFNLQEGLNAKLNFFDFNTFFWGISSILGSEKSMYYAKWRQQYVV

SEQ ID NO: 45787 - protein, 210 aa, Oryza sativa
MSLRRLAASALRRGGANDGGVLAAVRAEIAHELSSSPSSSPPSLQSQDIPDFSTVSDAPRGQEVLLRRRDASEEVLVSAVLAPLRFEGEEPLPRDALMKVFVSKPDVKPVMRFDCRAFAAEGDGGSADYDVTAVCYHPFAGECDAGEDKYEGPEFRNLDPQLQVALKGYMVARGVNSKLASLLHHHLVEKERWQYMNWLKTLEEMFSKDH

SEQ ID NO: 45788 - protein, 226 aa, Oryza sativa
MMMSSGFQLGVIGSLALSVASSVAIVICNKALISTLGFPFATTLTSWHLMMTFCTLHVAQRLHFFEPKAIDGQTVILFGLLNGTSIGLLNLSLGFNSIGFYQMTKLAIIPFTVLLETIFLKKRFSESIKLSLLVLLLGVGIASVTDLKLNLLGSVLSGLAIATTCVGQILTNTIQKRLKVSSTQLLYQSAPYQAAILFATGPFVDQLLTNRSVFAHKYTTPVLVSS

SEQ ID NO: 45789 - protein, 274 aa, Oryza sativa
MKACARAAGERLPLVGAPARQPLARSFVKVNRLSSQHETKSVVSCSVRVSDDKTHRIEATAEHILPATNDHVMKAIDSINRGQVIAVPTDTIYGFACDACSAEAVNRIYEIKGRVQTRPLAICVADVPDISRFAVVDHLPHGLLDSLLPGPVTVVLKRGNNSILERSLNPGLESIGVRVPDFDFIRAISRGAGSALALTSANLSGHPSSVNVKDFEDLWPHCSYVFDGGILPSGRAGSTIVDLITPGVYKILRDGSSRQETTAVLGKFGFVEAW

SEQ ID NO: 45790 - protein, 240 aa, Oryza sativa
MPASMPAAATQHRAGGGGARGERVSVRSSNRAATSPCRSPHHVVLEEEKGGRCHCHLATPASAPASTSPALPRGEEGERGEAPLTISRRAGQPLPPPLSPLPRRAILGAGLHLTHAATRRGRREGRGSSSRQQPRWPAYSTTAVVAATLPHQPRRRTPPHLRRREERKARGATSEATPPHRRASLEERRGEREREMALCGSVGWMDKIKDVVWMALWVVKKAGLVFFKGVSSVEKPTPIL

SEQ ID NO: 45791 - protein, 245 aa, Oryza sativa
MASNGEATTESETAAPAPVPEPTPPPCQGRLITVLSIDGGSIRGLVPATILACLEAKLQELGGPEARIADYFDVIAGTSTGALITSMLAAPDDNRQPLFAADDLTKFYLENGPKIFPQQRVGFLTPVANLIGTVRGPKYDGSFLHDKIKSLTHDVTIADTVTNIVVPAFDVKYLQPIIFSTYEAKNEPLKNAHLSDICISTSAAPTYFLAHFFKTTSPSGESREFHLIDRGVAANNPIPSIYHLV

SEQ ID NO: 45792 - protein, 310 aa, Oryza sativa; identical to SEQ ID NO: 31942

SEQ ID NO: 45793 - protein, 131 aa, Oryza sativa
MAAARAAVPIAVFLLLVLAEADPAAATRSPSAFVQNAIYSNRITIFSKTYCPYSMRAKRIFRDLKENPYIVELDLREDGREIQSVLLDLVGRHTVPQVFVNGQHVGGSDDTANAHSNGQLQKLLGNSQSQR

SEQ ID NO: 45794 - protein, 402 aa, Oryza sativa
MYVFDRFHTNGLSRNFSVSSNDSKRLLQEFVNKHGADLKVIYSVSGWLKKNPTNYCVKLTSGHKLEEARQEFKDSCSVQVYSIQACIPKDTAVLWNPEFVQAEELFNRPFDEENCLRDNRFCGVLNSFVKRTANGKLVSSFPPKPINSVAAAAPLKTSSAPKEQSAKGQQQGLPGSSSPKKGTSNKAEKDISSVLDKATNAPVVKEPSIALQGNKNKAQNGKALPSNGGSLATMWGRASAKPKTPATTNPTVLPSVAVTADAQICAKEEANADSSDDEQAVHYKRGSSANNRKRRAVFDLSDDDEDDNVVAIASPEPPEQCITNPIDEVAQESNPKQENLENKQEVEKDVKCCMGRTESPECKTKSSNTVSHSGITLKEKNNGPPPNDNKQDHAAETASNLT

SEQ ID NO: 45795 - protein, 110 aa, Oryza sativa
MLLTNSFCQTNLVHLHSRNVYVLSVEHTCRDYSLSPCLLEVSCYCANVEIFSIFAEFSCFIALQTMVPDFYSVYYFGSDWLNVLEYFNFYCFMSSKYKLIIPVKHRTVLF

SEQ ID NO: 45796 - protein, 424 aa, Oryza sativa
MRRATILVLLIALSSVIAPLPLEALNVRGHLLKSKTFLSPAFFLHPGSVSNKFYYDVPFPRGHLALKSFNAEVVDENGVPVPLHDTYLHHWVVEPYYALKNSDSADAQKLPKGIIARNSGVCKKTLGQYYGLGSETRHTATWVPDPYGIEIGNPEKPPEGYEEKWLINVHAIDTRGAIDKLGCTECKCDLYNMTIDEYGRKLPKDYIGGLYCCYDETQCKVKEGFNGELRKLFLRYTVTWLDWSDAVVPVKIYIFDVTDTSPPDEKSGTACKVEYQVEECSPENRAKNECIDVKVTKEVIPCGGDIVFGVAHQHSGGIGASLHGQDGRLLCASIPSYGKGEEAGNEDNYIVGMSTCYPKPGSVKVSDGEVLTVVSNYSSDRQHTGVMGLLYILVAEQEQPAPKPALCFSFPVPWCLPTWLTSNL

SEQ ID NO: 45797 - protein, 350 aa, Oryza sativa
MIFSVSLFGSSHQSIHKLYRKCWSSNSHSTLNVLSLAKTVGQSMRMKRIRVKPHATDLKNRPQAHEDNVFYKLVYRLPENLSWLLASPEMARRPPSKKKLKKEEMVSSNQFGVILEWEGVVVEDDDPDLEPRVWYVLSLEEAKSFPPDAVLKEIEGMRTDQAILEVLHWSEDPQEVQRLAARKEVIYKTLRGRFYQLRPGVLDFLNTLVDFDIPIAITTPRPRLSLEEGIKAVGLQGYFDAIVAAEDFCRGKPEGEMFEVTAGQLGLEPDVCLVLGNSNSTIESAHTAGMRCVAVASRYPAYELQAANHVVRWLDQLSVADLQRIANGEILGLRGRRSDMDMDMEIVIEE

SEQ ID NO: 45798 - protein, 611 aa, Oryza sativa
MAMLLRRRLPLARLLRPLQAEAAASTTSSPPPLQNRPAAASPSHALGSRLGFLNGVPGAPGAREASAFTTAGFLAAGAAAALASLPVAYADANEGVVDSAVSSDAAVKPVNPDAAVSSDVAVGEDLAHKERKRIIELIQSRGMPHGSYPQFDVAVKGQKVVVKFNVPSTCSLSDLIVDLVTHIGLEAEQGGGGSEMLLRAWNSVAARQITLNPHKKTTSNGDDNEDDLCVLIFEPLVGSQYSVSSYEVEFIKRGGFSLRELEALTSVLKLVGQKDVKQSSGKGNKSYTTRKGNGQRSKHVPSMEKTISDLEGMGVRVYGFDETSSIPMDGSGTVMWENIAGYEPQKREIEDTILLALQSPEVYDEIARATRCKFETNRPRAVLFEGPPGTGKTSSARVIAKQAGVPLLYVPLEIIMSKYYGESERLLGSVFSLANDLPDGGIIFLDEVDSFASARDSEMHEATRRILSVILRQIDGFEQDRRVVVIAATNRKEDLDPALISRFDSIICFDLPDQQTRAEISAQYAKHLTKSELFQFSLATEEMSGRDIRDICQQAERHWASKLIRGQVPKNDKGEPSLPPVEEYVACSEQRRRSLPNRTSKESRLPALKLA

SEQ ID NO: 45799 - protein, 314 aa, Oryza sativa
MEGGGERAAEAEEYHCHDFEWEDLRAEVEANPAFSYHLSPFPTTVGTPETPPPPPPSEAWTSFHRRHTCGKFFKERRYLLKEFPELLNSKDSAKVLEVGCGNGSTVVPILRSSPSTTVYACDCSKETLEKANEIVCSTKGVEVKDRFHPFLLDASKETFPDWLFCKSCRSPCSSNCNMIEEYPAFLRDNPCCVDGVDFITMIFTLSAIPFDNMLATLERCVSVLKPGGLVLFRDYGLYDMTMLRFLPHQRVGFREYMRSDGTLSYFFTLDTVRELFHASGLLELELGYCCVISVNRKKGKKMQRVWVHGKFQKP

SEQ ID NO: 45800 - protein, 543 aa, Oryza sativa; identical to SEQ ID NO: 36865

SEQ ID NO: 45801 - protein, 431 aa, Oryza sativa
MAMASPTNGGGGGGNKVISLRLQYYCVLAAVVVAVMVLSLAFVSPSAMGAAVRQNLGSVVAATAAAGEGADASAAAAGAGVAATTAAEEEREQAAAAGVVLFNFGDSNSDTGGVAAAGGIRIMPPEGRTYFHHPTGRLSDGRVIIDFICESLNTRELNPYLKSIGSDYSNGVNFAMAGSTVSHGVSPYSLNVQVDQFVYFKHRSLELFERGQKGPVSKEGFENALYMMDIGHNDVAGVMHTPSDNWDKKFSKIVSEIKDAIRILYDNGARKFWIHGTGALGCLPALVVQEKGEHDAHGCLANYNKAARQFNKELSHLCDEMRLQLKNATVVYTDMFAIKYDFVANHTKYGIKWPLMVCCGNGGPPYNFKPGKFGCDDLCEPGSKVLSWDGVHFTDFGSGLAAKLAMSGEYSKPKVKLASLVNAGSNKSSDS

SEQ ID NO: 45802 - protein, 547 aa, Oryza sativa
MGQSCRKNKRKELSNGKSTAPEEQRGDVEEIAWSQKGQQDGSDCTDDGQADMDGEVAGGQYVIRYEKDGEMERVLERQAELIGQYEAEEEAQRQWEKQFNENRSSAKVHVEAENKACQIENGWEQSKEHSRLADQAVHCNEEAKPGVKNHPSASNNRSAGLLLNGSLPESPQDTSGQEAAADQRDSHEELHGHCHAQSQGNSNVAGTMTGKNQEQGNENPDGCSSYCDIKAPSDGSPSMSDATLNSKVSDWSSSRFHDHGDNQVDAGPDQQPTSNMDIECVLQALQLARISLSQKLSKPVPPSQVTLALPAPGDHEHSEDDGYSPVDDEFNSARDELCSSSQSPDQEILALPAPEDYHDRENLPANDDATISLTEEQTSSSPHRQEILALPAPVDDYHREIVDDIKIPICIAGLFRLPTDSFPKDEMVSTCNKYGGSELNLRPTAAAPQNAFVSNTADRVTVAPSEIRDDHGFSTRPCYDPHSSGLLSVPTSGRCSTPSSDFTIRGASFLSGIPGLAEDFRKGRPLADADLFMQRGCDYTISNKWML

SEQ ID NO: 45803 - protein, 757 aa, Oryza sativa
MRERGEMREAKAPLIAEAAEHISHSHGSGSSGTGSHTSGGGGGWRGSRQYQRRSDALAYGNRYQKAAALVDLAEDGVGIPEDVLNDTRFERAMRFYFVYLRLDWLWSLNLFALILLNFLEKPLWCRGYSQHACDQRDLYFLGQLPYLSKTESLIYEGLTLVILVMDIFYPLSYEGLNLFWKNTINKLKVLLLFILACDILVFAFSPQPFRVAPYIRVAFLIMNIRELRMCAVTLVGMVGTYLNVLALSLLFLLFASWLAYVTFEDTPQGKTVFSSYGTTLYQMFILFTTSNNPDVWVPAYKSSRWSSLFFIVYVLLGVYFLTNLILAVIYDSFKEQLAKQVSQADCTRKSILEKAFGIIDATGQGYLNKEQCLSLLDELNKYRSLPKTSREDFELIFAELDQSGDFKVTSEEFATLCNTIAIKFQKEPPPSYLEKYPSFYHSALCEWLKSFVRSPLFEYIVIFVLLMNLVAVIIETTLDIENSSSQKVWQEVEFVFGWIYVIEMALKIFSLGFGAYWMEGQNKFDFVLTWTIFIGETLTFAFPSKLSFLSNGELIRYLLLGRMLRLTRILLQVRRFRAFVATFFTLMSSLMPYLGIVFCTLCIYCSLGLQIFGGIVYAGNPTLEETDLFSNDYLLFNFNDYPSGMVTLFNLLVMGNWQAWMESYRQLTGSYWSLIYFVSFYLISVLLLLNLIVAFVLEAFFAEMELEKDGEADIQDPTLEGRNRRRSVRVRTKGTMVDILLHHMLSNELDGSQNRDQ

SEQ ID NO: 45804 - protein, 293 aa, Oryza sativa
MATDVAATEPEVAAEEAAAAAPETTATAGDSKPAKESKAKKAAAPRKARSTATHPPYAEMISEAIATLKERTGSSQYAIGKFLEDKHKDHLPSNFRKQLLVQIKKLVAAGKLTKVKNSYKLPPTRAPAAAKPKAKPAAAAKPKPKPKAAAKPKAAAKPKAKAPAKSKAAAKPKAAAKPAAKPKAAAKPKSPAKPAAKPKAAPKAKAKPAAKPKAKAAPKPKAAAVTKTKATSAPARRPAKAAKTSAKDTPSKKAAPAAKKPAAAAKKAPAKKAAPAKKAAAPARKVPARKAKK

SEQ ID NO: 45805 - protein, 516 aa, Oryza sativa
MAAAWLVVLLTVHRLLHLSGVSAVDRSQFPPDFLFGTSSSAYQVEGGYLEGNKGLSNWDVFTHKQGTIEDGSNGDTANDHYHRYMEDIELMHSLGVNSYRFSISWARILPKGRFGDVNPDGVAFYNALIDGLVQKGIQPFVTICHYDIPHELDERYGGWLSPEIQKDFSYFAEVCFKLFGDRIKFWTTFNQPNLSIKFSYMDGFYSPGRCSEPFGKCALGNSSIEPYVAGHNIILSHANAVSVYRNKYQGKQGGQIGIALSITWYEPFRNTTIDLLAVKRALSFGASWFLDPILLGDYPTEMREVLGQSLPKFTSKQKNRLQSTKLDFIGLNHYTTCYVKDCIFSPCEIDPVNADARVFSLYERDGVPIGKATGAPFFHDVPRGMEEAVTYYKQRYNNTPTYITENGYSQASNSNMTAKDFTNDTGRITYIQGYLISLASAIRKGADVRGYFVWSLLDDFEWNFGYTLRFGLYHVHYKTLKRTPKLSVDWYRKFLTGSLLRRKFRDESQLHKFNSY

SEQ ID NO: 45806 - protein, 165 aa, Oryza sativa
MRQKVSEMEEELRKEKDAAEKVQLLQREVEKAKESERKMLESLIYQTKQLEQTKISLEEAKLEITTLQQANASLEASAAAAVVSRRGGAVEQRSVKDLVFGGGDDEIRALRCELRTAMQGEEKSRKALDDLSVALSDVTMEAKQVKSGCPRRRPSWRPPMPRPSG

SEQ ID NO: 45807 - protein, 371 aa, Oryza sativa
MAAARCLPLRASPPEVAKAFSSSIPASSSSSSSSSSTTTAAASLPLRAAVPPSSGRRIPPLRCASSSSSSQGSASPDIAVLLEVEGVLADVYRFGNRQAFNVAFQNLGLDCANWTEPIYADLVRKASGDEERMLLLFFNRIGWPTSLPTNEKESFMKSVLREKLKALEVFSASDSLPLRPGVEQFIDDALNEGVPVAILTTYGRNGEKTSRYIIEKLGQERTSKIHIVGKEEVERSLYGQLVLGEGVASSLDEQLVKEAQKAASAEKQRIAEEVASILKLSVDINAASKSSEKIIVTLRAGSEYVGRDVQNCVLVAGSQSGVLAAERIGMPCIVVRSSLTARAEFHSAKAVMDGFGGTDLTISKLLSKKWS

SEQ ID NO: 45808 - protein, 465 aa, Oryza sativa
MLPALLANCNHLHEWITSVLTVTPLNFRFIGPPSSDMRLFITSDPANIRHVFNTNFSNYPKGREFQEIFDILGDGIFSADGESWRRQRTKAQLLMSSPRFRAFVARYSRDKVEKALLPLLAHVAGTGDACNLQDVFLRLTFDTTTTLVFGVDPGSVAIDLPEVPFARAMDDAMTMLLLRHIVPLSWWRLARRLGIGYERKMPVAWRTMDRFVADTIAKRRAEKARTGIDDSADLLSSYINDDEEDAGTVDAFLRDTTINLMLAGRDTTGSALSWFFYLLTKNPRVLHKLLQELDSVKSTTAADGMVIFDPDETGRLVYLHAALCESLRLYPPVPMEHKGPAAADVLPSGHEVRPGDKIVVSLYAMGRMESVWGSDCMEFRPERWISDDGKLRYVPSYKFMSFNSGPRTCLGKDMAFVQLKTAAAAVMKNFEIEAVAGHVVEPKLSIILHMKNGFMVRVKRRLAVC

SEQ ID NO: 45809 - protein, 370 aa, Oryza sativa
MATSSVAGDIELDRPNLEDYLPSDSLPQEFPRNLHLRDLLDISPVLTEAAGAIVDDSFTRCFKSNSPEPWNWNIYLFPLWCLGVVIRYGILFPLRGLTLLVGWLAFFAAFFPVHFLLKGQKMRSKIERKLVEMMCSVFVASWTGVIKYHGPRPSTRPHQVFVANHTSMIDFIILEQMTAFAVIMQKHPGWVGFIQKTILESVGCIWFNRNDLKDREVVAKKLRDHVQHPDSNPLLIFPEGTCVNNQYTVMFKKGAFELGCAVCPIAIKYNKIFVDAFWNSKKQSFTMHLVRLMTSWAVVCDVWYLGPQYLRDGETAIEFAERVRDMIAARAGLKKVPWDGYLKHNRPSPKHTEEKQRIFADSVLRRLEES

SEQ ID NO: 45810 - protein, 615 aa, Oryza sativa
MIPPLASLPKNFSISLAHINHLPHEANEQKSHFIIIHTNPLGFFRVPGFSFLLLSPPLDPSSSSPRSSALAVARRRPPTMEAAGVEVNGGGGGDVVVVVPQQHEVAAKQAAAAAAAKGKSVESKGVRVVGGRIYDPENGKTCHQCRQKTMDFAASCHKIKKNNKQCTIQYCRKCLFNRYGQEAEKVANDGTWTCPKCKDICNCSFCMKKKGLPPTGILAHAAKASGCASVHHLLKKGKEAVAAAQRSTQKVRSTPVKKSPKRAIQPDAAADEPLAEGDENVCIDFNAAPVKKQKRSRKVGNGVALTKDESPDAPKEQVVLPKGTPVTSVAGAEWEPEDVGLALQFFEFCRTFAEIFQVRKGQPERILRDIAGGRGLRVVSSVIADFHITLLSIIQEGRGIKPITYSRDNDAWIVDTGKCISESIFVPEGLPLDSLSQGVSGYKNLSPSCKLSVLNFLCDESLSTEKLRSCILSETKNPSREKAHSAKEKEEPKEETIKNTDEAVLLKTEGAAVAIEEDKNGISQQKDVKEVKNADTNEKKHGGFLRTNPFMVDKKVIYWKLDDYCNNTTMMLQEVDADDLMGNKDKWFMLNEDEKKIVENYLSTRPKRRGRKAAQ

SEQ ID NO: 45811 - protein, 530 aa, Oryza sativa
MADMVKFTMEWLQDPLSLAIVVTVAVLIMRMQRRRAAPFPPGPKPLPIVGNMAMMDQLTHRGLAALAKEYGGLMHLRLGRLHAFAVSTPEYAREVLQAQDGAFSNRPATTAIAYLTYDRADMAFAHYGPFWRKMRKLCVVKLFSRRRAETWLAVRDESAALVRAVAASRGEAAVNLGELIFNLTKNVIFRAAFGTRDGEGHDEFIAILQEFSKLFGAFNIGDFIPWLSWADTNGINARLVAARTALDRFIDKIIDEHMERGKNPDDADADMVDDMLAFLAEAKPHAGKAAAAAAGAGDGADDLQNTLRLTRDNIKAIIMDVMFGGTETVASAIEWAMAEMMHSPDDLRRVQEELAAVVGLGRDVAESDLDKLPFLRCVIKETLRLHPPIPILLHETAADCLVAGYSVPRGSRVMVNVWAIARDRAAWGPDADAFRPSRFAAGAAAEGLDFRGGCFEFLPFGSGRRSCPGMALGLYALELAVARLAHGFNWSLPDGMKPSELDMSDIFGLTAPRATRLSAVATPRLTCPLY

SEQ ID NO: 45812 - protein, 324 aa, Oryza sativa
MQPLVSTSAAAAAIPSPPPPALTLPPPRRRIPPPLTAGALLCNRTGSGHASPRGRRPLPPPAMSHPLSSEPHALEQRAVVVTNKHGEKLVGVLHHTGSSKIVVLCHGFISTKNDSLILDLMAALTKKGISVFRFDFSGNGESEGEFEYGNYRKEADDLHSVVSYLCKEKYDVTAIVGHSKGGDVVTLYASIYDDVRLVINVSGRFDLEKGIEERIGEGSIDRINKEGYLDVKDKSGNVQYRVTKESLMERLNTDIRAVGMSITKECRFFTVHGSADETIPVEDAYKFAKHIPNHKLQVIEGANHNYTAHREELADAVVDFITSN

SEQ ID NO: 45813 - protein, 317 aa, Oryza sativa
MCGLDRNTSLTVFFDVSPSERSSQPGHQNPDLYIQFVTSYQHPEGQMRIRVTTICRKWVDGSTNTEELVEGFDQETAAVVLARYISLKMEMEEEFDATRWLDRSLIRLCSRFGDYRKDDPSSFSLHSNFSLFPQFMFNLRRSQFVQVFNNSPDETAYFRMLLNRESITNSVAMIQPSLISFSFDLPPSPVFLDVASIAADRILLLDAYFSVVIFHGMTIAQWRNMGYQNQPEHQQFAQLLQAPHEEAQIIIKGRFPAPRLVVCDQHGSQARFLLAKLNPSATYNSAHDVPPGSDIIFTDDVSFQVFCEHLQRLAVQS

SEQ ID NO: 45814 - protein, 115 aa, Oryza sativa
MVRSARFVATLLASRPPATSLLPAMSAPSRSAALATSTSARKGTSAAPSARLDTRGTKVALEFRAMRRRKMLMTWTMNSIISMAMAKVQSGRYRDRGKMLTCLHLLATNNIGFPV

SEQ ID NO: 45815 - protein, 432 aa, Oryza sativa
MVAVTVMRKSRNFVGPSPPTPPAEITTTLELSSIDRVPGLRHNVRSLHVFRRHKNSGPVVDGDSRRPAAVIRAALARALADYPAFAGRFVGSLLAGDACVACTGEGAWFVEAAADCSLDDVNGLEYPLMISEEELLPAPEDGVDPTSIPVMMQVTEFTCGGFILGLVAVHTLADGLGAAQFITAVAELARGMDKLRVAPVWDRSLIPNPPKLPPGPPPSFQSFGFQHFSTDVTSDRIAHVKAEYFQTFGQYCSTFDVATAKVWQARTRAVGYKPEIQVHVCFFANTRHLLTQVLPKDGGYYGNCFYPVTVTAIAEDVATKELLDVIKIIRDGKARLPMEFAKWASGDVKVDPYALTFEHNVLFVSDWTRLGFFEVDYGWGTPNHIIPFTYADYMAVAVLGAPPMPKKGTRIMTQCVENKCIKEFQDEMKAFI

SEQ ID NO: 45816 - protein, 429 aa, Oryza sativa
MKTFNQRTNNLLKKSPRYLSALDVTTEKEILLEDEWTLFLEHIFKHRVIVVDDWTKCYGTVQTFLHSSDAESCSDSFKGECDASFCEQTGKAKLAFVIFKEGKLVWAEVFHEVPCKSVVEAEALAVIALLFKLIDLNLLRGTVWTDNKVCYNVLNGEYEIKVDDPNRSLFLFLRSLRGRFESLTPVWKPRELLLIPDRLVSMVDDPLISRNRLVLSILEKTVPILSQPQFRISWSSYLGTIFDKRDGGKQISNTTNEIKESDESEDSICWVKADDEEAEIASFLEIMKTFSAHRLLIVVDNFEDKSPHYQKLIKDLSQKFYTCWMSKEGSVTIVEYDSPNTEEKETKRLVVMFGGTMALDEYIHQKNLCTVVLVKTSEIKLLRDAGIEEISAKTLLSFRNIKAKPVVPKKPREDEDLEKGGGGGGEGRW

SEQ ID NO: 45817 - protein, 476 aa, Oryza sativa
MASSSSSASSRFSPALQASDLNDFIAPSQDCIISLNKGPSARRLPIKQKEIAVSTNPPEEAVKISLKDCLACSGCITSAETVMLEKQSLGDFITRINSDKAVIVSVSPQSRASLAAFFGLSQSQVFRKLTALFKSMGVKAVYDTSSSRDLSLIEACSEFVTRYHQNQLSSGKEAGKNLPMLSSACPGWICYAEKTLGSFILPYISAVKSPQQAIGAAIKHHMVGKLGLKPHDVYHVTVMPCYDKKLEAVRDDFVFSVEDKDVTEVDSVLTTGEVLDLIQSRSVDFKTLEESPMDRLLTNVDDDGQLYGVSGGSGGYAETVFRHAAHVLFDRKIEGSVDFRILRNSDFREVTLEVEGKPVLKFALCYGFRNLQNIIRKIKMGKCEYHFIEVMACPSGCLNGGGQIKPAKGQSAKDLIQLLEDVYIQDVSVSNPFENPIAKRLYDEWLGQPGSENAKKYLHTKYHPVVKSVASQLQNW

SEQ ID NO: 45818 - protein, 506 aa, Oryza sativa
MGSCHSQPSVLAELMHLDTAKAETSFSSSRRSKFSYNWKSLHGSSTTSSYGSPCHPMFNLSKHSTNPKPPPPLKDSARMSNFSYQLVRSAESPKNAKYSLSEKMSHLLKPPNSSSHQNGNFTVGALKRRHNIAHFGGAINKLLKNEVHKKATPSEGRHWQTLLDNSLIRQNKLYCSEPRNEESTEQSWSSTDSESEKAVCFSSSGSIADLHASVSTDTSDSSDHSMSSSCLSVNDRWKMTFKKVHCALAANLDSMYVTNHKELEQPSPVSVLEIPDEDFSVTKSIKLDLHPESELVRCPSVESTAEVGEIGISDYALGVDGLDASLNGEAIQLVEDIFEEFGDEEEREFSYVLDILIVSGIHGTAEDQLYKVCQSLDCPAGYDVFEKLEKKYMKVAEWSRSDRKLIFDMVNTILSEILAPCLDMHPWVKSARKMAPVWGSEGLLEKILQMLVQRREELGLSKTKPEKKALDRKWPDLSDCIDRVGRDVENMIKDDLLEEMLLDLFS

SEQ ID NO: 45819 - protein, 113 aa, Oryza sativa
MHSLILQYGVSSRRGLANKLAEIFLLNSYGRTGFGFDKNMMSIVHSCINRSFPRHKHRRLDSHCHKLLSDRQQTSMLMATERLKFCMITQHIQLNTAATMQFLDSISNRPCRS

SEQ ID NO: 45820 - protein, 899 aa, Oryza sativa
MASTSAASSSSSKYAKHRRIGEEEEEEEEEAGEAEEELERFDDFTIASSWERFISEIEAICRQWLADGPNILTQKGAESVPSFDNLYVVKRELKHGKRVYCMEYHFMKSAKGKHSYWDDDTHSMQLSFGVYEFLIIAPLSASGVVLDDPESTKLLSSVAIALSNCGSNWPAFVPVHDPSRKAYIGIQNLGTVFTRRFEADRIGSQVPIRLMHLEGLHELFLSKFVLSSTDFPARVKVIFSMKLTYRTPEYDYYNEETLVSEANESIAESEVANHPKKQWDDDCSWAEWYSAEDPVKGFELTAIWGERVFEETLEMAEVENASSFDADRWLLHPIVSPYMVDDSIGKFVGFASQLQLLVKAFESSAEAQFLEDFVAADTSGQENSKSTVTVPPPSVVDRVMKDLFNDEVGNSNYVEAENKYGRAMKGAPSDSLFAQFCLHALWFGNCHIRAIAVLWIDFVREIRWCWEESERLPRMKSTSSIDLCTCLIHQKLHMLAICIERKKSLSREKGTDHAHEDGISNSVAQNKTRKGSAGVVPSMMLLNTFQEMHAPYTQDALLMTEDMHEERLHAAEAFGNAVGLSGQLERDVLSSDMSAFKAANPDAVFEDFIRWHSPGDWVSEDGAEDSSGWPPKGRLSQRMSEHGNMWRKIWNDAPALPVSEQKFLLDPIREGEKVIHYLETLRPQQLLEQMVCTVFKSSADILNRTTYGGFKLMKTKMDQLYATLASTLKSLQGKSDISDLSDDLKRLCQVFEHIEKLLILATSVHRKLIDAPRLSQAIFADYFNYYLPKMGTSLESVCYEKEFTAKEKVGMHERDAVSNLFPPPTANQSWRKVLSMGNLLNGHEPIQREIVFSVIERISNGHYSSPTPLSTDEQIETHRMYISGTSNDLWVALSVTSWD

SEQ ID NO: 45821 - protein, 589 aa, Oryza sativa
MVLKEISIKFQQEPKSILDTSDKSRKGGTWLQGAVLNIAECCLLPWPSQNRTDDSTAIVWRDEGLDNHPVNRMSLKELHNQVITVATALDTMFQKGDRIAIDMPMTCNAVIIYLAIVLGGFVVVSIADSFAPQEIGTRMSVSKAKAIFTQDFIIRGGKKVPLYSRVVQGTSSKAVVIPATGGFLGVSLRNGDMSWKDFLSCAAGRSSIYPTVYQPSDALTNILFSSGTTGEPKAIPWSQLSPIRCTCDTWAHLDIQPQDIFCWPTNLGWVMGPILLYSCFLSGATLALYHGSPLGRGFCKFVQDAGVTILGSVPSLVKSWKAGNFTEGLHWTKIRVLSTTGEASDIDDDLWLSSRASYKPIIECCGGTELASSYIQGSLLRSQAFGAFSGASMSTGFVILDEQGTPYPDDVPCAGEVGLFPLYFGATDRLLNADNNKVYFDGMPIYNGRQLRRHGDIIQRTVGGYYIVQGRADDTMNLGGIKTSSVEIERICNRADEALLETAAVSIKPAGGGPEQLAILAVLKDRSPPCDADVLKSKFQRAIQKNLNPLFKVSYVKIVPEFPRTASNKLLRRVLRDQLSKELSNRSKL

SEQ ID NO: 45822 - protein, 224 aa, Oryza sativa
MKATVKGRYEGDKATAAATLAFTPSAADLRFKASATDAAFARGPSLEGLILTLEKPGSFLLDLKPHSKDVRFQFMNSALLLDRRVSLTYTHSTTLSPGPAKLPARTALDGSLTFDPANKLSLSHTLGSSGCRVKYSYAHGQDRLTTIEPCFDTANNAWDFAVTRKFQGGDAIKATYQASTKLLALDWTRDSKIGASFKVAASFDLSDQSKAPKLIAESTWNYEI

SEQ ID NO: 45823 - protein, 441 aa, Oryza sativa
MSFDNFVQITGDARAVRKALFAVSTIIYKCPSKETIPLETSVSDLPPSIIVPSELPVYPSSNFYSPSDAAISSGHPSLSILGSTPHVPELTVSADAHSRLPIYQSVLPVIPAYNTPKCSGELVLRVLCPAGKIGLVIGKGGVTIKSIRKESGARIDVDDSKNDREESIITITSNEATDDAKSAAVEAVLLLQSKINDDNEGKMNLRLLVPGKVIGCLIGKGGSIVNDMRSKTKAAIYISKGEKPRKASSSDELVEVFGEVENLRDALVQIVLRLRDDVLRDSVDRQNSEKDGKLTVATTDPLYASSYPLPALLPYRQQITPLGYDHRGDIERGLEVYPHSSLYGYSSLQAIDDGYSAVSSYASKGYGGRPPHMEMTIPASGLSKVMGKHGTNLDNIIKISGAHIEIIESKSSRHGHVARISGTTEQKQSAENLIKAFIMST

SEQ ID NO: 45824 - protein, 124 aa, Oryza sativa
MRSSATAAAEAAEADQSRAMYELCALLLTVLRAWPEEGGGRGAAAWPRQVTAAGVASMLLGASVALMLCGSVTFMLGFFLMPWVIGLACVFLLVGFVTNLSVIWRAILWPASCSSSPKVASTCT

SEQ ID NO: 45825 - protein, 283 aa, Oryza sativa
MLRQLLERFGSASSDAKIQPPIVGVVPVVHHLKADQLNVLNRGEDEEFHKDNNFQPQRQKRSKRRCFRRIFKVKNFYELLRLSNRRSSAHNVQHTDASKTVSSKNNEPAKEDSGTSDDSEPRHSDSLEANIPQPQDLVDNVDDQADQSDEASPGRSRQSSAKEPLLFPLAATRGKVQPTSSAKTRRAFQETVKRNEDVRTKRLMRELRDIQRIIASQQSPEFTVELKNSNLFEWIVRLHQVSLLVQSIGNITETRLAYARLMKINKTIAFIRRWTPKAFCIRI

SEQ ID NO: 45826 - protein, 346 aa, Oryza sativa
MEVREMAVAAAAAAAASSGGGGGGLRMPPPNPNLPYREDCWSEGETEALVRAWGSRYVELNRGNLRQKQWQEVADAVNSRRGAAARRRPPRTDVQCKNRVDTLKKKYKAERARVMPSTWSFFPELDRLVGPTLSASASKRPSPSPSPVPPPPYFAMPIHPSAVRKPPSPSPSPSPPPPMALPLPSYRRGSPLPAAALIQQEAAAAAAAAVSDSEDSEGPGDNNNHNAQRSPSQSVSSRSGNSNKRSRQEVDGGFRELARAIEAFAEMYERVESAKQKQALEIERQRIDFLKQLEVKRMENFVDAHVKLARAKRIKKHAGTAPDGIGAAELVSSVAALPFLSTSTYI

SEQ ID NO: 45827 - protein, 686 aa, Oryza sativa
MAAAGEYSFAAEYDGPPLPYSLPRAIPLDLSRIPLASLSSPTSPPPPTAPPLPVVRPLTPSSLCSAESKRDSLGRGSRVLRRLLSATEVELVMRSERECAANQLRPEDVYVNGTKLSPEELVMLQGCQCPPSKLRPGFYWYDKVSGFWGKEGHKPHCIISPNLNVGGALDQKASNGNTGILINGREITKSELQMLKLAGVQCAGKPHFWVNADGTYQEEGQKTVKGKIWDKPIVKLLSPVLSLPTPNKANNQCGEEPVNVVNRPIPDYLEQRTIQKLLLVGSGTNTILKQAKFLYKSRPFSVEECEDLRLIIQSNIYNYLGILLEGRERFEEEAIADRRTTCQSDPSSSGHCEPELCNDITEYYIAPRLKAFSDWVLKAMAIGNLEDIFPAASREYAPMVEELWKDPAIQATYNRRSELPFLPSAASYFLDKAVDISRTEYELSDMDILYADGITSSDGLASTDFSFPQLALDGRGFDEPDPQDTLLRYQLIRINNKGLHENCKWLQMFDDVRLVIFCVAVSDYDEYYEDANGNVVNKMMETRQLFESIALHPIFEQMDFLLLLTEFDILEQKIGKSPLTSCDWFSDFTPLVSRNLINGTSKSSRGSSTGSTLAQMAGHYIAVKFKSVFQSFTERKLYVSYVNALDQESVRSAIRYGREIIKWEDEKPVFGSSETTYSEEPSSYSH

SEQ ID NO: 45828 - protein, 148 aa, Oryza sativa; identical to SEQ ID NO: 43401

SEQ ID NO: 45829 - protein, 417 aa, Oryza sativa
MEGFEKHYPPMLDDEVWRLEKIGRNGAHHQALTNSGVDTVQKFLQSYFTDEKKLFQTFSKMSQAAWKTIISHAMTCEVGDDLCLYEVKGNNVGLFFDAIYQLVGVKFGDSYKPINELDEIEQSAVETMKQLAYANISGIQYDHKVVNNYPVPLHRFHCGGTSMLTDFIPKQQIPTCGQYNSALAGQPFESTENFSSFQEASNASVDMSRFVQGQTSNVQFSQQLGMGNFIPHHSNQGTFIPRPRITPLCIPNTEKTYFNPNAHSSIQADHAATRIGQYAHNERSHSPEESYKRFSPDNFLHTDEVVALMQPHLVPPSNSENFSNLLNLSSNDQTSQQIAAPFQPSRTNSFDSSSCDQLIQNFISQFSSNERVAVPLSPRKWVKIRAALKLASVGRLSRASRKASHRPPARPRLVPIV

SEQ ID NO: 45830 - protein, 309 aa, Oryza sativa
MQVQMQMQQATTVLSSSSNRPWTLWCHPVPVVSSPSHAKNKKHCLRLRAGMAMASSELPDLSAIQRVVLDIEGTTTPISFVADVLFPYARDNVRRHLAATYGSSEETRADVALLRAQVEEDLAQGVDGAVAVPPDAEGEGEGAVVEALAANVESMIRADRKVTALKQLQGRIWRRGFDSGELRSEVYDDAADALRRWRAKAYIYSSGSREAQRLIFANTAAHGDLRDHLCGFFDTTIGAKREVSSYYEIWQTLGTDRPSQILFLTDVYQEAAAAKTAGLEVIISVRPGNAPLPDNHGFHTITSFAEISI

SEQ ID NO: 45831 - protein, 332 aa, Oryza sativa
MAIGTIVCASLWTEFVACEQVDERYNQLTRKDGPNSGTTNREDKEIFEISAKGAIVFILVASVFLLLLFYFMSSWFVWLLIVLFCIGGIEGMHVCLVTLLTRICKDCGQKTVQLPFFGEVLTLSVLIVPFCTIFAILWAVYRHASFAWIGQDILGICLMITVLQMARLPNIRVASALLSAAFVYDVFWVFISPLIFHESVMIAVARGDNSGEAIPMLLRIPRFFDPWGGYDMIGFGDIIFPGLLVAFSYRFDRASKRGLFNGYFLWLTVGYAVGLFLTYLALFLMDGHGQPALLYLVPCTLGLIVILGWFRGELHDLWNYGRSQTENLVDEP

SEQ ID NO: 45832 - protein, 323 aa, Oryza sativa
MAADPTTGGGEAESFFRAAPPLRDQDRVAGDLADFVARHSGSGGGGRLAGVVCVTSGGTTVPLEQRCVRYIDNFSSGQRGAASTEYFLKAGYAVIFIYRRGSKQPYCRFLPEDSFLDLFELGEESDIQVPESHAAVVKTAIRNYRKAIDEGLLLKLPFTTIFEYLQLLQMVGTAMNCLGRQGMFYLAAAVSDFYVPWESMAKHKIESASGLLNMQLNQVPKMLFILRKQWAPSAFCVSFKLETDPDILLQKAEAALRKYGMNVVVANELANYKDVVVMVTSNGRTTVRRPSKEDDVEEQLIDLLVEMHSEHIMQLNQDVHKLT

SEQ ID NO: 45833 - protein, 444 aa, Oryza sativa
MAEANQYQILVRLLDGRTRCLRFSTTTVSGAALLDAVSALSRVPAASLRLVTGRLDVSPSSVLASSADGRFPSASALLRLRGGKGGFGSLLRGAASKAGQKKTSNFDACRDINGRRLRHVNAERRLEEWKAEAADRQLEKLAEDFIKKKAKEAGRGGVKAAEVDKYLEKYRKDAESCVNAVEESVRASLGKRKTVPKPRGGEDAKKLKIWLGKKKVQEDESDSDSDTEMDDDEGADTKSIILDDGNSSHGSKSEDEKVDLGSITESPSEGETSGEKSGRSESEENGNGVQESREPTIRSEGECGDFISDGVVEHEIGVVDEHTPENGVSALSEEVLKPDVKAEDNTASASATSHLNDLEAPPVEEPANGNISPLSQEPLDLTIYSSAAELEVLGMERLKLELQNRGLKCGGTLQERAARLFLLKTTPLEKLPKKLFAKPSGGGK

SEQ ID NO: 45834 - protein, 220 aa, Oryza sativa
MTNVLDIGTPQKKEYFLCAETPSAARAWVSTLHASQLVLQAHKEAVNSLGGNGPTKLGKVATVVAVANATAIEASKEVEAAMKVSLRAALGSTTNKLSKGQLDDLTIMMETLRVKDDELHQLLQDIRARDATIRDITDKLQETAEAAETAASAAHSIDEQRRFLSSELERLKQDQEKQIEFSLLRLRESEEKASFFQKRGSIYSRKEILLFKKLKCGVLN

SEQ ID NO: 45835 - protein, 198 aa, Oryza sativa
MGDNLMDKVNALGERLKVSGAEVSRKMSAGVSNMSFKMKEFFQGQNMADKIVDEATLETMDAPDWATNLEICDMVNTGNVNSIELIRAIKRRIMLKNPRVQYLALVLLETVVKNCEKAFSEIAAERVLDEMVKLIDDPQTVVNNRNKALMLIEAWGESGDELRYLPVYEETYKSLRSRGIRFPGRDDERTPPALKMAL

SEQ ID NO: 45836 - protein, 671 aa, Oryza sativa
MLARRCHGLLLRRRRRLLPNLPPLSTAAISTPSPPPPPDATLDGAAPGDPGALAPDDAIASLPTVADSAGSAAALALFRRLASRPDLRCLMRLYVTAATAFVARGSLPMAHEVMRGLVAAFGEAGRLPEAADMVLEMRSHGLPLCVETANWVLRVGLETGSFVYARKVFDGMTRAGVCPDERSFRALVVVCCREGKVEEVDALLAAMWRYGFSLDNATCTVVVRSLCEKGRFKDVSEFFRRMLETGTPPNVVNYTAWIDGLCKRRYVKQAFHVLEEMVGRGLKPNVYTHTTLIDGLCKIGWTERAFRLFLKLIKSSSYKPNVHTYTVMIGGYCREGKLARAEMLLVRMVEQGLKPNTNTYTTLIGGHCKGGSFDRAFELMNKMKQEGFLPNIYTYNAVIDGFCKKGKIQEAYKVLRMATSQGLKFDKITYTILITEHCKQGHITYALDLLDRMVENGCCPDIEAYTSLISTYCQQRQMEESQKFFDKCLMIGLLPTKQTYTSMIAGYCKVGRSTLALRVFERMVQNGCFADSITYGALISGLCKESRLEEAKALYEGMLDKRLVPCEVTRVTLTFEYCRREKTSIAVSVLDRLDKRQQVHTVDVVVRKLSALGDVDAASLFLKKVLDEDYAVDHATYTGFINSCYENNRYALASEMSEKFSKKISSFKEKR

SEQ ID NO: 45837 - protein, 305 aa, Oryza sativa
MVGFIFSCLVPASVIFLALQKPWKGRPLPNTQVVPTVINGGILALYFVLWGKGLLACGPLVALLAEYAGAVLGVLSAALYGRKVNIWKKIGGLAAMLVAYYLLGNGWATRTHSPLYSFGSESLEKGTQVIGMKEMVVPLTAGILSALRRVLARRVSLKNQLKRRLHAINVASATCFLFPFAMWDTILGSASDSIVKLQFPSWAYLSTVLFGMVLIFYVDNVAEEKLHLVFSSPRHLMVSTGCIIVLEILYKMDFSLLGFLLCSVILGFGIFEATSLERSKKSPLEAHELSNGSFHNQLPISALPS

SEQ ID NO: 45838 - protein, 147 aa, Oryza sativa
MAGQPSGADKEVINEQMVANMYANMRSEMNQLYSKITELEMEVSEHSLVIGAIEPLDPSRRCYRMIGGVLVERTIKEVLPAVQRNKEGLEEVVARMNEALEKKKKEITEFELKYKIRIRKADSDTQEEGSMKEGSAQGVLVGPASGQ

SEQ ID NO: 45839 - protein, 497 aa, Oryza sativa
MERTTEDDERPTVPLLEPKPASNEEEEEVGSVRRRVVEENKKLWVVAGPSICARFSSFGVTVISQAFIGHIGATELAAYALVSTVLMRFSNGILLGMASALETLCGQSYGAKQYHMLGVYLQRSWLVLFCCAVILLPVYIFTTPLLIALGQDPEISAVAGTISLWYIPVMFSYIWAFMLQMYLQAQSKNMIVTYLAFLNLGIHLFLSWLLTVKFQLGLAGVMGSMVISFWIPVFGQLAFVFFGGCPLTWTGFSSSAFTDLGAIMKLSLSSGVMLCLELWYNTILVLLTGYMKNAEVALDALSICLNINGWEMMISIGFLSAIGVRVANELGAGSARRAKFAIFNVVTTSFLIGFVLFVLFLFFRGSLAYIFTESKAVADEVADLAPLLAFSILLNSVQPVLSGVAIGSGWQSVVAYVNVTSYYLIGIPLGAILGYVLGFQAKGIWIGMLLGTLVQTLVLLFITLRTNWKKQVEITRERLNRWYMGENGRSQNSIGNA

SEQ ID NO: 45840 - protein, 378 aa, Oryza sativa; identical to SEQ ID NO: 31978

SEQ ID NO: 45841 - protein, 72 aa, Oryza sativa
MVPFPRIALFLVSSSSAARIFTIADCRLLTPRLPSRYCCQPYPLLTSITGLQQHPPPPRPPRCPLSYSYPKP

SEQ ID NO: 45842 - protein, 117 aa, Oryza sativa
MAKSLLAASALLLALLLAVAGGAAAAGEVPLAWELGVGGGGGGGEEDSFGFSSEDAAADGAAVVRRVLQGQGYISYGALRRDTTPCSVRGASYYNCRPGGQANPYSRGCSAITRCRG

SEQ ID NO: 45843 - protein, 62 aa, Oryza sativa
MSRKGSEAEAEVEDLQAPQARTAYHSGPESARAASAAVRGPHGPPPRCSPRSPCSCSAAPIW

SEQ ID NO: 45844 - protein, 352 aa, Oryza sativa
MWALNLKAGGGGPCLTPRRRPLAAGEAAPCSVAAAWAGRRVGGRRGMALVAVGASGRRGKDGPGGGDGGDDEAKSKASSSSGNDDAASTGDSSDGLNQLHNESKSNISNSNYWRDVRANLVRREQELLVDPSAPAEQKTSSGEPAHQLPQKWAHPITMPEAGCVLVATEVLDDDSIFERTVILLLRLGSRGTFDSPFGVILNRPLYTKIKNVNPSFQDQATPFGDSPLFFGGPVDMSMFLVRASDNSRLKGFEEVIPGIRFGFRTDLEKAAVLMKSGAIKSQDLRFFVGHAAWDYEQLLSEIRAGYWAVASCSTELISDALTGDPSCLWTEILQLMGGHYSELSQKPKEDNE

SEQ ID NO: 45845 - protein, 47 aa, Oryza sativa
MHLDPKRIIHQPFIRKTYYPFKVIKKRSPHVLSHDLEILILIGEKEN

SEQ ID NO: 45846 - protein, 311 aa, Oryza sativa; identical to SEQ ID NO: 29442

SEQ ID NO: 45847 - protein, 567 aa, Oryza sativa
MAVFWYFAAKFFGPKRPPAEPGMLMSNLFQKGEPLDMWMYLSENEKFNDFSNEDALVWHEANIPYAVWGPTSTRTHTLTYYPSEAIKNNGSLYAHVYFARSGYPVDPTDPEYEQSSAFGRTHPVVAYLRKPKDGKKKSLLGDSSESNEQPPPKENKDSVDKDEGPVEYISYWKPNVTINLVDDFTRYPHNNVPPNVAPYLNVDPSSNNYYPTVFFNEFWLLRDKLIALNETVEELPLNLEVGPISMTKWQIFLQMEQSFQVHRSYGSMLEGEADELKRVFLEGNPYFLGLTMIVSLFHSLFDFLAFKNDIQFWNKNKSMEGLSAKSVVLNFVCQLIIFLYLLDNETSWMILGSSGIGVCIEFWKIGKAMHVEIDRSGKIPMLRFRDRESYAQNKTKEYDAIAMKYLTYVLLFLVFCFSIYSLKYEKHKSWYSWILSSLTSCVYMFGFIMMCPQLFINYKLKSVAHMPWRQMTYKFLNTIIDDLFAFVIKMPMLHRLSVFRDDVIFLIYLYQRWVYPVDKKRVNEYGFGGEDEPQAPQTLEGSDLAAASQQAGAEAEAETSTEDKKTK

SEQ ID NO: 45848 - protein, 411 aa, Oryza sativa; identical to SEQ ID NO: 30995

SEQ ID NO: 45849 - protein, 160 aa, Oryza sativa
MEPAAMDRIAGRLAAVDGLYYPTTFLLANPPPSAPDRKAALLALLSRDAPLFLERYGGSLSRDELAAFDALAGDYEVGWHLRRLRAASEGGPSASRVRNRRRAYDRLVREGEYFSEEAMREREPYLHHEYLGRFQDPTGRAMARPGERWSETLMRRAARP

SEQ ID NO: 45850 - protein, 69 aa, Oryza sativa
MYDLRLICLQLGGLSDEVSSSSLVISWSLSSSSCFTGSSEMDLFLIRGPLLVCSCKGNEVFVICAIYYK

SEQ ID NO: 45851 - protein, 509 aa, Oryza sativa
MASDAKPDSPPAGVDPPPPKEEAKAEKEGEGEEPQSGGRKRGRRKKGEAEKEKEKPPPATPTIERPSRERKTVERYSELAPRVTPAKKSPAILQGSGSKLKDIPNIQFKLSKRKADENLQSLHVLMYGRKSNVHFLKRNISQFSGFVWTDNQEKQRTRIKEKLDKFNKEKLLDFCEILDIHVSRAATKKEEVSAKLLEFLESPCITRDVVLTDDKKGKKRGRRSKGNGQATAEGASDGKKRRKSRKQSTEAAKENDDEDDEGPADSEDASMGEEDDEDSEAKDNAGSDEEPDEPPAKKKATDDKQTKKAKEKDATAKKASTRPAKGVSKPSQDTEEDDEPEVELESKKVVKKVSKSSKESDVTVDKTTKKASKSKKDEGKDGQNNNSGALNNKARKKDAAKTTNKNKGKGKGSTEAGAAPTTEELHAVVSDILKEVDFNTATLADILRQLGTHFKMDLMDRKSEVKHIIEEVINSMSDDEEGEEDNAEDDKDKNAKEENSKEDADGDEK

SEQ ID NO: 45852 - protein, 239 aa, Oryza sativa; identical to SEQ ID NO: 32983

SEQ ID NO: 45853 - protein, 425 aa, Oryza sativa
MSPKQKSLRSKRMAEASEEDGIDVLPDALLQHILSFLPAEDAVKTCVLSRRWRHLWKLTPILCITNTERWRSPKDFIKLVNHLVLFRGSSPLHKFEIKINSCAHWMIMSGDSNPFHCAIMWVMYALMCQVQVLTIKNMHAYIEMDDGFSLFSRHLTELNLSGLDFRKFVLNFSSCPALEYIYFSASCCFNSVEKILSQSVKYLTFDFPEFSEHHRTHIYAPNLITLRLDDCWGRVPFLESMPSLIAAFVRPHRDSDDLCSNTYSGNCEDEYCHGCYGMVDNAGNDSAKCVLLGGLSEAKKLELIAGPEMRIFRSDLRWCPLFSKLKSLLLNEWCVANNFWALACILEHSPVLLKLTLQISKETKPMIGAVENYSALVKPAAISKHLKVVKVHCKEVDEGVCETVKFLSTLDVVVLIRRMDRSTNR

SEQ ID NO: 45854 - protein, 354 aa, Oryza sativa
MPASDKQLASTVKKVTSRELPKKGADIVNMSQGTSPLPKDKGTATEPGKTVGTKRSDAPSSPGYHNVYVRRKVENDHSKVSSSQEVKGNGRDKTKEQETQQNVQHDQTNKPEVSSSVAVQHDQSNKPDLSSSVAVQHDQTNKPELSSSVAVQHDQSNKPDLSSSVAVQHDQTNKPELPSSVAVQHDQTNKPELPSSVAVQHDQTNKPELPSSVAVQHDQTNKPELPSSVAESGGIVSPKSPEKTNEQIVNKKNEPPVAPGTTVQDDTHKSSNQYWNARFNRLQTYLESCDRSTQEGYMRMLRSLSAADRSMHAIDLEKRAIHLLVEEGKELQRMKALNVLGKVSPNGPSKQAPL

SEQ ID NO: 45855 - protein, 147 aa, Oryza sativa
MGGDWQELAQAAVIGLLFAFLVAKLISTVIAFKEDNLRITRSTPTSPSAADTPAAPAPPPASLDGGHGDTSDGSGSDSDSDWEGVESTELDEEFSAASAFVAASAASGTSVPEQAQLQLYGLYKIATEGPCTAPQPSALKLKARAKW

SEQ ID NO: 45856 - protein, 108 aa, Oryza sativa
MSITLGRKRRHWLLCQHRVCSANVVVSVIEVKLGKLKCINDDCAYIPKLQLRALAHCHGSSQQTVCHQVVDDWLLHPETLAKVPQRGIGHEEDIIFPILFVGSVLSRN

SEQ ID NO: 45857 - protein, 336 aa, Oryza sativa
MAAVASASPLPAAAAPSTRCSPPPAFLPLRAHRPRVGTVATRRVFRAEAMRTQREKEQTEVAVEESFPFRETAPPDEPLVTAEESWVVKLEQSVNIFLTESVITILDGLYRDRNYARFFVLETIARVPYFAFISVLHMYETFGWWRRADYIKVHFAESWNEFHHLLIMEELGGNSLWVDRFLARFAAFFYYFMTVAMYMVSPRMAYHFSECVERHAYSTYDKFIKLHEDELKKLPAPEAALNYYLNEDLYLFDEFQTARVPCSRRPKIDNLYDVFVNIRDDEAEHCKTMKACQTHGNLRSPHSMQKCLETDTECVIPEDDCEGIVDCVKKSLVSKE

SEQ ID NO: 45858 - protein, 752 aa, Oryza sativa
MMEVEKPWELKEDVEIMTEEEEEDDSSNLLQARGRNKKHALINGDEQQQQQEEEEEEEVVEEHKSVFFDPTQVSEHVTEVSGKNEVTRVEQFVAKKEKAHETSSSKGKELETQENANSQETNENSNNSSLENRSPSNGSHEVCNSGETVTVANGKAGLKVITIIDKNQNGLANSNGSLHIANVSMNKTSVHEIEAEKDEDVIKGKVNIEEYDLEKILDEQETHDLFCPNCNSCITQRVILRKRKRTVRQTSPDEPPKKTQIAEPSANTSNQTVPERQGQESPDIFRCLSCFAFFIPTGCGFNIFRIFGRTEVNQEAQVQEAAASGQMSGSDNCASWLFSCFEPGDGPKKTDAGPEKEPLLPDKQDSNNGSASSVEGSTASVHSHGISVQQQESKRPLPAESSSQLQPSNTKKEDFGTVSFSGSSSVEAPSSSSASIINPGQTATGFLQTGETHVVIGQQDIVLQQNVPLPKPGDAAHLDKQKQETPPASHTFPTPGVKIPDANPAKFIPDVVRPMVDKPSRGIVIPPEAVESQTRPEHSSVQIGPDASMPLIDTPAPEQRDDWDILKAIVYGGLVESITSLSVVSAAASSGARTLDIFILGIANLIGGLPIIFHSMAELRSIGDVDEREEQGGHYWLQLGRRSKYRLHVAMAVLSYLLFGLLPPLIYGLSFRGGDVREKKMVAVAAASLGCIALLAMGKAHVARRRSYVKSLLYYLSIGVSASGLSYVAGLLAHFALITHQTPPASSSWASY

SEQ ID NO: 45859 - protein, 88 aa, Oryza sativa; identical to SEQ ID NO: 43342

SEQ ID NO: 45860 - protein, 450 aa, Oryza sativa
MEEAILLLMILLRKFNLKRVERDPTIMHHLTFALSISGQLKSLAVQFEELLPGMLDKREWSYNVALCYLAEEDDSTALNLLKRILKSGDDSDNFKELLLASKACTERSAQTEGASYAQRAIANMQGGCEQMAGVADLLLGVNLSNQARCATSDTERASWQCEALEVLENAENKMHGKDPRAMYSLSLENADQRKLDAAAFYAKKLVKLEAGSELRSWLLLARILSAQKQFADAETIIDAALDQTGKWSQGDLLRTKARIQAAQGQLRNAVETYTKLLAVIQLRTKSLSAGIFLAKGTKDDISLEIETWYDLALLYLRMSQWRDAEVCVSKIRTISPYSALAWHVKGKLYEAKGQPKEALGSYFRALDLDRKHVPSLISTASVLREIGNRPLPSVRCFLTDALQLDRTNHAAWFNLGLLYKEEGGRSAAEAAECFQAAALLEETAPVEPFR

SEQ ID NO: 45861 - protein, 192 aa, Oryza sativa; identical to SEQ ID NO: 30466

SEQ ID NO: 45862 - protein, 657 aa, Oryza sativa; identical to SEQ ID NO: 45745

SEQ ID NO: 45863 - protein, 222 aa, Oryza sativa
MAPTSKLSQGIKKASRSHTYHRRGLWAIKAKHGGAFPKAEKPAAAAAAAAPKFYPADDVKPRQPSTRKPNPTKLRSSITPGTVLILLAGRFMGKRVVFLKQLKSGLLLVTGPFKINGVPIRRVNQPYVIATSTKVDISGVNVEKFDDKYFSRDKKQKAKKTEGELFETEKEATKNLPEFKKEDQKVVDAELIKAIEAVPDLKTYLGARFSLRDGDKPHEMVF

SEQ ID NO: 45864 - protein, 268 aa, Oryza sativa
MKFFAAPEGRAGLGAVVLVAASRCPLFSFFALLVLLLFQPHHQLAASHVAVNQQVSLVPDAAAAKAAGVGNGAVVDVGDEEEEGSGSRWMLIVVTTTRSGGRERRRRNAALAHVEKHYFSGVVHFADAAGVYDAHFFDKIRQTDWPLPRTASPPPTPCSPADALLPSLAATSPVGEGLDGDVTAGEEVNAGLPAPLACLPHPSMAVRLRACGFCNGGREQWRRRVASRQPPSSCRPSPAADALVLSLLAPPKAATHRRPPQLPTQTEE

SEQ ID NO: 45865 - protein, 147 aa, Oryza sativa
MNIERLKQLVDLVGKHRLVLDLSCRKKDGRYAIVTDRWQKFSDVFVDEPTLKHLAAYADEFLVHGVDVEGKRLGIDEELVELLGRYSPIPVTYAGGVSTMDDLERIKRAGNSRVDVTVGSALDIFGGDLPYKDVVLWHKEQNMVSQP

SEQ ID NO: 45866 - protein, 635 aa, Oryza sativa
MDDAGEIHALGGSLRREASSARSGDAAVFFSRSSSRDEDDEEALRWAALEKLPTYDRARTAVLAMPEGELREVNVQRLGPQERHALLQRLAWVGDDHARFLSKFKDRVDRVGIELPTIEVRYENLNVEAEAYVGSRGLPTILNTYANVLEGLANTLHITPNRKQKISILHNVSGIIKPHRMTLLLGPPGAGKTTLLLALAGNVPSGLKVSGQITYNGHTMDEFEPRRSAAYVSQHDLHMGELTVRETVNFSAKCQGIGHRYDLLMELSRREKEENIKPDPEVDIYLKAAATGEQKAEVVTNHILKVLGLDICADTIVGNNMLRGISGGQKKRVTTAEMIVTPGRALFMDEISTGLDSSTTYNIVDSIRQTIHIVGGTAVIALLQPAPETYELFDDIILLSDGQVVYNGPREHVLEFFESVGFKCPERKGVQNSSSVQPVVSVERTVFYRERAAHMYSPLPYALGQVAIELPYILVQSLIYGVLVYAMIGFEWTAAKFFWYLFFMYFTLSYYTFYGMMSVGLTPSYNVASVVSTAFYAIWNLFSGFIIPRTRIPIWWRWYYWVCPVAWTLYGLVTSQFGDVTDTFDNGVRISDFVESYFGYHRDFLWVVAVMVVSFAVLFAFLFGLSIKIFNFQKR

SEQ ID NO: 45867 - protein, 88 aa, Oryza sativa
MLLTDICFSGHLWMLILFVSHWYIFQDSSFYNNLSFKFYFIQIGKPSIFQIDRGGGNIEKICTSSFFVQLKWCLMTAHVSTPTIRNFI

SEQ ID NO: 45868 - protein, 350 aa, Oryza sativa
MLAHTLSKMEFSVSSEAFIRAPGTRSEIGTVIQGVLLGLFLLPLLYKSSLQVLAYCRKLESQRTQTVEECTQKRIDCGVFYVSLLVALLLLVPSWTRLIQGFEVHPFVWVFNYIFTDSRERLALCAYWIFVIYVSIRRFYSISKQSKTERILLRKYYHLVAVLIFSPAVIFQPDFLDLAFGAAFAVFLILEMVRVWEIYPLGHIVHQFMSAFTDHRDSEILIVSHFSLLLGCALPKWMSSGFNDRPLTPFAGILSLGIGDTMASMIGYKYGVLRWSKTGKKTIEGTAAGITSVLAACSILLSLLASSGYILSQHWISLLVAVTLSGLLEAYTAQLDNAFIPLVFYSLLCL

SEQ ID NO: 45869 - protein, 514 aa, Oryza sativa
MRPLLAFAAVCALLVAAAAPAAAEEEKANKFRQREATDDMLGYPHLDEDALLKTKCPKHVELRWQTEVSSSIYATPLIADINSDGKLEVVVPSFVHYLEVLEGSDGDKLPGWPAFHQSNVHSSPLLYDIDKDGTREIVLATYNGVVNFFRVSGYMMMDKLEVPRRKVHKDWYVGLNTDPVDRSHPDVHDSSIAKKAASEESHPNIQDKPVVNESSKESQSRSTNDSTTRGVDSMKHASKEEPVESKPNSTRGQENMDVLNNLNSTDAGNNSSLSTTTENASHVQRRLLQTDEKSNQAGSSETDASDTGTAKAATVENSEPLEADADASFNLFRDVEDLPDEYNYDYGDYVDETMWGDEDWKEQQHEKAEDYVSIDAHILSTPVIADIDRDGIQEMVISVSYFFDHEYYDKPEHLKELGGIDIGKYIASSIVVFNLDTRQVKWTAELDLSTDSGNFTAHAYSSPTVVDLDGDGNLDILVGTSFGLFYVIDHRGKVRNKFPLEMAEIHAPVIAADQ

SEQ ID NO: 45870 - protein, 124 aa, Oryza sativa
MSFFEEWEVRKVNSNPIVLILCDHSTYTFNLIHTIYSHRYCFSGCSWMLILRIPYRYSFHDGPFYTNLAFQFYYIQINEPSILQINRGNIKYTSSCFATRIELQVCISMCMCQFCAAYKIQSRS

SEQ ID NO: 45871 - protein, 73 aa, Oryza sativa
MKVAAVVDTAAWELAAGDTARSDGGGAQIHAMAGRIWGSGSRQRGMKVAVMDDVAARELETAVGGDCGCRRRQ

SEQ ID NO: 45872 - protein, 463 aa, Oryza sativa
MESEVCWLLCAALAAAMACYYLTGTMRRRSRRLPPGPTPLPVIGNVLSLRGNMHHALARLAGEHGPVMALKLGLVTTVVVSSAGAAREAFTKHDRRLAARAVPDTTRARGFASRSMIWLPSSDPRWKTLRGVAATHVFSPRSLAAARGVRERKVRDIVGHLAGHAGEVVDVGKVVYGGVLNLRRLDLQGWRRWAEKRYGKVFGIFDSVINSRLADASTGKHADAGAGDFLDSLLDLMSAGTIARDDVTSIMYDLFGAGTDTIAITVEWAMAELLRNPSVMAKARAEMNHVLAGKVKATEMEENDVEKLPYLQAVVKEVMRLHPAAPILVPHRAEEDDAEIGGYAVPKGSTVIFNVWAIMRDPVAWERPEEFMPERFLDMAEEVDFRGKDHKFMPFGTGRRLCPGLSMAKRVVPFILASLLHAFEWRLPAGVTAEALDLSEKFTTVNVLVTPIKAIPILASDQI

SEQ ID NO: 45873 - protein, 232 aa, Oryza sativa
MERAAAAAPVVVRHGGVVLPPGFRFHPTDEELVVQYLRRKAFGLPLPAAVIPDLHNLFKLDPWDIPGASSDGDKYFFAVRPPAARGRRQHVTASGGCWKPAGGRDKPVVVARCGGSHLVGVKKGMVFVPRQGRKAPAAAAAAAGGGCWVMHEYSLALPMHKKGCLAEAEEWVVCRIFQRSSSGSRSPRRPDNDVRRTMPAVAELGRSPSPSSSSSQSSCVTSSSDQGEVSSG

SEQ ID NO: 45874 - protein, 519 aa, Oryza sativa
MDNNAEAANDGAGAGERRRLPDFQQSVRLKYVKLGYHYLITNGVYLLLTPLIALVAVHLSTLTAGDVAGLWSHLRFNLVSVVACTTLLVFLSTVRFLTRPRPVYLVDFACYKPPPERRCSRDAFMRCSRLAGCFTAASLDFQRRIVERSGLGDDTYLPAAVLREPPNPSMAEARREAEAVMFGAVDDLLAKTGVSAKEIGVLVVNCSLFNPTPSLSAMVVNHYKLRGNIVSYNLGGMGCSAGLLAIDLAKDLLQVHRNSYALVISMENITLNWYSGNDRSMLVSNCLFRMGGAAILLSNRWSERRRSKYELVHTVRTHKGGDDKCFGCVTQEEDGEGNVGVALSKDLMAVAGDALKTNITTLGPLVLPLSEQLLFMATLVAKKLLKMKNVKPYIPDFKLAFEHFCVHAGGRAVLDEIEKNLSLGEWQMEPSRMTLYRFGNTSSSSLWYELAYSEAKGRVRRRDRVWQIAFGSGFKCNSAVWRALRSVDPEEEALKKNPWMDEIDRFPVVVPRVSRISTD

SEQ ID NO: 45875 - protein, 511 aa, Oryza sativa
MAVGTVPDSQDLPRRYGGRVTTFVVLSCITAGMGGVIFGYDIGVSGGVTSMDGFLSMFFPEVYRRMKGTSVSNYCKFDSELLTAFTSSLYIAGLLTTFLASSVTARCGRRPSMVIAGSAILAGSAIGGTAVNVSMVILGRVLLGVGLGFGNQAVPLYLSEMAPPLHRGAFSNGFQLCVGIGAVTARLTNFFTQKIRQGWGWRVSLAVAAVPGGLLTLGALFLPETPNSLLQQGRDKRRVRVLLTRIRGVSDMEDEPEDIVAANSDKANSSRGLQMIVTQRQYRPQLVMAIMIPFFQQVTGINAISFYAPVLLRTIGMGESASLLSVVVTGLVGTSSTFVSMFLVDRYGRRTLFLVGGAQMLVSQLMIGGIMATQLGDHGQVSKTCALVLIFLIAVYVAGFAWSWGPLGWLVPSEVFPLEVRSAGQSITVAVNFLMTTAVAQLFLATLCRMRAGIFFFFAAWLVAMTAFVYLLLPETKGLPIEQVRRLWAQHWFWRRFVDTASNGEQAKLDC

SEQ ID NO: 45876 - protein, 198 aa, Oryza sativa
MGSGEKPAAEAAVTEAPPQEGGGAPGQETSRIINVPNNKVGVLIGKSGETIRNLQMNSGAKIQITKDAEADANAPTRSVELVGTLESIDKAERLIKNVIAEADAGGSPALIARGFGSGQSGSEQFEMLAPDNKVGLIIGKGGETIKTLQTRSGARIQLIPQHPPEGVTLTERTVRITGNKKQIEAAKDMIKQAMSQVM

SEQ ID NO: 45877 - protein, 395 aa, Oryza sativa; identical to SEQ ID NO: 32342

SEQ ID NO: 45878 - protein, 377 aa, Oryza sativa
MMAGTLQVAGGCLAPLLPSRRAAAAVRPPRASGASASAAAAAAAVEEDGKVRLGGSDVAVTKLGIGAWSWGDTTYWNEFQWDDRKLKAAKGAFDASVDCGITFFDTAEVYGAGISGAINSESLLGRFIKERQQKEQVEVAIATKFAALPWRLGRGSVISALKDSLSRLGVSSVELYQLHWPGIWGNEGYLDGLGDAYEQGLVKAVGVSNYSEKRLRDAYERLKKRGVPLASNQVNYSLIYRNPEENGVKAACDELGITLIAYSPIAQGVLTGKYTPNNPPTGPRGRIYTPEFLTKLQPLINRIKEIGGSYEKTPTQVVLNWLICQGNVVPIPGAKNAEQAREFAGALGWSLTDQEVEELRSMAREIKPVIGFPVEKL

SEQ ID NO: 45879 - protein, 459 aa, Oryza sativa
MQDGHPLAFLSKSLGPRNRGLSTYEKECLAILLAVDHWRSYLQFGEFIIRTDQRSLIHLDDQRLVTSWQQRALTKLLGLSYRLVYKKGLENKAADVLSRCRSNEVYQLSTVSSCVPSWLEEVQKGYDSDICTSQLLAKVLLSPSQFPSYSLKNGILYYMRLIWLGANSELQLKILSAFHCSAVGGHSGIQVTYSRVRRLFAWPGLKQAVRQFVSNCSICKQAKAERVRYPGLLQPLPVPEHAWVTVSLDFIEGLPSSAGFDCILVVVDKFSKYAHFLALVHPFTAFDVALAYLNNVYKLYGLPHHIISDRVRIFTSALWTELFQLTDTRLKLSTAYHLQTDGQTERVNQCLETFLRCFVHACPKKWFRWWALAEFWYNTAYHSALERSPFEVLYGHPPRHFGVSSTAECAVPDLDKWLKERAVISSLLRQHLLRAQQRMKFQVDKKRSDREFATGDWVF

SEQ ID NO: 45880 - protein, 403 aa, Oryza sativa
MVLELLTMAAHRVGRCMLLQPPRLATCVLFLLLPLLLPCSASSSVITHLPGFHGRLPFHLETGYVGVDEETGTELFYYFVESERSPSTGPVILWLTGGPGCSGFSGVVFEVGPMKYVLEPYNGSLPRLVYNQYSWTQMASILFLDTPVGSGFSYAHDPKGYNVGDISSSLQVVTFLKKWFNDHPRYLSNHFYVGGSSYAGKVIPIIMKFISEGIEQRQQPLVNLKLQGYIVGNPITGSKIDDNFKIPYSHGVGIISDQLYEAAVANCNGDYVTTTNELCAKALNAIDNLMSEVDYGNILDDKCVRATPKPINEVSRSRSLQEDYIRLSEPTVRPTINCFSYRYYLSFLWMNNNLTREALKIKKGTVGEWIRCKTGLPYVQDVASSIKYHFDLTTGGYRALVFR

SEQ ID NO: 45881 - protein, 55 aa, Oryza sativa
MGEDAPCGELLPVLPSSSAPPSQPRGHGFLAGELLPVLPSSSSPADYECYVHYTE

SEQ ID NO: 45882 - protein, 211 aa, Oryza sativa
MKDPFEAAVEEQESPPESPAANEEDAAGAPEGYDGASGSRGPPLRLPPSRAAPSGSGGAAAAAARGKVVRVQKEQQEEEDDEEDHMEVDLDKLPSGTSDPDKLAKMNAILSQFTEDQMNRYESFRRSGFQKSNMKKLLASITGSQKISLPTTIVVSGIAKMFVGELVETARIVMTERKDSGPVRPCHIREAYRRLKLEGKIPRRTVPRLFR

SEQ ID NO: 45883 - protein, 437 aa, Oryza sativa
MHNRVMALMVAHVIGDIITGDTAEPEVIVSTGPSVGGLLDSLTGSIGISARPKPIAAPVAAPTASISSPVGAPQSESLKGGMRPFDKDLLRNFILGAMPFGTPQDLNYANVTSVRTTGFSADPLPTDQKQPAWKPYLYKGRQRTLFSSLETLNAALYDRDDVQDFLSVSGQVTCRAELEGLPDVSLPLSGLKAARVEVSSFHHCVQASEPTNDKQTLIFQPPLGNFVLMHYQASCNMDPPVKGFYQLSMVSENEGAFLFKLRLMEGYKSPFLMEFCMVTMPFPRRRVASYDGNPSVGTVSMTEHSIEWRIVSSGRGLSGRSIEATFSGTVRFHPITIQRVNSSFRSVPSTAFVEDSVSEQDNTKNGANLDDYLMEKMNKDLQAVNLEEPLSWQAYNYAKVSFKIVGGTLSGLTIDPKSVSYSLTFLFHSDGLCFDLN

SEQ ID NO: 45884 - protein, 424 aa, Oryza sativa
MPRTARKARVLLLSSPPPPPSPPVMLRRGGVVLLLVVVVLGLLAARCDGKKVSSFVGTYGVNYGRIADNLPPPTEVVKLLRMARIKNVKIYDADHTVLDAFRGSGLNLVIAVTNGEVKDIAASPAKAMDWLNENVQPYYPSTRIVGITVGNEVLGGADAGLAEALIGAVVNIHDALKMLGLATKIELTTPHSEAVFANSYPPSACVFRDDLMVYLKPLLDFFSKTGAPFYVNAYPFLAYMSDPAHIDVNYALFKPNAGIYDAKTRLRYDNMFEAQVDAAYFALEAAGYPEMEVRVAETGWASAGDATEAGADPANARAYNFNLRKRLFLRKGTPYRPGRVAKAYIFALFNENLKPGPTTERHYGLFKPDGSVSIDLGFKGLVPSSSLPSSSIISFKRARERGWMALVQYSATLLSCTFIFLVLS

SEQ ID NO: 45885 - protein, 105 aa, Oryza sativa
MPLWGTGSSAASAAAEGSAAGGDGAARSSSGGAAVIRSLLPTRRRLRLDPPSKLFFPYEPGKQVRSAVKIKNISKSHVAFKFQTTAPKSCFMGLQVVYLLQERAS

SEQ ID NO: 45886 - protein, 156 aa, Oryza sativa
MAVHPLLRLLLLRPPPPPPPPPPNSPPFATTRRASSASAAAAAALLLLAASPRPRPARADPGGGGGEDIDEARVVRLFQEASPSVVFIKDLVVGRTPGRGGGQAVEAEDGEEGGATVEGTGSGFVWDTAGHIVTNYHVVAKLAGDGSAFHRCKCFL

SEQ ID NO: 45887 - protein, 266 aa, Oryza sativa
MMASRVMASSSPSHTASDLARFAAGRGGGGSAGLGSMNVEEILRGIYADMPTPALPLVGGDRPMSPLPAPDVAAAPRTAEEVWKEITGAGVAAAAGGVVPPAAAAAAAPAVVAGAGAGTGAEMTLEDFLAREGAVKEDEAVVTDPSAAKGQVVMGFLNGAEVTGGVTGGRSRKRHLMDPMDRAAMQRQKRMIKNRESAARSRERKQAYIAELESLVTQLEEENAKMFKEQEEQHQKRLKELKEMVVPVIIRKTSARDLRRTNSMEW

SEQ ID NO: 45888 - protein, 584 aa, Oryza sativa
MRLPHLGPTNTLPPYSTVGPSKAWLLQFTADLLHPDADDYSVRRSLEAYLLWLFGWVMFTSTHGHAVDFRLVHYARSIADAQPQDVPQWSWGSAVLAATYRALCEACTKTDAGAIIAGCPMLLQLWAAERFAIGRPVVDSAPYGVGRSAQWPEDGPTMGTYWCRRGRRYAHVQVRRGYPDFVFEFDRLQPSDVIWEPYTEEAVAARAPLGLSSLCTRDQAYWLTILPMVFDIFVEPHCPQRVMRQFGLRQVFPGNVQPTVLPADHSLTRRGQLAGALWAPRVQQYVDDWVLATEEVINELFPHTEENYRDYLRWYLPRTRARVTFTPDAPEPHVAAVTDAYPTHRDRDYFVAADDARDISADITAVQVRLNRGLHLTDVEQRVTFSCRSAVDVVPPAGPVQPRPRAPTVGAGPRPTAPVSHGPRLPSSAPSFGAVRPTAPVSHGPRLPSSAFAGTTGASASSAGAFATSSGAFASSSSHGASIPRPHAGFAAGIFGTRASSSHAGRTGPTSQFYDDDLHGAHHHDVLGSSQLGGAPEAHTQEQPEVTPVQAGRVGRAVPPDRLTYSQGHIRAQGRRDRGKRPRQ

SEQ ID NO: 45889 - protein, 495 aa, Oryza sativa
MAAAAPAGAQNRCVFVGNIPYDATEEQLVQICEEVGPVVSFRLVIDKETGKPKGYGFCEYKDEETALSARRNLQGYEINGRQLRVDFAENGRNADRNREKGRGGPGMASSVDTQKQLAGTPVVGDTGLHQPVGLPSAIHAASVMAGILGGSQTANVQNGLPVQYGLGNDPLTHYLARMSKHQLYEIMSELKSLTSQNKDVANKLLQGIPQLSKALFQSQIMLGMVTPQMMQMAKSQQPSSSLAQSSSHISEPFPQPDAMISSVPRPSASLPNPNVLQDPSAQLHNFPQYPHSSQPAGTIFPHGSQSGVGIHPPIVSQLLGASSSVPPLPLATSGSLISQVQPPFMPHHPRPPAMPAGMQQLPLTHPHVPQVPAIPDIAQKEMRFPEQANRSTEFAHHPKLRKLEDGTSTPGIVNNNPAVYPAPSQGMLPGGPSGSYNSAAVSFQQPENEVPQLTPDVESALLQQVLQLTPEQLSSLPVEQQQQVIQLQKMLSAGK

SEQ ID NO: 45890 - protein, 359 aa, Oryza sativa
MVETSTSLVKLEQDGSLFLPPGFRFHPTDAEVILSYLLQKFLNPSFTSLPIGEVDLNKCEPWDLPSKAKMGEKEWYFFSHKDMKYPTGMRTNRATKEGYWKATGKDREIFNLQPTSYGGSSNNKNNKQLVGMKKTLVFYMGRAPKGTKTNWVMHEFRLHANLHNDNPNLRLNLKDEWVVCKVFHKKGDDREAINKQQAQAAAVDQYSAGTPNNGSSVEAGDDDDDLFQLDSIIDPSIYFSNSSAANILSAPPNMSNSVVAANYGASTTTTGTASAGSFQQQPNYCSLINKSISSSNVSSWNNMPPPPPVAEGGVHGIGSSYSLQHQAAMVKALRDVIRLPNPLGMPQYKLDDAYLWDSS

SEQ ID NO: 45891 - protein, 306 aa, Oryza sativa
MDNARLAIANIGKLMFAQFSELVNEFYNNGLTSNLAGSRNPSLDYGFKGTEIAMASYCSELQYLANPITNHVQSAEQHNQDVNSLGLVSARKTLEAVDILKLMTSTYIVALCQAVDLRHLEENIKSSVKNCVTQVAKKVLTMNPTGDLSSARFSEKNLLTAIDREAVFSYADDPCSANYPLMQKLRAVLVEHALTSGDAEPEASVFSKITKFEEELRSALPREIEAARVAVANGTAPVANRIVESRSFPLYRFVREELGCVFLTGEKLKSPGGECNKVFLGISQGKLIDPMLDCLKEWNGEPLPIN

SEQ ID NO: 45892 - protein, 149 aa, Oryza sativa
MADHRKITSDEEEAAVKPTRSFRYEDYSTRRVFLRSYPLQWDWASPAPGEKEKQQQQQQVQGVVAGGDGEEDDDEYGGGGGDERGGRRWRRQVAVAVVEWGEEKLLLLRRVKKRLALYLIGCHYAGHRAALPFKSSSASCTAAMLASSR

SEQ ID NO: 45893 - protein, 506 aa, Oryza sativa
MEFFTEYGEASQYQIQEVIGKGSYGVVAAAVDTRTGERVAIKKINDVFEHVSDATRILREIKLLRLLRHPDIVEIKHIMLPPSRREFQDIYVVFELMESDLHQVIRANDDLTPEHYQFFLYQLLRALKYIHAANVFHRDLKPKNILANSDCKLKICDFGLARASFNDAPSAIFWTDYVATRWYRAPELCGSFFSKYTPAIDIWSIGCIFAELLTGRPLFPGKNVVHQLDIITDLLGTPSSETLSRIRNEKARRYLSTMRKKHAVPFSQKFRNTDPLALRLLERLLAFDPKDRSSAEEALADPYFASLANVEREPSRHPISKLEFEFERRKLTKDDVRELIYREILEYHPQMLQEYMKGGEQISFLYPSGVDRFKRQFAHLEENYSKGERGSPLQRKHASLPRERVGVSKDGYNQQNTNDQERSADSVARTTVSPPMSQDAQQHGSAGQNGVTSTDLSSRSYLKSASISASKCVAVKDNKEPEDDYISEEMEGSVDGLSEQVSRMHS

SEQ ID NO: 45894 - protein, 485 aa, Oryza sativa
MDFGYVGVGQGSSSSSSSASCRAADVAAWGSSTQQQQKRQRCQGSSDDQVGLSTSNSLQMSEPEPRDFDNGENEEEDYYLDEDDCIYDDGDGYDYEFDGGDYFNQRLADKFDDLDLPPGVEATVPWLQKIITNEEQSSSKLTVEDESANKSANKSQLFKQFDTVKNFSDHHYAATSGDVTKRDWVKRIQHDWKLLEKDLPASIYVRVAEDRMDLLRAAIIGPKGTPYHDGLFFFDIQFSNSYPANPPSVYYHSGGLRINPNLYNNGKVCLSLLGTWAGSGCETWNPSQSTMLQVLVSIQALILNEKPYFNEPGYASYANSVSGERIAMEYNDNTFLHSCRTMLYSLRRPPEHFADLVTSHFRERGHTILAACRYYMEGHKVGSVVPEEKEPEYGDAGASTSSASARAAAAALKPRPDKVDSVSRRPTFNDNLKTLFEELLMEFNVKGADTAKFLAEKVKKSSGATTTAPVGGARYAAEVVDEWMD

SEQ ID NO: 45895 - protein, 587 aa, Oryza sativa
MLQRNFREGGGEDGAGEMEGCDAEKKPRMPHMFCKTLTASDTSTHGGFSVPRRAAEDCFPPLDYKTVRPSQELIAVDLHGTQWKFRHIYRGQPRRHLLTIGWSSFVNRKKLVSGDAVLFLRGDDGRLRLGVRRAVQLRNEALFEPVNSSDSKLRILSSVASSLENKSVFHICFNPRSGASEFIVPYWRLLKSLNHPFSIGMRFRVCYESEDANERSAGLISGISEVDPIRWPGSRWKCLLVRWDDSTDSSHQNRVSPWEIERVGGSVSVTHSLSSGSKRTKLHFPQGSLDTPFLNGNGHPDSMGTENFHRVLQGQEFRGSRSHGVVCSESPGVPNFQSPDNRRFSADMRGYMMPASGPPQRNTEFTYQPIGFSESLGFPEVLQGQEMSQVVPLFRGATFGARTQNDRVVSANSVHRSAAQSGLLASTLGHPISQFTLSSSKVSSPSSVLMFNQATAPNHETVSGTNNKGMHVSQFASQEMLSETVTWPGTQRQTPSEITSNQFALARIPAPPSGAESGLPKRDAGRSSCRLFGFSLTGNMLGEDGEGLDDGAIEAGCENPPVLELFGHSHSTPGALHALCAAAPLGM

SEQ ID NO: 45896 - protein, 503 aa, Oryza sativa
MCIIFAGDDGHSEQLALLNNDHEVSEVCVEEISADNTGRSFLIRISESKVFYYWCAEKSKKHGMDLLAKMKNLLQGRPTLSDLTGISDSRLDAFATHLHAYLVASSIGDVKSLGSLNDFLGASSPQDQYLQPSSVVSKSSRFCTSAANAAKASSVYQTSLSPRCGAFKDGVPRMSCAKIAGRDKLKRRGDWLSSSTGPDDANLLTPKIVSSDSASEKCGGDCSENSANSPPLDLPLSFPLLPSLFPLATQYPLPKDSTEQPFKPYYCWCPPCPSSLQYSVTPLHMPVTSVEPLPLPPLSSLLSNDQPPTSTVSAKMDTTDLPSLNLPSILRDPLLHLPLPTSPLVSLHGSQVPTFTPLMSDPIVHVPVIDVCSSGQAYLVSCGPSMSATVTLLPSLKPLIPETESLVERSARETLMRLIASTPSASNPQLVNILPAVLTDVPEMNVRKHLGVHPGDRLSSSCSVDVIGPGFAVTEDDASVGDGAHATFAEYDDIGDQQHFQSM

SEQ ID NO: 45897 - protein, 84 aa, Oryza sativa
MYFRLVVIGTFAKTVNPGPVSGLPRIREEFPSRSRDFWGTTNISRLQGAQHPRARSINDQLWTLMIALGFNAVVSVRVSNEIRY

SEQ ID NO: 45898 - protein, 305 aa, Oryza sativa; identical to SEQ ID NO: 30193

SEQ ID NO: 45899 - protein, 342 aa, Oryza sativa
MSTRRHLAVFTTASLPWMTGTAINPLFRAAYLAKDGDREVTLVIPWLSLRDQELVYPNKIVFGSPLEHEAYVRRWIEERISFRPSFSIKFYPAKFSKELRSILPVGDITECIPDEVADVAVLEEPEHLNWYHHGRKWKNKFRRVIGVVHTNYIAYVKREKNGQAIACFMKYMNTWVTRIYCHKIIRLSGATQDLPRSVVCNVHGVNPKFLEVGKLKLKQLRNGEIAFTKGAYYIGKMVWSKGYRELLDLLSKYQSKLVGLEVDLYGSGEDSDEVRKSAELLSLAVKVHPGRDHADPLFHDYKVFINPSTTDVVCTTTAEALANGKDCHMCQSPFKRVLQAVP

SEQ ID NO: 45900 - protein, 256 aa, Oryza sativa
MQQQQHPAPGAEFVADRDAARAEVERALGGYSFRDGGALLLEDALTHSVHPRDEAGGRARHQRLEFLGDAALGLAFATIFYRDDPGLDQGDLTVLRSANVSTQKLARVAVRRRLYPLLRRYNCAPQDHEVSRFTKSVEGPYSGDPIEGPRVLADIVEAIVGAVYLDSKLDLEVLQKVAKLLCEPIITKKALLEDPESMLNELGGEHREDLEIKILAWRKVANVVDDGREQAITTSGLGNGSEDEVGKLRTIRIEEA

SEQ ID NO: 45901 - protein, 232 aa, Oryza sativa
MLYHLDLPQALEDEYAGWLSPRIVEDFTAYADVCFREFGDRVSHWTILAEPNVAALGGYDTGEFAPGRCSDPFGVTKCTVGNSSVEPYVAAHNMILTHAAVVRLYREKYQTLQKGIVGINVLSLWSYPLTDSTADLQAAQRYKDFTYGWILHPLVFGDYPQVMKKAIGSRLPSFSKVQTELVKGTLDFIGVNHYFSLYVSDLPLAKGVRDFIADRSVSCRASKTDPSSGQVS

SEQ ID NO: 45902 - protein, 208 aa, Oryza sativa
MKAHQLWQLPIKDMKSAPLPRGRTSPKKHLCILVVAFVSIVTLWAYLYPPQHYTSPMRDWLPAEPVRELTDQERASQVVFKQILSTPPVKSKRSKVAFMFLTPGTLPFERLWEKFFEGHEGRYTIYVHASREKPEHASPLFIDRDIRSEKVVWGKISMVDAERRLLANALEDVDNQHFVLLSDSCVPLHNFDYVYNYLIGTNISFIDS

SEQ ID NO: 45903 - protein, 271 aa, Oryza sativa; identical to SEQ ID NO: 37026

SEQ ID NO: 45904 - protein, 311 aa, Oryza sativa
MEDVENKLKDYEIVREGEAEIIINKKIAANEVFYNPVQVHNRDMSVALLRTFIAKREEEHKAMMDKRDKAHNKVSQSKSSGPNGENGSTGQHDEMDVDAEKETNKVADETEDLSTEATKTPSREVARELKAPVVLEALAASGLRSIRYAREIDVLEKVVALDIDKACIEACKRNIKFNGASAMSKIEPHLTDARVYMLTHPKEFDVVDIDPYGAPSIFLDSAVQAVADGGLLMCTATDMAVLCGPNGEVCHSKYGSYPTKGKYNHEMALRILLASIESHANRYKRYIVPVLSVSWISTSVFLSEYLLLQTK

SEQ ID NO: 45905 - protein, 688 aa, Oryza sativa
MDSPWSPAYISPGHYGVHDPRDFPISPRFQVGAEDFDERIPDDFVRHSPKYRHYEVHSPQHVDNLVWLPPGAVIQQNAGFPGNLGRPGNFLDGSSMYDHCRSPFHKGQGDPRYVDPRWRPIQHFDQTSMTNEYSGHPTNSCPDCNRPGERFVLNQDVRLENGVYVKEQTGGHPPPMFYNESHSHDRAWHAHANQSHQRYEDPRLHMPGSARAMEPYIVDNSSVTSLSRSSHESPHYFHGSSEHVSDTYHNQQVGVGGPYVQTPGFEESTGQHYSHSSTYGADPFYQMQQNLPPLQSLRRRANSPVHTGSPYESPHLPIPNGNFVRNTGDVSPRIPGMPAYDRIPNPWPSPNGSIPYRVVGHDIPAVVENRSNPNSGQYVQPLFAPESVQNQPGAPLMEIHPERACGGSVLSSQVDGRVAALPLTDQLSRMDINPLKKLEGPEHEKFTRNANETTSLHAMNDPSALTHHIGVVPEVDPKQRKPVEYETVTSKVHEGGATALQECGDISEDRLNFLPELAASVKKAALEDSEEKEKAQQDAGPTLLPTCDEEGNGKKLEETPAGNTGTDQDSDVHGSGEQQKSSGIEATTAEAEALSKGLQTIKNDDLEEIRELGSGTYGAVYHGKWRGCDVAIIGGIVNNSLRPQIPSWCDPEWKSLMENCWASEPADRPSFTEISQRLRKMAAAMNVK

SEQ ID NO: 45906 - protein, 353 aa, Oryza sativa
MTCRMAAGKQKKRIIRSTNSDQNRTWKKSKVESSNCHISLKSQIALKWDDYQKRVVPQKEQVGILWSDLAPFIDSRQKHDSGLADVTYIPPETFSLENLRSVLSYKVWDTCLTEADRKFLIQFLPTEIDAEENVHLLLKGQNYHFGNPSLSWSSSLCYGDTHPDALLNKEKQIRADEKAYRVNLNNYHSNMVESLKKWKKRWLSSDDPEIMFRDNNLAKHKQGDTRPKVTSSEMPLKVAQSSDVSKFMSYIEISRTQHNLVKSMKQSGDGIKTKHLTRVIGNLDKFHVKPYGTLIDDEQRRLREHWLNISCNDIPAAFEVLKNNRVTTEKLRNLLGLELGEKNVSIMRKVRCD

SEQ ID NO: 45907 - protein, 675 aa, Oryza sativa
MATYYSSPGNERDSQAMYPADSGNSSYPVPSAIGNMLYPGNGSSGPYTEFSGIIQHQQNFMELPGHPTAISQDSSSREPNMVASYMDQRSFGPAKDMRNEMLMHLMDGAHNAGADLIHNDTHSSAQIEFGLLNNHNSMSVAPAPGQGLSLSLNTHILAPSYPYWSAKTELLTPHSYHGDDNRMKNMQSEASQAIRNSKYLKAAQELLDEVVSVWKSIKQKAQKDQAEAGKSDNKEAEGGSKGEGVSSNPQESTANAAPEISAAEKQELQNKMAKLMAMLDEVDRKYKHYYHQMQIVVSSFDMVAGSGAAKPYTAVALQTISKHFRCLKDAINDQINVIRKKLGEEESSSGKEGKLTRLRYIDQQLRQQRAFQQYGLLQQNAWRPQRGLPENSVSILRAWLFEHFLHPYPKDSEKLMLARQTGLTRSQISNWFINARVRLWKPMIEDMYKEEIGEADLDSNSSSDNVPRSKDKIATSEDKEDLKSSMSQTYQPSQLGESKANIGMMSLGGAPAGFHNEGNQDDSFMNLMLKDQRPGEAEGSLLHDAVAHHSDENARFMAYHLSGLGRYGNSNVSLTLGLQHPDNRLSVQNTHQPGFAGAGEEIYNSTASLGVAAASSSDYESTNQIDQRQRSSCRIEAAVWLPQAQGLGSCIFFVRVNAPCCCHVGPGTMASLWVR

SEQ ID NO: 45908 - protein, 182 aa, Oryza sativa
MAGGGTRSVPVAATCAPGRRTPSHLCLLLRLIYQLGFRGVVIRVAEENGGAACAWPSSAGWLRTSSRCASSRWAHLPIQRAVYCWPAPCTSQEGHGFATMNSSVQISISAHPTKQPYPPTAPTRWLELNYERTKAKVFHELVFIYLVDSGYQFHYSGANLRIFIAPDKIIAPLDKLPSKEFD

SEQ ID NO: 45909 - protein, 258 aa, Oryza sativa
MELVSSSRSVLPRCGGGGVAGVAAAPFRTASASSRRKGTSGFVCALGCDGEGKKSVAEGTVRRRAALALLLASPAMSVAFSAHGKTKSRNPYDERRLLQQNKKIQEANRAPDDFPNFIREGFEVKVVTSDNYITRDSGLLYEDIKVGTGNSPKDGQQVIFHYVGYNESGRRIDSTYIQGSPAKIRLGNKTLVPGFEEGIRDMKPGGKRRIIIPPELGPPVGPSTFFSAKQFEVFDIELLAVQDCQRRTIAFYSDVVCS

SEQ ID NO: 45910 - protein, 293 aa, Oryza sativa; identical to SEQ ID NO: 30983

SEQ ID NO: 45911 - protein, 107 aa, Oryza sativa
MGLLDQLWDETVAGPRPDSGLGKLRNYYAQGGQLEEASPETQDGHRRRAGGRRRRRAEKPHRLRLGGHQFVGPMNYSAIQRGEKVLKNLKKQNNQSSRGISMTKEAS

SEQ ID NO: 45912 - protein, 195 aa, Oryza sativa; identical to SEQ ID NO: 43488

SEQ ID NO: 45913 - protein, 301 aa, Oryza sativa
MCEIHVVGTLLDPCYSDSKSKHQKGRYCGKAVDFIAEPHAMADSGHSDDQGSNPRKRNRGSTPKSSSTKFDDDDDITPSKKRNKALEYDTDEDEDDADPMKSDSEEDDYDSEKEKAKKNSSDAKDTASKKKAATGSSHKTGTPRTVSKSSSKTPSSKVSKEKESPEDSAKVFYRKKKSVTPKRPSSSEKEIKDKKSSGKKVTKGKGESAEVGLPSKDELRKTITEILKKVDFNTATFSDILKKLEDRYKIDLTPRKSAIKIMIQEELTRLSKEDDDEDEDEDGNEDAEKKKPQHQAKEVVA

SEQ ID NO: 45914 - protein, 170 aa, Oryza sativa
MGGSKDEQQDRGLFSNLMHGVAGGGGGHGYPYPPQQGYYPPPPTAYPPPPPAGYGGGYGYPPAGYPGSSAPFQHGNHGGGNMGMLAAGAAAAAAAYGAHKLSHGHGHGGYGYGGHHGGLFGGHHGHHGGLFGGHHGHHGGGLFGGHHGHHGGLFGGHHGFGGHHGHHGHH

SEQ ID NO: 45915 - protein, 487 aa, Oryza sativa
MKPEDYQYFGTLLNEEEGEQLSPEEQKERKIMKLLLKVKNGTPPQRKTALRQLTDKAREFGAGPLFNKILPLLMQPTLEDQERHLLVKVIDRVLYKLDELVRPFVHKILVVIEPLLIDEDYYARVEGREIISNLSKAAGLATMIAAMRPDIDNIDEYVRNTTARAFSVVASALGIPALLPFLKAVCQSKKSWQARHTGIKIVQQIAILMGCAVLPHLESVVEIIEHGLSDENQKVRTITALSLAALAEAAAPYGIESFDTVLKPLWKGIRSNRGKVLAAFLKAIGFIIPLMDALYASYYTKEVMQILIREFQSPDEEMKKIVLKVVKQCVSTEGVEADYIWNDILPEFFHHFWVRRMALDRRNYKQLVETTVEMANKVGVADIVGRIVEDLKDESEPYRRMVMETVEKVVANLGASDIDARLEELLIDGILYAFQEQASDDANVMLNGFGAVVNALGQGVKPYLPQICGTIKWRLNNKSAKVRQQGC

SEQ ID NO: 45916 - protein, 79 aa, Oryza sativa
MLTFCSSKHGSTYGTTAASLISGCVMRRASSSAGANRPCRWCSSWTPGHSDNLQITGTITGMKWLHSEFQTFMCTCSLV

SEQ ID NO: 45917 - protein, 99 aa, Oryza sativa
MLHHLLISWKMTGVSFLLVQLRRGKMIRNPNLAIQEGNPKQNHIEMLGSTYLKDLMEARMIHWRMEVGWESYGQKKFGRMIVRGILICLGHQKGKFHLV

SEQ ID NO: 45918 - protein, 564 aa, Oryza sativa
MEGGGAQRHHRGRRRGAAGSAARTPRGWCCSFAGVPQSPDLRPFPPSLAPPATAASSSPAPGGGAGRNKLPPKSPSISSFHSSPTSSRLAGLGGLIDPRRILSPGRVSPIDLDDSAPPLPLPLPLPPPPVTPAAETVVVPAETSAAVAPLVVASAEADAAGDEALDLRLFLRGRDGSTCVVMELDSGVLCDSSAFFAAMAPPRGPAGDGGGSGRRIEVDGVDNVEAFRAAVELMYQPDPLRWLAAAGVSRSIDVLEVSSSIMFERGVKLCLSYIEAVPWNENEEEKLKNLFARCTFDEAISQDVLARLRPHSWSSSEDLTVHLIQSVTSSTNSGARKDMQSLVNGLLSKSSVYQKDMAGLNRESLYNICYACLNSLVDLYDEATEATNHTAQALVIKGSKPFIERISQQTENLNWLLDILVNIDMAEEFVELWAKQDRLIRIHEQASPMMRYELSRISASVFIALGKGKVQCRGELRSLLFYGWFSPMLLDFGWLQRCSKGLDVRSLEENLGQALLTLPLKQQQCLFEEWFQCFASKGSECPNLTRAFQVWWRRSFVRSSVEGQ

SEQ ID NO: 45919 - protein, 106 aa, Oryza sativa
MKKGSTIWLDVPLDALARRIAAVGTASRPLLHQESGDPYAKAYAKLTALFEQRMDSYANADARVSLEHIAVKQGHSNVTTLTPSAIAIEALLKMESFLTEKAMIRN

SEQ ID NO: 45920 - protein, 479 aa, Oryza sativa; identical to SEQ ID NO: 31325

SEQ ID NO: 45921 - protein, 382 aa, Oryza sativa
MAFFVKISAPCSLAGHGTTSSSSGSSRSKRGLLLPVGAGAGAGAYGGRQYSDVVPVPALSQAQASSSGGRLRIFSGTANPRLAQEVACYLGMELGRVKIKRFADGELYVQLQESVRGCDVFLVQPTCPPANENLMELLIMIDACRRASAKTITAVVPYFGYARADRKMRGGRESIAAKLVANLITEAGAHRVLACDLHSGQSIGYFDIPVDHVYGQPVILDYLASKTICPDEVVVVSPDVGGVARARTFAKKLSDAPLAIVDKRRQGHNQSEVVHLIGDVRGKVAVMVDDMIDTAGTVSQGAELLHREGARAVYACSTHAVLSPPAVDRLSSGLFQEVIVTNTVPVLHHRTFPQLTVLSVANLLGETIWRVHDDCSVSSIFQ

SEQ ID NO: 45922 - protein, 63 aa, Oryza sativa
MPPMMLPKRNHVDKPHGHRSLLMVNDAFSDWLEAWSCLFPFISAFLIKMHAAYVNFYCAVTKL

SEQ ID NO: 45923 - protein, 453 aa, Oryza sativa
MVGDLSSLLAAASSASPVVLAPSKELHGVHLPMPLQGKRPPLQPQDAAVHIEAAAAAAAAAFQGQVMVPGHAHAGAPAAFQAFAVPDMAALIDVQDSHPDSVQLSLGIAEQCSRQEKILKFLRSGSDVKELDVSLLTELTGHQTLPINLGTQPYIPDDKLSALPISMASQPYIPDDKLSIYEFELDEPQQYLPENQLVIPDPLVEFFQSHGSALTIDQNRRILFNGNGDDMRYLLSIVLAFNMSKREISSCKTAYLVPYFERKRRSRASSHASNSKLASTAVDASKSTANGKSKSSSRKKQKSKNIKERDLYPKNYFHASEAFLSMLLDKDNSSSTIHSLKKAGPEISELLTKCSIGIAGTGLAVLLSVVCKMATGMKSPIAATRLVNTGVGLGLFWLSWAVNGLRDTITSIFRSPGDMNLKDEEVAVRIRKSMNDILFRAITILAITAFKFA

SEQ ID NO: 45924 - protein, 378 aa, Oryza sativa
MSARDRETAVALARLAAALDGAVLGLGTAALAVASWVKYLAASGQLRRIASAPAAAIPDLRSLLAEYGGGGGDGDQPILAVVRGHVRAAPRGKYLVPPGSGEHCVVAKHTQLCLFNEWRGIFGWTFDLHALFFKSIKEQIITSFRWVPFVLVDPENMTGMVHVKLDRAMQPLPLTTVYHKLTPVDSTPYTLFQTIIGNGYPIALLDEEKILPVGKEITAIGYIRPHKASVEISSCSEIPFFLSDLTKDEMEAELSSRAKTLFWASVVLGTMSVCLLGFATYRSWKKIKERREARQAQEVFRQTTDEVTDDQSSDEEAGEMGDGQLCVICLRKRRKAAFIPCGHLVCCCKCALIVERQFDPLCPMCRQDIRYMIRIYDN

SEQ ID NO: 45925 - protein, 554 aa, Oryza sativa
MRAPQERTVRDLYDRTRHKDLALPEESVEGRGSGRRVEGPGHREVVAKMEDKLTARKRPVPLDSPNVKTESGTCNVCCAPCSSCLHRNIALTDSNMDCGSSQTCFARSETKNSSFVRVDKGLRTKAKGGENDDEFSATSSPASYSENGENKVIARSSVAADSEVDKPAKRRRLVNHGSRSPIVECHDDSNSCVTGVSAASKLLLDKKKDKLSTSASSRDLTVNYKDNGINRLRNYCAEESTGKKRSDVHAMHRSSSDRSLPAESPFATKRLLRTQSSLSASHGLSPKRPTHEFGNAQNNLAHQPCEKASSNKTVERSLGGKSDPSVLGGERHSMMTSCGTSNRDKIKAGSLTKNLENGTSCSRNGSLEHADIQSNDAVNRNDNDKQERNQGCSMDTGSGRKLNTQNDVMTDSGNSEGLIDVNVCDICGDVGREYLLATCTRCLEGAEHTYCMRVKLEKVPDGEWLCEECCLKEDENQTRSNGGTSRDKVLDGKNQNSESTNNSKTLKVVVTDLDSQQITCGTPVNDPLAGSNQKLHLASSDLEARQVKVCHPNC

SEQ ID NO: 45926 - protein, 367 aa, Oryza sativa
MGSIGGGGSPEERAAAGGPVCVTGSTGYVGSWLVRALLRRGYRVHATARDPDKAWRVFSAVEEGKDQLRVFRADMAGEGSFDAAATGCVAFFHVAASMDIHVPPQNGNDNNIEEHVRTRVLEPATRGTINVLQSCVRAGTVRRVVFTSSISTMTAATTTAATGRRKAVVDESCLRAAADVWNTKPIGWVYILSKLMTEEAAFGFARENGINLASLVLPTVAGPFLTPNVPTSIQLLLSPITGDPKLYSLLASVHSRFGCVPLAHIQDVCDAHVFLMETEQADGRYLCAGGSYPMAQIAQILSLHYPPFKPAKRLSKDFHGSNPSVVSSKRLRDLGFRFEYDVEEIIKNSVVQCVDHGFLQDPDSSNC

SEQ ID NO: 45927 - protein, 607 aa, Oryza sativa
MGWRSRASAVAVLWMLAAVVAAAALDPDQDELERAFPIVEPDHGHTKLRLAKEGLEAIKRIETPIAAVAVIGPYRSGKSFLLNQLLSLTCNKGFGVGHMRDTKTKGIWVWGTPIELDVNGSKVSVLYLDTEGFESIGKSNVYDDRIFALATVLSSILIYNLPETIREADISRLSFAVEIAEEFYGRVKGQDVAFEPAKLLWLIQRDFLQGKSVQQMVDEALQRVPNNNGDKYIDEVNRIRDSLAFMGDNSTAFSLPQPHLQRTKLCDMDDQELDPLYIERRDELKQIVTSMIKPKLLQGRTLNGKEFVSFLRQILEALNKGEIPSTGSLVEVFNKAILERCLKLYNERMERVGLPVSVDKLQLIHNLAEDEARKLFDKQHFGKHHTTRSILKLDEEMRKVFGNFGFANEYQSSKLCKAKFSECEDKMEHLQSLKLPSMAKFNAGFLRCNQSFEMECVGPAKESYERRMSKMLARSRALFIKEYNNKLFNWLVTFSLVMIVIARFVIKFFLLEVAAWVIFIFLETYTRLFWSSELLYYNPIWHMIVSSWETIVYNPVLDIDRWVIPIVVVLSFLAVYWRCLGVRKRIGRSLLPLYRGSYGSSSRPRTD

SEQ ID NO: 45928 - protein, 110 aa, Oryza sativa
MTTPATQLQIILSYVEIYTWRMTRQYEEILRRLTRSAKFLLNSGRQPLLQFVGSLISYPGGQEHLKLGKNSHIPFSPHSPCTSHNFAIACHETFQLPSDAFKLYILRFPS

SEQ ID NO: 45929 - protein, 435 aa, Oryza sativa
MHTAVDLVNETKLDSEIKSWLAFAAQKVVEVNALAKALAGQKDEAYFAANAAAQASRRSSPRVTNEEVQKAAAALKGSDHRRATNVSARLDAQQKKLNLPVLPTTTIGSFPQTVELRRVRREYKAKKISEEEYISAIKEEISKVVKIQEELDIDVLVHGEPERNDMVEYFGEQLSGFAFTANGWVQSYGSRCVKPPIIYGDVSRPNPMTVFWSKLAQSMTSRPMKGMLTGPVTILNWSFVRNDQPRFETCYQIALAIKKEVEDLEAGGIQVIQIDEAALREGLPLRKAEHAFYLDWAVHSFRITNCGVQDTTQIHTHMCYSNFNDIIHSIINMDADVITIENSRSDEKLLSVFREGVKYGAGIGPGVYDIHSPRIPSTEEIADRVNKMLAVLDTNILWVNPDCGLKTRKYNEVKPALTNMVSAAKLIRTQLASAK

SEQ ID NO: 45930 - protein, 624 aa, Oryza sativa
MGTRRRRNPVIFLFLWFVMAFELCASLNHEGVALMRFKEMIDADPFDALLDWDEGNASPCSWFGVECSDDGRVVALNLPNLGLKGMLPQEIGTLAHMRSIILHNNSFYGIIPTEMKYLHELKVLDLGYNTFSGPFPSELRNILSLKFLFLEGNKLSGSLPIEYELASMDQTSLNKISTERNEENATRRKLLASKQKRSQKNRMLLSGTSESPLENVTMPKSHPDNITVPHRPVAPRSSSPQPPLPSEPIPSPAPSMPSPAPSVSTTTNGTSGQENKSKTAIYASIGGVACLVVVAMSAALILCYRHRKTSTVVPFSPTASGQLHTATLGGITKFKRSELETACEGFSNIIDTLPRFTLYKGTLPCGAEIAAVSTLVTYASGWTTVAEAQFKDKVEVLSKVSHKNLMNLVGYCEDEEPFTRMMVFEYVSNGTLFEHLHVKEADQLDWQSCLRIAMGVMYCLNYMQQLNPPVLLRDLSTSCIYLTEDNAAKVSDISFWGDKKEDEKSEASDEHITVYKFALLLLETISGRRPYSDDYGLLILWAHRYLIGDKPLMDMVDPTLKSVPEEQVRELTKLVKLCLSEDPMERPTVAEVTAWMQEITGISEEEAIPKNSPLWWAELEIITS

SEQ ID NO: 45931 - protein, 273 aa, Oryza sativa
MEHIARFFFGVSGNVIALFLFLSPVVTFWRIIKKRSTEDFSGVPYNMTLLNCLLSAWYGLPFVSPNNILVTTINGTGSVIEAIYVVIFLIFAERKARLKMMGLLGLVTSIFTMVVLVSLLALHGQGRKLFCGLAATIFSICMYASPLSIMRLVIKTKSVEFMPFLLSLSVFLCGTSWFIYGLLGRDPFIAIPNGCGSFLGLMQLILYAIYRNHKGATPAAAAGKGDAADEVEDAKKAAAAVEMADAKTNKVVADDADADADGKSADDKVASQV

SEQ ID NO: 45932 - protein, 320 aa, Oryza sativa
MEGGEQEESSAQRRERLLALRSSAAAAPSPSAAPHPPPPAADAWDLPVRDLMDASATTTAAAPRPPPRFDYYTNPAAAFASSSAASHKRKVAEPPPPGSGNYGSGYPPPHQHHMAPPPIHTPSRLSHDSPGGSPWRSPMQFQAPMSGYRGPPPGAPPPWSPHSGVPPPWNPHSAPPSQGLYPHPPSYGPRNYNPGQGGGRMNYGPRGRPDSPYGRGRGQNNYNNPGSRGRGGRDGSGTQNYSGWQDGRVRYHKSMTDDPWRDLQPIVGNIMIPRDGSKSWLPESLRAKKDTSDRGQVKPPSGLSLAEYLDLSFNEASNDT

SEQ ID NO: 45933 - protein, 245 aa, Oryza sativa
MASQRRRSSATAVLLSLLLLLQLAAAYPQGKRQNVAVFWGRNKAEGSLRQTCDTGDYNIVIISFLSVFGHGKYWLDLSGHDLRDDTIVNGVDFFIDNGPADHYDDLANRINDYNQNIRDPIGIMLTATVRCSYPDPRMKAALDTKLFRRIHVRFYDDPSCSYNHAGLAGVMAQWNKWSATYPDGQIFLGVVAANLTGKNDMVAVGELRDKLLPAVQNTDTYGGVMLWNSYYDSLTHYGRYVKDLA

SEQ ID NO: 45934 - protein, 262 aa, Oryza sativa
MRTALRLSEVGNAAVVVNPSTMQIIAKATDQTLQHDSLKSNKCAELNSDSPFSSLEVPEKKGSRLFLSNSNVSKCNSLNMEASCLNPWGWMKPRPSEQKSLPCEGGFPWHPLRHAAIVAIENAAERDKVMFPSIISSTKPNSDGNMEYYSVNESAKRLKVDRNDDKKIAHEAICDDLSETRPYLCTGFDIYLVWEPCSMCAMALVHQRFKRIFYAFPNPITGALGSVYRLHGEKSLNHRYSVFRVKVPESYSNSSGDCSDKC

SEQ ID NO: 45935 - protein, 294 aa, Oryza sativa
MMMRDVCMEVLPPMDHYASRGNWFMARKWSPEENKQFERALAGLDLRCPDWDRVARAIPGRSALEVMNHFRDLELDVQQIENGMVPFPVYGAAAAGGAFTLQWDGSHGVGDFRNAYRFGGGGGGKRHFGRTPEQERKKGVPWTEEEHKLFLLGLKKYGKGDWRNISRNFVQTRTPTQVASHAQKYFIRLNSGGKDKRRSSIHDITTVNLTDDRPPSPSQSSLISNQSNTSTLTAAVAPFSSTADVKPQNAANASFNSPSRTLGMAGYGMGLHDQGLQCGGPLHDQLAASRSILF

SEQ ID NO: 45936 - protein, 359 aa, Oryza sativa
MGSRGCFCKRPAAMGNLLLLLPHPAKAKLRPPTTAAKRGTLFFCSLSTDGPSSTMTVSITGATGFVGRRLVQKLLSEDHKVCVLTRSASKATSVFPASTFPGITIAEQGDWDKCIQGSTAVVNLAGMPISTRWSPEIKKEIKESRINVTSKVVNYINNASGDARPSVFVSATAIGFYGTSEISSFDESSPSGNDYLAEVCREWEARACQVNQEDVRLVLLRIGVVLGKDGGALAKMIPLFMMFAGGPLGTGRQWFSWIHQDDLVDLIYESLKNPSYKGVINGTAPNPVRLSEMCERLGRVVGRPSWLPVPEIALKAVLGEGASVVLEGQKVLPVKAKQLGFSYRYPYVQDALRAIARDL

SEQ ID NO: 45937 - protein, 473 aa, Oryza sativa
MRDITISISREENFVFLPRGTDYEAVQGNTRHIAFQGSKYCSKISFDWSIIRSLTMFAERPVELEHSVCSSQLRMLRVLDLRDAQFTITQNDVNNIVLLCHLKYLRIARYNNASYIYSLPKSIGRLDGLQTLDLDSTNISTLPTQITKLRSLRSLRCMKQYDFSSFTTCLTDTLCLPMIFTPSVSTSDRAEKIANLHLATKSFRSKSNGVKVPKGICGLRDLQILGVVDIRRTSSRVIKELGQLSELRKLYVVTKGSTKLKCEILYTAIQKLYSLQSLHMDAVGCTGIGTLECLDSVSSPPPLLRTLRLNGSLEELPNWIERLTHLRKFYLLRTKLKEGKTMLILGALPNLMLLHFCHNAYLGEKLVFKTGAFPNLRTLVTFNLDQQRDIRFEDGSSPQLEKIEIGRCRLESGIIGIIHLPRLKEISVEYKGKVAMLAQLEGEVNAHPNCPVLRMAMDRSDHDLAGNAKGSPP

SEQ ID NO: 45938 - protein, 1076 aa, Oryza sativa; identical to SEQ ID NO: 44912

SEQ ID NO: 45939 - protein, 1256 aa, Oryza sativa
MEAVEEQVAPEQVISTRGGSVFGKKTILKSDHFPGCQNKRLSPQIDDAPNYRQAGSLRVHGVAMPTMKGIVNVLNHIGAQKKGKQTQVLWHSLREEPVIYINGRPFVLRDVERPFSNLEYTGINRERVEQMEFRLKEDILQEASRYGNKILVTDELPNGQMVDQWESVVTDTVKTPLEVYEELQHQGYLVDYERVPITDEKAPKEGDFDNLVRRISQVDIETGIIFNCQMGRGRTTTGMVIATLIYLNRIGSSGIPRTSSIGKVFHSGNDVDDYMPSSEEAILRGEYSVIRSLVRVLEGGVEGKRQVDKVIDKCDTMQNLREAIATYRNSILRQPDEMKREASLSFFVEYLERYYFLICFAVYVHSVCSAQQSNFSEEVSFSDWMRARPELYSILRRLLRRDPMGALGYSSSKPSLAKIVEYADGRPHEMDIVAAMRNGEVLGRQTVLKSDHCPGCHNLHLPERVEGAPNFREIPEFPVYGVANPTVDGIRAVIQRISTSKGGRPILWHNMREEPVIYINGKPFVLREVERPYKNMLEYTGIDRDRVERMEARLKEDILREAERYSGAIMVIHETDNGEIFDAWENVNNEAVLTPLEVYKLLESEGLPIKYARVPITDGKAPKSSDFDTITLNVAAAHKDTAFVFNCQMGRGRTTTGTVIACLLRLRIDHGRPIRLPACEYNHEDPNELGYSSGEETTDHNGHLNSSSPRPHTVTEQHPRFGIDDILVLRKITRLFDNGIECRQTLDNVIDKCSALQNIRQAVLQYTKVINQQHVEQRVKRVALNRGAEYLERYLKLVAFSAYLWSEAFDGFCGQGEAKMSFKAWIHQRPEIQSMKWSIRLRPGRFFTVNDESKASFQPSQGDVMMEAIVKARNGSVLGKGSILKMYFFPGQKRSSTINFCGAPQVFKVDGYPVYSMATPTVDGAKEVLSYLGSKDTGRSIPQKVVVTDLREEVVVYIKGTPFVLRELDQPVDTLKHVGISGPMVENIEARLKEDILSEVKQQGGRLLLHQEEFNSSTGQSSVVGFWEHIGTEDVMTPAEVYSVLRNQGYCIDYKRIPLTREREALASDVDAIQSSVDENARYYLFISHTGYGGVAYAMAITCLGLGADEKFIMEQTAETHFISTSLTKSVSIKTSADIALKQGDYRDILNLTRVLVHGPKCKEEVDTVIDRCVGAGHLREDIMHYRKALQDCSLDDDETWSYLMDMGTKALRRYFFLITFRSYLYCSSLREPTFASWMEARPELGHLCDNLKLDK

SEQ ID NO: 45940 - protein, 793 aa, Oryza sativa
MERLKSAVPAELRRAVGEGTAADLPSTTSRLLAFLEALPLFRQVIGELTDPELALCRKDKGRAAELKGKGNACFSKREFEQALGFYSQALRYFPISPDGTDASLIATLYVNRASTMHKLGLLEECLRDCDRAISVSPNYAKAWYRRGMVNASFRNYSSSIHDLEVALSMEVTSSGKSNIEQELKLILQKHQNVNEVGTASSNCINADMPHTEQQPKVILECTSTPNKGRGMSSPNDISPASLIHAEDPLAVIIMKSCRDTHCHYCFSEAPADVVVCPSCTIPIYCSNRCQEKAIGQMSCNQNTHLESNNNVVDIAKLSVTSTKSKTPDSKQIAEHRHECGGACWAAVLPADIVLAGRIMAQYIEKQLLVGKRSTISGPNLDLVHHYDQDSSASKFESHIYATVLFLCLQSYYKSGVSWAEDSLSQLVLLICQIKVNSIAIVHMKSMDGVKALTKGFSGFSGDVMCSVEQVRVAQAIYMSGSFFNHSCRPNIHAYFHSRTLILRSTEYIKAGSPIELSYGPQVGEMDLPERQKSLRENYYFSCGCSSCSVLSLSDLVMNSFCCPQSNCLGAVSELIHHRHKENFVHVSIGESHVCTLSLPDVSKFDEDIVKVGKLFFKSDTMFNIDPGFCMSCRSQLDLSSAVAMSDRATSKINRLKELPSLDNVPEVLIAEALQSLERIEKLRHPYSKTLAQSHDTIAEAFAKVGDQEQARKHCEASIKILEKLYHPRHIIIAHELIKLVSIELSMGDGASAAAAFARADAIFSLYYGPDVERILPYVDVLRRTVSERSIDSC

SEQ ID NO: 45941 - protein, 375 aa, Oryza sativa
MPASDPAPAAAAAAYDRTAELRALDATLSGVRGLVASGATHLPRIFHNVVHGDQEPPEATAPSSAATTTTTVPVIDISGSRAAVVDAVRRAAAEWGFFQVTGHGVPLAAMDAAAGAARAFHESGGGEGSDKARLYSREPGRAVKYHCNFDLYQSPVANWRDTLYLRMAPDPPPAADLPEICRDALFEYAKQVKNLGNTLFELLSEGLGLKPSYLTDIECNQGQIILCHYYPPCPQPELAIGTSRHSDSGFLTILLQDDIGGLQILHEDRWVDVTPTPGAFIVNVADLLQLISNDNYKSVEHRVVAKNTEPRVSIACFFSTHFHPISTRMYGPIKELLSDENPPLYREALVRDYTARYYSVGLDGKFKTTLSEFRL

SEQ ID NO: 45942 - protein, 187 aa, Oryza sativa
MAMEGKSRRFAVACGVLSQYVRAEQKMAAAAGAAPARAVTTLSLMPGAEVVVEEEERREVGEEEAGPATAPAAPLTIFYGGRMVVFEDFPADKAAEVMRMASSGMAAAPAQREGAALADMPIMRKASLQRFFAKRKDRLAATTPYARPSPAETKASEPEEKKTPTSWLDLAASASAAARRDSLTIAL

SEQ ID NO: 45943 - protein, 291 aa, Oryza sativa
MAAGAPPLAGVGDRGSSSSSSHPPPPPPPKILLAKPPLPPPSSSGADDDGGGGGGAGRSRQATQPGSLSLVSDAWEVHTDKILPYLTENNDFMVIGVIGPTGVGKSTIMNELYGYDGSSPGMLPPFATQTEEIKAMAKHCTAGIDIRISNERVILLDTQPVFSPSVLIDMMKPDGSSAIPILSGDPLSADLAHELMGIQLGVFLASVCNILLVVSEGINDLSMWDLILTVDLLKHNIPDPSLLTSSTTQDKENKNDNQSGIEDYIADLCFVHARLGTRLFSFKAHGSEEGS

SEQ ID NO: 45944 - protein, 264 aa, Oryza sativa
MTGVSADAGVEVHALPTKGGTRVVAAFWRHPSARLTLLYSHGNAADLDQMLGLFLELRAHLRVNIMSYDYSGYGASTGKPSEYNTYCDIEAVYDCLTKVYGIEPEDLILYGQSVGSGPTLHLASRLEKLRGVVLHSAILSGIRVLYPVKVTLWFDIFKNIDKIKQVDCPVLVIHGTADDIVDFSHGKRLWELAKEKYEPLWVKGGGHCNLETYPEYIRHLRKFINAMEKLSKDKTAKAPQLAPSSSNNNMTEVEHNKCLRFGKR

SEQ ID NO: 45945 - protein, 377 aa, Oryza sativa
MGWASCCKGVDGVLPGRRKKKKETTWRIFSLKELQSATNNFNYDNKLGEGGFGSVYWGQLWDGSQIAVKRLKSWSNKAETEFAIEVEVLATVRHKSLLSLRGYCAEGQERLIVYDYMPNLSLHSHLHGQHAAECHLGWERRMKIAIDSAEGIAYLHHQATPHIIHRDIKSSNVLLDKNFQARVADFGFAKLIPDGATHVTTKVKGTLGYLAPEYAMLGKASESCDVFSFGVLLLELASGKRPVEKLNPTTKLTITEWALPLARDKKFKEIADPKLKDVFVEAELKRMVLVGLACSQNKQEQRPIMSEVVELLKGESAEKLSNLENDEMFKPDLTSSFQDSSHSSHPDSSDCITEEKNSKADTIDEAVDSSETVPSAR

SEQ ID NO: 45946 - protein, 415 aa, Oryza sativa
MKVTVMTADEQILTVDVDPDESVENLKALLEVETSVPLRQQQLHFNGREIQNTDKLSTVGVQDGDLVMMVKVTSNERPSQDIIRLNPDGSAVDPQAFRQHIRGDSQLMGQLLQNDPALAQAILGDDINELQNTLRSRHQQRLELKRKQEEELALMYADPFDVEAQKKIEAAIRQKGIDENWEAALEHNPEAFARVVMLYVDMEVNGVPLKAFVDSGAQSTIISKSCAERCGLLRLLDQRYRGVAIGVGQSEILGRIHVAPIKIGHVFYPCSFTVLDAPNMEFLFGLDMLRKHQCIIDLKDNVLRVGGGEVSVPFLQEKDIPSHIRDEEKLSKLASLSQGAAGESSTAREKTPDAPPRAPTTGAPAVNPPQPQGGGDFEAKVTKLVELGFDRASVIQALKLFNGNEEQAAAFLFGG

SEQ ID NO: 45947 - protein, 173 aa, Oryza sativa
MRQLYRRCRITGTVDFIFGNSAAVFEECVIKTVPRAEGARKSARNVVAANGRIDPGQTTGFVFWNCTLDGSKEFLALFRAKPESYRLYLGRPWKEYAITVYAGCYLGKVVRPVGWLPWRGEFALRTLYYGEFDSRGPGANHTARVEWSSQAPEQFVGVYSVENFIQGHEWIAY

SEQ ID NO: 45948 - protein, 727 aa, Oryza sativa
MAPRTSTVITWRYQQLFVVLSSVILEWVLMLLLLFEGLLSYLVTTFASLCKLHPPCPMCTRLDHVFGMAQPGFYRDLMCNSHKAEASSWAFCHIHQKLVDVHSMCESCLLSFATNKKSNLATYRSLAGKLGVGIGNEGFRPSFSLDNSSEASVIKEDITNILCSCCSSPLKVKSYPSMVLQNIASAIDTEVNTRHVSRDQLIEEISLVRYSELKTSDSESEPWQHGGVASLLDDAVDNLKEDFTLSHPKTKFAGVIPTDDIAQDQVAKNSDLIQLQNGGSDSKNSQVSAELYHFRADGNADLQSTDFSSKTVQHPTEDSDTTDKSEDDVWHNALDSISELSVTDKPAETSTAENEPKAEFTDRTAMKDSFKAHEDLQLLLSQVSPNDAINIPGVQEQAILNNITRALSLDRNYSGSISESMAIDEAEEHCTVDQLKKQIELDRKSISLLWKELEEERNASAIATNQTMSMITRLQEEKAAMQMETLQYQRMMEEQSQYDREDLQKMAAMVQELEAEIEGYKTKLRDQSLVNEIRDAMRISRSEECETSMSRTARSLSLFEDEKAYISKHLKKLRQNLHQFSNNGKFIDPKKIDDKEDTFDVTNSEDVYQDADEDSEMTNSENSEMTNVIRNGRNFRYLSNGTEGLTNGKDDPEGQYYAMVSENDLVNFEDEISELTAKLKALEEDRSFLEHSINSLRNGQEGKELIHGIACSLRELRKMGITWKDCD

SEQ ID NO: 45949 - protein, 327 aa, Oryza sativa
MSAAPIPREWVGLQQFPAATQTKLHELLGKLKEENVSTLTILVMGKGGVGKSSTVNSIVGERVATVSAFQSEGLRPMMCSRTRAGFTLNIIDTPGLIEGGYINEQAVEIIKRFLLGKTIDVLLYVDRLDAYRMDTLDDQVIRAVTNSFGKAIWRRTLVVLTHAQLSPPDGLDYNDFFTKRSESLLRYIRAGAGVSKRELGDFPLPIALVENSGRCKTNENGEKVLPDGTPWIPNLMKEITTVVSNGSKSIHVDQKLIDGPNPNNRWKMFIPLILMVEYFLVVKGIRRAIHADISNGKLDDWEQRYRDLVGSKDPVDQKGSSSGNRKA

SEQ ID NO: 45950 - protein, 250 aa, Oryza sativa
MSRRYDSRTTIFSPEGRLYQVEYAMEAIGNAGSALGVLAADGVVLVGEKKVTSKLLQTSRSAEKMYKIDSHLACAVAGIMSDANILLNTARLHAQRYALSYQEPIPVEQLVQSLCDTKQGYTQFGGLRPFGVSFLFAGWDKHHGFQLYMSDPSGNYSGWKAAAVGANSQAAQSMLKQDYRDGLTREEAVALALKVLSKTMDSTSLTAEKLELAEVFLQPGTGEVQYQVCSPEAMGKLLAKAGLSQPAPEA

SEQ ID NO: 45951 - protein, 165 aa, Oryza sativa
MLSTITAIDDLNYPEKTETYFIVNAPYVFSACWKVVKPLLQERTKRKIKVLYGSGRDELLKVMDYEALPNFCKREGSGSSNDSSDGVDCYSYDHPFHQELYNYIKQQALNEDFIGPIKQGSMHVDVPTPDLEEAKIMETIESELHKFSGANGLSHSFNKIKIEGP

SEQ ID NO: 45952 - protein, 74 aa, Oryza sativa
MLFRYPQFILFFQDWFTCLCGILVPEYCLMELGCIKRKSGIGLSASLIFRWKLTCLPNFKLCDCFFLKCWIFHS

SEQ ID NO: 45953 - protein, 63 aa, Oryza sativa
MLMWIFVFSPAIGSTSFVGVAILELIRALVSSTYRFSTDLELQNQYRFGCSDLSKQAYPSFPP

SEQ ID NO: 45954 - protein, 627 aa, Oryza sativa
MRVMKLGNRPDTFFSSGPVRSVSTDLATDMQILVDGCLFRLHKFPLLSKCMWLQALCVESGDGGGAVELPAFPGGAEAFEACAKFCYGVAVTIGPHNVVAVRCAAARLGMSEAADRGNLAAKLDAFLSSCLLRRWKDALAVLHSTRRYAALCEELGVTSRCVDAVAALAVGDASGAVPAGSSSSSPPWWARDISELGVDLYWRVMVAVKATGTVHAKAIGDTLKAYARRWLPIAAKNHHAAERTAGGGGGGAANAERATKNHRLLVEKIVSLLPAERNAVSCGFLLKLLKAANILGASPASKAELTRRVASQLEDANVSDLLIPAPPPCAGGVLYDVDAVVTILEEFALRQAAASGSPKGSPARAGRHRRSMSAESGELEGARRSTSMAAVSHGAMVRVGRLVDGFLAMVATKDARTPLDKMIAVAEAVPDFARPEHDDLYRAIDTYLRAHPEMDKSSRKKLCRVLNCRKLSEKASMHAAQNELLPLRVVVQVLFFENARAAGLSSGHGNRVAARFPGDGGDVSALLGTGRPRTTEENGKDGQSPAAAGSVAADGDWSVEGLRRAASRVATLKMRLEEEDGEDAGDEAFVHRTRAGLARSASSRVTAAAGRSKRMLSRLWPTSRTFT

SEQ ID NO: 45955 - protein, 491 aa, Oryza sativa; identical to SEQ ID NO: 30071

SEQ ID NO: 45956 - protein, 382 aa, Oryza sativa
MMRRFVNLVVDTAGGGGDATAYKLYRVAASALFSCPARRQAAKVLDPDDVEDAAGGLPPPAITFHPSSLSGPGNVDFLYLYGSGGGSDGDDSLLALDVDGRGLLYSAASAAVRYMPDPCKPKIEPISFTADDGRLYVIERVPLSGNPGCFEALTYGLLPDDDDSLSSRMGWYWRSLPPPPFAKAGYDITASAVVQLNESKELWVTAAHGAGTFSFDTNSKVGEWRELGEKGMPFMGRGEYVEEHGQWFGLSSTPRLGLYLCSCDLSYLCCSYDAQVMVRCWLDGLDRLPAAAPPKRSLLMETYAVHLGSGRFCIARFMEEEEQHNISLHPFFRVAGEKSKNDRFLLLTGVDVVGSDDAVVVHKSIRYAFQNGDFVRGYSRVF

SEQ ID NO: 45957 - protein, 88 aa, Oryza sativa
MIITPLPSVVLRATWILRPTNLAPRSLGPPTQILNRLHPLRTTKMFLQLSHPHPMVLLLNSVHRPGPLHDCAKLLLLLLQQHTRGQDR

SEQ ID NO: 45958 - protein, 711 aa, Oryza sativa
MENGDKDEKNVAVTEGSTNSEEKDQDEDLLRRTEMLNAKEAINSSNENSGNDSEAQIHVRDDSQKEFNEKMNKEGSSDPMEPTDSSQTEEDILAEDKSEEPVFDGTEVAEMEDLRRSSNQSVELDSDAHGSVLNERATAIKNFVKEKGAIAVSTFIRRLSGKKDENEFSVEDEKNEGSESISSGNIGSDAEPKSKEVQPKSEERTTWNPLNLIKIGRDFDTFMTGEAGHENVPDLIEQPTGKGRIIIYTKLGCEDCKMVRSFMRQKMLKYVEINIDIFPSRKMELENNTGSSTVPKVYFNDLLIGGLTELKKMEESGILDDRTDALFKDEPSSAAPLPPLPGEDDESGSGKIDELATIVRKMRESITLKDRFYKMRRFSSCFLGSEAVDFLSEDQYLERDEAVEFGRKLASKYFYRHVLDEDVFEDGNHLYRFLDNDPIIMSQCYNIPKGIIDVEPKPIVEVASRLRKLSETMFEAYVSEDGKHVDYRSIQGCEEFKRYVRTTEELQRVETHELSREEKLAFFINLYNMMAIHALVTCGHPAGPLDRRKFFGDFKYVIGGCAYSMSAIQNGILRVNQRPPYNLAKPFGQKDQRSKVALPYAEPLVHFALVCGTKSGPALRCYSPGNIDKELVEAARDFLRNVGIVVDPEAKVASVSKILRWYSTDFGKNETEVLKHAANYLEPAESEQFLELLANTQLKVLYQPYDWSLNI

SEQ ID NO: 45959 - protein, 338 aa, Oryza sativa
MPSSTMAVDTTASEYWLNWRFMLCAVWVYSCMVLACFLIWKYEGPSSQDGNGDGGEDSEDARPPRAASGVVYLEDCWKPCLEQIHPGWLLAFRVVSFFILASLLAVDVVVDGWSVFLYYTQWTFLLVTLYFGLGSVLSIYGCYQYSYKNGDNRSGADHGTYIIAPAGESVYDQSIKNPCYSKMHGGKEIAGFWGYLFQIMFQTNAGAVMITDLVFWFILYPFLAYNQYDMNFLLIGTHSINVVFMIGDTAMNSLRFPWFRIAYFLLWTGAFVNVQWLIHASISIWWPYPFLDLAFPKAPVWYLVVAVMHFPCYALFALVMRLKQSLLERWFPQSYTCV

SEQ ID NO: 45960 - protein, 374 aa, Oryza sativa
MVAAAVAAAEQVVAALREECATPAARLDGVAAAMAGEMAAGLAEEGGSKIKMIVSYVDNLPNGTEEGLFYALDLGGTNFRVLRVQLAGKEKRVVKRESREVSIPPHLMSGNSSELFGFIASALAKFVADEGHNAVFNDRQRELGFTFSFPVRQTSIASGTLIKWTKAFSIDDAVGEDVVAELQMAMEKQGLDMRVSALTNDTVGTLAAGSYYDEDIVVGVILGTGSNAAYLEKANAIPKLEGELPKSGNMVINTEWGNFSSSCLPITEYDEALDKESLNPGEQIFEKLISGMYLGEIVRRVLLKISLQSSIFGNLDQTKLKTRFILRTPDISVMHHDGTPDLRIVAEKLADNLKVIFISKSSIELYSLYPFYAQ

SEQ ID NO: 45961 - protein, 764 aa, Oryza sativa
MEIAVKTEQIVDMLRKMPNHLPLITIVKRNLALDFLPQSAKATGINSSFMASLRKRCELICKRLLERILQVEEGAASETEVHALPYVLALQAFCIVDPTLCTPATQPFQFVETLQPYLKKQVDNKSTAQLLESIIFVIDAVLPLIWKPPQSVVIELEQDLKQMIVRHSFLTVVHACIKCLCALSKAADRGPRLLEYLVNIFYKHLSGSNSSNSDSQLLGRSLFCLGLLLRYGSQLMAASENQLDFPKIISLLKKEYLLKDDFSLKVRGLRALGYILIAKPDFMLRKDISTLIESSLSSVVDYRLKIQGLQNLFEYLRDAESQLNAESTGKPTPNATNGGSEVPVAAGAGDTNICGGIIQLYWNSILERCLDINDQVRQTALKIVEIVLRQGLVHPITCVPHLIALETDPLEGNSKLAHHLLMNMNEKYPSFFESRLGDGLQMSFRFFESTISNHDMVATNMKCNPIAFVKPGISRIYRLIRANRNSRNKFVHSIVRKFEGDNRSYPTISFLMYCAEVLASLPFTSPDEPLYLIYDINRVIQLRAGAVEANLKNWTSMYQQQEMVGMPRDTGDVMHEPGGCSDQNLVDVSQMMLGNTCSTPVVNMAKLQEDCHGAIALQLLLKLKRHLKTVYSLTDARCQAFSLKDPPKSGETISKQNIPLNISNTNTSLPSCPQDAARVYQDFKTVLREDTVDYGMYTVSAQKKRPTPRSSSRVRRPAAVTRGRGGGGGGGDEDTDDEDWTGGGARVLDFSAQGGRVTRQRVQV

SEQ ID NO: 45962 - protein, 272 aa, Oryza sativa
MPVARPEPQEPRVIAHVDMDCFYVQVEQRSNPELRGQPTAVVQYNDWKGGGLIAVSYEARKFGVKRSMRGDEAKMVCPSINLVQVPVARDKADLNVYRSAGSEVVTILSTKGKCERASIDEVYLDLTDAAKEMLLESPPELLELIFEEATKSNILGLPSDVSNREDSVRAWLCRADADYQDKLLSCGAIIVAQLRVKVLEETQFTCSAGIAHNKMLAKLVSGMHKPAQQTVVPSSAVQDFLVSLPIKKMKQLGGKLGSSLQDDLGVNTVGDF

SEQ ID NO: 45963 - protein, 429 aa, Oryza sativa
MERKQAEYSNLDERYAIQGEKYQGQQYSHIYFTRLHHMRNLLHALVPSWKPHLPVTTVLGLEEGKDCIIVGTLYKHMKLKPSILDEYSKERSAIPLVKPHNFMHPDDHLILEDESGRVTLAGAIPPAAYVTGVVIALHGKETSAGNFLVEDILEAGIPPQITLPSINEDKYVVFVSGLSIGSEKFNPLQFQLLIDHITGHLGDENEQSIASNIVRVVVAGNSVHISPRFFNGQAVASKDQSRIAEPIKELDIMLTQLVASLPVDMMPGSNDPANFSLPQQPLHRCLFAGAATYNTFSSCSNPHQFELDSVRFIGTSGQNIDDLYKYSDAKDKLEFVERTLRWRHLAPTAPNSLGCYPYTDKDPFLVESCPHVYFVGNQDKYETQLLQGLEKQKVRLICIPRFCDSGVAVMLNLRNLECSTLSFSTSFDA

SEQ ID NO: 45964 - protein, 766 aa, Oryza sativa
MATVSDIGLSAAINVSMAVAFLLVFAFLRLQPINDRVYFPKWYLRGMRDSPVSSGAAVQKVVNLNMRSYLKFLSWMPAALKMPEDELINHAGLDSAVYLRIYLTGIKIFVPISILASLVLFPVNWTNDTLDSMKVVHSKIDKLSISNIPYGSNRFVTHLVMAYAVTFWTCYVLFREYEIITTMRLRFLASEKRRPDQFTVLVRNIPPDPDESISELVEHFFLVNHPDHYLRHQVVYNANKLADLVEKKKKLQNWLDYYQLKYERNPSKRPTTKTGFLGCFGSEVDAIEYYKAEIEKIGKEEADERQKIMKDPQSAVPAAFVSFRSRWGAAVCAQTQQTSNPTVWITEWAPEPRDVYWNNLSIPFVSLTVRRLIVAVAFFFLNFFYVIPIAFVQSLASLEGIEKALPFLKPLIKIDVIKSFIQGFLPGIALKVFLILLPTILMFMSKFEGLISQSSLERRSASKYYIFLFFNVFLGSIVTGSALDQLKAYIHQSANEIPRTIGVAIPMRATFFITYVMVDGWTGVAGEILRLRALIIFHLKNFFLVKTEKDREEAMDPGSICFDWCEPRIQLYFLLGLVYAVVTPLLLPFILVFFGLAYVVYRHQIINVYNQQYESGAQFWPSVHGRIIIALIVSQLLLIGLLSTKGFEETTPVLVVLPVLTFWFYKYCKNRFEPAFVRNPLQEAMRKDTLERAREPTFDLKAYLANAYLHPVFKGREEEDNMSISEGVGMEEVIVPTKRQSRRNTPAQSKYEGSDTLSLPETVHER

SEQ ID NO: 45965 - protein, 178 aa, Oryza sativa
MYRGATTILEDLKKRYPMNDAAGTINEIGSTVRRVMGGTSGILYDILCKAAYASLKQNTSIGANEWADALEASVAAVSKYGGASAGYRTMLDALIPACTVLKQSLKAGDDPVTAFIASSEAASAGAESTKQMQAKAGRSSYIAPDLVASVPDPGAVAAAAWYRAAAHAVKSKLHASDS

SEQ ID NO: 45966 - protein, 576 aa, Oryza sativa
MQMLSWICWLSYTGKRCEEVQKVECNLPSSQEWPVGRWIVSICPAHCDTTRAMCFCGPGTKYPDRPVAEACGFKTILPKKPDDSKLTDWKTPDPDVFTTNKSKPGWCNVNPEDAYSSKVKFKEECDCKYDGLWGRFCETRVECSCINQCSGHGHCRGGFCQCDGGYFGIDCSMPSNYSVAYGMPSWLQPPMNLPDLKNISSSSINVKVVAKKKRPLIYVYDLPAEFDSHLLEGRHYKFQCVNRIYDDKNRTIWTQQLYGAQIALYESILASPHRTLNGDEADYFYVPALDSCLITRSDDAPHLQMPRDLRLRSYHTLEYYRMTYDHIAQRYPYWNRTSGRDHIWFFSWDEGACYAPKEIWNSMMLVHWGNTNTKHKNSTTAYWADNWNYIPIDRRGNHPCFDPRKDLVLPAWKQPNPAAIWLKLWARTRNNRTTLFYFNGNLGPAYKDGRHEDTYSMGIRQKLAAEFGSTPDKQGKLGRQHTANVTVTYLRTEKYYEELASSIFCGVLPGDGWSGRMEDSMLQGCIPVIIQDGILLPYENMLNYNSFAVRIQEDDIPNLIRILRVCVCINSPFVRL

SEQ ID NO: 45967 - protein, 230 aa, Oryza sativa
MKGLWKQSGLAGMACAADVGAAGAGQRARLAVYVLAVAFAAFTAYVAVSSSSPPPAGEGASWFGGVYASTAPYRAQVSGFFSSIFPTGSSTPSPEQQPPPPRRGEGGGQVSSHGIDEHARVRSGAAHSVPVDPAASTKHSGSGGGGGAASNNGGGGSAPPPGNLAGSGTPPAKGSGGDGGGAPANNSTSGGAPANSAVEQSSPAGDGGGSPSTASSSAGKYPPRTPARRV

SEQ ID NO: 45968 - protein, 129 aa, Oryza sativa
MLRVGDLDHAINFYEKAFGMELLRKRDNPQYKYTIAMMGYGPEDKNAVLELTYNYGVKEYDKGNAYAQIAISTDDVYKTAEVIRQNGGQITREPGPLPGINTKITACTDPDGWKTVFVDNVDFLKELEE

SEQ ID NO: 45969 - protein, 355 aa, Oryza sativa
MGKKKKRVEKVFCYYCDREFDDEKILVQHQKAKHFKCHVCHKKLSTAGGMAIHVLQVHKESVTKVPNAKPERESTEIEIFGMQGIPPDVLAAHYGEEEDPSSKVAKVEVPSLRPPVMPNPAGMVYPPRPAYGVAPPMYNPALNPLMARPPIWPAPPPQPWFTQPVVSVPQMASGLAPQQPLFPIQNMPAPMTSAPANLLQTSFPMAHVGVPSPVTPQVSQPLFPVSTSAGNGAVSSPYVASVAPGSIPTSSPSVAPAGVGYAATNQGTGGPAAVPPPASNNKAPATQPGANEVYLVWDDEAMSMEERRLSLPKYQVHDETSQVSSDFYNFISVILMICEKNQVEVHGDALNWNIV

SEQ ID NO: 45970 - protein, 719 aa, Oryza sativa
MALEISMEGIEARARELGVDLSTVDLDSVTLPAGEDFGILSDDEDLLRIDDPMELEMGFANVVVVDNLPVVPPEKFEKLENVIRKIYSQIGAIKEGGLWMPVNPETKKTYGYCFIEYNTPQEAELAREKTNGYKLDKSHIFAVNMFDDFDKYMKVPDEWMPAEIKPYTPGENLQKWLADEKARDQFVIRAGTFTEVYWNDARQKMPELVFQKQYWTDSFIQWSPLGTYLATVHRQGSQVWGGDDKFERLMRFAHAQVKLIDFSPGEKYLVTYSSHEPSNPRDTHRVVLNIFDVRTGKVMRDFKGSADEFSASGNISVSGVSWPIFRWGGGKDDKYFARLGKNVISVYETETFSLLDKKSLKVENVVDFCWSPTDPIIALFVPELGGGNQPARVSLVQIPGKEELRQKNLFSVSDCKMYWQNSGEYLAVQVDRYTKTKKSTYTGFELFRIKERDIPIEVLELDNKNDKIIAFAWEPKGHRFAVIHGDGPKPDISFYSMKTSNNISRVSKLTTLKGKQANALFWSPGGRFIVFAGLKGFNGQLEFYNVDELETMATGEHFMATDIMWDPTGRYLASAVTSVHEMENGFQIWSFSGKQLYKVSKDHFFQFLWRPRPPSLLTPEKEDEIAKNLRKYSKKYEQEDQDAFNQLSEQERKRRKQLQEEWEGWVAKWKQLHEEERPYRMELRDGEASDDEEEYDTKEVEIEEEVDVQEEVPFELDQE

SEQ ID NO: 45971 - protein, 436 aa, Oryza sativa
MEPVVQIVSFGSELSNRSPTFDMKLSDLMDVDKPISYEKAREFFCRNPSQKWAAYVAGTILVLMTELDVKFTDSMSILVSSDVPEGKGVSSSASVEVATMAAIAAAYGLNIAPRDLALLCQKVENHVVGAPCGVMDQMTSACGEANKLLAMVCQPAEVKELVAIPNHMRFWGLDSGIRHSVGGGDYGSVRVGTYMGRKMIKCAASDLASESSVSDAPVQSNDYKQNAIELLKSEASLEYLCNIPPHRYEAIYAKDIPEVITGDAFLKKYGDHDDTVTAIDPKRSYNVKAPTRHPIYENFRVETFKALLEAANTDEQLSALGELMYQCHYSYNACGLGSDGTDLLVNLVQEMQHRNMSKGESPSLFGAKITGGGSGGSVCVMGKNCLKSSEEIIEIQQRYKAATGYLPILFDGSSPGAAKFGYLKIRRRPSSPIAAK

SEQ ID NO: 45972 - protein, 309 aa, Oryza sativa
MQEPQRIHRDAGGYPAAAAETDPLLAHPPPPRSPAEIEDEEIEDEEIEAASAACCRICLESETEPGDELISPCMCKGTQQFVHRYCLDHWRSVKEGTAFSHCTTCKAQFHLRVECLEDNLCRKMMFRLFVARDVFLVFLAVQTVIAAIGGMAYLLDKDGQFRNSFSDGWEHILSNHPVPFYYCVGVVVFFVMVGFIGLIVQCSSFNTNDPCLAGCRNCCYGWGILDFPASIEACLALAVIFVIVFAILGVAYGFFAATVAVQRILQRHYHILTKRELTKEYVVEDLRGCYTPPKMDPEQEQRLRTLQLM

SEQ ID NO: 45973 - protein, 587 aa, Oryza sativa
MSCCAASSSSPVLANPRGGFAASCSTRRNHRVIFLGSRQFSPIIYSPARRASSRLSRREVIAFAGQQSWDIGRFVRTLYFFNGPPNPLKIVESILSSFTGSAPGEVPKKMESSDVVLVTGATGGVGRRVVDILRNKGIPVRVLARNEEKARSMLGPDVDLIIGDVTKENSLDPKYFKGIKKVVNAVSVIVGPKEGDTPDRQKYKQGIKFFEPEIKGPSPEMVEYLGMQNLINAVKNSVGLTEGKLLFGGTGNLSGKIVWGALDDVVMGGVSESTFQIQPTGSETDGPTGLFKGTVSTSNNGGFTSIRTKNFTVPEDLSAYDGIELRVKGDGRRYKLIVRTSFEWDTVGYIASFDTTKGEWQSVKLPFSSLNPVFRARTMPDAAPFDASNVTSLQLMFSKFEYDGKLNPTFTEGSFELPFSSIRAYINEPITPRFVHVSSAGVTRPERPGLDLSKQPPAVRMNKELGSILTYKLKGEDLIRESGIPYTIVRPCALTEEPAGADLIFDQGDNITGKISREEIAFICVAALASPNAVEKTFEVKSTVPFSEPFVVDPSNPPPEKDYDVYFKELKAGITGKEALEGTPAQV

SEQ ID NO: 45974 - protein, 282 aa, Oryza sativa
MAVAVEEIVRRAGGCAVIDGGFATQLEALGADINDPLWSAACLITKPHLIKEVHMQYLEAGADVIISSSYQATIPGFLARGMLLEEAEGLLRRSIELALEARDEFWKSTLRKSKPVYNRALVAASIGSYGAYLADGSEYSGSYGEDITAEKLKDFHRRRLQVLASAGPDLIAFEAIPNKMEAQALVELLEEENIQVPSWICFSSVDGKNLCSGESFAECLQFLNASDKVTIVGVNCTPPQFIEGIIRELKKQTKKAIAVYPNSGEIWDGRAKRWLVSTTCYT

SEQ ID NO: 45975 - protein, 476 aa, Oryza sativa; identical to SEQ ID NO: 31625

SEQ ID NO: 45976 - protein, 536 aa, Oryza sativa
MGASTSTSNPSLEAQEQETLASASLALPLLRAAFSRSNGSLAEALSPPPAAFRSDSPPVPPRFHDLVARLGPAIASLFFSDVGPAGDAAGWLGFLRGFNRCCARVPASQSLALLLRVYAAACADAGAPCGLQFHPDEDGAGGEGKVVGELAPGEIAVLLWMCWVMAWSGSAPGVSGGQEGGGKGEPVLLPDVTHLVLSALVSAGAVADDAGVWGWEVSRGGKGVKVQEFTSWVLSTAAGLGNCLSRYVQERFRSCAADPVEERSVSTGNTSSCNPDVYLLTRGRAWAISLSLRNTLSEKFLSASVIGMDTEDLLYRSSVHGKGLSRFWSCVEGYKGPVLILLSAFSRSGGDNVDTDQRWGIGILTEEGLQNKDTFYGSSASLCSTYPIFRMLPPSGKEKNFIYCHLHPQIRVYEAKPKPVGLGFGGTIGNERIFLDEDFSKLTVRHHAVDKTYQHGSLIPNQGYLPVEASVLDVEVWGLGGEATRRQQDMYKKREDIFSEQRRKVDLKTFGNWEDSPEKMMMDMISDPNAVRREDR

SEQ ID NO: 45977 - protein, 302 aa, Oryza sativa
MGAMDVQLESTAVQRGQAKINVEEHALVSLLSDEKYATEKTEDVDPDDYEKLEEGIMQYGCAHYRRRCRIRAPCCNEIFDCRHCHNETKNSIKIDAVKRHELPRHEVQQVICSLCGTEQEVRQVCISCGVCMGKYFCEVCKLFDDDVSKQQYHCNGCGICRIGGKENFFHCSKCGCCYSIVLKNSHACVEGAMHHDCPICFEYLFESTNDVSVLPCGHTIHVKCLREMEEHCQFACPLCSKSVCDMSKAWERLDEELATISDTCDNKMVRILCNDCGATSEVQFHLIAHKCQKCKSYNTRQI

SEQ ID NO: 45978 - protein, 539 aa, Oryza sativa
MGVISTVLGFSGFGFGFSAGIVIGYYFFIYFQPTDVKDVKVRPLVEYDSISLDGILPEIPLWVKNPDYDRIDWLNRFLEMMWPYLNKAICRTALDIAKPIIEENRKTYKLESIEFESLTLGSLPPTFQGMKVYVTEEQELIMEPSLKWAANPNVTVVVKAYGLKATVQIVDLQVFASPRITLKPLVPTFPCFAKILVSLMEKPHVDFGLKLFGADLMAIPGLYRFVQETIKKQVASMYLWPKTLEVPIMDPSKASKKPVGILLVKVLRAQNLRKKDLLGKSDPYVKLKMSDDKLPSKKTTVKRSNLNPEWNEDFKFVVTDPETQALEINVFDWEQVGKHEKMGMNNILLKELPADETKVMTVNLLKTMDPNDVQNEKSRGQLTLEVTYKPFKEEDMEKEGIDNADVVEKAPDGTPAGGGLLYVVVHEAQDLEGKHHTNPYAKIIFKGEEKKTKVIKKNRDPRWEDEFEFVCEEPPVNDKLHIEVLSKASKKGLIHGKETLGYIDISLADVISNKRINEKYHLIDSKNGQIQIEMQCRTS

SEQ ID NO: 45979 - protein, 250 aa, Oryza sativa
MARKRRAPTPPPPPPPPPEAESSADSSGEEEEEEEEEEEERESPVAPPPQKPSGRGAASSDEEEEEGEDSDTDTYAQGFQLRKVGGGDEEGEEVEGDSSESEPEPEPVKKESAKKAKAEAKKKRAAPEPAPSGKAKKAKPEKSSSAAAPEPAPSSGKSKKAAKAEAAKAAAAEPAPSTGKVSKCSLQHTPTVGVPQNPPSSPPLAPSATQPPQDGILLLTSTPPPRLPPRRRRRRLPRGASSRPTPTPRK

SEQ ID NO: 45980 - protein, 375 aa, Oryza sativa
MSGGSGGGAASAVFYAEKYHPIQAGSIDGTDVAPHDNAVLRALLCSTAGLYDPFGDPKATGDPYCTVFVGRLSRYTDDETLRKEMSRYGRVKSMRLVRDIVTGASRGYAFVEYETDREMRRAYEDAHHSIIDGSEVLVDYYRQQLMPGWIPRRSGGGLGGKKESGQLRFGGRERPFRAPLRPIPYDELKRLGIPPPPEGRYMTRYQVPPPPRRKSSDIYREESPPKRRSKDRVDSSHYRRYCSPTQDDDSTVSTHRRKGSHDRREETERRTRAYISREAGSYSKRSPTEDDGDRRKRRRSREPGELSPYKEDDDNSKRGRSSVEPGFSPYQSHHHRHHRERHDSSSHSRHGERRHQDDRGNHSRNRRSESRDYSH

SEQ ID NO: 45981 - protein, 270 aa, Oryza sativa
MAMAPPSPPCLLRALLPVASSSSRGLRRRPTTSLLRCSSPSADAASPSGEGGREYEPSFADDFLLAFFRAKMVEEVGWDSEKPGYNGLIEVANRLMIKGKSALETEQSAVRVLRSLFPPLLLVLFKALLAPIANGQLASMMVARATALSCQWLMGPCLLNSITLSNGKSLSSGVFVEKCKYLEESKCLGVCINTCKLPTQTFFKDHMGVDLYMEPNFEDYSCQFNFGVSPPPLDTDKALKEPCLDICTNARRRKELGTGSSTDGLQCPQV

SEQ ID NO: 45982 - protein, 237 aa, Oryza sativa
MRIFVLSGQSNMAGRGGVHHRRWDGVVPPECAPCPSVLRLTAALDWVEAREPLHADIDTAKTCGVGPGMAFARAVLPRLDPPGSGVGLVPCAVGGTAIREWARGERLYDQMVRRARAAAECGEIEAVQWYQGESDAESDAATAAYAGNLETLIANVREDLGMPQLPFIQVALASGNKKNIEKVRKAQLGINLPNVVTVDAFGLSLNEDHLHLTTESQVKLGEMLAQVYMSNFLPATC

SEQ ID NO: 45983 - protein, 34 aa, Oryza sativa
MELEAFVARRSLGTARTCSRCSISKPPPTIQEEP

SEQ ID NO: 45984 - protein, 220 aa, Oryza sativa
MEDSDVHNLRTESLKQQYNLVKERTSVQHTYYSGSHVMEYGSLELNAHHVFMYMGSNPANDNATFVEDNSLPSFSRAVNQRDADLVYFWQKYRKLPESSPEKNEARKQLLEMMAHRSHVDNSVELIGNLLFGSEEGPRVLKAVRATGEPLVDDWSCLKSMVRTFEAQCGSLAQYGMKHMRSFANICNAGISAEAMAKVAAQACTSIPSNPWSSTHRGFSA

SEQ ID NO: 45985 - protein, 86 aa, Oryza sativa
MVLSNDIDLLNPPAELEKLKHKKKRLVQSPNSFFMDVKCQGCFNITTVFSHSQTVVVCPGCQTVLCQPTGGKARLTEGCSFRRKSD

SEQ ID NO: 45986 - protein, 306 aa, Oryza sativa; identical to SEQ ID NO: 28636

SEQ ID NO: 45987 - protein, 217 aa, Oryza sativa
MEKKVVEPSEKKTFVDLKSMWGRAEKKLKPIVDSNNISEHSVVRKDTEPTTHAPATEKIGCSRACEVGFAGTETHVPYESIEVSRPQDIDGNIEISKPHVAISESKEEDWLEDVDEDVGFLPHDPGKRIAISDYSVNQQDAVRMKYIALGPCRPPLEQFPQRNCGGKRRFISSWFDKYSWLEYSEEKDVAFCFVCYLFKDRTNYVGGDSYVNEGFRQ

SEQ ID NO: 45988 - protein, 327 aa, Oryza sativa
MARCISFLSTSSSLPCATKPPCCSVSSVLPSSPSSHQCRGRKTSCGSIRALREDWRERSKAIPPGGVYPAKDHCSQCGLCDTYYIAHVKNACAFLGDGMSRVEDLEPLVHGRGRKQDMDEMYFGVYEQLLYARKMKPVEGAQWTGIVTTIAVEMLKANMVDAVVCVQSDPDDRLAPMPVLARTPDEVIAAKGVKPTLSPNLNTLALVEAAGVKRLLFCGVGCQVQALRSVEKYLGLEKLYVLGTNCVDNGTREGLDKFLKAASSEPETVLHYEFMQDYKVHLKHLDGHIEEVPYFCLPAKDLVDVIAPSCYSCFDYTNGLAVRFPSF

SEQ ID NO: 45989 - protein, 80 aa, Oryza sativa
MWQLFTKKANIKGSVPFFLGLFLLFVRWPVAGIIMELYGSFVLFSGYGPPIQAFLYQIPVIGWILQYPFQLFGQFRRKRA

SEQ ID NO: 45990 - protein, 278 aa, Oryza sativa
MPQVRNQNLGMVADTESSGSLGGSSNAASDKAVDGSLDKRSQEKAPKKTHKAEREKLKRDQLNDLFVELSSMLDPERQNSGKATVLGDAARVLRDLVSQVESLRKEQSALLTERQYVGSENNELQEENIMLRAQILELHNEICARMGNNRLNQSNLAMSQPVANNGSNSATQPVPHHIWGNGPNLAMVHPTNTLSPLHNQHHQSAGASQVYASRPQELQLFPGTSVSTERERSRAGSGSTPATSSGLTDSLPGQLRLSLPQSSQEENSSGSKKGRKKG

SEQ ID NO: 45991 - protein, 303 aa, Oryza sativa
MDLDLWISKVKEGQHLAEHELQSLCEYVKEILIEESNVQPVNSPVTVCGDIHGQFHDLMKLFATGGHVPETNYIFMGDFVDRGFNSLEVFTILLLLKARYPAHITLLRGNHESRQLTQVYGFYDECQRKYGNANAWRYCTDVFDYLTLSAIINGTVLCVHGGLSPDVRTVDQIRTIDRNCEIPHEGPFCDLMWSDPEEIETWAVSPRGAGWLFGSRVTAEFNHINNLDLVCRAHQLVQEGLKYMFQDKGLVTVWSAPNYCYRCGNVASILSFSETMEREVKFFTETEENNQMRGPRTAVPYFL

SEQ ID NO: 45992 - protein, 554 aa, Oryza sativa
MGSPKMAKSAMKQGIWRRRIGAPFAAVLVAAVLAVVVFSGQFAKGPNASSQFAPVQVDNTLRPTRDKPVSADQDLERTVSSKLEGEDTEQIRLEDGQSPNKEAAIEEQKPSQAAAIDQDDNTLNPGLKQASGDERSAGGSDSLSKESPPQSQEGDGGTAESGAEPYIKCTAQSDIKICDLSNPRFDICELCGDARTIGQSSTVVYVPQNRASNGEEWIIRAQSRKHLPWIKKVTIKSVNSSEPEPICISKHHIPAIVFALGGLTANVWHDFSDVLVPLFLTARQFNRDVQLIITNNQPWFIKKYSAIFSRLTRHEIIDFDSDGQIRCYPHVIVGLRSHRDLGIDPSSSPQNYTMVDFRLFVREAYGLPAAEVDIPYKADKDDPDKKPRIMLIDRGKSRRFVNVAHVVQGLDWFGFEVVKADPKIDSNLDEFVRLVDSCDAIMGVHGAGLTNMVFLRSGGVVVHIVPYGIKFMADGFYGAPARDMGLRHVEYSISPEESTLLEKYGWNHTVINDPETIRKGGWEKVAEFYMSKQDIVLNMTRFGPSLLNAIEFIM

SEQ ID NO: 45993 - protein, 577 aa, Oryza sativa
MSSLQHLCIRTWFQQHYFSLQYHEDWQLQFAAGIKTILFVPVVPHGVLQLGSLDLVPESSTSVALIKDLFYKLYDASISGSPSGTGFGYSNTGRQPAAMLPMDSPDVVPHNFFRSIKSSAQLLNNDHLSLLHAFPVLEFASTEDSIVSIYDTSLTACAVEPLDGNDSDIWTNVHEELSQFTRCNTASEADKANISYMDKLINSDSKMSCRSVSHAEDPGYGNIDHFILTEMERENQEHINNYTSVNDYAVTSNPSFHSELHKTLEPISREEREDCMWHIRYRQQESTSSALLQENGNKAGFDKQCENNDYAELLLDAINDQVIWASNSESSHSTDSPVSCATQIQKDDHVPRLDESSVPNFPGGQDFSLISIDEGFMSCTMTGSSLTETNKAILVEEDFISDPIEGMHRETVEIKGRCRKTGLHRPRPRDRQLIQDRMMELRQLVPNTSKCSIDSLLDKTIAHMQFLQCVSEKADKLEKIINSEGSTKRQPGSCPLKVEVLDQPGHLLLIEMVCEEYGVFLEIAHVMKDLEVTILKGLLESRSDKLWARFVIQASQGFDQMQILYPLMHLLQKQRWS

SEQ ID NO: 45994 - protein, 191 aa, Oryza sativa
MHTPSMDQPAASNGDEAPRMEMCPSLYRAARSGRAEEVMALLLQQRPGDGAAAHRQVAGIIQHRQCNVLEVTAERNTILHVAAEKGHGELIQELYHRFIRDNSLLSRRNSAMDTPLHCAARAGHAGTVTILVNLAQDCEENILGCQNAAGDTALHMAARHGHGATVEALVVARAKATVLVSMKGSDHVMTT

SEQ ID NO: 45995 - protein, 183 aa, Oryza sativa
MLAMSVHPAATPALASRARISRPKLSAASPCTTSSSSTPRLVHLGSRRLPLRSLRGLAAAAASGAVEAEEGEEEKQVGGGDASAGEEAQEYKVKVPERQDPMLVLKFIWMEKNIGIALDQLVPGYGSIPLSPYYFWPRKDAWEELRAKLEEKEWISQKQMIILLNQATDIINLWQQGGGSLST

SEQ ID NO: 45996 - protein, 126 aa, Oryza sativa
MASNSSAAAAAAFFGISRDGDQHDQIKPLISHQQHQHQQQQLAASLTGVATAAPTAASSQGAPPAAPPAKKKRNLPGNPSNQPKYPFTISAMHAYISVLRDLVSIDWSLIICFLTVKASYRSHRRA

SEQ ID NO: 45997 - protein, 247 aa, Oryza sativa; identical to SEQ ID NO: 30630

SEQ ID NO: 45998 - protein, 947 aa, Oryza sativa
MPSVSRAVCVQRASGNNGRRCRDGAAAAGRRSVVAQRARHGKPEVAIRSGSGGSARGGHCSPLRAVAAPIPTTKKRVFHFGKGKSEGNKAMKDLLGGKGANLAEMASIGLSVPPGFTVSTEACQQYQAAGKTLPAGLWEEIVEGLQWVEEYMAARLGDPARPLLLSVRSGAAVSMPGMMDTVLNLGLNDEVAAGLAAKSGDRFAYDSYRRFLDMFGNVVMDIPHALFEEKLEAMKAVKGLHNDTDLTATDLKELVAQYKDVYVEAKGEPFPSDPKKQLQLAVLAVFNSWDSPRAIKYRSINKITGLKGTAVNVQTMVFGNMGNTSGTGVLFTRNPSTGEKKLYGEFLVNAQGEDVVAGIRTPEDLDAMRDHMPEPYEELVENCKILESHYKEMMDIEFTVQENRLWMLQCRTGKRTGKGAVKIAVDMVNEGLVERRTALKMVEPGHLDQLLHPQFENPSGYKDKVIATGLPASPGAAVGQIVFTAEDAEAWHAQGKDVILVRTETSPEDVGGMHAAVGILTARGGMTSHAAVVARGWGKCCVSGCSSVRVNDASKIVVIEDKALHEGEWLSLNGSTGEVIIGKQPLCPPALSGDLETFMSWVDEVRKLKVMANADTPEDATTARQNGAEGIGLCRTEHMFFASDERIKAVRQMIMASSLELRQKALDRLLPYQRSDFEGIFRAMDGLPVTIRLLDPPLHEFLPEGHVEDMVRELCSETGAAQDDVLARVEKLSEVNPMLGFRGCRLGISYPELTEMQARAIFEAAITMTNQGIQVFPEIMVPLVGTPQELGHQVDVIRQIANKVFTDMGKTIGYKVGTMIEIPRAALVADEIAEQAEFFSFGTNDLTQMTFGYSRDDVGKFLPIYLSQGILQHDPFEVLDQRGVGELVKLATERGRKARPNLKVGICGEHGGEPLSVAFFAKAGLDYVSCSPFRVPIARLAAAQVLL

SEQ ID NO: 45999 - protein, 226 aa, Oryza sativa
MASLSPSLHLPCNSRTGFAGKTQGIRLRVIPAGRVGFVRTTVECKESRIGKKPIEVPSNVTLTLEEQFIKAKGPLGELSLNYPGEVKVVKEESGKLRVSKTVETKRANQMHGLFRTLTDNIIVGVSKGFDKKLQLVGVGYRAAVEGKDLVMNLGFSHPVRMAVPGGLKVKVEENTRIIVSGYDKSEIGQFAASIKKWRPPEPYKGKGIRYADEIVRRKEGKAGKKK

SEQ ID NO: 46000 - protein, 670 aa, Oryza sativa
MGEAVWSSLKRAISRVCNLQAHDGHWPGDYAGLMFFLPGLIITLHVSGVLNTVLSSEHQKEMRRYIYNHQNEDGGWGLHIEGHSTMLGSSLNYVALRLLGEGPNGGDGCIENGRNWILDHGGATFTTSWGKFWLSVLGVFDWSGNNPVPPELLLLPYQLPFHPGRMSSYIRMVFIPMSYIYGKRFVGPVTVVLELRSELYNDPYDEIDWNKARTQCAKEDMYYPRSSKLDMFWSFLHKFIEPVLLRWPGRKLREKALATSMRNVHYEDECTRYICFGGVPKALNILACWIEDPSSEAFKCHIARVYDYLWIAEDGMKMQIYDGSQVWDAGLTVEALVATDLVKELGPTLKRAHSFLKNSQLLDNCPRDFNRWYRHISKGGWTFTTADDGWQVSDCTATALKACLLLSRISPEIVGEPLEIDAQYDAVNCLMSLMNDNGGFSAFELVRSNTWLEHINPTEAFGRVMIEYPYVECTSSSIQCLALFKKLHPGHRKEEVENCISKGANFIESSQRSDGSWYGSWGICFTYATWFAVTGLVSAGRTLGNSATVRKACDFLLSKQLPSGGWGESYLSCHDEVYTNLKGNRPHGTHTAWAMIALIDAGQAERDPVPLHRAAKALLNLQLEDGEFPQQEIVGVFLQTAMISYSQYRNIFPIMALTGYRRRVLLAGNI

SEQ ID NO: 46001 - protein, 274 aa, Oryza sativa
MSSWNSVGMEVLYQVLGWVAFFAWSFSFYPQVFLNFKRKSVVGLNFDFLVLNLTKHSSYLIYNAALFFSPFIQRQYHETYGDKEMIPVAANDVAFSVHAVALTAFTLFQVFIYERGNQKISKVCISITAIVWTAAIVCLIVAWPKSNWLWLIDVFNSIQVGMTAIKYIPQAIMNFRRKSTIGWSIGNILLDLTGGVLNFGQMGVQSIDQHTLVNFYGNIGKTLLSLEVVFFDILFIIQHYVLYPVKRDENGKAIISERVAPLIRPSDKPEEDSV

SEQ ID NO: 46002 - protein, 811 aa, Oryza sativa
MEKIERHFKNEETKVLPQARIHFSSEKQRELLYKSLCVIPLKLLERVLPWFVSKLNDQDAEAFLQNMFLAAPSSEAALVTLLSGWACKGRSKGTSNSGKFICLTPRALSSPLDENGFKDCQLCPCSLQSDICSRPAKKWNDTESSNISNCSQTADIALTCKNRPCHIPGLRVEISNLAVNSFASAESFRSLSLNYSAPSLYSSLFSWETDAAFSGPDNISRPIDTIFKFHKAIRKDLEFLDVESRKLIDGDESSLRQFIGRFRLLWGLYRAHSNAEDEIVFPALESKETLHNVSHSYTLDHKQEEELFKDISTILFELSQLHADLKHPLGGADAVGANHIHPYNRIDWSKKNNELLTKLQGMCKSIRVTLSNHVHREELELWPLFDKHFSVEEQDKIVGRIIGSTGAEVLQSMLPWVTSALSLDEQNNMLDTWRQVTKNTMFDEWLNEWWKRSPTSSGPSSDASHPEEDHFQEKFDQSEQMFKPGWKDIFRMNQSELEAEIRKVSRDSTLDPRRKAYLIQNLMTSRWIAAQQKSPQPQSEDRNGCTVLPGCCPSYRDPENQIFGCEHYKRKCKLVAACCNKLFTCRFCHDKVSDHTMERKATVEMMCMQCLKVQPVGPNCQTPSCNGLSMAKYYCSVCKFFDDERSVYHCPFCNLCRLGQGLGIDFFHCMKCNCCLGMKLIEHKCREKMLEMNCPICCDFLFTSSAAVKGLPCGHFMHSACFQAYTCSHYTCPICSKSLGDMTVYFGMLDGLLAAEELPEEYRDRCQDILCNDCERKGRSRFHWLYHKCGFCGSYNTRVIKIDRADCSTSD

SEQ ID NO: 46003 - protein, 586 aa, Oryza sativa
MAHDPSLGYADYFAAEVDGTGATELYGLQQHQQGVGVAEMFGVRGLMPAAHAHEQSKGVGALVVGGGGVDDGGATTLPTVHFGGLGELHHHQHRQSQAPLSLSLHRPEAAATSLLMQQQQQHLHHQPSPPAGAASTWQLQQGAWHLRGSRFLLPTQQLLQEFCSLPVKSTTSPSSASKATKPPQEEAASGGGSSSWTAPTQIQSMDAAELQRLKGKLYTMLEEVDRRYRRYCEQMRALAASFEAVAGERAAASYTRLASRTISRHFRSLRDGVVAQLQAVRKQLGEKDTAVPGMTKGETPRLRVLDQCLRQHKAYQAGMLESHPWRPQRGLPERAVSILRAWLFEHFLHPYPSDVDKHILARQTGLSRSQVANWFINARVRLWKPMVEEMYAEEMKDEEGSGQSTQASNPQNPNPSSYTSEVRGGGGGGEDRGEQKPSRAQLLHDAGSLASVVSIGHGGAGRTMVDHHHHQSLNFGTMDQLDFDAYEAAGGGQGFGAGGGVSLTLGLQQQHADPHDGVNVAFAAAAAPPNSSGVAAEYLFMGGGEHQQQLPQTAQFGAVMEGDAASHYRGLSATAAGFHLLHDLAG

SEQ ID NO: 46004 - protein, 318 aa, Oryza sativa
MAKKRESCTPDARGTPWKGRLRSHHPALPTSPSLLPSSSAKNQKKKREQEAQSFKRRAAPKKAKDTGKCGSRSQDAAEKPLLPAPPRRSPRLAGNPPALVDGVCKESMVRGKQSAIVPFRRSLRLRHNQNSQNAFSMDQNHESSSRRSQKNTVVKLSMRMVSHKDSQKIFCQDSQGIPPRIRVPDLSCKKTQKEELNSNCCEKLARKRKRGTEERMSSSKRQSHKDPKSLSLKCQESTPTNKPRNTSHKKGENNSSSMPQPKFCDGRLMNAERNNKELNGSERRETQCGLNNWTEEQDMALRKAYFTARPSPNFWKKV

SEQ ID NO: 46005 - protein, 488 aa, Oryza sativa
MAVVSGPDKGRGAEAVVVVAVRAAARDISKAALVWALTHVVQHGDTILLLAVMPPPHNSGKKFWGFPLFAGGCASAHRSVLTQNSDVADLCNQMMLKLRDFYDPNKIITKLKVIPASPGGVATESKRAQASWVVLDKELKHEEKRCMEELQCNIVAMKRSRPKVLRLNLVRSPPKESKSPLPPLPELSDSVGETESSINEQRCPIREPAVTPSSSPESETAFGSTDVGTSSVSSSDPGTSPYSASETNSTFKKEATKDNFQHSDVNVSDSESEASTPPAASSLQPWMADILKGSASSRLAGNRPRRTRTPTADALLEKISKLDLLAEISAIRSRSDLNFRGNVRDVVSLSRSAPPGPPPLCSICQHKTPVFGKPPRWFSYAELELATGGFSQANFLAEGGFGSVHRGVLPDGQAIAVKQYKLASSQGDVEFCSEVEVLSCAQHRNVVMLIGFCVEDKRRLLVYEYICNGSLDSHLYGKLIIILQILCD

SEQ ID NO: 46006 - protein, 83 aa, Oryza sativa; identical to SEQ ID NO: 30105

SEQ ID NO: 46007 - protein, 904 aa, Oryza sativa
MAGAAPLRDSLRRLCTDVGWSYAVFWRATRAADSQRLKLVWGDGHYERAAGAPSISGFEAMDLLLKEKAAALRSGTGRGGGGGEGHAADGAAGHSHDRVDALVHKAMAQQVHVVGEGVIGQAALTGLHRWIVHDIVDECEEEDEVLLEMKGQFCAGIQTIAVIPVLPRGVIQLGSTKMVMEEAAFIDHVRSLFQQLGSSTAVVPCGSFVQDSIMRTPFHKSLGVPTSSHSEDLAGGGNTYNDDMINHQFRHQKSPASTIQSFNPVQQFYAGPTFCRPVTIASRCDLFQPDHGSTFTLNSQSEDNRSTALLKNSVSHSKTSNDAFSHAFNPLNEPNVSISGRRECVSIEQHGSCRNGEMEITIGRTASSSCTGKTNIINKVDDLLSQDCLVGCQASNATSVNRKFQTMSIVDNTKLQDGSYAIPHAALVDSTQYSDCFQSLLGTIQGSSSSNSNAIHVDTSHNAVHGKSNFCPLGDRNAANSSDLAELLASPIPLELTGGNDLFDVLQLQQKPNGSNNSEVNNRQSMPYGSEQAVKSLIGCVDDDFTGLITEADPDQLLDAIVSKIITGHKQNVDTSASCSTTVAGFDRPLHSDCHLYTTGPSSGPIFCNFASVAPVAIKTEGPAAGSRQSSSSIDKSAGCSQTQESYKSQIRLWVENNHSVGSDSLSTGQASDSLSTGQCKRSDEIGKSNRKRSRPGESARPRPKDRQMIQDRIKELREIVPNSAKCSIDTLLEKTIKHMLFLQNVAKHADKLKGSGEPKIVSHEEGLLLKDNFEGGATWAFEVGTRSMTCPIIVEDLNPPRQMLVEMLCKERGIFLEIADQIRGLGLTILKGVMEVRKDKIWARFAVEANKDVTRMEIFLSLVHLLEPSTGSSILSAGVENTSLPRDSFFPSSIPASGFSNCL

SEQ ID NO: 46008 - protein, 600 aa, Oryza sativa
MATFFSSSTNQRDLTGGGGDGGDMSFQHYPPPSNPYSDSSAGGLIPLPASIVSHSHIAHGGGDEPAAFREAATADGGEMGLQTQLLMAHGAAARGHQGGLSLSLGTQVPVSLYQYRPAGMAAASLLSPSQSSPMAGRSAQNSIYVQNSRFLRAARELLDEVVNVRDAIKRKGDKNQGKDSGECKGGDAAGDDKAGSNPQEQESNSAPELSPSERQDLQNKVTALMAMLDQVDRRYRHYHHQMQIVMSSFDAVAGGGAARPYTALALQTISRHFRSLRDAIGAQAQAARRGLGEQDASAQGGGGLSRLRYIDQQLRQQRAMQQFGMMQQPQHAWRPQRGLPESAVSVLRAWLFEHFLHPYPKDSEKLMLARQTGLSRGQVSNWFINARVRLWKPMIEEMYKEEFGAEMDSNSSSENGGGGGGKGKDEAISSEDRDEFQSPSSAAAARHAGVAGQLNNPFKSEAMGGAALDVGVGVVGLSSCLGGAMGTYATGLNLNHHVHHPGAGGTSLLHDALHHHHHGGGGDARFVSYGDMADLGGGGGYDGGSVSLTLGLQHCNNAGPVPAEQQGLLYGSAGDFDYINGSDDRQRFGPASQLLHDFVA

SEQ ID NO: 46009 - protein, 203 aa, Oryza sativa
MNEGNIHIGATTPPSVAKLYQNQFEKDFSRFLQMRCMEIVPGGRMVLTVAGRKSKDVFNAGGTTTIFDLLSQGLRILVAEGRVAKEKLDSFNIPVYCPSADELTQLVQQCELLDISDIQLFEMDENRMHDSEQAEGTTAAHTAGQSMSATLRVATESLVASHFGEDILEEIFTVFARNFTSYIESEVEKSGITIITLYLQAKH

SEQ ID NO: 46010 - protein, 361 aa, Oryza sativa
MGRHGMSRGAAAGDGGGCLPMPVISAEVALAVIDASISVAAFVQLARIHRHDQQHGWTRQKIFHFMIGLCNLVFLVYFVSTIIATCERWLCWVHGCGFVLMASPQILLLASFLLLLSFWVDLCHQTNDEDEEDTRSHHEALLDRTKNKPGIRAADVRRRCCPGVQLGSRQKFVILVLLLSFVVTIAFAILIWIGRGENPIDSSLLKRVYLDVFSVVVLVLGGALACYGAILFSKMSKVRSETGSSEKRKVASLATVSLICFSSSAILALVTNVPVLVYWYSADEYIINNAIILFMYYFIGSSIPSGFVLWVMKDIPHRQTVERPTQSRVVILFRDRPSPTQDPQWRTAVTSSNKALKSSPI

SEQ ID NO: 46011 - protein, 117 aa, Oryza sativa
MEGDSFSGMANGGQVDNKLIQTFHKSFVQVQSILDQNRMLINEINQNHESRAPDNLTRNVGLIRELNNNIRRVVGLYADLSASFARTMDASSEGDSSGTLRSSDGAGRSGQKRVRPG

SEQ ID NO: 46012 - protein, 519 aa, Oryza sativa
MMMALRRAVGIGSAAALRSAAYLRRASPSPARPHPLVPPPPAARTFAAPPQVMKRSTKDDDDDGPRINNDITSPFVRLVTDQGHSVVPRHEALQLAARMDLDLVEVHRKSDPPVCKIMDFHKEKYKKDVKEKERLKTKSAIVLRGGENKEVRFKGKTELKDLKVKADGITRLMERGYRVKCMAMPSGNEEEDLGGPLSRLLGLIQDVCIVESGPHLDSKHAYVIVRHVKFATKKAGKKASKAIEDVGKGARKNASELSTVTADSGDETNDCGNGAISDQMDNAPAYVSNEFSMQKDAHDRGSRRELSWSKSNPGNYGENMQNVDAGAHRISSSQRAAQTSEGGFGSNNVKSGMEKQEKANEDVVPAETNRYASRRQQIRGDNQGLSQDRSPQGHRRNENEVRYPVNDYQRPLQQNNRQSPRFNDGRLPQEPRRNERGGHIPLNNKQGQFQQMNHPAESAGNGAGYPTPTAKSFGVFSTRKPATSELGKTNGASRTANSDVPKSYGIFSSPRRESGDKSS

SEQ ID NO: 46013 - protein, 369 aa, Oryza sativa
MNPAPSRAPQRQQRGGEMSARYGGGLQFFADAPPAGVEGGAATARTFFPVPGGGGEQQPPERAMRQQHYGGGGSGAAEISLGHGHGHGGKHHFHQFGVEAKDGGGGGDQSGFLTRHNSSPPGFFSSPVMDNGFSSSARPAGSSLGEVRHGAMSSSSNNNKKMKAPLSFASSRQGSGGLSQISEDGIPDLTDSIHGAAHHHGRSEENVSTHDHVVRSFSSGGFSIGSWEDSNSIVFSTSTGKSGAHGNDDIIATLSNYESQLVAPREMAGVEKYLQMQHDQVPFRVRAKRGCATHPRSIAERERRTRISEKLRKLQALVPNMDKQTSTSDMLDLAVDHIKGLQSQLQTLKEDKEKCTCSCKQASRNRPAD

SEQ ID NO: 46014 - protein, 485 aa, Oryza sativa
MAAEGEEARSPHVVLFPFLAHGHIPAFLRLAGHLQTLRPGLAVTLVSTPRLLGSLSLPATSPPIRLHALPFAPADHGLPDGAESLADLHVHQFITLFRASESLRPAFDGFVAGIRPPVCVIADSFFAWTADVARARGASHAVFLPGGAFGHAVFFSVWEHLPHTLTAGGDEFPLLPDFPDVVLHRTQIPQYMLAATGADPWTAFFRRVIPCCRKTDAVLVNTIQELETSGLDMLRASFGVQTWAIGPILAAPDPSKSQDDDDTSIIRWLDAHPRRSVLYISFGSQNSISIRQMAELALGLEASGRPFVWAVRPPVGFDPKDGFDPGWLPAGFEDRMARAGRGLVVRGWAPQARILAHPSTGAFLTHCGWNSILESLRHGVPLLGWPVGAEQFFNAMVVVEWGVCVEVARGNLESSAVESGEVAEAVGAVMGETEKGEAMRRKAGEIARAMAAAWEGPAGSSAASLERFLRCVEASALRDSCLGAS

SEQ ID NO: 46015 - protein, 70 aa, Oryza sativa
MLLFSAGRERLLDHCESCPQPNHRRWPLQPERGGGGEGREVSGEKQARYVYARLVPPYLLLEGELRRQGS

SEQ ID NO: 46016 - protein, 231 aa, Oryza sativa
MEGSSASQAKALFKATLLGLAILSMVTWVPHMYSCIKMFLVSVPSAASTLATPRCLFIFSNIIVIFLASELKLSEGESFGESPIPTNHGSDDSIRYRVEAFTLTTKSNDVIVNHVVEEQVSTVIVHDDSLQQLDQCEQVDASSTMSMDKESRRDNNNNNLAIGANVGNNGESEEVEEQGGAISLGKVIEEEMIEEEDVGLPTDELNRRVEDFIARFNMERQLEARMLVCCY

SEQ ID NO: 46017 - protein, 167 aa, Oryza sativa
MASPLRRLRSWRVSRGATSPCSTSAASMAAARTTNTLHRLLPLARAVHSSLPPSRYGDPRSPPQARRPSGEVELSKLEKTPSDRFDEIEAAIHANLVNDIEAYKSSLMADHGFFERMLTSMGIKKSYTRDQTLWLCKLILIFFASGSVGIGFAKIDDRLKQAPSNAL

SEQ ID NO: 46018 - protein, 147 aa, Oryza sativa
MDAGGEEAKQERHLVARAGPQALPPLPSRRRRRPRRPWSPSAPTSSTPSNPPSLSIYPSAGSPPARRGRVAGRRTTRARIDEEVRKLDGKIADAEENLGGIEVREAHLAESLYFISVRQKVNCMHAWRLYEVHDNASGSISCCHSYS

SEQ ID NO: 46019 - protein, 138 aa, Oryza sativa
MLVIVEADVLGFLGVEAVDVDADVVAIDIVQLGVLGGVDFHGEHVVACAVVAADVEEAQELRRLGIGEALVWGDDEGHAVGARIGVRGDDAEHEGHGEGLDYAIRLLLEPERSWVECVALDIGHAVCQLKEPCGGDHG

SEQ ID NO: 46020 - protein, 203 aa, Oryza sativa
MPGNAGRGLASMSSSAGRRAPMRIFELTATSCGRLRLGERRQFCVPSLLICKMPPLFALSVGGCFAFCLLCWRQSKACPQGVGGSTDRELVDGEVQVMRDMATRRALSRRAAARNAVGKGWASARSRISSISLCSQRPRRRAQQPQATPSLSGPRHRTLAAGRRRRQCRGGRGREEERRERERLLKGGDDMWASLTFFNLFDD

SEQ ID NO: 46021 - protein, 493 aa, Oryza sativa
MSIHWHGIRQLLSGWADGPSYITQCPIQPGGSYVYRFTITGQRGTLWWHAHISWLRATVHGPMVILPPAGVGYPFPAPHEEVPIMFGEWWNNDTEAVISQALQTGGGPNISDAYTLNGLPGPLYNCSAQDTFKLKVKPGKTYMLRLINAALNDELFFSIANHTLTVVDVDALYVKPFTVDTLIIAPGQTSNVLLTAKPTYPGASYYMLARPYTTTQGTFDNTTVAGVLEYDDPCPTTAAGKIVPIFSPTLPQINDTNAVSNFTAKLRSLASAGYPAAVPQQVDHRFFFTVGLGTHPCAVNGTCQGPNGSRFAASINNVSFVLPATALLQSHFAGKSKGVYASNFPYYPLNPFNYTGTPPNNTNVMNGTKVLVLPYGANVELVMQDTSILGAESHPLHLHGFNFFVVGQGFGNFDPINDPAKFNLYDPVERNTVGVPAGGWVAIRFHADNPGVWFMHCHLEVHMSWGLKMAWLVLDGSRPDQKLPPPPLDLPKC

SEQ ID NO: 46022 - protein, 487 aa, Oryza sativa
MASKSLFLLGAVLASLLLVAQDVSAARELAEANEAKGKNMKQEVAYGPQDEKLAHHADGYGHGGGYGGGNLLGAPKAIAAAVDDADGQLLLLLRVPIDQLGAPHDNDYLVYHPDPPSPKLDLLPNPPPPTLGDHQLAILSCGDDRYVVAALHVWSEFTSTLRLYRSSCSSGSWTSEEVSVEEPVRDRLCPIPDSAKRQLYHVTTKTITLGGAKGTVGWVDLWRGILLCDVLDEMSPRKLRDMPLPWPAKGNWRMYLNGDVSFCRDIAISQHKDSIKYLEMEIVSPRTVTTTIPTSTSADPTSYLEWVRRSREPQPTRRRSVFHPGSWRITTWSMPIPVTSWDDWRRDCTAESREVHLDTNPSHHYELLHSLMLSNSGDEHREEAQGQGATSSLSLGRLRLCYPALSCIDDDVVYLLGNAAGRGAKTGGMMVAVDVRNKELRGVAKLDPEKNTLYSMRCYLATGISKRLNTTTDTRVGRPEEDAEAAE

SEQ ID NO: 46023 - protein, 128 aa, Oryza sativa
MAKDPHVSISLTGLAMVVLLIFSSSFLQAAQGSDKKMAMKYDVPVKRLVYRPSAMQAAVIGTEAAAYEPFELCMGCRCCASSNASSCVDTRCCYAIDCNIPGKPFGVCAFSPHTCDCGATNCTSQQQP

SEQ ID NO: 46024 - protein, 169 aa, Oryza sativa
MSGNGVKKVAEVAAKAGKAIDWEGMAKMLVSDEARKEFNTLRRTFEDVNHQLQTKFSQEPQPIDWEYYRKGIGSKVVDMYKEAYESIEIPKYVDTVTPQYKPKFDALLVELKEAEKESLKESERIEKELAELQEMKKNISTMTADEYFAKHPEVKQKFDDEIRNDNWGY

SEQ ID NO: 46025 - protein, 460 aa, Oryza sativa
MDASAGGGGNSLPTAGADGAKRRVCYFYDAEVGNYYYGQGHPMKPHRIRMTHALLAHYGLLDQMQVLKPHPARDRDLCRFHADDYVAFLRSVTPETQQDQIRALKRFNVGEDCPVFDGLYSFCQTYAGGSVGGAVKLNHGHDIAINWAGGLHHAKKCEASGFCYVNDIVLAILELLKYHQRVLYVDIDIHHGDGVEEAFYTTDRVMTVSFHKFGDYFPGTGDIRDIGHSKGKYYSLNVPLDDGIDDESYQSLFKPIMGKVMEVFRPGAVVLQCGADSLSGDRLGCFNLSIRGHAECVRFMRSFNVPLLLLGGGGYTIRNVARCWCYETGVALGHELTDKMPPNEYFEYFGPDYTLHVAPSNMENKNTRQQLDDIRSRLLDNLSKLRHAPSVQFQERPPEAELPEQDEDQEDPDERHHADSDVEMDDVKPLDDSGRRSSIQNVRVKRESAETDAADQVFFY

SEQ ID NO: 46026 - protein, 298 aa, Oryza sativa
MLRAGGAASAALPLRRATNCLGATALHEAVRNGHAGVVALLMAEAPELASVANDGGVSPLYLAATVGSVDIVRALLHPLPDGTPSPASAAGPDGRTALHSAATTGKEIAREILDWKPEGRTLLTKADSSGRTPLHFAISSQIERFDVFQLFLDAEPSLALVCDIQGSFPLHVAAVMGSVRIVVELIQKCPNNYNDLVDDRGRNFLHCAVEHNKESIVRYICRDDRFGILMNAMDNEGNTPLHLAAEYGHPRMVSLLLETMSVDVAITNRDGLTAADLAYRHLQPGLHYFLVMEHGSVH

SEQ ID NO: 46027 - protein, 507 aa, Oryza sativa
MVEGVLLVVDSVEGPMPQTRFVLKKALEFGHAVVVVVNKIDRPTARPEFVVNSTFELFIELNATDEQCDFQTVYASGIKGKAGLSPENLGDDLGPLFEAILRCIPEPRIEKDGALQLLVSNTEYDEHKGRIAIGRLHAGELQRGMEVKVCTPDDACRISKISELFVYQNFSRVPVDNVSAGDICAVCGINDIMIGETIADKVSGTPLPTIKIEEPTVRMSFSINTSPFVGKEGKYVTSRNLRDRLYRELERNLAMKVEDGETADTFLVSGRGTLHLTILIENMRREGFEFMIGPPKVINKTVDGKLQEPYEIAAVEVPEEYMGSVVELLGKRRGQMVDMQPSGPEGTTLLKYKIPTRGLIGLRNAVLTASRGTAILNTIFDSYGPWAGDLSSRDQGSLVAFEDGSTTSYALLNAQERGILFVSPGQDVYKGQIVGIHQRPGDLAINVCKKKAATNVRSNKETTVVLDEALSYSLDDCIEFIQEDELVEVTPASIRMCKNPKVSKKNR

SEQ ID NO: 46028 - protein, 154 aa, Oryza sativa
MLSLHVGFVPVLHGDAVLDELLDCTILSGDVIIRHLAQLLSPKYVVFLTDVHGVFDRPPSDPNAVLLREIAVDENGSWSIVKPALKGNKKGVEISVAAHDTTGGMETKILEAAAIARLGVDVYITKVGTEHSLRALKGDTSSEDWLGTVIRSSR

SEQ ID NO: 46029 - protein, 646 aa, Oryza sativa
MEMEEDGGGGKVVYVAVSGNRNKALPTLRWALRRHAPAPEGRKKTALLVLVYVHRPATMIPIFRAKVPSIVLKDEIVTSYRQQERRITEKFLQQYLDICTSEKVQAEAFMIANDNIAHGLIGAIQEHKISTLIMGAGIYGKTSNLFSIRPRTTSIPISVNSDVPTMAGSHIPWFSFIPPWHHDDRSSVTSSSFLTDSQTMTDNGLDPENLDHQFFENAMPMFDYDSFSLIRHESLHGLNEIASQIILSGHSQYLRQLNFDVSCNEEVRNRQFIHGIDSILGVDSMNLEKVYWKAYMEDKTIKWIYLLEYIHKIVSVSLKQIQEQHDGASSGLTLEGLSDAATKPINRLLTFASAVSKVNGSPEKLFHTLQMHKALSEASPMIQQALLGEQKEFFVRELHRILDTLEDSAREILGKLKVQIQSHDSPIIPGGSVHLVTTYLMRYITLLAHNTSSLNTILGHDHSDHLLAADGINLLLPSHLISGLIFDLGSMLQKQSKLYKPEGLQYLFLMNNEHFILQHFEREDIKLMIGTEWIQKYCHNINRYKVKYIEATWATVVSCLDKKISISLNFLQPSPLKEFISSFETEYRLQMHWKVPDPKLRIELRQTVCDYVLPAYCEFMEKHPNLEKSGDNLEDIRNKLNELFEG

SEQ ID NO: 46030 - protein, 531 aa, Oryza sativa
MADTGGRPEVSLATVRSPGHPAASTTAAAAADLGHADTGQEKPTVESAQPANGAAPMGECGTEYRGLPDGDAGGPMPSSARTVSMIPLIFLIFYEVSGGPFGIEDSVGAAGPLLAIIGFLVLPVIWSIPEALITAELGAMFPENGGYVVWVASALGPYWGFQQGWMKWLSGVIDNALYPVLFLDYLKSGVPALGGGAPRAFAVVGLTAVLTLLNYRGLTVVGWVAICLGVFSLLPFFVMGLIALPKLRPARWLVIDLHNVDWNLYLNTLFWNLNYWDSISTLAGEVKNPGKTLPKALFYAVIFVVVAYLYPLLAGTGAVPLDRGQWTDGYFADIAKLLGGAWLMWWVQSAAALSNMGMFVAEMSSDSYQLLGMAERGMLPSFFAARSRYGTPLAGILFSASGVLLLSMMSFQEIVAAENFLYCFGMLLEFVAFILHRVRRPDAARPYRVPLGTAGCVAMLVPPTALIAVVLALSTLKVAVVSLGAVAMGLVLQPALRFVEKKRWLRFSVNPDLPEIGVIRPPAAPDEPLVP

SEQ ID NO: 46031 - protein, 377 aa, Oryza sativa; identical to SEQ ID NO: 45945

SEQ ID NO: 46032 - protein, 264 aa, Oryza sativa
MHPPAAAGGDHATAAPAPATGAAAATASDYAHYPRLSPEDVAPPPPPSYHAAASSAPPYSGNPYVSSPAGGVAPASKNTMDTVKDVLGKMGKRFGEAARKTETLTGNFWQHLKTGPSITDAAMGRVSQITKVIAEGGYDKIFHQTFDVLPDEKLKKPYACYLSTSAGPVMGVLYLSNKKLAFCSDNPLAYKVGDKDEWSYYKVVIPHTQLRSVNPSTSRTNASEKYIQVVSVDNHEFWFMGFVYYDSAVKNLQEALQEAQNLRA

SEQ ID NO: 46033 - protein, 587 aa, Oryza sativa
MDAAAAMEKQQQPGEKKITGGEEEEEEEVISSVRYRGWKSMPYVIGNETFEKLGTIGTTANLLVYLTTVYHLPSVRAATLLNFFSGTTNLAPLLGAFLSDTFLGRYTTIAAASLASCLGMLVLTLTAAIPSLHPPPCTASSSSSSCQGPTHGQLAALLATFAFLVVGAGGIRPCNLAFGADQFDPRTDSGRRGIASFFNWYYFTFTVAMMLSATLIIYLQSNVSWAIGLAVPAALMAISCALFFMGTRLYVRVRPEGSPFTSFARVIVAAVRKRRVPAPASADDLFDPPHQSKLVAKIAYTDQFRCLDKAAVVTPESRSSPWRLCTVQQVEEVKCLARIIPVWSAGIVYFIVVTQLGTFVVLQALQMDRRLTRWWAFEVPAGSMVVFNMMAMTVWIPVYDRVVVPALRRVTGKEGGISQLQRIGVGLVLSVATMVVAAAVEQRRRRLGAVGVKMSFLWLVPQQVAAGMSEAFAAIGQTELYYRQFPENMRSVAGALFFLAFALANYASGFMVAAVHRTTGWLAQDLNHARLDLFYLTVAAIAAANVCYFLLCARWYRFKNTTIADHVELPDYHHHQPGTANTIASKV

SEQ ID NO: 46034 - protein, 249 aa, Oryza sativa
MAQAVEEWYRQMPIITRSYLTAAVVTTVGCTLEIISPYHLYLNPKLVVQHYEIWRLVTNFLYFRKMDLDFLFHMFFLARYCKLLEENSFRGRTADFFYMLLFGATVLTGIVLIGGMIPYISETFARILFLSNSLTFMMVYVWSKHNPFIHMSFLGLFTFTAAYLPWVLLGFSILVGSSTWVDLLGMIAGHVYYFLEDVYPRMTGRRPLKTPSFIKALFADDNVVVARPPNAGLGAGARFGAMGADPQAQ

SEQ ID NO: 46035 - protein, 146 aa, Oryza sativa
MASSGDPSAVVVPRNFRLLEELERGEKGIGDGSVSYGMDDADDIYMRSWTGTIIGPHNTVHEGRIYQLKLFCDKDYPDRPPTVKFHSRINMTCVNPENGLVDQRKFSLLSNWRREYTMEAILTQLKKEMAASHNRKLVQPPEGTFF

SEQ ID NO: 46036 - protein, 625 aa, Oryza sativa
MASISGAAAPPSSSAACRLRLRRQLLLRPSHLRLRAPHSIADLSRSSSSSSEQQPSSTPAAPLASRPGQNGSTRGAVEKDPIKLWERYVEWLYQHKELGLFVDVSRMGFTEEFLRRMEPRMQRAFAAMRELEKGAIANPDEGRMVGHYWLRDPGLAPNSFLRTKIETTLDRILAFSQDVVSGKIKPPSSPAGRFTQILSIGIGGSALGPQFVSEALAPDNPPLKIRFIDNTDPAGIDHQIAQLGPELASTLVIVISKSGGTPETRNGLLEVQKAFRDAGLDFSKQGVAVTQENSLLDNTARIEGWLARFPMFDWVGGRTSEMSAVGLLPAALQGIDIKEMLVGAALMDEETRNTVVKENPAALLALCWYWASEGIGNKDMVVLPYKDSLLLLSRYLQQLVMESLGKEFDLDGNRVNQGLTVYGNKGSTDQHAYIQQLREGVHNFFVTFIEVLRDRPPGHDWELEPGVTCGDYLFGMLQGTRSALYSNDRESISVTVQEVTPRAVGALVALYERAVGIYASLVNINAYHQPGVEAGKKAAGEVLALQKRVLTVLNEASCKDPAEPLTLDQIAERCHCPEDIEMIYKIIQHMAANDRALIAEGSCGFPRSIKVYLGECNVDEDMLAA

SEQ ID NO: 46037 - protein, 374 aa, Oryza sativa
MGINQNKLLRPRRPGFQFIEEGKLSRQAELQRIKNQFGEAQAKELKVKQAQLAKAKAEVVMNPNLIEVAPGRPPKQKQKEEIPEIEPWDAKILPSTTYDDFSMEKVNMEKITIYVEHPEPLEPPAEPAPPPPQPLKLTKKEQKKLRTQRRLAKEKDRQEMIRQGLLEPPKPKVKMSNLMKVLGAEATQDPTRMELEIRTAAAEREQAHVDRNIARKLTPSERREKKERKLFEDPNTLETIVCVYRIRDLSHPQTRFKVDVNAQENRLTGAAVIADGISVVVVEGGKKSIKRYNKLMLNRIDWAAAVDDDDDADEESDKPVNSCALVWQGSVAKPCFTRFSVHNCRSEAAAKKVFADASVPHYWDLAVNFSEDSS

SEQ ID NO: 46038 - protein, 331 aa, Oryza sativa
MAMKCLFLFFAFLVAFFPGAAVGAGLKVGFYNKTCPSAERLVQQAVAAAFKNNSGVAPGLIRLHFHDCFVRGCDASVLIDGNDTEKTAPPITQPPRIRGDRRRQGRRRGGVPACRLLRRHPRLRRPRQRRPHRQRHLQGPRRPPRRQRLHRPGRARQPAPSHLQRHGARRPLRQQVAHRGGHGGALRRPHHRRLPLRLLHQPPLQLHRRRRRRPGDQRRLRVPPPRRVPLQQQPVLPQHHGGHGRDHPGGARQQVLRRGRQQPGPLHVGPRAAHQRHAQGVGGRVRQERDAVEEQVREGHGEDGRHRGEDRDDAGRGQAQLQGRQQEERQR

SEQ ID NO: 46039 - protein, 404 aa, Oryza sativa
MASAAMSTLNLSSSPLTKQQLRFGASTLSAEHVSGFSSARPAPSLCCSSSHWRAVKLRPRRRPWRRAGNRVVAQAGGYKVAILGAAGGIGQPLSLLVKMSPLVSALHLYDIANVDGVTADLGHCNTPAKVAGFTGKEELAGCLAGVDVVVIPAGVPRKPGMTRDDLFGINAGIVRELVEAVADHAPAALVHVISNPVNSTVPIAAEVLKRKGVYDPRKLFGVTTLDVVRANTFVAEMKGLPLADVDVPVVGGHAAATILPLLSKARPKTAFTDEEVEALTRRIQNVGTEVVEAKAKAGGGSATLSMAYAAARFLEASLRGLDGDADVYECSYVQCQAVPELPFFACRVKLGRDGVEEVAAAGAELRGLTEFEARALEALKPQLKKSIDKGVAYAQQQPATVAMG

SEQ ID NO: 46040 - protein, 193 aa, Oryza sativa
MGEEEEDPDWLRAFQPPTTSTVMLSSGSDDSPDSIDLSGDVGAVGRIIISNSPNGNQELLLDLKGTIYKSTIVPSRTFCVVSVGQTEAKIESIMDDFIQLEPQSNLFEAETMMEGTLDGFTFDSDEEGDKLPEPHASQNDQNNEDGDQPKAKTKRKAEKPAGKGQKKAKVAGKATKKGTRKTQTTKRTKKAKK

SEQ ID NO: 46041 - protein, 281 aa, Oryza sativa
MWRRQVGALLLRHRSTPSSTLRHHLPLPVPDQSPPLASNLLLRLFTSQSGEGGDGATKPFIAFVLGGPGSGKGTQCVRIASDFGFAHLSAGDLLRSEISTGSEKGELILNIIKEGKIVPSEITVELIRKAMESSDAKRVLIDGFPRCEENRIAFERITGTEPDLVIFFDCPEDEMVKRLLGRNQGRVDDNIETIKKRLKVFESLNIPVVDYYTSRGKVHKINATGTEEEIFGAVHKLFSSLSLFSLIEGIGKRANGGKSLHLQHAWTTIGHDAFSTAAARR

SEQ ID NO: 46042 - protein, 115 aa, Oryza sativa
MGFCMVVLLQIWKLQWHGYHVRSSLLVDAPCSSVPDVQATGRHELLLPALHRLACIDEEYLRTPGVKKGVAFGSLAARSAVSSGPARPRHPSCRGLGCCDVVLPWSPFGLFSILF

SEQ ID NO: 46043 - protein, 670 aa, Oryza sativa
MAAAAAASSMAKRKQRKAATEQEVENHDEATVAAEAGPENDGHTAHAAEEAAAAEEGVEREGGGEGGAEGEEGPDAAARGGEEGKEEEEREVSFDELGLDEQLKRALRKKGLDKATPIQREAIPLILEGKDVVAKAKTGSGKTFAYLLPMLHELLKLSAEGRIRKSAPNVFILVPTRELCQQVHNEASSLLEFCTSKLKVVQVNASMSDKDIKVALSGPPNILVTTPACVASCISKGIIRGSSIKESLSMMILDEADLLLSYRCEDDIKALVPHIPRSCQSILMSATSSADIEKLTKLLLHNPFILTLTEVGHAKDDLIPKNVQQFWISCDAKDKMLYILVLLKLELIQKKVLIFVNSIDSAFKLRLFLEKFGIRSSVLNAELPQNSRLHIIQAFNARLFDYLIATDDNKSKEERQANKGNKKDSRVSRKQLQQTLDAEFGVVRGIDFKNVFTVVNYDMPPDPAGYVHRVGRTGRANKTGASISLVSPKENGIFEDIENMLKDVENRDTSCISPFPLLTKNAVESLRYRAQDVARSVTTRDIKEARRQDIKNEILNSEKLKAHFDENPRDLDLLKHDKLLSNKEIPAHLRDVPEYLIDPTTKEASNVVKLSRAAMDIDKPRRRKRMGFKGGSGRSSDPLKTFSAEGKSRRRGRKERDGEQDRRKRKKVES

SEQ ID NO: 46044 - protein, 367 aa, Oryza sativa
MVMGASGSKLEKALGDQFPEGERYFGLENFGNTCYCNSVLQALYFCIPFREKLLEYYANNKTPGDAEENLLTCLADLFMQVSQSKKKTGVIAPKRFVQRVKKQNELFRSYMHQDAHEFLNFLLNELVDILEKESNAAKDSPQSSSPEKVPNGPVQPLANGVRKEPPVTLVHKNFQGILTNETRCLRCETVTARDETFFDLSVDIEQNSSITSCLKNFCSTETLNAEDKFFCDKCCSLQEAQKRMKIKKAPHILVIHLKRFKYIEQLGRYKKLSYRVVFPMELKLSTSDDVDTEYSLFAVVVHVGSGPNHGHYVSLVKSHNHWLFFDDENVEMVEESTLQTFFGSSHEYSGNTDHGYILFYEGLGGKS

SEQ ID NO: 46045 - protein, 48 aa, Oryza sativa
MHSTPSCSSPPPIPAARSLSTPSAPSCSSPRRHGDDDRLLSKLLLPTT

SEQ ID NO: 46046 - protein, 245 aa, Oryza sativa
MLKVVESYAPNIATFHFRGHVHAVRMLGLLQVKDLEMSCSDHSSILCYALTNLLSIVPNVEKLRISSQTQIVSTQTVPGKYLRLKHLHISLNRSPNFDYLSLVSFLDASPSLETFILHIWDIYIPLGHMGHPWTLGDSEQLRQMPGHRHDSLKKFEVVGSCYAKGLVELTCHILETTSSLDRIKLDTCGYVGLCASGSGRCYPHYTEQIMEACNSVLAIRTYIMGKVPPTVKFELVEPCSRCPVQ

SEQ ID NO: 46047 - protein, 283 aa, Oryza sativa
MEWSQPDTQGAHINPRSGHAGTMIDENWYIVGGGDNASGSTDTIMMNASKFVWSVVTSVPARDPLACEGLTLCSTTVDGEKFLVAFGGYNGQYNNEIFVMKLKPRNLVQPRLLQSPAAAAAAASVTAAYAVITDEKTRDIVATDDLDVKRVQPSGSSKQITTELDALNGEKGKLESRLAEVRDENSKLKDRLDMVKLLHGELTKELKSVQHQLAAEGSRCQKLESQIAAAHKRLESTDSLENELEVLRQQISQVEQTMTTAQRQKSGGVWKWVAGSAEISDDE

SEQ ID NO: 46048 - protein, 540 aa, Oryza sativa; identical to SEQ ID NO: 31514

SEQ ID NO: 46049 - protein, 87 aa, Oryza sativa
MITVDQVIGRCGAKSMVWGIDVLVLIPFLSYLPSFLAYGMPNRWCGDRSMFWSRFAGSPSVQARVFAIMRHQAPPFCAASAVCRLQI

SEQ ID NO: 46050 - protein, 279 aa, Oryza sativa
MASGWAQLPDDLLDNVAQRTAGIKDYVRLRAVCKSWRSFLRPRSRPPWLMLPYDPCSESCVRGFLDASDGTVHEIDLPDTRGKRCCGSSHGWLVLERWPDVWLLNRATRERVQLPPLMRRGEALAPPRFMERGARERWEDCAYRSLRRPLLQREVRVAALSSDPSVVDGGCTVVVLLGAEEEAVFCRPTDASWTPLACPAGAFAAVDVACQSGLFHLVSHHGRVAVFDLVSPLREVPTRRDRLHALAHTWDGRCLVQRRGGCGHEPLLLATWSGGGGAG

SEQ ID NO: 46051 - protein, 237 aa, Oryza sativa
MSDTALSGAPPAARSEDSWSQQQSYNFSGRVLLTAVVILFVIAVVFAVTRVLLYYLVVRPGGGGGGRRRGGLAGGILRSLNSLGVSGRRGLDASALAALPVTAYRKNGGGGGGGEGSNRGGPGATAADCAVCLSELADGEKVRELPNCRHVFHVECVDAWLRSRTTCPLCRAEAEVPKARASAAATATAQSSSSLGDGGITVVVTIHGGSDEAGGRSTALTGQPGSSNSPSCEAARN

SEQ ID NO: 46052 - protein, 356 aa, Oryza sativa
MRFKLTLNKLYAWSLVSYDRVVMLDSDNIFLQNTDELFQCGQFCAVFINPCIFHTGLFVLQPSMDVFKNMLHELAVGRDNPDGADQGFLASYFPDLLDRPMFHPPVNGTKLEGTYRLPLGYQMDASYYYLKLRWSIPCGPNSVITFPSAPWFKPWYWWSWPVLPLGLSWHEQRRENLGYSSELPVVLIQALFYIGVIAVTRLARPSLSKMCYNRRMEKSTIVLLTTLRVVAAWSILAAYTIPFFLIPRTVHPLLGWPLYLLGAFSFSSIVINVFLLHPLAVLTTWLGIIGALFVMAFPWYLNGVVRALAVFAYAFCCAPLIWGSLVKTMSSLQILIERDAFRLGEPNQTAEFTKLY

SEQ ID NO: 46053 - protein, 400 aa, Oryza sativa
MVSSTSGGLSPPAVVLAVAVVLSAAASRALAAPCYPRVFCFGDSLTDTGNIAFLYGNDSRRPSLWPPYGETFFHRATGRSSNGRLIIDFIAEAMGLPFVRPYWGGQTAGNFASGANFAVGGATALSPDFFRERGVPMDDDTVHLDMEMEWFRDLLGMLCTGGDMGGCKGMMNQSLFLVGEIGGNDYNLPLMSGMSIEKIRNFTPSVIAKISSIITELIGLGAKTLVVPGNIPIGCIPMYLMQFESDKKEDYEPKIGCLRWMNEFSQYHNKLLVDELENLRKLHLDVTIIYADYYGAAMEVFLSPERFGIEDPLVACCGGRGPYGVSASVRCGYGEYKVCDDPAKYASWDGFHPSEAAYKGIAIGLLQGSYTQPPIVSITNSCPQIIGLGSSVEHKAMYDL

SEQ ID NO: 46054 - protein, 186 aa, Oryza sativa
MEKGERSERLFYKLLIDNVEELLPVVYTPTVGEACQKYGSIYRRPQGLYISLKDKGKILEVLKNWPERSIQVIVITDGERILGLGDLGCQGMGIPVGKLSLYTALGGVRAPCLHLHPSATIIAAITSVLAPSLTHRFPLRFALSPLRVASLHPHRIAPLIIPSWVTSFHIAASSGFVCSRPLADHP

SEQ ID NO: 46055 - protein, 80 aa, Oryza sativa
MQINLKWKLTQDMVSVRRTRRMNMEQWKMICMRKHPPPMMIQRMTHMNTFFGNRIMSKLQSLMLVRETMRHLSLMKKLKH

SEQ ID NO: 46056 - protein, 306 aa, Oryza sativa
MCEEATRSRVLVVGATGRLGGCLVRASLAAGHPTFALVRPHHLAVPDSAPLTSLAGATVVKGSLEDYPSLLEAVRQVDVVICAVPTKQALEQKLLIRAIKDAGCVKRFIPAEYGLDPTKVQICGMDHGFYEKKIEIRHLIESECIPHTYICCNFLMRYLLPSLVQPGLDAPPRDEVKIFGDGNTRGVFVEETDVAKFTICTIDDPRTLNNTLYLRPSGNVYSMNKLVDLWEKKINKFLDKIYITEEQLLKNIEDAPLPLKMDLIFIYSTFIKGDQTYFEIDSRKEGTQLYPHVNYTTVDGYLDKLV

SEQ ID NO: 46057 - protein, 69 aa, Oryza sativa
MTTLLFACSALPQRFAPNRTSRSAPPRPGARPHVETVASGRRRQVGPHCCFAGSNQLAHPVDLSVRYTR

SEQ ID NO: 46058 - protein, 350 aa, Oryza sativa
MASQEEKTSVKSEEASSAAEEQPPQAAAPPPRRGVPPANPFDFSTMMNLLNDPSIKEMAEQIAKDPAFTEMAEQLQKTVQSPPARGAAQEAAAAAAPALDPSKYVSTMQQLMQNPQFVAMAERLGSALMQDPAMSSMLGGLTNPAHKEQLEARIARMKDDPSLKPILDEIENGGPAAMMKYWNDPEALQKFGRAMGVGPSGEGAAAAGGEHEEAEEEGGEEGEYEDESVIHHTASVGDVEGLKKALEEGVDKDEEDSEGRRGLHFACGYGELKCAQVLLEAGAAVDAVDKNKNTALHYAAGYGRKDCVALLLDHGAAVTVQNLDGKTAIDVAKLNNQEEVLKLLEKHAFV

SEQ ID NO: 46059 - protein, 517 aa, Oryza sativa
MGPPQQARGGGIDIEACARPIAVDHRIKLPYYFRIAGNLLRQAKIYRDENNLVDLYVILLRYSSLVCETIPKHRDYHTFKLREVDFFRLAPHNQSKLIEVLSELESLKPVVQRQITEHNRARGGAIESNSINGTIAVNNITKQHMTNPYTYQPFVGSNNGSFERPVPGGNHQMAPLMSAQPDRLTRKQLANLPFPKEETLARHSILGPNGLHGQWTGPVTAIKVQYPSNLDIIKSDVSSLFPSVLNQDGQNGPSTISTDSTQIENDDMKSVLSLDDGRWSKLAEECASVPSVSLEEELSQLSIKQPSPPPVLAELERRPIAPSEVADPTPGLAVSETGRYQNLHVPVKLMECFLRVAEANTKRSLETCGVLAGTLKKRTFYVTALIIPKQKSTSDSCEATNEDELFDVQDKGSLFTLGWIHTHPTQSCFLSSIDLHNHYSYQVMLPEAIAIVMAPTDTRRKHGIFHLSDPGGMGVIHDCPERGFHPHKAPLDGSPIYEHCSHVYMNPDVKFDVIDLR

SEQ ID NO: 46060 - protein, 312 aa, Oryza sativa
MASWIITRSTWIMSVFFVILSFFQGLVMVGGVTFTFTNRCGGTVWPGVLSNSGSSALGTTGFALGAGETRSLAAPAGWSGRFWARTGCTFDDDGKGTCATGDCGSGEVECRGAGATPPATLVEFTLGSGGGGGKDYYDVSLVDGYNLPMVVEAAAAGCPATGCVVDLNQRCPAELKAGHGQACRSACEAFGTPEYCCSGDHGNPDTCHPSVYSQMFKRACPRSYSYAYDDATSTFTCTGTDYSITFCPRPGNPNSQKSSNDPSPRPKDPQLEDDSWLASLATGEVDGAAPASTSLLLQATLAVAVMALLVLH

SEQ ID NO: 46061 - protein, 300 aa, Oryza sativa
MQWAALSSPPAPAAPAAVWMGRRARTARLPSPGPRRVVLAAAASSSSPSPDANSSSNSNSPGSGGGGEEVEEEREDAARMEKAAAFLMRSQKYAMLKQQLAVAAQFEDYKEAARLRDSLKSFEEEEPVLRLRRSLKKAVEEERFEDAAKYRDELKILAPHALLKCSSDATTLGIRVQVRSVYIESRSQPLKGQFFFAYRIRITNNSQRPVQLLRRHWIVTDANGRTENIWGVGVVGEQPVIFPRTGFEYSSACPLNTPNGRMEGDFEMKHIDKAGSSIFNVAIAPFSLSILGDDNDDVLL

SEQ ID NO: 46062 - protein, 313 aa, Oryza sativa
MSGRDRLPRRFIEDGRGYPDIRVVDERRGYPDIRVVEDRRGYHGIRAIEDHRGYPDIHEGLVMRVAPRSHTAMPEEEIEIQGAEFRRLMADHRALAEERLALHRELQAGKDEVRHLNTIIADISAKKETYIGELVDKRRKLEAELRANESLRDEIVQLRGEIDKHLVVRKELSAKSASIMHELTREQSNKQQIPMLKAEIDALRQELVHARSACELEQKGNFQLVEQKKAMEKNMISMAQVIGQMRAELANSEGRPWAPGATYGMKLGSPEVTFPTSYGDNYNIHVGGSEKGHSHLPESSSWGTYDNNRLQYR

SEQ ID NO: 46063 - protein, 361 aa, Oryza sativa
MDAGAEPLLPPPASAVDHLGRPASRRTSGRWLAALFIIGVEISERFAFGGISGNLITYLTGPLGQSTASAAAAINAWNGAALLLPLLGAAVADSWLGRYRIIICASLLYILGLGMLTLSPVLVPHQQAESGDNADNNASSSMDIHVAFFYLSLYIVAFAQGGHKPCVQAFGADQFDENDPEECASRSSFFNWWYFGIYGGNVITVSILNYIQDNIGWQLGFGIPCIAMSLSLAVFLLGTKSYRFYPLRSNTSLFDQVGKSLLAKIRWWCASWCSKSSGDLHCTQASSSQGDHNDAEKACFPDEATAVLKLFPIGATCLIYAIVFAQWITLFTKQASTLDRWIGGTQRTLAVSQRCKGLELD

SEQ ID NO: 46064 - protein, 323 aa, Oryza sativa
MEEVQGMMDEVIFDHLHAAAFQGHPLGDTILGPVENIKSISKKDLEQYITTHYTCPRMVVSAAGAVNHDEVVDQVREFFTGFSTDPTTVDQLVEANPAIFTGSEVRVEQPEMPLTHFAIAFKGSSWANPSSIPLMVIQSILGTWNRSIGVGNCSGSALARGISNGNLAESMIAFNTNYRDTGLFGICTIAQPDSLCDLSQLIMQEFRRLAFEVSETEVARARNQLKSALLLHIDGSTAVSENNGRQMLTYGRVMPFLELFARIDAVDRDTVMETAKDFIIDKDIALAAVGPLTNLPELSWFRSHTYSDDEFSSRTFLQDAQNN

SEQ ID NO: 46065 - protein, 275 aa, Oryza sativa; identical to SEQ ID NO: 44529

SEQ ID NO: 46066 - protein, 254 aa, Oryza sativa
MVVGGFVDWRGNPIDRKVHGGVRAAWFMFFLSVVTNMENIPNMLNLVTYLHGTMHMGVSSSATTVTNFIGATSGFALLGAFLSDSYITRSRTILLFGPLEFLALGLLALQAYLPSLHPPPCNIEAELSNCEEVHGFNTVILHIGLYTWAFSEGCIRACTPSLGADQFDHEDPSESRQQSSFFNWFTFGISLGGFIGLILIVWLENYKGWDIGFGVCALLILLGLLIVATGLPFYRNQVPEGSPLTRILQVINLN

SEQ ID NO: 46067 - protein, 309 aa, Oryza sativa; identical to SEQ ID NO: 28843

SEQ ID NO: 46068 - protein, 124 aa, Oryza sativa
MAAGPRGRLLLVALVSAAAVVAGALLPGCAAAAAAEGEGATRALLRDAVPVLLAVHRQPPRRDLRGRDRRRRRPPPRPIRQRPRRRCQQHHLLPAWKRGVLPEHRGGLRHRCMAVLSWWSDLSG

SEQ ID NO: 46069 - protein, 48 aa, Oryza sativa
MKAQKSLVYKCRTSFFFSNPPHYFANDMMIGEGQRCNHSCVYIIGIYF

SEQ ID NO: 46070 - protein, 158 aa, Oryza sativa
MEALTKVMDKVKEVKSNPEVVEKLDKVKEDISSLAHALHLGKHDKEHESEEKAKEGETAKRADEGASASKSEDSGVVVQAVEEIQAVVTAVQQQLHTEGAAAETPNEAAAAETSAEGEKPEESKRDVEKDDPSKRLDFKGFFAMIFERCCNPGNKKKD

SEQ ID NO: 46071 - protein, 157 aa, Oryza sativa
MDKLVQFGRKAWFVVRVLSGYEERRIRAHRLQMQQRIARAQAKKEELRKQPEQIILSEVRQMVQQMQALNQQLEEAETAIDEYFKPIDKNAKIIMDMQLEKEEKQIKEMTKVMQDQIAMQREIASKRAQATAIESKDAQTQTSDKIAEGPPKEETMK

SEQ ID NO: 46072 - protein, 98 aa, Oryza sativa
MALICQRAWRQHARRPPLVPYPAPSPPSSLPPRSWPAAVDHGICSGRQKQRDGLPPLSLPSLLRLIFLSLRLPLLFFSWIKLLGIGNISYSNCVLTEN

SEQ ID NO: 46073 - protein, 415 aa, Oryza sativa; identical to SEQ ID NO: 31743

SEQ ID NO: 46074 - protein, 271 aa, Oryza sativa; identical to SEQ ID NO: 30406

SEQ ID NO: 46075 - protein, 407 aa, Oryza sativa
MASRTAGRERDPCEDEEVRVYSDSRGYFASGGRDVDVGPFPTSDELYAALDHHYHLRSKPCDPAPLPTQCEGLLRGASEPESAQALQEPDVLSVGELLGAIALKEPIISSPSSSPQAVPEDNIDAVPSGCCLSSSPGSVIWVHKPPEGRRGSYHIRMDRSGLFHTYPDMGGPFLSLNEAQDAFTSHLNILYPPLKFEERDGESIVDMMVRKILYFPDGTRRRYSKSQVTQDVHNDMRQLARVILDMYNDDHSLLGGLAYELKDVIHFQPIMESCTWFDHLNFTALTKGDNELDYQIHLFFAELMCLVGQKDYIVTCCCALKSDDNGNCYNCKLQNVNLKHPNDTSQYAGGHEYLCGIYDTEEMSESEDEEKEEQRIRKLYEDLEEPGLHEKLFGDVEETGLQEELFG

SEQ ID NO: 46076 - protein, 519 aa, Oryza sativa
MDPRLGRSAFINFSNPNAYVGKFPVISTVSHPTASSQIDVLAHCSSYNLPRGTKRKFDGLSLGLGNSSSSESSKQSMGTGCTISSAKGSDDGSSIDLDLNHFTLGNEGTSRLDKRACDSRRALDKPELNLELSLSSQSAITGADFTAATEYNSPSLQPYYMDLVPTVDEGSTSARRPSGCQVLSFLNKTAKMSEFSPREVFPGSSNQSQGPAPMPTLLQLPKSPVACTSGLSRPQQRSSSTKNCTYPGCMKGARGSSGRCIAHGGGRRCQKDGCDKGAEGKTIFCKAHGGGRRCEHLGCTKSAEGRTDFCIAHGGGRRCSHEGCKRAARGKSGRCIKHGGGKRCQHAGCTKSARGRTGRCVGHGGGKRCQSSGCDKSAQGSTNFCKAHGGGKRCLWGHEGSDHGAGDTPCERLARGKNGLCVYHNPQVDENRVHGGFSVVSDALSQGDRPSNTETSRCSIFSHPMEAPRRVAAPADEGRVHGGNILSMFANGMSLGKHPANQAEASTSAPRNSNPPMAW

SEQ ID NO: 46077 - protein, 327 aa, Oryza sativa
MGAASDDAVKQLALLMDQVEAPLRRTFQNVHQGYPKETLLRFLKAREWNVSKAHKMLVDSLNWRIQNEIDTVLERPIVPVDLYRSIRDSQLVGLSGYTKEGLPVFAVGVGQSTYDKASVHYYVQSHIQINEYRDRVILPMLTEKFGRPVTTCVKVLDMTGLKLSALSQMKMLTSISTVDDLNYPEKTETYYVVNVPYIFSACWKVVKPLLQERTKKKVKVLHGCGRDELLKIMDYSSLPHFCRREGSGSSKHSSTDADDCYSLDHPFHKELYGHIEELASCKELIKMGSLHVSIPEPDPDDAKIVEVIQAEFQKIGEQNGSANGHKV

SEQ ID NO: 46078 - protein, 242 aa, Oryza sativa
MEARGDLRSILPYLPVVLRGGALFWPPAAQEALKALALGPDVSRVSSGDVLADALTDLRLALNLDPLPRRAAEGFALFFDDLLSRAQARDWFDHVAPSLARLLLRLPTLLEGHYRAAGDEARGLRILSSQDAGLVLLSQELAAALLACALFCLFPTADRAEACLPAINFDSLFAALCYNSRQSQEQKVRCLVHYFDRVTASTPTGSVSFERKVLPRRPESDGITYPDMDTWMKSGVPLCTFR

SEQ ID NO: 46079 - protein, 171 aa, Oryza sativa
MAAQALLSGRQLLGRPLQSSVSRSSSSRKAPFMVRAEATPPAKQGADRQLCFASKQSLSYLDGTLPGDFGFDPLGLSDPEGTGGFIEPRWLAYGEVFNGRTAMMGVVGMVAPELLGKLGLVPASRTGTRRAPWGSSTSSASRSTSPAPASRPTPAARSSTRSASGPRARRR

SEQ ID NO: 46080 - protein, 66 aa, Oryza sativa
MKHKLLKCLTVAPPPTSSTVEPGHRGAADGYQIQQHNGQRRKDRGGQQRRRQRPQRQWREWKRRWG

SEQ ID NO: 46081 - protein, 416 aa, Oryza sativa
MMNVPSAAAASSCDDFGYNATPPPPPSLLPIMDQDGGGGSIQRDHHHHHNHQQLGYNLEPSSLALLPPSNAAAAAAHHATIAHASPHDLLQFYPTSHYLAAAGGAGGGGNPYSHFTAAAAAGSTFQSYYQQPPQAAPEYYFPTLVSSAEENMASFAATQLGLNLGYRTYFPPRGGYTYGHHPPRCQAEGCKADLSSAKRYHRRHKVCEHHSKAPVVVTAGGLHQRFCQQCSRFHLLDEFDDAKKSCRKRLADHNRRRRKSKPSDGEHSGEKRRAQANKSAATKDKAGSSSKNAGIGDGFETQLLGGAHMSKDQDQAMDLGEVVKEAVDPKGKASMQQQQQQAHHGIHQQSHQQHGFPFPSSSGSCLFPQSQGAVSSTDTSNIAQVQEPSLAFHQQHHQHSNILQLGQAMFDLDFDH

SEQ ID NO: 46082 - protein, 173 aa, Oryza sativa
MSRHPSTKWAQRSDKVFLTIELPDARDVKLNLKPEGQFIFSAKGPADDTPYELDLELFDAVNVEESKAAVAARSICYLIKKAESKWWPRLLKKEGKPPVFLKVDWDKWQDEDDEDIGLGDFGDMDFSKLGMGGPDDDLEDDDEDDTADSANKDDEDIKAEGSGEQEAAGEAKP

SEQ ID NO: 46083 - protein, 256 aa, Oryza sativa
MTPPGSISTTSSNLRAQQKPSIPKKPCAFGAPPRHLHRPCKKNAAVSVACTGQGEQRSSPAIAAPQEAQAGTFSVEFRTRDGCRLGISRYPDFAYNAQGGRGVGVVASSGEDSGTVLVEFDVSSLYIPAMSGATTKFLGLPLPPFLKIDILPEALRGNIDPTSGQVDLKFRSRFCFSVGSIYRAPPLFVDTTLTSEESSGAIRRGTGERMDGEGRCKLVGVAVVDPIDDVFMNTFLSLPTECIAYLNATISITEPS

SEQ ID NO: 46084 - protein, 366 aa, Oryza sativa
MSSSASCLAPPPLRLPCSSSSSPSPAAAARFGSRRRAVAAAAPAKGWRLVRVSCFRQEDVPTTSDDGPGFEHISRPESSRGAEASGEEGEGEGEGSSGQRERGSGERDDWFLRAQEIKRNLRERIFRFQTQRWTVPWTGKTIAQVMILWIATFWFVGSWIVPFLAHAAGFSKESLTHRGQALYSLLTDITGGLAGIAILHHCLGRFRPLPPGWFEFNLKGRWYLDVALGCLLFPLVNFLSHININLIPMSSGPVPGVSSVEQSIVARDPVAMVLYAVVVTVCAPIWEEIVFRGFLLPSLTRYMPLPWSILVSAAAFALAHFNAQRVMPLVFLGVVMGGVFARSRNLLASMVLHSLWNGFVFLDLMK

SEQ ID NO: 46085 - protein, 495 aa, Oryza sativa
MMEDPGTLIPSDGAGLGREFEDSLFADSHHVNKDDCNTQLGSSFSEVSSSMYGSFENESLEKVSTPSNFGHSDPYGITTGQTGSQGSAVSGSFGELSISTSTSENLPVIHESRNTDHTMSTQSKDKSSAANNSSSSSPSSSEVGGAPAVRRMKVKDVSEYMISAAKENPQIAERIHAVLLENGVVPPPDLFSEESREQPKDLIVYDTSLFQTKDEMIKRMNELESTTNADFCHGPSVPHPPGHELQTKAVPYRIPLDLKPIQGLGTYHPSDSRNSTGSSHMYEPSAPPQEDPLQLIKQMPVAAAAVATAAVVASSMVVAAAKSNSDIKLDVPVAAAATAAAVVATTAAVNKQYEYLEPGCQLLSLPSSSGANELIPKGRHDFWDNQLEIDHGQTSVPEKEKDLVEVPQEAERVSDKSVGTESSRSDIALDGVAEFEIQWEEITLGERVGLGSFGEVYKGEWHGTEVAVKKFLQQDISSDALDEFRTEVTVCNPNL

SEQ ID NO: 46086 - protein, 135 aa, Oryza sativa
MAYEISEIKKIGIGLVGFGILFSFFGVILFFDRGLLALGNIFFLTGIGLLLGWQSMWQLFTKKANIKGSVPFFLGLFLLFVRWPVAGIIMELYGSFVLFSGYGPPIQAFLYQIPVIGWILQYPFQLFGQFRRKRA

SEQ ID NO: 46087 - protein, 388 aa, Oryza sativa
MGIPVGKLALYTALGGVRPSACLPITLDVGTNNEALLNDEFYIGLRQKRATAQEYADFLHEFMTAVKQNYGEKVLIQFEDFANHNAFELLAKYGTTHLVFNDDIQGTASVVLSGLVAALKLVGGSLSEHSYLFLGAGEAGTGIAELIALEISRQTKAPIEECRKKIWLVDSKGLIVSSRKETLQHFKKPWAHEHEPVGNLLDAVKTIKPTVLIGTSGKGQTFTQEVVEAISSFNERPVIFALSNPTSQSECTAEQAYTWSKGRAVFASGSPFDPVEYDGKIYVPGQANNAYIFPGFGLGVVMSGAIRVHDDMLLAASEALAQQVTQENFDKGLTYPPFSNIRKISAHIAANVAAKAYELGLASRRPRPKDLVKYAESCMYSPLYRNYR

SEQ ID NO: 46088 - protein, 551 aa, Oryza sativa
MFPNFGLMWLRLLETSILLKGWRKRCCANLHHNIQAMRRHTGFCGLCLIRASCTKLFLRAMFVDKFLRWKTFPLCCLRWILHYAVFELPPNSGIETQKQRTSSFLGTLQTLVSVWSKKEFVQAYSVEQQAYITAAIGLCLEKMSKRELETTKDVLNNILEGVSCRLESPIDLIRKMASAIALTFSKVVDPNNPLYLDDNCCENVEWDFGVLSPKEITAPSKDVELISKLKPSLPENKKHAGERRAKAIKHDTSENRAKIIEIESLDSCETSGSAVNGHFGEEECDEEIMNIDASSDSSLEPYDLSDDDSDLQKKFTQLKDLAAALRKPDDPDGVENALSSAEKLVRASPDELRHNSGDLVRALVHVRCSDVAMEGEEDSAEEKRQKALVALLVTCTFEPLDVLTKLLYSSSVDVSQRILIIDVMTEAAQELAETKIVRRELRHGNLISDTSPSWLVPSDQGPAGAGPWREVSESGTLLNWSHRYEREVPSRSGQVKSGNLVNGVLEKLKICRQSGQKTDFLYMLLLLCSLLCKDMIKDHMVLTCSIGTLLS

SEQ ID NO: 46089 - protein, 396 aa, Oryza sativa
MEGGGEGAESAAVASAAAAEVEVKNPRCFMDVSIGGEIEGRIVIELYASVVPRTAENFRALCTGEKGVGAVTGKHLHYKGSCFHRVIKGFMVQGGDITAGDGTGGESIYGLKFEDENFVLKHERKGMLSMANSGPNTNGSQFFITTTRTPHLDGKHVVFGRVIKGMGVVRSVEHAPVGEADRPTSDVEIVDCGELPEGADDGVVNFFNDGDTYPDWPNDLDEKPMEVSWWMDAVESAKAFGNNNFKKQDYKAALRKYRKALRYLDVCWEKEDIDEEKSSALRKTKSIILTNSSACKLKLGDLKGALLDADFALRESEGNAKAFFRQGQAHIALNDIDAAVESFKHALELEPSDGGIKRELAAAKKKIADRRNQERKAFARMFQPSGKSDKDNEESK

SEQ ID NO: 46090 - protein, 198 aa, Oryza sativa
MAIPTILGSLKLTPSPPSATPVSSSASSSLHFHLANAGAAALVAASLLVADPALAFKGGGPYGQQVTRGQDLTGKDLSGQTLIRQDFKTSILRQANFKGAKLLGASFFDADLTGADLSDADLRGADFSLANVSKVNLTNANLEGALATGNTTFKGSNIYGADFTDVPLRDDQREYLCKIADGVNTTTGNATKETLFCK

SEQ ID NO: 46091 - protein, 239 aa, Oryza sativa
MSVDDGADGISGFPDAMSAAAHKQMVTGAEEAMLGKLELDSQSNLFSNSDDFLLSGSSKLGISASEDIDLPGKQGLPESTTDRPGSNGSSRVPRLRVLGTAGMAGFGKAVDILDTIGCLVTTSLSTDGGFISRAKTKGCPISILAFEVANTILKGATIMQSLSEDTVTYFKQVVLPSEGVQNLISSDMSVLMRIVANDKREELKIFSQEIVRFGNRCKDPQWHNLDRYFVKLESENPPQ

SEQ ID NO: 46092 - protein, 169 aa, Oryza sativa; identical to SEQ ID NO: 30387

SEQ ID NO: 46093 - protein, 238 aa, Oryza sativa
MAAYGKPQPPLNDAYYGPPIPPPPAAAYYGAAAPPPAPRRSGAHRLFCCLFRVLAVAVIALGTAVLVLWLIYRPSVVKAYADTAALSRFDLTNGGSLLVYNLTVGMRVRNPNRFGINFRSVDAQASYDGDRFGYAPLQPLYVGRKSDARFDVTLSGSAAIDDRDVERTYRRETAQGSYEVKVRVYARQGFKVRGFRLNNKSKFTCTLNLPAPNSGNGTASGTPTTVFTRKQPKCDVDY

SEQ ID NO: 46094 - protein, 158 aa, Oryza sativa; identical to SEQ ID NO: 32720

SEQ ID NO: 46095 - protein, 273 aa, Oryza sativa
MARRRHACFLLLLPLLVLQLLLAGGSLVDDLPAATHQVPRLVGPQRKLQQLPNPRPQPQPLPQPNPNPQPQPLPQPQPQPQPQPQPLPQPQPQPQPLPLPGPQPLPQPGPQPNPNPQPLPQPNPNPQPLPQPDPNAPPLPLPQPNPNNPQPLPQPDPNAPSLPLPQPDPNAPPLPLPQPDPNAPPQPLPQPDPNNPQPLPQPDPNAPQQPLPQPDPNSPPQPLPQPDPNTPPGQQINAKISSQPDSIGGARTLYPYGVIYNLMPLFSLFFYMF

SEQ ID NO: 46096 - protein, 550 aa, Oryza sativa
MEEGAKIGREHEQQQQQHGRVNGSGRVAAVGGGSGGGGDEIEIEVAAAAGASPSRQHGGLHGDVQAPTWKRFLAHVGPGFVISIAYLDPSNLQTDLVAGSSHRYSLLWVLLFGFIFVLTVQSLAANLGIITGRHLAELCMGEYPKYVKYCLWLLAELGVIAATIPGVLGTALAYNMLLHIPFWAGVLACGACTFLILGLQGYGARKMEFTISVLMLVMATCFFMELGKVNPPAGGVIEGLFIPRPKGDYSTSDAVAMFGSLVVPHNLFLHSSLVLTRKMPYTSKGRKDASTFFLLENALALFIALLVNVAIVSISGTICANNLSFADTSTCSSLTLNSTYVLLKNILGKSSSTVYGVALLVSGQSCMVATSYAGQYIMQGFSGMRKCIIYLVAPCFTLLPSLIICSIGGTLRVHRIINIAAIVLSFVLPFALIPLIKFSSSCTNIGPYKNATSIIRIAWILSLVIIGINIYFFCTSFVAWLVHSDLPRVVNAIISSLVFPFMAAYIAALIYLAFRKVNLSDPFPTNSVSGEIEVQHIQIQEKQEDLGVHL

SEQ ID NO: 46097 - protein, 952 aa, Oryza sativa
MAAPGSHTRRRAWPLLFLAVLMFHSLAIYLFTRGFLLTRTELDVHSHRDDRIGISPGCSSWPPPAVDRLVIVVLDALRFDFVAPSTFFQERQPWMDKLQVLQRLAADEKTSARIFKALADPPTTSLQRLKALTTGGLPTFIDVGNSFGAPAIVEDNIMHQFAKNGKRVVMMGDDTWIQLYAEHFNKSYPYPSFNVKDLDTVDNGVIEHLLPSLHKNDWDVLIAHFLGVDHAGHIFGVDSTPMIQKLEQYNRILEDVIDTLKSLSTSGGPHENTLLLVMGDHGQTLNGDHGGGTAEEVETSLFAWSPKTPPNAVLSVLGKNLCNADLHGKEVCVSTMQQLDFAVTIAALLGIPFPFGSIGRVNPELYALSAGTWDNQQIGANDCTQQNDLEAWMRRYAEALCINCWQVKRYIDRYSATSVIGFRAEDLNHVADLYSKAQANWSSVLRSTCPVETSSQDELKECANKECTSSALRLQIDAYSDFLESFAKLARSAWTEFDLWLMGIGLSVMILSVSTQACMLVKLNIDQISEKERASSSFIPKNFFAFALVAIRAASFLSNSYILAEGRVANFLLATSCIASVWHSATKGKFIIEEFVFLLLNIFIRFGIEFGMSKQISGSIISNDHPVSIICGLFGSSFCSDLMEIFPIISLTLVAYIILKCISYAISHRFLKYSVMSGSILSYIFIAIHWASESTLLSHTKATRETGISLAPRLVYTIGGLSLAISAFYRLFGSTDHLKMNERITSLPAVMLCSWSPTILILLGRQGPFVALICMTIAWCIIKLQQKNQRELKLDKGIHAADSVSVTQWSFLAVCLFYLTGHWCTFDGLRYGAAFIGFDHFHIIRQGLLLSIDTFGVSHILPVLSLPFIAICWYNSASKNSKVNDATVTRLIQVLLMYGLITSITTTLTIICVTIQRRHLMVWGLFAPKYVFDAIGLLLTDLLVVLASIYYS

SEQ ID NO: 46098 - protein, 281 aa, Oryza sativa
MLPALLPGCLAAPPPPPPLVTTSSTASPSAHLRTLRLPSGLAVSRRAGFGEAARAAATERGAIEEEEEEEEGFPEWGNGDEDEYDHDPEIGDIMGEYFDDPNKAQSRMEERIKKKRHKIVQAKTGSPNPMKVVFNKFDFSNSYIWFEFYHALLPKDVTLICDALRSWHIVGRLGGCNSMNMQLSQLPLDCQRPTYDALEGANTTPTSFYNIGDLEIQDNIARVWVDIGIHEPLLLDILLNALTTINSDHVGIKQVQFGGSEFQNWSEDLKTEEAGYSVHKI

SEQ ID NO: 46099 - protein, 152 aa, Oryza sativa
MLCDEMSSLRATMAIVDADKSGGGGVGEKKRGSFDLAGILEKVVCLHEGHREVAASVPPGVLVPEQSIPGAADGELVVGLEAGAHNPHDRLPNHVALAPGNLGSKKDPRRRGLTKKMEETIDQDCKKQELGGQGIGGWGLAPRKKKKLRGGA

SEQ ID NO: 46100 - protein, 490 aa, Oryza sativa
MKNKKGSRRNRNKSAPVTVMVVDRFTTLPDDVLLNILDRLNTPDAVRTCLLSKRTLHLPRMLSHFRIALLSFAPDPDYITFKDTIGMNAAVAAATDNVLNFRAKDIPLRQLSICFYLKYYDCLTIGKAVARAMTTHKLDSAEFRILTDYKLHYYTLDGLRNNGKQLMTFFGACTDAFAGLTRLYLQNLRLPETDILNIIATCKRLESLRMFMCQTEGTVLQLQLEHQRLVELDICHGCLKLVKLNSLPKLERLVFYSWKHPQEPLYFGNVPQLSSLSLTNVGLRRHNLIRLSQFLSNVTSIRDLHLNFESERIWVQPERPKLLVPVLQNLQVLNLEDLPEGCDITWTRFFLEAAPFLKELCITVWDHWCNIVTDQVEREEEGYCDKTNVQWESSSSNGFRHYNLVKLTIYGFQPDDNFLGYIRHIMETAVNLEEISLYNRKVEDCCEELDPKIKIAPSRYPQTIEEQELLRKQITEGLVMALPHVIHFRS

SEQ ID NO: 46101 - protein, 314 aa, Oryza sativa
MPRNKKEKRGTGKKKHGDLYRTYGTRVIPVFVLSLADVDAELLMEEENLVWTSKDVVIVLEHNNEKVPLSYVSETTRQFAFPSLAQRHILAGLASAVGGLSAPYERASHIHERPVVNWLWAAGCHPFGPFSNSSKISQILQDVALRTTIYAQVDAALHKIRDTSEFVQSFASEHLKTPLGEPVKGKQNKSNTELWVEKFYKKVTTMPEPFPHELVERLEEYLDRLEGQLVDLSSLLYDHRLVDAYQNSSDILQSTIFTQQYVERVLSAERDKMKCCTIEYNHPKQSSQAFVYGGILLAGFLVYSLVIFFSSPVR

SEQ ID NO: 46102 - protein, 604 aa, Oryza sativa
MGSMTIGAKYKTTLKDPGTTGVLRMNEDKFTFTPHDPRSAMKLNVDFRSIKGHKFNKVDGSKPAPPLLNLSKDSDKGGGYMFEFDNVTNRDLSRDFVAKVLGKQQGTIPPKPNVPPENSVTSTGEEQLSAAEMQRRMKLLQEDSELQKLHMKFVLGNILQESEFWATRKNLLEDEANKGSKQRPGFKSAMLADVRPSADGRTNKVTFSLTTEIIHQIFAEKPAVHRAFLDFVPKKMSEKDFWTKYFRAEYLLRTKNTVAATAEAAEDEELAIFLKNDDILAKEARLKIKRVDPTLDMEADAGDDYIHLPDHGIIRDGSKETIDNDGELARRTLSQDLNRHAAVVLEGRSSDVELTDTKTVAEAIARSKKEPPSSSISDDTNHERLVKVARMTEIEDLQAPRSLPYAPLCIKDPREYFDSQQANALRSLGGNNDGRHARNCRLSTDDAFDHLLGQISSIKVNGLNYPVIQSDVALKVLNELNEGISRSRRLNLKNPQDSLLGQIPRRTRDELMDHWAAIQELLQHFWSSYPITTSVLYNKVQRIKDAMTQIYQKLQDIKESAQPDVRHEISQLVKPMTQALDAAFNHDLEQQQKSSKSGNKPNGF

SEQ ID NO: 46103 - protein, 270 aa, Oryza sativa
MAGSSSSTASTNPLFGVQVSEKLTKGNYALWSAQVLAAIRGARLDGHITGATAAPSMEIEKTASDKTTEKIVNPAYQEWFASDQQVLGFLLSTLSRDILTQVATASTAAQAWQQVCAMFTAQTKARSLNVRLTLTNTQKGNMSISEYCGKMKALADEIASSGKPLDEEDLVAYVLNGLDDDFEPVVSAIVARNESTTMAEVYSQLLNFENRQALRQAHASANAAVVVFSVVAAAAVAHVGAAILLLQDVGAALEEIRLGVVMTAPSAKCA

SEQ ID NO: 46104 - protein, 493 aa, Oryza sativa
MADVEACLLAHLNSGGEVPDSRSYASSLRVTHDELEAVIKSLSAFRIVDTTDITKETWVLTDEAKGYVAGGSPEAQLVAAIPPEGASKDVLREKLGSVFDIGMKTAAKNKWIGFEKGNKDLVLRKVNTIKDDLQEQLKSLESGEVLSDKVIDDLKRRKLITKEKSIWYALKKGPQFVAKRKKLATDVTQEHLRSGDWKDLEFKDYNFGAQGQPIAIGYVQPLLEVREEIQNIFLQMGFTEMPTNNYVESSFWNFDALFQPQQHPARDSHDTFFLEAPAATKQLPEDYLEKVKEVHQRGGYGSKGYGYDWKRDEAEKNLLRTHTTAVSTRMLYKLAQEKPFAPKRYYSIDRVFRNEAVDRTHLAEFHQIEGLICDYGLTLGDLIGVLEDFFSSLGMSKLRFKPAYNPYTEPSMEIFSYHEGLKKWVEVGNSGMFRPEMLLPMGLPEGVNVIAWGLSLERPTMILYGIDNIRDLFGPKVDFNLIKSNPLCRLGLQ

SEQ ID NO: 46105 - protein, 178 aa, Oryza sativa
MQISVRLTDEFIELAKENTGNNVETCGILGASFRDGTYYVTMLIIPKQEATAHSCQAVSEEEIHAILSEQSLYPAGWIHTHPSQTCFLSSIDLHTQYSYQVMLPEAVAIVIAPTDPTRNCGIFRLTDPGGMGVLRECSESGFHAHRETTDGGPIYETCSKVIFNPNLRFEIVDLRSAP

SEQ ID NO: 46106 - protein, 494 aa, Oryza sativa; identical to SEQ ID NO: 36798

SEQ ID NO: 46107 - protein, 97 aa, Oryza sativa
MLKIFEGLDQGKIDETNGSGLAAYVASQIDRSFSWKDIKWLQTVTSLPVLVKGIITAQDTRIAIEYGAAGIIMSNHGGRQLDYLPATISCLEELCHM

SEQ ID NO: 46108 - protein, 1026 aa, Oryza sativa
MLFDYFKQRFAQVTNPAIDPLREGLVMSLEVNIGKRRNILEVGPENADQVTLSSPVLNEGELESLLNDSKLKPKVLSTYFDIRKGLDGSLDKAIKVLCDEADAAVRNGSQLLVLSDRSEALEPTRPAIPILLAVGAIHQHLIQNGLRMSASIVADTAQCFSTHQFACLIGYGASAICPYLALETCRQWRLSNKTVNLMRNGKMPTVTIEQAQRNFIKAVKSGLLKILSKMGISLLSSYCGAQIFEIYGLGQEVVDLAFCGSVSKIGGLTLDELGRETLSFWVKAFSEDTAKRLENFGFIQSRPGGEYHANNPEMSKLLHKAVREKSDNAYTVYQQHLASRPVNVLRDLLELKSDRAPIPIGKVEPATSIVERFCTGGMSLGAISRETHEAIAIAMNRIGGKSNSGEGGEDPIRWSPLADVEDGYSPTLPHLKGLQNGDTATSAIKQVASGRFGVTPTFLVNAEQIEIKIAQGAKPGEGGQLPGKKVSAYIARLRNSKPGVPLISPPPHHDIYSIEDLAQLIYDLHQINPKAKVSVKLVAEAGIGTVASGVSKGNADIIQISGHDGGTGASPISSIKHAGGPWELGLSETHQTLIQNGLRERVVLRVDGGFRSGLDVLMAAAMGADEYGFGSVAMIATGCVMARICHTNNCPVGVASQREELRARFPGVPGDLVNYFLFVAEEVRATLAQLGFEKLDDIIGRTDILKAKHVSLAKTQHIDLKYLLSSAGLPKWSSSQIRSQDVHSNGPVLDETILADPDMSDAIENEKEVSKTFQIYNVDRAVCGRVAGVIAKKYGDTGFAGQLNITFTGSAGQSFGCFLTPGMNIRLVGEANDYVGKGMAGGELVVVPVEKTGFVPEDAAIVGNTCLYGATGGQVFVRGKTGERFAVRNSLGQAVVEGTGDHCCEYMTGGCVVVLGKVGRNVAAGMTGGLAYILDEDDTLVPKVNKEIVKMQRVNAPAGQMQLKGLIEAYVEKTGSEKGATILREWEAYLPLFWQLVPPSEEDSPEACAEFERVLAKQATTVQSAK

SEQ ID NO: 46109 - protein, 698 aa, Oryza sativa
MRRKLVDASFFGDHLPSGWRLQLGIKRKDRKAWVNCFSYVSPKGQSFATCQEVSAYLMSLLGYPEFKTDNIEYGSTQQHGLCADDGVNVLGVQHQIGTGMDSQSILPVASITFSSHSRDQDETDADDINSYECQQCNLTFHGQSAYAHHLITFHKMGSKRRKINKVGKFGEPVIGKDGKFECPVCNKTFEEQSRYFGHVGSHAKYHGLTPEAFLQTLSGKVGNDSFAGLSCSLQDLVGSPQLNEKTTASEARSQHHNCSTKHGGNSTRGIDLFNSNCPANFNGHNQTWCRPDEIPPTTDAPSTWTYRNNVTNCADRTVPRTAPQPNDHMDCRVSGFAEATNFNDQAGRHQGFRPSSFGTTNHCQGQIIDHAVAASKHAEVNNSMKSRDVNLNSRLNTISFPIATANNETSTALNDVNRSCITGKGFSGSFSNNDGAASIVLPSSGLNNKIPSSLGVADRSSIAARSFNAGYVNENGASEANNIGNKNNTMVYQTSLAMRPVSPCDLQLGFSGQKQQILPGYGELRPAASGSPQLGGMAANSSIPTRPSQPQFGSMARTDALPTGPSQPGSLARPNFVPTGFSQFASRPPTSVPPADSSQFAGGMARQNIPTTSEPTLVLGYTPQMVNGPPAQLGWDLSLSRMVSEGMLPVLCIWCNSQFHHFGPIDAQQSGSFGFICPACKEKMSGNPNAPNNGPWQP

SEQ ID NO: 46110 - protein, 160 aa, Oryza sativa; identical to SEQ ID NO: 33035

SEQ ID NO: 46111 - protein, 120 aa, Oryza sativa
MNAPDRYERFVVPGGTKKVSYERDTKIVNAGSFTIEREDHTIGNILRMQLHRDPNVLFAGYKLPHPLQYKILVRVHTANQSTPTQAYTQAINDLDKELENLKQAFEDEKIRYEERPKQGY

SEQ ID NO: 46112 - protein, 389 aa, Oryza sativa
MGYVGQHGVATLRRYKYSGVDHSLVAKYILQPFWSRFVNLFPLWFPPNMITLTGFMFLLTSAFLGFFYSPHLDTAPPRWVHLAHGMLLFLYQTFDAVDGKQARRTNSSSPLGELFDHGCDALACAFEALAFGSTAMCGKATFWYWFIAAVPFYCATWEHFFTNTLILPIVNGPTEGLMLIYLCHFFTFFTGAEWWAQDFRKSIPLLNWVPLVPEVPVYGIALFLMIAFAVIPTIGSNIHNVYKVVEARKGSMLLALAMLFPFGLLLAGVLVWSYLSPSDIMRNQPHLLVIGTGFAFGFLVGRMILAHLCDEPKGLKTGMCMSLAYFPFAIANALTARLDDGNPLVDEQLVLLMYCLFTVALYMHFATSVIHEITNALGIHCFRITRKKA

SEQ ID NO: 46113 - protein, 94 aa, Oryza sativa
MPIITHLESHNFHLLSLLEVRQYLRIKQHLLVLFLGRNRQQHIPKKHMEILLVQLLPYLQRNVLLLRRMMDPPFKDIMAKAPLKVVHRSGLFQW

SEQ ID NO: 46114 - protein, 394 aa, Oryza sativa; identical to SEQ ID NO: 36841

SEQ ID NO: 46115 - protein, 343 aa, Oryza sativa
MASRTLSVSSLASAFASIPRPRPPPPPPSRIRASPLSTAAAAASDGDAADGVDTVEQLLVTKPPASSSSSSAGRGRIDRLMKLQRRADGDFPPGGAGRRWFPYLDAFRAAGGVELTSREVLEVLEPHIMEARRERIRRAVENRSYSVCLVVEGLSDFGNVSAAFRSADALGVQSVHVISCDNNKRYRDNRHVSMGAEKWLDIELWSSTAECFDALKKRGYRIATTYLGNDSVCVYDMDWSQPTAIVVGNELMGISDDALKLSDLHCSVPMKGMVDSFNVSVAAGILMHHAVCDRISRIGHHGDLLPEESRILLAEFYLRHRQSTAGIVHEYAKRKAGNFMAKL

SEQ ID NO: 46116 - protein, 110 aa, Oryza sativa
MGTIQSMHLCFFSQMVYTLKLPTLKVKEKLANCNNQRKLLSVTATVSWNRLWRKFRVKILKNQLAWLQRVPLMITFTSTIRKLKGPGHKSLTVTKWTYQHKLYLHARKKH

SEQ ID NO: 46117 - protein, 315 aa, Oryza sativa
MMKESYMEVLPPAPAHYFVGQAAAAGGWFLPDRRGGGGAWSQEENKVFEQALAALDRNDPERWERVALLLPGKTVADVMTHYDDLENDVCFIEAGLVPFPHYGAAGGGGGSGFTLDWDGGDDPAGLGFKRSCYMVGGKRARGPDQERKKGVPWTEEEHKLFLMGLKKYGRGDWRNISRNFVTSRTPTQVASHAQKYFIRLNSGGKDKRRSSIHDITTVNLPDDDHGNPSPSPPPSVLTAHSSSSAAAVSEQFGVLVDGKPPPPPLGRGAGHHHFMPHPYAQVKIEAGNSHVAGGGRLDDSVLVQMQCGQLMQPLG

SEQ ID NO: 46118 - protein, 370 aa, Oryza sativa
MGMHAQIPSSGMGLTSPSYHTRMYPDNRLYGQYGQYGNALKTGLGFGSNMYNSRNNGRWGIVDSKYKPRGRASFGFGSENQDGFTELNRGPRSGGFKHQKQFGPSVTIAVKGQALPSVGKQENSAIPDKGQFNQEGFPVTYKDAKFFVIKSYSEDDVHKSIKYNVWASTPNGNKKLDAGYREAQEKSSECPVFLFFSVNTSGQFVGVAEMVGPVDFEKTVDYWQQDKWNGCFPIKWHVVKDVPNNILKHITLDNNDNKPVTNSRDTQEVKLEQGLEMLKIFKDHISKTSILDDFGFYENRQKLMQEKRAKQQLLQGQGSLDNASHEKEKNAIDGKSTAQKQALSKEGTPIVGEMLNASKSAVESSVTNGN

SEQ ID NO: 46119 - protein, 300 aa, Oryza sativa
MGKVGEKVRAFATNRWLVFVAAMWLQSMAGIGYLFGAISPVVKAALGYNQRQVAALGVAKDLGDCVGFLAGTLSATLPAWAMLLVGAAQNFLGYGWLWLIVTRQLPALPLSMMCLLIFVGTNGETYFNTASLVTCIQNFPKSRGPTVGILKGFAGLSSAILTQLFAVLHTPDHATLVFMVAVGPSLVAIGLMFVIRPVGGHRQVRPSDNNSFMFIYTICLLLASYLVGVMLVQDFVQLSDNMLVFITAVLFILLILPIAIPVTLTFSSKTEHPMEEALLAEPSKGQASTSQEKEPDVFFK

SEQ ID NO: 46120 - protein, 904 aa, Oryza sativa
MDASSELQCVGRLEVAAPPPARYLRVGSLPVPTDSPASLPALLPSSSPTGAPRYQMLPLETDLNTLPMIPNIPEKVFPMDAKSTEGSRYGSGLANQNLSRKCEALAVSGLAEYGDEIDVVAPTDILKQIFKIPYSKAQVSIAVNRIGDTLILNTGPDVDEGEKIFRRQSNHPKGSDPSMFLNFAMHSVRAEACDCPPSHQPSKEKQTASAILRGPFGQREGPLDSPSSSSFSTSPYLDQNISKSRKTSHGARESLYWGARENKQKVKGSDPVKKTTHVGDKPRCDVQESEKSRRVGNSGFRKVCFWQFHNFHMLLGSDLLIFSNEKYMAVSLHLWDVSRQVTPLNWLEAWLDNIMASVPELAICYHQNGVVQGYELLKNDDIFLLKGVSDDGTPAFHPQVVQQNGLAVLRFLQDNCKQDPGAYWLYKGAEEDVIQLYDLSILPQNHTAGDHRSTCGPMSSLMKKGRKESLFSLGTLLYRVAHRMSLSKVPSNRAKCAKFFKKCLDFLSEQDHLVVRAYAHEQFARLILRCYEELELTSESFLLESEVTLTDLDESPDLSLENLPSKQNEVLTEISEEPATLDGMLECSRSGSSQASNSLVDPGHVDISPVSSATKGDVTVDSLVMCQSGTQVSRTIADAISSKLAAIHHVSQAIKSLRWNRQLQNTQDDCVGNADTIWEKPVDFSLCRCGDIDCIEVCDIREWLPKSKMDHKLWKLVLLLGESYLALGEAYKNDGQLRRTLKVVELACLVYGSMPKNLEGEQFISSMSNSSLSVEDGDLKANLVLDEADYFKNAKCFNYDVSAGQLPPNYLFWVKAWMLVGDVYAEYHRLRGQQAPVLPEQKPDGEVRMSNEVAMEVKRLKRKLGKDKQNCGTCSLINCSCQSDRANSGSSASSSSSEASTLYG

SEQ ID NO: 46121 - protein, 16 aa, Oryza sativa
MFEQAVNRQKVLTFWT

SEQ ID NO: 46122 - protein, 269 aa, Oryza sativa
MSSSASRAASLLRRTSSALSRRCAHSSSAAAPSRPPVPLPRFRAAAAAASSSPSSGITSRRFLASKSPSSSSPSKASADENLVRVIDSEIECIVQSEEGAASAKQIDLPEDFPFEIIDNPGDQSITLKREIAGETIKATVYTNFDTQDLNEDGDDNENNEESFKPAIQMVVTVEKPEASILEFECHFNDDELAIESMRMLDQNNSDAENLYVGPTFQDLDESLQKALHRYLEVRGIKHSLHDWLCEYMMSKDEKEYLVWLKSMKEFVGN

SEQ ID NO: 46123 - protein, 288 aa, Oryza sativa
MGCRDFLKASRAAKAAGMEKGSYTIVHLDLASLDSVRQFVANVRRLEMPVDVVVCNAAVYQPTAKQPSFTADGFEMSVGVNHLGHFLLARELLADLTSSDYPSKRLIIVGSITGNTNTLAGNVPPKANLGDLRGLASGLDGVSSSAMIDGGEFDGAKAYKDSKVCNMLTMQEFHRRYHGETGVTFASLYPGCIATTGLFREHVPLFRLLFPPFQKYITKGYVSEEEAGKRLAQVVSDPSLTKSGVYWSWNNNSASFENQLSEEASDPEKAKKVWELSEKLVGLADHDQ

SEQ ID NO: 46124 - protein, 320 aa, Oryza sativa
MEEEPSATCRYFCHMCSLIVRPEMGIEEVKCPHCHSGFVEEMVGGDDDDGRRSGNAAAGGRGAASEENADDEATPAPPPWAPMLIDLLGVSSRRHGLDDGSSDLAAFARRQYRNIAFLQLLSALQDDDEAGGDTPGDSGRERLVLVTPADGNGAAATSGFTLGDLFLGPGLDLLLDYLADTDPNRQGTPPARKEAVAALPTVRVHDAAGATCPVCLDEFEAGGEAREMPCKHRFHDGCILPWLEAHSSCPVCRYQLPTDDEPTAGNVVVAAEGGDELIGNARGGGGDGDGDGGSSGRRRWLSWPFGGLFSHRSSRRSSSS

SEQ ID NO: 46125 - protein, 509 aa, Oryza sativa
MASSASVSPAAASHHRLLLPCSPRRLPRPRPRPRPRLLRSARPRLVACHADTLLPSSSPAAAAAACASTASANGFSDWLREHGLPPGKVAILDRPVPCFREGKDLPLHYVAAGQDLEAGDVAFEVPMSLVVTLERVLGDESVAELLTTNKLSELACLALYLMYEKKQGQDSFWYPYIKELDRQRGRGQLAVESPLLWTESELNYLKGSPIKDEVVARDEGIRREYNELDTLWFMAGSLFQQYPFDIPTEAFPFEIFKQAFVAVQSCVVHLQKVSLARRFALVPLGPPLLTYKSNCKAMLTAVGDSVRLVVDRPYKAGEPIIVWCGPQPNSRLLLNYGFIDEDNPYDRIVIEASLNIEDPQFQEKRMVAQRNGKLAIQNFHVCVGKEKETIAEMLPYLRLGYISDPDEMQSILSSEGDTCPVSPCTERAVLDQLVGYLESRLADYPTTLDEDDAMLADGNLEPKKEVATRLVRLEKKLLHGCLQAANEFINDLPDHTVSPCPAPFAPELK

SEQ ID NO: 46126 - protein, 819 aa, Oryza sativa
MALAMTSTSPQPPPPSPRRRWRRRPLLRPGVSSPPSRCRPSPSPKAKAALPLLSDVGRDPTAIKYYSRVASNLVGAGRLREFLLAAEGLRAASGDAGFEGRISRRLLSRGVAAALRDQGLPHVLEFLRDAGRVGIRAAVMLDADAYDTVAAACRLLLAERSMTEFVEAVEALAQCGFFVQGIVDPMDVLKIFVKKRDPNMAIRYARIFPQSQLLLCNTMEAFGKRKELKHALTVFGALKDQFGGINMFACRSIIDICGHCGSSVQARIIFEGLLADKITPNVYVFNSLMNVNAHSFSYNFSVYKHMQNLGVPPDLTSYNILLKTCCNAKEYKLAQEIYEEIKKKEQNGLLKLDVFTYSTMMKVFADAKMWKLASDIKQDMQSAGVRLNLVTWSSLINAYANSGLVDRAIEILEEMTRDGCQPTAPCFNIILTGCVKSCQYDRAFRLFYDWKEYGVKISLSPEQKGCFGDNFSYCEEHTSNSSTLLVVPFRPTVTTYNILMKACGTNGERAKSVMNEMRRNGLCPDLISWSILMDIYGSSQNRDGAIQALRRMQRVGMKLNVTAYTVAIKACVENKDLKLALHLFEEMKAHQLKPNLVTYKTLLTARNKYGSLQEVQQCLAIYQEMRKAGYQANDYYLKNLIVEWCEGVLSSGNGNREYYQLDQRKESFKLVLEKVTTFLQKDVDQNQTVDVRGLSKVESRVVVLSVLRKIKEKYLLGRAVQDDVVIITGHGKASSAKAETSVVEVEHAIVAVLTDELGLEVLIGPGSRPASSKPTVPARSRSHLDLASKHFSRRPQGMIKIPINSLNHWLKRKAVRTVQ

SEQ ID NO: 46127 - protein, 291 aa, Oryza sativa
MQYLAVSLNPLSGPLPKEIGNLRNLLSLGISSNNFTGELPAELGNLEKLEQMYIISSGFSGPFPSTFSKLKNLKILWASDNDLTGKIPDYFGSFPNLQDLRFQGNSFQGPIPASLSNLTRLTSLRIGDILNGSSSLSFISNLTSLNVLILRNCKISDNLGTANFSKLAGLTLLDLSFNNITGHVPQSILNLDKLSFLFLGNNSLSGSLPYDKSPSLNNLDFSYNHLSGSFPPWVTGNNLQLNLVANDFILDSTNNSILPSGLNCLQQDTPCFRGSPECIIPSFQLFTHIGS

SEQ ID NO: 46128 - protein, 559 aa, Oryza sativa
MALLMGAKPTAPLYSSLLQCCISSCAFRQGKSVHGRVAAASASPPDLHLSTKLVIFYARFGDVAAARKVFDGMPHRSVVSWTAMVSGYARNGRPREALELFALMRASGARPNQFTYGSAASACAGAGCARSGEQVHACAAKGRFAGDMFVQSALMDMHLRCGSVEDARQLFAEMGKKDVVSWNALIRGFVERGHDGDALGLFSSMLKEAMIPDHYTLGSALKACGIVGVAVNVELIHSCIIKLGYWDEKVVIGSLINSYAKCRSMSSARVIYDSISEPDLVSSTALISGYTMDRNYSEDAMELFCKIHRKGLWIDGVLLSSVLCLCASVASARFGTQIHAYMCKKQPMGDIALDNALVDMYAKAGEFSDAKRAFDEMPYRNVISWTSLITACGRNGSGEDAVTLFNRMVEDGVRPNDVTFLSLLSACGHCGLTNKGMEYFTSMMSRYGIDPRAEHYSSAIDLLARGGQLEDAWKLVQKTNLKPNSSMLGAMLGACKLHGNMLLGETAAKNLFSIDPGSSVNYAVLANMYAECSLWEDAQRTREVIDETTDGKEVGFSVI

SEQ ID NO: 46129 - protein, 233 aa, Oryza sativa; identical to SEQ ID NO: 30364

SEQ ID NO: 46130 - protein, 161 aa, Oryza sativa
MKSSSQEAGEEVSEISSQAASNNNETCNSSSGKVSLDLSLTVAAAAAAAASATESSTTDSGGTRPAATATATAREPARVFTCNYCQRKFFSSRRWAGTRTRTGGSARWPGAPCGSTRSPTATPTWPRCRCTAPACTPSASRRTRRCTTTTLAWRRRRGAPS

SEQ ID NO: 46131 - protein, 1125 aa, Oryza sativa
MSASSSGGRGAPPPATAASPGQKRPRGDDPASPSNRSESAPAKNPRRAFSSSPFADFGSYMAAKNSKLAAQFEADASTSAAEVTGGVFAGVSIFVDGFTVPSSQELKEIMLNNGGRFVNYFSRNTVTHIICTHLPNSKMSNLRAFSKGLPVVKPAWVVDSLAENRLLSCVPYQISQHNSSSRKQTKLSSFFSGRHYQGELNDQSNSHELQSSSVQEGSQDHNSGCEKEGSLLKEEASKDSLSSDDHKASMFEEQDSEDFVDEAGNAYETACSERRDNDMDGKLHVAESPDIRSRCSNLCSTSSTGSHLSLDSLDRNATKSSSRTHSTLTDPNFVENYFKYSRLHFIGTWRNRYRKRFSNLLGDKSSKGNRDHSGKNNTIIHIDMDCFFVSVVIRNKPELHDKPVAVCHSDNPKGTAEISSANYPARNYGIKAGMFVREAKARCPHLMIVPYDFDAYGEVADQFYGILHKYCSKVQALSCDEAFLDMTECLHDNPEEVTQKIRNEIFGTTKCSASAGISGNMLIARLATRSAKPNGQCFISSEKVGGYLNTLSIKALPGIGHTVSDKLKSKEVEYCGQLRNIPKESLHKDFGKKIGDMLWNYCRGIDHSVVEAVQETKSVGAEVNWGVRFNDNKDAENFLVNLSKEVCLRLEGCGVQGRTITLKLKTRRKGAGEPIKFMGCGDCETVSRSMTIAGATDNPVTLQRIAKQLFSSFCVDVKEVRGVGLKISRLEHADLARGAPQGNMLESWLASPSDKLKKHSTEKACLLKNRDDAATSERRGFGSIRPSGIGGTSRSSEVNPPSDRSTRVGVELPPLSELDLEVLKNLPPEIIYEMNDMYKGELHGFLGITSGDKAKESNTKSLVFPAVDQNLVPVLDTKLHGDGKHKDSIHFKKEADIKGPSGEQLSELKQANAPRSIASELVDIPTKSVIQHDFMPNSLSQADVTVLQELPEDVKADLFNALPLHRSGDPTCSTSHVSENKFPQDGRSDDPKQHPQICHLPGNSQKWIEEFRVSHCLILNVIAEQHTDSISSRPLSSVLEPVISYLPLCPNSGTEEWNEAFASLSELLTQYIHQKVESDIEELHKCFRLLKRLSSGSELFLELHDSILPLLQDSVRQHYGGILHL

SEQ ID NO: 46132 - protein, 124 aa, Oryza sativa
MMRLLTGADHGESRFLFSPRSVDAFGSTVIAEGTDDTRQLYWVHAWTVGPDGVITQLREYFNTDLTVTRLSASAAKTTAAISSSNSNHASSSAPPPPPSKPKCLWQSRRADRAHKSLPGLVLAI

SEQ ID NO: 46133 - protein, 331 aa, Oryza sativa
MDAAGRRLARVTAHLLPSSLPLPLASAPTLAPSPAASPASDSYRRVHGDVPSEPPEWRAATDESGKGFVDILYDKAVGEGIAKITINRPDRRNAFRPLTVKELMRAFEDARDDSSIGVIILTGKGTQSFCSGGDQALRDADGYVDFDSFGRLNVLDLQVQIRRLPKPVIAMVAGYAVGGGHVLHMVCDLTIAADNAIFGQTGPKVGSFDAGYGTSIMSRLVGPKKSREMWFLSRFYTADEADRMGLVNVVVPLADLERETVKWCRKILRNSPTAIRVLKSALNAADDGHVGLQELGGNATLIFYGTEEAKEGKNAYMERRRPDFSKFPRKP

SEQ ID NO: 46134 - protein, 400 aa, Oryza sativa
MAKTSLPPGFRFHPTDVELTVYYLKRKLLGKHLRCNAVSELDLYKFAPWDLPEKSSLQSKDREWYFFCPRDRKYSSGSRTNRSTEAGYWKATGKDRPVIYNSQTVGMKRTLVFHLGKPPRGDRTDWVMYEYRLEDKELSASGVKLDACVLCKIFQKSGPGPKIGEQYGAPFNEDDWNEANGELSSFAFSVPPCALESSNGRLNTAGQQLAVSDNIGSSLDHCSETNDKIAVGGCGTTSPSVPFDTIHTQQLDEIISCFSTDLLNSVSRDGSLPDSTADYDNDNEVSSDDGEAIFNELDELDSQSDESISNHCNSCGEDLIPPTLEVLKTEQYLELNDLSFSLADDPDPCNLLLTTNLSDQNHPELETRFEQGSLVDICNTTNATISNAACSASTVGDHVT

SEQ ID NO: 46135 - protein, 440 aa, Oryza sativa
MASRIASRLLRRSNATLGLIRSYSHARNYSSQLSALIPIGSQSSKLTRRRYYLPNASPYQLWSRSFASDNGDQVEAVVPFMGESVTDGTLANFLKKPGDRVEADEPIAQIETDKVTIDVASPEAGVIEKFIASEGDTVTPGTKVAIISKSAAPAETHVAPSEDSTPKETPPKAEETKPKLEEKSPKAEPPKMPLPPKTSPTEPQLPPKERERRVPMPRLRKRIANRLKDSQNTFAMLTTFNEVDMTNLMKLRSDYKDEFVTKHGVKLGLMSCFVKAAVTALQNQPIVNAVIDGDDIIYRDYVDISVAVGTSKGLVVPVIRDADNMNFADIEKGINALAKKATEGALSIDEMAGGTFTISNGGVYGSLISTPIINPPQSAILGMYSIVQRPVVVDGNILARPMMYLALTYDHRLIDGREAVYFLRRIKDVVEDPRRLLLDI

SEQ ID NO: 46136 - protein, 280 aa, Oryza sativa
MGWKGILGFDHGVVQAPLGPDISGPELAAAVANAGGIGLLRLPDWPAPDRVRDLIRRTRSLTERPFGAAIVLAFPHEENLRVVLEEKLAVLQVYWGEFPRERVDEAHLAGVKVLHQVGSFEEAAKAKEAGVDGIIVQGCEAGGHVIGQEGLLPLLPRVVDLVSDTDISIIAAGGIVDGRGYAAALALGAQGVCLGTRFLTTEESFAHPLYKKRLIEINCTGYTNVFGRARWPGAPQRVLKTTFYDQWKNLPEQETEENQPIIGHTIIHGVGYSSVRWYCS

SEQ ID NO: 46137 - protein, 200 aa, Oryza sativa
MQMQAARPRVGVRPRGGIRPFPLPTLSFNNNSNRSACACACAVSVSDSELAARGFAVRRSSTGLDVGALNEVFARVGFPRRQEERLRRALEHSEVVWLEDSASSSAGRPVAFARAAGDGVFNAVVWDVVVEPSCQGLGLGRAVMERLVADLRGKGVSNIALYAEPRVVGFYRLLGFAMDPDAIRGMAFYRSRQQIQNTSS

SEQ ID NO: 46138 - protein, 469 aa, Oryza sativa
MQTPTMSTSMATPAKLPSPPSLPIARQCCCHLLQLGRRGGAGVARASAKKKNPWLDPFDDGPDDEFDYRGAFSGGKQEEDPRPPEDPANPYGFLRFPAGYNPELDSLASKVRRDVRRACCVVSGGVYENVLFFPVVQLLRDRYPGVVVDVVASARGKQVYEMCKNVRYADVYDPDDDWPEPAEYTHQLGVLKNRYYDLIISTKLAGIGHALFLFMSSARDKVGYVYPNVNSAGAGLFLTEMFRPPTTNLADSGYNMYQDMLEWIGRPAKGVPEHPVPPLRVSISKKLRAFVEDKYSRAGVEKGKFVVVHGIASDSFANMRSRGDDDCLLPLEHWAEIAKEISSEDNGLKPLFVIPHQKHREEVEETVGKDTNILFITTPGQLTCLINDSVGVVATNTAAVQLANARDRPCVALFSSKEKARLFLPYLEERKGCTVVASETGKLIDIDVEAVKKAVKEFKAAPSVALAQT

SEQ ID NO: 46139 - protein, 88 aa, Oryza sativa
MSSLSTLSVTSCGRCQFGRILFLFLPMACRQGRQQHCLVDSYLDLEDKAVVVMSGVGAPNIVESGRCAGHPRLHSDEIASCWPTHRRG

SEQ ID NO: 46140 - protein, 528 aa, Oryza sativa
MRNVLRWQAKLDRAALRLGHVGSFCCAFLFFPVARGSSLLPLIGLTSEASIKYHVWLGNLVMLFFTAHGLCYIVFWASTDQIHEMLKWTRTKVANVPGELALLSGLVMWVTALPRVRRQMFELFFYAHHLYALFLVLFALHVGVAFFCSILPGVFLFMVDRYLRFLQSRVRVRLVSARLLACDAVELNFCKSPHLTHSPMSTVFINVPCVSRLQWHPFTVTSSSSLEPDRLSVVVKRAGRWTEKLYETISSLPPSQPGHLDVSVEGPYSQATPASFLQYDSLVMISGGGGITPFISVIRELVHRSGTAAEAATPSLLLIAVFKTSADLAMLDLIVPASGGFSDISRLELRIEAFVTRESVPSAGDVVAIAHKVPAEEVLFKPSPSHAPIAPVLGHNGWLWLAAVVSSSFFIFLLLVGAVQRLYIYPVDGNSNRVYPWAARTLLNLLLLCVGIAVAASAAVLWNKRRRAEEAKQVENVATPASSPATWLDKPRRGDAEVGRRPDLRSTMHRSILFSFWVELVLLPLKSA

SEQ ID NO: 46141 - protein, 60 aa, Oryza sativa
MASRPRRTARAPNRFGFEEVRVEPEADHEEDSIINMLVADLEAHEQGRAARRAPQQAGMQ

SEQ ID NO: 46142 - protein, 269 aa, Oryza sativa
MALPLVRLPPLPAARHPPLLRLPKHSVPPHGGRVSFACSSGSRAAFAACCASASVAPAAEAEAVVEEPEGPRTRLIAQNIPWDCTADDMRALFGKHGSVVDVELSMYNSTRNRGLAFVTMGSEEEALSALNHLNSTTLNDRTIKVDFTRSRKKQYVVPSAPMPKHSVFVGNLTWRVRSRHLRELFASTPGVQSVEVVFHTTSPRRSAGYGFVSFSSKEAAEAAISTFNGTKLMGRSINVMFKDDNAKKNKSAAPTEEDLKAESSEQIVS

SEQ ID NO: 46143 - protein, 474 aa, Oryza sativa; identical to SEQ ID NO: 29856

SEQ ID NO: 46144 - protein, 618 aa, Oryza sativa
MSSKCGAPKVRKPTINYHRLPLDGHQFDLDAFLTKDRNANNQSKPSTQSGSKSIDRRLTTPQLVSALTGIWNLVGQPESSGTAQISESHEILHKDEPVCFSKEQKEHALMSCCAENSTGLSSQNFLSTPKSIFEDLSLVKKMLMLTSCSSMAGGSSTWRHVHVGSAYYLKYQNIYPMQTRMMHTYAVSGSTEFKKDQSFRRDDNHSSQTRNMPTELCTSSSEEAHIYESSLHGTKSNLEIIPEYCSSSSCSSQQMVTCEETRIMPADQISSNTCTLTENSVCISCPVGDVVVINSEHTDQNVDGLMSQEHSVDKYSPQLESSVQHRFYGAVNLNRHAVAGALAGTVVSVSLHPIDTVKTIIQVNSSRRSSFYHTLRRALVERGVLGLYGGLASKIACSAPISAIYTLTYEIVKGSLLPILPKEYHSIAHCTAGGCSSIATSFVFTPSECIKQQMQVGSQYQNCWDALLGCLRKGGITSLYAGWGAVLCRNIPHSVIKFYTYESLKQFMLKSAPANANLDSGQTLFCGGFAGSTAALCTTPFDVVKTRVQLQALSPISKYDGVLHALKEIFQHEGLQGLYRGLAPRLAMYISQGAIFFTSYEFLKTIMFSEQELHARNF

SEQ ID NO: 46145 - protein, 643 aa, Oryza sativa
MSSATSVSAFAMAATSSAAAAAPPPCRLLGSGQAHLRLPPSAAAAAASARRRLLLRCAASGGNGKGGGGDGSGSDPVLEERRRRRQAELAARIASGEFTAQGPAWIAPLAVGLAKLGPPGELAAALLTKVAGGGGPEIPQAVGSMSAVTGQAFFIPLYDLFLTYGGIFRLNFGPKSFLIVSDPAIAKHILRDNSKAYSKGILAEILEFVMGTGLIPADGEIWRVRRRAIVPAMHQKYVTAMISLFGYASDRLCQKLDKAATDGEDVEMESLFSRLTLDVIGKAVFNYDFDSLSYDNGIVEAVYVTLREAEMRSTSPIPTWEIPIWKDISPRQKKVNEALALINKTLDELIDICKRLVEEEDLQFHEEYMNEQDPITLHFLLASGDDVSSKQLRDDLMTMLIAGHETSAAVLTWTFYLLSKYPNVMAKLQDEADTVLGDRLPTIEDVKKLKYTTRVINESLRLYPQPPVLIRRSIEEDMLGGYPIGRGEDIFISVWNLHHCPKHWDGADVFNPERWPLDGPNPNETNQNFSYLPFGGGPRKCVGDMFATFETVVATAMLVRRFDFQMAPGAPPVEMTTGATIHTTEGLKMTVTRRTKPPVIPNLEMKVISDSPENMSTTTSMPVSAASIASGEDQQGQVSATRI

SEQ ID NO: 46146 - protein, 234 aa, Oryza sativa; identical to SEQ ID NO: 30426

SEQ ID NO: 46147 - protein, 770 aa, Oryza sativa
MDFNGTLNDQMRGFYRSKYEYKGETKNMAVTQFEAVDARRCFPCWDEPAFKAKFKLTLEVPSELVALSNMPVACETIAGPIKTIHYEESPLMSTYLVAIVVGLFDYVEGVTSEGNKVRVYTQVGKSSQGKFALDIGVKSLNFYKDYFDTPYPLPKLDMVAIPDFAAGAMENYGLVTYREVSLLFDEQSSSASFKQDVAITVAHELAHQWFGNLVTMEWWTHLWLNEGFATWMSHLSVDSFFPQWNIWTQFLDSTTSALKLDSQAESHPIEVEIHHASEVDEIFDAISYDKGASVIRMLQSYLGAERFQKALTSYIKKYAYSNAKTEDLWAVLEEVSGEPVKDLMTTWTKQQGYPVISVKLKGHDLELEQDQFLLNGTSGAGIWIVPITLGCCSHDKQKRLLLKHKHDNIKAIVSQCDSRQKGGNFWIKLNIDETGFYRVKYDDELTAALRNALQAKKLSLMDEIGIVDDAHALSIACKQTLSSLLHLLYAFRDEADYSVLSHINSVTSSVAKISIDATPDLAGDIKQLFIKLLLPPAKKLGWDPKDGESHLNAMLRPMLLVALVQLGHDKTINEGFRRFQIFFDDRNTSLLTPDTRKAAYLSVMHNVSSTNRSGYDALLKVYRKSAEGEEKLRVLGTLSSCQDKDIVLESLNLIFTDEVRNQDAYRVLGGVIIEARETAWSWLKENWDRISEAFSGSSLISDFIRSIVTLFTSKEKEAEISQFFATRTKPGYERTLKQSLERVLINARWIEGIRGEAKLAQTVHELLHKP

SEQ ID NO: 46148 - protein, 635 aa, Oryza sativa
MASKPGPLTQWPWHNLGNYKYALVAPSAAYSTYRFVTASSAAERDLLNFMVFPMLLLRLLYGQLWITVSRHQTARSKHKIVNKSLDFEQIDRERNWDDQIILTALVFYLVSATMPQAQVAPWWSTKGMVVTAVLHAGPVEFLYYWLHRALHHHWLYARYHSHHHASIVTEPITSVIHPFAEEVVYFVLLAIPILSTVATGTVSVVTANGYLVYIDFMNYLGHCNFELVPKCLFHVFPPLKYLLYTPSFHSLHHTQFRTNYSLFMPVYDYIYGTTDKSSDELYERTLQGRDEAAWRPDVVHLTHLTTPESVFHNRLGFAAVASNPLGAAASGHLLRAASAVASPLLSLFASTFRSEANRLDKLNIETWVIPRFTSHYTSKSDGYKVSRLIEKAVSDAEASGARVLTLGLLNQGYDLNRNGELYVVRKPSLKTKIVDGTSLAVAAVLNMIPQGTKDVLLLGNANKISLVLTLSLCKREIQVRMVNKELYECLKQQLQPEMQEHLVLSCSYSSKVWLVGDGVTDEEQMKAQKGSHFVPYSQFPPNKARNDCVYHCTPALLVPESFENLHVCENWLPRRVMSAWRAAGIVHALEKWDGHECGGRVTGVQKAWSAALARGFRPYDDHHHPGITHDGRGGL

SEQ ID NO: 46149 - protein, 203 aa, Oryza sativa
MGYAPLNMLGIIQSQKTAELLLDQKVNGILCSPQVAAFDTATTICEVQEAADCLGADCVPRYVEMKKLLELEIDDAFQTKQKSFGEIAQSGWLGSMEYKTLEGLWNQSKAAWQALLNELQDDTSERILVVVGHPGINLALICRCLDLTMDYMSSFHLDDGSISVIDFPDGPKGRGVVRCTNYTAHLGRWSIPITRTMETDEEF

SEQ ID NO: 46150 - protein, 343 aa, Oryza sativa
MKEVRELCYDIDDFVDELFHAAANAKIQRALQFKASPLRKKLPLFKTSQLQEKLSRFNASQLQKKLSWRQKIVDEVSSFSSCLKELIMLYKRYDLGSLERRSGWESNGTMSLTLPLAEETSQRCYLGMDKDMDKLVGLLNDGQQECKVIAIIGLCGVGKTTLAEELYQKFGFQFQCCAFLRLSRKPDMKRVLGSLFSQVRQHDPPGTGTVEVDNLSHEIKSYLNDKRYFIVIDGVWSSYIWNTINQTLPKNFYSRILITTEIDHVAQRCCVDNRKYIFKKEPFNKVESDEFFSRVHEYLKEISSEIAQLFSGLPLMMAIVASILTRLPPSTEQWNVVKKIIKF

SEQ ID NO: 46151 - protein, 311 aa, Oryza sativa; identical to SEQ ID NO: 29587

SEQ ID NO: 46152 - protein, 215 aa, Oryza sativa
MRSSTTPTAQGETASPGGSWTSTPASSSGTAPSSTSFTLRDQYDLSDDTVRHRPPLGHDRCRLGHGGDNGGVGDGRAGEESKGADEGTRGAGPRHRPWSRHVGGRHPELALLAGRREGVVPAAHTDAADAPTQGQRRVKIAGYDVPKGANVIVNVWAVGRDLSVWDSPLPHSSTGRSVSSRRASTSRAATTASSPSALAVGFAPAHSSGSASWHP

SEQ ID NO: 46153 - protein, 1350 aa, Oryza sativa
MPRSSRHRSSSHRSHRRGGSVERSESEGDEAGGGAGAREEAAAARVSRDPEPERRRSSSGKEVVSSGNGYAEHGRKRKDRVEEMVVDVVSDRWNSGVCEDHLVEKRSKGEVFGPVDVDKLPEKSRGSGDESKRSSRRMVSMDDRAEEVVSKSDSGKRRSDKDLGRRESSGQYRDDRDRERERDREKERDREKEKEWERQKERERERGRDRERDRDREKDRERERERDKERDRERDRERERERDRERERERQKDREREKKDYDSKHERYDDGGAKKNGSKASRGEEDGYSYKRDTEINASATKEKYNNTEKDLDRHSRRKDVSEDKDKWPAENRDGDDRKTLSRYDHSKVRSSKEQRFDDDKYKEKYKDDYERDKRQQDDKCLDERLTRDHESDRADYKSSKDGHRTSESHYRKDVIQEPDHYDDYGSRYKESRGRKRPPEENDDQYDLKPPSAREQRGSADKSSGSGRLDALVERMRSDHRHPENVDSSPNKVHPRSSPGPNTYHDKDQNWHGSKLTDHAKREIPYDERNIRPRTSSGRERTPASRLRDRDADNRPSERLKQKDDLQSRDMQLEISSSLQYDRTPRKDAHPSPKHLSERSPTEQRFSGRLSGGRSTDNKAERSGLTKYRDRDGDSVERSVHQDRTPAKAPYREPTPSSSSRGGHFSGTSPNHPLPPPPRHRSDDSSFLGLHDDDRRPQSGDRRFHQKRNDMSSGRGHGHAWNNPPSWPSPVANGFVPMQHGVPGFHPPVHQFSAPPMFNLRPQMKLNQPGVSYPMHESVDRFSTHMRPFGWPNPLDESCPPHLQVWNGGSGVFASEPYMYGRQEWDQNRQHSVSRGWETTGDALKGQNELHEREPSVTKKEPDCSATPVPETSTGQYNLNSRIEQKEMDQTLEKNGTKDDLKSSFRNTGGSGGAPLMTSMPSNSGTAIFSKSYLSKISVSRDLVESELYKRCISLLADFGIANTPEVVGTGLVQNNGSFGKINRKLGTPNLLGSHNLKNKSDIFQRALALHKNQTAKIVSPTHSILETDRKTYLPEDNHDDTEMTDHTVSKELLVDNSEPHHGADTMEKELPLRQELAGGIGVTSPASIEPGNVGAPPVIIEPDVGMEDVAPPKIVEPDEGMEDAAPPKIVEPDEGMEDAAPPKIVEPDQGMEEVASPTIKEPDEDIEVMPLGTAEPGKGMEEVAPGGISEPEKGMENLVPPGIAEPVKDGMDDVAAPSAGPAAGLGDGVPEVTVELADSAQEKPPAMGELGDGMEVMPPPVTETSLGKEDSPAVPSSPEVQEIVSGMHAGIEKGMEGETDNLIDDNPGDGEVNASSLELDVASGADDCEALVESRVNLSRIPNSPESTH

SEQ ID NO: 46154 - protein, 631 aa, Oryza sativa
MHSRLLSAPSHASAASSSPLPFAAAHPCRASWTPRPTSPLPPLSLLRATASMHPSPPPEGHSDQPVHGVTNTVVGVLGGGQLGKMLCQAASQMGVRMAILDPLEDCPASSVCHEHVVGSFNDGATVSEFAKRCGVLTVEIEHVDAVTLEKLEKQGIDCEPKASTIMIIQDKYRQKTHFSKFGIPLPDFVEVDTLSSIEKAGEMFGYPLMVKSKRLAYDGRGNAVAHDKKELSSVVASLGGFEHGLYVERWTSFVKELSVIVARSRDGSTVCYPVVETIHKDNICHVVEAPAEVPDKIKKLATNVAEKAIKSLEGAGVFAVELFLTQDNQVLLNEVAPRPHNSGHHTIESCYTSQYEQHLRAILGLPLGDPSMKAPASIMYNILGEDEGEAGFTQAHQLIERALDISGASVHWYAKPEIRKQRKMGHITIVGPSKYSVKARLDKLLQRDAYDPKKVAVKPRAAIIMGSDSDLPVMKDAAVVLKKFNIPFELTIVSAHRTPERMYHYALSTKERGLEVIIAGAGGAAHLPGMVASLTSVPVIGVPIMTSSLHGTDSLLSIVQMPKGIPVATVAIGNAENAGLLAVRMLASRDPELGDKATEYQHDLRDMVLEKAKRLEELGWEEYTELYLKKH

SEQ ID NO: 46155 - protein, 1128 aa, Oryza sativa
MAASVEAAAAAVVAPPASVGGDEVVVGGGGGGASEQARTLIGALNLLSRNLPLPPAVLHAVSSIYHGGDAWEGEGEEGGEEEVAAAAAAVGDGCGESGEGEEDRADASPGADEGVTLIQELEDAVLKNQGPYMSYSELTALKEDRFNTSIQHRLTELEGLPSTRGEDLQMKCLLELYGLKLLDLQKKVRTDISAEYWLHKKCAHPDRQLFDWGMMRIRYPFTMYGIGDSFSMDADDINRKKRFSERISRLEEEEKNQAEIRKRKFFSEILNAAREYQLQVPASYKRKKQRNDGVLAWHVRARQRINRMEKSRLQVLKAGDQEAYLRMVEESKNERLKLLLGKTNELLEGIGKAVQRQKDAEHVSRPDGSELPKGSESDDCSQISGLKVESPDEESPSDVDADHHSSADHSKFNAGHRLDSTVHSIEEKVTEQPSALEGGELRPYQLEGLQWMLSLFNNNLNGILADEMGLGKTIQTIALIAYLLEKKEVTGPHLIIAPKAVLPNWSNEFKTWAPSIGTILYDGRPDDRKALREKNFGQRQFNVLLTHYDLILKDLKFLKKVHWHYLIVDEGHRLKNHECALARTLVSRYQIRRRLLLTGTPIQNSLQELWSLLNFILPNIFNSSQNFEEWFNAPFACEVSLNDEEQLLIIHRLHQVLRPFLLRRKKDEVEKYLPVKTQVILKCDMSAWQKAHYEQVTSNGRVSLGSGLKSKALQNLSMQLRKCCNHPYLFVEHYNMYQRQEIVRSSGKFELLDRLLPKLQRAGHRVLLFSQMTKLLDILEVYLQMYQFKYMRLDGSTKTEERGRLLADFNKKDSEYFLFLLSTRAGGLGLNLQTADTVIIFDSDWNPQMDQQAEDRAHRIGQKNEVRVFVLVSVGSIEEEILDRAKQKMGIDAKVIQAGLFNTTSTAQDRRALLQEILRRGTSSLGTDIPSEREINRLAARNDEEFWLFEKMDEERRQRENYKPRLMEGIEVPDWVFANDTLTEKIPADEPQNVLLTTKRRRKEVVYSDSFGDQWMKADDVVEETPRMAPRAKRSAYSSDVQEVDFSERRKRHKSLVNIADDASIPMWTPEKVRAGVSSYSKDENEDDAEDESTTSVLQGGSFTWKTLRRKRSSHFSNSSDSKGRSAF

SEQ ID NO: 46156 - protein, 482 aa, Oryza sativa
MECVRSGSGVLDPRCSPRFLGKKGGSLTSCGKATSTNLAICTKHEQNLHGNVKPSQLAASGSSYSVHRSPVLKQRQNLSARSTSADVYTTFDENVRAVSSHAAEEKVGVLLLNLGGPETLDDVQPFLFNLFADPDIIRLPRLFRFLQRPLAKLISTFRAPKSKEGYASIGGGSPLRKITDEQANALKVALKKKNLNANIYVGMRYWYPFTEEAIDQIKKDKITKLVVLPLYPQYSISTSGSSIRVLQNIVKEDSYFAGLPISIIESWYQRDGYVKSMADLIEKELSIFSNPEEVMIFFSAHGVPLTYVTDAGDPYRDQMEDCIALIMGELKSRGILNSHTLAYQSRVGPVQWLKPYTDEVLVELGQQGVKSLLAVPVSFVSEHIETLEEIDMEYKELALESGIENWGRVPALGCTSSFISDLADAVVEALPSASALVTKKVDESDSDMDLMHYLSKMFFGSILAFVLLLSPRLISAFRNTLL

SEQ ID NO: 46157 - protein, 369 aa, Oryza sativa; identical to SEQ ID NO: 35324

SEQ ID NO: 46158 - protein, 321 aa, Oryza sativa
MHAEEQLTNGFLDAPVDWTPGMSKHLRLKDFPSFFRATDPDEYMFHFALHVTERLAEADAAVLNTFDELEPEALDAMRAMLPPSVSIRTIGPLGFLAEQVVPKGSPLDALGSNLWKEDDSCFGWLDGKPPRSVVFVNYGSVTVMTNEELVEFAWGLANSGHDFLWIVRPDLIHGDAAVLPPEFMESVGGRGLLASWCPQEAVLRHEAVGVFLTHSGWNSTVESLCGGVPMLCWPFFAEQQTNRRYSCTEWGVAMEIDDDVRRDAVEAKIREAMGGDKGREMRRRAGEWKETGLRATRPGGRAHASLDALVADVLLSGGKAR

SEQ ID NO: 46159 - protein, 380 aa, Oryza sativa
MELAPFAAASSSSSSSTVTNTCKLRLRLSYTHCSIGFAPRVRRWIRAAAEGRGGDQRRSGRLAADGPRVVEVAAPPAAPVVTGGGGGGGGFAARDAELAMWERLGAVVRLSYGIGIYAAMALTGRFICQMAGIDCTGGFHPSLSALVEGLGYAAPPIMALLFILDDEVVKYSPHARAIRDVEDEELRSFFYGMSPWQFILIVTASSIGEELFYRVAVQGALADIFLRGTELMKDARGIASLSGMVPPFVPFAQTFAAAITAALTGSLYYVATAPKDPTYVVTPAMRSNTGRENLKKLFAAWYERRQMRKIYSPLLEGILAFYLGFEWIQTDNILAPMITHGIYSTVVLCHGLWKIHDHRRRLRQRIQEIRQEGTTNSDTL

SEQ ID NO: 46160 - protein, 325 aa, Oryza sativa
MMQDLFSVPSCFSSGEKLPDIPSSGTAAAAAAARQSAVTLVYRAEISGHRRLVTVTWCRNLLTHGLSVSIEGSAGNGKDKIGREYGEAAVAATAADGGGGGGGGKSCSACKVEMQPWHFWRKYGAKQFQVDGNAIDVVWDLRSARFSDGPEPLSDYYVAVVAGEEVVLLLGNLKKDAFRRTGSRPSLQDAVLVCKKEHVFSKKRFVTKARFSDRGKLHDISIECSSSNLTGGTDVDMAIKIDGCVSVLVRHLQWKFRGNECISINKLKVQVYWDAHDWLFGTGMRHALFIFKPEPPSPSPPGASSEFSTDEYSDFCLFLYAWKVE

SEQ ID NO: 46161 - protein, 395 aa, Oryza sativa
MMDKRVIANLMEERRRVEVTNNGRRTTENVYAVFTGSVVRHYPRRLFSLLTLALACVEEGRFRQRLISGRVSCKQIKIFISCAVQRVPLLDQVPCSITVTNTEELVQADSAGANNNKICECTFLNPGSWDAALLAAGTTLSAMKHILDGHAKIAYALVRPPGHHAQPDRADGYCFLNNAGLAVKLALDSGRRRVAVVDIDVHYGNGTAEGFYHTDSVLTISLHMKHGSWGPSHPQSGLVDETGEGRGLGYNLNIPLPNGSGDAGYEYAMNELVVPAIEKFRPELMVFVVGQDSSAFDPNGRQCLTMDGYRKIGQIMRGMADQHSNGQILIVQEGGYHITYSAYCLHATLEGVLNLQAPLLDDPLGFYPDDEKYTMQAVDIIKKCWKESIPFLKDI

SEQ ID NO: 46162 - protein, 112 aa, Oryza sativa
MLLTKAIIYILNKSIIPWKCFQNIMDCYCFSKTRVVMLILRKQVTTTKIHLRFSLPIINLSSNHFNQFNFLSLKQWGGTIPLEEQKYILINKQPINLNVKLLELKGGKSKST

SEQ ID NO: 46163 - protein, 536 aa, Oryza sativa; identical to SEQ ID NO: 36867

SEQ ID NO: 46164 - protein, 149 aa, Oryza sativa
MRPPSPSSLRPVSSRRQDPGPPRRGALAGVSIPKMLGCFQSLMKDFKKQIWMQRMIRSFVYAVRQGQWNTAVWFSSLPIVAIDLTYSFLIFFNVTTTSLITILCSGESDEQSKPSSNTGIRKASMLLVEEELSCRSWPSTTWTRFAGNA

SEQ ID NO: 46165 - protein, 77 aa, Oryza sativa
MQAVVAGSTSAGVRRHEVLQWRRAWDNRSWCDFAPFATTNLNMVNFDALLACANQQMSLMLAGYLCVHCVFVSEKLL

SEQ ID NO: 46166 - protein, 160 aa, Oryza sativa
MATPTAQTAALLAAAAALFLLASAALPVVRSDAGGDGGVTAYDELRHRGFPLGLLPANVRGYTLDSGSGDFAVDLASSCRIVLPAGSYLASFSDRLTGRLDDRRISGLSGIRVRAFFRWWSITGIRADGDELVFEVGSVSAKFPARHFNASLECPAKADS

SEQ ID NO: 46167 - protein, 494 aa, Oryza sativa
MSMAARFLDSLKATYQYYHRAMGNVLVAVPAAAGALVTVALLAPEAESTTVAIGRLRELIRPAHLFLAVFLPAAAATVYLVMRPRAVYLVDYACFRTAPNCRVPFATFLEHARQVPTLTERSVRFMTRLLERSGLGEETCLPPAHHYIPTYKYCTLEAARAEVDLVVFSAVDELFAKTGVSPDDVDILVVNCSLFCPTPSFVDMIVNRYKLRSDIRSMHLSGMGCSASLISIGLARNLLQVAPRGARALVVSTETITPNYYVGNERAMLLPNCLFRMGGAAALLSTSPAKARFRLKHVVRTLTGAEDSAHHCVFQEEDEHGSIGINLSKDLMTIAGNALKANITAIAPLVLPASEQLKFALAFIARKALSGRVKPYIPDFRAAFEHFCIHAGGRAVIDELQRSLCLSDEQVQASRMALHRFGNTSSSSVWYELAYVEAKGRMRRGDRVWMIGFGSGFKCNSAAWECISPARDDDGPWATSIHRYPVDIPDVLKH

SEQ ID NO: 46168 - protein, 486 aa, Oryza sativa
MAALLMNTGAVSMPFPTTRTAARRRTSRSRCQASSSGGSSNEGGGESYRGRSGRGGSTTWVTEYDLYGLLGVERSSPQSEIKAAYRSLQKRCHPDVAGAKGHDMAIVLNEVYSLLSDPAARLAYDQEQAKQSEFVGYTGKPLYSAWFGGEAEQRAVFVDEVRCVGCLKCALYANKTFAVESVYGRARVVAQWADAEDKILDAIQTCPVDCISMVERSDLAALEFLMSKQPRGRVRVSEGNTVGARAPDIFNEVSKFQKRFQEMKQKSATRESEESEAARQSRSSAVQTIRSISNWWYWQPFRAPATTVLASLHLPAPPPSPSMPADPVTDRLQEAAARRKAGGATAARTVASYARRDDYWTPQLNLPSLASPPERPHRRQSASPPRSQTRRATPTGDGGVTLGSIDLTAPLLMAIISAGFVGYNREEVAGVGGGGIQEHVGGAAALGLVNSFELKIVLASVTWFIIGAAIAGFIQFLARSEVNFRK

SEQ ID NO: 46169 - protein, 191 aa, Oryza sativa
MAAAARLLPVAAKRLTTTARARRLSTSTSTSPPATAVLYDQHGPPDKVLRVAELPAAKIGERDVCVRMLAAPINPSDLNRVEGVYPVRPPLPAAVAGYEGVGQVHALGGAVDSRLLSPGDWVIPSPPSLGTWQTYIVNPATAWHRVRSDVPPQYVATVTVNPLTALRMLCDFVNLAPGLLSLLSSLFFPCN

SEQ ID NO: 46170 - protein, 99 aa, Oryza sativa
MALSLPARRSLALPAPRHHRCRPRFATVPAPRRRPSPLHRAAPPPAAVPHKSSPPSSAPPRRSPLRRRPRFAAVPTPRRRRPRLAASPPRRRPSTSSRP

SEQ ID NO: 46171 - protein, 347 aa, Oryza sativa
MSIRRFVYLVLEEFAPRRSNYTLRNIDMERFFLPRPSPVPFVASGTDAAEYASLPCPAMTFYPPFSKLPGKQQMEFLLLGGNHNMVVAADQTCRTVLYDPGEHAVRTLPALPYQLELPTASVTVGDDLYILDHVEVGNVPCFHGLIYEDRLNEDWCCCALPPPPPLLSHKSDFQVDSYAVVGDTDIWISTHDSGIYCFNTVSHVWSTVATGWTLPFVGLAEYCQEHGLWFGLSHTRDRRSLVLSALDLDSSHLPVLLSLPLEFTPPDALKLVSSYLVNLGSAKFCIARLFQTDEDQRDGEELFAVLTAVEVERCDDDDAGANGGGLRMLKHRSEMYKLTSEMMYWVL

SEQ ID NO: 46172 - protein, 115 aa, Oryza sativa
MLSHIDWWNRVSRSKPLATIPTSSSISHISAMAGNASVMRRLYLSFYNWIVFIGWVQVSWSMILALLENGYEAVYAAVEQHLLFAQTAAIMEILHSIVGEISSFFIKKIISNKGW

SEQ ID NO: 46173 - protein, 210 aa, Oryza sativa
MGATMQLVVGLAGVASSSPRLAPHCAVATATTTSSCSVRKQSCSCCGAAHLPRRLQHKQQRRCGIRVRAVETDAAAGGEAKAAPEEPPSVDFAFVAPRLLPDGTPDVHYRTACGGQKLRDIMLDNYIDLYGPYDKLLLNCEGGGECGTCIVEVVEGGELLSPKTDVEKELLKRKPKTWRLACQATVGNPDSTGQMVIQQLPEWKIHEWDK

SEQ ID NO: 46174 - protein, 176 aa, Oryza sativa
MLGSKKEASHSISAKVGKNLLSLLAYALDNVLDSVFLLHQHLISSYLTSMEFPSFPCLLHQKNTSGSKQKGLYTKTAKAIHPVMVQSHRLLSITGSTNQRTPNPSLQMISKRRYWEPFNQHDPSQIDRPSLQPKKRMDKFRPQQWHKAPHSMHFPFLRLPIEEQPSISSEYAINVV

SEQ ID NO: 46175 - protein, 435 aa, Oryza sativa
MSIWCMSQNQYETGPRARFSYSLHSFGYDSGITAAAMYIVMIDEIFRMLGYFLSRWAKLIAMCNFVNFRNRWLKYVIVNTPARYGERTIVIHQHAFLQTFSSSISGWKIFSCILERNQNARMVWSEGKMNDSMAKNVKAAVIQALRSMDLEGHLLSRDLPLSRVSDRAERYWLACLAEVPTCSRVILVWHIATSLCEIKLANDHKINLTTMSRLSSFLVDEKALTGELQKAYTVSNCLSWYCMYLLASKPKLLPETILMSKKAFQDAVQCAHEMLSDCHSWQSIYNKLMKEAQKALVQGTHGLNLSGNILQQGAILANELIKKEDQKCRWEILSDVWVHLLVHIAPSSDAAALAEDLKSGVEFVTVIWALFCHCGIEKSKLWQQQKSANFRNSTPGPSNQSSDVSTHVQDTVSSSPPAARSSEIHVEASPTSGMS

SEQ ID NO: 46176 - protein, 93 aa, Oryza sativa
MSYADLMMVMAQVQRLKEPLIFVNHMKEVEHHDIFKVAAGWNSGWKIQTILALPGANHLIIIITDCLVQGMLQKLLLQRCRAMALLLHLMAPW

SEQ ID NO: 46177 - protein, 825 aa, Oryza sativa
MEIAVGALSGMVDALPAKLGDLLQQEYTLLSGARGDVGFLQSELGTMNAALLRCESLESSDVQTRAWVAQVRDLAYDIEDWIDLFAHRVDGGAAASPGAAAATSSSSSSGGFLSWVRCCVNKVTTLPARHVIATELQELKNRVIELSEQRKRYRFDPPARHAGGRSGVAAVDPRLVALYADTSSLVGLDAPVKKVSEMVVDDGTTGLKVVSISGMPGAGKTTLATAVLRRLKEENKFHCSAFVSVGQKPDIVGKTLKGILSQIGNGYAGGEDIGRLIGMLRDELKDKRYLIVIDDLWGRTEWSTLKCCFRDDNLGSRIMVTTRNDELAKECSSNSDESVYKTGLLSDADSKDLFSNKAFGKGKDCPNHLKDLYDIIVERCGGLPLAISSVAGALAHRFSKDEWERYESNLLPSSHSDELNLKQILNLSYNDLPSHLKSCMLYLSIFPNKYEIDVERLVRRWIAEGFIADARHASKEETARSYLTDLISRNLIQALHLRHNGTPSCYTLHPVIHDFIVVKSMEENFVTVLDAKKEALSTNNGTVRRLSLQNSVKQDLAGARNDMIKHARSVTVFGHANGVPRLNDMSVLRVLDLEGCNGPLCLDGLCKLILLRYLNLRGTDVSELPAQIGELRCLETLDVRSTKVKELPASIVSLEKLMHLLAGNAKLPGEISKMNGLLTLSCANVWKNTGSVLPELADLANLRELELFCDASEISGDNKTRVSFSSDGFKRLKQLSIQGSLPSVAFVNSSLRKVEVLELKYEKGISDGSNGVSGIEHLPSLKHVLIEFSQKDAGATATIASVRNAAEMVHPNHPDVSVKVDGKAI

SEQ ID NO: 46178 - protein, 507 aa, Oryza sativa
MAPMAGGGGVPWGDRARVVGAQIRSRFRVGVAPVDRRWLWRRGDGRVASEAVRQWTERVRSLWQREKSTDQISSSPGTSQVAAAAKPSSSALRFYRKKVGKEVDGIEDSVIFRSLQALAVPLIGNACHIFMHGLNSVQIYGAEKLQQALQERPKGKPLLTVSNHVAAMDDPFVIASILPPSVMLEAQKLRWTLCASDRCFTNPILSTFFRSVKVLPVSRGDGIYQKGMDMALSKLNNGGWVHIFPEGSRSKDGGKTVAPAKRGVGRLVMDADSLPVVIPFVHTGMQDIMPVGKRIPRAGKRVIVVVGDPISFNDLIIDNSDETQHISRGILYDKATERIGQRLQELKAEVDRLAAEQKSELQHHHARDTVNYGTRLWQQVDWEAFGMESSMLSPEPSDVQEPLKKAKPVLHLESEHAKPELHLEPEQAKHELHTEQCVPAAPSAEICSNFGVPLFFRQHTDPSELMGFAARGLLKNGRFMEEEGYRELQRQGAMNMFWGSQANNTVL

SEQ ID NO: 46179 - protein, 380 aa, Oryza sativa
MVAKIKRQIGGLSLLAKLGLLLLALLLLLAAILLLVFLLPRHHRRPLPPGSPPVNASDPDNIVAFDFSPFLILYKSGRVHRMDGTDRVPAGVDEATGVTSKDVVIDRSTGVGARMYLPPAKGAGKKDLAGALPVLVFFHGGAFVIESAFTAKYHDYLNKVTAKARVVAVSVDYRLAPEHPVPTAYDDSWQALNWVAKNGRSGPEPWLRDRGNMSRLFLAGDSAGANIAHNMAMRAGKDGGQLEGGVAITGILLLDPYFWGKNPVGAETTDPARRRQYEATWSFICDGKYGIDDPLVDPLSMPAPEWRKLACSRVAVTVSDLDDFKERGKAYAAALRDSGWGGEVEEYETAGEVHVYFLDKPSSPKSAKELTFVAGYLSHE

SEQ ID NO: 46180 - protein, 53 aa, Oryza sativa
MLAGFRSRWTSGSGFAWWRKRRPVAMSAAMRNRMFQGIGSVFPRRHSRSSRLP

SEQ ID NO: 46181 - protein, 280 aa, Oryza sativa
MFLRSKVQEMILRRRSRSMNSGGGGVQQSHLSGQHASSTTVSCDGGGGGAGGKSATAACALLGSPRLLHCASLPSGSHAKNGGGGGGGGGSEPETPYSMSPTSVIDAAAAFAPSPDAGGSKRRPWCDWGAGTHGLADALDCTGDDDDGHRQSVLAAASRAVKLQAQPQQQHPLLRSCSLDRRVEFGVKNKSSWLPLRVAGGEAAAAAAESPAEMQMEPSSEDYTCVISRGPNPRTVHIYGDRVVEGGGGATTAVALAGESSPRPINLPAPAREARGFLSL

SEQ ID NO: 46182 - protein, 257 aa, Oryza sativa
MVARPDGDAPTEFMSFTNCFHGRTMGSLALTSKVQYREPFAPVMPGATFAEYGNLEEAKKVIQSGKIAAVFVEPMQGEGGIHSATKEFLQGLRDACDEAGALLVFDEVQCGLGRTGYLWAYEAYGVVPDIMTLAKPLAGGLPIGVVLVTEKVASAINYGDHGTTFGGGPLVCQAALTTLDKIQKPGFLAEVAKKGENFKQLLSTKLSGNAHVKEIRGIGLIVGIELDVPAGPLVDACLDRGVIVLTAGKGNVVRQCC

SEQ ID NO: 46183 - protein, 306 aa, Oryza sativa
MGEGDAAYAKRVLLTAAGDDVSRGIASTLATHGCRLVLVGDEGALAGTAEEARRGGGGGDAVAVVGLDLHGCDEAAVDAAVGTAWRCFDGLDAMVNCYSYEGEVQDCLNISEDEFKKTMKANVMTPWFLVKAIAKRLRDSESSCGGSVVFLTQIIGAERGLYPGAAAYGTSLGAIHQFVRAVSNGAGQAQDEGERGVPWAAPGRQVPGVGGEGEGGEGDGGGDAAAEMAGPGEGRGVHGAVPGWGRVPVHDWQHHIRGWRPVHRAPAHALLHVDHHITVRDNKQLLVIVGRSITITRRAPSWVSAL

SEQ ID NO: 46184 - protein, 313 aa, Oryza sativa
MSTPAGVAPRRSSRLASSAPPLGAGQPSSSPLPRRRRRRASPSGCAREVDNSPPPVVILDDNEMEQHVEAEEMKKQGEESVEANEAEEKDKDAEVLEELPDWLPDGWIMEVRCGDNGNIYRYYTSPVSGYTFSTKMETLHYLFSEMDERVMESQACADDNELHRMHTWLPDGWAIEVRAGGKKMEKMYKFYVHLPTGMRFLSKENVLLYSNEGKISRCDVKGLCDTSSEDNILAMVEFNPDGLPEGWVKEIIFRKCNDGIRKDPYYTDPVSRHVFRTLKSVINYLETGQITKHAYIPRRSVTDMYSFDSLKVC

SEQ ID NO: 46185 - protein, 708 aa, Oryza sativa
MADREKAEETEEEYESDLDDAPLPAVRRRDAASDDDEEEEEEEEEGARPSPPTKAGSDAESDGQGAAEVYDDDDAYEDDEGYEEYGEVYEEFEQGRGVAGGVATGAVAAAGEEAGMGMKGEAEGEASAAAAEGEEGKKGSEPYAVPTAGAFYMHDDRFQEARGHGRQRRMVGDRRLWNAKEDQAWVHDRFDEMNLHDFHNDYTRRRPRGRFRGRGGAPVGKVRGGSRDNFRGNRSQTYYRDGAKNYIYVPKEPHSYHDNTKKVQQVLNDNGKNRTIKPPNPRDGDANNFDFVRKESRPLYGNAKSNKSAPRVVRGRGSKRYQPHWRSTAEISSEHNNKSQNLENTSSNANLGKHQHQASNSQPERGFPMKQSFASNLNSASPPFYPSRPSHQELPVSQRGDGQPSTTTRHFSSPIGMEHVSPTPQYGPLLRGKAFVPSAGHGKLHAEVPIKGMDHPSFHSSTSSSTSQFPIANQVTGNSAKSPHPIVQQRLVQSFNQSTPKMPGQMFAAQFASSDKLPSSMQSTSTILTEGTEISSPHGSNKSNTRLMAKGQHSDQGEEHASFMYGGAQVLGTTGSLGDQNFHGTPALFPVMQFGGQHPGGTGVPSIGMALPGFVSQQHLGLSNSEMTWLPILAGASGALGATYGSPYITVDGSYYPRTSEHASSSVSLREPSASSQLKSQEITEALNDELSQRQHKPRRYSEMNFGK

SEQ ID NO: 46186 - protein, 280 aa, Oryza sativa
MSFQDLEAGNARGLPRRGGGGRAGAAAAGAGASQAVASGVFQINTAVSTFQRLVNTLGTPKDTPDLRERIHKTRQHITQLVKDTSEKLKQASEADHRVEVSASKKIADAKLAKDFQAVLKEFQKAQRLAVEREAAYAPFISQAGLPQSYNSSEVNNGADKLAEQRTALLESRRQELVFLDNEIVFNEAVIEERDQGIQEIQHQITEVNEIFKDLAVLVHDQGQMIDDIDTHIENAVIATTQAKGQLSKAAKTQKSNSSLICLLLVIFGVVLLIVIIVLAA

SEQ ID NO: 46187 - protein, 81 aa, Oryza sativa
MSAYDEVEIEDMEWNAELGAYTYPCPCGDLFQITLADLRLGEEIARCPSCSLFLTVVYNEEDFADAKEPPHKPAPRPVAVA

SEQ ID NO: 46188 - protein, 39 aa, Oryza sativa
MSRTSKFAHLSNMTQYRWTVSFLKFLCGSRILTMIELIG

SEQ ID NO: 46189 - protein, 129 aa, Oryza sativa
MSHQVIMLWLPLVASPSSSSRPQACQAAVRSIVLPHPHASVRAASGNPVQAVSPVVPAAARRQSRSRPHQLSWSSSSLQVAALVNGICRCRSSWRASPHQLHIWPPASACCDPLPGAGPLRQSGLVTRL

SEQ ID NO: 46190 - protein, 167 aa, Oryza sativa
MPMDTERKKRKAFKAAVGMTGVTSASLDGDKLIVIGDGVDPIALTTILRRSLGHAELLSVSSGDDKKMGGGGGHGGMGMGFGGGHGGMGFGGGHGGKEGKEGGGKVVVDGVHHHHQQQLQQQHAMAPPMQPYPAAPAYYNAAAPSYPVYPSYAGYPQQEQDPGCSIM

SEQ ID NO: 46191 - protein, 684 aa, Oryza sativa
MASPAAAPPPTPPESDPRLVEAFVPFLEKLIKNASWRNKAHSKLSHTAKSILDRLQNPPPPAAAAQAPSTPTSPTTPTSSSSQPGPLRSLSLADSELLLGPINSALGSGSAKLAEAGLELLHRLIAHSYIHGEADPSADPSAQLVASLLDAACNALHLDDEHIELLLLKTLLSAVTSTSVRLHGDCLLRAVRACYDMYLGSRSVVNQATAKASLVQMLVIVFRRMEADSSTVPVQPIVVADVIELPEAASGASPAADANFVQGFISKIIGDIDGAITPLARTTSSAAAGAGGAAAHDGAFETRAAEEGAHPADLLDSTDKDMLDAKYWEINMYKSALEGRKDEIGVEGAVVGALDDDADVRIGNKLRRDAFLVFRALCKLSMKTPPKDAPADPIVMRGKILALELLKILLENAGAVFRTSERFLGAIKQYLCLSLLKNCASAHMIVFQLSCSIFISLVSRFRPGLKAEIGVFFPMIILRVLENIAQPNYQAKLIVLRFLEKLCADSQILVDIFLNYDCDVHSSNIFERMVNGLLKTAQGPPAGVSTTLVPPQDTTMKSEAMKCLVAILRSMGDWMNEQLRIPDPDSPKVESEQNDNDGGHEISHTEDNGDECSEASDSHSEMSNGVSEAASLEQRRAYKMELQEGISLFNRKPRKGIEFLINANKVGESPEEIAAYVRRSLRCT

SEQ ID NO: 46192 - protein, 522 aa, Oryza sativa
MYSVAKNYCGGGLAASDALSVSALGRSLKPSRKASRHVVPCRARSFTQCSLGGGSADQEIVIALGSNVGDRISTFDRALRMMKNSGVNITRHACLYETSPAYVTDQPRFLNSAVRGTTKLEPHELLKKLKEIEKDIGRTDGIRYGPRPIDLDILLYGKSHISTENLTVPHERIHERPFVLAPLVDLLGSSTDDNVEKSWHSLAKCTGGFFELWDKLGGESIIGTEGIKRVLPVGNRLLDWSERTLVMGVLNLTPDSFSDGGKFQEMEAAIAQTKLLISEGADIIDIGAQSTRPLARRLSADEELERLVPVLDAITGIPEMEGKLLSVDTFYAEVAAEAVKRGVHIVNDVSGGQIDPRILEVVAELGVPYVTMHMRGDPSTMQSEQNLLYGDVCKEVASELYKRVRQAELSGIPLWRIVLDPGIGFSKNSKHNLEVIMGLESIRTEIGKMSLGASHVPILLGPSRKRFLGEICNRVNPTERDAATMVVATAGILNGANIVRVHNVKYGVDTAKVSDALSKGRR

SEQ ID NO: 46193 - protein, 81 aa, Oryza sativa
MTGTLVFKRSQCLAILPKGISYLLMMMLEMLHEDKEGSDEVLLQPGPAPLHQLTSLKMLQLQNKEVLGQSLREMKVNLEDH

SEQ ID NO: 46194 - protein, 72 aa, Oryza sativa
MLTDAKVEFSNYWLQSKKLNRLLMLLGAVIVPQIFIKNNAEIDGGELLMLYEICAMIASIYLQQDFARIFLC

SEQ ID NO: 46195 - protein, 277 aa, Oryza sativa
MAADLAFEATELRLGLPGGGGDGDAAAAAARSSSGKRGFAETIDLKLKLEPAAAAVDDDDDKEEAAADDREKKVDIVGADNDDASPPAAAAAGGMKRSPSQSSVVTAAADPEKPRAPKAQVVGWPPVRSYRKNILAVQADKGKDAADGGGDKSGAGAAAAAFVKVSMDGAPYLRKVDLKMYKSYLELSKALEKMFSSFTIGNCGSHGVNGMNESKIADLLNGSEYVPTYEDKDGDWMLVGDVPWEMFVESCKRLRIMKGSEAIGLAPRAMEKCKNRS

SEQ ID NO: 46196 - protein, 409 aa, Oryza sativa
MEILEVPVQPPPRIGNGATSSASEIDNSPCQCGDDSQSASTVESKMQLPEDILYHIHTLMPMQDAARAACASRCFLRSWRFYPRLNLNVNTLRIDKRAPSNDKLTIDFISRVDPIMLNHAGTGVKMFKLTTHPCFSLHPSYVDRWLQIAFAPGIKEFELEMTRVSKMDYDFPCSLLSRVASSIQSFLLGGCSFHPGIQIGQMSTLTSLRLRSVKITEEELCGFLSKSCALQRLLLSDCHNIVVLKIPHLLELNYLEVLHFRKLEVIDSSAPKLSTFIYAGPPIQISLGEALLQVKKMQMFCDGSPDALHYGSKKLPSIAPNIQKLYLSTRNETVNTPKVLGKFLQLKCLEILLLTPDLSPGYDFCSLVSFIDASPALETFILRVSYYLYVKAIYHLSGTTYVQDFIVFS

SEQ ID NO: 46197 - protein, 124 aa, Oryza sativa
MHKQNFDGINVEIGANWVEGVNGEKMNPIWPFVNSTLKLRNFRSDYDYLSQNVYKEDGGVYDEAQAQKIIDRAHEVNENGEKLSATLPPSGRDDMSILTMQRLNDQYVCAAYIKLSLRLFLRAD

SEQ ID NO: 46198 - protein, 445 aa, Oryza sativa
MLTRVTHAPLRTVLSLTGVKEGLRGHILVELSDLDNEVLVKLVGGDLVETVVAHDVIGRLMIQCARQPGLAQIWEDILGFENCEFYIKRWPQLDGMQFEDVLISFPDAIPCGIKVASYGGKIILNPDDFYVLQEGDEVLVIAEDDDTYAPAPLPKVMRGYLPKDFVVPKSPERILFCGWRRDMEDMIMVLDAFVAPGSELWMFNDVPEMDRERKLIDGGLDFSRLENITLVHREGNAVIRRHLESLPLESFDSILILADESVEDSAIQADSRSLATLLLIRDIQAKRLPFREAMVSHVTRGSFCEGSWIGEMQQASDKSVIISEILDPRTKNLLSVSKISDYVLSNELVSMALAMVAEDRQINDVLEELFAEQGNEMQIRPADLYLREDEELNFFEVMLRGRQRKEIVIGYRLVDAERAIINPPDKVSRRRWSAKDVFVVITEKE

SEQ ID NO: 46199 - protein, 343 aa, Oryza sativa
MRFWRDSGGGGSGGGRDLNGGGTPCGQVRVLVVGDSGVGKSSLVHLILKGSAIARPPQTIGCAVDVKHITYGSPGSSSNSINSIKGDAERNFFVELWDVSGHERYKECRSLFYSQINGVIFVYDLSQRKTKTNLNKWAVEVAESGTFSAPLGSGGPGGLPVPYLVIANKVDIAPRDGKRVSSGNLVDVARQWVEKQGLLPSSEELPLAESFPGNSGLLTAAKVARYDKEALVKFFRMLIRRRYFSNELPAPSPWSLTPREDTILPVETTNDDDLFQRKSYAGQSYKYSGVTPLPAQRNLTPPPTLYPQQPMSSSSENYRYHRFSSSAIPDASSSRTNRADINI

SEQ ID NO: 46200 - protein, 459 aa, Oryza sativa
MPQYQELPCGGQVLDIDTALKDGILGGGPELGDAAAGDGGKQPVELRKMMDELDAAGDGGGDEAVPAVFICPISLEPMVDPVTLCTGQTYESANISRWLALGHRTCPTTMQELWDVTPIPNTTLRQLIAAWFSRRYTRFKKRSADFHGRAAELVHALRGTAVPKRQPLKGQARVAALRELRSLAAAHQSVTKAIAEAGGVGLLTSLLGPFTSHAVGSEAVAILVSGVPLDADAKAALMQPAKVSLLVDMLNEGAVDTKINCVRLIRILMEEKGFRPDTVASLSLLVGVMRLVRDKRHPDGVAAGLELLNSICAVHKPARSLIVSIGAVPQLVELLPELPTECVEPALDILDALAAVPEGRIALKDCPRTITNAVRLLMRVSEACTRRALSMLWVVCRMAPEECAPAALDAGLGAKLLLVIQSGCGPELKQQASELLKLCTMNCTSTVFISKCKLTKTIQ

SEQ ID NO: 46201 - protein, 157 aa, Oryza sativa
MTFGEVKLTIMIEDPRDIERKRLLGIEDPDEITRDDLADALVEVNEGRIPENRVALQLLAKEMTEWPDLEMEAPKKKSKPGKSVYAKATDTGIDPETAAKRLNIDWDSAADLDDEEEEDDETEVPSAVGYSALYLLTAFPVIIGISVVLILFYNSLQ

SEQ ID NO: 46202 - protein, 521 aa, Oryza sativa
MPSAFHSLLLPAIRNPKPSRRRGRGRGGSKRPKKTTKSKNRLADAAAGDATAFHLKTSARAGPGGAGSGRRGDGGCLVQPLGNLLLLGGGGNLRDAGLGALRPLPDDVLLDVLGLLAARDLARLSAASRALYVVASHDPLWRALVLDELGGDFAFSGSWRATYIAAASGGRAHLPPRGLEIRGFYSDYLFQSWLCANMEMRPEWLHRDTIDRRRGMSVEQFVSEFEEPNRPVLLEGCLESWPALQKWTREHLLKVSAGKEFAVGPVSMTLDRYLQYAGNVQEERPLYLFDAKFTEKVPEMGRDYEVPAYFREDLFGVLGEERPDHRWVIIGPAGSGSSFHVDPNSTSAWNAVIKGAKKWVMFPPEVVPPGVHPSADGAEVTSPVSIMEWFMNFYGACKTWEKRPVECICRAGEVVFVPNGWWHLVINLEESIAITQNYVSRRNLLNVLDFLKRPNASELVSGTTDRVNLHDKFRNAIDMTYPGMIKQLELEAQQKAAARKKKVSFWESAVDANTGGFKFSF

SEQ ID NO: 46203 - protein, 354 aa, Oryza sativa
MAAECGSGNCDAWAARDPSGILSPYKFNRRAVQSDDVSLRITHCGVCYADVAWTRNILNNSMYPLVAGHEIAGVVTEVGADVKSFKVGDHVGVGTYVNSCRDCENCNSSLENYCSQHVFTFNGVDTDGTVTKGGYSTHIVVHERYCFKIPDGYPLEKAAPLLCAGITVYSPMMRHNMNQPGKSLGVIGLGGLGHMAVKFGKAFGLKVTVISTSESKRKEAIDLLGADNFVVSSDENQMETLKSSLNFIIDTASGDHPFDPYLTLLKVGGVMALLSFPSEIKVHPANLNLGGRSLSGSVTGGTKDIQEMINFCAANKIYPDIEMIKIDYINEALQRLVDRDVRFRFVIDIENSFK

SEQ ID NO: 46204 - protein, 170 aa, Oryza sativa; identical to SEQ ID NO: 29532

SEQ ID NO: 46205 - protein, 666 aa, Oryza sativa
MSLSVLYKRLVDLLEEKKVHLPSILQSLGCIAQIAMPIFETRGEEIINFITKKILDCNDDSGDVSAHKSEWSDSTQSCLLKIYGIKTLVKSCQPCKDAQAHPGIEKLMGILKNILTYGDISANMISSTIDKAHLRLAAAKAVLRLSRQWDHKVPVDVFYLTLRISQDDVPQVRKLFLSKVHQYIKERALDAKYACAFLLAMDDYHAPQYEEFKHNIIEVAQICQQVKMRQLSVQAETNVLTAYPEYMISYLVHALSHDPSCPNIEEHEDVEAFGPIYWRLHLLLLILLGEEGLQHSVPGMKKESFTTIVSIFKSIKYSQDVVDVNKTKTLHAICDLGILIGKKLCQEQINISEAQTVSLPSQLYAPVQKDQNENSVESDEQIWPGCENVLAHFEALMTAKSAEVESPKDKMLIDETDEFGNEVPLGKIVKILKSQGAKKAGRKQKTKSGSINMEKDDDVLGLVREINLDNQENLGESEKSKPKKKRMDAKESNDKPVDFSTPKRKRSVSKSRPHSTKGNKYSDELLLQSVDPDETINSFENKVEGAKKRDDSVDTELVTSPASVKTPVSKGKKGAKKPHAEILSSSPKKSDEAGSSKRTVDSGSLNGSIKRQKPKLVSGLAKCTTHDTGSEDLIGKRIKVWWPLDKKFYEGVVESFDSSKKTHGAI

SEQ ID NO: 46206 - protein, 189 aa, Oryza sativa
MRRRGVPPGRRPRGRGGGRRRHGELPGPGAGRGLHGGGAEVGGLPGLRDPGEDGAEPAVEAVLRGGEGRAQGQRRRGLPVRRLHLQDAAPPDQHHPRLAPPRRLRRRRLRLQQVPRTGAVAVRGPGDIVRQRRCGSGTGEGRRRSEVSDGIDHRRARRRRRRGSSSARLLSLLIEESFRSLITFYSLSL

SEQ ID NO: 46207 - protein, 177 aa, Oryza sativa
MESCPSVKNILLLDSEGKRVAVKYYTDDWPTLSAKLAFEKSVFVKTQKATAGAEAEIVMFDGHIVVYKFIQDLHFFVTGGEEENELILASVLQGFTDAVDIILRNNVDKRTALENLDLILLCLDEIVDGGIVLETEGSVIAEKLSAHGIEGATSLAEQTIVQALTTAREHLTKSLLM

SEQ ID NO: 46208 - protein, 658 aa, Oryza sativa
MMKSTVFSAVAVSIGYTLLGWDFTTVLEANIHMKKEFGLNNGPSIDGIILAVSVFGSIAITVFSGSLLDWLGRRAALIYSSLLLISGGLLMVWSPNIYILLLARLIVGSGSGLVFTCVPIYISETSPPNMRGSLGTMPQFMFFVGIVFSYCLIFWMTLIPSPNWRIMIGAIFAPSLVYFALLVFYLPESPRWLVSDGKISEARISLQWLRGKDDVSDRSAGEIALIADGMNMITETAVGGHAVGAVRSQSFLGTSTNQMSRHSTFYWHLSDPLVGLLGSIHESMSELGAGRNSYFPVFNSFNIVEQEQTSEQRGNDSLRQSREAYSAEEGNNGGNLQASLLSQVASAETNDINTSFTSEGSSSYLRRHGTSTSGLAQDLISSLHDHDIEEDDEEIHIAALSSQPALGAGLHPFRQQMVRLSETADIKPKWRVLLQPGVRHALCYGMLIQALQQSAGISGLLRYTPQILELVGVISLFSDIGLDSHSASILISALNASLMLPCITAAMILMDVCGRRVLLLVSIPFLTLSVGAISLSNIVKMGSLPHEILFQLSLTICFCSYVIGLGPIPNILCSEMFPTRARATCASFCSLAFWFGRLLSIYCFPVMLSTIGLSGACAIYAFVCCLVLVFVYLRVPETKGLPLELIAEIFKFSRQECL

SEQ ID NO: 46209 - protein, 245 aa, Oryza sativa
MLAYLLHAPAAAAAVVPSPLSLRSPPKTPFLPTSPIRVPTPRRRPAAFSSAAAAVVPIAASLLEGPVLVWAGRLCLYYALLHIGLAGSPRNPFLAHEIGDDGAGDSDLGFSKWADKLRGGAPGENEAQDKRKLVSKWKPTTKGTLKRTYRVRSVEEGRRILKEIALVLSEDDHFVDASSHKGCQIRRESAHGESVCCYNVRALFDELPTPHLVLEITAFPAGPLTDNDYRKAERLEMVLRMSASI

SEQ ID NO: 46210 - protein, 62 aa, Oryza sativa; identical to SEQ ID NO: 29586

SEQ ID NO: 46211 - protein, 416 aa, Oryza sativa; identical to SEQ ID NO: 28567

SEQ ID NO: 46212 - protein, 242 aa, Oryza sativa
MAAAVTTTTTATTTHLCRGLSSSSAAAAKPRRATTLRCGAAARVEGLGRREALLGVLLSTATAASAPVAAVAATAELQEGFRTYEDEANKFSIAIPQDWLIGAGEVSGFKSVTAFYPDQVADSNVSVAITGIGPDFTSLKSFGDVDAFAETLVNGLDRSWKRPPGVAAKLINSRAANGFYYIEYTLQNPGEQRRHIVSAIGMAFNGWYNRLYTVTGQYIDEDGDVDKYRAQIEKCVQSFRFT

SEQ ID NO: 46213 - protein, 257 aa, Oryza sativa
MENAHETGGRSGSRAHRAPSTMWQDSAIDQRSIGQTPYEAARAEGRSSASSADQGPSTPRSKHSATDQRRRTKINDRLEILRELLPHTDQKRDKASFLSEVIEYIRFLQEKVQKYEEADPERNHEDSKSMPWAKVYYRSCWRNTKNTSQVQGEDLSPSTQDMNNEQYGPKHISAAQPALFNTQSVTSTTTSSSHMATGTPQNLEKNSTPSNQPPWLSMSTMRQESEPGNKMPNKHEKQTLHDENHSISSAYSQGSVP

SEQ ID NO: 46214 - protein, 230 aa, Oryza sativa
MKFRKGTKVEVLQKGGAPLGSWRPAEIVSGNGHTYLVSYGSCPTQGSVAAERVPRKAMRPLRPPLDGIVCWVKGEIAEVFDSYTWKVAEVVRLLGFSYYLVRLLGSSLELKVHASNLRIRQLWEDGKWVAIPKDSARFPGDSPRSQLRCGKVGHELVHTSRDNRLLLKKKKVYEGNTSQGLKRKSSALSAFPMQYSEVSKRFQTSHRDGRCLPVVPGGSLHLMDKLQSLR

SEQ ID NO: 46215 - protein, 247 aa, Oryza sativa
MPMNVNAVVIYLAIVLAGYVVVSIADSFAAPAISMRLKISEAKAIFTQDYILRDDKELPLYSRVVEAKAPMTIVIPVRGSTPIKGLRADDLSWEDFLAKVNHAKADNYTAVEQPAYAFTNILFSSGTTGEPKAIPWTHLTPLKSAADGWCHMDIRRGDVVAWPTNLGWMMGPWLVYASLLNGASMALYNGSLNSSGFAKFVQVWMLHGRMFNLMKISIRNCALSFDFVQIHNKNSPKYQCQNVSKII

SEQ ID NO: 46216 - protein, 19 aa, Oryza sativa
MRGSRLVNLAFRSRAVGME

SEQ ID NO: 46217 - protein, 263 aa, Oryza sativa
MKSSSVAPRLKQERQDDCKFQEGDVNSLELRLGISSDNDQISGGGAASPWLGVGVHPWSLAARQGKAALEQAHQRPNECAVQRENRAASSAQLVGWPPVRAFRKNLSTPKPADADDLMNKVKLCSDEGHGSRCAAQERRSSSTMFVKVNLEGYAVGRKIDLKAHRSYDSLSQALQSMFHGFLSDGIATRDNELQQMEEGSKKRYVLVYEDNEGDRMLVGDVPWELFIASVKRLYIAQDPRVHAKATIIAMLQADPESLDRNRG

SEQ ID NO: 46218 - protein, 526 aa, Oryza sativa
MSLRPSERVEVRRNRYKVAVDAEEGRRRREDNMVEIRKSRREESLLKKRREGLQAQAPVPASAATGVDKKLESLPAMIGGVYSDDNNLQLEATTQFRKLLSIERSPPIEEVIQSGVVPRFVQFLTREDFPQLQFEAAWALTNIASGTSENTKVVIDHGAVPIFVKLLGSSSDDVREQAVWALGNVAGDSPKCRDLVLANGALLPLLAQLNEHTKLSMLRNATWTLSNFCRGKPQPSFEQTRPALPALARLIHSNDEEVLTDACWALSYLSDGTNDKIQAVIEAGVCPRLVELLLHPSPSVLIPALRTVGNIVTGDDAQTQCIIDHQALPCLLSLLTQNLKKSIKKEACWTISNITAGNKDQIQAVINAGIIGPLVNLLQTAEFDIKKEAAWAISNATSGGSHDQIKYLVSEGCIKPLCDLLICPDIRIVTVCLEGLENILKVGETDKTLAAGDVNVFSQMIDEAEGLEKIENLQSHDNNEIYEKAVKILEAYWMDEEDDTMGATTVAAPQGATFDFGQGGGAAQFK

SEQ ID NO: 46219 - protein, 259 aa, Oryza sativa
MLAKRLKRCSILLFAFLLADASGSLLESSGGQAEAIGPQISPATEGEGKRRSLATGMFCVALPNADPTALQEGLNWACGQGHANCAAIQPGGPCYKANNLPALASYAYNDYYQRNSGAGATCSFNGTATTTATDPSSGQCVFSGSSMAGGTTPAGERAVRRRPVHAGVRQRVVADVPGDGEPRRRADPLRRRRQRHVRRSPGALRAAAGVADLPLPRSLISSSALVGVCPCKLCIWHYVIRYKFTHQRESVTTQESESP

SEQ ID NO: 46220 - protein, 96 aa, Oryza sativa
MSYREMELGDTDIYILEMALLVASEVMALGCPPTSRSQYILQRLQVQQSIAFLFFYCSEGIMKVFKLSIKRYGVANFKKMSHPISAFPVWLNNYPL

SEQ ID NO: 46221 - protein, 567 aa, Oryza sativa
MASSALICDTEQWKGLQAHVGAIQKTHLRDLMDDAERCKAMTAEYEGIFLDYSRQRATGETMEKLFKLAEAAKLKEKIEKMFSGDKINSTENRSVLHVALRAPRDEVIKSDGVNVVPEVWGVKDKIKQFSETFRSGSWVGATGKALTNVVSVGIGGSFLGPLFVHAALQTDPEAAESAKGRQLRFLANVDPVDVARSIKDLDPETTLVVVVSKTFTTAETMLNARTLKEWIVSSLGPDAVAKHMIAVSTNLELVEKFGIDPKNAFAFWDWVGGRYSVCSAVGVLPLSLQYGFPIVQKFLEGAASIDKHFRSSSFEKNIPVLLGLLSVWNVSFLGYPARAILPYSQALEKFAPHIQQLSMESNGKGVSIDGVQLSFETGEIDFGEPGTNGQHSFYQLIHQGRVIPCDFIGVVKSQQPVYLKGEIVSNHDELMSNFFAQPDALAYGKTPEQLHSEKVPEHLISHKTFQGNRPSLSLLLPSLSAYEIGQLLSIYEHRIAVQGFLWGINSFDQWGVELGKSLASQVRKSLHASRMEGKPVQGFNSSTASLLTRYLAVEPSTPYNTTTMPKV

SEQ ID NO: 46222 - protein, 451 aa, Oryza sativa
MVSSRRNTGGIQRDGSLRDWSEFVDPSPSPKLLYSQSYVAMRGLLSSLVSMDFALLSSRLKSAWAAILSQRHTRSPERSKSRGLSCKRLAFHLFVCFMVGIFIGFMPFFSVDVSQKIVSENGRLPFDEGAVDRGMVDGKVKELETIVVEKEVDIIDESEVEESPPVPAMLDDEADFVESAPAIPDINDLDITVRKLLIIVTITTVRPQQAYYLNRLAHVLKTVQSPLLWLVVEWPDQSFQTAEILRSSGVMYRHLICRKNTTSVRKIAVCQRNTAIYHIKKHRLDGIMHFADEERSYMSDVFEEMRKIRRFGAWPVAIHTGIKYRVVLEGPICKGNRVTGWNTIQNIQKKSAVRRFPVGFSGFAFNSTMLWDPERWNRPPMDSVIVHSGGRGGLQESRFIEKLVKHERQIEGLPEDCNRVMVWNFNLEPPLLNVPPGWSLHKNLDAVIPVT

SEQ ID NO: 46223 - protein, 72 aa, Oryza sativa
MSFEVGVTLEDDSQWQAPAHCFPAAAADEDEEEEEDEEQDEMIKSSYDHIEGVDDGLDAARLLRMLAGAAAF

SEQ ID NO: 46224 - protein, 328 aa, Oryza sativa
MEIQNHGVDFDAAEPSNARNELQMDKREETSEEDLDDQMEETEDPSEEELDDLVLNIVTCKPKSSVAQLNSEKQAADKDSRFRKRQQFEESSLQKRHKSSDFSETRNRKQSFPAISGAIQNEQKSSDLSGKGTHEFSSELDGDKSSASVQDVEALADSSTRNGSEQNSLASEPKRVSLWTQKSAWRDLVGGMGSASFSLSQILPNTNPAPPKVSNATEASASHAESRTKVKPSGKSLKPSEAATQLLPEQKMPTSSMAMLSSERKENNKLEKERVVPKITIGEVCPFMRNSESEKQWSKAKKVLTGFIKKGNESTGSNVGKGKPSTRR

SEQ ID NO: 46225 - protein, 371 aa, Oryza sativa
MPAAAAAAAPPNPNVLQLAPRLRGLVSFPSSYSSSSPFSNRLRLRLPRAASMSAEARVPVAPPAHPTYDLKAVINLALSEDAGDRGDVSCLATIPSDVKAEATFIAKEDGVVAGISLADMIFKQVDPSLKVEWFESDGNYVHKGLQFGRVYGCARNIIVAERVVLNFMQRMSGIATMTKAMADAAHPACILETRKTAPGLRLVDKWAVLIGGGKNHRIGLFDMVMIKDNHISVAGGITNAMKFVDRFLAKEKLALPVEVETRTLQEVKDLLEYAAENNTSLTRIMLDNMVVPLGNGDIDVSMLKDAVELINGRFETEASGNVTIDTVKKIGETGVTYISSGALTHSVKALDISLKIDTELALQVGRRTNRA

SEQ ID NO: 46226 - protein, 268 aa, Oryza sativa
MAATSPDSGDLILVEPAKPGSRVAVVTINRPKALNALTRPMMVSLAAAFRRLDADDGVAAVVLAGRGRAFCSGVDLTAAEEVFKGDVKDPAADPVVQMERCRKPIVGAIAGFAVTAGFEIALACDILVAGRSAKFIDTHAKFGIFPSWGLSQKLSRVIGPNRAREVSLTCMPITAEMAEKWGLVNHIVDDTQVLSKAIEVCEAIARNNRNLVVLYKSVINDGLQLDLEHARALEKERAHDYYNGMTKEQFASMQKFIQGRSSKPPSKL

SEQ ID NO: 46227 - protein, 70 aa, Oryza sativa
MARRAKLTINLKLRKSTINVEQLIHVRLRQILNFMGGKTAYIKVCSTIYITSKVLSPKMTKVQNLHCVRF

SEQ ID NO: 46228 - protein, 728 aa, Oryza sativa
METEVFPVVDLRVLTQSDLDELAAASAHAVDPRSSCPDRAVFNESAGSRKQTFSRVRFVPAAAAAAAAASASAAAAAKLPRGNDKEDSFIAYHLRRLFAPDDPSLIENPSFPQTQTLARSPSPDPDQLTTNSRGVSVDLVSLSRLADPYDAELGKRTARMTTEEELMGFISSLAGQWVNQRMRRKLVDASFFGDHLPSGWRLQLGIERKDRKAWVNCFSYVSPKGQSFATCQEVSAYLMSLLGYPEFKTDNIEYGSTQQHGLCADDGVNVLGVQHQIGTSMDSQSNLPVASATFYSHSRDQDETVADDINSYECQQCNLTFHGQSAYAHHLITFHKVSSKRRKSNKVSKFGEPVIGKDGKFECPVCNKTFEEQSRYFGHIGSHAKYQGLTPEAFLQTFSGKVGNNSFAGLSSSLQVLVGSPQLNEKTTACEARSQHHDCSTKHGGNSTRGIDLFNSNHPANFNGHNQSWCRSDEIPPTTEAQSTWTYRNNEMNCADRTVPRTVPQPNDHEDCRVSGFAEATNFNDQAGRHQGFRPFSFGTTNHCQGQIIDHAVAASKHAEVNNSMKSRDVNLNSRLNTISFPIATANNETSTALNDVNRSCITGKGFSGSFSNNDGAASIVLPSSGLNNKISSSLGVADRSSIAARSFNAGYVYENGASEANNIGNKNNTMVYQTSLAMRPLSPGKQSSGVASRRTAAVVSERHGGQVVRHPRTASSVYMPEQGPGWL

SEQ ID NO: 46229 - protein, 135 aa, Oryza sativa
MRSPAALLPVVADGGGGVGVEEEMDVDEDMAMCGGPRRRARGEEAAAERGAGARAGAELRDGEQAGAGAEGAAGARPRAAAAPGRRLVPEPPRAVEDQAARARLRRAPPILRRAPRRPQTRFAATRTPSSPRSRS

SEQ ID NO: 46230 - protein, 113 aa, Oryza sativa
MHRLPLASRPPGPHRAAAAAHRAPQRTTTACCGRLKQEATPSFASLAVAASAAAERAATPLLAAAALLLSAASPGFLASTPSAFAQSEGAALFRKACIGCHDMGGNILQPVSF

SEQ ID NO: 46231 - protein, 119 aa, Oryza sativa
MSIDWQSYGFKFKGGFIDDDGNAELQWDNMAFSHVDIAIHTYHEGAVDEWKSSQPERHLLRKALKSALFGLKADHAEDFLSCHGQKVREYVPDLAESIAGLILSSMIKSSKMSASLFSA

SEQ ID NO: 46232 - protein, 164 aa, Oryza sativa; identical to SEQ ID NO: 33054

SEQ ID NO: 46233 - protein, 262 aa, Oryza sativa; identical to SEQ ID NO: 33462

SEQ ID NO: 46234 - protein, 564 aa, Oryza sativa
MAPQLQGCYAVSSWPRLPRLPPWPCASHAQRRRVLRLLPPRRRCAGAVRVVAEAGPALAIDRVAEEADVRFPGDVEGVPGQQQQREEEEDAVDERERLRRMRISKANKGNTPWNKGRKHTPETLQRIRERTRIAMQDPKVKKKLMHLGHAQSEETRIKISMGVRRGWNLRLQKLMIQDGCFVEWRDMIADAARKGFAGGISLQWNSYKILTEQMRQEWLEKFQKRRSMPRPTGNRRAPKSPEQRRKIAEAIAAKWLDKEYRERVCSGIASYHGTSSGTKVPRKPRSAREPGSKRDTVKKKPIQSRSAGLEDACGTTPTVKRKKSATPYKDPMAGEKLEMITKIRAQRAALEIEKKEAIKRARSLIAEAEKAANALETVASTSPFAQASLIEARKLVTEARLSLQHVDDEGPADSASDDASQDSGASDLHNHDMANQNDVIKQENKPVNGMELPPSNVNGRDFYFDVSTLTETDHLRDYQRIENSMERAYLLPSASSAIQDVNENHRMKDFNAHQLMVNDESITIDQIASEVAEIYPDEPQEDDTLPVQKSKMRWVRGRLVEVEE

SEQ ID NO: 46235 - protein, 1212 aa, Oryza sativa
MPHSRSDSGSGSRGADPCRGRKRGRLLMLEEEEEEEESGMEGCSAPACGDVRGDFVGWCSDRHQVASCSGDQTQSASMFAAMQENACSIDSKGVVCPQSGLGYSAGQNGTHGGGGSMLHQNLEGCMYMNQLGQMCGPYPPEQLYDGLSTGFLHRDLAIYAVFGGKMANPVSLGSLKQFLSQWSSDSVVATRDESVESKKMAPVNKLILPDNLSSEESCWMFEDAEGRRHGPHSLAELSYWHHSSYLHDLSMIYHVDSKFGPFTLVSLIDWWSGGTEHSESSANDSGSLNALMDDVVEDISHQLHAGIMKSARKVFIDEIFSSVLPEMIACRKTEKQMAAKRKSQAAKTDNVSNKNALVLKGKGDGTSTRPKSLNSYNNKVPEDPSVAVQSTAMQYEFADILSAVWETIYNKSMKSIWDEVLYDPVMDYCDAWLKRKNESNLLSTVVPGASDNQKMQDTDEMSPKAICDSDAPESDMDFPPGFGPNQESAEHSHSACVEYVTEKTDGRSGSSITLFSGPLGRVQVMLANELYVAAKEALFQHFEEVISEEITNCLCIGFEDDINQERIRTPVHAPEPSSPPGISVHETPSPAEMPRDGISDMAEMARDEISDMAVDTIPCPADMAASGTSTVPEVTTDKLIIPYVEHQSPSASHASIFEKLDAHEEAELDDSFDEVPPGTEAGLASLVIMEKNKYQPSKSVDSVLDIYRYTSWAFFRQILHEGVMKEWASLFSGALSNCFDSWYARKNIVAKTMDDTLRPKEYTYYRKRKLRKNCEASSSEKPMDEQLSRPLRDLVECKVNMKNIHRSSKAGISQRVSVVEKPSKKRAKPSHNDNINLNIQQDLKLLSEKVPKRNRSSHPTSKPLVSSKVPTEDRTTSAMPAKKRKQKNLATESNLKTKAVILSPESHGCEAPTEKRTTAIMPVNKRKKNLSGESKLKAKPLTSPESYVCEAPIDNRTTSTMPAQKRKQKNLSNESNLKKKPLVLCPESYGCARASVSGWEWRDWARNATPSERAQVRGYRVRSILSAPENNVLKSSQVKGSSARTNRVKLRNLLAAAEGTDLLKIMQSKSRKKRLRFQRSKIHEWGLVALESIDAEDFVIEYVGELIRRQVSDIREDQYEKSGIGSSYLFRLDDDYVVDATKRGGLARFINHSCDPNCYTKVITVEGQKKIVIYAKRRIYAGEELTYNYKFPLEEKKIPCHCGSQRCRGSMN

SEQ ID NO: 46236 - protein, 241 aa, Oryza sativa
MGTNPSLHELAAGAAPRGRVVRILVRDADATDSSSSEDEAVAVAQPRPRRRGKVGGGGGGGGGVKRRVMEAGAGEARPTARFRGVRQRPWGRFAAEIRDPHLRRRLWLGTFDTAEEAAAAYDAASVRLRGSSAATNFASVRCYSLPPELPKPTISPPEAAVRPITLPIGTAKPTLLPRVKEEGESCGGRVKEEASSCEVQVLAPEPMWTMISGKRKKRSGCGTRVRAFHAVSACVEEVGGA

SEQ ID NO: 46237 - protein, 176 aa, Oryza sativa
MIGPVDFDKSVDYWQQDKWSGQFPVKWHIIKDVPNNLLRHIILENNDNKPVTNSRDTQEVKLEHGLQMLTIFKNHESETNILEDFDFYEQREKALQENRRQQQPASPELQKPAENKALGELMAHISDTFGQTVQLKETENGESKPAVEGVSSADEASTATTKAEDGTASTNASPVE

SEQ ID NO: 46238 - protein, 387 aa, Oryza sativa
MNRMTAPHGGMPPPPMPAAGGLARYGSAPGSLLASIADSVIRGRGVGVVDQLHHHQHQHQLPPPPPPQQQQMVGRYFSAESSGLTSCESSCRTTTTTSTAAAADVGRHPLERAYGGSGEIHVDASSAAVPLFRHSSSPAGLLSRLMADPHGNGMAATRGMGGYSGGGGDAGAMAHRRLSSQWSFSRQDLPQISEMGGLIPDIGESIVTGGGGNSSSDGAGHGAQSSSFLSSRNFSMSSWDDTNSIMFSPPSSSKKARVAAAAAGDHGDDMVSSFSNIDSQFGLSKQSSLEMAGMDDFLQLQPDSVACRARAKRGCATHPRSIAERERRTRISKRLKKLQDLVPNMDKQTNTSDMLDIAVTYIKELQGQVEKLKHDQANCTCSGKHDC

SEQ ID NO: 46239 - protein, 146 aa, Oryza sativa; identical to SEQ ID NO: 34463

SEQ ID NO: 46240 - protein, 284 aa, Oryza sativa
MAATASSSSTATASPLLLPSARRPLPSSKPWLPDGRAFRGSRALSSAARRCFCCCCRCEAAGEAGTAPPPQQRGVDDGGVVCTSATRSRRRSVLGVAVGVSSALALGLAAFDDALAAGLPPEEKPKLCDAACEKDLENVPMVTTESGLQYKDIKVGEGPSPPIGFQVAANYVAMVPNGQIFDSSLEKGQPYIFRVGSGQVIKGLDEGILSMKVGGLRRLYIPGPLAFPKGLTSAPGRQEWLQAAQLCSTSTYCTYQVLMMSESMHRNIYIYTSSSGFPHLLQEG

SEQ ID NO: 46241 - protein, 734 aa, Oryza sativa
MWVFYLISLPLTLGMVTVTLRYFAGPGVPRYVIATVGYAWFCSLSFIILVPADIWTTLTGREKGGIGFFWSWSYWSTFILTWAVVPTIQGYEDAGDFTVKERLKTSIHMNLLFYSIVGAIGLFGLILLLVMHRAWDGGIVGFAMACSNTFGLVTGAFLLGFGLSEIPRNIWKNADWTHRQKVLSHRVAKMAVKLDNAHQEYSNAIVVAQATSNQMSKRDLLRPYMDIIDKMLAQMLREDPSFKPSGGRLGENDMDYDTDDKTMATLRRQLRRAHEEYYRCKSEYMTYVMEALELEDTIKNYERRDANGWKFVSSFRESRPGTLGSLLDTMEFIWRCVLRKQLQKGFAIVLGCMSAAILLAEATLLPSGVDLSLFSILVKSVGKQEVLVQVAAFVPLMYMCICTYYSLFQIGMLMFYSLTPRQTSSVSLLMICSMVARYAPPISYNFLNLIRLGGDAKTTFEKRMGNIDDAVPFFGRGFNRIYPLFMVVYTLLVASNFFGRLINFFGSWKRFKFQREEENMDGFDPSGMIILQKERSWIEQGCKVGEQVIPLARNFNNVNTDVESGKVPLVENTLEMKSGATSSRADGRVGQSKYANNRETIATKYSAIREQSRQAVKPAKKEISSTSVSLLEEGSSEQWSNTGAPVGSSAGISQTWATMKIGFQNFKANMGSKKFITLRQDPGFAPHSNVSSPESLDEIFQKLKRRPADMPVDYLDDDDDNTGDMDPTFPGSTR

SEQ ID NO: 46242 - protein, 1381 aa, Oryza sativa
MNSVVEIMAISYPPEDGRYYCSSVAAGDDSPAAHHTNAHDDWDWDWVPPPPADAAAAAAADDDDDDGDPTPAGSPGSRGEDEEEERQRAQMVSAMNGQLNMLASRFLASAGVEEEWLEVVTALSWEAALLIQTHACTAGNDMDPASHVKIKCVASGRRRQSQVVRGLVFRKNAAHKHMPTKCHRPTLLLLHGALGLDSHLGFSSFDSMEQDKLILRASISHIIHTCSPNVVMVEKTVSRDIQELLLHHGVTLLLDMKLHRLQRIARCSGAPLLSFSQLLHDCPNHLKHCDYFHIDKFFEDHNTTTTTSAAALNKPSKTLMFLEGFSNPLGCTILLRGASTQELKKIKQVLHYTIFAAYHLVVETSFFEDQRVFLNDTNVDGTPQITHQTSIVSNRSLPTDYDVTCTSRGSLLEYHDGDHKATVPFTNKPDSYTQDEGTAIHCEAPPSENLLSSVSGSLRRFIDIFRYQNIYLPVTSSQDTTGHQNEQDTETSQETASDTLTKDHSCEYMDQLNDLQEQVFAKTNQKMSQPDPFGTEKHQQNVEQYRAGENINSDTDEADDVMDSQSILILLSSQCVTKQVVCEESHLYRINYYGNFDVSLGRYLQDILQNQNLSCSSCGEPPDAHMYSYTHRNGNLTINVRRLLPQHHLPGESEGKIWMWTRCLRCEHERGISKSSRRVLISTEARNLSFGKFLELSFSSHSAARRLSVCGHLVNRDCLRYFGLGSKVAKLQYSSVEIYTACKPQRTLEFHNPDMREWFEQEGRNVLARGVKLFYEVSSLIQHMKIFSEVAINCGDSLPVKEVSQLEEMLIEEKAQFVDSLVKAVDESGMSSSSVNEILGVNCLYQDLLIRLYVWDRRFHQIVECKSGRMANCVGKKEAAEFAGEPAATGESAVPFENGYIKEMQYSSETLTDENSRREEQHITKVPSFRVLEGTDTQLINPECGDNRETWIWSPLHELRESYRHELQAGYLERFELVNNYSPSHLSPLHKQSSAEFIVGPGGNVLCISEDEISSIISRALAISEERRHLLLDALMVEGEAAYSRGSESSKMEKSYSSLSEASSASSSWSSIGSSDSDASFSSDDLFSSYDSSLLSSLLHPEVSVNGKSSLKGKYSVICVHANQFYTLRKKCCPSELAYITSLSRCMKWDAQGGKSKAFFAKTLDDRFIIKQIKKTEFESFIEFAPDYFKHVYHSLDTGSQTCLAKILGIYQVKQIRHGKEVKLDLMVMENLLFGHKLSRIYDLKGVVFSRHVSDSNDHGTVYLDQNFVDDMRVSPIYVGGRTKHLLQRAIWNDTAFLTSINVMDYSLLVGVDKEKHEFVFGIIDYLRQYTWDKQLETWVKTSLVVPKNASPTVISPKEYKKRFRKFMAKYFLTVPDDWST

SEQ ID NO: 46243 - protein, 630 aa, Oryza sativa
MDNKHHKNVEAGKSSFHRMVLGQLVGEFGFDEENVPCNTPRSSVRSRFGASASRIVASTSGASVSPGEYVRDPGSILSLQPWIFKRSGSQKNEEKMMLASGSRVVGEGKNLMDSFRDGSAVEVSPRSPGLGSGPGRGRGALRSRRSRRHLIRPLVPMENSYIPQLYSADFEIDECTFGPAPSPASARPFIVTDGRRVISKSRYQPVPVPFHIGFEKEGRRNSSEMVESVIGIAPLPELKKSKRERQGSHNGGMGLSAFESSKPSKSTDLLARLRIFSTGVSIGIISSTLSNKNELDALKGTVKRMENLIQDLHDELEMREGLTVKELPNEMSVKIDDDESKAHVTDSEPMSKIEEELEAELARLELNITSNCLKEQTFDFSEDLIGDIVQGELKIDTTHCDLADHSSESAHGRDSRESSPDYTHDANYPVSPRDLSLRLHKVIQQRLEERIKELETTLAQSEMQTQVQVMATEQILCERTCSDSDSGSPNQESPVYIQETNSLVEPFCLNLAGDALEAYDEAYEEFMRIADSPCTTSTNGKPQVHEDYSVDRSLIWGLEDGSARKLKKVPTWERILKSREPNRTQESDGDDEDEFEDDDQDSKMLIQQIIERTKQGSPVLIHAQRIVFCG

SEQ ID NO: 46244 - protein, 127 aa, Oryza sativa
MESFDGECCCVPTKRDKNQAIVVQVPINRQVVFFFPYPMEGIGAVAASKKDQKSACSSTWMHWIIQLHKLSPVGLVDYTRNRRPDGENQSANSPLLHHEHEASHDLSPIASPELLQFLSIFLTAVRS

SEQ ID NO: 46245 - protein, 315 aa, Oryza sativa; identical to SEQ ID NO: 31738

SEQ ID NO: 46246 - protein, 299 aa, Oryza sativa
MFSFRKKHASRFDSDDIEQQEAKIQELRAALGPLSSSGKKYCTEACLRRYLEARNWNVDKSRKMLEESLKWRTAYRPEDIRWPEISVESETGKMYRASFVDREGRTVVIMRPAKQNTSSHEGQVRFLVYTLENAILSLPEDQEKMVWLIDFTGWTLANATPIKTARECANILQNHYPERLAIGILFNPPKVFEAFWKVVKHFLDPKSIQKVNFVYLKNEESMKILHKYIDPEVLPVEFGGKNNVVYSHEEYSKLMVKDDIKMASFWASDTKTDHVNKVINEHSVPEVTQQSSLVAAKAS

SEQ ID NO: 46247 - protein, 479 aa, Oryza sativa
MARLVVVIVAVAMAAWWAVAAVEGLGINWGTQATHPLPPKAVVQLLKDNGIAKVKLFDTDFAAMSALAGSGVEVMVAIPNEDLATMASDYGNAKDWVKKNVKRFDFDGGVTIKYVAVGNEPFLKAYNGSFINITLPALQNVQNALNDAGIGDRIKATVPLNADVYESTVPSAGRFRPEIAGLMTGIVKFLAKNNAPFTVNIYPFLSLYLDEHFPINFAFFDGGSTPVNDGGIMYTNVFDANFDTLVAALKAVGHGDMPIIVGEVGWPTDGDKNARVDLAQRFYAGLLKRLAANVGTPARPNQYIEMYLFGLVDEDMKSVAPGSFERHWGVLRYDGQPKFAMDLAGQGRNTMLVPAKGIEYLPKTWCVINTNAKDVSKLGDNINFACTYADCTPLGFGSSCNGMDTNGNASYAFNAYFQAQSQKEEACNFQGLAVPTETDPTTAQCNFTIQIKSSAAAAAAAPVAAGVVVAALAQLLLLW

SEQ ID NO: 46248 - protein, 525 aa, Oryza sativa
MRRGGHAEALLLRRRRGPARLWVAVLALLAGTLWLFSSSSSAGLGLGLARSSYGLQDVDVNKLWRTADSNGWRASSAPRTYWPQSESNGYLRVRCNGGLNQQRSAICNAVVAARIMNATLVLPELDTNSFWHDESGFLGIYDVLHFIKTLKYDVRIAMVIPEITTNGKTKKLKAHQIRPPRDAPVTWYTTVALEKMKKYGAIYLTPFSHRLAEDIDDPELQRLRCRVNYHALRFKPHIMKTSSEIVNKLRTEGHFMSIHLRFEMDMLAFAGCIDIFTPQEQKILIKYRKEHFAEKELIYRERRLIGKCPLTPEEVGLILRSMGFDNKTRIYLASGDLFGGKRFMKPFKAMFPRLENHSTVGPGKLEENTRGLAGSAVDYMVCLLSDIFIPTYDGPSNFANNLMGHRLYYGFRTTITPNRKALAPIFMDREEGRAARFEERVRQVMFNTYFGGPHKRVHPESFYTNSWPECFCQPNPRNRADKCPPDNIYEVLESQFQSVEGEEDIEEVKSTNQTDSTSQIEELVV

SEQ ID NO: 46249 - protein, 71 aa, Oryza sativa
MGFPMCLTQKTSIGIGFCRLNCDVLPSGKKIMWHHKIKWLQDNLPPPPPPNNSIHISIWIIEHNFFNKICK

SEQ ID NO: 46250 - protein, 536 aa, Oryza sativa
MGLQYTFQYKKGVENVVADALSRVPPQSHLSALSVASPIWLQEVLNSYAVDTQAQKLLVELAVHSPNDQGYSLTDGLIRHHGRIWIGANLGLQTKLITAFHSSPIGGHSGTMATYHRLKKLFSWVGLKTAVFNFVKQCQICQQAKHEHCRLPGLLVPLPVPKEAWIDISMDFIEGLPKSDGYTVILVVVDRFTKFASFIPLRHPYTASQVAVTVDKFVFKTHGLPQSIVSDHDKVFTSRFWGDLFKVWNTQLNMSTAYHPQTDGQTERVNQCLEMYLRCMIQATPTKWNSWLHLAEYWYNTSFHTSLGCSPHKALFGVEPHISQVPVLLSSVHHSVVDLISERNQLSVFLQQQLQRAQLRMKHKADKGRSERSFSVGDHVFLRLQPYAQSSVVNRPYPKLAFKFFGPFQILEKVGSAAYRLALPEGSAVHPVFHVSQLKAHVPDHTPVFTSLPTPVVLDAADVWPELILDRRLVKKGNAAHVQVLIKWSSLSADDATWEDYDVLKTRFPSAPAWGQAASLAGGTVTADGIQCDAPQ

SEQ ID NO: 46251 - protein, 175 aa, Oryza sativa
MAPSVMASSATSVAPFQGLKSTAGLPVNRRSSSSSFGNVSNGGRIRCMQVWPIEGIKKFETLSYLPPLTVEDLLKQIEYLLRSKWVPCLEFSKVGFVYRENHRSPGYYDGRYWTMWKLPMFGCTDATQVLKELEEAKKAYPDAFVRIIGFDNVRQVQLISFIAYKPPGCEESGGN

SEQ ID NO: 46252 - protein, 369 aa, Oryza sativa
MIVVQNQTNFSHTAYVVSATALLLVLFLPLVVVIKQEYQIKKELDDSLREPPTVTIEKPAAAAMQMSAITTKPKTETPSSSSPAPAPPSCCLGSCLKHMFNPPAQGEDYTILQSLVSVDMLVLFLATICGVGGTLTAIDNMGQIGQSLGYPAKSIKTFISLISIWNYAGRVTSGFASEMFLARYRFPRPLMLTAVLLLACVGHLLIAFGVAQSLYAASVIIGFCFGAQWPLLFAIISEVFGLKYYSTLYNFGSVASPVGAYVLNVRVAGYLYDVEAARQHGGSLAGGDKTCLGVQCFRKAFLIITAATVAGALISLVLVWRTRNFYKGDIYAKFRENTATDEATTNGNSADTAAEKRSTLVNDEDSKKG

SEQ ID NO: 46253 - protein, 512 aa, Oryza sativa
MAISKAWISLLLALAVVLSAPAARAEEAAAAEEGGDAAAEAVLTLDADGFDEAVAKHPFMVVEFYAPWCGHCKKLAPEYEKAAQELSKHDPPIVLAKVDANDEKNKPLATKYEIQGFPTLKIFRNQGKNIQEYKGPREAEGIVEYLKKQVGPASKEIKSPEDATNLIDDKKIYIVGIFSELSGTEYTNFIEVAEKLRSDYDFGHTLHANHLPRGDAAVERPLVRLFKPFDELVVDSKDFDVTALEKFIDASSTPKVVTFDKNPDNHPYLLKFFQSSAAKAMLFLNFSTGPFESFKSVYYGAAEEFKDKEIKFLIGDIEASQGAFQYFGLREDQVPLIIIQDGESKKFLKAHVEPDQIVSWLKEYFDGKLSPFRKSEPIPEVNDEPVKVVVADNVHDFVFKSGKNVLVEFYAPWCGHCKKLAPILDEAATTLKSDKDVVIAKMDATANDVPSEFDVQGYPTLYFVTPSGKMVPYESGRTADEIVDFIKKNKETAGQAKEKAESAPAEPLKDEL

SEQ ID NO: 46254 - protein, 481 aa, Oryza sativa
MSEAIALAMSKIETCVETGASFNNAMSKLSKKDKVVKELLEKIKQIQEQLDITNDFIQNHIGTANLGDPLDESWIATVRRLAFIVEDVMEKYLYYAHQLREEGSQKHPVKRSSYVDVFKKVGQLMDKINNRIGHLLSIREQSKLAPQLVPHSPYPDSEGQPELIGTNGPINVLLKFLKHGEDGAVLQLKVLSMLGIGGIGKTALASKVYRMLREEFQSHAFVTVSKMPDMTRVLFDILDQIGLRKYPASLNENQVITQIGQDLKDKSYLIVIDDLWDMQHWKTIKDALPDVNCGSRLIVITRLNNIAKTCSSGQNNLTYKVMPLAHHDSRTLFLKEILGHEGSCLDAPVFDEILKMFGGMPSALKCIGSFLRNKSVTTESQKINMSSLYSELENFPSWKKLKIALFLSCCGPSQTLEACSLYLSTLPDNHKIERDILTRKWISEGIILKDDELSINGVVNNCFEELINRNVIQQVDNSFGE

SEQ ID NO: 46255 - protein, 125 aa, Oryza sativa; identical to SEQ ID NO: 40590

SEQ ID NO: 46256 - protein, 191 aa, Oryza sativa
MGKDKHHRDWILRRCCGSIAACILTLAVLVGFIVLVIYLAIHPSKPSFYLQDVQLRNIDLSDPAISLNLQVTIASRNPNDRVGVYYKTLHVFTTYREEPITVPVELPAIYQGHKDVSVWSPVMSGESVPVGQYVADAMRQDIAAGYVLLHVKVDGRVKWKVGSWVSGGYHLFVTCPALLAPAAATSAAPSP

SEQ ID NO: 46257 - protein, 403 aa, Oryza sativa
MSSDTSRRDHAAMAVREVLAGDRKVGTVSRSARRRRLELRRLGRTASAVAEDDAAKRVRPASDSSSDSSESAKVAPEPTAEVARWPACVSHGAVSVIGRRREMEDAIFVAAPFLAASKEAAVEGSGVAEEEGKEEDEGFFAVYDGHGGSRVAEACRERMHVVLAEEVRVRRLLQGGGGGADVEDEDRARWKEAMAACFTRVDGEVGGAEEADTGEQTVGSTAVVAVVGPRRIVVANCGDSRAVLSRGGVAVPLSSDHKPDRPDEMERVEAAGGRVINWNGYRILGVLATSRSIGDYYLKPYVIAEPEVTVMDRTDKDEFLILASDGLWDVVSNDVACKIARNCLSGRAASKYPESVSGSTAADAAALLVELAISRGSKDNISVVVVELRRLRSRTTASKENGR

SEQ ID NO: 46258 - protein, 205 aa, Oryza sativa; identical to SEQ ID NO: 31273

SEQ ID NO: 46259 - protein, 530 aa, Oryza sativa
MASGSTDPLLPRAGAARRRPATGGWRSALFIIWVEVAERFAYYGVSSNLISYLTGPFGETTAAAAAAVNAWSGAASMLPLLGAAVADSWLGRYRTIVASSVLYITGLGLLALSSTFSSPQSQQCSSSGDGRQVCRSSSVQRAFFYVSLYLVAIAQSGHKPCVQAFGADQFDATDPGESSSRSTFFNWWYLGLCASATVTAAVMSYVQDNVGWGLGFGVPGMVMLLGLLVFLLGTRTYRFYDGGGSGAFSGVGEAVRAWRKSRRRGEGGGGGGATVEAEHGELAEEVRGMARLFPIWATCLLYGVLFAQPPTLFTKQAATLDRRIGPSSSFQVPPAALQSFLGVSIIPCVLLYEHVLVPAARRATGVATGITMLQRIGAGIAMCAVTLLVAALVEMRRLSAARDADPGAAVPMSLWWMVPQYVLFGAADVFAMVGMQEFFYDQVPGALKSLGLALYLSVLGVGSFISSFLISAIDVVTRRDGGTSWFDDDLNRGHLDYFYLLLAALTVLDLLAYVYFSMSYIYRRKVVDVQ

SEQ ID NO: 46260 - protein, 447 aa, Oryza sativa
MVARRFVVRQGGGGGGGGEAEEHEVEYDTEHGLDILRLQIFSLTSVPPELQKIVVEADGSVVDDGTDLEAISEGLRLVAITGEEEEAEAAAAAEAARAQEKSDEELARMIQAEEEALLLQQYSIRNDGGEEFRERVEPYMHQVLMYEDPMRQEAARKTVPMDELQEKALVSLAKEGNFSPSKDEEDHAFLLQLLFWFKQSFRWVNAPPCDSCGRETFNVGMGTALPSEIKFGANRVEIYRCNYCSSTTRFPRYNDPYKLLETRKGRCGEWANCFTFYCRSFGYEARLILDFTDHVWTECFSNLYGRWMHLDPCEGVYDNPLLYEKGWNKKLDYVIAISKDGVRDVTKRYTRKWHEVLSRRIITSEDTVSAILSSITGKYRSGLSIDGLTALENRDKKESEELSKAAYLEVDTSISLPGRQSGSVEWRKASQKCSTYILSITSGNGCG

SEQ ID NO: 46261 - protein, 230 aa, Oryza sativa
MASALAFVAVLLAAAAAATSPAAVAATTLTIQNLCPHPVWPLVTPTSGQPISDNTARLDPNSLISLAFPPTPWSGRVAARTGCDAAASPPAGCETGASPPSTVAQLSVHGGGDVATYSVSLVDGFNVPVVVSPQAVGGGQCPALGCVVDLNCDCPLGQRFSDGAACRGPPEYFKGRCPQTRTTPGDVEPVPQSCRSPGELKVIFCPPTMLTAAAAAAASDMLIRTVVASS

SEQ ID NO: 46262 - protein, 357 aa, Oryza sativa
MKIDKGYISPHFITNQDKAIVEFENARVLLTDQRVDDVQEILPLLEKTTQLSVPLLIIAEDVSHTVYSTLVLNKLNGLLNVAVVKCPGLGDEKKAILQDIAIMTGADFFASDLGWCLQGATSDQLGMAQKITITSDTTTIIAHPSMRPEIEARIQQLKKDLEETTSAYLKERFSSRIAKLSRGIAVIKVGAATEAELEDRKLRAEDAKNATFAAISEGITPGGGVTYVQLSKYIPSIMDLVDDSEEKIGVNIVGKALLVPAMTIARNAGADGPAVVEKLLASEWRVGYNAMTDKFEDLVDAGVVDPCRVARCVLQNSASIAGLILMTQAMMFDKIKKKKSTIPQIPGIPPLQINQNA

SEQ ID NO: 46263 - protein, 187 aa, Oryza sativa
MVGRKPLRRRRHDAPPSPPLFGATPRPTSPRSSSASVAAVAEELDGLLLTAPRPSASSSEPRSFPYVVKQRCWEKAERVAGRDPERWRRDALGNVVFRKLVGCPGCLCHDYDHIVPYSKGGKSTLENCQVLQATVNRSKGNKTELSKSELIQKSAYCRVSGRDMDLLELSAYGNVRRGPDSGGCRIQ

SEQ ID NO: 46264 - protein, 819 aa, Oryza sativa
MPLLNPLSRAPSTHIRSLARVLLSCLPTGGDRLRRLNPAIHARATVAGRLDDLFLTNLLLRGYSNLGRLRDARHLFDRMPHRNLVSWGSVISMYTQHGRDDCAISLFVAFQKASCEVPNEFLLASVLRACTQSKAVSLGEQVHGIAVKLDLDANVYVGTALINLYAKLGCMDEAMLVFHALPVRTPVTWNTVITGYAQIGCGGVALELFDRMGIEGVRPDRFVLASAVSACSALGFLEGGRQIHGYAYRSATETDTSVINVLIDLYCKCSRLSAARKLFDCMEYRNLVSWTTMISGYMQNSFNAEAITMFWNMTQAGWQPDGFACTSILNSCGSLAAIWQGRQIHAHVIKADLEADEYVKNALIDMYAKCEHLTEARAVFDALAEDDAISYNAMIEGYSKNRDLAEAVNIFQRMRFFSLRPSLLTFVSLLGVSSSQLAIELSKQIHGLIIKSGTSLDLYAASALIDVYSKCSLVNDAKTVFNMLHYKDMVIWNSMIFGHAQNEQGEEAIKLFNQLLLSGMAPNEFTFVALVTVASTLASMFHGQQFHAWIIKAGVDNDPHVSNALIDMYAKCGFIKEGRMLFESTCGEDVICWNSMITTYAQHGHAEEALQVFRLMGEAEVEPNYVTFVGVLSACAHAGFVGEGLNHFNSMKSNYDIEPGIEHYASVVNLFGRSGKLHAAKEFIERMPIKPAAAVWRSLLSACHLFGNAEIGRYAAEMALLADPTDSGPYVLLSNIYASKGLWADVHNLRQQMDSSGTVKETGCSWIEVTKEVHTFIVRGREHPEAELIYSVLDELTSLIKNLGYVPDTSDHTLLCETG

SEQ ID NO: 46265 - protein, 518 aa, Oryza sativa
MAGGGSIANDGEAAAGGNGGGDEVTFTVVMSCLTAGAVGLLLGYDIGVTGGLTQMESFLQAFFPEVLRKMSSAKQDAYCIFDSQVLNAFVSSFYLSTMVASLVAGHLTKTLGRRNSLLIAGVLFFAGTLLNLAAVNISMLIIGRILLGVAVGFSSLAAPVYLAEISPARWRGAFTSSIGLFANFGFLMADMINYRATTMARWGWRLSLGAGIVPALIVIVGAASIPDTPNSLALRGRLDEARDSLRRIRGAGVAAADVDAELKDIVRAAEEDRRYESGALRRLLRREYRPHLVMAVLITVFYEMTGGVVVSIFTPLLFYTVGFTSQKAILGSIITDVVSISSVAVAAVVVDRRGRRTLFMVGGAVLILCQVAMAWIFGAELGTDGGRAMPRGYAVAMVAVVCMYAAGLCVSWVPLSSVVTSEIFPLEVRSAALGLGGAISSALTFMQSQSFLEMLCSFKYGAFAYYAGWLVMMTAFVAAFLPETKGVPIESMGAVWAQHWYWKRFVKLAPAKQADGPE

SEQ ID NO: 46266 - protein, 343 aa, Oryza sativa
MDHRWWPRRRPEPAAIDITWVSCRGVRSSVPFHTPCLYASIYLHHPSPSPSSCGRRRPHRVKTATDRAGGGNPEWDAPLRLYLPSSSSSSPATSSDNKDEVLLRFELKSEVAVLGDVLSATAAVPVSELVADGATRRVSYQLAGPDGKHPNGVISFSYAVHAAAAADTSSSSPSSDADDDRRSTTTTTTSGSECDEYSITPPRSAASRAITLPPPPPSSTMYPAIDWPPTEQLIPMLLYPPAKPHTTAIVKGSTCYPPPPPPSSTPPVEPVAVFPPPPSPACGVYYPPPTVREPVINRSGMYPKVDLDIPVSCYPPPPTAATMYGGGCGYAAAPEWDGRWLHG

SEQ ID NO: 46267 - protein, 146 aa, Oryza sativa
MRGVGGPLLTIGDLLSDLAVDGGADLAGGEVSVPSSPSSAGQQAEEADPSELNRLFGEHYDNLMKALQENDPSWPSLMLKLCTALKTADKLVSCASIDAEQLLQKVELLERLLVRGDRAVTAIVEELQRSRPSEDSHSSKSKPSGK

SEQ ID NO: 46268 - protein, 223 aa, Oryza sativa; identical to SEQ ID NO: 31930

SEQ ID NO: 46269 - protein, 765 aa, Oryza sativa
MARPWCPDDAYACLSLLLLLLLPAAMATSYSSLCSFPAEAADLVVTAGEHQSIADRLNLPLPSDGYFSGGDKLLFASDDHRLPRSFSFFTRRAARTTDPAITHLVATVTLSGYRFFGGRSWRTNVSAHSVSFDLEGYYSNDSASAALCMVGSGSRARDDGLGVVIIPDVALRLRLPRPATLTRPFVTGRLEGPDFGAVTIVAYAEGDYKYGEATSCPTPPGAVRSESKVFDGNFTCDRLGALLRGSYTMEYAEGRAPSGFPLRQRLRSMHISEIYCGENGAVRAYMVFDFDDASSDAILLGIHEAPWRRGFQADGDEALVADGFWKPSQGRLCLRACRTVRSTVRESDCGIRIHFWFPAVWSIQQRSFVAGMIRNTRSDDDGDTNKMSGAISVSRTGFRGDLSDIKYHYTRVEDAKNYYHSNPELSKERNGRFPGNYSYRDFAFSLYITTHGGYGYASPVTLGSAMVDGGTLTADDAFSRHAVAEMIKQRLLSVSYEFDIHLYRRVNSSRAWNVSRVPDRWRVSAEGVYDTKSGTLCMVGCRVINSSSDCQILVTVQLPALGGEDGTGSISSLRKKSDTLFLETLGFAAYGAQPAIEAAQAISRVDTERIMLVTSMTLSCVFLVLQLRHARKNPDALPATSITMLAVLALGYMIPLVVNYEAMFVDDGGSRNRHFIELARGGRRWLELNEFVLRLSTMVAFVLQLRLLLLALSARSTAGASGGGDDRWAAERSTLWICLPLYIAGAILIWIPHIGDGHDHQPLAR

SEQ ID NO: 46270 - protein, 408 aa, Oryza sativa
MAMARRGNGGYQYGAYSYGYGYSKPQVNYHSQSSESVTTVVTKMDEMSVHENAVQKMSSSFREEKVYEQQGGAGGDVQVCRNGGAAAGAVQKHTYEEKKEEEVYEESNHGGGGGGCGGYARQHGAGGGQKHATYQHEVLKGYESAGGGYAAARHNGAGAGGVKKQYSYREEEEYDAGGYARHNGGGVQKQYSSYRRDEEECDAAAGGGYGRHHGAGGGAVKQHATYKQHQAIEGVNGCGAGGYNYNRHQAVAVAGGGQHHYGGATAAAYGNASNKQHFTAAAAGHHSSGGHTQYHHQSYECEEEDSDEDDCEDDDDDESDDDDDDGHCPPSRQGSVHSYHQAAYQHEEKQHAGGRNHYHAYERHEEHGGGAQRYQKYESSTQVGYAGGGGGNGGCVRGNAKPCFRIMA

SEQ ID NO: 46271 - protein, 508 aa, Oryza sativa
MAATSDSTPAAAAAAAASSSSSPLHIVVFPWLAFGHMIPFLELSKRLASRGHAVTFVTTPRNAARLGATPPAPLSSSSRLRVVPLDLPAVDGLPEGAESTADVPPEKVGLLKKAFDGLAAPFARFVAEACAAGDGEAVTAAAGFLRKPDWIIPDFAHSWIWPIAEEHKIPYATFLIVPAALVAILGPRRENLTHPRTTAEDYMVQPPWIPFPSNIAYRRRHEAEWMVAAFRANASGVSDMDRFWESEQHPNCRLIIYRTCPEIEPRLFPLLTELFAKPAIPAGLLMFPDTINNDDDASEQSFVPPTIEWLDKQSEKSVIYVALGSEAPLTEDHVRELALGLELANVRFLWALRPPRGDGGSNDGGAAEILPDGFESRVAARGIVCTQWVPQLRVLAHRAVGGFLTHCGWGSTIESFQFGHPLVMLPFIVDQGLIAEAMAARGIGVEVARNDDGLFHRDDVAAAVRRVMVEEEGKVLARKAKELSDIVGDREQQEMYLDELVGYLQLYK

SEQ ID NO: 46272 - protein, 409 aa, Oryza sativa
MATQIHHLEQEAYCSVLRAFKAQSDAITWEKEGLITELRKELRVSDVDHRELLNRVNSDDIIRSIREWRSAGGPQAMLPNNAQPMHDLAPSPTTSGRKRQKTSQSFPALPAPPPVMHSQQLALQGPPSSSTAKKGASSGAKGKKTKPGQKVPGGPSVKAMTSSAGPSGRGPHMNRNFPVGLVSFEPSEALHINPLINRKVMSRWPEDNSFYEATITDYNPETDLYALAYDINTANESWEWVDLKQMGPEDIRWQGDDPGIYQGVRGAPGSGGKKSSSRGGPTPGTGRGRGLPKHVSRKDFPPSQNGVGKRSSDDIDILHTESLIKEVERVFSINNPDPLEVEKAKKVLKEQEQSLIDAIARLAEASDGESDEHNRVRRNAPYAGSQHQANYADAMAVDGGHMLGGADAV

SEQ ID NO: 46273 - protein, 396 aa, Oryza sativa
MATFSGTDRLRDLHAFDDTKAGVKGLVDAGVTTVPYFFRHHPDPLPVAAPSEAAAAIPLIDLAKADVDRGHVVSQVRSAAESAGLFQVVNHGVAGELMDAMLAAARRFNEQPAEAKAPYYTRDLGSKVRFFCNFDLFQSPAAQWRDTLYVEMVPDAPSPEEIPPPLRGVAEEFAAAVWRLGERVTELLSEALGLPPGYLAEHAGCMDGMSMVAQYYPPCPEPEKTMGTTRHSDPSFLTVLLQDESGGLQAVLPRPPEERWVDVPPVAGALVVNVGDLLQLVSNGRLRSMEHRVLPTAASAARARVAVACFFRLEYSASLTRPRSYGPIVDSGEGGARRAAAVYRSTTPRDFLAYFNGKGLDGRSALEHFRIPEAAAASSAVDVVSSSTTAAASIPR

SEQ ID NO: 46274 - protein, 68 aa, Oryza sativa
MPSSGVGAAGAVESSSSTSKEQRERRWPRPRARRQWRRPRRAVASTSSELSILLVFAVIDFIDVDIVL

SEQ ID NO: 46275 - protein, 278 aa, Oryza sativa; identical to SEQ ID NO: 29983

SEQ ID NO: 46276 - protein, 302 aa, Oryza sativa
MSRWRAAAARISAAAESRLLSRAFSRVGTPAPQPPCRGFSKASAAAAASSRGPAAAAATTTATAAGARPEVRLNSMFLSKPCSLALPPDSPLRVEDPKFEGIKHLMLTLLLFYSKQSKSIRGANVVYHRITSQVDKSDIFDVFQLEKTFKTTFSLLVLHMWLILRRLKEEGKDGVKFGQYIYEIYNHDVELRVSKAGVNLLLTKWMKELEKIFYGNIVKYDSAISPEARQDDLVNVIWRNVYADEGSEAMDAAAVPAIQALARYTRREATCLSLTDKEAMFSGNFKFTALLPNSPSPAKPVR

SEQ ID NO: 46277 - protein, 111 aa, Oryza sativa; identical to SEQ ID NO: 31593

SEQ ID NO: 46278 - protein, 327 aa, Oryza sativa
MSASRPDHRRHHPPFLRDLSSPISSAVRLPPASLRRETQGSTTPPPPPPPLLFLDDLSHHSPSPRPATPPQAAAMSPSPPPPHRGGLFSSTPLRSNGSPSPAAWWSSSREEMAREGSPVDGVVQPQQQPSPTTASGQQSQQQKVTLITLPPPREVARPEMPKDSTPSAGRVDEEEWVTVFGFLPGDTNLVLREFEKCGIVLRHVPGPRDANWMHILYQSRHDAQKALTKHGQQLNSVLIIGVKQVDPWQRQYLNEKTNENFQVGATDPFPSQHVAPSSFTTRNALAPLPSNSMPNGIGNGSGRGASGAIASPTKSVLSKVMDLMFGL

SEQ ID NO: 46279 - protein, 681 aa, Oryza sativa
MVNTDGEGGCEGGGGDPMCVDDNAIVAVETGVGVDQGIGSQHDDAGGDRVMEGQGAVTNSGDEMGMRAYGDEAETEEAATVHGSKEGTEELLRKVVYSEEAAYKLYCDYGHRMGFSIRKGKQSYFTGTKRIRTKDYFCSKEGLKEGERLTDANFNDPHTRTNCKAMVRFRVNNHGEWKVIRLVSDHNHNLARPEERHLLRSARSLIAGRSSSVETSKQDSLSCYISMARTLAIGNADLQNLVRHLKSRANEDGMFYWDVQIDRGGRMTNFFWRDGRSRIDFDCFGDVVVFDATYRLNKHNLICAPFVGVNHHWQNTMYGCALLADESMSSFVWLFKSFLEAMGNRHPRSIFTNQDQVMSKAIEEVFPNTCHRISRWHIQKNAASRLGTLNGSKAFNKLFTKCMQGCDSEAEFEETWAGMLREFKLEDNKHTFDGGVEYEPQCDSLSNIFNCIAEKFTSPSTIVVVVDKLTEDWREKEIDEDTRCSQKPPACIIKHSDILNHAAKVYTYRIYKLFETYFLDGCGATKFKELHCEDNNRYQFEMTMQGRGSRVCTVHFDMMTMQLNCSCSKFETMGLLCPHALKALSIKNVCSIPETYILKRWTKGAKKCVFNPKQYESSYQECMDDEAAYCSHVMRYAYDLVTKSQGNEELRKSLWETLESGEKELEKYLENVTQYALSYAT

SEQ ID NO: 46280 - protein, 359 aa, Oryza sativa
MNFNKLVFAHYVERCPKPEPFFDPLVDEQSTSSRKRAPKTVEIALSIDKKVVNTAALSDAERFSEIPYIMEDASNANDSPRSSISGAKRKHNALEGDAELDSTIAENEVLWRANFEKFTFCLKKKFCADRKKPKLKVGTHPIWEAFFEASLMERDNNSVTSPINGIMERLGQKEGGTSMTLDHITRVLEELNCSPSSEDPDSFILDLSRIVEASRNEEIESLVRKKYGQEAFTIFRLLVRERGPVETDKIIDTTILDKQIVHGTLYKLWKDDYIDTERILSGTGTGNTQYFVWRVKNTFREQFIDNLCHAALNLRQMVNYIAELLLEGSKDDTKLRNRKNILILALTRHDDSLMLFQDF

SEQ ID NO: 46281 - protein, 1114 aa, Oryza sativa
MNPQAEGDAAAAAAVLGADPAGLTALLGDLTSPANEARSRAEGMFHALRASHPDALALRLAHLLLSPAHPSAPMAAVLLRRLISPGSQAFVYPGLSPATQSSLRALLLSAASATGLSKSISKKLSDAVAELASFLLPSNAWPDLLTFLYKSIASPSSPPALQESALNILARLASHLAAGFPNLHALLLSALSHPSSADVRVAGLNAAISLIQSLPSAADRDQFQDLLPAMMRALAESLNCGNEGSAQEALEMMIELAGAEPRFLRRQLPDVVGSMLQIAEAPGLEDGTRHLAVEFVVTLAEARERAPGMMRKLPRYVGRLFAVLMTMLLDVQDEPAWHAAVSEEEDAGETGSYVFAQECLDRLAIAVGGNTILPVAAELLPSFFASEEWKRRHAALVTIAQIAEGCARVMIKNLEQVVGMVLNSFRDPYPRVRWAAINAIGQLSTDLGPELQNKLHHVVLPALASSMDDFQNPRVQAHAASAILNFSENCRPDILTPYLDGIVGKLLSLLQTGNQMVQEGALTALASAADSSQEHFQKYYDAVMPYLKSILMNATDKSNRMLRAKSMECISLVGMAVGKQKFKDDAKQVMEVLMTLQGSQMEADDPITSYMLQAWARLCKCLGQDFLPYMNVVMPPLLQSAQLKPDVSVTSAGPEDENGESDDEGVETITLGDKRIGIRTSLLEEKATACNMLCCYADELKEGFFPWIDQVATTLVPLLKFYFHEEVRKAAVSAMPELLRSAKLAIAKSQSQGRDESYLKQLSDYIVPALVEAIHKEPDTQICASMLESLNESIQLSGTLLEEGQVRSIVDGIKEVITASALRRRERTDRAKAEDFDSEEEDLLREENEQEDEIFDQIGDCLGTLVKTFKTYFLPFFDELSVYLTPMLAKDKTVEERRIAICIFDDVAEHCREAAVRYYDTYLPSLLEACTSENPDIRQAAVYGIGICAEFGGSAFRPHTGEALSRLYNVIKHPNALDLDNAMAYDNAVSALGKICQFHRDGIDASQVVPAWLSCLPIKNDLIEAKIVHEQLCTMLEKSDRELLGHNNQYLPKIVSIFAEILCAGKDLATEQTFSKMVNLLRQLQTTLPPSVLASTWSSLQPQQQLALQSVLSS

SEQ ID NO: 46282 - protein, 387 aa, Oryza sativa
MNRKNTENLTEDLLGGFEYQVQVPYIMYHNAADEITGIWFYDPQECEQVGYLFSRIQKAFSRVSPKAKVSVTESEYEKPEVVPAVPSNEDTLKQPTSSIMLLDNAKYDFLSALLKGAACVGATMDEASAVQSNKSVGMVHSSTHASPHAIPPQSPAIQSNKSFGMVHSSTQAPLAIPPQSPAIRSNKSVGMIHSSTHASPFDIPPQSPAVQSNKSVGMIHSLTHASHLAIPPQSPALHGLHPSQISAVPVMPHDAHRSSSTSTIQPTSLANPLFFPPMPSLQTASHAASSLCSAAPLHPPITVQQLQSAPLHQPFSLPTASSIQPPYGMPLLQPFPPPNPSPFLTSGVSYGRPVITRDQLKDVLLSLCQNDEFIDMIYREFVKRQLP

SEQ ID NO: 46283 - protein, 128 aa, Oryza sativa
MKSVPLHLIYTFPTFPPKIGPGSSSTSPMMPPTPPAVAAPIRHSPASPSLPRSIKSIHGLPSLFSPIPPSSPVPQIAPAPRARAPPLSGEVRPSLLSALATAASIATPCSTPASTPFSRSATRTTSPP

SEQ ID NO: 46284 - protein, 524 aa, Oryza sativa
MAPSAAAPEIQELIHHPYDGRVTSFVVLSCVTACLGGILFGYDIGVSGGVTSMDAFLERFFPEVYRRMHGGGERVSNYCRFDSQLLTAFTSSLYVSGLATTFLASHVTARRGRRASMLVAGAAIAAGATVGASAAGLATVILGRVLLGVGVGFGNQAVPLYLSEMAPPSRRGAFSNGFQLCVSVGAFVAQLINFGAEKIAGGWGWRVSLAVAAVPAAFLAVGAVFLPETPNSLVQQGEDHGKVRALLSKIRGSDGAGVDDELDDIVAADRCKVTARRGLTLMLTHRRYRPQLVMAVMIPFFQQMTGINAIAFYAPVLLRTVGMGESAALLAVVIKQVVGIGATLASMLAVDRFGRRTLFLAGGAQMVISQLLIGAIMAAQLGDDGELSQASALLLIVLVAVYVAGFAWSWGPLGWLVPSEIFPLEVRSAGQSIAVAVNFLLTTAVAQSFLAMLCHMKAGIFFFFAAWLVAMTAFVYLLLPETKGLPIEQVGKLWARHWFWRRFVVTDSGVDGEEEGEAIDADKL

SEQ ID NO: 46285 - protein, 482 aa, Oryza sativa
MAEEEVAAVVGELRGSFRSGRTRAAEWRAAQLRGIVRMVEEREGDISDSLHSDLAKPRMESYLHEISLAKAACTFALKGLKNWMKPEKVPAALTTFPSTAQIVSEPLGVVLVISAWNYPFLLSIDPVIGAIAAGNAVVLKPSEIAPATSALFAKLLPEYVDSSCIKVVEGGVPETTALLEQKWDKIFYTGSGNVGRIVMAAAAKHLTPVALELGGKCPAIVDSNTDLHVTMKRLAVGKWGCNNGQACIAPDYVITTKSFAPELVDSLKRVLKRFYGEDPLQSEDLSRIVNSNHFRRLTNLIEDKKVAQKIVYGGQTDEKQLKIAPTVLLDVPLDTTLMAEEIFGPLLPIVTVDKIEDSIQFINSRTKPLAAYLFTKDKKLQEEFVSNVPAGGMLVNDVALHLANPHLPFGGVGDSGIGSYHGKFSFDCFTHKKAVLIRGFGGEATARYPPYTIEKQKILRGLINGSFFALILALLGFPKERR

SEQ ID NO: 46286 - protein, 71 aa, Oryza sativa
MAEIGVRSTYSPPVQSPFSYLSSNIDSSGSEFRLNLSDVCLRSSFQDSDRTQYISEYWCLEISLYFFNFAF

SEQ ID NO: 46287 - protein, 87 aa, Oryza sativa
MARGVSLPADMEAAKDAGIWEVLLLRYFDLQAAPWPLAAMIRAFSMLHNRMLADPSFLFKVGTEVVIDSRCATFAEDFWAEFELYDP

SEQ ID NO: 46288 - protein, 143 aa, Oryza sativa
MEKSRDKVNITPDLNKGKETVIPLHITRLDMREVDQSSYVARLKLKKPSNIPPSTLPLHLPVIGLDVNKPDNLHCLMIMQNVKHRNVLQMEAVKQIVIGEAKTPVLAMFVESFTGRLPALLRKMKLGGMSDILPSVELADVVR

SEQ ID NO: 46289 - protein, 584 aa, Oryza sativa
MGLINRGVFFKILAFLCFIRSSQGRNHFTTLDLPPLLKASSFSRIQHEAYDYIIVGGGTAGCPLAATLSQKYKVLLLERGGSPYGNRNISHLENFHICLADDSPNSPSQGFISTDGVINARAKVLGGGTSVNAGFYSRADPSFVQDAGWDAELVNQSYPWIEERIVYWPNITPWQAALRDGLLEAGVSPYNGYSYDHLFGTKVGGTIFDEAGYRHTAADLLAAGNHNNLRVLLHASVTRIIFNTEQEHRKPRTIGVEFKDENGGQQHAFLTRNRDSEIIISAGAIGSPQLLLLSGIGPRKELKKHNISVVLRNEHVGKGMSDNPMNSIFIPTKDAPKQSLIQTVGITDGGAFIEASSGFSQSPDSIQCHHGIMSAEIGQLSTIPPKQRNLDAVKKYVHKKYNLPKEVFSGGFILSKIDGPLSTGNLVLVDTDINSNPTVTFNYFQHPKDLSRCVYGIKTIERILKTNHFTNFTLNGGGYPMEVVLNMSVTANINLIPKHTNDSTSMEQFCRDTVVTIWHYHGGCHVGKVVDQQYRVIGVSGLRVIDGSTLFRSPGTNPQATVMMMGRYMGVKILRGRLGRAAGV

SEQ ID NO: 46290 - protein, 261 aa, Oryza sativa; identical to SEQ ID NO: 31824

SEQ ID NO: 46291 - protein, 83 aa, Oryza sativa
MVFVWLTAFFLVVALIVLVIYQLMCLADLEFDYINPFDSSSRINKVVIPEFVLQAALSVLFLLSGHWAMFLLSAPMVYYNYTL

SEQ ID NO: 46292 - protein, 129 aa, Oryza sativa
MGYASGTMAPGRCSSWEKGKCRVGDSGREPYTACHHQLLAHAETVRLYKEKYQFTEEAIRQSPFIRDNNLNRRSAKLSSIIQNYLLLGIQFQLGPGGGGRVFSVQTLADLPLLFLIIIYNIVKLGKRTP

SEQ ID NO: 46293 - protein, 261 aa, Oryza sativa
MEWQSGEGSAAILHLQEMAKLSVLQCSVGSDLDEDNTKNNDSRWVVKNLAMPFDSQGDFGPRQWKSNIAFAYAGKLYWADYDVGLIYCDVLESSPKLQLIKFPVPVRKFELGVSGPDDNCGNSESFRTAGVSNGKIKFVDVDNCRAQSFAVIIRTWTLQMPQMVWKLDDVLNVKQLWGSASFKKYGLHQWVPEYPVVSLLDPHIVHFVLHKHMYHDQVWMIAVDMRAKSVKSCKNYPKGEKEDGYKGLSFNIDFICSMLSK

SEQ ID NO: 46294 - protein, 414 aa, Oryza sativa
MAAVEGGIGEPPGLARERRLRLRRSVAATGDMDGDGDVGGGGGGGGGGGVRYVLALPAMASLAVLIAHLDAAVPVPRRPRSYLPRAVPMAWWAFRLPVFRPPPPPPPPPAKNPVKEEEGVARVVVVVAPPPPVDPGEEEAGKRAAKRARRCLNCDAVETPQWRSGPMGRSTLCNACGVRLRAVGSLPEHRAPAARTTTAAPASPPDSPIWTPGHKPPSSSPDIYLVRRTPKLPVTRPPRTKQAPPTAPAPAPPPPPPQPASPKTKTKAKAKKPKRKRSCVHCGSTETPQWREGPTGRGTLCNACGVRYRQGRLLPEYRPKGSPTFSPSVHAANHRQVLELRRQQRQSTNPSTPPPPPVSAAEPIPDEQKEEVVSVPVAAAAPATDGGAASSLDALLLDGPSAPLIVDGDDFLVS

SEQ ID NO: 46295 - protein, 688 aa, Oryza sativa
MKLVSIYLLVLCVVGANELLVVAASGNDGGGGRFVYSGFAGANLTLDGTATVTPAGLIELTNGTLQLKGHAFHPTPLRFGFGSGGGGGGDGVVVRSFSASFVFGILSAYPDMSAHGIVFLVSPTTDFSAALASQYLGLVNVTSNGDARNRIFAVELDTLQQDEFRDINDNHVGVDINGLVSLQSTSAGYYAADINGGGFRNLTLISHEAMRVWVDYDAGDARIDVTLAPLAVAKPVRPLISAAYNLSSVITDTAYVGFSSATGSFNSRHYVLGWSFAVDGGPAPAIDVAKLPKLPREGPKARSKFLEIFLPIASAAVVLAMGILVILLVRRRKRYTELREDWEVEFGPHRFPYKDLHHATQGFESKCLLGVGGFGRVYKGVLPNSNVEIAVKRVSHDSSQGVKEFVAEVVSLGRLQHCNLVRLLGYCRRKGELMLVYEYMSNGSLDKYLHGQDNKPTLSWAQRFQIIKDIASGLLYLHEECDKVVIHRDIKASNVLLDNEMNARLGDFGLARLYDHGEDPQSTHVVGTIGYLAPELGRTSKATPLTDVFAFGTFILEVTCGRRPIYHDSHGTQVMLVDWVLDHWHKQSLVDTVDLKLHGEFDVGEACLVLKLGLLCSHPFINARPDMRRVMQYLKREVALPELMPTSMSFHMLALMQNDGFDSYVQSYPSSNSKGNISTATSSLLEEG

SEQ ID NO: 46296 - protein, 242 aa, Oryza sativa
MAPSSRKERAAEARASTSKPSPAPAPAPAVQVQRRPVGGGRWTSRRISFYASRAFFLLIILQIPLFRVPCRAGTCTTPIQVTSSQLVSNEIFPPSVVKALLFPGAIASNLTKSMTFPRWNDLFDIYNLTDAKTASAVIDLQRLEILAGSYFCAAGALVGVINPGRMTLFGTLLVIWGLVKEALFGKPVNSDPTQSVHVYPTILIALICAFLSITYNVKKTVRNSQSVSITKPLQSSAKSKLK

SEQ ID NO: 46297 - protein, 505 aa, Oryza sativa
MALRAAELRRLVVLLRGEAALPLPLAWRGRPVSTAARDDELAGKSAYEVLGVGETSSSAEIKASFHRLAKETHPDVAAAAGSSRFLQILAAYEILSDSQRRAHYDIYLRSQKRVLQKHPRPSHHVYPNPSGSGIVVTRESNVVEWLKWYRLTIDDIVTKKRVATGSGYFDKLESELYTAIHAAYYGPDVRSVDLLPDCFEAEERSVYETPELLHLVSGRDLFGIVSLADRVQQLPDAFQEKQTLPGFKTYGISQHVSTNLEKGTVHASPVYIHKREIDKNDGPHSDAYKDIELWICGKLVATATRSPKCNCIDKSDVEDHIHVFLVPNEVASSDFTQELPILGTITGLATTGEEGSCCVYDSRGIKTHLIVKHRTLMVKHMHWYQVGDEISPCECRCSRARLPPSRYWLFEPRCYMHDTGGWYIETFGRDKKGRKILSPRQWDGSNEHSERRLHPAMYLAALAYRSLDIEDAQRKKWSITTFLELQSSHICQLCKKIFNGGKESS

SEQ ID NO: 46298 - protein, 764 aa, Oryza sativa
MMLLGSPSSGGYGGKFAGASPAGGTTTMAPSAKQPSSRAPPPGITGGRNDLRILSPAAAAAAVGGLEMKKPEAEGIAESLQATHRKELEASIRKQLQGVELSPSPYDTAWVAMVPLRGSSHNPSFPQCVDWILENQWDDGSWSIDGSISTANKDVLSSTLACVLALNKWNVGREHIRRGLSFIGRNFSIAMDDQAVAPIGFGITFPAMLTLANGSGLEVPVRQNDIDSLNHLREMKIQREAGNHSRGRKAYMAYLAEGFGNLLEWDEIMMFQRKNGSLFNCPSSTAGALANYHDDKALQYLQSLVNKFDGVVPTLYPLNIYCQLSMVDALENMGISQYFASEIKSILDMTYSSWLGKDEEIMLDVTTCAMAFRLLRMNGYDVSSDELSHVAGASGFRDSLQGYLNDRKSVLEVYKTSKHSISENDLILDSIGSWSGSLLKEMLCSNGKGTPGREEIEFALKYPFYSTLERLVHRKNIVLFDAKGSQMLKTECMPVHDSQDFLALAVDDFCISQSNYQNELNYLESWVKDNRLDQLHFARQKITYCYLSGAATTFRPEMGYARTSWARTAWLTAVIDDLFDVGGLEQEQENLLALMEKWEEPGEDEYYSEDVKIVFQALYNTVNEIGAKASALQGHDVTKYLVDVWLHVVRCMKVEAEWQRSQHLPTFEEYMESGMVSLGQGCTVMSALFLIGEKLPEGIVELEEYDELFRLMGTCGRLLNDIRGIEREESDGKMTNGVSLLVHASGGSMSVDEAKTEVMKRIDA

SEQ ID NO: 46299 - protein, 231 aa, Oryza sativa
MSGIQLKRTDTGEESVLEVKGLFYGIGHTPNSQLLQGQIDLDDAGYILVEEGTAKTSVDGVFAAGDVQDHEWRQAVTAAGSGCVAALSVERYLVANDLLVEFHQPVREEKEKEITDRDVEMGFDISHTKHRGQYALRKVYHESPRLVCVLYTSPTCGPCRTLKPILSKVIDEYNEHVHFVEIDIEEDPEIAEAAGIMGTPCVQFFKNKEMLRTVSGVKMKKEYREFIESNK

SEQ ID NO: 46300 - protein, 280 aa, Oryza sativa; identical to SEQ ID NO: 36834

SEQ ID NO: 46301 - protein, 94 aa, Oryza sativa
MGAPAGWRAGKRRRNSGLEETTTRTRRHGGEGRGGEAEKDLLDVLVTEGIDGGVARFLSFSGGGSLRLSMAVVGNGDCRIRELGFDPTPRQWLY

SEQ ID NO: 46302 - protein, 308 aa, Oryza sativa
MAGAGAGESLDLPVVDLASSDLAAAAKSVRKACVEYGFFYVVNHGAEGLAEKVFGESSKFFEQPLGEKMALLRNRNYLGYTPLGADKLDASSKFKGDLNENYCIGPIRKEGYQNDANQWPSEENFPCWKETMKLYHETALATGKRILSLIALSLNLDVEFFDCPVAFLRLLHYPGEANESDDGNYGASAHSDYGVLTLVATDGTPGLQICREKDRCPQLWEDVHHIEGALIVNIGDLLQRWTNCVFRSTLHRVVAVGKERYSVAFFLHTNPDLVVQCLESCCSEACPPRFPPIRSGDYLEDRLRARYK

SEQ ID NO: 46303 - protein, 550 aa, Oryza sativa
MGNCCVTPEGSGRGRKKQQQEQKQKQKEPKQQQQQQKKGKKPNPFSIEYNRSSAPSGHRLVVLREPTGRDIAARYELGGELGRGEFGVTYLCTERETGDAYACKSISKKKLRTAVDIEDVRREVDIMRHLPKHPNIVTLRDTYEDDNAVHLVMELCEGGELFDRIVARGHYTERAAALVTRTIVEVVQMCHKHGVMHRDLKPENFLFANKKETAALKAIDFGLSVFFTPGERFTEIVGSPYYMAPEVLKRNYGPEVDVWSAGVILCILLCGVPPFWAETEQGVAQAIIRSVIDFKRDPWPRVSDNAKDLVKGMLNPDPRRRLNAQQVLDHPWLQNIKKAPNVNLGETVKARLQQFSVMNKFKKHALRVIAEHLSVEEVAGIKDMFEKMDLNKDNMINFDELKLGLHKLGHQMADADVQILMDAADVDGNGSLDYGEFVALSVHLRKIGNDEHLHKAFAYFDRNQSGYIEIDELRESLADDLGANHEEVINAIIRDVDTDKDGKISYDEFAAMMKAGTDWRKASRQYSRERFTSLSLKLQKDGSLQLTTTQ

SEQ ID NO: 46304 - protein, 221 aa, Oryza sativa
MGISRDSMHKRRATGGKQKAWRKKRKYELGRQPANTKLSSNKTVRRVRVRGGNLKWRALRLDTGNYSWGSEAVTRKTRILDVVYNASNNELVRTQTLVKSAIVQVDAAPFKQWYLTHYGVDIGRKKKAPAAKKDAAEGQEGEAATEEAKKSNHVVRKLEKRQQTRTLDSHIEEQFGSGRLLACISSRPGQCGRADGYILEGKELEFYMKKLQRKKGKGAAA

SEQ ID NO: 46305 - protein, 122 aa, Oryza sativa; identical to SEQ ID NO: 45565

SEQ ID NO: 46306 - protein, 136 aa, Oryza sativa
MPSCFIRDYIRVMCTENVKEKTELLHALINGKKLSDLPKINQQTLIIWGEQDRVFPLELGLRLKRHLGDTSELVIVKNAGHAINREKPAELCRLIKNCIADPSVKYRDGHKGSWKSAIKRFAGSSLRKVDSTRPLL

SEQ ID NO: 46307 - protein, 452 aa, Oryza sativa
MGRRSSASSAAAGEPLLPAAASAKGGGGGGGRASMLQRCVSRADDELQWFRSCLRWVCMDHSGPWGAALSWLLFLLLAVAVPAAAHFLLAFRASRRPFSAVVQVSLSAASAAGFLCLSSSFRRIGLRRLLYLDKLRTKSDRVRLNYTARLSFSFRLLASLVAPCFAAEAAYKVWWYATSGDRVPFFGNDVLSNAVACSVEMAAWMYRSAIYLLTCVLFRLICHLQGLRLEDFAGTLLVEVEEGRAGVERVLREHLDIRKQLKVISHRFRKFIVASLLIATASQFASLLLTTRHDSVDDLLNTSELALCSVVLMSGLIIILSSAAKITHQAQALTGQTTKWHACCTIEPVPDEEAEPGSNHSSMLEVEPVSDSDGESSEETGDEDLLENTKIMLPQAHVISFQKRQALVTYLENNRAGITVFGFTLDRSYLHTIFMLEWTLFLWLLGKTIGFS

SEQ ID NO: 46308 - protein, 290 aa, Oryza sativa
MRKKLDTRFPAPRIKKIMQADEDVGKIALAVPVLVSKALELFLQDLCNRTYDITVQRGVKTLSSSHLKQCIHSYNVYDFLRDVVSKVPDMGTSDAGVDDKLGKRRKTAEDDSEEESKRTRNEAASQTSTGRGRGRGRGRGRRGGRVSEREIISAYEKFEENHEFPPGQFSKPSQLKVDVSVDGTDAIETKEATPLSNARASLRNIDLNIELTDYDDEGSAPLEVQPPAPAAGVVTTSSGPLVSEVNEEAKTKDFLGWQLPELTKMAMDPVQFALSSNHRLEEDEDYDNEE

SEQ ID NO: 46309 - protein, 70 aa, Oryza sativa; identical to SEQ ID NO: 42876

SEQ ID NO: 46310 - protein, 692 aa, Oryza sativa
MLSLTRSARMDANKYNSSTVQKDSFGLTAKEIFNKEKPDAYDKLVKEMVMDQRARPSDRTKTPEEIAQEEKERLEKLEKERQKRMLGTAESSDEDDDDDEEGDRSTKLDSSKPISGDDLGDSFSTDEPARKEKGWVDEIYEREGKKIGEDAEGSDNEESDDDGDDDDDDAEDGDDDAEDEDEEEDLSDNDFGNMSVRDWEQSDDDEVTVEEDEMEGLKQKEQKISGKVVKKDLQNSKKESNAESQVKDDNLPFVIEAPSNLKDLCSLLDGWSETEIIEIISRIRTCNSIRLAAENRKKMQVFYGVLLQYFAVLATQSPVRFKLIDTLVKPLIEMSGETPYFAAICARQRLIHTRTRLCEDIKVSGKSCWPSLKTLLLLRLWSLIFPCSDFRHVVATPMLLLMCEYLMRCPIQSGRDVAVGSFLCSMVLVATKESKKFCPEAVVFLQSLLVTSLGGNLGSDLRKKINDQFLELKTMEPWLHIHEKVHEVNPANILEVICMDSDAPYFSSDNFKASVLLSVAECLRGFVIIHEELCSFPEIFLPISSLMQEIMDKSDLPGLLQYILHEVIGLIKNRSDEVHASRQPLQMRKQKPEPIRQLNPKFEENYIKGLDYDPDRERAQMKKMKKRLKSEKKGAMRELRKDNYFLSAVKEKERIKQEQERAEKYGKAMAFLQEQEHAFKSGQLGKGRKRRR

SEQ ID NO: 46311 - protein, 609 aa, Oryza sativa
MDDKLYPPRGPARRNQVPSPERARLIPRCGCRLSSKHVWGSTGTPWHMLSALDCLLFSAPQSCSLAHTWTASVMHNRLVGGCFSSLSAAVASAIRVPVASYGTSAAQSTSKDQHGSNINSALKVLNLVPRKADYDKVGGPCHHRLIHDCMNDILGVQSNHTIHKGNGVTFNSCSNPAQAKFDSFVSNNGSALCSRTRFIKEDMFMLIMELHRKGETSTDQSILAAAMSSCADRQMFTQDTQLHGLLVKVGCDSTVFIGSSLITLYSRCSQLESSYLVFQTMPTKNTVSWTAMISGFALHNRVEPCLHLFASMMLSSCKPNDITFATLFSVCTKHALLALGRSVHALQMRMGFHSYVHVSNALLSMYAKCGCIDEAQFIFGCIACKDLVSWNAIIFGCSQYGLAKHCLDLLKEMERQHIVPDALSFLGVLSSCRHARLVEEGRHCFKTMIEHGIKPGLDHYSCMVDLLGRAGLLEEAWDLIQTMSIPPNAVIWGSLLGSCRVHGNISIGIQAAEHRLKLEPGCAATHIQLANLYATIGCWSDVARVRMAMKARGLKTNIGCSWIEVGDKVYSFTAENRSKSHQVNNVLAVLDCLQAHMECKYDMLTESLE

SEQ ID NO: 46312 - protein, 475 aa, Oryza sativa
MDQRGGAGGAAETHRVQLPDTATLSDVKAFLATKLSAAQPVPAESVRLTLNRSEELLTPDPSATLPALGLASGDLLYFTLSPLPSPSPPPQPQPQAQPLPRNPNPDVPSIAGAADPTKSPVESGSSSSMPQALCTNPGLPVASDPHHPPPDVVMAEAFAVIKSKSSLVVGDTKREMENVGGADGTVICRLVVALHAALLDAGFLYANPVGSCLQLPQNWASGSFVPVSMKYTLPELVEALPVVEEGMVAVLNYSLMGNFMMVYGHVPGATSGVRRLCLELPELAPLLYLDSDEVSTAEEREIHELWRVLKDEMCLPLMISLCQLNNLSLPPCLMALPGDVKAKVLEFVPGVDLARVQCTCKELRDLAADDNLWKKKCEMEFNTQGESSQVGRNWKERFGAAWKVSNNKGQKRPSPFFNYGWGNPYSPHGFPVIGGDSDMLPFIGHPNLLGRSFGNQRRNISPSCSFGGHHRNFLG

SEQ ID NO: 46313 - protein, 456 aa, Oryza sativa
MVEKVWSDDTTSQLEATIQFRRLLSDEKNPTVIKIIRADVLPRFSDFLSRHEHPQLQMEAAWVLTNIAASDYTLLVAECGAVPRLVELLESANANIRHQAIWALGNIAADVPTCREIVLDHGAVTPLLAQFREGMKVPVLRTATWALSNLCFGKLPAEVQVKPILDIISQLIHSVDEKILGDACWALCYICDGVSDGIQHVLDAGACPQLVNLLMHASANILLPVITVLARISSGDDAQVQVLVENDILNYLAPLLARNYPKSIKKQACLIVSNISTGSKDNIQAVIDADVISPLIFLLKTSEKDIKEEAAWAISNAASGGSNDQIQYLVSRGCLEPLCNVLTYQDADLVYACLEGLQNILQAGAVGKQGQGSTVNPYAQFILECGGLDKLEDLQEVDNDAIYKLVMKLLEGYWDEEVSDDDPNLPTSNDSAETVETASEDAAQPTEPSASPNESE

SEQ ID NO: 46314 - protein, 61 aa, Oryza sativa
MPVMELGILLIPLTLVFVPCRRIVLFLKRLQEFHRSITHPSFTSADMLSRFSSFNSMALML

SEQ ID NO: 46315 - protein, 446 aa, Oryza sativa
MKLTSEKVGCTGENKVRTILLENPGLLVLDEGHTPRNERSVIWKTLGKVKTEKRIILSGTPFQNNFLELYNILCLVRPRFGEMFLTKTRVGRRHCVSKKQRDKFSDKYEKGVWASLTSNVTDDNAEKVRSILKPFVHIHNGTILRTLPGLRECVIVLKPLPLQKSIIRKVENVGSGNNFEHEYVISLASTHPSLVNAINMTEEEASLIDKPMLERLRSNPYEGVKTRFVMEVVRLCEALKEKVLIFSQFIQPLELIKEHLRKIFKWREGKEILQMDGKILPRYRQNSIEVFNNPDSDARVLLASTRACCEGISLTGASRVVLLDVVWNPAVGRQAISRAFRIGQKKFVYTYNLITYGTGEGDKYDRQAEKDHLSKLVFSTEDEFSNVRNMLSKAEMEHCSKLISEDKVLEEMTSHDQLKGMFLKIHYPPTESNIVFTYNQIAPELS

SEQ ID NO: 46316 - protein, 118 aa, Oryza sativa
MDCGIELKGCICRINNCAVELFSMEEDLVIDDEDSWDLLARDLRLKATFLYIDLGRVICSCEIDEHKKMLTGLANKFFYFMDELTNAVSSRSIPLMQVCYSDTTLLLREVLSALVPSQ

SEQ ID NO: 46317 - protein, 218 aa, Oryza sativa; identical to SEQ ID NO: 31305

SEQ ID NO: 46318 - protein, 500 aa, Oryza sativa
MYIYPSLSPNTDSTSPLDRSQEHDKDSGIDRFISPRRWSQDGERSPSAASSRMTRKKERSGWGSLFRGCLSGGGAAGSRKVRPGPRTAAAAAAKHGGGASSAAAQRLSFTDVMSTASEQELSVSLVGSNLHVFTVGELKAATQGFLDGNFLGEGGFGPVYKGNVADKAKPGLKAQPIAVKLWDPEGAQGHKEWLSEVIFLGQLRHPNLVKLIGYCCEDEHRLLVYEYMAKGSLENHLFKKFPSMLSWSTRLNIAVGAAKGLVFLHDAEKPVIYRDFKTSNILLDPEYKAKLSDFGLAKDGPEGDDTHVSTRVMGTHGYAAPEYILTGHLTAKSDVYSFGVVLLEILSGRRAVDKTRPSREQHLVEHMRSWLKDPQKLSRVMDPALEGQYFATAAHKAALVAYKCLSGNPKNRPDMCQVVKDLEPLLNVTDDVSDESVAPIAPVREDNAVRKERTARRRPGERDGGKLRQSKMRSPQKVVRRRPGQSEEFWVWHMPGEVKC

SEQ ID NO: 46319 - protein, 77 aa, Oryza sativa
MQHRSLGDPWRRMMSRTRKGSLKGCLETARTRRKRMVIRKDFSRGCLVRRKRTRRKKEIEMVSSAGCLGTARTRTWN

SEQ ID NO: 46320 - protein, 109 aa, Oryza sativa
MAATFTMPRMLSISASMVASLNGMEKKSPTAMHPHHLFDNAQRTAPAPSSAPPAEPYSAPRRPRASSSPGGGSGVGGRAQEAMRRRRHLVAGHRTPASPTGRLPCPLPN

SEQ ID NO: 46321 - protein, 439 aa, Oryza sativa
MEEKGMGKQRWEKVLLQAAFDGNLRLLRKMARGLVTTGRGRGEADVLAAVADGGSGSRALHLAATEGRMDVLTYLVEDLRLDVNQTNDRGETPLFLSAFFGRTASTRYLLDHGADPMIVGKSGSPLHAAAGKGHCEIVELLLSRGIGIVFDSLYGTPLHTAAAHGQCSTMKILLDHHADPDKVFNLDDAPLNMAISSKSLECVKLLIQAGADVNFRDSNGATYVMMAANYGFSGIMKCLLDAGANPNIPDQFGVFPIEVAALQVHREIVEMLFPLTSPISTVPDWSIDGIFAHAKNFGSKPLPEDLCVKKIAQMKVEGKEAFKRKDYLLAAQLYTSALGLGPSPDDSATLLANRSLCWLRLENGKQALADANMCRMFRPHWIKACYRQGAAFMLLKEYGNACDAFSDGLKLDPANVDIENALRAALQAVKNDRCVKNNQ

SEQ ID NO: 46322 - protein, 1176 aa, Oryza sativa
MKRKQKPAAADAAAEVDADEPSQAPLPLEAFSGDVCAALTARYGRSTAPQHRHLLASAAAIRSILVDDGLPVTPASYLPAAISALQAAGSADPAAASALASLLVILLPNIPSSPSSLPPASASESASALAVFLSSPDASQLPTGTVRSVVKSLGHLVFHVDAAADWGSVASPLEALLAASVDQRAKVRRCAQESVEKLFAHLKQCGCGKKVSNAAIGMFDKHIASVKNHVNLNSDASEGKEMEAANMLSAMVVVVPYLSKKAMRTVFSEVYQLLTPCFSPLTRHVLKLMETLLDHLKAENVESDLVNLIPLLLAYLNYDEKKPDDTIVAALKLMKNCLAKLVGRPNLWMEVLPSAFEAVSGYLILDRKCSEDIAGLLQDCIDSHIDRNIILTGSQLCDRDYESLSDAAAVKSICSSINNMLCACASPPNSILTTALVLFLKLGESSYAFMKNIILTLSQIAAKTDKESERKNVEECIGAAVIALGPDKILSLIPIGFDEDRLTCSNTWLLPILDKYIYGASPQQFLERIVPLAESVQQASNMAKSARKCEDLKSCSNQLWNLLPAFCRYPVDICQNFGSLSKLLLEILKCDKYLYKSAVKALQQLVDGTRRLSSSEQNREIYVELSTLFSSKIINLSCPSFERCSKKDARKNMKVLASHSVYLLSTVTDYFLDSSPEKRSHLKDALRCLAQLSGSTNICNLFLSLVKRFGLEDTQSEQENIECQTNEVDKKDEEGTDVDEEKNKKRSLVMELISTFAEAADEDLLDLLFGFVKSSLLNNKQPCEGKALFALSIILKEHNEYSLARLDEIMMLLHGIKADLDNEVLEGQLLCYQYLLVHMIKANEENTSKKAFLILNELIVALKSKKESRRLAYDVLLAISNSLRSSESNSEDSDLQRLFTMVMGYLSSPAPHIVSGAIAALSLLIYNDANFCLEVPNLIPSVLVLLKHKAIEVIKASLGFVKVLVTSLHSEKLLELQADIMSGILPWSSVTKHHFKGKVVLIMEILIRKCGFDAIDLVTPEKYKAFVRSVEEGRKGNHNPADGAESEAQQPTQHAAKRRKRSDSDVGTGQEGTHTRAPSRSLPAGKKEFFVKGARNARSPGVKSQRSKPSGRNGDRTNFKSKSEPRPGNGQNTKGDKPQGFNKRNRTGKFDKTQNRGGKASDRSSRFKKPRTAATT

SEQ ID NO: 46323 - protein, 265 aa, Oryza sativa
MRRYSPPYRSPPRRGYGGRGRSPPRRGYGGRKEQGSGSLLVRNIPLSCRAEDLRVPFERFGPVRDVYLPKDYYTGEPRGFAFVEFVDPYDASEAQYHMNRQVVFGREITVVLAAESRKRPEEMRSRARVRGYSDHEGRRSSHYGRSRSRSRSRSPRYRGRPRSRSYSPAPRRRDDYSASPQRKDTHRAKSPRRQPKEHEVDKKRRSYSPANKDGDRRDADNGYEKRSPPADSDGSPPHRRSPRQSSGSPPGSRSRSADGSPARSD

SEQ ID NO: 46324 - protein, 175 aa, Oryza sativa
MRYLFIYKECSTLHFHRFWDWQPAYFGIIATTTAWVKGEGVIIWLLAIIYFISGVPGAYVLWYRPLYNAMRTESALKFGWFFLFYLIHIIFCVWAAVAPPFPFKGKSLAGILPAIDVIGRSAIVGIFYFVGFGLFCLESLLSIGVIQQVYMYFRGSGKAAEMKREAARGALSSAF

SEQ ID NO: 46325 - protein, 301 aa, Oryza sativa
MPASHFIDNRPEEPPESEVYKAVMDLVRRYTNKCSNGFLVNTVDSLEARVVNTLRHARRQGGRALPPFYCVGPLVNKAGERGERPERHECLAWLDRQPDRTVVFLCFGSTGIGNHSTEQLREIAVGLEKSGHRFLWVVRAPVVSDDPDRPDLDALLPAGFLERTSGQGAVVKQWAPQVDVLHHRATGAFVTHCGWNSVLEGITAGVPMLCWPLHSEQKMNKVLMVEEMGIAVEMVGWQQGLVTAEEVEAKVRLVMESEAGVELRARVTAHKEAAAVAWTDVGSSRAAFTEFLSNADSRQTS

SEQ ID NO: 46326 - protein, 327 aa, Oryza sativa; identical to SEQ ID NO: 30480

SEQ ID NO: 46327 - protein, 114 aa, Oryza sativa
MEVTVDMPSRGLSFLSYWKKEPPYAIDAHALVNLAEVLAYRPSILQQDLNHGVQCRATRLCSVLFCRRRWRVAGAPRHLPRPPPSHLCPVLAVSRCTVHPAVAWLEVEEDRREK

SEQ ID NO: 46328 - protein, 153 aa, Oryza sativa
MAKLIFLLAMVAFASTLLVSIAGAADNSTSPSSPSADPTAYDMLQRFGFPVGILPQGVQGYKLGDDGSSFEVYLAGDCEFRAAKKYVLHYSSRVAGQIATGSITSLEGVKVKEAFAWFRISEVDVDGDQIKLHVGLYTATVAADQLAVSPQCN

SEQ ID NO: 46329 - protein, 500 aa, Oryza sativa
MVLTHVEAVEEGSEAAAAVFASRYVQDPVPRYELGERSISKDAAYQIVHDELLLDSSPRLNLASFVTTWMEPECDRLILEAINKNYADMDEYPVTTELQNRCVNIIARLFNAPVGDGEKAVGVGTVGSSEAIMLAGLAFKRRWQNRRKAAGKPHDKPNIVTGANVQVCWEKFARYFEVELKEVKLTEGCYVMDPVKAVDMVDENTICVAAILGSTLTGEFEDVRRLNDLLAAKNKRTGWDTPIHVDAASGGFIAPFIYPELEWDFRLSLVKSINVSGHKYGLVYAGVGWVIWRNKEDLPEELIFHINYLGADQPTFTLNFSKGSSQIIAQYYQFLRLGFEGYKSVMKNCMESARTLREGLEKTGRFTIISKEEGVPLVAFTFKDGAGAQAFRLSSGLRRYGWIVPAYTMPAALEHMTVLRVVVREDFGRPLAERFLSHVRMALDEMDLAARAPVPRVQLTIELGPARTAGEEASIRVVKSEAVPVRKSVPLVAGKTKGVC

SEQ ID NO: 46330 - protein, 427 aa, Oryza sativa
MVILCASHIGISTTRSRFWSGWLSQNGCPRMCYHIPVNIRKLRKQNRRQRVITLSKSSALQDPVSSVKPSRLLQTDELRIFHNSVPEEIISTVRLEESDAFYMLELSTSREFSSSLLDKNAAILICIIDANGDSLLQRVPAAYCNHSAQGREAEKLLPFQSGSVDVVTFRGSKLQRIKEIWVGLESGSWRIDNLSLKVIHGQLNTPPDLEETPELKFNGLQYTFDKLSMLLGEDGASVVEARPVAVTDLTGISLSDLQEGQLSSASTASSILEMKEDGLKEYADLKQSLLLYDLAIVITGFSAFTLASNDSAALSFLVGGIGGFLYLLLLQKSVDGLPALNSPSEAGSAQPSVKGFSGIRRPWLILSLLMVAGAVALKYGAGGDKLEMTPVELFVGTAGFLANKVAIVLAAFKPLQSNLKAEDRSGD

SEQ ID NO: 46331 - protein, 543 aa, Oryza sativa
MRRGKAALWRPRHGEGETSRRGGDGDGEAADRLSALPDGVLHHVMSFLKAWEVVRTCVLSRRWRNLWASAPCVDLRIRYFRLDSEPPEEPRDFVNRLFRRREASAPVDTLRLQLSDPDNLFDNDDANAWIRTAIKRNARFIHLTGHRKEIGVLKHRALVSTHLKILKLSYVLIDDKILKQLSSGCKSLEELDLKDCVMTGHQISSASLKTLKMDRCKINVDLSITAPNLVFLNIVTPYIRVPSFKNLESLVTCSIILDDLFLGDDYQHISDEDDIDETTDDDDFGYQKNDKAGYRINYAKKGFVFGGNEDGYGYGSDIESDDNTYEYSEIANECGELQYGNNGDGHNSSKDGEYDNAETFGGQNVIHSLSNVRSLELLAGAGEVVLSRELKSCPIFINLKTLSLGEWCMDAEFDALVFLLQRSPNLERLFLEPQLNFNTRKALESGVKPTGRSFTCKDLQMVKIRCSKDDARVHMLAHLFRANGIPFDKIYVHRSGSSRLRSEKVMRDLAKQELEFWGSDEFWGSDYEYCGPDPEFGDSDLEF

SEQ ID NO: 46332 - protein, 518 aa, Oryza sativa
MAIGAFVESGGGGGGGGGGGYGGRVTAYVVLTCVVAGSGGILFGYDLGISGGVTSMDSFLKRFFPDVYQKKQDTRVSHYCAFDSELLTVFTSSLYIAGLVATLFASSVTRRYGRRTSMLIGGTVFIAGSVFGGAAVNVFMLLINRILLGIGLGFTNQSIPLYLSEMAPPRYRGAINNGFELCISLGILFANVLNYCVVKITAGWGWRISLSMAAVPAAFLTIGAVFLPETPSFIIERDGDTDKARILLQRLRGTTSVQKELDDLVAASNLSRTVQYPFRNIFKRKYRPQLVIALLVPFFNQLTGINVMNFYAPVMFRTIGLKESASLLSSVVNRLCATFANIMAMIVVDRFGRRKLFLVGGIQMILSQLAVGAILAAEFKDYGSMDREYAYLVLITMCVFVAGFAWSWGPLTFLVPTEICPLEIRSAGQSIVVAVVFLMTFVIGQTFLAVLCRIKSGTFFFFAGWICLMTVFVYFFLPETKKLPMEQMEQVWRKHWFWKKIVGEEEEKQAEKTALPSM

SEQ ID NO: 46333 - protein, 370 aa, Oryza sativa
MATSSSPRLLSSFLGDRLLSASARPLLRGAAPGSRRAAYQATRTLCNLVDILFNRGQSDKPEDNPRRLRPGKVSPRLSVPKHIQRPPYVNARQRPGLHNGPEIHDERGIECMRASGKLAAQVLKFAGTLVEPGITTDEIDKAVHQMIVDNGAYPSPLGYCGFPRSVCTSVNECICHGIPDSRPLEDGDIINIDVTVYLNRVFLCISSLYLHKCQSMTMVAGQLGYHGDTSATFLCGNVDDKAKKLVQVTRECLDKAISICAPGVEIKRIGRTIQDHADKFKFGVVRQFVGHGVGQVFHAEPVVLHFRNNEWGRMTLNQTFTIEPMLTVGSVNPVIWSDDWTAVTEDGSLSAQFEHTILITEDGAEILTQC

SEQ ID NO: 46334 - protein, 369 aa, Oryza sativa
MSNLSEPSKEAASADDSSAVQKTGAWSNTLNILLQQASVYGVAAGYCLSASLLSIINKWAVMKFPYPGALTALQYFTSVVGVLLCGQLKLIEHDGLNLRTMWKFLPAAVMFYISIFTNSELLLHANVDTFIVFRSAVPIFVAIGETLYLHQPWPSLKTWLSLSTILGGSVIYVFTDNQFTVTAYTWAVAYLASMSIDFVYIKHVVMTIGLNTWGLVLYNNLEALMLFPLEMLLMGELNQMKGDSAKVTNWLSSDVILPVALSCLFGLSISFFGFSCRRAISATGFTVLGIVNKLLTVVINLLIWDKHASFVGTIGLLICMSGGVLYQQSTTKPKAPKAEPKEENDEEQQKLLEMQQGLESSSTQKQASS

SEQ ID NO: 46335 - protein, 435 aa, Oryza sativa
MTSRVLVSSSSSSSSAAAAAFLPRIPNPCANPSHRGAPPCGAALWRHHSGRAVTTAAAAAATGDHWGAEYHGGGGGRGGKSAAGPGVQCDVDVVSWRERRVFASVAVAADVDTVWRVITDYERLAEFIPNLVHSGRIPCPHQGRVWLEQRGLQQALYWHIEARVVLDLKEVPDAVNGRELHFSMVDGDFKKFEGKWSIRSGPRSSSAILLYEVNVIPRFNFPAIFLERIIRSDLPVNLGALACRAENIYLGNQRHGTAKFSGAGSRFHNFRNATTENDAIAPSKFKETPPSGLGGVLASPPSELNSKWGVYGNVCRLDRPCVVDEIHLRRFDGLLEHEGAHRFVFASITVKAPVREVWNILTAYEKLPEFVPNLAISRIIRRDNNKVRILQEGCKGLLYMVLHARVVMDLREKLEREISFEQLKVISTHLKENGA

SEQ ID NO: 46336 - protein, 98 aa, Oryza sativa
MVYFDSWDEFVSKSVELFRNHPDTVSPPPRSSPLLPSDPPSRLFFLPDLTFRFGVCIQDPLRCQVPALRREARAQGHRQPRGTRIELTFFFSGFVSFN

SEQ ID NO: 46337 - protein, 418 aa, Oryza sativa
MAAAAARWAPVVGLLGLLLLPFAPAPAGAATPARSPPSSASSAVFLLSGDVYPTGHYYVTMNIGDPAKPYFLDVDTGSDLTWLQCDAPCQSCNKVPHPLYRPTKNKLVPCANSICTALHSGSSPNKKCTTQQQCDYQIKYTDKASSLGVLVMDSFSLPLRNKSNVRPSLSFGCGYDQQVGKNGAAPATTDGLLGLGRGSVSLLSQLKQQGITKNVLGHCLSTSGGGFLFFGDDMVPTSRVTWVSMVRSTSGNYYSPGSATLYFDRRSLSTKPMEVVFDSGSTYTYFSAQPYQATISAIKGSLSKSLKQVSDPSLPLCWKGQKAFKSVSDVKKDFKSLQFIFGKNAVMDIPPENYLIITKNGNVCLGILDGSAAKLSFSIIGDITMQDQMVIYDNEKAQLGWIRGSCSRSPKSIMSSFP

SEQ ID NO: 46338 - protein, 193 aa, Oryza sativa
MALSPTGGEETDGARRERRSGGRRHGGGSSGDHVTASKIAHTCSGRRIRVSLHVDDPPAVSRLYIHDPPPRHRQPTMAGHLRPPTRRGRRRPPRLHPLPDPRPLCRPGLRRARTLSRRLLRLHRRRHRRLSPVAHAASPLLHRRLLRPGRGRILQAVPTPATTDHARREHRLPLLLWRRRPRVHGGGHQELPR

SEQ ID NO: 46339 - protein, 585 aa, Oryza sativa
MGFDVGVVAFNPEGWGPPDTAPAPASLGGGAAAASIPFAPFSRSDKLGRIADWTRNPAGPAALAAASRDSVFDFTSVDDSLAAAAEDSSFRLVDAKPPPRHPRFGPKWRFNQRPQLPQRRDEEVEARHREAEKERARRERHFQNNRSHHHPGFRGNQSSSAKSSVDIQPDWTMREQIPFANFTKLSFSVADQPEDLLLCGAVEYYDRAFDRVNPKAARRLERFKSRNFFKVTTTDDPVIRRLAEEDKATVFATDAILAALMCTPRSIHSWDIVVQRVGNKLFFDKRDGSQLDLLSVNETAQEQLPENKDDINSAHSLAVEATYINQNFSQQVLLRDGEKVTFDEPNPFASEGEEAASVGYRYRRWKLDDEISIVARCEVHAVNADPGGGRQFLTLNALNEFDPKITGVDWRQKLETQRGAVLATELKNNANKLARWTCQALLAGADMMKLGYVSRVHPRDHYNHAILTVMGYKPRDFATQINLNTSNMWGIVKSIVDICMKFEEGKYVLVKDPAKPQVRIYEVPSDAFENDYVEEPLPEEEQVRPPSDDVDATAEEMDAAAEAEANNAAASAGGEGEKSAEAAAA

SEQ ID NO: 46340 - protein, 230 aa, Oryza sativa
MGGIARRRGGGDQGGVAAAAGGDGEAAASGFSSGDSSATTTLRSPASSSLTDDGGEVTSWTSADGGGGGDYCSFSCSSESELELESDDDDDEEEEEMMQLDGGGHAAGGPLYELAAPLLAQLPLRTGLSKYYQGKSQSFTSLCNARCVQDLAKKTTPYITRMKLQLRRGHGVVDRLSNSRRAPGPCSKTMAKKATRCSSDRLLSRAREHKPLHSSSSTPAQQSKKELSRC

SEQ ID NO: 46341 - protein, 588 aa, Oryza sativa
MPPAPSQEQTKLAPEKQQHISGHGEQAVRYHGWKVMPYVIGNETCERLGTIGTTANLLVYLTTVFHIPSAAAATLLNVFSGTSNLAPLLGAFLCDAYLGRYATLAAASIASFLGMLVLTLTAAIPSLHPPPCASSSSTSCQGPTHRQLAALLASFAFLVVGAGGIRPCNLAFGADQFDPATAAGRRGIASFFNWYYFTFTIAMMVSATLIIYLQSNINWAIGLAVPTALMALSCALFFMGTRLYVRVRPEGSPFTSFAQVLVAAARKRRLPAPASPADDLFDPPHRSKLVAKIKHTDQFRWLDKAAVVTAEDAVVDGMSAAAANPWRLCTVQQVEEVKVLARMIPVWSSSIVYYVMLTQLGTYTVFQVMQSDRRVGMSGFEVPAGSMVVFNMVALTAWLPVYDRAVVPALRRVTGREEGISQLQRIGIGLALSVATMAVAVAVEQRRRGAGGGSSSSWAWMVPQQAMAGLSEAFAAIGLNELCYKESPESMRSVAGALSPLALAVASYASGAMVTAVERATGWLAQDIDKGRVDLFYLVVGAMSAANLAYFVVCALWYRSKNIADHGGVELLQTSSKHNADAPPAMAV

SEQ ID NO: 46342 - protein, 239 aa, Oryza sativa
MLMGLYWHRPTGEYRLLLYRIELPASERLVDVLIPGDRNACYVYTLGSGDLPRCIGWPEAEANGASVLLHGSLHWYKRIEDMILAFDITAESFRWMRSPFGKAVWRAFHGLFEINCMLGMYCCDDGATFVDIWVLEDYEREVWSLKYRVELPVLEIRRELDVKRDLYSVMVSSEDGDVLVLVNCKRAMLYIGTDGKLLASLPHDNDGLSITPVKLRASLVPHAFFPSLLDYVVNASPFV

SEQ ID NO: 46343 - protein, 333 aa, Oryza sativa; identical to SEQ ID NO: 33961

SEQ ID NO: 46344 - protein, 55 aa, Oryza sativa
MAWDSTSTTWLGEKQNSSIVHRLRVDVVNLFLVDSLLYVTMHCAPCCVMFTNLKE

SEQ ID NO: 46345 - protein, 895 aa, Oryza sativa
MQAYDLIEVYCELMVARMSIIDSQKTCPIDLKEAIASVIFASMRCSDVTELADVRKHFTSKYGKEFAAAALEVRPDSGVSRLVIEKLSAGAPDTQTKIKTLTSIAEEHNIKWEPKAFEEKLPKQNDDLLHVTSTYPGGNIPTRGSSASNSGMPTSQPAAPSHSYMESSNSHMSTAHSYSSAEVPDNRAPYVTANSNAFPQENRRGSDAPMSPRSQHGPNSFSHDTAGGSNVSRPYSQYGATVPDTDTASRREEFNHSRERKSSVSGSNWNIEFKDATSAAQAAAESAEMASIAARAAAQLASRGNLSAEQNTGAFESPAYTHETTPRKQQAEHLMKDGQRSSNEQSSGAYDPRLISSNDARKDGGRTETSRVGSQNMPTNSLGQSPPYSPHIHSDEYDMPTDPHRSHSPDPQYSDDSSEKESNFGRPEDHQFNLPGERLSEAQLGGHNIKDTESKHATFDQENTDNYYSNYSSSHGTFTHGSSTIWDSQNDKAGPDSSAVVFDQYDSDVGEENLLDPFSSKHTEEPTVEDHKGFSSADWGQQHRNESPVNHSSSTLFSGTEANRKDVSSPHSYDNVPPTFDSDGVSSDEEMTTGMHARSLRSHSRGSDFSESRENIISGKVVHDVNENIEDHVSMSRKNYLNSSGSNAFNKERYSESSPRSDYSWVDGELDRTKIRDLEEERVPHKLEGASSLTTGENKNQLFSLGRQTSTSSADYDEGDPGLNFGRLTPGLRNKLRQPPPYIKDSGNTSLHKVPTAIEKSVHSEEDTSFGNTRNTSTGMARSSFGADYNSELHDQNQSVGASVEARSTMRNYYGSEGDRGKLSEQSYNAPSSVMNKSSGGVNSSQDLYHEKPGAGARRGTTTKTAKSYFDSDDSERKHLKNCSVACSPQASDRL

SEQ ID NO: 46346 - protein, 251 aa, Oryza sativa
MLPAGGYPSAAAISFPDADVDDDSDDGDFTDAPLIDPSDPTFPNPASSSAAAAAMATPASAGGGSGSVGGVGSSSGGGERRPLFQRLWTEEDEIVILRGFAEFTAARGTAFASHQYDTDPFYEDMRGRLQLGFSKSQLVEKLRRLKRKYRNCVSRLRGSGSAFSFRSPHEQAIFEIARNIWRPTNKHGRDGDSDDEDATQVTPAPVPVNTSPNDHNANYSDNGGLGTPQIAGHATSAGCFRCRQELLDASV

SEQ ID NO: 46347 - protein, 591 aa, Oryza sativa
MCSVHEGAVAAREMAAAVLNALAPAATVAQLAGADAAGLVSAILQAVRAARRNRRECRLLARRAMMVGDLLRLLPPESETMRRPEVRRALDGLGGALRQALELVESCQESGAVRGLMTAGRQAEQFREVQGEINDYMLLFPVVSHIDITRRLDLIYGLLLPADSQPHQMPEDAPGSPGDHFEADVRNVEITVAEVIPFESNQTITEPFEFGEHHVAGHQEGLEELLSKVQRLKWLCWWSQHDSLERPSTYDLLKAATNNFSSKSKIASGGWATVYKAQMRNSLEIAIKVYPMGTGEKRVFSQYERELNLLTKLQHTNIIKLLGHCTGEWELILIYEYMPNGSLDKFIHGPNREVSFDWFSCFKIIQGIAEGLLYLHTYEAEICIVHRDLKPSNILLDSDMNAKIGDFGIAKTISPARQQDTYVSGTFGYIAPEYLRGGILSTKVDVYAYGVILLEIITGRRSCIPCLKDDEYVHLTEYAWDLWRTGRSAELLDAALRNEARIAEITSCIQIALLCVQKDPADRPSMLDVLAMLRDEKIVAAPKKPGDLLLGDETSVESGDLLLGEETSGETAHWFASSGATCSSTEFTVPR

SEQ ID NO: 46348 - protein, 295 aa, Oryza sativa
MELEAQVEAMKATISDLEAEAKFFESTAAEASEGLIEIREEYDEDTEINSSTLDASSSASGMPDKDREYTQIMARLDELEMEENDAGSTSEEDGEDDEDDEDDEEDAGPSEDDKEDEEEENILIDDNDHHNASLGASFSGSGGNDQSHESAQLKSALKKPGGREILKSASFAPSASTPHSVFPGQTSTINPGIQLPLKKAVSFQDDNRHTVGPSKSLPLPQGPKHSSPILQVSSDNPTSHDRKIMSSGQKAFTGSIIEHDDNISTLQPSKSAALQNPASSSSRPVSRFKMQKGGR

SEQ ID NO: 46349 - protein, 270 aa, Oryza sativa
MGTSCERCRRRDEQDYRNLDDSQKHFLLTMMGDFQHEMIIPKEFVQRLKGDIPGEIQLETRNRNSHTVRVDKTQEKVIFTEGWAQFVKTFDLQMGDSMMFRFNGNSQFDVIIVDQIGREKACSAVVDDSQNPNVQERRVDATETLNSSRAHSQPMPMQSTTETVNHSHARPCPMHTAVDCMPLSHAHPQPMPMQFPTETVNHCHAPTGPMEMPLENVALSHAHARPLQMQSQPTDRLTQVQRGNSSKGNMTTMSSSSMSSGYNSIIICIS

SEQ ID NO: 46350 - protein, 436 aa, Oryza sativa
MDVCPGEPSTSHASASGLSGVEMQIDRGQPSSRLLGSSSTSNHESSTARDDVQMPSLSNSVPIPATSQPSEHDGRHGMPMNSFTTSSGLDVHMILRNSEGGNHHHDLFSDSRSWELPFLQGWFMAQNHTGASPSIPIDVGSSRGSNRHHASRRHVVGSLRGVGSSLLGPQIDEAEVHAASLGVGSELTTSLLAAGAAELPCTVKLRIWRHDIKDPCVTLEPEACRLTISHAVLCSEMGAHFSPCGRFLVACVACLLPQTEGDRGSQLPVQYDSAGAGTSPTRHPLPSHRVIYELRVYSLEEATFGKVLTSRAIRAAHCLTSIQFSPTSEHILLAYGRRHNSMLRSIVMDGETGIPVYTILEVYRVSDMELVRVLPSAEDEVNVACFHPSPGGGLVYGTKEGKLRILQHNGADITSTGLNCFIEENMLEIQRYALEG

SEQ ID NO: 46351 - protein, 214 aa, Oryza sativa
MYLLLYIIVTYGILKYKFIFFTSAEINGSVDCEHGKEQPTNKRPRSESGTRPSSKACREKVRRDKLNERFLELGAVLEPGKTPKMDKSSILNDAIRVMAELRSEAQKLKESNESLQEKIKELKAEKNELRDEKQKLKAEKESLEQQIKFLNARPSFVPHPPVIPASAFTAPQGQAAGQKLMMPVIGYPGFPMWQFMPPSDVDTTDDTKSCPPVA

SEQ ID NO: 46352 - protein, 481 aa, Oryza sativa
MANRHGLRMDGDGVGGSMHVVMLPWLAFGHILPFAEFAKRVARQGHRVTLFSTPRNTRRLIDVPPSLAGRIRVVDIPLPRVEHLPEHAEATIDLPSNDLRPYLRRAYDEAFSRELSRLLQETGPSRPDWVLADYAAYWAPADASRHGVPCAFLSLFGAAALCFFGPAETLQGRGPYAKTEPAHLTAVPEYVPFPTTVAFRGNEARELFKPSLIPDESGVSESYRFSQSIEGCQLVAVRSNQEFEPEWLELLGELYQKPVIPIGMFPPPPPQDVAGHEETLRWLDRQEPNSVVYAAFGSEVKLTAEQLQRIALGLEASELPFIWAFRAPPDAGDGDGLPGGFKERVNGRGVVCRGWVPQVKFLAHASVGGFLTHAGWNSIAEGLANGVRLVLLPLMFEQGLNARQLAEKKVAVEVARDEDDGSFAANDIVDALRRVMVGEEGDEFGVKVKELAKVFGDDEVNDRYVRDFLKCLSEYKMQRQG

SEQ ID NO: 46353 - protein, 465 aa, Oryza sativa
MDPSPAVDPSPAVDPSPAAETRRRATGKGGKQRGGKQLGLKRPPPISVPATPPPAATSSSPAAPTAIPPRPPQSSPIFVPDSPNPSPAAPTSSLASGTSTARPPQPQGGGWGPTSTISPNFASFFGNQQDPNSCLVRGYPPGGFVNFIQQNCPPQPQQQGENFHFVGHNMGFNPISPQPPSAYGTPTPQATNQGTSTNIMIDEEDNNDDSRAAKKRWTHEEEERLASAWLNASKDSIHGNDKKGDTFWKEVTDEFNKKGNGKRRREINQLKVHWSRLKSAISEFNDYWSTVTQMHTSGYSDDMLEKEAQRLYANRFGKPFALVHWWKILKDEPKWCAQFESEKDKSEMDAVPEQQSRPIGREAAKSERNGKRKKENVMEGIVLLGDNVQKIIKVHEDRRVDREKATEAQIQISNATLLAAKEQKEAKMFDVYNTLLSKDTSNMSEDQMASHQRAIRKLEEKLFAD

SEQ ID NO: 46354 - protein, 427 aa, Oryza sativa
MVIGVMYPGMSFPLLVNKEKIGIFKVLGTLPMTTGQITSGTKIMIWKGSDEKTVGETLYPPILHPVIATPLQMKMVDDPALSNVVGRASKMIGNFMSYYTHLPHEATKGKMTFLLHGPCDKKAVVEGIGRTLGLPVASVDASSLIKDFPSDSVSQINTCIQRPESRDGPLLIFLDRFDELVPHNRCGSTVMTDITTTQLKLLLDDPWVIFGHRITILVVSVRWINLICPTILSRIRTRFYCGNDEKEGDWDGVGMSLLKLLETNKSIDPNSRWVVTNAILYGNTSLSKSDVTKLFAATQSFDSIVIDAMQVLKDFKNTGSKAVSDLFLRATARRPCIILIQQLDAINNETLISLILHEMNNMDRDLHVFASTRWWQLIHHMFLESRLFTRRVFCGVDSKKDECDFVGQALFEIQQRMGTASDKSTSS

SEQ ID NO: 46355 - protein, 323 aa, Oryza sativa
MTTSSWSGLLVISCMLLMSWAAAAVDMSPVRFDAAYMPLFGGDNLVPSPHARTVLLKLDRFTGSGFVSKSAYHHGFFSASIKLPHDYTAGVVVAFYLSNGDVFPGQHDELDFELLGNRRGHAWHVQTNMYGNGSTGRGREERYLLPFDPTAAPHSYAIAWTPAAVIFYIDAIPIRELVRCSSGDYPAKPMSVYATIWDGSAWATDGGRHKVDYAYAPFTAVFSDLVVTGGTDDDHCAAMGLMTSEVAVMTPAKRGSMRRFRSRHLTYSACYDTVRYNGTGVVFPECDESEQDNFHAWGESKRVINSRSSSSATYATGSGVRID

SEQ ID NO: 46356 - protein, 99 aa, Oryza sativa
MCAVENHQSFNKTKDIVWRQDLFEDSMVAAGLSVTESSTKLYISNLHYGVTKEDIQVAGSLRFALCMLESDSSTHIGNFQAHVLCSQLCFRNFFPRWVI

SEQ ID NO: 46357 - protein, 414 aa, Oryza sativa
MWAASCLASCCAACACEACRTAVGSIGRRSARIAYCGLFALSLFASWALREVAAPLLQSIPWINHFHKTPDREWFETDAVLRVSLGNFVFFTILAIIMAGIKDQKDPRDKIHHGGWMAKIFCWVVIVFLMFFVPNGVVSFYESISKFGSGLFLLVQVVLLLDFVHGWNENWVAKDEQFWYMALLVVSVVCYIVTFSFSGLLFHWFAPSGHDCGINLFFIVFTLILVFVFAIVALHPKINGSLLPASVIALYCTYLCYSGLSSEPRDYECNGLHNHSKAVSTGSLSLGLLTTILSVVYSAVRAGSSATVLSAPDSPRAGADKPLLPFSKADEEAEKKDVPRPVTYSYSFFHLIFSLASMYSAMLLTGWSTSVGESGKLVDVGWPSVWVRIATQWATAGLYIWSLVAPLLFPDREF

SEQ ID NO: 46358 - protein, 403 aa, Oryza sativa
MEGWVATVAYTGTALACAAAATVVALRLVYRHLLHYAEPTHQRFIVRIILMVPVYAVMSFLSLVLPGSAIYFNSIREIYDAWVIYNFFSLCLAWVGGPGAVVVSLTGRSLKPSWFMMTCCFSAVPLDGRFIRRCKQGCLQFVILKPILVVITFILYAKGKYEDGNFSVNQSYLYITIIYTISYSMALFALALFYVACRDLLQPYNPVPKFIIIKSVVFLTYWQGVLVFLAAKSRFIKNAEEAAYLQNFVLCVEMLIAAIGHQFAFSYKEYAGSNARPFGGFRGSLFHALKFNDFYHDTVHQFAPTYHEYVLYSNEEEDEPTKYSSASVVSTVQDIQLVEVSVVDSKAPLASVILTHEADKTMPSHGMEETVAPSEPYDLSNLVDVELSNYSAEVPAIPDVGKQ

SEQ ID NO: 46359 - protein, 584 aa, Oryza sativa
MAACAASTATIDWELLEAAISGDTRSMKMKYMDSHDPTILLGKNPQGNTCLHISSMCGHLEFCKDVLSLPQDPTVKKKLLTTVNVMNETPLLTAITSGHVTLAAFLLKYCHEQGFSEVILKQDKHKCNALHHAICNGHKDLALELIATQPALSKDVNKYGESPMYIALMMRDSKFTDIFEKLLGIDGSSHSGTYGYNALHAAIRNGNPDIAKRIIVERPNLATEENKDGNTPIQLAVRWGKIDMLRVLLKHDRSQGYVINRKNGYPLLLSAAHRGHVAVAREIIKYCPDAPYCKKDGWTCLHKAVKSGNMEFVEFILGEPRLQKLVNMRSSKGKTALHYAIQKCDPKIVAALLDKKIDLTILGSDGNAAAWELRDALDSAKTLNWNEVSMLMIKADPPNAKSVYNLHEEAKEKLINASRKDARSLTQTYTSNTSLVAILIATITFAAAFTLPGGYSSDAGSQGLPIMARNVAFKAFLISDTLAMCASLAVAFICIIARWEDLDFLLYYRSFTKKLMWFAYMATTTAFATGLYTVLAPRLLWLAVGICSVAVLVPILTKVLGEWPVLKLRIRLGQAFKSEFLDMV

SEQ ID NO: 46360 - protein, 669 aa, Oryza sativa
MDVENSMDDDHFQQNMGNGDGMNVEGGSMEIITRVELELAFASEKLLNLEMLVMEIARKATDFEPPTLEDESVSSETAESAFELDILYGFLDAEVGELDDMISTLETDIQNVEHMVCQDESGGKIKARLDAAMVSLKQMKELVSDIRKESAKFEKAIEFPHDKEGITGDAGYENGIVSSHTSMRTEDQRRNVLQMLEQSIASELDLEKKLSESRCIIEELKLKLHHHDQEKYFLEESIESLCGKTFAAENASEVLLGTSKELVDKVSTVECHLSASRCREGDLESKLGESLMGLSSLQVNAENIQEGSQHSGGTETHPSPELPSLQDKVKELEKQLRESDSQLQLAKASAETFQEEQNVLHAEISTLENIIKSLKEDVSRAESRAQNAELRCMQLTEANIELNGELNSLKSHGSEKTSLLERKLKESHTQLEHAKASLDATVEQQSMLRSTMSDMEHMIDDLKGKVLKAETRAENAESKCTLLTDTNLELSEELSFLRGRAESLENSLHEANHVKMSTVKDIGIRTKIITDLVTKLALERERLHQQISLLTKKNKILAQKCKGSVKDDTQLSKNVTGKDVELHSTKLAEEIVPDFSSSQTKAEKPVDPSNEEEKTRSSEDDDSGGEGTAEAVRTIQPSVLNWKYITVAFLILLVAVFIYLPLPEESSSV

SEQ ID NO: 46361 - protein, 159 aa, Oryza sativa
MGGSQRWWRGRGSGEGVFPSPPSLRSGWEACSGGASEGAAAGWEESDGGGAAAASLPSPPLPLSDLDGRPVAVTRQWERPWDGRSPTAVSVPSPPLPLSDPDGKGSGGASEGAAAGWEETAACGFDENSSSTVASATSNVTSNDDRQRRCLHAENAVRS

SEQ ID NO: 46362 - protein, 350 aa, Oryza sativa
MAEASSSSAAAVPPLDPEAIAAVAEAAPPEEMTLVAKWKGNDYTVRVVGDDTLGELKRRICEVTGVLPKRQKLLYPKFKLNECKDSELISSIPFKPNVKINMIGTVEDEIFVDKEDDPEILNDYEIGQNEVTAIKDKDVYKQKLKRRASQYKIKILNPCRKGKKLLVLDIDFTLFDHRSAAENPIELMRPYLHEFLSAAYSEYDIMIWSATSMKWVGMKMDQLGVLGNPNYKITALMDHLAMITVQSENLSEKKTFDCKPLGVIWAQFPEYNETNTIMFDDLRRNFVMNPQNGLVIKPYKRTHSNRGTDQELVKLTQYLLTIAELEDLSKLDHSAWESFTEENAKRRRHR

SEQ ID NO: 46363 - protein, 959 aa, Oryza sativa
MGTYVRNYSDDEFSVAGEKPDVEFMDYQNDGSIQDYSLEDAPVVVTVPFPFIDGKPKSVLVGETSADTISIENTSSEPVNLWSVRIFSSNPEDSYVLSMMKPPLNDTDEEAKRNFLGLTSVEDRTLQPGQTLTIWLSCTPKDIGLHTSIVHVDIGDEKIERVAFLLADDNVSQALFSDKPYSRKHTQKKKFECSSFVPGCRPTRQHSQGFKFKLPQFAIPADIRELIQSKQRPDVLSEELNMTNYAKFFSTLLVMEEINLEEEMRSYDMERILMRRRGLEFLSLEVPGLAEKRPSLVHGDFIFVRHAGSDARPYQGFIHKVEADEIFLKFDNQFHLAHRDRNQYDVSFTYNRLNMRRLYKAIHEAELLGPDILFPCRSSSGSVKKGPFKPLNPHINTEQADVVATILGCRGVAPYVIYGPPGTGKTMTLVESILQLYTAKRRANVLICAASNSAADHVLAKLLQASYLIRPSDIFRLNAASRQYEDVDPDFIRFCFFQDMVFKCPPLQALLRYKIVISTYMSSSMLQSEGIRRGHFTHIFLDEAGQASEPEAMVPLSGLCGRDTVVVLAGDPMQLGPVVYCKQAEKDGLGKSYLQRLLFEYEQYSTGDPNYVTKLVRNYRCHPAILELPSELFYGGELIACKEDEVSSIYDSIDLPNKSFPVLFVGIQGCDEREGNDPSWFNRIEASKVVNIIRNLTRGGDVREADIGVITPYRQQVVKIKKALETFEMPDLKVGSVEQFQGQEREIIIISTVRSTVKHNEFDKFFNLGFLSNHRRFNVAITRAKSLLIIIGNPHIITKDRHWDRLLRYCADNGSYQGCPLPPPEETQVSGFRGSQDEPARWGYNQQQESSANYSYKQDPHDSGSEHVNGLPSTENEVEWSEKTLNEEHQPCSSAAEADSPEFMLKQKAEEEEHVEQDGVQPEQCPAKDNKLQDAYAAKYSFPPEWCDVSNIPATGWDD

SEQ ID NO: 46364 - protein, 293 aa, Oryza sativa
MATATATAAAAAPAAVPALVSPLSRRAFFPLPRRAGPKSLRVFASAARRRGLVVVAADAAAAAGGAEFSDEENPYEILGITPLDSFDHMKLAYKRKHKEADENGDQYYLSKLEKAYDTVMMQQLQYRKKGVTYGSVQVSKDIKYADDQPIVPWGPRSSKSTVKDMRINLGISAAIVVWIAIMGNADWKPLQFLCFAFFYRILQKLRATEPPITPIYNEYGEVEGRGIRMAKRVVRALGLIFGCVFAASLGYTAAVNVIEFSWQYTPRIVYYYQELIVTAATAALLYITASYYR

SEQ ID NO: 46365 - protein, 417 aa, Oryza sativa
MARASSSSSPPSPRLLLLLLVAVAATLLPEAAALGNFTAESRGARWRSRRARRRAFENGLGRTPQMGWNSWNHFYCGINEQIIRETADALVNTGLAKLGYQYVNIDDCWAEYSRDSQGNFVPNRQTFPSGIKALADYVHAKGLKLGIYSDAGSQTCSNKMPGSLDHEEQDVKTFASWGVDYLKYDNCNDAGRSVMERYTRMSNAMKTYGKNIFFSLCEWGKENPATWAGRMGNSWRTTGDIADNWGSMTSRADENDQWAAYAGPGGWNDPDMLEVGNGGMSEAEYRSHFSIWALAKAPLLIGCDVRSMSQQTKNILSNSEVIAVNQDSLGVRGKKVQSDNGLEVWAGPLSNNRKAVVLWNRQSYQATITAHWSNIGLAGSVAVTARDLWAHSSFAAQGQISASVAPHDCKMYVLTPN

SEQ ID NO: 46366 - protein, 769 aa, Oryza sativa
MTVDFREFFWGERNAGFELLYRNCKQSQATAKELVDFVRERSQIEENYSKLLGKLATSRLLGSGSSVAPLWAVLRSSTEKAASVHSQLAHQLSDSVKEIQRYADEQHKSQKKIKDEEAPTMEAVQTLQQNTLLLAKAREAYDSRKSETNDLKRKKALEDYRTQSERHELARVNFIQKMSEACYRFQVLEENHLSAVKSFIDNYIHTLINSYAMCASMCQDLQTNVDALSIEALLDRFCKERGTGRDKPEPHKNLQDTPPLSSNSLHLAQLHSQSSEDVFRSGHTNSTGSIPGSTSAATMDSQQLNHMATMPHQSSQSRLSEIFDTVRGKHRSTSSRSNDNSSANDPLSGIGSTANLNSSNVMMPTSGTLVDRDGFSIPPPPSSRSSTLLKSNQDSSSDDSSDDDTESRRKIKIEIKPISEASYATQVQPARLVSPPARTVISPEFNGNRTPPTLAELPKSIIPRPPSRRSLERSSPSMTRAESVTSIGSVSTGWSRGPSPLTLVYGDTIPIAVAFQEVVHASFRGAEEGLCQVRIFGDMKMCFPAGILNVLISHPNIPQLTFSLGNLPLDNLTPNSLLVSSVEEQPGTFRMDMNELLSQLKRLHDAHPGQSYFNVDLMKYSLAGGPGATSAPLHLVTYWNCDSTKSDLKVDYLYNATDKWAQRPCNAIITVTLPPSAAISNVHSKPPCSWNSASKKASWKVVNIKAGSILARFQHDGPLHADPPGEVAAQFSIGDACFSDASFTLAPACGYRVSLIKKKIISGRYTAVM

SEQ ID NO: 46367 - protein, 285 aa, Oryza sativa
MLAASARRVAAAAAASSSHSRLANQLAHALNPQRWIHDRNKKAMELVAKGWSALQEVDRVIDYADRNDKRLIPLLRGAKENFELALEIDNMNTHARLWLAKMHFKYHVPGACKAIGAALLVEAANMGDPDAQYELGCHLRIENDYVHSDQQAFYYIEKAVDQLHPGALYLLGAVYLTGDCVKRDIASAMWCFHRASEKGHSGAAIAYGSLLLKGAEVPEVITRFNSGKSPSTGKMRKRPIQQDPVKLAKEQFQIAAEAGCDLGLRWLKRLGDYEKQQEQPKQIQQ

SEQ ID NO: 46368 - protein, 222 aa, Oryza sativa
MATYLQSAGLTAATASTSRLLRPTPRRLLLLVAACSTGGRRSACLSVGLAAAAATIFQHHPACAATDDEPANNGWWLTEFPLPVPKIVNKELNNGETGSRTFVRNGIYIADIGPSYAAHAYRLRSTAFDLLALEDLLGNNADRANYVTKYLRLKSTFMYFDFDKLISAASDDQRPPLLDLATRLFDSFERLQKACGTKDDTQIGSSYADTKIILQEVMAKMA

SEQ ID NO: 46369 - protein, 393 aa, Oryza sativa
MKPKNGGAAADRRLPPRWILLCAFSFGLGMLFSDQFGSVPEWQKPLAAQRRVQDRKLQILDEDFVAKPKPTDDRDVMSEVTKTHEAIQYLDKSIATLQMELAGKRSTLELLGNGNGISQQRKKAFVVIGINTAFSSRKRRDSVRQTWMPQGEELKKLEEEKGIIIRFMIGHSATSNNVLDKEIDAEDAAHHDFLRLDHVEGYHELSAKTKIFFSTAVALWDADFYVKVDDDVHVNLGMLITTLGRHKLKPRVYIGCMKSGPVLADKNVKYHEPEFWKFGEDGNKYFRHATGQIYAISKDLATYISINRPILHKYANEDVSLGAWFIGLDVEHIDDRDMCCGTPPDCEWKAQAGNICVASFDWKCSGVCNPVERLKYVHSRCSEGDDAIWSASF

SEQ ID NO: 46370 - protein, 372 aa, Oryza sativa
MEAKSGEASVAPVAVATEATAATVSFQPQAAVAEQGSSSGGVLVPPPPMAAGGGGVVVAAAPVAGVVKVGKKRGRPRKYGPDGSLIRPLNATPISASVPMAASAVGPYTPASAVGAAMKRGRGRPLDFASTAKLHHHHQHQHHHQQQQFGFHFDSIGEMVACSAGANFTPHIITVAPGEDVTMKVISFSQQGPRAICILSANGVISNVTLRQPDSSGGTLTYEGRFELLSLSGSFMPTENSGTRSRSGGMSVSLASPDGRVVGGGVAGLLVAASPVQIVVGSFLPSYQMEQKNKKPRVEAAPALAQTPPAVPISSTDTHSSEQGQHSSVAPRTTNIVTSAYNPDQSWASPAQSIPDSARTPSGDVKVTASGA

SEQ ID NO: 46371 - protein, 113 aa, Oryza sativa
MAEAVLLALTKISDALADEITKELIVKLSEKVNNLKDLDEKIEQMRKQLTTMNNVILQMGMIYLTDEVVKGWIGEVRKVAYRVEDVMDKYLNYSMQMAEEWFLKKYFIKGSHP

SEQ ID NO: 46372 - protein, 82 aa, Oryza sativa
MRAPPARRGGSRRRRSTRAGATRRRPRRRSGCRRTGRRCTAACSATAPPTGSPTPADHRLLAAASPPAAAAVARLIRLSQLS

SEQ ID NO: 46373 - protein, 134 aa, Oryza sativa
MAAVPCGESFPCAAILRLRLRRYWSGRNMDLLVLSASDVTPSPPQTSPASLIPSRSSLLSHAGQHTEVSPSTPSAARAGITSKRMQATIKPNRICGWFCFSSASVVAIAGCHAQHVTIDDGWISCLLCCVVSSE

SEQ ID NO: 46374 - protein, 552 aa, Oryza sativa
MATKQQDASTSGAAMSMKEYLKRYQSDDAQGKAKKKKKKKPKPAAAVGGGVLIVDEDPTWHKPVQIEEEPASSGDERPLVDEDIEVKRMRRLEAIRAARPYNAIAEDGSGWVTVAAPEDSDGGLTGRRRRNDTPSPERGGAGRKDLSPPRRRQRQDTPSPDPRDAAGKDLSPPRQRRRRQDTPSPKGSEVAGGHDDLSPPRKSRQQRDPSPPRRLSRHDSKESQDISPPRRRTRHDSEEPQDLSPPRREGRHDSEEPKDLLPPWRRVRHDSEEPKDLSPPRRRTRHDSEEPEDLSPPRRRTRHDSHEPKDKLPPLKRQALGDGDISPPRKGRKEVAPKEVRKAGLMTAEEVKEDIRKIKEDERLKFAAQDPSVIGKGAKAVFRDKQGKRISEEDMRKAKEDTKPKEIHIEWGKGLVQKREAEARLQELESEKSKPFARTRDDPELDTMLKNRIRWGDPMAHLVKRNDTDLLLEDLGDDEKMKESGFIVPQNIPSHSWLKRGVDPPPNRYGIKPGRHWDGVDRSNGFEKDMFKLKNEKQATEQEAYLWSVADM

SEQ ID NO: 46375 - protein, 103 aa, Oryza sativa
MNWMKCCATTLRATTVSTGRAAQCTSRGSARSTRTSSCRSPRWTATSSTMFRSLRGPSGRGFLPAHWRQRGTLIPPPPSWMFREWDLRISQRLRGSLSTECRR

SEQ ID NO: 46376 - protein, 330 aa, Oryza sativa
MGGSEYDDDWELPSADITVVLCGKLGCGKSATGNSIVGREAFVSEYSHASVTSTCQLASTALKDGRTLNVIDTPGLFEMTITSEDAGKEIVKCMSMAKDGIHAVLMVFSATSRFTREDSSTIETIKEFFGEKIVDHMILVFTYGDLVGENKLKSMLNNAPEYLQKTVELCKNRVVLFDNMTKDRWLQEKQLENLLDVVDSVNTNNGGKPFSDQMLACIKEAHAREQEVHDAIGYTEEQISELKKEIQRTRDEQLANITNMVEEKLNITVDKLQQQLMEEQNARLEAERLAAEARLRSDEEIRKLKKRLEKAQQENEEFRKMASQHKCSIL

SEQ ID NO: 46377 - protein, 83 aa, Oryza sativa
MVAALSNMMLCSMETKIGFSFMLTEAMNHPNTNLSMAIMHLFNSDSISYVIYISEITEIKLLCACVTKYLLFNFPSTHYSIHQ

SEQ ID NO: 46378 - protein, 152 aa, Oryza sativa
MRRRSSAWRRRRRAVWGARVRGAGGGGAGGEDALRGARGRGGREQGGDQGGVPASGEGGAPGRRRHGGRGLHTAPRRVRHARRPRRARAVRPRHGRPGGVGVPAGARVVVPAADVGDGPVLVGQKHNSGAPCPTAPRSPPPELRRARRFAGE

SEQ ID NO: 46379 - protein, 182 aa, Oryza sativa
MAGQQPQQQGPPEDDFFDQFFSLTSSFPGAAPGGRAAGDQPFSLALSLDAAAAAEASGSGKRLGVGDDAEGGGSKADRETVQLTGLFPPVFGGGGVQPPNLRPTPPTQVLCCSSGLCLSSKSAELVLIFVVFGRPYGEFFRCSTRSSRSRAEQPSGRSRRRRGRRCERGVGRRPTPTASRRG

SEQ ID NO: 46380 - protein, 458 aa, Oryza sativa
MYGCVIGVQRGRTVEVVDTSDILLDTDPGTLDRDLLKKKLETYKKAFPGLAILGWYSIDTHVTNTDMETNQALMDASGTTFYLLFNPAMNLSLKDLPVTIYEKVHSTNRSPTPLIFVQGKYKTETVEAERISLDHTCPVVSDVSVPPLVGKGQHANIMQTSGFKLMLFEIPSGFAMFEVSQELIARPKDIWARFAYQDDITNVIVTLGSIQIHNKSVARDIIVGPGDELKEFILSFCTHNYLIVQDVELKDVIEKKLNIYCYCNPTVVGELTWGLNYVLHKLLPQEQSLTHEPYLPLSKAMSKQIKEYGFKISPREIDREFLRAMSFLNYLGYMSERYSLLLDHLFGQYRKNNMSDIEFAKSIASHLHSSEGIVPRDERYTRAEIMEFIDFIIAAPENRSRTLSFLRRIEAASIDDSPPPPSLSGGMGVSLLKRLRLDWITVCCLGCAVALYPFYRRV

SEQ ID NO: 46381 - protein, 313 aa, Oryza sativa
MAADSSMGFHQGITASMYNHHMLSFQSNSDLGGGAGAAAGMVMAPRSMNGTSSSAGLFVSPNTGVLGNASVAGPSRSSSGDAFSSTVAPKYKFVTGSPSDWNDRELNTLKEGLVRYAREPNIMKYIKIAAMLPNRTVRDVALRCWWATSKDRRKKPDGFYTGKKIRDMKPIQDKMVASASMANFHLAPANTVTPFSISMQHTNQQCQVPKEEVPVVDSATQHLLEENNHLLNQIATNIETFKTGENTDLFFRTNNNFKNILSRMSETPGIMGQMPQLPVQVNEDHLSSLLQLDRMVPSYGVTQTSHMKQEPRS

SEQ ID NO: 46382 - protein, 915 aa, Oryza sativa
MRSLAVASPLPPAAAVRRRPRASASGREVISQCWKCEINQDQPLGNSLRIGHSQGSLQRHGSRNLLAAAAAISIEQAEVSTYLPKGDMWSVHKFGGTCMGTPQRIQNVADIVLGDSSERKLIIVSAMSKVTDMMFNLVHKAQSRDNSYVTALDEVFNKHMAAAKELLDGEDLARFLAQLHSDISNLRAMLRAIFIAGHATESFSDFVVGHGELWSAQMLSYAIKKSGVPCSWMDTREVLVVKPSGSNQVDPDYLESEKRLQKWFSRQPAEIIIATGFIASTAENIPTTLKRDGSDFSASIIGSLVRACQVTIWTDVDGVFSADPRKVSEAVILSTLSYQEAWEMSYFGANVLHPRTIIPVMKDNIPIVIRNMFNLSAPGTTICKQPANENADLDACVKSFATIDKLALVNVEGTGMAGVPGTASAIFSAAKDVGANVIMISQASSEHSVCFAVPEKEVAAVSTALHVRFREALAAGRLSKVEVIRGCSILAAVGLRMASTPGVSAILFDALAKANINVRAIAQGCSEYNITVVLKQEDCVRALRAVHSRFFLSKTTLAVGIIGPGLIGGTLLDQLKDQAAVLKENMNIDLRVIGISGSRTMHLSDIGVDLNQWKELLRKEAEPADLDSFVRHLSENHVFPNKVLVDCTADTYVACHYYDWLKKGIHVITPNKKANSGPLDRYLKLRTLQRASYTHYFYEATVGAGLPIISTLRGLLETGDKILRIEGIFSGTLSYIFNNFEGTRTFSNVVAEAKEAGYTEPDPRDDLSGTDVARKVIILARESGLRLELSDIPVKSLVPEALRSCSSADEFMQKLPSFDQDWDRQRDEAEAAGEVLRYVGVVDVANRKGRVELQRYKRDHPFAQLSGSDNIIAFTTSRYKEQPLIVRGPGAGAEVTAGGVFCDILRLASYLGAPS

SEQ ID NO: 46383 - protein, 303 aa, Oryza sativa
MSGGQDLQLPPGFRFHPTDEELVMHYLCRRCAGLPIAVPIIAEIDLYKFDPWQLPRMALYGEKEWYFFSPRDRKYPNGSRPNRAAGSGYWKATGADKPVGSPKPVAIKKALVFYAGKAPKGEKTNWIMHEYRLADVDRSARKKNSLRLDDWVLCRIYNKKGGLEKPPAAAVAAAGMVSSGGGVQRKPMVGVNAAVSSPPEQKPVVAGPAFPDLAAYYDRPSDSMPRLHADSSCSEQVLSPEFACEVQSQPKISEWERTFATVGPINPAASILDPAGSGGLGGLGGGGSDPLLQDILMYWGKPF

SEQ ID NO: 46384 - protein, 234 aa, Oryza sativa
MRGSDHHQDVVAAPRGGGGGGDDGQAHDMVMPGFRFHPTEEELIEFYLRRKVEGKRFNIELIAFVDLYRYDPWDLPALASIGDKEWFFYVPRDRKYRNGDRPNRVTPSGYWKATGADRMVKVEGDRPIGLKKTLVFYVGKAPKGLRSSWIMNEYRLPHGDADRYQKEISLCRVYKRPGIEDNFHLTGTTTKSSGSKAAAAMGKKHAAANRTSSTAAAAAPRLAPMFDGGGGGHH

SEQ ID NO: 46385 - protein, 334 aa, Oryza sativa
MREHLKLRRAFTSSCGQLVFENIHDEERFKSWRQGMTGYPLVDAGMRELWATGWTHNRIRVIISSFAVKFLLIPWTWGMKYFWDVLLDADLESDILGWQYISGSLPDGHELSRLDNPEVQGQKYDPDGVYVRTWIPELARMPTEWIHHPWDAPSCILEVAGVELGFNYPKPIVDLHIARECLDDSISTMWQLDTAEKLAELDGEVVEDNLSNIKTFDIPKVVLRETSPCALPIDQRVPHASSKDHNLKSKVLKASNRSSICVDMIRSSKMEATSSVANSPVSRKRSFCETAFHVPSYSSSAEVHSHIQDHGGSLVGPSRYLLQEAGRNYVDEPT

SEQ ID NO: 46386 - protein, 429 aa, Oryza sativa
MTGGSGVVVLDNGGGLLKAGFGGDMNPTAVVPNCMAKPPGSKKWLVADQLQAQDVDVTGMTLRRPIDRGYLINQEVQREVWERVIRNLLQVDPNNSSLLLVEPQFNPPALQHATDELVFEELGFKSLCVADAPSLVHLYEASRQPSLFRAQCSLVVDCGFSFTHASPVLQNFTLNYAVRRMDLGGKALTNYLKELISYRSLNVMDETLLIDDAKEKLCFVSLDVPGDLRLARLSSNDNPFRCSYILPDGITYKKGFVKDLDEACRYSSLPANGESVRKDSSDSDRSKFEDKKKPELSQNEFVLTNERFLVPEMLFHPIDLGMNQAWLAECIVRAIQACHPHLQPVLFERIILTGGSTLFPRFTERLEKELRPLVPDDYQVKIIAQEDPILGAWRGGSLLAHRPDFESMCITKSEYEEMGSMRCRRRFFH

SEQ ID NO: 46387 - protein, 341 aa, Oryza sativa
MNSQGFGPGGSPKSFRYPRADFDLESGIARKGLRKPKNHDAPGLLTSTLMKIRYFYEAHPVAVAFILLSFGLSVLILLSVYETRFRMMRGSSGEVGEYPLPELRNLVMVAGHSIYTSESCGKIDREDSWFLEPYQKHPGQAATFLAHIKEGVGIAARDEKALLLFSGGETRKDAGPRSEAQSYWTIADSKGWFGNDESVRRRALTEEHARDSFENLLFSVCRFRELTGSYPQNITVVSYDFKEERFAQLHRSALGFPEGRFFFLGTTATLTARESAVKGEAAVRSQFQEDPYGCLGSLHMKRLKRDPFHRAIPYPNGCPELKGLFSYCGLVPYPGQLPWTQ

SEQ ID NO: 46388 - protein, 271 aa, Oryza sativa
MIKTLMHVISYDVCNDLRELLHTKSRREETYDKLQSVLGDSLTSCEIESATEEMSSCLQASTLLPHSAVEEMFNVEVVEEQSRSCGGLSVAMDNSLSPAHTLIQIQCGDHKGLVYDIMRTLKDCNIQISYGRFYASQNGSCEVDLFAVQSDGKKIVDQHKQRALCCRLRTELHRPLRVALVNRGPDTELLVANPVEVSGKGRPLVFYDITLALKKLHKRIFLAEIGRHVVGDREWEVYRVHLGEGDHSSLRSKIVDGVTNMLMGWDDTPPS

SEQ ID NO: 46389 - protein, 126 aa, Oryza sativa
MAMAMNSVLVLMLGLAMAATSSAAVYKVGDTSGWTILGNVNYTDWAVKKTFHVGDTIEFKYPQGIHNVVEVKKADYDSCTNSSPIATHTSGDDKIAIKAAGHRFFICGLQGRRHLRLDHPRQCQLH

SEQ ID NO: 46390 - protein, 491 aa, Oryza sativa
MASKLPDLGGGGVEDGGGKKWPGFVQFFFVLSVVLCVLLYAPRFIVLTPTYGLDFFPQPPPNVTTSPAGVVGDHNAGEVVVLDNQLRSPCSSLAGDTICCDRSDFNTDVCFMAGDVRTDPSSLSLLLFPKQPPAANATVEERIRPYTRKWEALIMSRVEEVRLRMAPPEEEPGHRCDVRHDAPLLVMTAGGYTGNLFHAFSDGFVPAWLTVQHLRRRVVLGVLSYNPWWAGTYGEIISGLSDYHVVDLLHDKRTHCFPGAIVGTRFHGILSVDPARLRDNKTIVDFHDLLAGVYETAGDTVVVDDVTQPAPRRPRLGIVSRRGTRVIENQAAVARLARSVGFDVDILETANGLPLPASYASVSACDVLVGVHGADLTKLLFLRPGAALVQIAPLGVAPIARGCYAEASARMGLHYEQYDAEGHESSLSRKYGLRDVVVSDPEAAKRDKGWGFVARVYLGGQNVTLDLSRFRHTLTRLHARALRVRSLHPAP

SEQ ID NO: 46391 - protein, 742 aa, Oryza sativa
MPMIHDLLIELRKINPWWICLASKGMGDSKEFAGELFVALARRRNLEPEDGITKEQLKEFWEEMTDQNFDSRLRIFFDMCDKNGDGMLTEDEVKEVIILSASANKLAKLKGHAATYASLIMEELDPDDRGYIEIWQLETLLRGMVSAQAAPEKMKRTTSSLARTMIPSRYRSPLKRHVSRTVDFVHENWKRIWLVALWLAVNVGLFAYKFEQYERRAAFQVMGHCVCVAKGAAEVLKLNMALILLPVCRNALTTLRSTALSHVIPFDDNINFHKVIAATIAAATAVHTLAHVTCDFPRLINCPSDKFMATLGPNFGYRQPTYADLLESAPGVTGILMIIIMSFSFTLATHSFRRSVVKLPSPLHHLAGFNAFWYAHHLLVLAYVLLVVHSYFIFLTREWYKKTTWMYLIVPVLFYACERTIRKVRENNYRVSIVKAAIYPGNVLSLHMKKPPGFKYKSGMYLFVKCPDVSPFEWHPFSITSAPGDDYLSVHIRTLGDWTTELRNLFGKACEAQVTSKKATLSRLETTVVADAQTEDTRFPKVLIDGPYGAPAQNYKKYDILLLIGLGIGATPFISILKDLLNNIKSNEEVESIHGSEIGSFKNNGPGRAYFYWVTREQGSFEWFKGVMDDVAESDHNNIIEMHNYLTSVYEEGDARSALIAMVQSLQHAKNGVDIVSGSRIRTHFARPNWRKVFSDLANAHKNSRIGVFYCGSPTLTKQLKDLSKEFSQTTTTRFHFHKENF

SEQ ID NO: 46392 - protein, 522 aa, Oryza sativa
MDAVAGAGQLVGLAAATLLTAAFLVAVKMGWRRRRRQREVAPEGSCRVVGGDGGDRTDIVIVGAGVAGSALAYTLGKDGRRVHVIERDMTEPDRIVGELLQPGGYLKLMELGLEDCVEEIDAQRVLGYALLQDGRNTKLSYPLEKFHSDVAGRSFHNGRFIQKMRQKAASLPNVHLEQGTVTSLLEEGGTVKGVQYKTKSGEELKAYAPLTIVCDGCFSNLRRVLCSPKVDVPSCFVGLVLENCQLPHPNHGHVILANPSPILCYPISSTEIRCLVDIPGQKVPSMATGEMAKYLKTVVAPQIPPELHDSFIAAIDKGSIRTMPNRSMPAAPLPTPGALLMGDAFNMRHPLTGGGMTVAFSDIVVLRNLLKPLGNLHDAPSLCKYLESFYTLRKPVASTINTLAGALYKVFCASTDQAKNEMREACFDYLSLGGVFSNGPIALLSGLNPRPLSLVAHFFAVAIYGVGRLMLPVPSPKRMWIGARLVSGACGIIFPIIKAEGVRQMFFPATVPAYYRAPPPME

SEQ ID NO: 46393 - protein, 55 aa, Oryza sativa
MDGAQSCISLICLLLTPYFSPPPLLGCSLLTNWLELICMHLLPWLWSCFECLTKV

SEQ ID NO: 46394 - protein, 54 aa, Oryza sativa
MAPVSEASPLVHQDGGIIASFAVYAGAPCCSARGRMAETDGDDDDDDYDCAPAA

SEQ ID NO: 46395 - protein, 261 aa, Oryza sativa
MAAATEKTAEEIRRELQELQRQHREISERLRDPRGLRRGAPAAAGPGGPRPLRGFPRPAVDLVDQSAPKRRILSAVVKVEDTEAKEDVKKEAEAEGPEGGSAAAEGGERRDGGFRRDGSQRMPRREFDMSLPEPLPREFPKDEDQSLVKRNKRMLGKLLVGTLEKFQQEDKKLSNTEAYMRRSEVQRKADQKAREESERLRQQEREQAIEKRKRDMMLRARVAAKAEEKRLELLYMQWAEHHKKLSNFLRLFLFLVQKYPY

SEQ ID NO: 46396 - protein, 194 aa, Oryza sativa
MTFLHAAMVLIMYHKWYLGLVIFSAAVSIKMNVLLFAPSLLLLMLKAMSIKGVFFALLGAAALQVLLGMPFLLSHPVEYISRAFNLGRVFIHFWSVNFKFVPEKFFVSKELAVALLVLHLTTLLVFAHYKWLKHEGGLFHFLHSRFKDATSIGQLIFAKPKLSTLNKEHIVTVMFVGNFIGIVCARSLHYQFYS

SEQ ID NO: 46397 - protein, 528 aa, Oryza sativa
MKKYVFGLGSAQVLATTAAVGMIAHRFAVLPGPAAIVIGSGLALSSTAVVLQVLQERGESTSRHGRATFSVLLFQDLAVVVLLILIPLISPNSSKGGVGFQAIAEAMGMAAVKAIAAITAIIAGGRLLLRPIYKQIAENRNAEIFSANTLLVIFGTSLLTARAGLSMALGAFLAGLLLAETEFSLQVESDIAPYRGLLLGLFFMTVGMSIDPKLLLSNFPAISVILGLLIIGKTMLVTFIGRVFGISTIAAVRVGLLLAPGGEFAFVAFGEAVNQGLLSPQLSSLLFLVVGFSMALTPWLAAGGQFLASKFEQHDVRSLLPVESETDDLQDHIIILGFGRVGQIIAQLLSERLIPFVALDVRSDRVAVGRALDLPVYFGDAGSREVLHKVGAERACAAAITLDTPGANYRAVWALSKYFPNVKTFVRAHDVDHGVNLEKAGATAVVPETLEPSLQLAAAVLAQAKLPMSEIAATVNEFRNRHLSELTELCATSGSSLGYGYSRVMSISKSKTVTSDDESETVDGALAI

SEQ ID NO: 46398 - protein, 212 aa, Oryza sativa
MSSPATAAAAAASCGVLRHHHPPASPRPPPTTTTTTSRLLLASRSRGLQRPLRVNHAPPRRLPPTAARAQSAAAAGYQPESEFYKVEAILRPWRVPYVSSGLLQMGIRGVTVSDVRGFGAQGGSTERHEGSEFAEDTFIDKVKMEIVVSKDQVEAVVDKIIEKARTGEIGDGKIFLIPVSDVIRIRTGERGERAERMAGGLADKLSSAMPIS

SEQ ID NO: 46399 - protein, 711 aa, Oryza sativa
MPGIIVDGVVTEEAQNEVNSSQNKDNSSAPRSPVASKSMHSEALEMHVEGSGAGEPSIEQLYNNVCEMESSSEGGSPSRESFGSDGEESRIDSELRHLVAGEMEAMKVIEEEEGEGSGNAANAVTAAENGTPVKAMSSNSSKKSSKKAAKSQLESESSVGPNGKASTEEGEAEVSKPGSRVGRRRKASPNPHNGTEDAGLNNPDLGPFLLKHARDLIASDNPRRALKYALRATKSFEKCAGGKPSLNLVMSLHVVAAIYCNLGKYDEAVPVLQRSLEIPVIEEGQEHALAKFSGCMQLGDTYGMLGQTALSLQWYAAGLEIQKQTLGEQDPRVGETCRYLAEAHVQALQLDEAQRLCQKALDIHRENGEPASLEETADRRLMGLICDTKGDHEAALEHLVMASMAMVANGQETEVASVDCSIGDIYLSLGRYDEAVFSYQKALTVFKTSKGENHATVASVFVRLADLYNKTGKLRESKSYCENALKIYQKPIPGTSLEEIATGLTDVSAIYETMNEHEQALKLLQKALKMYNNSAGQQSTIAGIEAQMGVLHYILGNYGEAYDSFKSAIAKLRTCGEKKTAFFGVALNQMGLACVQRYSINEAAELFEEARAVLEQEYGPYHPDTLGVYSNLAGTYDAMGRLDEAIEILEHVVGMREEKLGTANPDVDDEKRRLAELLKEAGRGRSRKAKSLENLLETNPYTVTKRGTVAA

SEQ ID NO: 46400 - protein, 596 aa, Oryza sativa
MAMVLPETAAEGKALTDAWDYKGRPAGRAATGGWGCAAMILGAELFERMTTLGIAVNLVPYMTGTMHLGNAAAANTVTNFIGTSFMLCLLGGFVADTYLGRYLTIAIFEAVQATGVMILTISTAAPGLRPPACGDPKGASAECVAADGTQLGVLYLGLYLTALGTGGLKSSVSGFGSDQFDESDVDGERKKMMRFFNWFYFFVSLGALLAVTVLVYVQDNVGRRWGYGICAAGILAGLAVFLSGTRRYRFKKLVGSPLTQVAAVTAAAWSKRSLPLPSDPDMLYDVDDAAAAGHDVKGKQRMPHSKECRFLDHAAIIDRSAAESPATASKWRLCTRTDVEEVKQVVRMLPIWATTIMFWTIHAQMTTFAVAQAELMDRRLAGGFLIPAGSLTVFLIASILLTVPFYDRLVVPVARRATANPHGLTPLQRVFVGLSLSIAGMAVAAAVERHRATASASAAAAAPTVFLLMPQFLLVGAGEAFTYMGQLDFFLRECPKGMKTMSTGLFLSTCAIGFFFSTLLVTIVHKVTGHGARGGGWLADNLDDGRLDYFYWLLAVISAINLVLFTVAARGYVYKEKRLADAGIELADEETIAVGH

SEQ ID NO: 46401 - protein, 640 aa, Oryza sativa
MLLDAGWTIDLRPRNGRNYLDSVYIPPSGKGSYWSVTKAYAVFLEGMESEKKGRAKDQRPSKKSVGSPGKSHVSEEILSKLKRIVVNKRRTKVELQKLKKRKHGLLKKQKTSKRNSRGSKNKISNSRKLHLGSERKKRGGCALLARGSNKDGGSSTNGFVPYEWKRTVLSWLIDLDIIDINAKLKCVDETHSKVLLEGVTTRDGINCRCCSKVFTVLEFVAHAGGPVSKPYRNVLVDGLDTDLLHCLINAWDKQSDSERQAFFPISTETDDPNDDTCGICGDGGNLICCDGCPSTFHMSCLELEALPSDDWRCAKCSCKFCQEHSRQDAQDIAEVDSSLCTCSQCEEKYHPGCSPETTNTSNVSSQACDLFCQQSCRLLFEGLRNLLAVKKDLEPEFSCRIIQRIHENVPETVVALDERVECNSKIAVALSLMDECFLPIVDQRTGINLIRNVVYNCGSNFVRMDFHGFYIFVLERGDEIIAAASVRIHGTKLAEMPFIGTRNMYRRQGMCRRLLDGIEMILSSLNVEKLIIPAIAELVDTWTSKFGFSSLDVSEKQEVKSTSMLVFPGTGLLQKPLLKKTSPGENSSSQEVDGVFSELESGKTSNVANEDSLCSANAETQGSAAPCYGDNSKDASACND

SEQ ID NO: 46402 - protein, 330 aa, Oryza sativa; identical to SEQ ID NO: 36199

SEQ ID NO: 46403 - protein, 435 aa, Oryza sativa; identical to SEQ ID NO: 29842

SEQ ID NO: 46404 - protein, 1288 aa, Oryza sativa
MAEVVLAGLCLAATPICVKLLINASTYLGVDMTHELHELETTIIPQFELVIEAAEKGNHRVKLDRWLQELKQAFYNAEDLLDEHEYNILKCKAKNKDSLAKDSTQVHGSSISNILEQPMHAVSSRMSNLWPEDRKILCQLNELKTILEKAKEFRELIHIPAGNSLEGPSVPTTIVPVVTSLLPPRVFGRDKDRDRIIHLLTKPMATVSSSVGYSGLAIIAHGGAGKSTLAQYVYNDKTVQEHFDVRMWVCISRKLDVHRHTREIIESAENGQCPRVDNLDTLQCKLRDILQKSEKFLLVLDDVWFDEFNNETEWDQLLDPLVSQKEGSRVLVTSRQDVLPAALRCKDVVRLENMEDTEFLALFKHHAFSGTEIKNPQLRGRLEKIAEKIVNRLGHSPLAASTVGSQLSRNKDINLWKSALNIENLSEPMKALLWSYNKLDSRLQRCFLYCSLFPKGHKYKIKEMVDLWVAEGLIDSHSPGDKRIEDVGRDYFNEMVSGSFFQPVSERYMGTWYIMHDLLHDLAESLTKEDCFRLEDDGVKEIPTTVRHLSVRVESMKFHKQSICKLRYLRTVICIDPLMDNGDDVFNQVLKNLKRLRVLYLSFYNSSRLPECIGELKHLRYLNIIKTLISELPRSLCTLYQLQLLQLNKKVKCLPDKLCNLSKLRRLEAFEDRIDELINAALPQIPYIGKLTLLQHIDGFFVQKKKGYELHQLGNMNELGGNLRVMNLENVSGKDEASESKLHQKTHLRGLHLSWNDVYGMDVSHLEILEGLRPPSQLEDLTIEGYKSAMYPSWLLDGSYFENLESFTLANCCGIGSLPPNTEIFRHCLTLTLENVPNMKTLSFLPEGLTSLSIVGCPLLVFTTNNDELEHHDYRESITRASNLETQLVLIWEADSDSDIRRTLLSEHSSMKKLTELMDTDISGNLQTIESALKIERDEALVKEDIIKVWLCCHEERMRFIYSRKVGLPFVPPSGLCELNLFSCSITDGALAICLGGLTSLRNLFLTEIMALTTLPPEEVLQHLGNLRYLVIRSCWCLRSFGGLRSATSLSEIRLFSCPSLQLARGAEFMQMSLEKLCVYNCVLSADFFCGDWPHLDDILLSGCRSSSSLHVGDLTSLESFSLYHFPDLCTLEGLSSLQLHHVHLIDVPKLTTESISQFRVQRSLYISSSVMLNHMLSAEGFVVPEFLSLESCKEPSVSFEESANFTSVKCLRLCNCEMRSPPGNMKCLSSLTKLDIYDCPNISSIPDLPSSLQHICIWGCELLKESCRAPEGESWPKIAHIRWKEFR

SEQ ID NO: 46405 - protein, 253 aa, Oryza sativa
MPGLAADQDTVSLVRRVSRALNRRLTDLVGLLFHHKSAGSLGAVAGFAIAVVFAWKFLRSSPARPRRPPGPKRPLVGPAAPDSAARDAAEPANPGKLTTRQIVVKRLGGCRKVTCQLLGVVFEEITPQELQTHATVRPSVVELLLEIAKYCDLYLMETVLDDKSEENALLALESAGLFKTGGLMKEKVLFCSSEVGRTSFVRQLEADFHIDTSLDIISQLSRFIRCQLFVSSIEGGQLAGNVFNSPSLEQFFS

SEQ ID NO: 46406 - protein, 568 aa, Oryza sativa
MGNTCVGPSSAADRHGFFHSVSLAVLWRPGGRAEPSQPPGYPPRESSHSSVTSSTAPERVTIADSDLSSSTPNKGGNKPKVRRVQSAGLLADSVLKRDSERLKDLYTLGKKLGQGQFGTTYQCVEKATGKVLACKSIAKRKLVSEEDVEDVRREIQIMHHLAGHPSVVSIVGAYEDAVAVHLVMELCAGGELFDRIVQRGHYSEKAAAQLARVIIGVVEACHSLGVMHRDLKPENFLFVNHKEDSPLKTIDFGLSIFFKPGENYSDVVGSPYYVAPEVLMKHYGREVDVWSAGVIIYILLSGVPPFWDESEQGIFEKVLKGDLDFSSDPWPAISDSAKDLVRKMLNRDPRKRLTAHEALCHPWVCVDGVAPDKPLDSAVLTRLKQFSAMNKLKKMALRVIAENLSEDEIARLREMFKMLDTDNSGQITLEELKTGLRRVGANLKDSEITTLMEAADIDNSGSIDYGEFIAATMHLNKVEREDNLFAAFSYFDKDSSGYITQDELQKACEEFGIGDAHLEDIIKDIDQDNDGRIDYNEFVTMMRKGNNPLGKKGQGQLSFGLREALKLG

SEQ ID NO: 46407 - protein, 1020 aa, Oryza sativa
MGASAARLAALLLLLLAAAAAVGECVYIPYNTSAGVVGGKLNVHVVPHTHDDVGWLKTVDQYYVGSNNSIQGACVQNVLDSLVPALLKDENRKFVYVEQAFFQRWWRQQSDMIKDIVKGLISTGRLELINGGMCMHDEATVHYIDMIDQTTLGHRFIKEEFGQIPRIGWQIDPFGHSAVQAYLLGTEVGFDAFYFFRIDYQDRDTRKGTKELEVVWRGSKTFGSSADIFAGIFPKNYEPPPGQFYFEVDDTSPIVQDDPLLFDYNVEQRVDDFVAAAIAQANITRTNHVMFTMGTDFKYQYAESWFRQMDKLIHYVNKDGRVNALYSTPSIYTDAKHAENVPWPLKTNDFFPYADNPNAYWTGYFTSRPALKRYVRVMSGYYLAARQLEFFKGRSNSDLTTDSLADALALAQHHDAVTGTEKQHVANDYAKRLSIGYTQAEKLVSSSLSCLSQSGSKSHCPSQTTNFEQCPLLNITYCPPSEMDLSQGKSLVVLVYNSLGWKREDVLRIPVISDSIVVHDSEGREVESQLLPIANASLYMREKHVKAYLGMLPAAKPKFWLAFPVSVPPLGFNTYFISSGKKSASVSLMSTLHSSQGSENSNMQIGQGQLKLQYNAAGALSLYSNSKTQVEANFEQKYKYYIGQDGNGSDPQASGAYIFRPNGTVPIKTDGQVPLTVLRGSILDEVHQQINPWIYQINRVYKGKDYVETEFIVGPIPVDDGNGKELSTEVVTNMATNKTFYTDSSGRDFIKRIRDYRSEWKIEVHQPIAGNYYPVNLGIYVEDGSRELSILVDRSVGGASIKDGQIELMLHRRLLHDDGRGVAEALNETTCFDNQCEGLVIQGKYYLKIDPQGEGARWRRTFGQEIYSPLLIAFAEQDGGNWVNSHVTKFSAMDPAYSLPDNVALLTLQELEDGTVLLRLAHLYEAGEHKDLSALASVDLKRVFPDKKIVKIVETSLSANQERSAMEKKRLKWKVEGPPADEKIVRGGPVDPSKLVVDLGPMEIRTFLINFAPQSGKQLM

SEQ ID NO: 46408 - protein, 711 aa, Oryza sativa
MAADALSIIPGAVLRNLSDKLYEKRKNAALEIEGIVKQLATSGEHDKISAVIALLTNDFTMSPQANHRKGGLIGLAAVTVGLTSEAAQHLEQIVPPVLTSFLDQDSRVRYYACEALYNIAKVVRGDFIIYFNKIFDALCKLSADSDANVQSAAHLLDRLVKDIVTESDQFSIEEFIPLLRERMNVLNPYVRQFLVGWITVLDSVPDIDMLGFLPDFLDGLFNMLSDSSHEIRQQADAALSEFLQEIKNSPNVDYGRMAEILVRRAGSSDEFTRLTSITWINEFVKLGGEQLVPYYADILGAILPCISDQEEKIRVVARETNEELCAIKADPTEGFDIGAILSIAKRELNSEHEATRIESLHWFSTLLVRYRAEFLAYLNDIFDPLLNALSDPSDAVVLLVLEVHARIAEESHHFHHLVSYLIHTFHNNHVLLEKRGALIVRRLCILLGAEKVYREFSTILETEGDLEFASTMVQALNLILLTSTELAELRSLLKKTLVDSCGKDLFQSLYASWCHSPMATISLCLLAQAYNHAISVIQSLGEEDINVKFLVQLDKLIRLLETPVFAYLRLQLLEPGKHTWLLKTLYGLLMLLPQQSAAFKILRTRLKTVPFSENLKRTSSTNPYSQILQVTEDGNRNHDTQSYNAINFPSRLHQFESMQQQHRVHLKNQLQSQKSASAIVLSQEIQRYEEAHSSSTSEIGRPPSRTSRGIS

SEQ ID NO: 46409 - protein, 154 aa, Oryza sativa
MLHRHTPLSIPNPKKPRRRAPSPLSISTSPPTVKTTTASSAITPRSFPLLLRPIITSPRRFHPSKFHPISCSGLVGTQTSPAMLWSTHRAPPWRHRRRCHRSRLSRSEPPRHQLHLDRLSIYPQETHPMAQRSWRSTSSSPTPFNCFHHRIHSL

SEQ ID NO: 46410 - protein, 230 aa, Oryza sativa
MGDAAGAWRRTGRRSTAAELMVARRRGRRERCRARPPGARRWRGGARRGGARRRCRGSRAGASRSPRGGAPGRRGARPSRCSTPTPPTSAPWCSSSPASPPRPTPPPPPPAARSSASAPASTAAAPCPSARPRHRRPSCRSTTSATTTARRRRRCRASCSGHSTSTTTSTAAAATSGTAAAAATCFSTGSSRRRRRRGCCCRASRRRRCCRRRGRRPPRLTTLMATTSDD

SEQ ID NO: 46411 - protein, 365 aa, Oryza sativa
MDDDDYSWVRRTKFSHSIVKSNSGREQFGAFLDPFDSSTAWRQKGFSGELMIHGHNLQPRAKGAVSKSPRPSIPLAKSPVSQAERKLKAKFSDGELKQRGKISDGSLREASKEKDRKVGHKGEGLSLDISCPILDRTVQDDSSDTLDFSFHSEEQSLRLLRVCSSPAPFYSKDTTTFGDSKIHSTSVKIVGEGSKPRRRAKSPMPTRVISEVFKEAKAATKRFSSPQRQRKSSSPHSPRSPDDSPRFGFPSMRTPGNLKARRASSWPRNYDNGVAKAVALDILERWTIDRSQLLIGQRFASGAYSRLFHGIYKEQPVAVKFIRQPDEEEDAELAAKLEKQFTAEVTILARLHHRNVIKVITRIPI

SEQ ID NO: 46412 - protein, 192 aa, Oryza sativa
MAHALISQLYPGDSDKKILARVSRLWHFRDLNDDTNILHTDLVLLDEVGNSTHVQMYRGAIEVLKPLIHEGNVYYIESFTVKDANRTYRPVSNDFMILFSKWTTLEECIDIPADFPAITFSLTPFQEIPSLVDKNIFYVDIMGVITEISSTSTVRPRSRDADSLKRTLQICDASNSTLPVTLWGDRSTAENI

SEQ ID NO: 46413 - protein, 469 aa, Oryza sativa
MVPDLAIRAIEFDKIDEISGVTARVEVADKNLMVLSLSFVFTSSKHYLLYDAIHASMSMIPIPNWCCDIYLPSNPLPVRYGDEYALVLFAKNYPYKREGRSTCIDLLYLWTPPKSSSPSTSPPPPPPPPPPREKMYPNPSGEPWHTRKPRFSKETPASFCHHVKFTSSSHAFWADLTKGVLCCRIKDLLDSFFVHFDFIELPPGCKSDALDDSDTGPAEMFRTMGCSTGDLIKFVSISFDDSVPEDDKTVTEWTLDMGTLQWTKGEELRFGTLWELDDFKKDGLPETEPVYPLLSMEEGDGGDLYFILSRPIMRWEDPAVHHVCRFNMTSKKLVSNPLSWRPDKIVPSGLLGCEFFRHLDSQRLVPDNRKMDAGKVQSWVEMESALEEVDESMQREISRKQMVWSGSQVDLFCVKSTDAVPGGITDAAQGGVSDGLQGKLIKPRESNKTLRPARQIKANPRYYGPEWAV

SEQ ID NO: 46414 - protein, 259 aa, Oryza sativa
MSLAVATPASARLSPLTTSSPEPCRRRRLLLSAAAPLRRTRLRRRIAVVASVPDPAARPAEYTPWLIAGLGNPGSKYHGTRHNVGFEMVDRIARDEGITMNTIQSKSLLGIGSIGEVPVLLVKPQSYINYSGEAIGPLAAYYQVPLRHILVMYDEMSLPNGVLRLQRKGGHGRHNGLQNVMECLDSSRELPRLSIGIGSPPGKMDTRAFLLQKFSSEERLQIDTALEQGVDAVRTLVLKGFSGSIERFNLVQKYKFHSV

SEQ ID NO: 46415 - protein, 277 aa, Oryza sativa
MALPTTSPLAAAAARPCAFPTPWRCRSPPLRRLPHVSCQANRGGSRDGNSLSTSAAAAAAASPPPRWRAAVSAALAAAIVSAAPAYADLNKFEAEQRGEFGIGSAAQFGSADLKKAVHVNENFRRANFTAADMRESNFSGSTFNGAYLEKAVAYRANFTGADLSDTLMDRMVLNEANLTNAVLVRSVLTRSDLGGAIIEGADFSDAVIDLTQKQALCKYANGTNPLTGVSTRKSLGCGNSRRNAYGSPSSPLLSAPPPKLLDRDGFCDEATGMCDAK

SEQ ID NO: 46416 - protein, 253 aa, Oryza sativa
MGFLEDFQASVEALPAMLQRNYSLMRELDKSLQGVQTGNEQRCQQEIEDIKHGLESGSITYDPAKLKFSDEAIEEQKHCVRIADEKVALASQTYDLVDAHIQQLDQFMRKLEELRQEKEAATTAAAAAAAAAASVATGTPVAATVTASAGTSTADNTPKGGRSSERGRGGRKKTAKVPTEQPAPAIDLELPVDPNEPTYCLCNQVSYGEMVACDNNDCKIEWYHFGCVGVKEHPKGKWYCPSCIGFQKKRKGK

SEQ ID NO: 46417 - protein, 83 aa, Oryza sativa
MRCSYLLVNKEYVKEILSETPDQKSTGNTKLMSSCMDLLTAVSSFFPSLLSGLEDIIELLKEDNELLKEGIAHVSVEGWWQHS

SEQ ID NO: 46418 - protein, 333 aa, Oryza sativa
MTNPAYFEVGRYLGGYGFMNITSYPSSQFGGLPDVAGIQNLGLGYSPEEIERLRAQDVGEGEVNIRLYEGRVVQGPLKGTEALFKVYPGSRSGASEADLMAVNELRTHAFLQNDASDICENIQFLLGAFETATGEQWLAFRDDGRYSAADYAKLTSERKLKEQSGSISFWNPYDRAYKLELKRYFVLKLLYGAMCGLVHMHNHDRLHQSLGPSSVVLNTVAEKNGRYLVPHLRDLAFSVDIGYSSVGSGALSDGLWRRASAAGASTPLEKRAFGIADDIYGAGLLLAYMSFIPFCEQELWMAFHCRDFWRIRSVSTFMLQESTFWQMTGCPKL

SEQ ID NO: 46419 - protein, 155 aa, Oryza sativa
MASTPEPETTVGGYELRERLGGRPPSTVVWRAVERSSGSPVVVKQVRLTGLPSTLRDSLDCEVRFLAAVTHPNIIRLLDLIQTESNLYLVLELCEGGDLAAYIQRNGRVEERVASNFMRQIGNSPSNICHINFISSPSSISFLLLPPNLSHYPQP

SEQ ID NO: 46420 - protein, 146 aa, Oryza sativa
MGQVMEVNPDGLLALVPIVSEDASPSVPAVAMPNRGKKVQDPVQDPKIQEFLANLDKLTRSEYPRHPYFYPMSGLNEKIDLLCKEKGTMHQFLASSSVPAAIDVVNPFTALVLPKKTMFDFSPLVGQETSVWAPDSTKSDVGPLEA

SEQ ID NO: 46421 - protein, 72 aa, Oryza sativa
MIGWWSVICLGRSFVLFFRYFVDARAACGSQFLFGYFFVALYSLPILFRDFLFLCVELFLPSLSKSMAEVKA

SEQ ID NO: 46422 - protein, 251 aa, Oryza sativa
MGSKSYPTVSDEYLAAVGKAKRKLRGLIAEKNCAPLMLRLAWHSAGTFDVSSRTGGPFGTVKNPGEQSHAANAGLDIAVRLLDPIKDQLPILSYADFYQLAGVVAVEVTGGPEVPFHPGRQDKPEPPPEGRLPDATQGSDHLRQVFSAQMGLSDKDIVALSGGHTLGRCHKERSGFEGAWTSIPLIFDNSYFTELVSGEKEGLLQLPSDKALMADPAFRPLVEKYAADEDAFFADYAEAHLKLSELGFAEE

SEQ ID NO: 46423 - protein, 215 aa, Oryza sativa
MAATNLPDILDPALTRPGRFDRHIVVPNPDVRGRQEILELYLQDKPVSSDVDVNAIARSTPGFNGADLANLVNIAAIKAAVEGADKLAAAQLEFAKDRIIMGTERKSMFISDESKKLTAYHESGHAIVALNTQGAHPIHKATILPRGSALGMVTQLPSQDETSISKNSCWHVLMFAWVAGLQRSSFLGKTMLQLGQEMIFILQQSLLSTWYQIVG

SEQ ID NO: 46424 - protein, 487 aa, Oryza sativa
MPLALAQLQDIGDRITDRLRPWSRSAEFWVRAADIYTSYKVCQLRAGFVKDEEEREAMWEQQHELGAQKMYSLCSELGGLFLKAAQILGKPDLAPMAWVKRLVTLCDNAPATPIDVVRDVVEKQFGKSFDDIFECFDVEPVGSASIAQVHRARLKLSKTDVAVKVQHPGAEKLMMVDIRNMQAFALFLQKYDINFDLYSATKEMEKQICYEFDFVREAKAMERIREFLRVTNKKKPPVIVPRVIPEMVSREVLVMEFIEGTPIMNLGNEMAKRGIDPGGKIATMAKQKILTDLTLAYGQMILKDGFFHADPHPGNILICKNTEVALLDYGQVKAMPEDLRLAYANLVIAMADDDFLRTKESFREIGIETWSIADNELEELFQLSLRMFDTRLPPGVTAMSPFAEDSSLNKVGVQSFPEELFSVLRTIQLLRGLTVGMGLRFSCAQQWKPIAEEALLKSGRLKAARSRRPRRSFVRRLFSSDNENQGT

SEQ ID NO: 46425 - protein, 154 aa, Oryza sativa
MDDEATLVGGKNHSHATQDLYDSIAAGNFPEWKLFVQVIDPEEEERFDFDPLDDTKTWPEDEVPLRPVGRLVLNRNVDNFFNENEQLAFGPGLVVPGIYYSDDKMLQCRVFAYADTQRYRLGPNYLMLPVNAPKCAHHNNHYDGAMNFMHQGLP

SEQ ID NO: 46426 - protein, 316 aa, Oryza sativa
MEEPGPEEEKEEEEARFDFLEWIGPDTSAAVFTFLDHPADLARASAVSRSWRRFVVRNGFSKIQCLRLCPEASNFTRIITKQAIASASESDAEHQHRAYMHLSYALLLDDPQDCIIRCIGASTTDNIPEETIQNTLVPTDWVAMMRPSYWSSAGHFDPAVPECLFYRLRSDLCLVQQINIQPFRAFFQYGDPIYSAKYVRFQMGYPKTPLPSQLLVSHDNEGQLAADDNYIWTYTSPQFPMLQESVLQSFKLPRAVLCIGGVVKIEFLGRVQKQEMDDLYYICGDSTAAGTRSRSLQERCGPQVLSRYSQIWRVPW

SEQ ID NO: 46427 - protein, 122 aa, Oryza sativa
MRPSGQQRLSESRRSSRRRCPGRSRVRGGSRRREPAWRRGRTPHGRPRRQRRGIGRRGRARGGHGSGGGRHCTVGGINDDDAALALADGRGADEAGGGSEWRRSRTSSRTLSEMSSTTHVAT

SEQ ID NO: 46428 - protein, 75 aa, Oryza sativa
MSWPPPSSWLPTAEEARCSPPLPSEIVAWATGSGQRLSSCWTTVGEEAKWLTKASGGWRLMMKQQSVEFLFSIAT

SEQ ID NO: 46429 - protein, 222 aa, Oryza sativa
MPNSFQAFLTGCSAGGLATFIHCDNFRTLLPKDSRVKCLADGGFFLDVEDISGQRTMRAFYNDVVRLQDLRGRFPHCGPNMDLGQCFFPSEVVKDIITPVFVLNPAYDAWQVQHVLSPVASDPQHSWLECRLDISKCDSNQLEILQGFRKKLHDTISELKHKKDWGFFIDSCFIHCQSLNSLTWHSPSSLRVNNKVMLSSSKKKTERKKMSTVQGTLYIMSN

SEQ ID NO: 46430 - protein, 342 aa, Oryza sativa
MADQLISTADHDTLPGNYVRPEAQRPRLADVLSDASIPVVDLANPDRAKLVSQVGAACRSHGFFQVLNHGVPVELTLSVLAVAHDFFRLPAEEKAKLYSDDPAKKIRLSTSFNVRKETVHNWRDYLRLHCYPLHRYLPDWPSNPPSFREIISTYCKEVRELGFRLYGAISESLGLEQDYIKKVLGEQEQHMAVNFYPKCPEPELTFGLPAHTDPNALTILLMDQQVAGLQVLKEGRWIAVNPQPNALVINIGDQLQALTNGRYKSVWHRAVVNSDKARMSVASFLCPCNDVLIGPAQKLITDGSPAVYRNYTYDEYYKKFWSRNLDQEHCLELFRTTPTDTS

SEQ ID NO: 46431 - protein, 37 aa, Oryza sativa
MYFYCLFSVFRSKELDTYANLTQIHNQLVSHAILQFK

SEQ ID NO: 46432 - protein, 249 aa, Oryza sativa
MLVGYLPFDDRNLVVLYQKIFKGDTQIPKWLSPSARDLLRRILEPNPMKRINIAGIKEHEWFQKDYTPVVPYDDDDDNYLDSVLPIKEQIDEAKQEKPTHINAFQLIGMASALDLSGFFEEEDASQRKIRFTSTHSPKDLFDKIENVVTEMGFQVQRGNSKLKVMKNGRGSKNLRNPSSFLVCTEVVELGPSLYVVELKKSHGDPILYRQLCERLSDELGVCKTEQIQRTESLEDDLESFDSGSSLPGF

SEQ ID NO: 46433 - protein, 494 aa, Oryza sativa
MAMACAALVPLLLLLLVVLSGSTSLADHSAGVDEVNYIVVLTSSWLKPNSVCSSLMSPHPNVTNWVPLSRPYGPCSSSPAKGRAAPSTVDGMLWSDQHRADYIQWRLSGSVAGVLQPADDVPVSTNYEQQSIEGDLNYGTYYPAPAPMSSKAMNPAATGGGGGGPGVTQTMVLDTASDVTWVQCSPCPTPPCYPQKDVLYDPTKSSSSGVFSCNSPTCTQLGPYANGCTNNNQCQYRVRYPDGTSTAGTYISDLLTITPATAVRSFQFGCSHGVQGSFSFGSSAAGIMALGGGPESLVSQTAATYGRVFSHCFPPPTRRGFFTLGVPRVAAWRYVLTPMLKNPAIPPTFYMVRLEAIAVAGQRIAVPPTVFAAGAALDSRTAITRLPPTAYQGLRQAFRDRMAMYQPAPPKGPLDTCYDMAGVRSFALPMITLVFDKNAAVELDPSGVLFQGCLAFTAGPNDQVPGIIGNIQLQTLEVLYNIPAALVGFRHAAC

SEQ ID NO: 46434 - protein, 366 aa, Oryza sativa
MMMSSSTSRREAAAKSSELGRAGGVDPPRPSAAAMARSGELPKVSAAATAAVRHEGWMLRYGRRKIGRSFVRTRYFVLDNKLLAYYKKQPKDNMVPVKALQIDGNCRVEDRGLKTHHGQMVYVLCIYNKKEKENHITMGAHDIEDALVWKKKLELLIDQQQDTMTAKNRKAFASLDFDMEFGGPLSFSDRDSGPEDEEEPRPTLLRRTTIGNGPPDSVHDWTKEPDIGLSDQNDTNHAYSRKNWRLLRCQNGLRIFEELVEVEYLARSCSRAMRAVGVVEATCESIFGLIMSMDVTRYEWDCSFQYGSLVEEVDGHTAILYHRLQLNWFSMLVWPRDLCYVRYWRRNDDGSYGNLWMSPCWSLSSF

SEQ ID NO: 46435 - protein, 156 aa, Oryza sativa
MRESIAEIVRHIGEAPFLVHLFNDDDGGSGRGGAGRVTVRRETASAESWPDVRRRWGPGGMRRPDGIILVEQIAAAVEEGGASAGAGAAEAARQVWGLVVQARGMECASCYVLDTCRVRSPAGLCTHFCLARAQCFGDPLELQLRNAWLNRLSGRR

SEQ ID NO: 46436 - protein, 361 aa, Oryza sativa
MDCSNGEVQHQWMEDVKSGGAVPFLDPDNCPNGWATPPGDTFMVRGPDYLATKVKIPGGEYLLKPLGFDWMKSPAKICEILNNKSHRVRKAIDGEVLRGNQPFVWAFNLQLPSKDNYSAIFYFVSLEPVPEGSLMDQFLKGDEAFRKSRLKLIANIVRGPWIVRTAVGEQAICILGRALTCKYTQGSNFIEIDVDVGSSIVANAIVHLAFGYVQTLTVDLAFLIEGQTESELPERLLGAVRFSELNPGSAGVYEVPSEEQQESAPFLPARLWQGFSNMLHNPGNSREPSSTSQSTNGSLHKEDADENTRESLHKEDVDDNTAGSLLKEDGYESATGSFDKEDTEEDSNGSLHNGDADENTK

SEQ ID NO: 46437 - protein, 495 aa, Oryza sativa
MGNILKCFISCFDGEDEDGGSGHGRFPNSYPPVSSLHYQPLHLDDLQVPLSPPPPSTRQQQPPPRPALSRLHYQPLRLADLQVPLSPPPPSTRQQQLPPRPARPLGYHHGVLWPTIEITPCDDFLNLEFTTKVCEGPQHHSTPSRKTDLNRCIHEKDDGNSKPSYYWLTKNKDNHVVTPQTKRSPRPPSGVAALERDLVDFTRTFEVPEGLAQHVTSPMQAQVTWYRKLLAAYKDIKYPPKESADAAVLVAATLRGIERTNLEGILAFYGFPIPTISKEASENHPSSIPKGVLFVLKTLPVNAKCIVDGDGFTAYVDTLDPIELRQDCNASCQSRNSKKQKLWDKTAADLQISLENTGQKKMFFGGREILARKYEIRLRGIDAPEIGMQYGKESQDALVKLIARKCVTLHVYGQDQFKRFVCDIHCGGVFIQEQMLVNGHAWHFKNYDKRPQFAKWEKMARDARQGLWAYDNLEKPWEWRKNKRKASRHHNSDVR

SEQ ID NO: 46438 - protein, 228 aa, Oryza sativa; identical to SEQ ID NO: 45395

SEQ ID NO: 46439 - protein, 722 aa, Oryza sativa
MAWCGDNICLGIRKEYMIINSMTGALTEVFSSGRNAPPLVVALPTGELLLGKDNIGVFVDQNGKLIQDGRIIWSDTPASVAIHRPYAVARLPRHVEIRSLRAPNALVQTVVLRDVQKLVETENCILAVLARSVYGLLPVPIGAQIVQLTASGEFEEALALCKLLPPEDSNLRAAKESSIHIRYGHFLFDNGSYEEAMEQFSDSHVDITYVLSLYPSLVLPQTHIIGEHDRLQDLPELARESSDVTDDMEPYSLQLHESDDKSPLEIKKMSHNALIALVKYLHKKRNGIIERATAEVTEEVVSGAVHHSSILSESYRSKKPNKKRAQTHTSSIAREMATVLDTSLLQALILTGQSSGAIELLKGLNYCDLKICKEFLEERSDYMVLLELYKSNEMHREALQLLNQLVEESKAEMGKNDFNKKFNPQMIIEYLRPLCRSDPMLVLESSLYVLERNPSDTIELFLSENVPADLVNSYLKQHAPNLQSTYLELMLSMSVSGINPNLQNELVQLYLSEVLDWHKILKEEGNWTEKTYSPTRKKLITTLENNSGYNTDILLKRLPQDALFEERAILYGKINQHLRALSLYVHKLQMPERAVAYCDRVYEEGAQQPSKSNIYFNLLQIYLNPRKAEKEFGQKIVPVASQYPGIQKVTKVRGARMGKKVVEIEGADDVRFSPSGTDSGRSDGDGDGDDVSDGGPIMLNEALELLSQRWDRINGAQALFVT

SEQ ID NO: 46440 - protein, 719 aa, Oryza sativa
MKKEFPGQVPTSRLHSEMDAAAAGGGGAAKRKRSFSEDDAYLILHRYQPATILTMLQEMGKQVGAGKGIDWRALVRRTSTGITSAREYQMLWRHLAYGHEFVESVEPASLPLDDGSDLECEIEIVPAPGNEALAEATSFAKTIITGSSREQTSGQRVNSEAAALNTPNEKIVRVPSDKQLVPGHRLTNGTGPVSSSKQPSHTGSSPDPLDPNGHPKKKKKPKPWSREEDMELGAGVQKHGEGNWMEILHKNKFDSSRTHLQLQQRWALICKRQGSTKPATPKIPNVMSEELKAAQKAFSLAIGTTRSSTLRPGGVPHHNPMVTTTNPEVKSVTAPSPLPVPVHVVPVPVPVQPVQVQLPPPQLHQAPAQSAPPPPKVSNASNKSRNNSKKQVAQSIPVNGPLSIQEAALAAGGRIAEPSVATNFLKAAQSTKAVHIRSRGTGSSKSSTGSKTPTVAGEPGTQLGSDQHLELQSTGDPSQVLTAHATEQVHNVSEVAGVNPLGQSAGVHLSETKKALNTTPVSGSSDKMEIDDNSNYFAVTMEDLFPEDVKQEDVQDPKIEEAIDPKDADMLEFDRFVAQGCLNKDNVDKSKAAKIAPEAQSVIGSQKKQLKTLPTVGKSNPVFAGPPATAKKTKAPVPQGGMSSGIVGVLNRSLGGKAPAPATTGTQSTVQKQQSMSSKGNLLVPKNVAPGTVTPANNRANTAVNGASKVNPPASQKPA

SEQ ID NO: 46441 - protein, 125 aa, Oryza sativa
MRLIGRGKSSKAKKGSSTPLQSKEKIAANVETVAVGSNNRQVAPDDNMPLGEAGYGKCLLFFLRLFCSDLGVLRILVIAVVVVVIVVVVVWRIFMICLCYCNSFGGFSDLYLCFRVSDHTVLLLL

SEQ ID NO: 46442 - protein, 247 aa, Oryza sativa
MEPDAADDDYMGDLSHFLPPPTPSSPSRSLGRRRQPPAQQAQGQGKRAKGVVPWQERRRRDRERKQREEDERTMAGLAEAIPETNVGFRLLKRMGYDPAAGGGAGAEPVGIEIRRSRAGLGAEPAVSVAPPQPSAEVAEGERRRVEEMAVELRARQSTQWRNRRVVWDYRKAEAALAQLENREAAPPPPEGEEKAEEEEEEVITEEDLQNILAKLRDEHYYCLYCGCKYESAEALANECPGPNEDDH

SEQ ID NO: 46443 - protein, 659 aa, Oryza sativa
MRVIYVLCVLGVLVPDAAGGRRHHRRHDCPPFTCGHLSDVSFPFRRRGDPPECGVQSYELTCADDKATIQIDKETYSVSDINYGDSTLWVVDASFLDSRSSCLLPRWNPLLRDPRLQAKSHHIIELAPPVGVTWASFVNCSQEIRNSSWMYMPVACLSTSRSFVYVFTGQQSAYIQNLEPSCGYLATTPLGGSKLNSTSALQNVSYQDVVKLMMTGFAVRFPFTVSGWNFKECLALSIRQTGTGSKERIANIAIIDFYFWSCFLLGDRSHNNLIYTYMVVDTALLILKWTAVLCRFVLAPLAVFIFLAHKYWRNKITIDAVEKFLQMQLTLGPTRYAYTDLTAITGHFGEKLGQGGYGSVYKGVLPGYVNVAVKVLENANCNGEEFISEVSTIGRIHHVNVVRLVGFCSEELRRALVYEYMPRGSLDKYIFSSKRSFSWDKLNEIALGIARGINYLHQGCDMQILHFDIKPHNILLDDNFVPKVADFGLAKLYPRDNSFVPLNALRGTIGYIAPEMISRSFGVISSKSDVYSFGMLLLEMAGGRRNSDMHAGNSSQAYYPSWVYDRLIEQQVGVGEISAATVANMHELERKLCIIGLHCIQMKSHDRPTMSEVIEMLEGGVVGLQMPPRPFFCDDESMSPMMDSYQFSSGLTEILEEDE

SEQ ID NO: 46444 - protein, 87 aa, Oryza sativa
MKLELIGINIEPPPPAIFGFAAPAGYFDFPPKRGGRGWPRGRGGFGGRGRGHVGRGRGRGDRGSRKISAEDLDADLDKYHAEGMQMS

SEQ ID NO: 46445 - protein, 943 aa, Oryza sativa
MLEKLYEIVFGILEKVADTKQKRKKGIFTKQGGDKESIIRSNLQYASLSALRRLPLDPGNPAFLHRAVQGVEFSDPVAVRHALSIASEIAVRDPYSVAMALGKNAQPGGALQDILHLHDVLARVYLAKLCHSISRARVLDERPDIKSQYSSLLYQLLLDPSDRVCFEAILCVLGKVDNTESTEERAGGWIRLTREILKLPEAPSVASKGILSKSEKSSKARRPQPLIKLVMRRLESSFRSFSRPVLHAAARVVQEMGKSRAAAYSLGAYDEAANLQSYSDNVESLDSDLNENSQPEATRKANPLSNGHGGMDTIAGLLASLMEVVRTTVACECVYVRAMVIKALIWMQNPHESFEELKSIIACELADPAWPSSLLNDVLLTLHARFKATPDMAVTLLEIARIFATKVPGKIDADVLQLLWKTCLVGAGPDGKHTALEAVTIVLDLPPPQPGSMSGFASVDMVSASDPKSAMALQRLVQAAVWFLGKNANYAASEYAWESATPPGTALMMLDADKMVAAASSRNPTLASALTRLQRCAFSGSWEIRIAAVQALTTIAIRSGEPYRLQIYEFLHALALGGVQSNFSELQLSNGENQGASGTGLGSLISPMLKVLDEMYRAQDDLARDIRQHDNSKQEWNDDELKKLYETHERLLDFVSLFCFVPRAKYLPLGPTSAKLIDIYRNRHNISTSSGLSDPAVATGISDLMYEPKDVPKEATLIQTGIDPDLAMAWAAGLEDDVWENNAPAVDKVKDFLAGAGTDAPDVDDEEYMNSRPSVGYDDMWAKTILETYEAEDDDGRSSGGSSPESTGSVETSISSHFSGMNYPSLFSSKPSGYGASQQTIREEPPSYSTSVLQKRESFENPLAGRGGRSFGSHEDEDRSSGNPQSGKALYDFTAGGDDELSLTAGEDVEIEYEVDGWYYVKKKRPGRDGKTAGLVPVLYVNS

SEQ ID NO: 46446 - protein, 897 aa, Oryza sativa
MPRSLAGDLTDPEMAQPYMKKDDDDEDVEYSPFYGIEKGAVLQEARAFHDPQLDARKCSQVITKLLYLLNQGETFTKVEATEVFFAVTKLFQSKDAGLRRLVYLMIKELSPSSDEVIIVTSSLMKDMNSKTDMYRANAIRVLCRIIDGTLLTQIERYLKQAIVDKNPVVASAALVSGIHLLQANPEIVKRWSNEVQEAVQSRFALVQFHGLALLHQIRQNDRLAISKMVSGLTRGSVRSPLAQCLLIRYTSQVIRESSMNTQTSDRPFFDYLESCLRHKSEMVILEAARKIAEMDVTSRELAPAITVLQLFLSSSKPVLRFAAVRTLNKVAMTRPLAVTNCNVDLESLMSDQNRSIATLAITTLLKTGNESSVDRLMKQITNFMSDIADEFKIVVVEAIRSLCLKFPLKYRSMMNFLSNSLREEGGFEYKKAIVDSIVTLISEIPDAKEIGLLYLCEFIEDCEFTYLSSQILHLLGNEGPRTSDPSRYIRYIYNRVILENATVRASAVSTLAKFGALVDALKPRIFVLLRRCLFDTDDEVRDRATLYLQTLDGEVAVGSTEKDVKEFLFGSFDVPLANLEASLKTYEPSEEPFDISLVSREVKSQPLQEKKAPGKKPPAGAPAPAPVPAVDAYQKILSSIPEFSGFGRLFKSSEPVELTEAETEYAINVVKHIYSSHVVLQYNCTNTIPEQLLENVTVYVDATDAEEFSEVCSKPLRSLPYDSPGQIFVAFEKPEHVPATGKFSNVLKFIVKEVDTSTGEVDEDGVEDEYQIEDLEIVSADYMLRVAVSNFRNAWENMDPESERVDEYGLGVRESLAEAVSAVISILGMQPCEGTEVVPKNARSHTCLLSGVFIGDAKVLVRLSFGLSGPKEVAMKLAVRSDDPEVSDKIHEIVASG

SEQ ID NO: 46447 - protein, 276 aa, Oryza sativa
MMPPPVQTLRLLLLTPFPPPPRLRFHRLTATGRSDNAAAASGTTARERRLAKVREERRRRQHELDNTYPGWARVLENACRDDDELRAILGDSIGNPELMKQRIQERVRKKGRAQFNKSKTGSIVAFKVSFRDFNPLNSFIWFELFGEPTDRDVDLLGGVIQAWYVMGRLGAYNSSNLQLANSMLDYDPSYDSDQASGVMPSSFHDISDVEFQDNWGRVWVDLGTSDYLGLDVLLNCLTQLSSEHLGIKQVVFGGKKMGDWEEGMKNSDYGYRHFKI

SEQ ID NO: 46448 - protein, 281 aa, Oryza sativa
MDGGGTPDGDPVPDMDMLMLSSALDGLDSYTDLVAGSSVADSIFSALTCFPPSQERLLHVSTPVGSNSRQDDSDVSITKEGTTTRRGDCAAGLASGEPVAAGIGSVPKPFDGVTLTERMLRALAMLKEASGGEAILVQVWMPVRNGEQHVLTTSDQPFLLDQKLTGYREVSRQFTFSAEEGPGLFPGLPGRVLMSGMPEWTSNVMYYHGSEYLRVDYARRHEVRGSLAMPVFNSSGGSCCAVLEVVMTREKDNFCLEMVNVSNALQSSIISDEAFQMINFG

SEQ ID NO: 46449 - protein, 539 aa, Oryza sativa
MAAPASPLHPLAAIAAALLLLLVAAPSAAAAASPVFPGVPPLQLQALQQRRPASSAGGSRYVVAAAAAAAGGNGTAAAAKPFTAHYFPQELDHFTFTPNASAVFYQKYLVNDTFWRRSAAAGETPAGPIFVYTGNEGDIEWFATNTGFMFDIAPSFGALLVFIEHRFYGESKPFGNESNSSPEKLGYLTLTQALADFAVLITSLKHNLSAVSSPVVVFGGSYGGMLASWFRLKYPHVTIGAVASSAPILQFDYITPWSSFYEAVSQDYKSESFNCFSVIKAAWDLIDERGSTDAGLLQLSKTFRACKTVKSVYSFRNWLWTAFVYTAMVDYPTPANFLMNLPAYPIKEMCKIIHGFPAGADIVDKAFAAASLYYNYTGDQTCFQLEDGEDPHGLSGWGWQACTEMVMPMTISNESMFPPFTFTYEGKSDDCFQSYGVRPRPHWITTEYGGNRIDLVLKRFGSNIIFSNGMRDPWSRGGVLKNISSSIIALVTEKGAHHLDFRSATKDDPDWVVEQRRQEVKIIQGWIDQYNEDLAQISK

SEQ ID NO: 46450 - protein, 119 aa, Oryza sativa
MFLHVRNVTDNDGFVIPSLSVEESDLGDWEAAQVSRPQPPPKATKDTEKIYLGPHGAPPSRAKKQEDTAAAATGYRDKSKVKEADQKVLGTGRDNKGGNNFNRYNNAGHHVKEPYKRST

SEQ ID NO: 46451 - protein, 403 aa, Oryza sativa
MGMPLLLLLLILVAAGPQAGRAAKPIPNLQLMTKEGGSSRIIQDDIIKAINKHPNAGWTAARNPYFANYTVNNNTLLLLFSFFFLRGHLPVVVSIAYIKTFISCLFGGLNNPPVQTAQFKHILGVKPTPHSVLNDVPVKTYPRSLMLPKEFDARSAWSQCNTIGTILDQGHCGSCWAFGAVECLQDRFCIHFNMNISLSVNDLVACCGFMCGDGCDGGYPIMAWRYFVRNGVVTDECDPYFDQVGCKHPGCEPAYPTPVCEKKCKVQNQVWLEKKHFSVNAYRVNSDPHDIMAEVYQNGPVEVAFTVYEDFAHYKSGVYKHITGGMMGGHAVKLIGWGTTDAGEDYWLLANQWNRGWGDDGYFKIIRGTNECGIEEDVVAGMPSTKNMVRNYDSAFGVGTAIV

SEQ ID NO: 46452 - protein, 250 aa, Oryza sativa
MATRRCLLRLLSRRLLAHTPQPASLASIATRTLASLAKPLVPQASRVLASPRLFPSRCHYASNRSSGDEEEGDDDDHYDEEGSGDEWGEEEEEAVAAKPPSGKTEEEKVAEAAEIGYTVVGPLGADEKPFKPYEPVFAVVQIGSHQFKVSNGDSIFTERLKFCDVNDKLILNRVLMLGSQSQTVIGRPTLPDATVHAVVEEHALDAKVIIFKKKRRKNYRRTKGHRQELTKLRITNIEGIDKSEATAVAA

SEQ ID NO: 46453 - protein, 494 aa, Oryza sativa
MPTASPAHAVFFPYPVQGHVASALHLAKLLHARGGVRVTFVHSERNRRRVIRSHGEGALAAGAPGFCFAAVPDGLPSDDDDDGPSDPRDLLFSIGACVPHLKKILDEAAASGAPATCVVSDVDHVLLAAREMGLPAVAFWTTSACGLMAFLQCKELIDRGIIPLKDAEKLSNGYLDSTVVDWVPGMPADMRLRDFFSFVRTTDTDDPVLAFVVSTMECLRTATSAVILNTFDALEGEVVAAMSRILPPIYTVGPLPQLTAASHVVASGADPPDTPALSAASLCPEDGGCLEWLGRKRPCSVLYVNFGSIVYLTSTQLVELAWGLADSGHDFLWVIRDDQAKVTGGDGPTGVLPAEFVEKTKGKGYLTSWCPQEAVLRHDAIGAFLTHCGWNSVLEGISNGVPMLCYPMAADQQTNCRYACTEWRVGVEVGDDIEREEVARMVREVMEEEIKGKEVRQRATEWKERAAMAVVPSGTSWVNLDRMVNEVFSPGNNM

SEQ ID NO: 46454 - protein, 181 aa, Oryza sativa
MEGGGEEFAIGVLISVKTTLGEEFEGQIVSFDRPTNLLVIQEGVGRAERGERRNVRVLKANYIREFSVVGKADDPLDPAGCVLDLAAIHAREEAALRQAEIEAERIGVGVTPEAQSIFDALSKTLPVQWDKTDIVVMKEVRVCNPYLPENVSGGTSAANERVKKVLDFERKRLHVRVPGQF

SEQ ID NO: 46455 - protein, 597 aa, Oryza sativa
MALWWPLLVLAAAYALCRILLFLIPPTVPSIDVDASDVLEDANQNKEDSYIYIPPRKGKGAQTDKVQCYEPATMKYLGYFPALTPDEVKEHVAQARKAQKIWAKSSFKQRRQFLRILLKYILEHQDLICEISSRDTGKTMVDASLGEIMTTCEKITWLLDEGEKWLKPEYRSCGRSMLHKKAKVEFYPLGVIGAIVSWNYPFHNVFNPMLAAIFSGNAAVIKVSEHASWSGCFYFRIIQAALAAVGAPDNLVHIITGFAETGQALVSSVDKIIFVGSPGVGRMIMNRASDTLIPVTLELGGKDAFIVCEDVDLPSVVQVAVRAALQSSGQNCAGAERFYVHKDIYSTFVSQVVKIIKYISVGPPLSGRYDMGAICMIEHSEKLQNLVNDAVDKGAEIAGRGSFGHLGEDAVDQFFPPTVLVNVNHTMKIMQEEAFGPILPIMKFNSDEEVVKLANDSKYGLGCAVFSGNQKRAIKIASQLHCGVAAINDFASSYMCQSLPFGGVKDSGFGRFAGVEGLRACCLVKAVVEDRWWPYVKTMIPKPIQYPVSENGFEFQELLVETLYGLSVWDRLRSLVNLLKMISEQNNSPANTRKKSR

SEQ ID NO: 46456 - protein, 624 aa, Oryza sativa
MESAHGGSDRPGSMDSQEPRVDAEQKPVLSDNPEEQTIPSKDEKVLEPTISHDSNGINLPSEGQAQAGTSNIGGGHNAAYPQTMYSSQAQPFYYQGPGYDNPSNEWDGYPPYVSVEGLEAGPAVVYNDDPQLMYHGGYGYDPYAHYSPISTPVPAAVSGDGQLYSPQQFSFSAPYYQQSVPPGMPYLSSPTPISQGEAMVPIDPTQGAFIAETLSPNGFLFGPRPEWFRSSEGNGSFPSPAASPQPAGGVSGPFGQSNFPMASGMQSPQHRPFYGFGTPSDSYGRVFSHGGYFPQATNYGGPFPSFGLNGTSSIPMEKGRRRGRGNALLCSCNGSLDFLNEQSRGPRATRPKKQPEDGGKDEKPSAGVDCELYNRPDFVTEYKNARFFIIKSYSEDNVHKSIKYGVWASTTNGNKKLDSAYREAKEKEEHCPIFLLFSVNASAQFCGVAEMIGPVDFEKSVDYWQQDKWTGQFPVKWHIVKDVPNNLFRHIILENNDNKPVTNSRDTQEVKLEQGMEMLKIFKDHEEDASILDDFDFYEERERALLDNKARLHQQHQLPSSTVVEPKKPLTVATDLVGHITKSFAQAVRLGEAKNVSPNSADKGASGDSSVAAKPLEVKEAGLA

SEQ ID NO: 46457 - protein, 570 aa, Oryza sativa
MEGGALALPHFRSRVGIGSPILLSADPGAARRSSGASGRSRVSRVNPGAYPRSAGRGRTWKRDSPEAPPRRSGITRVPNRSPEMPTERAGRTKVSNVNLEVSHHRAVAAVRLLRIEKGKAFVDLLNEKGNSSGENEMSYVERTLGFSIRCLDNRDIRLVTVIVAGTVRWKRYLDYLIMSLCSEEKVFREMEPLLLQILRIGFFEILKLNVPAYAAVDENVRLAKVALRPGAGNLVNAILRKLLLLKEANSLPLPKIEVDDRAQARALSIIYSHPVWMVRRWIRFLGKEEALKLMKWNNSDPHFSIRVNTANGYTRADLIDRLESLQVHYEKSTMDEFVRIQEGMQTVLQAGLLKEGMCAVQDESAGLVVSVVDPQPGETIIDCCAAPGGKTLFMAARLSGQGKIWALDINKGRLRILMEAAKLHNLDAMISDIHADLRLYAKETTATFDKVLLDAPCSGLGVLSKRADLRWNRQFEDLEELMCLQDELLDSASMLVKPGGILVYSTCSIDPEENEHRIAAFVQRHPDFVLQSVHGYVPAEFVTDEGFYSSSPTKHSIDGAFAARLVRSVL

SEQ ID NO: 46458 - protein, 415 aa, Oryza sativa
MAMRLSSAAVALALLLAATALEDVARGQDTERIEGSAGDVLEDDPVGRLKVYVYELPTKYNKKMVAKDSRCLSHMFAAEIFMHRFLLSSAIRTLNPEEADWFYTPVYTTCDLTPWGHPLPFKSPRIMRSAIQFISSHWPYWNRTDGADHFFVVPHDFGACFHYQEEKAIERGILPLLRRATLVQTFGQKDHVCLKEGSITIPPYAPPQKMKTHLVPPETPRSIFVYFRGLFYDTANDPEGGYYARGARASVWENFKNNPLFDISTDHPPTYYEDMQRSIFCLCPLGWAPWSPRLVEAVVFGCIPVIIADDIVLPFADAIPWDEIGVFVAEDDVPKLDTILTSIPMDVILRKQRLLANPSMKQAMLFPQPAQPGDAFHQILNGLGRKLPHPKSVYLDPGQKVLNWTQGPVGDLKPW

SEQ ID NO: 46459 - protein, 1008 aa, Oryza sativa
MLSAAAVMAPAPAAAKSSLEVLLETIKKRDEQPKDAPPALPARPTCRGRLPSARRPSLPSGVKLENGAAKGAVADTVMAGVNLENGAAEGAVADMVMADKKPGVEMKICVQEAKEENVVKTRIFGAKRKFSNGEVLEESPYADNIHKERKEMMVSKELPSVSPRTKTNGKPVFTDTMDYVLQKKLRVWCSSPDATWKLGQIQSVSGDDVEILLVNGEVLTPSPDRLLPANPDILDGVDNLIHLSYLNEPSVLYDLQSRYSRDLIYTKAGPVLVAVNPLKEVALYGKDFISQYRKKLNDDPHVYAIADLAFNEMRRDGVNQSIIISGESGAGKTETAKIAMQYLATLGDARGMESEVLQTNAILEALGNAKTSRNDNSSRFGKLTEIHFSETGKLSGAKIQTFLLEKSRVVRRATGERSFHIFYQLCSGANPLLKKKLFLKEADYYNYLKQSACLRIDGVDDAKRFSMLVDALDIIQISKEDQMKLFSMLAAVLWLGNISFSVIDNENHVEIVSNEGLATAAKLLGCSAPQLMNALTTRKIQAGKDNIIQKLTLTQAIDARDALAKSIYAHLFDWVVEQINHSLGTGREHTWRSISILDIYGFESFIKNGFEQFCINYANERLQQHFNRHLFKLEQEEYLEDGIDWANVEFVDNADCLTLFEKKPLGLLSLLDEESTFPKATDFSFANKLKQHLRGNSAFRGEQEGAFKICHYAGEVTYDTTGFLEKNRDPLNSELIQLLSSCKSELPKYFASVMVADSQNKSTLSWHSAVDSQKQSVVTKFKAQLFKLMQQLENTTPHFIRCIQPNSKQRPMLFEHDLVSHQLKCCGVLEVVRISRAGYPTRMTHQQFAERYGCLLLRSIASQDPLSISVAVLQQFNIPPEMYQVGYTKLFLRTGQVAALENAKNRMLHGALRIQKNFRGLCTRQEYQGLKKGAMTLQSFIRGEKARVHFDHLVKRWKASVLIQKYARRRIAATMFIDQLKYVVLLQSVMRGCLARKKYKCLKEEKDS

SEQ ID NO: 46460 - protein, 533 aa, Oryza sativa
MAPPAMAFQALALGPLPLPLPAARRRRRVRVLAVAADHTPPPPPSPSSPPEPANSPSRLLRELAERKKAVSPKKKHPPRRFILKPPLDDERLTQRFLSSPQLSLKALPLLSSCLPSAPLSAADRTWMDEYLLEAKQALGYPLAPSETLGDGDDDGCPARHFDVLLYLAFQHLDTSCERTRTRHVRSGHSRLWFLGQYVLELAFCEFFLQRYPRESPGPMRERVFALIGKRAIPKWIKAASLHNLVFPYDDLDKMIRKDREPPAKAVFWALFGAIYLCFGMPEVYRVLFEAFGMDPEDESCQPKLRRQLEDVDYVSVEFEKRQLTWQDVAAYRPPPDALFAHPRLFRACVPPGMHRFRGNIWDFDNRPKVMNTLGYPLPMNDRIPEITEARNIELGLGLQLCFLHPSKHKFEHPRFCLERLEYVGQKIQDLVMAERLLMKHLDAPGRWLAEKHRRLLMNKYCGRYLRDKHLHHYIIYGESVQDRFEHNRRLRNPSTTAVQQAIHGLAYCVYGKPDVRRLMFEVFDFEQVQPKAV

SEQ ID NO: 46461 - protein, 389 aa, Oryza sativa
MAKKSKLKKEGSSTTRNPAAELTDDLIVDILSRLPASRSADASAYPGGGAASSPTPTTARSSPKPSPASSTAARTNHAAPKLARHFVNVTGRGRPLICPTISFLPRFDLEGMRMVDCCGGLLLFRCFMSSDEFCYLVCNPSTEEWVAFPDSGYNPEWQFFTHLGFDPAVSSHFHVFEFVMGDCGFVEGVEIYSSETGLWNFMESEWDPETTVYDRTRTFFNGMLHLVEEGIAILSVDVEGEIWQSIGAPRPELENVEDMFALVSCFIGQSQGKLCYLSAYDTVPWNLSIWVLEDYSKDEWTLKHKLTTEQLSEKINCKCKTDFDKAWYYHVVAVHSECNLIYYIAGGDTLMSYDMGHKQSCVIENLGPGNNSGYLPYVPLYSEILSHGC

SEQ ID NO: 46462 - protein, 923 aa, Oryza sativa
MSREPAAAAEAEDVVARLGTDEATGLTEEEAARRLKLYGPNLVVAHHPQVGGKLLATLKCIVLLWGWDHSFTEYIKYEIGWESWEHLIFPCSREMLCVMFINFSSWAALAAALVSLALNSAGQTTYELIVIVSLLVGSLCACCVAKLLANRAKAPLEAKAFARRTKVLRDGIWKHEDATNLVPGDIIYLKCGDIVPANAFVLNMAQIDTKTIRHERSVNYVMGSLIYYGWAVSCGEGTAVVTVTGNNIPMSTLKQLYPKRFSRPGQLRKGVMAAATFCFCLVLVGITSEALVKFFFHQSIGTLHSGHFMPLIGLIPMSIPAVLYLALALDSQRLSKLGVASRGTFALEDLASMDAMLFNMTGTLTCNKPYFDKDKIEVLTEGIDKDHAVLLAARASKAHNELYKEPIDAAILGLMDDPEQARVGINVIEHRSRMFVAMTLMYMTTYIDENGSKCSVLKGDPALMLRDCSCSEEVREHIRKRIDKLGLDGYQCIAVGRIVNSRLDIIILLPFIDDLRSDSAEAVDNLTDMGLSVIVLTESPMTITKHVCGRLGKLGLNVLHADSMRELVSSKNELFLNINGISDLFVEYNRYVISNLRTYFGRRSAMVGYEFSDVDSIRESDIGIAVADATDSTKSESDIVLTEHALLSVSSAVQASREICQIMKGCMVYAVSSTVHAFAVRLILLLWRLELPCFPMLVIAACNYCTSTAMLFERVKPSQSPDSLKANKIIATGAAFGSYIALSTVVFFIMTTRTDFISHIIKARLLVGHDEEIKSALFLQMSIVNHAIGLFAHSRDGHCSGPIVTISSVLSQLVATVIAVYGDVNSPLPKGIGWGWAGFIWLYNFVLLLSLMLICDLCNLAKFNIFGITCRRLFTGWTEWMERCRRLLNRGKTWMEMLTLTAISGLILVWSIYAYHVMKVPQQ

SEQ ID NO: 46463 - protein, 325 aa, Oryza sativa
MEVVVARQPKAKKQINLFYCSECEELALKVAASSDTIHLQSINWRSFDDGFPNLFINNSHDIRGQHVAFLASFSSPSVIFEQISVIFALPKLFIASFTLVLPFFPTGSFERVEEEGDVATAFTLARILSMIPKSRGGPTSVVIYDIHALQERFYFGDDVLPCFETGIPLLLQRLRQLPDADNITIAFPDDGAWKRFHKLLLNFPMVVCAKVREGDKRIVRIKEGNPEGRHVVIVDDLVQSGGTLRECQKVLAAHGAAKVSAYVTHAVFPKQSYERFTHTNSAGSADKFAYFWITDSCPQTVKAINQQPPFEVLSLAGSIADALQI

SEQ ID NO: 46464 - protein, 99 aa, Oryza sativa
MMKTLNKMEFEVKDSVVWQKYFTATTNSVVLKGELCIWGLKKDIMILLIPLDDLSLVIPSKDGFRAVREFSVARDANINLSSLANAFLISRQQILCTLG

SEQ ID NO: 46465 - protein, 862 aa, Oryza sativa
MSSGLKKKGLEWDLNDWRWDSNLFLATPSNASPSKCSRRELGRAEGEIDFGVVDKRRRVSPEDDDGEECINAATTNGDDGQISGQRGRSSEDEMPRQGTCSSSGPCCQVDGCTVNLSSARDYNKRHKVCEVHTKSGVVRIKNVEHRFCQQCSRFHFLQEFDEGKKSCRSRLAQHNRRRRKVQVQAGVDVNSLHENHSLSNTLLLLLKQLSGLDSSGPSEQINGPNYLTNLVKNLAALAGTQRNQDMLKNANSAAIASHTGNYVAKGNSLHDSRPHIPVGTESTAEEPTVERRVQNFDLNDAYVEGDENRTDKIVFKLFGKEPNDFPSDLRAQILSWLSNCPSDIESYIRPGCIILTIYMRLPNWMWDKLAADPAHWIQKLISLSTDTLWRTGWMYARVQDYLTLSCNGNLMLASPWQPAIGNKHQILFITPIAVACSSTANFSVKGLNIAQPTTKLLCIFGGKYLIQEATEKLLDDTKMQRGPQCLTFSCSFPSTSGRGFIEVEDLDQSSLSFPFVVAEEDVCSEIRTLEHLLNLVSFDDTLVEKNDLLASRDRALNFLHEFGWFLQRSHIRATSETPKDCTEGFPAARFRWLLSFAVDREFCAVIKKLLDTLFQGGVHLDVQSTVEFVLKQDLVFVAVNKRSKPLIDFLLTYTTSSAPMDGTESAAPAQFLFTPDIAGPSDITPLHIAATYSDTAGVLDALTDDPQQLGIKAWKNARDATGLTPEDYARKRGHESYIEMVQNKIDSRLPKAHVSVTISSTTSTTDFTEKHASQSKTTDQTAFDVEKGQQISTKPPLSCRQCLPELAYRHHLNRFLSTRPAVLSLVAIAAVCVCVGLIMQGPPHIGGMRGPFRWNSLRSGPK

SEQ ID NO: 46466 - protein, 311 aa, Oryza sativa
MDAVAYMPVVRSGGWADIGSRHTMEDVFICSDNLMKEFGVESFEDGPSAFYGVFDGHGGKHAADFVCSNLARFIVEDEDFPREIEKALSSAFLQTDAAFADACSVNSSLASGTTALAALVVGRSLLVANAGDCRAVLCCRGKAIEMSRDHKPSCNREKVRIEASGGYVYDGYLNGQLNVARAIGDWHMEGMKACDGLGPLSAEPEVMIRDLTEEDEFLIIGCDGIWDVFRSQNAVDFARRKLQEHNDPVTCCKELVDEAIKRKSGDNLSVVVICFNSRPPPVLTTPRPRVQRSISAEGLRELQSFLDSLAD

SEQ ID NO: 46467 - protein, 358 aa, Oryza sativa
MVLQKRLDYGSHGHRAPIKPRVATLAPVKRSTRIRKKQMYALDLLATAAEKLLADQDNLSSGPNINETPEGYVTSMKPVKAEQFDEAFPLRSVAVKKDDCKGCTVGCAGICGFLRQANMCLAENSSTQNLADSVLESLTAKPDVLAKDSFVSSKKSCRLGFGLGTIPEYGSVGVCQPWSTRSAEVKQVHRARPTAIRSQEDSDAAALCALVETMDLDTKPLAEASSGSNSGVHICGPDRGHNSHPSCLAKVQHAADRDDDENSSGCVHPSTSGNNRGYIPHYIGDRRIRRLFASRLRKAARNRICGEMSCKGNKLSLCEKKMPTTRRRVQQTTLKRKRLAQLYSEKSSDEGILTESIF

SEQ ID NO: 46468 - protein, 348 aa, Oryza sativa
MAMAMHRFSLCCVVLLVLAPLAAVAWRPLPPRNGSGEVEGIGASKKFEGSSDFVKLQYHMGPVLAADITVHPIWYGRWPAEQKRTIRAFLRSLSPPGSGSGDGGIPSPSVAAWWRTVRLYTDQTSANVSGVVRLGREKCDARASRGGRLTRLDIQSVVRDAVTARTRPLPVDSSGVYLVLTSPEVVVENFCGQVCGFHYFTFPSVVGYTLPYAWVGNSAARCPEVCAYPFAIPSYVGGGRRAEAPPNGDVGVDGMVSVIAHELAELASNPLANAWYAGEDPSFPTEIADLCEGIYGTGGGGAYTGQLLTDGRSGASYNVNGVGGRKFLVQWVWNPILSYCSGPNALDQ

SEQ ID NO: 46469 - protein, 465 aa, Oryza sativa
MAAAIAAAADDSIVYKLSALLEEVRPSAAALRAASEAADAVAGLVKRIPTQQATHEAVAGFVRDLGLAGEKLAFTFRPPEVVRVAGSHAAGGAVARPDVSADLLVRLPKECFHEKDFLNHRYHAKRCLYLHVIEKSLRSSPLIQKISWSTFLDEARKPILHVYPAKEIAELPGFYVRIIPTASFLFNVSKMNLSTRNNVRAYTKDGINLPTPKYNCSILEDMFLEENVEFISSSVADWKALQEALVLLKVWARQRTSIYTHDCLNGYLISAILVFLTVDSAGSMINRSMTSRQIFRVVMKFLATSKMWTKGLVIQPTKKRTITKEDMVCFLKTFDVVICDVSGHVNLASRMTKSAFIELQDEAACALNCLDKCKDGGFEELFMTKVDLGAKFDSCLRINLKGNLKITTSSFCLDDLAWRKLEKDVQSLLQQGLTDRTKMIRVLWRSTPSEWNIMDNLVAVLCLLA

SEQ ID NO: 46470 - protein, 240 aa, Oryza sativa
MISVIRIRGEEKMEFKAAMFAAAVVAVLLSSPSPALAQKKSPPAAPSPVSLPPSLAPAPAPAPHYVDLAELLSVAGPFHTFLNYLEKTNVIETFQSQANKTKEGVTIFVPKDSAFAAIKQSTFSNLTGDQLKTLLLYHAFPKFYSLAEFKNLSELNPVNTFAGAPYTLNLTDDMGTISVQSMWSRPKISSSVYATRPVAVYALNKVLLPMQIFSKDPPAAARRTRRAPRAASAPASSMAW

SEQ ID NO: 46471 - protein, 102 aa, Oryza sativa
MGYDAMAHDASSPSTARDAKKKRIRGNRSAKLKQSKLDVRREQWLSQGWEGGEGCGIPWSSGRSQLRVADPRIPAPSTPSPACRDSDEGRGSRGFQGGFSWR

SEQ ID NO: 46472 - protein, 252 aa, Oryza sativa
MADSGSASERREEGKKGREEEEEDDVVCLDPSFFVDRSYETTTFTFGSQVLHLLCLRAASTDYDLTGQLVWPGAVLMNTYLSEHPETVKDHSIIELGSGVGITGILCSRFCKEVVLTDHNDEVLEIIKKNIEMQSCSGNANAVLTAEKLEWGNYVHISNIIEKHPSGFDLILGADICFQQSSISCLFDTVERLLRIQASKCRFILAYVSRAKVMDVLVLKEAEKHGMHVKEVDGTRTTISNLEGVIYDITLK

SEQ ID NO: 46473 - protein, 89 aa, Oryza sativa
MARGGGYGWALAAGLNAALAAISAKFFAPPLLKYSMVILFNVTMWGCYVNSLKALSSLQATVTNFAANFISSGLAGYFLFEEPLPSKVI

SEQ ID NO: 46474 - protein, 845 aa, Oryza sativa
METDEGFQPVFFQPRALKNLYRIDEIESLMPIMDMRVANLFDEETPQVFTACGRGPRSTLRILRPGLAISEMARSMLPAEPIAVWTVKKNINDMFDAYIVVSFANVTLVLSIGETIEEVSDSQFLDTTHSLAVSLLGEDSLMQVHPNGIRHIREDGRVNEWRTPGKKTITKVGSNRLQVVIALSGGELIYFEMDMTGQLMEVEKQDMSGDVACLAIAPVPEGRQRSRFLAVGSFDNTIRILSVDPDDCLQPLSVQSVSSAPESLMFLEVQASVGGEDGADHPANLFLNAGLQNGVLFRTNVDMVTGQLSDTRSRFLGLRPPKLFPCIVSHRQAMLCLSSRPWLGYIHQGHFLLTPLSCDTLESAASFSSDQCSEGVVAVAGDALRIFTIEHLGETFNETAIPLRYTPRKFVILPKKKYLAVIESDKGSLSAEEREAAKKECLEAAGVTENGNANNGDQMENGDGQEDGAEDRNTLPDEQYGYPKAESERWVSCIRILDPKSRDTTCLLELQDNEAAVSICTVNFHDKEHGTLLAVGTAKGLQFWPKRNLSAGFIHIYKFVDEGRSLELLHKTQVEEVPLALCQFQGRLLAGVGSVLRLYDLGKRKLLRKCENKLFPRTIVSIHTYRDRIYVGDMQESFHYCKYRRDENQLYIFADDSVPRWLTAANHIDFDTMAGADKFGNIYFARLPQDLSDEIEEDPTGGKIKWEQGKLNGAPNKVEEIVQFHVGDVVTCLQKASLIPGGGECLIYGTVMGSVGALLAFTSREDVDFFSHLEMHLRQEHPPLCGRDHMAYRSAYFPVKDVIDGDLCEQFPSLPADMQRKIADELDRTPGEILKKLEDIRSKII

SEQ ID NO: 46475 - protein, 84 aa, Oryza sativa
MCSSSAVRTTIAPRAPPYREKSLRLPSIVAPLPHRRAGAHHRHRRPSLSTLPPLRLRPPSFSADAVPPPFLLPPTYYRCRHPSQ

SEQ ID NO: 46476 - protein, 780 aa, Oryza sativa
MGSEAKEMKYRRRARVPEPFDYGQCGGDRSGVLDWGALKENPVELLRKLDELRDHITRSCEITDQPRERHRMSRRTASLRPSHAEPPPLGRGPEHYRSRYTGRYGSGFPHSPNDQLHRSMHRDRYERQPSGRFRQWPERQWENSGYLGGNHHQSTCQCAQCLHGQRAVMQEEHIPMTRYFAGQQGSHLFDRSPSVSSELDRRSVASSLYSHFSVSKRRTEFFRKKAESFCRPVRGAAPFVVCSSCNQLLQLPPGKCTARKQIQVRCGSCSEIVSFKLKEVKIHPLVAPTSFPASKTVGSSSRQVNKSFGWYQHQDEGNSSFHKLQAQERWQQNKDLADNISVSSTSSYDRIDKECGSNRSSQLLSVSVRRSRLANIPKDILCQGDAYSQVETSAFNTGNLQAPVIEDKCVDPFSSRLKDCSGGDRTSKECSLNIMADSVDANVRDERSDVTYEQNSKDHKEGFGEETVSSRHEQKLKESTSGFCDDGSMGNIDKLTADNDDTSSLEDGDVSKKYEEKIKQDDNNFQSEFITERYSKCSKEDNNSVIQVETIATICKQDDLDDCYSELLSPNSEHAIMPSKLESSVNERTNSSSRVSSEAELDEVQSAATKNGDSKFFAGFLKKGLKDISLFNQSVDSAKVSINGHSISERVLRKAEKKSGPVGPGSYWYDYRAGFWGVMGHECSGIIPPFIKEFNYPMPKNCAGGNTGVIVNGRELHQKDFELLAGRGLPRISGKSYSVEINGNVIDETTGKKLRKLGKLAPTVEKLKRGFGMHVPEEKS

SEQ ID NO: 46477 - protein, 172 aa, Oryza sativa
MAGGRTYWDKALTKIFLDLCIAEKTKRNHNKKGRTNIGWQNLYRNFREQSGKNYDSKQLQNKFSTFKRQYKLWKSLKNKSGGGWDNNSSTIRCDDDWWEDRIEENRDARQFRGKPLEHEDELTTHFGCMDTEEGTMLCVGGIGKRTPSSGSDDNLTPMSNDNVGLSSAGRVA

SEQ ID NO: 46478 - protein, 477 aa, Oryza sativa
MGKLVSKSWQESKLLWHIAFPAILTAVFQFSIGFVTVGFVGHIGQVELAAVTVVENVIEGFAYGVLLGMGSALETLCGQAVGAGQVSMLGVYIQRSWIICGATAVILTPTYVFTAGILIGLRQPTDIAAVAGTYTRWVIPQLFAYAANFPLQKFFQSQSKVWAMTAISGIALALHVVLNYIFLTRLGHGLVAAALIGNVTWWLIILAQFIYLVSGCFPEAWKGFSMLAFKNLAAFVKLSLASAIMLCLELWYYTAVLILVGLLKDAKLQVDVMSVCINYQLWTLMVALGFNAAVSVRVSNELGANRPKAAKFAVAMAVSTSAIVGAVFMAVFFIWRTQLPRFFSDDADVVRESAKLGYLLAATIFLNSIQPVLSGVAIGAGWQSLVAFINIGCYYLVGIPLGVLFGFKLKLDAMGIWVGMSLGTLLQTAILAFISFRTKRERQAMMAEERIREWGGRNDDALPSTTTPTADDHNVDR

SEQ ID NO: 46479 - protein, 246 aa, Oryza sativa
MELFVMIDACRRASARSITVVIPYFGYARADRKAQGREAITAKLSANLLTEAGSDRVIVCDIHSTQALGYFDIPVDHIHGQPVILDYLASKTISKDLVVVSPDVGGVVRARAFAKKLSDAPLAIVDKRRQGHNMSEVMHLIGDVKGKVAIMVDDMIDTAGTITSAAALLKQEGAEAVYACSTHAVFSPPAIERLSGGIFEEVIVTNSILLPEHKCFPQLTVLSMANLVAETIWHVHRDGSVSSIFQ

SEQ ID NO: 46480 - protein, 351 aa, Oryza sativa
MAPVVSRGGGGGGRAMGAKERKEAAQREKEAGDEAYGEELYKRAAAHYAAAADLDPGDTSCLIKRAAANFSMNKCKECVADCDEALGRRRRRDARCGCDEKLAADALFLKALALLNLAVCAADHEPAITALEGSLELRPGSKETRAKLDMAKRNRDAFAEQERLDQEAAKTHRDRGLELLRKKKYKEAEMQFSEAIKRNPRYPKNFSDRARCLVELNSLPKALEDANRCIELDDTLGMGYLRKGLVQIAMAKYEDAIATLVDGLKHDPQNLSIHNSLRECAARIKMAKDSDAIAKDLTKHQREIECLHKQLNEGENKASKERSRRMKSEKLVKTLSSQVEQLRSANERMQI

SEQ ID NO: 46481 - protein, 513 aa, Oryza sativa
MSIEERTLSLINKTTALNPNAQEFVPSSLRSINDVSNRSDTSRISVSGYSKDTIADQQDPVIPSNPDEEAHRYWQEQLPDDITPDFKVLGQDEMPGPDNISLTGLSINDSIGASLFSPNQTSNLQHRASPFIRDTLSTRSKIEFPSPTYVEEQSRATIMSPTASAMSPTAAPWVKTVRNGVQYNANRRDASHYNGDSSIGAPVQNLTDAYFGSRRSFSSTMDIMSQLENKVDGRFNQNLRSLSFGHSSPPSPASYGQNGLANYNKEAFGLANNTYRSHSAVLADDILSPSAGREHISLDAPRGRYNTTNLPVSGLGSSRGSQFMASSFNGNHDIVSNNTLQNIAGVQTGPAWLEADTAANMFLESKDEAHDFASLRHALLEQDRQVLLTGANPLAKELNIKELYNLQSRLAQEKARDVYRQRFQMPEFQGLVQEQNTPIDLCGLHVSEAIHALNYELNNRRKIARSTGRRLQVIIISSTRTPARLTAAVEQYLLEHGIQYTQAQPGLFRVLLQ

SEQ ID NO: 46482 - protein, 304 aa, Oryza sativa
MLLRSIGQASHLTDDPPDEKTDATKIKAWKTADDRVMGFIFMSVEVPIRMSFRDHTTAKEMWDYLKQRYTQESGALRFSLLQNLHNLQQQDQSIEEFYNAFTRLSGQLEAQTPKGASGCAQCKAREKHDQENLVYQFVMRLSSQFESIRVQLLGRPTRPTMAEALADLIAEETRLCSLDTTPTPVVTHNVMAAPQRVGAPMGGIPEFSSIAKSDRICSHCKKVGHISDDCFYLHPEKLADYQARRAAVPRPRATASAPVFLDITAAGPSSTSAGGSASSAVSCAPQSLVARPSYQASDWSWPSP

SEQ ID NO: 46483 - protein, 393 aa, Oryza sativa
MAAPGLDEVMAFLTDHGFAGAASALRDDVLARAASAAGDAGSDSDAALDPQLPPLRLPASTSGGGGAPAAPPASPGSSSDSASSSAFVSMRSSPSGMLNPYGVWSPRHSGTSSSEMEFGTARQYDATDFFFQEGWLYDDHLFHSKSELDDDNGEDKEEDKFVLGVHDGSGRIEMGVLSAGDDHRHEHVGNDGCEGCAEVYTCSSPLCGCCGEGLKNGGLEVVKDSSSTVYGRYQIIDDQTEILDECGMDGFQLKHPADVVLECHLPRDSGEGDERSELSVVEKELQMLSSFGTRVDADAFTSPGLVHDITDNAKLDDSIEKNMKNSSDKYLKEGYSIEPFPESSVDDTFEFGDIGPLNTDAQNSAAAKAEEGNPETNVDLALANFHREYEDLN

SEQ ID NO: 46484 - protein, 718 aa, Oryza sativa
MPLLLLRAGAGAKPPLSFSVPPPPGDVRISSRPPTTATRCSSSSSPKLSSATVQFRSDSDPWNQPTVDDDGDFDLKGRKAIPGIHVPRQRYIAVSKPALLDALLSLFPSQPPTPSPTSAAAADFKRFARCLDALLHAEHKEMLEEMRTYYMLTHNHHQHTAAADDDDDDQSVLNGNANTTAGFFGITDNGTLLLTRSLGLRTLLGLSPDPDSHNRIAFATHFQRSFMNLLRNAQFEELSAQDLLLTYALNTDYLLTLPIYVDWKKAAESNAIIFRRGYATERQKGLLLVEKLDYLQSKLLQNIFFGFSKPLRKLGKWLNEALKRSTGNEGFQIWIEKLKVWLKEQTYAENSLSLIENSSWDKLRSDQLPDADLPIWIAAQRAVSRYEGILSPVGPRGRLLRRLLAWTGLIPSLPEATIKSDIDTKDLEGYVRPNFLPRITLANIWAPASRESCNNNLWEITKASFGVLFGKSTLQEPAFQELILLYTDEADQSKEREKSDMMPLQLKIFERIPIPDLPVVFPHKKLSFRILDTVRLDIATVIGLLAYVVNYKFESLASSPSAFLLDIVAFTALAILVFRVALGYKQTRDRYQLLVNKTLYEKTLASGFGSVYFLLDASEQQQYKEALLAYGMLLCRKKYQVSSRVSIRDTCEQFMYEKFKAKIEMPIDKAMETLLRLGLVIELPTDGGSRVIALPCSDAYEILKSRWDSLLEHKTEQG

SEQ ID NO: 46485 - protein, 102 aa, Oryza sativa
MKGMVVMEREVRVTLRGDRLGQVPRCEARPEPRDPRRELLVRRRADGGLGLHHVRGHSCFFSSRYAIGAEATEAAREAAGGGGEECHGGRARLLRPRRFWSI

SEQ ID NO: 46486 - protein, 73 aa, Oryza sativa
MTSSSIWMKISPLLLIDEPCKQAKEMIFFFYLSKFQKSTTIWVKTINLLHVILMHTCQVHTHAQLVTVAELAV

SEQ ID NO: 46487 - protein, 394 aa, Oryza sativa
MASGTDEKAKMEGLTSAAAFVEGGIQDACDDACSICLEAFCESDPSTLTGCKHEFHLQCILEWCQRSSQCPMCWQPISLKDPTSQELLEAVERERNVRTNQTRNTTIFHHPALGDFEVQHLPVVGNDAELEERILQHLAAAAAMGRSHHLGRREGHRGRSGSHGRPQFLVFSSHPNMPSAGSVSSSSVQGEVDNESSPVHTTGELSLHANTHEEAGNQSPGMLTYDADQDAVVSSGNSTPVSSPRFFNRRHSTGQSTPVNNDRAGPSDLQSFSDSLKSRLNAVSMKYKESITKSTRGWKERLFSRHSSVADLGSEVRREVNAGIASVSRMMGRLETRGSNGRTSDGPAISTSEVIPSTESSNERVTENNPTTAATGSGNTSASSAPCVTTTGSN

SEQ ID NO: 46488 - protein, 310 aa, Oryza sativa
MSSLAAARADNFYYPPEWSPKKGGLNKFHGQHALRGRARKLDQGILIIRFEMPFNIWCGGCNSMIAKGVRFNAEKKQVGNYYSTKIWSFTMKSPCCKQEIVIQTDPKNTEYVIISGAQRKTEDYDVEDAETLLLPADEERDKLADPMYKLEHQEEDLKKKKEAEPVLVRLQRLSGSRHSDDYALNRALRDRLRSQKKRVAEEKRSARKMGLGVRLLPPSAEDATAAASVKFASKFEKSRRDKRAAIKAASIFPESSSSTSKNKLDLALKRRNIKAGAASALMASRVKPSSWQSAGSGSSRTQMPIMATRK

SEQ ID NO: 46489 - protein, 1052 aa, Oryza sativa
MVCSLMMQLTTTWPWRFFFCLFFHLLFLFPTNSLNQSYCDPGDASALLGFMQGLSGSGSGWTVPNATSETANCCAWLGVKCNDGGRVIGLDLQGMKLRGELAVSLGQLDQLQWLNLSSNNLHGAVPATLVQLQRLQRLDLSDNEFSGEFPTNVSLPVIEVFNISLNSFKEQHPTLHGSTLLAMFDAGYNMFTGHIDTSICDPNGVIRVLRFTSNLLSGEFPAGFGNCTKLEELYVDLNSITGSLPDDLFRLSSLRDLSLQENQLSGRMTPRFGNMSSLSKLDISFNSFSGYLPNVFGSLGKLEYFSAQSNLFRGPLPSSLSHSPSLKMLYLRNNSFHGQIDLNCSAMSQLSSLDLGTNKFIGTIDALSDCHHLRSLNLATNNLTGEIPNGFRNLQFLTYISLSNNSFTNVSSALSVLQGCPSLTSLVLTKNFNDGKALPMTGIDGFHNIQVFVIANSHLSGSVPSWVANFAQLKVLDLSWNKLSGNIPAWIGNLEHLFYLDLSNNTLSGGIPNSLTSMKGLLTCNSSQQSTETDYFPFFIKKNRTGKGLRYNQVSSFPPSLILSHNMLIGPILPGFGNLKNLHVLDLSNNHISGMIPDELSGMSSLESLDLSHNNLTGSIPSSLTKLNFLSSFSVAFNNLTGAIPLGGQFSTFTGSAYEGNPKLCGIRSGLALCQSSHAPTMSVKKNGKNKGVILGIAIGIALGAAFVLSVAVVLVLKSSFRRQDYIVKAVADTTEALELAPASLVLLFQNKDDGKAMTIGDILKSTNNFDQANIIGCGGFGLVYKATLPDGATIAIKRLSGDFGQMEREFKAEVETLSKAQHPNLVLLQGYCRIGNDRLLIYSYMENGSLDHWLHEKPDGPSRLSWQTRLQIAKGAARGLAYLHLSCQPHILHRDIKSSNILLDEDFEAHLADFGLARLICPYDTHVTTDLVGTLGYIPPEYGQSSVANFKGDVYSFGIVLLELLTGKRPVDMCKPKGARELVSWVLHMKEKNCEAEVLDRAMYDKKFEMQMVQMIDIACLCISESPKLRPLTHELVLWLDNIGGSTEATK

SEQ ID NO: 46490 - protein, 508 aa, Oryza sativa
MGWKAAMVGGKLAGVGGEKLRCAAAPAAAARSRMKLWMVRATTTVLLWTCVVQLTAVGDTWGPRVLKGWPSCITSPDDDAASATLAAARPEPVVDKAVLPPKRIYRNNGYLMVSCNGGLNQMRAAICDMVVIARYLNVTLVVPELDKTSFWNDPSEFQDIFDVEHFITSLRDEVRILRELPPRVKRRVEHGMYHSMPPISWSDISYYHNQILPLIRKYKVLHLNRTDARLANNGLPMEIQKLRCRVNYASLRFTSQIEELGKRVIRILRQNGPFLVLHLRYEMDMLAFSGCTQGCSNEEADDLTRMRYAYPWWKEKIINSELKRKDGLCPLTPEETALVLRALDIDRSMQIYIAAGEIYGGKRRMSALTSAYPNVVRKETLLEPSDLMFFQNHSSQMAALDYLVSLESDIFVPTYDGNMAKVVEGHRRYMGFKKTILLDQKLIVELVDQYNNSSLRWDEFSLMLKAAHANRMGSASKRTVILDRPKEEDYFYANPQECLQDSNLLHTS

SEQ ID NO: 46491 - protein, 661 aa, Oryza sativa
MAAEEGARSPTRMLAEGHLRVATGGGAPADGGIAVRHLPHHHASKRGAGGKNEQYNLEDVDSVPSKMSNKLVNGNNKVPATLDDYKRLLVPVIEEYFSTGDVELAASELRSLGSDQFHSYFIKKLISMAMDRHDKEKEMASILLSALYADLLGSSKMSEGFMMLLESTEDLSVDIPDAIDVLSVFVARAVVDEILPPVFLTRARALLPEFSKGIEVLQVSEKSYLSAPHHAELVERKWGGSTHFTVEEAKRRIQDILKEYIESGDIDEAFRCIRELGLPFFHHEVVKRALTLSMENLSSQPLILKLLKESTAGCLISSNQMSKGFCRLAESIDDLSLDIPSAKILFDKLVLTATSEGWLDASFTTSSAPNEDMRNASGEKIKHFKEESGHIIQEYFLSDDAPELIISLQELSAPEYNPIFLKKLITLAMDRKNREKEMASALLSSLSLELFSTDDIMKGFILLLQSAEDTALDIVDAPSELALFLARAVIDEVLIPLNLDEIGNRLRPNSSGSQTVQMARALLAARHSGERILRCWGGGTGWAVEDAKDKIAKLLEEYNTGGDLGEACQCIRDLGMPFFNHEVVKKALVMAMEKENEARILALLQECFGEGLITINQMTLGFTRVKEGLDDLILDIPNAQEKFGAYVDLATERGWLLPPFA

SEQ ID NO: 46492 - protein, 286 aa, Oryza sativa
MAGRYDRNPFDEDDVNPFAGGSVPPASNSRMPPLPHEPGFYNDRGATVDIPLDSTKDMKKKEKELQAKEAELNKRESELRRREEAASRAGIVIEEKNWPPFFPIIHHDISNEIPIHLQRMQYLAFSSLLGLAACLFWNIIATTAAWIKGAGVMIWLLAIIYFISGVPGAYVLWYRPLYNAMRTESALKFGWFFLFYLIHILFCIWSAVAPPFPFKGKSLAGILPAIDVIGNNAIVGIFYFIGFGLFCLESLLSVVVIQQVYMYFRGSGKAAEMKREAARGAMRSAF

SEQ ID NO: 46493 - protein, 197 aa, Oryza sativa
MLEIVKDRMPTFSDEESRMVKDSIDYVGINHYTSFYMKDPGPWNLTPTSYQDDWHVGFAYERNGVPIGAQANSYWLYIVPWGINKAVTYVKETYGNPTMILSENGMDQPGNVSITQGVHDTVRIRYYRNYITELKKAIDDGAKVIGYFAWSLLDNFEWRLGYTSRFGIVYVDYKTLKRYPKDSAFWFKNMLSSKKRN

SEQ ID NO: 46494 - protein, 175 aa, Oryza sativa
MASLRAAPGLPFSPRPACCRPPSSPGVQFFTPASAGGAGGVGRRRSYPRIEASARHGARKENPKVRNRRLQKKFNGTATKPRLSVFCSNRQLYAMLVDDHNRKILFYGSTLQKAICGDPPCGAVEAAGRVGEELIRACKELDITEISSYDRNGFARGEKMMAFEVPVSQYGFLPR

SEQ ID NO: 46495 - protein, 702 aa, Oryza sativa
MGMENPPLRWPPGFRFSPTDEELVLYFLKRRIATGRPTPYIADVDVYKSHPSHLPERSALRTGDKQWFFFSRMDRKYPNGSRASRTTGEGYWKATGKDRSICNGGGGGTASGRAVGSKKTLVYHHGRAPRGERSDWVMHEYTLLADALPPAARDREAYALYKLFHKSGAGPKNGEQYGAPFREEDWLDDDDHHHDQLPAEAALPAPATTSGRAATTEEHADFELPGGDLDVLLAQIENDQDIIEAQLDFSTHVTSQVQIQHRVHQGWLSDDGGKSDVADATTSGSALLMAENTCAELPIDGLEQLLMQISDDQQTVEMLSGFSASVPQSQLQHDYHQGCLGVHREEVGVADSTTVSSAVVTEECTVRELQDIEGLLMQIENDQENAESLPDFSTPVHLHDCHQAAFGDFQGSQRATFNIANLSTMVQESPNFDLQTGPSNQITESILTTEPMNGETNAVEETSPLRSMSVLGSYDRQDGDDEFLEINDFFDPEDLEQILGSTRSQNLIPADDGVFDSLQYSDAPMFLPGSFDRTGVVAENHYVEFGASGIQNQGFQHTTELLAHNQVALNVRNHMKDNHVVFSHSSDATIIHTVNEQPPNRSSNASQSWFNGALSALLDSVPSSPAMAAENIGLNRTLQRISSFRSQQPAREEVSSTLINTRRRGGGLIFISLMVLLVAIMWTFSNGSAVKLSKGLWKFPST

SEQ ID NO: 46496 - protein, 625 aa, Oryza sativa
MAATIPASPATLQPCKKNVSGSMLIRSPPRPWRRRLPQHVVIVDASSSSRGPKAATGGRLETSTDAAAVAGEDGDVIRRLQNGPDVRGVALEGENGRAVDLTPLAVEVIAESFGEWLREELQQLESGRDGGEVRVSVGRDPRLSGARLGAALFAGLARAGCSVFDVGLATTPACFMSTKLPRFSYDASIMMTASHLPYTRNGLKFFMKRGGLTSGEVEGVCDRAARKYVARKMGLGGGRGMPPVVMRVDLMSAYAQHLRNIIKERVAHPTHYDTPLKGFKVIVNAGNGCGGFFTWDVLEKLGADTTGSLHLEPDGKFPHHMPNPGDTTAMSLTRDAVLDHGADLGVVFDTDVDRSGVVDATGAAINGDRLIALMSAIVLDEHPGTTVVTDARTSDGLTRFIQARGGHHCLYRVGYRNVIDKGVQLNADGVETHLMMETTGHGALKENNFLDDGAYMVVKIIIEMVRMRLVGLEGSVGTLIMDLEEPAESKLMRMNILGEAKYAKQRGTQAVETFRNHIQEGKLNGWVLDDCGDCSVSQGCLVDTNDDPFDVDAYMYRAKFFDEYKGELGWVHIRQSVHNPNIAINMQSSIPGGCKSTAKDLLDRYLLTSGVNEFVDITEVQKFVK

SEQ ID NO: 46497 - protein, 1040 aa, Oryza sativa
MAAAAAAWRDDELVIKSPSDHRSYRLLRLPNGLCALLVHDPEIYPDGYPDPHASKPHEDEDMGEEDDEEEDGDEDDDDEEYSDEEGEDDEDDEGEEDEEDGSEPKRRKEKGSSEPLVKKAAAAMCVGMGSFADPPKAQGLAHFLEHMLFMGSSEFPDENEYDSYLSKHGGSSNAFTETEYTCYHFEVKREYLKGALDRFSQFFVSPLVKAEAMDREILAVDSEFNQVLQSDSCRLYQLQSHTCSQGHPLNRFTWGNKKSLVDAMGSGINLREEILQMYKTNYHGGMMKLVIIGGEPLDILESWTMELFSKVKGGPLLDMSPKTDMPFWRSGKLHRLEAVRDVHSLCLSWTLPCLHKEYMKKPEDYLAHLLGHEGKGSLLCFLKAKGWASSLSAGVGTDGTQRSSYAYIFEMSIRLTDSGLKNLYEVISAVYQYIKLLKQSEPQEWIFKELQDIGYMEFRFAEEQPPDDYAVDLAENMLYYSEKHIVSGEYIYEGWDPELVKHVLSFFHPDNMRVDVLSKSFDKQSQAIQCEPWFGAQYIEEDIPSSFMESWRNPAQIDDAFHLPRKNEFIPGDFNLRNANMPKPLSDDNPRCIVDEPFIKLWYKMDMTFNVPRANTYFLISVKDGYSNLENSVLTDLFVNLLKDELNEVLYQAYVAKLETSMSVVGSNLELKLYGYNDKLSTLLSSILAASQSFSPKSDRFEVIKEDLERAYKNTNMKPMSHSTYLRLQVLREIFWDVDEKLEVLMKLTFSDLVAYVPKLLSQLHIEGLCHGNLSEDEAMNISKIFQNTLSAQTLPDEARHEERVLCIPDDTNFVRSVRVKNELEENSVVEVYFPVEQDIGKDATKLRAITDLFSNIIEEPCFDQLRTKEQLGYTVDSSPRMTYRVLAYCFRVMSSKYSPVYLQSRIDSFIDGVSALLDGLDEETFEHHRSGLIADKLEKDPSLSYQTGDYWSQIVDKRYMFDMSKLEAEELRTVRKEDVISWYNTYIKPSSPKRRRLAIHVYGCNSDIAEAAKLKEQSWITIDDVKSLKKSSQFYSSLC

SEQ ID NO: 46498 - protein, 509 aa, Oryza sativa
MAFAATKPSKSPLLILLVSGVAFLLLASAAECYGGGRHDVTRSAVARRSGVGSRRQYVRHRLTGGAVDVPHRYMLAEKGSNSTRANHTSPAASNSTPSATTTEAPAAGKHHRSHKHRVRNWIIGFVVGSLAGVVSGLAMSVLFRMALNCVRGGYRSKSDTVIFIPKLIKSKEHLAFLEKDQDGLASLAVIGRGGCGEVYKAQLPPEREGDAPRFIAIKKIKKRSGDGSGGQNNNLSDEESRQLDKWTRQIQSEIRTVGHIRHRNLLPLAAHVPRPDCHYLVYEFMKNGSLHNALKATTTDTTTNDYNDNNSGEHPPPSPALPWPARLRIAVGIAAGLEYLHVSQRPQIIHRDLKPANILLDDDMEARIADFGLAKAMPDAHTHMTTSNVAGTLGYIAPEYHQTLKFTAKCDVYSFGVILAVLGTGKEPTDKFFAQQVVDDVGIVRWLRRVMQEGDPAAQAGVIDAAIAGAGHDEQILLVLRIAVFCTADDPKDRPTAKDVRCMLSQIKN

SEQ ID NO: 46499 - protein, 287 aa, Oryza sativa; identical to SEQ ID NO: 32901

SEQ ID NO: 46500 - protein, 213 aa, Oryza sativa
MATEEDASTMAAAEADPKPAATPSYPEMILAAIEALDDRNGSNKTAISQHIEGKYEGLLPPAHPSLLTAHLARMKQTGELAFSKNNYFRGDDPSLPPKRGRGRPPKPKDAAAAAAAPAPAPAAPAASSPRPRGRPPKPKDPLAEAVAKATSGMPRARGRPPKKAKVEQEDPIGAPAAASAPAAAAEAAPPVKRGRGRPPKVRPAAPVGEPAAA

SEQ ID NO: 46501 - protein, 196 aa, Oryza sativa
MSFFVGIQMRFLYAPRMEEFILKTIRERWRGHKAKLKEKYFDVNKSKEANCNNVPADVLPDQWIALINHWMSEKSKKISKQNKENCRKKKALHTAGTNSFARTREEMRQKDPAKNPHRAIVYIQTHKRKTGKNLNGHVDNLKKLVVEQPALADTSEGRTAWKGDALNQILGDDKPGHVHGLGLVPKPKQVLDVPNS

SEQ ID NO: 46502 - protein, 301 aa, Oryza sativa
MEMSSLKSPVFHVPGELTTCIRLPKGVLKIKTDCASLIDHNEGIHRTPEPMLADQLGIQVSSLPCASALDVHGFAMNSAYYYHINTSKSTLRNLHVRPYQREGTLDTYPHSVESPFGVQIMVPEELKRGYYSRMPNSFHQSTTKHSPEYCNEAPHEKNLLKNFGQQNAVIPESSPDPFTRNTDCHQTNGYMTHGLKTAESISEVLTLGTDTAGPYKHLLEQSETMRYPEGLKLKTPASQSVTEVEEGHRYPFTYKRRKLQKRLDLVDPVKKSTMVDSEPLSALASVANVKIKGNQALKIGS

SEQ ID NO: 46503 - protein, 395 aa, Oryza sativa
MEGGGGGGEEMMMTSGATGRIVPVFRSVLSRRALLRLAVALHSLLLWVFLLVGGGGWRRRRGDAGEGAEAGRAVRTRRRAAEKEDVRRRRALAEEVAMVEDADGEGARRWETFVVPGARRNALFCRVWAPAAAAAEMRGILVIIHGLNEHSGRYLHFAELLTSCGFGVYAMDWIGHGGSDGLHGYVPSLDYVVEDIDVLLGKIVLENPGVPCFLLGHSTGGAVVLKASLFPRIRAKLEGIILTSPALRVKPAHPIVGAVAPIFSLLAPKFQFKGANKRGIPVSRDPAALLAKYSDPLVYTGPIRVRTGHEILRISSYLLHNLKKVTVPFMVLHGTADRVTDPLASQDLYNEASSRHKDLRLYDGFLHDLLFEPERDEIATDIIDWMERMLALQTV

SEQ ID NO: 46504 - protein, 134 aa, Oryza sativa
MNFRLLLVLLCVVFEIILQYCSNFKLLSHPRHLYSHEFFAICSSIYSFIISQKRSEIIRSYKSDIFFVQNGVIMSFDMFDLTQNATGNSSYRVTWQSPQVCCSATHQCSKTIYFTCCIFTLHVSFICSNRGEWI

SEQ ID NO: 46505 - protein, 414 aa, Oryza sativa
MIPNPLLDRMEIIAIAGYITDEKMHIARDYLEKNTREACGIKPEQAEVTDAALLALIESYCREAGVRNLQKQIEKIYRKIALQLVRQGVSNEPTQEAAIVTASEEPNGGDSANKLKDETMEDPATENAAMTNADTASKEASELDLLNRTVDHDVHPAETPKEAVLTDSALSTDKLCTPEGNKDMEGAKEESADKAVEKVVIDSSNLGDYVGKPVFQAERIYEQTPVGVVMGLAWTAMGGSTLYIETTKVEEGDGKGALVMTGQLGDVMKESAQIAHTVGRAILLDKEPENLFFANSKVHLHVPAGSTPKDGPSAGCTMITSMLSLAMGKPVKKDLAMTGEVTLTGRILPIGGVKEKTIAARRSAVKTIVFPAANKRDFDELAPNVKEGLEVHFVDTYNEIFDIAFQSETQTETS

SEQ ID NO: 46506 - protein, 390 aa, Oryza sativa
MWIVPITLGCNSHDMQKRFLLKHKFSDIKGINSQYDDQDRQNSGNFWIKLNIDETGFYRVKYDDELTTALRNALQMKKLSLMDKIGIVEDAHALSIAGKQTLSSLLHLLYACRDEDDFSVLSHINSVTSSVAKISIDATPELAGEIKQLFIKLLLPTAEKLGWDPKNSESHLDAMLRPVLLVGLVQLGHDKTISEGVRRFQIFFDDRNTSLPPDTRKAAYLSVMHNVSSTNRSGYDALLKIYRESTEVEERLNVLGILSSCQDKDIVLESLNFIFTDEVRNQDAYLVLRSVIIDARETAWSWLKENWDRITKTFAASAILSDYVKSIVTLFTSKEKEAEISQFFATRTKPGFKRALKQSLENVRISARWVDGIRGEAELAQTVHDLLIKL

SEQ ID NO: 46507 - protein, 548 aa, Oryza sativa
MSSEPPPDAAAAAASSAGDLAADLSCHHQQEAAQEGCEEGGEGREGVAAPAAAAAAGRRRRPLRGQLRRRPRRGDPVQDHLRPRVDRDRRPRRGRRRPLRPHPRRRAGDPARQQEDGLRCAAREHEHRPVRARRQRRRRGQHPDGALRHLPQQGINRRRRGRRLPPQGAPQGHHAAGGDQVRKIYCINRAIPTLPINLEDASRSEAEIEKAEQAGEKLVRVGQDTRLNYRAIDLRTPANQAIFRIQCQVENKFREYFLSKNFVGIHSPKLIAGSSEGGAAVFKLQYNGQPACLAQSPQLYKQMAICGGFERVFEVGPVFRAENSNTHRHLCEFVGLDAEMEIKEHYFEVCDIIDGLFVAIFKHLNENCKKELETINRQYPFEPLKYLEKTLKLTYEEGIQMLKEAGTEIEPMGDLNTEAEKKLGRLVKEKYGTEFFILYRYPLAVRPFYTMPCYDNPAYSNSFDVFIRGEEIISGAQRIHLPELLTKRATECGIDASTISSYIESFSYGAPPHGGFGVGLERVVMLFCALNNIRKTSLFPRDPQRLVP

SEQ ID NO: 46508 - protein, 186 aa, Oryza sativa
MAALSTSGLYSVAVSRTSVPTRPSMYGAACLLVVILAAPLPISSIPRSIAGTAPSCTRARLSETFRYGSLDRSVTAAACRSVMAARPARKMLLTSLLGWPCVLQSLSAMVCPMCADRVMSSLVEATPSASVQELMSSTMEWPRWFSLTTETTAASALACAVSASRTRMMLRLSSSGMKHLSMWTKL

SEQ ID NO: 46509 - protein, 211 aa, Oryza sativa; identical to SEQ ID NO: 37292

SEQ ID NO: 46510 - protein, 294 aa, Oryza sativa
MLRGGTSLLGIVNFVTFLISIPILGGGIWLASRANSTDCIRFLQWPIIAIGLAVMVVSLMGFAGACYRQTWLLRLYLFAMFFIVVALLFFIVFAFAVTDRGDGQVVMNRRFLEYQLSDYNGWLRDRVADPAYWATISACLRDGRACAAMRRFARDPNTGMLVPETPSMFYARDLSPIQSGCCKPPTSCAYNYVNETFWTAYPGVPTVVNDVDCSKWSNDQQTLCFQCDSCKAGVLAGIKKSWRKVAILNIVVLIILVIVYVAGCAAFRNARRIENDEPFGMARMTKTQPSRFQF

SEQ ID NO: 46511 - protein, 368 aa, Oryza sativa
MAEAAGDGGWPEPVVRVQALSESGAATIPDRYVRPETERPSSSSEANAVANINIPVVDMSSSPGTAAAAVAEACREWGFFQAVNHGVPAALLRRARGVWRGFFQQPMEVKQRYGNSPATYEGYGSRLGVDKGAILDWGDYYFLHVRPPHLLSPHKWPHLPPDLRETTTEYSEEVRRLCERLMAVMAVGLGVEEGRLQEAFGGREGAGVCVRVNYYPRCPQPDLTLGLSSHSDPGGMTVLLVDDRVKGLQVRHAGAWVTVDPVPDAFIINVGDQIQVVTNALYRSVEHRVVVNAAEERLSIATFYNPRSDLPVAPLPELVSPERPPLYSPMTFDDYRLYIRRNGPRGKSQVDRLAAAAATIPNSTTTTQ

SEQ ID NO: 46512 - protein, 387 aa, Oryza sativa
MEGGGAKDGSAAAAQTRGSGDDGSHKPLPPCCLKAKAAAVESEAKCHATVVSGWFTEPRSRSGKTSKVQYFNNPMWPGEAHSLKVENILYQGKSPYQEILVFESSTYGNVLVLDGIVQLTEKDECAYQEMVTHLPLCSIPSPKSVLVVGGGDGGVLREIARHASVENIDICEIDQLVIDVCKDFFPQLSVGFKDPRVQLHVGDAVDFLRNAPEGKYDAIIVDSSDPIGPAQELVEKPFFQTIARALKPGGVLCNQAESMWLHTHLIQDMLSICRETFKGAVHYAWTSVPTYPSGVIGFLLCAKEGPAVNFLSPVNPIEKLEGAMEAGREIRFYNSEVHRAAFVLPTFVRRELESHNTCAEKDKSETKPVAKPKKMKIMPNSAIPTAS

SEQ ID NO: 46513 - protein, 411 aa, Oryza sativa
MAFCTPTATTPPHATPPPLTTSWKQLAFCNSSRLAAAAAGGGQRARPAGASVEARALAPASTAADAAAAAAAPAPPNVDYLAAEFAGHGVSFEAVGGSCAVKMELRNGSAAHVLLPGGLVTSYKPAMWHGAPTEVIHTTVAEGLGGRAVIRGGVSLDLRCGGAAGGGGDGMPPWSPSGAWSLRDVRGSPTGSIEVELASAAPPEASGVEARCVVTLHPEALATEFTARNAASPSPVALSAAVSTHLRVSTPDATYAVGLQGSDYRAIDPVLSEFAIVPPDFMSRSSSATTLARRWATKGFDAVLSGGGGGGAGAQEADGEEDDDYKRMTEEMCRIYSHAPRQFTIIDRGRRNSICVQRRGFEEVYVFSPGSKYQWYGKYAYVCVGPAMLEPIVLSPGATWSGAQYLRNPNL

SEQ ID NO: 46514 - protein, 274 aa, Oryza sativa
MPVQLGGGGKVAEPKDLAATDKDRPSSKKNRRRQKKPATSAAISPPVAAMQTLFDTSREVFQDSLPGFVPPPQAVARLAALLNDLKPHDVGIEPSMSCFKNADSKGPPRVTYLHFYDCPKFSFGIFCLPKSAVIPLHNHPGMTVFCKILFGSMHLKSYDWAKSAPDNDNNALETSDGARLAKVNTDAVFDASSETTVLYPENGGNLHCFTARTACAVLDVMGPPYNRADGRDCSYYDESPYLSSSGGDARYSWLKENHSTFEMKGVQMPQRFIV

SEQ ID NO: 46515 - protein, 530 aa, Oryza sativa
MAGEVAIDSGEKRLNELGYKQELRREMTLFKTLAISFSTMTLFTGITPLYGSSLRYTGPASLVWGWVVVSFFTWFVGFAMAEICSSFPTTGSLYFWAAHLAGPVWGPLASWCCAWLEAIGLIAGIGTQAFAGSQVLQSIILLCTGTNKGGGYLTPRWLFLLMYIGLTFIWAVLNTFALEVIAFLDLISMWWQVIGGTVIVIVLPLVAKTTQPASYVFTHFETAPEATGIRSSAYATILSLLVSQYSLYGYDAAAHLTEETKGADKNGPIAILSSIGIITVFGWAYILALTFSIQDFSYLFDPSNETAGTFVPAQILFDAFHGRYGSSAGAIALLFVIWGSFFFGGLSITTSAARVVYALSRDRGVPLSSVWRRVHPRHRVPANAVWLCAAACALLGLPILWINVVFTAITSIATIGWVGGYAVPIFARMVMREEDFSPGPFYLRRASRPVCLVAFLWICYTCTVFLLPTAYPISAGNFNYAPVALGACLGLIGLWWVLDARRWFKGPVRNIDDPLKDGGGDGVHNNGNKV

SEQ ID NO: 46516 - protein, 157 aa, Oryza sativa
MFLLVVLRCSRWIHRLPPSATSFLSFFPLGFLSSPPPLSDALLLRRSPSSTTHRRRLSLSSAPLPRPPTESAGTDPIPPSSLAMDRPSPLGGSRHRRIELPRWSSSVPSGLGRSRSLGGGSGRRRGGRLSSGCRIRIWCSGRIWRSSCTSRAVRSSG

SEQ ID NO: 46517 - protein, 69 aa, Oryza sativa
MRRRSSVKGRSGGGGSRRKVVAVVDPPEAAVDLDLNLNPSSTLAICLCFIECSLGSTKLDVMLSNFCQN

SEQ ID NO: 46518 - protein, 504 aa, Oryza sativa
MAAAAVVHLSVHGRLRRSPELHARPYHRPSLLRCRAFKQEADNGGEEASSSPPPPTTAEARRRRKGPLYKLKAAIQGLAGSRSAAAEAYGGEYQRAVEKAEEIFFSVATQVGRYVITMMSSGVVLGVGFQLSGGDSQMNTLIWYSWLGGVIIGTMIGANSVLEEHCKAGPRNVVITGSTRGLGKALAREFLLSGDRVVIASRSPESVLQTINELEENIQEGLSVAKKKQREILLHAKVVGTSCDVCKPEDVKKLVNFAKDELGSIDIWINNAGTNKGFRPLVNFSDEDISQIVSTNLVGSLLCTREAMNVMQHQQKGGHVFNMDGAGSGGSSTPLTAVYGSTKCGLRQFQASLLKESRRSKVGVHTASPGMVLTDLLLSGSSLRNKQMFNLICELPETVARTLVPRMRVVKGSGKAINYLTPPRILLALVTAWVRRGRWFDEEGRAVYAAEADRIRNWAESRARFSFTDAMEMYTENTWVSVFSLSVVCAFIILSSSGGPLPGT

SEQ ID NO: 46519 - protein, 243 aa, Oryza sativa
MEDALEQCVPSASRAVLEAMVSGFIRAGKVGLARKLLEFATINKRTLSPSVHVKLMLEAVRTPEGYGLAAALLDELGERPELHVRQQDCTAVMKVCVKLRRYAAVESLFGWFRDTGGRPTVVMYTAVIHSRCRDGRHREALSLAWEMERHAGGLLDLPAYRVLVKLCVALRDHERGVRYLARMKDAGFVPTGDMYGGLIGGYAAEGRMGRCRRLIREAELAGVKLERRLLSRLSEMGVEHSQL

SEQ ID NO: 46520 - protein, 278 aa, Oryza sativa
MQQKLQLINHGVPDEVIANLKNDLVEFFSQPLDAKKEYSQLPNNLEGYGQAFVVSDNQKLDWADMLYLQVCPTDSRDLRFWPNYPASFRHSIDAYSSETENIGLCLLQFMAKAVGVEPKSLLSVFEGQARGLRMNYYPPCLKADKVLGLSPHTDPGGLTLLLQVNDVQGLQINKDGKWFSVNALNGALIVNIGDTLEILSNGKFRSVEHRAVVHPSRERISAALFYYPCQDMVISPLPDFVKDGKVKYKTISYQDLLTEYFTAELDGRNRLKKMKLEP

SEQ ID NO: 46521 - protein, 501 aa, Oryza sativa
MAPIMQTFREIETCIECSALRQIQVPEVFYYAQKAVLHPTAPLFDQEAQSLKPRCVRALKRIFILCDHDRDGALSDVELNDFQVKCFNAPLQPTEIAGVKRVVQEKMPEGVNDNGLTLTGFLFLHALFIEKGRLETTWTVLRKFGYDNEIKLRDDLIPTIKRAPDQTLELTGQAIDFLRGIFNMFDTDNDDALLPAELDDLFSTAPENPWSNNPYVDCAERNVLGGLSLEGFLSKWALMTLLDPANSFANLIYVGYSGDFGSAFTTMRKRRVDRKKQQTQRNVFQCYVFGPRGAGKTALLQSFLGRQPSDALPMNGERFAANTVELSGSRKTLVFREIPEDDVRPLLADRESLAPCDVAVFVYDSCDEFSWQRTRDLLVEVATHGENTGYEVPCLIVAAKDDLDQSPLALQESTRVSQDMGIEMPIPISVRLRDLNNIFCRIVHAAQQPHLSIPETEAGKTRRQYRQLLNRSLMVVSVGDAVAVVGIAAYRVYAARKNTSS

SEQ ID NO: 46522 - protein, 563 aa, Oryza sativa
MYSETDFSFKDANKLCSLIRKQQALAKKKRKWLRSLIPREDGLIKPIKRPKFLKDVYLAESYVRSDEVSCEKVIAHVEKCYGFQSDGYSHHIVQDGLQLFKLQKGKDGSLSPQGLADMQLIINKLSNEALHSVANIATHNRVSFEKTRPAMKKIIEDHLPQYLANLHDENDMSQLSHILTNPFSYRSNSLNITTPISPKMLSSIDQALNVLSTLTIQALVAMKRKLDEVSFTPKFSFVPRISRKAHMVTVIRKECNKMISRVGESGDLPKNLAKALSVVNLYRKQELKCMDISQAEFFPFSKKAIFLQNDVLNAIWSIQKLKKGDLKLLRAILCQGSNDEMLLKTTVRRYLIDCLFECDEGDLPDEALRAIALCNQMPLRQKIDFTEQRKGAELEAVLNVSSSLRALVYHCTGGQTDDQLMNCESECHSDEQVMSLGCDDYSCDNDFVLTEGYKNFGHQQHKIDEACSSSMVNPVSVSGHFSSGAGSNMKKPTLHEVVGANEVEIRRSSMGLSEICDDAAILAHKLLGKILDNTLLAENKVNGLAGYSLDGSTSHGPQAAWTK

SEQ ID NO: 46523 - protein, 312 aa, Oryza sativa
MATATATAAALFSSRTLSPSSSPRRRRRRGIPAAVTGFLSRRHAPALQRRLAPLHVVDDSKEVETAAGDGAEERSQTDKLVDGMDFGELCNDFECISSPYVEATARQLARDILDLRDDNRAFTCYAVSVKYKDPVRTFVGREKYKRPLWITKALENPTVTVQEMSMQSTSNLTIKWTFRGKPKNPIFATIGGDLIVSVTSQFVLNQISGQVLEQVDSWDLSASSPPAQAYFWLSRRAFSTVEAGKDTIEAAKGTASRLSSKKDENLEVYPDPSGDPTKFFQRPDDGLNQDVYQIALFLAVLYFIVQFLRTTL

SEQ ID NO: 46524 - protein, 79 aa, Oryza sativa; identical to SEQ ID NO: 43473

SEQ ID NO: 46525 - protein, 447 aa, Oryza sativa
MAGARAMAFVALCALAAFPVAVTGAQVDPLYSSKQVLDWSSQANIKLQNFSLTEEDGLQLLVRPEEVTHRKLRERTRIKKKIEPVQQDDEALVKLENAGIERSKAVDSAVLGKYSIWRRENENEKADSKVRLMRDQMIMARIYSVLAKSRDKLDLHQDLLSRLKESQRSLGEATADAELPKSASERVKVMGQLLAKARDQLYDCKAITQRLRAMLQSADEQVRSLKKQSTFLSQLVAKTIPNGIHCLSMRLTIDYYLLSPEKRKFPKSENLENPDLYHYALFSDNVLAASVVVNSTIMNAKEPEKHVFHLVTDKLNFGAMNMWFLLNPPGDATIHVENVDDFKWLNSSYCPVLKQLESVAMKEYYFKADRPKTLSAGSSNLKYRNPKYLSMLNHLRFYLPQVYPKLNKILFLDDDIVVQKDLTSTSIFQIQILLRTSILMLVAGRME

SEQ ID NO: 46526 - protein, 397 aa, Oryza sativa
MPGLTAPASYSDEPPRHPALKINSKEPFNAEPHRSALVSSYITPVDFFYKRNHGPIPIVDDLSRYSVSITGIVNKNVQLSMADIRSLPKYDVTATLQCAGNRRTAMSKVRKVRGVGWDISALGNATWGGAKLSDVLELVGIPKLSSVTSLGGKHVEFVSVDRCKEEKGGPYKASIQLKQATDPEADVLLAYEMNGETLNRDHGYPLRVVVPGVIGARSVKWLDSINIIEEECQGFFVQKDYKMFPPSVDWDNINWSTRRPQMDFPVQSAICTLEDVDVIKEGKARIAGYAVSGGGRGIERVDISVDGGKTWVEAHRYQKSNVPYISDGPRSDKWAWVLFEATLDVPANAEIVAKAVDSAANVQPEKVEDVWNLRGILNTSWHRIKIQNSSCVGRSKM

SEQ ID NO: 46527 - protein, 189 aa, Oryza sativa
MSASDLPDELWARVLELGAGAGAASSALGFRDLCALAIASRRLRRLSLHPSLWSALLSRDFPTQSSQPSSASSSSSQQQLHPKSVYKTKFERHKVRMAEARRRVVFEAEGRVLACRRRLTQLEESLQEEGEKMKTAAQELDNLERVRRASVALNVWQPQVVRGRQKQLVQQCTVPVDSRLSDVNMELKV

SEQ ID NO: 46528 - protein, 626 aa, Oryza sativa
MAMRLFPSSSPLPPPPPLLPSPSAKAPPSAPFSLSLRLRRARVAASAAAAAGGPERGAGGYEGDAEGEGSSGAFDRGMSEIARKVPLFEPARGDAAAVAGERPLPINLELWLYRAKVHTRKYEFADAEKLLNQCIMYWPEDGRPYVALGKLYSKQSRFDKARAAYERGCQAAQGENPYIWQCWAVLERKGGNIRRARELFDAATVADAKHIAAWHGWAILEIKQGNIKKARNLLAKGLKYCGGNEYIYQTLALLEARAERFEQARTLFQQATQCNPKSCASWLAWAQVEIRAENNAMARKLFEKAVQASPKNRFSWHVWALFEAEQGSIDKARKLLKIGHAVNPRDPVILQSLALLEYNYSSPNTARVLFRKASQIDPRHQPVWIAWGWMEWKEGNARTARTLYQRALSVNSTNECAARCLQAWGVLEQRAGNYTAARRLLRSSLNINSQSEVTWMTWAALEDEQGDPVRAEGIRNIYFQQRTEVVDDASWVMGFLDIIDPALDSVKKLLNIDQPSGPATRDNPKSTGEPSNTATVRTSADAEFSGGSRAEGSDASDLANADDKESDDAAETPESDFDVDGFIRRRLALDPAELDAVLEGSDPRGVVSRRRTQRLPRKPLPLLPVP

SEQ ID NO: 46529 - protein, 145 aa, Oryza sativa; identical to SEQ ID NO: 32030

SEQ ID NO: 46530 - protein, 401 aa, Oryza sativa; identical to SEQ ID NO: 32266

SEQ ID NO: 46531 - protein, 282 aa, Oryza sativa; identical to SEQ ID NO: 28881

SEQ ID NO: 46532 - protein, 122 aa, Oryza sativa
MGGTMDYLSDLLGGGGSSSRRRYKKRKQYKVTVQGFVEPHKVVKRVQATGKKAEIWPYVPYTLVAHPYAAPAYDKRAPPGHVRRVDAVMPVASYGSAAAAAAPEERLTTMFSDENPNACSIM

SEQ ID NO: 46533 - protein, 250 aa, Oryza sativa
MALQQRPGMLGIGCSNVLARARVQQCLAAASHSNMPCLPVLLHVNGSKKQGSSFLSSQRIGLSRRRRRRDLSGVVVAEVSAAAGVTPASSSSSPGGISVSDVLWPSAGAFLAMAVLGRMDQMMAYKGVSLTIAPLGAVCDVLFTAPGSPAAKKYNMFVAQIGCAAFGVLALSLFGPGWLARGAALSASIAFMTITGASHPPAASLPLLFIDGPKFHHLQLWYALFPGAAGCIILCLIQEVVIYLKKNFKF

SEQ ID NO: 46534 - protein, 194 aa, Oryza sativa; identical to SEQ ID NO: 33607

SEQ ID NO: 46535 - protein, 97 aa, Oryza sativa
MQRRLRRVDPVAAAARARGSGYSPTRILSRRRQRSLTSPRWACPLTPSPSRPFPLSSLSPATPTGRIRRRRRWPGCGAFPSTRSGGERGGGGCPVAG

SEQ ID NO: 46536 - protein, 839 aa, Oryza sativa
MAFSPRSPWSRSRKPDVYSTVVVHGDDDDDDARGGGGGGRHALAEDDEEEDPSSLPPLLQRLPKDFGGGASFDEYDDPYSSDLDDASLSATVVVKRGAPASTSASSRSPFLDLRRSSPRAAEVDPYSTFVVHGTARSGGASSPRESASGTFVRRSGGSSSPRESVSGTFIRRTGSPSSPHESISGTFIHHTSGASSPRDTAQGGGGFGSSFWSPAVGQSEELRQPALLVQQQHQQQQNSRRKPSVSSVPESVTREDPSTKYELLHELGKGSYGAVYKARDLRTQELVAIKIISLTEGEEGYEDIRGEIEMLQQCSHPNVVRYFGSYQGEEYLWIVMEYCGGGSVADLIGITEEPLDESQIAYICREALKGLAYLHSIFKVHRDIKGGNILLTEQGEVKLGDFGVAAQLTRTMSKRNTFIGTPHWMAPEVIQESRYDGKVDVWALGVSAIEMAEGMPPRSTVHPMRVIFMISSEPAPMLEDKEKWSLLFHDFIAKCLTKDPRLRPAASEMLKHKFIEKCNPGASKMLAKIKEAKKIRAKVAAETELSGPDSDATVRINDDFGETVPTNPQQQTNHETYDGGAGDFGTMIVHPEDGDEVDESPIFPSSEFIPGLGSINSFTHDPKRAELISNFWAENTADIEANKEQYLDEHPDMQEAKTMPPSTGTVKKLKVAEGTMPRHGNQVSSASPGVASTMTKLNSSPSRKAFSVQDKLWSIYAAGNTVPIPFLKAIDISPLALVSDSVVGNGLAGSNRTDALEAVRELFSGDGQTKKGRKGQNEVPLPPGVHHRLTTSPTLMNLAQALAYHKTCYEDMPLQDSQATQEQQTIQNLCDTLRTILRL

SEQ ID NO: 46537 - protein, 777 aa, Oryza sativa
MRWWKRSVSPSPSPSSSSASASTPASPARASTSRVGGGVPSRRRDVVGFGWGGGSDPQPRLTRQRRLRHVDDIEVGVSALGLDSSPSPAAPSSCPSSRDSVGFGLLTASSTPISRTASNMEVAPPRSSSSPVLLPHPLPLPDEGDSPCRGSGRSLPSPKLFEGDCNGSAVESNLLGVSEIGSDRASLFPRVMAKTVQKNPEHGDLRSNGTNGINCGQRRKAFKEKLQDKSSAETLTFRLNIPAKSAPSSGFSSPVQSPRRLSSVDFLSTATSTQGANLSSAQSVWSPDLYGSSPRCASPEKIMGSQERSPRSSPLRSPVLRSKNPSAPPSPMHPKLFPENHVSRPEGNGSVNFHPLPLPPASVSPKQTNFSHQPVPKVDAPSMAGQWQKGKLIGSGTFGCVYEAANRHTGALCAMKEVNIIPDDAKSAESLKQLEQEIKFLSQFKHENIVQYYGSEYIEDRFYIYLEYVHPGSINKYVNQHCGAMTESVIRSFTRHILKGLAFLHSQKIMHRDIKGANLLVDVNGVVKLADFGMAKHLSTAAPNLSLKGTPYWMAPEVVQATLVKDVGYDLAVDIWSLGCTIIEMFTGKPPWSGLEGPAAMFKVLHKDPSIPDSLSPEGKEFLRCCFRRNPAERPTASKLLEHPFVHNSNNFNQHSALHSPTGLKSTDTGHNARDKKSCKIVSCMRGKNMITTGETSSARSPGSLSNRVAVGLTALPNLETRSLSPTPMSLRSSPGSAAHTPSMHFSIAYHQPSPLPRPNGKEAINLFTLKHDELPT

SEQ ID NO: 46538 - protein, 332 aa, Oryza sativa
MTSASLLLAPRSPDMAAAGILPVSGGGGASSARPVSMAERARMAKIPQPEPGLKCPRCDSTNTKFCYFNNYSLTQPRHFCKACRRYWTRGGALRNVPVGGGFRRNKRGTKPSNSKKPAAAVAGGVMAPPHAQLQLPFGFDGGGGGGHGSIIGGGGGGGASRLGFPELSSLHAAAAVDYQLGGGGGGDGLGLERQRLPHFPFLARSNAAVHPPPLMSTAAGVSYPFGDVAAGGLGGDMPANAASVAGSAGLITQMASVKMDDIDNHPPPSAATTTASSPIEFLGLRGSLQFWGGGGGHRGGGDGAGGSAAPGGGGGGWSDLPAFDLSTSGNIL

SEQ ID NO: 46539 - protein, 425 aa, Oryza sativa
MAGSLAASAFFPGPGSSPAASARSSKNAAVTGELPENLSVRGIVAKPNPPPAAMQVKAQAQTLPKVNGTKVNLKTVKPDMEETVPYSAPKTFYNQLPDWSMLLAAITTIFLAAEKQWTLLDWKPKKPDMLVDTFGFGRIIQDGMVFRQNFMIRSYEIGADRTASIETLMNHLQETALNHVRTAGLLGDGFGATPEMSKRNLIWVVSKIQLLVEQYPAWGDTVQVDTWVAAAGKNGMRRDWHVRDYNSGRTILRATSVWVMMHKKTRRLSKMPDEVRAEIGPYFNDRSAITEEQSEKLAKTGNKVGDDATEQFIRKGLTPRWGDLDVNQHVNNVKYIGWILESAPISVLEKHELASMTLDYRKECGRDSVLQSLTTVSGECTSIGADKQASAIQCDHLLQLESGADIVKAHTEWRPKRSHAAAENA

SEQ ID NO: 46540 - protein, 613 aa, Oryza sativa
MCSFGGRIVPRPTDKSLCYLGGETRIVAVERNASLADVHARLSRSLLGGQPFTLKYQLPNEDLDSLISVSTDEDLDNLVDEYDRIAATSSGGGSSRTSRIRLFLFPAKPESSSSLGSLLDDSSKSESWFVDALNSAISGSLDGIPRGISTDSASVNCLLGLEDDSSTHSRGGPPNSSPAEEQRANQQKLAAAAAVAAARHPHDVQSVPDSPMIDKNSSFGSTSSAPSLSNLPPIRVRPEDRPPDSRLAPQVPVEDHFAQMGISDQPVQPVIGGYMQPPPQVPIPNMAVPSISPSDASSRVFSDDDKSDHGGGGGRKPQPPKPEVPPVADPTNRAMYYNDRSPPAELKRDMPVGTDAASYRVPVPAQDAAAAAAAAAAAAQQPPAGYVYAQMHAPPPQQQPPPPQQQQPVPQQYVTAQNQHFIHNPATGTFIPIQSYYHHPVPQQAPQPPMPQPVPQPQQSHAFDPNTGMYYIPMRTNAPQAYSMPPGAAAVPPPTLVDTTPKPTVPIPQMAVKQPELQQPGLYRTTAAPTPVPASNAPAYAGMGYHHVIQTHHHPAPQPAATVAGNFGYDYGDPTRAQVFYSQAAAPPTLPPQYQPMGSPDAGQADLKQARAS

SEQ ID NO: 46541 - protein, 722 aa, Oryza sativa
MATGMLLRGLRSAASRTSPVFPTSASSPAPYVSPLLRRLYSAAAASAAASPALGPGGALDPSRIRNVAVIAHVDHGKTTLMDRLLRQCGADIPHERAMDSISLERERGITIASKVTSVSWKENELNMVDTPGHADFGGEVERVVGMVEGAVLVVDAGEGPLAQTKFVLSKALKYGLRPILLLNKVDRPSVSEETCNEVESLVFDLFANLGATEEQLDFPVLYASAKEGWASLEFTKSPPDNAKNMSALLDSILQHVPSPKADLEAPFQMLVSMMERDFYLGRILTGRVRSGVVRVGDKVHGLRSTDDGVQKIEDGKVVKLMKKKGTSMVIVEAAGAGDIISMAGLAAPAIGHTVSNSDILTALPTIELDPPTISMTFGVNDSPLSGRDGTHLTGAKIGNRLMAEAETNLAINVLPGPLSESYEVQGRGELQLGIFIENMRREGFELSVSPPKVMYRTDRGERLEPIEEVTVEVDEEHVGFVMETLTHRKGEVMDMGPVPGTTGRTRIFLTCPSRGLVGFKGIFSSFTRGTGFMHRAFQAYAKYRGQLGNVRKGVLVSVGKGLITSHALMSLEARGILFVSPGMEAYEGMIVGEHSRDSDLDINPVRTKELTNIRAPGKDENVRLSPPRLMSLEEAIGYVAADELIEVTPKVIRLRKKYLDATKRKMMKNKPMDWSFSDTKRSFVSAATLVYNNPKGADASYLCIGWRIAFSSAASVPHHDPA

SEQ ID NO: 46542 - protein, 294 aa, Oryza sativa
MVQKELSQAWWFDSHNLARTSPWLTNTLSELDDKTKQMLKMIDQDADSFAQRAEMYYKKRPVLVDMLGDLYRTHRSLAEQLDLLKNGNGTRHTVFGPSSCTQSWSHQAAAAAMGGKGTTGSRSSISLCSDNYDSESEVDDPEQENMEEELSESEDMMKHPSQSQADQAAQLELMHAEIEMLKEKNAELQKASAENEMLKQKNEELQRVSEENMALKAELAAKDEEKREVIRQLASSFDIVKKENFTLREYIIKNSKNSSSSSRGFDFKKLTKDLFTAKLFTAHCKATTGPMVAL

SEQ ID NO: 46543 - protein, 150 aa, Oryza sativa; identical to SEQ ID NO: 40342

SEQ ID NO: 46544 - protein, 107 aa, Oryza sativa
MITEIFLLRITKISYYSDNDAEISYINGVSSVPVVCLFLPYFPEIYSCETTDNSDILLYNHNMSALPWMNKLSLGFLLQPCILHEWCFLLTRYFGSFLCVRRDTAAI

SEQ ID NO: 46545 - protein, 407 aa, Oryza sativa
MGIEIVPQSFNEELDSTVTITPASDNIDVSDDTSVPHPSEVPATVNVVLVEQSDNSISEPLESDGANGATENVVPLASEKSTDNNDAMNSEPVNSEPYEASPANNAEKGDVMQQSDENNGDKQENQDLLSPMAETAGSDSTSVTSMEDVQEAKDAAPSETDDATGHPPDLSNDKACAGNGNGNVFQNAKCVLTTSTKKMKRSASATTRKSLQATNTDEGNASTLTNSKSSNGRTTTVPAGPVFRCTERAEKRREFYMKLEEKHQALEEEKIQLEAKLKKEQEEALKLLRKSLTFKATPMPSFYHEAPSPKAEYKKLPTTRPKSPKLGRRKASTAADASNSSEESDSTPRPCCRASRDSLDSICKCSSSSRNGKPQQPATAKPAASKKQPKPHAHKLSDQSAMNIAVH

SEQ ID NO: 46546 - protein, 319 aa, Oryza sativa
MWFFNFNRNGPSGFSGASTAEEVTAGVDARGLAAVVTGASSGIGLETTRVLALRGVRVVMAVRNVAAGHKAREAIRAEIHGAIVHVLEMDLSSMDSVRRFASEFDSLNLPLNILINNAGILSKDCIRSIDGLELHFATNHIGHFLLTNLLLENMKSTSRTTGVEGRIINVSSSGHILTYPEGICFDSVKDLSRFSTYIAYGQSKLANILHSTELARILKGDGVNISANAIHPGFVGTNLFKNWTMANAVVNTIGRIVCKTVEQGAATTCYVALHPQVTGISGKYFSNCNLETPSSQASNAELAKKLWEFSSNIVSAAKL

SEQ ID NO: 46547 - protein, 162 aa, Oryza sativa
MVSGNLFHCRRNSWPAEEYVGRTALQLLDFDGGSPPEQAWRRRLNSHANLLKEFSVTFMEAMRMMSLGLRLWSYVREEASHGRKAPIDPFTKEKCKPSASQGVPLGVVAFQEVSGESSRIGISFLVYVRLPRSWRTSFQYLYLAMGGTKSTHRYCLPDTMKV

SEQ ID NO: 46548 - protein, 179 aa, Oryza sativa
MKVVRNLDLERYMGRWYEIACFPSRFQPRDGTNTRATYTLAGDGAVKVLNETWTDGRRGHIEGTAYRADPVSDEAKLKVKFYVPPFLPIFPVVGDYWVLHVDDAYSYALVGQPSLNYLWILCRQPHMDEEVYGQLVERAKEEGYDVSKLKKTAHPDPPPETEQSAGDRGVWWIKSLFGR

SEQ ID NO: 46549 - protein, 186 aa, Oryza sativa
MYFIYLFCTFMLLEKPIIHRDVKSSNILLNEGFRAKVADFGFARTGPTEPDQSQIQTDVRGTAGYVDPEYLRTNHLTVKSDVFSYGVLLLEILSGRRPIEVRRAARERITVRWAFEKYNRGDVKEILDPMLTESVNEDILNKIFDVAFQCVAPTRADRPTMKEVAERLWKIRRDYAKTQRRAEMAL

SEQ ID NO: 46550 - protein, 471 aa, Oryza sativa
MARFILSLLELGVSATVHLLFGLYVFSTAVAADISQAAAASGCLLLRRPAAPGLVNVAAAGEEEERRGAAPVVLDGSPPPIVLVHGIFGFGKGRLGGLSYFAGAEKKDDRVLVPDLGSLTSIHDRARELFYYLKGGQVDYGEEHSKVFGHTRFGRTYDTGHYPVWDEQNPVHFVGHSAGVQVVRVLHQMLADKAFPGHDTSEDWVLSLTSLSGALNGTTRTYYDGMLAEDGRSMKSICLLQLCRIGVIVYDWLDIPWLKNYYNFGFDHFEMSWRKVGLSGLIDLLLGHTGPFASGDWILPDLTIQGSLTLNSTLRTFPNTFYFSYATKRTRKLFGITVPSSVLGIHPMLFLRVLQMCMWRHPQNAPLPYKGYRDEDWEDNDGALNTISMTHPRIPTEHPNRLVVDDSDCHPLQPGIWYYKIIEADHILFIVNRERAGVQFDLLYDGIFQRCRKHAFRRSPPTVPNESSQSQ

SEQ ID NO: 46551 - protein, 153 aa, Oryza sativa
MNALKNLGLNVVKASVCLDSTGKHIKLAITKLSTGRKIGEPELLEAVRLTIINNMIQYHPEASSQLALGATFGPEPPTELVDVDIATHIDIYDDGPDRRYDLCLALCFIPQIVRKIHIFFYHQNNMLLDWKIDCSSLVKAYVIKRVADPGGRI

SEQ ID NO: 46552 - protein, 175 aa, Oryza sativa
MAPTVMASSATSVAPFQGLKSTAGLPVSRRSTNSGFGNVSNGGRIKCMQVWPIEGIKKFETLSYLPPLTVEDLLKQIEYLLRSKWVPCLEFSKVGFVYRENHRSPGYYDGRYWTMWKLPMFGCTDATQVLKELEEAKKAYPDAFVRIIGFDNVRQVQLISFIAYKPPGCEESGGN

SEQ ID NO: 46553 - protein, 995 aa, Oryza sativa
MLPFEEQVVADLLEDPNGGLVVVSCGLPVASLASAVLLQLFHQSPDDGCFLILSAPEPVKAQIRRRLLLNSQSQPPLLQLQVHDVAPDLPAHHRVALYASRAALFLSPRALVADFLTSRLLPSRVRALLLLSAHRSSDTSSDAFVARLLRHHHLLPVYAFSDRPHAMVSGFAKAERAMKSLYIRRLHLWPRFHLLAAADLERSPPEVIDVRVPMTQPMRGIQAAILDAMDACLKELRRTNKVDVEDLTVDKGLFKSFDEIVRRQLDPIWHTLGKKTKQLVADLRTLRKLLDYLVRYDAVTYLKYLDTLRVSEGVRSVWIFADSSHKIFDLSKRRVYQVVRADGTKVAADNKGTPTKKRKVARASSRKGKETENEGSSDNKDNTQKVNAEMGIVVEEILEEAPKWKVLRELLQEIAEEQAKGDGDNVNPVHEDGINESGIVLVACKDERSCVQLQECISKGSHQVMRAEWEKYLLGKAELHGLHRKNKKTSQQLKGFGVLDGEVPMRSGESAGPVSISKVEANALLAAASEISTVTKEANLADDSNVSCKKRSFGKGKGKGKFKKTMAKREASKLRNRNTTEHTDLEVEGQSGKTDEQAETDACKLSAEDDSASAPAVDKAANNLSAFGDSVDTEPLPPVQFYALDSDQHVLDVWKPSVIIVYHPDITFVREIEVYKAENPSMKLKVYFLFYEDSAEVQKFESSIRRENEAFESLIRQKSLMMIPVDQNGRCIGPTLANEPEALLSQNSLTRKAGGRKPLEKEMQVIVDMREFMSSLPNVLHQKGIRIIPVTLEVGDYVLSPLICVERKSIADLFQSFASGRLYNQIETMVRYYKIPVLLIEFSQDKSFSFQSASEIGDDVSPTNIISKLSLLVLHFPRLRIVWSRSLHATADIFLSLKTNQDEPDESKAMRVGVPSEDGVVENDVRAENYNTSAIEFLRRLPGVTDSNYRRIMEECNSLAELALLPVERLSELMGTQKGARMLKEFLDAKCPTML

SEQ ID NO: 46554 - protein, 94 aa, Oryza sativa
MLCVYVSLITNLFKVDGLHFPHKYLSLLYADRCKVKGLHFPHKYLPYYFFSTRTYSYSVGYSLYPSLIIARFLRPSQNDHPLTSAYLFICAKSK

SEQ ID NO: 46555 - protein, 233 aa, Oryza sativa
MAANVGESTSSGTNGDAAGGSFECNICFELPQEPIVTLCGHLFCWPCIYRWLHIHAHSPECPVCKAVVEEDKLVPLYGRGKDRVDPRSKNIPEADIPNRPTGQRPATAPQADPNNNFAHANPNANANPWFMGTGVPLANARWGNYAFSAAFGGLFPMLSFQVHGFPDANPYAQPAGFHYGYGHGHGFHGGHMGHAAHGVPRQGPLEQPQQADIYLKALLIMVGFLVVASLLAF

SEQ ID NO: 46556 - protein, 496 aa, Oryza sativa
MDATATSTVAGGGFTGTTISARRAHMDGICLVNKKRRLTLRPCVEVDHSSKRVRSRCAKFESLPEDIVSRIISQLTLKEAVVMSSTSTKLRRAWIYHPNLYLDTSIVFGSSDRQKRVPSTETFIDTVNFILRTHSGLGVNKLAVMFELRKEHAHDIDGWVSFAVTSKARVVTLNFSPYHGSHDRSYNFPCHLFNGKSGSHLQVLQLDTVTLGPSPPGFCGFANLTMLTLENVLVLGDLQFLLKCPALEWLTIRMCSQLHNLYAPEPLPRLTFLCVQDCAIDKIDVHAPNLTTFKYRGRFKVILALRECLKLKTASIVSPIEDNLYYIFTELPNGLPHVERLHVNVFVKTQIPGFTQAPYKFINLRHLTMRITYEIAKRFGRNAVLQLAYFSEAAPFLVDLHLDMLCLDFYESRPARDVIMNRPHYSLKRACITGFNGNGGQVALVKFILKNAVKLEEMVIDPKGRITNQMMGEHKGRRMIKEKLVPKYKNGLLVIL

SEQ ID NO: 46557 - protein, 234 aa, Oryza sativa
MCRYDVAAFLSHRLFESGDPEVRVRFSGFGAEEDEWINVRKCVRQRSLPCESTECVAVLPGDLILCFQEGKEQALYFDACVLDAQRRRHDVRGCRCRFLVRYDHDHSEEIVPLRKVCRRPETDYRLQILHAARAAGMAKEAVVDLVSHNDKSSAEQKPPKQHKMMDVNTDEVTMVSNQDQEEPTGKPAATLPAAPVKTLNDSASASASDVQMGEAQAAPKVESSDEVEDKMKEG

SEQ ID NO: 46558 - protein, 1121 aa, Oryza sativa
MDQETFARTLAELLRGDNFHFGSPLAALFDRLKGGLCDPRIALYRRGTRFAERRKHYYRLQSYHNSMVRGLWDVKDCWKGCQGYNINEKLRALDAMKAQQQQQQQQQQQQKAHLGLGGRAGSETDSESREYGDPSLMRLKPDKTVLKKSGKPEKERSKGLLRLGAPKGLGEEYIGGAGRDAAMALSELSRQDNAYGYDSGVMRRGKPRRSQQGLHSEELGDDRDLRMIRSHRPMPKPGKKELAASYDGNLYGNNYHENQNGSSYYYGRNANANQGVTVAAAYDRPYFDTAKNAKYSDRDWMYGGQGMSSKALKGDEMDWPAGSYAGSMNDWQRGQSAGDYRSRKTQAGHGLKVKSYKSIEKQISDANFGSDHRGKIPGKIKGKSTSQYDRIGQKYSRSNAVYTQSEETESDSSEKFEGGGDMDLKRQPEHHSGSHRPAYSAKKLNKLPKASKVNYPTATEDFEPYQSKGTHRVNVTESDYLRDVHVTETEQISEMMRPPAARGERKRKVMASVDTHDHGNTELPDSNENADESLRSPENGERLASGSGCVDSNGDVEKKKMPLASCSSGSKKQKRRVEATSPAEHGEDAPSAPKLVENSSSSKKKGKKKPAAPEAVTDAVVVDEPAPVLPEVNVVVVEPEKPKKKYVPITPTIHTGFSFSIVHLLTAVRKAMATPTEDTLSAKQPDGEESRKCFNNEEHCKTPQDPSATEQAQQGHEAVDASGPEKAQQGHETADASAAEQTTPGNLPAFTVQEIVTRIRSNPSDPNILETQEPLQDLVRGVLKILSSRTAPLGAKGWKALVSYDKSNKSWLWVGPLPSGSSDGDPNEETSPDAWGIPHKMLVKLVDAFANWLKSGQETLKQIGSLPPPPAPDPANLDLKERFKDLRAQKSLNTISPSSEEARAYFQREEFLRYSIPDRAFCYTAADGEKSIVAPLRRGGGKPTAKARGHPMLLPDRPPHVTILCLVRDAAARLPARTGTRADVCTLLKDSQYLNHEESNKEAAVNQVVSGALDRLHYERDPCVLYDNDKKLWTYLHRGREEEDFEDDGTSSTKKWKRPRKESDPADPGNDDLEDDGTPTASDAKKQKTDSTASGEDKDSEDPAIQDPSAGDLEGDPDPDH

SEQ ID NO: 46559 - protein, 420 aa, Oryza sativa
MSRMAAPPPPLSGTGKPPTLPFSLKKPPPMPVYKDLHFNRDLSATKKLQAGVDLVARLVGVTLGPKGRNVVLSNKYGPPKIVNDGETVLKEIELEDPLENLGVKLVRQAGARTNDVAGDGCTTSIILAQGLIAEGMKVLAAGINPVQIARGIEKTASALVSELRLMSREIEDHEIAHVAAVSAGDDYAVGNMISDAFKRVGRKGMVRIENGRGTENGLEIVEGMQFERGYLSPYFVTDCTNMSAEFTDCKILLVDKKITDASEIIRILDSAVKEDYPLLIVAEDVEEKAMADLIKNKLKGTIKVAAIKAPSFGEQMTQCLDDIAIMTGGTLVREDMGYTLEKAGKEVLGSASKVVVGKDSTLIVTDGSTQHVIEKRVAQIKGQIENSSERYQKKILGERIARLCGGIAIIQVGAQTIIEM

SEQ ID NO: 46560 - protein, 295 aa, Oryza sativa
MGKTATEGDKEAGRGGGGGGGARRPVVLVTGCSEGGIGHAMARAFAAAGCAVVATARSRASMRGLEGDPRYLLLELDVRSDESARAAVADAVRELGRVDVLVNNAGVHLVAPLAEVPMEEFQQVFDTNVYGAMRLIHAVIPQMIEREQGTIVNVGSITALAPGPWAGVYSASKAALHALSDTLRLELKSFGINVMIVAPGGTKSNLGSNSTSKYVQIRDWKYYKKFEESLRARTDASQGPGSTPAEDLAKRVVALVLKKNPPAWFAYGQFSAILSLLYYAPLWFRDYFYKIVMKC

SEQ ID NO: 46561 - protein, 321 aa, Oryza sativa
MSAVERKTACVTGGNGYIASALIKMLLQKGCAVNTTVRNPENMEKNSHFKDLHALGPLAVFRADLEEEGSFDEAVAGCDYAFLVAAPVNLKSENPQKELVEAGVRGTLNVMRSCVRAGTVRRVVLTSSAAAVSGRPLQGDGHVLDESSWSDVDYLSSPANKTSPGKAYSLSKVLSEKEASRVAEENGISLVTVCPVVTVGPAPAAEAKPRPGDDQHREAHGEGHRRANAGPRRRPLPRRDIPRREAAAGGGGGGGGEVHLLRPQRHHAAARPLPGGQIPGVQCRRRRPRRPPGEAEDPPLVGEARRRRVRVQEQDAGRDVR

SEQ ID NO: 46562 - protein, 284 aa, Oryza sativa
MTSQAATTTTTAAAAAAWTREDDKAFENALAASVPGARSAEEVRRHYEALVEDVAAIDAGRVPLPRYAGEESAAPPDGAGAAAAASKDGGHRRDERKGGGGGYDGGKSCSKAEQERRKGIPWTEEEHRLFLLGLDKFGKGDWRSISRNFVISRTPTQVASHAQKYFIRLNSMNRDRRRSSIHDITSVTAGDQVAAQQGAPITGHQATGNPAAAALGPPGMKHHHHHHPGGAPPPMPMYSAAPMGHPVAGHMVPAAVGTPVVFPPGHAPYVVPVGYPAPPAKMHQ

SEQ ID NO: 46563 - protein, 244 aa, Oryza sativa
MAASARPVGVGGERATSFAMACSLLSRYVRQNGAAAAELGLGIRGEGEAPRAAPATMSLLPGEAERKKETMELFPQSAGFGQQDAITADSAADAREQEPEKRQLTIFYGGKVLVFNDFPADKAKGLMQLASKGSPVAPQNAAAPAPAAVTDNTKAPMAVPAPVSSLPTAQADAQKPARANASDMPIARKASLHRFLEKRKDRLNAKTPYQASPSDATPVKKEPESQPWLGLGPNAVVKPIERGQ

SEQ ID NO: 46564 - protein, 789 aa, Oryza sativa
MTAQTKKRGGGESGNGGAGLGLAAFIANGEDLGPIVRHAFESGKPESLLQGLRSIVKMKEVEIEELCRVHYEEFILAVDELRGVLVDADELKGMLSGENLRLQEVASSLLLKLDELLELYSVNKNVEEALGMLKICLQVTSLCQMCNKDIAEARLHSALKSLELIEKDFLQNIPLKLLKKAVQKQIPIVKLYIEKKVCNEFNEWLVYIRRTAKEIGKVSISQASLARQKNEGIHSQQREAEDCSRIGFDERAYALDLDLIGEEEVLEFDLTPVYRANYIHTCLGLGEKFREYYYNNRLMQLNLDLQIPTTQPFMESHQHFLAQIAGFFIVEDRVLRTADGLLSDSQVETMWGTAISKVTSILEEQFSRMDAANHLLLVKDYVTLLGATMKKYGYQTTSLLEILEKNRDKFYQLLLSDCRKKIDGIFTKDSYEQMIIKKENEYHMNVSAFQLEPIGVVPDFPYVAPFSSSVPDACLIVRSFIDDSVNYLSYDPMMDAYDVVKRYLDKLLIEVLNDGLLNLIHGGCLEITQMVQIAGNIAILEKSCDMFLFHAAQLCGVPRRLLDKPHSGLTARAVLKASQNAAYNGLIALANSKIDEFMLLLTSINWAPEETPEHVNDYMNEVVIYLHTLVSTAQNVFPREALYKVVCGAFSHISDSIMTVFLSDRVKRFNANAAAGIDIDLKKLEEFADDKFHSTGLSELRKETTFRDCLVEIRQLTDLLLSNQPENFMNPVIREKNFGSLDHKKVSIICDKFRDAPESLFGSLSGRSTVQSARKKSLDVLKRRLKDFS

SEQ ID NO: 46565 - protein, 169 aa, Oryza sativa
MAVVQEVVGAVAMRPGEQGVGGDNAGAGEQGGGDGRGLDLATVRSLNGVRVADKILRFVPDAAAFHTTLRCVKESTSCSEDSTAPRRRIIRRRLAASKEPRRQREREAVSAAAASTPRISGRRGRRGRSGGEEIDRPAPHPANASASVRFMLGGVATAETRDNKLGGGR

SEQ ID NO: 46566 - protein, 456 aa, Oryza sativa
MVGSVHVNGSVNGGNGTEERLDELRRLLGKSDGDLLKIVGIGAGAWGSVFAALLQDAYGRFREKVQIRIWRRAGRSVDRTTAEHLFEVINSREDVLRRLIRRCAYLKYVEARLGDRTLYADEILRDGFCLNMIDTPLCPLKVVTNLQEAVWDADIVVNGLPSTETREVFEEISKYWKERISVPVIISLAKGIEASLDPIPRIITPTQMISSATGVPTENILYLGGPNIASEIYNKEYANARICGSNKWRKPLAKFLRQPHFIVWDNSDLVTHEVMGGLKNVYAIGAGMVAALTNESATSKSVYFAHCTSEMIFITHLLTEQPEKLAGPLLADTYVTLLKGRNAWYGQMLAKGELSPDMGDSIKGKGMIQGISAVGAFFELLSQPSLSVQHPEENKQVAPAELCPILKRLYRILIKRELSTRDILQALRDETMNDPRERIEMAQSHAFYRPSLLGKP

SEQ ID NO: 46567 - protein, 856 aa, Oryza sativa
MVDKEGPVVLSPEYVMCGTTSHVEPRLTFSADGFKIEYWDSCENDEMAAQYWKISDITCIDCKWAQSVGSVLITLHVGSGTETGNSSHDRIQFCLIDSQWPRKQQNIWHLASRYQEIWNNIPSGDFASENWNIEPSLFFPKQYFSDTEEFEDVIYPKGDHDAVSISKRDVELLLPETFVNDTIIDFYVKHLSTRIEPAEKHRYHFFNSFFFRKLADLDKDQGRAPEGRAAFLRVRKWTRKINIFTKEFLFIPVNFNLHWSLIVICYPGEVETFKDGDTNISAKIPCILHMDSLKGSHSGLKDIIQSYLWEEWKERHPESASDCSDKFLNLRFISLELPQQDNSFDCGLFLLHYVELFLMDTPRSFNPLKIDSFANYLSDDWFPPAEASLKRSLIRKLIHKLLKEPSQDFPKLVCCSEQLDKTHGSENAELEQMSENAEREQAKELPAQMCTDGEPDSVGTILETQQPSISTCFNYSDENGPPVSVHNLHKLEVSSANKDAIVCLSNHDEKNESPPADSYNHLDLRSCDSEEAETAKGSAGVVKDPNSHKEPLLDSLDNNQDISIQAGAEMHDSMDSKLCSISNNADLMASEERSLDKNTNENEEHNRTSEDIVESVMMLGGSKSDTELDAEPERTAGEAEVRNCDHSKDIDYIALGDINKDAAKQSLNRNIVEAEDIKCEGTLVDHTVVEDATPYNVNETSASADKINDNEHNVSSELKEGNNGNGITTSISCEMEDRSIDNLMVGDSRNGTDETRADGQEAHDNSATAETVPCEDNATTSITDAEMPHEDSTCSVKGEAISDNTASDAKRPLPDSTYIEDIPDDKCLQKDDGGGDEAKTERHYKRRKFLVSEATS

SEQ ID NO: 46568 - protein, 132 aa, Oryza sativa
MASTPAAGPNGVASPAGQAPSSSLPGFHEAPPSVLISRPSWIVRSESNIRRERPKRPDPPCTICRGTGKIDCRNCFGRGRTNHADLVMLPKGEWPQWCRICGGSGLDYCHRCHGTGEFREPMGFHFATIHRK

SEQ ID NO: 46569 - protein, 673 aa, Oryza sativa
MGPSRSFQNLLLLLLPLALALCSAAASGEASRRFWVENDTFWKDGAPFQIVGGDVHYFRIVPEYWKDRLLRAKALGLNTIQTYVPWNLHEPKPLSWEFKGFTDIESYLRLAHELDMLVMLRVGPYICGEWDLGGFPPWLLTIEPTIELRSSDSTYLSLVDRWWGVLLPKIAPLLYSNGGPIIMVQIENEFGSFGDDKNYLHYLVEVARRYLGNDIMLYTTDGGAIGNLKNGTILQDDVFAAVDFDTGSNPWPIFQLQKEYNLPGKSAPLSSEFYTGWLTHWGERIATTDASSTAKALKRILCRNGSAVLYMAHGGTNFGFYNGANTGQNESDYKADLTSYDYDAPIREYGDVHNAKYKALRRVIHECTGIPLLQLPSKIERASYGLVEVQKVASLFDVIHNISDALKVAFSEQPLSMELMGQMFGFLLYTSEYQEKHSSSILSIPKVHDRAQVFVSCSHGDVRKPRYVGIVERWSSKTLQIPSLSCSSNVSLYILVENMGRVNYGPYIFDQKGILSSVEIDGIILRHWKMHPVSLNAVGNLSKLQLIMQMTDAEASKVSIYGDSENKLQDVSLYLNEGISEEPAFYEGHFHIDSESEKKDTFISFRGWNKGVAFVNNFNIGRFWPAIGPQCALYVPAPILKPGDNVIVIFELHSPNPELTIKLVKDPDFTCGQ

SEQ ID NO: 46570 - protein, 467 aa, Oryza sativa
MLRSTFPLVSHLPSRKPPPIRPRPPPVRPYASSAASPPPPPPPPASAYVHLPFCRKRCHYCDFPIVALGTSSPPTSPHGGDGDDPRIADYVRLLLREVAATRPVSDDGVPLETVFFGGGTPSLVPPRLVAAVLDALRTRFGLSASPEVSIEMDPGTFDAAKLRELVGLGVNRVSLGVQAFQEDLLRACGRAHGLREVHDAVGIVTACEGLQNWSMDLISSLPNQTEEMWEESLRCTVDARPTHVSVYDLQIEQGTKFGQLYTPGVYPLPNEKDSANFYKIASKRLSEAGYNHYEISSYCKTGYECKHNVTYWQNRSFYAFGLGSASYINGIRFSRPRRMKEYAEWVQKLENGVWSHESGNSGIKDMAMDVVMLSLRTAWGLDVQSFSKTFGRSLTESLCNTFRPFVESGLVIAMDMERRALQPSEFELDLQHDGENGSRVAFIRLSDPDGFLLSNELISLAFGIISP

SEQ ID NO: 46571 - protein, 51 aa, Oryza sativa
MVINLAIKLLLDQISYLAELRLTTGTSLQRTYLLRPATCMYHILQIRWLPI

SEQ ID NO: 46572 - protein, 83 aa, Oryza sativa
MAPPHLHPRLPPRPPPPPALPPPRHRLQKRRRPRRRPPAPAPPPRRPVRQLRLLRGGGLLRRHPCPLEEEGHRCPFQCPLLDL

SEQ ID NO: 46573 - protein, 785 aa, Oryza sativa
MGGARAQVNKPHKTRFASKASRHAHKIDKVRTGKPEGSHRAAVKGARAARVQRSKAIRDQKRAALLKEKRSSVGSSSAPRVVVLFGLSSSANVRSLAKDLLTIASGDEEKPTSSTVASPTYKLRTTVLEAPYGDLTSCMELAKVADLLAFVLSANSLYDCDSSSPIDDFGSQCLSVFRAMGLPSTAVFIRDLPSENKSRQELKKTAISFVSPELPEDCKFYAADTKDDLHKFMWLFKEQHLSCPHWRNQRPYVMSEEACIKPDDSSGLCTLLMSGYLRAHNLSVNQLVHLSGVGDFQLGQIDILKDPFPINERKNSNAMVSEDSGIQIVDTFVPDPSSQEPLLVENTPDPLEGEQTWPTEAEMEEAYLNNKQRKLKRKLPRGTSEYQAAWIVDDTDDEDGDSENDNQDGAGMVIDEQDHSDNGGDGSDMDVVSHFTEKFDEETIGGTEMADDENLTKEQIEAEIKKIKEANAEDEEFPDEVETPLDVPAKRRFAKYRGLKSFRTSSWDPKESLPQDYARIFAFDNFTRTQKHVLAKMAERDEGTLKDCAQRGSFVRLHLKNVPTEIASKLVHPSRRLPVVVSGLLQHESKISVLHFSIKKHDSYEAPIKSKDSLIFNVGFRQFTARPLFSTDNINCNKHKMERFLHHGRFSVASVYAPICFPPLPLIVLKSRDGEQPAIAAVGSLKSVDPDRIILKKIVLTGYPQRVSKLKAVVRYMFYNPEDVKWFKPVELWTKHGRRGRIKETVGTHGAMKCIFNSSVQQHDTVCMSLYKRAYPKWPEQLYQI

SEQ ID NO: 46574 - protein, 449 aa, Oryza sativa
MADESERSGMVIDDVGGGLNLPIIVAGKRKRELTWEEKALTVLDIVGSQQHPACQPAERDCSLIDSEKDYSSMAGCQAGEHASIFGIDKNGDDSDEPCAKDDAKQSDVAPLKEEENWELDSEPELTWDEKVVEVLNIVRRREITEYNPKQFCSIPTRFCAYNIAFFDLDKESKLARGPPIKSLAFPDYWWEMDSVNVIAIKVAESDVGYPIRVFGTVLARDEYDFRCVYLFRRDRNNPQIITSPEDTLTLTGPNRALGAIDKMYFEFNLKIRDGDVDKDFCKGVREHNAICYTKQPMTLSLESCLSRIDFVYSPVQLAVEASVAVKIKGVVSKFFTGKVTAWTTGDDQNKIILYDSEVEGRNRVLGADGSVDLTRCFVAVNLDDELVLNVCVSEGAGSIFELVLGHNDEECVLEQGPYELQVNVVWTAALKHRQRRKLFERIGDFRVLR

SEQ ID NO: 46575 - protein, 457 aa, Oryza sativa
MIRVVSPPPPSTVQLRGGGGTPGPSSSSAVCRFWGSRRGSRVAATSSWGWGKSRRRRRAAISCCSAEEGEGPRVATPSAPPAPSEGSIQLYSQIERVITEAAKQSREGWGSTGDWTEIEGAWVLKPKSQEPSFVVHFVGGIFVGAAPQITYRFFLERLADKGALVIATPYASGFDHFFIADEVQFKFDRCLRNMVEPVNDLPTFGVGHSLGSVIHLLIGSRYAVQRSGNILMAFNNKEASLAVPLFSPVIVPMAQSFGPIFSQLTSYPTLRFGAEAAIKQLENLSPPVVKQLLPLVQQLPPLYMDLVKGREEFVPKPEETRRLVKSYYGISRNLLIKFKDDQIDETSILAQVLSSESAISSLLDMSIRSLPGDHGLPLQQVLPDVPPAMADAVNRGGELLTNLATGTPWEAVAKEVGSTLGADSGVLRAQISKDVNTLVDVIVSWIESNSGPRLLRS

SEQ ID NO: 46576 - protein, 173 aa, Oryza sativa
MFLRRILSGGGGVAALRAARAVKETTGLVGLEVVPNAREVLVGLYTRTLKEIEAVPKDEGYRKAVESFTRHRLQICQEEDDWKRIEDRIGCGQVEELIEEAQDELKLIAKMIEWDPWGVPDDYECEVIEDDTLIPKHVPQHRPVALPEEFFKTLDAVKSDPALQGESPPQVKP

SEQ ID NO: 46577 - protein, 498 aa, Oryza sativa
MEMQDEHVIDVPSILAQELSTELTSLKPPSTELAGDGDPSPTPPIIIDEVGERTRNVDPHEYLPHHVYIGPYSRMRNADLAGDDDDKLRTLQEVLAAAAAYSTAPPLQLKDFVAELELLEARARSSYRHTFGVVPSKEFLRWLLLDACYILVRFGDVDDVVGRRPRPAAPAAVASANGAVQGGNRVVPSVERRRASAADRQYILDVVRDVFYLAANQVPFFVVERVRQMTFLDHGTPALDAIARFAGKLLEQKQYSVATPTMVGPPERRPEPANLLHLLHMHFTPTVLTSAAAVGGGGAPVGRWRTAMEYYFVGVKFKRRPLNRRSKGGALSILDVKVSGGGGGTLEVPQLNIDGETWRLLRNLIALEQSNPSGAGSHVTAYCVFMSQLASTPMDVELLSRRGVIVHGLGNNGEVAKRFADLCKGTVFDVDDADQNYLRPVCQVLDRRFQSRPRRWMAWLKQKYFANPWLAAGLAAAAVIFVCTVIQAVYSVLSYKKG

SEQ ID NO: 46578 - protein, 524 aa, Oryza sativa
MVVLAASIISKSGKALVSRQFVDMSRIRIEGLLAAFPKLVGTGKQHTYVETENVRYVYQPIEGLYLLLITNKQGNILEDLDTLRLLSKLVPEYSPSLDEEGVCKTAFELIFAFDEAISLGNKENVTVQQVKQYCEMESHEEKAHKLMMQSKINETRDVMKKKASELDKMRMERGKLDKGGYSSISGPRVIEKTFNDMSITGSGFGSGSGLGGLGMDMDSFASKPKGGRPSAAATAPGKGLGMKLGKTQKTNQFLESLKAEGEVILEDVQPSSVQSRASPLPPSDPVTVTIEEKLNVTVKRDGGVNNFDVQGTLALQVLNDADGFIQLQIENQDVPGLSFKTHPNINKDLFNSQQVVGAKDPNRPFPSGQNETPLVKWRIQGMDESSLPLSVNCWPSVSGSETYVNIEYEAAEMFDLHNVVISIPLPALREAPSVRQIDGEWKYDSRNSVLEWSILLIDQSNRSGSMEFVVPPADPSTFFPISIGFSASSTFSDLKVTGIRPLKDGNPPKYSQRARLVAANYQVV

SEQ ID NO: 46579 - protein, 205 aa, Oryza sativa; identical to SEQ ID NO: 30778

SEQ ID NO: 46580 - protein, 126 aa, Oryza sativa
MGDSQYSFSLTTFSPSGKLVQIEHALTAVGSGQTSLGIKAANGVVIATEKKLPSILVDETSVQKIQSLTPNIGVVYSGMGPDFRVLVRKSRNKHSSIIGCTRKLSLLLSLSEKLLLLCRSSHSLVV

SEQ ID NO: 46581 - protein, 313 aa, Oryza sativa
MSGRDRLPRRFIEDGRGYPDIRVVDERRGYPDIRVVEDRRGYHGIRAIEDHRGYPDIHEGLVMRVAPRSHTAMPEEEIEIQGAEFRRLMADHRALAEERLALHRELQAGKDEVRHLNTIIADISAKKETYIGELVDKRRKLEAELRANESLRDEIVQLRGEIDKHLVVRKELSAKSASIMHELTREQSNKQQIPMLKAEIDALRQELVHARSACELEQKGNFQLVEQKKAMEKNMISMAQEIEQMRAELANSEGRPWAPGATYGMKLGSPEVTFPTSYGDNYNIHVGGSEKGHSHLPESSSWGTYDNNRLQYR

SEQ ID NO: 46582 - protein, 267 aa, Oryza sativa
MEWDKAKASSGEAVDDRGGGEGGLGYVKVMTDEQMEVLRKQISIYATICEQLVEMHRALTAQQDSIAGMRLGNLYCDPLMVPGGHKITARQRWTPTPMQLQILENIFDQGNGTPSKQKIKDITAELSQHGQISETNVYNWFQNRRARSKRKQAALPNNNAESEAEADEESPTDKKPKSDRPLHQNIAMRDHNSERISEMHHFDTEHEQIRRMMYASNDSSSRSSGSLGQMSFYDNVMSNPRIDHFLGKVESPGSFPHMRSGESFDMY

SEQ ID NO: 46583 - protein, 485 aa, Oryza sativa
MAKPTVVLLPVWGAGHFMPMIEAGKRLLRGSGGALSVTVLLMPAPTPDAAVDIAAQVKREEASGADDISFRHLPAVDMPTVHTGIEEWVSLILRSHGPHVRAAIAGLDCPVAALVTDIFCTPALDVAAELGVPSYVYFTSGAVMLELLLYSPVLDEEVPGEFSEMDGALNIPGLPPVPPSVLPATMLHKKKMSTYRWFLETGRCYMKATGFIVNTAAELEQSVIDAIADGRCTRGVPAPTVYAIGPVIALTPPPEQPHECVRWLDAQPPASVLLVCFGSKGLLPPPKVREIAATLERSEHRFLWVLRGPPKDSRPGQRVPTDAMLDELLPEGFLDKTKGRGLVWPTRAPQKDILAHAAVGGFVTHCGWNSILESLWFGVPMLPWPLDNEQHANAFLLVSVLGVAVPLRLDRERDNFVEAAELERAVSTLLGGGDGEAGRKAREKAVAVKAACRKAVEKGGSSDAAFQRLAEEIRRGAVNVPKKRN

SEQ ID NO: 46584 - protein, 212 aa, Oryza sativa
MGASESILSRPQQQRRPPWADEITTVSEGRRDAGDGDPLLHRIKSLTIAPPLLSGQSAASSEAESSLTDILVRKPSSSSATSGNLNPNVMFELFSLYREWQEEKAKKISETQEEIENKIETADALSIKLLQRFNYSVTSMRSTSHNLAEVRPLQVEVGELKGRLTEVISNCDALCKRIAAEGPESLRSSVQPFTTSKMEPRESETLDLKTQS

SEQ ID NO: 46585 - protein, 194 aa, Oryza sativa
MGECRGGGGGGDGLIKLFGKTIPVQPDAKDVQQHSGSSSSSTESDVQETAAVAVADPSPRSEVVDGESPPQPGGEAASHQQQQKEMKLKKPDKILPCPRCSSMDTKFCYFNNYNVNQPRHFCKHCQRYWTAGGAMRNVPVGAGVLGLHDSTSWSLEPPMAGHSPVSGHLIIITTYKCYTFSLLLHTRQASQRGW

SEQ ID NO: 46586 - protein, 425 aa, Oryza sativa
MERVFSVEEISDPFWVPPPPPQSAAAAQQQGGGGVASGGGGGVAGGGGGGNAMNRCPSEWYFQKFLEEAVLDSPVPNPSPRAEAGGIRGAGGVVPVDVKQPQLSAAAAAAATTSAVVDPVEYNAMLKQKLEKDLAAVAMWRASGTVPPERPGAGSSLLNADVSHIGAPNSIGGNATPVQNMLSGPSGGSGSQLVQNVDVLVKQPTSSSSREQSDDDDMEGEAETTGTARPADQRLQRRKQSNRESARRSRSRKAAHLNELEAQVSQLRVENSSLLRRLADVNQKYNDAAVDNRVLKADVETLRAKVKMAEDSVKRVTGMNALFPAASDMSSLSMPFNSSPSEATSDAAVPIQDDPNNYFATNNDIGGNNNYMPDIPSSAQEDEDFVNGALAAGKIGRTASLQRVASLEHIQKRMCGGPASSGSTS

SEQ ID NO: 46587 - protein, 431 aa, Oryza sativa; identical to SEQ ID NO: 29670

SEQ ID NO: 46588 - protein, 395 aa, Oryza sativa
MKGSMKLRAEADFDPLLKYSTSEIRERLVDKYRISEYAMMVRNTIHEISKIEGVIEEVVMGSQASWCKQLTTLTRRSFTNMSRDFGYYWLRIVIYVLMAVCLGTIYYDVGTSYAAIQARASCGGFVSGFMTFMSIGGFPSFIEEMKMFTLERQNGHYGVAAYIISNFLSSMPFLLAVSWASASITYWMVKFRPGFSYFAFFALNLYGGVSVIESLMMIISALVPNFLMGLILGAGVIGIMMLTSGFFRLLPELPKIFWRYPVSYIVYGSWGLKGAYKNDLIGLEFEPMMPGQPKLTGEYIITKMMGLSLNHSKWLDLSMIFVLLFAYRLIFFLVLKAKEAAAPYIRVAYTRFTIKRLERRASFRKTLAMSSMSKRHNQPPHPMAVQEGLNSPMPY

SEQ ID NO: 46589 - protein, 672 aa, Oryza sativa
MARAPSFLLLPLLLLVSSSLTPAATAAAFVGLDSFLAAAAARDPSAGNDTFGALPAALLRQLSTPSPLLPTRLLSLSAQVPVTVRLAGASFPPATGRLLESFVNSAVSSSRFLSSRRPHRLALSHKIHLEVAASSSQLAPRAAAAVRAHLDSSAAPFHAAALSSVPYSVVDDLVAEDYRALVDTGSAPSVYIYLLNLGPQPRPYAYTAASSPADAHSPGFSRCLAPVWAGKERYIWIDLGAGPVDYGPALSGEGVLPRGEFHPLAALHGRPRSEKALVADLASLVLSAYKSLLVPSLRIPVHYESSLLVQVFHIHGHERDTSGLDWGSIEQSIRDGNLAYEGQRLKFDLNRIRFSDCPICSFAVARSTTSFTSRFLFDNYTLIVSEYLDSKRMRQVLSDSLEELHKVAGVHDNDDYDKVVPVFVFDLDYDKLLLLDRYHQAVAFRDMVISVRTRSSQTVSDYSCNGRHVITMTRNLDRPIIASVLQSMWGVSPTHQSWSPEHNATVVDYTWSTGHTPFGPFSETKSLSFVQKDAARRNVLLTTLNYTITSAIDVLESMAAHGGESILLRRKRRVEFIQRWNLLTYKLEKVVSAMSRLDYNKAMYFLRSSDHDLFAVHTLVYQASQELEASLVCFKDPPFPWLSVSMSGIFVFGFFYVYSKRDKLFRSKRKQF

SEQ ID NO: 46590 - protein, 267 aa, Oryza sativa
MGSAPFGDAVAGGGLYEYQGYHGGFAGGHGLGQPAGRAPALDDGETEGMDASAAAAVAAMEMAKRNCGGGREEKAAMALKSHSEAERRRRERINAHLATLRTMVPCTDKMDKAALLAEVVGHVKKLKSAAARVGRRATVPSGADEVAVDEASATGGGGEGPLLLRATLSCDDRADLFVDVRRALQPLGLEVVGSEVTTLGGRVRLAFLVSCGSRGGAAAAAMASVRHALQSVLDKASSGFDFAPRAASLLGSKRRKVSTFESSSSSS

SEQ ID NO: 46591 - protein, 501 aa, Oryza sativa
MSFRGEESGGEDGGRTASASDLRKPFLHTGSWYKMSSAGGGGGMGSRLGSSAYSLRDSSVSAVLCTLIVALGPIQFGFTCGLSSPTQDAIISDLGLTLSEFSLFGSLSNVGAMVGAIASGQIAEYIGRKGSLMIAAIPNIIGWLAISFAKDSSFLFMGRLLEGFGVGVISYVVPVYIAEIAPQTMRGALGSVNQLSVTIGILLAYLLGMFVPWRILSVLGILPCSILIPGLFFIPESPRWLAKMGKMEDFESSLQVLRGFETDIAVEVNEIKRTVQSSRRRTTIRFADIKQKRYSVPLMIGIGLLVLQQLSGVNGILFYAASIFKAAGLTNSNLATFGLGVVQVVATGVTTWLTDKAGRRLLLIISTTGMTITLVVVSVSFFVKDNITNGSHLYSVMSMLSLVGLVAFVISFSLGLGAIPWIIMSEILPVNIKSLAGSVATLANWLTAWLITMTASLMLSWSNGGTFAIYAAVCAGTLVFVCLWVPETKGRTLEEIAFSFR

SEQ ID NO: 46592 - protein, 270 aa, Oryza sativa; identical to SEQ ID NO: 30305

SEQ ID NO: 46593 - protein, 319 aa, Oryza sativa
MENQAVSEMHVVMDLEGTTKRIPPMQTPRARLLRSCGESILAMARGAYRRVEAMRCPVGCVARGASRAAAPVLSPLRLRCLSALAFADRQLLVVQDVAAVLFPAAERVLGRGADDLVLLVESLPARLDGAIDALEALLAGAAGLFVLPKRCRRYRAHEDDDDGVGGAVFRDIWCDEKEAASLHRSAMEEEARRHSDDVARKELESLEVVTADDGGGGGNTVHGDKAPVDGEGEAATPAKRGDASGGQECGVEDVQRVETPAAEITDAMKDSTEIVKDEDQERGGSEREEEETFAMARTAESREEALLGLFDIAWQQKLA

SEQ ID NO: 46594 - protein, 285 aa, Oryza sativa
MPFLSPLAGDDADDYYYAYDSRFRRGSGGGKIAKKEKDKDKDKGFLSFLPCFLPCSPGSVEPTVHRRLLSSDSSDSDNIATADITADLARLRARYSRLATGPPVRPRDVPCLLARTDDPPLAVAALSWLGGDLRPSCILLTLLPALFPTLPAHARHALSAAARRLHAREAALDGEVAEYQSTYAMKLACEKTKDGVAETAGEEMCKMARAARRADKLRWRAVEAAVKEVLTPAQAKEFLKAVEDVAARAARHGARWHARTGAVSVPVEVFDRMRANARAATDDAW

SEQ ID NO: 46595 - protein, 787 aa, Oryza sativa
MALPPPPPFSLSRSSRVCVGVAHAVPHRSAETVPDAAPQLLLMRAHARAGRMQPARQAFDAMLPRDRSLVAWTVLMSGYATHGPASEALDLLLRMVEWPLRPDAFVFSVALRACAAAGSLGVGRQVHAAAAKMGYVGADLFVANGLVTMYASCRSLGCAEKVFSGIAAPDSVSWTSMLSAYTENGCDTQALMLFLEMIHGGVSCDAYTLSVALRAASSLGHVRLGYQLHCYMIKSGFVPSEFLENCLIEFYGRCRELQLMQKVFDEMNAKDLVSWNIVIQCYADNLCDEEALVHFRDLMYKCAECDEYTLGSILHVITRRCAFDYGREIHGYLIRAGLDSDKYVMSALMDMYVNWATLRKSRSMLPLRMLKYYLSVQGKLDQFIVASSLKSCASDLDLAAGRMLHACVLKFDVNPDPFVISSLVDMYAKCGSLEEAHILFSRTKDPCTVAWSAIISGSCLNGQFERAIHLFRTMQLEHVQPNEFTYTSVLTACMALGDVVSGMEIHSNSIRNGYGTSDSVLRSLISFYLREGQFNQALRLCLSLSNSEISWGTLFQEFAELGDHLGILNLFHVIQRSGGVLDYPTACLILSSCGKKAHLPEGLQAHAYLMKRGLSSTGCMCDYLIDMYSGCGSLTHAFEAFRNTSGRNSSSWTSIIMASVENGCPETAIRLFVQMLRKEKSPNSLAFLSVLKACAEIGLVNEAFQFFVSMTEVYKIQPSEEHYSHMIEVLGRAGMFKEAEHFIDSVVPSESGASAWSLLCSAAKQNGNAKTMRLAADRLSKLTPDGC

SEQ ID NO: 46596 - protein, 158 aa, Oryza sativa
MVVGLINANPVVYEKKERRSRQAPETTDENAAEAIDQLEIFDHIRDIKDPEHPYSLEELNVVTEDSVEINDELSHVRVTFTPTVERCSMATVIGLCLRVKLMRSLPPRYKVDIRVAPGSHATETAVNKQLNDKERVAAALENPNLLDIVEECLSPTFA

SEQ ID NO: 46597 - protein, 335 aa, Oryza sativa
MEEGSNKREGLPPQLLDLIPDEKEWKLREALGLGRSRNAGFDGEEDKKLDLKLGLPGFIEDDEAETLRDYRLQQESPSLSLSFFPKHSKTTSSTTTTTGAKRGFIDTVEDKTEGYNDQKQQARAGCGKELAVEEMIAAVSERKKGCCPPPPPPHGAPATPARNRPQTQGRGAAAPVVGWPPIRSFRRNLASSSSSKHSPEPQNDNANAKVTLTCKKNPLVKINMDGIPIGRKIDLAAYNSYDGLSSAVKQPFHGFLQAQKDQTNAQIAQQGADDKIFYQLLDGSGEYTLVYEDSEGDRMLVGDVPWKVFVSTAKRLRVLRSSELSHTLIGATARV

SEQ ID NO: 46598 - protein, 112 aa, Oryza sativa
MEGLIPLLYKAIKDRRGGRPDGGAAAGVDLYDPEQRRLWLEQEVRSPLHPSAAAAGGQHQQQQQPHRRNLSLEELAGEVGLSPGRRLPRVALPKARSVRVFSCIGAGAGVAA

SEQ ID NO: 46599 - protein, 287 aa, Oryza sativa
MDHCRKVEGVQICDKRAGLRYLSKEEYLAQQPEWCDQMAWDAMATVWVDPEWIEKSKTNRANRKTPKFKPHRGGSNSIATVRQKLSKKFGREVSAIEAWVHTHRGSNPEDTNTLNTEEATLCLERYKTKATELNGPNFDWMNSPVDSRALYECSCGRPHGKWETFNGMVDDSEAMAKIKRRSTSSTANKRRRQEEDDHERARLIKDARIAKEYAQRVLEWSSGQDSYNNTIKLILESVIQHTGMPLPVAIPHPPPPPPPPTYGVYHSADQSTVNVCGHVSINIADVS

SEQ ID NO: 46600 - protein, 240 aa, Oryza sativa
MGSSTKNAITKPSSNRGKVISPSAVKATQHTSAFHPVQRQTSPANVVGKDKVDEGIANGVNVGHPVDVQNSFMQHHHHVHYYVHVMTQQQQQPSIERGSSDAQCGSSNVFDPPIEGHAANYSVNGSFSGGHNGNNGQRGPSTAPNVGRPNMETVNGIVDENGAGGGNGSGSGSGNDLYQNGVCYREAALNKFRQKRKVRNFGKKVRYQSRKRLAEQRPRIRGQFVRQSGQEDQAGQDEDR

SEQ ID NO: 46601 - protein, 521 aa, Oryza sativa
MTAATSKNVVVLFPFPGHGHLAAFLSFAGVLHRALPDVAITLVSTPRNVASLRRATSAGHDSFLLHELPFVPADHGLPAGWESSDGVPHNRFPDFLEALEVLQPAFDDFVAGATAAGDVAVCVVSDPFLAWTVTVARRRGCAHAFFVSCGAFGSAVVHSLWSHLPIRPDEAGRILLPEYPDVVIHRSQVSSNVLHPPTAVKHRVEAFFGRQIQLGYKTDALLINTVEEFEPTGLAMLRRTFRLPVIPIGPLVRASTKTTSPETDATAGAITSFLDSHPPSSVLYVSFGSQFSIQAEHMAELAAALEATGRPFVWAVKSGRAQHKRRDPAEVASRRIRGEGDGDQERPPPPWMGAAGGDPGASLHRSVPEPLRVELGAGEHDARRADHRVAARRRSVLQRQDARRGVGGVPPRGGGTGGHGHECHYCGQSDAGCRGGDGDVSNSEGGRDAAAGESDQGDHGSCTGGWTWLVGKSGIGGVLQNNEAERLKLEQNPRLLIYYASRCVILNHLLLLTTSTMLHVK

SEQ ID NO: 46602 - protein, 385 aa, Oryza sativa
MALQFVESQREARPELADPYADLADLYQRKLWHQLTLKLDHFLQLPAAQTGDTLIQLYNNFITDFETKINLLKLAHFAVIASRQYPDKDAAISFLEGVITKLRETKDLRINEPILYVKMQIAAINLEKGNQKECKKLLDEGKSTLDSMTDVDPTVHASLYWISSQYHKARQEFAEFYKNALLYLAYTTVESLSESFKLDLAFDLSLAALLGDNIYNFGELLAHPIINSLIGTKVEWVYHMLQAFNTGNLALYQELCRVHNAALSAQPALVQNERKLLEKINILCLMEIIFSRASEDRTIPLSVIAERTKLSVSDVEYLLMKSLSVHLIEGIIDEVDSTVHVSWVQPRVLGIPQVKALRERLDAWVGKVHTTLLSVEAETPDLVAA

SEQ ID NO: 46603 - protein, 213 aa, Oryza sativa
MHEYRLAADPLAAAANTYKPSSSSRFRNVSMRLDDWVLCRIYKKSGQASPMMPPLAADYDHDEPSGVLDDAYSFYAPPMISTTLIPKLPKIPSISELFDEHALAQIFDTAADPPADHHQHALAVHPSLNQLLGVGDNFLAECYPSTASTATVAGGKRKASPAGDYAGGGHTPAKRLNGSCFDVAPQSVVGGLQATPSSVLAGLNHQMLPPQLF

SEQ ID NO: 46604 - protein, 523 aa, Oryza sativa
MPADAAAKGMKLERYASGAGAMLLLRRAASGKVVSASSHLLFRATVLATMALVFLFTFHYPSLLSRSFTLSSGAGAGEGGAAAHASHRSLFMSSSSASASAASVYGGAAWEKEVRRSAKPRKDGGIAVLVTGAAGFVGTHCSLALRARGDGVLGLDNFNAYYDPELKRARQAPRRPRRARARRRHQRRAPAREAVRPGAVHPRAAPRRAGRRALRHGGAADVRGVQRGRARDRPRGRRQARRPAAGDRLGVVVVGVRPQHRRTLLRGAPHRPAGVAVRGDQEGRRGHRAHVQPHLRPLHHRPPLLHRVRAMGPPRHGLLLLRQEHRLRRAHHAVPRRRRRRRAPRFHLHRRRRQGLPRRARHLRQEHRLLQVRQEVRPGAAPRLQPRQHLAGAGHPHGRHPREAPRQEGQQAHRRHAQQWRRALHPRQRHPRRPRLRLPPHHLPRRRPPPLRRLVRRLLQAQARRPQDRRQGRRRRQALLLVGLQEEEEGRGDVGVIMIKQHNTMRHHASVYSIASSWRLLSV

SEQ ID NO: 46605 - protein, 154 aa, Oryza sativa
MLAIFQKQVAHAPAELNSPRSSAAKPKNPDEILRDFHALHPIEAFSTSFGGGAALACVAGHARNGLSGYERMFCGLDDIYCVFMGRLDNLSSLIRQYGLCSRSTNEALLVIEAYRTLRDRGPYPADQVVKDLSGSFAFVVFDNKSGAVFAALVI

SEQ ID NO: 46606 - protein, 215 aa, Oryza sativa
MAAPPARARADYDYLIKLLLIGDSGVGKSCLLLRFSDGSFTTSFITTIGIDFKIRTIELDGKRIKLQIWDTAGQERFRTITTAYYRGAMGILLVYDVTDESSFNNIRNWIRNIEQHASDNVNKILVGNKADMDESKRAVPTSKGQALADEYGIKFFETSAKTNLNVEQVFFSIARDIKQRLAETDSKTEDRTIKINKPEGDAEATTLQKSACCGS

SEQ ID NO: 46607 - protein, 519 aa, Oryza sativa
MQILPKPLDHPAPTPPPPHPGRSQQPIRSPTPLFASPIAPWPRAKPEGGERRGSSVAMDGLIKGLINVAIDAVEGAGRGERGGEDDAPRRHRPAREEEEGRGDERSRSTWAEVVSDHKGGEAEERPDHRNSRRDGRQERREDGDWERVDGRKQHQHNQYEEEYRRDSSSRRPQQHQQAPAYRRQQQDGDERNDGGWQTVGEKKHHGRPQQSEAWNAYRRPPSEQQYCEDAGQIHHGLNVEPTREELNSLSRACSRLWELDMNRLTPGKDYRIECGEGKKVYQKGDMASETLFSWLGDDVLRKPTYSRFCALLDNYNPHQGYKEVVTQQDKHEEVAFIEEIARTAPIKYLHRYLVLKGVASQDYEDFKRMLTSLWFDLYGRGGSSSSSSAFEHVFVGEIKGRRGQGENEVSGFHNWIQFYLEEANGNVDYQGYIFPRRRGESPDSETQLLTIQFEWHGVLKSVSSTLIGVSPEFEVALYTLCFFMGGEDNRVEIGPYGVNIKCYRMGNSKIGSAFPIADN

SEQ ID NO: 46608 - protein, 514 aa, Oryza sativa
MDLLRDRRLGALLVVVLVLVSGAAVEASIHTYDREPFREVGNAFLLSGGSEGVVADGADLAAPASSFIKFTNVTFWRTPESAESHAKMAHSTGLVQAILFEAADRDNIGGSAYGGQRSICCTPDLAKLEGCKQGEVIRRPSSDDPDWPYVLDTHFSGSHLSVKLEDEVVRITKTGMYNLFFISCDPKLRGLSMSGKTVWRNPGGYLPGRMAPLMKFYVFMSLAYLLVMVVWSSQYIRFWRDIMPIQNWITLIIALGLFEMTLWYFEYLNFNSSGVRPIGITTWVVTVGAIRKTISRLLILSISMGYGVVRPTLGGLTSKVLLLGLTYFLASELLDIAENVGTINDISGKARLFLVLPDAFLDAFLILWIFTSLSRTLEKLQARRSSVKLDIYRKFTNALAVSVIASVAWIGYEVYFKATDPFSEGWQSAWIITAFWDVLAFVLLLVICYLWAPSQSSQRYAYSGEAADDDDEESQSLTKGTDGDVGMVKVDKDRSGGVSSAFSLEDEAEEDKRE

SEQ ID NO: 46609 - protein, 846 aa, Oryza sativa
MASDGAQMEVERRLRDIGARFTSLPDADDELLRLIEEAETWLARVDQSPPESMHKALRPTMSALIKKELLDHSVPDIKLAVASCLTEVTRITAPEAPYDDDVMKDVFTRVVEAFEKLDDMESPSYARRVAMLETVAKVRSCVLMLDLDCDDLIRDMFHHFFRTISNTHQENVITSMETVMKFVIDESEDVQQDMPSCLLQDLASYLLKNLKKEEKETLPASFELAEKVINKCYEKLKPVFTPLLRGTPLDEYSEVVTSLFEDALDAGVADNSDAPGKDMVADGKLSHKIVSDESAQESSKLEQDANCPGKDGTPPNNTSTSAVSNGCALIDRVKSPSGPSSSDKKAELPSDDNQAKDTDDLISGAKEIPEPITTEPEKPSDHNLKKSHKLDTSTDSEVVDHSKAVNNNEDILVSRELSPETDDGDNKLPPETGNRAADDKSKHVDNTPAGKGKRGRPPASKSHEKKNVGKGKVSGLESKKADAVSDSGGRATRRLAKDDDIKSSFKKTGEGESSKKKQKENLKQQEDTPPDEDTDEDLSLKDIVSPKSSAKTGKNKGQAGDSGGSKRKRAQEAEETPQPKKNKILKGNLVGSRIKVWWPDDRKFYKGVVESFDVASKKHKVVYDDGDVERLHLKNEKWEFIDEGRDNNPDASSDMPHGRRGRVSLGEQTKEGKIETPSSGKHRGTDVADPPKKRGRPKGVRSSNSSQNDDSPLKGKSAENDDEDISKTPKSGSALKNEGGRSSRSTGKTKDGLLKGSNKDETGNTKSASKSKNDGGSKHKDSKDEAKSSGSNPKGASTPKAADGSKTNGLSTKRKQKEKEGESSEEEEHVSAKISTGKKRRRKAHN

SEQ ID NO: 46610 - protein, 352 aa, Oryza sativa
MGWNSWNHFYCGINEQIIRETADALVNTGLAKLGYQYVNIDDCWAEYSRDSQGNFVPNRQTFPSGIKALADYVHAKGLKLGIYSDAGSQTCSNKMPGSLDHEEQDVKTFASWGVDYLKYDNCNDAGRSVMERYTRMSNAMKTYGKNIFFSLCEWGKENPATWAGRMGNSWRTTGDIADNWGSMTSRADENDQWAAYAGPGGWNDPDMLEVGNGGMSEAEYRSHFSIWALAKAPLLIGCDVHSMSQQTKNILSNSEVIAVNQDSLGVQGKKVQSDNGLEVWAGPLSNNRKAVVLWNRQSYQATITAHWSNIGLAGSVAVTARDLWAHSSFAAQGQISASVAPHDCKMYVLTPN

SEQ ID NO: 46611 - protein, 226 aa, Oryza sativa
MNDIGMDAYRFSISWSRIFPNGTGEPNEEGLSYYNSLIDALLDKGIEPYVTLFHWDLPQALEDRYGGWLNSEIIEDFVQYAFTCFKEFGDRVKHWITFNEPYNFAIDGYDLGIQAPGRCSILSHVFCREGKSSTEPYIVAHNILLAHAGAFRAYEQHFKNEQGGLIGIALNSRWYEPFSNADEDTEAAARAMDFELGWFLDPLMFGHYPPSMQKLAETIDCGSGNL

SEQ ID NO: 46612 - protein, 609 aa, Oryza sativa
MPAAMAGGTGGAGGGGGRALDCRSFWKAGAFESASAPSREFHDALVAGDFDRARVHPKFLHTNATSHKWAFGAIAELLDNAVDEICNGATFIKVDKSVNLKDNSTMLVFQDDGGGMDPEGVRRCMSLGFSTKKSKKTIGQYGNGFKTSTMRLGADAIVFTRANRGSNVTLSIGLLSYTFLRRTMKDDIVVPMLDFKIQDGHIVPLVYGSQGDWDSSLKIILEWSPFSSKEELLQQFKDIVSHGTKVAIYNLWMNDDGLLELDFEDDDEDILLRDQDKASGGVTKAQKEIVQQHISHRLRFSLRAYTSILYLKKFENFQIILRGKPVEQIRIADELKFKKLVTYKPQVAHDSQVVSVKVDVGFAKEAPVLGIFGMNVYHKNRLIMPFWKVLQEGSSRGRSVVGVLEANFIEPAHDKQDFERTPLFIRLEAKLRQIILDYWKEKCHLIGYQPVDPQLRSQYKAALKDSGNPGPKSQQKASTSRRTGGHTSNLLPETYDDTEVIGLTANGSGSRVRSFGQAQENSMEPVGLDENSVDIGSEGALDPYIMEKLSEENIGLFTRREELRQRDTQLRQTVGELEQQIAETKKKCAQLADDLRIRKSQQQQQPPYI

SEQ ID NO: 46613 - protein, 312 aa, Oryza sativa
MARCFVLNTGAKIPSVGLGTWQAEPGVVGNAVYAAVKAGYRHIDCAQAYFNEKEIGVALKKVFDEGIVKREDIFITSKLWCTNHAPEDVPVALDSTLQDLQTDYVDLYLIHWPVRMKKGAGFGGQNVLLTDIPATWAAMEKLHDSGKARAIGVSNFSSKKLEDLLAVARVPPAVDQVECHPVWQQTKLRKFCTSKGIHLSAYSPLGSPGTASVKAVGNVLAHPVVVSTAEKLGKTPAQVALRWGIQMGHSVLPKSTHEERIKENIDVYDWSIPEDMFIKLSEIEQMKLIRGEFWTHPEGVYKSIEELWDGEI

SEQ ID NO: 46614 - protein, 893 aa, Oryza sativa
MRSLRRVLLQLVLLAGVAFRGVRFDDAADAAAAAQGSSDLFELPSPSPTLALPGGGDEGASTEIIAAPWPGRHGLFTPPRSTSQPARAVVQPAADFGSQLQFYDNGTIQLVDLLSKLPRWQFSTGPPLSKHITTSKPDLNYVIYLDGSETSDLIEVHNGSGVRLPWKLEEFIAETPYIRDSFVTIGSKVSTTFVVNADSGEIIYKHSLPVALNEVGGPLVEEIPSKLDAARSGTSANIIVVVRTDYSISASDLGEHLFNWTRTSFTANYYARYGHQDMLAQSSCLRGNIPCIRTEGPPIKLYLPDSSSDNAIVLRPVNEVSAVDALEPLLPPKKLPQPAGESNVALDSAQNQTADIALGHFVPADTELTNSVTKFSYRWLFPTFLMLLIMACLVKLADASKYCRQFVIRFLKPFMRDEKLMDPRGKSEGTSKRRKARKKDGLINSTQIFSASDKEGNGTGGSTEAQSNKAHDSTNVELPNGLNGRQIGKLCVYSKEIGKGSNGTVVFEGSYGGREVAVKRLLRSHNDIASKEIENLIASDQDPNIVRMYGFEQDNDFVYISLERCRCSLADLIQLHSVPPFSNTKGTDIELWRQDGLPSAQLLKLMRDVVAGIVHLHSLGIIHRDLKPQNVLISKEGPLRAKLSDMGISKRLQEDMTSVSHHGTGFGSSGWQAPEQLRHGRQTRAIDLFSLGCLIFYCITKGKHPFGEYYERDMKIINNQFDLFIVDHIPEAVHLISQLLDPDPEKRPTAVYVMHHPFFWSPELCLSFLRDTSDRIEKTSETDLIDALEGINVEAFGKNWGEKLDAALLADMGRYRKYSFESTRDLLRLIRNKSGHYREFSDDLKELLGSLPEGFVQYFSSRFPKLLIKVYEVMSEHCKDEEAFSKYFLGSSA

SEQ ID NO: 46615 - protein, 744 aa, Oryza sativa
MSISPSESTRGSQPLAPRHSNPSPGPRHGNSSAPPRRRGRRSPTAPVSPPSAAGGSGGPSSVSVVPAIREYVDTSQKVVGFRISREENDDSYTQEVGNFSECHSSEHGNSGFSANNGTSGQATPQRPELMESLKIDLSTTNSSGNGTQVTARKNQSVNANYLLNFHYDPISRPQPRGPRTYPTRRQRKIRPYNKDLFLQANFKFVVLDTGSYEIELMDPDKMLQWEDIVCVRYYSPCEVQCPICLESPLCPQITSCGHIYCFPCILRYLLMGKEDYKGESWKKCPLCFMMISTKELYTIYITQVQHFHVGDNVTFTLLSRSKNSLTPSIKNLTDESTIDEDPCSAFSKFILTSDVELSVREAKTDLVNWLHMADLGLVGDLEKLPYVSTALEQLEERMKYWSEYRNFSVSPPLKDSFSPVTSSKSRNPNNAQSSRQNSEHKLSPLSDEDMIAGVSELCISPESNKIFNKGMPSKTEERCMAPIDSNENDTYNFYQVSDGQHLILHPLNMKCLINHYGSSDMLPPRIHGKILELETVTQSEATRKRYRYLSHFSLTTTFQFCEIDLGDMLPPSSLAPFMDEIKKREKQRKRTAKKEESDRVKAEVAAAAQASAMLFEHTSFSPSSGPHGDFMFSLDDFEALGNNAGPSTSPPASERKLFSDVARLGFASAQDSPPLRVESGDLTGKSESTGEQGPAATPALSFASIISSTRASDNSLDTHKPNVVGKKGKKPTKVLLSTGGGRRY

SEQ ID NO: 46616 - protein, 169 aa, Oryza sativa
MAPAASASASAVVTPSSFRCVPTASCGLGARGKAPAPRRLLHDHAQGKKRAAATWSLKAGLWDSLRSGFLKSNNSTETVEPPSAPIEEEEPLPEELVLLERTLADGSTEQIIFSSAGDVNVYDLQALCDKVGWPRRPLTKIAASLRNSYLVATLHSVTMPSKAEIHFSR

SEQ ID NO: 46617 - protein, 512 aa, Oryza sativa
MATAAACISFASPSPARVVIRRQTRASASASATDRQEVVSPKRRLPLRKVPGDYGPPVVGAIRDRYEYFYGPGGRDGFFAARVRAHRSTVVRLNMPPGPFVARDPRVVALLDAASFPVLFDTSLVDKTDLFTGTFMPSTDLTGGYRVLSYLDPSEPNHAPLKTLLFYLLSHRRQQVIPKFREVYGDLFGLMENDLARVGKADFGVHNDAAAFGFLCQGLLGRDPAKSALGRDGPKLITKWVLFQLSPLLSLGLPTLVEDTLLHSLRLPPALVKKDYDRLADFFRDAAKAVVDEGERLGIAREEAVHNILFALCFNSFGGMKILFPTLVKWLGRAGARVHGRLATEVRGAVRDNGGEVTMKALAEMPLVKSAVYEALRIEPPVAMQYGRAKRDMVVESHDYGYEVREGEMLFGYQPMATKDPRVFARPEEYVPDRFLGEDGARLLRHVVWSNGPETAAPTLHDKQCAGKDFVVLVARLLLVELFLRYDSFDVEVGTSTLGSSVTVTSLKKATF

SEQ ID NO: 46618 - protein, 165 aa, Oryza sativa
MATMSLAAASPLASTPRGLAVSTPRTAFLGLLTGGASLAPFPGLAAAAAPPRLPAGRGDAAVARMAKREQELEEIRAMPTEKIEEEVVDLKGELFMLRLKRSARQEFKSSEFGRMRKRIARMLTVKREREIEQGINKRLSRKLDRKWKQSIVVRPPPSLRENKEE

SEQ ID NO: 46619 - protein, 886 aa, Oryza sativa; identical to SEQ ID NO: 43638

SEQ ID NO: 46620 - protein, 666 aa, Oryza sativa
MSGSEHPMVAAARAALAHLQLPLPPAPAGSNMDHHLLPHFLHRSPPSPCFLLLRTQHKPKPPQPQLHLLLCTAFDSLAHSLQEVLDKHKPKLHLDTLFLHGNLPFAKVGVPPPPPPPAPLLSPPSVSAHHQHQPATPTETETEDTAANDSPPPRTLPVRLLNIPVDRLRSTLSTLSLTELIDLVPHLVARSLPSPDTHPDKKKLFSVHHFFRYAEFEGKRFFEELDRDGDGQVTLEDLEIAMRKRRLPRRYARDFLRRTRSNLFSKSIGWKQFLSLMEQKEPTILRAYTTLCLSKSGTLHKNQILTSLKGAGLPANEDNAAAMLRYLNADSEESISYSHFRNFMLLLPSERLEDDPRNIWFEAATLVAVPPPVEISTGSVLKSALAGGLASALSTSVMHPIDSMKTRVQASSLSFPDLISTLPQIGLRGLYRGSIPAILGQFSSHGLRTGIFEASKLVLKSVAPTLSDIQVQSLSSFCSTILGTAVRIPCEVLKQRLQAGIFNNVGEAIVGTMQKDGPKGFFRGTGATLCREVPFYVAGMCLYAEAKKAAQHVLNRDLEPWETIAVGALSGGLAAVVTTPFDVMKTRMMTAPPGTPVSMQLIVFSILRNEGPLGLFKGAIPRFFWIAPLGAMNFAGYELAKKAMIQTESDSADSVHEKRTTVGSRG

SEQ ID NO: 46621 - protein, 318 aa, Oryza sativa; identical to SEQ ID NO: 37275

SEQ ID NO: 46622 - protein, 83 aa, Oryza sativa
MVWFRAFSLANPRDQIRLAITLALYDNYLKLPSNWKRADANSDILNYNGPKNVCSEGGRQLQEEGNGDEWQLYLNQKSLAVLS

SEQ ID NO: 46623 - protein, 103 aa, Oryza sativa; identical to SEQ ID NO: 30329

SEQ ID NO: 46624 - protein, 108 aa, Oryza sativa; identical to SEQ ID NO: 30022

SEQ ID NO: 46625 - protein, 211 aa, Oryza sativa; identical to SEQ ID NO: 29259

SEQ ID NO: 46626 - protein, 618 aa, Oryza sativa
MHTKRPLPAQAPPAGLVLVPAPKRPHVDAAAGGGGGVASPRGKRQLRSGMLVLFFVAQVKEEMRYNQRLRRVIRGENAISQQRAIETFDCVFQKAFDNAFQKHLDPIYRSLQSLNKRTDILSHEVEQIKHSNSNHHANQQYRSKANQESAAITEEVNQEQTAARFVASEAQEGQRVELRFLNKLNPLVFTKEKITAEDGTAIKIAIVRDNQIITSGPLSSARIEILALHGNFYDVVPDNWTESEFDHRIVSSSQGPALGGVCQVKLKNGEASPSDVFFNIPSSKTESGRLILAAKVHTSDIGGLRIKEAVMMNPVVVQVYRNKLNRSSDRPKLKDEVHRLKGISGKGCRTKWLKDNQINTVEEFVKALNKDEEKIRNECFKLKKDNKLWKDTIKHAKECDLEGNCKLKLYRAEEQHVVLFFNCVHDLVGAKFRDHYVAKDNFSSDQQDAVNRLKKQAYDELDSIGFDHEMKNNYPVMTLSDDAYIPFIDTAQNPPDLHVTFQVQGIAGAEIYHAHELPQAFPNNNNDFGQHFLHGFQGDLTQMDHDYAQFGIADMQCYTTQAPEGTSYGGNNMIGPANVPQNVIGDGSMDMFDCYAYIFPDNENQNERPHSSAYPGPV

SEQ ID NO: 46627 - protein, 674 aa, Oryza sativa
MCFNDNDQKLWDEDPHEYVRKGYDIIEDLYSPRTAAMDFVSELVRKRGKSNLQKFIHFIVDIFRRYDEASIEIKPYRQKDGALLAIGTCDKLKQTDPYKAELERMLVQHVFPEFNSHVGHLRAKAAWVAGQYAHISFSDQDNFRKAMHCIVSGMRDPDLPVRVDSVFALRSFVEACKDLNEIRPILPQLLDEFFKLMNEVENEDLVFTLETIVDKFGEEMAPYALGLCQNLAAAFWRCMASQEADDEADDSGALAAVGCLRAISTILESVSSLPHLFIQIEPTLLPIMRRMLTSDGQDVYEEVLEIVSYMTFFSPSISLDMWSLWPLMMEALNDWAIDFFENILVPLDNYVSRGSDHFLACKNPDYQQSLWSALSSIMMDQNMEDSDIEPAPKLIEVVFQNCKGNVDQWVEPYLSLTIDRLRRAHKPYLKCLLVQVIANAFYYNPSLTLATLHKLGAVTEIFNIWFGMLEQVKKSGVRANFKREHDKKVCCLGLTSLISLPADHIPGEALNRIFKATLDLLVAYKEQVAESKKQDDADGDDMDGFDADEDEDDDEVVSDKEMGLDEEDADEVNSLHLQKLAAEARGFQPADEYDDSDDDFSDDEELQSPIDEVDPFILFVETVQGLQASDPIRFQSLMQTLDFRYQALASGIAQHAEERRVEIEKEKLEKANAQ

SEQ ID NO: 46628 - protein, 197 aa, Oryza sativa
MPRLLPGTGRASSLSSSLLLLLLLGAAMAAAPEAAAVMPMEAYFSPAELVRIAGYGEELVSTVIVSGKVVCKLSLRPPGSDLLSIELPGATVGVACETGGIKTMANSVFTVTDENGNFTIELPSRLHATPNLEKACSVKVLQLPLDCACWPRRSPSYYHGIQLSSSEDGIRSYTTGVIRLQHHDTKSDMSMHHVGTE

SEQ ID NO: 46629 - protein, 131 aa, Oryza sativa
MGADLASKSTTRTLVSLGVHHGGGAALRGGAVGVVGARPSHQRAEHTGGGGERGHRGCCGGSAPNPSSFAARRLRRRLPHPLPQHRIRRHRDLNSTVKHLGHLMHGRSHGWVLLDAPKCYCQKPLYPLNVK

SEQ ID NO: 46630 - protein, 71 aa, Oryza sativa
MSMLWGTNLSQIYSMCSYVHRYLFMELSFKECHRQNLTWCQLLENLHVVVSLHGGHFCKLLWKDIIVRGHL

SEQ ID NO: 46631 - protein, 223 aa, Oryza sativa
MGDGAEAAGATAASRFGTICVFCGSNAGRRRVFGDAALDLGHELVRRGVDLVYGGGSIGLMGLIARTVLDGGRRVVGVIPRALMAVEISGESVGEVIVVQDMHERKAEMARRSKAFIALPGGYGTMEELLEMITWCQLGIHDKPVGLLNVDGYYDPLLALFDKGEAEGFINSDCRQIFVSAPTASELLTKMEQYTRLHQEVAPATSWEISELGYGRTPGADQS

SEQ ID NO: 46632 - protein, 158 aa, Oryza sativa; identical to SEQ ID NO: 32720

SEQ ID NO: 46633 - protein, 172 aa, Oryza sativa
MAFAVSTACRPSLLLPPRQRSSPPRPRPLLCTPSTAAFRRGPQRDNNANAGARSTAVDDGEEQDRLRQGEQGQRGAQLHAEGPGREGGVAVQVQGEAGGGVLLPRRRDPRMHQAGLRLPRLLREVQEGRRRGHRHQRRRRRLPQGVQEEVQAAVHAAERRGEQGEEGVGCAG

SEQ ID NO: 46634 - protein, 300 aa, Oryza sativa
MSLSHHLPPPPGDPYYVYAPHPYPDPQRQGVLTLFVAGLPDDVKPREIHNLFSSRPGFDHCLLEYTGRGNQVVAFVSFVNHQAALSAMSALNGTVFDPDTGDRLHIELAKSSSRKRHGDGGVYRVVDKRLKRKERAADHENAGDGGNDDDAWGEDDNGGNDGDGGSDEPLDTENDDSDEKNELPAERSSGQPGLKQHRGQSLSDDQPDKLSSDIPPCSTLFVANLGHSCTEEELKEVLSKQPGFHLLKMRRRGGMPVAFADFTDIESSTAAMDALQGTVLASSDADGLQIEYARSKMRKS

SEQ ID NO: 46635 - protein, 290 aa, Oryza sativa
MGNASGKEGEENGHVAAGAAAGVAGSAGAAARAPPPLMPPDAVMRELPPPVPYVFTPQVPVAPLHIPTEFSPVFNNSWINESDESTNNHPQEKGIPTLISWSQGGNEVFVEGSWDNWTSRRVLEKSGKDHTILLVLPSGVYHYRIIVDGEPKYVPELPHVADEGGQVANLLDVHDYIPESLGSVAGFDSPPSPEHSYDLQLPGDEEFAKEPPILPPQLVMSVLGDTDNSEEQTLKPKHVVLNHLYIEKGWGSQSLLALGVTHRFQSKYVSFVLYKPLRRSSTAKRTKNGG

SEQ ID NO: 46636 - protein, 367 aa, Oryza sativa
MELITNVSEYEQLAKQKLPKMIYDYYASGAEDQWTLKENREAFSRILFRPRILIDVSRINMATNVLGFNISMPIMIAPSAMQKMAHPEGELATARAASAAGTIMTLSSWSTSSVEEVNSAAPGIRFFQLYVYKDRNIVRQLVRRAELAGFKAIALTVDTPRLGRREADIKNRFNLPPHLVLKNFEALDLGKMDKTNDSGLASYVASQVDRSLSWTDVKWLQTITSLPILVKGVMTAEDTRLAVESGAAGIIVSNHGARQLDYVPATISCLEEVVREAKGRLPVFLDGGVRRGTDVFKALALGASGVFIGRPVLFSLAVDGEAGVRKVLQMLRDELELTMALSGCTSLAEITRNHVITDSDRIRRSRL

SEQ ID NO: 46637 - protein, 270 aa, Oryza sativa
MICLRAAFPLTSSFSSSPLRRLALKPSSSRAAAAAAMSSAPATAIAAPVEHIVLIKVRPEAAASGAAAAMVSSLQALSSVVPGLSYIHVGPVLRLRSPAAEALGPTHVLHSRYATKPDLAAYAAHPAHVAAVQGHVLPNALDTTAIDWVNAALAPSPVTPGSAVRLTLAKVKEGVEVPQLVEKGAAATAAAGEAKGARVSFGENFSPARAKGYQFGMVAVFDSVEELDAVEGDGKVQEAKAAVRPLLDEVLVLDFVVGPAAVEAPAPANL

SEQ ID NO: 46638 - protein, 276 aa, Oryza sativa
MESQVLVALALSLVGGLSTSIGALFVILNPTPNLKMLGLLQGFAAGLMLSISFLDLAHNALNSIGFLKGNLWFFAGVLFFGLVVKFIPEPTVVPTADAGKKQTDDDGSGKDMMKKHRRQVLFSGIITAVGISLHNFPEGMEVFLGSMKGLRVGLNLAIAIALHNIPEGVAVALPLYFATNSKWQAFKVATLSGFAEPLGMIIVAYLFPSSLNPEVLEGLLGSVGGVMAFLTLHEMLPLAFDYAGQKQAVKAVFVGMAFMSASLYFLEISLPKEVSL

SEQ ID NO: 46639 - protein, 390 aa, Oryza sativa
MEEGAKIGREHEQQQQQHGRVNGSGRVAAVGGGSGGGGDEIEIEVAAAAGASPSRQHGGLHGDVQAPTWKRFLAHVGPGFVISIAYLDPSNLQTDLVAGSSHRYSLLWVLLFGFIFVLTVQSLAANLGIITGRHLAELCMGEYPKYVKYCLWLLAELGVIAATIPGVLGTALAYNMLLHIPFWAGVLACGACTFLILGLQGYGARKMEFTISVLMLVMATCFFMELGKVNPPAGGVIEGLFIPRPKGDYSTSDAVAMFGSLVVPHNLFLHSSLVLTRKMPYTSKGRKDASTFFLLENALALFIALLVNVAIVSISGTICANNLSFADTSTCSSLTLNSTYVLLKNILGKSSSTVYGVALLVSGQSCMVATSYAGQYIMQVHLPNYWSRLD

SEQ ID NO: 46640 - protein, 326 aa, Oryza sativa; identical to SEQ ID NO: 32608

SEQ ID NO: 46641 - protein, 195 aa, Oryza sativa
MPMGPFRLADLVGFGVAAATGMQYLENFPERVYKSMLIPLMMEDKRTGEASRKGFYKYEDKRKATPDPEIMKYIEKSRSMAGVTPDTELMKLSEKDIVEMVFFPVINEACRVLDEGIAVKASDLDIASIFGMGFPPYRGGIMFWADSIGAKYIHDKLEVWAKRYSDIFKPCSYLAERAANGVPLSAPAKQVKARL

SEQ ID NO: 46642 - protein, 198 aa, Oryza sativa; identical to SEQ ID NO: 45363

SEQ ID NO: 46643 - protein, 94 aa, Oryza sativa
MLLRRGAASSSSSMAFPAPSFYPSSNSASLKCTVVAALDGGAQRRFQHSLEVGDLAAASEPLAQGFGSGGCCWRSQRFEVAAAPPTVFWRSSTW

SEQ ID NO: 46644 - protein, 806 aa, Oryza sativa
MCILCAVQRWSRRVATMLPWLVLPLILLWALSQLLPAAYRFEVTSPRLACVSVLILTLFWYEILLPRLSLWRARRSARLREERRAHALQLHKLRKTATRRCRNCNNPYRDQNPGGDKFMCSYCGHVSKRPVLDLGPAGTLPTGWPCTQDWPNAAGDPAYWLDLRCSSDNLYSGFSWRLFSSFCVSMRWFWREVLRFGSSGDGDGLGRDGKRLAKEGENGAKAEESRVEKAKRKAEEKRLARLEKEMLEEEERKQREEMAKLVEERRRLRDEKAEAEERSKGATPVGEKDPRKEVERRRQERRRKDEKDKGSSKSNSDCEDIERRVTREGERKRDSDRRNEPEKRDATRVGAEGHKPYNFDANNQGSKTVQSKAKYFGRMTGGLLSSSRGFGGGSFFGRSAQTSAPQVNKVTKPLVTVTDQSNVVKRGAQPPATAKSATAGGTTNSWTNVHRSVSPNVQSQPTGLKKSWHQLFSRSASVSPCPDVPATAREMNGQPEPYGAQISNAQIFLSQYPPLDSNPSSSRCMQFPGFPPVNGAPANMSLSHFPAGHMPYYCEPEPTVFEEPEQFEDPCYDPDAIALLGPVSESLDNFPLDLDSGFISSDITKETHAKPSPIESPLSRSRTFEDNPIRHSTGKGPNGSILPEASNEHGGTWQMWGTPLVQESLGLRGPQTEWLLPNTNQFNHGASHLNGGTRSSVGSGLDDNDLWLQKAPFQQMPLDTRSLFLSHDVSENAIHNDLDFGSPNKSARLHPIGPPGHSWSKEAVVLNGPQEASKICSPTGAHVGGGFFSTNPDVQSVWSFNQKETT

SEQ ID NO: 46645 - protein, 615 aa, Oryza sativa
MVAAGAAAAAAAAPRVNPSPSPHRRRASSALSPSKSANSNANANADAARGGGGGGGKPKGKAVPSRYLLAPSSKSTSTSSSSTTTTNSSATSNSTSTSASTPSRRFASPLPRRSSSVDRPRPTSNAAAAGGDALGPNGTTTTTTRSLSVAFQGRAYFLETSKAKPATSPSPVRRPVAAASTTPERRRPSMGTVPERGKVFEGGHSQQRWPMSARAAHGFEGNPLTKSLDCSLDKRGAAVLAAVRSLRQSMVFEEGVRRASFDSGDYLMSSDTESVSSGSNSGSQDAGMGRARSSPKGMSVPARFLQDAAASRPNRLADPSTPFMTHSSGFASSPRTAPVKKSLLNGFVSSPLNRPIRQPSPSKLVGSRRMSSQSQPRGSVGVSASYGDQHGRSSSGYGLDSQVKRRWLGCSKVDCEHLLRILCNRHLQWRCVNAQADAALAAQKMTAEKYLSDAWITTLGMRKSVALKRFQLQLFRNNWKLMTVLKGQMDFLEEWSFLERDHANSLSGIVEALTATILCLPVTDGAKADIQDVKNAVGSAVDIMQTIGSSICTLLAKLSGTSILVSDLAKIATQERTLMDQSRELLSTLASMHVKYCSLQGQRVQTTTHRRRVRS

SEQ ID NO: 46646 - protein, 707 aa, Oryza sativa
MASSAGGDPPPPGLFAAALHACSGASALEEHIHADDSNTISDNTLEQLGFLDQESNDASVNTEKIQSSTPKCKSVEDIPIAPAAKRCKNMDSKKLVPNSNNNSCLTGSQAPRKLPRKGDYPVQLRRNETFQDTKPPSTWICKNAACKAVLTADNTFCKRCSCCICHLFDDNKDPSLWLVCSSETGDRDCCESSCHIECALQHQKVGCVDLGQSIQLDGNYCCAACGKVIGILGFWKRQLMVAKDARRVDILCSRIYLSHRLLDGTTRFKEFHKIVEDAKAKLETEVGPLDGTSSKMARGIVGRLPVAADVQKLCSLAIDMADAWLKSNCKAETKQIDTLPAACRFRFEDITTSSLVVVLKEAASSQYHAIKGYKLWYWNSREQPSTRVPAIFPKDQRRILVSNLQPCTEYAFRIISFTEYGDLGHSECKCFTKSVEIIHKNMEHGAEGCSSTAKRDSKSRNGWSSGFQVHQLGKVLRKAWAEENGCPSEACKDEIEDSCCQSDSALHDKDQAAHVVSHELDLNESSVPDLNAEVVMPTESFRNENICSPGKNGLRKSNGSSDSDICAEGLVGEAPAMESRSQSRKQTSDLEQETYLEQETGADDSTLLISPPKHFSRRLGQLDDNYEYCVKVIRWLECSGHIEKDFRMKFLTWFSLRSTEQERRVVITFIRTLADDPSSLAGQLLDSFEEIVSSKKPRTGFCSKLWH

SEQ ID NO: 46647 - protein, 213 aa, Oryza sativa
MDEDVKMATLVDPINAYSFLYPVELPGKKFTFKWVESRKPERYSSAAPLSPDARQRIVSERVDMIHNVVISVSIGPPNSRFPPSKDKSKWDPEDVADWILAEKSSLKVTTGQRMTESSVLDAHSSDVDGEPYWYYEYLVRKSPTQSAPEPNLFRHNVACTAERDGYLYSLNASTLSKQWESMGPSLQKTVASFHLLPPTENYVPPYQDPWRFW

SEQ ID NO: 46648 - protein, 220 aa, Oryza sativa
MLLNICFLILLREELKFIILQKFFFEIFIFTISVFQEWYSASKVIAEKMALEYAEKKGLNVVTVCPCLVFGPQLQPTVNTSNELLIYITKGGPNVMRNMLLHIVDVRDVAEALILVYEKPESSGRYLCAPYHISPKATVEFLKNIYPNYNYVKCSAEVNGKTEIFTPISSEKLKSLGWKPRKLEETLTDSIEYYEKTGILQDAGGRPCVLPYLFHFLVEN

SEQ ID NO: 46649 - protein, 182 aa, Oryza sativa; identical to SEQ ID NO: 34346

SEQ ID NO: 46650 - protein, 727 aa, Oryza sativa
MFGDSDGSKDANPGAPPSTTDPPFPNRELTLSSYLCEKPTLASAAAGGGGGAGPSSPPNPAAAAAGDDGKHCVERDFLHLSAPKRGDPPGDDSSVVGGKKPRLDSLQLSLSLNSDGPAAPPSSQPPLASLLQPVPATDGDLRGAAAAAAVPAAPAMRTYSATTARTRSINSDDMSYSYSIFSHNPSCSLTHNSTDIYAAGEGTNGSVHSRFNFRPMGDGSVAFATPPLKEGTSSFFPTELPARMAAAAAAAAASAGGSFDGGRGGLHASRPDKILRDIVSDSVTAMAQVLQDFPSERLELLREAVRGMIDSHEKRDELASLQRKLERRSDLTTETLGRANRTQLEILVAIKTGIATFVTGKGRVPSSELVEMFLMTRCRNLNCESTLPVDDCDCKICSTKKGFCSACTCSVCHKFDCAANTCTWVGCDVCGHWCHVACALERNLIRPGPTLKGPIGTTEMQFQCLACNHSSEMFGFVKEVFNCCAENWNAETLMKELDFVRKIFAGCEDFEGKGLHAKAEEVLSLLGKKIISPLDATNSILQFFKYGVTDYSVTGSTSKGILAAQASQSTDMRSLQTPTITPPKSSFNFKTTTSILDTDALKPSPKPLSIEPHFSTASKEDDSSLETIVKCKEAEAKLFQKLADDARKEVDSYRQIVRSRTQKLEEEYAAKLAKVCFQETEEKRRKKLEELKMLENSHYDYLKMKMRMQTDIQGLLERMEATKKMWV

SEQ ID NO: 46651 - protein, 316 aa, Oryza sativa
MTALASPFLLPHRRRKRPLDDSHFHGPQRHRRRRLCLCPAAFPSPPIPPEAASSPAFDMGGFLSFLRGKPRHDDAGLGVYRGWVDVRSRDLSVATAMEDDDAGFGPRLVVRRRVGDPRKAALEAAAPRPRVKREPYYKEALERMRSHDKRLGELASLVNLEEEKLAELRKAAEPPKEDLSELFTPLTAEEENEVHNCLFGRGSSTEILALHEPSNIEVSREKFRCLRLTAWLNDEVINLYLELLKEREAREPKRFLKCHFFNTFFYKKDDVWRNATQVLASQNTITSSLWGAVLCWPVWLGMGNSRKFFICLHPLI

SEQ ID NO: 46652 - protein, 350 aa, Oryza sativa
MAAAAMATVAVPRVKLGSQGMEVSAQGLGCMGMCPAFEPPKPEADMVALIRHAIAAGVTFFDTSDLYGPHTNEVLLGKALQGGGVRDRVELATKFGKFFAGGKPGIRGDPAYVRAACEGSLRRLGVDCIDLYYQHRVDKKVPIEVTIGELKKLVEEGKIRYIGLCEASASTIRRAHAVHPITAVQLEWSLWSRDVEEDIVPTCRELGIGIVAYSPLGKGFFSSGAKLVDSLPDHDFRKLIPRFQPGNIEKNAEIFERVNEMAARKGCTPSQLALAWIHHQGRDVCPIPGTTKIGNFNQNVAALSVKLTPAEMAELESYASNVHGDRYPLMMANTTWQDSETPPLSSWKSE

SEQ ID NO: 46653 - protein, 384 aa, Oryza sativa
MAMSCSSSSSSVRLRLNLAPSRRRIAAPANLQVLRRVGVAAASIRLRAARATGGDARQPFDHVPRGVEEVGEMEEDEERRRRRGLKIAVVGFGNYGQFLTRTLVRQGHTVLAHSRSDYSAVAAELGATYFTDAHDLVECHPDVVLLVTSILSAEAVLRSLPVHRLRRDTLFADVLSVKEFPRNLLLGTLPEEFDIICTHPMFGPESAGDGWGGLPFVFDKVRVGDCPARRARAEAFLDIFAREGCRMVEMSCAEHDAHAAETQFLTHTVGRTLAMLELQTTPINTKGYETLLRLVDNTCSDSFDLYNGLFMYNNNSTELLNRLEWAMDSVKKRLFDGLHDVLRRQLFEGSPPLDSVSAAAAGSPPDDAPIDGDLGSDNEEEQSE

SEQ ID NO: 46654 - protein, 434 aa, Oryza sativa
MDPQGGGGSRLSAAGRGGNKRGGKQLGLKRSSAPAPSPATAQPPLPASSPPEAPSPATVQPPTPSSSPAVAAPSSSPAVPMSTMPPWPPQGAGWGSVPPNFAFLQGNQQGPSSWLYPTEGFVNFLQQNCLPQPQEGENFHLVGQTTNTMSTPPPTPQAAANNTVQIDIHEDAINDASAKKRSLRYWTHDEEERLASAWLNASKDPIHGNEKKGDTFWKEVTDEFNRKGNGKRTREINQLKVHWSRLKSSIGEFNDYWTKVTQMNTSGYDDDMLEKEAQQMYANTFGKPFALVHWWKILRKEPKWCAMIEKDKNKAEVVDIPDEQKRPIGREAAQAERNGKRKKDSMSEGIVILGDNIEKIIKVTQDRKLEREKVTEAQIHISNVNLKAAEQQKEAKMFEVYNSLLTQDTSNMSEEQKARRDKALQKLEEKLFAD

SEQ ID NO: 46655 - protein, 340 aa, Oryza sativa
MGGAAVSSLLATPTPTSRPRPVSTTTAPFSVNLSTAAARAPRLLLLSRRPRPRPAAAVLGVSDDTGVKMAGSDIVGKNDLLIVGPGVLGRLVAEKWQEEHPGCKVFGQTASTDHHNELSNIGIIPSLKGSTFPQKVPYVIFCAPPSRSDDYPGDVRVAASNWTGEGSFVFTSSTALYDCSDNELCNEDCPSVPIGRSPRTDVLLKAENVVLEAGGCVLRLAGLYKIDRGAHFFWLRKGTLDTRPDHIINQIHYEDAASLAIAIMKKGHRGRIFLGCDNKPLSRQEIMDSVNRSGKFDTKFQGFTGTDGPLGKKMENSRTRSEIGWEPKYPSFTEFLGLDS

SEQ ID NO: 46656 - protein, 210 aa, Oryza sativa
MFKLGSSAIYVCVVAPQQAHVPAVPLRCQAARHATGVVHGRRPAQERRQWRCRRREGGEVGLPLRSPSAKPFWPKLRVIAAGFDFGIRRHRRSLSKIEVSLIFSMPNSLLPLSSPSHPAVGAHRHGTRMLPTCSAAIVSARCAAAERPRPSREHLQLQVDALMLLGSRAQSEARRSAATSHAPAACTTEKEKKRKEKNERRKRKGWKREF

SEQ ID NO: 46657 - protein, 105 aa, Oryza sativa
MISMDMKGQKLTVVGDVDPVDVVGKLRKGWPSASLLSVGPAKEEKKEEKKPEEKKDDKKPEQPKLVFYPPPPAWHAHAAPPSYSYAPPQYVVHSAEEDPNSCVIC

SEQ ID NO: 46658 - protein, 509 aa, Oryza sativa; identical to SEQ ID NO: 31973

SEQ ID NO: 46659 - protein, 106 aa, Oryza sativa
MKLMLLFAATVVAAALVLVAAVDVGSSGALLPMHVLRGRVADVEDVVASVVEEEEAAYPRRRILYDSRYASYNGLTESKAACYGSCPGRGQPYSGRSCLNIYQCKG

SEQ ID NO: 46660 - protein, 357 aa, Oryza sativa
MNYRVVNPVKVESGPSTGVANGQPPRPMDGLADGGPPPFLTKTYDMVDDPTTDAVVSWSATNNSFVVWDPHLFGNVLLPRYFKHNNFSSFVRQLNTYGFRKVDPDKWEFANEGFLRGQKHLLKGIKRRKPPNSSPSQQSLGSFLEVGHFGYEGEIDQLKRDKHLLMAEVVKLRQEQQNTKSDLQAMEQKLQGTEQKQQHMMAFLSRVMHNPEFIRQLFSQSEMRKELEEFVSKKRRRRIDQGPELDSMGTGSSPEQVSQVMFEPHDPVDSLFNGVPSDLESSSVEANGGKAQQDVASSSSEHGKIKPSNGELNEDFWEDLLHEGGLDEDTRNPAIDDMNLLSQKMGYLNSSSTKSPQ

SEQ ID NO: 46661 - protein, 54 aa, Oryza sativa; identical to SEQ ID NO: 46394

SEQ ID NO: 46662 - protein, 265 aa, Oryza sativa
MSKTRMDGKVAIVTGGASGIGEAAARLFASCGATVVIADVQDELGEAVAASVAGGGCRYVRCDVTDEAQVEAAVAAAVAEHGRLDVMVSNAGVLLPTGPVVDMDLAALDRVMSVNFRGAAACVKHAARAMVSRGTRGAIVCTASVASCQGGFGPAAYTASKHAVLGLVRAAAGELGRHGVRVNCVSPGGVATPLSCGLTGMSPEEMEAAAEPHNVLRGKVLKAADVAEAMLFLASDQAAFVSGHNLVVDGATTAVNYAVLQSVGL

SEQ ID NO: 46663 - protein, 81 aa, Oryza sativa
MISNSRGFRYSVMFHSIYQLTTEDQINFLQGSGSILLLPPWNAGRICSAMRREFNLPCLNFPGYFCLLVSLSRKNSAQYLV

SEQ ID NO: 46664 - protein, 573 aa, Oryza sativa
MPPPPPPPPPPAAPDPPQLHGVVIITLPPPDQPSKGKTITAFTYTDDDVTPPPPTPPPTHLPTRALVPAGAGAGAEARRSRRGFSPRRAAAMVLVLGALAVAAYYSFYSDVAVQFLGMQEEAQNERNETKSFLLPLYPKARQGRALREFGDIKLAARRFDNDGGGGVGRKSRNKLEVKKAAAAGTNSTALLPIKGNVFPDGQYYTSIFVGNPPRPYFLDVDTGSDLTWIQCDAPCTNCAKGPHPLYKPAKEKIVPPKDLLCQELQGNQNYCETCKQCDYEIEYADRSSSMGVLARDDMHIITTNGGREKLDFVFGCAYDQQGQLLASPAKTDGILGLSSAGISLPSQLANQGIISNVFGHCITRDPNGGGYMFLGDDYVPRWGMTSTPIRSAPDNLFHTEAQKVYYGDQQLSMRGASGNSVQVIFDSGSSYTYLPDEIYKNLIAAIKYAYPNFVQDSSDRTLPLCLATDFPVRYLEDVKQLFKPLNLHFGKRWFVMPRTFTILPDNYLIISDKGNVCLGFLNGKDIDHGSTVIVGDNALRGKLVVYDNQQRQIGWTNSDCTKPQTQKGFPFFL

SEQ ID NO: 46665 - protein, 517 aa, Oryza sativa
MMKQIFGRRKNAKSADKDFFSGTSPSVLDQVSGLGVADRATSNLGSQPPIISSTGLSYGSGNRVENPNTRTNGNLYSSSFQPLPSFKDVPNSEKQNLLIRKLKLCCIVFDFTDPTKNIQEKEMKSQTLLEIVDYVVSATVKFPEIVMLEITRMISANLFRTLISPPREKKVLQAFDLEEDEAVMDPAWSHLQIVYELLLKFIQSPETDAKLAKRYIDHSFILRLLDIFDSEDPREREYLKMTLHRIYGKFMVYRPFIRKAINNIFYQFIYETEKHNGIAELLEILGSIINGFALPLKEEHKLFLVRTLIPLHKPKCIALYHQQLSYSITQFVEKDCKLADTVIRGLIKYWPITNSTKEVMFLGELEEILDATQPAEFQKCMVPLFRQIACCLNSSHFQVAERALFLWNNDHIENLIRQNSKVILPIIFSALEKNVIEHWNQAVKSLSLNVQKLFSDRDPELYKECLRKYEENKAKEKDHKLKQESVWKRLEEVASAKATSGEAVLISPSLARTSSLV

SEQ ID NO: 46666 - protein, 67 aa, Oryza sativa
MGISQGFQHLRPVCLKSPRTSPITRLMQKERSLMMLLTESRRLTGLKKISLLGWIRVTQAAIWSITY

SEQ ID NO: 46667 - protein, 389 aa, Oryza sativa
MASSPEAAAVGEEEKGKGKKEEGRRGGGVLGRMWRALFGGREDYEKRLQYLSKEEAAVHARMRRRTQFSRTAVRNLIVLSVLAEVVAIVYAIMTTRNEHITWEMRAIRVLPMFVLPAVSSVIYSTVVKFTRMLERKDQKTLEKLRAERKAKIDELKERTNYYLTQQLIQKYDLDPAAKAAAASVLASKLGEETGLKVHVGEEPKLDSAVARSNDVEISPSEGLRNRKQSNARGSRTGGTTAAQNPAQGAESSLTSSSGLEQPPMVVEHFQGSGASDGGWIAKIAALLVGEDPSQSYALICGNCHMHNGLARKEDYPHITYYCPHCHALNTSKQSLGQHSGSNSGRSTPVAPADGISASSSVVESEVSNMTTIQELKNEENTEKQEVQAS

SEQ ID NO: 46668 - protein, 397 aa, Oryza sativa
MANGGVCLSCSALVCALVFLTVDGDFVDITYVASAVAKGAVCLDGSPPAYHLARGFGSGVNSWLVHFEGGGWCSNVTTCLQRKRTRLGSSKQMAKQIAFSGILSNTPDYNPDFYNWNKVKVRYCDGSSFTGDVEKVDPATKLHYRGARVWQAVMDDLLAKGMNSANNALISGCSAGGLTSILHCDRFRDLFPVDTKVKCLSDAGFFINEKDIAGVEYIVAFFNGVATTHGSAKNLPSACTSRLSPGMCFFPQNEVKQIQTPLFILNAAYDSWQVRNILVPGFADPHGKWHSCKHDIDQCPASQLQILQGFRDDFLKALKEQGTPSTRGLFINSCFVHCQSETQETWFASGSPMLETKTIADAVGDWFYDRNPFQKIDCPYPCDSTCHNRIYDDPSEA

SEQ ID NO: 46669 - protein, 205 aa, Oryza sativa
MLPGVELARRRRVHYHGDGAAAGAGFGEHHHGHYNYFHQQHHRQAVASAEAGAGAGGEVSPAVAARIRLEEKLRGAAAAPSSSLSRWGRRFRERDGSTTSRQQNNQQEQQIQLPTEPRPTPKHSMTMLEAPSTRKAPRREMRRTLSKADLCAVCLDEVRERHQRVTRLPCSHKYHSECVLPWLAIQPDCPCCRTQVPSVDSLFVA

SEQ ID NO: 46670 - protein, 113 aa, Oryza sativa
MVGVSEFVGGLLNSAKSAVAAVASTVAAAAKPGLAAGVGFVKEQGVGKSALAVGGAAVAAYFLWPTAAVGGAIMNAPGAAGYVISRAAFLANPKLYFHLLRTVGAKAAAAAFL

SEQ ID NO: 46671 - protein, 442 aa, Oryza sativa
MDSAARASQSAAPPPPGAGVRVRAPLVESVSCYCRLDTGLKTVVDARKFVPGAKMCMQPDVKPNKCKSRGSRKERSRTQAPLLPGLPDDLAIACLIRVPRVEHPNLRIVCKRWNRLLSGNYYYSLRKRNGMAEEWVYVFKRDREGKISWHAFDPLHQLWKSLPPVPAEYSEALGFGCAVLSGCYLYLFGGKDPLRGSMRRVVFYNARTNKWHRAPDMLRKRHFFGSCVINNCLYVAGGECEGIQRTLPSAEVYDPNRNRWACVAEMNNGMVPFIGVVYDGKWFLKGLDSHRQVTSEVYLPSSNLWSTIDDEMVTGWRNPSITFNGKLYSSDCRDGCKLRVYDPNTGTWAKFMDSKHHLGSSRAFEAAALVTLNGKLCIVRNNMSITLVDISDPTMSIETDSARMWETVARKGQHRSFVANLWSTIAGRNLKSHIIHCQVLQV

SEQ ID NO: 46672 - protein, 547 aa, Oryza sativa
MATRPASRQRRASSAAAAVAVVRSSPQPQQQQQQQLPIPQSGSPTSTTTTTTSSSRLTPELSLDGPASPLFAGLDEDPAPKENVTVTVRFRPLSPREIRQGEEVAWYADGDTVVRSEQNPSVAYAYDRVFAPTTTTRQVYDVAAQHVVSGAMEGVNGTIFAYGVTSSGKTHTMHGDQRSPGIIPLAVKGAFSIIQETPNREFLLRVSYLEIYNEVVNDLLNPAGQNLRIREDPQGTFVEGIKEEVVLSPAHALSLIAAGEEHRHVGSTNFNLLSSRSHTIFTLTVESSPCGESNEGEAVTFSQLNLIDLAGSESSRAETTGVRRKEGSYINKSLLTLGTVISKLTDGKATHIPFRDSKLTRLLQSSLSGQGRVSLICTVTPASSNSEETHNTLKFAHRAKRIEVQASQNKIIDEKSLIKKYQNEIRRLKEELEQLKMGIITGTPVKDAGEDNIILWKQKKMVTSSCSLGSNKRRKLKLLCLQGYSVSQSLSWSPLRRHKLLDFLHILDQEEDILLGKRSLRTYLTKDVISCWIMKAMNYFLLLKDLA

SEQ ID NO: 46673 - protein, 228 aa, Oryza sativa
MPSLVDAFVGVLNWTKDYCIWSDSGDCGHENCESCYGIKDNNCVLLEGLSEAKTLGLISERGSFILKRDLKWRPTFTKLKTLLLNEYWCVPDDFSALTCILQHAPVLENLILQICSKGPKHRMKIKGNCHSMDSSLVISAHLEIVEIKCETVDKRVLKVLKYLSTFNILFSFKEIEILEGYDNDQDEVEEDEDEDSHEDEDENEDSYGDPYEDEDDDEDGDEVEEENV

SEQ ID NO: 46674 - protein, 345 aa, Oryza sativa
MELAVRAAAAASCSSGASLQLPRARAPLRLLGHRRLPARRVAVEAAAIAVEPENKVPQSNNSEAEVFACPVCYEPLIRKGPSGINLPSIYRSGFKCSKCNKSFTSKDIFLDLTVTSGTKEYSELKPARTELFRSPLVSFLYERGWRQNFNRSGFPGLDEEFQMAQDYFQSVAGGVLLDVSCGSGLFTRKFAKSGSYSAVIALDFSENMLCQCYEFIQQDDTLVNTNLALVRADISRLPFASSSIDAIHAGAAIHCWPSPSNAVAEISRVLRPGGVFVATTFLSSPRNNPFSVEALRPLRQIVGPVNTSYNYFTEGELEDLCKSCGLVNYSSKVQRSFIMFSGQKP

SEQ ID NO: 46675 - protein, 373 aa, Oryza sativa
MPTWPVHSILHADVVFLYLSGPNTGNNTGETERYMVSINVQHREAISISKLSPDDSSPPPRYFPSSFNSYINKRSGREKGGDNVTVRTNKKAEYISGLSEDCLALAISLTTPMDACRCCAVSRAFQKAANSDSVWRHFLPKDYLSILARADDRVHFTSEKKLLVSLVKDHVLLDQHSKSLWLERTSLAKCYLLSSRSLPIAWEDHPLKWRWISLPDSRFEEVTELLKVCWLDLCGRVNCRELSPNTEYAAYLVFKLTDDSYGLDCQTQEADITMDDQVVSAKRTISFYPRPRPRPRPSTRETLSNMGRIEEAGQAEEPSYPRERGDGWLEVQLGHFYNDLEDTGVVVIRLKEHIQLNWKKGLILEGMEIRHNI

SEQ ID NO: 46676 - protein, 75 aa, Oryza sativa
MGRVLALLGSKDLLHFRRVCAAAAAAAAAAAARRESVGSEMRWRRGMGDGRLGSMLNSAVDWSREGPIRHTINRI

SEQ ID NO: 46677 - protein, 251 aa, Oryza sativa
MAEELVLDTAIRDWVLVPLSVVMVLIGVLRYFVAKLMRSPSASPSPDPKLVKEGQVVIRARNLRINSQYIPAKAFKSRKVYYTNEENGLLHVPKEEAQKAQAAMFSDPNMAMDMMKKNLSMIVPQTLTFAWVNFFFSGFVAAKIPFPLTPRFRGMLQNGIDLSTVDVSYVSSRSWYFLNLFGLRGLFSLILGEENANDDAQKMMQMGGGFGGNPTMGLAAEKDNLDIIQHDWALPKMEHHAEEVLRKLLKK

SEQ ID NO: 46678 - protein, 54 aa, Oryza sativa
MNSSGPRSTFIIARCLIRLYLATSECHSSDSLPSSSIASSERRIFASGKYLRTE

SEQ ID NO: 46679 - protein, 302 aa, Oryza sativa
MINSGSLLASTVLVWLQDNVGWGISFVIVVVVMAFFLAVFFAGSRVYRYRPVRVSRWRQCTVTQVEEVKMLVRMCPIWACLVLFFSVSSQMSSTLVEQGTAMDNRVGPFTIPPASLATFHSIGVLLWIPVYDVALVPLARRATGKPKGITQLQRIGVGLAVAALIMAYSALVEERRLAAARAGAARTSILWQVPAQLMHGMAVVFTSIGKSEFFYDQAPRSMRSMCTALGQLAIAAGNYLSAFLLAVVASATTRGGDPGWIPDDLNKGHLDYFFWLMAALLLLDLLLFVFCAMRYKGSTAAS

SEQ ID NO: 46680 - protein, 73 aa, Oryza sativa
MTYSLLFSHAQRHQITRMQEEQGNEEIVKGIMQPLQSLRDINKLKYSCFNFGERRIYRYYLSVRTKLQCANRC

SEQ ID NO: 46681 - protein, 319 aa, Oryza sativa
MAASCALTLPSAISVSVSVSSNSPRRFRRSRRVVAMASVGQKVYAPGVAVSEGNGGLPKIDLKSPHGSEAEIYLFGACVTSWKVPSGKDLLFVRPDAVFNGQKPISGGIPHCFPQFGPGTMQQHGFARNMNWSITDSEANEGDPAVTLELKDDSYSRSMWDFSFQALYKVALHSTSLSTTLKITNTDDKPFSFNSALHSYFSASISGVSVKGLKGCKTLNKDPDPKNPLEGKEEREEVTFPGFVDCIYLGAPSELTLDNGLGDKIVISNANWSDAVLWNPHLQMEACYKDFVCVENAKIETLQLGPNQSWVAEQKIELI

SEQ ID NO: 46682 - protein, 518 aa, Oryza sativa
MDASAGGGGNSLPTAGADGAKRRVCYFYDAEVGNYYYGQGHPMKPHRIRMTHALLAHYGLLDQMQVLKPHPARDRDLCRFHADDYVAFLRSVTPETQQDQIRALKRFNVGEDCPVFDGLYSFCQTYAGGSVGGAVKLNHGHDIAINWAGGLHHAKKCEASGFCYVNDIVLAILELLKYHQRVLYVDIDIHHGDGVEEAFYTTDRVMTVSFHKFGDYFPGTGDIRDIGHSKGKYYSLNVPLDDGIDDESYQSLFKPIMGKVMEVFRPGAVVLQCGADSLSGDRLGCFNLSIRGHAECVRFMRSFNVPLLLLGGGGYTIRNVARCWCYETGVALGHELTDKMPPNEYFEYFGPDYTLHVAPSNMENKNTRQQLDDIRSRLLDNLSKLRHAPSVQFQERPPEAELPEQDEDQEDPDERHHADSDVEMDDVKPLDDSGRRSSIQNVRVKRESAETDAADQDGNRVAAENTKGTEPAADGVGSSKQTVPTDASAMAIDEPGSLKVEPDNSNKLQDQPSVHQKT

SEQ ID NO: 46683 - protein, 769 aa, Oryza sativa
MVRNLRAESDRMHALACICRTALCVDLFAKESVRRGQKPVPGTDVISLFEDVRAKDDLNSITSKSLFREELVASLVESCFQLSLPLPEQNNSGTESRVIGALAYGTGYGALNWTEPALDVVEVCRPCVLWDCNGRTYAIDCYLKLLVRLCHIYDTRGGVKTIKAGASQDQILNETRLRNLQLQLIRDLREVHTPRISSRLIWAISEHFDLEGLDPLLADDPEDPLNIIISNMHKILFNTESSTTTSNRIQDMQSVLICAQRLGTRNARAGQLLSKELEEYRASTSADFVTKHQSRYVLQIIKYVTSHPDNRWVGVGDATGDYPFSHHKLTVQFSEASAAQDRKLEGLVHKAILELWRPSPTQLSLLQTKGIGTLHKELPKAYTLTGSSDPCYIEAYHLADPTDGRITLHLKILNLTEPELNRVDIRVGLSGALYYMDGFSRTVRHLRNLVSQDPVQSSVTVGVSHFERCSLWVQVLYYPFDGSVGSTDYEGDYEESSQMTRQKRAFRAELGEPVVLRCQPYKIPLAELLLPYECSPVEYFRLWPSLPAMVECTGTYTYEGSGFKATAAQQYDSSPFLSGLKSISSKPFHQVCSHFIRTVAGFQLCYAAKTWFGGFVGMMIFGASEVSRNVDLGDETTTMICKFVVRASDESITREIESDLQGWMDDITDGAVEYMPEDEVKSAAAERLKISMERIALLKAAKPKVPPAKTKEEEEEEKKQNEDLDEFGNPKGPSTLSKLTAEEAEHRALQAAVLQEWHQLCKEKAMKAQ

SEQ ID NO: 46684 - protein, 727 aa, Oryza sativa
MFGDSDGSKDANPGAPPSTTDPPFPNRELTLSSYLCEKPTLASAAAGGGGGAGPSSPPNPAAAAAGDDGKHCVERDFLHLSAPKRGDPPGDDSSVVGGKKPRLDSLQLSLSLNSDGPAAPPSSQPPLASLLQPVPATDGDLRGAAAAAAVPAAPARRTYSATTARTRSINSDDMSYSYSIFSHNPSCSLTHNSTDIYAAGEGTNGSVHSRFNFRPMGDGSVAFATPPLKEGTSSFFPTELPARMAAAAAAAAASAGGSFDGGRGGLHASRPDKILRDIVSDSVTAMAQVLQDFPSERLELLREAVRGMIDSHEKRDELASLQRKLERRSDLTTETLGRANRTQLEILVAIKTGIATFVTGKGRVPSSELVEMFLMTRCRNLNCKSTLPVDDCDCKICSTKKGFCSACTCSVCHKFDCAANTCTWVGCDVCGHWCHVACALERNLIRPGPTLKGPIGTTEMQFQCLACNHSSEMFGFVKEVFNCCAENWNAETLMKELDFVRKIFAGCEDFEGKGLHAKAEEVLSLLGKKIISPLDATNSILQFFKYGVTDYSVTGSTSKGILAAQASQSTDMRSLQTPTITPPKSSFNFKTTTSILDTDALKPSPKPLSIEPHFSTASKEDDSSLETIVKCKEAEAKLFQKLADDARKEVDSYRQIVRSRTQKLEEEYAAKLAKVCFQETEEKRRKKLEELKMLENSHYDYLKMKMRMQTDIQGLLERMEATKKMWV

SEQ ID NO: 46685 - protein, 412 aa, Oryza sativa
MAEDPAGSRRWRCDAGDEHGCWLSSSAGGGGDDHFDRLPDPLLLVIFNRIGDVKALGRCSLVSRRFHDLVPLVDSVLVRVDCVIPDDPASSSSSSSSPSAAPSSPTASARARTVFSQIARIVLGGIVKPIQALGQILSPANSASVLAASVTSSPSSSSSSSSSSPPLPGDVSHHSPSEVLRSFKELRRLRIELPAGELSMEEGVLLKWKADFGSTLGSCVILGASSAGKDGGAGAAPAVDCGESDETGSIPESFYTNGGLKLRVVWTISSLIAASARHYLLQPIIADHTTLESLDLTDADGQGVLTMDKWQLQELRVKPVSASGGSHRTLMPALSMRLWYAPHIELPGGLVLNGATLVAIKPTEEATRDTVGSGIAGSAGGCWVSDAFEEPYRTAVGMLLKRRTYSLEMNSF

SEQ ID NO: 46686 - protein, 24 aa, Oryza sativa
MRRESSSNATAVTSPARRPVKRSE

SEQ ID NO: 46687 - protein, 301 aa, Oryza sativa
MSMSLFPGMDLTKMDAPTLTLLGAACCVMLSMHFTVQLVSQHLFYWKNPKEQKAILIIVLMAPLYAINSFVGLLDIKGSKTFFTFLDAVKECYEALAIAKFMALMYSYLNISISKNIVPDEIKGRVLHHSFPVSLFLPRNVRLEHKTLKLLKYWTWQFVVVRPICAILMITLQLLGLYPSWVSWTFTIILNFSVSMALYALVIFYHLFAKELAPHKPLAKFLCIKGIVFFSFWQGFALEVLAAVGIIQSHHFWLDVEHIQEAIQNVLVIIEMVFFSVLQQYAYHVAPYSGADRAKFEKKNE

SEQ ID NO: 46688 - protein, 250 aa, Oryza sativa; identical to SEQ ID NO: 37166

SEQ ID NO: 46689 - protein, 475 aa, Oryza sativa
MAGSGRPPAAQKKILQSLRPPLPFAASSRSPFAAPNDYHRFPAGGAAAAAASGSGGIGAGGAGGGGDIEEGLVIRTPQKRKAPEESDVAESSDCMITSPGFAVSPMLTPVSGKAVKTSKSKTKNNKAGPQTPTSNVGSPLNPPTPVGTCRYDSSLGLLTKKFINLLKQAPDGILDLNNAAETLEVQKRRIYDITNVLEGIGLIEKTLKNRIRWKGLDDSGVELDNGLSALQAEVENLSLKEQALDERISDMREKLRGLTEDENNQRWLYVTEDDIKGLPCFQNETLIAIKAPHGTTLEVPDPDEAGDYLQRRYRIVLRSTMGPIDVYLVSQFDEKFEDLGGGATPSGHANVPKHQPTEVFNTTNAGVGQCSNSVAVDNNIQHSQTIPQDPSASHDFGGMTRIIPSDIDTDADYWLISEGDVSITDMWKTAPDVQWDESLDTDVFLSEDVRTPSSHNQQPSAVGGPQMQVSDMHKP

SEQ ID NO: 46690 - protein, 262 aa, Oryza sativa
MAWIWMLMAAGAVLLWAVSLGRVLSSSSPACLPANSTFLSPPRGDRMSRNVLLVLAHPDDESMFFAPTILFLKSKGHSIHILCLSQGNADGLGNIRKEELYLACVTLKIPAEQVKVLDHSELQDGFHKNWDHGLIAELTLAQSQLWNIDTIVAFDSRGVSGHPNHCDVHHGICKLLRDNGQGHIEAWELVSLNIFRKYSGPVDIWLSSTLSSSSKQPTYTLVNNSPSRSFEAMASHKSQWVWFRRLFVLFSSYTYINVLQKI

SEQ ID NO: 46691 - protein, 370 aa, Oryza sativa
MATTTTTSSSSSNSQNPNPFNLPPWLRSLRCPFTFLCPPPPPPPPPPPPPPPPPPPLEVVSPSPRWRRPGLRVTTEYDSEEAMFAHKVSCKVAGGLAKLRLSFQSDPSGQGLGEEGDPRRQLFVAPVVGLIAKNFSVLYDVEARNALLSGQGSLPGGAIQLRGSHDVKERQGEVSVITRLGDPSYKLELSSLVPYNGLPRATLHFPIGQVSVEERRNEADEKMLSLYGIAKSNFLDGILTAQYSENDINLRYCYKDNELTLIPSVSLPSNAVSLGFKRRFGPSDKLSYRYDFTTDDWNAVYKRTVGKDFKVKAGYDSEVRVGWASVWVGQEDGKAKTAPMKTKLQLMLQVPQDNFRNPTFLFRVKKRWDL

SEQ ID NO: 46692 - protein, 75 aa, Oryza sativa
MWVSWSCVCVVNCMHVINKNLSIFTMHWVQVPRYLQSEPFIECDIQLLSIFGTIRYKNPLGGTPFVEQAEVQNWV

SEQ ID NO: 46693 - protein, 162 aa, Oryza sativa
MIEFIGILNVKVKGGTNLAIRDMSSSDPYVVLTLGQQKAQTSVIKANLNPVWNEELKLSVPQQYGPLKLQVFDHDMLSKDDLMGEAEIDLQPMINAAAAFGDPGLLGDRQIGRWLKSGDNALVRDSAVVVAGGEVRQELALKLQFTESGEVELEMQWFPLNM

SEQ ID NO: 46694 - protein, 186 aa, Oryza sativa; identical to SEQ ID NO: 32468

SEQ ID NO: 46695 - protein, 177 aa, Oryza sativa
MGLTVTPALDMPSIQSIRPVASMSSQLQDLQASRSASQAMPRRPSTSWSWTWQRRHRRQGGVMEASRAVVVGPRGRRMMDELFPRALDAAAAALILEVAVGGLDGRHVLLGEKETHQRHSFHTVGSRPHCLEALRTREADDRVFSLLLMGRQLFIWVDQVEWPSSAATHGLAVGLAR

SEQ ID NO: 46696 - protein, 398 aa, Oryza sativa
MSPLGSNHLSGFSSGYPPMKSPVGKSSYWNNRADNIFHGSPTLHNSHSFPEHHGGIISASPLVSSAASSASTASGFTALTGTSFLWGNNNNLRDHGQPSSIQSQALSNSLFPNNQPQRQSNLYQNLRGSFGASEHFSQFNVGSAPSVFPFESNFGYFSDSPDTSYMRQGKFGGTGPTRVSGSLMTNFGAYPRINVASMQNGSVGFEGLLDRGRNQTVGNSGCQEDSRVQYQLDLEKIIAGKDTRTTLMIKNIPNKYTSNMLLEVIDETHEGTYDFFYLPIDFKNKCNVGYAFINMASPGYIVSFFKAFAGRKWEKFNSEKVVSLAYARIQGKAALVNHFQNSSLMNEDKRCRPMLFDPKHTENNNQILLNGIFISMAQQDATQERHDLPENPREDNFS

SEQ ID NO: 46697 - protein, 208 aa, Oryza sativa
MSSSVLLFLVALLLSCSTMGNAARRLEVEYPAAHPAMPELPKPELPPHPVVPELPKHEEPPPHPHPAVPELPKPELPPPHPAVPELPKHEEPPHPVVPELPKPEVPHPAVPELPKHEEPPHPVVPELPKHEEPPHPVVPELPKPEVPHPAVPELPKHEEPPHPVVPELPKPEVPHPVVPELPKPEVPHPTVPEHEQPPKPESHYPEKP

SEQ ID NO: 46698 - protein, 820 aa, Oryza sativa
MTLDQIEGLKNPDVQCWGTEESDDGDPPRLWVQNGMYPGTAFTRSIGDSVAESIGVVANPEIFILELNANHPFFVLASDGVFEFLSSQTVVDMIAKYKDPRDACAAIVAESYRLWLQYETRTDDITIIVVHINGLTDMECTQTVMKVSLQPSQQVVELVGSESPSTISLNPKNQRSRQDLSRARLRALESSLENGRLWVPPSPSHRKTWEEQAHIERILHDHFLFRKLTDSQCHVLLDCMQRVEVKAGDIVVQQGGEGECFYVVGSGEFEVLAIQEEDGKEVTKVLHRYTADKLSSFGELALMYNKPLQASVRAVTTGTLWALKREDFRGILMSEFSNIPSLKLLRSVELFTRLTMLQLSQLADSLVEVTFGDGQMIVDKNDDASSLYIIQRGRVKLKLAADQVNSDAWDLLSSQTEVAQSSREDGNYVFEIDEGGHFGEWALFGETIAFTAMSVGDVTCSTIAKEKFDSIIGPLPKVSQSDSKLKDSLVPKGHGADDSSFRKAQLSDLEWKMCIYAADCSEIGLVQLRGSDKIKSLKRFYIKRVKDLHKEKHVFDEKDLMKSLSQSTCVPEVLCTCADQSYLGILLNCCLCCSLASILHAPLNESSARFYVASVVVALENLHQRSILYRGVSADILMVDRSGHLQLVDFRFAKKLQGERTYTICGIADSLAPEIVLGRGHGFSADWWALGVLIYFMLQSDMPFGSWRESELEPFAKIAKGHLVMPSTFSIEVVDLITKLLEVNENARLGAKGAESVKRHPWFDGIDWKQIADGTYTVPQEITDRVDSYVETLTEDLTASPSMPSEETADQAAPEWIQDW

SEQ ID NO: 46699 - protein, 67 aa, Oryza sativa
MDASIWCPLCSRAGIYPSFSSIWFSLLIYLSVNLQTFLTQFWNRKFYRLSKPIFWMNLSRINFLELI

SEQ ID NO: 46700 - protein, 970 aa, Oryza sativa
MLMEVANAMDAITKETVDLEHIPVEEVLDHLKCTREGLTSEVAQQRIHSFGYNKLEEKQESKLLKFLGFMWNPLSWVMEAAAIMAIALAHGGRDARGKRMRIDYHDFVGIVLLLFINSTISFMEENNAGNAAAALMARLAPKAKVLRDGTWDELDASLLVPGDIISVKLGDIIPADARLLEGDPLKIDQSALTGESLPVTKHPGDGIYSGSTCKQGEIEAVVIATGIHTFFGKAAHLVESTTHVGHFQKVLTSIGNFCICSIAAGMVIELLVMYAVHERKYRQIVDNLLVLLIGGIPIAMPTVLSVTMAIGSHKLAQQGAITKRMTAIEEMAGMDVLCSDKTGTLTLNKLSVDKNLIEVFEKGIEKDDVVLMAARASRLENQDAIDFAIVSMLPDPKEARAGIQEVHFLPFNPTDKRTALTYLDAEGKMHRVSKGAPEQILNLASNKCEIERKVHHVIGNFAERGLRSLAVAYQEVPEGTKESPGGPWQFVGLLPLFDPPRHDSAETIRRALDLGVSVKMITGDQLAIGKETGRRLGMGTNMYPSSSLLGDRKDGDIAVLPVDELIEQADGFAGVFPEHKYEIVQRLQARKHICGMTGDGVNDAPALKKADIGIAVADATDAARSASDIVLTEPGLSVIISAVLTSRAIFQRMKNYTIYAVSITVRIVLGFLLLACFWKFDFPPFLVLVIAILNDGTIMTISKDKVKPSPYPDSWKLTEIFATGVIIGAYLAVTTVLFFWAAYKTQFFVHIFNVDTLNINKVDTTDNELVARNTEKLASAVYLQVSTISQALIFVTRSRGWSFLERPGLLLMAAFVIAQLIATVLAAIATWEVASIRGIGWRWAGAIWVYNIVVYLLLDPMKFAVRYGLSGKAWNLVIDNKVAFTNRKDFGREARVVAWAHEQRTLHGLQSAASREKAASTELNQMAEEARRRAEITRLRELHTLKGKVESVAKLKGIDLEDVNNQHYTV

SEQ ID NO: 46701 - protein, 502 aa, Oryza sativa
MPRRTDNAASANSVEPEKSEECLEFDDDEEEEVEEEEIEYEEIEEEIEEEEVEEDEDVVEEVEEVDEEEDEEEEEESDETEGVSKTKGVHQKDVTEKGKHAELLALPPHGSEVYVGGISSDVSSEDLKRLCEPVGEVVEVRMMRGKDDSRGYAFVNFRTKGLALKAVKELNNAKLKGKRIRVSSSQAKNKLFIGNVPHSWTDDDFRKVVEEVGPGVLKADLMKVSSANRNRGYGFVEYYNHACAEYARQEMSSPTFKLDSNAPTVSWADPKNNDSASTSQVKSVYVKNLPKNVTQAQLKRLFEHHGEIEKVVLPPSRGGHDNRYGFVHFKDRSMAMRALQNTERYELDGQVLDCSLAKPPAADKKDDRVPLPSSNGAPLLPSYPPLGYGIMSVPGAYGASPASTAQPMLYAPRAPPGAAMVPMMLPDGRLVYVVQQPGGQLPLASPPPQQAGHRSGSGGRHGGSGGRYGGGGGSSGSSRPGAKRQRGDDNSSSRHKGRRRPY

SEQ ID NO: 46702 - protein, 309 aa, Oryza sativa
MRLKKSSRLPWAPTSPREQMGLAPAVFSKVCKMHGICYLMSNHGGTSILDLLTSTTSLVEGFTVKRLLRLFDSGGVPGVGKTQLGIQLAINVQIPVEYGGLGGKAVYIDTEGSFMVERVYQIAEGCISDILEYFPHCHDKAPAGQEKLKPESFLADIYYFRICSYTEQIAVINYLEKFLGEHKDVRIVIIDSVTFHFRQDFDDMALRTRVLSGLSLKLMKLSKAYNLAVVLLNQVTTKFTEGSFQLTLALGDSWSHSCTNRLILYWNGNERYGFLDKSPSLPVASAPYAVTVKGVRDAVNSNSKRVRVM

SEQ ID NO: 46703 - protein, 234 aa, Oryza sativa; identical to SEQ ID NO: 32439

SEQ ID NO: 46704 - protein, 639 aa, Oryza sativa
MAALQPSFSSAMAMKSLKLPKTAVLPGFGGIARPQDVQDRSANFTCSRPRAASVTDQSTAEPAKPRQNKHTVDPSAPEFLPLPSFEECFPRSTKESREIVHEESGHVLKIPFRRIHLTGDEKHFDTYDTSGPQNISPRIGLPKIRKEWIDRREKLGGPRYTQMYYAKQGIITEEMLYCATRENLSPEFVRSEVARGRAIIPSNKRHLELEPMIVGRNFLVKVNANIGNSAVVSSIEEEVHKLQWATMWGADTVMDLSTGRHIHETREWILRNSSVPIGTVPIYQALEKVNGIAENLSWEVFRDTLIEQAEQGVDYFTIHAGVLLRYIPLTAKRMTGIVSRGGSIHAKWCLTYHKENFAYEHWDEILDICNQYDVALSIGDGLRPGSIYDANDSAQFAELLTQGELTRRAWAKDVQVMNEGPGHIPMHKIPENMEKQLEWCNEAPFYTLGPLTTDIAPGYDHITSAIGAANIGALGTALLCYVTPKEHLGLPNRDDVKTGVISYKISAHAADLAKGHPYAQAWDDTLSKARFEFRWLDQFALSLDPVTAMSFHDETLPSEGAKVAHFCSMCGPKFCSMKITEDIRKYADEHGYGTVEEAVIQGMNAMSAEFSAARKTISGEQHGEAGGEIYVPESYTARK

SEQ ID NO: 46705 - protein, 252 aa, Oryza sativa; identical to SEQ ID NO: 32488

SEQ ID NO: 46706 - protein, 279 aa, Oryza sativa
MAAEAGSAAAGAAYEEERRKRVLENLKHLEDLGIKKMSKSLLEAARLQKSTRASPKPRKKFEVGATEVRRSSRARNSVSYKENFDELNSFLCRRRGSRIRSTEQGRDYTGRVASYEQQQRAFKKAERLQNSLDPENPSFVKTMVRSHVSSCFWLGLRTRFCKLHLPPKEYKMVLEDEEGGEFDSVYIGNRTGLSGGWRGFAMHHNLEDGDSLVFELAEPDRFKIYIIKAVDEDANESEPADEEAIGDKDTSTEDAAEQDDSPNAEPLKGTKRRKLRGRR

SEQ ID NO: 46707 - protein, 944 aa, Oryza sativa
MKIGLLMLLVLFLVMSPDGIRRSLAARPSIVNIGAILRFNSTIGGVSMIAIQAALEDINSDSTILNGTTLKVDMRDTNCDDGFLGMVEALQFMETDVIAIIGPQCSTIAHIVSYVANELRVPLMSFASDATLSSIQFPFFVRTAPSDLYQMDAVPAIVDYYRWKIVTAIYIDDDYGRNGIATLDDALTQRRCKISYKIAFPANARKSDLINLLVSVSYMESRVIILHTGAGPGLKIFSLANQLSMMGNGYVWIATDWLSAYLDANSSVPDETMYGMQGVLTLRPHIPESKMKSNLISKWSRLSKKYSYSYLRTSSYAFYVYDSVWAVARALDAFFDDGGKISFSNDSRLRDETGGTLHLEAMSIFDMGNNLLEKIRKANFTGVSGQVQFDATGDLIHPAYDVINIIGNGMRTVGYWSNYSSLLSTVLPEVLYSEPPNNSLANQHLYDVIWPGQTAQTPRGWVFPSNAKELKIGVPNRFSFREFVTKDNVTGSMKGYCIDVFTQALALLPYPVTYKFIPFGGGNENPHYDKLVQMVEDNEFDAAIGDIAITMSRTVTTDFTQPFIESGLVILAPVKKHIVNSWAFLQPFTLQMWCVTGLFFLVVGAVVWVLGHRINDEFRGSPREQIITIFWFSFSTLFFAHRENTMSTLGRGVLIIWLFVVLIIQSSYTASLTSILTVQQLDTSIRGIDDLKNSDGPIGFQVGSFAEEYMVRELNISRSRLRALGSPEEYAEALKHGPKRGGVMAIVDERPYVELFLSTYCKIAVAGSDFTSRGWGFAFPRDSPLQIDLSTAILSLSENGELQRIHDKWLKTSECSADNTEFVDSDQLRLESFWGLFLICGIACVIALLIYFFTTVRKFLRHEPPEDPTPRPGGSTTLPDERTPPKNGQEKCNCRNFISFLDHKEPPKKKRSLSLTPTTPLSNFTALEIEGPVRTVRNGSVVDI

SEQ ID NO: 46708 - protein, 448 aa, Oryza sativa
MFYTCRPLSRSFMASWQATASGTHVFSAFGFVQKIATFEKASGYQALIQFCDTETASSAKAALDGRCIPSYLLPELDVPCTLRINYSAHTVLNVKFQSHRSRDYTNPYLPVAPSAIDGSGPDGKKQEAESNVLLASVENMQYVVTIDVLHEVFSAFGFVQKIAIFEKNSGFQALIQYPDIQTAVAAKEALEGHSIYEGGYCKLHLTFSRHTDLNVKVNNERGRDYTGGNTAPTSNQPSILGPQPVYSGAYNNAPSSATGAVVPPGTTLTPPGAPSHPYTSSEPLPQTPAVPSGGAPLYTSQGILQGPPGVPPAQFPGYGSPQFPPGSAQAQMHQQHPVQGSQQMPGQMNHQPPPGSFMQYPGDGGRPVQDAPGQQAMPFHGHGGGQHLPPGYGGQPQFQQGPRPPMPPQQFPMYGDQQFPPGTGPQMMMPFAGQGGGQQHPFRPYNSH

SEQ ID NO: 46709 - protein, 71 aa, Oryza sativa
MPALPSILLRFYRDWAHSRTDSRTYGFMWLSVLVMVVEILFPSGHRCCKLLQKLMPLNNHILAEWEFNLGF

SEQ ID NO: 46710 - protein, 187 aa, Oryza sativa; identical to SEQ ID NO: 30279

SEQ ID NO: 46711 - protein, 328 aa, Oryza sativa
MAEVNGANNGNGHHGHGNGSGAAAAAIVQKTGFYAGFISGYAVSGSFLGTPDVGLLTPPEMAEVARRICASAPNTLFIADADTGGGNALNVKRTVQDLMAAGAAGCFLEDQAWPKKCGHMHGKQVIPAEEHAVKIAAAREVVGDRDFFIVARTDARSVTGLDDAIRRANLYIDAGADACFVEAPRSDEELMEICRRTKGYRVCNMLEGGKTPLHTRQELMEMGFHLIKSPLTTVYAAARALVDVLAALKRAETTRDELHRLTTFTEFNNLVGLDSWLDIEVRFSVNSSSSVPKPLPAPPALETTTEMEKAKAKAAAVVAGNGATNGVH

SEQ ID NO: 46712 - protein, 199 aa, Oryza sativa
MAGFATSRPASLALAALLAFLNLFAFLLAVGAERRRSTGKVVPDEYDLRSYCLYDTDASTVYGVAAFFVLLLAQALVTAATRCLCLGPALSSRGCAVASFVLSWITFLTAEACLIGGSVRNAYHTKYLGYYMKHDLVTCATLRKGVFAAAAALMLINLLASLMYYWSYSRAATGGFIKHQNEVGMSMTDYGLDKGGSMP

SEQ ID NO: 46713 - protein, 442 aa, Oryza sativa
MAGSKFGSFKSEKGSSAGAAAGAGAAAQRRDPYEVLGVGRNATEQEIKSAFRRMALKYHPDKNADDPVASDKFQEATFSYNILSDPDKRRQYDSSGFEAIEADSQELELDLSSLNTVNTVFAALFSKLGVPIKTTVSATVLEEALNGSVGISQLELGQSVFRKVEKQSAHFYSVDITDKEAKMGLVCRVQSTAKSKFKLLYFEPEENGGLSLALQEDSVKTGKVTSAGMFFLGFPVYRFEQNNSVAAAKDPDSAFFKRLDGFQPCEVNELKAGTHFFAVYGDNFFKSATYNIEVVCAEPFSTEKEKLRCVEAKILAKRSELSKFESEYREVLAKFTEMTSRYAQEMQTIDELLKERNAIHASYTNNTTLQRSSSSNKGKTSSKESKSDDDQTVKKEKKSKSKSMEGSRSDDDGPRKEKKPKERLRRKKWFNIHLKVDKRRPC

SEQ ID NO: 46714 - protein, 695 aa, Oryza sativa
MGWFRAASGLARVALRRNLARAPANPFAGPAPRYFHSTRPRRFAAPVPRAVPLSRLTDSFLDGTSSVYLEELQRAWEADPTSVDESWDNFFRNFVGQAATSPGISGQTIQESMRLLLLVRAYQVSGHLKAKLDPLALEERPIPDVLDPAFYGFSEADLDREFFLGVWRMAGFLSENRPVQTLRSVLERLEQAYCGTIGYEYMHIPDREKCNWLRDRIETVNAREYSYDRRQVMLDRLMWSTQFESFLAQKWTTAKRFGLEGAETLIPGMKEMFDRAADLSVESRGRLNVLGNVVRKPLRQIFSEFSGGTKPAEEGEGLYTGTGDVKYHLGTSYDRPTRGGKHIHLSLVANPSHLEAVDPVVAGKTRAKQYYSNDLDRTKNLGVLLHGDGSFSGQGVVYETLHLSALPNYTTGGTIHIVVNNQVAFTTDPRAGRSSQYCTDVAKALDAPIFHVNGDDLEAVVHVCELAAEWRQTFHSDVVVDIVCYRRFGHNEIDEPSFTQPKMYKIIRNHQSALEIYQNRLLESGKISKEDIDKMQKKVSTILNDEFQNSKEYIPNKRDWLSAYWTGFKSPEQISRIRNTGVKPEILKRVGEAMTTLPENFKPHRAVKKIFELRRQMIETGEGIDWAVGEALAFATLIIEGNHVRLSGQDVERGTFSHRHAVIHDQETGEQYCPLDNLVMNQDEELFTVSNRYEL

SEQ ID NO: 46715 - protein, 142 aa, Oryza sativa; identical to SEQ ID NO: 35832

SEQ ID NO: 46716 - protein, 110 aa, Oryza sativa
MSTIYMSQLSAALPLMEGEHHHHHQDHHQGHFQAFSLQPKDPPVLFPFVISRRSSSSSPSDSTTLSYGSDHHLTQQQQLEQDPCRRHRLLQLPAVTGGSRLRGGGAGRDH

SEQ ID NO: 46717 - protein, 122 aa, Oryza sativa
MNHKCTYPVSDSPASTNNFMISDFSEYVDEYGYSIDPFVGHGIGKIFHSEPIIWHTYDYEPGYMVVGQTFTIEPTLSMGGTQCTLWDDGWTAVTVDSSLTAQFEHTILVTGDGAEILTMHPR

SEQ ID NO: 46718 - protein, 238 aa, Oryza sativa
MASREDDRAGRGGGGGRTEQERRPSKAWGILIFGLIGATTATFAVAQVRRSVDWVYSQFNKMQTTSWRNASNSSNRGSFSEDARRRYYQRMQQEYEEEQERVQRIRHMQSVFNRERNKFRRSYEAWRENGPPGGYNYVPRDDWYWQTDTSHSEHKNRRTYTPAGPRVYSMSHHYTVLGLNRSRTTPYTDAEVKNAFRTKAMEVHPDQNQDNREAAEERFKEVVKSYEAIKLERKNDAS

SEQ ID NO: 46719 - protein, 176 aa, Oryza sativa
MHPARPDTPAVPAHRVILASRSPVFRAMLENEMEESRSGIIKIYDVSYDVLRAFVHYMYTAEALLDEQMASDLLVLAEKYEVKNLKAYCEKFLTSKVSNDNAITHYAFAHRHSAKQLLETSLAAIMDNMSTLADREEYKELVEKDPRLVVEIYEAYLNRQVNTAAGKETDSSSRKG

SEQ ID NO: 46720 - protein, 230 aa, Oryza sativa; identical to SEQ ID NO: 46340

SEQ ID NO: 46721 - protein, 265 aa, Oryza sativa; identical to SEQ ID NO: 40511

SEQ ID NO: 46722 - protein, 207 aa, Oryza sativa
MLLFPAKNGVYHQWVIQAPNLQNFFITGLYDDGWQIGDLTFLEEATVDWPLYSYDRDFVKLITGLSQARELDFAMPVRDVNVLEGLSCSFKNLKCLSLCTSLHLLSNVLSFFCIIRNASKLETLRIKLFDDSTQDDEVDNDFLNGQWTDDLFSNLKSVYVRNMTCKLSEMHFIEFILSKARNLEKNDVCLAEDCSKSNEEAVIELAK

SEQ ID NO: 46723 - protein, 217 aa, Oryza sativa; identical to SEQ ID NO: 30668

SEQ ID NO: 46724 - protein, 499 aa, Oryza sativa
MTTTTTTRHRLRDAAVASVVAVLPHEISPLISAASTFFFILSAYFAVLPLRDEGAISLGLSSLPGLFAGSLLLTLVAAPVASLAFSLPSIPKPRALVFIHRFFSLSLLVFFVLWFASTPGHSPSISQSSEDASNKPPGWGNHSWFYILVRISLFLWVSLLNLIAISSTWARVIDIMDSESGSRLFGFIGAGATLGQLFGSLFAATMALLGPFLLLFSSLLMELAALSSKGICTDDTHGSMELSSTIAEQSQNTEADDEMSSLVTSQGLPSQVSESQKTKPEIFVMFEGFWLIARSPYLMYISLFLWLSAVVSSFFYFQKVTIVATTISSPTARRRTFALINSFIAVFILAGQLTLTGRILTIAGVTVAICASPFIATLNMVALALWPTWVAVAVTETIRKVTTYVLTRPGRELLFTVVSQDEKYKAKVCIDVVVQRLGDATAAGIYSLLFSSLEKKASMVTLYALPLCFVWLLTAFHLGRLQTNLVKVQVASFASSIPR

SEQ ID NO: 46725 - protein, 220 aa, Oryza sativa
MLRAQVEGDDRERHLRGRRRRGGGGARQRRRARPRRPAQLPASYCEPHSFAEDGSVPPKKPTSVAEVAKQRELSGTLQSEADSKMKKQISNAKSKELSGHGLFDPQDVRPNGARNTANGTGASHTPVRNANVSSFSFGEANTDSVTKTAKKITGKKFTDLTGNNIFKGDEAPASAEKHLSTAKLKEMTGSNIFAEGQAPTREYHSGNRKPPGGESSIALV

SEQ ID NO: 46726 - protein, 708 aa, Oryza sativa
MPAWWPRKSRSKAKGVGKPPGAGAASAASSPRKSLDLVDLSASPSVTPRAREKARSLDSPSAAAPRHGGGRCGGGFGEVGYKLPVPVGDAGPGGQGQGQEPELEPAPVRFEENGDVVGGVAGDASSEELSVCSHDSSDEATDQQVCRSTDPASFVRGRNMPSDSHKILNEDNHFMSYSMPREHRKFFEVPVTNMGELHLHCDDLSTSETSSRGRMLPEDFLAPRTRSLSPGPKGHTFAVNNVNSREFGFSPRSPVKMMDGLKSPPHPLPLPPGPATCSPLPPSPTAYSPHPLGPTTCLQSESQWKKGKLLGSGTFGQVYLGFNSENGQFCAIKEVQVISDDPHSKERLKQLNQEIDMLRQLSHPNIVQYYGSEMTDDALSIYLEFVSGGSIHKLLREYGPFKEPVIRNYTGQILSGLAYLHGRNTVHRDIKGANILVGPNGEVKLADFGMAKHISSFAEIRSFKGSPYWMAPEVIMNGRGYHLPVDIWSLGCTIIEMATAKPPWHKYEGVAAIFKIANSKEIPEIPDSFSEEGKSFLQMCLKRDPASRFTATQLMDHPFVQDHPAVRAAKSGALRNAFAPADGTHTTSNREFSRKSITPLKDIGVSARDFTGFSTAVPSPHTASPISVVRTNMSLPVSPCSSPLRQFKQSNWSCLPSPPHPTFSNGATSYNLSSYMMNETRRIPTISDTWQDISQLKVQSPYGSPKRF

SEQ ID NO: 46727 - protein, 602 aa, Oryza sativa
MAAGRAFLRAAPSSLAAGAGRFAFACPTALPLTAAAAAATGPHRRGRGRCYCSASDAPPPPPYVLTTPLYYVNAPPHMGSAYTTIAADAIARFQRLLDKRVVFITGTDEHGEKIATSAEACGRNPKDHCDTISNSYKMLWADLDIEYDKFIRTTDRKHEAVVNDFYSRVLDSGDIYRADYEGLYCVSCEEYKDEKELGENKCCPVHLKPCVPRKEDNYFFALSKYQHQLEDLLTKNPNFVRPSHRLNEVQGWVKSGLRDFSISRASVEWGIPVPNDTKQTIYVWFDALLGYISALLDDGEKASLQQAVERGWPASLHLIGKDILRFHAVYWPAMLMSAGISVPDAVFGHGFLTKDGMKMGKSLGNTLEPKDLVNRFGVDSVRYFFLREVEFGNDGDYSEERFINIVNAHLANTIGNLLNRTLGLLKKNCKSTLAFDSIAAADGISLKDNVENLVDKAKDQFENLLLSSACETLMEIGNLGNLYIDEQAPWSCFKQGGESAEKAAKDLVIILETMRIIAIALSPITPSLSLRIYTQLGFTEDQFRTLRWEDTKWGGLKAGQVMMEPKPVFARIETETDEKDQSSSKATKGGKKKARSQGLVEA

SEQ ID NO: 46728 - protein, 784 aa, Oryza sativa
MDIPFSGSCKRVFEVAVEFSRNMGCSFISPEHLALALFTLDDPTTNSLLRSLGADPSQLASVALTRLQAELAKDCREPAGASSFKVPKKSPAGAGRSAFSKSLNSKKEKGALDQFCLDLTTQASGGFIDPIIGREEEIERVVQIICRRTKNNPILLGEAGVGKTAIAEGLALRIANGDVPIYLVAKRIMSLDVGLLIAGAKERGELESRVTSLIREVREAGDVILFIDEVHNLIGSGTVGKGKGAGLDIGNLLKPPLARGELQCIAATTLDEHRMHFEKDKALARRFQPVLVEEPSQDDAVKILLGLREKYETYHKCKFTLEAINAAVYLSARYIPDRQLPDKAIDLIDEAGSRARMESFNRKKEGQSSILLKSPDEYWQEIRAAQNMHEVVSSNQMKYSPRQENGSAAIKAPSEDMNELTSELQVEEPIVVGTEEIARVASLWSGIPVQQLTADDRKLLVGLDGELRKRVIGQDDAVMAISRAVKRSRVGLNDPDRPIATLLFCGPTGVGKTELTKALAASYFGSESAMLRLDMSEYMERHTVSKLIGSPPGYIGYGETGTLTEAVRRKPFTVVLLDEIEKAHPDIFNILLQIFEDGHLSDSQGRRVSFKNTLIVMTSNIGSTSISKGRRSMGFMTEDTESSSYVAMKSLVMEELKAFFRPELLNRIDEMVVFRPLEKTQMLAILDIILQEVKGRLLALGIGLEVSDAMKDLICEEGYDKSYGARPLRRAVTHLIEDVISEAILFGEYKPGDTILMDIDAGGKLCMSHLNEKVVQLSDPTRTF

SEQ ID NO: 46729 - protein, 70 aa, Oryza sativa
MTRHSYLVLKSLHTRLWCTQQISSKQLCHLLGFIFSSFRFVHIYSFKVYKFSLMFHACVLLPNNSSKSSV

SEQ ID NO: 46730 - protein, 321 aa, Oryza sativa
MEAEDEYSAGCSFSLMCQEDSTDLDDDGGGGGCFAGDGRADLLLVYNAAAAADDEDEEEVEEYMDHLVSKESSFCSSSSSTSSSSCCFSDAGGESAAAAAPMDWFALARRATVKWILETRGCFGFCHRTAYLAIAYFDRFCLRRCIDRSVMPWAARLLAVACVSLAAKMEEYRAPALSEFRAGVGDDGYEFSCVCIRRMELLVLSTLDWRMAAVTPFDYLPCLSSRLRRHVGGGGGAGASAALIFSAAEAASVLDHRPSTVAAAAVLAATHGALTREALESKMSGLSPSFLLDKEDVFACYSAMLSQPTSPASKSTTTTTG

SEQ ID NO: 46731 - protein, 326 aa, Oryza sativa
MTRGEKGMQPKISAFFKRQAPEPETSSGGDTHREGTCGTEVKRPKSCADGKVLNKKRNYAQFHLELGQPDFLLHMCSVCGMMYARGNDDDEKAHKAYHKSYFEGVPFKGWRNETVVARSEGGDRIILVTDENSCARNSKVQEVIKVVQKELGFGEGQLLHKLCKVYLFISSQRIVGCLVVEPIKTAHKVIPGSTEENGSDLPVDKIEPVKTNHTLAFGKISFKREVLKRHDHSDKNKEEYRDPGAIICEKEDVPAHCGFRAIWVVPSRRRKRIGSQLMDAARKSFLEGETLCISQCAFSPPTSSGKALARSYCKTSAFLVYKEQDA

SEQ ID NO: 46732 - protein, 158 aa, Oryza sativa
MRLSHCESYCGPPLCYIPCLPKSKDAAGDAAHKSKDAAAADAVPVAAAEDKPPPVQKIEAAVAEKDGDDSKEVDGDEEEEEDDDDVKTAVAVAAPPPAPLKSNLKKADCADSKCAEKGNVKWLDLLGKDLTEVKEFEPSESGDSMDEDDIAECVCAIQ

SEQ ID NO: 46733 - protein, 504 aa, Oryza sativa
MPRTAAAAAAAPPPLLLLSAAAAIAIAIAVAVAAPDGHLVASLPGFHGAFPSKHYSGYVTVDEGSGRRLFYYLVTSERDAAADPVVLWLNGGPGCSSLDGFVYENGPFNFERGSDPGGLPNLELNPYSWSKVSNVVYLDSPAGVGMSYSLNKSDYTTGDLKTAADAHTFLLKWFELYPEFQSNPFYMSGESFAGIYIPTLADEVVKGIEKDLKPRINFKGYLIGNGATDQDYDFNSFVPFAHGMGLISTELFEDASTACHGTFWGKVNNLCQEKIDRVHWELKDLNKYNILAPCYHHPEIQELEFKNSSLPSSFRKLGETEKRFPVRKRMAGRSWPLRAPVTRGRMTMWPELGGRSLPCTSDELANAWLDDEDVRAAIHAEPKSLIGSWELYTARIEYYHNTGDSMVKYHKKFTAMGYRALIYSGDHDLCIPYVGTEAWVRSMGYRVIDHWRPWYFGGQVAGYTQGYEHNLTFLTIKGAGHTVPEYKPKETLAFYSHWLSGKKI

SEQ ID NO: 46734 - protein, 318 aa, Oryza sativa; identical to SEQ ID NO: 31941

SEQ ID NO: 46735 - protein, 521 aa, Oryza sativa
MDDKGSVPRKGATDDTSIKTKKSKNKNRSAKKNKNTSKDADGLETVGASKKLSKKAVDETLSDSKSARRTRSTRMKGGTPVALKGRGKDSGAESLKVEEKNTALLKENKVGRRAGSARKKYKTTGDGDGLEDGNANVSVSSGKRSTRGETSVVSEARISEQGRKKKKLSELMAVTDVPNPSSGGKSKARGKRSMDASTEKLEDPDRDLEDTMKTRKRKKLDTLGDLSSQPQPVSRKSTTKVGELMHKAAGQMSQTRPVRKANGAVSQKNSRSTKERQVNAPDKSAHSLKVKKGKTDTLTENSLSCSEMLSQLSLAVFNLKKKERFSSAGMNFFTDFRKYSYASRSDVEKEIYGKATNTGSCASFSDVDEDIPEKAAGTEPTPLEQPLADHMQDDYWADILINVEEPLSSLRKKKDKGVNRTRKKEHVKKPAMKSSSLGNIEGPTVEGSENKQPNAETQLSVANGTKVSSEETESSSFAGLVLHFSRPGAVPSRSDLIKIFSQYGPVNEAKAETANNANCAL

SEQ ID NO: 46736 - protein, 311 aa, Oryza sativa; identical to SEQ ID NO: 29837

SEQ ID NO: 46737 - protein, 174 aa, Oryza sativa
MSRDPLVVGHVVGDILDPFNKSASLKVLYNNKELTNGSELKPSQVANEPRIEIAGRDIRNLYTLVMVDPDSPSPSNPTKREYLHWLVTDIPESANASYGNEVVSYESPKPTAGIHRFVFILFRQYVQQTIYAPGWRPNFNTRDFSALYNLGPPVAAVFFNCQRENGCGGRRYIR

SEQ ID NO: 46738 - protein, 408 aa, Oryza sativa
MGSVGVAPSGLKNSSSTSMGAEKLPDQMHDLKIRDDKEVEATIINGKGTETGHIIVTTTGGRNGQPKQTVSYMAERIVGQGSFGIVFQAKCLETGETVAIKKVLQDKRYKNRELQTMRLLDHPNVVALKHCFFSTTEKDELYLNLVLEYVPETVHRVVKHYNKMNQRMPLIYVKLYMYQICRALAYIHNSIGVCHRDIKPQNLLVNPHTHQLKLCDFGSAKVLVKGEPNISYICSRYYRAPELIFGATEYTTAIDIWSAGCVLAELMLGQPLFPSESGVDQLVEIIKVLGTPTREEIKCMNPNHTEFKFPQIKAHPWHKVFHKRLPPEAVDLVSRLLQYSPNLRCTAVEALVHPFFDELRDPNARLPNGRFLPPLFNFKPHELKGIPSDIMAKLIPEHVKKQCSYAGV

SEQ ID NO: 46739 - protein, 511 aa, Oryza sativa
MAAAPVASPFPALPSSSSSTTIAASTAARRCHDALLPPPAAAGREPARTRGSSSSLAGAAGERRRRRGEEDGGEVEAEAERRRKEEVNRKIASRKALSVILRREATKAVLDKRKPGKGTRRLLPRTVLEALHERITALRWDSALKVFDLMRDQVWYRPYVGIYVKLITMLGKCKQPERAHELFQAMVDEGCAPNLESYTALVSAYSRSGRFDRAFSLLEQMKATPGCRPDVQTYSILIKSCLHAYDFERVKYLMEDMARAGIRPNVVTYNTLIDAYGKAGRFAEMESTLLEMLTENCKPDVWTMNSTLRAFGGSGQIETMESCYEKFQASGISPNIKTYNILLDSYGKAKMYEKMGAVMEYMQKYYYSWTIVTYNVVIDAFGRAGDLEQMEYIFRLMKSERIKPNCVTLCSLVRAYGRAGDVKKIKTVLRIVENSDITLDIVFFNCLVDAFGRVGCLAEMWDVLDIMKLQRCKPDKVTCTTMIKWFLIKGIDDHRVQYLRDLKDGRSKDNI

SEQ ID NO: 46740 - protein, 303 aa, Oryza sativa; identical to SEQ ID NO: 31679

SEQ ID NO: 46741 - protein, 719 aa, Oryza sativa
MAMAPLFVPPPHLLFLLPATTSSSPAASLRRLLLPPLSCHARQVLDVMPQGDRVAGPRAAEGAGAKGATAQVGVATREAGTAGRHGRGRHGGGARPWRRGEDRPARGGQHAADDGEVQGTRRGGDLKQRREGRRWTRGETQARESGKAGNSGRCQSNGSGGNASRKGKKKAKGGENEVKLRVELDMCSKRGDVIGAINLYDSAVKEGIKMGQHHYSVLLYLCSSAALGFVQPAKSGNAGSGIASIGQLHSSSTQSVGNLEGDDVQSEGHSEDQEGNKTDLFASDDGTEKPSRIPVSDELREYARTRGFEIFEKMRSEEEKVPMNESALTAVARMAMSMGNGDMAFDVVKQMKDQGIAPKLRSYGPALTAFCNSGNVEKAFEVEAHMLESGVRPEEPELETLLKASVAAQQGDKVYYLLHKFRTTVRQASSTTAKLLEDWFQSPTASKVGKRKWDSGAITKAIENNGGGWHGLGWLGRGKWTISHSHIDRNGACLACGEKLTIIDLDPKETEDFATLVAKLAIKRERRSNFDNFQKWLEKHGPFDAVVDGANVGLFSHKHISLSKINIVADVIRQRFQSRKLPLIVVHNRHLTGERMQKPSNRKLVEKWKLSNAIYATPTGSNDDWYWLYAAIRCKCLMVTNDEMRDHTFQLLERDFFPKWKERHQVRFNFEDSCVTLQMPPPCSVVIQESENGQWHIPVVSEEGSLEKDRTWLCVTRRN

SEQ ID NO: 46742 - protein, 97 aa, Oryza sativa
MKQRRGRHAEAGGGGIGGGGARRRGSSTSAGEGAVASPPLRASSSRRRRMGWRTRHGSGSDSAPLLFLSGELFHSLTVFLSQNLLRFSEPKLAMRTW

SEQ ID NO: 46743 - protein, 130 aa, Oryza sativa; identical to SEQ ID NO: 28495

SEQ ID NO: 46744 - protein, 136 aa, Oryza sativa
MQPPKEIPTDYNCKDKFLIQSVVVEDGTTQKDIHSDMFSKEAGKVVEEFKLRVVYIPANPPSPVPEEEEDEIDSLDSDVDHEVQMPSTFDAASRKGYTSGSQASHDEGVSLTKAVLSKYVDENQKLQQELVWIFFR

SEQ ID NO: 46745 - protein, 679 aa, Oryza sativa
MRREEASAAAAAAEAGTPRSPDLHDLSDDSDYAAAAAASSSHSAMRSDLVDQGSGETAKVDVVYEKERVTIHPTQYGSGRISGKLRLYLQQGSLFLSWEPNEGVDSLSSNSATMEIEKYRNLYTIKALPLSDVRFIRKHTPTFGFEYIIIVLSSGLAFPPFYFYNGGLRELFATLKKHVFIIRSDDDPNVFLVNDFQDPLQKSLSSLELPGVATVANAMSRQNSLSFTSSVDEARHGSDAKHGASSSMTEYVSKQKHRSNDPGRDLSIQVLEKFSLVTKFARDTTSSLFRENHSSGGHTYGRQQQEYVLDNRANDKYKDQQITPDKDSLLSDSMESNKILAWGKPREQPLSVDEWRSFLDPEGRVMDSKALRKKVFYGGIDHVLRKEVWKFLLGYHEYDSTYAEREYLAVMKRTEYEAIKSQWKSISSTQAKRFTKFRERKGLIDKDVVRTDRSVPYYEGDDNQNVLVLRDILLTYSFYNFDLGYCQGMSDFLAPILYVMEDESESFWCFAILMERLGANFNRDQNGMHAQLLALSKLVELLDPQLHNYFRKNDCLNYFFCFRWVLIQFKREFSFDQIMLLWEVLWTHYWSEHFHLYLCVAILKRYRSRIIGEQMDFDTLLKFINELSGEINLDRAIQDAEALCDQAGPNGAACIPPGTPPSMPIETDGGLYVQEDEVM

SEQ ID NO: 46746 - protein, 184 aa, Oryza sativa
MVELVVAQCNSLPGQAQLLLIWMSKNACRPSLKVIRLYLLGLFHKLQNISSNSSRCSSRSNSRSHSHHCSKQEGMLLVLIIHRNLSTLTFLPKLRALCMSHHPCPMLHHQDPLFSRYLGCPCQCHFTTRHPCSLAVTTHKFHHRELCPVHYKCLWDCMAPTHPRLHSKCTSLPFSTIINCNRQQ

SEQ ID NO: 46747 - protein, 325 aa, Oryza sativa
MASAGVGRGRVRVAVVGDVHNDWTLEEDSKALHFLQPDLVLFTGDYGNENVQLVKSISDLQLPKAAILGNHDCWHTYQFSEKKVDRVQLQLESLGEQHVGYKCLDFPTIKLSVVGGRPFSCGGNRIFRPKLLSKWYGVNDMAESAKRIYDAATNAPKEHAVILLAHNGPTGLGSRMEDICGRDWVAGGGDHGDPDLEQAISDLQRETGVSIPLVVFGHMHKSLAYGRGLRKMIAFGANRTIYLNGAVVPRVNHAQSSRQPAISTSEKTGLEGLTGLMVPTSRAFTIVDLFEGAVEKISEVWVTVGDARTELEQELVLYKQPREHI

SEQ ID NO: 46748 - protein, 199 aa, Oryza sativa
MSLLTSPTPFGGAAVRRRAPPASAAAATRLDLPLVGSRAALHVARARRGGVSSRTQRRLEERGKNKRRGGGSVTAPAPPDMDEDAAAGEGVDWEGEPLGFEVSTTPMPELPDPEKPDFWEGPQWDALGFFVQYMWAFGVFFGLVACGFAVATYNEGATDFRETPSYKESVQTQEFPEESESSGSDVFEGNPTEVAPALE

SEQ ID NO: 46749 - protein, 647 aa, Oryza sativa
MSSSSSSLAAAAARKRALTEQRFSELSPALSPEVVKALKGGGFRRCTPVQAAAIPLLLSHKDVAVDAATGSGKTLAFVVPVVEILRRRPSPPKPHEVLGIIISPTRELSSQIYNVAQPFFATLKGVSSMLLVGGFDIKAELKKLEEEGANILVGTPGKLFDVMERLDTLNYKNLEILILDEADRLLDLGFQKQITSIISKLPKLRRTGLFSATQTEAVKELAKAGLRNPVRVEVKTEVKPTGKDGAQQELGPSKTPLGLRLEYMICEASNKSSQLVDFLVQNNGKKIMVYFATCACVDYWAIVLPLLDSLKGSPIIPYHGKMKQGPREKALASFSALSSGILVCTDVAARGLDIPHVDLIVQYDPPQDPNVFIHRAGRTARYDQEGDAIVFLLPKEDTYVEFLKRRGVPLTERECSTNAVDIVPQIRSAALEDRNVMEKGLTAFVSFVRAYKEHHCSYIFSWKDLEIGRLGMEYGLLQIPSMPEVKHHSLSLEGFTPVKDVDVTKIKYKDKAREKQRQKTLKRKAEELALRPEIEKRRKAPEKPEKPKRKKTGKQRQAVQTKEDMDELANEYRLLKKLKRGVIDEDEYEKLTGFGESDDDDSSDGGDSDLDERKERGNKVLKKIKQKGKAKGSRRFEGRSKQKTRRR

SEQ ID NO: 46750 - protein, 366 aa, Oryza sativa
MASKQMVHMNRGQGETSYARNSILQNAEQNRMRPLIEDAIADLVCSRSMVIADLGCSSGPNALALASIAVDAFRRRCLALRRPPPPAELCVLLNDLPDNDFATVVKSLVEFRRNNGDEPVLLTGVVPGSFYGRLFAAESLHLVCSSNSLHWLSEAPEDLKMNGIPAYDVDANVRRERRAVVVGAYARQFRKDFMAFLKMRAVELVPGGRMVLSLAGRRSVDLASELTHAWESTAMTLSDMVTMGVIDKEKFETFYMPIYGPSDEEIRQIIQEEGSFLIREMQVPELTSGAYSALITSARVASMLRAAFEPIIVQHFGPTGCDGKEGIMDEFVRTAERRWSLEGSLQDELAQNPRGVLLVSLEKKPS

SEQ ID NO: 46751 - protein, 360 aa, Oryza sativa
MEGNGCGGSGATPRGVVGMHWAPVVTSPPSPQPPFLPPAPCRPDVQMQQQGGLTCLKLGKRPCFWGGDGAGQVAQGSGGGGGGGGGGSADQGKRKEKAATAVPVVPRCQVEGCDITLQGVKEYHRRHKVCEVHAKAPRVVVHGTEQRFCQQCSRFHVLAEFDDAKKSCRRRLAGHNERRRRSNASEAMARGSAHPHGMPVLGHGFPPYGLPTSSAGALSLLSSARATGPWLMPTPDISARSSAALDELIAENRAALLSWQFFSDRQPPPAGRPTGRSPGSETAGGWHAHLQARPPPPGAGGQHENQSGHVTLDLMQATTAAGGSGAPFRPVPARPPKEGGDAGCTSDAWTPSPMEGARVV

SEQ ID NO: 46752 - protein, 630 aa, Oryza sativa
MAGQRSDSQSDESFEYMLLERDPDLYRTVFSGPSQISPWIDPSVLTLQHRIGRGPFGDVWIATHHQRTEDHDRYHEVAVKMLHPIREDQLQAFSVRFDEIFSKCQGLSNVCFLHGISTQNGRICIAMKFYEGSIGDKMARLKGGRIPLSDVLRYGADLARGIIDLHSRGILILNLKPCNFLLDEHDHAVLGDFGIPSLLFGLSLPNPDLIQRLGTPNYMAPEQWQPSIRGPISYETDSWGFAWSILEMLSGIQPWRGKSPDEVYQLVVLKKEKPIFPYNLPPAIENVLSGCFEYDFRDRPQMTDILDAFESAKDVDYENTDQGNSENLRMVSPALPSRTNWSFFKDKLQVGDKVRSRKLKNTCSPTTMEVPDGTIVGMEDNGERDGYILVRIHGLHDPLKVRSSTVERVTYGFAAGDWVRLREDEKKRSQVGILHSIDRSGTVYVGLIGVDTLWKGEYSDLQMAEAYCVGQFVRLKANISSPQFEWQRKRGGGLATGRISQILPNGCLFIKFRGKFNLGEVCSCLADPSEVELVSFDKCEGIVKKYEHLEDFHWAVRPLFIAVGFFTALKLGIFVGKGIARPRSRKVASVSDQSDHQQLQQQEVQNNANAAWLPPTVANMLFRDGPTLSG

SEQ ID NO: 46753 - protein, 172 aa, Oryza sativa
MEVRRPAGNEAAATQKGRAAAAGARRSNTSVLCRVHNGVPALAAGKQHQRLVPRPPRQPRPRRASAGGQRGRVGGAGHCCCCLPELDRDTSRDPPAGIYLRPSQPLNRESKLAILASSRNRQYHTTNQHYMSPVLQDLEESKARTFRVLFVPFDPALFPVSPPGSGLTTKAA

SEQ ID NO: 46754 - protein, 819 aa, Oryza sativa
MALAMTSTSPQPPPPSPRRRWRRRPLLRPGVSSPPSRCRPSPSPKAKAALPLLSDVGRDPTAIKYYSRVASNLVGAGRLREFLLAAEGLRAASGDAGFEGRISRRLLSRGVAAALRDQGLPHVLEFLRDAGRVGIRAAVMLDADAYDTVAAACRLLLAERSMTEFVEAVEALAQCGFFVQGIVDPMDVLKIFVKKRDPNMAIRYARIFPQSQLLLCNTMEAFGKRKELKHALTVFGALKDQFGGINMFACRSIIDICGHCGSSVQARIIFEGLLAGKITPNVYVFNSLMNVNAHSFSYNFSVYKHMQNLGVPPDLTSYNILLKTCCNAKEYKLAQEIYEEIKKKEQNGLLKLDVFTYSTMMKVFADAKMWKLASDIKQDMQSAGVRLNLVTWSSLINAYANSGLVDRAIEILEEMTRDGCQPTAPCFNIILTGCVKSCQYDRAFRLFYDWKEYGVKISLSPEQKGCFGDNFSYCEEHTSNSSTLLVVPFRPTVTTYNILMKACGTNGERAKSVMNEMRRNGLCPDLISWSILMDIYGSSQNRDGAIQALRRMQRVGMKLNVTAYTVAIKACVENKDLKLALHLFEEMKAHQLKPNLVTYKTLLTARNKYGSLQEVQQCLAIYQEMRKAGYQANDYYLKNLIVEWCEGVLSSGNGNRKYYQLDQRKESFKLVLEKVTTFLQKDVDQNQTVDVRGLSKVESRVVVLSVLRKIKEKYLLGRAVQDDVVIITGHGKASSAKAETSVVEVEHAIVAVLTDELGLEVLIGPGSRPASSKPTVPARSRSHLDLASKHFSRRPQGMIKIPINSLNHWLKRKAVRTVQ

SEQ ID NO: 46755 - protein, 39 aa, Oryza sativa
MIREKGTERLYRRKKERKRQSNVEEFHRFRKLGNLSQGI

SEQ ID NO: 46756 - protein, 112 aa, Oryza sativa
MSATAVSSLNPDAPLFIPAAFRQVEDFSPQWWDLVKTTAWFRDHWFHEHQQLDEMADSLALHDAAADDDDLAGLLPDDAFDDDDDDDLFFDQTHNLLVDPPQPPAALKTGTD

SEQ ID NO: 46757 - protein, 125 aa, Oryza sativa
MAAWADAALLRASSSPASATAAASSSSSSCCLARPRASLESRLHRRKVRYVLPPLLAPCQFDVSLPLRASVPPLGFARQLFVECPDGGSRECIGNLGSSAVLFIHVCMMGLLKNWSASLLVVRFI

SEQ ID NO: 46758 - protein, 347 aa, Oryza sativa; identical to SEQ ID NO: 31691

SEQ ID NO: 46759 - protein, 324 aa, Oryza sativa
MYSLSLVLIVNHFLIFLKSQSAASGSASGSHHVGVTASSSTPESAVPPTIATGTSQTIEIDADVNRVDDNDERPVKRKKLTSEVWQYFNKEKVSIDENGKIYKQEWAHCKFKNCTYKGRCESATGTSGFWSHLKLHHSVVKGQQQLKAQKDQEKGINVVEPYKYDEEASLRKLYVAIIMHEYPFNMVGHEYFRDFITSLRPNFPLKSRVTVRKEILSIYMQERDKLYEYLKTVKCRISATMDMWTSNQNKGYMCITLHWVDDDWCIQKRIVTFSHVEGRHTGVRLSEGFTTSMLRWFVEKKMFSLTLDNASANDVAVKDIICCC

SEQ ID NO: 46760 - protein, 1056 aa, Oryza sativa
MDRRIGLTSPSPKSTEKSGRDLRSGGDANGGANTNSNSIPRGDKEKGVNVQVILRCRPMSDEETKSNTPVVISCNERRREVAATQIIANKQIDRTFAFDKVFGPASKQKDLFEQSISPIVNEVLEGYNCTIFAYGQTGTGKTYTMEGGGTRKTKNGELPTDAGVIPRAVRQIFDILEAQCAEYSMKVTFLELYNEEITDLLAPEEPKFPIVPEDKTKKPIALMEDGKGGVFVRGLEEEVVYSAGEIYKILDKGSAKRRTAETLLNKQSSRSHSIFSITIHIKELTHEGEEMIKIGKLNLVDLAGSENISRSGARDGRAREAGEINKSLLTLGRVINALVEHSGHVPYRDSKLTRLLRDSLGGKTKTCIIATISPSVYCLEETLSTLDYAHRAKNIKNKPEVNQRMMKSAVIKDLYSEIDRLKQEVFAAREKNGIYIPRERYLQEEAEKKAMTEKIERLGADLEARDKQLVELKELYDAEQLLSAELSEKLGKTQKDLEDTKNVLHDLEEKYNEAESTIKEKEYVIFNLLKSEKSLVDCAYNLRAELENAAADVSGLFSKIERKDKIEDGNRSLVQRFRSQLTNQLDTLHKTVSTSVMQQENHLKEMEDDMQSFVSSKDEAAQGLRESIQKLKLLHGSGITALDSLAGEIDMNSQSTFERLNSQVQSHTSSLEQCFGGIASEADNLLNELQCSLSKQEERLTQFAKKQREGHLRAVEASRSISKITAGFFSSLDVHASKLTSILEETQSVQDQQLLDLEKKFEECAANEEKQLLEKVAEMLASSHARKKKLVQTAVGNLRESAVNRTSHLQNEISTAQDFTSSVREKWGFYMEETEKNYIEDTTAVDSGRSCLAEVLVECKAKTTMGAQQWKNAEDSLFSLGKGNVESADSIVRTGTEANQSLRSKLSSAVSTTLEEIDIANKALLSSIDSSLKLDHDACANIGSIIKPCHEEISELKGGHYHRVVEITENAGKCLEEEYLVDEPSCSTPRRRQIDLPSMESIEQLRTPDYDELLKSFRESRASLKQANGDMKHFLEVQEATPPSITDPRAPLIARN

SEQ ID NO: 46761 - protein, 98 aa, Oryza sativa
MPRVRGRRVPCMPELEGGVVRARGSLPPRTPPTSLTQHHKNTTLALPLGNAAATAICSISLPSYYYLPRGKITSNSLFVYFCMLASCNCFLAPSCVVC

SEQ ID NO: 46762 - protein, 410 aa, Oryza sativa
MLRQSSSRNHRSKGLKLKKALQITLLVLVSVWLIYQVKHSYEKKAYHENEPNDLHKDDDQNQGEIRLGRKDLPTKLEADSSTLDERIEDEENEEMEQEMKHDENDEDPIDEPDLDKDDDLPEPGEHSADKDERSEDVGVFEDEERKERSQEDQEKTFHGDNVSSAVSHDPPSAEQDELLRHAQDKILYVDDASTAVPHDNQEAERREEEARKAREMTFRGDDVSSSVDHDAQVTKPLPEEQLKSMDSIFEGTTNLSNGITFRGPGVNESTAARELGAIPADASSHPNTSTVSESNTDTAPVNLDGNHTGSDQANSTSLKGQQEQQANSTDVLNNQIKLFIDLTSAAELNYRPNGTLASASTDAENATSVDRGHDGNTGTNKAEEGDTGKDLDLSTKIMNKAISEDEVVLE

SEQ ID NO: 46763 - protein, 529 aa, Oryza sativa; identical to SEQ ID NO: 45518

SEQ ID NO: 46764 - protein, 205 aa, Oryza sativa
MAPASTSPPAKAQVTTAPAKSPLVGGLADLDAAVSLRLHALFLPVPRLLLKALEVAGDGRIWLPVPISLLLISTTTSSKVSPLLVGLVAGLVLDILFVGAAKLIVRRPRPAYNAADMYVAVAADHWSFPSGHSSRAFLVAAFLAAGGFPREALFLWAASTSASRVLLGRHYVLDVVAGACLGVFEAWLSSLLLRAMCARISFLVC

SEQ ID NO: 46765 - protein, 279 aa, Oryza sativa; identical to SEQ ID NO: 28931

SEQ ID NO: 46766 - protein, 329 aa, Oryza sativa; identical to SEQ ID NO: 37062

SEQ ID NO: 46767 - protein, 136 aa, Oryza sativa; identical to SEQ ID NO: 40528

SEQ ID NO: 46768 - protein, 490 aa, Oryza sativa
MAEDKGGLDAVLKESVDLENIPIEEVFQNLKCCRQGLTSEEAQLRLQLFGPNKLEEKEESKFLKFLGFMWNPLSWVMEAAAIMAIALANGGGKPPDWQDFVGIITLLLINSTISFIEENNAGNAAAALMARLAPKAKVLRNGSWTEEEAAILVPGDIISIKLGDIIPADARLLEGDPLKIDQSALTGESLPATKGPGDGVYSGSTVKQGEIEAVVIATGVHTFFGKAAHLVDSTNQVGHFQKVLTAIGNFCICSIAVGMFVEIIVMYPIQHRPYRPGIDNLLVLLIGGIPIAMPTVLSVTMAIGSHRLSQQGTITKRMTAIEEMAGMDVLCSDKTGTLTLNKLTVDKNLIEIFERGVTQDQVILMAARASRTENQDAIDTAIVGMLADPKEARAGIQEVHFLPFNPTDKRTALTYIDSDGKMYRVSKGAPEQILNLAHNKTQIERRVHAVIDKFCRTWTSVTCCSISGSSRWKERESWWAMALCCSPSTL

SEQ ID NO: 46769 - protein, 586 aa, Oryza sativa
MNSYCDKKEVTVAFSKTKRQEEDEVIWRMVEQGATDDEECGGTNCSAGENRDPGWPGTSVFRMLIPATKVGAVIGHSGERLRRLCEETKACVRVIGGHFAAAERAVIIFAKEQPDEPKPPAIDALLRVYECIINDDGLDVRYNNIVVARILTPSEQAASLIGDQGSVINYIKKASKTNIHVIDGDLPPVALEDDMIIEIWGLPARVHQALELVACHLRKYLVHRSVIPLFDPHVSIPISPVDMPPFHYSDHHEGLLHEASPGYYSLYAEAFQLEHPWTDTSYSRYPMENFTHADIFEYRQEAPVFFGRYRSVTPPHYGHEAEAYLSSPMELCLHNNLNTYGWQATPPIGRSDTVERIRSLISVYGKQAHPHRLRQTYQSTKMEKHPHSGISLYRRDDHPTRVSPSPATELPPSPAVSAYKWQVSPSLKMYPSTNVENLQHCRVSACAPEELPNVVVPSLTSQSPAVTSQVIMKMQVPIFYAEAVIGPTGARIDYIRQASGSSVVIKDLDDSAMSIEITGSAATDVQIAEQLIKNFMAEAAAASPDHSYDFIPSHLPAPRSPEPDIPTTSLTRRASCFTEPRLQATY

SEQ ID NO: 46770 - protein, 311 aa, Oryza sativa
MGSSGADAPTKTSKASAPQEQQPPASSSTATPAVYPDWANFQGYPPIPPHGFFPSPVATSQQGHPYMWGAQPMIPPYGTPPPPYVMYPPGVYAHPSMPPGAHPFTPYAMASPNGNADPTGTTTTAAAAAAGETDGKSSEGKEKSPIKRSKGSLGSLNMITGKNSTEHGKTSGASANGAISQSGESGSESSSEGSEANSQNDSHHKESGQEQDGEVRSSQNGVSRSPSQAKLNQTMAIMPMTSSGPVPAPTTNLNIGMDYWANTASSTPAIHGKATPTAAPGSMVPGEQWVQVCSISPSLQEPCTCNIFFPL

SEQ ID NO: 46771 - protein, 324 aa, Oryza sativa; identical to SEQ ID NO: 45185

SEQ ID NO: 46772 - protein, 220 aa, Oryza sativa
MDSDDKKFGKGPRELTGAVDLISHYKLLAHHDFFCKKPLPLAISDTHYLDNVVGDTEIRKGEGMELDQLVQNAYLRDKPAYIQPFDMETLGQAFQLRETAPVDLPSAEKGIPTISGKLKSESKDKEKKHKKHKDKDRDKDKEHKKHKHRHKDRSKDKDKDKDKDKKKDKSGHHDSGGDHSKKHHEKKRKHEGMEDSADVHKHKKSKHKSSRTDDTGNGLS

SEQ ID NO: 46773 - protein, 106 aa, Oryza sativa
MMAEADADGDGFISLDEFAALNATASGDAAAVEEDLRHAFRVFDADGNGTISAAELARVLHGLGEKATVQQCRRMIEGVDQNGDGLISFEEFKVMMAGGGSFAKIA

SEQ ID NO: 46774 - protein, 347 aa, Oryza sativa
MGSLRRVVHLVTALNGSANLRHIDTSRFFSRRPPPPFSPSSMAVVTEESSLPEPSMSFYPAPAPPESNGDIGVMLFGRARDRLLVTDQSDSAAIYDAGTHALLAETTPLKPKYWPVSVPVGDDIYLFDLYPRVPCGGRHCFEAVTAVDSSSSSYCSRALPPPPFLFAPGYSPKPIESYTVVGGSEVWISTARAGTYAFDTVSCSWSKQADWPMPFAGLAEYVPEHKLWFGLSSSRRDKHPLCAVDLAAAASPETGPELTNVWMELSVPREWIPVEAFLVHLGSSRFFVARFFQELVEVRCDFSQRFDRFAVFTGVELERTSRGELRMIKHKSERYSIAHKVLCHSVL

SEQ ID NO: 46775 - protein, 192 aa, Oryza sativa
MGQAFRKLFDAFFGNKEMRVVMLGLDAAGKTTILYKLHIGEVLSTVPTIGFNVEKVQYKNVVFTVWDVGGQEKLRPLWRHYFNNTDALIYVVDSLDRERIGRARAEFQAIINDPFMLNSVLLVFANKQDMRGAMTPMEVCEGLGLYDLNNRIWHIQGTCALKGDGLYEGLDWLATTLDEMRASGRITSTSSS

SEQ ID NO: 46776 - protein, 766 aa, Oryza sativa
MASHIVGYPRMGPKRELKFALESFWDGKSSAEDLEKVATDLRASIWKQMADAGIKYIPSNTFSYYDQVLDTAAMLGAVPERYSWTGGEIGFSTYFSMARGNATVPAMEMTKWFDTNYHFIVPELGPNTKFSYSSHKAVNEYKEAKALGVDTVPVLVGPVSYLLLSKPAKGVEKSFALLSLLSSILPVYKEVIAELKAAGATWIQFDEPTLVLDLDSHQLAAFSAAYTELESALSGLNVLIETYFADIPAESYKTLTSLNSVTAYGFDLIRGAKTLDLIKSAGFPSGKYLFAGVVDGRNIWADDLAASLTTLESLEAIVGKDKLVVSTSCSLMHTAVDLVNETKLDSEIKSWLAFAAQKVVEVNALAKALAGQKDEAYFAANAAAQASRRSSPRVTNEEVQKAAAALKGSDHRRATNVSARLDAQQKKLNLPVLPTTTIGSFPQTVELRRVRREYKAKKISEEEYISAIKEEISKVVKIQEELDIDVLVHGEPERNDMVEYFGEQLSGFAFTANGWVQSYGSRCVKPPIIYGDVSRPNPMTVFWSKLAQSMTSRPMKGMLTGPVTILNWSFVRNDQPRFETCYQIALAIKKEVEDLEAGGIQVIQIDEAALREGLPLRKAEHAFYLDWAVHSFRITNCGVQDTTQIHTHMCYSNFNDIIHSIINMDADVITIENSRSDEKLLSVFREGVKYGAGIGPGVYDIHSPRIPSTEEIADRVNKMLAVLDTNILWVNPDCGLKTRKYNEVKPALTNMVSAAKLIRTQLASAK

SEQ ID NO: 46777 - protein, 268 aa, Oryza sativa
MAVAAATRIAVVVVVLALAVLAPAARGLRRDDFPPGFLFGAATSAYQIEGAYLDDNKGLNNWDVFTHTQAGRISDGRNGDVADDHYHRYTEDVDILHNLGVNSYRFSISWARILPRGRLGGVNSAGIAFYNRLINALLQKGIQPFVTLNHFDIPHELETRYGGWLGAAIREEFEYYSDVCFNAFGDRVRFWTTFNEPNLSTRHQYILGEFPPNHCSPPFGNCSSGDSRREPYAAAHNILLSHAAAVHNWPSRWIGFWIQYSLVITLEK

SEQ ID NO: 46778 - protein, 502 aa, Oryza sativa
MKIKFNEWRNSIVSNQRVDDHRSENFKFADQFQTVFFKMRPAIMLNGFTSHQLKLIRQILRTHFRDLVYVCTFLEDGVSEKRVVYTDTNEDKISLMKNVREDLLKSREAKVKSAVGIRHVIDLLASERKLIVGHSCFLDIAQIYSKFVGPLPSSMEEFALSINRMFPHMADTRHLMSVNDAVQYRMRHKSKSLSSAFSLLCPALHAPDEKSSTLPSVRIEVEADETVLSCFTSGAKHEAGYDAFMTGCVFVQLCAYHGIKFEQLSPLEDLATNINLKKHINLLPPCWNSGTVLDLSTGTERPDAGYKRRYPAAVYDNVILIWGFQSKVRPKDIKDCICKVFGRASVTSVFPIDSTAVLVQFSKQESVNDFLDLKATLESADSAISVLHPLSTILEGGKTRAAKYDTYRDICRSSVSKFSFADQAEAVCSTSNSESKFKECNAADGSGAYGSALDGTVPASVQQSGGAKSGSKNKGDDDFSYQDILDALQDGKTSVGKRMSNA

SEQ ID NO: 46779 - protein, 935 aa, Oryza sativa
MGVSPWIIIFLLIVLVQAFVASADTNAQDTSGLNGLAGSWGSAPSNWAGNDPCGDKWIGIICTGNRVTSIRLSSFGLSGTLSGDIQSLSELQYLDLSYNKNLNGPLPSTIGTLSKLQNLILVGCGFTGEIPKEIGQLSNLIFLSLNSNKFTGSIPPSLGGLSKLYWFDLADNQLTGGLPISNATSPGLDNLTSTKHFHFGINQLSGSIPSQIFNSNMKLIHLLLDNNKFSGSIPSTLGLLNTLEVLRFDNNAQLTGPVPTNLKNLTKLAEFHLANSNLTGPLPDLTGMSSLSFVDMSNNSFSASDAPSWITTLPSSLTSLYLENLRISGEVPQSLFSLPSIQTLRLRGNRLNGTLNIADFSSQLQLVDLRDNFITALTVGTQYKKTLMLSGNPYCNQVNDDVHCKATGQSNPALPPYKTTSNCPALPPTCLSTQQLSPTCICSVPYRGTLFFRSPGFSDLGNSSYFIQLEGTMKAKFLNLSLPVDSIAIHDPFVDTNNNLEMSLEVYPSGKDQFSEQDISGIGFILSNQTYKPPSNFGPYYFLGQTYSFANGALQTSKSNTNHIPLIVGASVGGAAVIAALLALTICIARRKRSPKQTEDRSQSYVSWDIKSTSTSTAPQVRGARMFSFDELKKVTNNFSEANDIGTGGYGKVYRGTLPTGQLVAVKRSQQGSLQGNLEFRTEIELLSRVHHKNVVSLVGFCFDQGEQMLVYEYVPNGTLKESLTGKSGVRLDWKRRLRVVLGAAKGIAYLHELADPPIIHRDIKSSNVLLDERLNAKVSDFGLSKLLGEDGRGQITTQVKGTMGYLDPEYYMTQQLTEPERRVQLRRAAAGGDHGEEAAGARPLRGPGGQGGGGPPQGHVRPPRAPRPRAGGLLGARRPRAVRRPGPPLRRGVRRRPPLHGRGRRRDRADRQGGRRWGCGRRRVGGVGLHELRR

SEQ ID NO: 46780 - protein, 224 aa, Oryza sativa; identical to SEQ ID NO: 34297

SEQ ID NO: 46781 - protein, 232 aa, Oryza sativa; identical to SEQ ID NO: 32543

SEQ ID NO: 46782 - protein, 448 aa, Oryza sativa
MRRDVWLAFISEIISVYRFINEYGPRDDDPAIHHVYGAHRGKKRAVSSAANSIARLQSLQFIRRLYEDPAKLVQFSYLSNAPFGDVVLQTLAVKFWGGPLVTNSKAASQRASQWHRPSEDSSSAHAHIFDIDGSVYLRKWMTSPSWTSSHSANFWRNSSVKHGVILSKSLVVADKNLVEKAMVACKEKSKIVERTQATIVAATIEGIPSNIDLFKELILPFAIVSEKFYKLKRWENSRTTACFLLVVYTIIFRNMLSYVLPFSLMMLALSMLALKGLKEQGRLGRSFGKVTIKDQPPSNTIQKIIALKEAMASVENYLQNLNLSLLKIRTIFLAGQPEVTTQVALVLLASSAVLLVVPFKYVLAFFMFDQFTRELEFRREMVKAFMSFMKERWESIHAAPVVVLPYEDGGEQHNKTLPPKSTQQTQSGSVQSTDTYMNLSNGTYTLDI

SEQ ID NO: 46783 - protein, 76 aa, Oryza sativa
MMDGPAHRQGSASLDRFQKNMEKKEKRPMGIFEAYAEARKSGKDGEDYCTDRVKDKLEAYFGVVKEKHGASPDLMK

SEQ ID NO: 46784 - protein, 276 aa, Oryza sativa
MSSICAMRSLLAASTFLRSGASPLLRPLSRPLPSRLNLSRFGPVRPVSAAAAAADKSRGGGGSAMEAQPSYPGEIHVIVGPMFAGKTTALLRRVQVEAGTGRNVALIKSDKDNRYGLDSVVTHDGTKMPCWALPELSSFQDKLGTEAYDKVDVIGIDEAQFFDDLHDFCCKAADRDGKIVVVAGLDGDYKRNKFGSVLDIIPLADSVTKLTARCELCGRRAFFTLRKTRETKTELIGGADVYMPVCRQHYLDGQIVIEATRIVLDLEKSKVIHAFK

SEQ ID NO: 46785 - protein, 488 aa, Oryza sativa
MDGGGQGVARRHGAVAEEDPDRRRGDRSGKEGDDDGVDVDEKAPPPRRTSRRVASLDVFRGLTVALMILVDGAGGEWPVIGHAPWNGCNLADFVMPFFLFIVGMAIPLSLKRIPDRGRAVRRVVLRTLKLLFWGILLQGGYSHAPDDLSYGVDMKHVRWCGILQRIALAYLVVAVLEIVTKNAKVQDQSSSGFSIFRMYFSQWIVACCILVIYLSLVYGIYVPDWDFRVSDVKNPNFGKILTVTCGTRGKLSPPCNAVGYIDRKVLGINHMYHRPAWRRHKDCTDDSPHEGPFKTDSPAWCYAPFEPEGLLSSLSAVLSTIIGVHYGHVLVHMKSHTDRLKQWSIMGITLLILGLTLHFSHAIPLNKQLYTFSYICVTAGAAGIVFCMFYFLVDILNLHYPFAPLKWTGMNAMLVYVMAAAGIFEGFLNGWYYEGTNNTLVYWVRKHVFVKVWHSTRVGILLYVLFAQILFWALVAGLLHRARLYWKL

SEQ ID NO: 46786 - protein, 342 aa, Oryza sativa
MERRRWLQAAVLCCLLVLCSGRELKTKHTPIYNSTLARTLAEYTSAVYTADLTQLFSWTCERCCDLTEGFEVIELIVDVKNCLQAYVGYASDMNAVVVVFRGTQETSIQNWIEDLFWKQLDLDYPGMPQAKVHSGFYSAYHNTTLRDGVVNGIKKTREAYGNIPIMVTGHSMGGAMASFCALDLVVNYRLKDVTLITFGQPRIGNAVFASHFKCHLPNAIRVTNAHDIVPHLPPYYHYFPQKTYHHFPREVWVHNVGLGSLVYSIEQICDDSGEDPTCSRSVSGNSVQDHINYLGISMHAEASGSCRIVTGDNKLQYKMDSDGNIVFSKQPGLSVDQLHSSQ

SEQ ID NO: 46787 - protein, 753 aa, Oryza sativa
MASRAIIRRRKYALEHTNIPVLLRHSSISTFGQEKFGCEIEQSTASQNSRESNHEKAQYILRKQGLLGLSILCHPTRGASLASYESKPQTFGFPLGARYFLQSVRPTSSTAGQPKVGILDERSENQNQNQGKKEASPEECDQAVEGLSTAKAKAKAKLVQEVQKSDQSIIHKFWAILLGIGPALRAVASMSRADWAAKLKHWKDEFVSTLQHYWLGTKLLWADVRISSRLLVKLAGGKSLTRRERQQLTRTTADLFRLVPFAVFIIVPFMEFLLPVFLKMFPNMLPSTFQDKMKEEEALKRKLKARMEYARFLQDTAKEMAKEVQTSRSGEMKQTAEDLDEFLNKVRKGGHVSNEEILSFAKLFNDELTLDNMNRARLVNMCKYMGIQPFGTDHYLTFMLRKKLQEIKNDDKMIQAEGVESLSEEELRQACRERGHLGLLSTEEMQNQLRDWLDLSLNHSVPSSLLILSRAFTMSGKMKPEEAVVATLSSLPDEVVDTVGTVLPSEDSVSDRKRKLEFLEMQEELIKEEEKRQEKEDKAKLEVPKATEEDVALKEMTEPTAREEKELKKAKVEHDRKEQLCDISQALAVLASASSVAKERQEFLNLVNKEIELYNTMLEKEGTKGEEEARRAYKAAREESDHAAEIAAGEKVSSALIERVDAMLQKLEKEIDDVDARIGNRWQLLDSDRDGKVTPDEVAAAANYLKDTIGKEGVQELISNLSKDKDGKILVEDIVKLASQTGESNEQEETPRQ

SEQ ID NO: 46788 - protein, 75 aa, Oryza sativa
MVAAAATALNALVALGSASGTASKSSFVKSIVKAHDVVIFSKSYCPPPPPTPLIYPLCIPLYCLRLACWEFRFGM

SEQ ID NO: 46789 - protein, 557 aa, Oryza sativa
MATAAAAAAAAFSPLRRRLPLHHRGRRLLAVAAALSPEPPAPTPTTSPPPPPRKGYFPKRNEVLELTCEGLAFKGKGVCRVDGSTFVLLCDGALPGERLLARVRRIRRGAFAEAAKLRTLEPHRDAVDAPCPLAADCGGCKAQSLAYAAQIRHKHLQVRELLVNFGKFDPRKMESSEPDAILKPIVPCDEIFRYRNKMEFSFGTKRWMQREWKEEKDDEVVKEEKVEGDGYSLGLHAPGFFDKVLHVEKCLLQSEPADKVLAIVQETWLDPALGLTPYDVHKHVGFLKHLMIRTGRNITTGAPEVMVNFVTSCYKPELLEPLVNNITKIPEVVSIMNNVNTSVGNTSVGEEEYTLYGKPTITEMLRGLTFQISANSFFQTNTKQADVLYKLIGESAGLKGDGSEIILDLFCGTGTIGLTLARRAKHVYGYEVVPEAIADAKKNAKLNGISNATFVQGDLNKINETFGKEFPKPDIIISDPNRPGMHMKLIKWLLEVKAPRIVYVSCNPATCARDLDYLCHGVEEKDLKGCYELKTVIPVDMFPHTPHIECICVLELC

SEQ ID NO: 46790 - protein, 835 aa, Oryza sativa
MIHKGMFRFRETIRVWQAVHLIMLSQLWAQKMRLILTCLTQVHFNMGTLLQNMQTIIIVTHKLQMVLLSSKEEQINIQTAPGYGTSNSYYQNSTWNGGSFENNYAQSYQNYPSSNTNTVQHSISVPTNSFSYQQQYNQWPYYYNHTVPNPAGDPVGNSNSIVNTTSSYSYPSIQPPPPGTTSWKSNSSSSIAPPIQASGGPGPQDQYINQAHAPVLENQYAGQVAGNPRSQNHYASQTPACPQSTVNLNPVQQSNHGDQQNTVPRIAPGFSMVIPKSEKKILGADLSKKPAYVSVSMVKNDARSLPFSLHNYATRNLNCCKDEAQKAACQSMIEEIKNSAIADGTLLTKNWDTEPLLPLVQNVATIPETSANNSSPSLSTSTNRRRQKSRWEPVVEEKVTDKVEPVKGLVNGTTHNNLEAKNRMSNNWDSRKFFQSHHATANKVSQRPAKKQKISSYSDQMQNGNASSDSDKEQDLTKYYASATALANSPEEKKRREHRSKRFEKNQNSSSKSRNSAASKDVMANIHARRAVSALLARSCEDGTTLAVEDMDWDALTVKGTCQEIEKRYLRLTSAPDPATVRPEHVLEKALSMVETSQKNYLYKCDQLKSIRQDLTVQRIQNELTVKVYETHARLAMQAGDLPEYNQCQSQLKRLYAEGIKGCYFEFSAYNLLCVMLHSNNKRDLLSSLARLSKQAKQDEAVKHALAVHSAVSSGNYVLFFKLYKQAPNLNSCLMDLYVERMRFEAVKCMSKSYRPTIPVGYVAQILGFSRIDSEASEECEMWLKAHGAILSIDNSRDLQLDTKASTTTLYMPEPENAVAHGDASLSVNDFLART

SEQ ID NO: 46791 - protein, 148 aa, Oryza sativa
MKITALLVLKPSSSGGGASSSGGGGGSGGPEAVVLANATDVSHFGFFQRGAAREFIVFVARTVAQRTQPGQRQSVQHEEYKVHSHNRNGLCAVAFMDDHYPVRSAFSLLNKVLDEYQKAFGDSWKAATKDATDAAQQWPFLTDALTKF

SEQ ID NO: 46792 - protein, 92 aa, Oryza sativa
MLQGEAPHHHHRKQSAWTKYIYTMYSKLQSQLGSLIGFRAKWLDFYGQTSLELHVRVCHRNVIAIDSPSAQVFKKRKKRRTMISLSLAWIFT

SEQ ID NO: 46793 - protein, 757 aa, Oryza sativa
MALRAHPLLSSSSLPPPTLPILCLRCPGSSLSSKRFLRSHSRSAIRPWRNPCAARPGGPRFLGQDDADSDADEEDEEEWRWAPSAGPSGAHLVGAVDEDDSVGEGGGGVGWGAPDGDAAGGSGIRESGVDDGGQVGEWDLPMSSFRGRVQVQHHQEEEEEEEEEEEDEDGGGCEWSDPGFFLRGQEEEASSSVSTTTAMEEILTLARSPAVDGQAFAEFLAGYGRGALSVEECVELMRRMGEEGLALGCLHLLRWMQAPEEEPLLLPPQAWLLAVVALGRAQMADEVLEIVESLPPERRFSEAVLYNAAMSGLAYRGRYDDTWKVFKLMEKKNIQPDHMTSLIMLDVMNKSKTSAKDAWEFFQRMERKGVKWSLDICISLIKIFCDNGLKTEALIIQSAMEKKGIASNTSMYNTLINAYCKANQIEEAEGVFVEMKEKGLSATAMTYNILMGAYCRRLQPEVVESLLLEMQDLGLRPNARSYNFLIRVYGQQKKMSEKAEDAFLRMKTDGIMPTSSTYTSLLCAYAVNGLHEKAYLTYVDMKREGLKPSLETYTALIDMFRRAGDTEKLMETWRSMINEKVPGTRVIFHMVLDGLAKHGLYVQATDVIYEFRRAGLQPTVMTYNILMNAFARGGQHYKLPQLLKEMAAMELKPDSVTYSTMIYAYARVRDFSRAFYYHKLMVRSGQLPDVSSYKKLLNTLDVKAARKNIKDKNAIVGILKGKSSLKHRKEKKDEFWKNRKKRSMMNHVYGYPRKRFL

SEQ ID NO: 46794 - protein, 1227 aa, Oryza sativa
MPRKKASSPSPTSTARETRSSSARGHASPTPTPTLRRSTRETTSRFSSSSSSSANKHEGSPAKQSANNNTAKRKMNNAAADTSTRPIKKNKKLNAKSYLALFSTPQQTAKSPPAPAPPLLVQVDDDNASTVPMQDSGTLLEHEEADTQEQGYQSGLHKVPEVVLEETDVSKNKADEHASTSEPLIPVDLCSNDNASESSHGMEVKEQTVGCSNPCFVTDLPNRPCSIVHHEEAKKTIEAGDPREIKGASTSNQALVTHSDGTDYNEYLCAVCRSRETPGILKSCDGKDCKNRYHDSCLDPPLQYVSLGIWLCTLCTKKRLQFGLFAVSEGIESLWDVKEGVQNNKQYFVKYKNLAHVHNQWLPESDIIRTPGGQDLINKFCKRIQKEKTIRWKQEWAEPHRLLKKRPLMSEKEAEEFFNSLGDKFAYCNVEWLVKWKDLGYEYATWELETSSFLCTPEAKDLKRNYESRHEDARRGFDPAKINKGKQCLFQKLQKLPDGFPPGLDKDHLSSLNRLREFWHNSDGAICLDDQERVIKTILFSMSILPDVCQPLLIVSTSASLSLWEAKFNRLAPSINVVVYNGEKDVRKQIQDLEFYENGLVTFQVLLSHPDAILEDIQTMESIVWEAVMVDDCQSLRVSKCLEQLKHLSTSFRMVLLSFPLKESIPEYINLLSFLNPEGSVISSSSNGDFTDTGDILATLKEKFARHVAFERKADSSKFLEYWVPARLSRVQLEMYCYTLLSNSPALRSHSRTDSVGALRDILVSLRKCCDHPYLVDQSLQSSLTKGHSLTDILDIGVCASGKLLLLDKMLQEIRNQGRRVLIVSQSGGGAGNPMGDILDDFVRQRFGFESYERVERGLLVPKKQTALNMFNDKTKGRFIFLIDSRACVPSIKLSSVDAIIIYCSDWNPTNDLRVLQRISIESQSECVPIFRLYSSCTVEEKTLILAKHDHILDSNVQNVMPIVSHSLLSWGASFLFNRLEEFQKHDYSSKDSEDDGLFMNNVFLEFAAKLSTNVEASTKMENAVISRAQQSGSFYSRDIAVISEREGISAVDGDLPKFWTFWSNLLGGRSPHWQYISEPVQRNRRKIQNMEDQMRIPAEETDEAIMKRRKIGEIMDSSPKILPVKDNDAVLPENSTASSSHETSVDDTWQELGAESLQGTQKGLHTQLKPELSKLYELLELPETVKCLCEELLDYILKNHQVSQEPKGILHAFNIALCWRAASLKA

SEQ ID NO: 46795 - protein, 253 aa, Oryza sativa
MHFGLKVGSYHASSLFVATRPPTAGVVSRGIGVEGVSTVLAGLWGTGVGSATITENVHTIAVTKMGNRRAVGFGAIVLILLSFVGKVGAFIASIPDVLVAALLCFMWAMLCALGLSNLRYSAKGSSRNSIVVGLALFLSLSVPSYFQQYRLQPNSNSSVPTYFQPYIVASHGPIHTGSSGVNYILNTLLSLNMVIAFLVALILDNTVPGGRQERGLYVWSEAEAARRESAVMKDYELPFKIGHAFRWVKCVGL

SEQ ID NO: 46796 - protein, 540 aa, Oryza sativa
MSSYVTTPHHHHHHGCCSGSRRLQAPAPPARPRLVVAAAARHVALPPRRAVASRAMSAEAPLGVAPAAAEEEMAAVVDEMAEEAAVWCAVHGLVVGDRAEPRSGTIPGVGLVHAPFALLPTRFPASFWKQARELAPIFNDLVDRVSLDGEFLQDSLSRTRQVDDFTSRLLDIHAKMMEVNKEEDIRLGLHRSDYMLDSGTNSLLQIELNTISSSFPGLSSLVSELHRTLLNRHGKVLGLDSKRIPQNWAATQFAEALSMAWTEFNNKSAVIMMVVQPEERNMYDQYWLINHLKESHGVKTIRKTLAQVEAEGQVLPDGTLVVDGQTVSVVYFRAGYSPNDYPSEAEWRARLLMEQSSAIKCPSISYHLVGTKKIQQELAKPNILERFLNNKEDIAKLRKCFAGLWSLDNEEIVKTAIEKPDLFVLKPQREGGGNNIYGYDLRETLVRLQKEQGEALAAYILMQRIFPRASLTHLVQGGVCFEDLTISELGIFGAYLRNKDKVVLNNQCGYLMRTKVSSSNEGGVAAGFAVLDSILLTDEW

SEQ ID NO: 46797 - protein, 464 aa, Oryza sativa
MSAATEEGRPDGEEDSPRAEAFLEILGRVQPGDAEAELSSCGIGPTAEVAEQVLRSRVCYSRPKSAVRFFVWSGRSVKHTGYAWNLLVDILGKADMEEPMWDAVRTMNKEGGGLVTVATFASIFSSYCASGNLRKAVEAFDVMGKYGVEPDAVALNSLLSAMCRGEGRAQAAQDLFERTKATVAPDADTFGILLEAWEKEGNAQRAKSTFGEMIVRVGWDAGNMPAYDAFLSTLVRGDQFGEALKFLQVMRSKGCLPGLKFFARAIDLVVRKRDYANSLAIWQMMISDAGLVPNLPMYNAMIDLCCSVGDTDYALRMLDEMPFNGVFADFITYNAILEGLIKQRKAREAEAFLAEMSKNEQLPSPTNCAAAISMFSKEFNPSAAIDVWHCIVEHQITPADESARELIVGLLDFGRFAEVKKYTDEMLDMGIELPQSTIDNMKRTFDKVGKHHTYDHIARRPKRC

SEQ ID NO: 46798 - protein, 277 aa, Oryza sativa
MQGGGGGDSSGGGGGEAPRPSRYESQKRRDWHTFGQYLRNHRPPLELSRCSGAHVLEFLRYLDQFGKTKVHAAGCPFFGHPSPPAPCPCPLRQAWGSLDALVGRLRAAFEEHGGRPEANPFGARAVRLYLREVRDSQAKARGIAYEKKRRKRPPTSSSSSQAAAAAAAATSPASPAASPTPPPPPPTERSADVRPMPPEGHFFIPHPHFMHGHFLVPGGDADHHHQVSNAGNGGNTNTNTNTNTGGGGGNGDEMAVAMAAVAEAHAAGCMLPLSVFN

SEQ ID NO: 46799 - protein, 288 aa, Oryza sativa; identical to SEQ ID NO: 44004

SEQ ID NO: 46800 - protein, 436 aa, Oryza sativa
MSAAAASSAAGDSAKQPLLHHQRGNPPHVASVSSPSLPSAPPGALAGGRRFPGGLDVPNLKKRGGGTRSWIRVEAATASVQTLEVDKATMMRRCELPARDLRLLDPLFVCPSTILGRERAIVVNLEQIRCVITADEVLLLNSLDSYVLQYAAELQRRLLQRAEGDELPFEFRALELALEAACSFLDAQAAELEIEAYPLLDELTSKISTLNLERVRRLKSRLVALTRRVQKVRDEIEQLMDDDGDMAEMYLSEKKLRTEASFYGDQSMLGYNSVGDGTSFSAPVSPVSSPTESRKLEKAFSLCRSRHDSVKSSDNTATEHIQELEMLLEAYFVVIDSTLNKLTSLKEYIDDTEDFINIQLDNVRNQLIQFELLLTTATFVVAIFGVVAGIFGMNFETSVFSIQNAFQWVLIITGVIGAFIFCGFLWFFKYKRLMPL

SEQ ID NO: 46801 - protein, 378 aa, Oryza sativa; identical to SEQ ID NO: 31978

SEQ ID NO: 46802 - protein, 292 aa, Oryza sativa
METSAAAGGAHLIYVSSDDEEDETRVLLAESYSAEEIQIQQAILLSLDPSSDADAAHSSASSSRPSGAASTSDEPSSLPDRKGKRKLSSEEDGPIESTRKKRRKRGRFKCSVCMEKLQVSEQFTVSFCAHAFCNSCIGRYVAAKISENVAVIGCPDPGCEEGFVEMDTCRDIIPPELFDRWSVSLCELALGEKKYYCPFKDCSALLINDNDGAEKKIRETECPHCHRMFCARCRVPWHDGIKCKEFRKLGDDEKGEEDLMFKKLAGKKKWQRCPNCKMFVSRIDGCLQIKCR

SEQ ID NO: 46803 - protein, 425 aa, Oryza sativa
MAIPGSLFYRSPALQVIYVLCVLAVLVPDAGGRRHHQIQLQPECPTFTCGAHLRNASYPFRRRGDPPECGVASYELTCTDDKAIIQVDNGTYLVRGINYTDATFSVVDANMLDSSNSCPLPRWNRTPYRRYGVVEDSSRNIVQELMPSYSTITAAFVTCSREVTNNGMYSPVACLSNSSSFVYVLTGWFANYIKSLEPSCGYLAMTPVASAWLHPNASYADVVKLMRGGFAIQFPDTINLYSSFKECMAELLQDIRDGDQPKSSERNQYRIELVSLIEYGILQCATQGSRPTRAVMAIQLFIRRTPIAVWTLKCIAVSCRFILPPLVVLTFLVHKYWKRRMIIDAVEKFLRMQLMIGPTRYAYTEQGISGRRSAKEAMALYIKVFYSQVMSMWLSRCWETTIVMEKSSSVKSPPLAGFTMSMWFV

SEQ ID NO: 46804 - protein, 230 aa, Oryza sativa
MQKLIKKTPRLLVSSLVHFSKFLVLLICVILITFDLCDVKTAVKGKKRKSQPGGTEEKERKSSESLFMSHYPSTLKKQLVDDWEFVTQLGKLVKLPRSPTVDDILKKYLEHRTKKDNKINDSYAEILKGLRCYFDKALPAMLLYKKERQQYSEEVKGDVSPSTIYGAEHLLRLFVKLPELLASVNMEEDALNKLQQKLLDILKFLQKNQSSFFLSAYDGGSKGTDGIKTK

SEQ ID NO: 46805 - protein, 458 aa, Oryza sativa
MALSRRLLPLLLRRGSTPSLSPARALSTAAVTADAPAAAAAAAEEEAMTIKGVRISGRPLYMDMQATTPVDPRVLDAMLPFYLSRYGNPHSRTHLYGWESDAAVEEARARVASLVGADPREIFFTSGATECNNIAVKGVMRFYRDRRRHVVTTQTEHKCVLDSCRYLQQEGFEVTYLPVRPDGLVDVAQLADAIRPDTGLVSVMAVNNEIGVVQPLEEIGRICKEKGVPFHTDAAQALGKIPIGVNQMGIGLMSLSAHKIYGPKGVGSLYLRRRPRIRVEPQMSGGGQERGIRSGTVPTPLVVGFGAACEIAAKEMDYDHRRASVLQQRLLDGIRGQVDDIVINGSMEHRYPGNLNLSFAYVEGESLLMGLKEVAVSSGSACTSASLEPSYVLRALGVEEDMAHTSIRFGIGRFTTEEEVDRAIELTVHQVKKLRDMSPLYEMAKAGIDLKSIQWAQH

SEQ ID NO: 46806 - protein, 331 aa, Oryza sativa
MEGFSRDLLCGIGKGGDGPRGEVRPRVDMEAEEVELNLGLSLGGRFGLDRRGEKLARSSSVAAILAAPTEPSAPPSGLFRTSSLPTVAAAEAAKKQGVDELNCRRPSGGAEAEPAAARLPASGSPSSGSSDGEGRRLEVNMTDTLMRTSSLPAGIEDEWRKRKEAQSLKRLEVKRKRIERRNSLTSNISKEAVGQILEEMNAGAEKVESCDDVATGNKKTGGNVNHSSDRNRCTGLPPVHRATYTQQRGSLSGIPTKHIPAMKGSADAEEHNVPSAATEHRNGAAIATPPFSALAVRAVALASRGEQLRATGRVAARGLKASCTSTGKARR

SEQ ID NO: 46807 - protein, 385 aa, Oryza sativa
MSSSSSAARTLLSPAAPPVPRRGVVRPARCSGGGGAAAVETAASGAKVCTVSNRGDSLAICRVLNGMWQTSGGWGRIDRDAAVDAMLAYADAGLSTFDMADHYGPAEDLYGLFINRVRRERPPELLEEIKGLTKWVPPPVKMTRSYVEDNINRSRKRMDVSALDMLQFHWWDYANPGYLDALKHITDLKEEGKIKTVALTNFDTDRLQIILENGIPIVSNQVQHSIVDMRPQRRMAELCQLTGVKLITYGTVMGGLLSEKFLDTNVSIPFAGPPLNTPSLQKYKRMVDAWGGWSLFQALLQTLKKVSLKHGVSISTVAVRYILNQTSVAGSMVGVRLGLSEHIKDTNAIFSLELDEEDMNSITEASNKGRNLMDIIGDCGDEYRA

SEQ ID NO: 46808 - protein, 487 aa, Oryza sativa
MAFATSTLPFAPSNPSPSSRSAAAAFSPRGGVHFAAARSGLPLACAAPRHRGRPPPRRRRGGCLVVWASADYYATLGVPRSASNKDIKAAYRKLARQYHPDVNKEPGATDKFKEISAAYEVLSDEKKRALYDQYGEAGVRSAVGGSAGAYTSNPFDLFETFFGASMGGFSGMDQGTFRTRRRSTAVQGEDIRYDVNLGFSEAIFGTEKDIILSHLETCDACAGSGSKIGSKMRICSTCGGRGQVMRTEQTPFGLFSQVSICPTCAGEGEVISEYCKKCAGEGRVRVRKEIKVKIPPGVSKGSTLRVRGEGDAGPKGGPPGDLFVCLDIEEPADIKRDGINLYSTVSVSYIEAILGTVKKVRTVDGNSELRIPPGTQPGDVVVLAKQGVPSLNKPSARGDHLFTIKVTIPKRISGREKELLEELASLSNGGFAGAPVKPKSIRQENETTVAQENSDQPDEGEGDWLKKLQDFAGSIANGAAKWLKDNL

SEQ ID NO: 46809 - protein, 457 aa, Oryza sativa
MSSMNKTRAENGIFNQWRNSSSPIWSCSLSILSPKGAIASPLSMEMMASKNPTKTLLLLLLLVFFLSLACSQPLHSEPMSTTTTATQPAPPPPPPQSKIPHAEAGGAARLRRIVLGVLFGSLTGFLLSLAFLYAIRVAILHAKYAPAIVRGPVSFTPQISPKNLHSALPSAQPLAHGPNGKYYKLVLDNDVTVAVKRLEASRPEASPSSMPNVSKSDMRRVQRQLELLARVRHQNVMGLKAYVREADRLSLAYDFVPGGSLEDVMKRVRSLQVNLNWDARNRIAIGVAKGLRYLHFECTPRILHCSLKPSNVMLDEDFEPRLADCGVSRLIASGSADPELASSLYSAPECYQSSRYTDKSDVYSFGMILGVLLTGRDPTDHFFSGETGRGGLARWLRHMQQSGDAKDALDSSVLGEEGEEDEMVMAVRVAIICLSDLPADRPSSDELVPMLTQLHSL

SEQ ID NO: 46810 - protein, 651 aa, Oryza sativa
MRIRRYAARLLASSTATAPSSLPPPPAASAAWCHAAADDCAICDLTRSASPQVVAPDAIKQKGHIAGRALEPELRSDPRVGLAERTPVPEDQGRDIDDGPPAKRSLTFTDAAARLEGSGNVGAGVATEPAARLGAPVANGAVSGQEDRAATCLADESAAELIATGVTSLVTGATAEPEVLKGASFANTNVTEPRVSERVPLVREAATEPEAEVSMREVTEGALPDGEGAAKLEITGGLSRESADKMEVTKGISLVTEASADSELAQRVPTEPGVELSLPEVTERVPVVTEDFTELGDTFSGLHITGFASLDNEGSVEQEVTGSGSLVNEATEMEVKEGTCIFTRVATELGDTGRVSACSGDGDIALDEPRPPDCVSEVANVNVGNAGEAVASKVQPFRDNAESVGGSINSTGNGHVSSKSPTADEAAPPGGCTDTPSVSCLSDIVARSIGKSGRTDIICYVRRRGKRKLEMVEVKEENVEMDDSAICDQYDDKVASERTGPCESVTSTAVSVEIKIADIKRELEDNSTASKGKKKRAKRFQCEIDYCRMTFKNRAELSVHKKNTCTVKSCGRHFRSHKYLRRHQSIHNDDMPYKCPWEGCSMAFKWSWDRGEHFQVHAGKRPYKCTTPGCSKIYKFVSDFTRHKRRCKPQR

SEQ ID NO: 46811 - protein, 441 aa, Oryza sativa
MAPPAPAALLLPSNHSYRPLLPRPILHHATGFACASASPSPPPRLRLRLRHAAPLRAAALPAIAIAPGDHWGNWAFLLSAAAFGTWSEESTSWGAALSGSLVSIMAGLAATATGLVTAGAPAQDAVMDYLLPATVPLLLLGADLRRVVSTTGDLLKAFLIGSVATTIGTTIAFLLVPMKSLGQDSWKIAAALMGSYIGGAVNYVAISEALGVSPSVLAAGVAADNIISALYFMTLFSLAAKIPAEPKTAQEGSNGGESEGGRRMSVLHGGAAVALSFVICKAGSAISSQLGIQGGTLPCVTALVVALATAFPRLLGKLAPSGETIALILMQVFFTVVGANGNLVDAVTKAPSVFAFALVQVTIHLGIVLAAGKLMGFERKPLLIASNANVGGPTTAAAMATAKGWSSLIVPGILVGMFGISIATFVGIGFGMFVLRRICGA

SEQ ID NO: 46812 - protein, 511 aa, Oryza sativa
MANIDMGKILAGLENDDARVPKTKLVCTLGPASRSVPMLEKLLRAGMNVARFNFSHGTHEYHQETLDNLRQAMHNTGVLCAVMLDTKGPEIRTGFLKDGKPIKLTKGQELTVTTDYEIKGDENMITMSYKKLPVDVKPGNVILCADGTISLTVLSCDPKAGTVRCRCENTAMLGERKNCNLPGIVVDLPTLTEKDKEDILGWGVPNDIDMIALSFVRKGSDLVTVRQLLGQHAKRIKLMSKVENQEGVVNFDEILRETDAFMVARGDLGMEIPVEKIFLAQKMMIYKCNLAGKPVVTATQMLESMIKSPRPTRAEATDVANAVLDGTDCVMLSGESAAGAYPEVAVKIMARICVEAESSLDNEAVFKEMIRSAPLPMSPLESLASSAVRTANKAKAALIVVLTRGGTTAKLVAKYRPRVPILSVVVPVLTTDSFDWTISSEGPARHSLIYRGLVPLLAEGSAKATDSESTEVILDAALKSAVQKQLCKPGDAVVALHRIGVASVIKICIVK

SEQ ID NO: 46813 - protein, 284 aa, Oryza sativa
MAGGDNNSQTTNGGSGHEQRAMEEGRKQEEFAADGQGCGLAFSVPFIQKIIAEIFGTYFLIFAGCGAVTINQSKNGQITFPGVAIVWGLAVMVMVYAVGHISGAHFNPAVTLAFATCRRFPWRQVPAYAAAQMLGATLAAGTLRLMFGGRHEHFPGTLPAGSDVQSLVLEFIITFYLMFVISGVATDNRAIGELAGLAVGATILLNVLIAGPISGASMNPARSLGPAMIGGEYRSIWVYIVGPVAGAVAGAWAYNIIRFTNKPLREITKSGSFLKSMNRMNSST

SEQ ID NO: 46814 - protein, 178 aa, Oryza sativa
MVGESEGRPLRVGLVCGGPSPERGISLNSARSVLDHIQGEDLLVTCYYIDCGMNAYAISPAQLYSNTPSDFDFKLESLAQGFQSLFDFAQHLAANVDIVFPVIHGKFGEDGGIQELLEKANVPFVGTPSKNCLLAFDKYNASLELNAQGFLTVPNFLVEVKLLDFCVVYSMQYCSYCH

SEQ ID NO: 46815 - protein, 75 aa, Oryza sativa; identical to SEQ ID NO: 46428

SEQ ID NO: 46816 - protein, 554 aa, Oryza sativa
MSAGEDGVYFRMRFFFFFFLVVLCLLDSNISTSHGCFVEERTALMDIGSSLTRSNGTVPPSWGRGDGDDDCCLWERVKCSNITGRVSHLYFSNLYDSLEVLNAHGDSFWRFNTTVFSSFPELQFLDLSSIYPSSLNIDGLVGLKLPKLQHLNLSYNWLQESILADLGELVSLEVLDASSNAMSGVVPTAVLKNLTNLKELNLSANGFSGSLPGSLLELPHLDPSGSSLAGRTPINSSLEPVSLQVLNLNNNRMSGALPTERAFGYLRNLRELHLSSNNFTGNISTFLLSLPHIERLDLSGNTFEGPIPITPSSNLSLSLKGLRFSQNNLSGKLSFFWLRNLTKLEEINLSGNINLAVDVNIPGWAPPFQLKQLALSGCDLDKGIIAEPHFLRTQHHLQELDLSNNNLSGRMPNWLFTKEATLVNLNLGNNSLTGSLSPIWHPQTALQSIVISTNRITGKLPANFSAIFPSLSTLDLSDNNFHGEIPMSLCSIKHMKDLSLSNNNFSGKMPTCVFTDFLELWTLSASNNQLGGLVFGGMKKTVHRVCNAPTEQQI

SEQ ID NO: 46817 - protein, 185 aa, Oryza sativa
MATAMTNLIPAITFLMAASAGQERVNVRERGTMAKISGTIVCVGGATAMAFFKGPKLLNYTLGDLNMLLHSPAISKWVLGALCLVVSSSCWSLRLILQVPICKFYVDPLSLSAWTCFFSTLQCAALAVFLVPDANAWKIHSLFELSSYAFAVSSELPCVLLCVCPDSRMDKFWFSGSELNRAGHK

SEQ ID NO: 46818 - protein, 511 aa, Oryza sativa
MAEGERELHVRALDGRSTVVALAAAASVRDLKAALRSSFPPAQVSPSFHLFLKGTKLRVEAEIGTLAVGEGEFIVLVPFARKSQQCSPVAMAEQGQITESPRSSQVSTGANSARRGITDNLSSIPSSPHAETASRYFSSGANSAWQEIMDDLSSISSSPQDDSASKNFCAQSTIPCSGNSVEDVSTDQRLPTGNSNKRRKPCKENGNAFNEMPTSGANSAAGQPSIDKKSSIARSAATSCHGTCHLGPAEMADHLKQGLGKEGQIVHIEEIPCRAASFAELPNHLSEATREALKSIGVSRLYSHQSRAIHSSIAGRHVAIATSTSSGKSLCYNIPVLESLCQNLMACALYIFPTKALAQDQLRSLLEMKNALHTDIDVNIYDGDTPREDRTWIRDNARLLITNPDMLHMSILPCHGQFQRILSNLRYIVIDEAHSYKGAFGCHTALILRRLKRICSNIYGSHPTFIFCTATSANPREHVMELAKLDNVELIENDGSPCGFKYSSCGIPRYI

SEQ ID NO: 46819 - protein, 623 aa, Oryza sativa
MMHQCGTAIETSVTENGDISGSTNEGKEEDSLEKHNRGVTDGDSEVIMNLRSGLTSLQNLLTSNPGLAAVFASKERLTPLFECLALPVPPESNIPQICLSVLSLLTKHAPCLEAMVAERTSLILLFQILHCNRSCRDGALTVLYSLASTPELAWAAAKHGGVVYILELMLPLEEEIPMQQRVAAASLLGKLVGQPMHGPRVAITLARFLPDGLVSAIRDGPGEAVVSCLEQTTETPELVWTPAMAASLSAQLSTMATDLYQEQMKGRVVDWDVPEQASGQHVMKDEPQVGGIYVRLFLKDPKFPLRNPKRFLEGLLDQYVSSVAATHYEANAVDPELPLLLSAALVSLLRVHPALADHVGYLGYVPKLVSAMAYEGRRDTMASGQTTSRLQAEPSNQENSADSTVQTPQERVRLSCLRVLHQLASSTTCAEAMAATSAGTPQVVPLLMKAIGWQGGSILALETLKRVVGAGNRARDALVAQGLKVGLVEVLLGILDWRAGGRQGLCNQMKWNESEASIGRVLAVEVLHAFATEGAHCAKVREILNSSDVWSAYKDQKHDLFLPSNAQSSAAGVAGLIESSSSRLTYALTAPPPQPALVRLPSTAPALPSAPANPSGRHSYQHS

SEQ ID NO: 46820 - protein, 228 aa, Oryza sativa; identical to SEQ ID NO: 40524

SEQ ID NO: 46821 - protein, 154 aa, Oryza sativa; identical to SEQ ID NO: 37082

SEQ ID NO: 46822 - protein, 418 aa, Oryza sativa; identical to SEQ ID NO: 30103

SEQ ID NO: 46823 - protein, 1024 aa, Oryza sativa
MGGVSGKLVWVLLVMCSSWLIAAVHAQQAATTDPIEVAALEAILGRWGKTTSPLWRMSGEPCRGVPVDGSTDLDGNPKNNPGIKCDCSYNSGTVCHITQLRVYALNVVGQIPAELQNLTYLTYLNLDQNYLSGPIPSFIGQLTALTELHVGFNPLSGSLPKELGNLTNLNLLGISLTNFSGQLPEELGNLTKLRQLYTDSAGLSGPFPSTLSRLKNLKLLRASDNNFTGTIPDFIGSLSNLEDLAFQGNSFEGPIPASLSNLTKLTTLRIGDIVNGSSSLAFISSLTSLDTLVLRNCKISGDLGAVDFSKFANLTFLDLSFNNISGNVPKSILNLQKLIFLFLGNNSLTGELPDGISPSLTNLDFSYNQLTGSFPSWVTQNNLQLNLVANNFILGSTNIGMLPPGLNCLQEDTPCFRGSPKYYSFAVDCGSNRSIRVSDNTMYELDSTNLGDSSYYVTSQTRWGVSNVGKLFQAPNDSKIIHSGEKIQNAVDSELFQTARMSPSSLRYYGLGLENGNYTVLLKFAELGFPDTPTWQSLGRRFFDIYIQGELKEKDFNIRKMAGGKSFTAVYKSYTTTVSKNFLEIHLFWAGKGTCCIPIQGYYGPLISALSITPNFSPTVRNGVPKKKSKAGAIVGIVIAASVLGSAILFGIFMVIKKRRRMAKQQEELYNLVGQPDVFSNAELKLATDNFSSQNILGEGGYGPVYKGVLPDGRVIAVKQLSQSSHQGKSQFVTEVATISAVQHRNLVKLHGCCIDSNTPLLVYEYLKNGSLDKALFGNGSIKLDWATRFEIILGIARGLTYLHEESSVRIVHRDIKASNVLLDTDLTPKISDFGLAKLYDEKKTHVSTGIAGTFGYLAPEYAMRRHLTEKVDVFAFGVVALEIVAGRSNTDNSLEESKIYLFEWAWSLYEKEQALGIVDPRLEEFSRDEVYRVIHVALICTQGSPYQRPPMSKVVAMLTGDVEVAEVVTKPNYITEWQFRGGNTSYVTSHSGSTTPKLSRQKEIDPLTQSPTITGVSHEHEGR

SEQ ID NO: 46824 - protein, 74 aa, Oryza sativa
MGGRPHLGFGEAGVIRSSTALGNLSVSLRITTKMKTGPHGDAGFGEGVVGASASTREIEDGAPWGCWVWRGSCR

SEQ ID NO: 46825 - protein, 410 aa, Oryza sativa
MTMDVAGDAGGGRRPNFPLQLLEKKEEQPCSSSAAGGGTGPSSAGGNGNNGSGPGGAGGEMQLRKAAPKRSSTKDRHTKVEGRGRRIRMPALCAARVFQLTRELGHKTDGEAIEWLLQQAEPAVIAATGTGTIPANFTSLNISLRSSGSSLSAPAHLRALPSPAAAARFGSRADAWDRVVSLGFPSEGPASSSSSPSPLLLNFHSGSVGLDVQPSPSAAAAAADLSRKRRWEQEMQQQQQQQQQQQQQQQQQYQQQMAGYTQSQMPGTVWMVPSNSTQGGGPSGGGGGGGGGSGESIWTFPQMSSAAAAAAVYRGSVPSGLHFMNFPAPMALLPGQQLGLGPVGGGGGGGGGGEGHMGILAALNAYRTQAATDAAGQQGGGGGGGGSSQQQHGGGGGGGERHQSISTSDS

SEQ ID NO: 46826 - protein, 491 aa, Oryza sativa
MFTGQTADPNCRIADFLRKTLDPPIPETVRNAITVLQDLGALTQDEQLTELGEKLGSLPVHPSTSKMLLFGILMNCLDPALTLACAADYRDPFLLPMAPDERKRAAAAKVELASLYGGYSDQLAVVAAMDCWRRAKDRGQEAQFCSKYFVSSNTMNMLSNMRKQLQNELAQRGFVPVDASACSLNARDPGIIRAVLMAGAYPMVGRLLPPRKNTRRAVIETASGAKVRLHPHSCNFNLSFRKTSGNPLVIYDEITRGDGGMYIKNSSVVGSYPLIILATEMVVAPPGDDDSDEEDGDSSEDETEKVTLGQHKEIMSSPDNSVSVVIDRWLRFDATALDVAQIYCLRERLASAILFKVKHPQDVLPPDLGATMYAIACILSYDGLPAMITSDDVATSQGSNQSSAESSRFSQGRRVGYIPPGGFLMSLLSDKPLNAPHFQKSFNHPDGASGHIRSSRTSVGRFDQSRHPQRNNSGPGSSAARTFKRQRNGAQ

SEQ ID NO: 46827 - protein, 219 aa, Oryza sativa
MAAFMASGRSTVAPSTTRSCRPAAGFVTPRSLFSWGGRSAPPPEFQYHDVAPPFPMSLVANTHLRGRELKCCYKATVDGFSATDFHRRCDFKGPCVVVGRTGGGVRFGGFSPEGYRSTDDYYDTLDAFLFYWPETDTDAAAKEAAVVVLPKVGGSGAALFDYARGGPQFCRNMNSAIIKGGSARDLKVDGCRDKGFRQVQALSMRGNTLLLFGDLNPPV

SEQ ID NO: 46828 - protein, 132 aa, Oryza sativa
MNDEQQEEAEKSVVGEFSTVKHVRGILSMGRHSDPNSGGSSFSILLGDAPHLDGQYAVFGRLTKGDDTLRKLEQLPTRREGIFVMPIERISILSTYYYDVDLESCEAEKSILRRRLSESASEVERWRRKCFA

SEQ ID NO: 46829 - protein, 296 aa, Oryza sativa
MAAMGQEDDDVDHYEVLCLPSGEEGAGLSLEQIEKAYRTQSRLRHPDKRSDDPNATADFQRLASSYNFLRDESLRRQFDARLRGRREAAARAAASGVKRRKAVSDLEERERAASTGQAVDAAEAARREDKRKAADVKRELEEFFAAKQSASSSTPPASAPGAPQDAPKTDKGKILKVSWEGGADYYNAAKLEEIFKQFGGVEDVVIKTRKSRSRGSAIVVMASKEAALSALQNHSVYNVFSVPLIVAPVQESGGVPTRSTHTPETRPSNLGGTGFNDLEASVFRKLQEAQKRKQSG

SEQ ID NO: 46830 - protein, 806 aa, Oryza sativa
MKVEEKKRSITVAPFECAWDEEFRFRETGRGCITFEASAHNDVTLVFREQPGSQHYHYKMDNSRHYIVILGSHRNKRLKIEVDGKTVVDVAGIGLCCSSSFQSYWISIYDGLISIGQGRHPNNNILFQWLDPDPNRNVQYVGLSSWDKHVGYRNISLMPSAPQNSILWSQIECAYVEPDGAGGHTRKQESKDGLDQRALANFLENWDFSDSIFVVGSERKVVPAHKVVLGSCGDFPFNLMMSRPAIELPSVSYPVLHSLLEYIYTGSTQISEWQLVSLLELSSQFKVKPLVMYCEEIIGCLKMSDAVSESSKKIQLSSGGSQAHQFYYFPFKAPLNTQKIEQFLVNGEHSDVNIYVNGHGLVTHAHKLILSLWSMTFDKMFTNGMKESSASNVFFEDVPVEAFFLLIQFMYSGELKVDIEEITPVLVELLLLSDQFGITALQFECCKRIIEFLSKDTVCSVLRAVSSIPSCKLLEEMCKRNFAEHFDYCTTACTDFVLLDEATFKDILQHGHMTVTSEERVLDAILTWCMEACDCFNWTSVHELLSTSRPEKLFGGRLTAINTLLPFVRFPLVQPSVLHLMEKSNLAKNIEAFRQLVAEAIEFSNAGLRMATNTCERFHHRRSSYKELQYISDGDNNGVIYYAGTSFGKHQWINPVLAKNITVTASSPNSRYTDPKALVSKNYQATCFAGPRLEDGKMCSWWMVDIGPDHQLMCNYYTVRQDGSATFMRSWVLQGSMDGRSWTSLHVHEDDQTICQPGQFASWPITGQTALLPFRFFRVMLTAPATGVSNTWNLCICFLELYGYFR

SEQ ID NO: 46831 - protein, 336 aa, Oryza sativa; identical to SEQ ID NO: 29724

SEQ ID NO: 46832 - protein, 148 aa, Oryza sativa
MVAWIRRRRRRQGWIHRAPSFVRPRSRRSTASRVGSDGRGGSGDLRRLSAPADADPPPLPWIRRRRRREGLIRRPPSSLHPRSRRSARARRRVVCGLLLHVRRLAHHLQAASAVGSDVMGGSSFPSVPTLSGCPGRDRRRGGPEWRRW

SEQ ID NO: 46833 - protein, 374 aa, Oryza sativa
MMGVGGGLGMEATNCGALLRELQQIWAEVGESEGEKNKVLSEIERECLEVYRRKVDDANRTRVQLHQSVATKEAEVASLVATLGEHKLYLKKDKSVVPLKEQLAAVVPVLENLKGKKEERLKQFSDIQSQIEKIRSELSEYSDGDDKANSLIVDENDLSTRKLNNYQAQLHALQKEKSDRLHKVLEYVNEVHCLCGVLGIDFGKTVNGIHPSLHQNGLEQSTNISNSTLEGLANTISNLKAEQRSRIDKMRETMESLCKLWKLMDSPQEERRQFNRVLSVLISSEEEILSPGVLSQETIEKMGAEVERLTKLKARRLKEIFMKKRSELEEICRSAHIEPDASTAPEQTNEMIDSGTMLCILLLLSSLVTIVYKL

SEQ ID NO: 46834 - protein, 522 aa, Oryza sativa
MTEFKVGSLDARATKIRNVPIAVTPEGFWCCPSQAVLQKTMKNQNQQAKPKGGASPLASKASSVQRAPTISSERRAHSTPTRSRINSDEQKCAPAENSTPNPPKVANDRPQKQHKISVGFGQLEMSDLKVVLYGKDGVAVKMSVHRNILAENSTWFADKLSRQSPMSSMEVPDCEDVEIYVETVGLMYCNDAKQRLIKQSVTRVLRILKVAELLGFQACVLSCLEYLEAVPWVGEEEENVVSSVQHLQSGNYGVSPILKRVCSDLTSPPNDTFVHIIELVLKSGEDRGRREMKSLVLKLLKENSSCTSTSVDIYAETLYSSCQNCLESLLTLFRQATADDFAEQSLDLKEPVFRQIALEADNLLWLTEILADRNAAGEFAVMWSNQGELAELHSKLPTKSRHLVSCVTARLFVAIGKGDMLPSKDTRKLLLDVWLQPLMDDYNWLQHGCRSFDRKVVEEGIGRTILTLPLEDQQTILLSWLGSFLKVGDSCPNLQKAFEVWWKRTFVRPYVEQGNQSQPGRS

SEQ ID NO: 46835 - protein, 578 aa, Oryza sativa
MAWHFTAAFMIATCLMLFPRSEQSSQGEVLQQLRKQLEYPRQLDVWNNPNSDPCYTQPTSVVTVACEGNAITELKIIGDRITKPPKFSGYPVSNITLSEAFVLDSFVTTLARLPALHVVILVSLGLWGPLPDKIHRLSSLQVLDLSSNFLYGSIPPKLSAMPKLHTLTLDGNFFNGTMPDWFNLYSNLTVLRLQRNRLKGPIPASIGKATMLSELALAGNSIAGEVPQLGSLNKLEMLDLRDNELDGELPELPTALVTILLSKNSLKGEIPEQFGQLNRLQHLDLSFNFLVGKPPEKLFALPSISYLNLAANMLSGSFSTSLTCSSTLGFVDLSTNQLTGDLPVCLNVNVNNRVVKFDGNCFSDDPEHQHETKYCQQPHKGRGSNKDVGLVVTVVGVVFIVLVLSLILMASNRRSCQRVLAEQQLLQKQMQDNSTSGMSTELLVNARYISQAVKLGTQIMPMYRAFSLEELKEATKSFERSAFLGEGSIGKLYKGKLENGTLIAIRCLALHQRYSIRNLKLRLDLLAKLRHPNLVCLLGHCIDGEVDESSVKRVFLVYEYVPSGTFPSYLSGKELKIK

SEQ ID NO: 46836 - protein, 455 aa, Oryza sativa
MEAPPPPPPDSWETADLDEPMSRLHLPSARRVSSSPDLADADADDPQHPSSGRPDSVDQLDQFLREALEKPRERLSVLRMEQDILKFIHDPTQTEFDFHGLPTSYLRLAAHRLAQHYFLQSIALQDNGLPDGSGSRIILRKTSAECRLPAVRLSDIQVNLPQDESNSIAKVAIKQRPQKHYHNNSSSGAHSSRANLQKSVEERKEEYNKARARIFNNNSSSGNAADGRPGDEVTLPNTLHRSSSLELSSGNRLGEGPEITLERSLTTASSSSRVNRNKTEKDPAFNRNRQNNRVAIFRDRESDRKDPDYDRSYDRYMQRFDPGFGFNGGSYTIQPLYAPAVNYNTEFPQLGSHGSPVPVEQQPQSIAQHIPGPWSPAQSPNAIGYRPPDGSMPPPYSPGHAGAPIRSSVFMHTPQQFAMPSRPGVTYVHPQEPMRPFAQTHQQQPEASLRLARPR

SEQ ID NO: 46837 - protein, 64 aa, Oryza sativa
MNFSTQDGTPLLNVVNPTFDYVPPKLVSLFITDTGGHSPSYMYRLIAEYYSADDLVVRRKSTSS

SEQ ID NO: 46838 - protein, 480 aa, Oryza sativa
MPREGTRMAGLWEREVGCLPPKLFANSVMASQDFVRSLGVQKRLRKHRGCVNTISFNEDGSLLLSGSDDRAAVLWNWQEGTPTFAFHTGHSDNVFHALFMPFSGDRSIITCAADGQVRHSQIQEGGRVITNELVDTEVAVHKLAIEPGNPHTFFSCGDNGSVFLFDLREKYVAELFKCAEVDHFGGDTIELYAIAIDPRKPSCFAVAGSDEYVRIYDSRKIDVNGNSSFGRPIEYFCPPHMMGENKDGISGLAFSQTSELLASYSYDNIYLFSREHGLHFNNIEVGKRLLMDEIEGDCHINTAPLPFCRDKLPTPQIFKGHRNKHTMKGVNFLGPNCDYVTTGSDCGRVFIWRKKDGELMRVMKGDKQIVNCVEQHPYGIVIANCGIDKDIKIWAPGGSENPDEVETDSCCSDISESYDSVYFDDYIFSSDFDSSEEDDEDDDDDDDDDDDDEEDGLSVSINEDMSYEEKDAASDHDSDV

SEQ ID NO: 46839 - protein, 737 aa, Oryza sativa
MAARAPPRLRAYPLALFFLPVALLGVLAGAAPIRGDLRRVVEVEGEPRSVVWAVQLSDLHLSAFHPERAADFRRHVGGALAMVNPSLVLITGDLTDAKSKDLLSSRQEKSEWLEYEELIDEVVGLSGLNKEIFYDLRGNHDSYGVPEVGGMFDFYEKHSINARLGRTGNVQSITLQNSGWKHLFVGFDSAASIGLRSPANVFGQPTDQLLVELDAALSQWDNYSSTSAVTKVTFGHFPMSFSSSTTSGGSLRDVFLKHALSAYLCGHLHTNFGRNLKRHHRSDRNHLSAKQYYQTNMHEGTSTSIGSNNCSTTTESVAEFWEWEMGDWRSARSMRILAIDSGHVSYTDIDFRFGSMDVIIVPTFPLDSRFMQRLSTPHDLNCQANSTSHFGMVRTLVFSKYKIIAVSVKIYDSFSGSHHLVLEKDMEMTSGEGARGAMYTVPWNWKAYVDESPDRYWLQIEAKDLTGKIYYSQLRPFSVNGLTAKVRWTWKEFRVMGCQWGQLYQPIMWSTLAFLCLLILIPRTLLMLYENHMLKCRSSKTAAGSSGRHLLISFEYFAAELSKMYSVWSGMLIYLLYLVFFPWFAGNAVTENHNKMYLYYKGWSTSNLANLSTAAPYIGLPDVMVIVLPHLLFVVLPAFLIIAAIAANRAAYLVHISHKAKKDDDHYEERKCIHHVWIFRCFRRFLILLCLPIAWRHWKHCRAIVRAYEANPFMDAPIYCFGVPLLVCLAIYRASAI

SEQ ID NO: 46840 - protein, 168 aa, Oryza sativa; identical to SEQ ID NO: 30430

SEQ ID NO: 46841 - protein, 336 aa, Oryza sativa
MDALPDAADAAQLAAAAAPPQKRDEWSESGIVRLLEAYEAKWLLRNRAKLKWSDWVDIAHEVSAHCAMENAAATGKPGSSTAKTPNQCKNKIESMKKRYRAESAAAARAGPAAAGAGPSWRFFARMDGLLKGPAGSGQPQAELSNSIDLRAPPPAKVEVDVDADFVSQLADAGPGALSELVSAYANGSIQEKLDKVENSGHVEGRAAESDVNVSSPRIKEANEDAEEVDKVWDMSKKRKNTEFDIAKSIELLASSFLKIERARMDLYRETERMRVEAEIKKGEMELKRTEIMAKTHLQIAKLFAKRLKECSSKTGGSSSVTAEVDNRAKKGENGSG

SEQ ID NO: 46842 - protein, 192 aa, Oryza sativa
MAEESREEGGGGGVVEDGDEAGGRPGKDGGSGGAGRGRDGNNGISTWEIEEMEDEAGPASLAPPAAAAAADVYVAVGKGGSSMEALSWALRRLASPRSFVYLVHVFPVVISIPTGFGKITIGSQQSLVGDWPAALLKSRSSSWTSLGGDLSLTEFFKAGIVTSCSSILALLASCRPTLGIFCPIANLAAKKL

SEQ ID NO: 46843 - protein, 343 aa, Oryza sativa
MQCGLDSEADECFLGSSGIRHGGRRVLRRVRRPWPVRAIHQQAGAGLPPVHDPEPPERAAPGRRRRRRRRRRRVQRRRGGVVVRGQQRQLVAAAVGVGVGADAGGVEAGVRQRVRRHGRRAQAPAEPRLRVQRHDGGVRHQAGQGPHHRQPRRLEGGARHHVGHRLPPGGAADGGPQPSVPEEAARIKRSGGRVFGLKDEPGVMRVWLPGENSPGLAMARSLGDMRLKRHGVIPAPEVTSRRVTGADLFMVLATDGVWDVLSNEEVVSIVCATPRKQHASKAVVEAAVQRWRAKFPTSRVDDCSAVCLFLHDHTLGTAAAASAAAAAAARKARRASTATPPAS

SEQ ID NO: 46844 - protein, 237 aa, Oryza sativa
MDGRRNGEHQPTRWPPGAGVEERDNASSSPASILLFALIGATATTAAFGQLRRTMSWFYTQLSRSEPYVYWEDIPRRPNRRGEAWGQYYQRMREKSEDQRERVERIRHMQDMFKKERSECRDYRTRDGHNPSYYQNSRREEWYWDAESFYANQRTNFRSMPREAMGYTMSQHYSILGLDRSRLEPFSDAEIKNAFRRKAMEYHPDQNQHNKEFAEAKFKEVMDSYEAIKLERQNGSL

SEQ ID NO: 46845 - protein, 643 aa, Oryza sativa
MQEEKNFAAVCKLGIPEQELAETADNIPDECCKEETSMEQDEGGDGTNMESESISEVAEHPNVEDEENTQDDGGSEMEISEEIISGFGCEEDFSEEVTSKYVSEGEISDSGAIVSLHVEMQKQPVENHAFEQDDSSTADNAFHQDDSTADRAFDQDDIRADGYDDSQKELDIGMREFRVASEEVGIQEANSDDPVDCTEDANMELGVFLCDLQDASEGSGIAQESSQEGNSACFNDGAQMVPDITTQTTEDASEESDTAQETTLDDNSTPLAAGAQMELGIGTSELIEGSSDVTEQSGIAEETCQDDNAGYFSDDDSQKATVITTCQLQVDYEENVIAQEADDNSTGVRDDAQNEPEQTCELATSEECHFTQKTIQNHGALEESVVIASASEDAHEESDPTQDGHEEDYSVGINSGAQKEGELDTSESGGASEGTTVHQEDDGHVNTTDLNGSAQKEITVSILDDSEELCSSEENNQSSNMLIPEFSDNFSAEEPQNQDSVAKESSLDDICNAFSGMHLKGDAYLDPTESMTCPGNRLIIARRRRTPEEEEYLRGFNPRAPNFLPLELDPESEKVDLKHQMMDERKNAEEWMIDYALRRAVNNLGPARKKKVELLVQAFETVLPHDEEEKKGITPTRPVQACN

SEQ ID NO: 46846 - protein, 141 aa, Oryza sativa
MGSPQQRTSADDWRRDCTAESREVHLDTNPSHHYELLHSLMLSNSGDEHREEAQGQGATSSLSLGRLRLCYPALSCIDDDVVYLLGNAAGRGAKTGGMMVAVDVRNKELRGVAKLDPEKNTLNTTTDTRVGRPEEDAEAAE

SEQ ID NO: 46847 - protein, 545 aa, Oryza sativa
MASHAVTDALLLPRSEGAVAGAVDFRGRPASRASTGRWSAAMFVLGVEIAERFAYHGVSANLISYLTGPLGESTAGAAAAINLWSGVATMLPLLFACVADAWLGRYRTIVLASLLFVVSMGMLTLSSALPAFHGDGGGCSYTSKSLSCAPSTAQVAIFYVSLYLVALAEAGHKPCAQAFGADQFDQNDAKESVSRSSFFNWWYFGMCSGTAMTTMVSSYIQDNIGWGLGFGIPCLVMAFALAMFLLGTRNYRYYVSTQSSPFARLARAFVALIRGSKDDALAVVDDDDGGDHREELRGVLRLFPIWATCIIYAVIFSQSSTFFTKQAATLDRRIGESFRVPPAALQTFISVTIIAFIPVYDRAFVPVARRFTRASSGITMLQRIGTGLVLALAAMVVAALVEARRLGVARDAGMVDDPKAALPMSLWWMVPQYVLFGLSDVFAMIGLQEFFYDQVPDALHSLGLAFFLSIFGVGHFFSSFIISAIDGATKKSGASWFANNLNRAHLDYFYWLLAGLCAVELVAFVFVSRVYVYKKRVPHNGCDVM

SEQ ID NO: 46848 - protein, 798 aa, Oryza sativa
MSSRRVRVTGLGRPDAGVSRTKKQQQNQGLPRQHQQQQEAGGGGRAGREHAHHLFDELLRRDTTSIFDLNSALSAVARESPAVALSLFNRMPRADLCTYSIVIGCCSRAGHLDLAFAALGRVIRTGWTAQAITFSPLLKGLCHDKRTSNAMDIALRRMPALGCTPNAFSYNILLKGLCDENRSQQALHLLHTMMADDTRGGCPPDVVSYTTVINGLLREGQLDKAYCLFDEMLDQGMSPNCITYNCLLHGYCSSGKPKEAIGIFRKMCRDGVEPDVVTYNTLMVYLCKNGRSMEARKVFDSMVKKGHKPDSSIYGTLLHGYATEGYLVQMHQLLDVMVRNGTQPDHYIFNILIGAYAKHGMVDEAMLAFSKMRQQGLHPNIVTYGTVMDALCRVGKVDDAMSQFDRLISEGLTPNGVVFRTLIHGLCACDKWDKAEELAVEMIGRGICPNTIFFNTLLNHLCKEGMVTRAKNIFDLMVRVDVQCDVITYTTLIDGYCLDGKVDEATKLLEGMVLDGVKPNEVTYNTIINGYCKNGRIEDACSLFRQMASKGVNPGIVIYSTILHGLFQTRRIAAAKELYLWMIKCGIKLPIGTYNIILQGLCQNNCTDDALRMFHNLCLIDFHLQNRTFNIMIDALLKGGRHDEAKDLFASLLARGLVPNVVTYWLMMKSLIEQGLLEELDDLFLSLEKNGCTADSRMLNALVGKLPQKGEVRKAGVYLSKIDENNFSLEASTAESLVFLVSSGKYDQHINSIPEKYRPTAKSRAVFSQKKNPGLFDAAGSYGVVTRLYSSSYIELVV

SEQ ID NO: 46849 - protein, 635 aa, Oryza sativa
MDRGEPSLKPEWLVRGHGAVAATSLWTGTSSPRADDQGRSISSRNQSSGRDRERSSQQSISRRSSGSIGPRRHDRDGTAKSRGYASFGRSNRDRGGEKDSESRNWESRLGPPDDPLYDGFKPFSSCRPERDRLNHTRLKVDTLNQAVGESLDNGVRSVSRKVSGGVSFEREFPHLGSDDKNGKQDVGRVPSPGISTPIQSMPLGTALDGRSSVLAEVPVLSGPTNCPVPSSLLRTGSSKQMEVPNCGTALSMAETVMQAPLKISTTPQLSIDTHKIEERTMKQCILRPRTPSSNKISVSSSSDKLKSKGARAGDSNGPVKGTMQLPLQLSGSFIRAPVKHELVKPTQSGSFQVLSREQNGTVNTAKESTSNPASPVLGRSYSVEPLRKPIVNQKLKGVANGLPLQLQGSFGERKSSAKDKHKFFELLRSKSLNGSCTSTVSSSTLLDEQNNSCLELFDSGVKCMEHGSSSCEEANSCEGSQQHLSDNEEINPPWEPHDVFDEGMQEVLSDNRDFNSSSEIADTQDVYMKPHTNNAGSSPSIIPAEIYDGSMGSNCSDDETVMLFEPIGTGEEESYPAQDRPSPEEMAFLVSLGWKEDEIVPPLKQEEIADCVSVSYVLLISAIIFYSLPIHNLHV

SEQ ID NO: 46850 - protein, 1013 aa, Oryza sativa
MEGSDSSRSRDKRDADDDVDARSSWKEDDEHEDVEDRKNRSGKSTRYIYDDEGDEDDYDVRRESRVSKVPRRSPEERSERRLSDGYKDRDGDSSRRRREDNNDWDSSRRSGSRTSGHDVSRSKSRSSDRTSSDRADTRDSRSSADQSKNRSAREAHDYRNELSERWEDTERRKGSARTDKNDQDRRSIDPRYDSPPARDDRIVDSVDNTRQNTLHYNAKSEESDEKCMDQVEGTNRISDNVETKDMLPYVDKDGHALSRDGRNKEARHHREKDDGDQGHSDSDNERNISMKEKIRVDAHGDYKSYRGRDRNRELEGSKEHWGSRQRHDSKEPNDYDVGAEWRHGQERLDGGNFHGRSGYRKDSRGRYESSKGPSSYGNRYDSSDSIEIRPNRNLDFGRESSVSGRRINMGSLQDLTPGTSDPSEENKRNYGNGEDAQERYYDDVQNMDGKIPSDSHTGRGGAIASNNSGAGPSGSGSIISPTPQQGPKGSRPSRGLRGRPNVRDPQRMGLPVPLMPPPPFGPLGLPPGPMQPIGPNMSHSPGPLGPGVFIPPFPGHLVWPGARGIDVNMLSVPTNLPIPPVAGPSFTSSVAAGPNHSIHLNQTGSGLGSPANAPGTGFNPLSTPNHEILQDKPPAGWTPQRGPAGKAPSRGEQNDYSQNFVDTGMRPQNFIRELELTSVVEDYPKLRELIQRKDDIVSNSASAPMYYKCDLKDHMLSPEFFGTKFDVILIDPPWEEYVHRAPGITDHIEYWTPDEIMNLKIEAIADTPSFIFLWVGDGVGLEQGRQCLKKWGFRRCEDICWIKTNKKNATPGLRHDSNTLFQHSKEHCLMGIKGTVRRSTDGHIIHANIDTDIIIAEEPTDGSTKKPEDMYRIIEHFALGRRRLELFGEDHNIRPGWLTLGKGLSSSNFHKEAYIKNFMDRDGKIWQGGGGRNPPPDAPHLVVTTPEIESLRPKSPPQKSQQQQSMPPMGSSSSTNRRSVMNSSQIVVTVVGSETMMPSPWSSNPMSGFGMPE

SEQ ID NO: 46851 - protein, 330 aa, Oryza sativa; identical to SEQ ID NO: 32312

SEQ ID NO: 46852 - protein, 791 aa, Oryza sativa
MAAAAAAAAPRHHHHHVVVGSSRSAPVSVSVCVRRWCGGASSSALLRVGMIGGASASSAEGRGRRRWWRRGRRALRVRAAAGMDIASAVEVINDLGFDTLTFLGVTVLVVPAFRVVKASPILGFFCAGVVLNQFGLIRNLTDVKLLSEWGILFLLFEMGLELSLSRLKALARYAFGMGLPQVLLSTLAFTAFELPPNGAIGTKILQFLFDSRPDLVNIRSVDEAIVIGAALSLSSSAFVLQLLAEKGELPTRFGSATLGILLLQDIAVVPLLVILPVLESQNVVEQSVWPMLLAESLKALGGLGLLSLGGKYLIRRIFEFVAESRSSEAFVALCLLTVSGTSLLTQWLGFSDTLGAFLAGAILAETNFRTQIEADIRPFRGLLLGLFFVTTGTSIDMELLIREWPNVLSLLGGLIAIKTLIITAIGPRVGLTLQESVRIGLLLSQGGEFGFVVFSLANRLGVLPLELNKLLIIVVVLSMALTPLLNEIGRRAAGIIDEKSETKEKPAEMVNYDATEPIVILGFGEMGKVLAKFLSAPLSFGLDKDAEGWPYVAFDLNPAVVKSARKSGFPVLYGDGSRPLVLQSAGVSSPKAVMVMYTGKEKTIEAVNRLRQAFPGVPMYARAQDMSHLLDLKKAGATEVVLENAETSLQLGSMLLRGLGVMSDDVSFFSKLVRDSMELQAQEALNNIENREIDIMKPLEIRISDLVERNGNGSRMIAQEDSLRLSSRPNIPLIEATLEDRIPETTGENDQTGYDFNNIDSEDGVKYCLLEASDDESEASNSSKEMIDQSV

SEQ ID NO: 46853 - protein, 482 aa, Oryza sativa
MSSPSPALCAAASCSTPLRVASPVVRFRRPGAPAPVVSAARASSAAVPAVSDDLVLRIAEQLEDSVAASSPLLDPLRSASALSLLSTRWPTRRSNEAYRFTDISYLRSLPISLPSRDAPAVAPPASPYASHVHFSDGVLTSSSGAHVSALADLPPGHVRDRAAAALAASAGFADKDLFFDFNAVGAKDVVVVHVPEGVSMADDPVHIMFSYSGCGDGSMMMSNPRVLVVAEKGAEVAIIEEHFGQEDGGCYWANPVMEIIVEEDAKVVHSYVQQQSFAAAHTKWTVVQQNTSSNYEFVEVSIGARLNRHNLHVQQLGPETNTQLSTFHFSAQNKQIHDLHSKLILDHPRGRSQQIHRLIASGTGNGIFDGNIKVNRYAQQTDAGQETKCLLLSSKALVNVKPNLQIIADDVKCTHGAAISGEHDPNAIYFLQARGIDAKTAADALNFAFGAHVINQIPFKPIEKKTLAHFKALLASSRQNDE

SEQ ID NO: 46854 - protein, 554 aa, Oryza sativa
MAAPAPTASPPPPPAMSGLLSFASSRPYPPLPAPRPAAAAPRPRLRIAGSAAAAPNAVSHRASSSFSSGDRLRSLVRRGELDEALRLVGSARRPDAGTCAALIKKLSASGRTAEARRVLAACGPDVMAYNAMVAGYCGAGQLDAARRLVAEMPVEPDAYTYNTLIRGLCGRGRTANALAVLDEMLRRRCVPDVVTYTILLEATCKRSGYKQAMKLLDEMRDKGCTPDIVTYNVVVNGICQEGRVDDAIEFLKNLPSYGCEPNTVSYNIVLKGLCTAERWEDAEELMGEMGQKGCPPNVVTFNMLISFLCRKGLVEPALEVLEQIPKYGCTPNSLSYNPLLHAFCKQKKMDKAMAFLDLMVSRGCYPDIVSYNTLLTALCRSGEVDVAVELLHQLKDKGCAPVLISYNTVIDGLTKAGKTKEALELLNEMVSKGLQPDIITYSTIAAGLCREDRIEDAIRAFGKVQDMGIRPNTVLYNAIILGLCKRRETHSAIDLFAYMIGNGCMPNESTYTILIEGLAYEGLIKEARDLLDELCSRGVVRKSLINKGAIRLLD

SEQ ID NO: 46855 - protein, 431 aa, Oryza sativa
MEDDDAGGGGGGGEASPPHAGSAAAMAGAGRDIAASPTSSRSVTQTVNGSHRFVIQGYSLAKGMGVGKHIASETFTVGGYQWAIYFYPDGKNPEDNSAYVSVFIALASEGTDVRALFELTLLDQSGKAKHKVHSHFDRSLESGPYTLKYRGSMWGYKRFFRRTALETSDFLKDDCLKINCTVGVVVSTMDYSKPHSIHVPESDIGYHFGTLLDNQEGVDVICNVAGEKFHAHQLVLAARSSFFRSELFEHESDEEKNEVDTSNEIKEIVIDDMEPKVFKAVLHFMYRDNLVGDDELSASSSDCSIFDTLAGKLLAAADRYELPRLRLLCESYLCKHISVNSVATTLALADRHHAMELKSVCLKFAAENLSAVIRTDGFDYLKDNCPALQSEILRTVAGCEEECSSGGKSQSVWGQLSDGGDTSGRRVRPRV

SEQ ID NO: 46856 - protein, 417 aa, Oryza sativa
MRIGWLILNVLRIGWNILKFLVCMSPTLGRRFHTRDRAARHLCRRLARSLAVLRRCLARRPPPPRRRHASSIPSLGSVLWFSPMSTSLAEVPQGGHIKEVIAEGSSGGLSSSTQLLATKRKLAASNPPTAKRRRSPIALPIVRSPGVRQIISQNEVIMERSQVAGQMSPSAESPRARSMSPVARFVSSPSAIPIELDVETQPRESTQSTPHVVTHRSGKRTLKSLIWKEFKPFYSSTGKVLYGKCIHCSKVIKANRGSGTSQCHRHLLKCPLRIRVQQLVESLHSSLSPNASVLKDWKFDPDVARAELLRMLVLQELPFSFVEHPGFRRFCASLNPYFRVLSRITIKGDCLAAYQEQKLALFEVLRKTNSRVSLAADMWSSNQNLGYMCITCHFIDNEWNIQKRIIRFTQVRTHMIV

SEQ ID NO: 46857 - protein, 1096 aa, Oryza sativa
MLPYHGDRHRGSPPPYPAAAAHSSLSPSAAPFTVDCPRPAADPRVRNPNPPGLDLPTAPSLYTTAAAGDWGSSSWMEPPASYMAPSPAAATPPPPAYKGEAPETAPYGIFPGTCQIGNFMVTRPLRSESSQLTSAKGPGTWLGSSEVLPSGVGPSVFSPQQNTFVHKSEDAEPYPTQRGLLQYPPQYPAYDKYMTQLSSCSTNVPPPVMWTPPANSSEVVEQMFPVMNKNTGESSSSFSSYMNPCRINLDYFDCMWNEQKDLGHQTTDKHHGKWSSSASNAGDHLLNSLGADHRAARCFGNGRPIQESSEMKYDRGSFNSKVSPSEVGYVQSREFSSELPEVNNPTVDSPCWKGAPIAYPPSFGIMKNTDNSHSVNGVGGYQIEQSPEWSLKYSELFSKHQEVSASESVKSDALKTFKLPETRKNTEDNKEVLPVCIGVHNGIGNNASYFPEEQNSRRQKCYDSTGDCKNMIAANQQENLSVSKAKLLGEDSSNHIGSITEESINKGPSPLGSAPRALVENLSESLHVNVCSQAAGAEECTQAQICAKGGQQPRYYSDSGGSMLKTSSESRSKSRAELLKQMHDLSAMLLSTCNSVPLQGYEEELLQLVIQNLRDASSCISKVQNMSCSRNNLWMAMPEHSLVENDSELKTSISQAVAKLPEDKTLDDIDVSQLSIYKNLWVEAEASACKLKYELQLTRVKLAAMENHNNTQVPVDLSKGNKIFISTIPNSKPQNSTAYPANLQCQGADSCDGQLPAVNRSIIDGVDAEVIERLKFLQSNLKDCRAFCQNNCEEQEEASKKPCAIEDAVMARLRVLNSCPDNIASLKQENNNHHQLDTSTNRADNIDDAVMSRLRILKSRPDNVNPLGQESSKHEPDAATGTNNFIDNAVMSRLRILKSRPDNANSLGQESSKHEPDASTGTNDLIDNAVMSRLRILKCRDDNINSLDDAIKQHVEACTDQPNWDEDGVVAKIQAPNGDTVSTADGFQNILHSNNFVRHSEGKDSVSGLDSPGDATCSDEDNGRKAPSDEVNDKTAVQSEGSFPMNIGWPLSTMDSHICTAGSQETPLISSSVHRYDIFPPKWEHMLKENFFHPGK

SEQ ID NO: 46858 - protein, 389 aa, Oryza sativa
MRRLVTHLHRLSHRAIPSPPPSRPPTTTSLPFLLSRRLLSDDAAPPPAADVPNKELKRRLETYYGVDDEAELPSVTEAVLERKLADVHSETDDELIEELRSKPLPEVRDRDFESDFEEMHDTDEELDNLYNARQYVEKKIKSDEFFNMDDDKWNKMIKKAVDNGHLGNMNECENILEDMLHWDKLLPDEIKKKVEAKFNELGDMCEKGELEPEQAYELFKEFEDKMVSECTELMEAENPTDVDEFSKMENKSVKLDDPPGEGPVLRWESRIVFAPGGDAWHPKNRKVKLSVTVKELGLSRHAFRRLREVVGNRYNSGKDELTITSERFEHREENRKDCLRTLYAVVEDANKANKLADDARNAYVKNRLKANAQFMERLKVKTQKLRVAA

SEQ ID NO: 46859 - protein, 225 aa, Oryza sativa
MVLEPVHQHSKGLPRRQLACGPPYLSFAFWVDSFVSSLSRPPLVLASSLLSHGVRGPLRPRLTIAYILISQLLYGDISKQIKTRLSRLWDFHDINDEEKIYHTELVLLDETGASIHVQIYPSLRNKFKDLLQQGKVYYIDSFSVRYANRTYRPVANPLMISFTKWTTLEECIEIPDNFPSITFSLTPFQDVPSLVEKNHFYVGASPFDHICHLCLFPVAALYLSN

SEQ ID NO: 46860 - protein, 811 aa, Oryza sativa
MGDDVLGRGSRRDQEIVLVDIVDDDDHDDVPAVRRQDSLYVDATRAGGANHRGGQEESWARTLKLAFQCVGILYGDIGTSPLFVYSSTFKDGVRHPDDLLGALSLIIYSFALFTIVKYVFIALRANDDGDGGTFALYTLISRHAKVSLIPNQQAEDELISKYNTGKPQATLRRARWMKELLETNRAVKIWLFLLTILATAMVISDAVLTPAISVLSAVGGLKEKAPNLTTDEIVWITVATLVVLFAIQRFGTDKIGYLFAPIILLWLLLIGCVGIYNTIKFDTGVLRAFNLKYIIDYFRRNKKDGWISLSGILLCFTGTEALFSDLGYFSIRSIQLSFSFGLVPSVLLAYIGQAAYLREHPEHIANTFYRSTPNVMFWPTFILAVAASIIGSQAMISCAFATISHLQTLNCFPRVKILHTSRQYSGQLYIPEVNFLLCVGACLVTIGFKTTVIIGEAHAICVVFVMIITTLLLTIVMLLVWKVSIWYVALFFIVFMSSESIYLSAVLYQFVHGEYVPVAMSVFLMIVMTVWHYVHVKRYEFELEHTVPRDKVKELLERRDIQRVPGVGLFYTDLVQGIPPVFPHLIEKIPSIHSVLIFVSIKHLPIPSVDRSERFIFRHVDKEEYKVFQCVARYGYRDPMEEAKDFVDALTENLQYYIRDVNFYTTGGDQHIFRSTSYASSIAESFASYEKHSGHAVYAEEMLTPAESFSEHTKQLSGRSKHFKQFQVENMNMQKMEKVQQEQQAILREMENGVVYILGESDIVASPHSSLLNKIIVNYIYSFLRKNCRNGEKMLSIPRSQVLKVGIAYEI

SEQ ID NO: 46861 - protein, 56 aa, Oryza sativa
MTFYSSPREAHLGHARAGACRVPHRGGSAGDQPMHVVGVVQGVKPWIDQIVVDMLL

SEQ ID NO: 46862 - protein, 248 aa, Oryza sativa
MIMSGPCLTGYTQTINDWYDRDIDAINEPYRPIPSGAISENEVITQIWALLLAGLGLGALLDVWAGHDFPIIFYLAVGGSLLSYIYSAPPLKLKQNGWIGNFALGASYIGLPWWAGQALFGTLTPDIVVLTSLYSIAGLGIAIVNDFKSVEGDRALGLQSLPVAFGMETAKWICVGAIDITQLSVAGYLFSSGKPYYALALLGLTIPQVVFQFQYFLKDPVKYDVKYQASAQPFFVLGLLVTALATSH

SEQ ID NO: 46863 - protein, 289 aa, Oryza sativa; identical to SEQ ID NO: 34465

SEQ ID NO: 46864 - protein, 177 aa, Oryza sativa
MNSIYDFISCGEFLLEKGIIKENKLAGWGYSAGGLLVASAINTRPDLFRAVVLKVPFLDVCNTLLHPILPLTAIDYEEFGFPVDHEEFLSIRKYSPYDNIQKDVPYPAVFVTSSFNTRFGVWEAAKWVAKVREVTRYDPERPVILNLTTDVVEESKYLQTKELALETAFLIKMIHDT

SEQ ID NO: 46865 - protein, 814 aa, Oryza sativa
MYVVKRDGRQETVHFDKITARLKKLSYGLSQEHCDPVLVAQKVCAGVYKGVTTSQLDELAAETAAAMTASHPDYASLAARIAVSNLHKNTKKSFSETIKDMYGHFNERSGLNAPLVAHDVYEVIMKNASRLDSEIIYDRDFDYDYFGFKTLERSYLLKLGGKVVERPQHMLMRVSVGIHKDDIESAIKTYHLMSQRWFTHASPTLFNAGTTRPQLSSCFLICMKDDSIEGIYDTLKECAVISKSAGGIGVSVHNIRATGSYIRGTNGTSNGIVPMLRVFNDTARYVDQGGGKRKGAFAVYLEPWHADIFEFLDLRKNHGKEEHRARDLFYALWVPDLFMQRVQNNQEWSLFCPNEAPGLADCWGDEFEKLYTKYEREGKAKKIVPAQTLWFDILKAQIETGTPYMLYKDTCNRKSNQQNLGTIKSSNLCTEIIEYTSPTETAVCNLASIALPRFVREKGVPIESHPSKLVGSSDSKNRYFDFDKLAEVTSTVTYNLNKIIDINYYPVETAKRSNMRHRPIGIGVQGLADTFILLGMPFDSPEAQQLNKDIFETIYFHSLKASAELAGKEGPYETYEGSPVSKGILQPDMWNVVPSDRWNWPSLRSTISKVGLRNSLLVAPMPTASTSQILGNNECFEPYTSNIYSRRVLSGEFVVVNKHLLHDLTEMGVWTPALKNKIIYEDGSVQKMTVIPDDLKAIYKTVWEIKQKTLVDMAVDRGCYIDQSQSLNVHMEQPNFGKLTSLHFHAWSKGLKTGMYYLRTRAAADAIKFTVDTALLKANGENGTKAAEEEDVEAKMAQMVCSLNNREECLACGS

SEQ ID NO: 46866 - protein, 143 aa, Oryza sativa; identical to SEQ ID NO: 29622

SEQ ID NO: 46867 - protein, 1094 aa, Oryza sativa
MSSNPDGGRSFARRDQLLNIQSDVHKLWEEGKVFEAEPGSKPPGPGEKFFGNFPYPYMNGLLHLGHAFSLSKLEFGAAYHRLRGSNVLLPFAFHCTGMPIKASADKLSREAQQYGYPPVFPELDSSIEVADDSQPDQGVSVAPDKFKSKKSKAASKVGLQKFQWEIMRGFGLSDEEIAKFRDPYHWLSYFPPLAKEDLKAFGLGCDWRRSFITTDMNPFYDAFVRWQMRKLKKMGKVVKDMRYTIYSPLDGQPCADHDRASGEGVQPQEYVLIKMEVVPPFPPNLKTLEGRKVYLAAATLRPETMYGQTNCWVLPDGKYGAFEINDTDVFVLTSRAALNLAYQGLSKVPEKPTCLAELSGNDLIGLPLKSPLSFHDVIYALPMLTILTDKGTGIVTSVPSDSPDDFMALQDLVSKPALRQKFGVKDEWVLPFKIIPIINIPEFGDKSAEKVCLDLKIKSQNDKEKLAEAKRMTYLKGFTDGTMIVGEFNGRKVQEAKPLIKKQLLEEGTAVLYSEPEKKVMSRSGDECVVALTDQWYITYGGTEWKQKAVKCLEKMNTFSAETRNGFEHTLGWLNQWACSRSFGLGTRIPWDEQFLVESLSDSTLYMAYYTIAHLLQNGNMYGKEIFSIRPEQMTDEVWDYVFCDGLAPTTDIPPALLSKMKQEFEYWYPFDIRVSGKDLIQNHLTFSIYNHTALLPEHHWPRGFRCNGHLMLNSEKMSKSTGNFRTLRQAIEEFSSDATRFALADAGDGMDDANFVFETANAAILRLTKEIAWMEEVIAAESSLRTGPPSTYADHVFANEINIAVIETEKSYNAFMFRDALKLGFYDLQLARDEYRLSCGAAGMNRDLLWRFMEVQTRLITPICPHYAEHVWQKILRKEGFAIKAGWPVAGSPDPTLRIANKYLQDSIVKFRKLLQKQESGSKKPKKGAAAPPPSEENKLTVGLIYVNEHYYGWKEQCLRVLQSKFDSQARSFAPDEEITEALKNCSIGQETNFKQVQKLCMPFIKSKKDEAKSVGPHALNLKLPFGEMNVLEENLELIKRQVGLDHVEVLSASDEATRAKAGAHVSMLDKTPPSPGEPVAIFISKQEFEAQH

SEQ ID NO: 46868 - protein, 170 aa, Oryza sativa
MKHPRQEEEVSLALALSTDCSSTASDSSAAAAGGAARRKRARRRSVVATSGEGEFVCKTCSRAFPTFQALGGHRTSHLRGRSNGLDLGAIGDKAIRLHRAADKEHRDKHECHICGLGFEMGQALGGHMRRHREEMAAAGGGSSADDWVWRCDARPEGIAAEPPVLLELFA

SEQ ID NO: 46869 - protein, 308 aa, Oryza sativa; identical to SEQ ID NO: 28838

SEQ ID NO: 46870 - protein, 221 aa, Oryza sativa
MAALLHQTPLQPPQTTTRPHPWTHTSTTNLSPPHVALPQRRRAPLRRLQAAGSGGAIGSSAVTDTESTTTAKSPSKKKSRKEKQRMRRQEKEQEQRQMVLEALDVKSGGEVDEDDDELPQTVFDRILRRIMFMVGVPMASGVGLLNLYGALERGRGVAVPSWLPLLTILVTFGTSALGIAFGTLSASWDPEKEGSLLGLEEARANWPVLWEEEIEKAKKKK

SEQ ID NO: 46871 - protein, 260 aa, Oryza sativa
MRKLVPSPSLPTATALAGTPEMAAVALALALRGWWEEVNGSPAWQDGAFFSLSAAYALVSAVALVQLIRIQLRVPEFGWTTQKVFHLMNFVVNGVRAVVFGFHAQVFLFQTKVYTLVLLDLPGLLFFSTYTLLVLFWAEIYHQAKNLPTDKLRIIYMAVNGVIYVIQVCIWIYLGTNDSPLLEPVSKIFISVVSFLALLGFLIYGGRLFFMLRRFPIESKGRRKKLYEVGTVTAICFTCFLIRCIVVSVFDPFWHANIYC

SEQ ID NO: 46872 - protein, 357 aa, Oryza sativa
MPVLPWLAAAATTPVRRSPPLPATPRALLRLPASSFPPWSNCAKSGLPPRGPFATAADTPLGGSLPEPEEERDTLLDGALRAARFRDEESRRPDPLFIDPYAAVLLSLDVASEDKDLLALHLMPSAEHYRLVTRYIDDKLQHFISNSDDLRQIVLLTDGMDTRPYRLSWPRLSVVYDVSPRRVFITASQQLRGAGAKISRNCVVLHTSSESPDLQAGLNKNGFNGNRPSLWVLQGLPLFTFKSLEDLLLVIGNLAMKGSIFIGEVPRFTQWGAATDMASEQDRLENLSFTQGFRVSFVHYEEVAKDVGLGLDSPPEIHGRAIFIAEQLRFSDAQMESFRMHFERIEDDADEDGFEEL

SEQ ID NO: 46873 - protein, 686 aa, Oryza sativa
MDASIGDPRLTSVEAAFEKNPLPGFSWLVTPRAMAVAVLLGIVFCFVGMRIQMMTGFVPALNMPVTVLSFFLLKVLARQLQKWRLTVVPFTRQENMFLITCVITCLNLAITGGFATALTGMGTIVAKTLADDLDPRDIIDYIPTGKLIIYFFLIGMAGVLSNIPLNQIMIIDYQLLFPTGSVIGHPINSFHTPEGAYIAKMQVMTIFKVFFGSFSWSIFQWFYSSGSGCGFSSFPTFGLELYKRRFYIDFSATYIGVGMMCPHIVNFGLLFGAIISWGFLYPYLETKHGEWYQTDSPSNLDGLNGYKVFISVTLIVTDGLINFLILVTSAAINFYHIRQQQQQTSGLASYISKNPSMNYDERKRIEMFLSSKIPMFVPVAAYVAWTAISMVAMPAMFDQIKYYHVGVLYLAIPVVGFCNTYATGLTDWSVSNTYAKFSPFIFAAWIARPGAIVASLLVSGITMASLHVSSQAMQDLKSAHMTLTSPRAMIAGQVFGVALSSVVSPCIFRAFEKAAKPGAPLGSKDSVYPCPYAGLYRAICIIGMGGVKGLPKYCVELCVIAVLVTIAIDALVLVSQLKGWRLHLYIPSMTVIALPFFAGSYFTLDMCLGGLLLLLWKKIDTMSAEILSAAVAAGLICGEGLFTLPSALLNMFKVLPPMCMKFLPSGQEVEVVDSFLNSSGGTVPKT

SEQ ID NO: 46874 - protein, 483 aa, Oryza sativa
MVRQGVVVGGGGEITQAGSGSGSIAGSATAPAASPHQVAVEIDEQIYSPAFGNIVVPDSRGCCSGFTSSVTRVVFILHLLAFIALTIFLGVQASSRQNPTYKPFANFVPLASSVIVSIIAGCFWVILAVINPPKAIKTSLWAAPVLALACDVVILLVGNGAALGIGVLIVVVAIAVALYSCWASGPRLQHATAVLSTSLNAAHLPPTASCLVVFVILAAFGYMSFWTVAISCIAAAEGYFMNFKMAYVVALLVSMAWTMQVLRYFVYVAVAKLAHTRLVYGVRMPGGTVEAFCGTMMGPSFGDICMGAVAVPVIAAVRGFARAINAVTKGNDEFCQGCCLAISDKLMGRVNRWGFVHVGVRGKAFCVASRDVWSLFVLRGISKLVDSDLTGSFCFLSAVTGGALASLVAGSWALAMDKEHKELALPVAIYSFLIGYYMCRMIIAWPQACVATYHVAYAENPQNPHLGTLIPDHLRELQALATD

SEQ ID NO: 46875 - protein, 501 aa, Oryza sativa
MPLFMSEEELRLLGGDVAAVAERADAAIRELRQQVDTVRAEADAAAIAAEQTCALLEQRYDTLSAEADRFRAELAELAAASERRAADLASSQSEIHQLRIQAIAKDGEIERLKVEISEVHKSKSQSLELIEQRDAEIREKDGIIQNYLDKIVNLADSSASKGARIQEVEAKFTHLQATCNRITQEKDLLEKHNLWLDEELKEKVKNLAELRKSNMDEEARMSAKVAELERETSESSSSLRRSKERVSELEQRVSYMEKELCSTKDAAAANEQRLAAELSTVMKLAELHKESSEEWSKKAGELEGVIKALETHLTQVEDEYKEKLEKETSAKRDLEMEATYLKQKLEKCESDLENTRKSSELSFTPLVAADPCDLAGSPMKEMAFSDPANQNDLMIVPKVPTGVSGTALAASLLRDGWSLAKIYEKYQEATDALRHERFGRRHAEAVLERVLHEIEEKAELILDERAEHRRMVEAYALMDQKLQQALLEHDNFENTIRNLKS

SEQ ID NO: 46876 - protein, 425 aa, Oryza sativa; identical to SEQ ID NO: 29388

SEQ ID NO: 46877 - protein, 424 aa, Oryza sativa
MEAGAGSSSAKLVAACVIGGIVLGASVVALHLAGPVAIPALPPVDALRRRFRRGRRRPVRVYMDGCFDMMHYGHCNALRQAHALGDELIVGVASDDEITANKGPPVTPLHERLIMVRAVKWVHDVIPDAPYAITEDFMNKLFNEYNIDYIIHGDDPCLLPDGTDAYALAKKVGRYKQIKRTEGVSTTDIVGRMLLCVRERSASDSHNHSSLQRQFSHGHGQKIDDSGSGSGTRISHFLPTSRRIVQFSNSRGPGPDSRIVYIDGAFDLFHAGHVEILRLARELGDFLLVGIHTDQTISSTRGPHRPIMNLHERSLSVLACRYVDEVIIGAPWDVSKDMITTFNISLVVHGTIAENMDFMKDDLNPYAVPRAMGIYRRLESPLDITTSTIIRRIVANHEAYQKRNEKKEASEKKYYDSKSFVNGE

SEQ ID NO: 46878 - protein, 327 aa, Oryza sativa
MVLCTIEESGEHIIAGAGELHLEICLKDLQEDFMGGAEIIVSPPVVSFRETVLEKSCRTVMSKSPNKHNRLYMEARPLEEGLAEAIDDGRIGPRDDPKVRSKILSEEFGWDKDLAKKIWCFGPETTGPNMVVDMCKGVQYLNEIKDSVVAGFQWASKEGALAEENMRGICFEVCDVVLHADAIHRGGGQVIPTARRVIYASQLTAKPRLLEPVYLVEIQAPENALGGIYGVLNQKRGHVFEEMQRPGTPLYNIKAYLPVIESFGFSSQLRAATSGQAFPQCVFDHWDMMTSDPLEAGSQASTLVQDIRKRKGLKEQMTPLSDFEDKL

SEQ ID NO: 46879 - protein, 251 aa, Oryza sativa
MKIFSWVANKISGKQEANRFPANSSAPYRANVSDCREDEFSDWPQSLLAIGTFGNKQIEEVAQVENSSDNVQSVQDTVKFTEEEVDKIRKEFETLLAIKDQAEAQRSHDDDQVGLQKRADGEDNEKHIRQLINKRIIVSKSKNSLGKKGNTLKPRSVASLLKLFMCKGGFTSVVPEPRNTFPQSRMEKLLKAILQKKIHPQNSSTLVAKRHLDWKPDETEINECLEDALRDLDDDGAKWVKTDSEYIVLEM

SEQ ID NO: 46880 - protein, 255 aa, Oryza sativa
MGRSYACQALHGDISQNQRERTLSGFRDGRFNILVATDVAARGLDIPNVDLVIHYELPNTSELFVHRSGRTARAGKKGSAILIYTNDQARAVRIIEQDIGCKFTELPKIEVADEASDMFNVVRDNRSRLAGSPRTGGSSFGRGGYGGFGEGRSRSFGDFDGFGSSPNRGGRSRDAGSRYGSGFGDFRRPSNAFGRSSSKQPDGFGFGDFGEGNFSRNGNRRSRSFDDSGSTRYSRRPNGFGTSDFGRSGGFDDSN

SEQ ID NO: 46881 - protein, 147 aa, Oryza sativa
MAGPAASAVPLHAGSTPLPRRNPAAVRGLMRPPLLMVAKAQPCVLRRFTPASRRKCVAARGHGRQELRAGQYQLDDDEPLWLAVVRDITWGLRSFLAFLAEQPRQLKHLEWPGFRNTLRTATLTLILVAVFIVALSSVDAALCYILS

SEQ ID NO: 46882 - protein, 541 aa, Oryza sativa
MGFPASVANLGTNGRPAASSSHLASRIRFAGLGSIRRWQYAPGRLCRCMVVTNLIDEEKGVQFSSRGSVSVKPSDDSDLLLKPPQKPIRANGPPESVNAASPSPSRPTLEDRDKVRESLDEVLEKAEKLKASTSGNGIGNGDLRQNGASKPDSSATPAAEGANSRKTKTLKSVWRKGNPVSTVHKVVRDHPRSESRNQSSSTAKPSMPAPTKPVPPLLTKPSVVAPPPRRPVKADTSKEKKGPILIDKFASNKPIVDPVVAAALIEPVKPVRGPPAKVKDDRRKKTSTPAGPRRRMPKNDGLVDEDTAVRKGRRWSKAKRRAARLQLEASQVEEPVRVEILEVGEEGMVIEELAYQLAIDESEILRFLSVRGAMLDNVQTLDKDLVKMVCMEYDVEVLESGPVKVEEMAKKKEFLDEEDLDKLEDRPPIVTIMGHVDHGKTTLLDYIRKSKVVASEAGGITQGIGAYQVIVQVDGNPHACVFLDTPGHEASIIQQLQGNRSQIYHGKKERKTGCIIDHIAVVSEEQQTGYSIVNTTNLCKP

SEQ ID NO: 46883 - protein, 526 aa, Oryza sativa
MVHDTGGGRASSTACHYSPSLVAAEPEEHVHGRSKDDDDDAAVSLMGEKALLELLLDMALEQHAPGKKLPAEEREESEFDIYLRDDKSHVLYHPEFSSTSVSSSPLSVKSSERSDLGTASAVLTKDVALLAEETDILATQLKASQLYSVDSSKSNEELQSKGQVFVRSTRLLERRSKRRYAPRASIADVSCSADNSKKKEKSKKYGRVLEPDEPFKLFLRDRETTEFLTAKEERHLFSKIQILMKIEEAHRKLEVQCGREPTLAEWAEAVGMSSKELQSSIRTGRRCREKMARSNFRLVIHVARKYEGYGLDIQDLVQDGCSGLMKTFEKFNPSKGCRFPTYAYWWIRQSIKKSIFKNSRLIRLPESVYALLRKVGKARMECIMEGEQPTNANVARRAGITIEKLAKLRAKTRKPRSMQDHVWSDEGVTFQEITEDPNVEPPDLSVDRMMMRQQVRDFLGILSPREKEIIEHRFGIHDGEPKTLHVIGDMFGLSKERIRQLQNRALEKLKRSASLQGFDVYFDLLT

SEQ ID NO: 46884 - protein, 459 aa, Oryza sativa
MLASKLWSRLASPSSPASPRALSSSSSAAAAARYLLPSSGMPAQERSPGHPSGGDARPGAGLGLAETGCGAAGAPRPLPLPCSSSSDNPAEENPCTRQIYQRQLMPHRFKLFLGEKRHFTYANGASLNPQNYRYFSSSSGQQSIGIGNKIIHDLPRSVKIVEVGPRDGLQNEKNIVPTHVKIELIQRLATSGLSVVEATSFVSPKWVPQLADAKDVMDVVRNIEGVSLPVLTPNLKGFEAAVAAGAKEVAVFASASEAFSKSNINCTIKESLARYKDVALAAKELKIPMRGYVSCVVGCPVEGYVPPSNVAHVAKELYDMGCYEVSLGDTIGVGTPGTVVPMLEAVMFFVPKEKLAVHFHDTYGQSLSNILISLQMGVSVVDSSVAGLGGCPYAKGASGNVATEYVVYMLNGLGISTNVDLGKVMAAGEFICNHLGRQSGSKAAIALGSKVATANASKL

SEQ ID NO: 46885 - protein, 439 aa, Oryza sativa
MPISHELGEPDESFYNLWKEECEELWEEEDELWGDEDVEEELSLRHPGFNKWTVQQGAAGGDHIRAKDKNFYCFEVQVHFTGELVDGTQFVSSRENDIPERFILGQEDVMHGFNLAVSSMQPGEKAIFTIPSALTMTKAGSPASIPSNIPPNQTLRFEIELIAMFTIIDIFKDEGILKKIVKNAEPDRKQSHSSDFVFVKYDACLMDGTSVSKSEGVEFSLTDGFFCPAFAHAVHTMKEGEEAVLIVKPKYAFGEQGRPSQGEEAAVPPDATLYVHLLFVCWIRRIGEDQAIAKKTLRIGNSQRIHTQSQAVVKVRLLGKLQDGTVFDRRGYGDDEPFEFVVDEGQVIDGLDESVMTMEEGEVAEFTIPPQHAFDAVGSDQPASTPSTAPSTPNPATPQTNALATGTSGTPSGSAAQSSGTINTNRGFLFRCFGPSPTS

SEQ ID NO: 46886 - protein, 180 aa, Oryza sativa
MFSFGGGSSLTSVVPDATPAPAAPPGTGTGANAQVLYVFNRGGVCLLYREWHRPLRTLDPTQDQKLMFGLLFSLRSFTAKIDPTTAEKGNLGVPLLPGQGCSFYSFKTNTYKLNFLESPSGIKLILITHPRTGDQRDTLKHIYNLYVEYVVKNPLYAPGTPINRCELFNKHLDQYVKTLI

SEQ ID NO: 46887 - protein, 409 aa, Oryza sativa
MMPRRPTRRRASPRPTLPSRSASCRRRPRPARTPARTVSGAASTRSGSPTRCSWSSSARCRPLSTRSCSTCSASTRSTSRPSSPSPHTSSSPPRQAPSPSSSTSRITTPTGRHSGRWDKESETTKIRLYQFKRMMEGKGVLVNSFDWLEPKALKALAAGVCVPDKPTPSVYCVGPLVDTGNKVGSGAERRHACLVWLDAQPRRSVVFLSFGSQGALPAAQLKEIARGLESSGHRFLWVVRSPPEEQATSPEPDLERLLPAGFLERTKGTGMVAKNWAPQAEVVQHEAVGVFVTHCGWNSTLEAIMSALPMICWPLYAEQAMNKVIMVEEMKIAVPLDGYEEGGLVKAEEVEAKVRLVMETEEGRKLREKLVETRDMALDAVKEGGSSEVAFDEFMRDLEKSSLENGVCS

SEQ ID NO: 46888 - protein, 397 aa, Oryza sativa; identical to SEQ ID NO: 30550

SEQ ID NO: 46889 - protein, 546 aa, Oryza sativa
MTHSFQMQTFRTTLRFMRFWAKRRGVYSNVIGFLGGINWALLVARICQLYPNASPSMLISRFFKVYSKWKWPNPVMLCHIEEGSLGLLVWDPRRNFRDRGHHMPIITPAYPSMNSSYNVSISTRHVMVQEFTRASDICQAIDERKADWDALFEPYPFFESYRNYLKIEITARNEDDLRNWKGWVESRLRTLVLKIERFTREMLLSHPNPRDFIDSSRPLHCFYFMGLWKKQISQAQEAEQYDIRAIVNEFKSNIHAYQHWREGMEIEVSHVKRKDIPSFVFPGGIRPSRPSRTVGKEARAVSRSNISANVQERNVPSMAQPMPYKSSEVNKIPSDPHGGYQSQERNNAVVSSLPCEETGHMFNGYANLHTESVELEHLRSYKGSTSVPENHVVHDLVKPPESMPPNSIHVYPSPTNGLGHLLDSSCKKPADIIVNKTTNFSSAVLAVPDELDELDSHQVKVNQKDLTAVDQGLSLEHKVGSNGGKAGTTGSPDNNHLKRKAEEELEPLELAAPLVRPPAPTSMTQRRPLRLRLSTVVQPKPAEGTS

SEQ ID NO: 46890 - protein, 199 aa, Oryza sativa
MLAFEQESRYIIMDPLFPQSPVGFIREKGNVIFRQLFRSRRPFVAEITDAMGNEIFTVRRPFWLINSSIYAEVNGKEVGVVHRRWHLWRRIYDLYLGNRQFAVVENPGFWNWTFTLTDEDDNVLAQIDRNWRGIGFELFTDAGQYAIRFGDAGLNRKFGLASDIDELHVVRQLTLPERAVALALAVSLDCDYFSRRGGW

SEQ ID NO: 46891 - protein, 712 aa, Oryza sativa
MAGLRRLWGEWEIRVLLLSSLSLQVFLLFTGGLRKRNVAAWLHFMLWLAYLLADSIAIYALGNLSQNQKLCSNGPHGGGDMHLLVFWAPFLILHLGGQDTITAFAIEDNELWLRHLLSLVSQIALALYVYWKSRPSAAGLLVPAILMFVSGVVKYGERTWALKSASMSSLRSSMLTRPDPGPNYAKFMEEYHSSKEAGLHAEIVIVPERPPDDNIHVQEEHMEYGELVVKAHRFFHTFRRLFVDLILSFQDRTDSLAFFRRLQRDQAYKVVEIELLLMYESLHSKSSVIHGPTGRYLRIFTLAAPVLSLIVFSGTDKAPYKPVDVTVSYVLLGGAIFLEIYAILLMAISPWSFADLRKKDKCLPVASGVFRAVSYFLPEARPRWSNQMAQYNLIHYCLKDKPTWLTGALEKLEWDYNVRVKTIWDSIWYTHHIGVSMVLKQLVFKQLKEKANSTADPMSYRRFGDHRGQWFLHRMGCYQELGASVEVEFDESIILWHIATDLCFYDDDDDDGRDAGERKLKRWSSCCFCSCSDHAPTADDSHLNDVSHLPAASREISNYMLFLLVMRPFMLTASIGQIRFGDTCAETKNFFLRGDELGAARKAAEALTKVKTEINPREVKGDRSKSVLFDACRLAEQLRRVERRKRWRLVAGVWVEMLCYAAGKCRGNFHAKQLSQGGELLTVVWLLMAHFGMGDQYRVEAGHARAKLIIEN

SEQ ID NO: 46892 - protein, 461 aa, Oryza sativa
MAQFRSAPVESEAEPGADGPVDEANAVEEEKSGKGEDGIEEAADTVDSVKDSAKPEGMDAKEEAVEQEGGAAADKAKDIPVTSNGKTDAGGNEVAEMKVEKLENGDGHLKADGDSNGDNKGADGEKQLMLASAGEDVEDPVLSKLASNSFMFDYSCGGDDSGTEEEQAAFMKELERFYREKLMEFKPPKFYGEGLNCLKLWRQVTGLGGYDQVTSCKLWRQVGESFKPPKTCTTVSWTFRNFYEKALLEYEKHKIETGEFQVAASNLTERITSESQVGIHASGSGRARRESATRAMQGWHSQRLLGNGEIADPIIKDKGTVSVLKKDKTPKSSGSAKRKRTPTLEDDRIVPYKPDKLQNDSMVLDLGPPADWVKINVRRTKDCYEVYALVPGLLREEVHVQSDPAGRLIVTGEPEQLDNPWGVTPFKKVISLPSRIDPHQTSAVVTLHGQLFVRAPFEQSK

SEQ ID NO: 46893 - protein, 692 aa, Oryza sativa
MRERDVCWEYCDKMEGNKVRCRFCYKVLNGGISRLKFHLSQISSKGVNPCTKVKPDVIEKVKAVIAAKEEHRETQVLKRQRDTELSVRPRRIRDLPSQPTSPERATSPAITSTSDQTQFLALEVSTPVLKLSSVTNKARSAPQSEAERCIAEFFFENKLDYNIADSVSYRHMMEALGGQGFRGPSAEVLKTKWLHKLKSEVLQKTKEIEKDWATTGCTILADSWTDNKSKALINFSVSSPLGTFFLKTVDASPHIKSHQLYELFDDVIREVGPDNVVQIITDRNINYGSVDKLIMQNYNTIFWSPCASSCVNSMLDDFSKIDWVNRCICQAQTITRFVYNNKWVLDLMRKCIAGQELVCSGITKCVSDFLTLQSLLRHRPKLKQMFHSSDYASSSYANRSLSSSCVEILDDDEFWRAVEEIAAVSEPLLRVMRDVLGGKAAIGYIYESMTKVMDSIRTYYIMDEGKCKSFLDIVEQKWQVELHSPLHSAAAFLNPSIQYNPEVKFFTSIKEEFYHVLDKVLTVPDQRQGITVELHAFRKAQGMFGSNIAKEARNNTSPGMWWEQYGDSAPSLQHAAVRIVSQVCSTLTFQRDWSIIVRNHSEKRNKLDKEALADQAYVHYNFMLHSDSKMKKGDGDPIALDAIDMTSPWVEDSDSPNLAQWLDRFPSALDGDLNTRQFGGSIFGTNDTLFGL

SEQ ID NO: 46894 - protein, 568 aa, Oryza sativa
MVADGKLSHKIVSDESAQESSKLEQDANCPGKDGTPPNNTSTSAVSNGCALIDRVKSPSGPSSSDKKAELPSDDNQAKDTDDLISGAKEIPEPITTEPEKPSDHNLKKSHKLDTSTDSEVVDHSKAVNNNEDILVSRELSPETDDGDNKLPPETGNRAADDKSKHVDNTPAGKGKRGRPPASKSHEKKNVGKGKVSGLESKKADAVSDSGGRATRRLAKDDDIKSSFKKTGEGESSKKKQKENLKQQEDTPPDEDTDEDLSLKDIVSPKSSAKTGKNKGQAGDSGGSKRKRAQEAEETPQPKKNKILKGNLVGSRIKVWWPDDRKFYKGVVESFDVASKKHKVVYDDGDVERLHLKNEKWEFIDEGRDNNPDASSDMPHGGRGRVSLGEQTKEGKIETPSSGKHRGTDVADPPKKRGRPKGVRSSNSSQNDDSPLKGKSAENDDEDISKTPKSGSALKNEGGRSSRSTGKTKDGLLKGSNKDETGNTKSASKSKNDGGSKHKDSKDEAKSSGSNPKGASTPKAADGSKTNGLSTKRKQKEKEGESSEEEEHVSAKISTGKKRRRKAHN

SEQ ID NO: 46895 - protein, 779 aa, Oryza sativa
MGDVLPRSYARPAGMLPPNNEFGIREITPGLACSGPGGAYELVERMEYLYVRVVKARGLKWSGEFDPFAELRLGGYSCITRHVEKTASPEWDDVFAFSRERIHAPFLDVLVRGRGFAKDDYVGSTRLDLGILPDAPASVQPDSSPAPQWYPVFDKKGEFRGEVMMAVWFGTQKDSYFDSAVHADAAFPVDDKLAAHIKHIRYDVPRLCYVRVKFTEVRDIVFADKARVGEVFVRSRILGQVHRTRTSMDHRWKDEENGHLFVAAAPFKDYLNMSVVGVKNGKEEVIGHVNVLLDSFERRCDARPISPRWFSLMQPEGAAKIDKYSAKISVVLCLECGYKVLSEPVHYLSDVRPAAREQERERKCIGLVELGIREAILTATRTRDGRGSCDAYCVAKYGVKWYRTRTVTDSISPRFHQQYHWEVHDHCTVLTVAVFHNSQIGDKGGLVAGDPVKDVLLGKVRIRLSTLETGRTYAYAYPLMSLHGGGVKKMGELRLAVRFSSTSTLGLFQTYAQPHLPPMHYHRPLTVVQQEMLRREAVTIIAHRMGRMDPPLRRECVEHLCESHALRWSMRRSKAHFFRLAEALEPLSAASAWFYHVCRWTNPVTTVAVHVIFTMLVCYPRLVLPTFFLYKFMLGMRNYLRRPKHPWHVDMRVSHADTAHPDELDEEFDEFPTARPPEVVRMRYDKLRSLNARIQEIVGDIATHAERARCVMTWRDPRATGLYLLGCLCLAVITFSVPFQAVALLTGFYLMRHPILRQRLPDVVANFFRRLPCKVDCLL

SEQ ID NO: 46896 - protein, 510 aa, Oryza sativa
MGDFNVALVIVAAVVSVLVLLVSVYLLINYQHPDDANQAYFPKLVVVLGITVALLSILMLPADVANRQACRRAIYSGACSLTLPMKTLWLAVYIADAVLVFLVIPFAMFYYEGDQDKSVGKRLTSALLWVAVSAVVCGLILGILYGLVGKVDFTVRHLSSAVETFPNSFTSFSTGQPCISTSPKQCAAYTAPANSQTTWTMRATFPEYVVALATIVGSVLFTIFGGVGIACLPLGLIFSFVRRPKAVITRSQYIKEATELGKKARELKKAAEALHQEEKSGKKGRKWRKNVKALGKELVLLEDDMKALEEMYPQGEQAEATWALTVLGYIGKLLFGAVGLIISIAWVAHIVIYLLIDPPLSSFLNEIFVKLDGVWGLLGTAAFAFFCFYLLIAVIAGEMMLGLKLVFITIHPMKWGGTLMNSFLFNVGLILLCSISVIQFCATAFAYYAQATAAQEIFGHTLQSLRGIKYLYKYNVFQYGFVALAILTLFYYAIFGWRKRKPTGRFQLSN

SEQ ID NO: 46897 - protein, 389 aa, Oryza sativa; identical to SEQ ID NO: 31348

SEQ ID NO: 46898 - protein, 357 aa, Oryza sativa
MEAAAAVAPSGLRASFLDVLLSRRRNLQVALTVEPGSPVKRPLYQGRPPMGRSEAMESCPRKGVVNSKEKLVEENFYLITESGEQGRVPVLLLKLNDTTPKRKPVIVFLHSSYKCKEWLRPLLEAYASRGYISVAIDSRYHGERANNNSTYIDALKSAWRNGDAMPFILDTVWDLIKLGDHLSEREDVDPCRIGITGESLGGMHAWFAAVVDTRYSVVVPIIGVQGFRWAIDNNKWQARVDSIKPLFEEARIDLGKSEIDTEVVEKVWDKIAPGLDSQFDAPFSLPVIAPRPLLLLNGAEDPRCPVLGLQEPVSRAAKAYEEVGSADKFMFIAEPGIGHQMTANMVKEASDWFDRFL

SEQ ID NO: 46899 - protein, 157 aa, Oryza sativa
MIKVWNDLYSATDKYTDGWLSSAHKLLEEAMGKSTAESTAKHSSINCIVTSGSLIPSLAKCLLYRLDDVVAFENVYSSWEVGKLQCFKWIKERYDGPNVRFCAIGDGHEECTAAQIMKWPFVKIEFHPDAPHRFPGLNLPTIHRIMDTVYDSSSNDG

SEQ ID NO: 46900 - protein, 285 aa, Oryza sativa
MDPTPHRGGSPSPRFTLQPSRLPPEDMLFCVDVDLETRSEMRIAPGPAAAAAASPGAAGASSGAAAASRQAARPPVKRMDAVKQALLLFVHSKLTMCPDHRFAFASLGDTVSLVKKDFSSDAGSAVEAIQSLDASETRYAMADLTQLFKIAYQEGKRAELQGRLLRVVLIYCRSSTKPQHQWPIKQKNFTLDIIYLHDKPTADNCPQKVYDALVDALEHVSQYEGYILETGQGLARILFRQTCILLSHPLQRCIQDDLDIPKPLAKKNMVTEAAQNEDGMPVSTQ

SEQ ID NO: 46901 - protein, 205 aa, Oryza sativa
MAGGGAAASALSTPWRSLLQRALDGNAHLKHSTFFQLATVGGGGRPANRTVVFRGFQEQSDKIQINTDARSNKIGEIRNCSFGEICWYFTDTWEQFRISGFIDVIDGSNPEPVKLQLRERAWFGSSVKSRLQYLGPCPGLPIPDDDLIKDAHLDPSAGPVDAFCLLVLDPEKVDYLNLKSNQRLMFTRNQKGDGTNSWMAEKISP

SEQ ID NO: 46902 - protein, 476 aa, Oryza sativa
MNEKASVSKELNAKHKKILEGLLRLPENRECADCKSKGPRWASVNLGIFICMQCSGIHRSLGVHISKVRSATLDTWLPEQVAFIQSMGNEKSNSYWEAELPPNYDRVGIENFIRAKYEDKRWIPRNGSSRPSSGARDEKSSESQTSVNRGGHNQRSSFEQHRTSPAAVSKIAPVVSRTPTQAPHQPKAQPSVPKVSRPQPEKSPPNATPPKVERPSVAPPPKVDYATDLFNMLSMDGTTEKEAESSSNDDSAWEGFQSAEPVPSSDKKDSAKPVESKPQSTSGIEDLFKDSPAVTVSSAPAAPQVNVKNDIMSLFEKSSMVSPYAVQQQQLAFMTPQQLALLSQQQALLMAALKAGNAPQVIPGNASLLNGNGSNPANGGLPSQSWTSLAYQNPGLAPVAAQNGATKVANNNQEFSFGNFNFSTPGAYNTSSSVPANGAASAAANKSTSPTSSSLPSQSGKEYDFSSLTQGLFSKR

SEQ ID NO: 46903 - protein, 354 aa, Oryza sativa
MSNKPPEVIITDQCDAIQDAIEKVFPQTCHIWRLQSVMKKMPENLSGFSGFQSIENAFSTVVHNSLTQTVFENNWSKIIDKFGLHGRSAWLNMLFCNRHKWVPTYVKNNFCAGMFCTQNSESIGSLFHGYINSTTTLDEFLDQYNKTIVGIDCKETDANWKSSHEVVPCVTHYGIEKKFQKVYTNKMFEEFQEQLKGKMYCYPTLLKQEGSVYIFKVTQDVKIREQQCSLDFTVWWDRDDCDGRCKCTCRHFEFRGILCSHIITVLALLKVKKVPPKYVLQRWRKDMIRRHGTITNWSYNEMVDSPVARRFDLLCKSFYEVAEKAVVSNELLMLVLDSVEELKRKVDAHTAQNS

SEQ ID NO: 46904 - protein, 357 aa, Oryza sativa
MAPRGSYCRRVMGVAVAVAACALCLLPATTSGALRVGFYQSSCPNAEALVRQAVAAAFARDAGVAAGLIRLHFHDCFVRGCDASVLLTKNPAGGQTERDATPNNPSLRGFEVIDAAKAAVEAACPRTVSCADIIAFAARDSVKLTGNVDYQVPAGRRDGSVSNGTEALHNLPPPNATAQQLADTFFANKFLTLEDMVVLSGAHTVGRSFCASFFNRVWNGNTPIVDAGLDPAYAAQLRALCPTRDTLATTPMDPDTPATLDNNYYKLLPQGKGLFFSDNQLRVNATMNALVTRFAANEAEWKQRFADAMVKMGHIEVQTGRCGQIRVNCNVVNPSTSSPEVELAGEDQETGGAVAAS

SEQ ID NO: 46905 - protein, 219 aa, Oryza sativa; identical to SEQ ID NO: 31990

SEQ ID NO: 46906 - protein, 598 aa, Oryza sativa
METTRSDGSIMVVGAVDIDCPQHRLCGYRDLIRGVSGGGAAMSRWPEAAPFVPQIASTGGDGGAAVAGGGWSSGSSSPAPSSCSSSSSWREGDCCYDVCWCSSSTVHELRSIAERMVRDGYIEGLIRAFGGAATAGAAGRRGPPDELLLHNWFSQLDVEWVLLLHTCSEEEEDEHVRRPPPLPVEDLMALMERWIRALLTMVQVLCITQLELRAKKPTVAGVRRAIQFFLLRRDSKTAHADYVQQVVQFARFAEESILRMLAFVDAATLAVVEEDDDDHRVAEALPGMLQVYACISEASPTVLAMFKEASDLLASGSSRHGQEAQVFDGMDGIFLRKRKKLSDAIWDMMEKVRSSFLQDGCWQVSPEASASGVHETTVLMMNYIALLWRNDDVLTFILQDHHFSVFVSHTQGFSSVVNLITDIISCLGHKLEEIASSLSNSILDPALRCIFLLNNWQLVLHRIESLDLPSWALIDRCRTRRYIDTYIDVFWSPMLCCIFIGNSSDTPRKKTYRPAFGFRRYLSLENFEIEFRKTYAKHKFFKVPDPKLRQRLRQAIIQKIIPHYSMYLEERAARGMHNRPPKITPEQLKELLEELFEG

SEQ ID NO: 46907 - protein, 349 aa, Oryza sativa; identical to SEQ ID NO: 29922

SEQ ID NO: 46908 - protein, 109 aa, Oryza sativa; identical to SEQ ID NO: 44015

SEQ ID NO: 46909 - protein, 157 aa, Oryza sativa
MKGAKSKGAAKPDAKLAVKSKGAEKPAAKGRKGKAGKDPNKPKRAPSAFFVFMEEFRREFKEKNPKNKSVAAVGKAAGDRWKSLTEADKAPYVAKANKLKAEYNKAIAAYNKGESTAKKAPAKEEEEDDEEESDKSKSEVNDEDDDEGSEEDEDDDE

SEQ ID NO: 46910 - protein, 342 aa, Oryza sativa; identical to SEQ ID NO: 31553

SEQ ID NO: 46911 - protein, 281 aa, Oryza sativa
MAAAALLRRSPAARALLSPALSSRLVASKPHSSSPAPPPPPSKAGANTKTFSIYRWDPDSPSTKPHLKDYKVDLSDCGPMVLDVLLKIKNEQDPSLTFRRSCREGICGSCAMNIDGDNGLACLTKISSASSASTISPLPHMFVIKDLVVDMTNFYNQYKSVEPWLKRKDAPPQPGKEIPQTKADRAKLDGMYECILCACCSTSCPSYWWNPEEYLGPAALLHANRWIQDSRDQFTKERLDSINDEFKLYRCHTIKNCTHACPKGLNPGKHIDTIKKLQLEA

SEQ ID NO: 46912 - protein, 373 aa, Oryza sativa
MRRNSRTNRISRRSLSRFSVKIDGVRCFTYEEMASATNNFDMSAQVGQGGYGIVYKGILADGTIVAIKRAHEDSLQGSTEFCTEIELLSRLHHRNLVALVGYCDEENEQMLVYEFMPNGTLRDHLSGKSKPPLGFGLRLHIALGASKGILYLHTDADPPIFHRDVKASNILLDSKYVAKVADFGLSRLAPVPDVEGALPAHVSTVVKGTPGYLDPEYFLTHKLTDKSDVYSLGVVFLELLTGMKPIEHGKNIVREVKKAYRSGNISEIMDTRMGLCSPECVDSFLQLAMKCSRDETDARPSMTEIVRELELILKIMPEGDLIQLETPQTYSGRAMSKDPMSKSTSNSTNGNYLASSQTFTSVDASSSGVLLGW

SEQ ID NO: 46913 - protein, 579 aa, Oryza sativa
MTMAISSALPSPLLLAASLLLLIVQAQGITRHYEFNVQMANATRLCNTKSMVTVNGQCPGPELVAREGDRVVIRVTNNVAHNISLHWHGVRQVRTGWADGPAYITQCPIQTGQSYVYNFTVAGQRGTLWWHAHISWLRATVYGALVILPKLGVPYPFPAPHKEVPVIFGEWWNADTEEVVNQAVQTGGGPNVSDAFTINGLPGPLYNCSAQDTFKLKVKPGKTYMLRLINAALNEELFFAVANHTLTVVEVDAVYVKPFTVDTLVISPGQTTNVLLTAKPYYPGANFYMSAAPYSTARPGTFGNTTVAGILEYENPAMSPSAASFVKGLPLFKPTLPQLNDTDFVTNFTDKLRSLATPEYPAAVPQSVDKRFFFTVGLGTLPCPANMTCQGPNNTQMAASMNNVSFVLPARALLQSHFTGLSSGVYAPDFPVAPLSPFNYTGTPPNNTNVKTGTKLLVLRYNTSVELVMQDTSILGIESHPLHLHGFNFFVIGQGFGNYDAVNDPAKFNLVDPVERNTVGVPAGGWVAIRFLADNPGVWFMHCHLEAHTTWGLRMAWLVLDGSHPNQKLLPPPSDLPKC

SEQ ID NO: 46914 - protein, 769 aa, Oryza sativa
MRAPPARVGDCCPATEMDEVPGNQEDPRLGAYADKITDAMFADHVELGSHYAGDSSSEAGWAPMIARMQSQSQLGSNQLGVSFENGSLPDDPASLASAFKNMSLGFRDFTVGTPANPVSVAPLGGHYPASHVISSGETTMNSFHQQEFAQDGFRPSSLNPNVAEYMKPKYGVHNVQMCTGLHGSDYVSGDPYNLPSSASPLQKQYFIDGQFRANAPYQQTGSNFMRQDFDADSHYLLQSQYAYQQMPQVAGSDVHWVRSNQHGVHSSIPAASPYLRTPMVGQQAHSSADTYWNGAAISHGNNQLNSTFVNNCSCIIYPDCSREICEYCQMKQAEKLKHRYMFRRSSKGFLQPQIFDKVNIKCFPGKTMVKSDDINSARNIQSVFEPNGRIEMNQRINQHGHNQHLNIQGNDFLLFDRLNSQALSPVESEYGLAMKIPQMSYSSVDEVVGKIHLLAKDQNGCRFLQRIFTEGTSENVKKVFDGIIEHIGELVVDPFGNYLVQKLLEECNHDQKMHIVYEITKRPGQLIKFSCDMHGTRVVQKVIETINSPDEVSMVVCALSSGAITLMMDANGCHVALRCLQKFSHEHKAFLLNVAMEYYFELAQDRQGCCIIQKCILHANKEQKNQLLYNITSRALELSEHQYGNYVVQYILDLHISWATDEILDKLEDHFGSLSMQKSSSNVVEKCLKEASWPKRVKIIHELINDPKLLHILIDPYGNYVIQTALKECEDAAVRAVLIGAIRPHVAALRNNMFGKRILSKTYLKNRKH

SEQ ID NO: 46915 - protein, 189 aa, Oryza sativa
MWKMSQVDEWKPVIAMLFFDLISAVTTALLKKALAEGLDRLVLITLRQLVATIFLAPIAYFKERGKRPKLTLEILVYLFFSAALGAALSQYTFFYGLQYTTATFAITFTNMSPVITFLIAALLRVESLNMKNKAGAAKIIGTLMSFAGVMLLTLYKGVALTHQVVSSVSSDHHHAEIDNPAKRAGHSVL

SEQ ID NO: 46916 - protein, 143 aa, Oryza sativa
MVEAIISCHVEDLPITYLGLPLGTRKPTKAEVHPILDKLAKKVADWKPKMLSIDGRLCLIKSVLMALPVHYMSVLQFPRWAIKYIERKCRGLLWEGQEEVSGGHCLVSWRKVCSLVEKGGLGVKDMNFFGQALRLKWHAKSLE

SEQ ID NO: 46917 - protein, 290 aa, Oryza sativa
MSDDVIWHCIRHNHCSFMAKITTGIFCRNPYNATGICNRSSCPLANSRYATIRDHDGIFYLYMKTAERAHLPNKLWERVKLPRNYEKAMEVINKHLEFWPKLLVHKIKQRLTKMTQYRIRMRKLQLKVREKVMTMPRKETQRHLRRMDKAEKAAQLEKNIESELKERLKKGVYGDIYNYPFKEFDTILEMEKDDVAPTEEEEEEEVEYVEGDDEMDDMEDIEDFGGLPDDDEDDDNDGETDEDDLLDEPVAKKPKGRGSDLRSNIGKKSKKLITEVERDDDMGIRRRTRM

SEQ ID NO: 46918 - protein, 367 aa, Oryza sativa
MELTESKCDGGQEVSLLDAQLELYWNTFAVIKSMALKSALDLRIADAVHLHGGAATLAEIASEVALHPSKIPCLRRLMRALTVSGVFAAAVKPGDGGGGEPVYELTPSSRLLVGSSNLSGIMSMILHPTLVVPFLGVGEWLRRDREPPEEDPYCIFKQAHGRSLWELAGRDAAFDALINDGMVSDSRVIMDYVVREHGEVFRGIASLVDLAGGLGAAAQVISKAFPEVRCSVMDLGHVVAKAPAGTDVEYIAGDMFESVPPADAVFLKWVLHDWGDDDCIKILKNCKKAIPPRDKGGKVIIMDIVVGAGPSDQKHREVQALFDMYIMFVNGIERDEQEWKKVFMGAGFSGYKIMPVLGFRSMIEVYP

SEQ ID NO: 46919 - protein, 521 aa, Oryza sativa
MAMADLELEKVASFLLAALLPLVLFKLAAAKRGGGDGGMRLPPGPWRLPVIGNLHQIMAGGQLVHRTMAGLARGLGDAPLLSLRLGEVPIVVASSADAAREIMSRHDAKFATRPWSPTVRVQMVDGEGLAFAPYGALWRQLRKITMVELLSPRRVRSFRRVREEEVGRLVVAVATAATRRPGEAAVNVGERLTVLITDIAVRTIIGDRFERREDFLDAAAEWVKIMSGFSLGDLFPSSRLASFVSGTVRRAEANHRKNFELMDYALKQHEEKRAAAAAAGAGAVEDDEDIVDVLLRIQKEGGLEVPLTMGVIKGVIRDLFGAGSETSANTLQWTMSELVRNPRVMQKAQTELRDCLRGKQSVSEDDLIGLKYLKLVIKETLRLHPVVPLLLPRECQETCNIMGYDVPKGTNVLVNVWAICRDPRHWENAETFIPERFEDSTVDFKGTDFEFIPFGAGRRMCPGLAFAQVSMELALASLLYHFDWELPSGVAPSNLDMEEEMGITIRRKNDLYLVPKVRVPL

SEQ ID NO: 46920 - protein, 244 aa, Oryza sativa
MEPDASSAAAAQNPNPNPSTGLPPISAYYQTRAEHHAVVSSDWLAHAAAAASLPPSSDAADADAASDAAALLSPGSNGGGGGVIEEFNFWRRKPEAAEAVAAIMALAAVIRSSRATTMMELEIELKKASDKLKSWDATSISLSAACDLFMRFVTRTSHLEHEKFDAAKSRLIERGEKFGEISLKARKTIAMLSQDFISDGCTILVHGYSRVVLEVLKLAASKPQTLQGTLHRGQAGQNWFTNVK

SEQ ID NO: 46921 - protein, 315 aa, Oryza sativa
MGGFAPHPVVVPTAAMDGTSSVSARTASSLSSSSSSLDDGGRGRPPPAGSTLELPSRKHYRYPSRSARLFQKLRRSLPLLTLAPRCGRMQVGSASEVAAAAASGGGGGGAADSHLMSHVVSSFSGAARPMRRVTGTLFGHRKGRVALALQETPRCLPTLVIELAIQTNALLRELANPAGARIVLETERRAPSTDAAAGKHRRAPPLLDVAAWTMFCNGRKTGLAVRREATDDDLAVLETLRPVSMGAGVLPASNRSSSSSSQSPEKGAAAADDEVAYMRGCFDHFVGSRDSESLYMIAPQGGGTGPELAIFFVRL

SEQ ID NO: 46922 - protein, 297 aa, Oryza sativa; identical to SEQ ID NO: 28574

SEQ ID NO: 46923 - protein, 535 aa, Oryza sativa
MMPAGPGPLVVVLLLSLLLLVAGIHGRLQHEEEEEEEEVQDQEGGSSSFTLPVWAPHVPESGEERREHFRALMAKDMRRMMRQVPELMSKTDMFELPMRSALNIAQVGMYVVVVRIGTPALPYSLALETANEVTWINCRLRRRKGKHPGRPHVPPAATTMSIQVDDDGGGGGSGGKSKVTKVIMNWYRPAKSSSWRRFRCSQRACMDLPYNTCESPDQNTSCTYYQVMKDSTITSGIYGQEKATVAVSDGTMKKLPGLVIGCSTFEHGGAVNSHDGILSLGNSPSSFGIAAARRFGGRLSFCLLATTSGRNASSYLTFGANPAVQAPGTMETPLLYRDVAYGAHVTGILVGGQPLDIPPEVWDEGPLGNDNPEAGIILDTGTSITYLVSAVYDPVTAALDSHLAHLPKAEIKGFEYCYNWTFAGDGVDPAHNVTIPSFSIEMAGDARLAADAKSIVVPEVVPGVVCLGFNRISQGPSIIGNVLMQEHIWEIDHMSTVLRFRKDKCINHQQLNRHHKKASSSSSSSSSSPPPYPAA

SEQ ID NO: 46924 - protein, 83 aa, Oryza sativa
MELRTLASTRRLAEKHLLTSLTMSCMESSTRSQKTVPVVKPPKCMASMNFKFNQFALSSRSMVYHNLVRLKWGFFAHFSTYPR

SEQ ID NO: 46925 - protein, 703 aa, Oryza sativa
MGERYPHMFLILLLFHGAHAALKDPVQKWQTLGGQRPLVIARGGFSGLFPDSSQFSYQFAMSSSLHDVVLYCDLQLSSDGLGFCKTGLTLENSTLIAEAFPKRAKTYKVNGEEIHGWFALDFTADELYQNVTLIQDIFSRPSTFDGAMGMFTLEDLVGLKPPHLWVNVEYALFLQEHKLSAEDYILGLPKDFSVAYISSPEIGFLKNVGAKLKKSNTKLIFRFLREDVAEHTTKKTYGEILKDLKSVKAFASGILVPKEYIWPLGKDQYLRLPTSLVKDAHALGLEVFASGFANDVSMSYNYSFDPSAEYLQYIGNANFSVDGVITGFPPTASGAVACLANTKGNPLPPPGGDGGRPLIITHNGASGVYPGSTDLAYQQAVKDGADIIDCAVRMSKDGVAFCQPSADLSTSTTASTSFMTKISTVSEIQNKSGIFSFDLTWSEIQTLKPDLLGPYTQAGLKRNPAAKNAGKFVTLPEFLDLAKATNVSGIMVEMEHASLLAKRGLGLVDAVSGALANASYDKEGGHLPELMVVSDDTSVLAAFKKFPAFRRVLMVDETVSDASAPSVEEIKQFATAVTVGRGSIAQVNGFFLTRFTDVADRMHAANLTVYVGVLRNEFMNLGFDYWADPIIEIATYAFHVMADGLITEYPATAATYFRSPCSDLSLNLSYAILPADAGAGGCRVLAAAVASLFLILLPSHGFH

SEQ ID NO: 46926 - protein, 568 aa, Oryza sativa
MEDEEYEERLKKEKISLFFVATYGDGEPTDNAARFYKWFTEGNERGVWLNDFQYAIFGLGNRQYEHFNKVAKVVDELLVEQGGKRLVPVGLGDDDQCIEDDFNAWKETLWPELDQLLRDENDVSTGTTYTAAIPEYRVEFVKPDEAAHLERNFSLANGYAVHDAQHPCRANVAVRRELHTPASDRSCTHLEFDIAGTGLTYETGDHVGVYTENCLEVVEEAERLLGYSPEAFFTIHADKEDGTPLGGGSLAPPFPSPITVRNALARYADLLNSPKKSALVALATYASDSTEADRLRFLASPAGKDEYAQWVVASQRSLLEVMAEFPSAKPPLGVFFAAVAPRLQPRYYSISSSPSMAPTRIHVTCALVHEKTPAGRVHKGVCSTWIKNAIPSEETKDCSWAPVFVRQSNFKLPADPSVPVIMIGPGTGLAPFRGFLQERLSQKQSGAELGRSVFFFGCRNSKMDFIYEDELNTFLEEGALSELVLAFSREGPTKEYVQHKMSQKASEIWDMISQGGYIYVCGDAKGMARDVHRVLHTIVQEQGSLDSSKAESFVKSLQTEGRYLRDVW

SEQ ID NO: 46927 - protein, 579 aa, Oryza sativa
MKTFTRKPLQSAVHVQFLRSSGRAFHGLIDQLCSKCPKHDDGATLQSETTSSKFMCLYKFFRTSSEGDTAAVDNVLRNDGNTEVVAIQSKENGRNSNNILEDGEKSVLSSDHSKKLSAHHRLKIWITSGHSGIIGRYGKKLELNAANVPKQFPSEHVNTVWPDWLMKVAPEAVQGWFPRRAESFEKLGKIGEGTYSSVYKARDLKTGKIVALKKVRFVNLDPESVRFMAREILVLRKLNHPNVIKLEGIIASPVSTSLYLVFEYMEHDLTGLAATPGLKFTEPQVKCLMQQLLSGLDHCHSNGVLHRDLKGSNLLIDSNGVLKIADFGLATFYDPNNQQPLTSRVATLWYRPPELLLGATKYGVSVDMWSTGCILAELLASKPIMPGRTEVEQIHKIFKLCGSPSDEYWQKLNVPQTGMFKPSRQYRRCIADNFKHFPQPAIVLLDNLLALEPEARGTAASTLQSDFFRRKPLACSPSSLPKFPPSKEYDARLKLEEARRQRKVGGSVRPGRENVRINRGNGSIQPKKHTYISGNLHPQGDPRTLATRVRSPGLNATWNNRGDSMTVVKYLDVSTTLCG

SEQ ID NO: 46928 - protein, 484 aa, Oryza sativa
MPPLHRRLVLCFLILAAAAAATTAASISTPAELAVASHPLSPLRLPPAAPFAGGGEGGGGGGGPFCTRVHIRGRPSRLRDPSRFFHALRVRANATRPSGLELCFHRNATVGPCKCAASQCHKMAKSGLWVQAISPYDTRVLDFRMPSDPSRSIIVSTEEEFLLHRVVFLLLGMVLMAVAHTLSESVVFYYGGAMTIGIFLVILIILFQGMKLLPTGRKSSLAIFVYSSLVGMTTYFLHYLSGLLRSVLVEIGIAEDMHNPLGVFLLVSVILAGAWFGYWGVRKLVLTEEGSVDAGVAYFVEWAILIISAVMILQSSLDYLFAFSALLFCTAIKAVSRIEGKSRVLRCLSRAFSNIVPTGYEGFGEEYSSMNGSHQDGFSKLHGEYMRSTPKRNSLRSRKTLSQDLATDSYYSTFHTNPERKKFSEEEYAAFTREETHKAMKQLVSSPDFNRWALANVDRISVTPPQRTPQNSMSQQRKRLFGLF

SEQ ID NO: 46929 - protein, 327 aa, Oryza sativa; identical to SEQ ID NO: 35670

SEQ ID NO: 46930 - protein, 261 aa, Oryza sativa; identical to SEQ ID NO: 32752

SEQ ID NO: 46931 - protein, 755 aa, Oryza sativa
MVTVVEEVDHLPIYDLDPKLEEFKDHFNYRIKRYLDQKCLIEKHEGGLEEFSKGYLKFGINTVDGATIYREWAPAAQEAQLIGEFNNWNGAKHKMEKDKFGIWSIKISHVNGKPAIPHNSKVKFRFRHGGGAWVDRIPAWIRYATFDASKFGAPYDGVHWDPPACERYVFKHPRPPKPDAPRIYEAHVGMSGEEPEVSTYREFADNVLPRIRANNYNTVQLMAIMEHSYYASFGYHVTNFFAVSSRSGTPEDLKYLVDKAHSLGLRVLMDVVHSHASNNVTDGLNGYDVGQNTHESYFHTGDRGYHKLWDSRLFNYANWEVLRFLLSNLRYWMDEFMFDGFRFDGVTSMLYHHHGINKGFTGNYKEYFSLDTDVDAIVYMMLANHLMHKLLPEATIVAEDVSGMPVLCRPVDEGGVGFDFRLAMAIPDRWIDYLKNKEDRKWSMSEIVQTLTNRRYTEKCIAYAESHGQSIVGDKTIAFLLMDKEMYTGMSDLQPASPTINRGIALQKMIHFITMALGGDGYLNFMGNEFGHPEWIDFPREGNNWSYDKCRRQWSLVDTDHLRYKYMNAFDQAMNALEEEFSFLSSSKQIVSDMNEKDKVIVFERGDLVFVFNFHPNKTYKGYKVGCDLPGKYRVALDSDALVFGGHGRVGHDVDHFTSPEGMPGVPETNFNNRPNSFKVLSPPRTCVAYYRVDEDREELRRGGAVASGKIVTEYIDVEATSGETISGGWKGSEKDDCGKKGMKFVFRSSDEDCK

SEQ ID NO: 46932 - protein, 369 aa, Oryza sativa
MNLLFLVGRSLFLPISIIIERLEYFRTSYRRRKFFALATKLKAIRVGGRLSIEMPKSLLEDVCDEDQFECLDSMGYPMPSINGMVLVNTFEETFGDLYDEGVWSELSKNVSSRISRNVVSLASFNGETRYFACTGFFIEWNGCTSILTSASLVRKSGDRSKIVENLRIEVLLPNKKRTEGTLEHCNLHYNVAIVSVKDFRALCPANLHHEQESVCEDVLAVGRCFESDILMAASGRLVGWSGTLDCRMLRYANFKITKAGIGGPLIDFDGRYVGINFFDDIVGTPFLSCTVILHVLSRFDEERTINKVGNGDTSSGVLDWTMTGDRSVRPNSWPVPKPFWCHPDDLPRNETRTRHKYGYYNGQKFKYMC

SEQ ID NO: 46933 - protein, 159 aa, Oryza sativa; identical to SEQ ID NO: 30605

SEQ ID NO: 46934 - protein, 108 aa, Oryza sativa
MGMLSLYNAAHLLIHGEVELEDAILLSRHQLETIIARNLKSSPLSQQVTRALRIPLPRTLKRIEALNYIAEYNQEQACNPSVLQLARLDFNLLQLLHLRELKEFSRYI

SEQ ID NO: 46935 - protein, 514 aa, Oryza sativa
MTRLAVRSLVVLFLTVASPFLVAGGGGAKLNASSSSSPLYGIEFPPFNAGVADGGCDGKLMVQGMEEVSRSPSLKLHMTHRSAAEAAAAGRTRKESFLDSAGKDVARIHTMLRRVAGAGGGRAATNSTPRRALAERIVATVESGVAVGSGEYLVDLYVGTPPRRFQMIMDTGSDLNWLQCAPCLDCFEQRGPVFDPAASLSYRNVTCGDPRCGLVAPPTAPRACRRPHSDPCPYYYWYGDQSNTTGDLALEAFTVNLTAPGASRRVDDVVFGCGHSNRGLFHGAAGLLGLGRGALSFASQLRAVYGHAFSYCLVDHGSSVGSKIVFGDDDALLGHPRLNYTAFAPSAAAAADTFYYVQLKGVLVGGEKLNISPSTWDVGKDGSGGTIIDSGTTLSYFAEPAYEVIRRAFVERMDKAYPLVADFPVLSPCYNVSGVERVEVPEFSLLFADGAVWDFPAENYFVRLDPDGIMCLAVLGTPRSAMSIIGNFQQQNFHVLYDLQNNRLGFAPRRCAEV

SEQ ID NO: 46936 - protein, 183 aa, Oryza sativa
MLSAARSGALARWRPRETLLPRLLSSSATGAASPPARQAALLELPEVEKVLRDVRAGDVRVFPVGEGGLHGGSCADYMVVATGRSDWHVRNIAQALLYKIKQKQKGSDRILMPSVEGQQAGKWIVIDSGSIIIHALEERAREYYDLESIWTKEVSPNISVQELETSLVKTRRRDHSQKPMKSI

SEQ ID NO: 46937 - protein, 411 aa, Oryza sativa
MAVVVAGSRGKGEQQRLPWREAQQEARCPDMAPSRPPRPRPGPARAAVVYYLSRNGHLEHPHFMEVAVASPDGFYLRDVIDRLDALRGKGMARMYSWASKRSYRNGFVWHDLADDDYIYPVAGREYVLKGTERLHPIQLPLLDAAAASSCSSGSQETATSSPPGWENGTGEARQKKGAGINTSELCEYRVYKAEDPAAAAADAATQTEDGYRSSRGRHAQRAAAAAAQEELSREETSPPTASTSPETLEALIKADGRVMAAVTGGGRTRASSVLMQLISCGSVSVKSTLASPVMARTAAHYRPRPPRPPTLASTTTEIPNYRQKIVEDKEYLSGSLVETKRSSPADTSQDIAVLRRSSSYNADRVQKVEPSTEAVDMHDRCIPRRPRGKKDGGAYLISGGNGQYGSKRHGG

SEQ ID NO: 46938 - protein, 234 aa, Oryza sativa
MAKKMGVNSKAEAARERRSVAEADRRDRVERAKEEEYWREAEGPKSRAARRREEDAEKRAEAAARKAENRRLAEAEAASASASAPSKTAASKASRVGAPAPKVTEAELARRREDERLRLEREAGAAKKRAARTAEEEEYERVVLVANTNRDDSIIEARSVDEAIARMSLVDSEGALPADKHPERRLKASFKAFEEAELPKLKEEKPGLTLNQYKDMIWKLWKKSPDNPLNQAAE

SEQ ID NO: 46939 - protein, 118 aa, Oryza sativa
MSSAASASAAGGAGEEGAAAAAQPQQEGPVVTCKGVNGLDKVVLREVRGSSAEVYLYGGHVTSWKDEHGEELLFVSNKAIFKPPKAIRGGIPICFPQVRAFPFLHFFFARNLFRFLKF

SEQ ID NO: 46940 - protein, 207 aa, Oryza sativa
MDNLSEPLLAEIIKRIAKTSDRNSLSLVSKQLYTIDAEQRDAIHVGCGLHPATEALASLCSRFPNLWKVVIDYSGWISIHGKQLDNQGLLVLSSHCSSLTDLTLNFCSYIDDSGIGYLAYCKKLRSFRLNFAPAISSRGLLSVAVGCKSLCTFHLVDCMKVGSVEWLEYLGRAGSLEELVVKDCKCRNKSWLVGLGLVVPFSCFSAF

SEQ ID NO: 46941 - protein, 215 aa, Oryza sativa
MIAAVGRGPEGWGEDEMSVLPRHTKVVVTGNNRTKSVLVGLHGVVKKAVGLGGWHWLVLTNGIEVKLQRNALSVIEPPTGNEDDDKFDCENMQWNSSDLASDDAQSPKPQRSRSRQHRGFQTKSFSRSMSCDSHSKASFSSSSRAHTKVDLSKLEMTALWRYWRHFNLDASPNPSREQLVDAVQRHFVSQQLDELQVIVGFVQAAKRLKTNVKVA

SEQ ID NO: 46942 - protein, 328 aa, Oryza sativa
MSGHHEAKPYQPRRGPAPADEEAAPAAAADEAEAEAEVEAMERYEQEQEYEEGEEGEEEEYEGGEGVPMDADASAAAVAGMDPHGEMVPVAGGEAGGGYPHVASNTLTLSFQGEVYVFESVSAERVQAVLLLLGGRELAPGSGSVPSSSAAYSKKMNFPHRMASLMRFREKRKERNFDKKIRYTVRKEVALRMQRNRGQFTSSKSKAEEATSVITSSEGSPNWGAVEGRPPSAAECHHCGISAASTPMMRRGPDGPRTLCNACGLMWANKGTMREVTKGPPVPLQIVPAATNDVQNGIVEATGVEQHNSAVEEAVSAANGHESQSGVA

SEQ ID NO: 46943 - protein, 878 aa, Oryza sativa
MQHQQGFDTHRLHQEVKSRWLKPKEVLQILQNHDRFIITHKTPHKPPSGAWFLFNRRVLRYFRNDGYEWRKKKNGKTIAEAHERLKVDNVDALNCYYAHADKNSTFQRRIYWMLDPAYDHIVFVHYRDVQEGSISVSALNDSSTSNQNGSGSRAEAQSSPGLTSELFAPCLNSCSPGSAEEVSSQIMAINNETNSVSQPDWVQHCNQAALRKLKVQLSLEDREDHDVDAKDIPSNSEPITVYGIQNEEPGTCRNLADVFSGLEFSKENHPEETGLPFSSTIDVLKNSDTWLEEDQIEAILHSASMIVTENQWFNIREVSPEWSYCSESTKVIIAGDFLRDPSHGSWAIVFGDVKVHAEIVQQGVIRCHTPCLDARKVTMYLIDENEKACSEARQFEFHNKPTKSVVCENRKPCREVHESELHQRPTESNNELLLLFNYAQLLFDGHVSEQFLKFGLPFPNLECGLQVSPSEIMKGASERLNRDTAVNCVMEVLLNNKFEEWLFSKYEQNSEGNHFLPRQYHGVIHTIAALGYNWALKLLLNSGVLVNYRDANGWTALHWAARFGREETVVLLLDAGAAAGALSDPTAQDPAAKTPASVASAYGFKGLSAYLSEAELIAHLHSLESKENGSSGDQISRVVGRISDTSAHAQSGSDDQLALKESLGAMRYAVQAAGRIQTAFRIFSFRKKQQAGLQNRGNHIISIREVGAASHGMLEKAALSIQKNFRCWKKRKEFLKIRKNVIKIQARVRAHQQHNKYKELLRSVGILEKVMLRWYRKGVGLRGFHPGAIAMPIDEEDEDDVAKVFRKQRVETALNKAVSRVSSIIDSPVARQQYRRMLKMHKQNKDDDEKVEVSPASHVYGSGSHHMCWLSHNNKAMH

SEQ ID NO: 46944 - protein, 289 aa, Oryza sativa
MQYREPGVLLWRGFTLQEFANQCFGNKLDYGKGRQMPIHYGSNRLNYFTVSSPIATQLPHAVGAAYSLKMDKKDACAITYFGDGGTSEGDFHAALNFAAVMEAPVIFFCRNNGWAISTPTSEQFRSDGAVIRGQAYGMRSIRVDGNDALAVYSAVHTAREMAIKEGRPILVEALTYRVGHHSTSDDSTKYRPVDEIEHWRTARDPISRYRKWVQGNGWWCDEDESELRNNVRQELLKAIQVAERMPKPPLAELFTDVYDEVPSNLREQERLLRDTIKKHPADYPADVHI

SEQ ID NO: 46945 - protein, 258 aa, Oryza sativa
MVKNTSNKCIAAAGATAAAGLGGGAASCSGGGGDGKVTTAAAAALAVRPYKGVRMRSWGSWVSEIRAPHQKRRIWLGSYATPEAAARAYDAALLCLKGSDAVLNFPSSASSRRRLDIHRGGTDSAAGDMSPRSIQRVAAAAAAAFDAAAAAVVVDESCSCSAEAMSSTPTSGATSLSTLGSSGGGDVLDHATTPSSSSSAAANVCSPPLEGDHELWTELDAFASPKFMDLMAAGGTAFSSPWEEPEEDGELMRLWSFC

SEQ ID NO: 46946 - protein, 374 aa, Oryza sativa
MMNGYDMQSVPVYLSEMAPARLRGMLNIGFQLMITIGILAAELINYGTAKIKAGWGWRVSLALAAVPAAIITLGSLFLPDTPNSLIDRGHPEAAERMLRRIRGSDVDVSEEYADLVAASEESKLVQHPWRNILRRKYRAQLTMAICIPFFQQLTGINVIMFYAPVLFDTLGFKSDASLMSAVITGLVNVFATLVSIFTVDRLGRRKLFLQGGAQMVVCQVVVGTLIAVKFGTSGIGDIPKGYAAVVVLFICMYVAGFAWSWGPLGWLVPSEIFPLEIRPAGQSINVSVNMLFTFVIAQAFLTMLCHMKFGLFYFFAGWVVIMTVFIALFLPETKNVPIEEMVLVWKSHWFWRRFIGDHDVHVGANHVSNNKLQP

SEQ ID NO: 46947 - protein, 237 aa, Oryza sativa
MAAAKPVEPLPLLRAGADTAAAAALRRFQLPPQPPRSVRANAIRASPPSNGAGSPDELPAALLPNAARRRDGCGFSLGVDLGEARTGVAVGRGITLPRPLTVLKLRGQKLELMLLDIAQQQEADELIVGLPVSADGSETPQSNKVRSVVGRLAVQAADRGLRVYLQDEYGTTIDALEFMISRGVKRSARDVKSDAYSAMMILERYFSSSGQGAKIVLPKQPQLQSKLLEKSRQDAQV

SEQ ID NO: 46948 - protein, 341 aa, Oryza sativa
MKSKTNRSIQKARKTDNVQGGPNWVLVAGGVLLSTLSVKLGCKLKQLFDAKQRNSNTSKAQRRPGTCELHSNLYRFSDHLSCYHCNSGFSGNGVGVKQAPASPASKQMEPSLPLVKIPGPESSKENNGVMWISSPDRLEDPRKPFQYSNSSGSPCVSESGSDIYSKKEVIQKLRQHLKKRDEMIMEMQAQIADLKNSLNIQETHSTNLQSQLDSANRDLFESEREIQHLRKIIADHCVAEALSHDKPLLAGHWQSGATNGHANGYADSSSVDDPELHFIGLDKRKGEAERVEMLKREVGELKEVIEGKDFLLQSYKEQKVELSSKIRELQEKFSSQVPNIL

SEQ ID NO: 46949 - protein, 426 aa, Oryza sativa
MEVVSSSHSCLAFNRTPSSAWRFPGNGLGPGHAKLTRPRSAILCVRSGTASNPADSGKVHASHGFYVSDVDAALQGIPKKVGEIEKMIIPSLPEGPESSLISTGFWEWKPKLSVYYEKSGIDNSKAPSVLFLPGFGVGTFHFEKQLKDLGRDYKVWTMDFLGQGMSLPCEDPAPKSTSGELDEDTYWGFGQELQPWAEELVYSIDLWRDQVQHFIEEVIGEPVYIVGNSLGGFVSLYLAASCPHLVKGVTLLNATPFWGFLPNPATSPRLSKIFPWAGTFPLPSFVRKLTETVWQKISDPRSIQGILKQVYADHSTNVDMVFSRIIETTQHPAAAASFASIMCAPKGQISFEEALSRCQRQGIPISLMYGREDPWVRPIWGIKVKQQVPESPYYEISPAGHCPHDEVPEVPGKSLAWWITGRLQAS

SEQ ID NO: 46950 - protein, 347 aa, Oryza sativa
MATAISVGVAVPAASRRREDGAGPPLLLRRRCLVEGQVRCRLPWLRPIRHNVRVQTSNVNVGAGSYEGGEAGSHGEHLDSSATRDSNKPTKPPSGSRYPQSIAAVLLLCALASAFIVFFKGQPSAVVAMLAKSGFTAAFTLIFVSEIGDKTFFIAALLAMQYQRALVLLGSMAALSLMTIVSVIIGRIFQSVPAQFQTTLPIGEYAAIALLAFFGFKSIKDAWQLPDNANGNLQGNSESGELAEAEELVKEKVAKKLTSPLEVLWKSFSLVFFAEWGDRSMLATIALGAAQSPFGVASGAIAGHLVATFLAIVGGAFLANYLSEKLVGLIGGVLFLLFAVATFFGVF

SEQ ID NO: 46951 - protein, 854 aa, Oryza sativa
MTVGKDVSSLFTDVVNCMQTENLELKKLVYLYLINYAKSQPDLAILAVNTFVKDSQDPNPLIRALAVRTMGCIRVDKITEYLCDPLQRCLKDDDPYVRKTAAICVAKLYDINAELVEDRGFLEALKDLISGNNPMVVANAVAALAEIQDSSTRPIFEITSHTLSKLLTALNECTEWGQVFILDSLSRYKAADAREAENIVERVTPRLQHANCAVVLSAVKIILLQMELITSTDVVRNLCKKMAPPLVTLLSAEPEIQYVALRNINLIVQKRPTILAHEIKVFFCKYNDPIYVKMEKLEIVIKLASDRSIDQVLLEFKEYATEVDVDFVRKAVRAIGRCAIKLERAAERCISVLLELIKIKVNYVVQEAIIVIKDIFRRYPNTYESIIATLCESLDTLDEPEAKASMIWIIGEYAERIDYADELLESFLETFPEEPALVQLQLLTATVKLFLNKPTEGPQQMIQAVLNNATVETDNPDLRDRAYIYWRLLSTDPEAAKDVVLAEKPVISDDSNQLDSSLLDDLLANISTLSSVYHKPPEAFVSRVKTAPRADDEEFADTAETGYSESPSQGVDGASPSSSAGTSSNVPVKQPAAPAAPAPMPDLLGDLMGMDNSIVPVDEPTAPSGPPLPVLLPSTTGQGLQISAQLVRRDGQIFYDISFDNGTQTVLDGFMIQFNKNTFGLAAGGALQVSPLQPGTSARTLLPMVAFQNLSPGAPSSLLQVAVKNNQQPVWYFNDKIPMHAFFGEDGKMERTSFLEAWKSLPDDNEFSKEFPSSVVSSIDATVEHLAASNVFFIAKRKNSNKDVLYMSAKIPRGIPFLIELTAAVGVPGVKCAVKTPNKEMVALFFEAMESLPK

SEQ ID NO: 46952 - protein, 472 aa, Oryza sativa
MVALADSAAARKLLLHGAATDAAAVGMSFGLDGLWQLIAGLFSGLVHLLLLPFQAIAHGFQALGHAIQALFAGLGTVAHLLVQAAVAGIGHGFDGMWHAIQGFFASIVAALAGAAHGLVLPFEAFWRWLQTAAGGTGSGFQGLWQNVLAFFATLAGAAHDLVHPFEAFWKWLRTAAADAAADISFRLDGLWPLVKRLYASLLATLASAAHGLVPLLESLWRGLRAAAAAALPYVLVIAAVLCVVALVWLAWPFLFPAAAVIGLALVGVAGCCAFLLLAAAVLIGRALVYAVCFGVVLLFVAAKVVGKVLDRVLPACARCCYDDRVTTTATTMSAPDAAGMDISRAAYESLPELYAQILRSAGPVVAAAVFCSHPVAWACAAPVAALFLFRALDKRLPPSEPCVLPAAAYPDTVTDVSDSRSIGQHVSEDDDMSDSCSIVDPYHGEHVILTIRQRIHLRIHVVNNVCPVCALA

SEQ ID NO: 46953 - protein, 250 aa, Oryza sativa
MMGGFLSRVLLLAFGYAYPAYECYKTVELNKPEIEQLIFWCQYWILVALMTVMERFGDFTISWLPFYSEAKLMFFIYLWYPKTKGTTYIYGTFFRPYISQHENEIDRNLLELRARATDVVVLYFQKAATVGQNTFFDVLKYVASQSPSQRSSQQPSQVLTCFSSSKLFTEQTHLLLTTGITEFTISVQSLMLKFSGALLKQFYPCCLASLLAICFFFMQDAFTITAVLPSHVDLVSAATFSINYRNRNNL

SEQ ID NO: 46954 - protein, 118 aa, Oryza sativa
MSDSFCPDCKKHTEVAFDHSAGDTVCTECGLVLEAHSVDETSEWRTFANESSDNDPVRVGGPTNPLLTDGGLSTVIAKPNGAQGEFLSSSLGRWQNRGSNPDRSLILAFRTIANMADS

SEQ ID NO: 46955 - protein, 580 aa, Oryza sativa
MMEKDQRKGAMPVKKGSSANAVTKGITNRIQARRERKLALQQDVDKLKKKLRHEENVHRALERAFTRPLGALPRLPPYLPSQTLALLAEVAVPEEEVVRLEEQVVNFRQGLYQEAIIFSSAKNTSLPGGEGCVPAQLMPSSPVPNSEVSPANCHSPPTRPSMNGVAGAKQTPRKPSPSAAVAQDDRSGAGKENQSCSNTPARNCRHSPLLQKASKSRLPTAAAPEKRRATAQTISTVPDRKRLADTVSNNSEKASQDDSSVPNRLSEELLRCLLAIFSQMGGSSASGQDEEQAALSPSVSGSCESSEDAYPQDPYGILEFGTRDVGSYKRFHVIDATSFDQTAMENDTMLTRKLKALIRRLSSVDLTGLSHQQKLAFWINIYNSCMMNAFLEQGIPTTPHMLVAMMPKATINVGGRTHSAMSIEHFILRLPYSVKHVNPGGVTKGAADDVTMRGVFGLEWPEPLVTFALSCGSWSSPAVRVYTARGVEEELEAAKRDYLQSAVVVSAPAKVAIPKLLHWYLLDFAKDVDSLMDWVCLQLPSELRQKAMRIVEDGRRGVAAESRRMQVLPYEFRFRYLLAS

SEQ ID NO: 46956 - protein, 701 aa, Oryza sativa
MRKRDLGILLLAAFAVFFSLQHDGDLSFREAWYHLSDADYPIKHDADRLPSPLVADLNGDGKPEVLIPTHDAKIQVLQPHPRPSPDDASFHDARLMADVSLLPSNVRLSSGRRPVAMAVGTVDRHYAHAPSPSKQLLVVVTSGWSVMCFDHNLKKLWEANLQDDFPHAAHHREVAISITNYTLKHGDAGLVIVGGRMEMQHHSAELFDEFMVSEHNREEHRRSASEKQASETGNTDLRHFALYAFAGRTGELRWSRKNENIPSQPSDASVLIPQHNYKLDAHALNSRHPGQFECREFRESVLGVMPHHWDRREDTFLQLAHFRRHKRKALKKTPGKAVVNNVHKPSEHNPPGKDVSNRLANVIGKAADMANSNKIKKSQRTLYVPTITNYTQVWWVPNVVVAHEKEGIEAVHLASGRTICKLHLTEGGLHADINGDGVLDHVQVVGANGIEQTVVSGSMEVLKPCWAVATSGVPVREQLFNVSICHYNNFNLFHHGDFSRSFGRTFDTTGLEVATPILLQRDDGHKHRRGSHGDIIFLTSRGEVTSYSPGLLGHDAIWRWQLSTGATWSNLPSPSGMMENIVVPTLKAFSLRAYDPKQVIIAGGDLEAVVISPSGGLLASIELPAPPTHALVLEDFNGDGLTDIILVTSGGVYGFVQTRHPGALFFSTLVGCLIVVIGVIFVSLHLNSSNSGKPRASTDYR

SEQ ID NO: 46957 - protein, 732 aa, Oryza sativa
MPPSPSTRRSPSRETFLRRVNSFGNALPAKPKDEDLTLFADMQKIENDNFLLEPSEDFDESISKLSYFPDVKLGVNIPTRRESHDLLDVDGDKNDYEWLLTPPETPLFRSLDDEEEQSAGQDSRGRTKSKPIRISGSSTVDNTQRSSRSSASPIRLSPSPRSMSRTRPSSAASRSSPPFALQPPTPSWRPSTPPSAKTLTPPRRSPSPASTLTPPRRSPSPASRRMSTGSTPALNRTRGPSPVKTNRISSSPKLQGWHSNVPGFSHDAPANLRTSLPDHPLSHSRGGSPSPPISGRDMGSRGRRQSLSPTPSRRASSSHSIERDRLSSYSKASATSSGEDDLDSMQSLPVAYSTSPAVKKSLSMMKTRTIASSKKPSTTFSTSSVPKRSFDSAVWLMDHRKAPNNMFRPLLSSVPTTTFNAGKGNVVQRPMFSHNSYMTTSSNASSEHSASFGPYVDNDQEQHDQISEWDDNHQVHGDIFMFDKLDELNEETSHEETTKFVESDRQDIDMEKGWAASQTSGTNSSHVGYGEMATCTRCGNVFKVMDVDRQGDYCEECGLLLSICSAGPVTQTLQEAHQQDEITANCKSYAESGTSIASDCVEYREEASLGHQFNDEPPADCIKACSPLQSMVDTNEEMLLAHEVMNHTKNIKPYHVDDSLRNNNDISFHPFKVSDNQQASAEHEHFRDQINSHSESLPQCLPELNRQHNDSISQLPLVIIINWDQQHIQVLR

SEQ ID NO: 46958 - protein, 519 aa, Oryza sativa
MAAAAAVASLLGFVLALPFCLAAPSITTHGSDGGGGSYVSAVGDPGMRRDGLHVAWEAWNFCNEVGQEAPGMGSPRGADCFDLENGVDENGQPTYKVVHRVTDADNNLRAGDPLPGSPANITDVDLYAAAKELYLGDRCQVPDSPSPWQFWMVMLKNGNLDTTAAICPENGRPARPFSQTSRFPCPGGAGCMNQPLVFHNRTALDATARRLRGGLFGTYDLDAADLGSREVSYYSVTWEKDIGSGGDGGWVFHHKLRTAPKYPWLMLYLRSDATKGFSGGYHYDTRGMTKMVPESPNFKVRVTLEVKQGGGPNSQFYLMDMGSCWKNDGRPCDGDTATDVTRYSEMIINPETPSWCTRRRIEECPPWHTFRNGTRVHRTDAARFPYAAYHVYCSPGNARAAEEPTTYCDAYSNPQPQEILQLVPHPVWGEFGYPTAKGQGWIGDPRTWELDVGALSQALYFYQDPGTPPAKRRWSSLDVGTEIYVSKYAEAEWTLSGFDIVVPEECIGSSQGGPVSRCL

SEQ ID NO: 46959 - protein, 312 aa, Oryza sativa
MAAAEVYSPTAAAAAQQQQRGKVAAQAWQAVVGWIGFLLQVLLQILRGTPSCAQLLSFVGFRYPLLSGPADSEQSPSVAFMPLRSEIPADTAPAPTPPPESLQRLTVVLDLDETLVSAYESSSLPAIVRTQAVEAGLHCFDMECISTEKDVEGRNKVNHVTVFERPGLHEFLQKTSEFADLILFTAGLEGYARPLVDRIDVHNRFKLRLYRPSTVTTEYREHVKDLSCVSKDFCRVVIVDNNPFSFILQPLNGIPCVPFSAGQHNDNQLMEVIFPLLKHLSIQRDVRPALYERFHMPEWFQKHGIPQTDQAV

SEQ ID NO: 46960 - protein, 730 aa, Oryza sativa
MYLSAFSSSASSHGGGDSEARDSSTVVAVDRDKNSQQAVKWAVDRLLARGSVLQLVHVKPQQNAEAGADAEMQQMFISYRGYCARKGMQLKEVILDGSDISKAIVEYATSNAITDIVVGASTRNTFIRKFRNPDVPTCLMKMVPDYCTVHVIHKGKAIQVKAAKAPAPFTTLPPKQYSQSSIESDGYPRSRGDWKKISNQSSPKANRPSVDRLSGFAKAPTRERPLSGARSAPPKDFDDYIDFIAPPRPSVTRSSFSDDVDFPLSLELPSMDFGDSLELSLSASMSIESLSSAGKDVETEMRRLRLELKQTMEMYNSACKEAIDAKQKAAQMHQMKMEESKKYQELRNAEEEALALVQMEKAKCRAALEAAEAAQRIAELEAQKRLRAEWKAKREAEERKRATEAMNNTDLRYRRYSIDDIEAATHKFDKALKIGEGGYGPVYKAVMDHTNVAIKILRPDASQGRKQFQQEIEVLSCMRHPNMVLLLGACPEYGCLVYEYMDYGSLEDRLCRRGKTLPIPWNIRFRIAADIATGLLFLHQAKPEPLVHRDLKPANILLDHNFVSKISDVGLARLVPQSAAAAEATQYRMTSTAGTFCYIDPEYQQTGMLTTMSDIYSLGILLLQIITARSPMGLTHHVESAIERGTFQEVLDPMVTDWPVEEALVFAKLALRCAELRKKDRPDLGKEILPELNRLRCLSQEYDASKVSSTSTTCSSSAPYSFGGDDVSTP

SEQ ID NO: 46961 - protein, 158 aa, Oryza sativa
MQFLRGGGGGSGGGGAGGMAWEVLKRHFSRKRAVDVRRINPKVPKEEAVAISGRLLQIFTDHGPLTVGNTWNHAKDAGISGLNSKTHMKILLKWMTGRRIVKLNCVGTGNSKKFLYSPYSADADKSEEAAAEELSKAAASQGGKATKGQQKKRATALH

SEQ ID NO: 46962 - protein, 272 aa, Oryza sativa
MGYNRRRGRGSSSSSSSRRTKQEAAWDDGPGTSLPRQEDTEEEPKGPKIQLAMWDFGQCDVKRCTGRKLSRFGLLKELRVTNGFGGVVLSPVGTQCVSKEDRHIVQRKGLAVVDCSWARLSDVPFVKLRCGAPRLLPWLVAANPVNYGRPCELSCVEALSAALIICGEEETAHLLLGKFKWGHSFLSVNRELLKAYSQCENGTEIINVQNSWLSSNSNVPKSPVNAAEKSHQSTEEGSDADSDDGLPPLEENLNHLNFNQDDESEEESESDE

SEQ ID NO: 46963 - protein, 869 aa, Oryza sativa
MASSLSLDDINDDSVDLSKAPVAEVFQKLKCDRKGLTGAEGESRLRLYGPNKLEEKKESKLLKFLGFMWNPLSWVMEIAAIMAIVLANGGGRPPDWQDFVGIVSLLIINSTISYIEEANAGDAAAALMAGLAPKTKLLRDGRWEEQEAAILVPGDIISIKLGDIIPADARLLEGDPLKIDQSALTGESLPVNKHPGQEVFSGSTVKQGEIEAVVIATGVRTFFGKAAHLVDSTNNVGHFQQVLTAIGNFCIISIGAGMAVEVLVMYPIQHRAYRDGIDNLLVLLIGGIPIAMPTVLSVTMAIGSHRLSQQGAITKRMTAIEEMAGMDVLCSDKTGTLTLNKLTVDKTLIEVCSKGVDKDMVLLYAARASRVENQDAIDTCIVNMLDDPKEARAGIQEVHFLPFNPVDKRTAITYIDGNGDWHRVSKGAPEQIIELCNMAADAEKKVHALIDSYADRGLRSLGVSYQQVPEKSKDSGGDPWQFIGLLPLFDPPRHDSAETIRRALHLGVNVKMITGDQLAIAKETGRRLGMGTNMYPSTTLLGDKNSQVNGPPIDELIERADGFAGVFPEHKYEIVKRLQEMSHICGMTGDGVNDAPALKKADIGIAVDDATDAARSASDIVLTEPGLSVIVSAVLTSRAIFQRMKNYTIYAVSITIRIVLGFLLIAIIWKFDFAPFMVLIIAILNDGTIMTISKDRVKPSPTPDCWKLNEIFLTGVVLGTYMALVTVLFFYLAHDTNFFTDVFGVTSIRESERELMAALYLQVSIISQALIFVTRSRSWSFVERPGFLLLFAFFAAQMVATAIAVYARWDFCRIQGIGWRWGGAVWQFSVVTYLPLDVLKFIIRYALTGGKAGDSAQKKASSPPPTSQP

SEQ ID NO: 46964 - protein, 133 aa, Oryza sativa
MFLNGIPNDVEVGFLTLLESLNFCKVGQYLKCPKWPIWVVGSESHYSVLFALNPNVQEENELEERESKIRRAFDAQDQSGGGGFISVEGFQQVLRDTDINFPSDKLEDLCNAGIIVWSEFWQGCYNWIKGLEA

SEQ ID NO: 46965 - protein, 1286 aa, Oryza sativa
MRPSPPPAAPAAEPVPPWLRSLPVAPEFRPTAAEFADPVSYILKIEPAAAPYGICKVVPPLPPPPKKATFSNLSRSFAALHPDDRSPSFPTRHQQVGLCPRRTRPGLKPVWRSSHRYTLPQFESKAGATRKSLLAGLNFPASRQLTPLDHEVLFWRASADRPIVVEYGSDMSGSGFSPCAAQPQPPPQQQPTARAAAHLGETAWNMRGVARSPGSLLRFMPEDVPGVTTPMLYVGMMFSWFAWHVEDHDLHSLNYMHLGAAKTWYGVPRDAALAFEDVVREHGYGGEVNPLETFATLGQKTTVMSPEVLVESGIPCCRLVQNAGEFVVTFPGSYHCGFSHGFNCGEASNIATPEWLRIAKEAAIRRASINRPPMVSHYQLLYDLALSMRFREPSNGEMETRSSRIKEKKKCEGEQLVKKMFIQNVIEDNELLSHLLNDGSSCIILPANAHDGPGLSTLRSTDQSNMNSRISHNLCSREEAPEASGCLSPNRNGDTRNCISSDTHNMEGDKGDIMSATGLLDQGLLSCVTCGILSFSCVAVLKPRDSTARYLMSADSNSINNQLSISGGSILADAPTNERNGVISRPYSEHCCNEIMADDAEIDKNSALDLLAFAHGGQPDPEEDPLEKILKIAHGINKSQPNSSNNVGCVGTKLSSSSTERQERPSSQNAHCNGSSVISNGPKGVRTRNKYQLKMVLSEGFQAKDIYSAKEKKVQSEPSSSKGDVRETIDVSGTENDVGCKSTTISVSEHRGSTKNMYSVKEKKVQSKPSSLKGTVKETVDVSGTENDARCKSITISVSEHRGSTPMTNSLAASIVKPDKDSSRMHVFCLEHAIEVEKQLHAIGGSNIMLICRPEYPKIEAEARLLGEEMGLVYDWKGIHFKEANMEDRQKIQEVLRDEEAIPTSSDWAVKLGINLYYSANLAKSPLYNKQMPYNRVIYRAFGCDSPNDSPVMFNTCERKQSHQKKIVVAGRWCGKVWMSKQVHPYLAHRVESQEAEEADRICSYHFDEKHKAEPVGNSSRVEASKRKSSSLTDVTESSNRRGEIPGEETNTKRPKHSQENNLRALETAAEVVVPSPAGTGLRVSSRIANRANKLKSKMEKEDVPSSRPKSNIKEKSSHASGQKSNVQEANANSASHLRAMPPKQKAEAEAKKQIRTPKPPKQAVEYSCDIEGCSMSFRTKRDLSLHKSDICPVKGCGKKFFSHKYLLQHRKVHTDDRPLTCPWKGCNMAFKWPWARTEHLRVHTGDRPYVCHEPGCAQTFRFVSDFSRHKRKTGHSVKKKKKAKS

SEQ ID NO: 46966 - protein, 142 aa, Oryza sativa
MDTTSFPAVWAVVGPGVAGAVFGVGWWFWVDAVVCSAAAVPFLHYLPGLFASFAALMFNCVKREDANYNYYSPYDDSEWRLKLWLFVSYVVSFVSLAGAVGFLVQDALTDTGPSAWTGVAGVLQSVFVLISGLMYWTCHSED

SEQ ID NO: 46967 - protein, 216 aa, Oryza sativa
MPAELRESAAATWLSVAATDQRVYLTDRSTGWASWFDPAKQQWGPTCRLRPDATVSTWGLAPGRGGAERLVLFGAKRCGRAEQAKSRVVIQAWEVDGDGLALSRGAAHDTMPGEMSERLFPRDEDGDEEDEEEMSPSIGVCGNAAGGYVYNAADPTIGAVLYELRDGVGSAVERWEWVPCAPSVEAEPLGRFILACSPVGLDELARGQPAACTTAQ

SEQ ID NO: 46968 - protein, 249 aa, Oryza sativa
MARRRLHPRLPLRHRGRGRRQAPPPLLPLPLPLPLPRLPRPHRRHAPPPRWHPLRRTEEGGVGLGPGRGHHRGRGQAPRRDALLLRLARRGAEDGDRARPHRREEGGPLRGPRRVHPDLHAEARPGVRRQGRGAPRQGGRRRGLRLRQRRVRDAGVEGEPRRRRRGAPPLRRQRRARPRHGRRARPLRQARRPRRAVPPLRAPGGGRRRQGAQPRGGRRLHHQQRRGDAQGALKREQLKPSSTFHLKSP

SEQ ID NO: 46969 - protein, 206 aa, Oryza sativa
MDLESVNPELAEIDGQIGDILRALQNGFQKLDKIKDANRRSRQLEELTDKMRDCKRLIKDFERVVKDMAGSTDPETARMLHDRKQSMIKELNSYVALKKQYASENKRVDLFDGPSVEDGFGEENVLLASNMTNQQLMDQGNQLMDETDQAIARSKQTVQETINVGTETAAALKSQTEQMSRIVNELDSIHFSIKKASQMVKEIGCN

SEQ ID NO: 46970 - protein, 569 aa, Oryza sativa
MDEEARAAGCSPAPPRAPAASCGAAAELCLCSPTGVEGIEQVPGCPCFEDAGAVVVSGEAPEGPGVLCSEDGAELKLAEQGALDVRLGSPAVGIHEQQLLHRGTSGSDEAGAINEISPVEVSPSEASSNLDTAGAIGGSPLMLESLPETSDTRGCEQEVMPGVVVGSSNRDASSEVGVESERGSDADGRNGLGEGELVSSVDGGGAEKSSKVTGVLSEEGVDGMETALEPCVASVGSITQVEEGVDRMETSLDDSEASDGSTTQDFDTDVETESSGSSIEEQDMGYGVHIPHTEQAICEVARGNKSSEVKSSDRMSSVTLPTLILASGAAMLPHPSKVLTGGEDAYFIACDGWFGVADGVGQWSFEGINAGLYARELMDGCKKAVMESQGAPEMRTEEVLAKAADEARSPGSSTVLVAHFDGQVLHACNIGDSGFLVIRNGEIYQKSKPMTYGFNFPLQIEKGDDPFKLVQKYTIDLQEGDAIVTATDGLFDNVYEEEIAAVISKSLEAGLKPSEIAEFLVARAKEVGRSATCRSPFSDAALAVGYLGYSGGKLDDVTVVVSVVRKSEV

SEQ ID NO: 46971 - protein, 483 aa, Oryza sativa
MVLAQLGGSISRALAQMSNATVIDDKAFADCLHEIARALLQSDVQIRMVSDMRANIRRAVNLDALPAGTNKRRIIQQAVFAELCNMLDPGKPSFTPTKGKPSVVMFVGLQGSGKTTTCTKYAHYHQLKGFKPSLVCADTFRAGAFDQLKQNATKAKIPYYGSYMESDPVKIAVEGVERFRKEKSDLIIVDTSGRHKQEAALFEEMRQVAEATKPDLVIFVMDGSIGQAAFDQAQAFKQSASVGAVIVTKLDGHAKGGGALSAVAATKSPVVFIGTGEHMQDFEVFDVKPFVSRLLGMGDLSGLVNKIKDAMPADQQPELMQRLIEGTFTLRVFYELFQNLLNMGPIGQVLSMIPGFRSELMPKGHDKESQAKIKRYMTIMDSMTNAELDSTNPKLMSESRIKRVARGSGRTMKDVTDMLEEYKRIAKVCSKLKKKLPKNMDRNVMNNKDTLNTINNLIPKQLLNQIGGVNPLQSVMKQMGLKT

SEQ ID NO: 46972 - protein, 477 aa, Oryza sativa
MTDGHLFNNILLGGRAGSNPGQFKVYSGGLAWKRQGGGKTIEIEKSDLTSVTWMKVPRAYQLGVRTKDGLFYKFIGFREQDVSSLTNFMQKNMGLSPDEKQLSVSGQNWGGIDINGNMLTFMVGSKQAFEVSLADVSQTQMQGKTDVLLEFHVDDTTGGNEKDSLMDLSFHVPTSNTQFLGDENRTAAQVLWETIMGVADVDSSEEAVVTFEGIAILTPRGRYSVELHLSFLRLQGQANDFKIQYSSIVRLFLLPKSNNPHTFVVVTLDPPIRKGQTLYPHIVIQFETEAVVERNLALTKEVLAEKYKDRLEESYKGLIHEVFTKVLRGLSGAKVTRPGSFRSCQDGYAVKSSLKAEDGLLYPLEKGFFFLPKPPTLILHEEIEFVEFERHGAGGASISSHYFDLLVKLKNDQEHLFRNIQRSEYHNLFNFINGKHLKIMNLGDGQGATGGVTAVLRDTDDDAVDPHLERIKNQGWG

SEQ ID NO: 46973 - protein, 188 aa, Oryza sativa
MYPQLLEPSILPTYKAAPRDPSSSSHSPRQLAAAAMFGVVFPDHSFPLDVTAFAQVAPNSWALDLSTLSLAAAPRSAVVFLLPALPPPPDGQRAERVALRVGENLFNFMQSFCGADGGKLVVPTDILDRWFRKFQERPRRIPRISRHSTFESEGYFAVHCKLHVGRKGWLVEFCICRPSISSVFLDRN

SEQ ID NO: 46974 - protein, 89 aa, Oryza sativa
MALDARAMLLPAAAEVATVDVVGDGEERPWSGNGGNGGGGGGDSSSAMVGAVSVDLPTMWGDERRMKRELVAWAKAVASMAIRESCNSR

SEQ ID NO: 46975 - protein, 864 aa, Oryza sativa
MQLVDDADGALDSWARFCDLSDELFGGAGDLSAGPRLAPVVADLCARGLAELLRDQFIRSLEGIFRSNAVKKFWQQFHPYCNSSAVERIKFCVQENWPEDILSKALEDICLEKNYQEKCVLALVHSLQSYEDRSPHRKSKALDCSSSLMPRYQLMVSSVLLTTLPLSFPEILNVYFKKKLEELNIMMAGLDGSDPFDNHDLFERNSTSAWHSEMDIDGQEPGISESRNLVKNIGKVVRDLRYLGFTSMTEDSYSSAIIWLLKSKVHELAGDDYRIPVLGCVKKWIQAVPLKFLHAQLTYLGDSLDNESGSSGLKSPLASRPSSFPGIGVPSEALVRWHMRLEYFAYETLQDLRIGKLFEIIVDYPESSPAIEDLKQCLEYTGQHSKLVDSFISSLRYRLLTAGASTNDILHQYVSTIKALRTIDPTGVFLEAVGEPIRDYLRGRKDTIKCIVTMLTDGSGGNANGTGNAGDNLLEELNRDAENQENVDYDDHTNIDEKQAWLNAESWEPDPVEADPLKGSRNRRKIDILGLIVSIIGSKDQLVNEYRVMLAEKLLNKSDFDIDSDIRTLELLKIHFGESSMQKCEIMLNDLIDSKRTNSNIKTSLSKTSQTVGTVQEETELSHEVLDATIISSNFWPPIQTEDLTVPASVDQLLSDYAKRFHQIKTPRKLLWKKNLGTVKLELQFEDRSMQFTVAPVHAAIIMQFQEKPSWTSKTLATAIGVPVDSLNRKISFWTSKGVLTESVGPDADDPTFTVVDSTSDFNKNSTVNQLSERFQITEEEGESSIASVEEQLRKEMTVYEKFIIGMLTNFGSMTLDRIHNTLKMFCIAEPSYDKSLQQLQSFLSGLVSDEKLEMRDGSYLLRK

SEQ ID NO: 46976 - protein, 411 aa, Oryza sativa
MPTLAAAAAAARRAGGALRYAVLGGVRSLSSLQPSSSSSAAAAASEEVLVEGKASARAAVLNRPGHLNALTTTMGARLNKFYMSWEDNPDIGFVMMKGSGRAFCAGGDVVRLHQLISEGKLDECKDFFKTLYSFIYVLGTYLKPHVAILDGVTMGGGGGVSIPGTFRIVTDRTVFATPEVHIGFHPDAAASFYLSHLTGHVGEYLALTGEKLNGVDMIALGLATHYSMSDRLNLVDERLATLLTDDPSVIDTSLTHYGDLVYPDKSSIVHRLEVIDKCFSLETVEEIVDAMEIEAARLNEDWSTLALKRLKEASPLALKVSLRSIREGRYQTLDECLVREYRMSINGISEKFSHEFREGVRARLVEKDLAPKWDPPALEYVSADMVDSYFAPLGEFEPELTLPTESREAFV

SEQ ID NO: 46977 - protein, 37 aa, Oryza sativa
MLVSPSISSGCLVSGGQDKHVEPELLLGFGVWKNLQA

SEQ ID NO: 46978 - protein, 991 aa, Oryza sativa
MNQPEVNGLLCVGLHQTDGGDELYATECLKMNQGSSHETNKLDAVMSASTMHSDHNNANACVDDYQHTKMMAGIQPMEEVGFGCTQPFELQSQGIVPDSEEESLPSSPETSSTSNYDMPDLAEQNLEHIYNVLGEMVDKEGPVVLSPEYVMCGTTSHVEPRLTFSADGFKIEYWDSCENDEMAAQYWKISDITCIDCKWAQSVGSVLITLHVGSGTETGNSSHDRIQFCLIDSQWPRKQQNIWHLASRYQEIWNNIPSGDFASENWNIEPSLFFPKQYFSDTEEFEDVIYPKGDHDAVSISKRDVELLLPETFVNDTIIDFYVKHLSTRIEPAEKHRYHFFNSFFFRKLADLDKDQGRAPEGRAAFLRVRKWTRKINIFTKEFLFIPVNFNLHWSLIVICYPGEVETFKDGDTNISAKIPCILHMDSLKGSHSGLKDIIQSYLWEEWKERHPESASDCSDKFLNLRFISLELPQQDNSFDCGLFLLHYVELFLMDTPRSFNPLKIDSFANYLSDDWFPPAEASLKRSLIRKLIHKLLKEPSQDFPKLVCCSEQLDKTHGSENAELEQMSENAEREQAKELPAQMCTDGEPDSVGTILETQQPSISTCFNYSDENGPPVSVHNLHKLEVSSANKDAIVCLSNHDEKNESPPADSYNHLDLRSCDSEEAETAKGSAGVVKDPNSHKEPLLDSLDNNQDISIQAGAEMHDSMDSKLCSISNNADLMASEERSLDKNTNENEEHNRTSEDIVESVMMLGGSKSDTELDAEPERTAGEAEVRNCDHSKDIDYIALGDINKDAAKQSLNRNIVEAEDIKCEGTLVDHTVVEDATPYNVNETSASADKINDNEHNVSSELKEGNNGNGITTSISCEMEDRSIDNLMVGDSRNGTDETRADGQEAHDNSATAETVPCEDNATTSITDAEMPHEDSTCSVKGEAISDNTASDAKRPLPDSTYIEDIPDDKCLQKDDGGGDEAKTERHYKRRKFLVSEATS

SEQ ID NO: 46979 - protein, 91 aa, Oryza sativa
MVPRAMAAGRPRKRAMVVVLVMDMGRKPRKRVKGPMTLVVTPSRSLTVRRRRRVLMGMGTARSLRMRVVDTTSRAMAGETNTREATAARNM

SEQ ID NO: 46980 - protein, 253 aa, Oryza sativa
MESGANARRRRRLVDRGSDRLAFITGQAQSLPSDPSPDSPLYTVDAASLQRSERQLNEVGIGDDIFNYITQLQKSESGVQPTSEAHLETHKEKHQGNESDLQKLKTSNVVPEIQPVNEKAFQRHSEETLRKKNSHDRSASTQPMREMETRSRYVPPNQSNQSDSAGWSVETLKEILNFAPHEITQAISATEYNRFLASVIIGFLVVLSNWGLDVGGTITKVLVCYKANSISYCNEHNHCLHFVDGEQGPQREG

SEQ ID NO: 46981 - protein, 557 aa, Oryza sativa
MMSLNLAHQTGAAAAVAPAAPRTAVVAAAAGTVSAPAVAPAAAPSLQLQTQTVDPAAPAQGPDLPMAFQALVESLPEEQHPDVGGEERRKVGVPVYVMMPLDTVRKDGNGLNRRKAVEASLKALKSAGAEGIMVDVWWGIAECEGPGRYNFTGYMELMEMAKKNGLKVQAVMSFHQCGGNVGDSVTIPLPKWVLEEMDKDQDLAYTDRSGRRNYEYLSLGADAMPVLKGRTPVQCYGDFMRAFRDHFAAFMGNTIVEIQVGMGPAGELRYPSYPESNGTWRFPGIGEFQCYDRYMLSSLKAAAEAVGKPEWGNAGPGDSGGYNDWPEDSPFFRREGGWNTPYGEFFMSWYSQMLLEHGERILSAASGVYTGTPGVKISVKVAGIHWHYGTRSHAAELTAGYYNTRHHDGYQPIARMLARHGAVLNFTCVEMRNHEQPQDAQCRPEELVQQVAAAARESGVGLAGENALPRYDETAHDQIVTTAAEKAEEERMVAFTYLRMGPDLFQPDNWRRFAAFVKRMTESGVRDVCREQVEREAQGVAHATGSLVHEAAVALSN

SEQ ID NO: 46982 - protein, 710 aa, Oryza sativa
MPVADQLVDAASGNKILSFMDGNAGYNQIFMAEEDIHKTAFRCPGAIGLFEWVVMTFGLKSAGATYQRAMNYIYHDLIGWSVEVYIDDVVVKSKEVEDHIADLRKVFERTRKYGLKMNPTKCAFGVSAGQFLGILVHERGIVVTQRSVNAIKKIQPPENKTELQEMIGKINFVRRFISNLSRRLESFTPLLRLKADQQFTWGAEQQRALDNIKEYLSSPPVLIPPQKGIPFRLYLSAGEKSIGSVLIQELEGKERVVFYLSRRLLDAETRYSPVEKLCLCLYFSCTRLRHYLLSNECTVIWKADVVRYMLSAPILKGRVGKWIFSLTEFDLRYESPKAIKGQAIADFIVEHRDDSIGSVEIVPWTLFFDGSVCTHGCGIGLVIISPRGACFEFAYTIKPYATNNQAEYEAVLKGLQLLKEVEADTIEIMGDSLLVISQLAGEYECKNDTLMVYNEKCLELMKEFQLVTLKHVSREQNLEANDLAQGASGYKPMIKDVKVEIAAMLADDWRYDVHQYLSNPSQSASRKLRYRALKYTLLDDELYYQTIDGVLLKCLSADQAKVAISEVHDGICGIHQSAHKMKWLLRCVGYFWPTMLEDCFKYYKGCQDCQKFGAIQRAPASAMNPIIKPWPFRGWGIDMIGMINPPSSKGHKFILVATDYFTKWVEAIPLKKVDSGDAIQFVQELLLRIKVQSSCPMSLFSLPIAWVSSC

SEQ ID NO: 46983 - protein, 214 aa, Oryza sativa
MLVVVVVPLLMLGMACDAISVSVGSPKLDQAPWSRLPESFRDKGALVELKLRDQRVVLLPLSLHDSFPAASMESTELASPSTAEWSSLWAYHMTTGLDSLALALTQTANQNLAGEEGEGRNPAAKSPLLETRVRLLSAGLQLVSLAEKVRICWAWAWAAARAGRRRRRRTAAAMVVLAGLGKGIGFLAFGFGIEPTTLLTSSLVNNTVANLPIM

SEQ ID NO: 46984 - protein, 258 aa, Oryza sativa
MFFKEMKVKNNNFYFDIQADEKDAIQNIFWCNASSRAAYHHFGDCITFDTTYRTNMFNMPLAVFVGCNHHMQSVILSVALLRDERAESFEWLFKTFLKCMGGKAPMCILTDEDPAMASAIREVLKNTIHRLCRWHVLKKYKKQLGVLYEMFKHRNFKEKLHFVINHPLTPSEFVAAWKDLVEEFELQGCEVMENLYNLRAEWIPAYFKQIYYARMTSTQRSESVNHMVKTGYLKELTALHRVAAEINRCIQLRKQKED

SEQ ID NO: 46985 - protein, 266 aa, Oryza sativa
MASTIMAPTSRVLAAKTPFLGHPRPSNAPVRDIAAAATGRITMSKELWYGPDRVKYLGPFSAQTPSYLRGEFPGDYGWDTAGLSADPEAFARNRALEVIHGRWAMLGALGCITPEVLEKWVRVDFKEPVWFKAGAQIFSDGGLDYLGNPNLVHAQSILAVLGFQVVLMGLVEGYRINGLPGVGDGNDLYPGGQYFDPLGLADDPVTFAELKVKEIKNGRLAMFSMFGFFVQTIVTGKGPLENLLDHLADPVANNAWVYATKFTPGS

SEQ ID NO: 46986 - protein, 286 aa, Oryza sativa
MAYLPPHKRHSNASTPAPTPAPPPPSLSSSLRSLSLSSSPRGRHHRGATTRPSSKIVHAAGCVSRWSTLPPFPDDDGDDDGSLRLEPFPCDPIERRTGAKPLALVSSSAAEASSPCSAAAAASTVTERFLPDLLAAAWRAKAGDVPEEEEEVKLSVVARVGKVLFESSGGGSPVSMNSLREAVKAGEEGSRSNLHKSFYTNVPSECLDDMERSAAEKMGLEFDSSKEHYHVKVFDKRQSDSTITCKCTVQEDGKLAIHKVCLTAYRSNLSLLPFVLLMFCIIDSYE

SEQ ID NO: 46987 - protein, 488 aa, Oryza sativa
MDLRHSQTPSSDDETRALNALLDAFSSAFSLDDIATAYCRANGDVNRAGDLLTELEHPMAKSNEVDSSVGTIHPPSGKAIEENSTESSGQAKSREKMQKSSASFGTVSSMLGKGSTRATVPLMNRASGKEKPPMVELPEYMRDDFNGKVDKSDSAPKRETLNNRDIEEFLFSMLGEGFKLSMDMIREVLGSCGYDIKKSMEELMSVSTKDTSKKAEDKHYIAQDAAVECSSTKGSCLESQSTFRNGSAYSLRGKRHSSSQISPGELLVSIFTVPERSEEEPIGKRYELGANRNRVPDQKPVVEPLEDISSETNCYPVKVILSKELVAHNEEDYQNYRRAAKQHWDMMKQYYEKAVDAFREGNQKEVEYLLGEGKHYYMMARLADEKSSAEIVKSKKVESKNELCLDLRGQDPANVANLVRLHLRQLSNIPSFEYLKVITGAEDGSFKSAQRRRKVMKYLEKKSIVWTEEESNPGTILIPINQKQDQQD

SEQ ID NO: 46988 - protein, 532 aa, Oryza sativa
MLRAKETFRKMYSVAKNYCGGGLAASDALSVSALGRSLKPSRKASRHVVPCRARSFTQCSLGGGSADQEIVIALGSNVGDRISTFDRALRMMKNSGVNITRHACLYETSPAYVTDQPRFLNSAVRGTTKLEPHELLKKLKEIEKDIGRTDGIRYGPRPIDLDILLYGKSHISTENLTVPHERIHERPFVLAPLVDLLGSSTDDNVEKSWHSLAKCTGGFFESWDKLGGESIIGTEGIKRVLPVGNRLLDWSERTLVMGVLNLTPDSFSDGGKFQEVEAAIAQTKLLISEGADIIDIGAQSTRPLARRLSADEELERLVPVLDAITGIPEMEGKLLSVDTFYAEVAAEAVKRGVHIVNDVSGGQIDPRILEVVAELGVPYVTMHMRGDPSTMQSEQNLLYGDVCKEVASELYKRVRQAELSGIPLWRIVLDPGIGFSKNSKHNLEVIMGLESIRTEIGKMSLGASHVPILLGPSRKRFLGEICNRVNPTERDAATMVVATAGILNGANIVRVHNVKYGVDTAKVSDALSKGRR

SEQ ID NO: 46989 - protein, 419 aa, Oryza sativa
MVLQHSDRMDSLFSPQTSWVSGPIIVGAGPSGLAVAASLREQGVPFTMLERADCIASLWQKRTYDRLKLHLPKQFCELPRMAFPAHYPEYPTRRQFIDYLEDYAAAFDINPLFGHTVLSARYDETSGLWRVRASSSAGAEMEYIGSWLVVATGENAESVVPDIPGIDGFGGEVVHVADYKSGEAYRGKRVLVVGCGNSGMEVSLDLCDHGARPAMVVRDAVHVLPREVLGKSTFELAVLLMAWLPLWLVDKILVLLAWLVLGNLAKLGIRRPATGPLELKNTTGRTPVLDYGALARIRSGEITVVPGVARFGRGFAELADGRVIALDAVVLATGYRSNVPQWLQGNDFFNKDGYPKTAFPNGWKGESGLYAVGFTRRGLSGASADAMRAAKDLARVWKEATKPTKKSTACHRRCISVIF

SEQ ID NO: 46990 - protein, 112 aa, Oryza sativa
MLDSRSSSPRFSSPRLSPTVLQPMLLLLHPIPPRIPRSRRRRVVPFRRRRHTPPMPSLEPISSPSAGTAIHITGSQVLAGTDFFPFRRATVAAIHFTGSSCADWFPSDLSRN

SEQ ID NO: 46991 - protein, 501 aa, Oryza sativa
MAPPSRHVDAVAAVLPVLLTILLPSAAAIGVNYGTKGDNLPPPATVAKFLANRTRIDRVKLFDTNPDIVKAFAGTGITVMVTAGNGDIPTLGTKDGAAAWVAANIAPYYPATDISLVAVGNEIINTADNALIGGLVPAMRTLRAALVAAGFRRIRVSTPHSLGILSVSSPPSASRFLDVLDRTFFAPMLEFLRKTKSPFVVNPYPYFGYNGDTIPYALARRPNPGVLDPGTGITYTSMLEAQLDSVFSAMKKLGFEDVDITVGETGWPTKAEPGQAGVSVAEAAEYNRYLIGEASSGSGTPLMPKRTFETYIFALFNENLKPGPIAERNFGLFKPDLTPMYDVGLMKDTGKSSASAPAPAKGGNASGAAVTKRDSESEAAAPADEASAPAPSSVGKKVSTKATAPAPSDDGSASPEPSEGESADEKNPEEEEEEEGDDAAATTTPGGDGDSPETEAAGDDAKESEGKNNPHGHGDSSEAISVMFSVPSMLTIALSAILLHL

SEQ ID NO: 46992 - protein, 408 aa, Oryza sativa
MKRSRVVPDQVIIATVLSTCAHTRNLRFGKAIHSYMLVSDTLIDAQVSCALMNMYASCADMEMAEKLYNRVSEKEIVLSTTMVYGYAKNGKVEIAHSIFNGMPAKDVVSWSAMIAGYAESSKPMEALNLFHDMQRSGVKPDEITMLSVISACANVGALEKARCIHSFVENHSMCKILPIGNALIDMFSKCGSLTLALDVFNAMPQKNVVTWTSIITASAMHGDGRSALTLFENMKSEGIQPNGVTFLGLLYACCHAGLVEEGRLLFKIMVQQYRIEPMHEHYGCMVDLLGRAKLLGQAADLIQSMHLRPNVVIWGSLLAACRMHGDLELGTFAAKKILELDPNHGGAQVLLSNIYAEYGNWNDVKEVRGVMEVQGTWKKKGCSWMELNGSVHQFAVGGEKILEMKGSF

SEQ ID NO: 46993 - protein, 193 aa, Oryza sativa
MDRVQLVLLGLPILLFCSDLVTLFGPEQLPTPQPDLPPHPSPDAASDAVQPDDIAADAAASAQIAEPQVDGPASGTTVELKFCASCSYRGNAVTVKKMLETSFPGLEWFHLHGTTRSVLIDLEQWQQSGCLAISPSHFYKVLVSLKFTAMDNWFSQNYPNRDFPASLSYGSSLATGYQILNSGKIWKRFGHRC

SEQ ID NO: 46994 - protein, 498 aa, Oryza sativa
MDFFTEYGEGNRYKIEEVIGKGSYGVVCSALDTHTGEKVAIKKINDIFEHVSDATRILREIKLLRLLRHPDIVEIKHILLPPSRREFKDIYVVFELMESDLHQVIKANDDLTPEHYQFFLYQLLRGLKYIHTANVFHRDLKPKNILANADCKLKICDFGLARVAFSDTPTAIFWTDYVATRWYRAPELCGSFFSKYTPAIDIWSIGCIFAELLTGKPLFPGKNVVHQLDIITDLLGTPSTEAISRIRNEKARRYLSSMRRKKPIPFTQKFPNADPLALRLLERMLSFEPKDRPNAEEALADPYFRNIANVDREPSAQPVTKLEFEFERRRITKEDIRELIYRDILEYHPNMLREYLEGTESAGFMYPSAVDHFKKQFAYLEEHYAKGSTAAPPERQHNSLPRPSVLYSDDRPQNTANIAEDLSKCVLGDNTQKMHQGSASVCANRVPQGGAARPGKVVGSALRYGNCSTSTAEQYEHRRTDRNPALATNTVSPRGSYP

SEQ ID NO: 46995 - protein, 367 aa, Oryza sativa
MSPQRRSARRSKSRSPLREKSVSMSPRRSMSKSLPRSVSRSPVARRSRSPVKARTRSISRSSARSLQRRSRSRSLERSPVRKSVSRSPPTMDKGRSISRTSGRLPLRRSISRSPDRPYRRIPSRSPRKNTRRSISRSPVRLSKRSISPVRGGRSRRSVSRSASPPRRAISPAQNHGRSPSRSPSPDGSKRVRRGRGFTHRYSFARQYRSPSPDHSFRYGGRGDRDRHMSYRGSRQRSPPRRYRSSPLRGRASPRPNRYRRRSRSISRSPVYRDRGRGGGRSRSPVRSRSPAGGKLRSHGDRSRSMSRSRSLSGSRSRSPPPIHNRSPLASLSPKRESNAKSRSPSASSEGKKGLVSYGDGSPDSAGK

SEQ ID NO: 46996 - protein, 313 aa, Oryza sativa
MEFNKVVSSYRAASPAPVGMARGGGGPASRVEFVPSSRRARLAATNNSVTPVTKEEKQRIDQSEILTLDNIRTSLVRQEDSIIFSLLERAQFCYNADIYDKNAFHVDGFDGSLVEFMVRETEKLHQQVGRYKSPDEHPFFPEDLPEPLLPPLQYPKVLHPIADSININKEIWKMYFDELLPRLVKEGSDGNYGSSALCDTICLQALSKRIHYGKFVAEAKFQESPEAYMPAIIAQDCDQLMHLLTYETVERAIEHRVEAKAKIFGQEVDLGAEDNGAPPMYKIRPSLVAELYSYRIMPLTKEVQVAYLLRRLD

SEQ ID NO: 46997 - protein, 190 aa, Oryza sativa
MAMARSILLLLLLAAAASASADAPFLVAHKKVSLSRPKPGVERLAVSLDLYNQGSATAYDVSINDDTWPKEAFELVSGEMSKTLERLDPGVTASHAFVLETKVQGRFQGSPAVITYRVPTKAALQEAYSTPILALDVLAERPPEKKFEWAKRLVAKYGSLVSVVGLVGVFIYLVASPSKSSGAKASKKRR

SEQ ID NO: 46998 - protein, 85 aa, Oryza sativa
MQITPRTELMRGICTSSTQPSLYSTMYGLLRLAIRDICAANSKQSIKIKSSNQTICPVLPNIQSGFCRRNSKQLMGATCLLKCGE

SEQ ID NO: 46999 - protein, 559 aa, Oryza sativa
MGSMAAAAEAAQEEETVVFRSKLPDIEIPSHLTLQAYCFEKLPEVAARPCLIDGQTGAVYSYGEVEELSRRAAAGLRRLGVGKGDVVMSLLRNCPEFAFTFLGAARLGAATTTANPFYTPHEIHRQASAAGARVIVTEACAVEKVRGFAADRGIPVVAVDGDFDGCVGFGEAMLDASIEPLDADEEVHPDDVVALPYSSGTTGLPKGVMLTHRSLVTSVAQQVDGENPNLYFRREDVVLCLLPLFHIYSLNSVLLAGLRAGSAIVIMRKFDLGALVDLTRRHGVTVAPFVPPIVVEIAKSPRVTADDLASIRMVMSGAAPMGKDLQDAFMAKIPNAVLGQGYGMTEAGPVLAMCLAFAKEPFEVKSGSCGTVVRNAELKIVDPDTGATLGRNQSGEICIRGEQIMKGYLNDPESTKNTIDKGGWLHTGDIGYVDDDDEIFIVDRLKEIIKYKGFQVPPAELEALLITHPDIKDAAVVPMIDEIAGEVPVAFIVRIEGSAISENEIKQFVAKEVVFYKRLNKVFFADSIPKSPSGKILRKDLRAKLAAGIPTNDNTQLKS

SEQ ID NO: 47000 - protein, 250 aa, Oryza sativa; identical to SEQ ID NO: 28625

SEQ ID NO: 47001 - protein, 451 aa, Oryza sativa
MVEQKGNILMKRYEIGKLLGQGSFAKVYHGRNIKNSQSVAIKVIDKEKILKCELMDQIRREISVMNLVRHPCIVQLYEVMATKTKIYFILEYVKGGELFNKVRRGRLKEEVARKYFQQLISAIDFCHSRGVYHRDLKPENLLLDENRNLKISDFGLSALAECKRQDGLLHTTCGTPAYVAPEVINRKGYDGAKADVWACGVILYVLLAGYLPFQDKNVINMYKKICKAEFKWPSWFSSDIRKLLRRILDPNPATRISVSEIMEDPWFRVGLNSDLLNKTIPTDKVDKVMHVDMDSTFGNLSNNINEGKQEAENLTSLNAFDIISLSSGFDLSAMFEDENSKEESKFTSTNTATTITKKLEDVAKNLRLKFLKKNGGLLKMEGSKPGRKGVMSINAEIFQITPDFHLVEFTKINGDTLEYQKVKQEMRPALKDIVWAWQGEQPQPQSLNEQS

SEQ ID NO: 47002 - protein, 153 aa, Oryza sativa
MSRGGGSYGEVGQKIDYVFKVVLIGDSAVGKSQLLARFARNELRGHADKNIVIMLIGNKSDLGTLRVVPTEDAKEFAERENLFFMETSALESTNVENAFMTVLTEIYRIVSKKNLVANEEVDSSGNSSLLKGTKIVVPGQEPAPPTKASCCMS

SEQ ID NO: 47003 - protein, 283 aa, Oryza sativa; identical to SEQ ID NO: 30815

SEQ ID NO: 47004 - protein, 504 aa, Oryza sativa
MQPPILLPLLLLLLLLAAASPRPVLSRRHASPPLATETLDVAASLSRARAAVSAEAVPLHQSAAAAVSTEVVGEEHEEGRLALRLHSRDFLPEEQGRQRHASYRSLVLARLRRDSARAAAVSARAAMAADGVSRFDLVPANVTAFEASAAEIQGPVVSGVGLGSGEYFSRVGVGSPARQLYMVLDTGSDVTWVQCQPCADCYQQSDPVFDPSLSTSYASVACDNPRCHDLDAAACRNSTGACLYEVAYGDGSYTVGDFATETLTLGDSAPVSSVAIGCGHDNEGLFVGAAGLLALGGGPLSFPSQISATTFSYCLVDRDSPSSSTLQFGDAADAEVTAPLIRSPRTSTFYYVGLSGLSVGGQILSIPPSAFAMDSTGAGGVIVDSGTAVTRLQSSAYAALRDAFVRGTQSLPRTSGVSLFDTCYDLSDRTSVEVPAVSLRFAGGGELRLPAKNYLIPVDGAGTYCLAFAPTNAAVSIIGNVQQQGTRVSFDTAKSTVGFTTNKC

SEQ ID NO: 47005 - protein, 203 aa, Oryza sativa
MAEEDIQPIVCDNGTGMVKAGFAGDDAPRAVFPSIVGRPRHTGVMVGMGQKDAYVGDEAQSKRGILTLKYPIEHGIVNNWDDMEKIWHHTFYNELRVAPEEHPVLLTEAPMNPKANREKMTQIMFETFNCPAMYAAIQTMASHQGIPNVCNGLLCWVSPGNKDVCPCSLKAFCFEFSTSRIAGLNDCTSSFVFSLEDNLFLCT

SEQ ID NO: 47006 - protein, 444 aa, Oryza sativa
MSANPNQSFDDFNKQASSNFNSFLAIVVVLSVVSIAGSVAIVYLVYRCVKKNGLPAVNINTNPTAAAAMYAVVPDSQIRDATVERFLKEIAGEKPIRFTAQQLAGFTNNYSARLGAGGFGTVYKGMLPNGLTVAVKRLHVGGHGDGWSTSQEQFMAEVGSVGRTHHINLVRLFGFCFDADVRALVYEYMDNGALDAYLFDRSRAVAVATRRAIAVGVARGLRYLHEECQHKIVHYDIKPGNVLLDGGLTPKVADFGLARLASRGDTHVSVSGMRGTPGYAAPEMWMQAGVTEKCDVYSFGVLLFEIVRRRRNLDDGGAPGSQQQWFPMLAWSKHEAGHLAEAIEGCDAMDKQERETVERMCKVAFWCVQQQPEARPPMSAVVRMLEGEVDIDAPPVNPFQHLVASPAAALRWTSTTDSAESDNSLRSGSRQSAEVIIPIGSLHC

SEQ ID NO: 47007 - protein, 713 aa, Oryza sativa
MECENGRVSANGMSGLCVAAPRADPLNWGKATEEMTGSHLDEVKRMVAEYRQPLVKIEGASLRIAQVAAVAAAGEARVELDESARERVKASSDWVMNSMMNGTDSYGVTTGFGATSHRRTKEGGALQRELIRFLNAGAFGTGTDGHVLPAEATRAAMLVRINTLLQGYSGIRFEILEAIAKLLNANVTPCLPLRGTITASGDLVPLSYIAGLVTGRENAVAVAPDGSKVNAAEAFKIAGIQGGFFELQPKEGLAMVNGTAVGSGLASTVLFEANILAILAEVLSAVFCEVMNGKPEYTDHLTHKLKHHPGQIEAAAIMEHILEGSSYMKHAKKLGELDPLMKPKQDRYALRTSPQWLGPQIEVIRAATKSIEREINSVNDNPLIDVSRGKALHGGNFQGTPIGVSMDNTRLAIAAIGKLMFAQFSELVNDFYNNGLPSNLSGGRNPSLDYGFKGAEIAMASYCSELQFLGNPVTNHVQSAEQHNQDVNSLGLISSRKTDEAIDILKLMSSTFLIALCQAVDLRHIEENVKSAVKSCVMTVAKKTLSTNSTGDLHVARFCEKDLLKEIDREAVFAYADDPCSHNYPLMKKLRNVLVERALANGAAEFNADTSVFAKVAQFEEELRATLPGAIEAARAAVENGTAAIPSRITECRSYPLYRFVREELGTKYLTGEKTRSPGEELNKVLVAINEGKHIDPLLECLKEWNGEPLPIC

SEQ ID NO: 47008 - protein, 786 aa, Oryza sativa
MGTKVESKTYLPGYFTMADSSVNSNGNWLSYHEESKPSGHVSDSFTITTANASPDYDKEMLKRTMLVHEATFRKQVYELHRLYKNQKDLMAQFQREECNGYPRSADMLQARSYSSQATSRDVKRVWQVMPPTSGNDIKQSSINFAKGSEYARNGAPLMNNNNGRSTKKMLDLQLPADAYADDDDDDDDDVEILEEKPAKILPRINGSVVGGIVKLNVGNSEGSSHMEKSWIAGLHPQHVSTVNVLNKAVEESSSMKMPDFLGVGTSTSQSQRYSSGRVNLNHLSLEDTMKEKRIGEASGSNFFGANEEVKRNSSFNNKTDYQNVSMGWFKQEPNGINFSAAHYLPRCNPFNQLIDAPTSSNAAVKSPWQSSNTSYTANGYYGSVYTPFAQNGFFNGFSVDSINTPMATNHYHNQRSSKFPGEPQYQKHSPLHGVNLNDTPQDVTAIQEQGSENSPVDISWLRKDPVDLMKSQVQPSCANGQSQISLGSTAYSEGSTRVLGFPINAAAERNTEPLIKREADMEMHKKDDANARNLIDLNAAPSMDEPDIDVHQSEGGTVPQQPDDPSEDSLARTAAESLVALCKDVFQAGSPLADILHWFADLAIASKEDAVVCSSESDSDDEFEALTLQLEETKGYELYSTPKTPVEHKSNEDHGSVAASLLQTKPRRGRARKRPQKKDFQKDILPNLASLSKHEVSEDLHTLGRSTPSKRGGRNGSQSRGRRRARSVAIAVEEVEVSPPPAPAPPPPPPADLDANALGITGWGRTTRRCRRPRCPPANNASLRLA

SEQ ID NO: 47009 - protein, 230 aa, Oryza sativa
MAESDAAAPPPEVVAPVEEQTAPAVGASTLEEAEPAAAAAPAAEGEGEHKRKLEEVDAAPDANGGGEDDKRPRVEGDGEGVVQSNESSAKVDEPVATENSDAAPAEASVDAVNGKVPPTEDSQMGSGEKPAAEAAVTEAPPQEGGGAPGQETSRIINVPNNKVGVLIGKSGETIRNLQMNSGAKIQITKDAEADANAPTRSVELVGTLESIDKAERLIKNVIAEVFHVLN

SEQ ID NO: 47010 - protein, 275 aa, Oryza sativa
MAKKGKAAAAEAAAPDAGVSSPQGGGGEKEGSFLLGSPTWEDAGGGRWRCKETGHELPEREKEAYGRSRACRLALIDQAVARKKPPLNAFKPHPEHKSKLICNITGDIINKSEEHIWKHINGKRFLNKLEKLEEKMASGEMAEGEAEQSNEGENKTKSRKKKDKKKAAVVNPSLPREPKPEIDDSDNSDDPDFWVPPVGSRWDDDDGKDRWTSSPVKDKDDAAEDEDGDDDGDDMADKDDKETREIASSRTKRLSVEAVGPSSFASRKKKTKKEQ

SEQ ID NO: 47011 - protein, 359 aa, Oryza sativa
MFPRELQLSGESAKLVKLGEAVSKGTVNNETLGYFIGRVYLFLTRLGIDKNRLRFRQHLPNEMAHYAADCWDAEIECSYGWIECVGIADRSAYDLRAHSDKSGVPLVAHEKFSKPREVEKLVIVPSKKDLGLAFKGNQKMVVEALEAMSEKEAMDMKAALESKGETNFQVCTLGKDVVITKKMVSISMEKKLEHQRVFTPSVIEPSFGIGRIIYCLFEHSFYTRPSKSEEEQLNVFRFPPIVAPIKCTVFPLVKNQEFDDAAKVIDKALTTAGISHIIDTTAISIGRRYARTDEIGVPFAVTVDSATSVTIRERDSKEQIRVGIDEVASVVKQLTDGQSTWADVSFKYPSHIGPQGDQE

SEQ ID NO: 47012 - protein, 208 aa, Oryza sativa
MLEPWRKNKELVESDEDQKKPHKEHQKQVDRSRIKTSPSAGIEAKHSDVTSKQFSPTKIKQWAKNDLAQTISWLESQEEKPEPNELKAIAAEGVITCLQDAIESLKQGNDVKGVAEQWSFVPHVINELAELDGRRKEGSLSKEQLSRLAIKCKKIYQAEFAHMHDNDKKHQSKPRSDDAQYDSDDTIEMTEEEIDLACRQLPGVCGRQ

SEQ ID NO: 47013 - protein, 61 aa, Oryza sativa
MVAAAGGTSADAMIDGKHLGRGVAASTSAEGGGRICLRWPRNGRIRKHRPRDRRRLHRALE

SEQ ID NO: 47014 - protein, 342 aa, Oryza sativa
MSNADVEAGGPAGREATTGIKPPPGRYNPSGNGPNAVAPAPPPFYYYDQAAAQERHHRTWVVPLVVIANVAMFVVVMYYNNCPANGGRRDCVGRSFLRRLSFQPLRENPVLGPSAATLRKYGALDWYGVVHGNQAWRLETSTWLHAGLIHLAANMISLLIIGIRLEQQFGFWKVGLVYLVSGFGGSVLSVLFISRNGITVGASGALFGLLGAMLSELITNWTIYSNRCAAMVNLIIIAAINLALGILPRVDNFAHIGGFATGFLLGFVLLIQPQFGWSEQVSSAKSKYNAFQIILLTLSVALLIAGFAAGLVSVFKGVDGNAHCSWCHYLTCVPTSSWKCDK

SEQ ID NO: 47015 - protein, 312 aa, Oryza sativa
MSLGYAEKLSYREDVGNVGMPEIFDSPELLHKKIEELAVMVRESKHLVVFTGAGISTSSGIPDFRGPKGVWTLQRSGKGVPGASLPFHRAVPTLTHMALVELEKTGRLKFVISQNVDSLHLRSGLPREKLAELHGNSFKEICPSCKKEYLRDFEIETIGLKDTPRRCSDKNCGARLKDTVLDWEDALPPEEMDAAKEQCQKADLVLCLGTSLQITPACNMPLLSLKNGGRVAIVNLQATPKDKKASLVIHGLVDKVIAGVMYMMNLRIPPYIRTDFVQISLRNSVKKKMREMDSPSNKHSWLASTFAISSIS

SEQ ID NO: 47016 - protein, 497 aa, Oryza sativa
MAQQAKEVNTNRSRCGSSISMRMEGDRNGALAMLSISSSSARYGNDHQELASAAAAFRESAGDPRKLSSGMSSRLLPARSMRSTGAGDDGEVAAAPVAGARSLSFSKLFSFRIANAARCSSSLDFDHPLPSDAASSDHISANDETTATKTKTKTKAKHASDHMNISRSQSVPMSTLSRFSSKGGGGSKRVADSSSLRIHDGGSVRFRVSVIGASPPDGNADAAAAAGEEEDDAGSVEAEEEALVCRICMVALSEDGASGGGGGTLKLECRCKGELALAHGDCAVKWFSIKGNATCDVCNHEVLNLPVTLRRVHDRQQLVYEAAAAAAAAAAAAAGDDIAGGNRRGGYSYGRVWRGTTILVIVSMLAYFCFLEQLLVGDHGTAALAISLPFACVLGLFSSLTTAKMVSRKYVWIYSAVQYLFIVLFTHLFYRYVRLQAVIAIILSTFAGFGVAICANAILLQIIRWRARRASMSAAQEEEEARRAPTQADLENALPPP

SEQ ID NO: 47017 - protein, 43 aa, Oryza sativa
MCWAGQWTAGVRPVCARVWSPVRAKGHQCVTGEIVGNSPTLKV

SEQ ID NO: 47018 - protein, 803 aa, Oryza sativa
MAPAAGEPSAAAGGGEGDTEAHAVIDVSSSETDSDPDPGFGGAGKRPRRVVATAGSGREAEKRARILAAAVPPGFLDPLPRPSAPPPPPPPPRGRRRVTRQFWNAGDYDGKPDLLGGDPSLRSDSGMDHIRVHPRFLHSNATSHKWALGAFAELLDNSLDEVANGATYVNIDMLENKKDGTRMVSVEDDGGGMDPDKMWHCMSLGYSAKSKVKDTIGQYGNGFKTSTMRLGADVLVLSRSCGNGGRRRTQSIGMLSYTFLRETRKDDIIVPMIDYEKGQQYWKRMMRTTSIDWQTSLATIIEWSPYSSEAELLQEFSSIKEQGTRIIIYNLWENEQGELELDFDTDVNDIQIRGGNRDQKNIQLAKQFPNSRHFFTYRHSLQSYASILYLRVPSVFQMILRGKEIEHHNIIGDMMMKNHVIYKPVMTDGFPRDIDMMTDVTIGFVKDAKHHIPIQGFNVYHKNRLIKPFWRVWALPGIQGRGVIGVLEVNFVEPAHDKQDFERTNSLARLEARLNLMQKKYWSDNCHRIGYGGNSANRKSGREYKGPTSDQSPEGCRSSNYLQRKRSFGSPYSGSSNNNSKTGITSLNTSKISLPESRFSLRTTAQQTVEKTKRTLRYTRPLLHGLSHTSNDSDAQTSGTPSRSTSHILKTPEKSCHNENTLPLIPSSEAIRSEGTTRYQSEERNVTNNGDGQTVDNPETVIKLLTDENSSLKESIMKMEESLSRELHIERDKNKSLIERLENVQKQLGTANKEQEALVDIFTEERARRDQEVENQRTKLKEASSTIQNLLDQLNAARSCRKN

SEQ ID NO: 47019 - protein, 568 aa, Oryza sativa; identical to SEQ ID NO: 46926

SEQ ID NO: 47020 - protein, 150 aa, Oryza sativa
MAMEICAEAFPLSRFPTLEKSYCADSRDTERSHNTNWITEVHFSNRGSNKLWISEVAKIKKRIRSLNLRKSLGQARFSSSTGCIHEQLLKFYSLNYIHAGLSAESLPFPCLLKKLSGLCFAILLYTRFAGYIRKGTCQLSLCKGFRWSSA

SEQ ID NO: 47021 - protein, 265 aa, Oryza sativa
MEPPAGSEASGTMSGSASTNTGSKRSRTSGVWQHFDEVAMTGPDGRQVTFARCRICKNKLSAKSSGGTGHLKRHAEACAKKQGIQLRQQQLLLNPDGTFQGDRLQRPPPVPAAGKKKLQWSRIWGGSSSSHGGGTSSSAASGDARSHGPAEELSNYLDSDAIRHETSDFNVLGWWNDHKMSYPVLSKLAQDVLTVPVSSVSSESAFSLCGRIIEDRRTSLSSDHVEILLSVKDWELAAEHTQYTADNQELAAQFENLYLDDEQLG

SEQ ID NO: 47022 - protein, 594 aa, Oryza sativa
MDRDEEMGHGDRSLLFTGDEDDDLEADRDGGSTPSSDPGSFSDRSDPPSVDDIDEDDDDVVGDGRRAPRDDDDDQRGTWPQSFRQSIDMMSAVPSPAMSSIITAASPNLGRLAAVGSSLLKRATSSAVGQEGSSLPLSRPLLPPSSLSQLSTASGPPVRDSADSLPPRARPPPPPLQGESVVPPPLPRPSSACLRSNYIDLPPPSTRCGQKQAILNGLNVLCGVGILTTSYGIKQGGWLSLILLPLLGCCSCYTGLLLKKCIDSSPSIDTYPDIGQAAFGIYGRIFVSVVLYLELYACGVEYITLLGDSLSSVFPSADLAFGGIYLNAHNLFAITMALAILPSVWLKNLRLLSYLSAGGVIATTTVIVCLFWVGIGEGVGFHPGGTALNLTHFPVALGLYGYCYSGHSVFPNIYSSMEERPKFTFVLLFCFIVVTFVYAGVAVAGFLMFGESTMSQFTLNMPQQFIPSKIAIGMTIINPYTKYALTLTPVALSIEEALPRRMQTYQVGMCVRTALVASTVVVALTFPYFALVMALLGSVFTMLVALILPCACYLSIKKGSTPLWEVVLCITIILLGILCACVGSYTSVSQMISR

SEQ ID NO: 47023 - protein, 488 aa, Oryza sativa
MVRLPYTTALTTLFSYGLLFAFGQLRDFFRKLIDWFKAKNVKGYAPICLGLEDFYVRRLYLRIQDCFGRPIASAPDAWFDVVERYSNDSNKTLKRTSNTTRCLNLGSYNYLGFAAADEYCTPLVIESLKKYSPSTCSVRVDGGTTKLHTELEELVARFVGKPAAILFGMGYVTNSAIIPCLVGKGGLIISDSLNHNSIVNGARGSGATVRVFQHNSPAHLEEVLREQIAGGQPRTHRPWKKIIVIVEGIYSMEGELCKLPEIIAVCKKYKAYTYLDEAHSIGAVGQSGWGVCELLGVDPADVDIMMGTFTKSFGSCGGYIAASKEIIQHLKLSCPAHIYATSMSPPAVQQVISAIKVILGEDGSNRGAQKLARIRENSNFFRSELKKMGFEVLGDNDSPVMPIMLYNPAKIPAFSRECLRQKVAVVTVAFPATPLLLARARICISASHTREDLIKALDVISRVGDLVGIKYFPAEPPKIAEADHDKLE

SEQ ID NO: 47024 - protein, 387 aa, Oryza sativa; identical to SEQ ID NO: 31270

SEQ ID NO: 47025 - protein, 541 aa, Oryza sativa
MPPKLLTYLILALLAASAAAARRHPSPASSAAAGEPVYLWPLPRNFTSGSRTLLVDPDLALDGQGPGGAAAAVAEAFERYRSLVFSPWAHAARNASGGYDVGKLTVVVASADEKLELGVDESYTIYVAAAGGVNSIVGGATIEANTIYGAIRGLETFSQLCVFNYDTKNVEVRHAPWYIEDEPRFAFRGLLLDTSRHFLPVDVIKQVIDSMSFSKLNVLHWHIIDEQSFPLEVPSYPKLWKGSYSKLERYTVEDARDIVSYARKRGIHVMAEIDVPGHAESWGKGYPKLWPSPKCREPLDVTSNFTFEVISGILSDMRKIFPFGLFHLGGDEVYTGCWNATPHVKQWLHERNMTTKDAYKYFVLKAQEIAINLNWIPVNWEETFNSFKENLNPLTVVHNWLGPGVCPKVVEKGFRCIMSNQGVWYLDHLDVPWQDFYTSEPLAGINNTAQQKLVLGGEVCMWGETADTSDVQQTIWPRAAAAAERMWSQLEAISAQDLETTVLARLHYFRCLLNHRGIAAAPVTNSYARRPPIGPGSCFIQ

SEQ ID NO: 47026 - protein, 476 aa, Oryza sativa
MDEAWERAVEAALQAAGEGSSSPARSLTLDGAVKCLHGRLPAAEILERYQSLELLSIAGVGVASLAGFPRLRNLTRLTLSDNRIAGGLDHLVAAGLASLRDLDLSNNRIQDVGDLSPLANLRLVSLDLYECPVTRVKDYRSKVFGMIRTLKYLDKMDADENERPESDDDDDDGDGDGDGEEEEDDDDDEDEDPGSGEVANGGVSHPRGGVASHPVEVNGVIDVDEDESDADEVVPNGGDEHHANGFRVAAVGDEDEYVEEEDDDDEEDYEEEDDLGEEIDGDGDDEDAVVEVHDVPSSSDEEEDGIEEEDEEEDEDEEEVEDDGEEAEPESSGRVALAVGDVGEEIDGHEHGEGEDEDENGEIGEEDEERLEDDRVYEEGNDDDEEDVDDEDEDTEYLVQPIAQPQAMAVGNDFDAAEADDADEDRDEVDDDDDGGTDLPSSSQGAKRKRDDDPSGSGDDDEDDDGVEDLRPFKHH

SEQ ID NO: 47027 - protein, 523 aa, Oryza sativa
MAYRNTVCTPQVIDLETEQGHSHIHSESFNRTGNDSSDQGAQHAVRGVGNATNIGLSDMRSYYDAGMNHPHQPVHNLPPNLGVDSGFVFPSSMYNPCMSTTSMNQYVSHTQSFGLPSNQVVLGSMDEGSRNENAGESARGFIKRKNAAVAGSYHCANGFASSSSSHASLNPTHRPWDPSFESNVLPNTASYNPSEYHSQTSWPSMEGSSIPSNGFNLMGAHPESAQHGNYAFPTSHISQCFQPTSNTWISQSANGIADGIPQWEYVNGMNNAPGRFSRSGMTETVNGSFREYQNGPSTLCRGPLPYFHQHAGMHAHNLLDHTQVQAPYQQCHNNPVLHGVNHSGNRFHLGPRIPVLFSNSERTFGPPHHPLLANPVNHRNIRILPPEHATIMDFSRLYEVSNVVDEHRDMRLDIDSMTYEELLALEEQIGDVNTGLAKSYIVEKLKTSLFVPGSSCMSNKSSESSMENDACIICQEEYQVKECIGTLDCGHRYHEDCIKQWLMVKNLCPICKTTALSTGRRSG

SEQ ID NO: 47028 - protein, 478 aa, Oryza sativa
MTSLPDRGVSSSSSDPLCEGNIAPCSSSSEQKEDCSLKQSKTSILSCVFNSPFNIFEAHQDSSANKSPKSSSGSYDWSRVLRRIVCSGSMWRFLGTSKVLTSSDVWFLGKCYKLSSEESSSDSDSESGHATFLEDFSSRIWITYRRGFDAISDSKYTSDVNWGCMVRSSQMLVAQALIFHHLGRSWRRPLEKPYNPEYIGILHMFGDSEACAFSIHNLLQAGNSYGLAAGSWVGPYAMCRAWQTLVRTNREQHEVVDGNESFPMALYVVSGDEDGERGGAPVVCIDVAAQLCCDFNKGQSTWSPILLLVPLVLGLDKINPRYIPLLKETFTFPQSLGILGGKPGTSTYIAGVQDDRALYLDPHEVQMAVDIAADNIEADTSSYHCSTVRDLALDLIDPSLAIGFYCRDKDDFDDFCSRATELVDKANGAPLFTVVQSVQPSKQMYNQDDVLGISGDGNINVEDLDASGETGEEEWQIL

SEQ ID NO: 47029 - protein, 298 aa, Oryza sativa
MEAEHPHQITYTTTTTTSTSSLCPRRRKRGDDEAAHHLVFPMDLDSAAAAAAAAAHHQQQQQQTTSQDKLKALAYEYGHEFRVFSSVTFESMTSNLPAADQEEDDDFYELQPADYFNLVSNRIGEQSKVLKTRKMREAELAAQRAKIKKAVMRVRFPDGYILEADFHPSETVQSLMDFLKKVISRPDLPFYLYTVPPKKRIKDTSLDFYTIGFVPGANVYFSYDLPEGSELNTDSVKSGPYLREEIRMLDGLPIVQEPVHQPIDSTMNSSSAHQSDVSQSDFAPPANKKPAKPKWFKR

SEQ ID NO: 47030 - protein, 599 aa, Oryza sativa
MPGLAAADNSPPVAAPPPRRLSSPLPRSRAPPSPSPSTSSRAKPRKVAAQPETDEAALDNPDLGPFLLKQARDAMVSGEGGGAARALEFAERAARALERRGEGAELELAMSLHVAAAIHCGLGRHADAIPVLERAVAVVTPPPPPPPPEGESSAEEQPPEDQQKGEEWALAAFSGWMQLGDTHAMLGRMDESIACYGKGLEIQMAALGERDPRVAETCRYLAEAHVQALQFDEAEKLCRKALEIHREHSAPASLEEASDRRLMALILDAKGDYDGALEHLVLASMTMVANGRDIEVATIDVAIGNTYLALARFDEAVFSYQKALTVLKSARGDDHPSVASVFVRLADLYHRTGRLRESKSYCENALRVYAKPAPGAAPDEVAGGLMEIAAIYEALGDLDEALKLLQRALKLLEDSPGQWSTVAGIEAQMGVLYYMVGRYADSRNSFENAVAKLRASGERKSAFFGVLLNQMGLACVQLFKIDEAAQLFEEARAVLEQECGASHPDTLGVYSNLAAIYDAMGRVEDAIEILEHVLKVREEKLGTANPDVEDEKLRLAELLKEAGRSRNRKQKSLENLFVTNSQRVKKDAGRRWSNFGFRS

SEQ ID NO: 47031 - protein, 757 aa, Oryza sativa
MDFAELEAVEGLRWPWHAWPPTASAAASLVVPTSVLCTPLHPAAPDLLPLLPYAPLRCGGGGGGGGCGAALNPFSRVHHATARWACPFCGASANPFPRLLAPDALPAELFPTHSSVEYALPPDAAEAGGGPGPPSVVFVVDAATSGPELAALKAEVLRVVQGLPEGVRVALVSFAASVWVHDLGFEGCTRVVVMNGERELESEKIQEFLGVRDARYNKLAMPRSTKVQRFLLPVSECEFNITSAIEDLRSMSACPRGHRPLRATGAAISTAVALLEGCCSPNAGGRIMVFTSGPTTVGPGLVVETDLGKAIRSHRDIFNGNAPLIDKAREFYKKVANRLTAHALVLDLFACSLDQVGAAELRYPIEVSGGLMVHTESFESEQFKACLRHIFNREGVGYLNMNFNATIEIVTSREVKICGALGPCISLHRKNSSVSDKEIGEGGTNYWKMSTVDSKTCIVFFFRVDCSHNTEPPTVFFIQFMTRYRHGDGSYRLRVTTVARRWAGPRSPEIAAGFDQEAAAAVMARLAVHRAETYHVRDVIRWLDKMLIRFTAKFGNYVPEDPSTFRLSTNFSLYPQFMYYLRRSQFIDVFNSSPDETAFFRLMLNREGVVGSLIMIQPTLFQYSFDGPPIPVLLDVSSISPDVILLFDSYFYIVIHYGSKIAQWRKLGYHKDPNHENLRKLLEAPEVDAEALLVDRFPVPKLIKCDQHGSQARFLLARLNPSVTQKTQLSDGSEVIFTDDVSLQVFIEHLQELAVQG

SEQ ID NO: 47032 - protein, 282 aa, Oryza sativa
MVWDPLTGDRRAVDIPALFHRWDMVVYHGSVRCVDGDGCYSNPFEVAVVGTDTSGTVAFICVYSSKTGNWGNVVSAPISPGDYMSFSSILDGDFLYWLLGNHGCPILQFNLVKQTATLVNAPPDLRTNSYGGFHIAPAEDGGGLVILAVTHFSLNVWKGKTNRDGIAGWVLEKTIELDRLLSFGTGPETWAPVILCFAEEHDVVFLSTHVGFFMVNMQSMQFKNIPQILKGGLYYPFSSFYTKEAAELLPPCDMSKKPKVPFAGALPDIEEYGSNIGEISCY

SEQ ID NO: 47033 - protein, 515 aa, Oryza sativa
MEMTLPLLGAAVVLAAFLLFFLVKNNRCCWSPAAERRLRLPPGPWRLPLVGSLHHVLLSRHGDLPHRALRELAGRYGALMLLRFGAVPTLVVSSAEAAREVLKTHDACFASRHMTPTLAVFTRGGRDILFSPYGDLWRQLRRICVLELFSARRVQSLRHVREDEAARLVRAVAEECAIGGGGGAVVPIGDMMSRMVNDSVVRSAIGGRCARRDEFLRELEVSVRLTGGFNLADLYPSSSLARWLSGALRETEQCNRRVRAIMDDIIRERAAGKDDGDGEDDLLGVLLRLQKNGGVQCPLTTDMIATVIMEIFSAGSETASTTLEWAISELVRNPKVMDKAQSEVRKLFEGQDNLTEDDMSRLSYLHLVIRETLRLHAPAPFLLPRECREQCNVMGYDITEGTRVLVNAWAIARDTRYWEDPEIFKPERFNANLVDFKGNDFEYIPFGSGRRVCPGITLGLTSMELVLASLLYHFDWELPGGKRCEEIDMSEAFGITVRRKSKLVLHATPRVPCLH

SEQ ID NO: 47034 - protein, 217 aa, Oryza sativa
MVVATEEMAVYCFDALVSHYSGDQPPPPAFEEGIHPLFVTWKKATNGSEPRLRGCIGTLEARQIVTGFKEYALTSALRDRRFPPIQSKELPYLECTVSILTEYETALNHLDWEVGKHGLIIEFTDPDYNMRRSATYLPEVAAHEGWTHLETIDSLMRKAGYNGTITDSLRKKLRVTRYQSTLYTMHYGEYAAYVKKNRGAAPEINGAPIINGFKPGH

SEQ ID NO: 47035 - protein, 293 aa, Oryza sativa
MADRVYPAAKPNPPPAMANAGGGGATASFPAPKSQMYQRPIYRPQAAAAKRRRGRSCRCSFCCCFCWALLVVILLALVAAVAGGAFYLLYRPHRPSFTVSSVKLTALNLSSSPTSPSLTDSIQLTVTAKNPNKKVVYLYDDFSFSASTAANAVPLGAATSPGFTHDAGNTTVFTATIAANAVAVDPAAAASDIKKSGAFSVAVDAETRAGVRVGSLKTKKIGIQVHCEGIKVTPPPPAALPRPKAVKGKNGTVLAPAPAPADSDTAATTAATVSTAAHSCKVRVRVKIWKWTF

SEQ ID NO: 47036 - protein, 692 aa, Oryza sativa
MGRRVRRRRRLGAERGQLDQLERDAYRKLAERKASSSAASTATSPLPSAAYSPVKNSHHHPASRVSQESCFGKVESLSPSRLSQPNASGNAVNNSQGNMSKVSVHLFLHSTGVIAAKFQYHQKLVDAVHKIPKASWNGKERVWMFPHSSLSVAEEVLSTVPGIAVEVQKLDPLVKRALTASLYAGDLRDLYGKIPTDVESKLMPFQREGVRFALQHGARTLIADEMGLGKTLQAIAVASCLHDAWPVLVISPSSLRLHWASMIQHWLNIPTEDILVVLPQTGGSNKAGYRLVYSNTKGDFNLDGVFNVISMMCSQDKGHASGLGFKIVIADESHFLKNAQAKRTMHSLPVLQKAKYVVLLSGTPALSRPIELFTQLQALYPTVYKNVNEYGNRYCKGGFFGLYQGASNHEELHNLMKATVMIRRLKKDVLSQLPVKRRQQAFLDLSEKEMRHIRALFHELETVKIKIQSCDSQETMDSLKFAQKNLINKIYNDSAEAKIPAVLDYLGTIIEAECKFLIFAHHQSMLEAIHQHLLKKKVKCIRIDGQTPVPVRQTLVTDFQNKDDIKAAVLSIKAGGVGLTLTAASTVIFAELSWTPGDLIQAEDRAHRIGQVSSVNIYYLLANDTVDDIIWDVVQGKLENLGQMLDGQEKTLDVSQSDTRPSPSKQKTLDAYLKRCSNSTEADQPKLKNPRF

SEQ ID NO: 47037 - protein, 453 aa, Oryza sativa
MPVSRMMMESNTMAKEMAVRHHLLPGSPRRRTAHNLSSSSLRKSSDASLLHKVPCAALRSLLANLNDVLLTTRLFLLFPAVLLAIAATYLHFGQVWVFVLSLIGLVPLAERLSFLTEQIAFYTGPTVGGLLNATFGNVTEVIIALLALREGKIEVVKCSLLGSILSNLLLVLGTSLFLAGIANLRAHQPYDTKQAHVNTALLMLAVLCHSLPLMLRYAVTSGDHAIVSGDAALHLSRACSILMLIAYLAYLFFQLNTHRQLFEPQQVEDDDDDDLVIAQDDEPVLGFSSAMIWLALMTLLTALLSGYVVSTIEAASESWELSVSFISIILLPIVGNAAEHAGAVIFALKNKMDITLGVSLGSATQISMFVVPVSVIVAWTMGIPMDLDFNLLETGSLFLAILVTAFTLQEGESHYLKGLILVLCYAVISVCFFVIRRRSAGGTDGVHHLDVIV

SEQ ID NO: 47038 - protein, 155 aa, Oryza sativa; identical to SEQ ID NO: 41402

SEQ ID NO: 47039 - protein, 464 aa, Oryza sativa
MSGRGLMKQDLSKLDVTKLHPLSPEVISRQATINIGTIGHVAHGKSTVVKAISGVQTVRFKNELERNITIKLGYANAKIYKCEDEKCPRPMCYKAYGSGKEDSPHCDVPGFENTRMKLLRHVSFVDCPGHDILMATMLNGAAIMDGALLLIAANESCPQPQTSEHLAAVEIMRLQHIIILQNKIDLIQEGAAMNQHEAIQKFIQGTIAEGAPVVPISAQLKYNIDVICEYIVKKIPIPERNFTSPPNMIVIRSFDVNKPGSEVDEIRGGVAGGSILRGVLRVNQNIEVRPGIVMKDESGNIKCTPIYSRIVSLYAEQNELQFAVPGGLIGVGTTMDPTLTRADRLVGQVLGEVGSLPDVYVELEINFFLLRRLLGVRTKGTEKAGKVSKLTKGEILMLNIGSMSTGARVVAVKNDLAKLQLTAPVCTSKGEKVALSRRVEKHWRLIGWGQIQAGTTLEVPPCPL

SEQ ID NO: 47040 - protein, 53 aa, Oryza sativa
MFFTRYDSRNLSGTAAAAYVLCWIFHIIPDLKERCRIERLKLSVQAGKETSGA

SEQ ID NO: 47041 - protein, 335 aa, Oryza sativa
MAASSSSAPALADAYDIPWVEKYRPTRVADVVGNSDAVARLQVIARDGNMPNLILSGPPGTGKTTSILSLAHELLGPSYREAVLELNASDDRGLDVVRNKIKMFAQKKVTLQPGRHKIVILDEADSMTSGAQQALRRTMEIYSNTTRFALACNTSSKIIEPIQSRCAIVRFSRLSDQEILGRLMIVVAAEKVPYVPEGLEAIIFTADGDMRQALNNLQATVSGFRFVNQENVFKVCDQPHPLHVKNMVKNVLDGKFDEACSALKQLYDLGYSPTDIITTLFRVIKNYDMAEYLKLELLKETGFAHMRICDGVGSFLQLSGLLAKFALVRETAKAS

SEQ ID NO: 47042 - protein, 728 aa, Oryza sativa
MPPPPEDDGSSSARTPLIPPTPPPPGRAVARLHPLPLLVAAAFAASYHLLVAPAPSYYRSLFLSLGSNDTAAAHLHALTLRPHLAGTEANARAAEHVVSALSSLSFPTRVVPYSVLLAYPVHRSLSLSAPGHATTPFALVQDTYPGDPYAAVSAEAVPTFLAYAASGSVAAEAVYANYGRPEDFAYLAARGVDVTGKVVLARYGKVYRGDIVINARKAGAAAAVIYTDAKDYAAGEAFPDGPWMPPTGVQVGSTFKGVGDPTTPMWASSEGCERVSIPEAMATDDMPGIPALPVSGSDGEAILQLIGGDVAPKDWQGGDGSPVYRLGPGPAVLNLTYIGNETMATIQNVISVIEGKEEPERYIILGNHRDAWTFGAVDPNSGTAALLELAQRFSELQKKGWRPRRTIILCNWDAEEYGLVGSTEWVEENRAMLTSRTVAYLNVDSAVYGAGFYASATPQLDELLKEASKQVQNPDNETQSLYDLWMASDSSSMIKIGRIGGGGSDYSAFVQHIGIPSIDISMGSEYAVYHSLYDDFVWMEKFGDPLFRRHVAAASMWGLVALRLSDEEILPFNYSTYAVELEKGAIDINKRLLGVPVSSSPLQKSIAEFKRAALQMDSEMKALQTRKVWNPWRNNPLKVRDLNERLMMTERAFTDREGLSGRPWYKHLIYAPSLHDDYGAQVYPGVDDAIQMAERTNTSESWRSVQHEIYRIARVINQASLVLSGGLT

SEQ ID NO: 47043 - protein, 414 aa, Oryza sativa
MEHATCDDVHEHAINVSHGETASTSTSHQDLHSDSDDSHQDDRPSTSTQTPSPQSSASTSPTAYNTRNLSFPRRDSMYGHGRSIWNSGLWISFELVIYVVQIVAAIFVLVFSRDEHPHAPLFAWIIGYTIGCIASIPLICWRCAHRNRPSEQEPEQPPAAYPNLTSSQSSEGRNQRSSGTVLHFGCITISCPRPSILAYHFKTAVDCFFAVWFVVGNVWIFGGHSTLSDSQEAPNMYRLCLAFLALSCVGYAIPFVMCAAICCCFPCLISLLRLQEDLGHTRGATQELIDALPTYKFKPKRSKMWVDHASSSENLSEGGILGPGTKKERIVSAEDAVCCICLTKYGDDDELRELPCTHFFHVQCVDKWLKINAVCPLCKTEIGGVVRSFFSLPFGRRRVDRMAGRGIASSRFTV

SEQ ID NO: 47044 - protein, 601 aa, Oryza sativa
MAAAAEPPMVEQVITEFFAKSLHIILESRSPYESSRNFTRPSPPSSPLSGSQPRDRWFNLALRDCPAVLENFDLWRQSNLEPLVIDIVLLCRDSTSNTAAGSGKIIERWVIQYEARKSGGGNGNGSKNNGRKSRNSSAEDHSLYRATYQGSTVLLRSLHLLVRLLPAYSLFRELNSSGRIRPLNLSHKISSFVEPFTRAEDAEMKHYAFAPIETLFGRLSLSVSYVPVLEVVAASEPTSPMPPEIITDYVGSPTTDFLKKFNSLPSAGIAPACAAMTRRHSWSIEHGAGTSVSPSPSPTKAQSRGSPQLGVPLHVSLKTCSHPQNASSSGQKKYTPFEECYPSPPLSPSPSQSPSANYPKNPLFRYESAPVTIPTLKSGGGGGSGLPPSPCSKGKHQFSSHNDNLAHSPDHNSNVRKDLVRLGEFEKDMALQKVLSYSKYDLGYFHGLKLTRTSSKLFIMDELDEHELVFAWEDRDTIIDQLNRADISDREEQKNQDAGGSSTRSPAAAIGALVHLLKTAPSLREGLQSDAAAVVPQEPSSVQKVVTEEHGSIASSSTPVTATDALEELKKYREVKESILNRGKTQVSGTNLGEKLTDGEP

SEQ ID NO: 47045 - protein, 532 aa, Oryza sativa
MEVGTWAVVVAVAAAYMTWFWRMSRGLSGPRVWPVVGSLPGLVQHAENMHEWIAANLRRAGGTYQTCIFAVPGVARRGGLVTVTCDPRNLEHVLKSRFDNYPKGPFWHAVFRDLLGDGIFNSDGETWVAQRKTAALEFTTRTLRTAMSRWVSRSIHHRLLPILDDAAAGKAHVDLQDLLLRLTFDNICGLAFGKDPETLAKGLPENAFASAFDRATEATLNRFIFPEYLWRCKKWLGLGMETTLASSVAHVDQYLAAVIKARKLELAGNGKCDTVAMHDDLLSRFMRKGSYSDESLQHVALNFILAGRDTSSVALSWFFWLVSTHPAVERKVVHELCAVLAASRGAHDPALWLAAPFTFEELDSLVYLKAALSETLRLYPSVPEDSKHVVADDYLPDGTFVPAGSSVTYSIYSAGRMKTVWGEDCLEFRPERWLSADGSKFEPHDSYKFVAFNAGPRICLGKDLAYLQMKNIAGSVLLRHRLAVAQGHRVEQKMSLTLFMKNGLRMEVRPRDLAPVADELRGADVRATAPCA

SEQ ID NO: 47046 - protein, 118 aa, Oryza sativa
MYQLSFEDFSSQKTFLEGRDFCKSEVVFFFFFLHIDFCRRSKLNFVFVSCFYHSGNYRSGNKEAFFGQKKYRSWSKKVQFFLAKKKREENPVSVFSVDLGDCSLPYRLSFPSTFALMW

SEQ ID NO: 47047 - protein, 514 aa, Oryza sativa
MGSLDTNPTAFSAFPAGEGETFQPLNADDVRSYLHKAVDFISDYYKSVESMPVLPNVKPGYLQDELRASPPTYSAPFDVTMKELRSSVVPGMTHWASPNFFAFFPSTNSAAAIAGDLIASAMNTVGFTWQASPAATEMEVLALDWLAQMLNLPTSFMNRTGEGRGTGGGVILGTTSEAMLVTLVAARDAALRRSGSDGVAGLHRLAVYAADQTHSTFFKACRLAGFDPANIRSIPTGAETDYGLDPARLLEAMQADADAGLVPTYVCATVGTTSSNAVDPVGAVADVAARFAAWVHVDAAYAGSACICPEFRHHLDGVERVDSISMSPHKWLMTCLDCTCLYVRDTHRLTGSLETNPEYLKNHASDSGEVTDLKDMQVGVGRRFRGLKLWMVMRTYGVAKLQEHIRSDVAMAKVFEDLVRGDDRFEVVVPRNFALVCFRIRAGAGAAAATEEDADEANRELMERLNKTGKAYVAHTVVGGRFVLRFAVGSSLQEEHHVRSAWELIKKTTTEMMN

SEQ ID NO: 47048 - protein, 955 aa, Oryza sativa
MSSHRKNFRRRTDDAEDAYGDDSSNSKPTATKTQTPPVPKPRSPRRQGASRLSFVEDEDDDDAEEGPLSQRRRPAATVRQARTASPAAATLHRLTPARDRLKSSTAVAAAVPAPKPSNFQSHAGEYTPERLRELQKNARPLPGSLMRAPPPPPPPTAEAPRQRLPGAAASPAPATNTTAAAVEPVVILKGLVKPMSQASIGPRNPSQNEDKDEDESEEEEEEEEGPVIPDRATIEAIRAKRQQLQQPRHAAPDYISLDGCGVLSSREAAGGSSDEDDDETRGRIAMYAEKSDSQRSTKGVFGVINNRGPAASLGVINDGFREVEDEKDDDEDEEERKWEEEQFRKGLGRRVDDASAQRAANGGPAPVQVQPQPSGYSIDPRYQPSFSGVLPGTSIFASGSAEFLSIAQQADVASKALQENIRKLKETHKTTVDALVKTDTHLTEALSEISSLESGLQDAERKFVYMQELRNYISVMCDFLNDKAFYIEELEEHMQKLHENRVTAVSERRAADLAGESSVIEAAVNAAVSVLSKGSSSAYLSAASNAAQAAAAAARESSNLPPELDEFGRDINMQKRMDLKRREEDRRRRKIRSESKRLSSEGRSANNEHIEGELSTDESDSESSAYLSSRDELLKTADLVFSDAAEEYSSLRIVKDKFEGWKTQYPLAYRDAHVALSAPSVFTPYVRLELLKWDPLHETTDFFGMEWHKILFDYGEQNSESGTDPNNVDKDLIPVLVEKVALPILHHRIMHCWDILSTQRTKNAVDAINMVISYLPTSSKALHQLLAAVNSRLTEAIADISVPAWGSMVTRTVPGASQYAAHRFGVAIRLLKNVCLWKDIFAKPVLEKLALEELLKGKILPHMKSIILDAHDAIARAERISALLKGVWSSPSQKLQPFIDLVVELGNKLERRHMSGISEEETRGLARRLKDILVELNEYDKARAILKTFQIREAL

SEQ ID NO: 47049 - protein, 226 aa, Oryza sativa
MASLSLSLHHPCNSRTGFLGKRQGICLHVIPAGRVGFVRKTIECKESRIGKKPIEVPSNVTLTLEEQFIKAKGPLGELSLNYPGEVKVVKEESGKLRVSKTVETKRANQMHGLFRTLTDNIIVGVSKGFDKKLQLVGVGYRAAVEGKDLVMNLGFSHPVRMAVPEGLKVKVEENTRIIVSGYDKSEIGQFAASIKKWRPPEPYKGKGIRYADEVVRRKEGKAGKKK

SEQ ID NO: 47050 - protein, 420 aa, Oryza sativa
MARGLAVASLLLVALAVVARPPLALAVKDYPADASAVAKKSPASKADTPTTGKESVAGKTDVVTVAKKSPAGKADTSATYKEYAAAKADAVTVTKKSPAAKADTPTTSKESAAGKANAATVAKKSPAGKADTSATATGKEYAAAKADAITVTKKSPAAKADMPATGKESIAKVDAATVAKESTAGKTGKKAAAKEFTMSGKTNTEADAATVAKKSLAGKAGTPATGKEYAVTKADAATVAKKSPADKTGKESVVAKADTATVTKKSTAGKTGKKVAAKESPASHKTSMEAATKKSTANKTGTETAAKESTVSGKTDTETAAKESTAPGKTDTTAAVKESTAGKGDAPAMAEKSAAGKAEASAAAKESPTNKADAAAAGPTSGGYQYVNFVIKNPVKAKEKSSDRADGLPIDPTPDGQMMH

SEQ ID NO: 47051 - protein, 672 aa, Oryza sativa
MDRASNFIPGPYQELVDAKPIRSLAPMFPAPLGINVNQSSTPPLVCVTPVGQFPVGFGSGILPTFGSTTAFTTTANGVSYTSYTNNGAIDATPISAYKTRPGIVSLDGDEPYSGSASGRKSKRSSGSAADGSNGVKFKRPKPVYKNFVAGKELAFLPPSSSDPREVVEAVHMTFEALRRRHLQLDEIQETSKRADLKAGAIMMASNIRANVGKRVGLVPGVEIGDIFYFRMELCIIGLHAPSMGGIDYMSAKFGSDEDSVAICIVAAGGYENVDDDTDTLVYSGSGGNSRNSEERHDQKLERGNLALERSLHRKNEIRVVRGFRDPFCLTGKIYIYDGLYKIQESWKERTKSGINCFKYKLLREPGQPDGAALWKMTQGWIDNPASRGRVILPDLSSAAEALPVCLVNEVDHEKGPGHFTYASQVKYLRPLSSMKPLQGCGCQSVCLPGDPNCACGQHNGGDLPYSSSGLLACRKPIIYECGDACHCTTNCRNRVTQKGVRFHFEVFRTANRGWGLRCWDPIRAGAFICEYTGEVIDELKVNLDDSEDDYIFQTVCPGEKTLKFNFGPELIGEESTYVSADEFEPLPIKISAKKMGNVSRFMNHSCSPNVFWQPVQHDHGDDSHPHIMFFALKHIPPMTELTFDYGVAGSESSGSRRTKNCFCGSSNCRGVF

SEQ ID NO: 47052 - protein, 641 aa, Oryza sativa
MLSTTTALFRPPAPPPPPLQSPSTPRCSPVRTLASPPPPPAPTSSPVRMSGPPPPPPPPAPNSCPSRPAPPPPPPPPLASTSSPPRPAAPSPCQLHTSTSSPARPVPPPPPTLSTIRSSAPTPPLLPGATSAPSPPPPPPPCSSSNQLSAPPPPPPSFSKNNGSIAPPPAPPGGNAKLPGMRGRGPAPPSGPMSRSLQSGQAASRRSNLKPLHWVKVTRAMQGSLWEESQKTDEASKPPVFDMSELEHLFSAVLPSSDGKRSDKSGSRASGSKPEKIHLIDLRRANNCGIMLTKVKMPLPDLMSAILTLDDTILDADQVENLIKFTPTKEEAELLKGYKGDKQVLGECEQFFMELMKLPRVDSKLRVFLFKIQFPSQVSDLKRSLNIVNSSAEEIRGSAKLKRIMQTILSLGNALNQGTARGSAVGFRLDSLLKLSDTRARNNKMTLMHYLSKVLSEKLPELLDFPKDLASLELAAKVQLKSLAEEMQAINKGLEKVEQELTTSENDGPVSEIFRKTLKDFLSGAEAEVRSLTSLYSNVGRNADALALYFGEDPARCPFEQVVITLQNFVRLFVRSHDENCKQLDLEKKKALKEAEAEKTKKEPENAQKTKEPGNDKAKHNNSIKELGISLQSPAQTASAK

SEQ ID NO: 47053 - protein, 239 aa, Oryza sativa
MMNSSEPVKLIGAFGSPFVHRVEVALRLKGVPYELILEDMGNKSELLLAHNPVHKMVPVLLHGDRSAICESLVIVEYVDEAFDGPPLLPADPLRRAMARFWVHFLDENCLKPLRPALFGEGEEQKKSMEETREGLTVAEAELRGKRFSGGSSIGLADIAGGGVLAHWVGVLQEVAGVSVLSDGDGEYPALRRWAKDYVANESVMECLPDRDRLLSYFTGIKQKCVSVAKSTLPKYSLLP

SEQ ID NO: 47054 - protein, 174 aa, Oryza sativa; identical to SEQ ID NO: 31118

SEQ ID NO: 47055 - protein, 144 aa, Oryza sativa
MAAKWAQKTIVIPAQRRGCHLITPKILREIEGDLSGFKCGLAHLFLQHTSASLTINENYDSDVQADTETFLNRIVPEGRSAPWKHTLEGPDDMPAHIKSSMFGCALTIPITDGHLNMGTWQGIWLCEHRDNASSRKIVITLNGV

SEQ ID NO: 47056 - protein, 366 aa, Oryza sativa
MAPTAASAAAGEEQQAVGLAARDSSGHLSPFAISRRSTGDDDVAIKILFCGICHSDLHCIKNEWKHSIYPLVPGHEIAGVVTEVGKNVTRFKAGDRVGVGCMVNSCRSCESCNNGFENHCPEGVFTYNSVDKDGTVTYGGYSSMVVVHERFVVMFPEAMPLDVGAPLLCAGITVYTPMKYHGLNAPGKHVGVLGLGGLGHVAVKFARAFGLKVTVISSSPGKKREALERLGADAFVVSSSAEEMEAARSTMDGVINTVSANTPMAPYLALLKPNGKMILVGLPENPLEVPPFSLVHGNRTLAGSNIGGMADTQEMIELAAKHGVTADIEVIGADDVNTAMERLAKADVRYRFVIDVGNTLHAAAAE

SEQ ID NO: 47057 - protein, 575 aa, Oryza sativa
MVSDASKKKAAQKKAAAAAKRGDKAKAAITLSERTCTAVLTSHPLSRDIHIESLSLTFHGHDLLLDTDLELNYGRRYGLLGLNGCGKSCLLKAIGCRELPIPPHMDIYHLTHEIEASDMSALQAVISCDEQRLQLEKEAEILAAQDDGGGEALDRVYERLEAIDASTAEKRAAEILFGLGFNKHMQAKKTCDFSGGWRMRIALARALFMNPTILLLDEPTNHLDLEACVWLEETLKKFDRILVVISHSQDFLNGVCTNIIHMQNRKLKLYTGNYDQYVQTRAELEENQMKQYRWEQDQIASMKEYIARFGHGSAKLARQAQSKEKTLAKMERGGLTEKVVRDKVLTFRFTDVGTLPPPVLQFVEVTFGYTPDNLIYKNLDFGVDLDSRVALVGPNGAGKSTLLKLMTGDLIPLDGMVRRHNHLRIAQFHQHLAEKLDLDMSALQYMMKEYPGNEEERMRAAIGKFGLSGKAQVMPMRNLSDGQRSRVIFAWLAWREPHMLLLDEPTNHLDIETIDSLAEALNEWDGGLVLVSHDFRLINQVAQEVWVCEKQAVTRWEGDIMEFKEHLRSKAGVDD

SEQ ID NO: 47058 - protein, 109 aa, Oryza sativa
MICTFRWWDSKIKSTNSSPWCSSHLVLPLLLRVRPMVCKLRPNLLRSPLLWNSLRLPLLFWVLRELGVMFHLCLVRNSMVIVVSSGRVIARSTLRFMVFILRIGCVWLD

SEQ ID NO: 47059 - protein, 645 aa, Oryza sativa
MSGGGGGSGPLPYSMRDVDGRGAYNNAKFRHRSRLKMASQALFTNSSKYQCGKFTVGKFLSLLMVSGVIYLLVHKSSDGFVSGELHEKVGNTHTKKDFPKIRTFWRKPPRLPPRLPPNEIYRNNSLLLQSPQSEWTLRQKKVKEAFEHAWSGYRNYAMGYDELMPLTRRGIDGLGGLGATVVDSLDTAIIMGADDVVSEASKWIEDNLMKKLSEKGQVNLFETTIRVLGGLLSAYHLSGGDKARGDSGIPMTSKRANPERLLEVSKDLADRLLLAFTSSPTAIPLSDVVLRDRTAHAAPDGLSSTSEATTLQLEYSYLSTISGDPKYDLEAMKVLEHMRTLPTVEGLVPIYINPSSGQFSGENIRLGSRGDSYYEYLLKVWVQQERYRDTSLKYLFEMYTEAMKGVKHLLVRKTIPNGLVFVGELPYGRNSGFSPKMDHLVCFLPGTLALGATKGITKKKALENHLLTAEDIDNLQLAEDLAKTCVEMYFVTSTGLAPEIAYFHIEGNSEGGPDGGNKSSQYVNDIIIKPLDRHNLLRPETVESLFVLYRITEDPKYREWGWQIFQAFEKYTRVDSGGYTSLDDVTSLPPPRRDKMETFFLGETLKYLYLLFGESNILPLDKYVFNTEAHPLPIIQSAQQISHSV

SEQ ID NO: 47060 - protein, 320 aa, Oryza sativa
MAPTVEISHLSFTYPGIDGRPPPGAPPLIEDVCFSLDAGHRCLLLGSNGAGKTTILKILGGKHMVDPSMVRVLGRSAFHDTALTSSGDLCYLGGEWRRDVAFAGYQVNIQMDISAEKMIFGVVGVDPQRRDELIKILDIDLAWRMHKASDGQRRRVQICMGLLKPFKVLLLDEITVDLDVLARANLLTYLKKECEERGATIIYATHIFDGLDDWPTHIVYIARGKLQLALPLEKVKEMSQLSLMRTVESWLRKERDEDRRRRKERKEKGLPEFDKVTEGSRVIGDPAARAVNNGWAAGRLASTVAGEENFIFSSNSVLRQ

SEQ ID NO: 47061 - protein, 918 aa, Oryza sativa
MLVHRSIEKDVFEPLVMRISEIAQHYFGTVGSSETGEKGPTVPEFPEKIKWEVQHLEELFEGIKEDKEEVYEGFKSVSLAISEWQRRLAIAYQNAARDPRPFEGMKWAMEYHEMWVEDNNIIGAGDEILDFDEHELFESLRYVKTAQGGSEAHLLESIKSGMQCIKNVLATIRSRKEADNRSWCIVEQVFSPLLKLLKTINHLVSEAAARNNKSENYKILVKIDAEVNCLQDALDLIDRNKNEVYENFRLIEDLILPLLTFLKATYNDQSESLSFLDAVKHGVNYLEGVLDKIEQKQRDGNDNFHIVKAAFSPLLTCMYTFRRISLETLAHEDKSDAFILLDRIRDDLSQLKDVLQMVQEKENGIYSNFDAIEEHIDEIYDGHMNVEGSLKLNQMGGLRDKLQLIHEEITNIRGKVDDSFKVQEVSCHVMRMAAAHEASSSHQLSASNTFCITMESAQMWQLKVIIDELETRLRHCLLCLAVFPVDAIIKKRLLIHWWIGECFVTSVSEGKSFFNKLLLSNGFITPVKKYHCDKVHSCKVQPWIRGLLIEAAKSKAFVELSSDGSSRNDLTRTRRACLHAGKILTNFHPDVLTIYNIKQQYVELNTTWFSEKNRLTTLQLGQWHDASYDPRAHHVEINNAKFLKQVKSCKQLKYLSLRGISRIEALPNSIGKLSRLVILDLKACHNLEDLPKEIVKLVKLEYLDVSDCYLLSGMPKGLGKLFQLEVLKGFVLSNAKSKDLCHLNELVMLKKLRKLSIRIGYSIDSGQFANFGELCALRSLTLIWGAHPISTHGSSPSHAAPHAMPCVLPLGLEKLELRCFPLVELPHWVSPEKLRKLKKLYVSGGNISDLGDLKSWEVTVLRLRFLKHMNYSWTALHDSFRKLDVLEAHECENLQPWPSCGKGLWRKEPNGTIAPVLT

SEQ ID NO: 47062 - protein, 474 aa, Oryza sativa; identical to SEQ ID NO: 37223

SEQ ID NO: 47063 - protein, 177 aa, Oryza sativa
MAAAAAVRSVAISLFVVALAVAAFAWSPSSLAGGASHHLRLEEVASAAGAGAAGHGSMSAAAGKDGGASAAAHGSAPAAAGIERTGTSASSPPCAATACRAPAKAPATTTASPARRPARTTAAASTSPAATADRSHHRPSSSSAAAAAAAAGAGAGDDDSLCFFDDDDDVHAYAYAY

SEQ ID NO: 47064 - protein, 461 aa, Oryza sativa
MSGAPCSNLGLVPRDMHGSIPISTTNSSGPSIGVSSLVTDANSSLSGGAQLQPSTSMNADSFMRLPASPMSFSSNNISGSSVIDGPIVQQSPPQEQMQKRRSSSVTSQPVIDAAGALHAQKKSRVDIRQGDILQHNLIQQLLQGQSSLHLQGQQNPQIQALIHQHKLAQIQQQQQHQMLQPFSQIQQSQVGIPRQPQLRPPLAQPGMQLAGPVRTPVENGLCSRRLKQYLYHKRHRPENNPITYWRKLIDEYFAPRARERWCVSSYEKRGNPSGAVPHTAPDSWRCDICNTHGGKGYEATYEILPRLCQIRFDHGVIDEYLFLDMANEFRLPNGLMLLEHTKVVQKSIYEHMHVIHEGQLRIIFTPELKIMSWEFCSRRHDEYITRRFLSPQVAHLLQVAQKYQTVATESGPAGVSNSDAQNICNMFVTASRQLAKNIDHHTLNEHGLSKDMFAACRYQRW

SEQ ID NO: 47065 - protein, 360 aa, Oryza sativa
MVVCKCRKATRVYCFVHKVPVCGECICFPEHQLCVVKNYAEWVVNPDYDWPQHCSSCNSVLEAGSEETTRLGCLHVMHTRCLISHIQSYSTQTAPAGYVCPSCSTPIWPPSTIKDTGSRLHSKLKEAIAQTGLEKNVFGNHFVTMPKADTRTPPAFASDPLKRVSISGDRESNGANIINSAIDANVQSGGMYSSATVGSGTPSHVEPEIVEIDGPSPITTQFPEQESNFIRSPSPHGPSAMTRKGANYVERQNSEISYYADDEDANRKKYTKRGTFRHKFLRMLLPFWSSALPTLPVTAPPRKESDAPEGRSRHQKSSRMGPTKILLALAIMACIATMGILYYRLTQRSLSENFIEDEPQ

SEQ ID NO: 47066 - protein, 457 aa, Oryza sativa
MAAPPPPRPQPHVMVLPFPAQGHVMPLMELSHRLVGLGFEVEFVHTDFNRDRVINAMANETGAIPDGIHMVSFPDGMDPAGDRANIAKLGDGLPAAMLGGIEEMIRSEGIRWVIADVSMAWVTELAATVGVHVALFSTYSAAVVAHRLQVPKLIQDGVLDEIGNVRRNEMIQLRPTMPPVLAVELPWVTLSGTPDGRRMVIQNVFKTNPTISSAEVIICNTFQDIEPGALALVPNVLPVGPLEAPATSRLAGHFWPEDTTCLAWLDEQDACSVVYVAFGSFTVFDMARVQELADGLVLSGRPFLWVIRQNFTNGAGEGWLEEFRHRVSGKGMIVGWAPQQSVLSHPSIACFVSHCGWNSTMEGLRHGVPFLCWPYFADQYCNQSYICNVWGTGVKLQADERGVVTKEEIKNKVEQLVDDKEIKARAAKWKHAACTSIAEGGSSHENLLKFVNLLREQ

SEQ ID NO: 47067 - protein, 90 aa, Oryza sativa
MDKGHKQCLILWLRIQDWANYILNFVKDNGLEDSVMTVEEIRYGIETRGSELAGMDRGVLMRALKLLEQKGKTAIFKGTSVNEEGVKFSA

SEQ ID NO: 47068 - protein, 295 aa, Oryza sativa
MAASPAMPSLLLLLLLAVLVSAADAYDSAASANTNAGAIPDPNILNMEAMCPKTTDVKACQQLVKNMPSNIVAGKKDARSIARGCIATAWFVARDGAKDCTAAVDECKDKVDQCLDSCRHAFAAVNDALEPQGTGDDAVKVPEDEKLLAIHASLTQLLRGPTGTRRPPLCNTCCQDGSCTEEKKRNVVALFVQLWSLLDFADAVLEDLYPLTKLPGDKAAGSDTSAAAAGSTADKETSAAAGSTADTATSAAAGSTSAKETSPVAGSTADKTYAAAGSAPPVVDTAPAHPVTTYD

SEQ ID NO: 47069 - protein, 578 aa, Oryza sativa
MEEVRGRESKDHRGGGGGGGGDGDGERTGRWRAEEVIAGNRAVLEALRELVMYPVLYAREARVLGLNFPRGLLLHGPSGTGKKSMVRAVVRECNAHLTVIDSISVHKPHAGEGEKFMREAFTEAYSQASQGRPAVIFIDELDDICPPRGSRREQGSRIVGQLLTLMDGKSSKLLPHLVVVASATRVDAIESALRRPGRFDSEIEVTVPTAEERFEILKLYTKNLHLGECVDLQSVAASCNGYVGADLQALCREAARRAYGRLSSSSESENVLTLIMEDWESAKSVAKNSVTRGVTKEIPAVSWDDIGGLKAVKKKLQQAVEWPIKHAASFDRLGISPIRGVLLHGPPGCSKTTLAKAAAHAAQASFFSLSGAELYSKYVGEGEALLRRTFQMARLASPSIIFFDEADAIAPKRTGPSGNSSGNATVGERLLSTLLTEMDGLELATGIIVLAATNRPNAIDAALLRPGRFDMVLYVPPPDAEGRYEILRIHTRKMPLGDDVDLWKVAERTELFTGADLEGLSREAGMAALRESLRSERFVCDDIHFQAALRSLRPSLTQSVVDEYSNAAIHGPLTRRKH

SEQ ID NO: 47070 - protein, 665 aa, Oryza sativa
MARLLPFLVAAAAALVAVSLSAPGADGFYLPGSYPHKYNPGEPLSVKVNSLTSIDTEIPYSYYSLPFCTPPDGVKDSAENLGELLMGDRIENSPYRFRMHANDSDLFLCRSPPLAADAFNLLKKRIDEMYQVNLILDNLPAIRYTKKDDYFLRWTGYPVGIRVGVDYYVFNHLQFTVLVHKYEEANVARVMGTGDATDGFPSTGKDGSGGAAGSSGWMVVGFEVVPCSIKHNPDDVKSLKMYGKYPRSIKCDPTTVSMSIKENEPIVYTYEVSFVESDIKWPSRWDAYLKMEGAKVHWFSILNSLMVIAFLAGIVFVILLRTVRRDLTRYEELDSEAQAQMNEELSGWKLVVSDVFRAPSNPMLLCVMVGDGVQILGMAVVTILFAALGFMSPASRGTLITGMLFFYLVLGILAGYVGVRVWKTIKCGDHTGWMAVSWRVACFFPGIAFLILTTLNFLLWGSQSTGAIPFSLFVILILLWFCISVPLTLVGGLLGAKAPHIEYPVRTNQIPREIPPQKYPSWLLVLGAGTLPFGTLFIELFFIMSSIWMGRVYYVFGFLFIVLLLLVIVCAEVSLVLTYMHLCVEDWKWWWKSFFSSGSVAIYIFLYSINYLVFDLKSLSGPVSATLYLGYSLFMVIAIMLATGTVGFISSFCFVHYLFSSVKAD

SEQ ID NO: 47071 - protein, 541 aa, Oryza sativa
MARQEQQQHLQVLSALDAAKTQWYHFTAIVVAGMGFFTDAYDLFCISLVTKLLGRIYYTDLAKENPGSLPPNVAAAVNGVAFCGTLTGQLFFGWLGDKLGRKSVYGMTLLMMVICSIASGLSFSHTPTSVMATLCFFRFWLGFGIGGDYPLSATIMSEYANKKTRGAFIAAVFAMQGFGILAGGIVTLIISSAFRAGFPAPAYQDDRAGSTVRQADYVWRIILMLGAMPALLTYYWRMKMPETARYTALVAKNAKQAAADMSKVLQVEIQEEQDKLEQMVTRNSSSFGLFSRQFARRHGLHLVGTATTWFLLDIAFYSQNLFQKDIFTSINWIPKAKTMSALEEVFRIARAQTLIALCGTVPGYWFTVFLIDIVGRFAIQLLGFFMMTVFMLGLAVPYHHWTTKGNHIGFVVMYAFTFFFANFGPNSTTFIVPAEIFPARLRSTCHGISAAAGKAGAIIGSFGFLYAAQDPHKPDAGYKPGIGVRNSLFVLAGCNLLGFICTFLVPESKGKSLEEMSGEAEDDDDEVAAAGGGAAVRPQTA

SEQ ID NO: 47072 - protein, 35 aa, Oryza sativa
MRYYNVLTCSKFRRFVRHSCSGVCNVGNIPLVNIF

SEQ ID NO: 47073 - protein, 486 aa, Oryza sativa
MGWLTKFFRGSTHKISEGQYHSKPAEETIWNGPSNSAVVTDVPSEFDNEDIARAISLSLLEEEQRKAKAIEKDMHLEEDEQLARAIQESLNVESPPRARENGNANGGNMYQPLPFMFSSGFRTCAGCHSEIGHGRFLSCMGAVWHPECFRCHACNQPIYDYEFSMSGNHPYHKTCYKERFHPKCDVCKQFIPTNMNGLIEYRAHPFWLQKYCPSHEVDGTPRCCSCERMEPRESRYVLLDDGRKLCLECLDSAVMDTSECQPLYLEIQEFYEGLNMKVEQQVPLLLVERQALNEAMEGEKTGHHHLPETRCLCLSEEQTVSTILRRPRMAGNKVMEMITEPYRLTRRCEVTAILILYGLPRLLTGSILAHEMMHAWLRLKGYRTLSPDVEEGICQVLAHMWIESEIIAGSGSNGASTSSSSSASTSSKKGGRSQFERKLGDFFKHQIESDTSMAYGDGFRAGNRAVLQYGLKRTLEHIRLTGTFPF

SEQ ID NO: 47074 - protein, 626 aa, Oryza sativa
MEQGRGKGMLVGGSSSSGGGGGGRVEEGRVAREKARIPYTIPPPLDRPSPNYTVVDLKGTQVQVRNRWRKSVLDYRLWCYNTSDARYEFGHPYRRCCALPPKGHFLVYMHYKGKWLCALIEGISGYLNGYITRSTGKIDDLRIRENGYLGVTKSEFIEHAKKLPWDGAYVTAHQAKCGDNALLKSFLILHRYVDGQAPMPSDDEVREAGEVMILHFPEAAKSDNLFLDKIHKNFRASPAHVFGKRQIEKARSWSKTCGDVKSIFQGDGAQSEIAEKGRRDHDATKKSSKKDVTEAEAKEFLEEVRLIHRTFDKAENLFLLKDMPVHLSIDGPIDVAWTENELRRSREHGLDDPSWGFLTERSPKFPPTNNNEQNQPTLIENAYMTFSECDEYSGSPDHQEEMNEESVGYKVTSARAGVPFFCQTASEFEEMRIIPVFESSKKDVLSSFQLDPELTEPHRLIKHEKLELYLQDNPLCSDVDSTLDSKMAAIKAAIEGAEGQDTAHKEFAKCHIMGNHKRPLLLSSESRKLIAYHESGHAIVALHTQGAHPIHQATVLPHGLSLGMVTQVASPGNTSISKQKILARIDVCFGGAVAEELLFGEHTVTAGAKNDLFTAKELAQKLVLYC

SEQ ID NO: 47075 - protein, 152 aa, Oryza sativa
MFYGAMVWDPWLIVSQIVCLQCLYYLALGLLMALLVGTRVPRLTLLYLFDFATLTPRTTTGWCVIAAFLLAAAAGAAFMLYVIERAKKCLDFAATLYIIHLFICIVYGGWPASVTWWVVNIAGLAIMSLLGEYLCIRRELKEIPISRLRASV

SEQ ID NO: 47076 - protein, 76 aa, Oryza sativa
MDDAPCIEFWKVICSSRLQVSNDAYKRSGKGQGLLDAAITEQERIVHICTLFRRYFCCRISVYYLTFFTIFESGFS

SEQ ID NO: 47077 - protein, 700 aa, Oryza sativa; identical to SEQ ID NO: 35284

SEQ ID NO: 47078 - protein, 731 aa, Oryza sativa
MNSQKKRSPKIEPFRHRVDADPKSFDKSWKKLEDAIREIYNHNASGLSFEELYRTAYNLVLHKHGLKLYDKLTENLKGHLKEMCRSIEDAQGSLFLEELQRRWADHNKALQMIRDILMYMDRTFIATNKKTPVFDLGLELWRDIVVRTPKIHGRLLDTLLELIHRERMGEMINRGLMRSTTKMLMDLGSSVYHDDFEKPFLEVSASFYSGESQQFIECCDCGEYLKKAERRLAEELERVSQYMDAKTADKITSVVDTEMLANHMQRLILMENSGLVNMLVDDKHEDLSRMYNLFKRVPDGHSTIRSVMASHVKESGKALVSDPEKIKDPVEFVQRLLNEKDKYDEIISISFSNDKAFQNALNSSFENFINLNNRSPEFISLFVDDKLRKGVKGANEEDVETVLDKVMMLFRYLQEKDVFEKYYKQHLAKRLLSGKTTSDEAERSMLVKLKTECGYQFTSKLEGMFNDLKTSHDTMQSFYANLSGDTDSPTISVQILTTWSWPTQPCTPCKLPPEIVDISEKFRAFYLGTHNGRRLTWQTNMGNADIKATFGGRRHELNVSTYQMCVLMLFNSADGLTYGDIEQATGIPHADLKRCLQSLACVKGKNVLRKEPMSKDISEDDTFYYNDKFTSKLVKVKIGTVVAQKETEPEKLETRQRVEEDRKPQIEAAIVRIMKSRRVLDHNSVITEVTKQLQSRFLPNPVVIKKRIESLIEREFLERDKVDRKMYRYLA

SEQ ID NO: 47079 - protein, 439 aa, Oryza sativa
MAEPSKVIHIRNVGHEISESELLQVVQPFGTVAKLVMLRAKNQMEDLASAVNVIQYYNTIQPSVRGRNVYLQYSSHQELTTDQSSHGRNPDQEEPNRILLVTIHHMLYPITIEVLHQVFSPYGFVEKIVTFQKSAGFQTLIQYQSRQSAIQAYGALHGRNIYDGCCQLDIQYSNLSELQVHYNNDRSRDFTNPSLPTEQRSRSSQPSYNDPSSLFGFQQPGDPYAQMSKAAMIAAAFGGTLPPGVSGINDRCTLLVSNLNTDKIDEDKLFNLFSMYGNIVRIKILKNKPDHALIQMADGLQAELAVLYLKGAMLFGKKLEVNYSKYPTVTADPDARDYSTSHLNRFNSNVVKNYRHCCAPTKMIHISALPQDITEDTIHSLVGEHGTIANSRLFETNGKTQALVLFESVEEATEALVEKHASKLDRTNIRISFSQMQNI

SEQ ID NO: 47080 - protein, 342 aa, Oryza sativa
MSSGQEAGSSSGGSGDGGAAAPRRNTRKPKYSKFTQQELPACKPILTPKWVISVFVLVGVIFVPIGLVSLKASRKVVEIVDRYDDACVPANTTDKLAYIQNPTISKNCRRTLKVPKDMDAPIFVYYQLDNFYQNHRRYVKSRSDAQLRDPKKANDTSTCDPEGTANGMAIVPCGLIAWSIFNDTYGFVRNSKNLPVDKKNISWKSDREHKFGRDVFPKNFQNGSLIGGKTLDPNKSLSKQEDLIVWMRTAALPTFRKLYGRIHTDLKKGDTITVTLENNYNTYSFSGKKKLVLSTSTWLGGKNDFLGLAYLSVGGLCFFLAFAFTLLYLIKPRKMGDNNYLS

SEQ ID NO: 47081 - protein, 220 aa, Oryza sativa
METSSFLRTTLPTAKPLPAFQTLAPRPRPRPLRRSTISAAITRGRKEDTVAAVREQLEGCYLLAGIRYEGLTVKQLQGIRDTLPETCRLLVAKNTLVGKAIEGTPWEALKPCMKGMNAWLFVHTEEVPAALKPYRAFQKEERLEETNDFVGAVFEGKFYAPGDFKALETMPSRAEVYAKLLGSLQGPATSVVTTLQAPARDVVSVLSAYVRKLEQEVGAA

SEQ ID NO: 47082 - protein, 369 aa, Oryza sativa
MKLTVKTLKGTQFEIRVQPNDTIMAVKKIIEEIQGKDSYPWGQQLLIHNGKVLKDESTLEENKVSEVGFLVVMLSKSKASGSSGALSSLTSSTPLTRQETPADASRAAPQPLVAPTRTPQPERPPAVAPSNAYGQAASNLLSGSNLDTTINQLMEMGGGSWDRDKVQRALRAAYNNPERAVEYLYSGIPITAEVAVPAGGQGANTTEPSSTREASLSGIPNASPLNLFPQGDANDGGGAGGGTLEFLRHNQQFQALREMVHTNPQILQPMLQELSKKNPQLLRLIQENHDEFLQLINEPFDGADGDFLDQPDQDEMPHSINVTPEEQEAIGRLEGMGFDRARVIEAFFACDRNEQLAANYLLEHAADED

SEQ ID NO: 47083 - protein, 848 aa, Oryza sativa
MSAAAVLAVVAAAVAALAAAASGYELTKNGTVITYDRRSLIIDGHREIFFSGSIHYPRSPPDTWPDLISKAKEGGLNVIESYVFWNGHEPEQGVYNFEGRYDLIKFFKLIQEKEMYAIVRIGPFVQAEWNHGGLPYWLREIPDIIFRTNNEPFKKYMKQFVTLIVNKLKEAKLFASQGGPIILAQIENEYQHLEVAFKEAGTKYINWAAKMAIATNTGVPWIMCKQTKAPGEVIPTCNGRHCGDTWPGPADKKKPLLWTENWTAQYRVFGDPPSQRSAEDIAFSVARFFSVGGTMANYYMYHGGTNFGRNGAAFVMPRYYDEAPLDEFGLYKEPKWGHLRDLHHALRHCKKALLWGNPSVQPLGKLYEARVFEMKEKNVCVAFLSNHNTKEDGTVTFRGQKYFVARRSISILADCKTVVFSTQHVNSQHNQRTFHFADQTVQDNVWEMYSEEKIPRYSKTSIRTQRPLEQYNQTKDKTDYLWYTTSFRLETDDLPYRKEVKPVLEVSSHGHAIVAFVNDAFVGCGHGTKINKAFTMEKAMDLKVGVNHVAILSSTLGLMNSGSYLEHRMARVYTVTIRGLNTGTLDLTTNGWGHVVGLDGERRRVHSEQGMGAVAWKPGKDNQPLTWYRRRFDPPSGTDPVVIDLTPMGKGFLFVNGEGLGRYWVSYHHALGKPSQYLYHVPRSLLRPKGNTLMFFEEEGGKPDAIMILTVKRDNICTFMTEKNPAHVRWSWESKDSQPKAVAGAGAGAGGLKPTAVLSCPTKKTIQSVVFASYGNPLGICGNYTVGSCHAPRTKEVVEKACIGRKTCSLVVSSEVYGGDVHCPGTTGTLAVQAKCSKRPPRSAATAQ

SEQ ID NO: 47084 - protein, 184 aa, Oryza sativa
MSSSNNGGGGDKKPASGGRWGPTIRTLADISRCPSGFPGGGGGGGSDSDEPQEYYTGGEKSGMLVQDPTRRNTVDSIFDQARQMGALQESTAPFEDQSLSSRSFTGTGRLLSGETAPAAPPPPGNVLHNIPFWNNGFTVDDGPLRDYDDPANADFIESIKKSQCPQELEPADRRTPVHVNVIND

SEQ ID NO: 47085 - protein, 1082 aa, Oryza sativa
MMQMLGLRGSASKDRDRGRRGGDEASPGHGSPWTPSSSASSPRSPFAGGGGGRPLRLVYCDERGRFRMDPEAVAALQLVKGPVGVVSVCGRARQGKSFILNQLLGRSSGFQVASTHRPCTKGLWMWSAPIKRTALDGTEYSLLLLDTEGIDAYDQTGTYSIQIFSLAVLLSSMFIYNQMGGIDEAALDRLSLVTEMTKHIRVRANGGKSTASELGQFSPIFIWLLRDFYLDLVENDRKITPRDYLEIALRPLEGRGKDISSKNEIRESIRALFPDRECFTLVRPLNSENELQRLDQIPIEKLRPEFQAGLDELTRFILERTRPKQVAGTVMTGPVLAGVTQSFLDAINNGAVPTISSSWQSVEEAECRRAYDSAAEVYLSAFDRTKQAEEDALRDAHEAALRKALEAYGTVAVGTGTSRMHYEKVLSNFCRKTFQEYKRNAFLEADKQCSNMIQIMERKLRAACSAPGVKVSNVIQVLESLLTEYETSCSGPSKWRMLAAFLRQCLEGPILDLCLKLVNEAESERTSFALKYRSNEDQLELLKRQLEANEAHKSEYLKRYEAAISEKQRVSEDHSAHLTNLRTKCSTLDERCLSLSKELDLVRHECTDWRVKYEQYVTQQKAEQDGFISQLATLESRYSSAEGKLGAAREQAAAAQDEATEWRDKYETAAAQAKAALERLASVQEQINKIAHERESGIRAEFASHLEEKEEEMKRLVAKIRHAESEESVLAERLQVAESKAQSHNKETAALKDEIRELTGKLEFLRDRAVSFEKQARMLEQERNHLQEKFLSECKKYDEAEERYKAAEREAKRATELSDVARTEAVTAQKEKDEAQRLSMEKLAVIERIQRQVDRLEQEKVNLLDEVQKMHKSETDALSKVALLESRVAEREKEIEELMIQSNEQRSSTVHVLESLLSTERAARAEANKRAEALSLQLQSTQSKLDVLHQELTSVRLVETALDSKLRTTTHGKRLRENEVGMESVQDMDIDRPERSRKRSKSNTSPLKHFQSEDGGSVHMGEDSVTVSTDTKDGNPDGYKKLTIAKLKEELTKHGFGAQLLELKNPNKKDILALYKKLVLGK

SEQ ID NO: 47086 - protein, 145 aa, Oryza sativa
MVSSTMAGVDLPTRRLSPSPPAYKRDPRLPPLSPHTAALSLLSPRPTCRSLLVPPPSQLRPPLAGGRDLIGARRRHHPLRRFLLFPVHPSVEHDDRGNDDDTDDPKFLAVSSSLPTTPSISRRRVCSILPFRKIGSSSPSTSKTL

SEQ ID NO: 47087 - protein, 307 aa, Oryza sativa
MPHSSYLALMGLGMEKVSVPSILASTGVVKSNSFSMCFSKDGLGRINFGDTGSADQSETPFIVKSTHSYYNISITSMSVGDKNLPLGFYAIADSGTSFTYLNDPAYTAYTTNFNAQISERRANFSGSTRSGPFPFEYCYSLSPDQTTVELPVVSLTTNGGAVFPVTSPVYPIAAQMTNGEIRIIGYCLAVIKSDLPIDIIGQNFMTGLKVVFNREKSVLGWQKFDCYKDEKMTDDGSSVGSPSPSPGPTTHVFPQPQESDSPAGRTPIPGAAPVPRSSSAAAGGRAGFRLLSSMALLLLAAAAAAVF

SEQ ID NO: 47088 - protein, 750 aa, Oryza sativa
MEAAARGNKKLQERVPIRRTAWRLADLAILFLLLALLLHRVLHDSGAPWRRAALACEAWFTFMWLLNVNAKWSPVRFDTFPENLAERIDELPAVDMFVTTADPVLEPPLVTVNTVLSLLALDYPAAGEKLACYVSDDGCSPLTCYALREAARFARTWVPFCRRHGVAVRAPFRYFSSTPEFGPADGKFLEDWTFMKSEYEKLVHRIEDADEPSLLRHGGGEFAEFLDVERGNHPTIIKVLWDNNRSRTGDGFPRLIYVSREKSPNLHHHYKAGAMNALTRVSALMTNAPFMLNLDCDMFVNNPRVVLHAMCLLLGFDDEISCAFVQTPQKFYGALKDDPFGNQLEVSLMKVGRGIAGLQGIFYCGTGCFHRRKVIYGMRTGREGTTGYSSNKELHSKFGSSNNFKESARDVIYGNLSTEPIVDISSCVDVAKEVAACNYEIGTCWGQEVGWVYGSLTEDVLTGQRIHAAGWRSTLMEIEPPAFMGCAPNGGPACLTQLKRWASGFLEILISRNNPILTTTFKSLQFRQCLAYLHSYVWPVRAPFELCYALLGPYCLLSNQSFLPKTSEDGFYIALALFIAYNTYMFMEFIECGQSARACWNNHRMQRITSASAWLLAFLTVILKTLGFSETVFEVTRKDKSTSDGDSNTDEPEPGRFTFDESTVFIPVTALAMLSVIAIAVGAWRVVLVTTEGLPGGPGISEFISCGWLVLCFMPLLRGLVGSGRYGIPWSIKMKACLLVAIFLLFCKRN

SEQ ID NO: 47089 - protein, 88 aa, Oryza sativa
MERSGSCLKSCRDRSPGYRAASRNVNHGNLHSPSFGSYVPPTIEYYFFSSTSLFIQAGQLCSYASDMLTLQLLYYRLCDSVLVKSDAY

SEQ ID NO: 47090 - protein, 768 aa, Oryza sativa
MAAAAALWQPQEEGLREICTLLDAHISPNSDQARIWQQLQHYSQFPDFNNYLVFLLARGEGKSFEARQAAGLLLKNNLRATFSSMPPASQQYVKSELLPCIGATNKAIRSTVGTVISVLFQIVRVAGWIELFQALHQCLDSNDLDHMEGAMDAIYKICEDVPEELDVDVPGLPERPINVFMPRLLQFFQSTHAILRKLALGCINQYIVVMPAALYMSMDQYLQGLFNLAKDPSADVRKLVCSAWVQLIEVRPSILEPHLKNVTELMLQANKDSDDEVALEACEFWSAYCDVSMPPEGLREFLPRLIPTLLSNMSYSDDDESLADAEEDESFPDRDQDLKPRFHASRLHGSETGEDDDDDDAVNVWNLRKCSAAGLDVLSNVFGDDILPTLMPLIQQNLARTDDDAWKEREAAVLSIGAIAEGCITGLYPHLPQIVAFLIPLLDDKFPLIRSITCWTLSRYSKFIVQSLEHPNGREQFDKILLGLLRRVLDTNKRVQEAACSAFATLEEEAAEELVPHLGIILQHLMCAYGKYQRRNLRILYDALGTLADAVGAELNQAKYLDIFMPPLITKWQQLANSDKDLFPLLECFTSIAQALGPGFSQFAEPVFQRCINLIQSQHLAKVDPAAAGALYDKEFIVCALDLLSGLAEGLGAGIESLVSQSSLRDILLQCCMDEAADVRQSALALLGDLSRVCPIHLHPRLQEFLNVAAKQLNPQCVKEAVSVANNACWAIGELAIKVLYHFCNPSFFYFKRYCNPRLIHIDVSFLF

SEQ ID NO: 47091 - protein, 767 aa, Oryza sativa
MGSLTDIGVAAGINILSALGFLLAFAVLRIQPINDRVYFPKWYLKGTRSSPRSMGTVFSKFVNADLSTYIRFLNWMPAALQMPEPELIEHAGLDSAVYVRIYLLGLKIFVPIAVLAFIVLVPINWASGTLEKEKSLSYDQIDKLSISNLGKGSKRFWAHIVMAYVFTFWTFFVLYREYKVVTTMRLRFLAIQNRRADQFTVLVRNVPPDPDETVSEHVEHFFAVNHRDHYLSHQTVYNANTLAGLVEQKKGLQNWLVYYENQHAKNPAKKPTMKTGLWGLWGKRVDAIEHYTTAIEELCKQEDEERHKVITDPNAIMPAAFVSFKSRWGAAVCAQTQQTSNPTLWLTEWAPEPRDVFWPNLAIPFVELSVRRLIMAVALFFLTFFFMIPIAIVQSMANLDDIERMLPFLKPIIERNSLKSIVQGFLPGIALKIFLILLPTFLVMMSKIEGHTSLSGLDRRTASKYYLFLFVNVFLGSVITGTAFQQLNNFIHQSANKIPEIVGESIPMKATFFITYVMVDGWAGVAAEVLRLKPLVMFHIKNTFLVRTERDREQAMDPGSLDFGTTEPRIQLYFLLGLVYAVVTPILLPFIIVFFSLAYLVFRHQIINVYNQQYESGAQFWPDVQRRLVIALIVSQILLLGLLSTQEAEKSTVALLPLPVLSIWFHYVCKGRFEPAFIKFPLQDAMVKDTLERANDPTLNLREYLKDAYVHPVFQKNDIYEFAGIDEEEKNPMVATKRQSRMNTPVDSKFNSSSGTNEGEFSRMAPT

SEQ ID NO: 47092 - protein, 464 aa, Oryza sativa
MAASPAAGAAAATVSSFVSPSSFSSVKASKPDRLRPARRAAAVNVRCVSSPPATETSFKTKVPRNANMAKLQAGYLFPEIARRRAAHLLKFPDAKIISLGIGDTTEPIPDVITNAMAKRAHALSTVDGYSGYGAEQGEKKLRAAIAATYYADLGIEETDIFVSDGAKCDISRLQVLFGSNVKIAVQDPSYPAYVDSSVIMGQTGLYQEDVQKYGNIEYMKCSPENGFFPDLSSVPRTDIIFFCSPNNPTGAAASRDQLTKLVKFAKDNGSIIVYDSAYAMYISDDSPKSIFEIPGAKEVAIETASFSKYAGFTGVRLGWTVVPKELLFSDGHPVAKDFNRIVCTCFNGASNISQAGGLGCLSPEGLKAMSDVVGFYKENTKIIVDTFTSLGFNVYGAKNAPYVWVHFPGRNSWDVFAEILEKAHVVTTPGSGFGPGGEGFVRVSAFGHRENIIEAARRLKQLYK

SEQ ID NO: 47093 - protein, 641 aa, Oryza sativa
MAGDPAAGGDGGRGSSGGKGSSPSSSRHQQFRNLAKTRVDDLQEMFSGLQSARKESRSADAALLEEQVHHMLREWRAELNVPSPASSLQNSQSQGNNREASDPPSETLRLLQLAGAEEEDDATSKLVMPRSPMPMQSSHEGHNLSPVLQGGTMAGGAAELMVPRSPLQQMPSSHQSHGHGQDGGQNLQGEAVMGSTAATAAPHLGQGMQGDCGGMAGVTNAMFNDQLYYIDHELNIDDFLQDDDYKINLPGSNPDGPNTMQGIGQLEHQQYNLPLDLPPNSFVDANNSAQSSGDVFFHMSDLLTTMCPSPSQYLGPKCALWDCGRPVRGSDECQHYCNPYHAGLALNDDGLLGTRPVMCPRGIDLKDGPLFAALSAKVQGKNVGIPVCEGAATTKSPWNAPELFDLSLHEGESLREWLFFDTPRRAFDSGNRKQRSLPDYNGRGWHESRKQVMKDFGGLKRSYYMDPQPSSNYEWHLFEYETNDSDALALYRLEYKSSDTKRGVKSKLASSPLSEIQQQMVRLSADSPVESKRTARSRAKANQKDNNSNAYPALNTPVQVSASNAHQTMSVNTPDQVNVSNAYQTMPLNTPNQPGPSNAYHAASQMDQMTFLDGSVVYGPHLPYGYSTERSDFYWNPSDGT

SEQ ID NO: 47094 - protein, 629 aa, Oryza sativa
MSHSSDEDSEISDSEIDEYADKFYARLVAGEFKVKDGQSYSCPFCSGKKKKDFNINNLIQHASGVGAASNRQAKDKATHRALAKHLKNGLTKSSGQQSQTAVVEPQPLPNRDEKFVWPWMGVLVNVPTEWKDGRQIGRSGNHLKEQLSRFCPLKIIPLWNFRGHSGNAIVEFGKDWHGFRNALAFEDYFGKEGYGRRDWKEKQNQGSNLFGWVARAEDHTSPGLIGDHLRKNGDLKTINDLENEGARKTDKLVANLANQIEVKNRHLQELEVTYNERTTSLEKMMGQREQLLQKYNEEIRKMQQLAQRHSQKIIDENQKLRSELESKMSELNTRSKELDEIAAKSDYDRRIIDQEKQKNAIKSSHLKLATLEQERADENVLKLVREHKREKEAAVKKILKLEQQVDAKQKLELDIQQLKGKLEVMKHMPGDEDSALKNKIDELSEELQEKMDELDAMESLNQTLVIKERKSNTEMQDARKELENGLLDLLDGQSHIGIKRMGELDLEAFSKACRKMSSEEDAEITAAILCSKWQAEIKNPDWHPFRFVLVDGQEKEIIEDDAKLQELKEEHGEDIYRLVRDALCEINEYNPSGRFPVGELWNFKDKRKATLKETVQFVLRQWRANRRKR

SEQ ID NO: 47095 - protein, 657 aa, Oryza sativa
MPSLLHRTSSYPQQEPQYSHTEPIPVPKSSFIPYPPSGAVSHSSPGQPHNMNMPSPPTSFQMPVSAQNELHHPQFPRGGMPPGPLGRSMAHLDSAGLSTNNLQQNALNSGPVRPNGAMLTPGLVQHNLQRPNGLVPPQMLSRHPQHGMAPIQHSPPQFSQFHAQMLGPRHPPPKGCQMYNPQRPSQMMSGFDANLAMPDLSDPRARAMLHHGVHGQHYLPQGFELAGMRMDNGWPRFRSKYMSTPEIENIARMQQAATQINDPYIDDYYHQACLAKKSAGGQLKHHFCPTLIRDPSSRARSKDEPHAYLQVDALGRLPFSSIRRPRPLLDVEQTSESSDDVTEKSASKTLDQEPMLAARITIEDGLCLLLDVDDIDRLLQFSQQQDGGLQLRNRRQALLEQLAESLQLVDPLTPSNNAPLSPNDDLVFLRIVSLPKGRKLLSRYLELVSSGSELARIACMAVFRHLRFIFGNLPSDSSAVETTTKLATAVSTCVVRLELSGLSACLAAIVCSSLQPPLRPLGHAAGDGASFIIKSVLDTATELLTDQHVASTYSMQNRALWQASFDAFFGLLTEYCMSKFDSVIHALQTQPAVAAVIGREMPVELLRASLPHTNEYQRKQLLGFAQRTVPVNNHSSHGSSNGPMTSESIPSSESWKI

SEQ ID NO: 47096 - protein, 333 aa, Oryza sativa
MVAAAEWWEATIAAYTGLSPAAFFTAVAVAAALYVAVSGLLTRRPPPLPRRQEEARASQPLPPPVQLGEVTEEELRVYDGSDPNKPLLMAIKGQIYDVTQSRMFYGPGGPYALFAGRDASRALAKMSFELDDLTGDVSGLGPIELEALHEWEGKFMSKYVKVGTIKKIIPVSEGDAATHGGTSDRGIDVGTIESNRVPEPEENGATSHADAVEKSDADVSTHNHEDVVEKSDELLESGVDTRSTHEDAVGKPKEETEDADVQKTISTEVAGEGKGAPDEDDRNTCSLEDAIEKPKETAYIDVKDTSGHEVAGEPKEAPDVDGNNTSSNQDGSG

SEQ ID NO: 47097 - protein, 596 aa, Oryza sativa
MARLGLAVCAASFHLFLLLASTSSLRRAPTEADTANHARRTAYHFQPAKNWQNDPNGPMYHNGMYHLFYQYNPHSALWDIGNLSWGHSVSGDLLNWAALDTALDPTSPFDANGCWSGSATILPGALPAILYTGIDASKEQVQNVAFAKNPSDPLLREWEKPAYNPVIALPADVPGDKFRDPSTAWLGRDGLWRVAVSAEVDGVASTLVYRSKDFVRWERNAAPLHASRAAGMVECPDLFPVAERGEDGLDTSANGAGGVRHVLKLSVMDTLQDYYMVGTYDDAADAFSPAEPERGDDCRSWRRLDYGHVYASKSFFDVRKNRRVLWAWANESDSQADDVARGWSGVQTFPRKMWLAKDGKQLLQWPIEEIKTLRRKRAGLWQGTRLGAGAVQEIVGVASSQADVEVVFKIPSLEEAERVDDPNRLLDPQKLCGEKGAAVRGGVGPFGLLVMASGDLHEHTAVFFRVFRHHDKYKLLMCTDLTKSSTRAGVYKPAYGGFVDMDIDDHKTISLRTLIDHSVVESFGGGGRACITARVYPEHVATSSSHLYVFNNGSDAVKVAKLEAWDLATATVNVVVGDHHGLVAPALELEPTRTTQ

SEQ ID NO: 47098 - protein, 89 aa, Oryza sativa
MHISSMCISLHFFHELQILEALTTKKCQEEFSQESLETLGDSFLKYVTTRHLFSEYRLQHEGILTKMKKNLISNAALCQLACSSNLVVL

SEQ ID NO: 47099 - protein, 285 aa, Oryza sativa
MEMVLQRTSHHPVPGEQQEAAAELSSAELRRGPWTVDEDLTLINYISDHGEGRWNALARAAGLKRTGKSCRLRWLNYLRPDVKRGNFTAEEQLLILDLHSRWGNRWSKIAQHLPGRTDNEIKNYWRTRVQKHAKQLNCDVNSKRFKDAMKYLWMPRLAERIHARAGAVDDSGDYSNNDLSCVSGVTMATVANCFDGSPSMVTSSSSDSFTSESQDLKKINLHVHGDDEKMNSEDWMQEVDHEFWSTEIQPNNEQFQDQQLNGWVQGFSEGLSETLWSLEDIWKMQ

SEQ ID NO: 47100 - protein, 573 aa, Oryza sativa
MALATNSAAVSGGAAAAASSAPQPRLAATFLPMRRRTVSAVHAADPAKSNGPVQAAAKASSPSTVAAPEKKPVGLGKWTVDSWKAKKALQLPEYRSQEELDSVLKTIETFPPVVFAGEARHLEERLADAAMGRAFVLQGGDCAESFKEFNANNIRDTFRILLQMGAVLMFGGQMPVVKVGRMAGQFAKPRSDSFEERDGVKLPSYRGDNINGDTFDEKSRVPDPQRMIRAYAQSVATLNLLRAFATGGYAAMQRVTQWNLDFMDHSEQGDRYRELAHRVDEALGFMTAAGLTVDHPIMTTTDFWTSHECLLLPYEQSLTREDSTSGLFYDCSAHMLWVGERTRQLDGAHVEFLRGVANPLGIKVSDKMNPRDLVKLIEILNPSNKPGRITIITRMGAENMRVKLPHLIRAVRNSGQIVTWITDPMHGNTIKAPCGLKTRPFDSILAEVRAFFDVHDQEGSHPGGIHLEMTGQNVTECIGGSRTVTFDDLSDRYHTHCDPRLNASQSLELAFIIAAATRRSVSTRQGSASETLAPRLPLRGRQNGERSQDQEDLLQEQGVQEAHPSQGHSVQEG

SEQ ID NO: 47101 - protein, 449 aa, Oryza sativa
MIWIIGEYAERIDNADELLESFLETFPEEPALVQLQLLTATVKLFLKKPTEGPQQMIQAVLNNATVETDNPDLRDRAYIYWRLLSTDPEAAKDVVLAEKPVISDDSNQLDSSLLDDLLANISTLSSVYHKPPEAFVSRVKTAPRADDEEFADTAETGYSESPSQGVDGASPSSSAGTSSNVPVKQPAAPAAPAPMPDLLGDLMGMDNSIVPVDEPTAPSGPPLPVLLPSTTGQGLQISAQLVRRDGQIFYDISFDNGTQTVLDGFMIQFNKNTFGLAAGGALQVSPLQPGTSARTLLPMVAFQNLSPGAPSSLLQVAVKNNQQPVWYFNDKIPMHAFFGEDGKMERTSFLEAWKSLPDDNEFSKEFPSSVVSSIDATVEHLAASNVFFIAKRKNSNKDVLYMSAKIPRGIPFLIELTAAVGVPGVKCAVKTPNKEMVALFFEAMESLLK

SEQ ID NO: 47102 - protein, 223 aa, Oryza sativa; identical to SEQ ID NO: 35643

SEQ ID NO: 47103 - protein, 81 aa, Oryza sativa
MEYISCVFTIIWFSSFTQQCCYFYCCFPPWKKHGSSREVFICFSCDQLICRFGSKVCFRNQVMKKKTIWLGMSIGWFIQVS

SEQ ID NO: 47104 - protein, 80 aa, Oryza sativa
MQVYIILCSYEICIYGMWDTILFVGYRIVYLRNGSQLCSNLKFTVNFILYEYYVVLRICIGSQCVIIILAKGDICRYTKS

SEQ ID NO: 47105 - protein, 289 aa, Oryza sativa
MPDGCVVIRLPDPRVLRVIARSVLLAVALLSLAWLRDAEAPAGDALQVGLLLRDLRREGLLAPGARAVFLGAADGDCHHHPPALDGDDMRRITPRELLTTGDLSVDFVLDFGYFDKDGDRVGLVDRVLKDGGIFAAPIGSASEFRLPPNYRVVYIRRFTETFVGIKKIARVGGDNGIAGARTGMAATTPALKEGVLAFSAQTADTALAELKNFRRKLLLPHITGASAAHAHQAWLKLRHRPVIAVDFPAMWNVNKLQPAHPLVLQDKAVHGAQQQQLNRSVRLNPSTGY

SEQ ID NO: 47106 - protein, 1116 aa, Oryza sativa
MDETLASLRRPKRGRPPRPREDHLAAEDFEEEGEDEEAEAEALARPQTKRKRAASAAAAAALEDQTLIDIIKHNGRLISHAVKKLVEDYESDPKSVMFQILAMLFEACGARHNFYADYLYEADVDGVVFSLVELAKKGMVEDNYNTKQKDLKNFKENLVSFWDTLVHECQNGPLFDGSLFQKIKDYVVALSCTPPRVYRQVASLVGLQLVTSLISVAKTLSGQRETTQRQLNAEKKKQTDGPIVESLNKKLAHTHKSITYLEELMRKIFSGLFMHRYRDVDPEIRMSCIKSLGIWVVSYPSLFLQDIYLKYLGWTLNDKNAGVRRTSILALQSLYEVDENIPSLGLFTERFYSRMIQLADDVDISVAVSAIGLIKQLLRHQLLSDDDLGPLYDLLIDEPPLIRRAIGELVYDHLIAQNIKTSQSGARDGNNDSSEVHIGRMLQILREFSDDPVLSSYVIDDIWDDMKAMKDWKCIISMLLDENPLTELTDMDGTNLVRMLRASAKKAVGERIVPATDNRKMYYNKGQKEILENSKHEITTALLKKYPQLLRKYISDKAKISPLIDMMMLMKLELYSLKRQDQHFKAAIDLIADAFFKHGDKETLRSCIKAITFCCTNCQADLQNYAENKLKDLEDELVLKVKTAIKEVEAGDDEYSLMVNLKRFYELQLSKPVKNDGLFEDMYRILSHLKDMDNEVKSFLLLNMYLQLAWCLNAIDGENPSEASIDELLSRQSSLFEKLYYYLVVLPTYQKEGRSTTILSCRVCVITAEMWCLFKKPKYSSTRLESLGYLPQLDVVQNFWKLCEQQLNIPDEIEDEDANEEYIEDTNKDVVMIAAAKLVLADTVSKDYLGPELVSHYASHGTSTTEIIKHLITSLRKNADNNMGALFFEALKRGYERYMAHVSDGENQTLIGKSYSECQDLAGRLAGSYVGASRNKNKSEILKIIQDGVSFAFVDLPKQLSFLEAALLPFVSKLPSSDIPDILIDVQKRTQDTNTNEDPSAWRPYFTFVEHLRDKHAKNEVLQEEKEEKPVKRRGRPRKVRDVPARNLFDGHKSSDEESVSDSDQQGHGEDNDDDDADQPLINTFRSSASKLRSLKVSQQGTSGQKGPSRASGSNS

SEQ ID NO: 47107 - protein, 367 aa, Oryza sativa
MIKGCAMQALLEQGAQLHAQVIKTDLIRDSFVGSTLVDMYGKCGLISLSMQLFNEIEYRTDIAWNAVINVFAQHGHGREAIQAFDRMIYSGIRPNHIAFVSLLTACSHAGLVDEGLKYFYSMKEAHGIEPKEEHYSCIIDTYGRAGRLDEAYKFISEMPIKPNAYGWCSLLGACRMRGSKELGEVAAQNLMKLEPGNTGIHVSLSGIYASLGQWEDVKAVRKLMRDSRIKKLPGFSWVDSNKKTHVFGSEDWSHPQQKDIYEKLEELTTRIKEEGYIPDTSFLPCNLEDIAKERILRYHSERIAVAFALISMPATKPIIVKKNLRICIDCHTAFKFICKVERRDIIVRDNSRFHHFVNGRCSCGDYW

SEQ ID NO: 47108 - protein, 94 aa, Oryza sativa
MSAFVSPPPQPHMLYGLPRLHPPSSETAVSCSMPTTTSLQELNNSEGLQRPGYNNSPQAAVTIAQRPPSPSVPPAVSFDKGLLDDIVPPGVRLG

SEQ ID NO: 47109 - protein, 790 aa, Oryza sativa
MAPEAAAAALKPMKATSDGVFQGEDPLEAALPLAIVQICIVVVLTRVLAFFLRPLRQPRVIAEIIGGIMLGPSAIGRNSAFINTVFPKQSLTVLDTLANIGLLFFLFLVGLELDLRAIRRTGAGALAIAVAGISLPFVLGIGTSVVLQNTVNRGVPTGPFLVFMGVALSITAFPVLARILAELKLLTTDLGRMAMSAAAVNDVAAWILLALAIALSGSGSPFVSLWVLLSGVGFVLSSFFFIRPLLSWMARRSPEGEPVKELYICTTLTIVLAAGFITDTIGIHALFGAFIVGIIVPKEGPFAGVLLEKVEDLISGLFLPLYFVSSGLKTNVLTIKGGDSWGLLVLVVATACIGKIGGTVLASLIVRVPLREAVTLGVLMNTKGLVELIVLNIGKDRHVLNDETFAILVLMALINTFITTPLVMAIYKPARRAPPYKNRAVQRPNPDDELRMMVCFHSTRNIPTMINLMESSRGTRRRGITVYAMHLVELSERSSAINMVHKARRNGMPFWNRRRNGDGDQLVVAFETYQQLSHVSIRAMTAISDLHTIHEDVVTSAHQKRAALIVLPFHKLHQMDGHMESLGDEYQHINQRVLHHAPCSVGILVDRGLGGAAQVAASDVSYNIVVLFFGGRDDREALSYATRMVEHPGIALHVIRFVPESGGGGANDKAAADDAFLAEFRGKVAGGNDSIRYEERTSRGKADVVEAIKAMGPTNLFLVGQGSPCAPLMEPSAECPELGPVGSYLAMPDFSTVASVLVMKQYDPTAEHYELVEEVADTAVDIDTPGPRRG

SEQ ID NO: 47110 - protein, 152 aa, Oryza sativa
MPSFDFATEKWSVALQGPLNRILEESNGTLSYHDLANQLMLSGLKGTLCTSHWNDQFYTVDLWFLTDSEKGTWSKDHRINVDAVFHGIGDYLKVQPLLVTDEGKIVLSMQMGSKGVVQIYDPVTDTSSDIIQISIYTGASVFTGSLLCPQSV

SEQ ID NO: 47111 - protein, 794 aa, Oryza sativa
MASEEAARSHLSPRKHRRSPHDDDDAEDGASSPKRHKRGHHRHRHRVSPAAADPAEGEAEDGEILDQATAAVGVGVGRGLDADAGETGSVQGVLPAPEHGDNSDADLNIHVNELHTSQLARNPSQEHDYPAKSDHAAHEAIVEYHSRRSPGSRNHNEAHSKDCLRSCHASRETGFQTDGSRNSVRLDYEHGIDDRHGEPDRYSNRRWETEERGCYKKRKKSGCHIGRHTDICNSEEKHLDERKHGSLVEKKVDLHGLAYHERRSGDGRFDQKASAHHGHGEGREMDRWNSSTRKKDEEWRNRKNDTARNSYKETDRVGSRYGEEKLNDSIDKRDKRGFRGKEMDACWSRAVNGNEGSISYTHANYGMSGIYKDGSSLGGDDTKAKCKRRPEEEKKEPYREEDEENYLENIEDRKQQEKSAHYIDNKEINNDPAATKQRSNNLRAKEDITNDHELSNVFVGAKFYNVRKSPTLPKISISLGTSDNKRATSASGLQEGSSRISHNKRTTSASGLQEGIPMRGKQVILGNVIDGEQPIDRKLGNENSMLAKKNTLHDNWEDEEGYYIYHFGEVLQGRYEITARRGKGVFSTVVHAKDLKAQKDGCREVAIKIICNNIEKYRSGKREISILEKLGTADREDKQHCVRIISSFMHQNHLCLVLESLHMNLREVIKKFGHGTGLKLTAVRAYTKHIFIALKHLRHCGVLHCDIKPDNILVNKDNNLLKLCDFGSAMSAGNNEITPYLVSRFYRAPEIILGLPYDHPLDMWSAGCCLSELKQEKSYLMVQRTMTCFAFTWN

SEQ ID NO: 47112 - protein, 336 aa, Oryza sativa
MAAAAVAANGGGDGAQASNAPAPTRLASVYSEVQTSRLKHALPLPSVLRSPFALADGPASSAAGNPGEIAKLFPNLFGQPSVSLVPSPEPASTRPLKVGVVLSGGQAPGGHNVICGIFDYLQEYAKGSVMYGFKGGPAGVMKCKYVELTADYVYPYRNQGGFDMICSGRDKIETPEQFKQAEDTVNKLDLDGLVVIGGDDSNTNACLLAEYFRGKNMKTRVIGCPKTIDGDLKCKEVPTSFGFDTACKIYSEMIGNVMTDARSTGKYYHFVRLMGRAASHITLECALQTHPNVALIGEEVAAKKETLKSVTDYITDIVCKRAELGYNYGVILIQRV

SEQ ID NO: 47113 - protein, 318 aa, Oryza sativa
MGGAHGVCYGVVGNNLPSRSEVVQLYKSKGISAMRIYYPDQEALAALRGSGIAVIVDVGDKGAVANLANNPSAAADWVRNNVQAYWPSVFIRYIAVGNELGPGDMGTILPAMQNLYNALVSAGLSNSIKVSTAVKMDVITNSFPPSHGVFRPDLQRFIVPIAQFLANTMSPLLVNVYPYFAYRDNPRDIPLNYATFQPGTTVRDNDSGLTYTNLFSAMVDAVYAALEKAGAPGVRVVVSESGWPSAGGFAANVENARNHNQGVIDNVKNGTPKRPGQLETYVFAMFNENQKPGDETERHFGLFNPDKTPVYPITFPPN

SEQ ID NO: 47114 - protein, 885 aa, Oryza sativa
METEVFPVVDLRVLSQSDLEALAAASAHAVAPGGSCPDADQLPPLKIDRAVFNESAGSRKQTFSRVRFGAAAAVAASPSSPSPSAAAKLPRGNDKEDSFIAYHLRRLFAPDDPSSPQIQTLALPAPPSPDPDQLTTNSKGVSVDLVSLSRLADPYDAELGKRTAGMTTEEELMGFISSLAGQWVSQRMRRKLVDASFFGDHLPSGWRLQLGIKRKDRKAWVNCFSYVSPKGQSFATCQEVSAYLMSLLGYPEFKTDNIEYGSTQQHGLCADDGVNVLGVQHQIGTGMDSQSILPVASITFSSHSRDQDETDADDINSYECQQCNLTFHGQSAYAHHLITFHKMGSKRRKINKVGKFGEPVIGKDGKFECPVCNKTFEEQSRYFGHVGSHAKYHGLTPEAFLQTLSGKVGNDSFAGLSCSLQDLVGSPQLNEKTTASEARSQHHNCSTKHGGNSTRGIDLFNSNCPANFNGHNQTWCRPDEIPPTTDAPSTWTYRNNVTNCADRTVPRTAPQPNDHMDCRVSGFAEATNFNDQAGRHQGFRPSSFGTTNHCQGQIIDHAVAASKHAEVNNSMKSRDVNLNSRLNTISFPIATANNETSTALNDVNRSCITGKGFSGSFSNNDGAASIVLPSSGLNNKIPSSLGVADRSSIAARSFNAGYVNENGASEANNIGNKNNTMVYQTSLAMRPVSPCDLQLGFSGQKQQILPGYGELRPAASGSPQLGGMAANSSIPTRPSQPQFGSMARTDALPTGPSQPGSLARPNFVPTGFSQFASRPPTSVPPADSSQFAGGMARQNIPTTSEPTLVLGYTPQMVNGPPAQLGWDLSLSRMVSEGMLPVLCIWCNSQFHHFGPIDAQQSGSFGFICPACKEKMSGNPNAPNNGPWQP

SEQ ID NO: 47115 - protein, 112 aa, Oryza sativa
MRATSPSSDRRRRHPSIYICSASTTHHLSTAPRRTPLRLRVHLNDDDDASSPGGGSAGGGGGIPTVSLLRVGWMLCSCAGSSCTSHVTASRASLYYYCFCFLTFTVSPRTRV

SEQ ID NO: 47116 - protein, 201 aa, Oryza sativa
MAISHLSRRLLSPAAETARLLPKPHPLLFLHPHRHFSAPSQPDGGGGPAPVSPESMKHQEIEGPTVERDTSPLADETRRELDALRAAVQRISGSLALLGGAHLAAGAWIASGAAPVGVGSAAAVQGVVAFAFPFTAALVLRRAIKPIAFFQKMEANGRLQVLTLCLQATKNVNLMLLRTRVVAISCALGVSVGSVATILMR

SEQ ID NO: 47117 - protein, 366 aa, Oryza sativa
MGAASSRLEKALGEQFPEGERYFGLENFGNTCYCNSVLQALYFCVPFREQLLEYYANNKSTGDVEDNMLTCLADLFSQISNQKKKTGVIAPKRFIQRLKKQNEIFRSYMHQDAHEFLNFLLNELVDILEKESKVVAEPCENSSLKKNSNGPINVQLNGTKKEPVPTLVHKCFQGILTNETRCLRCETVTDRDETFFDLSLDIEQNSSITSCLKNFSSTETLNAEDKFFCDKCCSLQEAQKRMKIKKPPNILVIHLKRFKYIEQLGRYKKLSYRVVFPLELKLINTVDNSDLEYSLFAVLVHVGSGPNHGHYISLVKSHNHWLFFDDENVEMTDESMVQTFFGSAQEFSGNTDNGYILFYESLAEKS

SEQ ID NO: 47118 - protein, 83 aa, Oryza sativa
MVLLQYLVDFNFRMMWCSKFFFLFFISGLTFGLHLRLLHGLRLVIIFRIFTFPVTNTYLKSRMSLYFGMVQTLASSEINIHES

SEQ ID NO: 47119 - protein, 346 aa, Oryza sativa
MRQYIAKFFYEQEKDDGSDIIKTFEQWTPGKTKFPKQFERLYSKCLGTKICRGPQEDSIASYQKPSSKQSPRKHLSVKFIGPQNQRMPTYNVGDRIEVLSQDSGIVGCWFRCTVLKSCTNHNKLKVQYDDLQNADDSGRLEEWVPVSTLARPDKLGLRCPERRRVRPRPQQNSLADGTNLLPGAAVDVWQFSGWWEGVLVSADNISADSLQIYFPGENFFSVCQLKNLRISKDWVKSHWVDIEMKPDVLSKIPSVGVQTRQPDNLTSVERPDSRNSAMSDQELAAIQTNSSEDKQTGADQPAEVSLTDMASAFAEDQKQTVLGKRPRDDDAVQHCNGEVGIDVGKL

SEQ ID NO: 47120 - protein, 250 aa, Oryza sativa
MGRGRVELKRIENKINRQVTFSKRRNGLLKKAYELSVLCDAEVALIIFSSRGKLYEFGSAGITKTLERYQHCCYNAQDSNNALSETQSWYHEMSKLKAKFEALQRTQRHLLGEDLGPLSVKELQQLEKQLECALSQARQRKTQLMMEQVEELRRKERQLGEINRQLKHKLEVEGSTSNYRAMQQASWAQGAVVENGAAYVQPPPHSAAMDSEPTLQIGYPHQFVPAEANTIQRSTAPAGAENNFMLGWVL

SEQ ID NO: 47121 - protein, 756 aa, Oryza sativa
MNPLCCIAPVSLDSAVEHHHQPPRILAAAAAAPTSPTPPAAAVAAQVVLDAAQAAVAGVLHKWVNYGKGWRLRWFVLEGGVLSYYKLRVGGGGDSAASPAVAARVIGEGGALRRAREEAAAAGKQWKPFGEIHLKVSSIRASKSDDKRLYIFSGTKTLHLRCETEEDRNAWIQALQAAKDRFPRSLTSNDFSPMSDVLLSTEKLRVRLLQEGLNETVVKECESIMMTELLELHNQMKSQQQQYSILIDRLRQLETEKVELERTVVHETKEREAHGYANGRYSDFYSVLSGGSASESDPDTASQVADVETDEDEVMYFDTRDFLSAESLRSASCRRRELLTNGCNGLEHTDPAANVVKTTQYPSVKRRDKLPEPKEKENPVGLWSIIKENIGKDLSGVCLPVYFNEPLSSLQKCFEDLEYSYLVDHALQWGKQGDSLMRTLHVAAFAVSGYASTEGRQCKPFNPLLGETYEADYPDKGLRFFSEKVSHHPMVVACHCEGRGWKFWGDSNLKGKFWGRSIQLDPIGVLTLQFDDGETFQWSKVTTSIYNIIIGKIYCDHYGTMRIKGSGDYSCKLKFKEQSIIDRNPHQVHGFVQDNRTGQKVAMLIGKWDEAMYYVLGDPSAKPKGYDPMSEAVLLWERDKSLNQTRYNLSPFAISLNELTANLAKKLPPTDSRLRPDQRHLENGEYEMANAEKLRLEQLQRQARRLQEKGWQPRWFSKDDDDSYRYIGGYWEAREKGNWDGIPDIFGQRSASPGWS

SEQ ID NO: 47122 - protein, 214 aa, Oryza sativa
MAAAEKTKPVLYSEWMSSCSYRVRIALNLKGIDYEYRAVTRGDPDYGKINPIKYVPALVDGDFTISDSLAIILYLEDKYPQHPLLPQDLKKKALNMQIANIVCSSIQPLQCYAVIGLADGKMSANESLQIVQHYTDKGFRAIEKLLEGCRSKYATGDEVQLADVFLAPQIHAGITRFQIDMSKYPILTRFYKAYMELPAFQAAVPENQPDAPSS

SEQ ID NO: 47123 - protein, 144 aa, Oryza sativa
MRRGAPPPAPAAEAAGRRRPPRRGEAGGHYGGRRVRWRRRRRMLPRVPRLRAPGDGRRHPGRDHAPRGLQVGRAPDAAAPPRGLLVLLLLAARPRAEGRPDRRQRRLRCRLALHDAGQQGRQPGRHACLGEFLFKGRYNFLWCF

SEQ ID NO: 47124 - protein, 238 aa, Oryza sativa
MEESRADGRNPNQLRPFSCTRNPLDRAHGSARWAQGDTIVLAAVYGPKPGTRKGENPEKASIEVVWKPMTGQIGKQEKEYEMTLKRTLQSICLLTVHPNTTTSVILQVVGNDGSLLPCAINACCAALVFAGIPLKHLAVAIGCGVLEDGEVILDTNKAEEQQLKSFAHLVFPNSRKSASSKEPNQKEEDSERGLITSITHGVMSEEDYFSCIERGLAASSRISDFMRTTLQKQAPGDV

SEQ ID NO: 47125 - protein, 457 aa, Oryza sativa
MATRIPGTVAASGVYYNDQYRMPCKLKGIHCMALNCIPQKAKVRKCMNGYQSTFRFCVNEKNGQTTGQSNGSLIQQGQNFRCHSYGSHNSSETKECSLEDGTDSYRDFEEHSRGASQFSDNQVAAKKKSVKSSQGLAEACKFVYNDAKFVNERAQNDILLLSRGITRLNKRACQDVAVLGSGFLKLDARARKDTKKIDHSVKERAARLTHFARILKEQAQSDLKKAADQHWSDGALEADLRRADSVVRRRAMEDAFMALKFVRDIHDMMANRLQEQFAKDGSSSPANSRSFITLEKNGNTFELFPHEVSTDQITAIEQAYWSMASALSEADGIDYTDPEELELLVATLIDLDAMDGKKSVSLLAECSSSPDVNTRKALANALAAAPSMWILGNAGMGALQRLAQDSNYAVARAATRAINELTKQWELEEGDSLRFVLNQNMVSKETADDSAAADDTR

SEQ ID NO: 47126 - protein, 403 aa, Oryza sativa
MPRRRLPLLLLLPITLTLFLLFPSPPPPRPPPHQPQPQPLPCGAAPSDATAGRWVPTREPLPPPLYTSSCPFHRNAWNCPRNSRPPVAALSWAPARCGGGAVPRIDAAEFLAVARGRRIGLVGDSLSENLVVALLCALRSADGGASKWKRRGAWRGGYFPRDDVIVAYHRAVLLAKYTWQPVENSKELHKDGIKGTYRVDVDIPADEWVNVTRFYDVLIFNTGHWWGLDKFPKETPLVFYRGGKPIEPPLGIYDGLKVVLKSMASYIEREVPSKTLKLWRSQSPRHFYGGEWDHNGSCVSDRLLQEHELDLWFDPRFGGVNKEARLVNSAIQEALIGTDIQLLNLTYMSEFRADAHPAIWLGKKDAVAVWGQDCMHWCLPGVPDTWVDILAARILHHFKQANG

SEQ ID NO: 47127 - protein, 174 aa, Oryza sativa
MTTIRRFCCDDLLRFSSVNLDHLTETFNMSFYMTYMARWPDYFHAAVSPGDRVMGYIMGKVEGQGESWHGHVTAVSVATEFRRQKLAKKLMNLLEEISDKMDKAYFVDLFVRASNMPAIRMYEKLGYVVYRRVLRYYSGEEDGLDMRKALSQDVEKKSIIPLKRPITPDELEYD

SEQ ID NO: 47128 - protein, 271 aa, Oryza sativa
MDHEEIKNVVRKFPAFAYYNVDRKIKPLVALLLELGVPRSNIPGIIKKRPQLCGISLSDNLKPMMTYLENVGINKDKWSKVLSRFPALLTYSRQKVETTVSFLTELGVPKENIGKILTRCPHIMSYSVNDNLRPTAEYFQSIGADAASLIQKSPQAFGLNIEAKLKPITEFFLERDFTMEEIGTMANRFGIIHTLSMEDNLLPKYEYFLTMGYPRNELVKFPQYFGYSLEQRIKPRYARMIDCGVRLILNQLLSVSDSRFEDILRKRMDGI

SEQ ID NO: 47129 - protein, 500 aa, Oryza sativa
MALPLLRLLLLLVLSSVPLSCQLAHSTAADTQNWGQTSVVHLRNAHTRKLLGLLDDISGRTGSLHALLLEESPKQAPPHHHNRHGGHHRAAHTPAPSPAPSPSPFTAPPKSASPAAITIPISPSTPQPKAESNPAVEDAPAQPRHSWRNYGLVTAGSAVFLVMTIASVIYCRAKKVGTVRPWATGLSGQLQRAFVTGVPSLKRSELEAACEDFSNIIGSTSSCMLYKGTLSSGVEIAVLTSSTESGKEWSKECESQYRKKITNLSKVSHKNFMNLLGYCEEENLFTRAMVFEYAPNGTLFEYLHVREAENLDWMARVRISMGIAYCLEHMHQLNPPVVPRNFNSTTIYLTDDFAAKVSDLDFWNDSKGSFNSATSDETVMVEIDSMVHQYGIILLEILTGRVPYSESDGPLEHWASGYFEGKMTLAELIDPSLGSFPEDAARALCDVARWCIEPEPSKRPLMSQVAGRMKEITSLGPEGATPKVSPLWWAELEIMSGQAT

SEQ ID NO: 47130 - protein, 222 aa, Oryza sativa
MAGAALLFPATVIAAACVVLSGGASAAPPGRVFVVGGDGPRGWSQPTGTDETYNHWASRNRFHIGDFLDFKYAKNDSVVVVSRADYKLCSADKPVQRFDDGADVRFRLDRNGNFYFISGAPGHCKAGQRMTVRVMADHAAKGAGGGDSPAGAPSPDGDGDDEDDSGGSYRTPGYGYSSGSPPTPPHGNTSAAAVVSPSRGGGGGGGYHRVAGVAAAALLVLA

SEQ ID NO: 47131 - protein, 399 aa, Oryza sativa
MSRTLLSHILHRPPPLLASRGGGRGGALPSRLRTLRLNCSVAEATASGDEAPAPPARKKRVVSGVQPTGLVHLGNYLGAIKNWVSLQDLYETLFFIVDLHAITLPYEAPQLSKATRSTAAIYLACGIDSSKASIFVQSHVRAHVELMWLLSSSTPIGWLNRMIQFKEKSRKAGDENVGVALLTYPVLMASDILLYQSDLVPVGEDQTQHLELTREIAERVNNLYGGRKWKKMGGRGGSLFKVPEALIPPAGARVMSLTDGLSKMSKSAPSDQSRINLLDPKDVIMNKIKRCKTDSFPGLEFDNPERPECNNLLSIYQIITGKTKEEVIRECENMNWGSFKTTLTDALIDHLQPIQARYEEIMSDPGYLDGVLLEGSGKAAEIADITLNNVYQAMGFLRR

SEQ ID NO: 47132 - protein, 837 aa, Oryza sativa
MGPAAPSAGASGERGATLRRGGGSPVAVRRALTAPPSCVTSPNMMQWFADLGANMERSDMSFSVRTQLDACGECEWASSNGISGLLAKRSNALSPSFWRMISETLKFKRDALRYLEDCENNLDLEQSETLGQFVQSHGYCQFFQEAYLFPICGWMWSCPSQRVLGFSASSVLSFFRKHNLLQLFSRTQPLIVNGRSQSYFNKVREDLESRSCRIKTNCHVKSISSFDRGYRVLEVDGSEEMYDRIIVGIHALDALKLLGAEATHEESRILGAFQYVSSNLYLHCDESFMLCNSSTWSACNITRTRSGSVCVTYWLNLLQNIESTNHFLVTLNPSYVPDHVLLKWNTNHFVPTVAASKASLELDQIQGKRGIWFCGAYQGSGFHEDGFQAGKAAAQSLLGNKIDPLTNPKQMVLSWTETGARLLVLRFLKQYISVGNLILFEEGGTMFSFGEACEKCNKKSVLQVQDPLFYWQVATEADLGLADAYINGCFSFVNKREGLLNLFLILIASRDAHRSSCRNSSRRGWWTPLLFTAGVASAKYFLRHISRKNSVTQTRQNVSQHYDLSNDFFSLFLDKSMTYSSAIFKDEEESLEEAQLRKINLLIHKAKVGQDDEVLEIGSGWGSLAMEVVKQTGCKYTGVTQSVEQLKYAQRRVKEAGLEDRITFLLCDYREIPCHKYDRIICCEMIEEVGHEYMDEFFGCCESLLAENGIFVTQFISIPEERYDEYRRSSDFIKEYIFPGGCLPSLTRITSAMSAASRLCIEHVENIGYHYYTTLIRWRDNFMANKDKILALGFDEKFIRTWEYYFIYCAAGFKSRTLGDYQIVFSRPGNTKMGSGF

SEQ ID NO: 47133 - protein, 801 aa, Oryza sativa
MIRRRAAAVATLRASLRRTRSHAAGDSEDPLKDFGYRPSKVTYNALVQVLSSAGQVDLGFRVQKEMSESGFCMDRFTVGCFAHALCKEGRWADALDMIEREDFKLDTVLCTHMISGLMEASYFDEAMSFLHRMRCNSCIPNVVTYRTLLSGFLKKKQLGWCKRIINMMMTEGCNPNPSLFNSLVHSYCNEKDYAYAYKLLNRMTTCGCPPGYVVYNIFIGSICGQEKLPSPDLLDLAEKIYGEMLAANCVLNKVNVANFARCLCGVGKFDKAFQLIKEMMRKGFVPDTSTYSKVITFLCHATKVEKAFLLFQEMKMVGVTPDVYTYTILIDSFCKAGLIEQAQWLFEEMRSVGCSPTVVTYTALIHAYLKAKQVPQANDIFHRMVDAGCRPNDVTYGALVDGLCKAGNISKAFEVYAKLIGTSDSADSDFYFPCEDRHTLAPNVVTYGALVDGLCKAHKVDHAHELLDAMLSSGCEPNHIVYDALIDGFCKAGKIDSAQEVFLQMTKCGYLPSVHTYTSLIDRMFKDGRLDLAMKVLSQMLKDSCTPNVVTYTAMIDGLCRIGESEKALKLLSLMEEKGCSPNVVTYTALIDGLGKAGKIDLSLDLFTQMSRKGCSPNYVTYRVLINHLCAAGLLDKARLLLGEMKQTYWPKYLQGYRCAIQGFSKSFIASLGILEEMESYGTVPIAPVYGMLIDCFSKAGRLEIAMELHKEMMEVPSSVKTDNDMYASLIQALCLASQVEEAFRLYSEMTRRGFVPELSVFVCLIKGLVEVKKWDEALQLCYGICHEGVNWQGNKSFHGG

SEQ ID NO: 47134 - protein, 311 aa, Oryza sativa; identical to SEQ ID NO: 36921

SEQ ID NO: 47135 - protein, 537 aa, Oryza sativa
MVGGRALLPLLLLSALLVQIRASDPLFYEPFDESFEGRWVLSGKDDYKGVWKHEKSDGHEDYGLLVSEKAKKYAIIKELDEPVTLKDGTVVLQFEVRLQNGLECGGAYLKYIRPQDAAWDAKEFDNETPYTIMFGPDKCGSTNKVHFILKHKNPKTGKYVEHHLKFPPSVPYDKLSHVYTAILKPDNEVRILVDGEEKKKANFLSADDFEPSLIPSKTIPDPDDKKPEDWDERAKIPDPDAVKPDDWDEDAPMEIEDEEATKPEGWLDDEPEEIDDPEANKPEDWDDEEDGEWEAPKIDNPKCEEAPGCGEWKRPMKQNPAYKGKWHAPLIDNPNYKGIWKPQEIPNPEYFELDKPDSDPIAAIGIEIWTMQDGILFDNILIADDEKVATSILEKSWKPKYEVEKEKEKAEEAAAAAGDGLSEFQKKIFDVLYKLADIPFLEPYKTKIIDVIEKGEKQPNITIGILVSIVVVFVTVLFRILFGGKKPAAPVKPVAEVKKPKSTESEAAGSSGGKEDEKEEEEKDGAAAPRRRSRRET

SEQ ID NO: 47136 - protein, 236 aa, Oryza sativa
MASSTSSSLAVATMVAVVLLLGATTQAARLLDELVPGIPMPTIPGVPAVGPTIPAIPTIPGVPAVGPTIPTIPTVPTIPGVPAVGPTIPAIPTIPGVPAVGPTIPTIPTIPTIPGVPAVGSTIPTIPTIPGVPAVGPTIPTIPGVPTIPTVPGVPELPVNPGGVVPTIPKVPLPPVNPGAVVPAVPALPVPPIPGAAGGVVPTLPVPPLPAVPGVPLPEVPGVPLPPVPSVVPPVP

SEQ ID NO: 47137 - protein, 507 aa, Oryza sativa
MASTVLEATRAKHEDMERLERLAVRELQREPANTRDRLYQSHRVRHMLDLVISTSGKLVEIYEDKDNARKDEISNHLSSTVQAEIFPKFYDRLKEIRDYHRRNPSARFVSATDDFEELLKEEPAIEFTGEEAFGRYLDLHELYNEFINSKFGTPMEYSAYVGTFSHVEKMAQNLKTSRQYREYLEHILEYLTSFLYHTEPLQDIEKIFAKLESEFEEQWINGEVPGWESKDPEKESAQESVIDLDYYTTVEELVELGPEKLKEALAARGLKSGGTVQQRAERLFLLKHTPLEQLDRKHFAKGSHSSVSNATSNGNNFKDNLKKEIALMEVKMRRLCELLDEIIVRTKENAEKKLTLTYEEMEAEREEEEVQADSESDDEDQQIYNPLKLPMGWDGKPIPYWLYKLHGLGQEFKCEICGNHSYWGRRAYERHFKEWRHQHGMRCLGIPNTKNFNEITSIQEAKELWEKIQQRQGLNKWRPDLEEEYEDQEGNIYNKKTYTDLQRQGLI

SEQ ID NO: 47138 - protein, 322 aa, Oryza sativa; identical to SEQ ID NO: 31571

SEQ ID NO: 47139 - protein, 222 aa, Oryza sativa
MARGKVQLRRIENPVHRQVTFCKRRAGLLKKARELSILCEADIGIIIFSAHGKLYDLATTGTMEELIERYKSASGEQANACGDQRMDPKQEAMVLKQEINLLQKGLRYIYGNRANEHMTVEELNALERYLEIWMYNIRSAKMQIMIQEIQALKSKEGMLKAANEILQEKIVEQNGLIDVGMMVADQQNGHFSTVPLLEEITNPLTILSGYSTCRGSEMGYSF

SEQ ID NO: 47140 - protein, 978 aa, Oryza sativa
MAAAPPLAAGLRPAMAAAQAPVVAAAWGVGARRGAALSSSARCRALRLSRGGGGGRDGWVPPPVVGRMPPRTLSVRCAASNGRITQQEFTEMAWQSIVSSPEVAKESKHQIVETEHLMKSLLEQRNGLARRIFSKAGVDNTRLLDATEKFIQRQPKVLGEDPGSMLGRDLEALIQRARDFKKEYGDSFVSVEHLVLGFAEDKRFGRQLFKDFQITVQSLKTAIESIRGKQNVIDQDPEGKYEALDKYGKDLTAMARQGKLDPVIGRDDEIRRCIQILSRRTKNNPVLIGEPGVGKTAIAEGLAQRIVQGDVPQALTNRRLIALDMGALIAGAKYRGEFEDRLKAVLKEVTDSDGQTILFIDEIHTVVGAGATNGAMDAGNLLKPMLGRGELRCIGATTLDEYRKYIEKDPALERRFQQVYVDQPSVEDTISILRGLRERYELHHGVRISDSALVAAALLSDRYISGRFLPDKAIDLVDESAAKLKMEITSKPTALDEIDRAVIKLEMERLSLTNDTDKASRDRLSRIEAELSLLKEKQKDLTEQWEREKSVMTKIQSIKEEIDRVNVEIQQAEREYDLNRAAELKYGSLNALQRQLQTTEKELDEYQSSGKSMLREEVTQDDIAEIVSRWTGIPVSKLKQSDREKLLYLEEELHKRVVGQDPAVKAVSEAIQRSRAGLSDPNRPIASFMFMGPTGVGKTELAKALAAFMFNTEEAVVRIDMSEYMEKHSVSRLIGAPPGYVGYEEGGQLTEAVRRRPYSIILFDEIEKAHGDVFNVFLQILDDGRVTDSQGRKVSFTNSIIIMTSNVGSQFILNMDEEGGSTDSAYENIKKRVMDAARSVFRPEFMNRIDEYIVFKPLEREQINSIVKLQLARVQKRIADRKIKLEVSPGAVEFLGSLGYDPNYGARPVKRVIQQYVENELAKGILRGDFKDEDSILVDTQVTVPSNGQLPQQKLVFHKMSEESAPAAAEDEKFLPAV

SEQ ID NO: 47141 - protein, 114 aa, Oryza sativa
MDSSVRWCRWSSPSGMRFCFSVSFLFSFCIFYSSKEATPIYADLATVRRWQPCGRGHPERWPVTGRPGGVEQRWRGGRWQGRHRICGHRWSSRPGAAAASSLLPSSSIAVAGQA

SEQ ID NO: 47142 - protein, 243 aa, Oryza sativa
MSYGSSSSGGRGGRRVEYGRTYVVRPKGRHQATIVWLHGLGDNGASWSQLLDSLPLPNIKWICPTAPTRPVAAFGGFPCTAWFDVEDTSVDGRDDIEGLDASAAHVANLLSSEPSDVKLGIGGFSMGAAAALHSAACYAHGRFTNGVAYPVTLSAVIGLSGWLPCSRTLKSKMDSSQTALRRAGALPILLSHGRADEVVTYRNGEKSADFLRGSGFQYLNFKPYNGYRHTYLIFPIFIFFSEN

SEQ ID NO: 47143 - protein, 372 aa, Oryza sativa
MEEVRGRESKDHRGGGGGGGGDGDGERTGRWRAEEVIAGNRAVLEALRELVMYPVLYAREARVLGLNFPRGLLLHGPSGTGKKSMVRAVVRECNAHLTVIDSISVHKPHAGEGEKFMREAFTEAYSQASQGRPAVIFIDELDDICPPRGSRREQGSRIVGQLLTLMDGKSSKLLPHLVVVASATRVDAIESALRRPGRFDSEIEVTVPTAEERFEILKLYTKNLHLGECVDLQSVAASCNGYVGADLQALCREAARRAYGRLSSSSESENVLTLIMEDWESAKSVAKNSVTRGVTKEIPAVSWDDIGGLKAVKKKLQQAVEWPIKHAASFDRLGISPIRGVLLHGPPGCSKTTLAKGCCSCCPSFFLFIKWC

SEQ ID NO: 47144 - protein, 495 aa, Oryza sativa
MTHLEARGTTTAMGALEEAHLAAAISACECECYEEEEEDDLVEGDGEAAAADAMEPAVRALLLGLGEDARREGLRRTPKRVAKAFRDGTRGYKQKVKDIVQGALFPEVGVDKRTGSAGGTGGQVVVRDIDLFSYCESCLLPFSIQFHVGYVPSGGRVVGLSKLSRVADVFAKRLQNPQRLASEVCGALHASIQPAGVAVALQCWHIPLPENLKCKTLQGWISTSHSSRSGVFEGESSSFWNDFSALLKLRGIDMERDSHSASIAWCPLRSHDVPVCNGHCKKATTNGAISPKSVPAPSNMVSAVSSMLLSLGEDPFRKELVGTPQRYVQWLMKFRACNLDVKLNGFTLNNLSVYQSPAGDAADHRAIHSELHLPFCAQCEHHLLPFYGVVHIGYLDGGDGEVIDRSHFQALVHFYGCKLQVQERMTRQIAEAVYSVSHCGAIVVVEANHICMISRGIEKIRSSTATIAVLGQFLTDPSAKARFLQNVVDTTGLAV

SEQ ID NO: 47145 - protein, 508 aa, Oryza sativa
MGNYYSCGASSTSSPTSPSLVDYYYCYHRYPSSCSSTSTATSSGGRMPIRSHQQRLSSPTAVLGHETPALREVYTVGRKLGQGQFGTTYLCTQVSTGAEYACKSIAKRKLLSPEDVEDVRREIQIMHHLAGHGSVVTIQGAYEDNLYVHIVMELCEGGELFDRIVERGYFSERKAAEITRVIVGVVEACHSLGVMHRDLKPENFLLKESSSSSSLKAIDFGLSVFFKPGQVFSDVVGSPYYVAPEVLCKHYGPEADVWTAGVIVYILLSGVPPFWAETQQGIFDAVLRGSLDFDSDPWPTISDSAKDLIRRMLRSPPRERLTAHQVLCHPWVCDDGVAPDRPLAPAVLSRLKQFSAMNRLKKMALRVIARNLSEEELAGLKEMFKAMDTDASGAITFDELKEGLRRYGSNLREAEIRDLMDAADVDKAAPSTTTSSSPPPSTSTSWSARSTCSPPSPTSTATAAATSPSTSSSTPAGTTTWPTLASTTSSAKSTKTTTAASTTASSSQ

SEQ ID NO: 47146 - protein, 1218 aa, Oryza sativa
MANMNITTILEKMTGKDKDYRYMATSDLLSELNKEGFKADQDIEPKLTTTVLQQLEDASGDVSGLAVKCLAPLVKKVGEDRVVEMTNILCDKLLNGKDQHRDTASIALKTIIVEVTTTSLAEKILVSLAPQLIKGATAGKSAEVKCECLDILGDVLHRFGNLITKDHDSMLTALLSQLSSNQASVRKKSISCIASLAACLSDDLLAKATFEVVQLLKNRSAKSEIARTNIQMIGALSRSVGYRFGPHLAEAVPLLINYCTSASENDEELREYSLQALESFMLRCPRDISPYCEGILNLALEYISYDPNFTDSMEEDTDDEAQDEEDDDESANEYTDDEDASWKVRRASAKCLSAIIVSRPEMLSKMYLEACPKLIERFREREENVKMDIFNTFIELLRQTGNMTKGQGDIDESSPRWLLKQEVPKVVKSINRQLREKSIKTKVGAFSVLKELVVVLPDCLADHIGSLVPGIEKALNDKSSTSNLKIEALVFTRLVMASHSPAVFHPYIQALSGPILSAIGDRYYKVTAEALRVCGELVRVLRPNFEARTLDYRPYIGPIYKAILARLANQDQDQEVKECAISCMSLVVFTFGDGLQRELPACLPILVDRMGNEITRLTAVKAFAVIAKSPLRIDLSCVLDHVISELTAFLRKANRALRQATLGTLNSLVVAYGGQIGSSYETIIAELSTLISDMDLHMTALALELCCTIMVDRKSIQNVGLAVRYKVLPQALILIRSALLQGQALQALQRFFASLVQSANTSFDTLLDSLISTAKPSQSGGLAKQALSSIAQCVAVLCLAAGDQKCASTIEMLKGILKDDSTTNSAKQHMALLCLGEIGRRKDLSNHAQIENIVIESFQSPFEEIKSAASYALGNIAVGNLSKYLPFILNQIDNQQKKQYLLLHSLKEVIARQSVDHTGQSELQDSNIEKILALLFNHCESEEEGVRNVVAECLGKIALIEPRKLIPALKERTSSPAANTRATVAIAIKYSIVERPGKIDEIMYSEISTFLMLIKDSDRHVRRAAVLALSTAAHNKPNLIKGLLPELLPLLYDQTVVKQELIRTVDLGPFKHVVDDGLELRKAAFECVDTLLDSCLDQVNPSSFIVPFLLSGLGDHYDVKMPCHLILSKLADKCPSAVLAVLDSLVDPIEKTINHKPKGDAVKQEVDRNEDMIRSALRAIAALSRISGNDYSMRFKNLMNKIMASPPLADKYNSVRSE

SEQ ID NO: 47147 - protein, 198 aa, Oryza sativa
MAVSSWLPMVRRLVEQPLSSHQPASPFPPPSTPCRCVGRGAPPLHAQPAAASDRILLTRREPSMDQLKELGWAKRWSSQPYVSCRTTSLQELTRLGIKHVENLVIPSVRNDDWGFLVPYLIGSISLIVLAIGSISPGLLQAAIGAFLTVFPDYQDRVARHEAAHFLGIVLSCCTPGVCSFALRKSSFSSAPWLAVVDY

SEQ ID NO: 47148 - protein, 358 aa, Oryza sativa
MAGCLWPCVTGGGAAADGAGSLFRSKARGPVEVVRHARELLAFLAENHDACGDKRDVKREHKMVDLAKSIGEMKSILYGNGEADPVDEACSQLTKEFFKENTNSLHLLVVCLPYMDLETQKDVTQVTANLLRQKVDYRMVASDYLEENQDLLDVLMSGYDNMDIAIHYSAILRDCIRHQVAARYVLESQHMKKFFDYIQYPDFNIASDAFKTFKELLTRHRSSAAEFFSNNYDWFFPEFNSKLLSSSNYIIRRQATQLLGDILLDKSNTTAMVRYVSSKDNLIILMNLLREQSRAIQVEAFRVFKLFTCNPKKPPEIVGILVTNKSKILRFLADFTIEKEDQQFEADKAQVVTEISAM

SEQ ID NO: 47149 - protein, 529 aa, Oryza sativa
MSHRRRRNAAGPPPPEGIGGSSTAEASSTGEERPDLPWAWALGSERRVLALALAFRAANALLVRTYFNPDEHWQCLEVAHRIVFGYGHLTWEWKRGLRSYLHPFIFAALYKILSLLHLDSPWFMAMAPRLLQSVFASFGDLYLYKLSKLIFNNHVAQWALFSQLVNWFMFFCITRTLSNSMETVLTVTGLYYWFVAIESVKGNSVVSKQQAASKQSPPSRKMALLIAALACAIRPTSAITWLYVGLLDFIQMKSKSRFIFLEVVPLGVFVLAVTTFLDCWMYGSRIIVPLNFLKFNLFSSGGDYYGTHVFHWYFSQGFPSMIWTFLPFSISGILKSREWRLAGLIVWVLVVYSILGHKEFRFVLPVLPFMFMFSGHNLAAMAQLKGKGHNEKGRLSRLKLSVILLILTNVPMALYMSLYHQRGTEDAMLYLSREAHDGRVKSVLFLMPCHSTPYYSTLHYNLPMRFLDCTPSENKGTLDESDRFLMNPADFVGEVFGNLSSFSHIVLFESEERHVKLLLRNSFQEVKHC

SEQ ID NO: 47150 - protein, 506 aa, Oryza sativa
MTIDLSMPGSSGLLDDVGGKKHMNFFSNRYVLALTGAAGIGGFLFGYDTGVISGALLYIRDDFPAVRDNYFLQETIVSMALVGAIIGAAGGGWINDTYGRRKSTLVADMLFALGSLVMCAAGGPYILILGRLLVGLGVGIASVTAPVYIAEAAPSEIRGGLVSTNVLMITGGQFFSYLINLGFTEVPGTWRWMLGVAAVPAILQFVLMLFLPESPRWLFWKDEKAKAISVLEKIYDSDRLEEEVELLASSSMHEFQSDGTGSYLDIFKSKELRLAFFAGAGLQAFQQFTGINTVMYYSPTIVQMAGFTSNKLALLLSLIVAGMNAAGTIVGIYLIDRCGRRRLALTSLAGVVVSLAILAMAFILQSSSDICSNALNGACQGALGWFAVAGLALYIAFFSPGMGPVPWAVNSEIYPEAYRGMCGGMSATVNWVSNLIVAQTFLSIVGLVGTGLTFLIIAGIAVLAFIFVALYVPETKGLSFEQVELLWKERAWGNQGNRQSLLGAAP

SEQ ID NO: 47151 - protein, 728 aa, Oryza sativa
MSTQLTEHDHQPEQEPPHSENHLKQAEPNSFQFAEKETGYAGLQNFTGPKVDVGQTSGEQQHVKQMVGQQAPPGAQDARKRGYQPSIPFNMLIPILQAHLDRDKDMQLQTVWAKLRRNEVHKDDFLRVIRNIVGDQMLKQAAHKVFAQMQAQAQRSGQANANQQANANQYSLQSQVSSSGSAQLHDQQVHVSTTPNQGQKNQALSSSQTFVQSGTQVQSSMTAHDNSIQRPDAKGMHVTPNRPPVMNSAISAQTMNKQQQPTQVQQASQQIYGTTNRPDQPYTRPIGGSTPLSSLSSESEIRPSSHPAKMEILPSHPMTQQNAAAQQMQQNKDVKTNASNPRSNAKQDSGTGKGRAVGTGGSSTKSQGKQGPPNFSTPPAAKSNKKTAGQKKSLETSGSTPPPPSKKQKTSGTFQEQSFDQLNDVTAVSGVNLREEEEQLLSAPKEESWASEEARKIAQEEDGKLFLQKGPLLKKLAAIVPKCNLKSIGGDVEHCLSMCVEERLRRFISTLIRVSKQRIDTEKSGHQLVITSDVGRQILRMNQKAKEEWDKKQAEETDKNKKQNEVDGGGTVELDKEKEETRSKNAKPNKEEDDKMRTTAANVAARQAVGGSDMLSKWQLMAEQARQKREGLDLAASSQRGTASRSHMAGKGPTDHHEASKRTHSAAFGTGGMNRQGRGPFAASHPKGPQRTISMKDVICVLEREPQMTKSRLIYRLYERLPGDSTRD

SEQ ID NO: 47152 - protein, 875 aa, Oryza sativa
MEAIEELSELADATRQASALLADDDPSEQPAQRRGGSSFLTVVALGNIGAGKSAVLNGLIGHPVLPTGENGATRAPICVDLQRDASLSSKSIMLQIDSKSQQVSASSLRHSLQDRLTKAGSFGKGRSEEINVKLCTSTAPPLKLIDLPGIDQRSMDESMIGNYAARNDAILLVIVPALQAPDVASSRALRIARELDSEGSRTIGVVSKVDQVAEDQRALLAVQALLVNQGPRTAADIQWIATIGNSVPIASVQSGVGSESSPETIWKVEVESLKSILLGSPQSKLGREALVDSLAKQIRTRIKVRLPNLLNGLQGKSQIIQEELAKLGEQMVQSSEGTRVTALGLCREFEDKFLQHITGVEGGGWKVVASFEGKFPTRIKQLPLDKHFDMKNVKRIVLEADGYQPYLISPEKGLRSLIKGLLELAKEPSILLVDEVHRVLLDIVSATANATPGLGRYPLFKREVIAIGSAALDGFKDEAKKMVIALVDMERAFVPPQHFIRLLQRRMERQRHEDELKSRSTKKVSDAEPSKATSPQTQTKEGSNLQVLGPAGEITAGFLFKKRAKANDWSNRWFVLNERSGKLGYTKKQEERHFRGVINLEECNLEEVLDEEDPTRSLKDPKKPNVPDIGTPGLIFKITHKVAYKNVLKAHKAIILKAESMAEKTEWVTKIRSIVDQKGASATSGLPMKQSHSDGSLMSTSKKDGSLDTMLRKPVDPEEELKWISQEVRGYVEAVLSSLAANVPKAVVLCQVEKAKEGMLNQLYTSISMRSVERIEELIQEDHSVKHRREKIKKQSSLLSKVTRLLRIHDNRSATSNWSNDSAGSDSNPGSSGQSGDEWKSAFDPSQDVDPSAAGTNTGSRRIPSRMPPPPPQGG

SEQ ID NO: 47153 - protein, 210 aa, Oryza sativa
MAAQRRWPTSTLAAVAVAVVVLLAASAATTAEAQSAPAAAPGPAGPVLDQACLTALLNMSDCLTYVQNGSRARRPDKPCCPELAGLVESNPVCLCELLSGAGDSYGIAVDYSRALALPAICRVSTPPVSTCAAFGFNVPMGPTPSPSPAAVSPSGEGPQFPGTSPFASPPSTATPSTNAAAAGRSGDHLVAVGVAIAAAAVVVAGMFRIV

SEQ ID NO: 47154 - protein, 345 aa, Oryza sativa; identical to SEQ ID NO: 40484

SEQ ID NO: 47155 - protein, 527 aa, Oryza sativa
MLPPHPSIQRRSHRLPDSRRCPPRPLPRPSFIPPTAVNGVLEVEERKAQKSYWEEHSKDLTVEAMMLDSRAADLDKEERPEILSLLPPYEGKSVLELGAGIGRFTGELVKTAGHVLAMDFIESVIKKNESINGHHKNASFMCADVTCPDLMIEDNSIDLIFSNWLLMYLSDEEVEKLVKRMVRWLKVGGYIFFRESCFHQSGDSKRKVNPTHYREPRFYTKVFKECQALDQDGNSFELSVLTCKCVGAYVKSKKNQNQICWLWQKVDSTEDRGFQRFLDNVQYKASGILRYERIFGEGFVSTGGIETTKEFVDRLDLKPGQNVLDVGCGIGGGDFYMADKYDVHVVGIDLSINMVSFALERAIGRKCSVEFEVADCTKKTYPDNTFDVIYSRDTILHIQDKPSLFKSFFKWLKPGGKVLISDYCKCPGKPSEEFAAYIKQRGYDFHDVRAYGQMLENAGFHDVIAEDRTDQFLDVLERELAKVEKNKNEFVSDFSQEDYDAIVNGWKAKLQRSSAGEQRWGLFIATK

SEQ ID NO: 47156 - protein, 337 aa, Oryza sativa
MGKIKIGINGFGRIGRLVARVALQSEDVELVAVNDPFITTEYMTYMFKYDTVHGQWKHHEVKVKDSKTLIFGTKEVAVFGCRNPEEIPWAAAGAEYVVESTGVFTDKDKAAAHLKGGAKKVVISAPSKDAPMFVVGVNEKEYKSDVNIVSNASCTTNCLAPLAKVINDRFGIVEGLMTTVHAITATQKTVDGPSMKDWRGGRAASFNIIPSSTGAAKAVGKVLPALNGKLTGMAFRVPTVDVSVVDLTVRLEKPASYDQIKAAIKEEAEGKLKGILGYVEEDLVSTDFQGDSRSSIFDAKAGIALSDTFVKLVSWYDNEWGYSTRVIDLIRHMHSTN

SEQ ID NO: 47157 - protein, 292 aa, Oryza sativa
MLGHLRRSSHRVLIANLAVYSIQSSQIEFIAGWCSNHTTRNFSADTSNRVSNDRGHQSRELKPSLVKDDVAIIERIQNSTKELRQGPVGKNLSSAEKRKFLVNTLLDLEDSKEGVYSTLDAWVAFEQDFPVASIKQALVALEKEEQWHRIVQVIKWMSSKGQGKTIRTYEQLVCALEKDNRADEACRIWEFKIAHDLQSVPWRFCRLMLGIYYRNNKLDRLVKLFKNLEACGRKPPSKDIVRKVEDAYEMLGLVEEKKELLEKYKDLFDKPSSNDKKKGRQFKKVEKNIKPA

SEQ ID NO: 47158 - protein, 249 aa, Oryza sativa
MAIDDESPLRINTTRGGAMGGGGECDGAENQRWPPWLKPLLATSFFGQCKLHADSHKSECNMYCLDCMNGALCSQCLSYHRDHHAIQIRRSSYHDVIRVSEIQKVLDITGVQTYIINSARVVFLNERPQPRPGKGVTNTCEVCERSLLDTFRFCSLGCKIVGTSGDYRGRKRHAGGGIKKTKKLHKGAAAVPSDSDDSSTTTSGGSDKSSVVQSFTPSTPPATANSYRTGKRRKGVPHRSPFGSLMVEF

SEQ ID NO: 47159 - protein, 450 aa, Oryza sativa; identical to SEQ ID NO: 33424

SEQ ID NO: 47160 - protein, 468 aa, Oryza sativa
MPTAASERDGGGRAALGKAAAGLAAAAVVSLTGLAAEPLSPPPPARAESLTVAFPVSKAREVNRVQRTLVEAWGLIRETFVDPTFNHQDWDMRLQQTMVEMFPLKSEDAAYGKISGMLSTLGDPFTKIISPKEYQSFRIGSDGSVQGVGVFINKEPSSGRLLVMDCIEGGPADRAGLHGGDELVEIDGKSVSGLDGEAAAQRLRGRVGTTVKVKVLDGTENERNGRIRQKEVQLSREVINLSPLSTAIISHRSDDGRECKTGYVRLAAFSQTAAAEMESAIKKMEDEGVQSYILDLRNNPGGLVKAGLDVAQMWLDGNETLVNTVDREGNVLPINMARGHSLTHDPLVVLVNEGSASASEILAGALHDNGRAILVGHRTFGKGKIQSVTELDDGSALFITVAKYLSPALHEIDQVGIQPDIQCTPEMLSLPRAPSLKEDDKATNLEMDSCIMVAEQALEIEKSKGSAS

SEQ ID NO: 47161 - protein, 162 aa, Oryza sativa
MESTLITITRSPILPCPFSRRPASPARCFAGARRSRCAAASASFFSPAGGRGGGDAGAGSSLSSAAAAAALGEAAAAGGGGSDSEAILLSVQGMMCDGCAASVKRILESQPEVTSATVDFKEAKAVVLTTAEVKAAEDWQKQCGEKLANHLGTCGFESRLQE

SEQ ID NO: 47162 - protein, 598 aa, Oryza sativa
MLLPTSASACRGSGRALLLALAAALLALATPRPASASESDHKYKVEEPVKLWVNKVGPYNNPQETYNYHSLPFCQPSENPAHKWGGLGEVLGGNELIDSQIDIKFLRNEERGSICTLELDSKKVQQFSDAIDNSYWFEFFMDDLPLWGFVGETDKNNENKRYLYTHKSILVKYNDNRIIHVNLTQESPKLLEAGKKLDMTYSVKWLQTDVTFARRFEVYLDYPFFEHQIHWFSIFNSFMMVIFLTGLVSMILMRTLRNDYAKYAREDDDLESLERDVNEESGWKLVHGDVFRPPRSLAFLSAVVGIGTQLAALILLVIVLAIVGMLYVGRGSIITTFIVCYALTSFISGYVSGGLYSRNGGKNWIKAMILTASLFPFLCFAIGFVLNTIAIFYRSLAAIPFGTMVVMFVLWAFISFPLVLLGTVVGRNWSGAPNNPCRVKTIPRPIPEKKWYLTPSVISLMGGLLPFGSIFIEMYFVFTSFWNYKVYYVYGFMLLVFVILLIVTICVTIVGTYFLLNAENYHWQWTSFLSAASTALYVYLYSIYYYHVKTKMSGFFQTSFYFGYTLMFCLGLGILCGAIGYLGSTLFVRRIYRNIKCD

SEQ ID NO: 47163 - protein, 90 aa, Oryza sativa
MRARDLLRSPLRWPSHDSGWRREEETLAAGRRLPPHLRSALSPLEVRPPPPPSHAASPLRSLPGGYESIPARGDQVGTRKQWQMVLGLQW

SEQ ID NO: 47164 - protein, 253 aa, Oryza sativa; identical to SEQ ID NO: 29251

SEQ ID NO: 47165 - protein, 211 aa, Oryza sativa
MASRLLARSKALALALSRADAAAPGPAAGVQWLRTLSSLPRDPAAAASPAPAPRQPAVGSPLGLSKIPGYEQTSRLSGTQVLPRWFSTGTSNGSSAQQEGATRKVMALSPLEASIAKPRKGPLTSESWKVKQTELLTRSTYYMIPTLLLVSKNSISTSLLVASVFHQVYMFYKEILLDYVHHDITRKWVFIYFKILLIIMAKETVVYFDLF

SEQ ID NO: 47166 - protein, 327 aa, Oryza sativa; identical to SEQ ID NO: 37038

SEQ ID NO: 47167 - protein, 425 aa, Oryza sativa
MASVLAVPLLLCLLASASAARFAPADNHLLACGATAPAVLPDGRRFVPDSGCASTRLRSPAPTLHFYPFEPALASARFHVGAAGFLLLHNFSASAPVVKEFILHVHSDVLVLTFVPESGSNAFVNAIELVSAPDELVGDIGTLVTSSGTDQTNGLSSQVYEMLYRINVAGRKVTPFNDTLWRTWVNDERFLVSTESSNSGVWSFGGRIAYPKGSRLMTREVAPDNVYNSARSVSSQGKVTWGFPVPASSRYLVRMHFCDIVSKALNELYFDIYVNGQLAVKDFDISGATGFLAYPYYIDFVVDVEDEGALKLAIGGSKNSRSDEVSGILNAVEIMRMNKTNGGIDGDFAVSLGMEYVASKGIGEFTRSLLCGFIFAGLLLVLLMLVGRLRTELRNNGTTWSWQPNDSGDGKLARAYQLVSAKTDY

SEQ ID NO: 47168 - protein, 286 aa, Oryza sativa
MATTPLLTSDISEFMEGILYHFPKAITEENRPVDFYHLLHLCRMYLKPGHKVEDKQHHGHAGKSHYFDYISDFGQKVFCVGQEQNMLYELSKLNSPEHVYRWRRAVDYHEAGIEFKKRDFHEEDPHSLLDIRFRKGVMEIPCLPIDDKSSLLFRNLVALEQTCPQVSDDITAYIVLMSEFVSTAADVALLAQKGIIVHQMESDEEVSTLFTKLFEYVAFDFRGEHYLKSLYCAMEAHYQSRLNRWNAWLWHNHFSNPWLGFAAITSAFIVLCSILQTVLAFLSYTA

SEQ ID NO: 47169 - protein, 278 aa, Oryza sativa
MAGEKDERPVVKDPNPNLFFASQVIPNACATQAILSILMNRPEIDIGPELSNLKEFTGAFAPDMKGLAINNSDSIRTAHNSFARPEPFVSDEQRAAGKDDEVYHFISYLPFEGVLYELDGLKEGPISLGQCSGGPDDLDWLRMVQPVIQKRIERYSQSEIRFNLMAIIKNRKDVYTAELKELEKRRDQLLQEMNESSAAESLNSELAEVTSAIETVSEKIIMEEEKFKKWRTENIRRKHNYIPFLFNFLKMLAEKKQLKPLVEKAKQQKASSTSTSAR

SEQ ID NO: 47170 - protein, 474 aa, Oryza sativa
MGDIVRQILGWFPGHPASGNGATLSAAEGYGSEDRVSALPDDLLRNIVARLPVKDAARTAALASRWRRVWSSTPLVLRDADLLFSAGEAAGVAAVGRALAGHPGPFRVVHIEHCMFAFHRPELAEWARLVAAKGVEDLVFVNIPVHYFDVPLPADILRCAALRRLFIGNWNFPATSGFPRGADVFPHLLELYIWNTVMSARDLNHLLACSPVLQSLALALNSHPNRVRLCSQSLQCVLLFLSKAEEVAVVDAPLLQRLVLWKISTSYDTDDELPVKIRLACAPELQVLGYLEPRAHQLQIGETIIKADTKVIPSSMVPSIKVLALRVNFCVQEEIAMLVSFLRCFPNVETLHIESDIDDEFTGQPHAKFWQEVCPVECINSHVKKIVFHDFHGDKCELEFIDFIARTAQELQALLLMLTSKTYGPVVDVDEVNSQLGVLSFASEECITSLLGPKVQMVHIFHRSLDLSVDDPFL

SEQ ID NO: 47171 - protein, 65 aa, Oryza sativa; identical to SEQ ID NO: 44573

SEQ ID NO: 47172 - protein, 48 aa, Oryza sativa
MARTRASKTCRGSSRSCSSGRRRRRRRRRRRSGRRYVTVVSYTTDSSD

SEQ ID NO: 47173 - protein, 448 aa, Oryza sativa
MVMPMPTEGSEPLLPRKQRDGGDDGAASSHDHFDGASFSGAVFNLSTTIVGAGIMALPATMKVLGLVPGLILVMLAAVLTDASIELLVRFSRAVGATSYGEAMGDAFGAFGRGLLQLCVVVNNVGVMVVYMIIIGDVLSGKSSSGGVHHHGVIEGWFGPNRWNGRFSILVIVTLGVFTPLTCFKRVDSLKYTSALSVALAVVFVVITAGITTIKLMRGQIPMPKLFPDVHDWSSTWRLFTAAPVLVTAYICHYNVHPIHNELKDHSQIRPIVRASLLLCLAVYTTTSFFGFLLFGEATLDDVLANFDSDLGIPYSLVLDDAVRVSYVLHLMLVFPIVFHALRFNMDGLLFPSARPLSSDNRRFGAITAALLTVIFLAANFVPNIWDAFQFTGATAAVAIAYIFPAGMALRDRHGIATKGDKYLAVFMIVLALVANGVAVYSDACLGTF

SEQ ID NO: 47174 - protein, 891 aa, Oryza sativa
MGRRSKQKVEDMAEELCFVCKDGGDIRVCDFKNCLKGYHPHCVGKEESFLDSAEQFICELHKCVSCKRNSEYHCLCCPSSSVCGECLGKVEFAQFRKQSQTKGLCNNCLKLALFVEKNSEANSDGETVEFRYTENYLVLFKDYWETIKDNEGLALIDLQQANICLRTSLSCKQGRDSEKPPDEDYRADKNSLSVNDGAEQPFPVDVKVQPSEAKMSLKRKKSNKKTYVGWGSKELIEFLSCIGKDTTKPLDEFILTGVVKEYIQQKNLFKDRKRKSVICDDKLHSLFRKRKVKSNMILNLLEIHLAANAASEDDFLDDSEDDEGRIMRKRPCNTLKAAETSERDPKRNKKCFAALNHNNLKLIYLRRTLIMNLMGQDTFEQKVVGSLVRVKNDDNHYSYQMPKKHYQLGLVTGIRKSPQEYKIKDKRTDILLCVSNLWDDIKISMLSEEDIEEDECNDLLLLAKKGLFKRPTVADLEEKAASIHVDIVNHWIDRELMRLEKEIERAHEKGWRQELHELFNKKRLLSTQDERQRRLAEVPEAIPDTEESKRDEFGVAASNHLEENKGATGHVPNSVKVLMEDSRGATGHIADSVKVLMEGLPGGATARVADVFNVDMAKSQDASGQVTDYLEVVEEETPEDASGQVADILDVVEEEPPEDASGQVADILELVEEETSEDASGQVASILEVVEEETPEAPGKDLCNGGIPGSGLQNKMHNAQDGGTAQGSDMCNGGNTSRRLNDRKSVIVIDSDSDEDEDPHPEQHEPERAAPRAAMDVVMAPTHGAPVAMNGTSAPTLPCAKRGKNGTTAPKGRVPIAALHALQSMNAPGEHEYIWNYADPQGKVQGPFTMEHMRNWHRNRFFPPDFRVWRLGQTQNDSVLLTEAMGLKFSS

SEQ ID NO: 47175 - protein, 142 aa, Oryza sativa
MQLPPLRPGLRHAAARRVLHLLLRHRHRRLAHRHPRVRPRARRRRLVAHGVTSPHHKQHAASPAHPVQPTPSSRRRHIVVVRYPAGHSPPPHPAKPAPPSPAVIIPPPPHHRRARSRQPLAVAATRRSSSPTALVHLTPNPY

SEQ ID NO: 47176 - protein, 344 aa, Oryza sativa
MKQTGVSLRYMMEFGSRPTERNLLLSAQFLQKELPIRIARRALELESLPFGLSRKPAILKVRDWYLDSFRDIRYFPEVRNRNDELAFTQMIKMIKVRHNNVVPTMALGVQQLKNEQYRTRKIPTAFDEIHEFLDRFYMSRIGIRMLIGQHVALHDPDPEPGVIGLINTELSPIQVAQAASEDARSICLREYGSAPEIDIYGDPTFTFPYVSSHLHLMLFELVKNSLRAVQERYMNSDKDVPPVRIIVADGAEDVTIKVSDEGGGIPRSGLPRIFTYLYSTAKNPPDMDCPSEGVTMAGYGYGLPISRLYARYFGGDLQIISMEGYGTDAYLHLSRLGDSEEPLP

SEQ ID NO: 47177 - protein, 364 aa, Oryza sativa
MEGGRLGGAAASASAAAAADARGGMSGFAAPQHAIHTNLNNVQPTQVTDFGALAQSAGFRIEDLANLSTNGLFNLKSNAHTIINDPLQFENYVKSISPSNITTTATVTVVDPQTLVPQKGAQLNLVTIRTGNVENWGESTIADTSPRTDTSTDPDTDERNQMFEQGQLAAPTASDSSDRSKDKLDHKTLRRLAQNREAARKSRLRKKAYIQNLESSRLKLTQIEQELQRARQQGIFISTSSDQSHSASGNGALAFDMEYARWLEEHNKHINELRAAVNAHAGDNDLKSTVDSIMAHYNEIFKLKGVAAKADVFHVLSGMWKTPAERCFMWLGGFRSSELLKVRIYYYYIAPTYFEASPGGKMLT

SEQ ID NO: 47178 - protein, 582 aa, Oryza sativa
MAAAAEVDAAPDLPNGSSATATTDKKKSRESERRRRRRKQKKNKAASNAADADAAGDAGADDDAAEEKPDVKPQVEVEVEYVPEQADLDDGLLADFKSIFDKFTFKDSSADAEDDEKKDEAGTDAAKKAAGSDSDDDEQGTQQKKEGGLSNKQKKLQRRMKIAELKQICNRPDVVEVWDATASDPSLLVYLKSYRNTVPVPRHWCQKRKFLQGKRGIEKQPFQLPDFIAATGIEKIRQAYIEKEDSKKLKQKQRERMQPKMGKMDIDYQVLHDAFFKYQTKPKLTSHGDLYYEGKEFEVKLREMKPGMLSRELKEALGMPDGAPPPWLINMQRYGPPPSYPQLKIPGLNAPIPPGASFGYRPGEWGKPPVDEHGRPLYGDVFGVLQQDEPNYDEEPVDRSKHWGDLEEEEEEEEEEEEEEEEEPMEDEDMEDGMQSVDTISSTPTGVETPDVIDLRKLQRKEPEKQTEKQLYQILEQKEERIAPGAIYGSSHTYAIGAQDKAGPKRVDLLKNQKSDKVDVTIQPEGLEVMDDVLAAKYEEAREEEKLRNQKEDFSDMVAENASKRKRKQEKDGKSKKKDFKF

SEQ ID NO: 47179 - protein, 300 aa, Oryza sativa
MGKEKTHINIVVIGHVDSGKSTTTGHLIYKCGGIDKRTIEKFEKEAQEMGKGSFKYAWVLDKLKAERERGITIDIALWKFETAKYYVTIIDAPGHRDFIKNMITGTSQADCAVLIVAAGTGEFEAGISKNGQTREHALLAFTLGVKQLIVGVNKMDSTEPPFSEARFEEIKKEVSSYIKKIGYNPAAVAFVPISGWHGDNMLEPSDKMPWFKGWNVERKEGKAEGKCLIEALDAILPPSRPTDKPLRLPLQDVYKIGGIGTVPVGRVETGVLKPGTVVTFAPANITTEVKSVEMHHEALS

SEQ ID NO: 47180 - protein, 889 aa, Oryza sativa
MLSQPRRFHDDEYSTARDYRRNKRIGSRDRAEFHGDFEDRYRSSHQSREDSREDSYERDRDYDRYSYDSDYEKSRRDGSWRRRDLCESEHERRGLSHERDRSPYMQHSRSRSRGRDERSRSRSRSRSPRGKSRGRNQRDGFYDDNSFGRRREYDWDERRHGDLVAPSATVVVKGLSQKTNEDDLNQILAEWGPLRSVRVIKERSSGMSRGFAFIDFPTVEAARRMMEGVGDNGLLIDGRKVFFQYSSKPTSGMSGPSHGEENFTRYNYGHRTAAAPCDWICTICGCMNFARRTSCFQCNEPRTEDSLPADPTSSTPLHPKRGSELGPTHVLVVRGLDENADEEMLRYEFAKHAPIKDIRLVRDKFTHVSRGFAFIHFHSVEEATKALEATNGITLEKNGQVLRVTYAKSTHGPVSGASQSNSLAAAAIEAASFSQQYDAIGWAPKEYNPDDKLNSNSEPQSSGSAPQSGFVWDEKSGYYYDSASGFYYDGNTGLYYDGNAGVWYSYDQQTQQYVPCSEQNSSKAAGDMANTSTKTSESSGKNVVISAPAATIKQSEKTSLPEAVQAAASAALAAEKKEKERAKEIKLASKGSLLANKKKVNNVLAMWKQRNQEGQAGRAILDDKEPSNSADDKLNNLHNSTGFAVKAKPKSDVGNAKDMNSPASYNSLGRTAAPTEMIDSDIKPTPVSNSLGTTIMGVIRGSGRGIVRSDTAFHAPSDAGGADSFSNIPTSTCGLTANAGAPTSAPFKTELSALASYTPSGVSGSGKRRFSEAPGHSQYRDRAAERRNLYGSSSSLGSDNDGLDPTGEYPRRGPSEMGSMPFPPGVGERSSGEIGNTENYEVITADRAIDESNVGNRILRNMGWQEGLVRSITNFVYYSLMAFLAAACI

SEQ ID NO: 47181 - protein, 258 aa, Oryza sativa; identical to SEQ ID NO: 30725

SEQ ID NO: 47182 - protein, 43 aa, Oryza sativa
MIYTVVFVSIDYSKLQILAIAKYSRGNHHTFAKTTAANQNTRI

SEQ ID NO: 47183 - protein, 670 aa, Oryza sativa
MERVEDPDLEDPNPDVGELFSHYDGLYFRGALAGAGFSVQWSSPPSRMAGSFGSCTFGKPDNTITLSETVLKYRSSIDMKNALLHQMIHAILFVKHHRKDCRGHGPIFRAWMTAINTCSIDDHQRPPDGYNITTRHDFSPDKSTRSLSGFLWKCEYCGNTLVRATNIGAPSDACCIENVDNCSTCGNMLCHWHNHKMNCGGTYTKMGTSTSAEVQNNVQGTKRCPTDMKMAKSQRTIRKPESPDSDGLQEKATVMKQKAEGELLALVAGSNLKLTGSNSSKKGVKRHRPEDTQDTNAMLSTPLKNLKLGLDLVSSGKHRVSSIVGSNNTKSSRGSASRKQRKRHSPENVQKSSVLPALSQKKLKLKEDLVVSGKNEPLSLVNFSNGKSAGSNSSKKVSKQHELEGVQKSCVQPASPPRKPRQDLVASVKTEISCLASRSDAKVLRGSSSKCAGNQHEPADIQKSIALPSASESKLKRQNEISSSTKAGMQDKPRGTQKTIDLPASPQTKLKQSVLQKQKRQCGTRKSANEQFAVISAWLNYYESEGSSGSTEPLVNKRTERRRIARNRITYTRSRKQNARGNASIKSQPSEDDSSQAKAAAPCLEIVVSTPSEQVVNQSPGCQSQSPAPYLAIVPFDAAHDMVPLQSADPPGLTDDPTITSGIIDISDDD

SEQ ID NO: 47184 - protein, 223 aa, Oryza sativa
MAPQKRTTLVYSFVARGAVVLADHAEVSGNFASVAAQCLQKLPSTNNRHSYNCDGHTFNYHVHDGFTYCVVATESAGRQLPVGFIERVKEDFSKKYSGGKAKNATANSLKREYGPKLKEHMKYCDAHPEEIDKLAKVKAQVTEVKGVMMQNIEKVLDRGEKIELLVDKTEDLRSQAQDFRKAGTKIRRKMWWENMKMKLIVFGIVVALILVIILTVCRDLNCW

SEQ ID NO: 47185 - protein, 143 aa, Oryza sativa; identical to SEQ ID NO: 45615

SEQ ID NO: 47186 - protein, 149 aa, Oryza sativa
MYVPCPICATDKTDELSSLPPPPTMASARAGVRTLSIFSKESARRRVQPSMASPTTAESQAGQPAATCSPRALLAKLPPSPRPTASAAADRDDHACLSLLACFGGFFSSSSSAAFLATAGGFSGATGGGLGCWGWSREGAEGRPRTQLM

SEQ ID NO: 47187 - protein, 199 aa, Oryza sativa
MGDAGGPLPGERRLSPADPEEPSPPASSSDGTGSGGGGGENSVEEGDGEGPGSGSGTPTAKRQLFDADGSASRPTRRRRIASDDEITQAFTGETTSENTSSTNESNPFIAVLDSMWSKKRELDAIKEAGKDERHEKLLSLQKERLALERQKLEYERNLLEFKRNQRDERIMNMDLSDMTGQLREYYLRLQGEIMARRSG

SEQ ID NO: 47188 - protein, 608 aa, Oryza sativa
MAYRAMLQSAAESAIQSIGLGYDIAHDIRLKYCKQRSSPDPLLIELDHDEVQDIVLPGGLTVAGVSKSIKCDKGERTRFRSDVLSFQQMSEQFNQELSLSGKIPSGLFNTMFEFTGCWQKDAANTKSLAFDGWCITLYTVALSKAQIVLRDHVKQAVPSTWEPAALARFIRKFGTHVVVGIKMGGKDIIYLKQQHSSTLQAVDVQKRLKEMSDRRFLDANGQSDFSFKDSYGKDKIDTREHRLRFVDSSPLNSYSSKEDLVMMPKRRGGRDKDILSHSEWLNTVQAEPDVISMSFIPITSLLNGVPGCGFLNHAINLYLRYKPQIEELHQFLEFQLPRQWAPVYSDLPLGPQRKRQSTVSLPVNLIGPKLYVCTNMVDVGKRPVTGIRLFLEGKRSNKLAIHLQHLCSLPQILQLEDDPYNDQTPEAYDRKYYEPIGSWKRFSHVCTAPVESDDSSIVTGAQLEVVSHGFKKILFLRLHFSKVCNATSVRNPEWEGSPNLAQKSGLISTLISTHFSTAAQKPAPRPADVNINSAVYPGGPPVPVQTPKLLKFVDPTEMMRGPQDLPGYWVVSGAKLQLERGKISLRVKYSLLTAMLPDDDEFAFDEEF

SEQ ID NO: 47189 - protein, 217 aa, Oryza sativa
MAQAMASMTGLSQGVQLPAGPRRAGGRSRLAVVRADAAAADVQTGRRAVLGLVATGIAGGALAQAALAEAAKPIKLGPPPPPSGGLPGTLNSDQARDTDLPLRERFYLQPLPPAEAAARAKESAQDIINLKPLIEKKQWPFVRDDLRLRASYLRYDLKTVINSKPKDEKKGLKDLTGKLFATIDGLDHAAKIKSPEEAEKYYTLTKSALGDVLAKLG

SEQ ID NO: 47190 - protein, 1426 aa, Oryza sativa
MSYTPPGRRGGGGGGGSGNGRGGASGSGGGNGADGALLPLVSQGRDTSHTARLPVLSRTNYPDWALLMRVNLQAQGLWTAIDPGYAEFREDRAALSAILQAVPREMLRGLAKHDTAKAAWDAIKTMRVGVDRVREAKEKGFRRQFESMRFKERETPEEFAMRLTAVVADIRDMGGVMEDEHVNKKLLRVVPKKYKPVAISLEQLLDVKTMALEELVGRLSTVDSYSDDEEGSDGGKLYLTEEQWQARVKQREQEGSGNSGNKGRGAPGTQNHRGKPGGSPKGKEAATGANSSRDISRVKCFNCDEFGHYARQCRKPRRQRRGEANLVQAAEEEPTLLMAHVVGVSLAGEATLGRTPGGQEVHLTEKKVILDHEDGGEEEVTRDWFLDTGATNHMTGVRSAFAELDTGVVGTVKFGDGSVIEIQGRGTVVFRCKNSDHRSLDTVYYIPKLRKNIISVGRLDARGYDAHIWGGVCTLRDPDGLLLAKVKRDINYLYILKLHIANPVCMAASGGDMAWRWHARFGHLNFQSLRRLAQGNMVRGLPIIDHTDQLCDGCLAGKQRRLPFPEEAKFRAQEALELVHGDLCGPITPATPGGRKYFLLLVDDMSRHMWIRLLSGKHEAATAIKQFQVGVELESGRKLRALRTDRGGEFTSVEFMDYCADHGMRRELTAPYSPQQNGVVERRNQTVVAAARSMLKAAGMPACFWGEAVVAAVYVLNRSPTKALNGVTPHEAWHGRRPSVEHLRVFGCVGYVKTVKPNLRKLDDRGTRMVFIGYEQGSKAYRMYDPVARRVCVSRDVVFDEAATWAWRDPETEATEEEEFTVDFFVNPVDSVVADLGEQASTPVQGGTYTASTATPPSPPEVPAGVEFCSPPNSVTPGTNEGPIRYRRVQDILSATEPVLDFDYSDQCLLASEEPMSLAEAEQQLCWRQAMQEELKSIEDNQTWSFAELPVGHKAIGLKWVYKVKKDPSGVVVKHKARLVAKGYVQQQGIDFEEVFAPVARMETVRLLIAVAANKGWEIHHMDVKSAFLNGDLEEEVYVVQPPGFIEKGKEGQVLRLKKALYGLKQAPRAWNAKLHNTLISLNFIKSETESAVYVRGTGSSRLIVGVYVDDLIISGAQASEIDFFKEEMKKKFRMSDLGLLSYYLGMEVVQKDDGVFLSQTAYAAKILEKTGMEGCNSTQVPMEARLKLKRESGGEGVDSTMYRSTVGSLRYLVNTRPDLAYSVGYVSRFMEKPTSEHWAAVKHILRYIAGTLDVGCWFGRREKGELRLIGFSDSDMAGDLDDRKSTTGVLYMLGDSLISWQSQKQKVVALSSCEAEYIAATTGACQGIWLNRLLAELLGEDPGQTVMKVDNKSAINLCKNPVLHDRSKHIDTRFHFIRECVEKKQIAVEYVRTEDQLADILTKPVGRVRFLELRKKMGLEQAHQD

SEQ ID NO: 47191 - protein, 473 aa, Oryza sativa
MDMAAAAAEVSTPPSLVKMTEKALDEMPQWSWQSVVDAVRQCQRLLPTADATGVFDRVVGALVSHVAVSPGDATPTSSSPESSAFRFSCDTKSSCLSARCTSRTWWFEDLAVVLGPGMVERVAGALLARGTDHGVVSRFLFYYLKCRVAGAATADDKRAMLEAAIAAMSGLDRSSVSCRGLFGILRISSPLKLPTSCHDSLVAMIGAKLDHATLDNLLVPAPPGTTSSLYDVTLVLRFLDAFLHHAAATGARGETPRLKKVGKLVDLYLAEVAPDPSLRPAMFVELATALPAAARDCHDALYRAIDVYFQVHTRLTEEEKMRICKGINYEKLSPECCKHLARNAGFPTRAAVQALASQHTVLKSLLRGGGPDEHLRPVSAAKHRAGGEDHDDLVAAGGQVVLYAGRLDLSLESQNLRSLLDGMHWRVMELEKVCSRMKTQMSKMKAARRATGGGGGAAAGRRAASRSLPRMCS

SEQ ID NO: 47192 - protein, 669 aa, Oryza sativa
MRRRTKEREKKHRRKERLKEKERDKGKEILGLKSSDDNSCSTLRNSTSTNDESTNTPDSRDSASEEEDNSTVVDLCSPDTFVDQTACREISVQNNMDYCNTLTEFARTNSSDLFTSGQSKSSRWNLRLRKDFPQDQSSCCYDECGDENGSIGDFQWQSKERTRHSARSCNSVFTTNNRTRDRHNYISFSCDPRDDYVINDSCSSSSTGSGRETKMARKTGVERPRVQYRRCYPLDNFIVSKESRTGNTQQKNGAPKQVWEPMDSQKKNLLDNKNNGSGAVCNVDPTKLVEQDSSECPNFDAGHEPLSQSSERSRDICKSETDQPCENNEKNQATSCGGTIMVDKQDCYSTKDEGSGHDEELMMNSTSSDGLSSCTSEADRESSTSSVTSLSAQHQESSSSDSEESPERVNSIEEAPSTKTVSRSLLEACAGKGFREYQPKAMHRPHNDRLGFNIPPFQDQLLHHQSMHVPTHSSATMGLHNHPWAAPASGYMQYAQPSHFYSNPLGFGVPGKQSPDFPVQYSNVHHFPAPAFSYAPPEPIRKTTPSFRVMHTSPPYRNGLHQSQTVGHPHGDPTLERHPSQPKPLDLKDAPGENKSSPEGNASFSLFQFNLPIAPPAPPSSKDDTSGESATRTPLAQVQVQPCSREQTDVKEYNLFCSKNGSMFSFISR

SEQ ID NO: 47193 - protein, 1077 aa, Oryza sativa
MTSTMLMDSTLDTDGTAFICPECSFNGTSLPELISHLNETHGEETATKSVSPPKNPAVLSNEKRSRRKPAFSHQIISQPQRQSMPVFKQSNVDPGSIHFWNRVISADENDRKFSESTKIRDENVTHPKISPQRLIAPKIIHTPPTAVDTSPSFCSPSFQPIQKNFQCRVCHLTYKNFHDCTAHIRRKHEISHAQAGRYVGKLDTDVPLPPSATGHYKIRLKVKSLPPQAPTTATPIENFTNVYQCKCCPYTASWLKDVSQHERQNHGKYSSFVHEDTPHTNKHNNKDHNDLSTLLIDNVEPYNDTLPNSNDEIIMIEEDIDDDEEDALWKYQQELNNLTESPTNHNNTTYHQQNHPNASFLAKPFKKFQCPHCEHSSPKLAKLKLHIATHTNIKPYMCSICGWRANLRWYIQCHAKKRHPNQNFEVLQLSNEEAEQTINAYMRENGLQTKVHNRFDSKHHYQCSLCQFRSNHPRFIEQHIETNHSHMMEQNNNHSNLTPVDLNSQYSSKTVYPNFSSHPNFNPNRLYYCSLCYRGYRWRYDVKRHHKTMHETADDEVTKGRNFHYLEYVPQIDSLITATMSSIHNPMKHENEVEDNDGDLKLSIADARTVDVTDEEAALLMIEPEKSEMNQIVIDDHPEDAVIVFEDDRTDKSTSEIARLSSRPTYKPFRCPYCFYRTNWRTDCMRHMRARHKVEPNQNGYYEMSPDEAERTYDEYERTFGFVVAKKVLARFTDFRQVSWEDLKRSIWEKIKDKSDFEQCIYDRLRPDDYALAPVIQTPSVQPIVITIPNKIPLVKQKRVFTCMDCAFSSHRIYELERHVCSRIQKFQQEKSHGQVVISLYECTKGSYRTMNLNYAKHHIYLHQSKENEKKMFFYCSFCGYNHRSRSKLIVHIARTHPKRNSSNCSTTCRYAFDADFTIQQTLLKRSFIEQQLQIPKLFYCLYCPYISATILEHNQHRLYHQDNSMYSYKCQHCSFASSSSIYTNQHMLLHKNLTRAISTDIDTKSLKYIPVSTIGKEILGKPRRHNCPFCRSFASSCSSTILIHIKNTHSLNSKQFDGSLIIGAELAKEILCFEKQ

SEQ ID NO: 47194 - protein, 647 aa, Oryza sativa
MAEVARASASPPPASASTGGDRKRGRSSPSLPPPPPGPPPQVPHGSKRHRRDEGGGGGFDRRRLGPGVGYDNPDDRRYGNDHGGAGGRGGYGDERGQGRNFNRAPDWTDSGRGGWNDGPANSRREGLMSYKQFMQELEDDVSPDEAQHRYEEYKSEYITTQKKAYFDLHKNDDWLKNKYHPTNLEIVMERRNELARTAANQFLQDLQNGSLDIGPGLTSSATNKSGNSVDDTDANGKKGKLGKSQDDLYYAAPKAHPVSSEPRRIRIDVELAQALICKLDSEKGIENNVLSGSDHDRAEKDKSHGSMGPIVIIRGSSAVKGLEGAELLDTLVTYLWRIHGVDYYGMSETNEPKGLRHVKADSRTFNGASSNAAEWEKKLDSFWQDRIQGQDPMEILKAKDKIDAAASEVLDPHVRKIRDEKYGWKYGCGAKGCTKLFHAPEFVQKHLKLKHADLVRELTSKVRENIYFDNYMSDPKAPGGMPIMQQPAPREKVRQRPPIESRLRDERGNRRFDRNDSPTHDGSSDNPDDAYDSYGDPVMHGAFPPDIPAPPVLMPVPGAGPLGPFIPAPPEVAMRMMRDQGGPPPFEPTGGPRPRRPGRGGLPMGGPSPILAAPLPPPHMHDPRKIRSYQDLDAPEDEVTVMDYRSL

SEQ ID NO: 47195 - protein, 843 aa, Oryza sativa
MKLVQREAEKLALHNAGFLAQKRLARGLRLNYTEAVALIAAQILEFVRDGDRTVTDLMDLGKQLLGRRQVLPAVPQLLETVQVEGTFMDGTKLITVHDPISSDDGNLELALHGSFLPVPSLEKFSSVGVDDFPGEVRFCSGHIVLNLHRRALTLKVVNKADRPIQIGSHYHFIEANPYLVFDRQRAYGMRLNIPAGTAVRFEPGDAKTVTLVSIGGRKVIRGGNGIADGAVNRSQLNEVMEKVIANGFGHEDYPDSSEGIIGDGTHDYSVDHEKYASMYGPTTGDKIRLGDTDLFAEIEKDYAIYGDECIFGGGKVLRDGMGQSAGYPASDCLDTVVTNAVVIDYTGIYKADIGINGGLIVAIGKAGNPDVMDMDGVNEEMIVGVNTEVIAAEGMIVTAGGIDCHVHFICPQLAEEAIASGITTLVGGGTGPAHGTCATTCTPSPSHMKLMLQSTDELPINMGFTGKGNTTKPDGLAEIIKAGAMGLKLHEDWGSTPAAIDNCLSVAEAFDIQVNIHTDTLNESGCVEHTIAAFKDRTIHTYHSEGAGGGHAPDIIKVCGVKNVLPSSTNPTRPFTLNTVDEHLDMLMVCHHLDRNIPEDVAFAESRIRAETIAAEDILHDMGAISIISSDSQAMGRIGEVITRTWQTANKMKRQRGRLPISSSPDAAEDNDNFRIRRYIAKYTINPAIVNGFSDFVGSVEVGKLADLVIWKPSFFGAKPEMVIKGGAIACANMGDPNASIPTPEPVMMRPMFGAFGGAGSANSIAFVSKAAKEAGVAVQYKLGKRVEAVGRVRGLTKLNMKLNDALPKIDVDPETYTVTADGEVLRCQPTPTVPLSRNYFLF

SEQ ID NO: 47196 - protein, 516 aa, Oryza sativa
MGHRLVVVLLLALLVAGAARAAEQAAGEDGIRGGAGADHQEAAGITGGLSRRSFPAGFVFGTAASAYQVEGMALKDGRGPSIWDAFVKTPGEIANNATADVTVDEYHRYKEDVNIMKSMGFDAYRFSISWSRIFPTGTGKVNWKGVAYYNRLINYMLKIGITPYANLYHYDLPEALEVQYGGLLNRKIVEAFADYAEFCFKTFGDRVENWMTFNEPRVVAALGYDDGNFAPGRCTKCTAGNSATEPYIVAHHLILSHASAVQRYRHKYQHIQKGKIGILLDFVWYEGLTNSTADQAAAQRSRDFHVGWFLHPIIYGEYPKSLQVIVKERLPKFTADEVHMVKGSIDYVGINQYTAYYVRDQQPNATTLPSYSSDWHAAPIYERDGVPIGPRANSDWLYIVPWGLYKAVTYVKEKYGNPTMFLSENGMDDPGNVTIAQGVHDTTRVAYYRSYITKLKEAIDDGANCIGYFAWSLLDNFEWKLGYTSRFGLVYVDFRTLRRYPKMSAYWFRDLVSSKN

SEQ ID NO: 47197 - protein, 474 aa, Oryza sativa
MAAMYRPDPANPAARRPRLVVLLLVAFFALQLLVFLAFRGAPSPSSPDAAVDRVPVSARRDGEDSGCVGGLVYVYDLPPVFNEDLLALCEVLAPMYSLCPYLANDGLGFPAKGGNQSEFPPAELVGSWYSSDQFALEHIVHRRLLSHRCRTTDPARATAFFVPFYAGLAVGRHLWATNATDADRDRDCLALLSWLHAQPYYKRSNGWDHFIALGRITWDFRRSPDGGWGGSFLLMPGLANTTRLVIERDPWDAMDVGIPYPTSFHPRTAADVRAWQQYASSRSRPKLFAFAGAPRSAIKGDFRGLLLEECQAAGDACGALDCGEGRCIKQNELVMELFLGARFCLQPRGDSFTRRSLFDCMVGGAVPVLFWRRSAYRQYGWYVPVGNSQEEEWSVFIDRDELRAGNVTVRGVLAAIPEAKVREMRNRVVEMIPKLVYSAADKEGLGDGMKDAVDVMIDGMLRRAAEQRRSWRKV

SEQ ID NO: 47198 - protein, 66 aa, Oryza sativa
MLQLLMALAFSAAPLTLYVPPVRSLSLFVEAIEAVFRDCAPYSQGAIFRFRLGLSRILSGLARALR

SEQ ID NO: 47199 - protein, 105 aa, Oryza sativa
MELIDELEVTRRGPYSGGLGGISFDGDMLIALALRTIVFSTAPSHNTMYSYKDTERRREWVAHLQAGAGIVADSSPDDEQRECENKAAALARAIDLAESAFVDKE

SEQ ID NO: 47200 - protein, 255 aa, Oryza sativa
MFFCNLLCYFHYLQYNHVLHLYIIKPGFLNNYYKTNVMGTLNMLGLAKRIGARFLLTSTSEVYGDPLEHPQKETYWGHVNPIGVRSCYDEGKRTAETLTMDYHRGGGVEVRIARIFNTYGPRMCLDDGRVVSNFVAQALRRQPMTVYGDGKQTRSFQYVSDLVAGLMALMEGDHIGPFNLGNPGEFTMLELAQVVKETIDPMATIEFKPNTADDPHMRKPDITKAKHLLRWEPKVSLREGLPLMVKDFRQRILDE

SEQ ID NO: 47201 - protein, 182 aa, Oryza sativa
MASAPAASSAVLLVVVLVASLAAGGANAATFTITNRCSFTVWPAATPVGGGTQLNPGQTWTINVPAGTSSGRVWGRTGCSFDGAGRGRCATGDCGGALSCRLSGQPPLTLAEFTLGTSGGNRDFYNLSVIDGYNVAMSFSCSSGVTLTCRERSCPDAYQYPSDDSKLRSCNGNSNYRVVFCP

SEQ ID NO: 47202 - protein, 64 aa, Oryza sativa
MFFHQRNSPGMLRDRWMDGCSYVFNGSHDVLFIWCFIFLHDLSARSISIGYSCCVFLKKHSCRV

SEQ ID NO: 47203 - protein, 224 aa, Oryza sativa
MEASLTVAGAGAAALSLRPQIRLRITQATPLMPPRRLQSGPSKIQTSGARAHLAAAPASTPPAAGGGLYSAETYELTAENVDRVLDDVRPYLIADGGDVTVASVEDGVISLKLEGACGSCPSSTTTMKMGIERVLKEKFGDAVKDIRQVFDDDQQPAEPTPQAVNGHLDILRPAIANYGGSVEVVAVDGEDCLVRYEGPESIGSGIKAAIKEKFPDITNVVFLQ

SEQ ID NO: 47204 - protein, 362 aa, Oryza sativa
MARCSPPLLRRLFCRAAKSASAAGAGTGGTSKKNIVFLGSPQVAASVLETLLVASESPDSSFQVSAVVTQPPAAKNRGRKLMPSAVAQLALDRGFPGDLIFTPERAGEEAFLSDLKEVRPELCITAAYGNILPQRFLDIPPYGTVNIHPSLLPLYRGAAPVQRALQDGVEETGVSLAYTVRALDAGPVIASEKFAVDEYIKAPELLAILFNLGSKLLLHELPSILDGTAKEKAKPQDDSKITHAPKLNSDESWLSFNQEAKLLHNKVRAFAGWPGTRAKLQLVNQNGEPDVLEIKVISTKACASCDKTGDGNEVLFSGNSLLIPCGGSSCLEVVELQLPGKKVTTARDFWNGLRGQRLLKSP

SEQ ID NO: 47205 - protein, 299 aa, Oryza sativa
MLGSLISYSPSVNPKTENPDELIATGVLASLQNFIRKCIVAVLSYGPMPKHIAFIMDGNRRYAKFRSIQEGSGHRMGFSALIASLLYCYEMGVKYITVYAFSIDNFKRDLTEVKSLMELMEEKINELLENRNVINKVNCKINFWGKLDMLSEPVRVAAEKLMVSTAENKGLVFSVCMPYNSTSEIVIAVNKVCAERRDILQREDVDSVANNGVHSDISVADLDHHMYSAGCPDPDIVIRTSGETRLSNFLLWQTTFSHLQNPDPLWPEFSFKHLVWAILQYQRVHPYIEQSRNLAKKQL

SEQ ID NO: 47206 - protein, 194 aa, Oryza sativa
MMVREFHKVIGKETRRQAMEKWGGKPDVLVACVGGGSNAMGLFHEFVDDQDIRMIGVEAAGYGVDTDKHAATLTKGEVGVLHGSLSYVLQDDDGQVIEPHSISAGLDYPGVGPEHSFLKDIGRAEYDSVTDQEALDAFKRVSRLEGIIPALETSHALAYLEKLCPTLPDGVRVVVNCSGRGDKDVHTASKYLDV

SEQ ID NO: 47207 - protein, 818 aa, Oryza sativa
MGVFDRLPPMDRLRSEKMCFVQLIIPAESARLAVTYLGELGLLQFKDLNEDKSPFQRIFVNQVKRCSEMSRKLRFFNDQINKAGVKSSVRPAMQPDIDLEELEAKLREHENDLLEMNTNSEKLLQTYNELLEFKMVLSKAGGILASSHNHAAPAERELDEHIYDKEMDDGNAYLLEQGVHLGASENSGVKFVSGIILKSKAMAFERMLFRATRGNMFFNQAPAGEPVTDPISGEEVEKTVFVVFFSGDQAKAKILKICGSFGASCYPVPEEMVKQRQIFREVSGRLADLEATLDAGIQHRNKALESVGSQLWRWTIMVKKEKAVYDTLNMLNFDVTKKCLVGEGWCPIFAKSQIKDVLQRATLHSNSQVGIIFHEMDTIDSPPTYFQTDKFTNAFQEIVDAYGIARYEDANPAVYSVITFPFLFAVMFGDWGHGICLLLGACVLILREKKLSSQKLGSFMEMAFGGRYVILLMALFSIYCGLIYNEFFSVPFHIFGKSAYECREKTCSDAHTAGLIKVRDPYPFGVDPSWRGSRSELPFLNSLKMKMSILMGVTQMNLGIVLSYFDAKFHGNALDIRYQFIPRMIFLNSLFGYLALLILIKWCRGSQADLYHVMIYMFLDPSGNLGENQLFWGQKELQILLLLMAIVAVPWMLFPKPFILKKLHNERFQGHTYRFLGTSEMDPDSEPDSARSRHDDFNFSEVFVHQMIHSIEFVLGAVSNTASYLRLWALSLAHSELSTVFYEKLLVLAWGYDNLVVKLVGLVIFSFATAFILLGMESLSAFLHALRLHWVEFMNKFYHGDGYKFRPFSFALLADDED

SEQ ID NO: 47208 - protein, 206 aa, Oryza sativa
MDVPLPGGSVDQSEDYSPAATVVRFDPPLPLLRAPVPSSAASGEPPVLAFRDAASWRAAWEAAEASLLSQCEAGARSGCSITASRKCKPPWWKGLLGGAPTDYQERERCEEREMAACLEAAREACVKFAKEKCIEPFRDARIASEGLLENTKFAIWGAGSNRTSSASLCIANSQYPFNPRPGSTNYKGSDLLDSFPSEDNNIKDDD

SEQ ID NO: 47209 - protein, 304 aa, Oryza sativa
MSPSSSSSSTGPMGVAVSPEVEAALARGGAVVALESTIICHGMPYPKNLQTAMEVEAVVRENGAVPATIAILNGVPHVGLSGEQLKSLAVSGRQFQKTARRDIAHVVASGGNGATTVSATMFFAHKVGIPIFVTGGIGGVHRNGEQTMDISSDLTELGKTPVTVISAGVKSVLDIPRTLEYLETQGVTVAAYKTNEFPAFFTEVSGCKVPCRVDSPEECAKIIYANKNLHLGSGILIAVPIPKEHAASGNAIESAIQKALKEAEDKNIIGNAITPFMLDRVKVLTGRSSLEANCACKEQCSCWC

SEQ ID NO: 47210 - protein, 153 aa, Oryza sativa
MSSLSRKYPNIFGTTYSFMVTDFPDIIIQPSYDIFFVRGTKQFSPLLCHYPLTSGSRYHLLYFTHSFIYLFFLSLARLLAQVNLCSPPSPSYKQITKGLFGRFSIFGKQRWSKVHSTWMATRGKLASPLMLNNISLQVCDPLPLYLPISSVCH

SEQ ID NO: 47211 - protein, 107 aa, Oryza sativa
MEAVLTFSLLFAVYATVVDRRRAVGALGPLLVGLVVGANILAGGPYSGASMNPARSFGPALAAGEWADHWIYWVGPLIGGPLAGLVYEGLFMGPPGHEPLPRNDGDF

SEQ ID NO: 47212 - protein, 383 aa, Oryza sativa
MSGANARGRLSPASGGGGDSEPRSAGSRTRSVSATRGRKPSPRPGRDAAAAAAEEKKPAAVPTLLPSLSVPAGMRRQELLLRSGLSLDASCSSDASTDSFCSRASTGRIGRPTFGARKKKTLCQTDHKIVSMLEREVGLASANDVPGLKRRCSWVTANTEPCYAAFHDEEWGVPVHDDKVLFELLVLSGALAELTWPTILNKRPIFREVFMDFDPVLVSKLSEKKIIAPGSPSSTLLSEQKLRGVIENARQILKIVEEFGTFDKYCWSFVNNKPILSRFRYPRQVPVKTSKADAISKDLVRRGFRSVGPTVVYTFMQVSGMTNDHLISCYRFAECAAAATGSNTTVGSETNSDSSNRATEQQMNGTNGLAADIARTIDELSIS

SEQ ID NO: 47213 - protein, 245 aa, Oryza sativa
MGSLGGEEGARPAAAAEGARRPRFLCLHGFRTSGEIMRKQVVGKWPADVTARLDLVFADAPFPAEGKSDVEGIFDPPYYEWFQFDKNFTEYRNFDECLNYIEELMIKEGPFDGLMGFSQGSILSGALPGLQEQGLALTRVPKIKYLIIIGGAKFQSPTVAEKAYANNIKCPSVHFLGDTDFLKTHGEKLIESYVDPFIIRHPKGHTVPRLDEKSLEIMLRFLDKIEKETALEHSSTDVDEEEMYL

SEQ ID NO: 47214 - protein, 360 aa, Oryza sativa; identical to SEQ ID NO: 33345

SEQ ID NO: 47215 - protein, 180 aa, Oryza sativa
MASALAASTAVCSSPLASASASASSARRLRAVPPSRGIRYQALRADSGFAGNRRGGGRGASVVCAVQGQDTSIQVPEVTKSTWQSLVMESELPVLVGYWATWCGPCKMIDPVVGKLSKEYEGKLKCYKLNTDENPDIASQYGVRSIPTMMIFKNGEKKDAVIGAVPESTLIASIEKFVER

SEQ ID NO: 47216 - protein, 1073 aa, Oryza sativa
MDGAKSGKQCHVCQICGDGVGTAADGELFTACDVCGFPVCRPCYEYERKDGSQACPQCKTKYKRHKGSPPILGDESDDVDADDASDVNYPTSGNQDHKHKIAERMLTWRMNSGRNDDIVHSKYDSGEIGHPKYDSGEIPRIYIPSLTHSQISGEIPGASPDHMMSPVGNIGRRGHPFPYVNHSPNPSREFSGSLGNVAWKERVDGWKMKDEGAIPMANGTSIAPSEGRGVGDIDASTDYNMEDALLNDETRQPLSRKVPISSSRINPYRMVIVLRLIVLCIFLHYRITNPVRNAYPLWLLSVICEIWFALSWILDQFPKWSPINRETYLDRLALRYDREGEPSQLAPVDIFVSTVDPMKEPPLVTANTVLSILAVDYPVDKVSCYVSDDGAAMLTFDALAETSEFARKWVPFCKKYSIEPRAPEWYFAQKIDYLKDKVQASFVKDRRAMKREYEEFKVRVNALVAKAQKVPEEGWIMQDGTPWPGNNTRDHPGMIQVFLGHSGGLDTEGNELPRLVYVSREKRPGFQHHKKAGAMNALVRVSAVLTNGQYLLNLDCDHYINNSKALREAMCFLMDPNLGRRVCYVQFPQRFDGIDRNDRYANRNTVFFDINLRGLDGLQGPVYVGTGCVFNRTALYGYEPPIKQKRPGYFSSLCGGRKKTKKSKEKSTEKKKSHKHVDSSVPVFNLEDIEEGIEGSGFDDEKSLLMSQMSLEKRFGQSSVFVASTLMEYGGVPQSATPESLLKEAIHVISCGYEDKSDWGTEIGWIYGSVTEDILTGFKMHARGWRSIYCMPKRPAFKGSAPINLSDRLNQVLRWALGSVEILFSRHCPIWYGYGGRLKFLERFAYINTTIYPLTSIPLLLYCILPAICLLTGKFIIPEISNFASIWFISLFLSIFATGILEMRWSGVGIDEWWRNEQFWVIGGISAHLFAVFQGLLKVLAGIDTSFTVTSKASDEEGDFAELYMFKWTTLLIPPTTILIINLVGVVAGISYAINSGYQSWGPLFGKLFFAFWVIVHLYPFLKGLMGRQNRTPTIVVVWAILLASIFSLLWVRIDPFTTRVTGPDTQKCGINC

SEQ ID NO: 47217 - protein, 307 aa, Oryza sativa
MKEDPTVCVFGEDVGHYGGSYKVTKGLAEMFGDLRVLDTPIAENSFTGMGVGAAMKGLRPVVEGMNMGFLLLAYNQISNNCGMLHYTSGGQFKIPIVIRGPGGVGRQLGAEHSQRLESYFQSIPGLQMVACSTPYNAKGLMKAAIRSENPVVLFEHVLLYNLKEKIPDEEYVLCLEEAEMVRPGEHVTILTYSRMRYHVMQAAKTLVNKGYDPEVIDIRSLKPFDLHTIGNSIKKTHRVLIVEECMRTGGIGASLRSAIIDNFWDYLDAPIMCLSSQDVPTPYAAPLEDATVVQPAQIVAAVEQICQ

SEQ ID NO: 47218 - protein, 105 aa, Oryza sativa
MFWRFLNFFDPVKNIAPSCANISINDSSLSKPREIGVVVAGMERYELQLFLALKPCINDLRRELWRLNIMAHTRDTMDRKETYQVEEKHGYFAAETSSKFHLFSS

SEQ ID NO: 47219 - protein, 736 aa, Oryza sativa
MKRAADGMEKPKFLTREEREKLALERRQAAVTDQRRSALDLLQSLPRPPPPPPPPLSNPPRDSSSSHHRDSSDRDRDRDRDRDRDRDRDRDRERRRDDDSRRDRDRDRDRDRGDSSRRDRDRERGDRDRDRDRERGDRDRERGDREKDRLEKMAEREREKELDAIKEQYLGSKKPKKRVIKPSEKFRFSFDWENTEDTSRDMNSLYQSPHEARLLYGRGFLAGIDRREQKKVAAAHEKETRAEQRRKAGLDDRPEDDAVDKKEADAAAKYDAFDMRVDRHWTQKSLDEMTERDWRIFREDFNISYKGSKVPRPMRKWSESKLGTELLRAVEKAGYKEPSPIQMASIPLGLQQRDVIGIAETGSGKTAAFVLPMLSYITRLPPISEENEAEGPYAVVMAPTRELAQQIEEETVKFATYLGIKVVSIVGGQSIEEQGFKIRQGCEVVIATPGRLLDCLERRYAVLNQCNYVVLDEADRMIDMGFEPQVVGVLDAMPSSNLKPENEDEELDAKTIYRTTYMFSATMPPAVERLARKYLRNPVVVTIGTAGKATDLITQNVIMTKESEKMSRLQKILTDLGDKPAIVFCNTKKSADARAKDLDKAGFRVTTLHGGKSQEQRETSLDGFRNRRFTVLVATDVAGRGIDIPDVAHVINYEMPSSIDTYTHRIGRTGRAGKKGLATSFLTLENTDIFFDLKQMLIQSNSPVPPELARHEASKFKPGSVPDRPPRRNDTVYATH

SEQ ID NO: 47220 - protein, 687 aa, Oryza sativa
MTPVVHCSVGNISLFHIGSFRPSHEIQIRRFRSTERYSRVPSRRLLQPQRAFNLISIYKRSSWSSARRPRTLSAATVGTDVTVEDPNPPPSGETSEESSEDTAPDTAEASEQAEASTSSIPKAGRNIRKSEMPPLNDEDLVPGASFTGKVRSIKPFGVFVDIGAFTEGLVHISRVSDGFVKDISSLFTVGQEESVRLVEANKETGRISLTMRTGGDYVKPKTETPKAASGGRNTTATTSRGSPRQTRERDEAKSMGETNYVQGQFLDGVVKNSTRAGSFVTLPDGSEGFLPREEEAVALFTLIGHSALEVGQQVRVKVLNVVRGQVTLTMKEGEDDEEDLASLNTQLKQGWSRGTNAFELAFRRNKEISAFLDQREKIIVPDVQEAAVASVGTELDAEVGIEQSPGKEPETGNAESVAIDSSITEVKETDSIAAVEKDSEISKTESVETASSVVISEDDSTVDGKLVEPTASVSATETEIKEDSSEGSVTTEPTEAASTEFVTAVVEESAPTASSVETSEDDSTVDDKLVEPTASVSATEAESKEDSSEGSVASTESVTAVVEESAPVSSVAIEVPAPEASEASAQEIIEDSTTVEGAADDQTVESDSPPPEGVELSSNGAPDSSIAEDKPDEPEESLIVEEVPVTASSESEDKEPAAVPEEVAASSEKTADVAVAGAEASTATGQQ

SEQ ID NO: 47221 - protein, 186 aa, Oryza sativa; identical to SEQ ID NO: 33666

SEQ ID NO: 47222 - protein, 515 aa, Oryza sativa
MAGGFSVSGSGVEFEAKITPIVIISCIMAATGGLMFGYDVGISGGVTSMDDFLREFFPTVLKKKHEDKESNYCKYDNQGLQLFTSSLYLAGLTATFFASYTTRRLGRRLTMLIAGVFFIVGVIFNGAAQNLAMLIVGRILLGCGVGFANQAVPLFLSEIAPTRIRGGLNILFQLNVTIGILFANLVNYGTAKIHPWGWRLSLSLAGIPAALLTLGALFVVDTPNSLIERGRLEEGKAVLRKIRGTDNVEPEFNEIVEASRVAQEVKHPFRNLLQRRNRPQLVIAVLLQIFQQFTGINAIMFYAPVLFNTLGFKTDASLYSAVITGAVNVLSTLVSVYSVDRVGRRMLLLEAGVQMFLSQVAIAVVLGIKVTDRSDNLGHGWAIMVVVMVCTFVSSFAWSWGPLGWLIPSETFPLETRSAGQSVTVCVNLLFTFVIAQAFLSMLCHLKYAIFAFFSAWVVVMSLFVLFFLPETKNIPIEEMTERVWKQHWFWKRFMDDADKHHVVPNGGKSNGATV

SEQ ID NO: 47223 - protein, 615 aa, Oryza sativa
MLSVWLGTQADEAFPDAWHSDAHAAAGPGAVASTRAKVYFSPKLVYLRVAAIGAQDLVPLDASRPANFCVKLQLAGQVRRTRPGAPPGTLNPIWNEEFMFVVSEPFDEPLFVTVEDRVGPGRDEPLGRIMLPLNAAMPRHDHFGKPVEPRWYSLARPSDDPDKKEGKFASKIQLRMSLDFGYHVLDESTYYSSDLQPSSKHTRKPSIGILELGILGARNLIPMKGKDGRTTDAYCVAKYGPKWVRTRTILNTLNPQWNEQYTWEVFDPCTVITVVVFDNNQIGKNGDARDESIGKVRIRLSTLETDRVYTHFYPLLALKPSGLKKTGELHLAVRFTCTAWVNMIALYGRPLLPKMHYTQPISVMQLDYLRHQAMQIVAARLSRAEPPLRREVVEYMLDVGSHMFSLRRSKANFYRITSLFCGFAATAKWYDGIRSWRNPITTVLVHMLFLILICYPELILPTIFLYMFMIGLWNYRYKPRHPPYMDTKLCHAEFTNPDELDEEFDSFPSSRPADIVRMRYDRLRSVGGRVQTVVGDLATQGERAHALLSWRDPRATAIFIFLSLVVAIVLYVTPFQVLLVIAMLYLLRHPRFRSRMPSVPFNFYRRLPAKSDMLL

SEQ ID NO: 47224 - protein, 811 aa, Oryza sativa
MLGASRRSVCTAAAAAAAGSRRRAAAGVASAVSGDSSVSSSSAPPRSVINGEPGVPQLQKRLLSVLAAPKLTGTDNAASLKLREGSLVGRRYESSAAAVDSSDTPPVEKHEYQAEVNRLMDLIVHSLYSNKEVFLRELVSNASDALDKLRYLSVTDPDLIKDGAGLDIRIQTDKENGIITITDTGIGMTRQELVDSLGTIASSGTAKFLKALKESQEAGVDSNLIGQFGVGFYSAFLVSDKVAVSTKSPKSDKQYVWEGEAESSSYTIREETDPEKLLPRGTRLTLYLKREDKGFAHPEKIQKLVKNYSQFVSFPIYTWQEKGYTKEVEVDEPVEAKEGDDETKTEVKKKTKTVVEKYWDWELTNETQPIWLRNPREVSTEEYNEFYKKTFNEYMDPLASSHFTTEGEVEFRSILYVPATKKEDITDRKTKNIRLYVKRVFISDDFDGELFPRYLSFVRGVVDSNDLPLNVSREILQESRIVRIMRKRLVRKAFDMILGISCSENRDDYERFWENYGKFLKLGCMEDKENHKRIAPLLRFLSSQSNEELISLDEYVENMKPEQKDIYYIAADSLSSAKHAPFLEKLNEKEYEVLFLVDPMDEVSVTNLNSYKDKRFVDISKEDLDLGDKNEEKEKEIKQEYSQTCDWIKKRLGEKVARVDISNRLSSSPCVLVAAKFGWSANMERLMRAQSMGDMSSLDFMRSRKVFEINPEHEIIKGLNAACRANPDDPEALKAVDILFETSMISSGFTPDNPAELSGKMYEMMSTAMASKWASHAQPAEMNLQRDSPVSSEPIEAEVIEPELVDDSQKK

SEQ ID NO: 47225 - protein, 323 aa, Oryza sativa
MGAETGEPSSFLSLSAAFSYGIASMAMVFVNKAILMQYAHSMTLLTLQQIATALIIHFGQILGVSKRKDFSMATGRKLLPLSIFYNANVAFALASLKGVNIPMYIAIKRLTPLAVLVAGCLRGKGKPPTQVSLSVICTAAGVLIAALGDFSFDLYGYSMALTSVFFQTMYLILVEKSGAEDGLSSVELMFYNSVLSLPFLFFIIIATGEFPYSLSVLSEKTASLTFSAILLVSLVMGIVLNFTMFWCTIVNSALTTTIVGVLKGVGSTTLGFVLLGGVEVHTLNVTGLVINTFGGVWYSYAKYMQKRKMPKRIAPDVEAHPHK

SEQ ID NO: 47226 - protein, 548 aa, Oryza sativa
MLTRTITYCMVSVTHRIHHPSIMNKLFSTAWILRHVLRWFKVKMDGNAKGGGHSEALKNYNLGRTLGIGSFGKVKIAEHKLTGHRVAIKILNRRQMRNMEMEEKAKREIKILRLFIHPHIIRLYEVIYTPTDIYVVMEYCKFGELFDYIVEKGRLQEDEARRIFQQIISGVEYCHRNMVVHRDLKPENLLLDSKYNVKLADFGLSNVMHDGHFLKTSCGSPNYAAPEVISGKLYAGPEVDVWSCGVILYALLCGTLPFDDENIPNLFKKIKGGIYTLPSHLSALARDLIPRMLVVDPMKRITIREIREHQWFQIRLPRYLAVPPPDTAQQAKMIDEDTLQDVVNLGYGKDHVCESLRNRLQNEATVAYYLLLDNRFRATSGYLGADYQESLERNFNRFASSESASSNTRHYLPGSSDPHASGLRPHYPVERKWALGLQSRAQPREIMIEVLKALQDLNVSWKKNGQYNMKCRWSVGTQATDMLDVNNSFVDDSIIMDNGDVNGRLPAVIKFEIQTRDEKYLLDMQRVTGPQLLFLDFCADFLTKLRVL

SEQ ID NO: 47227 - protein, 227 aa, Oryza sativa
MAEEHETRPPSAGRPPSSGRGRADDADEREEGEIADDDSGHAPPQANPAAPHPLEHAWTFWFDNPQGKSKQATWGSSIRPIHTFSTVEDFWSLYNNIHHPSKLVVGADFHCFKNKIEPKWEDPICANGGKWTFSCGRGKSDTMWLHTLLAMIGEQFDYGDEICGAVVSVRGKQERIAIWTKNAANEAAQISIGKQWKEFLDYKDSIGFIVHDDAKKMDKGLKNRYTV

SEQ ID NO: 47228 - protein, 65 aa, Oryza sativa
MVATGAGGARPLPSPLGYPCRSSRGPVRHGGGGRRRRRRRDPRSSSSPLSSPAATGARGQRIRRR

SEQ ID NO: 47229 - protein, 402 aa, Oryza sativa
MAPPPPSPSPSPASGAQYAHQFLNTALSQRGPSALPYAEDVKWLIRNHLVALADAFPSLHPKAALFTHNDGRAAHLLQADGTIPIHHAGASYNLPAVLWLPEPYPRSPPLVFLSPTRDMVIKPHHPLVDRSGLVANAPYLRSWVFPSSNLVDLVRSLSHLFGLDPPLFTRSPNPPPPSPSPPIPATPLPRVNPSSSSSPSPSPYRFPASPQLAARPPPTEDPAEVYKRNAIAKLVDMAYADAATLRPVREAEVDTLFAMQATLRSRGEVVSDGVRKMGEEKEALERRLQDVMMATDLMEAWVMENTKGAAGDTEADEAIETADVLSKQMLECTAADLALEDTIYALDKAIQEGSVPFDGYLRSVRALAREQFFQRVLSTKVNKAQQQAQVARMAARAPQYAS

SEQ ID NO: 47230 - protein, 166 aa, Oryza sativa
MGNCQAAEAAAVVIQHPGGRVERLCWSTSAAEVMRANPEHYIALVTLRVAEERQDGDGGARRTVRLTRVKLLKPKETLLLGHAYRLITTHEVTKAVQARKEEKVRKAQQQLEESRQKLQSKARAAASAAAEVDEAAEENDNDSDNFDDEAALDASLDQVGLHGSEW

SEQ ID NO: 47231 - protein, 327 aa, Oryza sativa
MVLPSSNTRATSSMAYPVSLSSLHHHPNNHHAFFLPSKTNHDNTHKPIESSRISRRSLIFLPVLPSLLYASSSPALDDANIPSTSAIDTTITDRIFMDFSVCPSYFRSDRTLGAELATCPDSEPLGRVIFGLYGRLLPLTTANFKAACTSAAYRGTLVHKLLQGQFFVAGRQGPRRDRGEVQPPTGLVRNAETIDPKAFELKHARPGTLSLCLGQNDDDDDIKLNPNYHNVEFLVTTGPGPCPELDGQNIVFGTVLEGMNVITSIATIPTYKPAERIRFFNDFAQLIGDERAQTARALWDRPLKTVYISDCGELKVTKPSLSPPSLP

SEQ ID NO: 47232 - protein, 197 aa, Oryza sativa
MSAAAAALRPTEPLPLPSGLSLAPRLKLLLTFFRADLSVRPVDEWQLKTALLAFLRDPPLSLPVLPDSDLSVRTLPDLHKRRRDEPVASGVLHVRDLSFLRPRRRNGDDEEEEAEEMTREQEEEKYFQWRSSLVEKLAGIELNLEGVKFRMSVEIPPSDDFRAMKKSWENFYASELLSSSMGFIFLNENAALSCDSC

SEQ ID NO: 47233 - protein, 238 aa, Oryza sativa; identical to SEQ ID NO: 31893

SEQ ID NO: 47234 - protein, 114 aa, Oryza sativa; identical to SEQ ID NO: 31351

SEQ ID NO: 47235 - protein, 382 aa, Oryza sativa
MGHVEEASGSDDDGVELLSVSWNQDNSCFIAATTNGFRVFSCKPFHETMRRMFGPNGGIGIAEMLFRTSIFGLAGAESNTEFPPTMLQLWDDYNERRIHKYNFASEIRAVRLSKDYFVVVLEKTINVYRFKDLRLFYQARTVSNPNGLCCLSHHANASVFACPGTSKGQVLIEHFGLKETRFIAAHDSPLSCMTMALDGTLLATASVRGTLIRIFNTRDGTCVQEVRRGLDRAEIYSIALSPNVQWLAVSSDKGTVHVFSLRVKDAEEDAKKGESATAGAQVNDNCNYGSTVPVTQTKIGSNTSSSLSFMKGILPKYFSSEWSFAQFRLPEITRYIMAFGDQDTVMMIGLDGSFYRYSFDPVNGGEMMLKEYHLFLKASKSL

SEQ ID NO: 47236 - protein, 244 aa, Oryza sativa
MSVFGGDSWARDARQRKRRLDDLMLPASAVSPSSSSPDSFRRLSNGKFACLVCPHRPVLDSPLMLSMHNKGSRHIAAESRLREKELSRQQEINKRLAISPEASVSSSGKQHYGVRSSDMKEKPLIQQTRQAILEAQSSRFIIDSANKKSHDLERTSNSSLCDSQVTPSVPMEKWSGDTVKGKIFAGDRTATKMLAEEQADFQKRQEQELKFTASGWKRDGHGRWYRDENVEFDSDEDDPNICLG

SEQ ID NO: 47237 - protein, 272 aa, Oryza sativa
MARRRVAALASQLLRRQLLMRRPPPRFLSSAAAAASGPLDRLRSPPFARTAARHGSPALSPWSRFGGQKRGMFIQTQSTPNPQSLMFYPGKPVMEVGSSDFPNARTAMTSPLAKALFAIDGVTRVFFGSDFVTVTKSEETSWDYLKPEVFAVIMDFYSSGQSLFLDSSTAASMDTAIHEDDSEIVAMIKELLETRIRPAVQDDGGDIEYRGFDPETGIVKLKMQGACSGCPSSSVTLKSGIENMLMHYVPEVKGVEQELDGDEEAELTGQLE

SEQ ID NO: 47238 - protein, 705 aa, Oryza sativa
MVLLLLLLLALPAAAGGLAADGQALLAFKAAVLRDPEGALADWDASTAADPCAWNGVSCGAGSGAGGADRRVVALSLPRKGLVGSLPASPLPASLRHLNLRSNRLFGELPAPLLSAAAGLQSVVLYGNELYGPIPPELGDLPYLQILDLSSNSLNGTLPPAILRCRRLRSLALGWNNLTGALPQGFARGLSALEHLDLSHNRFSGAVPEDIGNLSRLEGTVDLSHNQFSGQIPASLGRLPEKVYIDLTYNNLSGPIPQNGALENRGPTAFVGNPGLCGPPLKNPCSPDAMPSSNPFVPKDGGSGAPGAGKNKGLGKVAIVAIVLSDVVGILIIALVFFYCYWRAVSSKEKGNGGAAGSEGSRCGKDCGCFSRDESATPSEHTEQYDLVPLDQQVRFDLDELLKASAFVLGKSGIGIVYKVVLEDGLTMAVRRLGEGGLQRFKEFQTEVEAIGKVRHPSIVTLRAYYWSYDEKLLIYDYIPNGSLSAAIHGKPGTMTFTPLPWDGRLKIMQGVAKGLSFLHEFSHKKYIHGDLRPNNVLLGSNMEPYISDFGLGRLANIAGGSPFTQSDHAGIEKAQSQQSDASVSPLVGKGSCYQAPEALKTLKPSQKWDVYSYGVILLEMITGRSPVVLLETMQMDLVQWVQFCIEEKKPSADVLDPSLARDSEREDEMIAALKVALACVQANPERRPSMRHVAGTLDHLNGSG

SEQ ID NO: 47239 - protein, 236 aa, Oryza sativa; identical to SEQ ID NO: 32350

SEQ ID NO: 47240 - protein, 754 aa, Oryza sativa
MRTQRILLAVVVSMVVSSAMLAVVSCARERKNYVVHLDPREDGGVADSVELWHRSFLPEATPEAAGDDGPRIIYSYSHVLSGFAAQLTDDEAEAMRKKEGCIRLYPEEFLPLATTHSPGFLGLHLGNDGFWSRSGFGRGVVIGLLDTGILPSHPSFGDAGMPPPPKKWKGTCEFKAISGGGCNNKIIGARAFGSAAVNATAPPVDDAGHGTHTASTAAGNFVENADVRGNAHGTASGMAPHAHLAIYKVCTRSRCSIMDIIAGLDTAVKDGVDVLSFSIGASPGAPFNYDLVAIATFKAMEHGIFVSSAAGNDGPVAATVGNGAPWMLTVAAGTMDRAIRTTVTLGNGQVFDGESLYQPRNNTAGRQLPLVFPGLNGDSDSRDCSTLVEEEVSGKVVLCESRSIVEHVEQGQTVSAYGGAGMILMNKPVEGYTTFADAHVLPASHVSYAAGSKILSYIKSTPKPTASVTFKGTVMGSSPAPSVAFFSSRGPNKASPGVLKPDITGPGMNILAAWAPGEMHTEFADGVSLSFFMESGTSMSTPHLSGIAAIIKSLHPTWSPAAIKSAIMTSSDVADHDGVPIKDEQYRSASFYTMGAGYVNPSRAVDPGLVYDLHTNDYIAYLCGLGIGDDGVKEITHRRVSCAKLKAITEAELNYPSLVVKLLSQPITVHRIVTNVGKANSVYTAVVDMPKNVAVTVHPPLLRFSRAYEKQSFTVTVRWAGQPAVAGVEGNLKWVSDEHVVRSPIVIPPAKAVV

SEQ ID NO: 47241 - protein, 440 aa, Oryza sativa
MISLAVPAIYSLTSQFPSATTHARAPSRCACACVPGRQVAEQPLASMKAEQAAAAAGETPRFRWDTFGSAPSEPQWEAIRGLSPKLPNRCRALMARLVCLPPPDQDGDEDEETLGALLVFWVKAMKPKRTDWLLVLKELTAMESPLLAEVLEHALLEDSFEANVRDYTKLIHIYGKQKLLQKAEDAFHAMKSRGLPCDQVMLTALMDMYSKAGDLTRAKEIFNEIGLLGLPMDKRVYGSMIMAYIRADMLDKAEDMISEMGDQQIVAGKEVYKALLRAYSYKGDSEGAQRVFDAIQFAGIVPDTKLCALLVNAYCLADRINEAMIVTRNMRSARITPCNKCIALILGAYEKVNRLEGALAFLTELEENGVIIGQEPSQLLAGWLRRLGVVQEVEQVLKDLAVDRKNTLEVDRKKNLASDRKIKRRRSKSKRSFASSLQRK

SEQ ID NO: 47242 - protein, 944 aa, Oryza sativa
MGTEKGGAKIGGGGGGGGGGGGGGGLFNLFDWKRKSRKKLFSNSPEGAKLVKRGEETLPSGRLHLIDDDEGIGVSSFKGSSDYSCASSVTDEEGREMKAPGVVARLMGLDAMPSTGVPEPYCTPFRDTRSFRDSQSLKRSPEYSGSDQFSYVPRRVDGYMRKPLDLRAQKMPSSPIERFQIETLPPRSAKPLPMSHHRLLSPIKNPGFSSARNAAQIMEAAAKILEPRPQVSSREKICSYSPARIPLRISETRENIPASQRAVSRQLQSSRTNLELPDVRFSRGQQMNRSWNSEDDIVIFRTSSDSYEINNPGFSKNNKGKSISLALQAKVNVQKREGLGSSGKNSGGQKDRDECRTSQPFRSQSNAQKNKQQKKPSSSGTSSPVLRQNNQKQNSMVSRGKSAPNKSVSSQQGRKMAGDSSTGKLKNASKISKGGSRKDIVESISCDKEGSSSNNKDFPQKKRLIERNSTNEKGMFVPEKSAARLQKQVQPNVVMDEHIKWNNDSKDSTDVVSFTFTSPLVKPSAGPSRLSGKWDTRSNFNLDAINEKDDSDKKSEGLSSVGLNFVNGDALSLLLEKKLKELTSKIEPSINFTRGDTFVPANFSLEEPVVSSSSNWDMESGVFDCSPSEGKPSQYVDYCQSAQSSTKGQIFRGSKLQVEEPEECSSISNARKEQEHEDLSPLSVLEPTFLNESCWSSDCCSGSSDGSKGYSSSSEVKNMPKNFLSNPPSVDAEAKTTDSVSSSSIDASDTSASIDASDISDITQCSKKSRNSELEYIGDVLGNVNLTKGGLGSLFISQDDVSVMDPHLFNKLESMNLYTQGKKNLDRRGYRKLLFDCVSECLETRRLTYFRAGYAAWSKGMAAMSRGIETEVCNEIGGWRSMGEWVEDELVDKDMSSGLGTWVDFRVEEFETGEELEREILSSLVDEVIGDVFVRRRDGRSVNL

SEQ ID NO: 47243 - protein, 204 aa, Oryza sativa
MDEVPGDARLGWIRQAVLLLQRARPSTPPPKQADAKGTRPDGVGEQQGVKRPVDHQIRVFFSVAASSVAENDLPDYFYSLSNEEIRNEAKMRRGRLEQSWLLIPKSYKEKQALAARQKYKQALIRIPFPDGVILQGVFLPTEPISSLYEFAASALKQPSLEFDLICPAGPRTRVTPPFPQPGERAHTLLDEDLVPSARLTFKPK

SEQ ID NO: 47244 - protein, 284 aa, Oryza sativa
MPLPVMGGAAAEHPALQAQLSSTATELMQYAGFTDEVFAAALATGAGAGAGGYMGLDDPLCPQQQHSGAMLPAAAAAAGEAFFSKDAHAAQAAFFAAAGGGGGSMVMSMMGMDEIGEYQRMMECGGALLGATHAADGADMAFGNAAAAELQMGGGGSSPARLPATGTTETTSLEDTSFKTVRLSNEERKEKIHRYIKKRNERNFSKKIKYACRKTLADSRPRVRGRFAKNDDYCEASRSIGSQNHEEYEQIGGVKGEDMLDSDALAHISGMSSYMYNHTVESWI

SEQ ID NO: 47245 - protein, 234 aa, Oryza sativa
MVGNRIWFGGLFTSSGRRRQINAEKTFELSPVQEQRLQKLKERLNIPYDQTRRDHQEALRALWSASFPDAELSSLISEQWKDMGWQGPNPSTDFRGCGFVGLENLLFFATTYPASYQRLLLKKQGMRATWEYPFAVAGVNVSYMLIQLLELNAERPKSLPGINFIKVLSEHEEAFDVLYCIAFEMMDAQWLAMRASYMQFKDVLEATKQQLERELSLEDVNGIRDIPAYNLLYK

SEQ ID NO: 47246 - protein, 424 aa, Oryza sativa
MAAAAVTKSPPVLVPPAGPTPGGSLPLSSIDKTAAVRVSVDFIQVFPSSAEAAKDQAASVAAMREGFARALVHYYPVAGRIAEPVPGEPEIDCTGEGVWFIEAEASCSLEEARNLERPLCIPKEELLPRPPPEVRVEDTVLLAQITKFTCGGFAVGICFSNLVFDGQGAAQFLKAVGEMARGLPEPSLKPIWARDAIPNPPKPPLGPPPSFTAFNFEKSVIEISLDSIKRVKDQVASETNQKCSTFDVVTAMMFKSRTLAIDFAPDADVRLGFAASTRHLLNNVLPSVDGYYGNCVYPGGLAKTSQEVKDASLVEIVTAIREAKDVLSTRFLDWMSGGAKENHYNVSLDYGTLVVTDWSHVGFNEVDYGFGEPSYVFTLNDDVNIVPSVVYLKPPKPKQGIRLVLQCVEAQHSKVFGEELQKLA

SEQ ID NO: 47247 - protein, 125 aa, Oryza sativa
MLEAVIPAVWSAVHGWFTPAVLFLVLNIVIGTIAVTSKVTASSSTAGGGGEGVGYGAWAGGGGGGGGEQRRFSRVPSMALDRLRSFNLSGGSPQPPLPLLLPRRPRWWAGCWIWAPAMRRRRRRW

SEQ ID NO: 47248 - protein, 484 aa, Oryza sativa
MADHQPAASSPKRKKKHSKKPEDSNATVDDSLAAAASPSPKKKEKHSKKKREAIDATMAAASPKKKEKKHSKKQEDTNVPEKKREVVHVTVDASLTGAAAAGAAPVVAYFPTGYDPLAAGGGRKGREAPRTRLFRHTKHPSRIELVVGAATGGGGGPDFVGRSYAGEAVLPQLTGYALGVLDKASGTLKVVPIAANKKLAHSQHSGAVGEAVSSAGDADLKVQDITKAFGTQKDKAKDIKWQSLNEQRNDPSAFMDLDLGNADTSVGANESQEPTVRNIPPYDPAADTSERAYLFDEIIPKSIRPHLVDIIGHFESGEISSKGYGSFVSNRVNKLQELQGEDKERLAWILSYITHLLSLLARNSSMSKRHRKENQATSGPVIPQYVYRKMVLMFTEPGSSALSTEKHELLINYILVLTLYADDFRSDPKDICEDLKMTRQMIKPYYDQLGCKSSSAGAFKSSVMTLPAPLKFPKEATRRKRRRF

SEQ ID NO: 47249 - protein, 696 aa, Oryza sativa
MSYASGGGGGGELATKRSAFHIDYGGGVSLRRLAQPEALARGMITQGSAQLRTLGRSLRTGAAMAVVFQEDLKNTSRKIFDPQDRLLVRLNRSFVVSCIVSIAVDPVFFYAPQVTANGGNLCVGISRDLAISASVVRTVVDLFFAARIVLQFRTAYIAPSSRVFGRGELVIDTAQIAARYFRRFFAADLLSVLPLPQIVIWKFLHRSKGAAVLSTKDALLIIVFLQYIPRVVRIYPLSSELKRTSGAFAESAYAGAAYYLLWYMLASHIVGASWYLLSIERVSDCWKKACNEFPGCNKIYMYCGNDHQKGFLEWRTITRQYINETCEPRDGVMPFNYGIYTPAVRSDVIKSNDFTSKLLYCLWWGLANLSTLGQGLQTSIYTGEALFSIFLATFGLILMAMLIGNIQTYLQSMTVRLEEMRVKRRDSEQWMHHRLLPQELRERVRRYDAYKWVNTRGVDEEVLVANLPKDLRRDIKRHLCLGLVRRVPLFANMDERLLDAICERLRPALYTERTFIIREGDPVDQMLFIIRGCLESITTDGGRSGFFNRSLLEESDFCGEELLTWALDPKAGLSLPSSTRTVRALSEVEAFALHSDELKFVAGQFRRMHSKQVQHTFRFYSQQWRTWAATYIQAAWRRHLKRRAIGSSTGLKTTMLVSRFAANAMRGVHRQRSRRADEVLMMPMPKPSEPDFGADY

SEQ ID NO: 47250 - protein, 145 aa, Oryza sativa
MGNSLQLPCPCQEATAVATSGVKKRRKKSPATAAVKSSKAAAAASSMHVVPVIDTPGEEEEMRMAWPGCHVEPAVDGGDGMRVKVLMKRKDAAELMARLEERCAVERKAKMVELNAGLRGGHGHGHGGGGARDAWAPRLVAIPEN

SEQ ID NO: 47251 - protein, 476 aa, Oryza sativa
MAMETTSQDSQVIMGRYKLGRLLGRGTFAKVYKAYKLATGEAVAIKVFDKEAVQRSGTVEQVKREVDVMRRVHHRHVIRLHEVMATRSRIYFVMEYASGGELFTRLSRSPRFPEPVARRYFQQLITAVEFCHSRGVYHRDLKPENLLLDARGDLKVTDFGLSALDGGLRGDGLLHTTCGTPAYVAPEVLLKRGYDGAKADIWSCGVILFVLLAGYLPFNETNLVILYRNITESNYRCPPWFSVEARKLLARLLDPNPKTRITISKIMDRPWFQQATCPLGDMSLVASAPSVLLARKEASQQHDDEEDDGFAREKKKRSNVIMSSPVIDVRPSSMNAFDIISRSRGLDLSKMFDAEERRSEARFSTRETTTAIVSKLEEIAEAGRFSFKLKEKGRVELEGSQDGRKGALAIEAEIFKVAPEVHVVEVRKTGGDSPDFRDFYKQELKPSLGDMVWAWQGGDSPPLVPAAGRRPITKRS

SEQ ID NO: 47252 - protein, 142 aa, Oryza sativa
MIRFILLQNRQGKTRLAKYYVPLEDSEKHKVEYEVHRLVVNRDPKFTNFVEFRTHKVIYRRYAGLFFSMCVDITDNELAYLECIHLFVEILDHFFSNVCELDLVFNFHKVYLILDEFILAGELQETSKRAIIERMGELEKLE

SEQ ID NO: 47253 - protein, 427 aa, Oryza sativa
MIYTAIDTFYLTDEQLRDSPSRKDGIDEATETALRVYGCDLIQESGILLKLPQAVMATAQVLFHRFYCKKSFVRFSVKRVAASCVWLAGKLEESPRRSKHIIIVFHRMECRRENVPIEHLDVFSKKYSDLKHDLVRTERHLLKEMGFICHVEHPHKFISNYLATLEAPELTQEAWNLANDSLRTTLCVRFKSEVVACGVVYAAARRHGVPLPEDPPWWNVFDADEAGIQEVCRVLAHLYSLPKSQYIQVYKDNDSFTHRRTSDTNASKESPATTVASDKGTPVPSSSSQEKDALIKAGSDKVKEKGDDDGKTLPSEPNGKEGPAVNLNSEKSESNVDRSRERERDRSRGRDRDSRGRDSDRDSKGRDSDRERERDREADRDRQQRHHSKDRSSGYSDKEKSRHRSSRDRGDHYSSHSSRDKDRHRRQ

SEQ ID NO: 47254 - protein, 685 aa, Oryza sativa
MSPESTGGPVHPPSHKHHRRPYHPHSPSPSPLPQGCTDNCSDPMTTTPIGSPCGCVLPICVIVDLDVAPYLLFMRIAELEVEVAAGTFLKQSQVKIMAAIPSIQDDQKTRVTIYLVPLREQFDGYTASLISDRFWNNKIQINSSIFGDYEVINVTYPGLRSPPPSLPETSHGSDPTGTGEDPITADVHHGKNKKLDSWIIVVVAGSSITLIAACIGLGVLLLKWYKLRQLQEAVSPATTPAVNRRYGGRSTLSVSRVSSASASMLSTVATCTTSVKTFSLSQLEKATDGFDSKRVLGQGGFGRVYHGTMDGGDEIAVKLLTREDRSGDREFIAEVEMLSRLHHRNLVKLIGICIEHNKRCLVYELIRNGSVESHLHGADKAKGMLNWDVRMKIALGAARGLAYLHEDSNPHVIHRDFKGSNILLEEDFTPKVTDFGLAREATNGIQPISTRVMGTFGYVAPEYAMTGHLLVKSDVYSYGVVLLELLSGRKPVCMSDTNGPQNLVTWARPLLCHKEGLERLIDPSLNGNFNFDDVAKVASIASMCVHNDPSQRPFMGEVVQALKLIYNDAEAACDDSYSHRDSSCDQYDDYHGALALDSGSGSWWNRSSNPSGFFDNRNPLPVITMEYSSGRIEGARDPRFALSTGGHAQSPALQNRSGPIRMKKKLASFYRSRGSFSEHGQLPRH

SEQ ID NO: 47255 - protein, 76 aa, Oryza sativa
MVWRIELNKNECPKRIELVVAWMKFSHRFLSVVNGWSMTEFSMVDLVGCMKKGTEHKKQLFSELVVFSEYEIVLSV

SEQ ID NO: 47256 - protein, 42 aa, Oryza sativa
MHFGINRGPSLCSSIIVAHEIDVSSVKASSLFSLTMHIMHQG

SEQ ID NO: 47257 - protein, 446 aa, Oryza sativa
MREILHIQGGQCGNQIGAKFWEVICDEHGIDHTGKYSGDSDLQLERINVYYNEASGGRYVPRAVLMDLEPGTMDSVRSGPYGQIFRPDNFVFGQSGAGNNWAKGHYTEGAELIDSVLDVVRKEAENCDCLQGFQVCHSLGGGTGSGMGTLLISKIREEYPDRMMLTFSVFPSPKVSDTVVEPYNATLSVHQLVENADECMVLDNEALYDICFRTLKLATPTFGDLNHLISATMSGVTCCLRFPGQLNSDLRKLAVNLIPFPRLHFFMVGFAPLTSRGSQQYRALTVPELTQQMWDAKNMMCAADPRHGRYLTASAMFRGKMSTKEVDEQMLNVQNKNSSYFVEWIPNNVKSSVCDIPPIGLKMASTFIGNSTSIQEMFRRVSEQFTAMFRRKAFLHWYTGEGMDEMEFTEAESNMNDLVAEYQQYQDATAEEEDYEEEEEDEEVAA

SEQ ID NO: 47258 - protein, 759 aa, Oryza sativa
MEWSSMRWWCLAVVLLLSTPLLAAGYLQERKNYIVHLEPRDEAAAAAGDASVEEWHRSFLPQVAKLDSDSDGADGGPRIVYSYSDVFTGFAARLTDEEAEAVRATAGCLRLYPEEFLPLATTRSPGFLGLHLGNEAFWSHSGFGRGVVIGILDTGILPSHPSFGDDGLQPPPKNWKGTCEFKAIAGGGCNNKIIGARAFGSAAVNSSAPPVDDAGHGTHTASTAAGNFVENANVRGNADGTASGMAPHAHLAIYKVCTRSRCSIMDIIAGLDAAVKDGVDVLSFSIGASSGTQFNYDPIAIAGFKAMERGIVVSCAAGNSGPDPGTVGNGAPWMLTVAAGTMDRAIRTTVRLGNGDEFDGESLFQPGNNSAANPLPLVYPGADGSDTSRDCSVLRDAEVTGKVVLCESRGLNGRIEAGQTVAAYGGAGIIVMNRAAEGYTTFADAHVLPASHVSFDAGTKIAAYVNSTDNPTASIAFKGTVIGSSPSPAVTFFSSRGPSKASPGILKPDITGPGMNILAAWAPSESHTEFSDGVGLSFFVESGTSMSTPHLSGIAALLKSLHPDWSPAAIKSAIMTTSDAVDRTGVPIKDEQYRHATFYAMGAGYVNPALAFDPGLVYDLHADDYIPYLCGLGIGDDGVKEIAHRPVTCSDVKTITEAELNYPSLVVNLLAQPITVNRTVTNVGKPSSVYTAVVDMPKDVSVIVQPPMLRFTELKEMQSFTVTVRWAGQPNVAGAEGNLKWVSDEHIVRSPIIIPATAA

SEQ ID NO: 47259 - protein, 163 aa, Oryza sativa
MEAKIGRLVGAIGAFFSGGDNVPWCGRDIIAGVEREVAEAATEEHKNVSIMRLSWALVHSRNTDDVNRGIAMLQASLGGSKSPLEAREKLYLLAVGHYRNGDYPRSRQLLEHCLEIQPGWGQALSLKKTVEDKIAKDGVIGIGIATTAVGLLVGIAAAVARKN

SEQ ID NO: 47260 - protein, 198 aa, Oryza sativa
MDLAKFSPPQIKRILRAASLDREVFDALMLVKRFGSDVREGKRRQFNYIGIFTYWVNWIHATANMSIQKNVTTIQYIGYVALKIVEIGSMPLHHVFRQKSLLAPSCTWAPPPFPLFSFLFLSLHHRRCGRRCRLRRLHHCLREVGPGCACVVVVVEHLVSEPVSHAVSVTVQGRRRWWWRRHHRRLSTHPCHRCRGPP

SEQ ID NO: 47261 - protein, 509 aa, Oryza sativa
MRPAASSSSSSSRDRLTISRPTEKDDVVEEKRDGGDVTAAVPRLAVYGAGRVHEIERFSHYVAKQIGIEDVSECPHLCALAYGYLKKTEGYEQNLLAFFHNKINSDALLVLLIEELDKCILGYFSFHWKFATEVITQVLTAEQPRRKLKTMVLEATRKMRFERVSRKLKVTRLFSTLVEELKVIGVTCNDGQLRDADADVMVPAAHRDRSPVLLLMGGGMGAGKSTVLKQIMKGLFWSGAAAHAVVVEADAFKESDVIYQAISSRGHHNDMLQTAELVHQSSIDAAASLLVTALNEGRDVIMDGTLSWEPFVLQTIAMARSVHRQRYRMGVGYKVAADGNATEQYWEPVEGAPVPSGRRPYRIELVGIICDAYLAVVRGIRRAIISGRAVRVSSQLKSHKRFAGSFRKYCDLVDSASLYSTNTIAGAKLIGWKDVGSRLLVDVEEIGLLDRVSRINEEANGVHELYPDGHPTDGAGSVWEDLVSSPARAAIQRELREAILDSEACFPSP

SEQ ID NO: 47262 - protein, 199 aa, Oryza sativa; identical to SEQ ID NO: 30673

SEQ ID NO: 47263 - protein, 579 aa, Oryza sativa
MLRENNVVHRDLKPQNILLVANNENSLLKIADFGFAKFLEPSSLAETLCGSPLYMAPEVMQAQKYDAKADLWSVGIILYQLVTGSPPFTGDSQIQLLRNILNTREIRFPSDCDLSHGCIDLCRKLLRINSVERLTVEEFVNHPFLAEHALERTLSRTPSDIRDGFPFINSSPTRPSSQSSQEDCMPFPLDDESTGQDEGPVSDSKSAIKSYGFATSKRLDKTSGQSPTRHSSLVSKYIRGNNYASSSQRLDHPRRIKENKGDEGHNPKGGYPEDSPIIDSLEFVDQEYVFVHPEGSSSSMNDSRQRTMPSKLDSSSLSPPKLLTAVSAPRPIHGMAINRQQSGGTGSLDSHCSPVSGTSQGSADLNDAMDQPPSDCLTRVRLLEQYASTIAELVKEKIKDAKHLEGFSIQLVVLATWKQAIYICTSYASSATRENPSHDVTAKGFGSNAPHLLANSQLLYDTCMEIESQFLVQMEYAEELANTIGQTVDATEMPDAIEIIFQTALNLGRHGGVDEMMGKSASAMVLYSKAVSMLRFLLTEAPSLALNPALSLTRDDRRRLRTYIEAVNARLVPLQYQRH

SEQ ID NO: 47264 - protein, 350 aa, Oryza sativa
MSGGVISMVVAPWILACGFLLCSSSFLGAEGAIGVNYGMLGNNLPSPAQVISMYKAKNINYVRLFHPDTAVLAALRNSGIGVVLGTYNEDLARLASDPSFAASWVSSYVQPFAGAVSFRYINAGNEVIPGDPAANVLPAMRNLDAALKAAGISGIPVTTAVATSVLGVSYPPSQGAFSEAASPYMAPIVAYLASRGAPLLVNVYPYFAYAADAERVQLGYALLSASQSASVTDGGVTYTNMFDAIVDAAHAAVEKATGGQAVELVVSETGWPSGGGGVGATVENAAAYNNNLIRHVSGGAGTPRRPGKPVETYLFAMFNENQKPEGVEQHFGLFQPDMTEVYHVDFAASS

SEQ ID NO: 47265 - protein, 805 aa, Oryza sativa
MEAEDDERAEAEAEARREKEAGNAAYRKLYLETAVRHYTRGALLDPRDISFLTNRAAAYLLMSKYKECVRDCDEAVEKGRELRADNKLVARALARKASALLKLAACAADYDPAIRALQQSLAEHYSEETLAKLGEAEEARKEIEERERLDQEAADHHRDRGNDFFKQKRYQEAAMHYTEAMKKNPKDPRVFSNRAQCHIYLGALPEGLEDADKCIALDPTFLKGYLRKAKVQLLMGNYEIALATYVEGLKCDPNNLEVLDGLRRCAACIKRANGGDSRAEDLREILGDLHLNDDLCNKLQKSMDEAAVLKKEASDERLKRIESERLARTLEDLYLSQVQQRKETEESLSRVQQEFEQLKIQQDEVTVELQRVNEQNENLLGQLSDSREHFEWLLSEHDQLLRERDNAVREVEELRQKRGQMLSVLVTAMHCEFSSSEVESATENFSNSLKIGEGGFGCVYKGILRNMTVAIKVLRPDSLQGQSQFEQEVSILSRVRHPHLVTLLGACSESSTLVYEFLPNGSLEDFLMCSDKRQTLTWQARIRIIAEICSALIFLHKNKPHPVVHGDLKPANILLGVNLVSKLSDFGISRLLIQSSTNNTTLYRTMHPVGTPLYMDPEFLSTGELTPQSDVYSFGIVVLRLLTGKPPVGIKNIVEDAMEKGDLNSVIDTSVGEWPHLHIEQLAYLALRCTELSRRCRPDLSGEVWAIVEAIRDAALSSPSSSRSAQDQNSPPSYFICPISQDIMDDPHIAADGFTYEAEAIRSWLCNGHDTSPMTNLLLEHEELIPNRALRSAIQEWLQQHSMSL

SEQ ID NO: 47266 - protein, 639 aa, Oryza sativa
MWENLMSVLPRNNKKSRVITTTRMSNVASSRSPRSNGHIYEMESLNDADSKELFSKIIFDHKGKCPKALDEIADEILKKCGGIPLAIITLASLLAKKPKTRKEWKRVKSSIGNACELEGMRQTLSLSFYDLSYDLRNCFLSFSSFPEDYEIDRERLVLRWIAEGFISGKEQQELMEEEGNNYFNELVNRSLIQPIDIQYNGSARACRVHDLMLELIVSLSKEENFITTLNGPECLPMPSKIRWLSLHSNENEVMQVVTNNRRHVRSVSFFPPVAQLPPFVEFQAMRVFDVKGCQFGEHKKMKNMESLIQLKYLNLAYTNVTELPKEIGEVHFLETLDVRNCQIQSLPPSLCQLQKLVRLFVSLGVTLPDKIGKMQALEELSHVAILCNSLNFVKALGELTKLRVFRVDCRYSWLNGKKQAPRQSVSTHEDVLLSSLQNLLKKKNLRSLEIDLTNGSSLVFSLMNPYCPLPQLEELVISNSISRVPRSMRSLKDVIHLEIKLDRMEEEDLHIIRDMSHSLLFLKIHLEITPEERLIIDSEGFECLKQFEFCCVGMGLKFVQGAMPDLEKLDLDIGVRKTMSKYGGFDFGIKNLEALKHVGVKLDCQYAENREIQSAEATIRSGVLPRRIMPQIQRIGVNR

SEQ ID NO: 47267 - protein, 536 aa, Oryza sativa
MVQHHRATLLLHQQQRKGDATAEEGQQLVAEEGAGKMKELRRRLVDYACHHRKHGHDALLRMLAGFALVSCLLLLLPGSPFSAAVDDLLQMGRTRLDDETPPPPPCAAVSNGTICCDRTAMRTDVCIMRGDVRTEAASNSLFLLVPPPDNSTAAAGRDERIRPYTRKWESSIMSTIDELRLRAVPEGGAAPASCDVRHDVPAVVFSTGGYTGNVYHEFNDGIIPLYITARQYNKKVVFVMLEYHDWWMTKYGHIVEQLSDYAPIDFTNDRRTHCFPEAVVGLRIHDELAIDAARMPGNRTIQDFRRMLDDAYRGRIQMIIEEEEKAAAVALGTPTQGSIRKKSALKDDKPRLVIVSRNGSRAIENEAELVRAAAGAGFRVAVLQPRQDTELAKMYRALNASDVMVGVHGAAMTHFLFMRPGSVFIQVVPLGTDWAAETYYGEPARRLGLRYMPYKIKPAESSLYRQYAKDDAVLTDPDTVNAKGWQVTKKVYLDGQNVRLDMVRFRRRLRDAYDHWAELRRRHNADSTETEQRKPW

SEQ ID NO: 47268 - protein, 519 aa, Oryza sativa
MVSALAGLQDHLKLARDYALEGLYDTSIIFFDGAIAQINKHLTTLDDALIRTKWLNCKKAICDEVEIVKQLDAQLKAFKEAPGARRSSSPPIRSNNKSFVFQPLDEYPTSSPAPFDDPDVWAPPRDTPNRRPTRGQSSTRKSSQDGAWARGPSKTGTPSRGAKPNGSKGNSGARSSTASSTGGRKGKSSSSKADSVSSDAEEGKSKKGQYEGPDMDLAAMLERDVLDSTPGVRWDDVAGLSEAKRLLEEAVVLPLWMPEYFQGIRRPWKGVLMFGPPGTGKTLLAKAVATECGTTFFNVSSATLASKWRGESERMVRCLFDLARFYAPSTIFIDEIDSLCTSRGASGEHESSRRVKSELLVQIDGVNNSSTTEDGQPKIVMVLAATNFPWDIDEALRRRLEKRIYIPLPNFESRKALININLKTVEVATDVDIDEVARRTEGYSGDDLTNVCRDASMNGMRRKIAGKTRDEIKNMSKDEISKDPVAMCDFEEALAKVQKSVSPADIEKHEKWQAEFGSA

SEQ ID NO: 47269 - protein, 266 aa, Oryza sativa
MSSRLRFLFSLAAAIAAASLLAAALRRRAPPSGLAARLVPAPMAAAAARNRGFVLWLHGLGDSGPANEPIRNFFSAPEFRLTKWAFPSAPNSPVSCNHGAVMPSWFDIHELPMSSGSPQDDSGVLKAVENVHAMIDKEVADGIPPENIFVCGFSQGGALTLASVLLYPKTLGGGAVFSGWLPFGSSVTERISPEARKTPILWSHGIADNVVLFEAGQAGPPFLQNAGFSCEFKAYPGLGHSISKEELYSLESWIKNHLKASQEKEN

SEQ ID NO: 47270 - protein, 397 aa, Oryza sativa
MEASRPAHARHMESNAARAAAAAAGEGVGDHDDDGEEEEEEEKWREALAAAWGQSRAKREAIRACYAAVKDMIRAEKDGADMRRLGVAMGEIKQLHHKVQRPKEQVADGEALLELVNSLAITAKSKKKDGPTPSEFVTSLLTKFGVRASLLDASIESFSCSDLGAMASPLFMTATGCQTMNGALNLAIEERRKRVARRLFDRFPSKPAGLYETTPDLDERNDTDKNMAVMFKLLRKNKCVKLENLILNRQSFAQTVENIFALSFLVKDGRVEIDVDDKGNHFVVPRNAPAAELITSREVINSQYVFRFGTKDWKIMEGVVEPGDELMPHRQNNIGEHYNNAKSYSASEPQRKRDEFAQGEGMDETLIKPCAEDVILKRKRRSEAESLKHWFSSCKWQ

SEQ ID NO: 47271 - protein, 262 aa, Oryza sativa; identical to SEQ ID NO: 30706

SEQ ID NO: 47272 - protein, 844 aa, Oryza sativa
MRLLALAVASIVLANLHLLGVHGRDLLLSCGSNATVDAGGRRWIGDMAPGLNFTLSSPGIAASQAGSSNGNEIFGLVYHSARFFSTASWYNFSVLPGNYCLRLHFFPYTFGNFSGNDSLFDVTANDFKLVSKFNVSEEIVWRSTVSNSAINAVVKEYFLLVGSRGLQVEFDPSPGSFAFVNAIEVMLTPDNLFNDTVNKVGSAGNGQLPLGLSNRGLETMYRLNVGGHALNSSSDQYLHRPWYTDEAFMFSANAAQIVSNTSSVSYLSNNDSSISPIDVYETARIMSNNMVVDKRFNVSWRFYVHPNFDYLVRLHFCELFYDKPNQRVFKIYINNKTAAEDYDVYVRAGGINKAYHEDYFDNLPQQVDSLWLQLGPDSLTSASGTDPLLNGLEIFKLSRNGNLAYVLGHIDMGNQRGISKDRNRKILWEEVGIGSASFVTLTSVVLFAWCYVRRKRKADEKEAPPGWHPLVLHEAMKSTTDARAAGKSPLTRNSSSIGHRMGRRFSISEIRAATKNFDEALLIGTGGFGKVYKGEVDEGTTVAIKRANPLCGQGLKEYETEIEMLSKLRHRHLVAMIGYCEEQKEMILVYEYMAKGTLRSHLYGSDLPPLTWKHRVDACIGAARGLHYLHTGADRGIIHRDVKTTNILLDENFVAKIADFGLSKTGPTLDQTHVSTAVKGSFGYLDPEYFRRQQLTQKSDVYSFGVVLFEVACGRPVIDPTLPKDQINLAEWAMRWQRQRSLDAIVDPRLDGDFSSESLKKFGEIAEKCLADDGRSRPSMGEVLWHLEYVLQLHEAYKRNNVDCESFGSSELGFADMSFSLPHIREGEEEHHSKPSSIREDPDT

SEQ ID NO: 47273 - protein, 50 aa, Oryza sativa; identical to SEQ ID NO: 32344

SEQ ID NO: 47274 - protein, 349 aa, Oryza sativa
MRKKDPVPFSQKFPNADPLALKLLQRLLAFDPKDRPTAEEALTDPYFKGLSKIDREPSCQPIRKLEFEFEQKKLSKEDIRELIFQEILEYHPQLQKNYRNGRERATFLYPSAVDQFKKQFSNLEESNGSGSAIPMERKHASLPRSTTVHSTPIPPKEQPLAASLKSSRPVSDEPCKNPWVMGGFSGNIPTSSQVSQVAKPVAPGRPVGSVFPYETGSTNDPYGPRGPVMSSGYPPQQQISQAYGYHQVPARMNCVEQSQAMDAYKMHSQSQTQAYAYPNSKVTADVALDMRGSTFHHSAGSKNGSLDRMVTQTDIYTRSLNGIVAAATSAGVGTNRKVGAVPISTSRMY

SEQ ID NO: 47275 - protein, 131 aa, Oryza sativa
MSSSSSSAGGSHAGLALAATAMALSGTLVLFSLCRANKPPHHDDAPARLRPCLSSSEKRKREKARRGSKKRVRFAADVVDNDSNASSRPAAAEPSCRNAAATAATAMPANREALYRGMLRGRSMLRVACSY

SEQ ID NO: 47276 - protein, 260 aa, Oryza sativa
MSSSSSSFKPNPLSLSVPDPALDRWLRDSGYLDILDSSASASASASTSSSPSATTTTAAASSTSTLINPTSAAAAVLAFARTLASVLALNPFARLSTTDLAAPTPSWSLAFLGPPGAASYSWPPTSTQARLRVQENVRRYARNYAALSILVFACCLYHMHCHLPSSLIVALIAFICSQSLRLRNISATAGVSRYRMPMALLGMLAILIVWESVRYCRERWGLATRAPGVGQFLLHSAQIGEVSIANVFLHNKSLERKIEV

SEQ ID NO: 47277 - protein, 180 aa, Oryza sativa
MNNQQSDFQPMTAMSMSKSCSLTDLLNTIDCAALSQFLLDGSSDAIAEPPAPPSPLIYTTPHPNYQTLNYNINSNSSMPHAFESRLDHHDGYVNNYNVNGLRRKRMMACSATSFDDGSSSNDFVHAVVKKPQLLPSDSRGSGFGGGYCNQQLSETATGFQFQNGNLLSHPFPLNNHLQMQ

SEQ ID NO: 47278 - protein, 202 aa, Oryza sativa
MEPEAMPAPDPNDARQRFLLELEFIQCLANPTYIHYLAQNRYFEDEAFIGYLKYLKYWQRPEYIKYIMYPHCLFFLELLQNANFRNAMAHPASKEVAHRQQYFFWKNYRNNRLKHILPRPPPEPTPAPAPAPAPATVPPAAPVPSTVVPPVAAPSSSLPPMSAAGASAMSPMQFAGTPGTNIPKNDMRNVMGGQGGRKRKMG

SEQ ID NO: 47279 - protein, 117 aa, Oryza sativa
MARLQQGMSHMQRMLEACMDMQLELQRSVRQEVSAALNRFIGEQGESKETIDDGSKWIHVRKGTCCICCDTPIDSLLYRCGHMCTCSKCANELVRSGGKCPLCRAPIIEVIRAYFIM

SEQ ID NO: 47280 - protein, 139 aa, Oryza sativa
MRSLRILSAPMAQRSSAPFIAHCLPLPYLCSVQVVPGIPVSHPPPPSHRRSRLSSTSMGSLDLGAAQEDRRHSRRHTRSSSGFLLLPCRMGLLAGDLLPSHPQVTPSIPRCCNAFDPPLLPHLVTFQSMPSPRSTCLDP

SEQ ID NO: 47281 - protein, 523 aa, Oryza sativa
MAFPAPSSSSPRRRGRGLAYLLVSVLLLASRVPGAAGADSEFEDGVSPKFPGCDNPFQKVKVTYWVDGDERSSLTGITARFGEVLPATGSDGDKRKAVVPAPKTGCAKSSAPLASSIAVAERGECTFLEKAKTAESGGAAALLLINDEDDLQKMVCTQNDTVPNIGIPVVMVSQSAGRKILSGMDGGAKVDILMYAPEKPSFDGAIPFLWLMAVGSVACASVWSFVVVGDEDKNAPTLGGEEAADSEIVELQTKTALVFIVTASLVLLFLFFFKSTWSAWLLVVLFCLSGLQGLHYVASTLIVRTCDRCREAKVALPVLGNVTVVTLVILPLALIFVVVWAVHQNSPFAWVGQDLMGICMMILVLQVVHLPNIKVATALLVSAFMYDIFWVFISPFIFKKSVMITVARGSDEGPSLPMVLKMPKEFDTWNGYDMIGFGDILFPGLLVAFSFRYDRANGKDLTDGYFLCLMIGYAFGLSCTYVGLYLMKSGQPALLYLVPSTLGTIVTLGAKRGELSQLWNAKV

SEQ ID NO: 47282 - protein, 235 aa, Oryza sativa
MAPRAATVEKVAVAPPTGLGLGVGGGVGAGGPHYRGVRKRPWGRYAAEIRDPAKKSRVWLGTYDTAEEAARAYDAAAREFRGAKAKTSFPFASQSMVGCGGSPSSNSTVDTGGGGVQTPMRAMPLPPTLDLDLFHRAAAVTAVAGTGVRFPFRGYPVARPATHPYFFYEQAAAAAAAEAGYRMMKLAPPVTVAAVAQSDSDSSSVVDLAPSPPAVTANKAAAFDLDLNRPPPVEN

SEQ ID NO: 47283 - protein, 141 aa, Oryza sativa
MNSESRSKYASTSSNTYYSSRTYGKSSTTSADEEEPFYGFGDFLRDLQAEFQNWEAGLNSEQKPKSLWEELAAIGEEFVEFLENELKIDDSSDAEDNANDPYTQSGGKNKQDVNTSTSSFDDSVSEIEAALEKLKKELGLS

SEQ ID NO: 47284 - protein, 213 aa, Oryza sativa
MRWGSYPMVGKNDLENYTFCTYCSKPKPPRAHHCRSCKMCVLDMDHHCPFIGNCVGASNHHAFVIFLISVVISCSYAAGMTIYSSYRIWPPLDFENLASTRRSMGYIKMLIEIIGTLASSAFFLSARGFVTVYLAFASLSVNAGIGVLLFQQLSYIYEGNTYLNRLSSPNVMHGERGLQNLIRFFGCPYSVSRVLSGYSNTGKLQDNSSSKLL

SEQ ID NO: 47285 - protein, 83 aa, Oryza sativa
MFFYLEEFSDGTLKNLQGFMAIPMIFLQAVQLLSQACCLPLPELLDMKTESRNAESRFAKSSNINMLCIPIETCWVINSLVFF

SEQ ID NO: 47286 - protein, 571 aa, Oryza sativa
MDLHQLLKYRLTGANVVYEIPTENNLQNSPWQANPLKYEFSDSPYTPLSSQFECDNLSALTNTPDNQSSAETISAQPISPLEADSSYRQAGILLQENIQVGADPLYATSRHNMQHALREIETVLMAPDTDDATTSTEHEFEEIKPAQLVRQRSRTWSHESRQPLPGVGRSQFASGGYPTASYEFRPEKRQRELREDPQIIVKQLLTRCAEALSEDRTEEFHKLVQEARGVVSINGEPIQRLGAYLLEGLVARHGNSGTNIYRALKCREPESKELLSYMRILYNICPYFKFGYMAANGAIAEALRTENNIHIIDFQIAQGTQWITLIQALAARPGGPPRVRITGIDDPVSEYARGEGLDIVGKMLKSMSEEFKIPLEFTPLSVYATQVTKEMLEIRPGEALSVNFTLQLHHTPDESVDVNNPRDGLLRMVKGLSPKVTTLVEQESHTNTTPFLMRFGETMEYYSAMFESIDANLPRDNKERISVEQHCLAKDIVNIIACEGKDRVERHELLGKWKSRLTMAGFRPYPLSSYVNSVIRKLLACYSDKYTLDEKDGAMLLGWRSRKLISASAWH

SEQ ID NO: 47287 - protein, 59 aa, Oryza sativa
MIRPRRRRRGDVGNRRRLPAPTVPPAACGGVSWPHIHIHVILILCPLFIPHHPPMSLID

SEQ ID NO: 47288 - protein, 363 aa, Oryza sativa
MASSSKTAAGNPLGGNAISEKLSKSNHALWKAQVMAAVRGARLEGHLTGATKTPNALITTTAGDKGEKEVTVRNPEFDDWVATDQQVLGFLLSTLARDVLAQVATCGTAAAAWQMLEEMYSSVTRARFINTRIALSNTKKGTLSINEYVSKMKALADEMTAAGKIVDDDDLISYIIAGLDDTYEPVISTIVGKDTMTLGEAYSQLLSFEQRLALRHGGDSSVNLANRGRGGGGGQQRGGNTGNGGRGRGGNNNGANRGRGRGNNGGARPPGGVDNRPKCQLCYKRGHTVINCWYRYDEDFVPDEKYAGSATSYGIDTNWYVDTSATDHVTGELDKLTVRDRYKGQDQVHTASGAGSGHEETSV

SEQ ID NO: 47289 - protein, 101 aa, Oryza sativa
MFFYYKLFYYKILMCFCKKKSVFFSIVVSVYFPHDATALTQPIYAFAYRYTRAQLTICPLGSWLPQLDNGHASPEPNGLMGFSFFYYSLFSPTHFDISWYK

SEQ ID NO: 47290 - protein, 457 aa, Oryza sativa
MVRSYVEKPNCIILAISPANQDIATSDAIKLSKEVDPSGERTFGVLTKLDLMDKGTNALDVLEGRAYRLQYPWVGIVNRSQADINRKVGMIVAREKEREYFENSPDYAHLASKMGSVYLAKLLSQHLEAVIKARIPSITSLINKTIDELESELDTIGKEVAADPGAQLYTILELCRAFDRVFKEHLDGGRSGGDKIYGVFDHKLPAAFRKLPFDRYLSVQNVKKVVSEADGYQPHLIAPEQGYRRLVEAGLAYFKGPAEATVDAVHVVLRDLVRKSIGETEPLRRFPTLQAAIATAANEALERFREDGRSTALRLVDMEAYLTVEFFRKLPQDPDSGSKVGNNTNESNGSGSGSVTVDRYGDGHYRNIASNVSQYIKMVGDQLLHKIPKAVVHCQVREAKRSLLNHFYVHIGKKEASQFGHLLDEDPAMLERRQQCWKRLELYKSARDEIDSVAWTR

SEQ ID NO: 47291 - protein, 274 aa, Oryza sativa
MLYIVGLGLGDERDITVRGLDAVRRCAKVYMEAYTSLLSLGLDPSALSNLEKMYGKEITVADREMVEERADQMLREAADADVAFLVVGDPFGATTHTDLVVRAKNMGVEVKVIHNASVMNAVGVCGLQLYRYGETISIPFFTETWRPDSFYEKIQNNRRLGLHTLCLLDIRVKEPTLESLCRGKKVSEPPRFMSVNTAISQLLEVEELRGGSAYGADSLCIGVARLGSDDQKIVAGPMKKLLDVDFGPPLHCLIIVGETHPVEEEMIEFHMIKS

SEQ ID NO: 47292 - protein, 327 aa, Oryza sativa
MLRLVGIGERLLAVGTNRRAAYFSQPSHRSGYYTAARDNGLSAKRKIPTVFSRMFSHYKVIVRKNKAGDHKCRNRISRGFRTFSGTVANSSATQHAQLAWKRLSHTYMYSGPRFPLISRAACALSFSFTRFHVVPGVMALAFGKFALSRPVLADSPHLPTMEGIVTNARDTRQFLSSIVWSIWEGVTLLIRAVHLAILFFPATALSPFADTFSVGFRRRWLRLVRRTLEIAGPAFIKWGQWAATRPDLFPSDLCVELAKLHSAAPAHGFAYSKATIEKAFGRKLSEIFETFEEEPVASGSIAQVHRATLRDQHTEKHVAVKVRHPGG

SEQ ID NO: 47293 - protein, 327 aa, Oryza sativa
MGGGSIRAAAKAAMIGGYRSASAVRRAVLPASPAPQTAPSAAGEGRKAASTYAAIDDWVIPDREVFGPVPTHEEAMAATLDLKESFQFAKSAQLEPLPSGDLDVPTKVGQEGLVHSETPQDLVHSETQGLVDLGASQDLVHSETSQGLVHSESSQGLIHSKTSEHEDNHEISLVSSGAPGRVVQAFTMLQDSPEAQEVVASLASDQNVWNAVMRNEKVMKFYKTYATKLNEDEVEGSESDSVQNSSELGSAGEAFMCYVEKMKALVSEMMTNLSSIMQDLVATSDEGQSKGKLKTMILDSKKDFANAPSAFVLLAIASIMVVLLKRA

SEQ ID NO: 47294 - protein, 404 aa, Oryza sativa
MAEICCEVVAGSSSEGKGPECDTGSRAARRRRMEIRRLRVVAERGAEEETSGKRRRLDGGGGEASTDEEDREVERARYGFTSVCGRRRDMEDSVSACPGFLPGHHFFGVFDGHGCSHVATSCGQRMHEIVVDEAGAAAGSAGLDEEARWRGVMERSFARMDAEAVASSRGSVAPAPTCRCEMQLPKCDHVGSTAVVAVLGPRHVVVANCGDSRAVLCRGGAAIPLSCDHKPDRPDELERIHAAGGRVIFWDGARVFGMLAMSRAIGDSYLKPYVICDPEVRVMERKDGEDEFLILASDGLWDVVSNEVACNVVRACLRSSGRRERNRSSPTSNLSPRQSSSSGDEAPNDGAPSAAAGSESDEESAAEEDKACAEAAVLLTKLALARQTSDNVSVVVVNLRRRKL

SEQ ID NO: 47295 - protein, 205 aa, Oryza sativa
MAEDSGAILRHISSLKDMLDKVNEEIEENIRKTREIESEIVKHSETEKEYIMKEPELMKGVSIAEFELNGIIQVAAAETDSLKVMEGNLEFQKATLNGIRKRFSNKMEKFINESKGFQANMLGDLNKDLVLLLKEKGSLGDESENLKMKINAIESSSRDYFADILEELNMENSVLESELQYKISEYMDVMKDISNLKALFSSINS

SEQ ID NO: 47296 - protein, 362 aa, Oryza sativa
MDGEIGEDMLTEILVRLPYKSLARFQCVATSWRRLISGDYLRRRLPLITSGVLYQEGRGGGGGGGGEGRRRQAYTYACASGGGDHGGGVAEADMGFFPGHETSTIIDGCNGMLLYYASQPAAAFHVVNPTTRRWARLPPPRGKTLLSVLAFDPSASPHYRVVCFTGWLPRGASVEVFDSEGGAWRDHELDFGLDTDAMSATMHYFDGAIHVLAYSGHVVRIDLGTMACAVTALPAPVSCRARAGHCRGRLRYASSDGTRLKFWELKNAATSEWALKHELGVNDLVAGEASGACQAVTFLFMAFHPDREMVYLWTPWKLVAFDMEKRRVEEEWEVGPEKEKEGAHLIQIWLFPFSRHLANSLA

SEQ ID NO: 47297 - protein, 155 aa, Oryza sativa
MVVKPWAHAPSSPQHDHFLQESTMAARKEAAHGFTSAAAWPDARIGGRRCRRQASILPARLLHHFVIVSLALLCSCFLLVGLVSTSFLCSPFQHHLKTGGDLAERAVGRCSSNVQRMFSCIYIFWVRLMCKFYIRTTIHYPLSQFVFLVYFLAFF

SEQ ID NO: 47298 - protein, 324 aa, Oryza sativa; identical to SEQ ID NO: 37050

SEQ ID NO: 47299 - protein, 671 aa, Oryza sativa
MTSSSRVRVGNLVPLNEGNASSSNGSVSSIPIYLGANVVGRNHLVVVDKRVSRKHLSLHASADGSIEAVVEGPNPIIVRSEGQRRKVCAQERVKIAHDDVLELIPGEYFVKYLNVGDNHKSSTSMGSSDFKKGKRLCEDDTVVIKRNRQIMEDEALARSLQKSFAEESSTISGLGCDQMLSSLDSAGFSERNNERIHSVDYLKDVLSLTFRLMRVQGLPSWTNTSSVTIQDVIQGEVLLAVLSNYMVDMEWLLTACPSLRKVRHVLVIHGEDGASVELLKKVKPANWILHKPPLPISFGTHHSKAMLLVYPQGIRVVVHTANLIHVDWNNKTQGLWMQDFPWKDAKDVNRSVSFENDLVDYLSAIKWPEFRVNLPVVGDVNINAAFFRKFDYKSSSVRLIGSVPGYHVGPNIKKWGHMKLRSVLEGCTFEQQFCKAPMIYQFSSLGSLDEKWMSEFAFSLSAGKSDNGSPLGIGKPLIVWPTVEDVRTSIEGYAAGSCIPSPQKNVEKDFLRKYWARWKADHVGRCRAMPHIKTFTRYNGQDIAWFLLTSANLSKAAWGALQKNNTQLMIRSYELGVLFLPKTHQSVPQFSCTGKNNSNLNNLAPGKEIKTKLVTLCWKSDEEKEQSTEIIRLPVPYQLPPKPYGTEDVPWSWDKRYTKKDVYGSVWPRHG

SEQ ID NO: 47300 - protein, 151 aa, Oryza sativa
MSASIKGRQPRFFDWDYRWMSFPLEARHCKHPNDQSLATYRGHSVLRTLIRCYFSPVYSTGQRYIYTGSSDEYVYIYDVVTGDIVEKLSWHGSIIRDCTWHPYNLTIVSSSWDGYLARWEASGDEDDLSVLTENEQRTSPYRQSYTRHLLL

SEQ ID NO: 47301 - protein, 296 aa, Oryza sativa
MALLLLRRGGGFAAATVLAVVVVALVLSCGGGAEAAVRDLRVGYYAETCPDAEAVVRDTMARARAHEARSVASVMRLQFHDCFVNGCDGSVLMDATPTMAGEKEALSNINSLRSFDVVDEIKEALEERCPGVVSCADIIVMAARDAVALTGGPFWDVRLGREDSLTASQEDSDNIMPSPRANATTLIKLFAGYNLTVTDLVALSGSHSIGEARCFSIVFRLYNQSGSGGPTPTWTPPTARGSTRSAPAAATRTSPEAWTPPRSSSTTSTSRTSSASAASSTPTRRSSPTTPGPGSP

SEQ ID NO: 47302 - protein, 298 aa, Oryza sativa
MAVADVQDLPVEDLRDNEVITVDSEGPGKPLQSIPLVQDKDAIQLARTFVNEKVKELMEGVSEPGVLQSRLSKITSFLVQATSIAAGLHDEVPLQIRGQTAALVTQISGLEQQVEELSKKLCSTEDELEVTNAMLKETQAAMLEAQSDRATAITAMNSLAMRMGASFARLGTILDPPPNAADSLEKSIKQMTALVSLLGPVSHSHSLSLARSSLTVGIAALLCRERGIEGLREPSGMDTRQFVRSQGPEFHSLISQVVDSMEQRLAKMVEGSGWRDSGATKEPGKPADSNKGTMPEPH

SEQ ID NO: 47303 - protein, 373 aa, Oryza sativa
MTTKTKPGMAERLLLPLSMVLVQLFTIGALLLAKLSFNSGMAPFVLLAYRNLIGTVTMLPFAFWFERQMMKKVNYKVLGWIFFNALFGIVLAMGLHYYGLRATNAGYTVNFLNLVPVVTFIIAAIFRLEKLKLKTRSGMIKVIGTVICVVGTMVVSLYRGKLLHLWPTHLLKPAQLRAIGGSDDSTFPTHHNMLIGTLFLCGSCLSYAFWFIVQAKVNKEFPSKYFSTMLACLMGTIQAVVIGIAVDRDRSAWALHWDLQLITIIYSGVFNTAATFCLITWAVSRRGPTYPSMFNSLALIITVVLDSMLLGSDISVGSLLGAFMIIIGLYSFLWGKGKEIKEQQQQVPTNTEADQSKITYPKSNGEVRIMLDT

SEQ ID NO: 47304 - protein, 90 aa, Oryza sativa
MVSPSSAGTTVRLALVLVLGAWWYLGALKVSTACHPMQILRPERGWKVCQMNRSPIWLLLVISGLSICIGFVQRWVFLDLLTDLSMNFIC

SEQ ID NO: 47305 - protein, 653 aa, Oryza sativa
MAAAARSSGGMSDQLFVSIKLECPRLAEMGLVPHVFGSHPVAGAWDPSKALLMEQGEAALWGLSCIVPSHRETLDFKFLLKPKDNSSHCIVEEGPDRSLVCGSNEVEIRNALFKFNDETGVVECKIFVETEILSPFDLAASWKAHQEHLQPRVRGAHDVIMNADSESRAKGADGRHVPPQEEQRAIFVDRGVGSPEFARPTNETISMSNIKFDSEAKDMPAAEGAVAAAAVADQMYGPKEDRKLAIVLVGLPARGKTFTAAKLTRYLRWLGHETKHFNVGKYRRLKHGINQTADFFRGDNKEGVEARNEVAALAMEDMLSWMQEGGQVGIFDATNSTRNRRNMLMKMAEGKCKIIFLETICNDQNVLERNMRLKVQRSPDYAEQTDFEAGVRDFKERLAYYEKVYEPVEEGSYVKMIDMVSGTGGQLQINDISGYLPGRIVFFLVNCHLTPRPILLTRHGESLDNVRGRIGGDSSLSETGSLYSRKLASFIEKRLASERTASIWTSTLQRSILTAQPIIGFPKIQWRALDEINAGICDGMTYDEIKKIKPEEYESRSKDKLRYRYPRGESYLDVIQRLEPVIIELERQRAPVVVISHQAVLRALYAYFADKPLEELPNIEIPLHTIIEIQMGVAGVQEKRYKLMDAVNSTAGI

SEQ ID NO: 47306 - protein, 226 aa, Oryza sativa
MANPRRAIALQIHTQTTPLAAAPAAAPSPSLPSSLVHFLKRPASFPFLLSLFVLLTWISLRFHHPSPSASVLRAPVVHDPQANLVRYPAALYPTPIAADGRGWLLDPVAAARDAGLPGGALVCLSLHVGQIQPGGLRGNHRHHTCNETFVIWGAKTKFRLENADVNDRGYGEAMIAADEVAIVASARSTAHALINMDVRPTFFLGCQDTPINPNSSNTDYKVWKDI

SEQ ID NO: 47307 - protein, 523 aa, Oryza sativa
MAYRNTVCTPQVIDLETEQGHSHIHSESFNRTGNDSSDQGAQHAVRGVGNATNIGLSDMRSYYDAGMNHPHQPVHNLPPNLGVDSGFVFPSSMYNPCMSTTSMNQYVSHTQSFGLPSNQVVLGSMDEGSRNENAGESARGFIKRKNAAVAGSYHCANGFASSSSSHASLNPTHRPWDPSFESNVLPNTASYNPSEYHSQTSWPSMEGSSIPSNGFNLMGAHPESAQHGNYAFPTSHISQCFQPTSNTWISQSANGIADGIPQWEYVNGMNNAPGRFSRSGMTETVNGSFREYQNGPSTLCRGPLPYFHQHAGMHAHNLLDHTQVQAPYQQCHNNPVLHGVNHSGNRFHLGPRIPVLFSNSERTFGPPHHPLLANPVNHRNIRILPPEHATIMDFSRLYEVSNVVDEHGDMRLDIDSMTYEELLALEEQIGDVNTGLAKSYIVEKLKTSLFVPGSSCMSNKSSESSMENDACIICQEEYQVKECIGTLDCGHRYHEDCIKQWLMVKNLCPICKTTALSTGRRSG

SEQ ID NO: 47308 - protein, 291 aa, Oryza sativa
MATAFDSPTASPAASPFDDDSFLRFDAAAPAPAPADAFPPSPEPYAFRPDAPSPFGMPEANGSLHDDPFAAPDNDNGPVLPPPNQMGADEGFLLREWRRQNAILLEEKEKKEKEMRNQIILDAKEFKKAFVEKRKLNVETSKDQNREREKLYLANQEKFHAGADKQYWKAISELIPHEIANIEKRGAKKDKDKEKKPGIVVIQGPKPGKPTDMSRMRQILLKLKHTPPPHMKPPPPPAAATGKDGAAGKDGAKVAAAASKDASANGSVPEMEKAAAAAAPAAAATEPIAAA

SEQ ID NO: 47309 - protein, 260 aa, Oryza sativa
MVCFASLRRALPLLLRATTTTTPRFLLPRALSGGVGGGAAVDARALLRGHSGWRGLRVAARMMLDSSDSAAAAGQMQPQQRAAGAVACSAQDGGAAGYASGGWAREDGKLKCGYSSFRGKRATMEDFYDVKLTEIDGQAVSLFGVFDGHGGPRAAEYLKENLFENLLKHPEFLTDTKLAISETYQKTDTDFLESESNAFRDDGSTASTAVLVGGHLYVANVGDSRAVVSKAGKAMALSEDHKPNRSDERKRIENAGGVVI

SEQ ID NO: 47310 - protein, 522 aa, Oryza sativa
MLMAASSPPPAAASSSGRLARVRLHDLAPYDGAATPAYGRAVHALSASLTRHGAALLDLPDAHAAILRCALQSARAFFRANDQPAFYLYRAGGSASRTSDDGGGDLVPACMDDAFRCFGEAARAALSAIARHLRLRTNVFDHLLDDTPLPVNEVSSSELLVAYSNQRLHTDHASSTACLGSSVPQVDRGFLVLIASDHPGIEVCDPNGQWYLADGISGPGDLLLLTGRALSHVTAGLRPTSRYRITNETRASLTFRLMPHANAILDCSPIAAAGHCVPQMYQPISASQFMDDLCAEERAVSNHSEAPSESQGSFISEPSLRSVLSDPLSGAFLEDAMVLLCGHSFGGLMLKKVIEMARCTICNGEVDPATLFPNLALRAVATVVKMEDDRRLFHNAALRKHRKEVTERMDVLKSTGGSRGNGELVLDAENPTSPRGVQYPFVVGERVLIMGNRRTPDKFVGKEAVITSQCLNGWYLVKAVDSGESIRLQYRSLKKVSELQLQSEMRLQPLTFLHNKYPSSGS

SEQ ID NO: 47311 - protein, 392 aa, Oryza sativa
MAPRQRLSFRRLVLLLVASTALACSVLAGGAVASVVETLGVRRHFGSPKRNTTGQHGAGRRRGGGSARSGLASCNMFQGSWVYDDSLPMYDTAGCPFVEAEFDCQKYGRPDKLYLKYRWRPSSCELPRFNGLDFLSKWRGKKILFVGDSISLNQWESLACMLHAAAPSSRTTYSRGTPFSTVTFQDYGVSVAYYRSTYLVDIVDESIGRVLKLDSISGDAWLGADMLIFNTWHWWTHTGRDQPWDFVQDGGQVMKDMDRLSAFSKGMSTWARWVDSNVDTSKTRVYFQGISPTHYNGADWGEGSRSCAQQTQPVAGSAYPAGPVPAQSAVRSAIAGMSKPVFLLDITLLSQLRRDGHPSGYSGGHPGNDCSHWCLAGVPDAWNQILYASLLA

SEQ ID NO: 47312 - protein, 245 aa, Oryza sativa
MGFTDEIVQVDVLGRHLLAGLSPDDYKGISEDEILYDASFEATEDKFVKYQITWWILLSVLLILAWGVGLLMLLYLAIWIYVCRKDFRSRKLCLTPHAIVYKVTRPATFPCFGVLRNEKHVVLHSVSDIVVEQGYLQSLFGIYSIRFENIGVRKPSSDDIKITGISHPHDFRKAVLVHLLNTSNLNLSRKAYVHDDQQSTSSKPITMSSVPPLGDLILEKLDEVEISVKKMQTLLEDVERSRMKT

SEQ ID NO: 47313 - protein, 250 aa, Oryza sativa
MMDTDHTEIIKEGEAVVEAMALLQSRFRRICVFCGSSQGKKKSYQDAAVELGKELVARNIDLVYGGGGVGLMGLVSQAVYNGGRHVIGVIPKTLMPREITGETVGEVKAVADMHQRKAEMARQSDAFIALPGGYGTLEELLEVIAWAQLGIHDKPVGLLNVDGYYNSLLSFIDKAVEEEFISPSARHIIVLAPTPKELLEKLEAYSPRHDKVVPKMQWEMEKMSYCKSCEIPGLKEGNKATIQAQRGSML

SEQ ID NO: 47314 - protein, 93 aa, Oryza sativa
MRTMHFLPSGLYLISSVTFALLSRQRCSRSLILLLPYTATFPILSPISSIIPMSVPILLLPCPTSIWTPLLMPQARWQCQAVDNSIQVHGHSR

SEQ ID NO: 47315 - protein, 97 aa, Oryza sativa
MKATQVATIILLTKIQALDREVGAVRSGASGTRTSTTAHRSSALAPAIQSPPTRCLPHSTASPPPEKADARRRTWKRCSSGPRIWRPNTTGPQASAS

SEQ ID NO: 47316 - protein, 511 aa, Oryza sativa
MAAMDLRVAAPASVAAAARCGTSLARPWPARAVGGGGGGGGRGRRLSVRTSVATTEAAAAAVGASEDAALEARDSKTVVAVILGGGAGTRLFPLTKRRAKPAVPIGGAYRLIDVPMSNCINSGINKVYILTQFNSASLNRHLSRAYNFSNGVAFGDGFVEVLAATQTPGSEGKRWFQGTADAVRQFDWLFDDAKAKDIDDVLILSGDHLYRMDYMDFVQSHRQRGADISICCLPIDDSRASDFGLMKIDDTGRVIAFSEKPKGDDLKAMQVDTTVLGLPQDEAKEKPYIASMGVYIFKKEILLNLLRWRFPTANDFGSEIIPASAKEINVKAYLFNDYWEDIGTIKSFFEANLSLAEQPPRFSFYDANKPMYTSRRNLPPSMINNSKITDSIISHGCFLDSCRIEHSVVGIRSRIGSNVHLKDTVMLGADFYETDLERGELLAEGKVPIGIGENTKIQNCIIDKNARIGKNVTISNSEGVQEADRTSEGFYIRSGITIVLKNSIIADGLVI

SEQ ID NO: 47317 - protein, 70 aa, Oryza sativa
MSALFNFHSFVTVVLLLICTCTFLKMHFPSILVRRTGFRGFFWKAARIGERLSPWVAIGCSVMGISIIFY

SEQ ID NO: 47318 - protein, 227 aa, Oryza sativa
MAIVGEEYCSAEERVLTVRKTSHFSPGDGFAAYDHRTGGLAFRADTYGRGHGGGAASAGELALLGPAGEALITVRRRRPSLHQRWEGYLGARADGQKPLFSARRSSILGGAAAGAVVELLAPLPASFSSTHAAAAELLRVDGSFPRRCCRVVAPKAESGGEAAVVAEIRRKVDEGARVVMGRDVFVLRVGAGFDAAFAMAIVLVLDQIAGDEADGNAGEETNRAMIW

SEQ ID NO: 47319 - protein, 425 aa, Oryza sativa
MAAASSFTAAAKFLAPVSARSAGDYKPPLPLPASASLRPGRKPAPRLRTALAVSSDVLPGNKAAPAAAAHSAVTREEALELYEDMVLGRIFEDMCAQMYYRGKMFGFVHLYNGQEAVSTGFIKLLNQADCVVSTYRDHVHALSKGVPARSVMAELFGKATGCCRGQGGSMHMFSEPHNLLGGFAFIGEGIPVATGAAFAAKYRHEVLKQSSPDGLDVTLAFFGDGTCNNGQFFECLNMAQLWKLPIVFVVENNLWAIGMSHLRATSDPEIYKKGPAFGMPGVHVDGMDVLKVREVAKEAIERARRGEGPTLVECETYRFRGHSLADPDELRRPDEKSHYAARDPITALKKYIIEQNLATESELKSIEKKIDDVVEEAVEFADASPLPPRSQLLENVFSDPKGFGIGPDGKYRCEDPLFTQGTAQV

SEQ ID NO: 47320 - protein, 338 aa, Oryza sativa
MLDRSPDVVAIHLKRFTSLDRSVEKIDKHVVYPLELDLKPFHCDPDINKELKYDLYGVVEHSGSPSYGHYVCSVRSSPSTWHLMNDSHVDLISEASALNQEGYILFYIRQGKFQWFSSLLEQKDDLHPENTSGASPVSVLENIDVDCPTSSGEATNSSGDKLEKDETSQCKTSFLEEPAKGCPIDGINKADLKDEIVPCISSHHDCVANRCPGSAADITNLDRPSTPSPKRKRFFSDDNEFNVFEFEDFGDEDETPLLGNLKFTSKAKKAKVESASKSTKGPCIDKNVTRLVRSMPSTRRKGIVDCLSQLNAEQDSGSCPRSHPLGKKKLGIPVPIKW

SEQ ID NO: 47321 - protein, 184 aa, Oryza sativa
MVELVVAQCNSLPGQAQLLLIWMSKNACRPSLKVIRLYLLGLFHKLQNISSNSSRCSSRSNSRSHSHHCSKQERMLLVLIIHRNLSTLTFLPKLRALCMSHHPCPMLHHQDPLFSRYLGCPCQCHFTTRHPCSLAVTTHKFHHRELCPVHYKCLWDCMAPTHPRLHSKCTSLPFSTIINCNRQQ

SEQ ID NO: 47322 - protein, 210 aa, Oryza sativa; identical to SEQ ID NO: 35715

SEQ ID NO: 47323 - protein, 347 aa, Oryza sativa
MDDNSIQQSLLADNPNVLQRKPSEGVNRFRRCRSTPSTDPLQGPPEKGSSVKAKELFKEMRPSFRLVGLLLFIYLLVGVLAFYAVMDEISGKRTNRVLDALYFCVVTMTTVGYGDLVPNNDTTKLLACAFVFMGMAVVALFVSKVADYLVEKQEVLFFKALHTNLKGGETKMLRAIETNRIKYKFYTNALLLVLSIISGTVFLWKVEKLSLVDSFYCVCATITTLGYGDKSFSSKLGRVFAVFWIITSTIIMAQFFMYLAEIYTERRQKMLANWVLTRKMTKMDLEAADLDDDRQVGAAEFVVYKLKELGKINQEEISSFLEEFEKLDVDHSGTLSPYDLTLAQSAQ

SEQ ID NO: 47324 - protein, 52 aa, Oryza sativa
MAPRATFVLLAWRHRRRRAAAEVPRPESAASPRELEAPGRPAIQKNVVHDDL

SEQ ID NO: 47325 - protein, 553 aa, Oryza sativa
MALYLLFESASGYGLFHAYGIDEIGQSVDAVRASVVDLDRFGKAVKLAAFTPFSSAVDALNQCNAISEGIMTDELRSFLELNLPKPKEGKKAKYSLGVVEPKVGSHISEVTGIPCQSNEFVQELLRGVRLHFDRFISELKKSDLEKAQLGLGHSYSRAKVKFNVNRVDNMVIQAIFLLDTLDKDINSFSMRVREWFGWHFPELVKIVNDNYIYAKLADYIKDKSELAEKDISKLADLIGDEDKAKEVVEAAKASMGQDLSEVDLMNVKQFAQRVMNLSEYRKNLYEYLVTKMNDIAPNLTSLIGEVVGARLISHAGSLSNLAKCPASTLQILGAEKALFRALKTRGNTPKYGLIFHSSFIGRASTKNKGRMARYLANKCSIASRIDCYSESATAVFGQKLREQVEERLDFYDKGVAPRKNLDVMKAAIDSMVNDATNDVDDGEKVDASAKKSKKKKSKAEADGEAMDLDKPSNVADEAEPGTEKKKKKISTSWRRSHRSRRRAWRMPMATPRRTVLPRRRRRRTVKSRRTLSLRRPLKGRRKRRSPRRRTATE

SEQ ID NO: 47326 - protein, 257 aa, Oryza sativa; identical to SEQ ID NO: 33192

SEQ ID NO: 47327 - protein, 251 aa, Oryza sativa
MMSEGEEHGSLLEKINDKIHEFKKGSSSSSSSDSDDDKKHHHKSKSKKKRLFGRTNPLHHVLGGGKAADLVLWRDKQTSGSILAGVTVIWLLFEGIGYHLLTFFCHSLMVFLTVCFVWANAASFINRGPPKFPDAILSEVQCLKIAHILRKEINEAFLTLRHVASGKDLKTYLMTVAGLWFVSIIGSCFSFLTLSYTIFLMAYTLPMLYEKYEDEVDVVGEKALIELKKQYAVLDHKLLSKIPMLAEKKQH

SEQ ID NO: 47328 - protein, 366 aa, Oryza sativa
MAQRVQEEDEQMMSTDDLIQAQIKLYHHCFAFIKSTALWAAIDLRIADVIHRNGGAATLSDLALNVGLHPTKLSHLRRLMRVLTVTGIFAVEDRNGEAMYTLTRVSRLLLNSDGEGTHALSQMARVLANPLAVISHFSIHEWFTTEKATTMTPFEVAHGCTRWEMIANDAKDGSVFNAGMVEDSRVAMDIILKESCGIFQGISSLIDVGGGHGAAAAAIATAFPNIKCTVLDLPHIVAEAPATHSNIQFIGGDLFKFIPAADVVLLKCLLHCWQDDDCVKILRLCKEAIPARDAGGKVIIIEVVVGIGSEEIVPKEMQLLFDVFMMYIDGIEREEYEWKKIFLEAGFSDYKITPVLGARSIIEVYP

SEQ ID NO: 47329 - protein, 354 aa, Oryza sativa
MEGGGGGGQELSTDNVKGIVLALLSSGFIGASFIIKKKGLRRAAVASGIRAGVGGYSYLLEPLWWVGMITMIVGEVANFVAYAFAPAVLVTPLGALSIIVSAVLAHFILNERLHALGVLGCVMCIAGSVVIVIHAPQEQEITSVREIWNMAIQPAFLLYVASVIVVVFVLVFHFSPLYGQSNVLIYTAICSLMGSLSVMSVKALGTSLKLTFEGTNQLVYPETWFFVLIVATCVLTQMNYLNKALDTFNTAIVSPIYYVMFTTLTILASVIMFKDWSGQSLGSITSEICGLIVVLSGTILLHVTKDYERIPQSRSIYAPLSPSLTARLNGDLLKHVEDDRNPDEEKALRRQEMY

SEQ ID NO: 47330 - protein, 120 aa, Oryza sativa
MAGSFPRCPRPPPHRLSMRAALGLGRHTWSYEGRRRSSTLQPPPAGVVRGGAGFGSPDVLLRAFWLPTRPLGCNKPLPLLPSALDIVPSSLPAPNLGLFHCSLVCWCYSPFKIFPFSACS

SEQ ID NO: 47331 - protein, 369 aa, Oryza sativa
MSSSATVHYRADGSVETAAVEPLYPMATVVYFQCVFAAITLILVAGSLLGRMSFLAWMIFVPLWLTFSYTVGAFSLWGGGFLFHWGVIDYCGGYVIHVSAGIAGFTAAYWVGPRAQKDRERFPPNNILFTLTGAGLLWMGWAGFNGGGPYAANSVASMAVLNTNICTAMSLIVWTCLDVIFFKKPSVVGAVQGMITGLVCITPAAGVVQGWAALVMGVLAGSIPWYTMMILHKRSKILQRVDDTLGVFHTHGVAGLLGGLLTGLFAEPTLCNLFLPVADSRGAFYGGAGGAQFGKQIAGGLFVVAWNVAVTSLICLAINLLVPLRMPDDKLEVGDDAVHGEEAYALWGDGEMYDVTKHGSDAAVAPVVV

SEQ ID NO: 47332 - protein, 561 aa, Oryza sativa
MDADEAAGSSRRMDLNLYLGLPRAPRPRRSDLGSDLALSTPMPSSPSSSAASVDAPPPPPELSHPPYSPSHADLSPPLQEVYSLYNPDDPPASETHLPPYAPPPAPVVSELPDDLEFGLHPPPPLVRASELLGWEDRPSSSTASSSFLPDTAARYWRLLEQTGSRWLRARRFRSDLPPLSSEAYPAGRDAAAVPVLQHEPMNDTVEHNKVAADGAEVGASEESEEQGRSAATFECNICFDMASEPVVTSCGHLFCWPCLYQWLNVYSNHKECPVCKGEVTEANITPIYGRGNSCLDAEKAVEGGKQTGPTIPPRPHGNRLESFRQQFHHLRPISRRLGEAHGLLSSWRRLLDQQIMNTASRFEGPPESAVQEMVDTAHAQHTSRLSRLASRMRARRLLREADNPNPPDGGSTSPDSGLIRNNASDPSRNGPSSLLPDGIDWLRGLTLLGYEDTERFASAMSDFRRITGPSQYGASASSSNPPNLESTFDRTHVVAAPSADQASNSSTAAVIQGDAGISESAGEPSNAGSSRSLRRRGRSSALGSLDADGGGLQRNKRRRIN

SEQ ID NO: 47333 - protein, 216 aa, Oryza sativa
MAPAVEAVEKKTGSAPVKAPALNERILSSMSRRSIAAHPWHDLEIGPGAPTIFNCVIEIPRGSKVKYELDKKTGLIVVDRVLYSSVVYPHNYGFIPRTLCEDSDPLDVLVIMQEPVIPGCFLRAKAIGLMPMIDQGEADDKIIAVCADDPEYKHYNDIKELPPHRLAEIRRFFEDYKKNENKEVAVNDFLPASAAYEAIKHSMDLYATYIVEGLRR

SEQ ID NO: 47334 - protein, 473 aa, Oryza sativa
MFGRARCSTSAPAAGERRALPVDPLSLPRLLVSAATTPGAAAPAVSTLHAAALKLGVLPSSLPASNALVSAYSLSGLLPCALRAFSLIPHPSTGSYTAILSALSRHGRRREALSLFSAAAVARPDAELLSCVVSCCRRASASLPARAAHAYGVKTAPLLAFYASAGPALVALYAMCGRVSAAKRIFDRMDGEDVVSWNAMIGGFAGAGMNGEAWDCFREMRARGVRGNARTAVAVLGACDLESGRQVHGHMVRNHGDSGSNAILWNALMNMYSRVGCVDNAEHVFFEIERKDVVSWNVMIGAFAKNGHGERALELVDAMLRCGMQPDSVTFTTLLMACCHCGLVDEGLALFERFVENSALIPTMEQCACIVDLLSRAGRFREAAGFIDQMPIRPNAVVWGALLSGSRMHHDVDHAQIAFEKLVQLEPDNPGNFVTMSNIYAKAGMVEDAKRVRMMIDREELVKPSGQSRVQAM

SEQ ID NO: 47335 - protein, 206 aa, Oryza sativa; identical to SEQ ID NO: 31969

SEQ ID NO: 47336 - protein, 57 aa, Oryza sativa
MCRISSWWFHIRYVSFVRYSAGADLPISVPTFSTTVRAHVVIVYTAICISTINSHME

SEQ ID NO: 47337 - protein, 446 aa, Oryza sativa
MAVTIQSVKARQIFDSRGNPTVEVDVGLSDGSFARGAVPSGASTGIYEALELRDGGSDYLGKGVLKAVSNVNTIIGPALIGKDPTEQVDIDNFMVQQLDGTSNNWGWCKQKLGANAILAVSLAVCKAGAMVKKIPLYQHIANLAGNKTLVLPVPAFNVINGGSHAGNKLAMQEFMILPTGASSFKEAMKMGVEVYHHLKSIIKKKYGQDATNVGDEGGFAPNIQENKEGLELLKAAIAKAGYTGKVVIGMDVAASEFYSEKDKTYDLNFKEDNNDGSHKISGDSLKDVYKSFVSEYPIVSIEDPFDQDDWATYAKLTDEIGQQVQIVGDDLLVTNPTRVAKAISEKTCNALLLKVNQIGSVTESIEAVRMSKRAGWGVMASHRGGETEDTFIADLSVGLSTGQIKTGAPCRSERLAKYNQLLRIEEELGDAAVYAGEKFRAPVEPY

SEQ ID NO: 47338 - protein, 224 aa, Oryza sativa
MGRGKIEIKRIENATNRQVTYSKRRTGIMKKARELTVLCDAQVAIIMFSSTGKYHEFCSPSTDIKGIFDRYQQAIGTSLWIEQYENMQRTLSHLKDINRNLRTEIRQRMGEDLDGLEFDELRGLEQNVDAALKEVRHRKYHVITTQTETYKKKVKHSYEAYETLQQELGLREEPAFGFVDNTGGGWDGGAGAGAAADMFAFRVVPSQPNLHGMAYGGNHDLRLG

SEQ ID NO: 47339 - protein, 143 aa, Oryza sativa
MKNRSYAEATEKLPSAVNFHLIVSAICCSDTSRTSSQSWKNSPRASLDRAPCNRRIHLLAIRASATVSLARLTWENNTGHLQAKQPFPVQLSVQNCVSTPSPMMCSATDRKISSTSLPGRKAAKVQGLSFCSKDFASHFNRRA

SEQ ID NO: 47340 - protein, 478 aa, Oryza sativa
MQVWVDYNGTAKQITVAMAPLKMAKPSKPLLSSTYDLSTVFVADEPYMVGFSSATGSFNSRHYVLGWSFAMDGPAPAIDIDKLPKLPRFAPKHKPKMVEIIPPLATATFIVALGTVSVLLIRRRMRYTELREDWEVEFGPHRFSYKDLFRATDGFKSMNLVGVGGFGRVYKGVLQSSKLEIAVKRVSHDSKQGMKEFIAEVVSIGRLQHRNLVQLLGYCRRKGELLLVYEYMANGSLDKHLYSEGDKRVLDWDQRLQIIKGIASGLLYLHEEWEKVIVHRDIKTSNVLLDSEMNSRLGDFGLARLYDRGADPLTTHVVGTIGYLAPELGRSSKATPLTDIFAFGIFILEVTCGRRPIMQVPEGEQHVLVDWVLEHWHKGSITEIVDTKLHGNYNVDEVCLVLKLGLLCSHPLSNARPNIRQVMKYLTGDMAMPELVPTHHSFHTLALMQNQGFDSYVMSYPSSTASMSAMSNNLSAQR

SEQ ID NO: 47341 - protein, 646 aa, Oryza sativa
MVGLVALSLDTVATKDEFVRLCATGRLRDALRRPFRGVLWSDAARLFSHLFRACRALRPLRQLHAFAATSGAATDRFTANHLMLAYADLGDLTAARELFERIPRRNVMSWNILFGGYIKNGDLGGARKLFDEMPERNVATWNAMVAGLTNLGFDEESLGFFLDMRREGMHPDEFGLGSVFRCCAGLRDVVTGRQVHAYVVRSGLDRDMCVGSSLAHMYMRCGCLQEGEAVLRMLPSLSIVSCNTIIAGRTQNGDSEGALEYFCMMRSVGVAADVVTFVSAISSCSDLAALAQGQQIHGQVMKAGVDKVVPVMTCLVHMYSRCGCLGDSERVFFGYCGSDTFLLSAMISAYGFHGHGQKAIELFKQMMNGGAEPSDVTFLALLYACSHSGLKEEGMDCFELMTKTYGMQPSVKHYTCVVDLLGRSGCLDEAEALILSMPLTPDGVIWKTLLSACKTQKNFDMAERIAKRVIELDPHDSASYVLLSNIRATSRRWGDVSEVRKAMRDNNVRKEPGVSWVELKGHIHQFCTGDESHPRQKEIDECLEEMMAKIRQCGYSPDMSMVLHDMEDEEKEVSLSHHSEKLAIAFAFLSLPEGVPIRVMKNLRVCDDCHLAIKLMSQVTGREIVVRDVSRFHHFKDGRCSCRDYW

SEQ ID NO: 47342 - protein, 102 aa, Oryza sativa
MDPVISPLPARADPPLATTGGADPAASPTVTTTIGGRGLTQFPASAAAATAKLPRMASRATSCSSCSGRGAWWVPTRLCCRSWNPGRCIPRLVSSRGRAAAD

SEQ ID NO: 47343 - protein, 410 aa, Oryza sativa
MAAPKPLSPRLAVPLAIALLLALGLVADFLWSSSSSSGTSGRGQLASASRTATAKKSGRARGKKPAAEGYLNATYADIPAPRWDWEEMPAAPVPRLDGYSVQIGDLLYVFAGYENLDHVHSHVDVYNFTSNTWTGRFDMPKEMANSHLGIATDGRYIYALTGQFGPQCRSPINRNFVVDTVTKEWHELPPLPVPRYAPATQLWRGRLHVMGGGKEDRHEPGLEHWSLAVKDGKALENEWRTEIAIPRGGPHRACIVANDKLFVIGGQEGDFMAKPGSPIFKCVRRHEVVYGDVYMLDDGNKWKQLSPLPKPNSHIECAWVIVNNSVIIVGGTTEKHPITKKMILVGEVFRFDLDTLTWSVIGRMPFRIKTALAGYWDGWLYFTSGQRDRGPDNPAPKKVVGCTWRTKLHL

SEQ ID NO: 47344 - protein, 509 aa, Oryza sativa
MFVEGFRVESPRVRYGDGEIESEYRYDTTEVVAPPSPEKGWVVRPKSVTYHFKTTTTVPKLGVMLVGWGGNNGTTLTAGVIANREGISWATKEKVHKANYFGSLTQSSTIRVGSYNGEEIYAPFRSLVPMVNPNDIVFGGWDISSMNLADAMTRARVLDIDLQKQLRHHMESMVPLPGVYNPDFIAANQGSRANNVIKGTKKEQVEQVKKDIREFKEKSKVDKVVVLWTANTERYSNVVAGMNDTMDNLLASLDKDEPEMSPSTLYAIACVMEGVPFINGSPQNTFVPGLIELAIKKNSVIGGDDFKSGQTKMKSVLVDFLVGAGIKPTSIASYNHLGNNDGMNLSAPQTFRSKEISKSGVVDDMVSSNAILYEPGEHPDHVIVIKYIPYVGDSKRAMDEYTSEIFMGGKNTIVLHNTCEDSLLAAPIILDLVLLAELSTRIQFKAEDQDKYHSFHPVATILSYLSKAPLVPPGTPVVNALAKQRAMLENILRACVGLAPENNMMLEYK

SEQ ID NO: 47345 - protein, 964 aa, Oryza sativa
MLPQQLQIYLCFILLSLKFGISASLPLETDALLDIKSHLEDPQNYLGNWDESHSPCQFYGVTCDQTSGGVIGISLSNASLSGTISSSFSLLSQLRTLELGANSISGTIPAALANCTNLQVLNLSTNSLTGQLPDLSTFINLQVLDLSTNNFSGPFPAWVGKLSGLTELGLGENNFNEGDVPESIGKLKNLTWLFLGQCNLRGELPVSIFDLVSLGTLDFSRNQIIGVFPIAISNLRNLWKIELYQNNLTGEIPPELAHLTLLSEFDVSQNQLSGILPKEIANLKKLKIFHIYRNNFSGVLPEGLGDLEFLESFSTYENQFSGKFPANLGRFSPLNAIDISENYFSGEFPRFLCQNNKLQFLLALDNNFSGEFPSSYSSCKTLQRFRISQNQFTGRIHSGIWGLPNAVIIDVANNKFVGGISSDIGISASLNQLYVHNNVFSGELPMELGKLSLLQKLVAFNNRFSGQIPAQIGSLKQLSFLHLEQNALEGSIPPDIGMCNSLVDLNLADNSLTGTIPDTLASLFTLNSLNLSHNMISGEIPEGLQYLKLSYVDFSHNNLSGPVPPALLMIAGDDAFSENDGLCIAGVSEGWRQNATNLRYCPWNDNHQNFSQRRLFVVLIIVTSLVVLLSGLACLRYENYKLEQFHSKGDIESGDDSDSKWVLESFHPPELDPEEICNLDVDNLIGCGGTGKVYRLELSKGRGVVAVKQLWKRDDAKVMRTEINTLGKIRHRNILKLHAFLTGGESNFLVYEYVVNGNLYDAIRREFKAGQPELDWEKRYRIAVGTAKGIMYLHHDCSPAIIHRDIKSTNILLDEEYEAKLADFGIAKLVEGSPLSCFAGTHGYMAPELAYSLKVTEKSDVYSFGIVLLELLTGRSPSDQQFDGELDIVSWVSSHLANQNPAAVLDPKVSSHASEDMTKVLNIAILCTVQLPSERPTMREVVKMLIDIDSISANGKAKNKNDKK

SEQ ID NO: 47346 - protein, 145 aa, Oryza sativa
MSRGRGRVPREGASAVAPGYTSCCCCFFLATCRHCCVVDLSSPAIPVPDRRRQQPPPCRAPVASSSSLSSPAPSSPHRRRGGHPILQNRSRIRSIAGGSCSAIAMPRHHSSRRRRRLPLGVGRRDRHRSRIRTTPPPPAADDSWW

SEQ ID NO: 47347 - protein, 153 aa, Oryza sativa; identical to SEQ ID NO: 29869

SEQ ID NO: 47348 - protein, 513 aa, Oryza sativa
MAGGAMTDTDGAHKNYPGKMTIFVFLACLVASSGGLIFGYDIGISGGVTSMDSFLIKFFPSVYAKEKEMVETNQYCKFDSELLTLFTSSLYLAALIASLFASVITRKFGRRITMLGGGVIFLVGAILNGAAADVAMLIIGRILLGIGVGFSNQAVPLYLSEMAPARMRGMLNISFQLMITVGILAANLINYFTDKIAGGWGWRVSLGLAAVPAVIMAGGSLFLPDTPNSLLSRGKENEARAMLRRIRGTDDVGPEYDDLVAASEASKAIENPWRTLLERRYRPQLVMSVLIPTLQQLTGINVVMFYAPVLFKTIGFGGTASLMSAVITGLVNMFATFVSIATVDRLGRRKLLLQGGVQMIFAQFILGTLIAVKFGTAGVANISRGYAIVVVLCICVFVSAFAWSWGPLGWLVPSEIFPLEIRSAAQSVVVVFNMAFTFIIAQIFLMMLCHLKFGLFYFFGAMELIMTGFVFFFLPETKGIPIEEMDRIWGKHWYWRRFVGAGAGGKVEITSTV

SEQ ID NO: 47349 - protein, 254 aa, Oryza sativa
MARGSAAAAIAGVVWVLLLLVGVASGARLPGGSGGNRGREPRGGAAAAAVATETAVFALGSFWRSEAAFGCLPGVIRTSVGYAGGSKARPEYRNLGDHAECVKVEYDPRLIQYKKLLEVFWASHDPREVFGQGPDVGNQYRSIIFTNGSVEARLAGLSKEKEQAKDRRSVITTQIQPIGAFYPAEPEHQKFELKRKPFLLQLIGNLPEEELLTSTLAAKLNAYAAELCSPNTQNRINSKIDEIAKKGWPILRDI

SEQ ID NO: 47350 - protein, 139 aa, Oryza sativa
MANSASGMAVGDECKLKFQELKSKRSFRFITFKIDERTQQVVVDRLGQPGDTYDDFTASMPASECRYAVFDFDFVTDENCQKSKIFFISWSPDTSKVRSKMLYASSKDRFKRELDGIQVELQATDPSEMSMDIVKARAL

SEQ ID NO: 47351 - protein, 379 aa, Oryza sativa
MATAGKVIKCKAAVAWEAAKPLVIEEVEVAPPQAMEVRVKILFTSLCHTDVYFWEAKGQTPVFPRIFGHEAGGIVESVGEGVTDLAPGDHVLPVFTGECKECAHCKSAESNMCDLLRINTDRGVMIGDGKSRFSINGKPIYHFVGTSTFSEYTVMHVGCVAKINPAAPLDKVCVLSCGISTGLGATINVAKPPKGSTVAIFGLGAVGLAAAEGARIAGASRIIGIDLNANRFEEARKFGCTEFVNPKDHDKPVQQVLAEMTNGGVDRSVECTGNINAMIQAFECVHDGWGVAVLVGVPHKDAEFKTHPMNFLNERTLKGTFFGNYKPRTDLPNVVELYMKKELEVEKFITHSVPFSEINTAFDLMHKGEGIRCIIRMEN

SEQ ID NO: 47352 - protein, 284 aa, Oryza sativa
MGRGKVQLKRIENKINRQVTFSKRRSGLLKKANEISVLCDAEVALIIFSTKGKLYEYATDSCMDKILERYERYSYAEKVLISAESDTQGNWCHEYRKLKAKVETIQKCQKHLMGEDLESLNLKELQQLEQQLENSLKHIRSRKSQLMLESINELQRKEKSLQEENKVLGTDPLHYSSPPSSSPPATPPPAAGRITQDGLAGAEARGDADAAAAGGVGGGGVRGGLRHGGLPAHAARLRRRGRPHRARHRPELALLQPPPAQVARRRRGRPPPAPAGQRHPFHRG

SEQ ID NO: 47353 - protein, 364 aa, Oryza sativa
MVGRGGGGGGGVSDRRHAGGGEGGGKESIGFYELRRGEFSVVVTNWGATILTVNLPDKNGHIDDVVLGYKDIGSYVNDTTYFGALVGRVANRIAGGRFTVKGHAFHTYKNDGKNTLHGGHRGFNQVFWSVRERATGHFPYITFYYRSYDGEQGFPGALDVLVTYKIDGDYSFSVTMYARPVDDGKPTPVNLAQHTYWDLRGHGNGTILDHSVQIFASAVTPVGAGLIPTGAVSPVSGTPFDFRAPAPPGARIADVPGGGYDINYVLDGEADGQGVRKAAVVSEPTSGRVLELWSDQPGLQFYTGNFLKGDEGKGGARYVKHGGLCLETQDYPDAVHNAKFPTEIYRKGQEYKHYMLYKFSLAKK

SEQ ID NO: 47354 - protein, 408 aa, Oryza sativa; identical to SEQ ID NO: 29863

SEQ ID NO: 47355 - protein, 160 aa, Oryza sativa
MATPTAQTAALLAAAAALFLLASAALPVVRSDAGGDGDVTAYDELRHRGFPLGLLPANVRGYTLDSGSGDFAVDLASSCRIVLPAGSYLASFSDRLTGRLDDRRISGLSGIRVRAFFRWWSITGIRADGDELVFEVGSVSAKFPARHFNASLECPAKADS

SEQ ID NO: 47356 - protein, 302 aa, Oryza sativa
MKIHHFRRRGKLMSPFYRKPTPAMGGLFFVPIGIFVARRQVGSSTGVNGAAIITLIFAMVGFLDDISNLVMDCNRKIPHWMRLFVQIVAGIYLSIWLSSTNISTPYNTKFLVPLPPPLGLAFIGKIYLVLAAICSLSMGTGVTLVDHLDGLAGGVAALALAGLSVASLPICSEMSVFGASMSGACTGFLFHNRYRASIVMGRVGSFALGGAIATIAACSGMFIPMFIACSIFLLELLLVIFQVPFQMAKKHFLGTNRYPLRILPSYYFLKSWGIKEPYIVAGAYIISCLLTAFAGYLGLVSA

SEQ ID NO: 47357 - protein, 419 aa, Oryza sativa
MAASTTCPARSMASVSRALRPRPHAAIASAAVRTAARLGGGLGIVCSMPSYGRKEKEEWGLTIASAPATTAAPALRSCQLLCKAEANISSNLPESIPSEANQYEKIVELLTTLFPVWVILGTIIGIYKPSMVTWLETDLFTVGLGFLMLSMGLTLTFEDFRRCMRNPWTVGVGFLAQYLIKPMLGFAIAMTLKLSAPLATGLILVSCCPGGQASNVATYISKGNVALSVLMTTCSTIGAIVMTPLLTKLLAGQLVPVDAAGLAISTFQVVLLPTIVGVLAHEYFPKFTERIISITPLIGVLLTTLLCASPIGQVSEVLKAQGGQLIIPVALLHVAAFALGYWLSKVSSFGESTSRTISIECGMQSSALGFLLAQKHFTNPLVAVPSAVSVVCMALGGSALAVFWRNRGLPANDKDDFKE

SEQ ID NO: 47358 - protein, 214 aa, Oryza sativa; identical to SEQ ID NO: 31615

SEQ ID NO: 47359 - protein, 230 aa, Oryza sativa
MRLVGLTGGIASGKSTISNLFKASGIPVVDADIVARNVVQKGTGGWKKIVEAFGNDVLLENGEIDRARLGQIVFSDPEKRQVLNRLLAPHISSGIFWEILKLWIKGCKVIVLDIPLLFETKMDQWTHPVIVVWVNEATQIERLMSRDGCSEEQARNRINAQLALDWKKSQADIVIDNSGTLDETKEKFQEVLRNVSEPLTWKERLRSRDGLFSVVVCTAVGVLLAQKNLL

SEQ ID NO: 47360 - protein, 342 aa, Oryza sativa
MMSLQIPARSGGLRRLLLLGGADGIRRPYSTGDRRRRVIREARQEEEDEAFLRTLNFSADPENNPPPPPPPPPRRPGGAPDDSSPHAAFPTDILRRAAGKQPLPPPQQPIGESLMEKLKLGDAAATSAAGNSGERPQPEREPTKPPPPEHEAAQPEDVDEIFRKMKETGLIPNAVAMLDGLCKSGLVQEAMKLFGLMREKGSIPEVVVYTAVVEAFCKARKLDDAVRIFKKMQGNGVIPNAFSYWLLIQGLCKGGRLDDAVAFCVEMFEAGHSPNAMTFVGLVDEVCKAKGVEEAEKLVRSFQDRNFAIDEKSIREHLDKKGPFSPVIWEVIFGKKKSGRPF

SEQ ID NO: 47361 - protein, 533 aa, Oryza sativa
MGSCCSRATSPDSGRGGANGYGYSHQTKPAQTTPSYNHPQPPPPAEVRYTPSAMNPPVVPPVVAPPKPTPDTILGKPYDDVRSVYYLGKELGRGQFGVTYLCTEIASGKQYACKSISKRKLVSKADKEDIRREIQIMQHLSGQQNIVEFRGAYEDKSNVHVVMELCAGGELFDRIIAKGHYSERAAATICRAVVNVVNICHFMGVMHRDLKPENFLLATKEENAMLKATDFGLSVFIEEGKMYRDIVGSAYYVAPEVLRRNYGKEIDVWSAGVILYILLSGVPPFWAETEKGIFDAILQGEIDFESQPWPSISESAKDLVRKMLTQDPKKRITSAQVLQHPWLRDGEASDKPIDSAVLSRMKQFRAMNKLKKMALKVIASNLNEEEIKGLKQMFTNMDTDNSGTITYEELKAGLAKLGSKLSEAEVKQLMEAADVDGNGSIDYVEFITATMHRHKLERDEHLFKAFQYFDKDNSGFITRDELESALIEHEMGDTSTIKDIISEVDTDNDGRINYEEFCAMMRGGGMQQPMRLK

SEQ ID NO: 47362 - protein, 649 aa, Oryza sativa
MAESAAAAAGDGKVEKAANGGVNGCDAAGEGKKRADQAVAFHELFTFADKWDLVLMAAGSLGALAHGAAMPLFFLLFGDLINGFGKNQTDLRTMTDEVSKYALYFVYLGLVVCASSYAEIACWMYTGERQVIALRKAYLDAVLRQDVGFFDTDARTGDIVFGVSTDTLLVQDAIGEKVGNFIHYIATFLAGLVVGFVAAWRLALLSVAVIPAIAFAGGLYAYTLTGLTSKSRESYANAGVVAEQAIAQVRTVYSFAGESKALNSYSEAIQNTLKLGYKAGMAKGLGIGCTYGIACMSWALVFWYAGVFIRNGQTDGGKAFTAIFSAIVGGMSLGQAFSNLGAFSKGKIAGYKLLEVIRQKPSIVHDHKDGKLLAEVHGNIEFKDVTFSYPSRPDVMIFRDFSLFFPAAKTVAVVGGSGSGKSTVVALIERFYDPNEGQVLLDNVDIKTLQLRWLRDQIGLVNQEPALFATTIHENILYGKPDATMAEVEAAATASNAHSFISTLPNGYNTMVGERGIQLSGGQKQRIAIARAMLKNPKILLLDEATSALDAGSENIVQEALDRLMTGRTTVVVAHRLSTIRNVNMIAVIQQGQVVETGTHDELLAKGSAGAADEGADHRAGGAPPVDDPRRGPHRRRAGWPDRRARQPL

SEQ ID NO: 47363 - protein, 249 aa, Oryza sativa
MEGDAAGAGGGDRSSIVIGLIENRAKEVGVAAFDLRSASLHLSQYIETSCSYHNTKTLLHFYDPMVAIVPPNKTAADGMVGVSELVGKHLPTNKKITMARGCFDDTKGAVMVKNLSARDPSALGLDTYCKQYYLCLAAASATIKWIESERGVIITNHSLSVTFNGSFDHMNIDSTSVQTLEIIDPFHTELWGTSNKKKSLFQMLKTTKTTGGTRLLRANLLQPLKDIQTINTRLDCLVRRLIFFVILNS

SEQ ID NO: 47364 - protein, 632 aa, Oryza sativa
MARRLAAALCLAVAAVSVAVATARFVVEKNSVKVLSPRSLRGRHEAAIANYGVPDYGGTLTGVVVYPADARLADGCRPFGEAAAKALRSRSRRPVVLLVDRGGCYFALKTWHAQLAGAAAVLVADGVDEPLLTMDSPEEETPDMAFLANITVPSALVTKQFGDALRAAASAADDEVVVRLDWRESMPHPDERVEYELWTNSNDECGPRCDEQAAFVGAFRGHAQLLEKRGYALFTPHYITWFCPDAFLETTQCKAQCVNRGRYCAPDPDGDLAAGYSGRDVVLENLRQLCVHRVANARNASWLWWDYVADYHLRCSMKGDHYTRRCADDVAKSLGLPMDLIDECMGDPDADVENDVLKTEQIVQVGLGTRGDVTILPTLVINNVQYRGKLESTSVLKAICAGFKESTEPDVCLTPEMETDECLNNNGGCWRDEKTNITACKDTFRGRICQCPVVDGVQYQGDGYTHCKAVGPGRCAMNNGGCWKGTRDGKTFSACSDSDLSGCKCPPGFKGDGLHCEDVDECSEKLACSCPHCSCKNTWGSFDCSCHGNNLMYIKAEDTCIAKNMSAFGWLVTTLVLSCLAGAGVAGYVFYKYRLRRYMDSEVMAIMSQYMPLEGQNGERLPLREEAQVEHA

SEQ ID NO: 47365 - protein, 191 aa, Oryza sativa
MLICYTSNKFPTDYIPTVFDNFSANVVVDSTTVNLGLWDTAGQEDYNRLRPLSYRGADVFVLAFSLVSRASYENIMKKWIPELQHYAPGVPIVLVGTKLDLREDKHYLLDHPGMIPVTTAQGEELRKQIGAAYYIECSSKTQQNVKGVFDAAIKVVIQPPTKQREKKKKKSRQGCSMMNMFRGRKMSCFKS

SEQ ID NO: 47366 - protein, 327 aa, Oryza sativa
MQDAARAACASRELLQSWRHYPELKFSAKTLAMDGQHNCIQGQMDSYIKRIDIALQNCTGGWVKRFRFELQFFHELSAHHINHWLDAAIPGIEELTLELPRDDKMKYKFPCKLLFEKGCSIQSLCLYSCAFHPDQGACSFRNLKRVYFSLVHITTEELWIFLYNSLSLEHLELGFCHKIACLKIPCTLQLLNFLRVRRCNMLQIIVSDAPNLSTFHYEGPLIQLSLGDSLQLKHVNISIYPWFNLFEYARKQLPTVAPNVETLFLMSANEAGIFYPLIFQPHGRFLHLKYLELVIVGPRNYGFGYQYTYLVTFLKASPVLETFILHV

SEQ ID NO: 47367 - protein, 142 aa, Oryza sativa
MPKNKGKGGKNRKRGKNEADDEKRELVFKEDGQEYAQVARMLGNGRCEAQCIDGTKRLCHIRGKMHKKVWIAAGDIVLVGLRDYQDDKADVILKYMNDEARLLKAYGEIPDHVRLNEGVVDEDDAAAHDDYIQFEDEDIDKI

SEQ ID NO: 47368 - protein, 209 aa, Oryza sativa
MQSLFASTLLKLCDISFLLVLMLGNLDGYTKSDEGKMMSALSLGKSETVYAHSEPDRSQPFGISYPYADSFYGGAVATYGTHAIMHPQIVGVMSSSRVPLPIEPATEEPIYVNAKQYHAILRRRQLRAKLEAENKLVKNRKPYLHESRHQHAMKRARGTGGRFLNTKQQPEASDGGTPRLVSANGVVFSKHEHSLSSSDLHHRRAKEGA

SEQ ID NO: 47369 - protein, 155 aa, Oryza sativa
MEKEHIKMAILKQEQTFRQQVNELHRVYRVQKQLMIEMQSISTQAQAKADNRTIPRLEMDHQQWYRNSGEKKAPEFVEDFDLELTLATGAGRKQEKPSNSDSGATVSSSTSAESESEQRFPESNVALRFQNESKRHDDQLMQSPWLYQCLSLKMA

SEQ ID NO: 47370 - protein, 371 aa, Oryza sativa
MATAEAKRRRHHSPPASIAAGGDSSTPTSAAPADSSSPSLDLIPDIARRLTSLEDFFSLRASCRAYRALLPASRRLLASQSPLLLVSLYPSFAEALFHPRLRRLHRFRLPWGHHLPPSRYTLLYAHGFLVTSTTAANNYPPRLLLLRLFTGEQLRLPRVFAPFSRVILTADLLVVIFLPGRATVQHCRPGDALWRVASAPAPHVFDDLISVNGTLYALVGLRLATLQLSESSLELSFLGGEHDDANRPEGDRFMLGECGGEVLLISVEHEERVVYRVFRWASEKRKWEMITNLGGRSLFLGLDGFAACVDQDHPGVRGDCLYAAGRRLGEWHEYSLADGTCDVCNADYPGAPPLNNSSLIRPSVWIFPSLC

SEQ ID NO: 47371 - protein, 77 aa, Oryza sativa
MAMKKKEKNAHTSMEHDDEKKKKERKEKKEIAMHSPKFQKRINGGGGIQKGVIFIFLFPLTNLPHTYTCTFLTRKYD

SEQ ID NO: 47372 - protein, 117 aa, Oryza sativa
MSKSFPQVFHKKLPMGDAVYYYFKDIYDALRIAQVGVRLIFLDHDYSEFRPVVPDEECFYRSFIFSYLEQVVDRIDTLWEDRLLAALRELDRRAERFQRASEFSRRRDAHRCYTIVA

SEQ ID NO: 47373 - protein, 220 aa, Oryza sativa; identical to SEQ ID NO: 32059

SEQ ID NO: 47374 - protein, 156 aa, Oryza sativa
MEEYLANMKTLRSYMSDLEEEATKRSAEEQRQRTAIDAHGADLAQVRAQTKQASEESEQLSKARAELCVEISEKQGRIATLEIECATLKQTLELLHQEIASTSSKLIEKRLFYTKTIESLTVKLQEQQEWLGAFKLKVEESQSKQNLQGTALLNMK

SEQ ID NO: 47375 - protein, 264 aa, Oryza sativa; identical to SEQ ID NO: 30711

SEQ ID NO: 47376 - protein, 132 aa, Oryza sativa
MLSGTVPVKLLIEKSAILKFNQLPRADGSSPDMLLLSNRSSSNVLSWPIESGMLPLSPVDPRSRTVSLTSFTMWEPSRTPCKSLLGRDRCSNEVALKSSSGRAPLKLLYPALNSLILEQFPSPEEILPLSWL

SEQ ID NO: 47377 - protein, 259 aa, Oryza sativa
MFQSMMCMLTGGDDHSHVEDVGKRYSLVVARHAKRPEGWAYRFRRTNTTILYYWSATLCDLEPLRRSDQATGYAMHLDRPPAFLQKNLHRFHVIILNTGHHWNRGKMKANRWQMYVSGAPSHDRDIAVIWKAKNFTIHNVVRWLDDELPRYPHLKVFYRSLSPRHFFNGEWNTGGTCDNKNPLSKGNSVFRNRSDDAEAEEAVRGTGIKLLDITAISRLRDEGHISRYSIRGRGGVQDCLHWCLPGVPDTWNEILAAQL

SEQ ID NO: 47378 - protein, 515 aa, Oryza sativa
MGEDGGVNSSSNSPAAAVGLVLVVAICTYLAVVATRKQKRRRRRRPPVVGTAFHQLYHVRRVHDYHTALSREHMTFRLLVPAGREQIYTCDPAVVEHILRTNFANYGKGSFNHGNMSDLFGDGIFAVDGDKWKQQRKIASYDFTTRALRDFSGDVFKRNAAKLAGVVSSHAASNQSMDFQGFLMRATMDSIFTIAFGQDLNTLDGSGEGRRFAAAFDDASEFTMLRYLNPFWKLSRLLNVGAEAMLKERIKVVDGFVYKLIRDRSDELSNTKAHDTDSRQDILTRFIQATTSDSGTVDYKYLRDIILNIVIAGKDTTAGSLAWFLYMMCKHPEVQEKICHEAMEATNAGEAASIDEFSQSLTDEALNKMHYLHAALTETLRLYPAVPLDNKQCFSDDVLPNGFNVSKGDIVFYIPYAMGRMESLWGKDAESFRPERWLDENGVFQQESPFKFTAFQAGPRICLGKDFAYRQMKIFAAVLLRFFVLKLRDEKEIISYRTMITLSVDQGLHLTAMAR

SEQ ID NO: 47379 - protein, 285 aa, Oryza sativa
MMASMAALLQRLLVVVNQVDPGAPGFWREFLVGMLKPVAATAVVAMAVALSFTQRLGLEGEMLYAMARAFLQLSVIGFVLQFIFTQKSAAWILLAYLFMVTVAGYTAGQRARHVPRGKHIAAVSILAGTSVTMALLVALRVFPFTPRYIIPVAGMMVGNAMTVTGVTMKKLREDVGMQRGVVETALALGATPRQATARQVRRSLVIALSPVIDNAKTVGLIALPGAMTGLIMGGASPLEAIQLQIVVMNMLMGASTVSSILSTYLCWPAFFTGAFQLNDAVFAAD

SEQ ID NO: 47380 - protein, 243 aa, Oryza sativa
MASLFKDPTKLSAYGDRRFTGTQEEYEAALQASVTVYVGNMSFYTTEEQAYELFSRAGEIRKIIMGLDKNSKTPCGFCFILYYSREDAEDAVKYISGTMLDDRPIRVDFDWGFEEGRQWGRGRSGGQVRDEYRTDYDPGRGGYGKMVQKELEAQRELVDYGGAFQPNAPPQYDRGDRKRGYGDSYRNDRDYQRKRYRNDERSSQRAPDSEFKRDAIDSEKNPRFREKGDSDEEDDDYDKRRRR

SEQ ID NO: 47381 - protein, 277 aa, Oryza sativa
MDLKTSNSPVIADPLPKLALPSAVMTYTTPTSFPSTGLYLNTPKKKPLPGKIEEVRAAGWLDLMLASSPPRKRQTKDFANDVQADELDLLYRNWVVNHPSALTSFEDIVNLARGKRLALFLDYDGTLSPIVDNPENAVMSDEMRSAVKHVASLFPTAIISGRSRDKVFDFVKLTELYYAGSHGMDIMGPVRKSDSSGQHVECIRSTDSEGKEVNLFQPASEFLPMISEVYKKLSESIKDIDGARMEDNKFCVSVHYRNVAPHDYGEVHQRVTAVLKN

SEQ ID NO: 47382 - protein, 82 aa, Oryza sativa
MPQRCLPPAMLGWRRLPPAAPGCHRRAIFLPRRPTVTAVAAFCGLIPSARRHRTSATVVATKHGATTAILIYLSVPLPRFSS

SEQ ID NO: 47383 - protein, 56 aa, Oryza sativa
MSNRRTYPVVALIPVGCTTLIPCRSTLVVLRYLYSLSAYTKYPTYTVDCRKFGKWV

SEQ ID NO: 47384 - protein, 87 aa, Oryza sativa
MEEREGRWGIAESEMGNGGERGDVGRCSSCSTGVIFVVTAAATTTKPALPPLEKGEKEMDAKLRRWHTRTARMGLSQLTQRGRWPPS

SEQ ID NO: 47385 - protein, 384 aa, Oryza sativa
MSFSSSMSKQQVLEVAGDEVGGGGGEEVMELIPGLPEEVAEKCLLHLPFLYHRLFRTVSSTWNRFLTVSPAKFPSAAAASVSLSLPFLFAFAFDPASRRLQCQALDPFSRRWLLLPPVPGGAAAAGSFAVVGLPRRGEIYVIGGVVEGGDKAVRSVAVYSAARNGWEEAAGMGTARGYMAAGEVGGRLVVAGEDGEAEVFDPEEGRWAPAAARRGAAVARYDAAASGGKLYVTEGWAWPFERAPRGAVYDAASDSWSEMARGMREGWTGSCAVAGGRMYIVAEYGEWRLKRYDEPRDEWRMVAGSGVPPEVRRPHVVSGEVEEVGSGGRRRIYVVGAGLDVAIGTVSPSPAIHGGDDERVDWEVVKGPAEFAGLAPCNAQVLYA

SEQ ID NO: 47386 - protein, 437 aa, Oryza sativa
MGDHQMMHAAPAAMYNGGGGTTSSHGVWWSNAVGVPAAATCSTTTELAGYTAWSSALAAGYDGMVADNGGKQAKSTTTASSESPGNNSSVTFQEPASIPDPAAVAAVPQPGLAGFTDWTQPFMNNGAGLHEFLQDGHHDMSASSLMNHSSNNLALQQAGHHHELLSSFGSDLLLSPTSPYGGFQSSLLRSLMEPTAKQQQQQPALAGLQQYHQYQQQMGHAPAAAAKFAQAVGARDSLQFTNDAPFWNPSAGFGMPAAVAVAAAAAQDQASVRSAKRSSPAPPRAAATLALKTAMEGVGDSSSVITKKETAFKKPRLETPSPLPTFKVRKEKLGDRITALQQLVSPFGKTDTASVLHETIEYIKFLHDQVGALSAPYLKNGAHQVPHLKNSSPDKSEHGEISLKGRGLCLVPISSTFAVASEVPVELWTPFGANFIR

SEQ ID NO: 47387 - protein, 423 aa, Oryza sativa
MAATTTRPLPLLLLLLLPPLLLLLLSFHAAAAAAAEEFPRDGRVIELDESSFEAALGAIDYLFVDFYAPWCGHCKRLAPELDEAAPVLAGLSEPIIVAKVNADKYRKLGSKYGVDGFPTLMLFIHGVPIEYTGSREADLLVRNLNKFVAPDVSILESDSAIKSFVENAGTSFPMFIGFGVNESLIAGYGGKYKKRAWFAVAKDFSEDFMVTYDFDKVPALVSLHPKYKEQSVFYGPFEGSFLEDFIRQSLLPLTVPINTETLKMLDDDDRKVVLAILEDDSDETSSQLVKVLRSAANANRDLVFGYVGIKQWDEFVETFDISKSSQLPKLIVWDRNEEYEVVEGSEKLEEGDQASQISQFLEGYRAGRTTKKKVSGPSFMGFLNSLVSLNSLYILICVFALLGVMIYFTGQDDTPQVRRAHEE

SEQ ID NO: 47388 - protein, 775 aa, Oryza sativa
MSYPTFHVHPPFPVSARKKEDDGGGGGGKKEAAAAAMRRLAEMDHRAAADGGKVVAAVAVDGDRGSQHALKWAADHVLSLSHPFFLLHVRRKHASLHSAGGKQFSLLHVQDDVAASSPDQMDHHTKDLLLPFQCFCSRRGLQCRETILDGTDVWKVIIDFVLDHKVDKLVLGASSRNAFTRTIWKLDVPTCVTKSAPNFCSVYVISKGKLSSFRLATHANANDTSKEELENISENRPLIAKSEPAPIIHIEGQNSSSALCPGCNPLSPNLSEECTESTSKYYPEDLEAEIRKLKLELKQKNDDMHMWNKLPLGIGDRSENSNASVEHEDEHLQEFTTCSTHSYSERPNAEPSSAVRGPKHKLLKLETSSSDQCRERTIQEFKDHSSQDTVHPILRRLPPKFYSPRNDSKHGCASEKAYNLELKCKSLPRPIETKRLLEGLPTRFQCKIYTTEEVANATDHFSPELKVGEGGYGPVYKATLDNTLVAAKILHSNITQGLKQFQQEVELLNNIRHPNMVHLLGACPEYGCLVYEYMPNGSLEDRLFCRSGTPPLPWQLRFKMAVEIATGLLYLHKMKPEAFVHRDLKPGNILLDKDFVSKISDVGLARIIPRSMDETVTQYRMTDAAGTFCYIDPEYQKTGLVTTKSDVYALGIIYLQMITAKDAMGLAYMVSDALEEGTFEGLLDPNVTGWPVQEAQKFAELSLKCCELRHRDRPDLESVVLPELIRLHTFVASSGDNSSIDQGHQRSVSDKELALENDLAEILNDGLVKGASFAA

SEQ ID NO: 47389 - protein, 112 aa, Oryza sativa
MTTTMMATPMDLPLAWPGRVDPPLAGLGEGRGADGDEEERRRLTSSLSLRRTDDDGDDGAACGKPGQRKRGSDARRRPQRCRRQLLGRPADGGGEPSARGEAGGGAFFFYLL

SEQ ID NO: 47390 - protein, 247 aa, Oryza sativa
MHTPILSSGLFTVLSCCHCTSCLLPIPDSCTGTEDAGDSTERDQRRGGGERGAEAAQRDVPGHQQLHQDRGARAGGVRQELQVAGGAPAGDAPDGRRRQGVPARRGARHRLHHAEAPAPGDGLHGDRDGCGARHPRAVPRPPVPRPPRLLGRRRQVPAGEAPGAEGARPRRRRLLREQLPGGVLRLLRRLLHLLVGAHGGRRRRLLRRRERRRGHLGRRPGLENLEVRFYGGGFSESYAGFDWPPSP

SEQ ID NO: 47391 - protein, 136 aa, Oryza sativa
MASGGLRRLPLLGRRLRRRRPVRPPPRRVNTHTLTNSGRPNSTRIEIQSVILTLHFLPTAPSKKKRKKTLIMNLDTYMSRFVVRIGFFFFGRRGKQLVVSQSASSIRRLARSRRSRAPHAGLNGSKGRELLFSLSL

SEQ ID NO: 47392 - protein, 661 aa, Oryza sativa
MAESLETLDVPLAHSDMNGSSTVQGEPSDENELIVDDLDAIWNELNTSLHVSRYVTDSVMKGTISAVEQESARQIASKDAEIAFLNEKLHQFRNSGLSLSEGRDKLYEEIYNLRQQLVTLSKSLLNSEWGLSVSHYNNFEGAEDESKHRGNEKSSKDGITKENGSKGSNEDIFIDPTVLKHMDRDELVAHFNKMMNQMKRQHDSTLQEKTEEIFRLKRENLKKEGPNPWHLRNNKEFELMRKKIWEVITKLDEVLVENKRTIRIKSDVFPGQQDKIKVVDSHNHQLQGAPTDNEEEECTTLIKASHFTPIETNYLNQIRRLESDIEDASIVTIVREETEKILVTEFISEIKMGLHGYEMEFNMNLDFWSIIQKEAIAEAASNINSFLLKYSEENSCAEAQSLHMQEMDKLKLNVDTFNLVIREKEEYLSQIEFKAIEDHLDFLRHELDSLRGKVAKQDSGISDKCRDFDVIVSRLEQALQHVHRNEIALKELNDRFRTVSDSQKEVEKQNKVLHAIIKEKEKGFSSSISKEKEFTECMRCVVESMRGFEKLVTDQQTIIAHKVQHNESRFSLLKEQCKILAKEGNTLRKKALRYKEISETRASNLQKAELEVDLLGDEVEALTDLLAKIYIALDHYSPVLQYYTGVMEILNMIKKHLNMSK

SEQ ID NO: 47393 - protein, 328 aa, Oryza sativa
MAVVKCIRVHELGGPEVLRWEQVEVGEPKEGEIRIKNTAIGVNFIDVYYRQGVYSAPLPFVPGREAVGVVTAVGPGLTGRKVGDVVAYAGNPMGSYAQEQIIPASVAVPLPPSIDHNTAAAIMLKGMTAHVLLRRVYKVQSGDCVLVHAAAGGVGSLLCQWANALGATVIGTVSNEEKAAQAAEDGCHHVIIYTKEDVVTRVKEFTAGKGVNVVYDSVGKDTYKGSVECLAWRGMLVSFGQSSGRPDPIPLSDLASKSLLVTRPSLMHYAATRDELLESAGEVFANVGSGVLRIRVNHTYPLSQAARAHADLQARKTTGSILLIPDDA

SEQ ID NO: 47394 - protein, 104 aa, Oryza sativa
MPMNVNAVVIYLAIVLAGYVVVSIADSFAAPAISMRLKISEAKAIFTQDYILRDDKELPLYSRVVEAKAPMTIVIPVRGSTPIKGLRADDLSWEDFLAKVNHAK

SEQ ID NO: 47395 - protein, 193 aa, Oryza sativa
MSTSSGADSSPPVSGLDYDDTALTLALPGSSSSSSSTADPERKRAAHADHADAKPPSPKARAVGWPTVRAYRRNALREDSARAKLVKVAVDGAPYLRKVDLAAHAGYAPLLRALHGMFASCLAVRGGGGGDGEGTKLVDLVTGAEYVPTYEDKDGDWMLVGDVPWKMFVESCKRIRLMKSSEAVNLSPRRSSR

SEQ ID NO: 47396 - protein, 416 aa, Oryza sativa
MSTDVVVVVAVIILIGLFSMQHYGTDKVGWLFAPIVLLWFILIGTIGALNIHKYNSSVLKAYNPVYIYRYFRRGKSESWTSLGGIMLSITGTEALYADLCHFPVLAIQIAFTLVVFPCLLLAYTGQAAYIISNKDHVVDAFYRSIPDTIYWPVFIIATLAAIVASQATISATYSIIKQALALGCFPRVSVVHTSKKFLGQIYIPDINWVLMILCIAVTAGFKNQSQIGNAYGTAVVIVMLVTTFLMVPIMLLVWKSHWILVVIFIVLSLMVELPYFTACINKVDQGGWVPLVVATTCFIIMYVWHFCTVKRYEFEMHSKVSMAWILGLGPSLGLVRVPGHRLRVHRAGKWSASYLLPFHHQPPCHPLGRRLRLCQVPPSIYSPNRRKVHREEDRAKELPHVPLCREVRVQGHPQER

SEQ ID NO: 47397 - protein, 278 aa, Oryza sativa
MSLRLRLAFRLLFCYCLLLAAAHPSSRRLLPLLVVSAAERTNVASLPGLDGALPSRFETGYVTVDEENGGELFYYFIESEGDPGADPVLLWINGGNRCSVLSALFFEIGPVKLAIEPYDGGVPRLRYNPYTWTKVASVLFVDSPVGAGFSFSRDPRGYDVGDVSSTLQLTKFVNKWFSQHREFLSNPLYVGGESYAGKLVPFLLQKISEDVEAGVKPVLNLKGYLVGNPGTGESIDYESKVPYAHGVGIISDNYMRLYWSIAEERIMPIPRMQPALKL

SEQ ID NO: 47398 - protein, 335 aa, Oryza sativa
MARAGAVLVVVLAAASVLLAPWAATAQTSSCDDALPPALAGNYSGLACRPVWNNFVLRYAQGKDNVLRVVISSMYSTGWVGMGFSKDGMMVGSSAMVGWVGKTGLSHVKQFSLRGKTPSQVVADEGFLQSKDHDHDRLTEHQGKTSFTFDFTTGGSSGSSYPDGLKRAHGALNLFAWGVLLPIGAIIARYCRRWDPLWFYLHAGIQLVGFILGLAGIVAGVSLYNKIQADVPAHRGLGIFVLVLGILQILAFFLRPHKDSKYRKYWNWYHHWVGRLALFFAAINIVLGIKVGAAGNSWKIGYGFNLAILLITIITLEVLLWTRWKNNNSSSMPTY

SEQ ID NO: 47399 - protein, 607 aa, Oryza sativa
MGRWWPPTSAAAATAEPRSVQLLLLGVALVAASFYAGTVFRSPSAPALLLPPSASRSPDPSRTPGAPKFTNRVSLSYRTKPISVPDYGVDVCPLKYNEYIPCHDASYISQLKKLDRSRHEDLESICPPQEKRLFCLVPPPNDYKIPIRWPTSRDYVWRSNVNHSRLAEVKGGQNWVHEKGKLWWFPGGGTHFRHGASEYIERLGNMTTNSTGDLRSAGVVQVLDVGCGVASFSAYLLPLDIHTMSFAPKDGHENQIQFALERGIGAMISVLATKQLPYPENAFEMVHCSRCRVDWHENDGILLKEVDRLLRPNGYFVYSAPPAYRKDKDFPVIWEKLMNITTSMCWKLIAKHVQTAIWIKPEDQSCRQKNADTKLLNICDSYDNSPPSWKIPLMNCVRLNKDQSNMQKLPSRPDRLSFYSRSLEMIGVTPEKFAKNNKFWRDQVSMYWSFLSVEKTSIRNVMDMNANIGGFAVALSNDPVWIMNVVPHTMSNTLPVIYDRGLIGSYHDWCEPFSTYPRTYDLLHAFHIFSHYQSRKEDCSLEDIMLEMDRIIRPEGFIIIRDENAILSGINDLAPKFLWDVTTHMLENEESKPEKVLVCRKKFWSIV

SEQ ID NO: 47400 - protein, 246 aa, Oryza sativa
MAVAAVRAAAADAAVTFLWVLCVSTLGASTAAVTSYLRIHEGIHYALLVTVSLLSVLLFAFNLLCDALGGASFNPTALAAFHAAGLSSPRHSSLFPLALRFPAQAAGAVGGAMAVSELMPEQYKHMLGGPSLKVDLHTGAAAELVLTFVITLAVLWIIVKGPRNPIVKTWMLSISTVCLVLTGAAYTGPSMNPANAFGWAYVNNRHNTWEQFYVYWICPFVGAVLAAWVFRAVFPPPAPKPKAKKA

SEQ ID NO: 47401 - protein, 597 aa, Oryza sativa
MFGRIDLCDFVLEHPTISRFHAVLQFRNDGEVFLYDLGSTHGSFINKTQVKKKIYVEIHVGDVIRFGQSSRLYIFQGPSELMPPEKDMQKLRDARVQQDMLDREASLLRAKNQAALAEGISWGMSEDAVEDSAEDEADEITWQTYKGQLTDRQEKTRSKIIKRLEKITNMKKEIDAIRAKDISQGGLTQGQQTQIARNEQRTSQLMEELENLEETLNDSIRESLGARTGNSNRGSHKASLEEEDDILSDEDDFYDRTKKKSSSHKSSEQQVETADSLLDKKDTITSDIESKKKLVEEEKNKLAKSENADVGDDLDAYMSGLSSQLVHDKIAQIQKELSDLQTELGRVVYLLKIADPMGEAARKRDLKPRETKSPASNDSLRPESRKQNKVAQNKASTEEKLKESCAEKTQVDKPAEEEKGISTNQENGSKPAFSIPKPQWLGDKRTVESEENCIKEESANEEETDNFVDYKDRKTILSGSANGKDLEEAAPGLILRKRKSDQSAANEVESSVESEASAADAVALLLKHKRGLQTSEDMEDENEPQASKRKSKKSKQKRVLGPARPDFLDAGPDHETWVPPEGQTGDGRTSLNDRLGY

SEQ ID NO: 47402 - protein, 525 aa, Oryza sativa
MGSRSRGGRHLLLLLLLHLLSLHSSLLPWAAVSAAGGGGSGDPYVGVTIGTAVTNLLSPSDLPEFLRAQRITHVRLYDADPRMLSALASSGARAFVGVPNDELLALGSSPATASAWVARRVLPYAGANSSTPGLIAAIAVGDEVPTALPSALPVLLPAIQSLAAALAAANLSSIPVSTPLPFSVVLDPFPPSQAFFNQSLAKSFILPLLSHLANTSAPLMLNLYPYYSMMQSNGVIPLDNALFKPLPPSLEMVDPNTLLHYTNVFDAMLDAVHVAVKNLNATGGGGPVPVLVTETGWPSYGDRRAEPYATRDNADAYNSNLIKHVNDKPGTPMRPGAQASVYIYELFNEDLRPGPVSEANWGLFHGNGTPVYLLHVSGAGGFLANDTTDRTFCIASDDADEKAVQAAMDWACGPGRTDCTAIQPGQGCYEPNDVRSHASFAFDSYYQSQGKAAGSCYFQGVGMVTTTDPSEYTPPQHCHFFLIAYAFRFFLLFMFSVLTVFDLFIHVCLELEGFSRSACGWVIIL

SEQ ID NO: 47403 - protein, 206 aa, Oryza sativa
MASARAALLRRHCLAAAGGANPVLFSGHGLRYRKLEVILTTTIDKLGKAGEVVKVAPGHFRNHLMPKMLAVPNIDKFALLIHEQRKLYQRQEEEVVKEVRQEDDDAKQQEEKLKEYQTAAKCLDNALLVLRRFISVGNELRSPVTKDEIVSEVARQLNINIHPDNLHLPSPLASLGEFELPLRLPRDIPRPEGKLQWTLTVKIRRK

SEQ ID NO: 47404 - protein, 332 aa, Oryza sativa
MAAGERPATMRAVQYSGYGGGAAALKFVEIPVPSVKKDEVLVKVEAASINQSDLMTQKGMMRPFHPKFPFIPVNNVSGEIVEVGSAVREFKVGDKVVSKLDFWTAGGLAEYVATSDKLTVARPAGISAADAAGVPVAGLTALQALKAIGTKFDGSGTSGGADVLITAASSGVGTYAVQLAKLGNHRVTATCGARNLGLVAGLGADGVLDYKTPEGAALSSPSGKKYDYIVNISNKNKWSVFKPRLSSHGRVVDVAPNFGNFVASVVTLFSRRKKLSLVSLKMSKEDLGLLLELMREGKLRTVVDSRHPFEKAADAWARSLSGHATGKVIVEM

SEQ ID NO: 47405 - protein, 378 aa, Oryza sativa
MGSSEKNGTAYGEYTYAELEREQYWPSEKLRISITGAGGFIGSHIARRLKSEGHYIIASDWKKNEHMTEDMFCHEFHLVDLRVMDNCLKVTNGVDHVFNLAADMGGMGFIQSNHSVIMYNNTMISFNMLEAARINGVKRFFYASSACIYPEFKQLETDVSLKESDAWPAEPQDAYGLEKLATEELCKHYTKDFGIECRVGRFHNIYGPFGTWKGGREKAPAAFCRKAQTSTDRFEMWGDGLQTRSFTFIDECVEGVLRLTKSDFREPVNIGSDEMVSMNEMAEIILSFEDRELPIHHIPGPEGVRGRNSDNTLIKEKLGWAPTMKLKDGLRFTYFWIKEQIEKEKTQGVDIAGYGSSKVVSTQAPVQLGSLRAADGKE

SEQ ID NO: 47406 - protein, 185 aa, Oryza sativa
MSSVWGLRRRSPSSSSPACSCRRGWEHLFSASASSSSRRRRWFGTSTLLRSKSALQSHQIDFVLNSDQSSRAFKEVVIIRHPRIGEYALGFITSTLTLRGVADGRRGGGSGAGGGRELACVYVPTNNLYLGDIFLMSRADVIVPDLSVREAIEIVLSGGMSVPQIISAVEGVVGLGGHGRPVKSP

SEQ ID NO: 47407 - protein, 950 aa, Oryza sativa
MVENGVLEQPKGVSRNRPRAQSNDHPVDPGYLPELTWEHKLSNIGYDLPSFRLTWRETFQLAGLGLRLGRHILEETSKGRAAVIDPMKKRIARSGQGVPLGGIGSGSIGRSYKGEFQRWQLFPGTCEERPVLANQFSAFISRKDGRNYSSVLHPGKPDLPKGSNISGIGSWDWNMSGQNSTYHALYPRSWTIYNGEPDPDVNIVCRQISPIIPHNYQQSSYPVSVFTFTVTNSGNTAADVTLLFTWANSVGGKSELTGYHSNSPMIEKDGVHGILLHHRTANGQPPVTFAIAAQEKEDIHISECPYFIISGSSDAFSAKDMWNYVKENGSFDNLDLTKTSMCSKPGLSIGAAIAASVKLPPQTTQNVSFALAWACPEVKFSSGKTYHRRYTKFHGTDNDAAASLAHDAILEHNSWERQIEEWQNPILQDERFPDWYPVTLFNELYYLNAGGTIWTDGLPPIQSLTGIGEKKFSLDMQNGDADDANGIIPRNNTASDILNQMASVLERIHASMESNSAIGTTLLQGEENIGQFLYLEGIEYYMWNTYDIHFYASFSLIMLFPKLQLSIQRDFAAAVLMHDPEKLRMLHDGKWVARKVLGAVPHDLGLYDPWFKVNAYTLYNTDRWKDLNPKFVLQVYRDVVATGDKSFARAVWPSVYMAMAYMEQFDRDKDGMIENEDFPDQTYDVWSMAGISAYCGGLWVAALQAASALAHEVGDKASEKLFWDKYEKAKSVYGKLWNGSYFNYDDGDNIMSASIHADQLAGQWYAKACGLFPIVDKDKAESALEKIYSFNVMKFKDGKRGAMNGMWPDGTVDMSAMQSREIWPGVTYALAATMIQEGMVEKGFKTAEGIYHAAWSPEGLGYSFQTPEAWNNDDEYRSLCYMRPLAIWAIQWALSNPKLHKQTADIPQDSFPKNQFSYARIAKLLHLPEDESPESFLRVIYEIVRNRYRS

SEQ ID NO: 47408 - protein, 206 aa, Oryza sativa
MGEIGINDYNHHFFQNRSFTAEIKPLVPLVILKIENATKVLIDLGAKTILVPGIPPMGCIPRFLNLLPSKNHNDYDKLGCLKWLNDFSQYHNRALKQMLQRIHHDPTVTLIYADYYGAMLKIVRSPQNNGFTKESVLRACCGVGGAYNADSLVCNGNATTSNLCTEPSRYISWDGLHLTEAAYHYIARGVLHGPYTEPAIPTRCTA

SEQ ID NO: 47409 - protein, 588 aa, Oryza sativa
MEPPSGFWASLGSFLKFLPYFCGLLILGVIKGILICPWACLIMAIGLSALILGLWPMHVIWTYYCIIRTKLVGPVVKLLLLIAATATLILWLIVGIPGSILAGLVYGFLAPIMATFGAVGKGKEKPFVHCFVDGTWSTITGSCTIVRDVKDLLFHSYFSIMDDLRLQAPPDNKPYEIRLLDIPGALLSAACGLILDGIMFTLIAIYKCPVMLFKGWKRLIQDMIGREGPFLETACVPFAGLAILLWPFAVVGAVLASILSSIPLGAFGAVVAYQESSLKMGLSYVVSSVSIFDEYTNDVLDMAPGSCFPRLKYRKREDSSHGGSLSRPTSFNKEKQEGKKPPARVTSFKNSIEDFNPFKLLEHLFVECKHQGETLVNEGVITMKDIEETKSGKVGTGVLNVGLPAYVILNALLRSAKANSVGLLLSDGSEITSDNRPKHTLYEWFFDPLLVIKEQIKAENFTEEEEKYLKMRVLLIGGPDRVKGSLPDVPSLDERKKAEIDAFARRLQGITKSISRYPTAKRRFDILVKQLLSELERTVGGGQSTNGSQSQSLRGGIARMLSQKSMGKAANVRDEDPEAQMTSHDRTP

SEQ ID NO: 47410 - protein, 83 aa, Oryza sativa
MWLTTLTSGCVPAWVTKSMTSSAALTMRGMACWSGGHCHPLLARHPLLPPVALSRWSPSPPSFSPAPRRPPLGREMGEGEWGT

SEQ ID NO: 47411 - protein, 86 aa, Oryza sativa
MPQLNICRTLYNMKNQGMPLIQYLMSLILAFMSYLNWQSTTGIIVRSTYHFKCRISFFMLVQINLSCSLVIYFVMMKKIMPTEPLF

SEQ ID NO: 47412 - protein, 474 aa, Oryza sativa
MTKPTTMAIFLSIVLLSMAQLPSLVAGTGRPRVIIIGAGISGISAGKRLSEAGITDILILEATDHIGGRMHKQRFAGVNVEIGANWVEGVNGEKMNPIWPIVNSTLKLRNFLSDFDSLAQNVYKDGGLCDAAYVQKRIDLADEADKSGENLSATLHPSGRDDMSILSMQRLNNHLPNGPSSPVDMVVDYFTYDYEFAEPPRVTSLRNTVPLPTFTDFGDDNYFVADQRGYEAVVYYLAGQYLEADKSGNIVDARLQLNKVVREISYSSTGVTVKTEDNSTYQADYVMVSASLGVLQSDLIQFKPQLPSWKILAIYQFDMAVYTKIFVKFPKKFWPEGAGREFFLYASTRRGYYGVWQEFEKQYPDANVLLVTVTDEESRRIEQQPDSQTKAEIMEVVRSMFPDEDVPDATDILVPRWWSDRFFQGSFSNWPIGVSRYEHDQLRAPVGRVYFTGEHTSERYNGYVHGAYLAGIYA

SEQ ID NO: 47413 - protein, 284 aa, Oryza sativa
MASSSRPEEAAAAAPPWSRLEGRVVLVTGASSGLGREFCLDLARAGCLVVAAARRADRLRSLCDEINASAPRASAAAAAVELDVASGGPALEAAVQSAWDAFGRIDVLINNAGLRGGVHSPLDWPEDEWETLIKTNLTGSWLVAKHVCRRMRDAKLKGSVINISSVSGLNRGHLPGSTGYAASKSAMHYATKLMALELGAYGIRVNSIAPGIFKSEITAPLLQKKWLSTVVSKIVPLKTHGTTDPALTSLVRFLIHETSSYVTGNIFIVDSGATLPGVPIFSSL

SEQ ID NO: 47414 - protein, 248 aa, Oryza sativa
MQIIQSRLSSKGSGYGSDLLGLMLEACIATDQGREQHQLSLSIDEIIHECKTFFFAGHETTSLLLTWTVFLLSVYPEWQARLRLEALRECGKENPNGDNLSKLKEMSMVFLETLRLYGPALFLQRKPLTDITVGETKIPKDHAIIIPSAIMHRDKEIWGDDTDEFNPLRFQNGVTRAAKVPHALLAFSIGPRSCIGQNFAMLEAKSVMAMILKKFSFTLSPNYVHAPVDLLTLQPKFGLPVVLRLLDA

SEQ ID NO: 47415 - protein, 179 aa, Oryza sativa
MAAVAFRLGQRVHAAGDPARVGTVRYLGPVDGHPGDWLGVDWDAGAGGRHDGSLAGRRYFVAAGERSASFARPTALSAGITLPDAIRNRYRVEEFTKEEQDEMYVFSSSQKRVSVELVGKNKVEEKLKNLNDLTSASVSYMGVSSIGPGDELKNLVPNLRQLDLTGNLLSQWQVCTSRD

SEQ ID NO: 47416 - protein, 430 aa, Oryza sativa
MGKHEFLTPKAIANRIKAKGLQKLRWYCQMCQKQCRDENGFKCHCMSESHQRQMQVFGQAPDRVVEGFSEEFLDAFLTLLRRAHRHSRIAATVVYNEFIADRHHVHMNSTRWATLTEFVKFLGREGHCKVEDTPKGWFITYIDRDSEQAVKARLKRKRIKSDLAEDERQERMIARQIERAQQSMGKTNGELGDDASPDGSEGESGSEDEYSDSENDHEGQEEDAKEANKAAGKIAIALQRAVPGPKVNPLDDKPKVKFGFEEEDEVSARDKEKEELAKKKGKDAINAAEARRSALDELMKEEEKAKERSNRKDYWLCPGIVVKVMSKSLAEKGYCKQKGVVKRVIDKYVGEIEMLESKHVLRVDQDELETVIPQIGGLVRIVNGAYRGSNARLLSVDTERFCAKVQVEKGLYDGKVLKAIEYEDICKIFH

SEQ ID NO: 47417 - protein, 360 aa, Oryza sativa
MAVVSESSRKALLPSFLYAAPAASSSPSFAAAAAVGVRGVPAPSLAGPAVWARSPREPAGKIEMYSPAFYAACTAGGIASCGLTHMTVTPLDLVKCNMQIDPAKYKSISSGFGVLLKEQGARGFFRGWVPTLLGYSAQGACKFGFYEFFKKYYSDIAGPEYAAKYKTLIYLAGSASAEVIADIALCPMEAVKVRVQTQPGFARGLSDGLPKFVKAEGYAGLYKGIVPLWGRQIPYTMMKFASFETVVEMIYKYAIPAPKSECSKPLQLGVSFAGGYIAGVFCAIVSHPADNLVSFLNNAKGATVGDAVNKLGMWGLFTRGLPLRIVMIGTLTGAQWGLYDAFKVMVGLPTTGGVAPTPAK

SEQ ID NO: 47418 - protein, 506 aa, Oryza sativa; identical to SEQ ID NO: 43275

SEQ ID NO: 47419 - protein, 142 aa, Oryza sativa
MGKTRGMGAGRKLKTHRRNQRWADKAYKKSHLGNEWKKPFAGSSHAKGIVLEKIGIEAKQPNSAIRKCARVQLVKNGKKIAAFVPNDGCLNFIEENDEVLIAGFGRKGHAVGDIPGVRFKVVKVSGVSLLALFKEKKEKPRS

SEQ ID NO: 47420 - protein, 493 aa, Oryza sativa
MTRVIHDSGEGMQKEALAMVSSDVNFPKGHFPDYKIGPNNQIIDPEEIHEAVPLKEIVAKETAQLLEQRRRLSVRDLKEKFEKGLSGASKLSEEAKRREAASLDRQVLLKKLRDVLDTLKGRVAGRNRDDADEAISLVEALAVQLTQREGELIYEKAEVKKLASFLKQATEDARKVAEEERALALAEIEKARTAIAIVEKGLQEHDAASSSREKEEIEGLRKEVREARRIKMLHQPSKVMDMEFELKALRTLIAEKNQLCNQLMKELAMIKRLEEDSSDLYDLEGSDILGSQFCIIPRFDDAPDISSCPTQWYRVISGGNRNLILGATKPTYAPEPFDVGRLLQAEIVLNAEKVTIQTMGPINPAAGLEHYVESLMKRADVEFNVVVTQMNGNDYSSNSVHAFHIGKMRIKLRKGWSTKARESYSTTMKLCGSRGGGNAAATAVFWQARKGLSYTLAFETDRDRNAAIMLARKFASNCNITLTGPGDEVHAGS

SEQ ID NO: 47421 - protein, 173 aa, Oryza sativa
MGQILDAIADCSLAIALDSNYSKAISRRAGLYELIRDYDQAGNDLRRLISLLERQLQENIYTPSEKSDGIRSSLNRSNLRLSALERDAKKGISLNVYLILGIEPSCTFLDIKKAYRKAALRHHPDKAGNFLVRSENINDAVWRDIANDIRKDADYLFKLIGKAYAILSDPTTN

SEQ ID NO: 47422 - protein, 151 aa, Oryza sativa
MGGLRRTEAVPRFGRSSPFLSLLPLSLSLLLVLVGRSAGAEEVWWPVTSYTMAAATLCGGDKDGVDLQIERCLSPQLPHRAHVKREEAGRPAAACSSSSSFCGNTSCRTSSSPLPPAARGGGSRGAVLLLSRLTPSTPAPSRRPSMPAPPH

SEQ ID NO: 47423 - protein, 304 aa, Oryza sativa
MAAGRGISQLLKKAFRPSSSSPLSSSWINHEESSGFTGLRALAILGVGASGLLSFATIASADEAEHGLEAPHYPWPHAGILSSYDHASIRRGHQVYTQVCASCHSMSLISYRDLVGVAYTEEETKAMAAEIEVVDGPNDEGEMFTRPGKLSDRFPQPYANEQAARFSNGGAYPPDLSLITKARHNGQNYVFALLTGYRDPPAGVSIREGLHYNPYFPGGAIAMPKMLIDGAVEYEDGTPATEAQMGKDVVSFLSWAAEPEMEERKLMGVKWIFLLSLALLQAAYYRRMKWSVYKSRKLVLDVVN

SEQ ID NO: 47424 - protein, 270 aa, Oryza sativa
MIGAMANFLDYDVYDLDLTSVKNNSELRKLFLDTTDKSIIVIEDIDAIEVELTTKRKGKKAANGDEIHDKRMLIEFSDKNDEKSKVTLSGLLSFVDGLWSACGSERIFMFTTNHIDRLDPALIRPGRMDKHIEMSYCRFEAFKVLAKSYLDITEHSLFAEIERLLDDTDTTPADVANNLMLRSKRNGEISRLLDEIDGAPRADVAKWCKRKRDTDECLAGFVEILKKSKMESATTPMDSMEEAKEERPNAKESYKMGRTYDENYRLGNAS

SEQ ID NO: 47425 - protein, 257 aa, Oryza sativa; identical to SEQ ID NO: 30400

SEQ ID NO: 47426 - protein, 397 aa, Oryza sativa
MVQGKFRHLPVVENGEVIAMLDIAKCLYDAISRLEKAAEQGSAIAAAVEGVERQLGGNFSAPYAFIETLRERMFKPSLSTIVTEGTKVAIVSPSDPVYVATQKMREFRVNSVVVATGNTLQGIFTSKDLLMRVVAQNLSPELTLVEKVMTVNPDFATLDTTILDALHIMHDGKFLHIPVLDREGQIAACLDVLQLTHAAIQLVEGGNDTVNDVANTVMQRFWDSTLALESPDEECDSRSEVSLLLASETGDGKSSIYPPVIGNSFAFKLQDQKGRVHRFTCGSESLNELASSIKQRLSITDEEGIMQLLYEDDEGDRVLLTTDADLAGAVLHAKSSGLKVLKLHIDLSESSTEVTKPSQQLAAARRSRLSPVRVGLMAGVVALSGAAVMVYLKRAKV

SEQ ID NO: 47427 - protein, 246 aa, Oryza sativa; identical to SEQ ID NO: 37170

SEQ ID NO: 47428 - protein, 110 aa, Oryza sativa
MGKAASMRVALVSVVLVGLILVSTAHAARPEKLPAVVSPSIAPAVAEVVDAAINAVDLLAGFQKPPGARLPPPGGTAVTGGNRGNRAKPRQIYKSKFEFKNSGKPRGLTR

SEQ ID NO: 47429 - protein, 91 aa, Oryza sativa
MGRGGRRCRRHSRLLATPASSGGTTSASRRRRSRYHPPPSLPRPRRRHHLQRARWGRWSATNKAATGPQTAEARAVAVAQAEAGVCDGCGS

SEQ ID NO: 47430 - protein, 61 aa, Oryza sativa
MPEESYQEEGYAPEAEEEAADDDDEEEAVEASAEVAEEAEDVEEVGTSYEKFVNIINLPQL

SEQ ID NO: 47431 - protein, 484 aa, Oryza sativa
MGEASSSSGHPRQNPHVLGYGFHGAMPNSLPSANLFEQQGGANYFGELEEALMQQVATLRRTQQTATTTSTLHHGDTTPFSTTATAAATARPPPTLDIFPSWPMRSLHTPKEGSNVTADTTDSESSSKNNSNQNASSDQHVLVGDMAGQFDQIPQQEQHKKMATNSPTHSSKTGKALDPKTMRRLAQNREAARKSRLRKKAYIQQLESSKLKLAQMEQDIHRARSQGLLLGAPGGNTSSGAAMFDVDYARWLEEDSQRMAELHGGLHAHLPDSDLRAIVDDTLTHYDHLFNLKGMAAKADVFHLITGMWATPAERCFLWMGGFRPSELLKTLTPQLDPLTEQQVVGICNLQQSSQQAEEALSQGLDQLHQSLAETVAGGSPLDDPNVGSFMGHMAIALGQLSNLEGFVIQADNLRQQTIHQMHRILTVRQAARCFLAIGEYHNRLRALSSLWASRPREILVADEGNCGELSIAAHPSESQYSAF

SEQ ID NO: 47432 - protein, 651 aa, Oryza sativa
MAVPTSDQRKRRPFLLSLSLFLLVSALLALAFLFLDPSAQSLSVLSSRLTAPTTTLAPPAVVAGGAEAGESADATEKAEETASRPDDTAAAVNADAAAGEGGGSSESPRLDADKGAAATEGVADDDGGGGGDEPAAKVRWETCRPGRGVSSADYIPCLDNMRAIKALRSRRHMEHRERHCPVAPRPRCLVRVPSGYRSPVPWPRSRDMIWYNNVPHPKLVEYKKDQNWVTKSGDYLVFPGGGTQFKTGVTRYIQFIEQIMPTIQWGTHTKTVLDVGCGVASFGGYLLDRNVITMSFAPKDEHEAQIQFALERGIPAFLAVIGTQKLPFPDEAFDVVHCARCRVHWYANGGKPLLELNRVLRPGGYYIWSATPVYRQEKRDQDDWNAMVKLTKSICWRTVVKSEDSNGIGVVVYQKPASNSCYLERRTNEPPMCSKKDGPRFPWYAPLDTCISSSIEKSSWPLPWPKRLNARYLNVPDDSSSTDEKFDVDTKYWKHAISEIYYNDFPVNWSSTRNVMDMNAGYGGFAAALVDKPLWVMNVVPVGQPDTLPVIFNRGLIGVYHDWCESFNTYPRTYDLLHMSYLLGSLTNRCDIMEVAAEIDRILRPDRWFVLRDTTEMIKKMRPVLKSLHYETVVVKQQFLVAKKGFWRSGK

SEQ ID NO: 47433 - protein, 303 aa, Oryza sativa; identical to SEQ ID NO: 44289

SEQ ID NO: 47434 - protein, 361 aa, Oryza sativa
MAMARSQLAAVFLAVLVSVAPLAGAADNLQDACNRTLFPKVCIQALTTNPESRTANARRLAELSVYVAAEVGTAVAAFAHHELNGVKEDALFKCVDSCSDDIEEAVAHLSALTRELTDAKFLEVKAWLSATLGGSSTCEDTCKDAPISEIKNAVVTKSLEFEKLLRVTLDLITEASGSMSADVALPPATGGGGGGYGYESSSAAAAPAPSESDSDVGSGSGSAASAPGPSPSDDTGYGGSSGSPSSSPSSSPSSSPSGSPSSSPSGSPSGSPAGSPAGGPTAGGPASGPSSYGAASGPAEGPSSSGAASGPAEGPSPSGAAGPAEGPSSYGSTEGPSPSPSSSGSADAPGPGASAPDSEEY

SEQ ID NO: 47435 - protein, 172 aa, Oryza sativa
MSALLAKATAMALVQHPVINSSCRDGKSFTYNSSINIAVAVAIDGGLITPVLPDADKLDIYSLSRKWKELVDKARAKQLQPHEYNSGTFTISNLGMFGVDRFDAILPPGTGAIMAVGSSQPTLVGTKDGSIGIKNQMQVNVTADHRVIYGADLAAFLQTLSKIIEDPKDLTF

SEQ ID NO: 47436 - protein, 557 aa, Oryza sativa
MTSDELAGEGEVDGAELILSLPEDVLGLISAHLRPRDLLALSAASRSLRNAVSTADKAWLAQCRRLLPTASHLLAWRTALAHSSLAVCRFLHSAAPLLGLWAHQNPELGNLVLALPGFLSLVAVRSIPQELSPRLLWAPVFELLADHRGHPAFLFLHGAAHDSLFPGLLSSSLHPLANTLFLEAHTSTSTSHFSRLAFADRRRLLNALVAASRLTLPPDVATAPLFARSDADLPLLAARREAMLRLHSQSGGGMVRRAEIEALLIGARKTAALPADTAGDKMRLRRTFSVVAGFVRNSLRQMVTRSASANSRAEYAHPKHLPLDEFLRAGESVGLSLRGARMRLSIYRNWPSMHDNRFVLYKLTTQAPMPGREYAGLWGGTFGWPPGRPEDERKPGKALFFLLLSYEEDSEGKLQLIATKVLEGTHYVVHPNGSSMFIVRVGEPSTETFPWQTDEESRAVEINRSFAGEGIATGYGFRYPGSKPGSLFVLLDGRLAFVWRENKAVLTLQRLDLEDMIRRGERVPSLPPIPNFAYLTKSYSNVFAVAPGSTSFPASPR

SEQ ID NO: 47437 - protein, 25 aa, Oryza sativa
MTCAKVLAWKGTTSIILCKAFSPRS

SEQ ID NO: 47438 - protein, 396 aa, Oryza sativa; identical to SEQ ID NO: 31075

SEQ ID NO: 47439 - protein, 37 aa, Oryza sativa
MHDFCSFNSSSFTAHLPPNPSLSLLSSLPSKPSSREH

SEQ ID NO: 47440 - protein, 427 aa, Oryza sativa
MGNCVARSGTAVDAGGDGGEDGKRRRRRWKAPREDQLGMVPGRIFSNDGRSRTATVYTQQGRKEINQDAMLVWDGFGGEDDGVLCGVFDGHGPHGHVVARRVRDSLPLRLMSAARDSGADMPAAAWRKAFARAYKAMDKDLRSHPSLDCFCSGSTAVTVLKLGSDLYMANIGDSRAVLGSREATGGGMVAVQLTVDLKPDVPSEAERIKKCRGRVFALQDEPEVPRVWLPFDDAPGLAMARAFGDFCLKDYGVISVPEFFHWSLTEKDQFVILASDGVWDVLSNQEAVDIVSASPSRSKAAKSLVEAATREWKTKYPTSKIDDCAVVCLYLDGKMDHERDSTASLDNISIEEGSVADPNEPQEQEPTLTRNFTVRTVAGSTQEKTLAGVDARIAGVANDQNWSGLDGVTRVNSLVQLPRFSEERAIG

SEQ ID NO: 47441 - protein, 88 aa, Oryza sativa
MARRRIAAHGESAATGYRRSASRVLGLPRSKRRQKAGGAWDWEGSGPSRQLGLPRLGEYCLASNHNVLMAIHTGYEDNPKQVLHPRLY

SEQ ID NO: 47442 - protein, 590 aa, Oryza sativa
MDPHSPAMAARLYFPYPSSDDVRHEVRRKPSAAGDGAAKEAGGDSCGAGRIWRRRRQRRLGFFLQWRRLTATFCLLLSIQTTYLHMETFLSAILSDLTSRSISFLVNKCSKPTTPTVEERLQQLLLRARVIVEEADERFITNQAMLQKLNILRKEMYRGYYTLICFRCHNNEEDNVKDREVSYYFTPSKLNPAKRVRFCTGSGQTLRDQLQQVLGSLQVTLEDMREFLMFFNSCPHLCRQPYSMHLLLDRCLFGRQMETEHIMNFLLKEDIPSAENLGVLPIIGPGKVGKSTLIEHACEDERVRNRFSQIVCFNDDDVGHANMVALRDCGVIKHKNHSIGGDRMLIIIELMGDIDEGVWGRLYSASKISVAVGSKIIVTSRSDKIVSFGTTQVLRVNFFTQEAYWYFFKVRTFGSLDAEEHPKLASLAMDIAREMNQCFMGSCIYSVLLKANFNARFWSMALARIREFKLKNNLIYNAYLVGGPWEAVKPAYVRTVNKISSEYLVVLHDYQTLSVPNMVHCYTNSAQSEGEVPEVSMQDFLFGSVKPQGKFKVLAWRSHLPPHYNYIFNCEVRRPHHMVTSKKRSHKLCT

SEQ ID NO: 47443 - protein, 102 aa, Oryza sativa
MAAGVGKVGEWIRRRMMPRRSKSKAAGSRSRSEGDGGEALPAPPQRKLRARALPAALRWRPRGRLLAVLYEKVVYHLLWLVESIVVVARLCFFVMRFGLKQL

SEQ ID NO: 47444 - protein, 522 aa, Oryza sativa
MSELDREMILAERGARIDDYKLKQLARASSSSSKADKSRRDSSPPPPPSRARSSARTDRSAAKSALDELRAKRMRQQDPEGYRNRFKDLIPQSGSPPRRRAGSPPSDGSNDGDNRGRITDETRDDEFDESPSRLDPLKFDDVKSITLRRSKLVKWFMEPFFEDLVSGCFVRLGIGKSKSGTPDYRLCIVRNVDANDPDRKYKLEGYTTCKYLNVVWDNEANAARWQMTQVSDSFPSEEEFKKWLQVAEKNGVRVPTRQDVLEKKEAIQQAYNFVYSAHTVQKMLKEKKSAIRRPINVAAEKDRLRNELDMAIARRDEAEAERIRSKLNQLQKMSKPISNNEKAAKLEAMNKKNRAENFKNASEMKPVNTSLKVGEAGYDPFSRRWTRSRNYYAAKPEGESAEVPNGNDGSAVAGDEDTKNGPRGGSAATAAALVAAADAGKLVDTNAPVDLGTESNLLHNFELGISLAGLEEFGGPKGLFDGYMARKQKIEATMGYKVPDNDGRRHALTLTVSDYKRRRGLL

SEQ ID NO: 47445 - protein, 217 aa, Oryza sativa
MRKTLVYYRGRAPNGHKSDWIMHEYRLETTETAPPQEEGWVVCRVFKKRLPTTRRDSDHDAPCGSWYVDEDAPGAFMSPMMITRSSILRPHQHHAGITLQEQHLHTTYKHRDLTTKIQQLQVPAAGHHLLNTMPHDLESSTSSFHSLLVSPDHHQINMHHAQADPFFDDMHAVDQATTTDWRVLDKFVASQLSNDATNKPADHYTDEGDILQVSDKQ

SEQ ID NO: 47446 - protein, 501 aa, Oryza sativa
MDAKKGSGEPEFFSEYGDASRYEVTEVVGKGSYGVVAAAVDTHTGGRVAIKKINDVFEHISDATRILREIKLLRLLRHPDIVEIKHIMLPPSRREFRDIYIIFELMESDLHQVIKANDDLTPEHHQFFLYQLLRGMKYIHAASVFHRDLKPKNILANADCKVKICDFGLARVSFDDTPSAIFWTDYVATRWYRAPELCGSFFSKYTPAIDIWSVGCIFAEMLMGKPLFPGKNVVHQLDLMTDLLGSPSGETISRIRNEKARRYLGNMRKKPRVPFSQKFPGADPMALHLLERLLAFDPKDRPTAAEALTDPYFTGLANSEREPIAQPISKLEFEFERRKLAKDDVRELIYREILEYHPQMMQKYLRGGDQSNFLYPSGVDRFKRQFAHLEEGVAQGDKTSPQLRQHVSLPRERVVRNGDEPDPTADYCIKLHVGEQPGHSSVTDGLNKPLLSARNFLKSESIGASQCVVIKEKREKDEESMSEYMNEAADGVPHKIAQLKT

SEQ ID NO: 47447 - protein, 735 aa, Oryza sativa
MGRGGIGGAGLVAAVAKADVENTDSTRGFVKDVKRIIIKVGTAVVTGPIGRLAMGRLGALCEQVKQLNFEGYEVILVTSGAVGVGRQRLKYRKLVNSSFADLQNPQMDMDGKACAAVGQSVLMAIYDTLFSQLDVTSSQLLVTDRDFMDPSFGNQLRETVNSLLDLKVIPVFNENDAISTRRQPYEDSSGIFWDNDSLARLLAQELKADLLIMLSDVEGLYSGPPSDPQSKIIHTYVHEQHGKLISFGEKSRVGRGGMQAKVAAAFTASSKGIPVVIASGFAIDSIIKVMRGEKIGTLFHREANQWGCSKEATAREMAVAARDCSRHLQKLSSEERKKILLDIADALEANEDLITSENQADLDLAQDIGYDKSLVARMTIKPGKIKSLAGSIREIADMEDPISHTLKRTEVAKDLVFEKTYCPLGVLLIIFESRPDALVQIASLAIRSGNGLLLKGGKEAMRSNTILHKVITGAIPDVVGKKLIGLVKNKDEIADLLKLDDVIDLVIPRGSNKLVSQIKAATKIPVLGHADGICHVYIDKSADMDMAKRIVLDAKVDYPAACNAMETLLVHKDLNRTEGLDDLLVELEKEGVVIYGGPVAHDTLKLPKVDSFHHEYNSMACTLEFVDDVQSAIDHINRYGSAHTDCIITTDGKAAETFLQQVDSAAVFHNASTRFCDGARFGLGAEVGISTGRIHARGPVGVDGLLTTRCILRGSGQVVNGDKGVVYTHRELPLQ

SEQ ID NO: 47448 - protein, 360 aa, Oryza sativa
MEAVVVDAGSKLLKAGIALPDQSPSLVMPSKMKLEVEDGQMGDGAVVEEVVQPVVRGFVKDWDAMEDLLNYVLYSNIGWEIGDEGQILFTEPLFTPKALREQLAQLMFEKFNVSGFYDSEQAVLSLYAVGRISGCTVDIGHGKIDIAPVCEGAVQHIASKRFDIGGTDLTNLFAEELKKSNSSVNIDISDVERLKEQYACCAEDQMAFEAIGSSCRPERHTLPDGQVITIEKERYIVGEALFQPHILGLEDYGIVHQLVTSVSNVTPEYHRQLLENTMLCGGTASMTGFEDRFQREANLSASAIYPSLVKPPEYMPENLARYSAWLGGAILAKVVFPQNQHVTKGDYDETGPSIVHKKCF

SEQ ID NO: 47449 - protein, 300 aa, Oryza sativa
MNMCEKDQNFHWGYDLFRDPFAPIGYYGPPHGYGDGNYCDLHYARDASHLDETHLHSSALTYDLYNPSVGIYHPGNAGEHDHDTVYIEPTSSNSCPDTDDSFPMDEEVGKRFYPMVPVPHVPKINGEIPSVDEATMDHERLTERLRLYELVEHKVKGDGNCQFRALSDQLYQSPDHHEFVRQQIMSQLKSNRDAYDGYVPMAYDDYLEKVSQNGEWGDHVTLQAAADKYGVKIFVMTSFKDTCYIEIQPKVQKSNKVVLLSFWAEVHYNSIYPQNDAPRSQTTRKRRWWPFSHNHHHHHH

SEQ ID NO: 47450 - protein, 343 aa, Oryza sativa
MAEGVVGIIILKLGLALATDTSRVGRNWLCHEASALARIFSQIRDMKEELESMQSFLQGAERFKDTDNTTANFIKKIRCIAFEIEDVVDEFTSKMEVKQGGLASKIKQRICHIKTWHRLAFKFQDIKLKLENVDRRKVRYDMTGLVKNAEQSDANCRYTDHTSYFPTEEDLVGIDDNKKLLMNWLRCDSQLQSVITSVCGMGGVGKTTLVAHVYNNVKVDFDSAAWITVSKAYQVEELLRQIIKGFNSNDLKSELRVDIVDMEKRTLVEIIRDYLKRKRFLLVLDDVWGVDMWFKIREAFPANSIGRFVITSRVHDIALIATGNHKIELKPLEAHHSWELFCK

SEQ ID NO: 47451 - protein, 506 aa, Oryza sativa
MVMEGMGMAAAWAAGDLWVLAAAVVAGVVLVDAVVRRAHDWVRVAALGAERRSRLPPGEMGWPMVGSMWAFLRAFKSGNPDAFIASFIRRFGRTGVCRTFMFSSPTILAVTPEACKQVLMDDEGFVTGWPKATVTLIGPKSFVNMSYDDHRRIRKLTAAPINGFDALTTYLSFIDQTVVASLRRWSSPESGQVEFLTELRRMTFKIIVQIFMSGADDATMEALERSYTDLNYGMRAMAINLPGFAYYRALRARRKLVSVLQGVLDGRRAAAAKGFKRSGAMDMMDRLIEAEDERGRRLADDEIVDVLIMYLNAGHESSGHITMWATVFLQENPDIFARAKAEQEEIMRSIPATQNGLTLRDFKKMHFLSQVVDETLRCVNVSFVSFRQATRDIFVNGYLIPKGWKVQLWYRSVHMDDQVYPDPKMFNPSRWEGPPPKAGTFLPFGLGARLCPGNDLAKLEISVFLHHFLLGYKLKRANPKCRVRYLPHPRPVDNCLATITKVSDEH

SEQ ID NO: 47452 - protein, 467 aa, Oryza sativa
MDAAGYPKMQGGGASSSSSSSASCRAADAAVWDAVQQQKRQRCQGSSSNDQVGLSTENNSFQAPEPELQNSDCVEDEEEDYYLYDEDDVCYDDDGDYEFDETDFNQQLADKFDGLDLPPGVEATVPWLQKKDIADGPSTFKSMAELDADITKKYEFFKQFDVVENFSDHHYADKPVGKTGKDWTKRIQYDWKLLEKDLPASIYVRVSENRMDLLRAVIIGPQGTPYHDGLFFFDAQFTSTYPSTPPVVYYHSGGLRLNPNLYACGKVCLSLLGTWSGSGCEKWNSAHSTMLQVLVSIQALVLNENPYFNEPGYETYANSATGQKSAMDYNDTTFQYSCRTMLYSLRRSPQHFDALVAGHFRHRGHAILAACKYYMEGHKVGSVVPNEDEEDAKQQDDTDAGGSGSSSGAKPQPEKPDLCKGRAASFKTNMAVLFEELLMEFNVKGADTKKFCDEKLKKNQQAAAAAR

SEQ ID NO: 47453 - protein, 241 aa, Oryza sativa
MPYANSPRSGTNMMNTPSPQQHLTAQQHRQKLMQTSQQQQLHAQQQLRPSAAGMLAQSAIPQLQDLQGQSQQKLQVPGQQQMQYNQALSQQYQNRQMQAGRMQPGMSQSQLNQGNQLRSHISQFTGAANSAMFTAAQASSNSQMMANIPGSMQSQSLLPQMQGLNRYSLTGGHPQRSHPSQMLTDQMFGMGGANSTSMMGMQQQQQFNMQANAQNLQQGMTGLQNQTQNPNFPQQRQQNQQ

SEQ ID NO: 47454 - protein, 128 aa, Oryza sativa
MMMMVRLPAMFVICILAVPLLPALGSEPPSTPVPTVGVTAASDLVGSGGHSYLDVRTEEEFKKGHVENSLNVPFLFFTPQGKEKNTKFIEQVALHYDKEDNIIVGCLSGVRSELASADLIAAVRPLPP

SEQ ID NO: 47455 - protein, 142 aa, Oryza sativa
MYLRTLVLAGTFEIQLFNPEESMTMNGKNEIARSSDSSFCSSLLLLSLTCYATRPHLASARRSCSLWARRKCDGGSGAGYNSRQSHGGYSVGSENRRSRWRATRGGCGVLNARGGGRGVIGCRGQGGHDDMGEGGDVSIGLP

SEQ ID NO: 47456 - protein, 501 aa, Oryza sativa
MASSGEEGRVVVDLRSAAESAGGGGGDEEAHAAPLHEIESLCMRCGDNGTTRLLMTMIPHFREVVLMAFECPHCGERNNEVQFAGQLQPKGCCYRLEVPRGQNEILNRQVVKSDSATIKIPELDFEIPPEAQRGSLSTVEGIIMRAVDELQALQDERKKVDPQKAEAIDKFLAKLRSLGLGEAAFTFVLDDPAGNSFIENQNAPSSDPLLSVRFYERMREQQAALGFLVEPSTEEPGDQPVNHASTVEGNSEVLQEPHGSVGAVAGRRAIAQGNPDEVAAALCRYSAPEEVDTLPSTCGACGTECVTRFFATKIPYFREVIVMATTCDMCGYRNSELKPGGEIPAKGKKITLRVQNGKDLTRDVIKSDSAGVKVPELELELASGTLGGIVTTVEGLIVKICEALQRVHGFHLGDSTLEWKKKKWEDFNDRLSKLLSLQEPWTLIIDDGLAASFVAPATDSLEDDNQLTIEEYVRSWEQNEELGLNDMDTSSADAAYNTTNP

SEQ ID NO: 47457 - protein, 317 aa, Oryza sativa
MASAARALGALVHKASSLSSSAAALRSAAVLHGRGSAGGSARLFQRHAARRRISTFQPLCMGRRSCKIAGRKDAQNLKKMKRNSKIGKEIVAAIKKGGPSPSSNTTLAAILEKARELDIPKEILERNIKRASEKGQDTYTEKVYEVYGFGGVGMVVEVLTDKITRSIADIRNVVKDCGAKLADPGSVTFRFRQARVVNIKVTDADKDQLLTVALDAGADDVIEPNFDDDDDDDDDYDDDSSEDVSERFYKIVTTSENYPVVLSKLQEEGLKFETDNGYELLPLNPIEVDDEAMELNKVLVSKLLELDDVDAVYTDQR

SEQ ID NO: 47458 - protein, 360 aa, Oryza sativa
MSGRKNAGKASPFLLLLISVGCFFATYNFLTMVGHGRSRDAGPRKILGGVGGVGGGGSDPSKRFHVALTATDALYSQWQSRVMYYWYREMRDRPGSDMGGFTRILHSGKPDGLMDEIPTLVVDPLPEGADRGYIVLNRPWAFVQWLKKSNIKEDYVLMAEPDHIFVRPLPNLAHGDEPAAFPFFYIKPTENEIILRKFFPEENGPVSKIDPIGNSPVIIKKAQLEKIAPTWMNISLKMKEDVETDKAFGWVLEMYAYAVASALHGVHYSLRKDFMIQPPWDAKSDNTFIIHYTYGCDYTLKGELTYGKIGEWRFDKRSYLRSPPPRNLTLPPPGVPESVATLVKMVNEATANIPGWDEER

SEQ ID NO: 47459 - protein, 576 aa, Oryza sativa
MASHANAYGIAFSGGFGTYLFGMSETIAKQATEANNAQNVKNPHIGWMIGFLFLVSFIGLLALVPLRKIMIVDYKLTYPSGTATAYLINGFHTPEGAKLAKKQVKELGKLFLFSFVWGFFQWFYTAGDGCGFQSFPTLGLQAYKNRFYFDFSPTYVGVGMICPHIVNVSVLLGGILSWGIMWPLIRNKKGSWYAASLSETSLHGLQGYRVFISIALILGDGLYNFVKVLIRTTAGFVVMMKKNSTLPVSNNGSPMVATEAISFDDERRTELFLKDQIPKTVAFGGYVAVAAVSIGTLPQIFPQLKWYYILVAYVFAPVLAFCNAYGAGLTDWSLASTYGKLAIFIFGAWAGASNGGVLVGLAACGVMMSIVSTASDLMQDFKTGYLTLASPRSMFVSQVIGTAMGCVIAPCVFWLFYKAFADIGVSGTEYPAPYAIVYRNMAILGVDGFSSLPKHCLTLCYIFFAAAIAINLARDLAPSKVARFIPLPMAMAIPFYIGSYFAIDMFIGTVILFVWEMVNKAKAEAFAPAVASGLICGDGIWTLPQSILALAKVKPPICMKFLSRSVNAQVDGFLGN

SEQ ID NO: 47460 - protein, 332 aa, Oryza sativa
MGDHKAVFISLQELFPQVDPRILKAVAIEHHNNVDSAVVAILDEVMPSVTSTSPPTVSSVRQEIAPCCIATSSASDGTSETGDSSSAGHGKQVEVDENVHSTQCKSSMEITNDRQRNVVDEVKSHSSYPWMNEQLHLPIRNVPEPVDISYVGHDGHLLSEYLDAILNGESGNSSTQPNVAYVHKQDSDNPIPADGCVTKDNSITLPLDYVDINDVNYSLKSSAGVSNSEDSFGTCGTYQFAHVLNIPIPDARKSSKGLGGEQDTNSIGKADLLPDLNLNHLATIASTHSVSIESLDDSISDAKSNKVLQLLTCQRQLFSVTLHMLFAVHLHL

SEQ ID NO: 47461 - protein, 343 aa, Oryza sativa
MAMELSNLTRCHLPLLLLFLLAGSSSMALPVHPAMDRVRWQVDKVNRRGHSIGLVMSYIDEATALESSGCFRPWHVLPFVDLYGRRYHIGSIRGVNVIYALTGQRRLNAAVTVQTLIDVFTVSGIVHYGTAGSSNDSMSFGDVSVPKFVAYTSAWTWKKFKSPKESDTELSFGDFTVPNGGENLLGALKFRNEELYSVGKPMKEVFWLPVDSAWFKIAEGLKVSLERCNDTFCLPTTPKVVCGLKGSSADMFLDNAEYRKFLFREFGVSTVDEESAAVVMTTTSPGIPVIVFRGVSDLAGGEPTWSSTSLMNLASINALKVAVEFIATVGKQKSTMSAGSANN

SEQ ID NO: 47462 - protein, 75 aa, Oryza sativa
MNVCKFHIVWESRSQVSANHRTMPTAVRLLLFSILSLGKSISIIPIMFLIMPRTSIACSSLFLNPFSMFICVFFP

SEQ ID NO: 47463 - protein, 61 aa, Oryza sativa
MLVYSWISTEACAFLQMLSGIEMHCGWGEFSCHFNQQTWPCAPASGCRGWALYIAHYLKKF

SEQ ID NO: 47464 - protein, 927 aa, Oryza sativa
MSSAPPPQQSKPSYNHRRHNNAAPRHHHGQQQQQPQPQPQPQQRYVPKPAAPKPSPPPTLTTALRSSASPSASGAGRVGGEADGFVAYLPHDEVVAAGLGGPDAQESQAVVDLLNDALAALLRAKPREFWRQVAQNTSLHEFLDSYLQFRHRWYDLPHRAPKGTVAGLVVGELELCRRVFMVLYRISSNKDPGAFRGESLSMKEHAALLQEKRLLDLPKLLDICAIYGHDNCKLTSSLVENAINVQPNILDGINIVLPQFLGIFHTMQERCMKSLQALTSSGPNDSGYTQLQKDFSEVLDFVNDAIVTLDAFVDAYQPAALLFCTSFETSYGVEELLNTLPRLYDSLLPSLLHGFQVMSSSQSNGETASDIILSDIVLGIRMLSRRTVSFGWRLLEFCYLNNQLVERDVEACTKMFPAKVEDPMIRGDIIIQTLKDINREATFSQDHPGKTFLQALEKEFKLMNRIGDIRKKGWIHMDDEQFQFIARLCGSTLTSWNSVPDLPVSSYGGELQHKNEDTAITESKITQIRDLFPDYGKGFLAACLEAYNQNPEEVIQRILDGTLHQDLLALDTSLEEMPQLKPAATVGKDKGKGILVETEPQIMNKPHKVNTEMHRYVEHSSSSSVPSASQGPSSSVPSVPQGRFTRKTNDDVPDSATLDSQKAKDAVRSAVLESQYEYDDEYDDSFDDLGFSVVESSYEETDGANDAESSSQGPRWSSQKKTQFYVKDGKNYSYKVAGSVAVSSAREAAVLRNVQKDTIHGLGRGGNVPLGVPNRQQHRDMEEEEGSNANNFGRGGSNIGRGGSYPRGDHGRRGGRDHGDPPPEGENPNGPPGFGRGGRRGGRNHGNQPEANENPNGQRGFGRGATRGGRNHDHPAEDHEDPDAAQGFARGGPAPRGGRGGRRGGGRDNHHRRDRAMKKHMQGLTGL

SEQ ID NO: 47465 - protein, 197 aa, Oryza sativa
MSASRFIKCVTVGDGAVGKTCMLISYTSNTFPTDYVPTVFDNFSANVVVDGNTVNLGLWDTAGQEDYNRLRPLSYRGADVFLLAFSLISKASYENVSKKWIPELKHYAPGVPIILVGTKLDLRDDKQFFVDHPGAVPITTAQGEELRKQIGAPYYIECSSKTQLNVKGVFDAAIKVVLQPPKAKKKKKAQRGACSIL

SEQ ID NO: 47466 - protein, 836 aa, Oryza sativa
MASVAAQLVGAALTLLLLSVAAAPARANEVPRLFLQEIASDYDDGIGGTAGDKGAKTIAGSPIVAGVMNDRLKALTSSFAKAIGDKLDYCIKDTDKEWNAAFNFSKDTTFLTNCMKQTNGDLQQRVCTAAEMKFYFNSLIDAGEKSGEINYVRPNKNCNLSSWMDGCEPGWACTVGKEQKINLQDAKDIPYRALDCQACCPGFFCPHGLTCMIPCPLGAYCPLSSLNKTTGICDPYNYQPPAGNPNHSCGGADNWADVVSTDDIFCPPGFYCPSTTQKLPCSSGFYCRKGSTSQTRCYKKSSCPPNSATQDITIFGALLVVASCLVLLIIYNFSGQILTNREKKQAKSREAAARYARETAQARERWKSAKDVAKKAGTGLQSQLSRTFSRKKAAQTPKGGGGGGSSLPPSGEDGGGRKKNLTDMMQSLEDNPDNDEGFNLEIGDKGLRKNMPKGKQMHSRSQIFKYAYGQIEKEKAMQQENHNLTFSGVISMAKEHDVSTRPVIEIAFKDLTLTLKGSKKKLLRSVTGKLRPGRVAAVMGPSGAGKTTFLSAIAGKATGCETSGMVLINGKVEPIRAYKRIIGFVPQDDIVHGNLTVQENLWFNARCRLSADMSKADKVLVVERVIESLGLQAVRDSLVGTVEQRGISGGQRKRVNVGLEMVMEPSVLILDEPTSGLDSASSLLLLRALRREALEGVNISMVVHQPSYTLYRMFDDLILLAKGGMTVYHGPVKKVEEYFTGLGITVPERVNPPDYYIDILEGIVKPTMSAGVSVKDLPLRWMLHNGYDVPRDMLQSSSDSESSFRGSTSPALRRCLRRGRGMGQRQGHRRPEEGRV

SEQ ID NO: 47467 - protein, 239 aa, Oryza sativa; identical to SEQ ID NO: 46342

SEQ ID NO: 47468 - protein, 492 aa, Oryza sativa
MDPYKHRPSSGSNSTFWTTNSGAPVWNNNSALTVGERGPILLEDYHLIEKLAQFDRERIPERVVHARGASAKGFFEVTHDISHLTCADFLRAPGVQTPVIVRFSTVVHERGSPETLRDPRGFAVKFYTREGNFDLVGNNMPVFFIRDGMKFPDMVHAFKPSPKTNMQENWRIVDFFSHHPESLHMFSFLFDDVGIPLNYRHMEGFGVNTYTLINKDGKPHLVKFHWKPTCGVKCLLDDEAVTVGGTCHSHATKDLTDSIAAGNYPEWKLYIQTIDPDHEDRFDFDPLDVTKTWPEDIIPLQPVGRMVLNKNIDNFFAENEQLAFCPAIIVPGIHYSDDKLLQTRIFSYADTQRHRLGPNYLMLPVNAPKCAYHNNHHDGSMNFMHRDEEVNYFPSRFDAARHAEKVPIPPRVLTGCREKCVIDKENNFQQAGERYRSFDPARQDRFLQRWVDALSDPRITHELRGIWISYWSQCDASLGQKLASRLNLKPNM

SEQ ID NO: 47469 - protein, 714 aa, Oryza sativa
MATATQAPTSPAAASGRGSVLPLLRGRPSTRVRLAVGRRPQTALRAQPPGAAEVVEQSVNTIRFLAVDSVEKAKSGHPGLPMGCAPLGHVLFDEFLRFNPKNPYWFDRDRFILSAGHGCMLQYALLHLAGYDSVTMDDLKAFRQWGSRTPGHPENFETPGVEVTTGPLGQGFANAVGLALAEKHLAARFNKPDLKIVDHHTYVILGDGCQMEGVSNEASSLAGHWGLGKLIAFYDDNHISIDGSTGIAFTEDALARYEALGWHTIWVKNGNTGYDDIRAAIKEAKAVKDKPTLIKVTTTIGYGSPNKANTYSVHGSALGTKEVEATKNNLSWHHEPFHVPDEVKRHWSHHIDEGASLEAEWNKKIVEYEKKYRQEAAELKSIISGELPSGWDNSLPKYTPENPADATRNLSQQCLNALAKAIPGFLGGSADLATSNMTLLKMFGDFQKDTPEERNIRFGVREHAMGAISNGIALHSPGLIPYCATFFVFTDYMRAAIRLSALCGSRVIFVMTHDSIGLGEDGPTHQPVEQLFSLRAMPNILMLRPADGNETSGAYKIAVLNRQRPSVLALSRQKLQQLKGTSAEGVAKGGYIISDNSSGNKPDIILIGTGSELEIVEKAADELRKDGKTVRVVSLVCWELFEEQSEKYKESVFPSEVTSRISVEAGVTFGWEKYIGEKGKAIGVDRFGSSAPAGKIYKELGLTVENVIATAKSL

SEQ ID NO: 47470 - protein, 106 aa, Oryza sativa
MRATVSTVESGSSAARMRSQSGDSCGQQTFLSSKGRDYYSTVVIHQVAKLMLSNCSFCILKPDENATHLLHSSCIHKGLEHGVTKFGSLGHNCETYCKARMHRLLL

SEQ ID NO: 47471 - protein, 258 aa, Oryza sativa
MSKAEAAAAGDAAKPDPEMGVAGEKEVVAEKAPARRKVAAEEEDPRLRWAFVRKVYCILALQFAVTAAIAVVAWAVRPIPRFFAAGSLASWLVYLAILLCPFIVLWPMLKYREKHPVNLLLLGLFTLCESLTIAVCSSTFLGKVVLQAAILTAVAVIGLTIFTFWAAHRGHDFTFMYPFLAASLLVLLAYLIIQICFPLGRAGMTIYGCLATVLFSAFIVFDTNQLIKRHTYNEYVIAAISLYLDVINLFMAQLSFSI

SEQ ID NO: 47472 - protein, 44 aa, Oryza sativa
MNVELLYPFVIKHYNSDGWSVMLVIKQNAFTLIWSLQTELPVNL

SEQ ID NO: 47473 - protein, 228 aa, Oryza sativa
MAAAAAAKIAPSMLSSDFANLAAEADRMVRLGADWLHMDIMDGHFVPNLTIGAPVIQSLRKHTKAYLDCHLMVTNPSDYVEPLAKAGASGFTFHIEVSRDNWQELIQSIKAKGMRPGVSLRPGTPVEEVFPLVEAENPVELVLVMTVEPGFGGQKFMPEMMEKVRALRKKYPSLDIEVDGGLGPSTIDVAASAGANCIVAGSSIFGAAEPGEVISALRKSVEGSQNKS

SEQ ID NO: 47474 - protein, 102 aa, Oryza sativa
MVQRRQQREAASAAMAAPSPPPDLVGGEAAAASGASPPLDLAGGETVGSRGPCGELSMGGEAVGSRTQRRASPRQRQRDLHNSSGRLPTAAVLLSNFCDCFV

SEQ ID NO: 47475 - protein, 252 aa, Oryza sativa
MGAEAVRVLVVDDSPVDRRVVELLLRAHCGGGGGAAAGEAAPFHVTAVDSGKKAMELLGRRRGDRDHLTPSSPAAAAAANDQAIDIVLTDYCMPEMTGYDLLKAIKALGSPNPIPVVVMSSENEPQRISRCLTAGAEDFILKPLKMNDVQRLRKCSGATRPRSAVAGDDDRCCNTAKKAAAAAAATPEQQQQQQRSSHLAGLAMVMNASSFEVSHYFQLIFKLILLAYAVLCLSQLLHRWSNGSSLLSLWCA

SEQ ID NO: 47476 - protein, 192 aa, Oryza sativa
MAATTTGRVVALGAVAVVVALTFLAGGADADCYDFCFKDCMARENNMVDYCSYACDKTCQPDKPTLYSSSSSSRLAGDMECQLSCALGSCHRLLPDGKGAVEACFGQCYDGCKTTAAARLPRPLRAGHYVLSSPPDDVDHDPDHRYVFSSPHDDVDHDPDQVFASPPDDIDRHVFAAPPDVLAALPGEPDHA

SEQ ID NO: 47477 - protein, 441 aa, Oryza sativa
MYKSRLQELCQQRRWAPPEYTHRCAGPAHAPLFGATVSVNGVEFRTPEDAARSAKEAHNIAAKAAFDHLSSLPLPPPPPPSENQSSYKSQLQIYAQKKGKLLPSYQTIREGPGHASRFKSVVTVDGKAFESPEYFHTVKEAESAAAKLALMSLPQEASSSERVPVQPLSYKNLLQELAQKHGFSLPVYSTTSDGSVQVPMFKSTVVFQDGSFQGEPANTKKQAEMNAARVAFQHFEDRRKNALSSTVLRGPHLGQGTVHISAGQVKIAEPVFSVPLASTATSHSATGATDRDYHSLGSTNPLPIAKSTNCADVHIQPCEFKDEKPAFPEPKTVLEVMDSSPELTPLEDAYSAPVASTSTVSSSGCGSDPLASASTVNSTGCGSVPLASASTVSSTGCGCSLLTNRVQVYPRRPDLVLPEGATVLPFSDDVWVAVSLPTLNH
